United States Patent Application Publication US 2014/0325702 A1 - sequence listing, part 34

SEQ ID NO: 63179 - DNA, 2482 bp, Heterodera glycines
atgagtgaacttgccaataaggagaaaaagagccttactgccgcagtcagcgcctccagcattggtggttattccactctgctcgtttttgttgtgcttggcctcgcttggtttgttgggttcgcttctcgtctgtttgccattgtccgtttcgagtcgatcatccacgaatttgacccatggtttcttcttttcgttattgaatgttcaccaatttaattattcatttgttaggttcaattaccgtgcaactcattacatggttgagaatggattctataattttcttaattggtttgatggtaaatgttacaataattcatttccgtaaattactcctttacttatgctgttttcagaacgcgcttggtaccctcttggtcgcattgtcggcggcaccgtttacccgggtttgatgctgaccagtggtttcatccactaccttctttcttgcctccatattccggtgcatattcgagacatttgcgtttttctggcaccgactttcaggtcttctaatatttgttttaatgcttaaatggtttttgcttttcagtggtctgactgcaattgccacttatttgctgaccaaagaactttggtccactggggccggacttttcgctgcgtgttttatcgcgatttctcctggttacaccaggttggctgactcgacaaaattttgccgccttcaggaatccattctcttttcagtcgttcggttgccggatcgtatgacaatgagggaattgccattttcgctcttcagttcacttactttctttgggttcgatcggtcaaaacgggttctgttttctgggcagcactcactgcgctttcctacttttacatggtctcagcttggggcggttacggtatgactttaacaatctttttgagaataaattagtccatagtttagttttcatcatcaatttgatcccgcttcatgtgtttgctctcatcatcagtggcaatttctccaacaaaatttacatcgcttataccactttttacactttgggtcagcttatggccatgcaggtgttccctttttcgtcctttttgtcttttattgctttttaggtcccttttgttggtttccaacccgttaagaccagcgaacacatggcagcagcgggaatttttggacttttacaggtcaaaatgctataacgaaacgcatcactcagtgcatttggtacgctttcgttcgttgtttcagctcatcggggccctccgctttctgcaaggtcgtctttctcgcaagcagttcatcactctgtttgtcaccaccattctggccactttttgtgccggcattgccctgctgatgttgctcacttacacgggtccaatttatggattttattagtcatataagagtgaccatcatttaagaattcttttcatcattgttataattcctttaaggttatattgcgccttggaccggccgattctattccctgtgggacaccggatatgcgaaggtgcacattccaatcattgccagtgttagcgaacatcagccaacgtgagaagaatttaaacaactgtgagaataagtctaacaaaatgcttttcctttctttaagcacttgggtctcctttttcttcgatttgcacatcaccgcggctgttttccctgcgggactttggttttgcgtcaaaaatgtgaacaacgaacgaatctttggtgccactttttcaatatttgcccattgtgctatttgtccatttcagtgattctttacgcggtcaccgccgtttactttgccggggtgatggttcggctgatgctcacacttacccccgttgtctgcattctcgctggcattgcgttctcaaacatttttgagaaatatatgttggacgatggagacgcaagaagaggaggcgaatggcgagaaccgaaggatgtcaaagaaggaggtgagacgaggagcaaaacatttaggaatgcctttctgagatggctttttaatctttttctaattcctcgcccaatttagaccgccgtctctatgacaaagcgacaacaaaaggcgggaagccgccaaaggtcccccaggcgacgaccgcctctttcagtccaagcgcacaacaagaaactgtggaccacattgggatgaacacacggtacaggacatggtcctctgttccttttcggatgccttctctctcagttccatcgttttggtggcgttgcttttcatccttttgatgtacgtcgctcactgcacttatgtgaccagcaatgcctattcccatccgtcggttgtgcttcagtcgcacaccaacgatgggtaagtatttgaattggattgtcaaactattcacaaattgtagaggacgcatcatcatggacgactttcgagaagcttattactggttgcgcaagaacacgccggaggatgcgcgagtgatgtcatggtgggactacggctaccaaatcgcagggatggccaaccgaacgtaa

SEQ ID NO: 63180 - DNA, 633 bp, Heterodera glycines
taaattggtgaacattcaataacgaaaagaagaaaccatgggtcaaattcgtggatgatcgactcgaaacggacaatggcaaacagacgagaagcgaacccaacaaaccaagcgaggccaagcacaacaaaaacgagcagagtggaataaccaccaatgctggaggcgctgactgcggcagtaaggctctttttctccttattggcaagttcactcattattgccgctaaataaaaggattattatacaagccaattttagacaatgctttggtttcaatgaaaaataaatatgagaaaactaacaacagggatattgagaaaagaaaaagaaaatacaagacaagagaaaatgtagaaaaaaacgagaacgagacgcgctaaaagtcaagaaaagagacgagaattctcttttaacgaacacctaattattaattaatcagaaatttttggttcgtatttttacggaacataatcgggccgggcggaatttgtatttcaaactgccggaataaaacggggcgggaataaaattgtttgccttcaatttagaaaacaaaaatcatctcaaaatttaaccaatcaaccttttttttaaaactatcaaaaattctaaatttaaaattttctaaaa

SEQ ID NO: 63181 - DNA, 675 bp, Heterodera glycines
tgctaaaatggcaaaaattacgcaaataaaaaatggcgaagagcgacggattgaaagcattactcggagaaaaaatgagcttgatgagaggagacggcttatcaataaatcattgacgggagaattgaagataaacaaacaaacaagatttgctgattccgatgaagaggaatcaacacaaaatagcaaagtaatctctgttaaatcaaatcgtttaataaaagggatttgtttagccatttagttttcttgcttcaatcggacgcatttatcccgaacaaaatgagaagagcaaaaatacaaatgttgtggatgattcaccagagcaattccttaaaaaaacgagacttaccaacgaaacagaaaaaagtgcacccaaactcaaaaatgtatgttttatttcaaatataataaatgctctctaattagcagatttcgttgtataaaccacccaacggcgatggtgacatgtggcaatgtttctttgtcaatgaacacacacccgaaatccgttcatccttttcttcatttcgtcggcaccaaaaagaagagacattgcgtaaggaatgggacaaaaagagagcgccaattgttaaggttctatttcctgctgtttttactcactttttagaccatttttagttttacaaaaaagaacggaagtcagcacttaga

SEQ ID NO: 63182 - DNA, 379 bp, Heterodera glycines
atggggcctcaggcgaaatatgcgggacaaacgaacgaatacaaagaagactggggaaaacagttctcgaagacaaacggacgaagttaagaagagtaacaaagcgagagagaacgtaaaaaacaattccaggatattatggcccattaaaagccatcgacagagaaaacgaacagacaaatggaagggaagacacgggtaaaatgggacaaacggaaagagcataaaaagcatggaatggaaggcaaaaaatgcttaaaacaattgcagacattaatccaccgccggaagggacgcgcattaaaatggacggacgaaacgatggaaaagcgaatgaaagggaaaggcaatggcacagaaaagacggcacaatcagtcc

SEQ ID NO: 63183 - DNA, 702 bp, Heterodera glycines
atggaaatttcaagcagctggagttttctgaaaatgacacttcaattagtgctttatctaatttatataaaggtacttccggatgccccaaaaattttcgggaatcggaatcctgaggaccaataatttttaaaatcggaattccgacaacaccaaaaatgtcgtaaatttttcgaaaaaactacatattttgataggctaaagttaaaatttataaccaaaaaataaaaggaaacgcgatcaaaaaaaattttgggaacaagggaagtccggcggtgccgttagttgccttcctggaaaaatttcgaaaatttgagtggctatattacttattttacacaaaagaaaccattctgaattggcaaaaaaaaaacaagaaaatttctacggttttttttttaaatttcagaaatcagtattctgtcacccaagatttttcgaaactcggaatttcggccccaaagatgtcgaagttgaattccatgacttacttgtccagagcacattcatgggcttccaaaagaattttaaggcactcaaccgatgaacccgcggccatttgaaatgcatcaaacgagttaacgtcacgtttgaagggattggctccaacgtccaaaaggaatctgaatcgattagagatttgagttccagtggtgaaaacgccaatagtttggtcaaaaatgcaaaaaattaagaaataaa

SEQ ID NO: 63184 - DNA, 208 bp, Heterodera glycines
atggccactttcaatgtggcccatctcatcactttaattggcgttggggtacaaaaatataaattaaatttattcctttttttctaatatttatttttgttttagtcaattgcttcagtgaaaactgtggaaattccattgatggaaattgaggccagtatccttggtatcaaagcaaagatttaaatctaaatttatgataattaaa

SEQ ID NO: 63185 - DNA, 525 bp, Heterodera glycines
gtgaaaagaaaaaattggagcaaaaaacatttgaagaaatatttggagaaaaatgggaagaaaaagaaaagtgaacagcaaaagagagaaattgttgaaaaattcatcaaaattaaagcgaaaatcaagcaaaaaggaagaaaatattcaacaaaagaatggaatacaattgaacagaaaatagcgaaaaaattggggacaaatcgaaagaaaatttacaaatggatcaaagaattgggattatacaaataccaatgcaaattgaaaacggatgcacaaaaaattgaaattgttcaaaaatttatggcaatgaaaaatgagtacaaacaaaaagggagaaaatattcgacaaaagaatgggacaaaaattatgcagaaattgtgaagaaaattggagtaaattatggaacaattcaaaaatggaagaaacaatttggaatgggcgaaagaatgtcggagaaagaaaaaatggcaaaagtgaacatttatttgctaaatgaaaggacaaaacccaaaaataagtga

SEQ ID NO: 63186 - DNA, 730 bp, Heterodera glycines
taattaaatccattccttcgggggaccgtgccgggtgccgcggggtaagcagtgctggttcgtttcatcacggcaccgaaccttttggctagtcagcaatcgttgcttaacttgccagatcggacgggtgcgcatgattccactgttccaagcaccccaccaaaagcaaaacgatataaccaaaatataaggaaaaattttttaaaaaattttttctccatcttcctttttgatactaaagcatcagagtgctaaaattaagttgtaaataaaatttggtgcgctttagagcactttctgaaaaaaatatttatgaaacaaaaaaatcgattttttcaagtgtccgtttggggtactcaaacatttatggggagcaaaaatccaacgcagaattaaagtacaggctataggaaagctactcccgaaggattcggtctccccataaatctgggcgcatcggttcggggggactgccccgaaaacaaaaaaatcgattttttcaagtgtccgtttggggtactcaaacaattatggggagcaaaaatccaacgcagaattaaagtacaggctatagggaagctactcccgaaggattcggtctccccataaatctgggcgcatcggttcggggggactgccccgaaaacaaaaaaatcgattttttcaagtgtccgtttggggtactcaaaaaattatggggagcaaaaatccaacgcagaattaaagtaca

SEQ ID NO: 63187 - DNA, 2278 bp, Heterodera glycines
cgcaaaaattgccgcttgtgccattattgttgtgatcggtttctcttttgggtcactcaaggttggcatccattttcgccaaatttcaactttgcaaattcaattttttctaattaatctgcattcttttttaattatttgtccatctcgcgaattgctcatttgtcaggtgcccattccaacaacttcgcccaaccctttgccaacagcaatttcgagccgggcaaagtcgtgttggcattgttcagcggactgttcagctacggaggatgggacattctgaacaccggcattgaggacattgcacatccgcacaggtgaaaaatgcagtttaaaagatcaaacaattaaattattaatttctaaaaaattatcatcaatttaatttattctaatcagaacttctttttttttgctccttttcctaaactaatcataattagtgtaattaaacattgatttttaatatggcatttgagaaacaatacatttggacatttatgagcaaaactggttttaatgaaaaataattttagtaacaataatggagtatatcgcatggcgtcgttggtgcagtggtagcattgctgccttccaagcagtaggggcgggttcgattcccgcacgacgcagaaatttattttttatttttttttgactaattgtttaggacaatgccattcgccattatcgccggcatggccatagtaattctgctgtacatgacaatgaatgtgtcctattttgcggttctcactgtgacggaaatgagaacatcaaatgccattgccatggtcagaggagagaaaaaatcaaaaaattgtggaattttttagtaaaaaaaaacaaccaaaaatcaatgaaaattttaaccaaatcgaatttaaaactgcttatttttctagtgagaacaaaataatacatatttcaaataataaaaattataatatttaaaatgggtaaataaatataagcaaaacaaattcacggatgaatattttttcaaatttaattttacccaaaatgtcgacttctaaaattaagctgatctcgtggatattgcgctaaatctgccccaatttaggggccatgttcggatttagacattctctgagcgtgtcttccacggctatcttcagtatttgatgccttttttggtgtgcattgtgctgattgggttcggcatcttttttatttgattaatttgttttttaattgtttttagttcgctaaatgccactttattcgggggcagccgaatgttatgggccattgcgcgggatgggtatttcccctcattcatttcgtgtattaaccggcaacacggcagtccacgggcggcacttttcattttcgtatgcattaattaattaattattattttttgttaaaattattcatttttcagtccaagaaaatatgcctgttaaaattatttgaatgttttaggtcgttctcgctatgcttttcacgtttcttggtgatttggatgttcgtctttctctctctttcattttattttaaatttaattttaatttctcaatttttaggaactgattggatacgttgagtttacgaattgggcaagttttttatttcaaaatttatgagaaattcaattattcaaaatctttgatccctccaaataaaaatttttattattagcattgcttaatgatcattggtgtttaattgattcccaattaattatctccaatttgcaggtggtccgttgctgcacaatggtggccctcttctgcatccgttttggccatcgtgccgatcgcattcaccccgaggcgctccgagtgccattggtgttaccaattgtctatttttttgtgtgtctttcgcttgtcgtggttactgtcgtcagaaatttcaagtcggcttttgaccttactatatttcctaatcttaggaaatacggtaattggggggggcattttttggtaattttcttcacaggtcggcaatgattggactttcgttccaggcctttggcctcttcgtttatttggttttcatttggccgccagcgataagccgcttctccaactaccgtaatgtggcacatcagatcaacagtatgcaaagggagactttgaaaattgaatttctgttgaaaaaggcaaaatgtccgccgtcgctcaaattgtttttgacggtgccatcgaagtgaaagatcggcgacaaaatgaggacggactgttcagtctgatgactgatggggacaacgactatttggcgtcaactcacaaagaaaacagcatcagc

SEQ ID NO: 63188 - DNA, 1095 bp, Heterodera glycines
gtataaaaggcgcgcgaagagatggcaaagcatcacaaagcatttattcgcttctcctctcaaaaggacactcaacggttagtcaactccactttttcctccagtttaagtttaatttagcaacatcttctctaaactctctgaacaacaatgatcgccacaactcggtgtgtagtgcttcttttggtcggcgccaccatggcggacgccttcctctcggcatttgagtaagttgcacaacccaagcaattaatgccaatatataaagcatggtctgatcagaatggcctgatcaggtgataatatgggtatttagcaacatttcatttagtgttgcacccggcgcactgcgcgaccgacgccaatgcggttgcggatgcggcggaggcgggggcggcggaggttgcggcggaggatgctccagcggtggcggcgggggcggggccgtccaattagcggtcagctgcggtgctgcacaacaggcggcaccagcctcttccggatgcggatgcagcagcggttgtggcggaggatgcgggggcggatgcagcagcagctgtggcggaggatgcggaggcggtggcggtggcggtggaggcggttccgttcagctcacgatcagctgcggtgctgcacaacaggcagcaccagcctcttccggctgcggcggaggatgcggtggcggttgcggcggagggtgcggtggcggatgcggcggtggttgcggaggcggctgcggtggaggcggaggatgcggcggtggtggcagcagcggtggcggatcagtccaactcgcggtcagttgcggcgctgcacaacaggcggcctcttccggctgtggaggcggtggcggtggcggatgcggttgtggatgtggacgtcgaaagcgcatggccatgcgtcgtcgctgtgttcgcgcgctcggacgcttttgaattggaaaagaataacaaaaaatgcctagattttaacgctttttaattgaatgctttcgccgaaatccatttctagctaattagccctaattaatgttagttattataataatgcgtagacgcaattatttattgcctctaattttcataaatttggtga

SEQ ID NO: 63189 - DNA, 79 bp, Heterodera glycines
gttgaacaatttgagcctttattctcgcaaaaaatgaaactatttttcggggagtgacgacggcaaaagtgcagtccta

SEQ ID NO: 63190 - DNA, 47 bp, Heterodera glycines
acatggttaagacctcaaaatcactgtgtgattggagattctgaggg

SEQ ID NO: 63191 - DNA, 830 bp, Heterodera glycines
taattaaatccattccttcgggggaccgtgccgggtgccgcggggtaagcagtgctggttcgtttcatcacggcaccgaaccttttggctagtcagcaatcgttgcttaacttgccagatcggacgggtgcgcatgattccactgttccaagcaccccaccaaaagcaaaacgatataaccaaaatataaggaaaaattttttaaaaaattttttctccatcttcctttttgatactaaagcatcagagtgctaaaattaagttgtaaataaaatttggtgcgctttagagcactttctgaaaaaaatatttatgaaacaaaaaaatcgattttttcaagtgtccgtttggggtactcaaacatttatggggagcaaaaatccaacgcagaattaaagtacaggctatagggaagctactcccgaaggattcggtctccccataaatctgggcgcatcggttcggggggactgccccgaaaacaaaaaaatcgattttttcaagtgtccgtttggggtactcaaacaattatggggagcaaaaatccaacgcagaattaaagtacaggctatagggaagctattccggaaggattcggtctccccataaatctgggcgcatcggttcggggggactgccccgaaaacaaaaaaatcgattttttcaagtgtccgtttggggtactcaaacaattatggggagcaaaaatccaacgcagaattaaagtacaggctatagggaagctattccggaaggattcggtctccccataaatctgggcgcatcggctcgggggactgccccgaaaacaaaaaaatcgattttttcaa

SEQ ID NO: 63192 - DNA, 138 bp, Heterodera glycines
cttttcacattgcccggagttgttgaacgcttctttccccgtcctgaagaagctcacatggtcaaagccgtcagagaagtgctcacaaaaagttggagcatcggagaaggggacgaagaagcggaggaaataataaaa

SEQ ID NO: 63193 - DNA, 60 bp, Heterodera glycines; identical to SEQ ID NO: 52045

SEQ ID NO: 63194 - DNA, 413 bp, Heterodera glycines
atggacttggggacaattgtaagtgttggtgttattgtagcacattcgcatagtcaattaattaaacactattaaaatttgctgtctctgcttgtattgttgtgctgtttttcaggaacaaaacatcaaagaccaccgctacacaacgattgccgccttcagaagagacattgatcaggtgaaaagggctaatcaaaaaaaggaaggaggaatgatccatttctccgatcttcatcagattctgatcaacagtcgcatcttcaacggtccccagtccgcctactcattgaaagccgaagaaattgtggagctgaccaaccaactgctgaacaactcgcaaaggcatttggccgagttggagacgaacattcaaaaggcattgacagtgagcacaaatgaggaggagaaaattg

SEQ ID NO: 63195 - DNA, 150 bp, Heterodera glycines
atgaaaattgtggcaattggctgtgctccgaccagcatcggatttgcttatcgccttcagcagctgaaagccgacggaattgaagaggcggcggacattgaacttttggtgttggagcaaaatccgacgcccggaggcctttcatgcaca

SEQ ID NO: 63196 - DNA, 1125 bp, Heterodera glycines
atgggggacggattttcttcatcgaaaatggggcaaaacgcctggccgtttgttcgcctaaaaatgataatttttgagaaattgttttttcaccctttcggattttcatttcttggattgccattggtgtggacggactcattattcgttccttgcatatgatggtggtttaggctgaagccaagggagttccgcgtgtgcgcaatcaggggacagcccgcgcgttacattgacccggtgacgcggctgccgtacgcggacatggacgcgttccgtgtactgcgcgagaagtaccaccaattcttggagacggaccatgaccatcttcaacagagacagcaacaacagcggaagaagtcggcggcaaatgattaaattggtcgttatttgattttttaaaaaagaaaatgccatctttttttattcgttcgtcgtcgtccgtccattcatgtttgaacaattgcataaaacattcaatctgacaaggccgtagccagacccttggttttggagggcttatgaactttaatcaaatcaatgaaaagaatgtcaaaattcgtagaaatggacggaaaattgagatgagaaaaggaaaatatccagcaatacaatttatgtacaaagcttttgaatgggaaaagcgaaatgaaaagcaaatataaaaaaacagcgaaaaaatacatgcggaatatgttatgaattttccacttctacttctttcacacagaaatcaattgccaatgtcattttgtcctcacttttgtcgtaaaatcctttgctcgggtccatcatattcttaatttttccatattttggcataaagactgctaccacctaccgaaaaatttctgaagccaattcccaatttgtgcttttcattgtttaaaaatttcctattcatttcgtgcttccaatcttctttacagaatagtcgagaaacaattcgaaaagttgccgaacatttgcagctccaattaacttaatgtacagcgatggaaaaagtattgactcaagacgataaatttgttaaattaaaattcctctaggaatttttatttttattttccaaattcaagccatttgtgactttccaggtcaccatgaaggattgatcatgtcaataaa

SEQ ID NO: 63197 - DNA, 735 bp, Heterodera glycines
atgagagcaggagcagaactccaattaggaaagccgcacaatcatgccccttctccaacacgatgtgaagccgctcagatcaacagaagcgtgcgcaacacagcattgtcatcacgtggaaatatgccacgcacagttgtgaatggagagccgtgccgactttaccccgctccatttggcatccgaggagggccatttgcagatggccgcactgttgacggagaacggatcagaggtgattaaggattgtgattagattgggaggcattctttttgtgtattttgtaatgcttttgagagtctctgtctcgagtctcggctcgagaaaagtctcggatttttcttttgtctcgggctcgagtctcaggaaattatcggtcacgaatagcactagtatttggcaacttaatgaatgccatttgcaacaatttcagttcgtcatttattttatttttttgtcagaaaaattttaatttaaattttaatttaaattttgtttttttgggttttttatttttataaaattacatcaatttttattctcatatttttaaattcatttcaatcattcagttcaatttcatccgtaatttccaaatatttcatttataaattatttttacgaaattttttttaattgacatttggtggaagaggttcaaaaaaataatgccaaactactagagaccggcatcatagaaaccggcatcatcgatttatcggtcgaagttttca

SEQ ID NO: 63198 - DNA, 179 bp, Heterodera glycines
tattcgaagcgccgagtgccattgcggtcaactacgtcgtcgtttgtcatcgggcatcgcgtcgcaacatcgaggtcgttgagcgggagaatgaacggacgggcgagtggctgacgctgcgttggcgtgtgcccgtggaggctgtggttgtacgccagcggagcggcacggatcggcgc

SEQ ID NO: 63199 - DNA, 996 bp, Heterodera glycines; identical to SEQ ID NO: 32995
  unsure (1)..(996): unsure at all n locations

SEQ ID NO: 63200 - DNA, 56 bp, Heterodera glycines; identical to SEQ ID NO: 52733

SEQ ID NO: 63201 - DNA, 426 bp, Heterodera glycines
atggttgctaaaacacgaggatggccccgttggaaattttatgattatttacacagtcgtcgtggacaacatggacaatttcggcacgacacaattagactcatgcaacaaattgaagccccaatgaatctggagggttacgacgccgacactttcttcctagagttttggatatttggaacaacagccaacaacattatcgttttgctgtgtttatttttggttcgtctggtcaatacaaaccagggctggacgtaattacggattacgtattacggattacggaaattacggcctttttggagttacggattacggattatgggttacggatttttgggatttttccgtaattttgatccgtaactggctttttagattatttttcgagacgatttcttgcaagattattttttataaaataaa

SEQ ID NO: 63202 - DNA, 1374 bp, Heterodera glycines
cagctgaagatttattcggaactttacgatcacatctgaacaatttgccccaaattacgtttgataaaagctctaataattctgcattcgaatggatgcaaaaagatggaattgcgattttatgtaacgaaaaaatgggcgaaatttccgaaaaaatccaagaaaataaattaaatgaacaattattttttgtcgtgaaaagcgcagaaaaaaaccgaaaacatttttgttcaatgttcaaagatggcaaaagcattaagctgatagcgcacaataatttggtgaataaggcaaaaaaatttgtgcaaattttggaaaatattccacctcaattaatggaaaagtttggaaaaattgcggaaaacgatgcacttttcaatgaggggaataaacaggaaattgccaaaataattggcacattttctaatgggctcaacttcttccgcaaatttgttgcaggttggtctcccgtttttggcacatttaattatttcccgggagtttttgtggtcactgaccacggatatgacatatattttaacaattccgacttcctaacccaatttaaaaaaaaaaaaattatgtcaaaaacgagaaatttcaattagacttttgtacaagttcgggttcgagtttaaaaattgatcaaaatagattttagaatcgtgatcagagaccacagaaaaatcctcaagaaacaaacatttttaataagttcaattaaattaaactaaaaggatccacctttagtttttaataaaattcaaaaccggggtaactttgataataaatagcgccgttatttttatttattttttgtagtagggtaatgagttgctttggaaaattttcatctaaccaaccctagtttcaagaaaactatgcccctttttaggaaattctgatcgttgcttgactgatcagctgcagacaagcaacaccgcctccatcatcacgctgctgaagaagccccatgggatggcacgacgaaaacggcgattttccaccatgaattttctcaaatgtgtcgttagcattgtgattggttccctgacaggagtatttgccgttatatttggtttttatttgttccaacatgtttttctagtttttctatgcaatatccatttcaattttggtcgtgggcttgtaatgttcctttggatcttttgcatcttaagttttgtagtgtgtttttttctattctactctaattgctttagtttcgcgtaattgaaaccaattaacagtcaatagtgtaattagttatttaatgtctatcaattagatttttttgaacaactaattattatctaaaattggactctctttttttctttttttgtttgtaatttaatcaaatgtataaataaa

SEQ ID NO: 63203 - DNA, 424 bp, Heterodera glycines
atgattttgcgttccggcattgctaagggtgttcgtgtggttcgcaatgacgacagaacgccgaaggcggctgtggtgttggacagtaagtttcgggaagtgtcgcgggtgctgacaatgataaactaaagccaaaccacaaccatttttagccaaagttgcggcgttcttcgagtcaaagaatttggtggacactgtcatggaaatactgccgcagcgtcgcaaaggcgggcgtccgtcgatgcgcgacttcactcccaaggactggtccgaggtcgaaacggtgatcaaagatgttcgcgtcgaggtttcgtctgttttgggttatggtgattcatacaatgggataaccaaaggtctaaaaaagcttactactcaaaaaaggcctcgggatcttggactctcaaaaaattttattttttga

SEQ ID NO: 63204 - DNA, 178 bp, Heterodera glycines
tattaaaaaataataggatttggaataagtaaaattgtaaaaatgagcgaatgttaattaaacctaacttatgccaagtggcgagggatccctcaggcttagtttttagaatcttattttttaaaaaagcacatttttctatttttgggttggggcccaaacgaccccggggcccaaa

SEQ ID NO: 63205 - DNA, 1848 bp, Heterodera glycines
cctaattaaacccatttttaattacctaattaggtctgacgagtgcccaagcagtggccaattgtgcacacaatccgatggtctcttgtaattgataaaataaacctaaattatttcttttgcccgtcatttaaggttctcactgctgtcaggatgcgatgcagggttttggattttgaataaatttttgatcaaatttcattcatgttaatccccccacagggatccccgtgagtcacatcaaagcaaagtcgggccattgtcctccgccaattggcatttccacgctgcaggacggaaacgtcggctgttggctggacaccaactgtcccggcattcagaagtgctgtctcgagccgaaccccggctcacacgtggccgcacgccgaatttgccgggacccggaaggcgtcagcagtcagttgagcgcgaggcgaacttgggggttgggggagggctaatccgcatagagataacggacaaacaattagagagagagacgtgagaaaagtagcgagagagagaaaaaggtagagagagagagaaaggtaaagagagagggagagagagagagacccaaatggaaaagataatttagataaattaggacagagaacatatgaacgggattttataattgaagcctgaaatgcccaagcttcgtgacctgtctcggcatgggttgggctctatcccggccgaccacagtgggaatgaaaagttggacggctccattttcagaaggctcttcaaaaattcataaccatggtaccaaaaaagctttctatcctcatttaggtccatacatttttaaaaatttgaaagttaagcataattgtttttctggacaaaattacattcgtaaaacattgcctcaggtgaatcgatttgcacacttccactgggtaattatcgtgagcaattattgtttctatcattagtgctttgtttagtggtcggcacttgtacagctttcgtcactcgctattattttgatgccagctcgggcaaatgcaaaccattccaggtgttttttgatacaaacctgctcgagagtcaaattttcgagaatcgtttaaatattatggagactcgaacagctcaagcgtatccatcaactaccgtatccctgattatccttatcacccattacagtactctggctgtggtggcaatgagaacaatttccaatcaatccaatcgtgccattccacatgtggtcttctgggtaattcctattatttcaatttttgcccctcaatttgtcaccatttttagggataaaagggaccccgtcttgtccgggcgaggccaacgcggaactgaactgtttgttgccgcacgcggacgcatgccacacagactcggtaagctaactaattgcaagttaattagaggcagccgattttgatgccttttgaattctttccatttttcaataactttttactaaaattggttcattagtggaggtgtaagtgtcgtgaatttgtttactgtttgaccggaattgccaatgggcgggagatctgaatagcttaattcttggggtttttttgggtccctgatcttaaaactgacatctattttgaccaatttctaatccctaactcgaacaaaagtcgaaatgcaagtttttcaatttatgaacttttttattcgaattttaggttaggaaatcggaattgtcaaatacataggtttagtatgatcaggcacccaaaaaatgtttcgttatttagctgtgctgtgttaattgaaacaattaaggattgtatgggaagagacggcgggcaacagccggtaagcttaaaaagtcaaattgactgacttttgaaaaatttgaag

SEQ ID NO: 63206 - DNA, 233 bp, Heterodera glycines
atgctcgtcgactctctccgtcccgccactctttcgtcctccaaaaaacgttcagcgcattccatggacgacaccgaccaattcattgaccacagtcccccgcacaaaaaacaactaatggacgaggaaaatgaccaaattttgacacaaaatacaccaaatgattcattggaccggcggaggccaattgcctttgccacaaaagcaattcacgcggggaatcggccagaaca

SEQ ID NO: 63207 - DNA, 630 bp, Heterodera glycines
atggaaaatgctgcgaccggtggaaagagagtcccccgtttctctcacagcgcggggacagagggcgccgagggggagaaggagccccaggcggaggagccgccctccgccggcaccgccggcgccgatagacctgccgaagaccattccctgctgctcgcccagctgctcgccgccttcgccctgttcggtcttgtcactgcgctgctcttccaattgcccgccttccgcgtgcgaagtcgcattggcacggacggacccgtgccaatccatcagttggacccgcaaatggccgaatgtgcgaagacatgcaggtagattagcagaaaagaggaggggaagagaattaccgtaacaccactctcagaatcgaattggtcgagagcattccccaaaacgtgtcttttcacctttccctcggcaattcgcccgctttggccatcccaacattctccgcttggatgcaactgatcagcgaggccaaacattcgctggccattgcggcttataagacgagtcttcgcggtgagccaacggcggagggagcgaaaattcggtgcaattttagggaaacacgtgctgggggaggaccaaggcaattactcgacccaaggagagacggttttcgat

SEQ ID NO: 63208 - DNA, 130 bp, Heterodera glycines
atgtattgcttctcaaaggttattagcattaataataccattccatttcactaatggatttgcgtgtcccgtaatgaattccatttaatattttttgcagaatttcatgataatcatactcaaaaattaa

SEQ ID NO: 63209 - DNA, 327 bp, Heterodera glycines
atgaaacatttctcccgcgctttccttctcttttgtcttatttttgtcgtcgcattaaactcttttaacgaagcggtaaattcaaagaaaaataataatttattctctaattttctgaatttttaagtttttccatcttttttttgtcagagtttaatcatcgacgaatgcaaaagtgtgtgcccaaagacgaacaataaatgcgcgacggattgtgtgaaatgcgcgagtggcaagtgcaaaaaagaatgcaaaaagccagcggcaccaaagtgcgcggagtgcggaaagaaagcggtgaatgaatgtaaagcgatgggaaagtga

SEQ ID NO: 63210 - DNA, 87 bp, Heterodera glycines
aaattcacggcttttttcccggttgtcccagccaaaaagtcccggtcccggtcttgcccaaatttcccggtaccgctgcactctagt

SEQ ID NO: 63211 - DNA, 59 bp, Heterodera glycines
tctaagattatttggcagcacatcattctggtaccttctgttactgctcgaactctgcg

SEQ ID NO: 63212 - DNA, 826 bp, Heterodera glycines
atggactggttaaatgtgtgggaaaaatgtgtaaggacagcgcatagtccaatcaatcaatggcaagcagtacggcataatgggtgccaaaaaattaataaattaaaactattaatataataaaaacaaaatttagtttaggtttgaggttgtccgagaaaatgaggctggagagatgaaaaaattgcaacaaaaaaaaaaaataaataaaaatacaatacctaaacactaatattaaatcattttcataattcaaattttgttaataaattggattttatttaaaagttttccaataaaataataaaaaggcttggatctgcttacatttatttcttcataattaattactttatttgactcaaaaacaatttatttcaaaataaatgattcgaaaaatgattctctatttgccattcctattcggtattattttcttctatttggaaattttgaagcctaattaatacaaaagtacacattaatattgtatattttaaaatgaattttttgataaaattttatataatgaaatttctaataatttaatttattttcagcatttaagtcttttgtcttattagtgtgacttttattagttaaatattattattagtattattgtataaaattataaaagaacaaaaggttgaacgttattcgtagagatcgacattttgaaaaatgcctggacctggacctggacctggattccatgttggacctggacctggatttcctggacaaaaatccaggaaaatccaggtccaggaaaaatccaggctcctcgagacctggatccaggcctggacctggatttttttaa

SEQ ID NO: 63213 - DNA, 230 bp, Heterodera glycines
cgctggggccgacttcacgcggtgcgcactgtccttggtttaattgccactggcgtttatttatacgcagtaagcaaagaataaaaggagaaaggaactttaaatccgacaacataacataaaatgacatattttttaatgtcaattttgcatattcacaaatttgtgtgcgtacactttcaatcacatttgtatatttgcactttattacataaaaacattaaagcgtt

SEQ ID NO: 63214 - DNA, 722 bp, Heterodera glycines
atgaatggattcgtttggcaccactttgttttgggagctgttctcctaatcagcaattgcgctgattgtctcagaaacgttgattggacaaccggcaagcagctgaacagtgaagagctaaaaaaagcgccgatcgtaatttcggacggaggtgaaatgtgagtctgataagtaagaaaaataaaatttaaaaaaaacaaattaaaatattaattgtttatttatcatcaagttttgctaattagtgtcttgcaagtgggcttgatcaacaacattgtgcccaatccaatcacgttgtatttcaacaccaccctggacattgataatcgccatttgaaaatgagtgtgtgccgagttggagaatgtgcggccaaagcgatgtattatttattataagtcattaaaacaataataataaatataaatattaaaatttgataattcaaatataattaaaaatatattcaaaaaaatgtattagaattacgttttgttttcttggacaaatggacccggcaaatgcacgactgaattcgcagtatcacatggaaaattatgaggaggacaataaaattgcgaccaaatgcaaaatggcacagcaaacaaaatgggcaaaacattttgaacaggacaaagtgctgcacggctttcaaattgtaatgagtgaaacggatgaggaaaaagttatggatttgtacacatcgacacaccaagaaaagtaa

SEQ ID NO: 63215 - DNA, 1823 bp, Heterodera glycines
atgaaatgcaaaaaaggcactgtcctcgacactcttgacttagggatgaacccaaaaatgaacattagtgttgaagaatgcaaagccggctatgaatattgtgcagcttttacatgcacaaaaggtacttagtcaatcaggcatttcagttgagtgaaatttgtacataagacgctggaatttaaatgtaattaaaattaattaaatgccgtttaaatgtatttggaataatattagacttttagatggaattaaattaattaaatgcatttaaatatatataatattcggctgacctatatcactaatatttaacaattgatttaatcaagtttattattcgcattttacagctggtcgggcaggcttttcacgaatccaatggtattgtgccaggatcaaatcccctccttatgagtgtgccgagcggttcacaaagttggtggaagaatacatcacacattccaatggccattggtgcgaatgccatttcggggaaatgggcaaagagatggacaatgaacaatttgtgcttccgcccatccctgatgggatgatgtgcaaagtgggacagtttgatgagaacgaaattggccaagtgtcggaggggaaatgcctgcacgacgaccattactgttacattgccaaatgcacaaaaggtgagagagagagagagagagagagagggagagagaaaaagagatgagagtgagagtgagggagaggcgagagagagagagagagaaacagagatgagagtgagggagaggagagagggagagatgaagtagggagagagagaaggggagagatagagtgatgtaagagagagagagagagagagagaaggaatgatagagagagagagagagttagagagagagagagtaagagacgagaaagcgaaagggagagagtgtgagagacagcgagatgagtgatagagatggagagagatagagagagatgaggaaaggaaaggtgagggcgtgagagcgtgatgtaagggatagagagtgagaaagaaaagagagataaagagagaagaaacatgagagagagagagataatgaggctaatcatttttggaaaaaaatatgaatcgtttcataatttcgccactttattatattattattaaattacctatcttcaaaatactgaaaaatgtaaaaagtttcgccaaattaataaaaaaaaagatttaaaaaaaaagaattctagcaaagtgaaattttctgtacattataattactacaaaggatgctccaaaaaaaatatatgtaaaatgaattcttggtaaaagtatgaaaattgatggtcatatttttaaaaaaaaaacaatgagttatttttttaaatattttaaatttttattttaaatttacgacatgtgaaaatcccgcaaaaaatatgcacacggttttatgcaaattgcatttgtttttgtttttttcattttttaatccatgccattcccgccaaatgctctttagacaatgaatatttcaaaacggtgtgggattgcactgatcgccccaaacgtgatcacatcactgatcaaatcgggcaaaaggccagtgttacgttgtactgtgacgcaatgtttggcaagaagaacatggccatgtccaatgaacatttcacaattgaaaagctggaagagcacgtggaaatgatgaacatgatgacgacaaagaggcgacgacgtcggaaaaaaagcacaacaatcacaacgccaagcaccgatttggcaaccaccacaatgcctactgtaacggagcaaactgtgccagctactgttgaggaggcgacagtcacgg

SEQ ID NO: 63216 - DNA, 1297 bp, Heterodera glycines
atggacccaaccgtggcgacaaagggtggccgtttcagtcttgaaaattacaagcaaaaaaattcaattgcgacgagttgtgagcaacagctgcaacaatcgggtggaagtgaaacattggcgatagggaaggtgctgcacggcttcaacatcgcatttgcggaggacaagctgttgttgacgtcatcgaccagccagaaaaggtatacggtaaagtcgactgtaattgacagtattttcagtaatagtgaaagaaaatgatggtcagagatgaagcaatatttaaatgaatataatctcatattcatataaataaattaatgctaatcgattttaaatgcttcaatgtatttttaattgtaaattaatcataaaaaatagtgtaattttatatagaaaataataacgatgattgaatattaaatttcaaaaaaaaatattaatttatttttgagtcctactccttgacacgattccgctaattaaccatcattgttaatttattaagcccgtcatatgccattcgcaatgcgcaacaatgctttgacattcatctcgggagtgagaagaatttggacgggtttctgaaggattacacggacaataaaaagcttgaaaaggataacgacttcttcaccgaattgagctatgacattttgtccggcattccgcaaaaaggcggcaaaattggcattattgcggcgggtggcgcgtgtaacatcaaaatcattctggtaccatgggcaaagtacttggtcattgattcggatttacaatggcaccatttgataataatgacatggcaatggaacggaacttttttgttgccatgggctaatgaccatggaattttttaaaattatttttgctattattgtaaattgattttggtacggaattttaacaatcctcatcccaaaaatttctatatgttttcacttttgcaattttaaaattacattttcactaaaaccccgtcattagaggcttaattggcgtagagcactaagtctatgtagacttagtgggtctatctttctaattcggaaaaggaaatttaaaaaatatatattcttgcatgttttttaaatcaaaatttaaaaaatcatttaaaaagaaaagaaattttattttgattaaaatgtatttaattaatattcaggaaggcgatggattgggcaaatgttttgacaatcaatgtgcctaaagcaatgtgtaaacaagccattaagagaaggaagaacgaaagaatcaaaaagaaatttatttttctaaaataatgcaaatatttaataaa

SEQ ID NO: 63217 - DNA, 927 bp, Heterodera glycines
atgtcaatttacaattttttcttgttgttttcgtcattgcttgttgttgttctgcagcaatgttcggcagcaaatgccacggacaaaaacaatgaagaaaatgtaacgaaaggtgattaaaagatattaattagtcaggcctatagagtgtctcattactacaataagaaatgggcaaaatatgttaggcatcgggtgggaatcgaacccacactgtcccggtttatctcagttggtccccagcatgtttttggctataacttttttatttgccaaccaaatccagccaatcgtggtatcattcgatagccctaggtgtcctatattatcctgaaaaatttcaaaagtttgaacaaagttatggcaaaaaatatttgagcactcagttttttgaatttttctggccataactttgtacaaacataacataatttttgaaatttttcagaccaatagagtagggctatcaattgaaaccaagatttgcttgattttgtttgcaaagaaaaaagttatagccaaaaacaacatttatgatgcaaaatgttcttaacaaaattcattgaaaattctaaacttttttcccagcggtgcctaaggcgccgtcgccccacaaaattctcctaaaattttaaaaaattgaatttaattgcttttttcatttgcaataatttttccaaaaacctagtttttgacaccaaattttaattttgaaaatttatttttagcaatttcttccggcaaaattgtgccaaaatctgatgccattgtccactcggggcctgttattgaaagtgtgtttgctgcggagccggtgaagaaatggacaaattggcaaaatgggaagcaattggaagtgaaggaggccatggaaatgccattggtgataaacccggatgggcgagtgtaagacaaaatagaaataaa

SEQ ID NO: 63218 - DNA, 554 bp, Heterodera glycines
atgataccattttgtctgggttggtttgacacttttaaaagataggagctttttttgcgggaagtagcagcctaagtaattcttatcatttaaatagctctgaaattttccaattcaagttttaactaccaaaagcttttcggtgaagggttcagaagttccggcaaataattttaaatttctgaattttaatctcaatttaaatgagtgatctggatagctgatcaatttaacgaggcaaataatgcccggcacgtagttttcgtgcttttttaactttacaagtcatttgtgggatttacttgaaatttcttaatcaaattgggaaaaaaacagcaggcctctctaattttcctgtccttgcagagctaggacttgaagtcatgaggccaacaccacttatgtgtcgactggcccttctttttcagtttttttaattaaaaaggagagattttatatctctgtaagataatgataatccatttatgcatttattaagatttatttaaaattttcaacttgtggcactttcaagatcatttgtctgttacata

SEQ ID NO: 63219 - DNA, 1153 bp, Heterodera glycines
ctaaaacaattgacctcgctgatccaacggaaggcggaagagcagaaaaatagtctggaagaaggagggaacgaaagaagggaagagaagaggacaaatgaggagaaagaaaaggaggaggataaaaggagaaaagaagaacgagagcagcagaaggaggagcaacaacaacatcaacagcggaagataacggaggaagagagagaaagagagaagaaggaggaagaggaaaagggaggggaggaaaggaagagagggacaacgaggagcaagaccaattcggaagtgagcagcggcgcaaagaggagggaagaagccgttgggagagtggaggaaggagaagaagcgggggaagggaaggaaggaaaaacgtgggacggaagaggcggggacgacgaggcggagaggaaggcgcgcgacttggagcagttggccatttaccgatcccgagtcaggcagcagctgaaccggaagctgacggcacttttggagagagtgatcagacgtatggacaaatgccatttgaacctttcccccattggagggaccgccgagtttagccaaaagggatggccatggaagaaaatgaattgggaagaaattcaccggagggccgaagcgaggggagaagaatggatgatgccaacaatggcaaagggaagaggaaggaagcgaaagagtggaagggaagaggacgaggggaaggaggaggaagttagtgtggggaggagggcgggagagaaaaagcgagtgaatggagaaagaagtgtgagagatacgaaaagggagagaaaagtgaagaaacgaaactcggaagaaaaacatggagaagaagatcagacgaaaaagagagtcacacgtaagagaaggggaagagaagaggacggagagacagagaaacagacaaagagaatgcatgacgaaagaggagggcaggaagagaaacgagaggagcccaaaaaggaagagaagcaggagaaaaacattcaggaggaacgcagagagcggaatgagaagcgagaggaagcgggcgaaagggaagagaagcagaacacacccccaatcattttgcggattcgcccaccgacggcaaagccaacggcactaacaacgatcaaacgaatgactgctccaagagcagcaacgggcaaaa

SEQ ID NO: 63220 - DNA, 439 bp, Heterodera glycines
atggttttccatcaagttaggaaatccttgaaaatgtgcaaaaataattataaatgatgatctgatcaggaaaccatttccaatcacaattcttaaataatttaattaaattttactcagtggcgcgggcggtggcgttgagtcttcacgcgggttgaatttctgttgggctgggttcattggtaacacaggttgtaatgctgcaattggatttgatgttgacatagcctgttgaccattcttaaatttttgatgcaattaattaattaattaaacacttttttaacatggtttattttttgattttattttttttggaaaaattttaatgggcgttttttaattaattttttattttggacttaaaaactaatcaaaaagtaatcgataaattaaaaaatgaattatgtaaaattaattaaactaattaaaaaataaa

SEQ ID NO: 63221 - DNA, 878 bp, Heterodera glycines
atgctctgcgctgtcctgctcttctccggccacactctgatcatgatggtcgccactttgactgtcgaccgttacattccgtccgcctttcgtttgctgcgccttttgccgcgtctttttgcactgatcggtgttccatgcatggtgatcagcaggtggggtgccttttactaatcatttgcttaatacggacccaagggatcggctaatgggataatggcacggaaaataacacaatttggctgagaatttcaatgaatttatttggaaatattttttcgtttttaattcttttggagcagtttaaggtgaatgtgtggatttagatgggcaattcgatattttgtgtcttaaactggcatccttttcattggcatttcatccattaattgcttttttcaccaccatttttgccactttcaggacccattacacttgcgacgtggtcattgcctatctgtctacaattgccatattttcgtatgtttttctcgtccattttaatggcaccgatttttcggcaaaaaattttggttttaatttttgagaagaaaaaattgtatattattagagaccggatttttatgtgctaaaaatcctgaaatatgtaataaaatatgtgctaaaaaatgctgaaatatgtgctaaaaacccccaaaaatgccaaaatatgtgctaaaatatgtgttaaaaattgaaaaaataagtgtgtttttgcataaaaattcccaaaaatctcattctttatcatttttagcccatacaacgcaaatcaaatccatttcgaagtgtttggggtaaaattgtctttttttgataaatcatttctataaattgaaagttccagcagagaacttcgaaatccaatgacgaattaa

SEQ ID NO: 63222 - DNA, 820 bp, Heterodera glycines
atggcgcaggtaggtgtgtgtgtgggtgtgtcaggtgcagttgcaattgttgttttggtatgtaattgtaggtattcatgcccaaaagataggtaccaaaaagcaaaatacgcataaaaataaggagtttcatatattttttgcaaaaaaaaatgaaaatatggtaaaaagtagaaatgaatatataaaacaaaaatgatcgagaaaactaaaataaaatgaataaaaataaaattttaacaaaaatttattttaatttaaaatccccggcaagtttcgctgggattcaaaaaattttaattgaggcgaaaaagattgacccggaaatcaagaccgatgacgttaataattttctcgaaaaacagaaaacatacacgattcacaggcccataaggaaaagattcccgagactaaagacgataccgagtggcttccataccgattggcagtgcgatttgtgcatatttgaccagttgaaaaagcataacgacggttacaagtatctgttggtatgcatcgacgtgctgagtcgaatgatcttcagtgcaccggccaagtcaaagaagagtgaggacatgattgaggcttttgatcgggtgttcgacaagtcgaaaattatcccgttgaaaatatatagcgacagcggactcgagtttcaggctggaaaaatgaaaaaatattttgaggaaaaatttattatcaaaaatgtgatgtatagccccgaccttcacgccggagtcgtggaaagggcaaatcggacaataaaagagcgtttgtatagatatttttaaaagaaagaactctacgatgggtccaagga

SEQ ID NO: 63223 - DNA, 712 bp, Heterodera glycines
  unsure (1)..(712): unsure at all n locations
atgaccgaagaggaattgcgcagacgcttgttggtggtcagcattgaacgtagccagccgccagccaacggaaatgccggaaatggagaaaacgccgaaggtttgcgaaacgcaatcagggaaaatgatggacgaccgaattttggagtaaatggtcaaacatttgcccaccaaaggaggccgcatgacactttcttatcaaatttgatgaataatggaataggaaactttcctcaaaatttggtccatgtaccgcgtacttcaaccccaactcgaaatgttgaatttgaacagcaaataggaccattcccgtttgttgttgaccgcaacaacagagcaccaaccccacctttaaacatacggcaacaaattttccaccccatcccactgaatacacaccgcattaaccaaatgtcggttaacgcgcaacgcaacattgacgttcagtacgtaccaaataattgcgttaatgccccgccaaacgtacagcgtcattgcgacattcagtacaccgctcctaaccctgtcgccgcgccatcaaacgcgcaacaaattcaagcaggaagtagacttattcaaaacattccaatgcaggctcagctttggcagggccctgatggaaaaatgactttggtttacccccaagaccaacagcaacaagtgctgatcgagcaacctaatttggctcaaatcatcaaaaatcactcgncag

SEQ ID NO: 63224 - DNA, 3851 bp, Heterodera glycines
  unsure (1)..(3851): unsure at all n locations
atgaccgaagaggnaatgcgtaggcgctgttggtggtcagcattgaacgtagccagccgccagccaacggaaatgccggaaatggagaaaacgccgaaggtttgcaaaacgcaatcagggaaaatgatgaacgaccgaattttggagtaaatggtcaaacatttgcccaccaaagtaggccgcatgacactttcttatcaaatttgatgaataatggaataggaaattttcctcaaaatttggtccatgtacagcgcacttcaaccccaactcgaaatgttgaatttgaacagcaaataggaccattcccgtttgttgttgaccgcaacaacagagcaccaacccccacctttaaacatacggcaacaaattttccaccccatcccactgaatgcacaccgcattaaccaagtgtcggttaacgcgcaacgcaacattgacgttcagtacgtaccaaataattgcgttaatgccctccaaacgtacagcgtcattgcgacattcagtacaccgctcctaaccctgtcgccgcgccatcaaacgcgcaacaaattcaagcaggaagtagacttattcaaaacattccaatgcaggctcagctttggcagggccctgatggaaaaatgactttggtttacccccaagaccaacagcaacaagtgctgatcgagcaacctaatttggctcaaaatcaacaaaaattcactcgccaggcctttcagattccggaaacgaatcaagagcctagacatttccctacctatccccaaccgaatgttgcgccaagcaacctcgaattcaacttgattttggaaagaattccggatctaaatggaaatgagggtacagattctgtgcgccgctttttcaaaaaatttgatgcatacaccgacggatggccaaacgcgaaacgaatttcggcgttagaaagcaaagtttacaacaaagcagaaagagcttttgaggcagcaaagtcaacgcagccctaccgatacgagcatatccgcaaagatatgattcagcagttggaagaaaccgactcaaagcaactaaatgcttttgatgatcttatgttgggcgttcggagaagacaaaatgagagcattgatgagttggctggaagaatttctcgcctagtaaagagtgcttatccgggtttgaccaacaatttgtgcgacgaatattcgatcaaatttctgatcagatcgatgggaaatcccgatcttgcgttaaatttggaattaatccgcacaccgggaatgactcttgatcattttgtgtcactagcagcaagggctgaatcgacccaacgcgccgcaaaacgattcagtacacacccaaatgatggctttcaacagcgcgagcaacaacccaaatggcgacaaaattttggtggtaactcaagccaaaacatggcgaagggtcaaaattttgctggaaacataaatcagcacccccagcccaaagaagacactagaaatcaatggaaatgttacaattgtgatgaatatggccacctttcacgcaattgttcacgtccaagaacttttatgcaaaatcagccaataaatcagcaaaaaaattttgttgctactggtgcgaaccgaactcaaatccaacccccaaatcagaaccgaaattttcaaacaccaaaaccaaattcagctaatttcctaaagcaaaattgtttggtggtccagcgtgaagaagttttagccgaggcgagggtaaacaaaattgagttggcaccggaagtaagtgaattttatgaaaaattggaacggatcaccgaaagcaaaaatgaaatttttttgccaacaattggaaaggttatgtcgttgaaacttgaagtgtttggcacagaaaccgacgcaatgcttgacggaggcgcacaaatctcattgattagtagtgattttctgcataagttgctgattgagaaagcgattacgctggaaacattggagattttcaaaacgaaaacccaaatttttgacgtaaacggaaaattagtgaaatgtctcggcacgattaaattgcctgtcaatcgtcacggtttttatgaaccggtgaccattcctttgcacatcactaatgccccaattggtttcggtcttttaattggaaccaacgcacttcaggatttgggatttaagttgtatgatgaacgaaataaggcactggttgaattcgaaaaagttgaacctgaaaagaaagattttctgacggtcatttatcggacaataattgaggccggcacagttaagaatttagaattcagcgttaacactgaattcgaaggacaggaaattgtcgttacttcggacgaaacttcagcaattcgtgtagaaccgaccataggaatccccgaaaaaggaaaaattgttgtcccagtgacaaattcatcgtttttgcccattactctgtttgaaaaatcttcgatcggaaaagtcgaacgagtgtactcaatcggtgagactgaaaatttgttaagtagcccaattatctgttccacgaaatatgaacaaaatgctgcccccgaatgttacgagaaattcttcgaaagtttacaagtcagaattggtgaactgaacgaagcgaacgacaaagaagtgcggaaaatgatttgcacttttcctgaaattttcgctttaagcgatgatgacttgaagcagacaaatttagtcgaacaccaaataaataccgcggaaaattcgccagtaaaaatgaaaatgcgcctggtcccatacgcttatcgcgaaaaaatagcagaaatgctccaaaattatttggcaagaggcatcattcgtccgtctatgtctccatgggcaagtcccattgtgattgtcccaaaacgtgatggaacgttacgtttttgtgtggactaccggggcttaaattcgatcacccgaaaagatagtttcccgctcccaaatatcgacaatactcttttaatgcttggaggacgaaaatacttcagcactttagactttatgtccggatattggcagataagaatggatgaaaattccattgaaaaaactgccttttcgactgagtacggtctttacgaatttacagtaatgccatttggtctaaccaatgcagtggcaactttccagcgatttatgtcgcgtctctttgagggaatgattaatggctttctgttcgtttacattgacgatattttaatcgcatctaaatcctttgatgagcatctgaaacaccttgaagcggtcttttctcgagttaaagcagcagaattaaaactaaaatttgaaaagtgtcatttttgcacaaccgaattaccatttttgggccacatcctcacaagggaagggattaaaatggatgcggataagctaaagcctgtgatggatttgcctatgccaacgaccaaaaaacaactccattctttgcttggttttctgacttattatagaaaatttatccattcattcggcacgattgctgctccgcttttcaaattgataagcgaaaaagctgaattcaaaatcggagaacaggaaaaacaagcaatcgaagaattaaagtcaaaaatcattcgagatgttgtgcttcattttccggatttcgatgcagcacagaatgacctaactaggcagtttataatcatgactgatgcgtgtaagaccggcattgcagcaattttatgtcagcctgatccggagaaacagattaggccaatttattttgcctcaagacaatgcaatgtccatgagtcacggctacagtgctaccgaattagaagctttagccgtcagatttggtgtaaaaaagttcgcacaattcatcactatgattccgactcgggtcattacggaccataa

SEQ ID NO: 63225 - DNA, 792 bp, Heterodera glycines
ttctcccttcccctctcctaaaggcttttcgtcggcgtttcgctttgtttgaccttcatttttctcatcgttcacttctttacgctccaccaaacgcttttgtacttttggccatgggctgagtcagtgagtactgtaggctacagtcagtccaccaaataaccgtaaccgcacggatagtcttacggacataattttacaacagcaaattaagttcaatttaaatgaatgatttttttgaggattttctgttctccgcagtttccgctttcgttttcctcgtctgttcattcattgagtcgttttactccacgggggcgtggtaaagaaaagcaatgaaatcgcttaacattcatcagacaaacgatgactcaccaattgccattggcacaggtccaacaattgcaatgacattggcggcgacggagtgattcacaacggatgccgactgatttgggagtgggcattcgccgcggtgagaacaacgaaaggaacagcgaaaggagcaatttttgaatttttgttattttataacaaagcacttgtatcaatcaccacaaaaaagctgatggaacaaaatattaaaattcactcgttttttggggatttttaccgtattttttaaaattacagtaatatttttcattactcctttcccaccgagattcacccccccccccccccacagtttcttctcttcactctgtgcgttttgttcttcaccagtgctttttttgccaagcgacaaaaaacggaagaacgacgcatttatttgcgcgagagaaatgctgg

SEQ ID NO: 63226 - DNA, 70 bp, Heterodera glycines
gaaggaatttgagcgcacaattcgcacttacaaaagcccatacatcagcttcacctatttccactcacag

SEQ ID NO: 63227 - DNA, 130 bp, Heterodera glycines
atgtctcccctccgctttcttttggccctttttctgatcactttggccgtcatggccggcaccaacggcttttttgagaactcggtggatggtggaccaaatgtggcatctccccttatccgtgaacgcc

SEQ ID NO: 63228 - DNA, 72 bp, Heterodera glycines
tgtccgtttgggggtactcaaacaattatgggggagcaaaaatccaacgcagaattaaagtacaggctatag

SEQ ID NO: 63229 - DNA, 1015 bp, Heterodera glycines
  unsure (1)..(1015): unsure at all n locations
ccatcaatgggcaccaatcccaagtcaagaacagtcgcgggaagccaccgccgccgccaactccaccgacggtcattaatcagcaaaaagaagtattttacaattgggtggatggccgatttgaattttcccataatcagcaaagtccaccggcgcctccccagcagtttccaccggtgccaaccgcggcgagttcggtagcatctccgcagcaaagacagtcggtgctaacagcggcgagttcggtggcgtctcctcctncctccaccacctcctccgcccccaccgccactattccaatcaaagccaactctgccggacaattcagtgccttccaccactgaatcaaaggcgtctttcgtcgatccgactaacaataaacgttccgaccttctgcaacaaatccaacaaggcaccaaactgaagaaagtgggcccaccatcaactgaacgaacgcccgtgccaacaaacgcaccgactttacgggacaacatgatggaacagattaagcaagggactaccttcaaacatgtaagtttgaaaatgtgccctcataattgtatcaatttcttagtaccaaatggaatttacaggtcgaccagtctgatgtggaaaacagtcgttgttctgctggaggcagtgcccaagaaattggtgtgctcacaggcgcattagccaaagcgttggaggaacaaagcaggcacgcaatgtactcgattgaaaattcggcattggcttcaccaactccctccacttcgatgtcttcaacaactttctcgacttcggctctttcacctgtgaagcttcaatttaagtcgttagacaaagcattgcctacaaatccgtgggaatcgggtaaatgatagaagaaatttggaaattaaaattttaactttatttgggacttgctttgtattactaacaatagtcatatttattcagaattggatgctttcctcgagctntgtggtcagtccgctgttttctcgtggaacgaattcgaagactcgacatg

SEQ ID NO: 63230 - DNA, 1203 bp, Heterodera glycines
tccgggattgtcacacaacagcattcttcccaaacggattatggtcagttttacctctctacgcaaggcgaacagtcacaaggcgtcccgtcaactgtcgatgcgtcgcagtcgcaaacagagccggacctgaattttcaagacgaggaggaaccgcttgtggacaatctgccgacacacgcttgcaagtgccgtttaccaggggcagacatcgcatcaacttgttaatttgaggtactgcggaattcacgacccttcgtcggtgggacagtgtactgtttgtggcaaatggttctgtaacggaaaaggcaatacggcaggcagtcatttgatcaatcacttggtacgagcccaacataaggaagtttcactgcacaaggactgtcctcttggagaaacccaattggaatgttaccattgcgggtcgaggtgtgccacgtttattttcaatggcttttttcattttaataaattaaggaacattttcattcttggtttcatcccttcgaaaactgattcggtggttgtcattttatgcagacagccatgcgcaacacaaaactctttgaaaaatgccaattggagtgccgaagattggaagccgctcatccaagagcggcaagttctctcctggctgataaaaattccttcacaacaggagcagttgagggctcgtcaaattacggcatccattatcaatcgtttggaggaactttggaaggtgtcgtgttgttctcttcttcgattaaattatgtttttaggacaatcccgaagcgacaattgaagacttggaatgccccggtaaatacacaacggaccctgaccatgtcttattgcgttacgaagatgcaagcatttacaagtactcttttaaaaaacggttttctctatttggagttttcaggcgaatatttaaccctttaatatctctggaagcggaatatgacaaaaaaatgaaagagtccatcagttgtcctgtcggtcaagttaagtgggacgtaaaatcggccaacaaagtgcatgccactttccaactgccaggatttagagatggaagtaggacactttgctccaacacattttacaccaaattcttcaagatatgaaacttatgatcggcgatgacttgcgtctaaagcactatcagacggtcgatgggtcggaatggagttgcatgggacggctgatcaaaataccggaca

SEQ ID NO: 63231 - DNA, 722 bp, Heterodera glycines
aaaaattccagattcgaaaattggtttcctcatacgttggcgagaatgaagaatttgcgcgacaatatttgggtggcgaacttgagctggaattttccccgcagggtaagtccattttaaagccaaattaatgatgaacacaaattccttattatttaattatagatttgcaaagaacgctgctatttagtgcgtcaaataaaaagccgacaaaaatccgaaccggaaaatacttattaaaatttacaaaatcccagagtgaaaatcccttgcccatttaatatttttaaacttttccacgataaaaattaaaaaaaaaacccgtatgttttcgtaaaaaagtgttaagatttaaataatcataaagagggctgagaattaaatattcgaaaaagtgctcagaataaaattaagatttttttttgaatttttgaagattttttgtataaaaatgtggcagaaaaattattattttgggagacatggattatctggacggatttttgtctgcgtgccatcaattttattgtaccattttaattaggcactttggctgaacgtatccgtgccggtggtgctggcattccggcattttacacgccaactggatatgcaacaatggttcaggaaggcggtaccccagccaaatacagtgttgcggaaaatggcaaaattgaaatttcaagcgacccaaaagaagtgaaaaaaatatttttaatgaa

SEQ ID NO: 63232 - DNA, 408 bp, Heterodera glycines
atgccgtatcgtttggtttataataaaaagatcacatatgcttattgtatttttgttagcagtaagtgcccaaccggttcaatttacggtacccgaaacttttggccaatttgaaagccatttaaatgggggtttcataaaatcctggattttaattttacgatcccatttttacattgtttgactgatggtggaatggtttcagaacgagaacacgtcgccagaatatttgctgactgtgatcaaccatttgcgcatggaactgctgaagaaggaggagcgcatccgcgacatggaggagtacacggacaaactgatcaccaaggtggacatggaattcaaatgggagcctctttcgcatcagtcaccagggggggttttgccagcgaaaaagcggaaactatttga

SEQ ID NO: 63233 - DNA, 608 bp, Heterodera glycines
atgccaaagccaacaagcacagaatggagacaatctgaggtgaaaatttggaatgaaaactggcattaaccaccctcattcaaattttaataattaaggcacgccagcgccacagagttctccgggttggccaacttcgcatgcggcggtgaccctttgtcgaccagcctcgataatttggaggatttggtgccagatcaacacttgaccatggaagaggcatattttagcattaaaatttacaatttaatttaatttttaagtttatcattcattcattgagttgtctctcattgatatttactttagccttctgtcggccgttggctttgatcttccgatgcttttccccgttgctttctgtgaaaatggacgggattttccattccgttaaaagggtttttgccttcttttccgccttttgtgccataatgacattggccatttacgaaaagtcccaaccaaatttgtaaatgtaataatattttaatgtttgcatcatttcaaaacgaataggccactcactcactatcacccacccacctattgtttattattattattattacaattattatttcatttttctttttggtaattaaaataaa

SEQ ID NO: 63234 - DNA, 483 bp, Heterodera glycines
atgccaccaaaacgtaaacatgtctacttggagagctacgaaaaagaattccggcacataaaaaaaagtcgaaaaggcgaagaatttgccctttgtgtcgtctgcaacgatgatattaatctcctttccattgggaaaaccgcaatttctctgcatcaaaaaacgggaaaacatcagaaagcggcaaaagcagcaaaccgatcaattccattgcaggaatttttgccaaatacttcggctccatcaactgaagaccgtaaagttctggctgccgaaggttaacaggcttatttttgatcaaaaattttataattaataggcactatcgcgtatcacactgcacaacattgtcaatcttttcgctcggtggactgtttgtcatctgacggaatgttgcgcacaatttttcctgattcaaccattgcgaaaaaaataagttgcggaaaaacaaaaacggcaaaaattctaactggtatcgcataa

SEQ ID NO: 63235 - DNA, 85 bp, Heterodera glycines
aaaataaataaaaatattcatgttgcacaacggactcgaaccaccaccctttgtccctttactatcttacaaaaaccacttcgcc

SEQ ID NO: 63236 - DNA, 1125 bp, Heterodera glycines
atgcccggacattttaaaaattcaaccaaacgaatgagggagctgaaaggattttgtgaggaattggaggtgcggaattaagtaatgaaaaattctaagctgttaatttaggttgaatttgaacgcttgaatcgacatgggccgacaagatggacatcaatgaacagcgtcttgggcaaaattattcggatggaatctgtcttaatcgcctacttttcaaaacctgacaaatgtccggcacttctttacgcttttttttcgtttttttctgaacaatcatttgcgatcattcattttttacaccacgtgctaggcctatttaacaagacaattgacttttttcaggttgttttactaattttaaatgaaaattctgttcataaatttagaaagaaaaagccattttgcccgaacttttgctggaaatggacaaatttagagcgaaaattgagcgacgaaaacaagaacggttttatggtgccgatttggcaatggaaaaagtcgggaagtgcacacgcgaagcgttggaggaacaatttcaagtaaaaattaatcggttttttattaaatttccaatttttccagtctttttacacctcggttttggcatatttgaacaaatggcatcgcattgaccgatttccggaaaagttgcaatgggttgcgctggcatcccgcaaaattccccacgacgatgcattggctctggctcgacaaattgcgcccgagttaacaaatgacttgtttgacgatgttagcgaagcaaaccaaatactgaattcttttccaaatgatgaatttcaaaaattaacccccgaacagaagtggaagaagctatttgaagcaaatttgccgcatctgctcaagctggtcagcattgttctttccattccggtctcgaatgcatttgtcgagagagtgttttctctttgcggctcacaatggactgacacgcggaatttgttgcaagtcgaaacagtcaaggcgttggtccaaacgaaagccaattttgatctttcttgcccacaaatgtaccaaatgctaatttccaatcacaaattgttggagaaaatcggcggatgggaaaaatacttttgataatcactttcaattgtttttgagcta

SEQ ID NO: 63237 - DNA, 232 bp, Heterodera glycines
atgacggaagccgagctgagagaaatcttcatggcgggcacgacggcgaatgaacgtaacagtttttttttggcatttttgttgtagcaacatagataattaattgtcacgtttttcagcgacgaacagaccgttgggcggcgcggtgacgacgacgacgaatgccaacaacagaacgaccggtgggaatgcgaccagcagcagctcctcatcaatcagcgacagtgactga

SEQ ID NO: 63238 - DNA, 848 bp, Heterodera glycines
  unsure (1)..(848): unsure at all n locations
taattaaatttatttatttattttatcaatcactgagttttttttttggatcgacctagccccgcatttgtcatntaggtttaaaacggagacgaagcaatcgcattttcaacgtcgacgcggtgtaccttaagcatgaacaccaaagtgatgcgtacgattttcgggtgattcctccattttcccctccatcccaaatattcttttcgctttccttaattaattaagcatctccaagtcggacttagccgtcgcttcagggcactgaaaatttggtttgtgtttcgtgcgattggcattcagcgaattcaacaatttttgagaatggtgcgtcaaattgggaaagtcaaatttgcaacattttgcccattaattagcaaaacgaattggccaaaatgttcgccgatcttttgctcagagacgaccgtttcgagctgttcgtcccccagcgtttgggcttagtctgctttcggatgaaggtaatctttacaaaggaatcactctaagtgatcgttttatgtcaatttgctaatgccattcccaatgccattgtcgggcaaaaagtgccgtggtagtttactgtatgtctagtgataaccctgccgtggttactgtaggacccacagttttttatcgtacctttgttcattgtcccttatgttgagaccagcaatgaactgaacgagtcgctttatttggccattaacgacgatcgacgcgttcatttggtcgcttcattcactcactgcacttttttcctccgtttcgtcgtttgcagttcaaagacacgcgaaacgaacatcgaaaaagcggtcgaagtgatcagagaaatggctgacaaagtgacg

SEQ ID NO: 63239 - DNA, 100 bp, Heterodera glycines
ctgtgctcatctgaattggccccagcagcgcatttgcaaacattgcactattggcatacccaccgaagcgcaaatggcgattctgaaacaattgctttgg

SEQ ID NO: 63240 - DNA, 975 bp, Heterodera glycines
atgtcccaaaaatctatttctgatttcatttccaatgttacatttcaacaatcaccttcaactcaaatttcaagcgctgaggaagcaatttcagatttagccgtttcaatttcgagtgatgagtttggggtgaattttagcaaatgtacttttgtaattattaaattttaggtcacatctccaaaaaggaagaaatattctcacaaaaagcctggcggaggactatcaaaaaaagggtgaaaaagcagtcacggaccacatcagaaccaccaagcacaaaaaaaatttggcagaatttaacagaaacgtgcctttgaccgattttgttaaacaaaaatcggtaattcattttggactcattaaataatctaattcaattgattaaggcttctgaagaaaaacggtgtctcgcagcagaattaacactggcctaccattgcgctcgtcactgttcacaattattttctttcaatgccaaatttgctcaaacaggtgaaaagcggtgataaatatattgtttaaatgttattgaccttttttacagagaataattggcttaaaaaattgccgggttttttgccgggtttttgaaaatttttgccgggtttttgccgggtttttcaactcgcgcgcccggtttttgggttttggcgatcgcatccctgtcaatatcgtatttatatatttcaaaattatttattgtatacacttatatgttacaattaaataatttcaaaataagatttcatgcattttcttattaaattaatgatctttgaaaagaagcaattgtgtgtgaacagataaaaaaaaattttttttttttgtcatattatttattcacattatttttgtctatatattaattttgaaaaattttttagaaaaaattatattaaaaatcttaaaattgaaaaattaataatgaattcgaagaaatgactaaaatgaaaagaaaaaaccagcctaaataaa

SEQ ID NO: 63241 - DNA, 1137 bp, Heterodera glycines
atggataaaaaattgttttttgtataattttttttactgagtgtttttgtataaaaatgattgcttctaaatttgttatattttgtcttgaatttaattagttgttcttggtttttactattttttacttcctttccttaattttatattttttcaagttgccgccgaagaattctcatttcaattctattatagtttaaaattgttttctaaaatattgttaaaattttttcacttatatagaagaaatcacaatgaaagtttttagtgtattaaatatttttgattttaaactgaaaaaactattatagagataataattcatttttttagcgaaaaaggttatttttataatcacatttttttagtaaaaagctgccttagtttattttattaggtaatttatgttttattcttgtgcggacgtcggattataatttattgtttgtatgtacttagtaattaataaatgaatattttttgttgaattgaccataaatattcttttagaaattgtaaacaatttttcaaatttatcttctaaaatttttcaaatgttcaaatttttattatccgattgggtttttattttaattttttataaagaataattatatgtatatttacttatgtagaaattttaatagtaatttgttaaaattgctgaaacagaattgaaatttttgttcctttttttatatttttatcaaaaatattttgttaagccaatttatgttctatttttgaatgattcattctaaaaatttaaatagttcaattttaatcgaaattgaggcaatctttattcatttataattatttatatatatccgtttaaaaattttttattcattattatttttattttaatagctaaataactgacattaaagtaaatttcatttaaaatattttttaaatcaaataatttaatatttaaaataagttttttaaataatatataagtaagtttataaaaataatttaaatgtatccagtaaaatttgtccactattttggtttcatgaactaaaatgtaacatttggtattctgcggaagttgacgaaccattgcttatgtaaaaattatatttcctatatgcatggactgagaaaaaaaaaatgggctatccttaa

SEQ ID NO: 63242 - DNA, 84 bp, Heterodera glycines
tgtgtgatttggtgcttgcgctttgccaatttgtccgagtccgacttcttcattttgggcagaggcgccaacggaagctgtgcc

SEQ ID NO: 63243 - DNA, 105 bp, Heterodera glycines; identical to SEQ ID NO: 53698

SEQ ID NO: 63244 - DNA, 769 bp, Heterodera glycines
atggggtgtgacgcattggtcctagtgacggaagagagcgccgggccatcgaatggcacaaaagaaaatgccgaaatggacgaaacgagcgacgggaaagagaaagaaccaatggcaagtgcaaattcgaaggtaatgcaacggaatccgaaggtaaaatcaaaaatttaatcattgaaggacttcttcgagttggaggacgaactttcgaaggcggaaaatgtggcagaaaagcaaacgaaggcaacgcaacaaatggacaaaatgcggacaattttggcaatgagtgacgacggaggaaatcaaaaccaagggtttgccgtgaatcgggagaatctcctgcttattgccgtctttttcccagcgctctctccgaactccttccgattgccatcactttgagacgtctcaatcgcctctccaatctccaaattatggccgcgcgtgagaaaatggtcaaaatgcgcgaatgtgtcgagaaacggaccaacgaattgcgaaatgggcatgtcggagttgacttcgtaaagaaatgcgtcgacctttgcctcgactttccaaggcaattttcaagttgaataatttcaatgttttttcctttgattttcagcccttccgactccgacatcgatctcatccacgtggatcagtttttcactgaaaccaattctattgtgcttccggaatcaattcgtaacgatgcgcaccaattgcgagtggcacgactaaaacacgaattttggactcggaaaaggtcgaaaaaaactaa

SEQ ID NO: 63245 - DNA, 1134 bp, Heterodera glycines
atgaacacccgcgttaattatgcgatgtataggctggacgaagccagaaagcaacaatatgatcagatatatattcaggcatgtgagagcaccaaatttcaaatgcaattggcaagggcaatcttacagataaatccaaatgagggggttagaaggatttttgatagagatgatttggtcgcgcattgggaaggtgataatttggaagttggattttgcgcaccactaacacctgaaaaaatattttgggataaaaaaattggtaatgagtgttacgaatggacgccagtttttgcagaaaacacaatattttttgttaaacccggcacaagggagttgagcattttggggaaaaagtcggaatgtgtggaaaatggcagtgtaaaggaaatgcataatgagactcaaaggggaataatccaaaaaatgggtgaaaatattgagaaaattcgacccaagtaccgaaatatacaaaaccctttaattttaaaagccggagcgctttttgaatcagacaatgtgcgaattgaggaaacaattcgtgaatatcgctcaaaaatgaataatttgcccacaccaacattacgtttagtcgaaaaaccaaatattacggaaattattaaattggttaaaagcgaggcaaatgaaacgcttggtgtgataattggtagatccggagattggttggaaatagtaaagaaaattccggagaaaaccaaggaagcattaaattatttgaaaggcctatcatatgtactgattgcgataccattattaattcttttggcattgattggatacattggaattaaatacagactgataatatttgccggggttcgtgctgggtcagtattggcaagagtgttaagagcaataatgggaatgaaaaaacgaagtactagagttttggcggtcccaacagctccggagttggatccaatcgatgaagaagcttatgttctggattatctgcctccgagacgggtagcagcaattacgaatgacccgcggagactcccatctattcgggtccgcctaaatgatttgttaacagcagccttggttgattcatgtgctagtgtatcctactgtagagaaagaacagcaagaaagcaggacttaaatttttga

SEQ ID NO: 63246 - DNA, 1652 bp, Heterodera glycines
atgcggctccaaaatattttgtcaattttaatcattctacacatttgcgaagtcaaatcattcccggtaattttatcaattagctaaaattgaaaatatatacaatttttcaagattttgtcatcattattcccatcgaaaaatgatagcggcgatactgttacaatttttgacaacataaaagaacaagaagtgcaaatccgaaagaaaagacaggctataacgcttttaaacgatggaaaatcaataaccctcacaataacgggacaaagtgtgactgttacagaggaaacattgtcggacggaacgattgtattgagaattacgggacaaaatccgacagttttaacaggtaaaaatagcaaaaaaataaagcaaataaaaatatttaaacaatcaaggtactgacaatttatcatccgacgatcaagcatcaaccactgaagagtcgtctgcttcggctaatgaagaagtgtcaacatccgatgacccagcatcaaccactgaagagtcgtcagcatcggctaatgaagaagcatcaacatcagatgacccagcatcaaccactgaagtattgtctgcttcggctaatgaagaagtgtcaatatccgatgacccagcatcaaccactgaagagtcgtcagcatcggctaacgaagaagtgtcaatatccgatgacccagcatcaaccactgaagagtcgtcagcatcggctaatgaagaagtgtcaatatccgatgacccagcatcaaccactgaagagtcgtcagcatcggctaatgaagaagtgtcaatatccgatgacccagcatcaaccactgaagagtcgtcagcatcggctaacgaagaagtgtcaatatccgatgacccagcatcaaccactgaagagtcgtcagcatcggctaacgaagaagtgtcaatatccgatgacccagcatcaaccactgaagagtcgtcagcatcggctaacgaagaagtgtcaatatccgatgacccagcatcaaccactgaagagtcgtcagcatacgctgatacagtaacatcctcttcttcttcattgataacttcttcaatttcctcaaagtcctcaacaacgacaactattttacgaccgccttcacaacaaaaacctagaagtagcagtagttcatcttgcgaaagtgaagaaaataaatttggcaaacggcgcccttctcatcataaaaataagaagtccaaacaaacgaaaaataaacaagaaggaaaggacaaaaacgagaaagaaaacttcgccaagcgtgtgtatgaatggttccataatttgccaagacattttgggtaatttttgttttataaccccatgagcagatgcaattataattctatttctatattctgtgattcttgttattctttttttaaatgaatcctgtcatcttattctttgaattttattgaaaggaagttgtgcactttgtttgatatttctttttggttgtttttctttttaaactttgataaaatggttttgttgtgatgttcgataccgaaatttacccgagactgagggggtcacctgccgggaaaataacagattaagaaaataagaaaaattttgaactatccaattctgacgatttttattaacaaaagcaattaagttttaaaataaa

SEQ ID NO: 63247 - DNA, 897 bp, Heterodera glycines
atgattaattttattgaatctaaatgtataaaatcttatcaagatggatcattaaaaataaaaaatgactatagcgcagaagaggaggaaatagaaacgaaagttttaaaggtataaaacaaataaaaataattaaaaaatagaaattttattttctaagacaccaagacgaatttttacattgaacaaacggagcaaaacaaatgcaaatcctgtgccgaactatgaagttgatgcggaagtggaaataacgggacgaaaggtgagaaagcgaataccgaaataggacaaaacgtgtgctttgacgttaaaagactataaaaatgaacattactcaaaaaacacaattttagaaaattcattagcaaattaaggtcgaatgaatgtgatttgaagctttgggcatttcggaagctaaaaaatatctccaaatttcccaaaatttataaaaaattctcattaaaaaaaagaaaagttagcaaaaccaaagcattgattaaaaaaagccaaaaatgatgacaattcaaacaaaatacatataaagattatgcgaactttatttttgagacatttcttaattgaaaatctttataaaaagcgagcgataatggatgctcttctttattttctaaaattttttagagctttttatcttgtttcgctgatttttcagaattttaaaagtgggtcggggcagggttagcaaacatgcacgatggtcaaatactgttaactcaattatagggtaaccatcatagttatggtaatttaaccataacaattttgaaattggatattgaaagcaaattttttcaattaaactaataattctttattaatagagagtgaaaacaactgctcacaagaaggctcaaagagttaaaacaacagctaaag

SEQ ID NO: 63248 - DNA, 1324 bp, Heterodera glycines
  unsure (1)..(1324): unsure at all n locations
atgagccaaagagaaagagacaatttacgaatcactgatcagaaagtgattcaaaaaatacggctacaaaatttggtcaaggacaacaaattatcaagcacgccaaaacgattgaaaacttttggcattttcaaggaaaataacagttacaaaattcatgaaaatgagctggaaaacaataatgttttatggacatccagaaaaataactgctaatgctgccaatggacagtcaaaaattgagcaaaaatatttgaaaaagaagcaaaatgccaaaaattacaaagaaaagagtcagcgattggaaaaagaattgcgggaaagagacgttgaaatttcgaatttgaaaagaaacgaagtgcattataagattaaaagtgaacaattggaaaaggaattggccaaaaaggaaaaacaaattgacgaaattaaaaagaatatgcaaaaggagttggacaacaaagaaagtgtaaagatttttaaagaaaagagtcaaaagttggaaaaagagttaggccagagagaaacagaaatttatgagttgaaaagaaacgaagtgcgacacattgtaaaaagtgaacatttggaaaaggaattggagaaaaaggaaaaacaaatggaacagttgaaaaaggaattggaaaagaaagaaaaagaaattgcaaaactgaaaaaggaagtgcgaagaggaggaggaggagaaaacaaaacgaatgacagaggtaataaacaagcaattccaatgcctaaaaaatctcaaaatcggaattcagggactaaaaaaattcgtaatcgtaaatagattgaaatcagaggcttaagaaaattagaaaataggaatttataaagcttcaaaaactctttcgggaatatattggtcctagcttctagactcaaaatcacaaaacaaactttgtaagtttttatgtgttaaaaatgactaagtaatcaaaaaattgcgcggcaaaaggttaaaccggtatcgagcctgtttaaatccaaaaattgcatcatttttaacagattaaaaataatatttttttatatgattttgtgtctggaatattttctcatttccgttccaaagttttggaactcgaaaccatttataaatatgagaacatttatctttaggcgaaggtaatcgggccaaaactatcgactcgaagttgacagtaaaagagcgcgaactgtacaatttggaccgtaacatttctatgaaagttcgtcaactgcaaaactttgaatcattaattgatcagcagaacaagagcaccaattcagcgatccgaaatagtgagaaattcgaagctttatttatttan

SEQ ID NO: 63249 - DNA, 262 bp, Heterodera glycines
atgagcgtctggtgagttggagccgaacggagctgagcgaattggcaaatattatttcggaaaagcttttaaacgagccaaattttgcgaacaccgcatttatagagcaaagtgccacaaaatattatttggatgccgattcgctggatgccgtgtttaagcagctggaaagcgatggagttgcattgcgaacccgactttatgaggaaattaagcgtgctggactgcttgaagacaaaggtggacaaggatgattaataaa

SEQ ID NO: 63250 - DNA, 733 bp, Heterodera glycines
atgttactgaggcggcacgagttgagaaagccgaggttcagcagcagcgaagcggcaccagtgaatatgcacaaaaagaacattggcaagtcgcaactgagtaaaatgtcgaaaaataatggagaaacggtggagggagacaaaatgccaaaaagttagtggggaaaagtgccatttttaaaattcaaaaagggactatggcattttacagtcggcactgctgcttctcttgcagctgctaagcatcagttggcaccttccgccttcccatcgtcggcattttcgtacgctttgccaaatttctcaaagtcaaaacagcaaatttcgccaattcggcggcaaaggccaatcggcaaaagtgcaagttacgactcattgataggacaatcaagcggccaactcagttctttccatcagggcccgacaaagcacggaaaaagtagtgaattggacggtgtaagcaaagggatgagaaaagtgccgagttgggacggcggattggcaagccgacttatggacgaaatgccgaagataaacttttccaaactgaagggcaaaaataagcccctttttgactcttagttaaattttacaccaaaattaagtcgtagttcttacaaatatcaatgaaatgaatttaattaatcttttttttggtttttatgctttctgtcaaagattttgaaatggaaaaacaaatatgcattttaaaaaaagttaataatcgaataaa

SEQ ID NO: 63251 - DNA, 75 bp, Heterodera glycines
atggttcaaaaagccttccgacgacgtttcggccgacgacgttttggggtgcaccgcccccaaacaccagcagca

SEQ ID NO: 63252 - DNA, 499 bp, Heterodera glycines
atgccgaataatgaggcggaaatgttcagcgaaaactgggcaatttcagctggaaaatcaatttggacacaatttgtgccgaaatgcttcacagtagaatcccgtggagtgaacagattcggctaaaaagattttaaatttaaattttgaggaaataattacgacagttgaagtttcaactatgatacccgcgtccgggtacccgaccgtgtccagacccggatacccggcttcccgacttggtagatccgagtccaactgggtccaaaaatatacactagtaataatgtgagtcttggttaaattgttgagcaaagttggaggaaagaaaatttttttaatttacttaatatttactttctatggttcaattctttctcatgttgatctcatttacacttttattaaagatttttgttgaaaatcttatattttaccattacgtaaagaaagctcaaaaattttttagacaaaaataactaatgtttattttaataaa

SEQ ID NO: 63253 - DNA, 3559 bp, Heterodera glycines
ttgattgattaattatttaatttgcaaatgctttttaaaggtggccgaagtgtttgaaaagaacggcacaagcgatgaatatttgacggagattcggatgccgttgaaccagggcattgttggccatgtggcaaccacaggacagatgatgaatgtgcgcgatgtgtacaggtaattaatgtattattagggaaattagtggaggaccaccagataattaattgggttgatcgaaacagttgtttccaggcatttataatcagacttcatttgaaattgatcaatgatcagtgtaggtatttctgatcactgatcaaaccatacacaagtgaattgagcattgattgacaacatccccgagattgattacatatttatgtatctctttggattccttatcatttagccatcccaatttctacccaaaagtggacgaacggaccggcttcatcactcgcaacattttgtgcttcccaattaaggactcctcaggtactgaattagccttctttttcacggcgaaaatattattaaaaaatcatacagtatcatcaaatctcacctatttactgttgcagctacagtagtttaacatcgtagtcccgtccctcattgtcaggcactttggtcggtgttgcggaactttgcaacaaaattgggcgtgacgcttttacgcggcacgacgaacaaattgcggcgacggtaggttgtaattacagtatttaaaaggctccttcgggcaaatgaaaaattagagtaaccgattaaacttttttacagtttgccgtctattgtgccatcagcatttctcacgtatgttgtcctttttgtgtcattgttctcctcatccaattaccgtttcctcccccttttacagtgccttctctaccgtaagctccaagaggcccaccgtcgttcgcacataacggccgaattgctggtccaaagttccaccctttcggtgagttttgcaatggcacaatcaatgccctgagaataaaattcaaatttggacaaacttacaagccaaggacgggttctatttcttgaattttcaaaatacgttttaaatccgcgatcttttccagcccccgagggcattcttctaattcccgattttaatttgtgatcagatccttttgtgatgattatcccatttcttttggccattaactctgtttattttttcctctccacagattgctcctgaggacattcttcggctgaccgtccgcgacattccttcgcccgattcgttccactccgagtcaaccaattccattttgtgccccgttccatcggaggtgccgacatttacgtggaggcatccttgtccatgttcaaaagcctgggcttcattgaccgatatcggatcagaagacggacattggcgcgctttttgttgatggtgcaaaagggttacagaggtgaggaaggggggggaagcaaaagtgtgggaatatttggatcaaaaatcgaaataatcttgttgaaagaattatatctttgttcgcctaattacggttttacctttccttccatcccacaagttcaatcagtactttccccctttcccaatctgttcagatgttccctaccacaattggagccatgcctttgccgttgctcatttttgctttttgttgctccgaatgccttcggtgaagtcatctttgcaggagttggagcggttcgccctgctggtcgcctgtctttgccatgacattggtgggaatatgggcatgtaattttcggctgattctagtctgatcaaaaggggcaaatcatttacttgtttcatatttgacacttttttagaccaccgtggcaccaccaatgcctttcagctccaatcggttaattgttttgatcaaactgatcattaactaattgattccactgtcccttcgttcagaaaactccgcttgcccaactatacagctctgaagggtccgtgctggaaaggcatcactttgcgcaggtgcgttgattaggcgtcgcttagccgatcaaagctaaacaaaccatcaacaaattatttattgtgccatgtttagacagtgagcattctcggcatggacgagtgcaatatttttgaccagttgaatcagaaacagtaccagcaggtacatacagtaccgctgtattttgattattgagactgatttccatcctctgtgctttgcattgaactttcgggtgatctgtccaatttccaaccatactctgatcagttcccacctggctaaagatgtggattactcaacttcagatcatggactgcattagggaagtgattctggccacagacattgcggcccatctgcgcaaagtggaacgaatcgctgaaatggctaaaggtgtttttttaaacagctgatcacttttcttactctcatcaatcaaatcccttccactaatcaagggtttgatcagtcctttccttgctttgcatccgctgatcacttcttctcacaattctctcggatcagtgatctttatcatgatcactctcatccaaattgttcatcaatcacttaatttatctgatcagtctattctctcctcgactgatcaccttaccccgttgcttctgatcaccattttcccctgtccttttgcagttggcttcgactcgcgatcagacgagcatcggtacctgttcacctgtctgctgatgactgcctctgatctgagtgatcagagcaaagatttccggcactcaaaagccatagcggagaacatttacaaggagttcttctcacaaggcgacctggagaaggaaatgggcaatcggccaattgagatgatggaccgggaaagggtgagttgatcgatcggagagaaagtgccaaaaaacgacacaatgccaatcccaccattttcccgttttaggcatgtgtgccgaaaattcaaatcgaattcatggacaccgttgcgctgccagtgtttaggtattatgacttggtcttgtcgactttctcgtatgttgtgacaaccgatcgcttcccagagagagagaaaagagagagagagaaagagagaaaaaaagaaagaaaagagagagagagagagagagaagcgatgtggagagacctaaatagatcacttcattttaataatggttaaacggcgtctccctcattgcttaaatatcttgccaatccgggattttgatggatgtccgttcccgcccctttcccttatctccctcttcgtttagactgcttgcgaaactccttcccgatttggtgccgacccatcagtgagtgccagtcccatcttgtctgattatctgatcactttccccctccccttaagggctttgctgcacaatcgccgctgttggatgaagcttgaccatattctgcaggagcagggactgccgctgacctcgggaggcttggaatatttgcgggaccaaaatttggaggagaaagtgacaaaacgggtgacagacgacgaacggaagggggaggacaatgtgtccaaaaatggacaaacggacgacgacgacactttgggcattccgatcaatgtgtggaggcgactgagcaac

SEQ ID NO: 63254 - DNA, 309 bp, Heterodera glycines
aaggctctttttactgcgcttgtcccccgggaatggtcgttgatccggcacatccgcgccaatgccttcccatcgacggcggactgaaaagggcggccgatcttttttcgtactgggcaaaaatgtcaaaaaagccggaaaggaggcgatgatgaacgtgtgtagagcgatggataaacgattgctcagacgtgtattgatcaaaacgaaaaattgatcagagtgatcagtcggccccattttatgtatttgcaaatcattactttacaacatttacgcaaaaataaaatttacagctgtttttgaaaa

SEQ ID NO: 63255 - DNA, 373 bp, Heterodera glycines
atgccttttccatttggtgagaaatagtaccctaaattaaagttgttccaagaatttttaagcgaataaaatttccaatcaaaaaaaaaaaattctttccggaaaaatgcatttttgatgcaaaaatttgatttgtttggtctcaattttcgggggaaaaaactgaattttccaaagattaccgtaaatgctctaggaatcgtgtgaaattttgaaattttagcgaaattcgctaacaaaatttgtgtaaatttttacaaaaatgtgcttttcagatgatgttctgcttgcgttcgaggacagcactgtttgtgtgttcaatttggccacaaaatcagttgtcgacgcggtcagaattcatttgtttaagtaa

SEQ ID NO: 63256 - DNA, 150 bp, Heterodera glycines
atgtcggattcagcagacgaatcagcagatccgttagatgctttggtttttatggaacaagccgaggagaacggcagtgatttcagcgacacaaaggaaggaaagggaatggcggaggaaaactcatccgacgagtccgaatacaacgaa

SEQ ID NO: 63257 - DNA, 219 bp, Heterodera glycines
gccacgaaatgtccaaaagagtaaaaacccacgaaatgtccaaaatttttcaaaatttataaaaacaaaatgagtctaatttaggatttttagggttttcggggtcgctgaatacgaatataccctttatattaccccttgcctaaccttaggcccatctgaataataaaaaactcaaattcgagacttttcgtgggctggacattttgtgggtaagcg

SEQ ID NO: 63258 - DNA, 522 bp, Heterodera glycines
  unsure (1)..(522): unsure at all n locations
atgaaaaggtgaggtgatcagaagaaaacaatgcgtttcagaaagtttggcttatcaaaacaaaaatatggcatgaaagatttaattttttaaactttagctttaaaaaattaaatttaaatgatggatttttataaaataattcaatgactcttaaaaggcaaaaaaaatttttagattttctaccctctccactcctccccgttgaattctatttaaaagcataaaacttgttttgttttttgacttcgaaaacagatgttcaaacttttttaaaagttttgccttttaaaaatttagttttattctaaataattgaaaattttttgccttttcgaaaaaatgttcaaaattttggaaaacttaaggcatattcgagcactgccaattgtgtgcttaatgggtcctggaaaaatgctgatgtcaaattttttcctggcgatgttgtcggatgcggcgttaatttggccacccaacaaattttcttcaccaaaaatggccatcgattgngttaggaaataa

SEQ ID NO: 63259 - DNA, 367 bp, Heterodera glycines
atgctcataggaattgcggccattaaagcgcagaaaaaagcattgaccggagaagcaattgaaggaattagtagaaggtaagaatcagttaattttaaaataatattaagttttaaaaaatctttaaccaaaagtttaaaaaatatttttatatttgttattctggctttacactatttaacttttgcataataatttatttctattgtttaataaaaaaaaatcttatcagttttcactagctgatcaaatctgagcttttatagtttgacagatttcacatatacattttttgaatgcctataaatgttcaaatattaaaaattttttaagcatggaacttcgaaacaatttgactatcctataa

SEQ ID NO: 63260 - DNA, 359 bp, Heterodera glycines
atggccgtctctttcctccacttttcctccatcattctgtgctccgttttggcccttcttctgttggcaatgttttgtgaagtccgtgcggcccccgcggtttaccaaatggaccgaaatgcctttcgaatgagtttcggcaagcgatcgcagcccatggaaacggaaagcagcgaattgaatgtgcgttatttggagaggggggggggggagggaatgacaaattgtgccgatcaaaacaagtgtttttaaagggtgccaacatcgccattccgctgctgtacgatatggccgaggccgaaacagccgcgcaaaaacagcggcacagagtcagcgcaccgtgggccacccggtggaag

SEQ ID NO: 63261 - DNA, 410 bp, Heterodera glycines
atgggatctcgcaggtaattattaaaatggatttaacaaaaattatgaattttaattttaagtgtcgctggtggtgttggtgcttcgatcatgaacaaagtgaactaagaaaaagggggaaaatttaaaaaaataaataaaattaaaattttagcaagccagcaaatacaacgagagtgagggtgagctgttgctcaactggatcaagcaggtcaccggtgccacaatgacggtgaacggaacgcgcgaaaacttccaagcacaactgaaggacggcacattgttatgcaagtaaagaaaaataagcattaaaagaaaaaagttataattacatattaattcgaaatgctaggcattgaatgaatctgacaaagtcgtaaaaagccaaaaaagccccaaaatttaataaa

SEQ ID NO: 63262 - DNA, 409 bp, Heterodera glycines
atgtccgaccgtatgcaaatgtttttgcaattcatcactaagaagattcagggaaaagccactgtgccgaaaaaaatcaacaattggttggagcagatttaaagcagccgtttgaagaattatcgcttgtttaagttgtcgctgaaaaatattctattgttttaataatccattttaagctacaataaattaccaattcattttcgattttgtttaatttggcgtccgattcgttctaaatggtgaataaaattatttttgtttgttcaaatattagcgcattgattttacacaaaaataatttaaacattcatatttaatccttacattgtgcttttgcagttgggcaattttttgttcaatttcttcgtatttgacttggaaataatcaatgcccgctgaatggaaa

SEQ ID NO: 63263 - DNA, 884 bp, Heterodera glycines
atgcttaaaacggacaacggaaacggacttggcgagacggaacagaaacagcagcagatgaacagggaagggaaaggccaaacggaagaggaagaagaagaagacggacaaagggaagagcaaaaaaagggaggaaaaaaggcaaaaggaaattgggagaacgaaaaagaggggaaaaaggaggaggaaaacaacaaaagcagcaacagcaggaggaggaacagctcgaaaaggacgagaaagcgcagcaagacaacgccaaccgcagaaggagggggaggaggaaaagcggcacagaatgagcgggacaaacggaggcttttgggcccgagtttgtcctgggacccgcaacagtgcgaacagcaacagcgcaaattgaggtgtgccgaagcgggacagactttaggggatagggtggaatggcacttggcggtggggctgatcacatacacagtcttggacaaaccaaaccggtggttaattgtgtctgatcagaatgatcagcttcatccctcccggacaaatcaaaccggtgggttaacttttttccccgattcagcagaccgcgctttcctttgttcaccaccaacggcacctgcggcactcagtgcgccaccgctgccgatctccgcggccgaatccattcggacggaagtgccgaacgattggcacacacaaacaagaaattgtcaatatttttgaccgcgaaaataatgccgaccaaaggaggacactcggagaagaagccgaaagggaaacggcgcaagaaaagcggtggtttgacgaaaggggccaacggaacagcggagaaaattggactggaattgaactggtcagttttgttggaaaattggcatttttatttgagttcggcaggagcttag

SEQ ID NO: 63264 - DNA, 508 bp, Heterodera glycines
tttgccccattcggcgacaaaaccgcacattccgccgtccgatcgcgaagaaaaataatcccaaatgaaattccaaagtccaaaaggaagaaataaaaaataaataatttaaaaaataaaaaagggcaaaaattattctgaaaattcaatggacgaataaatttaaaaaaaagaaaagaaaaggacacactttaaaatcaaagcaaacaaaggggaaaagcagcacactttattctgaagagattgtgctcaattagcacaaattgttataagtgcaaacggaagaagacaaaattcacgtaatttaaatgaaaaattaaaaaatataattatataaattgtaaaaaaattattgaattaatgtaataaaacaaccaattagattgttaatttatcagcgtgcgaagacttaagcaaataaattgccaataaaataatgccaataaaaaaagtgttggattaatttgagaggcgacgattagcgaatgaaagaaagaaagagtgggtg

SEQ ID NO: 63265 - DNA, 477 bp, Heterodera glycines
gggggactgccccgaaaacaaaaaaatcgatttttcaagtgtccgtttggggtactcaaacaattatggggagcaaaaatccaacgcagaattaaagtacaggctatagggaagctattcccgaaggattcggtctccccataaatctgagcgcatcggtaggggggacggcccgagaagccaaaaaaaaattttttttggataaaaattatttaaatgaactgactagataatatttaaaataggttatttctcttcctttcagtatccctgcaaagtttggtgcgcttctgatcagtttctgaaaaaaaagttaagcctaaactttttggcctgtttaaaaaggaattaaaaatttttaaaaattttattcatctccctttttgatataaaaagcatcagagtgcctaaactaacatgtaaataaaatttggtgcgtttcagagcattttctgaaaaaaatatttatgaattaat

SEQ ID NO: 63266 - DNA, 206 bp, Heterodera glycines
gtgtggtaagtgtgaagaactgtgttcctccaggcaaaaaattctaagaaaatttataagcatttgtagggttctcagcagtttccctgcaaaatttggtgagcttctgatcagtctagaacgttgggtgataaaatgaaaaaaataattaaaaaaaataatgctggtgtgctaagtgtgaagaactgtgttcttccaggcaaaaa

SEQ ID NO: 63267 - DNA, 1060 bp, Heterodera glycines
  unsure (1)..(1060): unsure at all n locations
tttcctctttcaaggctgtgtgattgacttgttcagaatacgaaagtcagcacatcaaagcggttgaagtgactgccgagtcgcgcctcttttaccacgtggtcagcgacgaccgcgtggcgatgaaattattggagcgtatcaaccaacgagggctccccggggaagtgaacttttatccgcttaatcgtgtgcttgtgaaagatcgccgcccggtttctgacgcggtaaaaaatgtattaattccactgaaaaatgaattgtctctcttaggatgcaagtcccatcctggaccatcttcaatacgacccgaactttgagcccgtttttcgctcaatctttggtaattgtgtgttcgtccgtgatcttgcggcaggttctcgggttgcgaaacaagaacgatttgactgtgttactcttgacggtgatattcatgacttttttgaatcatatttaatttggtaaattgaaacataggtgatcaagtgagtcgtcgtggaccaatgacgggcggatacattgacagaaaacgttcaaagattgacttggcaaagaaattgcgcaattttgaacgggaaaggataaatttggaggtaaatgcaaaatatgtttaatattgcatggaacatatttcgtaataagacactttacgatatatgggggaaaacatttcccatcaccaataagaggttaaaaaatcttaagaaaatttttactaataataagtaagtttcaaggagaaataaaagtcaaaaaatcgttggaaatttttaaaaaatttatcatgaaattttatttaaaaaattcatgattgtcttttaatttcttaatttgaaaaaaaacattcggtttggggggaactgttttcataaaataccatttcgtttaataggaacaagcggatttgttgtcgttgagtgtgtcagatagtcttaaagaagtggaacggattanggctggagatttccaaattggccatggacattcaaatgttgagcaaagagcacaaagcccttctggagaanaagagatcangtttctgagttgctcagccaacatt

SEQ ID NO: 63268 - DNA, 461 bp, Heterodera glycines
atgactttaaaaacaaatgctaaggttttctataacaacgcaaagaacaaaaccgaggaatttgtcatctgcgcggatgaagccgaatcggaggaatgtgcgggaaaatattggtaagcaaagaaaggcacaattggaaaacaatttcaaaaaatgtgccaaaactgttgttcaggttctacaatgttcgggaccatttgaattattttgggaaatcggtgtccgaatggggagagaagggatgtgccaactgacagaaaaggacaaaaaagaatgaatgaattgtgcaattaataattcactaattgtagtaacaaaataataatccaaaatatttttttattttttattattattatccgaagaatgaaacttaaaaaatatattaaattttaagggctctttttgatttgagtgggccattctcagctgaacatctgccaaatgatcccaaaaaatga

SEQ ID NO: 63269 - DNA, 114 bp, Heterodera glycines
atgacaacgacacaaaatgcgacggcactttcgctgctcacgatcagtgtcggcattgggtggggtgccaactacgagtgccgacgcgtcaccgatttgccgtgccgatacgaa

SEQ ID NO: 63270 - DNA, 636 bp, Heterodera glycines
atgtctgaccgtcttctcaaccgaactgtgagcgattcgactcgacattccaacaaaccgctggtgccatccagtacgaagggaattgatctctgcctgttattttatgtctacgttgtatgccaacagtaaccgtactgtaattcattttcatttccaaaaacctattttttacttttgtatgttttctgttctgtttaaactcgccctgaacattttggctggttctttttaccgttttcatcggatctacattttaattacagtaatgtctttaaatttgaatttagcatgcccccatacggaaaacccgacggacgaaaaatatatggcaagaaaaagaaaaaattcaacagattgttcaagcaggcagtagaagaaggagtgcagaacgacccgtcacctcgttgcacgaagccgcacacgctattgcaataagagaaggggacctcgtggcaccagcggtaacatacatattggaaattttttattaacattagtcatttgaatcttttgtttaaggtgttacagatgcgcggcttagaagtaaatgatgcgcaggtggcaaatctcgttgaacaagcagcaatggccgcgctggaattgcttcaacaaaatgagttggccctaatgaga

SEQ ID NO: 63271 - DNA, 225 bp, Heterodera glycines; identical to SEQ ID NO: 61696

SEQ ID NO: 63272 - DNA, 950 bp, Heterodera glycines
atggatggccagccaatttgggatgttttggcccgtgaaatttggccaatttttgcatcaaacattcgccatttgcgctttaacggtgatgatcatttggacaatttgcgtcgtcgcacttcgccgacaattctcaccgatctgaatcagttggattcaatcgattcatttgatctgttgcccgctgcgtttggtgatgattttgatgggccaaattcaacaatttctgctggccaaattctgtccaaatggttgcactctccgagaaaagatggccaacccaagcgattgagttgttataattacaacgaacaagggaacaccaattgggtcaacaatttcaaggaggtgtggcccaacattttcaacaatcactgatttttaattgccttaatttttgttttcaatcaaattgtttttagcattttcttcgtgccaatgccatttcttccgtcagttaccaaattcatttttctgttcatcggtcaattccaatgatgccatttgaattggtgaacgaatcgacaaaggaaaagctgacattggccaaagcaaaggaattgggcaacaattggataatgaaacaatgcaaaattattggggagaaagaggagaagcagcagaaaaatgaaaatttggacaacagttgtaacaatgtggtcttttggctttatatttgcaataattgcattgggtgagcaattaaaaaaggcatttaattttgtttaaataattcaaattgcgcctaattaaggccattgtctccgccaccagcagaagaagccggacaaaacatcaaaaaagtggcgttttctgctgacaatgaatgagtggtgggcccagcaaaacagtggttaacagaagaagaaataattatttaagaatgatcgatcgatttcaaatcagtgatcaaatgcaattttatgaaaaaaaccctctcaatttggtaa

SEQ ID NO: 63273 - DNA, 390 bp, Heterodera glycines
atgtgtccgttaatgaagttaaggactgtgcctacagtacaccacttccgttatggacaatacaatacatttcggtatgtattttttaacgatagaatatataaaagttatatttctggaatatttattaaaatatattttgtaaataaatttaatttatatgttaaaaaactttttggtaattaaggttggttatgataatgcatcctttcatccgcctattatcacctgtcacccgtcaaaacgatgttttaagccaacatccaataattccaatatgtttatggaatttcccgagaagaaaggaaacaattgaataattgtgtaaaaaactactattataattattttattttactttatttataaaatttttactattttagaaaa

SEQ ID NO: 63274 - DNA, 349 bp, Heterodera glycines
tttatgaaattcgctaaaaagctaaaaaaggaaaaagtgagtgtcgattttgtcctatttggcgaggccaccgccgagaacaacaaaataattgccgattttgtggacattcttaacggcactgaagagggaggagcctcgcatttgttggtcgtgccggttggagacaccaaactgtacgatgcattgcttcgttcgcccatttgtgcgggtgcgggcgctgcggtaggcgcagtcggagaatttggcatcaacgacgaggacgacccggaattggccatggcattgcgcatttcgctggaggagcagcgtctgcgtcaacagcagcagcaaggcggcgaagggaggg

SEQ ID NO: 63275 - DNA, 1631 bp, Heterodera glycines
atgaacaaaattgacgaaatatctttaactttaacaaacaaaaatacagatttattactaatcacggaatcatggactaacgaaaatgaggaaattcctcttagtccatggactagagaaaattacaactgcatttttgcatcacgaaaatccaaaagttgttctcgtggtggcggttgtggtattttgatcaaaaaggaaataggatttttcataaaattttccggcacaaaatttaattgtgaaattttaattttccaattacaaaatttaaaatcaacaaaatttgcattggtatatagaccaccaaaaacaacgtacaaacaaactatggaacttttcaaatttttggaaaaattttcaagccaaaattacgttgttttaggtgattttaatttttcaaaaagagacctggtatggaaggaagggcatccattttctaagagtaaatttggtgaaattttttgccactttttcagtaagctttctctctttaatgccacgaatggaccaacgagggagaactcgtggttagatttagttctatcggcaaatgatcaaattgtaaagcagtgtaatattgaaggcggggttttttcatcagatcatttggcgcaatttttcactatgtctattccaaaaactactcaaaaacccaaatttattaatattcgacggttcaccccgtcgaatgtgtctcttttaaatacggttatttcatctagaattagcaccttatctcagggtcattttagtgtaaatgaaaaatataacgcctttaataaaacactgctagaaaccttaaacgagtgtattccgataaaaagacttaccaaaaatgagttagcccctaaatatccaacgcatttattggcatccattaaagaaaaggccaaactatataagctgtgtaaaatcgacccaacaaaaagggcactttatgatagcattagtttacacataaaaatacaaacaaaaaaatttcattctcaacttgaacaaaaggctatttcaaagggaaaaaattcaatttttaaatatatacaaaaatatgatgttaatccctttgaaatatcgaatttggtttctgaaaacaaatgctatcataatgaccaagaaaaatgtgaattatttgccaatttatttgtaaattcgtttaacaattctgaagttgatccaggctttctaagcttggacaacacttttgttaatcaaagctttatatcagatatagaatttaacatcattgagacccaaaaacttttaagaaaacttccgaataaaaatggaacttctccggataatattagctataaaacattgaaaaattgccatccttcattagcaactgttattactgaccttttcaggatttcattagactctggttctcttccagatatctggaaggaatcaattgtctttcctctttttaaaaagggggataaattcaatcctgaaaattatagacctatttctttaacctgctctctgtgcagagttatggaaagaattctcagcaaaaatatttacaattttttattaaaaaacaataaaatttcggaatatcaatttggttttgttagaaataggtctacaacaagtcaattaataacagttgtggaagattg

SEQ ID NO: 63276 - DNA, 598 bp, Heterodera glycines
atggacaacaccgcaccaaaaaaattcttaacttcccttgaccagcttcaaattccccccgaaattgacaacgacagcgccattcccgactacgcaaaactgcttattaagcagttgcactcgctgttggccaccgcttcgtctctagttcaatctcaagtgacggcgaatgacgcgattgaggaagaccgcagacagcgaaccgttgtcatcaccaatgtgccggagttccaatccgggaaagcgtcggagcgtggggaggcggacagagcactggtcaatttgattttggacacagtggacctcgaccaaacgccagtggtgttccgtgtcggcatgcgaacgcccaacagagcgagaccgctcaaaatggaatttcccacgcgacatgcggctcggcatgtgctcagaatgaagggcaaagctttggcgttgaatgctctacatggtgcgcgcatcagggaaagcatgaccaaggagcaattggccgaacgccggaaattaattgagcagtgcgcaaagaaaagaaaagaagacgcgggagattggattatctacgcgaatcaggtcatcctgcgcagtgacattgacacaattc

SEQ ID NO: 63277 - DNA, 1188 bp, Heterodera glycines
atggcacttctttcgccacgtttcgatgcgttggtggacaaacatttcgatggcaaaagcgaattgacaatttggagaacgatcgaaattcgtcgcaaggacaaaggaccagaaccgaaactgtctgtgcggatggatagaaaatttatggaatttccattgcccgacgaccgtccgttgcccagtaaaagccgttttaagagccttgagattgtgtaattaaaaatcaaagctttatggcaataaaagcattccttccattttcacagttacattgatcactccgtcatcgcttttcttcgttcaaatcaccaaattttcgacaaaagaggcaccaatttacatttgtggattccttattcaaacaccacggatgggccgcggatttgggacatttttggtcgtgaaatttggccctttttttcgacaaacattcgccacttgcgcttttcccatcgtgatcatttggacaatttgcttcgtcgcacttcgtcgacaattctcactgatctcaaccaattgacttcaatctattcctgtggtttgtttcccgctgcgtttggtgatgattttgatgggccaatttctgctggccaagcattgtccaaatggttgcacacgccgagaaaagatggccaacccaaacgattgcgttgcgaagattacagcgaacaagggaacactgattgggtcaacaatttcaaggaggtgtggccataatttagacaaacgattgatttttgtttttccaatcaaattgtttagcattttctccgtgccaatgccatttcttccgtcagttaccaaattcatttttctgttcatgtgccgtcaatgccaatggtgccatttgaattgcttaacgaatggacaaaggaaaagctgacattggccaaagcaaatgaattggacaaccgatggataatgaaacgattcaaaattattggggagtccgcggcggttcagcagcagaagaaagatgataattgggacaacaattgtaacaatgtgttctttgggcttgttgctggcactaatagcattgggtgagcaataaaaaaaggcatttaatttttatccgaatttgaattttgcgcttaatttaggccattatctccgccaccaccagcagaagaagatgaagcgggacaaagcatcacaaaggggccgtcttctgctgacaaatga

SEQ ID NO: 63278 - DNA, 135 bp, Heterodera glycines
ttgcggtgcgggcgccggtggcgggagcggcgcttttggcggtgccgcgcgcgtggactgcaaaatgctctgatggatggcaccggccgatcgattggatttccgtggctggctgactggtgatgatggtgatca

SEQ ID NO: 63279 - DNA, 489 bp, Heterodera glycines
atgccaatggtgccatttgaattgcttaacgaatggacaaaggaaaagctgacattggccaaagcaaatgaaaatgaatgggacaacagttggataatgaaacgatgcaaaattattggggagaaagaggagaagcagaagaaagataaaaattgggacaacaattgtaacaatgtgttctttgggctttttgctggcactaatagcattgggtgagcaattcaaaaaggcatttaattttgtttaaataattaaaattttgcttaatttaggccattgtctccgccactggaagaagttgaagaacaaacgggacaaagcatcacaaaagggacgtcttctgctgacaaatgagtgacggacaaaagaacaaaatcaatgggcagacgcagaagaaatgaatattaattgaaaatgaccggacgatcataattcatcagtgatcaagtgcattttatgaagaaaaacctctcaatttcggtaaataaa

SEQ ID NO: 63280 - DNA, 458 bp, Heterodera glycines
atggcctcctattggcgtctgaaaagcattgaggagtacgagttggaaatgtccacgaaaagcaaggagacgcgtcgctatgtgttcaactgtttggacgacattggccaagtgcaccttccgtccgacttggacgacatcgaccgaatgtgcgagcggaatgaccggcttgaatttgtcgacattctgaagcaaatgctgagcatggaccaggtacagcttgaactccttgttggactcaaacaccggcatcagaaaaaatctcaacctttttaatttaaggaccgtcgtctgacaccgacccgcgggttgcagcacaaatttgtaaaaatgacgcatatgatcgagatggggcgcactaaatactgccaggtaataaacagttaactgtaagcaacaaattgtaagcaacatctgcaatttagtcccataattcggcatttgacatgccaagtcta

SEQ ID NO: 63281 - DNA, 388 bp, Heterodera glycines
atgaaccgacggtaaggcatttgaaaagtcacaaattcgtcatttatttagctaacaataaactgttttcccacttcagttggatttgcaacgacgtttggatggacattttcccctgttttgatcgtccccaactcggcctcaaaatggcacttctttcgccacgtttcgatgcgttggtggacaaacatttcgatggcaaaagcgaattgacaatttggagaacgatcgaaattcgtcgcaaggacaaaggaccagaaccgaaactgtctgtgcggatggatagaaaatttatggaatttccattgcccgaccgtccgctgcccagcaaaatccgttttaaagaccttcggattgagtaatttaaaatcagagttatggcaataaa

SEQ ID NO: 63282 - DNA, 690 bp, Heterodera glycines
atgctaacgattatgtatgcatttgaggtacgcatgttgcagtagcattaattaaaacggattaaagccacatgtaagtggataaatgattaattactttaataattattttatttcaaaaactttatttaattaattagataagattaattaattttttattgtatttcatttttaaacaaattataattattgatttataaaattattatcatctagaaaaggaaaaaatgcgacttacaaaaatatataaaaaatattttaattattggtttatgatgcgtgatgaaaataattgttcttttaaatgaatcacataaaatgtaatattgccttggtctttctttatttatattgcagttttttaatatctctatttgcttatattattatattttaatttttttaagttaatttttatattattttagagttgtcgtgatgctgctaaccaccacgttagagactttgggttgagcttgatggcattgagaaggaacagatagagcggcctggaattgtagacatatgattgaatatttggtttcagttttgcctttctttcgtttatttatgaattaacagatttctataattaaaaatgctttattatttaggtttttaaaatctctgccattccgcgccggcagtgcccgagtgaggaagataaattatttgtttatatgatta

SEQ ID NO: 63283 - DNA, 2587 bp, Heterodera glycines
ccattcgcgtttgcttaccttgacgacatgattgtggttagtcgttcacacgaggagcatcgaaaacatttgaatgaagttttcaaacgaatcggaaacttgattccggatcaaaccatacaagtgctcgttcaatcagaagcagatcaaatatctcgggttcgtcatcgacaaaaatgcaaggtgaccggatccatccaagactaaggcgatttctgaaatgcccgtccctacaaatgtttcggagcttcgatcatttttgggaatgatcaatcaataccaacagtttgtgaagaacatgcgatttcttcgacaaccattggacgagctactgaaacaggacgcggcatgggtctggtcaacggactgtcaaaatgccttcgacaaagtgattgaagtgctgaagtcggaccaactcttgacccattatgacccggaaaaggacatcattgtttctgccgatgcctctgattacagaatcggagcagtgatttcccatcgttttccggatggcagcttaaaggcaattgcacatgcatcgtgctctttgtcgcctgccgaaatgaactactcccaaatcgaaaaagagggactagctcttgtctttgcagttcagaagttccacaaatatctttccggaagacacttcgtcctgcagaccgatcacaagcctttgttgaccatttttggtaacaaaaagggcattaaagcgtgtacagcaaatcgcttacagcgctgggcactcatacttttggcgtatgattttgagatcgaataccaaaacactgctgattttggtcaagccgatgctctttcgcgcttaattgcaaaagcgccagtgcccgaagatgaatttattgtggcaacaattacggaaagccctaatttggcaactgtgaatgcctttacgcacaatttccagttgtccacgaggacattgtcaaggccacggaagctgataaattgcttcaggaagtgaagggattcgtcctgaaccaatggccaaacaaatgaaaagtctcgcccgccagcatatgtactggccgggaattgatcaatggtgagaaaatgtgagccttgtgccaccgaagcgaaggcaccaaagaaaacggaactacattcttggccaaaagccgaagggccatggaaacgtgtccacatggactacgccggttccttctttggaaagatgtatctgatcatcgtcgacgcgcactccaaatggccggaagtgttcgaaatgcgttcgaccggatcagcagcaacaattgaacaattacgttcactttgcgctcgttttagattgcctgaaactttggtcaccgacaacggcacccagtttagctccaacgaatttaaggaattcgtcaaagaaaacggaataaaccatctcttctcagcgccattgttagagaggcaaataattcaaatatttgcaattccctctcttgggctttttgaccccatattgattttttcccattcattcatgcccttcccttcgtccatcctgattcattctgttattttccttgctattttgtgctcccccaatttgctccgtccctccgacaaatatttatttgtttatttattttccatttgtgttaataaatttatttggtgttctacttccacaaataattgttgagcaatcaaccggctcaacattggcgacgcccgttcttcaggacttcacttcgaatattttctcgtgttgaaattgttcgaattgtggaaattcaaaaatctcgtgttgatttttggatttcgcagaaatcttcaaaaaaccaatcactaatcttgtgtgcggttctgctatgtgcagtttcttcgtctaagtcaatcctccaaatcaacaatggacaaaacgctcgcggaaattttggaaaaattaacgcaagcgatcaaacagcagagcgcgccgacatccacaacaactccaccggcacaaaacatcacattgccggatattcatccgttttcaacagaaaatgcggaggaattcgaggagtggttggagcgattccaattcgcattggattgcgcagcggccaatatggcggatgaagcgaaagtcaaattgttgatgacaaagctcaatccggccgccttcggcgaatacaagcgctactgcctgccggaggaattcaccaaattcaacttcgcggacaccaaatctcgtcttattaaattgttctcacatccgccatctttagcgattgatcgctatgaatgcctgcgagtgtgccgagagaacggcgaaagttttgaagtttttgtgaaccgactaaaggcagccctccgcaaattccgtttttcggaattaaacgaagaggaattcaaatgcctggttctcctcacgtcgctgaagtcatcaagcgacgccaaattacgccagcacatcctcgcacgtctcacagcggaggactcaaagacgacgaaaacgtccaaattattcgacaaagtcgttgaggacttaaatacacagctaaaaacggaggcggaagcaaaaattttggaggcgccaaagcccaaaatcaatgcaattcaacacggcaaaacatcgccaaataagcaccaaaat

SEQ ID NO: 63284 - DNA, 1266 bp, Heterodera glycines
atgggacgagattattttttaaagaagtatttaaataaaaccaatagtgagtcacagaactgccatttttattttaaaaatatcaaaaagaataaatttaaattgcaaatttgatcattcaatatcaattgcacgaaaaatgtcacgtaaaaatagttataataaataataaattgaagcaaattgttgtgtccgcaaggaacaacagaattaaatttattttagaaagacaaatgataacaaagaaataaataataaaacaaaacaaataaaataatgatgacgacggagtcagaggaaggcaaaaatggaaggagcaaaacagaaataatttagaactgaaaatgatgataaaataataaaataataatgaatgaaacaaaacagcgggggagaatattgactgaagaatatggcgtccaaaaacaacaggaacatcatttctactgtattggcgctgattcaaataataattaaaatccatcatatccaacacaaatctgagatttacataaaatacacaacaaagattgatataataaattcctaatattataataaataaaaagattaaataaaatgatatcaaagaaacaaatcaaagaaagtaaaaattttttgaaaattaatcataaaattctaattgtactttattttttcaattaaactttgattaaaacttcgttcatcacacacagctcattacaagatcatatattcagagttttgataaacaataaatatgaatttttaattacaaaatttattttaagttaagttataattaaagctataataataaaaaattcaggatttaatcagtaaaaatataagattttaaaaagtcaaccatggcgtcttgttaataaattataataaacataaacaccataataaaaaatttaatttaatgttaaataaactagttaatatactaacgaagctaaactcgatttaaaggtgacaattttcttaaaaattgtaaatataaaaatcattggatttataaagaataaacttgcaagtaatttaaaaaatccgaatttgggtaagaaatattgcttatatatcttctcatatgtagaaaagaaaacaatattaaataaaataaaaataattttaggagtacacaaaccccatcaagcctcaagctttttcaacacgaaaaatatcaaaaaccgcgaggttcgagcatcacctttatataatgcattaatgaaagctgcttaaatataactaaaaatttaatttggcttttaaaataaa

SEQ ID NO: 63285 - DNA, 988 bp, Heterodera glycines; identical to SEQ ID NO: 33124

SEQ ID NO: 63286 - DNA, 946 bp, Heterodera glycines; identical to SEQ ID NO: 33125

SEQ ID NO: 63287 - DNA, 702 bp, Heterodera glycines
atgagtggaaagcgcgcattggcaaccattataaaaatttacatcgatgaaaagcgagataaaaaacagaaaagtgaccagcaatggagcaaatccaagtggcagcgattcttgcaactttttcttaaggtggtggaggacgaaaacggcacaaatggcaacttggcattggaatgtaagtgaaaacaaataaatttatgtttatcgagagacattttttctgtaatttaaattttagaaaggtagaaaattatttttctgtcttatccatcaaaaacaattattttcgtaaaatataagttttaaaaaactggtggttttaaaatcggtagaacttttttgttttttgaaaaaatcactaaagattcatttttgaaaattcttagctggtgatttttttgtattgttaagagcttttgagaaagcctaaatttgccaaaaatgtaaaaagataaaatatgtttttaagttgacaataaaaagatgaagaaaaaacgaaggggaaagcgatttgccgacattgttttcagcgccgttttgttgattttattggcctttgcctttagcgccatttttcataaattaaaaagacaaattggcaaatgttttggatcacagcagccaaatgcaaatggccaaaacatatgggcacaaaatggagaagggtggacaagcggagaagaacaaataataaggggtaag

SEQ ID NO: 63288 - DNA, 932 bp, Heterodera glycines; identical to SEQ ID NO: 33127

SEQ ID NO: 63289 - DNA, 58 bp, Heterodera glycines
atggatttaaaactaaaaatgcaaattttgtattgtcgtccgttgaaaacacctccaa

SEQ ID NO: 63290 - DNA, 789 bp, Heterodera glycines
atgtgcaatgccgtaaacggaagcgacacccgcgcactcctcatgaccgcaacttcaacggccttcaatccagcacaaccgcatctcagcatgactgcggcaattttcatcgatccaggcagccacagatcattcatttcgttaaaggcagcacagctactggatcttccgttggtccacactgaagaatgccacttgaccagtttcggagaacgcgaaccaaaaagatacatcagcgacctggtcaagctcggatttctctgcacgagcggggaaaaactcatcttcaacctcaacgccatgaaattcttggtcaacgacatgccaatgattcaactgtcagagctggacaagacagagttgaggcaacaaaagctcaatcctccgcatgaacaacgacaacctgacatcatgctcggaattgatgtctggcacgaactgcaggttcaaccaatcgaaaagttgccaagcggcttcacactgtgccgatccaaaatcggcaaaatcttcagtggatcaggacgcatcgaaatgcatcaaacgccaaacgtgacatttgtcatgtcagtccacggcactgagcaagaagaagccaatcaatcagtcacgttcgaatcaaccaaagaagagacggaagtcttcacaaccgaagatgatttcaaaaaggacgaacaactcaacaacttcttcggattaaatctgattggcatggacgacacatcaacaccaatcgatcaggattatgtgatgatccatttcaaaaagaacctcacgttcatcaacaactga

SEQ ID NO: 63291 - DNA, 469 bp, Heterodera glycines
atggaggggacggcattgacacgtgcgttttgcaatgggatcagcgggaggggcttgtttataaagttttctattgaacgcattcaaaaagcggatgggatgttcaatttcctaaattccatcgctttaatccggaacgtttttttgttcagaatttcgtacggtccgtcgcgggggcggcacacgtcgacaatcggcagaatatgaggacggaaaggagacgaagcaaaaggaagaaggggacgaacaccgacaccaaagttcatcttcatccgccaatttcggccgctcttccgactccgagcaaatcctacgcgaattcaacaaagaattcagcggatttatgcgccaattcgttatgtcccgtgacaaaaagccgggcgaattcgacgagcgaatgaaagcattcatccgcgacttcaacaagaaaatgccgcccgaattcgaagttgaaaggagtgcgttttaa

SEQ ID NO: 63292 - DNA, 403 bp, Heterodera glycines
atattggtcagacattcaaatcccggacgatcatggacaatttcattacatttgtccgttctgcaaagagacgctcgttgaagcaaagaaattcatcaaattgttcatcaccaccgatgaacaggaagaagccgaaacatccgccgccggaaaagggaaatccgtcgttcattattaaattggcgagaaaaacaatcgtgccgaaatttatttaaaatgcattgggtttcatgcaattagcgaaagtatttaaaaatgggtccaagaagaaaacagtttatccgtatatatcgcatccatgtccatgtccaatgctcctcatcattagggtgaggattttattttttttaaatatttcgggaaaattttaaaaattgctaaattaaaaaatatttaaaataaa

SEQ ID NO: 63293 - DNA, 313 bp, Heterodera glycines
atgtctattattaatgttccaaatgtccaaattcgccagtgtttaggaaattgcactggatacagtaagtcaccggaaatcccacagaaattcggattggtatggtattgttcaatgccgaccacttcttctgttgttaaaatgccggatggaactgtaaataagagaaaggctgtgaatatactaatttaaatagtcagaaaaagatttgacccaaaaataaatattattttttttaccaatattttcagaaaattcctcttttgagaaaagcggaaagcgaattttgaacaatgccgggccaagcatttga

SEQ ID NO: 63294 - DNA, 337 bp, Heterodera glycines
aagcacttctctgaaagaagcggacggaagcgacggcgccgttgagaatgtccaaacgaaggaaaatatgcggccaattttggaagcggagagacaccaacagaacgacgatggcacaggggaaagtacggcattgggcgagaacgtttagcagtcacccaaaaatgctcaatttgtaatgctttttttagtccgttcgcctccgtcgtcttctcccactccgtggcatccttcgcatgcgctcgctgaaccgacgtggcagaaactgttgaggaaggaattccaaatgaaatacatgacgaacatttgttgctttttggaggaacaagccaaacag

SEQ ID NO: 63295 - DNA, 751 bp, Heterodera glycines
gtggattttagctccccataattgtttgagtaccccaaacggacacttgaaaaaatcgattttttttgtattcgggcagtccccccgaaccgatgcgcccagatttatggggagaccgaatccttcgggaatagcttccctatagcctgtactttaattctgcgttggatttttgctccccataattgtttgagtaccccaaacggatacttgaaaaaatcgatttttttgttttcgggcagtccccccgaaccgatgcgcccagatttatggggagaccgaatccttcgggaatagcttccctatagcctgtactttaattctgcgttggatttttgctccccataattgtttgagtaccccaaacggacacttgaaaaaatcgattttttttgtattcgggcagtccccccgaaatattatgaaaaatggtgaagaataaaaatttttaattcatttttaaacaggcaaaaaagtttaggcttaacttttttttcagaaacttatcagaagcgccccaaactttacagggatactgaaaggaaaagaattaacctgttttatcacattagctcgtcatcagtttttataaaaaattttcaaaattctgagtgtgagtaccttgggcgcaggaaaattattaaggaggagggttcattatttatttatttttgcaaaattaattcataattttttttcataaactgctctgaaacgcaccaaaatttatttacaagttgaataaggcact

SEQ ID NO: 63296 - DNA, 1589 bp, Heterodera glycines
aggctgctgttcacagtcacttggtcccgaccagctccatccccaacttcaaattggaatcggaccacgccggcccctcctccttcacgccggtcgcggctcaaggcaaaacgatgtcctctcccgacctgcacctccaggcaaacatttcctcgggttggtttggcaaaagcgacgctctgtcccccccatcactcatttttcccaatttgcctttgctcagctgcgtctgctcataagcaactccattcgcccatttttccctccgaagctcttctcgcccttcaccacgcttcctgctccgccactttgtccgtgcccgccaatctccccggcgggggacaaagcaatccttcgttcagtgcgcagagcagtcccggggggtcgggcgggtcgctgcttagttcggcactttctccgtcatcccaactcaacggcaatggactgacagagtgagtgaacgatggcttatggagagactttttaggcactatgaatttgataaataaaaaaacatttttagtcttagcgccccgtcaaaaatatcgccaatgcttaacggcaaatcaggcgatgaccaatggaaagccggcgaaggcataaagcagtcggtctgcccgccccaaatttcaattgtaagtggggaaagggcaaaaaccaatcacgtctaccgatttgacaaatggggactgatttacgaaattgttttttaatggctctgttcattctttattctaaacaccaaaaattggttcaaacttgaagtcccagcaaagtccgtacgcgaaagggcccgattcggtcacttccaaagcatccagcgacatgagcaaggacagtttccataatgcggcaccgacggggggaaaggagaaaactcgcaaatacaccaaattttatggtggaaggtaatgaaaaggcggggatttagcaattgaaaatgcgactatttaagtgcggatagccaagtgagttcaacgcggggaggccgaggccgaaggtcgattataaagtgagaaagaacgcacaaacgccaacgataataaaaaaaacatagcgaactgctcccggacgaacggcgacagacaattttggaacggaacaaagccgcggcggtacggtaccgaaagaggaagaagtgagtcacggggcagcaggggaatttgaaattaacaattggtacatttgttaccttctgattgtgagtggggtgttttagtctcaaatttgattttcgatcattgcttaattcgtaattttttcaatttttctccagggaagagcatgacgatatgatcacccgggtgacctctatggagcaagaaaagaacgctctggaggtgggcaagttcgggttgggttcgccttgtcattgtccgtccttttcagacccaaaattccgtcctccgtcgcgagttggagcgactcaactttttgctgcaggttcccctttctcttttttccctctgttcttttcaattctccttttcaggagcgtgaaagtcgttgcgtttgcaaggccaaccaattgcaagtgggcgtcagtgtgctggacgaaagccgaagtccgtcggttggctttatgaacg

SEQ ID NO: 63297 - DNA, 133 bp, Heterodera glycines
gacggaacgggccaactccgtctgagccaactttgagtcaatataactcttgaagttattgaccgaatcaaacaatcttgatatcattcgaaagctcttcacaggctctattagcctactaaaaattacagaa

SEQ ID NO: 63298 - DNA, 117 bp, Heterodera glycines
atgttcaaaaatgcggaagaaagggcaaaagagaatgaagcatggagagccaattcaataaatgatgacaagcataatataattgtgtattcgaaattcgatgattatttaaattgg

SEQ ID NO: 63299 - DNA, 60 bp, Heterodera glycines; identical to SEQ ID NO: 52045

SEQ ID NO: 63300 - DNA, 906 bp, Heterodera glycines
atggccaagttcagtcagttcaaattggaaaatgaggcgctgcaattggattttaagagcggaaaaagtgccaaacaaaaaaataaaaggctgaaaacagatggaaaggcaaatggaatagaatttgagcaaaaaatggaaaaaatgttcaggaagataataatagagaatgctaaattggcaaatggaagctcatcatcggcattttcatcgtcgacatttccatcatctgcgtttccgttaccgatttccatgtgcaccgtacctatttatgatgccgctttgcgcgtgccaatatatgacatgagcgatgctgtaagtttctcgaaaaaacaaatattcgggttagggctgccattcgacaaaattactcggaaaggcttccggaaaaaatgcgtcagcaatattaatttccataccaattcaggattagttttcaaattataaaactactgtatctctttttaaattcactgactcattttccggtcaagcttggaaaaataaagaattacagaagtagccaaaccagattgaatttttgaaattcctgccggaaatgccaaaagatttaaatggttgttttttcgtgccatttttgataaaaaatctcaacacttgcagattgaagaagaattatttcctaaatttgtgaacggaagtgccgatttttccacacattttgctgctgtaccatcaaataaaattaaaaagtacgaaactcatcttggcctactgtatgcgatgaaaacaaattggcgttgtgccaatgccaaaaataaaattgacaacagctgcaccaaatatcgccgatacattgacattttgtatgaatatttgttcatgatgcgctatgggattaagtctgtgaaagccgatgtcgagactcttgtagggccacggtaa

SEQ ID NO: 63301 - DNA, 403 bp, Heterodera glycines
  unsure (1)..(403): unsure at all n locations
atccgaattcgccgntttgncatccgaattcgccgttttgtcctccgaattcgccgttttgtcatccgaattcgccgttttgtcatccgaattcgccgttttgtcatccgaattcgccgttttgtcatccgaattcgccgttttgtcctccgaattcgccgttttgtcatccgaattcgccgttttgtcctccgaattcgccgttttgtcatccgaattcgccgttttgtcatccgaattcgccgttttgtcatccgaattcgccgttttgtcatccgaattcgccgttttgtcatccgaattcgccgttttgtcatccgaattcgccgttttgtcctccgaattcgccgttttgtcatccgaattcgccgttttgtcctccgaattcgccgttttgttctct

SEQ ID NO: 63302 - DNA, 368 bp, Heterodera glycines
ctgtttgccgggctcccagaaaattggatgagttaccaagctgaaatatgcatgccaaaaatagaaaccacgcaaaacaaatgaacatgaacgaacattgacgaagttggacgcaacgcagcgttaagccgaagcattgaagcgatcagtgaacgcgctgtgtgatcagaatctgtaattggtcaacttaagtcagacattttatgtaatataatgactagacatggaaaaaagccatcaaacgatcagataaaaagtaatgagtaatggtccgatcaagatgggttccaattcagtaatctaaaccaccgatcctgatcacgggtatgatgatgcaccgatcagtaatcaaaaccatcaagtcagat

SEQ ID NO: 63303 - DNA, 5189 bp, Heterodera glycines
  unsure (1)..(5189): unsure at all n locations
cgcgcgcggtgcttggccgcggctgcgacggcacttttgtgtaccggtgcgttgcttgcgcggatggcatcatggaaattgtgtttgctcgagagtcgagaccgaaggattgtttttggcattttgagcccgaataagttttcttcggcctcggcaactcggcatgctgtttattgagcctagctctcgacactgtcagggaaccgaaaatttcaacactttttccaaaaaacatttgggaacctccactcggaattctgtggccaaaaaaaattgagaatcgggaacgagaatcggtatgccatgtcccaaacangggaattttgggaatccgggatctgggaattgccatttttcgcattgtttttggttatcaccggtactcaagactgggaatctcttctcaaggttttgatcttgccaaaaaagttgagtatttttcactggacaataatgctgaaacccgagactctcgagcattacgcactaattgcttttccactaattggtgttatgtcgcccaggggccaattcgacgggcgcgacgtggccgtgaagcgggtgcaggcgctgctgagcgcggacaacaattggcaccggatcatcgaccgggaggtgacccatctgcgcgagagcgactcccatccgaacgtgatccgctacttttgctcggtaaaagacgatgcttgcaactcactgattgatcaattaaataaatacgattataacataatcatctgtctacaaattttttttttaaattctataaatttatttaaagaaagtttccttaaaatgtatgaaattttttggcattttttttttgtaaattataaaattcataaaaaataattactttacaatattcctaaatttaatctttaaaaactattatatcttttgattttacaaaaattttataggtggcacaagtgccaaattgatttgttaacaattttttattttggaagttaaagtttggaatttttcaaaaatctaaaaaattatagggaaaaaataatcaaattatttcacatagttatttttttttatattttattaaaaagtaatttaatataattcttttccgaatgaaaagttgttaaagaattatttttaaaaattttttttactctactcaaattttttttttgaaattttttccaaaattttttcaggaatccgactcctacttcagctacattgcgctcgagctgtgcgaccacacgctggaggacttcatcaaccaccagcggggcaaaatggagcgacggctcaagctggaactgctgcgccaggccacggacggcatcgcgcacttgcacagcatcaaaattgtacaattcatttgtttaattttcagacttggaaatttttacaaaaaaacatgaaatttttgcttaagaaatttcaagaaaggattttttaaaattttctagcgttttttggaaattttttttgaaaaaactgaaattttcttatgaaaaattttcttaaattttttttatgaaaaatttcgcacattgatcaaacccattttcatgactccgatcaatccaatcggttttcccattttcaatttgtcatcttttcaggtacaccgggatgtgaagccgaaggtcaatcacacaacattaaatgatgcggctgcaatttccaatttcattttttgttgtagaacattttgatcaacggcgtggccaagggccccccgcgggtcaaaatttccgactttggcctctgcaaaacggtgaagctgggccacaactccatctccaaagtgtccggcgttgtcggcaccgaggcaagggagaaaaacactatctgatcagagctgatctgagcaggctttgtcggtctgatcagtgccaacagccattgttgatagatcatttgtctttgaattttataagtgaacaattaattaggctcacatttttgtcttttagaaaggttctgaatgcccaaattttactttaaaaataatcactgatcaaatcaattttttagccaatcaatcaataattttgccacaaaaatctaacaataatcccatctttagggttggatggcgccggagctgtgggactcgacggcatctgtggtagaaaaaatcccaatcaaaatttcagaaattttaaaattttacaaagacctatgccattgacgtgttctcgctgggctgtgtgttctattatgtgttgacggagggtgaacacccatttggtgactcaaatgtgcgcctgtacaacatctccatgaacaagttcaacctgagcaaattggatggtgagcggctaactaaaaatggatgaaaaaatcacataaaaacgttatcagcaactgtgatcatgatcactgatcagtgttcggtatgataattgatcgggaaatgtttactgatcgctaaacatttcatacccgtgttttgatcagtgttcagaacccagatggatgaaatggtcacttgaaaaattaatcagcatccgtggtcatgatcagtgaacaaaatgatctttgctcagaacccatttcatatccgtggtttggggtcagtgatctgacttgatggttttgattactgatcggtgcatcatcatacccgtgatcaggatcggtggtttagattactgaattggaacccatcttgatcggaccattactcattactttttatctgatcgtttgatggcttttttccatgtctagtcattatattacataaaatgtctgacttaagttgaccaattacagattctgatcacacagcgcgttcactgatcgcttcaatgcttcggcttaacgctgcgttgcgtccaacttcgtcaatgttcgttcatgttcatttgttttgcgtggtttctatttttggcatgcatatttcagcttggtaactcatccaattttctgggagcccggcaaacagttgcaatttttgctggtacgttatggcatttttttgctgttgtattagcctatttggttcagtcttcgttttaagccaaactaaataatttttggaaattcttggtagctttcggctgatcgctttgttgagatccgataacccataggctggctgatcagactaaaaattacccgggcattaatttttctataaatttcattatcatcaggcatggtttttctttatatcaggtttttcggtcattttaagcaagaaactaatgaatgatcaatagagttaagccaccgatcaatttttttttgccattctaggtctcttctgcttgactttttttaatgaattgatcaaattggcatttttgggtgggctgaccaaactatcaatgctcatggcattaaatctggttagatcagactgaattaagccactgatcagttttggcttccttgatcaaatttcccaatggcaatttttctgtaggaagtgagtgatcggattgagaaattggaatcgcacgatctgatcatgcgccggttggagtggcgtcgtgccgtcgtggttggcacttggctgaaccgaattgacgaaccgttgaaaattggtacatttttaatcttggcttttcgtccgccaaaaattgacattttgtcccacccaaacacaaaacagatctcttgaagcagcgctcctaccagaacaatgtgcgcgatttgttgcgtgcaatccgcaacaaaaagcatcattaccaagtctggcaccaatttgcactcaaattttaattttttggcattttgtcactatttaaaaaaattttgccaggaactttctctggagctgcgcactctgcttggccgcttgcctgacgagtacattgcctatttcacttcaagattcccagaggcaagtttttttaaaaaaaagttctatttgacaatctgttgaaatttgaatattcgactcgaaaaccgtttttggggttaggggttcgttttctttgatcgagtctcgttctcgaactctgcgagaatctcgagtagcattaccattttattgtcttcatcgcatttgttggcatgatgttcatcaattgtcccacacttggcaaaacttttgtcaaattgtcccacatttggtgacattttgtctgccagtccttagtgactttgttcgacatctgtccaacaacttaaaaatgtttgtacaattatcccttagtaatattttattcccatttgtctcagctttggtggcattttatccaattcttcccctaatccataatgacattttgtccaattctttcttcaatctttggtgacattttgtcccattctcccccaacatttggtgacattttgtccaattcttccccccaacatttgatgacctttgtttggcacagttgctgatgcacgccttcatggcgttgacgctgtgggcccatgagaatgtgttccgccgcgacttctaccccaccgatcagctcgtcgagttcttcgagcgcgagcgcgacacgatcttcaaaacggaccaatcgccgcacgaccgtcgccgccgcagttcgagcccgtccaactggcgcagcgccagtgccgtaagaatggcaatcgattggaggcggaaaagcatgcccttgcttgatcccgaatcaatgggtcatggtgatggtctcgggaatttctctttcccgggactatttgacaaaggcacatggtgccggggaaggacgtccagggaaaggacgtacttggatttcggatttatagtaccagcctcaatggtgaagattttgtcgcatccaaattttcgacctccccccggatgagggctttattagaggggggcactaatagaggggctgggatctctattagaagaaaagtggtaccgcagtccgagtttggatatcccatttctttttagcatgggttcaattttcaacccaccctcccacttttaggtgggctttatttgagagggcggcactaatagaggggttgtgtggctctattaaaaggatcccttcctgatgcttttgttcaacacagtccctccccatccatcagcagttgtcccgagcgggaacaccgacacggaatggcgtcggcgccggcacaattgtgccaacaaattatgccattggcaacatcacggccgatggcatgcatcacccggttcgcaatcagttgcagcagcagcagaaacttcccttgcagttgcccgccttcaacccgttcatgccaccgccacttccaccggt

SEQ ID NO: 63304 - DNA, 499 bp, Heterodera glycines; identical to SEQ ID NO: 60789

SEQ ID NO: 63305 - DNA, 566 bp, Heterodera glycines
atgtccgctgggagcgtactccgcacaagtgtcctctacaaaattggtgttgatcattttttgctacgactaaccgtattccgtgtacaagtgagcaaaaattgccaactcgaaaaccggaatttcgtttttcgggaataactctgcgggatttgcttatatccagtgcacatagaaatgattatgtgtaattttttgagctctatccaaccgtgtttttggatttttaaaattttcagaaattttcgagctaggcctaaaaaacggttttttggttttttaattttctgattttttaacgaattttccaggaaaaacggagaccacttccaaaacatagtttttcgagctctatcgattggtgacattttcagaaaaattttggtttttttccggaaatagaaaaattttttgctctgaccgggacatttcagtcccgggcctataactcgtcgggagttgattttagccaaaaatcttgcaagagcatttttgtagagaattttaagctctatccaatgtgttttatcccatatttttaacatgagtataaaaaaagttataaa

SEQ ID NO: 63306 - DNA, 158 bp, Heterodera glycines
aaaattccctcaaaaataaaaggtctattgcgcaccgccctccctatcgtgctcgagagcatttgtatgtgtataaaatttatcaaaaaaagagatagccgtttttctgcgatgacctctaaatataaaaatccctctgtgaaataaaatggcgattg

SEQ ID NO: 63307 - DNA, 304 bp, Heterodera glycines; identical to SEQ ID NO: 51570

SEQ ID NO: 63308 - DNA, 108 bp, Heterodera glycines; identical to SEQ ID NO: 61460

SEQ ID NO: 63309 - DNA, 1333 bp, Heterodera glycines
atgatttcgtccaccgccgtgcctcgcccccttcgctcttcgaatcaacaaaaacagcagccaaacgcactgaccaaacagaacggtgctcatcagcagaagacgcctatcaaagccagggaagacagcagaaacagtcagaaaatccaaattgggggataaatcaaaaatgaattgttatttaaagggagcgacgcattgggcgcacagaaaccaaacggtcattcgccgcgtacgccgagcgttccgccggtgaataagcgatacgctcacgtaaaaaggcaattaatcactttcatatccattgactcgttggttattcttcagcaaagtcgggtcaatcactgagtacactccgtcgcccagtcgcgtgaagattttccacgagtctgtccgagtcagcgccactcccaaagtcggctcactgcaaaatgcgtcccatgtgcccggttcggagggaggggagggggcgttaattggctgtttttccaaataaataaactatttacatttagccggtggaaatgtgacgatcgagaacaaaaaactcaacttccgggaggcagcaaagccacgggtggaggacaaatcggaagtgccaattccaaagagtgagaaaaaggtaagaaaatgggggatggcatcgccaacaaaagggaaggaatgttttgacagattgcgactcaaaagttggaatggaaagcccagcccaaagtcggttcgttggacaatgtgaagcacaaacccgcggggggcaacctcaaagttttaacagtttcactttcatccctttaaagagtgggccgatgtttcagatattccacgagtcggtgcgggtgaaatgcgagtccaaagttgggtcccttgacaacatcggacacgtgcccggcgggggcaatgttaaggtggcattaattagtccaaacaatggcactttccctcccccttcgctttccttctcttacccccttcccccccccccccccgtcctcattagatttcggattacgcacgcagtgtttccggcagcggtgatggctccagacgtgacacttttgattcgggccgcagttcatcttccgccgacctccctaaaacaaaaaacgttgtgctcagtccgcaacgttcgccgcgacccgtggaaatgattctgacaccgaaggaaattccgccgacggacgacgacgaacaaaatgacgcgaacagaggacacattggacaagcggaagaagggggaggagagaaaaggaacggagagagggcgacggaagaggaaaccccgcaggggacgaaggaagcggaaacggggcaactgatcaattttggggactga

SEQ ID NO: 63310 - DNA, 761 bp, Heterodera glycines
atgtcactcaacacaccaacatttcaatcactggcactcaacccaccaacatttcaatcactgggactcaacccaacagcattacaatcactggcactcaacccaccaacatttcaatcactggcactcaacccaccaacatttcaatcactgggactcaacccaccaacatttcaatcactgggactcaacccaccaacatttcaatcactggtactcaacccaagagcattacaatcactggcactcaacccaccaacatttcaatcactggtactcaacccaagagcattacaatcactgggactcaacccaccaacatttcaatcactgggactcaacccaccaacatttcaatcactggcactcaacccaccaacatttcaatcactggcactcaacccaccaacatttcaatcactggtactcaacccaagagcattacaatcactggcactcaacccaccaacatttcaatcactgggactcaacccaccagcattccaatcactgggactcaacccaccagcattccaatcactggcactcaacccaccaacatttcaatcactggcactcaacccaccaacatttcaatcactggcactcaacccaccaacatttcaatcactggcactcaacccaccagcatttcaatcactgggactcaacccaccaacatttcaatcactggcactcaactcaccagcatttcaatcactgggactcaacccaccaacatttcaatcactgggactcaa

SEQ ID NO: 63311 - DNA, 641 bp, Heterodera glycines; identical to SEQ ID NO: 33163

SEQ ID NO: 63312 - DNA, 681 bp, Heterodera glycines
atgatatttgaaaatgaaagggcatgggatgtggtcgatcgttggctaaatgcccattatttttctttggaatacggcaacacaagaggtgaacttgaaaaaattgaacaaatgctgctcattgcgaaaggggcgattgtggaagacgcatatttcgacattcataaaattttaagtgtgccccaattttttgacgcaccccaaagggtggaaagcgatgaagatattttaaaaagtaaatatttattaaattctttcaaccccttcaaaaggggggtttattcgagggagggttctattcgaggatggggctctattccaggaagtgcggtatgtgagtcttacaattagcccatccccactcgcaacagaaaacagaaaatgaaatgctctagctttttaattgtataaaaacaatgcttttttaaagaaaattaattaatgatgcaaacattttattataataaatttcatgtttttgagcatttttttcatttttatgaaactttgaaaaacgtaaaaaatgggataatccctaattttcctaattagaggcgaaaagtcaaaatatggatttctgcggagtaatatctcatcgaaatagaaccgcagaagaaattaatactaatacttaaaaattcattcccgaatataattagccaaaggaaatcagttaaatca

SEQ ID NO: 63313 - DNA, 317 bp, Heterodera glycines
atgcatgcaacacagctaacaaatttggtcggaagttattatcattattattttaattcattgtttgtaaatgtaaatttatatgaatgcctctatctacctatccgaattttgcaatttacggaaatagatctacttcataattctgaatttcactcagaaatttcgcgtttaaatttttttttcataattagtaattttatgcgcctccgagatttcgcttttcataaatttttgccgggttcagaaattcatggatgtgccatctgcataaattgtaaaccccaaaattcgtttaattttaggaagattgttga

SEQ ID NO: 63314 - DNA, 388 bp, Heterodera glycines
atggtactccctctgactgctgccctatccaaactgctaaactgtaaacccgaaaatttagcagaatatttgaacaaccccgaggcggtgaacaaagcgaacgcttacctggccggcaaaaaactcaaaacaacctaccagggtcgtgattccaagaccaaagaggtcaagttcggcacattttcggtgaaagccgctgcggaaacctacgcctttgagggatttcttggcaagtttccaaaaattctgtttcggtccaacaccatgcgttcagatgtcaaagtccaacagtatttctacatgaagcaccggatccgcctactgtaccctcagctcaagtgcattgttgagtaccacaacaagggccattgcaaatactacccattgg

SEQ ID NO: 63315 - DNA, 2994 bp, Heterodera glycines
  unsure (1)..(2994): unsure at all n locations
aagagaatttggaagattggtcaatcacaggcaaacggagtttgactcagaaggcgcttttccattacacggaccgtcgggcgggcaaaggctattccgactttggtttcgtttcctccccattaattcccaaccgaattcgactctttcagccaccaccctttactacggtcgcccttacatttggccgcccgttcgcgaaattaaccgatggcactttttcatttgtgtgacctttgccctggttattctcgtcgactgcaaatggtgagcagaattggttgttttacaaacatgcggatttttgtaaaaaaatttttttgtacgtaatcgaaaaattctgaaattttgcagacaaatagcacattaaagtattatctgcaaaatttcaagtctttctaagaactacatactgacaacgaataagaaaatcagctttttcaaatttcttgataggctaatgacttaaattcccatccctattcataagatttcctaaaattttcctgcgcgccgggtcttattttaccatttattttttgaaaatttgaacccaaaatgtcgaaaactaaaattccggctttcactgtttcatgtttcttcgcccttttaggtttgtttcgtccttcgaattgtttcgtccgcccaaatcggaagccgcgactttggaaggcgacgcggtcgaatttgaggatcggaaaaaacttcagcttcgacgaatggtcaaatttagtttaattcccttggaaataatcagtcaaaatgatttatttcttaattaggagaggcgaaataataaaatatttgcaacaaatcaaaacacaaaaaatgaatgtttttcgggttttgtttaaattttaagtgtgtgtanncacaatctaaatatactgtttttcattttatggagtcaatgtcaactcgtacaataattattagtttttcaattatttccgttggagaaggaaagatggggattgggatgcaaattaaaatgatttgttaagagattttgtccaaaaattgttcgatttttcactttcgtcgtacaaaataatacgaaaagcccctctcgttgcctatgtttttcgtacttcgccttttaagcccaaaatgcgtcagaaagaggcggcggtgacgaggcgaccgatcgctgtgccattgggcaatccccgcacaaaaagaaacggaaagtcggctttcgcgaacagcgcgtcgtccaatacgaagttagacgccgaatgttcgaactttcgcatggacgcgtttcagaatcggattcgtgcctattcctcgcccgacaaaatctttcgatatttcgcgacgattaaggcattgccgaccattcattttcgttgcatttagtagattcggtttagcttcactacgaagacggctctttcgacattttcatgacgccggaggatttcgttcggtcactgaccccgggggtaattcagccgaggaaatacgggttggacaagtacaaagtgtacaacgtagaagaggtggtgaaccgatggggggggggagtggacgagtgagactttcgtcaggtcaaagagcatttgccctcgggggacggcgttttcaattggatgagcgactctggcggactgatcaatttcggcgactatctttttctgatgacccttttgtccagttcgttttttcgtcggaatgccatttcttctccctcttttgccgttgtcagcttcacccagcgaattcaaattggccttccatgtttttgatcagaacggcgacggagtgttggaccagcaggtgaaaagggaagaaaatagaggaaaaaagggatggaaaataataggaaaaaacgaatgatttgaatgtttacgggccacttattactcactgctgaataatgacccccaaaataaaatgagttttgttttgaaggagttcgctcgggtgcaggaattggtgctgagtcagtctaacattggccaaaggcaccgcgaccacaaaacgggcgccggcgcatttgtgaagacgaaaaattcagtgaatttttaaaggaaaagcgaaaaaataaccgagtttaaacccaatcagatgctttccaagcatttcttcggcgaaaatggacaaaataagttggacattggcactttcctccaattccaggcgaataaattattttctttttatatattttgcattattttagcagaatttccacggggacattttgaaaatcgaattcgaaagacgcgaccccgagacggggccccgagggaatcatttccgaagtgtgccgaacgaagccctccccctttttttctttaccctccgcccctttttagctgtcctttgccgaattgctgatgatccactcggacttgccagagaagcggcaaaagcgaatgctgaagagagtgcggagacggcaaaaggaattggcggacaaaagggtcaattaaaggggcagcattcacaattatgtttaattaattaatgagtaattaattaattgtttcttatttgttttgccattgtttccttttgagggcgtttcctttgaggaggtggacagtttcttcgccttcatttaccacattgacaaagtcgacttggccctccatttttacaaattggccgggaaaccgttgtccaaacaacttttgcaggcaaagtcaaatgattttaattgattaatattgtgaattatctcttttcagagggtcgcccgcaaagtgacgggcgtcgacctttcggaaacggtcgtcgacgtcgtggtcactctgttcgacgaaaatgcggtgggcaaaggcaacggacggacagacgacgcgacgcattcaatcggtcgaattttaggacggcgaactgtcgcagggcgaattcgtggccataatgaaaaagcgaatgcaacgaggcctggagaggccgaaggacaccggccttttccgactgatggacgcgtactggcaatgcgcgacgcgattcgcaagggacgacggacaaagttgggga

SEQ ID NO: 63316 - DNA, 800 bp, Heterodera glycines
  unsure (1)..(800): unsure at all n locations
gttcaggtcgaaattcagttcagcgccaaaaaggcgcccattatggttttatgaggggggagggcacgcttccgacttcacgggaaaatggatntggtgagtaaaaaagcgatggcaaatgccgaaaatgtgccgttctgtgaatttatttgccgcgttcagttcgtccgacccgaaaatgcgacccaacggagggaattggtgctgcgctcggaaacgacaatgacctccaatgtgaacctttggatcgaagtcagtcggaccaacgcaatcttcggcaccattcattcaaatgtttttagcgaagtcaaatcctcggaaatgccaccgttgagaatttggacttcaaattggtgagcacgaatgtgcgcgatgttgaccaggtgggcaaatgaatgagaagacggaggggagagggggaggggaggaaaggatgaaggagaatggaagaggatgaactgggggaggggggaggaccatcggcttttcgccccggcacttccaacacgaattccatttgaagagcagcttcgccgacctcggcttatttggggcggaatttctcgagaaattgctgaccgaaattctccaaattggccttctgttgccctcaatgcgtggcgttgtgctgcgcagtccaaagtttgttggcctctgtttcggcatttttgccaatccgccggtttagactgactgtccacgaccgatacatccgagtgcaaacgtatttcaaattggacgaacaatacgcggagaaactggtgcagggggcggtacggcaaacgctgctgaacatcgga

SEQ ID NO: 63317 - DNA, 1994 bp, Heterodera glycines
atgcccacggggttggcttatctgcgcgaaattggcatgaaagtggtcaacgatgaaatactcaaaatcaggtgccgaaaccactctttggcaatttttgcaaatgtcctttcagtttgccaaccatcactgagtccatcgacgcgggccaagtaattattgcaaattcacttggcaaactttcccccccttttttggtgtccattttcaatgcttacgtgtcaaagtattggcccccggtggagtacactttggaccttctcactcccgacactttcacgtggcgaatgtccaaaatgcatttgaggtgactgataattcatttttcaatttcattgtgccaatttgtctttttctgatcgaatggcaatttcgacgcccgtctcaacggtgcccttcttctgccgacagtgccaatccaaggtgaactaaccaacgaacgatcaaaccattgaatggccctttgtcttcaggcgaattcgaagctttgctcggccatctcggcctcacaatttctgtccgaatgcttaggtaagtgattgctgctaattggacaattagcaacggattagcactcattttgcaagtggtgattttgaattttttacattttgcattctgcccatagtgaagaagcgcgatcggagcgcctcaggtgcaaatgattttttgccgtgccgcggttggttacgtcgatttgagcgtacggaacagcggagtgatcaccgactttttcataagtgacctttttcttccgtcggatgcttctttattttcaatttcaattcagacgtcttcaaagcctttctcatcgcccattttaaagtgatttttcatttttttcattttttttcttttttcatttatttttgttttaagccgacggtggaacagcgaatttgccaaatgattgagggcgtaataaacggcgatatgaatgccgttttggcgacgatgccactgaaagtgagcaacagaaagaattcgaaaggaccccaattttcgaacattcgtccctaatttgtaaggtgcgcatcaatgaggacaatttggacttaatcggcagaaacttcggaattagccccgaccaaagcaaaaattcggagataaaaatgtgccaaaagacttttaattttatttaaaaaaataaataaattacagatcaaaaaaactgcaagcgccacgcaatttcacactgctcaactttgtctctcagctgagggacagaaatttggtgctcgacttttcactgatcgacgaccctttcgttagtcaggtaaagacagagggagagagaggggcgaagatggagagcagagagaaagaaagaagagatgagagagtagagagagagagggcgggcagggaaggagagaaaatactattaccgtatttacggtatttgaaccccccccccctgaattacaacgccccttttgaggggaggttaaaaataaaacccccggtggttctaataccgtaaatacggtaatttggtgccaatgaagtcattgccatttcaaggggacagttctgatgaaatcgcacggcgaaatttcgtacgatggcctcggggaaacgccatttgcccctccgaatgttatcattccgcaagcgcagggcaatgaaaaaaaacatttattcttcacaattttcaattttaggcgtttttatggccgagttttttgggactgattttgtcgccaattcgatgctttaccacgcattcaaacaaaaatatatggacgtggtggttggccctgaagtaatttccccctaattggctaccgtatccctccttctcttacggtaattaagccctaattgccctccccctcattttctcagtcatcgccacaactgaaggatgttctgcttacgacttgctcctcgggcttttgcatcggcgaatatttgggctctctcggccaacaattccccggccgtcaggaagcagtttgctaatcacttgaactatttttgaatttgcgaaa

SEQ ID NO: 63318 - DNA, 118 bp, Heterodera glycines
atggctgaaaatatctttgaccaatttattgttattgacgagaaagcattcactgattttataagcgagatggacgaaatggattgttaccgtcattataataacagttgtgctgact

SEQ ID NO: 63319 - DNA, 701 bp, Heterodera glycines
tatttaaatccattccttcgggggaccgtgccgggtgccgcggggtaagcagtgctggttcgtttcatcacggcaccgaaccttttggctagtcagcaatcgttgcttaacttgccagatcggacgggtgcgcatgattccactgttccaagcaccccaccaaaagcaaaacgatataaccaaaatataaggaaaaattttttaaaaaattttttctccatcttcctttttgatattaaagcatcagagtgctaaaattaagttgtaaataaaatttggtgcgctttagagcactttctgaaaaaaatatttatgaaacaaaaaaatcgattttttcaagtgtccgtttggggtactcaaacaattatggggagcaaaaatccaacgcagaattaaagtccaggctatagggaagctactcccgaaggattcggtctccccataaatctgggcgcatcggttcggggggactgccccgaaaacaaaaaaaatcgattttttcaagtgtccgtttggggtactcaaacaattatggggagcaaaaatccaacgcagaattaaagtacaggctatagggaagctactcccgaaggattcggtctccccataaatctgggcgcatcggttcggggggactgccccgaaaacaaaaataaatcgattttttcaagtgtccgtttggggtactcaaaccaattatg

SEQ ID NO: 63320 - DNA, 323 bp, Heterodera glycines
  unsure (1)..(323): unsure at all n locations
atgtttttgtgtttattccttttaattgccatttcaattattccaaccacaaatggctacaaaatgctcgtctacagtccgtcagtaagcaattcccatctgatttcaaatgcccgggtggccgatgtgttggccaatgatggccatgacgtggtaagaaattggcattttgattataatggcattttctgcgcacaaataattcaaaaaaataaataataaatttgcggtattttcaaatcgtaaattattttaatttcaattttcttanaaatgactatccttttcagactctgctcgaaagtcgaatgatggctccgctg

SEQ ID NO: 63321 - DNA, 150 bp, Heterodera glycines
gtgcggttgtatgcctgctgtggattgctgctgtgtcctgcttatccacaacattttgcgcacggttatgtggacaaaatacctggttacccaggccgtgccggcacgttaaccgggctgcatccgatgcaagtgtgtcgctgtcgacga

SEQ ID NO: 63322 - DNA, 722 bp, Heterodera glycines
atgggcgaaacgtctgctggacaggaagaaaagccatctagcgaactggatgatatgcaaaaataccttgaacaattgccaaggacaattgagcaagtgccagaaacgccaagagaaatggacggtatgccaaaagacccgaaacaaatgccaagagagttgaatgagaaagttgcccaaacgccaagagacgcgtacgatattcaacaataccttgaccagttgccgaggaccattgaagatgtgccagaaacgccaagagaaatggacggtatgccagaaacgctaaaagaaacgggcgaaacgccaaaagacccgaaacaaatgccaatagatttggacaatgctcaacaagagctgaaccaattggcaattgaaaatgcgccagaaacgcgacgagaattggacggaatgacaagagctgaaactatgggaatgcttggcattatgccaaaagaactgccgaaaaagccaaaaaagacaagaaagatgagtttgccagagcagttggccatccctccaaaagatttagaaggaatgcaaagcgaacacgtcgatacgccaagaccagaccaaaaatatataccggacatggaatttatgaaataccgtattccatacggtacagagacaccaaaagtagatgataataagcaggaagagaaggcagaaaaggtggaagagaaggaagaaatggaagaaatggcggaaaagcacaaaga

SEQ ID NO: 63323 - DNA, 1253 bp, Heterodera glycines
atggaaaattataaattaattgacgaatggtcgacgatttgcgaaaaatttggatttacgaagaacattacggaatttcggatcaattcggatgtgagacgccctgacgaagcgatgagggacgcaatcgacacaatgattaaggcggcttttaagactacggaagaaaggatgaagcggaaagtgcggatgtttggagtggcaataacgggtgccgggcttgcttccccggtttgggtaccgtacagggcgtacccgcagaacaatgcggatgttattatgcaggagattaataagttggggcagagcggggacggagatgaaaataagaaaacgcttttgttgtcggagcctattatgatgaaaattacttgcgtcacactgcccagtggagacgggccgaggaatgtacataaatttgatttcggatttaaggaacaccaacggataaggtaagttttttgagaaaaaaaaaagaaaaaaaggaaaatagaaaaaaaaagaaaaaattataattatttattaaggatttcgaatgtggataaattttgtttgttttacgcactggcgtcgtcgatgaattatttaattatggaccgttttgcatttaatcgatttatgaacaatattatgagacagagggacgcagctactgagcttttacgtaattgtggaattgatattaacgaatatagctatggagtggagcacttatcgagggttcagaattatttggtgggttaaatgaaaaagtgataaattaatggatttttcaggatgagatttaccccggaaagtaccgagtggtggcatttgaaaagtcagctgatccacggaaatcaatccgtgttttgtggaagggccctatgggacgcgaaaatgtagtgccgatatttttggagaatggtcactgggatggattaaagaaatatgtttgctttttcaaccgtgggaggaagttctgcgttgaatgtgaatgtttttacgatcaggatgtttatcatacgatggattgccgggcgagatgttattactgcaatagagctggaggaatgccgtgtcaaaaggagagtggagtgaagattgaatgcccgaagtgtcgacgttacttttataattgggaatgctacacctatcatcagggacatcagacttgtaaattatggaggcgttgcgttatctgtgacaagacttatcgatttaacccgaagaaggaccatgaatgtggagagacttattgccaactctgtagt

SEQ ID NO: 63324 - DNA, 373 bp, Heterodera glycines
atgcacactttcactggttgtacaaggcgttttgcactagtatcgtctgccggttgcggagggaagctcagcagcgagcagttcaacatgacgagatacccggcgagtgcacatcaatcagcgaccggtggtgctgaacccgttgaagccgttccattgccaacgccggctgtggtggcgactatccgtggtcgtcaacacgttcatggacccggaggatgggccagcctcacgtctcgccctttcggcacatgccattggcaacctcagcaactttttggtgccattgcaaggcgacaaccggatggagggtgtaccgttggagaacggcgagtacagcttccggctgcacgcccgggaccggatgggccag

SEQ ID NO: 63325 - DNA, 497 bp, Heterodera glycines
atgtttgcaagggtgagtgacgaaaaaaaataataaaaaaaaaatttttcaatttttttattgctttccagacttaccatgaagagttgaccaaccggtttggaggcgactattcacactcggtgctgctgaacaaaacaggaggtaattatgcaaatgtgaaaatagggctcgcgattttctggaaaaagtgtgcctttttgaagagttggttaattttttaacctatcccgctaaaattttgcaattttttccccggcaacgcataccattggtccttcaaaaacaagtttttttttttttaaatcgggtttgtttttgtgtataatggatgattctttaaaaaaaatttccatttattttttgcagtgtgcagctttgccatccgacttttgcaattccggaagcaaatggacaaactgaaaaccgtacaagcaaaggacttaatcttttcggtgggctatttttttggcaattctaatatattttttctttaa

SEQ ID NO: 63326 - DNA, 234 bp, Heterodera glycines
atgctcttataccattggcaactacaacaagttgaagcagttcgacgccttcttctgtccgctggttggtgcctccgttcttcttccgttgccgtcggtggtggtcaatgcgttcgaccatttgcaacacgcggcggtggccaaaaacgcgtcagtgatgatgaatggaaaacggagagggagcagtatcagaagtacgagcaacacaaccagcaacagcagcagcagccgagg

SEQ ID NO: 63327 - DNA, 198 bp, Heterodera glycines
attctgctctaccaactccaatgctcggagaccatcggcaactacaacaagttgaagcagttcggcgactcctttctggtggaggcctccgttctgttgccgggccatgggctcgagcacttgcaacaggcagccaaatcggtgaaggaatttgcggaccaactgcacccgttgtgcaagctgagctacgtggactat

SEQ ID NO: 63328 - DNA, 656 bp, Heterodera glycines
atgggtaaaagaaaggcaaatcagacaaaacggacacaatttttgggatttacctatttatctttttatggctatatggaaatagcaactatttttccattttggctatttggtccaattttatgctttgaagtttgtccaaccatcgcattcccttgagccatccgatccgaatttgcaattcgccttttcgttgtgcaaaccaaatcctacggaagaagaatatgaacggtatttgaatatgacattttttgtgacggtctcaatttaagtcttttaaaattatattttatcgttttcaaaattattccaggcttttccccaaaaaagttgacaaatatgtgttcccgactggcggttcatgtgcaggattgggcaatcaaatggtactctacagtataatgtattgtaatttacagtagagttgggcccccgaccccgcccccgaccccgaaccccgacatttttggccattttcggggaaaaccccgaccccgaaccccgacgcttccaaccccgaaccccgacccttaaccccgatcggggtcggggttaaatatacacccctaagaatggaatttttgtgggggaaaaggcaaaaaagttataagaaatttgaatttttttaaccattttgccaaattttattaaataaa

SEQ ID NO: 63329 - DNA, 154 bp, Heterodera glycines
atggcgcgtttgttccacgcacaccgattgtatgaatggtaagttttgcaatttattattggcaaaaaaattttaaattttcaaagttttcaggcgattatcacaacgtggcactgcacacgcgctattttcagaacgcaaaggaattgcttaa

SEQ ID NO: 63330 - DNA, 58 bp, Heterodera glycines
aggtcaaacaaatttctgtctctgaaattctgccccgcacttccgacctgatcttcct

SEQ ID NO: 63331 - DNA, 768 bp, Heterodera glycines
atggaccatccattcgttgtacagcttccgaattgcttctttgaagggcgcgttccaaccagggctgcacgcaattgcggattgcggattgcggattacggaaattgcgggctttttggacccccgtaattgcggattgcgggttgcggatttttgggatttatccgcaattttgatccgtaatttgactattggattatttttcgagacgatttcttgtaagattattttttataaaatgaatttttttctatttttatttaaagaaaatatgtacatttgtttaaattcttatttctttagcaatttaaaaatgtcaaacttaaatcctggtaattggtggtattattttgagcgtcaaggcaaagcaactgctaaatgtaacccccagtccatctgccttggagacaagacaaaaagccgaagttgaagtaaatgaatatttgctggatccaaaaattaaatccagggccgatccatcattatactgggaagtcaattcacaaaaatggccaatgattggtgacgttgtacggaaatttctttctccacctgcaacaagttcagaaagtgagaggcttttctcaacggccggtctaatttcagatgacttgcgaaagagtttattaccagaaaatcttgcaaaacttttgtttcttcatcacaatttgcttttaaccggtttctcaattgaatgattttgcttttataaatttgctttttaatatgcttttaaattgctttaaaagatttataggattttttaaa

SEQ ID NO: 63332 - DNA, 925 bp, Heterodera glycines
agtacggactataagaacactttgtttgtcggcggttccggcattttgaacggcgcgtgtgatgtgaacaatgacaaactgaaatatttgatgacattgaagaatggcgtgaccatcaaaaatgccattcttgacacgcccggtttgggcatttactgcgagggcaattgtgtgctggaaaatatttagtaaaaatttaaaaaattccttactattttctttaaattcaaattatttttttaataattctagctacaagcgattgtgttaccatgctactgggttcgggtataagagcaccagcacttcatacacttaccaagtgattggcggtgctggccaaggttcacctgacaaagtatgacaaatcagaaccaattagcaataaattcaaaaataattttgatagatttaattcataataatggtttccttgttttaagtatttcacccaatcgggcaaaggcactaccatcatcaagaatttttgcgctgaaggtttaaccccctctctctctaaaaataaatcgaaaaaatttaaataattcatgttttaatttcattacaccgttcaaaacgtctaattattttttaaaaacatttttcgttttaattaattaaggcaaatacggcaaattgtggtgttcatgcgggaattgtccgttccaaacggctcgtaccgtacaaatttccaacaccgtccttaaggggcccggactttcggttgtctgtgagttgaaaatcttatgaaaaatatttattttaaaaaaaatagaaaatgctaataaattcatttttagcgcttaattccaactacggtgacaaaatgtcactttcgggactgactttgcatggccaaaaatcagcgagcacaaaaacgtcatacatttgccaagtaaaacattcaaaaatgttaattatttaa

SEQ ID NO: 63333 - DNA, 129 bp, Heterodera glycines
acgccatttctctgttcactccgctgaacacgccctcaaaatgggcgccaggtcatccacgacatgtggccgtttgccaacggcagttacgtttcgggccgggccgtcacaaagtcgcgggaagtccag

SEQ ID NO: 63334 - DNA, 411 bp, Heterodera glycines
atggggttagatgtggaacattgggctcagtgtgaactgctcaaaaaagctgagaaagtttgccgccgtgtgcctaattcaattcatttcagagggcttttgatgaagtaattgtgcaagagtaatagcgaagtgtagatggaattaattacttttaaaaattcgttaaagaacagtaaaaaattaaaatttgtttgtttaactttgtttgtctttttttgttagattgtattttagaaattaaaaatgggtataaatttaattaaaatttataaattatgaatttatttagaaaatatggatttacaaaaaagatttaaaatgcttgggttttaatcaaaccaaattttcccattaatattatcataatttaattgggtaggtaaaaagtaaaatgattttttacagtaa

SEQ ID NO: 63335 - DNA, 786 bp, Heterodera glycines
  unsure (1)..(786): unsure at all n locations
atgattaaggtgaaaaaattcaaattttactntaagataaactcttaatattttatttttgcacagaaaacaaaggaagatgacaattgcaaaaaattactgtgtgctttgcattgtcggtacaattgctttggttatttgaagaaaattgttgtgctttttgaacgtgtttgtctaaaatacgaacaaaggaagttggagccgtcctttctttttgaactttgtgttgagtctgttctgccgacaaagaaccaacaacagattttgtcttgtgagtgccattggcaaatattaaaacaataaatcttctgtttcagctctcagtttacgccaactttgtcttctcaattgcttggtcaagttggaatcatcggggtataaacaacgcatcgatttcacttaccaagaaatcgcaaaaggtgtctcatattattttttgtattagtattttattatttaaaaaatttttcagggtatattaaattcacaaatgactatgagaaatcgatgcgagtgtgcagttttgtgctgtatagagacttggacgaattggccgctagtggcgcactgagtttggcgaagggatcggattttggacaaatccaattcaagtgagaaatgttggcaattgtgaagatcattggtcccaaaattttttaatttaatttttttatcttaaaattttttaacacttttctgggggtgttttgaggagctgagcacgaatccggcctccatttcgaccaattccgaatccctaacccgaactcgaacatttttcgagaa

SEQ ID NO: 63336 - DNA, 56 bp, Heterodera glycines
gctatagggaagctattctcgaaggattcggtctccccataaatctgggcgcatcg

SEQ ID NO: 63337 - DNA, 57 bp, Heterodera glycines
atgggcgacagaattccgcccgcaaacggtgcagataaagagccggtgacaagtcgg

SEQ ID NO: 63338 - DNA, 183 bp, Heterodera glycines
cgagagggctttctgagggcactgaacgaaagcggacttttgctggaggagcccgaggccatcccccacactcaccttaacgaccccaatttggtatgggaaacgtttccaattcagcacaaccgagctgacaaattggacgagttggacttgagtctggaaccgggcaaaggcgtttgctga

SEQ ID NO: 63339 - DNA, 383 bp, Heterodera glycines
atgccaaaacaaaacgaaatcgttctaaaatattcctttctggacttgacttggtttcttgatatcgaagctgttttctacgctatttctaaaacggttataccaaaccccagatttttgaatccggttttcagaaaaaatgccttgtggtgaaaacaatatttcacatttcactccataactttgtgagttcggcacggatcgagaccgggataagaccattggaaagagcagctcgagctctacaagaacgtatggaaagaaaaaatagttatttctgggactttttcagaaatcagaattaattctccaatgtggcccaaattttaggcccccagccacagccccttgcttctcccagttttaagtcttggatttgtcaa

SEQ ID NO: 63340 - DNA, 383 bp, Heterodera glycines
atgccaaaacaaaacgaaatcgttttaaaatattcctttctggacttgacttggtttcttgatatcgaagctgttttctacgctatttctaaaacggttataccaaaccccagatttttgaatccggttttcagaaaaaatgccttgtggtgaaaacaatatttcacatttcactccataactttgtgagttcggcacggatcgagaccggcataagaccattggaaagagcagctcgagctctacaagaacgtatggaaagaaaaaatagttatttctgggactttttcagaaatcagaattaattctccaatgtggcccaaattttaggcccccagccacagccccttgcttctcccagttttaagtcttggatttgtcaa

SEQ ID NO: 63341 - DNA, 778 bp, Heterodera glycines
atgccattccgtgggccattagcgacgaatgggacggaactgacacagcaacgcaaccaccaccaacaacagcatcaaatgttcatgcaggtgaacaaaatcggatgggaatgaataatatggcaaaggacaaaaaattatagcaaaatttgctgaacgatcgtcaccaaaaccaccaacagcaacagtacgtgcttcgactggaacaagttccggtgtacaacccgcgccttttcgccaccttagaacagtcaaaaccgttggagccaccgccgccgtatgaacaggtcgaattcgaatttttctgggtccattcaaaagcgtaacagggaatcaagaaaaggggaaagcgaattgtaagggtcaaaaattcgacaaaatgtaatgttttcaaaaaatcaccgacaacgcctttcaggtgtcattttactttcagtttgccaaaaaaaacttagatgtaatgggtttaatcaaccgctgttttcttatccaattggtgttgcttatttcactccttttttaggcaattcggtgtccacaacaccaacaacaacacaaccaacaatgcccaccaatttattctcctgtacaaatgaacgaggccaacaatgaaaatggaagggagacaaatgggaacgaaatgagaaatgctgacggaatggacagagcaacacaacggcaaagtgatgacgaactccttgaacttcttcggttgaggaggcaaccgacggatggcgacggagaaagaagaggaggagggacagatggaggaccatga

SEQ ID NO: 63342 - DNA, 1286 bp, Heterodera glycines
atgtcgaaagaatttcgtcgattcgatgatgtacaacttcgacttcgttcatttgatgaacgaatgtccaaagtcggcaccttgggtgctgctttattattttaaaattaatttcgaattttaattcccttctttgttaagatgtacctcccgcacaaattgtctcctccactgtccgtccaatctctgccaaatcgacaaatggcgacagtgccgttttggtgccctccacaacgatggcaccaccgtttgtctccagcacagccgcaacatccgttgagagacactcggcggaatcatcggaagaagaggagacggacaaacgtcacagaaagggcaaaacgccattgagaggtacggacttccaagccaattaaatcacaaattgcgaaaaagcaatttcaggcaatggcggactgagcatcagtgccgtttgggagggagtgaagcgaatgatgggcttcaccgccgactgccataacggtttgtacatttttccaaccaaaaacgatatatatgcatttttatattataaaatgaaaatcgactgggacctgctctaggacatggagttttcctggaccaagaggccagacaattggccattttggtttttctttcgaggggctggcttctctgggttttttcctaaattgccgttctccagtaaacgccccttttctcaattgtcaggcggttacaaaaccatcggcggcgattgcatttgcccccaatttttcgagggccatgcctgcgagcgcattgtctgcgccaacaacggcacgcgcgtgcgagtggccgcgttcggcggggaggaggtgtgcaagtgcactcatccccagtacatttcgggcaaacactgcgaagtggtgcactgccaaaacggtgggaaaagctcatcatcactgggaaaagcgattttgcagtggacgtattttctctttctttgccaggggggcgccttctcaacgacggcacgtgccattgcgtggacggatggtacacgggccaattctgccaggtccgttgttcagctagggccttttgatgggttctttttattagggaaggttttcctcatttcttttccattttgtcttttccctcttttaaagccaccctttctttttcagttttacacttcctcgtggctaatcgcctttggcattccgttgttggtcatcgccgccatcgtcttttgctgtgtgatttgtcgcttggatttgtgcgcattgcgccgtccttcaccgcctccgtcaagccgtcacaatcgaagttcgagctaa

SEQ ID NO: 63343 - DNA, 756 bp, Heterodera glycines
atgaaacgtcaaaaatcattagcacaccgacgaagatcacaaaaggtttccgtttcaacggtgctgcaaaaaccgttgaaggtttctttctctttggcactcactaagccggactcatccagctccgaaaattgttcttccgatgagccttccatttgcaagaaaaaacgacggagtcgccgggtcaaagtgttgacttttgtattattaatttcgtttgttttctttacaattttaaaacttttaagctaccagtaaagcaggttgtcattccgtcctctgtcaaaaaggagacaaaaattcaatcgcttccaaaggaaacaacaaaaagtcaaaaacccaaaaaggaaagccaaacgcagccaaaaagtcagaagaaatctcaaaaggaacatcaacaacctcaaaagaaaagtcaatcgcctcaaaaagaaagtcaaacgcctcatccgcctccgatggaggggccgtcggtctccgctttggtgccgaacactgcggactgcaaaaggcgcgttaattttggcaacgtggaagtgttcagatttgaatttgcgcaagggcacgacactgtgccggccaaaggaggcgtctctttgggtatttttaccttttactggatactccttaataattgatgttcatacgcaattcccatagccaaaaaaattttggtgaggattttattcttaattttattatttgttcccgaaaccttttacaagaattagtagccgcttttcgccaaaaaagaga

SEQ ID NO: 63344 - DNA, 868 bp, Heterodera glycines
atgcttcacaacacggtgattgaggtcatctaccgagtgtgcaaagagatggcaattcgccagcacaaggatctcctcttcggagggaaaacagtcattttcagcggtgacttcaaacagtcgctgccggtcgtgcctcatgaaggcttaaccgctcaggtgacagcctgttttcaaacatctccattgtttggtcaattcaccacgatgaaattgaccatcaaccagagattgggcaaaggtcagcaagcgtacttgcaaatgtgccgccaaattgggctcggagaaaccggagagcacttctggattcctcggcagttcctcgttaagagcaaggaagagctgatagactatgtctatcctaacttccaacaactccttggcaatgacaaggagctgctcaatcgtttgattctcgctccgcacattgacacgtgcgacgaagtcaacgacatcatgatggcgaatgtgccaggtcatatgcgggaatacttgtccacggataagccccttgacgaccgcccactggacatcgatgagatcgagtccgaagtggctgcgttgaaccggcgcacagactcgggcatgcccccacacagtctccggcttaaagtcggatgcgtcgtcgtccttcttatcaataaaagtgataaggaaggactgatcaatggcacccgcatagttctggaagaacttggcgatgatcgcctcattggtcgtgttatcaatagcaatgctattggcggccaagtgaagttctttcttgaaagaacacgaaatgtctatgaagacaaatcgcctggcggcataaaatatgagcgtttgcagttcccaataaagcctgcattcgctatgaccattcaaaaag

SEQ ID NO: 63345 - DNA, 802 bp, Heterodera glycines
cccaccagcatttcaatcactggggactcaacccaccagcatttcaatctctgggactcaacccaccagcatttcaatcactgggactcaacccaccagcatttcaatcactgggactcaatccaccagcatttcaatcactggggactcaacccaccagcatttcaatcactggggaactcaactcaccagcatttcaatcactgggactcaacccaccagcatttcaatcactgggactcaaaccaccagcatttcaatcactgggactcaacccaccagcatttcaatcactgggactcaacccaccagcatttcaatcactgggactcaacccaacagcatttcaatcactgggactcaacccaccagcatttcaatcactgggactcaacccaccagcatttcaatcactgggactcaaaccaccagcatttcaatcactgggactcaacccaccagcatttcaatcactgggactcaacccaccagcatttcaatcactgggactcaacccaacagcatttcaatcactgggactcaacccaccagcatttcaatcactgggactcaacccaccagcatttcaatcactgggactcaacccaccagcatttcaatcactgggactcaacccaccagcatttcaatcactgggactcaacccaccagcatttcaatcactgggactcaaaccaccagcatttcaatcactgggactcaacccaccagcatttcaatcactgggactcaacccaccagcattccaatcactgggactcaacccaccagcatttcaatc

SEQ ID NO: 63346 - DNA, 336 bp, Heterodera glycines
atgtacaagaaggagtaccgattggcggaaatcgatcgccaaattcaattgataatcgatgcgaaggccaaaatccaagaagaggaagaagaagaacaaataaaggagcgaagagcatattcggagaagatcaaacgcgagcggaagagaaaggaaaaagagcaaatggaagcgaagtccgaggccaagcgaaaggaagcggaagagaaggccaaagaaaatgccaaagcagaaaaagaagaatggaaacgggcactccgacgaccggcagccacaccggaagaaaaggcgaggaaagaagcggaaaatgaggcgaggaaggaagcggaagaggca

SEQ ID NO: 63347 - DNA, 940 bp, Heterodera glycines; identical to SEQ ID NO: 33218

SEQ ID NO: 63348 - DNA, 49 bp, Heterodera glycines; identical to SEQ ID NO: 51181

SEQ ID NO: 63349 - DNA, 163 bp, Heterodera glycines
ttgtcacaccaaaatgccgatgatgacgagcagcagcagaaggtcacgctgggcgttgaacgctttgcactgcccgaactgctgattcggcctggcgatgttgaagtgcagcaaatgggcatcccagaagcattgtgtgcggccattgaacggctgccaaagg

SEQ ID NO: 63350 - DNA, 3050 bp, Heterodera glycines
aattctcgactttttgggcacccgcgtgcgtctgaagggcttcgagtcgtacaaaggcgggttggacacgcgcggagacaccaccggactgtacagcatttacacggagcatcactctgcccagataatgttccacgtgtccacaatgctgccattcactccgaacaacaaacagcagctgtaccggaagcgacacattggaaatgacatggcaatcggacggggaagggaaggcaaggcattgaaatgattggactctcttcaggtgaccatcatcttccaagagcccgacgccttgcccttctcgcccatcaccgtccgttcccacttccaacacgtgttcatcgtcatccgcgcttgcaacccgctaaccgagggtgtcacctatcgggtcgctgtctctcgtgccaaggacgtgccaacgtttggccccccaatccccgcaagtgccacttttcaggtagtgccaacaaacaaaacgaacaaagtatcacattcttatgcattcaaattttcgcagaaaagtgccgagttccatgactttcttatcaccaaaataatcaacgccgaaaatgccgtccatcggtgcgccgtttcttcccactattttttgtatttcctcccctctttttctaggtcccgcaaatttgcttcgatggcggcgcgtacccggcgcgaggcgctgaaggatttggtggagaactacgcgggtactgcccattcaaacgaaggcgcgtcgcgcattgcgtcgcggctgttgggcggttcggttaagcgcaaagagcgcgtggtgccgaggcccgtgctcgatgccgcagtccgtgctgcgctctcctggtaatttattagtcgggaaatatataaggtttcgacttacccttccccccttaggcaagtcgacgtgtttgaccattccaccggccaacgtgcacctgccgtgctcggtttgtccgccgacacgctcgtcctcctctccgtaccctccgggctggccgtgttctccacgcccacccattccatcctgggatggatccaagccgccgatggagggttagcaatttcaaagggctcaaaagattaaattacctccaaatccccaaaaacctgaatcctggattggtcactgattcatttctacggatggttaatcattttcatctcgccacctaagttttaagtctcaaaatttccacatttaagtgtcaaaattttctttgaccatggcgatttgctgctgttgtggtgcgcttcccccgatggcagtgagcgcgagttgggactgttgttgaagcgacttgcgtccgtcacaaatggggaggaggcgaaggaggtcagtgaaattccatttccacgttaattaatttccgtttcatatttctaggtcattttgcataagaataaagcacttggcgagtcgttcggtttccatgtccaggaggagggcatcgtcacggacgtggacatgaacaaagtgccaatcctctttaatgactagccaaaaaattatgaatttcaaaataatccccgttttccttaagagtgcctggcgcgttggccttcggcagggctctcgcattgtcgaggtttttttcattaaggcccttttagtttaataaatacgtttggattttcagttggaaaatgcggcttttttcacgttcagcgccgaacacatcgccgttttgttggcggaacggtcgcaaattaaggcattcattcggcagctttttgcttatcatttttcattttcttcagctcacaatgatcgccccggcctctgatggtaatccgagacggggatgtgaaggtaaaacatggaaaagagaggggggggggggaaattccgaaatttttcaattaaaacaaatgacacagattttcaaaattgtctctccgacatggcccggccccgaagagcctcctttttctttaaaaaaaggctaaaacccaactgcattcattcccctgtttacagacccgaattgtcccgccgtccgtggcctcgaatgccaacaattgctctcccccgactcattcgctcgccaaccgttggcctaccagcaaatgtttgctctgcgtgaccagcagcgtcgggtcggctccaaactcagttccaatttgtccggcgattcctggggcaacagcacaccgtcgcccacgtcgctgacggcggtgacagaacgcaaaaaatattcgtaagttaaaaacaaaatggcatttctatttcacattttgcgtttaagggcaccggcgttcggttcggcagtcagtcgcatttaccaattggagagcaatgcgtccgttgactccatccaaacacggcgcggcgccaatcggccacagcacacgtcactcacggggacgggtgaacaacagccacaggtgggactgtctaaatcaattggcgattccattttactcctccccacagaatcagtcggcctgctcctccgcctccacctttagccgtgcccgttccgacgacgtggccaccaaaccgcccgctccgtccgcctccgcaaaagtgtcagtgtccaacttggcaatgtcgctggaggagtcgcttctctcctccaattcggcacccttcgtgcagtcgacttctttttgcgacggcattgcgctgccctccaccacaaaaacagcggcgacactttttgccgaaacgaacagcggcagggaacagcagcaaaggaggcgagtgtcgacggacggcgagctgagcaggtaccagtggtgcctgcagaaagtggtcgcagagaaacgggagctggaagccgagttggaacactgccgtaatcaactcgtggcggtcagtccccccaaaacagtcgatgatcatcaaataaccctccccaattcaggaacagcgtgcccacgagagcacgaggcggcaactccacatgctcacggagtactgcgaacgcttctcaattgtcccacctccgttcgaggagggggacgaggaattgtgatcaaaaagaaagcctgcccttccccaggcccttccaatctcttgacctttgttctcccatgcacaatattctatt

SEQ ID NO: 63351 - DNA, 138 bp, Heterodera glycines
atgggtgggcgtggagaacacggccagcccggagggtacggagaggaggacgagcgtgtcggcggacaaaccgagcacggcaggtgcacgttggccggtggaatggtcaaacacgtcgacttgcctaaggggggaagg

SEQ ID NO: 63352 - DNA, 1369 bp, Heterodera glycines
tcacaaatgctttaccaaggccgtgaaagaagcggccaatgaaccgtaaaaacggtgacaacatcagcagaaaaagaacaacaaaaatttcagcaaaaagcgaacgaaaagtgccgaatttggaggaagcgaaagccaaaaacgaagcgaaggaagcggaaacattgcggggcattggccttcgtttgggcaccccaacagcaaacaaatgatccctcctgttgcggtgccatcagccgacgttgagcactcgaagatagcacagacgacgaatgcaaaagtgtgaccatacaacggcagggacaattccaaggggagggaaataaaccccaaaggggaaaaaattaatggaaaatcgaaaattaactggccatctctttataattatggtatctccgaaccgtgtcataacagttcgacagttttttattttatttttttttttaaataattttattagaaattccaaatttgattttctaccaagttcttttttgaaatcattgtaaaaactgccattgacccctccgaacattaccctaagctaagaccctgaaattgtctctgcatgccagaaatgtaaacaatgaaaacttttgaaattgaaatcactttttgctctccgcttcagtccaatgtctgcgctgaattggccatcgatgtgaccgccgccgatgcaccgcaacagcacagaaacttgcctcctctccctccccacccaccgccgccgtcctcggcttccgccaattcctccgctgccgttgtttcctcttcaaatttgctccaatgttcgctttcccagccgaccatccacgacagtgtcgtcgtcggcggtgcgttcgcttcgtccatcagtagcggcaacggcggtcaactcgcgcacagcgaatggcacccgacctcggcacatctgtgcgcttaccacgactgccggtcgttagcctacgcgtggggtcttggcacgtcgacgtcgagtctggagacgacacggcctaccggcgcttcacaggtggggggaggggagggcacagagttgaacaagcgaaatgtttgttgcttctgtttgaaggcccaaagtccgtcggaggatgaccccggcgatgggaaatgcaacgatttgttggcaaattgtcccgcatttcgcaacgaactcggcgaagagcccatccgacgcattgcattgtcacggcaaacctttccgaccaccagcagtgggcagtgccaacaacacaacgttaagcaacaacaccacacaaatggacggagacggacaccgccggaggaattggcggagacatggcacagagaacacatggcagcagaagtaccggccgaagaccgttcaattgtcatgtatgtgtcgttttag

SEQ ID NO: 63353 - DNA, 3389 bp, Heterodera glycines
gattctcgatgtgaaagactcggactatgaggtagtgatgctgaaaattgttgtaaattggcatggcaaagatttggttgctttttagttggtcatcaaaattgaggagctgttcgaggaatataatttgttcgaccgggcgatcgtctgctccttctttccgtggatcatctattggattaagcggaggaacagtcacattctcacaggttggaaatggtaggggatgaccgaaaatacaaaccacaatccctgtttttaggattcacttttcgtcgtcggtcagttcttcgtttctcgctttaaataccataataaaacatacctattttccttttaggaacatttcatataccgatctgaagatgacaatccctcgtttctcttctccgttttaccattgctcggcggttgcgctcgatgctttgtacagatggtaaatggagttgattgaccactcaactcactgacaaacctttaaacaatgttttatcatctcttcaggagtatcaaagtctgtcttcctcacttcctcggtgttgacatgttgctcattgaggttggctattttaaattctcataccactgacaaaaaagaaaaatttttttaagcgtggcgaaatttgcgagtgagttgaacgactttcgccatttaatttatgtaaaatgcgatgcgctttcctttttcctttgtcagaaattttgtgagtgaaatggttgaccagggatttcacatgtgcgtgtggactgttaacgacaaaaatgaaatggtccgaattgatggctaattaattacctatttacaagtataaaacgcgttttaggcttggatcgcacataagttgaaaatcccatttcttacggactttccacataaggctcggggggttctggacggagcaaacggagtgcccacggaattgaccttcgaattgaattaggaacataaaatcaagtttttgtatgaagtgtatgtttgtttcattgtatagtaatattgatgtctttaccggtatttatttatttacttcttggaaataaacgcaaaacctaattcttcgaaattattaaaaacgtacgcacgcctaatggatcatttggagatttcatttaatgaactatattagttagatacctacctaagtattttttaaatatgtaaagatttctatcctttttgaggaacggacatgctctagatttttagattatacgtatttttaaaattggcattatgttttactacgagaaaaatcaggaccaaatttcaaaatagcaatgtaggtaattaacattcttgctttccgttatccgactagatatatataatttttgtcatagatacctgaacaagttacctgaaactttgtaaacataaattaatatttttgtaaaagaagaggattgaaacctatttattgcgtcatggcgaagtggggagaaggtttgggattttaaaaaattcattttgtggattgcatacttattaaatttctcccgaaatttaggggaccctcgttggattgtcgaagaggtaaaagcttcatttagacacatttatttggatattggagttagctattaaaaattcgctgctattttgcgcttactgattttttttaaaacgataccttgaacattttttacgatattaatttcggtgcactttccattataatacttttccccattatcataaaaagagagagttcctaaataagtgccattgctttgactttggttgtttcagaggccggatgccacaaatgtgaacaattggcattggttggtctcacacacacatttcatatgcacttctaaacaattgaagggttgagaagaatgccactccttggtctcgggaaaggcttcgcgtgcttttgttgggtcaaaccttggaaaaagggccggtgcgaattgaattttccgacttcaaaaaattggagggcgaagcgacggcgaacaatcggaaggcgaaactgattttcttcttcgagtggtccatcgacgtcaatttcattggtttgtaatttccttttttttgtaataaacgagtgattttaatttgctttttttagcaactgtttctggttccgaaactgagtacaaaggaagtgtggaaattctgaatttgagcgatgagaacgaggcgcacgaaattgaggtagcaattacagatttgtggttcaaatggcaccaaaaaaaacaaaaaatttatgccacagatttccgtgcacattgaaacggcgggcccacatgaaaacgaaattcggcacattctctccaccgatgggctctcattcgtccgttccaaagtgggcacttacgtgcgcgagttgaaggaggagttcagcaaagggattattttgccggtggacagcaaaggcgccattcgtccgcaggcggtggcaacgcaagggaaaacggtggtggacaagaagcgctttcagaatgatatcattcagaagacggaggagaaagtgaccacggcggaaagtgagggggggggggggaataaacgaagttggcgaggggagggaattcggcacggatttgatttatgggtatttaaatctaataattttcgttttagctcaaaacgctctcaaaactggtggtttcgaactgaccgaaacattcaaagtgccgcccgaacgcctttttgagattttgactgcgtctgaggtgtttttttggataaacatttcatcttgaaacctctgattttaagccacaatttgattttaaatcgcatttcattccctccacaaactttcagttggtcagtgtttggtctccgaattcgtcaattgatgcgcgagaaggtggccagttttcgttgcttggcggagtgatgtcgggtcatttcaccaaattggtaaatggatgaaacatcattggcttaatctacattcaaaaatatgaaataagcgcgtgaccgggtcccgagtcggattttgggggatctcaattcacaatcccgcctttttgaaattgcgggattagccgaattaacaccgcaaattgattttaggcaaatgcggcgcttatttcaatggcatggcgtttgaagagttacccatcaggtaaacctaaaagtctgaatccgtttcgcattttccttcatttttaggacattttgcggatgtgacatttacgcttaaggacaaagtaagaagggagaagcggagcttatctttcttttttttgtttctggaggtttcgttttttattttttcttcatttttttgtagggcgacagcaccgatctcgagcttaaggctgaccaagtgccggagcagctgattgaggacacgaagaccggcttttcccgttactatttccaaaacattggcaagaagttcggcatcagtctcaaccttttctga

SEQ ID NO: 63354 - DNA, 714 bp, Heterodera glycines
  unsure (1)..(714): unsure at all n locations
ggcgaagtgaaaattgatgaccacaaagttgtgccgcctaatcgagcggaaatgaaggtaatttntgggatggcaaaacaaactaaaaacatgaaattgtaagaccataagtggattcgtatttttatacaaatttcgaagcaatttagtaaaattcggaaaaaataaattctgaaaaattagaaaactaacgaaactgccgaccctcgaccacctttcttctctctaaaaattttgttttattacttgaaacactcaaagtttggtaggaaatgggcaaagtgattaatctttctttattccaatcgaaaaaaaatcacatctctagtaattacttcaggatagcatggaatcgttgatccaccacttcaaattcttcaccgagggctaccaagtgcccccgggggcggtgtatgtgccaaccgaggcaccaaagggcgaattcggcgtttatttggtggccgatgggaccagcaaaccgtaccgatgttacatccgagcaccaggcgaggcatcacatgagtgtcaattaaattcaaaattgttcaggatttgcacacctttccaaaatccacgacatcagctatatgcatttgatcccgggtaatcgcaacttccccccccccattaattttacatgtttaatctttattttctgcagatattgtggccattatcggcactttggatttggtgttcggagaagtggaccga

SEQ ID NO: 63355 - DNA, 271 bp, Heterodera glycines
atggcgctgggtgaactgcgaaagtacgttaatcatcttgaactgttcgccgacggtgggtgaatcgctgtttttatttagtattgcaattttttcagatcgtcaaaaaattttcttcaaaatcgacattgacatttcttctgtgcccgagtcaacgcctgaagctaggcccgcgttgcgaggatggttcgttttacctttgattttattggctctagtacagtttatgcgtccaatggacttttatgcgtccaatcaattgacaatcccg

SEQ ID NO: 63356 - DNA, 95 bp, Heterodera glycines
ctcaaatttccaattgtttcttaaattaagctgctaactaaattcgttaatcgaagcgacaaaatgaagtggacttacaaagaggagaactcttt

SEQ ID NO: 63357 - DNA, 852 bp, Heterodera glycines
agcaagaatattgctatcttgcctaggcgggattctgacttagaggcgttcagtcataatccctcagatggtagcttcgcaccattggtctatcgaccaagcacatgaaccaaatgtctgaacctgcggttcctctcgtactaagcaggattactatcatagcaacaggtctttagtagggtaaaactaacctgtctcacgacggtctaaacccagctcacgttccctattggtgggtgaacatccaacgcttggcgaattctgcttcgcaatgataggaagagccgacatcgaaggatcaaaagcgacgtcgctatggacgcttggccgccacaagccagttatccctgtggtaacttttctgacacctcttgctggaaactttacacattcaaaaggatcgataagccacgctttcgcggtccgtattcgtactgaaaatcaggatcaagtaagcatttgcctttttgctctacgagaggtttccgtcctctctgagcttgccttaggacacctgcgttacgctttgacagatgtaccgccccagtcaaactccccgcctgacactgtcatcggcgcgggtcgccgggccaccgggtggcccgacttaacaccaaaatggacaccctttcgggcgcactcccgttttaccgattaagtaaggaatcgatgaaagtagtggtatttcactggcgccttgcggctcccacttatgctacacctctcatgattcttcacaaagtcagactagagtcaagctcaacagggtcttctttccccgctaaatttgccaagcccgttcccttggctgtggtttcgctagatagtagatagggacagtgggaatctcgt

SEQ ID NO: 63358 - DNA, 752 bp, Heterodera glycines
  unsure (1)..(752): unsure at all n locations
atgggcttttctggccgtgtctggacaactcatcatcagttggacaaaggacaaaggattaaatttctttaaagactgaaaattacagtaggacaaccctcagggcaaacggtaacagtcatttaccattggttttttgccatttttattgaatcaaccgagcaaaaaggattttaaaaaattggcaagttaaagaaaaactcaaattaattgagcaataattgacgcaattacagtgataaatttttattttcaggattaaagcaatttttcaatattctaatttatcacacaaaactagagttgagcggtaccggtaccggtaccgaccggtaattaccggtttttttggtaccggtaccggtaccggtaccggtttgtctagtaccggtaccgccggtaaaaatttgtactggtaagaatgggggtctgggtgagaaaagagtagggaatggtgaagaaggagaaattttttgagaaaaaaaaattaaattatttattttcatttaaagcatttgttcatatgcataagtggtcaagtggctaaagcttcttattttattatttctcgcttgggttcaattccccactgggatagaatattcttcatattttctttaccattattttaattgaaattttaatttaaaaaaatattccaactttttttctttcattttaagcatcctanaaacccaaaaattaatcaattnggtctttntttacaaattctgttaaacaatcgcattaaa

SEQ ID NO: 63359 - DNA, 543 bp, Heterodera glycines
atgattgcgtcaacgctcgagcaattcaattcgctggatgatcaggaattggacagacgaattctgaatgccggactgccaattggacttggggaagagcaaacggcgaaaggggagaccagtcaagaagagatggaaatactttaccagcaactgatgggcgaggaaaagaaaaaatttactgaattagccgacggaatatttcacgacgaattggcaaatcaaatgaattgttttgtgaagaaaaaataaatggaatgcaggcataaatgcttacatttgttagtactcaaaatattggttaaatcagcaaatcattgtcagcacatttggacagcataatggccaaccgtcgggtcgaagaacaaaggcagacgcttacaaaggagcccaaaaaaaaggtgagctgatgttttttgcatgttttgcagatagcattttacgagataagcaggaaatgtagattttatacaatttcacagaacgtctaatacaaaaatgattttttttagctacccaattcaatttttactagtaaataaa

SEQ ID NO: 63360 - DNA, 72 bp, Heterodera glycines
accattctcaaacttctgaatatgatggtcgtggacgtgggatgtattcttttcaccaacaggacgtgaaag

SEQ ID NO: 63361 - DNA, 807 bp, Heterodera glycines
atgcaagtgagtttcaaccattttaaagaaaaaaatatcaattttcgatttttttagtggattttgactatcatctggagaatgatgtccaaatgtcgccgaatttggacattgacgatcaacaaccgccggcctgggccgcaacagcagaagcgggagtccaatgcgcgacacaaacaacggaagcctcaacccaaaccgactggaacatccatgcttttgggaacagtgcactttgcgaggccaatttcaagctacaacgtcgtgttgcacagctgcggcaacaattggctgagcattttaagcggtggcgggcctatgcatgtcactgagtttttgccacaatcaccacgccgcgacaacattttcatggctcttgaactcctggcaaaactccaatcatttgccgtcgctgatttgctttctgctgatcaaatcgctgatttccgcgccactgctgatcaattccgtgttcacatgttggagcacttacgccgccactgttcgacttcaaaatttcatcatttggtccaccatgcccctgaatttgctgaaaaccatggattttggtgccttctcagtgagcagcctgtggagaaatttcacgcgttgttcaatgacgatctcgcgcgcaaagcaaacaccaaagatctccatgatattttgatgttctgtgctagagaatctgccattcgaaacgccatttttgattcaaatgaactctgatcagtcttttgtagtttttttataagcttattatttatttttgttgttatttttcatacatttttcaattttttatattta

SEQ ID NO: 63362 - DNA, 526 bp, Heterodera glycines
  unsure (1)..(526): unsure at all n locations
atgtccaggaatattgcgcattcggctacgctgaacaacggtgtttttttgagcagggacattgagcaattgcgtatgtcgatgagcagtgtcgaagatgagggaagcgacggaagggctgatgaaatggcaaagttgcaaaaatggctctgtgagtttgttttttgctgctatttataacgaaatttatgcgaccgaaaaaatagaaaataataagccgaaaattgagtatataaggcggtcttttcaacgttaaggacacatttcataacggacggacggctgctagcaacgcgcgatggcagtgcccttcagccttcaagtggacggccttatctacagagtcagaaactccacttacgggcaatttcccttagatgtaattgttttttgcttttcaaaatcgtcattattcttcccttccctttttacaggtgacggagcacgacttacgccagctttgcgatgccacgatggacgtcttccggcagcagcagacactcgtcaggattcaccgcccngtcac

SEQ ID NO: 63363 - DNA, 767 bp, Heterodera glycines
aagtttcattgctcttttagggaattggacgatggcatcgccgaggcagtgagcagtttgttgtgggtggcgcctcgcatcggacacgaaattgcggaattcaaggcatactttgggcaatggcaaaatcagaaaaacaatgccgtggtgtgaaaagcttttgtccacccaagaaataaaatttggtgccaccaaaattacttttgtgtggtataaattggccgattccaatcctaaagaatttaatggaatttttccattttccctaaaaattccttaaacattatcacgcttaactaaataatttaattaaaccaaactgaaaagcatcgtccaaatgtaggtgatcaacgacgaactgacccacaaatacggcaaacaattcgcggaggccgcccgtatgaaccaattgccggagccgagccgagtgtcgcccaaattggtgcagaaattgtccgtcagcgcaccgtccaaattgctcgtcgaaaagtttgtcaccatttatttggggggtgtgacttttttgacaatttatcggttattgcttaaatatttttttaatcagtgccatttttgtttgctttttaaattccaattttttctctaggtatttggtcactattgcgcaatcggcgggcgtcgatttcgcgccggacgccaaagtgatgcgtgaagacgacgacgaaattgcgcgggcggaacgcaatctgatcaacttcatgaacgaggtgtgatgccatggggtggggatgggcaccgcttaatca

SEQ ID NO: 63364 - DNA, 491 bp, Heterodera glycines
atgaaatttgcaaagaaaatgttaatgattcccgaggcggaatatttggctctacggagtgcgatgaatagtggtgattatctccaaaatgaaaaagcgagtttagacgcaaaaatttctcagaatttacaagaccccggcataagcgagtacctcaaggcgaagagacatgattggctctataaagaaagacgtacggtaaaggggatacttgaaaataggccacagaaggtcgtgattgagaatcatgtacccggtccaaatgttgcaccatatctgggcctcaataaccaatccaaaccacaggagaccgaagaaccacggaaaataattattcctaggaaaagacttaaagagcgaactcctgatcctgaatcaaataatgatacccttgaggagttaactccggaaccccaaacaacatccacacacaaaacacccgttccaatcaaaactattatacacccgacccttttaaacggtctttttag

SEQ ID NO: 63365 - DNA, 405 bp, Heterodera glycines
atgtccggttgtaccaatgcccacaatatgggatgtgatattcacacaaaccctatgactgagctctcaatttgcgatgaaccagctagcgatggtgcggtgtccgctaatattttatcaatttcccattgattagctaatttttcagaatccgtcaattccaaattttcaaacagactcatgaaatcatccgaattttcaacatttggctttgacttaggcgacttcttgcaggcaatgatgacgctactacattcgattctcacttcttcatatccggaccccgcagggttttcattggattcagtcccttcaataacgatttcaaccccaacattagtgtacccctcgaggtttgaagctacttttgagctatcaatgctcaacgcctcgaatgattcataa

SEQ ID NO: 63366 - DNA, 2781 bp, Heterodera glycines
aagggactcagccagcggattcaagcagtcaagcatcagcctctgacatggagaaccaacagcaaatcatgaggcaactgccggaagagtccaaaagagaaattcaaaaacaaattgacgtgtttaaagtgagtgaattgataatgacaaatgataatgtgcatttggtgttaatttttcttttagattacacaacgcaaatttgagtacgaagtcggaaaatgggacgaaacgggcaatgacataattgcattggccaagaaaatgtgtcagataatgatgaacatgaccgacttcacgaagtctgtttgggccattgaaaatatatgttaaataaaaaaatttgtttgatcagaggtcgaggcccatacaaaacgacgatggatgtgattaaggcggcacaagaaatttcggaaaacggaggaaaactgaacgaattggcacgtcaaattgggaatgagtcggtggagagcaacaccaagaaggacctttgcgcctatttggaaagggtcactctgttttgtcatcaattgaatgtcacaagcaaagtgcttaatcgaacaatttcttttgcgacccatcctctgctggttcaggtcaaagcggacatccaagtggtcggagacgaattacgagtcagcggattggaggcggccacttctttgatccaaaatgccaaaaatctgctgaatgccgtcattttgactgttaaatcagcttacatcgcaagcacaaaggtcagttttgttaaggcgaaaggatttacgacgaatgaaccgctcaaaaactttttcagtaccgacgaaaagagaacaccaatcccaacgtggtcgaatggcgaatggtggcgcctcagaaacagccgcttgtcagtgcatctgctacaaaagcgcacggagtgatccgccgtgcctccgtatggaaaggggcggcaaataagggttcactacgttccactcattgaaaaacttttcattagaaaaaacaatatttcataaaatgtaaaaaaaatgcggggtgggggaacagctcccggcaaaaaatgtaaaaatgaggcttattttaactgtatcaaattttaaaggaacggcgccaacctccgccgatgcaaacattaaaacaatttcacatatcgacgtgaatgaacggcaaaacactgagaaattccataatttaataatttatcaataggaatgcaataattcgtgctgatttgggataccctcttaaaaccttcggcataacaaagcacaataaacgagtcaattattgtaagtatttaaaaatttaaattcacggatcttaaaacccctcaggatttaaaacctatcttttttgaacaaggttgactcgttgtgtgcagtcaatgctcatttttcacttaaaaagaattcactccataagataattattatttttttgaagacccaaactctgaataatctgatatccaattgccttttgtaatttgttttttatttcaattcaaaatttatttaaatcgcagtaaaataattatgtgcgtcaagggcatatattgatattatttattcgaaaaaggttacattccctgcttattctctcttgtatgcttttattgagattattttcgttttagggaatggggggggggaggaaaggaaaatgtgtatttatttggttggggtggcgagtgttgggaagtgccgggtgagagaaggggaaaagggaaggaaagaaagaggacaaattcggttcattgggttcgagagagaaagagtacggacgaatggaggggaagagaagtcattccttctcgtttctcttcccttttctctcccccaccctcgctccgctgccgccgccgccagcgattggctgtgtcgctgacgtggaccaatgggcttgtgccccggcagagtaacgccggcgtgcgtttccgcggtgtgcacttcgcgacgctgcaccacatccaagccacacttttcgttctgattgctcaaatcactttgtgtgattgcgattggaaaagactcgctcttgacaaccaaaaaaacattacaatattatcaattttcagatttacaatctcttagggatgctcagttctttccccttattattgtccttggtcggcctcatcgccgtccacgccgaagtcttcttcaaggaggagttttctgatgacagttggactgatcgatgggtcacgtcgaaggtgattctgggcattagtgcttcgttttggtttttagtttggaacattcagagcaaggatgattccgggaagttcgatctgtccgccgggaagttattcggggacaaagtgcgggaccaggacgcgatgggcaatcagcgacggtacggttgtgcctcatctctaactagttaaggacgtcggacggcattatcatcgcaacatctgcaacgacactgattgctgtgttcattttgtgtttgaggccaaaatatagcaactcccgatcaccgcaaaaataatagcggatgaaacagcaaaataccaaattttacaacaaatcagtgcctttaccaaacaaggatggccgcaaaaatttgacgacattaaattgtctccttttcttccaaaaagggcacaaatacccgaaatcgaaggatgcctcgcctacggtgaacgaattatcatcccttcgtcactccggaacaacatcctcaaatcattgcgttttgcacatcccggcattgtgcgaatgaaagcaattgccaggaaccacgtttacttgcccggaattgactccgaaatcgaacgagtggtgaagcaat

SEQ ID NO: 63367 - DNA, 1159 bp, Heterodera glycines
atgccgtcctcctgctgtgttccgagtgcgtctgcgtcgccctttccctccgcgtttacctcttacgcttcgcaaccgttcggcgccggtccgcaacagtcgctgtttccatcgccgatttcttcctcctaccaaattgggatgcccgaatattcgcggactgcgcctttgcccggtttttccttttgccattttcgcctttgatttgttacttttttaaattcagtgccaatttcggccaaagaaagatttcctgcaaatgaaattgggaaagaaaagtcggtagaagcggtgaaagacccatttgaaaaagagtcgaaagcgtcgagggatgagccatttttgtcgtcgaaatacgcgacagcgccgggagggagtgccgtgcttcccccggttatttacccgacttccgcggcactccgtcagtcgttcgtgccccagcagcagagtccctccgcctacaacttccaaccgcccttccaacagcaacaattccaacaaccccagcagcagcaggaccggttcccattcccttcccaatcgtacggccaatgccaatgccctcaaatccaatcgtcccgccctttcgccacgccgcaaatgcccgtgcaaaactgctgcattggccgttcccaaaggcaatgtcggctgggaatggagaggaagaaagtgttcggactgaggacattgttggacaaaggcacagaaaagggaaaaagggacggagaaaagggaaaatgcgacgcgaaattgggcaaaataatggaagaggtaattaacggagggagaagacacggaaaccaattaagaagaccaaatgaaataaaccccttcagaattcgcacttggaaatggcagaggcaaaagaagtgaaaaggggggggggcaaatgaaagcattttaacaaaatatttaggccattctgaaacgagcggacgaatcggcaatgggcccctggggggtcggcgttttttgcgcccccaaaaaattggaatttgcggtgaggacggaacgcttttgcacgggcgaagtgacggacggtttttgcgtcgcatttcagacaaatgcggaatgaaagtgacaattcaatttgtttaattgacattaaacattataaaattaaagtgaaaattgcaaaggctttcgaatttccaataaa

SEQ ID NO: 63368 - DNA, 577 bp, Heterodera glycines
tacagagctatagaggaagctattcccgaaggattcgagtctccccataaatctgggcgcatcggttcggggggactgccccgaaaacaaaaataaatcgattttttcaagtgtccgtttggggtactcaaacaattatggggagcaaaaatccaacgcagaattaaagtacaggctatagtgaagctattccggaaggattcggtctccccataaatctgggcgcatcggttcagggggactgccccgaaaacccaaaaaaaaattttttggataaaaattatttaaatgaactgactagataatatttaaaataggtttttctcttcctttcagtatccctgcaaagtttggtgcgcttctgatcagtttctgaaaaaaaagttaagcctaaactttttggcctgtttaaaaaggaattaaaaatttttaaaaattttattcatctccctttttgatagaaaaagcatcagagtgcctaaactaacatgtaaataaaatttggtgcgtttcagaaccctttctgaaaaaatatttaagaattaattttgcaaaaaataaataaaaacgaaagact

SEQ ID NO: 63369 - DNA, 499 bp, Heterodera glycines
atgcagcttgaatttgtcgcacttttggcacgccgattaaacatttcatcggatggcacacatttagcggtgattcaatttgctgaatcggctcaacttgaaatcacgcttaaccaatacgcatgtgaaagtcaagtaaatgttatggactaatttaattattccttaattaattactaattattaattcattacttttagttggaatgggccattcaacgcattcgctatttgggcggtgccacaaacaccggcaaagcactgaattttgcgctggagaatggctaccaaaatgcacgcggcggaattgtgccaaaaggtgaaataaaatttttaaaattattcatttaataaatttatttttaaaatattcatttaaaaatttacttttaaaattattccaattaaaatatttatttaagtggctattgtggtcacggatggacagtcgcaggatgaagtggaagaaactggtcatatttttttatttttcatataa

SEQ ID NO: 63370 - DNA, 816 bp, Heterodera glycines
  unsure (1)..(816): unsure at all n locations
atggaagaagcaaaaagcaattttaacattctctggacaaatntaagactccgtttgatcatggcaaaaagtaccaaggaaattgttgacaaatacacgcaaaaggagaacaacgaaatggagaagagaaaagggtgagcaaataaatgaaaatgtgccgaaataaatcaaaaaaaaaataattatttaaaaaataattaaaaacaatttaataccttcatataattcaaaaatgaaaatgtaataaactgcaactcaaataagtcgagctttttagcaaaacataaaaaggaatattgtaggaaactgataccaattgtgtgtttttaagcaatccaatcccaatcatttgttttcctttaagccttctgccgcccctttccgtgccaaagtgtccttctccccaattgacgcttggcaaatggactttgtggggctacgaatgtggcgactttcccgtgcacattaatgccaaagaacagtgcccattttgtgtaagagaaagaaaataaatatgcaatttcatagtccaatttcagttggtattgtgcaaatttcgtatccttttcaaaaatgctgtcttcgaaggcaaagatcggtgggagaattatttgcgaaaggggcaaagttttgtgggcaattcgcacgcattgccaacggagaacgaattgggcgaccttttgccaagcaaattggccacggaaatttgtgagttccgctgctgaaactgaatgagggtcgatttttggcaatccaaggataggattttctaaatttaaaccaacaatttttgtctttttccatggtcacattaaa

SEQ ID NO: 63371 - DNA, 2348 bp, Heterodera glycines
atgcttgtgatcagcgggtggcagacgctggtacaagggcgacaggacggagaggagtcagtctggtcaactgatcgctgtccaccgccgcggagcggatcttcacaagcaacaagggatcagcctggtcaactgatcacctcacagattttacgattaaccaaaatcaaccgcccgcctttctcagcacagacaacccggaatgaggcataagaaataaaacaacaacatacaggcagacttgcagcaactgaaccccccgacaactttgctgtggggagtgtcgcgactcacgtcacgagaaataaaatggaaatgataaattttataagcatgatgcaatttcattaaaaatgggaaaaaccttaatttaattggaaatgttccccctcttcgtcgttctattcaaaaaatatttgtttgtttacattcaattcttattcatttctcacacaaaaatgtattaatcagcgaatgacaccctatttaagtcgtggaattgttattgaaatgggttcagtcggaataaaacatcattcccctgcttgtctactgtttgtcccaatttctattttgccaaaatttttgccgggccgaatttgcctctgtttggtcccgacatcccccaagctaaaatcagtcaaaatgtccccgcgtcataatgtcccccaagctaaaatcagtcaaaatgtccccaattaaaattagcgaaaaaaccgaaataaacgatgccgaaattcattccctcttagtcatcatatcgagggacacccagaaaaaataaaggaccatgaaaaaattagtttcaaccatgcatgtcctttaaaatttgtccatttctgttttttgttatcttttcaattaattggaagtatttcattgtctttttagcagcttttattgtttttttatgattgataaattttctaaggtatttcgtatttttaaaccttaggggacattatgacgcagggacattttgacagcgcgccgcccccacaaagtgtccaagccacgaattgtccaaagccacgaattgtccaagccacgaattgtccaaaagagtaaaaacccacgaattgtccaaagtctaaaaagctcataaaaagccggaaaatgggtctattttagggttttcggggtcgctgaataccaatacgacatttatatagccccttgcctaaccctagccccacccgaataagaaaaatctccaaatttgattaaaaatatgtgctttttttgtcttcagattttgctattcattaattgaacaaatgattcgtaataaatagggttgtaaattatatggactaaaaaacgcgaaatatggacttaatatttgcttaaataaacctaaaaagtacaataaacaactaaaaaatggggtttaaaacttaaaaatgcatattttttattgttgttcgttgtatcaaaaacacctccaagtttgccaaatttcgaaaaaattctcattaaaaaaaaagaaatgttcgcaaaaaaatgacgaaaatatttattgaaaatgccaaaatgacgacgaaaactcaaatttttcgtgttttgtggggtgtaatttttaaaaatttccaaaaagttgatctttaggggtgtatttttcgtttttttttatttttcttgtgaaaatttccaaaaaatggccaaaatatggactaaaaacccaaaaatggcgaaatatggatttattcccgaaaacccccaaaatatggatttatatggactaaaaaccttcaccaaatcaaaaaattttaacgcagaaatgctatttttaagcccctttcttcatagcatatgcgcagaaaaaatatgttaatccatataatttacaaccctagtaataaacttgaaagtctacaaaaaagtcggaagaagctttgtttgtcagcatttcaaacccaactgaggaggccgtaaattttggagtggagattgacgaactgcatgccgtgataacttccggcaatgttgaataacagactttgaacgaggctgaactttcaacaatgacctttgagcgcggaaaaaccaattttgggtgagatcttctcctggaatgccaatgttcttcctttacttctctcgaacatatatcggcttgacacagcgccagatgttggatggtgttgacgcattttgagataatccactcaattttcacccacccgcaaccattgtttgttagatttatgcatttatttcaaaaattaaaatttttagctacactcgggacaataatttcgactatcaactcggaacaagctatgcggctacccctagagttcggcaccggctcaccggcaccatcaactcttacatggccaaccact

SEQ ID NO: 63372 - DNA, 189 bp, Heterodera glycines
tgtcgcgactcacgtcacgagaaataaaatggaaatgataaattttataagcatgatgcaatttcattaaaaatgggaaaaaccttaatttaattggaaatgttccccctcttcgtcgttctattcaaaaaatatttgtttgtttacattcaattcttattcatttctcacacaaaaatgtattaatca

SEQ ID NO: 63373 - DNA, 79 bp, Heterodera glycines
tagagaaaaaaagataatgtttttctctggcactctctatttattggtacacatctcgttttttgaaacggtgtgttta

SEQ ID NO: 63374 - DNA, 534 bp, Heterodera glycines
atggaagaggaacagaaagagaaagcggaagaggaacagaaaggggaacagaaagtggaagagaaatggaagagaaagtggaagagaaagtggaagagaaatggaagaggaacagaaagagaaagcggaagaggaacagaaaggggaacagaaagtggaagagaaatggaagaggaacagaaagagaaagcggaagaggaacagaaaggggaagaggaagtggaagaggaacagaaaggggaacaggaagaggaacagaaagaggaagagaaatggaagagaaagtggaagagaaagtggaagagaaagtggaagagaaatggaagaggaacagaaagagaaagcggaagaggaacagaaaggggaacagaaagtggaagagaaatggaagagaaagtggaagagaaatggaagaggaacagaaagagaaagcggaagaggaacagaaaggggaacagaaagtggaagagaaatggaagaggaacagaaagagaaagcggaagaggaacagaaaggggaacagaggagggttaa

SEQ ID NO: 63375 - DNA, 230 bp, Heterodera glycines
gtggcctccgtctgcgatggattcgcaagcccatgtggtccaactactgatcaaaatggcaaaaaaagaatgattaaaacgcataaaattcattcatcagcaatatattattttagaccgtatttttgcacggaaaacgagggggtggaaaatttgttggttttttcggaaaaatttaaatccaaaaaattgcgccaaaatgcggtgccgtctgtccccaactcttccgc

SEQ ID NO: 63376 - DNA, 543 bp, Heterodera glycines
  unsure (1)..(543): unsure at all n locations
acttcttcataacnccgagggcttcatccatcggcacatccaataaagcgaacaaagttcgatcaaaatcaacgccaagaagacggcctcgatttaaagtcatcggaaatggcaattgtgcacaatctcgacaaatgataattgatgcaggacaaaagaaaattggtctagaacaatgcataaaagtgattaataatcatatttgaatatgagtttttgaattgtttcagtgcggcatggtgtacagtttgaatgacccgaaggatgttgaacaacacgccaagtttcatcaccgctttacagaaacgaggagtttccaagtttcaatcagccaactttctgcttggaaagagtgagttttcattcccgtcttgaaatgttttttaaaaatcaaaaacaatattagcatttcaatattttttttttgttaaattaagagttcttttcactgagcacgtggaaattccaatcggcggatgtctctttttggttgatgccttctccacctcaacactcagaagaaagatggagtccgttataagc

SEQ ID NO: 63377 - DNA, 121 bp, Heterodera glycines
ggagaccactcccaacgtaatgtgcctggcacgaacagtgtgatttccatgcccggattgaccggctcacacaaacactgaatgatgagttgatgagtgactgaatagaatgaaatgattg

SEQ ID NO: 63378 - DNA, 184 bp, Heterodera glycines
atgaagtacccaccggcgcttggtcatttagaaaatttgcacatttacaaataatttaatattattttgctaaatataaatattcaggaaatccaagttacccgcactactcaagcaattgttcagttgtccaaacaaaactaacatgcaaattccccgaattccaagcccggaactatattaa

SEQ ID NO: 63379 - DNA, 1289 bp, Heterodera glycines
atgtctggtatacaaacgcttgtatgcgttcaacagcgggaactggatcaggcactggatcaggcactggatcaggcactggatcaggcactggatcaggcactggatcaggcactggatcaggaactagatcaggcactggatcaggaactggatcgagtacgttatttaaattgtaaaattttggaaaaaacatccctaaaattaaaaaaatttgccaaaaattcattccataaaatatattttttaaattcgtctgatttaaaataataaaattttaattcaaatttgttaaaatgcattcaatttttagcaacaccacctcaaacatgcacagatgaggcgactgtttttgcaaatgaaaacaatggggtgaaaattatttcaaaattgtttaattgaaattttttttgattttaaaattcaattcagtgtgatctgatcacttgtcctgctggaagaacgtgtggcattctgattggatttgctaggcttggcaccggtccatttgaaccatttctttacccaaaatgtgtgtccaacccgttggaattaactcgtaacacggaacaaaatggcaacgagaaaatccttacaaatggcccaggagtaattaaaatcttaaaataaaaataaatatgtgtggtttaacgcccttgggcatttttgcattagtcattttgcctatgcccaaaattaagttttaaaatttatgcttttccaatccaaaatagcttaaacaatttctgcgatttaatgattatgccatttaaattgaaaaaatatataaatctgaagaaaattttgggtttgacgcaaatgtccggggctcttcccaatattttgaacaagactgtccgagattttttttgtatcattgcttttttcgaagactcaattttatttcattttttatctttattttaaatattttaaattatataaattattttattcttatgaatttttagtgtaactgtggcacgacacaatgtgccgctgggttccagtgccaagttcggagttccatcgttaggcttggcaatcgaccatttgcacaaataattggaggtgcgaatgaaaaaaagattttttaaagagaaaattgggcatttttttttgcgacaaaaatctggcgatatgtctcttaaaaaatttaaaattttgaaattattttccatttgtatttatttgactttttttttgtaattttttcaggattccctcaatgtgttggcaattatagcatataccaaaaccccttcacaatagttccttacggaccaggg

SEQ ID NO: 63380 - DNA, 625 bp, Heterodera glycines
tgtaactgtggcacgacacaatgtgccgctgggttccagtgccaagttcggagttccattgttaagcttggcaatcgaccatttgcacaaataattggaggtgcgaatgaaaaaaagattttttaaagagaaaattgtgcaattttttttgcgacaaaaatctggcggtatgtctcttaaaaaatttaaaattttgaaattattttccatttgtatttatttgactttcttttgtaatttttttaggattccctcaatgtgttggcaattatagcatataccaaaaccccttcacaatagttccttacggaccaggggtacgtttatttattaaaattaaaaataactaaaatgattattatttttttataaaaatacaaaaattattacattttcgattttcataattcccgatttatatttaaatttaaattaatagtgtgctgaaattccggcatgtttggaagggataacatgcgtgactgctgttggcatcgcaaaatattgaaatctgcagtgggctcaagtaaagaaaaatttttcaaaaatcttattttactaattttttttttttagtttttttggcccttttgtgcttgaacctggcgctttatcaaatatataa

SEQ ID NO: 63381 - DNA, 736 bp, Heterodera glycines
atgaaatgtattttttattaaaataaatatagttttatatttttatttttatattttaaatgcattttttttttacattttatttcatggttgttctttttcaacggattgatgcaattgcgcgtcccgcgacatccaatcgaaatattttgaagaataacagttttgagggtataataatttcaaaattcaaaaattattttaaataattatttaattttaaattttttaataatttaataaattattttttattttatagcaaaattgtcatccattctccacaatcatccagataaggaaggaacattgagtaaaaaagaagtcttttcaaacggtgttatcagaaaatgcctgaatatttttccgattttttattcaattttaattaattttagaatttcaaccaccatttaaaattggaaatttgtcggatgcaaaaaatgtggaaaaacttgaaaagaaaggatttattgtggacattttgcctaaaagtgatggaaatcgtgccggagttatgaatgaattgaaaaatatgaagctgaagccgacaaagcaaatttcaatcttttagatgataatatccggaattgaaagacactgacatttttaattgggcatgacagaaaagctaattagttgaacatatttattaattattcggtatcataaaatataattagtgaatccattgatataatctatatatattatataacaagaaactgctattaaa

SEQ ID NO: 63382 - DNA, 840 bp, Heterodera glycines
  unsure (1)..(840): unsure at all n locations
cttgatcaaaaantcaatcaaagcgtaaggggaaataagcgacaaaatcaaaattgctttgaggttgtcgacaatttaaagacattaatgggagctatatgttaatgggtttgtcacagaatccacgcaacattcaaggacaaatcctctgaagggctgagataagcaccaacacttttaaagttttttgatgcaaataatttaaaaacattaaaggacagtaattagtttaccaaatattcctaatgaattaaaccgaaagtttttgaagatggctttaaggaatatttatcattgtatttttaatgacattaatggccgtaaacccaattggaatgggttattaaatcgagattgtatgtaaagcattaatagttttaaggacataatgacagaagagattaaacaaaaataggaccccgaatccgagctctccgatccgaagcacctaccgtagcagatccttccccgcgtccgcatcttcaaacctagattttactaaaaaaaattcttagaaattttttttataagaaaatcaagcaaaaaaattttgaaaaattgaaaagaaaaataaaataaattcgtctttaggtgaacccgtccggtggatggtgtgacggtgccgatacattgcacaaggcccagcgcgccaaggcccagggtatggccataatgatcgatttccactacagcgactcgtgggccgacccgggccaacagaacattccagcggcatggaaaagccattcattggcacaacttaacactgatgtgtacgagcacacttatggcatattaaactacttgaaaagcaatggcatttcagtggcatgggttcag

SEQ ID NO: 63383 - DNA, 677 bp, Heterodera glycines
tgaaaaaaatatttatgaaacaaaaaaatcgattttttcaagtgtccgtttggggtactcaaacatttatggggagcaaaaatccaacgcagaattaaagtacaggctatagggaagctattcccgaaggattcggtctccccataaatctgggcgcatcggttcggggggactgccccgaaaacaaaaaaatcgattttttcaagtgtccgtttggggtactcaaacaattatggggagcaaaaatccaacgcagaattaaagtacaggctatagggaagctattccggaaggattcggtctccccataaatctgggcgcatcggttcggggggactgccccgaaaacaaaaaaatcgattttttcaagtgtccgtttggggtactcaaacaattatggggagcaaaaatccaacgcagaattaaagtacaggctatagggaagctattccggaaggattcggtctccccataaatctgggcgcatcggctcggggggactgccccgaaaacaaaaaaatcgattttttcaagtgtccgtttggggtactcaaacaattatggggagcaaaaatccaacgcagaattaaagtacaggctatagggaagctattcccgaaggattcggtctccccataaatctgggcgcatcggttcggggggactgccccgaaaac

SEQ ID NO: 63384 - DNA, 772 bp, Heterodera glycines
atgtcgatgtctaaatcgtcctacacctacaatcggaagacatttgaggatgcggtgagatggccttaaacatttccgcctcaaaatttatttctaatatttaaggaattccctattttgtgtgagacatgcctcggcccgaacccgtacctacgcatggtataacaatgggaggggtggtcttacatcacacaatttcccgtaaaactgtttttagagcaaagacacacatggaggcgaatgcaaaatttgtgagcgtccattcacaacatttcgttggatgccgggcagaggggcgcgctacaaaaagaccgagatttgtcagacatgtgccaagttgaagaatgtgtgccagacctgtctgttggacttggaatacggttcttatgaattcgccgagcaaaattaacggatataatgaaatttaggccttcccgtccaagtgcgtgacacggcactccaagtcaaggagaccatcccaaaagtgggggccaatcgcgactatttcatccaggttttttggtggcatattttttcctattatttacgaattaaacaaaaatcccgctgggtttcagaatgttgaccgtgctttggaacaaacggatggcacagtgccgtacggcgagttggccaaactgaccgatgcgggcaccaacgaaatgttgcgcaagctggcccgaaatcagccatactacaaccgaaatttgccacacatttgctcattctttgtgaagggcgaatgcacccgtggtgaagagtgtccgtacag

SEQ ID NO: 63385 - DNA, 801 bp, Heterodera glycines
atgagctcccagcaacgccaagcggaacgtgcccaacttcgcgcaaggctgaatttacttgtcgacgatgtcgactttgtggttcaagggctgatcaacaattaccaggccgatgggttgatcaacgcggtaagttttcattttgctgtctttggttttttgcttatttttttttttgaattttaatcttgattgaacaggcgccggatgatggacagctaatggtaatggaccatggacaaggtctacagcatgagcagcagcagcagccgtgggaactggacccgcctctgcccgagcagcatttggaaattgacccacagctcccggatgcgtgggaactggttccctaccagccgacaccacaatgggaccaagttgtgcatgtggaacaacaaccgcagcagcagcaacactaccaccaccagcaacaacagcagcagcaaggcgtgggatgaggaatgggaggggccgctttcgccaaatgcgcttgctcaactccaggacgaggcggacgggctgcgtcaggatttgagtaaggattttgggtcagggttccataaaaaaaaattaagtggttgagagatttgttcgtgtggggcagccgcagcctacgtggcccggttaccaaagatattgacgcggaaattcaaatttgaatttagcgccaaaaattgtaacaaaagtacacgggtcactactcatgagaattaaaaatattgtataaatttaatacaacaacttaaatcaattaacgaaaatgagttaataattaatatttatacaaaaacaagcaataaa

SEQ ID NO: 63386 - DNA, 746 bp, Heterodera glycines
atggccgaagcagcaattcgccaactgtccgacgtgttccagcagttcttgactgctcagcaagcaaatgtggcagcaccagcacaaccgattccaatgcaaatttggcaaatttcgactgttttggtcttggtgaccatggcgaaagcgacatcgagggttggctggaacgctttgcccttgccttgactgctcaacaccgaaccttcaggacgatttgaaggttaagctcttgctgacaaagctgagtgagacggcctacgccgagtatagcaaacactgtttgctgaaaaagccaacagagtttgactttgctaaaacttccgaaatgctgaaaagcttattcgcgaagcaaaaatcagtttggatcaaccgatatgagtgcttaaaggctgaaaagcaagacgaggaggaatttcgcggcttcatcaaccgccacaaaaggctgttaagcgattttgagtttaaaaagctcaacgaagagcagtttaactgcttgatgctcctcgtggcgctcaaatcgccgaaggatgctgaattgcgaaagcgcatactgtcaaagttagcggccgatggtgacagagcaacatatgaaaatgttgtgaacgacttacaaatgtttctgtcgaccatttcggaagcgaaagcgatggagagaccatcgaactccaacattttggctgtaaagcgcaggcagcaaccgaagaaggacaattttggagaaaagggcaagaagcagcaatcat

SEQ ID NO: 63387 - DNA, 678 bp, Heterodera glycines
atggacggaacggcgcagccatcgtcatttatagtggaggaggaaatgctggaaagtgtggcggacgaaatggcgggcaaagagggacacgtggaattcacgggggaaaccagtggaaaagaggaagtgcagcagcagcacttagtgttgctcaagagtcccgagccggcggagggcggtggcggcagctcagctacaatggcgacgagccgacaaattggcactaacgaagcatttgacaggccagcggacgcagcactgcttttcgaggacattgacgacaaggacgtgacgtatgcgccggagattcagtcgttggaagttccgccggaccaactcagccaggcggactcgctgaatttggtggacgaggaacaattctcggaggagcatcaacgggtcattgtcactgatggtgaagacgaagtgccaccgaaggaagccgagaagcaaagagaacggcatgagccagaaaagttagaggagcaagaagccggagaagcaccgcagcgagagttgacgccgcatgaggaggaaaatctgcagcggatcatcgacagattgcgcagaacgccgtcgccacggcctcatcggatggaccaagcgcaggtgccacaggcgccgcaattcttgcgcagttacttcaacgacgagtccacctcatcactgtcatcgacg

SEQ ID NO: 63388 - DNA, 616 bp, Heterodera glycines
acgtaaggacagcctttctgttcggcaaaaacaatgtcctcgcattttctggcgacagagaagcccctggtaaggagaaaaattcaaactcgagcattgattgctttgcaggttatttgtcgcttcatcatgaccaaaatcggatgcttattctcaaatggattccgaattcgcttctcctttcgaagtatgatatattcatttaagcgatttgttgcttaatgattcactttaacccattttcgcttccttttagacccgggggttcaacaacaaatgctgtcaaaagtccaagtcactcatcgcattgtgtgccggtgtcgattaaattcgagaccgtttcacatttgcacttgcataaaaatggtccgtgtctatgccaaaaatgtttgtcaattaattgtccctccctttcagagggcactctttcatcttcaattgtccttatcgattctgatggtgttcaacagttttgcttttcgttctctcttgagcaacattgtttctcctttctgaagacgttggaaggcgcacttttcccacttttcaaaatcgaccccccattaaattccattaaaatcgaatgcggtgccacaggtcgtccactaatgggaat

SEQ ID NO: 63389 - DNA, 388 bp, Heterodera glycines
acgctatgcaattcaaaaaatacgctaaaccggctgagattgtgcggtttgttgagaatggaatgaccgcactcgtgttggattaccgggagaatcaaacggaaaccattgaatacaaaagcacgcacggcacaattaaagtggtgcacatcagcagaagagacataatgcccgggtgagtctcttttgacttcgcttaattcgtttatgcattaattagtcttttagaagcttgcttcactccctgttcaaagccttggacatcagtgtacgccctcttctcgaaaacatctctcatgtcgatcttgttgcattgctcggcgaccccaatgacataacggacgaaaaggggaccaaaacgaccattttaatggaggcactcaccact

SEQ ID NO: 63390 - DNA, 425 bp, Heterodera glycines
attttctccttgggctgctgccccaacgacgaatgggtggcggtcggaatggaaaacaacaatgtcgaggtgtgccccccccccctcactgcttgtaatataaatgctgtttttaaggtgttgcacatgaatcgccaggataaatatgtgctcgatgaccaccagagttgtgttctttcgttgaaattcgctaacagcggaaaggcaagccaaaatgagtcgaatttgaataattttatgtttttcagtggttcgtctccaccggaaaggattacgtcgtgaattgctggcgaacgccgtacggttaccgtcttttgaaaagcaaagagaacagttcggtcctttcttgcgacatttcgcatgacgaccgtttccttgtgactggttctggtgacaaaaaggcatctctctacgaattgagcttt

SEQ ID NO: 63391 - DNA, 1486 bp, Heterodera glycines
gccatcggtcggcttctccccctcgccttttcttctgccctaaactctctcacgatttcgcaatgtcagctgaacaaagcgattggcaaagtcgtggaaagggcctgcgaagccatcgacggccttcgcgaggtccgttctgacgacgccattccgccatttgaaattgacattttaagaaagcatgctcaattctgggtgaattgatgcaattggaggaaaagcacccgttgagtgaagcaattgccgaaagggacctgctcagttcgctgttcaccttaggtgaatgccttttatgctatttttgattattttggcgaatttatccttaggcaagtgccaaaatggaacgatgcctggggcaacgacggcgcatttaccgcagccgttcgaagcggccgattggcgcttttcccaaggctttgcgcggttggcgcctcttttaaattcggacacttacggaagaaatgctttggctggctttgttctttctgccggtgaggcaaaaaaggagtgccgaaaaggaaaaggctttaatcgcaacaaaattaggaagcgtttgcagttggacgagtcaaaatgcttttttggcgattgtttcccatttgaaaccgaacaaacgaaatgccaaggtgcccttagtgtttgttgtctgtgtcttcgttttatccccctttttccagttcctcgactcttttctctctgatcttctctccgtccattcttcgatcgtttcccgtcaaggcgaccccggcccagtgcttcaactcttccgattgcttctcaacgaccgccaattgcaagaaattgaagaaaatccggacggatatttcgaatttacggcactttgtgagctgccgattaaagtcaagtggaatgacttttcatttcgttgtcatcaaatatttcttaagctgtccgtggggaagggaaggccaaaagttaaaactttggccgtctctgtgctcggctcgctgcttcaactgaataagcaaagtcaaatgtaccgccgcgtgcttcgcctggtaggcatggaacagcttgtccccccaagccgtttccctcccaaggaatttttttttaatttacaaacaaaaaaagccttagaaaactttttaaataaagaaattacaaaaaaaaaattagcggaaaaaatcaattttttgaaattttcccttggaaaaacttatgggtttttattgaaaaatttctcggggggggggaacggtgcactcggtgggcatatttcgtcttcgatttgccattttttaagcttatttctctgttggattcgccatacgcgtcgctgagggaacaagcagccgaacagctcttcgagtttttcagttgcgaatccgacgacagcgaacatgggactgaaatggcactgaaattgctgacagagaccgactggggccgagggagggagggcctaggagagaacagacgccggatcagtgccattctgttggccaatgcgagatga

SEQ ID NO: 63392 - DNA, 312 bp, Heterodera glycines
atgactggcggtgccgtgccaccaaagccgtgccgtggaccgaccattccgatggcacagacgagaaagccattggacagcaattggacaacattcgcccatcgacgcacaaatccgcccgcgacaaacacaacgaaggcggtgccacaggccaagacgatcagaaatttgacgtatttgcggatttgcatttccagccgactttcgttggactgctggcccgtggtcaaatgcgcaatttggccgatcaccgtttgggccgcgacgcgaatcactgcaaaaaatggaaaacgcaaaataactgagttttaa

SEQ ID NO: 63393 - DNA, 935 bp, Heterodera glycines
cagggaatcgcgtgccagcggactgtcggtgagacgcaaattaaactaattaattaatttaaatattcaaatattcaattacatatattaaattacaattagacgtaagtaaataattgaattaagcattttgcactgttcggagctgaagttggaatcctcctcaatcaccggcgaatctgagccaattgagtaccaagctgaggaagtggccgagtccgtgtcggtgttcgaggcacggaatgtggcgtttaacggctcactttgcgtggagggcgacgcaattgcaattggtgctggcatttaattaaaactcagttattttgcgttttccattttttgcagtgattcgcgtcgcggcccaaacggtgatcggccaaattgcgcatttgaccacgggccagcagtccaacgaaagtcggctggaaatgcaaatccgcaaatacgtcaaatttctgatcgtcttggcctgtggcaccgccttcgttgtgtttgtcgcgggcggatttgtgcgtcgatgggcgaatgttgtccaattgctgtccaatggctttctcgtctgtgccatcggaatggtcggtccacggcacggctttggtggcacggcaccgccagtcattctttccgttcctttcgtcggcaggtgccctgcggattgcctgcaacggtcacttccattctgacggtcatcgcgcgtcgcttggccagcagaaatgtgtacgttaaacgtttggacatttgcgaggcgctaggccaagtggccataatcgcatctgacaaaacgggcacactgaccaaaaacgaaatgcacgtcaccgcactttggcactgcaacaaattcatcaaaggtggacaaattgagggggagggggtaaggtcaattagggaataattagagtgaatggaaaaaagaaatacgaattaagaaacagcaa

SEQ ID NO: 63394 - DNA, 963 bp, Heterodera glycines
atgtacaaattcgtccattgtctatttatggaaatgtacaaattcgtccattgtctatttatggaaatgtacaaattcgtccattgtctatttatggaaatgtacaaattcgtccattgtctatttatggaaatgtacaaattcgtccattgtctatttatggaaatgtacaaattcgtccattgtctatttatggaaatgtacaaattcgtccattgtctatttatggaaatgtacaaattcgtccattgtctatttatagaaatgtacaaattcgtccattgtctatttatggaaatgtacaaattcgtccattgtctatttatagaaatgtacaaattcgtccattgtctatttatggaaatgtacaaattcgtccattgtctatttatggaaatgtacaaattcgtccattgtctatttatggaaatgtacaaattcgtccattgtctatttatggaaatgtacaaattcgtccattgtctatttatggaaatgtacaaattcgtccattgtctatttatggaaatgtacaaattcgtccattgtctatttatggaaatgtacaaattcgtccattgtctatttatggaaatgtacaaattcgtccattgtctatttatggaaatgtacaaattcgtccattgtctatttatataaatgtacaaattcgtccattgtctattcacaccgtccgaaaaaacgagatgtgtaccaataaatagagagtgccagagaaaaacaatatctttttttctctaattttttgtctccttttggcgtactatctaatatttttattattaggaaaaacaacattcacttcatcctgtttaacttttttcctgcttattaaatccacaccaaattttgcaaatcgatagagaaaaaaattctgcattattctatgctcaattattattttctgtgctcaaactcaaaagttaagaagttcctaataaa

SEQ ID NO: 63395 - DNA, 1095 bp, Heterodera glycines
atgtcgggcgggtggcaattggaacaacttttgtccgcttttcaaattatatcggcacaaagaggcggcaccaacgaaaatgggtaaaatatttttcttccgtttttaattttgtgatttgctattaatgacttttttaaagaatttaatttaatttacagaatatttccttttcaaatcattcgcattgacgcgcaaaccaaaaaacatttttgggatgaaattaaagcgaacagcgcgagagaaccgcaatttattggtgggtgaacaaagcgagtaaataaaataaaattataattaatttattaaaaaggtttatgaagctgctttcaataatttaatttttgtacaaaaaaagatttttaatcgttttaattattttatttttcttttcgacaaaattcaacaattttaatagcattcgaattctaagctttcccttggtgatttggcaattattaaaaaaaaagttctagcatcaaaattgccaaaaatcgggatttttaagttttttcttaataactttaaaattaccataaaatctgtttttttgtaagcctcgagaaatcctgtgttaagaataccggggaccgcgggtccttgacagggtgccaaagcgtcaagttggactcggacccgtcaacaccctactggaaaccctacataatcctaagccctatttatatcatttttatggcattttgtgcctatttcaatgtttatagaatttttttttccaaaaataacgattttaacatttaatttacatatttcgtacaattttggtatttttcttatatattttatgtacatatttttgacagccctaacaattgcctttccataaatatttcagaaaatttcaactttctgctcaaactcggtgaattcacattgtcatattacgaggtgtacaaagtgttggaagcaattttaatgcgatggtcaaacacggagaaatcatctgctgacaataatggagaacagccgcccgaactttacactttcatggagcaatattttaacagcaaattaaattcccaaattttgcaaaaaaaggacaaaaaacaaataggcagcagcagcaaaaggagg

SEQ ID NO: 63396 - DNA, 68 bp, Heterodera glycines
atggtggaggacaaatctttggttggaactgtgaaatatgacggggcgaagcagtgcttttacgacag

SEQ ID NO: 63397 - DNA, 604 bp, Heterodera glycines
atgtcggagaagaaaataatcgcggacattaagaaaatggccaaaatggggcaaatggtaggtgttaattattttttttttggcagaaaacgaataaaaaaaggtcgtcacaaatttcattatagaatttaaccctcatccttttgctatggtatatcaatttccgaatttcattttagaattctgtacgaataatggcaaaggatttggttaggacgcgtcaatacgtgaaaaaggtttttgcctttttggtttatgccatttaaaatggcctattcagtttattatgatgagagcgaacatccaggcagtctctttgaaggttcaaacgctgaagagccaagactcaatggcacaagtgcttccccttggattgaaaatcggaatgattcgattaattaatttcaaggcaatgaaaggcgtcacgcgggcgatgcgcagcatgaacaagcagctgaacttgccgcaaattcagaagataatgaacgaatttgagaagcaatccgaaattatggacatgaaggaggaaatgatggacgacgcaattgacgaagcgatgggcgacgcggacgaagaggaggagacggacaaagtggtgcagcag

SEQ ID NO: 63398 - DNA, 722 bp, Heterodera glycines
  unsure (1)..(722): unsure at all n locations
atggagctcgaagaaggagaatatgtcgaggaagaagagctttttacgcgtaatcaacgtcaaaaaaacaaatttcaattaaatcgagaacatctcaattcatctgttttaaaacgaagacgtgaagaggatgattatgaaacagtcagcatggagttagaaagcgatccaggtgcattacaatttgttgtacgtatttgataagttttaagataattgtctggttttccctaatgtaagacaaaaaaaattgatgggacaaatctaacagaaaacaaattgtatttaatccacagatggttaatttagagatgtccaaagaaagtaaaacaaccgaacaccacagcgaagacgaagttgagctgctgagaagacaattactttcgcaggcaaacatttttactgggaatattttgcttatctctattcccataaaatttcattaaacggcaatttttacttaacagcagttataggttcaaatgaagaaagcgaagaagcaaacaatgaacgaacgcgtctcagaaatgcaaaaagaaatggagggaagtgaaaatgtggagtcaaccgaaagaatgaacgacttgcagcgtatgagtgagaaattacggcaactgaatgagcagttaacggaggcacaacttttgcagtcaacaattgtgcgacgaaaaaagcgattgcaggtccatccgttaaaatggnctcaatacatttccaataaa

SEQ ID NO: 63399 - DNA, 627 bp, Heterodera glycines
atggtggtgatgaaaaaactgaattatttgctaacttatttgcaaattcgtttaacgattctgaggttgacccaggctgccataaactggggcaacacttttgctaatcaatgctttatatcagatatagactttaacatcatcgaaacgcaaaaacttttgaaaaaactcccgaataaaaatggtacatccccggatgatataagctataaaacattgaaaaactgccattcttcattggcaactgttattactgacctgttcaggatttctttagattctggttctcttccagatatttggaaggaatcaatagttttacctcttttcaaaaaaggggataaatctaatcctgaaaattataggcctatttctctaacctgctcactttgcaggttatggaaagaattcttagccaaaatatttacaacttcctcctaaaaaacaataaaatttcggaataccaatttggttttgttagaaataggtctacgacaagtcaactaatagcagttgtggaagattggtacgaggcaattataaaatggaaaaaatgtgaccggtcatgttaaccaaataacaaggaatgcgtatttacgtatgcgttccttgtttagaataattaaa

SEQ ID NO: 63400 - DNA, 333 bp, Heterodera glycines
atgcccattgtcaagccatggtttcttccatatgtttcaactcgaacaatttcaaatgcaacaaaactaattgaagtcgtgcgcatttttaaccatatttcaatggaactttctgaaagacttacaaataaatactacttttatcaattaaatttgctaaatgaggacaaattaagcaattataaagcaaactttggcaatttgaatgctattcgcaagagatttgacgaaaaattgaaaataatgttcaaaaatgaaagagagatcgaagaaggttatacaaacgattcaaattatctgcaatcttctccattttatgacaaaatcattaag

SEQ ID NO: 63401 - DNA, 491 bp, Heterodera glycines
  unsure (1)..(491): unsure at all n locations
atgtttcgttctcattcacatagcgttttgctgaacattttgctcaattacacttcaagcatcgaagcaaaaattgcatattcgcttggttttatttatgaaatttatattaaattaaatattttttgccattttttgctgtttcggccatttcgaattgtttagtgccaattttcttttatatttttagactgccgaaagccgttcctttggcattctgttttcccacaaaaaatattgccaaattcgactttggatggtcatcattttccttttcgttaccgttttccatccgtgccatgccccgtgggcaacaaaagtgccgaattaatttgtgtcgatggaggaaaatggcgagccatcggatgccaagaagaaggagatgagaatgaaaattatggtaaaaccgtaaaacattaataatcattaatttgttattacattagcaaaaattttaatcttcgcacatttaaaaaataataatatttana

SEQ ID NO: 63402 - DNA, 567 bp, Heterodera glycines
atgaaaatattattaatattattatgcgcattaatattcgaaaatacaattaaccaaattgaggctggcaaaataaatcaagaaaaaagttttgctgaaatatttggccaaagatgggacgaaagaactgaagaaaatatgtatcgaattggtccaataatttatgaagaaaatgctgatcagaataaccaatttggacaaaatgatcaacatattgatcaaattgttgatgaaagtttggaagtgaaagaagagcagagtgaagaaatgtccacagattgtgatgaattgggcggccaattgccaatgtcaacaaatattggacaaatttgtgaggatttttcaaaagcaattgataaaaagaaaagagaaattgttgaaaagtttcagaaaattaaggagaaagttaagcaaatggaaaagaaatattcaacgaaagaatggcaaaaaattgaacgaaaaattgcaaaaaaattgggtacaaatcaaaagaaaatttacgaatggaaaacagaatttggaatgatcaaaaagcattattatacggatgatgaaaaatataaaaaa

SEQ ID NO: 63403 - DNA, 1063 bp, Heterodera glycines
atgttgttgtctattttcgtatttcaaatgcgaccatttcggtaaccaatgtggaggattcaagtcgatccacaaaattgttggcccaaaccacgctaaggaacattttgggcacaaaaacattggccgaaatgttaaggttgaaataatattttttaaacaataatattatttttttaaatttagcgaccgcgaacaaatctcgctgcaaatgcaaagcacactggacgaaataacaaagtcggaaatataattcaaggattgggatatatttcagatggactccataaaaatagcaattcttaatttaatttatttttaaatgcctccctaacacaaaaaatcccctttttggcttaattttaatttatttgtaagcccctggggagtgaaggtggaacgagtggagatgaaggatgtccgccttccggtgcagcttcaacgggcgatggccgctgaagcggaggcaacgcgcgaagcgggcgcaaaggtaacactaattaggaagagaaaaatacaaaattaatatttaattacattttattttaatataaaagtttaatgaaatttgttgaaaccaaaattacaagaaaattttaaatataatgattttctcaaatcataagggatgtgttatttttatgttcaaatgctttcatattaacatgcttttagaagattgggttgaatttaaaaattatttcattaagacgaagatttaaaaataaatgtaaaattttaaaattaattttttaattttattaatattttccaatttccagattattgctgctgaaggcgagcagaaagcctcaaaagcgttaagcgaagcggcacacactgttgcgcagtcgccggttgccattcagctccgttttcttcaaactttgacttcgataaggcaaaaagcgtggaaataaaaaaactttttttatatttttaattattttagtgctgaaaagaatcgaacaatcattttcccactaccaatggagctgatcaaacactatatcaggtgatgaatgcttagaaaattgccaaaacaaaatgaatgccaattaaa

SEQ ID NO: 63404 - DNA, 1190 bp, Heterodera glycines
atgcccgctgagtccccacataaagcaattgccaattgcctgagggctcagccggcacttttttttgcgtcggttgatggcattccctggcacaaaattatttgtgtgagagtgtgcggtttctaattcataaaaaccatgcaatttactttcaacagaatgtcatgggctgctccaattcatttttctttcaaattgtataccaaccactccaattaatttataattacattctctataattatctaggatattttgactaaattatcttagttaaaaaatttttttgaaatatttatcttaatattaattattggaaaataagcatactaagaaacaaaaaaatgtagtatttcttcacttttagctttttagtgttgaaaattcatgctattttctttaccaaattattatttaatttaaatttttccgaatgtttttatttggccaataatcattcacattttcttccgccatttatttgtgctagactttaccacaacattccttgccacttacgacttactttaactcaattattccatcattatgatgtgtatcccgcgtaaaggcaaagttggcaaaattgccaacgacggcactaataagcgaagccgaaggcttaaaagcggcaacttatagaggcgaactcggcaaaaaacattgattaatttttcatatgcatttattggcacaaattttgagaggaagtaaatgcccaaaaaatgtgccaaaaaattctgccattttcaatttattttttagcctcttattaaaatgacatttttgagaggacttttgagttcgagaaaagggagagcgtcgtcaactttgaccaacagcagcagacgaggccaagcagcttctgcaacacaaccgatgacggcgacgacatcgcattggacacaacaccaacgccatttccaagcatcacaggcattttttagtgataattaaaagcaaaaaaaaaaaacttttttttagcattatcaacaccagtcaattcggttcaagggcaatgaccgtaacgatttctttgcaaatggtaatggttaatgattaaaattataatttcatcttaagaatgtttttattttttaaataactataaattataaaaataacaaaatacttttattttgtttaattttggtattcaaattaaaattatgctgattttaaataataaa

SEQ ID NO: 63405 - DNA, 278 bp, Heterodera glycines
ccaaattttgttgaatttatgaaagaccgaccggatttgcttcacaaatggcacacaatggagaactttatgaaagaatgcattaagcaatttgaagaaaattaaattcgtggcatttcggcaaatttgaaattgtcattttaggtttggcttttaaaacaaaattttgggaaaatttttatatgttgcacaactgaattttttttttattgtaatttgaaattttgagactctttatgtaacagattttaatttggataaattcattggattaagta

SEQ ID NO: 63406 - DNA, 56 bp, Heterodera glycines; identical to SEQ ID NO: 52733

SEQ ID NO: 63407 - DNA, 346 bp, Heterodera glycines
aaaggaaaaaattgcaacaaaagtcatttgacgaaatatttggagaaaaatgggaagaaaaagaagaagaaaaaagagaaataattggaaaattttataaaataaaagagaaaatcaaggaaaaaggaagaaatattcagcaaaagaatggagtaaaatcaatgcgaaaataaagaaaattttcaaaaaaagaatggaaccaaaattataacgaaatttgtaagaaaattggagttagtcaaagaataattgagaaatggaagaaacaatttggcaatggcatacacaagaaaagtattatcaaaaaagaaaaaatggaaaaaatgaaaatgtattggcaaataaa

SEQ ID NO: 63408 - DNA, 351 bp, Heterodera glycines; identical to SEQ ID NO: 53910

SEQ ID NO: 63409 - DNA, 812 bp, Heterodera glycines
atgcatttagtgaaagtcttaaaaattcactgctggaaggaaaagggaccaaatttcggctccaaaaatttttctcgcttagtcggggcgatattgcattatatgagcaaatggttagcaaatttcctcaattaaaaaatttgtctagatcaggtaggtgcatttaaaattttttttataaaataatttttaaatatttaattgattttattatacaatagaattaacgaacgacgaaataacggaattacaaattcgaacttatattaaatttcttgacaataaaaatgatgagcaaatttgtagacgcgcaaaatatttgctcgatattttagcattttatcaatggtattttaaaataatttttaataaaaaaaaaactttttaaggttaaaaaataaggacgacattttaatggacaaacaggccgaagtgttaaaacacttggagttgtacgaacttttgatggtcattaaaatttatattttttagttgcaaatttctttgtttttttttcaatttgaaattaataaataattaaatatttttattttaggattcggtgccaaatttatctcaaaatgagatcaataatgatatgattatgcagctgttgtacgaacagagaaaagaattatttccaaatttaaatattgtaaaattttcaaattttgacagcccccaaggcggtgaaacggatgctaaatcggcacaacaatttttgcacggcaaaatcctccaaaaattggttttaaacagcgaatttttgacgcagttaaaaggtctctgaaaattctttaaaaattagcaaa

SEQ ID NO: 63410 - DNA, 1116 bp, Heterodera glycines
atgcatttggtggtacaatcgcacagttttgtgctgggccaagttgcaaaggattgtgccgaatttgttcaatttgtcaaccaaaatgggattggaattttgaaaaatttatattgcggtaaataaatgtgccataggtcgtcgtatcgtaaaagtgccagttttgcagaattttcgagcaaaactcttcacactttttgtttgatatggttgtgcttataaaaattattacgagtttttctcgaaaaatctgtaaaattggctttttacgaaacgatccagccgcgtcaggatcaatcagccgaggacaactcagctttacgaggtgtcatgacaacttgtacacagacaactcgtacaatgacttatgctaggcctatgctttaggctaggcctaggttaagcttagtctttattttgtaaaaatttttattgtacgactgagttgtctatcagccgaattgtcccatcagctgaattgtcctcagctgactagtccagaagccaatccagcacattaaataaaaatcaattttaattttgattagatttttttcacagaaaatattgcctttaatgagcgaatcacttattacaagacaattttgggctcacctaattcggaggaaagaaaagtggcagaagcattgcttgtcattaaaatgacttttagtgaaattttacaaattgaaaaagcaaatttcaagtattattttcatattttgtttaaaaagcattaatttaaataaagatataaataaaataagtttgcatatatttaatgatttatctaaaaaacaaattcataaatccttaacaaataaaatattaataaattgaaaaatattttataaaaatgctaaaatataaatattcaaattttttttaaataaaatttgattttaaagagcatcgaaatttgacgaccaaattggcatctttcgagccgaattaattgccttgatgaaaatgcttcaaattgtccttggcgagacaaaagcaatgttttggatgttttgtccaattttaacttattttcattttctgaaaacgaaacaaggacattcatcagaaaagttagactacaatcttttaaatatgtgcttcaaaaatacg

SEQ ID NO: 63411 - DNA, 649 bp, Heterodera glycines
aaaaattttattcatctcccttttcgatagaaaaagcatcagagtgcctaaactaacatgtaaataaaatttggtgcgtttcagagcattttctgaaaaaatatttatgaaataaaaaaatcgattttttcaagtgtccgtttggggtactcaaacaattatggggagcaaaaatccaacgcagaattaaagtacagactatagggaagctattcccgaaggattcggtctccccataaatctgggcgcatcggttcggggggactgccccgaaaacaaaaaaatcgattttttcaagtgtccgtttggggtactcaaacaattatggggagcaaaaatccaacgcagaattaaagtacaggctatagggaagctattcccgaaggattcggtctccccataaatctgggcgcatcggttcggggggactgccccgaaaacaaaaaaatcgattttttcaagtgtccgtttggggtactcaaacatttatggggagcaaaactccaacgcagaattaaagtacagactatagggaagctattcccgaaggattcggtctccccgataaatctgggcgcatcggttcagggggactgccccgaaaacacgaaaaaaaattttttggataaaaattatttaaatgaactga

SEQ ID NO: 63412 - DNA, 393 bp, Heterodera glycines
gaaaagccggacgaatttgaggagccatcgaatggggagaagaagccaaaggggggagcggaagaccaagctgacccaaagaagaagccggacggagtggaagaggagccaaagtcggagaataagccaaatgaagcggtgtcgaaggaagaggaaaaccaggcggaggagcccaaaaaggcaccagagctaaagacagcggaaaactcggaaaagccaccggtgtcacaggaaaaggcaccgccaaatggcacagccgaagatgatgtacaagttggcaagcaaggggaggaacaccaaaaacaagagcaaatgcaacaggcaggtgaccaacagccccaatcagacgaagtggcgcccgcgcgtgggaaccgacgccgacgaggtgcaaaa

SEQ ID NO: 63413 - DNA, 828 bp, Heterodera glycines
atgcaagagtgccacgactggatttggacgcagccactgatcaatggacatcctgtcaaacttgcggctgactcgtgctcgcatctgacaattattcaggagccactttggataagtttggggagtccaaaattgagaaaacaaggtaaaaaggttggcagtttttccggtcacaaattgagtttgttgggcgaattcgattgtttggtgcaatttaaaggtgttgatttaaagcttaaatgttcagttgcgaacaccgatgctccaaacatcatgggactagattggatcgtgccgtttgagcaggccacacagtctccaatcgcgaccacattggatttgtcaattgccacaacaaaagtcaacgcaattgaaccgaccgatgaaccaacaaatttggctgaacaaatgaaaaattcttttccacaggtttttcggccaggtttgggcgtgtgcacgaagatggaagcaacgcttcatttgaaacctggtgctcagcccgttttttgtcgagctaggccagttccgcatggagtttcggaggccgtcaacagcgaattggaccgtcttgttgaaattggagcgatccaccccgtcgatttttcgcgttgggcggcacctgtcctcgctgtgcgtaaaaagtctggtgaaattcgtgtttgcgtcgacttcacgaccggactaaatgatgcgttggaactcaaccgtcatccattgccacgaaccgacgacattttccatgcacttcgtgggtcaaaagttttctcacaacttgatctgcgcgatgcatatctccaattggaattggatgaaaagtcaaatcgttag

SEQ ID NO: 63414 - DNA, 285 bp, Heterodera glycines
atgaaaatagcattggggaaggaggagagacggaagagaaagagaggaaaaggaaaaattcgaagcaaggagggggagaaagaagaggaaaaggatgaaaatagcagtggggaaggaggagagacggaagagaaagagaggaaaaggaaaaattcgaagcaaggagggggaaaagaggaggaaaaggatgaaaatagcattggggaaggaggagagacggaagagaaagagagaaaaaggaaaaattcgaagcaaggagggggagaaagaagaggaaaaggatga

SEQ ID NO: 63415 - DNA, 272 bp, Heterodera glycines
atgatatcaaaaattaaaattttagaaggtgcgtaaaatgccgtttttctcgactgggttccatatttaaacaatcaatgtctttgatcataataatctttttctgattcaaagtgcattttcgatagagaaaagaaagggcttcaaaatgatatacaaaaatcaatcaatcggtaagatatttaatacgtttagagctttccaacaaaaacgaatggatttatgttaacaattcattggacaattacccgaaatcgacaatgacaagttga

SEQ ID NO: 63416 - DNA, 1500 bp, Heterodera glycines
atggagcaacaacaacagagacagcagcagcacatggagcacatggttgcggctgccaagctgttgtccgccgcggcacagcaacagaaccagcagcagcatcaagcagtacaagaagcggcggcggcggcggcggcggcacgcatgccatccctggagggcttactgaaccagcaaatggtgctgtccacgctacacggtaaaaaatttttctgatcaattttctgaaagctgctgtggctgatcaaaattccccctgaacacatccatttgtatatcgcgtggtcttgatcaaattccctgatcacatttattgtatatcgtattggaaccaatatttttcgatcaactttttcgatcactgccaattttccgatcacccgtctgatcagtactaactaattcccctccaaatatttcagcccaattgccggcacatatgaggcggtccactccaaatctgttcagcgtccctgactatcagcagccgagcgcatttcgaccgccgcctcccgcagccgccgcggttgccaaccttttgcagtcgcagcaaccgcctcaacagtcgccctcctcagtcgccgcgaacgcgtcagcgaccgttgcggcggtcgcactgagcaacgcactgtcttccgttcagcaactgctccaacaccagcaacaacaacaccagcagcaacagcaacaacaacggcttgccgcgatggcagtcgctgccgccggcgccgctaccgccaacggactgttccggcaacactcatttggcggcatcggcttcaccgagcagcagcagcagcaacaacagcaacaactggtgcaactgcaacaaatcgctgctacacaaccgacgcctccaccactgccgcaacaacaacaacaacagcaacaagttgctcacaatcagcaacaaaatccgccaaaatgagatggatggcattagcacacagcacacaaaactcgttgttgttgttgttttgttgttttcagcagggcttttcctcttctatgtattaataagtgattttttgtatggttcatggtattttctgatcactgccttagtgatcgtttttttaatggatttcactgatcagagatcaaaattttctcggctttctttgatcatccactgatttgagttgatcattgatcattttctgtctgtttaattttctcaattttcttgtctcattgatcagttcatgatcaagtgatccagcctcctttttgatcagatttctgatcggattattatgactaatcaattaattaattcattagcttattcaattgttcaaattcaaattgtacagaattcattcatcattcttttctgaattgtcctctctttctttgtacagtacaaatgttctatgttattacattggccaaactacagtatacttctactctaataattaatatacgataattacatttctaattatacattgtttcctatcaataatttaattaattaattaataatggaataaa

SEQ ID NO: 63417 - DNA, 1673 bp, Heterodera glycines
atgcggcaacgtgttccaacagtcggagcagttgcagaaccaccagaagctgatctgcgtgggcgcggacggcgtgttccggctggtccaaacccattaccaatgcaaccggtgcgcggaacgatttggcacacaggtgagaaggggagaaagccgtatggtgtggcacaatttagggctgggataaagccaattggccatggcacggcaaattttggggtgtgggattaatgcatcgatggacaagaaataaaattaaaaaattagtttttttaaatggaaaattggccaaatctttgagacagtggcactagagagggggcataaagcatatctaaaggagaaatagcataaaacataaaaggtgaagccttgctaaagggataaagcatgaaagggagtgcatcataaagcataatttaaatgggacaaaacataaaacagaattgaataaaaatagagggaacaaataggctatagcaaataagcacataaagcataggggggggggataaagcagtcattaattgaggaggcgggataaacgcataatgggttgagataccagcagagatttattcttggttctcgagtcaataaatttctctgggcttttctgtcgaggtcattaaagttttttgaagaaaaattgatacaattcttgagtcgagaaattctcaaattttttgggtaccattctctctcgttctcttgcaatcaattcttggtctccgttttctcgagtctctaggaaatttcaacactcccggcagccccagcaaacgaggggtttatccccgtgatccgttcgtggatggattggcggggatggcccctaaatcgggggcggggaccaaatgccatatcattactgtaattttttgtcataggccgagttccaagcacattgtcaagcggacttgcacaagttcaaacaggacaacagcagcagcggtgccaacaatgccgcctcggcacggggcacggaggttggcgcaactgagtgaacgcgaatgcgcgccaaatttggattggcaacaaacggacaaatttatacaacgaaagcctactgtagctgatcgatgatctccggcgagttaaagcatgcttcttcttcacagcacaaacacacaaacacacctactctcctctctgtacacatttaccacatttgtaatagtttctggaaaagctttaaattaccgcgtccaaaaaacaccacatttttggcattctcctcccccccactttttttggcataatgtcacacacaataattttgattttttttttcatttttttgtgttttcatctatttggtcagcaataggctttctctgttctctctctttctctttttgctatgtttgcgccccattgattttttttgatcgctttttcattgttttacacatcgccaaatttactcatatatttaaaacacattcgcgtgcagtattatttttgattaccatttatcacatttaaataaaaaaacaaaagttttaattgttttttttgctatttttcgagggctctctgatcattggcttttgatcaatatggtcatgcctcaactgatcgctcggttctttttggttctatcgatagatcagaagtggatcagttggtcatcgtttgatttcaattttcaaggacctgatcagagatga

SEQ ID NO: 63418 - DNA, 4150 bp, Heterodera glycines
ctcagtcctaactacattccgaacggaacaatggacgccggtggtatgttttttttttgttgctttgccactacgccacacggaatgccaaaatcaaaccgccacttttggcacaggtccgccgagactgccgcccgtgtcgcccagctacccaacctcggacctgggctcctccccccgttcctccatctccgcctcgcattataccgcgctgggaatcaacgcgtccaactggcaagcgttccgcgacgcttacgtcgcgcgtcggcgcagcggcgagtgcgagctgttgtcggtggatgaagcggcgagtgccaaggcgggcggtgccggcggcggtggaggtttcttgacgccgcaccaactgttgtcaccggcaccattctcgcccttctccgactacggggtggcggatttgcatatgggcggcacttccgtcaccggcacgccgttctcgagcagatcgccaaatttgtcaccgtcgccagtgcaccgtgccggcaccaacctgcacttcaggtggtcatgcctttcaaagcatcagcgtttttcattttgtcgagtcaatttcagagtttagccgtttaaattccgtatccgagccttaaaaacgcatttggcacaaaaaagtctcaaaaaataaatatgaaactttccgatcacttgtcaacagattgctgattttttgaccattaaaacaagaattcagttttattttaattttttaaaatgagcaaaattttttatcgattttttgggtatctttttgatcgattttctgatcatttttgggttcgatttgaacaaagccaaaaaatttgcttatttgttagttttttaattatattttcaaaattgtattctcagtgagttagcaaacatactgagcctcgataaataaataataaaaaatataaaaataaaaaataaaaaatattattttttgccagaaattttttatttcaattatttctatttacagatttaccgaaaactttcggattttattgacacgaaaaatcggttactttactaattgccgatcaggaaaacttggcataaatccctagatattaagttatggattctatgggtgccggataatcgcattcatttactctcggatccattttttcagttttgatcaaatccgctcgcgcagctccctctccaatccgatcgccggcttctacgggttggacgcgtttggtgccggtagcgaatgccacctccgtattccgtctcagtcgcgtgtgcttgacgcggaggtgcgcgagcgctctctgtccgatggcgagacgctgcacagcggcggcggcggcggcggcagcgagcaccagcgactgctgcagtcgcaccagcatcagctggacgacgaggacgagcgcatggacaccagcgacgcgacctcgtcgtccccgctggtagtcgccatgaccgtgtcgcggccgtcgtcgtccaacggcacgcagcagcagttgcacgcgggccaaaagcggcgcttgttgcaccagcataaacgcgcggcaggggcggcaagcgcggaggggcggcactcgccagtgccgccagcgagcgtgtgcgtcttaaaacaacagtcgccgccggtgcacgccgcgtcgctgctcagcagccgaccgccggaaagcggcggtgatggagaagcgttggcgagtgccattgtcgccaacgcgcaagtcagccgacagccgaccattgaggagccgcccccgtctccgacgctggccgaactgttccagcccggcgatgtacgtacctgggtaatttgatcaactggttgtctaatgttttgaaataatgccaattctctcattatgtgatcaaagagttcacgagtgatcaaacgagtttcaagtgatcaaatagaggtccgagtgatcaaaaagatttttgagtgatcaattgtgtcaaaattgttcaaaaaagaatggatgatttattttttctccaattacccacgggcgattgacaattttaaggacatactcttggtagtgtaacaatgcccgtttccaatgaaggccttgtcttccaatgacgtatcagaatcattaattgtgaaaaaaatgccaaaagaggtgcaatcggggcttattaaatcaacatgggctggcaaagatcactgattgatcactgatcagaattccggaaataattggtatttccaagaacaaaaaaggccaaaacttatttgaattattgtgattaacatgatagctattaattgctgataaaaataacaaatccaaataaaatgccattgaaaaaggggattcgtggtttgcatccggcacaaaaacatacaaaaagcctatttccagttggacaaagaccgcaaacggcaagtggaggattggattcggcaacaaacagctgccctggaggcatttcggcactcgctaatcccgccgcagcaggaggccaacctgttgcaggcaagtggtgttgtatgtgtggggccagccatcttaatcccccgttatccgccaaatccaaataatttgggcaattcccccccccccccccttgcccataatcctccgtcttccgctctaaaatatcaccaatttttatttcttgaaaaaaaattaccaacacaattgaaaaaaatcgttcaaaaattttgaaattcaaaaaaaatcagatttttttcaataaaaataatttttaattttttcgcgcgcgcgagacggcgaaaaaatctgttgacacatgaacgtgaaatctcgaccgggatattcaatttatggcatttttaaggtgcccacaattgtgccgcaaaattcgctggaacatttgtggcccagcccatcggccacgaattcgtccgccgggcccatccgtccggcgaccatgtggcgtcgcagtcgctccgaatcggacgtctccgccgcgactgaagcggccgcggcgactgcgagcgccgaaagcggcggcggcggctgtggcgacgcgtcggcgacaacaccagcgactgggaccaaaatgcaccagcgacggacaagccaacagcacacggtaccgctgctcaaagtgccgctcaacgaggccacccacgtttgcgaacattgtggccaggtgattaatgctgcttaattagttaattggctcattaataaagccattaagtaaatgaaattaatgatacacaaacaattaatttgatcattaattaagcgaatatttttcttgaaacataaagatggcattggcactgtcttaaaattaatcacttatttattttatttattttttcaagaaaacaaaataaaaaattcttaggctgaagggggcgggctgtggactaaatactagatccaggaattttgaaaaagtcgggattgggatttggattggcatcaggccgagataggattaccgatacttaagtcctggttttgccgggattactggattcaattgatcaggatttgcatggttccagggcttctcaatgcatgatcggctcgccaaacacatcgccagccgtcaccgggaccgatcatcgtcaatgaacgacgagaacagtcgggtccacaaatgcacactttgcccaaagagttttggccgatcggacatgcttaccaggtgagggaatgaaattaatttttaagaaatggtaaattttttttatccgacacgccaaattttcaagaattgcaaaaatttctcaaatccgcccgggccattttggataaaaacacacacaatcattttttcttttttttttggctgattcagattgatcagcattttttgatttacaaacgatttttctaattaaaatttggtggctcttaaataataaatttggtttgagaaaccgaaaaagttcccgaaacaactgaacaccgagagttaatcccgagactgaaaagccgggaccaatatcagcaaaaattcgagacacttttctcaagttgtcaagggttcaacattctcgaccaccaataacccgagtaaagcccaattccgttggcacaggcacatgcgtctgcacaccggcattcggccctacgcgtgccaactgtgtggccaagtgttctcgcgcagcgaccatctgagcacgcatcagcgaacgcacacgggcgagaagccgtatcagtgtccgcagtgcaactattccgcg

SEQ ID NO: 63419 - DNA, 356 bp, Heterodera glycines
atgctggtgcgactgcagcagtcgctggtgctcgctgccgccgccgccgccgccgctgtgcagcgtctcgccatcggacagagagcgctcgcgcacctccgcgtcaagcacacgcgactgagacggaatacggaggtggcattcgctaccggcaccaaacgcgtccaacccgtagaagccggcgatcggattggagagggagctgcgcgagcggatttgatcaaaactgaaaaaatggatccgagagtaaatgaatgcgattatccggcacccatagaatccataacttaatatctagggatttatgccaagttttcctgatcggcaattagtaaagtaaccgatttttcgtgtca

SEQ ID NO: 63420 - DNA, 105 bp, Heterodera glycines
atggtggaaatcgaagtgaatttggtgaacaacaccaacaacaactgcacaaatgatgttcttcgaaaataccgtgtggagatcactaattatgtgttctttttg

SEQ ID NO: 63421 - DNA, 1328 bp, Heterodera glycines
atgaacgacccgctatacacccgacaacgatttgccctgattgtttcagttatgcagggacacacagaaattgctgcacttttggtagacacaattttcaggggcaaaaaatcaacaataataaatgttacccatttttagttggagaaaggcgcggacgtgcatcagaccacccttggccaagtgaacaacgtgaccatgggtgagaaatgcgttttgcggacacaattgtgctgttgcctaattcatctcttttttgccccattttcagccgttacgcccctgtggattgctgtcaatatgcgccagttggagctgtgcagtgtgctgatcgctcatggtgccaacgtggacttgggaagtgacgcctccttgacgccgctactgcttgcatgtgacaaaggcagcacagaaatcggtgaatcaatcgtccggaataattttctcatcagcactttttcaccattttcagtcacccttctcgtggagaatggcgccgacgtcaatctcggggacagcgaaggagcaacgccgataatgatcacttctcgtgccggaagggtgaaaaatgccaaacgtggaaaaatttagcatttttttcgctcagatcgatcttgcgagcttcttacttactcacggcgcaaacgttgaacagatcgattacagcggtgggttgcccgttattattgccctaattaatgtcttttttcaatttcagggactcgatttgctcttttggacgccgccgctcatggccatttggaggtgtgccgtttactggtggaagaatgggcagctgacgtcaatcagcaagcgaccgacggcatcaccgctttgatgggcgcgtgcatccacggacgcttggacattagtaagaagcaattggtacaaaagccgactcaattttttccccaattttcagccgtttttctcatcgaacatggcgcccacattgaccacgctgacatggacgggtacaacgcgttgatgtgggcagtgaagcaaaaaaagactgaagtggcgcgtcatttgctggcaatcggcgcgaacgcagaccaagtgggaattgacggtgggtgggcccaaaaagggcttaattgtgatgcttcaattgactgctctcccccgccccctttttaaggcaaaagagcgagggatttggcccgagaaagcagacgtgccgaattgattgacctttttcgcaccacagctaacaatgagcagcgggaggatggcaatgcgtaagaaaaaaaaaggaatttctgttcaaaaattatttttgatttttcaggcagcaggacgagcaaccgcagcagcagcagcagtaa

SEQ ID NO: 63422 - DNA, 79 bp, Heterodera glycines
ctgggactttttggctgggaaaaccgggaaaaaagccgggaatttcccggtcccggtcaaaactggtcaacacgggacc

SEQ ID NO: 63423 - DNA, 254 bp, Heterodera glycines
atgttaagtaatattaattttttattcgacaaaaatcaagcattcatgcttttttatattttgcaggtaaatgtatgcagctataaatttacaacgaatacaaaatatattctacagagaatataaaatgttaagtatatattaattttttattcgacaaaaatcaagcattcatgcttttttatattttgcaggtaaatgtatgcagctataaatttataacgaatacaaaatatattctacagagaatataa

SEQ ID NO: 63424 - DNA, 303 bp, Heterodera glycines
aaaattccctcaaaaataaaaggtctattgcgcaccgccctccctatcatgctcgagagcatttgtatgtgtataaaatttatcaaaaaaagagatagccatttttctgggataacctctaaatataaaaatcctctgtgaaataaaatggcgattgtgcacagccctccgtctcatacgcaagcgcttttgtgaggtataaaatttctcaaaaaaagagatagacatttttctgggatagagtataaatttaaaaattccctcgaaaaataaaaggtctattgcgcaccgccctccctatca

SEQ ID NO: 63425 - DNA, 1151 bp, Heterodera glycines
atgcagtgcgatcgctccggtttttgacgaattatccaacaattatcttaatttgaaatttgttaaagtggatgtcgacaaatgcaaaggtgagagctaaagatgaccccttaaactaggcttgtaccagaaactaatttcatacatttttaaccataataacaatataatgcgaggaaattttatataaaaggactttttctttgaattcatgttataattcgaaagccttgaatatttatattacaccttaaattcattcagaaacaaagaacacatacggcgtcagtgcaatgccaacattcattgttctccttaatgggttagttgacaatgagtaaagtgaacagcagattggaattggtagtcctttcgttcgctgctttctattctaatggacttacctaattcgatttttgatgcttttccacataatggccggccgggtgctcaagtccccctccctaaattatgtaataattttcaaaaattagtccaattttcttgaaaaattcccctcttgctacgggcctgccggtcagtcctttattttggctaaatcattgcctttcttttcttcagtcaacgcgtggaccttttgcgtggtgccgacaaaactgcacttcagaatttggcccacaaatggtccaaaaattgtccaactcaaatggtctcaccgattcctggccaatgcgaattgtcaccgcttttcaacaaagtccaatgcgaatgtttgaacgaggttattccctatccattgttctctttgtgcattattatttgtattactttttaggacgattccaacaatttgaacaatttgctgaacggagttggtcccctgatcagtgattgtgacgagcaactgctgatcagcgtgtccttcatccaaccggtcaaagtgcactccgtccttttcaacggccccaaagagaaggcgccgaaaactgtgaaaatatttgcgaacatcaccaacactcttgggtttgaccaggcacagtccaccgagccaattcaggttcagaaaatgtgtcaaccgatgctaattgactaattattaaataatgattttcagtgcatcgacttgtccgaagaaaaactcgtcgcgctcaaatacgtcaagttccaggtattgtataaggtgaaataaa

SEQ ID NO: 63426 - DNA, 679 bp, Heterodera glycines
atggtccatgaaagtgtgacaaaagggttgatcaaaggcactcacaaatgcccagtccgtctatggcatttccacacagaaattccccctcccccgccagcccctctaaaacgatgtatgccaacggaacagcaacaaaaacaagggtaggccgtaccgaacacggccgagtcgccccctccatttgtatcatcgttggcattttcttcatgtgcattgggcggattcgcttgttgttgcccatcattatttgtactgctcgccaccgtcgacgcatcgacggaggcattgcattcactggttgaagctgctgagttggagttgttttgttggggggttggttttacaaacaaaatgcttttccagagacgcctctcactcccacccgaaaacttttcgacaatttgtttttcccggaatagaaaattggtcggatggaaaagacacgagcccatcagagggcgaacgtaccgaacttggccttgtcatgggcgcgttttgtgaatttgcagtagccgcattggccatgctcactgatgccaacgtaagagacaacggaacggcggcgaatattcaattgctgacgagccatttaaaaggaggcgaaaagggaggacggaggaagaaaatattatgaaacagaaaggaaagaaacattgagagataaatacgaaataaa

SEQ ID NO: 63427 - DNA, 435 bp, Heterodera glycines
atggctcgtcagcaattgaatattcgccgccgttccgttgtctcttacgttggcatcagtgagcatggccaatgcggctactgcaaattcacaaaacgcgcccatgacaaggccaagttcggtacgttcgccctctgatgggctcgtgtcttttccatccgaccaattttctattccgggaaaaacaaattgtcgaaaagttttcgggtgggagtgagaggcgtctctggaaaagcattttgtttgtaaaaccaaccccccaacaaaacaactccaactcagcagcttcaaccagtgaatgcaatgcctccgtcgatgcgtcgacggtggcgagcagtacaaataatgatgggcaacaacaagcgaatccgcccaatgcacatgaagaaaatgccaacgatgatacaaatggagggggcgactcggccgtgttcg

SEQ ID NO: 63428 - DNA, 155 bp, Heterodera glycines
ttgcataacgccatgcgtctttccgcactgctcaacgttcatccgtcgctttgccagtgaaaggacgagaatgggatgagtcagacccatccgactttaattgattctcaatttgacttaaatgatctgtttatcttttactgttttgttgtttt

SEQ ID NO: 63429 - DNA, 533 bp, Heterodera glycines
atggccaatgcattggcatccgaactcattgaacgcgtcgtttctcgtcaattccatttgtgtgccaacaaaattttttcccaacggatggcactcgaaatggcagtttctcagtcggagtcacttcttgaccaaattgtgcccaaactgctacactcaactgtccaccgaattcgagccaacaaagcccgtcatataaatgagaaaatgcacaacattcgtgagaatttgcaccgcgcgtggttgagacaattcgtcgaccattggcttgcggtggtccgacggaatcgaattttgcggaacatcactttcctgacaaatcaaaatggtatacctaattggtcaaattatggatgcaaagaaaggcactttcaggaaatggcactctcacactttcaccatcacaacctttgttcaggccgaacgcgaagaaaatgacgccggaaagaatgaaacaaatggcaacgaagaaaatgcaacaaatggaaaatgagaggaagaaaaggcgagagcaaaaagcaatgcaaatttag

SEQ ID NO: 63430 - DNA, 91 bp, Heterodera glycines
atgaagcgtcccggtcttaaattgcttcggaatcatccgaacagcccaatccccggcaaaaaactgcctgaagcagtcgagcacccgcagg

SEQ ID NO: 63431 - DNA, 590 bp, Heterodera glycines
atgaaggaaaatggaaaacattgtgatgatgtgaaggattccactaacatgacggccgactatgaaaagatgttcgctaaaaggtatttttaaagccgtgccaggttttgtcggttctagtgcagaatacgcgtcccatggacttttacgcgtcccataattttttatgcgccccatcaaatttttatgcgtcccaaggttttttacgcgtcccattgaattttcacgcgtcccatgaacttcatcaattaggattttttttttagaattaaccaacttttttatctttggtttccatccgaatagcccatgcttggcaaagcgtgtccagacatttgcgcctatgtccaaaatcggattcaaacaaatttttactaaaattaagaaatcgtagtcttctaattattaggaacattaattttgctgtttgaataattgatgtgatgacttttttaagaatatctaactatcaaattatcagacccccaatcgctttaggctatcagggattaaaaaaacttgttgaacccgacataggcgcgaatgtctgggcaattgtgaagatcattggtcccgaaatttttaattaa

SEQ ID NO: 63432 - DNA, 1674 bp, Heterodera glycines
atggacgattttatgaggcacagcgattttcaagaggaggacggggacgtttttacaacagaagcagtggaaattttcgtgatgagaattttggaagacgaagagggggaagttataatcaaaggttttaaattgttggactttttgtttaattatatataatcatggcaaataaatgtctttttgatcccatcatagaagtaaaaagttcttttattattttatgatttttcattattacaaataacttttgtttgcatttttacaatggaaaaactgagcaacgatgagacgcaaatatatgacagacagatacgattgtggggaatggaagctcagaacaggtcttgaaagggatgtgtccagtcaaagaaactcgaggatttgttatcatgactaaacatagttgcaaattatccttcatctaaaaagggaatcgtgaactgaaaatggaaaatagagtaaaaatgggcggccatcggacactaaaattccagttttaaggtcctgtaactctgaaatgttgctatcggcagctaaaattaggaattcacaatacaaaagactgctttatatttttcgacttgcagttcgcgagcttccactgtaagaaatgacccatgagtttttgtatttaaaggcttcggaattcatccgttctgttggttggattgagtggtcttggcgcagaaattgcaaaaaacctgatgttatctggcttaaaatctttgacaattatggacaacaaagaggtactaatcggttgaaaactttccttttcattcattcaggtcgttgaaggcgattatgcatctaattttttgcttgttcgtgccattaaaacgaacgtatgtttttactttctcacatttgattgccttttgcacatagatttgttttagcgtgctgaagcttcagctgaaaatttgaaattattaaatccgatggttgaattaatggtgctctccgattctgtcgttggaatgccgtcgaacttcttttccaaatttgatttggttattgtcgttgaccaggattatgacacaaccaatttaattaacaagaaatgccgtcaaaacaaaattcggttgtttggttgctaattttttaacggacttttccgttttaatttggctgtttcctttaggtttgaagctgccagtgtcttcggttgggttggctatgctttttttgatttcaataatcacacctttttgatgtaaatcaagaaaagttgccgtgtagagcaaatacttttcttttttcagtccaaaaccgaaagagaaggaaacaattattgaaagtattttggatggggacgaagaagacggggaaactgggggaggaagagggacctgtggaatgccaaaaaagatgaaaatgaatggcattgaagaaggacgcggacattgcggcgatagccatcaaacactgaccatcggagacgaagaagacagcaaagtcaagaaggtgaatttacagagagcaaatgtagaaatgctctctattaatgcgaaattcctttcatccctttcacttcattttccgataataaaaagttcctcttccagactattccatttccgagctttgaacacacttttgccattgaactcgggacgaaacgcttccgacgcaaatttaacattccaagcacttattttgttgtgcggg

SEQ ID NO: 63433 - DNA, 1880 bp, Heterodera glycines
aagggtgcgtcgcctgccaatatttggccatttccgacccaacgtcgaattcgcgcgtaggctgaaagacacgtcgaacgattaccggtccttacctcttggcatctttcatatcgctgttttgcagaccttacttcacttattggatctcaactgtacatttactcatcactttttttatgctcattttccatggcattggcactgactattcaaatgggctcaatgttattgagagaagcggagacgttatgggctcttcgctctccccgttacatattgtcgtatgggaacaaaacaatatttggatgggtccaagatttgtgagtcaaatttacatggtttggttttacaattgctatttttcataaatataaaggccgatctcgtccataccggtgccaaatttactccgtgcatgagaagggacgataaaatttatgaacaaattactgaagaacgaaagactgaagccgaaagcaccggtgagtaatatttccttcaattcgatacacttaatttcgaaattggtcatttcgagcggtgcaccccaaaacgtcgtcggccgaaacgtcgtcggaagactttttgaaccataactttgttcactgtcaatcaaattaagaattgttggtgttgttcgatagctctatgtgtttattattaatttgcaaaatctcaaaaattttcgttaagtttcaaaaaagttatggccagaaggaactcaaaaacccagtaattcgaactttttttgctctgatttttttgtgcataaataaaaatttttgaaaatttgcaggctaatagcatttttcgaatgctttcgaataataccaagaatgtttagtttggttgagaaagaaaaaagttatggttgaaaaattcgttcgacgacgtttcggctgacgacgttttgtcctactccgcatttcgaggtgcgtccttttgatactcggtgaaagtgtctcgtttcgagagtcatatgttaaacagcaatttattaggttataggccacaaaacataaagaaaatttttcttttttttcattcggaccacaatattcttgggttaatttggtatttataacgggtgcaccccaaaatcacgccgccaaataacgcctccgaacttgaaacgacatttagcctcttcaattctttattgaacttatcgttaaggctgttgtgttgggctcagtggttgtttccagacatcagagtgttcggtacgtaaacttgctaattgattgtctcgatttttgtccagaaacaatttgcgactctcttgaaatggactaacggcacttttcccgaaatgaattactctcgtgttgtttgtggccaggatccccgatactgtgctcgcccgcgttcagtacatccttatgtgtggggactgaacatttcgaattggccggtaaaaaatcttaaccaatcaattgaagatgaaattgattcaacaaaagatttgcgaaaagcattctccatcaatacccaaatccgaaaagcatatgcactgtacggtcacaggacggccttgctgcattcaaatgcacggacaatgtcggataacgtccagggagtactgcgactttgtccgtgggcatttccacccgaatgcgaccctttgttctcaggttttgtattgtttgttaattatttacttgcaaacttcagatttcctgtctgaatgaggtttgcggaatgactccatttctgaggcgtgacattcccgaccaactctaccgtcttttcaccccactctttattcatgctgggttggtgctgtccacgcttgttgagactattaatttgacagttatttcaggataatccgatgcgatagtcgctcacgctttacctgaccataatgtgccgat

SEQ ID NO: 63434 - DNA, 915 bp, Heterodera glycines
atggaggatttaggcacaaatttcatccgatggccacatatttacgccaataaatttcttcccgagtttgacttaggcgcaaccgtttgttggtaagaaagtgtcaagaacgaagccgacatcgtgtttaaagcccgggatttcttcttttgaaatttttggaaatttttttttacaaaaattcgcgggtcttttttgtggaaattatgctatttcacattttccaataaattattgtcgaaaaaaattattttatattttttgcgattttcttacatacatttttcaaccatccctattaactaattaggtatgagtctctttacaatcgtacacaattcgacagccgagaggagcaactggcaatgttggacaaagaattctatttgcagctgcctaatgtaggctaattgtgacttttttaaatttctaatttaattgattttacctaatagtgatttcgaatttttaaaatatttgaagttagctaacagttattttgaattttcatatttgattaaatttaaaaaaaacagtgtcttcgagttttctaaactgattgcatttagcttaaaaggatttagaaatgcaaatttaatttaatttagctaacagtgacttagaattttcagatttgattgaatttaaaacaaatttacaggttcgcttccaaaaattcaagaaacagttgttattatcaaaaaaccaatcaaatggactgactaatttgccatcccataaagaattgatgcagttcgaatgtgtgattgaaaaaaacttagaatatccattaaatgaaaaatatcattaagatttttaattataaaacttatttattttgtattcataataattaaaaaattttaaattcaatttaattcaatctaatcatttttattctatacataaaataaa

SEQ ID NO: 63435 - DNA, 57 bp, Heterodera glycines
gtcccggttcccggtcccggattttgaaaagctcaggtcccggtcccggtagggcga

SEQ ID NO: 63436 - DNA, 572 bp, Heterodera glycines
agtttgtattttaagaatgattatatattaaaatggatcaacgttcaaaaaattaagcactccttcctcacattgatcaccgcgttgctgtacggcagtgacactttgtccgccaaagtgatcattctgtccgactcaaccacggcgtcgagctcctcgtgcagcttctgctgcacccgtggggctgtggatcaagtgaatgatgccccagttcagcgtgtccgtggttgtctcctggtcggaaaaagaagctattatggtcaaatatgtttttgtgatgacaacgttctgatcaccaccaataaacacagctatagtaaaaacattcattccatcgaatccaatttaattattactacgctttacaataattatttggcttaattttcattgaattcatttatttactttttcaccatttctcagttttaatcaatcttccttcataatttgatgagggatttacataaaatttgttactgacctgtcccgctatccaaaagcccaacaaatgcgcgtacgaattaactctggctaaaacagacgtaatttgtcaaattttgagcataaaa

SEQ ID NO: 63437 - DNA, 489 bp, Heterodera glycines
atgatttatttaaaaataaattttttatttacttttttatttgtcaatttttgttttgtcattgccatggataacgacgaactcacaaaaatagtgaaatcttcgaacaaagcgacaaagaataaacaaaaagtggtaaaaaaaattaacaaaaatttttgaaaatttaattttttaaattaaattttattaattagacaacacctagtcaatcaaatgacagtgattcttccaaaagatcatcgcagaacattgatcaactgacgacggctatttgtcttgaatttttttattaaaatattaattataaaaacaaaccgaaaaatgataaatttaattaaaaaataaataaatttaggaaaaagagaataattaaaataaaattattctcttaaagtaatttccagaaccatgtgatcctttaagagtaccatgaaaaaatttttttttaagattgttaaaataataattttataaaaatataattta

SEQ ID NO: 63438 - DNA, 573 bp, Heterodera glycines
aagcaaagcacgaatgaattaaagaggcgaaagaattcacagtatcgtttctaatagggaaatattgacaggatattccgctaaaaacgggtttgatcatttttagcgcatttttaggtatacatttgagacaattgggcaggacaagaaaagaatgaagttgatgcctcatgaaactcggaattggttatgttttgtcgaaaatatccttacataatactcataaaaaaaatacaaataattcaattctatgaccacattctgaaaaaaatcccagaaatacgaggaaagatatgcttggtcacaataaaataaaaaatggctagtatgtaaaaatttgcggtcacaaataaaataaaaaatggctaatatgtaaaattggcgtccagaaatttttagactaatccgaagcaaagcacgaatgaattaaagaggcgaaagaattcacagtatcgtttctaatagggaaatattgacaggatattcggctaaaaacgggtttgatcatttttagcgcatttttaggtatacatttgagacaattgggcaggacaagaaaagaatgaagttgat

SEQ ID NO: 63439 - DNA, 570 bp, Heterodera glycines
atggccgccggggtgaagacgataatcggaggggcggtggaagcagtgatcgccacaataatgaggacgaccaaagtggaagtgattcgtgtgaagcttgaggaggaccaatggatgggccaaaacggactaaaaggagaagaggaggaggaaaaggaaaagggagagcagaaaggagtgggaggaagggaaggggaaaaggaggaggaaaaggaagaggaagagcaattagaagagcagaaaggagtgagaggaaaggaagaggaagagcaattagaagagcagaaaggagtcggaggaagggaagggaccgaaatgcataaaaatggcaaaaaagagcagcaacagcagcaaaaagagcaaatggaacccaagcagtacctggcggtgtacacagcacaaacatgcatcaaaagagcagcaggtggacggattagcaattgcttaaacaatttattcaacaaaagccaaccacaatttaagagaaaggcggaaaatggcaaaaggaacaaaacggaacagcaaaagcgggggatgaagacgaattgtcaatttacagcgacgcattag

SEQ ID NO: 63440 - DNA, 601 bp, Heterodera glycines
atgcgcacccgaaagcttgaagaaggtgcagccgcgataacggacgagcagatggaaacgatgcgccaacaaatggagcaaaaattccgtcaaaatctgctggaagccgagcagcggattgatcacaaatgggcgacgatgctgaacaaagaacaacaaaggactcagcgaattgcggcacaaagtgcgacggtgattggccaactgatgagtaagcgagtgacagagaggggagaagaaaaggaaaatacgagagagacagaggaaaaaagttgataataagtgatcggtgcaattggtgcctagagaaaggccaagtgttattcggagttaggggatgcggacatgtgtttagctgtccaccatgctctattgcgataatggccgttgaccagccaaaatgtctgatttgtttccataaattaactgatttggaatacttaggatcataaatgtgtacaggatatttgatctggatcctaagtatttacaatatttgtactcctataattgtactcctgcagtaatacctcatccttaacacttttttcattgcctacagtaatcgttaatgttttcatttttctaatttcattaacca

SEQ ID NO: 63441 - DNA, 631 bp, Heterodera glycines
attatcaagggcaagaggtttgttgtttatcaacgaaaagcgatgcccttaagctgacgcacttccacgacattgactctaccatggactctacgctccatgcaattgtgggccgaccggtggcgccatttctacaacaacggcttaatgctcgcccactttttcatcaatgtaataaaaaatttttctaaatttaaattttttgaaatttttattaattagtgcgtcagaagcagcaaaatggtccgcaagtggtcgagcaacaattgccatttgtgttctcatcttctgtcgacttcacaccagcgcaaagggcaaaggtggattggtctttctcatttctctctctcacactctgtctctctcacatttcataaagtctgagtgttgatgggcaggccttccctcgtgttggccccccttcaatgcttatttcggagctgtgaaaagcggtaggcaggccttcccttgtgttggtccccctatagttttttgcttctcatttctctctctctctctcacacatttcctcattatttgtgttgataagcctaaccaaaaatatttaaaaattcaggcaaatgcattgtttgaagcgttcaaagtgcgagaaggactgaatgaagattag

SEQ ID NO: 63442 - DNA, 57 bp, Heterodera glycines
gctatagtggaagctactcccgaaggattcggtctccccataaatctgggcgcatcg

SEQ ID NO: 63443 - DNA, 365 bp, Heterodera glycines
atgtacaaaaaagcggaagaaagggcaaaaagtgccaataaaataaatgctgataagtatttgctaattatcaattctaaattcgatgatcaattaacatgggtgagacttaaccttcaatgaaaattaaataaatcaaaaatttagactgaagatgctctgttttcggaatttgtcaaaggattagcgacaaattcagagacattttttaaaatggcagaagaatattcaaattatttatgtcgaaggaaagaggaagggagtatttatggcaatgatagacccatgatctctcatgggttatacgaaattgagaaaattaaaaagcatttggcacaaaaatatgaggcccatcttggcgttat

SEQ ID NO: 63444 - DNA, 556 bp, Heterodera glycines
atgctttgttatatttctgcattttcctttattattattgctcagcattttttagttccaatttcaaatgcaaatccatcggtgagttaattaatttggggaattaattttactattgcattttaattaggttgagaacaaaatgctaattgcgtttgtgagaaatgatcagaaaatgcaaatcagtgaatattcaatgcaaaaatatgatgcacaccttggcattttttattttatgagaatgaattggaaatgtgacaaaatagcagggaaatttgaagaatatgaactgacagaatgccaaaaatatcgaaaatatttggacattttgtacgaatatttgtgtagagaatacgtcggaattcacacagtaaagccaaaatttgtgtttaaacacaaaattgaaattaatggggcaataatttatgcggtgaattgtttggccaaaatttcgcaattttattttaattcatctctgagttcttttttgaattataaattaaacaactttttcacttataattcggaaccaaaattgttgaatgagaacgattga

SEQ ID NO: 63445 - DNA, 1320 bp, Heterodera glycines
atgctcggccttctgtttgcgctggtggaggtgtcgctgtttgctttgctcgtctctccgtacctttccaagctgcccaattccaccgttgcccttctcgaccatgccattcactttaaccccgggggcttggctcagatggaacaccgattcggttgcatctttgaccagaatctttacgagactttcaaacgtcaaataaatccgcgggtgcgtccgtcgctctgtccttttgaattggctgaacttgcagaacacctgcgacccgttccttctgtcctccttcgtgccgcggcctctcctcttcgtcttcgtcctcctccgacttctacccatttctgttttctctttttgaatactcgcacaattcgtcgacaaaaacaacttttggcgtcaaagagaatgtgccaatctttccctgttaccttgcggcacacaaattccaccaaagcctccgccgttgggttacatggatcacagaagaaagtgggcacaaaatgatcgaaatttgtttggctaattaacttggtaccattttataacaatgccgcctttttcgccgtctccggcgccatcgcaaattatgcgcagtgccaaaatgccagcgcgacaaatttgggcggcggaaggagttcacgcagctcagaaatttccattaacaaattcggtggaaaatttggcgacggccgacccaatgaagcggcaaatgtcattttcccatctgtaggagaattaattgaccagatggacagcaaattaattcactaattcaggcgcagtacgcgcacaacgagcagttttgtatccgaagtttaagccaatggcacaccaaagaaacgtcttttgctttttggctgttccatcaacatttttgagcaccattctgctaaaactaattaattaattaattcccctcttttacattccaaatcttttctttattctttaatgttaatttttgtctctgctgatcattggtcaatttaaattcaattagccattttaaaagtgcgttttcttccccctcctcctccaattatttttgcccattttttcatttcatttttgtttgtttcgtcattttatttatgagattaaacatttgtacaaaatggcaaaaatgcacaaaaaatcattcttttttctcttcacttttcttttatttatttttatcactcggaaagcatcactaatttgttggcatcattaagcccttcctcagaatgttcggtgccattccatgggctgtgtttttatgcttttgaagtatttttatttgtgttttttaaatacaatttcgtagtaatatttaaaaataaa

SEQ ID NO: 63446 - DNA, 288 bp, Heterodera glycines
atgccttttttcttcccctccttctccttctcattccatcatattctgaattttgtgacaaaaatcaattgtaaaacagcaaactgtgctaattacagcaaaataaatgaacagacggtaatgaatttatcgaaaaattataaattattttatccaatttttttcatgtttcagttggatttgcaacgacgtgtggatggacattgcaaattgacaatttggagagatataacaattcacaaggacgaaggaactagaaaaattcaaaaaaaatttgttttatcatga

SEQ ID NO: 63447 - DNA, 552 bp, Heterodera glycines
atggaagaaggatcggaagaaggtataaaattaaattttttttttaattaataaatttaaaaaaatattttttaatcccttttttaaaatggtttaagtttataaatattattttttgtttttttataaagcattcatcgctcatttttgacaagaaataaaaatagtggtgccacttttaccgctcttggaattttgataattgaatatttattaatttatttaatttttgttttttttaattttaaaaattaaaatcggtacttttggaagaatggcgatgccaattaggattaatagattttgttttccaattctggctaatttgaaatcaattagattcaaaaatttcaacggatctacctatctatttttgatgctaataattaattagcccataatttaattgctgcttttttaggaagcactcatacagtgattaatcggcacgaacgaatcagtgaagatgaacacagaacccgatcactttacggcgcatttgcacccactgatcaagaagatgtacatttaaaaatgccaaaaatagtctaa

SEQ ID NO: 63448 - DNA, 94 bp, Heterodera glycines
aattctatttttccaacccatttcaaacctttttacatcgattctgaccgtttttaagcatttttgagtttggggcctatgatcaatatttacc

SEQ ID NO: 63449 - DNA, 842 bp, Heterodera glycines
  unsure (1)..(842): unsure at all n locations
atggcggacaaaagtgcggacaacaacgacaaaactattaccggcacaaagtggaggttggagtaaattatgaaaaatttaataatttaaaaaaatgggcaaaaatgatttaaaaaattactttgccacccttcgtcagaagcgcaaaaatttatttttattttttttttgaaataatactttttcatgcatcctcaggaaacttatattcggaatactgctgagataatctcgctagcaaaatttgttttttcttaagggaccgtttcaatgaacacgcaatcattttaagtggatttaaaaatgttaattgtttttcatcttattttttagtaagacatctgtggcaccaaatttggcactggaacacgaattgcaaatggaggacgaaaatgtggtcaaaaaaggcaatatgacctgcagcaggtggaggacgggaattaattaatcttttttatatatacattaaatttattcaattattaattaattcatatttttaagtttttggggtttaattcctcattaagaaattaataaattttcactacttttaacactttaattgtctttcaatttttttagctcgtcatcatctgcacgtaaattgacattgagaaaggaattgacgagtgccaacgatgataatttccggtgagtttttaaacagaaggaaataattttacaaaaattaattccaacttaattttttccataaaaaattacttattagtacctttcatttaattggtttaattaagcgagtcgtccgcttcacaaaagttcgtttttgcgcagagtngnggaggattcaaagcgcgatgaccgagatactgatctga

SEQ ID NO: 63450 - DNA, 54 bp, Heterodera glycines; identical to SEQ ID NO: 53113

SEQ ID NO: 63451 - DNA, 1468 bp, Heterodera glycines
atgtggaatatcatgcagtcaacaactgctaccgctacattccagtctaaatccgcatcgagaagaagacgctcaacgcattcctcgatccagagcttcacatcctcacagcgtcatcaccattcgcaggaaacaggcgaagggctattcgcgcatttggacgaatggctgcgtttggatcaatacaagtcgaaggagaaggagcacaaaacggcacgagcgctcacactcggagccctcccgagcggagtgattggcctcaccgaagaatggttcatggacaaacttcggctgctcgtctcctactggactacggcatgctgcatttacgtcacattcatttttgggcgcgatgtcctgatacccttggtatgggtctacttaatggggcccgtcatcgttaccgtccgcaatttggtgacgggaaatcagtggacgcagcggaacagagctactcgaggcacacggcgagcaccggcaatttcaagaattgaagcaattgagctggtaccgcctccaatgccccaggagatgagagcgaatgaaacggcaagttcgcaacaagaggaccccgagccgtccccgctggtgatggatctgaaacgacaaatggtcgcgtcgcgttccgctcaaaacgacgttttcaaagtcgtgggaatgtcgcgactgaacgtcagccgcgaatgtccgtcgagcggacaaatggggaggacggggaggaatgaacgaagtagcgaacgaggagtgattgatggatgaaatgatgagaaaattagggcaaacgggaaatgatgaaggaaagaaaggggtgaagggaggggtcggctgacggcgggcacgtgaattaggggaaagaaagcgataaaaagcggatgtggcgccttacccgcgtgaaggtcgcccgaggcagcgcaaaaacgccgatcggaccatcggcggagcgacggcctcctctttatatttctcgcacatttattgtaagtgtagggtttaattacccaagtttgagtttgagataaatttgcggagtatttttggtgcgaatttttgggcggcaaattgggcaattggcgacggctaaatcggaacaaacggcgcagaccctcccccaactgcgtcaattaattaatttaaattgaaggctttccggcaacattatgcgccacattattattgtaaagcatagatggaaaatgggcagaagtcgacccccctcaccttcgcccgcaaaatgccccaaaataggtggggggggggtcggaagcggagaaaaaggaaaattgaacaaactttcttagcttaattcattaatagcaaaagttttttaattgtccccaaattgtaaaaaaaattaatatttttgggctagcttttttgaaaatttttaaaatatcaagccttagggaataatttctgttttattgtgattaccagggagggggccacatatgcatttacatgcaataaa

SEQ ID NO: 63452 - DNA, 167 bp, Heterodera glycines
ccgacccctcccttcacccctttctttccttcatcatttcccgtttgccctaattttctcatcatttcatccatcaatcactcctcgttcgctacttcgttcattcctccccgtcctccccatttgtccgctcgacggacattcgcggctgacgttcagtcgcgaca

SEQ ID NO: 63453 - DNA, 1520 bp, Heterodera glycines
atggcagatagttagttatgcacacagtcaaacgaaatctttttgaaaattttgtgaatttttaaaaacttgccccacaaacccgcgcctaaactaaccacgacgacctactttttgcaattaactgaatttaaacttgaaaatttttttaaaaatttcccatcaaagaaaatacataaaaaatacaatgccaaaataggtttttctcagtcgaaacaaaagactgaggagcaactacaaaatagtatgttcgtagcgctaataaaatatgaattttctcgattttattgatggggtttcttgaattgctaattattggagcctaatgcagggttctttctttctttgtactccaaaagcaaaccccgcctccccccccccccctaatttaagtattaatattaaaaacaaggtgcaatctatatttaaataaaaagatttctgctatttttggcttaactcgcaattttttatgtattttttaaagattttttggccaaataaattacaaaacacaacctttttgtaattttgcccgttggcaccgccggatattatcaatatgctaaagtcggtttttaaatgttggctaaccgtgaaattcactccattaattaagaaaagttttttgacaaacaaaacttctcttataaaaattttcttcgattattaatccacgtaaaaaaaactcaaattaataaatattagctaaattcacaattttggcaccaaaagagttttacatttttttcgttagaaatccgctcacctcgtggattaatataaaatatcttaataaaattttaaagccaacgataattttttaacgacaatttactcaaaaacattgcaacaactttcgcacaaaaatgatcacaccaaaagatacgagcatttagcccaatgttttggcacaatttcttttttctatggacaaatttataaggcactaattgtggcacaaaattggctaaaacccagtgtgaaatttgaccaaaaattgacggaactcaaacagcaatgtgatgatgccacaaacgaattggcaaaaaccaaccccaaattagctgaaaataattccatcaaaaatctgctgctggacaatgatggcattaaaaatttgacaaaaacttttcacgacattaaaagcattgtaaattcgccaaagagtaaaagtgctaaaaatagattgacagaagaaaatggcggcgcaatagaaatgattgaatttgatgatgatttaaaaaatatgggaaaccaaagaggatgacatcactctcaaacggacactgacgatttcatgggaaattgggtgtggattgactgatgagtaggggcacagatttgtatggatttccatatttttttgcacacttatttcggcctaaaaacacgtaaatagtatttttagcttggtttgatgcttctaggatgactttttattgccatatttcaggtttttgtccatgtttccctattttcatacatattttagcattttcattaaaaaagtcgaaaaa

SEQ ID NO: 63454 - DNA, 463 bp, Heterodera glycines
atgaacacgattaattcacgaaagagagatgcgaaaacggtgtttatagcaattaaggtttgcaaaaaaacaacaacatattttattggaaatataatttaaaataattaaatttaatttgctctcatttttcatttcaactttttagaatttgaacaacaataatttggagaaactcattgaggtgatttccattcagtttatttatatttttttaaatgatgagtaggacgtgaattttaggttttaactattttttttttgctcaattgatttgaagaaaggagctcaaaaaacgcatttccgcataaaaatttttcgattctgatgtcattatcggtcactagaaatcactattttgggattttgtcactaaaatagtgaaaattcactattttggagttttgtcactattttttcactatttcgacatttttttggaaaattctttaacaaaaatgca

SEQ ID NO: 63455 - DNA, 117 bp, Heterodera glycines
caacaaaatttgaataacgggcgcgaagcgcccgtccaaggccaacaaatttaaaaacgggcgcgaagcgcccgtcttgagcctcgatgtggactaaaaacccctactaatttttta

SEQ ID NO: 63456 - DNA, 434 bp, Heterodera glycines
atgcataaaattaaatccaaatttaaatggatgcgcgagtgggtcaaaagtgagcttcattgccgaaaatcttgacaaatttttgatttgcaattgcaaaaacaactgacaaaatttatgatgaataaaacttttaaattaatttgcacccctaattttcaagtttttttttgtccatatttggtgcatattttacgactttatttgcatatttatgcgcatattttggccacttttcatgcatattttttgcagccctggcaattactattggttgggtcgcatggtgatgacatttgcgttcacaatctaagcgacacttacgacgcagaattaaatggccacaaaaagccaattttttttctgcatttccaagtgcaatatgataagaaatagtgcaaaaagttaagaaaagccagggagagaaaaataaa

SEQ ID NO: 63457 - DNA, 519 bp, Heterodera glycines
gtccgtctttcgccgtctccgccgccccaaaaaaagccaacgaaagtggccaggcaattaaccttcgccagctcagatcgcacgcggacatcgaagtggatgacgaggaggaggagaagaagaacagacggcccgacgggagaagacgcaaagtgccaaaagtggtgagaaaccagcaaaattccaaaaaatttatcaaaaaatatatttttcccattcgttcgtcgtgaggggggggggtcgaagcgaagcgggaaagagaaaaaattttaaaatttgaacaaaccccttagcaaaattcatttaaaatttcaaaaaaaatttccccagcggtgcgtaaaaatcctaatttttcttttagaaaaatacgctcaaaaaattgcaaaattggttatttattggacaaaatctatttaataaatcgcaataagatttcggcccgagataatttccgttatttttcagccccgccgttgtgataaatgcccgatggaaattccacgaagtgtggaagcttga

SEQ ID NO: 63458 - DNA, 1235 bp, Heterodera glycines
gcacgtgaagcattgctccaatgggctcgccatgttacgtccggataccccggtgtcaatgttgccaacttttccggcagttggaaggacgggttggcattctgtgcccttctgcacttttaccatacctggctgataaactcggaagagatgatctgactgatcagtatagaaaattaattgaattttttttttctaaaattttatggccacgaatttgagagtttaaattttggcgtttgcctttgattttgctgaaatttttggaactgatttttcgaaacatgttcgttttattttaattttaaagtaatttgtaagtcttggtggatgagccgaaggttttgtttgtccacaagaccttgtggggcaaatccaagtgatcgacacaaatttctgctgatctccccaatcagtcaagaaatcagtcaccataatcgcaagacataaactgatcagacggggataaggatttctcgccagaatagatcaatttgaacctagctaaatattctgatagcttatcaggggataacaatgtttatcaaacgtcgttgctgctgtaccacacgccaacctctatttcttatcagggaaacttggacgacttggtctctcggctgacgcgcggcattggcatcactaacgaaaagttggaccacttattgacgcgcattgactcggtagacgcagcggaacgcggcgaacgcattgaactgttggagcgacaggtgcgccaaattggggacgacctgaagatgctgaagccaccaattgacgagctgttcctggacgtggacacgctgcggcaacatcggcacgcggacgcggccgacttcaacaaacagtgagcggataatcgagggatttttaaagaatatggaaacttatagagcattttcagtgaagctcgagaccgaggattgaccacgaaactaaaaaccttttagttcctaagtataggatgagaaattaagggggacggggaggatcaacgaattagaataagaaatttcaaaaattttttttttctaaatcggtaaaatgctgatcataatttttcagagttattggcctggaacaacgtcgaactgcctacctccaccgtctgaaagcttggccttagccagggagcacgctacgtcactgaacgctactcgaccgcatcgtccggcacgcgtggcaacgcttttcgtcgagttgaggatgccatccaatggattcgtgatcgaatg

SEQ ID NO: 63459 - DNA, 956 bp, Heterodera glycines
atgtcccatcaaacacaccattcgatcacgaatccattggatggcatcctcaactcgacgaaaagcgttgccacgcgtgccggacgatgcggtcgagtagcgttcagtgacgtagcgtgctccctggctaaggccaagctttcagacggtggaggtaggcagttcgacgttgttccaggccaataactctgaaaaattatgatcagcattttaccgatttagaaaaaaaaaatttttgaaatttcttattctaattcgttgatcctccccgtcccccttaatttctcatcctatacttaggaactaaaaggtttttagtttcgtggtcaatcctcggtctcgagcttcactgaaaatgctctataagtttccatattctttaaaaatccctcgattatccgctcactgtttgttgaagtcggccgcgtccgcgtgccgatgttgccgcagcgtgtccacgtccaggaacagctcgtcaattggtggcttcagcatcttcaggtcgtccccaatttggcgcacctgtcgctccaacagttcaatgcgttcgccgcgttccgctgcgtctaccgagtcaatgcgcgtcaataagtggtccaacttttcgttagtgatgccaatgccgcgcgtcagccgagagaccaagtcgtccaagtttccctgataagaaatagaggttggcgtgtggtacagcagcaacgacgtttgataaacattgttatcccctgataagctatcagaatatttagctaggttcaaattgatctattctggcgagaaatccttatccccgtctgatcagtttatgtcttgcgattatggtgactgatttcttgactgattggggagatcagcagaaatttgtgtcgatcacttggatttgccccacaaggtcttgtggacaaacaaaaccttcggctcatccaccaagacttacaaattactttaaaattaaa

SEQ ID NO: 63460 - DNA, 688 bp, Heterodera glycines
atggtaaaagtgcagaagggcacagaatgccaacccgtccttccaactgccggaaaagttggcaacattgacaccggggtatccggacgtaacatggcgagcccattggagcaatgcttcacgtgcagtcagcagtgcaagtgggagtttggagcggtgtcagcagcagcggttgattcagcattagcttgtggagtgccgttgttggtctgttgagtgatcaaatggatgggtgggaaatagagtggtgaatgaagagaattgtgagagaaatgagagtgcgagatacttgagagatagatagagagaaaagggcagaaacaaagaaaaaattgagaaggaaaacggagaaaaatcgcgcgcggaaagaccaaatgtaataaaagattggcagtcagaataattccagtcagtcaatgctcgcgtttcacacatttctcaccgaaattttcaaaaaattttaggctaattattaggactataaattattagttcggcgcataattatgttcgttgttttttagaaccagcgtatttctgagctttgttcacgtcgaacgcaagaaaccggattcgaaccgatcaattattcggatttttaaatgatacaaaaacaaattttctcagctaaactttgtaagttttttttggtttaaacaaaaaacgaacataattatgcgccgaccta

SEQ ID NO: 63461 - DNA, 314 bp, Heterodera glycines
atggtcaaaattctcaatttttcccccggcggatttccatatttcgggtttttgctccatattttatgtgcatgttttgtaatttcactgctatccataattgacagcccaaatgataagaccacaatcaatttactaattgctttttgccgtcggtccaatttcctaattgaggagcgagaacattcgcatgcaagaaaaaatccaccaaatgtcattaatttcacagttgagcaagaattgtttatttcacggccagtataatgctaaagttggcggacgacataaatatataataattccacccaaattga

SEQ ID NO: 63462 - DNA, 603 bp, Heterodera glycines
atgaccaattcatattcctcaattggactctccaaattcgcacaattggtgggattggacgagtcgagcggaactgtgcaagagttactccaaaagtgcaattggactgtgtctgaggacggcttcatttctccggtatcacacaaaaatgattttatcggttccctttaattatttttgggaacgcagcctttaattgctattaaaatgcgccgacactgggaatatccatttgattttaaggtgcgaaacgcagaattaatgcaagccattgaaagtctcaacgacgccaaatttggaacgggtttcgatattaagtttgcggaacggggtgtcggtggagcgaccgaatcggacagcaatttcgacaacttaaaatcattggtatttttcagaacccattcatttatcaaaaaagtccattatatataattaatttcacgatttgttaacccatttttggctaaaactaatatttcagatcgattccacaatgttcttcgatgcaatggccgtgcaatagaaaattaattccgaatgtttattccatttgcattatttattggtttttccatgaatggatttaagttaattacatgaaaa

SEQ ID NO: 63463 - DNA, 648 bp, Heterodera glycines
atggccacattggacgatgataccaaaattggagttgaccttcgctgcggggcggaggaaagtgaacgacgcccggacgcaattccgtacaacgcgcaacgcgtaataatttaattgcttttaataactactaattaattaaaataattaattatttctaataaatttcaaacagatcgacataatcgagatggaaaatgtgggacatgcaaatttcactgaagtcaaagttaatttcattcgagagcaagggaaaggaaaggtgagaagaaacgatttaagacattttaaatcatttaatttttactatctttttaggcgccgcgacagccctcacaattgttccgtgccgtgtttggtgacgcagccactgccgatgactttgtaattcgcattgaatacacaacgccaacgagtgactccggtgaaaaaaaatatataaaaatcattttttgcattaaaaaataactttaaattcccagatgatttcactgctaaaaaggagacacttgcgcaggaattgaatcaaaaaattcaaaaagcccgtgccggtgattctgaccaaatcattcaaattatcactctcatcagcacattgacactcgtacaggtgtggatatttaattatgattaataatttaaaataaa

SEQ ID NO: 63464 - DNA, 708 bp, Heterodera glycines
acttgtggattacatcaccacacaacacggatggccagcggatttgggatatttttgttcgcgaaatttggccaattttttcggaaaatattcaccatttggacttttacgattctgttggtttggacaatttgcttcgtcgcactacgccgacaattctcactgatctcaaccaattgacttcaatcaatttatatggtcggtttcctgctgcgtttggtgatgattttgatgggccaaattcaacaatttctgctggccaagcattgtccaaatggttgcactctccgagaaacgatggccaaccaaagcgattgcgttgcaaagactttaaagaacaaccgaacttagattggatcaacaatttcaaggaggtgagtggccacatttttgacaaatcactgatttttgttttcaaattgtttagcattttctccgtgccaatgccatttcttccgtcagttaccaatttaatttttctgttcctgtgccgtcaatgcaaattgtgccatttgaattggtgaacgaatggacaaaggaaaagctgacattggccaaaacaaagggatgggacaaccgatggataatgaaacgatgcaaaattattggggagacggcggcgattcagcagcaaaagaaagatgaaaattggggcaacagttgtaacaatgtgttcatttggcttaatagttacactaattgcattgg

SEQ ID NO: 63465 - DNA, 1811 bp, Heterodera glycines
atgaagccttcgtggaaatcaactgtgaaaaattataaacatgaagtctgcgttatttttatcgacggtgaaggcggtgttgaagggcactacgacccggttaaaaatgttggaaaacttttcagtgcacgcaactattgttttggggtatttatagataattagaaaataatttttttaggctgaaaattatggcactgtgctggacaccctgccaccaattgagaactattacccaggtggactcttcccggcagatcgcgcaaagtttgagcaatggtacgacgagaaccgggaaactgggcttgagctcaccgaagtgatcgcggactactgcaagacaggtatactttttggaaaaactataataataatatataattttttaagatgtccaaatcctggcctatggtatggtaaagatgaggcagctgttcttgtccgagactcggcatgacatcacggattcggtcaccatcccatccggctgcatgaagtattgggtgcagttggctcaccacgacaaagaacgggttaccatcatcccacacttgggatacgagaagcgaggcaaacagagctccatcgccaggaaatatttgaaggtgtatccaaattattttaattttacattttgtcgactctcagtggcgtgccgaagaagaattgcgggagaatggccgagtcctgcgccatgtcgaaagccctggaggggagttcaaattcggcaactacagcttggacgggatgatggagcgccctgatgaagacaaaaacttggccatcgaggtcaatgggtaaggaaagaattccgaaaaggtgccaatttctccattgaaaaaggtgctattggcatggatgcccaagctgcttccccgacgatgcggcaattgtgggcggaggagaaacagccggtgccctcagggcccgtgatgccaagcgaacccgggacattgcgcgggagttcgaggtggaaatcatctgggagtgccacctgaacgcaatgctggaggacaacccagccatgaaggcgtacttcgacaactgcccggactccggaccaattgacttccacgacgccttctttggcggtaccttttccatttaatttttaactaattttccggcacaggtcgaacagggcccgaatacttgggcgcatcggtgatcaacccagagacgggcgactggaaaagccgcacaatcaaagtgaaggactttaacagtctttatccttcgcggtaagaaatgccggaaaaaattaataattgaaaaattttggctttttaaggaatatgtacaccaattacccggttggccatccgaccgtggtgcagtttgacaaggacgtggaatggaggagtccagcggacattgttggcgacgatggcatccgccttgagggcatcatcaagtgctacgccgtgccgccccgccactgtcactacgacatcccggtccttccctaccgggtcaacaaccggacgctgttccccctctgccggacttgttcggaaatgtacccgcgcggcttgatcgaccccgagtacaactgcaaacattttgaggactctgaaaggggtgggtttagaaacttttaattaagcaaatatttttcttgataggattttcgacaactgtgacgcacattgagctggaggccgccctccgctctgggtacaaggtgacgcacgtgtaccgtgcctacatttggcggcttgcgtgcgattggagcaatgggctgttccactcgtacctgctcaaatttctcaaaatgaaatttgaaggtaaaatttgaaaaacttaataaa

SEQ ID NO: 63466 - DNA, 644 bp, Heterodera glycines
ataataataaaataataataattaattaattaaacatttttataataatttaactaataaatattatttaattataaccctcgttcctttttcctttaaaatcaaaaattgggaaaattccgttaattgatttgtttattaggtcttattgcagcactcttccccttcttcattgatttgtttattttgttcatcttaaggggtcctgtaattaatttggtttagttaaaataattatgcaaaaaaataaataaataaaaaaataaaatattgggctcataaattaaatttagataaaaaaaacattcaaagccaaagagttagaaaaaataaatttgcatcaaagtataaaatttcattgaaattttaattgtttgaaatttaaaaaaatatttgttattattttaaataataattaactagttaattaattagaacattttttaaaatttataaataaatattatttaattatacggtcccccatttctttttcgctttaagtcaaaaattgggaaattccgttaattgatttgtttatttgaccccccttcccttcccgccacccgaactcgccatttcccgtatccctcgctgcaacccttcctcgccactctcgctgccgagcaatttctcgccatttt

SEQ ID NO: 63467 - DNA, 241 bp, Heterodera glycines
atgaaaaagtaagtgcttttttgaatgttcaatgatcagaaatattaaaaaattattgttaattattattaattgtcattcttttttaattaatttttcgtttttcagttacattttcttcggattcaccgtcaaacggctgatgtatgaaagcatttctgcgtatgatagtgatggcttggctcggaataacggagaaattaaaaaaaatgccaaacattcctacggtgttggcgatacc

SEQ ID NO: 63468 - DNA, 458 bp, Heterodera glycines
atgcgcacccgtccgatctggcaagttaagcaacgattgctgactagccaaaaggttcggtgccgtgatgaaacgaaccagcactgcttaccccgcggcacccggcacggtcccccgaaggaatggatttaattaaattctctccttcggggatttttttccattaggtcgtccgttagcgttcgattgctctagtcaatttttcaaaatttttgttgaaatatttgtcgtgctctgaagggcgggggggaaggcccaccacgaggccgcgaagcggccgagtgagtaccttcggtgcaggaaaattattaaggaagagagttcattatttatttgttttttgcataattaattcataaatatttttttcagaaagggttctgaaacgcaccaaattttatttacatgttagtttaggcactctgatgctttttctatcaaaaagggagatgaataaa

SEQ ID NO: 63469 - DNA, 366 bp, Heterodera glycines
aatcgaacgctaacggacgacctaatggaaaaaaatccccgaaggagagaatttaattaaatccattccttcgggggaccgtgccgggtgccgcggggtaagcagtgctggttcgtttcatcacggcaccgaaccttttggctagtcagcaatcgttgcttaacttgccagatcggacgggtgcgcatgattccactgttccaagcaccccaccaaaagcaaaacgatataaccaaaatataaggaaaaatttttaaaaaaatttttctccatctccctttttgatagaaaaagcatcagagtgcctaaactaacatgtaaataaaaatgggtgcgctttagagcactttctgaaaaaatatttat

SEQ ID NO: 63470 - DNA, 484 bp, Heterodera glycines
  unsure (1)..(484): unsure at all n locations
atgcgccgcattttgtccattttgcaggaggcccaaaccgattgcactgacacagtgagtaaagggagaaacttttcgacggcatttactcatttttcaggagtgttccacgagcactggcggcgaccccacgggcactgccgggtccaacgttctgctgattgccatggcctggggactgtttgccatgtaattccattttatttgtcatttccagggttcctctcattttatatgttcttccattttaaattcattttcgttttaggcttatgtttttcatgcggcctgcttcgatgcgttccggcggaaacgatcgcgaaaatggccaaatcgcgggcaaaccgtcgtcagcagcgaacggacacaacaacgatgtgagagtggaactagtaactttgattttggaccggaaatattagggaatggcaaatcggctgttagattcgtgaccggcggtcttgaaatggntctaataatttag

SEQ ID NO: 63471 - DNA, 930 bp, Heterodera glycines; identical to SEQ ID NO: 33399
  unsure (1)..(930): unsure at all n locations

SEQ ID NO: 63472 - DNA, 236 bp, Heterodera glycines
atgccaaaatttgtatggacggctaagaggttggccactgatttatggcattgggccaacaaaaaggaaaagaagcgggccgcatcaccacttcgcgtgatagaaaaaaaattgggcatcagtatttggctgtacaagcacaaaacccatgacgaatttgtgaaaaagcacccggaggaattagagccggtgcccgacccatgtgaggaggcaaagcttaagctgaagaagaagcc

SEQ ID NO: 63473 - DNA, 967 bp, Heterodera glycines
atgggaggaggtgcaggacgcaaattggagcagggccaacatttgccggaggtggagaggaagaggcgcgagccgtggcgactctttgccaatttggcaaaaaatgtgagaaaagggacaaaaaagggaggtgggaagcgaaaaacttagcgaagggttaaaacatgaaatttatgggattttcgccagacgatttgagaaaaatttacattcaaaatttccctttctccaaacttcattgattttggtgattaaattgtttaaaaatttaaaaaagtacataatctcgattatttggtgagtttattaataaaaaaagctttttgttaattctttattgattaattattaatatgcattcaatttaataagtgccaaaatgttttgttcagcgcaagggcgccgatctgtcgtcgttgtgcccatccgatgagccgcccagctccacgctgccctccccaagtgtggaggaacagcgggcgcccttcagcatcacttctgcggatgcttttccaccgcaaaaggcataaatagaataaaaattaataattattaattcatgcaaaattataggcccaattcgccgctgccaaacctccgctgggaatgccttccgctgccatcccaacggattggtcgcctcggagtgccaaattggcctaccatccgccttcaatcgggtaaatttctggcacttttaaaaatttctgaacatttttttagctcattggatgaggcggaaagtggcggacgacaattagacatttcagcaccgagggaagagtacgagagcagattgagtacgccggacgaacttcggtaattagtgggagtaattagaggggggggggggacattgagtgaccataagcaaatgcgtttgttctgccgtttttcattgtgtgctttcctttggcaaaatgccacaagactttcacccagattagatttacccttttgcattaaa

SEQ ID NO: 63474 - DNA, 563 bp, Heterodera glycines
atggccacttttttcggcacggaagtgccaacggcgaaggaaaacaaaaagagaaaaagcaacgaggagaagtcgctttatgaggagctgcattcgcccaaattcatcgacgactcagccagaacagaggacgaaggcgacaacgaacagaaggaacccaagagaactgctggggacggagtcgccgttggcacggcactttcggcaacatcaaaaagccgcgcaagagtgattaattatcttattaacaatagtcaattccaaaaagcagtgatttaatgcttaattattattaacaataattaattaattgaattgtttagctttgcctatgaaatgccgtcgttttgccatttcagcatatagctaatgtgttgtttttttttttaatttaacccacttttgcaatgcagttgaccacaaagtcgaggccatcatcagcttggtgtccacccgccaaacattcgttggcttttcgtttggagggaccgctggcgccgttgggtcggcccataattcactcgccacggttgatgtgcgtgagcactgcttggcgtgaataa

SEQ ID NO: 63475 - DNA, 327 bp, Heterodera glycines
atgacacaaaaggcaaaggcggaaatggaggaggaggaacagaagacgaagcaggaacaacagcgagaatttgagggggaggaggaggaggaaaattgtgaagagaatggcagcgaagagaacggtgtgccgaaggaggcgacggcaaaatgccaccaacaaaatggaagacgagagaatggcacaggcaaagtaggaactgtcgggaatggcacgcacggggaaagttggaccatccgtttccctggctttaagggtttgattattgggcataattttcagtctcacggagtcaaggaaaagtcattcgcgaaaaccggacgctaa

SEQ ID NO: 63476 - DNA, 412 bp, Heterodera glycines
atgccgcagcactcgccccccggctcttccgccaattcgtcgtcctcctccgcgagccttttgcgcttccgtgccgcgttggacagtccgttcggctcgcgcgatgacatcagcaacaatttgacgaccgtaagcaacggatacgccgcctttccgcccgccccaccggtgcacaaaattatatttcaatttttaagagttttttcagcgatttttgggcggcccattgcgccacgccaatggcggcgctcccgtggctcacccgcagcattttttggcaccgccgtcgcccttccgtcgtgccgcgccgtgcccaggcgacagcagcgagccgctgctgcggcgcagtctccgctcgccgaccatgcgacggctgcaggagtcgctgcagagtttggcggaggatgtgccg

SEQ ID NO: 63477 - DNA, 561 bp, Heterodera glycines
atggacaatttcccgcttcaccgtgcggtgttttccaatgaagttcaaatggtcaagcagcacatgaccgaaatgaacaagaaggataagcaaggcaatacgtgagtttttaagaataataaaaagtacaaaatgtttttcttttcttaagacgcatatcgcctgtatgcttggccacaaaggtagccaatttgtactgtgtttacagttttttcgattattttttattttacagaaattgcgcggattttgttggagaaggcgcaaaactgcggagcagaacaacggtgaatggaacgcgttggatgaggccatcgcgtatggcgacattggattaggtgtgaaatttcaaatttcacatcaaaattgaaggggactatataagcttgtagtgcgtttgcgcaaaaaatgtctaatttttgcaattttgggcttaaaatttcaattaatgtaaattggggtcaatatttttcgaaaaattcccttatttaatttttaactaaattttaagtaaatttttttacgtattaaaaaaatttggttttttgtctttcatttaaa

SEQ ID NO: 63478 - DNA, 1033 bp, Heterodera glycines
atggcgtgccattgggcggccaccgccgtttttggcaaagtgccgctgatcgccacgatgctcccctcagttttggccaagggtttgaccagcaatgagctcaggtagaccagcctgaatttttaaatcccccaacaaaatgccaatgccaaccatcgcattgtgccaccaaacagctgatcagcggcagaatgttgtgtggagtcactgatcaggtcgacgctcaccttgaaagcaatttctttattattggcattccgtttaaatgccatttggcacaattaatgcgtcgattttgccgaagcgttgcagcgaccgttccaccaattccatggccgtgccctcctccgtcgttgcgcccgaaatggccaaaatgcgccgttcgtcgacgcccgaccgcacgagggactccttcacagccttggaaatttttttagctatgaaataaataaatataaatttccaaccgccaaacgctcccccgagggctcctgaatggtcagagaggcgccttcgcggccaaaactcagtgccatttggcggccgaatggacgcgttccgccttagaaaacaacaaatcgtattttaaataaataataataattttaaattcaatttaaaaataaatattttaaatatttaatttcaattctttcatatgatttccatgaattcttctcgaaatgttaacattttaatatgacccgaaaagggaaataaattaggcaatattaaatttaattatgctttttatttgatggtttttggtaaaatattgtaattccaataagataaattcaacaaaattcaccagtgacaattatcactttgcccacaaattcgccccgaaaatgcgctgaatttttttgcagtgccggcgatcgcttcggcgacgcattggcaccaatcggagaatcggcgaccaaagaattgggagacgaattgccattgatggccgaaccattgctgtagttggtggagttgttgtgctggttgttcagcaacattttgtaacaatttgagaaaaaataaa

SEQ ID NO: 63479 - DNA, 1189 bp, Heterodera glycines
atggcaatgccatcgcaggagaagcgaattcggagagcaaaaaaacgagaagaagaaggacggagaatggcaacaacaaacgacgaacgatggcagagaaacagaaacagaaacacttttggcccatggcaaaggccaacgaagaaaaaaccaaagttagggccaaaagaaaatgaaagacctaaagggaattgtcggcattttaaaggggaaaattgaaaattgacgaaaaacgaaaacaggtaatagcaaaatgagacgagcaaacaaaaagggcgaaggatgaacgaatccgaaaaagaacaacaggaggaaaagcattcatttgtccaatttgaaatgccaattttgacggtgccatccgacgaaagcaatgaaattgagcggacattttggagcacaaaatgatggcacaatgcaaaagaatgccgccattaattacaacattttggttttgcaaatattgaaattcaaaatttatttattttattccgtcggcggaatttcccaaaaaatgatgacgccaaataattcacgccagtcaattaataattgtctttccgtgctgataatgcaaaaaagggaggtaaataaatgataacattttgtccgtccccattttgcgtttgttcgtcctcaaaatgccattcatttgtccgtcattattttgtttattatttgtccatttgtccgtccgtccgtttgagtgcaaatgaaaaaaaaacaattaaaaaggcggggagggggaaaagaattaatgaattgaccaaacactgatcattttttattttcacattcgttgctgttctgcttttgctgctgtccgatcacgctaacggtgcacagagataaataaaaagaaaggcatcgtcactcatatgaccaaagatgggacgagacatggagggggagggtaattgaggggttaattggggtggggtaattagagggtgcaaagggcgatgggtaaaagggcggagacgctaatcaacgtcaattaccccaaaaaggaaaactttgcaaagaaaaaatttgcaaattttttgagacgagaatctaaaaaaaaattcaaaagcaggataagaatttgggaacccgatctgtgccggattcccagatgaaatcctaattttccaggttgatccggatgcgcttttcaaagtatccgggccagccaggaggaccatga

SEQ ID NO: 63480 - DNA, 674 bp, Heterodera glycines
gaggatcgggcggaatttgcattggtgtcggtggtgctgatgcggtcgatgtgatggctgattttccttgggaattgaagtgcccaaatgtcatcggagtcaaactgacggggcgtctttccggatggaaagcaagcaaggacatcattctcaaggtgggatggaaatttagtgatatgattcacatcacttttttcggacgttcagacgatgttttgtggctcatcgtctgccatgcaattgcattccattcgaacttgtaagcagaaaatttaactgaagctccaaataaaatgatttttcgataattttttaatagcgaaagtttattattattgctttggctagtgagttgtccttatgttgtaatatttagtctctacttcgactgacgatcagatcgaattgcgttcattcagagacactgtgctaagcaaagtaaacgaaaaacatgactttattatttaccatgttctttttgtctgcagctcgatgacatcaaaaacagcaatgatatccgttttgaggcagctgaaaaaattactaacaacatcaaacaatctgccgacgacagatacaattcaattgaaaaagtgtccagggaagcaattaacggacaactgcagggattcggacttaaagtttttgcgttcaacgcaggccttgcaggctct

SEQ ID NO: 63481 - DNA, 825 bp, Heterodera glycines
atgtggaacggaattttggccgatttgaaaattttcctcggactcgcacgaggcggtaatccaaacgtgaatgctggaggaacaagaatggaacaaattcaagacctggacagagaaagaatcagtacgaggaacggaatttcatgccaattcccgaaccaaatatgagacaaaatgatggacaaaaccaaaatttggttcaccaacaagtgcagggccaaaattttcaacaaaacatggcaagagtgatgccatacaccgagggaattcctgatattatccttgaacttcacaaagtcacactttcaaatcagtacgcaaatatccttagagaaattcctactctttttggcactgaaggaagggacgatgtcagcgatgatttcaacactcttgcatcgtgaatcaggcagatagcagacgaagaccaacaaggtgaaaattgagagcggatcgatgattggggtggagtgcgattttgagccgatgtcataatatctatatattctttccctctcccctcttttagctggtctgacccaaatgcaacagaatctgcaaaaggactccaaattctctgttcaaatggtgccggttccgcaacagcaaatgatgacgatgggcggcggcgccatggatggaccggcgcggacgtattttacatcgcgaaatccaacatcgattgcggtaccaggtcccgcccagagcaaggcgtccgattgtgatgagaagggcaccggaaattttggaaacatcccacccctcgacgggtttatgactcgggagatccggaaatttcgtcacgaaacatgcgaaacgatgtga

SEQ ID NO: 63482 - DNA, 256 bp, Heterodera glycines
atgtttggcactttcattctctccgccaccttttacatgtttctgcgctcaatgctcactttcagtgccgacgaattggaggcgatttttatgagcaaattttattagatttttacattttatataaattttcagcccattgaacagctcaccggtgctgtgcgcctggtctgctgcattttgttcacctggacagcgtcacaacttttccaaattcatcagcggttcatctatcacacgggatgccatggatacg

SEQ ID NO: 63483 - DNA, 414 bp, Heterodera glycines
gaatggtatgatgggcaaacgcaaatgctgaacgaatggcttacggtaataaatcaaaaattattttgaccaattaaatttaattgtttattttcttcctgcaggaaaggcttcaacaatcactttccaacacgcaactcaccagtttattgctcattgtaaaggtgaaaaataaaaacatttaaagaaatcaaatcaatttgaaaaagcgacgcgaaatttattttttcatgaaaatttaaaaaatttttgaaaagggtaaattttttagctttttttcacactctacccatttttcaaaaatttggaaattaaaaattcttaaaattcaaccaacccaaaatttccaaaaataaattttcagaaaatttattccgactttgaactgcacggcattgacgaggaacggctgaa

SEQ ID NO: 63484 - DNA, 2039 bp, Heterodera glycines
atgtggaccaattgtttttatgaacccattcgtttgtacaaatctgtcggtgacttggatgaagaggaccgtttgcttattaagcagtttatatcagcgagcatttcgtcgatttctttgcttctcgaccaattcgtggacattcgcgcgactcttttcatccatttgggagacctgcacagatattcctacacaactgttgagcaaaatatgcaacatttaacagcagctgctgaatattacaaaaaagcgctgagattggaccccaaaaacggacatccgttcaatcagttggcattgctgttgaaggaacacaatttggagcattcgctttcgctgtttcttcgtgcttgcattgtgccaaggcctttctctcatgctttaaagaatttgcgtgcatttaagcaaaataaatttgagcacaattcgtctctttctctgtttaatcttgtggacattcttatctacgattttgggcaagtttaatttgtcttctttttttttggttaaatattttaatgatttagacgagtttcgttcgaagatgagcgaaagcgttttgatggactatttgacgaacttctaaagcaatcccactatctttttgctgttagactcattcattcgttcgcattggcttcaatttacactttattaaacgaaggtgtgcctcaattaatttgttttaacttttaaacaaaaattaagaggacgacgagaaattccgatgttccgtttcttttctttttcgcaaatgggctttattattggttgaagttgagaagcacttagaagagcacactttaaaagaagatgaacaacaactcgcaaaaaaacgccgccagaatagaaagtcttcgtcttccagtgaatcgtccgaagaaaatttggaattcaaaaacggaactgcgggggaagagtcgcagatttgcgccgactttgcctgggtgttactctcttcaatttttgaatttttgaacttcacggatgggcgatttactggcagaaaactgtctgtttctctcaaatttgtgagttttcaaaatgatttttctaatcaaacaaatttttttagcaattccaaaatttgctcaaaactttagtcgatatactcaatgaattgttgccaaaattgagcgcaaaaatgcaaaaaaatgacaatgaaatggaaacgatggaacaaattgccgaatggtccataaatgggccatttactgaaggcaatgaagaagaacagtgcgaaattgctgccagttttattcgccatgtcgtcaaaaaacaaaaattcgctatcgtttttgacaaattctttcaaatgagcagcaatttgatggaagaaaaagagcttaaaccgatagaggcgttttcaaagatgcaccttcaacacgtgacaaatgaggtgatggaaaggggtcgaacttacatccttttcaaaaggctattttggaaacattttgggaacgaccctccaccccctcagggcgtctcatcgaaaatcttcttcccatcccttttttaattatcatcttctaaaatttaaccaaaaaacaataaataattcaccgaactaatttcagaatgagaagacaagcaaagttcctgtttatgtcgcgcccgattcgtccgttttcctccacaaattggacctcgttaaacatttgcttctgtcgatgaaccaaacgattataattgcgcgcagtgttttgagccgattggacaaagtcaaaagggaaaataataatgcgagggaggcgataaggcaaaaagcacacgaacaacaaccaatgggccacttctgggctttccctttatttaggtggattcagagtcgcattcccgagggccgagttcgaatgcttccacacacaggcgagaaattcatcaatgaatgcctccaatttgtgcgcgaaaagggactattggacaagaaaacattgttctgttcaattttgacaactggagaagcttccgaggaatacgaacggcagaaggaggaaatgcgccaatacaattgtcagttccgaagacaattcaattaa

SEQ ID NO: 63485 - DNA, 3997 bp, Heterodera glycines
atggcacaagttgacgacgattatgaagcgaacaaaagggtggcggagagtttgagggagtatatgggcagggtatgttcatgttttcgtgtattttcttgtctgccttatctccaaatccattcagaggctaaatgttgcgaatgccttcgaaacgcccattttggaagggctaatggctgctgtgaaagtggagccgctgcaacgcattggcactgtgttggacggttagtcatttgttcgtcggatgtttcatttgttaagcattgaaacggcacttttcagccagcgccagatgctatgcattccgtgtggacaacacttacagtgcgtagcctttgcttttgaaaatggaccctttgttaattgtcagcatacaaaatatcatactgaaacagttggattagtgatgagttgtattggctcattgtcatacttaaaatcgtaaaattcattggagtattattttcttttttcaacatttatttgttaggtgcctgctacaaagttctttcagcggcttcaggaggaggtacaattgaaccaaccttaaatacaatttacgttgtatttagagaaaattgccccatttcaaaacgacgattggcagaacgatcgggatgaggtcgagacggtcaatgcgaacgacgagggaggggacaaaagcggaacaattgcgagcggtgaagatggagaagggagcggcgaaggaaacaaacgggacaaaaacaaactgtcgaagccattggactcgtcgagaaaagcgaagcttttgacgcgagagactcaccaattggctgagggactttggaagcgatttgcttccgctcaacactttggggacacggaagatgatttgcatgcattgttcgaccaattatcaactgatgttactgggacggtaatgaaacgacgtcttggagcagtacatgggtcgttggaccgaaaggacaaccaattttcgattgaggatgccatctacaggtgtttctgaatgcacactactcaatgttctgcgccatgttaatttttttgtaaatttcagaaagatttcaaaggatttcgaagaagggtccgctcgaagtttcgtcagcaatcaaattctgatgaacgaccatggttagtggtaccaaatggtatctccttctcatttacctgcttatttttaggcaattttctgattttgcacacaaattggccgggggacgagccgtccaatccgttgccttcgttggtcaatcatctctcagccgcatcggcgcaatgccaaacaaaagcacttgaccaaatgacttctgctgtgaaacgtgcccagtccaaacggccctccgagttcgctcttctcactcaaatttgtgcggacgatgggcagaatttgcccacaatcgatttccaagaggaaaatagctacgaacagcgaattgattgtgttgtcgatgtttttgagaacgacggcggtgatgaggtgtggtggcaagaagcaccaagcccgtctcaaaaaaaatttttggaaggggaaccaggattttttttactctgtgagacaaaaaaatgtttccagtgttttcaccgcataagcgaaaaagcaggaatttgtagcggtgccgattggcgttgccgggaaattttttttggcaatttaatgaaatatgataagaaaataatacactaaaaatatataatttttcatttcggggccccttcccccaagttactcttccgttctttgttgcttttttattttcaaaattgggccacaaaaatattttgatggtaattaatttatataactttttactttgaagcatgcctcgacattggaaagtggtgatggtgcgcctttgcattcgtgtcgaatggctgtcgatgaaaccatcgctaattcgccttttgctgactcggccattgctcctctcacaaatggcataaatgtgccccatggaaatctcgaagaagatggtttaatcgttgaaacgttcagccaaaacattgatgaaggaactgacaatgagtcaaaagcaaccacagcttacttaggcagagatggggaagctttcggcacagaagtggtgagtttggcacggtattcctcccccatttaacttagcactcaaaaggctgaacgtgaaaagcaattggctggaggcgacgaggacattggcgatgaacaaatctgccgtctaattgacgaaaaccttttgccgctcactcaaacggacaatgaaaattttgtgccattaaaaaatacacttgttgaagatgattcccattggatggttgttttttttgggtttcttttttagcattttaaagtttgttctttagggggatcaaaatgttgaccatggcttagcgccaactgatgaaattcgacccaaaaaagggaaaacgaagcgcctgattcacgaggccggcagcgcaaaaggtatttttatttatttttttattttatggcattggaaacattcgcagtttaattaacttcagcaaaacgtcgtctgcaaaagggaaatgatttcgaggaaataagcggaattgcggatgatatgtgttggattccaaaaagagttgtcagctcattcgtgaagagagcaatagcggacattcagcggacatcgctggccaagcgaaggttggagatggacgccgacttcagcgacgacactccgttgccctttttgaacaagagactgacgagggacagggccaaacagctcgagtcaatggcatacgactcgaccaatctcctcagggcccgcattttctacaaggtggagagcaggatggtgtgacccggcacggcatatgccgaaaagtgccgtcggggaaatttggatttgcggcctaatgattttttcattttctacctcttttccacttgtttgttgtttttgcgttaatttttgcttaacggttaagagccacctcggagtttggtccttctttccctttgatgactctctgaaaagtgtccgtctgatcagtcggccccatttgctgccgcccttttcactgcctctccctcgcgacgaacaacacaacgaatttatcaaattttacctcgaattgatggatggtcagggtacggcggatacggaagcagcagatgtcatttccctggataatggggaggaaaattggcaaatggacgaccagaacggcacatttggagacgaagttcccatagacgctgaatttgctgtttctccgcacatggcatcagacgatggaagtcccaaacgaagaagatggggcagtgactgcactgatgaagaggacgacgaccaattggacactggctttggtttcctgaacaacataactctgaggtattcttacaatcagtcgttgggaaaccaacaattgtttttcagtgaaataaagcaaatttactatcaaacgaatttgaatgtggcaaaagtgaagaaggcgatgctaagggtcatttcctcccataagaaggtatttgcgtggtaaatgactaatttaatttaattgcatggtaaatgattaatttgatttctatcggtgatcgtttaagtgtgctcctccggcagttgattttgtgatgggtttggacgacgaagctgatgcagaagaccatctgtcatcttgtccatcagaggacaatgattcggaacagattgaaagcgatgttgaaagtatggctgccatttccgacgatgggacgccaactgcggagggagttcaggtgggcaccgccgagtcattagttaaggcactttggacagcactttcagaacaccgcagcgaaagcccgggggatcaacagcagagagttattcgcgaatgtcccgcgttttttgagtggaatgacaaagcgaaatttgactgtcacaaattcattcgctgttctgctgcatctatgcaacgataaggtgagaaaagaaggaaagaaaacaccgacggattggctgtaaagaaaattaaccacgcaaattttagcaattcactttggcacaaatggaaggagaga

SEQ ID NO: 63486 - DNA, 957 bp, Heterodera glycines
atggatggtcagggtacggcggatacggaagcagcagatgtcatttccctggataatggggaggaaaattggcaaatggacgaccagaacggcacacttggagacgaagttcccatagacgctgaatttgctgtttctccgcacatggcatcagacgatggaagtcccaaacgaagaagatggggcagtgactgcactgatgaagaggacgacgaccaattggacactggctttggtttcctgaacaacataactctgaggtattcttacaatcagtcgttgggaaaccaacaattgtttttcagtgaaataaagcaaatttactatcaaacgaatttgaatgtggcaaaagtgaagaaggcgatgctaagggtcatttcctcccataagaaggtatttgtgtggtaaatgactaatttaatttaattgcatggtaaatgattaatttgatttaattgcatggtaaatgattaatttgatttctatcggtgatcgtttaagtgtgctcctccggcagttgattttgtgatgggtttggacgacgaagctgatgcagaagaccatctgtcatcttgtccatcacaggacaatgattcggaacagattgaaagcgatgttgaaagtatggctgccatttccgacgatgggacgccaactgcggagggagttcaggtgggcaccgccgagtcattagttaaggcactttggacagcactttcagaacaccgcagcgaaagcccgggggatcaacagcagagagttattcgcgaatgtcccgcgttttttgaatggaatgacaaagcgaaatttgactgtcacaaattcattcgctgttctgctgcatctatgcaacgataaggtgagaaaagaaagaaagaaaacaccgacggattggctgtaaagaaaattaaccacgcaaattttagcaattcactttggcacaaatggaaggagaga

SEQ ID NO: 63487 - DNA, 681 bp, Heterodera glycines
ctcttaattgttttgggcctcattatgataatggccaattgtggacaagcgatgcggcagcaggcggtggccgtacgtggccaactccgttgtgggaacagacccgcctcgggggtcaaagtgaaggtgggcccaaggggggggggaagaggggaggggacacttgcggaaaacgtacgttcagttgtgggacgaggacgacgggcccgaccccgacgacgtgtcggttctttcctagcagcgacactcgccaaacatcctttctttaggcttgacgaggcgtttaccgactcttctggctccttccaaatgagagggtcgacacgcgaactgacaaacattgaccccgtgctgaagatttgtcagtcgtcgggggagggggatttatttaataatggcaaaaaacaaacaaacaaaacagatcacgactgtgacgatgggataatgccaggtgagggggggggggggattggggaggacaacccaaaggggaagaagcattgcaggacaacgcaaagtgaaactgcgcatccccagccaatacatcacaaacggagggttggccagacgaacttttgaagtgtaagtgggaaaagagaaacgaaatgtgtgcatccgttccccaacagcggagtacttaatttggagacagtctttgctggggaggaaagggacttcatt

SEQ ID NO: 63488 - DNA, 148 bp, Heterodera glycines
tgtatttgtttgagttggagaagcgtcccaacaatcagtagaaagctggccaatcccagaaaccgacaacgagttcccaaatgtgagacgacaaatggggatttttattgtacgtgcattactcatttgacatttatttatttcttcg

SEQ ID NO: 63489 - DNA, 469 bp, Heterodera glycines
ctcttaattgttttgggcctcattatgataatggccaattgtggacaagcgatgcggcagcaggcggtggccgtacgtggccaactccgttgtgggaacagacccgcctcgggggtcaaagtgaaggtgggcccaagggggggggggaagaggggaggggacacttgcggaaaacgtacgttcagttgtgggacgaggacgacgggcccgaccccgacgacgtgtcggttctttcctagcagcgacactcgccaaacatcctttctttaggcttgacgaggcgtttaccgactcttctggctccttccaaatgagagggtcgacacgcgaactgacaaacattgaccccgtgctgaagatttgtcagtcgtcggggggaggggggaatttatttataatggcaaaaacaaacaaacaaaacagatcacgactgtgacgatgggataatgcaggtgaggggggggggggg

SEQ ID NO: 63490 - DNA, 194 bp, Heterodera glycines
tttagtgccgctaaaaagttgggcaatttgagcaaggatgacgtgatgtatttgtttgagttggagaagcgtcccaacaatcagcagaaagctggccaatcccagaaaccgacaacgagttcccaaatgtgagacgacaaatggggatttttattgtacgtgcattactcatttgacatttatttatttcttcg

SEQ ID NO: 63491 - DNA, 1076 bp, Heterodera glycines
atggatcggacagttaatgattttagcttccaacatttttctgcaacttctactccaatgcccacatccacgtgccaatatctgaaaaaacgacctttactcaaagaaaaagtcagtgtttgcacattagttaaaaatttgaccattttcagaacaatacgatctcagcttctcctgccagtaagaaaacaccaatttctgctgaagaatcgttgtcaaatgagacaatgccggaccttttcttttacgacaagaaaagttcggacggattttcatttgaggaagaagggcaagagaatcggcagaaaaaagtgttgtcttcagtgtcagaagtaacttcgtgctcaaactcatcgcagaaaaaggaaattatcgaatgttcgctttctccaattcacgtgaaaaacgatcacaaatataaagcgaagaaaattatctcttcggatgtcgaggacagcattgtgtcaagttcgtcgaatggaaacgaaaaccgacaaaatgaacaaaattcgattgtggcagctgaagaagaccaaaatcgcaagagagtgttatctgattcaagtggaaccgacgaaggacgacagcttcaagttcaaagtgaagacgaaagtgggaggagcagcgaagaggaggcccaagtcgagcacaattcgagtgagacaacagccgaagaagagacggaggaagacatcgaaacagtcggggacagccaaagtgagggggaaagtgtgctgattgatgaagacgaagaatcggctgataaagttggagctttaccgaacagaattgaaggccgcaagaatctcccgggtgaatccctcagactttacattcaccacttacaaaggattttaggcaatgtgccacgaaccatcttactttcccaaccaaccatagtttctgagcaaaatcgtgccgaaatttacaatgcaatgcgtaagttagaacttttgacctaacagaaactgatttttagctgtccaacctggtcgcctttttggtggaaaaatgactgatgaaagattcatgaaaatctcatcagtgtccaatgacgtcatcaatgccatgcatag

SEQ ID NO: 63492 - DNA, 134 bp, Heterodera glycines
atgagagctcgctggacaatgacgaaggccaggactgaggcacaagattctcagattggactaacactatttttctatcgcagttgcaaagactaccgagaaaatcctccttatttacttccacttgagatgtg

SEQ ID NO: 63493 - DNA, 681 bp, Heterodera glycines
atggataagcgcactgagaaggagccgaaccgaccgaccgatggacggacggagacgaaaactgaggacaaaatgccaagaatatgtgtgatcagtgacaaattcaaacccaatgccgcgccctttcgatttattcccgatggaatgacaattccaaacttttttttaatttgttaaaattaaagagtgcatggtaataatttaaattcgtttaccgttacctgtcaattttggaaaagaaaacggtcaaaaaccggctgaaaaatttaatcatttaccagtcgacttaatttccgccgttaaattaccctgttttctggttaaaaaatttgcatgttttttgaagagattttttcgattttttattggattttgttccggaatactgaatttgcccttagcctggaaacgaacatatgttcattgtattctgaatagataaatttaaaaatcaaattgatgaaaatcatagacaaacttaatgatttttaaatctaattgctagaaaaattaaaaagaattttttatattattatctgccgagacacagtttctttttaccatttttccttctataactcgccaaactcttggacccaaagatttaaaagttttctttaattttagagttgcacgggatcgggtcgggaattcccggtcctccaggtcccggctgtccag

SEQ ID NO: 63494 - DNA, 1556 bp, Heterodera glycines
atggcgttggagtccgcaacagcagcgctgggtgccaataaacattgcgaatgtgaacattgctcagaatggataagcgcactgagaaggagccgaaccgaccgaccgatggacggacggagacgaaaactgaggacaaaatgccaagaatatgtgtgatcagtgacaaattcaaacccaatgccgcgccctttcgattgccaaagtgcaaaaatgccactgataaataaacaaagtgagagcaaaccaatggaattttagcaaaaatggagaatatatccttgaaacacagctgaaaatgggttagccaacagctgctgatgttctaattttgtgaaaaaaatcaaaaagttaaattgacaaaaaattgtttatattctgaatgttgaaattgaatatgccaaggcattccgcaaaattcaaacttatgacccattctttactgaacggtggaaacaaaatgaaccggaccggctcatttcggcccgcacggttcggccccagcccagtttttgttgatctataacttttttctttgtcaaccaaatccaacaatcttgatatcattcgaaagctcttcacatactctattagccttacaaaaagcaaaaagattttctagcctgcaaaaaaattatgaagaaaaaacttcaaaaaaattgatttttttagttttcatgctattacttttttgatatttgtcgaattgccaagcaatagcttagaaaaagtttttaaactcgttaccaagattgttggatttggttgacaaagaaaaaagtcatagatcaaaaaattggctggggccgaactgaggtagaccgaaatgaacataaaaaagcaaatgcaatttttaaaatttataacataaaatgtaaatattttgccaaatataattttaggtgaagtttcggtcagtttagaaactcttggcatttctgttttgaatataatttttacaaaattataataagaacaacgaaaaaattttgtttggcgcgggatgaaccttatgatatttcgacatggcctttgacttaaaaccgaaagttgagctgaggctttagaccgagactcgagactggcaccaaaaaaaccagctgccctgactcgagaccagagacaaacaccgttggcataatattaggcctaaatgatttcgggtattttttgtatttcctatttcgatttaaatccgttgctcgccttcccggccttagggtacgcccatttaaaattattttcaattatttaatttagttttaaaatatttttaatgtataattgatttaacatatttaataatttctctttgctctctttgctttaattaattaatttctctttgctttaattaattattttctcattgcttttcgtcgtaaacggaagcattcacatgaaaaaattctcaacattttaaaattattcaccaacaaaacaaaatcttacttttacttctctaaaaaatgattgcattttggcataattttggttttctttcttcaaaattgcaaaaaacatttgattttattttaaagcaaaaaaaaagaaaa

SEQ ID NO: 63495 - DNA, 1706 bp, Heterodera glycines
atggaaattgtgaacaaatttatggaaatgaaaaaccgattttatgagagtggggaaaagcgaccgtttcgccaagtggacaaagaaatagcggacaaattggacgtaaacgcacggacaatttacaagtggaaaaagagattcggattgagtaagcctgcgacttaattaaggtaattaattactaaaaattaagaattgggagagaacagaaaaattggaattttgaaaaagatcaacgaactgaaaagcaaaaacccacagataacattggcacaaattgagaaagaattgccaacccttggatattatagtaagttgttcaggctttttattttcggcattttttaatttttaagcttaagtttaaattttaacgtaaatatgtgctgattttcataattatttcattaaaaatcccaattatggtaattttggagaaaattcgtcaaaaggtttcaaattttctaactatcggcatggcgtcgttggtccctccgccaccaaaaatttttgagagaaaaacgcaccgaagattttttaaactatgaattaaagtaattcacaaaaaaaggaattcaaagttacttccttccattgtcaaatttattaaaaaggagggttgcgcctcggggaagaaattttcagggagcggcgggaggggggggggggggggagcccaaaattgtcgaggaccggagaagccgatcggagaatgaccccttttaagcagattctgcattctctgattcaaaatcattgaataatgccagtaaaaccctgtccaaattggctttcactgtcaaaattatctattaaaaaaaattactaaaatttcttttaggaaaagactttaaagaatcttataaacaattggaaacaattagaaaatttgataaaattgtggcaaaaaagttaagtccgctttcatttgaagagaaaaccaaaattgctgcagaattgggcgtgaaaatcagaacactttatgattggaaaaagaaattaggaattaatggtctgttttaaggggtattggaaattcatgaattttgtaaaaaaacggacgagggccatgaaaaaactgggacatcgggaccaatcccggtgtcgggatttaaacgataaaagttaaaattaaaaattaatattgccaaatttagaagagagaggctacggaaaaaaggaaaaaatagcaattttaaaacggtatgatcagatcaaaaaagaaaacccacaaaagacaatgggacaaattgttaaggaaatgcaagtcagccaaagcatgttttatttgtggagaaaagaattcaaagtcaaaataaaacgtaagtaattaaggaaggaattaaaaatatttaaatttatcggcacaaaatcctcaaaattaattaataatatttaagcacattttttatctgaggatgaaaaacggaaaatagtggcaaaattcaacaaaataaaggaaataaagggacagtcaattaaacgagaagacaaaaagaaaattgccaagcgattgggcttttcactgaatgcaattttacgttggaaaaaccaattcggtcaaaaaggtcgtttaattgcagagaattaattaatataattgtgttttattttaattatgaaaatatttgacaatttctctaacagaaagtcgaaccttcgaattgtacgaaagaatggaattgctgaaaaagtattacaaa

SEQ ID NO: 63496 - DNA, 1536 bp, Heterodera glycines; identical to SEQ ID NO: 33422

SEQ ID NO: 63497 - DNA, 555 bp, Heterodera glycines
atgttcaccaccgtccactacaatttcttcctacaaaaacgcgctcttcgctttaccgccgatcaattggtaggaaagagaattattgaaggaagtcaattttttgtttgacatttttttcaaaagatagttcttaaaatataaattgtgccattttaaaggggtatttttccctaaaaattcgtttacattggttttctgaatgtttgaaatttgtccatttttgggtcgatgcgtctgagctaccaaaggacaggcgcttttggctgccgttggccacttgcttggcccactcctacccaatgcttctcccattggacgccaattgctacagcgaccaaacggcgttcaaattgctcacaaaaaacataaaattgccgacggaagaggaggaggaggggaagagtgaaggaatggacgaagacgaccgaagatgaatgaaagaaaaagaagaaatacgaagtaggaaatgcaaaaaatgacggaagggattccaagtgggaagaaaaccatttgaatttttacaaattgtttgtttcatgttaaaaaaataaa

SEQ ID NO: 63498 - DNA, 743 bp, Heterodera glycines
atgtggcaattaggtgttaatgatgaagccccgcaggaggatgaagaggatgtgcaccttatcaaacaggacacatcaagacttgttaagaaaaacagtaatatgcttaacaatttttaatggaaaaaaaaatcatttttaattaatatttattttattatatttaaatattgtatgttaatataaaacatttttttaaaggttgcgatactggtgagacattgaattgcacttcgacggaaagtggagatgagaaggatgaaattttgatgtaaaacaatgaattttaaaaattaaaattaattaaaaatgtatatttaaaaataattttaaatattttataaaataatttgcattgcttaaattattttagttgtttttatatcataaggttattacaacgcattaatttttagttgatcattttaatcatctcttttaaacaaacaaatttttggtattaatcaacggtaatcaatttaatataaaccggacagattttattattaatttggctgaagattgacaattctcaattcttcagctgaataatttttaatttgaatcaattatcatttggcgaagtcctatactaaataataatttaattataaaatttattttaatttgaaaaaggaaaaccgcagcaatacctattacattaagaaaaaaaataatataccattattctaattgatttgaagaaaaattttatgattgatacttcctttatgtaaaataaa

SEQ ID NO: 63499 - DNA, 280 bp, Heterodera glycines
aaatttttaaaaattttccagcaaataatggaaatttttttcgaattccccccccaaacgaaaattaaaaagtttaataggcaattttcgtaacaaataacactctaatttccaaaaattttcccggcggcgcctatcggcaccgccggacctaccttttccactatttttacaagttttttgccttaaaacggccaaaatttggtcatttttagtgaaaaagtgcagttgttacccagcagtgaaaaaaaaagttattggttaaatagcaaaaaaaaaa

SEQ ID NO: 63500 - DNA, 892 bp, Heterodera glycines
gcggcaaattatggcattgtgttggactccctcccaccgctcgatgactactaccccggcggacacttccctgaggagctaaagaagccggagcagtggtacgaggagaaccgcaacacgccgtttgacctgcgcgaagtcattgcggattactgcaaagcaggtaaaaattgggcatcaaaaaaaaatatgcaaattttcttcagatgtccaaattttggcccatggaatggtcaaaatgcggcagttgttcgccgctgcaactagccaggagctgaccgactccatcaccatcccgtcagcctgcatgaagttcttcgtggtcttgtcgcacgtcggaaaagagagggtggccatcatcccccatcttgggtacgagaagcgcgggaagcagagtgccatcgctcgcaagtacctcaagtggcgtgccgaggaagagatgcgcgacaacggatggactcttcgccacgtggaaagccctggcggcgaatacaatcacggcaacttcctgctggacggcatgctggaggagcggatcggcgaagacaagaatttggcgatcgaagtgaatgggtaaggaaacacctgccaaacttatgctaattttctcccattcagatgctattggcacgcgtgcccgcactgcttccccgaggacgacgcaattgttggcggtggagagacggccggtgccattcgagcgagggatgagaagaggatccggcagattgcgcgggacttcgaggtggagatcgtgtgggagtgccagctcggacgaatgctggaagtggacccgcagatgaaggcattcttcgacaacacgcccgattccggcccgattgacttccatgacgcctttttcggaggtcattttttcccaatttttggttaa

SEQ ID NO: 63501 - DNA, 996 bp, Heterodera glycines
  unsure (1)..(996): unsure at all n locations
atgaaaaatttgaaacttatggcacaaattcccaatagttttttttcgcgaaaaacctggataaatgctttcccccataggcaatgcaaaattacactgtataatgttttggtgacaaaaacatacatgcaaaaaaggcgaggaaatgatttgccaaaagaaacaattggtaaaccgaaggatgtgccaaaatccaaaattgaaaaaccattcaatatgccaaaaacaataattgccaaaccgaatgatgtgccaaaacagaaaaatgccaaaaagaaagcatcgaaaaatgatggggggcaaaagaaagaaaaacttgttgttagccgaccatcatcacccaatggagtgccaattgagtttgaattggaaatcaatgaatacactaatggacaattgatcaacaaaaacactatttctggacaatgggacaaaaggaatgagaaaatcattgatgaaatgttaaaaaataaaaaagttggtgtcacacaattggggcccattcagtcaaaagcaggtatattagcacaaagatgaaattcagaaaagccgcgtatctcaggcaatatcatataaccagatctaggattttgccgcttaaatggcaatctttgaaagttttttataaatttttatttaagccacaaatgagggtaaaacctcttatattggggcaaaggtaattaccgaaaaataatatttatatttccatgtttcacgggaaaaattattttttaaattataactgattgataaactttttagacattttgccattaaaaccaggacagttcgaaactgaattccattttttctctgataaccatgcaaacagtcagcaatcaactgttgcatcaacatcgaaaaatcaagtcagaaatttttaattaattaaaaaaataattattttagaaatctaaaaaagtgcctgagcgtctattanaacattccaagtcaatggccgaatttagaaacacgcaaaactcaaatgagtca

SEQ ID NO: 63502 - DNA, 322 bp, Heterodera glycines
atggacttccgtccggtgaggtcaattgaggatacggcgtggccaatgtttggtctggcccggtcatcatgtgctgcaggtgcgcatcgtcgccacgtattttgtccccccgcgtcggttggtcttccgccgttggcgccgtttccgtcgacggtgtctccgtgctattgacgccaacgatgaaatgagcaccgcccgcgttaatgggcaccaattgggcgtcctggccgcgcaccggcaaaacagtgaccgtaccggaagagatgctgatgccgggcagtggagtaccgttactgtaggaagttacggtgctggagaaacg

SEQ ID NO: 63503 - DNA, 1161 bp, Heterodera glycines
atggcagatgaggatgggaagcgagtttctcgctctgaaaacgggcaacacattaaaaaaatgtttgtgaactcggccttggggtcatccgtcatgattgaaaataaaagtggtggcgataatgagccaaattatgaagagagtgaggtgagaattgaggtcttggacaaaacaactaagacggccttagggtcaccagtcatgcatagcagagctaatttagctataaacaacatgacaatagagaatattgaggacattaatagcttttttcacaacctttgaaaattattttgctcgaacatatcagattttgggaactttgacagaccctctgttatgggccatgttacagcccaaatctctgagtgaatcagagaatagaaaatctgaaactatttcaacggatgacaaatttattgttattcaaacagggataaattggaccttggcatcacgattaactgaagtgagttcttggcctcattttttgcttatgaaaaagaaatcacaatcagatgaatattttcgattgggtgaaatcattgatataaaagaatttgtggaaaatgagtcaaattctcttaatgcttctaacaaatttgcgacaaattttaccttgctcccagaggatggctgtgggtcaattgaaagaattctaaaatgcgaaaaaaccggcaaaataattgccgtcgatgtctgttttgatgtaggggagtcactacaacgtttctattcacaccaatttggatcagatgttgatgtttcagcaattgttgatgatgcttgggtagaacttattaccttaggttttcgaattcaaggctttgaagacagtctgtctactttaactggtctaaatacgttaagtgataaaccaacccaaatagtacctcaccaatacattggaaccagcattgatttagttatcaagattgtcagacaaattgatccagtagaggaggattaccgtcaatggtgtgagtttctcgcaaaacaacggtctacttccaaccatgatcaagactaccatcaccgaaggtagaattatattgagaacaaaagtaccctcgggtcaccagtcatgtgattttgttccctaattattaaaaatttgcagcatttaaaaacttattttaaattctttcttattaaaataaa

SEQ ID NO: 63504 - DNA, 325 bp, Heterodera glycines
atgtatttgtctatctttattagtagaaagtgtaaggattaattctttttgttttttgagcaccttatttggatggttataagtcggacgagaatcaaccgaagaaatatttgggagatgattcaatagtcctaattctgctctttcgaatgagcatttatttgttcaaaactattaaaatttcagagactagttaagtttttgtaacagtaacgaaatgagaggacaaaaaacaaatacagaaaatgtttaaaaaatatgaaacatttaattttaattttgtttggtatttattaattgcaaataatgattgtatataaattga

SEQ ID NO: 63505 - DNA, 460 bp, Heterodera glycines
atgcccctcgctaccgtattacctggcgagaagaaggtggacgtgaagtggtcagccattgcggacaaaaagtgctgcggatggatgacaggaggaagaggtggaggagcgggaggaagaagtgccgttggtgaagcggaagaaatgatgccgtcgccgacaacggcggtgccggaagatgaaacggatttttgtggttggagaggtgaagcggctgcggatgaatagtggggcggacggggaggagacactgtggcggaagaggaggaggaggagggacagcatgaagaggctaccaagtcagcggaggacatggcatgccaaacaaaaagtgaatgaaaaagtcaggcaaattgtactaaatggcacaaaaaagtcagtcagtctcgagccgaaactctcgaaccccgccccggccctccttactctcgacaaacgacggggacaaaaaacggggcaa

SEQ ID NO: 63506 - DNA, 555 bp, Heterodera glycines
atggtacaataaatatcctttcatttaaaaacaaattaatttttgtctaaaactttatgagtaatttatttgttaaaatggtaaaaaaaaataatttgtgataatggtaattgactttggcataaaaatcaaaaattaaaattaaaaagaggtatccaaacaattatttaatttatttattcaactaaaaaagtttggcacgttataactcgccactcgggctcattcagcaaaaaataaaaacatttggaaatccggcaacattttactattttttttttctttgcataagtttttattagaattttctaacgacacgaatttgcctacgcaatgtaattgaaaacgaagaatcgtttgtcgatcaagctgactgtaatacgggtacggctgccgacgactgggttcgtgatccgattagtgctaactgtcgaaatcgtccacagtcgaattctttgatagtaaatacataggtgtttaaccatcattgacctcttgaaaagcagctaaatgatgataataagcatagttgggagctctggattttctatttaa

SEQ ID NO: 63507 - DNA, 549 bp, Heterodera glycines
atgtcggacaatccgaaggacgtggagaaggaaatggaaaaagcgatgtaataattcaaattatttaaatttccatgctaatcattttgctttcccttttcagcttcatcgctgccgactgttggctcaaagtgttcgatttgcttccacgctctcagcttggcctcggaattgcgctgatcagccgccgatttgactatttcgttgaagaacacttcaaaacgcgcaaatggaaattgggcgaaacaatttatgctatggaaattgggcaaaaaatttagctttccgtgcgccgttttgtcaaattttttttaaattattaagtgtaggaacaaaaccgaaaagtacctgatttatgcccgaccgtaaacactttctaaccatttctttctttgcttcctttggattgtgcgacatttttttttttgctggtaattaacgggaatcccgccgggaacgggaaaaaattttttacgaaaaaatcatgttttttttctaaaattttactttattttattttttcaagtgaaaatactaattttttaaaca

SEQ ID NO: 63508 - DNA, 108 bp, Heterodera glycines
atgcttcgcactgctactgtccatgattggccagaatatccggtcaggggcattctgctggacacttcgcgacactatctgaacaaaaatgtcattttgcgacaaatt

SEQ ID NO: 63509 - DNA, 4003 bp, Heterodera glycines
atgtacaagctgaaaacgggaaggcatttcgagaagaatgttgcggcacacattgcttctctgcaagcggcacaagcagcaaacggaggcgaagaaaaagcagtaaaatgtttttatttacaataaaaaaaattatttttttactttttaataaagttttatataataaaaaataaagtgtttataaaagcaatttttttaattttatttcaatttataaattatttttctatttataataaatttttatttgtatatgtcattatttaaattatttcattaattaaatttacaaaaccccttaaattataatttaaaaaattttttgttgtaattttcattggtaaattattttttcaatttatatatattttatttttattgttgtttataattatttcattaattaaatttacaaaatgccattaaattctaatttaaaaaaatatttttttttaccattttttcccatttttctcagctgatcgttcccgtggttagccacgcggttgcggacgtggagctgtgcttggactcgcgccagctgcttgttgccagccgttctggccaagtcacactgttcctttttgccaagaccgaatgttgccaagaaattgcggtaaatcccggatttttcaaaattttttttatacaaaatgccaaatgaaaatttttgctaaacaattttttttcatacagacattggtgttgccacagttgtgccgttccaccatttcaacaacttttttacccacaacagcaccaccatcgcccaagaatggtggccaagaagtgccaaagggtaatcaaaaaattaattaggcattaattacgctattaaaaaatcattaaattgtttcggtcatttaattaaggatatatctagtcctccgcccgcgtattatttcctccgaaatttaaaaaaattttctaatataaatctttcaaaaaaaattaaagaagcttttgaagaaaatatttttgaaaattttcttgcgtttttcgaaattttatgatgaaattactgttttttcaaaaattttttccaaaaaaccaacggatgaaatttcttataaaaatttctaagttttttgccggaaaattttcaagtttaaaactttaataaattttttatgaatagttgattaataaattaattgtcactttgccacaggcaatttaattaatcaattaattagtgaacattaagccgtgtccgccaccggtcgcctcaagcgacaatcgcatgctgccgacggcacagcaatgccatcggcgacgacggcgccagcggccgaacaatcggtgccatcgccgccgcttccagcgccgtcgtcttctcgcaattcctcccactccacggacacatcgttgggctcccactgcgcggaacttatcccgctgaaagtgcgcggcggcgcattgcgccggcccgctggtgggtgccatgccgaaataaaaaaaatgattgaaaatgaatttccaatcatagatggacaggggggggggggggttgggtaaatttcgtaaatcatatagagaggtccgcggcattgcgtaaaattttcaacgaaaatcgtaaaagcactggtaaagaggggaaaattttttatgaaattgggaaaaagcaaaatttttcttccaaaaatttaatgaagtttaatttcgtttcaatttttaacgaaatttcttcgtttacaatttcgtaaacttttttttatgaagttggatttcgtaaatttttaaaattatagatagttaagaaaaaaaaattatgtttttttctttaaaaaattgttataatttttttaatgaaattttggcgcattctacataatatgaattttttctcgccccaggctatcagcccgagttggtgtgccaaatcccgtggatcaatggcattcgacccgagttggtcaccgcattggcactgaattccgcgcacggactcattgcactgggcaccagagttggctttgcgctaatcgatgcgcacaccgcggcacaggtcaaactaattttattaaagtggattaattaaaaaataatgtaaattaaattaaaaaattaaaaaaatatttaatttatttattaaataaaatttaaatattgaaattttgtttacctttaaagcttaatgaataagaatatataataagcaattataaatttttaaatagccttttaaataataatcattcactttctatatgtaaatttattaaaatttatatttaatatatttaaaattttaatcaaatttaaattaaaaaactccattctgtcaaggtctacgcttggtccaacgatgaactgtttggtcgtgagccaatcccttattggtcctccgcgttgaacagccaaatagacgaaatgaccatttcgccagcaacggaggttaacgcgaaggcattttttttaccaatttcccaatttattttaatgactttaaaaaattaattatgggtacttaagctaattaccgtgatttaattgcgcgtttgactaaagctactcactgactaattacaattatatacagcactaacgctcattccttacagtatctctctccctttcacagtacacccagcaaccgtacctctctgtatctctttgtctttcctccatttctcctcctttttcccactttgattataccgtactatctttactgaccgcatacaattgacagtatacttaccgtaaccgccgtctttttcgatactcacacaccatacataatacaaaacatacttactgaatatacaaataccataacaacaataatagctcgccccgtccgtgtcgtccaccgccaactcgacgccgcgcaagcggcacccgctcgcgcgcgcgctgtccatccgctcgccatgcatcaaagtgagtagtgtgtgtgtgtgtgtgtgtgtgtgtgtgtgtgtgtgtgtgtgtgtgtgtgtgtgtgtgtgtgcgcgtttgctgtgctcgcgttcaccgtatttcggcaaattgcttattgtataccgtaacgggaagttccctgtactgtgtctcctcggcactcgataatgacgtcgttattttgctgctcccttgcacgttcaaatgcaggcataccgtagtatattcattttggttatggtagaacgagaatacgcattttacaatgccaacggttgcggcggcattttgtctatccaattcggcacatggatattaattaaaattaccctctgcctgcaaaaattcttatgagtttgcagtttatttgcttttaaaatagttttataaaattaataactttttttttatttctaaataattatgcaaataaagtaacattttctctttacctatttgttcttgattttaatatttaattcttgttcaataccaattttattttcacctaattcacttttattacaccacttcagttttaattactaacaatcaaattatatatatttccagtttatcattccaataatcactcacatcacctttgttcaccgagaacggtctgatcagtttggtttggtttgaaaagctactgattaatcatcggttctgatcactcatttggatcattttatttttgaaattgctactcattaaaaaaaacttttttttttccaaattaatcactccacttcttttgactaatttattttcttctcctgcttatcaggggcctttgctcgtcttgttataattgttgcacccgggtttaactttatcgaggcagggttaaggaaattaaattagttttgattattaaaaaggtttttaatttattttaatttattgttagaaattaattttattaatatacaaaaaattaaataattaattttgggtaatttcacataaatagcttattaatttccggaatatatataaatttcaggaatccagaattccttcttttatatacgggtctggaaattccgtcttctactatcataaatttccgggatgtgcaatttcaaccttaaattaccggaatccataa

SEQ ID NO: 63510 - DNA, 383 bp, Heterodera glycines
atgccaaaacaaaacgaaatcgttttaaaatattcctttctggacttgacttggtttcttgatatcgaagctgttttctacgctatttctaaaacggttataccaaaccccagatttttgaatccggttttcagaaaaaatgccttgtggtgaaaacaatatttcacatttcactccataactttgtgagttcggcacggatcgagaccgggataagaccattggaaagagcagctcgagctctacaagaaggtatggaaagaaaaaatagttatttctgggactttttcagaaatcagaattaattctccaatgtggcccaaattttaggcccccagccacagccctttgcttctcccagttttaagtcttggatttgtcaa

SEQ ID NO: 63511 - DNA, 952 bp, Heterodera glycines; identical to SEQ ID NO: 33444

SEQ ID NO: 63512 - DNA, 656 bp, Heterodera glycines
cctcttcagggagttcaacagttccttggtccgcgtgatgaccttttcgaccacttacgtcgaggtggaggtggtccgtgccggcctttccatgctgccatttctgatggtcagtgagtactggaaaaaaaattgaaaaaattcaggattcaaaaatttgtgacttaaattccgggaacttttgactttcggcgtgcctaaccctgcctagaaacattttttttttgttaatttttgtatttttttccacttttctccatttttgtgctctcgcactcgcttttctctgcacctctcttttcatccatctctcgcttcttttccccattagtctctccaattttccccactatttctttcccttcacatcattactctttacactccctgctaattgaccgtaatgggccaattcattcattaattatactaattaattgaatttccaaggtcggttttgccatcatggccacctgcacttctgtgtccgtgctgctctcggctgtttattggcgccaatggcacgtgcaaaagttggcacttgcgctgatggcatgcgtgtgcccattcatggcgtgcggcaccgcgttgggcctcctgtttttggccggtgtccgttatgggtaggaaattcgtaaaaattttaaaaattaaaa

SEQ ID NO: 63513 - DNA, 343 bp, Heterodera glycines
atgatgatgaagcaagtgctgaaggcaaagggcaagcaggagaaggacgtcattccgtaagcataaaaaatgaaggggccgggggaaggacgggtgggcgaagagcatttggagtttcattttgaattaggattctgattttgaatttttatttgggaattgtctcggcacttttgctgacggaacattcactgctttcagatggcagaaaactgtgcaaaagattggcaacactgaaaaaagacgaaaggaaatcaaatggaatttggaggaggaatcggtggaatcgctggaccaattgacctaccggggactgaaaaggcagggcgcaattgaagacaat

SEQ ID NO: 63514 - DNA, 102 bp, Heterodera glycines
atgtccttccgggctcgtaaagtcccgttgaaaaaattggaacaaaaagtgccgaagtgttctttggaattttatttcgccgattcggcactttcttgctca

SEQ ID NO: 63515 - DNA, 709 bp, Heterodera glycines
atgtttgcgttttatttgtcaaaatgcggaacaattgtttgattctgaggaattcttgcaaattgatcagaatttgttgtgtgaaatatttggccgtgatcagttggtgatcagcaatgaatttggcatttggaaagctgtaatttgaattgaaagaatattacataaaatactcataatttaaatattattaaggcactccgttgggccgacgaaaagtgccgtcaaaatgccatcgaatgttcctctgaaaatcgtcgtgctgcgcttggcccggcactgttcaaaattcgtttccctctcatcccatcagatgcatttgtgaagcaaatcggtagaaatttaattgtttttcgacctttgcgcttttttgcagttccttctggtgttttgtccaatgaagaatttgtcggtgtttatcagtttcattgccatccgaatttttgtggtgtacccggactaaacccactgaaatttccatggaacggacgaattttcgattggaacacagccaaaggcaacagaggaacattgacgatggaaattgggagattttctgaatttacacaaaaggaagtggggagtaaatgctttagtgattatgaaatacgaataaatggatttggatggaaaatattggcaggaataaagccgaaaagcaatcaaaaatggctgggcttttacctttgttgcaccgctccaaaagaag

SEQ ID NO: 63516 - DNA, 747 bp, Heterodera glycines
atgacttttaaaataaacttttcaaggtaaataataaaagaaagcatttttgcgatgcaaaatcgattaaaaaattgattaaaatttagcataaaaagtatgaccaacacaaaagctagaaaaaattaattaattaattatatttcatatgattggtcaaatggaagattttgtaaataattataaattaccttattcgattaattcaacgatttaaaaaattttggttgagaaatttacagttaaaaattttattgaaattttttaaaggcataattcacattaataattgaaaaccatggatgggctggccaggtcaggaaagagaatttaatttgtttaaatttttaaaagtgatgaaaacatggaaattttcggtcacactctgaatttttgccactattttgctatccccccaccccgagtttaggcctctattttgggatttttcgacctaaaaaatcttgcaaagattttatttaagtcatattagttttttaccagtttctattggatattttttgttcttaagaaataatttgaaaattacagattacgtattatggaaaaccttggcggattacggatttccgtaactgaaaatacatttacgccggccccattcaataatattaatggaaaaaaagttacgaagaaaaaagttcattttcaattttttgatacccggagaaattgggcaaaaagggtagtttaaaaacgaaacatttgtaaaagtattaaaactta

SEQ ID NO: 63517 - DNA, 769 bp, Heterodera glycines
ttgggcctaatcaattggagcgctttgccttcgatgttcaagcgcaacagtgcgtgccgttcgcttatcgcgggctgaagggcaaccgaaacaattttctgagccaagaggagtgtgaggtggcatgcctgccaaattcctgcccttccggtgagactgcaggaccaaaacaacagtgcctttacgctgatcctttcccatttatgcactgtgaatcctatccatttggtcggttttaggaagtccttttgtgggggccgatggacgggcccaaagctgcgcagtaagcacggcgatgagcacatgtcccaacggttattggtgccacgttggggcgaatgctgccacgacaatgtgttgccctgagggtatcggccgtttgaagtgccgccaccccaaagtgttttgtttagcaaatgccagtccctgccaattgccaatgtccacgggggagggaccgttccgattggatcgcttttacttcgatttgggctccaaaagttgcaaatcgttcatttacaagggactgaagggcaaccagaacaacttcctctctttggtgctttgctcctttcgttcgttttcgcttttccattttctgctttagcgcgcgtgtcagctcagctgtctccccctcgacagttcgtccgtccaattggcattgccaaatggcatttgccaatgctttgctttccttcagatccgtgcattggtcagccggccaaatcgaccagtgggccaagtgtttttctgctcggcttccatcgcg

SEQ ID NO: 63518 - DNA, 186 bp, Heterodera glycines
atgatttatatcaaacaattcctcttgacaggtaaattatgaatcataaagaattttttttgacaaaaatgaaattaacataagttttggttccacaaaacctaatgaaaagaattgatgaaaaataaaaaaaacacatataaatcattttcaggtcgctttaccgaatttttttgttgtagttaa

SEQ ID NO: 63519 - DNA, 460 bp, Heterodera glycines
atgtcggggttcggggtcggggcggggtcggggttgcaaccctagattaaattaccagattttaattttgtaaattaaaaattgttttaaaaggttttaaatttaaatgttgagagagacagaggaacagaaaatggagaaagatgaagagaaagaagaatataaagaagaaaataaagaggaagggaagagaaagatgaagaaaaatagtgaggaagagggacagaaaggggaagagagagagaggggggaagagaacgaggaaaagagagggagagaagaacaaaataatgatgaagagagagaggaacagaaagaaacgggaagaggaaaaggggatgatggaagaaaaaagaggaagaggaaagaaagggaagggggaacagaaagtgacaaacagaagaagagggcacaactaaattattctcctaatttccttcctattagtagaatagattag

SEQ ID NO: 63520 - DNA, 255 bp, Heterodera glycines
atgtctgatgctgatcattttaatgcgcacgaatctttcaacgacacaagtaaaaatcacacaattaaataaattaattcatttatctaattaattaattgcttaattaattaattgcctaattaagtgtggccaggcagcattgggggcggcgatttggtggaaaaaagtgccattccgtggtggaaaagaatggaattttggcgcaacagtttgatcattttgctcattctattgtttggacttatttttttg

SEQ ID NO: 63521 - DNA, 141 bp, Heterodera glycines
atgacaaaacaacgaatggtcgtgaacatttacaaaagtaaatatgcgaagagaaaaacggaagagatttctttgataagccaagtgaaggaaattgaagagattgagcggttgaccttcgacgagaataaatccattttt

SEQ ID NO: 63522 - DNA, 551 bp, Heterodera glycines
atgcattcgatttttataaaaacgtttccttatttatttaattttaaacaatattgtacctctcctaacaatgttgtaccacttctaatcacagttgtaccacttctaatcacagttgcacctcttctaatcactgctgtacctcttctaatcacagttgtatctcttctaatcacttttgtacctcttctaatcacttttgtacctcttctaatcacttttgtacctcttctaatcagtgttgtacctcttctaatcactcttctaatcgctgttgtacctcttctatttactgttgtacctcttctaatcactgttgtacctcttctaatcacagttgtacctctttttatcacagttgtacctctttttatcacagttgtacctcttctaatcactgttgtacctcttctaattccagtgaatcccttcacagtctatgtagaaaatctcctaaagagtcaagtgctttttcccactaaatatccaacgactcacgcaccccctatatactatatatgacatattgacatggagtttcgattctcaaa

SEQ ID NO: 63523 - DNA, 1037 bp, Heterodera glycines; identical to SEQ ID NO: 6992
  unsure (1)..(1037): unsure at all n locations

SEQ ID NO: 63524 - DNA, 845 bp, Heterodera glycines
atggctgaaacagatgccattgcaattttatgtgacccagacattaagctcaatgcgggtgtcggaagggcaatcagaaacacaggtggtcaggacttcatggttcgttttttgaacaacctttcaagaaataaactggatataatattcatgaacatgttttagttctttattttgatgtttagaattctttaaacgaggagaaacgcaaacagcgtggttcacgtgtgatctctgttcctatttcaagtggaattcgctctgcttctgtgctgttggctcccgtttctggcatggaccgtcattctctcgaccaagtttattctgcaatcatccaaaaagctttggaccttcggattgagagtctttcgatgcctctgcttggtacggtttttattatcatatttttcaattcattaaatttaggaaatttattttcctcacttgataccgcttcaaattatttgtgggcttgccttcagcagttttcttcatttggtcgtttaaaggtaaatggaaattattttcatttagccaactccacattttagaaaattcaaatcgtggacaccaatgatttccatatgcgatctcttcacaaattcatcattgccaaattgcgtgctcaatcacaactccaaaatggttcatctgcttcaagtaactcggaaaacaatcaatcggacgacagtcggctgacagtgagcacaccaaccgggaacaccgacagcgaacagtcatttcgcttggttggctcggggacttcgcaatcgccaattgaacttttctgttccactggtgccggacccggacgcaatcttcgtgagttttatttgattaattaa

SEQ ID NO: 63525 - DNA, 398 bp, Heterodera glycines
  unsure (1)..(398): unsure at all n locations
atgtcatctgcaaaaaataaaaaatccattgagaatgtaatcatcagtgttcggaatgagtttggttatctgaaccagctctgggacactgtttacatggacttgccaacccgggaattccgcgtggaagaagcctgcgaatttatgttcaatctcctacaggtgatcagaaaatcagaagagaaagtaagtacattaagaccttcatctacgtctaaatatatttgcaattttaggtggtccgtaatattgtttctgacttggaaatccgccgagaagcagtgaccaatctgaggaaatttttggggttgccttctttcgacgagtcgcttttcccgccncagtcgatcgcattggtacctcanattttttctaacattctcactgnatttttttag

SEQ ID NO: 63526 - DNA, 367 bp, Heterodera glycines
atgattgctgaacccgaagtgccttctgcgaccaatgttgataacgatgggaatggtgatgaacaaacaaaaaacgaccaacctgtcatttacaggtacaaaaataatttaaattagtctaattgcataataatttttaattttagcccagatgatcaaccaattgagcttcaattttcttaattgatgaaagaatttcaaaaactcgcccaatattggttcaattattttttatgcatctaaattttaatatttttttcaaattgtggtagttaattcattaatctttgaagatgatatgtgatcaatgaatgctaatttaatcagtcaaacttttcctttactttatttcattattttgaataaa

SEQ ID NO: 63527 - DNA, 524 bp, Heterodera glycines
ctggttttgaattgattcgaaacggaacgaccagcatcaaggtgcaatttaatgagcctataaaggacggcgggtatgagatgatcgttctgggggaatttgattcgattttatctattaatgctaatcgtgtgctcagtagcgacggaagcatatgatgaattcttatgagattgaaatatttctatccaaacatccgacaacccgaaaatattttatcgggtttttgcttccgacaagatgccaaaattgaaggacaggcattttccgtactgttttgtggcgaatactgaccgggcgggcacgataggtgaacactgggtcgcctgttttgtaaattcgccgacagaaattgaatattttgattcattgggcgattatcccaatgaagatttaagttcataccttaacttatttgaacgaattctcattaacgaccgcatcgtccaacatcaattctcagatgcatgtggtcaattttgcatttatttcttgacacagcgctgctccggaatcccttattg

SEQ ID NO: 63528 - DNA, 2509 bp, Heterodera glycines
gatttggagagacatgtttattgatgccggtgaagcttgagtcgctgaaggcgacatttaatttggactgtgaggacaagccctttttcccctattattacaacaagaaagaaaattatggaatacgattggaacatctgctaccgatggaggactattcgccgggatctatgaataaggataaatttataaaattcgaaaaatggtaggaaaatagaaaaatttttgaataaaattcttttttttttcaggtacaatgagaacaaggagacacccttttatttggatgaagaattgagaaattattgccgaaacgacacggagattttattgttgtctattattgagtttaggaggatattgattaacgacattacgaaaggattcgaccccctgccgaggagttgtacgaatgcgggggttgcgatgaatatttttaaagcaatgtttttattgacggagcaattatcgattgtgccggagaagggatatgagcggtgtgatcgcgccagtgtgatggcaataaaatatttggagtggaggagcaagagagatggaattgagatacgacacgcggggaacggacgagaagttaaaattgggaattacaaattggatgggtttattgcgaataacggagctagcgacaaatgcattgaggttatgggatgttacatacacggatgtttgaattgttatgacccggcggcggaactgattggaggaaggacagcccaggaattgaacgatgagtctcaggagagattagtggagctacggaagactttggatgtcgaagaagtttgggtatgtttatttgacatttgaatttataaattctactttttaggggtgtcaaattgagaaggaattgaaaaaggatgaggaaatgagggacttctttgacgacagaggaaatgagaaggggccgatgatccgaggatggcatatgagggagggaggacgggaccgatgaaattgtttgcgaaatcggatgagaagaagaaaattagtgtttatgatattgtgagtctgtatccgtcggtgaattacggtacagcttacccgattggattgccggagattattttaccgaagagtgatgagattgatgttaattggatgagaccggaggatttgaagtataatgggttgtataaagtgagggtcaacccgccgcgagggttgcgggttccggttcttcagttgaagtgcgatgagagattattgttcccgttatgttggagatgtgtgtcaaaatttaagaaggagactacgagatgtaactacaagtgcccacatgatggggcacagcggcgatacgtggcgacatatactagcgttgaattggtaagaatttatagagaaaacttttaagaaaattttgacattttcaggcaaaggcgttggaatgcggttatactgtggacagattttatagagcgtggcactacgaagaggaggcgaatgatttattcaagggatacgtgcgcttatttttgaagctgaaggaggaggcgagcggtttcccgaagggggttgagacgggggagcagaaggatatgtggagagaagagtataaggaaaaatatggaatcgacattgaattggctaaagtgaagaagaatccggggttgcggtacataagcaagttgatgctaaatagtttatgggtaagaaaattgaaaataaatttcgataggtaattttcaatttcagggaaagttttcgatgagaaattgtttgaacaagaatgcggtaattgatagggcgtcggagttttataaaatagcgtgtgaccataaaattgaattatgtgatattgttgaatattcggaagaggcgattagattgatatacagggacaaggaggactttgtgatggagcacaagtcgagcaacatagtcattagtttatggtgagttcaaaaaaattataaatttgtatataacctaattttaggacgacgagtatggcgaggttaaaattattggaattcatgagagaagcggagagccatggcggagaaatattgtacacggacacggacagtatttttgttttgcacgatagggacgtggagccgattacgacggggaaatttttgggagaaatgagtgaggaatacggtgggcatgagattgaagaatattgttgtggaggggcgaagcagtacgcgttgaagatgaaaaacaagcagacgggggagacggaatacgttatgaaaattagggggattacgttcgacgtggacaacaggaagactttgcattacgatacattcagggagatggttcttagttacgggaaaggggaggttgacccggcgttcttcgtgtacaagaatgattttgggtacgtttttcaaacatttgactcattaaaaaatcaatatttaggccgacaagggattcaaaagtggtgacaagggagaagcacaaaatgtacaggccggtctgccagaaggggataatcgatgaagaacttaatgtgatgccatttggattt

SEQ ID NO: 63529 - DNA, 111 bp, Heterodera glycines
tttagtgacaaaaccccaaaatagtgatttatagtgacgaaaagtgacgtccaaatgaaaaaattttaatgcagaaatgcgttttttgagctcctttcttcaaaacaattg

SEQ ID NO: 63530 - DNA, 105 bp, Heterodera glycines
tttattgttcgtcaataaacatttatttattgattgtcttccttaaaccctcggaccgaacaattggcgcagtcacaaaaatttggactttgctcacatcttcgg

SEQ ID NO: 63531 - DNA, 204 bp, Heterodera glycines
atggatttgccatttgttgaaattgacgagagaggggtcgaacggcactacagcagagcagtggtggacgaatggggcttacgccgcgcatttcgcaacgaacggcgcaaaaacggcgccaaacatgaaatggtggacaaaaagcatgaaaagttggcactaagaaatgcggccaagaacaacgaaattgcccaatatacaaag

SEQ ID NO: 63532 - DNA, 1147 bp, Heterodera glycines
atgggcaccaaattgacattgtggccatacagaaccgagaaagatcagtcaatttgggatgtttttgttcgcgaaatttggccaatttttgcaccaaacattcgtcatttgggctttcacgatggcgattatttggacaaattgcgtcgtcgcacttcaccaacaattctcactgatcttgatcaattgaatgcaattgattccggttttctattcccagaaggaattgccgattttgatgtgctgaatccaactgctgcccaagcgttgaccaaatggttgcacactccgagcaaaaatggtcaaccgaagcgattgtattactttaattctccacggaatctcggatgggtcaacagcttcaaagaggtcgtctcgccagaattttcgtcaatttgtttttgttttaccaatttttgtgtttaggcattccgtcgtgccaccacttctatcagttacaaaattcgatttaatttatatttggaaccaatgccaattgaaccatttgaattggtgaacaaacggacgaaagaaaagctgacactgacgaaggagatcgacgaattcgacgtaaatgtgtgtaattggctgttgcaacggtgcccaattggggagacggcgacggtgccagcaattaaatggaaagacagcgtaaatccgagtgccaatttgaacaatgtcacttttgatctgtggagtttcgataaatccattgggtgagcagcagcaatagcatttgaattttatcgaaaaataaaatatttaattaattttaggccattgtcgccaccaacggaagaagaaaaagaagaagcggatcaaagcaacggaaatgtcatctgattaagtgtacgggaaagaataattaattgtatttgagaaatgatcgatctcaatttgttgtgcttattttctctcagaaatgcttttttaattgtttcgttccaattatataaaaatatgcttttttgttgagcaatttattaataattagggtttgtaattatatggatataaaaacgcgaaatatggccataaaatatggaccaaaaatcgcaaaatatggacagaaaatggcaagaatatggacataaattttccgaatttatgggtaaattttcaaaaaaaaattttcaaattcattaaa

SEQ ID NO: 63533 - DNA, 777 bp, Heterodera glycines
atgaaactgtgcttattattctttttaattgttgaaattgaaattggagcggaaaagaaaaaagtgcaacaaaaaacatttgaagaaatatttggagaaaaatgggaagaaaaagaaaatgaacagaaaaagagagataaaatagaattgaaaatcggaaaaaaattgggcacaaatcgaaacaaaatttacaaatggatcaaagaattaggaatatacaaaaaatggcataacaaatcaaaaacggatgtacaaaaaattgaaattgttcaaaaatttaatgcaatgaaaaatgaatataaacaaaatggatgaaaatattcgacaaaagaatgggacaaaaattatgaagaaattgggaagaaaattggagtaagttatgtaacaattcaaaaatggaagaaacaatttggaatgggtgaaagattaacggagaaagaaaaaatggacaaaatgaaaatatattggaaaatgaaaagagaagacgcaaaaatgagtgacgagaaaatttcaaaaatattgaaaattcatcgactgaacattttcagatggaagaaacaatttgaagaagaattaaatgaggattaaaaaaacattgatgagataaaatatcttttcatttattcatttttttcttgtcatgatttgcattcactcaactttttgcttcctcctaatccaaggccttgtcttcatatttgttttttaatccctatattgtatagccttacatatttttgatttttcttaagataattaagattaaaaaaaggtaaa

SEQ ID NO: 63534 - DNA, 575 bp, Heterodera glycines
atgaaagcgaaaaacgaaaaaagtgtccaattaaagcttgaagtgccatcgccaccgccactaccaaacgaattcgaattaaaaaatggtaaaaaaaaatacataaattatctaaaaaatgttgtatcattaaatattttattccaatttttaaggagggatattatgaaaataataattttattttttaattagaatttttaatattttagtttttggcatcagtccaaatccattgcgccagaaaaattgtacgaaagatatacagagtcaaaatgctgacgtacaacaacagtatgacgacttagaaatgcaattcatgattcaaagtacgataggcatgctcaacgaatttgaggatgaaaatgaatgaaaaaaaagaaaaatgattttatttttgattttttgtaaacatatattttatgggttagccgacatttgcggaccgacttttgcggaccgacatttgcggaccgacttttgcggaccgacatttgcggaccgacttttgcggaccgacatttgcggaccgacttttgtggaccactatttctgggttgaactgtctaaataaa

SEQ ID NO: 63535 - DNA, 135 bp, Heterodera glycines
atggcgctgaattggacttttcggaaggagtgcgtcattattttcgtaatgaatttggtcaattatgtttcattgatggcaatggtgcactttttgtactcccgtagagcgaaaaaccgaaagagatactgtata

SEQ ID NO: 63536 - DNA, 345 bp, Heterodera glycines
atgcagaggagtacaagtaagaaaaataaatgaaaaattaaaaatttttcaatatgaaatttctagaaactgcaattttgaaattgggcgggtcgagacgggctgatccctttaaaagcaatcggttccgagtctctccgatgctgttcaaatcggattctcaaatttcccggctcggaaccagtttccatttggataaaaatttaaattcccatgtattttcaccaacagtgaaattgataaaaaaaagtctcttgccaataaaattgatgtctccgaataatggtttaaagactcaataactgttggtataaaaaaggctagcttttagtatttcttaataaa

SEQ ID NO: 63537 - DNA, 745 bp, Heterodera glycines
atggtcagcgaccaaaaccggatcattttcaacttgcgctcccagatgatagaccaaagagcagtcattttgcagaatttatcacggattgagagattggaatgtttcgcttcgaacgtaatttaaatttatttattggatttttttaaattttataattttattttaatataataattcaacattgttaaaattaaaactattttttccagaaccgcggtggtcgtggtaactttcgtctgcggtataacccaatggcggctgttgaactgaccctgctcgggaatcgtcttgaggacagggctcgtagacaccgggtggccataggcgcatcgacgtcagcatcaactgtgaacgaagccaacgggggcgagcatggcgagggaagtagcgcacaaaaccagaacggtgagttttaaaattgtgcataaaacaaaataatatatagaacagtcaactccgcgcacttcacgcgtgcctttgtcggccataggtattaaaataatcacatttcaatttttatcccccccccccccccaaaaaaataggtaatgttgtcgctggtcaggctgtgcagcagcctcagctgttagaaggcgaaaatggtgaatttatttaataaattaaattatataaattattttaataatattaaattttagtgccttcttttgggccaacaattgagcgccatatggagagatcgcgtcaccggttgctccatgacgagatggttcagagatcg

SEQ ID NO: 63538 - DNA, 234 bp, Heterodera glycines
atgccaattcagacaaaaagagaaatggagacaccaaatgagcaacagcagcagaattgtaatgaagcgattgaacttccgtgtgtaaatgaaaagggaggacaaagcaatggcagtgaacggccaaagcaaacgataaaacgaaagccgcaacaaatggccaagggggaggagtgcgatttgttgtccgacgaattcctctttgagaatggcaattccatcgacttggaatgg

SEQ ID NO: 63539 - DNA, 758 bp, Heterodera glycines; identical to SEQ ID NO: 33486

SEQ ID NO: 63540 - DNA, 615 bp, Heterodera glycines
atgcacgtttggttattggtgagtgagtgggacgaatggcgaagaaaacaaaaaccaaagacaaacaatcgatcgatcatttgtttactattttataatagcaaatccaattatggcatttaatgatgtcattacttttttcttcaggaaaacatcgattattctgctaatggcacggagggagtacagcttgaaaatgtggaggaggtgagaaggggagggttttttcgccagaatatttatggcatttataagctaatgagcatatttgtatatgcatataataataaccatttaatgatggccaagcgaattaattggacgaatgaaagcattcagaaaaaagagcaaaacgaagaagacactcagaacagtggagaacagcagcaaagagaagaggaaaaggacgacgaaatggcggaaaacaattgggagaaaggggaggaagaagaggaaggaggaagagggaacggaggcgaagaagacccaatcgaagtgctgctcaaagacattttcggagggcacggggggacagcggcggtggcagcagaaacggcggcggaagaggagccgacaacgagcggagaaatgcaacaaaatgccaccaacgaaaag

SEQ ID NO: 63541 - DNA, 874 bp, Heterodera glycines
atggcacggattgtgcataatgatggcacatgtaaaaattactggaataaattgaatatttaattggcttttgcatttttttaaaatccaatttactctagcaaatcttttcaaccaaatcccatcaatccctgtggacaatgaattggaatgtgcaatttgtcttgatcaaattggtgccggaatacttgcgaagcgaatgccctcgtgcgaagtaaataaatattattaaatatttttttaatattaattttagcacatctatcacgaaaattgcattataacatggtgagcatcagaaaaattataattgtaaaaaaataattttataaaatctattatttttaaacaatcgaatgtcatctctactcaaaaggttccccaattttctgaatttaatttctaagattttgaggaaatccgatggaaatggaaaattttcaaaatattataaattaattttatgggcgcaaggttcagagcatttatagaagtttaaaatagatttaattttgttgttgtttgtgatcccaagtgcgaagaattatgcttatttaaaaataaaaatttttaattttttaggtttcgagttgggcataacacttgcccaatttgtcgtcagcaaataattgaaatgccaatgatacagccccaaaatggtccatagcgaaactgtgtttgaccttgtgccaacagcgcatccagaaattagctgatgattttactataaaatattaagaaaacaaaaaaaaggtgctgagagattataaaagataataatattttattatttatgtctatatgtatttgtgatttacacaaacatcataactagggctgggatttttatgtgctaaaaatcctgaaatatgta

SEQ ID NO: 63542 - DNA, 675 bp, Heterodera glycines
atgcctggacctggacctggacctggattccatgttggacctggacctggatttcctggtcaaaaatcaaggaaaatccaggtccaggaaaaatccaggctcctcgagacctggatccaggcctggacctggattttttaaaccaattttaaaaatcaaaaaaatgtttgaaaaattcaattaattgcttgggaacatctaaaaatatctaatttacaataataatttgtttttaaatatatttaatcattttttgaaaacttgaaaaaatatcggtcacttgaaataataaattctaaaattttgtccaggaaaatccaggttttttcctgttttgcctggacctggacctagatttttttcacatttgacctggacctggatttcctggacaaaaatccaggaaaatccaggttgtcaaaaaatgacctggacctggatccaggaaaaatccaggcctggatccaggtccaggtcgaactctactgttaattcttcagtgaaaaaacaatgagctgaattaatttataattttctatatttaattaattatctaattttttagggcatattttggcattttctgatttctattttatattatataatttttttgatattatttatgtcgttttaaacactttaagcattatggatttcaaattttatatataa

SEQ ID NO: 63543 - DNA, 523 bp, Heterodera glycines
atgttcttatttgtaagaaatgttctgatttcgggctattgttcttactttgttcttatttgtcgcttctcagaaaaatctgtcaaatttctttaaaaatttctgattggcgtactgtttaagaaaaatattttcaattttggcattataatttctttcttgctgttatttttggctaattattttagtttttattgctttattgtctttctcttttgtttttaatttagcacctgcactacatattactaacaaatggcaccgcctaagcgcaaaagcttttttaaaagtgaatattccaatgaatttcaggggatcacaaaaagcaaaacaggaggtgaatttgcgcattacgtcccatgcaattttgacatttctttgttgtccattgaaaaagcagccattcctcaccatctgaagacggaaaaacacaaaaaagcagcgaaagctgcaaattccgctttggcaatcacggcattcatgccaagcaaatcggcacccacggaggaaggttgaattacaa

SEQ ID NO: 63544 - DNA, 594 bp, Heterodera glycines
atgaaaaaagaactcagtgtgaatggggataagcgaccgtatggcgagaaatataaagaaatatgcgcgaaacttggcgcaagttcacgttcaatttataaatggaaaaggaaatttggctttagtaagttgaaaaattagggccttaattttagtaaataaaaagtcataaaaatgcgtataaaataggaaaatcttatgaattttaatttgaattcaaatcatgcagaggaaccaacaaaattaattcactgaccagtcatttttcattcctacacatcagggatgtgccgagccagacaaaatccgattccgattaaatcgccgattccgattatggccaaaaatccgatacggttttaaaaccgattacgattatggcccaaaatccgattaattgcgattccgattacgattccgatttttttaaaataattttttcccaaaaattttattcataatcaaaatcataaattttaagattgtgatgcaaaaataaaagtttgtccacattctgaggcaataaacgttttctcagatctgtcacaatcaacccagcggtggagaaaagccgttcgctttcagtcgatgtag

SEQ ID NO: 63545 - DNA, 308 bp, Heterodera glycines; identical to SEQ ID NO: 54826

SEQ ID NO: 63546 - DNA, 1618 bp, Heterodera glycines
atgccgaacggaactcaagaattacgttttgacattttcctgctagagcattggtttgtcattatggtgagcggcaagcagcttggcgatgtgttttggccaaatgaatggtggcacggcgaggcatggaaaaacattacggcaattagggtgagcaaaaaaaaaaagaaatggcaaaattttaattgcattggccgaacccgaaaatttggtcttgcatggatttacaaaaataattgatacatggtttcgagaaataaatataccgtattcccgagggctctatttttcaacccctcttaaaagtgtgcctttatttcagggcgggggggggggctaattcagtgggggaggctgtattataggaaacactgtagtcactttttggcaccaaaatgtaaagcttgtttacaataactcaaactcgggatgctgcatatttttgctaatttaaaaaaaaataaataaaaattcgaaataattttataaaagtttttggcatttaaagcttaacggccaaatgttgcttctctatgggcccgaattggatgcatatggcattgaaaatgagaatgtaagaaataatttaaaattgattaaaaataaaataattaaattatcatttagcattaaaatttaaataattaaattattattatttagttcaaattttctgttccgcttccattctccactggaatcaatggccttcatgaaaattcgtcatgctttttccgtgtccaaatgcttaatgtgtatgaagcaaaattgttgattgttaattttacgaatgataaatcaggtaagaattatgaaatgaaacaaaaaattttatttaattatccaattacttattaaacgattcaaaaataacaaaataattttattttattgttaattgattattaaacaatgacaaataattttattttaatattcaattgattattaaatgatttaaaaataaaaaaaatttttaattaattgattattaacgatttcaaaataacaaatagttttatttttattatatccaattgattacaaaataaattcaaaataataaaaataattgtattttattattcattgattatgaatcatttaaacaaattaattttaaataagtaactgtatttttattcaattgattattagattatataaaataatcaaaaataattttttatttttcaattgattataatttcaaaataaattaaggaaaaaaagtaattttatttattattcaattaatctttaatgtttagcaagtgatctggcaacattttccatcatattaggcaaatcatttaacaatgacacatcatttaacaatgatacaattgtatttgaagttgaactgcgtgttttttatgtaatttttaattaaattattttaaatgttttttaattaaaaaaaatatttccaaaattttaggacggaaaatggcttgaaaatgaacatcgaaatgcaacaattacattcaaaaacatttctgttttagaactgttttttggcatcaccaatggcaatgatgtgataaagttgaacggtgtgcaaatgtttgaagaatattccaattcggcgccatattgcgacatgaaaaaaatcgag

SEQ ID NO: 63547 - DNA, 290 bp, Heterodera glycines
  unsure (1)..(290): unsure at all n locations
atgatttctgcaaaagttgaaaatattctctgcaacaaatcggtcatgctntcggagataaattctattggctttgacatggattacaccctggccggtgaaacatttaaaaccagttttttccgaggaaaatcaaaaattcattttccactttttcaggctatatatcacccaacacggaggaactcatcttcaaattatgcattgagtacctgcagaaacataaagggttttggattgaagcaatagctttttgtgtaattgagcaacgcatggcggagaattcttga

SEQ ID NO: 63548 - DNA, 122 bp, Heterodera glycines
atgtatcccagaaatatggtccaattgaacggagaagtgaaagtgatgaacactttctacgacttgcccgaaaccgatctgttgtcccaacttgttcatctcttcgacaaaaactctggagt

SEQ ID NO: 63549 - DNA, 1087 bp, Heterodera glycines
cactctgacttcaaacgttggaaaatcattgtggcatggattttgccaataattttattgaattttaatttgctttttgcattgaaaagcactgaaaatgacacatacacaattttggtgtcttcgtcatctgaagaacgtgtgaaatgtcaatacaattattctcttcacgaggcatatgtatggaaattaaattgaaaaattttaattaaatttatttcatttaaaaaaaagtttatttttattattttaagtattttttctactggccacgatcatttttcacctttttgctgccaacactggtcgttttagttgccaacttaacaatcatcattaaattgcgaggccgttcaattctgacaggtaatcataattggaataattaaataagaactaataaaagaaaattttcttgtcaatatttcaaatgccaccttttccagaaacttatcaacttaaaaaaagaagtaatcaactttttccaaataaatttcaattcaaaaaatatactaataaaaaaagaacaaaaaatataatattttggaaaaatttttaaaaataccaatagatttatgagccaaaaatggatttttaaataatttattcactttagtttaacattctctgaagagggtgataggttgattcgtaaaatctgcaattagagcctttgtttgctgcaaaatatggcataattttgcataagtttaagttttttctatgaaaaaagtttattttagaaataataaaatcctatttaaattttggttatacactctaaaaaaattgtttttattttaaatgctaattaacaatttgggttttagggaatgtcaattcatcagccgtggcacgtgcaaacaatgttgtgctgtttgcaattcctgttgtttacattgtgttgaatattccttattccgtgcgaagtcttatgaaatttgtaatggattcggtgtccaatgaaaaactgtaccaaaaccattatttactgtatgccggatcattttacatttattgcttcaatttttctgtcaattttatcatttacgcgctcagtaggtcagaatcaaaaaataaaatataa

SEQ ID NO: 63550 - DNA, 552 bp, Heterodera glycines
atgcgatttgcacttttggaggagaaaatggcacttgtgcgactgttgcggcgctattcactggccaaaaatgagcaaacggaggtggcgaaaagggcaaattgaaaatttaattataattaaaaatatttaataattttttgttatttttagaaatttctaaaggtcaattcgcaagttgtgcttaatcctggcgcagtgatggtacaattgaatttgagagaagagaatttttaagaaaatcaaattgactgaatttgaggaaaatttgtaacaaatttattaaaatatttcacccaaatatgttttatgtaaaagatatttataaaaataattagtgaattctttaaattttaatacttttccgacaataatcgcaagaaataatagtaaaaaatttgatataaagcaaccaactaaattttgctttattaatatcattcgatagctcaaattttctctgttaattttaagatttgaaaaagaaaagttatgaaattatatggatttttttatattgattttttaagcttgccttttaggcacaaaaaa

SEQ ID NO: 63551 - DNA, 865 bp, Heterodera glycines
atggctgaagcatcttcaaatgtcaccgaaatcagcggcactgtcattttcgctgcttatgccatggcatttttggaacttggcacactcattccgacaattcccatcctggcattctgctcttcaattgtttacaaaacttccattctgcaccggaaccttaagggcattctgttggcccaactttttggcatatttatgagtttgtggccacgtgtctttttgttggttgacaaaattttcgtgacaaaaaatttttttttgttggtgccaaattttattgctggagcatcaactgctgcattgacattcatcaacattgttggccatgtgctgattgtggagcgaatatgtgcaactgtttacgtggacacttacgagagataccgtagttgggcatttacggtggtttggctgtccattacggtaaaatattgtaccttttaaaaagcaataatgttttgttcattaatacataaaacagttttttttcaattaaacatcgcgtgaaaagtaaaattaaaaagtttttctttcattgagtaattatcggtgacattaattaatgaaataaatattcttaatttaatcagttgtccgctttaaagatcatcctttctttggggctaacaatttatcaaacgcttgttttggattcaatgttttcactaacaaatatttttgttggtatttacaacggagcaatgatcgccagtttaatagaaatttttgtaagctaaaaattaaaataatttgtttatattaatttttttagcttttttcaattatcacaaaatttaaccaaaaaatgtttgatttacgtcaaggcaattgtaaaaatcagcaattatctgttcggtatcag

SEQ ID NO: 63552 - DNA, 1309 bp, Heterodera glycines
  unsure (1)..(1309): unsure at all n locations
atgttcattgtccttcaaaaaggcgtgaaattggatggcagtaacccggcaattctcgacggctatggcggcttcggcagttctcagactccatatttctccgttactcgcctgatgctcgctaaacattttggcattgtatcagtaattgcaaatattcggggtggaaggtattgatgatcgcttgttttttggtttattgtttcaaattcagcgaatatggggaaaaatggcacgaggcggggatgctcgaccgtaagcagaacgttttcgacgacttcattgccgcggccgactttctcatcagcgaaaaatacacgaacaacaagaagtgagttgtggtgcagtatccgttcgtaaaactcgcaattcctttttcaggttggccatccatggcgggtccaacgggggattactgacggcagtctgctctcaacaacggccggacctcttcggggccgtcgtcacccgtgttgggtaagtaagcaataacagcagatttgctatttattatgaactttttttagcgtccttgacatgctccgtttcaacaagttcaccgtcggcgctgcttgggctaccgaatatggagaccccgacaaaccggacgacttctccttcatttacaggtatgttttaccccttttcctgcttattcattgtttcttcgacaaaggtactcgcgccttcattgtctccgcctcacgaacggcgtgaattggccggcaacactgctgatgagtgccgatcacgatgtaagttgtctgctgcagcgggtcggtcccaaagggttggaggggtacgcgggggttgggtacttaccagagtttgcctttttcattcgtttactttttaaggaccgcgttgtgcctcttcacaccttaaagtacgttgctcagctgtaccatttgctgcgcacggaggcaagcgaatggcagcggaggccggtgctggcgcgcattgagacaaaggcggggcacggagccggcaaaccaaccaccaaaacggtaacgcattctcttggggaaacaggcaagtgatactgtgctgattttggttcagatcgccgaacttgtcgatttgtactgttttttgcagcgggtgctcgaactcgaatggaaggagatttgattttgtgatgttgtgcaaaacttaattctatttatatgaaaatgtatgtctttttcgttgtttcatgtctataaatatgaaaaaagcacgattccatttcacttcctccnccccccccatcatacatgtacaaggggtgtctcagaccaagggccatacgttttcattatttattaaa

SEQ ID NO: 63553 - DNA, 1364 bp, Heterodera glycines
  unsure (1)..(1364): unsure at all n locations
atggcgtcggaaaccactccctcgtcacttccgctcccaaattcatcgcaaagcatttatccgttaacaactcaatcagaaactgctgctgtgtgcttttcctccacctcgagtccaaaattggccgtttacaacaataaccattcggtcagtgatcagcagcggtgctctccgtcagtcaacaattcaaagtgcaaattgacgagcattttaatttatattttttggcgatttccagtataaaaagagtgctcagccgaagcggtactccgtcctcttccaacgcatcgctccacttaaaaattggcacgcctaagtcaaccgccggcgatgtctatgatttccatagcagtcccgaagaagatggcgttccgaccacgggccccggctttttcttttcctccgccccaaacgccggtgttattcaatcgaaaggtcgcaaagcattaaacaaaaaaagattacctatctacttaaaaaatataattaattcacaatcagttccagaaagtcttcaaccgccacaaaaaaggataaaaacggcaattttggcaaagaaattattggctgcggcagctgactcgaatttaattgactcaattggagtgggacaacccaatggaaatggcacaccaaaaaggatgtcatcggacgaacattttggaaatgaaaatctgagcatttttggtgagatttgggggtggtaaacagtaattaatttttttaacaatcacagagggaacacagagagaaaccgaaggaattggcgaaggactctttgaggaagatgaagaagaaacggaggagcaggaggaaagagaattggacgagcgaccggacggaggacgaacggatgccgccacttcagtggttgtccaggaacagaaaaaggtgggtcatggtacaatcagtgaaactctgattctagtctggaaaaatctaaatggtaaatgaatatttgattgtttttctcagaagggaggtgcggtgccgataggcgccgccgactaaaagccgggaaaaattggaatatttgatgaatttttattagaaatttgttcaaaattttaataattttcctctcccctttatccgtgacccccctcccctcatcaccccttcgattcgaaagggttccccatttttggggcctttttcggggaccccctattttttgtatgttctaaaatttttgagacttgacgagttattgaggttcctttagttttcttaataatcctttttgagacccctctctatttgaagctttatttacaaaagaataacatgaaattaatcctcacagaattttctccctaatttatctcaanaaataaataataaatttccagaataacaattga

SEQ ID NO: 63554 - DNA, 176 bp, Heterodera glycines
atggcccgaattgctgcagaaactgtacgccgaacaatcgaatcgaagcaacgaaatggcggaagcgcaccgccaggacagagaacgcattcggacgatgatgcaaagagaagtgacaaaaatggcggaagcgcagggacagacgggcgaaaggcagacacttttcataacggcag

SEQ ID NO: 63555 - DNA, 243 bp, Heterodera glycines
atggccactaaacggacggcgttggcatctgcggccacaacgacggtgcatgaccaaaatttggtgggcatttttgtgaaaatttattttattacaattttcaattttaaattttttaaaattattaaaaagtgttttgtcttgagtcgtttcctggtatttttgcgcaattatatcaataagatcagtcactgaacctgatcaaatcagaaacaaaatgtaatcatttcgaattttcagtag

SEQ ID NO: 63556 - DNA, 471 bp, Heterodera glycines
atggagcattgctttcatttagctaaaattgaacggcgacatcgccgcgctgacagtgaaacaaacaaaaatataccaagctttttggaactcaacctgaacaacaacacttatgaacagtacaagacaaatgtattgtgtgacttttaacatttttgacaatttattattttctaaaaaattcagttttctgcggccgatggaaatgtaacgacgaattcgacaaataattacagcaataacaaaaaagccacaaccgaattcgatatagaaaagccgccggtgtttaaaacgaaaaccgaagaaaatgcatttcgacgaaaggaagtggaagaaaaacggaaaaaggaagaggaagaagagcagcagaaggggaagaaggaagagaaaaaggaacggaaaatggggcaagaaaaggaagaaaacccaaaaagtgaggaggagcagaagaaaaagaatgaggaacaaaag

SEQ ID NO: 63557 - DNA, 441 bp, Heterodera glycines
atgtcgctgatcgaactgctcgcaaaaacaacatcggcggcgcgggcggtgaagaagcgccagcggttacaaaaacggccaaaaccttggctgaactgcttcaatactcaaacgtcgttgcagcaaatctggaaaataaacgtaagagcgccgccattgctcactattttttattattattgtaaggttcaaaaaggatgaatcaatcaacaaaaataaattcagtcacttcaccgacgacttccaagaatgatggtcctccgacggcggatggtttcacatttacagcagcagctcaggaagaatgtccgtcctcgtcatcgtccaaatcaattgccacgctcatcaccgaccggttcaggccaaacagaggcactttttaccgttatacaccagcgccagtggttacaccggcggtcgtgcacaaactcttactcaacg

SEQ ID NO: 63558 - DNA, 8318 bp, Heterodera glycines
atgtcgggatttttgcgtacaaaaatcgcaatagagctaaaggctcttgaaaaggcaaaaacggcaacagaattgtatgctgagccggaccaaactctgacctcattggaaaatgcaattctcctggaaagcgcggcagagagaataaagtcagaggtggaggcagtgaatgccaaaatcgagcaaatttggataaccgcaagcaaatggcatgacgtcatacaaaaaatggacaaggacgaaagaaaaagtgagcagacagcgtatgaacaatttcaaacaacggagaaactgaacacaaaaatggaagcagccaacacaaagctaacagagcttaaggacctggagatgaaggtggaagcaggagcaaagctgcaacgctccaaagcggacagagacgcgcgagtggagcaaagagaacatgcaaaagcaatggcgaagtcaaatgcagaagcagacaaagggaataaccgtgcgagaggcaatgaaatgactgccgcgttgtaccaattgccaacactaagaattaagccgtttgggggagacaaacgggaatggcccatgtttgaagaagcatttaaagtggctgtggaccaaaagccaggaagcaaaacggagaagctaaatttgctgaaatcgctggttgagcgagaggccgcattgctcatcggaggcctacgcttggaagagaaaaattacgaaattgccatgaagctgttaaaggacacctatggagacaaaggcgaatatgtaaggaggttgcacacggagttgtcgaacctcaagcgatactttcggtggaagacacaaagcatttttgcatggaattggaacgcctggcaagagaattggaagcagcggaagaagacattgaagggccgccaatttatttaatgcttgagaagaagctatacaagcctttcctgcgtgaaattctggaagagaaagcaaaaaatccagacttttgggacacgtcatccctccgaaaggccttaggaagtgcattgagcaaagagctagcaatcaaagaagtcatgagggagtatggcttcgaaggcaaagaggcaaatccagagcatggattcaaacgacaattaaggcggaacagattcggaggctcagtcaatgtagccacaacacatttcgggaaacccaatggagagcgaagaaaaatcccggaacaaaaaatgccaagtccgaggcaaggccaacgaagttttcagcagactccacaaaattccgcattccgagaacgtaagggacaaggaagaagcccaaaaattcagcggaatccaacagcagttaacacacaaggtgaactgtttctgtgtgttttctgtggagggaaacacagacacgacagttgcgaaaaggcaaggacggtgcaacaacgatttgcagtcctccaggagaagggcttatgctacaaatgcctgaagtcaaatcatatcggaagaaattgcccatgcccaatgaaatgtttcaagtgccagcaagcacacccaacggcattatgccatcagacaaacaacccacaaagggcaacagagtggagaaacatggcaaacaaagtcatgaacgtccggaaagaagagaaaccggacaaacgggacgaattcaaagaagtttcgttcacgccctcgcaatgcaattcagtgcaaggaaattcgcgagtcctgctgagaacagcagaggtgaccatcttcaatccatccaatccaaaaagaagcatggtcgcatcagtttttgtggatgacggaagtgaacgctcattcatccgtgccaatgtggcaaaacaattaggccttccggtgattgaaacggaagagtgccatttgactggttttggcgagaaagaagccaaacgctacgtgagcaatgttgtccgcgtaggatttttgggagtcaacggagacccatatatatgcgcactcaatgaaatggaattcattgtgaaagcgatgcccatcgtaacgctgaattcgatggatgaagcggaattaagcaagaaaaaactttcccttccatcgcggccaagacagccagacattctgttgggaatggatgtcagacatgacctgaaaataagagacgaaacagaaaagttgccaagtggattcacattgtcaacgtctcgagtcgggcggatgataagtggttatggccaagtccagggcccaatggacatgagtgtgcaagtgacgtacactggagcactcataagtgccttacaatgtgccaatagcagaagagatgctgacgaagaaattgaagaacagataaagacatttttcgggctgaacataatcggattgagtgacaatccagaagaaaacgacaaagaagaagtgatgagaacgttcagaaaaagcttgacattcaaagaaggaagatatgaatgtggcctaccatggaacgaaagagtaaaggatttgccgacaaattttcaacaagcgagggcaagactttgtggcacagtgaaaaaattgcgagaattaaatttggtggacgaataccaaaaaattttcaatgagtgggagaggaacgggataatcgaaagagtgccggatccaacacaaacaactggaccggtacattatctcccacatcggcccgtgataaaaatggacaaggccacgacaaaaataagaattgtgatggatgcatccgcgaagccagcaaaccgcaaaggagccccatcgttgaacgaatgcttgcacacagggccgttgttgctaaatgaattgaccgggatccttctaagatggagaagaatgaaggatctaatcctggcggacatcgaaaaagccttcctccaattatcagtgagagaggaggacagagacgcgaccagatttctgtggctggaggatccacaaaagacagaaatttcaagcccaacatatgtgagaaccgttgtgtttcggttctgtcgggtctcatttggattgacaacttcaccatttcttttaaatgcaaccatccgtgaacatctctcattctacgacacggttctaccgcaaaccataatggagaatttgtacgtggacaacatactgatcaatgtgaagaagaatgaagacatggcgcaaatttgccacgaatcgatcgagctgttccgtcaagggggaatgaagctgcaggaatttttctgcagtaagccgatcgccatacgaagccttcctgcggaattattggccaaaaaccaaaaggagataaaagttctcggaattccgtggacgaatgaggatgatgaaatttgcttccgatttaaaaaatttgccggaaagcacacgaagaggaacatcttggcacacattgcaaaaatttatgaccctttggggttagtggcgcctgcagtgctcccagcaaagcattttttgcaaaaacgttttgaagccaaaaacggctgggatgaaggattggaagaagaattgattcatgaatggaatcaaatcatggagacttggcaaacgaaagaggggacagaggtccaaattcgattcgcacgaagagtcgacaacgaagacgaagtggacaaggaaatgcattgcttcgcagatgcgagcggaaaaggcttaggcgttgccatttacatccgggaatcgacagaaaaaatgagcgtcaatttggtgtttgcaaagagcctggtgaagccctccaacatatcagatgttgcggcaacaattccaaaaatggaattacaatccataacgctgggagtgaagttgttaaagtacgtgctccaacatctcaaactcaaaccaacacagacaacgatttggactgacagcttgtgttccgttgaacgaattaaggagcataagaaatgcgatcgatttgtttcaaatcgattagcaaaaatacgtggacagtttgaagtcaaacatttggtcagtgcagataatcccgcggacgtggcatcacgcggcacaacaccaagagagttgagcagaaatttgttatggaagcatggcccaaaatggttatcagaagaaaaggccctgtggccaaaaccagcaaaggtttatcacccagatgaagagaagctcaggggaagtgctgaagatgaagaagtgaaaacagccgcagtcatgaatgaggtgcctttccaaccaaccattgatgtgaaccggtactccagctggaaaaaggccaaaaccgtgggtgcctatgtcttacgctggatacattcggtggcaaaaaatggatacaatggaaatttgttgccaattctgagcaaaatgggcccaaaaaagcacgggaaccaagataagggtgtactgtcagtgcccgaattatgtgcatccgaacatttgctgatatgggaagcacaacgacaatttccaacggaggaaaaaacaaaggaaaatcttcgtctgttcaaagacaaagaaatctggagatgccgaggacgcattggagaagcaacagtaaaggaggatacgaaattcccgattttcttgcctcctgaagcatggaccacaaaactcattgtgctggaagcacactggaaaatgaagcatccaactcacagtactctgttggggtacatgagggaaaagtactggatacccaaaggaagaaggttcatcagaaacacgatattgtctgatcgacacggatgtttgaattgccgcaaagagaggcttaaaccatatgcctatccacaaatgccaaacttgcccagtgaacgagttgcgatgataaggccatttgagaagacgggcgttgactattttggcccattaacgataaaaggcggagttaaagtctacatcgcactttatacctgtctcgtaatacgagcggttcatttggaagtggccgatgattgtacggcaacagaatttttgaggacctttcgaaggttcagctcacgccgcggcctcccaagcctaatgtggtcagataatggcaccaattttattgctggagcagagtgcataaaagaggaatggagaagagaaatactggtggaaaccagccactcaggagtgagttggaaattcaacgtaccacgagcaccctggcaaggtggcgcatgggaaagactggtgggcatcaccagaagtgcgttacgaagaacagtgggaaaaagcctaatggaaaggcaagaattcgatacgcttgtttgcgaaatcgaagctgtggtgaacacaaggcctcttacattccaatcagaagaagaattcacacaaccgctcagacccgtcgattttttattgccatataaacgtgtggaaacaagccttccattgtcggacgaagatccaatggatcccgactatacataccaaccccggaaaaggggggaattgcatcaattgatgagagttgcaataaaaagaattgatcgattctggaaacagtggaaaacggagtacttactttcactcagagaaagagatcgaaccaaccgagcagaaggaagtctcccaagagagggggatattgtcctggttgaagaagaggaagacccacggtccatttggacgatgggaaaagtcgaaaagcttttgaaggggagggatggactcgtgcgcacggcacgagtacacacaaaaggaaaaactctggttcgagcgattaaccttttgtaccctctagaaattaacacttctgcggaggacgaagtcagtcaaattcaagtgactgccattatggattcaccaagtgctgtgatggaaggcggggacccgcaagcagccacaacggagtccagtttgcctccagggacggtgatgcaggattcacaaatcgtcacgacagaatcgagtttgtctcctgtcagaggaaggaaggagcggcaagctgtgaaagagagaagaattcgaaagagacagccaacggaggaagtcagaggcaaaggcaaatcgaagaagaatggaccatatgatccactgcgaccgggcaactacagaattcctcgccgaaacccgttctttccgtcacaagtagcgtacaatgagcaaacacgcacgtatcgacgacgacgggggaggacgattgatctttcgggattgaggaagttgttcgctggattgggcggcactgaatttgtgagacgagagctgcaagagaaggctaacccggctctaagagaagaaaggctgcgaaaagataaagtcaaattcatggaagatgacgccaggcgcgtcgctgagagtgaaagaaaggcagcggaggagaaattggaaaaatcaatgaaggattctcaacggcaaacgaatgtcgaatcatcgtcgggcggaacgacacgtaatcctttcgaaccgatggaagtgcttcccggagaccccgaaccagaagttcctttggaggaattggcacgccaggagaaatttgatagggaaatggcacttgaacaaaggaagatgtacgaaaaacgaagagcagagagaaatgctgagaaggatcggaggcgttggggactaccacgcggaatggttcggagaaaggggcattatgccccgcaccaagggatcaacaaaaggcagaaatggcaccgtggacggcacattaatgagatccaaactgggcggaagtaccgacatccacgtgcccatgacatttctccgctacggcaaccaaatggcgctacaaccgaattgctggctctaagttcggagatggaagggcaaattcggaatgacaagcgagcacgggatgagagtcagtcaaaggagcccgtgcggtcccagcgacgattcaaagccagagatccgttggacgaacagttgaaaagaaggcaaaaagggcaacaagctgaagagaaccctggcagaataaagctggcaccagcaagtcccggctaccgacgtaccatcaattattcgctgtttacgcgatgtgagcctggtgtaaagggacatgaaggttgtcaaaggaattgcaccatgggaagtctgtcccacggccggctaaccaaaatcccgcaagccgaatcaaaggcggtctgcctggcccaagccttcgcattcgattggctaggacgtatgcacgccaagaaatttaatgaaaattggtgcgccttgctgggaagcggaagcgagattgaggattcattgaagaattggtggacgaaagtgctccaaaacaatgagaagacgataccacagaagcaactcgagtgtgtgctgatggcatgggacaattcgtgccaagtttttggacaagagtggaaaggaaaaatctatggaccagttggtctggaggaagtgccagtgaaaacgaatgtgataagtgcagaggcgcaatttgagagttggctcaggaatctcacggagagattcggccagaccttgaccaaactgagagccaaggagtactggaaggactgccatctccaaagcaagagggtattggttgtgagtaaccaagaagccgctgagctggtagccaaggaatttgaggaagaaggctcgagctggttcgtccattttggtgacaaaccgttgcgtgaaaagatgttcccggccaattggaatatcaaaattatcttcaatttggagctgaggagggaagaaagagaagaattggaagtgttcaaagaagacataaaagatattgcaagggcaggactggaagttcatttggcgactcggaaaaatgcacgtttgccacgagagtttgaggaattcgccgagatgcaaggctgtggaatttaccaatacgaaaaaattggagaactcgcagcggcgatcagaggaacaccggccaacacgggaacaaatcccgagtcaggagagtcagcccagaagagtacaactggatggaggcgagccgtaaccaaaagtctgacaggattgaccatgctggtcatgttattgatcacactgttgcaaccaatgatgatcaatggacaagtcattcggccggaacgaaacggcagatggattcctgtaaatcccttcggaagaccactacgaatggaggaactcgttggatttacggagccgacggtacctcggctgagcctcgacaagagagggcaaatcacgcccactttgccgacaacagcggcggatatgtccattgcgcatatccgggaatggtacaaaaaggcgcggatgcaaacaagtggtacgactcaaacttcggcagcaacgacgacagtgcgtacgagtaccagtgccagtacagaaatgactactctacgaactcccgaaacgacggtaaccacgagaacgacgacgaaaacaaagggagtcaccacgcaaccacagcggaagactacgaatcaagaaccaaggacggactcaagacggaggcagtggactcaaactccaagccgtcgctggactgatcaaatctga

SEQ ID NO: 63559 - DNA, 1163 bp, Heterodera glycines
atgcgagggggaaatgcaaagggaaaaatggcacaattggggggcacaaaagtggggtgagtcgcggggaggggggggcacatcaccggagaaaggcgggaggggaagggtccgggcgaatttgctctcccgcaaattcgtaattttccatcaaatgatcgccgatttcatcggctgtccgcctgggtgatgtgtcgtttcgtccgtcgcaccgcgatggtccgatcggcgtttttgcactgcttcgggcgtccttcacgcggagaaggcgccacatccgctttttatcgctttccttcccctcattcacgtgctcgcctgctgccgtccctcccttcgccccctttttgtcctcccttcccttcatcatttcccgtttgccctatttttcccatctttccatccatttatcactccttgttcgcaacttcattcactcctccccgtcctcctcatttgtccgctcaacggacattcgcggctgtcgttcagccgcgacaccacagcacacaaaattgttttttgtaagcaacaaacaaaaaacttggtttaacttcaatttctattcattttcaggtgctgtatttgcaacaaaattgttgatgagccacagcacacaaaattgttttttgtaagcaacaaacaaaaaacttggtttaacttcaatttctattcatttacaggtgctgtatttgcaacaaaattgttgatgagccacagcacacaaaattgttttttgtaagcaacaaacaaaaaacttttgatgagccacagcacacaaaattgttttttgtaagcaacaaacaaaaaacttggtttaacttcaatttctattcattttcaggtgctgtatttgcaacaaaattgttgatgagccacagcacacaaaattgttttttgtaagcaacaaacaaaaaacttggtttaacttcaatttctattcattttcaggtgctgtatttgcaacaaaattgttgatgagacaaaaattgttttttgtaagcaaatcactttttttggttcattaattcttatttttattttaaagtgttttggtttttggtcccggattgaactggagcgaaaaaactccaaaaaaactttttatttaaattctttaatacttgtgtttaaataattgtcacaagttttattgaatttga

SEQ ID NO: 63560 - DNA, 624 bp, Heterodera glycines
atgtcaaatcctcctaatcctcctaattccccctatcattttttaaaagaattccaaatcccttggcaaccgccttcaagatccccatcgccgcttccttgtcctcatcaacctccttctacaccaacgggcgctacaactcccccgggttgcgagcctcttataacctggcctccggaggactggtcacctgaggaatgtatgcagacgaacaattttgatttattatggaattctaaaattaatataggttcttcgtcccagtgcatgcctgaagagccacaaattgtccaaactgatgtttaggacattgtgcaaccagttcatgaaattgaacggtaaaagagccaaaaattaactcgtgctaaattttgaaaaatctcttggtttagaaatgattcgccaaagcctccgccggtcttattgttctctgagtttaaaaaaaagctcgaaaacaaaaaaagaaacgaacggaaggccaagtatggcttgaactttaaacaaaaacaacaactttttaagaaaaaaactcttggaccgtgcagaaaaagctgaaaaggaggcaattgagaagaaaagaaaggaggaaacaaaagagtaatttgttatttttaaattagtaaa

SEQ ID NO: 63561 - DNA, 1360 bp, Heterodera glycines
atggctgttcgctcaattttgggcaattacaattggagtgaagtgtcatttgtatacacgccggacgaccaacggatgtaattaattaattatttaattttaattatgggctgcccctaattagttttaacggattatttaacaatttgcccagccggacaccaacggatttaattaatttgatcagccggccaccaaccgatttacttatttaattaattaattttaattagagcctaattaataaaaaaagattaatttcccagggtatgccaatatttttatacggattttatcgcgttggtcaacgacgacccaaacgtgaccattgttttccggcgcaaaatggactccagcgcggaaagcatgcgctcgacactgatcgcagtgtcaaaccgatccagaagttggaaattgatcaaatcaaaatcaaaaaaaaaaaataataatttaaaattaatttaataaatggtaaaaaagtagtaatattcagaaaatagaagaggatattattggcaggagcagatcgttcgttacccgtcctcccgaaatttttttaaaaatttccaactcagaaattttaaaaaaataaaatattttttttaacaaaatttcaagaaaaaaaaattgtcaagaatttttctagcgatttttgaaaagtttaataataaattactttttaaatcgctgaaaaatatttcacaatacttttttcttgtaattttctaataaaaatttttcgaagatttttgtagaaataataataataataaaatattcaaaagtaagtaaatataaattaaaaagattaacaaaagaaaaaattaaaaacttaaataaaactaaaatgcttgtaatatttgaatataaaaaattaaacaaaaaaaaaaaaatatttcatgttggaaaaatgttgaatagatttaagaaaattataatttaaatcaaacattttcctaaagttgtgatcacttgttttgataatatcaatgatcgacgacaatttttgcttgccgtcactgaccttggcttggctggcaaaaacacagagtgccattttaaaattttatttttaaaacatttatttttggcaaaaacacagagtgccattttaaaattttatttttaaaactttattttcttttttagattcgcttttatcatcggttcaatgaggggactcggaatgacacagccgggtgaacaatttttcaagcagattcttgaaacaataattatagcaaatagaatagtttactaaattattgacagtgattaattgggtaattgtggtaattaggcaattattaattgaatgagttgagcgagagggcatgataaaaattaattcgggaataaa

SEQ ID NO: 63562 - DNA, 675 bp, Heterodera glycines
atgcacccacaattttctgcgccaatccaccatcatttaatcactgggactcaacccaccaacattccaatcaacgggactcaatccaccaacatttcaatcactgggactcaatctcatcaatccttcagcaacacaattaccgggactcagttctccgacatttcaatcactgggactcaacctcagcaacggaatacagaactatttaaaaggaatccagaaattgaaatataacccataaatcaaaacactatggtgtacatttatattgctttttctatccatcaaaggatttttctttcattttttattactatcataacatgctttttattcaaaacaaatatcaaaaaccaaatcagattcttttcatattataaacaaggaaaagtacaaaaaacttttttaagtaacaaacctttttcattcaaacgaattctaatgtatttttttaatcaaacaattctccattatcgtttacataagcaaaacaaaaagctttcacatcaaaatggaaatcaattaacaaaaacgaaaatttagacaaaaaataataataacagcaaaaccacaaattttttcttacacacaaaaacagaaacttcatataccggattttccactcaaacaaacacaaaaatgtgctcattattttattaattattttatata

SEQ ID NO: 63563 - DNA, 1550 bp, Heterodera glycines
atgacggacatcacattttcatcccaggaaaccttatcatggcaaattggatattttgttttcacattttgtacggttttcaaccgtcggatttgacagacggaaaatttaaatccgacaaaattttgattaaaaaaattcatttacgacccacttaaaaaatgattaagacgaagcgaagccccatttattccaagtgagaagaaaagagaaacaaggaactgcgaaagttcaattaaaaaaaatttaattttcaaaaattcatttaaaaatataaaataaaagacataaaaaattaattggtactgaaaatttatttaactaaattaattatttaaatgataatttaaaataaattttaattttaaatggttctcaatttctttttgcaattaaaattatgagtcactaaggcttgggtttatcaattttaatttcattaacaaaaagcccgagatttatctttaatttattaaagaaatattgattcaaatttattttaataattaatttattttaaaaataattaatttttttaaaaatttaatttgtaatgcttcagcttggccccagctcatcggcgtcgggcagtacaagcagcagttcggcggacagtgaagcaatggtggcaccgaaaagcaatgggattgaagcgccgccaaaaatcagtgaaccatttcagttggcacacacggcaaatgggggtaatttattaaaaaaaacaaaataacaaaataattttttaaatttattaccttttgtaatttgataaaacattttttaatattattttttaaaatttctttatttattaaaaagcactttaaataaaaaattttatttttaattataatttgacaaataaaaaaaagttttagaagaaatgaatattttctctaaagatttttaaatttattgattatttaaaaataatttcaattaatcatatatttttttcaaaaaccttttggcaaattaaaaaaaaactttttaaaaaatgcgaaaatttctaacatttaataaatatttcatattttataggatttaaatattttaagccttttaaaatccaacgatttcatttttaaaatattcaaatatcttttctcttttttgaaaattctgtattaaattatgtcatttaattcatttcaattatttatttttaagttcacaatttaaattggcaatttaaattatttattttaaaactcgcttattttattgtaattgttttaaatttctgaattttcccaaattaatattaaaataattaaataaacttttgtccccctctttcagtcaatggtccatttcatccgtgcaaattgctcaacgagccaccaattgtgatgctcggcgatggcatcagttgcagtgccattggcggcggcgctggttgtgttgcgggctctgctcgccgtcgtagccgttcgccgggcgcgcgtcgcaacgcgcattcggtgcaacaaccgcagcccatccgcgcagcgcaacaactccaacaccaacaacagcaacaacaataccacggggcaaacaatgggtaa

SEQ ID NO: 63564 - DNA, 624 bp, Heterodera glycines
  unsure (1)..(624): unsure at all n locations
atgcctgctgaaacagctaattctaattcgaacgttaattcatctgcaacagcaaataataacgcaatttcaactcatatgcttcgcgagaaaaacagcgacgaggcaatggtaagtgaaattgtctaattggacaaatggtattctcccacccctcttctgatttaaaggaagttgaccagaaaatcgtgactgatactgccgacattttgcagtctgtgctcgaattcgcttttggcgtttcaatcgacgacaacaatggcattgcacaggaattctcctcatctcccgaattgcttttacaactgcaggattctgtgcgcacaattcttacgtctttgtgcctaaaaagtgtttcgccattgaaacaaataattttagtttctttttaagctgacgaagtcagtcaatcgcttctgttggatgaactgatatttacggcggtcaatctgataaagccgagcaatgggttcagctcctcaaattccatcccaaattccgacgactctttggccgtggtttttccccaacgcaatttgccgaattcattcatcgcctcttcagcctttgattatctcattggaacacggaaacgatgcaaatgtctgctcgaccaatcgntaa

SEQ ID NO: 63565 - DNA, 1219 bp, Heterodera glycines
  unsure (1)..(1219): unsure at all n locations
agggtttgaaagtggcacagaacgcagcggcacaagccaaactagccgaacagcagcgacaaacggccaacagcacacaaaaaacaactccgacaacacaaacaactccaacggtaacagcagcgaaagttgggaaggaaaaagtgagggaacaacgggacagcagcaaacagcggacaacgcaacagactgacaaggaaatggtacggtgaatggggaaaatgttgtaataattaggtaaattaattaatgcacgatttgttacggaaaagcattaaagcacggaaaagggacacttggcaaacaaaagaaagtatttgaattgttggagaattgttttaaatagtcttatattaccaaatatgatttgttgcctttacaggattccgttgactccgcttctgtcaattccgcaccacgtacaaatccgtcacagcagcagggtaacaaaacaacatttaaaggtctaaaacttcaaaaaaattgcttacaattaagcacctccgaaaaaagcggtggcacctcccccaccgcctcctcctccgccgccaccattgtttgtacagcctaaaaaagttgtgcaaaatggccctaaagcagcgggaggaatgccgccaccgccgcctccgcttggcttattcgtctcaaccgctgaagcggtgccgaagaagaaaattgcgaaaattggcagcaaaatgccaatgatcaattggacggcgctgaacccgaaccaagtgaagggcaccgtgtttaacaacatgaatgacgagtgggtgatcaaaccgtacatataacatgtattttttccttttttcagaaaattggctgaagagcttgacctgagcaaattggtcaataattttcaatttttatttttaccattttctatgcaaaatatgaattcaggaagcaatgtttagtctggacgagaagaagccgtcgtctgaatcgcaacagcaaaatgtggacgcaaacgcagcggtcaaaccccgtggacagccgtcaccaaatgcgaccgtaaattgcggaaaaaacactgttctctcaactaaacggcttcaaaacatcggttggggactttttctcacactgnngagggcggaatttgcaatcattaagccatagaaatttaaaaatggatttttttgcccacttaatattnattttatttttttacagccataattcgtcggaagaatcgggaaaagggcaatgggat

SEQ ID NO: 63566 - DNA, 270 bp, Heterodera glycines
caattcttcttccaacgatctgatgcgtggcgtgtgcggactgcaaaatttaggcaacacatgctttatgaactcgtaaattaaaaattttatttttataatttttttgctcatttttcagtgccatccaatgcctcagcaatgtgcctgagctgaccacctatttcttggaggacaactatgtggacgaggtgaacacgtccaacccgttgggcaccggcggtcgtctggtgaagcagtacgcggacttgctcaaggacatgtggtcgg

SEQ ID NO: 63567 - DNA, 2094 bp, Heterodera glycines
atgggcaccgaactgttgcgttcgttggtttgggagcgccaatgtcctgacgagtttggcatgtaccgctacaaaaagtacaatgttcatcgactgattgtccgcttttatgtgtttattggtcggaaaattaattttttaaatgaattttggcatcttttaacttaatagcatgaataatttggttgaaattaagatttacggaggctaactgttctaaaaaaatgccaaaatttattaattttattggaatatatatttttttttttgtaatttcaatttttaggctattttttccttggcatttgctttaaccaattgatggtcgacattgcaaaggtagattttaactgaaaatttataattcactaaataaaaaatggaattaattgtaacattaaattcctaagttttgagcgtaattacgtcttctaaaaatttttggcctccgtaactaccattgaaattcattttgttcgtttttttgttgtaattttcgagtttttggggccatcgggcctccaaaatcaccccttgcgtcaacacttaaaatttaaaaaaaaactaagaacttctcccatttcagtacaccattggacgtcatcgtccccatttcatggacgtgtgtaagccggccacacaaatgccaatccgttcaccggacggcagcacacaaatggtgttgaaggagtacagaagcaactgtccggctgaagagcacaggtcagcaaaaattttgggtaaatgtttttaaaagaaaattttatgcttttaaaattccaataatttcaatgtcataaaaatttgttttagtggattttccgggtcgctgtcccgaacccgaattcgaaccaaaagccaaaacttttgattctgaggttcatgattcaatattggtcaaaatgtttgccaggatcgtgatagcgcgaccctgaaaaccccataaaaaacgttttcccgactaaaaaaaatttgcaatccaaaagggtgtccgtacctctatggaatcatttttaaaaaatgttttgtttgtgtgagtcacctcccttaaaatttaatgaaattttggcgcatttcaaaattttttggacacacgagttacaccaatgacatttttttggtttcaaaaaaatatatttaaatttaatacacctttttcagttatgtaacggattttgagtgtttgggcgacaacaaatatttgatccacgagtccatgctgtccttctattccgggcactcggccttctcattttatgccgcttggtacacagcggtaaggaaagaaaattttttttttaatttaaatttaaaaattttgcaataaatgggtcgtacataaaagttaaatttgccatctaattgcatgtaatacaatttaaacctttgagaaagtttcagcaattttgtagaaatttaaaaaaaaaattaataatttatcataaaataatgaaaaaatcgctatgaaacaaaaattgtttcacgagattttcgtataaaaaattttttctaacaatagattttatttcgaagaattctaattgtacgtttcaaatttttttttttttaaatttttcggggatgaaacggacccgtttttacgctcctttttgaacaaaaattttgaaaataacgcgggagggggcggcgagggcggtgccaaaaagaaaatttttgaagtctctgtttagaaattttttaaaaaatgcaaattttgcctaaaaattttttattttttttgtaaaagaattattcgattttctgttgtttttttgtgccagttgtatttgcaagcacgcatttatcgtccactggtcagcaaattggtgctgcctgctgtccaatttgcgctgttcggcggtgccgcgtttgtggcgtacacgcgggtcagcaactacaaacaccactggtccgacgtgttggttggcacactgatcggctcagcgatcggcctgatcaatgtatgtgtatttggtgattgtggaccgacccataaacccaaatcccggacctgaattcgaacaaatgtcgttttttacaaggttattttttggcaacagtacatttcccactcgccgtcccttttcaattaaa

SEQ ID NO: 63568 - DNA, 1643 bp, Heterodera glycines
atgtccacaacattgtcaactccgttcataccatccactgtgcaaacaaaaccttttgctggacaaaaaccgggcaccagcggtcttcgaaaacgagttagtgtgccatcttttcaaaaaagcctcgtaattcggtggcttttcgcttacaaaaggacacataaacttcaaattttcgaatttcgcactttaaaatggttggatcttttattgcatgagtgctagctttcagtttgttccgtatatttaaacagtttttagacgaaaaaatacgaaattccaaaattaaactttcgaccttttattcgaattcgggtccgggtttcggtattgatcggaatgggtgacatattcgtgatcagtgacccagaaaaccctctattcacactcgactttttcaggtgccggagttccagcagccgaattacacagaaaatttcgttcaatgtgtgctcgacggtgggcttggcgaagcaaaacgtggcgccgttttggtggttggcggtgatggacgctttttgtgtccacaagcggtcaatgtgatcatcaaaatcgcggctgctaatggggtcagattaaaaaaaacacatctgggggctttagggtttagtgacggtaagggcttaggacgattattcagtaaaaattttttagccgtggcattacaaaaaggggcgttttcagactctcagtttacgactaaaaaaccatgaatttttcaatgggtcataactttttcaagaagtctccgaattaaacattcttggtatcattctagagctgaaagatttctctattggcctacgaaaaatgaaaaaaaaattgtggccaaaaaatctcgtaaaagcgaatttttaaatttattttagtcataattttttttcgaaaacaaaaaaggctaatttcaaaggccttttattacaatacctgaaaaaatgaggaggatttgtctattcggcgtgccaacaaaatttggtcaattcgaaaaaaataataattccgtcttattgttaggtgtccaagctgatcattggccgtgacggaattttgagcacaccggcggtgtcccatttgatccgcaaaggggacaatggacgacaaatcaacggttggccattttttatgattttttaaatctaaaaattttttaggtggcataattctaacagccagccataacccgggcggcccaaaaaatgacttcggaatcaaatttaattgcgaaaatgggggaccagcgccggacaatgtgcgtgaaaataaaaaaaaacattataaacaggccccagaaaaggtccctcacatttttgaaggattttcaaaaaaaattttaaagtgcgccatattttgtcttatttaatttttttaggtcaccgaacgcatttatcagctgagtacaaacattgccgagtttcgcatttgccccaatttggacattgactttggccaaattggcacaacaattgccaccattgagggcattggacaatttgttgtccaggtttttttcctttttttttttgtaaaaaaaaataagtaatggttcaaatttgcaggtgattgacagtgtccaggactatgccgattatatggagaaaatttttgactttcctaaggtattggattcaaaatgggctatttaa

SEQ ID NO: 63569 - DNA, 415 bp, Heterodera glycines
ttgctgctggccaaacgtatttgatggtgcagaacattccggccgccgccggctgtttaaagtaattttttttcaatttttggccaaatgtaagagaccgaaccccacaaagacctaagattttactggtttttttggggggggggtaccacattagaaaaaaaactgggggttgttctattttgggaggtgtagaattcacctgtttttttcgaagaatttgataggaaattcaaaccaaaatgcattaagtccgtaaccagaaatgggagaaggaggccctaaaacttggagtcaaaatctcttaaaaaaatcggactgagcgccaaatttttggtaaatttttaactagtttttttccttcctccaaggcattgtctgacggcgaatcccttctgttccgaggccatccatt

SEQ ID NO: 63570 - DNA, 56 bp, Heterodera glycines; identical to SEQ ID NO: 52733

SEQ ID NO: 63571 - DNA, 67 bp, Heterodera glycines
atttgatctgctaattgatccccgatcataattattattcattaattatgagtgcttgggcgaatgg

SEQ ID NO: 63572 - DNA, 105 bp, Heterodera glycines
tgtccgtttggggtactcaaacaattatggggagcaaaaatccaacgcagaattaaagtacaggctatagggaagctattcccgaaggattcggtctccccataa

SEQ ID NO: 63573 - DNA, 215 bp, Heterodera glycines
atttgaatgagaatagaaagagccaggttcgatgaagttttggtaagccaaaaaaaaatccaaacatttaaaaatctataaaaaatttaaaaatgagaattcatgcgagattttctggaaataagcttaatagggcctagttaagctgtaaaaaaaatttggggcgatttgaatgagaatagaaagagccaggttcgatgaattttggtaagcca

SEQ ID NO: 63574 - DNA, 367 bp, Heterodera glycines
atgaaagacaatgaattctggatcaagggagtttcaattagaggcaagggagctgatgaacccgatgatggtgataaagccgaaatttggcgagacttagtcccgatgaagaaatgcccgaagaatcggtgaatttgaatcccatgtaatagccgcgagaaactgatctccctatccatattaaggcttcttaaaggatgcaagattaattacagaaaatctttatttaaaatgcattatttaaacgttatacaagaaattctgaattttcaatttgcgattgaatcatgtctaaaattcgcacatctgaatatgtctatgggaataatagaaagaaaatcaatttaaattaggacataaggaaata

SEQ ID NO: 63575 - DNA, 230 bp, Heterodera glycines
atgtaccacggacaaattgtgtgaaagctgaattatgaaattctaaatgaaaatttgtgaacaaataattttatattaacgaatttcaaatttaagttccagcagctcccggttcagaccacgacgacaacgacaattgcaacagacacaaaaactcagccgaatgttaatcctgtaaggttttgattattctatgtaaaagcaaaaattgaacgcaaaaagagaataaa

SEQ ID NO: 63576 - DNA, 563 bp, Heterodera glycines
atggcaattatggcaactgtgtggaaaacaaaggcaccaaatccagtgattgctgttcggccaattacgactttaaatgttgtgtgggacaagtaaggttaaggcaattacagtgggagggataaataaataagagtaataaaaacataaaatttgataggaaaaaattaacaaatgaagatttgagcaaatgtcttttttcttccattatcctttttattcattatcttaagaattaaaaaaaaaacaaaatgggcacccactttaatttctcttttgttttcgaatttcttaaagtccacttaatttaaagcatcaaaaattcaaatataataaaagaaatatgaaatttattttaatttctttttttaaattcgattcaattaaataaaaattcatgtttatataaatgatagtaatttgatcataataagaaaattagttttaaattaatcttcttttaggcaaacagcggcgacggaactgcaaccatcaccaaccacaacaaccgtattttatcataaaatatattttataacaaaaacttaaaataatttaataaa

SEQ ID NO: 63577 - DNA, 815 bp, Heterodera glycines
atgctttctttcgtcgtttttttgttgtttgccgttggccttgctcaggtatatgtgatgttttacaatcaattaaatatactatttctcgcattttagacagctgatcaaccgcctccggtaatttataattttctcttggttttgattggttagggattgtgtggttctttggcttgaactgcctcggcatttaagctttggcatcggtctctagttttgcgtttttggagcagtatatgtttagtgtgaaatataattattatttttaattattcataattattggtttcagttaccttccggcattgtccccgcatgccgagagaccgtggaaatgttttgccaatgtggagccgtttgcgttccaaaagcgggttgggccggtgataaatgttgccccgatggattttcaattctgtgcgggtgtccggtaagttaattacataattgtctaagattttatttctattttctttttgcaataataaagaatttgtacggtgtttttgggaaacaatttcggaaattgttccaaaaaatgttcaaataattaaattttattaaatttatatttgctttaattatttattaataataaattagtctgaattaattgggtgtaactcttcaggtaaaagaaagaaatggctcccagacaatcggacagttgacaattcgacagcggacaatccgtcagaagtggattagactattggacagtgaatagtctgacagtaaaatacacaaaaaagataagaaaatgccatagccgacctgcccgattgtgccaaatcaagaaaaaggaaaataaa

SEQ ID NO: 63578 - DNA, 785 bp, Heterodera glycines; identical to SEQ ID NO: 33546

SEQ ID NO: 63579 - DNA, 590 bp, Heterodera glycines
atggcgttctctgaagacccgttgatcaaaattgaagaggacaatcctcgagctgacgcgtcaactcacaatttgcctactaatgagaagctgttgccacaaaataatcattttgcaagcaatgttttgaaagcgcaaacggattggcactcacaaacggaacaacaacagtatcaaatcatcaattttgttgacaacaatgcaccaccacatagtgaattaacgtcgagctttaatgattttgctgatttgctgtcaaacacgaagacaaatgacgtggtgccggattttggaatgactcaaatgcgcaaaatcgagccaaaacattttaatgaaccaaaaatactgaacaatgttactcatttaaatcaaacagcggccagtcaagtctccaacaattcgaaacagttccatgaacttggttggttacaaaaaaaagttttctaattgtgttttatatagggatgtatgttgcaaagctactttctaagacacctcaaaacggaatcgcagaagctattcgcttgaaaggccagattttctcaatgtgcaccagcaagcaaattgatttgatgagtgaaagtatgtga

SEQ ID NO: 63580 - DNA, 249 bp, Heterodera glycines
atgcgtttgattcgaatgaaactgaacagtttggagaaggggaaaatggacaacgcttacgacgaggcggtgaaacgcgttcagtgcgttattttcttatttattcgctaattacacacatttttcatccttaaggagtcttgacgaaatgcgcaaaaagcttgaggatttgaaatgtaacatggaaaacggcgagacggaggcgagcggagagggcacgacgaaggcacagcttgagttggaggaaag

SEQ ID NO: 63581 - DNA, 887 bp, Heterodera glycines
atggacttggacccaaaagctcacgcaactttaagtgacatgacaactcaggacaagttgggcatggcgagggaactcattgaccggattaacaagggcgacttggtgaggctttggcgttcattcatttgctgattatattaatatttgaggtgacgaggcagcgatttgtgattgaccgtttgggtacgatcagagttgggaagaaaaagattttgaaccatttgcaaattctgaaatccaaggaggaaagcggagaggtgctgaaactctctctgattactctacttaaaaaatacaattaaacagtattcgaatcgtgcacttgtcagcaaattgattgagtcgtacgacggtttgatggcccaggaaaaagaattcatcgctttgatgcgcgacatcatcaaatcgtatcacgaagcaatcgacgccgtcacatccgaactcaattccattcagcaatcgcaacaaaagcaacaaattgccgaagtgagcgtggtggaggaggacgaggaacagagtaggcattggaggaaaagccaccgaattaagtccttttaagaaaaacttgagaacaatgtcagtacgcaattggatggacttgtgaacggattcacttcattggaaaatatggtcactgaaatggaaaagacttcgctgatggacgaacagttcaaaatttgcattgaattgcattatgagcaggtgaagaagcattttgtctaattgacagaaaaaacaccgagggacacgttcagaaaaagaaaatggaactgatgcatcaaatccacatgaaggagaaggcttcgctggagttgagcaccaaggatctcaccgaccagacaaagcgtcgaggtgggccatttgttgtttaaagaagaattaaa

SEQ ID NO: 63582 - DNA, 2270 bp, Heterodera glycines
caacgttccaagggatcagtcaaacttttgtgttcacaagcgttactggacatcttatgaactataatttccatgaaagctataaacaatgggtcgaaagtcgcatttatgacttattcgaagggcaagtcgttctcgacattgacagcggaatgcgagacattgaaacaaatttgaagtttaattttgtcctttttacttctaacaatgagaatgtgtttaaggagagagagccgaaaagcccacactttgctcatttggacggattgtgacagggaaggcgaattcatcggcaacgaagtggtcaaagtgtgcagaaaggagaacagtctcctcacagtccgtagagcgagattttcggagattaccgatcaggcgatcagtcgggcgattcagaaccttacagcaattgaccaaaattgggtagatgcggttgactgccgaatggaattggaccttcggataggtgggccattcagttgatctctgctcccgtagaattatgaaaccgttttaggagctgccttcactcggctccaaactttgtacttgaagaaaaatttctaccaatttctccgggacaacgacccgaagtccgtgatcagctacggaagttgccaattcccaactttgggatttgttgtagagagatacagggagaacaaagaatttgtaagccaagaattttggaaattgagcggcaaggacgggagcacaaacattgaatttctatgggagcgggaggggctgtccactcagttgttcgatcgagaggctattctggtcggcaatccatggtttatgtccaaatattcttttttctcttaggctctttacgaagcgtgcactgctgttgtccattcggctcgcgttaaagaggtggactcccatccgaagaccaaatggagacccccgccgatggacaccgttcagctggaaaaactcggcagcaagttcctcaaaatgaacgtaaaacgcatcatggaatctgcagaaaagctttatcagcacgggcttatttcgtatccgcggtgaattttactttgaattaattgatttggaatatgggacatttgtaggacagaaacaaattgctattccgcagattttgatttggattcaatagtcaacagactaacagagaatgaccaatggggggattttgcgatgaatgatgtgcaaatgtgtggaggtgcaaaaccgaggaatggacgaaaaagcgacaaggcgcacccgccaatacatcccgtcaaaaatgccaacaggtggcaaaaagggggaaagggcacacgtcgcttttgtcggactaggcattttaaggaatgaaattgcgagtatggacgaatggaaagtctacgaattggtctgtcggtattttctggcgtcagtttctcgcgatgcaagtggaagagaaacgaaagtgaaggtgagtcatcttcccgatgccatttgtagcattttaagtgccaagaaattttgtcaccgaagtccttttgtttaggcggaagtcaacgaagagattttcaccgccacgggccttataatcgacgaccggggctatctcaaagtttatcccttcgaaaaatgggctgacaaagaacttcccatgtatcgaaatggccaaccgttgccgaatttccaaattaggatggctaatttatcgactcaggttttataaccgaattaaggacgaacatataattgaatcaacacaacttgcttttagcctcctccccttttgaccgaagctgatttgatcgctctaatggacaaaaaaggcattggcactgatgcgacgcatgcagaacatattgagcggatcaaattcagaaagtatgtcgtattgaacaatgccaataggtttgagccaacgaaagtcggcttggccctgatcaatgggtacgatcggatggaacaccgacacaaagtgagcaagccgaatttgagggcggagttggaagcagaccttgtcaaaatatgcgaaggtgacgacgggtgggggagagacttattggtttaaaaaaaaagaaaacagcaaagttgggggaaggggtatatcaccgttccttaaattttagtcattttcttaaaaagttgcattaaaatcagtaaaaaatttaattgtaggggcaaagacgaaacagactgtgttgagagaacagatcaacatttacaaggaattgttccggaacaccgaattgaaagtccacaaattgggcgagtctctgcgcgcaatttaccaacagaacaacaacggtctcatccgatga

SEQ ID NO: 63583 - DNA, 498 bp, Heterodera glycines; identical to SEQ ID NO: 61407

SEQ ID NO: 63584 - DNA, 389 bp, Heterodera glycines
  unsure (1)..(389): unsure at all n locations
atgccaaacaaaaacgaaatcgttntaaaatattcctttctggacttgacttggtttctgatnatcgaagctgttttctacgctatttctaaaacggttataccaaaccncnagatttttgaatccggttttcagaaaaaatgccttgtggtgaaaacaatatttcacatttcactccataactttgtgagttcggcacggatcgagaccgggataagaccattggaaagagcagctcgagctctacaagaaggtatggaaagaaaaaatagttatttctgggactttttcagaaatcagaattaattctccaatgtggcccaaattttaggcccccagccacagccccttgcttctcccagttttaagtcttggatttgtcaaataaa

SEQ ID NO: 63585 - DNA, 516 bp, Heterodera glycines
atggcacccaaagtttgtgccgatggaattattggctctgacgattctgagcacacgcttccaacaggaccaacccacccactcgaggagcaattggatacacaaactgtcgaacaacggcgtgccgtgttggagttggtggtcagccgactgctgttctttgtcggcgaagtggtgctcaagttcctctcctacgccgagtgcactttttctgtccacatcaaagacaccattctgagacgggtgggcgttgacgaaagatttctcatgaaaagtgactccggaaaacaaaaaagatcgctttttggcttaattggaatagtgtaaaaatgggtcggcgtattttggttttacatttcctttgggtgtttttaattgactattttaaatgcctttagggtctgaacactcccaaccccaaacggcctccatcacgtcatagcgagctgaattttgaaaacaccaacaaaaacaataatggggatgaaggtggaaacgatgacgaactttgccaag

SEQ ID NO: 63586 - DNA, 524 bp, Heterodera glycines
atggaaatggaaatgatgcagcgaagccaaaacgccaaattggcggccgtccgaaatttgcacgactttcttttaaatgggccaaaggagccgaggtttgagttaagcaattcgaaattcgcacaaaatgattgttggcatttcatttgtctcttttagcacttcgtttcggcaccctttcattgtcagtgccgaggcccgtgccgaatgtgaccaaattttgagtcattttgagaagagaatggaggaagaaataaaaaagacaaacactttgttaagttcgaccagcaaagccaaagaaagtacgaacgaaatcgttttatattttaatcatttttaattcattttaggtccacaaaagaccaaaaacgagttggacgcattcaaaaagctttacttgcaaattttgtttcgcctttttcgagaattgtatcggcaaagtgccgaaaaagtgaccaaaagtgggcagaaaggcatacggaggcaaagggcggagaaggcgcagctgaaaacgatgaacgaag

SEQ ID NO: 63587 - DNA, 1120 bp, Heterodera glycines
atgtctgttcatttcattgatcgccaggacgccggacaaaaattgtacaaagcattggcccaacttgaccttcagcagcagagagacaaaatcgtatgacgaacaatgcttctgtcgtaaagtttgatgacgtgcggttcaggtcattctggcacttccccgtggcggagttccaattgcttttgaaattgccaaagcaatgcgagtgccgttggatttgttgttggtctgcagaagagcgtacataatcttagatttttcttatgaattttaggttcgaaaaattggtgccccggacaacgatgactctgcgattggtgccatagccgagggattggcacggccaattttggtaatggaaagtgtccttatgataataatgcaaattaaaggacaacgaaacggtggccgcggttcttctgcccacttcgacgacagctgaacaatacatacagcaggagacggagagacaaatgaaagaaatcgaacggcagaaaaaggtcgaaatgacgagcagaattaattgagcacgaaggcacaacgattgattgcctttcagacttattttggtgagcatcgaacgccaattccgttggatggacgcgtcgcaattgtcgtggacgatggcattgccacgggtgcaactgctcgtgctgcgctcgccgttttgcgtcataaaaatgtcagcagaattattttggctgttcctgttgggccgcccgaaacaattggtgggaataaaagtaaaattgaaagatgaatgattcttttcattacatccagatcagtttcgtgccgaaggaatcgaagtgatttgtgtggcgacgccgcccactttcaacgccgtcgggtccttttacgtcaaattttgccaaaccaccgacgaagaagtgatcagatgcattgagaaggccaaagaatggatgcacggagaaaggtcgaaatgatgcagcagcagaaaagggggaaaaggcgaacaaaattgaaattgcataacattgtgttgtatttatgtatgttgattagtgtgaacatattcggaaataaccgttgttgtcttatgttgatttgattttgcatcagaaacaaagttttgtgataaaatgatcttcctaataaa

SEQ ID NO: 63588 - DNA, 1230 bp, Heterodera glycines
atgtcaattgacaaacaatcaaacattgatattgatccatcaagcaatgaaattgttaaaatgtcaattgatgacgaggaaaatgatgtaaatcattaattaatttatgcattcaattttttaaatggatatgaaacttttaaattttaactcaattataaattaattttaaaatttcgccttattaaattcaattttaaatgaatttttaaataatattatgacgcatttaaaatatatttagattttaattcagagaaattaattaaaaaatatatttagccaagttcaagcaataaaagagccaaaaatgaacattatcaggaaaacgatgtaaaagcatattttgggctttcaatttttcaaacgatttaaaatttttaaattttaattctattaaaaatattatatatatatatataaattaatttttattttaattaaaattaaatatttatgtatttgataaaagaagaattatattttgggcttttcttttttaaatgattaaagaataattatatttaaatttaactgaaaacgagtaaaaagattattttaaattttattcaattaaaaataaattatttaaaaatatgtctagccaacttcaagctataaaagatcaaaaaatcaccaaacatcaaaaaatgaatttattcaacaaattgattcgctgctggaagcaaaagaaaatcttacacaaatttacatggacaattggtacgttgtggacgacatggccaaggaatatttttcaattgtcatcaaaatgcttggccaaatgccaccgaaaattaaaaatttgttcgaaaatgacattgaaattttgaatttcaaatttaaaaacaaatatcaacaaaacattggtggcggaggtggtggaacaattaatttggacaaaattttggtggaaaatgcgatggattatgatgaggacacacttcgccaaactcatcggagtttaattgaacgtttcgccataaaaattggcagaatgttggagattacgataaacaacgcttttgtgccgtcgaatggcataatggcaatcattgaactgcacatttatcaaacattttcggaaggactcaaaaagtaattttgttttttaatatttaaattctaaattaagaaagaattttagtattggctggaatttttagcacaagaaatctaggaaattttttttaaatccaaaatttggtaatggaaaaattaattaggaaa

SEQ ID NO: 63589 - DNA, 664 bp, Heterodera glycines
atgcgtgaatgggtggcgagtggctgctgtccggtcggtacagcttcaacaatgttgtgtcacgggtaaataaaattctattgaataaaagaaatatttaatttttaaaaatttttaaatgcaaaaaatcatttaaatttttttttgaaaggcgttgccaccgcctattcctggataaatgcaagaattccgggcaccccggatgatcggtcttcttgagccctttaacaaagcggaagtgccaactaaaacatattgatttaaattattattttttaaataaccatattgatttttctttatcaaccaacattctcacttacaaatttccttatttttggttttactaattaggaatatttaattattgttattcatttaattctcttaacctctacttcattttgactttttcctattttattgaattaattttagaaaaataaatgctggtgcagaaataattattggtttgagagagaattgctgttattgatgttactcaaaaaaatcaaatgaattttataaaagttttggatacaagtgttcgaaaaaccagatttattgagttcttcttggcataacttttttaacggtcaatgaaattttttgaaattttgcagttctaatagagaacatttagggcaatcgaatgatgtcatga

SEQ ID NO: 63590 - DNA, 535 bp, Heterodera glycines
atgaatttattaagtgcgctgaatttatatgcaactgctcaacaagatgctgtacatgctttggtgaatgtatgcaacttacttaaaaatgttaacacatctctattaaattaagatggagcttcgtcgaagggtagcgctacatgaagccggccactttataacaaacggggacctaacgaaattttttggaaatttgcaggcaaataaagaatgattaaagcgttgaatttatcaattcggttaagtatacgtgcgagccaaaagatggagaggaagaggaggaaaagccgaagaacgaggagaaacatgaagtggaaaaagaggaaaaggagtcagagaaaaagcaggaaaagaaaaacatttcttcaaaatgaaaaatgtttttataatttagccataattttttttgaaaattctttaaatttctaaagaattcttaaaagaacatgactattaaatcagtgaagtttgaaaaaaaactgatgtaaattatagtaaacatagttgactttatatgtttgcatttaataaa

SEQ ID NO: 63591 - DNA, 490 bp, Heterodera glycines
atgaccttcagatgccaactccgtgtggaaaagccgcttaatgttgtggtggaaatggacgaaacggagaagaagagaatggagagggaattggccgaggaaggacagaacattttggagaaagtgatctgtgggagagcagcaaacgcattagaagaggtggcacaacagaaacaaagggacggaagggagctaacaaaggggggggggataaagccaagggtaaagggggatgaagctaatccaagcgaatggggagggagtgatggaaagggagagggggtaagggagatgaagcaaagtaagctaatggtgtgaggatgaaattggccaaaaaatcttttaattaatttaattaaaaattctttgccagcgaataaatcggcgcttcgctttgcttcccaccaaaatgacactgtccaatctgaacgcttcgtacgttgtggaggaggtgatgcgccgcatgagaagggttcgacggcaaaagtaa

SEQ ID NO: 63592 - DNA, 375 bp, Heterodera glycines
atggcctccgagccatgggtaagcaaaggaaaatcagattattatctaatattattattcaaatttagccacgggttggataagttgagtatgcaaattttcatttgatttcaggagcagcaagccaagctaagcgagaagtactacccgaacacgccaatgctccattacctcgtcaaaatgctgaaactgcacggcctgtacttcgacgagcatctcgtttggcgcgaagttcaggtgaaatgtgatgggcaaaaagaagtttattttctcatgcaaaagaattattttcagaatgaaattcgtatttcaaagggtaaaatcatttacccgccaatcggtgcaggaaaacagaagatgaaagccaaaatataa

SEQ ID NO: 63593 - DNA, 4451 bp, Heterodera glycines
  unsure (1)..(4451): unsure at all n locations
atggacacggtcatccaaaacttggacgtcgcgcaaggaacggacgtcacaacattgtcggtttgtttccgctcccattcagctctcgtccgctgtacggaggccgtcttttacaaaccgcacggcgagcagttgacagcaagacgcgacgacgccgagcgggcactgatgaccgaccaaacagcgttcaagttgccgaaaaagggagtccccctaattttagtccatcagaacacgcctgcccagcgcgacgaagtgtccacctcgtcagccaatcctggccagaccgacacagcgatgagagccctctggcgtttggcacagaccttccccggcatactcatccgctgcatttgcttctacgccgcccaagccttggaaatcgaacggttggtggcccagcaagaaattcccgacattttagtgaccatggcggacgcaacacaggggcacgaatcgtcacttgtcgtcgtcgtcacaacatgttccgtcttcgacagtgcagctgactcacagccgttctgggcggatgccgcgcagggtggacgtcgccatctcccgcgccagccatggaatgatcatcattggcgatttgctgctgctcaaccggacggatacgtggcggcgctacctggaccaagcgacaacggagacgacagtggtcggcccggagtacttcgacttcgagcagttcaacaaccccgacaactattacgacaaggacggacagctgatctcagccaacggtggtgcggtacggtcagagcatttctacagcaagtacggtaaaaatgtgtggtacaacaactccggtgagtcaaggggggcggagaacagatatcaaccttaccttcctcaaggtggcactcgggaacgcactcgtggccgggcctctacttctggtgcgcgcagatgaaagaaggccaagctgtacgccttcagccatggacggcagccgcgcatggacctccttctttcttcattccccttcctcacgttttgcaaatttctttttgttttgactctcttctctctcactctctctctctcttgtccatttctatttaaaattatcattcattttccttttattccgaactgttaatggcctttctttccccccaattcaaaattcttaaaatgcgtcggtttcctcacactttttctgacccattctttctcttctctcatcatgcttttacatctcgtccccaaaccggaatgacccctggttgcttttctccgatttcccttgccatccatccgagaggaaggtggaccgctgttcattactgtaatgcgcagcttggccgtggaagttcggattggagagacgaagggcgaagccgagagtttggacccattcattcattcacttcattttttcttttaaggatcggggacgatcctaagggaagggggaagttgtaaggattattcgacgcatttccctcatttaattattccttattggccattatcaattcaatcacatttatccatttttcacacgtttttccttttctcattgtaatgtctctccgcccattctcttcgcatttctacttccccagtgatcagttagtcagttagtgatggaacagacttcaattattattccgatttctcgcttcgtttaaatccaacatcgaatgaataaacacatctttaacagtcaatgagtcgtttgggggttcggggcttggtcaaaggcgccttggcttttccccattccctcccaaattccatccgggataaacggtgcatagttggtctgggggcacagtgcgcatccctcattgaattaacaaatttattggcactgaatcaaaagctttttcaaaatctataaatattatatcaactttttgctggtgacagcattggggaagaagaaaatgagcgcggatttttaccaaaacggcttaggcctccaccacggtttccgagaccacgcccgacgagaccacggccaacacagccaccacgcccagtgcctatgacgaatgcttatacaccggcaccgtcgccagtgccgcacccaactcaggcaaaccatggcgattacccagcgggtccaccatataatccgcattggaaaaatcaatgcaattaactttaattaattaattagtcgattcgataatctcaacaaatgttataagatttgcaataattaaatgtaattgaccagctagtggacaatgtcggattgtttggttcggttgttacaaatatgccgtcgatattatgtgcactgaatccacaaaagtacatgtatcaaccgatgaatccaggaagtcaatgtttattttaacgaatttcaaatttaatttgtaaattacaaacagtgggaggacaagcaccctatagtatgtttacaaatgattttcattaaatttatttaaatttctaaaaacccgtaaatttttttgtcaaaattaagatgacaaccaacaaaatcctgcgcagccaaacacatcccctcccgacagtaaattctttaaaatgtacaattaattattaattgttcggatgagcctatttgaattattatggcaatctgtccattcaaattccccgccatttttgttgttgtcactcgcccataaatagacggtcattccctccctcctggtctttttcccctcattttcattttattttgttattttcctccgaccaaattgtcttcgcttttttttattgttcgtcaataaacatttatttattgatcgtcttccttaaaccctcggaccgaacaattggcgcagtcacaaaaatttggactttgctcacatcttcgggtaagaacaattgagagcattgatctttttaggactaaaagcaaaagccgagacggcacaacaaattcaccgaaaagccgggattggctgtgaattttgattttaaagccgagttggcaaaattcttcaacaaagcagtcaaagaaactgctcagtcgtcaaaagcctggtcggcaaattcttcaatttaagcagtcaaagaaactgctcttcttctaaagccgggacggctcgacatttcttctagccgagtcggctctaaaattcttcgaaagccgagtcggctcgccaaattcgttaaaagccgggttggctaaatattaaattgacacctattggtgcaatacttcaacgtttattggtttcgggtcgaaacaataatcgtcaacaatgacgtaacctgccgcgactcaacaaccaaatttgcaacaattaatcgacgtaattgctcagcaacagacgcaaatcaaccagctgataaatgttcaaagaaacaatcagccaaatccagcaatcatccaaacaattccgtcaatgccggacgtcgcaattttcgaacaatgcgacgaaaagcatcgcatcaccgaatggcttgagcgattcacttttgccattgactcgtgcgcaccgaacgcggccgatgacataaaagtcaaggcactgattaacaaattgtctgaaaccgcgttcagcgagtacagcaaatttgttctcccggccaaggtgacggatttcgactttgatgaaacaatttcgaaattggagaagctgtttgccaaaccacaatcaatatttgtggaccgatttgcatgtctgatcgccaccaaagacgatggcgaagaatttcaccaatttgtcaacaggcacaaacgacttttgaaagattttcagtttgacaaattgaatgaagaacaattcaaagggctcatgctcctaactgcgctgaagtcttcaaaagacgcagttcttcggcaacgcattctcgccaaacttacaaaggatggcgacgccgtcaaatatgatgaactgattgaggagtgcatcaattttttgtctacaatccatgaggcaaaattgatcgaaacaacttcggtgtcatcaaggacagtgaatgcagtgaagccaaaccaaagaagggaaagaccaaagccacaatccaagcaaggccaaccaagcgcaactccaaatcagcttcaatgttggagatgtgggaaaacgaaccacacccacagagaatgctcgcacaaatcggctaagtgtcccaaatgtcgctacaacggccacttggagaatcaatgcgaaaaagtgcaagagtggcgccgcaaaaacttcaaagtgaagaaagttggaactcttagtattggaatagcactgaaatcaatcaacagcgcttctcttataaagataaaagtcatgctgaacggaaggatcgtgaagtccattctcgactccggagcagagattaatgtcatcgatgaggaaacttatcgacagatcggacagccaaaaatttggaaatgtgccgaaagaggcagaatgttcgacgggacagaaaaatcttttatcggaaagggagaaggacacttcgaattccaaggcgtanaagtaaagaanatttttatgtcgccgagaagggatcgatga

SEQ ID NO: 63594 - DNA, 1116 bp, Heterodera glycines
cgcagggaaagaatcgagaggcaaaaatgccccgatcaatccaacaaaagttgacggcacgccaaataaggacgccgaaaaacaaatcagtcagctaaagcaggagtacaccaatgtcttaaaaaatgaattgggactctgcacaaaggtcaaagcgcatttagaattgaaacccgacgcacagccaatatacagaaaggctcgtccggtcccgtacaacgccaaaaatgcagttgacggagaattggatcgttgggagaaaatgggagtcatcggcaaagttgagcacacagaatgggcagcaccgattttggtcgtcaaaaaggtcgatggtagcgctcgattgtgcatcgactattcaaccggactcaacaatgcgctaaaagaccaccagcacccgttaccattaccggaagacatttttgccaccttaaatggaggccagtacttttcacaaattgatctccgggatgcgtatcttcaagtggagctggacgaagcatcgaaaaagctgtgtgccattgccacccatagaggaaattataaagtcaaaagacttccctttggcatcaaaacagctcctggcattttccagtcgataatggaccaaatgttggcagattttgacttcacgacagcctacctagacgacatcatcatcgtcagcaagggccaaaaagaacattctgaacatttgaaaagatgttctcgcgatttcaagaatggggatttcgcgtcaaacgggaaaaatgttcgtttttccaagatgaaattaaatatctcggacaaataatcgacaaaaacggacgcagacctgaccccagcaaaatcaccgccatcagtgagatgccagaaccgacggatgtctcttcacttcggtcatatttgggaatggtaaaccattaccaacaattcatcaaaaacatgcgcttcgtcagaaagcctcttgatgatttgctgaaaaaggacaccgaatggatttggagcgacaaatgcaaaaatgcatttgacaaaatcaaaggaattttgtcatcagaattgttgctcacgcactatgaccctctaaaagagatcatagtagctgcagatgcttctgatcagggaattgggcagtga

SEQ ID NO: 63595 - DNA, 890 bp, Heterodera glycines
atgaatttggtcagcacaaaaccaattatacatcatgaaaaatgcattggagacccaatagaaaaattgagtgttgagcaaattgataggcaacaaaggttgaaaatactcacatgcacagaaaatataaaaaccttatggagagaggtaatttaaatattaaaaattaagaaaattcacttttataggggtttcaaaaagccgaagaatttgacattgcaacagtggcagaaacagatacggaagaatctttaacatataattaccctacctttgactcaattaggcgagcttataattaatagaaggagacagcaaaaacatgggatttcgaccgattcctatgatataccagagcaattattattaacacgacaaggagcaattaaattgttgttaaataagccgctaactactaatgagaagttgttgaatatagtaatcctaatttccaaaaaatgagcatatattatttttagttgggtaatttatcgaaatagagatgaaggaattgtaatatttgctacaaaaacagcaacacaagcagttgaaaattgccaaattttggtagtcgatgggacattcgaagttgcccctaaacctttcactcagctatatattgttcacggattggtaattagatttatttttcgtaaatttaaaactcttatagtttggcgatgccactttatcggctgaaaatggcgaatggataccattagcgtttgctttaatgaagaaacggtttttgcctttggctaactttttaaaaatttttttagcacaactgtttcttataacattgtttggcgagaaattaagcttttatggaaagattacactttaaatatttcaagaattcatgtagattatgaaacagcgcaaataaa

SEQ ID NO: 63596 - DNA, 617 bp, Heterodera glycines
ccttttccctcaacatcgactgacccatcgacgattgatcttacgattcaaaagcatgtccattcaattgtggaagagcaatcagagcaggtaaacatttttatgtcaattgctatgaccatgccttattttgatttatttgtctaaaactaattttgaaacggacaaaaaggtatccgcctacgaatcggaagaaattgaagtgaaacgaagaaaaattgtggtggaggaggacgaatcggaagagagcatcccgacacttccgccaaagttggacgaggagagcgaattgtcgcgactgaaacttcagtaagtgggcaatttgtaatgcattttttcgctgggtttttcaataaattaatttgtactgctccataaaggctgctgctatcgaacttttcgcaagaacaattggaccggtacgaagcaatgcgacgggcgagtttaccgaaatcgatcattcgacgggtcaaaaaatcggaaatgcttctccccccccccctcaccaccatttgttcagttgatccatcagttcactggtgtgaccgtcaaccaaaatgttgtaattgcaattgccggtatggccaaagtgttcaccggcgaactcattgaagagg

SEQ ID NO: 63597 - DNA, 405 bp, Heterodera glycines
  unsure (1)..(405): unsure at all n locations
acaaaggcacggcgctgaaactgaacaggcgcgcatttattgnccaggaagtgggctcagaacgaagagcgaaattgaggaggaggtcagaaatggcattgatacttaagttaagcaatttatccgtaataaaaatttcagtttaaatgtgcccgcgacggcaaatacccagaagagaatttggaagattggtcaatcacaggcaaacggagtttgactcagaaggcgcttttccattacacggaccgtcgggcgggcaaaggctattccgactttggtttcgtttcctccccattaattcccaaccgaattcgactctttcagccaccaccctttactacggtcgcccttacatttggccgcccgttcgcgaaattaaccgatggcactttttcatttgtgtga

SEQ ID NO: 63598 - DNA, 346 bp, Heterodera glycines
atggacaaaattttgccttgtcaaccttctactagcaacacaagttttacaaacaatgaaaataatgacaacaacataaaaatagacagtgacaaatgcactgtaacagaaatggaagaagacgaggaagaggacgaagagtttcaaccaaacgagacggacctgagcagtgatgatgtgattagtcagccaaatgttgagagtgatcaggtttatcaagcggcaaaaaaaaattgtagatcggtgttaatttcagctagattctgtttatcatactccgaattgtgaaactcagtggccaaaagagaatgacgaacaggttgcgatgttaataaaaaaaatgtaa

SEQ ID NO: 63599 - DNA, 216 bp, Heterodera glycines
  unsure (1)..(216): unsure at all n locations
atgaaaaataatgaaaaagtggaagaattgacaccaaacaaaagctcgcaagaagaaaactttgaggacgaattgtttgggcagcaggtgatttaatgtaaactcaagaataaaaaatacagttgtccttatccactttaggattcggatttgagttttgttacgacttgggaccccattgaacgatttgngaaaaagaaaatagcgacgaaatga

SEQ ID NO: 63600 - DNA, 190 bp, Heterodera glycines
atggcattggcattggcaattgctaaatgccaaaaagtgtgtgagggggcgaaaaaaacaaaattgattttacagggcgtgaaccaaaggggaaaagatgaactgattgaacgccacaagagcaattgattaattatttagctgaaatagagttgaaaaacagcaaaattaactattaaatgaaaataaa

SEQ ID NO: 63601 - DNA, 56 bp, Heterodera glycines; identical to SEQ ID NO: 52733

SEQ ID NO: 63602 - DNA, 72 bp, Heterodera glycines
gtgccggctccacaaacacaatccgtttgcagaaagtcgaataacagagggacgtgtccaatgagcttttga

SEQ ID NO: 63603 - DNA, 362 bp, Heterodera glycines
attctctcatataagataaaaatgaaaaaaatattatgttcaaatttattaatattaaaaagcttaaaaactaatttggatatgaaaaaaaaacaaaataattatttacagggttggggaattgaactttagaagaagaaaaaagtatggaaggcacaaccaccaggccaccgacgctcacattggctttacattctttgaaaatgatattgaaaaggcaaaaaggaaaagcttcatatctcggccagaagcttcatttagcaaaaataaaaaaaaatttataatacaaagggggggtaatctacctaccctgaaagtttcattcggaagtcccatggtcacttgggtacctctcctttgta

SEQ ID NO: 63604 - DNA, 304 bp, Heterodera glycines
aaaattccctcaaaaataaaaggtctattgcgcaccgccctccctatcatgctcgagagcatttgtatgtgtataaaatttatcaaaaaaagagatagccatttttctgggataacctctaaatataaaaatcctctgtgaaataaaatggcgattgtgcacagccctccgtctcatacccaagcgcttttgtgaggtataaaatttctcaaaaaaagagatagccatttttctgggatagagtataaatttaaaaattccctcaaaaataaaagggctattgcgcaccgccctccctatcatg

SEQ ID NO: 63605 - DNA, 144 bp, Heterodera glycines
acagccctccgtctcatacgcaagcgcttttgtgaggtataaaatttctcaaaaaaagagataggcatttttctgggatagagtataaatttaaaaattccctcaaaaataaaaggtctattgcgcaccgccctccctatcatg

SEQ ID NO: 63606 - DNA, 351 bp, Heterodera glycines; identical to SEQ ID NO: 53910

SEQ ID NO: 63607 - DNA, 432 bp, Heterodera glycines
atgatgctaatccaacgccacatccgcggttgtcgctggagtagtcgcagcgggcgcctcagtattggtcgccgcattcgtcgtcggagtagtcgccgctccggttggatcattgttagtcgccgccgctccatccgcggtcgtcgtcggagcagtcgcagcagcgggcgcctcagtgttggtcgccgcatccgttgtcgcagtagccgctccggttgcgtcagtgttagtcgccaccgcgccatccgcaatcgccgtcgttgtcgccggagtcgtcgcagcggtcgcctcagtattggtcgtcgcagccgtcgtcgtcgtagtcgcaacgggttcgttggcgttggtcaccgtcgctccatccgcgttcgtcgttgtcgctggagtagtcgcagcgggcgcctcagtgttggtcgccgtagtcgcaccggg

SEQ ID NO: 63608 - DNA, 536 bp, Heterodera glycines
tgtgacaacggaccgcggggaacactgcgattactccaccgacaacgacgaccgcggggccggagcgacggtgaccaacgccaacgaaccccggtgcgactacggcgaccaacactgaggcgcccgctgcgactactccagcgacaacgacgaacgcggatggagcgacggtgaccaacgccaacgaacccgttgcgactacgacgacgacggctgcgacgaccaatactgaggcgaccgctgcgacgactccggcgacaacgacggcgattgcggatggcgcggtggcgactaacactgacgcaaccggagcggctactgcgacaacggatgcggcgaccaacactgaggcgcccgctgctgcgactgctccgacgacgaccgcggatggagcggcggcgactaacaatgatccaaccggagcggcgactactccgacgacgaatgcggcgaccaatactgaggcgcccgctgcgactactccagcgacaaccgcggatgtggcgttggattagcatcatggcacaacaacagaa

SEQ ID NO: 63609 - DNA, 616 bp, Heterodera glycines
ccggcaccgatcacagcgatccgaaaaacccttgaagcaaagatggaggagctgagaaagatacgagagcaggtggagcaattagtctaatttaacttcgaaccaattaaaattcttaaggaaatggtggcgcaccaaacggagaaaattgagtggcaaagagagagagaacaaatgggcggaagggcgcataaaatggtcaattaattaagggttgattatggcaaatgacaactgaaaaaaatttgtgcagaatggcgccgcttcgcatggccaaggcgtggattataagcaaatcgcggacaacgctttgcgagcggcggaagagctgcagaaacagtaccgcgagtatcaaaggcattacacggcggaggtgcagcggctgagcggacagctggtcaaattggagcaggaactggcgacacgacagcaaaaaattacggtagtggcaccgacggaaacggtagctgaacataaacaggacggccacaatgacgacaatgacgcggtcaatgtcagtgccgttataaaaatgccgacgcaacaccaggcacagcacgtgacacgaccacagaggggatatgaagtgaaacaatgccgaaagcgaccaatttaa

SEQ ID NO: 63610 - DNA, 1445 bp, Heterodera glycines
atgggaccaactcaaaagaaggcgaggctcaacttcaccatcgaccaactcatcgtccgtccgttgcgcgactcgcaacgcgtcaacgtcgttcctccgccgaccgtaacaaacgcagcacagcaaacgcagcagccgccgttggctgcacttcagcagcagacattgcagcaactgacaaatggtacaaattgaggagggaaattggcaaaagatgactcccgcttcaaaaagaaaaaactgtttttattttcaaaatccgaatttgcgtcttcctttttcagtgcgttggccctctcttccgtcgtccgcctttcgacccctttttccccctcctctctccgcgccgttcgctttttctcccttcgctcttccgtctctttttttctcttctccgcccttctctcttccgattccgtcttctttgcccaacaatttgtcttcatcgtttcatccgtcaccttttttgatgctcactccgccaactcgcgccgctttgatggccatcgccctccgaagacaacagcagcagcattttggaagtgcgggcagttcaacagggcctagcagcacatgctcatcctcacagtcagcggacacgacggaggtgggaaacgaaaaacaaacaataaactttatcatgtttgctatttggatttcggattaacaaaacttttttctgtatgtcgcacatttcctcttcagtgtgttgccattcgtaccgaaaatcgcccatgcgttgtttctccggcgttgcgacacaaaaatttgacgcttcatgagacaccgaaacgatcgaacagaaaaagaggactgactaatcgcacgcgatttatcgcagcgggcgacgactcgacgaaagccgaatgcgaaatttgtcacaaaaaatttggacgcccgtggctgctgaacggacatatgcgaacacacagtgatttataataatcattccaagccacaaattaacacttgaaaagtattttaggcggggacaaaccgtacagctgcgaaaaatgtgacaaaacatttgcggaccgcagcaattgtcgtgcccatgaacgaacacacggaggtatttggaatttggggctaccaatttgaaaattatttataaatttcagcggaaaaacccttcgaatgccctcgctgcaagaaagcattcaaagtgaagtcttatctaacgaaacacaagaaatcatgcgggaaaagtgaatcgaaatttgatgattgatgttttggtgtacttcgtctgtttgacctttttacggactttattctcatcttctcacaatttgttctttttttcttcatttgtattatgtgaatctcttttatgcaattacggtttttgttttgtgtttgaatacaattctgacatgggttcgtccatagtcgcccccgcaaatcaccccgattcgtagagacataaaaattcattaagctga

SEQ ID NO: 63611 - DNA, 347 bp, Heterodera glycines
atgtcgaataaaacgaatgttttggatgcgaatagcaacgccaaaggaaacactttgggatttgtgctaatagcgggtggagtgttgtaagtgccttcttctcacaactttgcctcctctattacacttaattattcagcttgctccttcttctactgatcaattcggttgtgcttctgatttaccgtcggcgccgacaacggacttttgtttataatgttaacagcgaagggaagcggtcgacgaaaacgaattcaccgcccgcggatctcacccttatttcttacaaggcgtttcagtgatcttatgtattttctgtgtgtattagttgtataaaattgattaaa

SEQ ID NO: 63612 - DNA, 735 bp, Heterodera glycines
ggtgttgccattggtaccggaaaatcgcccatgcgttgtttttcgggcgttgcgacacaaaaatttgacgcttcatgagacaccgaaacgatcgaacagaaaaagaggactgactaatggcacgcgatttatcgcagcgggcgacgactcgacgaaagccgaatgcgaaatttgtcacaaaaaatttggacgcccgtggctgctgaatggacatatgcgaacacacagtgatttataataatcattccaagccacaaattaacacttgaaaagtattttaggcggggacaaaccgtacagctgcgaaaaatgtgacaaaacatttgcggaccgcagcaattgtcgtgcccatgaacgaacacatggaggtatttggaattggggttatcaatttgaaaattaaaatttcagcggaaaaacccttcggatgccctcgctgcaagaaagcattcaaagtgaagtcttatctaacgaaacacaagaaatcatgcgggaaaagtgaatcgaaatttgatgattgatgttttggtgtacttcgtctgtttgacctttttacggactttattctcatcttctcacaatttgttctttttttcttcatttgtattatgtgaatctcttttatgcaattacggtttttgttttgtgtttgaatacaattctgacatgggttcgtccatagtcgcccccgcaaatcaccccgattcgtagagacataaaaattcattaagctga

SEQ ID NO: 63613 - DNA, 347 bp, Heterodera glycines
atgtcgaataaaacgaatgttttggatgcgaatagcaacgccaaaggaaacactttgggatttgtgctaatagcgggtggagtgttgtaagtgccttcttctcacaactttgcctcctctattacacttaattattcagcttgctccttcttctactgatccattcggttgtgcttctgatttaccgtcggcgccgacaacggacttttgtttataatgttaacagcgaagggaagcggtcgacgaaaacgaattcaccgcccgcggatctcacccttatttcttacaaggcgtttcagtgatcttatgtattttctgtgtgtattagttgtataaaattgattaaa

SEQ ID NO: 63614 - DNA, 244 bp, Heterodera glycines
ttaaggttttgtgttttgactttgcttttttttccattttttccaatcgaccacgttaattcattctctatacatttagtgtcttatttcatgaaattatattaatttaattttaaataaagaggcaaatttttacagaaaataaatagacgctgactaattagctaacatttataaagaaagtagaaatttgattaaatgcatatacaaaatattacttttttaaatttgtataaagttccta

SEQ ID NO: 63615 - DNA, 244 bp, Heterodera glycines
atgcgcactttttggctgctccgccgtgacaattacacattcttcttgaagccgccgggcgaggagaacgccgagcataatcagcaccaaatgggcaacaccgaagaatgggaggacaacaacaacaacaccaacgacaacaacgagttcaagcccattttggacccagaaatattcccaaggccaaagcaaaacgccgcggcacgacgccatcaacagccacgggacttttgctcgtcattaa

SEQ ID NO: 63616 - DNA, 510 bp, Heterodera glycines
atggacgactcttcaacgctaatcgaccgtgatgaagtgatgaaaaatttcaaggaaaacttgtcgttcgtcaacaacaaatatcaaatcgcattaccatggaacgacagcgaagcaccatcacgaggccgcgaagaggccgagtgagtaccttcggtgcaggaaaattattaaattttaaaaattttttaatttctttttatatatgccaaataatgtaggcttaccttttttagtgaaaattcgatcactcatattttttgatacattgagcagaagcgttccaaactttgcagggatactccccggtaaaggactcacttactctgaaatgagcaccgagctagctggctcaaaaaaattttcgaaaatctgagtctttcgtttttatttattttttgcaaaattaattcttaaatattttttcagaaagggttgtgaaacgctccagattttatttacatgttagtttaggcactctgatgctttttctatcaaaaagggagatga

SEQ ID NO: 63617 - DNA, 814 bp, Heterodera glycines
aatcgattttttcaagtgtccgtttgggggtactcaaacaattatggggagcaaaaatccaacgcagaattaaagtacaggctatagggaagctattcccgaaggattcggtctccccataaatctgggcgcatcggttcggggggactgccccgaaaacaaaaaaatcgattttttcaagtgtccgtttggggtactcaaacaattatggggagcaaaaatccaacgcagaattaaagtacaggctatagggaagctattcccgaaggattcggtctccccataaatctgggcgcatcggttcggggggactgccccgaaaacaaaaataaatcgattttttcaagtgtccgtttggggtactcaaacaattatggggagcaaaaatccaacgcagaattaaagtacaggctatagtgaagctattccggaaggattcggtctccccataaatctgggcgcatcggttcaaggggactgccccgaaaacccaaaaaaaaattttttggataaaaattatttaaatgaactgactagataatatttaaaataggttatttctcttcctttcagtatccctgcaaagtttggtgcgcttctgatcagtttctgaaaaaaaagttaagcctaaactttttggcatgtttaaaaaggaattaaaaatttttaaaaattttattcatctccctttttgatagaaaaagcatcagagtgcctaaactaacatgtaaataaaatctggagcgtttcacaaccctttctgaaaaaatatttaagaattaattttgcaaaaaataaataaaaacgaaagact

SEQ ID NO: 63618 - DNA, 3399 bp, Heterodera glycines
ccgatgaacacatcattgcaaacaaattctgaatctgttgaatcgactgatggcgatgagtcgagcagtgaattgagagacccggtttgtcgattttttttccaactaattataagaaacaagatttaccagggccaacaatttatatatatgacttttttaaaattaaaaattatacgactaaaagtttttttaaaaattctctgattctcatttttaacattttacttacagtttttgtcgtgcatttttttacattaaaaaaattccatatctgttaaaataggaaacatttcacttttagcattctgcgctcggcgtggaagaaattgtgaatgaggaagaagcgcgcaggcgtcgcgagcagctgaatcgacgcccgtcctacaggtgtggcaccagggaagatccaagccagccttggggaacgaagctggcctgttttccatctgagtcatagttttgggccataattttccaaaataggccaaatttttcaaacgtaatttgcaaatttggtagatttttaaatttgacccgaaaaattgcccattggagataatctaaataaattttaaaaaaagaaattaagagacagaacatggcgctagggtaaaattgaagcgcatctttttaaaagtttgtttgtacctttaggatgattctcaaagatttggagacagtgggagacaaaccgatgaaaaaggaaatgcacgacgatggcaacaacaacacggccaacacattcaaccatgatcggaatgaccgaaacacgggcactacattacatcaattgggtgaggagactgaaaaaaagaaaaaatcgaaatttaaaccagccaaaaatgtcaaagttgacgaattcttcatatttatgttttacaaaaaacgaaattgccactttaaaaaatgaaatcacaaccttcgacgagttaatttttgtttaaaatttattgggtaatttaaatggtaaaattctttttatggttttctgggtcgtatgcaatatttctaatagaaaaaattcttccaaaatttaaaaataagtttcttatatgtttttccattctgccaaggttcgccgggtgaaaatcaagcatttgcaagcagttccaacaacagcagcaacaacaacaatgttggtgttggtgggctaaagccggcaaatttgccctcagggctccgtgttggagttgtaggaacagctgcagcttccaatcagccgcttactcagcacatttcgccgccgacacaacaaaatttggcggcacttggtatcacttactattttcaaaacataaaacatgcatttttttgttattgcctatttagggcccaaaaattaaaatgaacaggttttgacgatgaaccggggcattcctggaccaaaagtcctcgtttggtcgggattcccggtcttgctgttttccctccatatacccgggagttccagaaaagtgccgacggggccctggtcccatccatgcgttatattgccgagtctgggttcaacttgacccggtcatcgggcacttttatagtaggctaaaagttggcagcagttcgggggggggggagtatgtacccccactttttcttccttggataaaaggacctgacgttagttaaatgcaatttaccaatttgggattcgaaaaaattcagaattgaatagagagcaatacttttctctatctctctcttttctaaaaaaatgtacgcttcaggacagttaaatttgattggcaatccggccgcatcgattgcccaccaacagcaacaaaatcgcctgatggcaactgttgctgaaatgccgtcacagccgcaaccccaacaattgtctgccgcaacaaattcggcaccgccgccccaaccgttgctagccgccgtgaacaacctggaaatgttgggactcaaagcgccggatgcacttggcactgccgcatttggacccaatggtaaagctgaccttatcagacaaaaaacatggaaaggaaggcctgatttaaaaaacaaacaaacaaaaatttagaattttcaaacctgccagtgtgtgagggatttaactattcgttgcataaagaatccactttttttagttttagttttttcttctttttattgaaattaaagttttgtgaatgtaatatgacattcagttaaaattgtcgaaccaaatgaaaagtttcctaactcgttgacaaaatatgacttattgttaatccaaaacaaacactaaattagtttttatagcctcagtatgtctctaaaggtataaatattctcagtttagaaaaagcacccaaaactttattatgtgacatggtacggatttttgaaaactgtggcaaaggaagtctttggacaacggggttttcttaaattttttgataactttttccagtgctgtttttaaatttagtttcttaaatttgtacaaaatccaaaaaaaaatcatttttttaatgttttagattggcaaaacaatttgctatcttcgtatggccgaacccagcagcagcaatcgccccaggtatcgctgatgcagcagcagcaacagcagcagaacaatgctgccggcgctgttgttggcacgatggcaaacagtccgctcggcatgaacaacattggcgtcgttgccggacacgcagcagcactacagcagcaccaccagcagcaacatgtaacaccgccaccgcatgggcttggtaaattactagaactatccagaaaacagattcgggaggggcacccgaaaaccttttttgtttattcgacacagtgggaaatataggaaatttttttaccggttttcgcaaatttggccatttgggatcaaatttttcaaaaccatgggatcaggtatgcgatagtgaattcaagactgaacatttcccgatacttgcttactccggcactcgacacgaaatcgagattatcggataatttttttccattaatttttccggagaggggggggggggggaggaggtctggtcccgcgttcaatgacattgtttttgttacttaatgcaattttgaatttatctaaattaattctcattatgcattttgctgtgcctttcttttaaggttcgcgccaagggtccgcatcactcacttcattgtacgttaagtgccgacaaaatcgctgtaattgactgtttcagctccccaaacgttaggtcagagggcggcgatgacaacacccggaaaagacaagtgcgactgctcaaaaacaggtggcataatttaatttgatttaattttctacaattttttgttttttttttcttataattttcttacaaaaaaattattcaataattaaattccagggaagcagcaaaggaatgtcgtcgtaaaaagaaggagtatgtcaaatgcctggaaaatcgc

SEQ ID NO: 63619 - DNA, 499 bp, Heterodera glycines
atggagaaggcctgcaaaatttggagagattatatcgattttagtgcgctaggttcgatgaaactttttaaaatataagcctaaactttttggcctgtttaaaaaggaattaaaaatttttaaaaattttattcatctcccttttgatagaaaaagcatcagagagccttatttaacttttaattaacatttggtgcgtttcagagcagtttctgaaaaaatatttatgaattgattttgctaaaaaaataaaatagtgaagctttaaaaattaataaaaaattttaaattcagaattactggagttagcatcatagcagtgcttttccttgtctttttgatgccctcgcaaaatctggttcgcttctgatcagtttataaaaaaaaagttaagcctaaaatttttcgcatatttaaaaagcaattaaaaatttttagattttttattcatctccctttttgatagtgaaagcatctgagtgcctaaaataacttgcaa

SEQ ID NO: 63620 - DNA, 253 bp, Heterodera glycines
atgtattctccatttgatttgtttttggtttcttcgggtcgtcaattatcttcattcgctcatctctttgtgccaattaattgccggatttttgcgccgaatgttcgaaccatgtcgacaaagcctcccgctgataatgagtccaacaatgaaggtcaacagaagagcagtaactcactcgcacgagacgggaattatgaagatggaaatatgaagaatagagacaaacaaaaagagttcggaggacctgctg

SEQ ID NO: 63621 - DNA, 253 bp, Heterodera glycines
atgacgtcgggcgctactgtaaaagtgacagtttttgaaaattttttcactttttttggtaatttttttttgtttatttacacataatgatgtatattaagcattattgtcatattcttgatcagcgacctctaaaacccccgggtatttggtttcatgactttttaaacaaaaaaaaatttaccaaaaaagtgaaaaaattttcaaaaactcacttttacacacaccatcccaaaaaacgagatgtgtacca

SEQ ID NO: 63622 - DNA, 461 bp, Heterodera glycines
atggacgaaaaaattgaattcgacgccaagcaggcccatttcaagcgaaaacttgggccgctgcgttatggcaaccggatcccgaaggccgaaaaggcccactacacaccggaacagcgagaggccgaccgctggttgtccaaccacgcttggccgcccccagcgcccttcaagggcattcttttccccgccaagagtaagtgctttaaaatttttagtctgggactggaacaaggcttttaagactgtaatttctgtacatttacatgggtacccatataaatgtacattaagtattgctttttatgtaatgtttgatttttagtctggcactggaaaaagggggccgctgcatatgcttcgcactggcgagacgagttcttggggtccaaaaacccggacgtcaaggcagctgcggacgccgctgccaagggcgactttctcaaactcggcatcaacga

SEQ ID NO: 63623 - DNA, 649 bp, Heterodera glycines
atgacggaaaaattgtccggactttccagctctgttagctcatatctttcggtaagtgatttcagcaccaaattccgtttaaccaatgaaagtttttatattaacccctcaattattacacattgttttagaagaccccagcaaaaagttgagatgtaagcttttgattttcaaggctttctttgttcttttgcttctttcctttctttctttccctcttttgttcgcttttttcgtttttctttttccgacttttttgtctttccaccagaattagtgaaataacactaaaaaagagtggcggggggggaatgctcttttcttgatgaagttggtggaaattcgaaaaagtccggtgggtttgttgagggcattctgtccattttgctacttaaaatcacaaaatgatttgtataaattgcaggaccggtactgactgatccgtccgagttttgtgcgatgagctgaaaaagggcgacgaagaattaaggaaattttgttgtatcgtttcatccattcccaccactcttttcatctgttgttgttgattggacaattcataacaaagtttcatatcttatcacattcgcctatatgtactgtattattattatttgtattattgtacgacatggacagaacaaataaa

SEQ ID NO: 63624 - DNA, 4790 bp, Heterodera glycines
tcatttcaaaaagctggcggatattccattttttgtgaatgaacaaaattgcatttgtttgctataaattttcaaatattttcctttcgtcatttcttcaatcacaatatttctgtccgtattaatttttcatattccataagcattggccatgttggcatccgccaattggtcctgaattgtttttttagtttttccgtataaatgccattcacctcaagcaatcggatcctcctctcgtgctgtcgtaagaccactttgattttggccaattcgtcttcaacgcttccactgacctacaaaattgaaatttaaatgagtcattcactaataatgatttattagctaatcaccgcggcagcggatgaattgctcggccttcgcgatgcgttcggtgtcgttgcggcggtgctttgtccgtccgcttctccgcttctgttctgttcccgaaggattccgtccgattccgctacgacattggcggacgttaagaaacatccgctcggttgaggcgatgcagtgggagaggaagaatggcaaatcagcaactcttttgccactaaaaaacgtttatttatgtcgcattttcagatttcctttaagccctctacgacgtccttcaacattggttttgtcctgggtactgttagaaattgttgaaactgtcccctgcccccctctcactcccatttatcaaataaaattttgccgtaccgtccgatttgccatcattcgcctcgccatttattacattctgttgctgctcttcgtctttgtcgcgatttgcgaaataatttgtatttcctccctccgcccccttgacaaaataaatcctttattttacaattatcccccctccttttttcgcttcattacaccacttccgttcccgacggccgactggccataaaagactttgatttccctgcggttgcttcttcttgccttttcattctttcccttggatccttttgtggacttatcccccttttcttcgccgttcgctcgcctttgctttcgcatagccttcgcctttgattcatcgctttttttccttggacttaattggtggagataaagagtttttgaaagcgatcttttgtttggaattcgtttgtctttctgattttgtcttaatttggttttaattcggaattgggtcagcactcattggccaattccgacacaacggccgggaaacctcccattccccccctttttttgtctaattgtaccccattggtttttcactttgttctctaattgccctttccaatttcttttgtaatccgcttttcacttattctcgtattcatgtctgcccatttccgtgcgcaacttaaattggcttatactgaagccgaagagcttctctcggacgaccgacaatttcccatcccagcgcgtaataatcagcctgattctgtttttctcctaaccgttcgttcatgtatccaatctttaaatgatcatgtttccgatgtccaatcaattttttctgttcttaatgacaattctgaccgatggatggcccttagaactaacatgactggggccgagagaatccaagataatcccatttatgacaattttgtgatcgaatgtcccttcccttcgactgtttccaacctccggaagtaccttcggacccttcgagaccaaggccgtgccttagaagccaacctccctgccaaggttcaaaatactcaaaatgccgcccctccctccctcgttcatttgcccaaaacgacgctaccgactttttccggggattgcacgacttatatgactttttggaacacatttaaagcgggagttcatgacacgaacatcccgaattctctcaaatttacgtatttaaaacaatgtctttctggtcccccattgactttgattaattccctcccagtttttgacgattcatatgacatagctctcgcccttttgtcaaaacactacgagaacccagaggaagttgctcgtgcccttcataattctcttagaaagctcccccaaatccgaaccggtgaatttttttgtgatgaccttcgttccctccttgaccaattggaatgtatttgtgtacaaatgtcacaacaaaattgttcctatgatactgtggcagtccaaatggaagttgaggagagacttccccgcttcattctcgacgaaattttcatgtcaaaggaaaacgacgacgattggtcaacggacaaactgaaggcacgcctttgggccattctcaagcgaaaagagcaaattcagacgcttcaccccaaagttcctgtttctccaaggcacaaattccaaacgaccccttcccccctttccaaatttggcaccccttctcattcgccccccgaattcccaactcttacttttcattccaagagaagtcaacagtctaaccacaaacaaacaaatgaaaaatccaatcctaaacccaaattaccatgccttttctgtgacaatcctggtcacttttcaagtttttgtaccacatttactgatcaaaaaacacgcctcgagcggcttaaggctctcaactggtgtttcaaatgcttaaaacccggccatttttcccgtcaatgtcctgctccagcccaatgttctaattgtaagggatctcatcatcgagtgctctgttttaatcgatcggaaaatccccatcgctccaccaatttcagttattcccaaccgaccccaacttttcctcagttttcgccccctgccccgttaattcctccatttcaataccattcttctccgccccctatcattactcacagaacgtctcattcgccttctatccctgataacccctccggcattacagcacacatcaaccaaacaaatacggccatcaccactgctcatttggccaccctcccttgctcaaatgtgtgaaggtcagaatttttcaccctcaaaattacaaaatttcccgggaaggcatcggtcttttggaagacgcaagtacccactcgtacattaattttgacgaagccaaaacccttaatttgaacttggcccccgtttctgtgagattaggtgtttttaatgacccaaagtccagagtcatccagactttttcgaaccaatttggcctacaattaatgaatggacggtccctaattgtctctacaaatgcaattggctctcttacccagcccacctcatatttgccattttcccctgaattgctttccaatgttgaattggtccataaattccgctcaactttgccatcacatgtgacattgagaaagcatttttacaagttgctgttcacccggaacaccgggactgcgcacgttttttatggcttaaagatccccatcgcccattttccaagtccaatatgcaaattttccgcttcacccgtgtatcatttggtctgacttcttccccctttttacttgccgcaacgatacgccatcacttatccaaatttccatccgaattatcacaagaagtggccctaaatacttatgtggacaatattctcctttccgtacaaagtcccaatgaagcccaaattaaagccaaatccattatttcactttttcaaagggcaggaatgacactccgagaatttgccagtaattccgaaaatgctctatccaaactccccgacgacataaaactctcaggttctgaacaaaaatttttgggtcttaattggaacacccaaaccgactccttggaatttaatttatcccctccgaataatgattttatcccttctaaacgctccattctgtccttcattgcgtctcaatacgacccccttggccttatttccccactcattctcccattaaaaatttttctccaatcaatattccaaaatggcagcgattgggatcaaactctcccaacccaaattcaaaacgactgggattgcgcaattaaaaattggaaaaatgcagaaaaggtgtccattccccgttgtcccgttacactcccattggagggaagaaattatcagttacattgttttactgatgcctcctctctcgccatgtgtgccacagtgtatctccgaattacccatccctctttctctcaagcagaagtgtttttaattttttcaaaaaccaaagtaaaaccgactcataaaggcacgccactgaccattccacgactcgaactcattgccgtagaaattgggacgcgggctttaaaatttacccaatcgcacttttcctccttaaatttggaccccgaattaaccatttggtcggactcttcaattgtcctttcctggttaaattctccccaaaattcattggaaatttttgtccaaaatcgaattaagtcgataaaaagtacatcaaatttggtaatccgccatttaccaggttctgaaaaccccgccgacatcggcacaagaggcctgaactccgcccaaattctttccaatgcctcagtgtggtggtcaggtccaaaatggctcccccttctcccaattaattggcctgataaccgccaaataaaacactttcggaactctaaatccgaatcgtcttcaattttggccactccactgtatacttttgcgacggaacaactttccgataagcggttaattgatttatctcatttttcccgcctcccaaaggcacttcgaattaccgccctcgttttccgttttatcagatttgtccaaaagaagcaaaatccaaaacctaactcagcccctatctcatttattgaacttaaaaagtcatttaaatttcttattgctcaagagcaagcccatcacccgccctcggaccgagacactg

SEQ ID NO: 63625 - DNA, 894 bp, Heterodera glycines
atgcgaaagcaaaggcgagcgaacggcgaagaaaagggggataagtccacaaaaggatccaagggaaagaatgaaaaggcaagaagaagcaaccgcagggaaatcaaagtcttttatggccagtcggccgtcgggaacggaagtggtgtaatgaagcgaaaaaaggaggggggataattgtaaaataaaggatttattttgtcaagggggcggagggaggaaatacaaattatttcgcaaatcgcgacaaagacgaagagcagcaacagaatgtaataaatggcgaggcgaatgatggcaaatcggacggtacggcaaaattttatttgataaatgggagtgagaggggggcaggggacagtttcaacaatttctaacagtacccaggacaaaaccaatgttgaaggacgtcgtagagggcttaaaggaaatctgaaaatgcgacataaataaacgttttttagtggcaaaagagttgctgatttgccattcttcctctcccactgcatcgcctcaaccgagcggatgtttcttaacgtccgccaatgtcgtagcggaatcggacggaatccttcgggaacagaacagaagcggagaagcggacggacaaagcaccgccgcaacgacaccgaacgcatcgcgaaggccgagcaattcatccgctgccgcggtgattagctaataaatcattattagtgaatgactcatttaaatttcaattttgtaggtcagtggaagcgttgaagacgaattggccaaaatcaaagtggtcttacgacagcacgagaggaggatccgattgcttgaggtgaatggcatttatacggaaaaactaaaaaaacaattcaggaccaattggcggatgccaacatggccaatgcttatggaatatga

SEQ ID NO: 63626 - DNA, 364 bp, Heterodera glycines
atggctgaggccagaaatattgctgccttaagcttcaccgtaacacacgatggcatttccgtctcttatgaccaggaagttctgcgggacatttggcacgcgttttcacgcagttataaaaaacgcatcgcaaaattcgaggtttgcttttatttttgatatttacttttgtatttttcttgtatttcattaactttcgtgttttccagaatgatttcttcgctgggattttcccggccaatatccgttcgttggccattgtcattttccttgtggccgcattgaatgtttcattcggaaatgacaaaactccgttcaatcttgccgataagctcaattactacgtcttttccaatatcaccac

SEQ ID NO: 63627 - DNA, 512 bp, Heterodera glycines
atgagccacccaatttggcaaatcggtctttttaaatgcattaaagaagattcagtcgattgcttggagtgtaagcaaaaaaaacgttattaatttttcatcttcatcattttttggtttaaaaatatattttaatacttttttatactttgaaagacttttttattaatacagattttgaattccaatcctgcaacaggacccgcaaatttgaaatttctggtctctagccgtagtctcgccccacctactggccgccgtagtcgagtgtgcggcggtttttagcgcaataagcaaaaaatttgacgaatttttgttattttttgactgaaccgggtttgaggaccaataacttttgttaatttcttttttatctaaaaattcctttggattcttgattaacagacgatgaggaatcgattgataagtattttgccgcaattccatgcattttaagtcagtggacgattcagtcccaaagtcatttggccatttcagtcccgggtctgtaa

SEQ ID NO: 63628 - DNA, 164 bp, Heterodera glycines
acattgacacatgaaattggccatttgttgggcttggaacattcatctgatccgagggctgtgatgtatccaagaaaaaaggagcaccagccgggctttgaactgtccgacgacgatgttagggctatacgatttttgtacaattaataaaattcaatatttaa

SEQ ID NO: 63629 - DNA, 3042 bp, Heterodera glycines
atggaaaacttggaacggacactcaatcatactcgtttgactagacagcgagctcaaaatgaaggaatattgctcgacagagatggaaatgttttttttcgggagaatccaccaaatagaactttaggcgtgatgaaccaaaacgtggtggtggcggatcccaatttggagaattcggagcagctggactcgatggaaatgagacggcgccttttgaacccgaacaatgacagcgcacttggacagttgcgacaaaatgaacgtgccagccttgacgaaaacgaagaagaggaggcaaaccaaggttttatgcgaaaccgaacggactggacacaaaatttgggagagagggcaggcccaacccaacaaatttttcgaaattttgtctttggacattcccaaaatgaagatgacttcttcgatcatccaaacattagaagaacttcgactccggtcaatgaaaaccgctgtgttggggttggcccgcaaaaccttaatgaaatagggttgttagccgaacaaattgggagggtcatcgttggtcagctaaatagtgctcatcaaaatccgaacacaaacccggcaccaaatttgacgcaacatggtgttgaaatccaccagcaaatacaccattcggctgtttttgcgcgtcgagccaataacataccgtttcgaatgccgggtcagcaaaatccagcagcgattcaacaaaattttggtcgccctcaatctcaacaaattcaaccaccaaatttccaaccccgtcagccatatgcttggcaaatgaacgaacagtgcgttcaagtgcaacaaccaccaatgccgcagatgaactatcagccgcccccgacctttaacacacatcaaaatcagcctaattttggcatgggaaattttgattttgggattgtattggagcggatccctgacctctcaggcaccgaaggatcggatggtatcaaaaaattttttaaaaagtttgacttttattcattgaattggtcggatgcgcaaaagattagggctctagaatcaaagctgtatggtcgcgctgagcgcgcattccaaactgcgcaaagtacgcaaccctttcgctacgaaccaattaagcgcgaaatgcttaatctcctggacgaaactgacgcacgcaatttgaatgcgtttgatgaactgatgcaaggcgtgagacggggaccaaacgaaagcattgacgagttagcgaaccgtatttcaggcttggtacagagagcttacaacggtttgccacagcatttgagcaacgaatacgccattaagtttctggttagagcgatgggcaatcctgagctcgcgttaaacctcgagcttgtgagaacgccaggcatgaccctggaccacttcgtgtcacttgccgcgcgtgctgaatctacgcaaaaggcaacacaacgattttcgaggccggacaacagagaaaggacttggagaacgaacacaccgcaacatttttcccagacgaataatgggccctcaagaagcaattttgaggaacggggccagcaaatgcaaaaatttggaacccaatcaaaccgaagttggagttgcttcaactgtaacagcccaggacatttggccagagattgtccccaaggaaaaatttttcgcgcaattgagcgaactaactcttctacgacaatgaatcaacaaggcaaacaacaaatgggttataatcggcagcaaatgcctgagcccaacgaaaacccaccaaatcggcactaccagcaaaagaattatttgaagcaaaattgcttagttctgcaagaggaacaagttcatcaaaacaatttcattgttggtgaattgaagcaggacctggaagatttttttgacgaaataaggaaatgcgcgacggaagacaaaaattcaaatttttcaaaagtcggaaaagtaatggcagttttggttgaagtttttggaacgaagacgaaggcaatgctcgacggaggcgcacaaatttctgtaattgaggcaaagttcctctacaatttgataagggacaaaaaattggacgttcggaatttgagtgttttgaaagcggaaaatcgcatttccgatgcgaatggcaatcctttggaatgtttaggagttatttgtctgccgataaaacggcatgagaattcgagcgaggtcaaagtcgcgatgcatatcgccaaatcgtcgattggatttgaccttctttttggcacgaatgcgcttaatgaattgggctataaaatgtacgatgccatcagcgacactataattgattttgaaaaagctaagcaaaacaaaatcaattcactcgctgtgatctataaaacggtgctagaaccacgagccacgaaatttaatggatatggcgagccggatcaatatgaaggcagagaaatgttattgccgtctgatcaaggaaacgatcaaattcggttggagccaacaatcgcgattagccgtgacaagcaagtaatggtgaagaaggaagggaaaggtggagacaaaccgccaaagaaagggcagctgcagaagagacggacaccttatgacgttcgggaggacgaaggcgagcaaattactgccatcaccaaatgtaaacgcgtgaaaaatgtgtcgaatttgctcccggctgtggtgccgccacccgagggaatgtcttacaacccgccgattgacggttatttgagaatggccgtaataaatgcgaacgaagaaagacaaattgaaaagaaacggcggcggacagagcgaaggattggcattggcactgacgaagtgtcggcattgccggctttgcgggaagaagtgacatattccgtcagaggaggagtgaccgtgagaatgaaagaggaaaaagtgaaggaaatggcggggggagagaacgaaaaagttagtcccaatgagttgcgacttcaaaagcgaaaaaccacaaaaggaaagaaacggcagaagttgcgaataaaaaaaagagagaaagaaaacggtggaaaaggaagtggagggaaagatgagaagacaattggacagttttga

SEQ ID NO: 63630 - DNA, 1256 bp, Heterodera glycines
atgtacattgagcagataggcagagctcaattaagcaccgtatcgatccaaggcggatggacctgtcgctgctgtaataggcataagtggcagggaaatgtgggaagtgggggagggggaagggaagttacgcattttgccgaaaaatgtgtcaagaggggatatgttaagagtgagagtggcgtggcagcagcagcgatatttatgtacattattatgtacatagtgagtgagtgcattgtgtgggagaaaaaaagaataatgacgaagggataaaagcagggcaaaaggagggaaaggaggaagagtggggggagaagaggaggagcagggtacaaatgagagaaaaaagaaaaggaaaaaagagatttttgctacacaggaggagcaaggataggatgagagagagagagaaacaaagaaagaaagaaagatcgatgaaaaaatacctaaaaggaatgaatagttaagcaaaaaggaaaagaaagaaattttgcgtacttgatacgcatagataagcacacaaaaacgcgttttccgcttggtttggggtgtctacgatgacttttataatgcctatttcggggtttttgtgcctattttaggatttttgaaaaaaaatccttaacaaaaatgcaataaaaacgaaacacacacccctaagaaatgacccaaaaaaaattttcagaaaatacaccccctaagaattgaaaaaattttcaaaaattggtcccaaaacttaatattttttcttaattttttggtttaaaaagttgttcatattcgaaaaaaacattaaaatatttaataatttctattgaaatatttaagatttaaagtgttttgttacctaaaaagcgttaataaaaaattttatatgcctattttagtgcctatttgaggatttttgtgtctattttgcgatttttttatgcctttttaggtgcctatttcgcgattttttgtgcctaaaaaaggaagtcctagtaattaaaaaaacgaatcgcaaaaaatatggacaatcatggagaattgtgtccctaatttaactttgtattttttttaagcaaaaaaatggtatatggggatattcgggatgctgatcacgaatctgatattggatttgccatataatttttctgcttttgaagggttaaagctgatttctttgttgaaatgctgattctttgacgaaaatgactgatttttttcaggcaaattttgttattaacttaaggaaattgcaaaaaaataaa

SEQ ID NO: 63631 - DNA, 882 bp, Heterodera glycines
atgatgctgccgtcattcaatgctgctccgatcattggcatctgtttgctgttggtgttcattccgtgttcaacagcagcattgacatcacaacaaccgcatacaaaaaacaacaccaacaacgacactgacaataatggatcatcaacagaatcttcggtgttagggccaccatcacggccaccgtcatcatcggcggcaccatcatcctcatcatcatcaatgatggtgatggcagcacaaaaatcgcagctgacggtgaccaatgaggacaagctgtgtgtgatgcgcaaaatttgtggcaaggacggtgaactgcgtcagaattgcccgtaagtcagtcgatgatgtattactggcatgagcgtgcatgtataaatttgcaacaaaaaaaaatcactaaaaatttccattgtcttaattttttaaaatcaagtgtggcttgttttttcaggttgaccaaattcaagtccgtagtcagaaaacaattttggaaggaggatttttttttttttttggttgctcttcgggccaaaatttttttctcttgaaaattttttcattttgcgagggagggagaattccccccctggctactggcctgtctaaattgtccgtcttattagacgtggagtctgacattcatttcgcaccattccaaatctcggatttggatttaagcaaaattcgaatttaaaaattgctcaagacttacaaaaaaaaaaaaattaaaccaaaaaaaaagtcgacagacatatttgcccgtaacataaaaatattaaaaaaaaaaatttttttttttcagttatccttaccaacccttccccatcaatttgaccatggaaattgaatacaaagaattgtgcccgcaactgtttaaag

SEQ ID NO: 63632 - DNA, 1203 bp, Heterodera glycines
atgccgacgaactatttgattcatgcagaaatgtaagcgcgccttttttaaatttaaaactcttaattatttattgaatttcccaattgatcagccattaaaaaaaaatttttttttggcaatttgtgccatttccaacttttgtttcgtacaaattcaaattttctctttttaaaggtgcgcacttcgtccacggcctttgtgttaagcattctttgcggcacttcaattgaactgtgcacgccgaagaagttcttccaatacattggcacgtacagcaaggtcacccatgtgccgttcaccatcaacgtggtgatgctcaatgacagccatcctgtgaaacaaaacaacaaaatgatacgcccgatggacacgtaaggattttctggctatattatacaattaatgaatccgatcattcaatttacagcctatacacaaaaaaaatttttttttcaaatttctcacttttttgtggaaaatttttactctatttattgggttttttaatttcggatttaaaaaaaaataataatgataatattttgttattggtttattcaaattgcacaaagattcgaatgaattgtttcgtcagtgtggatttaattcaaatttacgaaacgtctaaaatttggccaaaaaactgcgcaaaaattaattttttggagaaattacgttttttttaaaattttgtaatcatttgtgcattttttgctttttgttatgtgtagtataaacaaatgagaaaataatgttataataaaatgatttttttttttttgccagggtcacttacaaatgcaacgaagtgccggataaattcgaccactcatgcgcttgcattgattgtcaacacgcctgcacttcgtccgcaccattcccacttctttttcatgtgagtgaattcaaaaaaaacaaatttaaatttttatcaatgttttttaaaaaatttgtttttccaattgagaacattttctaaactaaatttttttttgccttgaccccccaccaaacggatccgaaaaaaccaataaaatctttttattaatatgttttttattttgatttattactacaatttgtcaattttatttgttttttagtatttgatcgattaaaattgagaaattttaaatatttatttatcaggaaagctgcaaagtcgccggcatggattgtaagacggcaatcagagttttg

SEQ ID NO: 63633 - DNA, 847 bp, Heterodera glycines
aaaacattgataaaaatttaaatttgttttttttgaattcactcacatgaaaaagaagtgggaatggtgcggacgaagtgcaggcgtgttgacaatcaatgcaagcgcatgagtggtcgaatttatccggcacttcgttgcatttgtaagtgaccctggcaaaaaaaaaaaaatcattttattataacattattttctcatttgtttatactacacataacaaaaagcaaaaaatgcacaaatgattacaaaattttaaaaaaaacgtaatttctccaaaaaattaatttttgcgcagttttttggccaaattttagacgtttcgtaaatttgaattaaatccacactgacgaaacaattcattcgaatctttgtgcaatttgaataaaccaataacaaaatattatcattattatttttttttaaatccgaaattaaaaaacccaataaatagagtaaaaattttccacaaaaaagtgagaaatttgaaaaaaaaattttttttgtgtataggctgtaaattgaatgatcggattcattaattgtataatatagccagaaaatccttacgtgtccatcgggcgtatcattttgttgttttgtttcacaggatggctgtcattgagcatcaccacgttgatggtgaacggcacatgggtgaccttgctgtacgtgccaatgtattggaagaacttcttcggcgtgcacagttcaattgaagtgccgcaaagaatgcttaacacaaaggccgtggacgaagtgcgcacctttaaaaagagaaaatttgaatttgtacgaaacaaaagttggaaatggcacaaattgccaaaaaaaaatttttttttaa

SEQ ID NO: 63634 - DNA, 1004 bp, Heterodera glycines
atgaattatgtatgtttaattctaattttaataaacagatatttaaattagattgccacgggacctggaccgggacgggaattccccgtcctccgaggtcacggtccaggttcccggtcccggattttaaaaatctcaagtcccggtcccgatagggaaaccgggaaaaacaagcactggtatttcaaccatcaagaaggttattaatttaattaattttttattttacttaaaaatattaaaaaattaaataaccaaaaataatatttttcagatatgcaaaaatccattttgccttctttgattgtggaatttaagaatgataattgcaccaattaagtcatgtaaaaattgttgaatggaaaatgctgaaaatggcacttttgaaaattggagaaaaacaaaaatggaaaaaattggcaaatttacgagaaatggggggaaaaatttaatgagtcatttacaaaaaaatttgaaaatcagtcaggtaaagatgacaatgaaaattttgaagaagaaacgaaaaaattggaaaaataatgggaggttttgaaagaagtaaattttgatgagaaaaagaaaacgagaaaaagtgatggataaaaattgttgaaagaatggacagatgagagatgaaaagaaagacagaaacactttttttttttgcttttttaaatttattaggatttatctttatcttttttttttggtgatttagtttttcagtatgtaataattgttactcttcatttattctcggaattatgaaaaacaaatgaaaattttattttacatttttgggattttcatttttccctttgttaagctgtttgaatgagttatgaaatcagtgttcacactaattttttgtttaaaagatccttatacaatggcaaacttgaaaataatttaaaatctaaattcagaatgaaaaagttatttcagacccaattaaaaaatggttggaatttcatataattaggaggcgatttttagtgaataaa

SEQ ID NO: 63635 - DNA, 2757 bp, Heterodera glycines
atgtatacatcatattttctcatcagcagttagttttattaaaaaccaatatttgtttacatttgaattgatttggaaaaaaatctttccctgtggcaaaggggggggggggggggcacaataaaacattacactcttctgacacaatttcctttacatatttgcatttttttccagttttattcctccaaataatcaatgtgagccttcgccatttagttcattgttattgggcttggaatgggattaacccatggctgccaagtgtccttatttataagatttgtccttatttggaggggccggtaagatttgtccttattttcaggcttccccaaactttttaaattttttgtcttaactttcttttcttaaaaaattcgctcaaaatcgtaaaaattggtcatttttttggtgaaaatctgttaacaaaatagtgtaattgcccaaaatgttttaaagaacaatcacaattttacatttttctgaaatttttttgcaaaaaaatcacaaaatttagacaattttttgggcaaaatctgttaacaaattgctttaaatttttaaaaaaattccccctgcggcgcctatcggcaccgccggaccaccccccccccccccactttaagtttgttgggataagcgctccaaaaaagtgcatatgcggtcaaatgagaaaaatggtcaccggaaacaaattaaattgtttttatgttaataaaatgttgttttaagtcgtttcatgtattttattgcgtttttttttcgcgcaatattagttttcgaaaaaatcctatttttggggtcaaaatcttagcacttagcttcgtttgtccttattttgaaaaaaaaaacttggcagctctggattaacctgctgaattagtccagcagtacataaagattttgccgattttgttttgtgatttttatttattttttaattttaatttattgccaatgattttccacatttaaatagaaaattacgaatttttacattgcttatcatgtccaaacctttggctaaacgaatgaagcttttattgagcgcgggtgaggatgcggatgtttattttttggtggggaacggagacgcaaaagaagcgagtttttaaattcaaaatatattaattatttaattgaaaattggggaaattttatgaatttaatagtttttttgattgttttttacttatattttaatcctctttagcttttgcaagcccataaattgattttgaagcacgcttccgatgtgtttgaggcaatgttccgttttgatgccaataaggaaaaagcagaattcggtaaaaatattacggaatggcacttataatattaaagcattaattatcgattattctctgctaattaacctcattaattttgaattagcctctactaattgccctgttgtggaagtccccgatgttgaagcatcagcgttcaaagtgatgttgagcttcatttacacagaagatttaagtgaattggacggagataatgcaatggcagtgctttatgccggtgaaatttatttaattttacaaaaaacaattaaattatttaattagccaagaaatacgacatccccgccctggttgaccaatctttgcaaattcccatttcaaaactgcgcaatgtgttcatggcttatgtcctagccggactttttggattggaggtgggtacgaacaatcattagaatcagattcggtctcgaatttcactggtaaacaaaatttccctaaacttcgatttttagcaaaattttttttaaattaatttagagcgtatagtaaattaagtattttagaactcatttattagtgctatccaaggccaaaaaatccatgaattttagaatttcgcaaatgattgtttgttttacattgacaaaaatgcagacactttgttcgaatcggaggaatttttgaaaattgaccaaaaaatcttatgtgaaattttggaacgtgacgaattgcaaatcagtggagaaatttcaatttggaattcggtaatttacctacttataaaattaaattaattctaattaatacatttaattattctctattaaatattaatttaaaatttaaagtcgctccgttgggccgatgcgaagtgccgtcaaaatggcatcgaatgctcagcagagaatcgtcgtgccatgctcggtccggcactgctcaaaattcgctttccgcttttgtcaaacgaggaattttcgaagaaaattggtaaaagaaatcaaatttagtaaatctttttttttgagctatcctaaaaaataataattatttttaagaggatttaacttttttttatattttttaataatttaaaataatattttattttattcctttcattttcctttgttttacagttccatctggtgtgttatcaaaagatgaagtgattggcgtttatcaattcaattcccttctaaattgtcgtgagatttccgatgtcttacagttcccaatgcaatttccgactaatggacggatttctgatcggaaaaagggcacacttttgatggacattgaaaaagtgtccgaatttgcacgagaggagcttgagagcagtcggcacagcgaaaaagtgttcataaatggacttccattgaaactattggcacaaataaaaacgaaaacggaaagcactgacaatgagaaatgtttgtgctttttccttttgtgtgattctccagaaaaaggtgctaattatctgttcattaatgctaattaa

SEQ ID NO: 63636 - DNA, 679 bp, Heterodera glycines
gaaattgatttacaaattgacgtaagagactgcagtggttcaagttcggctggggatattttttctcgttttgaaaaggatgcagaatttgagcaaatactgaatactgtaaataaactttatatacccctcataataattaatttaaggcaacatcccccagtccatctgccttggagacaagacaaaaagccgaagttgaagtaaatgaatatttgcgggatccaaaaattaaatccagggccgatccatcattatactgggaagtcaattcacaaaaatggccaatgattggtgacgttgtacggaaatttctttctccacctgcaacaagttcagaaagtgagaggcttttctcaacggccggtctaatttcagatgacttgcgaaagagtttattaccagaaaatcttgcaaaacttttgtttcttcatcacaatttgcttttaaccggtttctcaattgaatgatatttgaatgatttttgttttaatgcgactaaaaattttttaaattacggattacagattgcggattacgggaaattacggggtttttggacccccgtaattacggattacggatttccgtaactgagaaattcgccgcaattacggattacggatttccgtaattgcaaacccagttgcgtgcagccctgtttccgactgtccatata

SEQ ID NO: 63637 - DNA, 146 bp, Heterodera glycines
  unsure (1)..(146): unsure at all n locations
atggctatctctttttttgagaaattttctatgcaacaaacgctctcgaacatgaaacgaagtgcggtgcgccgtggccattttatttttcaaataatttttaaattnaatacatattccagaaaaatggctatctctttttttga

SEQ ID NO: 63638 - DNA, 146 bp, Heterodera glycines; identical to SEQ ID NO: 57273

SEQ ID NO: 63639 - DNA, 411 bp, Heterodera glycines
atggctatctatttttttgagaaattttctatgcaacaaacgctctcgaacatgaaacgaagtgcggtacgccataattcccctgatcgaaatcatttcgaggagggctctggaatttattaaattaggatttttgatgcataaattattgttaaataattaaatttctttttttctgtttccatgttctaaagcctaaataattcccctgattgaaatcatttcgaggagggctctggaatttattaaattaagatttttgatgcataaattattgttgaataattaaatttctttttttctgtttccaagttctaaagcctaaataattcccctgatttaaatcatttcgaggagggctctggaatttattaaattaggatttttgatgcataaattattgttaaataa

SEQ ID NO: 63640 - DNA, 1640 bp, Heterodera glycines
atgcagcaacttcgccaaaacaaaacatcggacaaaggcaattttgtggaacaaccgcagaggcaagaaggtctgcaaattggcgcgttagagttcgtcatagcaatggaacgactccccgaactgaatggaacggaaggaccgaaccaaattcggaaatttttccaaaaatttctgttggcaacagaagaatggccggaaagtcgccgcgtttcggcgctggaaagcaaaatcagtggaaaggcagaacgcgcttttgacgccgccatgaaacatcgcccggaaaatttcaacgaaatttgctgcggaatgaaggaaattttgagcgaatgggattggacagaaatgcgggcattcaatgaattgtgggaaggagtgaagcgacgatcggacgaatctttggatgaatttgcggaacggctgtacggcattgtcgagtgcgcttacccaggtttgccctcaaatttcgtcgacgactttgcagtcaagcacctaattcgtgctatggaaaatccggaaatttcggtgggattggaaatagctcgccgtccaggcatgagcttcgacagtttcgtcgctctcgcagtacgcgcagaggcagtgcaaaaagccactaaatcggctggatttggaaaagagcaccggccaaattttcagcaaaaatcgacagttccgccacaaaaaattttcgcgccaaggacaaaccgagtcgtctgctacaactgcaataaaattggtcatacatctcgcaattgtatactttcccctggactgaagcatttcgaccgtccaccaaaatcgccacagcatcaaaaatttgttaagaaaaatgccggttttcggaaattttctccagctgagaataaaccgaatgtttttcggttggacaaccaactagcggcacaacgaacgaacgcggaagctggaaataaattgaaggcacccaatcggcagcgaaattcgtcgtcgttatgcagtgtaaaaagagggaaaatggaggaaaaatcggcggaaattccaaaatggtttttgaatgctattttcgctgcgttggttgtgttcgccggcgtattttcgaaggaaaagtcaaagtgtggacaaatttggaaaagtaaaggctcaatgagtcgcaccgacgaagtgaaaggacggaaagcattcggaaaattggggacaattttttcgccgaaggccggggaggaattggcggatgtcgcagccgccaatcttgaaaatttgttgaaaatcggtaaaagcctgaattttccaaatggccatcgcaggtgtgcgcaagaagctaccgctgatgaatttataaggccagatgaaaagtcggaattccgttttgtccgttgtttttacaggtctgaccctgcaacgcgactttatgccgaaccggtccactgctgacacccttgccgcccctttcaacgccgaatgcactaccgatgagcccaaagcgctgaggacatcgcttcttagagggcgaggatgtgctaatattgtgattttaaaatatatttggcgttttgttatttaatttgtttcatttttgtttgtgatttttgtggagtgttggttgttagtttatgctgtcgcagttttcctattgattgtcctcgccctaattttatttggaa

SEQ ID NO: 63641 - DNA, 883 bp, Heterodera glycines; identical to SEQ ID NO: 33634
  unsure (1)..(883): unsure at all n locations

SEQ ID NO: 63642 - DNA, 391 bp, Heterodera glycines
atgaacagatgtgtgagcaacaaactgacattattccggctaaaatcccaagaagcatccaatcttggaaacttttccgcccaaaatatatgttaacttttcgtttatgtgatggtaattagctactttaaacttaattttagaaaaatcttttaattaagagtgtctttcgtgtctttggggaaacaaaaacaagtacgagacgaacgaaggaagggccatcatcaaatttgaattatgcgagaagtgcacgatcgacaactgccgagccactgacattcttgccccgttcaaaccaaagaaataatcagaatgaggagtgataatgaatgatacaaatcgcaagacaattaaatcaatagctttatttcgatttcagtacttaaataaa

SEQ ID NO: 63643 - DNA, 385 bp, Heterodera glycines
atgtccaaacggaaagttttgcttatgggaaagagtggagcgggcaaaacaagcatgcgttcaatcatctttgcaaattacattgcgagagacacaagccgtcttggccctacaatggaagtggaacatgcgcacgtcaagtaactgcaacgcattcttgaataaccaaaagaagcaatttacagatttttgggtaatatggtccttcatctgtgggattgtggtggccaagaaacatttatggaaaattatatgactgcacaaagagaccaaatttttaaaaatgttcaggtgatgttattttagattttagtgctttagcattttagtgtctcaaattgaattattaaaaaaattaacccgaaagcaaaaaagcatgaataaa

SEQ ID NO: 63644 - DNA, 90 bp, Heterodera glycines
atgaccgagattaaaactgacattggatttgctcgcgcatttgtacggttggcattggagcgaaagctgctttacctatacctaaaaaag

SEQ ID NO: 63645 - DNA, 899 bp, Heterodera glycines
atggacaataaaacgaggagtgagaaggagaaagaaatcactatgacctttggagtgagccgaacgacgattgccaaatggaagtgccaattgagaaagagagggggtaagaaagtgccaaaaaagaaatcaaaaactgaaaaagcattcaacagatgatcaatggtcggaagaggaagcaaatgagcacacatcggacgaaggcaccgaaaatttggacggaggagaggatggacagcaaccaatggcacatgaggacaatgccaatgaaaatgatagtgaaaatgccaattccagtgaaaatgatagtgaaaatgccaatggccgtaaaaacgatagtgaaaatgccaattacagtgaaaatgatagtgaaaatgacactaaaattggagccaaagaatcgttgggtgagttatttgtacagaacccttattttgtatgttaaaataatattaaatttttaatacgaaaaattaaaaattaggtcaaaactacccaaaaagaagagatgaatgggaaaaaattgtgaaaatatttgatgaattaaaagaaaaattaattcgtaagaaaagtaaactttgtaatcgtttggaaattgaaaataaaattgccaaaaaattgggcacacatcgattaataatttataaatggaagaataaatttgaaaatgacagtaagtgattggaaaattaggcatttaaattttaatgtaaaatttaaaattattaatttagaaaggaaagtttattattccgaaaaagaaaagagaaaaataataaaaatattttatcaaataaaagatgaaaagagagaaacggaggaaaaagtggcacaacgaatgggcataaatcgagaattaatttaccgatggaaaaaagagttgggagtgggacaaaacg

SEQ ID NO: 63646 - DNA, 158 bp, Heterodera glycines
ctacgaaggcgcaccactcagcacaaacatatgccatttacttgggaagcaaaaggaatttagacgaaatccgagccaaatatttcaagggaggtgaaaggacggtaaaagaaacggcgagaatggtcggattggaagtgcccgaagaacaacaatgg

SEQ ID NO: 63647 - DNA, 231 bp, Heterodera glycines
atgccacaggaccaaaccattgcgagtgtaaagaaagaggatgatcagcaacggaacgcagtaccaaaggacgaaggaggaggtgacgatgtttcgggtgctcatcagactgatcggagaatgccagtgaaagcgggtacacaccgcaacattcttgtaaaagatgtaactggtgaaaatgtaatagggcaagctgaacaggagagaaacggcccaaatggaggccattag

SEQ ID NO: 63648 - DNA, 1705 bp, Heterodera glycines
tcgctcacaggcaatttgttcgcaattctcgtcatttgtgcccaccgttccgtgcgcaccgccaccaatttctttttggctaatctcgccgttgcggaccttttggttgccattttttgcattttccaggcaaactcttctcccgaagcaataggcattctcactttgttgtagaatatgttccatttggttggcaccaacgacggacgttggcttttcggtgagaatggtcaaatggcgtgccattcactcatccttcgctttgaggtgccactttgtgcaaattgtacgcgttcgtgcttcacctcttcccctgcaccagcattggcattctcgtctgcgcctctgtcgagaaatacatcgccggtttgctttccaagtgtgccttccccttttaaagtgaacattcgttttggtgctccacccgcttttggccctcaaagtgttcaccccgcgcttccgcgttttgctaatggcctccatttgggccgtttctctcctgttcagcttgccctattacattttcaccagttacatcttttacaagaatgttgcggtgtgtacccgctttcactggcattctccgatcagtctgatgagcacccgaaacatcgtcacctcctccttcgtcctttggtactgcgttccgttgctgatcatcctctttctttacactcgcaatggtttggtcctgtggcatagtgcgccgctgaagaaactgacccaagtgggcaaattgcgaaccaacagcaacggttggttaagagaagggaaagcaaaggatcagcagaaaaaggcgattgatcattgatcagagacgacgacaattgcctcggggataggcagtgccaaaacaagagccaaacgaagtgcgacgcatccgccgccgccgccacaaccgacggatgacgccgaggagagggccaaacggatgaacaatgccaatgaatgtgcaatggcacatttacgaagggcgacaatgagcagcgacagcgaaacacacggaagcgaagaggaggacgagcggaaaagggatgaagaagcattatttgggaaagaggggacggaggaggaagccgagcgagaggaggcacagcagggagacgcgagaatggtaccatgggatgacggacaaagctcgtgccaaggactggctaaggcgatgaggaacaacgaaatgttggcactgccgacggcaaagaatgacattaccacgaccacgctgggcacacccaacggcacagtgctcatgggcacggtggagtctcgtaaaaaggtgctgggaacgaaacaggatcgcagcaccgtcgctgttcaggtgatccgactttggagcgccattgttttttcattcgccgtgctcaccctcccccaccacgtccgtcttctctatacggtcggtcggctcccttttcgaccaatttcgaactcttttcgtcatgttgaaggtgtggaccgagcagatcatatgctccaacagtttggaggcgttggttcagccactcacttaccttttgctgtttctcttctcctcttgcaaccctttcctttacgcggtattccgccgaattaatccgcagattacatcgttcgttttttttagtttatgagtcagcaatttcggtctgccatccgcgatattttcaagtgcaggtgaatcgaatgggcgcgtgggactgattcggcggcggaaattgaaacattg

SEQ ID NO: 63649 - DNA, 602 bp, Heterodera glycines
atgcacgaaatgccaaaatatgcacaaatatgcaaatatgcacataaatcgcgaaatatgcacaaatgtgcaaaatatgcacatgtaagtacgtcctagaagcttcaaaccaagctaaaaacatgtttttcgtgcgtttcagacgtcccacagtccaggaaaaaatatgcatgtgcatataattttatgccctagttatgacatcgaaggtcaaaaaatcaagttttttggtcataactttcttgaaactgaacgaatttttttgaaattttctaggctaataaaaaacacttagggcaatcgtatgttattaatattttaaaatttgattgcttatagatcattagtcaaaattctcctttatttttgcatttggctgccatatttattcaatttttaccatcaatgagaaaaacattcgacgattctcgctttttgagcatggccatcttcataatggtcaacactgtatcctaaatgcaattctttcgtaattatacaaggacttaggtattacagaaaatctaaaacattttgctaaaattcaccggcgaaaatttcaataatttaatttaatgcgcagcaaaaaattactcaataaa

SEQ ID NO: 63650 - DNA, 507 bp, Heterodera glycines
atgtgtagagatgcccatcatgctgtagctttgacctgtttcttttggtgtcaatttgatgttgcatacggtacaaatgtaataaatagtgctgttcgagactctcggtctcgagtctcgactcgagaaaagtctcgggttttttttggtctcggtctcgagttttcaagtctcgggttttcaagtctcggtctcgattttcgagactcgagaccgagactttttatgccaatttaaaataaagatgaaatattttattcatttcacgcacatattttagttgtagtccttaattttgaacttttttagagtaatggatccggaaatttctgataattttccggctgaaaatgagcaaagcgaagaagtgtttattgatgaaaatgaaaacaacctttcaaaacttgaaccgactgaaccctccgcttcatttttgcgttattaccaattcaataagggtgacaaaaacgcaaaatgccgaatttttgtttaattttcttgaataaa

SEQ ID NO: 63651 - DNA, 275 bp, Heterodera glycines
attacgtggtcagctggcagtgcttggacatcatccgcaaggacatggtcgacccgttgagcggcaagcggatggccgagtcggacatcatcgaactgcaacggggcggcacgggctacgcggctacaaacaagctggacgccaagctgatcagaccccaattggaactgcaataaatggatgattgttcatgttgctgacttgatcatggatttgccaaatatttgctataatttctgtgtttgtaccgttttgcaatttacaagatttgatga

SEQ ID NO: 63652 - DNA, 401 bp, Heterodera glycines
atgaaccgacggtaaagtatatttaaaaataaaattttgaatgaaataaaattatccaaccttttttcttatttttcacaatttcagttggatttgtagcgatgtttggatggacattctcccatctcttgaccgtgctcaactcggcctcaaaatggcattgctttccgaccgtttcgatgttatggtggacgcgcattttgatggcaaaagcgaattgacactttggaaggaaattgtcatatttaaaaacggtatttttcattaattaaaatattttttaaattttgaatttttaagtggcgggggtgaggatgggaagtgacccgcacgctatcgaagaattgccggattatgctctgcgcaaccaaatcatctttcactccctcggaatttcgtaa

SEQ ID NO: 63653 - DNA, 308 bp, Heterodera glycines
ttggagcatgatgaggatttcgagtctccaccacactcgtcggacgaggaggcgccagaggacgaggtggattcggactttgacaaagacgaggaggaggatgagcccacgccggcggaagaggacccggaacaaattgagcgacgacgaaaggttttttttttggaaggaaattaattcataaattcacacctgacaaaaaaaaagggtttccgaccggagacaaaaaaaaaaattcttttaataccgtccaaaaaaacaaaaaaaaaatttttttttttttgaaaaattttcagtaatgttcatga

SEQ ID NO: 63654 - DNA, 207 bp, Heterodera glycines
attaaaattgtcccctcaccgaaatccggaaaattccctaaaactacaacaacaaataatatgaaatacttgccgccggaacttttggacgaaatgactttttacatatatcctaaccaaaattattcgagaattctgacttcttcctggctactcatggaatttttgaggccccatatcgaaagatggcaaaaaatatttaaatta

SEQ ID NO: 63655 - DNA, 709 bp, Heterodera glycines
cttattgtcgcttggttgctgaatttccgttaaatttgcttttcaatgcgtatttcgaaataataattctcaaaaagcaaggggacagcggcattgggtaaattaacacaaatcaacaaattttcattagtttttttctgtcataattattgtattggttttaaattttaaataaattctatttttcagtacaattcacttcggtctttgggccaaaaaagaaaatgcttcttatcaatattggaataatggtataattattggcacatcgtttggcatcgttggaggctttcccgcgttcggcggcggcgacactgtcgggtgcggtgttaatatgacatcgaaggagatgttttttacaaaaaacggcatccaattgagtgaggaaatatatatccaataaagtcaagaatttattaattttaaaataattttatggaattaaaatttaaaagttgttggccataaaattttcttaagggtccaaattcttaaaccgagcttagttaaattaaactaattaaatatcttaatatttatgttttcttattcttttgcaaatttatttcatttttaaaaaatccattttttatcagatacgacaaaaattgatgtatcggaaaccgaattggtgccattcgtcggtctgctaactcccggagacattatccaagccaattttggtccaaactttgtttacaatctctga

SEQ ID NO: 63656 - DNA, 554 bp, Heterodera glycines
atgcaaaaatactttcttcttacctttctgatcatctgccttatacagccaatcaaatcacatttgccaccagccgaggccgagggtaatttcccatttaactaaagagttttggccataattgaaagatgccgaacaatgtcattctttgattagattggcattgggatggttttgcgatattttcgagataataaatttttcggaaaataaatatctttatgattttaaataagcagtttttgagttaaaatcgcgcagctacaaatttaacgctttttttgtttcaagaatttgctcctaatgaacaatccgccgttggacaacttgcgacaaaggaaatgaaagtggcccaaagtctcaccgacgaaaaagtggaaaataatgccattatgaaagatagcagaaacggcagtggaattggtcagattttgctaaattcaagaaattatgtgaaattaattattattatttttacagcggcgcctgtttcggcggaggaaatgcaaaaactgcgcgatcaatttgctgagatggtaattgaaaatttataa

SEQ ID NO: 63657 - DNA, 899 bp, Heterodera glycines
atgtttgcttgccgttttggaccgatcctaccaattgcggcattctttttcgatccgacttacgccacagaatacggcaacaaattggatgctttattcaaacaatggcccgagccattattaattaatgagacggaagtgagtggcggaaaaacacttggccaaaaaatcattggaagtgttctacaaagaggaaaaagcccaacaaaaaagggcaaagaaaaggttaatgaggagagttcatcagcagcagaacaagaagcattcgtcatgaatcgtgcaaatttcgaaaatttaattaaacaaaactttgaaactgtaaaagcattgatggaacaaaacagcgcataccaagtgaatcgaatttatgaatggctttattcaacgacgacaaatcgacagcaagaaatgccaaaatcacagaccgaaacggctataccactcgatgatgactacgtgctcatgccaaaatcacagaacgaaacggctataccactcgatgatgactacatgctcgtgccaaaatcacagaccgaaacggctataccactcgatgatgactacgtgctcgtgccaaaatcacagaccgaaacggctataccactcgatgatgactacgtgctcgtgccaaaatcacagaacgaaacggctataccactcgatgatgactacgtgctcgtgccaaaatcacagaccgaaacggctataccactcgatgatgactacgtgctcgtgccaaaatcacagaacgaaacggctagactactcgatgatgacgacatgctcatcgcatttgtaacgaaagattatgccaattttgagaaccattgcattgaaatgaacaaacaggatttgttggcgcatgttggattactatcaaagcgaaagggcaaaggcag

SEQ ID NO: 63658 - DNA, 794 bp, Heterodera glycines
caactgctccgcgaggcgggtatcccgacaactgaaccggaatacgatgcagaaatatacattcatcaagtgcaagggttgtggaacgtcaaatatcccggtgagtacaaaattttcatatttaacgattaccagatgagcccaatcaccaaatctgatatcaccgattaccaattccctattcttctctaccacaacaacaaccactttgacggcatcaaaactctttcaaaatttttcaacaaaaagaactactgtctctcctgcgagtcgccgtactacaagaaaatcgagcactcattaaaatgtacttcactctgccacgggtgccgtgaggtgggagtcgactatccatgtgagccccaacaaggatacagcaaaaaatgtgagcactgtaacaacaccttttacaacaacagctgttatgaacgccacctccacaaggatttgtgcaccaaatttcaacgctgtgaagattgtggggtaatttataacataaaggttcatgggagtgttgggcataaatgtggggaacagttttgtaaactttgcaagcaatttcatataaaagaagacgaagacgacgggatgaacccctgtacgaaatgtttcatccagcccctaaagcaacaacgaattaagtcatacaggatcatcgcatacgactttgaggcgacacaggacaagaaggtggagaaccggttcgagcacgaggtcaactttgcagcggctaccatcatttgcaccgactgcattatcaacagcgactggaacaaatcacttcagggaaaaaa

SEQ ID NO: 63659 - DNA, 271 bp, Heterodera glycines
ttagtacttatggggccggttgcgtctcaaacatttggttcggaaaaataattttttttgatttatccgaaggcgcaaatattaataatttttttcttaaaactcatacgtatgaaaaagttacaagcattttttgagaaataaaaaaaatacggggttaactaattcggagtgaaattgtgcggggtggaaacatagtgctcccatatcagaaaattgtttttgcatttttatacatttcatttgttttaaatcttttaatatagcccga

SEQ ID NO: 63660 - DNA, 76 bp, Heterodera glycines; identical to SEQ ID NO: 53797

SEQ ID NO: 63661 - DNA, 393 bp, Heterodera glycines
atggctgtttccatttctaacgaactttccaagttggaatttgctgctcaggttattatggtatgactattgtttgctgtttttctccattttcctggttttcaggcccctccaaatcaagtgacgtcccaagaccgcaaagatgccgaggcactctttatgagtctgcgcgaaggcgtaatttccgtggagcactgtcggcaaagcttggaggccaccaaaaatcactttctcatgttcgagttgactcgcgctttggtcgctcggctgttgaaagaatgggcgcaattttccctcgacgatgtgagcaacatttgcgattatttgttcaattttccggccgtgcacacagagtattttttaaaagttaaattattcatttctcctaattaa

SEQ ID NO: 63662 - DNA, 158 bp, Heterodera glycines
attttctaagaaaaaataggagttttggggggcgcaggcggtgccgataggcgccgccggggaaaaaattggaaattttgatcatttataaacagtttttcactgaaaattagccaatttataggtaaaattttgaaaaattttatgggaatttatcc

SEQ ID NO: 63663 - DNA, 306 bp, Heterodera glycines
acttggtagcaatttgtgatgcatcattagagtataaaacaaagttttatgataatgggtgcatcttaaagcatttttggatgaccacaaagaagataggacaattttatggcaaaatcgacgcccgttacaatggcgaaccaaagcattggatcaccgaaattgagcttggccctctgctgtggcagttcaagcatttgatcaatgatcccatggcggagaagcatccgatagaattggaaaatttatttgtgctggacccatgcgaagaggccaaactcaaattgaaacattccggaaattttg

SEQ ID NO: 63664 - DNA, 620 bp, Heterodera glycines
tctgccacgaccaggacgaggctgcccgagtgatgtcccatttcaaaattctaatccgcccgatgatttccaatccacccattcatggtgcgcgaattgcgtccaaaattttgtccgacccgaaattgcgccaacaatggtcagttgaaatggcatcatttgggggggggggaatgccaaaattaaataacttttcgtccaagtctttcaccgccttttaaaatagaaatcattcgtgatcatagactcaaaatccagatttatcactctatgcttaacaagtgtccaatcccaatatgttttgaggctgggcgatgtgaagggcatggccgaccgaatcatcacaatgcgctcccaactccgcgatttgttggccaaggctggctccaaacgcaattgggaccacattgtcaaccaaatcggcatgttctgtttcacgggaatcagtcctgaacaagtccgacatttctttgtgctattcccaatttccaatgattcaggtcgaccgactcgccaaagaattcagtatttatttgacgagggacggacgaatttcagtggccgggatctcatccaaaaacattgactatttggcaaatgcgctgcacgaagtgacgaaa

SEQ ID NO: 63665 - DNA, 234 bp, Heterodera glycines
aaatgttagatcaaggagacataattgtgccgataacacctattagctcaaatgtggcagacgcagtcttcaaccaatttatcaaagtagaacaaagtgtagcaagaaaaagtcttaacatttatggaacaccttttgtcattactgtaacagttcttaacattaatggattaagaaaaaataaagaataaattattattattttttttttgtaaaattttataaaaaatgtga

SEQ ID NO: 63666 - DNA, 476 bp, Heterodera glycines
gatttgactctgtttggtggcccactgttcaccggatcgtttgttgctaaaatgagcaacgattggctggttggggctcagctcaaggccaacctggaacagggcactgttggcccgacagcaatttcgattgggcgtaagacggcggagtactcactgcactcgcataccaccgacgggacggactttggtgcaaggtttgtatggaatggagttatcaaatttttgtcagggttttaaatgccgaagtagaggcctaaaacgtatacccaagattgtaaagtgaaagttttaatcaaatttagtattatttttttccattgtattcttttcagtctgtaccatcgggtgcaccaaaatttggagtacggtgtgcagatgggttggaagatgcgcgacgccctggcgagttgggcgattgccaccaagtacaacatgagcccagaattgacccttcgtgcaaagatggaccacaa

SEQ ID NO: 63667 - DNA, 705 bp, Heterodera glycines
tttggtgcgctttagagcactttctgaaaaaaatatttatgaaacaaaaaaatcgattttttcaagtgtccgtttggggtactcaaacaattatggggagcaaaaatccaacgcagaattaaagtacaggctatagggaagctattcccgaaggattcggtctccccataaatctgggcgcatcggttcggggggactgccccgaaaacaaaaataaatcgattttttcaagtgtccgtttggggtactcaaacaattatggggagcaaaaatccaacgcagaattaaagtacaggctatagggaagctattcccgaaggattcggtctccccataaatctgggcgcatcggttcggggggactgccccgaaaacaaaaataaatcgattttttcaagtgtccgtttggggtactcaaacaattatggggagcaaaaatccaacgcagaattaaagtacaggctatagggaagctattccggaaggattcggtctccccataaatctgggcgcatcggttcggggggactgccccgaaaacaaaaaaatcgattttttcaagtgtccgtttggggtactcaaacaattatggggagcaaaactccaacgcagaattaaagtacagactatagggaagctattcccgaaggattcggtctccccataaatctgggcgcatcggttcagggggactgccccgaaaac

SEQ ID NO: 63668 - DNA, 314 bp, Heterodera glycines
atgcaaatggattataaatttgatttaaaggattttaaatcaaataattgttacaacccttcgaacttaaattttgttgagcttgagtcagagttatttcgtttgacatgccatttcgacaggcgaattcggacttttgctataagcgcgttggagcaaatgtgcgaagatgcttcaatgaaaatgttggagaaggaatgcttgagcttggagtattaccctcatttggcaaacttatgcaaaaacagtgagcagaatgttcgtgtcgttgcgcttcgtattttgacaaaatttgcccttgtctaccctgaaga

SEQ ID NO: 63669 - DNA, 393 bp, Heterodera glycines
atggacgcggagtcgcagcatccttttgtggtggataatgacagcgacggtttataccctcatttgggagttggcgacgtgaatttcctcttttttaaaattgttttatttcacttttcccattttaattcatccaaatttgaaaatattaaatttctacagcttgccttttcaatttggcgaaatgagttgctcatgccgttggctgctcagcttgtggcccatatcattgagctgctcggtcggattcgaaatggtatctctgcttcatttggcattcgaatttcggacctccgggggcgccgtcctctcttttggtcgatgtcaatgaatccatccatcgggagcaaaagcacagtttttgtgcatgtccattggtatccgacaacagag

SEQ ID NO: 63670 - DNA, 187 bp, Heterodera glycines
gcctccaaggacattgttgcggtgtttcatcttcggcacattttgctggacggccattgttttgaggacccatcgggcaatccgccgcgtggactccaatttgtgctgggcacgcgcgctgagccggcactgttcgacaccattgtgatggccaacctgggctacttccagctcaaggccgggccag

SEQ ID NO: 63671 - DNA, 731 bp, Heterodera glycines
atgggtaattccggtttcaatgccccaggcgtttactgtgtgcatgccaaagtttgtggataaatgaatagcggcgattaatggtgcaaaatttgaccagcaatgacaaaattcatgaataacctcgcaatgcttatgaaattcttatcagtattttaataaaatttattacttcgaaaagtgtaaagttttaatgaaattttttctttttttttctctatctcaacttttgtcaagaatattcgaaattcaaattgagaaaattaagcgataagtttactgtttaagctttttttgatttttaaagtaaaatggctaacgatgttaacaaaaacaaaacctgaaatacaccacggcaaagaaacaaacaccaaacaatcccattttaagcaagaaaatttcgccatttatttgctcaattttcactgatttattttccattccaattttattattgtacacattttgtttgttttgtttgtttgtcgtcgtacaaaaaataatagtgcgaaaaatagtgaaaatgaacaaaaagagatttgtcagctcccccccccccccacactttagaaaaccaaacaaaatttgttagtgcaaaaaaagcaacaaaaaactacattttttgttggtaataaaaaaactaattgagaaatgtacatttttaaaatcgatgcttcaaattttcataaagtaagctcattttaatagaaatgaaaaattttcagaattaa

SEQ ID NO: 63672 - DNA, 1850 bp, Heterodera glycines; identical to SEQ ID NO: 7051
  unsure (1)..(1850): unsure at all n locations

SEQ ID NO: 63673 - DNA, 330 bp, Heterodera glycines
atgaaaggatgcttattaatttcttcattatttgcatttttgattaccatcttaattagtaataattatgttggatcagaaaataaaaaattggaacagaaatcatttgatgaaatatttggagaaaaatgggaagaaaaaagaaacgaagaacagaaaaaaagagaaataattggaaaattcaataagataaaagagaaaattaagcaaaaaggaagaaaatattcagcaaaagaatagagtaaaattgaaggaaaaatagcaaaaaaattgtgcacaaatcgccgatatattcaaaaatggatcaaagaattgggattaaatcagaga

SEQ ID NO: 63674 - DNA, 76 bp, Heterodera glycines
agttactggcgttagcatcatagcggtgcttttccttgtctttttgatgcccttgcaaaatctggtgcgcttctga

SEQ ID NO: 63675 - DNA, 850 bp, Heterodera glycines
catttcaatcactgggactcaacccaccagcatttcaatcactgggactcaactcaacagcatttcaatcactgggactcaacccaccagcattccaatcactgggactcaacccaacagcatttcaatcactgggactcagcccaccagcattccaatcactgggactcaacccaacagcatttcaatcactgggactcaacccaacagcatttcaatcacttgaactcaacccacagcattccaatcactggcactcaattctcctgcatttcaatcactgggactcaacccaccaaaattcaatcactgggactcaacccaccaacatttcaatcactgggactcaacccaacagcatttcaatcactgggactcaacccaccagcatttcaatcactgggactcaacccaccaacatttcaatcactgggactcaacccaacagcatttcaatcactggtactcaacccaccagcattccaatcactggcactcaattctcctgcatttcaatcactgggactcaacccaccagcatttcaatcactgggactcaacccaacagcatttcaatcactgggactcagcccaccagcatttcaatcactgggactcaacccaacagcatttcaatcacttggactcaacccacagcattccaatcactggcactcaattctcctgcatttcaatcactgggactcaacccaccatcattcaaatcactgggactcaacccaacagcatttcaatcactgagactcagcccaccagcattacaatcactgggactcaacccaacagcattccaatcacttggactcaacccacagtattccaatcactg

SEQ ID NO: 63676 - DNA, 1159 bp, Heterodera glycines
cgctaccgtaccgtgcaattggtccgcgtcaagtacggtattgagctggccgatgcactgaaaaagcacctcaccgactttgagcaactgattgatctgctactgatcagacagcttgagcgaatcacatccgtttatgaggaaaaacagattacaaaacaggtaaataattggttttattgaattataatcattcaaaagtacatcaatatatagagatgctcattaaattttatggttacgggaatacttttaatggatgatccattgggaatttcgagaaaccaaaataaaactaagagcagtagtcagaaatccgacctttctggcgaacaagcattaattctttattttttttcttccaattcttctattttttttgtttttttattatattttttaactattgtttttttgtattttaacattgtcttaaaattttacatttttagtacaatcgaataattaggttaattaaaaattacatgcgatttttcaatcgctttgatactttagcaaaattattttacagatggcccagctgaccactgctgttgactataaaatggtgtccaaattgggtgtgtccgcggacgaattgtccgccgctcgttgcttcctgctcaagtacgactgtgcccgtgaccaatatgttcgaccgttcaacttcaggcaagtgcatcataattgatgtcagaaataaattaccttaattacttaggcattaaaattggtgtctatttttttggtattctaaatctcttttagaggggattaaatcggataattctatggttttatcatttgtccaaacatcccaaaaaatttgtcaacaattcattgaatttatatcctcaaataactttcattcgagcgccttttgtcgaaacaattttttaaaatttaatggttttgcataaaatggtaagggaccaaaatctacccaattttcccataaatttttttaaaagaaaaatttattttaatcgaagaattatttgagacctatccccaattacaatacaaaaaaattttttgccgtccttcagcgggcaacgtgtttacaccggttatcagagtctgttgcattcgtcccgcgacgtgcaacggatgacggaaaaggacaagggggacgagtacgcgtacattgggaacgatg

SEQ ID NO: 63677 - DNA, 423 bp, Heterodera glycines
atgattgaagttagacagatggcatcttacaaacggcgacggcaattgtggaatgcagaaaatgaacggtttgaagaagagggggagaaggaacaagaggaaaatgaggagggcggaggaggagagggaaacgaatgggaaaaagaagcggcggaggaggaagtggagaacaatgaagcagaagaggaaaatgacgatgaaaacgaagaattggagaaggaaggagtggtgacagaggaggaggaggaagaaatgagtgaagaagaggacgaggaggaagaggaagaaatgatgggaaaagaagtggactatgagtcgggggatgagggaattgtattggtgagaaggaaagtgccagcggatggtttaaaggagcaaaaggaaaagccaacggacgacacggccaccaacagaaaactgtga

SEQ ID NO: 63678 - DNA, 300 bp, Heterodera glycines
atgctgaccattggaagttacgattacaatgatttttgtccaattcattcaacaaaacttactgacaaggatttcgtctccttgaatttctgccgggtcaccatgacgaaaaaaattgccagaaaagccaagcgtgaaatgaaagttggcaatgtgttcgcgcagtttgccctgcaaaatggacaaatagtccacgtcatccgcaaccattcgactgccaatggcaccaatgaacacatcgtcaatgtcaatttggacaaatctaaaaggaacaacactatgtacaccgaaaatgtttag

SEQ ID NO: 63679 - DNA, 3629 bp, Heterodera glycines
atgacgaaccgctccatttcacattcaaacaacggcaaaaagccacagcaacggcacgatgcaacaacttcggcacaacgagttctgttactgcttcagcctgaccaactgaacacggacacacacaaaaccattttggattttttcaacaattttaaagtgccagtattagtggaggcgcatttaccgggtgaacgcttactgcttgaactcggtgaccggccacgctttggcctggtggtgttcaccgattaccgctccttccatttgctttcttcgactgaaaaggatgtgctgagccagttttgtgcgcgtcattcggttggtgtcatctcatttttggaacttccatctgatgaggagcagcaacatcgcacagaatttgccaatttcactgcatttggacgacaatcggtcaccaaaattgtggtttccggcacttcacctgtccacaatgttgccaaatcgggcacggaatattcggtgccgcaaaaggatggagatgccaaacttgcattcacattgttcaaacatgcactaagtcatatgaatccaattttggaagcggaaaatgaattgggccaccgtttttccatcgctttacaactggaagaacatcatgttatgtttggtgccaaaccaaaccaacattggttggttagagttgcacttttggacgccgtcacatttcttgcacccgccattcatgacgacgacttggaaaggttaattggctcttttgcagttctatctttttcacatttcgaattaaaatacaaattaataggttttcggggtcgctcgctgatcactgatcaggcatccgtgtcgactaattacgaaccccgggcccgaattctaacgaaaaatcagaaactcatttttttaccataattcacattataaaaattagaatttttgatcgagttctgatctgggcttcggcattgggcaaatccgagtttagcttcgtggtcagtatcttagaaaagccctgggaaactggtttttgagcctaaaaaagttaaatgaagacgcaattctttatcattaccgaaaaattgcctttgtataatagtaactaaacattttcggtgtacatagtgttgttccttttagatttgtccaaattgacattgacgatgtgttcattggtgccattggcagtcgaatggttgcggatgacgtggactatttgtccattttgcagggcaaactgcgcgaacacattgccaactttcatttcacgcttggcttttctggcaatttttttcgtcatggtgacccggcagaaattcaaggagacgaaatccttgtcagtaagttttgttgaatgaattggacaaaaatcattgtaatcgtaacttccaatggtcagcatttgtcatgttccatgaaaactgaaattgtttggaattttccaaattttgccgctagtttcgaaatcgtaaattaagaaaattattaaaagccagcaaggtgacccttttgacctgcaaccaatttccgaatcctttccctaaatttgaaaaaaaaaaactaattttcgaccttttgttagagtttggtttgagtgaccgggattggttgaggttgatttgtctgattcgtgacatattttcgtacccgaatttattttttttgcacttttttttgtacaacttctaaacgaaaatcatttgttttttttttgtcgaaaatttacattttgtctgtaataggcaatgcgaacaaattccactggttcccgcacatgtggcgtcacaaccatccgccagaattttctgcggattatctgcttgcattgatgacacaaaatcgtgtgtttgctgagaatgttggcatttctgccaatctgagctatgccgtttcgccacaacattctggggttagttgttgaaaaatggaattttcaaatgcaatatttttctactaaatttgccaggtttatccgatctatcagcctctgtacgatgcctggtccaaaatttggtcgatccaagtcacttctaccgaaggtggttaaaaggcgcagtaccacaatttttacttggagaatataaatttttcaagaaaatttttaatttttttttaggcctggtgacaccacacttggagaatttgtttttattttttgctaggcctattttagtaatttactacattttttaaaattaaaattgccaccctttttgggttagactcacatcagagtgcttgtttttgtacaaaaattttcgacatttatacaattttatcccctccagaatacccacatctgaagccagcaagcggaaggcgtgcatttgtccatggaaatattacggtgcttcccaggtttttttttttgaatttcttcgaccataacttctttttcctattcgaataaacgttcagtttgggtaccatgaaatttttttccatttccagacaaacctgtggccttttcacgcacacccaattctttcacgcttaccctgatggggtggacaattttctgcacaatgtgttgggcggcggtgacctgttcagctccattctgatgaacaaattctccgttttcatgacccatcagcaaaactatgcaaatgatcggcttggcggcttcacttttatgaacattgccaaatttgttggttgttggacaaatttgcgactgaaatggacggcaccgaaaaatgtggccgatttgtacatgaaacggtttccgaatgagcgcactttgctttacacggtgccaactttttcaaattttattatccataaaaatgggtgaatgaatgtgtgtattcagaacccgtgtgatgatcaacggcacaggcgtacgcttccactcaattacaattgcagtgcaatcaaattgccaaatctgatcattttgggtccccagaaaacgggtgggttttttcgtttaaattttctattgttttttgttgtttttttaatttctattgttttttttcgtttaaattttctattgtttgttttttgtagttgtttttttattttctattgtttgttttttgtcccgttttcgttttgtgttttgtctcatacttcactgtattactcatctcctttctctattctcattcactttccctcttttgccatctttcattcttgcttcttctttttttcattcactctcattctgtttcctctcttttttctctctgtctgtcatcgaactctctctctactattctcatgcttttctccgcatcctcgttttcttgtttatttaagcaaaaagtccccacttaaaaacaatttttttaaataattttaaacaaatttttcgtaagggtttcttgattttttttataccctaccattttaacaaaagagactaataataataatattccaaatttcagggaccagtgcgcttggtctgttcctgtcgttgcacccaaacattggcaccaatgtgcccattccccactcatttgaagaactccaattttttgctggtccaaattatgcgcttggcatggaatggtacgcagaacagtttgccaacaacaccgccgccatgtccgttctgtttgaaaagactgcaaattattttgacaacccgagggcgcccgcggcggtgcacgcgttggtgccaaatgcgcgactaa

SEQ ID NO: 63680 - DNA, 1149 bp, Heterodera glycines
atgcaaatggttcccgcaaatactttatttgctcgcgtaggccttgatttggccgggcccttcccaatgactattagtggaaataaatatattttgaatattatttgctggttttgtaagtatgtcatttcggtaccattacctgacgctaaatcacacacaatagcgatagcctttttaaagaactgctatttaaaatttggtggctgcactgaattagtcagtgataatgccaccgcctttacatcggagtttttccgagaattttgttcactattatatataaataaaaaatatgctgtatcccattggtctcaaggcaatgctgcgactgaacgtacctttaggacttttcataatattttagctaagtacattacgaaagaacagccagattttgacgaattccttgattatgctaatttttgttataatacatcagttcattcttctactaacgagaccccttattttttaatgtttgggcgcgatccgatattttgcatagatcaaattttagaccctaaagttagagacccgatagcatttactgacgaaactgaatttaaacaaaaactagtgatctctcttcggagagcgtggaaaagtgcctcagaagtgcatgcagatgcacaagaaaaaatgaaaatacagtatgacaaaacaatgagaacgcctaagctaaagtaaggtgatagagttttgctaagaaattatgcgggaaaaataaatacatccaaaaaattccagttgccgtggaagggcgtctttaggataattaaaattgacggtatttatgttaccattgtaagttgcaattcgccccaaagcaacccgcgccgcgttcacattaatcaacttaagaaatgcgttgaaatcctaggaccagcttgcacttctccctggcttagtcccgaagaaaataatgctcttgtggaagcagaaagcgaagaaattgctgatttacctggtcattctcatccaattattataaaagaacaaatagagttacctgcgcaaaaccatgctaatgacctggttagtgatactcaaaacatagagaatgatacaagcgaaccaacacaattgcctcaatatgctttaagaaatcgtacaaaacttaacaaaccagcgcgatatttagattag

SEQ ID NO: 63681 - DNA, 749 bp, Heterodera glycines
atgcccacattggcggattacaaaatgggcacattggcggatttacaaaatgcccacattggcggatttacgaaacgagatagcactaaaaacaggcaccaaacaatggagttgtttggaatactagtaaaagataaattattggatggggtggcattctctttgggttctttttttgactctgtatttgttataatggtgcattagcccacgctcttttgtacactctcatcgtctgcctctttctctgtcattttcctaacactattttctttttcgtctttcccccaagaattttttgccaaatatgtattaactgatctgtaaaaaaaactctcttcaaaatttcatggtttaaaaaaatttttcaaaattttaattttacaccttttttcgagaaattttttgcccattgctaattttttttttgcatcagttgaaaacaaataggtttttaaatgagtctctgatctgattttgactaaaaaatggagaagcacttctgacaaaaaaggcaatcctaaagaatgggggtccctttaacttttttattttgggcataaatcagtttccggggtcttcgagggtgctgattatgaatttggactctgattttcccaatttcgaacccaggatccgaatttcgaacaaaaaagttgaaaatttttttcaaaatacgtgtaaaaatcgatctaatttttgcgtaaatcgcatatttttaataattgtgaagcaaaatgaaaaataaa

SEQ ID NO: 63682 - DNA, 258 bp, Heterodera glycines
aatgatcagtcacacaaattttgtgtgcacacccgcaggggagattttgttaaaatgatgttgggactcgaagaaggaacctacggagaaaggaattgatttcggatttgaatatttaaaggtgattcaaatgatgaattatctttcttaatttttaattaaaaatttaggaaaaatttgacaacatttccatttctgttgttttgcttggagaagacaaacaatttttggcgaatttatcattcaatcagcaggcaa

SEQ ID NO: 63683 - DNA, 2741 bp, Heterodera glycines; identical to SEQ ID NO: 7055

SEQ ID NO: 63684 - DNA, 819 bp, Heterodera glycines
atggcggcgatgctcatacccgctgacggacaataccaactatgcccgtccaagccgacagaagggattaccgttaccatgagctttccggaggaacaaaattgcactcttccggtggaaaagcctccactgacggtgaagtcaaatctttacataccaattcggattccgcgagtgtttcccgcatttaaatgctggaatgtgacaacagtcacatgcaccgagtcttttctccgaatcatgacgttggatcatcctgacaagaaaattgaagccgacgcttcagtcgaggactgtcaggcctcaatacaccattcgccgatgaacagagtaagtgagacaagatgggaaagtttggcgccaattcgaaaagagtacggatggtacggcgtgaattgtttcaacaatgtacagacagtgattgaagaaggaaaagcagggattttggatgggaaaagactgataacttcgtggggagactctttaaaaatcgacaaaagtctgggagaagacggcagctggatacgcctgaaataattaattcatttaatgatccgggtattcctttacatgtgttatgtctgaccacctatcttgactccctttcccttgttgtctctcacaatttctttttccctgtcgctagtcatcccaatttcccttccttttggccttttcttccacggggcgcccgacccgcccacctgttgccaatataaaaatttgggggagagatcggattgatcagtgtgatcggggactttgatcggcttgttgcgaacttttcctttttgcttttacacatatactcatcgctaa

SEQ ID NO: 63685 - DNA, 714 bp, Heterodera glycines
atggatttagacgctctgcggcgtcgaattgtgactctcgagcgagagatgcgtgaaaatggtggaactcgccctgggcttccgatgccgaccacatttgacgggacgactgatttgcaggattatttgaagacctttaatttaatcgcgaccgcccacaattggacacccgcgcgatgtgtgcaagttctcccgctgttcctcagaggatcggcaagggcaatttacgagagcatcgaaccggatattaaagacaattggcgaagtctaattgatgccatggcggataagttgaaacaaatgtctccgagtctgacagcaagacagaaattggcacaacggaaacaactgactggagaatcgctggaagaattcgcgcaggcgattcggaacctcgtcttacgtgcttatcccgacaattctctcgagatggactttggaaatttggtgctcggtgctttggaaaatgatgtgaaacaagcaaacgaagtccgacttcgacaattccgttcggaaattgcgcgagatttttttcgggcaaatatggcaccacgactgaaggaaagagtgatacacatggaagaaccgcaaacgctcgaggaagcagtggcccaggccagacgtgttgaacaagttcaaggaaatttggccgatgacatgtggaaaaatacacaagatgcaaaagccgaagttgctttagctgaagttaatgca

SEQ ID NO: 63686 - DNA, 136 bp, Heterodera glycines
atgaaggcgaattgtgcttccgactcccagaagaagctcccttccgcggatttgtgcaatggccgctgttcggccgagcgacggattcactgccgcgaattggccaaatggggacggcaactgacgacactcgtcg

SEQ ID NO: 63687 - DNA, 405 bp, Heterodera glycines
atggacaatcccggcccatcaaatgggattgacttaatcgaacttggagacagtgacgatgaaagaatggaaaagtttgcatttggtaagtaaatcccctcaaaaaagtatttctttttcaaatggcactgttttaggtggcaacgacacactttccctgatttcattaaaggtatttgtacgacatatggaatttaaaacttaatgcaatttaataatttttcagacggactttgaaaggccaccgaaggaagaagccatgttaaatttagtcgacgcttcctttgagctcatcgaccctaacccgaatgtccacgaacttttcgttacttttgaccaccaatttttctcgggaactttgaattcgaatgcgtgtgtcgtcgaatggagcaaaacgatgacatc

SEQ ID NO: 63688 - DNA, 415 bp, Heterodera glycines
atgagagaaaaaggaaaaggaggagaaaaaggagaggaaaaggaggagaaaaaggagaggaaaaggagaggaaaaggaaaggaaaaggagaggaaaaggaggagaaaaaggagaggaaaaggaggagaaaaaggagaggaaaaggaggagaaaaaggagaggaaaaggaggagaaaaaggagaggaaaaggaggagaaaaaggagaggaaaaggagaggaaaaggagaggaaaaggaggagaaaaaggagaggaaaaggaggagaaaaaggagaggaaaaggaggagaaaaaggagaggaaaaggaggagaaaaaggagaggaaaaggagaggaaaaggagaggaaaaggaggagaaaaaggagaggaaaaggaggagaaaaaggagaggaaaaggagaggaaaaggaggagagt

SEQ ID NO: 63689 - DNA, 158 bp, Heterodera glycines
atggctaacttatgctccgccaaactcctcaaagtgttcgtcctcctcctccttctcctcctcctcaattcccttctcgttctccccgctcgcattctcgtcgctcttgctcccgacaacaaaagtcacctccgttcgatgctccctttgatcaatcg

SEQ ID NO: 63690 - DNA, 929 bp, Heterodera glycines
atggcaaaccggatgcaacaaacatatcgtcgagccttctctgttatacagcagcgtgttgaaggtgtaataccaagcagttttatgctggattttgaacctggttatattgatatttaatcgattttattttaaatatttgatcatttagctgcgagatcggcatttcttgatgtttggccgaacacaatgatcagacattgtctgtttcacttggcccaatcagtcaacagaagagtgcagagggaaggactagcaccacaattcttagtagatatcgattttagaaagtctgtcagatcattgtcagcgatttcgtttctacctttaatttatgtggaagaaggttatcaaattctcagaaatcatgcgcctatacaagcgcatccaatttttgattactttgcatcgtaggttatggtcatgtttttaaataattctgatgttttttatagtacatatctcttccgtgttgatggaaatggaaatcgacgacctgctttatttgtgccagaaacgtggaatatgcatgattcggtccttggtgatttagggcgcacaaataatggcctggaaggctttcatgacagtttcaacaagcgattttcggctcctaatccacctttggcaacgtatttaaacattaaattaccaaaacagaaaacaattaaaggtttattagtcgaatcaaagatgaagatgagtaccaacgaaaccggatgagaccccatgaacttgatcaaactagacctgtatctgaagtacctcgttcgaaaaaatatcttgaaaacgaccgtgctattcgagacttggttgcccaatttgacgagcaagatccagatgatcgcaatgaacagcattggctacgacatctgcacgcaatttcatttcgtctgaccaccaaaggaattgataattggattgaataa

SEQ ID NO: 63691 - DNA, 681 bp, Heterodera glycines
atgtatttcaaagtttttttttaattttgcttcaattatgtcatgttcaaccacaacaaggcaagttttgtagtttaagcaaaaaaaaaatcgaaatcaattttcagaccgattagaacccgataagaggacaacgaaaagcaaaacgatgactgtttttgaaggctatgaaatgcgtactgatagaataatagcagcaggccaaacccaggctatttttcagtacttgtatatattaaatattctatcttaaataggtatggagatgtgtcaagaaatcatgcccaggcagggcccattcacctatcgacagcacaaacttaattggaagaacaaatcataaccatttgccggacccagagtctaacgtggtgaaatctgttgttaaaattggaatatttcctatttaattttattaaattatagaaaaggcagcgtcaggaacagctaaaagacgctgctatggatcaacctgaagctgccccgcgcaatttaattggatcgtcaagagaaggactctctgatgatcaacttgttcgattgccaacttatggcgcaagtagaataaaaatacaaaggcaacgtcaaataccgggtcgagatgctgtaaatgcggcaaatcctttggaaatagagatagaagtgagccattaaaaaccaaaaatcgtgccaaaaattaaa

SEQ ID NO: 63692 - DNA, 737 bp, Heterodera glycines
atggcgagacgaaaagtgaaaaattcaagggccgatcttggcctactgatgctgtacgcagtcaaaggagaaggaaaacaagagctattcggatgtgcatgatgattttttaataatataatcactcccgttagcccttgggaaaggcaattttatgaatatattttttattcacaattggggcgcaaatgtgcggggcgcaaatgtgcggggcgcaaatgtaggggcgcaaatgtaggggcgcaaatgtaggggcgcaaatgtaggggcgcaaatgtaggggcgcaaatgtgcggggcgcaaatgtaggggcgcaaatgtaggggcgcaaatgtgcggggcgcaaatgtaggggcgcaaatgtagcagctccagataaataatattttgttattgtaagaaaaatttaacccataaaattgaaggataatgaaataaataaataaacaatattacattaaaaagaagaaacaattattaaaagatattaaaatctgtaaatgttggacaaaaaataatgtttaaattatgactaaataaaatattttttatgtcaaattgtcgactaatactttgaaaatttatttaattaataaataactataaaattttttaattaattagaaaatattactattttttttatttccagatgttttaaatgattgccttgttttgattatcaataatttaattgccatattttctaagttaagaattttttaaattattggtaa

SEQ ID NO: 63693 - DNA, 1213 bp, Heterodera glycines
atgtcaaacattaccaaaacccttctcctgctgattttgctggtggccgtttcattccgtttttcggcttcgactaatggaaaaagtgagttatggaaaaattcattttcatttttagtctaatactcgcttgttaaggtctttagcttttatctgtagcaaagtcttttggcaatttcttctagtctcaagcatattaagtttcaaataatgttaaaattccattattttattggcacttaaaatattccccctaaatccatgtcctgtgggccttattaataattgaatataaataatatttattgaattaaagaaaatgctaatgatgggaatggtagcaacgcatccgttggcattgggacgaaaatcaaacgaattgtgaccgccggactgctcttcacttcactggcgacaggcggggcgggcgaaattcaacgaagcaatgttcagagaagaaatgtcatgggactgacgcacccaatggtacaaagaattatcagtaatagcaattaagcctaattagcatgatacgactgacactcaccttttctagcctcctcgacctccgccagagcttactccatttcaaaaagcaaaagcaatcatagaagaacatgctaaaaaaaataatttcactgagtcagaggtacaaattcgacttagccaattatactttttaaattacgatatatagcgcgagccaattatactttttaattacgatatttagcgcgagtcacccggaggacccgacccacaccatcatttcaatttcactgagtcaaatgtacaaattcgatttagccaattatactttttaaattacgatatatagcgcgagccaattatactttttaattacgatatttagcgcgagtcacccggaggacccgacgcacaccataatttcaatttcactgagtcaaaggtacaaattcgacttagccaattatcctttttaattactatatttagcgcatgggaccccaacgacccaatggacagcataatttcaaaaatcatactgattgagaggtacaaattaaacttttcaattatgcgtttttaattacgaattttcagcgcggctacgtatccggtggacccgactcactcacaatcattgaaatatagaaagaaatgatgcatcgagtgtgattagttcttttaagggtttattttctcttcttttcattataaactttctaga

SEQ ID NO: 63694 - DNA, 440 bp, Heterodera glycines
atgttcttctatgattgcttctgctttttgaaatggagtaagctctggcggaggtggaggaggctagaaaaggtgagtgtcagtcgtatcatgctaattaggcttaattgctattactgataattctttgtaccattgggtgcgtcagtcccgtggcatttcctccctgaacattgcttcgctgaattgcgcccgccccgcccgtcgccagtgaagtgaagagcagtccggcggtcacaattcgtttgattttcgtcccaatgccaacggatgcgttgctaccattcccatcattagcattttctttaattgattacactttttaagtcagttatttacaatgttcacaagacatggattaggagaatactttcagaggcaaaaaatgatgaaactttcacataatttgaaagctaattgacttaaaactagaaaataaa

SEQ ID NO: 63695 - DNA, 236 bp, Heterodera glycines
acttggacatttcgtgggctggacattttgtgggtcagcggaaaaaatgggccgcgctctgtttgccaactgtgtctgttctgtgctatggtcaactgggtcatctttcctatgcactctctccaccagtctctttctgcgagtcacccggaggacccaacccacaccaccatttcaattttacgtatccggtggacccgattcactcacaatcattgaaatatagaaagaaatga

SEQ ID NO: 63696 - DNA, 826 bp, Heterodera glycines
ttaccaaaccctttctcctgctgattttgctggtggccgtttcattccgtttttcggcttcgactaatggaaagagtgagttataaaaacaagaattaattctcagccttttctatcatttaagttttggcaatttattttctagttttaagtcaattagctttcaaattatgtgaaagtttcatcattttttgcctctgaaagtattctcctaatccatgtcttgtgaacattgtaaataactgacttaaaaagtgtaatcaattaaagaaaatgctaatgatgggaatggtagcaacgcatccgttggcattgggacgaaaatcaaacgaattgtgaccgccggactgctcttcacttcactggcgacgggcggggcgggcgcaattcagcgaagcaatgttcagggaggaaatgccacgggactgacgcacccaatggtacaaagaattatcagtaatagcaattaagcctaattagcatgatacgactgacactcaccttttctagcctcctccacctccgccagagcttactccatttcaaaaagcagaagcaatcatagaagaacatgctaaaaaaattaatttcactgagtcaaaggtacaaattcgatttagccaattatactttttatttacgatatttagcgcgagtcacccggaggacccaacccacaccatcatttcaatttcactgagtcaaaggtcaaattcgatttagccaattatactttttaattacgatatttagcgcgagccaaccagacgacccaacccacaatatttagcgcgagtcacccggaggacccgacccacaccatcat

SEQ ID NO: 63697 - DNA, 615 bp, Heterodera glycines
atggactctatccaaaaatttatgcttttattgaaactccttaagtaagtggctttgttgtgtgcaacatttgctacggtaaaccaataaaaataaatataaatgatttaaattactttattttaattataagaacacaacattttttgtggctggcgagaaataagaaaataaacaaattacaaaattgaggaaacgactagagaaaatttgggctaccaattataacaagaatgtaaaatttttcatctttaagcaaaattatgccatattttgtgccgaaaaaacagttaaaattgcggattttacgtaacgacccagcacgtttttaatactttctaacatttaaaaccttgtggtttacttgtttaaaagctgtctctaagctattgattgaccatttaattattattacactagagatcgacattttgaaaaaagcctggacctgggatttcctggataaaaatccaggaaaatccaggtccatgaaaaggacctggactttttttcatatagaacggctccattttgagcactaaagaccggaaaaactcccgaaaaaaatcattttttagcaaaattttctcaagaatattatttatttaaatttta

SEQ ID NO: 63698 - DNA, 802 bp, Heterodera glycines
atgtcaaatcaatcaacttcttctgctgctgctgccggatcgacggcgccgccatcgccttcgaacgaagcttcttctccttcggccgctcaagcgtcaagtcagtcatcgtctgctgctggtgattcgtcagcctctcccaatggaccgcgtcttaagccgcgtaaagtgcccgtcaaccgcttcagggatgttcgtccggcactgcagctgcgactcagtcagttgaagcatccgttaatcaggaaactggagcaggacaccggcattgaccgtgagagggttcgtctccaactccaaacatttccttcccccatcataattcccccatcacccattttcagctcttttacatggctatggcatatttcgtgttcctgctcctgttcactcagtgtaagcttctgctctccactctcattggttggcatttcgacacaaatgccatcctttctctaattcctccccttttatttaaggctcagtctatcccgcctatcagagcattgtgactgtccatactcaggccaaaagtcagtgttattttgtggaattcccaaataaaaggatttgaatttcaggcgaagagattcagtggctcacttattggtgtttgttctctctgttttctctgtgtgacatttccttttccgtcgcccttccgttctatgcccttgtgaagacaatcattttgttgtatttggctcttccccaaacttatggtgcgcacaatttctacgtcatttacgttgacccgctggtggaccaatggatgctgatggtcaacgaaattgctggctga

SEQ ID NO: 63699 - DNA, 425 bp, Heterodera glycines
atggcaaagcaaaacactgatcagctcagcacatcggacggaattgtggcaaaacaaaaattgtgaataagataatgataattcctataatttggagggatttcccgagacggaagcacattggtactgatttggcctcaattggagcacaaaattggttgttcaaaagaaaagactcaattcgccaacggactaaaggattctttcggccagaagagaatgggaatttaatgaacaaattgcagggattggaggcatctttcgacgacatttcctatctgaacacaaaattgcgtttggttctcgaaagtcaggacaaattggagaagtcaaattttgggattggaaaattcaccaccaaagacgacaaatataaaaagcgatttaatcacccatcttttaatatgaaattatatgacaaataa

SEQ ID NO: 63700 - DNA, 541 bp, Heterodera glycines
atgaaggcccatttcaacggcatcagtcacaacggcgaagcatcgatgtacgccaaaattgagcagcaaagtgccgaagaattgatcaaactgcacagtaaactgatgctttttaaaataatttctgaagaaattttgaaaaggatattttaagaattttaaattgaatttttctcatgcttaagaaagtgccattaatcagttcgaatcgcgtggcattccgtcgctgaacccgtttaacgagtcgcactttgtgccccacgcgacgattttatatttgaggagtgaaagtgatcggaagcttatcaaatggtgggcggaggaagaagcgaaatgggaaggcagaaaattgggcacggaaaatgtgaaaagtgagagacaaatcaatggaaaagcgaaataaaatggaatgaattaaaattagtgaaaatgtttaaaattactcgcaattttattttatttagtgcttcagctttgcaacattgacttggacgatcagaccgaagattacgaagtgttgtacgaagttcgcattgattaa

SEQ ID NO: 63701 - DNA, 715 bp, Heterodera glycines
atgctgaagtgggtttgtatcaatcggttaattaccatttgaaaatgaaaatggcaaacatttgccaacccaacccaaaaaggtcgtgtccaatgtcaaagccatccaaaacgaattgctccgatttgactccgatttttcgcacacttttcaaccactccaatcactgcacgtcacacttcttctcatccatttggacaaggcaaacttccaaaagcaagtcaatttatataaataaataaattatgtagtggcaaaaaaagaagaagaaactttcccgagaagaaaaaatctgatggaccgattaaggcgataattagaaacctaatcaattaaagtagaaaatgatcctaaatgatttagtaaaaaaagaagcaaaaggagaaatgttaaattagcattaccaaatttgtaaaataaacaacaaacctacacatttttatgcaatttgcgcttgcccaattaaagaaaattagcaaatgattaattatgaaggattgtcttttttaaaatatttgaacaaattgattatggtttgtagaaccaaaacatactttaaaatttgtttgcacattgaaaatgcttttaaaaagcataaaatccgtccatttttgtgattttcagcgcttgtgatgctctcgctgcgactgtgcagcattttgctcaaccattggtggtaatttatttggtttttgaggaatcaattcatttttaa

SEQ ID NO: 63702 - DNA, 288 bp, Heterodera glycines
atgcaattctctagtgttggccatttaaggcaaacattaaatgacataatcaaggatgcatataaacaacggtttgggctctcaccacagaaggccgccggaacaacggttaaagcgaaacgccaaattgacgttacggaccttttttttcacgatcaccctggtgattattgggaaaaaattgaagagttggaaaaaaagttggctgaattaaaagaggagattatgacgaaagagagggaacatggtgccaaaggtacagagcagaaaagaaaaaggaacttgaag

SEQ ID NO: 63703 - DNA, 463 bp, Heterodera glycines
  unsure (1)..(463): unsure at all n locations
atgggccgtncattggacaaaattcatgtgaatgaatgggcagggaaaaataaatcaaaaaatgaaattcagacatttttcgagaggatagaaaaacacttggaaaatggcgcaaagccggaagagatgagctacgagcagcaattctcccggatggaactgaaacgggccatttcgtcatacccggccaaagaagtgaagaagggacttgacaatctgtacaagaaagtggagaaacatctctgcccgggctcgcctcttctggtcgttgtgtggcgacaaatgcaggcaaaaaaaaccacggatttctttcacatttgacaaagttcaggaagaattcttgaaccaggtgaaacattaccaagagctgatctcgcggtgttacggcgcctcaaaaatcgaattggatttctccattggggatgtgcttcaattcttctctgaaatcgctcaacagcactaa

SEQ ID NO: 63704 - DNA, 99 bp, Heterodera glycines
ccgacagggatttcaattagatcaccaaacaaatgaaaatcggattcgaattctccactttgtatcaaatataactttattataaatcacatttacaaa

SEQ ID NO: 63705 - DNA, 677 bp, Heterodera glycines; identical to SEQ ID NO: 63383

SEQ ID NO: 63706 - DNA, 252 bp, Heterodera glycines
atgaatgaatggatgaataaaaaagggaagagaaagaaacaaacggaacggaacgctccaccgccaccgcacgcattggcaccacccgcggcggccattgctgcggctgccatcaaaaagccgcccgcatccgccgacgtgccgccgcctacggttaccggagaagcaccagagatggcggcgttgacggtgccggcactgccaaacggaaaatgttgcgacgcagcggtgccaccaaacgcagacacaacg

SEQ ID NO: 63707 - DNA, 1472 bp, Heterodera glycines
atggctatgccaccgcaatcgcccgcgtccgcagcagccgctgcggctgccgcggcagcggtcgtcatgcagcaccagcaacaacagcaacaggtgcagtcgcagctgagcaagctggacagcctgttcgggcccgggtcgccggcagcggcgaccgctgcactgctccaactgcagcagcaacatcagcagcaccagcaacaggttgagtttcttgttgatcaacagttgtgtggaattcgaatttttttttaaattcacatttggaaaattttggaaagaattttttaattagtatgctcgagagtctcgggctcataattctcacaaatatcctgaattggattgtcatgttttacaaaaaaaatttaaaccgatactgcgatttcaagcgtcaattgttttggaaacttttatccaattaatagagacgattattttgaaaaagctggacctgaacctggattccatgttagacctggacctggattaccttcggtttttgataattttcaaaataaaacatcggtcacttgtaataataaattcaaaattttggtctaggaaatccaggtttttcgtatttagcctggaactggatttcctggaccaaacatccagaaaaatctaggcctggatccgggtaccaattaagcatgtcattttaccttatcatgacccaatttaggcggagcccctctcattaactaattaattaattatcattgttcagtcggccgctgctgcggcacaatgccatcagcagcaacaacaacaagcgaacagtgagctggccgctgcggcactgctggccagccaattccaacggcacaattcgtcggtggtcgccgcttcggtggcggcacaactgctggccgctgccagtccggcaagcccggcggcggcggcggccctctctttgatgtcgtctccgctgggcatgcacaaccacccgcaacagcaacaaaaccatcacaaccaacagaatcaacagcaatttgctaatgttgcagctgctgccgcgtcactcatccaccaacagcaacaggtggccccggggcttcacgcctattagctctgctaatgggtggttgatcaagtttttatgaggattgtcataggttactgatatttggagaccgaacgggatcggggagcccttcgggattttcccgggatccttgtcccgatttattctgaaaaatgttgatcaggatcccgacaaaatggatttaaatctagtaaccctatcctggcctgattcccaattccggtcccgacttctactaattttggcactgtcaaattaatctgcccggctggtcaatcagtgtgataataatgttccaattcaaacaatatgatcaaaatattatcttaaatcctatcagctaatcactgccacccattttgtcactaattaccctaattaaacactttcccttttttcaatcatcatcacccctaataaa

SEQ ID NO: 63708 - DNA, 533 bp, Heterodera glycines
tgaaaaaagggaaagtgtttaattagggtaattagtgacaaaatgggtggcagtgattagctgataggatttaagataatattttgatcatattgtttgaattggaacattattatcacactgattgaccagccgggcagattaatttgacagtgccaaaattagtagaagtcgggaccggaattgggaatcaggccaggatagggttactagatttaaatccattttgtcgggatcctgatcaacatttttcagaataaatcgggacaaggatcccgggaaaatcccgaagggctccccgatcccgttcggtctccaaatatcagtaacctatgacaatcctcataaaaacttgatcaaccacccattagcagagctaataggcgtgaagccccggggccacctgttgctgttggtggatgagtgacgcggcagcagctgcaacattagcaaattgctgttgattctgttggttgtgatggttttgttgctgttgcgggtggttgtgcatgcccagcggagacgacatcaaa

SEQ ID NO: 63709 - DNA, 631 bp, Heterodera glycines
atgagcacaaaagcaccaccaccgacagcagcaacgccaagttggagcagtacacgatggaaaagcggaggggaaacaaacgacgcaaaagagaacaaaaaagcacatgagacaagccgaactgcagcgacagaacggacggaaggcaatgttaacttccgactgctcgcaatcgccggaatcattgcgggttggtcctttcgaaccaaaaatgattattatttaccacttaattcctttaatttttgcttcagtgttgtttattatggttggaattggaagcatttgcacgggacggtacgtgcgaaagagtcgtcaactccacggcaaatacagggtcggcaataaattaaagatcgattagaaataaaccaatggaacgagtggaaaagtgggggaggggtaataaagaaagaatattcgaccatttcgctttgttttagcccgccgcgtacgaattgcagaccactcgccccccgcctttgaccagctcttccatgactttcgcgccttccaatcgcatggccaattccaatgaattgcagcagaatcggcatttcgagtttggccaaatccatcaaataccgccgccagttcattgtcctcatcagctcacaatgaatgggaatga

SEQ ID NO: 63710 - DNA, 783 bp, Heterodera glycines
  unsure (1)..(783): unsure at all n locations
atggaaacaacgacaattccattaataattcgccccactacaactattattccaccagcaactcgcactactacaaccgctattccaccaattactcatactaccacaactgctatcccaccgacaactcgcactatttcaacggctattccaccgattattcgcaccaccacgacggctattccattaataattcgccccactacaactattattccaccgactattcgcattaccacaacggctattccaccaacaactcgcgctactacaaaggctattccattaataattcgccccactacaactattattccaccagcaactcgcactactacaaccgctattccaccaattactcatactaccacaactgctatcccaccgacaactcgcactatttcaacggctattccaccgattattcgcaccaccacgacggctattccattaataattcgccccactacaactattattccaccgacaactcgcactactacaaccgctattccaccaattaccacaactgctatcccaccgacaactcgcactatttcaacggctattccaccgattattcgcaccaccacgacggctattccattaataattcgccccactacaactattattccaccgacaactcgcactactacaaccgctattccacccacaacccaggctanaacaagggaaatgccanagggtacaattgaaaccattgagaagctcatcaaaaaactcgagaaaatgacagaaatacggangaaaacaaagtga

SEQ ID NO: 63711 - DNA, 431 bp, Heterodera glycines
atggcttactgtaaggacgtttgagcgaaccctgacagtacagtatacgaatctgttttgctctttttataagaagtgggcgttaattgactcaccgttttctaaagatattatgacgtaattaaagccactattgtgccattagcttctgcccagtaataattcaagaatttaaataataaaatgattattttaagttgcctgttgagcttctgataattttgccagcatttttttattatgggtcttatttttctctcacaaaatatgtgagaaattttgtcggagttaatcgtttgagacagccggaagtatttggtgacgaaatcgcattaatttgcaaaagaaatcgaggcggaaatggtcaaacaacgacaaagtgtcgtgtgggaaattaactcaccaattggtcgattttttggtatttcaaa

SEQ ID NO: 63712 - DNA, 634 bp, Heterodera glycines
atgaagaaacaaaaggcaaagcccgaggaaaagcccgcggcacctgcagaagccaaagcactagtgccggaacagaagaaggcagaagagacaaaggaaaagctgaagcaggaagagaaagctgcggaagtgccgacctcacctgaagaaaagaagagaaaggaagcagaagcaaaagcgaagagagatgccgaagaaaaggccaaaaaagaggcagaagcaaagaaaaaggaggaagaaattaagaaacaaaaggcaaagcccgaggaaaagcccgcggcttttgatgcaaatgacttcgtggcgcttttttcttcctattcttcaataaatttctctgttaaatttccaagtcagactgctcaaattgaagttgttctctcagattgtcttcttgagaacggtttgttactcaaacaaatttaatttaatttaatttaattttattagttgactcaattaaaccttcgcgcgaaccggcgccgctgtacatgaaacccaaatttgttagagggttgtcaaatgtgattgacctgatggcgctgaatgaagccacgtttgagtgccaattccaaggatttccagaaccaaatgttttatggttcatcgatgatcaacctttgacacagaaagg

SEQ ID NO: 63713 - DNA, 409 bp, Heterodera glycines
atgaaagaagcaaaattttatcacttactctacgacacattatctgaacagtcgtcagagtaagtggttttcgcccttctgatgacttttttattttttacgaataaataaatcatttattttatttcgtagcaaaaataatccaaaacaacaatataaattattcaacaaaattattaatgaggtgaatccattagtgatttgggcatcttaattgataataaattaaggctttctatcattatactaaaattactaaagctgcttatttaaggattcttaatattgccaaaattctaaaatccagctctatacgtatttgaaccaaaatttataaaaatatattcatcctcttttagaatatgcgcctgaaatttggaatccgacatacaaaaaagatataaataaa

SEQ ID NO: 63714 - DNA, 670 bp, Heterodera glycines
atggagcacgaaatcggaacttatccatcggtgacattgtccaattcatcaattatcgcggcccttcaaaaacgtggctgcgagggacaattgtgtcaggaaaaggtgtagtttggcgaatttagtcgccacaattgcatgccgttgtaacccgtcatgcaaaccaaatccagaaattcgatcccattccatacaaggaaaatttgggcattgacaatcaggcacaaggcgaacagcaaccggagacaccaaaccgatcacctcgcagagttcggttcgctgacgaacagaacgaaccgctcgaacagatacagccgattgagccgagacggtccacgcgccaaagaaaagccccacaacagttggacatggaagtgaccaaaaccaaatatgattatgtcaaacaggggaagacaaattaaagggggagatgttgggatgttgtcagccattattattttctctcgctctcttccctttagtcatttctctcttatttttccacactctctctctcttgcctgaggcgcataaatagcgacggttcccttccctttttgtccgtctcccagtcatttccaaattcagtccgtatttgccattcatctttctctgtctattttattattatatttattcgcttctgacttattttattgtgttcaataaa

SEQ ID NO: 63715 - DNA, 1011 bp, Heterodera glycines
atgaataataattggatgattagtgagtgagatgttttgttttccaaaattcatttggttttaaaatttttttaacaaatttcatcaaatcatccacaattttttcttaaacggcaaatttttcaatttttcctttcattccttttcattttttgacaacttttgaaataaaagtgcctatttttggattttaagacttttgaagtcaattttttgcactttccttccgtctgtccaaaacaattaattaattaaattgcatgtaattatttactaaatgagggagtaattcttgtgcttttaattatgtttacgatcattttcgagtttgtgatcacaatacagaaattattattcattattaaacaattaataatggcaaaggcaaaggcttctcccgcatttcttccgccaaagtcaaagtgattcccccgccgcccatcgtttggcaataaaaagggcaaattgaaaagaagcgggagggagggggagaagaagcactaaaacattgttattattattatattattattagaggtgttttaaagagacaaaacatagaaaaaagcagcgaaagcgcagacaaacgccgtcggcacaaaacgcacattttatccgatcaaaatcagtttactgacaataaagttgcatttgaaatataaattttaaccaatgaataagccaatcgatggcacgtcgtttaatggcaaaaaacacagaatttaatttatggcttatagactagggcccagcttcctctctttgaaacctttatttaatcattaaaaaagtagattacatactattttaatttcaaaactttaaatatattttttagtcaaaatttccaatttataattatcacaaatttaaaaatgtaaaaaatgctattaagattattgttaatcgattcttgcttttgtctgccaaatgttcagcaactttttttgcctcgtaatagtggcactcatcggaatggttcagtcaaaatttcaaaaaaaaaacaaacaa

SEQ ID NO: 63716 - DNA, 220 bp, Heterodera glycines
atgggccgaatttacaaatatgtgaaggaattcggtgccgacgcaatcatcgcaacgccgtgcatggacggtgaaacaaaaaaaacatataaaaataataaacaaatattttaaataattaaaaaacattgttatttgtcacagtgccaccaatgcttgggcatttggcctccaatttcaacttgccaatgatggtttggggacagagcatggcgtcggt

SEQ ID NO: 63717 - DNA, 783 bp, Heterodera glycines
atggcaccggaggaccaaatcccaaagccccaggcggagaaggaaaatgttgagccacaggcggacccagagaaacaacgcaaacggcgatcaccaccggcaccaatcatcagcgagctggcccgaatgatggatcagctgaaggcctcaatggttgcggaaatccaggactgtttggagcatgtgcgaaatgcgatgatggatgaggtccagctggcgttggacaatttgtgggccaaaatccagccggtcatggtggatcatgggcgctcgattgcggctttggcggatgcatttgatgaaatgaccatgaaagaggccaaggacaaaatggagaaccccacggagggaggtcctggggtaaatgacccaccggctaacagcccaccagagagtggaggccaaaataaccaggctgacaataacaacccaccacagagtggaggccaaaataaccaggctgacaataacaacccacaacaaagtggaggccaaaatgttcagttggctaatcagtttgagcgacccgcccaatggcagggccgagggtcgcgtggaacttggcgtggtcgtcgcgggttcgagaacggagggcctggtcgagtgagctacttgcgacgccagcttgagcgggagtccggcggtcgagtgcgcatccagcacccctacttggaattccgccgtggccgtggttatggaccgagtggcagaattgatcgcgcatttggacaatatggaggacaaaactctggggggccaagccgaggacgccgtgggaactga

SEQ ID NO: 63718 - DNA, 552 bp, Heterodera glycines
atggcatttgtacaatttgctgttttaatttgggacacaattgtggcatatgtccatgggaaaagagcggacggcacaaatgccaacggcgaaattgatgaaaaatcggaaaagattggccacaacagaatccaagcatttattgctgccacaaaatgttttgaccttccggaatggcgaacaaatttaggtgaaaatttaaatgtaaatgcaattttaatttcttttttgttttatttgaatttcttttcccttataagaaaaacccaagaccaaaattgttaagtaattattcctacatcagatttaaaaacattttcaatcatttccaagcgatttttattttttcaaaaagataaaatctaaatgattttataatattataatttaattattattccagcatttttgactctttgatcaaaattgaagcgatctcttcaaaagaagaagaaaaaaaaggccaaaaagtgcctgcttttggcatatcgatctataaagaacatgaatacccagaaagcataagcaaaagcatttcaaaacgtaaataaa

SEQ ID NO: 63719 - DNA, 612 bp, Heterodera glycines
atgacaggttagggagaggacgaaaagttagatagaaagatatgaaacaaacgaagagttaagaaaatagtttcatataataacaaacaaaaattggaaaaagaaaaaggtgaaatgcagagtaaaatgttattccctgttacgaattaaaaaatttaacagatcgactagttaaagtcccattaataaaaaatgccgaaaaagtcttccgccgcatcgacaaggctaggctcaacgaaagtgaacagaatgccagatgcaatgccgagaacgaggaaaaagccggacatcatgccaacaacttgggacttggattcattgacttttctgcataaatttctttctgagaaaagtattaaaatgaattatgttacttcggcgcgtaaaccatcgccaaagaactgcaatagccgtgactgagtgccataagagtgatcagaacagtgaacacccattggttgtggatgaacacgaagcgacgcggagtcaaattgtcatattggtaatcgcaaaaccaaaacaacggaagaaagagcagacggaggcaaatcggcagggacaaataatcggggaaaggctgaaggagggaggggaggggaatagggaaataaa

SEQ ID NO: 63720 - DNA, 1849 bp, Heterodera glycines
aataatgaccacgggctcggaccgaacacaactccaactgcaattacattttaacgcaaataattcttccgaggcatcccaatcacaaaattcctccgaacaaatgcaaaattgttcaagtatgcatttcctaatctttcataataatctgttgaccattgtttagccaatgaaagagtctctggagaagattcggtgccattcatcgacagagagacttttggagacgcggagagtgacagaggaaggggaccgccgcccgatcggtttcgactggtctatctgatcgtgcttctacatggaatgggcatgttgctgccgtggaacactttcattacgatcgcaggggatgtaagacaaaaaaatttcgaaaaacaaacttcaattaaatgttttaatgggctttaaggcacttttataactgcttttttaagtattatttgcaattcaaattcgcaaatgtgagcaatgaagacaattacaaagtgtactttttcaattatctgacggtttgtgcccaaattcccgtgagtttattcatgtttatctgattgtgagcatttttctgcctttttcctattttagaatttgcttctaagttttctgaatttatttgtcgtcataagaggcggcttttaccgtcgcatttacttcactttggccgtcatttttggcatatgtctcgtcacaattgcgatggtttacgttccaaccgataactgtgccttgccattccttatcttttttatcctttcttttcttagggactttcggctttttcctcttcacaatgctatccgttgtgcttctgaatagcgccagtggtgtttatcaaaacagtatttggggattggtcgctgattttcccggggaattcgccggtgccattattcttggcaacaatttatgcgggattctgatggcggtgctatacatcctcatcattgtgttgggtttgcgattcatccgcttcgcttttgttcggttcgcttttagtcggtgccaatgccgcactcgccgccacagtttacttcggtctcgctctgtttaccgtcgtcctttgcattttttctttccattttcttcaaaaattggttctattctatttattttcaaactttaatctttttaaacataaagaatttctacaattactatgtccaaaaagcggcgaaagcgcgcgcgaacaatggaacgaatattctgcacgaggaggaaacgggcgaagcgaaggccaatagaaaagtgacgcatccgccgctaaaaacatacatcgcaattttctctgaggtaagcaccaattaaagcatgatatgctgtgaaaatatcattttggcaacttataggtccgtcgccagttgctcgatgtttggcttgtcttttttgtcactttggctctgtttccgaccgttttgttgaaagtgtctttaattagtccgttcaacgaccagaaaacttccggtggcattttacacattaattgttttttgacatttctcttaagaatcgctctacaagcagctgacagttttcctcaatttcaatgtttgggccgctgtcggctgttggctgtccggcttttccccgagggttttgtccatcggtgttttatttccctattcccctcccctccctccttcagcctttccccgattatttgtccctgccgatttgcctccgtctgctctttcttccgttgttttggttttgcgattaccaatatgacaatttgactccgcgtcgcttcgtgttcatccacaaccaatgggtgttcactgttctgatcactcttatggcactcagtcacggctattgcagttctttggcgatggtttacgcgccgaagtaa

SEQ ID NO: 63721 - DNA, 476 bp, Heterodera glycines
atgcttgcctacttcgaaagtgaggagcagcggctgcgagcgaacgaatcaacgacggggatatatagaatcggagattgtgatggtggccaaaacgacgggaaggtcagtagggggggggggggtttgatggttaattgatgtcttaattatgttaatttgtcaaaatccactccagtaggtcagtttccgctctgatcagtccttctctcccattcagcaaattgtgctcggcacttgggagcgattcgccttcgccaatgtccaaccaatggtcgccgggggacattcagcagggcaattccatggaaatgtcctccaatttatgcaatttgtgatcagttcgtttgcccttcagaagcgacgaaatcgtgtcgatgctcagccaaaatcatttagaggcgcccaacgtggagagtcttctcggcggcttacaaatcggacaacgaatggccgccgatcagcgaccgatgcag

SEQ ID NO: 63722 - DNA, 810 bp, Heterodera glycines
atgttctcaaaattcttttcaaagggaagaaattccatatttaaatatatacagaaatacgaggttaatccctttgaaatacctaatttagtttttgaaaccaaatgctatcatgatggtgctgaaaaatgtgaattatttgccaatttatttgtaaattcgtttaataattctgaagatgacccaggctgttatagcctgggtacaacttttgctaatcaatgctttatatcagatatagactttaacatcatcgagacacaaaaacttttgaaaaaactcccgaataaaaatggtacatccccggatgatataagctataaaacattgaaaaactgccattcttcattggcaactgttattactgacctgttcaggatttctttagattctggttctcttccagatatttggaaggaatcaatagttttacctcttttcaaaaaaggggataaatctaatcctgaaaattataggcctatttctctaacctgctcactttgcagggttatggaaagaattcttagccaaaatatttacaacttcctcctaaaaaacaataaaatttcggaataccaatttggttttgttagaaataggtctacgacaagtcaactaataacagttgtggaagattggtacgaggcaattataaatggaaaaaatgtgaccggtcatgttaaccaaataacaaggaatgcgtatttacgtatgagttccttgtttagaataattaaatccaaatcatctaagatttggattacgttatataaaacttatattaggcctttattggaatacgctccggag

SEQ ID NO: 63723 - DNA, 208 bp, Heterodera glycines
  unsure (1)..(208): unsure at all n locations
atgcttctccgttccttcgtgcaagatcgaacaaatttcgccgaattatgcaagaaattggaaaaattggatttgatgaaaatgatcacttttgtaaccaggcgccgtggcaaggctgtgtacgatagtggggaaacggtggaatatttgaggcagcaattcgaagcataccttggcgtaatgcatttgatgcgacaganatgggcct

SEQ ID NO: 63724 - DNA, 444 bp, Heterodera glycines
atgcgccgcctccccctcactctcgcacgcacccctccctcccgcacgattcgactcgcattcgttacgcacgctctccaggtgtttgttcaaattaagtatatataaaaaatagccctattcagggatacccattcaacccttgcttgatgggaacgactgttcgcgcgagtgtgcatattcgacttccaaagatcagcgcaaatcacgacgacttcaagtccatctgtgaggagttgaaattgcagatccgcgggattcacggcgaacattccgagaggtaattatttattgttctgtttttgaaacaattgtcctttatttagcgctggcggcgtttatgacatcagcaacaaggcccgtcttggtctcacggagttcgaagcggtgaagcagatgtacgacggagtgaaacacctgatcgaattggagaagaaagcataa

SEQ ID NO: 63725 - DNA, 720 bp, Heterodera glycines
atggcccacactgaggtaaaccgcattcatttcgtatataaattgaattcaggaagtcacttggccaacaatttcgcgcgcatatgcaaaaaataaaattggtacaacggctattgttgagagtgaagccgagtataaaaaagtagcgcagagggtaaaggaaaagcttgatataataggcccaaaaaagtaagtaataaatttcaaatttaaacatttacggtttattggatttgatatatccccaagttatttaaaaagactttttttaaataaaacaacccttggaaacatgttttcatgatttttgaaaacaaaaaatatttttccaaaaaatgggggggggcaccatccaaagtattactggttcatttttcaaaatgcctaatttcgtttttatctttgtaatttcttaaatttagatattttcacacagtcatcgttttcccaaattggagtaacgcatttcagttggcgatccttgctacacaaagtcactatttctttttggacggagaaaatgaaatcaaagaaaagaaaattaatgtgatcgttgttcggtgtgaaaacgaccgttttggaagggctatccaagcggggcagtggtttacccaaacagttgaaaaccaaatgaaatacatgataaagtaatttttatttaaatagctattagtagggtcgctacttttagtgacgaaaatctcaaaatagttaattaaa

SEQ ID NO: 63726 - DNA, 1301 bp, Heterodera glycines
atgccaattgttatgttatccaacaagcattgcgaagtgattacgctaagtgacgacgatggaggacaacaacagccaatgatggcccagcaagtgcagcgccaccaaccgcgacagcatggtcttcaaaaaaggtgtgcgtgggtgttggtttgtacgcatacataccattgggtaattgagggtgcaagcaggggaccgggacagacatcctgcattgttacacactcgggactgaagtgtcgaaatagctgggactcggatgaatcattaaatttccaaaaagcaaaatattcaacggagtaacaaatttggtttctttcggttactaatttaataaatcaaataatttttgaacaaaatattacattgtgatccgggattaatttggtcgtgaaaccctttaagaaatagttttacataaatctcactcgatggttcggcctcgaattctggatttttttttgttaattatgctttttggacattgaatgattcaattcctaagttgggcacttttaatgtaaataattgtttggacaaaaggttaaaactcattttcatgatgaattagcgtacaatcacatcagaatctgtccccacggacggggattttttttttggcgaagtggagtcttggcgccaagggctataattttataatttttcataaaattaataagttctattttcaacttactaacaaaaaagaatgggttgggcatttgagggtcgaagtcaaagaataccgttgattatggttatgaatataatccttgccctgacaattaaaaatttggaaatttaagtgagtattatggcgactgccaatcgtccaacatcgccgccatcccaaatggacgtctgccgcctaacaatcagcttcacccacgccaacaacagcaggcgcaaatgcagcgacaaacattggcacagttgctgaaagcggagaatgtgtaattaattgatgggatggcatttagtggcgaacttttaaattttgaaagttgtttttaagaagcctaaaggaatcggtttttatcgatttactgaactttttatcgataacattccctttcagccaatcaacggtatcatctctcggcactggaatcatttccaaaaacgttaatcttccgcttcaaaatcagcgtcgcccatgccaacagcagccgacacaaacgcaacggcaaatgctggccgagttgctgaaaacggagaatgggtgattaattgatggggatggtattttgtggcaaaaaaacccaaagtaattaactaaaaaaatttcaaaaattaaa

SEQ ID NO: 63727 - DNA, 593 bp, Heterodera glycines
atggtcatgtccacgggtgggccccactccaaccttggcctgatgagcagcagcggtggaccgcactccaaccttggcccgatgaacccacattcggtccagaatccactttctgtgcagaatcctcattcggtgcaaaacccacaatctgtgacgggcattgccccgggctcagtgaaatcgtacaatgatgatatgcagcatcaaatgcaacagcaaaaagcaagtggaagtaaagaggaaggggcaaatgaagaactgacagttgtggagcagtacaacgaatccagggaccagtttatgaacgtatgcgacaacattgagcgcaacatggtatcattgacattggacttttaacaatagagtgtaccttagattatttttgggtttttgtgtcggaaaaggggtccgacgtaccgacacgcgaagttgcaagggtgggggataccgagagaatggaccggactattccatactcattagaaaattttcagcaactcatcctcgaagtaaaccgtcaacagagcaagctgtacaatcagcagcaaaattctgcagtcgcgtgggttgaagtgacatcaatgttagggtga

SEQ ID NO: 63728 - DNA, 87 bp, Heterodera glycines
gccaattgattgacggcggtcattgaattcctgttatttgtgttgtttctatcgtttttttgtgacaaatgaaatacgcccagctag

SEQ ID NO: 63729 - DNA, 159 bp, Heterodera glycines
atgctttctaccggctttgccaagaacaaggatgctgacggcctgagcatggccgaacccggagccatggccgagcagctcaacgccgaagtacgcacccacacccgtatcagcggaatcgaccctggtcataagcgcctgtggattggtgaggagcag

SEQ ID NO: 63730 - DNA, 1056 bp, Heterodera glycines
atgtcggaccctgccctcatttttcttcacattccactggaggaccttaaagtatgtttttgtgtttgtttgtttgttgttgctcaaaatttaaaatttattttcatgtgtagctgatcgaatgtgccatcaaagacgtgcagttatttgccgtttccttggagaataaacgtcatggattgccgccgctcaattccctcgtcaaacttctcttctatccgcgcccttcgacgcgacggtatcggccttctaattaccaccatcaatgtcttgttcagctttgtctttaagtcacaacaatcagcatgacgacgccctgacaccgcagtgacaactgaaattgatgacgctgatgttggatttcgctcgattccgccatcaccccttcagccgtttccgagcacttggacaagaccaaaaccattttgagtgagtgtttattcgaattttaaatcttttattcataaataattttggtttagcgcgtccattcccgccaattgttcctttttgaatagcttggaaccggtcaccccaactctcaagccggacaaaaacgatttgcccgaattgaaacgcgtcagtccatttgtttcgcgttgtaaaatgtaccattgaataaatttttcagtcacgattcattcgtattgcggaatacgaacaatcgctcaagaggtatgttaagcttcgagtgacactcgttgcattcaacaacgccctgacaccgcagtgtcaactcgaattgatggacgcttgacgttggatttgatgcgtctcggcgtcacgttttgattttggttttcattgtcaatgtatctgagctgttcgtttagaactttatcattcccaagcttgacgaggccaaaacacttgctgtaaatattttgacacgttcggtggaacttttggagctcgaagagtaatgcttttttctttttgtatcgtgaattccttttgatacatcccggctataactgatttaacatgattgtattattgttttttcttttcttatttcaccaattgttattatttgttaattgatttggaaataaa

SEQ ID NO: 63731 - DNA, 704 bp, Heterodera glycines
atggtgctgctgctgcttctgctgtcattgttgttgtctgttctcgcgctgatgccattgttgttgttgttattgtcacaattgttggcacaatgccaagcggtgaacgaattaacattcatgttgctgttgatgcttctgtccacggtcagcaagtcgaccagctggttgcaggtcaaaattcgcgcattgtgtattgtctttagctgggcacctgcaatggtttattagagtgaatgaacatcgattttttttttttgaaaattcatgcaaaaatatattaattttatagacgaggaatgaattttctgagttcccgagactttaagctttcgtttggtaccatgaatgtgtgttttggccaattaagaaattgaaaatattggaacagagccgaatcgcatacccgtcgaaaatcggttcaaaaagaaattttgttaatttcaaattttgcaaaatgtttgataattgattgtattgattagcaaattccgaggtattccttcctgcttaagtgcctgatgatgtcaagaaaaaaaatttttttttttttttggaagtttgtacttccacagaccaatgcaaatggtgaagctctcagaggagactttggatgttgcaacgggctgacgatgaatactgccaatgtcagaatgttgtcggtgtacggccataattttcgaatcgcacgaatgtgacctaaa

SEQ ID NO: 63732 - DNA, 285 bp, Heterodera glycines
atcctgaaatcgccaagtaaatatctatgctacacctttatcattagtaccgctgcgctcgtactgttgattatgctgccgcacgaaagtatgccggtctatttagggatggcatgtacgctgggctttggcgcgatagtctttacacagcgagccgtattttttgcacctatcggcgaagcaaaaattgctgaaaataaaacaggtgcggcgatggcgttgggtagctttattggttacgctccggcgatgttctgcttcagtctgtatggctacattctggat

SEQ ID NO: 63733 - DNA, 1336 bp, Heterodera glycines
  unsure (1)..(1336): unsure at all n locations
atggcgaaacgtcatagaaccgaaaggaaagagggagaagaaacagaagaaagggaagagaaagagaacaaagaaagggggaaagagaaagagacagaaaatgaacaggaaatgagggaacttggccaaatggaggtcataaattaattaataaagaaaagtcaggaatttgaaaattcaggatcagatttcgggtgggagccagaccgggtcggattttactaataaaacattgtttttcaagatcctgatccaggtcccaaacttttgaccctgaccacgatccgtttctaaaaatgcctaaaaaatttaattcgagaaaacaaaattattgaggcgtcattattagtgctcgactttttgaaaaaagactgggcctggatttgttgggcctgagcctggcttgcgtggacaaaatttcggaaaaacaaggtccatgagaaacccaggttgccgaaaaaggcccggaccttgcttgacctggatctaggaaaatccagacttggacccaattccaggtcgagctctatcaactttattatagttaaactanatgtacttgtcaaaaatatcttgagactcccggtaaaattatcaaatagcctcagcactttagcttaattattttctttagcatccgttgccgaattatttgttgccagaagacaaaatcccggagtataagctgcacaaatgcacacagtgtttatgttcattttattgggccaaatcacttcaaaaacactcatgcaaaggccaacagacggagaaagggacagaagaagaaaaggaagcggtgatcagtgattgattgaaaatgaatttataataatttaaatggattaattaaatccgaaatttcagaaacaaactgttactgatgctaataacccgggagagcagaaggaggcaagtcaatccgatgcaaaagcattgggtgaaaaacagcagaactgttatgatgaggtaaatgggttttccagatctgggattttccttatctgctaaaagtctgtaagaatttgcataaaattagggtttgctgatttttttgcttttttgaaaaactttacctgacgctgtctttttttatgaccaactgaaacatgatcagcgtcagacacatgaacaagctataaaatatgtaaatagaaggggaaaaatcgaagcccgacccggacttctttcttcgacccaacccgatttttttctccacccgctacaatccgggaagacattatttttaataaaacgttaaattaattgttactttttatttcaaatttaacagaaaaccaaagccaatgctgagaagcaatatgaggtgggtatttaa

SEQ ID NO: 63734 - DNA, 657 bp, Heterodera glycines
gttttcggggcagtccccccgaaccgatgcgcccagatttatggggagaccgaatccttcgggaatagcttccctatagcctgtactttaattctgcgttggatttttgctccccataattgtttgagtaccccaaacggacacttgaaaaaatcgatttttttgttttcggggcagtccccccgaaccgatgcgcccagatttatggggagaccgaatccttcgggaatagcttccctatagcctgtactttaattctgcgttggatttttgctccccataattgtttgagtaccccaaacggacacttgaaaaaatcgatttttttgttttcggggcagtccccccgagccgatgcgcccagatttatggggagaccgaatccttccggaatagcttccctatagcctgtactttaattctgcgttggatttttgctccccataattgtttgagtaccccaaacggacacttgaaaaaatcgatttttttgttttcggggcagtccccccgaaccgatgcgcccagatttatggggagaccgaatccttccggaatagcttccctatagcctgtactttaattctgcgttggatttttgctccccataatttgttgagtaccccaaacggacacttgaaaaaatcgatttttttg

SEQ ID NO: 63735 - DNA, 1316 bp, Heterodera glycines
atgaccatcaaaatttgggactttgtgaacacttacgaatgtttgaaaacactcaaagggtaatctctcattttgcgccttttttgctaatttaccttttttcctttagccatgaacataatatttcttccgtcgtttttcttccctccggagattttattttgtccgcgtcgcgggacaagctgattaaactgtgggacattgcgaatggttattgcgtgcagaacttctccaaacacaccgattgggttcgaatggtggcggttaacgaggacggaaagtgttttgcttcgtgcagcaatgacagggtaacaaattgcattttttttattgaggcggagtatgggaattaaagaaataaagacaacgatggcactctcctattttatacaaatcatagaccaaaatgtgaggggaatgggcggtcgactcccccaaccgtaagaaatttcatatggttttttgcaatttcttcgctccaaaagcagatcttactcgcaatttgtaaactttttaaatgaggattaaaaccacttagaaaaaactctaaaaatttaaccactttacttgtatatattcggaccattcattgcattttcagtccattattatttggtgtttggccaccaaagtgccgaaaatgactttgcttggccatgaacatgtcatcgagtcgatcatttgggtgtcggacaaaagcgctgctcaaattctcacattttccggcgagtcgtcgcgagaaggtggcaaatttcatttttaatgccgaacttatttaatggaatttgcattaccataggaaaaactaacggagacattgagcaacaacagcagaaaacggccatgttggtctccgcatcgcgtgaccgatccattcgcttttgggaggtaaccattttttgagtttggcttttttggttcattatttccgccattttccatcccttctttaggtgttgtccggctgttgtctgtttaccttggctggccatgacaattgggtgcgcgacattcgactgcatcctaacggcaaatttttggtgcgagaaaaccccgggggttggaaatggtaccaaaaaaggaggcgaaataacccatttatagttttttacggcttttttgttattcattttattcaatttgagtgttaaactgtctattttgtgcaggtgtctgtcagtgacgacaaaacgttgcgcgtgtggagcattgagcaccggcggtgcattaaaacgctgcaggcacatccccaatttgtcaccgcgttgggtaaacaaattatttgtttttaatgacggttaactacttgtaataaa

SEQ ID NO: 63736 - DNA, 570 bp, Heterodera glycines
atgcttacggcaactccggcatcgtttctttactgtaagtaccgtaattttccattgaggctgcgattggcccaccattttttaattacccaaatttttgacaattaaatttaaactcccaaaaaaatgaacccaaatgtttgacatttagattttaaaacccccaaaaaaaatgattttctttttcagccggtgccaccaaggacgagctggaggagatcaaaagccaggtgaacgaggtgaagcagaagtggcggaccggcgacttggagggcgcggacattcaagaggacagcgcaatgcgcgacgaattggaggcgctcaaaggggtccgtgtgtttgcctgccccatgacttacaaaatttccaaaaaaatttcatcctttgaggaggttgtggcctatgattttcaaaaaaaaaagttttccctggcttgcatcgattgccctagctcacattttccgtttttttttgtaggtgaacgtgaaggagcgtttccagcctggtcagggcgagttccagaagtcctacgaccgttcggagttggacacttccggtgtgtgcgtttag

SEQ ID NO: 63737 - DNA, 665 bp, Heterodera glycines
  unsure (1)..(665): unsure at all n locations
atggcagatgacagccggattgcaggaatatgtgaaagtcctttggaattaggtgcaaacggaacaaattaattggaacataaatattaaaaaaaaggtccggcgaagcagcagcaattgtccgatgctggtggcctaccatcatcaagttctgctactgttgctgctgatcccaaggcgtctggatcgtttccgctctcattcactgatttgaccccgattcgttcaaagtcagtgaagattgaagcaaaaaggcgaaaagttgaaacggcactgttgacgacaaaaatttgtgaaactgctgctgctgctgctgctgaattgccaacactgaaggaaatgcaactcaaagtgcttgaaaaggaggacgcaaaattgacgttggaaattcgaaaactcgaactcgagttggaagttttggagttgaaaaaagaaaaacaaacccgaaaattattggcaaatttttaaaagatgcaaaaaaagcgaaaaatacatccctaaaaagagaattttttcgaaatttcggaaatttttttttaggtattttgtccattccaaaaatttttcgctgaaaacaatgaagttattacaaaaattttgatatgtatttgatttgcaactgtgaagcgtgaatttaattanaattggcatgttttaagattaaa

SEQ ID NO: 63738 - DNA, 854 bp, Heterodera glycines
atgagttggcaatgcccgtggacatgtaaccgatgcccaccggatggaaatgtgccgacaaggccaccccaaattttagatccgccgcttccaaacagaaattgcaaggattttttagagtgagacttcaatggcacatacataaatgacaaatctcagtcattgataatttgttttgattatatgtggattttaaaaatctcaaaatatcgtcccttttaaaagctaatctttttgcaaacattttttatttttactcaatttattttctataatatagcccccccccccctaaattagacccactctcttaaataaagccctcatttagaaaggggctgaaaaatcaagcacccagtggcttaattttaggaaatttacttaaaaataaaatgttttcgtcgacagattttaaaaatattttttaaaatttttagtttttttgcgttttatttaaaaattgtcataagatataagcctttagtgattttgttgttttaagaagaagcggaatcaaaaaaaaaataaaacaacatttaagttgtccagcatgggcgcggaatggcaattgttcactttattcaacgtcaacacgagccgcattttgtccaatcacttgtcaagttgggtgtgcaattggaggaggggaaggaggagtggtgctaacatcatttaatggataaaatttctatgattatgaaacgcctaattacactaattaaaattaattccaagaaaatatgtaatttcaaaatgttgacatcatcatcattatcatcatcataatttaattgataaaaatttaaaaaatatataagcgccaattacaccagtaaaatcaatttcgtaataaa

SEQ ID NO: 63739 - DNA, 751 bp, Heterodera glycines
atgtccgatcaaatccgttgtttaattcaatcgggagttggatctgatcattatgcaattacgagtgacggttggtctaagccgacactgtcaccacaattacaaaggttgataattattttttaataatgtttaatcattttaattgtaatttcagtgtcactgttcattggattgataaaagtttctctcgccacgatgccgtactcgctgccttttccatggaaaattttgttcactctggtgaactgatctcggagaaaattgcactatgtttgaatcaaaatggattgacattgaacaaaatggcgtgttgtgtgcgtgatgatgcgaagaatatgcaatctgccatcagacagttggaaaaggagaggtatgccaaggaaatcagtgataaatgaatgaaatctttagttttcaatgttgtgcacattttctcaatttggttgtcagtgatgcaatgaagacagagtgcctttcagaaattattttcaagacgaaagaagtgaccaacgaaatgccggacttttgtgcttgtcaaagcggcctcgcctggcagagatggaaacaatacctgcttctcagcaaataagcaattatatccaataactaatgaatttcagctgtcgcgcgaggtgtcaacggcgtcagtgattttgccgactcttaaacgacttcatgtttttttgcaagagggaaaatttccagaaattattcaaccgtttatcgacagtttggtggactcattaaa

SEQ ID NO: 63740 - DNA, 539 bp, Heterodera glycines
atgttcattattaatttctctgttattttatttgttttaatttcccccgttttgtcatcatttgctacaatatgcgtacgaccgaacacttttaattatgtggggcgactgtggtgtacacgcaataacattatgcacatgatttatcaagataagcccaaattgcagatgaagaaagtggaagatattcatgcattgccttctgggtggatttaggcatttgtgatcagaatgacacgaacgcaatgatccaaatcatcaaagcagataccaatgaaacggttggtattgcaaatggatgtgatttatgtaattagtagggctctaatttttagttttttacccattttttcctgctgaactctccgtgtggcctgaaacgcacgaaaaacaattgtttttttggtgtgttgttaagctacttttcgagttattagttcctattttcggtttttatttcttagagcctaaaaagaaatttaaaaacttattttaacctattttggcgttttgcccaaatttattaacaaacaggcaaa

SEQ ID NO: 63741 - DNA, 1074 bp, Heterodera glycines
atgttcatcgttttaccaagtatttatatgctttttgcgacccgaattttcattaatttattttcggatgactctttccaattttttttttttggatgattcgttttgcgcaattcgtcgctgacgtcattgaatgcttttacacctagcaatttcctagaatattttttggagtacctaatttgtttttaataaaatttaatatatttttttaaataaaatgcattgatttccttaaatccgaaaattattattttttattgggtttttggaaattaaaatggaaaataaataaatgtttaattatgtttttaatttgattttctcactaataattgatataaataattatttttcttttctttaattttcattaatcagtttatttttttaaagaatttcatatttaacatatattcatgtaaataaagattgaaaacccgaaaaattttgaattttttgtaagaacttttgagaaaaaaatagttgatataagaaaaatgtcttttgttttagcataatgataaaaattttaaaaattctagattgcatatataaatttaaaaaatcaaaatttttttgaagttatctaaaaacgctggtgtttttatgtatttttataacaatttttgcatttttgagggttcaaagctatttttggcagtttttaacgcatattttagtgaatatttgggcgtttttcgtgtttttaggtcatatttgggggatttttagtgcatattttatgcgcatatttggcattttttagtgaatccaacctataactctagtgatgataatagatatttaagcaattcaatattttaaaaaaaattaattttaaaaaatttaaaattaagtttaacatttttacggtcgatcggttactgataattggaattgcaaaaactttgccccattttagcaaattggaattgaccgataaggtaattttcgaacttgtaaattaaagtaaattagaaggtatccaattataaaaaacatgatatgtcgatacattaacgaacgacccacggacaaaggaattaattaaaaaaaaaatattttttttaa

SEQ ID NO: 63742 - DNA, 790 bp, Heterodera glycines
atgcccgctgcgagggcaccccgccaaagggtcctctacatgctggtattttttatttttttaatagagccaccccctggcctgcagaaaatggcaactgaagcgtgctcaaaaagtacacttcagtaccaggcgaataccgcgtcggcgtttgatctgagagaaaagtgcccagcgaacttattgtagagctttgaaagctcgatttttcaaaatttaaaaatttcgaaaattttcaaaaattttcgagttaggcctaaaaaacggttttcgggtttttgaattttaggattttttaacgatttttcccagagaaacggagaccacttccaaaacatagtttttcgagctctatcgattggtatttttttcggaaaaatttcgattttttcccggaaatagaaaaaaattttggcctcagcgggacatttgagtcctgggcccataactcgtcaggggttggttttagcgaaaaattgtattagaacatttttgtagagaattttaaatgctatcgaatggtgtgcttaatgactggaaaatttcaaaaattttcgagctaggccccctagaaattttcggaaattttttttcggacgaaaatgggggtgaaaaatatttttctggggtaaaataaggtgctgagtacgaatataatgtctattttaagtttcataatttttggaattttttaaaaattctttattttttggcaattttttggccttggaaatttgggttaatattggaaaattcataactcggtgatggtttcatcgatttaactata

SEQ ID NO: 63743 - DNA, 600 bp, Heterodera glycines
gacgacctgcgctttttgtattcgcccgaacattcgctgtcccgtttcgaataccaaattcacaaggaattcagcggagactccgtcaacaggtcattctcccccccccctaattgcttttattttgatcattaattggctttttgttcagctcttacattgccatcgcattggaagcggcaccgcctttggcgggtgtcgatgactcatcagtggaagacgcggcaaatttggtaaattttctgttaatttttaaaatttttctattcattgtaaataccaattcttttgcattattaattaattgtttagcaaaatgttgcagcaaatggcgccgcttcgcccccgtggtggaaaaatatgctgcggagagaagtggcgaacgcaattcaggcggacaaattttaaattggaataaataatcaaaatctatgctttaatcaatttcagggcacaatgaatgccattctgcacaatatgacggtcgaattgccggacggaagttaccattttggcaacgacatttgcgcacggatggcactttgtccgattagcaattcgccggttcaacttttttacgacgcctatttcagcgaaaag

SEQ ID NO: 63744 - DNA, 715 bp, Heterodera glycines
atggtgctcaagggcaaaggaattaaacgcctggagcagccgggctatggtgaccaaatactcaacatcaaagtgaatgtgccgaagtgagttttttttttgcgtaaatttggagtggctcttgatgatgatttggacatatttgatttcctcactatttttcattgacccctggggctgaaaattcgggaccaccagcaaaaagatgccccttcctatcccctctccatcctataaaaatggaatgttttgatttgatcgtccgttgtcaactgatttttgcggcgcctcatgttccttaacaccacaggcatctaacggctcgtcaacgtacactgatgctggagtttgccaagttggaagcgggacggcgcggcaccgtggacgggttggacagtggtggcggcaaaggaggaggcgcagcagcaaatgaccaagcggaagagccggaagaaatgccagcagcaggcacaaaaaagaagggcactaatggtggcggcggcgaagacaaagggggcgctggtttcaaatggtccaaattcttttgataattatgcccgcgcgcaacaaattttcatccatttttgctccacacagatcacaatttccatccagtgtttgattgaaaattatcgtcgtcctcctgttttgtgtttttgttaaattgttctacaatatatacaacattttactattttacacatattacaataaa

SEQ ID NO: 63745 - DNA, 465 bp, Heterodera glycines
ggtccccctaaagcagaggaatttgatgcaacaggtgccgatacggaaacagaagaatcattaacatataatttcccaacgtttgtctcaattagacgagcctataatagacgaagacaacaaaaacatggaatttcaactgatccttatgagatacctgcacaattattattaacaagacaaggagcaattaaattagctttaaataaaccattgtcaaaggatgacaagttaattttctttgaattaatagctaattaagttattataaaaataaatgtttaagctgggtaatctatagaaatagagatgaaggaattataatttttgataccaaaacggcagaattgctttcggcactagcaataggagcagcgatcgcaacgctcttaactccaattgtggtcgggtctgttgcaattggttacgttattgcatacaacgtgcataaaaacaatgaaaaac

SEQ ID NO: 63746 - DNA, 576 bp, Heterodera glycines
gtaattgtccatttcgatctgaaaggagctgcaccaaagccacattatattaaagaattattaccgttcattaagaaattgggatttactgaaattcttatggagtatgaagtacaggaaattgtaattttattatttttaaatatttttttaatttaaggacatgttcccatactcttttgggttgtcggttttaagacgaaagactgcttttgatgaaatgactaccaagcagcttaaagaggttgtgtatcttcattaaatattgctgttatttttggcactagttaaaagaaggacatttttgaaaattatcaaaaacaataggggggagggacccttttgttttgcaaaaaaattttgtgataaaaaaccgttaaaatttgttctccgggggtttagggtcgctatcacgaatttgacatctattttgaccaatttctaaacccgaacaaaaatcaaaatttgaatttttcgatttatgattttttgttcaaatttaggttaggaaatgggaattgatcaaaatagttgacagattcgtgatcgggaaccccgaaaaccccgttgaataaa

SEQ ID NO: 63747 - DNA, 74 bp, Heterodera glycines
tttctcggaattttttggggtcatttatttccataatatttttcggtaataaattccatgaattaataacccta

SEQ ID NO: 63748 - DNA, 434 bp, Heterodera glycines
atggaaccgggatttgccagcccttggatgtttaagtttttaggtttgaaataagggaataaaaaatcacataatattttcagaatttggaaacaatttacaaggaaaattacggaatttgttatggtttatgacataaaaattaatttacacgacagagataatgttgtcaaattacaatcactaattcacaatcagtttcaagctccatgttttaatgattggctagtttttgcttggaaaaaagctgggtactacggtgatgacacattgccaaatttttgtcaccccaacaaatatgcgttcgatgtgccaaaagaaagatatttgcgaaaaatttaattgtgaaaatattattttattgagatgtgcctattgcaaaatgtatttgtgttttaaatattttttgacgattatcacatatgtgaaaatga

SEQ ID NO: 63749 - DNA, 71 bp, Heterodera glycines
gttttgcgtgcgtttcaggccacggggagctcaggaaaaaaataggcttttgcctaaaaattggaacccta

SEQ ID NO: 63750 - DNA, 864 bp, Heterodera glycines
atggataaagaaaaggtggtttactgtaaaaaatggtgttaattcgcgtgcaggatctataaataaattaatattattttaatcattaaaaatattttagttatataaatgataaatcgaaatttattaatgctatgataaaaaaatcatttgataatggattcaacagaaacggaaaaattagcactttgtggaaaatattttacttacagatttgaaggtttcagacgcggtgtagaatcttaaaaaattaatattatttaaatcttttataagatttacgcgatacaaattaaggaaatagtaaagttcaagtgattttgatagaaaatggaaatgaaaatgtggtttattgaaaaaaaatggtgttaattcgcgtgcagaatctataaataaattaatattattttaatcattaaaaatattttagttatataaatgataaatcgaaatttattaatgctctgataaaaaaagcatttgataatggattcaacagttcaaatgatgcgacgtttttcgcccgaaaaactgcaaccggcgataacagaagaaaagaggaatgaagtgaaaaatgttgggaatatggcaatggaagagggctacgaagaggaactgatggcactataacagtgaaagaagcgccaggaaaaccaccattatggtcccatttgttgttaatgttgttgtttatgtttattgttatatataaacaaataataatatgagaaaggcaacagagatggacagcaaagaacctaaatacgatatgacaaatgccatctggtccctcctgttcgcagcgtcacaagaaacgcaaggcccacatgccaagcacaccaacggtcaatccgaacctgaaca

SEQ ID NO: 63751 - DNA, 129 bp, Heterodera glycines
gttcggattgaccgttggtgtgcttggcatgtgggccttgcgtttcttgtgacgctgcgaacaggagggaccagatggcatttgtcatatcgtatttaggttctttgctgtccatctctgttgcctttc

SEQ ID NO: 63752 - DNA, 812 bp, Heterodera glycines
atgccttatggtgttgcgtcagcgccagccatttttcaacaagtgatggaagacgtccttcgtggaatcgacggagtcgccgtctacttggatgatattgtggtgacagcccccaacgacgcggaacatttgaaaaggctggaaatgactctccaacgcatccaaaaatttggattgcgtgtcaaaaaggaaaatgttcctttatgaaaaaccaaattgcttatttggggcacatcatcgacaaagaagggatcgaacgtcgccggacaaagttgaggccatacagaaaattccagcccccaaaaacttaaaggaattgaaatccttcttgggcatggttgggtattatcgcaagttcattccgtcaatggcaacaatttcggagccgttgaacgagctacgccgatcagagaccaaatggcattggggacaacaacagcaaaaatcattcgaacagatcaaaattatgctgtcgtcgaacgagctgttggcccattttgatcccaaaaagccactttatttggcaacggatgcatctgactacggagtcggagcgatccttttccacaaagatggaacaactggaaagtttggcgtgatcgcgtacgcttcaagaactttgagcccagccgaaagaaattatgcgcagatcgaaaaagaaggacgcgcagtaatcttcggagtggagaaattcaaccagtacttgtacggtagaaaattcattctacagacttatcacgagcctttaaaaaggatttttggaccaaaaggcgagctgcccgtggttgcggcacgaagacttcatcgttgga

SEQ ID NO: 63753 - DNA, 565 bp, Heterodera glycines
  unsure (1)..(565): unsure at all n locations
actcccattttgcgcaacaggtgactccgaagtgcagcgcacaatgctcgaattgcttaaccaactcgacggttttgagcctaccaaaaacatcaaagtgataatggcaacgaatcggatcgacattttggacccggcactgctcaggccaggtcggtgccaaagctgccaatgtttgtataattttatgaaattgctaaggtcggattgatcgtaaaatcgaatttcctgcacccgacgagaaagccagactggacatcctgaagatccattccagaaaaatganatttgatgcgtggcataaacatgagcaaaattgccgaaactattcctggcgcctcgggggcagaagttaaggcgagtgtggccatgggggatggctaattgatacggctaatcactgtaccttcgtcccttcccttttaaggccgtttgcactgaggcgggaatgttcgcattgcgcgaacgtcggatacacgtgacgcaggaggacttcgaaatggcagtgggcaaagtgatggccaaggacggggagaaggacatgtcgctgaggaaattgttcaaa

SEQ ID NO: 63754 - DNA, 57 bp, Heterodera glycines
atgagcacgatttcctgtcaaaggcagccattgcggacgcaattcgagcagttcaca

SEQ ID NO: 63755 - DNA, 2571 bp, Heterodera glycines
atggctctctttagagcccgcagtgacaagacgccgacccacgccgggataccagcccctgatgaggtccgagagggagggtgcggccaaaaccgaaccaatcccgcggccccccgtggtaaggcggtagcgattcaaaggcaaaacggtataactattcctataaatgcctgcgctcaatccggcctagtccggacccagagggttcagcagtggtcagccgtggaggagtccgctttaaaggatgtagtggtgcgaaacacagacgaccgggggctcattaattgggccaaaggtgtgctccctgaatggcaaagattgtgccagctcaacccgaccatgtacatggctcgatcgtctccatcgctgtccaataagtgggcatctctgcggcggacccatgttggtcctggatgcccttcgaaagaaggctccgggccctcacaagacctttcagatgtaaaaatccaaccagccaggttggcccatgatacggtggccgagctacctcaacgtactgtcccttgtggcacagacggtcatggtgtaatcgattccgatgagaccgagactgccttagctgaggtatcccggtcgagtccctttggagaacgcgagccgctcgacttaggggcgacagagaggatcacgcgtaagcggctgcgcaacgccgttcgcgatgtggttccacctcggaaacgcagggttccatccacctcttcacgtaaggaacaagatttggttccagaggtggacaggcctgcacctacggatgtgttgacacacccacccacagaatccgaaccagaaccgatgcttgacccactctcacttgtccaactggtaaagccgcaattaggccgggcaatgggatgggcagccgaggagatggaactcgggaatgtcgtgatggacgtagagctgaagagggagttcaaccgggaggtgaggcgtgtcggaagaacgcctcccgaccaaatgtataagcgtggcgcaggtccaccactcccacagaaacgagagcccgaacgagtagccctactcgagcaactcattgtggcgcgcgtggagcgtgacatcaacaggggacttgattggttccttgaactgaatgtcgcggtctttgcagccgctagggttctgagccgccgggagagagtggaaactcttgctgatcggctgcacatcaacgattctgccactctgtccgaagtatccagacggcgagctaaagccgaaaggaaactccggtgtgcccgggaacaaccatggatgagcaggcggatcaggatacttggtgtgagggtcgagagactcaaacaactagctgacctggtccggcaaagaatagctgggagaggtaatagatcgtcttatgaaggccctaggcggagattccgactaagaccttctttacgttctgttactgaagcacctgtcaatccaccccttaacgggaatgaagtttacacgttctggcatagcctttgggcgcagagcctccgtgctaacacggatgactgtcaactgagggaattcaaaaaccagctttctgctgcgcgacacacggatctgacgaacgtcggaaccagctcattggttcagatgttcagcgcggcccttcggaaaatgaagaagggcaaagctcccggtcctgatggtatccgtgccgcgtggtggggagtgttccggcgaattgcaccgtatgtggctacgtgggtggtccaagtaatacgaggggcagaaccagtagctaactggatctgcaatgggctcactgtcctgctgcctaagagtagtgacaatgccgaccctagtaactaccggccaatcacatgcctaaatacatgctacaaactcttcactgccgttatcgcacaaataaccgcaagttacgttgatgttcttggtggcctacctagacaacaagtagcactgcgaaaaggcgtttggggcacctctgtgtccctgatgatcgatgcgctaacggtggctgacgcgagaagagctaaacgcccacttggagtctgctggttcgacttcaagaaagcgtttgactcagtaccgcacaacttaattcgctggatcctgagagtcatcggactccccccggtcatcttgtctgtcattgtctctgtgatggatcaatgggtaacgaggttaaagataggtggaaaggtcatgcccaagaccatcccggtgcgaaccggcgtattccaaggggacaccctatcgcccctgcttttctgcctatctgtttggccaatctcgttcgccctagaccaatttcctcagtatcagtttcgttgtgcaaaccatcttcagcagggctttagtgtcggacacgtgttttacatggacgacctgaaatgctattgcccagacagggaagtgttgacagcagttattcagcaggtgcagaagagcgcttctgccctcggtctgacgatccactacaagaaatctgcgtggctcgaccaggacggcgggaaaagtggcaaagccgtcttgggtgtaccagaacttgtcggcacttacaagtacctgggaatgcacgagagattcatgatt

SEQ ID NO: 63756 - DNA, 477 bp, Heterodera glycines
aaccaatcaagtcccctgttgatgtcacgctccacgcgcgccacaatgagttgctcgagtagggctactcgttcgggctctcgtttctgtgggagtggtggacctgcgccacgcttatacatttggtcgggaggcgttcttccgacacgcctcacctcccggttgaactccctcttcagctctacgtccatcacgacattcccgagttccatctcctcggctgcccatcccattgcccggcctaattgcggctttaccagttggacaagtgagagtgggtcaagcatcggttctggttcggattctgtgggtgggtgtgtcaacacatccgtaggtgcaggcctgtccacctctggaaccaaatcttgttccttacgtgaagaggtggatggaaccctgcgtttccgaggtggaaccacatcgcgaacggcgttgcgcagccgcttacgcgtgatcctctctgtcgcccctaagtcg

SEQ ID NO: 63757 - DNA, 1837 bp, Heterodera glycines
cgccttaccacggggggccgcgggattggttcggttttggccgcaccctccctctcggacctcatcaggggctggtatcccggcgtgggtcggcgtcttgtcactgcgggctctaaagagagccatttgggttaaggtttctctttccaaatcacaggatatcatttcgctttgatcgcttttcaaatgtattggttagaccgtatacaagtgatcttgcgccaccccagctccaagggtggcgcgccaagctagtaaggccagccccagctcaaagggtcgtaccccaagctagcaaggccggccccagctcaaggtggtaccccaagctagcaaggtaaaaaagagtggtgatcctccactcctgcgatcagcgagggaggagttgcacaggctccatcctgcgcgcagtgcaagactctggcttcaagaatccgcacgtgggagacacacgtgtggtcgcaaggtccttcatagccggagcttttacggccctttctcgtgccctgcttactagcatattactctatgctacctgttagcaagcaggttggtacactcggccatccgaaccccactagctcacagttctgaaaccagcaacgcagccttcgcctacgagggctagggctttcggtgcgtgtgggattacacgagactgtcatgttcctaaccagtgcgagccaacaccagaaaggggcctggacttaggttcaagttacagggtgaggctggagtctccatggccattccccttcgggctcgttatgacagcttcgacgtggtgcagcggggtaacacacggatgcccccgagctcactccgaagtgagtctgtccgtgccattcggcccgaccatttttaggtttcacgaaataccgccctgtaatctttcgccatatccgggaagaactgtcaagctcaacagaaatactggacccgcagctaagaaggcccagacgtttttggccgatgggaaggtaacccagcgccctcggattagcgcaacccgtgcagcacctagggactttcgcgacctgtaggccaactcctaccaggctccccggaggttccgagtatcgccacactcgtgcgcgtcggtagttagccgacgaggcatttggctaccttaagagagtcatagttactcccgccgtttacccgcgcttaatcaagtttccttggcttaacattcagagcactgggcagaaatcagacacggtcaacgtccacaaggaccatccgtctcctctgttttaattagacagtcggattccccgagttcgtgccagttctaaactggtcgttcagcgccaaccgaagtgcataccctgacgagcatacacgcagctgaagcgctccacaagcagctctcaccactagtccacgcaccatccccgaaagaacagcacacagccacgggcaaaagccgcctgtttcacgcaacagcccggctgacccgacctttagagccaattcttttcccgaagttacgaatctaatttgccgacttcccttacctacattattctatcgactagaggctgttcaccttggagacctgctgcggatatcggtacgatcaggcaggagattcaaatagcttccctcgcattttcaagggccgtgtggagcgcacgagacaccacaggaaccgcggtgctttacgggcgcaacatccctatctcaggctgagccacttccaggcacgcacaccctaaaccagaaaagagaactctggctcggactccacaaaacgtctgcgagttcatttgcgttaccgcgcaaaacatagggagagaaccgtcatttccctagcctggcgtgggaatgttaa

SEQ ID NO: 63758 - DNA, 749 bp, Heterodera glycines
ttaacattcccacgccaggctagggaaatgacggttctctccctatgttttgcgcggtaacgcaaatgaactcgcagacgttttgtggagtccgagccagagttctcttttctggtttagggtgtgcgtgcctggaagtggctcagcctgagatagggatgttgcgcccgtaaagcaccgcggttcctgtggtgtctcgtgcgctccacacggcccttgaaaatgcgagggaagctatttgaatctcctgcctgatcgtaccgatatccgcagcaggtctccaaggtgaacagcctctagtcgatagaataatgtaggtaagggaagtcggcaaattagattcgtaacttcgggaaaagaattggctctaaaggtcgggtcagccgggctgttgcgtgaaacaggcggcttttgcccgtggctgtgtgctgttctttcggggatggtgcgtggactagtggtgagagctgcttgtggagcgcttcagctgcgtgtatgctcgtcagggtatgcacttcggttggcgctgaacgaccagtttagaactggcacgaactcggggaatccgactgtctaattaaaacagaggagacggatggtccttgtggacgttgaccgtgtctgatttctgcccagtgctctgaatgttaagccaaggaaacttgattaagcgcgggtaaacggcgggagtaactatgactctcttaaggtagccaaatgcctcgtcggctaactaccgacgcgcacga

SEQ ID NO: 63759 - DNA, 232 bp, Heterodera glycines
actttacgaggaaattgtgcaaaatgaattgagcacattcagcgaagacacaacacttaaattggaagagggaggaggagcagcacaaaacattgcatcatttggacaatcggacaaaagggaacagcacaaagacaaagaggacgaaaaacggacaaaaggcaacggaaaacgcaaagacaaattggtagggaaaagcaaggacaaatggaaaaaggcgttgattatttga

SEQ ID NO: 63760 - DNA, 622 bp, Heterodera glycines
atgaaagacgtgagagaagcgaccgatcggctgacagatcgaattgaacaagcacagaagaattacgcgtactttcaggtgggccaaggaaaagcgtttggtcaaatggtcaaataaacttttgccaatttgaaaatgccataggaatttcgtcgtcttatgttttggtctcgccaaatgtttgcgacaattaccggcgaattgctgccgcgcgaccccccggggtgcgaagcgctgttggcacggcacgcggagtacagacgcgagttggagacgaaggaggcggaaaaggcgaatttcgtgcggaaaggcattgaaatggtcgccgcgggaaattcgctgggggccgaaattcggacgcgactcgaaactttggaaaaaacattcacacatttggcacagacatggacaaaacggcaaaaggcaccacaaaatcaatgggaaaaccattgtgactaattggccatttgaggtgtacgaagagaattcggacgtacaaaaatggatggcaaatgccaacgaattggagcggtggctgtcagagagggagcaattccttcgcgacgattggcattcgggcgcgaccgcagaaaatgtcgaaggcgtcgaacttcggattcgg

SEQ ID NO: 63761 - DNA, 1876 bp, Heterodera glycines
atggtgtttggcagaaaattcactctgctcaccgatcacaaaccgctgctggccatctttggttccaagaagggcataccgatttatgccgcgagccgactgcaaagatgggccttaattttgtcaaattacgagttcgacatcaaatatgtcaacacagcagcatttggacaagccgacgtcctttcccggctaattgcaaattacccaaggccagaagaagacattttgattgcaaacatttgcacagaaacggaatgcttcatcaacagtgtattccaagtccaaattgatcaattgccattgacagcggctgagattgcggatgcaacagccaaagacgaaattctctcagaaatttcgagactgtcaaagaatggttggccaaacaaatgcaacgacccaaacatcgctccattctttccgaaacgagacgaaatcgtggaagtggaaggttgtttgctgtaccaacagcgcgtcatcatcccaggaattttacgggatcgagcattgaaggctttacatttgtcacatccaggaattgtgcgaatgaaagcgctcggacgccgtcacatttattggccaggattggattcggaaattgagaaaaccgtcaaatcctgtgaagaatgccaaaacgcacagaaaaatccgacaaaaagcacacttgctccatggacgccaacaagcaaagtcttcgaaagagttcacattgattttgctggtccatgcgacgacggatttatgtattttattatggtggactcctactcaaaatggcccgaagtctgccaaatgaagagcataaattctcaggccacggttggtttcctccgatcgatcatttacagactgggagtcccggaagaaattgtgtcagacaatggaacacaatttcattccgccgattttgccaaattttgcacagaattcggcatcaaacacactttcaccccgccataccatccacaatcgaacggacaggcagaaagattcgtcgacacgttcaagcgtgcaatgaagaagtcttcgaaaaacgacaaagattgggccgagaaagcgctcctttcttatcggacgactcccaacgcgacatcgaacggctactcacctgatcagttattctttggacggaagctccgtaccaaaatgtcgcttgttcacctgaggggagagccaattgagcatattgatcatgaactgatcagacaggcgaaaaaggaatatgcttcaaaaatgtctaatcaatttgacaagaagcacggagcaaaacgcactgattttggtccgggtgaccccgttttactcctcaattacaggaacaacaaatcccactggctgcagggcacaattttggaaagggttaaaaattccccaacttttcgagtcgaagtaccgatcttgggaggaagaattgtccaccggcacacaaatcagctgcgccgacgtttcatcttcgaagatgaacaaaaagtgatcggaatcaaccgattcacattgatcgtggacaaaatgatgagcaacagcaacaacccgagcagccagctgatgatgttccccaattggcagtgcgcagatcagaacggatcgtcaagccgcggcaattttactcgcccagcccgatcaagaagcgccgccgccactgatcaggagtgattagaatttaagaagggaggtgttagagatagtgaccattgacatttgtgatctctgaccctttgtttgtcccttcttccctcccccatttctgtctatttaatgttgactcccttccccacatttggacttccttcattcattctccaattttattgtggcataaagccaatcgatattcgcctctctccgtcaccaatttattattttattttcttca

SEQ ID NO: 63762 - DNA, 1428 bp, Heterodera glycines
atgtggggcgtggcaaatcgatggatggataatgaagcaggttagtgccatgccgtggatgaatgaatggccatgcaatgccaaaattgggcggggaaaggcgaatttgtggccaaattaaaatgtggggctgtggcaaaatcgatggatgataatgtgatcgctacagtgaggcagactagtgccattgtgttaaatgggaaataatctggctcttttatactccactcactcaaatttttgcgtcaaaggtactcactcggccgcttcgcggcctcgcactcttcttttggcattttcttatggcataacagttcttccttgtttcttgactttttcttacgcacaacatttttcttctatacaaatttttcaaacaaattctcattcattcatttaaaatttcattactatatacgttatattgacaaggagtttcgtttcaaaaactaatttgagcttaacggctaatgggacgggtctgaaagtagtggaagggtcttacaactttttgaggagaatccgggaaaactatagaaaaaaattcagcgcggacgactgagtcccggggaccgatttctcactttttcttgcgtttgacggcccataactttttttctgaaaatcggatcaaaaaattcccgctgtgagggccctaagtgaaaatgttgcctaaaagttaaaaaaaattctaggcctctagctctaaccccctgggctgggtgcttctagaacttttcagtaccaactttgtccagttcagtccccgttgaataactcattaggctttgacctgagcgcagggtggccagcagacttattgtagagctttaaaagcccgatttttccaaattttaaaatttcgaaaattttcaaaatttttcgagctaggcctaaaaatcggttttcgggtttttgaattttaggattttttaacgatttttcccagagaaacgaagaccacttccaaaacatagtttttcgagctctatcgattggtaatttttttggaaaaatttcgattttttcccggaaatagaaaaaatttttggcctcagcgggacatttgagtcctgggcccataactcgtcaggggttgattttagcgaaaaattgtcttagaacatttttgtagagcattttaaatgctatcgaatggtgtactacatgatgtaaaattttcggaaattttcgagctaggccccctagaaattttcggaaattttttttcggacgaaaatgggggtgaaaaatatttttctggggtaaaataaggtgctgagtacgaatatgatgtctattttaagtttcataatttttggaattttttaaaaattctttattttttggcaattttttggcccttggaaatttgggctaatattggaaaattcatatctagcctaagggttgactaattttgagcaa

SEQ ID NO: 63763 - DNA, 1110 bp, Heterodera glycines
atggtagcagcaacgagtcagagaagagaaaatagtaaggaaattgaagagaaaattttattttttttattcaaaacaatcagaagaggtacaacagtgattagaagaggtacaacagtgattaaaagaggtaaaaaagtgattagaagaggtacaacagtgattaaaagaggtacaaaagtgatcagaagaggtacaacagtgattaaaagaggtacaaaagtgatcagaagaggtacaacagtgattaaaagaggtacaaaagtgattaaaataggtacaacagtgattaaaagaggtacaaaagtgataaattaaacgcactgaaaaataacacaaaaataaatagaaaaatttaaaagtggtacaacagtgattagtaaattcattaaattaaaatgaaaatattttttaacaaatttaatttaaaaaatacatgaaattctatcaattaaaaaaataattaattatacttataaaatttatttatcaaaaaaaaaattttattaattgaatatttatttaatttgaaattaaattaattttttttcaaattcaaaaataaataatgaaattctttaatttaaaaaaaataaatttaaataatttaaaagaaatcttcaaattaattaaaaacagtcaaaataacccaaaaatgcatagaaaataatgtacaccgcccggattcgaacttcccccccccctcaaaatgatgtctcagaatccccaatcacacagggattctgaggtcttgactatgttaaaagtaaaatcttatcacgtattcgtgatcagcggcccaaataacccctaaagacatattttttgaagatttttggtgaaaaaatttttcaactcaaaaatcctatgctcacccctttggacccgaatcacaaaatcacttttatttttatatctttttttaaaaatgtgataaaaatgtaaaataaaatttatattatagagaaaaaaattgcggatttttgtagtattttacttttctcaaatagcttttcagaaggcagttacgaatttttttctgaaaaatctaaaatttccagaatttctggaataacttttttcatgttgatgttagaaaacctaaataaa

SEQ ID NO: 63764 - DNA, 1899 bp, Heterodera glycines
atgttgtgcgaaattttggaacgcgacgaattgcaaatccgtgaagaaatttcaatgtggaatgcagtaaatttttttaaatttaaaaatgttacaaatttatttttaaaataagtccgaatctttttcggactattttataaaattattatattcaccagcctttccatatttacagttttcaactcttcctcaaattggcactgtttcggcccgtttcgaagcgctggtggacaaacattttgatgacaggacgattttttttataattccggcaagtttttttttttttttgtttttttctgttcttttttgtttttgtttttgggttatggtcccaaaagccttaacagccccaaattttcaaaattcttaataaaataaaaattttggaaattcaagaaaatttatttgtaaaagtgaatagttttttatgtgtttttttgaaggattttatgcgtaaaatatttaatggcctccaagtaggcaagttttattgttttttttttgtgtgtaaaaatgagaatgtttcaattttgtaaattatttttttaggatttttttccaaaaaacgaacttcaattttcagaatatcaaagtggtggacattctaccctttttgaccgtccatatcttaagagaacattttttcttaaaattaaaaatcttttttttggaaattttacatttttaatttaattttttggccctttttattcattaaaaaatctttttttttggaaattttacatttttaatttaattttttggccctttttattcaattaagcctaaaaatgcattttctatgaacaaatttacatatttaactaacattttttcaaaatttcagctgggtttgcatggtgtttggatggacattctccccttttgaccgtcctcaactcggcctcaaattggcattgctttctccccgtttcaatgctccagtggacaaacatttcaacggctgaaggcgtaagtttcagtttcaaattggccatgaaaatttttctaatctctacttttgtttggattcggtatttaaaaaatttaatttgaaaattttttttgagaaattttttcgatttatgacctcagaatccctgtgtgatttgtacctcttctaatcactgttgtacctcttctgatcactgttgtagctttttttcccattttttaaataactagagcgcaaaaaaaacctttttttcagcgacgaatatcgattatattttattattcattttctcagtatacattttgttattgattcccccccccccctcccttttgttaaataattaaaaacaccaaacttccaatgcttattaagtttttcctttgtatacaattttaatctatatttcaaacattttaaataattctctctttatttttttgttttttttcagctggttttttgcaacactttggatgggcatttctgaccatcttcaactcggcccaaattggcattgctttcgccccgtttcaatgctctggtggacaaacatttcaatggcaaagcggattgctggcaagtttcaatttttctcaaagtaaccggtcaaatgtttaataagctttaaaattgtgattgcattcggcagttcaaaaattgaaaaaaggaaaaaattttctttgttgaaaaaacttattttaaaaaatttatacttcaaccatatgaaatagccggtcaaatgttttctgagctcaaaatttttgattgcattcggcaattcataattgaaaacggaaaaaattttctttgttgaaaaaatcttaaaaattgtaattttcaagcctatgaaaatcaattattgtaactttttgaaaaaccaaattcgctcaacattgtgggcttatatcaattgcatcccgtaaataatttgtgaa

SEQ ID NO: 63765 - DNA, 857 bp, Heterodera glycines
ctgggtttgccttgagtttggatggacattctccccttttgaccgtcctccactcggcctcaaattggcattgctttcgccccgtttcaatgctccagtggacaaacatttcaacggctgaaggcgtaagtttcagtttcaaattggccatgaaaatttttttgagaaattttttcgatttatgacctcagaatccctgtgtgatttgtacctcttctaatcactggtgtacctcttctgatcactgttgtagctttttccccattttttaaataactagagcgcaaaaaaaaacctttttcttcagcgacgaatatcgattatattttattattcatttctcagtataaattttgttattgattccccccctcccttttgttaaataattaaaaacaccaaactaccaatgcttattaagtttttcctttgtatacaattttaatctatatttcaaacattttagataattctctctttatttttttgttttatttcagctggttttttgcaacactttgtatgggcatttctgaccatcttcaactcggcccaaattggcattgctttcgccccgtttcaatgctctggtggacaaacatttcaatggcaaaccggattgctggcaagtttcaatttttctcaaagtaaccggtcaaatgtttaataagctctaaaattgtgattgcattcggcagttcaaaaattgaaaaaaggaaaaaattttctttgttgaaaaaatcttaaaaattgtaattttcaagcatatgaaaatcaattattgtaactttttgaaaaaccaaaatcgctcaacattgtgggcttataccaattccatcccgtaaataatttgtgaa

SEQ ID NO: 63766 - DNA, 810 bp, Heterodera glycines
atgccttcaaaacaaaagaatttgagaaagaagatgcaagatgtgtatcggcgacaggcagagcgatctgtcagtcgggataactcacccgtctcagacgggagtgcagatgggaatggagaggcatcggcgtctctccggggcaccagcaccccaagcttaagtgctttgcaaataagcacaccggcttcttccattggaagtaaaaagaggggaagacccttgagagccggagcgaagccaatcttggctactcaagaaagggtgtctctcattgacacacctcgaactgcggtcactcaaagtgaccagggttcgccgtgcaaaaaaaggggaaaggtcgccgagtgtggtcaacccatgtttgccaatgaagctattgctttgacgcctgtttcgactcaaagtcgtggagggcgtcctgccaaaaaaattagaggcccaggccgaggcagactcactgattccatgagcaaaagctctgaaatggatatcaatcttgaaaatgccccaattccggcaaccttgcacattgtgtctgaaaaaattgacttcagcactgtgccaattaatttcgccacatcgcgaaattttgcctgtaaaatttggagatgggcagcaattggcctttacgagcgtgatggcgaaacagcatttggcccacgctctggcccaagattcattgagacctgttggaacaggccaaatgaatggctaaatgacagctttattgttgcctatttagcttacattgcaagcatttcacaacgaaaaacagtagttggtggattctttggcatcgagaactga

SEQ ID NO: 63767 - DNA, 4876 bp, Heterodera glycines
atgccttctaaacaacgcaatttgaaaaagaagaagcaagatgtgtatcggcgacaggcagagcgatctgtcagtcgggataactcacccgtctcagacgggagtgcagatgggaatggagaggcatcggcgtctctccggggcaccagcaccccaagcttaagtgctttgcaaataagcacaccggcttcttccattggaagtaaaaagaggggaagacccttgagagccggagcgaagccaatcttggctactcaagaaagggtgtctctcattgacacacctcgaactgcggtcactcaaagtgaccagggttcgccgtgcaaaaaaaggggaaaggtcgccgagtgtggccaacccatgtttgccaatgaagctattgctttgacgcctgtttcgactcaaagtcgtggagggcgtcctgccaaaaaaattagaggcccaggccgaggcagactcactgattccatgagcaaaagctctgaaatggatatcaatcttgaaaatgccccaattccggcaccctcgcacattgtgtctgaaaaaattgacttcagcactgtgccaattaatttcgccacatcgcgaaattttgcctgtaaaatttggagatgggcagcaattggcctttatgagcgtgatggcgaaacagcacttggcccacgctctggcccaagattcattgagacctgttggaacaggccaaatgaatggctaaatgacagctttattgttgcctatttagcttacattgcaagcatttcacaacgaaaaacagtagttgtggattctttggcatcgagaactgatgtttctcgattttccaacgtgaagaattacactttcggctatgatccgaatgctgttcctgaagttgtgcttatgccgcttcacttcccaaatcattggactctcatcgtctacgatgttgcacatggtgcatacttccttgactcgctgcatatgagcagcttgagtgatgagagaatggcactcatccagtcaataattgctgagatagtgcccgggactgcgtcattcgctgttgaatacgtgcagcaattgacaaagcaaaatgatggtaacagctgcgggtacttcgtgtgcctgtatgctgaatcctggctgatgaacaaccgtacatttgttctgccggatttgaacatcaattatgagaagaagcgcattttatggcacataaatgagctttatggctcagatattgtgccgtttcatccaagggaaggtgtttcaacatctttcgctgttgtgtctcatcacaatggggatgtagcgcaaacttcctccaaggacatagtgccaattgaagtggatgattcagcagtacttccttcctcggaagatactgctgttcttgcgcaagcaccagtgatcggcgaaaatcaagctgacacccacggtgttgttgcggacacaattgtccagcaagaaccaatcgcgcaggctgatgatgtaatctttgtcagacctaagacgccaccaaggcgatcactgcgcgtgcaaaaaaggctttcagcttctgttagccgttcgccttcaccggcgccaaaacgacccccgccagcaaattcgctgggaatggcaatgccgatcacacggcgttgctctgcatttcacaaggggtggcaatgcgctgcagcagcagccaaacatttcccggaatattgtgactccgggaaactcggtgacaaaaaatgcgccgattgcggtgcacatctcttctcacatgaagacagtaacatttgctgccggaagggaagagttgtgctgccaatgcttaacccgcatcctgatgagctcaaagagctgattgtggggaataagcaatcccgtgaagggaaagaatttgtgcgacacatgtcgcgttataacaacctgttccaatttgcgagcgtttccgctggcaacaaaccaagccctgctggcggtccgatggccgttattcttaacggagaattccatcgccgcataagcagcatgcaggctggtacaactcagattcctggctttggccagttgtacattctggacccagtcgaggctatggaacagcgtcgaaacaaccccaggtttactggggagaaaatcacaaacgaagatgagtttgtgcagggtcaccagctaaatgagcagactcttgagatcttagaacaaatgatccaagtgcatcatcctgctgcgcaggcatataagcaggcgcgtgagcagctcactgagcttctccaacaacaaaatcaggaagagcttcgtttcttccgcatgactttgttggatagccgcagggctccagctggtcttaaagacccaaaattgcacccacaccaaataatcaccccttctacgggtgaagggatgttcgctattcatgcggaccccactggtgctcctccgcccaaaggaatttgggtagagaacaaacaagggcaattaaatgaaattgctcctttcagtccgtggactgatagtcttacgtatccattaatcaagccaatgggcgatgatggatacacaactggcattaaatatgctaagccaccatcgcgtaagcgaaaaggtgctcagaatgcatctggcctatttgactcggaagccgagtcagataatgagtcgtgcgagactcagtcaattgcatcatctgatgcggggtcagtcgcagattcagatgctgaatctgtagcatctgtttcatcgcagcaccggcggattgacaaatccaaacaatttatctccctgcgagattattgcaagtattatctcgcaataagggatgaaaatgtggagttgcaataccaccacattctttcatgtggtggaggacttggtcagcgctggatccttgaccaggctgcaaaaattgattggcaaatagcaacatttttgcgtagacctgacatggatctgcggatcagcactccaaaaaatctgctgcagtatttggtcaaccaatacaacaggcagcaagcacggcaaaaccccaatgcccaacagaaaactgttgatgacattggcagtgttgttcggctttccgaacacaacgtaaattctctccaatattggaagaaaatgtatgaagattgcaacaccgtttttgcacggtgccatgacgcgaagaaagcgcgtctcttcattactttcacgaacaacagggaatggcctgagttcaaagagaatttacacaaaaacggtcaagtatttactgaccgttttgacatgtggatgcgtgtctggagcagcaaaatcgctgagttccgagaagaactttatgacaaaaagttcttcggaacaatccttggttacggtgaatcaatggagttccaaggccgaggaggcccacatgcccacattgtggcgcaaacagacctggacgcagttccatatgtcattcaggaatacatatgggcgcacattccatctttgcctgataaagatgacgacacgcccattgcaaaaatgcatcgcgaaatccgcgaaacaatgcatatgcaactgcacagatgcagtgacagttggtgtggtcctagcgacccaatttacgggcggtgcaagaaggggttcccagccccttactcaaaatgtacgattttgcgcccggacaggcccgcgatgtatttccggccttcaccaactgatggtggtgcccaattagaggtaaacggcttaatatacgacaactcacatgtcgtgccgtataatccttatattctgctacgttaccgagtacaccataatgtactgtttgcatatggtaacaaagcaaatattaaatacgcactcaagtaccctttcaaagggccaggacattgttatgtcgagtgcaaagaagagtccggcaataaaattggaattgatgagccggctcaatatgccaagatgaacttccgtggtgcaacggaagcatatgccattgttcattcaatgccatttgcccgtctttcgcatcatgttgtcaaattggcaattcatttgccaaaccaacagcccattgtatatagggcattccagctggtgagcaaagctcaacaaatccagcaaggcgaactgccagaaacgcagtgttcagcctattggaaacaatggcaaaatgagtggaagaatgatccaaagtttaaggatattcttttcgaaaaagtcccagagcggttccgatgggcaaaggacaaatgggtcctgtacaaaaggcagcaaattaaaaggccacctatcggccgaattgttcctgtacccccatcggacccggaaaggttcgcgctctattcacttatgcgtcactttcctggacacccagaccatcttaagatggttaatgggttactttgtacctcattcactgaggctgcaataatgcatggtcttcttgaagacgacaaaatttgggacaaaactctggcggaggcagctctgtcgcgctggccagatcagatgagatggctctttgtgagcatcctggtctatggccagccgagtaatgccatagaattgtggaacaagtacaaagaccaaatgtacaatccacagggcattatcagtgcggctatacgccaagcacgggagcaggaagcgctagccgacattgattggcgattgcacttctttaactcaagctgcatgcactgtggcctcccagatccaccaaattcaaaagccaaaaatatcaatttggcagttgaagaagctttctttggtgatgatgatcttaatatgccgcctggccagccaaatcctaggcagcagcaaaacgctccacctccactcaacagcgaccagcaaaaggtctttgatgctgttgtgagggctattcaatcggatccgaaggatccgactgtgccacgccgtttctttattttcggcgatggag

SEQ ID NO: 63768 - DNA, 1343 bp, Heterodera glycines
gcccagcagcatcacattgacacgcgacggcaccaacagacgcaagacggtggcaacgacaacgacgaggaggggaaggaggacggagtggtgaccaacaaacggtcaaaagtggtgagtatttgtaccatttataatagatttttctccgaaaaatcgctaatttgtggatttttggagaaaagttagcgaatttttgtttggaaaactgtaccaggggaagatttcatcccaccacccatcgagaaaaattgttgaaaaaaattcatttttattcaaatctccgaattacaaccccccccccccccccctcgttcgtcgtaaggggggcggctgtaaaggagggtggggtcgtaacgcaaaaaaaaaggtcgtcgccgggcaaaattgggggccttcgtacgaaaaattggtcctggcgcacaatcgtccgcgtatgggcctcgccctggcgcaccccttgttcatgtatgcccccgaaacaaaaaaaaaatttgagttcccattttattggatttttttttaatttttggttttggcttgggagtggattgtggcgacatgaaatgaatttgtccacaaaaattgggggcattttttccattttcaacaatttggcaattatttccctcccttccccagtcggtgacacttgacgagacggaagaaatttcggtgctcgacgaagaggagggcaaggaggaggaggcagaggagggcgaactaactgatgaggaggaagaggagaaggatgaaaacgatgcggacgtgctgtttgtggacgcacgaagtcggacaacgaagaagaaaaagaagggcaaaagcggcggcgccaatgtgtcgctggaggagggcgaaattgtggacgaatcggaggaggaacagcagcagcaaatggtcgttaccaaaaaattttaaatcaaaaaagaggaaaacctgaaaaaatttggctattatctaacaataagcaaaggcattaagaatttttaaattttgcccgtcggcgccttatgcaccaacggccccaaaaattctcctaaaattttgaagacgaaaaggggcggggaggggaaggggccttcgtaatcgagggcaggcaggatttaatttaaaaaaagctcgtcggttacatggcttggacccaccctccgctttttgggatccggttcccgaccctcggagttgtaaagccgcggaacccgactaaaaaaaaatcggttatccggggcacaaatggaccggggggcatcagtcatcggagggttgacaaatgcgtttaattgctgcatccaaaaaacaaaatttggtttcatcaaactctgaaaattcaaagttgttgccga

SEQ ID NO: 63769 - DNA, 914 bp, Heterodera glycines
atggcaaattcggtcaaaatgcgggattcggatgagaaaaaaccgggatttaggagggcaggggacgaggaggagttgggattttggagtaaggaagcgcagggaaggcacacgccgtaaaataaagggaatttttgaggtcgcgaaaataatctgaaggttttccccttttcaaggcaagaaaatcaccgtcagagcccaaattgcgccggacgatcaagttgaggacatggttgtgcgtggaaatatcgacgatgtcatgagggtaaatttcaaatttatttctgaaaaaaatttgcaacacaaaaaaattgtttaaagtcgcctattttttagggtccccctgaaaaaaaaatttttttttttgaatttaacaaatgagatgcagaaaattttatggtttttctctaaagtgacaaattcttcggcatcagtgtaaaatgctgcaaaacattttttcagagtattttgaagttaaatttccttgctcatttccgatggctcaccaccgtgaaaaatcgttatcggtcaacttttttttttagtttttgcccacaactttttagaaacctaataaatttaagaaatttttcaatctaacaaagccaattctgacaaatatgaatggagtttagccttgaaactggggaatggaaaatttcttttaaaaatttttcaaaaaaaaaattggcgtaattttgtcccggcgaaatttttcggagcacccggggcgagaatggggtgggactcattgaaaaatatcgaaaaagtttagaaaaaaatagttagacttttatttactattacagatgcacatccgattcgcgtttcagtctgtcaaacgtgcatatgagggaaacggattgggacaattttttgttcacaacaaagtaattgtctcaattccgccactg

SEQ ID NO: 63770 - DNA, 1015 bp, Heterodera glycines
atgacgctgaagaagcggtcggccgtccaatttgtgtccaattgcaatgtgccgtcgggaagagatgcgctgacggcacaactccaaagactgctccaagttgatgtgtttgggaaatgcaataacaacacaaactgtaaagaagaatgctaccaaagagaacaaggtaggaatctgggaatatttggcattcatttgtcaatgtcagcgactttggcactatttttgtcgaaaatttggtattagatggtctcaataatggtgggcattgatcagttacagattcgagagctcaagagagtctcggacacgactcaagaaaagtctcggctatttttcggtctcgcatttttgatcacgatcgattttccattttcgagaccgaaaccgctatttttttacaaccctagtgcgacatttgcagaccgactttttctcatagcctaccgttgacacttccatttcctgtgccgactggaatttatttttacccggaagtcattgcgcaatcttatcaattgccacccccccccccctcattttcagagtcccactttttctactttgctttcgagaatgccgtctgcccaaattatgtgacggagaaattttggaaggcattgcgcaatttgatagtgccaattgtgttgagtagaaaagtgatggaagaagttggcattccgaatggcactttcattgcggcggacgactttaacagtgtgaaagcattggcggaatatttgaaggaattgcaaagggacaaagacaaatacatgaggtaattaattagtatgagattagggaaattgattgtccaataagggaaataattaatgattgtaagtgagggtaatttaatgagagtaattaatgccaaaagggggtaattagagggaaataattatcgtgcaggtaattaatgccaaaagggtaattgagagaaacaattattgtaaatgagggtaattaatgtcaaaagggtaattagagggaatataattgtatttttaataaa

SEQ ID NO: 63771 - DNA, 309 bp, Heterodera glycines
gttgcgatccgattcgcgtttgatgctgtcaaacggacatatgagagaagaaatttgggaaatttctttgttcaacacaaagtaattgtctccattccgccaacccagacccgcagaacgggcccttcggcatctgccgccgctgcccttgcgattctctcctgcgccgccgccagggcaaatatgacgaagatggcttttccgttagaaaagctgaatcagtttaagaagctcgatcgctggattcgaaaccagttaagccgaaagactttggccgatgtcgatgatttgttctcgttgttgatttag

SEQ ID NO: 63772 - DNA, 2140 bp, Heterodera glycines
cagccctgatatttaatatgcctaatatttttgggtgttaaaaactaaaaactgccaaaatatttaggttttcggttctaaaaacctcaaaataggtgttaaagtttcaatttaggggtataaaataacaaaatttttgaggaaatttttcattctcaggggtgtatttttgaaaattagacgaaatttatgtaaattaatctttatattcgggttcggggtccaaaatgggtgccggattcgctgcaaaagtgctggacacattaaggctgctaaatttcccgacacgaggaccaagactgagaatcccgagcagaattactggacatttgcaatgttaaatttatttcaaaaaatttttattttcgaatatacttttaattaaccacaacttttaaaaaaccaggtatatttaggctgcggtaggctgcgtagtaaaagaatttttacttttttttctaaattagttattgattttaaaaaatttgagtccaaaaatatttgagacggaaccggccctttgagtactaagacggaactggcgagacggaactggccagacggaactgacccctactgttaggctaggcctaggctttagtatatgagcacacgacaataaatcaataattaaaaattgatcgatcattcaaacaattcactgcttctgatcacttgggccgatctttgcattacgaaactggaatgtcgattctgttccattgatcataaaattgccagtcaatcgcttccttctcacattttgtccatttgctttcgtcgcgcacaattggacaacggatcagaaggaaatggccaatattgttcatccgcttcaacgtcaattcacagtttcatcgaccaaaatgtcatcgcttttctccaccgttttcatcgtcttttcgatgtctgtccaattaattttgccatcggtacgggcagtgaccgccttttggagttcattttgcgcaacatttggccaatgcttggaaaaaatatttgtgccatggattgtcctccagaattttccgccgtttgtgacaatttgtcccgtcacttctcagcgattgtccatcacttcgcgttgtcttttaccactctaacaattgcatcatcgaatgtcatttatatgataatcagtatttccttttacttcctgagcaaagtcagcataccggacctctaaaatccttaataaacattcttaaagccaaaaaaaaaaaatttgctaacttaaaaatttttcaagaaaaaaatcttaaagttttctcataagaaaattctaagaaaaaaaatattttttcagaaattttatggtgaattaccaagttttttcaaaaaattttccaaaaaattgctgaaaatttctgaaaaaatttttttcttagaattttcttatgaaaaaactttctaagatttttttcttgaaaaatttctaagttagcaattttttttttaaaattttctcgggggggaaacgatgcgggggggaaacgagctgctccccaccgccggacccctgttccacaaaaagttttttggaaaaaccgccgcaaaaaaaaactggtgtgaaaaccaacaacaaaaaaaagaggaaaaaggtcgtcgcccggggggaggtaccccaccccccaagccgaaatcctgggaccgtccctgccccctttgcgcatgtatggcgaaggccttttcaaatatttgaattgttaaaatgcgtttggatttaatttggtcccctttttctgcagcgtcaaagtccccaagctgccccggccattaaccgttgtatcatcgtgtgtccgagcagtttggtgaagaattgggacaaggaaattgccaaatggctccacggccgagtcaattctttgccaattgactcgggcaaacgcgaggacattatacgcaatttaagtacgactttttgggcggcagaagcaattgcgaattcaattgacagaacaatttgtcagtcagacgggccaaagagtgccgacgccggtgattatcatttcgtatgagacattccgactttacacggacattttgcacgagaaggaaattggcttggtgatttgtgatgaggtgggagtgatttgggaggcggagattggcacactttgccaacacttttcccctgaat

SEQ ID NO: 63773 - DNA, 310 bp, Heterodera glycines
aaaggtctctgtcacaacccggcactctctgacttaatctgtggagtcaatgaaagcatcgacagacaggtggacgctgcccgatctgctcgccatttcattcacaagcgacacaaacgatacatcctccaggatgctgtcattatgagaattttggcggacgcgtcatacaacaacaagggtgaaattcgtgatctgatgacggcgctcggtctacaaattgaaggatatgcagcaaaattgaaagatttcgtgaattttgatgattcgattgttcgtattccgtgatgaattttttattgaatgttta

SEQ ID NO: 63774 - DNA, 834 bp, Heterodera glycines
tctgttcggagtgccaatgtttgtcggcggttgtgccattctttggatttattgggaccgtttcaaaaagccaaaaaagaaaatgtaaaaataaaaataaccctttcaaaaatttgattaatttaatttttcagtttcatctccgccgactgttggctttgtgtcttcgatttgcttgagccgtcacaacttggccttggcatttcaatgatcagccaccgttttgacttttacgtcgacgaacacttcaaaacgcgcaaatggacattgggacttattcgaatttggagcaaaattggagagaatggcacgaagaaaatgaaaattgtcaataaatattggacaccattgccaattccgcaaattgaaatgccacgcaaagtcaccggattcgaacgcatcgatatcaagtaaaattggtcaattatgaagaaacaatttaggctcaattcatgttatttttagttacatcgaccaaaatgccatcgcttttctccgccgttttcgtccacttttcgccgcctgtcaaatcaatttgtccatcagtatgagaagtgatcgcatctcggaactcattttgcgcaacatttggccaatgctcgggaaaaacatccatgacattgaaatgtccgcctcatttttccatcttttgcgacaaatggcgccatcaattcttagcgattgtccatcacttcgttttgtcattttttatgccggtgatctcttcgccgaattcccatgcgatgacggtgccgcggcatcggatggacaatcggtggccaaatggcttttcactccacttcaaaacaacgtgccaaaagtgctcaactgctg

SEQ ID NO: 63775 - DNA, 323 bp, Heterodera glycines
ctgtctgtgctgcgaaaagttgcaggaaaatgtcatctgagtcaaatatggagaatttccccgtcaaattggacatggattatatcaaacggttggcacgcatcgaacggaccggccctaacacttttaggtttctttgatgaaaagggtttcgaaagaattcatttttagtgccaattttcttgtggcaggctatcgtaaggcggtgaatagggacgttttcgggggacaaatgttcgcgcaggcaattgccgcggcagaagcaacggtggacggcgacgaatttgcaccgaacgcggcccattcgatgttcattagaaaag

SEQ ID NO: 63776 - DNA, 870 bp, Heterodera glycines
atgacattctatgcttctcttgttggatacacgggaagaaataatagttagtccttttgttgaatttttagaaattttatccgtcaaatcggcttctggaattttaatgagtaaatcaggaaccgtaaatgaaattctctgcttctcttgttggatacacgggaagaaataattgttagtccttttgttgaatttttagaaattctatccgtcaaatcggcttttggaattttaatgagtaaatcagtaaccgtaaatgacattctatgcttctcttgttggatacacgggaagaaataatagttagtccttttgttgaatttttagaaattctatccgtcaaatcggcttttggaattttaatgagtaaatcagtaaccgtatagatgaaattgtatcattgtgattcatggatccaccgtaagatatgaacaattaatcctctgattgaattctaagcaaatgtatcggtcatgtgatgtatcgaaacagcaatgattaaatcgcggcacgcggcacggtctctcgaaggaatggatttaattaaattctctccttcggggatttttttccattaggtcgtccgttagcgttcgattgctatagtcaatttttcaaaatttttgttgaaatatttgtcgtgctctgaagggcgggggggaaggcccgccacgaggccgcgaagcggccgagtgagtaccttcggtgcaggaaaattattaaggaagagagttcattatttatttgttttttgcataattaattcataaatatttttttcagaacagggttctgaaacgcaccaaattttatttacatgttagtttaggcactctgatgctttttctatcaaaaagggagatgaataaa

SEQ ID NO: 63777 - DNA, 70 bp, Heterodera glycines
aatcgaacgctaacggacgacctaatggaaaaaaatccccgaaggagagaatttaattaaatccattcct

SEQ ID NO: 63778 - DNA, 428 bp, Heterodera glycines
atgacattctatgcttctcttgttggatacacgggaagaaataatagttagtccttttgttgaatttttagaaattctatccgtcaaatcggcttttggaattttaatgagtaaatcagtaaccgtaaatgacattctatgcttctcttgttggatacacgggaagaaataatagttagtccttttgttgaatttttagaaattttatccgtcaaatcggcttttggaattttaatgagtaaatcagtaaccgtaaatgacattctatgcttctcttgttggatacacgggaagaaataatagttagtccttttgttgaatttttagaaattctatccgtcgaatcggcttttggaattttaatgagtaaatcaggaaccgtaaataacattctatgcttctcttgttggatacacgggaagaaataa

SEQ ID NO: 63779 - DNA, 291 bp, Heterodera glycines
atgttgagcttcatttacattgaagatttgagcgaattgaatggagacaacgcaatggcagtgctttacgcgggtggatttattttttaattaattaattaattattttgttatttagccaataagtacaacattcctggccttgacggcccatctttacaaatttccttctccaaattgcgcaatgttttcttggcttacgcccaggccaatattttcgatttgaaggtggaatttaaaaatgatttatctccatactggtttggcgtaattttgttgattttgatataa

SEQ ID NO: 63780 - DNA, 491 bp, Heterodera glycines
cttatgaggaatggcttccactagtgttgggccgggaacgatggcttcgaagcggactcagccaagagaaaggccaacaaaagggtgggcggggagagggtaattaaaaaattaattaattaattttaaaatttaattttgaattcactgtttctgctggcgccaataagagactctcgaaaattggacataaagaaatttaaaattaattataccaaagagcagagagtaattaaaaagtaccaagtgccataattagtaattttgctatttaattgaatgaatattaattatttcatttggcaccggcaaatggctgagtattaaataaatccttgttaatccactcaatctctccaaacatttccatttggtatccaaaatcctccccaaaaaaggatgggcttatgagagaataaatttaagaaaatttaaatctttcagcagatgccgacaatgactacgacttgaatttggacggcacacactga

SEQ ID NO: 63781 - DNA, 114 bp, Heterodera glycines
atgcgacggttcagggagtgtgaaagtttggaggtgctgatcgtctacgccgcaacgcttggctacgaagcggatcggtatcgcatttggacatcggatatgccccggaaagag

SEQ ID NO: 63782 - DNA, 508 bp, Heterodera glycines
atggaatatcttgaggaaactttgtatcagtactcgttagaacccacagtaaacgactggtggggtaagttagatatagtttgcaggatttgctatttaattatttagaaatgttttttgaaaatgttgtagctgccagaaggcgtgcaaccattaaaaagtttccggctgaaagtgcggcagaagacgataaatggatgaacgaagccgacatgtttatcgcggcaaaaatgtttaaaattaatgtcatattttataagctcagcgacaacccagatcatatttggcaaatttttacgccaggcatgcaaaaaagcgtaagaatttttagaattttgttaattaaacaatttttggacggttttaagcttttaaatccggagcaagaccgtgaagtaccatctatctttatttataatgaaagtggtcgttttgaaatcattcttgaacccgagcgtttgtctcagaaatctatgacgaattaacatttaaaaattagcggaattta

SEQ ID NO: 63783 - DNA, 146 bp, Heterodera glycines
taaaattgccgaatacggtatcggctcaaaatcgcacaaaaacacttttataggttttcttaggtgctgagaacgatataaaagcttaaaattgggcgcggaaaagcatttaaaccggtttttgaaccggtttaaaactcgaaaat

SEQ ID NO: 63784 - DNA, 636 bp, Heterodera glycines
atgcaaatatggtatcattggaaagcccataaaaaatgctatccaatggtatgctacttatctgttgaaattggaaaatgacaattttatacgcaattatttttttcaaagcatgatgggacaacacttatgaccatgactgtattagggaaaaaaggattggacagagcagcagcaggagagaggagcgaattcagatgccataattcatgatgcttctcgaaaagggatgtcgtgagttacgaaacggagcagcttttttccgaccccaaatccgaaacggcattccgactaatgcctgtgtgccaacatgtcaaattccttcataaactaacacaccttatatttgttttttatttcttgtaatgaattgttagaaaataattttaagatttaaattagggggcaattaaatttttttgtaaaaattctaatggccaattttagaacaacgaacaaatgattgaaaggaaattgaaagggagcgaaagagatattatgtgtctcttttcaaaatgctctttgaaggttagagacatgagaatagcgtggtgagccgaagtgacaaaaatatcagtgagagactttcagaagagggatggggtcatttcagtacagaaaattatattaaataaa

SEQ ID NO: 63785 - DNA, 738 bp, Heterodera glycines
atgttctctaccggcaaagggaggtaaaactttgcggtaatataccgtatttactgaattagaaccacccgggggctctatttttcaataatataccgtatttactgaattagaaccacccgggggctctatttttctaccccccccccctccctcgacctccagggaggatgagaggagctggctatattttagggacgagggtctaattcagggtgaaaggtctatttctgtaagtacggtatgtttaaaaatggccaataacccgcgccggtgcgttaccgtgccgagctaggcggcaccggatttcgtctggaaactgtatatatctaaaagtattgtttaaggtgcggtatgtggtccggcggtcactcgatggtattacgactctacacaacggtagagagttgcagaaaaaacatgaataaaatgattttacttatggatttgcaaaatgcatcttatactatcactgtttcgagatttcgaataagtgtgtaaacttggggacccgtgcccggtttttttgaattgtcgggtttttattgggtttgcctgaattattattttcacttaatagacataagatttgatataaaaatccataaaattgacaattgttggtgactcatcagaaataggaacaaaatttacaatttggttccggcatcgcctatcggcaccgccgatcctctcgtgtttttttttgtttttttaaaacatacagtaaaaaataaa

SEQ ID NO: 63786 - DNA, 152 bp, Heterodera glycines
tcggcaattacattgtccaaaaatgtgtgccggaccagccaggggccagaaactattgcaaagacttcaacaacatttgccaaatgggctttttcggcatgccaattcattgctcatcttgtaagggtgatctgtgcaacgaagcgcgtaat

SEQ ID NO: 63787 - DNA, 668 bp, Heterodera glycines
atggaaagattaaaagaaggaattgaggaagaagagaaaatgaacggaaaaattcaaagaaaacagaatcaaagaaatggcgaaggaacagcgaaaggaggggaaacagaagaaatggtaaaggggggaagggaaaagagaagggacggaacttcagacggacgagcagtggcgagagttgcgcgaatggagtgcccgcagagtcagcgacgatggcggcgcgacaaagaaaaggggcgccgatgaatggccggaggaaggcgggagacacttcgaaggtgagaggggaagggggacaaacggaggggacggacggacgagggatggcattctcaaatttatttgattttgggcatttttcaatttatcctataaaatttatatgaaagaggggaggacctcttttattggaggaaagaatgaggaagggtttatggaacagtgatggccaggggacatcgtgctaagtgcggaccaagcggacgcccttctcgaggaaacatttgcacgacgacggagggccaaaaggaaattcattgggtcgaaggtgggcaatggaaagacgacaatcaattaaaaacatttaaaaaaacgaaaaaccctcaaaattacagctgaccaattgcagacgattggtttacttttgtcattttccatatgggcattaa

SEQ ID NO: 63788 - DNA, 388 bp, Heterodera glycines
gaattcagaatacacagaggaaaagctgctgttcatgaaaagggtggaggaaataattttggacaccgcgtcaccgcccaattcgacaaaacggcgacagtttgtggaggaggcggtggaccatctgaggacgcaattgggacacggtcccccacccgcggaccccgaatggacttttctgacatcgatgtaggcacatcgatagccatatggccggtgctaggtcgaaccgaaaatggtctcagtgtgaataaaaatatttaaatttaattatacgattcactaaattcatataattatataaaaaaataatagcgtgtgaatcaataattcctaatacgtataattgaatgaatttgatgcatttgcttgttcaaaattatttaaa

SEQ ID NO: 63789 - DNA, 1105 bp, Heterodera glycines
atgatgctgcccggctggacgctgttgttggtggcatattgcgtgtgtttggcacttggcattgttggcacaatgggggcaagcgcggaactgataccaagcaaaatgttcaatcacaacaacaaccacaacttcaacaacaacaatgaccagaagcaattaggggctaatgattttgcggaaaaccctcagcgacaggcgggcaacaacggaggcgacaacaacaacttgttgctggcccaaccgtcggcattccaacttcaaaaacaaatgatgatgagggcggcaatggcagcagcagccaaagtggcacaacagaaacaacggcagcaccaccaccaccacatgccgcaccataatcatcatcaccaccagcagaacaatgtggatggaagcagcaaatttggggtggtggagcaggaggagaaaagtggtgaggaattttttatgtttaatacagggatgcgatctgttctgatttatcagaaatgttctgatttgaagggtccaaatctgataaaataaaaatgttctgattttggggtagcgaccaaaatttgttctgatttcttaaacaaactcataattttaaaattttatggcctaatgtcactattttacaaaaaaaatataaaatttatggcaaaatttggtcattttttggacaaaaatctgttaacaaatcgtactaaaatcacaaatttttcccggcggcacctatcggcgccgccggatcccctgtcctccaaaatttttgggagaagggccccgcaaaaaaagcgtttttaaaagcgaaaaaaaagtcgtcgcttggtttttaattgcaaaattggcattttttggtgaaaatctgttaacaaatcagaacgaaattacaaaaaattttccggcggcgcctatcggcaccgccggaccctccccctcgcccatttcccaaaagttttttgggaaaatgcgccgcaaaaaattcttaaaaatctgattttttgatcccgagtgcactgaaatttacgatttgttaatttcctcaccaaaatttttaaagatgataattggaggcgaaaaatataatatttaatgatttttgattaaattaattgtaaaa

SEQ ID NO: 63790 - DNA, 674 bp, Heterodera glycines
ttgccaacgaaagtgaggacagatcgtgcgatgcgcgaagtcccacggagcgcctttgcctggccaaccaaacggcggtgctcggcggctttcaccatttgacgcacgactgccattgcgtgcagccgtgcaccggtacggtacatgccacagtaggcgatgccttaggcaacccaagcgtcttactgtaggcaagaaaaaaagatatgcaaaccgtacccagaaaattaacaaacgaattacccatttgggatgtactgttgccccgttcagagcatgtcttcgagacggcgtattccgcggccgcgtggcccgcgtcgaattttaacattggcggcgacgattgtgccattgttttgggcgcgaattttacgagagaaaattgcaccaaagtcaaaaaaaggggagagaaagggaatcaattggcattccgttcagtatttcgccaaaaacacggcactcatcgagatttactatgaacaacttaactatgagaaactgaaggaaacgccgggctatacggtaactaagggaatcaaaagggtacggtaacgaggggcttttcctgtttaagttggtcaatttgttctccgacttgggcggcaacattggcctgtggatcggcttctctctgatcactgtgatggaagtggtcgagctgatcttcgagtgtt

SEQ ID NO: 63791 - DNA, 359 bp, Heterodera glycines
ttcgtaagacaattttactttttgttttttggttgcaattgggttagccatttctgaaaaatgtccaaatcagaatgtacatcaaattggttaactattaaaaaataataggatttggaataagtaaaattgtaaaaaatgagcgaatgttaattaaacctaacttatgccaagtggcgagggatccctcaggcttagtttttagaatcttaatttttaaaaaagcacatttttcgatttttgggttggggcccaaacgaccccggggcccaaaaacgggggcccaaacgaccccggggcccaaaaacgggggcccaaacgcgggggcccaaaaacgggggcccaaacgctctggtccc

SEQ ID NO: 63792 - DNA, 446 bp, Heterodera glycines
atgagcctgctccagctgaagcacaaagagttggacctgaacgtcaagaacaaggccggcttcaccccgttgcatcagttcgtgatgcgtgaagatcttggtaagaacgcacggaatttatgaggtttctttaaaattggcattcaaaaaaaaagttttttttttctaaaaattttcaatttttaacaatttttgagctaaaaattaaaaagacaatcatttgccattatcctcatccacttccagggatggtgatgtgtctgctctcctacggtgccggcctcggcgagaaagcggacagtggcaaaatgacggcactgcattttgcggtgtccaagtgcaacctgcaggtcacacgcttgctgctctgcctgggcgccgacccgaacgtgaccaatgcgcacggggactcgccacggcatttggccgccaaattgaaagagtaa

SEQ ID NO: 63793 - DNA, 492 bp, Heterodera glycines
atgcggtgagtaattgcggaaatacctgaataattcggctaatttgcccaacatataatttttcttttcagttctgccttgaaatcaatcagagctcgtttaatgcctcgaatggataatgagtgagttgaatttttattttcaatttataaaaatataaggaagggattaagcgcattcggataagaataatctgatttgacataggattttccgaaatgcgatgttcaacttccgttcggggatgatgatggccatggaaagtatacaacagtacagcaataactcaaaacaaaaagatgctaattctgaagtcgacaattctgttcaaagcttaaccactacaaaacaatgattgataatttgacactgtcaccataaaatattgtattatattgcaataattaatcctgttaagactattttaatcaaattttctttctttttttaaatttttttttgcataatttccataacaaaagacaatgcaaa

SEQ ID NO: 63794 - DNA, 750 bp, Heterodera glycines
atgacttggtacggcgtcatattttgtgtggttccgttgaatatcagttccatttcaattgcacctcttttgttttttactaggtaaaatcgcataaaaataaattttaatatttggaatttaattattcttataatgaaaaataatttttttttttttttgaattaaaagaaataattaattagttaaaaattgatgatagacagaaatgttgttaataatttttctttaaacaataattagttttaaattaaaataatcaactaaaaaaattaaaaggccttatcaatttatttaattactttattttattaattataatattaaaatgccaatttttagcactgaatatcacaatgcttttacaaaagaatgggcacgattacgtgctttgttcgtcgggcttcaaccgtcaaacacaatttttgcaacaactgtacaacctttgcagccgatgataatgaaaatgaacaatcaaaatcaatcgccaactcggattgacaattttttaccaaataattaaaaatcatttagcataaatagggctaaatgtatgataatatatataattatattttgtaatcattaatgaaatgaaacatataaatatacaatttcttctttaaatacttcagacttgatgagattttctaaatgtgttgatgagttattttaaaaagcgataagacgaaaatatcatatttatttatttataacaatttgtggtttttcaataattggtttaagcca

SEQ ID NO: 63795 - DNA, 464 bp, Heterodera glycines
atggatgacattggaacaggaaatttagcatatgatgaagtgagtttttcaaattattgatattttgaaaattcccgaattaacagattggtcgtgaaattaatgagggtttacaagtgtcgggaaaaccgttggatgaaaggcttatccacttggccaaagcggaggaattaattctgaaacaagatgggacttctattcttgacaatttccttgacgagatggtacaatttatccatgaacgagaacagaaagtccgttgctttgtgatttcttttattgaaaaggcttggtaagttttgcttaactgtaaaataattaattaattgattaaagtgaaatttagcaaaaaagacacggaagtgttcaaaagagcgatagcgactttaaattgggcaatggttgaccagtcgagcggagttatcgtgcagaaaaaagtgtcactattatttttcagcatttaa

SEQ ID NO: 63796 - DNA, 1168 bp, Heterodera glycines
  unsure (1)..(1168): unsure at all n locations
atgccgaccttccgaaaggcacctcaaaaggggggagacaaagatacgacgaagaggaagaaaatagtgggagagacgaaagacggagagagctcaaggacgagtgataaggctgaagggagagagacagagggagataaacacaagcaggaaaaagagggaggaaacgaattgaaagagagaggtacagaaaacagagagaaacgagacagtgttgaaaagagtgacggtgatcagaatcagcagactgagagggaaaatgctgatcagcagaacacagagacgacgaagcagcagcaaaagggaaaagagagtgtggcaaaaggggagaacaaagaaggcagagacagcgagacagaaaaagtagacgaaaaacaaaagcaaacgccgaataaaccatcgacggtgagggatttgatgggcttaaacaattgaaaaacgaagtcatttaaactccgatttttaatcatttcaanatttggtttcagttctccgatcagaacaacggacaaaatttgttactaaatgaaattgcgacaacaacaaccgaagggcaacagaatgaagaacaaatgccaacaatgccatcgatgggaaagaagcagcagaagacgaccaaatcaaaagcaaaaacggaaacggaaacaatggcagaaaaaacgaacggaaaaagcggacattcgaagtcgaaaccgcaacagaaaaagacgacaccgacggcatattattcatccacggcatcggcacaggcacagtaccattatcagccgaacaacaataatcagcaacaacagcaattccaacaccggccagcatttgtcctccatcgttgtgcctccggcgatgggcggcggagtgtcgtcgccatttggcccatccaaattcccttcgcttcagcaatggttgctgcgtatgcgccatttttgcagaattttatgcagaacggtggtgcggcaacaacttccgcttatgcggacgcatccggtacaatttttgcactgctccaacaacagaggcaactgccgacgccgcagcaccagcagcacaaaattggccaaatgtttgtcggcaaaatgatgggaatggcatcggccgctgccgcaaatgccaggcaggcggagggaaagtgccgacgacgacgacagccgcaaaaagcaccagcaacggc

SEQ ID NO: 63797 - DNA, 302 bp, Heterodera glycines
atgcgccagacactgatgactttctttctgccgcttttcatcttcttcgcccatctgacagcgagtctcttcggtaagcaatttgagtccacaaatcatcattttaaaattatgtttattttttttatataaattttcaaggcctcaagtgcaaatttggagacgaaatgcggccagcattgatcaaaaaattcatggactccggacagtgccctcctacaacggatggacaggagacgaagcattgtgtggcaaaaatctgtacaacaggtccaccatcacccgctccaaatgggcgctga

SEQ ID NO: 63798 - DNA, 360 bp, Heterodera glycines
cacataaaaacccgggccctgcggatgaccaatgggatgttttggtgtggggatgtgctgaaacggacgctggcacttgtgccgttttggaaacaaaattatctcaagtcatgaacaacactgttgcgttctcttgcgaatgccattatggcgccagggatgttgatttggcaaatgagcaactgatgctccgtcatctgttctcgcccattgccgctcctaccgatgccgtttcaattgcagtaatggcattcattatatgaactaaattgaaaatatatatatatatatatattccaaattccgtatatattaaattaaacccccctccccccttaattagaagctccaccccctgaa

SEQ ID NO: 63799 - DNA, 792 bp, Heterodera glycines
aaaagagagaatcgaacgggtgcaaaattaaaattaaaatggcttggattggtcggtcattttcggttgcttttcctccccagtcgctcagcttcaccaacggttggaccattcgctgggcccaattcgcgtgcttcgtcattctccgctggaggccatgtgccgtccgccgttggacgagcggctgagaaggctttaccggtgaagagaacggggggaatggcactcacttccatttcgaatggagaataatcgtatttaaatccgacaaaaagcggacttcactttttctgtttttcttttggcttaacactgtccaatcgcaacagttttattctccctctcttttcattggtttaaatgccattcctttgcatttgaaaggtgcccaaaagtggagaaggcttttgaaaacgtttgttttgtggcggaattgctgcggcgaaaggaccgcgaccaaaaggtggcccaggactggaaatacgtggccaggtcagtcggtccgtcggtgcttttgcggcccattcatttgcccgattcgactgctgttttttccatatgttttgctgttccatcatttacattttttccctttttcttcctttttgtccctttttccttcccattttccctttcagtgttttggaccgtttgttcctcgttctgtttgctctttgctgcttttgcggcaccgcttggattttgttgcaggcgcccattttttatgaccgtcggcagcccattgacctccaatttcaaccgccgaatgctgtcgacgtgtgaataatggga

SEQ ID NO: 63800 - DNA, 1392 bp, Heterodera glycines
atgtgttcatggcaacaattgatcaactctcttgtcaccaccaaagaagttgccgaacaaaagcaactcgacgaaactctcagggaagtttccgaattttgtcaaaatggttggccaaagaaattaccccaaaattggcagcttatttcacacatcggtacaaactctcggaagtcaatggatgtcttatgtttggagagcgcgtcatcatcccggcagaattgcgccaacgtatcctgtccgcgctccatttcactcatcctggcattgttcggatgaaggcacttgcacagcgacacgtgtactggccacgcatggacctcgacattgacaggtgcgtccgaaactgtgacgaatgtgcacttgcagcaaaagcaccgccaaaagcgccgcttcgtccatggccttccacaaacaaagtgtatgagcgtctacacatggattttgccggaccatgttccgatggacgtctctatctaattgtcgtggatgcttttagcaaatggccagaaatattctcagtcaagagcacaaccgccgacaacgtcattgtccaattggaatggctattttcgcgatacggttttccatgtgaaatcgtgaccgataatggcccaccttttcattcaaatgctttttcccatttttgcaggaccaagggaataaagcaaagtttttgtccgccttatcacccgaagagcaatggacaagccgaacgatttgtggacattttcaaaaaggagatgaaaaagggtgcaggcaaggacaaacaatgggtcaccaattccttgtttgcctatcgcaacacgccaaacatcgctttgaatggtcgcattcctgccgaactttttcttggccgtcctccacgcacagaactttccttgctgaaaccaactgtttcacacccaacaaacggcaccaaagactacgccaacaacatggcaaaacagttcaatcgccaaaatggagttcgccgtcgaactttcgcgattggagacgacgttctgataatcaattatcggaacaacaaaacaacgtggttacatggtaaagttgttgaaggatcaggtgtggtttggaaagttcatgttccaatcttaaacgccgttgtgcgtagacataccaatcaaatgcgtcacttttttcctaattccccaacagtctcaaggttcacatcatcagcagcaacatcttcaaattgttcaccaagaacccgcgacagaaccgaacactcctcagcgtcacgtgcgtttcgcggacgaacaacctgaagagcaaccggtcccggacgagcacaatcagaacgaagtcagacggtcgaatcgtaaccgccgtccaccaaaactgctcgacatggacacatcaaaagcacgatatgattacacaaattga

SEQ ID NO: 63801 - DNA, 267 bp, Heterodera glycines
cgcaaatagatgagcctccctcgtacgaggaggcactaaagcaaggcctgcccaccacccgtcccatcgcgcccatggctaccggagtgctgggccagcacacacctgtaacgctggacctgcctccccccgctgacacccagcagaaacctgtgctgccagggccgtccgccgttgttgtaacccgccctagccgcgcgtccctgcgccgtgccgccagcggtccgcgatcgaccctctagtcaaggccttaagtgagtcgtatta

SEQ ID NO: 63802 - DNA, 645 bp, Heterodera glycines
atgggcaacaaacgaccaacttcaagtggatttccctggaccaatcactggactcttcaaagggaagcaaaccagctcagtaacaaattgttttgcgcaaccagcaacactgttcgtcaaatggcacagtctccaactactgtcgccaacccatcgcgcagaccactgcaattacgcttccgagtattgccagctgcaagacaacagttcactcatctggacttcagcatgtccaaacgacaattgtttcatgtgcgatttccaagaagccgaagaaatccacggagaattcacaagctcaacggtcaaataacagcattttggatctcggatgatcgacaaaaggcactgaccttcaccgagacgcatgccgtgcaagcatgcgacgggagacaaatcgtcttatcagagcagaacttcggcattccaaaagagcaattcgacatcatgatgagcaaccacacaagagcgaaacgcaacgtgcaacccgaacaactcgcttcacagcttaccgctgctcaacttgccacaacaatggcactctcacagctttacttaaaggaatgccagcgcaacgtgcgcgtcagcaacccaacgcttcaggcacgaaaactcctcaagcgcgaaaatctgcaagcccgatag

SEQ ID NO: 63803 - DNA, 771 bp, Heterodera glycines
cttttcgaaccgcttcgttgagtacgtctcggaactttgtcgtgttccagcgtgccgggtcttctccctttttggttaggattgtgcgcaggaatccgggagtgagcttcttttcaagcatgaggaaggtcggtgggccttcgatgtcttctcctgtattgttgagttcgcgtgtgagtcgttcgagttgcaggaggaattctttggtgtcgcgcaggtttttgcagggcttgaggtttgccaattcgaaatgaagtgccctgatgtgttcgtccggtgctccgtatgtgtccttcagcaattggagggccgtgtcgtaattattgtcctccagtcgaaagccagccacgagttctcgggcttctcctccgagtaggttgcgcaggagattgaacttctccgctttgctgagtgcgtgtgtgccgattgctgatttgaacgattcgtagaactccggccatttgcgtttgttgccgaagaacttgtccagctggattggctggaattggtagaacggaggagtgaaggacggcgtcttgtttggttgttgctgcgcggtgtgttgcattgcgtttgcatgagctgcttgagcgtcccgctcttctttgtccgccttgctgcggtagagtcgggattgaactgtgagtgtgcttatgaggtcacgcaagtcgcgcagcttcagtgctgcttcgtcgactttgtctgttgttcgctcctttttctcgaacttgttgaaatctgcttctgctggatcgcgttccgttgcaggca

SEQ ID NO: 63804 - DNA, 936 bp, Heterodera glycines
atgcgcatcctcccactcatctcaaagatcgcaagttgctctcaatttcgctaccatcatctgcaagtgcaacaaaaacccaacttgtgggtgcgaatcgactcaaaaaatggaaacgtccaacgattgtcacaaactgcaatccatgagctctacgagacaatcctcaacaaaacggacaacgacttggatctccacccactgatcttccatcagtggcaactcgacaacgacaccgacttcgctacctttccacacatcgacgaatccgaggattcggaagagttcaaaaataagctggaacaacacacgacccaacgagccgaagcactcggagctttacccggcggaatcgaaggatggaccgtcagatggctccaagaacggctacaggaaataatccaatggtggatgcgtctcgcctcggcatattccacattcatactctgccgcgacgttatcctaccctgcttgatcgcctacttcctgaacccaatccgcatcacactcatgaccctgattggatttcgaccaaagaaacaaccaacgcttcaaatccaagcacaacacgaggacatgccattgagggaaatgccaaacacaccaatccggcggaaacgacgtcaattgcccgagcaatcgactccaccaatacgacaggacacgacgacagcaacggcctcattccgaacaagagcaagagcccacagcgcaacggaagacacgcccttcggacgcttgcgaccaatgaaactggcagacgactgaagggcccaaaagaaccaagaagagagaagaaggaaggaagaacggacgagcctttccttgccgcctcgggagtgtcgcgattgccattcgcgaaaatcaaataatttgattttgcaattgtgcacaaattgtgcaaaattgaattggccccaaaaaccaaaaaccaaa

SEQ ID NO: 63805 - DNA, 668 bp, Heterodera glycines
caactttggaattgtgccgtcgtgcgctgccactttgattggtttgacaaggctttttgcgtagatgaggttgcattcatcctttctgattattgttttggccttttggtacacggcaattcccatgccgtatttgctggcgtcgcagaagcagtggaattccactgagtcgatggcttggatgtgccgtggaaattcgattgtgattgcttcgcctctgttgagccactgtgccatcaatttgagccagtccttgttgatgtttgctggcaattcgtcgtcccattttgggttcaagttttgcacttcttgaagaatgagcttggctggcagtagtacgggtgacatgagtccgagcgggtcatagactttggcaatttgcgacagaattgtccgttttgtgatttttccttcgaagattggcaatttgaagatgagccgattatgttttggtttccatcgaatgccgagcactttgttgtcttctaggtcctttgccaagtcgtctggttgcagcttttttagctcttcgatgttgcttccgtagaattctcggagtttcatgcccgctgcttcgaagattgtcttgcttgcgtcaccaaatcttgaagcttttccgttggcttggcgtcgaacatgatgttgtcgacgtacagattcttttcgat

SEQ ID NO: 63806 - DNA, 2262 bp, Heterodera glycines
atggccgcaccaattcaacagaaactcagcgctgctctcaaagttctctcccgaagccgaactgcggcggaactgaacatccaagccgaccaagcggcatcaaacctcgaaaacgcattcaatttcgaggctcaactggagaaggtccaaaaagaagcaaaaacaatggacatcttcctcgacgacgtacgagaatcgctcacagcatgggcggatttactgcgcaaactgcctgcaacggaacgcgatccagcagaagcagatttcaacaagttcgagaaaaaggagcgaacaacagacaaagtcgacgaagcagcactgaagctgcgcgacttgcgtgacctcataagcacactcacagttcaatcccgactctaccgcagcaaggcggacaaagaagagcgggacgctcaagcagctcatgcaaacgcaatgcaacacaccgcgcagcaacaaccaaacaagacgccgtccttcactcctccgttctaccaattccagccaatccagctggacaagttcttcggcaacaaacgcaaatggccggagttctacgaatcgttcaaatcagcaatcggcacacacgcactcagcaaagcggagaagttcaatctcctgcgcaacctactcggaggagaagcccgagaactcgtggctggctttcgactggaggacaataattacgacacggccctccaattgctgaaggacacatacggagcaccggacgaacacatcagggcacttcatttcgaattggcaaacctcaagccctgcaaaaacctgcgcgacaccaaagaattcctcctgcaactcgaacgactcacacgcgaactcaacaatacaggagaagacatcgaaggcccaccgaccttcctcatgcttgaaaagaagctcactcccggattcctgcgcacaatcctaaccaaaaagggagaagacccggcacgctggaacacgacaaagttccgagacgtactcaacgaagcggttcgaaaagaatcccaaatccaagaagtcatgggcgagtacggacactcgccacaacaacggccgcaaccacaaaggcccaatttctcggcatcaaaattccgagaccgcgcaccaatcccacagcaacgggaacgcacattcatcacctcagcggtggatgacaatcacaaaaggctgatcaatcgacagcctcaacacaggccacagcaacaaaggcctcgcgcaccacaaccgcaacaaagaaacttgcgcactttcaacaatcaaaggcaatttccaactcaacgtgccaatgcgaccaacaatcaacgacaatttccaactcaacgtaccaatgcgatcaacaatcgaaggcaatttccaactcaacatgccaatgcgacattcaatcaacgcaagccaccaagtccatgcatcttctgtgacaacgatcactggaatgaagaatgccggaaatacagtacaattcaacagcgaagagaagtactacgcacaaaggcattatgcttcaaatgcctcaaaagcaatcatcaagcaagcaactgcccgcaaccgaagaaatgcttcaaatgcaaacaacctcatccaacggcattatgttatgcagacgaaaaaccaccgaaccaaatcacagcagcaatgttggggcaaacacaacaaaatatgtcaatcacaactcaagacggaagcaacgaaccaacggcatcgacatcgcaaatgtgcaatgccgtaaacggaagcgacactcgcgcactcctcatgaccgcaacttcaacggtcttcaatccagcacaaccgcatctcagcatgactgcggcaattttcatcgatccaggcagccacagatcattcatttcagcaaaggcagcacagctactggatcttccggtggtccacaccgaagaatgccacttgaccagtttcggagaacgcgaaccaaaaagatacatcagcgacctggtcaagctcggatttctctgcacgagcggggaaaaactcatcttcaacctcaacgccatgaaattcttggtcaacgacatgccaatgattcaactgtcagagctggacaagacagagttgaggcaacaaaagcacaatcctccgcatgaacaacgacaacctgacatcatgctcggaattgatgtctggcacgaactgcaggttcaaccaatcgaaagttgccaagcggtttcacactgtgccgatccaaaatcggcaaaatcctcagtggatcaggacgcatcgaaatgcatcaaacgccaaacgtga

SEQ ID NO: 63807 - DNA, 971 bp, Heterodera glycines
  unsure (1)..(971): unsure at all n locations
atgatcaaaatgaataaanttcggagatcaaaatngcnaatgancagancancgaccnaattcaatgataaacaaaaatgtgaaattgttcataaatttgacgcaataaaagaaggaattaagaaaagaggaaaatattcggcaaaaggccgtggtaaaattgagcaaaagattggcgtaaaattgggaattaatcgactgaaaatttacaaatggaaaaaagaatttgggttaaatttaaaaaaagataaacattattatgaaaagaaaaagcaggaatttgttgaaagaattgaagaattcaaaagaatgtacaaaaatggaaaacagaaacaatttgcgaaagaattgggcattcacaaagaaacatttattaaatggaaaaagaaatttggcattgaaattggcaaaagtaattttaatttaatttttaattttaattttaaatatttcaggatattctaatgaagaaaaaatgaacaaaatgtatgaatatttgaaaatgaagaaagcaaatccgtctttgagtgataaagaaattgccgaatttttgaaaatcactcaacgcaccctaatacgatggaaacaaatatttgtataatttttttttattttttgatattagcatatggattattgttttgttttatttgtttttctccttttatgtgtcgtctttttcctttttaattgtcttcttaaagcattcgataatgttatttctgaattttataattttgtgccgaccggtaaccataaattcggttttggtttttgttaacgatcagacaaattttccattttttttttattttggaggagaactgaactaggattgctattttagcatattgtctttaacaaatttttggaaaattcagtccttaatattataaaaattcccaacagctctccgttaagaaatctgtgtcgcggatcgaggtaaaattcattttttatttatgctttca

SEQ ID NO: 63808 - DNA, 605 bp, Heterodera glycines
aaacaaaaaaatcgattttttcaagtgtccgtttggggtactcaaacaattatggggagcaaaaatccaacgcagaattaaagtacaggctatagggaagctattcccgaaggattcggtctccccataaatctgggcgcatcggttcggggggactgccccgaaaacaaaaataaatcgattttttcaagtgtccgtttggggtactcaaacaattatggggagcaaaaatccaacgcagaattaaagtacaggctatagggaagctattcccgaaggattcggtctccccataaatctgggcgcatcggttcagggtactgccccgaaatccaaaaaaaaattttttttggataaaaattatttaaatgaactgactagataatatttaaaataggttatttctcttcctttcagtatccctgctaagtttggtgcgcttctgatcagtttctgaaaaaaaagttaagcctaaactttttggcctgtttaaaaaggaattaaaaattttttaaaatttattcatctccctttttgatagaaaaagcatcagagtgcctaaaatagcatgtaaataaaatttggtgcgtttcagagcattttct

SEQ ID NO: 63809 - DNA, 140 bp, Heterodera glycines
  unsure (1)..(140): unsure at all n locations
cttgtgtggtaagtgtgaagaactgtgttcctccaggcaaaaaattctaagaaaatttataagcatttgaagggttctcagcagtttccctgcaaaatttggtgagcttctgatcagtctagaacgttgngtgataaatg

SEQ ID NO: 63810 - DNA, 865 bp, Heterodera glycines
gagtcgaagctggaaagtgagtacatccaacgcctttttcgggccaactgacaccgctcgaggtacagtaacaatggtacattcattgacaattggtacagtaaccgggccattaaccaggagggcctatttcaatttccgccatatcatagctctgacgtcacatttttaaattttaaaagtgtataatttttgaaaaccttggatcattcgattcctctaaatattctccatttgcatgctaaaaccaattatggccataaatcggggagattttttttagttgcccaatctaatcactaaatttgttgccatttttctcatctcttttttccccaatgccattgtgtggttttttgtgtgcgcttttccaccagtgcctaaaactgaaaatacctttcccaggagagtcggctgtgcgaactgaagtacggtctgcaaagcatgcacaagggcaaaatgccgaacgacgcgcatttgctgcgttttctgcgcgcccgcgacttcgacgtgcaaaaggccacgcaactggtaaaaacgcttaatgttgaatagaccgtgccgtaaaatctcatacaaatgccaacttttggctttccactttttcgattttgtataatttcacttatgcctttttcaatgcttcaaatcattttagacgctgaactcgttgctgtggcggaagcagcacaaaatcggtggctaactttaacattatgtgcttggattgcccatgattaccactgggtaataaaaactcatttttagacagtcttttggacgactttgtgcctccggcgcttttcaaaaaatatttccccggcggatggcatcacaacgattctgaggtggggggacttagcat

SEQ ID NO: 63811 - DNA, 1646 bp, Heterodera glycines
atgatcaaacttttcattatgaagatgccattcccacattttccttgtaggcccattcaaaatgtgatcggatacatttggggcagtgaacggcccgacgagtgggtgatgctcggcaaccatttcgacgcgtgggttttcggcgccatcgacccgaacagcgggacggccgtgctggcggaggtggccaagggattggccgaaacggtgcgcaccaccgggtggaggccgaagcggacgattgttttctgcgcttgggacgcggaggagcccggactgatcgggtgggaagcactcactgattatgcataattaacttactgatcacacacattgacaaaactatatctagtatattcgtgtagctttactaagtattcgtttttttaatttgtttcatttttttgccacagatcgaccgaatttgtggaagaatttgcggaaattttgcagcaaaaggccatcgtttatttgaacgtcgatttgatctcctccaaccaatcattgtctgtccgtgttccttttgtgctcatttcctgtggccaatgttctgtttcaggtctgtctccactgtcccttcgcttttccattcggccgtcgcggcggcaaaagtcgtcaaaaacccattggacgaccaattgaccgtcttcgactcgtgggccaaacatttcccatcaaaaacggaatggcttccggacattcctgaaatgagcatccccgggggcggaagtgaccatatgtgagcaaaaactattggggaaattgaaaaaaagagcaaatttacaaaaataaggcaaataaaattaaatgaaaaaaaccaaatccatgcttaggtaattattacctacaatttcaagtacatcatcatcataattaatgtacggtattttagcacttttctgaactttttgggcgtcccggtgatcgactttctttacaaagatgccgaatcccccggatattcctaccccctctatcactcgcgctacgaattgccatttgtcaacgagcaccttttcgacaacaatcagttggcggtccgtttctcaaacattttttttgcatatttcgaactcaattctttaaaattcaggtgcataaagccgtgggcgaatattgggcggaattggcacgtctttttgctgattcgctgcttttgccgatcagtgcgaccactttggcacatcgattattggccgactatttggaggggatcaaaaaagttgctaaattaaattcaatttgaatttcgttattatttattttattcagccaatcttggatttgagcagccaatttccgagtacgtgtggaccggcgaagacccaactggacaatctgatccaaaatgggcaccaatttatggcgcaggcggaagagttcgaacggcacgcccaaggccaaagtgcgagtgccaatttggcccaattagcgtgggcaaatgaccgactgagaaaattggagcaatgttttgtgaacccggcgatgggactcgcgcgggaagaaccgctcaaaaggcacgtgctgttcgcaacatcgaaggacaatttctacgcatcgaacacaatggcaattgtttataaaaaggtgacaaaaacgaatttgtaattaaatttgaagagacaattaagaaagaaaaatgctaa

SEQ ID NO: 63812 - DNA, 659 bp, Heterodera glycines
atggccgaattgttcagaattgcaaatgaaagttcagatgaatttgagcaaagaaatgcaaaaaaggcaatagaaaatataaatgaaaattttaaactaattgaggaaaatgtgaaaaaaatgttggaaaaattgggaatttatcaattgggaatggaagaaaatgtactcaaaattgggaaaaatggaattgagaaaaatgacaaaattgtgaaaatggtgcaaagattaagcgaaaattcaaaatgggaagggacaattgaaaagaccaacgaaataattagcctaattaaatcagccgaagaaagtgcccgaaaggaggcgatcgaagcattggaaagtttggaaatgatcgacgaacaaaacgatcgggacaaaattgtgatcagaaaaagtgaccggaattaattattgtcgatcaaaaaattttcatgaatatttgtgaacaaattgttaattgatgatccattagttggcattaatattaatcgtgggcattatcaaatgcctttgctgagtgtgctggtggcacagtgaatcgcctgctgcacaacggccaattccaaggccaattcattgcaccattttgtgcgctcctcggcactttttgcgtcgcgaaattggccaatctaagcataaaaagcattaatttcattaaa

SEQ ID NO: 63813 - DNA, 754 bp, Heterodera glycines
atgtgcagaacaaatgccgaaaatggacagactttcgttttgcatttgccaaatgttgacgaagagaccgcaaattttaacattttctttttcttttatgtaaaatcaacgaaaaacgaatacaaaggtaattataataattattaatttagcaaattaataaaagataattatttctgggatttatatgttctaaaaaacaaaaaaaaatgccaaaaaatctgctgaaataaacatagtaaaaaaatgtgcaaaaagcccaaaaaatgattctatgtgctggaaagtcgctctaattcgtgaattgttgaatgaaaatgcgctttttgggctttaatgcgataagattatacgcagaaaagtatatgcaaacatataaatctcagcgctcggttatatttaatttacattaaatatcatttaaataattatccgtttgttattgcaaaaggatatagagagttagatagtacaaatttacaaaatttgtgctataattgcgtcccattaagctgacatcgatgacgaaaatccgtcagacgaaggccctttctttgatccaaaattcaacttagaattggaagacattcggacgatgttccgcatggcttatgtcacgctatacaggcccaacttttccaagctgtacacggtcaatttgggccaaattgacccgaccgaactatttttgaaatcgcgcgtgtttctcgaaacgaagattccgatgagacgggtactttttggttactggtga

SEQ ID NO: 63814 - DNA, 876 bp, Heterodera glycines
ttttaagcccgtcatacagaccgtcgtggacaaattcaatcgttcggtgattgttctccaatgtggcgctgattcgttgggctccgatcggcttgtctgttttaacctcagctttgacggcctcgggtatgtgtagaatggcacaaaagggggagagagagagagaaaggagagagtggttgagaaaaagtctatggccaaaccatctgcacaatttgccttggaatactcttccacattcattccatcagggaatgtgtccgtatcgtcaagtcactcggcgttcctctgctcatcatcgtcggaggcggttgcactcaacgcaacatgatgacgtaaaaagacacaaaggaaaaaagcggtgcacaatattaaaattggggtaatcagcagtgaaaacgctgggactcagagcaccaccatttcaatcacagaaactcagaccacagcattgcaatcactggcaatcaattatcctgcatttcaatcactgggaatcaaaccaccaaaattcaatcactgggactcatagcaccaacatttcaatcagtgggactcaacccaacagcatttcaatcactgggactcaacccaccagcatttcaatcactgggactcaacccgccagcatttcaatcactgggactcaacccaacagcatttcaatcactggtattcaacccaccagcattccaatcactggcactcaattctcatgcatttcaatcactgggactcaacccaccagcatttcaatcactgggactcaacccaacagcatttcaatcactgggactcagcccaccagcatttcaatcaccaggactcaacccaccagcatttcaatcactggcactcaacccaacagcatgctaa

SEQ ID NO: 63815 - DNA, 1617 bp, Heterodera glycines
  unsure (1)..(1617): unsure at all n locations
atgtcccaattcattcgatgggagctgaacctgaccgaacttgtccgacgaatgaatctgattggatacggacgggacgnaatcatgctgatcactttgcactcggctgatcagctgaacgcgccgggcggcttacgcagacatgcttcaggcagaagaatggcagagacacccgtttccttgaccaggtaaaattgtaattctcgtggcttttaccataatcttgacctataatctattggccaaaccctaaaaagtatggcaaatactcaaataatgttggaccgactccanaaatggcacagacagaaaaaatatggcattctccccatataaatgtgtattagtgccatactctgctgagcgggttctacaaatattttacattttccacctcttttggcacagggaggctttatgggctccgcacgcgttttgcccctcgcacaaatggcggcacgccgtttgcatttttggcgtcgaagacttggcccgactcgtcaaattcccgcaccttttcttcaataaattttggcccgccttcgattttggcgctttgttgtgtgtgtacgaacggttgttcaacatgacccatttgcacacctgcggggaacagttggccaaaatggcaccggtggtgaacaaatcgtttgtccaacaactgcccaatgtccgttggtttggtgttggaaaaaagagtgaaatacgaaaaaagggaaaaaatttctttaaaattttccaatatattttttccttaaaacacttttaaaaaattgaggacccccaaaaaaagataaattttagaaataagaataatacgaacgatgaaaaagaaaaattatttatttaaaaaataaaatggggaaaaattctaaacatttttttttaattttaaaaatttttcttatttaggtgcgatttcaacaattcaagaaggaaatattgtgtgaacgaagtaaagtgcagataatttctgatgaccaattgacatttaatgagacaatgagctttaattgtgatggtgaatgaggagccgaaaaagaagaatattttttaaagtttattataattttatttatttgtaaaaatatatttattttcattttattagtaacatcgagattagtttaacagcctgtctaattattaagaagatcgctcaaacagttatttttaagaattcctatcaaaatattccaaaaaaaaaaactatttttatgaataggaaatacatattgcaaattgtaaatttaaattatgaccaaattcttggaaatcatgggcacgaaaaatggagattgtatgccatggattttgcaatatttcataagttgcgtgatcataagtttatttggtagtgtttttaacaattatgtgccgattttttgcactctgctcgtgatggtaaaactcaccttttaaatcaaacagatcgccattcaaattcgacatccgccttctccgtccgtcatacagttgtaccatcacaattctttacgtatttctcctcacaacaataatagcagctgcacttcgttttcattacgcaatgcttgccgaaatacaaattggcacgccgcaaagttttgattgccggggccgcatttggcatttgca

SEQ ID NO: 63816 - DNA, 779 bp, Heterodera glycines
atggtcatccttgtgtgttcactgcttcaggtgctcatttccatccaggtaatttgtcaattaaataattgggtaattaagctcaattcatttgcccattccctataatttcaatttgaaattattttcaattccccagggcctcattttcgtccgccatccctacttcaatgagcccggctttgagaagctccaagggacgagtcggggcgacgaattgtcgcgcaaatacaatttgtgcatcgaaaacgccacacttaattatgccatttatgagcagtggaagaacggatcgccgtattttacggtgagtcaattaaaaaaagtgactttttatatccccaatccaaggggaaaggcaactgacgcaaattaaacgacggaatatgccaaaaaaagaagcaaaatccattttgccaaaaaaagaagcaaaatccattttacaggatgtcattcgacggcacttttggctgaaacggcacgcggtcattcggcaggcggaacggtggctgaaggaagtgacggagaacgtgcggaacagcggaaagatgcaattgccggacaccgacggaatggcggacggcgttttgtccagccaaagccttcaggtgggaaagaatatcggaaaaaggaaaatctgatcaaaaagatgcaaaaactgatcaaacaaattatagcgtcaaaccgtgcgcaaattgttggaagaatttcggaaaatggaaaaccctttgaaggaagcggaagcggaggaggcgaaaaagggaggaggacaagcgtaa

SEQ ID NO: 63817 - DNA, 405 bp, Heterodera glycines
ccgatgtgtcggcaatttacgacagtttgccccccgaaattgaattcttccgatttgtcgaatcacttcggccatgctcaccgaatgaaacggctgaagagaaagaggaggaacaacgggaggcaaaaaggatttttaatgaaaggcttgaacagttgcgagaaagacaagtaggaaatttgcaatgaaaaacaattctaaagtgagtttttccaggaagctttgaaatatgcggagatgacaaagtctgtcgatgtttcacgaaatcgttcactaatgcaagactttggaaaggtaagccaagtgttggaatatatgtatttttctaattccttcgtatctcccaggaaatgagagaagcaaatcgtcatttggtcgccgttattaacacactgataactgtcg

SEQ ID NO: 63818 - DNA, 612 bp, Heterodera glycines
atggcgtcactgttccgttccgagtcggtagacaatccaacacgattgaaggacgaggaatgggaccgagtggtcgcagtgtttgtgcaggtgggcgtatggtcatttcaggggatttgcaaaactgctttagggtccggcctggcaatttaaaaattggaaatggaatggcaatccggttgagatatttgccaacattgctgcgtttcacttgccatccgaagaacggacgagggagactgagtcgattcggggcgggaaaattattaaattttataaattggggaagagtttgatgcagataacaacaaaggtaggcttatctttgatagtgaaaactcgatcttctcatattttatgttaattgagcataaggttgccaaactcatcagggatgctcggcggtaaaggaatttcgggcaatgcaatgaaggcccatctagatgactcacaaaaatgttagaaaatatgaatctgtggtgtttattcatttcttcagaaaataattattaaatattttttcaggagagggttctgaagcatcatcatattttattttcaagctattttaggcactctgatgctttgtatatcaaaaagggagaggaataa

SEQ ID NO: 63819 - DNA, 3562 bp, Heterodera glycines
atgcttttgctcgtgctttgcctttttgttgtcccaactgcgcattgggtccagcagcaaatgccgccggcgcagcccctgggggctgcccaattttttcagccgattatatcttttaaagcgtccacggcacagcaacaacaacaacaacagcagcagcagcagataatgtacaacggaggaggagcggaacaacaacaacaaacggaacaccaacaacaagaacagcagcaacaagctggccaagcagttcggatatcgcgctttgatccgacattaaaggttaaaaaaaaattgtgaaactttgggctcaattacggattacgtgttaaggattaccaggaattatttcggcgtttttggacttcgtaattacggatcatgagccattttttagttgaccaattcaaattaacttggcatcattcaatgctttttacttgtaatattttaacaaattgcaaaaaaagagaaaagtcattaaatgattatcacaatctatctttacatggatggttctgtaacttttattgagttatttttaccttttagtaatgacttaaagatagaatcatatattctgtatttgctgactttacgatattttaatccattccatttgtacccatcacaaggagaattatgatgtaaactttatcaataaattattaatttttttttaatttttcataaacttccgttttttacgaggcagaaattccgattttcgaacaataatttttgaaaattgtgttctttgttcagacgaaatccaacgatggctatttgtctgcttcagctggccagggcacttttgtgcgcattgggccaactgccaatgcgccacccctacaaattttggtggaggacagagatttggtaagtaattttagttgaataaaatatccaatttaaaattattatttattttaaatatcccttaaaatacagtcaattaatttatttttttaactttgatttaacacattttcaaattcagttgccaggaatgccttcagcagtgtatcagtgagtttaattcttacattttttaaaataaaaatgccaattaaaataaattatatggcttatatttagtgcaaaaattcgatcgtttttagttatattttaaccggttacggtgctgaacgctttgcggttgaccatctgggcaatttgtatctgaacgtggatgaattggacactgatgcaactggcacaccgctctttgttctgcatgttatggcggtatttcaaatataaattaaattaaattaatttattattaaatggtgaaattcagtctggcaaaatttcgtttagccacaaaaaaataataatttttgaattttatagcagaattttgattcgattttaagttacaaagataaatttttgaagaagtcttagtcttgactcgagaaaagtctcggttttttgggcctggtctcggcctctattctcggaaaatgttggttttgagcatcactattaatatagagagaggtcgacacaacgccacagcgcagcagtgctccgatcagtctgactatacatttgctggacgacgacatggacaacgacgaggtggacggcgtggagacggagcaggagcaggaccaaccgcagcagcacgtgcaacaacaacaactacaacatttacaaggcaccgttggcggtggaccaacactgccacagacggtgtacgtggccaatgtgtcggccgccgctgggccgggcgagcggcgagtgatcgcgcaagtgaaggcacgcgagagcgagagcaacagtgccgtgttgtaagtactgggagattgggctttcgcttcagaattagttggaattttgcaaaaaaaagtgcttaaaaattatttttttgtataaagttttaggcactaactcaaactccccccagaacaagttttcatgagctattattgcaaaaaattgcaaaccaagggcccctctttgaatacagtatgtacattctcagataccgtatcgtggaagtgagtgacggcgctgtgaactcatttcgctacgaccacacaaagcatgaactcaggtgccaaccaatttaatttaaaggtcatataaattaaatttacgctctttaattagcgcgatcggtccattgtatccgggacatcgttataaggtaataccaagttaattcaaatcatttcattcaaaaaatgtaaatggcttttttgaatcttcccactttaaaaaatttttcttttttttcgtctattaccctaattttgttcatttttaggtggtgatcgaggcacgggacaccgatgggcttgttggccatgctgttgtgttggtccaagcattggccgcagaccatctgccatcaaaagctgctttttcctccccctcctcttccgctgctcgcgcttcgctgttcggcagtggccaagttccggtcattgctgatcatcagccatttccgctttcatcgtccgcatttgtgccaccattagcaaaagccgtcggcgtcggcatacccccggctttaccggcgtcaccaccgtcggcacaaatgtcctcctccctttctcaaaatgtgccaccagctgcgggttcgcagcagatgatgtcatcggcactgattgcgtcctcggccggtgggtattggcagccgattagcaacggcggcaacaacaaagcaaattccaaccaaaagccgaacccattttggcgagttgatccaacaacaacattagcaacaccagcagcagcagtgaagttgaatccgatgcttataccattcgcaactaccacaactgccgtaccaccgccgccaagtcagtccacggtgagtgttcagtgaaattcgggcttaacccggattggcaccgatcgaaaaagacagtctctcgataagaataaggttcaagaaaagtctgcaatttttgggcattgaattcgaaacttggccatgtttcggacagtatgtcaacagatgaagcgatgatgtaaatgctttggcccctcgtatcttcgttttttatagctttttaccggaatgtaatcacaagtgatggaatagattgcttaacgtaatctttaaatctatgctaaatgtgttggcattaatgcgcagcgtactgtaaaaaaatgcatcgtgtgccaatgcctttgaaggaccctttgttcttgttagatttaaatataaatatatatatatatatatatatatatatatttgtgtgtccctatatacataattgatatccgtttttgaatactataatatttcatacagtatcatttttattttccattatttattttttttcagttccaatttttgatctgcccttttcaggagcagactttgtttgttgagctgtccgagtcggcgccggtcggcacattggtcacttcattgggcaacgagttcagtgcaggaaaagtgcattttgtgctgctggatgaagaaggcaacattggcacaatgtttggcatggaggacgagcaggagggcacaattgtgacaaaaggcactctcgaccgggagcagactgcgcaatacaaattgcgcattgaa

SEQ ID NO: 63820 - DNA, 329 bp, Heterodera glycines
atgacaaccatgggacagctctaccaggttcatttccatttgacctttaaaaggttttaagagggaagccaaacgagattcgaagtggtacaaaatcggcagttgtgccgataatccccactggttctttaaaacaaaaaatgggcaaattacaaagggacctttgcttttctcttttgattcactttttttgttgcaagttttggtatgtcttttccaaatcgctttaattttttcttgggtttcaaaattaattcttttttcaggaccgccacgaggaggacttgttcatgtacatcgcttacagcgaggagaacgtttacggctga

SEQ ID NO: 63821 - DNA, 686 bp, Heterodera glycines
atgggacagtgccgaaacggaaaactgctctcatccgctccaggaactaagaaagcgatgacaattatgaataatgtggcaacgacaacgagcaaaatggcaaatggtggacaacggaacagcgaaggacaacaaaagagggggccaaaaggagggaggacggaggtgagagaaagaagagaatgaatgagtggaagaaaccaggttacctttttcagaacaaagggaaggcagtccattcttccaaaaaactgacggcaaacactccgtcgacagtcacaactctcaccgcgataaaaccaaaaatgttgggaaggaacattggcaacggacgggggagacctttgggaagtgcacataaagccgtgggaaaagccgtggatgggtcatcaagtggcgattcttccgatgacgactcatccatcgaccagcacgtccaattggccagcgaaagcagagacgtaaaactaaatggtggtggtgaatcgacaattatgaaagggacggggcggagaggacgtcgcaaaggccgaacgagggacgagtcttcaccagacttggccacgacaacagtggccgaagattggactggtggcaatggagacccggagttatgtgcacacaaaaaatgccaaagaccgctgcatatgtccatcaattgggtccaatgcgatgactgcgacaag

SEQ ID NO: 63822 - DNA, 372 bp, Heterodera glycines
atggagttgctgcgcattgccatgtatcatcgcttcatgccattcttatttctctgctttttgttgtgccgtggggccccggctaatgatgtaaaaaagaagaaaggtaggaccaaatttcaattcatttttattttatattaaataatacttttaaaatatttttaggggtatggaatattagtgttttatttttataaagccagtaaatttttggaaatttgataacagagttccgaaattttttaagaaaatgtttgggttcaacgtctaaaatatttgttgcacgtaattccgacttccaaaattttttattgcctcgcggcaacttcttcccttataaatactacattaatatttaaaattatataa

SEQ ID NO: 63823 - DNA, 527 bp, Heterodera glycines
atgaagtactggagcggatacgtgagctgaattactttgctgatcaaaaatcaaaagaatattataaataacacccatacaaataataactaaataaaagacccagtacagacaaaataactctttaatttaggatcatttaaattaagatttaaataaaaaccttctaaaattgattaacattgcaatctactcaaaatgcaagaaataaaaaagatttaagagaaaaaattaatgatactaataatttaaaataatagtaaaaaaatatataaataacagataaaatcggtattgctaaaggttcaaagtgaaacaataggctgaacttgtaggatgattgcaaagaaacatcttagatataaatattagattgaattaatgtgtaaacaaaatattcttaggatgttttataatgaatttaaataggcctattttataccaaatattttaaaatataaagtattgaagaaaaacacatacattattaaaattttatcaagccaagaaaaatttattttaataaa

SEQ ID NO: 63824 - DNA, 1090 bp, Heterodera glycines
atggctaaaagaaaagttctaattaaattgcaaagcaaaaaagcggcccaaaagcggtggcgaatgcgagaaggtcgtagggcgaaggcccaaatcgctgctcaagttcgatggacgaagaaaagttaattttcaattcatttttcataaaatctccaattttcccaaatttaagccgctccccagaccgacccagatgccgacacgccacaaccatccgaagatgagccgccggcatcagaggcaccggcgcgggacaacgacggacgaccaccatcaactccaacaccggtgacaccactggaattggacgtcccgtcggtggacatggtggaaaccgatgtaccaattacttcaacaccagccgacgacgaccaagaagccgagcccgtgccgtcaacatccacggcacgctgtgacctcatggcgacaccatcgacttcaaagtgcgccggtgcctttggtcttgacgatggtgagtgagaaattccatcaaaaattttgtttttttaattcatttcattttcattatttttaagtccatatgtttgacgaactgcgacggcgccacgtttggaccgaggaggaactgcaacggcagcgccgatcaaacgctttcctccggaaacagctcaaggcacagcgcgaccgttcgacgagcctcgagcgttcggcttcagcatgccgccagcgcaaggccctttccgacgtgaccaacacccagcagggggacaacaagctgagcgcggcgaacgacctgctcatcaccttggactctggcatctcgttcaaggcccgtgaagcactgaagcggttgttcaccgaccaaggacttgacgtttggtcaccgacgagagagatgaagcgtctgaaggcggagctgtgcgaggcggtcaatgaaggttgttgagaagttggtgaaacacgcgacactgctaaatgcccttcacgatcaaggtgtcggaaacaatcaagagaatggaagcaaatacccaaacttttgatcaaaatttcatttttccaaacattttcactatctgaatattatgttgaacacatttttccgatttctataacattattaaataaa

SEQ ID NO: 63825 - DNA, 1318 bp, Heterodera glycines
atggctaaaagaaaagttctaattaaattgcaaagcaaaaaagcggcccaaaagcggtggcgaatgcgagaaggtcgtagggcgaaggcccaaatcgctgctcaagttcgatggacgaagaaaagttaattttcaattcatttttcataaaatctccaattttcccaaatttaagccgctccccagaccgaccccgatgccgacacgccacaaccatccgaagatgagccgccggcatcagaggcaccggcgcgggacaacgacggacgaccaccatcaactccaacaccggtgacaccactggaattggacgtcccgtcggtggacatggtggaaaccgatgtaccaattacttcaacaccagccgacgacgaccaagaagccgagcccgtgccgtcaacatccacggcacgctgtgacctcatggcgacaccatcgacttcaaagtgcgccggtgcctttggtcttgacgatggtgagtgagaaattccatcaaaaattttgtttttttaattcattttacattttcattatttttaagtcattatgtttgatgaactgcgacggcgccacgtttggaccgaggaggaactgcaacggcagcgccgatcaaacgctttcctccgaaaacagctcaaggcacagtgtgatcgttcgacgagcctcgagcgatcggcttcagcatgccgccagcggaaggccctttccgacattaccaacaaccaacaggaggacaacaggctgagcgcgttgaacgatctgctcattacattggacgcaggaatctagttcaaagcccgtgaagcgttgaagcggtcgttcgctggccagggacatgacgtttgggcaccgatgtgggcagtgaagcgtctgaagagggagctggcggagggggcaaatttttagtgggtgggcgaaggacagactcgagcacttgcctgtaccgacgtccgtgcctttgttgaggggcgacttcaagtgttggcaaaaagtggtgagaggaaaatgaataattatttaacaaaggcagtctgcaactccaccagcaatttgtttcctaaattgtgttggtgctgacgggtgacaagggaggcaacggtgtggcagcaacgacaaaattgggactggtgatcgtcaacgttgatcacccaaattccccaaaaaatttgtccattttgggaatttattttggacatgatgaccgaaaaaatttggagaacaaatttggctcgatttttgcacaattgaaccagctggagaccgttgcattcgaaattgctgggaggaagcggatcatcccagtccaaatgtaaataaa

SEQ ID NO: 63826 - DNA, 384 bp, Heterodera glycines
atggcttcacaaattgaaacaaaaaaacaaaaactgaagcttccccacggtggacatctttacacattcgataaaatgagtaaagatgaaacgacaaaattttggaggtgcgaattcaaggatagcgtcaacaaatgtaaaggccgcatttggacggacctaaacaataacttcattcgtcttgcaacgccacacacttgtcccgcaaattcttcgaatgttgaagctcaacgagttaaaactacaatcaaactccgtgccatcgccaccttggaaccgccatctatcattcgttcagaagcattgcagaacgtgccatcaccagccgcacttttggtgacaaaaaggctcgcgaatgacgtacgagaattttttaacaaatga

SEQ ID NO: 63827 - DNA, 625 bp, Heterodera glycines
atgccagatccggttttgcttttttcattttgtacggaacttacaaaagaaagtgaagcagcaaggcttatggcaggtaattttctcccctttatttaaaaatttttttttcaaaatttaagcgttattgttctgatccggtgtttgctttgaatgttcggatgctcacatcagtcgcattcgttccgctttgtgatgtcaggaatgcagtgacagcacttgacatggaatttggaaatttggcggcttttcgacctctaattgattggtcagaaaataaaattttcaattttagaataagtttttaggcttttggacaatatgttgggcgtcctcgtcccaatggcacatggtcacaaccattgttccgtccggagcagtggaacgtctaccaacggacattggatggagatgcgaggacgaacaacaccgcagaagcggaactaaaaagcgaggcaaatatttggcagctgatagacgaattctgaatatggttcgcaattacattccattgaatgcagtgaatgatcatgattatcttccacccattccccagcccaatcaatttcacactattttggaatttcttcgaggtatttcacaccattatcaaatgaacccttga

SEQ ID NO: 63828 - DNA, 60 bp, Heterodera glycines; identical to SEQ ID NO: 52045

SEQ ID NO: 63829 - DNA, 334 bp, Heterodera glycines
atgcacattatatggcctattgtcggaattctgatgtcctctattggtacgactttgacgattcgaatctcacccgatgtgaacagctttgaagtgctttcccaagaggcgtacattctgttatacaagcagaaagagactttggaagacgaggaagcgatggaggaggacgaaatgttggaggaggaggaggaatgggtggaggcaaattcatccgacgaaatggaaactgagggcggcaacggcacgtgaaagcactgcggccccccccccccccttattgtgattattcattatctttattacatgtagtaattatttgccgatttcgcca

SEQ ID NO: 63830 - DNA, 959 bp, Heterodera glycines
tattcagcatcatattgcaatgtgttgaaatacactgagggcaacaatggctattgggtgtggtgttcatcaccagtaaaatggtaatacaaaaatcgttattttttttttaaatttataaaaatatctataaaaaatatcttttcgaataaatttaattgtatttttgattttacatttacttaaatgattttttcagtttgagcttgttgacaccgttttcctggtatggttgtttgtttatttttctttcttccaatttttactctactgcatattaattgtcgggaaagtgcttaatcattccaaaattctcgattaattttatgcgttcacatcaagaccaatctaatgttttctttttgttatacgataaaatatgtcttttactaattgaattttgatcattgattaggcaacgattattttcactgatggactataaatgatcaccacatttttccaaaaagggatcaaagtatcctcaaaatcttattttttcgtaattggaccaagatcccgagaaaatcgaaaactgccgatattttcattgccgtactctgtcatctggcaatctatttcttcttacaaattgcgaccataatccgggaaaatctaatattgccgacaaaaccatttctgtccggactctgtggatcgctggcattcattatgccgtaattgtcacaggtgctccggaaaaggccgttgatgttcctgcattggtaccaccacattttgaccatgatgtacgccttctactcctatccgatcacgcccgcattcaaccgatggggcgatttacctcaactattttgtgcattcctacgtgtactcggtgagattgaggcctttaaaacgatttttttttcttgtccttgttcgattttttggattttttttttcgagggtcgtgccacattttaattgatttttcgcaaaattccccatgaccgcca

SEQ ID NO: 63831 - DNA, 321 bp, Heterodera glycines
atgaccggaaatggaaatgaattaatgagaacagaggatgacgaaaattctgttaatttcatgcatttgtttgataatctggaattgacggattctgaaaatctggccagtctaagggaaattgagaaaatagttgcggacacctcaccaccgccagctggtccatcgccaattgaaagctcagttttggggtttgtgttcatctcacaccccatactgtgggcactggtacaaccggacattttgggcgaacgaaatgagctatcggaccggaaaaatttaagcttagaatcggatcagttggtcttccaagtacaccca

SEQ ID NO: 63832 - DNA, 509 bp, Heterodera glycines
atgggaaagagtttttatgaggagaaaaagcgcaaattcattgaacaatttgatgaatttaaagaattatatggtcaaggcaaacagaaagaatttgcgaaggaattgggcatttctgaaaagacattttggaattggaaaaaagaattggtgccaaattaccataaaagtcaaagtaagaatatatttttagttaaattaaatctaatttttatttaagagcaatatacaaatgaagctaaattaagaaaaatgagaaaatattacgaaataaaagaaaaaaatcagaaattgagcgatgtattaattgccaggaaattggaaattggatcgtcaactctgaaaaattggaaaaccaatttactacaacactaattgatcagttatgattgaacatgatggatgataatatgatcacatcgggcctctccccccgggcagtatctgttcacgagaccgatcgggtagagagagcctaagaattgtgtgattttctttcccggaataaa

SEQ ID NO: 63833 - DNA, 717 bp, Heterodera glycines
atgccaagagagagagaaagaaatgccaatgccaagagagaaagaaagaaatgccaagagagaaagaaagaaatgccaatgccaagagagaaagaaagaaatgccaattccaagagagaaagtaagaaatgccaatgccaagagagaaagaaagaaatgccaatgccaagagagaaagaaagaaatgccaatgccaagagagaaagaaagaaatgccaatgccaagagagaaagaaagaaatgccaatgccaagagagaaagaaagaaatgccaagagagaaagaaagaaatgccaatgccaagagagaaagaaagaaatgccaagagagaaagaaagaaatgccaatgccaagagagaaagaaagaaatgccaatgccaagagagaaagaaagaaatgccaagagagaaagaaagaaatgccaagagagaaagaaagaaatgccaatgccaagagagaagaaagaaatgccaatgccaagagagaaagaaagaaatgccaatgccaagagagaaagaaagaaatgcccatgccaagagagaaagaaagaaatgccaagagagaaagaaagaaatgccaatgccaagagagaaagaaagaaatgccaagagagaaagaaagaaatgccaatgccaagagagaaagaaagagatgccaatgccaagagagaaagaaagaaatgccaagagagaaagaaagaaatgccaatgccaatag

SEQ ID NO: 63834 - DNA, 617 bp, Heterodera glycines
atgggcctcggcatatatctcttggttagctcggtttccttcatcttcggagtggtgggtttttgggggtgggggaaatcatttattttgtgtctaatttgtccccacttccctttcagtacgcagggctcatgctgtcaatcaagattattcgtgagtgccgccactaatcatctcgcacaaatttaaattttgtttttacagttacgtttggcacgtgaacggggcgtcgccggcggtgtgggcggagatactggtacagcaactggcagcactcggacaagcagtggacgcaaatctgacgacgacgaatgccgacaacaaaacggcgcctgggaatgcggccgccagcagctctcaagcagcgacagtgactgactgaatgacgcgtggtcggatgagccatgcatggtacaacaacaacaacaataacaacggcatggcatgaagaaaaatggcgatcggaatggacgagaattttgcagaggatactaattaaaaagcatggataattttccgcattaaagaaatgttgtataatgaaattaagcccgtcaaatccaactgatttgtgtatgaatttccacactaatgcatgccatcatttgatattacca

SEQ ID NO: 63835 - DNA, 210 bp, Heterodera glycines
aagagtaaaaacccacgaaatgtccaaaatttttcaaaatttataaaaacaaaatgagtctaatttaggatttttagggttttcggggtcgctgaatacgaatataccctttatattaccccttgcctaaccttaggcccatctgaataataaaaaactcaaattcgagacttggacatttcgtgggctggacattttgtgggtcagcgg

SEQ ID NO: 63836 - DNA, 794 bp, Heterodera glycines
atgccaactctgttttttaggctcaattcgtcctttgagccgtccaaggcattcccatccgactcgccgttggccagctcaatcagttcgctccgtgaagtgttcgaggagttctttcccatccacggtgagagtgatcaaattgtctgatcagtgatcagagtgagcgatcaatagtgatcattgcttatattcccctcaaattaagtgatcgtcaaccgtcccccaaacatctctgatcatgctcaggtagatgtacttgaaattgaaaatttccaaggataaaaaaaagtcttactacgtccggactgatcagtgatcactccaacaaactcagtcacattttctgatcagttcatatgcttgggatttggttgaatatttgttaaagaaaaagttcttgagtctccaaatttccatcaaaaattgaagaactctctctctctcttccagtcccatcatgagctatagaattctgaaaaaattttcaatattttttcaaaaaaaacttgacatatttattcaaaaaatttgaatccgcgattgccttctattaactaattatcggaccatccaatgaaaacaagcaaattttgggataaaaaagttgacaaatcgcgtcaaatgtttgacttttcatgcggcatctatcagagatgtatcggaatttagaatgccgatttccgattgcttgttgccgaaattttcagtgaaaatatggaaattttggcctaaattcccgacgaaaatggaaaattttggaaatttggttagcattggtatgcttccaagag

SEQ ID NO: 63837 - DNA, 576 bp, Heterodera glycines
atgctgttgaccgtcaaaagtgatctgatcggctccatcgcggtcaccatcgtttgcatggcggtcgtctgttccctgttcatctacagtcgacttggcgtcggtgccattgcgctgtgcatcacctcaatttgcttcagtcagtagtcgtcaatgttttttattttacggcattttatgccattttgtgctttttttctgtcattcatttcaaaaatcactttttcagcgctcgtcggtgtactcagttggtgcggcgctgacttggacccggtgacaatggtaagaagctttaaacgctgatcaaaagttaacggatatgggtttgatcattgatcaatttattgcattgatcaaacaatgcgtcagtcatcgattggattacggctatttgatcaactgactgattatagttttcctgatccttaatgacggatcaatgattcatcatcaaaccatttaatctttttggctaaactgattgattgggctgcttcccctgcatcgttttcaccacgagagaatttttaaataacttttaacgaggacataaaaaaaaaattttgattgaaaata

SEQ ID NO: 63838 - DNA, 718 bp, Heterodera glycines
atgagagaaaataaaataggaatatacaataatcacttaaacgcatatgtgaccactgtaagttaaggaacggtggctgattgtgagaaaaatcctacggtagtaaagtattatcgtccaactgtggcacaaaaagcggtggcaaatgcgatggattcgcttgctacgagtaatggagtgacacctcgaaaagtaattaataattaattaattaatcctaacaacaaaaaaaactaaaattttgatataaaaattctttaatttctcctatcaatttttatttgtaaaaattaaacaaattgtttttataggattttacaaaagtgtttgcttctaaaaagtcgaaaaaagaattgtataaaattgcttctggagaaatggcaccccattttttgttgaacgttggcgacaatttttacgacgaaggcgtaacaaaagaggatgttgcagagcgttttgaacaggtaattaattgttaattaaggataatttataaaacaaactataccacaaagtatttatttaatacgggaaaagaatttttaataaaaaaaatatttttatataaataccaatggttttctttttatagaattttactaaagtgtacaattatggcagtttgaatgtgccatggtatacaattgctggtaacaacgattgggaaagcaaagatggaattgagccacaaattgaacacccaagtggcaaatggtaa

SEQ ID NO: 63839 - DNA, 637 bp, Heterodera glycines
gcacataaacgccgtgttggtcggaggtttcgatgtgtttttcactgatcgctacgacctcgccgaaagcgaatggacccaccgacgaatccacgggaatgacccccaattgtcgttggactcgctcagcccttcgaccacttattttgttcgaatcgatgttcgaaattcggacggaactgtcgtaaaaagccaatcagcttatcgcttcacgacattcggttggttcggcaaaatttgctttaatcgcctattaattcattaattgaccttaaaagagactttgccgcttcgaagagattttcggcacatcgacacattggcataccaacaaattgggcctggccgaatgcaaatccaatgggaattgccggaagcagtaaaaatgggatcaaatggtaattttgaaaagggaaacggaaataaaaggatcatttagggatcgtcatcttctacaagtacgcgttcgttttccttctttctttttgattttttgcactcattctcagttcggacactcgcgaacctttggaccgatggcaccgaattgacttggaaaattccgaaacggttcagatcattggacaacattggaaactatgaagagataaaccaattaagcgatcacttgaattaa

SEQ ID NO: 63840 - DNA, 567 bp, Heterodera glycines
atggcaacaatatgtgatgcatatagggaggacgaacacgttgatgaaaaggctgaaaatgcgcaattaattcagcacaaaattcaatcttcaagaaaaagcttatccaatttgacgaaaaatggcattcaaaacggatttaagcattatgttgagctggagcaccacttgggctcattgttatggtcttacaagtacaaaatccaagaaccaaggacggttgggcttcccgagaaggcgaaacagttgctgatgattaagcatgaaccgtgtgaagaagcgaaattgaaagtgaccagaatggagaagcatgatcagtcagatgtgggcgaaatcttcaatcaagtccaggacataagcatcggtgatcagtcaaaagtgatcgaaaatagaaaggacaacaaaaacaaggacaccagtgatcagtcaaatgtgggcgagattggcaaccatgtccagaacatgagcatcggtgatcaatccaataaggacggcagtgatcagttggaagtgatcggaagtggtaatgatgatcagaacatggctaacgacaatcaatcaaattaa

SEQ ID NO: 63841 - DNA, 341 bp, Heterodera glycines
atgtacttggcgaataaggatgaatggcaggcagaacttttacaaaatgttggactgtgtaagttaacaattttttttcattttttaaaaaataatttaaagcgaattttgctggaatatacgaagaaataaaggaacaaatggagcgacaaagaattgtcgaacaatttcgtattgtgttgtttgattttctatggcaactgttcgacttgaagcaatctcaagtgccaaatttcacagggattcacaaaagcattcagaaaatatgggacaataccaacgaattgggattaggcaagttttaccatgatcagtagggctgggcattttatttaattaaa

SEQ ID NO: 63842 - DNA, 1080 bp, Heterodera glycines
  unsure (1)..(1080): unsure at all n locations
atggagctgctgagaagcacccaaaatctgaagaacagagaagcggagaattatttggtgcagcgaggcgtaagtttttttgctttagcgcctctgttgcactttaggcggcgtccaaagttgacttttaggcttccgtttgatgccacaaatgtaggcattgaccaaataaggaaaaacttatggtttaggcatcatccaatcagtttttaaatgtgtccaatcatctgtttttgttggccatataactttttttttacttgttcaacacttaacacattcttagtattaaacgaaagcttaaagtgcaaggaattcatagaaaagagacaaatattgacaccaagaaaaaaaaaaactgagaaaaagtaatttagcttttttcgggtatatttatgaataggtaactactttttgtctgttgcttagggcccagcatttagttctacagaaaattctacagactttatgctttcgtttgataccacaaatctatgcattgaccaaataaggaaaaattacggactaagaaactgaagattggacgcctaagtgcattggaggcttctaacttttaaaattttcaaaaattggatttgacatgacccatttttcagattgaaaagggcagcactgtaatggctgcaaaaaaggaaccaggaaaagggggatcaacagttgccacccaagtaacgaccaatgtaagtgaggcgttgtaacaaaatgactgacgatgggcatttaccaattttttccgatacttccgtgttttgctacccctcccccttcgaaaattgaaaaaaaaattcatattttggtagattctggtgtttgtttcgacctttgatgacaccatgttcgtgatcagtgactttgaaaaccccaaaatatgaattttccgaggggggggggggtagcaaaacacgggaataccttttttcccattttgtagctgttcggcatcgacatgaaacgcccagtgacccgtgtccgttacgaagtgaaaatcagcggacacattatgctccgaagcggagaagagntgattatcgacctaaccgagcaaaccaaatcgagttg

SEQ ID NO: 63843 - DNA, 1215 bp, Heterodera glycines
atgtctgtcatccctggtgtggaccagaaatttagtcaaccaatcaacaaactcggtaagcacattgaaagcccggcacttttatagaatgggtcccgcgtggattttcggggtcgctaatcacgaatttgagacatttctgtaatccaattccaaatcctaacttaaatatgaaaaaatcgaaattcgatgggttttagactttttttaattcgagtttttggtgctttccttctataaaagtgccaagtgaaatgaagatgtaaaagctttgtaagttttgcagggccatttaacgagtgacgactttaaaaagcttctgtaatactatcgatggtagcttaaaaaaggaaaatcgaatttttttcgcaattaggtagtaagttgtttttgccgttttcagggtcggaaatcctattcgggaatccatttcggaccccaaaccccgaattcgaacaaaaaatcttagaatctgtataaaacgaacatattttttgctctttttcaatgtattatagtgaaggtgctgatgtccagcccagaatatgaggaagggaacgagtgagaacgaggattggatttggggggaaaacggaataagccaaaatccgggccctggataaatggcctccccaaattggtaatcccttgggcgcccactagatcgaatacgcgtgcggggatgggcgagaaggagtaaaatataagataaatattggccaatcacataaaataataattccgccgcgctttgctctcggctctcgctcgccgattaactgcccactcaactgactccttatcgagagaatgctcccgattaaatagttggacttatggaacggaaaatggaatggaagagagcggggatatgtgcttgggaaagagataaaacggatgtgattaattgcgctttacacgtccacccttccttaagtttgtcctcaaactttgatttacttttgagttggaatgaatcaaaaaataatcaagcatcaaaacgtgacagattgaccgaagtcataggaaattaaattattgatacataaataattcgatttcgactgaatacccgaaagttggtgtgaaaactgacgtggattaatttattctatcaacagggatgtctagaaacaaaactttgttttaatgttgtaaacatagttttattttgtcataaaaaaaggcacggattttcaggcgcttaatcgcaaa

SEQ ID NO: 63844 - DNA, 1170 bp, Heterodera glycines
atgccactggcacaaaattatgaagacctcacatcatcgcgcgaatccgccactgtcgacaaacattcgccattaactccaacaacgaatgtcgtcgttgaccgaattttttcgggtgatcctgaaatggcagatgaggatgggaagcgagtttctcgctctgaaaacgggcaacacattaaaaaaatgtctgtgaactcggccttggggtcatccgtcatgattgaaaataaaagtggtggcgataatgagccaaattatgaagagagtgaggtgagaattgaggtcttggacaaaacaactaagacggccttagggtcaccagtcatgcatagcagagctaatttagctataaacaatataacaatagagaatattgaggacattaatagctttttcacaacctttgaaaattattttgctcgaacatatcagattttgggaactttgacagaccctctgttatgggctatgttacagcccaaatctctgagtgaatcagagaatagaaaatctgaaactatttcaacggatgacaaatttattgttattcaaacagggataaattggaccttggcatcacgattaactgaagtgagttcttggcctcattttttgctgatgaaaaagaaatcacaatcagatgaatattttcgattgggtgaaatcatagatataaaagaatttgtggaaaatgagtcaaattctcttaatgcttctaacaaatttgcgacaaattttaccttgctcccagaggatggctgtgggtcaattgaaagaattctaaaatgcgaaaaaaccggcaaaataattgccgtcgatgtctgttttgatgtaggggagtcactacaacgtttctattcacaccagtttggatcagatgttgatgtttcagcaattgttgatgatgcttgggtagaagttattaccttaggttttcgaattcaaggctttgaagacagtctgtctactttaactggtctaaatacgttaagtgatgaaccaacccaaatagtacctcaccaatacattggaaccagcattgatttagttatcaagattgtcagacaaattgatccagtagaggaggattaccgtcaatggtgtgagtttctcgcaaaacaacggtctacttccaaccatgatcaagactaccatcaccgaaggtag

SEQ ID NO: 63845 - DNA, 524 bp, Heterodera glycines
atgacgagttctgcgaacagaaagtagaagtagcacagtattccaactttattaagatttgtttacatttattaaattcgcgccaataagttgaaattaaattaaatatttaattttttaagtgatttaatattctttactgactttaaaggtctaatttgtattttcagtgtagatttggccttcgactcagcagggataacttcggataacgattgtttattcaacatgccactaataaaagaaagaaatttgtcgttacctgctgcttaaaatttttttttatctttgtttcgaacatcatgcgaaaacccgctaacgggtataatcattattctcttttttaatcatttcttcacaaaaattaatgacaaaaaaaggtaatttgaagattttttttgtcaaattctttgtaaattaaaagaaaattgatagtacttaaatagaaaagcagacttagaaagaagattatgacttgtcaataattcgtcagttaagctgaaacttcgctgaatgaagctgaa

SEQ ID NO: 63846 - DNA, 1406 bp, Heterodera glycines
atggacaagtgagaaagcggaaatgtttttgaaacatttaaaatttgtttttttcggcactttaaacgaccaaatttggttggacacgttggcatggcttgggcgtggagaggtcggcacgcacatggcgctggtcaacgcccgcttcaccgttctggcgtacacgcagctgcagcaaaggcaatggtggttgaaggagttgcacatctgtcagagggaaccgagagggacaggcgccgaactgatcagcttgaacagcgacggctcccgcttcatgtcgccattgcccaccgcacaattgccggaaaatgtcgtcggcttctccagcacattcaacatctggtcgacttcaacaattcccaattttaatttaaattgttccccatttttgcaggtatttcgacggtgaagtgatcattttcctgcaccgaattcgccgcctcttctccacggacgtctctctgcagttcaacattcggcggacgcaaactcgtggttggaaagcgatggcacgtcacatttggcccctgctgaagaacggactcatcatgctggtcaacgtaaagcggctgcacctcatcaggatgcacaaatacgtgtcgccgaccgtcctcttcgactgcgcagaacttttccaaatcagcggcactgttttgcccgagagtccgacaacttacagcaattcgccggacttgtcgacacgtttactgtacaactggctgcacacgcctcgccccgatggtcgtccagtggtattcaaattgagcaaatggaaatcaggatgggaaaatttcgtcaacgaattgatcacggtgggtgtggggtgggtgtttgatcgacggacggattttacttttcctcgttgctttttaattgttctgatcacatttttccgttttttagtccttcactcgtgcggtcggcccggtcaagtacatggtgctcgcttcgttcgacgtcaactacacccggcgtgaacaaatggtgaacattcggacggaggaaaagctgacgctgtcgagcgatgtgcatcaaaggccggatggtggctttgtgtcatctgtgaagattctacgctgtccagcggtgttcacggaagcgaacgtgatgtcctggttgcgtctgccgcgtgtggccagcgaatggcacccaaatttggtgaccattggcttttcagatgactaaattgggtatggacgagttgaacaaatttaagattcagtgttcttatttccttcgttttcagaccaatgccttcgaacagagaaaccgatcgggctgagaactgagaaggataactgcggatcaacaacagatgagccctaagcacaatggccatcgaatgaaattatctctgatcattattattcatatatatatatattgtatttgtcttggcaaaggaa

SEQ ID NO: 63847 - DNA, 421 bp, Heterodera glycines
atgccaaaaaggcaaaaggaaaagacactttcgagcctatttggaagccagaaaaatgccgaaaataaaagtaaaattgttggcacttttgagcaaaaattggaattactgaaaaaagcatttgcacagcaaaaattgggtaagagaggaaattttcagggattttaaaatacaaacaaaatttttatcagaccaaatgatatttgaagaatacaaaaacaacgaaaatttgacactttttattgaaatgaaagacaaaataaattttaatgaaaaaaatgcgcaaatatttcctaccgaaaaatggcacgcattgaaatttacggaagagatggaaaactaactgattgaaaccgataaagtaatttaaaatcaaaaaaaacaaaaagtaataatattttaagttgaaaaacgcattaaa

SEQ ID NO: 63848 - DNA, 608 bp, Heterodera glycines
gttttccaaactgcaaatttcgttcgaggtattttttgtctcccatacagccaaaatctaagtgtcattaattttttccctcccaaaggtatcgaggccaagaggacaatcggcacttttaccgtatcccgaaaagaccgcccattctgcgccaggcatggctttgtgccattggaagaagtgaggagacggtggtgagccaggcaagcaaaagcatcccccgtgggagaaggggcgggggacggagaggcaaaacaatttggcactaaattgctttttattgacgggaaatgccgcgggcgttggcgtttttcgcagactttttcgttttatgtgttttgttcgattttaaattttatttataaataaaaaaacattttaaatgtaaatgatgaatggcatttcttcagctccgaatttgttctgcccatttttacggaggtgaaaagcacgaaggcgacatcccggtggcggacccccaggcaaatttttcttaattggttattaattacaattaatggttcaaaaattgcagattgacccacccgaattcatcgaacttccgccaaaagaagtgcgctcttccgaaagaagggcccgcttaaagg

SEQ ID NO: 63849 - DNA, 54 bp, Heterodera glycines
atgtatttttctcgatttagcttacatgctgtgttttgcggaccccctcctgct

SEQ ID NO: 63850 - DNA, 746 bp, Heterodera glycines
atgaaaaatgccaattcggtggctttgcccttctgtccgtccacttcggctgcttctgatggggccaactccgaagcgaaccgtacggacaaaaagcgacgaattcacacgcgaaatgtccgatcagtgatcagcagcatttactgcagacggaaaaatgcgacgatcggcagaccgtcgatcggctgttggttggcactgctgttgccgctctcctcgttggcacttgtgttcaacgatcagttggaccaacagagtccggtgttttacagtgccaagaaaaagctaaaggaacaggtggaaaattcaaaaaaaaaaaaccaaaattactggaaattcacaacttttcaggaaatcattcagaaggtcctccgagattatggtgagattatttattttcatataaatttataaaaaaaagttattttaaagattggcgggttcgtccccgaggcaaaaatgactcttggcaaggtgaggagaagcctaattagtgacgaattgattagacaattaacgataatcattccctgctctgctcagatacgggtggccctgtgattgtttctgtaaatgtctgttaccactgttgttttttgaccccatttatttatgtcgacagatttatctccgctcaatctccaaaattgatgacgtcaacatggaatgtaagcttttgggaagtgattgagacaaaacatcaaattcgttcacagaaaatggacatttgggcatcaaaaaattaa

SEQ ID NO: 63851 - DNA, 1862 bp, Heterodera glycines
atgcctcaacttggcgtcagtttcatctactccaccatttacgagaaattccgaaatgttcttcatgttaatgccaatattcaatccgcgcccgttgtctctgctttggccggtgagaacaatcaaatgccattccaaatttgttggtattcaggcggattttctagcattttcactcaaataatattcgtccctaccgacatcataagttatcttcctttttcattttgcaaatccgtcccattcactacggtttccctccgttttagtcagcatatgatgatctacaataatcccgcaaaatttttgggctctgctaaaaatgttgccgttttggacttcgtgcgaacggatggaaagtcgggccgtttgacctttgggcttcgaattgtccgagcggtttatcacatcgatggtttgtaaagggaacaattggaaagaaaaaaacatttggaattcttggggatttgtttttcattaatttatgggaattccttcagtttttaattgagaagggaatttcgccaattgtaactcggaaaatacatacggtttttatcagtggatagagcatgaccaatttgtaatgtgaatttttaatttttttgcctaagaaacttccctgggagttaaaaagcctcgaaattgggttttttagatctgaaggcacatttcatttctgaatgactgccaaccagggctggaatgggggtccgtccgccggtggtgccgacaggcgccgccgggaaaaattttgaaattttgagtgaatttgttaacagattttgtccaaaatatgtcaaatcattggttaatttattggtctatggacgttttaaaaataaagaaaaataattttcaatgttaggaaatttcttattaattaaatttcaattaaaattatcaaaacaaaatataaaaattctcctatcccagtggtgaattgaacccaagggatagacaacgaaagacagaaggcttaaccaccagaccaaatatatatgcgtccttctttaacagaattgaatttatttatttaattttttctaaaaaatttcttttcacacaccaatttcctattttcgtctcagtaaaaattccctatataaaatgcatcacggatcaaaatcacggaaaatttgaaaaaatccgtgacccgtgatccgagatcacggcaccccaaaaaccccgtgattcccgtgatccgtgatcacggccagccctgctcgggtatcacaatgggtttaagcaggttgaattaagctattcaaaaattttaaaaattagacagcgcccaattcacatttcgcgaggaatggtgggaccctcggctggcctatggccgttttgcggacgatgaaactgaagtgccggcttttgttgtgttggccaccagcgaacaggctgatctgactcaacagatttgggcaagtgttgaaacttaatcggcagagatcggcgattgtactgacaaatcaaaatagacaatcaatgctttgatattgattgatcagtcgatttatgattgacgaaaattatcatttcaatcacttttagatgccggacactttcttccaaaatgaaaagtaacaagcaaaaaatctgttcattttgattgtttaaatggccatttagagaggcgagaaggcatttgattgataagccaaatgtgctgatcagaatccatccggacggacaaatcctttacagtgttcggtccgattttgttttggctttctgtcgtgtttaactgtgctgttttcagtctctctctcgtcctttcatgtcccatgtctttggagtactatccgttggaccgacaaacatgcttaatcgacttggccagctgtaagccaaaagaa

SEQ ID NO: 63852 - DNA, 900 bp, Heterodera glycines
gctgtggacgtttggattggcgtttgtatggcatttgtaagatgttgatcattttgttgcactgaaagttcaattaattttaccaattttaatattttgcagatttttggcgcactgctcgaatttgcgctggtcaattacgcggctcgtaaagacattagcacaacgcaacagcgaatggttgtgcctaatgagataaataattgtcaaaaataaacatttaattatactttgtctattggcacacatttgccgtgtccctttttgaaaagccgcttaagatcaaactgcaccaccagtacagcacggtggtccaccaccaatccgtcgatgcttctgccgccgacgcgaaccaaagtcggccgccgcccggccacacgttccaatcgctgctccatcccaccccaaccaccggtgccaatttcggctctgtccgtcactcgtccacggcatcgcatcgcttcgtgccgcagagtccgtcctccttgccttcccggcgaccgctcggcatttgcttccgcctgtgctgtcggctgttcgttcgacgatacaaagagcgctccaaacgcattgacgtcgtctcgagactggtgagaaagcgcgggatggggccgggaaatgggaccaaattggacggagagaatggcacggagtcccgagagggggcagaagaaaggaagaattagatgcctatttaaaaacatttttttaggtatttcccatcggatatgcatgtttcaatggtatttgaaataaatatttgtaaaagataattgcaaaaattaatttaaattttaattttctaaattatatttttaaataatattatatagattatttgtcatttaattataaacattccctgcaaattcagtgctttattgggccgtctatttgatg

SEQ ID NO: 63853 - DNA, 304 bp, Heterodera glycines
aaaattccctcaaaaataaaatgtctattgcgcaccgccctccctatcatgctcgagagcatttgtatgtgtataaaatttatcaaaaaaagagatagccatttttctgggataacctctaaatataaaaatcctctgtgaaataaaatggcgattgtgcactgccctccgtctcatacgcaagcgcttttgtgaggtataaaatttctcaaaaaaagagatagccatttttctgggatagagtataaatttaaaaattccctcaaaaataaaaggtctattgcgcaccgccctccctatcatg

SEQ ID NO: 63854 - DNA, 50 bp, Heterodera glycines
atgagctacaaatggattaaaggacgtcaacatcaaggatcctgtcactg

SEQ ID NO: 63855 - DNA, 234 bp, Heterodera glycines; identical to SEQ ID NO: 33936

SEQ ID NO: 63856 - DNA, 546 bp, Heterodera glycines
  unsure (1)..(546): unsure at all n locations
ctcancnaactcagcnncaggagtcaaatttcgcttcttctatttcggcggcaacaacggggctcgactttgggcaaatgtcaactcaacaaccgacacatcagaaccgttccgaagcttctgatttcttttcgccaattgccgcagcgacaatggcaatggatgtggaacaaaagaaaaccaatccaaagccgagacagcagcaaaccgacgcctcgaatttctttggacctatttcagcggcaaccatgggaattggtgcagaaaaacccaagccaaagatgaaacaacagcaacaaggggtcgcctctcagtttgcttctgccatttccgccgcaacaatgggtaggagcaatgaacaacctaagcagcaacctccgatcgaaaaacagaaggaacagacagacgaagaaattctggatgaatttcttgagagtgtttcggctgcaactacctatttggatgtttcgcagaagaagaagccaaagaagaaaggaaagaaggaagcagaagatgaagaagcggcagcaattgcatcgatttccc

SEQ ID NO: 63857 - DNA, 559 bp, Heterodera glycines
atgatctcttctgggttaaacgaaactgagaaaatgaaagagcatttgaaacaaaaatatgaagcccatcttggcgttatgtatttgatggcagagaattggcaatgtgacaaaattgctcatcaattaactgcaaatgaaaatggaatgaatgtcaaaaatatcgtaaatatgtggacattttctatgaatattttttccgattgtatgcttatggtttgtttgatctgtacataattttgaatttgtctttttattaaaattaattatgataataatttattaagctaaaaatttgaacgtgtctgaacaattggtaccattgatgaagccattacttattacagaaatttctctggacagtttaattggagttatcaaaaatttgaattatatttcgaaatgtttttggcaaagagataaaaatgaaccatggaatttcaattattgggagatggatttgataaatgaggatgaattaaattatgaaataaaagaggagaaaagtggggaaaatccatcaaaaaatgaaattgaaaaaaattgcaaaacttcgtaa

SEQ ID NO: 63858 - DNA, 117 bp, Heterodera glycines; identical to SEQ ID NO: 53938

SEQ ID NO: 63859 - DNA, 412 bp, Heterodera glycines
  unsure (1)..(412): unsure at all n locations
tttccaccttcaattccgagcagtccagcggccagcactcgcgggccgagagctgtctcgaattggaagcgctcgccgccgtccatcgattcgcaggaattgtgcaggaaattgctgtgtccgaaatggtgcccaacgccccctccccctctcacttccccttccgttcagctcccccgcactgccgatttgatttttgtgaatgtcaccactttggagggtccgtccgccgtttgtttggcatttcgtccatttccgtccctttcagcgcagccgttttgtctcgaattgacggcgaagggatggcgcgtcacttcgctgcgtaccgattgcatgcagggcgacttcacccgcatggaattgttcaccanttactatcaatcgctgcatcagttgatggacgcaatttcac

SEQ ID NO: 63860 - DNA, 887 bp, Heterodera glycines
atggcgtccacaatctttttgctaaacattgctggacaattgcaaattcgccgtgcaaatcgcgcggtattccacaaaaaaaattgccgaaattaaatattattaaaattgttttagaataatttgctgacatcagttttaattatcaatgaattatttatctcatttttgccacattttcttccctttatttgtgaaagggtaaatttaattaattatttaaaaatatatttttcttatactaacttaatgaatttaatctcggttattttaactttttgtaatataacaaaaacatataaaataaaactatgctttttttattatcatttgatattaataattgatattaaataattgcaaaactatatttgttatttttgtttaaattatttctttttttaatataattaagtcatgatttacatttattttaaataatttattttatattacctaattttttaatttaaaaataaaaaaatcttttatttcattttaaacgatatttcgcaggtttttggtgccggttcatcgcttggcacaggacctttgtccgagttgatgaactcgttcgaagttttgtttttttcttccatatattcgtacaagttttcggcacggaacaacacatcaatgcatggcacgggaggaacatttaataacaatgccgtacaacaatatcaacaacagtcatactgtatggagatgaattacagtaggcagaatatggaacgaagacgggctgatcgtgtggtaccaatggcaccgggacaacctcagccggcacaaatcctcatccgccaagttacgccagttgagaatgtaaacggcaggcctagaacatcgatggcacgcttttgagaagagtcgagaaattttttgaa

SEQ ID NO: 63861 - DNA, 882 bp, Heterodera glycines
atgaatcctcagcaaaagctcactcataccgcggtgattggacgggcagtgagtagcagtggtcggccgggcacttggcaagatttaggacgggtaagtcgtacaaagtggcaacatcctgtttagattagtatagatccagagaatgatcccttgaaaataacgtatcatggaattcaattcttgtctcccgaattagaattaagtttatttgcatgaaaattactggaaatcatgatctcaaactgattttaggcggttcagaataccaaaaaagtttcactctaatctagtgaataacattggaatctattttccgaatttaaccattttcattggatttttactgaatgcaaattctgatccaattataagccaaaaaatctagatttccagaccctgcctgactcagaaatccttcagatacttgaatctaacgaaaaagacaacttcaatgccatcgaccctaatttgtttgttgacccgagcacaaaaacgattttggctccaatactacggctccttttggatgggcattttccaagctattttttctttcccaaaaaaaatatccaatgcaaaaaaagagatattttatcaattgtaatctctcatctctaatggattaaaaattttgattatagcaaaaattagatttcaataatcaagaattttgtaaaactaaaaaatagatttcgtttaaaaaatctgctaacttttgagtttttgagtataatttataatgaatatttttgaaatattttaaaatttcattatttcacttaaaataatgatgtaatgagattttaaattaatttaatagacaaaacttggaatcaagggtttttgtcttcttcaaataattacaatcaatgaaataaa

SEQ ID NO: 63862 - DNA, 212 bp, Heterodera glycines
catcccactttgtacaacattgttctgaaaagacctttcaacttcttgttaacgacatggagcagtacaatgccagagaaaattcagagattaaatctgaggccagatttggattctccggacttgatttggccacaaaaaccgcttttaataaatttccaactgatcaaagcaaagttttgacccgtacaataaaagtgatcgggttttga

SEQ ID NO: 63863 - DNA, 568 bp, Heterodera glycines
atgttgctactgccttcatttttatgtccacattgtctggtgggagttgtggaggtgcaccaacaaattacctaatacatttatctgcaatataatcaagaaattttgtttattttttgaaatttaaaaaaaaatcaaaaagaatttccactgactatttaataaaaaaaagaattttttcaaattaaaatatattttaatttaatttaattttgatatttcggcttcgtcaaatttttagaaaatttggatattttttgagtttttaacatcaaataacctagataatgaagctgctgatgaaaatggtgatggtgccacaaatgttggatacatccgtaaattgtcaaatgccgtggttggtacacttggggcgatggcctcgataacgggcgcatttggcataaatcaaaatgggaacggcacacagaacttgcattggcacaaaacgggacaccatggcatttgcaaagtggcatcgaaatgtcggcacgcatgccgatttttggaaaggtcaattatccaaaaagcccaaaacggcactattgggaagttaaaaatggcatag

SEQ ID NO: 63864 - DNA, 194 bp, Heterodera glycines
ctcaagcatctgagttgccatattactctaaacatatttttgaatagctaaaaacccataaaagcctttaaatttaacgaagactccaaaaacaacaataaattgccaaaacttgcaaccatctcctccaagttacgaggagtctgacaaacgacagcgagagcttttgctgaactaccaagaattttccaaaa

SEQ ID NO: 63865 - DNA, 100 bp, Heterodera glycines
atgggaacaattgatgtgattcgacgggcccttttgtgcatattttggccaacaccggaggaaatactttgtcgaaattcgggtccaatacatttgaaat

SEQ ID NO: 63866 - DNA, 443 bp, Heterodera glycines
atggttatggaagtgaagcgacgcgagtacatcggagatggacagggtgacctcctcccacgggcttttgtcatacatgtgaataaaaaagaaaagccatcgtcaaacaaaaacatttttttgttttttaagagagaaaaaaatcccatcacttgttgcttcatattctgcggaccaattcaatggcgcatgaataatttcagctacattggatgatgagagaaataaaaacaaaaatgaataaattgagagaatttttgtttttagacacatcaaaactctgtccatcaaataacacagatgaattatgcaaatatgaaccaattcaattcttttcctacactaaacggtcaaaaatacacttataaattgttaattatagtgaacttttttgtttgattttaggcactttgtataatcaccagcaacaaaaacaacaacaa

SEQ ID NO: 63867 - DNA, 67 bp, Heterodera glycines
  unsure (1)..(67): unsure at all n locations
gacataaacatttatttgatttattttaccatattcacaatttgatcaaaatataggtggtcaaaan

SEQ ID NO: 63868 - DNA, 596 bp, Heterodera glycines
  unsure (1)..(596): unsure at all n locations
atgtcggggttgggatcagggacgggcgaagctcggcttagtactcgaagccgaagcccttntaataaaataaatatattgaatataaaacttttggttaccggcgatgccggtggcgcctccggggaaattntaataggcactagtgctgctcaagagtctcggtctcgagcaaatttctcgggttttttgggctcggtctcggattttaagtctcggtctttgagactcgagaccgagacttttacacccctaatgtttgcttttggtaaatttttataaattttaggtctttgttcaatcttgtcgccatatacgtggtcaagtgggttgtattcttggatattttctttatttttgcgttggatctgtcggcaatttcatcgccgacgagagtgccagaggagaaagaagcggaattttggttttcaacgccgacggcacggcgagggaattatcggaggatgaggaaaacgaatgggcagggggattttccatcacccccagccgaaccgctggacccgaacaaaaaaggaagaagtgccgaggcgggcgacgctgatcggaaaatccggagggaggacattcccggataa

SEQ ID NO: 63869 - DNA, 320 bp, Heterodera glycines
atgtggaacttgctcggactcatgaagtgttggagaagcattgcatttacagcagaggacgcttcgggggatggaagtacgaagtgtcaaaccaggaccattgcttcatccaggttggctttaaaaaattaaaaataaaaataatttaaattaattaattaattttcagggcaaagaattgtgtgatcgattgttgttggacgagcccgaaaaactgtacaaaacattgattcccgagaagagaggttaatgagaagaagaaaaagaagcggaaaagaaagagaattgaaggcaaagaaaaaaaagagaaaatgaataaa

SEQ ID NO: 63870 - DNA, 577 bp, Heterodera glycines
gttctcgaatcctttttggattccgagttctcgtcagagaacctccgcttctggtgttgcatccaggacctcaaattctctcccaattgtcaagttaaaacaaaaggccaacacattttggacgagtttcttgctcccggtgcgccctgtcaggtcctttcctccgttttttgcttccttcggtcaatttttacattaggttaacgtcgactctagaacgcttgaagaaacattacgatgcttggaggagtcggaccaagcattgcgaaaccagaggttcgctttctcagtttcggaggaacacgtgttcacactgatgagcaaagactcgtacccacgttttctccgatccggcatttacaaggctgttttggacgctgccaaggcaaagggtggcagaaaacggatcattgacctgatcagagagctgtcagggagtgccgtaaacactaagaaagtgcctgccaaataccacaaaacatcgcgggggagtgccgatgtggacaatacacaacaactgtcgttgaacgccaacaacttccccaaacagtgctcctccgactcattgcctgtgaaa

SEQ ID NO: 63871 - DNA, 1265 bp, Heterodera glycines
ggactggaaaaaactgagaaacttcattttggtggcggaaatactgactgggaagagcgaaatttgggcagatttaaaactaggtaattctgtcaatcattattacatttaggtaattaatttagtgaaactcgtttcgttgaaatattggactacgtttgcaaaagggattcatctgctgagattggatttagtggaattaaggatttgcaatttaaggtaatggaacgaaatttgtggcaaaaattccattcaaaatattcttttaagtgtcattctctgctggaagcccatgaagaactgcttggacaatggttttttgagcatcaagagaacggaccaactctcgggaaatatctttgcattgagaatcttaaactttgttgtgacgaaggctattttggctcggattgttctccatgtcctggaatgaaactctcgggcaaaccttgtttcgggaatggacaatgccaagtgcttttttccataaaaataattataaaaaagactaaaaattaagggcaacggaacacggaatggcaatgggacgtgttcttgccatgcgggttatgtcggcaaaatgtgcagcaattgcgattcgtcttattttgcagtttcgcaaaattcgtcttacatcgaatgcgaaggtcgaaaattcgcttgacatttttattcgttttctttaattgaatgttaaattaatatatttatctaattttttcgtaccctttcagaatgtttcgacggatgttctagtggttgtggcggtccgagcccaaaagattgtcggtcttgccgaattgggtataaaatggatcccgaaatcggctgtaatggttggtaccgcacggaaacaatgccagttgatattagccttgaaaaatttttggtggttatttttccaattgtgtaattattactgcagtaataatttgcacggtttcattatttaaggggtgggtaatccactattttaacattagacaccaactcggaccctttttattatttctgtttatttaaatgtccatctcttacattatttatccgctaattttgaatttctttccctcagatatcgacgaatgtgcagaggaagggaaatgtgacaagtccaatgaaaaatgtgtcaacactcctgggtaacttttaaaaatcgcatttgtgactgacaatttactcgttccctttgagttccttcgagtgccaatgtgtcgatgggtttaaacgattggactccggcgaatgttccatcgatgtcgaag

SEQ ID NO: 63872 - DNA, 823 bp, Heterodera glycines
atgttttgccttttgccaggccgagaaaaagctgaagtcggtcaaacagtcggagatgaaccgcgtcttctccgaggaagtgattcgctttgcgcaccaaatcagcaaaaaccattcggtggccagttcagtctattggcagcagggcgacccgtcgcggccgtacccaacggaggcaaatttcgccgtgagcaatttgctgttgagcagaacacaaccggtaaaaagcgaacactgcgtccaagagtgatccctttgctcttattttcagaatgttcccctgtcatttgcagcccaagcgactcccggcggaatgctcaaatcggtcttcaatgttcccggaatgccgcaaaaagcgttttcgccaagtcctcgctcggcaatgtttgtctccaatttgggcgcttcttccgcttcaccgagggggcgcccttccggaagcggtaaaacgggcgaagtgtgtcagtttaaatttcacctaaataggcgcgcggatggcttccccagcgactcgtcctaagattctccagcggagttcgtctcagcaaagcccccgctttgctcagatgggctttcttcccggccaacaacagccgtcgttgatccaacagagtccgagcagttctccgatggttcaaccgcctcagtccgtctccaatttcgtgtctccttccggacagatgatggtcaacctgccggccaatctcaaagcattttcccaggcgccatcgctcgacgtacaaaaaatagagcaaatgtcatccgaatcaagctcaagttcgagcagtggggacgaagcgagtccaagcggacaatgaactga

SEQ ID NO: 63873 - DNA, 767 bp, Heterodera glycines
gaacaaacggcacgagtccatcgcagaagcacacgtgtcgggatgggacatcgagcagatggagattcaggtggcacgccaaacagcgaaagtgccgatgaacgaacgaatgaatccctccccaaaaaggacagcaaatacgtcgtccaactgctgggcgattggcggcagaaccctttcgacatccaatccaccaactgcgagctgtgcgtgcagctccaacggaacgcggtctattggctggccgaactgctcgcgcccgccctcgtcaccgcggcactgacactctgcgcggtgctctttcagttggcactgccccaggcgctgctgctcgctttcagtctgttctcccagctgctggccatgcagctaatgaacacgcggatgccatcctacacgggcacggcaccggccatccgtaagcgattgattaatagcaattagccgtgcccttctccactgacgtgcccatttggccagtgaaatttgccgctttcaatttgctgtccaccggcgcccttttcgtagccactcttttgctccgccgtttctcacaaacgaattcgaacattccgttgccccgctccgtctacgccttggcctccattctcgacaaactgatgccattgccgaagggttccaaagaattgacggaggaaaatttgccgcagggaaattacgcggacattgcgctgacactgaacaatttgttgttttgtcttttcactttcacttacggatggacaatcattttcacactgatcatc

SEQ ID NO: 63874 - DNA, 831 bp, Heterodera glycines
tgtgcccttttgcttaggcgaagcgccgccgccgaaaccgccgcaagaagccgcttcccccgcagtgcaaagcaattgcgtggattcggacccgaagtgcagcctttgggcgagtcagggcgaatgccaaaccaatgcgatttggtgtggcaaaattgacaaattcaatttttacccaatttactctaaaaacgactgaccatgaaaataatcgtacaattagcatttgttacttgccaaccaacaaatcaggatgatgtccaactgtcgccgttcttgccaatcgtgccaggggggcgaccgtgcctggcaactgcgcacgcaattggccaaaagttatgacaacacgacaaataccaatgcgactcgaactgtacgcattgagtccgtacgcatatcacacatggaaatcgtaaagactgataacttattttgatcagtcaacaaattccccaaatatttgaaaaaggatgaaacgcgcgaattggcgcgtctctttgggcggttggtgctgtcctggaacgactcgaaagtcagttgggaccgcgaacattggggcgtttcctggctgaacttctattgggtccaaatttggacgcctcaattgatgcaaatcaattcgtcagttttcggcacaaaaattacacgtgtttaaagtggcacaatttaagggcaagtacaacgcccggacaaataaacggcaaagttttggcagcaaattacacgggccaagtgtacatgtggacaggtgagcacagaagaaagcggacaaatgggcgaccgacgatgccatgccaaactctttcagactccaattcgttgttccctacc

SEQ ID NO: 63875 - DNA, 573 bp, Heterodera glycines
atgaaccaagatagagggaaaagaaagagggtaagagagagagagagagagagagagagaagaaaagggagggagagagtgatggatagagaggggagagagaaagaggaggaaacaaagagacaaaggaggagagatgatgcggagagagaaagaaagaagcgaggggagggtcacaaggacaattattaattaaccaccgtttctccttttcagaattccgcacaaacgccgttcgaacaaatttacgaagcagccgattatttgagggaacagtcgccaattccgacaatttattcgacaatgtcaaacggacaaaagtcaaagccaaaaatgcgaatttattcggaaggcggcggatacgataatttggagagattaagagaagaaatccgaaggcaaaaggcggaattggaggggaaaaggagaaaaggaaaagaaacggaggacagcgaacaattggccaaaggcaaaaagccatggcaatcaaaaaaggaaacaccgaattgggcacaaaatgccaatgggacgacagaacacaacgaagagtttgtcggatggacgaaatgttaa

SEQ ID NO: 63876 - DNA, 489 bp, Heterodera glycines
atgaatggctaccaaccatctagaaatgaacacacaggagatgaaagtagtaaaaaaaagaggcacaatacaaattattttagatatgtaagtgaccggccaaatttaggttgacaatcgagcaaataattttattttgaatttaaatatcgaacgaattaaatttaagaaacattaaaacgttttttcgtaaaaaatgattattatcactgacgaaatcacatattaccaaatacaaaatgacaaattaaggcatttgttaaagtttcactttttaaatgacagatttataacggaaactccgaacagtttggcttatgtgtcgcaattacggagtttaatacagaaaatatgccaaattacataacggaaaaactgaaaaacgaattcaaaatttacagaaaattgtcaaaagacagcaagcacatgcttaaagtgtttgaaaggtcattgaaaccaaaaagattcttttttaacttcataatttaa

SEQ ID NO: 63877 - DNA, 1335 bp, Heterodera glycines
  unsure (1)..(1335): unsure at all n locations
atgagatggctcttcgtgagcatctcgtcttnggggcagcggagtaatgccctagaactgtggaacaagtacaaagaccaaatgtacaatccacagggcatcaccagtgcggctatacgccaagcacgggagcaggaagcgctagccgacattgattggcgattgcacttctttaactcaagctgcgtgcactgtggcctcccagatccaccaaattcaaaagccaaaaatatcaatttggcagttgaagaagctttctttggtgatgatgatctgaatatgtcgcctggccagcaaaatcctaggcagcagcaaaacgctccacctccactcaacagcgaccaacaaacggtctttgatgctgttgttaaggcaattcagtcggacccaagggatgcgactgtacctcgccgtttctttatattcggcgacggagggaccgggaaaacatttctgtttggccaaattataaggcgattgcggaaggtcccatacacctacaaagtgcttgctacggcatccactgggtgtgcggctatcttgctgccatatgggaaaacagcccattccacgttccgtctaggcagagaagtctcgctagacaagcttccaagcattccgcttgaaagcttctttgcccgacggatacgtgaggcccaactcatcatcattgatgagatcaccatgctgcacaacacggtgatagaggtcatcgaccgagtgtgcaaagaaatggcaattccccagcacaaggacctcctcttcggaggaaaaacggtcatattcagcggtgactttaaacagtcactgccggtcgtgcctcacgaaggcctaactgcacaagttacggcctgctttcaaaccaatccactgtttggtcagtttaccacaatgaaattgaccatcaaccagaggttgggccaagggcagcaagcgtacttgcaaatgtgccgccaaatcggcctcggagagaccggagaacacttctggattcctccgcagttcctcgtaaagagcagggaagagttgatagactttgtctatccaaacttccaacaactccttggcaatgacaaagagctgctcaatcgtttgattctcgctccgcacattgacacgtgtgatgagatcaacgaaatcatgatggcgaatgtgcctggtcaagtgcgcgaatatttgtcctcggataagccgcttgacgagcgtccactggacatcgatgaaatcgagtccgaagtggcagcgttgaaccggcgcacagactctgggatgcctccccaccgtctgcgactcaaagtcggaagccgtcgttgttctccttatcaacaaaagtga

SEQ ID NO: 63878 - DNA, 393 bp, Heterodera glycines
atgccttcaaaggatcgaagaagaaaagaagcagatcgtttacgctggcgagcggccattcagacacctgacgtggccaatgctcttgggggtccgaatacaagtggtcaacaaccttttggcatagatcagggtttttgttgcttttcatatgataattaaaatctatttgtagaaccttcaacgtcgactggaattcgtgcccaaatcagacaactacgaaatgatggacaagctattgtgggtacgccggcaatgcaactggacaccagtgttgtttcgactccgaccactgtcggattacgggctttgactattgttggaggtcttaatttaagcaaaatttaaactaaacctatatatattaaacaaatgacaggctctacaaataaa

SEQ ID NO: 63879 - DNA, 864 bp, Heterodera glycines
atgagttcatctggtttattttacaatgctttaattcgacgtccaaatgagcgcaccgaagaggtcagttcaataagctcgtcagatttttcttcaactgtttggagttgtttaaatataaactcagaatatgaactatttttcaggatgtatctgtgatattcaaccaattgcgtcgtttggatgtttttgaacggttacacgactcccctcttcggagtgtttgtcgaactgcacgactggagagacacccggccaattatgtgttgttcaggtgggaagaaagcactgtttaaacggacttacagcatgagaatcatttcaaactgaaagaaaatcaattctttaataagtaaacctgctcatggatatattttttattttagaaaaggtcagttggccacttgctggtacattcttctgtccggatcggtgttcatgtgggtattcgttctttatgttcttatcccaattgctattgactttaattttctaaaacccaaaaatatacactgtaaaacgggatttatttttttaacgaattgaaaattccataaaaattaagatttcacataaatttggtagtttttgaaaaattggacagttttagacaagttattaattaatcactatttttaaataagttttgattagcagaggcaacataaaataatccctgaaattttcaggaacaagcaaatctacttgcccattggatggtatgtctgttttggattaattgatattatcttcatttatttgtcaatgctcaaaattagtcttcattttttgcaaacttccgccccgtttgcaccaattatttttttgaaaagttcaaaatggctacaaattcttgctatttag

SEQ ID NO: 63880 - DNA, 111 bp, Heterodera glycines
atggacccgaaattgtacttcgattcggacgatccccaatggctgagttggatcggacaattctcaaaagagatgagtcggtgttcgttgaacacggacgagctgaattct

SEQ ID NO: 63881 - DNA, 683 bp, Heterodera glycines
agttggatcggacaattctcaaaagagatgagtcggtctttgttgaacacggacgagctgaattctgtgcgttttgtgccgtcattgtcggcttaaaaccattttgaaattgtgccgaaatgttcaggtccgagtttgtaccagggaacagttttacggcccggcgggggtcgaagcgatgaaacgcagcggcgaattgtacgcagagcacagaaacggtgcgaaacagtcaaattacaaattaaaattgaatttcacttttattactgtaattaattcatttaatatacacaaattccctaaaaatattttgctattcttaacaaaaaaccctaattaattgaccttttgtggctaaatttgcaagaattacaattagttaggttttgtccgtctttttgttacattttcggcctttgccccccccccccttaagacaatgtcctcgtgttggtcagcggtgcgtcgtctgtccctcggggttcaaccaaagtgtaattaacatgcaattggtacaattgcacctgctgaaggttccatgctcacctcgtgctaccaagagtgggaaagtgtgaggtcagtgagagaaggaatgccaacgacggatttaaaacattcgcaattgcccaacaactaaattcccatagttctaagcattttcactctctctttttacttaattt

SEQ ID NO: 63882 - DNA, 1014 bp, Heterodera glycines
atgccacgcaatgaggtttctggggcgaaaaaaaaaattaaattgcaacataaggtttaataatgttttctttcaaatcttctctagtggaaaagtggacccgttgggaaaaattaaaaacaaagtgagaataacgctattttgcgacacgcttttacttttcagtttcgatctgatatgagtggaaactcggcaattagtttattttcttaatctttgattgttttcatttctattataatgttttttcgctaattgctttttttgcactcagcagcaaaaaagcggggaagattcatgttcttttgaggaattggaagaagagttggagaaggaagagtacggaaaagaggccaaaacggaaagggaagtaggacaaagagaagagaaagtcgaacagaaaattgaggaggacaaaaaaatggaggaaaaacagacggtgagaaatggcaaaatgccaaatacgaataaataagaaggttccattttcagtcggacagtcctcaacaatgccaacaactctttgacatgtttgctgatggggaggaagacggagaggagaaaatgggcgaacccatggaattggacaggtgccaaaaagggggaaaagcagacgaaaaacaaagccaattgtcataggatttccgtcgaaacgaacgcacaaacggtgatttgcacagaagggaccgacttgtggccagactcttccgtctcttcgcatttgaatgaagtgaattcggcattcgctgcctcgcgcacggaagcactgcgaaaactgtttacggtgagaagttggaccatcacattttgttacggaaactatcacccacaaatattcgtcctccaatggaggatttggcatcattttttgaccctttaaaagccttttaggagccgcaacgcttcgcgcaaccgttccaaagagacgcttgttcttatcggtcctaccgggcggagaagagaaaggccaacgacttggaatacatcaccgaaagacacgtaatccactggtaa

SEQ ID NO: 63883 - DNA, 856 bp, Heterodera glycines
atggcctggacctggatccaggaaaaatccatgcctggatccaggtccgtatgcaaagggtgattggtttttatgggtatttttgtttaaaaaatcctattaatcgcaaaaaaaagacaaattaaaaaagacacagtcaacctgtatcgaacttgtgacctaattgtaaggtaatgtaaatgttgatgcactaaccacaacaccaaaacacagcatggacggtaaaaaagaaaaaaaagcgacaataaatctttttatggataattacagaaaaaaattggcgttctgtcacaattaatttttatctttacttatctcaattttatgtactatctcttcattcttaataatgtaaaaaacaacatttatttcgccacatataactttttttctactcatacaatttacaccaaattttgcatatcgatagagaaaaacattctgcatcaattaataggtcaacaagttaatattaaaataggtcgaattagaaagttatggagtgattaaaatttttgcatttcttttcctctcgtgttggcgtactattttcacatctctaacacacaaaaaacatcaaattcgtaaatgctaacaattttggttataaggatacaaaatcactttggaaatttagaattaatagagaaattaatagttttagcatttttggtgaaaacagcagtttaggacttgagttataacgtgataaaaatttgaaagtatcacaacttttttctgagatgtcaaattgcttagcattcacttagaaaaagattctccttttcaaaatctttttttagataccaaatttgttcatttttgttgggaatgaagcgtgttatggctgatcaaa

SEQ ID NO: 63884 - DNA, 297 bp, Heterodera glycines
atgcaattagaaaacaaatttaagtcaacgattattttttgtatgatggctaatttagaacaattaaaagtaaaaaattaaattttaatttaaatttcaggaaatgattctcattttgaagcaccagaaccagatgctctgtttagcagccctggtcaacatagtgcttacacaacggagagaagctgatttccatagatgaaaacaatatattgtttgaccaattctagcgataattaaattatttaactattagattagccatattctacaatttttatactgcaaattttaata

SEQ ID NO: 63885 - DNA, 287 bp, Heterodera glycines
atgattgaaacaatgtttaaaaaatcgatttttgaacctcatgtcaagagtttatgttcaaaatcattaaaatatggtcacgtaatttttagtgttgttcaaaccgaaaaattgaatgaaagcaaaaaataattgaattttaaatttcttctgttgacaaaatttgttaaatcatataaatttcatattttgtcaaaatttttaaaatttaggcttcttttgatgtactaaatgcggtcctacataagaaggcatttttggagccattcaacggaatcgtaaactga

SEQ ID NO: 63886 - DNA, 238 bp, Heterodera glycines
atggcaaaatccggtgctaacttttcacctgacgcaatgccagcaaacaattccgaaggaatcattgtcgattcactttacttggcatggtagaaaaaataatttcattaattttttttctttatttattaaaatgtattaattaaggcaaaagtttggcgacccaaatgcccttctgttaattgttgttggacaagcctatcaaacatttgagcagaagcaagtggaatatttttaa

SEQ ID NO: 63887 - DNA, 312 bp, Heterodera glycines
atgccaaatccaaaaaagaaaagctggtgccaaaaccaagacagccgtggaggttgtcgacaggtaaagtaaactaaaaatatgccaaattaatcgaaaaagcaatgattccaattgctaaatttaatattaaagcagtttgtgaactacaatttaaaaaaataaaaacgattttaggataatccataaagtgtaagcaaataatattatttcaagtctccttatccttaataatttacttgacaattgaacgtttgtccataatttttatttatcatagattttcattatttacctcagtgaatttaaaaa

SEQ ID NO: 63888 - DNA, 616 bp, Heterodera glycines
atggcacgatgtgtcacgtcgatcgcgtttctccccattggagatttgacccccggaatcattgctctggacatggctctccctgacgaacttactcccgtccttgactggtaaattgacaatctcacaaattgtttactatttattgttctttaattgtttaataggttcgtcatgaactacacgggtcgtattaagcatgatggaagccgaacacgcccgcgatttgacccaaacatttggagtgtttacactcgaacactgcaaggcgatgaccggacgaataaccattcagaagccgcgaacagacgcctacaatgcgcatttgcctgttcacatccatcgatttggcatttcattgaccttctgcgaaaggatcaaaagttatcagatgatgacttcgcgaagtgttcaactggacaagaaccaccgcaaaaggcaaagaaatatcgtgaagcagaccgccgaattctcacgatggttcaaaattatttgccacttaacaacgcagacaccaacattttcccaattcatcaccctttcaatcatcattttattattacatttttgatcggaatttctcgaaattatgaaatgagaccgtgatttgaaacaa

SEQ ID NO: 63889 - DNA, 60 bp, Heterodera glycines
ttgcggtcgttcccgcacaacggaatggcacatcagcagaatggccgcagcgaatgccga

SEQ ID NO: 63890 - DNA, 285 bp, Heterodera glycines
atgacacagaatattttgtcggagcattttgaaacgcccattggccaactgatggcacaatttgacatacaaattcaaattcgcgacacggactttggtgatgctcggtttgtcgacatggaaaagaattggtcagctgaacctgttgacaatcgcggtgcctacaaagtgatgctccatccaaaagtgggcgcccgcagaattgtacatggacaagaagaacgttccagcagccaaatgagcaatcggcaaaatgaaatgttcggaaatcaaacagccttttag

SEQ ID NO: 63891 - DNA, 705 bp, Heterodera glycines
aatttggtgcgctttagagcactttctgaaaaaaatatttatgaaacaaaaaaatcgattttttcaagtgtccgtttggggtactcaaacatttatggggagcaaaaatccaacgcagaattaaagtacaggctatagggaagctattcccgaaggattcggtctccccataaatctgggcgcatcggttcggggggactgccccgaaaacaaaaaaatcgattttttcaagtgtccgtttggggtactcaaacaattatggggagcaaaaatccaacgcagaattaaagtacaggctatagggaagctactcccgaaggattcggtctccccataaatctgggcgcatcggttcggggggactgccccgaaaacaaaaaaatcgattttttcaagtgtccgtttggggtactcaaacaattatggggagcaaaaatccaacgcagaattaaagtacaggctatagggaagctattccggaaggattcggtctccccataaatctgggcgcatcggctcggggggactgccccgaaaacaaaaataaatcgattttttcaagtgtccgtttggggtactcaaacaattatggggagcaaaaatccaacgcagaattaaagtacaggctatagggaagctattcccgaaggattcggtctccccataaatctgggcgcatcggttcggggggactgccccgaaaac

SEQ ID NO: 63892 - DNA, 286 bp, Heterodera glycines
atgttttttctggacaaattcctccaggggcttaagccccaattcgacgatgacattgtggacagactcaactattactacacgccaatgttattcatcattttcgctctcacattatccgccaaacagtttcgtttccaatgtttccatttccatggctccgtccgtcccttcagatacgtcggccaaccgattcagtgttggatccccgcacaattcaccggcgcttgggttttcacattttataaattattttattattattcgcatttaattatttaataat

SEQ ID NO: 63893 - DNA, 48 bp, Heterodera glycines
atggacaaaaaatggtacagcagagcgggaatttacgaaatggaccaa

SEQ ID NO: 63894 - DNA, 1467 bp, Heterodera glycines
  unsure (1)..(1467): unsure at all n locations
atggccgcaaccggagaaaagtgtggccttcgtacaaaaaattaatcctggcgcagccccctgcgccaatcgtccgtcgtatgggcctcgccctggcgcactccttgttcacgtatgattgtactgttttcgttgcataattagttctcttttttctccttattatactgagtgaaaaattgataaattatgtcagcaaaatgtcacccataaatttatttcctaccgactgtcaataactggtgatggaattcctacgctctanaaaattgagaatttcctagcttcagccgaaagaaccccacccaaatatggttgatatgggaaatgtttaaaattttaataaaattaaataaaattaattttacaaatttattaaactcattcaaatttgttgacttgcgatttttggaaaacataaaaatcattgaaactttaaaaaatttcaatgaattttcgcggagtaaatttttgaaaatctaaattgaataaatggagaaattaattttcgttttcaacatagaaagcttttggattcagggcctctaatagctcatcaattcgatcaaatgagattcatttgatcgaaaagtgtctcagggcatgtaatttccttgtcatccgccattataaaactcaattaaaattaaaaatatttaaaatcacatgaattcgatatgaaaatggaaaaaacattttcgctggttaaaggatattgaaacaaagaacaaaacaaaaattatttaataaaacaacggtcactaattgtgaagtactgtagttagtgattgcctctgagttttacctttttaaggtaccaatatgaatccagtaaacaaaatattaacaattttaaaggcaaaaaataaattaatatgtctgggaaaataaaaaaatttaattaattgtttaagtgttttttaggattaaataataataaaaaagaaaacttgcttgaaattcaattagtttgaagtgaatttgtttagctacaaaatattaggagattttataataacattttgtcaaaaagagagttaatatcaaaatttctaccaaattacaggcattttccacttccatttttggcgttatggaaggtggacggaagtcatcatcgatgatcgacttccatgccgaaacgacaatggccaattgctttacagtcggcctccgactgagtaattaaaataaaataaaatattttaaattttattatttttagaaatgtattttgggccatcctattagagaaggcgtatgccaagatgtacggcggttatgctgtgcttagcggaggaaaagttagcgactccctctcggacttgacgggagggattacggaagaatgggacttgaagagtctcgatgtcgccaaacgaagggacatggaattggtaataaaaaaaatttaaaatataagccatttttcctaaattccgcaaaagggtactaatgaaaaataaa

SEQ ID NO: 63895 - DNA, 362 bp, Heterodera glycines
  unsure (1)..(362): unsure at all n locations
atgtgtgcacgttgcggacgctttggacgccctcattcggagcagttgtgcgcactggggacagtgcaaaaagaggcggtaccaacgcgtgatgatgatacactgaagcaagcaagcaaatacaataagtacattttggtaagggaaatttaatgtaaaaaaattcaagggacaattgaaaagggtcctcccgcccgaattcatatttagaataaggaatttttgtaaaaaaaatttagcgaaaatattcaatttttttttaattttnagaaatttttttgaatttcacataaaaaactgggaacaagcttttgaaaaaaattttcaaacagaaaaatttcaagaaaaaaattcttaataaa

SEQ ID NO: 63896 - DNA, 361 bp, Heterodera glycines
caaaacgtcgtcgaacgaatttttcgaccataacttttttctttctcaaccaaattaaacattcttggtattattcgaaagcattcgaaaaatgctattagcctgcaaattttcaaaattttttatttatgcacaaaaaaatcagagcaaaaaaagttcgaattactggggttttgagttccttctggccataacttttttgaaacttaacgaaaatttttgtagattttgcaaattaataataaacacatagagctattgaacaacaccaacaattcttaatttgattgacagtgaacaaagttatggttcaaaaagtcttccgacgacgtttcggccgaagacgttttggggtgcaccg

SEQ ID NO: 63897 - DNA, 169 bp, Heterodera glycines
gtgttgtatatcaaattcaactcaaacaaactcgaaaaaaatacttgtttaaactgcagtgaaatggatttagggggattttaacctttaattaggaatttgatcacagttaaagaattaagacactttgttttatatttgaatgcattggcgttttttacgccaacaa

SEQ ID NO: 63898 - DNA, 1975 bp, Heterodera glycines
  unsure (1)..(1975): unsure at all n locations
atgacccgcccattacgcactcggaggaagagaaaatggtcaaagtgagtttcataattcaaatgtttttttgacatttgattattggcatcattccccaaaggtcaaacaaatgatctgtcgtctgttgggtgaaattgatggtcgagttaaacgaattcaatcgatgcgacgcatttccacggaggatcaagtggtgggcatttattgaattgaattgaattattttgataataaattggataaccgtttttttgcccagggcttcatcgaggaatggtctttgcttacatggaatgtgttgtgcatcaccagtcgactgcaaaacgatttcaatgcgtctgtgaagtcgcaggaggaccgggtcatcttcaacaagttgaacttggctttggtcgacctcgtcaacaactcggggtacaaccaattcataaataaccaaaattatttgacccccccccccccctcatttcagagaagctctgagtccgcctttgcttcacccggacgccaatttcgacattttgacgaattcgctggctgagaccatgcacattttgcacggtctttaccggacactgaagtcgaacatgcacatgacgcaggaggaggtggaacagttcgccatgaggtgggtttggctttggatcgggtggttcccaaatgattcatgttaatggattcatttggtaagttaattttttggcaataaaatgccattttcttgtttgccattttcctgccattccgtttcttccttttttacaccatctgctccctttttagacttcagtccttctccgaccagaatttgattccgtttgtggagatgtttaaggtgggtgcactttttggccgttcgttcggccttttctccccgaaccctctcgcttcagtccttttgcgttggacaaactgtccgtttgtggcaggacttgcgagatgtccagattgngtggtaatacacttacgcagtcactatgatatacattaattgcaaaacacacagaccccggggcatttttggccatccgtgggccattaccagtaattggaattttgtttacaaaattggcacacatttttctggcaatggattttcccccacttggccaatgcttttggggtcagtgtgcgcgggtgtgcccaaatgttggcaaactgtgcgctttcctttcccattccaatgcgcagcatcgtcaacaagcaaacgctgccggagcagcccgtggtccgattggtcactttttactccttccaaatgcatcgtttggccattttggctgctcggcttcaagtgagtttttccatctgtgttattacttggaacagattccgatttttaaataaattcaaaataaactaaaattaccttcaattaaatttcagggctttcgctatgaactgacggtgaacaatcggcaaatgtttggcgactacgaccccgtccgcccgttgtcggacagtgttttctccgcgttggaactgttgatggccgattgtggtttgtttataaaaatttattaatttttccccaccccctttttaatgtatgattaaattgttaatccaattagtcatttcttcaagttttggccaccgagccgtcgctgaacccaattctggtgaccaacaaccttttctccatcaattgtggtgcgttggctcgtggcgtggtgttcaagcagttcgacgtgcaggtggtcagtgaagaaatggccgaacatattcaggtcattggagtggagaggagaacattgaatcagccatcaattgacacaaaaaaaattcaattgtctttcagtccgaaatgcgtcgccaacgtttgctccagcagccgtctccgattgcccaagtgccggccgccgcactgttggccatgaaacccaccagtgggacgaagcgctccaacagtcaggccatcaccggtcagagggatgggccatcaaaaattgccatcattttggacgagtaa

SEQ ID NO: 63899 - DNA, 1760 bp, Heterodera glycines
gatttgtcccccaacggaatggacatgaaaagtgccggaggtggcagcagcggaaagcggccgatcttctacttttacattcgtgccacgatgttttctccgtccggacggtttgcggatgcgcacacactttcgctgccgttcaccatcgccacacggcgtaaccaggactatcaggtggggaagggggggcgagcagtactttaattgtacaataatattaatggcatctccaaccaacccatgttaaggtgcaacgtatgatgagttcgtacaccgccacctgcttttggctgtacggaaacaacattcaagtaattttaaaattcatttttaatttattttcaaattgaggacggtttgctgttgcaatgggtggagacggcgatgggctgggagaagttcaagtttctgttcatgcagcattttcggatcaacgccgaggtggagcggggtttacaggacaaggacttcgacctgctccaggttgatgaacccttcttttgatatgaacatttttcaaattgttttagtataaaatccaatgcaatgactgttcccctccttcgtccacatttagtggagatcgtgagctttgtttcgcttaaaaattggatattttttgaaatttgataatttaattaaggcaaaatcaccttcaaaaacattctgtgtccccatttgcgttacgaatgtggctcaacgaatgtccgcttcagtgtgtggcgtggactgctcgaactgctccaactctttcaggttcaattggccgccgcgtcacaaataaaatttcattcaatgatttgacaatttaacaaaggacacaaaaacgtgcgtacgcaaattgtgggagaagcagttgatcatgggtttcatggaatttgaccaggcaatgccataaaaacctctaaaacgcgcccctccataaaaagaaaaggttaaggtgtccgacactctctcctcctatccctccgctttgcttatgcgtctgtcctttgtcaccggcggtaccatttgcatcactctcaagtcaaccgtccactcggaggatcgggcgccaagtgtaccaatgcatttggagccgttggacctgaaaaagctccaagccaaaagtctcaccgattatttgcgggacattgccgttgcggagaaggtaaattcaaaaacattaatccaaccaaatttaattgtaaagtaatctttcagatcaaatatctgatcaactcgcagggagagccggtgctgatcagcgacctgttggagcagttcagtgagaggacgggcggtggtattgaggagttggaaaccagccgatgcatttcttccaacgtcacacacagcggcgacattgacgccatgcaacaaataacgtaagtgcaattcgggaatgtttcgatggcgcgtgattattggtcacttttcccgtttttgttcagtttcaccgccatgcgaattgctgtggtgacgtgcaaagtgaagccgcccagtgccgatctgatggaatatgaggaggcggcgttgcttcgcggcgatgtgcagccgaaggtgcactcgccggtcccgtcctccagcaacggttacccgtctccgtctttcaaccccgcttcggtgttccccggcagcgccggcggtggtggcggcggctatcggctgccttcggtcagcgcagcaaatgacgattttgtgcgggaagtgacccaattgtgcaacttctggggcaagtcgaagcaggtcaattcacagttggcaaatttacgcat

SEQ ID NO: 63900 - DNA, 2895 bp, Heterodera glycines
atgaacaaggttatagacaaaaaattcaggccatgcgaaaactgccggattttttgcttttttgaaaaatactttatctattttcctttaactccttccattttttcaaggctcaataccctcacaaggtcgcataatcgggaagggcaccttagcgcagaggtaataattgtatttttaaactgtttactgacataagcattttataaggaccaaaaaacatatttttttttattcaacttaaaaactgtttttcagtcgcgcagcaaatctcgtggagcgaagcccatgtacaatgcccagccacgccgaacgcagcccgaacaaatgctaagccttgagacggtgagttgatcagaaaaacggaaattatgtatcaaatttttacataattttacaaattttagcaagttgttctttgcccaaaatgttcactgacattctcttcacacagaagtttgagcctacacaacagaatacataaaaaaggtgggtaaatgacaatgtgcttattgaagaaaaaaaatgaaagaatttttaataagaaattgtgaatttttgaaaaaaaaattgataaaattccaaaatttattgcggcgctgcaaattttttgtcaaaaagcgagggaaaattattttctaattttttattaaaataaatttcttttaatgtgataaaaaaaatttaaaaattgatcattattttttgaattttttcagagaacccgaaggaaccgcggacgacgcgcagtgccggcactgacgctgccccgttgacgccgcctcgtcagcgcatggtcaatgtaagttttgggcggtaaaatttgaggccataaaaatggcacttatacagtttaggcccaaaaaaacaaatttatttttacaattttgaaatttaattaattgtttaattattaaatgaatttttacaaatgtcgcgggctcaactaaaattttcgtaatttttttattaaaattaaattcagaaatttaatttaattatttcatttcatttcatttttaaacaatttacagctcgacgagtcatcgggcccggacgatgtgtttgctgaagctcatccgatgcaaccggtcgctgctgacggtaagagcaaaagctcaatgcgaaaaaaacaatcgatcactggccaatcgatcagtggaaagtccattggcaaaaattaaaattttaaaaaacaacaaggattttccaattttacatattgaatttaaaaaggttttttaatttttaaaaataattaatttatcattatacaaaatatattattttaagttttttatcaaattagataattataattttttaatataatttaaataaaatttgttttcaaaattaatttttgttgacggattgtccacttatcaattgatcagtgctgatcaattgatcagtgacggattgtccactgataattttgatatttttgggtttttattgaatataaagaaatttttgggcagcgctgggcacatcgggagggaaattttgataaaataaaacgaaatttgttaaaaattttattattatttctctaatctttcattcttttaaggtaccccaacattacccggaggcattccccgcaattcccaagcccaaattgacgttgtccggaaatcgacgtcggcatgtggcaaaaaaaattcggtgagtaaatcaggttttaaacaggggtctcgactgaaaattttcaagatcagcattttgattttggcttaaaaatcagcatttcaaaattttattacaaatggttaaaaatcaacaaaaatgtttttttgcggcgcgcttctaaaaaatatattttttttgtggaatttggagggggaggtgccgatagagactatacataccgtatttgctctaattatcccccatgggggattatttttcaacctcctcgtagactgggggataattggagactgggggattaagatagagggattattcttcaaacccctcctagactgggggataattggagattgggggattaatggagattgggggataattagagcaaatacggtatattcaattttattccctcctgttcaaatggcacacacaaatgggagggtacgggttattttggcacgcgctgccatctttttgcgtccaaagttgttttattttaatttttgtaagccaaggcctcacccgaattattaaccgtatttgtgtgcctaatggaatgtgttatgcgtgccgttttgagcagattcatgtaaaaaaaagagttgggagaaggtgtggaaagaatggaatgttttcagcgctttgctttgctgcgttagcgtcgcttgacagcagcccaattgtgtgaattgcgctgtcgccgcgcctcttcaccccgccatttttgactcaatggagggggaattcttcgtgttttgttctcacttttcgtttgctataaacagtttcggtcagcttcacaaaaacagcgaaactggcttaatgccccgcgaactttgctttttacatgtgcaatttttgttaaagaagcataataattaaaataatttaattctttattttttaaggtccataaaaggaaaacaaattaataaatatttaaatttagtgcctattttattgcattaaatttgggtggggtcgttttagcgtttagcaatataatttctttttgtatcatttggaaagctccaatgtactcaattatttagttaaaattttgataaatgtatatataatcaattaaacacgccgcactaaaacggcccatctcgtgaaacaataatagagttggtggtaacatgaggttctacagtacattaatgagtattattgtatatttaactgtgattatataacacaacaaaaagtttttttagaaaatataataaa

SEQ ID NO: 63901 - DNA, 646 bp, Heterodera glycines
gatggagggatacaaatggcatttcaatgagacggtaattaatgccaaaaatggggggaaaacaaaacaggaatcaaaggcattatgcttttgattcgttttaatggaacctaatgaaaaaaaaaattgaattttcggtggcatgaatgggtgtattgtgtcctcagaaatcttacccgtagatttgaaaaaaaaaatggatagcagggggcaagggcgcagccagacccttggttttgtgggggggggggggggcctgaaatttaaaaatcggtttttagaagtgtttttttagaaatcccgtatttcgacgaatttgtagccgtttcgacaaaaaaaaattactattttttgccatttggggtcaattttcaaaaatatggcaaaatgggaggagtggtatgtactcaaatgcctaccaggcatggttgggttgggatttgcctttgctcctccaaaatttgttgcccatttttcccaggtgctcactgtgtggtcggcgcccaattattgctaccgatgcggcaatgtggcggccattctcgagctggacgagcagttgaacaaggactttaccatatttgaagcggctccgcaggaagtcagtggtgtcaaaatcaaaactaataatgtccccaaccaacgg

SEQ ID NO: 63902 - DNA, 1461 bp, Heterodera glycines
  unsure (1)..(1461): unsure at all n locations
atgccaatgagancagcgaaggcggagctgacagcaagaaaaagaagaagaagaacaataaaaagaagaaaaacgccccgnttgtctgtgcacaatgaggaagtagcaaaaaaagaatcgaaaaaaggtgtggaagacgagcgggaggatgacagttttggagagaagaacaaggtccgccttgaagggaaggggcgatttgatctgtgccgcatttaattttagcgtcggacttcgctcaccgattcgccattaactgagctcagtccgtcgtcaacgactagcaacggcgactcagcggacgacactgaggtggccaaaagcagcagcaaacaaggttttttatgctttcatatttaattattcatttccattgcttggccactttttctgcaggttcgtcgtgtgggactgtgtccaattcgtcctcctccaacttttacgttgtcaatgcaccgccttcctcttcatattcttcagttggagaacgacaacagcaccagaacatgcactttttgagcgaaattacagaagaggaaaacatcaacgaagtggagcgcgagtacgccttcgaaattgtaatcaaccagaaaaaggtgcagtttctgaaagaatgtgaaagggtggggggagtgtttttatttatttgattaatttccctctgatatttggcggttctttccgaattcgtttggccaaaaatcgttttagcatttgattaagcagctgaagtacaacaaatggacggagcagttgtgccagtcgatcttcggtggggatttccgcactttttaccgtcgcttcaaaatggtgatgatttgcctacgcaaacggaaatctgcccattacgagcgacttaccgatgcacaattggcgtcacacgtggctgaggtgaaacgaaattattcagtttttctagttgaaaataaatattttttagatgatcattgaaaagtttcacaacaaggagaatcagaccaccattttgatggttttgctcagcaatagtgagcgggaagtgaagtgtgcggaccgcgaccacggctattgcaggttcaaatagttttccaaattttttatgaagtatagtggctctatgggaattgaatgttgtgggttatggaatttgatacgaaagaaattgccttttgttagcatgacgacggatgcagttttttcgcggggggggggtgagtagcaccctcatgagtgacgatttttgcaattccaaggcacggcctgtgaaattggatccgttttttaaaatcagaatccagacctcttattgttaacgcatcaaaatattctttaggattgcgcatatgttgttgaagctattgactcgcagtcaattggaaaaattgctcgaagtgaccgcggcgaagagcggaaaaaacgcattgcatttggccactgccactggacagtcatgtcaactgcaagtactgctcgctcttacag

SEQ ID NO: 63903 - DNA, 859 bp, Heterodera glycines
ttgacaaacattcgtatcgtaacggacagcacggccgacatacctttggcactcagacaagaacttaacatcgagatggtgcctctcaagattcattttggagatgaagaatatttagatacggtgacgctgcagtctgaggaattttatccgaagctgacctcgtcaccgcactttccccgaacgtcgcagccgtctcctgcggagtttctggacttgtatcagggactgctgggagagcccgatacggaggtgatctcgattcacttggcatccgtgctgagcggaacataccagtcagcgctgctggcttccacgatgctggaggactcgtcaggcaaggttcatgtgtttgattcctgctcggcttcctatgggattggcgctcttgctgtagctgctgcccgagcagctaaggcggggcaaagtgttgatgagatttggaacttgtacgaacgatgagagagaacttttacatatacttcctcgtagatacgctagaatttctgcaaaaaggtggaagaatcggcaaagcatccgctcttttcggttctttgctaaacataaagcccattctttcgctggatcgaacgggcgaagttgctgcgattgataaggttcgcggtcacaaaaaagcggttgcgcgaatcttagagctgttggcggcggatgtacccggtaagacaatccgcagtttacatattgctcatgcaaacaatttggaaggtgcggaacagctgcgcgcggccatcatgcagcaatttgttgtagagcatgtggactacattacactgggacctgttattggcgcacacgctggaccaggcaccatcgcagcgttcgtgagtacggtgtaaga

SEQ ID NO: 63904 - DNA, 425 bp, Heterodera glycines
ttgtgtcccgtccaatcgattccgcagggtcttgcagccattctaggcgttccaagagaaagcggatgccaaaacaaatacggaagccatgagtgaatcacttcgacgtgtcaaatcgggccaagttacttacgctcgtgcgcgatacgaacacggacggtattgacatcaaacagggccattttattggcattcaagatgggcgcattgtatcttcacagccgagtcttctggatgcttgcaagaagctgctggaggaaatgattgaagaaagcagcgaaattgtcactatcctcaccggagaagatgccgttgatgcagagacggaggagctggaggcgttcattcaggcggcttatcccgacattgaaattgagcttcatcctggcggacagcctttgtatgcgtacctgttttccgttgag

SEQ ID NO: 63905 - DNA, 73 bp, Heterodera glycines; identical to SEQ ID NO: 56411

SEQ ID NO: 63906 - DNA, 423 bp, Heterodera glycines
atgaggacaacattggaaacgggtaagtgaatgttatattcaatttcattcatatttgtttctatttttaggcttctcgacgcaactcccggcccgagtgatcagcagcagaagtgaatgaatgaattgttaagaaatgatcgaccaatttgaattatgaaattattgacgtgttcataaatattgttttatttttgttggattgatcattgatcaacttggatttgtgttatgccattatgataaattcagtgattttgtgggtcagcggagcgaatgcgttgtctttttgcttttctcattaaagccatttttgggtattctctgaatccgaatccgtcaccccgggtaaaaccaaaaagtctcagaaactcctccccttaaaataatagtccgtaaaaacttttctcaagcacaaccaaa

SEQ ID NO: 63907 - DNA, 907 bp, Heterodera glycines
atgtcagacagccgaaaagaagcggaggaaaaaatggcaaaagcaatgtaaaattaaaatgccaacttcaattttaaattttgttttttttttttttcagtttcatctccgccgactgttggctttgtgtcttcgatttgcttgagccgtcacaacttggccttggcatttcaatgatcagccaccgttttgacatttacgtggacgaacacttcaaaacccgcaaatgggcactgaaatttatccgaattcgaggcaaaattggagaaaatggcaccaaggaaatgaaaattgtcaaatattacgattggaaaccattgccaattccgcaaaagccgttgccaaagagagtcgtcggattcaaagccatttcaatagagtaaaatgaattaattaacaattttcaaatgtaaatgatgcaattatttcattttcacagatacatcgaccaaaatgccatcgcttttctccgccgttttcgtcaacttttcgccaaatgtcaaatcaatttgtccatcgatatatattacatttacactgaccgaattatggtgttccttttgcacaacatttggccaatgatcggaaaaaacatttatgccattgaattgcgcgtcagaattttccgccgtttgcgtcaattcgtcgatccgtcaattctcaacaattgttcatcgcttcgcgttgtcatttcatgtgccgatgatttcttcatcgaattcccatctgctgacaatgccatggcgtcggatggccaagcgttggcaaaatggcttttcactccacttcaagacaatgtgccaaagatgctaaaatgctcgttggacatggattatgatgggaatttggtgacgaatgttgaagccttcaaagcggtgatttcgaattgattttatttgtgattaaa

SEQ ID NO: 63908 - DNA, 623 bp, Heterodera glycines
atgctcaacaaaaacagacaaacggtggccaaatggcttttcactccacttcaagaaaatggtgtgccaaaagtgctcaaatgttcgttggaaaaagatgatgggaaatggccgttgaaaattgaagcattcaaagcggtacttaccgtgaactaagtaatttattaatttgtttccttcatattttaggcatttgccaatgcttcatctcctgccaatttcatcgttgtcatttcgtttttgtggtcttttgctgtgccatttgtgctgaccaacgaatttactcgagaacagttggcattgaaacggattaacaatagccatcgatttttgttggaccgttgtccaattgtgcgaaacgtaagcaaatggacaaaatgggaaaaggaagcgattggatggcaatttaatggccaatggaacaaaattaacattcgaattgataatgagcgtcaaattggggacgggtcagtgaataaattattcaaaaaatccaaaattattgcatttatctttttaggcttctcaacgcaatgatcggcccatgtgttctccagaagaagtgaatgaatatgtattgttgagaagtgatcgatcaatttaataattatggaattattaaa

SEQ ID NO: 63909 - DNA, 123 bp, Heterodera glycines
tttttgggccccagggtcgtttgggccccaacccaaaaatagaaaaatgtgcttttttaaaaattaagattctaaaaactaagcctgaaggatccctcgccacttggcataagttaggtttaa

SEQ ID NO: 63910 - DNA, 1959 bp, Heterodera glycines
atgcagcaggacgacttgttcatgggcatgttgacggtgaaggagcatctgatggcgcaggattggatggtcggagacactaaacggacgatgcgcagacgcgtcaatgaggtgggatctggggggggggtggacagtggcagtggcaaaatgggaataatttaaggtaattgacgagtttggtctggaagagtgtcgccatgagctcgttggattcagcggagtaattatcatttttaaaaatttacaattgcaatttctaggtcgaaaagagcattttgggtggtgagacgcgtcgtttgctgttcgcttccgaacttgtgaacaatccgcaaatcatttttgctgatgaaccgaccacggtctgatttttggtctaattttcgaaaaaaatccaatttttagggcctcgacttttcaatggcggaaagtgtgatcagcgtaatgcgtgccctggctttgtctggccggactatcatttgcaccatcgttcagccgccattggacatttactgggtatgaattcacataagactttgacccccaagtgcctttaggttctgggacccgatcctctttcgattcgtaaaattattatcacaattgtcttttttccaattgaaaatgaaattgtaaacttgccttgtcttccttttttgttctaccaatatccctctaccattgaattgcagcactgaaatgtttttattaattatgaaattctgcagatggccgcaggaaataatgcgcgattgactcgtgacgtaagtttattttcatataattgtggggaatttggtcacagcttgttatcatgggccggaatgaatttttagtggaagaagtttgtaaaaatttatgagcataaaactgaagcgtatcgaacgcaagaatattcaaaaaagacctaaaagcattttctaatcataattaactaaggatccaaaaaattttgagtgcaataatcgccaattttaaaattatttggcgttttattttaaagtttttgttggtttatatgtttactacacactaccaaaaaaaaattcctattttaattagtgatgtacatccgagagttagaatctccagatgagcactctctggttttattcaatccgcttcgttcttgctttcgtcctaatagagatgttcgagaataatgaaatttgattttttaggctaaaagattgttatagttgaggaagaaataaatttataaattgggttttgattcaatatctcataacaccaaccgtcaaaatttaggaattgttttcggcaattgcctgtcagcgacgctctatcgttcgtctggacactgaaagagcccgattccgtcgtttgaacggagctcagttccgtgtggttgtgcgattgtcaggttatttttaaaaacgatatccaattttagcagtttaatggtgaacaaaccgcgcgcattgtcagctcaccctttgttttcattgtttgaaaattaaacaaaaagattaaaccagggggtcgtcggggcttctgatcacgaatatgaatatcggatttgcaattatttatttaccatagtttatatcatatatttagaaattttgacaaatctaattaattattgaccctaaatctatgcttttcaaaatcactgattttcaaatcaatgttattagtgcgtgatcagaagccccgaaatccccagcagcggggttggtctttatcgataacagaaaattatttttatggagcccatatccattataccttaaaaagtagttaaatttatatcttacagaaaattcctcgatttaggaggcttcttgccaaactttgctgctgttatgccacagcaacagaacggtgggttgtcatttcccttcgttttaccaatctgctcatttttggcacattttagtggtcaatgttgctgcggttctcgccaatgccaatcccaatggacagaattataat

SEQ ID NO: 63911 - DNA, 1582 bp, Heterodera glycines
atgatttttacggaaaatgtggtgccaatttgtttggccaattccacttctgaaaaagttttcaacaataatttgcacattgtcggctggggacatcagaatggtaattaattattaaatgctgtttaattaaaaatgattttttttttgttgattcgctaattaggtataagatcatccaagaattaaacaccaattaacattgaatatggacacacaaaattctttataaaagtgggcatgtattttacagaagccgactatgatgaagagggcaatgaacggtgctaggtcatttcgcgacaagtgcaaaaataaaaatcaataaaattgggcacttcgcgacagtgcaaaaatgggcacttcgcgacagtgcaaaaatggtgtataaatggggcgtttcgcgacgggaccagagcgtttgggcccccgtttttgggcccccgcgtttgggcccccgtttttgggcccccggggtcgtttgggcccccgtttttgggccccggggtcgtttgggccccaacccaaaaatcgaaaaatgtgcttttttaaaaattaagattctaaaaactaagcctgagggatccctcgccacttggcataagttaggtttaattaacattcgctcattttttacaattttacttattccaaatcctattattttttaatagttaaccaatttgatgtacattctgatttggacatttttcagaaatggctaacccaattgcaaccaaaaaacaaaaagtaaaattgtcttacgaaggccacctttacaccttcgctaaaatgagttctgatgggatgacaaaattttggagatgcgagttcaaaaacagcaccgacaaatgcaacggccgaatctggacggacctccacgaccaattcattcgcctcgcaactccgcacacatgtccagcagatgcgtcacgtgttgatgctcaaatggtcacgaccacaatcaaaaggcgcgcaattgccaccttcgaaccgccttctgtcatcagagcagaagcgcttcaaaatgtcccgtctccgtcggcaattttggtgtcaaaacaagcagcaaaagatgtgaaaaactgcaccgattctgtatttgccgagaacgctcgaatgatcacgtctgttgcgttcgtgcccttgtgtgacattagaatggcggtagcggcacttgatacggagttcggaaatttggcggttttccaaccgctgattgactggtgtgtaaactttttttaaatttaaaccccactgaaattacaggctattaatcaattacgttggacagcccaggcccaatggcacatggtctcaaccaacttttcgccctgaacaatggaacgtctacacacgcacgcttaatgccgatgcacggaccaacaaccactccgaggcggagcatcatcgtctacagggcgccttcaattgccgacacccgtcgatttttcacttcattgacgtgctacgtcgtgagcagaagccaacagacgtcaaatacgcgtcattcatggccggagaggaccccccaccaaaagaacgaaagtttttgccgacagatgaacaaattcttaatttg

SEQ ID NO: 63912 - DNA, 80 bp, Heterodera glycines
gtcctgcccataatatctgtggcatggaataaattttgtaactgcgctgcctaacggcggtgcttaaagtgcgctaaaaa

SEQ ID NO: 63913 - DNA, 80 bp, Heterodera glycines; identical to SEQ ID NO: 51817

SEQ ID NO: 63914 - DNA, 1621 bp, Heterodera glycines; identical to SEQ ID NO: 34013

SEQ ID NO: 63915 - DNA, 743 bp, Heterodera glycines
  unsure (1)..(743): unsure at all n locations
atgtggttttcgtgcatttctcgtcgagttaaagcngcagaaaaaataagtaaaaacttaaaaatccgcgtcctttttataaatatcttttttaaaaatttaatccagtaaaaatgaatatgacatctaatttcagtcaaggacatttttggattattctaatcaattgaaatctctgacgtcgatcatttttctgattttatgtttcttagtcaatttgttgacactaattgcttataaacggcaccgaaaagcgactgtcacgtcattgagcggaaactgttaatttactcgctgcttacttttgctggccacgcccttttggcggtgttttttgtatgtaaatttaaatttaaaaatatttttaatttaaatttttattaactacaaaataaacttattccaatttcagctttccgtcagcgaattcgtctggccattttatccccagtacagtgccatcatttacatccaatacccatgggtcaccgatctttgcactttggtgttgtccagttggctgctgttgtgcacaagcgacaaatttcggcaccaattaattggcacttttttgccaaaacgccttttgccgtcaacgagggcacaaaatgttgttgttccattggacaaaaacaatgtcttaattacagtgcagccttatcattcatcaaaatgggcagcgagatgacagaagcggataattgattattgaaaaagagatgcttattttaattttaaataaa

SEQ ID NO: 63916 - DNA, 657 bp, Heterodera glycines
atggcactcggaggatggaagcgtgagcgtgctcgactccgttctctacaaaacctgaaccgcctgttcgtccgcccagcgctgaccaaagaacaactcaaggaagaatatgaagcgcgcgtccgaaaacgtcaacaaaactctgctcccgtggcaccagcaatgcaacatcgccagacaaatgttccgactcccgtcaaaaaaaatggaccaaaccagaaggaggccagcgacgacatttccaaaccgccggaagtttttgaccaaacaatcctcgtatgttatgaagcattaaaatcattaccaccaaacgacaaaattgttcaccaaattcaatcactcgaaaaacaataccctcgtcttttcaataaatagttctgtcagacctccaaacatttcctcaacaaaaaaaaaacatttattccagtacttcacatttctcaccaaaatttttcctcaaaaaaaaaaaatttttttttctcttctacaaccctaaaaaaacaaataaccacttttccctttgttggaggtctgacttttctaatttctgcttctccttcaaaatttcaattcttttatcactgctttccatttcaccttatttccgccaaaagagtaagtggcacatgtccttcttttggttatttttatttttga

SEQ ID NO: 63917 - DNA, 855 bp, Heterodera glycines
taattaaatccattccttcgggggaccgtgccgggtgccgcggggtaagcagtgctggttcgtttcatcacggcaccgaaccttttggctagtcagcaatcgttgcttaacttgccagatcggacgggtgcgcatgattccactgttccaagcaccccaccaaaagcaaaacgatataaccaaaatataaggaaaaatttttaaaaaattttttctccatcttcctttttgatactaaagcatcagagtgctaaaattaacttgtaaataaaatttggtgcgctttagagcactttctgaaaaaatatttatgaaataaaaaaatcgatttattcaagtgtccgtttggggtactcaaacaattatggggagggagcaaaaatccaacgcagaattaaagtacaggctatagggaagctattccggaaggattcggtctccccataaatctgggcgcatcggttcggggggactgccccgaaaacaaaaaaatcgattttttcaagtgtccgtttggggtactcaaacaattatggggagcaaaaatccaacgcagaattaaagtacaagctatagggaagctattccggaaggattcggtctccccataaatctgggcgcatcggttcggggggactgccccgaaaacaaaaaaatcgattttttcaagtgtccgtttggggtactcaaacaattatggggagcaaaaatccaacgcagaattaaagtacaggctatagggaagctattccggaaggattcggtctccccataaatctgggcgcatcggttcagggggactgccccgaaaaccaaaaaaaaatttttggataaaattatttaaatgaactgact

SEQ ID NO: 63918 - DNA, 570 bp, Heterodera glycines
atgttgtcggaaagtgcagacaagaccttgctctcgcattcgttgacgaacgattctcaaactgctgcggcaattcagatagtaactgcgttgaaagacacaattttgtcgccaaatgtttcattagttgtgatttgtttgtactcttatcaaaaagaatcacttcaaactgaattcgaaaagcagcgaattgaggtacttgtcgtgacggtcgatggctatcaagcacaagaaagtgatttggtaattttggtaacaacaagaacgagtcttcgagatggggcattaagagcacttcaagcagcacgtccacatttgagtcgcgaaaaagaagagcggatgagcccgaccaaggtccgagtgcacgccgaaatgagacatggaggccgcagcaacgtcttggacaattcagcggtgccgtttttgtcagaagtcgcgaaccaacgggtcctcgtggtgcttgctttgtgtgcaaacgtgtcgggaatttggcaaagaactgttgatatgcggatggacaatcagcaggacgtggtcaaccaaggggcaaagggcaatggaaataaatag

SEQ ID NO: 63919 - DNA, 3783 bp, Heterodera glycines
atgtacatgtgggccaaagcgagcgctttcggagacgaagaagcggcatctgcaattctgcggacaccaaatccaaaggagtgcaagcgaattggatcgcgaattcggctgtttggcacaactgctttggcgacgcataagcatattcgtgatgacttgcgccaactggcacaaatatagacagaacgaacacctgatgcgccatctcttcaattttggtcccgatgttgaatttgttgaatgtacagcaaatgacgtgtactggggtgcaggagtggcgctttcggatgttgaaaaaatccgcgacataaaccgatggcctggtaaaaatatccttggacggattctctcagccttgatgaagaaattcctgcgtaagaaatctggtgaaatgaaaacaaaaaaaaacaataaaaaaataaataaataaataaaaaataataaataaataaatccaagattttttttaatattacatataataataataataatttaattataattatattaaatcctataaattttttcaaataacaccgcaataacaaatgatttattacagaaatgtcggcaccaacagcaccaccaaatgttcgggacctgagcgagttcccgccgttggaaaagttaacattggaggatgtaaggaaaaagaacaaaattgcctcggcaagcccaagtggaaactcaaatatttctaaggaaacctgtagtagtgcaataagtgtggatttagttgcttcggcaagtcaaataacttggggaggggaaaaagggaacagtgggcaagaaaaaggggaaaagaatcaaaaattaaataaaaatgttgcttcggcaagcccaagagattatgaaaaatttgcgaatcaaggatttgacaaaaacccggatgaaatggctgaagaaatgatggaagaattttcaagttttaatgtgagagaaaatgaaggaaaaattgttgaatacctggtttgccaagtagaagaaaatatagtgattggaggaaaattgaggacaatggcaaacaaaggctggccacattttgtagcaatctcaaatgaggtggctgaaaaagcaagagagtttaaaaagaaattgcaaatgggagacatagttggagtgaaaaaatttgagtggaaaaatgattaccgatacttagcaaaaagagaaactgacaaaagtcatttcaacaaaatgtggtatgtgcaaaaaataaacagtcaagcaacagtcattgacctcggtcatataagatatgcaattctgagggaacatccgggtttggtcttaagaatcagagaaatggtctcaaatggtgtcacgaaaaagctttgtgctatcattatttctcctggtctgcagttgagttcgagatgttatcggcgtcagctttctgagttggaattggagtctctccaagaagggcagttgataaaagtttggactgcttttgttccagagcaaacattagtagaaaattcgttcatacttccacctcaaagccaatttcgactggggactgaaaagcagatagaggaaggcaaaggagttctctccattgtcggaaatcatgcgccgtggccataccaatcgaactctcgcaatgtcttctttccgcttttgccagagatgactctgccggaaattgagttgtcagaacaaatcatgagttcagcgattgcctacagctttgaagatgaggaaaagagaattgttgagtgcaaatttgaaggaagagcagaatggcagaacgacactttttggttgagatttgctgaaattgataccgaaaaaatgaaaaaattgaaagaagtttggacagaagaagcgaatgtcttcttcagaactgcgttggatttgccgcactttgcttttggctatgtcaaacaaattgacattgagagaatcagagaggaaggaaaaccaaaatttaatttttggataatggccaaagtcaccaatgtccaagagagaaagtttcgtgatgttcatgccgaattggaagcagcagaagaaggaggtgtctttgtagtacacccgatcattccgattggagtgaaacacagaagggattgctttgcttctaatttgccatcaaaaattgcaaatttggaaacaaaacaagggaaaatgatgcgtgcggtattaggcagaactgaggagataattgaggaaaatgtggaccaaaatgcttcggcaatacaaattaatcacgcattgatgaaaaaattaaatgaaaagcagcagcagacagcaaaacttttgttgagcaaggagtcgcactttgtttttcagcatgctccaccgggtgttggcaaaacgtatgttgccgcaattgttgcagcaattcttttgtcgatagaaaaagaaataaaaattgccattgtgacagcagcaaatttgccacttgcaaaattagtccaagaattgaatgatgtatttggttctgatgagatggaagaatcaggttcagttgcattcttctcgggttatgccaaagaaaagtacaaagaaatgttagaaaagttgaaaaggcatttgttgatttccaaaatttcgaacgaagaaataataagcaagtttgagacacaagacgatgtgaaggaaattgagacttattgtaagaatttcgaagttcgaccacgcttaacgaaagaacgaaaagtagcgaatttgtactcagaagttgcggatttgcggattgtcttcaccacagtgtcgatggcagaaaatttgattcacacagctttagacggcacaacagtcttaatctttgatgaagctactcaggggtcgtgggtctgcttagcacatttagtagccagaatgccaaaattggagaaagtcttggtaactggtgaccaattgcagcttggtgttcatctgcagaaactcccgcctttgctacaatccggttttggtcttgaatcaatggttgatcagttgatcatgtctccgacagttgttcaaactcgtctaacgacttgttacagaatgcacccgacactggtgaaagcagttgcttcggcagtatatgagccaaatggagaaaaattcgaaccaggaagagcagctgaagatcggtccctcctgacagcttcgaagtttcctctaccaattcaaaattgtccaattgttctgctgaatgttgtcggaaagtgcagacaagacccgctctcgcattcgttgacgaacgattctcaaactgctgcggcaattcagatagtaactgcgttgaaagacacaattttgtcgccaaatgtttcattagttgtgatttgtttgtactcttatcaaaaagaatcacttcaaactgaattcgaaaagcagcgaattgaggtacttgtcgtgacggtcgatggctatcaagcacaagaaagtgatttggtaattttggtaacaacaagaacgagtcttcgagatggggcattaagtgagaattcagaatttttgaaggattcgagaagggctacagtagctttaagcagagcaaaaagtggtttatttttgattggcgatttcaaaactttaagtgagggagaggtgtggaataagtttttggaaacagcaagtgaggactctcaaattgttggtgaggaatatcttcagatcctacgaaatggtcgatacatgcgtgatcgatatgggcaattaattgatggcattggcagagtagtccaggatctacagtggttacaaaagaatgatgaaaattggcgaacgatgcaacagcagagtacttcaagcagcacgtccacatttgagtcgcgaaaaagaaat

SEQ ID NO: 63920 - DNA, 1138 bp, Heterodera glycines
atgccgactgcgaaagttgtcatatcgcaagatggaaggaaactcgtgccattcttcacatcagcatatccattttccaatcacttctcctgccgatttgtcattgatgggcttgaattttcctccagcgaacaaatgtacatgtgggccaaagcgagcgttttcggagacgaagaagcggcatctgcaattctgcggacatcaaatccaaaggagtgcaagcgcattggatcgcgaattcggctgtttgacacaactgcttggcgacgcataagcatattcgtgatgacttgcgccaattggcacaaatatagacagaacgaacacctgatgcgccatctcttcaattttggtcccgatgctgaatttgttgaatgtacagcaaatgacgtgtactggggcgcaggagtagcaatttcggatgttgaaaaaattcgcaacacgaaccgttggccaggaaaaaacgtccttgggaagattctctcagctttgatgaagaaatttttgcgtaagaaatctggtgaaatgaatccaaaaaaattacatataataataagaataataatttaatttaattataattatattaaatcgtattcattcaaataacacagcaataacaaatgatttttttacagatatgtcggcaccaccagcaccaccaaatgttcgggacctgagcgagttcccgccgttggaaaagttaacattggaggatgtaaggaaaaagaacaaaattgcctcggcaagcccaagtggaaactcaaatatttctaaggaaacctgtagtagtgcaataagtgtggatttagttgcttcggcaagtcaaataacttggggaggggaaaaagggaacagtgggcaagaaaaaggggaaaagaatcaaaaattaaataaaaatgttgcttcggcaagcccaagagattatgaaaaatttgcgaatcaaggatttgacaaaaacccggatgaaatggctgaagaaatgatggaagaattttcaagttttaatgtgagagaaaatgaaggaaaaattgttgaatacctggtttgccaagtagaagaaaatatagtgattggaggaaaattgaggacaatggcaaacaaaggctggccacattttgtagcaatctcaaatgag

SEQ ID NO: 63921 - DNA, 1110 bp, Heterodera glycines
atgtgcacaccaccagtaaatacactttttgctaaagttggtttggatttggcaggtccatttccgaaaacggaaaatggaaataaacacattttaaatattatttgttggtttactaagtttgtgatttctgtgcctctaccagacgcaaaagctaaaaccatagcctcggcatttttaaagaattgttatttgcgttttgggggttgtactgaattaattactgacaatgcaacggcatttacgtcagatttcttcaaaagtttatgtgctttgctttacataaataagacatacgctattccacattggagtcaaggaaatgctgtaactgagagatcctttaggactttccataatattctctctaaatatatttctaaggatgagcctgactttgatgagcatttagactttgtaagcttttgctataatacttcggtacatcgttcgacaaatgaaacaccattctttcttatgtatggtagagatccgattttctgcattgatctaattttagatccaaaaattagggaaccagtcgcatttagtgatgatgaagaaatacgtcaaaaaattgtagtcacacttagaaaagcttggcaagcagcaaatttggccaatcaagaggctcaggcaagaacaaaatcttcttatgataaattagttagaaatccaacaatttctgttggagacagagttttactcagaaattattcaggaaaaataggtacttcaaagaaattccacttaccttggaaaggtgtatttagagtcatagacatagaaggggtcagaacaacaatactaagctgtaattcgcctcagtctaatccaagagtagtacatattaaccaacttaaaaaatgcatagaaccccttgggccagcatgcactattcctaagcttgatgatgatgaagaaaaagcattacatgaggcaaatgcaaaggaattaataaatgaaccgggacattaccacaaattaggtcaaaaatcaaattctgaagttgaaaaagaagtagaagaaacggatgaacctgagcaaatcagtccgagatataatcttaggaaaaatccgagagcaagaaaactcagtttaaataattaa

SEQ ID NO: 63922 - DNA, 1209 bp, Heterodera glycines
atggtaatattgagtcaaatgacttatcagattcatgaaaaggacaccaaaatcacagctacaatttctcaagaatgggaagaggttgaaagccaaatgatcaaagcagtgattggtgattacagaaaaatgtggttaataattatgtctctaattattaccattctgtcaattgacttggcgataagattgacaattggtttaagtgaatttttgcagggaatgggcgcttaggcaatttattatttggtacaacaattcagaaagctgggagaagagtaagaaaattgagggagactaaaattcaacaaggagaaatttatgaagagccaattaatcagattaattggccaccaagaattagaagggcaggaaattcatttaaaaaatctttcaccagacctttcaaaagaaataggcatggaccaaatccaacacaaatgagcactcattttgaattaaattctttgatgggacagcttgggtcgttaaataataataaaatgacagtgaccactctcgtctctcttaataatttccaaatgaaatgcttagtggacacaggctcaagcacctcagttgcaccaaaagcgttagctgattacttaggtattaaaacatttaaatcagaggcacatttaatgagtgcttccggtcatccagtacatgtcaaagaagctgctcgtgtgactttaaaaataggaaatgaatatgtggacataattattcgtctttttgatgatgaactttcatggacaatgaaagattataattttattttgggatgtgatgctcttgcttcactgccgcctattacttttgactttcaaaataaatggctatccataggaaatgctactttgccattgggaaatgccacaaataaaattttatatggacttaaaatatatgcaactgacactactgaattaagtcctaatgagcaatgcatcgttaaggcaaaaaccaaaagtcttcaaaagcttcggcatgaaattgtttttaatgaaattgataaaaaacttttaaatgagggaattgggtttgtgccatcattatctgatttcaaatcagaaacaatcagtgtaattattacaaatcccacctcaactgtaaaaagaatttttaaaggaacatgcctcggcaatgcaaatgaagtcttaaaaacggaaaatagcactatttttactgaaattgagaaagaggaca

SEQ ID NO: 63923 - DNA, 297 bp, Heterodera glycines
caggcactttttccgcggtcacttcgatcggtcggccaccgacgtttacatcgacttcgcggtacacaccggccgcttccgccccatccggctcgcgcacccaaatgtggtgatgcagggctttgatggtctcaaaaaaaacatgcttccgattaaatgcattacagtatcaccttgtagaattgctcaatgaatgagttaaatgtaaaaatgatgatcgataggccttgagaaaagcaattggaaaatttaaaaaaaaattttgtgttcattgaatctaatagaatatgaaaaaaa

SEQ ID NO: 63924 - DNA, 1388 bp, Heterodera glycines
atgtttttccgttgtgacaatttcactgctggaccgcctcgaccgacaccatctcgcaggcgctcgacttctgctggatccgggggaggtgcggggcgatcagaccgtgaggacactggtcttcaaacggcgggggacgtaggataaataatgatttatccttattttattgttttttgcaacgattgtttttcgcgttaatttaaaatatttttgcatccttcatttaattttccttttgattgttgtcttcgttttcggtcttcgtgttctctcaagttttatatattttgtgcttttgaattattgtaataaaactacaaaaatttggtgcttttccccgtggactttcattcagcaacaacaaacgcccaaaggcttaattggtactgttatttgagttcctaattgcaatttgccttattctctaattccttgtcagtaaagtggtgttgaaaattaagtaaatctttccttgaccccaaaatctcaacccaaaccccagcaaatcccaaagtccctccccgaaaatacgccttttctccaacggatgacccaaaaatgtggggagagattttctcaaaagaaatagcttcacaatgtgcaacagatagagacttttgtacacaatcaaatgtcgggggttaaagatgaaaaattgaaaaatatttaaagaaatttagagaatactttaatttaaaaatttttgattaaataaattttaaaagataagattcataaaactttttaaaatattccataacattaaaatatcaaaagaaaaattatcaaaaaagaataaatatggaagagttcaatgaataaaatgaaacttgcgacaattcatctgaacatattttattatttttaaaaaataaattttgggtcatttaaaaaaactaatcttaaaatagctaatacggctacgccatgtaacaattcttaatcacatttttacgaaaaacttgcgcaaaaaatagcatgtcagaagaaaacgaaggtgccaatgccacaactaataagtgaaattgtagggagagtttcattattctaaaaagaatatttatcatcggttttgaattttgtaaaaatattaaagttgtgaagtaatttttagcaaatcccgtcaaaaaatgatttatcttgaaaaaagcttcaaaataattttttaagtgtaagtcaaatgaaaagcattaaacaattattacagggctcggattcgtacttcgatgccaagtacatacttagatttcggcttttgtgcttggaaaattttaactgtacttatttccaagattgtacttggaatcgggatttttgcatatgaatgtaaaaaatatacattttatgaaaaaaatttcaaatttttggcattttgtcaaaataaa

SEQ ID NO: 63925 - DNA, 2272 bp, Heterodera glycines
atgaccgatcaaattatcgatcgaaaatcaaagcaaaaccaaaactttccaaatccaaattatggtcgagaaattggggtgaatcacccaattcagaatacaagagattttggaaatggacccaattttcaaaattttcatccggttcggaatatcaatcaaccaaattatcaacagcgaccgaatccaaattttgaaaatttggcaccacaacccaatcactttccgaacgttcaaaatttcgagtttgtccctcagcaaaatttccaacaaaatcaaattcctgatattgtaatggaattacataaagttactctgtcaaaccaatacgcaaatacgctccgagaaattccgaacctatacggaacggaaggtcgggacaaaattaaggatttcttcctaaatgttcaaatgtgtgccggagagtggagaccagaaaagcaaaaagagttgctacagacaaagttgaaagggaaagctttgaaagcgtatcatattgcgctgaacaaatttggaaatgaggcgacatttggcattctaaaaaccgaaataatgtccattttgagagagacagactacaaagaagcaaacgcattttccgaattgacacagaatggtaaaagaaaaccaaatgaagacattataaagtttggtgagcgaattcaacggttggttaattgctcatacattggtctggacgaaaaccagttggatgaggtgtcaaaaaagcacttcatttcaaacataaatgatgtgaatttggccagatttttggaatgccagaccaaagcaaaccaaacctttgatgagcttttgatgatggccaaccgtttgagtcttattgaggacggaaaaaaccgagaacgaaacgaatcagttggaattcctgttcagtttcagcaaaccggcccacagcaaaaaccgtacagcccatttcaaaacccaaattacggacaacgttttgaaagaaattttccaaattttgggatgggagcgcaaaataatttcaggccaaaccgacagagtggtttcaaaaaccaaaccttccaacaggaaaaccgaaattattgccccaataagaattttgatcattttcaaaaccaaaatttggtcccttatcaaacttatggcccgaaaaatcaatgggtatccgacccacaaaacggctttcaaaacgatattttttatgagagcaacccaaattcccggccaagtcaacgttttgtccattttcaaaaccaaaattccgatcaccaacaagacgtcaatgatcataaaatcgaggcgatcagcgcaaatagaacccagttcgattcaaatcaacaatcaaatccaatggcaacgcagaacatggagttgaatatgattaaggtgaaaggaaaaggaactgaaaaatgcgaaaagaaatcagtcaaaattagtcacatcgaacacagcgaaccgcccgcctacgaaaaatttttcaattcattaatcgcccattcaactgaatttccctcaccaaacccgacacaaatatcaaattcagaatgtattgtgttagagttgaacgttgctggattaaaagcaactgcattaactgactcagcagccgaaattaatgctgccaatccggaatttttacataaagttgcagtggaaaagggagtgaatttgattgattggggttttagtccaaacaaaggaaagtcagaaattccttttgaagtcgaatcttttacgggtggaagagtaccagtgattggagtactgaatgtgccgatggaaaaaggaaattggcaaggcaaaattaattgtgtggtcaccaaaaaacctttcccttacgattttgttcttggacaaaatgcgttaagttctcttggatattacatcggaaatgtaattacaaatgaaataattaatttcggtgagagtccaaaacattcgaataattcattgccaaactctggtcgaatctcctccctaaaaattgtaccgcgccccatacaatcgagaatcatttccaacgaagtgattaaatcaatttcccctgtcaaacgcataaaattcattcaaaaggtttcatccaattcaaagattgcttccaacaaaaccgatcaaaccccctttgtcaaacttcaaaaaatccccaaaaagatcccgagcccaccaatcaaattagtcattaatgcaatccgtcataaaaatgaggatttggatcaaaaacagaccaaacgggaacgacgacgtgtttttgttaattccaagtacaaaaatgtttttcgccaaccaa

SEQ ID NO: 63926 - DNA, 333 bp, Heterodera glycines
cttgaggaagagcaccgattggtgaacactgttcgctcgttgatccgcattaagaatccgaatgatcgactctgtttggccagagctgtgttgctaggtcttcacgattggcgttcacggtcaccaggcggaggcggaccgacagcattcaaaagtttcgcaaatcgccagcacacccacgggcctgaggcacgtaacttattgagacgtgccgcaattccccgcaacaaacacatgtacacaattgatgacgtccaaaaagtacaagattggattgatcaacgatacgggccaggagaaattcgaattgcagtttttgagaaggaacgtgag

SEQ ID NO: 63927 - DNA, 812 bp, Heterodera glycines
atgtacacaattgatgacgtccaaaaagtacaagattggattgatcaacgatacgggccaggagaaattcgaattgcagtttttgagaaggaacgtgagtaccgaattgtgttcaaggcagcatccggcgaggcagccaagttcaacttgtgtcttttgttcgaacccgataaaatttggttgtataaaatcggatggccattttggtaaggaaaaaggtgcaaaatgacgtggaacgagtgcactttgtacatccgtttgcattgtccgcgataataatggcaatttacagcaacaaatttgacctaaacaacttaattttgggttttcggtattaatttggcgaaattttttcttaaaattagtgctgtttctctgttccttttctgcacaattacgacttgcttctcttacggtagagtcaattaattcttgcacaatttgtcattgttgaatcaatctccgcgtcctcctctcccgtcgctgaagaacaatttgagttttcggaaacgaaattggtcgatgaacacgactcaaccgactcagtcataagatggtttggaaggcgatgtctgtggtgttcaaaaagcattgtttacatttacagttagcacaaaccaaaaaggaacgtttaattgttaaaagtggaagcagtgctggctctacttaagtttacgtgtccaaccgacttttacgcgtccaatcaaagactatccccccgtttcttaggtcatatctttttttcatacttggtcaatccatacatctttggcatcattgaaagctttaagtctcaggaattcaaaaataaa

SEQ ID NO: 63928 - DNA, 637 bp, Heterodera glycines
atggaaaaatcaattaaaaatgtgttagaacgcctctacaatgacccaaaatcccctgctgcgttcgccggtgttgacagactgtggctggaagccaaaaaagaattaggaaataaaattcgtaaaaatgatgtaaaacattacttggagggacatcgcacctacactttgatgcgcccaaggcgcgtaaattttctgcgcgctcgaacgactgcagccggttttatgaccgactgtcaggttgatttggctgattttcaagcactttcccaacacaacagcggcaatcgttatttaatggtggtaatcgatgtcctttctaaacggattttcgtaacacctcttcgtaccaagaaatccgatgacatggtagaaggctttaaacgagtgttttcaactatgccaatgaaaccacacagaattttctccgacaagggtacagaattcagaaatcagcagctgaaaaaaattttgatgaagaggaagttgagaaatatgagagcacacattctgagaagaaagcagcattagccgagcgcgcaatacgacaaatcaaaaatcgtgtatatcgttactttgcccaaacaaaaaccctcaattgggtggacgtaattgatcaaatttgttgatggcatta

SEQ ID NO: 63929 - DNA, 953 bp, Heterodera glycines
atgtcaaacaatccgctgccgcctaccacgactttgactgacacaaacgatttacatctgctcgaaatgctgacattggaggaggaggaggaggcaagcaagggaagaataactgcttcggcaagccaaaacgaagatcaaactaggaatctttctagggaaacttgtagtaatgaattcggtgtacaatcagttgcttcggcaagtaaaatagaaggggcatgcacgggtcatatggtaggaaacgggcaagaaaacagtgaaacaaataaaaatatcagtcaaaatattgcttcggcaagccaaagtactaatgaaaaggaaacgaaaagaattgcagaaataaatcattgtagagaaatgattagaaaaacaatggcagctttggcaataaaatgtgatactgagaaaacatctgaactgagagatactaaaaaagtgatgaaaagaatccaacagaacctattaataacatagactgtccttctagttctggaataggtttaagatgtactgatactcttgcatgggcaatggttaaaccagaaagcgatgaatatcaaaaaaagaaaaaaagggataaaaatagtgatgatcagctaaggatgattattttccagagaatgggtgagtgtgcaatggctgttcggctgggtaaagaggacaaatggccatattttgcattagttcatccaaatgtaaaactgaatcagtatccacgcttaggcagtataatctcagtaccgaaagtggaaaagcttgaatattttagttctttgaattctgagttatactcatcaaacccaaacgaggaaagtggaactatttataatattataaaaagtgtaagaaatgagataaaagcaattgatgtcgattttaatgtatatgatgatgagagtgatgataacattctttccgcatcaaattggaccggatgtaaaaaatcttga

SEQ ID NO: 63930 - DNA, 110 bp, Heterodera glycines
agattctcattgattcctatgcgagttattctgctgacaaaaatcggcttttccaaacattggtaaaattcgaatgccgcggaattgagccgacttcgttcgacccccgg

SEQ ID NO: 63931 - DNA, 1150 bp, Heterodera glycines
atgaagtttttggaccgcgatgttcttcagacaatgcaacttgtgacaaataaacattgtcttattgttgataaatatttcgatgtttttcctctccgtgccgttgctcggtacttctcttaggaattacttctcattgggctgtttttcaggtgcaaattgcgtacgactcgttccaatgacatgaaattgcttttgatttaccgtgggagaacgattgagtccaattcggatttgcacttgtggcttcggcattgttttgtcggatgtattgagttcatcgtcagtttaattcccccgccccacctctttttttatagttatccgattttcaggaattcaaatttaccagtgaaatcttacgcgaccttcaaggaatggggcaacgaatctttcaactcaattactgtgttttcgattatcaaggacgttcatcttcccaattaatttcgcagtataaaattgacacactcttttctatcagtgcttttcaggttttctctttgatttattcaaaatttgaaactgaattaagtgaccgaccacagcaatttttgtgtcaattttttagaaatgccttggcgccgtcttttctttcggccgtcgttgtgagttccgtccgcttatttctgaccttcttcgactccctccaaaatcatttgtcattgatttcgaagggtacaaagccaaagcagaggacagcgaagtgataaggcgagtaggaaaagctcacttccttttttggtgtaaaatttttaaaaatatgaaaaatgaatcgaattccattgtttacatattttcacaactgaagatttatataatattctattaaatcctttcagtgtttggctgaatagcctttgtgatgaacattgcgatgactccgccaacccaaaagcgctctccctcaaaggctttgattattccgctctttcgttggatttaatcgaaactttgcacgaagtttcttttctcttatcgatataagcctaaatttctgtttatttttaggattttgttaattcaacaaataaacaaagttttattctgaacgttgagtgcgacgatgaaatgaatttggagcggaaagaagaaaatcggataaccggggagaaattcaaagtgaacgccaccgcggaaggggacattt

SEQ ID NO: 63932 - DNA, 230 bp, Heterodera glycines
atttatttaagattttaaagtaaaaaagtgctttgtttgcttcatggtgtgtttgtttatttcttttattttgggtggccttttctttaatttgcttccaaattgggaattaaaatttaaaaacaaaagtgggaaatgcaattggactgtccttcttagcctgtctttgcgcttcaaatgagtgccaatttgatcgggtcactgaccttcgtccgtcggattacgacgac

SEQ ID NO: 63933 - DNA, 284 bp, Heterodera glycines
gaaaacgaaaacacgaaaaaattttgttaatttcagccataatcaagaaacataaaactttaaattgtattaccaaattgaagaaattgaaatccaagattttttggaaaagagtaaaaatgaataaatcaagaattcttagctaggtcataatccggaaaaaccggtcaaaaattcgccggatcggaccggattggcattttcaaaaatgaccgatttccggacccggaactctaatcgtctccctaatcctgagcccaattccgtccgcgtccgaactagtc

SEQ ID NO: 63934 - DNA, 95 bp, Heterodera glycines
  unsure (1)..(95): unsure at all n locations
acgcaatgcgaaaagcggcggtgcgattgtgcgcaaaaatggaagcganaatgagggcacaaattgacgaaacggcaaagaaattgttggcctga

SEQ ID NO: 63935 - DNA, 928 bp, Heterodera glycines; identical to SEQ ID NO: 34033

SEQ ID NO: 63936 - DNA, 767 bp, Heterodera glycines
  unsure (1)..(767): unsure at all n locations
atggtcgcctttggaagcatggcgcgcaaaaagtcctttggacgcggacgagagccaacccttaaacaaaaagtggaaattgaggtggaaaaaacactggcatggtaacttattagtcaatgaaatagacatatgaaaaggttatcggaaatttaacagcaaaaaatgttggtagagagaaacaaaatttttatttctgttnacaaagggacagtcaaattaaaattgaaataataatttatattttagccaatttaanaatattaaaaaaccaaaagtggcattttttgtcttatgattaagccataagtaatattagtaaagccattaattgatgaggaatgttggcacctgtacgaaacagtcgatgccggccacgagtgtgaagtaaacggagcacgtctgcgcgatcattgccgcggggtaaccaatgggcgaaagcgacccatagccaatggaaagtgccaaggaataacgacgaatggagtcgacaaagaacagaaacaacgccagtgattatcacctgattagggcggaatgattggcgctcggatgggattagtggtaataaggcaattagccctaattatccgtgattggattttgtgccttaccaatgcgtcggaacagccgagtgccgaaaggtacaaactgccgctgtacgactgacgaagcgagggacgactgtagaaaaaacgcattacagtaagattgatatgattttaaaggaaatgcccctacagggtgctaggtcgtttcttaataaa

SEQ ID NO: 63937 - DNA, 467 bp, Heterodera glycines
atgcgaaaagcgaaatgcgaaacgccaaaaaatgcgaataatgcgaaaggcgaaatgcgaaaagcgaaacctcggcccataggctacggtagaggtaattaattaatcacttacaccgtttaccgtattttaaattaatttttacagtacatctttggtggagaacggaacgatcggctgatttatttaatgcactattcatttgtgtttatttatttgattttactcattaaaatattaattatttaattaatgaattaattaattaatgatcattgaacgacgaacatttagtcaacatttaactcattccaacagatttttaaactgctgttggtcagtaaagattaactttgtttcatgcagtttttctcagcaaacagaaaattagagaagactttggaaaactttaaagagataacaggcggagttatggcattttaggaaaactaaaatttaaagtaaaa

SEQ ID NO: 63938 - DNA, 141 bp, Heterodera glycines
atgtggcatcacaaatcacggcattcccttttgtccttttctgttgccaatttttgtctcttttctctgtttttttggcattttgacgcaattttggccagggaagaaaattatgaaccaattccggatgaaaaggctacg

SEQ ID NO: 63939 - DNA, 802 bp, Heterodera glycines
atgagctgtaaaattggtatttttacttcaaaaagcacacactcatctagcagaagcagttatttggacaaggaaattgcaaatggtgacaaggaattgctgaatggcctaattaggggcctaaacgagctaattgatgattacagttgcccacacttatgcccaacagatgggcacattgtgcaaaaatttgtgccaattttgttcgacacacttcgaaaatggcaccaacaaaaagtgaaatatgtcaaacgcagtcaaacaatggcattggcatgctcagtggtcgaacatttgcttgcccgattggagacactgatcacaatgtttgttcgctttaccgtaatttatcctttttatgatgaagccccctcccccctcacctctgctgtttaccgtaattcctcccaattaccgtagtgtcatggtattttttacaatgggatttcgtacaattttttttcatttcaattgaacttagaacttttcctcaaaaaaacataatgaatttcttttttcctagaaaaaaagaaaaacctagttttttttggaaaaatgaaataaaattgaaaaatctatttaaactcattcgcattcgcttaccaaagcattgaaatgccatcagaaaatttagatgagaggtaaatttgaaaatttaatttgattggatgggttgtaatgattttcagggatttcaataataaatccaaattttctgaggctttcaaaaccaaaatcaaatccatatttcttttggaattatattttggcattttttaaattttccagagaagccacataa

SEQ ID NO: 63940 - DNA, 1248 bp, Heterodera glycines
atgagtcaggccggcggattttttatttctattctagcattacgccaagttgcggtcgaattacgccaaaatgcacaatttgaattgccctcaggccaacaatcatttaatcctgacaattttaagcaaaaagtgaaaaacaaattcgactttgtgataagaacattgaaagaaatggagaacacagaaaattatgagcaaatttggaattggaagcggcggcgattaagcagtagtagaagtggtttaagcataagcccaccacctcataatggcattgttctcggctgtgtgcttctccattttggcatcgcattgtccaaacgtgccaacgtggaacatacgaaatttgaaaatttttcaaaactgaaaaatgccaacggcgaatgtccaactgttcagtatgaaaggcgagattaccaatgtggcaaagtgccattcaggtgattagccccgctaatatgcgtcattagactgtgattaattgctgggcggagggagagaccaccggaacgagtgaatttttgcttcaatttttgggcactcgaaaaagtttgaaaaaatacaaaaaatttactttttttattagaagtgcaccgattgagctacaattgttcaacgaagcaattagcaattatacccgaacaatcagaatcatttccaacaaatgccaagattggaaatataattaccgcgactaattagccaattaaagtttttcacaattaaaattttaattatatgtattagtgacagaaactagaccgggctaggcgagatttttaactaggtatccggaatctggctttttaatcgaataattttataaaaattttgaaaatcaatgagtcaggccggcggattttttatttctattctagcattacgccaagttgcggtcgaattacgccaaaatgcacaatttgaattgccctcaggccaacaatcatttaatcctgacaattttaagcaaaaagtgaaaaacaaattcgactttgtgataagaacattgaaagaaatggagaacacagaaaattatgagcaaatttggaattggtctgagatttttgagcaaaaattttctggtaaaatgtgccaagggcaatttcatcccctttttggcaaaatttttcaatttttaattgtgaaaaatatattaacctaaaaatttaaatttaaattttcgaaaaaatgagaaaacttaaaaatatgtgtatgtatttcaaaaaatggtatctaaaaaataaa

SEQ ID NO: 63941 - DNA, 757 bp, Heterodera glycines
  unsure (1)..(757): unsure at all n locations
atggttattggattaaaatggtaaggaaaaggattgttaaataaaatgtgttaaaattaatttatgtttttgatagtaatttttgatttatgtnagatgnatnagtttgaaaaagtgngtgattatntgatatnaattgaatatgttttggaggnatattatnggatttnnttgagaaaccgtaaaataataatatgtttttatttattttaaaataagccatttctcagatttggccaatgcttttgattctcaaaaaggaattggctttcaaccaaatgagcttattgctgatcagttgaccggcgatcagtttcaagttcaatttgtggcaatgttggcgaccttcgatttgaatgtccaaaggagagtcattagtttgactagaggtaagcattccaatttttatttgtgaaatttaaatttaaaatcaaatttaattatatgaatttcagtcctgcaaagtgagtacgaggctttttacgcttttcttgattggaattccattttcgggcagcatcagcagggcacttccggacagaatcagcagcaggggccgcctcctccgccacccgccggcggcactttctgatcagtaaaaagtgcactgatcagtacaattcatgttcattactctctgtttgtctgtctgtgcctgaatttgctgagtctatcctacaaaaaatatcgccaatttggcattccgtccttctcattcactggaaatataattaccgcgactaattagccaattaaa

SEQ ID NO: 63942 - DNA, 363 bp, Heterodera glycines
atgcatcagtttcaaaaagcccgtgattatctgatctcacttgcatatgttttggagccacattatcggatttccttgcgaaaccgtaaaataataatatgttttttatttattttaaaataagccatttctcagatttggccaatgcttttgattgctcaaaaggaattggctttcaaccaaatgagcttattgctgatcagttgaccggcgatcagtttcaagttcaatttgtggcaatgttggcgaccttcgatttgaatgtccaagggaaagtcattagtttgactagaggtaagcattccaatttttatttgtgaaatttaaaatcaaatttaattatatgaatttcagtcctgcaaa

SEQ ID NO: 63943 - DNA, 707 bp, Heterodera glycines
aatttggtgcgctttagagcactttctgaaaaaaatatttatgaaacaaaaaaatcgattttttcaagtgtccgtttggggtactcaaacaattatggggagcaaaaatccaacgcagaattaaagtacaggctatagggaagctattcccgaaggattcggtctccccataaatctgggcgcatcggttcggggggactgccccgaaaacaaaaataaatcgattttctcaagtgtccgtttggggtactcaaacaattatggggagcaaaaatccaacgcagaattaaagtacaggctatagggaagctattcccgaaggattcggtctccccataaatctgggcgcatcggttcagggggactgccccgaaaacaaaaataaatcgattttttcaagtgtccgtttggggtactcaaacaattatggggagcaaaaatccaacgcagaattaaagtacaggctatagggaagctattccggaaggattcggtctccccataaatctgggcgcatcggttcggggggactgccccgaaaacaaaaaaaacgattttttcaagtgtccgtttggggtactcaaacaattatggggagcaaaactccaacgcagaattaaagtacagactatagggaagctattcccgaaggattcggtctccccataaatctgggcgcatcggttcagggggactgccccgaaaac

SEQ ID NO: 63944 - DNA, 400 bp, Heterodera glycines
atgaacaccagcgaaacgcaaaagaagcatcagctgaccacttccacacccatcggttgcactgtcaaaaaccatcaaaaaccaccgctccgcaagcgaagtgttgccgacggcagtggcgaccgtgagaatggcacggctgccacaattaattgggccaaagcggacctttcagtgtgcgtaagaaacaattcacaaaattttggtttgtttcccccactaaatatttgaaaatttgatctttttactatttttcaaaaaagtaggagtcatatttacggtgattactttaatttacaccatttttgaagccctaaacaattcctcaaattctttcagttggcttaatgcgtccaaaaatgtctcttctcctgcggattcttttgccgcggtgaataaa

SEQ ID NO: 63945 - DNA, 347 bp, Heterodera glycines
atgattccttcggtttgtaatggtgaaagtagcagttccgacgacgaatattacaacaatttttccaaatacaaagcgaaggcagcattggcattacgaagaaatgattgcaaaagtggcaaagagattactaaaaatgggaaaagcacaacgaagaaagtctcttcagaaccatcggatgttgagggtttgaagaatgaaacgattttctttttgaacaataaaaaatactactttagttttcacatcttgtccattatctgaacaattaatttcgcgggctgaagtcgatcctgagatttgtgtagttcaaattgcggacacttccgtaaactctgttgttgatc

SEQ ID NO: 63946 - DNA, 307 bp, Heterodera glycines
atggtaagtttatcatcggatagacagtgaaatgaatccgacaaaaaatgcgataaatgggacataacacatacaaacattcagccaaatggaaaaaaatcaaataaattaatatattgtcccattaagaatgaacatttcattgcggacattagcgttgctcccaaattatcaattggagcatttagcctaattgtgatggccttctaattgtgcacgaaattgccagaaataattgaaaatccgatggaaagatggattaaagattgccctctgtatgcccgtccccattcacttgccgaatgta

SEQ ID NO: 63947 - DNA, 133 bp, Heterodera glycines
  unsure (1)..(133): unsure at all n locations
atcgacagttntggctctgtccgggggtgattctcaacgatgnaatgcatgttcgcacgtcccaataaatttgattttcgtcaaatatgtgccactatgcatcagactgcacttttgcaaaaagatccagtga

SEQ ID NO: 63948 - DNA, 182 bp, Heterodera glycines
atgatggtaaatttctcaaattcgttaatttaagctatcgaagtttatataaatttaccaatttttagaaattaaacatttttttattattattctcgagaaaatctccccaaaatgatttcttttttttgtaaaaatttatgaactttagggggtcaaaagggccgctttataagatgcga

SEQ ID NO: 63949 - DNA, 843 bp, Heterodera glycines
gccaatttcttgtgttcttcaaagcattggatattatagaagtctcgatggcactcgtcacagttaatttccgggcacttttccgcacatgggaacccgagtcccatccggcaacatttcttgcagcgctccttgcattcaattcggtgtcgttctttggtccaaaaggtcacttcacagctaacacaaaaatttttgacgcaaaaaaaccaggacaccgatttgatcccgtcccagtgattgccttctcttatcacgcaaacttcgtgcttacggacaccttcccccttgaaaattggcttaagtccaaatttctaaaaaaatgtaaaaaatgggttaatttcaagctaatttggttaccatttcaaaagccgcaatgcgaaacatatccgggaattccctgtcccaaaatttttgtacaacctcaaggtgttggaaccaaaagttttgtcacccatgctaatccctgatttttccatcagttcgatggccaattccatttgtttcttctccgtcttcatcagataacggaatttgttttccgttatacctttccctatgagctggtagcttcgagcaatttccaaagcataaaaaagacctaaacacaagtaaaagatcctaaatttgtgcggaatttatgggatttggaactcactaaatttcccctttggcgtattaagccgacccgattcattgatttgggcgaggggacaaaagcgagacattttatgaagggagtaaaaaaagccgttgagttgctactgcgagaaaattctttcgggaaaaatacaattttgtttaattatcagaaatatcaattaaaaattatcaaattaaaaa

SEQ ID NO: 63950 - DNA, 713 bp, Heterodera glycines
atggctgatttaaagaaaatgaaaagagatacagaggcagagaaaacgtgagtaaatagagcaaagttaggactataaaaaattataagaaaaaaattttattacttcaaaaatgaattattggagggccgagtctaaaaatggtctccaaaaaacggcatttttcaagaccatcaaataacaaaatgttttaaaagtggttttggaaattccgaatttaccacgctgagtccgaatatggctttagatttggtctctgggttctcaacaaacctgtacagctccaacttcatgcatggagttggagcagtacaagctcagggttaaaagataggtcagatttaaggccatattcggattctactggtctaatttgtacagaaaaccttctttttttgttatatcaggttacttttttgaccataaaaaaatcgagaaaaattagtgggccaattttcaatttttgcatggtcgggaaaaaatactaaaaaattgaataagcaaataaaaaatgaaacaatggcatgaaatgaaagaagactttctgacgaacaaaattaaaaaagaattattaaaataactgcagaaattacggagttatgaatttttgaatttgtcaaaaaaaattgtgcggaaacttatgttacaccctaagtaattgaattcctttatgagattggaatttaagcccgagggcagaaatgaaagaacga

SEQ ID NO: 63951 - DNA, 396 bp, Heterodera glycines
  unsure (1)..(396): unsure at all n locations
tggtacttttgcttgccgctgccacggtttgctcacttttctattgattttcatctccgttatgccaagccggtcagtcagttgagaattttgaataanaatcaaaaacaatttcaatttaataccaaaattccatcaaaattatgccattttcattttccatttttgttaaggcaacttaattttgtcggcaaatatttgacgggcatcgaagggtacaaaatggtcgactcgcagtctctgcggcgctttgttttccattttcttcgtcaggacggcgtttttctgctgcgaatggtggccacgcacgcgggcgaattggcctgctacgatttggccaagaaattgtgggacaatttcatggttcacaaagagggggccaaaatgcacgacgta

SEQ ID NO: 63952 - DNA, 1055 bp, Heterodera glycines
cccaacatgttgttgtactatttcgccagtgcggtaaagtccatccaattccatgtggacgacgacataatcgacaaattgaattattattacacaacggcaattataattggtaattgtgcgcgggaggggtaaaaagagcgtaaaatggacttttgaggggaaaattagcacaaaatcattgtcaaaaagtgtcaaattgccaaaaggcacaataagcgcttaattaccattttaccggtgaatacaccctataagtcagtaatgttattttacattatataatttttgtcataacacattgatgtgccattttcagctacccaattcatgccatcgtttcccccccccccgctaattaattcggattcattcccaacggaattgggtgggtcacaccaactgaagcccttaaggagcgtgtcccatcataggcatggaaaagagcattgtgaatgaatggtgagggagaggagaatgtttgagtagggcgacaaccgacggacggaaggctaatgaattggggggggatgaagcagagggatgaagcaacttatttgttggccataggaaatgagcaaaagcatcgcccgggcaatacaaataaaagcttttgctgaaaagatcacacgaactcgtcattagcagaaaactgagggaaatggagaaagtgttttattgcgttgaaaagggaaatggagaaaaaaatgaaatattagagggtaattaataggaaaataaatataaaatgggaagacattaaaagcatcgcctattttgtaattgttaaattattattgggttcattttcagttttcgccattctcgtctcctccaaagaatacctcggttggttggttactcttcgcttttaatgattttttgtaattgccctcattaggcaaccccattcaatgttgggtgcccgccactttcaccgagccgatggagcagtacacggagaattactgttttgtacaggtagcaaataattgaatagcataagatggctatttaaatggaattcagagcacctattttctgcctctgaatga

SEQ ID NO: 63953 - DNA, 314 bp, Heterodera glycines
  unsure (1)..(314): unsure at all n locations
cttnaagaaaaatgcgccccttttgcgcccttccgccgacggaaaaagcgaacaattggataatcatttggccgaattggaacttttgatgaacggcgcaagggaagcgctttcagtggatgagctcctccaaaacgagactcagctaatccttgttttgtttgagatgaaaaattcaatttttggcgataaaataacgcttaattcaaaaaatttgtgtgagggggaaaactttttgcagtttttgtttattttgcatgaaaatgccattggagaactgatgagaaaagctgaatttacggcacaattgaaag

SEQ ID NO: 63954 - DNA, 278 bp, Heterodera glycines
atggtcaaattgagtcaaatgacttatcagattcatgaaaaggacacaaaaatcacagcttcaatttctcaggaatgggaagaggttgaaagccaaatggtcaaagcagttattggtgattacagaaaaatatggttaataattatgtctctaattctcaccattttgtcaattgacttggcgataagattgacaattggtttaagtgaaatttatgcagggaatgggcgcttaggcaatttttatttggtacaacaattcagaaagctgggaaaagg

SEQ ID NO: 63955 - DNA, 2198 bp, Heterodera glycines
atgccgcatcgtggtcgtctgaatgtgctcgccaatgtgtgccagcaaccgttgagcaccgttttggccctgttcaacacgttgaagctaatggacgagggctcccgcgatgtcaaataccatttgggcgtgtgcattgaacggctgaatcgccaatcgcagcgcatgatcaaaattgcgttggttgcaaattcgtcatatttggagggttaggcattgaaaatttggattttcgacgaaaatttataaattgtttagctgtcgacccggttgttcagggcaaagtccgtgctgaggcattttacagcaacgatttgcactgtgaccgtcacatggtgagtttgattagcaattgtcttttgtgtagaaaatttcttcaacaaaaatgcgaattttttgaattttcgccaatttttctttgattatgaatttagactgataaaatttggactgttcattagcaaatccaataggttatagaaatctgaccgtattgaatatcttaaacattttcggaaaaattgtaagttttaaaaaaatcgttattaacttttaaaatcatttttagtttcgtattgatttgaattttttatattgaaatcctttaaattcattgtcgccatcgccaatttcccctcccttccccaaaaaaggcgctggtgcttcacggtgacgcctccttctccggccagaacctggtgatggagacgttcaacctcaaagacctgccccactattccatcgacggcaccattcacattgtggtcaacaaccaaatcggcttcgccacggacccgcgcgcctcgcgctcttcgccctactgcacggatgtcggccgagtcatgcgcattccgatcttccatgtcaatgcggacgacccggaggcggtgatgcgtgtaagaagcatttcagaaaataatatttttgggattattacactaataaacaattatgagaagtgaactgcttaagagcctcccttttatggctccacaaaccacaaatctcattttttgaaattttttaaaaatttttcactgaatttctttgcgatctatttcaaatgtttttgctttattaaattttcgagttgatttgtatccttaaaaaaattccgtaggtgtgcgatgttgcggcccagtggcgcaaaggagttcaagaaggacgtgatcattgacttggtgtgctaccttcgtcacgggcacaacgaattggacatgccgatgttcatgcagccgttgatgtaccagcgcattcgacagacaaagccgttgttggaccagtaccaggagaagattttggcggaaggcatcgctgaccaggcacattattggcatttcactgtgtttttaatttttcttagggaaaattcgatttttatcagggccaaattggattggacacttttccgggtttggtggccttttcacactcgaaaatgcccagtttgacatacttgtcttttataaatttagtttaaaaatttgtgattcctaattatacccccttggactcctcacgaggggagggtgaaacccgttggccaactcgtaaattttttttaactccccctaaaactccaacccaaaatcctggtacataactctttgattgtgagggttcccatatatttgaatcaaaaaattcatattgccccaggaatatgtggacaaagaattgaagaactacggcgccattctggagaaagcgcacgagagtgccaagcaggtgaccgagctgtgcaaccggaactggtcggacacgccgttgtacgacggcaaaatcccatcccaattgttgcccaccggcattgagcgcgactcgctggagcacattgtgaacaaaatctcgcaagtgcccgacgggttcaacctgtacccgagactgctccgactgctcaaaggtatgttggtgggctcaaattcagcatttttttttgtaggccgaaaagaaatgctgagcgaaaacaatttggactggtccattggcgagtcgttggcgttcgggtcgttgttgatggaaggtgtgtttttattgggttctttttggggtaaattccgacttaaattgtgccaggaattcacgtgcggttgtctggtcaggatgttgagcgtggcgccttctcccatcgccatcatgcgctccatgatcagctgattgaccaaaaaacgtacaaccctctcaacgacctttccgag

SEQ ID NO: 63956 - DNA, 1776 bp, Heterodera glycines
atgttccccatccgaccgccgcccagcgctgtgcacatcaatgccctgctcaacccgccggacgagttcgatgagaagccgaagcacaacctgttccgctggctgcacacaccgcgcaaggatggccgtccgaaaattgtgaccattcgcaagtggcgcaaaccgcaatgggcttcgttcatgccaagcttgatcacggtccgaaagattttacggcattttttgcttccatttttttcatttttctaatcgattttacgcgtcccatgccatccacagtttcttaggccataacttttttcttaattggtcaatgcttatattcttggtaccaatcaaaagcttgaactctcgggatcttataaatccaagaaaacagcaattacttgcattagaaaataaattacaatgagaaaacatgaaattcaaggtttttcgagtattttcaagaataattttttgtctattgcttttagccgagaatttagttatacaaaagcttctgtagactttaagctttcgtttgataccaagaatataggcattgaccaagtatgaaaaaagatatgcccaaagaaactgaggatgatagtcattcatgggacgcgtaaaaccgtatatttgcattttttgattccatttttttttgaatttcaatcaattttcagtttttcatcgctccgagtgccgtccctgtcaacttcctcgtcatttgtcacattgcatgcaataccaacttccagaagatggaacgggagaatgaagagacggacgagcggctgacgccgaatgcgcaagtcactgcacatgccgtgattgtacgccagcggaacggcactgatcagcgcacagtggcgaagtggaagtgggaggcaaatcgaatattggacactgctatgcatcaacagttcggattttctattttcagtagccgcatggcaaacgacgtttggctggacactctgttttggattgaccgcactgaggtgggcacgaagttttgcactgatcgacgcgcgcttcggcaggctggtggccacgcatttcaaactgcgcaaatggaagctgggcgagctgggtattcatcgggcaccaagcggatgggactggggcggcacggcgactgtcaccgttatggacgaccacccgttgatgaagccactgccgcttgccaagtgttctgcaccaaacggcgtgattggcttccgtgccatctacatttggtcgtggcgaaatttttttgcaaattttcaaaaatttcccccatttttcgcacaggtgcgtcgacctggaagttactttcaatgagaagccgaagcatcaactgttacgatggctgcacacaccactcccagatggcagtccgaaaattttgactattcgcaagtggcgacgcgcgcattggtctacgctcacgtcgagcctgcgaacggtcggtcggaaatttttttttttttttgcgtttttccgattccaattttttttttgttgtaattttttcaatttttccagtatttcgaagcgccgagtgccattgcggtcaactacgtcgtcgtttgtcatcgggcatcgcgtcgcaacatcgaggtcgttgagcgggagaatgaacgaacgggcgagtggctgacgctgcgttggcgtgtgcccgtggaggctgtggttgtacgccagcggagcggcacggatcggcgcacagtggcgaagtgggagtgggacgcaaaccatactttggacactatgctgtgcatcaacatccaggacagcgacattgggtag

SEQ ID NO: 63957 - DNA, 660 bp, Heterodera glycines
aaacaaaaaaatcgattttttcaagtgtccgtttggggtactcaaacaattatggggagcaaaaatccaacgcagaattaaagtacaggctatagggaagctattcccgaaggattcggtctccccataaatctgggcgcatcggttcggggggactgccccgaaaacaaaaaaatcgattttttcaagtgtccgtttggggtactcaaacaattatggggagcaaaaatccaacgcagaattaaagtacaggctatagggaagctattcccgaaggattcggtctccccataaatctgggcgcatcggttcggggggactgccccgaaaacaaaaaaatcgattttttcaagtgtccgtttggggtactcaaacaattatggggagcaaaaatccaacgcagaattaaagtacagactatagggaagctattcccgaaggattcggtctccccataaatctgggcgcatcggttcggggggactgccccgaaaacaaaaaaatcgattttttcaagtgtccgtttggggtactcaaacaattatggggagcaaaaatccaacgcagaattaaagtacaggctatagggaagctattcccgaaggattcggtctccccataaatctgggcgcatcggttcggggggactgccccgaaaac

SEQ ID NO: 63958 - DNA, 316 bp, Heterodera glycines
atgaacgtaaattatatagaaaaaagaatttacaactactgtcgaaatcaaccactgtcgaatacacctgctggtacgtgcaaaagtgccgacggagacaaaaaataaatatttatgccatactattttccgatgtaaaggaaccataataacaaataattcgctcagctccaataaatgtctatgataaaaattttactaaatcttttgtataattatagcttatcccatagagaaagaggaacagaaagaggaagagagagaggatgagaaaggggaagagaaagatgaagggaaagaggaggagaaagagaaa

SEQ ID NO: 63959 - DNA, 594 bp, Heterodera glycines
atggcatcatccatcggttcgtccgattcctttttccgttcaacaactgatcaaagtaatggaaaaattttaaaaaaattacgaaaaaagaaaataattattaaaaataaaataaattcaaaatctaacttttatcagcaccagcagcatcagcagcagaagaagtgggcaaatacgaagtgttcagttggcacggaaatttgagtgatcaattgtcagctgaactgttcgtcactgatcagcagctgctgaaggtgggccatttttgaatggacaaatgatcaaaccgcggcgggaggggaggggaggccaaaaacagagaaagatttatggaaaatttagttcaaaatttccattcgtttttaaaggttttccaatgatataaaattaaaaggagaaagggccgacctattcctcgaacaatttgatggcattttgccaaaaccattcaattatgaaatgaacacaaattacaaattatttattgggctgtaattatttgttatatttaaggaatgccgagaaaaacttgcgaagtccgaattgaaggaaacgaaattgctgtggaataacggtgaactgaatgctgaaagt

SEQ ID NO: 63960 - DNA, 387 bp, Heterodera glycines
  unsure (1)..(387): unsure at all n locations
atggcccgccaaatcgggcttggagaaaccggagagcacttctggattcctccgaagttcctcgttaagagcaaggaagagctgatagattatgtctatcctaacttccaacaactccttggcaatgacaacgagctactcaatcgtttgattctcgctccgcacattgacacgtgtgatgaagtcaacgagatcatgatggcgaatgtgccaggtcaagtgcgggaatacttgtccacggataagccccttgacgaccgcccactggacatcgatgagatcgagtgcgaagtggctgcgttgaaccggcgcacagactcgggcatgcccccgcacagtctccggcttanagtcggatgcgtcgtcgtccttcttatcataaagtga

SEQ ID NO: 63961 - DNA, 1005 bp, Heterodera glycines
atggtgatatcatcaatgatgatgagttgtgcctcacgaatccgtcgggcaaataagctctccagcggaatgcttgggagtttgtctaatgacacttctctacccagacgaaacgtggaatgggctgttttcccatatggcagcaaaatgactgcacacccagtggatgccgtagcaagcactttgtaggtgtatggggcctttcgcaagcgcctaataatcacattataggctttctattaaactagtcaacgagatgccatttcatttccacgaattcgaagtttttcaaaaaataattattacattaaattttcaaatattattattcattatttaaaatgaaattttttaattgttatcatttttgtgataggaaaataaaattatttgttttgggtttagtttattttttatgggtttttcgtgaaggatttttatattattttcgaaagtatttattcgtgcgatttattaattttatttaagttcagcgaaatcttttctttcaaaaggttcagttctcattacgattgttgtcggcgcatataatatattaagtgttattttattcagctaaataatatttgcattttaaatcgagatataaaattagttttaatcagggggttcttcaattatttttggattttttgctttgagagttctattttttgcgaaactattcatttatttgtttttattagttgctatttttatttttaccatttaatttagacactctcaaacaaaaatgttattttctatcaaatgaattaattttttatctactaacctatgatgaagattgattggtaaaagatttcaatctgttttgtcattgtttatttgttatactgaagacattattgagtacagcagaaattcatttttttaataatattttatttattttaaatgcaattataatttgatataatcatcagttattggacttcattatgatgtatattttgcttttaatgtagtctagactaattttta

SEQ ID NO: 63962 - DNA, 56 bp, Heterodera glycines
gctatagggaagctatccccgaaggattcggtctcaccataaatctgggcgcatcg

SEQ ID NO: 63963 - DNA, 986 bp, Heterodera glycines
atgccttctaagcaacgaaatttgcgaaaaaatgagcaagagcgttatcagcggcggacggagaaatctgtcagtcgggatacctcacccgtctcagtcgggagtgcagatgggaatggtgaggcatcagcatctctccggggcaccaccaccccaagtttaagtgctttgcaaataagcacgcctgcttcttccattggaagtaaaaaaaggggaagacccttgaaagcaggagcgaagccaattttggcaacgcaagaaactgtgtcctcaattggcacacctcgaactgctgtcacccaaagtgaccaaggttcgccgtgcaaaaaaaggggaaaggtcactgagtgtgacaaacccacgtttgcaaatgaagctattgcttcaacgcctgtttcgactcaaagtcgtggagggcgaccagttaagcaactgggagggcatgccggtaaaggaagaggcaaaaccaacgagtctatgagcaaatgctctgaaatggaccaaagtgtggaaaacgctctaagtccggcaccctcgcacattgtgtttgaaaaaattgatttcagctctgtgcaaattaatttcgccacatcgcgaaattttgcctgtaaaatttggaaatgggcagcaatcggcctttacgaacgtgatggcgaaacaccgattgccccaagatctggcccaagatacattgagacctgttggaatgatatgacccagtttctcaatgacggctttgctgccacatacttggcatacttggcaaccatatcacaacgaaaagtggtcgttgttgacccaatggtatggagcaatggcctggacagagtcatgccttacaaaaatatgacatttgggtacgaccctaatgttccggcagaagttatacttttgccagtacatttccctggacattggactctcattgtccatgatgtgcaatttggcactcattttgccgattctttgcctaccacatatggcag

SEQ ID NO: 63964 - DNA, 419 bp, Heterodera glycines
atgcgcgttgtgcaacgacatttgatgaacatttccttttttgaccgtcttcaactcggcctcaaattggcattgctttcgccacgtttcaatgcgtttgtggacaaacatgttgatgacgagagcgaattgacaatttggagagcaatcgaaattcgtcgcaaggtcagtgtcagaacaacggcaccacaattatttgtgattatcggaattatttgtgattatcggcgctgtcaattctgtgccatttccattgcccgaccatccgttgtccaacaaaattcgctctgaatttccgtttcgactcatttcgaaccccaaactcaaatttggtaaaaatcaaatttcgttttcaactaaatttacagtattgggcctaaactccacaagagccaaagaaacttttatatgggaataaa

SEQ ID NO: 63965 - DNA, 372 bp, Heterodera glycines
atgacccgcgtcaatatctggatttattacgtaagttttgaaaaaataatccaaaaaaaaaacttgacacaaaattaatgtgcataattttcagaaattggaatatttagaaaaaaaattaagaaaattcctctccctagacagattgccatcagctcttgcataggaatagccttctcaaacatcaacataacgatgaacacacttttctcgcatatcattgggccccgaatgcaatccaagcagcagggaatgctggagatgttcggcggttttggacgaatgttgggcccgctactcatcgggtttgacggggggtagtcgagagtcttgaatctgattacattgatcagttttgagtcggataataaa

SEQ ID NO: 63966 - DNA, 49 bp, Heterodera glycines; identical to SEQ ID NO: 51181

SEQ ID NO: 63967 - DNA, 539 bp, Heterodera glycines
atgtccgcggcgcaatgtcatgtaatccttgttcgctacactaatttatgctatgagaatggtacaaaaagtatcccttcagctgtccttcagcacatttttttaaattttgaggtgtaggcccaaaacggaaaagtaccaaaattactatttaattgcatatttttttttgttttgaaatttatgccaaatttcgcttaaaaatttcgataaatttaagaaaaaaatcgacaaaaaatgtcaaaatatacaacagatgcaaatttctgtttatccgaacaaataagaatatttttagaaatttatgatgaatttcgaatgaaaatccgtcaaatcaaaggagaaaatcgacaaataatcatttaaatcgatcggacatttctcaaataattcattcatttcttttccaatgatcaattggcgatccgtaactttgactacctaagggaattttggaaaatcaacagtttaagcggcttgatgttttaatatattttaataacatataaaatttgttttcggcggttttaacaattaaa

SEQ ID NO: 63968 - DNA, 376 bp, Heterodera glycines
atgaattgccgatggtaataaaaatttcaaatttttcatttaccctaaattcattttcctcgcatttgagttggatttgcaacgacgtttggatggacattctcccatcttttgaccatgctcaactcggactcaaaatggcactgctttctccacgttttgatgcgttggtggacaaacatttcgatggcaaaagcgaattgacaatttggagaccaatcacaatttgcaaagatgctgttgcagcagtgccgaacttagctgtgcttatcgaccaaggcaattcagacaatttcgtgccatttccattgcccaaccattcgctgcccaacaaaattcgctttaacaacctttggattgagtaatacaaacacaa

SEQ ID NO: 63969 - DNA, 166 bp, Heterodera glycines
atgtctgttccaatcagtttgttttcatttcataccgcttcaaagcgtaatcaatcgcaacagaacgagcgggcaattggccttgaagcagcacttgatcaattgactgttggacaaatgacaactgagaagcacgctgttgaagctgcaaagaaattggactatt

SEQ ID NO: 63970 - DNA, 56 bp, Heterodera glycines; identical to SEQ ID NO: 58360

SEQ ID NO: 63971 - DNA, 485 bp, Heterodera glycines
atgttttgcgttcgccgcccacgtcgtcgtcctcaatgctcagatccgatcttgcgcagttatcgtcgtggaaaggtgaaaatgttttcaaaaaaacgtaatttaaacttaattgttttctttccaaattacatttttttttgttctatgagtcaaaatttttaaattatttgtttataaatatttttgtcctttacaggagcacgtggtgctcgaattggggagtccgatggcgatccgagataatgacgaggacggggcaaacaaagaaattatcgatcaggaattggagggtgagtgaaaatgccattataaatttttgctttcaattattattattattattcagtcactctcgaaggcaatgagaaagagtgttaggccaaggcgcacagagtgcaaattttgatatgatgaatttaaaatattaaatttaattatttttggttttaaattttcatttttaaaatcatttctaagctcaa

SEQ ID NO: 63972 - DNA, 231 bp, Heterodera glycines
  unsure (1)..(231): unsure at all n locations
tggagaaggcctgcaaaatttggagagattatatcgattttagtgcgctaggttcgatgaaactttttaaaatataagcctaaactttttggcctgtttaaaaaggaattaaaaatttttaaaatatttattcatctccctttttgatagtgaaagcatcagagagccttatttaactttttattaacattntggtgcgtttcagagcacgttctaaaaaatatttatgaa

SEQ ID NO: 63973 - DNA, 222 bp, Heterodera glycines
atgacattccaatctctggaactcaactcaccagcatttcaatcgccaggactcaatccaccagcattccaatcactgggactcaacccaccagcaattcaatctctgggactcaattctcaagctttccaatctctgggactcaaatctcctgcattccaaacattgggactcaacccaccaacatttcaatcactgggactcaacccaacagcattctaa

SEQ ID NO: 63974 - DNA, 618 bp, Heterodera glycines
atgccaaatcaaattttttcgccggggtttttgactattttggagctgggcgaaatgagcttggaccaagaattgcaacgtggtaaaccaaaaaaatcaaagaatcaactgatcacaatggtaaaagatatcgtgagcactttggatgttttgcacaaaggttattaactaattagtttattaattaattattaattaattgtcaataatagagttaacgattctaaattaaaattatttaattaatgtgaataatatgaaaaactgttcaaagacaaaaaaaaatattgtaattacttgaacaaaataattaattattttaaatttaatacatgttcgatcctttccttactgattttatcgaaataattttaatttgttttttaagttgcaatgcatttggacttcaagccgttaaatttgctgttatttaaaaaactcagtcttttttcttccacagatgtttcaataaaattgacggattttgatggtaattaaggattaattaattaattcagcttttgattaaaatagtgtaacatcattgaattaaataattcatgtttatgaactctttttaaggaattcaaatataaattttattttagtaattaatta

SEQ ID NO: 63975 - DNA, 89 bp, Heterodera glycines
caaaatttaaataacgggcgctaagcgcccgtccaaggccgcgaagcggcctaacaagctaaaaaacgggcgcgaagcgcccgtatgag

SEQ ID NO: 63976 - DNA, 329 bp, Heterodera glycines
ctttgatttgggcccggcacattttatcgcattctcaacagagttctatttttggcccaattattatcgctttgaaagtttggcagcccaatggcattggctgattcgagatttggaagtaaaaacttgaaaacttactttttttttttaaaactaagattttttaagaaagctaacttgaacagacatcaggtgccatggatcatcacaatgggccatcgtccaatgtattgttcgggtaaatagagacaaaaaaagaaaaattaataaaaaatcaaaataatttttcagatttttctggcgatgattgcacaagatatgactcaatt

SEQ ID NO: 63977 - DNA, 368 bp, Heterodera glycines
ggtttataatcaactacgccggacgtcttcgcaacaacggcacacgcactcgtccattgtttcgttccgaagaatggagtgtgtatgagcgcacaatgaacggcacggaccgcacaaacaacttcgccgaggcgtatcatcgcacgttgcaacatgcgatcggacatggacatcccccaatttggaaattcatcaacattttgcgtgagcgccagaaaataattgacgtggacttcgaacatttcctcgctggaaatgctccgccgcagaaagcaaagcgttaccgtgaagcggacagacgaattttgaggattctggagcgctacaatcgggaaaaagcgcagccgcaaatcaacgatgatcactag

SEQ ID NO: 63978 - DNA, 385 bp, Heterodera glycines
atgaatctcctaaacggaatgccaagcccttggaaatttcacttagaagcgaaatggacgacaatgtgagggaaaataagtgggtaaagcaattgccaatgaatgctttcttttcagagaaccgtccgattgtcagctgatggacgacccaatggttgaagacaaaagagcgccctttctcgggaggattttgcagttttgcgaagtaagttaattcacaaatgaattcacgcgttttccttcccgggattaaatttttaattataggaaaataagcggaagtactgctccacgacactttgttccacactctgtgactttgtattgtcagctgccaaacaataattctttttttgttgacaaatttactttttaattattaaaa

SEQ ID NO: 63979 - DNA, 1606 bp, Heterodera glycines
atgtataaatgccaatcctggcaaggaacaactcggaaaaatgatcggacgcgaagggtttttggcattgccatgggaattggaaatgacgatggagacgtacaatttggtgatggtaaaaaagacaatgcaaattaacaacaattgtcaaagatagccattctgacgagcatggaaagagagacaacagcgaatggcattgccaattcaattcacaaatttcgaaccgaacaaaggctggatgaaatcagaaaactgtcaaaggtaacgcaaagagcaaacagtccgaaattaaataggtaactcagtcaaataactttgtcagttttggtttgccgaaattgggcagagaaacgttacattcgatgactttatgcagaaagttggaaaagagacattggttgttctttcaacaattacagctttattttctgagttttgtagcgaaattccatgcaacgcttccagaggacgagttacgacgaagaagaagtgatcaaaacccaaacaatgatcacttggctttcgcaaatgcaactttggtcagtatcaaagcaaaaaggaaaacaaacaaaaaaaaatcagattattaaacaattaatgacactgccttccaaacttcagtttccagcctgtttttgacatggataattccaaaccgataactgaccaaggtcagttcttcatgttggttttgaaacataatgctgacaaactgaatggacaacaagttgattgcatgagtggtaatgtgtaagaggatgcaatagaaataaacaaatggtttttgagtggatttccacggaaggccaagttcaacgacacggtttatgggaagtaagggaataaccaaagacgggtttacggatgaggttgttactgtcgatgggaattcaaaaagtaaatgtaaactcaaaaaagctatgcattggcatgatgcacgaaataactgtcgaagtgaaggccctttacaaaatgttgccgaacgatgaggaaggaactgcgtgccgtgaattaaccgcgagtgtggacaatcagtgggagggccggaacatcttcaaacagtttctgcaaaatctcagatacgactgtcaccttcgatgtcgaatggaatttattcgtaatttatgtcactgtacgggtccaacactgagttatctgatcaaagacgaagacgaattggccaagtggccgctttgtgattattcaaaatgcgaaactgagtaaactaagaaagcatttgcttaactaacgcattacttccgcagaatctccggacgcaattacagcgatgaagaatgcagcaaaaactgtttcagagattgcgaacagatacgcttcagcgtaacacatgaaaagaagggcaaaagcttacgaccagggaactttcttaacactcactcattacggtgtttttattgactaaacaatttcagaactgacaaccgttgtcctaaactggggctcttttgagtatctgacattggaacaggattgggtttggtctgtgaccacattcatttcggcaatcgggggaagcatcggaatgtggctcggactgtccattttgagtttgatccaggcaattttggattgtcattgctaa

SEQ ID NO: 63980 - DNA, 58 bp, Heterodera glycines
ctttgctcactccttccgtggcttcttcttcggggtgttcttccttcacaattaacag

SEQ ID NO: 63981 - DNA, 787 bp, Heterodera glycines
atggaaccttttattgtgcgtatcagttacgcagggaatttgcgcccctatgaactcgctgaatatgaaactatttcaatgttgaaagtgcgtgtcgccgtttttgagggtgtgcctccaatccagcagcgtcttttttttcaagtagtcaatttgtcatagaagaaagtcataattttttcatttaaatatatttaaaaatatcataattaaatatttttttaaacgaaaaacatagtaaaagcaaataaaaataaattatttccccccttttcagatgatctgagccgggctgcagtgatcaattcaccgcgtccaaaaccatcattttgcgcctcaaacccattcagtggactcattgttcgacgctccgcttccatgggagacgcgcggtaattttcaaaacgaaattattaacaaaaacaatttaattagattattcattaattttccagaattcgccaaatgactgctcacaatcggaacaccgaaaatggacaaaatgaaaaagacgaaatggcggggaaaaaatttaaaaattgaaaaaaaaaacaaatgaatttgtatcttccctacagataattgttattctgtaagaactttttttttgataatacatactagagaagtacgggaccggaacctggtactgaaaaaacgtacaagtgggtaccagtatctaagtcccggcctttcaccccgaaaagtaccggttccggtttatctcgaaattgccggtcccgtacaactctagtacatacatatgtaatattattattataataaa

SEQ ID NO: 63982 - DNA, 432 bp, Heterodera glycines
atggctcatcgaacacctcttttgttcgcggcggctgcactgggagcaggtgtggccgggtttacggcctggtggctgtggacgcggcgtgatgtcgccggcggcggcggacccaattttggcggcgacgaagtgcccaacggtggcggcgacgaagtgcccaacggtggcggcgtcgaagtgcccaacggtggcggcgacgaagtgaccaacggtggcggcgtcgaagtgcccaacggtggcggcgacgaagtgaccaacggtggcggcgtcgaagtgcccgacggtggcggcggcggggccaatattggctgggcgaatgaagaagaggaggaaggggggcctccccatccgctccagaatccattgccagatcagcagaattaattgaattttttttatttttgcttttttttgttgttgttgaataaa

SEQ ID NO: 63983 - DNA, 375 bp, Heterodera glycines
atgaaaaagaagggagagagagagatggacagagacggagaaagcggggaagagaaagaaatagagaaatatcagctcactcatttatacctgaaaattattatgatagtaagactaaaaaaattattgaaatttattagaggcaattaaaggatatttgttaaaattttattggttttaataaagcatcaattacaaaaacaaatgattaaatttatttgttgtcagcgtgatttcaaaaaaagaaacattaaatggagtaataaaaaaagacagacgcataaacaaaagaatgactgggaattgattgtcctgagaaagtttgtcgttgcaattcatccaattcagagaaaaatgcatttttagcacattaaa

SEQ ID NO: 63984 - DNA, 78 bp, Heterodera glycines
  unsure (1)..(78): unsure at all n locations
atgtcttctctctctctctttctctctctctctctctctctgtngtctctcgtctgtctgcttctctctctngtctct

SEQ ID NO: 63985 - DNA, 780 bp, Heterodera glycines
atcgtcacttttacgaacatttgctccttctgcacgccttacgtttgtttgcccaatgcttcatttgtcggctcttttgccttaattggctaattaaggatgtgatcaaactgcttaatgacctataccaacgatttgatcgaattgtcggccttcacgacgtgtacaaagtggagacaattggtaaattagtgacaaaggaataaaacagaaagatacaataagcaaacgcttcttttcattaacaggcgatgcttatatgatcgtcggaggggtgccgaaagagtcccaaaatcacgcggagaaaattctgaatgttgccattggttttctgatggagtcgcgatttgtcaggggtggcccctctcctgctgtactccgttctgtgctttttgcaggtgaccaaccccaccaacgaattggccatttccatccgaattggcgtccattccggccccgtcgtcgccggcgtcgtcggagtaaaagtaaagcttttccatttcccttatcttaagagtgctttaccaatcattttttcagatgccaaggtgtttctttctttacataaattgtgtttaaatttgtcgtcagatattgcctttttggtgacacaattcatttggccaatcgaatggaatctttgggtgcgtttgaacaattcgcacaaaattaacggattttagggatgccatccaaaatccacgtcagcaaaactgcgaaggctttggcaatcagaaacaatccgtcatttttgttcacagagagaggggccataaaaat

SEQ ID NO: 63986 - DNA, 59 bp, Heterodera glycines
gatcgtcgatttttctgtatttttcataagactaatttacaataaaatgtatttttaaa

SEQ ID NO: 63987 - DNA, 144 bp, Heterodera glycines
atggtggacaagaaccttttcaccaaggagcagcaggcgaaaggtgggcaaccgacaagaaaactgcacaacggcattttttcatccctccattttcagatgccaaacgaccgcaaccactcgctgggccccaattcgtttcga

SEQ ID NO: 63988 - DNA, 1302 bp, Heterodera glycines
atgtcggaatcactgcaaggaattctggaaatattccgaggaaaacccacaaaaatggagaagaagaaagtaattactaatttagttttctttcggaaaattagctcattatttggccacgatttatgtttccaattatgtcggaatcactgcaaggaattctggaaatattccgaggaaaacccacaaaaatggagatgaagaaagtaattactatttcgttttcttttggaaaattagataattgtttggccacgatttatgtttccaattatgtcggaatcactgcactggcgtcatttgaaagctctatgtgtgctctatatttacatttacatttcaaaatagaaatgactgatttaaaaataaaaaagttatggcacacggtgcaaaaaaaaagccaagataggtatgtgttgccgaaatgtccgtgccgaactggccaaacttgaattaatacaagactttttgccaaaatatgaagatgcgccagtgttttcgactttgattcatttcgatatcaaaaatatttacctagaatgtttatgcgcaaaattttgaggactgaatcttgagaacgagattcaatttgggaaatgtttttatcggttcaattttttttaacatttttctcgggttttcttaataaatttgtctttaggaaatctttgaatttaaaaatggaaccggcgcgtgaaattgcgaaagtaatagtgcattttctgaactaaacaatttgattcattttagacaaacatcggaaaaactgtcaccgagaatgaagagggcgaaaaaagagaagatgaggcccggaaaaaagcagtggatcagtacaaaaaggagatgtcaccagcggatcgtaagcttctgtgtaagtgaatcaaacttgtttattccaaagaattaacttgtttcaaaaaagttgtgaccagaaaacttcaaaacacttctgatcattttgaccataatttggtgaattttggtggctttgtcaactccaatatacactaatagaggactttggagctatagatttataccaattttttaatttgaagcttctataaaagttatgatgcattaaatttagcgacgcgtgaagcttctcactccgccattgcgcgagcgagcggtgcctatgttccgacatatctgagaatgaacggtgattgcaccggagcggtaagtttgtctccttttaatcactaatcattgacactacctcaggcgtggcgaagaccaatccctcgctgtaaaactgttaaagagttgaagatggacgtagtcattggacagaactga

SEQ ID NO: 63989 - DNA, 656 bp, Heterodera glycines
gcaaatactacttcattggacaaccgaacatgcacaacagtcatttacagtaatattacattgtttttccaattggggcatgtgatggacttttagctgaatacgggcattttttttcttaatttgaaaacaatttaagacagttatcggatcagttacgcacagaaaatgaacagcgcactgagtgaaagcatatgggaagcatcaaattgtcatggtaaaatttgagtttaagtgaaagaaatcttgggatttaacatttatggcccaaatcataaattagaaagtgtctcatataataaatctgatgattttaatggattcgtggccagccacccagcaaaaaccttgggttctgattactagataaaaaatgaaattcatgacctaaattctgttccattgtctacggacggatttcaatgaaaacccttaaatattactctaaatgtttatccaattttgcatttattttctttttcggattgccttcgcatcgattggaattttgaacatggtaattccacctttgagttcgacaataaaacggtctttttttgcattttctgcattcttttgcactaattggattcctttttttcagttgcaattcaaaaattacttgtggcaatggcgaaattgtgttgtccaacaga

SEQ ID NO: 63990 - DNA, 396 bp, Heterodera glycines
atggcatttatttatgaacatggaggcgaaaaaaaggtaatttattaaagggaaaatgatagaataaatttaattgattagtaaaatatcggtattcgattgtctttatcaaaagatggcaattccatttctgatccatcacagatggacctcgagaaagacagtgccgaggcgagaaaggaggagccgggcctttttcgcattcttttgggcggaaagccggacaatccgtctgatcccgcggccaaccgaagggtgccgatcagcgcgcgctttctcaccggcgagccaaaatggcgttacttcgttttgccgttgcttttcggtgcctttgttttcgcgattagaccgtggcaatggcaacgcccggggggacgaaaatcagaaggaaagtga

SEQ ID NO: 63991 - DNA, 769 bp, Heterodera glycines
atggacgaacagttgaagaggagcaaagaaaatgcggacaaatacagacacagggcaatgaaactggacgaacggttgaggcggaagacggaaaagattgaggaacaaaagacacaaattgaggaagcgatcaatgccaaacgaatggcggaggacgaactgagcaaagtgaaggcggaaaatgcacttattaagcagcagcaagagcaggtcgacacaaattggagcagttcgttaacccccccccccccccccgcccaaaaaaaaattaattttttttaaaatcctaactttcttttgtgcgagttttttctttttaattttgtttatttcttcggtgctggtgtgatatagggcacccgacacagacccattctcccgctaaaaaaaaaactaaaaatttgttagtttttaaaatgcttaaattcagttaaaattaattttcccagaaaaagaaactaaatgtttaaacaattttgttttgtattacagaatgtaagcaatctccaacatgcagttggtgcaggtcaaacaacaacatcagcatctgctccggatttgggccttcttaatgacagagtgaacgcaattttttttttttaatttgaaaattcacttttcggatttttgcagattcgaactgtcacaaaaaggaggaaggagttggacaaggcacttgctttccttggagttcgtcaaccaaaacgtgcaaaacattccaccaccaaaaaaaaaggttttttttttttgacaaattgctattattaaa

SEQ ID NO: 63992 - DNA, 120 bp, Heterodera glycines
atgctcagttctttccccttattattgtccttggtcggcctcatcgccgtccacgccgaagtcttcttcaaggaggagttttctgatgacagttggactgatcgatgggtcacgtcgaag

SEQ ID NO: 63993 - DNA, 263 bp, Heterodera glycines
atgtttttgttagcctatttatttacaggagaagtaagtatatgaatatcaacaataaaaaatatatttattttaagatttataatagtgcaactaaagatattaaatgaaaaatacaaattgaattagaggaatttctaccaaacattacaatattttttcatacataatacttttcagtaaaaattatagttatatgttcaacaagtatttagctgttttttaaccgattcaaaactataaaaaagaatttttgaatttta

SEQ ID NO: 63994 - DNA, 483 bp, Heterodera glycines
atttgttctgctacaatggtccttgtcatcgaattttgtgcccaaattctcggctgttccccgaaatcactccgcgacaagctcaatcatcctgaggaccgagtgaaggcactgaaggagctggtcggaaaaaaggttcggacgacataccaggaccggaatgaaatacagaaaacattttttgtcgacggaatatcggaccatggagcggctttgaccccagcatacggcagactcagacaaccgtacaacattaacattgctgcccatttctacgctcgccaccgtattaagcttcacctgccatacgtgccgtgtattgtggagaaatattctggatgtggcgaagacagatactatccaatggaactactcgaaattgtggatgacgactacaccaacaaagagcgatggcttggcaaattgtttaccgaaatcgaggacgacttcattcctgtcaaacgccttggtcgagttgactaa

SEQ ID NO: 63995 - DNA, 318 bp, Heterodera glycines
  unsure (1)..(318): unsure at all n locations
atgaaactgcnggaggagcaacaagtgaaagctaagaagccaaacgttgatgagcgatttctttggaaaatcacgagaggccaatttgtgcttgcgattcggctgtgctcaggttaatcaaaaatttttgacgaccaaattaattgacagctttcagaggactggaaacatttatttcacaacaaagacaaggcatgtcggctggaagatggacgagtggcgattggactcgagatgtgtgaagaatgtgcccgaatcattgcctgtgtcagtgacatgattgctgatncaaagnaaagccaaaaaccaccgaaataa

SEQ ID NO: 63996 - DNA, 1175 bp, Heterodera glycines
atgattggattggccagcttagaagaagcagatcaaatgagaagacaggtgagagaaacagagacagagaaaaatatacgtgagagagagaggggagagagaaagagatagtatgagagagagagagtgagaaaggggaggggaggagagagagagagtgagaaagatagagaacgctagaagaagagaaagaatgagacagagagaaatatagagagtgagagaaagatagagagcgagagagagatagtatgataatgactcgagctttagggtactcgaaaagtatcaaacaaaggaggatttagactgggtttccgagactctacacggtaggaaaaatcttttcacgcgtcaaaagccgacccgaaacccgagactctcgaatagcaataaaatttaatttgacttttatcccattcaaattaggcttattaatcgtctattttgcctcctttcttttttctgttcagattcatctgagactgccagaattggttggaggagaaaagcaaagggttaacgaattaatggaaatgttgtcaattcgttcgagtggaaatggtaagcatcaaattaagttttgttcaaataaagcgaactctttttaacgcaaaaacaatttttattttttatttactttatattttcattaaacaaaacttattttattttaatttaaaaaattatgattttcaatatttttttagtaattaaaaagaaatttattattgttgtttaactctcatattaaaattcatttattttgtccatttgttttttattttcccatttttacgcaattttaattttaaattaattaaatattccctttaaattggttataagatatgcttggtttggtccaattcttctacacaaatgtgctgttgtcaagtgtcaattctgtggccaatgaggcgaagtggcagaatgaaattgcgcaaatgaatgccttcgctttgatccatcgaattgacgcgtttcattggcgcaacggacggatcgccaacgattgggcggaagtgcggaaagcggtgggcacacttgtggacgaattgggcacagaacaaacgggcaaattgacatcacaggtgaaggaggaagcaggggacaatttagaggaaaaaattaaagcaaattaattaattgatttaattaattaattggtttaa

SEQ ID NO: 63997 - DNA, 224 bp, Heterodera glycines
atgccgtttattttgggcttttatgcatttcagtgagttacgtaaaaacttaaaaataaaataaaaaattaaacaggcggcataaagtcaacgatgctaatcaaaatcttatcaattagtcaacatgacggatcaaaactaattatggggtctaatttcaaaatttccggggggtttcaaaacctaaagtaccgaaaaatttaaggtaaaaattggcaaataaa

SEQ ID NO: 63998 - DNA, 2664 bp, Heterodera glycines
  unsure (1)..(2664): unsure at all n locations
actccgatgctgaacaccttgcccttgcctatgaacaattgctgtccaataaaagctatcgcttctcaaaccaagctgaattcgccgaccgtataaacagtatgccaattgctgttgctgctccgttgtggcttttctccgcttttgtcgacgatttgctggtctatttggaggcaaattttaagatggacgaatactacgatatgccgatggccaaggatacggtaatgaacgaactgtggacggcatggggaagactgcagttgctacaagcgacggcacaaggcggcgaacgcgagagagagaaagtgaaactgtgccaagtttattgcttcctaggtactactgtcgcacactgtggggttactgtatgaaaaatgagcctaaggcattccagaaaaataaaattttagagagaagaaatttaaaataaaatttcgaaactttatttattggcgagaaatttttttggatgatttgctcgtttcgtttccgattaaaatggacatcttcagcaaaaaaatgctataacttttcgctagagctcgacctggacctgcatccgaggtctgagtttttcctggatccgagttccagtcgagtttttggcgacctggtttttatgaacctggattttccacgattttggccttcaggcctaggcttttttcgctagtagtttttttgaaaaattgccgaataatcgagaccatttgcggagacgttggatgataccaaaatgtttttaaaaaaatttttaacggactttaggggtcaccgatcacgaatctaacatacatttcgacaaacttacgaactgcggacctgcattngaaaaaagttcgaacaaaaagttgaagataaaaaaatgcgaaatttgaaggtttgacttaacgcacgagtttggttccggggttcgaaattggccgaaatggatgttatattcgtaatcagtgaccccaaaaaacttttttatcatttaatatagataatttaagtacatttaaattaaaaatatatatgaaattggcttgtaaactaaaaaagtgtctttttttgtcagcaaatgcatttttttggtttagccaattaggctcataacttgaggattaccgccgatgttttaacagtagtcatttaccgtaacagtcgcaccacttacagtacaccaacaacaccgttcgtcctttttcagattgggcaattcgcaaaagttggccacacattggagacacggcttcttttgcaatcattttagacaacattcattggaaagattttgaagcaacaacactggtaggctttttctcgagcttctgcggaaatccgccagtcccgaaatcccaatcccttcccattttctggtcttttttgcccggggcactatttttactttttacgggaacggaggccaatcataattacgaaggacaaatcggacgaccaatcacacatttggcatttgtctccaaatttatcgttacgacaaaaattaggtcgtttgtctctgtcgtcaaattgtccgtaaatttgtcgtcatttttctttaaaatgaaccaaacatttaagataaggcaaaaaattaaaaattctgattggtgctatgtcattattttaaaaccatcattatgtgcgttatttaaaaaaccatcaaaataaaaattttgcttataacttttctttaaaataaccaaatttttaattcttgatatcattcgatagaactaagtgttctttaagagcctgcaaaatttcaaaaaaatttataactttaaaaaaaagttatgaccaaaaatgttcgaaaaccaaggttttttgagttcctcgagctataacttttttgaaacttaacgaaattttttgaaattttgcagactgatagagaacacttagggctatcgaatatttcaagaattaaacatttatttaccttagagcaaaattataaataattattcgacaaaaattttcataatgatggttttttaaataacgactccgccccttctgattgaccccccagggaaaaggcgggaaaggaagaaatttcttctttgaaaaagggttccattatttcctgctgaaaaacatacctccgatttagcgatttaggagcataatatttagtggattttttgcgcaattttttattgccaattaattaaataataaatatttgtttagcttaaaaatttgaatctcaattcccaaaacggtgcggcgcctctgaaagggccgatttgtacagaaagtgtggctgatcggctgttcgctgagctgaccaacgcgcaaaactttggttttttgcacactcatgccattttcacactgatcaaacgacggaccaatggcattttggcatttctctgctcaaaaaagaagctgaacgaaatcatggaggtcaaagagcgcattcaaatgctgacaagaagcgtagacaaattggattggttggaaatggcatttccggacattctgcacataggcaagcggaaggaagcggggtccaccgatgcctttgtggcggaaatttcattgggccgaaatgtcattgacataacccatattgggatgatcaatgacagcagaacccatttattgtccacaatcgacattaatgcctttttttggcagggttggcattggcattactttatgacctaa

SEQ ID NO: 63999 - DNA, 1869 bp, Heterodera glycines
atggccgctgatatcactgtgttcgtccggctgatcgaagcggtgccccggggggcaaaatttgacaaaatttggaaagaaaaaaaggaaaaccaaatcatcgatttgtacgacagctttttcgagatggactatagcaacgaatatcgaacacaaatgcattttacgtggaaattgtttgacgctgtccgatcagagctggccgatcttggttttttgatcaacgagaaaaagctgagacagaaatgggacggcatggaaaagcgggcacagcgcgacgccgcggaccaaacagcgagcgacgatggcacagtgccaaccgcgccaattttggtggccaaattacatgcgcaaacgctgcaaaagttggcatttgaaaatgccgaaacggcgaaacggaagacggcagaaatggccaaacatttcagggaaaagctgaagacaggtgaactcataaaaggggggaagcaaacattcggaatttttgcatgtgctaatattggcacaatgacatcaattagtgccaaatcccgctgattatggcatgggcattttggtgccaaagacctctgacgttatgacaactcatacaaaaggcattgtattttattgtacgagttgccttttgtatgagttgcaaagaatttgccaaatgccgacgagaatttcggtgtgtcgaacaatttggccaaaaatgtccatgtttatttttatcgctaatcatggcatgctgttttggcgttagtgtcatttccttgggactctttttggcaaattattttcttttctccattttaaatctttatagaattgagcgaatcaactggcgcaaggcaccaacttttgctttttttggaactcagtgacatcaaagtgctgcttgaacagcttggcatagaattcactgagaaggaatttgaggacgacccaatggaagaagaaggacaaaagagtaccagtgatcagcagcagacagagaaacgaaagaagaaaaagaagaacaggaagaaaggaggcatgaaaaagaaggcagacaaagcgggagagactgtgcagaatggagagagtgcagagaaaccttgtgatcagagtgggagagagaacgtgcaaattgaagagaaggccgcagaaaaattggagaatggaagagagagcgtgcaaaacgaagaaaaccgaaaaaattcgccagcagagaatggcgaaaagagagtgaaaaacgaagagagtgcagagaaaacagagcaaataatctgtgacctgcagagaaaaacaattgagagagcagacagtcatccgccgataataagacaagacagagaatgaaactctgttgatcagaagaaattaattgaaaatgaaaagagagaaaattctgatcagaaaaaagaaaaagggactgaaatgggacagaacggaacttgggaagagactgatcaaagccgggaaattgatgctcaaattggcaacaatttgctgtcattttcaaatggggaggattcgaaagaggaaaaaacacctgcgaaatttttcaaagtttcgggtgaatgcccaaatcggtgtcaattttattagttttatttattttttaaatttttgatagatttaaaaaaacataattttttggccggcaaatatttggaattgatggccgagccgagcaaattcgagagttttacagcagccgaaaacccggaaaggattttattggatttgagtgtttttgcgaatgaaatatcgcgcagatttgaaacactgcaacaattgggacaaaatgcaaaaaaaattgccaatatgaatatgaaagtgccaaaacagttgataaaatattggaaaaaattggaagagaatgcccaaatagaaaatgaaata

SEQ ID NO: 64000 - DNA, 532 bp, Heterodera glycines
atgagttgtcttcgagtagtgatgatgggaaaaatagtgccacttgaaatggttgaacaggcatttttcaatatgcccgaggattattcattggtgcgcatgaatgaaaaatttgggccaataattttatggacgaaatagtgaagttgacgaattagttgtattttcttttgtcgcataaatgttatttgaagaatacccatttttcttctatttctttttatttaataggccgtgcaattattcttttttcaagagctaacaataagaaggttatcattggtattacaaatccaatttattagtttttatcccgatagtatgtgtatatccctatcaatgttaacaaatagttttttgtctcctcttgtacctcaaaaaattgatgtgcctccataataaggggcacgaaatcacatgtttgcgtagccaccattcgatgtgcttgagttgtgaaatgatgaagcggggaaagcgaaaaaaagcaagtttattttatatgaaacatttggcaccaaacaatagaattaaa

SEQ ID NO: 64001 - DNA, 80 bp, Heterodera glycines
atgaacaccaaacataataaaactgagactctgtctctctctctctctctctctctccttctctgtgccttcctttctat

SEQ ID NO: 64002 - DNA, 2356 bp, Heterodera glycines
atgtcacaacatcctcatcaaggtgatttgtggattaaaaagggtatttggaaatttgaaaatccaaaattggactcattgtcagtttatggcacaagtgccggtgccggtggttatccaccgcaacaacaacaacaacaaccacagcagcaacaggcggttgaccaacaacagcagcaatttcttggcgccgcttcagtcgctgctgcagctgcggcccaacaaatgagcaatgtgtgcgagggggggggggaattaaaattaaaattggaaatttaaaattaaattaatttaaatttggctaaagtttacgccgcaacaacagtatgaggtgtggcaacagtattattcccaaattggtgtccaacaccagcagcaacagcagcagcaaacactttcgccattcttgagccattccatccaggttttgacgagaaaagtggggacgggcaaaatggcacaaattaaatggatgttgcaaaaaaaattataatggtgccaaaattgggaggaattcgaattcccggcgagggaggaacactgtttgaaaagtttcgaaatagtcaattgtccgaaaaaaatcaaaaattgatcaaaataaattttttattttgatcctatttgattaaagggaaccagagggagtaattaatcttgtctgattgggaacaatgcaatttttaaaatcatcaaaaataaacaataaagattaaatttgtccaaaagttttattttttataatggtggaaattacctggattatggatttagggataaaatataattagccctaaattgcacattattatcttctccatttactgctagatgaacatatgtgccttgtttcctgcctaatttctttatctttgaccattaaattagaaaattaataggtcattaacaaattatttggcacaaattggtcaaaaacattcttccccatcattagtcgatggccgcccagccgtccacgtcgcttgccatgctgcagcagcaccagcagccggcgcagcaccaaatgctggcacaacagcagcagcagatggcacaacactacggcacttcgcccatggcacctgtggtggtcagcccgagcggaagcggcgcaggcagcagcggaagtgccgggttggcagccgcctcgttggtggtgcagcagcatcagcagtatctgcaacaggctgcactgcttgctcatgttagcacgagttgacttgctgtcgggtggtataagaaagactttaaaattttggaaaaaaatccacgaggggcactcgggattcggagcggtttttccgtaaacttttgggcggattcgggacaataaaaatgtcgggattagagtggaaaccctgcaccctagggaatgggtggaggcgtgggttcaatgcccatccgaggggccgcataatattatttttgcctgtttcagcagcagaatcagcagtaccaccaccaacagcagcagcaacatattcagcagccaagacaagttgcggtcgttcaaccgcaacaacagcaacaacaacaacatcagcagttgcagcaattgcatcagcggacgattggcggtgccaccggcgttggcacttcgactgttgccattggcggcagcccattcatggcatcggcggtccaacaaaatgtaaatatatatggcattttccatgtgaaactaggtcggacatcaccacaagattaagccatggtatcgcacttaacttgggaaaggctcagatttttttggggtgtcgaatcccggatatttctatctcgagaatcacaaataaaaatttttgaacatggattttattttgggcctggacttgaattttttgccaatccatgtccaggaacttcgatgttgctaattgagcaatttgataattaaataaaaggtcgtccatcaatcggcgtttggagttgcccagcaacatccacaacaacaacaacaacagccgcagcaacacgttaagcaggtgcaccagcagcagcagctgatcagccaatcgcatgttcagctgcaacagagtccacaaaagcagcatgaaaagtgggatccgctcaaggagtttggactgcacaaagacgaagttgcgttgaagtcgccgcccagcaatgtttgttctgttgtgccaattgctaattcatgaattggggaacccataaaatttgattaaattgaacgaaaaatcgtcgattaggcgtgtatttatgggctaaaaagccatggaaaatatttaagtgataaagccatttaaatcggaattacatttaagattagtccctgatgactgacaaggatagttgtgaaattaaaaaaaaacacaaaaaaatttaaataatttatgaa

SEQ ID NO: 64003 - DNA, 278 bp, Heterodera glycines
atgcagcaggccaaccaagtgttggcaaacactgacgaaagtttggccgactatttgtccactttgctgtccgacaccacggacgaactgcgaaaaatgtaaaaattaattaaatttattttctaaaattttggcggcaaaaatttagattttttcataaaattttttacagtaatgttcttttttgtgcttcttctaatattaaatcttaaatatttttaggtctattttgaataagaagaaatgccgatattgaggggcccaacaataatttatta

SEQ ID NO: 64004 - DNA, 100 bp, Heterodera glycines; identical to SEQ ID NO: 51845

SEQ ID NO: 64005 - DNA, 623 bp, Heterodera glycines
atggatgctcagccagtgataaataagatttcggatgatgaaggtcgaagaacggaagatgcattcacacgatttatcaaaaggtaggataatctagcgaaaatataaaaatttaaaatgtcttttaagttttgaaaccgatggtgggaatgtgtatattcagcagattgacgagttgagggggcccgaacgaaacactctcgaagttgaatttgcacacatttccgcttacagcgcggtgcttgctgccacaattgaactgcaattttacaggtcaactccgatttacgtgcttttgttttagctaaatccatgaattcattttctaaggttgtatccgtttctgtgccatgccatttgcgaattggtcgtcgagcgttgtgatgctgccgaccaacacgaacatttgcgtcgcaagcaatactacttggccatagtaggggttaaaaccaggcaccaagttcggcatctgaccagcgacaaaatcggcaaacttatccggatttcgggacaagtggtgcgtacgcaccaggttcatcccgagttggcattgggcactttcgtatgcgaggattgtggcgttgtgacgcgggatgtgccacaacatttcaaatacacgcccg

SEQ ID NO: 64006 - DNA, 80 bp, Heterodera glycines
ctattattatgagccacccaatttggcaaagatcggtctttttatacgcattaaagaagattcagtcgattgcttggagt

SEQ ID NO: 64007 - DNA, 106 bp, Heterodera glycines
cagttttggcccttcgtccaaattgtcaatctgacggttatccctcttcactttcgcgttgtgttcctccaattcttcggcattttctggaatattttcctctcct

SEQ ID NO: 64008 - DNA, 638 bp, Heterodera glycines
gctggttatccgttgccttttaagcgcccctcgggatgggaggagccctatcggagagataaaatgggggggggggaagggtaaaggccatttccggtcccggccttacacctccggccctccaaaagaccgtccctggtcgttaaaatttaaataatttccaaaatttgaatgaagtcctcagactttttctttcttttcatttgttttacgatgagaaatttgttttgattttaagccaaaactgaaaataaaataatttaaatatttatttaattactcaaaataaaaatggaaaattccgagcctcgatgggaatgaactcattccttcaaccaatccacagaagctctgccaatgaactaccaaaataaatccgcgtttttttttttttttaaattaatttttttttgaaattctgattcaattggatttgaattaaattggcattgcttttcaaattataagccaagagaaaatctgacgaaatttttaacttttaaaattatataaatttaataattattttattttatttccaatcgactaaaatttagatttttgatatagcccggtgtgactgtatgactatacctccccttcatatctaaggatcgtccctgatccaagaacttaaa

SEQ ID NO: 64009 - DNA, 555 bp, Heterodera glycines
atggatggaaaatacggtatttatctattatatacggtggctggtcattttgatcatcaaaacacgacggtcggcacaatgttcagcagatgtgccattctttccttctttcttccttccattgttcaggaagaacttagcagcagtgagacaatcattccgtaaagaccgagcacctgaacagagcaaaaagaaaattcaaataaatttacccaacagtttcgaaacgaattgggacgactgagcaccgaccgactgaggccacgccagccagccggtttttgggtataaccccattcatacctgttcgaattgaatgaatttgaaatcattcgatagccctaagagttctcaatttccttgtaaatttttgaaaaatttagtttaatttcaaaaaagttattgccaaaagacttaggatttgtttttccaaacattttttgaacacaacttttttaaaaacggaaattttttcaatttaaactttagcaaggtttataaagatttttaggcctatcggatgatatcaaatacattcaattcggacaattatga

SEQ ID NO: 64010 - DNA, 480 bp, Heterodera glycines
atgaggcatgtgccatatgcataccgcgagaaaattgcggcaatgcttcaagactatctgggaagaggagtcatccaatcgtccatttctccatgggccagtcccatcgtattagtgccaaaacgtgatggtacattacgtttttgtgtcgattatcgagctgtgaactcggttacgcgtaaagatagcttccccttaccaaacattgacaacatactgttaatgctaggaggaaaaaagtttttcagtactctcgattttatgtcagggtattggcagattaaaatggaagacaattcggtggaaataacggcgtttacaactgagtacggcctttacgagttcaaagttatgccattcgggctaacaaacgcggtcgcgactttccaaagattcatgacccgtcttttcgagggcatgatcaacgattttgtcttcatttacatggatgacattgtgatcctcttcagaatcgtttga

SEQ ID NO: 64011 - DNA, 628 bp, Heterodera glycines
atgattttgattcttcttcgagtaaatataaattatacaacatgttttattattttggaaattctaaccaaattgctgaatgagaatagattgaattatgaacagaaattgtcaattaatgaaatgattttgcaattagcaattgatacagccaataattacaaaacaaatgaaacattggataaaataatccaaccaaaatttgaagaatatttagaggaaatgttcaaaaaagcggaagaaagtgcaaaaaaagaaagaccatggaacgccaataaaataaattatgacaaacatttgataattttgtatacaaaattcgatgatcatttgatatgggtgagacttaacattcaagcaaaactttaaaaattaaaaatttaggatgaagattctgaattttcggaattttgtcaaaggattagcgacaaatttggagaaattatttaaaatggctaaagaatattcaaattattaccgtcaaatgaaagagaaaggattcatggcctcttatgggttatacgaaattgagaaaatgaaatagcatttgacgcaaaactatgaggcgcaacttggcattttgaatttaatgcaaaagaattggcaatgtgacaaaattgcggataaa

SEQ ID NO: 64012 - DNA, 1167 bp, Heterodera glycines
atgaagcaacaactcgattcaactgatgcaaagtcaacgtgtgcttttgatgagttgatggcaggtgtccgcagatgtggaaacgcggaaaagaacggcagtgctgttggaaaaattatgttggtaaaggtctcaattttagagcaaaaggcagacgcaatgcttgatggcggcgcccagatttcactgatttcagtggaatttttcaacaaaattttgaatagttcaacattgaacaaagaatttttgaagcccgatcgacaaattgcacgtgtcatagacataaatggaaaagaggtcaaatgttacggtgttgtaactttgcctgttaaaaggcaggaaaggacagtgcaagtgcgtcttcacgtagctcaaacatcgtttggctacgatttactattcggaaccaactcactttcggagttagggttcaaaattttttacgagttgtcaaaaacgatggtagacttcaagcaaaacgtgaacacccaaaactcggttcacgtgattttcaaaacgactttaatgccgttagccactacacttgttgaaatgacaagttcaacgaagaaagacaaagaattggcaatttttccatcaaatgacagaaaaaaggtgatgagaattgaaccggctgtcgtaaatccaaataacggaaaatttatcgcaccgatcaccaatttctctgcacttccgattacattggaaaaggatgagattgttggacaatttgagcattttgcgaatccgcgtgaattgaatgattcaatgttgttcacattgacaggcaaaaatgatgaagaccaaaattcgtccaaatctaaaagtgaaatccaattaaattgtgcgaattcaaaagaattccagcaagctggcacaaataaacggacaacttacgtggagaagaaaagcaaaaattgcaaattctgatcacggagtttgaagacatttttgctgtcagtgattgggagttaacacagactaatttggtccaacatgcgatcgatacaaaagacgcagaaccaatccgaagtcaaatgcgcccaatcccatacgcataccgcggaaaagtgactgaaatggtccaagattatatgggacgtggtctcattcgtccatccagctcaccttgggcaagtccaattgttcttgttccaaagcgtgatg

SEQ ID NO: 64013 - DNA, 1486 bp, Heterodera glycines
tttccatataatttgacagaactacttatttgttagttgataattttgaataaatcaattaattttatattttccatggccgcttaagtatttcgaaggccttcgcggccgataacattgtgccggacgttgtgtcccaagcgccggaaaggctcgtgaccgtggaatacgatggcggagtgtacgcggagctcggcaacgaattggcacccaaaaagttggccaaggcgccgaacctttcatgggacgcggaggagtgcaaaaagtacacagtggccatggtcgacccggacgcgccttcgcgggagcacccgaaaaatcggtggcattttattaagggcacatcagaggcaggagcgttttcccccccccccccccccctccatccatgcaccaaaatccaaactgattggctttctccagattagtttaatttattaggattgaataagcggacggttaaaatgctgaaaacgggggcataaaaagacccataaaggggggggggggggggtggcctgctggtaataatagcgataagccgatcgctggcaccggaggtcgtgggttcgattccctcccaggtctataatttttccaaacctttattaaattgaaattcatattatgccaaataaaatttctattagaaaatgttggcttacacaattttttgccattaatgatacttttcctaattaagttttccaatacaaattaaaccgacggcggattgcccactgactgatcaaatgaattttttgttttgttttggtgactaaaagattagttaatgacaatgtcctggattcaaccaaagtattatattaaattaaaaataaaataaattatttttgatttgagagagtggctccattggttggttgtcaatgtgccgggcactgatgtcgcgcagggagagcaactcatcgattatatggggccggcaccgcccaaagggacgggttggcacaaacaatgaataatgagtgtcataatcaatttgtttgcctattgaaaaaataaaaaagaattttgaggtctccaccgctatgtgttccttgtctatgcgcagaaagaggaggcggtggttaatgccattaaaaagccaggtaatcaatcagtgttgggagactgaaaaatgcttttgaaccctatccatggaatttaaagggtgtaggggcaaggtcaatttgttaaacggtttcctaattaatatttggcgtaaccggggcataaattgccccaaggctgggccttgtccattcgaatcacaacacaaatcgcgaactcagttttgtctaaaaattgctcatttaggaatataattagataattagcaccacattttccagggcgttcgcacttcaacatcagagaatttgccaaggaaatttacgtcgggccgcctctggcagggaatttcttcaacgcgaaataccacggctgaatcagacccaatttgagtgggaatgaaagaaccatg

SEQ ID NO: 64014 - DNA, 979 bp, Heterodera glycines
tgtgatcatgttttgctgtttctgatcagcccacgtgcatctgtcctattccctgggctatttggtcggctgtctgatgggcggctttatctccgaccgttacggccgtaagccggccatttacggcttctccattctgtccaccatcttcggctttctgctgtccttctcgcgcgagttcgaagtgtttttggtcgtccgatttcttctcgccgcttgcaatgaggcggccgatttggccgcttacgtttattgcatggaaatcactggttttgccatgccaaaatgcccttttgcaccatgccaatgcttctttctccccagggatgcagtatcgttccgttgtcggcagccttttgcaagcgccgtgggcttgcggctacgccttcctggcattagttgcttacatttggcggtcgtggacctcaattcaggtggggtgggcggctcccggacaattcgtcaacaaacttaataaaacgcaattttatgtaaaacaatatgaaaattaatttaaaattcaaaaaataatttttgtaatttatttcctgacgaattgtccattactgaccgattgtctctctggacatcgagtgggcgaggggaagctaaggattgcaaatgatagctgatcaccaccgttttccatctccttgccctgtttctgatccatcatcttccggagagtccacgttggctaatcgccacaaatcgcgtggacgaggcgagtccattctgctatttaccgtattaaagtgatttacaggcggagaaaatcatcaggaaggcatgccacttcaataaggcatagtcaattagcactaatgaccaattaatgagtctaagtgccttttcagagttcgcttccctccgatttggaattggtgcgacacgcggaacaacgcaaatggctaaaatacaatcaaaggccgcactttattgactcatttaaatcgccgacaatggcatttcgtaaatg

SEQ ID NO: 64015 - DNA, 66 bp, Heterodera glycines
atggctatctctttttttgagaaattttctatgcaacaaacgctctcaaacatgaaacgaagtgcg

SEQ ID NO: 64016 - DNA, 146 bp, Heterodera glycines; identical to SEQ ID NO: 56264

SEQ ID NO: 64017 - DNA, 146 bp, Heterodera glycines; identical to SEQ ID NO: 56264

SEQ ID NO: 64018 - DNA, 146 bp, Heterodera glycines; identical to SEQ ID NO: 56264

SEQ ID NO: 64019 - DNA, 484 bp, Heterodera glycines
atgataaagaagcgattagagaggaaggaaggtaaagataatgcagggtagaagagggggaggggggggaaatatatgtaaatcaaaaataattacagaaaaaaatgccacgaaagaggagctgaatgaggatggcataatggcacagatgaaagaaatgtttaagcagatgaatctcggaaatttgaacgatttaatgggaggaatgggtgaagaagaagaggaagaaatgagagaaggtgaagaacaattggaagaagaggaggaggaagagaaagaagaggaaaaggcagctgagaaagaaggagagggcgaagaagaaaaggaagagggagaggaggaggagaaagagcaggagaaggaagagggagagggacagtgcagcaaaagtaatgaagaaggaggacaatgtatggcaaaagaaggcgaagagaacgcagaaaagtcagagacgaagatgaaagaggacagagatgaattgtga

SEQ ID NO: 64020 - DNA, 49 bp, Heterodera glycines; identical to SEQ ID NO: 57477

SEQ ID NO: 64021 - DNA, 2822 bp, Heterodera glycines; identical to SEQ ID NO: 7164
  unsure (1)..(2822): unsure at all n locations

SEQ ID NO: 64022 - DNA, 288 bp, Heterodera glycines
gctggttggatttttacatctgacaggtcttgtgagggcccggagccttctttcgaagggcatccaggaccaacatgggaccgccgcatagatgcccacttattggacagcgatggagacgatcgagacatgtacatggtcgggttgagctggcacaatctttgccattctgggagtacacctttggcccaattaatgagtccccggtcgtctgtgtttcgcaccactacatcctttatagcggactcctccacggctgaccactgctgaaccctctgcgtccggact

SEQ ID NO: 64023 - DNA, 109 bp, Heterodera glycines
atgtctgctgtacaattcaaacagtcatttgacaaagtctgtgccaccacagccaacgcatttcgctttagcctccaatggtgttttgtgccgctggtcgttattcttg

SEQ ID NO: 64024 - DNA, 1009 bp, Heterodera glycines; identical to SEQ ID NO: 34158

SEQ ID NO: 64025 - DNA, 1231 bp, Heterodera glycines
aagcagttcaacggacgcaattcttgaatacaaaaagtcattggaaccgccgagaattgaaataaacggaacaattgaaaattatgcggtgataaaacccccaaattcattattttgtttttagaaataaaatatatgggtaattaagggttcaactgacaatttttctcgtttaaatgctcaaaattcggtgataaatgaccaacgccgtggcagcagtacgtcaatcggatttagtaaagtaataaatgattttattcttaatgtgcaaatgtaaaaacatattatttaaatatttaattgcaaaattttattcttaccatattatagcataaagcacataaagtggattcgcgcaaaatcactcacaaaaaacggttggaaagagggcaggtaattaacacattaatcactttaatacttttaaaataattttgaacgatatttgatcactccaaccatacaaaaaaatctcggtacaattttcatttttcagaccacaacaacagtctctgaagacaaagcactaattgctgaacgagcgccggcattaaaattttttcagcgtgccaacgggtcaaagtttgcgcattccttggaccgatacaacacggtaaagaaaaaggggaatttgatcagtgatcaatcattaaaaaatgccatcgaacaaatattaaccaacgctataatgttgaacatttatcaatggaagtgattagaaatctcgaacattcttggacatgatttcttgaaatttgatatattttttttctaacaattttttttgaactttaaatattcaaagaatcaaatcctcttagtctaaaaatttttttaaataaaaataataaatttacaatattctaagcacaatttattttatttttttgatattcgtattaagattttagttttatttatccaaactttggaattttagtacatatttcaaatatatttgggcatttttgtaatgaaatttcatccttaatgattaatgcgttaattatttcaatttgcattttgggatttcaaaattttacaggatgtttgtgccgaaatgcgtccgctgtcattgcgcagtgccgccgcgcgttccatgtcgccgctgctgcaccagcaacggcgcctgttcagcatcggcggcggcgcgagcggtggcacacatcgctcatgcggaagtgccagcggcatggccggcattggggaagaggacgtactcagctgggag

SEQ ID NO: 64026 - DNA, 65 bp, Heterodera glycines
atgggtttttttttactggatttttgtccagaaaatcgtcgttacggacacggctttttcaaaag

SEQ ID NO: 64027 - DNA, 1216 bp, Heterodera glycines
aatattgttgaaataaaacggaccgattttgaacggaatggctccttcccctaccatttgtgcaaaattgtcaatttggctgcgaaggcaagttacaaatgtggcaacattggccgtttgaaggatttggttgtcgcgttgaccgcctacaaaccgtcctcatcatcgcggtattttacacgaataataataattaataaatgttgttttcgtataattttaccacggctaattagggggcatacatatgaatgatccctctgacaattttctagcttttctaacccaagatttttaaaagaaataaatcctaaaattttcatgtaaaatctttaaaaattaatattttttattagaaacaacaaatttcgagacaatacatactacagcataatattctccttttttaacagagaaattttgggcgattcaatgatccgtgaaatgatggcaaacgtattgagaggcttcaaatgtttggtggacaagcaaataaaggcacaatacggacatgacattcaacacttgggcaaactgattgagcatatggaagctgtgattggcaaattgaaaaggtcgtcgaaagagaataaatttaatcagaaaatgattaatttgtttgttcagggatggacgttgtcaaaaggaacgtactgaattggaaacaacactgatcgcatgcattcagcgaagggacaaaattgtatgtttttaaaaatgtttttttttaatttttccatctcatattgtggggtttggatccatggcaactcgtacaatttttaatgggtgtgtccataactttttttaaaatcaaccaaattcttcaaacttgatatcattggaatgctctccaagtttacaagcgatcattaagcagaagctaagagattaagcatttcacgaaaaagttataatttcaagaatattaaaaatccacaaaagcaggctttttggcaatttataaattataacatttttgtgaaatgcttaatgatcacttgtaaacttggagagcattcaaatgatatcaagtttgaagaatttggttgactttaaaaaaagttatgactacacacattaaaaattgtacgagttgccctgacaccgaaaattccaggattatgtgcatagatttttaaacaacaaatttttggtctaaaattcaaagggatccctcaatgttttttcgtgtatcatatatgtacttaataaa

SEQ ID NO: 64028 - DNA, 261 bp, Heterodera glycines
atgaatgtgagaagaaaaaagtcgaaattgtccagggatggcggcaattgaaattcggctgtgcctgggacattgaagcacagaaatgcatgccgaatgaagaaacagtgaaagcattggcacggggagagaaggcaaagcagaggaagtgacggaaagtattttaaaaatgaaagcaaatgatttgatcgcttctgggattgatcgaagtgatgttgaccgaaacagtttgctacaaatgccaaatttaaatttttgaaa

SEQ ID NO: 64029 - DNA, 1108 bp, Heterodera glycines
atgatcagccaccgtttcgacttttatgtggacgaacacttcaaaactcgcaaatggacattggcatttattggaattcaaagcaaaaatggagagaatggcaccaaggaaatggaaattgtcaatttcggtcacaaagcattgccaattccgcaaattcaaatgccacgcaaagtcatcggattccaatggatcaacatctcgtaaattggccaatgtcaaaattttttgccaacatttccctttcagtttcatcgaccaaaatgccattgcttttctccgccattttcgtccacttttcaccgcctgtccaatcaatttgaccatcattacgcacaatgctcgcactttggagttcattttgcccaacatttggccattgttcgggaaaaacattcatggcatggatttgtccgccacatttttccgccatttgcgtaaatttgccccgtcgattctcaacgactgtccatcgcttcgctttgtcaatgcctattactatggtttcttcaccggattccctgccgatgacagtgccgcggcatcggatggacaagcgttggccaaatggcttttcactccacttcaaagcaatgtgccaaagatgctcgaatgcgggttggacatgggtgatgggaattggtcgtcgaatattgaacaattcaaagcggtgcattcatttatctttcatttttctttatcaattttcccatattttaggcatttgccaatgcttcttcccccgtcaattttattgtcgtcatgtgttttattcctacgtcttttgctgactccgttgtgccctttgatctgaccaacgaattgacacgcgaacaattggcattgaaaggaactaattttaacaactgttttctgctgatccgttctccaattgcgcgagatgcgaacaaatgggcagaatgggaaaaggaagcgattggatggaaatttattgatcaatgcaacaaaattgaaattcaaatttatgatgaggaacaaatcggagatgggtaagcgaatgcttttttcaaaaattcatatttattgcgtttctatttttaggcttctcgacgcaaatcccggcccaagtgatcagcagcagaagtga

SEQ ID NO: 64030 - DNA, 138 bp, Heterodera glycines; identical to SEQ ID NO: 50950

SEQ ID NO: 64031 - DNA, 309 bp, Heterodera glycines
atggaagtaaaatacggaaatgtggacaaaaacctgaaatatggaaaattaaaaactatcaatattcgaatgataccaattttgaagataactgacgaacaaaaaagttatggccattcccatttgaaattgtacgaaacgccattgtacgaactgctgtcgacccatttttggtgtcatgtgaaggaatggatggatgataaaatgatgaaaatgacggaaaaaagggacgaagcggaggggaaggggggacaaaggaaggaaaaggggcgacgaataatcgcctccggcactttcccgtggtgaata

SEQ ID NO: 64032 - DNA, 385 bp, Heterodera glycines
atgaattatgatcttttcactttttgtccaatgtattttatgtcttatgtaacttttgctaattgtattgatacccaatgatttacgaaaaaaacattcagttatcatccattgctgaacagaaaagccaaggcgtcattagcgatcattaaaaaatttgtgacaaattcgtccgccgtttcgccacacgaaggaatggcacaaccattggacaacgacggaaggccattcagtgaacgaattcggcaagaaaagcaggacaaagaagcgtactttaaacaattggcctcagcttggggtgacaaagcatgaaaaacaaattcgattatgtaaagaaaatccgagaaaaaaaaataccgaaaattaaacaaaaaatctcgctcga

SEQ ID NO: 64033 - DNA, 752 bp, Heterodera glycines
atgttgattgtttcaagtttcgaatttcgtatgttgttggcacgaaatacgaaattattaagcactggtaagaatgtgggaaggggttgagagaaaatattttttgaaaattggtagaaaaggaaaatttttttgaaaagaaattataatttgatcagttcttttacacgtaaagaacaagaaaaatatatagcctgggcccgtaccaaaagaacgaggtaagggttaacctaccctcagaaccaggggtggggcgcggagagaaaatcacgcggtcgcggatcgcgcggaaaattggaaaattattaggcgcaaatcgaaatttaatatacaaatggaaaaaagaattaaatttaaataaaatgaatttttatgagcaaaaaaagagggaattcattaaacgatttgatgaatgtaaaagtttatatggccaactcaaacagaaagaatttgtgaaggaattgggcatttctgaatttacatttataaaatggaaaatgaattattgccaaattacaataaacgtaataatgtttttttaattaattaatattcatttaatttttatatttatttgtttaaggcaaattgaaaattcatacctatgctgagaaattgaaatatgtgaaaagaagtgaggaaatgaaactaagaaaatctaacgatgagtgataagaaaattgccgaaaatttgggtgtcaaacgaaccagcttaatcggatggaagaagaagttcggcaccaaaacgtgaa

SEQ ID NO: 64034 - DNA, 373 bp, Heterodera glycines
atggccagaagaattctaaacccagatttttcgtatgggtttcgtcgacgaatttttttggttttcgccgggactggggttaattattcaatggtggcgttaaggattgcagtcgggattagatttttgtatatactttaattaacaaatcttgaatcttgtcccttaatttatgacggcaaagaattaccacgatccaattaaatgctattgtgttttagataattcaaatggattttgcaacggggccaacgaagaaattctgcgaggtctgtcggagctggattgacttatttgaggataaaattcaagtggaaaagttgatgagtaagccggagtgttttgaattaaaataattaattaatttttttaa

SEQ ID NO: 64035 - DNA, 759 bp, Heterodera glycines
atggccgcccgtgatcttcagtgtgttcaatgccaacaattcatgcataattggggcgtatgtgttgcctaaatcatcctagtaatttatttcgaaaaagtgataaataaatggggaaatacgtcactaaagtggtggtcgtacaaaaccggtcgaatttaaaagatttttaaacttttggaaagtttcgaaaaacaaaaaatctaatttaagttaactaattttgataaaccggttttgctggcaaaggtcaaacttattattagtgtgatatgcatttaacatggccaaggcataatatattttgataagtgaaatgaagtgcatattttttgttttttaaatggcaacaaacagcggcaatttgtggtggtgtgacaatgctaaactgatcaacaaaaataataataataataatttagagagaaggaaattggcgtggacaattaattactttattgggtaattacggtgtagagaatggtagaaatgctgatggtgtcttactccgtcatttttgagaataatttatgaaaaaagcggttttccggagcatttcaaggtcaacattgatcaaagtgatcacaaaaatgacattcaaaataattttttgaaaaatacaaatttaattaattatatgcctctggaaaagtgttcaaatgagggaaaatcaccatcaacaagcagtagtagtcagtgtattgtaatatcgagaattaagaagttttctatggcaaaaacgaaaaaaaagacattaaa

SEQ ID NO: 64036 - DNA, 388 bp, Heterodera glycines
atgccaaaacaaaacgaaatcgttttaaaatattcctttctggacttgacttggtttcttgatatcgaagctgttttctgcgctatttctaaaacggttataccaaaccccagatttttgaatccggttttcagaaaaaatgccttgtggtgaaaacaatatttcacatttcactccataactttgtgagttcggcacggatcgagaccgggataagaccattggaaagagcagctcgagctctacaagtaggtatggaaagaaaaaatagttatttctgggactttttcagaaatcagaattaattctccaatgtggcccaaattttaggcccccagccacagccccttgcttctcccagttttaagtcttggatttgtcaaataaa

SEQ ID NO: 64037 - DNA, 817 bp, Heterodera glycines
catttcaatcactgggactcaacccaacagcatttcaatcactgggactcaacccaccagcatttcaatcactgggactcaatccaccaacatttcaatcactgggactcaacccaacagcattccaatcactgggactaaacccaccagcatttcaatcactggtactcaacccaccagcatttcaatcactggcactcaattctccgcatttcaatcactgggactcaacccaccagcatttcaatcactgggactcaacccaccagcatttcaatcactgggactcaacccaccagcatttcaatcactgggactcaacccaccagcatttcaatcactgggactcaacccaacagcatttcaatcactgggactcagcccaccagcatttcaatcactgggactcaacccaacagcatttcaatcactgggactcaattctgcatttcaatcactggtactcaacccaccagcatttcaatcactggtactcaacccaccagcatttcaatcactggtactcaatccaccaacatttcaatcactggtactcaacccaacagcattacaatcactggtactaaacccaacagcattacaatcactggtactcaattctccagcatttcaatcactgggactcaatccaccatcattacaatcactggtactcaacccaccagcattacaatcactggtactcaacccaccatcattacaatcactggtactcaaaccaccatcattacaatcactggtactcaacccatcatcattacaatcgctgctactcacaccagcatttcaatcactg

SEQ ID NO: 64038 - DNA, 48 bp, Heterodera glycines
atgatgacacttttgtttgtcaaacctacacttgtgatggtggaaaat

SEQ ID NO: 64039 - DNA, 586 bp, Heterodera glycines
atggggtttttaaggtctctgatcacgaatcggacattcattttgaccaatttcgaatcccggacccgaattcgaacaaaaagtcgaaaattcaaaattttcaaaattcacttttatgattgcactggaaatcatttaaatgtatgtaatccataattatttaaacataattaattttctattgtttatataattaattcacttttagttgcgtcctcacgagtggctttgcgtgcgtgaaaatgccacacccgaggagatcaacgaaaactaccggaagtttgtccgtgtcgttcacccggacaaaaacaaccaatgcagcgacaaattgtttatggtttaaaaatagagtgccacgggaccgggaatttttgccaaaaccgggacttgccgggacctgagaagccgggaccgggaccgggacctcgattttttttcgggaccgggaccgcaagaaaaaccgggaaccgggaccaaccgggaaattttaaaaattcaaaaaaattttaaaaatttaaaaaaaaattcaaattttaatttatatcaagtgaaaataatacaaaattatttggttttttataataaa

SEQ ID NO: 64040 - DNA, 88 bp, Heterodera glycines
ttttaagccaatttattcacaaaatacattttttttttgttgccaaaatgagcacggaacgctattccttctctctcaccaccttcag

SEQ ID NO: 64041 - DNA, 1888 bp, Heterodera glycines
gaatgaatgatgatcagttcagtctggaggaagaagaaggaaaagaacagcaagaagacaggaaaactccgacaaaagatggtaatatacaaatattagaagacattttcagatataatttggtaacttaacgacaattttaaaaaattaattgaaaattgcttcaaatttcagtttcggacggtcatttgaaagcaattttggagagaattggtgaattggagaagcagcaacaacagcagacaaaaggcgagggcaatttaacgaaaatgaaatttttgggcttttctttggtaactgcgcaattgaacatttttcgaatcatttaattattgagaacattttgactggcaacagcagaattaatacaatcagaaaaatcttaaaactcgaccgattctgcgaaaaaatgctaaaagcataggaataattattaaatttattttattttcatttaaataaataaataattaattgttttctattttaagctgctgaggaacggttcttacaatcgcaaaatgatcagaagaaaattttggaaagaatcttcagtgaattggagaagcagcaacaacagcagacaaaaggcgaggacaaattaacgaaaatgaaaaaatatttaatcgaattaaatgtttccattttaaatttaaaaattaatccgatttttaagctactgcggggcaattgtcaaagattttggaaaaaattggtgaaatggaaaaacagaacgaaaacacggacaaaggcgagggaattttagcgaagaataaattatcacttattaaaaattcttttttttgaataagtttcttatgaattaagaatttcatttaaataaattataacatttttaatttttgaaaattaattttaggaactttggagcaattttcaaagatggaaaatgatcagaagaacattttggaaaaaatcagtgaaatggagaagcagacaaagaaaaaggtgaatgaatgaatggaagagaaaaataaaataaaaatattttacggtaaaaataatttttaatttatctaataaattattatataatattattaaaaaatatcgaattatttactttcaggggtttttaaaattccaagaaaattgttgggatgccttcgcttctcacgaggacatcgaaatcagtggtgacaaaagtctcattgtctatgtctatccttcgagaaaagatcatagtatttttaaaatttacatcaaaattcaatttctactaacaagacgcgtggcatgccgtcttcgcaaaatatccgattgtgctgaacaagtctttgtctgactttttttactacgaaatttcagttattaaaaaaaaacgaatttaagtaagcgaattttggtataaaaagtgaaatattttattatttatttcttctttattcagttgggtcatcaagatcggattcgctgttaaacagcagacaaaattggatgaaacaattcaacttgaaaagggcacttttgcatatgaaagcgatggcgatatttggattaacggagaaggaaagggaacaaatgcccaatattcctacggtgttggcgataccgttggaattggcgtcaattcggccactcgacagatcattttcaccaaaaatggacttcgtttgggttagcaaataataaataatataattttacgattttaaattacaatttggttatttgtctattttatgctaatttattttatgtttaaaataatcaaaaatcccttaactttttcacagatacttctgatttggttgatccatcttttgctgatggttcattttatccattcgttactttggtcacttctggtgaccaaattgaggcgaattttgggcccaatttcaaattcgatttggcgactctctga

SEQ ID NO: 64042 - DNA, 666 bp, Heterodera glycines
atggcaacatttaacggggagaaacgagagagtgtagcaaaggatgagaaaaagggaaagacaaaaaaggaagtgcaaatgaccgtcgcgaaagggtgggtgggaaacacggatggcattccgaggcctcaaacattttcggaagtcgaaaatcggaattccgaccccaaaaacatcggaagacggaaatcggaaatttttcaaaaaatataaaatatcataaaaaaatttctaaatattttaataggctaaattttttaattaggtgatttcaaaaatgtttttggttttttgaatatttttcttgaaaagtattcgatggttttatttaaaatttttttatgtcatttttcattattttagaaaatttttgggaaaaggagtgactatttacacgtttttaacggcgcgcttttttcaaaaactttttgggaagaaaagggtccagcggtgccgataggcgccgccgggaaatttttgaaaatttcagtgcaatttattgacagaaattgtaaaaacataattaatgggtcgaggaaaggaaaatataaaattattttgtgatttaaatgaaaaagtaatttctgattttcatattttcccaaaaatatggatataaaatcgcgaaatatggacataaaatggcaaaaatatgttttaaataaa

SEQ ID NO: 64043 - DNA, 531 bp, Heterodera glycines
atgttcggcggattttgcggaatatttgttggaccgtttaaaaggtatgaccatttgtaaagcttgaaaagagaaatagatgcgtaaagttaatatcacaaattctcagaaaaattacgttatcgccgacggtggaaacacgaaatccttcgttatgcaatgctacaaattgtcttgctagtgcttttttcgttgaaacatttgtcctaatgaccacgacaataatcacagcaataataatcaccacaatagctctaaatgataaacatggatgtaatggatgtaaaaaggaatttcggtaactattaacatacattataagtagagaccggaaatttcaaatttgcggatcccgctgcgggactggaactcaaaattttttgcgggacgggatcccgcgggattaatcccgcaaatcccgcatttaaaatttgcgggatcccgtgcgggattgcgggattttagaaaattcgaaaaaatttcaattaaattcaaaaaatttccaaaaatcaaaaaatgctgaaaaataaa

SEQ ID NO: 64044 - DNA, 415 bp, Heterodera glycines
ggtgcccatttcggctcgcccttttaccattcgtccgccgctgctcagaattcgtccgccaataacactccgccccaatcgcaacgtgtgccaaccatcgcagtacagcaggtaaaagcgactcgaaaaagccaaatcagcagcaaagtgccaaaacaaacgaaagcaccccgagtctatgctttttggaccaatctcccattttttgggtaattctcatattcattttggagactatttcttggcattttgaggacaaagtccgattttcgagggcaaatctctgtgtttgaaaaagccagttcatttatttgttgatcagttgctgatcactcaacttttcagccgagtttgccgtttggacctggcgccaattatgcaaataatggcattcccggggatgatgagcaaatga

SEQ ID NO: 64045 - DNA, 332 bp, Heterodera glycines
gaaatgctcagcagcggcgacccacagtacgctcactacggtgggcctttacacgtcaaagtggagacgactgctccgcctgccgtcgcttatcagcgcgttgctggcgttctcgccgtccttgctgaactgctgcaaccagtgaatgaaaaaggatggcaatgagaaagtacattcagattaaggtcaaagacacacacattgagggcatcacaacggagcccaacccgaatttgaacgcattggaagggggcggggacagcgacgggggaggcgactcgaacggagccgaaggcaatggcgaagaagccggaggaccaagtaaagcttga

SEQ ID NO: 64046 - DNA, 212 bp, Heterodera glycines
taattaaatccattccttcgggggaccgtgccgggtgccgcggggtaagcagtgctggttcgtttcatcacggcaccgaaccttttggctagtcagcaatcgttgcttaacttgccagatcggacgggtgcgcatgattccactgttccaagcaccccaccaaaagcaaaacgatataaccaaaatataaggaaaaattttttaaaaatttt

SEQ ID NO: 64047 - DNA, 411 bp, Heterodera glycines
atgaaaatgaataagcgaattttgaagaaaatgtgagaatttattcgtttaagaatttgtgaattcatttttaagaacacttcaatatattttgacaatttcagttggatttgcaacgacattttgatggacattttccctcattttgaccgcgcccaactggcctcaaaatggcacttctttcgcctcgtttcgatgttttggtggacaaacatttcgatggcaaaagcgaattgccaatttggggaccaatcagaattgaaaggatgggaacagaagcaaaactatgtgtcgttaaattgagcaatggcaattctgtgccatttccattgcctgaccgtccgttgcccgacaaaattcgctttaattaccttcagattaagtaactgaaattcaaaaacaattaataaa

SEQ ID NO: 64048 - DNA, 721 bp, Heterodera glycines
ttaattgcaaaaacggcgactgaacttacggaaattgtgacagagaaaatggacagaatttatgtcaaattggagcaacagcaggtgaaaaatgatttaaattcttttaaatttaaattccaatttttccgcaggcgatggccaaattggcaaatgcaaaagaaattcaggtactaattatgtagtaattaagtcacaattttttggaggcattaataaaaaaatgtctttttttcaaaaatttacaaaaatgaaatttcgaatttaaaaattatttaattgcttacaactttaaactctttaatgacaaagtcataaattttgcatattttcagtcgcttctcagcgcaacgatcgacgaaaaaatggccaaacatgaggtggtgaataaatctttttaggggtcaaattggacggggagtctataagaagtgggataatatttataattggaacaattgcaaatttcatccccaaattttcagtcacttctaatcgcaactgatcaaagaattgtccattttttgcttttgccatttcttctgatcgccgccgtttgccttacacttttgctgatcaaagcaattgtcgaccaatttttgaagcagaaatttgaacaaaacaacgacacaacggatggggaagaggaaaagcggactgaagagaaggaggaaacggaagaaaatggaaaaggaggagagaaaggaagacgaggggagga

SEQ ID NO: 64049 - DNA, 366 bp, Heterodera glycines
atggcacaaaataaccaaataatcttacagattgttgttgttgttgtgccaatagcattggatgcagaagttttgctggcgctggcactcgctgccgcccgtgcggcggcggaaatagtcgcggtaccactcaccgagtgcttgacgctcgctgatgttgaactttacgctactgatgaccgaggaactattgactctgcaactttggacaaatcaaaagactataaccgactaaacgtctaggcgccgaaaaaccacgatattgcaccgagaaagagtgacgtttgcgcgatcttcaagctctgagggccactaccatgtaaaagttgtggtcatgaaaccgacattggaatttttgaaagaaaa

SEQ ID NO: 64050 - DNA, 1507 bp, Heterodera glycines
atgaaaaaaattgacgaaattgcaaataatttgagattacggacaaaaagggcagctttccaggtggcctgtcacagtatttctgcccaaaatgctgtaatttttttttaaatctttaagtttatcatttttttttcattttcagtctccaaagccccgttcagcagacaggaaagttcgccgtcagtcggtccgtcgcccgcccacaaatgtacggcgccagcgcgcagccaacatcagttcaaaactggtaaatttccacaaaatgatttttcataaaatttaaattttttaaattttttttgttttttcttagtttgatgcttccgacatggaagacgaaaattttaacaaaaaggtgggggtgaaaatacgggtaaattagggtcaaaaaagctacttttttcagcaacaacagaacgatccgataacaacagcaggagtcagtccgataatgattttttaataaaaaattaaagggtttttttttgggtggtatgaactgaaattttagattttaattctccctccctaatttaggaagaacgaagtgagcttgaccaattgtttttggaagtgcaacggacagttttcggcattggagcaaaatccaacttcaaagaggacgcggtggtgcgacgagccgacaacacattggtcaatgattgggaaaaacacgaggggggggggtctgaaaaagatattttttcgtgtgcttttccaaagacaaataaaagttttttgttgtttttagcaacgtcctctcccgccgcttttccacaatgatgatgaagcccaaaaggctgtggtcggcaagcgattggtcactgacaatgcggccaaaagcggcacctcggccgcgaaccccaaaagggtcaaaacgacgttggacgaccttttgatggatgtggaaatgagagcagagcaggacggaacgcaaacgacgcagcaaattgcgagcgaccaaactgaccaacagcagcaaaattacacggtaagtaattggttcgcctcaaaaaatgaggggttttaaactcaagggggagggggtcacaaaaatattatggtattataattttgcgattgttaagagaatttttttgagggagtgaatgatcttaaaattaagtgtttttttttcagttggtcaatgtgtgttcaacatcaacaacaaaactgtgtgaagtgcaggacggagtgcaaacgacgcaacaaattgtgggcgacaaaacggatcaacagcagcaacagcagcaaaataacatggtgatcgaaaagccggtgagtaatttattcacgcaaaaaaggaggggtgtctaatgaccaagagtctcaatggagggggaggggggttagaaaaaattcattataattttaaatttttgtgattgttcaggtggtgcatgcggtcattgatggcgacgacgaagattctgaaaatgtgccgagcttaatctcaattggcactcaaacctggccaaaaaaaaagataagttgcagtttttga

SEQ ID NO: 64051 - DNA, 1348 bp, Heterodera glycines
atggacagcgagctatcttcgaaagtgcaacaacaggcacaaatgtgcagatttcttcgctcccatgttagcgatttgaaaaatctgtcattaaactattctgcacgcctagaattgttggaaaaatgggcaggaaatgaagtgagaatttaaataatagttatttaattatcattataatttaatttaaaaatctataattttagcaatattcgccttatccatcaaatacgcattctccagtgtcgccggcagttctgcacgaaacactggagattattcagcaacagtccaggcaacatgaacaactggcgaacagagtccttgagaaaggcaacaccgaacttgctgttgtacaagtggcactatcgtcattgaaacgagcaatgacaccatcgctgaatactgatcagacatcatcatcatcatcatcagtaaaaaggagaagattgatgtcggaggagcaaaatggtaatgttactaatcatttttttgagtaaaagataattttgcctttatagaagcggcttctttggcgatggccgcctttacacatctgcaaaatcacattgcagaaaaatgtcaaattttgcaaagccgtgtccaaaagctggaggatggtggagctgaaaggatggaagtgcaagtcgacaaaatgcgccgagaaatggagcaaaaccttcgacaagaaatgatggaacgtgaacaacgccttgatgaaaaatggagcgttttgctgttgaaggagcgtgagaagacgcaacagatcgccacacaggcttccgaggtgatcggtaatttgcttgaaaatggtgaaaaagaagggaaggaaaacaatcaaaaggggaaaaagctgatcgtcagtgaacggtgtctgtggtgtttagggaatgaaaatatggtgacatttggggctaaggagtgtttacatgttttttcttgtccaaagtgctctatcccaatcattgcaagcgatgaacccaagtgcttgatttgttttcaaaatatttccgaattggaatatatgaaaaattgaaagagtagaaattggatcaaaaagaaaagaatttacgatcattttttcgctttttctactcttttgcctttgcatttaatgtctcttacatttttgttgcaatttaatacaaattttgcatatttaaactttgactctgacactgtttgataataagaatacagtaagttctgattgataatagtactgtaatttatttatactcataatatttcatttaattctcctgacattttgttataatttatttgatcctattctacgaatttttttcatatttaaacttggcctctaatattgtttgataataaa

SEQ ID NO: 64052 - DNA, 975 bp, Heterodera glycines
atgaaaatatcaatcatcgacctagtattctttggaatgctttttgcatttcttggaaatggtgcatctacttttcccttgaattcggctgtgatggaggtcgagaaggacgaagcggacaattcgactacggtggaggccgaagacaattcgactacggcggatgatgtgacagaggatgcggacaattcgactacggtggaggccgaagacaattcgactacggcggatgatgtgacagaggatgcggacaattcgactacggtggaggttgtgacagaggatgcggacaattcgactacggtggaggctgtgacagaggatgcggacaattcgactacggcggatgatgtgacagaggatgcggacagttcgactactttggaggatgtgacagaggatgcggacaattcgactacggtggaggctgtgacagaagatgcggacaattcgactacggcgaaggatgtgacagaggactcggacaattcgactacggtggagactgtgacagaggatgcggacaattcgactacggcggaggatgtgacagaggatgcggacaattcgactacggcggtgcttgattgtgcgacggagaatgcggacaattcgactaaggaggaaatccaagaggccacgatggaggctaagacagaggacgcggataattcgactacggttgaaattgggaacccagatgacgagtgataattgtcattttcttgatactttgacgagaattttgaatttgtgataaactgtggaaattaacagttacaaatcccttatttgtcagttaatttgttttttttttgaaaatctttggcctaaattacggattcttacggcaatttttttaattatggaaatctgcattccgtcattatggaggtccaaaatttgtgattttttgaaagtcaattttgcgaaagggtccggtcatgtaaactctgatacatcgactaattaaaa

SEQ ID NO: 64053 - DNA, 1047 bp, Heterodera glycines
atggcatcttccggcattgatataccgccaccaccacctccgccagaacttgcaccgccggaggagaaaaagatgatgttgcaggtaattcaggaactgttacaaaaatatttaatattttttgtattttttgacaattttcttgtatctctttaccagcctgataacactggtacgacggaccaagaaaatgttcaacaacaacaatcagttgaaccgtcgatgccatgccttcacgttgtaagcgatgaaacaatcattgacgctgatgtcccgatggaaattgatgatgaggacgacgacgacaatgatgatgatgatgaagacggcgatggcgtcaacgacgatgatgctgatcgtccatacagtccttcacaggtagtgggcgattattatcttcaattgataattttcagaggggtaccttgataattgagctatttgtcgtaatttgtaccaaattcaaaatactagttcaccaaaatttatttttgggttcagctttgtggcttggtaaaacaagcactttccctgttataatattcaacatttacagtaaatcctgattgtaaaatttgatttctgtagttttatgcacaggcgattccaccgccgccgccaccgttgcaattgaaaacgaataatgaggagacaaacagcaaagacgaataccttgatgaggaggaggaggatgagattacggaagaagaatgtgtagaggagaaattggacgagacaaagcaaaaagtagttgggcataggcaaaagaaatggacaaaagtgaaaagggaagaaaatgagagtaaaaaggtggaacaacaaaaattgatgatggaagaaggcaaaaatggagatgagcatggccaggaaaaggaaaaagaagacgaaggccaggaaaatgaaggcgcagaagaagacaaagtggagcagcaacgggaacagcaaaggcaaaattcaccggtgccaagcgaagcgacgagaaaggcggatgaggagaagggaattcagcaggtccaaaaccatcatcatcatcaataccaacagtag

SEQ ID NO: 64054 - DNA, 978 bp, Heterodera glycines
atggcattttttaatccaatcccctccccctcccaagatgccgtctccaaactgctcaaatgcaccgcccttttcccttgtgagcattcgaatcgggtgccggagggcaagtcgtcccaccagctgttgctgtgcggcattttccgtggcggcatcgatgtgctgtgccgtgtccgcctggtcatggacccatccgaccagacggtgtccatgaacatggttgtcaggtagaaattaagccataattcatatcctccttccctaatgggccagacgatttttaagaattttttttgttgttgttaaaaatgtaggaaatttgaaaaaacattttgaaaaggaagggcaattaaatttttaccaaaaattgtttttaggaaatataaattatgggaatttattttgtaatcaaaaaataatcattttttcatgttcagatcaatggacgaaacagtcagtcaaatgatcgcaaacattgtcagctgaggaacggcaaaaaacattcatctgttgttacatcaatgataatatttctaaatttacactatttgattgatggctggattttatttatttactcgttctttgttttattgtgtccacaaaaataataaaaagtctttcggtccaatttaattaaactcaatacttacaccaatcgacttgtctcatcgagatggatcgaaagatatgtaatttatatgcaacttcaatattggtggtattctttttatttcttttttttaaacattatccccattagaaattttgaagattacattccttgcaaatttgaacatttttggtacgaatctgtaaaatcacattggctcaaaccaataaatttggtcattttttgagtaaaatctcaaatctgaattttttcatgaaaaaaatttgaaaaaaataattatttttttcagaacccgataccctgacccggttcgaaatcttggaccaggacccggcaaaccctga

SEQ ID NO: 64055 - DNA, 1206 bp, Heterodera glycines
tgtgccaggctatcgagcgctacatgaagcaggcgattgtggacaaaacggcttcggtgtcctccgccgctttggtctcatcgctccatttgatgcgcaaaagccccgaggtttgcgcacattcattaaacatttcttattatgtttgcaaatttcatctacctatattttcttacttttttattgaaatttttttattttgcattatctcccccccaagaaattaaaaaaaattactaacttagaaatttttcaagaaagaaatcatagaatttttttcataataaaaaattttttaataaatcttttcgagaaattttcagcgattttttggaaaaattttttgaaagatcttacgaattcaccataaaatatatttaaaaaaaaattcttagaattttcttataaaaaaactttctaagattttttcttgagaagtttctaagttagtaaatttaaaaaaaaaattctctggggaaacgagctgctcctattttttacaccatgaaaagtgccgtgaaaattgattttttttttttttttgagattttatttgtctttatttttcatctttattttttcatggcttttcccccttttttcggtcgtccgccgttgggccaacgaagtgcaggaggcggtgtccgccgaaaatcacatggtccaattccacgccctttctttgctcgttcaaatccgtgccaacgaccgactggccattctgaagatggtccaaaagttcaggtaaaagtcgtgtccgggtagtttgggtccgattttggacataggcgcaaatgtggggaaaatagtaatttttggcgaaaacggctaaaaattttgcaaaacacaaccccctaattcgggattcaaaaaaccaaaaatacatccctaaaaatcgaattttggcttcagccccccccccgaaatctttgatctattcgaatttaaattatatatatatatatattttgtgtcctttgccagcaagtccggactgcgctccccgctggcgttgtgccaacttgtccgtgtggcggcccgcctcatcgcggccgaggcggaggagcacgcgctgggcgtggacggcggcggcagcgccgagtcgcgctccgccttcaccttcatcgagagttgcctgcgcaacaaacacgagatggtcgtctacgaggccgcctctgccattgtgcggttgccgcgcattagcag

SEQ ID NO: 64056 - DNA, 1770 bp, Heterodera glycines
cgtcgtgacaaaaaagacgatgaatcggccgccgggaacccttacgaccacttggacaaggccactgttgtccaagaggttttgttttacccaaatatttgcgcttataattggtcaagaccgtgtaaatgacgacatactttttggagaccatcggcaaatgggtccaagggtctttggtaattttctgttttgagacgccccttgaaattttcaaataaaacgtcatttctaagattatttctggcgctggtcacgaatatgacatttgttttgtaaaattccgagctccaaaccagaattcgaacaaaaactcaaatcataaattacaaggaaaacatattttggtaatagttcaatttgtccccccattttttgaattttttttagattttaagtcaaaaacacgttttttaataggttttcggcatagccgatcacgaaaagtccggctctttttgctgattaagccatgcctattgtgatttaaaagcgtgaatttgcaacgaattttttttaggcatatgcaagcgcaaatgcacggagttcgaatgtttgaacacaatttgttgggggcgttgaaaatggactaaaatttctcaaacttttgccaaatttatcagttaacgagtctgaatgttaaaacttttactggattttatggttatggttcgccactccatccttaagccgaatcctgcttatttgttagtccctggttcacggaaaattcctaacttgttaattatcatgcaaaatgtgtggcaaaaaaatatgcaaattccctcatttgacgacgacaatacagaaaatgcccccattttcagacgcgtgccttcaacgagacgccggtgaatgcacgcaaatgtcggcccattctgtgcaaattgctgtacttgctgcagcacggggagaccattggcaagacggaggccaccgacacattttttgccatcaccaaactgtggcaggccaaggacatgacgctgcgcatgttggtctacttgtccatcaaagagttgtgccaaatgtccagcgatgtgatcattgtgaccagcaggtttcctgttcattgtttcaatattttatttcttttcatttacacaacaaatctttctgaaaaattgacattttttttacaaatttttcaaaactccgggcgggcttttgatttacaaaatttcaacagcttggtacttttccgttttgggcctatacctcaaaatttcaaaaattcttaacaaagggcggctgaagtgacaatttttataccatccctattgcattaattagcgtagcgataaaggacctcctttttcggtttggtgcataaattattggatgtgaaagttatgccaaaacggaacatttttccgtaaagtttacaattgaatttgatgatgaccgtgtccagatacctatttgcgcttttgtcaaaaatcaggttcaaatctgagttttttctattcctgatcgcctaaacagcattatataaatgatagaaattgattgtatccaataatttgataataataaaatttttgaaaaaatcgtcaattattcaaacaaacaaaattaatgctactataaaccataagacgagattttaatgccgataggatatttgggatttaaaaaatacgcgcaaatgtcccgtacgcaaatgggggatagccgaagatgaccccctttcccctttagactgactctggacatgaccggccgtgaggacgtgtaccgagcgcccgcaatccgcgcgctttgccgtat

SEQ ID NO: 64057 - DNA, 354 bp, Heterodera glycines
atgccaaattgggggacgattcagtggaaggataaaaagacggacaaattgagcaaagtcaactttatgcttgacggagattccattgggtgagtggcatcagcttttgctttttaacaatcaaatttaaattgcacttcattcaggccattgtcgccaccaaagacggaccaaatgaatgaaaaaagtcaaccggaaatgaaccccgggctcagcagacagaggaaaaaagtgaatgaattgttgagaaatgaaaaatgatcgatcattatgaatggaaattgatctgatgattgcttctttcgtttgaaaatagagttcgaagttgtatgcactaaaaaatccaaatatgca

SEQ ID NO: 64058 - DNA, 49 bp, Heterodera glycines; identical to SEQ ID NO: 51181

SEQ ID NO: 64059 - DNA, 661 bp, Heterodera glycines
gttttcggggcagtccccccgaaccgatgcgcccagatttatggggagaccgaatccttcgggagtagcttccctatagcctgtactttaattctgcgttggatttttgctccccataattgtttgagtaccccaaacggacacttgaaaaaatcgatttttttgttttcggggcagtccccccgaaccgatgcgcccagatttatggggagaccgaatccttcgggaatagcttccctatagcctgtactttaattctgcgttggatttttgctccccataattgtttgagtaccccaaacggacacttgaaaaaatcgatttttttgttttcggggcagtccccccgaaccgatgcgcccagatttatggggagaccgaatccttcgggagtagcttccctatagcctgtactttaattctgcgttggatttttgctccccataaatgtttgagtaccccaaacggacacttgaaaaaatcgatttttttgttttcggggcagtccccccgaaccgatgcgcccagatttatggggagaccgaatccttccggaatagcttccctatagcctgtactttaattctgcgttggatttttgctccccataattgtttgagtaccccaaacggacacttgaaaaaatcgattttttttgttt

SEQ ID NO: 64060 - DNA, 475 bp, Heterodera glycines
cgacaaccacaacaacggaggaaccgacaaccacaacaacggaggaaccgacaaccacaacaacggaggaaccgacaaccacaacaacggaggaaccgacaaccacaacaacggaggaaccgacaaccacaacaacggaggaaccgacaaccacaacaacggaggaaccgacaaccacaacaacggaggaaccgacaaccacaacaacggaggaaccgacaaccacaacaacggaggaaccgacaaccacaacaacggaggaaccgacaaccacaacaacggaggaaccgacaaccacaacaacggaggaaccgacaaccacaacaacggaggaaccgacaacctctacaacggaggaaccgacaaccacaacaacggaggaaccgacaaccacaacaacggaggaaccgacaatcacaacaacggaggaaccgacaaccacaacaacggaggaaccgacaaccacaacaacgga

SEQ ID NO: 64061 - DNA, 243 bp, Heterodera glycines
atgccaacaaataatatgtttttcatcggtttattttcttttttcattatgctgctaacaatatttgatgcccatggtaatttgtttatattttagtttttaaaaataaatattatttaattccaatttatttctattttagttagaagtgatcatgttggcacaaatgtatggcaaaaagatgacccatctgccgatcaaatgccaataaagaagcatcagaaacacaatgaacgaaaacaa

SEQ ID NO: 64062 - DNA, 463 bp, Heterodera glycines
gcaaaagccgcctgtttcacgcaacagcccggctgacccgacctttagagccaattcttttcccgaagttacgaatctaatttgccgacttcccttacctacattattctatcgactagaggctgttcaccttggagacctgctgcggatatcggtacgatcaggcaggagattcaaatagcttccctcgcattttcaagggccgtgtggagcgcacgagacaccacaggaaccgcggtgctttacgggcgcaacatccctatctcaggctgagccacttccaggcacgcacaccctaaaccagaaaagagaactctggctcggactccacacgacgtctgcgagttcatttgcgttaccgcgcaaaacagctcttgcgaaccgtcatttccctagcctggcgtgggaatgttaacccacttccctttcggcaaccggatggaccaactgcgcaagcacagaa

SEQ ID NO: 64063 - DNA, 397 bp, Heterodera glycines
atgcgaaaattagaaatttgtagtcgttctgtgccaaaaaatgacattaccatttttgcgtcaaatcttcaaaaaataatggtacaattagggtccgggggtgtcaattaggcgtcgccggtaaaatctaaaaatttgccccttatttaaaccatctgcccttagattattccattcggtgctagtgcgtttcctaaaaagtgccacccatgcgcgtttcctaaaagtgctattttaatagaatacctataaataaatgcaaatacaatttaattatttatttaaaaattttcattatagcatgaaataatccaacaaatgatgaatttttcattgttcattaaaattatcaccaaaaatatgcactgtccagcataaaatattttaaatataaaaa

SEQ ID NO: 64064 - DNA, 6770 bp, Heterodera glycines
aaaagtggatgagttcatccagggtggcagtgttgtcatacacccggtccctgccactgcggttgaggacagactgttctgtttccgctgcaacgtcccatcaataattgctgatgaagactccccgaggggaaggataatggcagtcctactgggccgtccagccatggagggcattcgtatggagaaggaaagcgttgatgactcaacggattcgtggatggaagaagagggaccgctccaccctgcaattcttgctctcaactcgcggcagagagtgactgcacgcctaatgttgggaggaggtctggtgcaacaacaggcgccgccaggcaccggcaaaaccaaagtcgctgcggcgatcattaaggcaatgatggactcaaatcccgggttccggattgtggtgatggcttgtgccaacattccagttgcaaagctggtacaagaggcggaaggcacatgtgctgaaaaggatttggatggagcacgagcaattgccttattttccggttttgccagatgcaaatacacggatcaaataaaagatgttcaacggcatacgctgccgaacaaagtaaactctgaggagttcgtcaagcagttatcgcccaatgtacagaagcaagtgaaggagtaccttgctcattgtgagaagaacccgcgcttggcgcctgagagagcgattggaaaagtattcaactcatgtatggcaccgaaaatagtcttctcaacagctgccatggctgcgaatttacttcatggtgaaggaaacatcactgatgcagacgttttgctcttgatgaaagcactcaagctcagtgggcagtggtggttcacttggttgcgcggatgcccaagctcaaggcattgcttttgacgggcgatcgtcatcagctcggagtgcatctgcaagaactgcctgacatcttccactcaggatatggattggaaagcgtcatcctacaagccgaggcttcggttgggacgaactacactttcctcacaaagatgtacagaagccatccatttttggcaaagctcatcagctatgcctcatatgagttgcacaatgaacaactcattccagcaagaagtgctgaagaacgctcactcattacgggctcaggctttcttatgccagttcaagaatgtcctgtgggacttatcaatgctttttcatcattccgtgtggacccaaaaagcgactcgctcacagatgaccatcaaacagaagtggcatcgttcttggtacaagcacttttggaacattttggcaacgctttttcgtccagaattattgttctgtgtatgtacacgtaccaaacttcggaaattgaacgaaagctgaagcactgcggtgttcgtgcactcacagttgatgcctatcaggcacaggagtgcgacattcccaaagttatttttgatcagtcccaccctgaagggcacacaaatggcacatttcggtcaatcagtaccatccatttttctgatcaaatggtgcccattctcttttgatcagtgccatttccccatggcacctattatctgttgatcagtgccattccccaattttttttttgatcattaggcacacattatcttttgatcagtgccattccccaatttttctttgatcattaggcacacattctcctttgatcagtgccattctccttttaatcaattggcacacatttttttctgatcaatgcctttccccttttgatcaattggcacatattatcttttgatcatgccattcccccatttctttttgatcatttggcacacactctcttttgatcagtgccattccctcatttctttttgatcatttggcacacattctcttttgatcagtgccattccctcatttcttattgatcatttggcacacattctcttttgatcatgccattccctcatttcttattgatcatttggcacacattctcttttgatcatgccattcccccatttctttttgatcattaggcacacattctcttttgatcagtgccattccctcatttctttttgatcatttggcacacattctcttttgatcagtgccattcccccatttcttttgatcagttggcacacattatcttttgatcactgccaccctaattttcgtttgattaaatttgtccatttattttatcagcctccttttcggccatttactttgatcagtcccaccctgaggggttcatttattgcttcacatttacatgttatatttgaatgtggccactttatactttatgttgatttattaatgttaatatatttactgaatttcatatcttgattttatttcacaaattaaaaaaaaatagcaataataatcttaaataataattaaatgcacataaataaaattaaattaaaattaaatattgatactcaattaaatttaactcacgcattcgtcacatctttatacaaattaattcgaatcgcatattcgaatatgtaggggtcccattcagtatgaatccatgcatttttcatagatggctcaaatatgcccttcttacccgtgccaattatcatgcatgagtcttcgctcatgcttgcctcatctatttattcattcatgccatgtgctttcataggatcatgcattcataaactattcatctattatctaaattagcgtatctcatttagatgcgaaccaaaaatctgccttctaagcattcaaatcacgaagtttctgaccaaatagacgacaacgcattaacgagtgatgctaggtcatcaagtgttgagagccctgcggggaccatttatgaatcattcgaggcgttgagcattgatagctcaaaagtagcttcaagccccgaggggtacactaatgttggggctgaaatcgttattgaagggactgaatccaatgaaaaccctgaggggtccggatatgatgaagtgagaaacgagggtagtagcgttacgtttaaagcgatggaagtgacccttgaccaggtcgatgcagagggttttgcgaataatggctttgatgatgaggaacctgaagcatgtcctccggctaaagatgtgagcaaatcatcgcttctttatttggtttcgcaagccggagatggctacgtaattgcttgcaagaagtcgcctaagtcgaagccaaattggccattcttcatgaacatcgaagacaagctgattgagtcggccccaggctttcagcgtaaacttgaagttggtgactttgtggcggtttcatcatttgagtggaaccagaagctgcgatatttggctcaacatcgccaagatgccacacagtcctgcaaattttggttcaacgaaaacacgcaactgttgccaaagcaggctgatgacactggcgtggttcaactcatgtacatgaacatcggacgcaagcagatcaccggggtcgtttactggataaagaggaagatccaaagcgttccatccagcttcgttcacgcaaacatcgcgtgctgtggtctagcggtttcggcacgcataaatcggcgtcatcttgatggcatcaatccggaagacctcaagctgggctcgcttgtgacggtggttgttgccaacattccacaggactcacttgtatcaatgggatacattctgcctgatgcttcaccgtacaaattgggaacggaaagaagagccgaaacaccagaattcttcggtgcaattgcgtctgttcgtcctcatctattggagtggccaaatctgaatgcaaacatgacgcccaaggtttatccatgctccgcggagcttactaaacatcatgttgtggcgatggagcatgttgttggagcagctctccagattgagatggagcgagaggttgacatgatgattgaagcatgctttgaaggaagggctcggaagttcgatggtgctgattgtctgattgtctttggttcgagatcgaagaaagaagtgaatgagttggccaaggtctgggagccggagtcccaagtgaaggtcttcaaagaattggatgagaagcattttgctctgggagtggtcaaggatgttgaggtgctccacgcagagtacgaaaagttggaactccacatcgtcatcttcttgaacaacatccaggaaaggaagaatgtcgacatcgcaagaaaagtggatgagttcatccagggtggcagtgttgtaatacacccggtccctgccactgcggttgaggacagactgttctgtttccgctgcaacgtcccatcaataattgctgatgaagactccccgaggggaaggataatggcagttctgctcggccgtccagccatggaaggcattcgaatggagaagcaaagcgttgacgactcaacggattcgtggatggaagaagaaggaccgctccaccctgcaattcttgctctcaactcgcggcagagagtgactgcacgcctaatgttgggaggaggtctggtgcaacaacaggcgccgccaggcaccggcaaaaccaaagtcgctgcggcgatcattaaggcaatgatggactccaatcccgggttccggattgtggtgatggcttgtgccaacattccagtcgcaaagctggtacaagaagcggaaggaacgtgtgctggaaatgatttggatggagcacgagcaattgccttattttccggttttgccagatgcaaatacacggatcaaataaaagatgttcaacggcatacgctgccgaacaaagtaaactctgaggagttcgtcaagcagttatcgcccaatgtacagaagcaagtgaaggagtaccttgctcattgtgagaagaacccgcgcttggcgcctgagagagcgattggaaaagtattcaactcatgtatggcaccgaaaatagtcttctcaacagctgccatggctgcgaatttacttcatggtgaaggaaacatcactgatgctgacgttttgctctttgatgaaagcactcaagctcagtgggcagtggtggttcacttggttgcgcggatgcccaagctcaaggcattgcttttgacgggcgatcgtcatcagctcggagtgcatcttcaagaactacctgacatcttccactcaggatatggattggaaagcgtcatccttcaagcagaggcttcgatagggacgaactatacattcctcacaaagatgtacagaagccatccatttttggcaaagctcatcagctatgcctcatatgaattgcacaatgagcaactcattccagcaagaagcgctgaagaacgctcactcatcacgggctcagattttcttctgccggttcaagaatgtcctgtgggactaattaatgctttctcatcatttcgtgtggacccaaaaagcgattcgctcacagatgaccatcaaacagaagtggcatcgttcttggtacaagcacttttggaacattttggcaacgctttttcgtccagaattattgttctgtgtatgtacacgtaccaaacttcggaaattgaacgaaagctgaagcactgcggtgttcgtgcactcacagttgatgcctatcaggcacaggagtgcgacattcccaaagttatttttgatcagtcccaccctgaagggcacacaaatggcacatttcggtcaatcagtaccatccatttttctgatcaaatggtgcccattctcttttgatcagtgccatttccccatggcacctattatctgttgatcagtgccattccctcatttcttattgatcatttggcacacattctcttttgatcatgccattccctcatttcttattgatcatttggcacacattctcttttgatcatgccattcccccatttctttttgatcattaggcacacattctcttttgatcagtgccattccctcatttctttttgatcatttggcacacattctcttttgatcagtgccattcccccatttcttttgatcagttggcacacattatcttttgatcactgccaccctaattttcgtttgattaaatttgtccatttattttatcagcctccttttcggccatttactttgatcagtcccaccctgaggggttcatttattgcttcacatttacatgttatatttgaatgtggccactttatactttatgttgatttattaatgttaatatatttactgaatttcatatcttgattttatttcacaaattaaaaaaaaatagcaataataatcttaaataataattaaatgcacataaataaaataaaattaaaattaaatattgatactcaattaaatttaactcacgcattcgtcacatctttatacaaattaattcgaatcgcatattcgaatatgtaggggtcccattcagtatgaatccatgcatttttcatagatggctcaaatatgcccttcttacccgtgccaattatcatgcatgagtcttcgctcatgcttgcctcatctatgtattcattcatgccatgtgctttcataggatcatgcattcataaactattcatctattatctaaattagcgtatctcatttagatgcgaaccaaaaatctgccttctaagcattcaaatcacgaagtttctgaccaaatagacgacaacgcattaacgagtgatgctaggtcatcaagtgttgagagccctgcggggaccatttatgaatcattcgaggcgttgagcattgatagctcaaaagtagcttcaagccccgaggggtatactaatgttggggctgaaatcgttattgaagggactgaatccaatgaaaaccctgaggggtcctga

SEQ ID NO: 64065 - DNA, 362 bp, Heterodera glycines
atgagcgaagactcatgcatgataattggcacgggtaagaagggcatatttgagccatctatgaaaaatgcatggattcatactgaatgggacccctacatattcgaatatgcgattcgaattaatttgtataaagatgtgacgaatgcgtgagttaaatttaattgagtatcaatatttaattttaatttaattttatttatgtgcatttaattattatttaagattattattgctatttttttttaatttgtgaaataaaatcaagatatgaaattcagtaaatatattaacattaataaatcaacataaagtataaagtggccacattcaaatataacatgtaaatgtgaagcaataaa

SEQ ID NO: 64066 - DNA, 406 bp, Heterodera glycines
atgctccaaaacggccttaccattctgcttctgatcagtgttgtgatcggtcattccttggccaagcttggcccaaccatcaaacataatcctcattttaaaaccgtacaaactgcgcatcatttgcatgatgccattgcgaagaagcacaaggcgagcaattgggcgaggggggaattttgagtgaaaattcatttcgaaataattaaggccgaagttacgcaagtcatttgctccattagcaacgaacaggtgacagacaaaattcaaatttcaaatttaacattttaatttaaaattcataaattaagcgtcaagcattggctttggagttcaaaaaacaattcggcactgatctgattgccatgctgaaaaaggagttcaaaagcgactttgaagaactgat

SEQ ID NO: 64067 - DNA, 56 bp, Heterodera glycines; identical to SEQ ID NO: 52733

SEQ ID NO: 64068 - DNA, 170 bp, Heterodera glycines
ccaacgcagaattaaagtacaggctatagggaagctattccggaaggattcggtctccccataaatctgggcgcatcggttcggggggactgccccgaaaacaaaaaaatcgattttttcaagtgtccctctggggaatcaaacaattatggggagcaaaaatccaacgc

SEQ ID NO: 64069 - DNA, 665 bp, Heterodera glycines
atgcgcacccgtccgatctggcaagttaagcaacgattgctgactagccaaaaggttcggtgccgtgatgaaacgaaccagcactgcttaccccgcggcacccggcacggtcccccgaaggaatggatttaattaaattctctccttcggggatttttttccattaggtcgtccgttagcgttcgattgctctagtcaatttttcaaaatttttgttgaaatatttgtcgtgctctgaagggcgtgggaggggggggggggcgaaggcccaccacgaggccgcgaagaggccgagtgagtaccttcggtgcaggaaaattattaaattttaaaaattttttaattgctttttaaatatgccaaaaaatgtaggcttaacttttttagtgaaaattcgatcactcatattttttgctaattgagcagaagcgtaccaaactttgcagggatactccccggtaaaggactaacttacactgaaatgagcgccgagctagctggctcaaaaaaattttcgaaaatctgagtctttcgtttttatttattttttgcaaaattaattcttaaatattttttcagaaagggttctgaaacgcaccaaattttatttacatgttagtttaggcactctgatgctttttctatcaaaaagggagatgaataaa

SEQ ID NO: 64070 - DNA, 1008 bp, Heterodera glycines
tgaaaaaaatatttatgaaacaaaaaaatcgattttttcaagtgtccgtttggggtactcaaacatttatggggagcaaaaatccaacgcagaattaaagtacaggctatagggaagctactcccgaagattcggtctccccataaatctgggcgcatcggttcggggggactgccccgaaaacaaaaaaatctattttttcaagtgtccgtttggggtactcaaacatttatggggagcaaaaatccaacgcagaattaaagtacagactatagggaagctattcccgaaggattcggtctccccataaatctgggcgcatcggttcggggggactgccccgaaaacaaaaataaatcgattttttcaagtgtccgtttggggtactcaaacaattatggggagcaaaaatccaacgcagaattaaagtacaggctatagggaagctactcccgaaggattcggtctccccataaatctgggcgcatcggttcggggggactgccccgaaaacaaaaataaatcgattttttcaagtgtccgtttggggtactcaaacaattatggggagcaaaaatccaacgcagaattaaagtacaggctatagggaagctattccggaaggattcggtctccccattaatctgggcgcatcggttcggggggactgccccgaaaacaaaaaaatcgattttttcaagtgtccgtttggggtactcaaacaattatggggagcaaaaatccaacgcagaattaaagtacaggctatagggaagctattccggaaggattcggtctccccataaatctgggcgcatcggttcggggggactgccccgaaaagaaaaaaatcgattttttcaagtgtccgtttggggtactcaaacaattatggggagcaaaaatccaacgcagaattaaagtacaggctatagggaagctattcccgaaggattcggtctccccataaatctgggcgcatcggttcggggggactgccccgaaaac

SEQ ID NO: 64071 - DNA, 464 bp, Heterodera glycines
atgctaattgcttatatccccaaacgaattcatctcaatttgaatgtggtcggtgctgcacttcgtcagcgtatgccgttttctgcggctgtgcttgaccctcacgatcagctgaaagattcagacaagccgatgtcggagcagatgaacccttcattctttaaggtattcattttggctatgaccatgcttttattattcggttcctaaaaagatggtcgattactacttcgacaaaggcgctgctgtcattgagccgaaattggttgagaacttcaaagcttcgcatgggaaatcgaaagaagagagggtcagctctgtcaaagggattcttgcggcgattaaacccgttaacaaggtttaaacttgcggttgctctatattaaatttttaatttaaaggttctttacgtgaccttcccgcttcgacgcgatgacggatcttatggtctcaatttatgatta

SEQ ID NO: 64072 - DNA, 856 bp, Heterodera glycines
atgagcgtgactccaactaccatcttttgggttggttgctcaaaatacattttgtactagtagtttatttgttgtctgctgtttaagagtcggtgcagaagtcactcgagcgcaccttcgaccgtgccgttccggtggatcccagcgaggagttccaattgcgcattgccggtgccagcgagaaggacattgtccattctgtaggagaatgatggcttcattcgctaattcaatcaacctaaactaatttcagggccttgagtacacgatgaaccgttcggccaagcaaatcattgccaccacgaacaaatacaacttgggcttagacttgcgtactgctgcctatgccaacgccatcgaaaagatttaccaaacctatgagacgtctggctttaccttcgcttaatcgatttttcgacgcattcgtaatgtagttaattctcgggtttttgaacgcgtatcatttagtgtttgtcagatcacagttctattgtattcgattttatccgacaaacctcattcccgtaatttttttgtcttaatcatcgttaattttttcgatttgtctcccgtttttgtctgtgaaccttttccccatctacgagtacaaatagtgataaaaaattaaaaccaaaatgagagatgaaccaattggtgtagatattaataacttcgtgatcgaaaaagggggaacaaagcacagtatgccacttttaccccaaagaatccattctttaaaaaaaattcaatttttttttcgaattagggtccgggtttcagaatttggcaaacccaagttcagatccatcataatcagtatcttcgaaaacccctaaaaactgattttgagcacaaa

SEQ ID NO: 64073 - DNA, 2047 bp, Heterodera glycines
atggctcagtcacagaatggtggtgtcaaaaaccgtcggatttcacttggttcgcctaaggacctgaaggaagtgcacttttttgaggaagatgaagtccccgatgtgccgttaaatggtgcaagagtcaaagtaatttcattttaagaattatttattggtttatccacttgattttaggtttgctatgccggagtttgtctaactgacaaagaaatcagtaacacgaaacaagtgatttgtagttgtaaattaaaaagaaaagtttttgtcgtgagggaatttaaacaatcagaaaattttaaggcacgtataactcacggcgttaaggacaccagtctttttccaggttaatttaattgagtattgtgcccattcatattaattattcgtctttaaatgcaggctacgaagtttccggagtgatcgatgagtttgggcccaatgcaactccggttgagtacaatttgaaagtcggcgacaaagtcattgtatggcccactgaagaggtacttctctcaagtgcaaatttattcatcaacaatcgttgctcattcagatgtgccaaaatggctatgctgactttgtggcagtgccaaatttgtcgcttcttgtcaagattcccgacactttgtcaatgcatgtcgcgtcgattcttccggccggcgcaacttgggcactctctgcgattgtccatgtgcctttgattccctccgactttctttcagtgtcctcccccttttaggcccgtcctgtcgttgaggccatcgccagcacaaaaggatgttgcaacattttaattgttggcgctggtggacttggactttggattctgacattggccaaacattttcttaccgcgggtcaggagaaccgaatcaaactgattgttgctgactctaaggaggagagactttgcctggcagaacgtaatggagcagactttgtggtgcattgggacgattcaggtcaacttcgggccgttttaccacttaggttaaatctcaaaataccattaacttttaactttgggttttccatgcaacaattcccctaatgcaaccggattggtttctttaaccccattaataattttctgtgctttttaagaataattagcttaaaaaattactactaaagtgtggtccgtgctatttcattttgtcaaaataatgcgttacaaatttggacattgtttcagagtttgaggaatatttaatcatgcggaccaaagacgtcgctaccaatggccttcacattgtgttcgatttcgtcacttcccctcgtacagtcgcccgttcactcaagtgcctttctgaagtttgtatggcaaacaaaaatgattgttaagaacgtaaatttaatttggtccgtttgcttaagggtggtgtccttttcgttggcggtattccgggtttggacgttcagctgccaatcaaattagtggccaaaaaccgtttggccattatgggcgttacgcgtggttccattgagcaactgaagaacctggtcacattgctttcagagggacagctcaatgcccccaattatcgcgtttatccggtggaccaggcatcacaagtcgctgaatggattaaacgccccctaaataaatgaagttttaaggtgttgaagcaattgagcatgtccgaggttgaaggccgagccattttggaggtgtttaatccggacacagaagttaagaaggccgaggaagagcagaaataaacggattgtgataaaccgagtggaggagcctttccctcacctgtgcacttttatattatttgtgacctttcctttctagtgattcatattggagaaggcacagttctatttaatcccggcggacgaaatttgcacagatgtaattaaggataaattttcaagcgtctcactgtcttctcacctcccccttatagtcaattataatacacatcgacttaattttgggctttggcatattggtttttgtaagatagtagagggcttgagattcgagcccgctccacgacattaatatattaaatttcgtctaaaaaataaa

SEQ ID NO: 64074 - DNA, 2088 bp, Heterodera glycines
atgagaccaccgaatgtgagttgactaaatggtaatacctagtacgatatccccccatttttagacaaataaatgaaaccgattaaattttcgactctgttcgagttcgggtctgggtttcggaatggatatctttcgtgatcaaagaccctgtggaaacatttttcatgaaacttgaaaactaaaatattttcaagaaaaggggtagcaaaccttagtattgccgataaacaaataatactttattaataaaaagttttcagtttgatcatgacctcacttctttgattagacgtgcaaaaatgaaatttgagtctcgcgcgaaagaggacttactgaatgcactgaacaatttcactgatcttcaaccggacgttgtgaattttacttttccagacggagtgcccagatggtgcctttctttttcgggcactattcccattcaatacaaggtaaagtgttccaattaattttctctcatggaatgacaccctaagggcgctcgatacaacattcccgtggcactttactttttggaaagccatccaaacgtgggcccgttctgttacgtgaagcccacttcatgtatgcgaattcggccatctaaagttgtggacgattctggtcgtatttatttgccatatcttacggaatggcgatatccaaaccatgacactaccggattgcttcaggtttcaatgtttctcaagttcaatcgtttgaattccccttttcaggttattacgattgaattccaagagaaatgtccggtatattctgtgagcaacaattctaaaaacacgggtcattcaaacaatccatatccacactcgggatccatgacgaacttgccctacccaaactcggcccttccctacccaaccgccgatccgccctcgcacataatgccacagccatcctcctacactccgatgccgcaaccgggtgttttaagagttaaccagcagatggatatctttgttttcattgtatcggtacaggaaattatcaggctccatattcaaattcatacccatcggaccccatttcttacccaactcctgccacaaatgtgacggcacaatccgatggagtgtatccctatggaaccgggactatccaaccaacccacattcatgccagtttgcttagtgcggtcgaggatcgaattcgacaacgacttcgagacaaaattggtcagttttgtctataaatttgtatttggactgtcttatcccctattttaggcactccgtttgctgagttgcaatccatcgatgtgaacctgcaagaattgcgtgtagggaaacaaaacttgcgcgatatgctcgacaacattgccagagaccaacgcgaattggagcgggttttagacatttatacggtgcatttaaattagttttttttatttgttgtcgttgtttcaggataaaaaggaagagctcgaaagtgcgttgaaagtggtcgattcaaatggcactacggacaacggagttgcatttaacgaggaacaggcgatcgatgcacaaacgcccgtccatcgacaaatactcaaatgccatgtgcaagacagtgccattgacgacaccatttaccacttgggccaggctttgcaccaaggggccgtcaatttgcagacctatctgaaatatgttcgccagctgtccaaacaacagttccaacatcgtctgttgatgtacaaatgccgggacagatcgcgtttgactatttagtggaaatacaaaaaaatgtgcacactcctcacttgaccatcattgcttaacgcaaatatgcaaattgaacgcattctttttctgtttattcggtagagggaaaataacgaaactcattttaagctgtaaatattgatgggttattcggattaatattatttgagtatgaaaatgttaaatacggtaatggttagagcccggacataaactgaactttctttcgtcctaaggttcttgtttttgcccgggcttacatttatttcttagccattattttagaggaattcgttcgtttaattaaaattttaaacccctttgatgaaacttcgtccttttcattgggtttgcttgatca

SEQ ID NO: 64075 - DNA, 49 bp, Heterodera glycines; identical to SEQ ID NO: 51181

SEQ ID NO: 64076 - DNA, 306 bp, Heterodera glycines
atgcatacattcgcaacacaacccaccacccataattggatgcattttgttaggtttgtgtcgtgcccggctccgggtttggccagcgtcctggcactttccatttccgcaccaccattttgccgcccattgacattttcgaggacatgctcaaccgtttcggcgccttccacaaacgctttttggccaagtaaatagacgataggcgaaattttttttatttctaatttaaaattttcaggtacaaataatatcttcgatgtgtgcctcccatatgtgtttgtaattattatgaatgatggatga

SEQ ID NO: 64077 - DNA, 360 bp, Heterodera glycines
taattaaatccattccttcgggggaccgtgccgggtgccgcggggtaagcagtgctggttcgtttcatcacggcaccgaaccttttggctagtcagcaatcgttgcttaacttgccagatcggacgggtgcgcatgattccactgttccaagcaccccaccaaaagcaaaacgatataaccaaaatataaggaaaaattttttaaaaatttttttctccatcttcctttttgatactaaagcatcagagtgctaaaattaagttgtaaataaaatttggtgcgctttagagcactttctgaaaaaaatatttatgaaacaaaaaaatcgattttttcaagtgtccgtttggggtactcaa

SEQ ID NO: 64078 - DNA, 898 bp, Heterodera glycines
agttcatggtcggacggactgctgatcaattttaccatcggaacgcatcggggcaatgagccgattgatcgctgtgagctttggaagcagctgatcagctcgttgcatcgctctaatgggtaaatcagctgctgatgggggaaggaaattttaactgattggaacaaaaaacgaaagctaattcaagaatgtgccattcgcgaaaaattatttcatcgagccgggagggaccaagaatcccttggacaaattcgagactcggtaataagatcaagaaatttccttttcgcataaccgaactctgtaggaccgggagtgattgatgaaccatttgatcccgtcagatcaattggcaacggtcgtctgagtgtggcatccgatgttgggctgttggacccatgcgcgaagccggcgccgccgggcgaacagtgcaacggtgccgtgtgcaaacagtcacttggcgaggtgagtgcagaaaaggggggaacagctgctgatcacgttgattacaaatgccacataacattaattgattagtttgatcgaacattctgattagaatcaacaaatcatttttcggcatttgtgccaactctgcgcaaaatgagtgaagaattgccatgaaatgcaaaatgatgccatttatgatcggctccttaaaaaaggtttgcattggcggtgagctgtgcggctgtccgacgagccaaaagcgcgccagcgcggacgaccaatgccggctggttgagtccttcaccattccgttgtgggtgctgcgcagaggcgtacacaatctggtgttcaattcgacctttgcgaatccaattgatcagctgaacaaggagtacgtgcgccagttcagcaccggtgttgcccaatgctacccgcacaccgcgctcag

SEQ ID NO: 64079 - DNA, 714 bp, Heterodera glycines
atgttcgtcgatgctcttccggcctcaattgtcagtctaaatcttacttcaaatcgtcttgttcggctgacaaaccgaatttgtcgactccagcaactcggcacacttcggctggaccacaaccttttcgaggaactgcccgaggatgtgagtatacaggggaaaaacgggagaaccctaatttgtaggactttctttgctcttcgcaccgatttttgcttgtaatttcataacagattttcaccaaaaaatgccaaatttttgcaattttgagcatttgacgaccatgaaaagttcgcccgttttccccctcgtttttggactgttttgggtcctcgaagttaaaaaagacgttttcaaaaaaaaatttccagctctgtctgatcaactcgttgtgtcatttgtcgctggtcgggctcaatcggctccaatttcttcccccgtctctttgtgttgtcaaatttactgcaccacgcttcattttgttggacatttctggcaatgaacatgcgccgttcatcaccgggcacggcacggctcacaatcaacattctgttcacaatgctgccaccacctcttcgacagttgtttctgttactgctccgccggcactttgtgaatttgctgctgccgcagtgcttaacaataagtgagaaaaatgggagcgggcaacgacgggtgtacttcatttccccccttgtcgtgccccgaaaa

SEQ ID NO: 64080 - DNA, 2160 bp, Heterodera glycines
atgggacgactcatcttccgaatgacagaattgttggagcatattcagaggctaatccgaacggtatacatagtttattacatgttctaatttctgcttttttagaaggaactatcatcgatttttccgactctcagccatttcagcagccgcccattgtcaacgtgccgacgaggggaattttgcgtaattgcaacggcattgacgcagcatcggatgtgcagaaagcaaatggaactgccaccaatgaaggcgaacatcagcttcccatcgccgatcagtctgtgccatttggaggcgcttctgtgccgcgtgtcgcttccgtcactgggcgagggacgcgaggagtgcgcggcggattgggaagagggggttcgttttcagtgctaaacactcataatttggtggttagcaccagcacaaaacaacaacatcagtcgtccaccagtgaatgcggagatttcgccacccaaatcggtcaccttcgactcgacgaccgttttcaacggtagcagggcgagaggaggcggaggaacgacgagtcgtggttttggaagaggggccaatgcagttggtcggttatttaagtgtggttatttggatttttttcaatttcatcccacagaactcggaccaggagaccgtcgcggttttggacatggtgcccatgcagttggtctgtcattcccgtaaatttgagagtaattgtggtcatttttattctaatagaactcaattcttcgaatgatccgccgagcattggcactattttgcgtggtggtggacggggccgtggtcgtggcatgaactccgaaggtttttcccccgttcttttgtattatttatcctaatttcgaggtcaaaatggtggtttgggcaatgcccggccaaatgccgaaaacaacggacgcggaagagagaattacggtgaccgtaggggcggtggtcgcggaagcgaaggagacggcggagaacgtttcgggcgcggcagaggcggaagaggacgacccgaatttggcgaaagaccgtcgaatcacagtcagcgaggaccatccgcaacaaatggcggagacgaacgctttccacgggatggtaacgaacggagtgaaagcatttatgacgagctaaaaagcaaaatttagagccaaggtcgagtcggccaagacacatttacaagaaaagaccgatcgaatgcctttacgaagaggactgtctcgtcagtgaacgctacgtggacatccgtgacgaagacgaagacttagttgtcagtggagacaatgttgaaaagttcacagcgtatgagtaagcgattcatccgataatggaagttgaatttcctctgtattaaggacttggaaggactttgatctggagccaaagctactcgacaacataaatcggtgcaaatacgtggtacctcgcaagatccaatcgtacacttttccgctgataagagacggtgcgacacatttcgccaatgtttttacgctattttaaaaactttgtttaggcttcgacgtgaaggcacacgcggagacgagcagcgggaaaagtgccgcatttttcctgccaatcatcgacaaaattatgaaactgaaaaaggaaggcactttcaagtcgagacgggactgtccgtacgccctcattttgtcgccgacccgtgagctggcaatccaagtgtacgaacaagggcggaaattgtgcaatggtgggcaccgtcgttccgttcgatgcctttaatcggttttttctgtttaggttgcgatgtatctatttcattggcttacggtgaaacagtgagacacgaaaacattcgcaacatttccatcgatggctgcgatattctcgtcggcacgccgggccgtacttgcgattttttccagtccaaaaatgtcagaaaattgcttgtttcttcgaaataattcgtctactccttccttttagctcatgttcgaccttttgaaggtgttcgttcttgacgaagctgacaaactgttggacgaaagtttcattttggatatgcgtgtacttggcagtatgccaaattggcctacggtatttcatcatggaatccaggtccaggcatttcgatgggaaccgcccacttcggcgccggccttttcggcgccgttgctaacaacttttttcctgatcaaccaa

SEQ ID NO: 64081 - DNA, 1844 bp, Heterodera glycines
atgtacgggcagccaggggccggtgcagcggtgtattcgtcgtttcagcaacaggtcggagcccacaaaattccgctgtcgaaactccgccggacgaaactgaatcaaagtattcaaaaatttttcaaaaaaattcgttggtggaaaactgaatttttttcaaaagttttctaaggttttttcttggaaataagtgaaaattttttgtctcggtggagtttcgtcggcggagtgcgttttgggggtaccggcaacaggtgtatggagaatggtagaacgatgctgaccccttaccgaaaaatttatctgtttttttgtccacaatgtgttaggcatattgtctaccacatttttttccctaatgtgtcaattttcatcggttggttttcagcacgccgaagttgtcgatcagcagtgctaccaacaacagtccgctgcttctgtgggttacggtccgtcgatgccgggcgcctccgcgtcagtccctcttgaacaacagcagcaggcatcacaaaagggtgccgtcacttcgtcggcggcaaaaccgctgccccaacaacactttgtgcccccgccgccctccttttacacggccggcaaccgttcgtccaacgccgccgccgccgcactgcttggcgttgtgccatcgcctccgatgcttccgccgtcggtcggcggctcggcggtggttggcccaccgccgcccaccgcttacgcgacacagcagcaacagtcgatcaatgccgtcacttcgtcatcggcaaaactgctgccccagcagcccccgcagcctttttacgcggccggcaactattcgtccaaagccgccgccgcttcaatgtttggcgttatgccacgacctccgatgctttgcccgtggggcggcggctcagcggtgattggcccaccgttgcccgctgcttacgcggcacaacagcaacagccgatcgaccccatgccgtcatcgtcgtcatggaattttggccaacagcagcaataccaatttgcggcagatctatcacaccaacaccacaaagtaaaaaacttcggtttgagagaggaggtggtggatgggtagccccaatcaaagaatattttagatgtcgtccacttcatcaacggcagatttgcaccaaaagctgttcgttccgactgccgaagatctttctgacagcatgatatacccatttgatgtgacgcatttgttctgcagagaaaaaacttcggagattttggacccccaggttagcaaatacctaatcattaagagaggagggggtatatgggtagcaccactcaaggaatattaatattttagatggcgggccccacttcatcaacggcagatttgaacccaacgttgttcgttccgactgccaaagttttggaccccgaattggttagcaaataatcattaatttgaattagggaagttacttagacacaggagggcattagttttgcatattcaaaaatgaagcctcttaatttttgtgagtgaaattatggatgacttataaaactgtatcaaaattaaatggttgtggtactcatttgggtggtgcagaagatgacccatattgattttgttcaacaaaagtaatggtcattttcgatttgcatctctttatatcatggaaatgttttctctaaattcgcttttttccttcccaatctccgctcttttcggttttagaatgtattaccctaaaatgattaggcttccgtctgaacttatttccgaattggcgagtgctcttccccttgacccccgctgggccgtcatccgtgtgtcctcggcctttgattttttcgtttatacaaaacagataatttataggaaa

SEQ ID NO: 64082 - DNA, 364 bp, Heterodera glycines
atggccgccgaatcgcaatacgtaacatttaatcattcaaaaacacatttttaaaatatcccaaattttttagccaattccttaccgaagcaaactcaccgaaccttttgagccgggacaaacgctaattgttaaaggaaaaacagcggaagactcagtccggtgggaaattaattggcttttacaaaaaataattaggcttaattcaatatactaaaagaattattttatcccccccccacccctcataactcaaaagtttaaatcgctttccagtttcaccattaatctccaccatacgtcggccgacttcagtggtaacgatgttcccctgcacatttctgtgcgatttgatgaaggaaag

SEQ ID NO: 64083 - DNA, 740 bp, Heterodera glycines
atgcttttccaacgacaaaaattgccaaaaatttgtgccactcttttcccaaaatgccaaattcggcgatcgtccaactttgtcgagttggcaggcttcactgcctccactgactccaagcagtacgcggctaaaaaactgttgttgctcaaaaacggcagctcccgaagttacaacgacgtgaacgtggcagccggacgttttgcggcattgctcaacaaaaagtacggcattcaggtgggagagaagaagacaaaatgcgaaatattaatttaaaaaatcaaaaaatatttattttagcaaaataaattttacaaaaatattatttaattaccaaaaaataaataaacaaaaaataattttcattaaatgaattaataaattgattaattcaaacattattttaagtaaataaatacattcatttggatataaatatttaaataaatttggtgttaatcaacctttttacattttaattaaaataatcaattaaattaaattttaattaataaaatttattatttttatttaaattaaatatcaaagatataattaatttttttctttttcaaattcagaagggtgacactgtgttatgtcgaacttcaaaaactgttgacgcgttggcactttatttggctgtccttcggcttggtgccatttacgtgccgcttaatcccacttacacaaaacgggaaacagagcattttgtgaacgtaaaaatttgctaaaataaa

SEQ ID NO: 64084 - DNA, 1048 bp, Heterodera glycines
atggctaaaagaactttattacggaagcgacagaccaaaaatgcacgccatacgcgtgagaacaagcgggaggagagaaaagcgcagacggccaaggcgatgaaagcccggtgggctaagaaaagtgagttttttcaccaaattttattttaaaaaatatctttttttaatttcagcctctccagagccgaatcccaatgccggaacgccacagcaggacgaagcagggccgtcgacatctgctgtaccggccgaagaactaatggagccgccgccaccagcaccagtgccaacgccggagatggacaaggaaattttggaatttggcttttcgctgccatcgacatctgtcacaccaatcggtgatttggtgccgttttcgacaacaccaactgcgccaatggacaccggagagacaaccccgccaccgctggccattgacgagcgatcagagcgcatcgaacaacttgagaagcagctcaaggaccgggacgacaccatcaaatttctgcgcgagcaggtgcgcaatcgagaagcgctgatcagtgatctgcgtcggcagctggacgagcacatggtaccaccgatggcaccaccaacgaccagcaaaagtgagtgaaatttttcttttttaatttcataaaatctgatcattttttcaattttagcatcaccaaacagaggaagatcgaagaaaagactggatgaactgcagcgcagcgccaggcgcgacatcgtcgaccaaattgtgggcgtcatcgatcgtgatcgctcgcgttccgcgagccgcgcatctctggaccggatccaccgagatatccggcacaaatcgcgcactacacgccaaagaagggcaaggagcggaaggaggggatggacgctgaggatgggcttttgctgctcgcccaacttggaacacagaaggcgtacaagcggatgaaggcgattttacggctaattggccgtaatttcaacgttttgccgccgttggaaaaggtgcatttttcagtgaatttttcgtttgatcaatgttttttgggtcatcgca

SEQ ID NO: 64085 - DNA, 161 bp, Heterodera glycines
acacggcgtccggaaactgagctgctgtaccaaaaaagatttgtatgtgtggcgaagtggtctgtgagaaggtcaccaaagggggggtcccaggttcgattcccagtgcatactattgatgtatttcaattattttaatgaataaataaaaggaaaagtga

SEQ ID NO: 64086 - DNA, 1483 bp, Heterodera glycines
  unsure (1)..(1483): unsure at all n locations
atgccggtgctgcactttctgcacaacgcggtgcccgccctgtttctgctcgtccgacttgcgctgtcgccagaacggcgtccgctggtgccgcgactgctctgtgccattgtgcgcgcaccgctccgctcgctgctttggcgacccgtcgcggcacaactgttggtcagcgcgttgtccgctcgcgtttacgtgcacaaccgggccggggcactgtatttgtgcaggtgataatgatgacacgacattaaaactacaattggaaggaagagaagcggttctactctgtatttcaagattttttggcctcgagtccagggatttgacataattttaatttaatattatcaacaattaatggtttttaaatgtcgttacttagttggatattcgtgccaatgttgataatattaaagtaattacataattagtctcggcaaagttcgaaaatttgctgcaactctcggggccactctcagacgaagccaaaaaaggccctcttttttcaaggatattcgacttcctcggcacttttctgatcattcgatttggcgcaaactttttgaacagcgcaaacactgccgggggcaacaaagaggagacgcagcgccggaggggccgcgcggccatttgggcccttttggtaacaacaaatgcacaaatgtattggcatttaacatttaattctgctcctggggcaagcttgtgcctcgagactgagtttggtggcatggcccggccctttcagaggggcacggccaggccattaatccaagaaaattcgaaaacaaattctacaaatgaacagaattaaaaatttttatgttcatttaaaaaaaaaattaaatttctttacaattattgttcactcgcctccgagaaaacaccgaaattcgtaactttaaagctttcaatgctatgttagcaagtttttgttcaaaaaatgctcgatatgattcgttgttattttttctttcattaattcaaattaataacaaaaaagagaaaaataaattattttatcaattttctctgttaactgattttttcacatattttccttcaaaaaatcgaaaaataacccgaaatatccctttgagaatttgtttttctttcaattcttgttcttcattaaattatgcctttattcatatttacaggggccacttgcgttctccgcgtcgctttcatggtgtgatttctttaaaatttcaaaactaaaaataaaattccatttcaaaggctcgaatttggcaacatcgagtgggacccgtgggctctgtttttggccccgctgctcgcacttgcccaagctgttcacattctgttgctgaagcaggcgcagttggcatttttcgctgccctcggcatgcccaacggcaacaatgtgccaattctatgggccaataactaacttggcttanataagtccagacttatccatgtcaaggacgtccttggaaatggacccacttttctgaaa

SEQ ID NO: 64087 - DNA, 56 bp, Heterodera glycines
actatagggaagctattcccgaaggattcggtctccccataaatctgggcgcatcg

SEQ ID NO: 64088 - DNA, 642 bp, Heterodera glycines
accactcttggctccggcttcccctccgacttgggcggactcggcacgggcaccggcaccaccttcgtccagccccacaactaccaattcggcaccgccacctcgggctcgttccactcgtctgacgacagtctgtcggtcagcatggactgtgccatgtttgcacccgaagaactgaaggtagataatgcattcatccgtggcattttcctagttgcgatcagagtgaaaaaatgctctgatcagtttatcttagtgatcagcaaacgtcatttgatcgagatgaggtatatagaagtgaaaaaacgaaattagtgatcagtgagtgattcgtaatcagtcatgatttaactgatcggataataattactacaaattctttctgatcgcttttctagcgatactttcaccgagtctagagatttcaaaaaaaggtcccaggctctcgagactgctttttcaaatccctttattttataaaataatctttcaaattcatgtttttatttactgatcaggcggaaatataatcaaaaaaagctgtttatcaataaaactgtcccattttcaggtgtctgttgtgggcaaccaaattgttgtggagggaaagcacggcgaaaagcaggactcacttgggtcgat

SEQ ID NO: 64089 - DNA, 421 bp, Heterodera glycines
atgaatatgatcagtaagtggagattaatctcaatgactgatcaacccaattttataatgcgatcagaaacaatcagtgagttgcctttttatcgaaacttcataatccaactaattgaaattcttcctaaattgttttgatttattttattttttcaaattattttgttcaattgccttgattgtgttcagtggtgatgaggtgaacatccgcgtggtcattgtcggcgtactctcttcgatcactttgcgttcgaaagtgcttaaaaagggcagggcaattaaaaaacttaattagttaatttcaattttttaaggctcaatcggcaatcaaagtgccaaatctgtttggcactttcggagccgggccaaggccagggatttccccagccaattttccaaccgccaaagcgtcgcttaa

SEQ ID NO: 64090 - DNA, 686 bp, Heterodera glycines
gcgagaaggattgtgcggccggtgatgacgagccgggccgcgaggtgtgcggcgaccggatttgccctgtgggcgagttccagtgcagcaaccacaactgcacacggccattccaactgtgcgacgggcaggacgactgtggcgatggcagtgacgagaaggactgtgacaagccatgcgatgattggatgttcaaggtgtttgttggggttagccgacatttgcggaccgacatttgcggaccactatttcagggttgaactgtctaaaaaaacaaaaaataattatttccaaaaattgcgttaccttttttaattttgatttttccaacttgaacatattttccatatttatccattttcgcgatttatttcatatttttggcatttatgcccatattttgcgattttatatccatatttttgacagccctactgatcaccttaagcaataaacatcgaaagtaataaaacaattttatttttaagaagttaagcttccattgataaatatagtatatagttgctcgttcttaatttcggatccatagttttataacagcaaattacggacaatgttagggaaaaaggtagaactattttgagtttttttttttaaatttaattgtttgtcatgactgataaaaatttaagctctaggctaccaaagcaatttatttttaattt

SEQ ID NO: 64091 - DNA, 58 bp, Heterodera glycines
atgcttaacagagtttggagaaatgataaagaatttgccatcaaaacacaagagaact

SEQ ID NO: 64092 - DNA, 508 bp, Heterodera glycines
  unsure (1)..(508): unsure at all n locations
atggcatattttgctccttttccccccatttgtcttttccatttaatttttattttccaattgctcggccccgttttctgtgctaatgtttatttgaaaaagcaatacggtgagaacgagttccgtattgagtcatggggcaaaacgaactgttcactgaacggaattgacattgtgcagcttggaattggccgaccatgtgaagaatggccagattttggtaaaaagacaattaaaaaataattagccatttataattaacaaaaaaaataaataacactttataaatgatttttaagcaaccattttctgtgatggcaaaatacttgaggtaataattaagaattattaattaattacgtttacgtaatttattaggcagtgaattattggggcgagcgaatgcttttcatgcgcgactcaaagcatttcgttgaccgtcctctgctngaagatgccaaaaaagtggtcgatgaatttanaaccatttttgatgtgacggaatgga

SEQ ID NO: 64093 - DNA, 735 bp, Heterodera glycines
atgtcgggttccctaagtgtcggatcccccaaaagtcgcaccacgtgtgagaaagtgagtgagaaatgagcatattgtaacggatgagaaatggcaactttggccgatcgttggtgggaaaagaaacaggaacgaaagggaaagggcaaaaagggaaaatgatgattgttattgaggggaaatgcaaattcaagcaaaaataatataatgcgcaaaaaggggaaaaaggcaattaaatgaaaaggatgaaatgaagtctaaatctttaaatcaaatcgaaaactcaaacggttttggctttaaaattgccaatggaaattgacaacagttttaattttatgattgtaattataacttttttttcttgttatctcgttatttctggggctttaactatgccgaaagcgaattacagatttgttacaacaccctaaaattttttgagtattttaattttcgaaaatttcacccctttttgacccagaaaaaaatttccgagatttgaggggttgaacaatagaaggcccgggccttcaaatagagggtttacggtatgcactttacagaccataaaaaataaaattgttttttaatcatttaaaaaatttctagggcgttttcggagttgctggtcatgaatctgacatccatttcaaccaaattcgaaccccgaacccatatccgattaaaaaaagggaataaagaaaaatgaatatttataaattgtcaattaaa

SEQ ID NO: 64094 - DNA, 577 bp, Heterodera glycines
atgtcgggatccccaaagtcgggtccccaaatgtcgggttcccaagttgcaaatccccaaaagtcgggtagccgacaagtctcacaatccattagccattttatgtgagtgtaatatttatcccgcccccatcgcacctttaggctgatcgcgcatcaggatttggatccaaattaacacattaaataaagactgttcattccggcataattacgcgcaaaaatttcaaatttaacaactttttaatttactaaatatacaaacaaaatataagtgtgcaattaaaaaataataatttcacagtttttaaatcacaatgtcaatcgaaacaattattggcagacttcaaactgctgaacatgttatttctgaatatttgaatgatgttttgcccgaaaaacctgaggcaccaaaaatgcaaaagaaaaacgtgctttgatacttttggtaaaaaatataaaagagtcttctgacgaattattagcgcaattagaagaaattcgaggggcacgttcagctcaagtcgatctgatcagagttttaacagctcaagagcgattagatgctgaaagaagaa

SEQ ID NO: 64095 - DNA, 1340 bp, Heterodera glycines
ctgctgacaataaggaactgtgcccaattggaaaaataatgacaacgaatgttaaaatttttgatcagcccgctatttcaatgatggatggcggtgcacaagtttcacttattaaggcggagtttcttaaaaatattttggaaagtcagaaattggaaggcacaaatctcaaaatttggccgaaaacccggaatgtcgttgacattaatggaaagcgtgtagagtgttatggaattattgtgttgccagttgtaagaagaggttgtgaagcagttgaaattatgttccacattacggatgcgcctgttggacatccaattttgtttggaacaaatgcacttgggctccttgggttcaaaatttttgatgctcccaacggcgaattagtggaatttgagtgtgtggacaacaagtctgattctgtgcgtgtgatttacagtactttggttgaaccatattcaacaaaatttgttgaactttcaatttcatcaccgcaatcacaaatttttcacataaagcagtaattttaaaacaaaatgaagaaattgctgcagttgaagaggtgaaggaaattgccaaagctgatgattgtcttgaagatgcatggctttatcattcggtggagatggaaaagtgtctttttgaggatgagttcaaagccgaaattggccaattggatgaggacaaacataataaactcggatcacttttgcatgtttttgcaaatatttccgcttttaatgacagcgatctaacccaaatcgaagttgtcaaacaccatattgacactgaccgttcattccccatcaaaaatcgtatgcgacctgtgccatatgcataccgagaaaaggttgcggccatgatccaagattatttgggccgtggtattattcgtccatctttatcaccatgggctagcccaattgttattgtaccgaaaaaggatggaactttgaggttttgtgtcgattaccgaggcttaaattcggtaaccagaaaggactgctttccattgccgaacattgaaagaacccttctcatgttgggtggacgaaaatatttctcaactttggattttctctcaggctatggcaaataaaaatgccggaggaatcggtcgaaaaaactgcttttgtcaccgaatttgggctccatgaatttaccgtaatgccatttggcttatgcaacgcagttgcgactttccaacggtttatgtctcagttatttggacaaatgatgaatgattttgtgtttgtctacattgatgatgtgctggtggcctcagagtcgtttgagcagcatttgaagcatttgaaattagtttttgaacaaatccgcga

SEQ ID NO: 64096 - DNA, 462 bp, Heterodera glycines
  unsure (1)..(462): unsure at all n locations
atgccggtttccggaccggtttggcattttcaaaatgaccggtttccgggcccggcctctcaaaaaccggtcaaaccggatttttccaaaaaaacgccggaccggtttgctgggcccggtaaaaaccggtaccgggcccggtccggtccgctctctacatttcagcgatttcttgaaattttttttgaaaaactagttcgtcaaaaaaatttataagatattttttttagaatttgttagaagaaaggctttattttaaaattgctatttcttctanatgtgtttttaaaaaaaattttttttttttgaaggtatggcttaaaaattgggcaattacttctcttatttttacacttcattttgtttcacgttgcagggtcaacgatgttcaaattcgaattgatgagctcaatttgcaatttgtgtaccgtttgggagtgatggcggacaaacattgggaat

SEQ ID NO: 64097 - DNA, 519 bp, Heterodera glycines
atgtttaagtgtacaatcttgatgattgagaatggaatgtaagtggaataattagaattaagtgataatttttaattcatataattttttggctttttaattttatgaattaaaaaaattgttaataaatataattaaaaaatgtaaattcaataaaaaaaaatttaagtttcggagtatttaacacattttaaatggtttaaattaaagtcttttaaagatgtaaagaatccgtcgtggtacaattttttcttgactcgtttttaattgaaaataatcaattaaattttttgaaaaaatctaattttttatacaaaagtttttaccgtccctggcgggattcccgttaataatttttttttcattttcccgttctcggaattttttttaccagactacttttatctatcagtttcattataggcacatttggagggagaaatatctgagcacagacaaatgtacatggacttggtaaacttcgctaatttaaaataattaaatggaacaaacagagca

SEQ ID NO: 64098 - DNA, 821 bp, Heterodera glycines; identical to SEQ ID NO: 34266

SEQ ID NO: 64099 - DNA, 821 bp, Heterodera glycines
ggggactgcccgaaaacaaaaaatcgatttttcaagtgtccgttgggggtactcaaacaatatggggagtaaaatccacgcagatttagtacaggctataggaagctattcccgaaggatcggtctccccataaatctgggcgcatcggtcggggggactgcccgaaaacaaaaataatcgatttttcaagtgtccgttggggtactcaaacaattatggggagcaaaaatccacggcagaattaaagtacaggctatagggaagctattccggaaggattcggtctccccataaatctgggcgcatcggttcggggggactgccccgaaaacaaaaaaatcgattttttcaagtgtccgtttggggtactcaaacatttatggggagcaaaaatccaacgcagaattaaagtacagactatagggaagctattcccgaaggattcggtctccccataaatctgggcgcatcggttcagggggactgccccgaaaacccaaaaaaaaattttttggataaaaattatttaaatgaactgactagataatatttaaaataggttatttctcttcctttcagtatccctgcaaagtttggtgcgcttctgatcagtttctgaaaaaaaagttaagcctaaactttttggcctgtttaaaaaggaattaaaaatttttaaaaattttattcatctccctttttgatagaaaaagcatcagagtgcctaaactaacatgtaaataaaatttggtgcgtttcagaaccctttctgaaaaaatatttaagaattaattttgcaaaaaataaataaaaacgaaagact

SEQ ID NO: 64100 - DNA, 911 bp, Heterodera glycines
atgtctttagggcaagactgtatgatcatgattatggatgggaattttatgtaagaaaaatcccgaaataggtaaataaaacatgtaacaaaaaatgctaaaatatgtaccaaaatatgtaaataaaattttgtaaatggttattttttggaaataaattctcataaagggtgaaataggcataaaatgccataaaaatgacctaaaggtttaaaaacacatttactattttaaaagttaatttttagtatctcacttttgaaaaaaacgattttttgggtacttttcaaaaaaaaatttttttttcacaaaaaattctataaattctcaaaaaccctctatgtaaaaatatgtaaataaaagtcccaacttttgttcgcaaacgcaaaaaagaaagtgttttcctactattcagagcatagagaagccaggaaaaaaatatgtattgacataaattcccagccctagtcatgatcatttaatatttatgatcaaatttaaatggtacctttcttatcaactattaaaattgttatcagcaatgattagaattaaggatgacaattcctctgtagtattgctgaccaaatttgagcgaaaattatgtaaaagtaaaattattaattccatgttatagttgcgagcgatatttaactataatgaaccaattgacatataatcgagcagttttgcgcggcaagaagacagagattgattaatctctgcgcgctgcgctgtgcagaaagagagctgctggatgaatagctagctttgctgctgatgaaggacgaacaaaaaattgttaataattctttggttgggagtaattaattgattattgaagtaaatggcaagattatgccgaattcatgggcagaaaaccgggggtgggggaaaggaattgtaataaa

SEQ ID NO: 64101 - DNA, 1518 bp, Heterodera glycines
atgcttgtattttttattttttattttgttgcatttgcttatccttttcggcacaatttcgtttctgatcgcactgacgaatctaatgagggattaaaaggaagcggaccagctttgcgacttcgttgcggcgaaaaaatgccagataatagggtaaaacttggtccaacatagaattaatttttgtctaacgaatattaggtaattttttttattttaataatttttctgaaaaggtaatacattattaaattttaataattccaggtcgaatttggacaactttcgccgccttcggactggccatgggcaatttcggtccgttccgaatgtttgaataagcgttcaaaccgcaccgaagtactctcgacttgttccggagttctaattggttcaaaacatgtgctaacagctgctcattgtcttttaacgacaattaattcctatttgcgatgcaaaggaaatgaagtagccggggaatttgaattccctgggaccacgtgagttttacaaatttattttgcatattaatattttgctaaaacttagaaaatttaatccaaattaaatcgaatctataatcacttttgcgccgtgctttttaaaaaaattgaggaacagatgggggtacagttctagtgttaataaggtggaggctactccagcggtctaaaggcactgacgggaaaattttcacaaatttcgattaattttgataagaattggtttaaatttaattaaacttattgtatgttattagaaaatatttgacatcctgtctttaaaattttcaaaaatgcaatgcggatcccacggattcccgcacaaaaaaatctgcggatcgcgctggggatgggaatcaaaaattttttgtgggaggcggattccgcggaagtaatcacgcaaatcccatattaccataaatgcgagtttaacgctgggattgcaaaattcgcgcgtaatcccgccccgtgcaggtctttcatttattacaccgaataaaaactaaaaatggttctaaatgtggctcatcatcacaggattctttttgccaaatagggattaaattcattcagcaaattgcctattaaattaatttttcccattagggtgtatgtggctgcaaaattcataaaactgacaattggagggaaaaattggaaccaaacgagttcgttgagcatcaaaaaatacaccaaatttgacagattcatgtcacaacactacgacaatgacattgcaatacttgaggcaattattaatttaatatgcatctttttatgattcctatttttatattgtttggcattttctttttgaccaaaattgaagttgcatggaacttggaattttaggcaaaaaccgtgacagtgaattgacgggaccaaaaaattagaaccgggactatgttttaaaccggaaaccggatccaacttgtgaattgcaagaaaaaatcaaaagttttatttcttgcgtaaatttattcagctcactcatcctgttgtttatgacatgaaa

SEQ ID NO: 64102 - DNA, 439 bp, Heterodera glycines
atgattgtcaataatacatttttatggcaattaagggggactccggaggaccgcttatgcgcgaataccgaggaaaatggtacgtcattggtttggttattggcaaacccgacgtgtgtgaccataaatgtaagacattaaaaaataaaagcaacttaattggattaatttgttaatagcgtgtttcttgcgcccaacctcttattgtacttggattaaccgagcgaccagagggcgcgtcatctgccaacgaattatttattaataacgaagacgaatggttggaaattttggattattttatgcaattatattaattaattattatttttaatttaaagaatttttgccttaaaatatagattgaaaaatttggacttgtgtttgaaaatgttatttattgtgatggctatttcaatgttttttaaattttttatta

SEQ ID NO: 64103 - DNA, 321 bp, Heterodera glycines
atgtttgttcattgtttttcggattggttgatgacgcaccgctgttcatccgtttgtgttcatggtaaagttggagcagtgcagctggcggtggcggtggttgattctgttggccaagcaacgcggtatcaccagaggaagaagccttgaaaatgcacaaatttatttaaattaacatatttcaaatatttagtgttctacgaaacccaaaattccataataataaattaaatttcttttagtcaaaactaattaataaacctttttcgaaaaaaaaacatagtctaaaaataaaaataaaatagtattttcagagtgtag

SEQ ID NO: 64104 - DNA, 929 bp, Heterodera glycines
actcgcgcacattatcgccgttggcgccttgatggcgctggctttggcccaatttccgcgtttttcacggcaatcattgacaaaatttgctgctgtggcacattcattctcaaaaagaattctcagaatggcattggtgccgagtttcctcaactcaaatttgccttttcaccttccggtgctgttctgttggaaaatgtgaacggttgtgggccaaattcgtccgcaaattcgtcctcatcaagtggccgaaatggtggcacaacttctgcttgttcagaagtttcaaccaccgaattgcctgttagcgtttttttaatataaataattataattaaggctgggatttatatttatgaaaaatttccaaaatatttaaataaatatttacgtaaaattacaaaatattttatgaaaatatgaccaaaagtgagaaatttaaagtaacaatattgaataaattcaaccgatttttgaaaattcaattcttagagagtgtatttttcattttgctgcattttgttattagccttttttgttgacagattttttaaaaaattttgatgaatgcacaaaatggaaaaatattttttttcagataaattaaagcccaagaaaaaattttaaattttgttagcttgaggatgctacactctgaaaatactattttatttttatttttagactatgtttttttttcgaaaaaggtttattaattagttttgactaaaagaaatttaatttattattatggaattttgggtttcgtagaacactaaatatttgaaatatgttaatttaaataaatttgtgcattttcaaggcttcttcctctggtgataccgcgttgcttggccaacagaatcaaccaccgccaccgccagctgcactgctccaactttaccatgaacacaaacggatgaacagcg

SEQ ID NO: 64105 - DNA, 90 bp, Heterodera glycines
atgagtttgatgagatcgtatcaattgtgttatcatgcaagtgaagtgccgtattacgtaattgccaagcgtccaatagagtccagcaaa

SEQ ID NO: 64106 - DNA, 264 bp, Heterodera glycines
aaatttttcgattccggtgactacaacatgaacaagaacaagcctattccaccgccgataggccagaatttgactgctgccaacactcccaaactggccgttccgattgaaactgaacccgagaaaaaaatggaagaatcagctccgattattgtatcgcaattgctcccaatgatgcgtcccttggccggctcaatttcgggttgttcgatggatggcggcgaatctgacgatgagggcggacagcttcaggtttattgttag

SEQ ID NO: 64107 - DNA, 549 bp, Heterodera glycines
atgcaggaacaactggcgaacctcaacctgaacaagtacaagcagatgcagcggcttttggaggacgcggaggaacgagcggaacttgcggagaattcgctgtacaaaatccgcaccaaaagccgctcctccgccagcctccgcggcatcgtcggcttcgacctccgcccgtccgcttcttccgccgctgtcctccgttctgtacgtcccttcctttttcttaattttgcttccctttgttcagtcttccgcttccatttttgcttcacaatattcgcaacccaacaattatgacaatcattcacttggtggagggacaaaagaggaaaatccattcaatccgaatggaaatttgatgagcaaatccatccacgaagaggaggaggaggaagaagaggaagaggataatgaggtagaatagaagaggagaaagaggagaaggaaaaggaggtaaaatatgcaggaggaagaatgaagaggaggaagaagaggagagaaagaacaggaaatgaaaaaggaggcatgtggggggcatttttgatgaataaa

SEQ ID NO: 64108 - DNA, 468 bp, Heterodera glycines
cgacgccaacgatgagaacgcgttactgtgcgcagtccgatcacgcaatttggtcgtgattagcatggtacgccaagcaggcggccaattagtggttccacggcctcgcattggtgattcccattgaaatttttttccaaattttctaacgatcaaattttcaaaaattttcaaggtgtcgaactttgtctgtccgccggcaccggcggcttggacgcactgaaggcatggcacgccgccggtgccaatctgtccaccccggactatgagggacggactgcgctgcatattgtgagtagtcattaatgattcgctcgagagtgtcaaaggtcgtctcgagaccgcttggaaattctgcgtaattctcaaggacaatacaattttaaattaaaaatttaaatatatttaaattatttttcccaggctgcttctcgtggcttcgatgaattgtgcttttggctttgtgag

SEQ ID NO: 64109 - DNA, 561 bp, Heterodera glycines
aaaaaattgtcaaaaaaaagaattgctgtggaccgcgccggaacatttgcgccaaaacaaccgggccggcactgttgagggggacgtgtacagcttcgcaatcatctgcacggaactggtcaaccgcgagacggtgtggaacggtgtggagcgcgagcaggacattgacggtacggtaccgttgaacggaagttacggtagtggggggggggggggactcgagagagtcacaaaaaatgtgatcatcgtttcactctcgagattaattctcgaacagtctcgggttttcgagaattttccggggatcagttaatgtctcgacttatctgttacggataaagtactgactctcgggggatcggggtcaaaatgctttctctccaatctcgaagtctcgggatctcagtctatttttgcctcaacgtttaaaaaattaatttgttttttccccataaattttgtatcgcctaaaacggaccaatgtcccactacctcacaggccacaaagttcgcggaatgaagagatgtgtgaccaccaacgcctggagagggggagctgtg

SEQ ID NO: 64110 - DNA, 1031 bp, Heterodera glycines; identical to SEQ ID NO: 34278

SEQ ID NO: 64111 - DNA, 1742 bp, Heterodera glycines
atgaagcaactgatcacggagaacccaaagcaacaaccatctcaactgcgcgcacagattcggaccaacgtcaacgacgaagtctttgagctgcttggcaccaatgaagcactcgaccaaatgacgaacaggtagaaaacaattcagtcgaataatgatacaacatttactagggccaagaacaaatttgttggcaaagttaactgcggcgacccactgcaaatccaaattccggctggtcttctgaaaaaagacgatgaatccgtcctcatttatgacagccgcgaagtgagggtaggacagtcggatgtcgtactgattttcagccatagcaaggcgtgacttacttattttattttttaaatctttttaatttcagctgttatcaatgctcaaacaaaatcgtcggtggagccttgacggcactttccgcagtgcaccaaagccttggacgcaagtgttcgtcatcggctgttacgtaaacaatcggatggtcgtcacagcgcaagccttgctacctggtaaagcctcgaagtattacacagaagtccttcaacagttgaagcgtgccgttgaacccatccttcccataaaggcaaaaaaaaacagcagattatcttcattaataattattttaagtgatgagcgacttcgagattggaatgctgaaagcgatgcgtcatgtcttcccgtcatgcgaacgctcgggctgcagcttccacatggcgcaagcggtgttccgaaaagccagaagcatgggcatttttaatttgttgaacgaagatgacaacgaagcaccggttcaaaggaaatccgttcacaaaacattcaggtgtctttcattagcttatgtgtatttatttgttttttcaaaatcagatctgttctctctttggcactcattccgccactttacgttcggcgcgctttttcaactattgtcagcgcggcaccgcttggagttcaaggatggctggcgtattttgccaaaacctacattggcaccactcaattcgagattgatcgcggggcggaggcatttgaaccgcatgctgatgtcggacactttcttctgcgtcgcactcgaagcacaactcgtaaatgcacctattctgtcatgaaatttatgaaatttttcaattttagcgttcagtatttcccaggcatccataatgacaggcagtggaccaatacaattcggactgcattcgccacaaccttcaactccaaccattccattgtcagaagaaagcagcttgcagcttattccacgctgggaacaagacatcgtctgtcctccacgcttcccaatctcgttttggaatgtgtacaccagagctcaaatggcaattgagcgaacgaacaacggcatggaagccgcgcatggacaatttgcagtaaaaatttgtccgttggaagacacttattttttgttaatttagcgtgaactcaatcatcatccgtcactgagtgatttcatagcagcattcatcaaggacatcgacaaacaactggacatcggacgcgcagaacagctccagaaaagtagaaaacgaccgcaacggtacattatcaaagaacaaaatgtggtgcgaatccttgacgaggccgactttgaatcggaagaaggattgacaaattctttgcacctgctcgggctcgtgatgcaaggctttgcggagggacttcacgtccgtggaaattcagagagtggtgaagaaactgaggccgatgaaaattga

SEQ ID NO: 64112 - DNA, 771 bp, Heterodera glycines
atgttaattgcgttgggtttggacaatcgcgcctattacgagcaccaatttgaggaccttttcctccgagaaactgccgatttctatcgtcgtgcaagtcaaaagtttttggcggagaacagcgcgtgcgtttacgttcacaaagtcaacgaatctttgattgaggaggtccaacgatcggagcgctatttggacaaaataacggagacgaaaatcattcacgttaattctgtgaagagaataacgaaattggatttgctttttaggttctgaacgaagaacttataacaaaaaacatgacgacaattgtggagatggacaactcgggactcgtttacatgttgctcaatgaccgaattgatggttttacatttcaatataaatctgtctactttttgctattagatttgcgctgtctgtacgaattgctcaaaagagttgaaagcgggcctaagacgatgacaaatacaatgagcagatttttgcgtgccaaagggaccgcagttgtcaacgacaacacccaacagcagccgcagggagaaaccgtagagccaatcggcggagtttcaaatccaatcattttcatccaggtgaacttttctgtctcggtatttggactttatttttttagagtttaattggactcaaagaacaattcgaccgttttctgctcgaagcgttcaataacgacagggaattcaagcagtgcattcagtcggactttgaacactttctcaatatcagtccaaaagcacccgaatacctttctct

SEQ ID NO: 64113 - DNA, 93 bp, Heterodera glycines
atggggagcaaaaatccaccgcagaattatagtacaggctatagggaagctattcccgaaggattcggtctctccataaatctgggcgcatcg

SEQ ID NO: 64114 - DNA, 893 bp, Heterodera glycines
  unsure (1)..(893): unsure at all n locations
ggagcgtactgtgcgactttcggctggacgccgcatgtgccaatgtggtgtggcaaaggtgggcacaaagcagcgaacgtcagagctgatcggccaagtcaaaccgatcaccccaagtcaatgccatctcccctcccccctttttctgctctctccgcagaattttctatggccgcgatgtccgcgagaaggaaatgatcgccgtggcaaaggcaagcgcgaatttgcaagttgtggaggctgcggccattaaccgcgcgcaaacttcgttcagtccgcgtccgccgggcgctggtccgtcgaatttttgatcataaaataaataacatttcagcgctgataactcttgacgaaggctttcttaacacttcctacattaaagccattgaattggtcgattcctacgacttggacattgaagctatttaccgacggcacagcgtggaggaaatgagcgtaagtaacgatgggtccttgaaaagaaggacaaacggagcaaaatggcaatgttgggtcagttggttgagccttttatcatcggttaggtgccggtggaatgttggaccatcaatttcggctgctcaatcaatgacaacgaatttctctactttttggcaccgcaacaaattgctcattattggatgggattggacaaagtgaacactaattgttcggcttttgccgtttcaaaatgttttttccaaggtcattaagcggcttcaagatcagatgcgcaatcccgaccgacgtgtgttgtggctgaaaaggctctatttgcacttgtggactgagcaggagcaccaacggggcgaagtcagcagcagttcgggcggaagcagcgccgggggaattgccggtagaaattgggaggggggggggtggccanaattggg

SEQ ID NO: 64115 - DNA, 382 bp, Heterodera glycines
atgcgtaagagatctgtgcattgaataatttcttaatcattttcatttttgaaatgttcaaaaaataaaaatttaccaaattaaaaaaatttgaaaatttccaaaatccattaaaaacgaatataatataattggattattgtaagtttatgaccattcacaatcagcttaaatttaaagtcagcaataatccattttccgtccgttttactcaactattcacagcatacaaccatcaaaacaatttaattctttgaaagttttatccccttttcttttgcagcagaaatattctacctgctcagaaattatctttggattcatcccttcggtttccaaggagtacaagaagttcttgtcgtcatcaaacgacgctaattta

SEQ ID NO: 64116 - DNA, 1749 bp, Heterodera glycines
gaaattccaggaaaaacaggaaaaaaaattcttagaccaaaaccccggaaatatatataaatatattggaaaagattttcagcgttgggaaataccacccatctctcataaccaacaaatcataactgatgacaaaactaaagctgacatttttgcaaaccatttttctgaatccttccaaaatttatcagaataccccaaacctcctccaataatttctgttaatcaaccttcaatttctgacgttcatttcaatgttttagatgttctcgaaattttaacccaccttccaaacaaaaataatacatctcctgacgatttaagttttaattttctgaaacgttttcatctaattttaaccagacctctaacagatttattcaaactgtctctaaaatccggtaaactaccaaaaatttggaaaacctcaattattctaccactatttaaaaacggagataagaatctagcatcaaacttccgtcccatttccattacctgttcttgctgtagaattttcgaaagaatattagccaaaagaataacagaatttttactggaaaataacttaatttctgatcaacaattcggtttcctcagaaagcgctctaccaccctccaattaatttcgactcttgaggattggtataatgccatacttctcaataaaaaaatcgactgtatttatttggacataattaaagcctttgacaaagtccctcatgaattgctaatttataaaatagagaaaattggaattaagggcaaccttctaaattggcttaaagattttctaactaacaggacattcaaggtcagaattaatcagcagttttccaaagaatttcccatcaaatcaggtgttccccagggatctgtcttggggccaattctatttttaatttttataaatgatctatccccagtaatccctgacggaatttcgctaaaactttttgccgacgatactaaaatttatttttgctatgacaccgaatctcaacgtaaaaaactagacgaagccttacattgcgtcagccaatgggccaaaatttggggtctacaattttcaccagaaaaatcagcttctctatacctcggcaaagataatttcaaaattccatacaaatttaatggaaagactattaaagagacccaaacaattcgagatcttggaatcttaattgacaacaaactgacctttaaatcccatatttctgctattcttcaaaaagcctaccttagaagcagaacgctttttcaaaaaatgaaatcaaaatcatctaagacatggattaaaatctataaaagctatattagacccttacttgaatattcatccgaaaattggaacccccacattaaaaaagaaattattcgccttgaaaaatttcaaaaatttttcaccagaaaagtgttcttaaagtgccatttaccggttttaccatattcagaccgattaaaatacctttatatttccagtcttgaaaataggagaaaatatttagatctgatcacagccttcaaaattattaaacaagaaactcacctaaaccctctaaaattatataacatatctcaaagaagaaattcaccttttcccagattaatcactaaatctaaaattactaaaactgaacattcttttaccaatcgtaccacaaaaaatttacaagaattaagcaaaacaatcgacctttcatcaataaactcaattcaaagttacaggaccaaacttaaaaaactgtt

SEQ ID NO: 64117 - DNA, 336 bp, Heterodera glycines
atgatgttcatttggctgttgttgctgccttcctttttgtttctcctccgcttaagtcatgccaatttgcttatccctggcattatgacggaacgcgtcgaattggcaccaaaatcggtaatttactcctttttaatattttttttatacatattaatccttaattttttttcaattaagcaagaatacatcggctttcttcagtcggctttgaatggcactgaggtggaaattcgggtcaaatgtgaggaggacgttgaaatcgaattcgatgtcgaatttgccattcgaagttcgccttgcgccaaggaatttattgtggacaaaatgcgctaa

SEQ ID NO: 64118 - DNA, 693 bp, Heterodera glycines
atgaaacgaccaatggactcaacagcaactccaccttccaccaaaaccacacgtatttccgcggacgctttggctggccaaatcgactcactttctgctgcagtcaacgctcttcttgttcaagacgacatttcccaggccgtcaaacttcagttcggcgttctgctgactaccctccacacatgccaacacgtcatcgatggtctgaacaacaacgcaaacaacaacagtgccgaggaacaggaacggcgccgttccttggtcatcattggaatgccggagaacccttcagcccgtccttcggagcgtgttcgagaggatcaaaaggttgtctcggggattttggacgaattgggtgttgaggcggtgccaacgacgacctaccgaatgggccgtcctgatgttcaccgtgcctcgccacgcttggtcaaagtggtgctgccggcctccgtccatcagcacattgcactcggcggttggaaaaaggagcgcactcgcctccgttctctgccaaactggggccgtttgctgattcgcccgtctctcagccgtgaacaactccaggcggaatacgaacaaagacaggccaaacgcaacggaatggccaaccatccgccacgtgccaacaatgctagcgccatttcaaaccaactgcacgaacttggacaaaaaatgcagcaaaattttcgatga

SEQ ID NO: 64119 - DNA, 704 bp, Heterodera glycines
  unsure (1)..(704): unsure at all n locations
aatttggtgcgctttagagcacntttctgaaaaaaatatttatgaaacaaaaaaatcgattttttcaagtgtccgtttggggtactcaaacatttatggggagcaaaaatccaacgcagaattaaagtacaggctatagggaagctattcccgaaggattcggtctccccataaatctgggcgcatcggttcggggggactgccccgaaaacaaaaaaatcgattttttcaagtgtccgtttggggtactcaaacaattatggggagcaaaaatccaacgcagaattaaagtacaggctatagggaagctattccggaaggattcggtctccccataaatctgggcgcatcggctcggggggactgccccgaaaacaaaaaaatcgattttttcaagtgtccgtttggggtactcaaacaattatggggagtaaaaatccaacgcagaattaaagtacaggctatagggaagctattcccgaaggattcggtctccccataaatctgggcgcatcggttcggggggactgccccgaaaacaaaaaaatcgattttttcaagtgtccgtttggggtactcaaacaattatggggagcaaaaatccaacgcagaattaaagtacaggctatagggaagctattcccgaaggattcggtctccccataaatctgggcgcatcggttcggggggactgccccgaaaac

SEQ ID NO: 64120 - DNA, 477 bp, Heterodera glycines
atgcatttgaaattgtgcctattattctgtttaattttatttttgatcaccctaactgatcagatcggatctgaaaataaaaaattggaacaaaaaacatttgatgaaatatttggagaaaaatgggaagaaaaaagaaacgaagaacagaaaaaaagagaaataattggaaaattcaataagataaaagagaaaattaagcaaaaaggaagaaaatacccaagaaaagaatggagtaaaattgaaggaaaaatagcaaaaaaattgggcacaaatcgccaatatatttataaatggatcaaagaattgggattaaatcaaaaaacaaacaaatgctacaaatcaaaaactgatgagcaaaaatttgaaattgtgcagaaatttgctgaaataacaaatgaatttaagcaaaaaggaagaaaatattcaagaaaagaatggcaacaaaattatgccgaaatttgtaagaaaatcaga

SEQ ID NO: 64121 - DNA, 674 bp, Heterodera glycines
atgccgcaacaacaacagcaactgtaccatcagcagcagcaacatcatgttttgtcgttgccatcttcagcgacagcgggtggccgagctgttcagcaacatcatcaccgacgttctgccgcttctcctgcggtggtctatcaacaaccgcaacagcagcagcagcatcagcaacactaccaccacaatcagcagcgatcaacagcagcaaatatgatgatgagcagtggtccggctaacatgaacatttcagtccgtgaattcttgagcaacaacaacgcggccagcagagggggagaccgttgatgatctgatttttttgattgaattgctttctttctttcttttttgcttgtttctcctttttgctcttcttctggctttgatatgagacgcgcgcattgattgattattgatcatttaatcattatcatcttattatttgtgttcccactttgatcgtttgaaaatgtccgttttgttattttacctatttatttttcattaacgcaccgactgaagacacaaattttttcagtggcaattttcaactcactttattgccctttgctcacatcacacacacacacattttattttacaaacatacagacggacattcatttcataaccaatggcatggcattggttagtctctgattggattcaataaa

SEQ ID NO: 64122 - DNA, 1040 bp, Heterodera glycines
atggaaagattgcgaagttttttggcagaattaaaggcaaaggaattggacagtcgcacagtttacgaggcgatcgttccattaaaaggtgaaaatgggctaattaaaatttaagcggagcaaagccaattttttttaattatgccaattataatatttaatcattaattaattattcattagcattctgtgacgacacttttctgtacgaaaagttcaaaggaaccggcgaaaaaagttcaacagaaaaacaaatggtgcttttgataggaacacttgtgcatgaaattgagcagcggattaaaacggttcagcaattgtttcgattggacccccaaaaatattttttcgatggaaaaaaagccaaaaattcggcccaattgtggacagtgatcaaagaagtggcattcaccctaaacattgacagcattgaaaatctgtgggcatttctcaacaaacttttctacactttgttgaaccttttggctcatttggagggattcgatttttttgacggaatgtccaaaagtgacactttcgaaattgaaaaattgcaattaatgcagcaaattgtcgtcagaaaatacgcatttttaattatcgaagatgagaaatatcggacgaaatgggacgaattgggaaacgaacagaaggcgaaaaaactgtttaaaattatcggcacaaaattcgacccaattcattttgagcacttaaaaagggagtgggcaaaaatggagcaacaaataaaaattggtaaaaataattaattatttatttaatttgaaaataaatttagacagcgaattatacgcacaaaatttggtcacgaaagattggcacaacagacaaattatgccaatgttcgcaaaattgtcacaacaaataacaacggaggcctataaaatgaacgaattaacagcgacaaaaaaagtttcattgaaaataaaataaaaattaattaattatttaattaagttggaaaaatatttacgcaattttggaaacgcaaatgaccgagaagaaaatgaggagcaaataaa

SEQ ID NO: 64123 - DNA, 1597 bp, Heterodera glycines
atgcgagatgagctgttggagcagcacacgctcagaatgatcagactgaaccgatcggaaaatgcattttccgaatttctgaaaaattcagtggccgaagagaaggcggctgtgtacagactgaacagattttacatggacaaggacagaaacactggacaggaattgtccttaaatatattccacaaatacgcggaacttcaaaggatgtgccgaaacggtaatattaacgcattaattaaccaatcgggcattttggacaatgttttagaattgtcagttggccaaatcacaaaaatagaagtgcgaaattacattcgctttttggattaccaaaatgaagagattgtctggctgaaggccgaactgttgcttaacatgcttgcctattataaatggcatgtgtttaagggtttgattctgtttaagattaggctcaagagtctcgaaaagaaaatttcgcggtttttagtccggaaatcggaatggacttttcaatgattccaaaacaaattttttttcgtatttactcaaaggaaacgagaacattgatcgttgtgtgccaccattttgcgcttaattttattttttgatttctttaaatttgaaagtaaaaaataaacaaattttcttaggtttacaattcataaagcaaaaattttgccaaaaagtgacgaacaagaaattttggacgaagcatttacaataaccgaaaatgggatggattctgtgcccgacttgaacagtgtccatgccattaatacttcaatgcaacatctgttcacattgggagcaattaagggcaaattaggcggaattggacaaccagatgattggtggcacgccgtaatcccatttttggcttcgactcacaacgaaactctgaaagagcttcttgttcaaaatgacgaatttcgggcaaaactgaaaagtatgaacaaattggggcgaaaaagcagtaaaattagcggaaaatttaattttgccaatttttagcaatttacattgatagagaacggttggagagaatgattccaaaagattcgcaaatgtttgaacaactcattattgaaagcatggcgaaaaaagggacaaaaaacttgacggattacggtgagttttacaaaatgccaacaattgacaatttaaaaattgaaaaacgaatttagaaaatgccgaatcattcaacataatgcaattatatgagaagctaatactgggggatgaggacaatggcgaaaccaaagacaatttgacactttctgttttctgtttttacttcgaaattttactggaaaatcttttggcgaaactccgcccattaaaagcgaaggaaaatgcgaaattaaagcgaatggcaattgaagttgaggtcgaaaatgccaaattgaagcaaattctttcaaaattgagcggaaaagacggaaaattggccaaagtgtgctatttggaaagctttaccttatgggctgcgcagaacgaagcgttggcaaatgaaaacgaaacgaagcaattgacaagcagcgaaatggtggataatttgtgggaattggaaaaagtgaaacgaattaaaaaaatgaattcgataaataattaa

SEQ ID NO: 64124 - DNA, 476 bp, Heterodera glycines
atgggaaaacaattggaaaatggtgacaaaatggacaaaacatcaaaaaagcatatcgaaaaattcgttgatgaccgaaaaatgttgcattacagcgcaatttcatttttattattgaccaattcaaaggaagaaaaaggcgaaataaaaattgggagaaataatgcaaaaggcacagcctataaatggtaatttaaaatctatattttaattaaaataatttaaaaaataatttaggaaaatgtctgagtattttgatgagagcaaatttaatgttgaaacagaatttgcttataaaatgcgaacattgcgctctaaaaatttgatgaaaaataacgaaaaaattctttcaattaaaaatgaaattgcaaaattaattggagaaaatttggtagaagagcttgaattccaacatccaataataatgtcaattggtaataaaagcttaagcgaaaattaattatcaaaggaataaa

SEQ ID NO: 64125 - DNA, 501 bp, Heterodera glycines
atgatggtacttttggagaattcattttgtttattatttttgacaatttttttatccgtctgttctttaaaaggcgctaaaaaaagtaatgaaatttttaattttaaaatattttaaaactttttaagcatttggcattgatcaaattgactgtttttatgcaaatttttttgggctatcatttgaaactgaaaaaaaatgtgacaaaaattttgaagaaatttcgctaacaaaaattgaagagattatttattttaatgaaatgaatgaattattaaaagcggtaaaaacaaaagaaaatttggacgcggaacacaaaaaattgtcggaaaaaacattggaacaatttttgaacattgagaatttgtatcaaaattcaacgcaaatcgtgaaaagctgtgaatattggaaatttttcctcaatattcgcagtgtttttggcatgttttaaatataatttaattttaaatcattaaaatatgtttttttcgaattaataaa

SEQ ID NO: 64126 - DNA, 410 bp, Heterodera glycines
atgtttgagcaaggtatagcactggaagtaattgaacgaacagtaaatgttccaactgttgaattgaaatgccgttttgcacgactttgtaagaaaatagcaataggcgttataaattaaaaaaataaatttaacattttttaaatataattattagggatggaaattttatgtaacacatatttttcctggattccccaaatgctctgaatagtagaaaaaaaacacattcttttttgtgtttgcgaacaaaaatcgggacttttatttatatatttttacatatttcgagctttttagcatatttacacatttcgggctttttgtacatattttggactttttagcaatttctccataaatttttgagaatttttaaaattaatcaaaatttcttgtgaaaaattaaa

SEQ ID NO: 64127 - DNA, 697 bp, Heterodera glycines
gacgggtgcgcatgactttctgaaaaaaatatttatgaaacaaaaaaatcgattttttcaagtgtccgtttggggtactcaaacatttatggggagcaaaaatccaacgcagaattaaagtacaggctatagggaagctattcccgaaggattcggtctccccataaatctgggcgcatcggttcggggggactgccccgaaaacaaaaaaatcgattttttcaagtgtccgtttggggtactcaaacaattatggggagcaaaaatccaacgcagaattaaagtacaggctatagggaagctattccggaaggattcggtctccccataaatctgggcgcatcggttcggggggactgccccgaaaacaaaaaaatcgattttttcaagtgtccgtttggggtactcaaacaattatggggagcaaaaatccaacgcagaattaaagtacaggctatagggaagctattcccgaaggattcggtctccccataaatctgggcgcatcggctcggggggactgccccgaaaacaaaaaaatcgattttttcaagtgtccgtttggggtactcaaacaattatggggagcaaaaatccaacgcagaattaaagtacaggctatagggaagctattcccgaaggattcggtctccccataaatctgggcgcatcggttcggggggactgccccgaaaac

SEQ ID NO: 64128 - DNA, 589 bp, Heterodera glycines
atggccattcaaatgttcagcagctgcagcttaatcacttttgccattcttcttttttctatgttgattgaggcaagattcttggacaaacgaagtgagaagccgctaaaatttgcataattaggcccaatttggtattggtggttttatttttttgacagattttaagaggtatcttaacagctgattttgtttgacacttaattagcgcattaattaattgcttgggtgggaaggaatttccggttttttagcctctaatttccccatttttttggtttacattttaaaacaaaaataaattaaattttattttagtccaagtaaatcaaatgcattaattacctcctgtattaatttttaaatattctctgaggtgccaacattcgcttcgtcgttttggcattatttccctcttcttcagccgataattgcttttacggcatgcgccatcgcaacatcccttcgggtggccttgtcgcgaaaatgaccaagtggaacacgttcaacatgaagaagggcgaccggatgaatgagcacgactgtcgcgggtcgtttgccggctgtcagacgtattcatgcatcgatg

SEQ ID NO: 64129 - DNA, 753 bp, Heterodera glycines
atggaaataataataattttattaaggattacaaatgcggataaattttgtttgttttatgcattggtggcgtcaaagctttatttggaagagcatcgaaacatttttaatcgatttatgaaaaatattgtgagacagagggattcagctattgaacttttacataattgtggaattgatattaacgaatatagctatggtgtggagcaattgccgaatgttcagaaatattgggtgggtttaaatgaaaaaatgcaaaattaataaatttttcaggatgagatttaccccggaaagtaccgggttgtggcgtttgaaaaatctgcggatccgaggaaatcgatacgtgttttgtggaaaggtcctatggggcgtgaaaatgtcgtgccgttattcttggagaatggccattgggatggtctgaagaatttcgtctgcttttttaatcgagggaggaaattctgcattgattgcgaatgtttttacgacaaggatgttaagcatgctttcgattgccgggcgagatgttattattgcaatagagtgggaggaatgccatgtgaaaaggagagtggagtgaagattgaatgcacgaagtgtcgacgttacttttacaattgggaatgctataattatcatcagggacatcagacttgcaacttatggaagcgctgtgtaatttgtgacaagacatatttatttaacccgaagaaggaacatgaatgcggagagacctattgccaactttgtagt

SEQ ID NO: 64130 - DNA, 664 bp, Heterodera glycines
aaacaaaaaaatcgattttttcaagtgtccgtttgagggtactcaaacaattatgtgggagcaaaaatccaacgcagaattaaagtacaggttatagggaagctattcccgaaggattcggtctccccataaatctgggcgcatcggttcggggggactgcccctaaaacaaaaaaatcgattttttcaagtgtccgtttggggtactcaaacatttatggggagcaaaaatccaacgcagaattaaagtacaggctatagggaagctattcccgaaggattcggtctccccataaatctgggcgcatcggttcggggggactgccccgaaaacaaaaaaatcgattttttcaagtgtccgtttggggtactcaaacaattatggggagcaaaaatccaacgcagaattaaagtacaggctatagggaagctattcccgaaggattcggtctccccataaatctgggcgcatcggttcggggggactgccccgaaaacaaaaataaatcgattttttcaagtgtccgtttggggtactcaaacaattatggggagcaaaaatccaacgcagaattaaagtacaggctatagtgaagctattccggaaggattcggtctccccataaatctgggcgcatcggttcagggggactgccccgaaaac

SEQ ID NO: 64131 - DNA, 189 bp, Heterodera glycines
tgcgtcgacgtcggttccatcgttttgtgcgcctcctatttggacattccgccggagccgatcagcagcagcagtgacgagaaaagcaacgggaaaagaaagaagcaaaagggacagacgaaaaaagaagggcccaaaattgtgacggatgtccacgaatttgggtgcattccatggagaatgttttga

SEQ ID NO: 64132 - DNA, 392 bp, Heterodera glycines
cggttacgtcggcatcaaattttgccccgaatggtattggttttgcttaaattccattaaccattcccaccaaaagcaataacatgctttacccgcgtgaagacaaacaaaatcggcagcttatgtacgtttgtcggaattgtgagcacagcgaaccggcggacaatccgtgcatttatgtgaacaaactgactcacgaagtcgagtgcgttttgtagtcaaattgcaatgaattattttaattgatcacccttaatgagttaagtgagctgacacaaattgtggcagatgttattcacgacccgactctgcccaagacggaggagcacccgtgccccaaatgcaaaaacgccgagtcggtgttcttccaggcgcagtcgcggcgagcggag

SEQ ID NO: 64133 - DNA, 389 bp, Heterodera glycines
atgccaaaacaaaacgaaatcgttttaaaatattcctttctggacttgacttggtttcttgatatcgaagctgttttctacgctatttctaaaacggttataccaaaccccagatttttgaatccggttttcagaaaaaatgccttgtggtgaaaacaatatttcacatttcactccataactttgtgagttcggcacggatcgagaccgggataagaccattggaaagagcagctcgagctctacaagaaggtatggaaagaaaaaatagttatttctgggactttttcagaaatcagaattaattctccaatgtggcccaaattttaggcccccagccacagccccttgcttctcccagtttataagtcttggatttgtcaaataaa

SEQ ID NO: 64134 - DNA, 388 bp, Heterodera glycines; identical to SEQ ID NO: 59796

SEQ ID NO: 64135 - DNA, 860 bp, Heterodera glycines
atgaacaggtctttggtaaaatgccaaatttggcataattttcaaaaatcctttaaggtttggccctgctttgagccggcaaaatggcaggaaaagcgttgcgggggatgcaccgctttgggcaactgcgattttgaccagggccaaccgggcgaaacgtcggatgatgccgagaaacaacagccgcagaaggccatcaacaacaacacttccgccgacagcaacagaaacggggcatcggcttggtggccatgcctttgtgcacccgcaatacggtaagttggacagacactgtatgtacaatatttcaatcgactgctgtttggtgagtatgactaatcacttggaattgtttgggcgatcatattttacataaaatttaattttaacttttttttaattctcagaatttgcgttcgtgttgatgacaatttgccagaaactgttggctctccgccgttggcagccgacaactcatccgacccttctccttcttctgctgatccgccattgcttgaacgcgtgcccaaaatttgggagttgaaaaaggcggaagtgaagcgaatggaaacgccggaacagaaggaggcgagggaagaagcatatggactgagggtaatgagaaaacgaacggacaattaaagcgtttaattttaaattaattacctaaatggcattttcatttccttttattatttaaatttgggttactccccgaccctcggcggagattaaagtcggatatcatggagaaaattcctcaacaagatttttccgggatacctggacaaatttagaagattacggagagaacaccttctttggtgaggaaattgaaaaaaaaatagaattttttttta

SEQ ID NO: 64136 - DNA, 2879 bp, Heterodera glycines
ttttaaagggtgtgtatgatccgatcgcaattcgttcaaaagctgtcgagaatctcgtgtttgctgtctcacaaatgagtgaatacgaacagagtcagatgggctacagtaagcgcgagttcatcaccaagtaaacaatgcacgaacaatcaaatggttatttgtgattatatgacggaaatttaacactaataataatcactgaccctttatgtacttttgatagttaatttttattaaatataattaaaatatttttatttaatatttatttttaagatgcagtttcaatgggagggaatgttcggtggaggaagacttctcattgtatgtggacccgacttatggcaactgtttcacattcaatgcccacccggacaaaaatgtgttgagtgaacgagccgggccaaattatggtaaaaatgcgtttcaattaaaaaacaaaatgaaaaatgccatttaagaaatttgaaatctttgcaaatatttaggcctccgtttccaagtttttgtcaatgtcagcgactatttgcccacgacagaagctgccggtgttcgcattactgtgcataagtcaatgcgtggcgtactgtactttttgatttcaattcttgtttttagtcctgaagaacagccctttccggacacacatggccataggaatgaatttgcttattttcaaaaaaatttaaaataaattctttttagtgctccaactggcttcgttagctcatttggcatccgtttgaagtgagaataaaaaaacatttaattattttgaaaagaaaacattagcttaatgatttaaaaattaaataaaaatatataataattttgaagatgtgttaatcggttgccaagtccatacggcgaatgtgttgagcaaggcaaaactgatgaatatatttatcgggacaaggaatattccactgaggtaaaatcttgcaaaatcctgtaataatcaaaagttatccaaatgtgacaaatccataacctaaattagcgaatttaattattgaaaatccccttctgctgaaggggtgccaacgctcgtgcatccaacggatgctggtcagaaagtgcgggtaagaagaacagttgggaaacagattataataaatgaaatataataattaataaatattaattactaggaataaaatttataataataaattaataataataaggataattaatctgcaaatattctatttttggcaaatcaacagatgtggcgacccgcgttttcctcgctatttgaacttcagcaattgtcccgtgggcgacccgcggctgagttagtgttaatcttcaagaaattatttaaatgataacacaaaaatggaattcatacgcaaattgtaaatgagaattgcttgaaataatgaaaaatcagctgaaaaagattccgttttaaagaaacaattatcaattataggaccagcaataaagtttttttagcaaaaataattaattagttactaacaatgcatttaaattcaaatttgcaggagagtgtctccgacgtgaaatgcacagcgctgcgcggtctgccactcagcccgactgcgtgtgccgacagccgtgtcggtgcgatcaaataaaacaattaattttgattgcatttaattagaaaattaatccataataaaaaaagttctaacttttcttcagtgagcaggtgttcagcattacgtacagttgtgccaggtaaatattgtaaaattcgaaatgtttagctttcaaattccgggagggggtgggggggggtaccgttttgttaaagtatttctggtcgtttcccctctgtcataatgagaggccatttttatgaaaaaatattctgggaatgcgataccgacaattcatctgatcattttttcttctcggtctcaagtctatctcagtccatttgagctgttaaatccctttctcatttacttaatttaatattgaatttgctattatttttataatttggcgttttttcattattttctcatgctttattaaatttattcaataaattaattcaacagatggccctccagcgatttggcattgcacggcgaatgcgacccgtcgctgagcggtgcgcaatgtctgcagttccatcgagaacagtccgccattgtcgaggtgtactttgaacaattgaactacgagagtttgcaggagagcgaagcatacggagtaaaaacgaaaatttatttaaaattaaagaagggagggggaggaggggctaatgcttaatggggaaatatgtccagcggaaggcaaagcggaccaactgcgtttaggaaaagttagaaaccatcaacaaagttggtatcattaaaatgctctaaaaagctttacagctaaccaaaactcataatgatttgcaaagaagtaaacaattaaaattaagaatatacaaaaattctgacttttctgcagtttcaggtcttaatttttatctggttgttaatctcatagaaataccttacaaatacagtctaaatatagatgaacaaagaacaaatgttagctacaaaaagccattaaataccacaaatttggctttctgtctcttaaagtcacaatcaaaaatctcgagtaattgttgcgagaagttgttactttttttcttgtaacaatatcaaaaatattttgctgttttcccatagatgccaaatttgctgtctgactttggcggacagcttggcctatggatgggtgtttcagtgatcacaatcatggaagttggcattctaatcagtgagctgctggttttgttttttgtgccaaaaatggtcacttggctgagtcgattgttgaacattgtcgttggcactgatcgggtgccgtcgggcgatggcccaatgttgccttct

SEQ ID NO: 64137 - DNA, 791 bp, Heterodera glycines
atggaccgcgtggtgcccgtgtccgccttcggaaatccggcacttggcgaattttacaaagtgatgccgtcgagcggacttcgagttcggttttttctttattttgtcattttctcccatttttgggtgcaaaaatgtcatagaattacaaattccatacatttgaattgccatggattatttaaattttttctagcgaggcttgtatcacatctttttaatatttttttctgggaaaaatcacaatttgaccaattctgaaaccggactcgaattggaacaaaagttcacatttttcaacaagttcacatttacgcaacaaaatccattcaatgcaaagaagtggacagaatgagttttcgactttttgttcgagttcgaatcatgtattcaaacatgttttcagaaaaattttcttttaaaattctcaaaattttcccagcgtttgcatcgccaggtcacaaatttgaaagcccccgcccctaattgacaaactacgaattattggctctaatttcctcctttttttacagttggaaatccgtcacgaggactacaagcagcagttgggggacatcaaacaaacttattggattgctgaagtgaaagaggcaaaccctatatttgattacttttatgacagtttttatgtccaaccttcgaattttgctgggcaacaaaataagggacgatcgaaggaacaacaaaaaaaaaactgtgccaaattggcatttcgttgtcttcaattagcatcgaataatcttgataatgctgtgtccctttctctttag

SEQ ID NO: 64138 - DNA, 120 bp, Heterodera glycines
ggttcgatgaaacttttaaaatatacgcctaaactttttggcctgtttaaaaaggaattaaaaatttttaaaaattttattcatctcccttttgatagaaaaagcatcagagtgccttca

SEQ ID NO: 64139 - DNA, 70 bp, Heterodera glycines
gtttcagagcacgttctaaaaaatatttatgaattaattttgcaaaataataaataattaatgaaaaagt

SEQ ID NO: 64140 - DNA, 1317 bp, Heterodera glycines
atgatcgatgacattttcacggataaaaatggtcaatttgaggctccagtaggcaaggaaacttttaattcgataaaaaattgcaaacgagctgtttatattggattttacactgacaaagcatgggtaagcagcgccaaaaccttaccgaatgccaaaaaatgaaaagtgccgacagaaaatgtttaattttcctatttatttaatggcatttttttttggttgtttttttagcttattattagtcaagcatttttcaaaaaaattttttggtcaaaaaatgacagtcctatttattcaagacttaatttaattttaaaaaaatttagttaactcaaaagttgtattcgcttgcccaaaatacacttgatgccaaaaattcgagtattaagaaaatttatgccaaagttgaaacaaatgattgcctgagatttagcaaaaagttaaaaaccaaggaggaattcatgaacgaattcaaggtaaaataaataaaatacccaaaaataaataaattgaatgtcagtgcttttaaggttagctttgatcaaaaaactatctacatcaacaatgcagaagaaaaagctgaaattaagagcaataaatattttaatgaagaaacatatcgcatttcaagagaatattttgctggtcagttttatttattttttaaataaaaaaaataaaataatttcgctaatcccaaaattataagtccaattaattgattaatttaatttaatttttttttttttttgctattttttatacttccaagctctcgtctagccgaattttttttttacccaccatatcttccacacagatattaagaagtggacaaaaaaattgaaaatatagaaggaaaaaaattatgaatttgaatttttcactgaaaattgcataaagaatttagtattattggtgtataataaaaaataaataaataataataatttaacataaaacaaaatgaattttggttgagaaaaatttttataatttcaaaaaatgaacaataaaatcgaaagtgttatttaagaaaaaagttcaagcgaagaagcaagctcatctgcagcatcatcaaccaagcaaaaatggaagcaattaggaaagatggtcaaatcacttccattgttgggcggaaaggacaacgacaaaaagaaatttgaacagtataaaaagaagccacacgtttttgatatatataaaaaggacagtaggggatgtgaagatacagtaggatgttgtaacgtaaggatgggatttggatggaacacaaagggagttgaacggatttttttcttccgattttcttga

SEQ ID NO: 64141 - DNA, 508 bp, Heterodera glycines
atgaaaatacgccctaaaatcagaacatttcttagaaataagaacataaagaaaccctgcattaatcagataaaaataaattcaaatgaaaacgtcaaccggtatcgaactcctaacaagaaatacggttagtgttgaagcactaaccactaaaccacaaatatattggaagttaacagcaaaatttactttatttcataaaaaatttgtcaaagatggttaaaaattcattgcgggggtcagagtcgcgggggcggggacgggggtgacgggggcggggtccgaactctacttctaattgaaataaaatgcgaaaaaaatgacctcaaaaaattaactgttgcagttgcaaattgagtacatttcaagccttttgagataaagctcatacgattttcggcaaggaaatttttgtaaaagggtcggtgttaggtcgagcctaaaaaagtatcaatgataataataattaaattaattaatattttaattttatttgctgaataataaa

SEQ ID NO: 64142 - DNA, 160 bp, Heterodera glycines
atggtgcaatatgtcaagggaaatgctcaactgaatgccgacattgtgaacagtgattcgtcaaaaaattgtccacttggagaaccgactttttgggaaaagaattttctgggcaagaaaaaatcatttaaaggatgccataattttcggtgtttggatg

SEQ ID NO: 64143 - DNA, 452 bp, Heterodera glycines
atggcttcggtcgggcaattcgttgttctccgtgcagcaggcgcggtacgctttgatcagtccgaccccgtcgaggaaaatgggccgcaggaaagggtaactgagcaacgcacggccgtccgaatgggccgggggcagaaaggtgcgtttgtgctcaaccactccgatgggttgcgtggtgtagtcgtaaatgatggcctgcctgggcaatttgtcggcacggaaggtgctcggaactgtgaactacggcgtatttgaagggaaactccagttcctccgatgaagaatgccataaatttccagaattcgctggcattggccatgccccgaagcaaaaatgctgggctaatcccccggatgatggaccgactccggaacagatcgtccgcccacccaccatttcccaccaggaataccaaaaaattcaaacttttgaaaccccaaaaaattaa

SEQ ID NO: 64144 - DNA, 412 bp, Heterodera glycines
atgcacggatgtttcgtcaccacggtgccccattatttgatgggaatgccgcacgatttgcgctattttctgtcggacaacgaccaccgaccgtgggaccatgtgagtgaataagggcaagggaattgaatgagtgtgtaaaaagcgtcgccggattttgcccttttggctaattaattaacgtcaattagtgatggctttttcttccatattcttttcattctcccatcgcttttttcagtgcgctgagcgtcttcttcagcccttttacgaccacaaagggaacactgtgtttttctcgttgtacaacagcaaaaaccaatgcgtggacagtgtggtgctaatggacgaagtcaactcgagggaccaatttgaggaggtcgaacggcaccagctgagcttcatggaacag

SEQ ID NO: 64145 - DNA, 2560 bp, Heterodera glycines
atgttgattcattcattggtttcgtgtcccttttctcccggcagatgccgcgtcaacaatttcactgatacggattattcctccgtcccgctgggcttctccatcccgcgagtcaactgcgaaggggtcctcaacaagtcggaatgtcagttcgaaaagtgttcattgggagtggatggcccccgctgcacagagacgggcaatggcttcgtttttgaccgttccatcgtcacttattccgccattgaaagggtttgacatttgcctaactctctctgactgttcatgtttatttttctcgtttttcagtgggaattcgtgtgcgatcggcaatatctcaaggcgatgattcagtcatcgtattacattggtcagatgatgggttcgctcatcttcggctttcttggcgacaggtttcattcattttgtattttgttggccatgtcattttcctttttaccgcttcgctgtcctaggattggacgcaaaaaggtgtttttcatcgccattgtcctccaaattatcggcagttccggcatggcagttgcccctttttggcaaatgtatgccgtttaccgcgcctgtgtcggctttgcccatcctggtcatttaccattattttaaattaatatgtcgaaaataatttatgtatttaggtatttttgtcatcgcagtcatcatcggttgttaatttttttttttcgtttcttttaaccccaatttacggttatcaaaggaatggaattggttggcccaagcaaaaggaaaatcgcttcgctgttcaccggcgttttctttgctgttggccaagttttactcggccttttggctttttttattcggaattatcaataccttcatgcttcaattgctgcttttgccaccattttcctcttttattggtggtgcgtcttttaatccatctctattaagcattgtttattccccaaatcttccttttcttttaagggttgtgcctgaaagtccccgttggctcgtctctcaaaagcgttacgtcgaagctgaccaaattttgcgaaatgcggcacgcattaacaaaagggaacttccggacaaatggtgggacgacattgaggaagaagcaaatggcggaggggaaaaaagggcggatgaatgcacagcacagaagcggacgacgcgcaagcataattacacggaccttttgagaacgccgaaaatacggcgcatttccttcacggcattcttttgttggtcggcttttaacttttctaattggtccccttttttatttgtatttggttttactttatttctcctcgcttttttaggccggtcgtttcgatgctttactacggcatgtcaatgaaggtatgttcgtttacattgtttggttctgtttttctgtttctcgcttatttcaatttttagactgattttctaggcggtgacatgtacatgacattcatttttggcggattggttgaaattccggctctttttttgatgtattttctgattgatcgcatcggtcggaagccaatcattgccggagggttcacaatcgctgcactttgcatgatctcaaatttgttacttggtgaaaaaggtaaagcagttcatttaaattttattcgaataattcttccatccatatttgtgagaaaaagtgtaaaacgtgggaattagatttttttgaaattttctgattgtgagtatgcaaaattttttaaagaatttctgcagcaaggttttgtcccgttcccataacggttttccactaatttatgttttccaccatttcccatgtctttccttaacatcctctaccatttttcagtgaacacaatggtggcagttgcccaatttctcaccggaaaagcttcgagtaccgtcacttacgccactctgtacaccatcacaccggtgttcagtatttcttggcatttcttactgtcttcgttttcttacctaggaactgttcccgaccgtaattcgcaacatggccaccagcgcctgttctgtgatggctcggtttggcgccattttggcctctttgcttatgttttggctggtcgatgaattcggcaaaaatgtggtcagattttcttccacttctttggaatcgtcgcaataaatacacttgaaatggttgaatttttcagataatttatcctttcgccattttgggcatttgtgccgccgccgtcgtcatcatttttttgcccgaaacgactggcatgaagtttcttgaaacgatagacgaagtcgaaggatggacgaagaatcatgaggaaatgcagccgctgtcctctcaatcgctgcagggcacaaaaagtgccagtggcgaaatcaaaacggagtgagtgaacattatttgcaatttttgatcaaattagatttctaacaaaagccggaacttgtgtggtttacctgacagatttcacatacattttcaaatgcctataaatgtattaattttacagtttttttaagcatggaattattaaaagacttcaatattcgagaaattgatagacttcctgtatcaagagtaccctcatgggcaagatgcccatga

SEQ ID NO: 64146 - DNA, 634 bp, Heterodera glycines
atgccaagaaatactgaacaccggtgtgatggtgtacagagtggcgtaagtgacggtactcgaagcttttccggtgagaaattgggcaactgccaccattgtgttcactgaaaaatggtagaggatgttaaggaaagacatgggaaatggtggaaaacataaattagtggaaaaccgttatgggaacgggacaaaaccttgctgcagaaattctttaaaaaattttgcatactcacaatcagaaaatttcaaaaaaatctaattcccacgttttacactttttctcacaaatatggatggaagaattattcgaataaaatttaaatgaactgctttacctttttcaccaagtaacaaatttgagatcatgcaaagtgcagcgattgtgaaccctccggcaatgattggcttccgaccgatgcgatcaatcagaaaatacatcaaaaaaagagccggaatttcaaccaatccgccaaaaatgaatgtcatgtacatgtcaccgcctagaaaatcagtctaaaaattgaaataagcgagaaacagaaaaacagaaccaaacaatgtaaacgaacataccttcattgacatgccgtagtaaagcatcgaaacgaccggcctaaaaaagcgaggagaa

SEQ ID NO: 64147 - DNA, 1827 bp, Heterodera glycines
atggtatgtgaaccgaatggcatcgagtttaaggaggagggcagtgagtccgagagttgttgctcttcgattgtccaggtgtacaacagtgggagttgtggaagcaaaaaatggactgtggaagcgctgtacgaaagctgtcggatgaaagtgcgaatgacgggatcgggtttaatgagtgagtgcacacttatgataccgctggaaaatgggctaatactgacaataagtttagtggatgccgaaattatatcgaagcggaaggagccggatggaacatacaggttttatgtgcattacgtggattgtaatcggcgcttggacgagtgggtagcggaggaccggatcgatctcatgtctgttcgtattccccaacgcgtgaagaagtcagcatcacagcaggcaattgctcagtcgttggaccaatcattcgaccaaaattttgcgataagtgacgcacaaaggtaccagaagtacttataaatgtttttcttaaacaattccttcagctcacgtagctcaactcccgaaaaagtgattgaaatgtttcgaacaccgactcgatcactgaccggaagtcgaaagaggaagcacttaggacacaccatcgaatacgtcgatgccaattcaacctcttccgaatgctgtccttccgtcaccacaaatggtctacctaattccacagcaccaagcggtatcactgaacaattgccttctgtgtttcacttcccactatttaagttcccagtttgcgtggttccatgtcaaaggccagtttgcttttcccttaaaataataaattctgacgactaaaactattatttgaatttccaggtcggtcatagtgaagatgcgctcactcggattcgcaatgtggagaaagttcagctgggccgaaacatcattcagccatggtacttttcgccctaccccaaggaaatgacccatttgccctgcatttacctctgcgagttttgtttgacctatctcaagagtcagtcggcactcgccagacacgttgtgagactaattgcccatcctctttaatgtccaaaatttgtgaagaaaaaatgcaacttatattacccgcctggaaacgaaatttaccggaaagattcaatttcattttatgagattgacggtcggaaaaataaggtggaattgaagatctttttgttattctctctaatttattttagatttatgcccaaaatttgtgtctgctggcaaagctttttttggaccacaaaacactttattacgacacggaccctttcctgttttacgtgttgaccgaatacgaccagaagggctttcatatcgtaggatacttctccaaggtacattcttctaaatgtcaaaaatatctatattttgttaggaaaaagagtctgccgaggagtataacgtcgcctgcattttggtgttgccaccctatcaaaaacgcgggtacggccgtttgttgattgaattcagttacgaactttcgaagattgagggcaggacaggatctccaggtagggcattttaaatccgcggcatttcagtaacaatgtgttccagaaaagcctctttctgacctcggattggtactcatttcacattattatttttcaaataacatgaccaattaagctttcttaccgctcttattggttccaaacaatccttgagacaatgctaaaaattgtgagccaacaaggacggcccattccgtcgcagggcgaggacggcgaggaggaggaggacacgcaagtgtcactgtccatcatggacctttgcgagttgaccagcattcgcaaggaggacgttttgtctacacttcag

SEQ ID NO: 64148 - DNA, 1117 bp, Heterodera glycines
atgccatcgtccagcgggtcggaaaagggtaatggacgcaatggcgttcgtggcgaggaagaagtgaagggaggaaaagaaattgctagcaagacacttaagtgagattttggcctttctccttttgtgtattattttacttctttaagtattcaatcgaagcgtttttatttggacgtcaagcaaaatgatcgtggacgtttcgtcaaattggctgaggtcttattataattaatagaaaaaattacaagtaatttacgcacttcgcttgtataccaaccagtatttgactgattgtttcaggttgctatgaatggtcgaaagaatcgtttgttcatgtcaatgcgaatttgcaagaatattaaggaattgttggggaagtttgaggggcacgtgccagcgtcgggtaacatttttttttattgaacactacttgcaagccgaacaaacaattaagaggaagtgaatgggaaagcggagaatgtgaccattcaatctgaatctatcgtgaccgagagacgtcgatatttcatcgaccttcgcgaaaatcggcgtggttcctttttgcggattactcagctcgagacgcattccgggattcgcaactcagtggcattgccatttgaggggatcggccaattgcacgatgcactggactcaattctggaggaatatggcgaagggttcattggttaggcaactcacttctacgattacaaaaactttttccttaagaggaggaagccgaacttccccattctcagatgattcgtactgatgggaaaagctttttttttgatcctggccacaattctcgcggggactttctgaaaatcaccgaggtatgtttgtttgtagctaataatattttgagtaataatttgaacgactaatttagttgaagtcattcatgggagtgcgcaattccgtcgtcctttcaatcagagcaattccgcaattcactcaagtcctctccaagctctacgatgactttcaggagctcagagccgtagaggaagtgaacgtgaacaatgtgcttaagaaggagccgccgaaggaagcgatcaccgattccaacgaagagtcacccaaaaaagagaccaagtccactgattga

SEQ ID NO: 64149 - DNA, 1101 bp, Heterodera glycines
atggtgaaatgccatccggataaattggcaaagaaagttcagtcattggatgcaccaaagggcgcatataaaacacttattttggaggtgagtgagcactggcgagaatatgcaggaaaaaagtttaatcggtttcatttttgagtaaaaatggcaaaccaatggtttcgtaaaaaataattaagggttacgtgttcattgaccaaagttcagtgcttcataaagaacagcccgattatgtcctgtaccaagaaatcgtacaaatggcacataaaaaatgtgtaagaaatgtcgcttctgttgaacccgagtggatttctgattttgttactttttcatcataattttatttctgtgtgtaattttacaacaaacatttgttctctgtgcaaatattcttttatttttgctttactttttattttttattaattgttttaagagttcaaaatgaataatgtgaccgctaagttgccgtttctttaccgctttctgggtcatcatttaagaaattcaaaacgacaaatagcggtctctccagtagatcttgtacgacaaaaaaatgttttcatgaggcgtgaaatggattttttgcaaccgaccagcaaaatttcttccccatcggctgtttgtatactgaaaaattactttgttacttttgggtttgtcgaacaatctgatgtcggaaaggcggttcaaatagctgaggcaagtcttcaaaaggatatcgtgaattaggtaatcacaattcagtatcatttggatggttctataaatgctcgtctcatcttgacggtgccggagttacgtgaattatatgagtcggtgaagtcacagcaaagtgttctgattgagggacagaaaaccatccagccacttgaaaagtctatcgatcaaactacgatgcgaatttgggaggacatggagtgtggtcggaatcaatttttaggcttgcttgacaaattagttaaggtcttcgtgtgctcagagtaggccattcgactccattttacaacaatctcagagaattagttatacccattttcaatttggaagaatttttggaccgtatggactatgtattgatgagcgagaaataaa

SEQ ID NO: 64150 - DNA, 1592 bp, Heterodera glycines
atgttgcaacaatatcagcttgacgaagggaacatgaatttactaacttccattgcaagtagccaaaaagaagcaggcaatcaaaagtagttccatgtgttttgtcaaatatctcatatgtgtttcagacacaaaattgaagttgtgaaaaagctgagatgcgtttccggtgaaaaattgaaaaatatcagagcaacatcgaaacaactcaatcacattgaaacggacagcagttcttgtgaagaggactttagtgggaatggtgaacagcaacaacctgggaaaagcatagaacgaatgccaaagttgacgcatcaaattgaaacttgtttgctggcaggaaataacgcgcggactgcacagaatctcccaattgacaaaaacggtattttattttgattaattttctattaattgatcattcaattagcgcattttgagcaaaccattaattcttccctgttttaaatttcagaacaaagatatgaggctgcgtcaaaacaaaataaacagcatgccaaaggacaattgcaatgctccaacgccctttctcgcatcaaaggacgccaaattattgttccacgggacgaaaacattgaaaagaagagacgacaattaccaattaatgctgaggaacagccaattgttgaggcaatcaacgaatatcccgtggtcataatttgcggcgagactggttccgggaaaactacgcaaataccccaatttttgtatgaggctggctacacctccaatggacacttaattggagtgaccgaaccaaggcgtattgctgcgataagtatggcatcgcgagttggccacgagttggacaacgaaaaattggcatcataccaggtgaattacgaatcactaattaattacaatactaattggttatagatcagacatgaagggaatcgaagtgaagagacaaaaatactatttatgacggacggagtactcttgaaagagttgcagacggactttacactttcgcgttactcagtcgttgtcattgatgaggcgcacgaacgttccatttatagtgacgttttaattgggcttttgtcaaggatttgtgcgctcagaatgaaacgcggttatcctttaaaactgattatcatgtcggcaacactgaaacttcaggattttcttcgacaaaggtcaattcactttttttacagtgccaatttctttcttttagacttttttccatcagtcaaccaaaagttgtcagtgtccaagctcgtcagtttccagttacaatttattttgaacggcgcactccaacaaattatttggaagcaacattcaaaaaagtgtgtaaaatccacgaggaatacccagcgggtggcatccttgcgttcgtcacaggtcaacgtgaagtcacacatttggtcaaattgctagaaaacaaatacacaaaaatatctgcatcaaaattactgagaaaagagaaaatgaaaaagtgtcggaagaaagagacaaaagaggaggaggaagagggactactgcttgacaacgacgagttcggaacttcggatatggaccttgaagatgaggcgtggcaaaatacctttttttgggtctga

SEQ ID NO: 64151 - DNA, 1431 bp, Heterodera glycines
agcatttgccgccttctgaagcgggcgcgcaactcgtggagcgtgcactggtcgaagcatcgcgcatttctgaagaaattaaaaggcggccattcggcggattcatcgcttatgaggaagtgaaaagggcggtgacaaatggagacgcaaaagcggagggacggccggcaattcaaagctataaagtttacttacaattagtcagaaaaacgaaacataaattacttaattcaggaatactatccgtacgactttgtccaatttcggagcactgacaatgagcagcaattgaaagtgctcgagtttgatacattcagcgaagcagtggacaaattttactcgtcgatcgaaacacaaaaagcggaacaacgcattttgggagcagaaaaagaggcagaaaaaaaagtgcaggtaatggcaaaataagcgtaacgataaatgctgtgagctgtttgaagaatgtgcgacgcgaccacgaaaatcgtatccaagcattgagcgaagtgcaacaagtccaggaacgccgagcggagttggttttgctaaacaaagaattggtggagaaggcattgtaccttatgaggcaagcgatttttgccttttttgtcgtggacctcgtgacgaattgcattcgtattgttcagaattgccattgccaatatgagttgggcagacattgagccgtggctcaaaacgatagcggaacaacaccccgtcgtacgcagcatttccaagttgcaattgaactcgaaccggttatcttttagcattggtttgtttgcagcccaatctttaaagctttacgatgcgtctcagcgacccggaagaaactgatggatctacttttaatattgacatcgacattgggcttaatgcagaccaaaacgcacgacgcttttactctgaacggaaaatggcaagcgcaaaagaacaaaaaaccttcgcagcttcgaagacagcgctgaaatcggctcaaagccaggccaaaaataaacttaaccaggcaaaattaaacagacgagtcttgttatgatgaacaattggcactttcagatgaagacgaagaaaatgagtacgatccgagcacgcaaaagctattggttcgagaaattccactgggtgagctttgccaatttgtatttcttttggcgttacttaggtcctttcccttccattctcagtttattagttcggaccgttttttggtgctcgccgggagagatgcccaccagaatgagcttttggttaagcgttacatgcgttcttgtgacatttacgtacacgcagagattcagtcagttcggacttcgaactgtattttaattctattcttatttaagaggagctgcttcggttgtaattcgaaaccgcgaccgttccggcgctgaacctccgccacggacgctgaacgaagcagtaattcacagctaa

SEQ ID NO: 64152 - DNA, 368 bp, Heterodera glycines
atgcatcagcgtaaccctctgtcctatgcgcagcaactttccatgtcaacaaatgaccatccagcaatttccggcgtggacttcccacgagtggtattttataattgaattcataatttttttttttgattttcaggcattcagttcttcatggggtggaaggacgggaaattcggctttaattctcgcggtcgatggagatttgctcgttcatgagcttttgctatgagatggcggctatgtctaacaaaaaacgtttatttatttaagcatccagcaaaatttttatgtatttcaacttttattttctaatgcctttattgattgcatttttacatgtaaaataatctcatttgataaatgattga

SEQ ID NO: 64153 - DNA, 1488 bp, Heterodera glycines
atgtcgtcagctaattcctcttctgcgacagcctcaacatcgggaccaaccaacaaacgtcaaagaatgcggtcggaatgcaatgtttccaatgcatcggttcaaaaacagaatttaggcaataatcggtattcaatgactttccaacttattatggtaactcatcgattttctttaggcattttgccaatcatcgaccacgttatcgccaaccaaaaagggataatcggcggcttttagtcccgggtttggtttccaattgtcctgtcagaattcgttctgctgaactcagtgatttacccgggtttgttttttcttttgccattttctgagccctttttagtttctcatatgacccaattacgaagaaatactaccgaattttggagaatggtcccggacgtgtaagtcaaaattcgaactacacacatttatgttatgttcttaagcccccagggtcaactctccaacatttacgcaatttagccgtacgagccggaaacacagagacatcatcgaattctgcaacttcctgctttaagccaaacaggaaccagtcagcggatatttccaatttgccaaattatctacaacaactccaactcggtcctggcggtagttcgaccacgagaagaaccgggcgtttcgtggaggaaaggcggcttcgtcatgttaagcaacagcccagctatagctttgaggtgagttctgttattttattggatcgggtgggttactcccgttgtatcttttttatgctttatttttaagtaatcgcttttaaacaggtttccggcacttggggtcagcgcttctcgagttgccaatttctggacgtgtcggaggatggacgaactttgattggatgctggtgatactttttcagaaatcactagcacctttttttttgtaggacttcagagcaaaacaatcttttcgaggggcactgttctcgtgtgctatccttcggcgtcactgttgacccaaacacagccaaaaaagacactcagcgaatggcactcgccgaagatgttggggacatggcatcactgttggactccaatgggaaataccgctgcaacacctatgggtttttggatgcgaatgcttatccattttttatgctattctctttcagattgtgctttgagccaatagacaatgagatttgcttgggctcttccaaccgaattctcattgacatggtcacttttttttaaaattaattcaaaatttcatttcgttttcggtggtgtaatagcacttagaagtctctaaaattaattcaaaatcacaaaattcttttttgaggtgcttgccccggctgaccgtgacgtcacttgccttctctttgccactgctcgttctttttaccaggaacaacaacattccgtcggatcttgtccaaaaattgtaaccaaatgcacggttaacttgcgtcccattgaattcaatctttcggaggaggtaaatgttctatcagactaa

SEQ ID NO: 64154 - DNA, 374 bp, Heterodera glycines
atgaaaactaaattcgcgacatttgatctttgtgcagctttgcacgatttgcgcgcttttgttgggatgagagttgttaatgtctacgacataaactcgaagacatatttgataaaattacaaaggttggtctactttaattcttatctttttttgaaatttgtcaggcccaacgaaaaagcgttcattctttttgagtccggcataagaatccacagcaccacttatgattggccgaagtcgaccattccttccgggttcagcatgaaattccgaaaacacattaatacgcggcgtctcacccgctgtttctcaggttggatttgggactgacaatcagtcccgttttacggtgcttcaggttggtgttgatc

SEQ ID NO: 64155 - DNA, 379 bp, Heterodera glycines
atggtgttttgtgtgcctaaaactgtggaacgacaattgccaatgggaccactggttcgaataacgaagcgattcagctcaaatggaatttcgtagcacaggtccctggccattacaagcccttgggttttcccgggcctgggtttttgtccagatccaacttagaatccaagtccagggcttttcaaattgccgaactcacaaccaacatttaataatttccagaatacctctgcaactggcgaccgaaaatacaaggaacaagattctatgacttatcatttattcctgaactctccttaggctaaattttacaacaaaaaaacggtgcttttttctggtcttatttgaatctattttgggggaattccttaataaa

SEQ ID NO: 64156 - DNA, 307 bp, Heterodera glycines
ctccgaatgtgtcatttgcggctccaattcgtttcccttgggcgttcgattgcgcgactgcacccatctcagctgcgttcaatgtttcgtcgcatatgctgaagaacttttgtcccggatgagtctaaaatggcacccccaagtcggttacaccgtcggatgccccttttacgggtgcaccggtaaaagcgcttaatttttcgctttttaaattggcatttttccattgccctttttgtttcacaattccaacgcacttcagctgtcgtcaccgatgttcacactttgtatttgctgggcaagcctt

SEQ ID NO: 64157 - DNA, 1529 bp, Heterodera glycines
  unsure (1)..(1529): unsure at all n locations
ttaaatctttgccattgcgctgctccgaagaaatgaacggatcgcccacaaatttctcgaaaaatgagaaaggctttgagccgatggcggaagtgcagctgctgaaggacgacgatcaattggtggtggaggagcgatgttctgcgttgtggaatgagatcaaggacgccggggtgttggacggggccgaattatcggcgagttttgacgaatcgatcggttgattgattgatttattaatgtggggatgttgcgcgagagaaagacgcggagagagagggcgatgaatctgatcagcaaatctgaaaagggcgagggaagggagtaaatatttatcggatcagcgggggaccggacgggcagcaaaaagtgcggaagcaagaaggaaccgatcaatgcaaaaggggattaagcggctaacggcggataaattatctgtcgataaatgagaaatgacattgctaaaacacattcctaaaatatttgctgattttctaattcctttcagaatgcttttttggctcagctccaatcggaaagtgaccaattggacgaacaggttcagaagctcgcgcaaaagtcggagacattggcagcgaatgcacagctcagactttgttcggtttggacagcgttggaggagctgaagcggaagaagcagcgaattgcgggggaaatggggggttagtggggggggggtgatcagcaggaacaggcgggctgataagaaatgggaggaaagggaacaaatgattagtggaagagataatgataatgatcaaagagaaaggggcaatgagaaagtgatcggataaagtcaaatcatcagagagaatgggagagagagagaagagagaaataatattcaatggtcagagaggaaagggcaangagagagtgatcagaaaaagtcaaatgatcaaggagagtgagggaataattaaacagggaaggataaagaaagagagagagataaaggtaatgatcagagaggaagaggcgatgatagagtaatcagatgagcagaaagaatgggagagagagagagagaatctcatggaggaaaggacaataagagagataatgataatgatcagagaggaaagtgcaactagagagtggttagaaaaagtcaaataatcaaggagagtgagagaataatcgtagagaaacggataataacatagataaagacgatgatcagaatgtacaatgagatcgataatgataatgatcagagagaaagaaggaagagaaaataatcaaaaaaatttaaattagagagaatgggggagtgattcgtcttccgttcaatttggcactgatttgttttcccatcgccacagattttcaccaccaccgaccacagattggcgctctccgcctcatcaacagtttccggaaatggctgaaacagaaggaggcgcaacagagtcaggtcaagcagcgcattgcccactcccacgacagtgagtcgtcattgcgcgagttggagcaggaacaacaagagcggaacatcattcagcgga

SEQ ID NO: 64158 - DNA, 245 bp, Heterodera glycines
cttcgtttactccattcgttaccttttcccaatgctttcgtcccatcatcgcgaatcacttctcctccaatacggtcattcgcaagtgctttactcggacgaattctgcaaattgaccgacgaaattctgatcatcaaaaagttcttttttggcactctccggccaaaggttgtgctgctgaaggacattcgcgtggtgtacttcgacgagcaaaagaatcagcagaagaaatacgcacatcgcc

SEQ ID NO: 64159 - DNA, 49 bp, Heterodera glycines; identical to SEQ ID NO: 57477

SEQ ID NO: 64160 - DNA, 1469 bp, Heterodera glycines
  unsure (1)..(1469): unsure at all n locations
atgacanaaacatggatgcatncagacgaaacgaaggcncaacgtttcaaaggcaacggacgactttttgtgacacctgaaaaaatggagaaaatatttttcgaaatgtgtgaacgcttttggtccagcgaaaattatcatgagcaaaaagcaaattgcttggattttgttttcaattttgtgaacacattgtgcgagggaaacgcaccaaaaaagacggtaaatttgcgcaaagggacggacatttggacaacgggaacggacatttcatcaacagggacagcatgtcaatgcaaataaccgagaaaagattagacttggctaatgacgagttgtacggggaaaactttgaaaatttggagataaattctaaggagaaacaaaaaatatttgagaaaaattcaaaaatttctgagatatttgagatatgagtggcccacataattttcaaaatttgagtccaaatttttcattacaacattttgttcttttaagttatggcctgataattttattgaatttgataaatttatgtccagaaaatatgaaagaagcagctttaatttatttgatcccacatttcctcaatcggcgctcgataggaaacccattaaattgccaggtaatttttttcttttttggttaaatatttgaattttaaataaaacgatatatttacgactagtgatggacaatacgccgccgtggaagttttttaaattttatttaaaatttggacagatttttcattacaacttgggcttagggtcggtttttggctaattattaaaaaaaagaaattgtaatacgtggggcccggcggtgccgcctcagaaattttaatcttttatgtgcgatttcaaaccacaaactgaaaaattgatcaggctacgagccttatatattacatcatttattattgtcatttattatttaaaattaaagttataattgatacaaattgtcttttaaaataccacaaattggaaattttaatcaaaaatacgaattgcaattcaaacaaaaatgaagataataaagaagaaaacgaagttgctaactgttcaaattttgttttgctgcacacaactggccattttgataagccaataaaagaggaagaggattttgaaaatccaattttaattcacactttgccagaaaaaacggtgcaaaacggcaaaaacattgccatacaattcattctaaaggcatacacatgcaaaatgaaaagcagcaaaaacggtcaaacaagaacattggtcactgagttaaggctgatggacgaaacggtcagtcgaatacagtacattctttagttactgtaagaatcacaaatatcgaaaactgatctatttaagcttagaaatagaaaaatagtggcgatggcatggcaaaaacttacagtaggaaaagaccaaaatttttttatcgctgggcactcacaacctcaagaaaacaaacagaaa

SEQ ID NO: 64161 - DNA, 950 bp, Heterodera glycines
atgaagttggatggaatcggatctcagaatgaatggctgtcaatgttcagtggggggggggactaacattttaaacgacagccaacggaaaagcaaatgaaagcgacggaatggcgggggggggggggggggtaatgcaaaaagggaacagagaataagttggaagtatcgaataattgagtgatgaaagcataacaataagaattttaaaatcgccccgggtggcgatcactgatcggtgttcttttttccattccaaaatcgattgatcacagattatatggccaaacgtttgctgcccaaaataagatcaatacgataaatgcgcgtgaacggaggggggggggggggagacgttcttcgttcatctcacatttcaaaaacattttaaaatgtaaatttaatattttagatattaaaaaaacatattaacagctgacagttaattaatttattaatatacaatacaaatctctttcgttttgcatatgacaactttcattaggcaaattatgtggagtgcttatacacgattttttcaggtcagaaagtaaattaaaaatgtcttttttcataatgttcctacgcaattctcgaacctaaatggatgactgtttaataacgaatattgaaaagcgattaactagaagtgaaaagtgctggtaaaaacaaccacttattaagtttactcaagcttatttttatattaaatctttaattttcacaaaagctttgtcaagtaattagtcttaaagcaggaaattctgaacaaattctgaaagaaatttctttcatggcaattgatgtgccaaaaaacgaataacaatatttaaatgatctacattttatctttttaatgaaaagcactctttttgatattgcatatgacaacactcatccgaagaattataagcaaattttcacgcaatattttcagttaagcgaataaa

SEQ ID NO: 64162 - DNA, 1884 bp, Heterodera glycines
  unsure (1)..(1884): unsure at all n locations
atgngagcaaacgtttacattggcagtgccgaattcagagaattgccaacggatgagcgaatgaaataccaattaaaggtggggaaatgccgattctgatcatgggaagcaaaaacagcaaacaaaaggtggtgccggaggagcagtcaaatggcatttgcatatgcgaaatgaatcggaagtgcggctgtgttcaggcaaacgatcggctcaaaggggctcttagtctgatcaaacaatttcccggggcattccgccgtttaggtcgaaagtctcggccttaattagtgtcccattaaaggcttattggtggactcattaaaaggttgctctttgctttaggtccattcagaaccgttttccctgctgctgccaaattcgtcgtcctccgatcagtccgatttcgtctcccttttgcgtccctccgtgccctttttctctgtgccctccccctcctcccactctttcgccctccccccgcttcttctcgcctgtctctttctctctctcactctcattctgctggccatcattcttctccttttggtccttcgccgttctgctgatcaatcggcggaacgcaaacggcgcattttattcattttcaccgggtaaataaaagcaaaaataataaattgggcaaaatttgtcgattgcacttcagaaaacaaaaaaatgtggaagaatttggactgatgagaagaaaagaattcggcgtgaacatttcgttgcacggatcgcaaaagaaattggagtcaattttattggtaattacctaattaacaaagcaaatgccgtcgaaggaagggaaggaaggctcgtcgcttcaccttctcttcccaaggtgaacgcccagccaaaccgccgcaatgaattggaacgcgtcgcgagggttttggtgaagaatggcatccgcgtgttctacgaccgatgggacagggaaagcattgagcgaaatttgcttggatgggttcaaaacgcggtgacaaaggcgactaaggtcggtcgacggacaaaggcaaaggcggggaattcgtaggaaattcgaaagattcgaccaataaatctaatttatccgtccttttgcagattgttttgttctacgacagtcgtgctgaacaactgctgctggttccctgcgcaggacaaaacggggatttgttcgatcgcgtgttctgtgcacttcaccaacatttggacctcaaaaaaacggttcgaatttcgaacaaagcgcaatatgaccaattcgtcagattttcatcaaatgggacgagtccaaattggcggatggacggccgttgtctgcttttctgttggcggagaatgtttttctgtttcggcgcgatttgaaacaaatttttgccgctcttaacgtgacgatcagtgacactgaacagagagacattgaggtgaagtgataaaacaattttttttggtgattaattgttcagcgtgaatatgaaaaaatgaaagtgattggaaatccgaaggaaatgagagaggaaaagcccaatgaacggacccatttgctgagcgaatttgaagacgaacacatggcgaagaacaacggcggggggcaatttggcacaaaagaaacagtgacggcaccgacagcggaagggggaaaaggggaagagggaacggaggcgagcagtaactgcaacacaacaacaacacaatgggggacgacagggatgagcagtgactgcaacacaacaacagcagcagcagcgcaattggagtggcataatgaagcggaggaacaaaggacaaagaatcagctggcaaaaggaaaagaagaaggtgattctggagtgattgtgccatgaaattcaaaacaacaatttattttttatgttggttaaaaaatacaatcaaaaagaa

SEQ ID NO: 64163 - DNA, 237 bp, Heterodera glycines
gttcgagtgcggcgatatattcgcttggcatgtcacaacgaatgtgccaaagaatgtgcgagacatcccggcttcgaaagtacgtcaattgttgaaaatggctttcattgggtttgtgtgcgaagtgtcgccctccccccccccctccatttccccgcttctgtcctaaatcgaatgttgggcaggtcaatgctggccccactgcacgaagtactgcttggactacgcggcaacaca

SEQ ID NO: 64164 - DNA, 49 bp, Heterodera glycines; identical to SEQ ID NO: 51181

SEQ ID NO: 64165 - DNA, 73 bp, Heterodera glycines
tccaagtggggaattgaacccaggcgaaaaattatgaaggtagaaagtttaaccactacaccacatgttcatg

SEQ ID NO: 64166 - DNA, 56 bp, Heterodera glycines; identical to SEQ ID NO: 52733

SEQ ID NO: 64167 - DNA, 149 bp, Heterodera glycines
ggaaagccggcacattgttatccctcagaaggcatttctctcaaaaccatccattacgatatttgctgcgactaattctcttattcgataaattctctaaaccattcgtagtttttccctggtttcttaatgatgaactttgttttcca

SEQ ID NO: 64168 - DNA, 726 bp, Heterodera glycines
ctaccgtatttgctctaattatcccccatgggggattatttttcaaccccctcgtatactgggggataattggagactgggggattatgatagagggattatttttcaaacgcctcctagactgggggattaatggagattgggggattaatggagattgggggataattagagcaaatacggtatttaaacacaaataaacattttactcatcaattatatggaagtatttaaatttttaccactacaatgaacaaaagtgttggtaaattattataatatttaaaattactactattttattaagtttttaaatcaaaaatttgaagggttttccattttttttttaatagattaagccattttgctcctagaatttcaagccattccatttttggtttttgtttttttaattttagtatttcatgccgttcatttttgtttaccttttttttgttgcatttccgcccatagatgacaaaagatatttgtgcaaaaaaattagaacaaaaatggcgaatttttatattattctttttaatttaatcattgagttttttgtggatcgacctagcaccaattagcttaagtagactaattcataccggatattttctcaagaatattaatttaaaaaatctattttttttaaaattagtaaattatttcaaaaacacgcaaaaaataatttattttcattttttggtatttttcaaatttaataaa

SEQ ID NO: 64169 - DNA, 479 bp, Heterodera glycines
atggaccgtgcccgacaggtcgcgagcgatgcctgggcggtgccagctgccaacagggtcagtgcaagtgcccgcttggcaccgtgccggacggtgtccggtgcgcggtggtcacccaagttggggccggccagccatgctcggccacgaatgtgtgcaccaattttgccgtctgtgtccaaggcgtgtgcacgtgtccgtccccatttgtggcacaaaatgggcaatgcattgtgagtttttttaacgaaaaaatgaaaatcaaactcaaaaaatgccgaaaatgggggggggaaatgaaaacgacagaagtttggcacacccctgttgtatggcattatgccaaacattttttggtttcattttattatttttttttctctcttaatctaaacataaaatattatattttagcggcctgaaactgttttggcaggcgcttcttgcggtaaaataatgaaaatcctttaaaaaataaa

SEQ ID NO: 64170 - DNA, 1058 bp, Heterodera glycines
atgcacatgccctgctcgcatttggagcctccaccgcattcaacggccggggaacaggccgagtttggtggtactgtaacaacaatacaagggaatacagtatcacgaacagtgagtgacggtgtcagcaaaataatgcttgccattttttaaattaacaaatgattttttcgccgtgtttgttggtaaaaatcttagaaatttataggaaaaaatttttttgaaaaaatatttgaaaaatttatcagagatttttttgaaaacacttacgaattcatcagaaaattttgaaaaattgaaaattttttcttaagcttacttataaaaatttttttttaggtgcttcttgaaaaatttctgtttgaagccaaaaatgaaaaatggcaccatataaatatggaaatttcttcggtagccttcctctccccatttccacaaattggaagtgattggactgatcacctttcctgatcacccccaagcaatcgattctaattataataatcctcatgccgtgccgtgcccacctgtcattttggtgacacaaacatcgttgagcgcactggtcccggtcgggcacacgcacgtgccgtccatgcaggtggagccgccaacacagcgctcaccgcgcacgcacgagccaagcggcgcggcacgcactacagtagaacaaatgattaattacagtaaattagagtcgttatggtacagtaaccgcgacggttttagcgagcgtcaaaacttaaaaatcatatataccaattacattaatgttataaagttaattttaaggatatgggagctattacataactgattttaaagttaaaggttgtattgcataaattacagaaaatttgttacagtattttgtttaccatatgagtgactacaaaattatagtaacccgaattataaaaaattattatgattaaatgatgctttttcccttctcggaacacagaagagacgccactgtttccattacagtaaattagactagagtatgttacagtaatcggtcagattacaaattacagtagaaaccaatcttttta

SEQ ID NO: 64171 - DNA, 1510 bp, Heterodera glycines
atgccaatactcacagcaatgttctgccgaggagcccggggtatgaaaacatgttttttttttgttgaaagattgcgttaatttcgaaaaaatatttttcgtttaattactttttaaattaaataattctgaaaaaatcggaacgaaattggcacatttatcgtcctcaagagtctcgtgccgaaaatataatatatatatattaatctaaaaattgcggccttgaaggcattttgccggcaactgacgtgccaatgtgtgtacggcatgcgcgtgtcgcaggacgggcacagttgcattttctccgaccgtaactgtaccaggcgtggcgaaatttgggtggccgaaattggccaatgtcgccagggtcggtagtttttcgtttcagggcaaaagtaaccattctttcctgttcacctgcccctagtaaaaatttaaaaataattgaatttaaaatttgctttttcaaaaattttgaacaagaaaaccgaaaaaaataggagattttctcttgttggattttttaattttctggattaaaaaaaaattttaaatttttgcatttttcaagaaattttccaaagaaaattttttagatttaaaaaaattacaattttgcaaaaatgtttgtggttttaataatttttgattgatttttttttaattttaaaattatgccaatatcattttttttttttttgaaatttttagcaattttgcccggggctggcccatgttcacattcaatgcaatgttcggctgttgtccaagtaattaatgttgtaaattttcaattttattttacataattattatttatgccttttgagggcgcccaatgtttgctggaacagtgcgtgtgcccaaaggatttgcctatggccactgacgggacgtggtaatgaatcaatgactcttaattgggcaattaataattaatcaatgactcttaattgggtaaataattaattaattattgcccatggccactgacgggacgtggtaattaatcaaggactcttaattggagcaattaattaattagttattaatcaatgagccttaattgggcaaataattaattaatctttgcctgtggccagtgacgggttgttgtatttcattagtgtgataaatgacttaattcgataattaattaattgcctttctctcccattaagtggcacgcaatgccctcaaggacaaatgttctctggcgtgaccggaagctgcttaccaggtagagtgtgcttttaaatatttaaatttgaatacgaaaattgatgttttaattcatttttattctgctatattgggttccatcgtttagggttattttgaattttttaatttaaattaaatatttaaattttcagctgttcagcccggcggcgaatgcctttactcaagccaatgccatgccgtttacccgggaatgctgtgcagtctgagccgttgccggtgcccgaataatcaggcacccttttttgcaacaattaattgcctttaa

SEQ ID NO: 64172 - DNA, 1262 bp, Heterodera glycines
  unsure (1)..(1262): unsure at all n locations
atgttttgttctttttcgaaaactccttttcatattatcattcatttttttctaattcacatttcgaatgcaatttcatcagtgagttaattaacagttaattaattggtcgaatcattttttaattagggagacgacaaaatgctaattgcatttgtgagaaatgatcagaaaatacaaatcagtgaatattcaatggaaaaatatgagatacactttggcattttgtattatatgagaaagaattggaaatgtgtaaaaatagcaaaagaatttgatgaaaatgaacggacggaatgccaaaaatatcgcaaatatttggacattttgtacgaatatttgtgcagagaatacgccggaattcccacagtgaagccaaaatttgtatttaaaaatgaaattgaatttgatggcctaattgaaattgaaggcccaataatttatgcggtgaattgtctggccaaaatttcgcaattttattttcataaatacagtgcggtgatgatgtataaaagaaaattaaacaagctcttcacttatcattttgaaccaaaattgttaaatgagcatagattgaattataatgtaaaattggtcaacgaaaaaccaaaagtgccaattaacgaaatgattttacaattggcaattgacacagcttatgggtgccaaacaaatgaaagtgtcgacggaatattccggcagaattttaacgaaattttaggggaaatgtttaaaaaagcggaacaacgggcaaaaagggaagataattatggaattttcgttacgtatgacataattgtccgatcgatttttgatgattattttgtatgggtgagtcttttaaaaacaaattgttttaattaatgccaaaattaagactgatgatgcaatttttactgaatttgtgaaaggtcaagagacaaattttgagaaattttataggatgcttaaagaatattattcaaactctgtgaaatcaaaggaattttatttacaacaatatggggccttttttggtcttatgtatttaatgagaaaaaattggcaatgtgccaaagttggagaggatttaaaagaaaagtgccaaaaatacaaaaaatatttgcatattttgtatgaatatttcttcagaatatctgccgaaggtttttgctttccatttaatgatcatttaattaattaataaaataattaagcaaaaaacccaaatatgacaaatcaattgccagcggtaaagcctgtttnttgaatgcagtaataaa

SEQ ID NO: 64173 - DNA, 578 bp, Heterodera glycines
atggtgcgttttgctgggcttcgtggcaccacatttattttactcgatggaacggaacttcctctagtcgggcttggcacatatggattgttgacccaaaatgacgtcgatgttgcagttgatacggcactattgagtggttatcgtttgtttgacactgcaaattattaccagaacgaattggagttaggaaacgcttttaaagttaatgagcattttttgtttcaatggtttatgtatgactttattttcagaaattattgcctaagcataatttgaaacgtgaagatgtttttattgtgacgaaggcaaacattcgctcacccaaggttgaggaaaatgcaattgcaatggttgaacattcacttcaatctttgcagacagagtataattatatattagagttcgacctggacttggatctagccctgcaggctcacatctccaggctattttgcagcaacaccaatttttgtcagaaaaaaatccaagcctggtttttttttctgaacctgagttatcctgaattttgcgcagtaaatccagactcaacctgggatccagtccaggctttttag

SEQ ID NO: 64174 - DNA, 2714 bp, Heterodera glycines
  unsure (1)..(2714): unsure at all n locations
ccgtccttttttggatntacggaggcggtaaaaccttaaaccaaaaaatcataattatntaaatgcaatattaaatttgttaggcttttggtccggcaccgcctctttggatgtttacgatggcaaaattttgtcgaggtacataacaaatccgctggtgtttttggccgtacgtacttaaatccccttttgtccagtgaagaggatgtccattgtggttacggtaaattaccgggttacggtgttcggctttttgtatctcggccagagaggtcgttcgagattttttgtgtttaaccattcgagaattaaagctcattttggccaggaggcgccggggaatatgggcttatgggaccaattgcttgcgctcaaatgggtgcaccaaaacatcgaatgtttgcctttgatttccataattgagacaatttatgcctttgttcagctttcggcggtgaaccggcacttgtcactctcttcggcgaaagtgccggcgccgcttccattaacatgcacatgtctgttccgttgttcaattttagtaaagtctccatcaattcacttttaaaggctttcgccccgttcgcagccctttttcgcgcgtgccattatccaaagcggaagtgccacggcaccctgggcagtggaaaacaaacaggtggggggggggggggaagtcaatcggaagtccaaaacgagtgatcactactgctgatcagcaaagtgctttatgaatctgggccaatttgatttattattttacttatttattcaaagtgcaattgtttcttaaggtggcattgcatcgggcggtcattttatacggtaattctaattaatgataatttgctattaaatattttaatcaccaaaatggcacagattatatgaaatgcggcggtgccaaagagaaaatgtcccaattggcgcccgaggcgtggaatttggatgccgttttggagtgtttgctgaaggcatcctcagaaaggcttcgtgacgcggaatggagccccgttatggaatttgccgactttccatgggtacaaataatatttttaattattgcctaaattgtttggtggttttcctgccccttttcgcccatttaggtgccggtcatcgacggcgatttactcgagcaaagtgtgagtagttcactcaaacagggcaattttaaggtaaaatttaaaggatggaccatttttaccattttgggctaattataataattaatggatgtattattattttctgcaattaaatgcttttcgaatattcgttctgttcagcgcactcaacttctcgtcggcagcaacaaagacgaggccatttatttcattgtttaccaattggccgacatttttcccccgtcggaatttttcagcaaaaagttgggagacaattaacaaaaaaaactattaaatttgtttaatttctccagggaattcatcacaacacgtgagctgtggctgaagagcatttccaaccttttgccccgccaaattctcaaatcgtcgctgagtcttcaggccatcgtgcagcaatacgagccggacggggaattgccagtcgaatggtggcaatgggtggacaggtgggaaagggggataaaggggtaattaagagcatttgacgatggggaaatctttaattaatcagaccaattaagggcattaggggggggggatgttccttcaaaatgaccattcctttttcagtttggacaaaatgctcggcgatttgctgttcacttgcaatgtcaacgaatttgcgcttgcccacgctgagcatggcgcgcccactttttattatgtgttttcccaccgcgcttctcaacagacgtggcccgaatggatgggcaagcgaacttcgaaattcaaatttggatttgaagtcattgggatttgtccacaggtgttttacatgggtacgagatcaacttcatttttggcgagccgtacaatcgcaagcagttcaattacacgcgggaggagagggagctcagctcgcgctttatgcggtcagaaattcaaataaattcttaacaaaattacatttaatacatttttctcgaactatttgattttctactcctaattggaattatttccttttttgaaggtcggccctaaaagtgttatccaatagatatctccgcttttggactaaatcactttttaaagatattgggccaactttgcccgaactggcgacccgaatcgcaacgcggacggctcatacactggtgggcatttggcaattagggctaattaggaagaatgactgtggttaaaaagcccttaaatctggaaaaataattcagctgacacttggcccacttacaacacgaaaggcatggaatatatgaacctaacagtcgagtcggactactcactgcgaggggcacgacggattggcacgggcccacggaggaaacagtgcaaattttggaagcagttgatgccgaaactgttgctcctctccggtatttcaactgttacattatcccatggattaatttaacaatttggcacttaatttgttctcatttgtcagccgatcttggtgagtcgttcatccgatggaagcagcacatggagcgttgggagcaggagtacatggcggactgggaagcggccatgaaccgatggtcgcgtttccaatcgtaccgcgacagagacatcgccgaaagcatcgatcagcaggggacatgc

SEQ ID NO: 64175 - DNA, 132 bp, Heterodera glycines
atgggcacaatggaggtgaagaaattggcaaaaaaaagttaccgttatttggcaaacggacaaagagccgaggagaaagcgcaaattattgtgcaagtcgtggcggatgtacagcaaatgcaggaagtacag

SEQ ID NO: 64176 - DNA, 420 bp, Heterodera glycines
atggattgggtaattaaaaaggcccttttgcaattaccaaacgaaaacgatggtgccaatggccaacagttggcgactcgaacggacattttcggcgaattggtagcgctggacgagcgaatgtttgttgggcagccgcgtaaaagcgtagcagcgttggttgtacaacagcaaagtgacgaaaacctttggcaaattggaaaacggaaaaatgaaagaattaaaattaaaaaaagataccgtaaaacaaacgacccaaatgaacaggcgtactgtaacatcgatgatatggtacaggccgtagaagtcgcctcggaaagtgatcacgccgttgttgatcagcgagttgttcagctcactgccaatgtacagcccgatcagtgtggacatcaccagctgatcagtgataatttttcataa

SEQ ID NO: 64177 - DNA, 105 bp, Heterodera glycines
atgatgagacaaatgtctattcgccgtggaccgttcgtgtttggccgggttccgctcacctttaccttccagtccgaagttgccaggcgtgtagtcggcgaaccg

SEQ ID NO: 64178 - DNA, 360 bp, Heterodera glycines
atggcacttttcgtaaatggacattcgaaattggagcaaaacgactcgcgagcactcgcacttggcactctcctcgttttggtggaacggtggtcagtcagagattggcgcttctttttcgactgtaatcaatgggcttaatccagcgaccatttgcacgaaagcataagggaaagactaagtgtcgagtctttgatcagacatttggacaattcggacgaacgcatcgccctcagttcactttcgctgatcaatgccatttacgaattggcagaccgaggcgaaagacttacgattatcaaagtgattggacggaaaccgcggggattccgacggaaaacgggaaaaagggcaacgaaa

SEQ ID NO: 64179 - DNA, 1335 bp, Heterodera glycines
atggcgaaacgtcatagaaccgaaaagaaagagggagaagaaacagaagaaagggaagagaaagagaacaaagaaaaggggaaagagaaagagacagaaaatgaacaggaaatgagggaacttggccaaatggaggtcataaattaattaataaagaaaagtcaggaatttgaaaattcaggatcagatttcgggtgggagccagaccgggtcggattttactaataaaaccttgtttttcaagatcctgatccaggtcccaaacttttgaccctgaccacgatcagtttctaaaaatgcctaaaaaatttaattcgaaaaaacaaaattattgaggcgtcattattagtgctcgactttttgaaaaaagactgggcctgggtttgttgggcctgagcctggcttgcgtggacaaaatttcggaaaaacaaggtccaggagaaacccaggttgccgaaaaaggcccggaccttgcttgacctggatctaggaaaatccagacttggacccaattccaggtcgagctctatcaactttattatagttaaactaagtgtacttgtcaaaaatatcttgagactcccggtaaaattatcaaatagcctcagcactttagcttaattattttctttagcatccgttgccgaattatttgttgccagaagacaaaatcccggagtataagctgcacaaatgcacacagtgtttatgttcattttattgggccaaatcacttcaaaaacactcatgcaaaggccaacagacggagaaagggacagaagaagaaaaggaagcggtgatcagtgattgattgaaaatgaatttataataatttaaatggattaattaaatccgaaatttcagaaacaaactgttactgatgctaataacccgggagagcagaaggaggcaagtcaatccgatgcaaaagcattgggtgaaaaacagcagaactgttatgatgaggtaaatgggttttccagatctgggattttccttatctgctaaaagtctgtaagaatttgcataaaattagggtttgctgatttttttgctttttgaaaaactttacctgacgctgtctttttttatgaccaactgaaacatgatcagcgtcagacacatggacaagctataaaatatgtaaatagaaggggaaaaatcgaaacccgacccggacttctttcttcgacccaacccgatttttttctccacccgctacaatccaggaagacattatttttaataaaacgttaaattaattgttactttttatttcaaatttaacagaaaaccaaagccaatgctgagaagcaatatgaggtgggtatttaa

SEQ ID NO: 64180 - DNA, 1465 bp, Heterodera glycines
atgtctgcaatttccaattccaactttgcgcaatgtttttctggcttacgccctgaccagtcttcttcaattggaggtgggaaaggcgtaaaataacaattttaattaatttaattggaaagattgtcccgacttcagcttttaataaaattacagtatcttttgaacaatttccctaaattttggatatttatgtccaccttttttgtaatatttcagaatttttggtccactctttcccaaattcgatttcaacctacataaaatttgtatattctctgaactgtttgttcagttaattatttttaggacttcgcccgccgctgcttggcttacatcgataaaaatgcggactctttgatcagatctgatgattttttgcaagttgaccaaaaaacattgtgcgaaattttggagcgtgatcaattgcaaatctgtggagaaatttcaatttggaaagcggtaaatttatacaaatatttatttaaaaaagcaattaaaatatttccattgttttaattaggctctccgttgggctgattgtcagtgcttgcaaaatggccatgaatgttcagcggagaatcgtcgtgccgcccttggccctgcgctcttccaaattcgttttccactctttcagccaacaaaattttccgaacttattggtaaaagttaaattgttaattactcttttgttttgtattggcatttttgttgatttttactgaattattacccaattaatgccaatttgaattttgagcagcacaattaattgccccatattactatttattcattgaattccaccttttttacagttccttccggcattttgacaacggaagaatttgtcggcgtctaccaattctattgccatccgaattttcagtggttacacccgttgaaatttccgcgccatggccgaatttctgatcggcaccacgcgacccttgtgttggacattgagaaattttcggaatttgcacaagaaattgtcgggagtgaacggagcagtgaagcggcgtttgtcagcggaatgccgtggaaaattcgtgcaacgataaaaatggcgaaacaaagcactggaaaatgtttggacatttacctttggtgctgtgccgcttcagtagaagaagaaggaggaggtgagtataatcatcaagggtgtggtccatgtggcccaaaacaatttggaatgtgggatttatctttacctaattttttaaaatccagagggataggcgccgccgagaatttttccagatttatgtgtaatttgtcaatagattttatttttaaaaagaataatgtacatttgtatataatatttatataaaaaaatctttgttatgttttatgtaaatttttgtttccagcggaatcgatctcaaaaattatcgggccgggaattcctcattttttaggtaccggtatatttctcagtcccatatcgtcgggaccaggg

SEQ ID NO: 64181 - DNA, 138 bp, Heterodera glycines; identical to SEQ ID NO: 50950

SEQ ID NO: 64182 - DNA, 250 bp, Heterodera glycines
atggccaaagcattggcactgagcaaaacacacttttggcgtcatatgatgccgggatgggaatgcttcagtgaccgaatcaatagccgtgatcaactcggatttcaatcgaccggagaaatggatcacttttgtctcaaatggaaggacatggcatgggctgcctatgtgaatgtgctgagttgggagtgccaaaatggaatcggtggattaacttccagcattgcactgaaaccaattaatgaaagat

SEQ ID NO: 64183 - DNA, 354 bp, Heterodera glycines
atggcaccaaaagtgatcagcaggagagtgatcattgaaggaacagtgatagtgatcagtgaattggcaaatttttacgcattctgtgcaaattttaaatttgaaaaagttagttgtattaattttttttgatcaacgggaatgtttgttctgttcaatttaattaaatttttgactattttttatttaattttacatttaattattgaaattatagaataaaataatttagagagattttatctaataatattacgattcaattgccatattaatgaatatatttttttacagaaaaagatgatagctattgtacaacaatacattaaggaaattcatacattttacatgtaa

SEQ ID NO: 64184 - DNA, 896 bp, Heterodera glycines
atggattttcgaatcccaaatcctggcctgtgggcaagaaaaaacttcaaacaagatgaaggagagcaaaggataaagcccgttggaggaagacttggcaaaaaagtcgatggagggatgtgccgggctttaaaaagattgtgcacatcgtggaggatggaggttatcggtgatgaactgctcagtgtcatggaccagtgatttgaaagaggccgatttctcagtcgatgaagcgcccaaagcacccaatttttttttaattaggagtacggtacggtagttaattagtaaattgctaattattttttaaaataaacatgttcctcgaataaatggcaatttgcacaaaaaagtttcgaaaaattttgttataaatttaaaaagggacaaaaatagatttcaaaagatttataattaattaattacttcaaatttacgcataaaaactaaaaaccaaattctaagtaatcaatttttaatttaaaaaaaatgtaaaaagaaaagaaaaattcatacaaaaaaatgatcgtaattcatgtatgtttgtacatagattgtgatactttatgattaatttagttaataattaaattatcagtaaaagaacaaaataaaaagaataaagaataaaaattttgtagtatcataattaattaatttaattactgaataaaagtaattagattaaaatttatataaattatggatgagcaaagagtacaatttttttttgagaattttttgcctgtaatttgcaaaatttcattgactgtacattagcattaaaaaagttggtttacagtgaaaataaagcattttcactcacaccaaagcggagagcgaaggatgtcgccacaaaagcaaagaacactggggcagagaagcaaagaggatga

SEQ ID NO: 64185 - DNA, 725 bp, Heterodera glycines
atgctaaacatatccgcttacttctattgcagttctctctgtttccaactattcatccacagaataatgatcaatttgccaagtgttcagttgaaaagttattgatctagaaatatcgcaaacaggccttatactagtcatacattcctttagtacatcaatgggtactaaaagacgctgccttccttaataatgccttagttcctttgagacatcaaataattccctcctaaacgataccagcgctgtcattaaaattttcaatgtcattacattttttctcattaattgcctctgtaaatacaaattttccagttgagaagatagttgtggtagaatttgtacctagacccttcattatatttgaaagatttatgtggttgtttttagtggatggggatattaaataaattgaggagaaaagttttactatttattgtcagtaacaccataaattgaatttaattttaggtataatttacttaattttaatcaatactattgtatttattatttttattatattttaatacaactttaatttaattttaatttaattttttaatttagttttatttatttttatttttatttaacatttattttcttttaattttaatcttatttttatttttattttactttttatttgaattaatttgaattttattttactttatttattattcagttaatttaaaggagttgttcagaacctctatcca

SEQ ID NO: 64186 - DNA, 762 bp, Heterodera glycines
atggcttttcactccacttcaaagcaatgtgccaaagatgctcgaatgctggatgaacacggatggtgagaattggatgtcgcggattgaagccatcaaagcggtgcttactattgatttatttggcactttaccctgtttgggtttcgcttattaaccaatttttcctcattttaggcatttgccgatgcttcatctcccgtcaatttcattgtcgttatttttatttggaacactttttttgctgattccgtcgtgctcttcaatctgaccaacgaattgacccgtgaacaattggcattgaaaagaagtgatgaccacaacgaacattttttgctgatccgttgtccaattgtgcgaaatgcgagcaaatggacaaaatgggaagaagaagcgattggattgcgaatttttcggcccttgaatcaatggaatcaaatttttatccaaattgacaacgaggacgaaatcggtgacaggtcagtgaatgcttaagcaaacagttaaaagtcattgcgtttgtgtttttaggcttctcgacgtaaatcccggcccaagtgatcagcagcagaagtgaatgaatcaattgtttagaagtgatcaaccaaattgaaagatggaattattgacgtgctcataattgtcttttttatcatagaatggtcattgatcacaacatatgtatatttgtgttatgtatgtcttgaggatacatttagtgaattcttgaaaccggatttatccatagaattttagaataaa

SEQ ID NO: 64187 - DNA, 638 bp, Heterodera glycines
taattattttgccccatttaatggtcgtattatcaatcaatttaatccctccattttaccaccatatctctcccattaatttctcattttctgcagttttttcctcagggctcccagtcgcgttctgagaaccgcgcgcgcaaagccttgcgcaccatcacagtcattctcggcactttcatccttttctggacaccgttttatgtgcttgccacggtgtacggcttctgcgagcgctgttccagctcggcaggctttcaagcgttgtacacaatcaggcacggagaatgggggatggcattttgttaacacttttttatacactactccatcgtcggattgatcaggaaacttttctgatcagttgcttttcattttcaaatctatgatcactgtttcataggacattcatctgactattggtcattcatttgaatcgatatttgaatcagtccccaactttttatccaaagattgaatggcactttttggcccgtaatgccataatcctctgccctgttcagttacctcctttgctacatgaactcgccgatcaaccccttctgttatgccatggccaaccaacaagtaattaattaataattcttattttgttcaatgataatatccgtggtggg

SEQ ID NO: 64188 - DNA, 376 bp, Heterodera glycines
atgtcacaagaggtaaaaaattggaaaattttcaactgaattactatcttatttatgcataatccattactgtattctgcaatcattacagataaatgaattcattgaaccgtattcaattaagcaaagcaaaagggctgaaattggcgatttcaacggacaaatccaaaagttaattgaggaatgggttcagaatattccaatcgcgaacacagatgacagtaatttttctaaaaaattatttttcaaaagttcctttattagaaaaagtgccaaaagcaaaaatcctaaggaacggctcctttttgatgaactccgaattggacgggtccgacttggatttgatctgtgtggtgccagaccaaataaacattag

SEQ ID NO: 64189 - DNA, 402 bp, Heterodera glycines
ggcacaaattatacgaacatgggctaacaaattcggacaatcacgagcgcatccacctgatcatccatgtgctgcttgtggacgcggtttttgatcgcttggcgcgcgacctttgccgcaagacggcatttgaagtccaattccgcaactgggccgcgttggccaaacaaatggagttccagaaggaggagatccgcagcttcgtgtgcaacccgttgaacaatgtgaactgcttgctgactggtggtggtggtcttgtttggcccaggatttatggccaaattttagggctaattatcaggcccaaatccgcgaccgaccaatgggttgactaaatttgccaataaaggggggcgattttcggcacaaaaaattgtcataatttcagggatgtcccggcgg

SEQ ID NO: 64190 - DNA, 795 bp, Heterodera glycines
atgaaaagtgatcgggcaaagtcaaacaatggcatgaaaagtgatcgggcaaagtcaaactatggcacgaaaagtgatcggacaaagccaaacaatggcatgaaaagtgatcgggcaaagtcaaacaatggcatgaaaagtgatcgggcaaagtcaaactatggcgtgaaaagtgatcggacaaagccaaacaatggcatgaaaagtgatcggacaaagccaaacaatggcatgaaaagtgatcgggcaaagtcaaacaatggcatgaaaagtgatcgggcaaagccaaacaatggcataaaaagtgatcggacaaagccaaacaatggcatgaaaagtgatcggacaaagccaaacaatggcatgaaaagtgatcgggcaaagtcaaacaatggcatgaaaagtgatcggacaaagccaaacaatggcatgaaaagtgatcgggcaaagtcaaacaatggcatgaaaagtgatcgggcaaagtcaaactatggcgtgaaaagtgatcgggcaaagtcaaacaatggcacgaaaagtgatcggacaaagccaaacaatggcatgaaaagtgatcgggcaaagtcaaacaatggcatgaaaagtgatcggacaaagtcaaacaatggcatgaaaagtgatcgggcaaagtcaaacaatggcatgaaaagtgatcgggcaaagtcaaactatggcatgaaaagtgatcggacaaagccaaacaatggcatgaaaagtgatcgggcaaagtcaaacaatggcatgaaaagtgatcggacaaagccaaccaatggatga

SEQ ID NO: 64191 - DNA, 792 bp, Heterodera glycines
atggatcttctactttttgttcgaatcggagttcggggttcgattgggccaaaatagatgacagaatcggtttttcaaaggtttttcttattagttgagaatttgtttagacttatttatcagcaaaacatttaaaaaagagagcaaaaatttattgagctgatccgttccgctgcatttccttttatggactgaaagtaaaatttattatttgtttttattaattttatttatttatgtaaaattactaatcaaaaaaggtgaattgctgctacttgagctgcttgaatacgtctcaactcttcttcctgatacggcagaagaatgggaaaaaaattttttgaggagcgtgcaggcggagaaaattttgaaatttcgttgggatttatgaaagattttgcccaaaagcacgtttccgattctgattcgtattttttgggaatttgattccaaaatattaaaaaatagtaattttcagcgaaggttacattatgcaaaggatgatgcgcacggcaaatgagaaggttaattgcataatttgatgcaccacacttttgccaatttttctttccggcaaaaaaattcgtttttgaaattttcgtttattttatggccaagcgattggtcaaaatgcgaaaagccaacaaatttggtcccaggatcaacattgaaatccacataagcatcttttgattttgttttttgttgatcactcggaaatgggcaatttctgccgcacatttcacaaatgttaaaaattgaacactgtccgcttttgcttctccgaataaa

SEQ ID NO: 64192 - DNA, 864 bp, Heterodera glycines
atgggcaacatcaaattagtgcttcttatgcttttaaatagctttttgtttgctcagtctgaagatcgtatgttttataattaaatgtttaaaataaattttaatcttattccatttaaaagctctccgctttgttggcaaagttgtgataatcactggtaattgtctcattaaatccgaacctaatttctcaataaaccaggggtattttaaacaaagtcattatgaatcagtttccgtaatccattaaaaattcatttgacattcatgtgggaaaaacaaatttcattaaaaatagtcaactttggggaggagtttttgacaaaatattttaacgaataataatttttgatttaacaaaaaatgcactcaacactagaatccctttcctggcaccgatttctcaaccaaatgcccctctccctgcccttcccccaattaattaggctcatcttcgggcattggccgagatgcggcaattgaatttgcaaaagaaggagcgaatgttgtgatccacgggagggacaaagaacgattgaaagtgtgtaaaatttgactgaaaataatgtttaatacatttttaaaggaaactgaggcactgatcattaaagaggccaatgtgtccaacgaaaaagtgctaaaagtttacggagacatcgaaaaggttgaaacgacaacggcaattttcgataaaacgattaaaaagttcaaacaaattgatattttggtgagcttcaaaatttttgtttttgaatattgtccttatgtttaggtaaacaatgccgggactgtaatgctaaaaggcactaaagaacaatttgatttgaacaatttggattacctttacaatgtcggattgagaag

SEQ ID NO: 64193 - DNA, 624 bp, Heterodera glycines
atgaaatattttgcagaaatttttgattatttgaaaaaaaagtttttagaatttttgctgaattacgttaaaatttgacaattattaattcttcttcttaaaaatataatttttatgatggaaaaagctcaaaatattgataaaattggaagaagacaaaaaaaaattattacatacaaaaaatggacaaaatttcatcaaatttttaggttcaaatttcttaattgttcaatttttagatgtatattttcggtttcatctccatcccgtcacatttgaactgctttcactgctcaatttttcttggcgcaaattttcgtccaaaatttcttcgccgatggacgacgaaaaattgaagtaatccgccgctgatgttgtgctttgtttggtcaggccaaactttttggagtagcgtttttttgaacttctaaaaatgttttttttttaaatttattttacagaaaaattaaacatggatttaaatttgattgaaaatttccagaaaaaaaagataagaaaaaatttaatggttaaattaaaatgagaaaattctcaaataataattattattttttaattaattaaagaaattcacattttgtgaaagtataagtaattaataaa

SEQ ID NO: 64194 - DNA, 291 bp, Heterodera glycines
atgcatatgcatataattctatgccctagtgatcgtattttggagttcatttttcgcaacatttggccaatgatcgcgacaaacattcatggcttgcaattgtccaaacgaagtttccgccgtttgcgtcagttggccccgtcatttctcaacgactgtccatcgcttcactttgtgtcctattatgacgatcttttcaccgaatttccggccaatgacaatgccacggcatcggatagacaagcggtggccaaatggcttttcactccacttcaaaacgatgtgccaaag

SEQ ID NO: 64195 - DNA, 601 bp, Heterodera glycines
atgtctttttttctgcgcactaatttcaatatattaagcataaaaaacgcgttttccgcttggtttgaggagtcgtctacgttgacttttataatgcctatttttcagaaaataaacccctaagaattgaaaattcaaaaattgatcccaaaatttaataattttttcttaataaaaatttctggtttaaaaatttgttcttgtcgaaaaaactttaaacaatttcataattttatttacaattgaattatttaactttgacgtgttttgctacctaaaaagcgttcacaaaaaagtatttgcctattttagtgcctatttaatgcttattttgcgattttttgtgccttttaagagcttatttcgcgatttttgtgcctaaaaaaggaagctttaagaataattatttgaaaataattaaacaatattgttttttattttagtacggaatatcgccaggcatttcaaacggggtttccatttgtgtttaaacgattttcaaatgctaatcaagcaattccaatgcacaatgggcttccattaggcactacacaatgttgaatgatgaagatatttcgggataattcagtccaacattaaa

SEQ ID NO: 64196 - DNA, 621 bp, Heterodera glycines
atggcatttcgtgccggtgcaggcaccggtcgggaattggcacaacgaccggaccaatacttggacatcttggtaaggttttggagttacatacctgttttacaatggcattttttaagcggtaaaatttcagacaaattttgactgttgttggtcaacgcctgacgaagtgcacgcaattgctgaacaattagacgaatttgtgcaccacgaaattcggttagttttcattttctgaatttttcaaaaatattattttcggcaccgtttaaattagcggaatgccgttaacggacatggcttattgttggaaacccattccatccgactgttcaagtcggtccgctaaaatgccgtgccgaaatttcgtaaatccgccgccaaataaaacggagcaaaacttgggttttcattcgttagctttgagtctaaaatttatattaaaaattcaattttttttcattttcttaccccgtttttccatcccttcccaatttcagtgggccttacgccgggcccggctcagagccgtccgactgtcttcggcactgtttgctcgtgtttcgtgtgctcgactggcacatcggcgcactgtgcacttttggccaagcaaaaatgtga

SEQ ID NO: 64197 - DNA, 3376 bp, Heterodera glycines
  unsure (1)..(3376): unsure at all n locations
atggtgtgcgatctcaaaaatccttacgttggaattttcgtgaaaagggacgatgcgtaagtcccatttaaaaatatggagtttgagtttgttttagcaatacatcggatgcagtcaattcgatcgacgagctttaccctgtcggcacattcggcaatgtcgttgaactaaaccgagtccatccgaagaggttggaaatgttcgtcagcgcccatcggcgcattcgactgttggaaaagttggacacactcgacaatgaacaagtcggcagaacacagcggagaaaaaagagggtacaaccgcaacagctgactccaaacagagaagagggcgctaacgggaccgaagaaccgcaaggcgagaagccgcttctctatgcgcgtattgagaatgttgttgagccggtattcaagccggacgattggatgaaagtaaatgcatttatttaagtgacaaaatcatttctcccgtctaggcgaccattgacaccatcataatgaccattcgtgaaattgccagttatagtccgctctttcaacaacaaataatcaatttgctcattccaaaacaaaatgtgacggaagatcccatcgccttatgtgacttagtcggcactattgttgaaacatcgaccgcaacaacccaagacttacaggatttgatggagaaaacggatgtgagagtttcgatatattttagtttaaaacaattttatgttaggtaatggaacgactacggaaagctttggaattgctggagaaggagaagaccattttaagaatgcggaaccaaataaaggaggacgtagagcgaaaagtgaacgaacagcacagaaaagcaatgctttacgaacatgtgaaaatgcgaaatcttttaattaattaaaattaaaatttagctgaaagcaataaaacgggaacttggtatcgaaaaagaggacaaacaagctgttcttgagaagatggaagaacgattagccaacctcaaagttcccgagtacgcaatgaaagtaatcaaagaggagcaagccaaactgtcatttctggaccctcacagcagtgagttcagcatttcaaggtagaaacggttctttcccattaatataattaacattttaaaggaattacttggattggctgaccagtgtgccctgggggaaaacttctgaggaaaacatggacgttcacaaagcacgtcaaattttggaggaagaccattatgggatgaaagatgttaaagagcgcattcttgagtttattgcagtcgggatactcaaacagcagacaaacgggaaaattctctgcttccacgggcctcccggagtgggaaagacgagtattgcaaaatcaatcgcacgtgcacttaacagagaggtgagtcacaattaaaacggaaatggtaaccgttattttatcaatctctgttaatcttctatttaatcatctctatgttgtcttgtcccgacattataatgcgaaaaaggcgtcccgtgtttatcgcaggaaccagggtttcgactggggaggggtaccgcctcaggcaacgactttttttgttgttgcttttcataccattntgaggtaaaccttgaaaaaggtgcaccaaaaaggaaatttttaatntcatcaaacaaatattaatttttaaaaaaaattcgtgtatggggggtcttggaagatacataccccgtgtaccctcctcccctttgggccgtttctggtttatcggaacacaaatatacgggttagctgatgcctcaaaagtttggacacaatttatcctattttctgctaaatccgcagtttacaaaaataccacagattctttcagtactaccgcttttcggttggaggcatgacagacgtcgctgagataaaaggccatcgacgcacttatgttggagcaatgccgggcaaattgattcaatgcctaaagaaagttcaaactgagaatccactggttctcattgatgaagtggacaaaattggcagagaaggtgcaattgttattcaatttttgaacaacttcgtttttagggtaccatggcgatccctcttcagcgttgctcgaagttttggaccccgaacaaaacgcaaattttttggatgtgagttgaaattaatttaacaaatataattttacattcagcatttcttggatgttcctgtagacctttcaaaggttctgtttatatgcaccgctaatgtaactgacacaataccgggtccattaaaagaccgaatggagatgattgaagttgcgggttatgtggctgaagaaaagctggagattgctcgcaaatatttggtcccaaaatgccgtgagaaatggtaagagcttacaccaatatttattttaatctatttcccatttaaattcattttaaagtgctttgcccgacgaaaaattggttataaaagacgatgcaatcgattcgttgataaaatcttattgccgtgaatcgggagtacgaaatttggaaaagcacattgaaaaagtaatttaatatggcgaacatagaagccctttaaaaattgttttagattttcagaaagagcgcttatcaattagtaagcggagaaggcgcccaaacacaaatactgccaattgtggtggagaacagcaacctcaagaaatatgttgggcgagaaaagttcacttctgaccggttgtacccgacaacgccggtcggtgtagtaatgggattggcgtggacagcgatgggtatgtcgaattgatttctgaataagtaatattgcaagctctttctcgtttataggaggctcggcgctttatgtcgaggcgactcttgcaagacgtttgggcacaccttcaacagatgttcagcaagtcactgatgagaaatcccatcagaaaacagtgaccggcaatttggaagtgaccggacacctcggcgatgtgatgaaggtacttggaacatttaggaacccccggtctattattttaaaggaatcaatgcgtactgcttacactgttgcgaaaaatgtactactgagaaaggacccgcaaaacgaatttcttgaaaaagcgtatatccatcttcacctgcccgaggttgacctgtcgtctcctttcgttgacccattcaaatgttttcccttagggcgctgtgccgaaggatggcccttctgccggctgcactgttgtcagtgcccttatgtcgctggcacttgaccgtcccgtggcccagcagacagcgatgaccggggaagtttcgctgacggggaagattttgccggttggcggcataaaagagaaaataatcgcagcaaaacgggcaggagtgggacggattatactgcccagcgaaaacaggaaggacttcgaagatttggctgactttatcaagaaagat

SEQ ID NO: 64198 - DNA, 858 bp, Heterodera glycines
atgaaaatgaaatgcgcaaaaaacgcaaatacaacggaagaaattctaaggaaaaattcaaaaaataaagaaaaagaaaaaataagagaaaaaaagggacaggacgaagaagagcaaatttataaggaaataaccgaaatttacagacaaaattcggaaacggacgaactgatggaattatacgaagaaaacgaaaaatggataagacaaagccaaaacaaaaaggcaaaaaagaaagaaaaagcaacgaaaaaaggagcaaaaaatgggaaggaaaaggaaaaaagtaataacaaaaaagggaaaaaagaaatgacggaaaaaagaagcaacgaattgggggaggaaaaagaggacaaaaaagagggcaaaacgccaaaaaaggggacaaaaaaggcgaatttaattgaaaatgggcaaaacggcggggaaaatggcacaaaaacattggcagaaattggaatcggaaaattaggaggcaaattttaatttaaaaaggaattaaataagaaagaaatttagatttattagacgatttggtggtgaaagaaacttttgaaaatgtattactaaagaaattggacggcaaaaacattgaaataacgaaaaatattattttatttgtgcgagcgatcgaaacgaaattaaaattcataaaaagggaagaaaaaaggacggaaaatgatcaaattttggacaaatttgacgaaaaatgggatagtttcatgcaaagtgcgagcatcagaagtgaagaattgcaatttgtacatgacaaattatattttattcacgaggacattgaccaaattgcatttgagtgagaaacaaaaatttaaataattaatttaatgtaataaa

SEQ ID NO: 64199 - DNA, 404 bp, Heterodera glycines
atgcttgtaatttttccgatcgatatttcctttgccattatatatccaatccacaatgtgcttgtgatcttaattcgcgcctaccgatcagctttcacaaaagcggattttgtctcatattgctactgggccaatacggtaatcattaattgaataatttgaatttaataattcaaaatttagccgctttttcttcattcgctcgtcactgttttgttgtacatccgctttatcaacagaagctcgaaaattacgaaaagaagaaattttgtgaaaaggaatttaaatgaagtagggaaaacccatttcaaatttttggaggaacagtggaacagaaaaagtgcattttcaaccgattaaattaggatgcacttaattttttatgcattaaccattttttccaa

SEQ ID NO: 64200 - DNA, 219 bp, Heterodera glycines
cagattgtgaacgttgataatcaactcaatgagctgaccttccgcgaggcagagatctcccagctgtataagaaagatcacccaacttatcgtgcgctgctggaaaaacgccagacgctggagcaagaacgcaaacgcctgaataagcgggtatcggcaatgccttccacccaacaggaagtgttgcgtttaagtcgtgacgtagaagcgggccgtgcg

SEQ ID NO: 64201 - DNA, 409 bp, Heterodera glycines
gggggaaaaaaaatggaaattttgatcatttataaacagtttttcactgaaaattagccaatttataggtaaaattttgaaaaattttatgggaatttaatccaattcttaggggtgtaaaagtcgcatttcgcgccaaaaagcgaaatgcgaaacgccaaaaaatgcgaataatgcgaaaggcgaaatgcgaaaagcgaaacctcggcccatccctgctgctcacccatcagtgaccgttttcacttcatttggccaatttttcggattcgtcgttttgtcacttggcagtgacgcaaatgccctgttggactggcattccgttagccaatgagagaaagccaagtgcagcagcagcagcggatttgttcattttttgttccttttcctttcaaatttttcattggca

SEQ ID NO: 64202 - DNA, 576 bp, Heterodera glycines
caggccgtgccaatctttccggcgtcgcctcctccgccaatagcgctcttttcggcattggcactgctgcggtacgtccgtcctcctcctcaaccgcgtccagcacttcgacgcccacccaatctaccactgcccagcggcgtccgattgttctgtcggcaaaagcatcgccgtctccgccgccgccaccgccgcttttgaacataaaaagtggcggaagaacggcacaaagggtggcggtgacaacaaaagaaaaacagaaaacgaagcagagagaagagagggagcacaacgaaacggaagacgaaatattcttgggaggggaaggtaaatgggcgaggggagaaagagagagagagtgtgtgttagagagagcgagagagttggaaaacgatggatggcggagtgacccattttatgccaaatttagtctcattgaatggtccaacaaaatttgtggagaatgccattgtgaagccgaaagtgccgccaaagcctgacaaaaacgcactgatcggagtcggacaacagcagcagaagaagcgaaaggaagaggtgggaggggacagagaatga

SEQ ID NO: 64203 - DNA, 1128 bp, Heterodera glycines
atgtggttgagtccgaacggaacaatccgaaacattctcggggggacaggtgaggaaaagctttggaaatataataaagcattttaaatgctaattggaaacaacgaataaaaaatacgctcaaatgtttcagtgttccgtgagccgatcatttgcaagaacattccccgagttgtgcccgggtggaagaaggaaattgtgatcggacgccacgcatttggtgaccaatacaaagcgacggatattgtggtgccgaaggggtccaaatttgaaataaacatcattaaaagtgacggacaagttgagaggcactcggtgttcaactttgccgatacgggcggtattataatgggcatgtgagtggggggaaaatggagaaaatttattttagcgattaggggcagaagcttgcgtttattttctttaaaaatttacaaattaaggtataacacggacgactccatccgtggctttgcccattcctgcttccaatacgccctcaaaaagcaatttcctcttttcttgagcaccaaaaacacaattttgaagcgctacgatggccgcttcaaagacattttccaggaaattttcgacaggtattcctatcaactgtaaaatgcttctttaatttgtagtagcattaaaaaatttccagggaatacaaatccaaattcgaagcgctgggaatttactacgaacaccgactcatcgacgatatggtcgcgcaaatgttgaaaagtgagggtggctttgtttgggcctgcaaaaactacgacggtgacgtccaaagtgacgtggtggcccaggggtacgggtcattgggccttatgacatgtgagcgaattggcaaaaaataaattacattgttttactaagcaaaattttttagctgttttaatgtgtccggacggaaaaactatcgaagccgaggctgcacatggaactgttacgcgtcacttccgcgaacaccaaaaggtgaggaaaatgcttttctggcaacaaattgtattttcaatattcacatttttagggtaatccaacgtccacaaatccagtggcttcaattttcgcttggacccgcgggttggagcatcgcggtgttttggacggaaacgacgcccttgtgaa

SEQ ID NO: 64204 - DNA, 1155 bp, Heterodera glycines
atgcctggacaaacgcctgccggaccggcaagcgttggtgtgtttgttgagacggcgtttctcagcttccacgctttttaggcggatgcgattttcgtttttttggattatttccctctccaaaatgcgtctccaccatttgtcaacttcaccattcatttgtacgccgtttttcggccccaaaaactgctcgtccatctgcaaaagtgcgccggcgagtcttcttcccaaccaccgtccgctttgactgcgagacgcactcacaatcattgtcatttcgatgttgcccaagcacttcgtatttgcacagaaaatggcaggcatatggcgtttccatcctattttaccattttgggcattacagcattgcacgagtgttctgtgtttttgctttgcctcgagcgtctttacgaggaagcgacgcgtttggcgttgcgtcacgttggcctcgcgtgtgccaaagagtgcgcgcgacgtttggacgccgactcagccgcagcagacgcattcgccccaatcgggcatttggcgtcctttcatgggccggtggatgaggaggattttggagaaagtggcgatgctggtgtacaaaaaatggaacaacagcagcagcaagtgcaggagatgcgcaagcgagtttggatggaaattggtgagcaaatgtcggaaaaaatatattgaccaatatgctttgcaattccattcaaatttgagttccttttttttgttagcaaagagtgtaattgcgagcggtgcgcctgtcgagcaatgtttggcactgctgaaagagtcgcggggtgccgtgcgcgtgcaagacgttttggcacattttccagaatttcacaccatcgaacacttacgggagcccatctgcgaatgcctcaagcaatacaccaaccaaattgaggttgtgttttactggaccgaatgctgctggataaattggatttataacaaaattccagcaccttcaaagtgaaattagggatgtcactgcgatggcggaggaattgcgcaccgaaactgcgaaagcgcatgccaagtgaaaactcgcttatatgaaaattcctaaatgacaatatatttattgtttttttagctttatggtcgtcagaaccagcgattgttgtgcgatgtgccgtggcattctgttga

SEQ ID NO: 64205 - DNA, 504 bp, Heterodera glycines; identical to SEQ ID NO: 60631

SEQ ID NO: 64206 - DNA, 459 bp, Heterodera glycines
atgagaccgtttttgggggttcgtcgaattatctctgtttaccgcacaatttccggtttacgacccttcgattgcgttcaacggacattgacagttcccatcgaagggaaagcgccgaaacgatgcaccgccgaggaagcagttcgggacatcgaatcaggttggttttgctgaaaaatacatttttggttaaggcggaataatttaagggtgatttatcggaaaatataacaaaactattatttgcctccatttcgtgattaaaccctcagatgaacacatttacttgcatcatgccatgtcgtgtcccaccgatttactgagggctttcggcaaacacatcgaaaagaacgatttgagaggaatccgtgcaagccatgccttaacttgcggcgaagtgagtgccgctaaaaccaaaaaccaataaaatacacaaattttgaaggtcccatggactga

SEQ ID NO: 64207 - DNA, 147 bp, Heterodera glycines
atgacctactaccttgatgaagatacgccaaaacgctcaaataatgacttatattcatgcattcggcttgatatgaacttcacaaaatgtgatcagaatgatcctggtgcaacaatcaaaatcagcgatgccaacacaaatgaatgg

SEQ ID NO: 64208 - DNA, 3180 bp, Heterodera glycines
gtgtgatggggacaacgattgtggcgacaattcggatgagaccaatgatcagtgcaaagttgcggtttgtgagccaccgttgcgcttccgatgtgcacactcccgtctctgtctgaacattttgcagctctgcaacgggtaaaaaacaaattaatttaattgcaatttaaattgttaaatgttacttaattattatattaatgtatggactacttaattaatgtgtgtttaaccattattaagtgattggttaatgttaattaccattgacaagtggctaattaacagacaatatttccctactaccactctgttaagtaccctaattaacaataactactatgcttaattacctttgattagtactaaattggtgataaatttcagctttaatgactgtggtgaacacgacttctccgatgaacatctatgtaagtttccaaaatttaatcgacttttcaagaaaaaagaatttcatttgtatatttaaaaaaaattaatttaaattaattttttccctaatttagcaatgtgttcatccttttctgagtatggcgattgctctacggacgaattcaaatgctccaatggcaaatgcatcaatgccacacttgcttgtgatcggaaagatggtgagatgagcggtgatcagaatttttgatttttgaaatttcggagaaaattttgtccatcaaaaccaattctttctaaattcactcatactctcccctcttccgtgccaaaaagcaatttttttttaaatttccgtttaaatgaaatttttttttttttttttttgatttcctcattcaaactcgtgagtcaaattttctgatcacagattgcggcgatgccaccgatgagattggctgcgcgaaaaacaacggcaaaagttgccattccaagggggacaacggcgggtgcaagcacttgtgcactgatgtgcaggacggctactattgccattgtcgggacgggttcagaccagacccggccaacccgttcgactgtgtggtaaaaaaaaaattggaaaatttgattactgctcaagaccgaaatttcccgtgattcgagatcaagaaaaaaagagacttttctcggctcagggctcgagaaaatcaaaaaaaaaaacacaaaatcaattcaaaaaataattattttttattaaatttccaaaactggtctctgtttattgaaatatatgttcatttttgaatacatacgtcgtaccaaaataaaaatcaatttttgcgaaaaacggacaattattgattgagctaataatagccgattcctaaggacgtcctttgtgaacccaaggacggacgaatggaaatttggataaaaattcacaaaatatttttttcaaggacattgatgagtgccaaggcaacaacacatgcacacagcaatgcctgaacaccaagggctcatatctgtgcaaatgtgtggacgactacacatcaggtacagttgcgccttttctttgttcaataatttatttttgtcggtaaaattcaataatttatttttgtcggtaaaaataacgaaattttatcggcattttttttacccctaattttttgttaataaaatgtcgacaattttttcttttcaaaatccgaataatttttatttaaaaataacttcctagaatgaaaattcaagaaatgaatataaaattcttgaaaaacctggaacgagaaaaatgttggcattcgggtcaataggccaagaatgttcaggtcgggatccgggacgcggaccgagaaaaatgccgggattcagatcaacctggcaaagctcttgattggatgtctaaagacaaatcgctaaatctctccctgattttgattcaattctgatcaggcgtcgtgatcggtgcaatggcgggcaaagattgtcgcgcaaatggcgagccggcattggtgatggtggccgccaacaacaaggtgatgcagttgaatttggtcggcgcccggggccgcgtcaacgccgctgcggagtccgcggacgtacaggcggacattgccgctgtggagttcgacccgcgtcgggaacagatgttttgggtatggttttcttgagcattaattaatttgtttatttaacggtcattgaatgatttatttgccggtaatcagtagggaatagaattacatggaaatccatatttttttcctggactgtgggaggcctgaaacgcacgaaaaacatgtttttagcttggtttgaagcttctaggaaggatttctatatccatattttccatatttttccatatttcgcgatttatgtccatatttccatatttttccatattttggcattttggtccatattttatgtccatattttggcatttttcaaaaaaacctctattagaacggcccccagcagctaaattagcctttttgagcccaaaacccgaaaaatttttcaaaaaatcattttttcgccaaaatttctcgagaatattgaataaatttaaattttcttaaaaattaataaattatgtcaaaaataagcaaaaaagcgaaaatttcgcttttgttgttgattttgcgctaaaaaaattaataaattttagcttttatgttttttttcttttaaaatgattgcacgtaattgccgaaaaaattcgagaccaatttccgaatgttgaccgactaattgcaaaacgaaagccgtctttgtcaaagcgccttaccgagtcaaaaaatttggaaatgtatctcatatgcaatttcaaccaataaatttgaagaaattttgcactcaattttgaaaaatttatgtccatattttgacatttttgccatttatgtccatatttcgcgatttttgccattttatgtccatattttgcgatttttggtccatattttatggccatatttcgcgattttatatccatataattacactccctagtaatcagtttaattgactattagttggttaggtcgctattaattgccagtttaattgatgttatgtttttagattgatgcctaccaaaagaaggtgttccgttcggcattgccaaagggcaatcagtcggtaagggcataacgggcaaaatttggcattttaatttgtgccaaattttaaatactcatcttttttttttgccagcacgaaggccagaaactgcaaattcatttgatgacaatgtga

SEQ ID NO: 64209 - DNA, 771 bp, Heterodera glycines
atggccataaaatatggaccaaaaatcgcaaaatatggacataaaatggcaaaaatcgcgaaatatggacataaatggcaaaaatgtcaaaatatggacataaatttttcaaaattgagtgcaaaatttcttcaaatttattggttgaaattgcatatgagatacatttccaaattttttgactcggtaaggcgctttgacaaagacggctttcgttttgcaattagtcggtcaacattcggaaattggtctcgaattttttcggcaattacgtgcaatcattttaaaagaaaaaaaacataaaagctaaaatttattaatttttttagcgcaaaatcaacaacaaaagcgaaattttcgcttttttgcttatttttgacataatttattaatttttaagaaaatttaaatttattcaatattctcgagaaattttggcgaaaaaatgattttttgaaaaatttttcgggttttgggctcaaaaaggctaatttagctgctgggggccgttctaatagaggtttttttgaaaaatgccaaaatatggacataaaatatggaccaaaatgccaaaatatggaaaaatatggaaatatggacataaatcgcgaaatatggaaaaatatggaaaatatggatatagaaatccttcctagaagcttcaaaccaagctaaaaacatgtttttcgtgcgtttcaggcctcccacagtccaggaaaaaaatatggatttccatgtaattctattccctactgattaccggcaaataaa

SEQ ID NO: 64210 - DNA, 808 bp, Heterodera glycines
atgttgcaggccgaaagtgcatgtgcccgcgcacaatgcacccatttgtgtgctgaattgccggccagcggtttccgttgcatgtgcccggacaatgtgacacaatttgatgacggctcatgtggcaccgttcgaattgaggagttgccggtgaaaaattggaatttttttttaggattttccaaatttttgtttgggtttgcgtccggggttcgaacctggcccgaaacggaaatccatgttctttgatttacgacccagaaaacggcacagattttgacgatttttaggggtcggggtcacttcggcgcggaccatttcggcgccgcaaattttgaaatgctataacttttttatttgtcagttagctttagccaatctggcatcatttgaaagctctatgtgtgctctatatttacatgtaaaaatagaaatgaatgattcaaaaataaaaaagttatgccacgcggcgccgaaaaagccaagaaaaagttaatttttgaggttttttggccataacttttttgtaaactgacgaaattttttgaaattttacaggctaatagagaatctgaagagctatcgaatgataacaaaaattttttaatttggttgatcaggaaaaaagttgttagcaacggcgccgaaaaggccggcgccagatagaacagaaaaataaccctgtcacattttgcagcaaaacgccaaaatttctctattttcaaattttatttgtgtttatgcagtcagtttatgtttaacaaaaaaatcgtaagactcaaaaaattacccaaaaatttttgtctaa

SEQ ID NO: 64211 - DNA, 123 bp, Heterodera glycines
ctatttttacaagttttttgccttaaaacggccaaaatttggtcatttttagtgaaaaagtaagtgcagttgttacccagcagtggaaaaaaagttattggttaaatagcaaaaaaaaaaaaa

SEQ ID NO: 64212 - DNA, 451 bp, Heterodera glycines
atggtggcatttgcaccgccgccggcacatgcaaatgcggtgactttgagggcgaattttgccaaaaggtgattgattggttgtggttggtggcagttttaaatcatttggaatcatctcatcattcatgcaattgtttcttttttttttttctttcagcaatcgtcagtgactcgtcaacttattggacgacttggtaattaattaaaattataaaattttggtagtcttggtaaacaattttcaaaataaaaaatatttaaataaaaatcagagggaaataattaatttttaagtataaatttaacctcaaattctttacaatttaccccaaaacgactattttcaaaaacttttagcctaattcaagaaatttcgtttttgaagtcagaattccttggcgcctaaaagtttcggaagaagaaatttctgtgttcgaatttctgggcca

SEQ ID NO: 64213 - DNA, 49 bp, Heterodera glycines; identical to SEQ ID NO: 51181

SEQ ID NO: 64214 - DNA, 165 bp, Heterodera glycines
  unsure (1)..(165): unsure at all n locations
aggatcgggtctcnccataaatctgggcgcatcggttcggggggactgctccgaaaacacaaataaatcgatttttcgagtgtccgtttggggtactcaaacaattatggggagcaaaaatccaacgcagaattaaagtacaggctatagggaagctattccgga

SEQ ID NO: 64215 - DNA, 1081 bp, Heterodera glycines
ttcaatcggctagtgctttaaggttttgtctttgactttgcttttttttccatttatttcaatcggctagtgctttaaggttttgtctttgactttgcttttttttccatttatttcaatcggctagtgctttaaggttttgtctttgactttgcttttttttccatttatttcaatcggctagtgctttaaggttttgtgttttgactttgcttttttttccatttattccaatcgaccacgttaattcattctctatacatttagtgtcttatttcatgaaattatattaatttaattttaaataaagaggcaaatttttacagaaaataaatagacgctgactaattagctaacatttataaagaaagtagaaatttgattaaatgcatatacaatatacaaaatattacttttttaaatttgtataaagttcctattttgtctttgactttgcttttttttccatttatttcaatcggctagtgctttaaggttttgtctttgactttgcttttttgtccatttatttcaatcggctagtgctttaaggttttgtgttttgactttgcttttttttccatttatttcaatcggctagtgctttaaggttttgtctttgactttgcttcggctagtgctttaaggttttgtctttgactttgcttttttttccatttatttcaatcggctagtgctttaaggttttgtctttgactttgcttcggctagtgctttaaggttttgtctttgactttgctttttttccatttatttcaatcggctagtgctttaaggttttgtctttgactttgcttttttgtccatttatttcaatcggctagtgctttaaggttttgtctttgactttgcttttttttccatttatttcaatcggctagtgctttaaggttttgtgttttgactttgcttttttttccatttattccaatcgaccacgttaattcattctctatacatttagtgacttatttcatgaaattatattaatttaattttaaataaagaggcaaatttttacagaaaataaatagacgctgactaattagctaacatttat

SEQ ID NO: 64216 - DNA, 398 bp, Heterodera glycines
aaaccttaaagcactagccgattgaaataaatggaaaaaaaagcaaagtcaaagacaaaaccttaaagcactagccgattgaaataaatggaaaaaaaagcaaagtcaaagacaaaaccttaaagcactagccgattgaaataaatggaaaaaaaagcaaagtcaaagacaaaataggaactttatacaaatttaaaaaagtaatattttgtatattgtatatgcatttaatcaaatttctactttctttataaatgttagctaattagtcagcgtctatttattttctgtacaaatttgcctctttatttaaaattaaattaatataatttcatgaaataagacactacatgtatagagaatgattaacgtggtcgattggaataaatggaaaaaaa

SEQ ID NO: 64217 - DNA, 394 bp, Heterodera glycines
atggtaagaaacagggaattaaaaattttttaatttaataaataaatgattttcgatatttttaaaataaagtgtccatttttcattattacaaattcaaaattacaatattatttacaggagaataatacagattaattaaaacatttttaataaaattaatttttaaatgatttaaatttaaaatttcagggatttttgaacgaccaaacgctgtttgatttacacgtcaatttttgctgaaaacttgattgtttcacttattattcattgataaataatgatttaatgactttcatcatatttaataatttaataatcaaatttcaaaaaaaatttctcgagcggcgtcgcctggtggcaccgccagacaattcttattttgtgaaacaaa

SEQ ID NO: 64218 - DNA, 367 bp, Heterodera glycines
atgcactacagtgcgtcctccatttatctgatgcgtccggaggaacaccgcttcaccaacgctgattcgccctacttccggaccaacagctcatttcttggcatcggaatggacaaaagtgtccgcatagttgaaagtgggtttaaaaaaattcgaaccgtacgtcgcaattgaaattttattttttttgcagacggtttgaagcaaggcgatggcgctggagcaaaagctgcgatggttgtccaagtgcagaaagtgagcattttaatgtatttgaattttatttccttactggataattatttctaatttgtatccgacgtaaaaagacaacagaaaaaaattacgaatttttttgtttaataaa

SEQ ID NO: 64219 - DNA, 1078 bp, Heterodera glycines
atgagcaccttttggcgtttagcattggtgcagaaacggctgtccgattatttcaatgcgatttgtgaattcaatgggaaaaagtaagttttggatgggaatgatcagtttcaaaggccgggaggaaatttcaaagcaaaatgaaagaacaaagatcactttctttgattttacttagccacattaaaccacccgccaaagacaaacattagtaaaaccttaatttatacctaaagggccttcattgtttgaataattaggaaccattaaattttggccatttcggcccggcatggctaagatgtctgctgatcacttgtgctttactctttgaagaaattccgcatttttagccctttttacgaccatttggcttttatgtgctgcgacagttgctgtgcttttttgttttggctttgaatgctttcgatttgtccattgaaaatgtccatggaagtataatctttctcttttacatctcaatactgctaatggcacttttttttcatttgaggagcaaataaattcgttcgaattgtccccttatctccgtctgcccacccttcccggccatgtgccaaattcggccaaggaattattcgccaatgaaagtgccggagctggagatgcttctatcagtggccattattgaaaagatagtgaattttaacaatggcccaactggtataaaatctgcctttattttcctggtgctgcttggtaaacttcgtgtttttgtgccccaaaaattccaaagttttagtcggattttgcattatctttttaacaaaatccacgcatttttgagtcgccggggaatttaaaaagaagtgttctaccacactttgccattattttgtaattgtttgaataattttatatattttccaaatttgagagccgacgacaacgccatcggcacaatgaggccccaacaattgtcggctgcatcagcctaaccgaggtgtacctgtagcagaacctgatcggcgaattgcccagcaccgtcggggatttgaaggcatgttttggtcaggcccgtatcaagaaaaaatttcggggaggacatccgaagtaa

SEQ ID NO: 64220 - DNA, 729 bp, Heterodera glycines
gctggtggaggtgtcgctgtttgttttgctcgtctctccgtacctttccaagctgcccaattccaccgttgtccttctcgaccatgccattcactttaaccccgggggcttggctcagatggaacaccgattcggttgcatctttgaccagaatctttacgagactttcaaacgtcaaatgaatccgcgggtgcgtccgtcgctctgtccttttgaattggctgaacttgcagaacacctgcgacccgttccttctgtcctccttcgtgccgcggcctctcctcttcgtcttcgtcctcctccgacttctacccatttctgttttctctttttgttcgctgctccccaaaatgctttgagcatttcgctggccaaatgcattctatgcgttaagcccaccatcagatacaaaaagaagtgattaggaaaaaggccaaaagcaaaataataaaaataaaaagcccaaaaaatgtttagcgccaaaagcactccttcaaagagtttccatcgtaatactcgcacaattcgtcgacaaaaacaacttttggcgtcaaagagaatgtgccaatctttccccgttaccttgcggcacacaaattccaccaaagcctccgccgttgggttacatggatcacagaagaaagtgggcacaaaatgatcgaaatttgtttggctaattaacttggtaccattttataacaatgccgcctttttcgccgtctccggcgc

SEQ ID NO: 64221 - DNA, 590 bp, Heterodera glycines
atgaaattatgtttatttaaaattatttttgctttttatctcttaccatatgcttgcctgtctttggaatcattggaatctcttttcgattcggaaggtttgtcgaatgagatgtgttaattaattaagaaagatccatttaaattttaatttttgaccttatttcaaaagtattacgaatggaaaaataaagtgcaaaatacatattaaaatacggaaacgccctaaaacatgaaaacaagaattactgaaaaattctaaattttttgatcaacaatttttgatcaattttttttatcattagggatgtcaattttatgtaaatacatattttttcctggcttctccatgctctaaataggcggaaaacactttcttttttgtgtttgcgaacaaaaatctggacttttatttacatattcggggtttttatagttattttggactttttcatacatttttttcttacatattttgaggattttttactgttttggaaattctcaaaaaaatccaaaattttggctattgcttatttttcatttttctttaatttttgaaaatttatagaatggctcgtgaaaaaataa

SEQ ID NO: 64222 - DNA, 484 bp, Heterodera glycines
gccaagtccccctgcccctctccgtcctctcccaactccgacttttgtccgtccttcgcaatgcgtcgctacgctttcattcgctccttttaccccatcctccgattctttgccgatgcctattttttgctggcggacgccctcttcgccttatacaacgcttttcaaccgattgatcagatcggctgggcatcggctgatccgttgctattcattccggcgaacaaagcggccgaaatgattcgccgagggagcactgatcttggcgagctgatggacgtgttaagattcgcagcgaaaactgaccgatgtgccgttacgcggacgattggcgttggcaatggccgttttggcgaggaaaagtgtggcgggatttgccatcgaagtggattttacgtatcaattgcgccttttttacatggaggatttgaatgtgctgatcggacaacacttgcaaaacgagcagagagaagcagtgagaaaa

SEQ ID NO: 64223 - DNA, 1144 bp, Heterodera glycines
atgcgtcaagacttgattttccattactaccaggcaaaggccaattgtaattggccaaataattcagcaaaacaatattcccaggaactcccgaagtatttgcgaggctatcacaacattggcaaaagggaggcggcacaaattggggcactgattttgagggcacaaacgaaagatgggaaagagccgccgctggcgcacattcagcacattttgcagcaattaataccaaagtgagggaatgaaagaagcaaatgcgaaatgaaaatggaaatggaaaaaattataaaataaatttaaatttctctttttagggactttttgaaaatgcaaaattcggccgagtggaaaagggtaagaaaaagcgaaggcgacgatttaaactcatcaaaaaattgttaagttaatttgtgccgaatttggtgccaatttgcaaatgccaaaatgttccgacgatgccaaaatggcgtttcttcgacgactttcttctgagccgacttttggctccgcctttttcgaggcattcattcattttttccgaaaataatttttaattttttggtgaaacaatcggccgactcgaaaatgggctcaaaattattggtggcaatcaatcggtaatcaaaaaataaatatcccttggtttattggaattcatagtgacggaatatctctctacggttcggagtccaagcagcacatttgcacttacgtattcgagcagatttgtcaatggcaaccggcgaatacgtaaaattaaaaaaaaactaacaaacatcgaaggcagattcgagaatggcactttatcggggatggcactaaactttttttttgttatgaaaattgcctttggttcaaatgtttgccaaattttcagctattttcacatcacaatggaaaagggcaaccgattgctttttgagacaacacttggccacaaaatggacggttcgaatgcttaaccctctcgcattggcttaaaccgaattttttagatcttctgacttcgtacattcaggcaatgattgcgcggagggaatgtattaccacaaaatgccaaaatgaacgaaatgccaaatcgggaaatgtgttgccttatgtgccattgctggcatttggcgacgatcgtcgcgaatttgcctaa

SEQ ID NO: 64224 - DNA, 184 bp, Heterodera glycines
atgttgaagtgcccggcatggctggtcgatttgaagcggaatatatttacgactcgtactgtttttgtttttatccccatttcattttaatttttttcattttcagctctcacttatccgacacggtcaaactgatgggcaaggaatacaaccggaaaaagctgaagcggaaatgatcaattga

SEQ ID NO: 64225 - DNA, 941 bp, Heterodera glycines
atggctaataataatcattgtccaccaaatgtttctgtagaaaatgatggcggttggacattggcagttcgtacgaagcacgggtgccgtcggcgtcgcgtgttcagtgccaaaacgacgacaaaatgcggggccaatttggacgggccaagcacaaatgcattcaacgaggacggcactgaaggaggagaagttcaagcagcagtggaagagttgacacttcagatggaacgcctcgtgtgcagaatgccacacacatttttgtgagtcataagttgtgatcagggtcgctgatcgtgaattcagcacccatattggtgtttattttattcgtgtatatttggtagagcccggcggaatcgggactcccgcgggatttccgactcccgcttttcggtgaacgggatttttacgggattcccgttcaggactcccatcccggtaaattttgaactcccgctcccagaaattttttttaccggattctaatatttggcaggttttgatgcggaattcaaaaagttgtattgtccacctttttgtttgcttccagagtcagacagtgcactatttcttcctttctctcgtggctatgcggaagaaaagaaggaaatagtgcactgtctgactgtctgcctattttcccagcgtcgctggtatgagcaaaaaaaaaaaaaaaaggtcgttcgggcgaaagtttttcaaaaatacacccctaagaatcgggcgaagaattttcaaaaatacacccctaagaattgacttttcggatcggtaccccccccccaagcccaaatcctggatacgtccctgacacatggaacaaaaactttggaaaaagattgttcaggtgcccttgccaatttttggcttgtgttcctccaatcattttcatttaaaaaattcatcagaaaatcaaagagtcacttttttatgaataa

SEQ ID NO: 64226 - DNA, 364 bp, Heterodera glycines
atgaaaaatattaaagtacgcaattagcagataaatctttacttttgtatatgcctaacttaaacaaataaaatttttactgcaaaacgaattgcataaaaatgttaagtcgagattaattaaattattcgtttatcttataattattatttctaatatttaaacagagaattaaaaatctttttttaaagaacccctttttttattccattaaagtattttgaagattatataacttaaaatttaaagaatttgttgaatcttaataaagttaacgcaagtagttcattattttttattgataaaaaataaaaatgaaatataactcctattagttagaaataattgtatgaattaaatggaa

SEQ ID NO: 64227 - DNA, 535 bp, Heterodera glycines
ggggatgagagagtcggagaaggaaaggaagagacagtacaagagggtggaagaaagggcttgtccttcaaggtggttgcggacaagaatggaaatacggtggtgtacaacgacagggacgtgccgattgggacgggttctgtgcggaaagtgggcgaacgatcatatgaggtaaaatataaaaagaatttaaacataattctgcatttttgatcactcgcaacaacaggcggtgatcagcaagaatctgttcatcactcggctgaaggatgcccggcggggcccatgctgcagagagttgacgggcgaagaatgcaccgaatccattaaggtatcggtcagcactggtcaattatcagtccgatcactttgcagttggccaacccgcagttcagtcacccgagccaaagggacgacaatggcacgacgaggctgacctggtccgacctttgctttatccctccctttggcttaagcttcgagtgattcaggcccgactgtttcgacatgtccatcgatgtcactttgccaccaa

SEQ ID NO: 64228 - DNA, 440 bp, Heterodera glycines
atgataaaatcgattcttcatgatactgggccgcttcaaaagcacaaactggttaaaaaaatattggagacctacaaactgaattcgaaaaagcatgtaataatgacaattttttatatattttatttaaatattatttaatttgtttaggtcaattcccgagttaaaaagactctgcggacctacgttgggaatggtgagctcgcagttgcagctggaagatattcggtggccgcatcgggcggtggtgataaatgatttgtttgatggttccattttgtaaaaaattgagaaatattttaagggaaagcaaaaaatgtttaatgagaaaaaggggaaaacgggagaccaaagaattgattaaatgaaagtttaattctttttacaaataacaaaaagattaagaaatttttatttttttaaaagataacaataataaa

SEQ ID NO: 64229 - DNA, 986 bp, Heterodera glycines
atgaaagagacaccacaaaacagatcaacttttatgagagatcaacagtttatggatcgattaacagttagccaaaaatcggtgctaaaatcgtccaattatttgattggcatttatgttcccggggggcgaaggttctcgtatccggggggtggaacggctgggttgaaaatcgcaactccgttttggtcatattggagacccatcggcatttgaggactcgctaaatcatgtttttagggcgatgttttgaggcggcataaaaataacactacccccgttaacgcgctcaaacaggcgagggtcattcagtaggtgggcgggccctctaaacacataaaacaccggaggtgggggagccgggttgaacagttgtctcacccatctggttcggtatatgattagtcatttgatttataattgaaaaaatgttacttactcccatataaatgtgggcgaactaaaagtttttaaatatgtgtatggtgaaggagtggagaattttctaccttggtttagtggaattggccggatgcgttcaaaatttgctaaataaaaaataataaatgaaatagagctgatttattaatgctaggaataagttaaattaaaattaaacgattttaggtggatgtttttattgcaacaaaaacggacccgcataatcgaactagatttcaaaaacgtcccacaaaacgacttagttcaattaagaaatcataaagaacgactagaaattttctgaaatttaaatccgtgaaaatttaacatatattgatagtattgatcaaaattctacagttggcaaagttgcatgatttattgaaaattttgggaaaattatagtttactctatccacctgagtatcgattgttctggcggttaaagcgaccgcgccagttcctgttattgcgcacccgtctgccacgaaaaggctcattccgatacccttggtccgcacggtttccttggataaataattaaa

SEQ ID NO: 64230 - DNA, 628 bp, Heterodera glycines
atgtctgtgaatttatattgtaaaggaattacagacccggtagtaatacctatcagaccgaaggagcaaatatctgcggatacgattcttaatgagtttattaaattacaacaatcgtattcggaaatcaatttactcgatcaagaaatatctgtaattttcaccacttattcaacacctgctggaagcggtaaaaaaatataattaattcatatgctcatcatttttaggcagaaaatcaaataaattaatggaaaaaaatgatcttagtcgtattcgtatttctaacgctgacagtttcggtaagtggttaatcaaaaagaggatttaaattggtttttcaggtttattttatgccttagagctcacccgtcattaccagctcattaacaatgggataacatataaaaaatatttatgtattataaataatccaaaaaaacaaaaaactattgtgcgagatttgatgaatgaggcggacattaatcaaaaagaaaaatcctacgggctcgatcatatcaaattaattcaaaatttttgggatcaaaaatattcaaaaatatatagaattgttgcctttgacgatgtaagaatattctcgaaaaaactttctttatttgtgttttag

SEQ ID NO: 64231 - DNA, 720 bp, Heterodera glycines
atgtcgtctccgccaccgctgtcggagaagtcgcaacaaccgctggcgacaggcaatgatggcacggcagcagcgacaacgacggcacagcaagcgtcgccgctcaaaagcggcggcggcggggtcaaagacagtcccaagttggggaagaagcgcaggacgagcgcgacaacgacggcaccgacagttgtgagggggaaacaaattagcgggatctaaattgataaccaattaaatttagtaaaaatttcagaattttgggtcaattatcgccaattgattggcgccattttcttttgttatcaaaaaaaattggctccaaaattctcaaatttaatatcaacggagcagattatgcctaagctaatctatgctttttgagcttaattttccaaaccgattatctaaaaaataatatttttaggtttttttcatttagatttttgtaaaaaattaattttatttatttttttgtagaaaaaagtaacagcagcaccagcaacagaaaaagtagaacaacaacaatctgccaaagacaacaaaaattatgccaaaaatagcgacggcactgcagtggtttcgaagcgaaaagcgtcgccaaaaacggcaacaacaacgcccgcgggcaccgcagcacaaccatgcgccgcaacaacggaaaagcaacaactgcaaccggcacaacaaatgccatcgatgaaacgcgtgacgggcaataaa

SEQ ID NO: 64232 - DNA, 263 bp, Heterodera glycines
atgaaaaacaaagttttagttccacaaaagcccagtaattggaatcataaacaagtatttcttttttcaaataattttataaaatttttcagccttctccttcatttgctaatgtcaaaattggaaataaaatacagtgcatggccaagaacatttgcgatttgtttgtttctttaatactttctttaaatgaattgcctaaaatttgctcttttttcaaggagtgtaatgtggaagcgagcaaagcttacgaaacgctttga

SEQ ID NO: 64233 - DNA, 801 bp, Heterodera glycines
atggtgccggtttggcgatggtaagtcggccggggcgtgggaagtcggcgatttgttatcggacactaaaatttcgaacagaaatcaaaaatacgagtgtctcgtcggtcacattaaattgcgatgaatttgtaagatattatttcccttgttccgctaggccaccatggacatcatcaaattgcacggcggcgaacccgcaaattttttggacgttggtggcggcgcaacagttgaacaggtggtggggtcgggtttttcatcaatggtaaattggatggaaagctgaaaaaattgagaaattttctgaaattttgcattagcataatacacacacacacacacacttattgttagaactatcgtggcaaacaaatgcataatttggttaacaacgaaaaagttttggcccaaaaaattattcatccggagatgtttttttggtgtgtttttcctcccgaccaattaaaaaaaacaaaaaacaatatttttgttttttctctgattctgagatttgctccaatttgcgccaccgaataaattttaattcatttgaatttggtccaaaatttccaaattttttgtctgtgaatttaatttaaatgctttatcccttccttttttttgcaggtgtacgaggcgttcaaaatcatcactgcggacgagaagaaggtcaatgccattctggtgaacattttcggtggcattatgcgctgcgatgtgatcgcccaaggcattatcaaagcggcggtcggtgaattcgcttttttctctttttttcttacaattcgccataggaaa

SEQ ID NO: 64234 - DNA, 83 bp, Heterodera glycines
tccatttaaggtacttggactttccgcagtaaaatgtggtacaaaattttggaactgtcccgcctcacggtgggacttaaaag

SEQ ID NO: 64235 - DNA, 264 bp, Heterodera glycines
atgccgaaatatggatgtcaaatatggaaatatggaaaaaaatctgaaatatggaaaatatgtaagtaacaaggcatcctagaagcatcaaaccaagctaaaaatactatttaggtggttttaggccgaatgagtgtgcaaaaaaatatgaaaatccatacaaatccagtccctggatcattatgtaacatttattttgatattgatttcatctaatcataaatttaacataatttctgctttgaaattaaatgaaaaaataaa

SEQ ID NO: 64236 - DNA, 699 bp, Heterodera glycines
atggatccaatacaggcaagaccgtctaattatgacgacagtgagctgatttcgttgatccaattccatagcatcgacataattgtaaaaataattaaaataattaacttaaaaaaaattaattaatttgtgaggttggcgccttctcttcaatgatttgtgtcataacactttttgtcttcattagttcaaagcaaatgttatgccataatgaggtaatatatttttttaattcattaaagcaacaaatttattttttaaaataatttatctttatttattctttaataaaaaataaaatttaaggatacaagatttcagcaaacttcttaaaaatgaatttaattcaactttttatttctttagtttattataattttgttttaattaaatttttgattaaatttcttctatgagcattttgattttgatttttttattattttaatacttcgaataattgcatatttttaccattttaaaattcttttttatatgttgaagaaataattcattcaaattttctttcagttgctaacattgctcgctgccgctgacctttgcaccagcctcggcatttttgtgctcggtctaatgcgcaaggcactttatgaacaggtcatggaaacaagtccgataccaatgaggaatggtgaacaaaaataaggaaaaagatgttactaatttgaaaataataaa

SEQ ID NO: 64237 - DNA, 70 bp, Heterodera glycines
aattactggaagtagcatcatagcagtgcttttcttgtcttttgatgcctcgcaaatctggtcgctctga

SEQ ID NO: 64238 - DNA, 516 bp, Heterodera glycines
atggatttagacgccctgcggcgtcgaattgtgactctcgagcaagagatgcgtgaaaatggtggaactcgctctgggctcccaatgccgaccacatttgacgggacgactgatttgcaggattatttgaagtcctttaatttaatcgcgaccgcccacaattggacacccgcacgatttgtgcaagttctcccgctgttcctcagaggatcggcaagggcaacttacgagaacatcgaaccggatattaaagataattggcgaagtctaattgatgccatggcggataagttgaaacaaatgtctccaagtctgacagcaagacagaaattggcacaacggaaacaactgactggagaatcgctggaagaattcgcgcaagcgattcggaacctcgtcttacgtgcttatcccgacaattctctcgagatggactttggaaatttggtgctcggtgctttggaaaatgatgtgaaacaagcaaacgaagtccgacttcgacaattccgttcgtaa

SEQ ID NO: 64239 - DNA, 1280 bp, Heterodera glycines
  unsure (1)..(1280): unsure at all n locations
gctgaggaagactcagccgacgcatcggccgaagacgaagacacaacgacgccgcaacttttcatagccgaaatactgcaaatccatctgtacaagccgtccgaattcctcaagaatctgatccaggaaacgcttctttcgttggctcagaatggctcactgctcggactcaccaatttgcttgtgcttgttttggtggtcatcaatcggtcggtcgattggtcaaaaacagtcaagtgatcaatccgatcaccgcccaatcgcagttcgatgagtggcaaaggcattcgcatttcacgtgccaaagtgattgctgtgttcgccggcgtttggctgttcctcgtcgtcagtcacgtgcttttctccgcacttcagtacttcgctgtctcgcagctgcacgaactgttggagttgaccagcagcaaccccagccaatttgcatgtcgacggtactctcagccaataagaaatggnggggggggggtcgaacccacggcccacctatttcatgggactgatttcttgatcactgggcctgatttgccgataattcactcctcccactccccccccccccccgctcttttagaagtgccactttcatggtgtacaatgaaatcggagagcgctgcgatcggttggccgtttaccaagagttgggccactttctgctcagaggtcacactctgttcaccgttgtgctgctgtccatttctttggtcattttcgtaatcactgntgtattagccatcgccgncgtccaanagagcaacannncattttctagaatagaaaatagcgacaaatcaggcaaaaatagcnncggcggaagagaagcganncggggggaaacggacagtagagagcgggcggaagcactagtgaggagaagagcggtagagtaggcnngggcgggggcagggagggggnggggggggggtctcgaactgatgaatgcttttcgtttttcagtgactcgagcccattccgccggcgtgaaacgctcttccaaactctcgtcctttcgctgttcgtttgtccttccgtttgttttgctttcattccgtcccttcttttccagcattgctttcttcctgtcgctgttctcccaaagcttcatcgaaatgtatgtgatggtggtcaacgatcgtcgcgagatcgcctggtgggcctccgtctatcagctgagtcgcattgcggcgttcatcgacccgttgtttaaccccgtgctggtggccgtccgcactccgatcattcgcagacgcgtaaattatcactga

SEQ ID NO: 64240 - DNA, 566 bp, Heterodera glycines
atgctttccccgacattcacagtcagaggttcaatccatgtcgataatttcggtgtactgcttgaccctgatggaaaactcggcaatcatttgtcacttgtgcgggttggtcagcttatcattgcccaggctcggctctgtttggtccctgaacgacaatcgccactttggtttattgtcaatgtgatttgcgaagagaaagaagaggaatatgtaaaagaagaagaagcggatgttggtgacgaacaaagtcatgcttacgacttaatgagcgaagacaaccaaaacaaagaaaacgaaactgaaattggaggcgaacctgacgatgagttcgacgtaatcgacggaggatttgggggaggatggaaaaagacggagaagaagcgggtggaagcagaactgaaaagggaggagaagagttgcgtcgaagagagtttggacgcgagcattggcgagtcgtcgatcagcagcagcgagtcaattcgcagtgccacggaaaatctgccgatgagtgacggaattgcgttgttcattcagatcagaagttatgagtggatattggcgct

SEQ ID NO: 64241 - DNA, 696 bp, Heterodera glycines; identical to SEQ ID NO: 34456

SEQ ID NO: 64242 - DNA, 132 bp, Heterodera glycines
gaccgtgcccaaattgagctggcgcgtaaggccaagctgcgggtggacgcactgttcaaggacgtccttgacaagcggtacgacgcggttgtgttgccgggcggtcagccgggctccgacaatttggccgct

SEQ ID NO: 64243 - DNA, 92 bp, Heterodera glycines
ggattatttttcaaaacacctcgtagactggggtataattggagactgcgggattaatagagactgggctataattagagcgatatacggta

SEQ ID NO: 64244 - DNA, 359 bp, Heterodera glycines
atggcattgactcttccgctatattttttcgatggcatccgtcgtcttcttccgccccgtgtttcctcgagtccgtccaccagcgatcaatatcgtcttgcttctcatatcattgctcattgctccatctttgaccaggttatttttatcggataggcaaaagtttttaggaaatatcaacataatataaatatattattttaatttgcttttttcaggtccgttggagacgcgtctcaaaggcttttaagcaggcaattgatgcccgcataaacaaatacacacgaattgatgtgcgttgctatcctggactttcacaactcagcgaagagggcacgaggggaagaggttttggataa

SEQ ID NO: 64245 - DNA, 477 bp, Heterodera glycines
atgttaacagttagttatttatgaattaaacattattttttataaattgtcaatttcgatacaaaattaactttttgaattctgcaaacaattattctcaatatatgtaaatttccgcttttttgccggcacaaatggcagcagtgaaattataaatattctttcaatttaagtaaaaccaaaagaatcaaaagatactattttaaaaaaaatcttaaaatgaataaaagataaagctatttttaattcaatttattacatttttaccaatatttttggtttttttagaaaaggcctacgacaagctatatggaggctacaagggataaaattgactataataattaaaaattattttttcagagaaatttttttgaaagtgaacctttaaaattaaaaatctgtttttaaatctgatatattaaaaaaacttaaacaaaaaagaagacactcaaatttcaaaaaaaatttaataaa

SEQ ID NO: 64246 - DNA, 928 bp, Heterodera glycines
atgcatattgcaaatgcgaaagtgcaatttgcaatatgcatgcgagtgcatgcacatgtttgtgcatgtgtgaatgagcgagtgagtgtgagtgatagtgagagtgagagtgagtgatagtgtgaatgaaagtgagagtgagagtgagtgagcgtgaatgagagtgagagtgagtgagagtgtgagtgagagtgagagtgagtgagtgagagcgagagtgagtgagtgtgagtgtgaatgagagtgagagtgagtgtgtgaacgagcgtttgatcgagcgtgcgttaagcgtatgagtgcgcgcgttatgcatgtgcgcgtgtgcattaaacgcatgcgcctgtatggccgtgtatccgcgtttgaacttgtatgtgcgaaaatgagctgtccaaataaatcccccgccgcaataaaataattttttataatttttctgccaatcaatattcttcgtgacagccgaaaaaatccgtgccagcctaaaaaatcggtgccacccaaaaaaatcaacaccaacagttaagaaaattaagagactcccatctctctaaattccaacacctaataccctcaaaaactgttgtaaacagcgaaccatttttattttatcgatcaatatgtaaatagtaatagaaaatgagacacatttgttttttaatattgtgatttgtgatcattatattatagatatgtacttagacatctcttctgtttaatgtccctattcttccctagaaatccccttttttttgttttcaacacatttttacacatattttcatattaaacggtaataccaacaaattatatggtcgaaatgtcaacattaaatccgcgtccaaaattaccaatttttaaattttcttatcctcctggcattcttttacccgctgtcaccccttcccctgcttcccttagtacatca

SEQ ID NO: 64247 - DNA, 1365 bp, Heterodera glycines
atgcaaaagggtgacaaagactggcagccatctttgggctccatcttagaactacagtttttatcgacaaataatggtggtcttggtgttccaattgagggaattacgtcgccctatttttatttacgaaaagccggctcatattttaccgcccacactgagaattctgacctttatagtgtgaatttattgtgcccttcaagcggaactgacaatgttggcataactatatggtacttttagtggggggggggtctttttatgacaatgtattttcaggtattcgattccggcggcagattttttgaaatttaaaaatctgctctcaaccttttttgttaaagaattcacaaatgatccggaatatttgcggaataagtcaattttggtgaaccctaatatcatccgtgaaaataggatccgatgtatccgaactgtgagttatcaataaagataagattttaagaaaaatatattttcacatagtgtttagtaatttttggtatctaaaacatttttttttgaatattttttcgaagcttgtgactagcaaaaacattatcatagtgattggaaattatttttttaaaagaaattttataaccatatcagtttaatatataaaatattatccctaattttattataataaaaaacgtttatattttattatgttcagcgtgctggtgagggtataataactctcccgggttctgtgcattttgggttttcaacggtgagaaaaaaaactttgagccaaaattttttgatatatattagggattaaattgtgctgttgcgtacaatgttggtccaccgtcttggattccatatggaattgattctaaaccatgctctggcgtctataaatatgcatttatagaggcatttgagctagcaaaactttatgtgcttaaatgtgaagatggtgacaccgctcgagcagcagaattatggaacaccaagtataaaaacatattgaactatgggcatgggttcgatcctatctacccaaactgtcgcccgactatcacctaatctgatgacatcataccgagaaagtatgtactactgtccgggatttggtttagaagtgaaggattaatcgagaaagaaacgggaattcggcgtggcattagatatcgatgtattaattataattgtagggcctcttcaacttatgatctttccactttattgtttacaaatactaatcccacccatcagccggttgagcataattttgaacctaatcgatccttgattaatttaccatattatgtactattttaaattttttttgtttgatttttcttgcaatttagttgccgatgttctgtttattcttttctattaaataataaa

SEQ ID NO: 64248 - DNA, 322 bp, Heterodera glycines
atggagttgcctcaacaggccaaatttgtaacaatggaaaggaatcctgaatatgtagcaccattttcaaagggagataaaataggagttttccacaacaaaagagagaattgcctttcatattttttgaacggtgatttgctaggtgcgtgttagataattttttttgtgattgtaatatttattttaaggccaaaataaacaattcatcgcggattcaagtgggctgtggcctgccgtaacactacggcacccaggcgatcgtgtggaattccgggtcgattctgaattgggtcaaatgccgggaggactttggaaatga

SEQ ID NO: 64249 - DNA, 49 bp, Heterodera glycines
ggaagctattcccgaaggattcggtctccccataaatctgggagcatcg

SEQ ID NO: 64250 - DNA, 661 bp, Heterodera glycines
atggatttggtggagagtggactgctagctgattcgttgcgtgaagaaggcgtgcagagggctgagctaaagcggaaggcgaaagtcgcgctcgatctgattgatgccggtttgaccggcgatgcactgcatgaggagggacaacgttggaagaaggccaaaactgcactcagcgttctcggaaacatgttgttggccgattcacttccggaaaagaagactgcggagctcccgcttccgccagccgaaaaaattgaatcactgccacttccaccactcgaaaaaatgaaaacacccccacttccacctgccgacaaaatgccttcgccgctcccaccatgatcaaaagtggaaagtgatgagcaacaattctacgacagcatttctgcggctaccactatgatggacagcgcctcaatgcagcagcaggcgccgctcaaaagaaaacagctgactccaaaaggcaaaagcaacaatggtatgaagaaggcagctgagccgcagcatcatcacaatgtgggggacatggacaagactcttgacgaattttttgagagcgttagcgcagcgacgaccaatttgtctatataaattgttgtttcatgcaattgtattgaattttaattaattcattaatacgaaatgctgaattctttctcca

SEQ ID NO: 64251 - DNA, 209 bp, Heterodera glycines
ctcaaaaattttggttaagtttcaaaaaagttatggccagaaggaactcaaaaccccagtaattcgaactttttttggctctgatttttttgtgtataaataaaaattttggaaaatttgcaggctaatagcatttttcgaatgctttcgaataataccaagaatgtttaatttggttgagaaagaaaaaagttatggtcgaaaaattc

SEQ ID NO: 64252 - DNA, 91 bp, Heterodera glycines; identical to SEQ ID NO: 53030

SEQ ID NO: 64253 - DNA, 1581 bp, Heterodera glycines
atgcgcatgcagaaccctgctggcctcatggggacaatgtatgcgcctgccagcggtggatttttcctgccacaggccatccagaaccaacgtgctgcgccgttcatgcaaacaccgaatctgtccggggcacaaatgcgtggcgctgtccctcgctggaacaatatgggcggtttcagtgaggagtgccaaatggtgtctttgtttggcatttccattttttttgtagatcatccaatgcaaggctacatgatgggtccagctggtggcggtcagttcggcggcgctaaccaaattgctcgtggaggacctcgctccggtggtggcggaggaatgcgtcagtacgggggacaaccgcgccagcaacagaaccgcatgcctggtatgggcggaggccatcagcagcaaggaatgcgttaccaggtgaaaacatgcataaaaaccgacacgcaaaaaaaggggtacatggggcgagactgatccaggggggggactgatataaattccaacaaatttcaaaaaaatccgccaaacaaaaattagaacaaaaagattttattaaatattaaaaatgaggatggtgttcgtatattggacaaaaaacttgtgcaccgccccaatgtttttttttcaattgcagggacagccgagaggaatgcaacaacaacagcaggctcaacaaccacaaattgcctattcgtcgtatccgcagcagcagagccgtggcggcatggcaccacagatgggtggcggaggcggtggaggagtcaaagctgaccatgcgatcactgctacacaccaggaaccgttgaatacacatgatgcttaccgaggctgccatcactgtatgtattgctgtctgtcatcaattaaattcacctataattttttattttttcctaaatagggacaaaagcaaatgtatggtgagcgtctgtacgcgatggttgccagttgcttccgggacggtgatgtcgagaaagttggcaagatcacgggaattcttctcgagatggagaatgccgagattttggtcggtttttttcatcactcacaagcatagctgtgcgggggggcggttgtgacgccgaacgcaaggggtcggcgggtgtcgaacgcacgaggcggggggagggttgagaaaaaggaaaagaaaaaaagagaaaaagggagcggcaacatcaaggaaatggtcgcgaaattgcgttcgactaaccctgaggggtttctcgtcgaacgcaaaaaaatgaagacttgaaaattgattagtttctttaagaaatttcgctaaaattttccaatttttctgcgactgacaccattttcctcctgcgttcgacgaattttgctgaagaaaattcgtcaaacacaagaagaggggctgaaaattttctcaaataaaatttgtctttcatgtcagattttcccaaaatggcatgtcattatttttttgttatttagttgttgcttggagacgaggaaatgttgcgtttgcgcgtggacgaagcagcaacagtgctttaccaggccacgggtcagaaggaggcgcagtaggataaatgaagtggatggattggatga

SEQ ID NO: 64254 - DNA, 936 bp, Heterodera glycines
gacaattttttccgctgttgctcaccgcagaagctggacacctggacgtctgtcgagtgctcgtcgagaaaggagcggctcttgaccagcaagaattctttgggaagaccccgttgatttgcgcaagcggtgcgggacgtctggatgttggtgggtagaaaattgacatcaaattcaaacataatttttcaaccttccttttcagtggcttttctggtggacatgggcactgcagttaacaagacggacggcggtggctacaaccctttgatgtacgcagttgaaaatgggcacactgaagtggcgagactccttctggaaaagggcgcggacaaagaacaaattggcgcagatggtgggtttaacacaaaatttcactgttttatattatatatccccccccccttaaggcagacgcgcaatggacttggccgaagaaggaggcggcaatgccgaaatgatgactctgttgcgcacctttggcgggaccaacgcaatggcggagttctgaggagaagagaaatccgttctcttacatgtattgtattctccatgtgtaacatatttgtgtgtttttcaagctcaactgctccgatttgtatgtacttattcaaactgcaaaaaaaaatttcaacatacttaacatgatctctctgtactgaatgaccattatttatttgcttttgcaatagtttttgactaaatttccaaccattttaatcaatttaggaacaaaagaattttgaatttcttgtttggttcagcggttccgacagttaaatatttttttcaaaaaaagtgatcctaccatcggtatattacccccatttcgaccaatctcgaatccctgacacgaattcgaacacaagcccaaaattcgaatttccgtttttagtctaaaaatggcttaaataattttatattgaagcactatga

SEQ ID NO: 64255 - DNA, 1272 bp, Heterodera glycines
atggtctttgcccggttttgggatgggaatgactttagcgtttttccacatttgtggtataatgccggaagagatggacagattgaagagattggccatatattcaatggcaatggggccgaggtggcgaatttgagcagcggagatgttgtcggggccaagggcggtagaatttttggaggaaatgatgccgctgtgtgtaataatcagccccacccccccgccctcccgaaaattaaaaaaattcttaaaggaaaaaatcctacgagaaatattttttatttttacctaaaaagcggagtgcatcattcattacaaaaaatttctgaaattcaaaaaaaaaaatttttacctcagtggaagttttggtgccgaaagtatcgcacttacatcgattgtgagggcggtgacatggagttgaaacgtcatctgcaggaggacgaacgggaacaggtcggacaaactctcgttgacgggccgccgccctccgaggcgcagcatcggcacgcgcttcgtcatgcaccgcctcccccaaaccgtaagaaaaatttacaaaaaaagtgtaataaaacattagcaaaaatgactattccaaacaatttttattcggaagattaaaaaaaagcaccgatcgtgttgcttcatgaagaatttttttttgggttttaatcgttttttgaattttttcttaaaattttcattatttttttgcgtcgaatgtcctagtgatgtttttgtttggaattttcaagaaaaattcttacaagtagtaaattttttgaatgaatttaaagaaagaaagaaaaaattgaaattttttttagagatttttcaaaattttgtgatgaaaattacttcagtttttaaaaaataatttttttttttctgggggggggggacctgtggatagtgacgatccctttggtgactactttttttccacagcacctggtggtggtggtagtggtggaagcaacaacaaagtctcctccacgccggcaaagctgcgcagcaccaatggtaacaacaataagcgtccacgtccaccgcttctcgaattggaatcggatgacgacgacgctgtcgtcattgaaaatgccatgcaaacgcgggatgccattggacgagcgatgccgcggcacgaggtgccccgaaagcgtacggttttggaagaggaggaaaatggaaatggtggtggtgaacagcaacggattcttcgtcctcctccgatccgattcggtttccttcttctcccaaaactccgccattgcg

SEQ ID NO: 64256 - DNA, 2960 bp, Heterodera glycines
ccccccccccttaaggcagacgcgcaatggacttggccgaagaaggaggcggcaatgccgaaatgatgactctgttgcacccctttggcgggcccaccgcaatggcggagttttgggagaagaaggaaaccgaatcggatcggaggaggacgaagaatccgttgctgttcaccaccaccatttccattttcctcctcttccaaaaccgtacgctttcggggcacctcgtgccgcggcatcgctcgtccaatggcatcccgcgtttgcatggcattttcaatgacgacagcgtcgtcgtcatccgattccaattcgagaagcggtggacgtggacgcttattgttgttaccattggtgctgcgcagctttgccggcgtggaggagactttgttgttgcttccaccactaccaccaccaccaggtgctgtggaaaaaaagtagtcaccaaagggatcgtcactatccacaggtcccccccccccagaaaaaaaaaaattattttttaaaaactgaagtaattttcatcacaaaattttgaaaaatctctaaaaaaaatttcaattttttctttctttctttaaattcattcaaaaaatttactacttgtaagaatttttcttgaaaattccaaacaaaaacatcactaggacattcgacgcaaaaaaataatgaaaattttaagaaaaaattcaaaaaacgattaaaacccaaaaaaaaattcttcatgaagcaacacgatcggtgcttttttttaatcttccgaataaaaattgtttggaatagtcatttttgctaatgttttattacactttttttgtaaatttttcttacggtttgggggaggcggtgcatgacgaagcgcgtgccgatgctgcgcctcggagggcggcggcccgtcaacgagagtttgtccgacctgttcccgttcgtcctcctgcagatgacgtttcaactccatgtcaccgccctcacaatcgatgtaagtgcgatactttcggcaccaaaacttccactgaggtaaaaatttttttttttgaatttcagaaattttttgtaatgaatgatgcactccgctttttaggtaaaaataaaaaatatttctcgtaggattttttcctttaagaatttttttaattttcgggagggcgggggggtggggctgattattacacacagcggcatcatttcctccaaaaattctaccgcccttggccccgacaacatctccgctgctcaaattcgccacctcggccccattgccattgaatatatggccaatctcttcaatctgtccatctcttccggcattataccacaaatgtggaaaaacgctaaagtcattcccatcccaaaaccgggcaaagaccataccaaccctgccaacttccgtccgatctctcttctctctccaatcgccaaaatccttgaacgcctactactcccctctctcaatacacacctcccacccgcaccacaccaacacggcttccgccatggcttctccactgtcaccgccctacattctatttaccgcttcatcacagacggtctcaaccgaaaacaaccagttgagcgcaccgttgcagtagccctcgacctctcaaaagcatttgacaccgttgaccaccgattactaatatctaatatcgaacatctcaacaacaacactccctgctcatcacaaaagatggctagccaactacctcggcggtcgccaagcccaagtcaccttccgcgacactacctcccccctccacactatccgtatgggagtcccccaaggcagcgttctctcgccaacccttttcaacttttacaccgccaacttcccctcacctcctcccggcattcaaatcgtcacatatgccgatgacatcaccattttggcccgtgccacccaaatcaattctgccagcgaccaaattaactcctttcttccacgtgtcatttcctggctcaacgatagaaagctgatcctctcaacctctaaatcctcatcgaccatcttcacgaccagttcacatgagcaccgcatcgacccccatatccacgccaacgactgtcctatcccagtccttcgtaatcccaaaatactcggcatcacatttgacccacaggtcacctttaatgctcatgtgtccactctccgcaccaaacttcaaaaacgcaacaatatcctccgtgccctcgcaggaacaacctggggccaatgcaaagaagtcctctccaccacttacaaagccattggacgctcattactaaattatgcagctccaatttggtctccccagctggctgactcccactggtcaaccctccaacgctgccaaaactccgccctccggacaaccactggctgtgttactatgacatcctctgaacatctccattcagaaacatccatcctgcccgccaaagatcacaatttccttctctcacaacaattccttcttgcctgccgtgctcccacccatccctccttcgatgttcctcgccctcgtccatctcgccaaatgaaatggaccctcgagcaccgtttcggccatataatagactctaccctatcagatacacgtggagaaatcctaccggcacaaaaactccttcacactcgtatggttgctacaacaattcgttcctccaccaaccgcatccttggcaagccacccccacctatcgacaacagcgaaacttccctcccgcgtgtagcacgctcacgccttgcccaactacgagccggcttctccccgctgatcaacagctacaacgccaaaattaaccctcacataaccaactcatgcccagcgtgcaatgccaccccccacgacacaattcatcttttcaactgcaccgccaaccccactaacctcacaacccaaacgctgtggacccacccccgtctggccgcgactttcttgaaactcatgccagttatccctttcacccagcaaggagtcggc

SEQ ID NO: 64257 - DNA, 1371 bp, Heterodera glycines
atgcggcacactacgggccaagggcgaagcatttgcattggacgccaagggtttgacgatggttggcacccttccatgcgacagtaattttttgaatgatatttattgtgacaaaaaagtatggtaataaaaagcttagggggtgggcattttttgaaatttttttttctttggtaattttgttgttgtttttggatcttcagcggttttgagttttcgtttctaaaactcttaaaaaggctgccatttaacgatttaggtgactattggaaaattttttaactaaaaaaattactttttttagctttgttaatccgtgaactgcccgcgagtgccgatgatttgtctgtccgtcatgcggttgtccgttttactgatgttgagccattgaacgtccgtttggccgcctcgcgactgttcgcattcattcaaatggggtcactgtttgacgcagaaatggcccaccataagctgcaacgaacatgtttatacatcgacaattgtgccggtaccgaaaaccaaaaaattattccttttttaattggctataatttgtcgaaatgccgttgcctttgtaaaaaagtttccttttccccgaaaattctgtcctctttttcaaaaaatcaaatttctagtaattgcacctaatcaaaagtctaattgtagcttagaaaacgggtaatacctataatattaagatttactctttgcctcgccattttgcaaaaaaaaaaacttttttttaaatgccctgaaaatttctcacaattaggcggttttccttgtcgctgatcacaatttggcgtccattttcgaccaactccgaaccccggtctcgaacaaagagtcgaaaattcaaaaaaattatttttttttgattttgcttcaatgcacactaaaaatatgaaaaattgaaagccatcaataaatcattttgtttttaatattactatttactttagtgtttgtctcattttctcgtcattcgttggccaaagttttgagcgaagggcgcgttaaattgttgccagaaacgcaagaaggttttgcatatttattggatttttttttcataatttacacaaaatttaacaaattttttccattttcagatgtccaaatcattgaccaaacaactcataatcagagttcttcgtcttccaccgcaaattcagtgaacactccgtttggaattttgccaatttgttgtatgaaatttttgttttttttggtttaattgctttttgtttagctgagcccgatccagcaaaatttcaatatgagcatagctcgggctatttctacgatccggcaaccggcttttaccatgacccaaaaaccgaattttactactcggccaagagcagaagt

SEQ ID NO: 64258 - DNA, 460 bp, Heterodera glycines
atgttcaaagctgggctcaaattggcctttttgctcttcgcggcgcttttcccgtcaggtaaggaaattattgttttaaattattattttatttttataattactacaaaaataattcatttttaaattaccgtatttcgctaccgtattttgagtttgtattggacatacggtagcgctatagttattggaaatttgtacacatacggtcgagatgttttttttttttttgtatatttatttttcaatttttcagttcctgcattgagatgcgtgtccagcattgcacttacgtacatcaacaacatgaccggcggagtaatgatcgttgacctgagcaagccggttgaatgtgcgttcggttgtgcacgaggaacctgcagcatgaactttggcggtgaattgaacagccattttgggcttcgaattgtgcgcactctgggcgacgacggcgattaca

SEQ ID NO: 64259 - DNA, 75 bp, Heterodera glycines; identical to SEQ ID NO: 54636

SEQ ID NO: 64260 - DNA, 59 bp, Heterodera glycines
acttttgtacctcttttaatcactgttgtacctcttctaatcactgttgtacctcttct

SEQ ID NO: 64261 - DNA, 669 bp, Heterodera glycines
atgtcgtcaaatgaagaagaagaatccggcggttcaaatgatgaccaattttcgtaagtataaatttattgaatttttataaagaaatgcctaaattacatgtccaaaagtgtggtggcctatgtcggaaagggccaaatgggcgatggcccagttttttggttaagtgtcctttctcatttgttcgaatccaaccaaatttttattatttatattcttaacaagtaacttgtgctctctattagcctgtaaaatttcaaaaaattacgttgagtttcaaaaaaaaacaataaatttgtgccaaaaatgttcggaaaagcagttttttttaaattttatcttaacttttatttttatgacacaatccgggactatgtaaaatgtataaaggcttacattttgttacaaaaattgaaaacaaattttttattttttttgaaaatattagctctccgatcagtccggttagccccattcaaccgatgagcaccgattggagcaacgcaattgacgcgcaggaaatgggcgccggaggtgttggaggagggatcagcagcggaagcctgcatgagagcctgcacgaactttcgcgttggaaaatttttggaaaaaaaattgatgcttccttgcataccttatgaaaaatcgcgtttttagggcaagcgctca

SEQ ID NO: 64262 - DNA, 383 bp, Heterodera glycines
atggccataaaatatggaccaaaaatcgcaaaatatggacataaaattgcgaaaatctcaaaatatggacataaatggcaaaaacgtcaaaatatggacataaatttttcaaaattgagtgtaaaatttcttcaaatttattggttgaaattgcatatgagatatatttccaaattttttgactcggtaaggcgctttgacaaagacggctttcgttttgcaattagtcggtcaacattcggaaattggtctcgaattttttcggcaattacgtgcaatcattttaaaagaaaaaaaacataaaagctaaaatttattaatttttttagcgcaaaatcaacaacaaaagcgaaattttcgcttttttgcttattttgacataa

SEQ ID NO: 64263 - DNA, 154 bp, Heterodera glycines
tgattgcacgtaattgccgaaaaaattcgagaccaatttccgaatgttgaccgactaattgcaaaacgaaagccgtctttgtcaaagcgccttaccgagtcaaaaaatttggaaatatatctcatatgcaatttcaaccaataaatttgaagaa

SEQ ID NO: 64264 - DNA, 844 bp, Heterodera glycines
  unsure (1)..(844): unsure at all n locations
atgtggcacactcatntacngcatgcngatgtgttcggtcttggcatttatttgacaactcgtgaaattnttctcacaaaaaatgggacaccgtttgggttatttgaatntaaacaaacaaaattaatatttcttaaattaaagtcaaatgattttcgatttgatattggttttaaaaattttagaaacacagaactattaaccaaagtataaaacatttaaactaagatttttcgatcggaaatatctatatgttctatcgttattttaattttaattcgattttttcaatcatcaaaaggaaaaaaggtcaccaagccaaaaagacgctcaaatatgtttttgttaaattaatggacaagtttttaatttttagaacaatcgacttttatttttcgtaatttatttttatttttgatggcgaataaaaaataaagaaaaaaacattttttattttcagttaccgccgccattaccgttccatttccgattgatcacctccagcagcagcagcagcagttgttcccattcgtttctttgctttcgcctgctgatcaaattgaggcaaactttgggccaaactttctctttacgaacacacaaaaataaatgatcggacaatttgctgctactgttcttatgttttcatatcaagcaacttttttaccagcagcaggaatataagggaatttctctttatcaacagtgtaaaaaatggattatattcactcgggaagcatcgaaaatgttccgaaataagtaaatcagtagtaaaaataagtttttagggtcaaaattaagtacattttttaaaacgttgtttttttgcattttattcaataaa

SEQ ID NO: 64265 - DNA, 81 bp, Heterodera glycines
tcttcgacgccaaaaatgcaaacggagtgccgccatttgtgcgaggggcaaaacgcgtgcggagcccataaagcctccctg

SEQ ID NO: 64266 - DNA, 1018 bp, Heterodera glycines
atgtttatgacgtggacgaacgatgaaaagtatagtggcaaaactatgtttatggatgacgatgatctgctgaaagaggtgttgaacaactatgagattattaatgctccaagtgtaactgaaggggtaagttgcatgaattcttaatgggattaatgttcgttcattatttcggattcttcttcagtctatgttgccttttcctttctatttttaactatttcaagatttttcgtctataagatgcgaccctagtgatagcaaaaaactttacaaaatgcgcaagattcattgctttttttgatagcattcatattttgttttattgcttttcagcatatcaaagaacttaatgcaatcgccagacgacgaatatatgggggtggaatttaccgcactggacttgtgggtgttggcgactacacagcaattgacgctgctgcagtgccaagtgcgatgaaagaactggttgaaacaatcaatcagccaaaggacccgctggaaaatattaaaatggccataagcgctcatctagaactcgtgagataatttaaaatcaaaaaatgttttgtttaaataaatctttaactatgttttaaaataattaattaaaaactccttttgcagctcaaaattcatccttttgatgatggaaatggaaggacttccagacttctgctgaatgttttattgtttaaaaaaggggtaatattttattttatattttaaagagaatgcttcattatttataattttattttatagatgataagactaaattctagtaaatagtctattttataattatgcgtaaaaaacgtccatggtttttgtttggtctttttctgttgaactaatgttaaacttgaaatttactaaatagttaaaaactgtatttccaaatgtttatcctttttagcataagcccatcttgttcaaaccggtagatgaagacaagtacgtaagctgcatcaaagtctatactcttgagacgccggagaacaaatttggtatttaa

SEQ ID NO: 64267 - DNA, 1197 bp, Heterodera glycines
atgcccgactttcatcttcgtcgtcgggaggacaaggaaaagcggcagtcacagccgggccaaccgttcgacatcgacttgaacgagaatcaggggaccatccgagcagtgaaaaccgaggcgcacctgcacattccgatgtcgtccggcaatgtgtgtggtgtcattttttgcactaatatacataattaaatcgtattttcgacccgaatttttcaaaatgaatgtcaaattcgtaatcattttaacaatttttcaaacgcagtatttgaaagttgatcgccttaaataccgttaatttatccgaagttttaaggtgatcaaaatcccattggctgctatccaagagccttcacgtaacatcgacataaaacaaatgcggtcggacatgtgcgcctcgggcatttgcggtccatttctcaagggccattttcggacatttgcgaaatcccccccccccgcccagtcgcacttcatcagcagcagaagcactcactcactgacaaacgttttgtgctttggttattgcgtgaaattgtttttttggggccatttgctatcgattggaaaatgccgttggcttttgctattagtcaatttaactcaatgctttctcactagtctgaccaatttggcatggctgttttattaatgagttgctaatcgatttgttgtacggtatgaaatgaacaaattaatttttcaacgtcatttttgtttccaaattagcaatttgtgggcaaaataacagccagtgaaatcttggcaaaaatcaaaaatataaaattcatagagacatggaggatgaaggaacaacagttcatttgtcttgattaggtcatatgattaatgtattttaacgctaaaaatataattaaattttgccgcatttcttattacatatgagtaggattaggattcttaggtttttacttatttctgcggcttaaactcgaccagaaatgcacgaaaagcacattttttgttcgggaatttttggttttaacgcccctatccgaccctagaaatccctattttgactttgcccctaaaatgttttatccctattggacatttcgccccctatttttgcccttatttcgtgatttttcaaaatatttaagaaaatatttatcaaaaatgaagatttaaagcagcaaaaattgaaatttgcttttaattaatttaaaaaataaa

SEQ ID NO: 64268 - DNA, 518 bp, Heterodera glycines
gtgctttgcgttggttggttggcgtgggtgactgtggtggttgggccgtttttgcgatattatggctggaaaaaagatgcgatttcgctatggggagcgcggccgtctgggttcaagtgcttgcttgcgcttgtgctcggcattgaacggtgatggctgctgctggggtgccacctttgtcgtggcctcagtttctccagcgattggcagctgtcgaaatgaataaacatgcagctcgtctgtgtgttaaagaaatttggcgagttaattgacttgtgtaaatgtggcctaaggcacaaatgctgtggggaactcagcactggggatgctgaacctaaagttggtggtggtgttggtatacgagtgagtggcgtattgccatggttgacaagccctatgagttcgtggatcggaactccttgcctggggaccagtgtgcttgcattcgaaaaacacgagacataagcgcccgaaggcttggcctgaggaagtgcctaaaccggaatccggagtgctcg

SEQ ID NO: 64269 - DNA, 907 bp, Heterodera glycines
caccaaaaaattagtggacaattgcgagaaaaggacgacgtaaatctgaagttgatgagcgaacgcattcgaagcacacaagcacagaaaaagatgagggacgagaaggaactgctggaccaaaacattcagtcgttggagaaccaattggccaccaaactgttacattgccaacggttggaggagaaagagagagtactcaccgaaaaccgagtgacacttgagcacgaattgaggcaagcatttgggaaagctatgcaggagaaaggctaattaaggcaattcaggatcagagaccaaaacaatgaaacattgcgcaaaaagggcattgaattttcacaattggcaacggacctccgcttgagattggaccgattggacatccaattcactgaacttcgcgaggttggctaataaacataggtggacaggggggggggcaatttcgtaaaaatttcggccaaaatttatcagtggtgatggatgaatcgaagtctctttccacggaaaacgaaaatatttaataccttttcattttctctccctttttagagcgtaataaaaaaggcatcctcatacgaagcgaatgccaacaaaattaaacggcttgaggaagagaaaagttcgttgaaacggaagttggaccgagcaaaaagaatggaaaagtacgaaaatgtggacgaattgctgcaggaggaaaatcgcattttgaaggttagtaaataacggagaacacaaagaaacgaaagaattttaggaaagcaaataatttcaaaatttaatttttgaaggagtctctgacctgtccaagttgcaaagtgaatcggaaaaatgccattctggacaagtgccatcacgtgttctgttttgaatgcatccgccttcgctatgacaatcggcggcgaaa

SEQ ID NO: 64270 - DNA, 1113 bp, Heterodera glycines
  unsure (1)..(1113): unsure at all n locations
atggacagctgcgaaagtgtcggcacaaccgacgcggaaggggcagaacaaaagcagaacgtaagcaagctaatgattaatttgtaagatgaaaaaatactctcagaagtattgctaatacaatataaacgagctggggaagttaataactttagcactaaaaacaatttttattttggaacttaaaaaaatattggttttaacaaaatttaaaaattcaattattgtaaaatggagtaggtcggtaggtcacggtctaatcgaaaccgaaaaccgggctatttgttcattacctgggatgtatttaaagtatgttgaaattccgaaatagttatgtatgtacataagttttatttttaatattcttctaaaatatttccaaaaattatttagttatttattctctaaaattgcaatttttataaaaatctgttaacaaatagagccaacctttcttaaaacagttctcaaaatcgaaaaatttgttcagttttttggaacaaatctgttaacaatattntgatacatttgtattaaatatattaaaatttggttttaaataaatccataaaataattattgctggtgcttctttgttcggccaattcatttcaatttcatttggcccattaatcactgcgtattcgctcgacataggcaatattcacctacacacgtgcggcccgtccattgttagctgaagcaaatgcacagctacacaacattactatgacaaattccaagaacgaagacatcaagaacattgtacaataatttatttattttttgtttttataaatattttattaagtacattaaaatttctatttttttctcagattgttgaattgaaagatagtattgttgggtcgctaatcgagttgcgcgatatcgataaatgcgttgaaaaaatcatgacctcaaaggagtcaatgaacgaggaggacgaagtcaatcaggtcctttttctgaaaaatatacattatcgttaagattagtaaaatctacaaaattcaaaaattgtttttccagattaattggagttgctgggatgacgcaatttcgtgctttcacataacctgggaatattcgattttgtattctttaaaaaga

SEQ ID NO: 64271 - DNA, 554 bp, Heterodera glycines
gacgaggcagagggggcagaggaattgccccaagccaaactgagaatgggacgactcatcttcagaatgatggacttggagtaatttcagaggctaatctaaacggtataaaccgtttatttcatgttttaattctgttttctttagaaggaactatcatcgatttttccgactctcagccatcgcagcagccgcccattgtcaacgtgccgacgaggggaattttgcgtaattgcaacggcattgacgcagcatcggatgtgcagaaagcaaatggaactgccaccaatgaaggcgaacatcagcttcccatcgccgatcagcctgtgccatttggaggcgcttctgtgccgcgtgtcgcttccgtcactgggcgtgggacgcgaggagtgcgcggcggattgggaagaggaggttcgttttcagtgctaaacactcataatttggtggttagcaccagcacaaaacaacaacatcagtcgtccaccagtgaatgcggagatttcgccacccaaatcggtcaccttcgactcgacgaccgttttcaatggtag

SEQ ID NO: 64272 - DNA, 795 bp, Heterodera glycines
atggcgccgaacaacaaaaagccgccaacgccgacgaaaaaaacgtctcgcgcttcttccagccaattcgctgcttcttgcggcaccgatggctttgatgactgtccgccctccttggcttcttcctcgttacgtgccattggcttgtcctttgtccgtgccaaactccgatggcgacggttggacgaatttcggctggagtgccgtcgggctgtgatcggatgggcattcatcaacgaatcgttaaaggttcatgtgctcgacacggtggaagatctgtgcgcggaactgagccgatggagtgaataattaaaattataatttattacaaataattaatatttaaaattaatttaagaaaataactgttagtaaaatttatttcccattattattaagatttttaatttataattttttttattttaatttaaaatattaattaaacagtaaacaatacgcatattttttattattttaaaacatattttaattaattaatttaaatttataaagtgtttaatttaattatgtttaaataagtttattaaaatgtattttattttaatgtaatttattttttattaaaatatacttaattttttctttttaattgttttaaaaatatataaataattaattaatttaatttaatttcagttttcttattttagcggaaaagcatgctcaaatatttccggaggaagaaaatcaggccattcgacaagccgccttcaaggcaaaagcacaaagtttggactcggcccattcgctgtacagtcaacgcacatttaa

SEQ ID NO: 64273 - DNA, 86 bp, Heterodera glycines
atcagttccaattatttatccggtcagcacaacacagcaaaaatacaatatatacacatagcaatcagtgatcagaaaagaacaat

SEQ ID NO: 64274 - DNA, 1029 bp, Heterodera glycines
atgactactccctccattcgtctcatcgcgacgtccaaggcgcctgctgcgaccggctacaggtggaaacagtggacaacaattgtgaaagctcaatttttttgctttttacagccaggcagtgctcgtcaacaaccagacgctgtacgtgagcggccagaccgggatgatatcaggaaagacggatgtggtgccgggtggagcgcgcgccgaggcgaagcaggcgatgaccaacatcggggagattctgacgtacgccggctcgtccttcaagcacggtgagtgagcaaaagtcggatcacatcatccatcatcagtgaattcccgccccttttcagttatcaactgcaacatcatggtgaccaacatgagcgacttccaggatgtcaacgaaacgttcaagaacttcttcaccccggacacgtaccctgcgcgcagcttcttccaggtggtcaagttgccgaagaatgcactcgtcatgatcgatgcggtggcggttgttgcgggccagtgagccgaagtgcagaagagcgcacagatgaacaacaaatgtacattcgtgtattgtatattgatgtgatcatgtattcgatcctattgtattattgcgtgtaataactgtcctcgttctgatcacgattgtatgtatatattatgttgcgccaatcagataaatgcctattgtatgtattctggtcctcgttaaattttacagaagtccgctaaaatcctttacagcaagtcaaaatttttcgaaaccgagaaagacggcaattgtccggaaaaaccgttcaccgcttggtcaaagagtttttggggctttgaaattcgttttgaatggggcctctagcaaaactaagaatctgactacgattaggtatctagcaacaaaattgagattaaaatgaaaagccacctactcttctcatttaccatcactttgctgatttcaagacagcaatgatgatttttcttgagatgctaattttcagagtgtaatttaactaaaaattgccaatttcgaataaa

SEQ ID NO: 64275 - DNA, 561 bp, Heterodera glycines
cgaacaaacgaccaacgtcctaatttctgaaaccaccattctccaaatggctgctccctccattcgtctcatcaccacgtccaaggcgcctcctgcgacgggtcacaggtcggaacaacggaggccatcaaaaccatcttcatgttttttgttttttcagccaggcagtgctcctcaacaaccagacgctgtacatcagtggccagaccgggatcgcggcggggtcgacgaatgtggtgccgggtggagcgcgagccgaggcgaaacaagcgatgaccaacattggcgagattctgacgtacgccggctcgtccttcaagcacggtgcgtgagcaaaaacctgatcatccagccatcatctgtgaatttgcgccccttttcagtgatcaactgcaacatcatggtggccgcatgagcgacttccaggcggtcaacgagacgatcaagaacttcttcaccgaggacacgtaccctgcgcgcagcttcttccaagtggtcaagttaccgaagagcgcgtacgtcatgatcgacgtggtggcgatcgttcagggccagagctga

SEQ ID NO: 64276 - DNA, 402 bp, Heterodera glycines
atgtgccgtctttgtcggttggattctgttgtggcacatttgctgaaagacaatttggagtggacttttccggaagcgattgaacacgaaatggacagcaataaccaaatcacattggcatcattagctgctgcagaaaatcaaaatttttcagcacaaaattcgaaaatatttcttggcggaaccattggaggtgatacacttagcctatcaatgaattaatttaaattaaaaacttaaattgtttaaggaatttttaaatattgcaaaaaattgtaagaacgtattaaaataatttatagaaaatatttggtatatttttttaaattcactttttaatggattcttgcacttacaataatttttttatacattaaaaaaatgctctaaaattaatttcta

SEQ ID NO: 64277 - DNA, 615 bp, Heterodera glycines
atgtcgtgctcaattttggcggatagtaagaaaattctcgtgcttttgaacttccaacttgtccaatgtacattaagcgaatcgcaaacatttaattggttgacggtgaattcgtaccaacttcaccccaccacgcccgtactgaagtgccggctcagtcaggcactcgaacaaattcagccggccatggccgtgggtgtccagccagctaatctgcacaagttcaactcaatttttaaacggactatcgccaattgggttggttgcggaaccctttccttataaagaaagatattgccgagatatggcttttcctttttacgtttggttcggaagcccactgtcatttgttatctcgcctttgcttgtttattattccgttttttcagtttgtccagtcgagtgcggttgactttctccaccttttactcgtctgcatgcgatggttgtgccgagaatatgaaatcccagcccgttacgtcatttcaattcacgacgaagtcaataagaaatctcataattgttttaccacatttttcaggttcgttatttggtcccggaaaaggacaaatatcgctgtgcgttggctctttcactgagcaatatgtatgtgag

SEQ ID NO: 64278 - DNA, 76 bp, Heterodera glycines; identical to SEQ ID NO: 51235

SEQ ID NO: 64279 - DNA, 839 bp, Heterodera glycines
caattttcataaatttcaacccctatatttgaatcttttaaccctattttcgcccttattttgtgaatttttttgcccctatttaggtctcaatgttgatttatcgcccctaaaaatcctcgtccttattaatatccggtcgtgcactaacatacttgatatagactgttacaatttctaaaatgaattttacctcaattattatgccaatgcctcgtacaatatcatatgtacaattataatgctataacaggcactcgcgcaaaaacgtcctagagataaatgaccgcagtattgtaaacatgttttttctactaaaaaatataaaaatatatagttctcgtcctgtttaaatttgggaataattaaaaatagtggcatgttatcctgacgctgggtcagttaaaaaatttttccaaaaaaggggggggccatcggtagagtattaccatttcttcattaagaaagcaataatggaatcggaaaaagaatggagcaacaatcaaaagcttatagaccttgccaaaacttcaaaagctaatgtcagaggcacaattccaaagggcttcccttatttcacggtcaattttggtctacagcccgggtttgctcatgtggtcgaagatgaaagaaaatttccgttcaatttcgcgcaggttttccctagtcagtttaaacttttaaaacagttgatttaggaaatcattggaggaatgctcgacttgcctcacagccattggagaaaaccaaaaaagcagagttttgatcaaattatggagagaagaaacaaattgaaaaaaaattggacaaaatacgattggacagaaattgtgagaaga

SEQ ID NO: 64280 - DNA, 1104 bp, Heterodera glycines
  unsure (1)..(1104): unsure at all n locations
atgtggcagcaacancnggaattccaaccaaactctgaatntggttccgcgaaagaattttcttcgtgcctcgtaaaatgcattacaacgtaatgatgttgccaacaaaagcaaagagaagacagagcttttaaaaatactcattggtattatggataaaggggttttgttaatgatttaaaaaattaaataatctaaaataataaaaatcatgatcgcctacaaaaaacaaccaatttttattttttgatatcgatagttctaaatgatttatataattagcctacaaatttttaaaatttattataaaaagttatgataaaaaaatgctcgaaaacgagatttttaactccttcagcaggccataacctttttgaaaccttttttgaatgttaatcaaatttttttgaaatttgcagattaataaagaacattttgaactacaatatctaatgattataaacaaattttgagcatatgccttttttctgcgccttagtttcgatatattaagcataaatagctcattttccacttggtttaaagcttctaacttgcattttttgtgacttttttatacttttttgttgactttcatttttaaggcaaaatttgacttttagcgaagaaaaattccgaaaaataggtttaacttcgaggcggtacaaaaatttccttaccactaggactcaaatgacgagactgaaaataataataaaatctggcgtggtgatcttttgaaaatatttttttgttaaactagcaggttagcggcttcggcgcatctcccgctaggcagtacgattgtgttgtagaattatgaatgataaaaccgactattatggctcggccgcttcgcggcctcgcacccttctcttggcattttcttatggcacaactgggactcagttcttcgacattccaaacactgggactcaaccctccggcatttcaacactgggactcaacccttcggcattccaaacactgggactcagcccaccggcattccaaacgctgggactcaacccaccggcattccaaacactgggactcaacactccggcattccaaacactgagactcaacccaccaccattctaa

SEQ ID NO: 64281 - DNA, 338 bp, Heterodera glycines
atgccgttgttttcccaccggattggacagcggcgagtgccgtgcgtgcggcacgttcagcaacagatgcgcagcagcgagtgggccgcgacggcgacgggtccgtggcgagtgcgacttggccagcaaacgttcgctgtgcgaaatcagcgggacggtgtcgtcgaggcgacactgtgccaaaaaggaaaattcattcaaaaaaaggaaaagcctttttattagcgacaaaaaaatcattcgcgcgaaagcgaaacattttgtttggcatttaaaattatgggaacattttgaaaggtgccattttgttataaaaaagccatcaattgaaaatttca

SEQ ID NO: 64282 - DNA, 901 bp, Heterodera glycines
atgaatgctcgagaatggtgtcaagagtcggggcccctcggcactccaccggcaaattttaaagaattttttatttgcatgttcacacccgaaccgaggtccccgcaacaaaagtttttggaaattagccagccaaaagccatgttagccaaatgctcgaattcgaaactcgaaaacataaatgaaaactctttcggacttcagtcagtcattgtaccaaaagtttgcaagaatccgtgtaaaacccatttttaaagccgtcgaaaattttccgattaataagcaccgaaaaggaaggcaccgtattcccctcgttcggcacaaaattcccccaaattttgcctgatagtcggccacggaaaagccaagccctttggcgtccttgcgcagtgtgaccacaatgggcacacaatgccacaccgcaaagccggacagattctccagcgagcgggagcgcagccaccggttggcaccagcggcggacgacgcgcggcatcgtcgccgcgccgccgtgccgcccggcgacagcggtcgcgcaccgcttccgtcgtcttcgtcgtcgtcagcgacggaggccgccaaatcggccagccgaagctccgactttgcctaggaaattaaaaactcaacaatttccagtggaaaatctcagataaattaaatccgattttatggcgtccaaaaaaatgacagaaaaaagtgtaatttatatagataaaatttttatgatgttgaaattttccaagtatggcatttcgaaaatggcagaagataatgaatgtgacaaaaaagataaaaaaaattctaatttaatttttgtttacgagggaaattattaaaaatttaaaaaaacagtttttgctactgaaaaaacggaaaataattattaattgtaagctaa

SEQ ID NO: 64283 - DNA, 1778 bp, Heterodera glycines
agctattgggccactcgaatgggccccgaatatgacgtcattgtggtggatgtgaggccggacgagcgtgtgttggaggacggcggattgggcatcgaatggcagggcaccgtggacatttgtgacggtgaaaattggcaaaaaaaggattaaatttaattaattgaatttcgatggcatagactgactgcttcttacccttatgtaacaaacaacatgatatccataagaaaaatttttgatttcacttcataataactgtgtgggaaattccatgcaaatgtatgactaattaattaattgattgattgctgtctaattgacaggactattaattaattatgggtttatttaatttaatgaaaaaaatataaaaattagctgcatattattttttgggtgccatttcaccaataatagaaataaatattcataaaacttattattttgatttaataaatttattctatctgtaatatttaattaattaattacgcctaattgacagtgctattaattaattacatgtttctttctttttaacgaaaaaatttaaaaaaattttggtgcctttaactaattagcgctcatttataatgctcaaaatttttatttcacaaatttcttagctttaattgtttaataaaggaagtcagctgtgttcccaccatttcattgaaagcattcgaaaggatggaccggcagcaaaaacgggcgcactgaaagcgggcgacgaacttttacaggtgccaaaacattgggaggataaatttagtttaattaataaatttaaaataaattttagcggattaattccaaaaatttgataattttaatccttttatcggatttattacaaaattttaggtcaatgaaactgccctttttggtgaatcgtttgtgcgcgttcgcaacgaattgaacggcgcgcaaaagaattgcggcgaatttgtccgtctgattttttgccgaagggctgaaaagggtatttaaaatttttttttttaaatttgaaataattttaaatttcattttaagagcatattaattttgtgatgccatccgagcaaagtttgccgttggcctacccaatattggcctcattgatgtccattgatcagcactttatcaaagtgattttattcatcattagaaattttaagagctcgtgaaaaaattcgaaaaaaatttattttagaggtttttacaaggcaaacgaaagttgtaaaaaaactatatacctaaataaataaaacagatctcatttatgatcaaatattttataatcaatttttatttagcttacaattaataattattttccgttttttcagtagcaaaaactgtttttttaaatttttaataatttccctcgtaaacaaaaattaaattagaattttttttatcttttttgtcacattcattatcttctgccattttcgaaatgccatacttggaaaatttcaacatcataaaaattttatctatataaattacacttttttctgtcatttttttggacgccataaaatcggatttaatttatctgagattttccactggaaattgttgagtttttaatttcctaggcaaagtcggagcttcggctggccgatttggcggcctccgtcgctgacgacgacgaagacgacggaagcggtgcgcgaccgctgtcgccgggcggcacggcggcgcggcgacgatgccgcgcgtcgtccgccgctggtgccaaccggtggctgcgctcccgctcgctggagaatctgtccggctttgcg

SEQ ID NO: 64284 - DNA, 1027 bp, Heterodera glycines
atggttgcgcaacagcaaaagccaagacggaagcggtcacggagtgaggacatgcacaaggaggagccggaggatgatgatgaagaggatgaggaggaagaagcgacggcacggaagcggaagagaagtgaggaagcggtggatgaggcgccgcagcggtcgtcggatggtggggacgaggaaaagcagcagcgcagcagcaacaaccacaacatccatcgtcacaaacgcgagcaacaccaccaccgggaggcgacggcacggagcaacagcggtggcaaaacggcgacgacgaagacaccaccggcggcacaggagaagcggaagatgaagccgccgagaaagcatgccgataatggtggtggtgatgacgcagtgaaggaagaaaacgccgccactgacgatgtcatgaggagtggggcagcagctgctgctgatgaggctgaagcggcgcatgggctggaggaggtggacagcgttggtccgtacattaactcattcagtattcgaggcgggaaaggtttccgataaagccccaacatttcaaccccctccccccccccttctgaaagggtgcttaaattgctcaggatggctactttaagcagattttcaccaaaaatttctacctaatttatgtatttagcaaaattttttttggaaaatttgggtgaaggaggtgaaaaaaacggtttatgccagaaaatttgattttctctcctcttagaaaaatgcttttttttatttaacaggtaaacaatttgactgggaaggaggagaagaggaggaggaggatgttgaattgggctttgaccttgtagagaatgaccatttggaccatggaaatgacgatggcgatgacgaaacggttgtggtggctgtggtgatgcaaaacgatgacgaagctgacaatggtggtggtgaccaatcggttgctgaacatgaacaacaacaaaatggccatgatcaacaattgcaggtttttttaggaacgtgtaaaaaatgggtttttgatatttttggttga

SEQ ID NO: 64285 - DNA, 207 bp, Heterodera glycines
aaaattccctcaaaaataaaaggtctattgcgcaccgccctctctatcatgctcgagagcatttgtatgtgtataaaatttatcaaaaaaagagatagccatttttctgggataacctctaaatataaaaatcctctgtgaaataaaatggcgattgtgcacagcccctccgtctcatacgcaagcgcttttgtgaggtataaaatt

SEQ ID NO: 64286 - DNA, 304 bp, Heterodera glycines; identical to SEQ ID NO: 53844

SEQ ID NO: 64287 - DNA, 503 bp, Heterodera glycines
atgacactcgcatgtgataccatatcatatgtgccgtcatatgtaagttccgcatacgatatgttcttatggcacgtcagttcataattgaaacgtggatatgatttatgacacgtcatatctgagatatcatccgaattgaaataggccctggataattaaattagctcatcaaatggtcattccaatgtgtccatttggtttcagttcgttttatttctcccaaaagcactgaccaagatgggcatatccgggactccgtcgatcaatgcccggcaattccaagctgctgtccgcgtacccaatggccttctcaaactcggccaaccgttcgttggccctggccaaattgagcagcgcctcggacttcataaaatcgtcctggtgaccgttggccaagtcgacctgctcaacggcctgtgagattggctcagtttaattaattaattacttcattagtaatgtcagagagacaattaatgaacgatttcattataaataaa

SEQ ID NO: 64288 - DNA, 931 bp, Heterodera glycines
atgccgacacttcaagctgagcaacatccgccaccactgtcgccacaaacaaacaatgtacagcagcaacaaccaactgtaccgagtccgctgaacgagcgccaacagagtgtacaaccaacgcagggtgaacatccacaaatccgggcaaacgccaccttgcaaacaaacatggttcaagcgcagcagcagcagcagcaaagtcatcagtttttggcacttgaccacgacaatgacgatcagcttttgaaccaaatttttttggtagcaaaataaaaaaataataaccagcaattgacatgccaattacaggatctcaccacttccgctgaaatgcaacctatcgccttggataacaacaacaacaataatatggttagcaagaatttttggtttgtttatttgtctaatattccattttgttttagaatccacaaatttcttcgtcagcatcttcatctcgtcgccgaaacaatgccaatgccggacgtggccgaggaagaggaggaggaaccagacgcagagcggtgagacgcatgaatgaatgaagattaaaaaaacattttgtgaattattattatttgtttatttttaaataaagaatgctcgtcaacagccccaaagcgaacgaattcagtcgtcccaaccccaaacggtccaaatactttctccatcagtggttcaacatggccaaggtttaacacgtgaacaatgcgatagtatacttcccaatctggaagtgaacgaggcaatggtccgaaatgatgagcgatgtgttatttgccaaatgggatttgacttggggtcattgaatgctaccgaactcccatgtaaacatctttatcatttgtcatgcgctagagattggcttatgcaccaaaatcgttgtgccatttgtatgcgccgttttgtgcttgactctgatgcttaa

SEQ ID NO: 64289 - DNA, 842 bp, Heterodera glycines
atgtcacaaatgctgccatttgttcaaagcccattctttaattcgatgccaatgccacatcaattcccacatcttccatttctgaaccaatttgctcatccaattatggggccattcccccatccggtttttgttcacacatcgagcccttctccctttcccctcccgccagggataacattttcaaatcgccaacaaattgaacgcattgctacacatgttcatggccaaaacattgcacaacagcaacagcaacaaattgtaccaaggactaatgagggaattgctggcgttggaccatggcaggaggaattttaccaggatggtactacaacaaatgattttctcgacttcaatcggcaaattggttcatacattccgtaatccttttttttaatattgaaggaaagggattgtgtttttagtggactaacccttaagctgcttgaatttaattttgcggaaagaattccttttcgcaatggcacatccgcgcccggcataaaccttttgttggaaaatgagcaacatttgcgtgttcatatttgtgctagagaggccagggctacccttttatcaaacactctcttggttggaggcacttaccggttcatgcatttgaatgtgagaccgaagcgcgattttggacaatctgtgaactacactttatctttcgcatttggaagttcagttcacttgattcgggttatcctgttttatttatttatttgtcattttgaatttaatgagtttaaggggccgacagtagcatttaatccattaactcttcgaagtccgagcgaccgggttcctcaatttgtttgtccaaaaaactaaataaa

SEQ ID NO: 64290 - DNA, 2125 bp, Heterodera glycines
atgccaacaaattttggggaattgagagagcgaatttgtgaggagatcggctatggaaatggtacaatgaagctcatacacaaaggtaaatgataccaatggaagtgagaaaaggtggtggatgggttttgttgaagtttggcatttaccaatgaaatttattgttttattgatattgccctgaattttgagacggggacggtgcacatattctataaaactttaaacactgtttataaatgacgtttaatttcacgggaaaaagatggtttagcatatttgcttatgagaggaggtatcactaaaattttcacaaaaatttacaaaaaaaaattgtactgagattattattttttaatttttaggcaaatacattatcgccccgatggaccggcggttggccgagcacaaattgaaggacggagacagaatttttgcgattggcgttgtggcaacgccaaaaccggccttgggtgttgaaatgtaggcaaattatgagaagatacagttagccaaactgaacgaactgtacaaagcaatttgagacgacattacggaatttggagcggaatttatttagaaaggtttttttgataattgccttgttaaaatcaaaaaaataagccgggcaaaacctttgatttttcagaacccaattaatggccaatctctttggcctcattgagttcaatttcattcgttgttcaattatccctccccttcagtgatttgtccctactgagtttgaccaattgattcgtcacaatgggttcgaccggcgtttatacttcggcaatttgctcatctctttatatttttccccgacggattacccggtgaattgggcgaatgtgcttctctctcacaatctcccccgcccataaacacatcatttggatgatccgtgccgaagtttggctaaccacaaacactgatgggtgccattgaaacacaaataaagtgttgtcaatgaattgattaatttattttttagttttcagatttcaatatgagttgcggagtctgcggcgggaaaatttggctgaaatgggcaaatcaatgcgagaaatgcgatttggtgtgccatacaaattgtttggagggggcacaaagcaaagaatgtcaatcgaccgaccaatacactttcgatgacgacactttcatcaaattagccagtgatgaaattggtaagcctaaaaaggaattaactaaccgaatagaacgaagggttagtgggagaacattggcaaaatgtttgtttttctttagccgaacggaaacggtccaacgtctcgcaatcgacagttgatgaacaaaaacctacgccatcggaaaaatgttcggatgggaaaaacgcttcttccaactgccgaaggcggcgaattgccgagagattgcaaacattttcagcacttaccttaaagagtgtgcaggaatattctcgaagacggacagtccaaaagggacagtcggcggagaatgagaacagcaccagtgacattggttggactgttcatccatcttaaacattctttgaccaaattgcatatttttcagaatcccccggttctccaaaatcgcctttttcggttggggcggaagggtcttttggaatggtatccattgcggaagtgctcgagatggatttgctcgactctctcgagggatttggcccaaaatcgcaatttagtgatctcaaatttgaaccgggtaaaactttttgcttttataataaaatgcgaattgattggcctttcttttcccacaggcaatgcttacaatccgcaagttgtgtgtgaggcgaaggtcaaaggacagcgtttgtttgattggtgcgagacggaagagcggaagaaacggatcaatgggcaggtgaagtgacgcaaattgaggggtccgttgttctaacgcaacaacaccctcagattgacctggtccaggctgaaattgaagcagtgactcgtctacggcgttccttgcccaataaatccggtgcttcgatttggttttgattgctgaattgtgaactcaaatttgcaggtgttgattttgaacgcatcgaacatcgtcttcaggcattggctttcattatgatgctttattgctatgcattaaatgtcctcga

SEQ ID NO: 64291 - DNA, 283 bp, Heterodera glycines
atgcaactctctgtgctttcttttgcattcgttgccctgtttttggtcggttttaatttaactagttgtttctttttttgcgttttaaaatttccggggatattttttgacttttttagtgcctcgggttttcagtgagtccaattccgattccttaaatatgttcaaataaaaacttttgcggtaatttttctttaagacttctgcgctaattgagttcaccgaagcgaatgcgccaaagcagaacaacggtaccgacacgaacgcggaaaaggaggaaaac

SEQ ID NO: 64292 - DNA, 2179 bp, Heterodera glycines
atgtccagccctgctagacaggtatctcgaccggagctgatcaagtatttttggtcccaccggcattgtggtgtttctcggtttcccttttttggtcccgtaattccccgtcccgaattttgcctaaaattccggtatccttcagcagctcgtatttaggctgtcttatttgatgaagccgttgaacgtttgcagaaatgtgctggcaatctttccggcgcgtgtcttttccatctgatgaaatgtaatttttacaataaaaactataatttcattaaaaataaatattttaatgaattatttcacaaaatttagtaaatttccaattaatttttattacagtgcttttgcttgaattcaaactctatcgagcgttctttgtggcctcgactaatggaactgatcccggcacatttaaaaatgattttatccgctctgactttgccgttcttcacaatgcgcccactgcttataatatcgaatttttccgcattgacatggccattgctcgcgaagagcttcttgcttctagtgacatctacttttttcagagttgtcctgaaagtgtgtgagctattaattgggggataggtccgagctgatcgagagtgtcggccgagagttctcgactcgagcaaagtcacgggtttcattttataatagcttagggtattggctggacaaactattttgggataaaattcgaatcctttgataatgtcagcttcgcaaatgttggccaatccattttgacactttggtctcggcctcataactagggatgcaatttatagttgctaaaaacataggctcaacaaattttttttgctcaaaaacctctcatatttgtgcattacagaatgagaaaagtgaaattttttcatcaataagcaagcaaaaaactttgaataattccatgctgctttattacgattaactttagccttggacatcgattcggacttcttcgaatgtgattgaagagaaaatggacagagaaaaagttagaccaacgactaagtatggcttagtaaaccctttgttaattttttaaacgtgaaagtgcggcctcaaacctaacgatacgagttagaatttctctaattttccaagtttactaaatttagccattatggaattttgaaaaagcacgtttaaacgagcgtccctggcctgtaccaaattttggatctcctttttttaaaaagtcggaatttcaagacaatttttgctttttgaaccacttttttgcggtgcgctttttgaaaaaaacttttctgcaccggggggggggggggggttaagcggtgacaataggcgccgcttgggaaaatttttaaattttaatacgatttgttaacagaatttgtccgaaaggtcatttttgtagtcatcgctattaaaaaaaaatttaagaaatgaggagaccggcgatgctgagaaataaacattttttaactgttgaaattgtacaaatttctaaaatcccttttgtgttctatcttaaaacttttaattaaagagacatttttgccaaaataattattaaatttttcaagtttggagaacagtttcactaatgaaatttaagctcgttttaacaaagagaaaattatttgcaatgaataaagtttaagttaaagagagaagaattggatttttcaataattggtcaccgatggcacaatcccttcactttgatgaacctggtcggcaattccctccaaatctaaagtttatttacttattaagctgtaaatattaaatagtcaaattctttgttcccatatgtaaaacagtgccccccccccaactgagcttatttcttaggcagtgcttatttttgagtatttgagaaatttttgagttttttaaattttccaaattatttaaataaaaattttaattttaaaatttcagggtttgataatctgcccttttcggcaccgcctgaccaaatgctcaaaactgcaaaatttgggcatttttaaggattataaattgtcctcggtgcccgtatgtgtgtagagaaaatttatgaaaacaatagcgaaaagttaatagaaagcaatttttgagaaagacatggacattatgaaaatttttgaaaaaataatcaccggaaacaatgtccaaatactgaaaaattgattatcagggattttcgagaaacaataaa

SEQ ID NO: 64293 - DNA, 362 bp, Heterodera glycines
atgccaatgaatgatgacaacaaaaacaatgcacagatgaatgataagggaaaggcaccacaacaatttctacagaatccgcaacaagtacagtacgcacaacaacaatcacaactgcaaccagcacagtacccgcaacagcagcaaattatgccgcagcaagtatttttaccctctgagcaattgcaacagttcccatggctgtacggtatgccagggctgaacagaatcacacttaaacacaatgccaatgaggccgtaaagccatcgccagccgaacagttgagcagtttccttgcagagcagcaacgtcaacaacaggcaaccagtcaattgcaccgtcagaacctgcattcgcgagg

SEQ ID NO: 64294 - DNA, 570 bp, Heterodera glycines
atggaatccgtttcatcttctttaaagtcaaccgagggccagacccagcagcagcggaaggaaattgcaaattcttcagtaagaccaaccgagggccagcaatcggtccgttactttcgtcgaattcgcatttgttcaacttcctcggattcatcggatgagatttttaattcttttgaacgtcaggacaactcagtgattaatgttaagaacactaagcaattgaacatgatcaaatctcccgaggtaagcagaaataaaaacttgaaattctttggtatattttaataaaattgtttaatatttcaacctctatcaatgaaattaagaagaacaaaaaaggaaaatcgcgtgaaattattgttaggcagcgttctctctctccgagaagtgacattacaatattaaatacatcaaacaaaacatcggtttcgaaagcacctgcaggaaagcacaaagaaagtgacgatgctagaaacgcgcgcaagatcttcgttggcgggtttaattaattggaaaaagaagattagttaactttttagattatagcatacgacgacgaagaattca

SEQ ID NO: 64295 - DNA, 99 bp, Heterodera glycines
aaaattaaaaaacgggcgcgaagcgcccgtcctgaggccgcgaagcggccgaatgttccccacaaaattaaacaaacgggcgcgaagcgcccgtcctga

SEQ ID NO: 64296 - DNA, 566 bp, Heterodera glycines
atgaggtaaaatttttacctaattaacgcctttaataggtttgccgtccgccgattcgttcaatcgtcgcacttttcgcgcacttttttgcattatcattgttaatatcggcggctatttctttacactaagttgttacattttgttaattcccacaatttcatcgccgatcactgcttggttttaccaagcaattacagcaattccttttaacattggctcagcatcaagcggacccattttatactttacgaggtgttttttaaaagaaaaatatattttttaatttaacttcctatttcagtactgaatatcgtcaggcattccaaacggagtttccatctgtattcaaacgaattttgaatgtgaatcgagtaattccgctgcacaatggacctcaattaggcactacacaatggtgaatgatgtcatccagcagaagatgctcttcggtaccagcccaatcattaattggcacttaattgatgccgcgcgttccttggcctattggcccagaaatcatagaaattctctctaatgttttgattactaattcatacaacaga

SEQ ID NO: 64297 - DNA, 648 bp, Heterodera glycines
atggtaaatatgcatttattcttgaaatcacatccaaatttacagttttatttggccttcaaagatgtccatcccagctggtctctgattggaattgcaggaatttatgcagtcatcatagtaattggcgccatccttaatttgtctgtgattttaatcacaatcaaaacaaagtaggttttatatatatttaaatttattatgcttattgcactcgattcataatagcccgcaatttgcttaattagctcttttttagggttgccgtccgctgattcggtcaatcctcgcacttttcgcgcactttttttcattatcactgtgaatgtcggcggttattggttctctgcaatttcccatttgctgttaattcccacaatttcatctccgatcactgcttggttttgtacagcaattacggcaattcctgcgactttcggcgcagtgtcaaacggacccattttatattttacaaggttttaaaattttaaaaactaaaatatttattagcaattatagtaccgaatatcggcaggcattccaaacggagtttccattcgttttcagacgaatttcaaatgtgactcaagttattccactgcagaatacccgatcataagctttgaaagatataatttaaataataaa

SEQ ID NO: 64298 - DNA, 527 bp, Heterodera glycines
atgaaactttttaaaatataagcctaaactttttggcctgtttaaaaaggaattaaaaatttttaaaatatttattcatctcccttttgatagaaaaagcatcagagagccttatttaacttttaattaacatttggtgcgtttcagagcacgttctgaaaaaatatttatgaattaattttgcaaaataataaataattaatgaaaaagtcagaatttcgaaaaattttaaaaacaacaagcgttggcattttttcaggttaagttagtcctttacaatggagaaggcctgcaaaatttggagagattatatcgattttagtgcgctaggttcgatgaaactttttaaaatataagcctaaactttttggcctgtttaaaaaggaattaaaaatttttaaaaattttattcatctcccttttgatagaaaaagcatcagagagccttatttaacttttaattaacatttggtgcgtttcacagcacgttctaaaaaatatttatgaattaattttgcaaaataata

SEQ ID NO: 64299 - DNA, 635 bp, Heterodera glycines
atggccgaacaatgggaggaagaacgtgccgaaaagcaaaggctgacgaaaaaactgagaagggcgagtgaatgggcgaagggagaagcgaacaaacgcaattataggacaaatgggaattttaaagtaattaaggcggaactactccaaagagaaacggaagaacaattggaagtgcaacgaaaggcgaaagagcgactggaaacggagcacaacgcgttgttacgcttggagaaacggcgaacactgcgcgaagagaccgaatcggtgggcatggcactgatcagagacaaattggcggcgaaagagcgcgaagtgtccgcacaggtcatttgaggggaaaaggaagagagagacaaatggaaaaggaaaagcggactttagcggcaccgaatcatcgaattggagcgaaagctgtggcacatggaaatggcaatggaaagcgaacaatgaaaagaaggaataacggcgccagcggacggcacggacaaattgagaaaaatgacgggaaaattggaagaaaaaggacaaaagtggcagaaatagggagaaaaaagggaggttgcctgctgatcgaccgtaaactgacttggaatttgttctcttgagtttcttttcaaattttctttgaataa

SEQ ID NO: 64300 - DNA, 985 bp, Heterodera glycines
atgccaaaaatgaggcatacgatgccaaagttacatcataagagtgccagcacagatacggtaatcaactgtggtgtactgtaaaatctgggccaaaaaattgacaaggaaaggagcgcgaaaaccaattggcaaaacgaatcgaaggctaacagccaattacacactttgtgatcctttcttaaaaatcaaaaatgaattaaatttaaaattttaaagactcacattttggtaaaagtatccaaaattaacgaaaaattgaacaaaacggagaccagtgccaatattcctggcaaaataattcccggccaaatggctgaccttttaagcaataaatcaacaaattcttcctagtatttagcagtagagagagctaatcaatgagatgccaattaaaataaaaaattcatgtttttattcattgtaaaaaaattgatgaaataaaaatttgaaataaaaaggttttgcattaatgtcacacaactttttactttccttttctccggatgagaattgcaatttcccacaattttaaggcgcgatatttgttatacttaaaaaattttatgaaagaaaaagctttacattagatttcagatagtttatttgttcaaatattcctaaattttacgatgtcacagaaatacggggggaaatggagaaagaaagaatcacagcgaaaaattaatcagatttttgctgaaggcctgacaaaacatctttgtgttggttggccaaaacgacaagaatgtgcccaaagtctcggccttcctgcacattgagacgcaaagagttgacgaatttctgatcatattcagtcagtactgcatcaccttggtttctgtagaaaaaatgatttgataatgctttaaaactgctcgagagacggtaccaagaccgagacttggcctcaaaacacactcgagaccatgactcaacaagacgagaaccagaaacccgagactgttctcgaggcgagaataaa

SEQ ID NO: 64301 - DNA, 687 bp, Heterodera glycines
atggatgacacggaattccgaatttttggggtcggaattccgatttccgaaaaatttatgagctacggaataccgatttctgaaatttttttggacctcggaatgccatccctggtatatggtatgttagggtttcgactttagaaaaagtgaaaacagcaattattctatctagcatttccatcatcattttcttcaggaagccgaaaagagttggacccccgagcagtgggggacaaatgggcgctggccaactgggcgtcagcccatgtttttccgatataactcctttcatagttgtacgaattgagtcaatttgatagcatttgacagccttactattatagtgcaagttttcaaaaaaaaattcctgatatttcaaaaaattacagctaatagagaaagaacacttaggtatttgttgtgcaatcgaaaggtttcgatgaattaaaaatttagttactcttgaacaaaataattttgtaaaattttccatttgattgttttgagaaacgcccattagcacctccaacaaaacggtgcgtatcatctccttgcactcaatttaagcccacctgtgaatgttaaaggattcgcctttgttgcgcgctttttccagaaaattgatggcatttttaaccgaatcgtcaatgagacacgtgcacttaattaacaattattaataaa

SEQ ID NO: 64302 - DNA, 887 bp, Heterodera glycines
aagtgcacgtgtctcattgacgattcggttaaaaatgccatcaattttctggaaaaagcgcgcaacaaaggcgaatcctttaacattcacaggtgggcttaaattgagtgcaaggagatgatacgcaccgttttgttggaggtgctaatgggcgtttctcaaaacaatcaaatggaaaattttacaaaattattttgttcaagagtaactaaatttttaattcatcgaaacctttcgattgcacaacaaatacctaagtgttctttctctattagctgtaattttttgaaatatcaggaatttttttttgaaaacttgcactataatagtaaggctgtcaaatgctatcaaattgactcaattcgtacaactatgaaaggagttatatcggaaaaacatgggctgacgcccagttggccagcgcccatttgtcccccactgctcgggggtccaactcttttcggcttcctgaagaaaatgatgatggaaatgctagatagaataattgctgttttcactttttctaaagtcgaaaccctaacataccatataccagggatggcattccgaggtccaaaaaaatttcagaaatcggtattccgtagctcataaatttttcggaaatcggaattccgaccccaaaaattcggaattccgtgtcatccatgccatatactatacatttttgaaacacgtcactacgttacggtagagataaaatatgtttgagtgtgtgccaagtttttttctttgttccaagttatatgggtatcatatcatgaactcttttaaaattttgagtcaaaatttatttacccccccccccccgtttttgtaggcatttcgtagaaaatgagttcgatgtgatcgcccgcgtggcgttgggg

SEQ ID NO: 64303 - DNA, 104 bp, Heterodera glycines
cgcttccaattccttctacaatcgcctttatacatcccattatgaacgctaaaattatcagagtgccgaaaatcgcatgtgatctacgcctaacaaaaaatggt

SEQ ID NO: 64304 - DNA, 558 bp, Heterodera glycines
atggaaaatttagccagcggtgccatctgtggagtgatgtatcatctgttcagcggacaaccactgaccatcatcggttccactgggcccgtgctcgtgtttgagaccatcgtgttcgacatgtgcactgtcagtttaggggaaaagcggttttattaatccctatttcaggggttatttagcctaaggaatatagggattattttcgtccgagtacaagtttttggctataactttttttcttttccaactaaatccaacaatcttggtatcattcgataaccctaaatgtcctctattagcctggttttaaaagttttttcaaaaaaagtatagaaactcagttttttaaattttgcaccctctgatcagggcctgtcactcaactatctgtccttccgcttttgggtccatgtttggaccgcgctgattctttttgtgatggtggcgactgatgcttcatcgcttgtctcctacattacccgcttcacggaagaatcatttgccatgctgatcgccgtcattttcgtctacgaggcttgtatgaagctgttcaag

SEQ ID NO: 64305 - DNA, 416 bp, Heterodera glycines
agagattgtcctcataccgtatccatttaaaaaacacaccgtttcactgacatatactttctgctttcccaatttcgctttctggaattcagtgtttagcagccattccctacatttttcttcccattcattagtggtgcggtgggaatgccattttttgcttttgcgtcgcctttgtcaccgccaacggcgccgccgctttttggcaatccgtcgctctttgctttcccaccatttttactcttctcaaccgctgtcaacagttctttttgtgcctgaattttcattaaattcaatgcataattattattttgtattcatctaaaaaaatgaagtgatcggatgaaggaagtcccggaactgagagggaattttcctgggacatttttacaatagcccaagatagggactgtatc

SEQ ID NO: 64306 - DNA, 1400 bp, Heterodera glycines
gtacggcattccgccacaacaaacggcggatcaagccagggaagctttttgagcgccgttcgctccatttccgacattggccgcacattttcccatggcaaaaatctgcagggacgttgcacagattcggacagtccaacgaagcggcaaacatccggcaatcagcttgagctgcccaaagtgagtaataggtccatgcctggatcaaggccatgataagcctgatttttcctgggcctgaatttttgttcaggaaatccaggcccaacatggaacccatgtccagttccaggcttttttcaaaactgtcagcccttagcagtttggtcaaattgttccagactttataacacttaatatggcttcccaaaaatgcatcagtatgggatttgcagctttttttcccccatatcaatgcatgccttaaaaatttgcttaatcaccacgacgactgaattttgcagtaattgtcctcattcattaggttatataattccgtcacataaattatgccaagaattttaattagataatcctggtgcatttttttgtttctaaggttggttctttgcccaaggacatgcaaaaggagaattcgcagagcagtgacttttttgcacgaaatatgcacttcatgaaaaagttgccgcccggcgctgaggcgtccaatgttttagtgggagaggtaattagttaattaccccttagcaattaataaattttctccaaaaatgtgtgacatgcactcaggttgacttcctcacccatcatgtcactgcgtttgttcgtctcaagaaggcccaactgcttggcgatctgactgaagtgccggtgccaacgcgctttctgtttttgttgcttggcccctccgggcatgcggcacagttcaaagaaattggacgcgcaattgccactttaatgtccgatgaggtgaatacatagagatgatcaataagatcgtgggagcatatgcatatgggcgcaatacatttccacactctccgaaatttttttatttattaacaggtattttttttaataaaaagtattaaaaaatatttttttaatagaacaaatgctttcaaaaattttgtctcggcgaaatttcggccggctaaattatgacggggtaatttttcggcggcgaaactttgtcctgttccctaaaaaatcaatttaaaaaaatcaaatttttaattactatgcatttgctgactcgctgctgtgtttctcagattttccacgaggtcgcctacaaagccaaacagcggtcagatcttttggacggtgttgacgaattcttggacgctgtcactgtgctgccacccggggaatgggacccgaacattcggattgaaccgccaagttccatccccaatcaacagagtcgtgttcaggtg

SEQ ID NO: 64307 - DNA, 1123 bp, Heterodera glycines
atgaacaacagccaaaacaacggtgacaaaatgtcatcggctgccccttcaacaatgtcagcagcagaaggtggaaattggatatttattgtatttgggctaatgagtcaattaaggggggggggggtgccacaggttcattttgtattgtatttgactaatgaatgtctaataggtcaattaagagggcaacactataaattcgttttgaacccctattttttgatcaaacatcaattagtctcaaacaaattgtcatggcagcagctttcaaaggtgaaaattggatatctgttgtatttgggctaatgaatgtttattgagtcaattaagggggcgccgtaagttcatttttaaaatatatttaggctaataaatgtctaatgagtcaattaagggggcggcgccataagttcatttttgaaaatccagttggtcaaagatcaattagtctcaaaagaattgtcatggcagcagcttttcattatcgcaatgttgcccgtatttgtatgctttatcatattttttctgcgcattgtcctggaatttagcaaataccccccaccaaagaattggaaaaatgcgtcagtgaatcagaatttcttaaaaaaacgagataaggtaattgattttttgattttatgcgctaattgaatgtatggaaataaacaatacaataatccaattacagtatatttgtaaaactgttgaacctttcaaaaaactgaaattaatgaggttcatatacattttgttgacctttcgtattttgtataatatttaatgctataaatactgtattactgacgcatttccattggcatataatgtatattttccactaacgcatactactgtattactaacgccttttcaccgtcgtatactgtattactgacgcattttccggcggccgccgtttacggtcctaatttataagagaaaacattcagcctctggatccgctagcaaagtggcaattaccggacccgctgcacctgtggaagagcctcagccagcagcaggccaaactcagccgacaacttccgccgacactttggccaacattcatcaaacggacaaagagatcgctgctgaccgacgcgaatcactttggatgtga

SEQ ID NO: 64308 - DNA, 490 bp, Heterodera glycines
atgtattttgaccatgaaatgcgaagggaaaaggaacaaagaaaaggaaaaaagggacagagaacgaacgaaacttttgatgggaaattaaactgtggatggacacaatttcattttgtcgttccttttggtgtaaagttcgggaagaaagcacaaacagaagaaaaagacaccacgcaaaggtcggcagagaaagaaaggacaatcgacggacgaaaagttaattaattaattaattggagagagagagagagaaaaaaaagaaagaaaaaaggaggaggaaaagcattggcaaattgggagaaaacaaaatgaagaacaatgagcaaatatgtacacaaagtaccaggagaatgattactcacacatttggtaaagagaaagatgatacgattggttttgaattgtccaaaaatgtgcaaaaaaaaagtgccgcgaagtcttgactcatggcagaaaagttttgcagttgccaggtttaaggattaaa

SEQ ID NO: 64309 - DNA, 463 bp, Heterodera glycines
atggcggaataccgcggctttgctcgcattttgaccaaatcagatttgctgagcgtcgaccggataaaggaggagattggcataatgttgaacgacaaaaagtgagtgccaaattcgaatttacagtttttgttttcgcatcgtcagatacaaagcaaacgctcttcgcctgtccaaactccaccgacaaaagccaaacccaccggaggagcagctgatcagatggaccgactttgtgctggagaacggaccactgaaggaactgatcccggaaagtgccgagttgggaatggtcgaatatttctgcttggacattgcgctgatttgcttgatcatcgcttttgccatcctttggctgtgccggaggcttttcggcgcacttttggcaccatggaagagagaaagcgcacgacagaaaaatgacaaaaaaaaagtgtcggaacgagtgatcaaggaggactga

SEQ ID NO: 64310 - DNA, 409 bp, Heterodera glycines
atgagtgtgtgccgtgccgtgcacatgtgccctcatttacgagttccttccgccggaatcccagcagaagcaaatggtggtggacaaaaggccaaagaatgttttgttgaacgaaaatttcaaaccgatgtatgggtggtggtcaacgaaaatgatagggggtgggggtaattaatttcgaaaaaaaataaaataactaattaattaattaattttaaatgaaactatttgggtgaaaagaaatgttttcgtttagttctaatctcaaaaaattaattgaatactaattttattttaaaaattctattttatttatttattattggaattcttttgtctttttaggcgcccttatttaatttctttttcagacattaacttgttttaaaaattttattaccctaataaa

SEQ ID NO: 64311 - DNA, 661 bp, Heterodera glycines
gttttcggggcagtccccccgaaccgatgcgcccagatttatggggagaccgaatccttcgggaatagcttccctatagcctgtactttaattctgcgttggatttttgctccccataattgtttgagtaccccaaacggacacttgaaaaaatagatttttttgttttcggggcagtccccccgaaccgatgcgcccagatttatggggagaccgaatccttcgggaatagcttccctatagtctgtactttaattctgcgttggatttttgctccccataattgtttgagtaccccaaacggacacttgaaaaaatagattttttttgttttcggggcagtccccccgaaccgatgcgcccagatttatggggagaccgaatccttcgggaatagcttccctatagcctgtactttaattctgcgttggatttttgctccccataattgtttgagtaccccaaacggacacttgaaaaaatcgatttttttgttttcggggcagtccccccgaaccgatgcgcccagatttatggggagaccgaatccttcgggaatagcttccctatagtctgtactttaattctgcgttggatttttgctccccataaatgtttgagtaccccaaacggacacttgaaaaaatagatttttttgttt

SEQ ID NO: 64312 - DNA, 1107 bp, Heterodera glycines
tactctgaccaattgtataagcattacgcagctgcttctcaatacgaatatgcgcgacattactacactccgttcaatcagtacccacagccgcaaccaccgcaatattttaacccggaacacatgcagaaactgtacagggaagcggtacggtatgccaattgcaatgccatagttaaatgggacagaaaaaagcgcgaattgtccatttgggtcttggacagtaaccatcgttctactgttacagtacacggagtacgataaacgcgagttggaaaacgcgttgcgcggctacttacagtacatagctttggcctacgcccagcccatgtcggtcttcccgcggcactacgacttgcgcgacaaattcccgcagtgcgccgcgtggattggcctcgcccgggaccaggggaagtgcggcgcgtgttgggccgtcgcaacggccgccgcgcgcgacgacagggcgtgcattttcttgacactccgcaactatttggtgttcaccaagaacccgaacctgtactcatcgaccatggacctgatcagttgcacaaaggaagccgatgggtacgaagcgaaaagccaaacggaaaaacgaattgaaattcaatgcggaaaatgggggaaaacggaaaaatgggggaaaccatggtgggttaggcaaattgcaattcagctgcaacgggggaacgccacaattggcatggaagtatttggagaagtacggctatttgacgggtgcgccggtggtgaacggcaccgggtgcaagccgtacgtattcccaccgctgaagtcggacccggagaaggagcggaaggcgcccgagtgtacggaacattgccaagcgggatggaagcggatggccatggacaaactgagcggacgcattctgccgccgagcaatgagacgcgctaccgcacgggtgagaaggaaaatgccaaaggggaggccaaaaggtaacatttcagtgatcaaaacgaaccactggggcatggacgactttgaaggacagctgaaatgccaagagcgaaggatggacgaatgttatggcaaaatgttggagggcagcgagagaggaatcatggcagaggcaagacaccactga

SEQ ID NO: 64313 - DNA, 204 bp, Heterodera glycines
atgtttgacgaaggaaaaatgcgcggaaatggcgacgaaagaccaaaacggcaccaaatgaagcacactcagtggcaggaaaagcggacaaatggaggaaaagcggacaaatggaagaaaagcggacaaatggaagaaatgaggaaaagcggacaaatggaggaaaagcggacaaatggaagctcagagaaacggatgagatga

SEQ ID NO: 64314 - DNA, 992 bp, Heterodera glycines
atttagccaattcattgcgtcaacaacgcaccgaggacaatcacatttcgataaatggacaaatttactcagttgacggacctaatgttaatgttggtgttgaagggcatgatttgagtgtgaatgggagagtttatcaaaacagggccacagagcagtatctggaaattatacaagacaaaaacataagaaatgtaattgtcagtgtgccattatcgttattttctcgcgaaaacataaccgttgggcaaacgcgacatattcacgctgaatgcgatggaaatttatatatcgaccaatcggcagatgactgtattcgcatattatgcgttgatgtaaaaaaggatgccgctgcaaagaactttgggtcaacaagtggaggctttaattttggatcgacgagtgttttttacaatttttcggtccgaggaactttacatatccataattcgtcacttgagtgtgctaacattgaatgtgatgcatctttaaatgtaactcactcaccaatagaacgtaatgcgcaaatgaaatgtggtgggagtttaagtattgatgagtcaccaatgggaaatattcggcttaactgtgatggatctttgcggatcgaaaaatcgaaaatggaaagcagtcagattgatgttggtggaagcattgggattgttaagtcaccaatgggaagtattgggattgactgtggtggatctttacggatcgaaaagtcgaaaatggaaattggcaacctagactgtggaggaagtttaaccattgtagaatcgccagcgcaaaatcttcagttagactgtggaggaagtttaaatatgaaggagtcgccaatgaaaaatgttggcattaattgtggtggaagtgcaaccattaagaagtcgaaaatggaaagtggtcgcattaattgtggtggcagtttttcaattgatagaacgccaacgggaagtgttcgaattaattacggtggaagtagaattaatttatga

SEQ ID NO: 64315 - DNA, 412 bp, Heterodera glycines
atgtttgatgatcgcatcaatgaagaagatgcaaaggataatgacgatgaaataatggtgacgtcagcagaaaatgacggaattacaacaacggcagcagcaacatgttcaagcagtagccagaccggaactgataggaaaagccgagaagttcaagcagcaatacaggaccaacaacaaacaggaaatactaataggagccgagaagttcatgcagtacagtaccaactacagcagcaacaacaacaaacagcagtaaatgccgagagaagccgagaagttcaagcagtacagtatcaactacagcagcaacaacaacaaacagcaggaaatgccgggagaggccgagaagttcaagcagcacaacacctacacgatcaacacaagcataaccatcgtgttcagccgccaa

SEQ ID NO: 64316 - DNA, 225 bp, Heterodera glycines
ttttaaaatttcgaaaattttgaaaatttttcgagctagggctaaaaaacggttttcgggtttttgaattttaggattttttaacgatttttcccagagaaacggagaccacttccaaaacatagtttttcgagctctatcgactggtatttttttcggaaaaatttcgattttttcccggaaatagaaaaaatttttggcctgagcgggacatttgagtcccgg

SEQ ID NO: 64317 - DNA, 506 bp, Heterodera glycines
caaaagttgtttacaaccacttattgccaatttaatttcttgcagatttaaagccatccattgcctgccggttctcggcacagcaaagcactaatagggtgtttgactcacttcaaaaaataattcattacccaaaagtttttttacaaccacttattgccaatctaatttcttgcagatttaaagctatccattgcctgccggttctcggcacagcaaagcactaatagggtgtttgactcacttcaaaaaataattcattacccaaaagttttttacaaccacttattgccaatctaatttcttgcagattgaaagccatacattgcctgccggttctcggcacagcaaagcactaatagggtgtttgactcacttcaaaaaataattcattacccaaaagttttttacaaccacttattgccaatctaatttcttgcagatttaaagctatccattgcctgccggttctcggcacagcaaagcactaatagggtgtttgactc

SEQ ID NO: 64318 - DNA, 305 bp, Heterodera glycines
atgtataagcatcgtttattcgaaagttctgcaatttatagtagggttcgagccccgtgggtgggcgtggctttttaaattttagggatgaatttatgagaaaatttttcatatcatagggttgtatttttctaagttttagaaattaaaaatcatcaaggaatatttgtcctcaaagtttccctatgcattcaaatacaatacgtatatttaaaaaataataattctaaatttaatgtagattcttaaaaaattggatgctttttgctagcttttcatttcccgttttgtacatacgaaataaa

SEQ ID NO: 64319 - DNA, 58 bp, Heterodera glycines
aaaaaccaaataattttgtattattttcacttgatataaattaaaatttgaatttttt

SEQ ID NO: 64320 - DNA, 157 bp, Heterodera glycines
atgagcgctaaaattatcagagtgccgaaaatcgcatgtgatctaagcctagcaaaaaatggtgtaagtaaaaatcgtaattacgctcaaaaagcttctcaaacaattttagcgcttccaattccttctacaatcgcctttatacatcccattatga

SEQ ID NO: 64321 - DNA, 1104 bp, Heterodera glycines
tcaaggtttgccgggtccaagtggcccgccgggtcctccccgagcgccggaccaagcggctccgtggttgggccgcccgtgctacccgggcgtcaaaggcgccaaggcgagtttcggcacaccgctaattttgcacttttcagggtgacctgggctttcccggaccgccgggtccgccagggccggcggcgctgacccagcacaaaggcacaattgtgggccctgaggggcatccgggcgcaaagggtgaaaaggtcgcgcgcgcgggtttttgtttccccatcaaaaaaattaactgttattttaaatgctttatgctcttttacttaaatcaattgaataattattattttctcaatttaaataatttaaaaaataatatttattataaaaatttttaattaaaaacaaaacacgattatacttgaatatattcttttaataacttcctttaaaaatatgaaaatataaatttttgcatttttggtttacaaattttataattggctattaaatttttatcaaaatatttttataaaatcataatcataaaattactatattaaatattaaaaattaaattaaattttttcaaataattttttatttataaatactaaccaaaatttttcgcttacgtagtgttaattagttgcatagaaactaatatagaaaatgccctcacatgccttcaattgctgcttctgtgccggtgtgtgcccgtttcaaaatttattaaattttttgcataaaaataaattttttaatttataattcagggagaacctggcgatacaggcccacgcggttatcctggccaagcaggcattcctggacagccgggactgcctgggatgaagggcgaaaagggactgccaggcccagcagggccaagggtaaaatttattatcaaaaaatgtaaaaaattcaaaaaaaattttattacagggtaaagaaggtcggcccggacagcccggtccacctggcttcaaaggcgaccgcggggtggacggcattccaggagtgccgggacaacttggccagaaaggagaccaaggctttcccgggagagacggtgcgcgtcaaattaataaagaattaatt

SEQ ID NO: 64322 - DNA, 1017 bp, Heterodera glycines
ctgcaaattcttcggtgatcagtcgccatggcgaaaggcaacagggaaatggagacaacaacggcaaaacaacaatgccaaagtcggcaaaggcagccgctgatcaagcagatggagcaaatgcttcgcagctttgcattatggcatgttaaattttggggcattaattgaaactaattaagggaggtaattggcttaataaaatttgattgccttaataaaatttaattttcaattttgcaatgaaattaaacaaactttaaaaattaaaaactattttaatttgttcacattttattgataatcctgaaaatgattgtcattttgcaaaaatgctaatactttcaaaacaaatttctttcttattttaagaaagtgatttaatttaaaaaattattttactgaaaaattaggattttcttttcataaccaaggcattctaaaattcttttcaattttatcctcatttgttcattatctttaaatataaaagtttgttttctgttcaggccattgcttcttgtcattgtcattctgttcattgtcgggacaaatttagtggaaacggttgtcattgtcagaaaaattaattaatacccgataaataaatttattaccataattatttattcaattcagcaatcagcttgtcgtgattgtacacagcgcggatgcttttgcattggagaaaaaggcattctaaaattaattaattaattaactgacatttattaatgcgttatttaagaataaatcatcaaataatattaattgattttaaggctccatgggaccgcctgggcctcaagggcctccaggattggccggcacacgcggttttccgggccctgaaggactgcaagggccaaaaggactaaaagtcaaatattctagcaaaaaaaaaaaaaattttaatttaagggtgcacaaggccctcccggaccttttggcgtgaaaggtgaccgaggcccagtgggcacgccaggcttccccggcaatgatggcaacccaggacat

SEQ ID NO: 64323 - DNA, 1210 bp, Heterodera glycines
atgcgtaccattctcttcatggccatggtttgcttggtgatggctgtcctaatggaaatgggtgggcaaaaatattttattaaaattataaaaaatatatttttatttatttattttagcaaattcaaaagcagtcaaaaaagacaataaaaaaggtaaaaacaattttaaaaatttattaaaatattccttgaaaggagcagtggcggcatcaccagcaaaaggaaaagcatcgccaaaaggaggcaaaagcccagcaaaaggaaaagcggcaaaaggtaaaaaaaaatggaaatgatttaaaataataaaatattaagttagtaaaaaagataacaaattgaaagcaaagaaagaaaccaaaggcattaaaggtagaaggattataaataaaatattttttgtaatataaattaaaacagttaaaaatgcaaagccaacaaaaaaaggtaaatcggcaaaaggcgcaccaaaaacaggcaattaatgtttttttttatttgtcgaaaagtaatgaatttattcagccaagaaagtccaagccgccaaaaaagcaccaggaaaggacaaaaagtcgctaggtaaaaaaccgtttgaaatttcaaataattataatctgaaattttaacttaatttagttaagccaatcgtccttaaagcaccggtaccaccccataaaatgcacccgatgattgaatccgaaggtaaactctgatatctattcaaaataaaggtcatcctttccgaaatttttatcagctgtgccaccgcccgcccatgcgcgttcgcttgcgaccgttccttacagtacaccgggggcagccgaccgtaactcattgccatcgtacacttcggctggcaccaatttggacatggccgatgataatgatgattatcagaattattactacggaacggaagacagcagcagggaatttgatgcatcggcggaggaggaggatgaactatatgaggaggaggtcggggcaatgagtgggcagacggacgactacggtattggcagtggacaggatgagtacggtcatcaaccggtggacgtgccgccaaagtcggtgatgctcgactgaagagcatcaatgaaatcaatcagagatcaccggaaaatcattttttcgtaatatagaccaaaatttatagttgctaattttttgtatatttttatttgtaaaaatagttttttattaataaa

SEQ ID NO: 64324 - DNA, 69 bp, Heterodera glycines
aaactgatcagaagcgcaccaaactttgcagggacactgaaaggacgagaaataacctatttcaaatag

SEQ ID NO: 64325 - DNA, 239 bp, Heterodera glycines
ggttcgatgatactttttaaaatataagcttaaactttttggcctgtttaaaaaggaattaaaaatatttaaaatatttattcatctcccttttgatagaaaaagcatcagagagccttaattaacctgtaaataaagttttgtgtgtttcagagcactttctgaaaaaatacttatgaattaattttgcaaaaaataaataattaatgaaaaagtcagaatttcgaaaaattttaaaa

SEQ ID NO: 64326 - DNA, 693 bp, Heterodera glycines
aaaaaatcgatttattcaagtgtccgtttggggtactcaaacaattatggggagcaaaaatccaacgcagaattaaaatacaggctatagggaagctattcccgaaggatttggtctccccataaatctgggcgcatcggttcggggggactgccccgaaaacaaaaaaatcgattttttcaagtgtccgtttggggtactcaaacaattatggggagcaaaaatccaaggtaaaaataaagtagtggtatatcgaagctattcccgaaggattcggactccctataaatctgggcgcatcggttaagggtactgccccgaaaacccaaaaaaaaaatttttttggataaaaattatttaaatgaactgactagataatatttaaaataggttatttctcttcctttcagtatacctgcaaagtttgctgcgcttctgatcagtttctgaaaaaaagttaagcctaacatcggttcagggagactgccccgaaaacccaaaaaaaaattattttgaaaaaaaattattaaaaggaaatgactagttactatttgaaataggttatttctcgtcctttcagtgtccctgcaaagtttggtgcgcttctgatcagtttctgaaaaaaaagttaagcctaaaccttttggcctgtttaaaaaggaattaaaaatttttaaaaattttattcatctc

SEQ ID NO: 64327 - DNA, 93 bp, Heterodera glycines
atggggagcaaaaatccaacgcagaattatagtacaggctatagggaagctattcccgaaggattcggtctccccataaatctgggcgcatcg

SEQ ID NO: 64328 - DNA, 147 bp, Heterodera glycines
atgacgccaataaattggcaaaccctcgaggtaaatactgaaggtccacaaaacttccaacgcagtgaaatcggcgttgacaaacagcgccagcacaatgcacgggaggacgagaagttcgacgcggaaagtgtcctcgtctttatt

SEQ ID NO: 64329 - DNA, 570 bp, Heterodera glycines
gttctgttcatcggttctctcttcgccacctgttatttcatgttcgtcaaattccgtgccacttacaataaagacgaggacactttccgcgtcgaacttctcgtcctcccgtgcattgtgctggcgctgtttgtcaacgccgatttcactgcgttggaagttttgtggaccttcagtatttacctcgagggtttgccaatttattggcgtcattttgccactattctttagctgtcgcgattttgccccaacttttcatgcttcaaaaacgcggcgaagcggagacaatcactgcccattatctgtttctgcttggcatttaccgcgctttatacattttcaattggtttatttgccggttcatttttctgccattttccaaatttaagggtctatcgctattacactgaggcgttctacgacccaattgtgatcgtttcgggcattgtaagttaagaaaaaacagcgccttacgcctcgcattcctttcacaggttcaaactgttctgtacgccgatttcttctatctttacgtcactcgagtggtcaaagatggggccaaattggaat

SEQ ID NO: 64330 - DNA, 3537 bp, Heterodera glycines
caaaagtatcgatgtgggtgatcagaagaggcgggtcatttcagtacggaacaaatgattttaattaattaataattattttaaatatattattttaaaatatttttaaatattatttggaggcaaaaaatccatcaatatattttacacattcaatgcattgcacttttattattcacaattgtatttttttatatattttataatttaagcatattattgatagatttttgccatatcagtcgacactttttagcgagttattgcactttatttatattcgattaaaatacgtagcataacctagtcaaaataatagtttttgtcttctcataataaagcaaattcatttttctaaaatattttacttctaattttctcttaatttttttgtcaatttttaattttaaaacgattttagaaatgaaaattttacttttaactttttttactatcctttgctttattgacttaacgtcaaaccataagtcgaaatttgaggactttcttaaaaatcgagaagcaatgaaactgatcaaaagttacaaggaaaatcagatcaaaactgttaaggaactacatattgagctagcaaaaacagggattcaattgggaatatgcactttaaaaatatatatgggtaaaacaagagcactatttccgatacatcaaacgaaagccctcgattagaaatgaaatttgaaaaatgtctttctcgtgatctatcagatactatctatttaatcggaagtgagaacaattggcgaaaatacagaatgacgaatgaaaatataacagatttatacattgcatgcacaaaatgttatgcgttacaaaacaaagaaaaaaggcttaggccaattgttgcaagagcagttattcaatttaaagagagataaattggccacctcacaagtaatgccatggcaaaaagcttattctatcaataatatgcttaaattataaaatatataaaaaaatacaattgtgaataataaaagtgcaatgcattgaatgtgtaaaatatattgatggattttttgcccccaaataatatttaaaaatattttaaaataatatatttaaaataattattaattaattaaaatcatttgttccgtactgaaatggcccgcctcttctgatcacccacatcgatacttttgacacttcgccacatcgataccaatttttctattttaattttctcgatgtttcatcatattcctttttcggcatgcttttttcaaaaaacttggctaattgtaagattgaccggcccgggccgcccggttccaaagagtccgtttaacatgcagcccaggcccagcagtcccaaattctgaaccgggcgcggcgttcgatggggccgggctttttgcaaaagttatggaatgctgattaaaattgaaaattgcttaatcttttatttttttaatttaaaatagtcagctatcttaattccatattttaaagctaattttttaacctcaggcaattattagggacaatctttttgtgtttaacattagggattccatttttttaattttaaatgtgtaacatttggtgggacttcaggtcctaaaaatttccgaattccacaattttaagaatttcttcaaaataattattatttactttataataacatatcccaaaaccaaaatatgcgattgcttcagttttggtgactatcgccgacatgggccgttttctctcaagtacgaattccgacttcgctttcggcactctctccccccccccctccgtttttccccatttttaggcgtgtgcatttgggtggataaacgactgtttcaaattcgcagaaactgtttctctcggcttcgctggttttgcttgacaatttgttgtcagatttgtttgttttggaagcgacggagaaaattccgaaatcgaaaaggcgaaaatcgccgtgccaataagtccgccacagcgacgacttttgcgccgagcgtttcgaccacctcgggcaagttacgaaagtgcaaatgacgttggccatgatggcctttttgtagggggtgaagccattcccgaggaaatggcctcagaaggtccctttgtggccaatcacgtggtcgcaccgtgtggcactttggccacaattgacgaattgtcgcgggaggccgttacaacaacggacgacaacaacaacaacgaaggaagcggcagcgaaagccgaattcgccctccgcacctccgcttgggcgtctgttcgcgaagggctcagagaaggctaaagcctccgccattccctcccattttggacaccgtttcggaagcggggacatttcaaggtcaattaaggaaccaataacaaataattgaagattggtcattaaagatgtgtctgagatcagaacagtgcatggagaggacgaatttgaggagagagcgggaacaaacagcgaagacacgcgagcacgggcagacgaattggaggggggagagagcagcgacatggacggggtggaggacaaggaggaggagcagtacacgccgctggagaagcgcaaccgacgcgtgtccgcactgttcatcctcgtcgtcatgttaggcgagtacttcgccgtccatccgtcactttcattcggttttccttagggtacaccgccggtggcgcttgtctgatgcaattatgggagcgatggtcattcgtcgatgccttttacttttgtttcgtcacagtgaccacaatcggatttggcgacattgtcccacagaatgtcacttttttgcctgctacgttggcttacattgtgatcggtctgtcaggaaagcagctccgtttggctgaccggctctttaggcctgatcatcaccacaatgtgcatcgacctcgtcggcagtgcttacatccaggacatccatttgtacgggagggcactcgggagcagctttctgaccattggcggaaaagtcattcaccttggcgaagtgttctcctacgtggcttttctccagaagaattacggtctcggcttgctctctttggcatttcccttcgcttggcttaccttttctctcgtcaggacttactcccgaccaactcgacagactcgcccaattgccggaggttggcatgcacagcaactgacaataaagggaccaattcgttcaggaatacctgctggactgcttgatcaatgggcggcagcctgacctcaattggattggcgggcgccctttcattccgccagtcggtgctttgtccgctttgccttccgacctttgccttttgcaggacatttattacttcaaatggattgagcagccccggacattgtccttcacctccgaacggcagttggcctccagcgagtctttggatctgttcgttccgagggttccgtcgtggcattttccctccctttccccccccccccccttagaaacacttcgctgtgttccaccgctcgcactttgacccctcgcgagtattatcaacgagtgctggtccattactgtcgccaaatgcaaacggaagcggtggccaaaacgccggcgatt

SEQ ID NO: 64331 - DNA, 659 bp, Heterodera glycines
cggggcagtccccccgaaccgatccgtccagatttatggggagaccgaatccttcgggaatagcttccctatagcctgtactttaattctgcgttggatttttgctccccataattgtttgagtaccccaaacggacacttgaaaaaatcgatttttttgttttcggggcagtccccccgaaccgatgcgcccagatttatggggagaccgaatccttcgggaatagcttccctatagcctgtactttaattctgcgttggatttttgctccccataattgtttgagtaccccaaacggacacttgaaaaaatcgatttttttgttttcggggcagtccccccgaaccgatgcgcccagatttatggggagaccgaatccttccggaatagcttccctatagcctgtactttaattctgcgttggatttttgctccccataattgtttgagtaccccaaacggacacttgaaaaaatcgatttttttgttttcggggcagtccccccgaaccgatgcgcccagatttatggggagaccgaatccttcgggaatagcttccctatagcctgtactttaattctgcgttggatttttgctccccataattgtttgagtaccccaaacggacacttgaaaaaatcgatttttttgttttata

SEQ ID NO: 64332 - DNA, 660 bp, Heterodera glycines
atgcgcacccgtccgatctggcaagttaagcaacgattgctgactagccaaaaggttcggtgccgtgatgaaacgaaccagcactgcttaccccgcggcacccggcacggtcccccgaaggaatggatttaattaaattctctccttcggggatttttttccattaggtcgtccgttagcgttcgattgctctagtcaatttttcaaaatttttgttgaaatatttgtcgtgctctgaagggcgtgggagggggggggggggggcgaaggcccaccacgaggccgcgaagaggccgagtgagtaccttcggtgcaggaaaattattaaattttaaaattttttaattgctttttaaatatgccaaaaaatgtaggcttaacttttttagtgaaaattcgatcactcatattttttgctaattgagcagaagcgtaccaaactttgcagggatactccccggtaaaggactaacttacactgaaatgagcgccgagctagctggctcaaaaaaatttttcgaaaatctgagtctttcgtttttatttatttgcaaaattaattcataaatattttttcagaaagggttctgaaacgcaccaaattttatttacatgttagtttaggcactctgatgctttttctatcaataatggaggtga

SEQ ID NO: 64333 - DNA, 56 bp, Heterodera glycines
ggttcgatgaaacttattaaaatataagcctaaactttttggcctgtttaaaaagg

SEQ ID NO: 64334 - DNA, 60 bp, Heterodera glycines
atgacaacatcacatttgacgaatggcatgaacggttcggctctttcgttgaacaggagg

SEQ ID NO: 64335 - DNA, 1471 bp, Heterodera glycines
atgttgcgaagattgagacggagatatccccttttcgcacatttactgttaaggcaattagtcaaacgtaaatttgcaaagttagacaggaatttatcaaaaagcgatgacaactggcacatgacatattttgcgaatgttagccttttggtacaccgataataaagaatatcaatcaccgatcagacaacccagacagatttactttattagctttagaacacggatctatagacatttctttaagtaaaacaagaaatccgttctacggcaaaaaaaaaaaactgataaaatcatttaacttaattgtattaaataaaaaacataaatttacttaaaaaccggaccttctgtctgaaaatcttcggttgtgaaggaggtgccattgtaggcaaaggatatttatttggtgaaaatttattatttcttaatagaccaaaatggctttggacaaaatatgtcacaaaaatttgcggattttggacaaaatctgttaacaaattgaaaaatttcaaatccgttaaaaagtcaaatcttaaaatttttaaatatatttaattaaagtgtcaaaacatacacattggaaaactaacacactcattttatatctatgcgattctgaagtacgtttaaacaaaaaaaacttaaaattaattttaattttggctaattacatgagttgttcagttctttgcaatttgcccatttgatttggcaaacgctgatctcctcatccttactgtctccactcttgcctgaacgttactctccttgcactcctcaagtttcgaactttgcttaatcgctaaactctccgctggtcgtcctccccttcgttgatcactggcgttggtgaaggtgggaagtcagctcgaaaaaatttacaaaaaacaaacaataggccctaaaattttcaaggaagagctctgatttaaattttataacaaatcgtttaatttattatttcctgaatgatttaaaacaattggcaaaaaatcatttttttatataaatcagattttaaaattgagctttcgattaaattccactcctacattatgccaccttgtttaaagtcatttttaaaaatttgctttttgtcaccattattcaaccttagaaatccctattttcgggtattcacccttaaaaatccataatagcatttttacctctttatttactgtcttattttgtacttttttcaccctttaaatccgatccataatcataaggtgaatgatgaaaacagccatagaacagcggttcaaatgtcacataaattttgtttaattgatcatgattctcgcggaaaaataacacctattaaactccagagggttctcaaaaatggcacaccacagctgtttaatttggagacgtgttgtttaattgttaatcagttcgatgagcaacgttgcggttacatcggtcttgcaaaatttccagcgctgtgggatgcatgatataa

SEQ ID NO: 64336 - DNA, 86 bp, Heterodera glycines
atggaagtggttgggattttgctcacttttcagaacatatgggtttttaagtatgactcaagtgcagtatgctctaaccatatatg

SEQ ID NO: 64337 - DNA, 2114 bp, Heterodera glycines
atgagcggattgaaaagattccgaattgtctcatcgcctaaaaaaagaatggtcgatgactttccaaccaatctcaaacatcttcgcgatgtaattctatttggcttttccggcctgttctatgtccgtgccagagttgcagatcttcagttttcattatacaaggtttcgggtcgtctattctggccaccattatgaattaacacggatttaggcatgtccgttgaagcgtaacgggatgttatgtaagaaaaaactcgacgaggaactgtattgtgccagttgtgaccaccgcgccaacaaggcaacccgcaatctgtacatgagattggagctccgagattgcgaaaatccggagataagccagactgcgactgtcttttccgcggtagcggaacattacctaaaccttaaggttgagcaatttgccaaaatggtagaagagcagcccggacagctcgaagcactgcttaaatctaagattgagcagactgtcgctgtcaaactcagtataaaggtgcacaaaattcaatatatggatgtaaaaatattcttttttgagtttaaggcaaagggagagctcgagacgttggactgggtcgctgtgtccgtacagcaggagaaccgtgagagtgagggagatgacgaggcgtcacctgatggacaaatgaacttgacacaaataacgaagatggataaataatcgagattgagaacaggagcgtgaattcggaggcctatggcccgcctaagaaacgaacaaaaaagaactgatccaaatcaattggctccgtctctatggccaattatttgtagtagtctttggcctagttgatgttaacccggattaatatcatagagagggaaagagagatagaccattttgttagtaccatatgtatctttgtacaattcatccaaaaattagtttttcaagcaaccacagctgaaccgacgatgaaaagggagcaatccacagcggcgggcattctttcattattatcggcagcagcgcacaatgacaatacagcggcagcctcagcctcggatagcaatgccaagcgactacgtcgtcatagttgggactttaagacgatggcccattttgaagaggaacgggcaaaggcggaggaggatagacagaaaaaagagaagcagcctcaacaaccagcaccttgtttgagcaaaaacagcattatgtgcaccgagtggaacggttcgcactgcaacgccatgtgaccgagtttgtagttaacggaaagcatgatgagccggaagaggcgcttctctgcgccttcgagcatatcatcgctcgtgcaatccgaaacgcagaggattcccatcagcaaactgacaacggaagaggcgcatctgcgggcgacggtgtacgtcgtcaaaggcacgtcataagacttggaattttcttaatggtagaggtgagattttccctaagcgttattcgctcctttgttaatgcaaaagttttctttgcaaaacaccaggtctaaccgacccgattctgctgcccattcgtcctccggagcaaaacacggcagaagtgttgatggctgagctggacaaacttggccagtcggatggcgatgaggatgtgcatggtggagggatcagcaaacgttctttgttgctcagcgatccaattgaagtggtcgtcacatgtatagcacctccggtggtgcggcgccacgtttttaccaataccagcattggggctatgacgaccggcagctgatccgtgtgatgaatcaggacgacaacttttgtttattcatgcactggttgccacccgttcgtacacggaccaggaatttttaaaggcaacttcgcgacgacaacccttaacagaggcggatgatgatcatcagcgggattcagtgaccgctgagatagcacgacgcgtgataacgagaaaaaatttttgtgctggctacgaagcactgaacagtctggtgtccaaccgggagcggatgaatgcgacagtgacggagctaatgcaagctgcagaaattccagcggaccaagagtcgtatgagatggagcatatcgaccaaattcagcagttttgggtcggttgttggtgtttgaatgagtgctga

SEQ ID NO: 64338 - DNA, 566 bp, Heterodera glycines
atgccagatttaacggcaacaaatatttcgaaaagcaaagtaaaaaaagaaacgaaactttactgtcaagaaaatgagttttgagtcaacatataatttaacccaatttgtcctgaatttaaaaatcaaaaatgcgactatagttacatttaaattcgtattttctcggcgctggactctccgtcgatcgccgtaaattcatgaaaatcttaaatcacaaaaaattgtccaaataacctagcaaaccttttaatgaaaatttggcttctgtgtctcggtcggtttggttttttgtcacccatcagtcgagtttcattctcaatactcgagttttctctaattatcataaatattttatgtcggaatcaataatctgtcgaacacacctggcacagggatgccgtgtcttagtcgatgttttgcccaatagttaatatagttttctattttttagtgaagttttaatgtacgatgtttttttgcgattgggattaaaacaataaatttaaaaccttttttaacccatcctaatcttattgctgtttcaggtccaattgtatctttaa

SEQ ID NO: 64339 - DNA, 634 bp, Heterodera glycines
atgtggtccgccgccaggtgcatttggtgggccgccccctggcggcttccctggcggagggggacctatgcgtgggtacgaaggcggtggaggagggggatttgctgaacgaccgagaccatattgatcagtgattgcaaaacaatggttgatctgatctggacccttttgataatgagaaaaaccatgatattcgttcttatgttttcttttcctttggtggactttcatgtcttcctcatttttatgtagttttatatgttctctgcttttaatatctaattggttttgatggcttttttattccttccatttaattaaatttggtaatttaaaccattatacttggacaaatgcttatgtgagaaattaaagcggttttccatttttttttgtcataatgcaaggatcatcggcacgttcatttttaaatcctttgaaaaaattgcaacgaaaagaagacttggagaaggaatttgtggagagtggtgagaaagaccgggtccaagaggttgtggaacgacgacttcacgagtcggggtgggcgaaacgagtggagagcatgtgcgaggagtacatcgcgaagaaggtagcgaaggtgaataaggccgcatgagttattgttttaaataaa

SEQ ID NO: 64340 - DNA, 71 bp, Heterodera glycines
caccaccacattttcttcctcctttcttcttccttccttctctccaccccatactttttttttaatacaaa

SEQ ID NO: 64341 - DNA, 569 bp, Heterodera glycines
atgagcaaaattgaaactgtcaaattgaaatcggatatcgaagaaatcaaatattttcttccattttgtcccaatgtcaatctgcacaaaaggacatgcactgttgtcacattcggtagagcaaaaatatgagaaattttaaatgaaacccaaatttttgctaggtgttgggcatactgttaaggctgaaaaagaactgctcaaaatttacccggaatgccatttgatcgctgctgatccgtcggatgaaatcaatgccaatttgactcaatcaatcggtggcacttttgttcatggcccaattggtgctgagacggccaatcaacaaccagtgatctcatggggaggtaggctaaactttatggaaatgcttttctttaatatatttgcacttcactaccagtgattgtaggtggcattccgaggccgaacattttaggaaatcggaatttctaggccaaaagtttttaggaaaacggaattccgacattgcggaaatttctaaatttttgaaaatggataaatttttcaattttatttttttttagtagcatatatgtaaaatgtta

SEQ ID NO: 64342 - DNA, 3468 bp, Heterodera glycines
atgggacgttctactcggaaaacgacgacgacgatatggtcgttccgtcaacttcagctggacggcgacgacgacgacagaggcgcagcggggggcggacgggtcccagctgctcgggcttcggctcctttggcccgccgtcgtcggacagcacggacggctcctttgtggagttggctgcgtggagtgattgatgatgggatgggggggggggcgacgacgatgatgatgatgatgatgactaatttataacataatcttgctatataaaataataataataatttcgatatctgttgaccgcgcgtgagcatgcgcaaagcgaatgggggggggggggtgtggggtaaggggggtcagacgcgcacgcgcagccctttgcaactgaacagcgcacgcgtgactgcaaatagtttgcctaaaatgggcggggggggggggttggagggaaaattagagtcgacaaaaattgaatccgcccacctcttcaattgactcagacgggacgcggccgaaggcggacgacaaccaaagcggaagccggtgacaacgacgacgacgacgacggtgaagtcgttgacgacttcttcaccgtggtcggtgtctgggagcgggccggctcccggtcgcgtgccacgcagaccgagaccatccaagtgcgcttccacaactgggagcgggcgcggcgccccgacctactgctcgcacgctgcatcgcccgtctgatggctcgcgtgctggacgggcgtgcggagccgctccgcgtcgggctgtccgtacagccgcccggctgggacaactgcttccacgtgccgatgcgcccaccacagcagaacagtgcgcacgcgctggcggccgccctcgaaacattcgcgaagcagtacgacgagctcgacctgttctccgccgacgtctgcttcaaagtgtcggcggtttgggccttgcccggtgagctcgtcctccgcatcccccacccctgtccctcgacaaagtttgacccctccccccaccgtttagccgcgcgcgtggagggcgcatgtgccgaggacgagcagcgcgcacgtggcactgtccgctgccaatcctttgtgccggttgtgaacggggcgggcggcgaccgctggtgcatggcacgcgccatcgtgctggggctggcccagcggcgcatctgcgtactggagcggcgcaacgtggtccacttccgcgccttctgtctggcgcagcgtggcgaagcgggcgcgcccgaggcacgtcgcctgttggaggacgcagcggtgccgctggaccgcccaacgtacggggctgccgaggcgcaacgagtccagcgctggctggacgccagcctaggcgcccaccaagtgcggctggtcatcttcgcccgcgagctggcctaccgcgtggcgtggaagggcgcgcggccggcacgctttaacctgtgcttggtggtacaggacggccactacgggtacatacagtgcccggagcagctattccatgtactatactacctttagccaaaagaacttgtaaaattgaaaattgtttaggcgcgccagtactgtgtggactgcgagcagccggtggaccggcgcacacacccgcaaggctgccgggcgctgtgcccccagtgtcttcgctttggctggggccgtccctgtgcgcgggagccgggccgcgcgccgtcgcgctgcgccgactgtctgttcgtgttcgagaacgcggactgtttcgaggcgcaccggcgccgggtggacccgccgccgcctggctggcaacacgaccgtcgtcgcggcagaccccaccgtccgatgtgtgaggagcggcgcgtgtgcgcccgctgtcgtcaggtggtgtggacccgtcacggcgcgcacgcgtgcgccctcaacaacaatgttggccgacagcaagcagcacaacaacaacaacagtgcgaccgatgcttcgggattcacgacgcgcagtggaccccccacttcatccagccgaagcgggcgcagtgtcagctgatcgccaacgacgcggagcgcccagccgccccggcggaaggcctcgaggacgacaacgacgacgacgacgacgatgataacgatggcgatgctgacgatgtcaacgacaacgacgacggtggtgatgcggaacagaatcgacaacgtcgacgacggcgcacgctgcgctttctgttctgggacgtggagtgtgcccaagtggcggacgaaaatgaagagggggacgagggggtgccggcgcgaatgctcaaacatgtgccgctgctggtgtgcgcggaggtgatctgtgagcggtgtgtggccgcgggcgtggacttggagcgcgagccggaccgacgggcgcctggctgttgctgcggcggtgcggcttggcgagacggacaacaccgccggtggctgatgcgcgcgcgcgaggacgcgttcagcgacgacgacgacgacgacaacgcagacgcggacgggggacggcggtggcggcggccgaacccgcgccgcttgcgtttcttccacgacgcggcgaccgggcgttcgccgatggcacagtttgccgattttgtgctccacgacgggcccgtgaatgtgcgcaccgtgatgctggcccacaacggggtacgggggtgtacaaaagcggagttgaagaaaagctaccatctacgctttgtaggggcgttacgatgtgcatttgctgatggaggagctccagcggcgcggagtgcgtccccggcggctggtcgccaccgggctgcgcgtctacacgctggagctgggcggacgaaatcagcgcagcgtggtcgccaaggactcgctgaactttttcggctgtgccctgtcaaagctgccggccatgttcgggctggacggcgtgccggacaagcagttcttcccctacaactacatcagggccgaaaatatggatgtggcgcatgtgggactgccgccggctgccgactacgacccggaccggatgcgcccggcggagcgcgacgcgttccagcgctggtacgcggcggagcaacagcgtcgacccaaccgactgttcgtgctgcgccgggagctgctccgctactgtgccaacgatgtgcgcattctgcgacgcgcctgtctgcgcttccgccacgtggtcggcgagctgtcgggcggcgtggagccgttcctggccgcctccaccatcgccgggctggcgctggccatctaccggcaacaacatctgccccgtgatctgatggtgcacacgccggagggcggcttcctgcgcggacgacgcgcttccgccgcctcgcgccacttcttcgcgctgctggagagactgcacccgcaatggcgcggtcgactgcgcaccgcccgctggtccatcggcgaagcgtgcgtggaggacgatggttaccggctggacgcgctgctctaccgcccggtgccgctgcgcccgctcgtcatcgagttcaacgggtgcttctttccg

SEQ ID NO: 64343 - DNA, 987 bp, Heterodera glycines
tttcgcttgaatgttcgtgcatggaataatagaagaggattttcggtccgattttattggttttgctgaccgagataatggttaacagagacaaacggggccattcgtattgctacgtgagaggtgaaattcttggaccgtagcaagacggactacagcgaaagcatttggcaagaatgtcttcattaatcaagaacgaaagtcagaggttcgaaggcgatcagataccgccctagttctgaccgtaaacgatgccaactagcgatccgccggcggatttattcgccctggtggggagcttcccggaaacgaaagtcttccggttccgggggaagtatggttgcaaagctgaaacttaaaggaattgacggaagggcaccaccaggagtggagcctgcggcttaatttgactcaacacggggaaactcacccggcccggacaccgtaaggattgacagattgatagctttttcatgattcggtggatggtggtgcatggccgttcttagttcgtggagcgatttgtctggtttattccgataacgagcgagactctagcctactaaatagttggctcattgcttctgtgggcacaacttcttagagggattttcggtgttcagccgcacgaaattgagcaataacaggtctgtgatgcccttagatgtccggggctgcacgcgcgctacactggcaaaatcagcgtgcttgtccttccccgaaaaggggttggtaaaccggtgaaaatttgccgtggattgggatcggacattgcaattattgtccgtgaacgaggaattcctttgtagggggcgagtcatcaactcgctctgaatacgtccctgccctttgtacacaccgcccgtcgctgccccgggactgagccatttcgagaaattcggggacggttagtgttccggcttcggtcggtatgcagactggaaccgatttaatcgcagtggcttgaaccgggcaaaagtcgtaaca

SEQ ID NO: 64344 - DNA, 718 bp, Heterodera glycines
ttgggcagcgtccacaagtcatctcgaacgacctgtgcccatcagcggacgggggcatttggtggtgccaacgctagcccaacaggacagcaggtaggtggtgaataggaatcacttgggtaatgatccagcagcaggttcacctacagctaccttgttacgacttttgcccggttcaagccactgcgattaaatcggttccagtctgcataccgaccgaagccggaacactaaccgtccccgaatttctcgaaatggctcagtcccggggcagcgacgggcggtgtgtacaaagggcagggacgtattcagagcgagttgatgactcgccccctacaaaggaattcctcgttcacggacaataattgcaatgtccgatcccaatccacggcaaattttcaccggtttaccaaccccttttcggggaaggacaagcacgctgattttgccagtgtagcgcgcgtgcagccccggacatctaagggcatcacagacctgttattgctcaatttcgtgcggctgaacaccgaaaatccctctaagaagttgtgcccacagaagcaatgagccaactatttagtaggctagagtctcgctcgttatcggaataaaccagacaaatcgctccacgaactaagaacggccatgcaccaccatccaccgaatcatgaaaaagctatcaatctgtcaatccttacggtgtccgggccgggtgagt

SEQ ID NO: 64345 - DNA, 153 bp, Heterodera glycines
caccaaatcttcctcactgaagcacgggaccgaactcaaattggtgtcccggcaaaagctgcgtccaatcgatgccatgacgatcaacaacagtaccagcagactttgccagcaaattcaccacaagtggatgaaaaatgggcacaagctgag

SEQ ID NO: 64346 - DNA, 61 bp, Heterodera glycines
atgtgcgacgaagaagttgctgctctcgtggtggacaatgggtccggaatgtgcaaggcga

SEQ ID NO: 64347 - DNA, 738 bp, Heterodera glycines
atgcttataacaaatttcaattcaactaattgtaagcgaaatttgtttgttagtcgcacaaaaattattttgtaaaataacaaaaatgattcgaatttttgagtacctataataaaatttttttttagcaaaagaaaaacggaaattgtttttggattttgtatagcaaattagtaaaaaaaaaatcacctatttatttggaaaattgtttaattttcatattttattttttcaattcaaaataaattagtgaatttaattatggatttagtattatttatgttattaaaatatttattaattatatataattaattatattttttaattatttgaaatacaaaagcatttttaaattcattttagaactacttagtctggcccagccgtgatgaggccgttttcgatgatgttgtcatggagttgggcgtgtatggctttatgcttggcaacagagttgacggcacggtgccatactttgaccagcctggtcacttggtccgtaccaagttggcatccagcaatgagggcggcgtttcagttggaaccggcgcatttgactcagtttacttgtattaaatatgggagacaaaaaaattgttgcataacattttcctatcgtaacttttcctactactgtatccttcttgggtttttttacagtatctttggtgggacaaataatttagatgataaaatgatgatgatttctgttgtgttgtttatgaaacaaataaa

SEQ ID NO: 64348 - DNA, 324 bp, Heterodera glycines
tttacagttaaattgttttttacatatttatttacttttaaaagcacttttgtttttcatttgtcaacacctttctgagtcccattagtcatgctcaacacggggttggtcattcccttgctgttatgaaacagaaataatttcatgtttagaaaatttctcggcaaaacttttgtcataacgggggcatcgcgtggcattggcaaggaaattgcacttaaattggccaaagacggcgcgaacatagtcatttgcgcgaagacaactcaggacaacccaaagttgccagggacaatttacagtgcagcggaggaaattgaaaaa

SEQ ID NO: 64349 - DNA, 1004 bp, Heterodera glycines
atggtgatcaactgggaccccttcattcttttcatttcgccaacaattctagttgatctcaccattgattctgtccattccggtgaactgcttcccgatggaattgatgattttgatgggccaaatgcaactccaactgctggccaagcgttgtccaaatggttgcacactccgagaaatgatggccaacccaagcgattgatttgtcatggttttacgttaggatttagtaaatgggtcatcgatttaaaggaggtcagtcccaactttttcgtaaaatgtttggattaattgccatttgatttcggtttcccattgtttaggcatttctccgtgccaccacttcttctgcctgctacaaaattcaaattgaattttttgagccaacagaaattgtgccatttgaattggtgaacgaacggaccagcgaaattctaaaattggagaaaggagaagttgatggatgggttttcccatggataatgaaacgatgccaaattggagggccggcggttcaatgggaggacgaaaatttggataatttgaacgatgtccattttatgcttcaagcagattgcattgggtgatttgcttttattggtgccgtcacattaaatttcatttcatttatgccattgtctgcgcaaaaggcgggtcaaatgaacgcaaaatattctctgaaaatgagtgccggaaaaagtgaatgaattattaggaaatgagaaattctgatcattgaatggaaattgatctgataattactcctcatatttatttgttgcttctttcatttgatcagaaaactacaaaaaactggttttgctttttggatattgataatttatccaaaaaatttaaaaatggtttataaactggaaaatcttgacaaatgcgcgaccgcgatacgcgattggcggcattttttttgcgcgatccgcgaccgcaggatttttctgtgcgcgctccagccctgcttcgaccaatagctgtcagttttcaataaa

SEQ ID NO: 64350 - DNA, 877 bp, Heterodera glycines
atgggcgccagaaaaacagacaacacaaaaagactcgccattgacaactcatacaacatcttgggagaaaagctagctaacattggtaggcttatggacgaaaacgaagatgacggcaacaacaccgactgttctatttcacgccaattgttccaaatctgcttgacgcttctacaacaggtccaaagccaacagagtgagcttttcactctcaaacagcggcaaattgcggacgaagctgtgcaagatcacgagcggcggcgaagcgttgtcgtaatgggtctactcgaatcgcagaaacaaaagccatccgagcgagtcgctgcggaccgaacggccatctcaggcgttctcgatgagcttggcatcgagagcccgatcactgtttacagaatgggttccacggaccaagcaaagacaggtcaaaaccgcccgcggttgatgaaagtaattttcggctgctcaaaacatcagagacaaaccttgacacaatggaacaaactgcgcgctcaaattagtcaaaaaccggggatgagcaacatcaaaattcgcccttcactcagccaagaggaactcaaggcccgacgtgtgctgcaggaagagtgcagcagaaaaagaaaggaagatggcggcgaatgggtggtttacgctgacaaagtgatgctgaggtcagacattgcgacatttaaaaataacaccaattgacttgctattttaccaaatcacactcaaaaaacatttataaattcgcacttttccggtcttaagcatgttaagcccaataaccccaaaacgaaaataggggaagttaaagcatgcttagttaatattagatcactttacaacaaaattgatgaaatagctttaaatttggtaa

SEQ ID NO: 64351 - DNA, 177 bp, Heterodera glycines
atttcctatgacaaaaaacaaagttatagttttcaagtatccatgggctaaagaggattgggttttcctcctttgtccatgtttcagttaacagaaaaatgtctatgtttttatttaccaaatttaaagctatttcatcaattttgttgtaaagtgatctaatattaactaagcatg

SEQ ID NO: 64352 - DNA, 655 bp, Heterodera glycines
atgcaattaaattgcaaacattttgaattctcagagattgaaaatgacctgactgatgctaacaatcgaattgtggacgctttttcaaaaatggagcagtcttttgatgacgcacaacgccaggaaatgcaaaaggacggatggacatttctgagacaattccaatacgaccaactttgtacagatcaatgtgatcacttttatttaaaccatccaatttttatatgtaatcttttcgaattttatttttcaccacttaaagatgctcaattgcccgaaggatttcgccattctatcgacgaattttcacaaatgccaaaagaaacgcgtgaagcaatgctatggaagcgaattgagcgcatttcgaggaatatccctgacgtaaataggccaattatggcaattattaaggaattaattggtggttatgctcaaaaaattgtgcaaatttatgaaggaaatcgctgataaattggaccgacggaagatggaaaagaacgaacgtttgtcgggccagcggcgacgaaaacgacggcaattggaacccatcggcggcatcagtgtgctcagcccaattatgttgcaaccgtttatgttttcgccgacattgacgtaacaaattaacacatttcattaatgaactattaattgataa

SEQ ID NO: 64353 - DNA, 315 bp, Heterodera glycines
atgaatgttcccgattcatttgctgttggccatagaccacgtcgtttctgttcaccgtgtataattcgcttcaattccatagaaacacgaccacgaacattggcaatggtgaaataataattaaaattaataaaaaaaatttacaattaactaaattttattcattttattttttagattcaacgctgtcctcaaattaattcgttgagtaccgtagttccgaaagttaatggctacggtggaagtcacacgccaaattgggcatattgctaccacaactcaagccctccctaccgtaactcatactacgatatg

SEQ ID NO: 64354 - DNA, 190 bp, Heterodera glycines
atgaatttaatttgcttttcgttcttttttgttgttcttgtgacaaatgtcatcggtgaagggtaattaaatgaattcaaatcaattttcaaatgctttctgtttctttagacttgccgaggacaaatggaaaaagtgcgaattgaatgggaacagaatgatcagaatgggaaaggacgttaaaaagtaa

SEQ ID NO: 64355 - DNA, 866 bp, Heterodera glycines
atgagttcctcttccgctaaattggccgagttccaaaatgctcttccgttcggtgtttttttgaatgatttcgacggcgcagcgcttggaattgtcgcatttgaaattcattgtgccattggaacaaatgacgtgaacacttgcaaaacgatggtaagtgaaatttaaaaaataaatttgaacattttgaatgaaaaaatggttggctacggggggaatagaacccatggcacaaaacaactgagatttgaatgtattaagaattttttttaataaaaattttaattttgtaggctaccgaagaaaaaagtcgaaaattgaccactcggggaattcgaacttccacaaccactcgggcaactccgccaaaaacaaagctgaaaattgtaactccattcaaaactgaaacaccacgcgttgtaatcgttttcattttttaaaaatttaaataatgctttttctagtctgaaattgaaaaatcaccgaaactgaccaccctggaaacccatacaaaaacaaacccaaatgtcggaacttcatctgccgtaatcatttccctcaaattaaattaaattaaaaatttttagccgaatctgttcactccacgtgattctactgtgaagcatttcggcacaaattgcgtccaaattgattttccagctgaaattgcccaattttcgctgaacgtttccgccgcactattcggcattgcctgtaaacaatacctaagaaagtacaaaattggacaattgccaaaaaattacgatgaaaaaatggaaataaaagacaaaatggaagcgtgtggaaaagtgccgacagagacaaattgcaaaaagttaaaaaaatggaaattaaaattaaattaa

SEQ ID NO: 64356 - DNA, 2260 bp, Heterodera glycines
atgggccggacgaaggcatcgaaattttcgacgcgaaagacggatactgcggtcgatcttgggttggacatattaaggaatggcaacgtgtttcaattaagtgtaccaatgttggtttttattatcgttatcaatttaattaagttcatttctaaattatcagtccaacactgttgcccacgagtttttacatgcgctagccctctggcatgagcaagaccgggacgatgccaacaaatacatcaaatggaatccaacgccacgaaatgttagccaggattacaagaattttcttttgcaattttacattaaaaaacactggcataatttaatattttagcaaaaagagccggcgaaaacagaaaattacggctttccctatgattttcattcaattttgcattatgaagctgtgaaaacaagagggtcagttattttaaaggtataaatgaaaagaaaataatttggcaatgaatcagctattacgacatgattacgctgaaccgtttttaccaacgcacaatgtttcactcaacatatgaactttcgtttaaagacgccgccattatcaacaaaatttattgcgacggtaaatcgaattaattcattataaaatagagtgaattaatttaagaaaattgcaaaaacgtcgaaaacaaatgccaaaagggaggatatcccaacccaaagaattgcaagcaatgcctttgcccggtgggatacggtggagaaaaatgcgaaatggtcgaaaatggtaaaaaaaaaattaaaatgataaaaattattaatatttcagatggaaattgccaaactgacagggcaaatgaaattgaagcagattggcaaattcgaacgttgaagccaaaagtgagctgcacaaaaaaggatgagtcatgcggatgccattggcaaataaaggcaacatttatatgaaatattaaaaataaaattaaaaaaacgaaaacaaacaaataaaattaatattaatattataaaattaatttaaagaaaaaaaacatatttacagccacaagatggcaaaaaggtgatcatcaaattgaaatggctgcatgaaaaggtgctcacctgtgatgacccttgcggcacttatcgagtcgaaataaaataccgaaaagacaaaagggcgcggggtaatttaatttaattaaataataattatttaaattttgtaaaggtgcatttatttgctgttctgcccaaattgaagaagatgaaacaaagaattggattgaggcgggtgcacccggcgaggacattctcatttcggcttatcccaatcagactaattttgaacaattgacggaattgttcgaattgacttacgaaacgggtatgggcacgtaataattattattttatgctaattgcttttaaattacttagacggcgccaaaattttgccagcgagcgattgtccggacggtgtgaattggaagccggagagatcacccggacatgttctgatttgcaatcatcccgataccggcaagcttgttgaatgctgcacgaaggggcagaaatgtccattaagggctaactcaacattcagctgtaaactaattgtggtaaaaaccaagaaattattaaatttttgatcaaaaaaagattttagctttggccatactcttttagacagttttggcacactttgggaaaattttataaaaattttgcgaaatttgggtgtggcctagtctcagagagggtatgaataagtaaaacggaaatattgataaaaaattattaagctaaacggtcaataccgcgagatcagaggcgtaaacgaaagcaaaatcttctttttcgaatgttttgtaagtgacattaaataatttaattaattaattgtaaaaaaatacattgtcaattaattaaaaattaattgattgattggttaaatttatttttaaagaggcgagaaggagagatgaaaagcttttggggttattggaaggacaaaagcaaagacccaattcgcattggcgattttcaatgcttgagctacgaagaagccggcatcataaatccgccagacaaaacagtgattgattacccattgcgcttcaaaagtgccaacataaacgaataatgatgccaaagggatgaaccaactgcggagaatggatgtgatgcatagggcgggtgtttttacctatttaaaagttttcctttttataatattttattttttagtgtatttaactttggttttgtatttgtaaatttatttatattgtaa

SEQ ID NO: 64357 - DNA, 178 bp, Heterodera glycines
atggcaaattcatcaaaaatatgcgatagatcaggcccgtatcaaggggtgggggtaagtgttcccgcctcaccccgataattaaaaatcaaaattttaataaactgcaacaatttataaaaaaaattataacataattttcatacagtcatgctcatatgtttacgacagcccataa

SEQ ID NO: 64358 - DNA, 317 bp, Heterodera glycines
atggcggtgttcggctttcatttagtcttgacaatgattgcagcggtaatttttaacaaaacagcgcaatgccactttctctgtgatttgctgttctttaaagggttggctgtcaaattcgttcgtaaatattattattattttttgtttaagtcttggttatttcgtgctagaatcgtctgttttgtcagaattaaatgcctgtgaaagtgaaaacaaacgcagaaggaaaaaagagtaacggatattttttgaaattttcactcgtatttttagtgatttttcaggaaggatttccttcggattggtggcaatga

SEQ ID NO: 64359 - DNA, 186 bp, Heterodera glycines
attttttctttgtgtctctgagcaacaaaatggcaaaaaaaacgaagtcgtaaagatataaatgttctttaaaagatatttatttaagatatttgattgtaaggctcgcgagtgttatttcgggcactaaacaaatttgggttagggagagagcagcagccgaagcggcggccattctttacgacc

SEQ ID NO: 64360 - DNA, 451 bp, Heterodera glycines
atgacacaaaatgaaaatattttgcatttggattataaccgcttgaaaacatcaaaatcaataaggctacaacggatgaaaatcttagccgggcaacaactaaatgaaaagggaaacaattgggatcagttactgattcatgcattatttgattataacatcgccatacatacggttattgaaacattcaccatttttaaacaatatatttaagacacccaaaattaccagtagaccgattgctaaagttacctaactcagaaaattatgagtcatatatatccatttacacaaaattacattcagaaaaaagcattgaaagcttggaaaatagtgcgtaaagaaatagaaaagggacaagataaatttaaaaaggaaaatgattagtcgaaaagcgagagaaaagacttttaaaattgctgatttacttttcctaaaaagaggtattaaa

SEQ ID NO: 64361 - DNA, 126 bp, Heterodera glycines
tcgtagctcggcttctgatcacttccatactactcgttctgagcaacatcatgacttgtccgtcttggtcttagaaaaaattataaaaattggattattcaattctaccaaggtagcaacaggctg

SEQ ID NO: 64362 - DNA, 434 bp, Heterodera glycines
cccctgacagcatgtgctcgaactccccgtttttaggagagtaagagaggtagttaatccgtgtttaatcaattatgaaattcaaaaataaacaaaaaaaaatatttcaaaaaacagttattcacaggacctaataaattcaagacttatgtcagtttttataatcttgaacaacaatgaaaactgcatgatttaacgaaaggcaaattaataattattagggtgcaaatttttaccgacaaagaattcataaaaaggggcctaaatagggacgaaaaatgacaaaagcaacatataaataatttgttttttttgccaattatttcattttcattgttgaaaacctaagaatcctaaaaatttatgaattaaaaaaggaaaatatgatgaatggttaaatgatatttgcggtcggataattgtggcctgctgga

SEQ ID NO: 64363 - DNA, 682 bp, Heterodera glycines
atggagaaaatcattggcgcctatcagccttcggtcattgtgcttcaatgcggtgcggactcactgacaggcgatcgtttgggctgttttaacctcacattgaaaggtattcgacagtaaaatccctgaattgctttttgctttaggacatggaaaatgtgtggagtacatgaagaaatttgacctgcctgtgttaatgctcggcggtggcggttacaccattagaaatgtcgcgcggtgttggacctacgaaactgcggttgcattggatactgaaatttcaaatggtaaattttccgtttggtaatttgagcattttctcatttatagaattgccttacaacgattactttgagtattatggacccgactttaaattgcatatcaatccgtccaatatgcccaatcacaacaatttggaatacttggataaagtgaagtgagttactatctgtaaacttacgttttaaagcatttattgtcccaagggaaagaatattcgaatcattgcgccaaattccgcatgcccccggtgttcagatgcattgtctgtttttgaacacttcgtttgaatctgattttgatttcagcacctgagcccgatgcaatggttatggatgaagaggcgcaattggacgaggctaatcccgacgaacgtatcccgggtaaaaaagaaaaatga

SEQ ID NO: 64364 - DNA, 4026 bp, Heterodera glycines
atggctctctttagagcccgcagtgacaagacgccgacccacgccgggataccagcccctgatgaggtccgagagggagggtgcggccaaaaccgaaccaatcccgcggccccccgtggtaaggcggcagcgattcaaaggcaaaacggcataactattcctataaaagcctgcgctcaatccggcctagtccggacccagagggttcagcagtggtcagccgtggaggagtccgccttaaaagatgtggtggtgcgaaacacagacgaccgggggctcattaattgggccaaaggtgtgctccctgaatggcaaagattgtgccagctcaacccgaccatgtacatggctcgatcgtctccatcgctgtccaataagtgggcatctctgcggcggacccatgttggtcctggatgcccttcgaaagaaggctccgggccctcacaagacctttcagatgtaaaaatccaaccagccaggttggcccatgatacggtagccgagctacctcaacgtactgtcccttgcggcacagacggtcatggtgtaatcgattccgatgagatcgagattgccttagcagaggtatcccggtcgagtccctttgaagaacgcgagccgttcgacttaggggcgacagagaggatcacgcgtaagcggctgcgcaacgccgttcgcgatgtggttccacctcggaaacgcagggttccatccaccccttcacgtaaggaacaagatttggttccagaggtggacgggcctgcacctacggatgtgttgacacacccacccacagaatccgaaccagaaccgatgcttgacccactctcacttgtccaactggtaaggccgcaattaggccgggcaatgggatgggcagccgaggagatggaactcgggaatgtcgtgatggacgtggagctgaagagggagttcaaccgggaggtgaggcgtgtcggaagaacgcctcccgaccaaatgtataagcgtggcgcaggtccaccactcccacagaaacgagagcccgaacgagtagccctacttgagcaactcattgcggcgcgcgtggaacgtggcatcaacaggggacttgattggttccttgaactgaatgtcgcggtctttgcagccactagggttctgagccgccgggagagagtggaaactcttgctgatcggctgcacatcaacgattctgccactctgtccgaagtatccagacggcgagctaaagctgaaaggaaactccggtgtgcacgggaacaaccatggatgagcaggcggatcaggaaacttggtgtgagggtcgagagactcaaacaactagctgacctggtccggcaaagaatagctgggagaggtaatagatcgtcttacgaaggccctaggcggagattccgactaagaccctctttacgttctgttactgaagcacctgtcaatccaccccttaacgggaatgaagtttacacgttctggcacagcctttgggcgcagagcctccgtgctaacacggatgactgtcaattgaggaaattcaaaaaccagctttctgctgcgcgacacacggatctgacgagcgtcggaaccagctcattggttcagatgttcagcgcggcccttcggaaaatgaagaagggcaaagctcccggtcctgatggtatccgtgccgcgtggtggggagtgttccggcgaattgcaccgtatgtggctacgtgggtggtccgagtaatacgtggggcagaaccagtagctaactggatttgcaacgggctcactgtcctactgcccaagagtagtgacaatgccgaccctagtaattaccggccaattacatgcctaaatacctgctacaaactcttcactgccgttatcgcacaaataaccgcaagttacgttgatgttcttggtggcctacctagacaacaagtagcactgcgaaaaggcgtttggggcacctctgtgtccctgatgatcgatgcgctaacggtggctgacgcgagaaaagctaaacgcccacttggagtctgctggttcgacttcaagaaagcgtttgactcagtaccgcacaacttaattcgctggatcctgagagtcatcggactccccccggtcatcttgtctgtcattgtctctgtgatggatcaatgggcaacgaggctcaagataggtggaaaggtcatgcccaagaccatcccggtgcgaaccggcgtattccaaggggacaccctatcgcccctgctgttctgcctatcggtgtggccaatatcgttcgccctagaccaatttcctcagtatcagtttcgttgtgcaaaccatcttcagcagggctttagtgtcggacacgtgttttacatggacgacctgaaatgctattgcccagacagggaagtgttgacagcagttattcagcaggtgcagaagagcgcttctgccctcggtctgacgatccactacaagaaatctgcgtggctcgaccaggacggcgggaaaagtggcaaagccgtcttgggtgtaccagtacttgtcggcacttacaagtacctgggaatgcacgagagattcatgattgtaagcaaagacagtcttgagtcagtcaggggaaagttcatggggcggcttaaaaccctgtggacctcgaaactgacattcggacaggcaatgcttggcacaaagagcatctgcatgccagtcgtgcgctacgtgctgcagaatctattcctaccaaaatcggaattcaaccagacccgtctggtcctgagagagtgggatcgtcagatcagagacctactggatgaatgtaatatccggcaggttttccgaagcaagacggagttatatgtcagccgcgaagagggtggctggggtcttcctagcatggaagacgccctcgaggaagaggtagtcacaaaacttgccatacttgttgcaagacaagaaactgagccgttgttccgggtgtgtgaagctcttgaaaggaaaaggtgccccacccccctgtccctaggattgcaaatactgaaggactggggagttggggtagagttacagggccgcacattgctgctgaacgggaacacagtgggcccatctcaggcaaccagaaaactcactggagaactggtcctgaggagggaagcggaacggctcagtagatggagaagtaaagtgaaacctggctgtggcatgactggaggggcatggcgggatgtgcccggaatcgatgtccatcttagcaataggtggctcgtcaaaggtgcactgtctccgaccgttgtctcaaacagccttgccatacgagcaaacacggtgattctgagagggagtggcgggggctacaccaaaggtaccctcctccggtgcagaggatgtggtaacacgggagaaacacgcagacacattgtgtcagcatgctccctgggaaggcagaagggggctgcctcccgcaggcacgacaacgtctgcaggatattggtgcgagccatctgccacaaactcaacattgaaccgcccaactcagccaacttcccccatgtcgttgtgctggaaggcagtggtgctaagatgtggatagactttcccttcgtggtgccacataagatccgccacacacgacctgacatcgtcgtcttgtttgagtggaacggggtcagacgtcttagtgtcatcgaagtggctgttagcgatgtggcaaatatgcaaacacaacacatccgcaaatcccacagatatggcaccaactcgactgaacccttcgtcgcgggggtcacgcctacgtataggaatgactgcctggcagcgcagttgcgagcgaaatttaaagcccagcaagttgatgtgatcccgatcattgtcgggaccactggtgaaacattggatggcgagtttgggcggatccgaaagggtttgcctatgctcactaaactgcagatgccaaggctgtggtcagaaatccagcgggcggtgatcctcggatcatatcgaattttggttgaacatcttgcgctaccaaaggggggcgcttga

SEQ ID NO: 64365 - DNA, 832 bp, Heterodera glycines
cggctaacgccgtaacacactacggatgacgacttttctgtgcttgcgcagttggtccatccggttgccgaaagggaagtgggttaacattcccacgccaggctagggaaatgacggttcgcaagagctgttttgcgcggtaacgcaaatgaactcgcagacgtcgtgtggagtccgagccagagttctcttttctggtttagggtgtgcgtgcctggaagtggctcagcctgagatagggatgttgcgcccgtaaagcaccgcggttcctgtggtgtctcgtgcgctccacacggcccttgaaaatgcgagggaagctatttgaatctcctgcctgatcgtaccgatatccgcagcaggtctccaaggtgaacagcctctagtcgatagaataatgtaggtaagggaagtcggcaaattagattcgtaacttcgggaaaagaattggctctaaaggtcgggtcagccgggctgttgcgtgaaacaggcggcttttgcccgtggctgcgtgctgttctttcggggatggtgcgtggactagtggtgagagctgcttgtggagcgcttcagctgcgtgtatgctcgtcagggtatgcacttcggttggcgctgaacgaccagtttagaactggcacgaactcggggaatccgactgtctaattaaaacagaggagacggatggtccttgtggacgttgaccgtgtctgatttctgcccagtgctctgaatgttaagccaaggaaacttgattaagcgcgggtaaacggcgggagtaactatgactctcttaaggtagccaaatgcctcgtcggctaactaccgacgcgcacga

SEQ ID NO: 64366 - DNA, 1885 bp, Heterodera glycines
gccttaccacggggggccgcgggattggttcggttttggccgcaccctccctctcggacctcatcaggggctggtatcccggcgtgggtcggcgtcttgtcactgcgggctctaaagagagccatttgggttaaggtttctctttccaaatcacaggatatcatttcgcttttgatcgcttttcaaatgtattggttagaccgtatacaagtgattttgcgccaccccagctccaagggtggcgcgccaagctagtaaggccagccccagctcaaagggtcgtaccccaagctagcaaggccggccccagctcaaggtggtaccccaagctagcaaggtaaaaagagtggtgatcctccactcctgcgatcagcgagggaggagttgcacaggctccatcctgcgcgcagtgcaagactctggcttcaagaatccacacgtgggagacacacgcatggtcgcaaggtccttcatagccggagcctttacggccctttctcgtgccctgcttactagcatattactctatgctacctgttagcaagcaggttggtacactcggccatccgaaccccacttgctcacagttctgaaaccaacaacgcagcctttgcctacgagggctagggctttcggtgcgtgtgggattatacgagactgtcgtgttccctaaccagtgcgagccaacaccagaaaggggcctggacttaggttcgagttacagggtgaggctggagtctccatggccattccccttcgggctcgctatgacagcttcggcgtggtgcagcggggtaacacacggatgcccccgagctcactccgaagtgagtctgtccgtgccattcggcccgaccttttttaggtttcacgaaataccgccctgtaatctttcgccatatccgggaagaactgtcaggctcaacagaaatactggacccgcggctaagaaggcccagacgtttttggccgatgggaaggtaacccagcgccctcggattagcgcaacccgtgcagcacctagggactttcgcgacctgtaggccaactcctaacaggctccccggaggttccgagtatcgccacactcgtgcgcgtcggtagttagccgacgaggcatttggctaccttaagagagtcatagttactcccgccgtttacccgcgcttaatcaagtttccttggcttaacattcagagcactgggcagaaatcagacacggtcaacgtccacaaggaccatccgtctcctctgttttaattagacagtcggattccccgagttcgtgccagttctaaactggtcgttcagcgccaaccgaagtgcataccctgacgagcatacacgcagctgaagcgctccacaagcagctctcaccactagtccacgcaccatccccgaaagaacagcacgcagccacgggcaaaagccgcctgtttcacgcaacagcccggctgacccgacctttagagccaattcttttcccgaagttacgaatctaatttgccgacttcccttacctacattattctatcgactagaggctgttcaccttggagacctgctgcggatatcggtacgatcaggcaggagattcaaatagcttccctcgcattttcaagggccgtgtggagcgcacgagacaccacaggaaccgcggtgctttacgggcgcaacatccctatctcaggctgagccacttccaggcacgcacaccctaaaccagaaaagagaactctggctcggactccacacgacgtctgcgagttcatttgcgttaccgcgcaaaacagctcttgcgaaccgtcatttccctagcctggcgtgggaatgttaacccacttccctttcggcaaccggatggaccaactgcgcaagcacagaa

SEQ ID NO: 64367 - DNA, 477 bp, Heterodera glycines
aaccaatcaagtcccctgttgatgccacgttccacgcgcgccgcaatgagttgctcaagtagggctactcgttcgggctctcgtttctgtgggagtggtggacctgcgccacgcttatacatttggtcgggaggcgttcttccgacacgcctcacctcccggttgaactccctcttcagctccacgtccatcacgacattcccgagttccatctcctcggctgcccatcccattgcccggcctaattgcggccttaccagttggacaagtgagagtgggtcaagcatcggttctggttcggattctgtgggtgggtgtgtcaacacatccgtaggtgcaggcccgtccacctctggaaccaaatcttgttccttacgtgaaggggtggatggaaccctgcgtttccgaggtggaaccacatcgcgaacggcgttgcgcagccgcttacgcgtgatcctctctgtcgcccctaagtcg

SEQ ID NO: 64368 - DNA, 384 bp, Heterodera glycines
aggtcttgcgcaacaaccgacgcgcacgaatggatcaacgagattcccactgtccctatctactatctagcgaaaccacagccaagggaacgggcttggcaaatttagcggggaaagaagaccctgttgagcttgactctagtctgactttgtgaagaatcatgagaggtgtagcataagtgggagccgcaaggcgccagtgaaataccactactttcatcgattccttacttaatcggtaaaacgggagtgcgcccgaaagggtgtccattttggtgttaagtcgggccacccggtggcccggcgacccgcgccgatgacagtgtcaggcggggagtttgactggggcggtacatctgtcaaagcgtaacgcaggtgtcctaa

SEQ ID NO: 64369 - DNA, 240 bp, Heterodera glycines
accaaaatggacaccctttcgggcgcactcccgttttaccgattaagtaaggaatcgatgaaagtagtggtatttcactggcgccttgcggctcccacttatgctacacctctcatgattcttcacaaagtcagactagagtcaagctcaacagggtcttctttccccgctaaatttgccaagcccgttcccttggctgtggtttcgctagatagtagatagggacagtgggaatctcgt

SEQ ID NO: 64370 - DNA, 296 bp, Heterodera glycines
atgtgccaaggtcagcagaaagacgattcgccaagaaacaaagcaacggatatattggagaagagaaaatgaaggcggaaggaaagggttaaaatttgaaaataatttgaaaataatttgtttgaaacagcttttaaagcatcatttaattaaaaaatattttttttggtataaataaataaaataatatttcagcagggcataaaaacaaattattaggacgacttatggttgagagacaaatttgataagattcatggacagaaaagctgaagaaaatgaaggcagaaaataaa

SEQ ID NO: 64371 - DNA, 1060 bp, Heterodera glycines
gtccaaatgttgcaccatatctgggcctcaataaccaatccaaactacaggagaccgatgaaccccggaaaataattattcctgggaaaagacttgaagagaaaactcctgatccggaatcggataatgatacaataaatgagttaactccggagccccaaacaacatccacactcaaaacacccattccgatcaaaactattatacacccgacccttttaaacggtctttttaggtacgtgaaggaaaacaaagatttatttaaaattacggcggccggaaaggtacagtcgaacatgaatttgccgattgaaaacagtaattatagagatgttttgttgtatctcgcagggaagaaagatgaaacgccgcgcggtgcaaaatttctcaaagatcggttactgaaggatccaacagtaaaagacatggttgataaatcaaaggtcatgtggggacgtggaaggaaaaaggcaataaaatctataaaaacacccggcatagtgcgagagaagaaacccttcaaaccactaatatgggcaagactgtagagaaaattttatcgaaaatttattataatttaaaatctccggcaagtttcgctgggattcaaaaaattttaattgaggcgaaaaagattgacccgaaaattacgaccgatgacgtaaataaattcctagaaaaacagagaacatacacgattcacaagcccataaggaaaagattcccgagactgaagacaataccgagtggcttccacaccgattggcagtgtgatttatgcatttttgatcagctgaaaaagcataacgacggttataaatatttattggtctgcatcgacgtgctgagtcgaatgatcttcagtgcaccggccaagtcaaagaagagtgaggacatgatcgaggcttttgatcgggtgttcgaaaagtctaaaattatcccgatgaaaatatatagtgacagtgggcttgaattccaagcaggaaaaatgaaaaaatattttgaggaaaaattcatcatcaaaaatgtaatgtatagtcctgatctgcacgccggagtc

SEQ ID NO: 64372 - DNA, 743 bp, Heterodera glycines
atgtggggcattgaatcgcgatacatttcggaagatgcattggccacggaatggtaagaaataatggtgctcgagagtctcgatcttgatttgagaaaagttctctgcttttttggtctcggtctcgggaaatttgcggtctccaatatcactagtaaggaatttggtggttaatcgagagtctcggttcttaatttgagaaatttctcatttttatagtggagacttagtctgaaaataggaatgaaatttgacaaatcaagagtctcggttcacattaaattttacaaaaaatattaaaaatcctattttatcttacatattatttttttttaaaagtttgttgaaaaaggcaaaaatcctcaggtttgttatctaaaattgaaatgaaaaatttttgaaggaaaaaccaataaaaatgaattttaataataacttttttgaaataattataaaaaatttttataggcaatttgaccaagacgacaaaaatgggagaatggaagaaaaataaacaaagatgaattataactattattttattcttttaaaaataatgttttttattgttattttgtcaaatgaagttattaaaaatcgaaattgaccaaattaaatggagttattggcattttttgtttcccgatgaaatttttttgaaacttacaattagcaggctaatgagcttaccttgacttataaacttttgaattatcccaagttgttagtttgaacgaaataaa

SEQ ID NO: 64373 - DNA, 508 bp, Heterodera glycines
atgtgtgatccctggcactgcggtgttggggcgcaacatagtcccgtctcgatcgcatgcgatggggcggagacagagcgtatgctcggagtcccgaaagatggtgaactattcctgagcaggatgaagccggaggaaactcttgtggaagtccgaagcgattgtgccgtgcaaatctgttgtctgacttgggtataggtacgaaagactaatggaaccatctagtaactggttcccttcgtagtttcccccagaatagctggagctagttacacagttatactcggtaaaaagcatgaatagaggaataaggataaaaaatatccttaacctattctccaattttaaatgggtatgtatccagggtatctttactatgattcctggcgttaaaagaaagaaccgcgataccgtagcaaaattttcaacctatacctaaaaaccgttaaggggggcaccggcggtggccaggtttttaacagatttttaccaaaaatttataaccaaa

SEQ ID NO: 64374 - DNA, 1194 bp, Heterodera glycines
atgattgagttgaactttttcggcattgatgtcgacttggccctcgtgttaatccctaacatcgaagccatccctgacgaacctttggatgcaactgacgtcaaatcaatgatggaaattatggcattttcattaaatccgcacgaagggatgctcaaatcgctttccggtgagaaaaaataaaaaatttaaactaaaaataaatataaagatttaattatagcgatcattaaaagaattgtatctatattaattttcaaataatttcaaatatatataactaaataatttcaaaattgatattttaattttttagcgaacttttgagcaagcaaataatttttaaaattggagataattcaaattagtttcataatttaatttggcattttcagggtatttggcaaatattcaaattttggaattgatgaggaccaaaagcaacatgaaaaaatttcgaatggtgctgcggagtctcaaattttgggcaaaaagttttccgattatttgataaaattaaaaattgaatcgaattacaggtaattatatttatggcaactttgtcggctttttcaacggtgccgcgctttctattttggcggcaaaaattattttatggtatccaaatggttctgtgccatttatgtttgaaaaattgatgttcattctgatgaataggtgatttttaaataaaaaagacatgatcaaatatgttgctgttaacaaaaatgaagtaaaaattgccaaaaaatcactaaatccataaattaatggcattttaaaattttaatggaaaaacaaataaaatcatttacaaataattttttttcattgtttgtcattttaattcattttctttttaaaacttcctaatcatgcaataaaattctcgataaattgaattttatagaattttacgaaaaaatttcatatgctaaataaaaataaggcgtaatgccaataatcatactcaaatttctaaggaaatggccaatgccaattcaattgactgaagaattggaaaataacggatttgaatcgatgagttggaattcatcagataaatcaacggcactactaatgccaataatcacgccaagctgtttgacccaaaatgcttcacaaagtgtcaataaatcaacgttcaggataatacaaaacacgatcagagagagtaataataatacattttaa

SEQ ID NO: 64375 - DNA, 3802 bp, Heterodera glycines
gatttgatgcaaatgaggaggccaaagaacgattaataaatttcatacaatttgaattgatcgaggattttatgacaattttgtattcaactgatcagaaagattttgatgaaaaaaacaaaaaattaaaagataaattggaaagagaagaagatgaaaagaagcaacgtgaagctgatttagctgatcagaacatggaacaactgattggagaggaggagagagtgaagaaattggggcaacagatggcagcgagacagacagagaagcggaaaaggaggctagagagtgaacaaaagagaaagttggagcggcagagacgcagactgttggtgccatcgtcacacggcacaataattgaccaatgcaacgatgaagcgctctttgataccccgtccaggtgcaaaccgttgtgccacttttagaccacgtttagccacagggatcttaggcctccaaatttggcgcttggggctgattacccaatattttgctcacgtgagttttaataacgagaatttcagactagaggccttttaggcttccaaatttgctttggggcaatttatcccatattttggtcacgacttatttaggcccaaaaatttcaacctttgatcaaatggtttccaaatttgcctcggcactgcttaaaccacatttttctcctttattaatccttttattttccggctcccgctctcaaaataatgataattaaaatccgtgttgcaggtacgacgaaagtccaaacctgagtccatcaagacactccgacagtccatcatggaacagcagcgagaatatgctgtttagccccttgaggcacaaagtttctaatagtttgaaaatttcgactagtaattcgccgcgtaattggagtaactcagtgcaaagtcctgtcagcaatgagaaatggcagaacagaatattggccgatgaatttcgaacagaattgtccaatttgccaagtgaattgtgccaattttgtagcaatactcaggatgggaagagggcccctcattttttcaaaaaataattgaactagaaattttggcactatttttcataaatgttgatcattgatcacaatcaataatttctttcatctaaattcatacataatagccaaatgattttgccaatttgcatcaattattcagataatgagctcccctatccataaattttggccaatatttaaaatggacgaaaaaatgtttgattcaaatagcgatcgtaaatattacgaaaatatatttaaaacttgaaaatttgagaagtcaaaattattaaaagtattgacccttcccattctgcgttttcacatattatttaaagaattaaaattggttttttagagttcatttccgatgaatttttacattttgcttatgcccaattccttacaaatcccacggaaatgcagcgtcggattttggacattggcatttttgtgaacgaaattttgcatcggacaaaaattgttgcaaaaatcaacaaaattctggcaattaaaagggcaaatgaggaagaacgatttaaattcaaacaattaaatgaaatggacacatcattgttcctggaggaacgactcaatgagaccaaaattttggcgattaaaacggagggtgattttgaaaaatttgcgcaccttttgtacggcattttgaagcgaattatttttgaaatggaaggcaaaaaaattgacataaaattggatgaggaggatgaggagatgaaaatggtcaggaaacaattgcaccggaacaaattagcacaagcaattgaaattggcacgccccacgggccaaaaagcgtaaaaagcatttggcaaagtatggataagaaactgcaaggcaaaatgttggcccaaatcactgggacaagcaaacagaacttggccgatcgattcattgagtattatttgaacgggtggagagcattgggcgagcagcagcgaattggtaagttgtgtcaaaatttttggcaattaattagcagtcaactgaaaaattgttggcataaagagaacagtactgagttctagaaacccaaaactgaaaatcccatatgttcgggaatatatcccaatatgctgaggaatgaaaccccaaatctcttatagcagagacaaaaagcgattcttatttgtaagattcattatcgatccatctccctaatattttgaatattttggcaacaattaaaaattacaaacaattattaaggcgtttttttttggcacaaaaaatcgcgaaataggcacctaaaaaggcagaaaaaaatcgcaaataggcattaaataggcacaaaaatccccgaataggcacaaacaggcaaataaaatgtttttattaacgcgtttttgttgaaaaacccataaaaattaatcaaaaaacttaattttggttatatttcaattgttttacagtttttttcgaacacagacagtttttaaaccaaaaattttatcaaaaaaaaaaaaattttggggatcaatttttgaaacttccaaaataggcaaagttaggcattataaaaatcatcgtagaagcttcaaacgaagtggaaaacgcgtgtttcgtgcttatttgagcgtattaagtgcgcagaaattttaggcatttgcctaaaaaacgaagccctaacaattatatcacgaaaaaaatcttggttcattcgaacttgactagaccaaactggccctgcctcggtaagatttatgacggacagtcggtgataggaatatcgttttggacgaaaatttccgacgaaatttgtcacggatggctgaacaattccaatataaaacagtaaaataatttctcaacatttttattaagacagaaaattgtataaagaatatgaaggcaaatttatggataaatgtaaaacaaatctgggcacaaatttcccacaaaatacacagcaaatttattttaaaagttctgaagaagaaaagcatgaagaatttgtaaactttttaaatttattttattttaaattaataaaaaaaaatgttattatgaagctggtcaatcttctgcgtgaaaatgggttccatgaagcgcagccaaccgaatcaatatccgcattgaatacactgaaatctctcatttcggcatgggttagtcgctcatattgctaattatctacttaactgattttctggtgagcagtacagtaaaacgtgttaattactgtaacagtaaagtttttaccgatcgggaagatcttgaaaaaccttaaaatttcaattttctttttttttgggaagctagaagtgaactaaaagaatgccaagaaaaggaatatctattgttagcctgaatttagccctaggtattaatcgaaaaattttcgaatttgtctttaatattaaaaggaaaataaataacatttttgctgaaatttttatcctgtagattaattaaaaatatttattttcaaatttttaaatttttgtctttttctttttttttattcctatttaatccctcctaattagtccaacgacaatgcgcgagtgttggagacgggttcccagttgttaggcgcacggacaacaaacgcggacattgacataatttgcgtaatgcgacaaacattagtaacccaaaaggaggaaatggacacattttttggcaaaaattattgcaatttaaacgaaagaatttgcgatgacaattcgttgtactgcctgttgtgcaaggcattatcgcttaattaatcaataattaattagttaatttaattgaaataatttttaaatgcctcgagtttatgtgcattaaataaa

SEQ ID NO: 64376 - DNA, 234 bp, Heterodera glycines
atgaaagatgaagaggaatatcaaaacaatcgtgttcggcctttcgaaattgatcagacaaggggcattgccgatcgaccacgtcttaaaaaatacatcgaaaatgactcagctattaggcaattggtaattgcttatgacgcgaaagaagaaaaaaatgacgatgatttgatccgacatattcatgcattgcaataccgtgtggggatgaagggattcgaaggatgggattag

SEQ ID NO: 64377 - DNA, 716 bp, Heterodera glycines
atggaccggaacagcacaaaatacaaagacgccgttgtggccaccggggcactcggaattggagttgcaattgcgactacccaatttggacttttggtcggttctgcagcgaccaatttgctgttggactgtctgatttcgacaaaaaacgccggcaaagatgcgatcaatcgtggcctttccgtggaacagtccatcgagaaacgcatttatgccgccatcgaggcaactcaagaaatagccaaggtttgcattggctcttcccacatttgtcaaacggttttcaaatatttccttcaatttttcccacttccaattagaacccttctgagaagttgactgcccatgcgaattccttccttgacattgcgaattcgctcagcgaaagcattttgggactgccgcgtgctgtggaggaccccgagtgggggctgaaggagcgcgtcacgtttctcgcgtcgcgtatcggtcaccgaatcagctcaaagaccaacgaacgcatcgtggaaccgctgctgcagcagatgtgtgtcctcacagagcagttgtcgaagtgcattgtcctcgtaagttgttggatttgttttattggacaatttttttctaattgggttaaaaattggctaaactttcctgccttttcaggtggactacgccaagcagcgccaggaatggacgttcaacaaagtgagccaattgtcgacatcggtcgttga

SEQ ID NO: 64378 - DNA, 1356 bp, Heterodera glycines
atgctggcggatcaacaaaaaatggtgcaggaccaatcacagcaaattgctcaattgattgcgatccgacaaaacgcaccaaatgcggcggcacagcccaatcaaggagcaaattcagtcccaatattgccggacatttcaccattcgagccaacggacgacaagagccgaatttcggaatggattgagcgcttcaaattcgcgttggattgcacagcaccaacggcggacgacgaagtcaaggtcaaatgtttgatgaataagctgagcgaatcggctttcagcgaatacagcagatcagttctgccgtcgtcggtcacagatttcagttttaaagtgacgaccgaaaagcttgagaagctatttgccaaggctcagtccatattcatcgaccgctacgagtgtttaaaagcggtgagaggagaaggcgaacaattcaggcagttcataaatcggcacagaaaattgctgaccgattttaaattcgatgagctgacaaaagagcaatttaattgcctcatgttattgatggcactcaaagcgcccaacgaagctgcattgcgacagcgaattctgacaaaattgtcagcagatggcgccaacatcagctatgatggagtggtggaagacttaatcagcttccaatccacaatttcagaagcaaaggcaatcgaagcgacaagttcttcgaggccagtgaattcgattcgacaaaattcaaagccaaacaattcaacgaacaaatacgtcaaggaaagtccaaagccaaataatttgccgaacaaattcaaagaaaggaccaacactgaggcaactacaatatgttggcgatgtggcttcggcgtgcatcgacctgacgaatgccgttacaaaacgagcaaatgccgcaagtgtgagtttgtcggccatttggacaaacaatgcgagcgtgtccaagagtggcgcaaacgccaaaatgccaaaaagaaaggaaacaaccgcgttggccaccttcgtattggaatgaccacgcatgccgtcaattccatttcgctgctaaaaacagcggttctgttcaacaagaagccagtcgaattccatctcgacacggggtcggacattgtcgtcattgatcaattgacgcacgaatatgttggacgaccaccgatcgaaaaatgtaacgaaattggcaaggctttcgacggcacaaaaatttcctttattggaaaaggattcggtacattcaaatttggcaaaattgaagtcgagcaaacattttatgttgccaaagcaggctcacttaatttgttgagctgcaaaatgatggacttatttgggcttttagacgaattaaagctaaggataagcaacccaaca

SEQ ID NO: 64379 - DNA, 492 bp, Heterodera glycines
atgaaattttatttgcttatttttgttcctattcgagaatttagtggctatttaatgcctatttcgtggtttttctgactaaaaaagaatccctaatcataatatttgatacagaattaataactcctgcaaatacaattattagttgattaataaagaaaaaatgagtattatgtagagtagagcgggaccgggaccaaaacacggacaactgagtacaactgagtaccgaggtcccggttttgaccagttttgaccgggaccgggaaattcccgtggtcccggactaatactcccggatattccacctttaaggacccctttccaggcagggccagactttgccgggtctaatgcaaacaaacagctgcacttcttaaaaattgactcgacaaattatagggactgtaaaagctgtgaaatttttatgaaagatatccttcatagatcgcgcaattttctattttgactcctataatacttacaaataca

SEQ ID NO: 64380 - DNA, 416 bp, Heterodera glycines
atgaaattttatttgcttatttttgttcctattcgagaatttagtggctatttaatgcctatttcgtggtttttctgactaaaaaagaatccctaatcataatatttgatacagaattaataactcctgcaaatacaattattagttgattaataaataaaaaatgagtattatggtccataaatgaaattttaaattttccaaaaattctattaatatggatatatattttttattgcatctgatttttttaaataaataccaatattattaattttcatccttgaatttttatgattttttgcggaccatgccaaaaactgacattcgcgcgctactttttggcgaatttaaaaaaaaaatcgattcaatgtacaaaattttagccttattattaaataaaaaatgaactcaca

SEQ ID NO: 64381 - DNA, 712 bp, Heterodera glycines
atgacaaatacgcggaaagagtcaaaggcaatgaatggccacgggcgaactcaaaaaagcaaaggacgaccgacgggggaggagaagaagcagggacaagcgattgatcagcagaagagtcagtggaccgaccgatcagcatcaactgactgatcattttcatcatccagctgttgttgcccccggccgactgctgctgacacgttcgccccaaaaaagagaaagaactgatcaaagttattttaaaaagttaaaagttccaaaataaatgtttcatcgtgaaatgccaacaattctgatttccaagtaatttgctaactaaaaataatgtgtgtattaattaattttatttcgaaatttttgttttgtgcttctttcagtaataaaatcggctttatttcagtttacacgtctaattactaattattcttttatgctccaatccaacaaaattaatttttgattataacatttatccaaaagttgaaccttcacatatgtatttgttccttgaaaactatttactaaattcaatttaatatttataaatttaggttgccttccgttaaatattttattttcaatttattattaacctattttgttggataaatttaaaaaaaatcattggatcaaaactggaatagagccaaaaaaatcatttaatttattcttaaattttaatttttgtaagattttgtaaaaaaataaa

SEQ ID NO: 64382 - DNA, 327 bp, Heterodera glycines
aaaatctataaaaaatttaaaaatgagaattcatgcgagattttctggaaataagcttaatatggcctagttaagctgtaaaaaaaatttggggcgatttgaaagagaatagaaagaaccaggttcgatgaagttttggtaagccaaaaaaaatgcaaacatttaaaaatctataaaaaatttaaaaatgagaattcatgcgagattttctggaaataagcttaatagggcctagttaagctgtaaaaaaaatttggggcgatttgaaagagaatagaaagaaccaggttcgatgaagttttggtaagccaaaaaaaatccaaacat

SEQ ID NO: 64383 - DNA, 3372 bp, Heterodera glycines
atgactccagatgaaaattatggtaaatattgatcatagtcgccaaactcaatatggtttaaaaactgtctgaatcgatgttaaatgcttagaaatgtgcaggaaaaactgttatgcaaaaccaatttaaaaaatataccagagttgtataaaaaaatagacattttaaatctatgaaaaatttgtctatttctaattcttcactcggcgccggatttttttaatttaacatttaaaattttgtctttaacagactaagtttaaatttcttataaaaattaagttcataaacaagcgttgtataataccggttcataaatattagtttcgaatttattcctgtggcgccgagcattcgtaatcagaccgggaagagaaggattttatacatttttgttttcactaaaaaatattttcactcttttaattaaataattcgaatatatataataaataataattttcttaatttacaaatttaaaaaatagtaaaatagcttaaaacgctccatcttggaagtgaccttaatgattatagttttgttttgaagagcacaaaattgctaactaattgctaaacaatgaacaaataaattaattatcgacaacattgaattaataatgaatgaatcatttattcttaaatttactgtaaatcatgtgctaatgcacaagagtaaacaaaaatgctagtggcgtaagtttccatccatttgtatttacatctatatatatacatataattgtactatttaggggaacacttggcaatggcgtcagccggcaaaaagcacacattccttctcggacacaagcggttcagctcaagaacctacatggaggagcatgccgtttccgctgcgtcagcatgggaggttcatggtaaatagtgctagtgtttattgttttaattaattttgtttttaaaaaattgtaggtgaggtgtacgaggctgttcgccttgtgaaggaaaatttcacggaacaatcaactcgctggatgtgctttgcatgccagcgaaccgaccacacattccaccggtgtccgaacaaggtcttcgttcataattttttcaatattagctaatttttcctttaaaacaggcgattctggacgaatttaaaaaattcgttcacgaattcccacaggaccagcagaagtttcggctggtcctgtcggacaagattgccatggatggcaaaatgctctgcgaattagttccggggttcggtcagtttttttttcttgttttatttctcatttaaatttggcgatttttaggcgggaagatcgtgcgccgacgtgaacaagaggcggccgcaaaattgcgtcagcaagaagcggatgctgcgaaggagaaactgcgtcagcaacagcagcgggagcaccttcgctccttgggggttggttttgcctcacttaatgaaagaatttcttacagctggtagagataattctgtcagctgtaaagtatacttacatgtgcaatgtttttaaattttttttacagcgaatgcccgcagctctgctcacgttggaaacgggccattccatcgatcaccttgacgcaaagagcaacatcgtgaggatgttgatcgagctggctgaggaggaggaggaggagaaaacccaccattattttttttttgtttcattatttcattttattttgttcacctcccacggctgtcccccttgggacgggtggaggggtggtggccggcgggcggccgaatgttgagaaactttttaaaaatttcgatgcccaggcgcctcaatagcgaggcgtctctaacccaaacggccctctttagggctgtgagattgcaagagttaaatctgcccgccggccacaacctgatcattcactcatatatttgttttccctttgctttagccatagctaggagataggcaagtgtaagcatgcaaatcactgtttggcatatgtgttttaccatatgtttacaatgcttacactagcctgtctccagctaaagacccctgccgtttttccctcacttcgttgaggttttttacccggcgggtcttcttctcacccccacttcatcatttatttgttttttgttgtgtcaacaataaatttatttgtaaattagcttgcatgaattttttaaagtttcgaaaaactaatttttatatgacttttttgtacacaacgtagttttgggaacccttcaagcgatcttgaaggggctctctctcgaatgccaagcatacaccaaggcttggaaacgatcatacgagatcgcttccgtggccagcaaaagatgtccgtcggctggctcatgtgtcggtgacttttgcacaaaagtccgaccctccacagccatccgagagctcagggaaaccgaaacgttccccgggaacagtttctgcatcgacagcacggcattttggggaaaccaatgtctcctagcagccagttcatgtctcttctacaagtggtttgcaaaaccacgctcataagccatttacgaagtcatcggatgcaactcttgggagtttggcatccatattcaacttcgcctcgactctaccgctggaagaagtgcgacagtcgaaactgtgcttcttccaggccgtgtgctcaaatggcacaacatcagcatttcaacaataggagtgagccaagcaccggctcccctactgaacgctgacttcctgattgaagggcgaaatgtcgcccttgtccgtgagaaaatcacggactctttccattgtacagacttgaaagccgcccaagctttcaattgtactctgggaattgacgcatgcacgggctgtcttcccgatcacacagacgggacagtctcgtgccattgtcgcgtcgccaatctcgagggtctaatggaagaccctcagcggagacttccgctctcattccgccattacgaactgcggaatcacggaaggcgaatattcgccataaccggatatagtccggtccaaatgaacattcaaatggacagccttcaaatgtccttggaaatgcaccagagtttgtgtacaatcacaccaaagcacatctctggctgctacaaatgtgcgacgggagctcagttctcctactcgtgccacactgacattggccaaacattggccgatattcaatgcgaagatggttcgcatttcacgagcaaatgtggcccgaacataacggaccacactgtcgtgctcccattccagcatgccgaaataagcacgacatgccaagtcatgtgcttggctgggagaaccaaattctccttggtgggacaactccattatatcccactccgacaacagtcagaattcggagcccgagtctccgaaagcctcgaagaggccagcaactccaggctgggctga

SEQ ID NO: 64384 - DNA, 475 bp, Heterodera glycines
ttcgctgtcccgtaccagcagtccgtcacggttttatgaaaaattgacacgcggcgcgtcaattggaggcggcggaggcggcgatttgcgcacactgaagccgttgccgagcacaatgtcctacgacttaaagtgaaaatttaatatgcattttaaaattattattttaatttactttttattttttatattaaaatcgctaatttaatatttaatttgaaatttatttttaaaactttttatgatttattagtttaattaaaaaattatttatttttcttcaccgataaaattgtaaaatattattctttttaaatatatttttattttataaattttaatataactttctctacgatttaaaatcgtataaaataataattaattaaattcatttgcatattaaattttgcagaaatatcatgagaatgaccgagattaaaactgacattggatttgctcgcgcatttgtacg

SEQ ID NO: 64385 - DNA, 1085 bp, Heterodera glycines
  unsure (1)..(1085): unsure at all n locations
atgggagcaacatcgtcatcggcagaagtagcacaggcaacaactagttcgagcagtatgctgaggaacaaaaaaaagcaaaatcatagggaaaagcaacaaagcggaaaaagatgaaaaaaaaaacgaactttcaagtgacgacctaaaagcaaagcgggcgcataagcagcagaagaagcaatgggagaggaggaagagcacaggaaaaataagctcactaaaattaaaaccataaaccaaagcataatcatttgctaatgagaaggcctttggggcaatcagtcggaacaatcaaaagaatattaatggctcaatttgtcgcctaattatgaatattcgctttgttttttattatttattttctttcaaatcctttacatcatcttattttttttactttttgttattttttgttttgaagaattgctttaaacattgattaattcgcttttgtgttgtattaataccaacaatttatttaacttactgtaatatttatgtaccgtaacccgcccattttactaccgttttcctttgtctgtttgtgttgtgcgcctaattggtattaaccttttgttcagttgctattgtgaagtcgtgccccgcttctgtttaacataaatgggttcgttcgttttctttaattaattaccaaaattaacattttattatttttaattttaattatattaattattgacaattaactccactaactaattaattaaactatttttaacataaagtaaattgcaattttttctgcttattcattagcatttgcttctgtccgtccgctcgctttacccttttgccaaatattttttttgttttattttccattttttaggtttttccgtttcctccggcggtgcctttggtgcgtgccgtcgaattgccagcgctttcgctgcctcggccgccgccttcgccgagtccaccgccgcccgagccgacgccggtgcccgaattgccggtgccgaaaatggctgaacagctcgaacttgtggtggaagaccgcaccacacgcagccgacactgccaccaattncgaggnncgcagtgatggtaaagtgggaaaa

SEQ ID NO: 64386 - DNA, 312 bp, Heterodera glycines
tagtgagcttatttttcctgtgctcttcctcctctcccattgcttcttctgctgcttatgcgcccgctttgcttttaggtcgtcacttgaaagttcgttttttttttcatctttttccgctttgttgcttttccctatgattttgcttttttttgttcctcagcatactgctcgaactagttgttgcctgtgctacttctgccgatgacgatgttgctcccattttccaatttcgttgcggtgttcctggcagttttccgcttcttgtactacttgaattaattgtttccgttgttgtactgcttgaacgcg

SEQ ID NO: 64387 - DNA, 656 bp, Heterodera glycines
aaatcacaacttaatgcggatggccatgaaatttgctacgacgaattgctgggcaacgcaattgatgtgagaacatttaaatattattgtaatttttatgacaagacccatacgccaatcggcaaaaaaggcacataaagtgaaaattttgcattaaaaattcaatatttgtaactttgattctgtttaataggccacaaatgctgatataaatatataaaatccaggtcaatttgttcaatatttgcatacacaaaaatgtttttcaatttttattcattatctataaaacaaagtgatttttaagggatcgtacacttataatccaattcaatcaatttacgacaacgaagacatggccaaatttactcctaccaaaaattacgaaattggtaagttcaaagattttctgatatgattaaaaacatattattttattatcaatattattagttgctaattcatttaacagtctaattaagttgcaaactcacaatttattcaaaaaatttacagattatcttcgttccctcccaccgctggtgaccaatgggcttttcccacttttgaaatatgccgaacatttgctgaaattgacgcatccagaagtgattgagggcatcaaacggcctcatcacttggtgaaagagtttcgg

SEQ ID NO: 64388 - DNA, 147 bp, Heterodera glycines
  unsure (1)..(147): unsure at all n locations
atgggcaggacacgccaagtacctcaaacttgggtaattaaaccgaagaaagaagtgcagtggngaagaatgacgcctanaatgaaaggaatattcgatgctgtgcgaactctttgtgacccctctctgactctgccaatgcagcag

SEQ ID NO: 64389 - DNA, 80 bp, Heterodera glycines; identical to SEQ ID NO: 51817

SEQ ID NO: 64390 - DNA, 126 bp, Heterodera glycines; identical to SEQ ID NO: 54981

SEQ ID NO: 64391 - DNA, 787 bp, Heterodera glycines
gccaattattcgctgtcggacattgtgctgcaaccgtacgacgctttcaccaaaattcacaccgtaaaattgcaacacattctgtacaatgagcgcaatggtattcgctccggtcaaatctcgcacctcgtcgaaggctatttgaccaaatatggccttcctcttgagcacgcggctcacaatcagtgcacagtgctggctaagtttgggtcattgaacgaacggaccatcgccagtttcaccgacgcattagaaaatgtgctgttccattacccgaaaaagcgcgagacggcgccgacctacaaatatgacgaagtgcaggtgaaaaaaagagagaggagaacgatgcgagagtgaaagagcaatagtcgagaatgggtatgctggtcaagagtttacgacggaaaaaattggcactttgaaatgggagggacagagaataattagtcggcaatggacatttagtactttaaatattggcacatttgcattcagattaattgttacgacgagtgcgaggcttcggtggacatagatgacaatgtgagcgatcagcgcgcccgcgttcgtctgttttgcttggcctttctcagaggcacttccttcttggagatcggactgaacgaccggcgccgcgagggaaaagaggtggtgcgacgcaaagacattttgccaatgtacacggagcgatggattcgatttgaagcgcccgaatttcacgagacggtggacaaaggcgtctggggaggaggaccaggtgaagcggagagtcgccatgcgaccgacg

SEQ ID NO: 64392 - DNA, 292 bp, Heterodera glycines
atggttaaccgaggatgggttccaaacgaaaacatcgaatccgaactgaagaagggcaagcaactgcgggagtccgagctgaaggatttgaacgcggtcgtcagaagtgctgagaaggtgggccaagtgttgcgttatgttaacccaaccatttgtttatcttttgttttttcttagatttagtgtttaaattcagggctctcctttcgtcaaaaacgacccggaaaagggaatttgggccttcaaggatttggaagaaatggcaaggcaaagcgacgccgtcccaattatt

SEQ ID NO: 64393 - DNA, 1057 bp, Heterodera glycines
atgcccggctccatggacaaataccatcagtatgttccattctcagctcattcgaattgtggagtgaggaatcgcgcacttccttccttagccaagttcgtctttcgaaaaatccttttttattattttttttagtttttggattcctacgatattttggacgtgaattgttcagacttggtgcttaaattatgcgtgagtttaagggaaagtcgcaaaatttttttcgataaaattcagaaaattcgttggcataccgttcctccccaaatgctttcgcaatttactgactttttatgcgctttggccatcaaccatgtccaccatatcaattcagtgttcaattgcttcgtcgaccatttcttgccaattggcaatgcgaaaggtatgaaacaatgtttttaagacgacacacacaatttctttaaatctgcaggttttctagcccattgaaatttgctttccattttcccaactttaagatccttcaaattttgaggcgcatcgtccgccagcggtggtggacgaccatttccaagagtcgctgtacgccttggccaacctttccatccaaaacgttgtctcctgcaaccctttgtccgtcaaatttcacttctttttgatttgttttcctgtttttcaggacgacgcctcttctgctcaaatgttttgtgaaacgctttccgcacatcaaacagccgtctccgaaactgctcgcctttatgcgaaatgtgctccgttttgccgattggattagggacgaggaaatctctgccgaaatttggtcgcttatcgtcgagaaactcctgcacatcgatgtagtaatgtttttcttctcctatttattccgggtcattttaggctttatgttttgagcgggaggaagaagaacaacagccgactaattctaatcgtttgaaacagaaaaaattggacaacgaaaccgccagcgaagaaacaacaaatccgatgagggaaaaactgaacacattggtcgaattcattctcaattatttgggggacgccgaggccagcaaagtgacgcttatcaaagaag

SEQ ID NO: 64394 - DNA, 998 bp, Heterodera glycines
gtcgttcatccacggccttttcttctccttcaacaccatcaccaccattgggtccttttttcgaccgttccctcgcgattccttccctttttcagattgggcaatatccgtgtcaccaatcgtggtacttattgtgttcccttcccctcactttgtacttttttactttaccccctccccttttttcagtgtatctcgcggtaattaatcgctccccccgctttttccctcattttccccgtacttcctcaacagttggtcattctctacgtaattatcggacttgcagtgatcacaggtgggcaaagagtgccgtggcactgacagtcggccaattggcgctttctttcccacccttttgattagcttctcttgacttgtgctcctcaaccttgaaaaagaccttcacgaagttgcattactttgggcgtaaaatcagagaaatccatggcatccacggattaaggcaaagcaaaggaagggaaaagcaaaacacaactcaaaagccattttagtagggacatgcgggaagcaatgaagatcatttcagcaatgaaaaagatcaggtgggggagcaaagagacaatggcacttttgaaagaaaaattcactgactttccaatgccatcgcagaggcagcaaagagcgaattacgctggaggaccgtgagttattaacagctaattgattgttttgttaacggcattttgatttagttaaaaggtttttggaggttcaggagcatttgctcaggtagaagcgaactctgaccaaacaaaaaatggcatcactttttgcatcctttttaaggcagccttacgtgccatacgacgtgcacatcttcaaatggatcgaagatgcggtcggcattcccttttcatatgataaatcgcccgattggcattaatttccctttaaatgcttcaaaagcatcgccccccccctccgttcagtacatgcaatactgcttcaacaatgaggagtccgtctccctcggg

SEQ ID NO: 64395 - DNA, 1448 bp, Heterodera glycines
atggagaaaagtggcggagattcggaattagagggaggaagccgaaccgaattggcacaatcagacaaagggattctgttggcattggcattggttttagtggatggcattatggtattagcattggccaatgattgttggcacggaaggattggaattggcatcggttagggaaaactttgactttccttagtgttggatttcctacctcggcagaggtaaataaaagaataaatttgggaattgcccaaaagaggcaaataaacgtgggaaaagcgaaatccaaggagaaggcatttccctttttcacttttaaattagtcggaaatttactcaccaaaaaagaaaaaataaataaataaatacagaaacgccgtctttggcaccaatccgaggagtgaaatggaacgacgagttcagaagaagatacgacgaatttgaggagggaatgagcggagaacaggtgcactaaagggtgggggcaaaacgaaaaaaagacggaaagtgccaaaatttaacggaatttcgcctgacgggaagggccaaaaaatggggggaaggcaaaaaagccctatttgtgccttttttgttgcagtcctccggtgagcacgagacagtactgcagaagacgatgaaggtcagtgagtgccgttcattggcttttcatctcccctggtactcattcgtccccttttcagtacctgaaaattcttttaccgcacggttagcacttcacaagtccattttatgatgccaaaagtgtgtgtgtttaatgccgacttttgcagttgggctcaacattttgctgttcacttacatttcgttgggtgccatcgttttcatctttttggaggcggacaacgaattggagcaacgacggagcaaactgtcccaaattttgcatatttatgaactgataatgaaggaaactgttgctatttgtcgctctgccggtgcgacttccctctccgcactgaacgggtcgatggtcggtgctgggacccaaattaggagagaaatgccgaggctcgccgactaattgatggccatttgttggcaaatggcatgttagaagacgtgctcctccctttgacattgcctcccccgggcgtttcccttttccaatttcacttctcaggtcgaacgtcgaatgcgtccccttctctcagtgctttcccggactcacgaatatgacgaaaggttcacggccgaggcgcaaatgtggagcgattcagagcacactttggccacaaaggtacggtgggaaaagaaaaggaaaacagaaaatttaattttaaaaaatgcctaattttgtacatccaaatgcccaattcgctgaccaatgcccatttttgccgcattttccccatttttccactcattcggactattttagtggactttcgccgcttccagtctctacgcactgactgtgatcacttccacag

SEQ ID NO: 64396 - DNA, 92 bp, Heterodera glycines
ggattatttttcaaaacacctcgtagactgggggataattggagactgcgggattaatagagactgggctataattagagcatatacggtat

SEQ ID NO: 64397 - DNA, 505 bp, Heterodera glycines
cttaaattttttacaaccacttattgccaatctaatttcttgcagattgaaagccatccattgcctgccgatgctcggcacagcaaagcactaatagggtgtttgactgacttcaaaaaataattccttacccaaaagttttttacaaccacttattgcctatctaatttcttgcagattgaaagccatccattgcctgccggttctcggcacagcaaagcactaatagggtgtttgactcacttcaaaaaataattccttacccaaaagttttttacaaccatttattgcctatctaatttcttgcagattgaaagccatccattgcctgccggttctcggcacagcaaagcactaatagggtgtttgactcacttcaaaaaataattccttacccaaaagttttttacaaccacttattgccaatctaatttcttgcagattgaaagccatccattgcctgccggttctcggcacagcaaagcactaatagggtgtttgactc

SEQ ID NO: 64398 - DNA, 349 bp, Heterodera glycines
atggaaaaaatttggtcaacaattgaaaaaggagaaacatcgaaaacagagaagaaaaatttgacaaaagaaacatcggaagaagtaaaaagtgacgaacgaattgacgaagaaaaaagtgatcagaaaattgaggaagaaaaaagtaaacagaaaatggaagagccaaaaagtgagggggaaaaaagtgatcagaaaattgaaaaagaaaatagtgatcagaaaattgaggaagaaaaaagcaagcagaaaatggaagagccaaaaagtgatcagaaaattgaaaaagaaaatagtgatcagaaaattgaggaagaaaaaagcaagcagaaaatggaagagccaaaaa

SEQ ID NO: 64399 - DNA, 576 bp, Heterodera glycines
atgcgcaagactttctttattgatgggataacagaaaagggagcggcattcgtgccagcctacggccgtcttcgccagccgtttaatataaatgtggcggcacatttttatgcccgacaccgtgtgaaactgcatcacccctacattccgtgcattgttgaacgctttgagtgtggggagaaccgtaactacccgatggaactgctcgaaattgtgaaagaaggacaacaaccgatcgggcaatggctgggcaacttgttcaaggagagggatgacattgcagcagctcgtcaaccctgtcggacaaaactttagttttgcgtgatgaagaagacactggacgcgatcaatgtagccagaaatctcctgagttttattggtaaatcaagctaatgttttttttttcgacttatttcactttgtttaaatcatgtttccttcttcacataaatatgacaattttaataatttaaaaagaaaagtggtaaaggttaatgggcgaccgtagctcaaatggtaagagcgcagcactcagtgctgaggctgcaggttcgaatcctgccggtcgttaataaa

SEQ ID NO: 64400 - DNA, 264 bp, Heterodera glycines
  unsure (1)..(264): unsure at all n locations
ttgaaaaaaacgatttttttgttttcggggcagtccccccgaaccgatgcgcccagatttatggggagaccgaatccttccggaatagcttccctatagcctgtactttaattctgcgttggatttttgctccccataattgtttgagtaccccaaacggacacttgaaaaaatcgatttttttgttttcggggcagtccccccgaaccgatgcgcccagatttatggggagaccgaatccttcgggaatagcttccctnatag

SEQ ID NO: 64401 - DNA, 604 bp, Heterodera glycines
atgaattgcgtagcattaagcagaaaaagtattacatttttttgtgaacttctgtcccctccgctacctgtaaaattggatgatttggtaaagagaaagagacaaatcggtgaccaaatggccaaagtgcaaaagtaagtcaggagaaagtccaaagtcggctcggttggtcagaccaatcaaagcggtaaaacaccgcaaagctcagaaaacaacgaccgttttgcacgtcaccccaactcacgtcacaaaactcctcgaaggatattttcccatccccgtccttgtcatggaaaagaatggttttatcggcgatttgctgaagttgagtggagaggtgataaaaaccgcacggttttgggtaattttcaaaaagaatttttaatttcaggatccgaaaaatcatcataaaaaaattcaggattgagaaaataaaaccggcccaaaaggtttgggatcaaaaagatttaaatttgcaaaagaaaaaattgaatttccttcacctgtcacttttggtgacaggtggatgattgatgaccttccgcggcgctgcgcggcgcggagagggggagtgaaaaaaaatcgccagtgcggatttgaggaa

SEQ ID NO: 64402 - DNA, 204 bp, Heterodera glycines
ccactggacgatgaccaacactacaaaacgtttccgtacaacaaagcgactcaacgtgaagccgtccgactaatcaatgaagccaggcgtaaatcaagcagccaagtgaggaaaagtagcaaaccgacggccaacaaaatggacacattactcgagagcaacaaattcattgttgacgaagaaaatgaggaaaaggaagaatga

SEQ ID NO: 64403 - DNA, 1092 bp, Heterodera glycines
atgagtgacaatttcactgatgaggtccaatcttcgtctatattcccgtcgttactcaatacttctcaagttccgtccgaatcgttcaacaattcgtcggtccaaaatgtgcatttggcaggtcattcccaccacggacacagagatcgcattgtgttcttcgaaatggtgtcaaatttataaattcaaaaacatgggcataatttaagcacttcgaagagcatcagacgcaacttacgtttgccttttggtttttcataacgattatcgctaaaattggtaacgtaacttgagaattaaacaatttgttttctgcttactttcagctttccatcggtttgaaaaaataaatcgcattttgcccgactcggcacttctgctcgttttgggaagtattttcggtggaattttgcatattatgtttcccgaacgtgtaattgactgaccaatacgatttttctcaatgatcaaaatgttcaggaaatttacctgaaaccggattggttctttctttaccttttgcccccaattgcgcttgaggctggctactttttgcccaacaaagaggcaagttaaggaagtcaacgaaatgttcgaaaaggaatttttatgtatcgtaccaaaaattaatggcggattttagtttttcaaaaatattgggactatcaccacatacgctgtggtcggaactctttggaatattgcagcgaccggtaaactgtcaaaattttggtaatatttggttctcccctcatacgaatcagttgtaacatttggcgtttctttttcgtttcgatattctatgattctccgataataatttcgtcaatttgttttttaatttaaaagtaagcatcaaattcaggtctcactctgtacgccttcaacagtttcttccacggcaacccctcccccatcgctctgtttctgttcgccactctcatctccgcggttgaccccgtggcggtcatttgcgtatttgaggagatccatgtcaaccaattgctgtacatttgtgtgtttggggagtcccttctgaatgatgccgttaccattgtgagaattcgtccctttttctcatttattctctaa

SEQ ID NO: 64404 - DNA, 314 bp, Heterodera glycines
catttcaatcactgggactcaatccaccaacattccgatcaacgggactcaatccaccagcatttcaatcactgggactcaatccaccaacattccaatcaacgggactcaatccaccagcatttcaatcactgggactcaatccaccaacattccaatcaccgggactcaatccaccagtatttcaatcactgggactcaatccaccaacattccaatcaacgggactcaatccaccagcatttcaatcactgggactcaacccaccagcatttcaatcaacgggactcaatccaccagcattcaatcactga

SEQ ID NO: 64405 - DNA, 677 bp, Heterodera glycines
atggacactgttgatcagagccgtgccatcgacaacttgccgccccgtgccaccggcgatcagtggcaatgcacggcacaatttggaaagaccggtgtgagcatgagcaatgcattgtttctgccgccgttggtcaaaggtgtgtaaacagacgtgaaaatattaaaattaattgtctaatgagttataagtagagaaattggattttaatcgatttttctacacaaaatcaatcgcaagaaagaatatccgattaaaacatcgattgagttggtctctaatttgaatgacattgagcctattttttttaatgtgcaagagtttaggatatttttaaactcaatttaagcaattttggagcaaaatagcccccttttttaacaattgacctttccagagtttttttcctaggaaaaacctaaaaaaatttatgaaaaattgaatttgaagaaaaaaaagtttagagtttttcccagaaaaaccttctaagaaagtgagaaacttaaaaaaattcagtttttgaaaacatttttgggggaagacaatacggggggagggtgggtgagctgtgctccctaaaaaagtataattttgtccgattcatttttaattaattaaaattaaaaaatggtaataatattttttcaaatttaattaatttactcgtcagcaataaa

SEQ ID NO: 64406 - DNA, 1347 bp, Heterodera glycines
  unsure (1)..(1347): unsure at all n locations
cgctcgctcntaattatacatttcccntattccttggtcagatcgattttctgtcgccttcgcttttttcgtacataaattcgggcacgggaattgaggtgaaccgagtgaaggaatgacttttgaattgttttaattgatccttccttagaatttgacaagccttccgaatatgatacaaaatatcgggggaccatttggctttagtgccaaagaccaacagctttggatggactttattatggaggcgtcgggagtggtggaaaatgccgagaaaattgaggcggtaagaaaagaaatgaacgagcgaatgaatgaatgaattctcatggcggtggacaatttcaggaaacgaatgtgacggccccgggggaaaacccattgaaaacggtgtgggaaaagcattacgacagggagcgatacgagcgcgagatacgcaccaaagagggcactccgttgtactttaccaaacaaaacataaggtcgaccattggggagatggaaaaagggaaaaagtgccaaagtgaatgaaaaacagtgccaaaaaaagtggcaatcgtttgtaatagtttagcattttcagcgatggctttggcccaaaagaagtgagcaaagtcgaagtgttcgaacaattgcataagttgatgggcagtgagcagatcaaagacatgaacaggacgggcttcgccctcctgtccaagcagcagttggatttgctgtacgggcccaactcggagttccacgacgagaaagtcaaactcgtggcttacaaattagtgaaccaaaagaagtgcttgagcttaaggtgctcaaacggttcctggcgttgaaccgatcgacgattcagcagcacattgaacgcgacattcattcgctcgcgcagataaaatcatttaaaatcacgcggaagtcagcgcccgcgaaggcgcagcaccacgcgcgatcaaagagagcggtgattctgtcgccgattagcttttccccgtttatcctcgtgagttgggcttggccttccaatccgatcatttgtcttcagaccttcctcgacaggagcccgatcatcctttctccaatcattttctctccgctgatccttgcccctgccgtcttgggccctgtgccgcccccccccgctccctttccaccttttatacgccccgttgttcaggtgatcctttccccgtgggctttcgtgccggtcatcctctcgccccgtctgctcgacccgttgattctatcgcctcccattctttctcccgttattttggtccgtcttttgcttcaccgtccccccccatcctccgcgtccctttcagtcccctctagcgctgcatccgatcattcttt

SEQ ID NO: 64407 - DNA, 678 bp, Heterodera glycines
atggttataagactgccgatttcacctggttctttgatgggctgaagaaagctggtggcagttttgacgttattggcatctcacattatccgagctcgtcaaattggaaaaccctagacgcacaggccgaaacaacactgaaaactatgatcagtcggtacggtagacgactgttttgtagtttaaaaaattctgagatttattggaggttcggttcaaatttttgtaatctaggatatttaaagtttgctctttaaaaatgggtaattcttaaaagagaaattcaaaactcccacagctttaaaaattttaacataaaattaggcaatttttcaaattttcataacaaattatcaaaaatatatgtaattttcagcggccctttttgttaggcctcaatatagccactttctaaaagccgaactttgccattttaacagatatggcaaaaaggtggtggtggccgagattggcttatcatggaacgagccaagtgccagcaaatccatgcttgacgacatgttcaagcgggtgaaagcattggggaacaacggcattggcattttctattgggagccgcaggcgtcgccaggctggaaccattaccagtggggcgcgttggacaattcgggcaaatttacggccgcaatggaatcattcaaaacaactgaagaatga

SEQ ID NO: 64408 - DNA, 648 bp, Heterodera glycines
atgcaaactgctcgaaaaggagctgatcaagcaaatagccttttgtgaggagagaacgagtaaattccaatcggcgggcgactcgaaaaacacccttttatatgagggattgttacagcaatcaaaagtattttgaaatttaattgttaatttacgtgaaaaacaatttaagaatgatttgcagcgggttcaattggctgcgttgggacaaacacaactccctaagtgcgtttgactaaaatgacggtaaagttttggcattttatagcttcaaattgcccgaactgtccttacccattatccaattgaattcttcaatttctgacgacaaattgatgcttagaataaagaaagtcgagcacctgaaacttcccgaggttataattttccacaatttctggtataattttttgtagggttggaaaccatccgactgtgctttgtacgttttcttcaaatttccttttccccatggtacgcatcaaactggacgaactcccactatcaaagggacaaattctcccggtaatttttgttaaagaaatttttttataaattgatatttttagaatttacggatgtttttcaactggacataagtcgcaaaacaaagcaatttttgcgcatctgcaaaagacagcctcttaa

SEQ ID NO: 64409 - DNA, 614 bp, Heterodera glycines
atggcacagcttaattctgaattaatccgcgctaattgcgaagacagcggtttcattgatgaaattgagttgcgtctcatttccggtgccctgcaatttgttcatcccaattcgccgattccttttgagcgaattccactgcacaaaatcaaacatataattagctttgagaatggccgaggtgccgtaaatgtgcttctggtcgagaattttgcttattcatcggaccacaagcttggccttgttagcaagtgccatttatttgaaactcaacgcggcgatgatgaccgaggagtggcaatggttgaagaattttgccaaggatttaagcagaaatttggagaaattctggagaaactatcagccgagcaacaacaaaaacaatgattataattttttacatctttttgttgttgttttttattttataaataatactttatggattaagaaattaggtaataccatttatctgtgtataatcgtataacacacacacgtgatacattatatagttttttccgtgtttttattttcttttgagatgatgtccttctcttctacctccgaaaattcatttgacgaaggtctggcgaatacttcgtttgttgcta

SEQ ID NO: 64410 - DNA, 880 bp, Heterodera glycines
atgccgtccctcgaaggtatttgtcggcggcacggaaatgggcggaggaggccatcggaaggcactctgttcagctccatttgctcgcgtggacagtcccggcaattctcgcagcttttgttctttggactgatcggattgatgcctctgagcttagcggactctgttccgttggcaatgcggatcaaagtgcgcttttgtggctttggactgtccctcggtcttcgtccgcactgctcggactttaccttatcctttccggcttctccgcaatgtgcaaagaacggaatcacttcagaaagcgggttggtgttgagagaaggcataaatcagacgaagaatgtttcaattgggaagaatcttttttaaagcgaattcattggcatcgcttttcatttgtttgtctttcggcagggcacagacacatccaaacttgaaaagttcatgttcaaaatgggtgtgttcgcccttttgttcgtgttcccctcgctgatcgcttccgcgtgcgatctccaccaattgtcagtgctcatccaatggcttccgcacaccgtcggctgtaagtcgcgcggaggcgccttctccggagagtgcgttcggcccgaacagccccccgggcaattacaggtcgttttccgatagtttaaagacgagttggcattccatccaaattatcttatttcacagctgctgggagcgacgatggaattgaccgcggggatggcctcggggttatggatgttgtcgccgaaaacactgaactcgtggaagagggcattgccttgtggaaggacagcggacaaaggcacagagaggagaaaggacgaaaccggcatgagaatggcggaaatggaaagagagcgacgggggacggacagaa

SEQ ID NO: 64411 - DNA, 556 bp, Heterodera glycines
atggacatggactactccgtggacgtcaaggtgggcagaggataggattcgtagagtccaaaaatgggaaatccggtccgcgttcatcagtttctttttttcaaaaccaaatttaaaattctctttctactctcaaaaataatataattttttgggtgttgaatggttagtttgactaatttttacatatttcaaagccctctaatggctgttcagttttttttaactctgctaatgaacctttaaatagcaaaacattttttaaagggtttttacccgattttttcgcttcctaaattcttattttgaatcccatcatccttttccctccgtccgcagatggaagtgcacccggcacgcgagccaccgcccgtcaaatacgaggacacggaggacgaggcgcaggtggacaaggatgacgagcccgtgtcgacggacgactacacggagggcaccgactcggagacggaggactgaatgactgacggagggagggaggaactgctctaattgcaaatggggaccattgaatgatgaatgattgataactaataaa

SEQ ID NO: 64412 - DNA, 821 bp, Heterodera glycines
  unsure (1)..(821): unsure at all n locations
aaacaaaaaaatcgattttttcaagtgtcagtttggggtactcaaacatttatggggagcaaaaatccaacgcagaattaaagtacaggctatagggaagctattcccgaaggattcggtctccccataaatctgggcgcatcggttcggggggactgccccgaaaacaaaaaaatcgattttttcaagtgtccgtttggggtactcaaacatttatggggagcaaaaatccaacgcagaattaaagtacagactatagggaagctattcccgaaggattcggtctccccataaatctgggcgcatcggttcggggggactgccccgaaaacaaaaaaatcgattttttcaagtgtccgtttggggtactcaaacatttatggggagcaaaaatccaacgcagaattaaagtacagactatagggaagctattcccgaaagatccggnctccccataaatctgggcgcatcggttcagggggactgccccgaaaacccaaaaaaaaattttttggataaaaattatttaaatgaactgactagataatatttaaaataggttatttctcttcctttcagtatccctgcaaagtttggtgcgcttctgatcagtttctgaaaaaaaaagttaagcctaaactttttggcctgtttaaaaaggaattaaaaatttttaaaaattttattcatctccctttttgatagaaaaagcatcagagtgcctaaactaacatgtaaataaaatttggtgcgtttcagaaccctttctgaaaaaatatttaagaattaattttgcaaaaaataaataaaaacgaaagact

SEQ ID NO: 64413 - DNA, 49 bp, Heterodera glycines
ggaagctattccggaaggattcggtctccccataaatctgggcgcatcg

SEQ ID NO: 64414 - DNA, 293 bp, Heterodera glycines
ggaatcgaaggtgttgtaagctttttttccttttttcacttgtaaatttatttaaattttcaatttttttagctttttttcgaaaaattttttgtctttttttcggcaggcactgcctctgacaatgttttttatttatttagaaaaataaatttttttttcttgttgatttattttaattatatttcatccttacattttttaataaacattttcaaactttcaccttattaatttaaggcgaattttgccttttttattaaaatctctttgtgaaaaggaaaaaaaatagg

SEQ ID NO: 64415 - DNA, 356 bp, Heterodera glycines
ggaatcgaaggtgttgtaagcttttttccttttttcacttgtaaatttatttaaattttcaatttttttagctttttttcgaaaatttttttgtctttttttcggcaggcactgcctctgacaatgttttttatttatttagaaaaataaattgattttttttctttttgatttattttaattatatttcatccttaaattttttaataaacattttcaaactttcaccttattaatttaaggcgaattttgccttttttaataaattctcttgtgaaaaggcaaaaaaataggctcttttaaatatgcctatttaaattactttcattgctttcctttcgcttacgaccatacca

SEQ ID NO: 64416 - DNA, 349 bp, Heterodera glycines
ggaatcgaaggtgttgtaagcttttttcctttttcacttgtaaatttatttaaattttcaatttttttagcttttttcgaaaatttttttgtctttttttcggcaggcactgcctctgacaatgttttttatttatttagaaaaataaatttttttttcttgttgatttattttaattatatttcatccttaaattttttaataaacattttcaaactttcaccttattaatttaaggcaaatttgcttttttaataaattctcttgtgaaaaggcaaaaaaataggctcttttaaatatgcctatttaaattactttcattgctttcctttcgcttacgaccatacca

SEQ ID NO: 64417 - DNA, 1698 bp, Heterodera glycines
atggagtgcgcgctgttctcaaccggacgcgaccaaaccaacttgcgcgggtggacagcaacggcagcagaaacaatacgacaagaggcaacggcgtggcatccgaagcaatgggttagtttttatgacatccaatgtgtgaatcataattatgttgtttgtaagaaaaaatgtttaccatccaaaatttcccaactcaaaatgtcccaatttttcacaatttttaattggttggttttctacagaacaggacaaatcttcaccactaaaagttttccaaaaagacgctgaaaatttttaaaatttttttttcttctgatatcttataaaaacttttctcggattctttttcttgaaagaattcaaagtttgaaaattttttaaagtttttagcggcaaaattttgggtacaccagtactccatctgtccaaattagtaaattgtatttttttttcaggtccgtctctttcatatgcccaaattctgcggcctcctcaaaagcgcgctgcccgaacagaaccaacgaaattgtgttgctgcagcacatgaaattccactgtcgtcatcacaaggttcgtttttccccccattttcccctgatttaatgggtccgtatgtcataaatattgtccgacccaaaaaacttttaaatttaaatagttaaacgttaaaaaatttataggtaagaaaaagaagaaattttgaaattgctggcaaaattctgactggaaattcgggaattgtacctctgattccctaatattttgtttttgattaaaaaaactaatttaattaaatcttcctaatccattaggctttcgaatagactccaattatggcaagaaaattatttttttgattttctttttttttaattttaccaccggttttttttctaaaatctatcgccattttccagtgccaatttgtccgaccaaaactttgtaaaccgtcgggaatcgctatttgctgaccgagactgtccactgttgaccgacttcttcgtcgacctgttccgcctcgttgacaatccttccggcggatgaacgcgtcggaacagttttttttgaaaaaactcagacttttggtaatttttttttaattttctacgtattggcttcaaaattggataactattaaaggaatttatccccaaaaaaccgccgtgttgtccgcccatttgtccctccccaccaaaaaactgggaatgtgttggcaccgatttttttaaataaaagagcttgtaaattatgcctaattggtataccatgggaacaaacaatttttttttacaaaaagtgcattaaatttcgaatttctgagtgaaagaattgctgttgccgatgataattttttgccggtattttttccctaaattcagtggcgcatggggccgacgcaccaccacttttgtttgagcccttactgcagatgtgcaagtccaacatgaaccaggaagtggagctgctcagcaaattgtcagcagctgcatcacagcctgcggtgtaagtgcgaaaaatggaaaaaattttaatgggtcaatttttttgtaaaatttctcaatttttcctattatttttctcaacgaatttttttcacttttccagcaaaaaggagacgacgacaatccaccggctggagttcacgctgatcaccgcctatttcaaactgttcgaccctacgccgacttcagctaa

SEQ ID NO: 64418 - DNA, 1847 bp, Heterodera glycines
atgagcataagggcgttaaaacgacgaagtgtgcgctcgtcaactttctttgaaaaaggtagatattaaaagaaaagcaacttaaattatattaaaataattagtttgaatcttatttaaaacatagggtgggagatttgagttacaaaaaaaaacggtgcaccccaaaactccgccgaaaaataactccgccggccgaaactctgccgagacataactccgccgggcaaaaaaattttcaaatttagaaattttgcaagaaaaaatcagaatttttttaaaaacgaagagtaaaatattttcaaataattttcctctatttttttgaaagaacttagtttttcatcattaagttttgaaaaatcgctggaaatgttttaggaaaattttttggcggaatttcgtaaaaaaatttgcaatccaatagggtcgcccgccccctttggtttttaattaaattttaaatcctccatttaaacagcgtaaaagtttcatgccaaaattcaaaattagcgcgtaatggtttaattttcagatttggcagttctcctagaattctgcggccagcagccagcagatgttgtgtcctggcgcgacttcgaggcttctgcggggtaattgttttagtaataaaacagtttcaccaatctcccccagggcttgatacggtttagaaattagtaattacagcatttaaaattacgaatatggaaaccatgtcttcatacttttgaaaacaaaaaaattcttcaaaaaaagggggcagccatcggcagtattaccaatttttgattttttttaaattggaaaacttaaaatgagcaatattttcttttttttctttgttgcgcctcactgtaataccgaaaattaattattttcaatttttaacgctgcgtttggtttagttctttcaacggctggtcaaaaattggcgagggggcatttggagaagtctttaaaggaccccttgatggtgtttgcattgtgctgaaggtgttttgttttaatgttttgcctctttttcaagtgtttttcaaggttatcccgttcgctgtcaacgaggatcagtgtttgaagctcgtcaatggagaccatctaaagccagcaaaatttgtcttcaacgaattgttcatcaccaacgagctttcaaagctatccgaggccggcaatgactttgtcacgccatcgttcacacaattgcgcatgagcaaggtcgtcaaaggtatgtttaatggagtgcagttaacaactaatttgggcttatgggtgttttattttcttaatggagatacatctaaaagcaaatgtttttaaaagaaagtttgtcaaaccgtgctaagctcatttttccgttaaggatgtcttccgtccaaattgctgaaagcatgggatgactttaagaaggcaaagcctgaattggtggagaacgaccggccagacatttacgcccatgaagatctccatttcgcaatcatcggcctttcctatgggggaaaagatctggagaagtatacggttaggtttcaagaaaagaaaaaaactaaaatgaagttttttcatagataaaaaatggccgcgaatgttactccattttccatcaagtcgccttgtccctagcgatcgcagaagacgttctcgaattcgagcaccgggatctgcacgccgggaacattctcgtggagcagtgcccggtcgatgaaaaaattcggtaagcagcaaaagcaaaacagtggaaaataatgtttttgttaaaggtacctttatcgaggagaacaaatcgatgtcgtctctaatggagtgcgcgcctcaattatcgacttttcgatttcgcacttggaaaaaaa

SEQ ID NO: 64419 - DNA, 677 bp, Heterodera glycines
gctttcgaatgataccaccatttcgtatagatttggttaacaaagaaaaaagttatagtccacctactggactggcgctgaaacgcgtgggtcccgttttaatgttgacattttttcaatttaaaaatgactgaattaattttttaccaaaaataaaatttgtttatttcattgtgtgataaaaaaaaaatttaaagaaatttataggatttttttctataaaaaattaatattttcatttattcgcagagcttgtcaatgtggaacagaagccgaaaaaaattccaatatggaggagggtgagaaaaagagaattttctcattcgaccgatatcacctaataatttttaaatttttttttttaattttcagaaggattctgaactcttttcaaggccttgcacctttttggaggacacccgcttttatttgctctccaagcggcaaccaatccccgccgcattacgccgcaatggacttacatcggttggaaattgaaaaaaaaaaattttaattttcataaatttattttgattatttcttaaataaacataatttttattaattttttaaattttatttttttttcacagaaagctattgatgccattgtgaaggatttgttcggcaaagcaaaaagtggtgaagcaaagtcgccctcccccatggaccataag

SEQ ID NO: 64420 - DNA, 154 bp, Heterodera glycines
atgggaagcaacggcaatccggaggaggatttaattaacttaacagacaaattaaagaaaaaactcgcaaagcatggagaagacgaagaagaagaagccaaactgaaacgaagaaaatcgaaaaaagggattttcgatagaacaattcaaaaag

SEQ ID NO: 64421 - DNA, 86 bp, Heterodera glycines
gaagataaacgatcaggaaagtatttgcggtgaaattgtggctcaagaaagtggcgaaaacactgcaaatcaacagaatcagactc

SEQ ID NO: 64422 - DNA, 68 bp, Heterodera glycines
gacataaacatttatttgatttattttaccatattcacaatttgatcaaaatataggtggtcaaaagt

SEQ ID NO: 64423 - DNA, 64 bp, Heterodera glycines
agttactggcgttagcatcatagcggtgcttttccttgtctttttgatgcccttgcaaaatctg

SEQ ID NO: 64424 - DNA, 173 bp, Heterodera glycines
atgaatagagatcgacattttgaaaaaaagcctggatctgtaccagggttctgtgttggatctggatctgatttcctggacaaaaatccaagtccaggaaatcaaggctcctcgaacctggattcaggcttggacctggattttttgaaatttgttttaaaaagccaaacaat

SEQ ID NO: 64425 - DNA, 85 bp, Heterodera glycines
atgcatgccaaattcgtgcaaattgttgccattgcatgccaatggccagaagcgacgttgaccgatttgaatattctcaaataca

SEQ ID NO: 64426 - DNA, 432 bp, Heterodera glycines
atggcccattcggccaagcagaaaatggtcaaacgcagcgcatacgcgaatttgggaccattttttgtggaattttatggaggaaaccatttcataaagcagttcatttggcaactttttcggggtcattttatgagtttgggtggtaatttaggagatgggcaaccaacttataacggcgatgaatgcacagccatattcttatctaataaatctaggcttaattatcggcaattcactttcttacctaatcgtggccggtttttggcgccagtgccctccaaaaaaaacttcgtatcccaaagtaattaaagatttggtttgcaacagtaatgtttaatccatttcagcaacatttaataatgtagaaggtcgaaccaaagagtctaatcaaaatcaaatagattaataatttctggcaccaatttacaa

SEQ ID NO: 64427 - DNA, 1017 bp, Heterodera glycines
atgctgttagtggttcgattcccattgcttacgtttgttttctatttattattatttcaaattgttttatttttgtttttttattttatttttttaattaagtttattaaaataaaaaataataacaaaattatttttaattcataaaagattatttatttttagttaaattttaaaaaatataatcaaataaaaataaaaaaatgtttaatttaatttagtttgttaaaatagaataattaatgcttttttaattctaaaagaataatttttttaaattaaattttaaaattaatttaatataaccaaataaaaataacaataaaaaaataaaaatacaaagcttaataatttaaagagaaaaattttttgcaataagagacaacagatccgttagtcaagtagttagttctgccttgctttgattctgtgctgtcgaggattcttaattccgggtgtcttccatcttttattacttttaaattattacgttttaagtattttatttttctattgtttatcaaaaaagattagttagatgaagagtgaaataatcagacccctcctgcgatccataaaatttttaacagagaatggaagagaaagaggaacaaaaagtggaaggaaaagagggaaaggaacagaaagagagagagaaagtggaaggaagagaaaagggaagagagacaggaactgaaagaggtacagaaagaggaagagaaagtggaaaagaaagtggaagagaaaatggaagaggaacaaaaagtagaagagaaaaaggcagagaacgagaaatgggaagagaaagaggaagatgaacagagaatggaagagaaagaggaacaaaaagtggaaggaaaagagggagatgaacagagaatggaagagaaagaggaacaaaaagtggaaggaaaagagggagaggacagcggagcggtagaagccgatgaagattttattttaaaggattttcatgatgagtgcaccgaggaatttattttaaaatcgagcaattaa

SEQ ID NO: 64428 - DNA, 667 bp, Heterodera glycines
atggcccattcggccaagcagaaaatggtcaaacgcagcgcatacgcgaatttgggaccattttttgtggaattttatggaggaaaccatttcataaagcagttcatttggcaactttttcggggtcattttatgagtttgggtggtaatttaggagatgggcaaccaacttataacggcgatgaatgcacagccatattcttatctaataaatctaggcttaattatcggcaattcattttcttatctaataaatctaggcttaattatcggcaattcattttcttatcaaataaatctaaccttaatttcgcatcgaaaagtaattaaagacacattttaataaaaaattcaacccagaaaacaaaaatgaaagccaaaaatatttggttatttaattgctggaattctttaaataagttccttggcgccactcatcattaaaaagtatttacttattttgatcaaaaattcaaatgtgcaaaaggacaaaggaataaaaattaattttaattaaaaaatagacgcatttctaacttatgttttatcattgttgatactgaaatggaaggacgcattgacaattgataacactgtatttttggttgaaagggaggaaaagcggattaaaagagagactgtcaagggatgcgcgataaatgcgtga

SEQ ID NO: 64429 - DNA, 876 bp, Heterodera glycines
atggaagagccaaaaagtgagggggaaaaaagtgatcagaaaattgaaaaagaaaatagtgatcagaaaattgaggaagaaaaaagcaagcagaaaatggaagagccaaaaagtgagggagaaaaaagtgatcagaaaatagaaaaagaaaatagtgatcagaaaattgaggaagaaaaaagcaagcagaaaatggaagagccaaaaagtgagggagaaaaaagtgatcagaaaatagaaaaagaaaaagttgatgagttaggaaattcagaaagtattgatgaaagtgttaataaaagtggagaagaagcatcaaatgttagccaaaaaacagaatatgacatacaaagtgaagaaatggacgaaaaatggaacaaaattgagagaaaaagaacagaaagccaaagaaaaaggcaaagccaaagacaaaagcaattaataagcgcaaaagtaatcaatgcaacactttcaggttaaatcagaaaaataattaagatcttaagttttttagaagatttagaattattacacaatttatgcaaattagtttttctaaatgaaaaatcctgaaaatatgtttttagtttgggttgaaaattcaggcgccatctttgtcgattttttcgtaatcatttaaaaaaaattctgtacaagtgcccttggcacttaaaaatcggaaaattttcagttaactgcttttagtgagagttctatagaatgataattattatttacgatatatttatgtaaaaaaaagtgtaaagcgaaatttaataattaatttatcatatataatatcagatttgtgtgaaaatgagccgcttgttcaaaaatataaaaatgaaattttgcataacatgcagccaaatgccatga

SEQ ID NO: 64430 - DNA, 726 bp, Heterodera glycines
atgccatcgaatgttcggcagagaatcgtcgtgttgtccttggcctggcactgtccaaaattcgttttccgctcatctctttttcggatttctccgaccatgttggtaggtcgtccgtcaacagatgcttcgtttttcaaatcattttaacaaaatgttttttttaaattcccattttttcagtgccttccggcgtgttgaccagtgacgagttggtcggcgttttcctgacccacgcccacgcggaccgtcgtgccaactccgagttgtaccccatccaatttcccacccaaaatcgcactccactcgttttaacggaggtcccggccgaggtggtcattccgccgatactcaattatgattatgttccttcgttgtcgttcaatggatggggcagcagccgccgcaggtacggtttaataattacataaattacattaaatcaatttaaaaaaagacgacggaaccgccgaaacaaatacactgtccgcgaactcgggttggatttcgaggtgccccaaatcagtgattgggctgcaccacccgttgatttggcaccgatactgcttaattactgatctgattgatcaaaaccaattcatatttattcattgtatgaaatttgcaaatttatttgcgtaaaaaacacgtacaccttttgacattgcataaaaacattacaatggaccattaatgatcgcttttttcaagttttcaaaaaataaa

SEQ ID NO: 64431 - DNA, 313 bp, Heterodera glycines
atggagaaggcctgcaaaatttggagagattatatcgatgttagtgcgctaggttcgatgaaactttttaaaatataagcctaaactttttggcctgtttaaaaaggaattaaaaatttttaaaaattttattcatctcccttttgatagaaaaagcatcagagagccttatttaactttaaattaacatttggtgcgtttcagagcagtttctgaaaaaatatttatgaattaattttgctaaaaaaataaaatagtgaagctttaaaaataataaaaattttaaattcagaatactggagtagcatcatag

SEQ ID NO: 64432 - DNA, 575 bp, Heterodera glycines
  unsure (1)..(575): unsure at all n locations
tgcaggtctacagggctatnagggaagctattcccgaaggattcggtctccccataaatctgggcgcatcggctcggggggactgccccgaaaacaaaaaaatcgattttttcaagtgtccgtttggggtactcaaacaattatggggagcaaaaatccaacgcagaattaaagtacaggctatagggaagctattcccgaaggattcggtctccccataaatctgggcgcatcggttcagggggactgccccgaaaacccaaaaaaaaatttttttggataaaaattatttaaatgaactgactagataatatttaaaataggttattactcttcctttcagtatccctgcaaagtttggtgcgcttctgatcagtttctgaaaaaaaagttaagcctaaactttttggcctgtttaaaaaggaattaaaaattttattcatctccctttttgatagaaaaagcatcagagtgcctaaactaacctgtaaataaagttttgtgtgtttcagagcactttctgaaaaaatacttatgaattaattttgcaaaaaataaataattaatgaaaaagt

SEQ ID NO: 64433 - DNA, 1759 bp, Heterodera glycines
atgagcggttctgcgctgtgcccgtgggccgttaatgatttagtccgtgacggctcagatcggacagcaaaagcgatgggatgcggcggcacaaatggggagcaaaatgtgcgcgactgtgtcaagcgcgcggaattggaggatttggtcagtccaatccattcaagcaaatagggacaatcccagggagggatagaaggggtacgtatccccattcccaaatgggtaaacaaaaaatccaaaaaattgagagccattttaattttaaaatcacacggcgtgacggcgctttctttttacagatggatgccatccaaaagttggatctgatccgactcgacttggccatgacgcggttcaacccccgggtggacggcgaatttgtgccctccgccaatctgtcgctgctcattcgtacggcaccgccgaaacccacaattatgggctttacaccgcacgaggcactctttcttagtaagtttttgcaactctttcaattctcatgatgtttcactcagaggggggaagagagtgtacaaatttggcattggcattttgtttatccaattcccccaccttttttaagccactcatagtcctaactctctgctgaccttcaattctgcattaaccgtgacaaatctgaacacatttgggcacgaacaactcgtcaaatttatccaaaaaatcatccattctgaacaaattggacgaaatgccaatggcagagaggttgagaagcgcaaaagggcaattgtggaaaaactgatcaaattctatgccgacgaaacgccgacgaacgacacaatgcattggttgaagcagtacactttggtaggtcagaagggaaggccgaaaattatcagaatagccaaaagaaacactggcaaaaggggggcaattagcaacggattaattaagggcaattaatgataattcgtttcaagtttctctgacccccttttcagttcctttccgacgtccttttcattatgccaattttggccgaagctcggctgaagtccgccctcggatggcccgtctttctgcaccaatttgaccatttgaacaaaggccatgccaaactgttgccgttccgcgccgtggcacacactggtgaaggagggcgaatgccgcctgttaattgcatccgaaatttgcagccgaatacgcattcactttgggcgtgccattgctgggcaatttcgaattggacgaggatgacagaagagtacgcgcagagatggtacatgcctacggcagttttgtgaagaatgggtaagtcaacatgctcattacacctttttggcatttgagatgccataaaatacgtccagctgctgtgtttcacaattccacccggcttttttcaaattccattcttttctaattgttagccatttataatcgcatttttaataattgatctcgtctctcaattagtgtgccaaatatgctcaacggcgaaagggattggcccccactcggcacggaccgtggtcagcccgtccgattggtgcacattaaacggccgaacaccgtggcagaaacagggccaatggacgtggcacaaaaggagacattttggcggaggctttccacgttgaaaggatacacagaagttgcgggtttccccaaggaaatggcacaattagcgacagaattttaatttttatttcatttttcaatgaatttttgtacattttgtttttaatttcggctagttttgtattctgggaccaaaataatgtccaataaa

SEQ ID NO: 64434 - DNA, 1285 bp, Heterodera glycines
atgcttcaacgtctatttgttggcaagaatttcacctgtctgccgttgttcacttctcatcgcagttatccgggctcaaatttcactttccccatagattggtatgaaaataagtatgtgttactgcaccaacgcgcccgtgaaaaagtttcgcccgattttcacaagcaggttattattatgttaatggagcattttaatttcctgattattcatcactgttgcttataattccaatcttccgccttcttaagaccaccggccttaacggcctttacgtgaatgaaaatccgcacaaagaccttcgcttgctttaccaccgcattttgcgcgtgattggaatgatcccggacagcagtcagtaccggatggccgtcgaagaaattgtcaagcatcgcctttcgcttgttgaagcggttactatataaaatgtcgtggaaacgtgtttacggaggtttttaggtcgctgatcacgaatctgacatccatttcaaccttttcgaatcccggacccaaatttgaacaaaaaataggaaattcaaattttggtaaatttatgaacaaaagtgcgaatcttcaaaattttgattttcgactttttgttcgaattcgggtccgaaactcgagataggtcaaaatgagtgtcagattattgtcagcgaccctgaaaaccctcgtaaacatgtttccacgacttttcagaacaaaacaaaattttcccaaaaagtatgggaggcaccatcgatagtaatccaaaattctaaattacagaactttgtctaaattggatttatttctcaattgttaagcgattgttggattgttttgatgtttcaggaacccgacattcaacaattggagcagaaaatcggcatgggtcagattgaagaagtagttcaacaggttgtatccaaatttctttgttttggtgacacgactctatcaaatgaattgttaatacgctctttcttaaggccgagtatgaattggagtgtattcgtctgtttgttgcacataaatgttgggaaccgctggtggaaaaagcggatgaggcgcaatggcggtggccaattggaccaggcccataagggaatcaaatgaccgtgaaaatttgacgccttagaacgctgtattttttctcgttacaattattttaacgaattcacgtggagaatataaacagtataattatgggatgttaattaggataaaaaaagaaaaattttgtcattttaatattatgagcaccttatgtatcaactcgtacagttcttctgggctgcca

SEQ ID NO: 64435 - DNA, 77 bp, Heterodera glycines
atgccagtggttgtgttgcgtggcgtcgatgacgcgtaccctccgcagaaaaaagcgtttgcaatgctccgctggat

SEQ ID NO: 64436 - DNA, 1019 bp, Heterodera glycines
atggccgtgggtgacacggagatccttacataattgttttttaagcataaaaaaatatttttttagtcggatgataaaaaaccaaaattaaaaaacattaattctcattaggtgctctttcccaattaatgatatgttgacaaaaaatctgcttacaatttgtgagcaaaactttcatgtgatttttgcatgagaatcccattttaataccaactgtttacgtcaaaataaaaaagccaaataaataattaacaaaaagtaaatatttaaataatattagatattggatgaaaaaaatatatatataaatcctttataattgacataaaattactttatttacccaccaactatgaaaaccatcttttttacatttattcttcttcttcttttgccaaattgctgcattgcaaaatcacttaacctttgcaccgtttatgacaaaatggaatcggaatatgaaataaaaattaatttaagtgcaattaaagtcagaggcaacgcagaatttaaagacacaaatttgcatcaaaatattcaaaacggagaatgtttgtggcgtttcggttccggacgacattgagacgaatttggttgaattcgtatttgacattggcattatgccattgcaaaacaatgtgtttaattcggagaaagggcaacaaagtgggaaaacaacgcgtgatgatgattacatttttgaagtaccaacagaccatgaccatggaaatgccatgaggagcagcagaacggtgccaattaccgtatacgaggcacacaaactgaacggaaagccaattgtgatcaatttgggcaaaattgatccatatggacagtttttgaatcggcgtttatttgttgagagaaaaaacgatttgggcagaaattaccacgcacttttgtatgcaattgcaacaaaaaatggtgaaacggaagaaaagaaagtttttgttggatttgcccaactggtgagggccaatggagaaacttccacttctgagcagcggcaggtgaattaa

SEQ ID NO: 64437 - DNA, 67 bp, Heterodera glycines
atggtaattaattctaaaatatctgaaaaagaatgcaactttttgggtagcgataaaccttttttaa

SEQ ID NO: 64438 - DNA, 845 bp, Heterodera glycines
atgcggcacgtgagcgtggaattgaccccgccgaatggacgtataagtgagttggcggcactaatgttttatgccaaattggcactaacgtttacaccaaaaatgaaattttgggagtctaaggaaacaatacaattctggtggagcagctcgttccaccccaattttccaaggaattcctcctctaatatattttttaatttcatacaattttccaaaaaaaattcggagggcgggggaaaaatgtcgacactcttgcaatgatatgcatagttgtaacggaatttaaacaaatttttctagaaacattgaggagatgcgcatacagttgtcaaaaactggcgtcaatttcgattggaatcgcgtgagtgccctcctttgtcactcgtccaattgtaccgaaactgcgatttctcccccctttcaattccaggagattttcacatgccgaccagattactttcgctggacccagtggatttttatccaactcttcaggcatggattcgtcaggaagacgctttccgaagtgaactgggacccagttgacggcactgtgttggccgatgaacaggtgacctaaagtgccgtacccagaagacccttattgcttcggcgaggggggggggcgagcgaccgttttttattgcgcttttcaaaaaaatttaaaaatagcttagtttttataggcaccgccggagaaagaaaattctgagaattttgacgaagtctttaaaattgtataattttaaaaaatccccattttttcccattcattttttcgttttcaatttctggttgcttcattctctaccaccgcaaattacaatttttttttcattaaa

SEQ ID NO: 64439 - DNA, 209 bp, Heterodera glycines
aaaaaagggggaggaaaaagagtgggaaagaaagtgtcgccgtcgtcgtctgtccgttttcttttccatccaagcaaacagatcacatatccacgaattaattcacaaaaacaaaaaaaagatgttcctccgcccctctagcgccagccaagccaagtcctcaccaactcacacagtaatcaggcatgcgcatacaatcgggtccactg

SEQ ID NO: 64440 - DNA, 542 bp, Heterodera glycines
atgcagaagttattctttccactagtgaatctttataaggataattgccttcaactgatgcacgaaaagctgaaaaatcaacaattggacacttgggcacaactaaaaaatgccattttgaaagaaaaagaagcgaggtaaaaatggggaaaataattattattaaaaaataataattttaagagagcaaaaaatgaatgaattaatgagccaaaaaacaaacaaaagtagcacaaagataatacaaaaactgtcaagaaaaagcatcaaaaaccattcgaagaaacaattggagacaaatttggaaaaagggagcgaatcgattgaaagtggccaattgccatcattttatggcaccgagcagaaaatgttgaggccgaaggaaagggtaaacaaaaatatatacaaagtattagatgtagaccaaaccctaattgttcagggaatcgactaccattacttctatcggtttgatgccaatgcgatcagttgccgccactgtccataccgccgaccggcgcaaaagaacttgaagccgacca

SEQ ID NO: 64441 - DNA, 1243 bp, Heterodera glycines
atgccgacagtatttaatcggtcgatacggtaagtgccaaattcaaatgcccaccgtttcccttccgcacaactcgcagtagcaccatagcaacctttttctgcttctgatcactttttgccgctgttttttctccatttactattacaaaaattcaaattttccaaaatctagtgatgttcgactgaatggcttcaattaaaaacacaaagcaaaaattccgagtttttctcaaattcattcgacatttatacagcgactcacaaattatatatacaatcagagagattccgaataaatccatccgccgcttttggccagcgattcgctctctgtgctgctgtcacatctgttgctgatcatttttctgaaaccaacctgaacttttttctgccaacttagcaacattttcacggcccttgtgccaactttggtctgaataccgcggctgttccacaaaaatttgttgtttttttccaaacttttgttattgctttatttgacattgtctgccatgaaatcagggcaacaaaaatcgatgtctaaacgaggggggagggggagggggttgccggtgaaggggaaaagaaggaaatttcagaaaagttggctatttttaaattaggtgcaaattgtatgagtagaaaaaacggacattggccacaggggtagtgatgtccgagagtctcggtctcgagtcccgaatcgagaaaagtctcgggtttttagcctcggtctcgggtttttaatctcggactcgattttcgagactcgagaccgagactgttttacacccctaatgattggcttttggtaaacttatatttttataaattttaggtcctattcaattttgttaacatatgtgtggtccagagggaggttggatcagttcccctccaagtagttattttttcttctcatttttcaaaaatattcttttttccgatgggaattcaatcacattttaacaattaaaatcgtaaaatattgtgtttttggactaaatctattaacaaaatgcactaaaattttaaaatttttcccttttcccaagagaaattttttttttaatttgaaaattgagtacactttgttacgaaaatagccaatattcaaaaatgtacccataaatttttgtattttcgttttgggggacgaattcgagtaaaatgtttaaaaatttcatttcacggggggatcttgaaatttctgtctaaaactctgggtttttttaaataaa

SEQ ID NO: 64442 - DNA, 1016 bp, Heterodera glycines
atgaacggctctaaatctgacgaaactcgtgcgaaaattactgccgatgtggttgagcaaaaaataaaggtggtggacaaggaaaaacaacaaataaatgaaaacttatattttgcaggaatttcaacaaaaaaaacggcggaagaaaatgtaaattgtattcgaatttaattgattatttataaattgaaggccgagctgaaacgtcaaccatttgccacagaacagcgagtgctcaaactggacgtgaggaaattgttcataaatttaaaaggagcgaaaaaaagaataatttcgacaattatgaagaatgggggttggtcccatcttctcttttcttattttgggacaaaaacatgactcttgggcttttcggggtcactgatcacaaagcgggcacccatttcgacccattccgaacccctgatacgaactcgcacaagaagtcgaaaactcaacttcgaatttcatatttggtctaaaaatagttaaaatggttttttgaagcaacgataactttcgctttcgtttctatatgggaccgacccccattcttcattgttcgtgattgcgcaccacaatttcgtctcccttttacagaaagaactctggacgaaattgaaagagttgagaaaggacaccaaattggccatggaacaacaaaagttggcaaacgaattgcgcatttccaagttggaagcagaattggaacgacaaaaattcgaattcaaggaacgactcatgaagatggaaatcgaacgcgtaagttttattttaatttatttaaataattatgagaaaattgaatctaacaattgttttaacatttaaaatgatgtgaattaagttgaatgaacgactcatgaagaccggtggtacggtagcctatccccccttttccaactattacactttgttttttaggtgaaaaaaatgatgattgggtgattgaatgaaaatttgtgggagtatttttttaaattaattaattttttcatcgttttttccttttatta

SEQ ID NO: 64443 - DNA, 1596 bp, Heterodera glycines
  unsure (1)..(1596): unsure at all n locations
atgaccaacagctcactgaaaaatgtgctcacatttgctaattttatggacgatctttttttggactacaaaaagaacgacaaaatgggttagttgagttcaaaagttaaccaagaaaattttgacgaagaaactttagtttatttttttaaaattgaaaataatttgctcaatttttataaaattcttcgtggattaatcaatctgaaatttagcaggctgaaatcccttacgttgacatattttcctgcaaaatttcaagcattctgaaaccaaaaaaagaatatttaaaaattaacgtgccaaaatccttgatttttagtgccaaaaaaccacagccctactgataaaataacagaaaattttctatttcgcagattgctcatattttgtagatatttactccttctttaatggttgtaaaaagaattttaaatcgatttaatttgatcttttgttccagcattgaatacggtaataaatttgacacaatttttcagattccgtcacaaatgaggcaccgtatcccagggacggatactgtgagaagcaaaagcggacagtgtttaatgtcacatttgttaaatgggccgccgaacttgcncatttccatggcaaaagcagtgaagaagaatatccgaattttaaattggtctctaaggaattattccgctatgaattcgttggatttgatggctttttctattttgaccaattgcttggccagcaaatcgccaacaaattcaaaaacgaatttttttctccccaaaatccgatggcaaacgttgtgaagaaccaaattttgcaacttaccttatcattggctgcgcgaattctcctctgtgtgatgttagtggtgaattataaatttatgaaaatgaatgaaataaaataatttttctgtataaatacgtaaattttgggaaaatatcaaatcgaaaaaattattgaaacatttatttgatttaaaatttgctattttctattaaatgattcggaaaataaatttatctttcgaattattataagcttaatttttagaatttttccatttcaaattattcaaattggagatggccagcatttgtggactcaatttttaagtccaactcaaaattgggtagaatacgatacggaacaacagcaatatattggtaaacttttgaatttttatcgaaaaattatatagcaaaatttgagtttttcaagagatggattcacagataaaaatgcataaattgaatttaacgaggattttgcaaaaatttaggcaattaactccacccccacaataaaaatgcataattatttttagacaattttaaatttatcctcaaactttctgagtttaaattgacatattatgaaatgtttaacgtggtcgacacaataatgaacagagaaaatgaaaaaaatggtcgaagtcagacatcaccagcaagagcactttacacatttataaagctgcattttgcttcattactaccgccaccatcattagcattatcattagcaaacggagcgctgcggaccaatcagccagggtcgggggcttttaggtttatgatttttaatgaaaacatcagaattaattaa

SEQ ID NO: 64444 - DNA, 1511 bp, Heterodera glycines
atgaacaaaatttccttgctaaaattggcgtccgaaatattcggaataaaatccgaacaagttgccaagacaaataaagacgattggaaaaaattccagcaactcgaaaatgaggtaaaaatcctggaggaacgaggtgcgcgaatatacagcaccatgaatggaaagcggaaaccgcatataaataataaaaattgggttttgtcaatggacaaaccagacgatgttatttttggaggaacaaaatcaataaaagaattgaatagccaaattttaaaaattgaaaaattaccatggtcccaagctggaccaggaatagtagttgatgggaaattttacccgttaatgagcttagaaattgggggcatcatcgaccaatttgacatatttaatgaattttggaaaggcatcgaaagggccaacaaaacaccaaaaaatccagaaaatttggaccaaaattccgaagaggaaaaaataaatatttctgaaaattcagtaaaaaaatctgtagaaaattcagaaacaatccaatttgaaattattggagaaacaaatgaaattgaatttgagactatgtgccaaatttttaaggaagagcgaaatgtccatggtaaggactccgtcaaaagaggcgacgggcttttgaatttgaaggtaaaagggtcacaaccccaagttagaaaaatgtcccttaagggaattattaaatggacaattttggcaattttcatcctttttggccatgtcaaaggcatggacaacaccaaaaaattggatgagagcatcatcgacgaattaagcgatgatggtgccattgaagaaaaggacgaaaaatcacagatgcacatgagcatcctcaattgcccgcctacaaccagcaatgcgcctcaaattcaagccgaaatcggcacactcatacaaacccaaataagcgcaatggccgaaaattggctgcgatcggcttttcagcaagggccaatgaatgaagcaacaaataaaaaaggaaatggcggacaaaaaatggggaaaaaaagggcatttcctttttcccaatcaacggcagaatcaggcgaaagttggaggaaagttggaaaaacgggcgcatcacaatggcagcgaacccatgaactgactaccgccgcagcagatgccgtcgaggctttggccgaacatcttcgcgactacaatgttgccgtgtccattctcctggtcacaattgccgccggacttgccgagatgaacaatcactacaagggcaacttcaaagggaacagaaagtgaattgtcggccgccggagtgtcgctaatttcatccttagcgacgaaaatttaaaattttatgattcatctgtttaaaataatttcacgccaaattcataacctttgtgattttaagcctttttattagtcagcattgtttacatttaaatttctgtcagcccgcctatgtaaaattgccgtatttaaaccattgcaaaatcaccattttttatcgttcaaatcgttcatta

SEQ ID NO: 64445 - DNA, 171 bp, Heterodera glycines
atgttctacgcaccttcaaagtttggcttttaccatgcttttattgcctccctttctgttattattgtttctgaacttggcgacaaaacatggtttatcgcagcggtatgtttccaaatgcaaaacatttaaaatctcaaaaattactaattttagccaaaaattcaataa

SEQ ID NO: 64446 - DNA, 77 bp, Heterodera glycines
atgggccaagctctaagtgaaccgatcacaaccaaaaacagcgcctcttgttccaatgatcgctattttgtcggcgg

SEQ ID NO: 64447 - DNA, 596 bp, Heterodera glycines
atgaaaaggagggttagcttctgatttatgcagtaaaaaagttccacaaatttttggttggacggcatttttcactgcaaaccggatcccaaacctttgttggccatttttggcaacaaaaagggggataaaagcttgcaccacaaatcgattgcagcgctgggccatcatacttttagggtacgacttcaacatcgaatacaaaagcacgtcagaatttggacatgccgatgttttgtaccgactgatcgcaaaaacgccacttccggacgatgaacgaattgtggcaagtattagcactgctggaagttttgtgctgaacgccatcgaaaaagggctcccgattgtcaatgaggatctgatcagagccgctgatcaggatcagacaattcagaaggtcaaaaagttcgtcaaaactcaatggcccaacaacccccccggaaaatgacccgaagagcaaaaaaaaaagtcttcggattccccgctccgaaattttttctggctacgggcttgcggtcaactggaaaaaataagcactggtaagaataggggtttgagtgaaaattagtgaaggaaattgatgaaaatttaataaa

SEQ ID NO: 64448 - DNA, 238 bp, Heterodera glycines
actttagaagaagaaaaaagtatgggaaggcacaaccaccaggccaccgacgctcacattggctttacattctttgaaaatgatattgaaaaggcaaaaaggaaaagcttcatatctcggccagaagcttcatttagcaaaaataaaaaaaaaatttataatacaaagggggggggtaatctacctaccctgaaagtttcattcggaagtcccatggtcacttgggtacctctccttt

SEQ ID NO: 64449 - DNA, 304 bp, Heterodera glycines; identical to SEQ ID NO: 53844

SEQ ID NO: 64450 - DNA, 277 bp, Heterodera glycines
tttgaaaattttcattaatttattagctttaacttttgggttttattaaataaaaacctaaataaaaatttaattatttaatattttcacttgaaataaattaaaatttgattttttttttaattttttgaatttttagaaattcccgattggtcccggttcccggtcccggtcccgaacaaaaatcgaggtcccggtcccggtcccggcttctcaggtcccggcaagtcccggtcccggttttgcccaaaattcccggtcccgctctactctagtt

SEQ ID NO: 64451 - DNA, 80 bp, Heterodera glycines
gtcctgcccataatatctgttgcatggaataaattttggaactgcgctgcctaacggcggtgcttaaagtgcgctaaaaa

SEQ ID NO: 64452 - DNA, 387 bp, Heterodera glycines; identical to SEQ ID NO: 52041

SEQ ID NO: 64453 - DNA, 453 bp, Heterodera glycines
atggcctcctattggcgtctgaaaagcattgaggagtacgagttggaaatgtccacgaaaagcaaagagacacgtcgctatgtgttcaactgtttggacgacattggccaagtgcaccttccgtccgacttggacgacatcgaccgaatgtgcgagcggagtgaccggcttgaatttgtcgacattctgaagcaaatgctgagcatggaccaggtacagcttgaactccttattggactcaaacattgaccatcacaattctcaacctttttaatttaaggaccgtcgtctgacaccgacccgcgggttgcaacacaaatttgtaaaaatgacgcatatgatcgagatggggcgcactaaatactgccaggtaatgaacggttaattgtaggcaacatttgcaatttagtcacataatttggtatgaatgtgttttctcccatcttgacatga

SEQ ID NO: 64454 - DNA, 99 bp, Heterodera glycines
agattccaaccattttatcataaataatagaattaactttaaattcatccgacttttgaatatgcgcatttttggtgggcgttaaacggggtaattgac

SEQ ID NO: 64455 - DNA, 1738 bp, Heterodera glycines
atgttcacaattagaaagacatctcttctccgtctgtgcctttttgcttctttaatcactcatccgttttctgttctttctgacccaacagccgatgccatcgacggcatttcggtggcagaaatgcgtggatttctcaaacgggagcatactttcgtaaagccatatcaatgtaagttttttttcgtcattgatacctttctaattggcggatggctaaaaaaaatatgttaaaatacagtatatttttcttttttccagatgctgatagtgaccttcccttctgggacattattggcaatgccattttaactccgcagtatatccgtcttacatccgatttgcagagtctcagtggtggattgtggaataaaatggcatgttctatcttcagtaaaaataaaaaatattcttaaaattagcccaacaccgcgcgagactgggaatttatagtgagtttccgagtgcacggatcgactggctctttgttcggaggtgcgattgctgtcctttcttttaatgtttgtattttcagatggaatggccatttggtatgttcaagacccggatacgcttggccctgttttcggctccaaagattatttccgaggacttggcattttcattgacacttacagcaatcacaacggacctcatcaagtaaaactcgtgaaatcagaagcaaaatattttaactaattgagcattcgcatccgtacatttcggccatggtttccaatggctcgcttcattatgaccatgacgtggatggaactcacacgcaattgggcggagaacacaatggtaaaactggctattacactttgaattgtttgtttttgctgattaggttgtgaagcaaagattcggaacaaagaccacgacacgcaagtgttggtccgttacgtggcggacactctttcggtaatggaccatattttgtccttttgttgctaaatcctctggctagtccatcccaacattgtttacaaaaggtgttcacagacattactggggattcgcaatggcatcgctgtttcactgttgaccatgttattttgcccacaaattactatttcggaattacagcagctactggagaactttcaggtaagaaacggtggcgcttgataaaaaaactcgcctttttaatttttgttaaaaaccaaaaggtgtacgcttttagtttgcaaaattgttctgtcataataaatcttgaaaagtccttcccgtggaattttcggggtcgttagtcacgaacatgatattattttgtcaaatcgctaacccggattaaaaaataagttgaattcaaatttttcgattttatttttttgttcggcatccgaaattggttgaaacagatgtcagattcttgattagtgacctggaaaatccacgggaaggaataattttcacggttaaaatactttaccaaacaatttgccaaccaaaagggtctccctttggttttaataaaattaaaattcacaactagcgccgaagcagtcaaaatgtttgttacttaatacatacaaaaatagacattttttatcaataggacaaaaaacgaaagttcacctttgagatagatttaggtaactgggaaaaatgctcgtctcctttagataatcatgacgtattgagcatccgaatgtttgagcaagagttcgcccgagtggagaagccatttgagagtgccaaccgtgactcggtggaacccttcgcagaaaagtaa

SEQ ID NO: 64456 - DNA, 629 bp, Heterodera glycines
atggccaaactgcgcaacttgtgctggtcggtttcagcaatgaccacaaattggtgccgaaggaaacggcggtgggttcagtggcaaatgagcaaagcaaaagacaaattggcacaatttagccaaaattggcggatttgtggattgatcaattaaataccagaccaggcattatacagatgcccaaaaaacccagaagataggtccaaatacagatcagtagtgttttttacaatctgtgcctcgttaattggtcattaattaatctttcagtggttcggtttctacaccgacaacgacacacaaacgatagtgccaatggagcagactgaactttacaagcaggtcattcactcatcactcactcaccgatcaatgaatcaatcggaatatgaaacacaattaaaccgatcaaaaactgatcagaaaagcattgatttactttttaggatcgcattggactgaaaacgctgaacgagtcgaaccgtctccattttctgactttcaacggcgaacatctccaaatacccaccgatgtatgcgtatgagggggtttttagaaggaaaacaaaatacgaaaatgaaacacgaaaccaattaaaaatacaaaaagaaagaaaatacataaa

SEQ ID NO: 64457 - DNA, 145 bp, Heterodera glycines
atggtgatgctaacagtgctaaaaaaggcaaggagaaaggagcaagaaatgcgagtgctcattctcggcctggacaactcgggcaaaacgacttttttgaagagaatcagtggagaagaaattggtgaaatcgcaccaacctttg

SEQ ID NO: 64458 - DNA, 659 bp, Heterodera glycines
aaaaataaatcgatttttttcaagtgtccgttttggggtactcaaacaatttatggggagcaaaaatccaacgcagaattaaagtacaggctatagggaagctattcccgaaggattcggtctccccataaatctgggcgcatcggttcggggggactgccccgaaaacaaaaataaatcgattttttcaagtgtccgtttggggtactcaaacaattatggggagcaaaaatccaacgcagaattaaagtacaggctatagtgaagctattccggaaggattcggtctccccataaatctgggcgcatcggttcagggggactgccccgaaaacccaaaaaaaaattttttggataaaaattatttaaatgaactgactagataatatttaaaataggttatttctcttcctttcagtatccctgcaaagtttggtgcgcttctgatcagtttctgaaaaaaaagttaagcctaaactttttggcctgtttaaaaaggaattaaaaatttttaaaaattttattcatctccctttttgatagaaaaagcatcagagtgcctaaactaacatgtaaataaaatttggtgcgtttcagaaccctttctgaaaaaatatttaagaattaattttgcaaaaaataaataaaaacgaaagact

SEQ ID NO: 64459 - DNA, 1013 bp, Heterodera glycines
atggaagaaacaatttggcattcgatatatgagaataacggagaaagaaaaaatgaaaatttattggcaaataaaaaaagaaaaaccaaaagtgagtgataatgaaattgctaaaattgtgaacacttcaaatgcgaatatttgtaattggaagaaacaatttggagaagaaatgtttgagaattgaaaacggatgattttttaagaaaattagtgacaaagaaattgctaaaacattgaaaattcgtcaaaatagcctccgaaaatggaagaaacagtttggaagagaagaaaaataagaaaaaatatttgaaaattgattagaggaagaaaagtttagaaattttttgaaaaatattagatttttcattaaatctgaatccaatttgtaaatcgcattaatttgctgattattattttagtgatcgtcgtcaaagttttataaaatcagttccttcatctatgggagacaacattgagcaatgagtcgatcaggttgcttgatcagtcagtccttaacaccatgggaaattttctttcgactgagaataactgaaaacgataaagtatttgcaataagaaagttggttgagggagaaaattttcaatttttttgaaaaatattaggcatttcttaaaatccgaacagaatttgttaatttaataattgttagctaatcaaaatataatgtgaaacctgaaaaagtgtgacaagtaaagtctaaaaatattgaaagtttatcgacagggattgtgactggacaattcgacagtggacaatccgacagaggtggacaatcggacagagatggacaattggacaatggacaatccgaaagagatggacaatcggacagagatggacaattggacaatggacaatccaacagagatggacaatcggacagaggcggaccaatcggacagagatggacaattggacaatggaccaatccgacagagatggacaatcggacagagatggacaattggacaatggacaattcggacag

SEQ ID NO: 64460 - DNA, 1015 bp, Heterodera glycines
atgcgcgcgaaatttgcgacgattgaaacggggaaaaaggaaacaatgacattttttaagttaggtgaaatttagacaaaaaaaattaaaaataaaaagccagactgttcatgaagtagcaccatttatggttggccttgtttctaagaattgtgtgtatttattttaagtaactcggagaaatttcattttgttaatttttataacaaaatttcgtaaatattttttcaaaaattcgtattttttacaaaaattacaataaaaaaaattaacaatttacctgccattactgctggtgatcaatttttgatcatttctctgttcattggaggcatcgatcactttttggtttcttttattatttatttctttaactttaatggagaaagctttttgaaataggcaatttttaacaaattaatcaacctctgctcctaaggctttttttcctccgattaaatggcattttaaaaatgttgacaagccaaaattccgttcggcatattcccagaattaaatggggaaaattaattctcgaatgaaaaaccacctgctgctaagaatgtgtgtgcgctgctgcactatttgtttgacaggtgccaaattaaaacgaaaatattttttaattaatttttaaagcggtaaaaatgattaatgggaaaaattgtcaattttgaattccgattatggaacaacatctgtcgtaaattatacaatatttatttgtttaattcgaatagtcttaaagcaaaactcaaaaccattgccaaattctgatcagaaatggctcgaggaaaaatgatcagacttttgtattccaagatatgacggcttgaaagattccggatcaagacgggatgttagaattcgaaccggactggatttctgggttaaaaatcctgttttcaggactcctggtccgagccaactttcaaaaacatactcggatcggaatcaggaatccggaaaaaccctgacaagacccggtcttgtttcggcctcaagacgacaatga

SEQ ID NO: 64461 - DNA, 3147 bp, Heterodera glycines
atgccaaagatggacgagaagggcaattattggaaaatctgtacagtaagtgaatgggtaattaattaatgattgctaatttgtaagcaaaaatgtgaatactgtaaatgaccgaatgatgacggaagttaattaataattattatgataataaatttggggaaaaagtgagtaaaattttaaaaatgcaaaaagtttaataattttttaagtgcgcttttacgtcaaatttttgctgttttcatgtaaaagtgctttttgtttttgtttttctaagttttgttttaaagtgcgtcagaattggcatttcaaaaaattgaactgaaaaaaattgcttaactttttgtggaaagaatatcaaaatagaaagcataatccgaatggataaaagctgcattaaaactgcaaaaagtgggcttcttaaattatgctcaaaatgcactgaaaatggaaaatatgtgtagtttggactgaaaaaaataataataaacaagttatggatggtatcatagcaaaaacatagcaaaataaaaataaaaatctaaaacctaaaaagtaataaaaattatatatttttttatttttttataaaatttttaaattattcattttaaactttttgaaaaaaaaattctataaaatgcttaattttttttaattttatcatcaaaaatcattagatttatttttataaggtttccttctacgttatgccattaatttcaaatatttaaaacctgatcaacgaaattaaatttaaatcaaaatttgaaaaaaaattctctttgtccccttataaataaaaatatttgttttaatagaaacaaaaatatttctttaaaatatgcaaaagacaaacaaaaattatgatgaatatgtaaatttttgttagcagtgaaggaataatgaccaccaaaaaatttaaataataaatatgcaaaaataatgagacaataaaatactaaataaaaataataataataataataattatacattttctgtttatttgatccggacagtggccaattcggaggacgaacaaaggcttaatctgttggccaaacaaatatataacaaataatcggcactgattttatgcctattgtctcccattatttttgttattatttatttcttttgtgggttacagtagctaagcgggggcactctgttgtttatttgaacaaatttggcggcgagtcataatgccaaaagtcacaaaactatttttgttatgtgaaaataggcaaaaaaaaaattggggcagatgagaaaacaattacaaagcttaggtatgttataaaaagtgtgataattcctctgctgacagcagcagagaacgcattgtttaataaaaaaaaataaatttattacaaattatttaattaattattaaatagaattaattttataaaaaatagttttatttaattatttatttagttactaatttggaataattgtttttattaattttattttttatattatttaaatttttataaaattacttttatcaattaattttaaagaatttttattcttttatcattagccttataaattagtttctaagcttgttttatttatttacattcataagttcaaaaagatatttttttaattggcaatttaaaaaatttaaatttttgctttaaattggcaaaatgttccgctgtcccttcctcctcattgtcctcaatttggccattgcgctcctctgttttttgctgcgccttttgccctcaacttcggcacaacgcctggaccgctgtttcgacggcacaaattttgtcccaagtgggttaaacggaggtcaagattatcggtatcatttcaatataacatttcatggcacgtttaatccccagaaatattttcctaaaaaattatgaatattgatgaatatcttttgaatttatggcttctattccagaatatattcttaatatggaataacggtaattacaatatgacatgtaaaagacgaaattatattactagggggatacggtagattcggtttttggcgctatttgaataagtagaatgttttaaaatttcaaatttttctaacttaaaagtcacgaaaacgacaatttatctgtgtctgtgaatatgctacgattaagcgatttcctaacctcctaacagtatcccgcacatatggagttacggtagtgtgtgggatggattacggtggcagcgccgtatttctttcgtccaggcgctcagagctgcacggacgaggccgacccgttgaccacccagagtcccaccgtcactgcaatgccaatttgtgaagcattttttgataccgaaccgaccgcaacggatgtgacggctgacacgcacccttgctatatgccgggtaaaatttccgaattttaatttttggtttttgaatatttttttagacaataagccaatggccagcaaatgccgacgccgatgcaaaacttgctgcttgttgccaaaatatggcagctgtgaaggtacaacaaaatgccttcttatacatacgcggcacagtagggatgcttgagagcgagcattttccgaggctcgaaaataccgagacttttctcgagtcgagaccgatacgctccagcatcactactgcacaatagtcctattggtttgattattaatgttcgttgatcgaaaatttcccgtgactctcgagcatcactcactactaatgatgcctatttaactaattataagctctttttagctaatgatagaaatcaacattgaatataatgcaataatttcaaaaaatgaagaaaatccctcagatggcacaacctcttccaatctcctggattagtatgtaatcgcaattttttgtgccattttttaagaccaacagtcggcacaggcgaccactccccaagtgccgtgcaatccgtccctttgttcggtggagaaatttgcggtcaaagtgtgcccgcgcacgtgcggacgatgcgtggactatttgcgcagcatggagcaaaccaaatattgcgacgatacggagaatgttgacaactgtatggtgctgaaggtggccgggggaatgaggacgaatttgaaaatagtggcaatggcatttagccaaaaaaaaaactcaaaatttgaatgctggcaatgacaata

SEQ ID NO: 64462 - DNA, 315 bp, Heterodera glycines
atgtttcaaaaggaagcgacggaaaatgcaaatggcaaaattggtgcaaaaagtagggaaaaatatatttttgaaaaacaaacaatctttaaagaattcgtcaaaatgaaaaatgcaattttaattcactttaatttttaaaataattttagcttctgctgaaaaggatggccctgtgctgctcactgacgtcgatgctgaagcgtttaaagtgatgttgcgcttcatttattcggatgatttgagcgaattgaatgggcaaaacgcaaccgaagtgctttatgcgggtgaataattaaatttaatttggtttaa

SEQ ID NO: 64463 - DNA, 972 bp, Heterodera glycines
acgattttcatgagcatcgatgcaacagagaatgttatgcatagaataataattaaaaacagtagtgacagcaataagaaaattcaaaaattttattcaataaagaaattattttaaaaaatgataaaattgataatagtttgaaaataaagatgttaaattgagttattttagagatttttattaaggcaaaaagtctagaaccttcaaaattagaactttcagcctaaaagcaaaaatagatattacaataataagtttttcaaatgatccaataaaaaatattattttcttaccaattaccatattttaatggatttttaaaaataaattttgaagaaaaataattttatttttttattctatttgtgaaaaattcttttttgaattcaaataaataagaagatgagaaaaaaattggtatttaataattttccagaataagatttcgagaaaacataataacatcgaaatccagggaccatgacatgtacgggcttcgtccagcacatcgcttctttcaacagcacccagcagtgaacgactgtttggccaatctgttggccagtggccgtattacaattaccgtatgaaattaattataatattattattaataataataaaaatagaaatatttaataggacgacatttccaccattggcgaacactcaatttgtgtaaaagatggacgtgaattcagtgcagatgtgatcattttgtgcaccggatacaatttcggatttccattcattaggccggcagaattaattcccatcagagtaaacattttaatagagttttaatgctgaaaatatgaataatattgctccggggcttcgggtataacaactccgcctagttgtccaaattgaatgcaatttgatatcattcaatagcactaaatattctaaattagcttgaaaaattagaaaagcgtttaaacagtttttgaacttacattttttggt

SEQ ID NO: 64464 - DNA, 427 bp, Heterodera glycines
cgtctctgaagcagcggctgagcgacgcgggcgtggactttaaggaggacttggagaaactgagggagctgaagattctggtcgattttgacgagcagggctatttgctccaaatattttcaaaggtaaatttatgaaaggggaaaacccgaaaatgaataatgaagcctaactgatcaattagttgattaattaagccatgccaagaccgccccacccttttcctggaaatcatccaacggcacaaccaccaggcaagtgggcacaatgccaatgtcgtcggcgttaggttgccaatgccaaaatgaccaattccccccagggctttggcgccggcaacttcaaagcgttattcgaaagcatcgaggcggaacagaacgaacgtggcaatttgttctacaaagacgtggcggtgggaggagaaaaa

SEQ ID NO: 64465 - DNA, 773 bp, Heterodera glycines
atggccgagggaaaacactcagtcaacgacaaaaacggcacttccgttttgcagaaaagcgacactcgcaccgattgcatcgatttgcgatgtgacggtcccatcgatcagtgcacggaaatgctagcgggaaaggtaaatgggaaatgaactgttagaaagcgttttaatgaatgttgtttttctttacagatatttgacctttccttttggaacggtgccgaacaatttttggctcaacccgcccctttggggggttacgaaatgtaatttttgctcttttggctgctaatgacgaaaattcagagttcggaatgcgctttctcagcacattcgccacctgctgggcgagtccgtcccctccgatcaacttttgctcgtgccaaatgcgtccgtcgctttggagctgttcgtccgctgctgctgttcacccggcggtgatttcctttggctggcttttcttcaccctcccacagatgtcgtcctttgtccaattccctttgccgatgaattcctgtcggaggaattccgttcaaattcctccattgactttgttacggtcaatttcccggtacattttggcccttctactgatcagaggcgcttcctatgatttccagtggaattcgtctcttttgaactgtgccgaattacaacagacaacggaagggctggggaaggtgggccgtgtcattggtccgttggctgatcagccgaatcagaggacgaaaatcattgaaaggaggcggaacaaaatgagagaaactctttaa

SEQ ID NO: 64466 - DNA, 996 bp, Heterodera glycines; identical to SEQ ID NO: 34751

SEQ ID NO: 64467 - DNA, 350 bp, Heterodera glycines
atggcgtgcacaacggagagcaacggaatcagctacagcatgttcaagactgcctattgcctctatgtcttccaaatgaccaacgcgcaggaggactcgccaggatttgagctgatcaaagagggctgtactgcagtgaacatccgattcactgaagcagtacccaacgagggagttacattgattgcgtacggagaggcagacgggctcattcttattgatcgtaaccgttagatcactagtgacctcacagtatgagtcagaattattcctctgaaaacattctgatggacacgcctccgagggacgggatagtgatgtgctttcccgatgttatcgagaagtcgcca

SEQ ID NO: 64468 - DNA, 572 bp, Heterodera glycines
atgaccgtcacatccaacaccgaattccgactcatcgaatgtgtgccaatccttgaggaagttgctcgtgaatttggctgtattacgccactaccaaaccttgggtatgtttctttcgttttacaacactaactccagcatacagtagccatcgtgactatcgtgtaagcggatgtatgatgattcgcacgctgacatcgttgaatcgactctacattttcgatgctgaagactgtattgaggttaatggaaaatatgtttcatattttattgctattttaggtgaagggtttcttaaggcaagaggacggcacgagccaaaaagtggtcaacgaatattatgaaaaatatgatggactaaatggatttgctgaatttattcggaattgggcctttacttttttctgtttccatgcctttgatgatgatgacacatctgatgaagactaatttcgttaatatttattctatgctctttgttacaaaccgataaacaaatccatcagggttatttgaacgattcaaaatttgcataatattttcgaaacccaatccgacggacataaaataaa

SEQ ID NO: 64469 - DNA, 327 bp, Heterodera glycines
atggacgaagaactgaacaaaaaggaggagccgttcactctcgccgaatgttgcacagcatttgatctggttgcggttatgttcgactgcaaaattccggtgccgtacgaggaggagcagaagcgttacgttttcgagcaccaggacaagccgcgtttcatctacatcagcgaagaaggagaccaaattgagttcaagggaattgtcaagcagtttggatacgtcctaagcgttgagactatctacttcgacaaagaaaagggaattgatgaattctataacttcctccgtaacaatgtcatgtgtttcttcagtgttgattcataa

SEQ ID NO: 64470 - DNA, 1230 bp, Heterodera glycines
atggccgactttgccgcagtttctgtccaaattgatgccgtcctgctgtcggcactcattgagcgaccgttgcgcaccgaactcccgcacatttgccacttgtcggacgtcggcgcaatgtttccgaacatcattctgaccaacctcatcgaggaggtgtgcatggcgtgcattcacaacgtgccggaagcgaagtgcaaatgcccgctgcagtgggtgtggcgaggcgaaattggtcagtctcatcaattagcgcgctaattacccccataaataagtgcactcagtcgcttaacagtgggcgtcagccgaggcggtccggaggggagggggggggagtatttggatggcatttgaggggcatactgtagtcatgggctaattgtaagtttatcctttttttaattttaaatgatgccctcaaaatgaatgtgtacatttgcaggattttgtcggaatgcgttcaaacggttgcatgacacggaagaagttcagcagcagcggcggatgaccgccaccaccaccatttgccatcgcaaaaacccttctctttacgtggacactgatgagcccacatttcgctacaaatacaaacaaatgcggcggaaggtgtgctgcagcgggtggaaaaaaaattattgggaaaatttaaagaattttggcacaccattccaatcactgtttggagttactatagtctaccacccacaaaaaaaatgaataaaattgatgccattcgttctctcatggcctgtaatgctaaggaaaaatactcctgaggtgcggaaatggcaaaaaaaaaatggtttttgaaccggtttaaaattcggaaaattgaacaaaatggagcacttctataaaatggtcaaaaccggacaaatttggtatcattcgacagctattgatgagtaacgtttaaaaatgggtcggggtcggtttagtacgagcgcaagtttttggctataacttttttctttgccaacaaaatccaacatttttagtatcgttcgatagccctaagtgtcctctattaatctgaaaaattgcgaaaaattttgttaagcttcaagaaagttatggtcagaaaaattcaaaaaaccagattttcaaacttttttggctcaaactttttttaaacttaacaaaattttttgaaattttgcaggctaatagagcatccgaagggctctcgaatgatatcaagaaagttggatttggataacaaataaa

SEQ ID NO: 64471 - DNA, 219 bp, Heterodera glycines
  unsure (1)..(219): unsure at all n locations
aaaaaataggaaattttgatcatttataaactgtttttcactgaaaattagccaatttataggtaaaattttgaaaaattttatgggaatntaatccaattcttaggggtgtaaaagtcgcatttcgcgccaaaaagcgaaatgcgaaatgcgaaacgccaaaaaatgcgaataatgcgaaaggcgaaatgcgaaaagcgaaacctaggcacatccctg

SEQ ID NO: 64472 - DNA, 77 bp, Heterodera glycines; identical to SEQ ID NO: 58904

SEQ ID NO: 64473 - DNA, 670 bp, Heterodera glycines
atgttgcactttccattaaattttttccagccaaagactgtttcgccgccgaaattcaaaccgattggcgaactgtcggactatcaacagcaaatcaacggatcgaaaggcatgcagggtttgtctattccttttactacttgtgtactatttttcttgaatttcagaattttcaaacattcgattggccactcctccgcctcaaccgtcgccaatgcttcacaatgttccgttacctccagcgatcagtgtcaacgatatgatggtggaccgcaattacattgcaaaggtgcgttgccacttttattaatgtttatattagtaaatgtctcatttttcgcttttcggacacacaaattttcactcgctatccattaaaggggatacgaattacagaggagcgggatggttggcagggttagacgcaatcgcgttatggattacagaaattacgaaaacccagtcacgttgagccctgttgtacccgttgcacatgtttcattcggtttcaaaaccctattccgtttcatttctctgatttcattagtccgaccattttaaacaattttgtattccaattttttccaacgttctcagggagtctcttcgccgaagttcaaaccgattggcgaactgtcggattaccagcaacaaatcaatggatcgcaag

SEQ ID NO: 64474 - DNA, 418 bp, Heterodera glycines; identical to SEQ ID NO: 53014

SEQ ID NO: 64475 - DNA, 935 bp, Heterodera glycines
aaaaagctcgtagtggatctgtgctagcgtccggtgcacactttgtgtgttactggttggttggctttctgccggtctttccccggcgttggctttaccggtcggcgtcggtgggctggcgagtttactttgaacaaatcagagtgcttcaaacaggcgtttcgcttgaatgttcgtgcatggaataatagaagaggatttcggtccgattttattggttttgctgaccgagataatggttaacagagacaaacggggccattcgtattgctacgtgagaggtgaaattcttggaccgtagcaagacggactacagcgaaagcatttggcaagaatgtcttcattaatcaagaacgaaagtcagaggttcgaaggcgatcagataccgccctagttctgaccgtaaacgatgccaactagcgatccgccggcggatttattcgccctggtggggagcttcccggaaacgaaagtcttccggttccgggggaagtatggttgcaaagctgaaacttaaaggaattgacggaagggcaccaccaggagtggagcctgcggcttaatttgactcaacacggggaaactcacccggcccggacaccgtaaggattgacagattgatagctttttcatgattcggtggatggtggtgcatggccgttcttagttcgtggagcgatttgtctggtttattccgataacgagcgagactctagcctactaaatagttggctcattgcttctgtgggcacaacttcttagagggattttcggtgttcagccgcacgaaattgagcaataacaggtctgtgatgcccttagatgtccggggctgcacgcgcgctacactggcaaaatcagcgtgcttgtccttccccgaaaggggttggtaaaccggtgaaaatttgccgtgattgggatcggacattgcaatt

SEQ ID NO: 64476 - DNA, 3771 bp, Heterodera glycines
atgaaaatagcattggggaaggaggagagacggaagagaaagagaggaaaaggaaaaattcgaagcaaggagggggagaaagaggaggaaaaggatgaaaatagcattggggaaggaggagagacggaagagaaagagaggaaaaggaaaaattcgacggaaggaggaggagagaatgaagctgaaaagagagagtaacagcagcaaatcgacactttttaattttgccggtcctaataatgctaatggatgtcgtaaatccccgtcaaaatcctgaaaactacacaattttcgaaagaaaaatgcattcattcgattacataggcaaaaaatttatgttgtggcgtgggttttgcaggagcacagcttgttccccaaatcccattaacgatttaaaaaaatcattaaatttctcagggaatttccggcaaatttcaaacaatttattacaaatagagattcttagaccccctaagaatcggtcggggccgttttcgcgtgagtagctgtttaggactgaaattggtcggatttgtgcaaaacatccatgtttcgaatccgaacccgcattcggacaaatttcttaactttttaatttttttatttcttgcggctaatatcttctacagtaatttgtcagtttggtcggatgtgcgtcaaacggaaaaaataattaaaattttataaaaatataacaaaaatcaaagaatttattcaaaaaaagaggtgttcctaaacatatgaccatgacttcttcaaaagaattgaacaaaaaaaagttttgcctatttcactttacgaggatttttttccaaaaaataaccatttgaaaaatttttatttacatattggggtttttgtacatattttgggatattttagttaaaaaatgacaattctagaataaaatctgataaaaacttgtgctgctccatttttcctaggtcaatgacttcttttaaagaatttttttaatagcctcaaacaacaacaaaaaattgactctaatttttaaaattaaaaaaattaacggtagttttaatatttgccaaaaattgcgcaaaattttccaacagttgcagcctctattgtccgtcccatgtaaagcacttttaaagtggcatagattttaccggtgctagggcgttccacaaaaaagctcagtgtgggcgttccacaaaaactcagtgatcgataaaattaaataaataaatttaattattcaattcacaaaacacggtgccgtccggttaacactaatgtacggcgggacgcgtcatttcaaattttttaatttttcaatttttgacatcacttctcgccaattttctccatttgtagtaggcatagcctgacgccattgtactttttttttaatttattatataataaagtttttatttttatctcatttttgccgttttcccaactctttcgcctgcagcagtttgtgcctgtctttttgggtcatacattattcagtttatactttcgaatgataccaaaaaggtagggtttatcgaacatgaacaaagttattgtataaaaacccgggattgacaattgattggactcataaaggtcgattggactcataaactgcactagagcaaaatccgttccctaatcatgacacataaacaaaaagatacaaaaacattcatcaatcccttttcatgtctataaaaatgtttgttttttcactttgtctcgcatttgaaaaaaaaataaaaatttctaacgcaattaattattctgctctttgttgtgtgatatcattcggaactcggccaaaattgtgttaattgccacaaaaatgaaccgacggtaagcaatttgaaaagtcacacaaattcatcattagggatcggattcttagttttttaactattttttctgcggctttaactcgacgagaaatgcacgaaaaacacattctttttcgaaaatttttcatttttagtgccactattcatcactaggaatcactattttggagcttcgccactaaaaaaaactatttcggaagttagccactaaaataattttttgccactattttggcgtttcgtcattatttttgccactattttggcattttttggaaaatttcccaaaaaatgcaataaaaacgaaaaatacaccccaagaatcgacctaaaaatttttcaaaaatacacccctaagaatcgacctaaaaattttcaaaaatacatccctaagaattggaaaaatttcacaaaaattcttcccccaaatttttttttcttgttcaatattttctaagaaaatattttgtaactgcaatcagtgaataaaatctttaattccggattttattttccgagatttctttattctatgcaaagatttccgtttttattgcatttttgttaacaaattttgggcaaaacgccaaaataggcaaaaataggctctttcaaaattttttaggctttttaggcgctaaaaataaaagcctagaaaataggcactaataactcgaaaagtagcttaacaacacccgaaaaaaacatgtttttcgtgcgtttcaggccacggggagctcaggaaaaaaataggcttttgcctaaaaattgcatccctagttatgtatgattttccattttaatcgtttagatagtttgactttttcataactagggatggtaaaaatatgtatataaaatcgcgaaatatggccataaaatatggactaaaaatcgcttttgaagtcattttaaggtcatttagagtcagcaaaaaagtcatttgacttaaattcccatccctagtcataattttgcaaaatattctcctctttggtggtcctcctctgttgcgttcccttttgcttcctcttccaatcggtcattttatgccaaaatgtttccgccccttccgtttttgtcaatgatctttcgtttcccatttaaacattgtccaaccccatttaaggcaaaaaaattcaaaaattgttttaataaaatgtgattttcgtgtttctttcatcaagtacaatccgtaaaaaataggaaaaatctaaaaaaatcagggctctctctattcatatgcaaaaaatattcaccaattcccttttcatgactataaaaatcttttgttttccgctttgactctcattaaaaaaataaagtttccaacgaattattattctgttcttttgtttgacatcattcggaactcgtccaaaattgtgctaattgctgccaaaaatgaaccgacggtaatgaattttaaaagtcacaaattcgtcgtttatttgactaaactgttttctataatttcagttggatttgcaacgacgtttggatggacattttccccagttttgaccatcctcaactcggcctcaaattggcacttctttcgccacgtttcgatgcgttggtggacaaacatttcgatggcaaaagcgaattgacaatttggagacaaatcaaaattcgcaaggacaaaggaccaggaccgaagctgtttgtattgttcaatgacaaatttgtggaatttccgttgcccgacgaccgtccgttgcccagcaaaattcgctttaagcgtctttatattgagtaattcaaaatctgagctatgacaataaaagcattcatcccatttttaggtacatcgatcactccgtcatcgcttttcttcgttccaatcaccaaattttcgacaaaagaggcatcgatttacagttgtggattccattatcatacaccacggatggccagcggatttgggatattttgacac

SEQ ID NO: 64477 - DNA, 138 bp, Heterodera glycines; identical to SEQ ID NO: 50950

SEQ ID NO: 64478 - DNA, 679 bp, Heterodera glycines
tgaaaaaaatatttatgaaacaaaaaaatcgattttttcaagtgtccgtttggggtactcaaacatttatggggagcaaaaatccaacgcagaattaaagtacaggctatagggaagctattcccgaaggattcggtctccccataaatctgggcgcatcggttcggggggactgccccgaaaacaaaaaaaatcgattttttcaagtgtccgtttggggtactcaaccaattatggggagcaaaaatccaacgcagaattaaagtccaggctatagggaagctattcccgaaggattcggtctccccataaatctgggcgcatcggttcggggggactgccccgaaaacaaaaaaatcgattttttcaagtgtccgtttggggtactcaaacaattatggggagcaaaaatccaacgcagaattaaagtacaggctatagggaagctactcccgaaggattcggtctccccataaatctgggcgcatcggttcggggggactgccccgaaaacaaaaaaaatcgattttttcaagtgtccgtttggggtactcaaacaattatggggagcaaaaatccaacgcagaattaaagtacaggctatagggaagctattccggaaggattcggtctccccataaatctgggcgcatcggttcgggaggactgccccgaaaac

SEQ ID NO: 64479 - DNA, 291 bp, Heterodera glycines
atgacgatgaatggttccgataatagagtagagcggtaaacaggtacctaacgtatttaatattacttgaaaacagatctttaaaatatgcaattttactaaaaatatagacaattataaataaattatagaattagaaatgttcaaaaaatttaagataaaaaatgaccatttaccggtaccgactgaaaatgttgtttgttaccggtaccggtttttccagtaccggtgattaccggtaacggctaatgaaaaaccaataccgctcataaaattatttaaattaataaa

SEQ ID NO: 64480 - DNA, 544 bp, Heterodera glycines
cacattctcaatcaacacaaatgcttaactaataaaaaataaatcttctttttggtccattgccatagccaacgcttcatctcccaaattccatcggcggtgccattctccgtccgtctccccccccccccctccggtgctgcttttcctctgctcttccgctgatctcactccctccccaccgtttggtcctcaattatttctcattagtgccattttatgcttattccttcttctctccgcttcatcatccgctgtcattcttcagctgctgctgagtgttttttgccttcgttttcgtcccttttacaattgtataattctttcaattgagcaactttggcattatttcctcctccttgtttgttagcatttgaattagccgaggttcactcggttctcagccagcagaatggccaactccagtggccatgacccaatcgcgcggtggctcactcggctaaggcctcgttcgcgcatcgctttggtcattttcggcgctgtgatgatccacctcagcatcggcacttaccacaccttcggt

SEQ ID NO: 64481 - DNA, 1530 bp, Heterodera glycines
ggcatcaaaaaaaaattaaataaaatgcccaacaaactttttctcaaatgcttttgcctttattcggttcagagtacggcacaaatggaccggaggttcgtctactgtctgttcgcgctctctttttttgccaacttttgcatttatgccccctgggcattcaaaaaaatcatttaccaggcaagcaattgatctgattgatgttgaatatctgatgttgccttttggctttgtgccgttcagattccccccggtgttctcagatgccccttggtaatttgcgaccgcaacatggacaccccctggttccgcatctacgaatgggtccgcgagttcctcacgcgtcttttgcccttcgttctcatagcctacttcaacgtgaacattctgatcacttacaggtgatgaccgataaggtcgagccaatcttttgtgatttgttatgtttgaggaccaacaaaaaagaccgtctctcattgtccagccaatcgtttcatcggaaggccgtggtcgagaaaagcgaaaaggtccaacccatcgctgagacaagagcctaatgaatctgatcagttgcaggaggagaagcggctgttcactgtgctgttcgccattaccgtcattttctttctgtgcacaatccccgcggttggccaaagcctattccgttgttgcttcacttttgcaccgctttttcatctttccaggccccggtgaccattttcatctccgatcggcagagccaatcgctgccatttcaggtgggtgaaattgcgtatttacaattggcatttagtggacacaaaacaacccttttaaatcccattttgattttgaccaacagatattccgttccgcctcgaatttgttggaaatcaccaaattcgctcttaatttttacttatattgtctcataaacccaggttcatctcactttgcttttctctaattgtcatttttgcgaattgttaagacattcggagggtttgcctcagagtgttgaaatgcaacggttggacttcgttgtacgaaagagtgagcagcggacacacgctgaggaccattccgagcatgccgaacagcaggtgaaggagcaattaatgggcgacggacgaaacgctaatgaccatcgatcaatttttggtcgggaagcaacaaaaccattttgacaatacggaatgggtctgatcggagttcgcgcgggagcagaaaaagtcggaacagtcatttggccacggaagagagtcaaaggacggacccaccggcggaggggacgaccgatcagtgccaaagtccgatcggctacactgaacggcagacaaaccattcgaaccattcgtcagggcagagaatggccagtcggacaacgccgagacggagcagtgcccgcaacacaacggacagtcatcggacgaccatttgcagcaacaaagacagcagtcattggcacgcgcaattgtgaacggagcgaatggagaaaaaaatgaaaaaagaaaatggaaaggaatttgtacattttgaggagcaataatt

SEQ ID NO: 64482 - DNA, 2614 bp, Heterodera glycines
atgctcccttacatggcctcgtacatgcgaaatttcaccgacccatcagtcaaaattgagcatctcatttgggtcccaactttccaaggtttggtttgccagaaagcgcaaaatgaagtgccccttttgctgggcaggctgttttccgttggcaatggtaatcggcgggtttctgtcccaaagggttgggcctcggctggccgctgccattggctgctacacaatgtggtgagtcaatgaatgggtgctttcttctgctgctcattaatagggttgagcgctaccggtaccggccggtaattaccggtttttttggtaccggtaccgaccttctgattttcattatttctcgcttgggttcaattccccactgggataaaatatttttcatatttactttaccattcattattttaaataaaattttaatttaaaaaaaaattttttttctttcattttaaacagcctagaaatcgaaaaagtaaccaaagactgggtcattttttgacaaattctgtaaattaaaaattttcccggcggcgcctatcggcaccgccggcccccctttcttccccaaaagtcttggaaaaaacgcgccgcgaaaaaagcggtgttgaaagcaaaaaaaaaaaaaaagataaatcaatttacatggcggacccagacccccttgtcttgcaaaaaaactgaattttagtgttctttatcctgaatttgaaaaagaagcctggtcaattaccggtttttaccggtaccggtgtaaaaagttggtacctaccggtttttgcattaccggtcagtaccggtaccggttttttttacaattaccgattaccgctcaactctactcattaatcccttagttttcaatttaatttttgcacagtctctaatccaattaagcaaatcatttgcatcgaaattagaatttgtcaaaaataataatttatttatttggttaaaaatggcttttccccaatgcttttggcctgtcttttcccttccgtccgtctgtccctttacttttcattcattctttggccccaattttcagtttgggtgtgctcctctcctcatggacaatccgccattcctattacggctttctgttcacctacggactgatgtttggccttggccagggaatcgctgtcagaaaatgccattatgccaaaactagtccctaattgttcagtatgtgatcgcagtctcttgcgtgatcaattgggcccccaaaatggtcggcctcggctcgggcatcgtcgccgccggctttggcatttcgtcctccatttttgcaccaattcaaacgcgcattgtgaacccgaacaatgtggcggccaataaggacggatatttcaacgatcagcatttgctgtgaatggcattttcatcaattggtgccaactttgctcgcttaggtcgcgtgttcccggattgttcgtcactttggccaccgcttatttcttcatgcaatgtattgggctgttattcatttgcgacccgcctgatgaggtccgttctccgtcgttcgtttcgaatcgtttcttaattacccctaattaccccttctctctttgtcgccacttaattaaccgatgcatttgtctcgtcccgtccttgtcctcctcattaaataattactgcaaatggcttaacctgctggttcgtccgctctttcagtttgtccgtcgctttttgtccccaattcgacctctctgatcgacatggcatggctctccaagaagcgcagtcattggttagctgccaatcggtccccgctgctttcctccgggtgggccaccgccaaaatgggactccaacggatggaacgcttcgggcgttatcaatacgctcggtttgtcagtagagcaacgaattttcaaaaacaaacaaacaaaaaacagactggcaacagccgctgaacaggaggaggacagtgacgaagagcaaaagcagaaaaaggcaaagaatggcacggagaaagaagcttttcctccccaaatgctaaccaaaaaccgaaaaaaaagacctaggaaagaaaggaaaagcactttataacacggaaaaagaaaatgccaactttagagtgaaagtgggagcaatgaacagcaacggcatttgaccaattcctttccgactcctccgaacgaatcggacgaaacggcagaagaggaggacgacgacttggacattggcaagcaggtcaaccgacaggggacacggcacagccgacggactgacactgacagaaaagtgccgaacttttcaggggcctccgatttcgctgagcacgcggcaaatgctccgttcgtccaccttttattttctgttcatttcgctgttctgctgctctttttatgggaatttcttctacaatttgtacaaagtcataaataataatgacacaattaattaattttcatttaatttttcagactttcggcgaaactttcatcgaagacgacttttttctggcctttgctttcagtttgggtatattaagagggtaactaattttagcttcattttttgcttccgcttgtcaggctctgtggccaatgcgattgctcgcgtcggctggggacttcttacggataggacgagtttccag

SEQ ID NO: 64483 - DNA, 279 bp, Heterodera glycines; identical to SEQ ID NO: 58736

SEQ ID NO: 64484 - DNA, 288 bp, Heterodera glycines
  unsure (1)..(288): unsure at all n locations
gctgtaaaaaaaatttggggcgatttgaaagagaatagaaagaaccaggttcgatgaagttttggtaagccaaaaaaaatgcaaacatttaaaaatctataaaaaatttaaaaatgagaattcatgcgagattttctggaaataagcttaatagggcctagttaagctgtaaaaaaaatttggggcgatttgaaagagaatagaaagaaccaggttcgatgaagttttggtaagccanaaaaaaatccgaaatatttaaaaatctataaaaaatttaaaaatgagaat

SEQ ID NO: 64485 - DNA, 1278 bp, Heterodera glycines
atgggtacggcacaatgtgcccatccatgcacatctgtcccggttttgtctccagcagatcctgccgtgcaacgcaactcattagctctccgttcttatcccgggccccagtccctttttccggtaagttgaacaaagcgcagtcatcgggttccaaacaacaccgcaattattatgtgaatccagcaactaaaacagcaggagaatgtacaagcagcattaacccttcgagtaatccatcacgaatcctgctctaggattttagcatggaggctttttgactaaacttttagaagttatttttcggaccatctcacagaaattatgggtatcacctcaagtttcatagcagcgatttatcgggtggaaactaatataggagttcggcatttccccccaaaaaaccaaaaaaaaaatttgacctgtaaagaagttattaagaaaaaatcacaaaaattttgacttttttgcaattttcagttagaacttttttagtaagcgactaatcgctaagcaattgcttagaaatagcttctaaacatgttcagctttcgaatgataccaagattgttagatttgatcgacaacaaaaaaagttatagtccaaaaacaagggctggcgccgaaacggcggcgccgaaacgatacagaccctgccgcggagggactagggtcgtttatggagatgaagatttagataggtgaattattaatatgaattttattttttatcccattagtttgatgtttattttatgaaaggaattccgtttgtttagttcttcttcaagtcgacaacttgaagttttttaatccaaaattattcattcgcccaaattatctttgatcttttgttttctattatcctgcaaaattacaaaaaattcactaagtttaaaaaaattatgacttgagaaactcaaaaaagcaagttttcttgaacatattttgtcataaatttcttgaaactttttgttatgattttgccaaaatgacagttttaagagaataaggatttttagggccgttggaaattttttacatacgttttacattattttaaagatactcaccaacaaatttcaaattttggattaatttttgacgataatcaatttttaatcgtagatttttgtatataaatatttataaaacgatattgcattttttgaaaattattgtttattttttccgttataaattaaaaattttattatattaaaatattattgtggcaaaaaaattttttttcgagaaattgacttgcaaaaaaataaa

SEQ ID NO: 64486 - DNA, 1137 bp, Heterodera glycines
atgtccgcttcaacctcacaagcgccaactccgctgccaaccaccagccacgcatccgtcgctggcccatggcagcgcggaggctcagtgaagtcgcgcaactcgttgaagctgttgaaacgcaaaatttttggtggcaccggctcgaaaaatcgcgaaaatggcggttgcgatgtggcggaaacgacaatttcggtactttttttgatcaaattgtgtcggaatcaattcgagtttcagctattacaatttatcaaatcctttctaattaagactgctccgacggatgaaaacattgtgtggacagctccgtcatcaccacaaattggtcgcacattcaacggtgttaccggcatgccaagacgtcgaaattcagcaagacttcgtgaattgcagcgcctgcttcgggcataccatgaacaacgaagaagtgaatggacatcgacgccaagcagtccaaggatccatcaacgacaacaaatgccaatgaaagaagcaccatcaccagtgggatatcatgatcagaattttgatcaccatggaaccaattatcccgttcatataccagtagcaaagctgagttactgtcgtggtgaactcggccctgaacgccctctaattcttcaatcacattctgtggatcagcagcagcaacaaaatttgcctgggccaaatgtgctaagacggaaaatcaatttgtcagagttggaattggcactgttaaacggtgccaatacatcatgcccatcaagcttgttcacaaattccagccaaacagcttcatcattgcagcaaccactgccaacatcggcaactgttgttgtgcacactcagccaccaggacacgcaactgctgagcaagctgcgacaacagttgttgaggaaaagcatgcttatcgagcaaccaattttcagcatgaacaacagcatcaacaaattatttcgttatcaaagcacctacagtaccagggtgctaccacagtaacttcaacaacacacttttcgtccgctgttgggtctccccagaagcagcagatggatttcctaattaaaaaggctaattaccaaccaccgattgatctgccactgataagcccatcaccatatgaacaaatcatttcatatgtggcaccccct

SEQ ID NO: 64487 - DNA, 1349 bp, Heterodera glycines
atggcatctgaaaagccgaacaacaagcagaagaaaaagaaaaagcggcgaaacaaaagtgaccaaatgccaaaaacgcaccatggcattgttggacagtacgcggaaattcaaaatcaacaaatttctggcaatcaaatggcttcttctcccaaattggccaagccacaacagcaacagaatgccaagacttatccaaaaagcggttcttcaaatattttatcgctcggatttaatcagttagttcaacgccattttcaacaaagccaactaccaccaaaacaacagcagcaacaacaacaaaatgctgtcgttgaaccaatgctcaagtcggccaggtcggagcctcgtcttacggcacgggccaaccggcgcgagcattggctgctgatgagccgcccagaaatccctggctcatcatttctatctccaaccccgtcaattgccgctttagagcatttggaccgtgttcgtgatcggattagtgagacaaagtcagggattaggggtgctaaactttcgagagtcttgaactcgaaaacatttggagatatgtgacagccgtgtttgagtcgcgcggtgggcttggccccgtgttgagcgatgtgcaggccgagttggagcactggttgggcgacacgtcccttctattggccatcgcctgtgaggtacattggtcagtgccggagcggttcagaagccgacagctggaaattgagtaagttttgctgttttatggtactttattggttttaaacattaataggggtaacaataaaaaaacaatttaatacaattcggatgccgagaatcccgaacatcgatttttaaaattaaactacattacttaattagcaaagctctaattacacatccgagtttaatgccagaagaataaattttggttaaataatttttaattttaactaaaatctgtattttcaatttttcaaattaaattccatcggtctgcagcaaaatgccattattactactgctgtgatcaaaaatattggcccttaaggcttaagcaatgcttacacgcggtgctacgcgtgaacaaccgccgcgtgctgagcctgaacgataatgacaatgacgaggaaacagcggcggtaaccgcgaaagttagccccgcggacagtccgtttttgatgccacggcacgggccacggcaccgttcattctcaacccattcgctgaacaatcgttccatcggcggcggcagcggcgggcgtccgtttcccattgcgttggcacgatccaaaacggaggagtcatgcattcgagatgccgagctggacgcattccagggtcttgaatgctttacagatgaagcgccaccataa

SEQ ID NO: 64488 - DNA, 2137 bp, Heterodera glycines
  unsure (1)..(2137): unsure at all n locations
gactattcatcaaaaatgactattttatcggtagacnatggcttgtgggcaaaattcaagcgattgacgaggatttgcttccatgtaaccgcattttttacacagttttgccaagtaaatgaatataatttaattaattccgaaaaaattccaattaattaattacagaaaaatccgacataattaaggttcagacaaaacatcacaaatcagcattgatcaagaaaccggtgaactgtttgcacacaatttgactggcttaaaccatccaatcaaattttgcgtttttgcaaggtaattaaggattaattaggagggtgggggggggtcattatttcgtaattgagccgctgtttagtacgttcaagccaaattcaacacatcttgctataatatctcgacatggtattcccgaaaatttccgttcaattttacatcttcaaattgtaccaaatccgtcaaatattgctgagcatcatcatctcccacaacaaatgccgttgggcataattcgagcaaacaattcacattccttgctggaacatcagtttttgcgccaacaaattcccatagaatttgatggaatggcacttgggaatggttggattttttaaaagattcaaagatttttatatattttattttggggggcattttagtaatttaaatattttattttttaagggcattacaattcattaccaaataaagtaaattcatctgtaacatatcccaaattgtcattcgattccatcaaatttttgccatacggtcaaagtgatcagcaccaaaaaatcggtacattcgatgtgatcagacaattggtcggaattgactccgccaatgccaaattgcgcttcaatccggcatttgttgaagcatttgagaacggactgtacaaatttggcatttctgttcaggatgccattggcaataaagcaattgtttaccgaaatgtaaaattcggaaatatttattaattaatttgaagaaaatttgttttgaattttcaagattcatcttttggacgacaaatttcgcttacgttttcgctttaatgaatcgcttcatacaattggagccaatctgacaacatttattgggtgagtaaaaatttttcgattttaaattgcgacttaaaattaaaaaaatttttttttttttttttggtttttttggcattgaatttcgggaccaattcttgatattcttcatgaaataatctctgatcacatttttcatttgatccatctataaataaaatttaagaaagcttgaaaaacgacttcaaggcgattacaggattatgccatcattaccaatacgagacgaggaaaatccgggacaaaagtaagaaattctggcacaattaaaagcaaattcgaattcatgccaaattgaagtttcgtcatgtgtttccatttgtggtcaccaacaaataatggtagtggtgatgcaattgttgaatttgcggaaagtgaacggttattgtccacaaatgtacaaaattcgaaagccaatgaacaattgcatagcttatactcagaatacaaagtgatcaacattgaggtaatgttttttggagttaaatgccatttaaaaataaaattaataataaaatatttacagtttatgaaaattgaggtgatttttttccaagatcggaatccaaatcccatttcgggatttgaatactgtgatcctatcccgggctgatacgaagcaagcctgatccggacttttttcaaaattcctggctctataaatcaaccagagagtagattttcagcgcaaaaattagacttagccacgccctaggttagcaccaaaaaactaagcaaatgcttcaacgtcagcccgagatttttttttgacaatactttttatttggagaaatgtgttttttaacaaaatgaaaatataaatttcgaacaattcaaagactaagtttgtgaatggctcttcgggtcaattttatttttanatctttttttaatgaattataatttttanaatttatttaaaaatgatgctttttcagtcatgtgctgctgctgattcgtcgacatcatcggtactgctcaattccgattcttttggctcgtcgatggtgcagccaaatgccaaagcagtgctc

SEQ ID NO: 64489 - DNA, 351 bp, Heterodera glycines
  unsure (1)..(351): unsure at all n locations
atggtatttcccttaactaaaaattaatctttaaatttcaaaaaatttcccaacattcagcttcatacaactccaccngacaatccgtatagtgtttatgcgaaaagcaacaataaattgacgccttcttccatgtttgctatgcccgaatttattcatccaaaaacattacggtaatatacggctatttactgtattgtaaatcagaataatttattttttaaatatatttagaagtgatgaattggaatattgaagatgtttattcagagaaatgcctattcctataacttttctctgtttggattcgcaatttctaatttttttattattttttttttgtcaaatata

SEQ ID NO: 64490 - DNA, 1284 bp, Heterodera glycines
atgatttgctttcattcacttttatctcttctaatgctcttcattgccatgctattattgaccatgcaaaacagagcagttgactcattcctgttgagccaccgaaatttggtaattaattttaattaaaaaaaattaattgaaaaaaagaatcggattatatataataaaataaaaaaatgtatatacagataaaaaattttaacattaaaattttttttcaaataccttaaggcaaaatgattttttttaattcattaaaaaatttctttaaaaaattatcaaacaacgattttttcaatctgtaaaagattagttattttttcacatttattttataaagtacgcctttttaattatgagaaaggcaaaccgaataaaaagaatgtagcattgtcatttcccattattatttgcgtgcgtgaatgcttaatcctctcatgagctaatccattttataagtacaacataagatataaatccctctcttgacgtataaaatattgatttgaaaaaattttgaaaataaattatgcaactaataaaaatattttgacattaaaataaaacaaattttagttggttcctttcgcgtccaccaaaatggccatggccaacaatgtggccaaattggacaccacaaacaataacaacattggcgttcgtcggcggcaccattttgtcagcctttttatgatgaaagcattgccaaaatctggtgatggagatgatgatgaacgacaaattggtgccaagaatgtgctgtttcaaaatgatggcaaccacctgctgctgcaaccgtcggctaatgatggtgccattgccccgcagcgagtgcactcgcgccggaaacgattgcacatgttatccaccttgcgacgcgttggcacaccgcgccggtcaactgaactgcttaaacggcttgtggttgaacaccagcagcagaaacaacggcatgtgccactgaaacggattttgtcattcgatcttctctggatgttcaagagggatttctgagattcaaataccaattttttttttaatttcaaaagcaattaattttaatttgtaatgtgtaatgtaacaaatgtcacatgtacagtgtatcactgaattgtttttatactgtaaaaaactgatatgaaacaacaacgacttaattaatgaaggatttgctaggaagttgttgttggcaaaaacaatatttttttaatccatgtttattgcaccaaggcactaaaattttttgtcgaaaaacattatttaaaaatataaataataata

SEQ ID NO: 64491 - DNA, 56 bp, Heterodera glycines; identical to SEQ ID NO: 52733

SEQ ID NO: 64492 - DNA, 536 bp, Heterodera glycines
atgtccttgcaaatcggcatacccgtccttggaaaccgacttcggacgataccatccctgagtttggttaatggatttgagagaataaattggatgaacgaaatgagtaaaaatggacgaaacgaacgaaagaatggtggggcacatttggagggggggggggggatggcattggccacttgacaccaaccccaccaaaaattggtggcacaaaaagagaaggcgtgggtggaacaatagcatagaaaaattatatgaatttgtaatgattagagtgtggattttagttattaaatttttttttctgcaacattattttgatgagatatgcacgaaaagcatatttttagtccgaaaatgttttattttaaattcgtcactaggatattatgtacgtcactattttggcgtttcgtcactattttgaattttttgagaatttcttttcaaagaaaaaacattcccgaaggattaaactttcattaatttattttttaatccaaaaaacacctacacctaaattcttcaaacacaga

SEQ ID NO: 64493 - DNA, 462 bp, Heterodera glycines
tttcaggttaagttagtcctttacaatggagaaggcctgcaaaatttggagagattatatcgattttagtgcgctaggttcgatgaaactttttaaaatataagcctaaactttttggcctgtttaaaaaggaattaaaaatttttaaaaattttattcatctcccttttgatagaaaaagcatcagagagccttatttaacttttaattaacatttggtgcgtttcagagcagtttctgaaaaaatatttatgaattgattttgctaaaaaaataaaatagtgaagctttaaaaattaataaaaaattttaaattcagaattactggagttagcatcatagcagtgcttttccttgtctttttgatgccctcgcaaaatctggttcgcttctgatcagtttataaaaaaaaagttaagcctaaaatttttcgcatatttaaaaagcaattaaaaattttta

SEQ ID NO: 64494 - DNA, 2748 bp, Heterodera glycines
atgcacaatttgtcatttgaattgcgctcggaagacgtgcttaaggggcacgattggcactgcagagacagcgagactgaagtgttcgaccgaattgtgaagcaaatccaagtcaaagtgagcagaggcaaaatatttgcaaataattatgatttgaaatggaattcagagaagggtcgacgtggaggaacacttccggcaaattgtcgtgtacaaaaggaaaagggcggaggaagaagagacggacgaagcggaagaaagggaggaaggggagaaagggcaacgccacggggagggcgcccgggggcaggagctgactcttgagcaaatactcgacccatcggaccagttaagcattcggcttaagctgttcattttctgtccgttctcagaccaaccacaaccactgctgccccctcgcctcgttcttctctgcttacttcttctcccgacgttatcagttacagtatgctgcagccatttttgcctgaccgtactgatcaacagcggaatactgtggcagcagaaccggtgcagacgaaagtgttgataaatgcgggaggacggaaggtgtacaatttgggagtggagttttcaagtgagtttattgctgggtaattaatttattaattaattgtggttaaatgggcttaaagagcaattttggcagaatttgtgccaagttttccgcccgctctcagcaccgaacttttgagcgtcgcttctccgctcgacccgcggggaagcgcccccctccaaagagtgcgcaaccgatcccctctaaacacatttaatggggaggagagaagcgagagggctgtacgaagttcgggaacagtggaaaaaggtagaagctgatccaccccccccccctaaaaattctttctcagaataccgacaaaagcgtcgcggacaaattcccgacccatcagaacgaccccttcaggggtacagtctgcccaacctgctcaaggagctcgcgttgctcacttacgaactgaaatcgttgaggacgatgatgacggttggggtgggcgacggagagagaggggagggggaggaaaagccaacgacggaaagcattgaatggacggaacagagggagcagcttctgggcaattgtaagcaaaacaaaggagcgaaaaaacaattggaaataatgacagtgctcgccgaattgttgaccttttctgactgcgaatttcggctcagagaatgcgcttttggcgaatttggaaggccaaaagaaaaatcggaacgcaatttaatgtgagcactaattgagggaaagaaatggcaattaacaaatgaattggctcatttggcttcagtttgaccactttggccacttcgctgctttgtgagcaaagagcgtctgaggaatttgttcgttttacgcttttcctttcaaactgtgcttttcttttctccctttttcggtttgtgggcccatcgcttttttggctcgcgaagttcattctgtgctgaatgggacggacggtggcaaagggacggagacgcaattcggcgccatgggcggcggaatgcacgcccaatttgttggttgcacccgtcccatgcccttatgacggattttgctcagaatgatccctccgaacaaaggcttttcctcgagactctttttgtccaaacggtcatggactgttctgcttatgcgtgtgcagcagtaagccttttcagccaattaggccaatcagcgaaatgcaattgagcggtagtccccgtttgcgaaggagtcgtggaagcatctccactcctccttctaccggtctgtggatctcgacaagcgatacgacgtccgtctgatcgccgccttggcttatatgtccaccgccgccactcggtttgtcctccctttcatttgttgttgtgatcctccgtcccttacagttccatcatgcgctctcggcttgccacttcgactttgcgagacgacaaagcgccctttggggatttgttgagggatttgcaaagaaagggccgactgatggccttttggagcaaagtcttcataaagtacgttttggtcagcaaatggtcaattaatgtccattaactaattgtaagagttcgaatgtgttggccaatgctttggctctgctcgcttacactcgcgagcattcagtgtaccgttattggaagaacgaattcgacttcgaagcgctgagcaattggttggtcgaacagcaggacagccgaaggcaatacgaaaacgcattggtcggcccattaggacaaatggtccaatttgtcgcccattcattcgttaaaggacactttcttcgcctcccgcgcccttttccaattcgcttcagtgaacgccgctcgccacgttcggttggcacttctcggctctgtccaagtgagtgccaataataataatagtcccgtgcattgattgcttcagggcaatttttcgattccatccgcgccttcgttgtcacggcaattcaatgagaacgaattgcccttttcactgagtgtcactccgtcggcgagccgaatgcaaattgagaccaaaggcgatgcaaggtgagctgattgatgggtggacgaagcttaagcaaatctttcttccttttaaggcttcttctcggagtgcgtgtcctcgtggaaaaaaggcgtcggtcgagaagagaaccaagcgatgctgagccggtcactcttgaccttgtgcagttgagaacgcagaccaatttcattcagcagacggtcacaatcaagtga

SEQ ID NO: 64495 - DNA, 59 bp, Heterodera glycines
caggttatcactcagctgaaactcgagaatcagactctcagggcgttgttccacggatt

SEQ ID NO: 64496 - DNA, 890 bp, Heterodera glycines
  unsure (1)..(890): unsure at all n locations
aggcaaaggggcagaatgccaaatcactttctcaactgatcaaaaaatcttaaggacggaaaatggtagctgcggggtacggtaagaaaaccatccnaacgcactttcattcattgttcacaaccgcaccaaagccattgtacgggtcggccactatggtggtgctgtcgaccccgggccgtgtcgatgggttcactttggacccggtcagtgtcgtccaattggcccacccctatcaatcactaattacaaatcctaattaaattacgaatccctttttttttgctccattcagagcattggcgaatttattctcacaaatccggcgatgcgagtgccgaagaagggcaaaatttacagtataaatgagggatatgccaagaaatggtccaaaggtcggtgatttggtcggacaatttactggggaaagggaatgaataacctcaagggatcaccgaatacatccgatcgcgcaaattccccgaagagggcaaatcggcgtacggacagcgctatgtcgggtcgatggtaattcagaattggcgtaatattctggcgaaatgtgcgttttttgaggtagccgatgttcaccgcactttgttgtacggcggcattttcatgtatcccgcgaccacaggtgggaaaagcgacgaatgagaagcccatttgaagcaaacgattggacagatgcgccaaatgggaaacttcgcctcctttacgaatgcaatccgatggcatttgtcatggaaaacgccggggggaaggcccactcggggaaatgcccgattttggacatacagccgaagtccatccaccaaagagcgcccatctttttgggctcgaaggaagacgtggaggaattgctggaatacatccgaaaacacgaccaa

SEQ ID NO: 64497 - DNA, 91 bp, Heterodera glycines
aacccgtgcggaaatatacgtgcaaggaagtcttctgctcgccattgaagcctctgtacggcactggggccaacactttatgtgtcgctaa

SEQ ID NO: 64498 - DNA, 753 bp, Heterodera glycines
acccaatatttcggcaccattctgatcggtttccccccgcagcaattccaagtgctcttcgacacaggctcctccaacctggtgaggatggcattgccctgttggcattatgctgctaacggtcactcccttttcagtgggtcccctgcaaagggtgcaatgactcggcatgctcaacacatcgccaattcagctgccacaattcagtcggctgtcaaatggccggccaaaactttgacattgtctacggcaccggctcggcttcgggtgttctgctgcaggacatcgtttgtgtaagaataaaagttagcgattattttggcaccgtaaaagaataattttatgtgagtttggcaatttgagtgtcaatttgtgcacaaatacaactcaaaagtttggctgttcaatgagtgaacctggagacgttttttcggtaaaactaaaagttatttcatgtccaaaccaccctttgagcaaagaatgccgccttcgatggcattttggggatggcgtggaattcaatttcgactgacgcggcggtgcaaccgttggcccaaatatttgaaaatgaagattgcgatgagaaagtgttcgccttttggttggttgcgaaggaatcgaatcgccaaaagcctgaataccaatgaccccatcaaaggctgaacaaagatgactttggggacgacccgcgaggggcgaaaggcggacaaatgacatgtgtgcacagacaaaagccgatataaggtacgaaca

SEQ ID NO: 64499 - DNA, 776 bp, Heterodera glycines
  unsure (1)..(776): unsure at all n locations
catcgctttaggtccgcgttttgtcntacaacaaaagcaggggagtggtgcgaagtgcagttggtccgtcgttgtgcctctgccaagttggccagtccaagtgtccagtccaacttggccacttgctcgnccacgctcggctcctcctcctcctcgttggcctcctcctccagccaatacggacagatcggatgggtgccaagcctttacattgccccggcaaattctttggacaaacacaggtttttggtcatggatggccacgccacgggttgacttttccaatctcagctggtaccacggcaaagtcacccgggcggaggccgagcagttactcggctcgggcattaacggctcatttttggtgagggaatcggagacgaaccccggccaattttccatctctctgcgacacgaaggttcaaatgaaagtgcataaagagaaggcaaaggcattaaaattaaaaacaaataaaaattcgaccgtttctttcgccttcccctacagtaccttcctttattaggtcgtgtctaccattaccgtatcagtttcgatgccaattttcgggtttgatcatttcccatcacttcgtttaccctgccaatggcatttcccctcccacctcgttcagctgtttatcactgaaagtgccaaattcaaatcccttggtgagctcgtccaccaccactccatgtccgcctccggcttaatctgttcgtcttcctattttctcttttgtcacttccttaaaaggcactttaatgtatccggtgaa

SEQ ID NO: 64500 - DNA, 262 bp, Heterodera glycines
  unsure (1)..(262): unsure at all n locations
gtaattacttaaggtgcaaatgaccatttccatttttccgcgtatttgtccctcttttcctccttttctccggcattttccttcttcgtccgctaattcgctcgcttttcgtcgccacttttctctgaccggcccccgtcacagctttttcttcgattatttcactanagttcgattttgaagttataaaaaaggaaaagtcgctaaacgagtgaatccaaaggatttagcaccccaagggacatgcccctctccgcgacta

SEQ ID NO: 64501 - DNA, 915 bp, Heterodera glycines
atgccaaaacaaaacgaaatcgttttaaaatattcctttctggacttgacttggtttcttgatatcgaagctgttttctacgctatttctaaaacggttataccaaaccccagatttttgaatccggttttcagaaaaaatgccttgtggtgaaaacaatatttcacatttcactccataactttgtgagttcggcacggatcgagaccgggataagaccattggaaagagcagctcgagctctacaagaaggtatggaaagaaaaaatagttatttctgggactttttcagaaatcagaattaattctccaatgtggcccaaattttaggcccccagccacagccccttgcttctcccagttttaagtcttggatttgtcaaataaattcaagacttcaaattaataatcaaaaattctcttaaaatttttttgaacccaattcaaaaaaggaaaaaaatttgcagtcaaaaaattattcgaatttctccaattttgtttccataatttccgaaagttattcggtatcataatgccaaaacaaaacgaaatcgttttaaaatattcctttctggacttgacttggtttcttgatatcgaagctgttttctacgctatttctaaaacggttataccaaaccccagatttttgaatccggttttcagaaaaaatgccttgtggtgaaaacaatatttcacatttcactccataactttgtgagttcggcacggatcgagaccgggataagaccattggaaagagcagctcgagctctacaagaacgtatggaaagaaaaaatagttatttctgggactttttcagaaatcagaattaattctccaatgtggcccaaattttaggcccccagccacagccccttgcttctcccagttttaagtcttggatttgtcaa

SEQ ID NO: 64502 - DNA, 1181 bp, Heterodera glycines
atgaccgaagccaaaaacgagaaacagtcagttgtgatgccgccttttactctgagcacggggacaacgacggcggcgtctgtgtcctccatcgaggaggacgatgcggacgagtacggcatgttggacgagtacatggcgaacgtcgagaaacagcgcaaaattgcgcccattggaagcgaagccaatcatttgggcaatggtagtaaaaagcgaccgaacacattgaagtgcgttgtgcgcagaaagattttctcttccatttaaattaatttgttcctttcagactctcatgcccaaagccaatttctgtgatcaacaacgggaacattcccaacggattgtctgccgcatatgagccgatcagtccgggcgaaatccttcgtgacgaccaacagaattttgggaacaacaataacgacgaccgcaagaaggggagcatgacagacacaggggacgtgccctaccagttcaacgtggacaaattcatctccgacattttgccgcagccaaccgcccagcaacaatcgttgttgtacaactcggacttgtcctccaacaaccgctttttcaccccgctggcacaacagccgctcaccgctgactcgccgctgtttacgcccattgtgccgtccattgaccattatggcgtcaaagatccgtggtattatggcaaagtcaacgacatctcatcggcccatccgctgcagcagccgctgatggacagcactaacccatgggcatatccctgagaagtttcttctgatcagatgcaaaagaaatgcccccattgaatgtgtggaactttggttttctctgccccttttttaggcttttcagttttagatgtgtgtttcccccccctccttcaaatagttatttgttcaaatatgcgtagttgttagagatgtaccctccggggatggtgtttccgttttttggcaaaaatgccccggcatttccatctctgaaccattgcgcatattcgtatcattttcatcgttctcacaatcagtgtgcttccgtcaccaaccaaccaaccttcccatttattttgttgttttctgttagatgctacccattccacaagagcagtgcgtttagattatcttatttatttgtaaccctccaacggtcacacaatcattccattcattccctcgtcttgcatagagaataaa

SEQ ID NO: 64503 - DNA, 597 bp, Heterodera glycines
atgatcagaaaggccccccaaactttgcgagggaaactccccgggtaaaaggacttaactttacactgaaatggagcgcggagctagctggggtttaaaaattttttcaaaaaatcaaaagtctttcgtttttattttaattatttattatttttgcaaaattaattcataattattttttcagaaagtgctctgaaacgcaccaaattttatttacaagctattttaggcactctgatgctttttctatcaaaaagggagatgaataaatttttaaaaatttttaattcctttttaaacaggccaaaaagtttaggcttaactttttttttcagaaactgatcagaagcgcaccaaactttgcagggaaactccccggtaaaggactaacttacactgaaatgagcgccgagctagctgggtttaaaaattttttcgaaaatcagagtctttcgtttttatttaattatttattattttttgcaaaattaattcataattattttttcagaaagtgctctgaaacgcaccaaattttatttacaagctattttaggcactctgatgctttttctatcaaaaagggagatgaataaa

SEQ ID NO: 64504 - DNA, 323 bp, Heterodera glycines
  unsure (1)..(323): unsure at all n locations
atttataagcatttgaagggttctcagcagtttccctgcaaaatntggtgagcttctgatcagtctagaacgttgggtgatcaaatgcaaaaaataattaaaaaaaaataatgctggtgtggtaagtgtgaagaactgtgttcctccaggcaaaaaattctaagaaaatttataagcatttgaagggttctcagcagtttccctgcaaaatttggtgagcttctgatcagtctagaacgttgggtgatcaaatgcaaaaaataatttaaaaaaaataatgctggtgtggtaagtgtgaagaactgtgttcctccaggcaaaaa

SEQ ID NO: 64505 - DNA, 1203 bp, Heterodera glycines
atgaacttccgtggtgcaacggaagcatatgccattgttcattcactgccatttgccaaactttcacatcaggttgtcaaacttagcatccatatgcctaatcaacaaccgattgtgtacagggcttttcagctggtgagcaaagctcaacaaatccagcaaggcgaactgccagagacgcaatgttctgcctattggaaacaatggcaaaatgaatggaagcatgatccgaagctcaaggacatgctttttgaaaaagtccctgagcattttatatgggcaaaggacaaatggaacaaaaggaaatataacctaacaaagagaccaccaatcggtcgaattgttcctgtacccccatcggacccggaaaggttcgcgctctattcacttatgcgtcactttcctggagacccagaccatcttaagatggttaatgggttgctttgtacctcattcactgaggctgcaataatgcatggtcttcttgaagacgacaaaatggagagcttctttgcccgtcggattcgtgaggcccaactcatcatcattgatgagatcaccatgcttcacaacacggtgattgaggtcatcgaccgagtgtgcaaagagatggcaattcgccagcacaaggatctcctcttcggaggaaaaacggtcattttcagcggtgacttcaaacagtcgctgccggtcgtgcctcatgaaggcttaaccgctcaggtaacagcctgttttcaaacgtctccgttgtttggtcaattcaccacgatgaaattgaccatcaaccagagactgggccaaggtcagcaagcgtacttgcaaatgtgccgccaaatcgggctcggagaaaccggagagcacttctggattcctccgcagttcctcgttaagagcaaggaagagctgatagattatgtctatcctaacttccaacaactccttggcaatgacaaagagctgctcaatcgtttgattctcgctccgcacattgacacgtgtgatgaagtcaacgagatcatgatggcgaatgtgccaggtcaagtgcgggaatacttgtccacggataagccccttgacgaccgcccactggacatcgatgagatcgagtccgaagtggctgcgttgaaccggcgcacagactcgggcatgcccccgcacagtctccggcttaaagtcggacttaaggggccttcttatcaatag

SEQ ID NO: 64506 - DNA, 4284 bp, Heterodera glycines
atgtcgcggtacaataatttgctccaatttgcgagtgtttcggctggcaataagccaagtcctgcaggcggaccgatggcagtaattctcaatggagaattccatcgccgtataagcagcatgcaggctggcacaacccagattcctggcttcggtcagttatacattctggatccagtcgaagccatggagcagcgacgaaaaaatcccacctttactggtgaaaaaatcacaaacgatgaagagtttgtgcagggtcatcagcttaatgaggcgacccttgaaattttggaacaagttatccaagaaaatcacccagctgcgtcggcttacaagcaggctcgggaacagctccaagagttgttaaaacaacaaaggactgaagaactccgattcttcagaatgactttgctggatgagcgctctgctccgggtggtatgaaagacccaaagttgcatccccaccagataatcaccccctcaacgggtgaagggatgttcgcgattcatgcggatcccactggtgccccggcaccaaaaggaatatgggttgaaaacaagcaaggacagttgaacgaaattgccccgtttagtccatggactgatagcttgacctatccattaattaagcctaagggcgacgatggatacaaatttggaattccatatgctaaacccgcacaaaggaagcggaaaagcgataattctgatgatatgtttgacacagaagcaatgtccgatgatgacatgtgcgagaccgagtcaattgcattttctgataccggatctgaaacatcgacgcagtcagtgaccagtcgctatgacaaatcaaaaagatttgtctccctgcgcgattattgcaaatatcatctcgcaataagggatgaaaatttggagtggcaataccatcacattctttcatgtggcggtggtcttggacagcgctgggtcttagaccaagcgtccaaaattgactggcaaattgccacttttttgcgccgtccagacatggacctgcgcgtaagtacaccaaaaaatttgctgcagtacttggtgaaccaatacaacaagcagcaagctcggcaaaaccccaatgcacaacaaaagagtgttgatgacattggcagcgttgttcgcctttctgagagaaatgtaaattctcttcagtattggaaaaaaatgtatgaagactgcaacaccatttttgcgcgttgccatgacgcaaaaaaggcgcggctctttatcacattcacgaataaccgtgagtggccagagttcaaggagaacatttacaaaaatggtcaaatgttcactgaccgtttcgacatgtggatgcgtgtgtggtccagcaaaattgctgttttccaccaggagctctatgaaaagagtttcttcggaacaatccttggctcaggcgagtcaatggagttccaagggcgtggtggcccacacgcacacattgtagcccagactgacctggacgtagtcccagaagtcatccaggaatacatatgggctcatattccacctttgccagacaaagatgatgactccccaattgcacaaatgcatcgcgaagtacgagattatatgcatatgcaactgcacagatgcagtgatagttggtgcggtccacgtgaccccaactttgggcggtgtaaaaaaggcttcccagccccgtactcgaaatgtacgattctgcacccggacaggcccgcgttgtattaccggcctagcccaaccgatggtggtgccaaaattgaggtgaacggcttaatatacgacaactcacaggtcgtgccgtacaatccatacattttgctgcgttaccgagtacaccacaatgtgttattcgcttatggtaacaaagcgaacatcaaatatgcactcaaataccctttcaaagggcctggacattgttatgtcgagtgcaaagaggagtccggcagcaaaatcggtatcgatgagccggctcaatatgccaaaatgaacttccgtggtgctacggaagcttttgcagttgtgcattcaatgcaatttgcaaaactctcacatcacgttgttcagttgtccattcatttgccaaaccagcagcccgttgtatacagggccttccaactggtgagtaaagctgaggaaattcagcgcggcgaactcccagagacgccatgctctgcctattggaagcaatggcaaaacgaatggcagcatgttccttcgctcaaggacatgctttttgaaaaagtcccagagcaatttcgatgggcaaaagaccgatgggtcctgtataaaaggaagcctacaaagaggcccccaattggtcgtgttgttcctgtccctccaacggaccgggaaagatttgcactttatgctttgatgcgtcactttcccggtgatccggaccacttaaaactggtaaatgggcagcagtacaacactttcacagaggccgctttacagcacgggcttcttgaagatgaccaaatttggcacaaaacgctcggcgaggcagccttacatcgctggccggaccagatgagatggctcttcgtgagcatcctcgtctttgggcagccgagcaatgccctagaactgtggaacaagtacaaagaccaaatgtacaacccacagggcatcaccagtgcggctatacgtcaagcacgcgagcagcaagcattagccgacattgattggcgattgcacttctttaacttaagctgcgtgcattgtggcctcccagatccaccaaattcaaaagccaaaaatatcaatctggcaattgaagaatatttctatggtgatgatggtctgaatatgccgcctggccagccaaaacaaaggccacaacaaaacaccccacctccactcaacagcgaccagcaaaaggtctttgatgctgtagtgagagcaatacagtcggacccaaaggaccagactgtgcctcgccgtttcttcattttcggcgatggaggtacaggaaaaacattcctgtttggccaaattatcaagcgcttgcgcaagcccccatacacctacaaagtgcttgccacggcatccactgggtgtgcggctattttgctgccttatgggaaaacagcccattccactttccgtctgggtagagaagtgtcattagacaaactcccaagcattcccttggagagcttctttgctcgacggatacgtgaggcccaactcatcatcattgatgagatcaccatgcttcacaacacggtgatagaggtcatcgaccgagtgtgcaaagaaatggcaattccccagcacaaggacctcctcttcggaggaaaaacggtcatattcagcggtgactttaaacagtcgctgccggtcgtgcctcacgaaggcctaactgcacaagttacggcctgctttcaaacctctccactgttttgtcaattcactacaatgaaattgacaataaaccagaggttgggccaagggcagcaagcctacttgcaaatgtgccgccaaataggcctcggggagaccggagaatacttctggattcctccgcagtttctcgtaaagagcagggaagagttgatagactttgtctatcccgacttccaaaaactccttggaaatgacaaggaactgctcaatcggctgatcctcgcacctcacattgacacgtgcgatgagatcaacgaaattatgatggcgaacgtgcctggtcaagtgcgagaatatttgtccacggacaagcctcttgacgagcggccactggacatcgatgaaatcgagtccgaagtggcagcgttgaaccgacgcacagactctgggatgcctccccaccgtctgcgactcaaggtcggaagcgtcgttgtcctccttataaacaaaagtgataaggaaggattgatcaacggcacgcgcatcgttcttgaagaacttggcgacgatcgtctggtcggtcgcgtcattaacagcaacgctgttggtggccaagttaagttcttcatcgaaagaacacgcaatgtctacgaggacaaaacgcctggcggcttaaaatatgagcgtttgcagtttcccatcaaacctgccttcgccatgaccattctcaaaggtcaaggccaaacaatcagcacggtcggaattgacctcgaaagggatgtattttcccacggtcaattgtacactgcattttcaagagcaacggacgggagcaacgtccgagtgtacgctcccagaagggagaccgatgcacaagacagagtcaaagtgctgaatattgttgcaacgaaaatgctcaatttgcaataa

SEQ ID NO: 64507 - DNA, 2830 bp, Heterodera glycines
atgccttcaaaacaacacgctaaaagaaagaaggagcaagagcggtaccaaaggcagatggagcaatctgtcagcccaggtcgctcacccgtccctgacggaagtgcagatgagaatggggtggcatcacacccgggcaccacaacgcccaatattagtgctttgcaattaagcacaccggcttcttccattggaagtaaaagaaggggaagacccccaaaagccggagcggagtcaattatgacttcgcaacacagtgtgtcatctgctgatacacaagtcactttggccactcaaaatgttgagtcgtcgcctagcagcaaaaaatggaaggtcggcgaagttgaccgatccatgtctgctattggagcaattgcttcaacacctgtttccaggcaaaaaagccgtggagggcggccgaccaaaaagagaggcggcccaggcaggggccaaacaaattattcaatgagcaatggctcctcaatgaaccacggctctgaagataccacattattggtcgttttgccagctttgcctgaaaacatgaacttcagcacagtgtcaattaattttgccacatcgcgaaattttgcctgtaaaatttggaaatgggcagcaattggcctttacgaacgtgatggcgaaacagcgcttgccccgagctctggcccaagatacattgagacctgttggaatgatctgacccagtttctcaatgacggctttgctgccacatacttggcatacttggcaaccatatcacaacgaaaagtggtcgttgttgacccaatggtatggagcaatggcctggacagagtcatgccttacaaaaatatgacatttgggtacgaccctaatgttccggcagaagttatacttttgccagtacatttccctggacattgggctctcattgtccatgatgtgcaatttggcactcattttgccgattctttgcctaccccatatggcaggttggatccgcaactgacggataaaattaaaaagatcatttgtgacattttgccgtcgacagtgttgaccgggattcttaatgccgaaaatctcacggtacaacacgatggaaatagctgcgggtacttcgtttgcctgtatgctgaatcctggcttatgaacaatcgaacatttgttctaccaagtttattcataaattatgaaaagaagcgtattttgtggcacattaacgagctgtatggctctgataatgtgccatatcatccaagggaaggggtgccaactccttgcccaattgtctatcgacatacggatgaagcgcagtcgacatccaaggccgctgagtcaatggaagttgatgataaaaatgacataatgatcatcgaaccacagacaagtggacaggctgctaatgccattctcacccaagcccaagtggatggtgaaaaccaagtcgacacgcttggtttggtttcggagtcttgtgttccgcaagagccaattgctcaggctgacgatgcaatatttgtcagaccgaagacgcctccgaggcgatcaacgcgcataggcagacggcaatccacttcgattagccgttctccttctcccgcaccgagacgcagctcatcagcaaatgctgttgagaaagtcacagcatttacgaagcgttgctaccttgtccacaagggttggtgctgtgctgccgcagcagcaaaacattttccggaatactccgattcaggtaaacttggcgaaaaaaagtgcgctcattgtggggcactgctcttcccgcatgaggacagcagccattgctgtcgacagggaagggttgttttgccaaagcttaacccgcacccaaaagagcttgaagagctcatcgtgtgcgacaaacaaccccgccaagggaaggagtttgttcggaatatgtcgcgttacaacaatttgctccaatttgcgagtgtttcggcaggaaataagccttgccctgcaggcggacccatggcagtaattctaaacggagaattccatcgccgcataagcagcatgcaggctggcacgacccagattcctggcttcggtcagttatacattctggatccagtcgaagccatggagcagcgacgaaaaaatcccaccttcacgggagagaaaatcacaaacgataaagagtttgtgcagggtcatcagcttaatgatgagacccttgaaattttggaacaaatgatccaagaaaatcacccggctgcatctgcttacaagcaggctcgagaacagctccaagagttgttaagacaacaaaggacggaagagctccgttttttcagaatgactttgttgaatgagcgctctgctccgggtggtatgaaagaccctaaattgcatccccaccagataatcaccccctcaacgggtgaaggtatgttcgcaatacacgcggatcccacaggtgccccggcaccaaaagggatatgggtcgaaaacaagcaagggcagttaaacgaaatagccccgttcagtccatggactgatagcttgacttatccattaattaagcctaagggcgatgatggatatcaaattggtattccatatgccaaacccgcacaaaaaaagcggagaagcgatcaatgtgtcgatcaaatgtttgacactgatgcaatgtccgacgatggctgttgcgagactgagtcaattgctgcatcagatgctgagtcggtcgaatcgaccgaatcattgattgatcgcattgataagacgagaaaattcatttctctgcgagattactgcaagtaccatctcgcaataagggatgaaaatttggagtggcaatatcaccacattctgtcatgtggcg

SEQ ID NO: 64508 - DNA, 157 bp, Heterodera glycines
gccataaaatattgcagatttttttctctttactcaacaatttgcgatttaataattaaagacgctaaaaaatggcacaccagcaagcgataacgaagaagcgtaaagctatgcaagacggaattttcaaggccgaattaaacaactttctcatgaa

SEQ ID NO: 64509 - DNA, 3367 bp, Heterodera glycines
atgggctcggacgaatggtgcacagaacgcaattggcgccaattttgtgcaatttcatggctggaacagctaaacacattggacttgagccaaacgaatttaagcatttgccggtgagaatttttttttaatttctggaaaaaaattttagcgtttttttttaatttttgaaaaaaacttgtaattcagcattaatgttgaaaaaaccgctgtgaaatttctttcctttagggtttttaaaaaaattctcatgtttgagatggtgtgcgttattgatttactcaacttttacgtctattgaaaaattgatttttaccctttgtttgtgtaagtaataaaaacacagtctgataatgccttacttagctttttttttgcaaaaaattttttgtttaaaatatccatattcattttttggcttttttcatgcaatttttttcacttttttcagctttgtatgcaacgatatttctgatggatattttccccattttggaacgttctcaactcgaactcaaattggcactgatttcgcccctttctatgcgctggtcgacaaacatttcgatggcgaaagtggattaagtcgtaagttttattttctttccaaattgaccattaaaatattttctaagctctacaatttttggttggcacttaaaaaaagtgaaatttttttgaggaattttctatttggcttatgtttcagagcatcgtaaataaaaaacgaaaatatttttttaaatcagaaattttttttgggaaatttgcaattttaaatttagatttttgcgctctttttactcaattaagcaccctattgagattttatgtgcttaaaattatttgatagattgagcaatttaataaattgtaacatttttgtttgaaattaagagaaaatcaaattttttgagtaattttgcaatttgatttattttcagggttgcttttgccaaattaagccatttttctaagcgcaaatttacttatttactaaagtattctttcacaatttcagctgggtgtgccacgaagtttcgatggacgttttgccttttttgaccatgcttaacttggcctcaaattggcattgatttcgccccgtttcgattagctggtggacaaacatttcggtggcaaaacggatttcggcaagtttttttagggttattgaatattttttaaggagtttgtgcccaaacggggcctacatttcaaaattgctctaaaaataaaaattttccaaatttggcaaattttaatttatttttgtaaatgaatatggcacttctttcgccatgtttcgaactttggtggacaaacatttcgatggtaaaaagtgattgttttttatggtttttgttgttttttaatgattttgtgcaaaaaagaagcctccaatttcaaacacttttgcctaaaagcaaaattcggtttttttgtaaatgtgaactattttagtgtttttgctttttttttgtaattttatattcttaagattttcagcaaccgccaaaatgtttggatggacattttcccactgttgaccgtcctcaactcggtttaaaattggcactgctttcgcccgtttcgatgttttagtggacaaatattttgatggcaaaaaaagtgattttttagggtttttaattaaggattttgtgcgaaaaggggcctccaatttcaaacgaattttgcttaaaagcaaaattcggttttttttgttgtaaaagtgaaccttttttttagggtttttgcttatttgctgattttttatgttagaaaatcacatacatttttaccaactccagctagacagatttatttacctttttcatgtaaaaatagtaactttttaagggttttcgttaatcatatttttgtattttataaaatatttcgttactttttcagcacataagcaacaacgtttggatggaaattttcctttttttgaccatgctcaactcggcctcaaattggcactgctttcgcccgtttcgattagctggtggacaaatattttgatgaaaaagcaaaatgactgtgggccacaaatcgaaaggactaacttaaatgtggtaagtatttaaagttttctcggttctaaaaatggcccgaaaaataaaaaaaattcaaaattcgtaattttttttgatttttttttgtgtcaggtttttttagtgtcttattgttacgtatttttggatttaatgatttttaagctgggccttacatttatatttttccattatagtcataaatttctttgtttggcaattacatggcataaaaaaattttttggaaattttgtatgtttttgcatttttaatagaaaaatttttgtttcgtgtaaaattgctcagagtttcggtcaacaaatttttgtccaaccctattgcttccctttccgctaaattattaattttcataatttcagttggtgttcagcgatgtttggatgggcattttcccactttttgaccgtcctcaactcggcctcaaattggcactgatttcgccccgtttcgatgttttagtggacaaacatttcgatggacaaacgcgaattttttcaaatttcggtaagtcttttgtttttgctttttttgtaagtgattggttttttttgtttacttaattgaagtcgtaagtttcatttttttcataaaattgaaccttatgaatttaaaattggtctctaaaatcgcagaatttttaagtttctgtggcaaaatcataaattatttaagaaaaaaatcaattacaattagcagaaaccttgcttgattttaaattatcacgtaattatagaaactttaatttttagaaagtttttcattttaaaagataatttagcaatttgttagtggaaaacccccataaagccagaaagacaaatatatttttactttttttcatttaaaagtaccatttttttttatgtttttgttaatcattttttaaaatttttttggattttaggagtttttcccttttttggcattgctcaacttggcttaaattagcaatgctttcgctcggtttcgatgcgttggtgaacaaacatttcaatggcaaaagcggattgctgcgcaagttttttttcacgaattaaccggttaaatatttttatgctctaattttttggatgcattcggcaattaaaaaattgaaattttcaaaattgtatcttcaaacatgaaaatcaattattgtgaatttttgaaaatctcaacattgttgcggtgatgctgtttcaatcccgcaaactttttgtgagattaaaacaattctctcaggaaattgctgtatttggccggttaaaatcaaattcatcgatttgaccatgatttgaataaa

SEQ ID NO: 64510 - DNA, 367 bp, Heterodera glycines
atgtatagagaaaatgcgagaatatccaatagtactaagaatgtaaaattggttgcctttaggcaaagttatgccgtgttttctcgaaaaattcgctaaaatggcggattttacgaaacgacttagcaccacgaaaatgtgtgctcgagtgccgcggggccaagcagtgatcagcggaatgaatgaatggattattatttgagaaatgatcaaccgatccttttttggatttgctaattgaaacaggaatttatttatgcttgctttctttttaaaaattctttaaattaaaaattcgattattttgcagttaacgaatgagagagaggtagagttcggacttttgaaaaaattccggaaaaaataa

SEQ ID NO: 64511 - DNA, 842 bp, Heterodera glycines
gtttacatcgcccgctgaaaaaaagaaaaaattttcctccgccgaccattgcctaatttcatctgccaaaattggtgaaaatcagcaacaatcgttgggttcatcatttgagacaacatttggagaagaacagaaaaagaaaatgaatgatcgaattttgaagaggaaaatgtgagacaaatttaaataattaattaataaaaaattttatggttagggttaatcccttcggactcaatcctaaaaggctcccccaccggtgtactcaaagccaaaaaaacgtaatgagggtacctttttggattttcattcaaaaattatttcccaaccatgaaaaaatgggttaattaatggccgtacatacaagattaatttcttagcatttctgttctgctacaggccaaaactatggaaaacccgaaacatatgctttgtatgtaatcgcgcagggaggggggtaaaaaggccataattacgtacccataaactaattaacaaaatttcattctttcagttggatttgcagcgatgttttgatggacattctgcccttttttgaccactttaaactcggcctcaaattggcactgatttctgaccgtttcgacattttagtggacacacattttgatggcaaatcagaattgacaatttggaggccaatcacaattcgcaagggccctgagccagacttatttgactgtggttccaactctgtgccgtttccgtcgcctgatgacagtccgctgcaactttttgtgaagggcaaatctgagggatttccattgccgcaccgtccgctgcccagcaaaatgcactttaaatgccttcaaattaagtaa

SEQ ID NO: 64512 - DNA, 341 bp, Heterodera glycines
atggataccgccgtactcgtgatcagcaaccccgaaaacctaagaaaaggtgagttttttatatgaaattccgaggaaaaaattttagaaaaaattttcaaaaaaacttactaattcatcataaatttcaaacaaaaaaaaatcgcttaaaaaatttttaaatattatatttttaaaatgttttcccggcaaaattttgacgggcgaaattttgtcttgtttccaggtgaagcaaactcgcaatgcgataaatcgcgagatttttttttcaacgaatttccatgtcttaaccaaaatcacatcagtgcatgctaataagataatgtagaatcaagaataaa

SEQ ID NO: 64513 - DNA, 719 bp, Heterodera glycines
atggtcctggattcggaattagtcgaaatggatgccggatccgtggtctgtgacctcaaaacccttagaaatatgtttccatgacttttgtaaatataaaaaaattttcgaaaaatttatgggggacaacctataatagagccaaatttctaagattattttcttaaagtttttaaatttgaaaattaaaaaaaaagtctcggccggctaaatttcgttcgtctcactgttcaggcatttctccgtgccaccactttggccgcttacactgttcaattttcattggctgatacaacgccaattgtgccatttgaattggtgaacgaacggacccaagaaaagctgacattgatgtacatcataattgaacatgcggattataatggctggcagctgaagcgatgcccaattagtgaaaaggcggcggatcaatgggaagacgaaattttggacgatttgaatggtgtgagcattgatttgcatgagcactttgacattgggtgagcaacgacggcattttttgcaacttttgtcaaatccaattcaaaaattatggcactcattttaggcaattgtctcctccaccagcaacagcaacagaagaagaagaagaagcggaccaaagcaattgaaaggtcggcgggagacaatgaccaacccgaaagatatcccttagaattttttatctggtagctgaaaaattttaaaaactttaatta

SEQ ID NO: 64514 - DNA, 813 bp, Heterodera glycines
atgaggttaccctggttgtctgcgcctgctgcctcatttgaagctaatgtccagccaatttgggatgtttttgcccgcgaaatttggcccatttttgcgccaaacattcgccacttgctcttgaccgttcgcgatcatttggacaatttgcgtcgctgcacttcgccaacaattctcaccgatctcatcaatttgaattcaatctgttctttttgtctgcgccctgatggaattgccgattttgatgggccaaatttaaatgctggccaagcgttggccaaatggttgcacattccgcgcactgatggccaaccgaagcgattgcgtttttgcaaagatttggaggaacaacataatttcgattgggtcaacagtttcaaagaggtggccataataattatttttgcgaaaatttgccatttgatttgatcaatttggctttttgtttaggcatttctccgtgccaccactttggccgccgcttacattgttcaatttccattggctcctacaacgccaattgtgccattcgaattggtgaatgaacggacccaagaaaagctgacactgatgaacgtgatcagaattggaagtgttaatggttggcagctgaagcgatgcccaattagtgaaaaggcggcgcttcaatgggaattccatattttggacgatttgaataatttgagcatttatttgcataatcacaatcaaattgggtgagcgacgacggcacttttgctgcttatcgaatattttgaatctctgctgatggatggatttgataattaatgttcttttttttctttaaaatga

SEQ ID NO: 64515 - DNA, 335 bp, Heterodera glycines
atgggttttccaaaggcaggccaagatcccggcgcaggattttgttgggttccaccagtccgttttttaaaagaaaatgatggaaaagcgaattttgaggaggaaaatgtgagacaaatgataattaattaatgtgaattttatgattaaggttaaatgattttcggactcaaatctaaaaaaagatcccaccggtgtactgtatttggggggggggggataccctcttgagattgaacttggaaaacatcattacatcaaccgttgaaaaaaaataaaataatttattaaactcattgaaaatttttttaacaaattttcagttggatttgtaa

SEQ ID NO: 64516 - DNA, 371 bp, Heterodera glycines
atgttcccaaataagcgcaaatgttctttcaatcccgattgggaaaagcaatatacttttgtcaaaagaagccgaaaagggaatggatttttttattgtgctttttgccaaaaagacatcaatgtcgagtcgatgggagtttcggccataaagtcgcacacggaaaacaaagaacataagcaaattaaagaggaacggcgtaaaagcacaacaattgagaattttgttcgatccaaatcgacgcttaattcaattgaccttcaagttgcaacggctgagggtcatttttaatcttttttaagtgtaaaaatttgtttttaggcacttttgcttaccatgtgtgtaattttaaccatttttcattgcatata

SEQ ID NO: 64517 - DNA, 563 bp, Heterodera glycines
atgaaagcaaaatcacaagggattgaacagaaagttcacgaatttttgagtgactgcccttgcatattcaaccatttattgatgaaaaaatggtgtgttcattggtgtgatgaattgacgtgcgcttaattgacagctggcgaggatggcattgattttgtcacgttgccgtggcctggagaaggaaacaatgcataaagggggggggggagacatttaagaatggaaaggatgaaaacgacaaagacaaaacgccgggaaatggtaattaatgaacgagccaaagaaaatttagaaaggaaacgattgaacggacatgcccataaaaggagttttttacactttttgtaaatgaaatttgagtttacctaatcacaaaattctaaaatctgaatctcaaaatgccttttcctcatttcctttttccctttcgcttttttaccattttttaaggtgcgttgtctctttcaatctgtgcccgtatgattttggcaaccgaatgcaagtgcacaacaatggaaaatgcacaaaatatgcataaaaatagaaaaatatacattaaa

SEQ ID NO: 64518 - DNA, 964 bp, Heterodera glycines
atgcgcatgaacaccggcacagcgtacaatgccaaatggtcattgagacgggcggacagttggtcaatgagtgcctggcataacgttagaattaaaaaaaaacaaaaattgtttttataataatctatctaataaatattgccctccaccaatgttagtacgatcattcccgccgtccatctcggccaggcacttccacaccgtacatagtcacgtcaagaatggcaaccaacggctgctagacgcccttcacctttaatttaaaaaagatttttcttgtttcttttttttataatatttttctgttattcaaagcaaattcagtgtggacaactcatttggagttgaagcaaatcaggtaaaatcaaacaattaaaaaatatatagaaaatattagcttaaaggatagagaacacgttgtcaccggccgattggcaattcttaattagttcttctgcgtgtcaccctcgttcacatagccttcaaaatgggcgaaattattaatgaataaattatataaaaaaaatataaattagaaaaaaaacttccaattcacataacagaaatgctatgctgcccacagacagaaagaagaacaatttatttacgtctgctgatgaatgcctttctttatccctatttttcgctatttttctacgtttctccctcgccatcccaactcttctctctctctctctcactctctctctctctaaatttttcattacagtcacggtcaaaacaagcaaaacaagaaacgaaaaaccattttactcagttgaacgtacaataaaaataaaggaaacaatgaataaaataagttattgttaattattgggaaagtattaaaatgtttaaggtgaaaaaattaagtaaagcaacggaaaaaatggagaaaaagaaaaggacaaaaaagaaaagagaaagtgcaaagaaagaaaaactaaactggaaatggaaataa

SEQ ID NO: 64519 - DNA, 889 bp, Heterodera glycines
  unsure (1)..(889): unsure at all n locations
atgcccaccggatggaaatgtgccgacaaggccaccccaaattttggatccgccgcttccgaacagaaattgcaaggattttttagagtgagacttcaatggcacatacataaatgacaaatctcagtcattgataatttgttttgattatatgtggattttaaaaatctcaaaatatcgtcccttttaaaagctaatctttttgcaaacattttttatttttactcaatttattttctataatatagcccccccccccctaaattagacccactctcttaaataaagctctcatttagaaaggggctgaaaaatcaagcacccagtggcttaattttagtaaatttacttaaaaataaaatgttttcgtcgacagattttaaaaatattttttttaatttttagtttttttgcgttttatttaaaaattgtcataagatataagcctttagtgattttgttgttttaagaagaagcggaatcaaaaaaaaaaaataaaccaagatatacagttgttcaccatggaagcgaaatgttttatgtgggtcaaactgtataagtacccgccatttatataaataccgttttgcctataattatgcctttttacctttcatttttaggtcagttcgtttggtggcaccgatgagcagcagcaacaacaattccagtgtggggggaagggcancacccgaggccgcgaagcggccgagtgagtaccttcggtgcaggaaaattattaaggaagagagttcattatttatttgttttttgcataattaatttataaatatttttttcagaaagggttctgaaacgcaccaaattttatttacatgttagtttaggcactctgatgctttttctatcaaattgggagatgaataaa

SEQ ID NO: 64520 - DNA, 451 bp, Heterodera glycines
atgagttcaattatttggcaaattgggttgtttaacaaattgcctaacgggaaagctgaatgtgttgagtgcaaggctaaccaactgcaaaaatttgagtttgaacggagccatggcagcctcaaatctttgattgtccatcttttttcaaagatccatgccaattcgacgtatgctgagaagtacagacaattggaaaaaacctcaaacaaggatgaatcccagaaaaaactctcaactttttttccatgttcaagcagtaatttaagaaatgaaatgactatttaaattttaaaataattttaggcactctcgctgtgatggacaaaaaagtggtcaattttttggtgtctaccaacacttcattcaaagtggtgaatcatccaacatttcaatcattgctcgcaccacaacatattaaagttcgttattcgttagtgtattaaaagaa

SEQ ID NO: 64521 - DNA, 1703 bp, Heterodera glycines
atgaactcaaagagtgtgaatcgatttcattcacgacggatgcgtggagtgggccaacaaacaatttcctatggtcagcataagaatgtaaaccttttaaagctgcattttagtttgactgctcatgggatcactcaaaattggacaatgaaaaatcatgtgttggcggtgactgaatttcagggaacacactcaggaaaagaaattgccaaattgttgtcaaaaatcatctcggactgggagatttgctccgcgaaaattcactgttttttgcgtgactctgcagccaatatgaaatcagtagtgttctattttttcatttgatatgttttgttttatttttaggcgttctcccagaccattgtggatgagaacggtttgacaacccaaattttggcatatgaaaatgtcagctgtggtgctcatttactcaatctcgtggtccaaaaaagtattaaatcagaaaggattgccgacctgcttaaacagtgtcgtaaagttgtcgcccatttcaaacactctaacaaagcattaggaatgttaaaggacatccaaatctttcttgatcttccggaccattcccttttacaagtaaatcaatataaatcttttgagccaaatgaccaaaatttaggaggtatcagtgaggtggaattcggctcttgggatgatttcgcgtctgtttgagcaacgggaagcgctgtaccagtacgccttcgaaaatcgtaattttgagatgacgttaacaaatgaagagtggggattaatcgaagaaatgatttctttgcttcaaccaatcgaagacgcatcaaagatgcttgtaaaagcaccattgtccggtgatttaaataaattaatttttaaagcccgaaacccagtttagcccaaataccaattgcactgacccttcatggaaaactttatactgccaaattaattaacaaagacattgatgtggtgcgttgttcattggttaatgagctcgagaaatatttttttgctctccgtgaaaaacggtataacattaatacacatttttcattttaaaactattatttaagagttcattgtttatcgacatttttggatttacgtttcaaggacaagtttttgctcgaaggacggaacatttttcttgctaaaatttcgtcatggctcaaagaggaacttgacgatttcatattgccattggttaatgaatgtgatgaaattgctttggctccgtcgcccaaaaaacagaagctttcgctttttgatgacctcaatgatattgcttcaacaagcaacaaggagaatgcaggcagttaaaaatttgagttttttaataaaaaaatcatttaagatccttcccagaattcatctgaccttgatgatgagctcaacaaatatttggccagtggttgtgtaaattcgcgcgaggatccgctgacagcttggcgacaaatggcacccaaattcccaattttgtcaaaaattgcgcgcaagtttctcactgcacctgccacgagtgtcccaagtgaagccacttttaaagtggcgagagacgtttacgattacagaaggtcgcagttgaagccagaaacagcggaaatgttaatctttttgaataaggcacttccaaatatcaattacagatattaaatttttcattatctcgcaattttatttttctactggtcaaaaaatgttatttaatatttgta

SEQ ID NO: 64522 - DNA, 108 bp, Heterodera glycines
gaaccacagtatgagctggagtgtttgaatagctcgaacaatgtcaaggatcggggtcggggaccgggggagctcggggacggggagcaaccctaatattaataatca

SEQ ID NO: 64523 - DNA, 647 bp, Heterodera glycines
atggcaaaagcaattaaaatgctctttcacttcatccgaatatactttcatcatctcttttttgcaataatcacggttatttacgtcagtttcgttaaagcaaacgaatgcgtagaacactttcgcatctttttcagccttttcttaatatgggcatttgtgcagtttcgttttgaggaaaaaagaggggaaaaatgctaattgatttaaatgtgaaacggtcagcgattttttgtgagtaaaatccgagatgggcattttatttgggttttataggttaaattgcaaggttttcatttatattcattaaattttcagcttaacggcacattgaacccacaaaaatttgaacgaatattttttattttgacagtgtcagaatttgatggttgccacactctctggccgtaaaccgcttttttttcgcggcacgctttttccaaaaaacttccgtgccatccctacaagtgacaaaccagcaaaaaattcatttttttattgaaaatttcaaaaggagtcacttaaaaatagtgtgttttttactaaaattaatgatggatttttatatgaggtcattgaaacggaaaagtgccccagaatttgcacaattgtttattaaaagaccatttttttcatttacttttgta

SEQ ID NO: 64524 - DNA, 76 bp, Heterodera glycines; identical to SEQ ID NO: 63674

SEQ ID NO: 64525 - DNA, 173 bp, Heterodera glycines
tgtctaaacgcattcgctttcttcgtttgggaatacaaaccgtcgatgttggattttggagagaaaaaatccaaatgataatttatattttggataattaagctttcattttatactctgctttcattgttaattcctgttttttgtacattgataaagttttcataaacatg

SEQ ID NO: 64526 - DNA, 345 bp, Heterodera glycines
atgactcgggaatattcagacagttacattctggagtatgtgtcggcgggtccaaaacaatacgccttgaagcttaagaggaaaaaggatggggtgatctggtacaagacgaaaatccgggggtttacactgaataaggacaatagagtggattatgaggagttcaagtcaatggtcttgagctacacggaaggagttaaaaaagtgtttcgctatcctgagaagattgggccgacaagggatagcagaatgctctcgcgggacgtgaagaaagaatattcgccagtgcagaagaaggggataattgatgatgactataatgtgttgccttttggatattattaa

SEQ ID NO: 64527 - DNA, 233 bp, Heterodera glycines
atgaccgtggatttgtattgcggcaccttgtcagatccagtgataatacctggacgcccaccgggacagattacggcggatgttgttttcaatgagtttatgcgccgacaacaatcataccgggatgtcaaccttttggaagaaagaatttcgatgaaaatgacaaccttttcattaccattgcggtaggcaaatactccatgaaaaaaattatatttttattcagaagatga

SEQ ID NO: 64528 - DNA, 487 bp, Heterodera glycines
acatgcaaaaattgccgtcagctgttaccgctctactcagaaacgggttcatctccacatcaatgaaacagtcgacggtggacagtttgatttggtcgatgaccaaagcgaagcgacagaggctacaagtgaccaaataattgaaattgcataaccaagtgtatggcatttgctcaattaaattttacaatcgcaggtcaaaaatggattcctttcccatttctacgacatttcccaagtgatcaccggctctttgaccatgggactgctcggcggaagcgacaaagagttccaagaactctgtgcctattttaaggttccacaattcaatctctgcgtttaatgaataatggacaattaatttcaggagcaagtttgtgcctttgttgtcgatattttcaacccggacaaagtccggtttacaacggtcgaacatttaacggaagacgtgaagaaactgttaatgtatcgaattggcttaataaag

SEQ ID NO: 64529 - DNA, 65 bp, Heterodera glycines
atgattgagccgataggaaaagccaacttaagaaaggcatgcgcagttagagacacccgttccat

SEQ ID NO: 64530 - DNA, 902 bp, Heterodera glycines
aaacaatcagatgagtacaaagcattggtaaatctgcgcgactcaatgcaaaaaaatcatgaaagcatcatgaaagcaatttcctttgctcaagaaatgattggaatggaaagaaaattggacgactataccaatgtaattatatcaaagttcacagtttttggcaaatattttttggctccggtcagacattagtttttcgtatttaagcgccatttatggcatgttctaatcgctaatttaaatatttttcttagagttacttttatatttgaaaaatcaattataaaaaacctcaatttttattgagttcttaaaaattatttgtcgttgagaatttaagataaataaatattaaatatttaaattccaatttaatttagaatgttcgtattccgattaaaaatctttttgtacacatgcgaaaattttgggacccgtcaactgacaaatcgccagaagctgttgaaattttttcaaaagcctgctacacgaccgaattggccaacacccctctgggcatactcaatgttgtaaattaagcagaaattaaaattaaatttgaaatttttccagtacattcatacccacactgtcgaaggttgcaaaatggggttgaaaccgaaccaaatctcgctcttgtccaaatttgtgcctttattacaaaaaattcgaatgaagcttggcgatcaaatggacaaagacgactttaatacacgcgtcccaggtaataggatgagcaaaaaaaggatttaagggaaggtgccaattaaagatcgcagtcttgatatattttctgatttcagtcaaagaattcttttttttagttctaacaagttggttcatggaaattgacacaaaggttgctcgaatggtgttgggaaaaatcaaaaaattaattg

SEQ ID NO: 64531 - DNA, 865 bp, Heterodera glycines
atggttggttccttttgtgccaatgtgacattcaaaaagaacccaacggaaatcttttggtttcaaagggagattttgctgacggctgttccaatcatggatcacgtacaaaattacgtggaaaatgaaatggtaggtcataatcgcaataacaaaaaccaacagttcattactattaatgatttaaatcagagttgccaactgaaaattttcaaaaatcagcatttgaaaattttattcaaaatgaaaaaatcaataaaatcagtaaaaatattttttacttgaattttttaagtcggcggggaaaatctatgaaaggagtgccatttgttaacagattttcacaaaaataaccaatttttcgattttgtgccaaagtttttggggtcgggcggtgccgataggctaaaaatgaccatttttgatgaaattattaaaatcagcataaacataataattcataaaatcacaaaaaaaatcatctttcaatgataacatcattaaccctttgaagtctgcaaaatgatgataaagcaacagagttggctaccctgctttaaataaataaaaagttttaaaatgattaatttaaaaatttaattttattcaggaaaaaacatttccaaagattgaaattggcttagtcaaaagtaaaatcgaccaaatgagtattgatcagccagtgaaagagaatgccacaattttcaaagcaatggttgaaatctttaatgaactcaacaaatatggaaacagaagataagtttaaattttcctccaaaatattcaattttttcaatcgaaaattaatttaaagcatattttgcaaaaaactaaatggtttttactcattctaaatttttccaaa

SEQ ID NO: 64532 - DNA, 272 bp, Heterodera glycines
acaacattgacaaagtagcgcttcttttggagctgtttgagcggcgacacttgcccctgacaaacgaagactttttccataatcttgcaattttgcgggattttggtccgaccggaaaatgtgctgtgcgagcatcgccgttttactacccacttgcaaattatacggatacgtgtacggcttcgtactatttttcgggttcattcatccatgcatgtgaatcgtacattgtttatttttttgtgtgatgaatggcacattttggagcaaaa

SEQ ID NO: 64533 - DNA, 950 bp, Heterodera glycines
atgttcggggaggaaaagcaaccgctgaatcacaaggatgaggaggatggcatcggcatcaaagtcagtttttggaacatatgtagcaacatccgatcatctctctattcttatcagatccaacatttaagggatgggaggagatcaagattcttttcactcagttaacctaataataattaatgagttttattaacccaataataataatgatttttaaaataaattttgcggaaagtggaataaaattgagaaaaaatccattttaaaatatgaccgatctgttaggcccacaaaaaaagataatggcatggtttaggaccaaatgaaatattaaaattaatataattatatttttatatatctattttattttcatccttttaagtcacggacacttttttaaattttaaaattttaagtccggacgcattggccgtattttggagggtgtcacacgaccgcagtaccatgacggaatgttgctgcatacggtcaaactttacaacattgtgcaaccaaatttggcatttttcgggaaaaaggatgctcaacaggtggattttcacgacgggcatttttcggcattatttttaatttttaaattaaattaaatcattttaatacagaaggtcctaattttttcgaatgctttttacatcaccgttttgaagctgttcgccatccaacaaatgaccgtggtcatgaatttcccggtccgtgttgtgccggtggaaactgaacgagacccgcacggtttggcactgtccagccgaaatcagtacttaagtgccgaagaacggcgacgggcattgtgtctgtacaatatgttggtagcggcacgcaatgccgcaacgaatggtgccggtttggcctcagttgcggcacaagcgcaacaaatgttaacccaagcggaaaagcatgacggcataaagcaagttttcatctga

SEQ ID NO: 64534 - DNA, 557 bp, Heterodera glycines
atggtggacaaaggcgaaggtgacagccgctaccaagaattgaaggacggaatttaccatggctaccagccgttgcgtgctcgcaaaacgttcacttacacttacacacccgaatttgtgccaggagcattgaacatgtaaaatttgaaacatttgttttaatttaaaaaatgaattattaattaattaattagtgcggttgcccgtgacctcgactccatcccatcggggccaaaggacgacggcgcacattaccaaatggtcacggcacacaaagtgaatagggccccaaaggtgcggagaaatgccaaaatataataataataataaatatgattaataaaatggcaaatctttaacaaagcattttatcggtgataaaatggctgaaacatttccaaaagttttgttaattctaaaatattttattctaatccaatctctccctctgtttaatttcttttcattgtcagcccgaagatccgtacgcgtggctccaaccgcaggccccaaaacagcagcaacaacagcaggaggaagtgacggaagaagcatag

SEQ ID NO: 64535 - DNA, 879 bp, Heterodera glycines
atgacttcaaaacgcaacgggactttgcaaaaaggcggtccgtcgaccaaaaaatgggattttcgagctatagggtaagcaatttttaataatatatttaagagaaaagtgtaatcaataatttttcaggaacaattttactgaggaaatggaaaattataaattaattgacgaacggtcgacgatttgcgaaaaatttggattcacgaagaacattacggaatttcggatcaattcggatgtgagacgccctgacgaagcgatgagggacgcaatcgacacaatgattaaggcggcttttaagactacggaagaaaggatgaagcggaaagtgcggatgtttggtgtggcaataacgggtgccgggcttgcttccccggtttggttaccgtacagggcgtacccgcagaacaatgcggatgttattatgcaggagattaataagttagggcagagcggggacggagatgaaaataagaaaacgcttttgttgtcggagcctattatgatgaaaattacttgcgtcaccgtgcccagtggagaagggccgagaaatgtacacaaatttgacttcggattcaaggaacaccaacggataaggtgagtttttgagaaaaaaaaagaaaaaacgagaatagaaaaaaaaagaaaaattataattatttattaaggatttcgaatgtggataaaatttgtttgttttatgcgttggtggcgtcaaagctttatttggaagtgcatcggaatatttttaatcgttttatgaataatattatgagacaacgagaggcggctgttgaactattacgtaattgtggaattgatattaacgaatatagctatggagtggaacacttgccgaatgttcagaattattgg

SEQ ID NO: 64536 - DNA, 1423 bp, Heterodera glycines
atgttcactccgaaatttgcttcattaatgtttacgggttcatgctattatgtaaacattagggttgagcggtaccggtaccggtactggccggtaattaccggtttttttggtaccggtaccggtaccggtaccggtttttttcaaaaatgaaattaccgttaccggtttgtctagtaccggtaccgccggtaaaaatttgcactggtaagaatgggggtctggtcgagaaaagagtaggaaattggtgaagaaggagaaatttttgagaaaaaattaaattttatttcatttagtcatgggattacacacatgcacatgtggtgtagtggttaaactttctacctttcataatttttcgcctgggttcaattccccacttggatagaatattcctcacattttttttaccattattttaattaaaattttaattttaaaaaatattccaacttttttctttcatgttaagcatcctaaaaacccaaaacttaatcaattggtcattttttttacaaattctgttaacaaatcgcattaaaaattacaaaatttttcccggcggcgcctatcggcaccgctggccctccttgtcccccaaaagtcttggaaaaaacgtgccgcgtaaaaagcggtgttgaaagcaaaaaaaggtcattgatttacattaatttacatggccggagaccccttcgcaaaattggaaaattggctgctgaccccttgttttgcaataatctgaattttgaggtctacatctgaattttagtgttctttatcctgaatttgaaaaaaaacttggtcaccctcaatatacatatacttctgaacaattctaatgctaaaaaacaggcactcgcgcgaaaactgaataaaaattttgtatttggaaaattttgtccaaaaatttttatgttctaaaattaccggtttttaccggtaccggtaccggtaccggttgaaaaagttggtaccggtaccggtaccggtttttgcagtaccggtcagtaccggtaccggtttttttgcaattaccgattaccgctcaactctaatagaaaccatggatttagacaaaaacacccataaaaattgactattctggcataatttataatccttaaatttggtcatttttagacaatatctgtgcaattataccaaaaaagaatggaatcgaggcgatacatcgaataaaggaatgtggagccaaacacatcattcaaaaaaaaaaaaatttttttttgagattttttggaactaattaaaaacaaacccccgccccgttcccgggggcgcgaaatttctcacccccgcccccgcccccgcgactctgacccccgcaatcccccgcccacgcgaaaagccacccccgcaaccacggggtccgaaccctagtttttcttattgttagaccgatgaa

SEQ ID NO: 64537 - DNA, 75 bp, Heterodera glycines; identical to SEQ ID NO: 54636

SEQ ID NO: 64538 - DNA, 1412 bp, Heterodera glycines
atgggacgaaaagaagacaactttggtaattttctcatttttataattaggggtggatttgagtcaattttttttgctgtttttaaatgaccctaacctaattgaaagaagtattttattctttgtttgaagcaatgcatttttgttttatttttttcaacattttggagatattaatgtggttgaaatttttagcttgaactgtttggaaaatcgacatcaaaggattgtgttgttcagtcgccaaacagaacattgttttgtgcatgtgaaggcccgttttacacccaaaatcgtccattaatagataattctcaattttttggtacgtttgtttctaaaaagtatgaataagataaaaaaaaatatttattatttaatttcattggaaatgatttatatttgtattaaatactattaagcgaaagttagggacaaacccgagtaatcaaattcacgaaaatgtggatatacctgtacacattgtatcacttattgtacaattgaatattgataatttatagaaaaataacaaatataaatccacctttaaataattaaattatttaaaaatttttcccaataagatataatactttttactttgtcttcttaatatgcatatttttatagcggcaatggatcctttttggtcggaattaccagcacgaataattggcacatgctgcatggcatcagaagagccaaaatatcgcggagatgatggtggttaacagggttgtcataaagagactttagcctcattttgtggctttttgagaagccaatgatgctaatgttttcaaatgaggcttttgttttgttttttgggaattttaagatttttgggaaaacttctgaaaaataatagctatttctaatcaaaatctaaggcttattgaacgcggatgatatttcttctcgtctgtcgaactgctcttgctgcgagaaggtattgactagtgatcgaactggccaaaagcttgatttaaaaatttgtaaaaaaaatttcttaggagccaaaattgttgaagatttccatcgtaagagtgtctacttttaattaaattaatcaaatttatttagaaaaacaaaatcagtgacacaccagaatgccgaaaaatgattgaagaaatgaggaattgtatatgcccaagccaagtggataaacgggatgaatactaccgtgacgtattcctaattgattttaaaacttttaatagtaaactgtttttaattcgattaaattaggcaaaaccagttgattttctgccacactcgtgcgtggaagaagaaggttggccgcaaactgattgctgtcccgaaaacacccgcgttgaatgttgcgcattccatgaaacggtttatcagactagcaaaattgctttggatatttcaaattattattttaa

SEQ ID NO: 64539 - DNA, 674 bp, Heterodera glycines
  unsure (1)..(674): unsure at all n locations
atgggacagtaagttatttgttgagatagcattttatcctcaccagaaataaaaatcttcaattaaatcctcatgttgtcatgaaacaattccttttttaacatctaaaattcaaaattaagttaatactgtaaattttgaagatttttatataaatccactaattattttagccattaaattgccttgaatgtgactacaatgttttggaagcacgactgataatgctcgtcaaaatagaggacgattcaccacttttttgcgagttgaaaaaatcctgcaatccgtactttttcttattaattatacaaaaatttttcaaaattttttaactagtaatttgtcgggcttggcgaaatttggccgccgtttcaacgcacacaaagaaaaatgtgctgcattgatcaagcagcagcagtcgtcaccatcgacggagcttaaattggaactgcgtcaggaattcatggactacagcaaggaagggtcctttctgatcgattaccttcgtgatcattgatcagtgccagaattcggacaattccctcncaaaaacncacaaaaattaataatacctttaacctctcccctcccaaaaaaaacccacaaatntaattcctttatccccctcccccaccaaaaaacgaaaaacaagtttcttcatcccacaacaaaaa

SEQ ID NO: 64540 - DNA, 785 bp, Heterodera glycines
atggaaggatatggtgattttttctctatgtttccttcccactatactaattttctcaaatttcctttcacccaattttgaaaaagtctgaaatgtataaaatagaaaaaatgtcgaaaagttttcagtttatgaaagccaaaaaatgaaatatgctgatttgcagcactaaaatacttgaaataaataaaccgactaaattatcggaccaggaaataacgtcgccagccgaaacgtcgccgggcgaatttttggaccataacttttttcctactcaaccatattaaacattcttggtattgttccaaagcttatgaaaaactcttgaataatttattttattttcacatatttttgtcttttttaattcctgtgatcatccatatatttttgtcacttactctacgacatttatctgaatagtcgtcagagtaagtggttctcgcccttctgatgacttttttattttttatgaataaataaataaataaatgtaaaaaaagtgatgaaaaaaataaatgctaaataatacatgaaagaacaaaaaaataataaatacaaatatattaatagggataacatttatagttgctaaaaactgccaaaataattaatttttagtttctaaaaaccccaaaatagttgctaaaaatgggtaaatagttgctaaaaacttccgaatttaggtgtgtaaaatgacaaaaattttattcaaaagtcaacaaatattaatccaaatcattattgagataaaaatttttaaaatagaaattcttgtcaagaaa

SEQ ID NO: 64541 - DNA, 153 bp, Heterodera glycines
gatcttttaggccaagccaaaatttttgtttagtaatttattttgtttattttcatttttatttacaacagtgtccaattttctggtgtccatttttccattggtgtccaattttcggtgtccaattttctggtgtccaatttaccgggagcc

SEQ ID NO: 64542 - DNA, 304 bp, Heterodera glycines
atgcgaagaggtgcaacagtgattagaagaggtgcaacagtgattagaagaggtgcaacagtgattagaagaggtgcaacagtgattagaagaggtgcaacagtgattagaagaggtgcaacagtgattagaagaggtgcaacagtgattagaagaggtgcaacagtgattagaagaggtgcaacagtgattagaagaggtgcaacagtgattagaagaggtgcaacagtgattagaagaggtgcaacagtgattagaagaggtgcaacagtgattagaagaggtgcaacagtgattagaagag

SEQ ID NO: 64543 - DNA, 400 bp, Heterodera glycines
taattaaatccattccttcgggggaccgtgccgggtgccgcggggtaagcagtgctggttcgtttcatcacggcaccgaaccttttggctagtcagcaatcgttgcttaacttgccagatcggacgggtgcgcatgattccactgttccaagcaccccaccaaaagcaaaacgatataaccaaaatataaggaaaaattttttaaaaaattttttctccatcttcctttttgatactaaagcatcagagtgctaaaattaagttgtaaataaaaatttggtgcgctttagagcactttctgaaaaaaatatttatgaaacaaaaaaatcgatttttttcagtgtccgtttggggtactcaaacatttatggggagcaaaaatcccacgcagaattaaagt

SEQ ID NO: 64544 - DNA, 744 bp, Heterodera glycines
atgacgttttttagacttgcattttttgcaaaattatttgcaaacataagaattctctttaaaaagaactttaatttaattgtaagaaaataaattttgtgtcactttaaaaaaatggaggtttgatcgaggaaatttaggatttgaagaatcaaaacatttaataaattttttatatacaatttttgcactatattaaaagtcccgcattttgaattttaccaaaagttaaaacaacagggggaccctttggtttgcaaaaatttttaatgtatattcatgaaagtttattccctggggttattggggtccatgacctcatattagatgtcagattcgtgatcagcgacctctaaaaccccggataacaaattttcatggttttttatcacaaaaaaaagttttgcaaaacaaaagggtcaccccttttgtttttgataaaattcaaaatgcgggacttttaatatagtgcccaattttttcttactttttcgagtaccctcacactcttttttttaaataaaaaatcgcataatttccagggtgttttcccattttcagcttcattatgctgccctggtgtccacccaaatgttggagacactgcttgaacaagaggcgggcaaggcgttgatcaattcgcggaacaatgcgggcgaaacgccgtcaatggtcgcgctgcgggcggtcaatccgttgtgcatgaaaacgctgttcaaccacgggggcgacctgttgaataaa

SEQ ID NO: 64545 - DNA, 645 bp, Heterodera glycines
atggcattaaagaattttattaaaatgtcagaatgggtaagtaattgttaattcattcttcttcataagatgaaaaattaattgaaaatgtgaataaaaaatgctaaaatggaaatattctatgattgcaagcgtttatggcgtgtaaaaagtcaacagaaaaagaaatgctagcaattacatattagtaaaattatttatttataaatttaattacaacaattttccaaccatcaaaaataaaggaattcatttttttttctttttaaaatatagccaaaaaccaaaaaaaaattattttatttggttacaaaatcgtagataaatatttaaagtttcaatccaaaaatccataaaaatgattttttgggcaaaatttgttaatatttgcactctaattttcaatatttccccctgcggctcctattggcattgatattttttaaaaatcgaacaaaaatttacaaaaagtggtgataaaaactccgaaaaatttagattgaacaattttgacactgactttttttaaaatttaataaaataatagagaaatatttggctatctaatcatatcaagagttgaattaattaactttgaacaattttcatacatttaagctatcttacattttttatgacaataaa

SEQ ID NO: 64546 - DNA, 282 bp, Heterodera glycines
atgcccatccaacgaggccgcgggttggcggaagaacgcttcacaaaacagtacatgaacacggagctgaaaatgttttcagaactattaaatgaaaatcaattagaagcaattaagcaaattaatgccaataaaacttacacaatgtcagcaaattcaatgagggcacaagtgaagaagctgaaacgaattgcattaacaaattgtaccgaaaagggcagtgatcaggatcagaccccgaattcaaacaaaaagtcgaaaattcaaaactttcaaatttag

SEQ ID NO: 64547 - DNA, 661 bp, Heterodera glycines
gttttcggggcagtccccccgaaccgatgcgcccagatttatggggagaccgaatccttccggaatagcttccctatagcctgtactttaattctgcgttggatttttgctccccataattgtttgagtaccccaaacggacacttgaaaaaatcgatttttttgttttcggggcagtccccccgaaccgatgcgcccagatttatggggagaccgaatccttccggaatagcttccctatagcctgtactttaattctgcgttggatttttgctccccataattgtttgagtaccccaaacggacacttgaaaaaatcgatttttttgttttcggggcagtccccccgaaccgatgcgcccagatttatggggagaccgaatccttcgggaatagcttccctagtctgtactttaattctgcgttggatttttgctccccataattgtttgagtaccccaaacggacacttgaaaaaatcgatttttttgttttcggggcagtccccccgaaccgatgcgcccagatttatggggagaccgaatccttcggcagtagcttccctatagcctgtactttaattctgcgttggatttttgctccccataaatgtttgagtacccctaaacggacacttgaaaaaatcgatttttttgttttc

SEQ ID NO: 64548 - DNA, 1086 bp, Heterodera glycines
atggcacaaagcaaatggaaattgtcaattcccgttggcaaccgttgccaattccgtcgccagacaaagtcaacggatttgaatgcatcgagatctcgtaaaattggcaaaattcaaaagtttgtcaacatttcccattcattttcagttacatagaccaaaatgtcatcaaatttctcctccgttttcatcaacttttcacctcctgtccaattcatttgatcatcaacgtaaccgatgacagaattttggagttcattttgcgcaaaatttggccagtgttcggaaacaaacttcgtggtatgttttgtttacgggtgtttatcgccgttttcggaaattcgtcccctcacttctcaacgattgtacagctgttcgcgttctctctttccacaacaatgccatgccgtttggtggacaagcggtggccaaatggctttttactcgccttccggacaatgggccaaaggtgttaagttgctgtctgctcgatgatgcaaatttgaagtcgacaattggtgtcatcaaagcggtgcttaccaacagggctgcaaaaaatatgcacgaaaaatggccaaaatatgcgcataaatatgcaaataaaatcgtgaaatatgcatcaaatatgcacagaaattgcaaaatatgcatcaaatatgcacaaaaaaacttgaaaattaggggtgcaaatttattttaaaaaattttcttcactagtgcacttgccaatgagctgctacatttcttttataaaattctctttagcaaatattgacattttttaaatcaaaaattttctcatgaaaaaaaaaatttgggggaagaatttttgagaaaatttccaattcttagtggtgtttttaaaaattttcggtcgattcttaggggtgtatttttttgaattttttagggccgattcttaggggtttccgttttattgaattttttttaacaaattttccaaaatatgcaaaaaatctgaaaatatgtacaaaaaatgtcaaaatatgcatgaaatatgcagaaaaaccctaaatatgcaaatatgcacaaaaatcccgaaatatgcaaaaatatgcaaataaa

SEQ ID NO: 64549 - DNA, 850 bp, Heterodera glycines
atgccatcgaataattcaagtgccattgaacgcagtaaaataagaaagaaaaaaaatgaaggagaaatgaacgaaccttatgctgtcgctgatgaaaggtaattaatattaatgagggggcataaaataattaacggcaaaacgatgacccaacaaaatggaaaagaactgaaacattatttgaattgtattttctcttttcaatcattaaccaataaattatattgctcggacattacttcgtttcgaattgaaaatttgcgaaaaaattatttacataaattcttccaatgcaaaaacttttgcatatttttttagtttagtttattaggccccctattatttaaggttagggatgtgcgagagtctcggttcccgactcgggaaatttcccggatttttcgcttgccggtctcggttcccggtctcgggtttttagtatcggaaaccgcgaaatttttacactgttaagaatgaccctttcggggagagggtcgacggtaaagggagaaaagaggaaaaagtccgacggtgccgttaggcgtcgccggatttttttttattagtaatttcgttctgatttgttaatagattttcatcaaaaagactaatttttttctgtctgtgtatgaacactgactcactccgttccccgtccatcctgccgtttccgtcatcttcgccatgttttctgcggcaggacgccgtcaaattgcacctcgggtggtgcaaaagtatcgatattttgacattgacttctcagtgtgtccattattttgaatttgcattggctacacttgaaagattaatgggatttgttcagcgccgaatgaatgcatagtaaaataaa

SEQ ID NO: 64550 - DNA, 1814 bp, Heterodera glycines
atgaatcgacggtaaggaaattttttttagaaattagcaatttttaattccaattagcaatttttaattccaattaaccatttttaattccaattagcaatttttaattccaattagccatttttaatttcaattagcaatttttaattccaattagcaatttttaatttcaattagcaatttttaattccaattagcaatttttaattccaattagcaatttttaattccaattagcaatttttaattccaattagcaatttttaattccaattagcaatttttaattccaattagcaatttttaactccaattagcaatttttaattccaattagcaatttttaattccaattagccatttttaattccaattagcaatttttaattctaattggccatttttaatttcaattagcaatttttaattctaattggccatttttaattccaattagccatttttaattccaattagcaatttttaactccaattagcaatttttaattccaatttttgtttctcatttcagttggatttgtaacgacgtgtggatggacattttgcctcattttgaccatgctcaactcggcctcaaaatggcactgatttcgccccgttttgatgcgctggtggacaaacatttcgatggcaaaacggaattgataatttggaaatggatagtaattcgcaaggacaacggaccaaaatcaaaactgtctgtatgggtcgatggcaaatttgtgggatttccgatgccggaccgtccgctgcccatcaaaattcgatttaagaagcttcagattaagtaattttagacttttgtatatattaaagcaatttttatatttcttcagttacattgaccattctgtgctcacatttcttcgttccaacaagcaaatttgggacagaagtggcatcaaattggaagtgtttgtgtattcatttgatacggatgtccaaccgacttgggatgtttttgtccgtcaaatttggcctatttttgcgaaaagcattcgtcatttgggctttcgcaatggcgatcatttggacaatttccgtcgtcgcacttcaccaacgattctcactgatcttgatcaattgtattcaatcgattccggtgctctgttccccgatggaattgctgatgatgggccaaatggaaatgctggtcaagcgttgaccaaatggcttcacactccgacaaaagatggacagccgaagcgattgcgttgtaatggttatttggatctaatgaatctcgaatgggtcaacaacttcaaagaggtgtgtctcgccatattttctataaattgttttcgtttttccattttttgtgtttagacatttcgccgtgccaccacttctgtcagttaccatattcaacttttttttcatgcggaaccaaagccacttgaatcatttgaattagtgaacgaagtgacaaatgagaagctgacactgaagatgagcaaaaaatacaatggatcagtgtataattggctgttgcaacggtgcccaattggggagacggcgacggcgccagttaagtggaaaaaccgcgaaaattctgatgccaattttaattatatcatcagatttgatccttggcatgacaataattcgggcgccaatttgaacagtgtccgatttaatttgtgtgcaaatagttgcattgggtgagcagcaacagcaatatattattttgtcgaaaaaacaattaattaattcattttaggccattgtcgccaccaacggaagaagaaaaagaagaagatgaagcggatcaaagcaacaaaaatgtcgtctga

SEQ ID NO: 64551 - DNA, 739 bp, Heterodera glycines
atgcatgaaagttttgtggccaaatttcgtgtcatccgaccgcaggccaatctgatcactttggacggggacaacaacaacgacatcattctccatgaagaagcagacgaagatgaagcaatagctcgtcagtggaattttgcaaaaaattgcattttttactgggccgtaaaatgctgtcacattgttagcacttttcgcggttttttaaatttttctaggccaactttaggagccgttgaatacgaatttgacattttttagaaaaaaaaaacaggaccacatagattcgtttttattatctactaaaattaccttaaaattaaaaaaatcaaatcaaatggaatgtaattgccccaattttgacgaaatcataatttttctgcagccaaattaattaattttcaaattttgcatgctaattgaaaatatggccattcgctaaatttttatggttatgatttgaactggaatagtgccacttttttttttttgcaaaaattcgctgtctcaacatggaatttccttttttgagagccctgtacttcttccgccggacaacagccgaggccgattggtggtggtactgctgacgaactgcaacaggaggcggaggacaacgaaagtgttttgctgaacggcgccgaatcgccgacccccggcgccggcactttgggctacgaaattttggcggaggactccaaaacgcctgccccattctatgaaatgatgagcgaaa

SEQ ID NO: 64552 - DNA, 383 bp, Heterodera glycines
aattgaacgctaacggacgacctaatggaaaaaaatccccgaaggagagaatttaattaaatccattcctttgggggaccgtgccgggtgccgcggggtaagcagtgctggttcgtttcatcacggcaccgaaccttttggctagtcagcaatcgttgcttaacttgccagatcggacgggtgcgcatgattccactgttccaagcaccccaccaaaagcaaaacgatataaccaaaatataaggaaaaattttttaaaaaattttttctccatcttcctttttgatactaaagcatcagagtgctaaaattaagttgtaaataaaatttggtgcgctttagagcactttctgaaaaaaatatttatgaaacaaaaaaatcga

SEQ ID NO: 64553 - DNA, 594 bp, Heterodera glycines
aaacaaaaataaatcgattttttcaagtgtccgtttggggtactcaaacaattatggggagcaaaaatccaacgcaaaattaaagtacaggctatagggaagctattccggaaggattcggtctccccataaatctgggcgcatcggttcagggggactgccccaaaaacaaaaaaaaatcttttttttcgagtgtccgtttggggcactcaaacaattatggggagcaaaaatccaacgcagaattaaagtacaggatatagggaatttactccagaaggattcggtctccccataaatctgggcgcatcggttcggggggactgccccgaaaaaaaaaaaatcgattttttcaagtgtccgtggggggtactcaaacaattatggggagcaaaaaccccacgcagaattaaagtacaggctatagggaagctattcccgaaggattcggtctccccataaatctgggcgcatcggttcggggggactgccccgaaaacaaaaaaaaatattttttcaagtgtccgtttggggtactcaaacatttatggggagcaaaaatccaacgcagaattaaagtacaggctataggga

SEQ ID NO: 64554 - DNA, 105 bp, Heterodera glycines
atgcaactgttggaaatcattgtttccgaaaagacgtccaaggaggcactcgccgtggccgccaaactcggcctggaccagaagaagctgattgtcgtggtcaag

SEQ ID NO: 64555 - DNA, 461 bp, Heterodera glycines
atggtaaatgtagtcgttcctgtgggtatgtaagttgcttcaaaaatttcatcacatttaaaaattttagaaatattaattatactaaaaactccttgttcattaaaatggatcttgaagacaaatccggagtgatttatggaataaattgctatgaacccaccgttaataaaattataggatataatggagaagaaatcaatgtatttgaacaggaacaaaatgtatgaaaaaataaacaaaaaaaaagtgaaaatttttttagtggttggcaatcaccgatgcatttgacaaagttttatatgaagccgcccatttttttcgtctttttttaaaaactgtaagaaatttttttcaatttaatgtattgtttttttcaggatggcgcaataaatgccactgattttgaaagaacaataactaattctttcgattatttgagtgtttgaacagtgaactga

SEQ ID NO: 64556 - DNA, 543 bp, Heterodera glycines
atggaaatgttatctatattattaaactattttaaaaacaattttaaaaaggtaagtaaaaaaagactttgaatactaaaaaaattttttaaggagtcctttatatggtatgataataaacaagagctgaaaaatcgtttaaaatgccaggattctaattacaatttggctattcatttggacactagctatccctacgaagaatttttggatgtcgggggcaaagattttttatttacatttctgttttatgaaaaaaatgttcgatgttgttgtggcaatgtgatcggtacttagaacttatttcataatgggattgtacggttggagaatgagaccgaaattatcgtttatttttatcgggaaggagcacagcgatttgacagaaacaatttatatttgagccgtctctacagaatacgtatccctcttagcgcaatattgacatggcttcatagaactgagtgtctaatttcgcctgtttttataattctgaaggctttttttgtaatttatgacaggtttttttctttttttttaata

SEQ ID NO: 64557 - DNA, 292 bp, Heterodera glycines
atggcaacaaaaatggcacaatcatttggcgcgccattaaaatgcgcacagtgccaatgcaaacgaataacaatgacaaagaaagatcaatcattttggagtcatcaattgcctttaagaaattgttagtacatattttatttattaaaatattaagcaaaaatgcgtaagtgaactcttttttgtaattttaaaatttttaatcaaaaaaaaaaattatagtaaaaagattataaattattaagctatacattgggagcaggaaaacggctttctctgcttttcgactgga

SEQ ID NO: 64558 - DNA, 449 bp, Heterodera glycines
atgccattctcagatttcgctgggcgtgccatgcaaaatgatttcctccgttcaaatggtccgtcttttttgtcggattatgccgacctttggcttcttgcgttagacatgctgccgatggcacaccaaacagcagaagagcaaagagaacagctgaagatggagctgttcatcagccgcagctccaattgctccatggaagcatgggtagaaagaaaggcaaatccgtccgatcagtgaaatccaattttttaggtatttaactattttcctttatctgggttatgtggatatataacatttagtaacaattttcccagcctaactatttgatcaaatttaattcccttaagtttgtccaaccgtcggattccgttggagcatccgatccgaaaatgccattcgacgattcggtgtgcaaactgaatccgattggaagaaaaacatga

SEQ ID NO: 64559 - DNA, 61 bp, Heterodera glycines
ctgtgtattatcactttatttccatctgtgttccgaaataaattgaattgatggtcattaa

SEQ ID NO: 64560 - DNA, 317 bp, Heterodera glycines
ggttcgatgaaactttttaaaatataagcctaaactttttggcctgtttaaaaaggaattaaaaatttttaaaatatttattcatctcccttttgatagaaaaagcatcagagagccttaattaacctgtaaataaagttttgtgtgtttcagagcactttctgaaaaaatacttatgaattaattttgcaaaaaataaataagtaatgaaaaagtcagaatttcgaaaaattttaaaaacaacaagcgttggcattttttcaggttaagttagtactttacaatggagaaggcctgcaaaattggagagattatat

SEQ ID NO: 64561 - DNA, 324 bp, Heterodera glycines
  unsure (1)..(324): unsure at all n locations
tcagtttataaaaaaaaagttaagcctaaaattnttcgcatgtttaaaaagcnaataaaaatttttagattttttattcatctcctttttgatagtgaaagcatctgagtgcctaaaataacttgtaaataaaatttggtgcgtttcagagcagtttgtgaaaaaatatttatgaattaattttgctaaaaaaataaaatagtgaagctttaaaaattaataaaaaattttaaattcagaattactggagttagcatcatagcagtgcttttccttgtctttttgatgccctcgcaaaatctggttcgcttctgatcagtttat

SEQ ID NO: 64562 - DNA, 655 bp, Heterodera glycines
gttaaatgcaaaactgttgtgaaaaattgttataactccattcagagaagagatagaaaaaaaaaaataggtttagagagcccatgaacagctgaatcggatgcaagtaccgccgttgctgtacgcctaacagttggtgagcaatgacggaaaattgcttaaaaaagaaaccaaacaaactcatcaattgttagctcccgttgacaaaccgaagggtacattggggcaatggatgttgggctaccgtatcagttattaaaattgttgtttttcaaaaaggatactaaaactgggataacccattcagagactagtcaaaaaaaataataataggcttggactaccatactaattagaatttttagaatgtgtctgttaaatgcaaaactgttgtgaaaaattgttataactccattcagagaagagatagaaaaaaaataaaaataggtttagagagcccgtgaacagctgcatcggatgcaagtgccgccgttgctgtacgcctaacagttggtgagcaatgacggaaaattgcttaaaaaagaaaccaaacaaactcatcaattgtttgctcccgttgacaaaccgaagggtacattggggcaatggatgttgggctaccgtatcagttattaaaatagttgtttttcaaaaa

SEQ ID NO: 64563 - DNA, 436 bp, Heterodera glycines
atgtcaatgcaacaaaatcaagggtccgatgatgctttgccaatgtgggcggtaccggattttgatgaaatgggccaaatgccgcagcggcaaaaacaaaaaaaaatcccaacgttgaaggagtttcggaaccaatggaaggaacgaagacttctgtgggagagggaggaagcagaaaaaaaagaccccaaaacatggaagaagaggaccgatgagatgaagaaaatctgtgaggagagattggagcaatcaaaaggtgcaggcggcagcaacaaacgacaggagccggacacatacacttggaactgggacgaactactgcgccaagaaagagaatatttggacgggggtctatggggaaaatgatgagataccccccccccccccttcacctccctcccgttcgattgatcgattattttattttctatttgaa

SEQ ID NO: 64564 - DNA, 1157 bp, Heterodera glycines
atgaaaatattattaatatttttattattatgcgcattaatattcaaaaaagcaattaaccaaattgaggctggcaaaataacccaagaaaaaagttttgctgaaatatttggccaaacatgggacgacggagcagaagaagaaaacatctgtcaaaatgatcaaataattcatggagaaattgctgatcagaataaccaattaggacaaaatgttcgtcaatttgatcagaattttgatgaaaatgtggaagtgaaggaagaggagagtgaagaaatgtccacggattatgatgaattgggccaattgccaatgccaacaaagaatggacaaagttgtgatcgtttttcaaatgaaactaataaaaataaaagagaaattgtggaaaaatttcataaaataaaagagaaattcaagcaagaaaaaaagaaatattattctggaaaagaatggcacaaaattgaaagaaaaattgctcaaaaatcgggtgttaattacgagaaaatttacgaatggaaaagagaatttggaatgatgatccataaaaattcggaagatgaaaaacgccaaatattaaagcgatttgatcaaatatatgacaaattaaaaatgaaattaaatggaaaattggatggaaaaagaatgaaatgtaaaaaaataatagcaaaacatttgggcattgaaataaacagcatttataaatggaagaggcaattaaaaaatggaaaaaccgatgaaaaaattgagaatcgaaaaagaaaaattgttgaaaaatatttgaaaacaaaaagtgaatttatgcaaatgggaaaacatccggacaaggaatggaaagaatttagagcaaaaattaaacaaatgtttggtgtaggttttttgacaattgaaagatgggccaagaaattcggcattaaacaaaatgtttcaaaaggtcaaatttaaatatttcttcacccatttttaatcttttaaaattatttttagaacgaaaagttctcacaatttgtgagaaaatggaaaagatgaagaaatattatcagatgaaaaaacataatccaaagctcaccgatcgccaaattgccgcagaattgggaatttcaacacgcgcattatgcaaatacaaatccgatttaatgagagatgaaacgaaattttga

SEQ ID NO: 64565 - DNA, 350 bp, Heterodera glycines
atgtattctttccgttttttcctcttcgtctttttgttcatccattttcgtttcattggcacggcacaaattgtgaatggtcagcagctggacagcaattcggaggtgtgtttttcgtattgtatgtcaatctcccctcctttttaagcagcttcagtctaaccaaacgtacagtgtcaccaacgtcgaccgcatgtccaatgcgttccattcgccaacggacaatcagacgacttctcttctcggagacgaaaccctcaaacccagcgacaacgaagcgaactgtacgactacggaaaatggttgcgagttgaacgatggcaaatattgtacggactgtaaaacaattg

SEQ ID NO: 64566 - DNA, 984 bp, Heterodera glycines
atgcatcgcgaaatccgcgaaacaatgcatatgcaactgcacagatgcagtgacagttggtgtggtcctagcgacccaatttacgggcggtgcaagaaggggttcccagccccttactcaaaatgtacgattttgcgcccggacaggcccgcgatgtatttccggccttcaccatctgatggtggtgcccaattagaggtaaacggcctgatatacgacaactcacatgtcgtgccgtataatccttatattctgctgcgttaccgagtacaccataatgtactgtttgcatatggtaacaaagcaaatattaaatacgcactcaagtaccctttcaaagggccaggacattgttatgtcgagtgcaaagaagagtccggcaataaaattggaattgatgagccggctcaatatgccaagatgaacttccgtggtgcaacggaagcatatgccattgttcattcaatgccatttgcccgtctttcgcatcatgttgtcaaattggcaattcatttgccaaaccaacagcccattgtatatagggcattccagctggtgagcaaagctcaacaaatccagcaaggcgaactgccagaaacgcagtgttcagcctattggaaacaatggcaaaatgagtggaagaatgatccaaagtttaaggacattcttttcgaaaaagtcccagagcggttccgatgggcaaaggacaaatgggtcctgtacaaaaggcagcaaattaaaaggccacctatcggccgaattgttcctgtacccccatcggacccggaaaggttcgcgctctattcacttatgcgtcactttcctggagacccagaccatcttaagatggttaatgggttgctttgtacctcattcactgaggctgcaataatgcatggtcttcttgaagacgacaaaatatgggacaaaactctggcggaggcagctctgtcgcgctggacagatcagatgagatggcttttt

SEQ ID NO: 64567 - DNA, 49 bp, Heterodera glycines; identical to SEQ ID NO: 51181

SEQ ID NO: 64568 - DNA, 399 bp, Heterodera glycines
atgcgttcaattgctgggacattttggttgttgctgtttcgcttgtctcttttgtgctcaaatcggacgccatttcggtggtcaaaattttgcgtgtgctcagagtgttacggtaggcaaaaagaaaacattggcattttgccaaaaaaaataattttaaaattcaattaaaaacattttagccctctccgcgccatcaatcgcgccaaagggcttaagcatgttgtgcaatgtgtgattgttgccgtcaaaacgattggtgagcatttttttggggggggggggggattttttaaatttaaaaaaaaatatttataatttttatttaaggattttgattttgtttttattattttttaatttttagggaatattatgctggtcaccttcatgcttcag

SEQ ID NO: 64569 - DNA, 361 bp, Heterodera glycines
tccaactgtcttccgcttcatcaacacaatttgatatgagaaaagtcaattgatgcagacattgcacgatgcgtcgctggtgaagtccctcctcaaaaacgcgcaaatatcgtgccgtcgatgcgagaattctcgactcttacagggttacaataccatcaacaacatcaaccatgcttaccaaaatgatcaaaattaccatacaatgttaatcctgataatatcttcaattttctcgttgaatttctcaaaaattatgtaataaacccgtagtcattcttcaatgttttgtcattttttcgttgaaaacacactgataaatatgttatggtgttaattttaaacatttttcgaaaaaaaa

SEQ ID NO: 64570 - DNA, 138 bp, Heterodera glycines; identical to SEQ ID NO: 50950

SEQ ID NO: 64571 - DNA, 1458 bp, Heterodera glycines
atgaaatttgctcatagtttagcctttacaagtggtagtcaaatttccgagcagttagctgggtctgtattggccctctcgaggattttttgctattttttggaagagctttttcgcagctttcgaatggtatatgcatttttcctgttactccaatatttgcggagatatgcacgtccgaaactcagaaaaaacaaatgcggtagcattctataaaaaaacattgtttcaagataattatctagaaccatctgaggaaaactattcagaagtccgcttcttaataataatctagcaaatatatttacgtttcagtgagttttgcttgtcacgcttgtcacatgacgaagcgattttatgctacagttatagttctgtactagtaaattcctcaaacgagctcgaaaacatgaaatttgctcatagtttagcctttacaagtggtagtcaaatttccgatcagttagctgggtctgtattggccctctcgaggattttttgctattttttggaagagctttttcgcagctttcgaatggtatatgcatttttcctgttactccaatatttgcggagatatgcacgtccgaaactcagaaaaaacaaatgcggtagcattctataaaaaaacattgtttcaagataattatctagaaccatctgaggaaaactattcagaagtccgcttcttaataataatctagcaaatatatttacgtttcagtgagttttgcttgtcacgcttgtcacatgacgaagcgattttatgctacatttatagttctgtactagtaaattcctcaaacgagctcgaaaacatgaaatttgctcatagtttagcctttacaagtggtagtcaaatttccgagcagttagctgggtctgtattggccctctcgaggattttttgctattttttggaagagctttttcgcagctttcgaatggtatatgcatttttcctgttactccaatatttgcggagatatgcacgtccgaaactcagaaaaaacaaatgcggtagcattctataaaaaaacattgtttcaagataattatctagaaccatctgaggaaaactattcagaagtccgcttcttaataataatctagcaaatatatttacgtttcagtgagttttgcttgtcacgcttgtcacatgacgaagcgattttatgctacatttatagttctgtactagtaaattcctcaaacgagctcgaaaacatgaaatttgctcatagtttagcctttacaagtggtagtcaaatttccgagcagttagctgggtctgtattggccctctcgaggattttttgctattttttggaagagctttttcgcagctttcgaatggtatatgcatttttcctgttactccaatatttgcggagatatgcacgtccgattgaatacccaccaatccaaattttaatggttggattttataatttttaa

SEQ ID NO: 64572 - DNA, 346 bp, Heterodera glycines
atgggacgaaaaacgatgacattgacggccgtagtgctgatggtgaaatcagcaaatataacgcactcggagtttggctcgagaaccgagcaagcttttcatttatcgtttaatgtatcatttttgttgctaggacccgcaaaatcttacaaaatgattcccagccctagtaatgattggagttttattgtaaaaaaattttcgcttttcacccccaccacttaattcatgaaaatttttttttcattcaggttccgccgataattttttccaaattgctcgctgttccgacaagatcgtaatgtatcactttggttgttggaacccgcaaaatcttacaaattga

SEQ ID NO: 64573 - DNA, 167 bp, Heterodera glycines
cccaggcgggcattgaagtgattgagctcgcaactgctgaaactgaaccgacaattccatcgctttttgcggatgatttggctattgtgataaatggcaccgctcttttgactcgacctaaaagtaacaacaacaaaaagacgcccgttgtcagcagaaccaatgaa

SEQ ID NO: 64574 - DNA, 195 bp, Heterodera glycines
agcctttgaagtttttgtgcacattatgtatttccggtttctctccaaagactaattagttgtcattaggcaaaggcatttgtacatacgccaaaattcccctgctgctgttaatcaccgtctccgccttttctctttttattggtgattttgattttcagctgcaaatcaaaagcaagcagcaataaaatagac

SEQ ID NO: 64575 - DNA, 418 bp, Heterodera glycines
atgttgccactccctcgtgagttggaagagaatcgaaatcggacaaagcctctcaactcaccaccaccggcgaagagaaacaaaagagatgagtcaccaccagtttttgatgagaacgggaacgagcttggctctcccccatcttacaatggagataaagaggatgaggaggaggaagggataatttctgagtcaccgcctcattatgaaggaatcgagactgtaacatttgacttccctcatcatacaatgaagattatgaacgtgttattgcggattcaccgcctcgttatgtagaaactcaaaacgagactataacaccaaaagtaccatctcgtcagccgcctcctaccccaagcactgctaagccggcccccctcctccaccaccaccgtctacaatttcgactcctatttca

SEQ ID NO: 64576 - DNA, 56 bp, Heterodera glycines; identical to SEQ ID NO: 52733

SEQ ID NO: 64577 - DNA, 167 bp, Heterodera glycines
atgttggacaccgtcgttctgtgcgggaacaccgtcgacgtgcagggcgactcactgttcagttggctttttgcgcagaaacgcgagcccaacggaccgtcggcggaccatcgccaattggcggcgcagcaatgggcgtggattgagcagcaaatgcgccgatcgga

SEQ ID NO: 64578 - DNA, 723 bp, Heterodera glycines
  unsure (1)..(723): unsure at all n locations
atggcagccgcagaaccgtgccgagaaattctgacagtgacagattttgacagtaagaagaatttttaaaaattatttaaaggcaaattttaatagataatagatatttaaatctaattctcgtaaaatttttaaaaatgcaagtgatatgagcaggcatgatgaaattctaattggtcacgatgtttttctttctcgaatttgtaaccccgagagtgtggtctagtgcctattttctaggtttttattttttttatagtctaaaaagcctaaagatttttaaaaagacctattttggcgttttgcccaaaattattaacaatttgcccaaaattattaacaaaaatgcaataaaaacgaaaaatacaccccctaaaaatcgaaattccaattttttaaaatttgttataatttgttggattcaaacaaatcgtagctctttgtttatcttcaaattataaattggcacgaactttgtgacaaaatcaaaaaattttcaaaaatcaggcgctgagcaaataaaacacggacaattaattgaaaaaattacaattgtgcaaactttcatttgaatacgggcaaaagtgtctgacggaaaccaaattttacgtgccattanattcgtataaaaaaggaattgaaattttaaattaatacattcattanaaatataaacgaaaaacatttttaaacattagtcttaaattcattgntgttttaata

SEQ ID NO: 64579 - DNA, 885 bp, Heterodera glycines
atgcacaatcgcttcggcgtgctttccgacgtcaaagccggcattgtgtcactgagtcagaagattgtcgggccatgtgcactgatccaaggggcgttgccacgaatactgcgcgacacgccgcagtcgttcttcgacaacaccaaagcattgctagcaaaaaattctgaaattgtctacgacattctgtgccaagtgccgggactgaaaccgctacgaccccaaggggcgatgtacatgatggtcggctttgacgaggaaatgtacggggacgagacgggcttcttgcagaggctaatcgcggaggaaaggtaagcatcgttggcactttgctcttcctgactttatctctgtttcgctttcagcgtgtactgcttgcccggttccgccttctctctgcccaattggttccgtttggtgttggctttccccgaagaaacgacgagggaagcgtgcgagcggatagccgccttctgcacacggcacatgcgcccgtgcaggaaacaattggcactatgggggagtcaactggacgaggaggacggccgagggtcggaaggggcggaacggaccgcagctgaagagagtacgagtggtgaggaggaggaagacggccagagacaaagcgagcgatcagccgaatgatcaatcgatcggccgatcaaagcgtgccgaaatgcggcacgggcacacattcccatccaaccgaaaagcaaatctcaaacagtcgctaccgtcgcgtcatttatcctttttgattgtttatttttttctcttattaatttatataatttctaaacaaattactttgcttttatgcattctttcctatttttatccatttgattttgattctctttataacccaatgatatttttgagcaa

SEQ ID NO: 64580 - DNA, 158 bp, Heterodera glycines
atggcacattttggtgcaccacaaattcgggaacaaatgctcaagggaattggtgacgacctgcagaaagtgttggacatatttggcaatggcagtgatgacgacgatgcaagcatacaattgctgttacgatacatcgttgaaaaggtgtcatggat

SEQ ID NO: 64581 - DNA, 691 bp, Heterodera glycines
atggagatcgtgagcagcaagatagaagggcagtggtgagacaacactgagacgtgcggtgtctgcacggaccactgcttcgcggagatctcgtcactcagctgccctgtgacaccaatgtcaagcatatcttccaaccatctgcgtacgccgttcgttgaccaccaaccggacatgcccgaagtgccgccgtcccgtcaacatcccagacaacatatggtgaaaaagataaaaaaaatatagcataaaatgtttgtttaggccgaccaaagactcgcatagtcagtcctacaaagattactttgctgaacaaagtcagagctcaacatcagcccgacccccagacgacgactttgtgatccgagcctggtaaaaaaaattgaaagagtttgaaaacaattatcagaaatataggagtgtctacgaagaccttcgcaatggccagagagacgcctacgggagtgtgattcgtcaaccaattgcgccccgtagagctttccagctcgtgatcgaccaaatccgggagggcagctctgaccttggcgaccgtcaaatggagtgggacatcaccgacccacggaatgacgaggaacaagggctgcacatgtgcgagaccctcctgagagaaagaatggaggaggatgagaaggaggaaaaggagaagaaagagaaaaaatatttggaattttga

SEQ ID NO: 64582 - DNA, 2679 bp, Heterodera glycines
atgccgtgttcgttagctgcactcatcccttcttatggtctggacgtggaggacaagcccttcttcccgcatttggccaacagaccggaaaactacggcagagaaattcgcccaacgcccgacgactatttggcaaacggtatgatgcccgggaagaggcgacaattcgacgaatggtacgctgcgcaccaccatgagccttttatgctcgatgaggcgcttgccaggtaaaaactatttttacatgtataaattaaatttttctgtttcagttattgcacgaatgatgtcaagattttgatggctgcccttgtcgcattccgtcgggaattctttgagatttcgcgtcgccaggagtacatggacgggatcgacgacagagagaaccatgatggcatcgacgtactgcgtgagtgcatgaccatcgccggcgcgtgcatgcgacactttcgcactaatcacctgcctaacgaccaccttgccatcgtccctgagcgaggttacgacaacgctcaaaatcaaagccttctcgccttacgattcttccattggtactcggaggagtacggggtggatgtgcagaccgcccactctgccggaggagagaaacggatcggcccctactcggttgacggatggattgaggcagaggggcgtgcaattgaagtgcatggtattgattatttatttttattcagtaaaaaatcaatattttaaggctgtacttggcacggatgcaagaaatgttatccaatcgataacatgttgttgcccaacggaaagacagcggggcaggtacgggagcgcgacgcaaagcggatggaatacatctgggcccgagtgaatcgtgtggacgtgtattgggaatgcaaaatcacgtctatgctagagcggagcaaagccatgaggaaatccttcgcgaactacgtggatgacgggccactggtgatccgggaggcattcactggaggacggaccggaccactgaaattgctgcgcaaagcggggccgggagagaagatctcctattacgacttcacgtcattatacccttacataaagtcagttcttttttctgtatttgacaaataaattgtaaatcttaagcttcaccactcgctatcctgttgggcacccgaaagtacatgttttaaaccaacaagtggaatggatcagcgcggcggacaatcctttcccgttggcgctgctcaaagtttgggttgtgccgccccgccaaatcgatgttgcagtgttaccggtcaaagtggacgaccgactgtgctttccgctgtgcatcagctgtgccaaagaatacccaaccggaggcgtggacaacgactaccactgtcagcacactgatcaacaacgcggatgggtcagcacctgtacatcgattgagctcaacgcagcgctcgacgagggttaccgcgtcacgagggtgttccgcgtgctagaatacgagcaaagcgacgacaagctcttccgcccctacattgcggaattcatggctcaaaaaatccaggcaagcggatttgacagcagcataagaggggacgctgagaaggaagaacaatttgtccgagagtgtgcggagcagtttggcatcaacattgatcctacaaaaatggtggtcaacaaggggaaacggtccctggcaaagctctgtctgaacaatttatgtgagttttgacatattaattttgacaaaaaatgtaatttttagggggacgtttttcgcttcgcaactttggcctgtgccagacactcatcactgacgacccggtgacgctggccgagtacttggacaacaaatcgatcgaagtcacatcgatcgatcagctggacgaggcgcacatcctcatcacctacctccacaagaaggattggatcgatgagcacgcttgctcaaacattggtgagactaaagttgtaaacttgtgctaatttgataaatttagtcatctctctgtggaccacttccgctgcgcggcttgttctgctcaaagccatgcagaaggtggttaggtcgccggggtccgagctactctacaccggtacatatgccctaaaaaattgcatgaaataaattgcaaatattttttagatacagacagtctcatcctcgtccacccggaggagcgatgtccgctcaaaactggtccacatctgggccagttcactgacgagtacccggaccacgacattgtggagttttgcagtgggggtgcaaaacaggtaaattttaagttaaattcatcaatctgtattgattatttcacattttagtatggtctgtgtttgcgacgaaagggagctggggcggatgccaaaaaggaatacgtgctcaaggtaagcggattgacgctgaactacgacgtgatcaacaaccaaggcatgcgttacgagacgttcaaagaagaagtggtgcggtacgcaacaacgggtgattatgagccaatcattgtcacttatcctaacttcctccgaccgaacattcgggagggagggagggtcgtatccatgcccctacagaaatgttaccgaccatatgttgggaagggaattataggcagcgatttcaatgtgaagaattttggccacactttgtaatgtttttgttttctgatgtatctgtctttctcatcaatacaccataaattgtatttaactcatttttca

SEQ ID NO: 64583 - DNA, 909 bp, Heterodera glycines
atgcgcttggctgaagacattgagggcctggagatgcgcactcgaaagcttgaagaaggtgcagccgcgacaacggaggcgcagatggaaacgatgcgccaacaaatggagcaaaaatttcgtcaaaatctgctggaagccgagcagcggattgatcacaagtgggcgacgatgctgagcaaagaacaacaaagaactcagcgaattgcggcacaaagcgcggcggtgattggacaactgatgaataagcgactggcagaggggggagaagaaaaggaaaatacgagagagacagaggaaaaaaagttgataataagtgatcggtgcaattggtgcttagagaaaggccagtgttatttggagttaggggatgcggacatgtgtttagctgtccaccgtgcactattgcgataatggccgttgacgagccaaaatgtctgatttgtttccaaaaattaactgatttggaatacttaggatcataaacgtgtaccgaatatttgctttggatcctaattattttaaatgtttgtactcctataattgtactcctatagtatttcctcatcatcacttttttcattgcctacagtaatcgttaacattttcatttctcattaactaactaaatttgtcacatttatttgctttggatcgcatgaatttacaatatttgtgtaattgtactcctacagtatttcctcatcatcacttttttcattgcctacactaatcgttaacattttcatttctcattaactaaataatttgccgtctttatttgaccacactgtaacccataaaaaatgtttgccatctttatttgatcaaacagtatcccataaaaaatgaattttcatgaacaaatcccaaatttcgaccgttttgatttattgaaggcaaaaaata

SEQ ID NO: 64584 - DNA, 312 bp, Heterodera glycines
atgaaggaaaaagaggaggaggagaagaaaagaagagagggaaaagaaaaagagacggaaaagaagaaggaagagatgaagcagaaggacgagacggaaaccaaacgaagcctcagcgtcggaacaacgaaagacgatgaaatctcgattgtggattctgaagaaagagaaagagatgccttcgaaaactcgccgaagccgacaaacgagcgaatggcattttgggagtcgactttgaacaatgaggcaaaaaaggatttgcgagaggacaaagagaaagccttaaaaacacaggccaagctattgtcgtaa

SEQ ID NO: 64585 - DNA, 453 bp, Heterodera glycines
atgatgggatcgaaatggtcagtgcgcgagttcaggagagcggtggcggaacaagtacggtgcatgcggtcagcagagtcagcattggcatcaatgaaagacccggaagtacgcactgatcaccgaaccgagcgtggtcagacgggacgaggaggcaaagcaggtcgggagccatttcaaagagcatttacgggacaaccaacaaacccgtgcgaaacccaacgaaacacgaagcgaggagcggtacgggacgaacgcccgtttcgccagacgatcgaccacacatgccaacgagaacgagagctcaggcgggaattggccccgcgtcgcatcaaacggaccaattgccacaacggagatatggagctgttcactatgcctaagaagtggacatcgaccaagcaaatgccgcgactatccgacagctcaggagcggaggaggagactcattga

SEQ ID NO: 64586 - DNA, 258 bp, Heterodera glycines
atggactacgccattttcgtcgttgaacaggtgaaaaaaggccagaaaattgaaattttgcgatcactcccaaaaaaaagcgatgttaaggccagcaaccagacattcaaccgggcgaagctgatgaacgtcggctttgtggaggcgtcccgtctctacgactggcaatgcttcgtcttccatgacgtcgaccttttgccggaggacgaccgcaatttgtactcgtgtccggaacacccgcggcacatgagtgtggcg

SEQ ID NO: 64587 - DNA, 197 bp, Heterodera glycines
ctcgttcaatttgagtgattcttcaacaaatacatattataattaaccaattgtccaattctgtgcttatgggaacggatgtcctccagcggcagacatttgttcacattgtccatcgccatcatttttttgtgtttcgcggttactgtcgtccaaacccgctaccgtttccgggaggaaccgatgccggacgaggg

SEQ ID NO: 64588 - DNA, 438 bp, Heterodera glycines
atgcattttcttatttttgtttttgtattcttattcataatcatttcaactggcaaaactttatcagttaataatttatgtgaaaagaatggtaaaatacggccaacttttgctgaaatatttggccaaaaatgggacaatgaaaaaatggaagaaaatgaaaatgaaagtgttcaaaatacaaattataatcaaaattatcaaaatgaattaattgatcagaatgatcaattcgatgatcagcaaaaacgcggcattattcacagatttcacgcaataaaagaaggaattaagaaaaaggggaaatattcggcaaaaatttggaataaatttgagcaaaagattggcgtaaaattgggaattaatggactgaaaatttacaaatggaaaaaagaattaaaattaaagaaaaataaaagaaacttaaagcattattag

SEQ ID NO: 64589 - DNA, 3742 bp, Heterodera glycines
  unsure (1)..(3742): unsure at all n locations
attgcacacacaaactgcaacagagccaaattttgtacaattttcgcgtcaaactttccattttaaatttcagcaaactcggcaatggccatcgaccttggctccgagtacatgaagatggcattgatcaaaccgggcgtgcccatggagacggtgctgaaccgcgaatctcaacgcaaaacgccaatggcactgaccatccgggacggggaacgcttcctgggcgacacggcacagaaaaaagtttgattttaatttttaaatttgctagtgcttgtatgaagtctctcgtcactctcttttcttggaccaaagcttttgtactacttgatttttagttcttttctgggtcactctgatcatgaatatggcattcattttggccaatacataacccgaattcgaatataagtctaaaactcgaaaaaaaattttttttgcaatccttttttgtttcaaaccgaaaaattctttgaaacgtaacaatcacaaataattaaaataaaacaaattggtactgagttgaacggctcggactttgttcatttcatcaaatggccgaatttgtggtacagaaaattgattttgaacaccatccactaccataattgtttggctttcttcaaaaaaactttttcgttttttcgctaatttttttgccatattttttttttgtttttttaggcacttggcatgccacggcacacttttgccttctttttggacttggtcggcaaacaaatggacgacccaattgtgcaagcgtttcaagccgaattcccacatttgacgctgaaagcgcatccggcacgaggcactgtccaatttgagacggagtgagttggggccaaatgagggcaaaatttggatttttaccaggcaatttgagtagatgttgggatgaggttcgataacaacctattagcaaaaaaaacaaaacatttttttacggttttcattttgaagcgttgcaaatttcgaaattttttagcttgccaattttttttttgccattttcagtgccggtgacctgtctgtggagtgtgcacttggcatggtcctgtccaatgcgaggcacgaggttcggctctaatttggccaaacaacacatttttctatatctttctcttttttgttctctgtctcctcggggttgtgccaaattccgtgcctttttgagaccgggtgaattacaaatttaatttttttttgtgtgaaaattcaaataaaaatcccggatgcatgcattttgcaactttttttttctgcaaattccgctgatttttaatgatccgctggcattttacacatttagaaaatgtatatttttcgtcctgggttcgctttttctctctttcctctctctctctctctctttctctttctctttctttctttccttcctctctttctttttctctctctgtttctctctcactctctcatctcccttccctctcaccatctcatttcatctcggacattggtaccatcctcttacatttttcctttctattttctctcctctctttgtctccctccccccctctctctctctctctctctctctcgtgacatttccttttctctccctaccattttctctgtctcaaattattttcagtgtgtataattcattaaaatttgcattaaaaggtggaggcatacgctggccaaacggtgcgcgacgcagtgatcacagtgccttcctatttcgggtagcgcattacgaaagcccttaaaattgcaattaatttggcaaatgtgatccgccatttttaaaggctcattgaacgggcggcggttgaagcggcggccaaaattgcggatttgaatctgttgcaattgatcggctccggcaccgccgccggactcaactacggcgtgtttcggcacaaagaaatcactgaacagccacaggtaatggtgttgccaacgccaacaaacacaccagggtgtggggctagtttcgtaggataaaaagcagaaaaatttgctgcattacagaaattccgacaccaaaaagtgtctgtatgtggattttttaaaaaaatttgatttttttagtctaaaaggtttttgaaattaaaatttttttgtatgaactgccatttaaccctttgtatttggcactgaaacaatcaaaaaaatttttaaattttttttttgattttttcacccccccctttttccattaaacagaggctgctcatctacgatgttggatcatcaaaaacgctggccactattgttcaatttcggcttgtcaacaatgacacggaagcagcaccaccgctaccagcaacagcaacaaacagcacaacgaccacagcgaagcgaaaagcaaccacaatttatccacaagtgcgtcgcgtgtggtttggcaggcctatagatttcaaaaaaaaatcgagggaggcaggttcttttatggtattcccaaaccccgaaaaatctttaaaaaatcattttgtaaaaagattttaggaaaaaatttcgaatttttctaatgcatttcaggaaacctttgagaaacttcgtaattcatgcgatgcattataaaattttgaaaaaatcacaaattttcttttaaatttttttacttaaattttgtttaaaagagttttaaggttttctttttgatttaaaaaaattctgggagagggtggggtggacggtgaaaaactgagaattccattattttccgctcctgcatttgttgcttaaggtggaaacgctcggcgtcggctacaaccgcacactgggcggtcgtcagttgacacttcgactccgggaccaccttgtccgcgcgttcaagcagcagcacccgtcaacgagcaataccgttgaacagaatttgagggcaatggccaaactgatgaaggaggccgaacgcgtcaaacaggttgaattttcagaaaaaaatattagaaaatttgacgaaaagaaaaaaaatttttttttttgattttcagcgacttgttttttttgggaaacatagccagtgggaatgccttctcggtggcgcctatcggcaccgccggtcagaaaatttgaattttaacgacaaaattcaaaaactagtacttttttttggcggaaaacagctacaaaaatttctgtttttttctctcggtcgctcacattagagaaaagcttttttggcccgaattgcaaaaaaaaaatcttcgggttccccctccgaatttttggtttttggttacgacttgaacatggcatcttacaataggagtaagtatcgcaattcctggtaattattcttatgatatttttggtgatttcataaatacgctcttttaaaacccatagattttgtcggcaaacacggaccattacgcccatgtggagagtgtgtttgaggaccgcgacttccgcgtcaaagtcacccgggacgagttggaggcgatgttccaagactttgagcaattccacatggagcccatcaccgacgcgttgcggatggcccaacttacggtggaccattggacgtgttgtgttgatgggtgccggcacacggatgccacgcctacagaccgtccctcgcacatttctccnagggggttggttggcactatttaaacgattgccagagtttggcgacatcggccagctttttttgtgccattgacccattcattttgacccaaaattncaagcctgtcagaaatggggaccggattaaaaaaagcgaaaacaatttttgggcagaaatggaaaaaaa

SEQ ID NO: 64590 - DNA, 659 bp, Heterodera glycines
atggatggatgctcttatgcagtttatttagttcccacaaatttttttcactttccaagcaaaaaacacacaaaatatataggtttacggggtcacttgccacgaatctggttttttgaccaaaatctatttaaatatacgaaatgggtgctggattcggatcatcgaccccaaaatctcctggaaaatgttttcacatccgtaacattagcaaattttcagatttccgagttggacagttacatgtaccaaagtgtgggcagtcagggaatcaaggttagtgagactaaatatgtgctttaaaaatatggaaattgaatccgatttaatgtttgtttgatagttccttttcgaataaatttttctaaaaatgccaatttttggtacattttaaaacccaaaaattgtaaaaataggcatcataatttcttaaaatttcggctttaaattttcggtttcccacacacatttcgctgaatatttaattttttgtttgtaaaatactcctaggcctgttttcctgcaattttcagttttacgcggatgccattggcctgccgctgttccaacgcaaaatttcgggacgtccaaaatgtgttgagagcaacacttatgtgcaggacgaggaggatgtagtggaggaattgtaccacctttag

SEQ ID NO: 64591 - DNA, 439 bp, Heterodera glycines
atatattgacaaagtcaacctttctgctgtaccaattgttgaattcaattttatgatttcggacaattttttgacaattaacaatggtaacaattagcctaattatatgtacaattaatttttaaaatttgcagtttcaccgaatccaaagggtttttacaaagaattttttgaagaatcaaagcttggctcatttttggaagaatatgtcggactttggctgttggcagcggacattatgccaaacttgcgccaaaaattgacaaaattaatttttatggtgccggataaatgtagacttattcgtgatgaacgtcaccctcaaaattgcgccacatttgatcagatggcatttgagaagaagcatcgctccgtccgtcaaattaacccactcgtaaataattttaaaaatatttacaatttatttatatttaaataa

SEQ ID NO: 64592 - DNA, 1145 bp, Heterodera glycines
atgaaatttctgtgccatggacgtgtttctgattggaacattgccaagggcaacagagcgacatttccaatggaaattgagaaattgtcggaatttgcacgagtgaaagtggggagtaaacgttacagcgatgtcgttcaaataaagggattccaattgaaaataaaggcacaagttaaaatgaatgagcaaaacccagcgaaatgtttgggcatttatctttgttgtgccgcttcagaagatgcagaaaaaggtgattcaaaattaatttaggtaaatggtttattaaatttattaaaatgaaaattggagttgcaaatgttcggcaatattttgaattgtttcgcaaaagagcggcacgaacgatttaacaaggaaattaagttccgatttgtttaatgaagataacagctgtggatttttgtatttcattaacttttctgtgagtggcaaattagcttttttttaattgctcagaaattaaggaattaatggacgtgaccagaggattttacaaaaaagaggaggacaaagtgacattggccattgattttagcgtggaaggacgaggaagaatggaatcagaccgagactcagacaaatccgccgggaaaattgtgatggaaattggcaaattgtcatgacggcaaagaaaaaagtttgcgcatttacctctgttgtaccgcttcagaagatgaagaaggtgattcaaaattaatttagatcgtaccatgtgattatttggagaacaatggcgattctcaagggcaacattgcccaactgtcctctgcccaacttcgtcagcaaattttatccccccccctactgaccccttgcgttcggcgtcatcatgacccgacccaactgaccccttcgccctcctcccactcatttactatgcttcctatatacaaatcatcaaaataattcagtttcgaaatatttctcaaataaaaattattttttttaaggaacaagtaaaatccgtggttcaaataatccgtcagtggacaatccatcagtggaggacaatccgtcagtaatggataatctgtcagtggataatccgtcagtggacaattcgtcagaaaattttttttttgagcaatgatcaaaaattttgcaaaaattaatattaaattta

SEQ ID NO: 64593 - DNA, 2321 bp, Heterodera glycines
atgggatgtataaaggcgattgtagaaggaattgtaagcgctaaaattgtttgaaaagctttttgagcgtaattacgatttttacttacaccattttttgctaggcttagatcacatgcgattttcggcactctgataattttagcgttcataatgggatgtataaaggcgattgtagaaggaattggaagcgctaaaattgtttgagaagctttttgagcgtaattacgattttacttacaccattttttgctaggcttagatcacatgcgattttcggcactctgataattttagcgctcataatgggatgtataaaggcgattgtagaaggaattggaagcgctaaaattgtttgaggagctttttgagcgtaattacgattttacttacaccatttttttctaggcttagatcacatgcgattttcggcactctgataattttagcgctcataatgggatgtataaaggcgattgtagaaggaattggaagcgctaaaattgtttgagaagctttttgagcgtaattacgatttttacttacaccattttttgctaggcttagatcacatgcgattttcggcactctgataattttagcgctcataatgggatgtataaaggcgattgtagaaggaattggaagcgctaaaattgtttgagaagctttttgagcgtaattacgattttacttacaccattttttgctaggcttagatcacatgcgattttcggcactctgataattttagcgctcataatgggatgtataaaggcgattgtagaaggaattggaagcgctaaaattgtttgaggagctttttgagcgtaattgcgatttttacttgcaccattttttgctaggcttagatcacatgcgattttcggctctttgataattttagcgctcatgaaacgtcccagcactccatgcaactacctgagcttgagacagcagagcttattgtagaaagcgctaactgattttttgtttagcaactcaactcctaagaatttgtgccctgagcaacgctataattttggtgttcgggaagagattacaatttggcaatttattgttgctgaagccagggcaagaaatagggcaacattagcatgtgatctgcacttctgggaatattttaacaaccgcaatttgttggaatttaagacgtcgtccgtttccattgaactacagtaatgatttgtttttacaaagatttgggtgcagttagagccagtgtcaaaatggacaaaaacattaattgggcatatgaatataaaaaccatttgtccagggatggcattttgtaaacttctgttcacttggcacgctcagataagcatgaaaagcaaattgttttgttttttcttaaataaaaatcaatgacaaaattttaattgccgtttttgtgcatatttaatgccgttttgtgattttttgcataaaaatgccatccctaatttattgtttagagttgctaaaacaattcgcaaattttattttaaataatgtacggggttgaaaagggcaattttccatttaataattcatatatttaaaaaataatggattattttcagcttccggcgaagaatgttgccgaatattttggaagcacaactgcccaacgaatatttattctttcttttgcgcttattttccattaaaattaacactacgcagaaagaaaggcaggaattgaaaaacagaaattagctgtttttaattactaaattttagtctcgcgcagcgcactgggtgcattattgtcacagagctaggcacttctttcctgcatgcatattccggtgtgttttaataattaaacaaaatttataaaaataatttaacggaactaggattttttgttgctattttaatatgttcaaaagttaaaccaacaatttttagatgacaaaagccctttttgaccacagattatattttaaaaaaggatttgaaaatttcatacgaatccctggtgttattttaaaatcatcaccggcaaaaaaaagaaggaatttagccggtactcaccaaaaatgattcgtttcttattaaagcaacaaaaaaactttcacattttttgacaaattgctgaaaatttaaaaataatttaatttgggtggaaaatattaattgacaaaaatctcatcgggaaattaagtcaaaatcattgtttattatgaatttcaaaatctggcaaataattaggagcattattttaacaaattttttgattaaaaattttttggcacataaaactccagttctgattatagtttaatatttaaaaaatatttaataataataaa

SEQ ID NO: 64594 - DNA, 438 bp, Heterodera glycines
aaaatggtgcaagtaaaaatcgcaattacgctcaaaaagctcctcaaacaattttagcgcttccaattccttctacaatcgcctttatacatcccattatgagcgctaaaattatcagagtgccgaaaatcgcatgtgatctaagcctagcaaaaaatggtgtaagtaaaatcgtaattacgctcaaaaagcttctcaaacaattttagcgcttccaattccttctacaatcgcctttatacatcccattatgagcgctaaaattatcagagtgccgaaaatcgcatgtgatctaagcctagcaaaaaatggtgtaagtaaaaatcgtaattacgctcaaaaagcttctcaaacaattttagcgcttccaattccttctacaatcgcctttatacatcccattatgagcgctaaaattatcagagtgccgaaaatcgc

SEQ ID NO: 64595 - DNA, 374 bp, Heterodera glycines
tatacatcccattatgagcgctaaaattatcagagtgccgaaaatcgcatgtgatctaagcctagcaaaaaatggtgtaagtaaaatcgtaattacgctcaaaaagcttctcaaacaattttagcgcttccaattccttctacaatcgcctttatacatcccattatgaacgctaaaattatcagagtgccgaaaatcgcatgtgatctaagcctagcaaaaaatggtgtaagtaaaaatcgtaattacgctcaaaaagcttttcaaacaattttagcgcttacaattccttctacaatcgcctttatacatcccattatgagcgctaaaattatcagagtgccgaaaatcgcatgtgatctaagcctagcaaa

SEQ ID NO: 64596 - DNA, 47 bp, Heterodera glycines
ggaagctactcccgaaggattcggtctccataaatctgggcgcatcg

SEQ ID NO: 64597 - DNA, 780 bp, Heterodera glycines
atggttgagatgggaaccgaaattcaaacatcacgaaatgaacttaaggcttttcaagaagaagtagataaagccaaaaacataacattggagcatgtggaaaagaatgacttgaaaaaagcaaagaaatcagccgacgtcgcaaagggaatcgccagacaggcaaagaccaaatatacatcaactctcgagggatataatgataaatcggaaaagggttttagcgggatagtgaataggcttaatgaggcgctcggtgagcatattaaacgtaaagatattgaaaatatacaagtatctgaagctgagaaaggaccacaaaaaagagaaagactagccaatgaggatgttcaatttcaatatgacagcattgatcaaaaatttattgtctatctttccgctgctgtctcccacatagatttgtcaaaacacctcgcctatgtgctcggttttaagaacacaaggctatttcatgcggaagaagcgaattatatgccagatttgactggcggcgtaaggcagctatacatttatgcaccaaatttaatcgaaaacacaattatcggcaaccagatggccccactcttaagaatagttaacgtcgtcgatgacccaggatcgattagtgaagttatatatagcaccgagtattttcatcgtctacagtcgaaacgaatttcagaaattacaattgaaattcacacaccgtttggtgaattcgttaaatttcactggggaagttgtattcttacattacattttaagaaaagtatattttaa

SEQ ID NO: 64598 - DNA, 1229 bp, Heterodera glycines
tcatttctccccctctcttcttttgtcagtctgcacaatttgatggttttggtgttccattctcgggttggtcgtcaacggaccggggtttgttttgttttttattttttctattacctacacaaattcctccattggacagactttcgctctcggcggcactttcgaattcatttccgaggcgccctttttgccgggccctccactccccgggggcccaaaagggtgtgcctttttgatagagccaaacggagccaacgacggcaccggtgtcattttgtcgcccacttaccccggggtttacccaagcgtgggtttggccgctgaatcaaatgtgtcacctccctttttgtttagaatttgcaatgtttgtttctgctgcggggcctcgcccaccaacggatccgtttgttcttccgcgatttcgacgtgtatttcggcggcgaacagttcgatttaagggggggggggggaaatgaaatgccacggcatcgccaccgattcattcggtcgctcatttgtgccgttttcagctgtccctacgattcgctgacaatttacgacggcgcctcaacttccgatccgatcattcgaaaactctgtgggctccaacaacgacttgaactgttctcattcggacacgagctgttgctggagtttaacaccaccgaagtggaggggaaagtgggcgacagggggtaatttggatgaaatttaatgaatttattatgttcaaacatttctcgtcaattttccatctgtcccccctcccctccccccgttcagctttcacattgagtaccaattctcggataaattcgtggccattagccgtctgatcggtgccaagccgagtgtccactgcccaggccatttgcgtggttccgagtgcgatgttcgcgtctgttcgggccacgaatccgtccattttgtgcactctcccaatgttcgttttctctgctcttgtccgtcattcattgttctttctgctcagttccccgacctttacccaccgaatacgacgtgtacttacattttggatggtctccaaggcgatcagaatttggagaaagtcattctccgcttcgaatcgttcgtcgtccccggccaaagtgcgccttcgcccatcgtcgaaagaagcgccattccgtcggccgattggtcccacatcaattcgatgcccgggcaccgtttggcgcaatctctccccgcaaagtgcagcagcagcg

SEQ ID NO: 64599 - DNA, 74 bp, Heterodera glycines
gtatacatttgagacaattgggcaggacaagaaaagaatgaagttgatgcctcatgaaactcggaattggttat

SEQ ID NO: 64600 - DNA, 441 bp, Heterodera glycines
  unsure (1)..(441): unsure at all n locations
atgaacaaaatgtaagacaatttctgacttaataattagttcaatgctttgttattcagttacattctcattttcaacggcatttgcattggtaagaattaatttaatattttgtgacacttttcaattgcattttaaaatgaaatttaattttaattttaatttaatctttgataagtctaaaaatcacttctcttctgatcattttatttccactttgtttttattttacattttattttctcccccccccccttttcgattttatacattttatttattttatttatttttaattcattttcattttatttttttattttttcagttttctttctccttttcggcctttgtgtgatttgcaattgcgtcgtccgaagggtcanattccaccacgagacagaggaaaagaaaaagaaaccgaccgttagcaggtgaaaa

SEQ ID NO: 64601 - DNA, 226 bp, Heterodera glycines
attatgagccacccaatttggcaaatcggtctttttaaacgcattaaagaagattcagtcgattgcttggagtgtaagcaaaaaaacgttattaatttttcatcttcatcattttttggtttaaaaatatatttgaatactttgctatactttgaaagacttttttattaatacagaattttttgaaatttcctaaaatccgcaatcctgcgcaggatcctgcaga

SEQ ID NO: 64602 - DNA, 1233 bp, Heterodera glycines
atgcttcgtaataataatcctaaaaatgttaacaacgcgaaacctcagcaaacccttcatcttaataagaatgttgaatcacggagcactgttattgaagcactttccatgattgaagttgaggaccggcggcttcctttgctgcaatacgaacaggaaatgatgatcgacactttcatcgacgacgttctttttattacagcaaagtaactttaaaaatgtaattaaaaaaattttatatatttcaaatgaaaaatatttttcagaggattgggcttagagcggatcttcttcaatcacctccatttgtacagtgtcccaagttttacagtgctcgtcttaaacacaaccccagacgatgaagtgctttttagataatcatttaattattctttctaagccccatggaatatgattctaattttcgaggaattcttcgttggactataacttacaatttatagcatttttacttggaacgcctgcgcagattgaacccgggctgtcctcctaaattaatcactgctgatgttccttcacgcaaccggtgttctgttgggggcgcacccctttttcaagttatgaagtccatattattcacagtactctcatttaccgttctggcggtgttcaattcgtcacttctcgcattttaatggttgatttactaacggacaaagtgcctttcgattgcgttattggcatcctcgtctttagggcacacgagtaatttatcattttacgaatttatttttaacaagcagcgcaatttgtttcaggttgctttttggttttcaggaatcatttattctgagattattccgagagaaaaggccccatggctttgtcaaagtgaatactcttttattctttttaaatttgacattttatttttaatgatatcacccatttgtgaaggcattcaccgacagttgtgtacaaattaccagtgatggactcggccaattgcaacggcttgtgaatctgctatatctaaagagggtcgttgtccttccacgtttttatgcaccagtcaaagagtgtttagacgtcgatcaggcaaaaaaaaagcaaaaaataattagttcccaaattgaaatataaaaatttcagcaaaagtttgtgcaaacggtaattcaactaaacaacactcaacgcaaagtgcaggccaatctccgcgacatcatcggaacttgcgtcagggagttgaagcagtgcacaaagggcgtggat

SEQ ID NO: 64603 - DNA, 2069 bp, Heterodera glycines
atgaagtgtcaacattgtgggtaccagttctgctgggtctgctcaaaaacctggtcgccacatggtaattaaaaaatacgtgcattgtccttttttccccaaaccggtggcctttgtgatggaccagagccaaaaaagcaggggttggagcagaaatcggcggaggaatttaagcgctatgaaaaacaccacgattcctacacacagcaaaaaaacaaaattacagcagaagaggaagtaaaaaaacgcataattatgaaaaacaaaaacttttcttttgcaggttggcaaaagaatatacgactatatcaaaaaacttggtgggtttctttttgaaaaatatttaccaaaattacctaaatttaaagatagtaaatcgaaagaagcagcattggttttgcaggaggcactcgaaaagctgctcgaaggccggaaaacactgaaatatacgtaagcggaacaaattgcttattttgatgagtggttccaaagacggtcctttttggaattgatttgtcaagtttttaaattgtttcgaaaggccccaaattgcaaaaatttggatttgggattttgggtcaagatttatttaaattaccgagttaaaatttaaaagttgcccattttttgggaaattttgtttcaatttcgggggcagtgccccaccctccttcccctgggtagagcatgcccctgtttgcattgtctaaatccttttcttaaaatttgttttagtgtcggtgaatttttccataatcacataaacacttttagttacgtattttcattttgtcacattgacgaaaaaaatgatgaattccacaacgcccaatcagttcttgaaaagtcggtaaaagcggtatgcctatgatgtttgaaattttcgttagttttattcatatgtatagttgagtgagcgcttgacgaacatggattttgcaaaagtcggcaacgccatttcggacgtactcttttttttttaatttctagttttattattttagctcaaagaattgtgccagaaatttgaggcagagaaaagagcattgattgatttatgtgacgaaaaaacagttaaagagatgatcgctgaaaaagggccgacggaaaatgaaacgggcacatctgctggcttatgaaaaagcaaagtgaggaaaaagaaacgaggtggagaagcggtgaaagttacaatatttattccataaaacagcacccagtgccttcatttatttattttattgttttggctatacaatcttcaattcatgcgggcttttccatttacaaaacattccataatattcgacacacacccatttcatttgttttcttttattttaaactactttatttgaatcaaaattgttctttttttccatttggttagaagtcctgaaaatacgtatccgggggttctcgaggtcgtcatttcgaccaatttgggatcccagaccagaattataacaaaaagtcaaaaattctcaatatttctctaaatttatttttaaaaaaccaaaagtagtcaaattctcttttttttttttttgcttttcaaaaccgctttttttgcggcgcgctttttccaaaaaacttttggagaactgggggttccggcggtgccgataggcgccgccagaaaaatttttgaaaattggagtgcaatttgttaaaaatcatataagaaaaatgaagtcctatttgataaaaaaaaatacgaaatattactcaatttcgtaaaatttttcaattttttatataaaaatggctaaatttaagagtattttgttaaattatttaaattctcttcgtctttacgaagtcgcctctctcttttcccttcgtctccgacccttccccagattttttcactagccccccccttttttcggcccctcatacgaacgaagtcagagggggtcgactcccccccccccatttaaggtatgccgttgggtttcggaatcaaattttgtaggtgggtagagcacccagggtttttaagaaaagtggtttcaatttctgcgaaatgattcccatgccgagttattaaatgccaatttttttaatga

SEQ ID NO: 64604 - DNA, 447 bp, Heterodera glycines
cttctcagagcgttaaaaactcggaagctcgaaacattaatttcagcatataaaagctatatcagaccacagttagaatacgccacagaaatttggaatccattaaaaaaaaatatccgcaaaattgaagcagttcaaaaaattttttacaagaaaagccttcaaaaaatgtgggcttgttcccatgccgtatgaagaaagattaaatctttgcggaattaagacattggaaattagacgtaaaatcaatgatattacaactacttttaaaatcctaaaaaaacatacacatcttaaaccatctaacttttttgctgttgctaacgggctattcgcaaaccctttttattacaaaataggatatatattacaaaaacaaaaaataattttttttaatagggttattaattaatggaatttattaccgaaaaatattatggaaataaa

SEQ ID NO: 64605 - DNA, 1411 bp, Heterodera glycines
atggcacgcggcgccgaaaaagccaagaaaaagtcaatttttgaggttttttggccataacttttttgtaaacggatgaaattttttgaaattttgcaggctaatagagaatctcaagagctatcgaatgataataaaactataacttttttctttgtcaaccaaattcaacaatcttggtattattcgagagcccttcgcatgctctattaacctgcaaaaatctaaaaattttcgttatgtttaaaaaaagttcaagccaaaaaagttggaaaatttggctttttaaattcttctgaccataacttttttgaaccttaatgaaatttttcaaaatttggcatgctaatagaagacacttagggctttcgaatgataccaacaatattggatttggttgacaaagaaaaaagttgtaaccaaaaaaatgctggcgcccaaacgtgccggcgcccaactgacgggttccgtttttttgtgttgtttattttgatcactgattagccatatcttacttttatcacaactaaataaatcattatatatgtatttcatttaaaactttttaaaagtaagaatttttaaagaaaatgctaagcaaaaagacgcataattagaaaattatgagctttcaaatttgattttgtaccattacgaccaaaattaggtacctatttgcatttgcaaatttcattttttttcatatgtaaaagacatgaaaaaaacgccaacaaagagaagaaaagaaattttttccttgcggtgtgttaaaagcttaaaaacttaaaattacaattattgcgcttttttgcttttagaattatgaattttgtcgtccgtctttcatcaaaatcgcgtttcctccgacttttcccttcctcctactcgccattttcctccccattttcatcgtccccttccaccgcttcatcaagcgtttcttccacccctctgctcattatcacacaaagggcagcggaccaagttgaaaatccattgcttaaataatcgtgacttttttttgacgaattgggatgagattttcttgctttctttgtgtgtcctggttgatactttgctcggaaatttaacggcctttaaattttgaacaaatttactcaggccatcagatttgaaaattctttttgaaagagacagtgccttaccaaacattaaaaaaagaaaccaaaaagtttctatttcataacccatttcatttttattttcattttagctccgtcgcatcgccgccccgggtgagcatttgcgcatttgtgtcgactcgggcggctgttccggtttcgagtacaaattgacgctcgacaagcgattggacgaggcggaggacgaagtgattaaagcgtcggagggagccatcgttgttgtggacaaggtttcgtgcaagttttga

SEQ ID NO: 64606 - DNA, 602 bp, Heterodera glycines
atgaaccgcaacaaagaaatgggaaaattaacacagagatgtaaaaaaaaggtccaaaaatccagaaaaggagaaataattgaaaagtcagttaataaaaaattttttttgaagtcggaaataaaaaaataaaataaaagcttatgggcagatattgaggaagaattgaaaaattttgccaaatcaagtccatgaatatttatttttaattttcaattttttgaattcagttgagggccaaaaaaatgtgtcggtcgatgatgagtatttggatgatcaaaatgccgccttttctggcttagttcacaatgataacgtcgatttaagtgctttggacgaaggtggaagcagcgatgagtgttcgatgttcgaaattttagctattttttgattttattgcatttaaggcaaattcgcttagaaatcggttcaaacatttttgtgtcttaataaaaaaaaaattcattttaaggctttctggtgaaatggctcaaaacttgttgatcattaaagcaaacatgaacaaattgtttttgggaccatctaatgatatcgatgacgaggaaaaggatgatgaaaataatgataacgaggccaaatag

SEQ ID NO: 64607 - DNA, 599 bp, Heterodera glycines
tgacgaagaaagttgtgcaccacgtgaaggccattgtgcacaagaccagttcaagtgccatacatcgggcatttgtataccaggcacatggaaatggtaaataaatatttgttttaaaattattattaattgaattatggttaattcaattaatttttctgtactatgcacgccacctacaatgtaaaacacatcgctcaaatttattttgatgcaaaattaaaactgatttcagttttctcaatttcttcgagtatttttttagtaataaatttttttattattttgaaattggattttaaaatacaaaaaaaatattaataaaattcttttaaaaaactatttttaatttcttacaagaagaaaaaagtcataagaaatttaaaaaaaaatcttttaaagtaattttctgttatgaatgtacaaattaataggtacataggtatgccaaaaattctttaattaattgattatgtcattattattaattacagtgatggccaattggactgtgacgatggaagtgatgagccccgagcgacctgtgaggagatgcacagcacatgccccgctggtcatttccggtgcaacaatggacg

SEQ ID NO: 64608 - DNA, 389 bp, Heterodera glycines
atgactcttcttggcgcaaatacgctcgccttgttcttcctcacattggccttgtcatgtaagtgtgactaccttctacttttctaatgactttgcttactctcgctctctcttttttctctttttctcattctctctctctctctctctctttctcttttttctctttttctcattctctctctctctctctttctcttttttctccttttctcattctctctctctctcgctctctgataattacatatttaatccattccatttttgtaatatgaatattaatttaattttaagccccaatgttaattacctacagtttcgtgtgcctatacgccatgttcggtgcctgggtgttctacagtattgaatcgccgcatgaagaccgt

SEQ ID NO: 64609 - DNA, 352 bp, Heterodera glycines; identical to SEQ ID NO: 55331

SEQ ID NO: 64610 - DNA, 272 bp, Heterodera glycines
atggtatctacacgtaataaaactggaaaatttatgaagctaagcaattctgggactgaagcaagacgaaagcggaaggaatggcgccgggagcatgcaaaaaaagctggatcaacaccaaaaagtgacgaaaattgaacaaatttaattttattttaaaacactgcatttttcagcgctaaagcagaccgaagccgagacaacagcagacggagagggtacatcgacccaagccgccgaaaaagggccgtcaaaaagaactccggaccttc

SEQ ID NO: 64611 - DNA, 308 bp, Heterodera glycines
atgccgcaatgtcctccagggatgtgtgccgacgccctccaattcgacagtctgaaattggaattcagacggaccaaaaaagttcaaaaatcggaaatcggcatgccgacacatctctggtgtgcacatttattaattggtaagattgggttttaattttgaaagatttttacggtttgtttggtaaacaataccagggtcaatggcaactcgtacaacaaaaaaaaaatctaagaattttcaactaaaacttagaattttcagataaaaaaaatctaaatggattttttagcctagaaagactttaa

SEQ ID NO: 64612 - DNA, 675 bp, Heterodera glycines
atggacggccccaccaaagagaccgtcacagagcaaaaccacccggacggaacggacaatcaagaaggaatttcgcccgaaaaaatggagctgatcaacaacacacttgacaagctgtacaacgacccatcctccccagcggcgttcgctggagttactgcactgtggaaggaggcgcgaaaaaagttaaaacatttacgtaaaagggacgtggagcattatttggaggggcatcgcacgtacactctgatgcgcccccgaagagtgcgctttccaagggccaaaactgttgcagctggcttcatgacagacgtccaagtggatttggccgattttcaggcgctttcgcgccacaatcggggtcaccgctacctgcttgtggcggttgatgtgctctccaaacgactatttgttgttccactaaaaaataagagagccgatgagatgctggaggcatttaagcaacttatcgacaaaatgcccatggtcccccatcgcatcttttccgacaaaggaaccgaattcaaaaacagattgctgaaggaattcttcgaggagcaggagattgcgaagcacgagcccgtccattcatcagtcaaagcgtcggttgctgagcgggccatccgtaatggaagcagaaacggtaccgatatttcgcggaaaaggagacactga

SEQ ID NO: 64613 - DNA, 293 bp, Heterodera glycines
atgatgacgtggcagtcggaaggacagttcaacggcatgttcactgtgcacactgaacaggaaagtcgttgttgtcctcgttggtgtttgagttgctgttggtgttccgttgttgttgtccccgtcggttgttgtcgcaggagacggcttttgctggcgatgtttgaaagagtcgaaaaagttgaccaattgggacactttggagacgaacgctctgtaaaaaaattctgtcaattagcatttttcaatcccttttaaataaggaaatttttgaaaatccgggcaatttacaa

SEQ ID NO: 64614 - DNA, 49 bp, Heterodera glycines; identical to SEQ ID NO: 64413

SEQ ID NO: 64615 - DNA, 1214 bp, Heterodera glycines
atgccaacattcttaatcgaatttggcactgaccagtggaaaagcgcaatccgagaaaagggcgacgaaaaaagcatttgtgaagaattcaaaacggtcaaaaaaaaagcataaattaataatatataaataatcattttttacagagcaatggcattggcaccatactcaatgacattgagccggaaaacgccaacggcactttggcaaaaataattcattttgtgccgccatcgaaagataccaaaatgttcgcatttttccaaattgaaaggcccaaattttcaaaattcataaccaaccgtacaaaattgttgccctaccaaaatgacccgaacaatacaagtcaggaagaaaaaaatatttttaaatatttaattttggcatgtttttagagagagcaacaccctgtgattactacggcgcagattgtgtgccgatcaaaaatttgttgttgaaaattgaggcattggcaaactgtggaaagaaggaaagcgaaaacaatgcggtaaaaaatagaaaaaatatttaaaaaatattatttaaaaataatttcaggctttcaaaaagccagactgggccccacttccgccagaaatgccatggaaaaagccatccgaaacaatgctatgtggaggggatatgctttgtgacaaacaaaggctgcgagaacagtacaacagattgagggaaagtgagttaaatttggaaatttaaataaataaaaataaaatcgaaattaaaattcagtatgtgggcttaagcccgaaaaagtggcaagtcagcggctaaaacgacaataccaaccaaaagagaaatggaccgaatccccgatcaaaatcgcattcaacaaatcagctcgtaataatttttaattagctgaacaaatgttttaaagtgccagaaagttatgaccactgctgggataatgccaatttgtaaaaaaatacataattaattgtttagtgccaaaggacgggtaccaacaatggaaggatgcgatagaaagtggtgccgctttgataatgtgagaatgatctttttaggtttagttgattttcggaacgattgtcatagtttcagccgagtttttgatacaaaaaaatgggggggggcggatggaagccgtaaatccgtaaatggaaagccgggagttatggggaagcgcaaatccgaaggctcattaaaaaagggacaaaaagtactagaataaa

SEQ ID NO: 64616 - DNA, 658 bp, Heterodera glycines
atgtctgacgaaattggcaacattttgtcccattacaaatgccaaccccaacaacagtcttcgaccgctgattgtggtggtagtactgtttcggcacgacttatgcctgctgatggtcaaccaccagaagtgccatcgtcgccggttgtgccattggcattggctgcagcacccattgacaattccttccagccaaagcatttaacagcggttgccaatttggacgatttgtcgggcgatgaggagggcaacttggtgcgcaacttgtccgccacggtgtgtatgtgcgtgtggatttggcggtggggttcaactgagccccgccaactgggccccaaccaactcgggcttccggaccaactgggccccgctaactgagcgccaaaaatcattgcttgacaatatgaagcaaaaaatatgactggctcatggtgtcgagttgatccggggcccagttggttgagctatcggaaggcccagttgaccaagtccgttggtttggaattttggaatttggacaagaaaaaagtttttgtctctttcgaatatttaaaaaaaataaaattcgggaaattaaaaaaaatatgcccctttttgtggaaatataatcatttttatatttcagtttttgtacgaaaacaattataagcacttttga

SEQ ID NO: 64617 - DNA, 2915 bp, Heterodera glycines
cgattggcggaaatgcacgcggaacgcgagacaaacaatgccttgcaaccagccccagcagcagcagcgcaacaacaattagcagcagccggccgaagacggctgtccaccgtatgcgaggatggtacgcatttgcatggaaaaccggtggcattgcatgactcacgggtgctggtactgtacacgggaggtgggtgaggaattgctaatatattcgagaggtgaatgaggaatcattactgtatacacaaggctaactggggaattcttactgtagattgtggggcggagcggtggggaataatattatagtaccggcatgtgagaattattattgttcatgggactgggtcatgaattccaagtatacgcttgataggaattacggcacccagttcgcgagggtttttttgtcatgttaattataaaaaaaaccatttttcactcaaaaatgtttttcaggcacaattgggatgcgcgcgtgccatgatggaggtgcggtaaatttaaatacctaatttttacagtgcaattaacttattaaatagggacacccaagagtttgtccacttggcgaaaacaaaaagagctaataccaatagtacaattctaataaattaagagataaaaattgaaaatatttctcaatgtttgattgttctagaaaaaatgaattcatttcaaaaaattccagaattaccaaaaaaaaaatcactaaaaatttagctggttcgttcttttcatacatagaaaatgagatcattttgtttttagtattttcaaaagttaataattattaagaatctctgaatacccctttaaaatgatccgttgttaaattctttcccaaactcttttttttaaatttatattcattattttcaccgacgaatttttgattgcttttgttcggattgttattttcaatttattattatcactttttctataaaaaactcatttttttaaataaaatccatcaaataaagtagggctttaatcccctttccccgcaatttggtccccgtcgttccccggtttggccgggacccctcctgctgcctataagctttaaaaattcaatatcgcgcatagtttacgcgcctgagcagtactatttgccgcgtgccatccgcgacattccgccgctcaacgacaaggagtacgctgatcggatgtacgcggatttgccgctgaagccgctctgtttgccgcccgtgcacgggatgaacaagcgggtggtgtattgggtaaggacggcgaatgaaatcctactcaaaaaaatgcggaatctccgaccttaaccgaagttcgggcaaagaggattttggcaaaattggatttatccgacttttcagttggtcgaatatgaaccgctgttggattcgtccgacatgacttttgacgattggatacgaattgccaaagtttgtacggagaattgatgatgctcgaccgaaaaacttctcaagatcgaagcactaacaatcttccaatggaacaaaccgaattgtactgcccaaatcgcattaaatcgatttactattgcaaattttcggttttttttgtctccagcggccaaaattgatcagacaaaacgagaaagatctaaaaaaatcgaatcataaaaaagcaaaaattaagctagagttattaaattatttttttaatattagcaaaaaaattaattgaataaaaaggaaaatcgcattatttcttatcacttttggcgccggattcccaaaaagccgaaaatttacaattaagcaaatcaactaccttcaacagataaaagaaagtgatttgggcagtcacacttcgggatgctccattataagcaaataaagatgaagatcagggctgcaagcaaatacggattacggaaattacgggggtttttggacccctgttatgacggattacgggtttctttaattgagaaaatcaccgtaaatactgattacggatttccgtaattgaaatcccagttggatatggaaaaacaaaaactaaaaatactgatgagccttaaaagccgagtccttctcaagtcggaagaccggcgagaagactctcgagtatcatttcagcactgaatgttgaatggcactttaaaattggttaaaatttgcaggacattcgcaagtcgtattctgcctacgacggattcgttgtggtcatttttttacatcatttttaattttatttaaatattatttattaaatttgtatatcaatcaaacagctccacggcaccgacacattggcatatacggcatgcgcattgtcatttatgatggaaaacttgggcaaaccggtggtgatcacgggtgcccaggtacttgaatatatatgggtgcccaatatggacaaaatgtacccagaccaactcattttagattgatcaaataattagatcgaacctaaaaaagtattaataattgtaatattaaattaattattatttgcattttatttccaaaataataaatcataacttagctcaaacttattgaaatttgaactgaataataaagaattatgtatctttgaaatctatttaatcatagattgatttctgaaaaaagttatatataaattaaatgtatcatattttatggtcaaaccaaaaatttcagtacgttttatcgcttaaaattctgcaaataaaataaataataattaaatttacatatcaattaattccaaatcatgtcgtatcaatagattttcatattatccaatcacagttaattcatctcttgggattaatttattttcaaatattttagtaaaaataaacaaatttagtctaaagcgaaaattcgcagattccggtggcagaagtccgatcagatgggcgtgaaaatatgatcggtgcactgattgttgcaggcaatttggacattccggaa

SEQ ID NO: 64618 - DNA, 1169 bp, Heterodera glycines
atgagtccatttttcgcagtggccaacttcggcctttcactgtgcaagaatcgttgtgccgaaatgttgttgtgctacgcattttcccttctatgcccattgaatcggtgcaatttcaaatcttaaaatttttgttacagtaatcgaatacagtaatggaactgatgtcgcaatttttaaaaaatgccctttggcgctgtgtaaaaaatcgtaattttccaacacttagtattaagatgctaaatttttgaaactttgcttagcccacaggctaattcggcatgtaaagcctttcgagttcatttccatattggttacaaaaaagattttattgttgacttttttgcttaaaatcaaaataatttttaatttgtgataaatgcggcactctccccccttgtgcctatgtgccagtggaggataacgaattaaatttttatttgaattaagtcatttttatttattatttcgtaataattaatttttataaatcaaaaaattaaattttaaatttttattattcttgtcactcatctttatatttaaaattcttccccttcaaaatgccataaaaatttttaaaatttaaatgtgccaaattcttctcttttttttctcaatttccatttttttggtccgcgctttgctccgtccgccaacccgtggcgttgtgctgcaggcgtacggctcgggcaacattccgctccgtcgggaggacattctgcaggaaatccgtgccgcggtccaacggggctgtctggtggtgaacgtgtcacagtgcgccaagggacacgtggcggtggattatttgacgggaaaggtggccaaagttagaggggaaagcatatattaagcctgagcaaatccgggccaaaaaatggaaattttagtctttgggctacgatggtggcgctaggcgccgtcggcaaaattttgaaatttcaatgaaatcttcaaaaaaaaggttcctttaaatttaaacttagcttgtttcatttcaatgatttttcgtacataaatttttaaaagcttaaaaaactactcgataaaaaagtcaaatatttttttaaataaacgataaaatcaaaaaggaattaaaacgaaaatttcagaaaaaagaaaaattaattcgtttaagaaaaaaataacttatataaaagtacgataaa

SEQ ID NO: 64619 - DNA, 949 bp, Heterodera glycines
atgtgcttccagccgctatacagcccggacgaattcaaagacattgaagaacaggtcagagaaagagagggcggaagagagcgcagaaacagagaaagaagggagagagagtaaaaggaagagagagactggggataacgaaagagaggaagagagaatggaaagaggggaagagagagagagatatgtgaatagagggaggaagataaagcagtaattagagaggcgaagaggaatgaaaagggatggaaaggggatttagagagaatggagagaaagagattaagagagggtggaaagataatgaaaaggaaggggaaaattgccatttttcttgaggatcaattcttcaaaatgcttatcgttcacggaaaagaatacgagtcgttggactgcatgagcatcgacttccacggtcggcccggggaggaggcgcgctatttggggccgaagggacggacgaacgatggcacggacggagacgtacggacgaggggggcaattgaatttgggttaaaattctgttttttcagctctgtctgtccgaatcacacgaaattgtcgcggaagtgaaagaaatacagactttgctgccgggcgcggaagaagcggaagaaaaatgcatggaatacggaggggaggagcagttcgggacggagttggagtgccatggccaatgccgacttggcctaattcgggtcggctaaatgccatttttggttggctgatcagagaactccctccaattttgcaatttaaaatttcaaaaatggactttttgatcaaaaaccatcatccgttagcaaattgaaaaattttgtgaatgtttcagaaaatttgcaaatgcaccgctcgcactttggaaagcctcgccgattcggaaactctacagaattttcccctttgtgactatgcgaaatgcaatttgaagttaaatggaaaaaaacaa

SEQ ID NO: 64620 - DNA, 376 bp, Heterodera glycines
atgctcaactcaaaaagttacagccttctgaaaaagtgcgtctattttaaattaacacccctttttcggaaaaaaattcgttaaatttttttccgtcatcatttcgtcttctcactttcagaatcttaatattttcagaactaacccaccccggtgctatgtcgttattagagctcggtattttgaaaaaagcctggacctggacttggattccatgttcgacctggatttcctggacaaaaatccaggaaaatacaggttcaggaaaaatccaggcctggatccaggtccatgccgagctctagtcgttataaaaaaacccatcaaaaagggagcaatcattaataattggtgtcccgacgaaaaaaaatgttaa

SEQ ID NO: 64621 - DNA, 141 bp, Heterodera glycines
atggcccccaaattccttccgcccgaacttctgttcgaaatcgtggcgtttatgcctgcaagaggtgccgtgccgaatgcttttacctcctgctggttgcttcactcacttttgctccaacgagtcaccaaatggaagcag

SEQ ID NO: 64622 - DNA, 619 bp, Heterodera glycines
atgaattttcaggcattggtcaaagcattcgccgcgactaacgcaactcatttgagtgaaacggaattggagaaagagttggacagggaattggaccaatcagtgccattgattttggaagaaattgccaaaacggagggggcaaaggcagcaggggaaccgacgacggaattggagacattggttggcgaggggttggagcagttggaggagaacaacaggacgaagacgaaggagcagcagcagaagcagggcgaaggaggaggcgaaaagagcgggaaatgtaaagaggaagagggggaaaagacaacaagggccaaaacacagggtaaaacacaacaagggaatacaaaaaacacaaaaaaataaaaataaataaggtgtgacagacggaaacgaaactgaggagccatttgttggagtgggcttggagataacgaaagttgggcaaggaattaccaaaacgaatacagaagcggaagaaaagacagagacaactgccgaaacacatccagaaacagaaacacatcctgaggaaaagacagagacaacagcagaaacacatgctgaaatagaaacacatcccgaagtagaaacccaaccagaggaaaatacaacg

SEQ ID NO: 64623 - DNA, 744 bp, Heterodera glycines
  unsure (1)..(744): unsure at all n locations
atgacaaccataccngaagtcattgttagggcacgagaataccaagggcgtggtctgttgagcgcactcgacttttacaacgaactgtttcaaaaaactaatgaactcaaacagcaattaaattgtgaaagggttgtgccactcgttgaaattgacaaagcggaattggacaattatctgcgaaaaccgccagcgggattcgttgggtttgaggagctctggacccaagctgtgctggaaaaccccgacccggagaatttggtgccctatccaatccagggatttgaacaattgttgcagcgaaaaaagatgcaattggcaacggtttcttcgctccatcagggaattggttggaattactatattttttctttttaccttttattcttttattagacaattgcgtttctcgaattgctacgaaccaaagcttagtgctttctgcccacaataaatatattcaaataatgcaagcgcaaaaacaattttctaatcggttgtacccccaaacactaaaaataaaacaaataattttgcagtttattgcgcattttggcttcacaaacactttctcaacgctttgggatgattgttgacgaaaaagaagaacaattattttgccgcttagaaggaatgaatttaagagtgaacggacccgggcgcttaaaggtaatttttaatcaaaatttttttctcgtcctttatcccgagattaaattgaaatttcttcttgtcaaggatcaa

SEQ ID NO: 64624 - DNA, 735 bp, Heterodera glycines
aaaacaaaaaaatcgattttttcaagtgtccgtttggggtactcaaacaattatggggagcaaaaatccaacgcagaattaaagtacaggctatagggaagctattcccgaaggattcggtctccccataaatctgggcgcatcggttcggggggactgccccgaaaacaaaaaaatcgattttttcaagttccgtttggggtactcaaacaattatggggagcaaaaatccaacgcagaattaaagtacaggctatagggaagctattcccgaaggattcggtctccccataaatctgggcgcatcggttcggggggactgccccgaaaacaaaaataaatcgattttttcaagtgtccgtttggggtactcaaacaattatggggagcaaaaatcctacgcagaattaaagtacaggctatagtgaagctattccggaaggattcggtctccccataaatctgggcgcatcggttcagggggactgccccgaaaacccaaaaaaaaattttttggataaaaattatttaaatgaactgactagataatatttaaaataggttatttctcttcctttcagtatccctgcaaagtttggtgcgcttctgatcagtttctgaaaaaaaagttaagcctaaactttttggcctgtttaaaaaggaattaaaaatttttaaaaattttattcatctcactgttttgatagaaaaagcatcagagtgcctaaactaaca

SEQ ID NO: 64625 - DNA, 1643 bp, Heterodera glycines
ttggatgcttatttggattcatgtgctataacaaaaccggatcgagctcccgaacacgactaccaatacacgtggagttgtgagccgttgcgatttgaaagcatcaaaagcgatgagctgacttggcattctgagtggcgttggatgaacttggacgcacttcgcaatacggaaaacgaatttttggatgaccagggccgaatccatttgtgggcgagggtggacattttcgaactttctaattacgggtaggttttaaacagccctacaactaatctttacgtgtgatttagacgcgctgataagccagacctattaacagtgaatggtcgaactttccgagtgaataaatacgtaatcaaacttcgtgctgaattcattttactatgtttttcagattttggctggcttttccccattttttcgcactttctttttcaaggacggcttcaaagaattccttactcagaacttcgagattcgagaccccgaggtggatgccgacatgtttggtcgtatgctcgacattgttatgactcaagaccaatacgacccggatggtgggtttggaggccatgtttatttacacgaatctcaatctccgacttgacagatgaaactgtggaaggcttgcttcacttagccgacaaatacgaccttgcttgtgtgaaagaagtttgcgagaaattcctcatggattacagtgaacagtcgcgcattttcaaatttcggatggcggaagcttacggacttgtcgccttaaaagtaaggaggacaaaatttttaatctactagtttgtagtgggtttgatcgacgaccgatcctctgtattttattcatttttttccaaaaagcataaaccgttttttcttgcctaaatttgagtgataattaaaaaaatttgcagtgtctgatttttggaaggtgggttgttttcgaaaattaacagtgaagaagctaacacgtttatcccgcgttaaatcggaatgtttgaacatcgttcctctatatttaactatgcattttttgttaccgttcgcaccccttctagcaaattcccccctcttatgctttcctcttacaaattaggcccgtaacaataaaaaggcgagataggttaattgctttattttgtagttaatccatctcaacaatttttttttcattaagggtcaaacattacggagaatggacccgcaggagttttgtgccaattttcttgccaatgtcaacgaattcgccaaactcagcgaaagatccaagcgcacttgggacaggcgcatgggcgacttcagttttggtcgttcttcggcttttccatgttacaactgccggaagcgtcggcgagtgttttcgcccgagccaaacattcatttgtccatcggtgattatacggcacgctcgcgcacagtctcttccactcacacggcaagcattcgcactttgtcccggtcaacttcttacgatggccaagcgagtaacgacgacaattcatccatttaccatccgccaacggaggcctccttttctgcatagcaacaaacgcccagaaccacaaacattgcccctcatagttgggcaccctctgattttgcgtgtgtttttcttagatgcaaagaaagtcaagtcgaatgttcagtga

SEQ ID NO: 64626 - DNA, 91 bp, Heterodera glycines; identical to SEQ ID NO: 53030

SEQ ID NO: 64627 - DNA, 1592 bp, Heterodera glycines
  unsure (1)..(1592): unsure at all n locations
atgccatttcggcatgaagaggagggcgactcgtacacccaaacggaagagattcaggtgggaatctgaaacggcaaagaaaatggccctggagggggggggggattggtaccagggaaggagttccgaggccctaaaaaattgcagaaatcggacttattccccaaaattcagggacaattccctgcataaatttgtatttaaatttattggaccatttgggtgaattaaactccttccgtcaactaatcttttgaggtcgcttcgatcacatggaattatcgtgcccatgatttcgttgtcaaattggacatttgggatgttgtggacaagggacgtcgtgccgacccttcgaccggtgcggcggctcctctcaaattgggattttctcgcaaaaatgcttatcaatcggccaaatgttccgttgacattccctcggctgtccaagaagtggtaaatgagaaattaggcccgaattttttgaatattgttggccaaataacagctgtaagccaccagaattgtcattaaattaatcattttctcttaaattgacttgatttatgcctttttgaagattcaaaacgctgcttgtgatgcgagcactgtgaacgtttacaacggctgtgacggagtcgtcatgttattcgacgtgaccagagattggtcagaggcgggggggggggggaggcgtacaacaaagatcaatcgctcgctgtttttaattaccgcattttcatgtttttctgactgtgttttgtgtaggacctgggcttacatccgtcgcgaattgccctcagtgccggcccatattcccgtgttggtaatggccaacaaaatggacctgatcagtgctgctgatcagccactgccttacaccatcggcgaatgtctccaatttcttcgcgttttcaatgaacggtggggaggagcacacatttaaagggcggggggggagttgaggggccgaatggnttttagcattgggtttcggttaccctcccccctctgttaaatttgacattttaggtgcaaaccctgcccaaatgcatcttcctccgtccgttgtcccccgctccctttgccaattcgatttgtgaaggcgtcgatgaaaagcgcccggggactgaaatttttgtacaatttcttcaacattccattcctaaatgtgcaggttcttgactgacaatgaactttgcttattgctagaaaatgttaatttttaattccagaaaagctttcttaaaaatgcaatggaagcgaatttgagggagctgcgaattgcggaggaagaattggacattttggcgaaagaggaaggacaaaatcccacaaattggcgaagaaaaagcgacgaatcggcggacgaaggaaaaggcgaagagagaaaccgaagacacagtggagaggaagagacggaggaagaaagggaggaggaggaggaagaacacacggaagaggaagagaaagggcatggggagaggcagagacggcaaagggacggagagcggacgtccccagcgaaaagcgcacaattcgccgccgcttctcgcccccgtccctccccctcctcctcgtcctcgtcggaagaa

SEQ ID NO: 64628 - DNA, 1509 bp, Heterodera glycines
  unsure (1)..(1509): unsure at all n locations
aaaattttcatttttanagggttcattttngaaaatttttgctcgattcttagaggtgtgtgtgtttntcgtttttattgcacaaattttggacaaaacactgaaatatntgaaaataattgtttcaaatttttttaggcttttaggtgttaatattaataaaaaactataaaatagttgtaaataactcgaaagtcaaccttaaaacaaccacaaaaaaactttttttgttttttgtgcgttgtaggcactgggagctcaggaaaaaatatgaaaaaataaatttaagcaaattttattagaattggttccatttaaattagcgtattttatttttgctaatttttggggattaatctgttttaacaatttttagaccccaaaaatctgagcccttataatttgcgatgtgaacttacaatacgtagtggaacaattgtaggtgaccatctcgacaaacaattacagcaaagacaaacagaaatctggacaaattatgtggaagcaactgttagaaaaattaggggtcacgttgaaaaggtaaaacaaattttttggaaaattctaaaaaactaaaaattttcacaaaatctatgcacattatttgttaggtaatggtattttctgcctaatttgtagaatttcatgttttaaagtcctatcgagtgcaaattacattaattaaaattcataaaaaatttgtcaaattaatatttttttgaaaagtttcgtttcataaattttccatttttcgatgaattaatataaaaatataaatatacatatatacaggtcaagaaattgtttctaaatttaatgctatttggtccttttttcacctttaaatttttagatttttgataaaatttcaataatttattgtatattttttaaactcacatttaatatttttaaggatgttcagtaccaaaaagtagcacaagaaaactatgcgctccaatctttccccggtttggatgaaattttcagaaaaagtcgtttttttcttgtaaattcccagccccaagtggactttgacaattacaatatttttaatggcattgaaaagatcaaattaattggtggatttcaattaaaacaaaatggacgagaattagacgaggttggcatttgaatatttaataagcaaacttaataataattgtatgttctttataatacatagtaaaaatagctcaaaatatttatttaattgtattttattttgtgattctttagaaaataactgcaaattttggcgacagaaatggcattgttttcgtcagttttggcacagttatggacaccaataaatcggatttttcgtatgtcatcgaagccataaaagtgacaatccaaaaatttcccgattatttattcgtttgtaaactgagcaaaggtcatatggaaggaattccaaatgtatttgcgaccgatgaatggttggatcaacaggggatattaggtgaaaagaaaattaataaaactaaatacgatcaaattcattaa

SEQ ID NO: 64629 - DNA, 313 bp, Heterodera glycines
atgggccgaatgcttccggcagaggctggcccgcgttatgggctttacgcggtttgttttgtgatttcgaatattttgtatagctgcaatttaattttaggcactggcggcaattgccggattggcctattgttaccgcgaccgtcttggatttaaaaagtgaatggacggacggcggaacggattggtcacccaccattttgatgagagagggggcaattttgaattcggattgttccaaggtccacaaattttatggccaatggtcggatcttttttcatttgatgctttttggtttcttttcactgtaaa

SEQ ID NO: 64630 - DNA, 958 bp, Heterodera glycines
atgttgctgaatgtgtccgactcggactcggcacgcgaaggcggactgatcagcggagaaagtgtgtacaaggccagcttcaggaaggtgagccggggcgggagatgaacacaaaaagggcggggtggagccaactccgagttctaattccccatttttagttataaaccgatttttcaaaaataaaaatgaccaaatttactattttagcagatttcatgaattttttgacagattttcgctaaaaatatctataattttgaaaatttacaaacccaactttgtaaaaaatttacgaaattggaaaaacgaaatttcctaaaaaatcaaatttgcctgggatgcccatacgatttacgaaattaaatgggaatctatgggaaatgccattcattcattgtccattgcttctgttgttgctgtgaccaattcattcgcaacaattaacccaaaaagtgcgctctgttaattgtttgccttttcctaacaaattttattcggacatttaactgctaattgactgctctttccttctccttaattaatacgctaaccaaatgcacagaaattggcggacaaattgcgccaaattcaaagcaacacttcgcttccgcccggctcgcgtggtgccaccaccaccaccagccaacactcccaggcgggcgcaggcgccgacttcgcctcctccgcgggtgccaacgcgtcgtcgacgttgcgcctgcggctgttggaccgatctttggacggcgccaacagtgccgccggaagtgtggccaacggcggagggggcagcagcagagggacaccgccgccacagccacagacagtgcagctacagcagcaaatggcattcggagaggagagacccgcctcggaggcgagcagcagcacacggcggatggaaaacaattgcaatgagaagcaacagcacagccgaagcagaaggagggtcgaacag

SEQ ID NO: 64631 - DNA, 602 bp, Heterodera glycines
atgcacatagaaatagtgcacgaagaccgaatattgggcacggaaaatgtgccattggaattgaccgaacaacaattggacaaggtcagtattcggtacctctgaattttatttacccccgcttatgtctttttgtttttagttaagcttaggcgcttacgatcgcctgcttcgccaagggtcgtttagagaattggtcggcaaaatgatgagaaatcccctggcttcgcctgatctcgttgtggcgacgtttggccaaattcgcattcggaatcgccttggccaggcactggctaaccacgacaaacaagaacttcgggggttgttcctcttcctccggcacaatttgttcgtcgcttcgtactttgacattctctacgacgtggcaaccgtcgcaattggtaaaaattgttgcaattatacacaaattgtgcctttactccaattgttttgctgcgtttagacacttacgctggaaaaccgctccaaaaagatatccgtgttaacattaaactgttggaagcacagctcagaagtgaagtgcaattgcaggaaatgctctgcgagacaattggtgcgtttttgcaaataattaaaataaa

SEQ ID NO: 64632 - DNA, 1086 bp, Heterodera glycines
  unsure (1)..(1086): unsure at all n locations
atgaaccgaaaaggagaagcgatgcttatgcttacgccgtcccaagaaccttttgttgctttgctcaggcaaaggaatgtccccgtcacaaaagtgacgtgagttctctttaaatagatttttgttgtctttttttctccatttttaccttggttaatttcagagtcgactccaacaaagtgtttgatgttcgtaataaaatcaccaatttgatggttcctttcccatcggtgaagcaatttgctcagcaggtggttgacatttacttatatttaaaacaaaaaataacattttgttttaagagtttaatcgcttatgcaaaagctctctatttttcggaattgaaggtaagcgcaatttcatgaatacttaaaagttttcgttttatttattttaaaagtttttactttttgttatatcccaattaaatgcacagcagcacttttattaattttaggaagtgtttgatgtgcaaagcattgatttcgatgcactttccaggttgttttcctttgtcgaattacacatttcttgggaccattaatattaaatgttaaataccatacattttccaggtcttatgggttggtagttacgcctcggatcagatttctcagaaaaaaaggaattattacaagaaaatatgtcgaattgnagaagggaacttcgccagaaatggcaaccaaaactgaagaaattttgcttggcaatccgagcggaagcggcggaaaaaatccatttgatattcaatgccaaaacgaaatggaggaggaagaaccatttttgaaggtgtcgcgaagggacgtgttcaattccatcactgaggtcgatgtgaaggtaagcatttcgctgatttatagtcaagggaaaacgagaattttcaggaagaaattttgtcgagaatttcttcaaagaaaccaatttcgaagacaatgatggctaggaaaatgatcaaacgaatgggcgttgttgggaagcgaaagcgattcgaaaatgagagagaaagcgacgaagaagaggacacggaacagcagaagaagaagggggacgcaatttgttgttgatttttaaatgctaaataataaa

SEQ ID NO: 64633 - DNA, 114 bp, Heterodera glycines
atgatttcatcgaagagaattcggacccattacaaaccgattgtacggatagaggacgatgattcggcacagttcggatgttcggaagcagagcgatattggatgggaatggcg

SEQ ID NO: 64634 - DNA, 805 bp, Heterodera glycines
cccattttcggcactgacgtcgactttgaaaagcagcggttgtcttccgtcaatataatcatctgtacgcccggccgtcttttacaacacatggacgagaatgaacatttcagttgtgatcagctgcaaatgttggtgatcgacgaggctgaccgaattttggacatgggatttagacatcaggtgactgaattataagtcgctgatcagcgaacattaatattctaaatctgatttttatttccgattgacgccatcattgaaaatttgccgaaagaacgccaaactctgttgttctctgccacccaaacgcgacggacggaggatttggtccgagtttcgcttcgtaaccccgtcttcgtggcggcccacgaacactccggcagtgcgacgcccgatcaattggtgcaggtgaagcggaccaaacactgaaattctgaaatgttgttttttattttcaatccatccttttttgcagagttatttcgtgtgcatggaagaagcaaaactgaacatgctttggtagcctttgttatttcgataatatccgtcaaaacttagtgttagttaatttcctctttaatcctttcaggtcatttctgaagaacaatcggacgaagaaaacattggtttttgtcacttgctgtaagcaggtgatgaatcatcccatccgaattcttttgatttagtttttaagtgatttttccttttcaagggctcgtttcatcactgaaacattcactcatttggcggcccggcctttacttcacccggcctttggggtgacctgaaacagagcaaacgc

SEQ ID NO: 64635 - DNA, 826 bp, Heterodera glycines
atgaaaattttattgtttttcattgctttcattggcattctgtgccatgaagtgttcgcaaaatttacaaaggagaagaaagacttcttctcatctgtaaattttaaatgcctaaaactcatcaacgaaatgaaaaaatattctactgaagcagaatgtgagtaataaattatataataaaaaagttgttttaaattttttggtttcctttttttttgaaaagaaaaaaatattgcagaatattgcttagtctcttctttttttgctttgtaaacaaaaattcacgtcattttatattatcaatttaatgccgaattaatgaatttatttttctttttgctatagattctgaagacaaattgatggcaaattttagagatttatctgagaaagtaaaaacttgttcttgttgtgtggacgaaggtaataaatcttttttcaattcaatggacaatgccaaagaattctttgaaaatattgggaaagatgccaataaaagtcacattcaaaaatggcttcatcaaataagcaccgatttcaatacattgactattgaaagtgacctgtttgaaatttgggaaaactttatcgaatactcacatgccattacctcggaaaatttaaagtaatgtgtgatcaagtggcgaaaaatcagaatgatataagaaatgatgcggcactttatgctgtccttaataccattcattatgctgtagaaaaatgtaaaagtttagcagcaaactatgaaaagcctaagctttctgaaatgatttctgtttttcgtgatacactcctcattatgaaaaaatccttttacgaaagggaa

SEQ ID NO: 64636 - DNA, 664 bp, Heterodera glycines
atgactgatgggacgaaatcggtgagtgtttttctttctaacttttgatgccattacatttcttgggcctttgttttaagatggacgacgccgttgaattggtcactgccctggagaacatgcgggtgaacatcgacctgctcagtgtaaaaaccgacaaatttgggatttggggtcacacttgagaggaatcttgccaatgcaaaaatggtttaaaacctttgttggttttgtttcgattcaatgccccaggattctatgctcgtaaaaactagacatgcatattccaaccgtttcaggtacttttccattgatgacacaccccattaaaaaaatgagcaacaaagccggttcagtatacatagacttacctattttgtacgcataaaagaattgggttgggttcaaatgggacaaagttttctcatcttctttatattttgtatttacttacacatatcgaatggctttgttgcgcttttttaaattggggtgtgtcatcaaaacataaaaatataccttttattccctctattaatttttcaacgaatttaatttacaattttgcttttttcagaaaactcgcattggcgctgttttgaacgaattccgcaagaaaatcaaagacgaaaaactagcaaaacgttgcaaggcattgatcaag

SEQ ID NO: 64637 - DNA, 724 bp, Heterodera glycines
aaattttatttcttattcacaagcaatgtcaaaaaacgacttccgccctcacaaagaaatgtaaataaaattgaaaattttgtaaatttcatagaaattcttcaatttttcagctttatctgcggcgattgttggcttttggtgttcgattttcttgcgccttctcagctcggccttgaaattgcgctggtcaaccgccgttttaactgcatcgtcgacgaacacttcaaaacacgcaaatggaaattgggcaaaatgcgaatttgccacaaaattggagagaatggcacgaagaaaatgcaaattgtcaattccgatggaaatccattgtcaatcccgcaaaatccgttgtcgaacaaagtcatcggattcagacacattcatatcttgtaaaaatttgattaaattggaatttttcatctacattctctttttttcagctacatcgatcaaaatgtcatcgcatttatccgccgtttgttcaacggatttgtacattaccacgggcaatgatcgcattttggaatttattttgctcaacatttggccaatgctgcatgactccattcgtgttatgcttttgaactccatcgcttttcggcgtttgcgtcaattggccccgtcacttctcagcgaatgtccatcacttcgttttgtctctttctttgacgtcattttccccgaatttccgccggatgaaagtgccaatgcgtcggatggctaa

SEQ ID NO: 64638 - DNA, 356 bp, Heterodera glycines
atgaacctagcccaccgaagcgccgaagaatgccaaacatcctcaaaagtggaagcaacaacaacaacaacaatggcaaaagacgcaattttcggcactatgtacgcgcgctgaacaccgacgtagcgttcaacaaaaaattcagactaatgaatgctaaaagtacattcatgatccagactctaccatcaaatcctgagtcgcttttgcgagtcatttttggacattgcatacaatcgtcattaaatgaagctcagagacgtggaattgaaccgagtcgacttggggcaacaattacttcacagttattggaccctgacatttggattccgatccgtcagataactccaaacaca

SEQ ID NO: 64639 - DNA, 690 bp, Heterodera glycines
atggcatcaaaatttgttctcatccccgacgaaatctatcaaggtctaacaaacaatgattcgggaaatatcaatttggactttgctcaacgtactttggaaagaacaaaaagaaggagggaaaatgtgacggctaagaatgtacattataaccaggaattgtcccgttatctccatctgcgagatgaacaacaaaatcggccaactaaagttgaaattgcgaaagggttaaaagcgttgattaaaaggggagatgaaagtgatgaagaaccggtttttaatttgggatcagacagacagcaatcccacgcttcacaaattcgtaaaccacgtcgacaccatcacagctataatgaggatgaggaaatgccattacagcagccttctccaccgcttcgagctgaaaataggggacaaaagcggaaaccaaatgatttttattcctcgtgggaggaaggcgcaaagagacaactgcgtcaccaagatgaaccggttcctccctcctctaagatcgtgaatagacaaagaagaagtcaaccgccagtttcattgagaagagaagaacaacaaattccagttgacatcccgcaggaagaacccttccaaccagtcccacaaccgtctattcctatacatccacaagttaacagaaaacggaaagcccagcataccctaaatgatattcgggaa

SEQ ID NO: 64640 - DNA, 49 bp, Heterodera glycines; identical to SEQ ID NO: 57477

SEQ ID NO: 64641 - DNA, 2167 bp, Heterodera glycines
atgtctcggaacgtacgagttcccgaaaaagccggctccaactgcagtttacgcgcccaatcaacaactaacctcaatttcattttttttatgatcaatgccgacatttttgttatcaatcgaacatttaagcctatagaattttttgctaaactaagttttctgagttaaaggcaacaaacataaaaaattagttttgattataatcgaaaaaatgctaatttattttcacgttgtaattttttttctcaatgttagcatttactctttttttgaattaaaaattcccttgactttaagctttcgtttgatgccaagaataattaagttatggccgaagaaactgagtatggtcattgattggatgcgtaaactgcagtagagcgaaaaccaaatgccaagtttcattttggcatttgtgccaacatttatttgccaattggcattttaatccacgcaaaaaaaaatggcataactttttgcagttgcttttcttcgcctccacctcgttggcattggtcaaggtggttaagcggcagagtggaaatggtgccgccggcccagcagaggaaacgcatgtcggctttgagggcaatgatccgccgccgagcagcttaaatgagcccatctcagcgatcgggcctgatcagcaggtcaaattaaaatgattgaggaggacaaattttgtttctctttaatctgaaccaagggtgtgcgaatttctcggcattttcgttgcgccccatttttcggcacttttaatttttgtttcattttcgcatttaattgcgggattttttttggctcggtgccgacacttatataaaaaaatgggcaggtcaatgccacgaaaaatcgcaatgagcaaaccgaaatcattttttaaaatgtaattttttttatttggtaatctttgtgccaaaatcccatccctgtctatatccaaattaaaaaaatgagaattttcttcgattttaggccgaggacggaaagggtctcgccgacattgcctacgacacggtggaggaacagtcgcagtcatcggcggcgtccagtagttgggcgacttctccgtccagtaccagtgccgctgcgactgttggcacagtgtcgccgggcattggcgacgctgaaagtgccgccgagactcgactgcaggacaccgccgcgtcagagggcacaccatcggcaacgactgaggaggcgtcgccggtcggagtggaggaagagaacaatgacaacaacaacaattcgcctagcagcagcgacagcggcgacgctgccgccaccgcgtcaacagttgccgaggaagggcagcgactggaggagaccgtggcgaccgccacgacagcgagcagtacagcacgacgaatcgcggctgtggcatcagccgggaagaagcaggacgagcgcaaggggcgcaagaagaccgggctgccaaccgcagcggtggagaccgcggcgaccgatggcacggcgacaacaccggcgacggcacaacaacagcagcagcgcaactgcaactcggaacgccttcggcaactgatcatcgaggtagggaaggcatttggacagccaaataatttaataatttagtttttatgaagtaaattagggttggtcatttaaaaggtgtactaattactagttcgcaagtcttacgagtagtcatagtctaatgggtcagtatcgtttcgattctcagagttattcccgaccttgaatctaagggatgatttactaattgccaaatttagaacatccattcaaagccatccgtggccaagcgccaaattcagtccaaagtggccgaggagatcaacggaaagattgacgtaatatgcgcacgacatgcgttcagttacattgtcaattcaggtcataaaatttttccattaattaattagttgattccataattatttttaaaaattaattatcattaacaaattaattgcatcattagataatttgccatttttgaatagaattgttttgtgaggccgaacataacggagtgatctgcttgtgcttcaaacaacagtgatcaatgatcagccgatgaaaaaacaaacgatcaaagaaatttgataaaattgaatgacactaaatttaatttatgataaaatcacattggataccaaataattttcaaggcctttttata

SEQ ID NO: 64642 - DNA, 947 bp, Heterodera glycines
atggctaattttaagactttaatctattgttttcagtttttgaatgcttcacacagcggcgggattggcctaatccaaacaatttgccagcacattgatgaaaaaacgtcaccgatcacttcggcggagtgcgaacgtttcgacaccaatctcttttcatccaccatatccatggcaattgaactgactggccaggatgtcatgtgtgagctgatcgccgggccttggttattattatttaattcataaataaactaaaatataataaaataaaatcatattttagcccgcgtgcaaacacaactgtttccaattctggcccaatcagttgcgccttctgtcacctgcttcacaaaaaggcgttaagcgtaagtgattttaacaatttcaatgagtttatgttgatcccatatatattaggccaatatccagtggaaatgagggaccttgacttctctaaatgggaaattattttttaaagaaaaaatgataattatgaaatttttgtttaaattcttaattaaattgtgttaattttttccctagtagtgctgactggatttccggactccatttccatttttttcatttggttcattattcacttcaatttatgaacattccagattattaacagctttgtacggttgtttgagggatttaatatgatgtgtgaccgactctccgatgaaaagaatgcgtgccggctttacgtgaagcaaatgacgctgaaaatgggctatatcatggacctacaccttgaggagcaaaatgcccgagtatactgtaaatatgttttcaattgtgtatgatcgagactggtgtcctctaatttctgcaaatgttttatgttccttggccttttgattgatgcaaaaattatttcaaaaaaatttaaatcccaaaaaatgtcactttttgtattatttattaataatcttaataaa

SEQ ID NO: 64643 - DNA, 582 bp, Heterodera glycines
cttaccatgccatacttgctgcggacgcaatcaaactggccaaccctgctggtggcaactcgaacattgtggccaatctgaaaagggccagagcgggatttaagcaagcaattgacatcattgacacggttctcggagtcgcgtaggttttaaaaaatttttcaattttttctattaggttttttttgaatatagcaaattttaaaataaaaatttaggagattttgttatacaattttacttttgaccgaaaatttgtatgaaaatggatttaaaatagaaaataatgaactttccatcgaaacaaaaattttcaaatttttttttgaaagatctttaaaaataatttcagcattttttttacagaatatttaatgaaaaattgataatcggaaaatttttcgaaaattatttaaattattgttttactaactttaaggtcgaaaaaacggccagagaccgttgctgtggcacgcaaaaccccaacagcacttttgagaaccgatgattcggttgcgcaaattgttggaacattgggcccgtgcttctgcaaaggctcctctttcatcatccattctgtca

SEQ ID NO: 64644 - DNA, 853 bp, Heterodera glycines
atggcgaaaaaaggtagccaaaaattttgggtaagaccttcccaatttatgtttctcttaaaaaattgaaaaatattacgaatgaatgaatgatgaattgaataaatgtgaacattgtaaagcttagaaacgattggaaaagcaattattaaaggtcatttgggcaacgagagtaattttatgattatcccccaaagaaaagcaccaaaaaggtcattcattattcgagaaatgtaaattttatcagatgaaaaggcaagaattatagcattttagagggagaaagagaaaggccaaaaaagtgcaaaattgctaaaacaaaccttggcgaaaaatgccaaaatgtgctaaaaactaaaaaattgctaaatctacttcaaaaagtgctaaatcatatggtgctatgcgaaaaattcaagaaaaacgaactaaaacaagtcttttttttttctaaaatgcttaaattgagctccaaagatgttctactgcttataatcccactaaaaaagaatttaaattttaatataaatttaaagcgtaaatttatgatatcaaaatttttcagtgtctaaaaattcgtaataaatttatttattaatattttatgtgatctttttttaaatttcattatgatatgttcgcgcactcatatcaaaaaatttcttttcattttcattcattttcaatttctgatttttttttaaatccaaaaaatacaaaaatatggaaattaaaaggcatcctagaagcaccaaaccaagctaaaaatactatttacattatatttaggccgaagtacttataaatgtgcaaaaaaatatatggaaacatacaaatccaggccctataaaaa

SEQ ID NO: 64645 - DNA, 413 bp, Heterodera glycines
atggacaattttttattgagctcaattcaaacatgtccattttgtatggttgccaccaccgtacgtccgagagcagcacacactgtacaaggtgctatgtcattacttaaaaaccatcataatgggcgttacttaaaaaaccatcataatgaaaatttttgcttataactttgctctaaaaagaccaaatttttaatccttgctatcattcgatagatctaaatgttctttatgagcctgtaaaatttcaaaaaattttattaagtttaaaaaaagttatggccaaaaatgttcgaaaatcaaggttttttgagttcctcgagctataacttttttgaaacttaacgaaattttttgaaattttgcagactgatagagaacacttagggctatcaaatgatatcaagaattaa

SEQ ID NO: 64646 - DNA, 433 bp, Heterodera glycines
atggcattgctagtatcacgtgccactgtgttgtttgcttcatcgtacaccgtgtttgcctaccgtagcacttcgtccttttacaaaatgtacagtaacaattttgttgggtcattaccgtaatctttgcgacaaatgatgcaatgtctgaaaatgaatgttcaaattattttagatttgaatattgtgcgagttttttaataaaaaaatgtttttgtagcgtgtacaactgccaaccatggtctactgtaggcgatgaagagtgcggtaaggtgtacggtatcgccaccgaagaggaccacccaatgagagggccagggcgtgtgtttctgctcaccatgctttcctctggcgctgttcagctgctctcatgcagttctgatctggcacaaccgttccaactgatcgccacgacaaaccatttcccatacaa

SEQ ID NO: 64647 - DNA, 531 bp, Heterodera glycines
atgcgagatgattttcgccaattgccttcctctaatggactcgtcgaggcactttccgcctcctcctcttcgtccgcttcctcctcctcttcgtccgcttcctcctcctcttccgcctgttgctgtgcggagaatcgtctctttctatgctcaccgcagcagcggggactgacttttccgtccccaattcgcccctccggcgaatgttcatcttcctcctcatcatccgcttcctcttccgcttcatcttcctcctcctcttcctttgctttgtcttccgtcaccccccgtcgtccttttttctttcacaaagtggcaaagacaattgtggcggaagatgaggacgaagttcaacagcaggggacggagaatatgtggaagacaaatccgatgataaagcgaaggacgagcaaaaacagtgccaagggaaagggaaacaaaggggaggaggaaaattgccaacggaggacggacccgaaaaaggcaattgaagctgcggacgccgtctcacggatgggttttctaaactga

SEQ ID NO: 64648 - DNA, 117 bp, Heterodera glycines
atgcagaatttttttctctatcgctatgcaaaatttggtatgaatttaacaagcagaaaaaaagttaaacaggatgaagtaaatgttgttctttacattattaagaatgaagagata

SEQ ID NO: 64649 - DNA, 828 bp, Heterodera glycines
taattaaatccattccttcgggggaccgtgccgggtgccgcggggtaagcagtgctggttcgtttcatcacggcaccgaaccttttggctagtcagcaatcgttgcttaacttgccagatcggacgggtgcgcatgattccactgttccaagcaccccaccaaaagcaaaacgatataaccaaaatataaggaaaaattttttaaaaaattttttctccatcttcctttttgatactaaagcatcagagtgctaaaattaagttgtaaataaaatttggtgcgctttagagcactttctgaaaaaaatatttatgaaacaaaaaaatcgattttttcaagtgtccgtttggggtactcaaacatttatggggagcaaaaatccaacgcagaattaaagtacaggctatagggaagctattccggaaggattcggtctccccataaatctgggcgcatcggttcggggggactgccccgaaaacaaaaaaatcgattttttcaagtgtccgtttggggtactcaaacaattatggggagcaaaaatccaacgcagaattaaagtacaggctatagggaagctattcccgaaggattcggtctccccataaatctgggcgcatcggttcggggggactgccccgaaaacaaaaaaatcgattttttcaagtgtccgtttggggtactcaaacatttatggggagcaaaaatccaacgcagaattaaagtacagactatagggaagctattcccgaaggattcggtctccccataaatctgggcgcatcggttcggggggactgccccgaaaacaaaaaaatcgatttttt

SEQ ID NO: 64650 - DNA, 2039 bp, Heterodera glycines
ccctccattgacattggtctgcttgtcctgcgcggaaatgaggaattaatacggcaaaaattgaaacgccttttggcaataacaatgccaaaagtacgtcaaaagttgtacgtgcatttggagcaaatggacgtcatccgggcacttcttcccgccatttacattaatgcggcatccattgcgccgaaaattgatctccgagtccttctgaaccgaacgaccagcgtcccagttgaccgggttttctatgacgaggtttttgatttttttgtataattaatttaattttagtttgtaaatttatgcttgaaaagatttggcacatattcaatgccattgaaaatttgctgttttcaggtcaaagacccaagccatccgatttttccgatgcttcgcgaagagaatgggccaactttcaagatggattcttttgccacctcccatcacaaacttccggaaaagccgtatgaccatgtcgtgttgggcgggacgttcgaccgattgcacaacgggcacaaattgctgctctccgaggcggcaatgacggcacggacaagaatcacttgcggagtgacggacggaaaaatgaatgaaagtacggccttcttgcccatgtcgaattgtgcaatctcagaaatttaaaatacatttatgttgggcttggaaagttgaccaaaaacagaatgtttaagtgtcctgctagcgctcttttttcgggaaaaccgcagaaaagcaatccaaccggaaaagtaatgaatttcggctttttaaatttgaattctaaaaaattccagaaaaaattctttacgaactgatggagccggtcgaaactcgttgccgctccgtcaccgaattcattggcgacatttccgaaggcatcgaatgccaaacagtgcccatttatgatgcgtatggtccggccattgttggtgaccattaccaagcgattgttgtcagtgaggagacactgaagggcggcgaggcggtcaatgcgaagagaatggtgcaatttaatggcggtttctcccatgttttcgatcccttacaaaaaatgggtatttggaatttttgcaccaaattcaaaaattccaatttaaatttgttgagcaaaccagcggacattacaatgttttccattttcaattccaccccttttcaggagaatggcttcaaaaagttggacatttgtctggtggagttgttgaagaatgcggaagcggacaaggtgctgaacgagacgaagctcagctcgagtttgaagcgcaaggaaatgctcggcactttgctggctgagccgggccctccaaaggcggccatttccaatgcgcattacgtaatcggactgaccggaggcattgcatccggcaaaacgcacattgccacctttttggcggagaagggctgcgaggtgggcaaacatattttcctaatggcctttgctaaaacacagacaatctttaaaaatcagaccgtttttttctctcaaatcccaaccccctcgagttttttaaaattagattttcggagttgcgagacatggctttttaacgtttttctgcaccttccccaagcaaaaattttaaaaaatgcaacaacatccaattgaaccaatttttatttgttttttttctgcgagttaaaccgttcaaaaaagtttcaagcattaaattattagttgaaatgttagactattaaaaggttatcgaatgcgatacgcttgtccatcagttgtacaagaacaacatggaattgagggagaaattgtccaaagtgtttggggacgaaattgtgaaaaacggtgacatcgacagggacaaattggccaccattgtgttcggggacaaggcgagtaatctagataattggatgatttttgcggaaatggggtatttttcgtaaaaaaaatcatgacttgttttttgttgttgtttttttgcctagatacttttttccttttcgcaacaaatccggcaaagaaaatttaatgcattttatttacagcttttcaaacaaaaacaaattttcggtttttttatgaa

SEQ ID NO: 64651 - DNA, 984 bp, Heterodera glycines
atggtcggcggactgttccacaacttgcgccacaacctccaattctttgtcaagaatttggtgagacagtgccaaaaagaaaaataaatcccacataccgtatccatttgggtttactgtattttttgaaagggatgtctcaatcatgggtgggatgttctattaaagaaaactgtatcttaattaccatatgtcttcccgaaggcgatctgtcaaaatgttctccaatgctgccatgagactgacgtggaacggtgcgtttcgtgcctttccacgtgcattttccccgacaaaacgccgtacccaattgacgagacaatggcacgtgaacaatgaacatttatttatcttaataaattttatcgatcatatggttttatcgtattcctaaattacgactcccttttctctaaaataaagtccctcttttgaggggaattgaaaataaagcaccggggctatatttctggtcaaaaaaagggaaaacagagataaaagtcaaattttagagggtctcaaagaaaagcgtgatttttcaggtacataacggaccgccgcatgacagcaattttggctattcgtacgccaaacgaatgatcggtgagttgcaatgatcagctaaataaattcaaatttccaataaacaaacagatgtactcaaccgcggatatgctcaggagcacaatcgaaagtatcgagaaaaaataaatattttatttttgattaaataattttaaactttctctctccctctctctctctctctctccccgatctctctctaataattaatgcgtcgagattgccgacatttttgaacgagtgttccaaaggtacacttcggcagtgccgtgcaatgtatttggaccgcgtgacaattacaatttggagaacggtaagagaaaacgcaatggacagaagagcacagacaaatctttacggagagggaaaaactgggcaatgcacgaaaatatgaaaataata

SEQ ID NO: 64652 - DNA, 669 bp, Heterodera glycines
atggaaagttcgactgaggaaaaaatttcacccaaatttcttcaatttataccaaaatcgccaattattggtgggtgatcttacacaaaataatttaatacattaatagagcatttttttcattaaaaaagataaataaatattaaagtttaatgataatttggtcaatttaaattaaatcttcgcttttgaaaattattttaatttttgacggacttttatcttctaaaagtcgttatccattgtaataaataatccgtatttgcgtagttgaacagccaccttcatacgctactgtaacacagtatcagcgccagcaacagcaacaacagcagcccaattataataactaccaatcgtatcctgtccaaccacctcaacactgttatggatgttacgatggtgctggacggtacggaggaaacggtaataaactctcaattatcattactattttttataggagggtataatggaaatggaggatataatagtaatagtggacaaggtcagctaaacagtaaaaattaacagtgttcggtggaaatggaggatactattatggacaaggtcatcttctaattgccaacataaataacaagtactttaggaggatacggcgtggggtacggtgggaacggaggatacggtaactaacaaaaccacata

SEQ ID NO: 64653 - DNA, 802 bp, Heterodera glycines
atgcgcggcggcattctcagcaaagcgttgcgccgctacgccgccgacggacacttaaaaggcgacgatgtgccaaagtgaggaggagacttttaaaaattgaaaatttgattttttaatatatttgtggcgattcgaatcggattttctttaatggcaaagtttttccttgccgatttcttgagtcaataaaggagtttcctttatgactagtgaatgatcatatgggttttgccaatgttttatgaactgaatgcaaagtcaaaattcaaaatttgataatttcgttacaaatttttggcgaaaagttgtttgttgattttgacaaaaatttgagaaaatttatcatttttttgtagaatgagtggagataattttgaatctgctgaatttaagtatttttaaagaaaaaaatcagtttgaagattttttaaagttttcatttatttttcactttttttttttggcatttttgagggtttttagcacaaataaaccccaactaaaatcgggcacaaaatatttttcctgctgttaaattgggcatcgcgatatataatttgaaacttttgaatttgaaatttgtctccaattgattctaatgaatacagtaagcgtcgtgtaagcgttgtggacagttcggacgacgactatcgctacggtattttgggcaagtcgctgcgccaattcaacgatggcgggaaactgtatttgcatgacaaccatcgacggaatgacacggaaacgagcagcagcagcgctgaagggacgatgacagtgcaaaatgcaattggcagaaagg

SEQ ID NO: 64654 - DNA, 581 bp, Heterodera glycines
atggccaaaatgttctttttatcacctcggtcattgtggatcgacgcgaagtatccatttcgaaaaacgccgacacgagaagcgctcgtgccaagatcgatgccaattgcatgtgaatttcgcggcattattttatgcgaattagaaatttggtaaatcttaaatccggtttattttttaccgtttgttggtaaaaattatattggtttgattattttttggctctattgaagggagtcaacaaataaattattaaaaaattttatttgaagaaatttgaaaaatttctgatttttgacacaaaaatatgattttttaatttcaaatttctgcttactaaatttttctgtctattttttctttaataaaggattgtccttcaaatttgtgcattaaaaatatttttgttagtctttaattaactctcgctcccgcccgggactcccgtaaaatttcagcgggattttaacgggattcccgatcacgctcccggaaattttttttaacggactctatcaaaaaggaaaaaaatatttggcaactctaacaaaaaattcgaaatcgtaattctgcaaaataaa

SEQ ID NO: 64655 - DNA, 451 bp, Heterodera glycines
atgcaaacaatcgctgaaattaaaaatttcgagattattgaaggcggaagagtttttattgtgagagtgagaattgagaacgtagtacatgtggagtacagggtttgtattaaaaatgaaaaaaatatcagttttttaatgcttgcgttttatgccgtaagggggtgtgttcatgtggcgttgagaaggcactgacaccttatttgaaggtgtctgtggcagatgatactgggattttggaaaatgtggcattttttggtgtacgtgggaagaaaaacggaatggtaatgttttaaagaaaaaataccattctaatttaaattcaggaggagttgagaggattgtctggggccgtgtgcaccatgaaaatcggcgcgagagtgaaagaaatcggagggaagaaggggatctattactctttgattgatattgtcagcctttaaatctataa

SEQ ID NO: 64656 - DNA, 1644 bp, Heterodera glycines
atgaattctgaaaaatcagaaaaagctaataccattttggtggaagctgcaaaaaaagagacagaaagagcctggagggatgtagcggcgttagcagaagaagttggcgattttgccaaatcttctcgggaaacgcttaatcgtgcaataaaatctagggaaaaagctccgtatgctaatggtgttcgggaattatatcttaaaatgtcagattcaatttgggaaattttcaaaatcatggaccaaatcaatttggagtcagaaaaagccgaatctgcgtggcgtgagttcgagagatgcaaaacatttgaccaggcaacaaagttcgaggaacaatcgcaaaattcattaattgaagcccgaagattacattttgagtcccggagggtgcagagccaaatgttaaattatgaaaatagactccaaacaattgttttgggagcatatgggtatataagaaccaaaaaaaactaaaaggggcgcactcaaaaggtgtttgataatcgattcattttgtcatgaggacttaaaatttggatttacaaaatataaatctaaattttattttaaaaatcctttcataattaatgcagagcaaaattttaaaaatatcctcgcatcaataatcgaaaaaatttataaaaatgaacagggaaaattcaaaagcattctgaagctttcctttggttttgaatcattttattgccctcttagatgccctagcgaaaacacagccgaggctttgttccgacaagtcttattaaaagaagaactatattcgcttttctatcctttggacgatatcataacactagaagtaactataatcccagatgtccacaatagaccaagaaattgaatttattaagaaaaatgttacgaaaaattggaaatttgccggaaaaatacttaaacgatcaaataatcttgaaatctttgcaaataaacttttcaaaggggtgaaaactttctacataacagcatttagtgcacctggaatggaaaatttatatttttcattcttagaaatgctcgaaaaaattcaaaaattacctaaacttattatgcatgagtatggaaaccaagcattagctatgcaaaaattagaaattggactcaaagaaataaatatatttaaatgtcaagaagcagagaatttaacatgtttgaggcacaaaaaagaagttgcgttatgggtaataggaaaaaaagaatttgcgttatgggtaatatgatgatgaaaaaaacgttataaaaaagagaatagtgtaaaaaattttcattataaatgctgagactaatcagaataaagtatcacaaaaaatgacatctttgagcatatctcatcatgctgcgcatcccaatggtttttattttatattatttttataaaaattcaataaattaaaggtatttggacaaaatctttcgaaccaattaatccaaaccatgagttcccaacagtaaaatacttcgaagtcaagcttgtgggacacgggtgattatttttacgttaattttttatgatttaatattagcacatatggaatcggcttttcaacgcgaaagtacggatccggtgaattcgttggatggaacgacgactcgatcggttatgattccatgggagatataattggttaa

SEQ ID NO: 64657 - DNA, 808 bp, Heterodera glycines
atgatcaatctgtcttttaagttggcagtacaaattgatgaaggaaatccagacagcagaattgcaccggatgagcacggtcgctatttgatcagcaaagttcatgccgtctatgtacaccaaaataatagagagattattttctttcattttatggcatgttttttatctattgaatttcttattaatcaaagttatgaattaaaaatatattttgagaattaatcaattataaaataaattataaatgttttaatgaaaataattttataataaaccatatcttttattctgtctactctcgcccctgaagcgcctggggtcgcttcgttgtcacaacgaaatgacccttggagtttcagggtgaaatcgggttcaccctgggttcatatctgaaccttgggcgcccatcaccctcatgtctctcttatatttaaataaattaataatataattaaaaattttgtatatgtaaatttattcaaaaatcaacaaataatttattcataatttaataaaaaattgtaaaaatatggaaatcctaggttggcccggatttgaagagtgggtgcaatccgaggattgcgaaaacatggaacaaagtaaccaattcacagaattggttacagttgaagcaatcttcgacctaatgttaaagcgaccaattgcgcaccatatggctaagatcgtcgaaacctgtccgaaatatgtccaaggtagatacaaatcgggacgaaaaccattaaaatgattgtgtttcaaattctttagttcgtcaaaaatatgggctcaaaaccacaaaaataaa

SEQ ID NO: 64658 - DNA, 1160 bp, Heterodera glycines
atgtctggacaaggaaacggaggaaagggacgcggaaaaggaggggcaaaaggttaccgtaaagtgagtaaaaaataatttgcaaaaaataataactatcgaaatttaattagtttttaccaagccacttcatttaaaactatttatgagaaaattattttaaatttgacaaattttctagggtaactaatacttttaaataaaatttaattgattaaatgtgaagtttttgttaagtttttccaaatgggacattgttaactattcttattttagaccaatcttgacaacatccaaggcatcaccaaacaggtcatccgtcgtttggcacgctgtggggggctaaaacgcattcccggcctgaactacagagaaattccggtatcaaaaaatggacgaagggattttcatttgtttaacaaaaatgaaaatttttgacagtatctggtattattatttttaactcaattttccggtaaaaaaatcattttgagtcaatttttttagggtaattcatttttggtattttttgctttcattttttctaaattctttggtagaaatgtaagatttttcggtactaattaatttgagttcgctttttcagacagtccatggcaacatccgatgcatcaccaatccgattcgttacgaagccgtcaatggcatctccggggcgatcaacgatcaaattcagccagacgatcccgttttcggaacggtgaaatttctcgggtttctttcagaatctttgtaaaaatagatataatgattataataattagagctcaatttttgagagccttttttcggctcattagtttcaatatattagcaagtaaaatcacatttttccaattggcttgagccttcaacattgacttttattatgttttttttccttttttttgcgtgtttcgtgcctttttggcattttgccgtttttggtctctttttcaggtaataattaaaaaatttaaaagtacaccccgtattaaatgaaatttttttaaagattggaaatttcattttttttccttgataaaaaattatgtttaaatttttccttattcaaaaatcattataaaatttttataatcatttaaatgagcaattttgattaagtttacatgttttgttccctaaaaattcttaataaa

SEQ ID NO: 64659 - DNA, 633 bp, Heterodera glycines
atttcctttcagtttgggttcacacacaccaaaaccggcttaatgtttttcctttgtgacggctcttactgtttgaccgccactctgtggggcgttctgttggaccgatggaattgcaacaattttctgatgtttttcggctcatccgccaccattgtttcattggttctgtttggagttgttgaaaagtatgtttttccatttcctcttaatcaaaattactccaattttcacttcccattttcactgattaggcgtctcgaatggatttgcatttccttggccattcttggcattgcctccggcgccctttacatcccctcgtttcagcagtgtttggacgttgtcaagtcatttgtctcatttaaaatgttgttcttccgaaactaaactcttttcaggaagaggggttacgacgattcatttcaaacgtacggatgcgtttccggacttattcaatcctcctacgcattggggtgactaaataaatttctggtttcattatacctctgacaatgtgtttttcctttgtttagtggttttatgggtccgactgtcctcggcggttggggctgtcaaaagtttggcctacgttcgatcgtgttatccatcgtggtcatcaatctcattttt

SEQ ID NO: 64660 - DNA, 618 bp, Heterodera glycines
atggaaaatcgcaaccttcagtgcccctcaaaattttccattgattatattctgtccattcctgcaaaaaagccacgtcatggtgttcaagcgggagctggaacgtcatcggctaaatctgcaaaggatttcgtcaaaaagttggaaaacagtgtggagcatgtgccacggttccaatacgtcaaggccaaatctaagttcagcatcgaggacgtcccaacgaatccagaagggctgcttgcaggcatttttcaattctgcattgatgaggccattacggatagtcaagagcgtggaatcaaaccaacccatattggatgtttgatcagcagccctctgttgaccggcggtgacatacccacccccattcgtcaaatcactaacaacacggtggacaccatccttaatcaattcaataaagtggcgcaaagcaaacagcagcaaaatgtgaccctctggggcgagccgttcacagttactgtgaccaccgttgaccgaactggacttcccgacaaaagaagtctgaaaggtggcgcccggcgcagtctggcatctgtacatcaccgtatcaatgatcggtgtttgatcaaagttcgctccaaagaatgtcaattttga

SEQ ID NO: 64661 - DNA, 604 bp, Heterodera glycines
cacaaaaatttcgtcttgcggatttttgtccggcaacaaatcccaaagtaccggcccagctgatccgttgtgtttacgcgattgaatctgatgagaaaaatggcattgctgtgtatgagcatgagaagcctgcttggtgggcaaattgtccttattttatgtccttaaatttttgtactgcaaattttgtagcgcaaaattcctaaattagagacttctccaggactgcaaaactgcttagcatcgccccttaaaaaatgttttttttttaagaaaatgggttaattttcaaaaaaaaattttgctaatatttcaaaattatcatgccgacacattttttttatcttcttaaatttaagtacaattccagtatttgaggatattaaggttgatacttgatcttttaggtctgatccgacaattttggcaatgttcgatgattttgaaaaattacggtcagctactgttttgaagggacttcatgcaaggacacttacgggatttatcaaatcatttttgcaggaattgaaggtgaaattttattattattatttttaatttcaattgtttttaaattatgaatgaaattaattactaaaataaa

SEQ ID NO: 64662 - DNA, 1203 bp, Heterodera glycines
atgtcggaggaagagccctgtgaaaacaatgtaattgaattcattttttattcggtggacacaaaattatgacataattccatcaaatttcggtatttcgaataagaaaaaaaggaaattaaaattatcaaaattagaaaatataattaaaaatagacaaaatcacaaaattttgattggttgtaattttcgtagaccgaaaaaagttttattttactcggagttatttatgcccctgttttagaccacccaaacgttaacacgatcttggtttggcaaattcaatgtatagcgattaaattcaaaaaattaaaatattttaattttagaaaactaattttacaaaaattgaaatgccaaatttgccggaaattccgctgatcaattttcgaataatcctaatgggcaaggaagaagtgattaatgggccaaaatcactaaaggattgatttagcccctaacagctttagttggttttttttttattagactcagtttttctcatattttgagtctccaaaagaaaaattttttgcttatgaccataaatttttgtctaaatattattttactttcgaaatcattcaatgtcaaaaacactaggcatggacggagttcaatcactcatttcccaatacccaaatttttacggccataaaaaatttctcggaaagtcacagtaattgcccgaattcacctggcacaacaccatgtcctggttgagctgtcgccgcacatggctcacatagttgtacatcagcggcagcgtaatgaacgccgccaccaccgaggccagcgagaaggtcagcgcggaataggcgacaaatttgtacgccttcacttgcgtgtcgtaattcataatgtgtggcaccggttgttttataataatcaatggattagcccgcctttgaagggataattaaggataattaatcgccttttacgctcattaataatgtcccatgatggaagcttcaatatggtaatgacccattaaaaaaggaggatttttttttattcccaaccagtggacggacggctgctttaattgaaaattacagtaatcgatgatacagtatttcaagggcaaatattgtaacggtaaatgaaaaagaaataacaaaaatgtcccaaataatgattataagattttgagaaagattaaagaaattattgagaaaattaaatttattgataagatta

SEQ ID NO: 64663 - DNA, 1152 bp, Heterodera glycines
atgaattacgacacgcaagtgaaggcgtacaaatttgtcgcctattccgcgctgaccttctcgctggcctcggtggtggcggcgttcattacgctgccgctgatgtacaactatgtgagccatgtgcggcgacagctcaaccaggacatggtgttgtgccaggtgaattcgggcaattactgtgactttccgagaaattttttatggccgtaaaaatttgggtattgggaaatgagtgattgaactccgtccatgcctagtgtttttgacattgaatgatttcgaaagtaaaataatatttagacaaaaatttatggtcataagcaaaaaatttttcttttggagactcaaaatatgagaaaaactgagtctaataaaaaaaaaaccaactaaagctgttaggggctaaatcaatcctttagtgattttggcccattaatcacttcttccttgcccattaggattattcgaaaattgatcagcggaatttccggcaaatttggcatttcaatttttgtaaaattagttttctaaaattaaaatattttaattttttgaatttaatcgctatacattgaatttgccaaaccaagatcgtgttaacgtttgggtggtctaaaacaggggcataaataactccgagtaaaataaaacttttttcggtctacgaaaattacaaccaatcaaaattttgtgattttgtctatttttaattatattttctaattttgataattttaatttcctttttttcttattcgaaataccgaaatttgatggaattatgtcataattttgtgtccaccgaataaaaaatgaattcaattacattgttttcacagggctcttcctccgacatctttcgcgaggttgaggtgctgaaaaatgcaccattcgtcgcgcacggaaaccgaacggcgcgccaggccggctacgaagcgcatgcagcaggcgcgccttctggcgccggcccctctggctcgtcggtgggccgtgccggaggcgcaaacgtggctggtggcggtggcgcgtgcaaaccatgctgcgtgccgggacctccgggccctcagggacggccaggacgacatggaaagcccggcaagccgggcgcgcccggagtgcctggcgccgccggcgctggaccggcaattt

SEQ ID NO: 64664 - DNA, 832 bp, Heterodera glycines
atgcgccccttccaagtgccttacttggaaaacgtggtcagcgagttgggcatctacggctccatcatcgcggatagttccaacggcaaagtgttgtggaattcggccgaaggctacttgtcccgaagcaaggtaatattaattggtcattaaatgacagtgtaaattgggcaggctattatgatacggtagcggaaggaggaatactgtaatattttaccagaacgaaaaggcgtctattgtagtatttaacaactgtataagtattctttaattaattgcttataattctctctttttattaaacaattaattaaaattggcccatagaagcattgattttgaccacagagtccctaagtgggctgttttttaagggctagccaattttgtgaaaattttattttttacagtaattgttattaaaagatttaaaaattttaaaatgtgattatttttggcaaaactgcgaaaaatttaacttacttttccactggtgcctttcggcaccgccggccaccgcgccgcaaaactttatgaaaagcaaaaaaaaaaaaaaaattcgtaaaaccgttgacacaaaaaattttaatttatttgattgaaaactcgaaattcaagccttttgccctgaattaaaaaaaactgagaaccctgggttagactaatgagtaaatttcggctagggaagaatacggtaggactaagttttgtaatttcaattgctcaatttaagccggccaacttgaaccagggcggtgtttgcgaagggtccggcgttgttgactcggtgcttctgttccccgacaacgaatttgtcggcaccaactga

SEQ ID NO: 64665 - DNA, 139 bp, Heterodera glycines
aagaacattttgttttgtgccacatttgtatgccattctccgccattgattagaaattttgattttcttaaaaaatatatttttttaaatttttggtgaattgttaccaccacttttcgttttggcattttgctgatct

SEQ ID NO: 64666 - DNA, 321 bp, Heterodera glycines
atgtcagcaacaataacactcactgatcaccaacaacgccatgccaatcagccgccaactggtgccaacaatttaagtgccattaccatcagcaacgatgccgtgttccggccaccgatcattgttgagcatcgtcgtggcacgactacgaccaacgcatcaactatggtgccaagaccgaaaagtgccgacggagaagcagctaatgacgacgatggaattgcacgtccaatgccaatccgaccaatgcacggcgccaccaacagtaacagactgttggaagaattggttcgtgaaataatttatggctgcattttatga

SEQ ID NO: 64667 - DNA, 712 bp, Heterodera glycines
  unsure (1)..(712): unsure at all n locations
atgactgagttgccccatttggtgatggatttgcacgttcgactgccgaacagcttcaaatgtccggacgcatgttttattttgtccggctttgtcgacgctttgtcgttccgcgaattgtttccgcattgtgccaccgacgaatttatgcgccgggcagagaatgccaaaatcaaaacaataggacacagatcaaagcaacaaagtgccacgtccgacgatagtgatgacgaacaaggacaaatggacaacccatgggtcggctttttggtcgaaaacccaaacggaaccaaattcgagctgaaattgcactactcaccttcgaactatgacaaatggtcgaaaatggtgatccgacaattggccgacgacgaccatcagcaggcggcaaaagaattggacgaaaatgccgaaaattatgatgttagtagctaacccttttatttactttttgattttgttattgtattttcagaaatgcatttgcttttgcttttataaataaataaaaatcatgtatatgtacttctcaaaaacggaccaatgataaaatgaatttaaatcaaaatttgatttgtgaaatgaccgaaaagtaaattagcaaaattatggacaaaaactggcgaaatcttgttcaattttaaatagcgaanatatatttttctaattgatacaaaaagaaaaataattttccttatttttttattcccaa

SEQ ID NO: 64668 - DNA, 4227 bp, Heterodera glycines
atgccaaattctcctcctccatctaaacgtccccgccgcttttttattgaagagttgctccgtgagccattcaatcagctttcgccaccgcgcaaatcaccaaaagattacgtaaaactgctcaactccgaaactgagcttgtcccaaaatttcaatggctgaaaaataagtcgaactttatcatcgagaatgtgcctgctgatccagaagcccttctaattggaatatttcaagaatgcatggatgaggcaatgaacgaaagccgcgtgaaaggaattaaaccaacccatctgggctgcaccatttccagtcaactgctaacatcagacatttggatcccaattcggcagcttactcctgacaccatcaacacaattctaaaccgatttaacgacgttgcgcaaagcaaaaagcaggatggagtgacactttggggcgagccctttactgtgtcagtaactacagtcaaccggaatgggctgccagagaaaagacaattaaaagggggagcagcacgtaaactggcaccagtcaatcacaaaatacatcaacaatgccttattaaggtgtataatacttaggttttgttgaatataaattatttaagatagaaaatgctgataattactgcttgttttacgcgatgcaagcaacaatggtccgcacagttggtaccatgacacgtcaacatttttacgattatctgcatggaatcaagacaatgatagggaagctgcagagagaaacaacagaaatgatgaatgctgtaaatgctccgctcaacctcctcaattatgatgcagaaatttatgttccgcgaatcatcgattggtggaatgacgaaaaatttgcgaggcagtggaaattcaaggcgtttattttcggatcagcagggcattacaagccattgtttaaatatggggcggatgactacgatgtgtcaattctgctgtattttgatgagggacactttaacggtgtgcagaaaaatggcaatttgtttgggagaccgtattgtctgagctgtgaaaaaacttatgatcgtccaaagcagcacaccaaaagttgtaaagcccgctgcataaaatggtataaaaaaacgtaatagcaaataaaaattctctattttattagctcccaaatgggaccgctttttccttgtaaaccaatcgatggatttcgtcaaaaatgcagcgactgcaataaaatgttcttcaaccaagtctgctatcagcatcatctttccctaaacttttgtaaaacgagcaaggaatgcaaacattgcggtgtggtgtgggacttgaacaacaataccaaaaatggaagagaggtaggttttgttttttcatcaaattttttgctttaaggaattgttttttttaagggtcacaaatgcaacgaaagatggtgtgaaaattgtcaaatttttcatgaatttgagcgaggctgctttataagaccgcttgaaccgaaccacaagaaggaaacaatgggatggcgtctggttacttttgacttggaaacaacacaacacacgcctatcgacccggattttccggaaaaacggaagcatcaagtcaatttcgtgaccgcaaaagtcgcgtgtccggattgtatttcatcagggagatggaaagagagtttgcgtggcaaattctgcaacgtttgtggctatcaccgaacagtcacattcagccagatgccttttcatgagacaacagtcgacaaacaaaatattgaccgtcaccctttggttgcatttgtgaaatggatactttacaagctgccaaaacaatacgacactattgcttactcacattttggagggcgattcgacatggtcttggtctttcgagaattattattggaaggattcaacccttcaatgattaaaaagggaaatcgattgtttgagatgaaagcaagtttttttttattgattaacgtaaataatcgtgtatttgtaggtgaaaagcaggaaaaagatgaacccaaatgtgactttccgagactcgtggaacttaattcctgggccactggcatcgatggtcccaatgttcggtttggatgtgcaggacaagcccttttttcctcacctggcaaaccggcctgaaaattatggatgcaatctcttccctaccaaagctgactatttggcagacggaatgaacatcgcaaagagaaaagaattcgacaaatggtatcaagagaacagaaatgcaccctttctgcttgatgaatcattggccaggtaaaaaaagtaaaaatttttaaaataaaacacattttagctactgcaaaaatgatgtcgatattttgatggctggtttaattgctttccgctctgaatttttggagatgacaaaaagatccgccggggcagatggaaaagctgatcgggctgcatacaccaccccacacaacggaattgatccaatacggcactgtattactatcgcttcagcatgtatgcggcattttcggacaaaccacttgaaaccagcacacttggctctcgtaccagaaaagggatatgacagttgcggggataatcaaagcgatttggcactcaattttatggagtggtatgcggaaaagtttgatgttcaaattcaaaatgcatattcagccaatggcgaaaaaaggtagaatttgtcgaaaatacaaaaaaatgggcaccaattttaagggttggaaatttccgtcttgatggatggattgaatctcagcaaaaggggctcgagatccatgggtgcatttggcacgcatgttccaactgttatccggatgataacgaagtgctgccttgcggcaaaacagcagggcgaattcgcgagaaaaacaaacgacgaatggaaatcattttggaacaagtcccaaacgttgagattttttggcaatgcgagattgagacaatgttggcaaaggacaagcaaatgaggaaaaaattcgacgaatataccggtgacgggggaccaatcgatatccgggcatcattcatgggaggaagaactggggctctgaagctttttcacgaggcagcggaagggcagaaaatcagctattatgacgtcacaagcctctaccctttcataaagtctattaattttcgttttttccttatcaattttttcagttttacaacggattacccaattggtcatcccactcttcacgtcccgtgtgaagaagttgattggcgacggccagaggacaatccatacccattggccattctcaaagtgttcgtcattccgccccgaaaaattgatgtgccagttttgccggtcaaagttgatgatcgattatgttttccgctgtgcatgaaatgctgcaaaaagttccccaatggtgccgtaaagctgtcttacagttgcaactggatttgatgagacaatccggggcaatgtcgaggccgaggagcaatttatcgcggaatgcaacgaacaattcggaattcaaattgaccgtactaaaatggtcacgaacaaaggaaagagagccttggccaaacttgccgtcaacaatttatgtatcaattttcaattttattttttgcatattttaaatataggggggaggttctctcttcgaaactttggcctttcacaaactcatatcacggacgatccatctgagctcgccaattatcttgacaacaagaaaatcgaagttacggggcttgacatgctgacaccagacagaatattaatcagctaccaacagaaaaaggactggattaaggagcatccgtgctcaaatgtggtaatctcccttttcaccacttcggcagcccgattacacctactaaaagcaatgcaaaaagttgtgcgtacgcctggttgtgtccttttgtacaccggtaaaaaaatataattatccaacaaaaatcatattttattttaagataccgattcattgatttacgcccacccaattggcttgaaccctctcaagactggaccccatttgggtcaatttacagatgaatttccagaggtcaaatttttaaatttaattttttaattcaattttttatttttagcacgaaattttggaatttgtgagcggagggtcaaaacaatatgggttgaaacttcgtcgcaatgactctgaccaaattgaacacgttttgaagctcagagggatcacactaaactatgatgtaacagaaaatcagggacttcgctatgacacattcaaagatagtgttatcaaatttgccc

SEQ ID NO: 64669 - DNA, 335 bp, Heterodera glycines
atgggcgcaatgaatgcagtcaaagtgatgggtattcgttatggtagattatagtttgatcttcttttttctaatattttagaaattgtatcttctcttcactaattcttcacatttccagctaaaaatgacctcttctcaagcttagttttttccaaattgtatcttcttttaactcattttaaaattttcattttcaatttactaatatttcagaaattgtatcttctcttcactaattcttcccttttccagccaaaattgacctcttctcagtcttaatttttttcaaattgtgtcttcttttgaattatttaaaattttcaagcaataaa

SEQ ID NO: 64670 - DNA, 759 bp, Heterodera glycines
atgaagtcacagacaaggcaaagcaagaatttactggtccaaatttatgacacccatcttggcattttgcactatatgaaacagaattggcattgtgttggatggtttggcatgactcattgtgaagaataccgcaaatatttgggcattttgtaccaacatttttccgatatttatgctgagattccgaccaaaaagccatcttttaggacaaaaaatggtgaaattcgtctgacatttgtccaagttatggaaagattggcaaacatttttaaattttgtcacggctcgaaattggcggaagaaaatgcaaaagaatgggaagaaatgggcttaattctgccaaacgaggaggaaataaatgcttataaagcaaattcggaagacaaaacaaaaggaaaagggaagcaaaaggcaaaaatggaagagtcaccacaggcaaagtttgacgaaatgatggaaaataaatttaaaacgattgaacaaaatgcacagagaaatgccaacagtggtggaagaggggcacggggaaatcagtcgggatcatcttcattggcaagagcagatcagtcggaatcattaacatcgtcgccggcattatcttcattatcatcggcatcggcattttcaccgttattttcatcatcgccattatcaccaccacctgcttcgttatcagtatcctcatcaacagcagcaaatgccgaacacatttataatatcgttttgaacatgccaatacatagcatggctgacgcg

SEQ ID NO: 64671 - DNA, 870 bp, Heterodera glycines
atggcgaacatcattagtggtaccaattttcaaaaaaggcgaaaaactgatccattaaattacagaccggtgtcattaaccagcactgtctgtagagtttttgaacgaattttaagtagcaaaattttagaatttctgaacggtataagattttttgataaaaaacaatcgggtttttaaaaaataggtcgactacaacccaaatattaaaaacaatggacgatataataattctctacaaaaggatcaacaaattgacattatctatattgattttgtcaaggcgtttgattctgtaccaattgatttattacttcaaaaaatcaaaaagattggaattgaaggaaaaatttataaatttttaactaactttttaaaaaatcggagttttaaggttaaaatcggcgaagtattgtcagaaagtttcagaatattttcaggagtgccccagggaagtgtcttagggccattactctttttaatttttataaatgatcagccgtccgttattacaaatgaagcggcatcagttggcataaaaaagtatgccgatgatgttaaattatattatgccaatgaaaatgatgaccattcgaatcagttggataaagcaattgaggctttggaaaatggtcaaaaataaatgggttagaaatttcaactgggaaatgttttgttctttatttagggaaaaataatatgaaaaaagattatttaattaactcaaaaaagatttcagaatcggataatgttcgtgacctaggcattataattgactcgaaactgcatttttcagaacatattaacaaaattgtacgaaacgcttatcttagagttttccagattttaagagtcttaaaaaccagggaa

SEQ ID NO: 64672 - DNA, 676 bp, Heterodera glycines
tattgttcaaaataataacggctccctaaaaattcacggttttgacgaatcgacaaatggcagcgtcaacattgcggatattttccctgttgtgcctatcgcaaaacacacaaggatggatcttccgtcttcaagcggtaccgtggagttgttcgaccgaggattggcattctctgtacaggaacaatacggtctacaaacggctgcgacattgcgacaaaaggacaaccagtttctcacaacatcacatgccttcgcccccactgaaatttctgctgatgctctatttaaatctgtcgttgctgcggcaactgtgcaaccacaacaaaaatcaccaccatcatcatcattatcatcggcatccccacaacaacaacaacaacaacaacaatcaccatttttggcatcggcaccaccaccaccaccaccaccaccaccaccaccatcatcatcatcattatcattggcaccaccacaacaacaacaacaacaatcgccatttttggcattggcaccaccaccaccaccagctccgccaccaccaccacttccttcaccagcgcaggcttcgtactcatctgtttttttgatatcaccaggagatgaacaaatatcatcatttttggcatcggtaccaccaccggcccaacatcgtactctccgatttattgattga

SEQ ID NO: 64673 - DNA, 495 bp, Heterodera glycines
atggaaaaacatggagatattcgaggatcggaactttttcaaattcaagaacaaagatcgacaatgagtccgagaatggagaaagaaaccgaggcgccaaaaaccaagaaaactgaccttttcaaatattcacggtgccacaaaagaaaggttgggcccccgtgggcggaagggattaagctgggattgcagtggaagaaggacagccggtcgtactcgtgggaaccgtaaccgttcttcatttggagccacgcgttgtgctaaatggcaaaaccgcctaatttctgcagaatcgggcaaagcccggcctccatcacaaaatatatcagcaatctccgagacccgttcattgtttttttgaattttagtcttttttggcatcccaaatgcagtgatgttggagtcatggcatattgtacaaaaaaagtcttttggcaaatgcctgaacctgtaaaggcattctctggtcgaattaatagaaactctttaaaaaca

SEQ ID NO: 64674 - DNA, 1387 bp, Heterodera glycines
atgggtaaattgcgtgccaaaatccaatttgaccaaaccattctcttcgtcttgttgttgtttttctgcattactgtatatcttcggcacacggtggccacatgcatcgaggaaagcagcagcagtggtggcacacagcccacaacactaccaccgttgactgtagattataccgtatgcaaaagaatggcgccagatttacgccaagcatgcataatgaggctgcaatggtggcaagaggcacggaaggtacggtagtggcacaaggggaaggttgggtgtgcaaagatgtctgatttgtttttgtttttatttttcaaaaaaaacaattatctttttctcgaaaaacaaaatttgaattgtttagctcccaggaacaaaaaagtaaaaaaaaaactatgggtatatattaattcgttttcacaaagtataaattatgtcgaaaataaaatgataaaatttttttgtatccttacaaaatatagagtttaaccttaaaactactacagtcgagaacgaaaagtgaaaatttaggcggaaagagaagggcgaattgtgccagcgaaggaattgccaccgccgtcacaagggcttggtccgcttatttatagattttatttattatttaatagcttttgttaattgttatttttcaagaaaaaatatgcgacagataagaaattaccattaaaggtttgccaacccatcggaaagcgactccggcagaaaaagcagcccaaccgccgccgtcggtggcctcggaacggtacggatgcttaaacaccagctgcttatgcaaatacatgaaaggcaagaaaattgagaaatctaatagaatttgcaaaaatattataattaaaaaaacattttaggaatactttttatttattgttcaaaacatgagaatttttttatgaaatttttgaaaccataaataaatttagagttttaacttgtttttagatcagtgcatctcgacggcaaaagcggcaactcaactgtttgagaccagcagaccaaaacgacagtcgggcgagccggataagagtttggcacggtgtaagcgaatggagtaccgtatgctcagcgatgatcagcgagagcgatttgtaagagcattgattttatataggctttagctaatgtattgccactgtacagctgcatggaaactgtttaaactcaaaagtaataaataggaaccgagttttatctggatcagagaccggaaaaaatttttatatagaaaaatagatacaggttaaacctgaaaaaatatcagtaaacgttacaggaggtacaggcaccaatgactaaatttctgtctgatttaaaatttgttcatgaagcgataaaaattgattgtttcaagtaatcaaaaattaaa

SEQ ID NO: 64675 - DNA, 1662 bp, Heterodera glycines
  unsure (1)..(1662): unsure at all n locations
atgaccgaaattcgcgacacaaattcaaaaactttgaaaagttcattgagagagtctcaaaccgagactctcgaatattcattcaccacccaaacagttgcgatgcatttggatgtgaagccacacaattttttgtacgtgccaactgttgatgtggagagcggtgagtctgaggaattgctgaaactgatcgattttgacggagccgaaccgatcccggggaaaattcggtggggattatggaggaaaaggttggcacattacaagcgggctgactaccgaagagtgcccaaaaatccgctgtactcaccgttgtattcgagcccagaaagttacagaagaaaggtgagcaaatacaggaaaattttaattttaaattaaaaaagtttaaaagattttgtattaaaattatatttttattttattccttaaaaaatttagtgctcttcaaaagcggacatgtggtcaatgggtgtaattacttatgaaatcatttttgtgagaatggtcaaaaaggagttccccgacgcaaacgaagaaactttacgggtaattgattagtttgttggataatttaagggggcggggatgttaatgataatgataatgatgcaaatgatactcattaagaacacgatcgttttaattctttcttttaataattatatttaataattttaatttttatcctttaaatctgattgaattttagttggcaattgctaagaaactctttgacattgtgcccgtttacagtggcaaatcgaccgatattaaagcaaaatggccaaagccaaagcgatttgtgtacgatttgcgttggctaacttcctctgtcaaaacagtgaaaagcattctccgaatttggttaaatttccctcggcttgccgttctcatcacagtcagtcaaataacaaactttcattaaaatgcgctttttaatattcttaaacaagcaaagtctgggtttgacaggaaacaaaaataaaaaaactgctgagctcggcattttaggagattgataaaaccaaaatttttcagaaatatattaagatttaaatgccacaaaaaccattttttgtaaactaaacttaaaattaatgaaaacttctaaaataatagcaactttaattatttatgtcattttttgaagacctttttaaaatttgccacaaatttatttcgattttagaagacctatgacaaaacctaaaaatttttaattttttttttttgaagaatttgttggatgttatgcctcaaagacggatgacagcggcgggcgttttggagtatttggccggcaaatgctacccggccgagctgttccgcacggactacgcacgggacggcacgattttcaacaaaatttcattcaacaaattgtcagatatggtcaacaaacagcagaagcagcaatgtgacagcgacaaatgcactcaaaaatgggtaaaaataagccaaatggtggcgaaagtggcagaaatgcgccaagaggggattgtgaacaaaagtcaagaaatgttggacaatggtgacttanaagaatgtgcaacacggcatggcgaaggtgggaaaaagggaaaagtgattagtcactcattgatcagtcaaaacaaacaaaaaccagatcagccaaatcaancattaagagcaaaatga

SEQ ID NO: 64676 - DNA, 1021 bp, Heterodera glycines
atggagtcgccgccaccaactccaggaccagtgccgacgcccgagatggacgaggaaattttggaatttggcttttcgctgccgtcgacatctgtcacaccaatcggcgatttggtgccgttttcgacaacaccaactgcgccaatggacaccggggaaatgacaccgccaccgctggtcatcgacgagcgatcaccgcgcatcgaacacttggagaagcagctcaaggaccaggaggacatcatcaagtttctgcgcgagcaggtgcgcaaccgtgatgcactgatcagtgatctgcgttgccagctggagcaatgcgcggtaccaccaacggcgccaccaacgacgagcaaaagtgagtgaaataaaatccccctttactctttttcgaaatcttaatctttttctaattttagcgactccaacaggacgaccaaagaaaaatgttgatcatttgcagtgcacctcacgccgcaaattggctaagtcctcaaacgtgcatcggaaatggaacatctctttgaatcgacatgaccaaagacaatttggcaagctcttatgcacttaggccaaatccaaaatttcacaaaagtacacatttttagcaaatcactcccaaatttataaatttaggctcaaccactttcgccaaatgacttggacgcatttgaacaccaaattgaggagttccgtgtttttctggcccaagaacaacggatgcgcgacttcctatctcagaaaccgaaggcccacttattgctcaatcatttcgtcccatttgctcggcaacactcttttctcggcttgctggacgagcagggtgggcagcaaaaattaattaactcaaattttcaaaaacattaggggatgaggcgctgcactcggtttggcgaagactggagcaatggtggaaatgcatgccggatgccgaccaaattctacaacaattcgagcaccattttgtcagcaattggcttctcgacaccggcataattgctgagatgaagcaggcgagttttga

SEQ ID NO: 64677 - DNA, 521 bp, Heterodera glycines
atgaaggcacgccaattcgcgcattgcataagctttccatcagtgagtgataaatggattttaaagaattatttttaacaattccatttttcagttttatattgtttcaaaaaaagatttgccgatgattgggaagaaagaaattatgtttctttccaacaattctacaaaaggtattcaaaaataataaaatattgttgtgtatttattaattaattcgtaaatccgctacaagaatttttcaatgaaaatttgtaaaaaaaaacttctgaaaattctaggtaaaataatttgctaatttcatttatcgaagatgaaacaattcgctaacaaattttcatctttccggattatattttaaatttttggcgccatttaagttgaccaaattctcatcgatggaacgcacgaactgaccaacaaaaatgcatttaacactatgataatgaatttaatcccctttttaccatttaatttatttatattgtttcaatattaatattgatttaaattttgcataa

SEQ ID NO: 64678 - DNA, 794 bp, Heterodera glycines
atgaagcgcatgggttacattattgtgacggcggttgacaaaggcgaaattttaaaagcggcaacattaaagggtaaacagacgtccaaaagcggcttatcatgaatttgctcttcggtttttgtattttcaaataaatttcagcttctgtcaaactttggtccatcattcaagcaataacaattgacgagaaccaatccgccgacccgcggtccgccgctcctcccattgactatacgtccctttgtgtccgctttcccctgcccgactcgctggacaatgccatgtccctgttttttgacgacacgcggcacaatcggacgaatgtgccggttgaggacgaactgtgcgtgtccaacccgttgttggagctgatcaaactgttgttggactcgtccctgaaaagccagaaaattttgatggatgctttgacacaaaatgggacccacgccaatgaaagtattcccattgattcgtccctggcccagcttctcaactctctttcgttggattccctcggcaacggcgttcgcggattgctcggcggactctctttggagccggagactcggaagattgccggtgcaaaggcactgatgttaccgtatgcattgaaacacggcacagaggaggaagaagcaaatgccgagaaatgggagctgaaattggcacaggtggagaagaggagagggattaagcagaacagcaagcaaatagattcacatttttcttttagttcctcgaccatttctattcgcctcacatcaaagcgaattggtaaattcttggattaa

SEQ ID NO: 64679 - DNA, 968 bp, Heterodera glycines
atgcctgttctccgaacgccaccactaacccggacgagggcactcaaccagggaatcattgttgaccgcgatggaaacgcatttagggctgaaaattttggagtttcggggggcaggccgatctcgcccttagcgaacaacgaaaatcagcgactggacgacaatcatgaaaatgttttagcagagactgagattcgtcgtcgcctgctttacggaggaatggaacaaagcgcacctgaggaacaattggagtacgacgaaatggaaaacggcgacgaacaaaatgtcaacggtatggtgcaacaaaatttcgaaaatggagttgaagctggggatagagggagttttggaaacgatgcattggacgcacatgggttgcgagcgttttcaacgccgcttaacgagcaaaatctaagcgctctgcagcgagacctaagaatgcaacttccggaaaatttgagcgtcatccaaaaccaaattagggttatgaatttcatgcaaaatcaaatgccaaacccagtcgcgcataatttccctgcattgaatcacccacaagcagtcaatccgattgcttgccgacccaatggtcagttgtacgaaaatgctgcggttaattttgagcggcagagagaacagcagataaggctcacacagcaaccggttgttgaggaccaacaatcacacgttcggcgaattcctccgccacatgcctatacacaaggacaccgtcggtcccaggacgaaggatttgagtttcaccaaggacagcaacacccaaatttcaaaaaaaacctacctataagagccaatcaacaaaatcgtcctgagtgcaatcagcaaccggtcccccaccctgggctggtattcgatggcatgatggcacaggccattcgaagcctcgacggtttttcatacacgatgacactcaacgcaattccgaacctggacggcacagaggttctgattcg

SEQ ID NO: 64680 - DNA, 3278 bp, Heterodera glycines
ttttgtgccaagctgacgagaacaaacgagtccgtccaaatttcttcgcatcacgtcaatgcagtaaacacgaaagtaattattgcccaacggagctggaagctcttgcagttcgatttggtgcctggaaattcgcacaatttattaccggaattccgaccaaaataatcaccgatcataaagcgcttccgccaatgtttcggagtaagaaacaaacaggaaactctcgagttgaccgctggttaatggaattgaacgcacgattcactctcactgtcgagtacagtcctgggaaatccaacattgttgctgatgttttatcacggtccggtgctttaataagtgaagtcactgagaattttgacacggattcagcttttgtctgtaaattaaaagagaatgaaggcgaaaagaatctggaagtggatgagatcggggaaaaagagagaatcgattgggtcgaagcgacaaaggtcagcgaattcagcgaaatatacaacttcttgcaaaaacgaattttgccagacgaaatccggaagaaacaaaaaattttggatacttttcataaattttccataatggatggattgctgtattttataccatcgaaacctgaaggaccaaaacttttcgtccccagcaaattcaggcaaacttttattgatcagcgtcattcaggaatttgttcgggccatttcagtggaaaaaaactttttcgtcaattgtcggaaaagtacttttggccaaatatgttcggcgactgcgttaaaacctgtctaagttgtagaatttgtgcacacagcagaaaaccccggtcaaatgaaccgccactccggataatccagacgtccgaaccgttggaacttgtctgtgtcgatattttatcgatcggaatgtccgaaaacggtaatcggtatgtgcttgtctcaatcgatcacttcacaaaatacatcgtcgcaaccccaatcccggacaaaagcaaagacacagtctcaaaagcatttgtaaaagagtttgtgttgctgttcggggcaccaaaaagattccatagtgaccaaggaaaggaattcgtcaacgaaactctaaaagaaatttccgccattctaggcgtcgaaaagaccacaactgctgggtacgacccacaagcaaatggagctgcggaacgggcaaatcaaactttgcttaatatgcttaaaaagtctacgtcctcgcactggagttgggatgaacgacttcctttcgttgtgttctcgtacaacactacaccgtctgaagtcactggattttcgccatttcaactgatgttcggaaaaattgcaaattttccaggggaaatagactttaaaaagtatggaaacccgttctacaccgtggacgaggaaacatatttacaagcatttaaagaaaatttgcagttaattctcgaatatgcgcgtaaaaatgccgaaatttcacgggcagaaacaaaaaatcggtacgattctcgcccaaatgtgaccgcaaacaaatttgcgattggcgacaaatgcatggtcatttatcccggatcgaaatcccgaatacagcacaaaaaactgcattggaatcagttcgggccgtacaaaattgttaaaatgttcgaatcgtccgcagacgttgtcccagttgataaaagttcagctgaaccgattaccgtcccaatagaacgtctcgtccgtgtaccagtcggagttcccgacatatcaacgctcccacacggaaaaaacccataccggaacattttggctactattttgcttgcaaatttagaaataatagttcaaaaaagagaacaaacagacgaaactccggtgtcgagtgaggaatggcaaaaaaagggaatcacaaaaaactcagcagaaaatttcgaccaaaatcagttagggacaactgacattttaggtgggcggaagatgcaacaagacgaaactgccgggcttatttggaccatgaagtgcgaaggcgaaagccacgaattctgtggaaaacttctgtgcgcggagttagacccggttttggacgcaaaaacggagcccggaaacgtggaaattggcactcctctgcaggccattttgtgccttttcatcctccgttccgttgccacagtctcttccgcggcggcaaaaagccttgttcatcttatacttggctctgaatccgggatggagttggtcgtttacgagggagtccgaaaagacaacattcgtgccggtgcccttccacgagaagaagacgtcgagaaaatttggtcaatgtggtgtgaaaagtgcgcggtgaccaaaaagcttctccaatcgtcaggatttgagaagattcgagtgcaaaattccgacggagagcccaaagaaaagcccgaaactattcaggtcgaaatgccggaagcggtgcccaaattgcccgaatcagagcgtgacggttggagcacattgttcgaacagaccgggtggattctggaaaaagtccgttccatcgccattcatcgtagccgcacactagttgagactccacgagttctgatcggtgactcaacggctttccaactctttcccgaaatgcgggcacaaacgcaatttgttggcacggaacgagggctgttaactgaagtgatccgtccacttagcgaatgcgtcttctcaagcaaagtgcgcgccgcaatgatcatcctcggtcgtgattcgctggtcaaagacgagaccgttgatcagatcatggaacagtgccaacggatccaacaactgtgttcccgttttccgtccgtttcgttcatttggctgcctccaccgtatgttcgtcagtacgatttggcctatcacgaaatgatcggccgtctttccgaactgctcggcgattggtttgttttcgtgactccgtttggtaggagtttgattgaaatctggcgttatggcgattcctttgatcggagtcgtgtcaatgcagatggatggatgactgaaaatggcattaaagcattgtcggcgtggatcagcacacaaattccgaaatggccaaacaacagacaacttgggattcgaacggtccgctccagtgtttcggtcactaggagagtctatgggttgggtctatgcgaccgcccggagactgcggcttcttcttcggctcgtggggggttgggtctatgcgaccgccgcccgaattctcgttctcgatcgccgtttagacgccgcgacaaccgccaatcgcaaccattcgttcgaggaggacaccgccgagatgatgtgacacgcgaccgccggcactag

SEQ ID NO: 64681 - DNA, 3721 bp, Heterodera glycines
atgcctgttctccgaacgccaccactaacccggacgagggcactcaaccagggaatcattgttgaccgcgatggaaacgcaattagggctgaaaattttggagtttcggggggcaggccgatctcgcccttagcgaacaacgaaaatcagcgactggacgacaatcatgaaaatgttttagcagagactgagattcgtcgtcgcctgctttacggaggaatggaacaaagcgcacctgaggaacaattggagtacgacgaaatggaaaacggcgacgaacaaaatgtcaacggtatggtgcaacaaaatttcgaaaatggagttgaagctggggatagagggagttttggaaacgatgcattggacgcacatgggttgcgagcgttttcaacgccgcttaacgagcaaaatctaagcgctctgcagcgagacctaagaatgcaacttccggaaaatttgagcgtcatacaaaaccaaattagggttatgaatttcatgcaaaatcaaatgccaaacccagtcgcgcataatttccctgcattgaatccgattgcttgccgacccaatggccagttgtacgaaaacgctgcggttaattttgagcgacagagagaacagcagataaggctcacacagcaaccggttgttgaggaccaacaatcacacgttcggcgaattcctccgccacatgcctatacacaaggacaccgccggtcccaggacgaaagatttgagtttcaccaaggacagcaacacccaaatttcaaaaaaaacctacctataagagccaatcaacaaaatcgtcttgagtgcaatcagcaaccggtcccccaccctgggctggtattcgatggcatgatggcacaggccattcgaagcctcgacggtttttcatacacgatgacactcaacgcaattccgaacctggacggcaacagaggttctgattcggtgaatgctttcttcaagcaatttgatgttgctacagaagagtggcccgaagataaacgattgcgagcgctacgctccaaatgttttggaaaggctgagagagctttcaattcagctgtggacgcaaaccgtcatgattatcagctcattaaaagagcgatcatccgacaactggacgacactgacgcaaaacaattgacgtcttttgaccaactgatgcgaggaattcggcgtcgaccgaacgagagtatcgatgagctgggaaacagaatctcgggattggttcgccgtgcttatccgggtctaaccgaacaacaatacgacgagtattcaatcatgcactttataagggccatgtctaaccctgagttagcgatcactcttgaaatgacgcgtagaccaggcgcaacatttgatgagtttatcgcgcaagccgcacgagctgaagcaactcagttagctgctagaagtgcactgcgacctaatcaacagtatcaacgcccaatgacaaactcaacgggtccagccaataattatgcaccaaataatcgctcaaataattggcccaaaccggagcttggctcaaatccgtcatatcgggttacatgctataactgcggccaaaatggccacgtctctcggaattgtacgactccaccaaaattttgttcctttcaagagaaccgaaatcaaatcgcaaaacaccaaggttcaggggctaacgctgcgcctttaaattggaataggcaagcccctaacaaaaatggacaacaattcccggcgtcaaggaatttcctccgtcataattacctcgttgagcaaaacaacgagccaccaaaacggaatgatttactggctggtgccgtgaatgccgaatacgggccgcaaattgaaagtttctttcaaaatgcagtgaacaagacaagtgatgtcgatggttctgatggaagccctcttgttggaaagataatcgttgcaaaagtctctgttttcgaacgacagtcggatgcaatgttggacgggggtgcgcaaatttcactgatttcagccgaattttttgcacaaatcatggacaaagtggacaaaaatgatattatttcccatttggaacgacgcattgttgacataaatggtaaagaagtgaaatgtttcggaatcgtttgtctgccaatcacgagaggaacacagacggcgcgagttcgcatgtttgttgctcaatcctcatttggttacgaccttctcttcggaaccaatgctttgaatcaattgggatttaaactgatcgacaaagtcaacatgaatgttgttgaattctccccgatggaaacacatgcaaattcggcacatataatctatcgagtcacacttctgcctcaatcatccacacttgtcgaattgtcaatggccaatggacaagaagacaaagaagtcactgtaataggaagaaatgatttggatgagcaactaagaattgagcctactttaacatcttgcaaaaacggacaaatcgctgtgccgatcacaaacttttcgtcaattccaattacactggaagcgaatgaaagtgtcgcattggtcgagcatgtcgatgaatggcacgaattggaacattcgtttttccctccgttcttcgtcagcagcgtcacacacgaaaatgaaaacatacgcactgaacaaatcaaagaaatcttacgaactcgtattggcatgtctcagcaacacgaagcggacaaattggaacgtttaataattggtttcgaacaaatttttgcactcgatgacagcgaactgacacaaactgaaataactcagcatttcattaacaccggcgatgcctcaccaattcgaggccggatgcgtccactgccatttgcacatcgtaaaaaagtttcgtcaatgctccaggactatttaagcagaggattaattcgaccatcaaaatcgccatgggcaagtcccattgtccttgtgccgaaacgtgatggaagcttaagattttgtgttgattatcgagggattaattcggtcacagtgaaagacgcatacccactgccgaacattgattacatccttctcgcactaggagaaaagaaatacttctcgactctcgacttcctttcgggctactggcaaatcagaatggacgaaaagtccgttgaaaagactgcgtttgttactgaattcgggttgcacgagtttaccgttcttccattcgggctttgtaatgccgttgcgacgtaccaacggttcatgtctcggctttttgaggatctgattaatgactttgttttcgtctacattgatgatattttggttgcatcagaatcgtttgaacagcatttggagcatttagaaattgtgttcgagcggataaaagattccgagctgaaattgaaaattgaaaaatgtcgtttttctgcctccgaattgccatttctgggacatgtgttaactcgccgtggtttgaaaatgaatgccgataaagtaaggcctgtcattgaactgcctttgccgtcgaccaaaaagcaattacattcatttcttgggttcatgacgtattatcggaaattcatctatggctttggagagattgctgcacctctgtttcacctcctaaaaaagaacacaccatttgttttgggagagaaggaaatattggtagtcgagaaattgaaagaaaaacttcttgaagatgcggttctctatttcccggacttcaaaagcgcaatgaatgatgctgaacgatgtttcatcatcctcaccgacgcga

SEQ ID NO: 64682 - DNA, 666 bp, Heterodera glycines
atgtatcaacaaagggtctatctccactctctggcgaggtatggccagccaaagcagagtggggcataaacaagaattttttaatctttggtatttcctctattttgtgcctgctctacatttatgtcttgtgccaatatgcctattgcaacagaaatttattcagctttcccgacaaattgttgagataattattgtgagtgggaaatgtttgtgttcaaattgatccatcgttttttttaattttcagatttgcaaggggagagcagcaagacggacgaggacctgccgatgagcagtgttccctattttccgatggtgcccgactcaatgattgcggaggagcacatggaagagcggtccaaaaagttggagaaatggctgcggtcgatgctcaaagtgccggtcaatcgcgaataccacgaaatggtcaaaaagcaaccttatttttaattcttaatatcattcggtagctcagaatgtctttattaccctgccaatttcaaaaaaaattgttaacttttcgaaaagttatgactaaaaaatctggaaaacttgattttttaaaaatttattttgccagaacttttttgaaagttaacgagtttttttgaaattttacaggctaatagagaacacttagggctatcggctaaatatcaataa

SEQ ID NO: 64683 - DNA, 3690 bp, Heterodera glycines; identical to SEQ ID NO: 7389

SEQ ID NO: 64684 - DNA, 351 bp, Heterodera glycines
atgggtggaagaattcatattgttgatgaattcccagccaatctcaaacacgctgttgctgaggtggagtttatggacagattatgaatttttaaatataatttttacttttttaaaatttaggcttttagaaaatagctatagatacacatttaaaaaaacatttgatcagaaataatacctttttagctattttctgaaaatctgattgtgggttttaatgggggaaaaagccaaaattaacaatatcaccgaatcaatggtgctctcactaattgcacattggcaggataagaatttgtttccctcattccttcaaattagttaatttcttaggagttttttagccta

SEQ ID NO: 64685 - DNA, 648 bp, Heterodera glycines
gtgtgaagatgcgcaatgcttctcagtgcgttgcattgggacggacaattcgacgcttttccacacaaaaggatgtgttaacatggacaaattgtgggatgttaaactgccacttaaagaatttggattaaatgaatgccaatcgatgaatgggacggcagagcgcaatttttgcgatgggaacagatgcaatgggcacaatgaaaagcaaagcgtaagccatgcttttatgggtgaatgacaaatgagattttttgattgtttttggcattatagaatccatttttaaagttgcatgggatggcacggcattcactgattttagtgccattttaaaaaaatagaaatattccctatcccaacatttgagcccagtcgggccatgctaactgaaaaaagagttcaaaaaattttatgtaacaaaaattttcttatggaaagtgaaaatatgattagggaaaatgaaagtgagaaaataaaaatttagataattattaattttggttctttacgggcggcataattaacttaaatttcctttattagtcatctgaagcgacaaacgctcgaagtgctgaaaccaaatcccgtgtcattaccggtgccgaaactgttgccgtttcatacgacggcacgaaaaagaacacc

SEQ ID NO: 64686 - DNA, 116 bp, Heterodera glycines
gacgatgtgcctcgtgtggttgccagcatgtgattgggtgtgtgttaagcggtggtggttgtgctgctgctcgtcaagagacgagagtctccacaaagctgatccgagccgcataa

SEQ ID NO: 64687 - DNA, 1338 bp, Heterodera glycines
  unsure (1)..(1338): unsure at all n locations
cagagttgacaaatttattcccatcgtttttnaaggtattgcgaactttgctttgcccgattcggtatcattcagcagatgaagtactttttgttgctgaatttattaagatttttgaaaatatgtccttcattggccgttagaggcagtaaaatttgattgaattttttaataatccacacaaaaatgggcattgccaaatccaatttccaaagtttcattgctcttttagggaattggacgatggcatcgccgaggcagtgagcagtttgttgtgggtggcgcctcgcattggacacgaaattgcggaattcaaggcatactttgggcaatggcaaaatcagaaaaacaatgccgtggtgtgaaaagcttttgtccaccctagaaacaaaatttggtgccaccaaaattactttcgtgtggtataaattggccgattccaatcctaaagaatttaatggaatttttccattttccctaaaaattccttaaacattatcacgcttacaattaactaaataattcaattaaaccaaactgaaaagcatcgtccaaatgtaggtgatcaacgacgaactgacccacaaatacggcaaacaattcgcggaggccgcccgtatgaaccaattgccggagccgagccgagtgtcgaccaaattggtgcagaaattgtccgtcagcgcaccgtccaaattgctcgtcgaaaagtttgtcaccatttatttggggggtgtgactttttttgacaatttctcggtaattgcttaaatatttttctaatcaatgccattttgtttgctttttaaattccaattttttctctaggtatttggtcactattgcgcaatcggcgggcgtcgatttcgcgccggacgccaaagtgatgcgtgaagacgacgacgaaattgcacgagcggaacgcaacttgatcaacttcatgaacgaggtgtggtgccattggggttgggtgggcaccgtttaatcagccatcgaattggcgggattctgcgtttattgttaatcagacacgaaaaccgcgcgcaaaaaatggcacttttgcacccttttttgattttgtgccttatccgaaaaacccgcttttccgagtcgtacagcgattggtccaccttttctacacgctttccccccccccctccgtttaggagcagtacgggtggactgtccgtcacaacgacgacccaaacagcaaaggcggcggcggagggcatttcgctgctgccgtcggtggcgccattggctccgccgatccgttgatgaaccagggcagcaacaacgccagtggcaatggtgctaatgcaatgcctatgccgccaaatg

SEQ ID NO: 64688 - DNA, 437 bp, Heterodera glycines
aaaatggtctaagtaaaaatcgtaattacgctcaaaaagcttctcaaacaattttagcgcttccaattccttctacaatcgcctttatacatcccattatgagcgctaaaattatcagagtgccgaaaatcgcatgtgatctaagcctagaaaaaatggtctaagtaaaaatcgtaattacgctcaaaaagcttctcaaacaattttagcgcttccaattccttctacaatcgcctttatacatcccattatgagcgctaaaattatcagagtgccgaaaatcgcatgtgatctaagcctagaaaaaatggtctaagtaaaaatcgtaattacgctcaaaaagcttctcaaacaattttagcgcttccaattccttctaaaatcgcctttatacatcccattatgagcgctaaaattatcagagtgccgaaaatcgc

SEQ ID NO: 64689 - DNA, 1649 bp, Heterodera glycines
atggcactaaaaattccatttgaaggcaaaggaaattcagaaatgttggcctcgtgttccacgccaaagtcaagtcaggaggatttgctctgtcactttcgccttttagacgaaacttcggtgtattttcgacctaagcccagcgatgataaccaacagcaacggcatgggaataataaacagcgccaaaaacgggcaaaatgccaacagaaacagcagcaacttcaaattgacgattattttaacgcaatccgtcggccaaagcatttgcgcggagcgaaacggcacagcaaaacgacggagagggcatttttggacatggaatttgatcatttggggaaaaccgaaatggcattggaggaggaaaagcagcagcaaatggacgatgagaagtgcagctcgccaattctgttggactttcggaggaattccgccggaagcaatgaaacggaaagtgagtaaagaaagaaaagccatgggaaggattagggacaagtgatcgccgctgatcagtgattgatcatttgaccattatcacttaatgttttggtattagtgactttttgatcacttatataccattcttatcactgattattgaccaaatgatcagtgatcaatggtaattggtgctgatcattagggctccaatttttagttttttacctatttttttctgagctccctatggcctgaaacggacgaaaaacatgttttttcggttgttattgttaagctagttttcgagttgttagcaactattttctagttttttattgttcgcacctaaaaccctaaaaaaattttgaaaaaactatttcaactatttattgttttgctcaaaatttattaacaaaatgcaataaaaacgaataacacactcttaagaagcgacccaaaaaattttaaaagatatacccccccccctaagaaaagaaatgaaaaattttctcaaaaattcatctacaaaatttattcttttttttcttgtcaaatttttttgaatttaaaaattatgtatctcattactgatttagcttaattttgttgctttttggataaaattttatgattttacacccctaaatttgaaactttttggtacgtattttcccatttttagcacctaaaaattggagccatactgatcatttattcatttatattttttcataattctttctccatttcgagatttccttcctcctcctgcttctcctgcggttggcctcaattgccaaatgttttctcctcaacttttgcctcggccgagtgatccttcggctaataatttctcgccctcgggccgtcattacacggtgctgagacggataaggatgaagcacaaaatgaagagggatgcactgatgaagaggaaaagcgaaagttatggggacgaacaaagacaacagtacaccaatttaccaatggaaccaatcggagggagcaaaggaagtgatcagaatgagaaggaaggaagagaagaggacgacagcgggaggaaaaggaccaattgcaacagtgacagcggaatggaagagaaatgtgagtggggactgatcggaggaggaagacgaagtgatggagaggaaagaaattggggagggagggaccgtggactgatcagggaggatggaagttgggattga

SEQ ID NO: 64690 - DNA, 283 bp, Heterodera glycines
tctcgactttgtcccttccaatgcccattcttccgtgcccttattaatcgtcgtccttcctcgtgttcttcttcctccgctgctctgctgatgttcccctacagttccttctccaccgtgcgtccccactccatctcttcccaaagttcgtccactttctcctcccggaatttcacccaatcggacaccgaagcggaagaggagaagaagtttcagaagcgaatcgtccaccgaagagaagtgctgacaccgtcgagaatgaaatgggactgggacagaagag

SEQ ID NO: 64691 - DNA, 299 bp, Heterodera glycines
gaatgccaaaatatgtgcttcacccaatccaactgttcacatcactgaacaacaccgaaaatgtcgaaaatgcacagaactcgccgcgctttgcacgcgaccgctttcacgttcagtataacgctaccgcgcgcgcgttcgcaccactgtttgtactgctcgcgcatgtcgtgtacgcgtcgccaccaacggcacagcacgacaacgacagcgacgttgagtttggattggcacaggacgctgcgggagctgccgaacttgtggaaatggcaccagccacgggcatcattgtgccaagg

SEQ ID NO: 64692 - DNA, 57 bp, Heterodera glycines
atgaagccaacattcaacttcaacctttttgcatccgtctttcttgtgctttgtgtg

SEQ ID NO: 64693 - DNA, 400 bp, Heterodera glycines
atggacgtgtcttggggatctgggcttaaaaaagcccctgccgagggtaagggacggcatggagacgtaccgtaccaatcacattattaataattttatctcatttttttcacttttggtgattttttaaatttattattattatcccattaacaggaggaggaaggggcaaccaatctctcatcgatctctaactgtctgttctcttatgtctccttccttttcccatacactctctcgccatttctcgttttctcaattaaacaatccctcccctttggtgcctttctcatagatcgtgccgcgcaatttcaccttgcacacttggacacaatgcttctttgatgggaaattgtttgtgttgccgccctgccctttgtagatgaattgcttaaataaa

SEQ ID NO: 64694 - DNA, 162 bp, Heterodera glycines
agccatgaatgagccgtggaaagaaggtgcagcgtgaagagaccagcaaaagaagaaaagcgaagaaattcaaagaaatttttgaaaaataaaatttaccgctaatagttaaaatgattttggtggaataaacaaaaaatttgcgtctgtccaaataaaaaa

SEQ ID NO: 64695 - DNA, 720 bp, Heterodera glycines
atggcggatgcggacggaggaacagaacgccaatttaaacttggcatgcgccaaagcatttgcaaatcgttcggcgagagacgcggtgacaagacaacaaatggcattgaggtgttcggaatgaacatgttcaaggagatgatggagaagcgaagcggccagcagcagacgacgtccgcctgtgaaattctggtgggaaaattttgcggaccgccaattttacagaaaaatggcaccgaaaaaatgaaattttatgtccaccggtgccgaaattggaccgctagggagagaattattttgaatggtttatttttataacaaaaatgggaaattatttgattttggctaattatatatataaattgtttgcttttggctaattatatatctccgatttaaatgtattttttttaataattccttttttattattttattaatttatttagaattcattctccgactctttgctgccctctgctgaacgtagtgctgaattcgtcattgaaaaaattgacgacgagaaatttttcaatttcggtttgaaagcaaaggacgcatcattgtcaccatattttggattgttcagtgacggcgaagtgtgtattttaattaaaaatatttttttaatttaatattgatatttcacgaaaacgctatttttttatttagaaatattatgccgtggtgcgcaatgccaaacaaaaaatggatggctag

SEQ ID NO: 64696 - DNA, 1635 bp, Heterodera glycines
tgcagacaaaggtggctttctgttcatatttcgtgtctgctgccggctgtcttttgcagtgtgggcaaattgcgcggattgcgcaattttttgtgccaattgttgtgtccacggattcgtcgttgctgccacctgtgctgttgttgttgttgttgttgccggattcgttggttgggggtccatgaattggacaacccaaaccaagcgcactgtagtcattcagtccattggtggcaaggtactgtaattcgaatttttaaagaaaatttcaagaaaaaattttgaaaattatttagcgatttttcatattttttgatgaaatacaaagtttttttcaataaatttctccaaaaaatcggcagaaaatttttcttcttgaaattttcttaaatttagaatttttttttttgagaaatttcggtttgaaattttttaatttttcggggaggggatgcaattcccctggtccccgaccaaataagtcaccctctaaatcttaaaaatgtttctttaaaaattaaaattaaacaaaattttctgtatttttcaaatgcttacgtgcgcgtcttgcttcactctgtcggccaattgtctatacgcttccgcagacaattgcgcgaaaactcttttttccctttctgtaatacagtacccgacgcacaaggagaaaatcaagcggcgcttcaaccgttccgaagttgtttacaactatgtgcagcgtccatgtacgttttctggacggtgtaaaaattatttttgaattgttgcacttttttatgggtgcatattttcatcatcctcaaaaagggaacttttatttttccaaaaaaaaagaaagaaaaatatgttattttcctgaatttctcgttgaaaaaatattttgattcaattttttgaattttcggtggaaaaaaaataaacaaattaattgcctcttaacacggagactgaacttgttaataaattatgattttttatttcccaaaaaagtgacgggtctgtatttttccccttaaattttacattttttacaattcgcttttttttaattgcccctcccctccctttgccactgtcagtcctccactgctcctgggagaaggaggaggcgcgttcccgccacgtggactttgcctgcccaattgtgaagagcaagtccaacccgagtttggcttccgccgcctccgaccctttgccgcaggtgccattttcagaggagacaatttttttgaaatatgtgccgttttcttacaattttcaaaaaagagtgatttatcgcttttaaaagtaaattcaacaaagcatttgagtgctttttaagcctgcgccgttgcaaaacaacatcaacaatgggtgggcggcggagaatggtgccggcgaacattcggccaatttccagcaacggccgacgaatgacaacgacgggagcagcggaaatgagaatgaggccggtcaccacccaccaccgccctactcctcctcacagcaccaccaccattcccaacaaccgttgttcctcaatgtcggctcggcaccacccaactacggtcacaacggcaacagtaacaacattggcacaacgccgcagcaactaccgtaccatttgatcaataatggggcaggcggcacacagac

SEQ ID NO: 64697 - DNA, 249 bp, Heterodera glycines
gcggtgatgggcgcttacaacgaaaacaatggcaccatcgaagtgccattacatggttacaacgtcggaaaggcgattgttgaaaggattttgaacacggaaaacgggacggtgcatttgcacggaatgcgcgaaccaatgtcactggcaaaggccgtcgaaattggcttttttgacaacctgtcgctgactgtggttgacccgaacaccacgcaaaggctgtttttggacgaagcattggaacggaaa

SEQ ID NO: 64698 - DNA, 188 bp, Heterodera glycines
tgcatttttaagcgtcaaccattgcgctctccgcccgcaatcgtgcagaattcggcagcggatgattgaggcttaatggtttctgatgatatttttcaatttccactctcttctgtctcattgtgttcctttgacgcatttattttctatgcattcgtaaattgaaacttgtcataaatgaagcaaaa

SEQ ID NO: 64699 - DNA, 132 bp, Heterodera glycines
gaaagtgaaagcgattaaacgaaaaacggagaaaagtgtggatgatcaatcttctgcttaatcttaatttcttaaacatttaacctgtacgtattttactttattattttttcgaaaagaaaattcatttta

SEQ ID NO: 64700 - DNA, 1346 bp, Heterodera glycines
atgaaatgtccattaatgtcgaatttcgatggaagagaagcggcgggtgagaagagcaaacaaacacttaacaaatcaaggaattctcagcaggaaaaagtttttgaaaaaaagataacgaaaaatattggataaattctgctaacaaaattcgtgaaaaattgttaataaattttgttaaaatattttttggaaaatatttttttataagagaacgaagtggattcatctactgctattgttgaagaatattattattctgaggaagaaaacgacaacaatcatcgccagcgaagcgatggaaaaaggcctttgttttgcgcaatattcggacaggtgtaataatacttttatatcttcgaattatccgtggtttctttatcaaaattttttccaaattttttaattctttccatataaagcgattaatcagacgtaaaaagtgcattaattaatcagtcactctgtcttaatttagccattaatctgtgtctatcattaattattaatttataatctctttaagttgcatcttcgtcctttccatggtctgtccctctcccaaatcgatcagtgcgcttttgctggcgctcgaccactcattgaccatccctttttcttggtccaaatcaccgcttccgatcttttggccaatgacagcaaaacaactgatcaaagcaatgaaacgaaattatttggcattacaaaagtcagttttaacgcataaaataaagaaacatttccaaatttgaaacgaatttattacttaatgaatttttacgctttttctccaattatcaaaacccaaaacaggtggcagtaattattcgaccaaaaaagggatgtgtaaacgaccgaaaggtttatttggcggaagcctccgctgatcagcaaaatgatgctcttcccgccacatttgcggatggatcttcagaaactggcgctattctttcagggaaaaggtcgtttttcaaacaaaaaatgcattaaaatattaaatttttattaattaaatttttaagtgtatttattatttttcatatttttgttccattttagagctgttgaaatcgtacgaagtacaaaagaaactgcaaagatcagtttgaatcatatcgacacgcaaatttcaatcatttccattggaaatcttttcttcaatgtttttgtccgtcttcgttctccaaaaatagaaaatgtaaaagtaaatgcacaattatatacagtaattaatagtaattaattccttttattgcaggcatttcagtcatcgctttgtgtccaaaattgtccggacggcgcaaaaatggacgaatattcggcatttttaaacagcaataaagaaa

SEQ ID NO: 64701 - DNA, 452 bp, Heterodera glycines
atgaatggagtgatagcgcataacgacacaatttgttggctctacgaattgctcgactcgccggtgagttttgtgagaggggcgccatcggaaaacactgatcagcccgggagaactctgatcagagtgagaaagtgattatgatcagagaacggaccaatgggttgaatttctgatcaaagtttggaaataataaggaatttattagcggattaatcagcaaaaggaggggggggggcaggcagaacacccccagtaaaataattgcatttttgcggtgaatgaatgataaagtaaaaatgtgacataaaaacggaaaatgttttcgccgcataaagggcaaaagaatggctgaattattattattgcatttttctcagattttcattgatttggccatcgattaaacaaataattaatgcttttgtgatattttccttttaataattaaa

SEQ ID NO: 64702 - DNA, 112 bp, Heterodera glycines
cttctgatgcgcgtgccattgttattgttgttgtggttttttcctccacttcttgcgacaacgccgaatttggctgcgtttcttgctgccgctgctgtttttccggttgttc

SEQ ID NO: 64703 - DNA, 350 bp, Heterodera glycines
atgggactgaagcgacggagcacaaatgagggcgaaacaattgcgcttctgacgctgggactgaaaaatgtgctgcaaaccttaccggacacggtccatcattacgatgatgaccattggcacggcacggactatggcacagtgaaaatgggagaggatgacggacgagagcaacaccaagaagaagccaatcaatacggggtaaaattttggtgaatttttaattattcaaattgattttacaatattttatttagaatggctatgccagcgggcatccgtgccaacatctgactgttaataggcatcaagagaaaaatgaagtgtcaaagcgtgtgcattggcattaa

SEQ ID NO: 64704 - DNA, 520 bp, Heterodera glycines
atggaccatgtgctcaaagtgcgcggactgacgctgaattatgatgtgatcaacaaccaagggatgcgctatgagaacttcaaagaggaggtggtccggtaggcgacaagtggtgaatacgagccaataatagtcacgtacccaaatttccttcgacctaacatcagggagggaggccgagtcgtttccatgcctatgcaaaagtgctatcgtccgtttgtgggaaagggcataataggcgctgatttcaatgtgctgaattttggacacacaccgtaatttattgtacattgtctctctctctctctctcacacacacacacatgactattcttttgtacctacgtgtacattttataccattttattcgtttttaataaaaattaatgcataattaaagaattgaagataaagttttaaaataattaagcattataagaagtcaattttaggttgaaaaatgcacaattaagcaagcgaagatgcaatctatattgaaaatgaggaatggaaaataaa

SEQ ID NO: 64705 - DNA, 266 bp, Heterodera glycines
taaacagttcgaacccggaggacattgagtcacttaaacaagcattgaaaggagcactttacgaacaagaggaggagggacagtcggaccatttcaaggcggccatctgatgacagagggaaaaatggcaaaataaattaagacggttaattaacaatgggtagatcattaacataatatatcttttggttattttggcacatttcactatgaacatgtcaatttttaaaaaggacggacaataaagttaaacagcaacattgaaa

SEQ ID NO: 64706 - DNA, 585 bp, Heterodera glycines
atggctcaaaggaaatgcaaaattgtcaattccgatgaaaaagctttgccaaatccacaaaatccgttgccgaacaaagtcatcggattcagtggcattcagatcatgtaaaaaaaattcaatttttaatgattggtaccaatcacactttcttatgttttcagcttcatcgaccaaaatgtgctcattttccttcgccgttttgactgttttttcgcctcttgtgcaacaaaattggcaattcgcactgaaaatattcgtatttcggagttccttctgctcagaatttggccaatgttcaaagacaccacttatctgttgtgtttctaccctatcgcttttcgtctaatccgtcaattggcctcgtccattctcaacgaatttccatcccttcgcattgttgctttccaaggcgccattttccccgcttttccgcctgatgacagtgccaatgcgttggatggccaagcggtggccaaatggctgtttactcctcatcccagcaatttgatgaaggcgttgtatgtcacaattgagaactcatcggttgaccaattgttggcaacatttgaacaaatcaaagcg

SEQ ID NO: 64707 - DNA, 984 bp, Heterodera glycines
atgaagtaaacgttttggcagttcggtacttcgtcaatcagtacgaacgggcaaaacgtgctaacaactggtacaatgagaaagttgtggaaattgcaaacgtcatagagtaaatttatgcaattatattaaaaataattttttaaacccctagcagtttgaacaaaagaaatagaagttttagttggcttaaagagaaaaaattgttttatttagcttaaagagttttaaattaaaacctttttgaaacagtttgggatttctacgatgactttatatgattttggaaaaatccttaacaaaactgaaataaaaaacgaaaaatacacccctagctttttatttgaaaattattcttattcgaaaaaactaaattataataatttcatttacgattgaaatataaaaaaattaatcttcttgattctttatgggttttgctgtaaaatatttaataattttatttacaactgaagtataaacttttgttaattttttatgagttttactactaaaaataggcaattaaaaatttatttgacgaatcagttgcatttttttaacaaattgaattgtaagataagtattttaaaacaataatatttgatattcaaattagcataaattttttagagagtggcataatgaaaacagcagccaagtcttggaaaatttaatggagatactgcaagaaaggattgaaggttttggtgacccggacctattcaagaatgccgccatactgaaaaattgggcctttttaaagagtgactccgcaatcacagttggtaaggttgtttgaaatataaataattttagtggttttgttttaaaatatttttaggcaacaatttatttgttttttcctcatcaggtcgtccagcaacatttgcgaatggctttccgacgttccaatcattctttttgatttttgatccatttttcaccgattcggtgcgttattatctgcacgttatgttttaa

SEQ ID NO: 64708 - DNA, 666 bp, Heterodera glycines
tgcaagaacgactgaccaagcaaatgctttcagcaattctccaagctgtgcacccgacgggcgtcggagttgtgattgaagcgaggtgaacatatatatttacattatataacgggctttggggaagggcacacaaaattcaagacggcatttgtttgctttttctattcaaaagcaattctcgaactcaattggctatacaaaaccaaaaaccatatttttacgctttaaaattgagccaggtttaattcatgtgagatttatagatttttttacaaaaaattttccaagtgtagacttatgcaatgctttagtatgatatgaaagttgaaaattgaggtgctttttaaaaattaaaaatgtaatttttatttgcacaaattatgtcgctattatttttcttggggaaatttatagcttttttggttactcaaatttggatatatattatattgtttgtatgaattcccattcttcagccacatgtgcatggtgatgaggggcgtgcagaagatcaatgccaccaccaccacctcgtgtatgatgggcgtttttcggtaattttttttttcaaaaattcagaaaatttattgttttagtacccccttatttttcagcgatgatccgaagacgcgcgaggagtttctcactctgatcaaaaaatga

SEQ ID NO: 64709 - DNA, 2967 bp, Heterodera glycines
atgccaaccgtgttggattaccacgggttggacatgttgcttgagcgcgaatttgcgccctgcgttggtccgatgtcggcacaacaaaatgacgacgatgccgccgccattgtgcaaccgaagcgtaaaggcatgaaaaggtaaagaaaaaatttttaatttttgaaaataaatgaaatattttatcaatgactttttaataattttattgaaaaatttttgaaaaaaaataaaaataaattaatttttgatggaaatagttttcgatgtgcgagcggacgagttttttcatacagacaaaacaataattttttttactattttttgaaaatttaaaatgaataccgtatttttggcgcatttctcccaatcgatttactgttattttttggcaatttgtatccgtttttttcaagaattttttaatactcttaaaattacccgtaattataacttcatttaatttccgctccctttttgaggccatacgacgaatttatcggggacgaatcggctgtcggaatggtcaagtcgccgtcatttgctgaacaaatgcagcacacggcgccccccaacctgaacgacttctgcatggaacactacggctttgacgagcagtacattcgcgctcagccggacagagtctacgacattttgtttgtttttggacatttttcccaaatttcaacccaaaaattaaatttattagataattttttatttttttctataaaattggtgtgaatgatgactacattatttggaatcagcttgcccccccccccgaattttttaaaaatttttttactaaaaattttcaaagaaattataataattattttctaacgatattttgaaattgtgtgatttttggaacagttttgaaaaaataattgttaattgattcaaaataatattttgagaaatcgcaaaaaaaaaaaaattctttagattttcctataaaaaagttttctgtttttttttgaaaatttctgtgaaattttaattttcgaaagcgaaggtggttgtgtgctgaacccatatcaccccaatttaaaaatgaggaacaatttaaagaaattaaaaaaaaaaaaattattttttaattgccagtgcgttctctgatatatgtgtttttgccatttttccctcagattccattcgtccggtcgcgttgagttgcaactgtcgcgcaatttctagtgccaccattttgtccattccatgcccgcccgaggaggagcacaactggggcatggtccgccagtaccgtatgaccacccagaaccgggagggcgacacactgtactttcgctgttcgcgctgcgagtcgctgatgcgttacacaaatgtaataaataattgaatattttatttattttttaaaaattataccatttttagactttaaaaacagcctcttttaggaaaaaatgaaatggtcctttcaaattatatgaaattataagaaaaaaaaattgagaaatttttatagtgcttttttcaaaattttatgatgcaccccaaaaggttgtcgccgtaacatcgccgagacataatgaatgtcgcggcaaaaaaaaaataaaaatttcaaggaaaatttaaaaatttttttatttattcccttttgcaggatgaatatcggccaaagttgacgatgaaggacggtgatatccaaggcgattgcttcccggctcatcacccgcaatgctacccggtgaaaaaggtaaagagagagagagagagcattacgaatcagtaaaattaaaacagttaaattttttgttatttagaaaaaaaaaaatttttttttttgatcaaattgttgtttaatttctttaaatttggctattttctttcaaagaaagacttcaaaccccgaaaaattaaattcaaacattttttggggttactagcaaaaacccctttaagaaatgctgatcaaaaaattcagttagttttttttttaaaataaagaggaaaataattgcttcccattctttgaattggccatgttttgctttaggaatgggtgattctgcaacagttggaccgccaggcacgcctttacatgatgcagtttgacatggcacaatgggaggccatgcgccagcaacaacagcagcagccggcggaggacaacgacggcaccgcagcggcggaattcgacgcgtacagtggcaggtaaaagcagacactcgggcgacgatcatatttcgggtgcactacgttcttaccccctaaaattttttttttaaatttcaagccaaaattttctttttttcaaaaatcctaagcaaattttttaattaagttatgagaaaatttattaactcatgcaaatttgaaaaaagcgcaaaaaaaattcaaaaattttttttgtaaaattttctttaaaaattttttcctccgaactcgaacgaaacgtcgggaaagaacattgcattatacagcatcgaccatgatggtggagaagtcagtgctggtggtaatgtgccgccggcgatcgctatgctgtcaaacggtgtgtccgcggtcggagtgggagaggaggagtacggtgacattggcgacgacgacactgtactgccgccatcagccacagcgatgctttccaacggtggtgtcatcggaagggagtacgatgacgacgactttgttactaccgtaccgcattcgacgtcgatggcatttgtgccgaacggtgccgcaaccgccgccgccatgccgaggggctacggtatggacgaagtgatggcaacaacgacggcagcgcagcagaaccaccacccggtcctgctcggtgatcggcaaatggggtttggtggtggcactgcgggcggcaaaacggcggcatcaaatgcgtcacggtttcgaaaataccgtatcatccgtaagcgtggcgctgcaccgaacatggcgacagcatttgattggcgcaagacggatctcgacaataagcgctga

SEQ ID NO: 64710 - DNA, 444 bp, Heterodera glycines
atggctgagcaaaattcttttaattctcaaaagggcgaaaatgtggtcctacagggacaaattggttcggatttcgatccaattttctttacccctgaggagaaccaaaatctgaacaatgtactgactcgaatgcgaacattcgaatccgctatttgccgtcaatttcgtaaattggagcgagaatttgcagagttgaaaattgtggctcaccaatcagatgataccgatcgaatggtcaaaattgaacggtcaataattgatttggaggatcgagaagaaatggacaattttcaaatggaagaaaaagtgataaaaatggcagaaaaggctgaaactctcgaaatacggcaaaatgcatttgaaagattgaccaaagtcaaatttaacaaggtggtggagaaaatgaaagtggaaatggcgaaaaataacagaaaacattga

SEQ ID NO: 64711 - DNA, 96 bp, Heterodera glycines
gaggatcccgctttgcgtgtccatcttgttggtgatgacccgcgacgtccaaggcgaggacaaccgaagcaattggtttcgtacgaagtgggggtc

SEQ ID NO: 64712 - DNA, 606 bp, Heterodera glycines
atgccgctgagagttttgccgcaaattatacatccgccaccaaatgtgccggtaattttgggtcgtttttggttgttttttctcaaattcccaagtgcatttttcaggcatttcgggtccaaccagttcaacaaccgataccactgagagacgtgccgctatttgtcaacccaccaccaaatgtgccggtaattttggctctctttttgttgctctttcaaaatcccgagtctttttttcaggccgttcgggtccaaccagtgtaacaaccgataccgctgcgagacgtgccattatttgttaacccaccaccaaatgtgccggtaattttgggtcgtttttggttgcgttttctcaaattcccaagtgtattttttaggaaattcgtgtgggaccaaatcatgatgggcaacaaccaatgccgctgagagttttgccgcaaattatacatcggccaccaaatgtgccggtaattttgggtcgtttttggttgttttttctcaaattcccaagtgcatttttcaggcatttcgggtccaaccagttcaacaaccgataccactgagagacgtgccgctatttgtcaacccaccaccaaatgtgccg

SEQ ID NO: 64713 - DNA, 364 bp, Heterodera glycines
aagacccgacttaagccaattttcaagggagaaggtgttcgaagaaatgagatttgtgtgataagagatggggaccacttggatggattaaaatcggtgtcctggtttttctgtgttcgcaacttttgcgtgggttgtgaagtgacgtacgatcgacctgaaagacacagaatggagtgtaaggaaaaatgcaagaagtgctgtagaatgggattcgggttcccatgtgcggatgtgtgcgataagattcactgcgaggagtgcaaccgcaacttctataacaacgaatgttttgaagcgcacaagaaggcggcttgtaacgagtataataaatgtgaaaaatgtggagaagtctaccaaacag

SEQ ID NO: 64714 - DNA, 568 bp, Heterodera glycines
gactcaatccaccagcattccaatcactggtactcaacccacagcatttcaatcgccaggactcaatccaccatcgttccaatcgccgggactcaacccaccagcattccaatcactgggactcaaatctccggcattccaatctctgggactcaaatctccggcattccaaacattgggactcaaatctgcggcattccaatcactgggactcaacccacagcatttcaatcgccaggactcaatccaccagcattccaatcactgggactcaacccacttgcattcaatcactgggactcaatccaccatcgttccaatcgccgggactcaacccaccagcattccaatcactgggactcaacccacaggatttcaatcgccaggactcaatccaccatcgttccaatcgccgggactcaacccaccagcattccaatcagtgggactcaacccaccagcattcaaatcactgggactcaacccaacagcaattcaatctctgggactcaattctcaagctttccaatcactgggactcaaatctccggcattccaatctctgtga

SEQ ID NO: 64715 - DNA, 924 bp, Heterodera glycines
  unsure (1)..(924): unsure at all n locations
aatactggnaggagcgtaaattggttcatcgcgatttggccgctcgtaatgtttggtgggcgacaaaattcgggtgtttccggtcgtcaaggtcgccgattttgttctggcacgaaagcttatggaggaggacatttacgaggcacatgctggtgcaaaatttccattaaaatgtttgtcaatttggttattattaatttaaaattttaaggctcaataacgggcgcagttcgcccccccccctccgaaaatttattattttttaaattcctgacataagcgattttttataagaaaaatttttgcaaaaacttagaaattcatttcaaaatgataaaaagcgttttattaattcattttaaaatgataaaaacgctaaaaaaattttcaatacattttttttgaaattttcataaaaacttctattctaaaattttttaagaccaggaaaaagcaaattgtaaattaaaaattccattacaaattcacatcacaatttcttaatctgttaagggactgctcctgaatctgcagttcaaggaactttcacagtcaaatccgacgtgtggtcttatggcgttttgttgtacgagatcttcacccgaggtgcaactccatatccgggtactaattaacgaaataattaattttcatgtcccgttttttaaaaagaattgaacaacaaggaagtggtggaacaagtcgtcattggttatcgcatgagttgtccacgttcaactggtcagtttgggatgataccaaaaggtttacagggttgctaaacacgaattagacatttaatttcgaccaatttcgaaacccgacccggactcgaacaaaaagtcgaaaatccaaaattttttttagtttcacactttaatcaaaattgattttaaaaaatcaatcgcccattacagcattaaa

SEQ ID NO: 64716 - DNA, 519 bp, Heterodera glycines
atgctttcaagagtagcagcagtagaagtgaaatgtttgagaatggaacaactaaaaataaaatttccatcgcccgaggcggaagaattgaaaatgatcgcctcgaagacgtcatcatcactcatatcatattcttttaatatgatggaatgtgatgaagatgaatgtcagtggtaacggacggactaacagatgctttaaaaagaccaaataatcaaaacgccagagaaaggcatgacaaaaatggaccaccacaatgaaacaggtgggtgatgggcgattaggcaacattcgttttttgaatgccgttctttgctaataatcacttcagatcaaatgtccgtccgtctaaaaatgtgtctcgaatccacgccacagttggccatgtgttgaaccaatatttttggacgcaaattcatctgatcaatgatcaaatcagtccataaatttgtccttgaaaattttgggtataaaaggcgggaagaagtattccatcgaaacaaatattgtagcagccaa

SEQ ID NO: 64717 - DNA, 111 bp, Heterodera glycines
gggaggaagagggaaaagagggctcttgacagagcggtccgcgagaccatcgacgaagcgacagagaaggccaaagagttccttgaagaaaattggagcgcatttgagaaa

SEQ ID NO: 64718 - DNA, 3042 bp, Heterodera glycines
tttagggcaaaaaaatgtactaaccactactgtcctcgttctttcgctgttcacctttttttgttgcgggctgcgctatgtgtacattgagacggacattgtcaagctgtgggtttcaggttggtgtaaaaatttaaaaaaatatatttgaccgggttggacaccgtccgtcagtttttaataaatttaaagggaaaattggaaaaaaaacgaatgaattttttgggtaatttttgaatcttgcatggttttcttattaaaaatcctatgaaaatttctttttttccacacggcattgccgaaaaatgccatcagagaacccaaattttgcaatttcagtccaaaagtgcccataaaacgttgaatttttttctaattttttagagggtggtcgtctgaacgaggagctgaattttctgtccactctgcagcaggagagccgccaacgtcgtcaaaatgcgacaaaacggcacagcgacgaggacgaaccgacaaccgcggcatatgagcaacggcactttttgcccgaggatatggacgaacggttgttcgaaattccggaggacgaagcgcccatttcatcgtatcaggtgggaatgggggtgcgggaggtgcccaaaaaaaaacgaaagttttagagaatttcgaaaccttcccccaattttccaaaaaatagtatttgccgcacttaaaccaatccaaatccgggaaaataattaagatatttaaaaattaggtctttttcctcatattgaatgtttgtaaaaaaaattttagaaaaaaatcatgaaattttgaaaatttttcgtttttttttgaaaattttcaaaaatgcaaaaagtgattttgcatttgccttttatctgcactgaatttaaaatttacgccttttcaggtgctcatccaaacggcggaccattcgacgccctcgcgaaatgtgctgaccaaaaaggagttgctgcgccatgtgcagctgatgcttgaaatcacgcagctcagtgtccacaaatttggattgtacggtttttttggcaaatttcttaaattttctgatgccaaattattgcgttttcaaaaatttacggttttttttaattttctgccaaaattaagcggcaaaatttcggatggtttcataaaagtgtacctgtttttcatacatttttttcaaaatagtctataatttttccataattctgaatttaattactaaattttattgccagaaattggacgctggacgacatttgcttcaagccgggcgccctggacatcagccccgactcgatggcctatgtgctgaagccgaccctggagcggctgatcccgtgcatttggatttcgcccattgactgcttttttgagggcgcgaaaccactgtattaattttgaaattacttcagaaaattcttgcaagaacccaaacgctttcaaaaattgagaaaatttttgatttcctgctggcaaatcctcttggaattttgaaaatcatacaaaatattgtttttttttaaatattggggaggtaagaaagattcacgctctttaaaacccaaaaaaatccgataaattttgaatttttgcaataaattttttaacccctcccttttttaaagcggtccgtcgcccccaattgacatacaaaacattccgttgggtcccctgctgcaactgatggtggacgacattccggaccaggtcagctggaccaacctggacccggagcacgtggtcagtcaagtgaccgccaccttcgacctgggcaccatgcgcaacttcttcatgcgagtacgtctcggatttttggaaatgtttttttcaaaaaaaatgtcggctggtaaaaaatgcaaaaaagaaatgttttttctcttttttgaagtttgaaatttaaaattttccttaaatgctcataaaactgataaaaaaaatcattcggacaggttcccctcgagaaaatttttaaaaaatttaaaacttctggattaaaaagatttttcttgctttttgaaaaatgcctgtagacattatttcattcattttccagtccggcatcggcaaaggctacttggaacggttgtgcatcgacccgcttgacccggcatgtccaccgacggcaccgaatcactacggcggcaccgtgttgtgcgatgcaattcggcattttgagcagcgaattgttggcgtcggacaaatgaccaaccggacaattgtggacattttggcgccgtacaaatccgtcgacggcacaaacaatgccgggaacaaacagaagaagcagaacacatcgccattcgacattttgcaagcattttgtgagtattgtttaagggtttatgtgtaaattcgatggaaaaagggcagagaatggagaggaggatgagagacagtaccataaaaggagcaaagagagagtaagagattgggaaaagagtgcgacaaaaataaagttgttaatagagaggggcgatagacttttggtctggaaaggaaaagaatataagacaaaaagaaataggatagcaattctagagagagagagggtgaattgagaatatcgaacaagagagagtatagggaaaaggtgagagagagcgagagagttcggctagtttataagggaatggagagaaagaaagggagagttcggcatggagaaagacgagacggaaagagagaaagaattaggtacagagaaatattgagttaaagacagagagagagagagagtaaaaatagggagttggtggaggttgaaaaacttcttttttaattttgggttgaatttcagttggtgacgctgatagtggcgctggtgctgataagtctggccagtcgagcaatgccaccgcaaccaacacctcttccacatgttccgtgcacaaaacggcattcatgcgttggctgtcccacaacttggagacgttcgggggccaattcccggcccatttgttgccccgtttccccaactatggccaagtgatgcgccacgggtgccgcggcgttgcctccagcgtcatgaaatggccggccagaatggttatt

SEQ ID NO: 64719 - DNA, 677 bp, Heterodera glycines
atgccatcagcaagatccatcgatacggaaattacgcagccttcacttgttgacattattgctacgccgttagcgcgacagggaccgattaagccatttcgacaccgagagccggagacaggcagaaaaacgaattcgtttgctgtggatgaagatatcttaactgttgaggaaaaagaaaaggtactattttctgaaaaatattccataacaaagtatcaaaataggagttgatgagcaaagtgcaacctctggacgcaccgaaagctggttttctcggaacgcctcctcctcctcttgtggatttgttcgaattttcggacattattgtgcgtggacctcaacttgaaacaaaagacattggcacgcaagtttcattccctgaaccgagttccgcttttggtggacaacaacctgcaagaaatttcaacgggttttctgcgccagtgaatgttgttgcggccactcaagtcccgttctctgaaccacagtcaacttttgggggatttggcggacaacaacaacagccgccaagcaattccaacggtttatcggctccagttggcgtagttgcggagacagtttcgtcctcacaaattcgactttcatggactgatcctaatggaagtgcatttaaccaaatgtacaccatcaaatacggaataaggtacaactaa

SEQ ID NO: 64720 - DNA, 49 bp, Heterodera glycines; identical to SEQ ID NO: 51181

SEQ ID NO: 64721 - DNA, 413 bp, Heterodera glycines
gcatatgccgggaacaacattcgagaacaccgaaatatgatccattcttcgacagttaactttcctcaaaaggtgcgggcacttaaatgagcaccaaaggaaaattattactccgataatttgcatttttattccgtccgcttccaaattgtaatttttgtttttgtttttcagtcccaggacccgcagatgaagccgttgttcctctcttatgccgatgtgttgggcttaccgtcgacagtctcatcgtcggcttcatcagcttccacttcgttttcagcaagtgtgaagccgaatttccgaccaaaatctgccgcaaagtcagtttaaatgtaaaaaaaaaatgtttccatcaaatgaatttaattttcagggatcgaaacgcggctcggattcgcgctttgttggaatga

SEQ ID NO: 64722 - DNA, 56 bp, Heterodera glycines
taatcactgttgtacctcttctaatcacttttgtacctcttctaatcactattgta

SEQ ID NO: 64723 - DNA, 108 bp, Heterodera glycines
ccaattcttatgcttaatttttaaacgatgcaaataaccaaattaccaaatttgcaacaagagtatatgtaaattatgtaattcatgcataataaagatttgttaatg

SEQ ID NO: 64724 - DNA, 145 bp, Heterodera glycines
aaatgaaaattattttcgtcaaaatattcactgccggcactttgttggcaatgctaacggtggcggtaatcgtcacaaaattttactttatcgaggaatgggaggagagaagggacggcggaggacgccatcgaaacaggcaaaa

SEQ ID NO: 64725 - DNA, 1022 bp, Heterodera glycines
caaggcatttccgctggattatcccttggcttggaacaaatctgtggttgctggccaattcatcagtttcggcctctttcggttgccttttgtcacaactttccttcccattttatcattggtttagtgacgatttgttaaccgcgttaattgttgctcaacggaaacaaattttcgagtgcgaatatgaggtgtttttttattccatattttgacttgtcaatttcattaaaacaaattatgtaattatcaaatgtttgtcactccaaaaacattttaattttttaaggaccgaaatttgtacaaagacccaaatgcttctgccatttatattctcaggtgttttgccttttgctattcctttcactttccaaatgaattaattttaatttgttcagtttggctgtctccgataggtatagacggaggggcattggtacgctgttgctaaaccatctgatcactgattacagcggtgggtcattaggggtcatccaatgatccattcaatttaacgattgaaattaattggggctaaactttgatgttgacattgtttaacaacaaagttataaaatcttgttccaatgaggttttcaggtcgctttgatcagaataagattttttggaccattttaagctcggacccgagtttctcttcgcatggtcatttgttggcgtttttatgctttgtctccactttttcagttcccttggcttcaaaactgattttcctgcatgttcttagtgacaaccattcggccatcgttttctaccgcaaaaacgggttccgccatcatatgacactgcccaaatattatttaatcgacggccaataccgcgacgggcaaactttcgtcctcttcacttcgcagggagtgtttggcgaattcgtctcgtcagttggcgattggtgtgccatggcgatgagtttcctcacttcgccattttggcggtgctttttcaacaaaaaccaaacactcaacggacggacaaatgcaaactgtcgacatgtgaaataa

SEQ ID NO: 64726 - DNA, 472 bp, Heterodera glycines
  unsure (1)..(472): unsure at all n locations
agcaatcgttgcttaacttgccagatcggacgggtgcgcatgattccactgttccaagcaccccaccaaaagcaaaacgatataaccaaaatataaggaaaaattttttctccatcttcctttttgatactaaagcatcagagtgctaaaattaagttgtaaataaaattttggtgcactttagagcactttctgaaaaaaatatttatgaaacaaaaaaatcgattttttcaagtgtccgtttggggtactcaaacatttatggggagcaaaaatccaacgcagaattanagtacaggctatagggaagctattcccgaggnnatcggtctccccataaatcntggcgcatnncgttcgngggaatgccccgaaaacaaaaaatcgattttttttcagtgtccgttttgggtactcaaacaattatggggagcaaaaatccaacgcagaattaaagtacaggctataggaa

SEQ ID NO: 64727 - DNA, 1013 bp, Heterodera glycines
atgtttttaaaacaatataatttagaccaaattgactacactaagcgcattttcaaggcattgctggtcaatgtgctttttgtgtctaccggttactttctgaacgccggctttttaattttactccgaaaactttcgctgagccaagtccaaattgtgtttggcacttacatcctcggcattttcacctgcatttcggcaattagcaacccattaacactttatctcttcaggtggtgggcaattcgaccttttaatttgcagaaacaattgaaattcagttcggattatcgaactgcgttcaacaaacatctttttggacgataagcattcattttatacgagagattctgatgcgatttgtggtggaaatgtcatggcgaaacgacaaattgaccagcgaaatggcagagttggaaatgttcggttggcatgaacaaaataagaaaaaacctcattttttaaaacattttcaaccatttttttgtgaatttgttaattcttgacagaagagattactgaaaaggcaaagaaaatgtgaaattctgaattcacaattattaccaaaagattaaaaacaatttattcatttatcaggtataattgtaaaaatttttgtcaggcgcatcgaggattcctttggatattgctacgttgactcttcatttaaaactatgtattcgtaagtacagcaatcctaaatggtaaatttatcacaaggagaagtaaggataaatttgaatattccgaattctattttaggtactatttcggacagatcttcttcggattcgcagtcaaacagcagataaaatgggaagagacaattgatccttccgactttgggaatttatttcatacgtaagccaaggcaattttaacatcaatggcgaagcgatggaagttgattcattcgacgaaaaccgatactgttggacgtggcattaattgggccacccgacaggttttttacaccaaaaatggacgacttcacggtttgtaaaaaaaataaa

SEQ ID NO: 64728 - DNA, 515 bp, Heterodera glycines
atgaagttaagagccagaaagtgcgcgaatataaagaggaggtagaattttttttttctcaaaattatttctttaatgaaaaaatgaaaaaattttgttcttatataaaaattagtgtggttttttcaaaaaaaaaaaattcatcattttcactaaaaaaaatggagccaaataagtacttcgattttgaattcaaattcaaaaatttttgtttgaaaaatgatcaattttgcaatgtaatttgagtggaaaactgaattaattaatgaacaaaaatgtaaaattaaaaaacaaattttccatcttagaaatttcaaaaacaaaaaatcctgtaaaattattttgtaagtaatttcaagaaaaaataaaaagattttttttttgggtaaatttttcttctattttttggaaaaacttagtaattcgtcataaaatttgaaaaagcgcaagaaaattggtaaatccatttcagattgacgcgtggaaagtgcagcaccatgctcgtaatgaagtga

SEQ ID NO: 64729 - DNA, 303 bp, Heterodera glycines
atgattgtcagctataattttaatcattttaattttgtatgtaaaaaactcattacaaaattattggcgaaatcctctcagatgatgttgaaaaattattaattgcaaacaaatttgtgaaaaaatgttaaacgactaaatattttaaatataattcagaaatatttggctcttttttccagggccgaatttgcggaattaataatgcaacacacaattcgcaaaaaatctagcttctgggttcgtacccaaaatccggcatgggaagcgtcccatgccgggctctaataatccaattgctaa

SEQ ID NO: 64730 - DNA, 247 bp, Heterodera glycines
  unsure (1)..(247): unsure at all n locations
atgagcagaagcgtaccaaactatgcanggatactccccggtaaaggactaacttacactgaaatgagcgccgagctagctggctcaaaaaaaattttcgaaaatctgagtctttcgtttttatttattttttgcaaaattaattcataaatattttttcagaaagggttctgaaacgcaccaaattttatttacaagttaataaggctctctgatgctttttctatcaataatggaggtgaataaa

SEQ ID NO: 64731 - DNA, 235 bp, Heterodera glycines
ggtctccccataaatctggggcgcatcggttcggggggactgccccgaaaacaaaaataaatcgattttttcaagtgtccgtttggggtactcaaacaattatggggagcaaaaatccaacgcagaattaaagtacaggctatagtgaagctattccggaaggattcggtctccccataaatctgggcgcatcggttcagggggactgccccgaaaacccaaaaaaaaatttttt

SEQ ID NO: 64732 - DNA, 697 bp, Heterodera glycines
atgggcgaaggcgaaacgcctcaaactgtgctcaaccgccggcaccgccccagggggttcgtttaattttggtttaaaaattgtttttaatatttttaaattcagagaatcaaacggaaatttgccactgcgaatcgaacggcggtcgaagtgaccttttgtgtgtgtctcagaatttgaccacaacggacgccgatttgccggcgaatttttcgccttcggtggtgcacatggagcacaacttcataaaatatttactcaaggagagagattcatttttcgattcaatgggagtcaataaaaatttaaatttaggacaaaattttgcccggcaaagagacaaatgttttgtctttggacctttcgtccaatttaatttccgacattgaaccggcaacttttgataagttcgccaaattgcaagtgctgatgttgacgcacaacaaaattgacagcgaacagatcagctagtaaaacaaaatgccagagaatcactgccacaaagcattaaatttattttcaaaattttacagcgatttactcacggccaaattgggacagagattgcatcagttgtacttggactacgacttcatctccacccttgaccaaggaatctttgacaatttagatcagctgaagaaattgccgttggacggaaatcggcgcttacaactcacgaaaggcgtcagccatt

SEQ ID NO: 64733 - DNA, 302 bp, Heterodera glycines
atggcggtgtatttgacgcatagagaccaaaaggccaacaacagaagcagtgagtgccaagtgccaaacgaaccaaaagcataaaagcaccgcttttccctcgagggaccaacaaaaaaagttaaaccccgcggggaaagaaagggcaaaacgatcgaaaattatgacgcaattatgatcattttctttctttttttattgtgtatatcgatttttcagagtttttcgaacctcatctgatgtccaacccaccgccgatggcggaacaggtaaaattattaaattaataaaaaaaaataata

SEQ ID NO: 64734 - DNA, 546 bp, Heterodera glycines
atgcgagggctggaaaggaaaagctgggatagaaatagtgcagggaaatgggagctttgtgagggacggaaaggaaaattttgtttgggtgaatataggaaaatggtaattttagaagggaagaaagggaaaattttggttgaaaatagtgcagtaaaaagagaggtatgtgagggctaaaaaggaaaattacgatggaaatagtgcaggaaaagggagctttctgagggacggaaacgaaaattttgggtgaaaatagtgcagtaaaaaaggggggggggatgagaggcttgaaaatgaaaaatttggggtgaaaaagtgcaagaaaatgggagatcagagaggacagaaatgggcaattttggatgaaataattcagattaactgataaataatgggaaagatgaaaagaaatttacgaaaatatttcagaaagtgagagagtgctaattggagagatagaaagagaaattgcgatgaaaatagtgcgtgtaaattagagaaaatggaaaagacagaaatgaaatttttgatattgaaaataaa

SEQ ID NO: 64735 - DNA, 1068 bp, Heterodera glycines
atgaattttaaaaccgccgggggcctgggaaataaaattaacgaggcattcagccatcattacaaaatcaaaaaacaacgtggaaggagagaagccaaggctgaagataccaaagactcaaaaattgatgtcgcaaagagggccgcagaacgcgccgggagagacgtagaaagacattttaatcagatcaacaatatctcgaattccatccaaacccaactaaacacactacgagaaacaaatcctcaaattttagaagagcctgatataaaaatttggtttgacaaaatggttgagatgggaaccgaaattcaaacatcacgaaatgaacttaaggcttttcaagaagaagtagataaagccaaaaacataacattggagcatgtggaaaagaatgacttgaaaaaagcaaagaaatcagccgacgtcgcaaagggaatcgccagacaggcaaagaccaaatatacatcaactctcgagggatataatgataaatcggaaaagggttttagcgggatagtgaataggcttaatgaggcgctcggtgagcatattaaacgtaaagatattgaaaatatacaagtatctgaagctgagaaaggaccacaaaaaagagaaagactagccaatgaggatgttcaatttcaatatgacagcattgatcaaaaatttattgtctatctttccgctgctgtctcccacatagatttgtcaaaacacctcgcctatgtgctcggttttaagaacacaaggctatttcatgcggaagaagcgaattatatgccagatttgactggcggcgtaaggcagctatacatttatgcaccaaatttaatcgaaaacacaattatcggcaaccagatggccccactcttaagaatagttaacgtcgtcgatgacccaggatcgattagtgaagttatatatagcaccgagtattttcatcgtctacagtcgaaacgaatttcagaaattacaattgaaattcacacaccgtttggtgaattcgttaaatttcactggggaagttgtattcttacattacattttaagaaaagtatattttaa

SEQ ID NO: 64736 - DNA, 997 bp, Heterodera glycines
catcaacgatctgtttttatacaaaatgaaataatagtcatttcatcttttagttttatttcttcgaacctgacaatattccgccacctgtcattatggtccagcatgtctctttccgatacaatccggaatcagtaattgagttatggtaatttttcaatatattttacaatttagccatacatttacaagaatttggactttggtatcgacttggacacacggggtttgtttcccggattttactttctaaccaactaacaaataaagtggcacttgttggtccgaacggggctggcaaatcgacactcctcaagctgttcagcagagatgttgagccaactgatgggatgatccgacggcatttgcactgcaaaattggcaaatatcatcaagtaattgcaatggacattttttcactatttaattatttctagcatctcgttgaagaacttccactcgaactctccgcgttggaatacatgcaaagagagtttccggacgtaagagagaaggaggaaatgcgaaaaatcatcggccgatacggtcttacgggtcgtgagcaggcaattaaacggatactcacttttattgacacaatgccatgctaattataggtgtgtccgatgaagcaactgtccgatggtcagcgctgtcgtgtggcgttcgcttggttggcatggcagcaaccacatttgttgctcctcgacgagcccacgaatcatttggacatggagtcaatcgacgcgcttgctgaggccattaataacttcgccggtggaatgattctcgtttctcacgacttccgactggtccagcaagtcacggaagagatttgggcaagcaaattttacttttgttttctttacaatgacgtatttaataggtttgcgacaaacaaacaattactaaatgggacggcgatatattttcctacaaagagcatcttcggaaaaagattgaatcgaacgaccggaagggcacgatgacagaacgt

SEQ ID NO: 64737 - DNA, 653 bp, Heterodera glycines
atggcatcccgtaaaaacgttgaacaagcggccaacatgaaaaatgatgaaggagaagaaacaacgacaaacgttgccgacacggtaaaagctaagacggaggtcgctgttactcactcaactttcacatccgatgaggagtcaagcagtggccgaaagcgacggcactctttcgatggaaccgcaacctcattgcttggagcaatgatccatgcacgaggagagaagcgtgaaaactggtaattacaaaaaaaatgtgccaaagcagtactctcatataacaggttaaatgcgctcgaacaaaagtatgcaaaaatggaaaaagaattaggaatcgatgacaatgcgtctgacgttgtcgatttcgaggaagattccatggaaacgattctgaaaaagtagaaggagagaatttttgtagcccaactcatgcatgcaagtattttataaaaagggttgagcgttctgaggaaaaagttcgtgcatgggaggaaaaagaggcaaacgccgcaagcacatcggcatcaacatcaatgcgtaaataaatttgaattggcaatgtgccaaaaaaaaaaaattttttttctcaagaagcgcctaccgacgaatggaatcttgaaaaggaacaaagttcggatgactcacaagctgaa

SEQ ID NO: 64738 - DNA, 876 bp, Heterodera glycines
atgagaaatgagctaggtgcaaatcgtgttatactaaagccacaagaattttataagcttgcgcttgatcataaagttgtgagttcatcgcttcgttattaattaactgggtctaatttcttttttatcttgctcaggaaatttctgcaataattcctcttactgacgatgttattcgtgtgtcctacaaacagaagaagaattttattgatgagcatgctacaagcaacattgttctcagtttatggacaaccagtaaacatttaacaaaaatggcggataaagtttaaaaacggtaaattaaaggctgcgcccgcctcaaacttcttgattacatgaaccaggtggatagggcagagggtgctgagctactttatacggttggtctatagtccctcccggttgagtttccaacaccttttgtttaggacactgatagtgtaattgtgaagcatcggtgcgaccatgttccaattcagacgggtgaatttatgggacaaatgtctcaggaatatgtgggattcgcgatccgtagcttcgtttgtggaggtgattgattaatgaatttttttaccaagttaatgttgagcctctatttgtgtacaaaggtgccaaacagtatgccctaaaaatggtggatgagagtaccggcgaatgcaaatatgtacaaaaaattcgcggaataacatttgatgtgcagaatagtcaagcgctccagtttgagcacttcaaacagaaagtgttaaactatggccgtcatggagagcgcccggcggtgtttagctatgacaaaatacaaccgaccaagagcagtcggatagtgacaagagagcagttgaagcgctatcttccagtctgccagaaggggataataaa

SEQ ID NO: 64739 - DNA, 1733 bp, Heterodera glycines
atgaccagcaatagttatagcatgaaaagacgctggaatttccgttcagtaagtttttttgaacaaaaacatcccatcggaggacgacgacgccgatgacgcagaagaacaagcaggcgtctcctcctcttctcaaataactcaggatcaacgccgcctacaattaggagagggaccaagtagcagagatgtagaaagtgaggcggcacattggcagagccaaaacgctccgctatttgaacaaactgcttaccatgtgcacaaattggaacgcttttccctgtcgcgtcatgtcacagaatttgtgctgaacgctagcgttgaggaacctgaggaagccttacgctccgcgtttgagatgctaatcaggcaggctgttgataacacgcaaaaacaaagtggacgtcctgttgccaagattggcatcagtttgcatggcagaggtgtgcgctaattcgtccattcattaattatcatccacatttcctctgctttacagggttgtacgagccaattgtgctcccacttcgtccactggaacaaaacacttgcgacgtgcttatggctgagctcgataaacttggccaaagtgatggagacgatgctggagatgaggaaggagcgggaatggacaagcgcacccttttgttgagcgaagcaattcaagtcacagtcacctgctttgcgcctcctgctggcgctcgacctcgacattttccccatcaattttggggatacaacgagaaacaccgtatacggatctgtaactgggacgacaattactgtcttttctacgcattaattggctcccgtgcttatcacgacccggtactgttcaaagaatggacacaagcccgacaacaaccgcaacaaaatatggcacagctaacgttgctgcaagatttttgtgaaggccaagaagcatttcgtctactgttaaccaatcgggcgttgatgcgctcatccgctgagcgtttgctgaatggagcgggcattcgagaagccatgaatgcttacggcattgatcagctccagcccattcaagacttttgagtttcgtttgcaacactcacgcggaaattcgctcctaacatggcgggactcatgtcttctgttcccaattcggctcgacggactgaaaagtacctttagccttgattgtgcggataaaccattttttccctatggctacaatcgaaggttgtcccaattggaattgtaattgctgaaaatggctggaaaatgatcaaaaaaattatagggaaaattatactatccgactcgaaaatttgccagccagagaacattactttcccgggtcgatgaaacaggcaaagctagataagtttgagcaatggtaatgagtttaagcaaaaattgtaatgtgataaattggctcaacaaaggtacgtggagaactggcgaaacacccttctttttaccggatcagttacgcatttactgtcttaatgacaccgaaattctgatgaaatccgttctgaaatttcgtcaaattttgatgcgatgagataaccaacggttttgatgtgttgccgatcagttgcacgattgccaggtgggtggtaaaaaacattatcgagcatcggcgccaccgtttagcgtatgcatgaacatttttcgtgctctgttcatgaaaaaagaccagttggccattgttcccgaggctggttatgagcgaaatgaccgagccagtgttttggtgaatgaataaa

SEQ ID NO: 64740 - DNA, 454 bp, Heterodera glycines
atgggcgacaacgagccggatactttagcaaaaatattagaaaaaaaactggaccaacaagtggttgttaagctgaatataaaggtcagtgtactgtcattgccatcaggaaaaaactgcatttttcgtgctcttaggaggctaaaggtgaatttgaaggccaagattttgactggatcattctcacaatcgctgcaaatgacgacatggaggaggatgaggacggtggcgataaaaagaagatgaaaacattagagtcagaaggagctgctaaaaaggtctctgatgcttatgatgaagaaatacaatttatggggcattcgacatcgtccaagcaaggggccagtatcgaaaagaatgattgagcgggcggacactatgatccgatcccatacaagttcatggagcactgtgttaaagcatagaattagacattctttttggagacaataaa

SEQ ID NO: 64741 - DNA, 316 bp, Heterodera glycines
atgatcaatgaaatttgggataaatggtgggcccataaaaattaatttggcattccattgaccgaaaaatgtccgaaaatggacccttaagaaactgaccgcaaatttccgattttcagcaggccgcaaatttcatataacattttaatttcctttcttcagctgccttgccaccatttcatcgtccgatttcaagaaagcgcttgtcgaggcgaacggaggagaagcgaacgccgacgacgacagccaattgaaacatgtcaccgttgaggaagtgatctcgcgcataaatgccatggtaacgtttgttgattga

SEQ ID NO: 64742 - DNA, 1144 bp, Heterodera glycines
tgaccgtgccttacctcagctaccaaatcaccggttggcttctcggccaggtcggcaaatgtcccttcgcttttgcttcatttcccctcaggcactttattggctgagtgttttccatgcgatcgcttctttcgcgctgctcatttccttctatcagctgaaaatcccattgatcaccttcaaacgggagaaggaagtcgcgcggaaattaatgttcgacggttgttggataacggaggacgaagcgggcggagaggacaggggactgacggacacgtgcttttggtgggcggggagggggggcaaaagcgactgattgacgcgttcactttcaggtatttggaccgaattgtgattagctcaaagtctttcccgatgaaatattgggacaaatttgttcgccggaaaaccaagcaaaagtaccgggaacaagtcgacgaggaaacgctgaacgcccttttgggcacggaacggagtcccggggacacgtcgtttgactatcggtgagtgctgacacatccgaatactcaatcgggacgaacggtggggccgggggcattagggctgctcaagagtcgaaatttccgagactcaagacctagaattgtccccggtagtcgggaccgagacccaaaacccccgaaattccgtggtttataaattgccattcattcttcttccctgtcattcttccccctccccccccccccattatccccggctgttcagttacaactgttggctttggaccggcgtcattctgaccaatcggcagttcctttaccgcgtctgctatttgctgtgctccgcctccggcgttctcttctccccctttttctacgctttccttctcatcgacgtcgttctctccttccccatgctcaaggccattcttcagtcggtcacccacaacctccagcagctcatcctcacaattatggtaattaattgcacaccgaagttcgagagttacgggagagaattggaactcggccaaattcagatgactctcgtggtcgtttacctttacactgtcgtcgccttcaatttctttcgcaagttttacgttcaggtgattaattaattggccatttgtggggaattgccccccccccccccccctccccccctttttttgtgaatt

SEQ ID NO: 64743 - DNA, 351 bp, Heterodera glycines
atggaaaaagaggggaatggaaaaagaggggaatggaaaaagaggggaatggaaaaagaggggaatggaaaaagaggggaatggaaaaagaggggaatggaaaaagaggggaatggaaaaagaggggaatggaaaaagaggggaatggaaaaagaggggaatggaaaaagaggggaatggaaaaagaggggaatggaaaaagaggggaatggaaaaagaggggaatggaaaaagaggggaatggaaaaagaggggaatggaaaaagatcatgaatgctgctgtcctgtgctgtcaatttctgttttttgttctctttggtcacattttttttcttttgatttaagttttta

SEQ ID NO: 64744 - DNA, 1139 bp, Heterodera glycines
atgtgcctggaggacgtgcaaacagcggcgagtggccaaatgccacactcggacttggccatcacgcgcaccggacagaacggtggacagacgagtgggatgtttgaccaacaaattgacctgcgaacgtatggattaaacaatttgaaaatatacgaagaaatgtaggtaaatggggatacgaaatgccaataaaaaatgaaatgccaacaccaactgaccgcctcattgtgcccatcaaaggcagccagaaatggcttcgcgaacatgcgctccaactttgccgcgttcagtgctcgcgtgtactccacctgctgctgaaatgggtcgggcggggcggcgtaattccgaggcactaatttcggatgcgaaaaatcaccaaaaatatcttcataaagctcctaacccttgaatatgtcatgttttgtctcgcgttggtattcatccggatgtctggagatcactttgactttcatctgaaagaaaacgcacaaattaatataacagtgaatttatttgccaaaataaattaaattttgcatttacagtaaataacgcatcataaaatagtcagttattattatcatgatttatttgtttgaataactatttaaaatggcaatgaaaaacggaaaagggatgcaccaatttttctcattaaaaaccaattttcggcacatctctgacgatactgcagacaatgctggaacattgaaacatcacaatttatacaaaaaaggggcagagattgacaatgattgtggagtcaaaaaataatcattcttaattcttatcctttttgcgaccgatagggggagggggggggggggtcctcttctccctttaagttacgttttgtcattccatgaaccagcaatgctttttaatacaaaaaaatatatacacaaatttggaatatattttcaaaaaaaatgtttgactattcagtaaaatgggaattggctgaagggtgtaatttgagaacatgacagaacggaaatattaaggaagtcgcccaaaaaagtgctcaggtttcgtccagcatttcgccgtccccattcattgttacgccgatgccgaaaatgtcatgagtccgctgaaaataagcaagagattgtgagttgaaatcatctaataaa

SEQ ID NO: 64745 - DNA, 69 bp, Heterodera glycines
cggactcatgacattttcggcatcggcgtaacaatgaatggggacggcgaaatgctggacgaaacctga

SEQ ID NO: 64746 - DNA, 146 bp, Heterodera glycines
atgcttttaaaagtaacaccatggctcctcatcagggtaaggcggtgctgcgctgagccgtgcgtcgcctgggcaccgatgcattggcggcggcgccgcgtgagatgtgcggatgatggcactgccgacgagcaatgtgatcggcg

SEQ ID NO: 64747 - DNA, 810 bp, Heterodera glycines
gtaattacaaaaacgtctttttcttagcgatttcgtaattgttgtgcccgactcggcgacgggtgccaacaactgtgcagctatgatcagaacttgggcacggtaaattttttgttaattaggattagcgtaaaatattatcccatattttgattttaaaatttttatctattcttgaaaatctataaaatctcttaccattttcattttgcctttttcagatacaattggccgtgctgaccggaagtaagaaaaaacaaagcgtatacagtatccactgacactaatccaaccccttccctcctactgtaagggtgtccggtgagtcgcgtcggtgaaatgatggtgagaaaatgaggcaaaaatgaacaaattatgaccaagtttaaatttaggtatgcgctagtggaaatgaggtaaaaaaagggggaccaattaaaaaaatcacttctgaaaaagtaaaaaattaacgaaacaaaacattgtttagtgattttttaaattgttatttttagcgctaattggcataatgacttttttatacccgcctctttttcgcatgaaattgaaaaaagattttcaatttttcaaggacgccaccgcctgttgccaagcatttggcgtttttgagtccggcttcgaccattgtcgacgtaaattttacttgattgattttctttagaattttttcatttagcgtactgtaatccgtccggagggttgccaaatgatgggatgttagccgagaaatacagatgccttcagaagcttactcagatccaaaaatgcttctatttgacccaacggccc

SEQ ID NO: 64748 - DNA, 1829 bp, Heterodera glycines
atggcactggtactcattttgcttggtttcatttggcatgcgccggcctcagttggtgccgatttgccaagttgcattcgcgcaaaatgctctcattgccgggtgccgttcatcgccgaaatgtgccccggggcgtgtgccgtctgtgggcccattggcaacaaacttttcatcactacggtcagcagaagtcaatttcattcaaaaatttctaatcagtaactaacaatcccttttcgaaagcttactcaatagtttggatcagtgatggcacggaacagtcggaatcccaatttttaatttccgaaaaaattttggacgtcgaaattctgattttataatttttaataaaaggtcggaaattttttttttataaattcaaactgatttattttaaattattaaataattagtgtccatctgatcaaaaccctgttaacgtctcggctagcattgcgatcagtcgaaattgactgttaacatattcgccacaattttctgtttgatcacttctgctgaccattggtgttattaattgcaggcacaacagtcggcacaagtgccggacgcaagggcatttggccaagcgcaagtcaaagtgccattcgcgcaacaattgcccttcccttcctcagttggcggagcaccgcaacaaagagttggtgaagcagtaccagcagcacaacagagacaacatcaacgccaagtgaactcacggggtgtaaacaacaacaataacaatggtggaataaatttaaagaattaacattcttatattgatcaagaaaaaaaggatgatttatttttccattttatcccaaacttttttttttgtggatccaataaggtttttaatttttgaattccaaacactggttggcgtgaccggaaagtgcgtcagtgatacaaacattttaaaataaaattctgtagccttaagttttcggttcaaaataagtttatgtaaatacacggaaacaaactgaaaggcaccaatccctcaatatgagatcatttatgccatttggaccataaatgctaaaactacgaaaattttaacattcggttttttgttcgagttcgggtctggggttcggagctggcccaaatggatacatgggttcgtgatcaatgacctcgaaaccccaaggaactagtttttatgacaataaaattttcactgacaacattttctactgacgcattttccgggagccctggttggtctgatgtacatggaaaggcaccattattttggaattctggtgatccggttttagatcataaaggaatagtgtcaaaaatagtttattccaataaatactgaaaaaattttcaattataataaataaactaaaattgttttagggcgtcaaaaggcgttcagaaaccaatatggcactgattttggagccggtgctgctgaacaaaaccattaccaccaccagcaacaactgccgttccaaaatgggcagcaaggcggtggtggccaattcgtgccagccgatcaccaaaatcaaggcggccaattcgtgccagctggtggccaatttgggccgcttccctatcaaaatcagcagcagcagcaaggcggccaatttgtggcacagtccggccagtttggccaatttgtgccgccgggcgatcagggtgggcagcaatttgtgccacaaaatcagcaaggcggtggccaacagtttgtgccggctgatcagcgtcagggtggacaatttgctgcgccacaacaacaacagaccaccagctttggtggcttctacaaccagcagcaacagccggatgaattctttccgcaagccggctttggcccg

SEQ ID NO: 64749 - DNA, 96 bp, Heterodera glycines
atgcgcaaaatgttgcgctcggtgtttctggttctgttcgtcttgctgatcggctggctgatcagttcggctgcccgcaatctgatcaccgcattt

SEQ ID NO: 64750 - DNA, 207 bp, Heterodera glycines
atgaatcccaacggttttttctttgttttagcggtactttttcttgtgaaagtcgactttttacatggcgtttacaatggtatgtcaataaaatatttctgatttttaaacaaaaataaaaaattcagaaccaatggcacgacaggtgctgcaaaagcatgcatcacaatttcagcagcattgtaaaaatcccgcagaggaagtgcc

SEQ ID NO: 64751 - DNA, 798 bp, Heterodera glycines
  unsure (1)..(798): unsure at all n locations
atgaccgttgcgctaattggcaatcggacttccatctttatgatgctttttctcggcatcgaacggtgcgtcgctgtgctcttcccaatttggtaatcaattagataattgactaattattatcaattttaagtgaaaaaaaattctcaggtcaaggagtcgcaaccaacgcaaatatgctttttggacttgcatattttctgtgcttctccatgcaccgttcagtatttaccaatgcttatctgttgggttcaacgcaccgaaaaggcgccgatttatttttatttaatattttaattttaattttagattacttttgtgctcctcaattgatgttgtggcgggaggtggaaacaattttatcatcacaattttgaacaacggagtgatgggcggcacaataattgtgtacactttgttgtggttgaaaattaaatttgcgtcttctccaaatggtaaggcaaaggcaaaggtcgaaaattgagtgtcaccaaattacagtattccgagggaaattgaccaatttccaaaatggcaattttaaaaatattatgactagggtagcaacttttcgtgacgaaaaatcccgaaatagttaactaaaatagtgagtaaaaatgccaaaatagtgaagaaatagtgacaaaaagtccgaaatagtgacgaatagtgacataattttcagccaaaaattaagcaaaaataatttttattcactgattgcattgcaaatgagtagggctgggatttttaagggcaaaaaaacaaaataggtacataaaanaataatttttaana

SEQ ID NO: 64752 - DNA, 342 bp, Heterodera glycines
atgggacaagaccagggttcccggatatttgcaggtgacctcagggtgtatcaagtaaatttattatttaaatgcataaaatgtacatttatcgaatccctggttattcccaaaaaacatttgaattttcattaaaaaattcagaaaaatcgtgatttgtttgctaattaaattttttgtcatattgggcgtaaaatgatttagaaaaattaaccacaaaaaagtaaccaaaatgcatttttttgcaaaaaaaatacccaatgggcttaaaaaccccaaatttattcaaaaaatgcaaaaaaaattttcggattttttattttgaaatttttttaaaataaa

SEQ ID NO: 64753 - DNA, 105 bp, Heterodera glycines
atgttcgcctgcgtaatcgtcgacattcgcagcaagcacacctgcgctgagttcatcattcgggacgacattcacaaattttttgggttccagctcgaggagaat

SEQ ID NO: 64754 - DNA, 6759 bp, Heterodera glycines
atgactctgcaaaatgacggttgcagttgtggtttttttgtttgcttatatgctgaggcatggctgattaataatcaatcgcttattttaccaaaccttgatataaatttggaaaaaagaagaattctttggcatataaacggtctttataatcgtgataatgtagtatatcacccgtgctcattgtttgttggcagcgaaaatgaaaatttgggttctttgcatgattcgcgtgattcatctatgtccattgattcaaacataaatcaaactccagtcaaaagaagaggacgcccagctaagaatcgttctgggtcaggacggccaaaaaaaacagagaataatcaaatattaatgccagttttttcgcacaattcttcccttgcaactgatttaaattattcggactgctctgattatgttagtgtctcttcaaattgtagtagtaacagaggaggtcgtccaaaaaaaaggagtggtggtccaggaagacgacccaaaaagactgttcataccaatttaaaagaaaatattaatccggcccaagaaaatcacacatcgaatactcaacctgtaatttctaatgaattattgagcttattgaattctgattctattgatgtccctgactcgcaacctgtagccccaggacgtgtttgtattcaatcaataaataaagatctcattaaagagacgtggtcttctcctactgatatgttcagtgatgatttaatctactgttttcaacgttatcttgcatcaaaaatagctaacaaaattgttgcagtagtcaacccacaatacacagacttacaaagttttcatgttggtcctattgctttcccatacaatgtgattgataactgctttaattattcagcgaactatgacattttgttgatgactattttctttaatggtcattttgctttaatcatttttgaccgatctgaccgagataatttgatttgtctatttattgattccttgcctcattatgatcggctttttgatcctcaataccctggctatgatgtgagaaggattgaaataattaaaaacggaatttgtgaattgacacctggtctgactcatgatgatgtggtaattagggctttaagttcatcagaatttacaccccaacatgacggaattaactgtggcgtatttgttctgctttattcggaggcctatttaaataattgttctctgaaattcccaaatttaaacattaactttgagaggcggagaattttgtggcatttggcccagctgataaataatgataatgtagagtatattggaagaaatgctaatccacatcctcaatcccttcctttatataatgtggagtctaatattgaacaatcatgcccaagggatggagatggagcgtttatttgcgtagaacctgatatagatagaacccctgatgttattttgaggccaccttccacggtttcttcgattacggcaacccgccgatctatccgacttcaaagaagtgttagtactgaaaaatcttctgataacaatgtgaatactcttccaaaaattgagcgaaatgacattacacagcgttgttatgtgaaacaccaaggaaacccatgcgcagatgtgcgtgcaaagcacactactgagtattatgattcaggaaatattggtgacaaaatatgcgaatattgtaacgcacttttattgaacagcgaggcagaaaaaaggaatgggaaattttcttcgagtttttgttgtaatcacggttcagttgttttgccctcctataaagagcatccaccaacacttcaacgatttttgtcagggcaagattcagagtcaaaagaatttttatcccatcaaaatgtatacaattcattgctggcctttgcatcaatttctgttggctattacgaatcgtctcttgatggtgacaaatgttatttattgaatggagaatttacacgaaaaattgggttattacctggacaatttgctccgtcttttgcgcaattgtatatacttgaccctatggcggcatttatgcaaagaacaaaaaatatcgaatatggtggggatagagtaaatgaaaaaacaataagaaagcttgattttataattcgcaaataccatccgcttgccaaagagctattgaatttccatgcacaataccaaaagactttagacgaacacggtccagaatctgttctcaatttccgtttgacattggttgaagctcgtgaagcaccattaaatataaaggaccctttcctccatccaagacaagccaatttacccgacgaggggaattctttattttccatctgggctgaaagcgatcagccaccattattaaaaggtatttggatcactacagatgaaggaaagcttcaaaaattccgtccacatcacccacaaaccgattctctttgctatcccttaatatttccaaatggcgatgacggtttccatccaaaaattccttacaatatcacaaataaaaaatgcgaggatgaagctatggaacttgatgtcgaatctgatgaaaacacttctgattctgacgaaaaagcatccgatgataatttatctgttgcaagttcagttgattcggttgaaaagtgcggaaaacgtcaattcttatcagttaggtcttatatccgatatcgtattgcgctgcgaaatgacaagaagcttcaccatatttggagtgctggtgggggcctgagtcaaaaatttattttggattattcagctcgtatcgatacaaatgttgcaaattatttgcggaagcctgaattaaatttacgcagtactttacctgaaaatgcgcttcgctggctttctcgtaatgcggggcttaactcaaccgaagaattaggtagcgttgttatgttccggagatctgcgcctggaacacgggcatactttcaacataaattttacgatgctaccactattatgtcaaggtttaagaggccagggtttgcatcattttttttaacttttacgacaaatcccagatggccagagatttctcgaaattttcttcaccaaggtcagaggactgttgatagacccgatttaatttgtcgtgtttatgaggacaaactaagacacttgcattttttgctggatagtaaaaatattttggggaaaatgattggccaggaatgcagggaatttcaaaagaaatacggcggtccacatgcccaccgcgtttatcataccgatctgctcgcaattcctgaaaatattgacggattgatatgggcacatattcccgccgagccaaataaaaatgacagatctgattgggctatttttattcgtaaagtgcgtgaattattgccaaagtatcagtttcatgactgtgggcgtcattgcttaaatcgtaaagggaaatgtaaaaaaggttttcccaaaccgtttagcaaatttacaattttacatgatgaccggccagcaatatatttacgcccaagccctgaagatggtgggcaaacattgactgttaaaagaaaaaaaactcaaataacatatgataattcgcgagtgtccgcgtacaatccttatattttggttcactttgaaacccaccataatttggaatatgcatatgggcaaagcacaaatttgaaatatttatacaaatacccgttcaagggtcccagtttctcatacgtaaagactaacgaagtaaatggaaaaattggtattgacgagccggcatattacgccaaaatgttatatcgttcatctcctgaggcctattgtaggatcatgtcgctaaagtatgctaaattatctcataccgttattgctttgtcaattcatttgcctggtcagcagaaaatttattataagaaaaatgaaaaagagtcagtcgctcaacaagtacagtcaggcattttgcccgaaactcctttaacagcgtattggaaaatgtgtgaaacggatcctgatgttaggaaaattctttttgaacatatgcccgagcaattttcattcaacagatctggaaaatattggaagaaacgaattttttcaacgaatccaaaacggcaaaagaaccacgcgaggaagccaatcattggacgaatttacccggtttcaccacgaaatcctgagttatttgcattatatttattgacaaaacattttcccggaaacccggagcaattaaaaatgttaaaccccacgcatatctgtaaaacatttctggaaacagcccgactcaggggacttattgatgacagcgatgtgtgggttcggaccatggaggagggtgctgcctcgcttaccccagcacaaatgcgtcagttgctggctaatattttaatttttggttcaactgaaaattgtctcattgatggagcactactctgggaaaaatttgtttcacacatgtttgacacacgctgcacagatgctgagcgtcctgctcgtattgaccatgctcttgctcttttagaaaaattattagttaaactaggaaaacagtgtaaagattatggactgccaaccccaacaatttcaattataaatgatccacagcgggggcttatcgagtttttcttcccccagcacttaaatgatgatgatgttgatgacatagttgacacaacagcatttgagcgtggaaaattgaacgctgaacaacagaaattttttgaaatgataaaaactgcttttttgaacccatcgagttctcgactattttatttatgcggcgatggcggaactgggaagacatttttgctgaattacattttatatcaattgcgaaagatcggtgctaaaattattcctaccgcatcgaccggcatggcatccacgcgcttttatgttggtggtactactgttcattcagcgtttaaatttggaataaatgttgaggccggaatattgccttcaattccctttgatagtttctttggtcgacgcataatagaaagtgatatcataataattgacgaaatgacaatgttggagcggacagtttttgaaaatattgatttagtctgccgtcaattgtgcactcaaaaacagcatttacctttcggtggaaaatgtgttataatttctggtgattggaaacagtcacttccagttgtaatcggttcttatgggagtgcagcgcaggttgcagcatgcatacagtcctcaccgctttacccaatattctcaaaatataaactgacccaaagcatgcgagttaatccaaacgaaatagagtttcttaaatggcttgatgatgttggaagaggagtaaatggagacacggttgcaatcccaaaagatatggttgtcgattcacgagaagaacttattggttgggtgtttgatcaaggatttaatatgccaagtagcgaaatgcttaaacgccttcttttggctactacaaatagaattgttgacataaataattcccaaatttctcagtccatgtatggaaattttcttgaatatttctcggttgacaaggcaacagatgaaaacccgctttcggtaaatgcagctgactttgatgtagcccagctaaaccagctgaatccaatgggaatgcctacccatttgttacgccttaaaattggatcaattatcgtcttactcgtaaatttaaatacttcaaaagggctttgtaatggcacacgtcttcttattaaaaaattaactgacaatctaattgaatgtgaaaccattggtaccggatcttctggaaatggtataattattggaattccccgaaaccggcatacatataaagacaaacgtccggacggtgtaagttttgaaagatttcaattccccattcgccttgcttttgccatgacggttgtgaaggcgcaaggccaaacggcagttcgcttgggaattgattttacagaagaaccttttgcccacggtcagttgtacacggcgctttcaaggtgtacaagtcgtgataatataaaaatttttgctcccaacaagccaaaagacgataatggaaaccctttgattagaaatgttattgcccctggtcttaatttggattaaaccttttaaatttaatatcaatacattttaaaaattttctcatcaatgtgcgaagagccccggtaatgcgggaggtgccgccacccttaaagtgcaaggagccccggtaacgcgggaggaaccgccacccttaaagtgcgaggagccccggtaatgcgggaggtgccgccacccttaaaatgcgaggagccccggtaacgcgggaggtaccgccacccttaaagtgcgaggagccccggtaacgcgggaggtaccgccacccttaaagtgcgaggagccccggtaatgcgggaggtgccgccacccttaaaatgcgaggagccccggtaacgcgggaggtaccgccacccttaaagtgtgaggagccccggtaacgcgggaggtaccaccacccttaaagtgcgaggagccccggtaacgcgggaggtaccgccacccttaaagtgcgaggagccccggtaatgcgggaggtgccgccacccttaacatgcgaggagccctggtaacgcgggaagtgccgccaaatcttcagagcttagctcctcgccgggggcactaaaaattaaaaataaattaacaaattacagtaaaaaataacacacccccggcgagtggggtccatggtttttgccagtttcccaccgtgctcctccgcgtggtggaccctgggggttggacaatttaaatttacaaaaaaaattgtccaaccgctaatgacggtta

SEQ ID NO: 64755 - DNA, 645 bp, Heterodera glycines
atggacagcagcacatcttccggcatgagcgaaagtgccaatacgccgagggcaccgtcgtcaaatttggcggaagagccaactcaacattcagatggaaagctggtacaatacccacaccagtctttttctgattacacattctgttgcataagtcttcgggtcaaagtgccgtcgccacttttgctccccgttttgaaaacggaaaaaatttgtccgtggatcattttgcaagccgcgctcgtgaacttaaaaaaagtggaaataatgaggtaggcgaggcaaaggcggactgaataggacggatgaacccaaaaacatttgcatttagagggataaggtgcatcagattctgctttacttcgaatccgtcgctttttacataatgacagcgtcttcactcaactcaaagcccgaaaaaatgcactcatcattgactgacgtagtcaattttttaaagtaatgttttgccaattattttcataataccctcaaatcatttttagctcttcttgggcatctttcaagaacagcaaaacgttgagttcgtcgagtgctgccatttccattcggaatcgactcaaaaccatccaactgatgatctcctcttgccttgccttccacctctattccatccacagcaca

SEQ ID NO: 64756 - DNA, 76 bp, Heterodera glycines
aattactggagttagcatcatagcagtgcttttccttgtctttttgatgccctcgcaaaatctggtccgcttctga

SEQ ID NO: 64757 - DNA, 532 bp, Heterodera glycines
taattaaatccattccttcgggggaccgtgccgggtgccgcggggtaagcagtgctggttcgtttcatcacggcaccgaaccttttggctagtcagcaatcgttgcttaacttgccagatcggacgggtgcgcatgattccactgttccaagcaccccaccaaaagcaaaacgatataaccaaaatataaggaaaaattttttaaaaaattttttctccatcttcctttttgatactaaagcatcagagtgctaaaattaagttgtaaataaaatttggtgcgctttagagcactttctgaaaaaaatatttatgaaacaaaaaaatcgattttttcaagtgtccgtttggggtactcaaacaattatggggagcaaaaatccaacgcagaattaaagtacaggctatagggaagctattcccgaaggattcggtctccccataaatctgggcgcatcggttcggggggactgccccgaaaacaaaaaaatcgattttttcaagtgtccgtttggggtactcaaacaattat

SEQ ID NO: 64758 - DNA, 1111 bp, Heterodera glycines
gtgaacaattcgctggttgctctgcaacggctcgacattttctgcaccgaaccctttcgaattccgttcgccggcaaagtggacatgtgctgcttcgacaagacgggcactctgactaaggacgagttggtgatggagggcgttgccggactgcccacaacaaaggcagactccccgaacagcaacgggtgagcacaattcgaactcgaacgcccctttcagccgatgaacgatcattgacatttgtcagcaaattggaaacctaaaaaatacaagatgaaattaggggaacgacgattttgaagaagataatctcggggatcggatttgggaatcctccgaaaacaatcaaactatttgggatgggtcggagtttcaaatccagtttaagattattccttcatccaaactgtttgtagaagtacttcaaacgatgcgatggcctctgacagccgctccacagaaaatgacacgacgccaagcgacaccacagtaactgttgttcaaaatgttgccgagtgcggacccaacacaatcaacgcgttggcctcctgccactcgttggtccgttttgagaacgaattggtgggcgatccgctggagaaggccattctcaaatggttggactggaacgtcacgaaacgtgagagttatttttggctctaaggggcggaattcagtgccaatctttagaatttttttataaaaataaatttctccattctcagaagacgctgtgatgccgaaccggcgaatgcccaaaatggcgccgctgaaaatcttccgccgctttcacttcaccagccaaatgaaacggatgactgtcgtggcgggctatcagccggttgccggctccaacgacacttttcacattgtcagcgtcaagggggcgcccgaagtgcttaagccaatggtcggtgagggaatgctaagggaagtggaagaggtgggagaaatgcttgagcaacggatgaatggcattttgaaaaaatagtgccaaaaccgccgtaattggaattgaaaagtcagtcccttttcagttctcgaatccaccgtctgactacgactcgcactaccaacagttggccttggccggcgcgcggattgtcgc

SEQ ID NO: 64759 - DNA, 87 bp, Heterodera glycines
ggtattactgattctccaatgccggattttctcgcgcgacatttggccgatatcggaaaaagttccgaaaggaccgatatccacaag

SEQ ID NO: 64760 - DNA, 144 bp, Heterodera glycines
atggttgacaagccctatgagttcgtggatcggaactccttgcctggggaccagtgtgcttgcattcgaaaaaacacgagacataagcgcccgaaggcctctggcctgaggaagtgtcctaaccgggaaatccggaatgctcgt

SEQ ID NO: 64761 - DNA, 205 bp, Heterodera glycines
atgggcaaacttcaaagagaaatcaaagaaatttttgaaaatcagcaaaatgaatacgaaaataaaatttatgaattggaagaaatcgaagaattggcgaaggaagagatggagcagatcgaaagcaaaattgagcagaacaaaaccaaactgagcagcaggacagagcagcagaggcggaagaaaaataagaaaacggaagacg

SEQ ID NO: 64762 - DNA, 555 bp, Heterodera glycines
actctctcacagggaccagacggcaaactttcatgcctcgacgaagaccaacatccaaaaaatgcaacccgtgctgacaatgagagcgaattggaggagtgcgcgcaccagcccaatcggaacatcatttgagatggtcgttagggaatagaataagacggacgttcttgcatagatgccgatgattgtttgacatgagttacctttcggcaaatgtccgtacactttgaccgaaaattgtaaatttacgaaaccgttaaccccatttgcctattctgttcgttttttgatacatttgctcgttattttatcgttagctatctatttattacattgcaatttgtctttttcattttcctccgttacttccttatcgatcttcatcgctacagatatgtcataaacgaatttatccataatatcagccttctatgtttttccaacatatttatctttgacaacgagaaaacgtattgaatgtacaatcagagcaccccattactccaattagattaaacccagccattcgatcgcgggtcccctcaagttaaccaa

SEQ ID NO: 64763 - DNA, 357 bp, Heterodera glycines
gttcaaccgatgttggcaatggcaacggcgcacatttaaatggacatttgacggcgccaaaaaatgaacagcaacagaatggcaatgatgaatgcgaaacggcgcaacaaaaaacggatgatggcaccgaaataacggcagaaagcaacaatggcaatgaaagtgccaacaaaccggcggatggcaatggcatggaaaatccggcaccaccacaaggcactcctcaaaaagatgctaatgatgctgagggtgatcatgatgatcaacatggatttggtgccgatcagaaacagggtgccaacaacgacgacggcggaggaagcattgccaaaatggcaattgtatgcggacgggcaa

SEQ ID NO: 64764 - DNA, 2517 bp, Heterodera glycines
atgatgcaatttgcacgaaaacattcgagcagttcattggccgagcaacggatggccatggacagagaccatcgtgagaatttgtttaaatttgttaatatattttataattaaaaataaaaaacaatttcgatgaaaagtttgttgagtattttgagcaaaagttaataaaataaaatttttaaatataatttaagaaagaaattcttgctaaacattgattttgttcatttataataaaataacggatggataatttatcatcaaatttttaaaatatttaatcagctcttatttttatttgcttgtagttttggcttttcaaaagttcaagacaacttggtttttcgcttcagattcttattctcaaatgccaagttttaatttttctatttttatgccaaacagccggcttttggtcattttcatttcataaaaatttttgtttgacattcagtcgatttggcattccatcatggctccaccgtgtcgctgtacgccggcaccggcgtccgcaatcagccgatgcttccgctgagtaacagtgccaatcgcatggtgccattgacaacaccggcgtcgcgtgcaaaacagcgcaagcagcacattatgaacgcctattttggcggttttggctcggcactgaacaaattggcggctgcgaataagtgaaactcaatttttatggggcaaattttttaattttttttttgcttttaaatgaatttgtccgggaaatttccgtaaatagcggctaaaaaatcggaaaccaacccgagaaaaattgttttttcggttagattgaccaaaagttttagaaattccctaccagcagtagacctaatttttcttaaatttttaaaattttggcaaaaatctcaaaaaaattcccggtttcgattcggtagggtttagaaaaagacagtaagactttgtgtataaagtataaattaatcgggaaaaatatattaaaaatacatttagtttaatttttatgcgttttttaaattaaaaattccaatttttcctttcaaattttcgttggacaattaacggcgtgaaaatgatgggcagcaacgaggaagtgtcttcatcggtcgaaaaccaccaaaatcatcctgcttctggcatcaatttctgtccaaatccgtcgcagccattgcgccaaacacggggcacgttctcacagcgaaaggtgcgcgatatttgaatttggcactaatttgggaatagctatcccctgatcatctctgatcagtcccggtttgatagcctctgatcagtgatttggaagatggccagcagataattaatgattaggaacacttttttttggttgctgaattcttcgtgagggaggcattcaaattttgagatcgagtttttcaatttttcgtctcggtttttctagacaatgccgaaaaaccaaaacacagtggaccctaaaagccccaaatccaggctcagatccatcagacgaagttcggttcggcctcggatttagattttaaaatttaattaattcttcataaaatcaataaaatttttgaattttttggggttgttcaaatgctttgctgtttttggctaaaaatagcggaatttttatggtttttagtctcccaattatgaattacccctcacacatttgaagctgcagaatcaccagcaaatggactgcccgatcggtggtcggcatttacacggacgaggaggacgaggaggaggacgacgacgaccaatgttgaagaggatgatgaggatgcggatgatgatgacgacattgcggatgatgtggacgtgtcaaccgaggaacagcagacggacgtcgagcagtacaaggagacggtgagcaatacgaataataatgctgatcactagcatttcatgatcagttcagtatttgatcagactgcttttattaatgctgatcactagcagtttatgattgatcaatagcattttatgatcagttctgtccttgatcagtctgcttttttaatcaccacctatttctgatcaataaaaatggaaaaaataatttttggtttgatcatttttcaaccatttcttcttttttgatctttctgctgctcagtttgttgtcttttttcttgattagtctgaaactgattcgaagattcttggtttaatgcattagtttcttaatccaaccctaataaatttgatcaaaatttgtgcgctacaattttcaggttgacagcgatgagaaaattgcccctctgatcgaatgtgagcaactgaaaaacttcttatctgggccgccaacaacaaaatgccaaataaattcggatgccattctgtcggtgtcgtcgactacgacgaagacaccggcgacagcccaaaatggtggcaccattgagttggtggtggtctccaaacagaaacaaccgccgcaacacaaccagcccaagcccaacaaacagagcggcggggccgaatcgcgagcaaattcggccgaaaatgggacaagaaagtaattaatgaacaattaaa

SEQ ID NO: 64765 - DNA, 1489 bp, Heterodera glycines
atgccattgtgggagttcggcagactgctcaagctggtgttgtggtggtggctgaaccggtgatggttcgggtctcgcttcacaaatggtggacgccgttgcacaaactgttgttgttgttgttgctgctgctgttgttgttgttgctgttgttgctgatgttgttgtgccatgccgtcggtcaacgcgtccagcttggactcgatgaagtacagtttgctgttcagctgcgtgtgcaacagttccatgcggccaagcacattgcgctccaatttctgttaaaaaacaaaaattttagcaatttaaattcgtaaaattgaaaaaactcggacaaatttagaggaaatcggcctggattggatccaggcctggatttttcctggatccaggcccaggtccatttttggcaacttgggtttttcctgaacctggggtttcctgggtttttgtccagaaaatccagatccaggcccaacatggaaccaagggccagttccaggtccaggcttttttcaaaatgccgatctcatctcttctatgagtatattcagtgacattccaacacccaaacccagtcttaaatctaaaatttattgcatatgttttcaaattttaaactaaaatcttgtaaaaattaagtgcctttgttttgatcgaaatttcttatagcaattccttgaaattaattttatctcccaaaaattgaaattatttaaaatttggttactgtacccgcatttcggtcaatgtccgttgctcaagctccaacaaggctcggttcatgttcatattttttaataatacaataataaattatttgtgttgcttaattatttttaaataaggaaaatttctcaaaattttttttagcgaattagaggttaattttatttaaatattttcattaaaaacatttattataagacttttttaattgtgagatttggtcaggggcttgaaaataaatttggcctaatatttatacaaaaatgtcgaaaaaatctttggctctaagagtaaaaataaaagtcttcggattgtccttccgaaatttttttcgggcctatgggcctgcgcgtgccctgcatgtcccccccccccctgctcgaatgaaaccatcaaccttccacggttttggtcgggaattctcgactcgctaagtgccgttccaataatattttgccaatttggttggagaaatttgaacctcccagcaggagaatacattatcgcatttttgttctatttttacaaagaaatgctttatttgctctcttttagtttgctgtttccaacactcgtacagttttgggttatttgaatatttgccgttcactttcaatgtttggcattgtgacacgtaatattttagttgtaaacgaaattaatttaaatatttctagggtttttccgaaaaaggacatttccgaaagtccagcaggcaatgcttatcggcagaaaaggaattgaaaaattgattaagatttaa

SEQ ID NO: 64766 - DNA, 462 bp, Heterodera glycines
atggctgatggcaacgaatggaaacgagaaccgcttttccattttgctagaattgtttgtttggatttgatgaaagcggtgagttttaggtcaagggcgtagccagacccttggcttctgagggggtgggaggggggctcaagtcaaaaactcgatttttggtgtatttttctgtttttattcgattttagggggtgtatttttcgttttttgaaatcccgaagtagcgagggtgtattacagaatttttagctttttttcgccaaaaaattactgttttttgcatggtttttcacacgtaattaatttcttttatgatgaatttagtctttgatcgcgtcacattgtgccaatgttatttatgcgggcaaacaaaaagatattgatattgaccataggaacatcaaattaaggctgcaagaaattactacccatatggctgattggatagccaaaatgctg

SEQ ID NO: 64767 - DNA, 606 bp, Heterodera glycines
aatttggtgcgtttcagagcattttctgaaaaaatatttatgaaataaaaaaatcgattttttcaagtgtccgtttggggtactcaaacaattatggggagcaaaaatccaacgcagaattaaagtacagactatagggaagctattcccgaaggattcggtctccccataaatctgggcgcatcggttcggggggactgccccgaaaacaaaaaaatcgattttttcaagtgtccgtttggggtactcaaacaattatggggagcaaaaatccaacgcagaattaaagtacaggctatagggaagctattcccgaaggattcggtctccccataaatctgggcgcatcggttcggggggactgccccgaaaacaaaaataaatcgattttttcaagtgtccgtttggggtactcaaacaattatggggagcaaaaatccaacgcagaattaaagtacaggctatagggaagctattccggaaggattcggtctccccataaatctgggcgcatcggttcggggggactgccccgaaaacaaaaaaatcgattttttcaagtgtccgtttggggtactcaaacaattatggggagcaaaaatccaa

SEQ ID NO: 64768 - DNA, 660 bp, Heterodera glycines
aacaaaaaaatcgattttttcaagtgtccgtttggggtactcaaacaattatggggagcaaaaatccaacgcagaattaatgtacaggctatagggaagctattcccgaaggattcggtctccccataaatctgggcgcatcggttcggggggactgccccgaaaacaaaaaaatcgattttttcaagtgtccgtttggggtactcaaacaattatggggagcaaaaatccaacgcagaattaaagtacaggctatagggaagctactcccgaaggattcggtctccccataaatatgggcgcatcggttcggggggactgccccgaaaacaaaaaaatcgattttttcaagtgtccgtttggggtactcaaacaattatggggagcaaaaatccaacgcagaattaaagtacaggctatagggaagctattcccgaaggattcggtctccccataaatctgggcgcatcggttcggggggactgccccgaaaacaaaaaaaatcgattttttcaagtgtccgtttggggtactcaaacatttatggggagcaaaaatccaacgcagaattaaagtacaggctatagggaagctattcccgaaggattcggtctccccataaatctgggcgcatcggttcggggggactgccccgaaaac

SEQ ID NO: 64769 - DNA, 135 bp, Heterodera glycines
atgttagtcatagaaatgttgtcaatattcaaacgtatttgcattatttcttactcgatggttgtgagtttattttcaccggccactgcgtcacctaaatttttctatttgctgattttataaaattttcagtga

SEQ ID NO: 64770 - DNA, 58 bp, Heterodera glycines; identical to SEQ ID NO: 50987

SEQ ID NO: 64771 - DNA, 729 bp, Heterodera glycines
atgggtcaaatcaaaaaattaatgtgtttgtgcacatctacaaactcttggctttcgaatgacccagggttgtttgggtccggacccgggaagtgccctaaaaagggaggacaagcgacaagcactttggtcgcgatttctgtgtgtcattggttcgatttcttatttttgttttctgttcacttttgttttccgttcaccttttttgtttgccatttttaattttatttatttaattttagttttttcattaattaaatttattaaaataaataataatattgtatttctaattagatttgaattaattaaataaaaaatacaaatacaaatacaaatctatataattaataagaaaaataattttttgagttcataaacgtttttaagttatattattattattttatgaaaacaaataaatttttataaattcttacttacgtgaattgtgcaataattcaaaataggaaaacaaagaggagaggaagagaaagaggacgggtaacagaaataggaagatgagagcaagacgaagagaaagataaaaaggaagaggaaagggaagagaaagtggaatggaaagagggaccgatagaggaagttgaagagaatgtggaagagttaagagaagagaaagtggaagcggaaagagaagaaaaagagaagggaagagaaagtgtaagaggaagaaaaccaggaaagttaatagaaagtggaagattttag

SEQ ID NO: 64772 - DNA, 637 bp, Heterodera glycines
gttattttaaaacatatttttatcaagaaatatttttaaaaattgagacgttggtatttctataaatgcatatgtataattgaatattttattaaaaataacttaaaaatgaaatgaataatttaagataaataaactaataaatttctgattatagcaaataaaatgaaagctttaacaattaaaagtctagtcgattatatcactcgacaaaattaagttaatagaattaagcactattcaattgcactttgagaaaattaattttttttaacttataatttttaacaatctttaatcttaaatttaattataattaattaaaaataagagatttaatgaaaatacaaaatcaatttaatatgcgatttgccctattgagctattaatatgtgattcctattagctattaattcttataaataaaaaataattaatgagaattgatgttgaacaatacgatcgttaatgagaattcgttaaaataagttaaggtatgaacttaaatcttcattgggataatcgcccaatgaatcaaaatattcaatttctgtcggcaaaacagcaatccagtgttcaagtatcgtgcccgcccggtcggtattcgccacaaaacagtatggaaaatgcctgttcc

SEQ ID NO: 64773 - DNA, 1276 bp, Heterodera glycines
atggactgtgaaaatgcggaaaattatgacaaagtttttgagcaagaaacaaaaggaaataaaattctaaaactacatatgtcaattcttttaaacctcattgatgttcttccggatttttacactttttcgaaagaaaaagcgaatgaatttgcaacaattaaaaaattatgtaagaaaaggcgaaaaaggggaataaaaatatcgaaattgaaaataattttacaattaaaaataattagccaaaattaaaaaaacatttattaattataaaaataattagccaaaattaaaaaaacatttattaattataaaaataattaaccaaaattaaaaaattatttattaattataaaaataattaaccaaaattaaaaaattatttatttaattaattaaacataattatctaaaattaaaaaatatttatttaattaattaaaaatatatccaaaattaaacattttttctttaattaattaaaaattatccaaaattaaaaaaaaattctttaattaaataaaaaaataaaaaatattcagctgaagaaaaaaaggtggccagtttttatgaaaatatttttgacgctcaaaacaccgaagcggcacgtgccaaagagatggaattggcactgatccgtgccatccaacacattttgctaaatgatcagcgtgaaaagacggcggtacaaagtcaaaggcaaaaggacgagccccacattatgtatttgttcatggttttgagtgtgttggatctgttcgacgacgaagtgccggcccggcggactgcgcgaatgctttgcatggcattgccaagtgccaaagagacgacgcccaaggggaaaaggcaacggaatgccatacggggcaccaccattagccaactagtcgaaaagtgtctcgacaacgacatacaaaacattgagcggcaaaccttcgccgatcagcgggaaatgtcagcccaatggcacggccaattcttcgcccattatttgcccaattttccggccaatgatccgctgctgaaacgcattcggcaaacggtgggcgcactgcacacactgaatttgctgatggggggcgatgagttggacaatttgatggccaacaatgaatttgtgccggcgaaattggtggacaaaaattgttggttttttttattttattaaaatatttttataaatgcttaagaattataataatttaaaattttaaatgagtatctaatgcagatcattatggacgggaatttaagtcatatagatcatgaagtttga

SEQ ID NO: 64774 - DNA, 559 bp, Heterodera glycines
atgacatttttccgaaccaaagtcttcaaaaatgttcaatttcttttttctgctgatcttcgcttcttctgcccaaaatgcgtttcaacaaaatgtaaaatattgtaaattcgacattattttgtttaatattttattttttttgtctttatttttgatttagaattttacattttagcctcaaaatttgtccatatatttatattttaataaaatttttttttttattttgcagataatagatgcttcgtggggggtatcgaacgataccaagaatgtcaatcgatcactttgtcaatccgttcatccgtcccatctccttaatccatccatcaattaggcccattcgccgtgccgttgttgtgctgttttggtacatttggtgttgccatttcttaatttaaagaaaatggaggacgaatttatttgcataggccaattcatgacaagtttcacgatcgtttttaaaataatttacccatatttaaattatttttaccgataaacaattccgaaatgcctcaaaacgagatcaagcattaatttgcataatcggaaa

SEQ ID NO: 64775 - DNA, 315 bp, Heterodera glycines
atggccattgatcagcaacgtgttgattgcgcaacccgtctcgatcaaattcctttggagacatttgtcagaccgttgccgtgtaacgtaagataaaatcatataattaaatacatgaaattaatgacgctattttcagcacattttccacaaccattgcattgaaaactcggtatttttaaggcttttcgggtctatgttttcatacatgtgcatatatgaagaaaaaatcttttataggttaagaagcggacataaaacatgtccaatatgccgccgtggtaagaccttaatgaatttataattttcaataaa

SEQ ID NO: 64776 - DNA, 804 bp, Heterodera glycines
cgaattatgaatgaagttttgtcggacattggacatacatgtgcatatatagacgatatcattgtgtatacggacacatttgaagagcacatgtttattttggagaaaatttttgaccgaatacgtaattttaaattgaaattgaagcctcaaaaatgtgaattttgtaagagcgaaattgtttatttggggcataaactaaactgtaaggggtacgagccgtccatcagcaacaaagaagccatacagcatttcccagaaccaggaaatgttaaggaaataaaaagatttcttggactggttggattttttaggaaattcataccaaattacgctgcaaaagctgccccattgacattattgttaagaggaaaggaaaacgagacgaattttaagtgggagacagaacaacaaaaagcatttttggctctaaaaactgagctgacaaagtccccaagcttacgacccccaaattataaaaaagagtttcatttatttactgacgcttcacaaatcgcttggggaggggctttgatgcaaaaagataacgaagggacactgtacgcagttgcatactgcagcaaaatattaagccaaactgaggcacgttacccacccacccatggggagctggcagcaattgttcacgcgattggtgttttccattcaattttttacgaatgtgacattaccatttataacgatcacaaacctttgactttcctgttatccaaaggaaagaccaatcccaaattgaacagatggcttctaattttccaggatatcaacccaacaattaattaa

SEQ ID NO: 64777 - DNA, 88 bp, Heterodera glycines
atttgccaatgcgttggaacgtgccctgctggacatgcgcgacttggtcgactgggccgggcgattgaagggacgggcaaagctttga

SEQ ID NO: 64778 - DNA, 380 bp, Heterodera glycines
atggcgtccaaacactttgtggaggcggtggccaaaatgccggccaagacgaccatgtccattggcaccattgtggacggactgatggaggcggccattgtcgggcacaaacgctacactggcgaagtgatgaacggtgggcaaattggggggggggaattgttattttccaaaatcataagtataatgacaaggataattcctcgggtacctttatttccaccccgagctcgttttcctctccaatttttttttaattttcaaacacaaatgttcaaaaaaaaataaaaatctatagctatttttatgatgaattgctatactagcaattagtttttccaaaaattttttcaaaaacttgaaattttcttttaaataaa

SEQ ID NO: 64779 - DNA, 443 bp, Heterodera glycines
atgtccgcttggatttgtcctgggtttttgctgttttttgtgctcattctgatcactgatcactgtccgatgacccaagctgtcactcaaccgccctatggtcaattggctgtcagtggaaaaaatctagtacaaaaaagtacgaaaaaagccgtggcattgcacggcctgtcaatgtactggagccaatgggtgccgaagttttgggtgaaacagaccgtcaacgtaatgttcaatttttcatttatattaaacaaattgtccttgaaaaatgataagaactaccttagaaatcgaaactatgagttttgtattagaattctgcaatgaaaatttttttcaagaaattgggaatcggggatccgggcctaaaaatggaaaatagaatttgtgcttccatgggttataaatgcattaaaatcggcatatattctaacaataaa

SEQ ID NO: 64780 - DNA, 225 bp, Heterodera glycines
atgtccgcttggatttgtcctgggtttttgctgttttttgtgctcattctgatcactgatcactgtccgatgacccaagctgtcactcaaccgccctatggtcaattggctgtcagtggaaaaaatctagtacaaaaaagtacgaaaaaagccgtggcattgcacggcctgtcaatgtactggagccaatgggtgccgaagttttgggtgaaacagaccgtcaac

SEQ ID NO: 64781 - DNA, 503 bp, Heterodera glycines
taattaaatccattccttcgggggaccgtgccgggtgccgcggggtaagcagtgctggttcgtttcatcacggcaccgaaccttttggctagtcagcaatcgttgcttaacttgccagatcggacgggtgcgcatgattccactgttccaagcaccccaccaaaagcaaaacgatataaccaaaatataaggaaaaatttttttaaaaaatttttctccatcttcctttttgatactaaagcatcagagtgctaaaattaagttgtaaaataaaatttggtgcgctttagagcactttctgaaaaaaaatatttatgaaacaaaaaaatcgattttttcaagtgtccgtttggggtactcaaacatttatggggagcaaaaatccaacgcaaaattaaagtacaggctatagggaaactactcccgaaggattcggtctcccccataaatctgggcgcatcggttcggggggactgccccgaaaacaaaaaaatcgatttttt

SEQ ID NO: 64782 - DNA, 439 bp, Heterodera glycines
aaaatggtgtaagtaaaaatcgtaattacgctcaaaaagcttctcaaacaattttagcgcttccaattccttctacaatcgcctttatacatcccattatgagcgctaaaattatcagagtgccgaaaatcgcatgtgatctaagcctagcaaaaaatggtgtaagtaaaaatcgtaattacgctcaaaaagcttctcaaacaattttagcgcttccaattccttctacaatcgcctttatacatcccattatgagcgctaaaattatcagagtgccgaaaatcgcatgtgatctaagcctagcaaaaaatggtgtaagtaaaaatcgtaattacgctcaaaaagctcctcaaacaattttagcgcttccaattccttctacaatcgcctttatacatcccattatgagcgctaaaattatcagagtgccgaaaatcgc

SEQ ID NO: 64783 - DNA, 758 bp, Heterodera glycines
atgaagtgtgccagcgatcacccgacaggcggagttgatgaaaattaccactgcacacataacgattcacaacgtggttgggtcagcacttgcacatctttggaactgaatgctgccctggacgagggttatcgggtcaccaaacttttccgcgtattggaataccaaagcagcgatgatcaattgttcaaatcgtacattgcggaatttatggcgctcaaaatccaagcatccggctttgacaccagtatcaaaggcaatcctgagcttgaggaagcgtttgtgagggagtgttatgagaagtttggcattacaatcgatccaacaaagatggagccgaacaaagggaaacgatcgatagcaaagctctgcttgaataacttatgtatgttgtctttaaatatattatttttaaataaatttctagggggtcgattctctcttcgcaactttgggctgtcgcaaacactcatcacagatgaccctgtggttctcgctgaatatttggacaaccgatcgctcgaggtcacagcgatcgacgaattggacgctgaacacatactgatcagttatgagaaaaagaaggagtgggtcgaggaacatgcatgttccaatattggtataataatttatgaaaacaaaattcataattaatttagtaatatctctttggacaacttcggcggctcggctggtattactaaaggcaatgcagaaggtgaaaagggaaccaggctgtgagctactttataccggta

SEQ ID NO: 64784 - DNA, 99 bp, Heterodera glycines
atgctctcattggtaggtgttgccatttcaactcttcccatggatgccattcaattggcaatggaaggaactaattaagtcaaaatttaaattaaaaaa

SEQ ID NO: 64785 - DNA, 966 bp, Heterodera glycines
atggtcgaaggtgtagaatattggagatgccctcatgtaagcgctaattttcgagctgtacacacctattatttaagcgccccccatattgtcccggtcgcatttatgtccactctcgttggcatgaaagaggcgaattacgattcaaattaggatggaccaaaaatgaaaaccattctcacaatgaaattttggacaaaaacaaagtaaacaaaaaaaagaattttttatttatatttatcccaaaaattaggtacgaaatgcggctgagcgtttgaggcaactagccagagaagctcatccgcttcaaactagggatgccatagatgaagcaagggccgcactgtctgctgaagctcgtgttactgccccttcttcttctgccatgggaaaagtttttcggcgtgccaagcgtaaagctgccgaactacagggtgaccagggattggactcagttaatcctttggaaatgattgtgcctaattatttggagccaataattttactgaatgagaacatcgaaattgccggtcaacaacgaaaacttattgcctttgccacacaagcctcactccgaatgcttggtacttaccgcagtgaaatttcaatcgacggcacttttaaagtaagtcggagttttttaattacctaattaatattataataacagacagctccgaagggatttggacaactatttaccgttcatactgtaattgactcctgtgccattccttgtgtgtttgcctgtttaccaacgaaacacatgcaaggataccttcgcgtttttgatgcattgcgaatccgaatcggaaactggtttcctcaaaaagtaatgacggactttgaagttgcaattacggcgatgggtgtgatgggtggctgagagctttggatcgaaaatgataatttggctcaaagacaggcattgttcacgattgaggcaattccgttttgtctttttca

SEQ ID NO: 64786 - DNA, 426 bp, Heterodera glycines
atgcttataaaatttttcttaaacgatcattattgcttttcaccgtggtgcgacttttggggatttgcaacttggggacccgacatttggggacccgacatttggggatcccgacatttggggacccgacatttggggatcccgacatttggggacccgacatttggggatcccgattggggacccgacatttggggatcccgacatttggggacccgacatttggggatcccgacatttggggacccgacatttggggatcccgacatttggggacccgacatttggggacccgacttttggggacccgacatttggggatcccgacatttggggatcccgacatttggggacccgacttttggggacccgacatttggggatcccgacatttggggacccgacttttggggatccgacagttag

SEQ ID NO: 64787 - DNA, 687 bp, Heterodera glycines
atgacgaccagcgaagggaaagcgacggcgatcacttcgcccggccccccggggttggacgagggcgactcaccgccccaggcgccaacagaacaacagcagaagggcggaccacagcagaaggagaaggacgagaaagagttgcactctctgctgaacaaagaaaaggcacgcgcctgtgagtggtgagttcgtgaaattcgggtcaagaaaggtcggattgttcggttctcgagtttcgggcggcaaccctattttggaatacaacccacttccaaatttatttgcacaattcttttatgataaggtcgtcaatctccgctgtcccgatcattggcaccattctgctgatgttcttctttttccaatgcacatcagcaatgcaaacgaacacggcgggcacggagggcaaacagtgtgtgatgcgcgggatttgtggaaaggatggtgaactgcgtcagaattgccggtcagtaagtcagtcagtcggtggtgtatgtgtgtgcgcatgtgtcaaagtgcaaaaaattcagttaaaacacaattcaaaactaaaaattagaaaatttgttttcggctgggctcgaggtgattttttgtaaactttttgccaaaaataacaaaattttcagtgtttttaattaaaaataatgtgttttatttcaatttcttcaacgatttcattaa

SEQ ID NO: 64788 - DNA, 527 bp, Heterodera glycines
atgaggttcgtaaaaaattttctatcttaaaaagaaaagttattaggtacataaattttggaaaaatttgaaaattaagatcactgttttaaaaaaaaagtatatgaaaagaaatatacataaaaaatcagcaatttttagttaaggattagtaaaaggctcaataaccattcgttttttgactctcgtcagagggaaataagaaaactgagttgcacggttggttaaaatgggtttttgggccatgagttcgattccacttggctgcaaatatttttaaaaattgtttcacgaagttttgggaccaatgatcaagcatttgacattcacttcgactaattcagaaccctgacccgaactcaaaaaatccaaaataattttaaaaagatttacaggcaagcggatctgaacccttggcacaaaaagcccatttttaaccaactgtgcaattgtttcacttagttgcctctgtcgagaatgggcaaattttcggtttttgaggccctttcaactccgaactgaataaa

SEQ ID NO: 64789 - DNA, 430 bp, Heterodera glycines
  unsure (1)..(430): unsure at all n locations
ccctcgcccacaccgtccgcgaccatttggtcagccgatggattcgcacccaacagcactattacgagaaggacccgaaggtaaggccattcattcccacgttcgattgcatcgttttcaattggtttcagcgcgtttattacctttcgttggaattttacatgggccggactttgtccaacacaatgctcaatttgggaatgcaagcgacggtggacgaagcgctttaccaggcgaacgaccgcattttatattacgaattaagtttatttggcattccatttcagctgggcctcaacattgaagagctgcaagagattgaggaggacgccggccttggcaacggcggactcggccgactcgccgcctgctttttggactcaatggccacgctcggcattcccgcctatgngtacggactgcgctatga

SEQ ID NO: 64790 - DNA, 266 bp, Heterodera glycines
atgattggccctccaccgccgccgccgccgccgccaccaccgcaacaacatggcaccggagggggcgctgctggtggtggaccgccaccgcaacagcaacaggtgttaccgccaccgccgaagaaaaatgtgttggatggtgacgggaaaaggaggcaaaatgccaataaaaatgatggcaaaaatgccaaagatgaagcagctgcacgaacaaagcacgtcattggcagaaattagcttttatttgctaaaaatgtaacaaacaa

SEQ ID NO: 64791 - DNA, 160 bp, Heterodera glycines
cgattccctttggctgttgaagagggctccgctcggcgtcgtcgctggtcaacaaatggacgaagcgggtcaggagatgaacacggcgcactgttggcaatggacagccgggcacagtgtgctccgagtgcaattcgaagaccgggacattgggtactaa

SEQ ID NO: 64792 - DNA, 2191 bp, Heterodera glycines
atcccattaaggcgttggattgagagcaaaatccatggacatttgggagaattggctgtacctcagtgatccgttgtccaatggcattttccgcatgaacaaattcacgggcaatttctacgaaagtgtggcacctgatcatcgcttgccgggaactgtgcgcatttttgccagcgaatcagacatcaaaacgcgtaatcaatggtaaaaaagagttgattcaacgtattttatttaattttatcgattaattaacggattatttttaattaccgactaattgacatttactgggtaattaccgatcgattaattgaccgatttttgtttaatcaccaacttattgacattactgagcctaattaaaaggtgcaatgagcggaccagtcatttgtgtgccaaaaacaacggtggatgtgatcagatttgtcatgtgatctccgatgatatgggcactccggcacataaagtgcagtgcagctgtaatgacacctatcaattggtgggtgcttatcatcattttcaatggcacaaataaatgccaatgtgggtaatttctgtagctgggagaatgtatttcagaaaaaaaaccataatttccaaaattttaacattttctagaatttccaaatatcattaaaattttttgttttccttacttaaaattttaagttaactaggtagtatcaatattttagtcctctcctcatccaatacttcaaaaaagtcagaaattttttttaactccaattttctcaaaattagacttttatctttctatttgtttttgttttttgagggaacgaagggaatcgagaacgaatttaggctgaattttaaaaaataaacttgtctggtacttgctgggtcaataagcgcccgtccgataaatttttttagtgagtttcttaaattttaaattagaaaaatgctcgagggtcttggcatcgagtcacaaaatggtatctcttggcaatttttacactgatcacttattgtcaggtgaagcagccgggcgaagacattgccacccaatgtgtgccgaacgaagcggcacgcgtcagctgcgaaggcccgtacaatttccaatgcgcgtcggacggccactgcattgcgctggacaaaacgtgtgacgcgcgggcggactgcgcggacgggtcggacgaagcgcccagctactgttttgtgcgcttctgccccgagacgtactatctgtgcgcaaacaggcgctgcgtgcaggaacagttgcgctgcaacggggtcaacgactgtggcgaccggtccgacgaaattgattgcagcttgcccactcaaaaaacgggccaggaaggcggcggcagcggaagcggcggcattggcacgggcacggcaatggtggtcaacacggtgtgcccgccaggtgattcaatgtttaatgatgggatgataattaattgaggagggtcaaacgaatttaaaatctcgactcggtgggcataccgtgattcaaatccccgggatttgaatcccgatatgttgtcaggatcctcaagtcggcatcaggacgaggaaagcccgacggggtccctgtcccatccggattctatagtcgaattcactgtttcaatactctcgaaccaattaattaattaattaccccactcccaaaaattcatcaggttcatttgcctgcatgaatgggcattgcatcaacagttcacgcgtttgtgacggccacaatgattgccatgaccaggaagtgtcggatgagaatgccaaaacgtgtcctggactgcctattgattgtcgcggggtgcgcaagaagtgcccgaacacaaacatttgcatacaggtacggtatgaaagaaaaatatattgtatattgaacaaaaaaatcctgtatttcctttattattaaaaaggttaataactgtaattttgagagaaaacatattttaacatatgaatcctatatcatttaaaaggattactattatttgaaatagttactgtaatagtgagcatactgtatatacaaattcaatttttacattattacttatttcttttttttaatatacatatatttacagcctgctgatttatgtgacggatatgatgattgtggcgatcgtgctgatgagcaacaactgttttgcgtaatgccaacaaattaattaattatttatttccaaacccaagggaattgcct

SEQ ID NO: 64793 - DNA, 1643 bp, Heterodera glycines
atggaaaagaaggttaaacaacgagttataattaaagtcattttgtatttaattatctaaatttattaatccaattattaatttaaataacaaataagtaatttttctgctaaaaatttaaataaaaaaaaaaaagcaaaatatttcaaacgcctctctctttgtttgatatagagaaaaagcgttttattcactcactcattggggcagcgttttaatatgatatatagttttctcaaatctcaggggtcagaaaacaatgctcataatcagccaaatccctacacataaagcccgaaagtccaatgggggggggggtgttttggcactatatggaaagtgaccagttttgaaaagtttttcaaaaggggggacccttttattttgcaaaattttttttgtgatagtcataaaaatttattctctggagtttttggggtccccgatcacgaatccttcaattattttgatcaattccgatttcctaatctaaatttgaacaaaaaatcataattttaaaaattcaaaatttcgatttttattcgagttcgggttagggattagaaattagtcaaaatacatgtcagattcgtgattagcgacctttaaaaccccggataaaaaatgatcatggttttttatcttaaaaaaattttgcaaaacaaaagggtccccccttttgtttcaaaaactgtcactttccatatagtgccaaattttttattaaaattaaatttataaatttcactattcataaaattaaaaaataaataaattattcagaaacaaaaaatatatgtttgagaatttctatttttttatagaagaaataatttgaacgacttaaaactgtcgaacatttcaacaattgtttataataatttgaataatttttttttaaattgcttactaaaaataagtcatcgttgtcaaaacataaaaaaaattaatggaatttttttgtcgcaatttaatttacctatgcaatttccattaaaatatttttaggaaaaatttacgcctacgacacgcgaggagaccatagtgagttttttttatcgttagtacaattaatttaatagaatcacaattatatttaattttaattaatggatgttggctactttaattaaattaattattttctatcaattatccccaaaggaaaaatagttgtactttgacgccttaattaattaagttgtgacaattgccaccggtgattggacatatgcgttggcattggacccgtgtgctggctatgtgttctggtcggacagcggctataaggtggtgattttagtaatgatgcacgagatataccgaaaatttgccgagacttgtgtgactgagactaaatctcggacatcaaatcacgatttaaatactttaattacaaatattttaataatttttaattggagagaatttggtttattctaaaaaaaattccataaaataaaaatattttaggtttttcttaatcattgggatttcatgactacaaaattgcatttaatattcagcaatttatttggtacacatcttaatataattattaaaaaagaattgttgctattaaaaattttgttttgtggttcattagagaaatcttataagaaaattgtaaaataataaataaa

SEQ ID NO: 64794 - DNA, 1734 bp, Heterodera glycines
atgcgctcgcacattaatgagtttaagatcctgttcatcaacatcctcgtcctttacttcttccattctctgacttggttcgtctactttttgcgatatcgggtaatagttaattaattattaattaatgaattattaattaataaaaaatgatgacatcattttccaaaattaaaaaattcagttgcttctcttcttttacaccagtacgtgtgatctgctgagccccgtttggatggtccccgtttttatgggcccttaccaagtgtattccgtcgcttatccgtctctccatttcgctgttactttcgaacgcattcgagcattgtttttggtgagaaacttcgcaaaatgccccaggctttctttgtttggttccatcccaaaaaaacattcataaaaaaggcaaaaagcattcatttgagagattagggacacaatctctgagtaccaaatgagaaggatattcacatacaaaaaaggagacacttgcttggataattaattaggtgcacaattatgagcagatgggcccgaaactgatcatcgcaatcatctgcgccattgtctgttttaccaattgctgttaattgtttcggttattaattaaccattttgaaatatcccaattcagtggcttgcttctttgctgtatttggcgtgcattgtcggcttggcacttgccgaccctcaaatctctggccacccccaaggcgtcgtttacttgacctccgattacaatgccaacctgattttttgggccatgcttttcacgatgcttttggtcgttgcgacggcattgtgcgattggcgcatttatttgctgaacaaaaggctaaaccgggtcgggaatggcccatcgactgagtacaacctcagtctgaagtaccaaatcaacgaaaacaccctctccatgatgctgatcttcccgatggacttgctttacgcattgatttatcccatatacaatgttattgtgctggtccttcgcgcctaccggcaaatgctttcaaccgccaattacgtctcctattaccatatggcgaatacggtatggtagagacagaaataaactgacaataaagcatacggtaagtttataaaacaaattcccatttttcagttgcttttcctgcattctctggtcacccttgtggtgtatattcgatttatcaaatatgtcagccgcgttcgaaagccgagcattgtaaaaagtcaaccgaatgaagaagcaaatatacacttcaaacaattgcaagcgcaatggaaatgaatttttaaatgttttcaattataaaaagttgacgaattaaaagtcattaggcatttttcatttaatttgtttttgcaaaaattaatcaattcgaatcaaagaaagtgccatttctgtcaccttaacaattgtttttgtgccgttctcaattcttttctgattggcattgggcaggccaaacgcattggtccgtctgcgaattgcgcagcattcccggcacacaatcgcacgagcaaaagcagtgcatttgcgtgcaaatttcgggcattgggttgtcgcaggtcggctcgcacccggcgcaacgcaattggccaatttgttcggaagaagagcactgattgaaaatatgagggaatattataataatattgtttattattagtttataaaaaagattggatttagtaggtgaaatgccgcaaaaaatgacaatttttttaaatagattacacataaataaa

SEQ ID NO: 64795 - DNA, 396 bp, Heterodera glycines
atggttgagacatacaccgacttggaatcaaagccaaaatttcacacatgtaaataaattaattaaaaataaatttagaaaattttaaaataattttaggaaaatgtaaaataaaaatatattcaggcaacatcaatgcaattgcattgcatctacagatcaaagctgaggagcggtaagttctttcatatttttatttttatttaattgaaaaaatttatttataattaaaatattactctttttttttgtaatttgactgtttttttattcattaaattaattttaagtaaatttttaatttgcattttttagctttaatacttcattcgaaactgtggcagcctttgacgattttgcacaaaaagttatcacaaaataaatatttaaaataaa

SEQ ID NO: 64796 - DNA, 761 bp, Heterodera glycines
caaatgttttcatgccagaaaacggtttcgtgaactgactgagcccgtcaaggcgttgttggctctgctcaaatacccgttcatcatgctccttctcctcctgctcactgtttttgtcccctctctccaaattgctctcattgtcaatgtttccctttagcttctcactgtgacgatggtattgctcaacactcttcagttgttttttggcttcaaagctcttcccgcctatgtgcaatatatggagcagtatcgccacactttgggcattttcggagcgttgggcgaaattgccattattttgtgagtttattttggccatccccttcactttctcttccccccccctattcaggtacattatgctgtcttcgcttgtcggcctttattctgtccctttgatccgtcgccttcagccacgtcgtgggcacacttcgatgactgccataatcactaattgtgtgatcattctcgtcctttcttccgctcttcccgtcctcgtcagaactttgggtgtgtattcactaccctccccaaattgtttcccttttttgggtatcacttcgtttgatctcctcggcaattacggccgaatccattggatctccaacttctctcttgtctgggggtacaaccttctcttcgccgccgcttccattttctgtttggccaacaaatttactcagcccgtccgtcgagaattgcttcgccggttttttctttgtttcttatttctcttctaatatattttaggttcactg

SEQ ID NO: 64797 - DNA, 324 bp, Heterodera glycines
aaaatgccttctccgtccgtctctcttctcagcatcgtcgcaattttctgtttgctgtgcaaatgttgcgtttcggcaccgcgtaattaattgcttttaattagctgtaattataaggaattgcttttctgcagatccgtgctgtcccggcagccaaaaagtggcttcgttgttggttaattacgttggtattttccgccatttctcttccaagtcatcgctttgttcggatgtcgacagtgttgcggggggattgaaaggccgtctgatcggcggcacgaacgggggacacgccactcccttggccgacatcgaatcacctct

SEQ ID NO: 64798 - DNA, 279 bp, Heterodera glycines
gtccgatcacttctccggacaacatttctcagctttgcactccgtcaaacccctcaccccctcagggcattttaagccttccggaatttgccaattcgtaaaatcaaacattctctcatcataatacattttctcataagctaccaattggacattatctccgcgttgcgaggcaatgagcacgatttcctggcaaaggcagccattgcggacgcaattcgagcagttcaaagtgatgaggacaaaatggaactaattgatttcattgcgtcagaagaa

SEQ ID NO: 64799 - DNA, 283 bp, Heterodera glycines
aaaggatatatacctcattatatgcgatgaaattcttgaaattgatgaagtcaaacgccacaagaaaccaatgcaatacaagttacgcgatgcaaaaggagagaagttcaatggatttttctatccggaagaattggcccccgtacgtagagatgctgaaacaacttacagaattgaacgcgtttttcggaaacggaaaatgcccgacggaacaatggaagtgctcgtgaaatttgtaggatacccagagagagaatggattcatgagactcaacttgtataa

SEQ ID NO: 64800 - DNA, 474 bp, Heterodera glycines
atggtggtcaaattcgatgttcagacggattcgcaaaaatttcggttaaacccagggtttctatcgaaaatttttcaaaatcaggacatcgggcccaaaaaatcagattttggagtcgaaaatcaggactttttgcaaaattgcttcaatggaggtagtccggcggtgccgacaggcgccgccggaaattttttttgatttgttaacagattttcaccaaaaaggccattttttaaattaaatccaatgccataaaatttcaaaattattgagtttttttttaagaaatcggaataatttcgtcgctaccccaaaatcagaacattcttataaataagaacaaatggaagccctggtttaaaggcgccagcttggactcactcatactggcgctaacgaaatcagatgattaaagtgaaaaaagggaagatttacgagtagtgaaaaagaaaaaaatttattttttgtgttaaa

SEQ ID NO: 64801 - DNA, 1690 bp, Heterodera glycines
atgtttccgtattttgttacgcctctcctactaattaccctaattattccaacatttgtcgtcgtaaattcaaagtcgtttggtaacatcagcgacaaatacaccattcatcctccaggcccctaccatattgttgttgttttctatgttgccggtaattttgagtattgtactgtagattgtttcatttcaatcatttaaaaataaaaaactacggtaattttaattcgtaaacattttattttaaattttttgttctgttccatttgcgcgaatttgtggatgttcccaaaaaaaaaaaaattttttttccacgtaattaagaaatccatccggctctaaacacataatccgagttggaatccgtaatttttaaataaaagtgtcatacttttgaactgacagtgaactgtaatgcagtagggacgtgtcaaaatgccaatttccgacatttttgggcacggaattccgatttttaatatttttttgaggttgtcggcacataccccagaattccgacttccgagttctgaatttttttttttttggcacggatttctgacttatcaaagcgagtttttagcacataaataatgttttggacttttagctgacaaaaaatgttttctgctttttagcaaatattttggcgatttttggcaaatataaatccgggctctggtggattaaacaaatttaattttttagatggccatcagaaagaatttccatttgcaactgatgagaacggcagaatcaaattgtcatttaatgagaaagtgttgaaaaaacgtgccaacattgacaaagaggacaaaaatcttcactcatacatagcatttttcgaacggtaggaccctagcaaaattagtacataccattcgaaagcctctgatgggataagcccaaaaaagggaactttttgagccggtttataactcgaaaaacagtgaaaaacatgggacaaatgagtcccagtgaaaatggaacccacttcagtaccaatgaaataattaatggaagcacaaaaaagggtgctgctgggtcgtttcgttaaaaatgccactatgcgcatttcatgcaagtgccaaacaaagaaatttttcgagaaaaaatcgacatacaaaaatttccacgtacatactatgtgtatgaaaagtctataaaataatatagaaatttaatcgttttaaaaatcccccccccccccccggtttaagtaaggagatccgagatgacggctccaccgtcaaaatagcggttcatttgcgcaacagtgcaaatgaggagcgacttttgcatcccttcgaaatgtttaagtataatgaagcacatgagactgaattggttcgaacatttggcaattatgcccttttcatgaaggaccgaaagtataatgagtgtcgattgcacgaagtgtttcaaatcatgtttgatcgtcttccattgctgacggtaatcatcattagggatgcaatttttagtttttttcactatttttttgctgttaactcccagtgacctgaaaagcacgaaaaacatggcttttttggtggttgttaagctagttttcgagttattagagcctattttctagttttttatttttagcacttcaaaaatttttgaaaaaaaaattcttttttttaacaattttggcgttttgccaaaaatttataacaaaaatgca

SEQ ID NO: 64802 - DNA, 2760 bp, Heterodera glycines
atgcaacagactttccgcaatgaaaattttccgcggatcagtcagagtcaaaaccgacaaaattgttacaattgtggtcgtttcgggcattttgcccgacaatgcaattaccctcggcaagttagaactgaaaatgctaacattggtactccagcgactggtgccaacaaaacatcagtcgaagtgcctaaagacacgtcacagccacaatacaacaaaccgctaccgttttcaagaaattatctccgtcaaaattttcttgttgaacaacaagaaaatcctccaccgacgtcacaaaattttttgattggaggaatttcaatgagtaatgatgaattggagaaactttttgaaagagacaaaagcgttgaagctgaaaatagtcgagcaaagttgttgaatgtctctgttggtaaaatcgtggtcattaaagtttctgtttgtgatttatcagccacggccatgttggacggaggagcacaagtttcacttgtgtcctttgcttttttctcgaaaattatgactgagaaaaacctcgataaaattcaactttgtccgacccggaaaagcactcaagttgttgacataaacgggaaaacagtagagtatgttggagtcgtgtcattgccaattgtcagaaaaaatactgaagtttggatcagatttcatgtgacaaaagcgtcatttggttatgaatttctttttggcaccaacgcattggctcgtttgaatttcaagctctatgatgggcaaaaccaagaaatgataagtttcacagaggttgacagtgaagaaaaaaactcggtacatgttatctatagaacaactttattaccgcaagccacgactttggttgaattggctagtccaatgaattttaaaggggaaaacgtggctgttttcccaaattcagaaaaagaaataaagattgagccaacactcacggtttccgaaaaaggaaaactgattgtaccaatcaccaatttttcctctcttccgataacattggaaaaggatacacatgtcggaaatatcgaattggttgaaaattttggcgaaacggaggacttttttctgtctccgttaattgcgtattgtcgtcaacaaaacgagccgagccttgctcaaatgagtgagcaaaatgcgaacaagttggacactatgagagaaatttgggtgccaaaaataaaaaatctgaaagagggccaaatccgaaatttggatgaattagtccgccaattcgaaaatatttttgccttatatatgaccatgagttaacgcaaacaagtttggtggagcataacatcgatacaggaagcgcagcgccagttaaaaatcgaatgagacccgtcccatatgcttatcgggaaaaagttgcggaaatgttgcgagattatttgggccgtggaatcattaaatcatccatttcgccatgggcgagtccaattgttttggtgccaaaacgcgacggaagtttgcgattttgcgttgattacaggggaattaatgcagtaacgaaaaaagatgcatttcctctgcccaatattgactatatcctaatggcgataggtggaaaaaagttcttttcaacactcgattttatgtctggatactggcaaattcgcatgagtgaagactcggttcaaaaaactgccttcacaactgaatttgggcttcacgaattcaccgttctaccatttggtttgtgtaatgctgtcgcaacatatcaacgattcatgacaagacttttcaacgaaatggttaatgatttcgttttcatttatgttgacgatattttggtggcgtctgagacttgggatgcacatctgaaacacttggagcaagtttttgagcgagtcgagcaggctgagttgaaattgaaaattgacaaatgtcgttttgctgccgaagaattaccctttttgggtcatatcctaacaacaaatgggataaaaatggacgcggataaaattcgtccaattcttgaacttccacttccttcctcaaaaaaacaattgcagtcatttcttggattcatgacatactaccgtaaattcatttacggatttggatctttggctgcgccactcttccatctcattaaagaaaatacaccttttgtaatgggcaaaaaagaacagaaaattgttaattttttgaaaagaaaagtgttagaagatgttgtgttgtattttccggactttaaagtagctgcggaaaatgcgttgaggcgatttatcattttgacggatgccagtaaatttggaatctcagcagttctctgccagcaggacgaacttaaaaatgttcgcccgatatactttgcttctcgccaatgcaataaatataagagtaaatactgtcctactgaactcgaagcactggcaatccgttttggaactcgaaaattttcacaattcattacgggtattccatgccgtgtgatcaccgatcataaagcattaattcccatgtttcgaagtaaaaaggaaacgggaaatgcaagagtcgatcgatggctgatggaagtgaacgctcgttaccaattatctgttgaatatcagccagggaagcagaacgtggttgctgaccttctatctcgagttggaaaacagtcagacacagaaaaaatggaaaatttgttagatgattgtccgtctgaggtagttgttatcaaaaaattgtctatcaaagaaattaagacaaatgctgacattgagaaactggaccgaaaagagtgggttgaacagaccaaaagca

SEQ ID NO: 64803 - DNA, 899 bp, Heterodera glycines
atggcaatctctggcattgcagcacagaagcagctgttacggttggccattgaatcggaggctcgtaaggataattaactaattcattcttttaccgtttccaactttcaatgaattttcgcctcggtgtattaaaatgtgaatgcctttctaagaattgggcaatttttgaaaattggaatcccaataaaataattccaccttcttttaatttttttatttattttaaatgcctttttaaattaatatcaaagtgctctttgcttttttcgtttttcttactaattgttttatatttttgttatttctcgcatttttcgcgctcattttgatatttccttggtgttggaatgaattattagtaatcaccgataatgaattggtcagcaatttatgagaaagacttccataaaatatatataaataataataaatgaaatgcattcgaatgcattaattaataaaatttcatttggatgctgctttaattaatcccatttttatttcttcaattttcccaggcatattatttttcccatttatttgcgcgtgtcgaatgacaattttcttctccgccgaatatgccattcattcagcaacgccaaaaaggacagaaaatgcacttttcggcaaaactcattcgttggaagtgccgagacgacggacaaaaagtggcaaagcaaagcaaaaatggtggaggcaattagccaaatcattgccgacgatttgctgcggaatcacaatttcgatcagtcccattaaaaggggaaaatgagaggaaatgataaatgcatgcatttttaaataataataattatttttatctgtaaatattgtgataaaattgataaaaatgaaaaagagagtttgatgagtaataattattcggtcggaataaa

SEQ ID NO: 64804 - DNA, 49 bp, Heterodera glycines; identical to SEQ ID NO: 51181

SEQ ID NO: 64805 - DNA, 473 bp, Heterodera glycines
atgacatggactgcttgccaccagcgtcatgcaacaagcgctcgcgcgtttgttgcgtgcaaccattggatcaggccccaccgcctgttggctgccccaagggtatgttgcctaattagctaattccaataagtggggggggcgaaggcccaccacgaggccgcgaagaggccgagtgagtaccttcggtgcaggaaaattattaaattttaaaaattttttaattgctttttaaatatgccaaaaaatgtaggcttaacttttttagtgaaaattcgatcactcatattttttgctaattgagcagaagcgtaccaaactttgcagggatactccccggtaaaggactaacttacactgaaatgagcgccgagctagctggctcaaaaaaattttcgaaaatctgagtctttcgtttttatttgttttttgcataattaattcataaatatttttttcagaaaatgctctga

SEQ ID NO: 64806 - DNA, 695 bp, Heterodera glycines
gatggcattgtgaaagatggactgaccgatgcttacgattcggtgcatatgggcaattgtgcggagaaaacggcgaaggaatgccaaataggacgggaggagcaggacaattacgccattcaaagttacaaaagggctgctcaagcatggcaggcgagaaaagaccgtgactcatttagaaacagcaatttcttatattgatagaatgggcaaattggacccgaaattgtaccagtggagataaaaacgcgcaaagggactttcaaaatggagcgggacgaggagtacagcaaagtggactttgacaaactgaaggcattgcgcacagtcttccagaaaggcgagggaaaaaaacaaaacacataagtaatcgttaaaatgtttttttttcttccacggcccctgacgcttaattccgatgcataagaagtgataaataaaaaataatccccggccacttctgaatttttaagaggaactgactaaaatttttctttaactttagagaatggcacagtgactgcgggaaatgcctccacgttaaacgatggcgcagccgccgtcttaatggccagcgaggaaaaagcggacgcacttggggtgaagccaatggccaaagtaatcgcctacggagacgcagccacacacccaatggactttccaatcgccccggcgcttgtcatccccaaggcact

SEQ ID NO: 64807 - DNA, 588 bp, Heterodera glycines
ttccctatagcctgtactttaattctgcgttggatttctgttccccataattgtttgagtaccccaaacggacacttgaaaaaatcgatttttttgttttcggggcagtccccccgaaccgatgcgcccagatttatggggagaccgaatccttcgggagtagcttccctatagcctgtactttaattctgcgttggatttttgctccccataattgtttgagtaccccaaacggacacttgaaaaaatcgatttttttgttttcggggcagtccccccgaaccgatgcgcccagatttatggggagaccgaatccttccggaatagcttccctatagcctgtactttaattctgcgttggatttttgctccccataattgtttgagtaccccaaacggacacttgaaaaaatcgatttttttgttttcggggcagtccccccgaaccgatgcgcccagatttatggggagaccgaatccttccggaatagcttccctatagcctgtactttaattctgcgttggatttttgctccccataattgtttgagtaccccaaacggacacttgaaaaaatcgatttttttg

SEQ ID NO: 64808 - DNA, 667 bp, Heterodera glycines
atgcgatatgctcggcaccatatcgagaatgccgaagatgtcggcgacgaacttttgcacggaccaaaagagttggcagaagtcgacgatacggagtgtgggattgcattctgtcgggtaatatccgtccgataatgatcagtcatcgtttaaaaaaaaattattgcgtccaaatattttcgttagtgccgtttaattggtaaaatagtgcgttggagatgaacattgcgattatgtaccgcaacgaccgcgagcagttcaacaagaatgcccgttaatgggcccagaagcacgcctgttactgttttccatttcttttatctttccgattcccatttttgttggttttttctcttatcatttttctcacaatttgcaatttttttttccaaaatttcaaccctttattgggtgcaactcgtccccttcccccctccgaaaaatttcgtaaaaaattataatagaaaaaaaaaatttttttttttgacacgaaaatctcaagaaaaaaattttcactgatttttggaaaaatttacgtatgtgtgcaccctattcttctcttttcagtaccttgactgctttatctttttgatttgctaaaaaattgatttatgtatttcagttattactgaaattcgatttaaagaaaccaaagttaacaacgtag

SEQ ID NO: 64809 - DNA, 458 bp, Heterodera glycines
attggactcttttgccgatttgctttcacatctttttgagctgatggaccaatttctggagggaagttcgtgtagcgaccttttggcggaagtcatccaagaatcactaaaaaattgtatacccttcctcttcccctttctgacagagtctaatgacaagtttaacaggtgttctcgtctgtgaaaactttggcgtttttcgcgacaatttggccgaattgcacggccaattgcaggaaaggctaaacgcactggcgaaaaaacatgaaattgcttcctctgttggcacaataaaactgagcacttgaaaagggataaaagaaggagatgaaagattttttgattccacgagctaatggctccccaaattaatgtgatatttgtgatacccatgatttcgcacaatatttccaattgcattgtcatagtttgtaaattcaattgttcctttgaattac

SEQ ID NO: 64810 - DNA, 2915 bp, Heterodera glycines
atgactccaacttctgaggaatgccatgtctgcccctccgaagccgctggcagcgacaacagtcgctcttctgcctctccgccggggcttcaacagcaaaagccaaagagtcgcgctgcgtctccccccgtggacactgcgaatccgccgctcaattcgccaccgtcctcacaaccgcttcactcccgactagcgtttaatggcacaacttcggccaaaatcaatgacacagcacgacattggaagcagtggaattcatcagaggaaatggcacttgcatttggcgagaataaaaaggcacaaatggcggcacgggcgatgttcgacctggtgcatcaatacggggacaaccttcgagaagttctgttccttttcagtagaccgcttcgaacaggcgcacattttacagtgtttagtccgtccttttccatttagggatggatgaatgtgttggattgtcttctttacatgctcaaagctaatcttctgccgtctcctcttgtccaattggaagattttgtggagctgtccggcttcgtttcgcttaaacattgcttcaaacgccgtccgactgcaccgaaaaaggaagagagcggactcctcagttggctcggacttacgggcagttcagccaccggcggcggagaatcggggcaaagccgaccacaaaacgagcaagagaaggagttgagcaaggctagaaacaatcacttagattaggtcgtttcataatcattgtcctattcggttagttgacaaactttcgaattgttacagctttctaaagcctaaaaagtacaaaaaataacaaaaacacgcgcaacaaacatctcatattctcaagcttaacaatgaagtttagatataacaatatttatggaacaacccaatatttgttgcacctttatttcatatcgagtcttccaaattccaatttcagttggctgctaatacagttgccgagtgtcaccctgagcaaattgtgctggacagtcgctatttggccagttcttcgctcactgagttagtcaattccatcatccattgttctttcaccgtggcacccattctctgcactttgcacggaccgacacatcatcaacaagataaccaacagcaacactcacaacacgaaagccaaggttggttgacaggtcgaaaataaacgtatgaaaagcgctggtgcgaacgaataagggaagacacaaaggggtccggcacaataccgacaggcactgccgaaaaatatatgacaattttgattatcttattgtgcggtggggtaacataatgtagcgtaccctttggaattatgtggaaagtgttagccattaagacgaggactccttcgtcgacttgtccaatgtcgctgtgccccctgccgaaatgcttcgccgcgcaccgacagacggcactgagcaacaaccgctgcttcgtcaggcggcgggttccacactttccattgagtcgacttctgacgaccgcacttcgccccaccactcgaacaacggccttcagcaaaatgggccatcggtggtgaaactgtcaccggaagaggaagaggcgatggtctttttgcttgaattgatggtgggtttcaacacttaattttttactgaaaaggtaataattccagacgaacattgtgctggagaatcgagacaggctggcccaagtgtggtctccggtgcgcgaccacctgcgcactttgctttcccacttcccacacaaccaacaactgatggagcgtgccgtcgtgtccattgtccgaattgccaatcggaatctcttccgtttaggacaacatttcacaccaactccaattgaaaaggggaaacaaacttcggaagcggtgatagcaccgaatttggcaagacaaaagcaatcgcagcaaatcattgccggacaaaacaaatgcgtggtgattgtggtggacccaatggacgacgacaaacagcacaagcaacaacggggcgacgtgacgaacaaaggcagggcatcgataataaacaaattgaaacgttaatttttgtttataaattggatttttatttcagattcactggtttccaatcagcagactgtccaggaccgcgccagcaattgtgccgacgaagtgctccatttcatgggctgtgaactgttggcacttcgaccacccgaattgtttctgttctcccgtcaaattgctttcggtctccatcagctcctccgcgcaaatgctgccaatttacacgcgagcgaacattgggaaatgtttttcatacttttggaatctgtcggcgcggccgcttaccgcgacgaaatcgacggggcagaaatggtcgaggtgtgtttcaggcgctattattagttgaaaaacaactgttcggctggttgatgcttacatatgttggctatccctttcagttgcccccaccgccccttcccaaaaactgttcttcggttttcaaacgtggcactatcgtactggcattcaatttatcccgacacgatccagccgcttttctaaaagtctgtgaaattttgacgtttttggcccgtgatgcggcgcatataacgccatcgaattttgcccaattcacgaggtgtcttcgaacaatggttgaagccagtctggatggaggaaagtgagttggcagttaaattcgtaaatcaaaaatctgctcattgtaagatgtgccccaatgaaacttccggcgactcctccgtctgctcaaatactaaccaacgacaatcactcgaagcaattttcagtgccaaataatgatcaaaatggaacgaataatgtcacagaacagcaacacataggggaaggagagcgggcggtgggggagcacgaaagactgtccaactgttacatggacgcatctttacaggtgaaagcgtggtctttcccaccgcgacaaattaaa

SEQ ID NO: 64811 - DNA, 691 bp, Heterodera glycines
tggcactgaaaattgcttcgagtgattgtcgttggttagtatttgagcagacggaggagtcgccggaagtttcattggggcacatcttacaatgagcagatttttgatttacgaatttaactgccaactcactttcctccatccagactggcttcaaccattgttcgaagacacctcgtgaattgggcaaaattcgatggcgttatatgcgccgcatcacgggccaaaaacgtcaaaatttcacagacttttagaaaagcggctggatcgtgtcgggataaattgaatgccagtacgatagtgccacgtttgaaaaccgaagaacagtttttgggaaggggcggtgggggcaactgaaagggatagccaacatatgtaagcatcaaccagccgaacagttgtttttcaactaataatagcgcctgaaacacacctcgaccatttctgccccgtcgatttcgtcgcggtaagcggccgcgccgacagattccaaaagtatgaaaaacatttcccaatgttcgctcgcgtgtaaattggcagcatttgcgcggaggagctgatggagaccgaaagcaatttgacgggagaacagaaacaattcgggtggtcgaagtgccaacagttcacagcccatgaaatggagcacttcgtcggcacaattgctggcgcggtcctggacagtctgctgatt

SEQ ID NO: 64812 - DNA, 228 bp, Heterodera glycines
aatgatgagtgggagcaaattgaagaactagttggggttttgaaatgtgctgaagaggcaacaaaaaggttcacggaggagccaatttcgtttgtccttcctcaagcaagatcactacacgatgagttgtacgaaatgaaaattgtcaacaggactgtggagacaatcagaacgacactttactatgcgtttgaacggcgcttttttgagctagcgaacaagaagtaa

SEQ ID NO: 64813 - DNA, 843 bp, Heterodera glycines
atgggtgttgtccacttcaaaattgtttgtgcttccgttttgatgggccccgactggtggctgaagacggcttttgaacaggtccaacaacgcacatgtgctgggttgtcactgtttgtttttaagatttacgccgatggcatttggaacatccgtttgcgagacctttacacgaacctggtgttcccaattgtgaatacactcacttttctgatcgcgtttccttacgttctcagcaattttctcctcttttttgtcggtaagcgatttaaatttttttcttttcccaaattttaatatcaaaatattttatcactattttattctgtgttttcagatgcttcacgcgaggaacaaatcattgtgatacgatttgcttatccgtttctgctcggctccatttgtttctgtgctttaatcacatggcaatggcaaaagctcaaacttttggcccagaaaattcgtaacgacaaggtgctttgttttgctactctaataatgaatattgggtagggtttttgtttgtttgttttgctgtttgtattttgatatttgttgtctcttcctctcttccccttgggcatttctgtaaggattgtgccgaactttcattctttcgtcaatttggacagcatttgttggttctaaattattttccatcaaacatttcagtatttaatcggcacacaattggtcaacttttatcgtgaaaacacttccgccattgtgggcaattcgacagtcaaaaaatcagtgacaccaatggaatcgattgtaaatcagcaacaacaaaagagccaagttgcgaatggagaacagccgggaaggaatgatgaattgtaa

SEQ ID NO: 64814 - DNA, 1437 bp, Heterodera glycines
atatctgccgtgtttgtcgattgtcggggaacgacgttttataccatccgtgcctttgtaactaattggcttttcaatttcaaaatttgttaattgacaatttaggcactggcagcataaagtacgtgcaccaggattgtctgctacagtggcttaagtacagcaagaaggatgtttgcgaattgtgcaaccacaaattctcttttcgtccactttatcggccggatatgcccgaaaggcttcccattttcgacttactcaggggttggcttgtgttttgcagttgccactttccatctttcattgtcaggcgtctttctcatattggccaacttcatgcggttggctctgacttatgcgatggtcgcttgctgttggctcggtctccactccaagtgcattttgttattatggcaattttcgtcccattttaggcattgtgccgttaatggcggctcgcatccatcggctcgtcttctctggccttatgaccgcttttttctcctcccgcattttccaactattctcaactgaaaatgtcgcaattgacatcgcccggggttctttagtcgtcactatttttctatgcacttttatttccctcgtttggcttcgtgaacaaataatggtacaattttgtggatttcaattcttaatgagtttttaacagattggaggacctgcccatcttttacatttgaacgaggaccaaccaattgttgagcatcaacaacaccaaagtgagaaaaatacccattcacataatttaatatcaaccgaatcttagaccaaccgcctgacaatgccgggcaaagtgcagaagcggatgcagaagaacatggggatggaaagaacgaaaatgcttacaatgggctaactcccactgaacaaatgagttcttttggtccgtccacttcggcggcaacttccgattcgactgatgctaatgatcaaacagaagctgaaaaccagcttgaccaacttccccaaaatcgccaactccgccctctccaattctaccaacctgttcaagctgcgcttgtggccaaccaaaatcaaccggccgaccaaggccaacaagcgcacaatggcggagacgcggcggcagccgaaattgacccgcagcagcaacgttttgtggatgagctcacatggcaaaaacttttgggtttggacggctcttttgcttttattgagcacgtgttttggacaatttcactcaacattgtgttcaacatcgttttccgttggtccaattaattgccaatttgtcgatgaccctcagtttagtgtacttccctgctcaaattggttctggaattctgtctaccatcggctttgggtctggaaagattgcatttttcgaacttcctatttcgattttgactggtttggtcgccatttttattcatggcctcgtcatccatcgaatctcta

SEQ ID NO: 64815 - DNA, 368 bp, Heterodera glycines
ctggtgaactgcaaaaagcgcccattttggacgaagaagcatgccgacagaatgtggacaggtgaggcccaaaacaatgtttgactcgatcagcaatcagaccaagtttcctgaattaatcactgatcagaagtcagtgatcagacattcttcaacgacttcctagatcagcgattagagttaatcactcatttccttctttaccattcaaaaaataataatttgatcagtgattagcgattattttcttcaaacggaaacgatctttctcttttccgaacatcccaatgatcggatttatataaaaatattattaaaaatcatttaaagtgcattttattttcagtggaacctgccagaactatgtg

SEQ ID NO: 64816 - DNA, 165 bp, Heterodera glycines
caacggtccatccagcagaacacctcgcgattgaacttgcagaaaaggcgtgggaatgactaaaaaaggggcagggaacaaaatggtgatgatgtttggaaactggacgaatgaatgaatctgccaccttttgcattgaagactccaccattgtttggaagccga

SEQ ID NO: 64817 - DNA, 1333 bp, Heterodera glycines; identical to SEQ ID NO: 35216
  unsure (1)..(1333): unsure at all n locations

SEQ ID NO: 64818 - DNA, 150 bp, Heterodera glycines
atgcccctatgtgtacaacgactgcgatcttggggacaaatatgggagcctcgagaaagtgatgacgcgcaaattggccagaacagcgtaccgacagaaacagataatctgccaagcggatgtcacaatgatagaaaccgaagaaagctg

SEQ ID NO: 64819 - DNA, 66 bp, Heterodera glycines; identical to SEQ ID NO: 53774

SEQ ID NO: 64820 - DNA, 2107 bp, Heterodera glycines
atggctcttgcacaaaaattttctatgaattttggaaaattggccgaaaatttacaatcgcaaatcgactatgctttacacgatagaagtggttttaaaagtgatttggacactgacagttcgctgtattcccctgtaagagtaatgcttggtttttctataccgcgtctggttggctcgataagagttcggctttttggtcgaattctttgggttttggtctcgatttgcgagaaacgagacagaactttttacataataataaatatttttgttaaattaaaaaaaaattgttttaaataaaagtgtaaaattttaacaagtttttgcatttttggggatagttaagtggtttgattttaggtttatgtcaaaatttttaaaaatttccattccaaaatctttcgttggcgtgagacggaatgatgtacatttcacttaattattgaataaatctcattccaaaaactttaaaaatctcaatttaatgtttaaaaaaaagcccgtgtgaaaaaggtgaaaagtgaaattgcccaaaaaattactaaagggttcacagcacttattcaaattcaaaaattttgaatttgaaaaattaataaaataaaaaatttttgcgtttttgtaaatatatgataataattagggttgtaaattatatggactaaaaaacgcgaaatatggacattaaatatggactaaaaaagcccgaaatatggactaaaaaggccaaaaatggccaaatatggaccaaaatatggataaaaaatgccaaaatatatgttgtaaacccccaaaaatcccaaaaaaggtgtgcatatttaatatttgcttaaataaacctaaaaagtacaataaacaaccaaaaaatggggtttaaaacttaaaaatgcatattttttattgttgttcgttgtatcaaaaacacctccaagtttgccaaatttcgaaaaaattctcattaaaaaaaaagaaatgttcgcaaaaaaatgacgaaaatatttattgaaaatgccaaaatgacgacgaaaactcaaatttttcgtgttttgtggggtgtaatttttaaaaatttccaaaaagttgatctttaggggtgtatttttcgtttttttttcatttttcttgtgaaaatttccaaaaaatggccaaaatatggactaaaaacccaaaaatggcgaaatatggatttattcccgaaaacccccaaaatatggatttatatggactaaaaaccttcaccaaatcaaaaaattttaacgcagaaatgctatttttaagcccctttcttcatagcatatgcgcagaaaaaatatgttaatccatataatttacaaccctaatgataaagcataaatattagcccggcaatagtattgttaaaattcgaaatctctgacaacttaacggacgggcacgactgggccccgccaactgggccccaaccaactgggccccggattaactgggccccaccaactgggccccaagagacagtaatttttccaccattattgtataatattatttatatatttttcattacatacacatatgtatgtgtgtttcgtttacaataatctaatttgtgtttatatttttttcgttcagtgcctaactacaataactttccttcagctattttttaaatttaactatcatttcatggcaaataatatattatcgcagaataaccacaaaaaaattgagcatgaaggtcatctttatgttttcgccaaactcagtgcggatggttttatcaaatttttgaggtgtgagaacaaaaacaataaggacatgaagtgccgagggcgtctgcacaccaatttgaatgacgtagtgttgaaacaagtcaatgagcatgtctgtggagcaaaccctgcgcgagtggaagcacagcgcgtcgttacaggttaggttatatcaaatgctgaagattttgaatgcatatttgacaattttaggaataaaatgtagagccattgaaaccgccgagccgccatctacacttcgctcaattgcactccaaaatgtgggaacccctgtgttgtctgaagtcccaacaaaaaatgcaacaaaacaagttgtgttaatttctctgcgatga

SEQ ID NO: 64821 - DNA, 1442 bp, Heterodera glycines
attcaaaaaatgaattcttcgaaccccataaaattggccgaagacaaaagcgggtcaatgtccgtgaaatatttcaagacgcatttcaacgaattcggcagcatggcacccaaatcgcatgcgttttttatgtgtttgtcgcgcttatggcactttttggagtgatttgtacgattgcccgcttggctttatttaatccggcagattatttggcatggcttctgatgctctggcttttttatgtctttgggcactacatcaacgcattcatcaaagaatgcaccggctgccttcgcaacaataataaccaaattcactcaatagaattggcagagaatggtcccgctgctgctggtgctaatgagcaatgaattaatgcccattagggaaaggaaacggacaattgtttgatactgtattcaacttaaattgtagttatctgattcataacgttgtattttcatagggaaaacataccaattgtcctccaagtatttatagttaacaaaatatattggacaaatttcagggaataatatagtcttacactgtatgggtaataaaatgtaaattcgaaattttaacttgataaacatgaacataaaatttctctcaccgatttcatgccgaatttattcgaacgtctttcaaaaatgaatttgcattcattcgtcagtttcattaaaaactcgagactgaaaaggccagaaatatataaaataattaattaaatttaaaggtccatcggtggaggttggaggggcgatgctcacattgtggcaaatcttttcagcaaaagatgttcagagaaaaggcatgacattttcttattttttcgaattacattattttccattttgtcatttttggtcgtccttattaattaattaattaattatttgcctaaatgtttttattttttaaaccgtttgctgcaggaagtgatcgcgatcacctgctcctggtgcaagcgctcctaccacaacaagcggcactgcttctcgctggcacgcttcgacgaccgctgcgaccggggcgtgctgcgcgagctgatccttcccccgggatggctgcttcggctggccgctccgcggcggcggagtgccaacccatcgaccggctcaagaagtaattggcatataaaattcaattttataaaatcaatgcctttttcagtgttggcatacgctgacgcggcggcacagaaacggtcccgacggcgcagcaaataccgtgcgtttgtggttaagccgccgcccgcctcgcgctgttcgtccgcgcaggcgcacggcgtcgccaacgggtacagccgctgggcaaccgcggcccaactgcagccgctgcccatccaaccgctgctggtgttcgtcaacccgaaaagtggcggcaacaaaggagccaaggcgttgaacacgctgtgctggttgttgaacccgcggcag

SEQ ID NO: 64822 - DNA, 490 bp, Heterodera glycines
atggaccatgaattggcaatgcacggatggcaagagtgcgttgcgcggatgaacaacatttgcccgggccaaatcgtcgaattcacgcggctgaaagtgcgcgaacaagggcgaaatggaaacgtgaaggggagtttccccttcacgttgctgtacaacggcgagtcgcgccaccgtgtgctcggacaggcgcctgcggcagtgacaaatgcgggtgagtaaaagggttgctatttttttggggagggttttttgactcaaaaaatccaattttctgtcccttttccagtgtgttctccgaatttcaacacgcccatcattgttgaagcaaatgatcagcaccaacacagcagcaacggcacaatcattggcggcggcgaccggggcggaaacgatttgaacaaccccaacaacaacaatgatagcgtcatcaatgacgcactgtcggcacaacttaccaatcgctcggaccaagtgaacacgagcgttg

SEQ ID NO: 64823 - DNA, 132 bp, Heterodera glycines
  unsure (1)..(132): unsure at all n locations
atgatattcttttatcggtcatattaccgtattattggtagcttcttcattggcagaattgctttgttcagcatacgaaatattctgatccacttgttcattancactctttttcaaatggttcttcgttta

SEQ ID NO: 64824 - DNA, 1658 bp, Heterodera glycines
atggagattttaaacgaatttaatttgatgaaaaaggaattgcgaaaagaaagtgtttataaaaatttgtcccattctcaattggaatgtgaaattgcaaaaaagttgggaattagtcgaaagaaaatttataaatggaagaacgaatttggtaagaaaacaatggcatatttgaattttactaattgtctcattttaaggtttattaagggaattttcaaatcagcaaaaaatagtaaaagttaaacaatttgaaaaagtgaaaaaagaatttacaaaaaaattcaattcaaaaacgaattggaaaattaatgggaaaatagctgaaaaaattggtgttaaatttaatacaattcgtgtttggaagagaaacttaaacttgacaactcgtaaatttgtttaattttatacttttatttaattataaataatgaaaattaatttaaaaatttgattttttgataaggaaagaccaaaatttacacggatgctgataaattggaatatgtgaaaagaattgaagaaatgacagaaagaaacccaatgatgaagaagaagaaaattgccgaaaaattaggcattccaattggcaacttaagccgatggacgaagaaattcggcaccaaggcagaaggtttagccactagaccacatttgaatttgaataactgctttaaattaaataaataatttacagacccccattcttaccagtgcttatttagtcccgccgggaccgggctttctttttttcaaaaaccgggaccgggcctgaaaaaaccgggaattcccgtctcggtcccgctcagctcaaatttttctgttatttaaatttaaacaaaatttaaaaagacatcaagctttcgtttcataaacatataattcttttaaatggtaattggggatgtcaattttatgtaaaatacatattttttcttggcttctccatgctctaaatagtaggaaaaacactttattttctgtgtttgcaacaaaaatcgggacttttatttacatattttggggttttatacatatttcgagattttatacatatttggtacatattttggtttttttttacatatttatatacatattttgactactttttgtacatatttttgacatccctactggtgggtgagctatttctaaaaatcagtaaagtcgatccatggcccttttagtacaggataattgagcttcggtacaagtgcgctggtttatagcttaatttgctaaattcattgtttttttgaaattttgaaaaatttcaaaaatctcattttaacaattaatttggtcccatttaagcgaaaaggacattttacacagctgctgagaaattggaatatgtgaaaagaagtgaggaaatgacagaaagaaacccaatgatgaagaagaagaaaattgccgaaaaattaggcattccaattcgcaacataagacgatggacgaagaaattcggcaccaaatcgattcattagcattggtgaaagataattttatcctctggacacttggctcaacttcactatgtagagaaaagcatatactatttatttataatgcctttttctaccaaaaaatattaatttttaatgaaaaatttcatttcttgagccttggagctttttatcagaacaaaatgagca

SEQ ID NO: 64825 - DNA, 1092 bp, Heterodera glycines
atgggaatggtcaacagtttcaaagaggtgtgtggccatatttccgtaaaatattttgcttaattgccatttgctttttgtttcacattgtttaggcatttcttcgtgccaccactcctgtcggctacacatttcgacttgaactttatgattcaacggaaattgtcacgccatttgaagtgatgaacgaacggaccaacgaaatgctgacatttgagaaagaaggaaacgatgaaattgtggatgaagatagtcaatttactgatgctgtttggctgttgaagcgatgcccaattggggggacggcgacgattcagtgggaggacagaaagtcggacaaattgaacaaagtcgatattcgtctttatggaaattgcattgggtgcgtggcaaccgtgtcccggcatttgcgtttttgtccaaaaatcgggttcaaaattaagtttttttcaatccctgcttgctgatcgcctaaaacaagcgatacaaagtgatcgtatctgatcatttgatcgtcaatgaatttatgatattaaaattttcaaagagcagagttaatgctctctaataagtgagaagactgtgttttaattttaatgatctttagatcagggatgaaaaaaaaaaattaaatttgattccgatttttttgacaaaggcgcaaatgtcggggttccgtggcaacggcatttttgtttcgtttaaagtcattcaaatttcacttaatattcaggccattgtctccactaaaggcgggccaaatgaacgcaaaaaatcatccgaaaatgaatcccgagcccagcggacagcagaagaaaaagtgaaagaattattaggaaatgacaaatgattgatcataggaatggaaattgatctgataatttttccttatatttatttgttgcttctttcatttgaatacatttaggtaatttgtctggatttttggaacttttacgcagaaaatcttttttgtctttagaaattcattgtctaatgttctattttttgtgctttacttttgcctaatttttcaggacttttttgcatttcttacgtacgttttttgacgattttttatgactttaaaaa

SEQ ID NO: 64826 - DNA, 77 bp, Heterodera glycines
tccaagtgggggaaattgaacccaggcgaaaaattatgaaaggtagaaagtttaaccactacaccacatgtgcatgt

SEQ ID NO: 64827 - DNA, 1034 bp, Heterodera glycines
attcccttcacagcgacaacaacaacaaacaatcagcaacgacgacaattgcgcaacgcttcaacacagcacatccatcgcccgtgcacacgttgactccgatcacttctgctgctgctgctgctctccaatcaacacaatgggcttcctcttctacatgttcgtggctgcggttgcgttcggcggtggagcggtgggtttgggggtggggggaattcgcgttgttgctgctttttctgaatccaatcaaatttgtatccattccaaaatgtattgtttgtccttaaaacaatggacaaaatttctcgggattgagctttcaagcagggtaaattcgagactcataaaagcacggaaaatgcatttggcttatttatgtgttttttgctggtgtgagacgaaaccaaattttagaatccaaaaattgattttgaggcttttcagaagtgccattaacatatacaacgttcagtttgaccaatttcggacccgaaaacccaaaatttcattgttccatgactagtaaaatggtttagttggcccgcttttgcctccgttcgtgttcattttgtgtctaatttgttcccattttcttttcagtactgtggcatgatttacaccgccaaacgggccagggcatcggcgggcggcggctccaagaaggacaagaagcagaaagcgtcgaagagctccagcggtgaacaatgatcgactcgaggacggcccccgcggatgaacgaacgatggaattcgagcaacaaacgcttctccccttctaactgctgctgatcccccaatatgacgctgtttcccccctccccccaaattatatcatttgtatgtgctttatcaccctctgatctgttgtccgtgataagctttatgcgctgtccatatcagtgatcaaatcgttgtaattgttgtaatgatatatgtatgtatgtcctatatattgtatttgtatgtgctccaatgcaacacccaatcattatgtgtacataatatatgttgtatgaatgtattcggacaataaa

SEQ ID NO: 64828 - DNA, 470 bp, Heterodera glycines
  unsure (1)..(470): unsure at all n locations
atgggaatntaagtcaaatgacttttttttttgctgactctaaatgaccttaaaatgacttcaaaagtgttctacactttgtttgaagcttctaacatacattttttatgactttttcgtgactttttggcgatttttcatgactttttatattaatgaatgatgatcaagcgaaaaaattaaatttttgtgccgtcgatggataatggattggaaacaaaaattaaaatttggcatttcaggtgcgtccaagctcatcacgacatgcgaatgtttgacggacataaggtgatcagtatctgtagttaattttttgagtaattatgcgattgaggcttttttcaaatttcataattgaaaaattggaggtgtccatttttagagtataaatcccaattttttaactgtcgcgagtctcttcagccaattttagcgcccttattgagacaaactaaagataaaaaaataaa

SEQ ID NO: 64829 - DNA, 620 bp, Heterodera glycines
atggtcagctgttggcattgcattggttctgtgcgcattgtattccttctgttatatgatcatcgccttacaaaatgccttaagggctcaattgtttgaattttgaaatgaattactattattttttaaattattatcaaattctcaggccaattgcttgtacaacgaccgctccgcttggcagtgcggtgaacgcattggcaaagacgaactttgcgttggaatctatcgccatttttatttacattttcatttggttgcacatgaacaaaatggacaaaaaatcgcgaaaagagaatgggaatagcacaggcaagaaaaaagaaaggaaaggaggaaatgaattagttgtcaatcaattgttaattgcccatttaattatgtcatttgttaattgtctccacaatttttgccacctaattccaaatttagtggatgttcgccgtctgttcaagtcgctgttctccattttgctggtcgatttcgtcggttggtccaccaattccatctcgattactcttctcggtttgatcggcttttcgtccgcttctcccaaaacgaccgatcgcattatttacttttttatcacaagttccctaaactatatgacgtacattaaa

SEQ ID NO: 64830 - DNA, 219 bp, Heterodera glycines
tataaaaataaaagtgattttgggattccagaccaaaggggggtgacaggatttttgagtggaaaaattttttcccaaaaaactttcaaaaacatgtcattagggctattttatgacgctgatcacgaatacgtgatcagattttacttttaacatcgataagacctcagaatccctgtgtgattggggattctgagcatcattttgagggggaggggg

SEQ ID NO: 64831 - DNA, 381 bp, Heterodera glycines
atgcagaccagatacgccagctctgtccgtttccacctcatcggtttcacgtcctctttaactctctcttcaaagtgctttgcaactttccctcacggtacttgttcgctatcggactcgtggccgtatttagtcttagatgaagtttaccacctgatttgggctgcgatcccaaacaacccgactccaagacacgtaaagatggataggcaccgccagttggacaggtcttgcaccttctctggagccccggtcaagggaaacttgaacaagcgggccaacccaagctcacggtctatacgctacacctcgcaacccagaggagctgcgattcagcgctggactcttcccagttcactcgccgttactacgggaatcctc

SEQ ID NO: 64832 - DNA, 352 bp, Heterodera glycines; identical to SEQ ID NO: 55331

SEQ ID NO: 64833 - DNA, 662 bp, Heterodera glycines
  unsure (1)..(662): unsure at all n locations
cgaaaacaaaaaaaatcgattttttcaagtgtccgtttggggtactcaaacaaatatggggagcaaaaatccaacgcagaattaaagtacaggctatagggaagctattcccgaaggattcggtctccccataaatctgggcgcatcggttcggggggactgcnccgaaaacaaaaataaatcgattttttcaagtgtccgtttggggtactcaaacaattatggggagcaaaaatccaacgcagaattaaagtacaggctatagtgaagctattccggaaggattcggtctccccataaatctgggcgcatcggttcagggggactgccccgaaaacccaaaaaaaaattttttggataaaaattatttaaatgaactgactagataatatttaaaataggttatttctcttcctttcagtatccctgcaaagtttggtgcgcttctgatcagtttctgaaaaaaaagttaagcctaaactttttggcctgtttaaaaaggaattaaaaatttttaaaaattttattcatctccctttttgatagaaaaagcatcagagtgcctaaactaacatgtaaataaaatttggtgcgtttcagaaccctttctgaaaaaatatttaagaattaattttgcaaaaaataaataaaaacgaaagact

SEQ ID NO: 64834 - DNA, 95 bp, Heterodera glycines
atggaaatttttgatgaatatattattgttgatgaaaaatcactttcaattaacattggctcaaagttcaatgaagtgactcaattcgctgcaat

SEQ ID NO: 64835 - DNA, 907 bp, Heterodera glycines
atgaactcttgggtgtcgtacacttccttggatcggtgcagcaaggcgaaggaacatcaaaagaggcaaaggactacgttaaaaaattggagaacaacatcgagcacatggccaaattccactacgttaaaagtcaagtcgaaattcaccattacggatttgccgagcacgcctgaggcattgttggctgggattttccaacactgcatcgacgaagcaattgttgaaagccgtgagcgaaacatcgaacctacacacctcggctgtatgatcagcagtcctctgctggaaggcggcgacatcccaatcccgatacgacaaatgacaaacaacactctcgacaccattctcaaccagttcaaaaaagtggcgcagtccaaacaacagaaaaatgtatcgttatggggtgagccgtttaccgtcaccatcacgactctggaccgtaatggactaccatccaaacgtcgtgtcaaagggggagctcgtcgccctgtcaaaacggccgttcaccaccgaattaatgaccaatgcctgattaaaattcgcaataacgacaaccacttctgccttttctacgcgctgcaggcaacaatggtcgccaaaacgtgcaattggcctcgctggaagttttcccgttacttgaacaaccaatacggacaacagggacaactttatcatgatgcggttgagctcatgcagcaggttaatgcaccaatggatttggttggctacgacgcggacacatttgtgcctcatgtcgttgactactggaacaacgcgcagcgacaacaccgctttgctgtgttcatctttggatcgttgggacagtataaaccgatctacaagtacattgacaccacctacgacacacctttgatgctatattttaatgaggaccatttcgatg

SEQ ID NO: 64836 - DNA, 56 bp, Heterodera glycines
gctatagggaagctactccggaaggattcggtctccccataaatctgggcgcatcg

SEQ ID NO: 64837 - DNA, 770 bp, Heterodera glycines
ttgaattgccaaactccgaatcgaaatttcatcttttaccttttcaagttcctcggcatggcgtatcatttcatttgtgtctacgctttttgtcaaatcgtttacgctcacttttcttgctgaatgggtcagttgcgtttcccattttccaacatttttatcaattcaatttttagggcgaccgttctcagctgaccacaattgttttgggcgcaagagaggacgttgtcggttggtattttcaaccaattccctaaatttctgcttttaaggcgttattttgggtggaatcattggccatatgatttgcactggcatcgctgtgctcggcggccgtttgttggcacaacgaatttcggtacgcacaggttcggcatttttgtattaccattttattttttcaaccattgtaatcatcgatggacaaggggggagatcaatttcgtaaatcgtacggaggtctgaggaaatttcgtaaaattttcaaccaaaatcgaaaaagcactggtaaatgggaaaattttttgaaaattgggaaaaaaccaacaaattttgtgacggttttgaattacgtttcgttaaaatttttaccaaattgggggaaaaaccgaattttgtgctaaaacccgaaatttttacgcttttgagtctattcgatcttttcctattccgtaaatttttacgaattggattccgttttcctatttcgtgaatctttttttttacgaagttgggtctcacttacattgttttagtggaaaattactagt

SEQ ID NO: 64838 - DNA, 345 bp, Heterodera glycines
atgttggccgaagcgatcagcatcaagatggaacatgccgccgcaacccaaacgtgcggatttgagaactcggtggagcattgcgaacaaaacaaaagtgtaagtatcaaattaaatggaccgatcgggagagggggggggcggggagcaacagatgtgatgaaaaatagaaaaatcatgtacaaaaattattaattaaaaaatgaagattgtttatgcggtcatcgacgaaatggacgacgaagacgtggatgaagccatggcgccaccaccaccccaatcatcatcatcgcataagggcacttgcagtgtagcgacgcagacaaagatgagttattgaataaa

SEQ ID NO: 64839 - DNA, 271 bp, Heterodera glycines
atgagcattacagtacctctgtccacttccgataagccgtttggcaccgaagtggacaataacttccgcttttttgatggtgaattatcaggtagcggtgatgatgatgatgataatgatgatgatgatgaaattgttcgttttaatgatgcgagggcagtttgcacaactgcaacctcaacattgccgtggcgcagaatccgatcggccatgacgtcgtgcacattttcttgttgcttcaacaaatcgaacgattcacggagaacggctg

SEQ ID NO: 64840 - DNA, 380 bp, Heterodera glycines
atgaagaaatccgttaccgtcgctgttcccgaacaaaaagaaatcaatcaaccaaacgcggaagtggagccaccaaaatcagacactacaaagaagcgcaaggtggaggaccgggaactgtggaaattggcaaaagggaaattcatgctcgcgacgtacttatgcgcaggttaaattggaatattaaatttaaattttattaatttaataaaatttatttagacgactgggaccgactgttccataatcaacagaaagtcgcgcgcttggaagatggccgttttgcggtgagctttgagctctgtgaagaatgcgcgtgggccaattgtcgcgcaaccgatctcattgcgcctatgaagaaaaagcctaacaatgcatga

SEQ ID NO: 64841 - DNA, 1841 bp, Heterodera glycines
atggtgcttcccaatggaaaaacagcgggacaggtgcgggagcgagacggcaagaggatggagtacatcagaagatattgcaatcgcgtggatgtgtactgggaatgtcgaatttcggaaatgctggcccggagcaaagcaatgcggaaatgctttgccaattacgtggacgacggtccgttggtgataagggatgcgtttatgggaggacggactggaccgatgaaattgctgcgcagggctggaccgggagagaagatctcctactacgacttcacatccctttacccatacgtgaagtgagttttttattaaatttacagataaataatctttattttagcttcacaacccgataccccattggacacccgaaagtacatgtgctgaaccaacaagtggactggagcagtgcggtggacaacccatatcccttggcactgctgaaggtctgggttgtgcctccccgtcgcatcgatgtcccggtgttgccggtgaaagtggacgacagattgtgcttcccattgtgcatcagttgtgcaaaggagtacccgactgggggagtgaacaacgactacctctgcgagcacactgaccagcaaaggggatgggtcagcacatgcacatcaattgagctgaatgcggctttggatgagggctaccgcgtcacgaaggtgttccgcgtgttggagtacgagcaaagcgacgaccaacttttccgcccatacatcgcggaatttatggcgcaaaagatccaagccagcgggtttgatagcatgatcaaaggaaatgccgctatggaggagcagtttgtacgagagtgcgaggaaatgtttggtataaatgtggacccaaccaaaatggtggttaacaaaggaaagcggtccttggccaagttgtgcctaaacaatttatgtaagcatttttttatttttagttatctttaaaaatttttaatttaggggggcgcttttcactacgaaactacgggctgtcgcagactctgattacggacaacccagttatattagcagagtacctggacaacaaatcgattgaagtttcgtcaattgatcagctggatggggagcatattctcatcacatatctacacaagaaggactgggtggatgagcacgcttgctcaaatattggtgagaaattttctttaaatattgcttaatcaaaaattacagtaatttctttgtggaccacttccgctgcgcggattgttttgctaaaggcaatgcaaaaggtggtcaggtcagagcgatgtgagctactgtacacaggtaaatgaacaaaaatcttcgtacaataatttttgaaaaattacagacaccgacagtctgatcctcgtccatccggaggaatgttgcccactcaaaactggtccacatttgggtcagttcacggatgagtaccccgatcacgacatcgtggagtactgcagcggagggtcaaaacaagtaaaatttgtaaaattacattttacaaattactgttatttgtttaagtacggtttatgtctgcggaggaaagaggcgggacccgatgctgagtcggagtacgtgctaaaagtccgggggatgacgctcaattacgacgtcgtcaacaaccagggactgcgctatgaacgattcaaagaggaagtgatcaattatgcaacaagaggagattatgaaccgattatcgtcacatatccaaactttctccggccaaacatcagggagggcggtcgggttgtctctatgcctatgcaaaagtgctatcgaccatttgtgggcaagggaattgttggtcctaattttaatgttttgaattttggtcacactttataa

SEQ ID NO: 64842 - DNA, 57 bp, Heterodera glycines
gctatagggaagctattcccgaaggattcggtctccccataaatctgggcgcatcgg

SEQ ID NO: 64843 - DNA, 549 bp, Heterodera glycines
atgccgactgcgaaagttgtcatatcgcaagatggaaggaaactcgtgccattcttcacatcagcatatccattttccaatcacttctcctgccgatttgtcattgatggactcgaattttcgtccagtgagcaaatgtacatgtgggccaaagcgagcgttttcggagacgaagaagcggcatctgcaattctgcggacgtcaaatccgaaggaatgcaaacgcattggatcgcgaattcggttgttcaacaccactgcttggagacgaataagcatattcgtcatgacctgtgctaactggcataagtataagcaaaatgaagacctgatgcgccatctcttcaattttggtcccgatgctgaatttgttgaatgtacagcaaatgacgtgtactggggtgcaggagtggcgctttcggatgttgaaaaaatccgcgacataaaccgatggcctggtaaaaatatccttggacggattctctcagccttgatgaagaaattcctgcgtaagaaatctggtgaaatgaacacaaaaaaaaaataaaaa

SEQ ID NO: 64844 - DNA, 62 bp, Heterodera glycines
atggatggcccgtgggtgatgaagcagggaaatgggcaagaaaaagagaagcaaggcgactg

SEQ ID NO: 64845 - DNA, 61 bp, Heterodera glycines
gtcacagagtctgcgcgttccattcaaattcctccccttttggcttttttcgccgcttaat

SEQ ID NO: 64846 - DNA, 989 bp, Heterodera glycines
  unsure (1)..(989): unsure at all n locations
atgacgacaaatggacggggacggagtgaccaaggncaacagcagaagcaatgccaaaatacngaagcattgggcgatcagccgcagaaaagggacggcacgnccgaaggaggcggaaagggcgcaatttgtgggggagggacgggaggcaatcttttgtaagagagaggggagagataattaacaaaatagcgttacatcaatttagggacattttgaatctgttgagcaaaagagcggaagcggcagcatcaaaggaaaaagggcaaaaggaggagggagagacaaggggaggacgagagacggaagaggagaaaaagactgtgaagagaaagtgcaatgtcaaaagagagtcagatgaacagcagccacaagggagacagtggacggaagacggacagagaaaggaaatagtggaaggaagagaagaagaggacgaaactgcgatggacgaaggacaaacacagacacatttgaaccattcagtggaacacattctgaaggacggggaagagaaagaggaggaagagttggcgaagaagagagcaaagacggaagagaagacggaagggaaaacggaagagaagacgcaagagagagaaacggaagagagagaaacgaaagggatggaggagagagagaaggaagagacggaagaaatgcaagtggaagatggatatcactgtgccaacagagaagaaagtgccgacttccgactggatcaaatggacagatttgcccttttccttggcacggcttttcctccagcggcgttgagacatttaatgaaggaaaatccattttttcgcaaattttgttcatcgttgcgcgcagataatgcacttacatttgaaagtgtaaacaaagtcagttttgagttcctaagtttttacaataaatttcaatttcagttaatggacactcattttgctcgaatgaaagacaaaatccggcgaaaattggcacatattcaaagttcagttctgctg

SEQ ID NO: 64847 - DNA, 190 bp, Heterodera glycines
aaatagtgacaaaacgccaaaatagtgatttttaactattttagtgacgaaatcgccaaaatagtgatttttagctattttagtgacgaaatcgccaaaatagtgatttctagtgacgaaaagtgacgtccaaatgaaaaaattttaacgcagaaatgcgttttttgagctcctttcttcaaaacaattg

SEQ ID NO: 64848 - DNA, 316 bp, Heterodera glycines
ttgggacacggccaaagaccgtgccaatttgtacatgttatggaatttctgcccggcggcgaactgttcgcctattttcgagcattgcgcaagttctccagcactgtggtcaaattttactcagcagagatcattttggcacttgagtatcttcattccaaacaaattgtaacatcgtggcaaaacggaaatatttaatcgacaaataattcaaattttaggcttatcgcgacctaaaaccggaaaatctgatggttagcatccacggacacatcaaactgacggattttggctttgcaaaagtcatccagaacaa

SEQ ID NO: 64849 - DNA, 450 bp, Heterodera glycines
atgccattgtatgtgttgtgcaacagtttctattcggtgcaacaaaggtgtgacgttctgtgcacaccagatggcataatgctagttaatttggccgaaaattcattttataagcaggattcagtgttagtgaattattattattattaaacttattactaaattaagatttaatttgataatttttaaatttcagtgtcatgagaatgggtgacaaaatgatgcgtaatgtcgtgcagccacttgcccgtttaaaactgatcaatgaagaatttgtacttattcgggcgatcatttactcacatatgggtctgcaatggcaaaattttaaaaaaatcaataaattttaatgagttcatttaattttgctttaagtttcgaaccgaatcgtttgagtgcaaagagagagtttaattttttgtaacttttcttttaaataaccaaattaaa

SEQ ID NO: 64850 - DNA, 1042 bp, Heterodera glycines
atgtctcgtggacaccggttcaagtgtcacggtggcgtcaagggcgctgatcgacattcttggctgcaaaacggtaccatcgcatgaggacgcaatcagcgcaagtggtcacataatttcatttcgtgaaaaagcaaaggtaatgctaaaagtggcagacatttgtgtcccaattactatttattttgtaaatgaacaaaaatccgtctgcaaccgagactatcaattaattcttggatgtgattcactccgacattttggcccctttaccgtagacatagagaaaaacaaaattcaaattggaacccaatggataagcttaggttcgaaaaattatgaattaatgaacaatattcgagcctttgctgccgaaaattacacaattccaccttcaagccaagtaatgatcagagcaaacattaaaactgccttacagccaaaacacagcttagttgtggataagcccgatttaaatttgctaagcaatgaccttgggattgtaccaagtgtgtcggctccatttgtggaggatatcccgttgacaataattaatccatcaaatgatcctaagattttattcaaaggcatgcatttagcctatttaaacgaaatagtcgaaaatgatggaattttctacgaatcagaccaggagaaaattaaaagcgggaatcctgacccaaatggattaactgatccatcattcaaaattgacctctcaaaatctgacattaatgaaagagaaagagaagcacttaaaaatcttttagaagaatttaaggacatattttcaaaaagtcaatatgatttaggctcattttcaggtggcgaacatcattttgacacgacaaccgaagctccaatttcttcgccgccaagacgaatgccatataaatacagagatgaattaaagaagcatattgaacaattgcttaataaaggagtaatggttgaatctgagacaccatgggtcaccccttttgtagtagtacagaaaaaggatggtggaattagaccatgtttagattttcgaaaattaaatgag

SEQ ID NO: 64851 - DNA, 507 bp, Heterodera glycines
atgagttccattttgggaatagtcaaatttgttcctttatgtttggttttaacttttgttttggaaaaaattaaaaaacaatcagaaaactcggaattgggattggaaacacataggaaaacagcggcacacatggcgagatttgaagcatcggaaaaacaatgtaattcatatgatagattttgaagggggagagtgaggggatttcgggggatttcaattttctcagcgggtacccaatttttaaaaagatgattccattcattttgtgaatttagtgtaattggttggtcccattcgacagattccacgcaaagagtttgcataaaaatttttaggggaagaattacgggggaaatgagtccaagggggtcaaaattagaagcaataaaagacaaaattgaccttttagtacataaattttcagggggtggtgatacggttaacaaaaattgtcatttagagtgttccatgatacaccaagaaatttatgtatcgtaccactga

SEQ ID NO: 64852 - DNA, 810 bp, Heterodera glycines
atgccattgtttcggactgccaacccacacgcactgaacagcaaagtcgtccgtggcattgccaagcagcgcggcattacgcctgagcaagtgttcttccgattcaccatggacattggcatcacaccgctcagcggcaccaccaacgggtgggtgccggtttccgcgagagcagttcgcccccaccccccgtatcaaacttaaaaaatttttaagagaagttcaggagaaagtttttgaaattttttagcaattttttcaaaattttatgatatttactaagttttaaagattttttttttgtttgaaagatttctagcttgaattttttaattttcgaggggaaatgatacggggggtcgaccctccctgacttcattcgtatgagaggctgaaaaaggaggggggggggggggggttggaacttcgtattggtttggtggacaaaaatgtgaaaagatgtggggaaagattgaagaggaagtgtaagagagagagagaggcgacttcgtaaaaacgaaaacaattaaacaaattaatcaagatatttacttttttctgaaattcaaagcacatatttgtttgcttgttaagcgaacacatggcacaagacgttctggtgccggatatgccaccactgagtgccgaagaaatcaagcaaatcgaatccattctttatggggatggctgaagaggacaaaatttaaacttatttccagatcattattgataatcaggaaccaattcactaattgctttataaaaaagcgaacacattctgttgaataatatttattccaattaatcaca

SEQ ID NO: 64853 - DNA, 2254 bp, Heterodera glycines
atgggttctcttaaaatggatactgagtgtattttagggttcggacctcgtgggcgagggtggcttttcgcgggggcgggggtcagagtcgcgggggtgagaaatttctcgcccccgtggacgggggcgggggtttgtttttaattagctccaaaaaatctcacaaaaaatttttttttttgaatgatgtgtttggctccacattcctttattcgatgtatcgcctcgattcaattcttttttggtataattgcatagatattgtctaaaaatgaccaaatttaaggattataaattatgccaaaatagtcaatttttatgggtgtttttgtctaaatccagggtttctatttcaaaattttcaaaataagaataaaggccaaaaaataagattttagggtcaaaaataagaacattttgcaaaattgcttcaaatatttttacattttattcgatcaaaaatgtattctattattatatttttcataaatttcagtgcattcgggatcactaaatcagatttttaacattttttgcggcatatttccaaaaaacttggtgaatgtgcgaggggagaggtccggtggtgccgattggcgccgcaagcggaaaatttttaagactatatgaattttgttagaaattagccaaattttttagaaatttcccttatgcctataattttaggcttatattttaaaaacttttatcgaattagctctcaatataaataataaaattgcactgaattttataggcatattccccggtaaaggactattaactagagaccggaaatttcaaatttgcggatcccgctgcgggactggaatccaaaattttttgcgggacgggatcccgcgggattaatcccgcaaatcccgcatttaaaatttgcgggatcccgtgcgggattgcgggattttggaaaattcgaaaaaatttcaattaaatttcaaaaaatttccaaaaaacaaaaaatacctgacattttgaaaaagaaattttttaggggctggggtgcatttaaaggggctgatgggtcgactaagattttcaaatggatcagcagactgtaaaaagagatcgggaaccaaaatctcctaatgatccataaatttgaatatttttgcttttcaaaaccgttttttggtgcgctattttttcaaaaaactaggaacagggtggggggggggcccgccgtagaaattctttgaaatttaatacgatttgttaatagattttgtaaaaaatgaccaaattttgtaattttgagtgaattttttaaaagagaataatgtggaggccatccggcgggttacctatcatttcgtcactgagaaataattttttaaaaatgttggcaaaatgtcattatgtaaattattttcattaaataaaatatttttatttcggaaatgtttattaaactagcggggagataattatattgaaaataaattctgttattatttttttaaatatatttttttaaattctttgtttcaagcgatggaaaatatgcacaaataagagtgcgaattggccagtaaattttaattttcggctaaaggatcgctatcttaaatctgcacatctgttgtttacttttttatttgaatgaaattgaagaaataacaattagtacatattattcggttcatcgcagcaaataaacgaaaataagagtttttttaccaaataataactctttctgataagcaatttcatttttctgttttggcttaaattgtttttaatttgtgtaaattattagtcccaaaaatagtcttaaaatggacaattgggttcaacttcaactgaaagggacaattgcgctcaatttaaaaaaatatattaaaaaaataataacagaatttcttttcaatataattatctatttaataaacatttccgaaataaaaaatattttattaatgaaaataattagagatcgacattttgaaaaaagcctggacctggacctggattccatgttggacctggaccttgatttcctggacaaaaatccaggaaaatctaggtccaggaaaaatccaggctcctctagacctggatccaggcctggacctggattttttgaaatttattttaacaatcaaaaaaatgtttgaaaaaattaattatttgctagaaacatctaaaaatatctaattaataataataataatgtgtttttaaatttatttaatctgtttttgaaaacttgaaaaaacatcggtcacttgaaaaa

SEQ ID NO: 64854 - DNA, 941 bp, Heterodera glycines
  unsure (1)..(941): unsure at all n locations
atgtatttgtcaaaaataatttttttatttttttataattttaatggtgtatttggaatttatgaaattgatagtaaagaggatcttaaagatttaaatgtaaaaacggaaaattgtaaaaaagtaaagatagagaatttttctgtttctgtaaaaaatgagccaatttttgatgataaacatttggtggggaaaatcggacattttgcagaaaatgcgactgatcaaaagcatgaagagtttgcgattaaaaaagaatctgatcagcagagnatttattgtattgatgaggataatggggatgaaaatgggaaagtaattttngttatttngaganaaatttntttaggtgtataaaaaaagtctcggtcttgagtctcgatcgaaaatgtagactcagaccgataacttgagccgagcccaaaaaccgccgcgagacaaataaattttatatatggcaatagttatgttaataaatttagccaaaaaataaataaaatttataaatgtttaaaatgtagataggtataactccaaattagtaaattggaaaaaaatatcgttaccaactttaaaaaaactaaattttttcgtaaatttttttatgaggtttatttttggtaaataatttttagatatcctcggcagaaacggatgaattggaaatggtgaagcaatttgacgtaatgaaaaatgaattgcgactgaataaaaactataaacaattatcaaaaagtaaatttgaagcaattgtagcacaaaaattgggcaaaagccgtgcacaaatttatgcattaaaaaggaaattgaagaaaaaatatggaaaaataattaacacaaaaatggaggaaaatgccgagacaaaattaatgataattaggcaatttgatgagatgaaagcggaagagaagcgaaatggaaaacttaagacggaaaactta

SEQ ID NO: 64855 - DNA, 350 bp, Heterodera glycines
atggttgcttcttcattctctaataatggcaaaaatattttggaatcgccgttcaaactaacaggttacatacttattaaactatgttttgtatttttcaaataataattacctattcaggagaatgcaaattgctctattattgtacaaacgaattgggtcattttttgaaccaaacatcaaatgctttaatcggcaatcctctgagaatagttccgtttgatgggcttagctctccacaaaaggtttggtttcatggaacatggctgagtattcgggatcaaaaacaaaaattaactgaaaccattgcaacaccaaaaaataatcattctgcacagattcgatcataa

SEQ ID NO: 64856 - DNA, 304 bp, Heterodera glycines
aaaattccctcaaaaataaaaggtctattgcgcaccgccctccctatcatgctcgagagcatttgtatgtgtataaaatttatcaaaaaaagagatatccatttttctgggataacctctaaatataaaaatcctctgtgaaataaaatggcgattgtgcacagccctccgtctcatacgcaagcgcttttgtgaggtataaaatttctcaaaaaaagagatagacatttttctgggatagagtataaatttaaaaattccctcaaaaataaaaggtctattgcgcaccgccctccctatcatg

SEQ ID NO: 64857 - DNA, 304 bp, Heterodera glycines; identical to SEQ ID NO: 51570

SEQ ID NO: 64858 - DNA, 830 bp, Heterodera glycines
atggacgatctttatgaggaatataagaagcatgatgaaatgggtaaaagttgcactttttgagttttaggcgttcatctttaatatgagcgtattttttagttcttaaagtagtaccaaagatttatttgagcatttttcgagaaaaattggtttttgcctaaaattccttagcaaagaattaataagaaccgaaaaatttaccaccaagaatcgaactactctctaaaaaattggctttttatcaacaaaatccatggaatttactcatttatcatttaattggagagccccgtgaattttatttaaataaaaacggtaataaaagaacaatattttcagactcaattgtatatcgtgtgtggaagaatcgaatagaaaaatattgtgcgaacaaaaaaaggacaattttcaatttgacatttgttaaatgtgcggcagaaattgcccatttccgagtgattaaccaaaacaaaaattcaaaagatgcttatgtgaatttaaaagttgtcccagataagtatttgcaagatggatttgttggatttttgcattatgacaaaacacttggccaacaaattgctgagaaatttgaaaaagaaatcttttctaacaaagaacaaattaatgaaagggtggagaaccaaattatgcaattggccttctcatttgcagcccgggtgatcctctgcataatgtaagcgctttattaaattctaatgggactgtaattgtagcaattagctgtgggcgcttttttttgtaaggaatgcccgtttggggtttttttgtaaggaccgcccatttacgataattgactcgtcaaaata

SEQ ID NO: 64859 - DNA, 889 bp, Heterodera glycines
atgtcttcagctcgatgccggatggctttggggcccgcgctgttccgacttcggcaacatgtcactacggccgaaaatttgctggacgagcccgtgatcaatgccgagacgaccgaaaaccttgaacaggaacgggggcacatcacccgtatcctgtcaaggatggaggtcgagctggacgcgtggggtgccattatgaacggactgcaaggcccagcgagagaggcggaggaagcgcttttcactgcctttattcgagatgaccggcacttgacggagtggttggaagatgcgcgagaaatgctggctcacatagcagcagaactcgcagatgagcccaaccagccaatcgcggcgggaggacagcaaccagctgttgctgtgaatcaacccgtgccagccgtgccattcgtcaacaatgccgcatttctcggcggtgccaatgttcaacagccagctgctgttgccaaccatgccaatcagccaccattggtgccaaataatgcccaaatcgtgccaaacttgccggctgttgctgcgcctgcgcctttagccactgctcggctgccgcagctcagtcttcctgttttttcgggcgaaccaatggaatggcccgcgttttggcagagtttcgagagtgccgtcgaccgtgccgcccttgagcccgtcgacaagctcaactatctccacggttgcttacgcggaaaggctgctcgtgccgtaaccgcctaccgtggaggggacaattatgcccatgccgttgccgcactcaggcgactcttcggagatccacggaaaattgccgaagcacttcagtccgaactgatcaatctccggcctgtggacgatagcgttggatcactgcaacacttcctcgagactttggagc

SEQ ID NO: 64860 - DNA, 287 bp, Heterodera glycines
atggcactggcacagcagggtgccgagaagaataacgccgaacaagaccagtttcatgatgatttgatggtgagttaattaaacgaaataaaaggcaaaattttctagctttaaaattcaaaaattaaaataaaacattaagaaaaagaatcgaaaaataattagataaaatttagctagcacatttttcaattaaaaaaatattaaattttgtcaaatttagccagattgcccgaaattatgatttgaaattgtaaggtggaggggaggtgatactcgaaaataaa

SEQ ID NO: 64861 - DNA, 563 bp, Heterodera glycines
tttttggggtccaagaattcgaatatcttttcggcaccttatcccgaccctgatcccaacccttttttccttgcatccatagcattttttggacccggaattcagtatttcgaaaattgatatcccgaccgtggtccaccaatctcccttttccccaacaaacattcataacgcaacaaaatttggggctggctctccattgttcaactctcatcaaaaccaatgaattttgcttgggcctgacttgtcccgtcccaactgagtacacaagagagccaaaaaataaaacatttttcgtttgcccattttggcggattgaaaatgttcagtctccccgttctccgttcacaaacacagctcccccccaatctcaaatttcgcgcatcaaccaatttcactctcggttagtttcacaaataaacaattctttgccaaccccgcgcctccggggacggcggacggggcggggatcgggcgagatgagtaataaataccccaacccaacccccgcccccccctctctttttaatgtcatataattcacacaatgttcttcacttcct

SEQ ID NO: 64862 - DNA, 149 bp, Heterodera glycines
atgatgttgacgcgggcaaagcgtgccagcggcggccgatggaccacgcagcagatcatcgagtgcattttcgcaattttcatcccgcccgttgctgtgctgatccatggcggccacgaatgggtgctccatctgatcatcaacatcgt

SEQ ID NO: 64863 - DNA, 896 bp, Heterodera glycines
  unsure (1)..(896): unsure at all n locations
atgaccttaatacttatgacagaaatgaccgccgttacggtaattggaaattgacagtaatatattatgaagtgatttttaaatattaattaatccgggggatcactgtagcaacgatttggatcgtgacaattattactcaaaattaaggtaattatgcgccacgaagtggctttccggaagattacaactttaatgacctaaatcgtgacaattatgatccaaattatgataattatgttccaagcatagatattgacaagcgttattcaaagaatggtaatagttgctataatgtcaagttgccaaaaagtttaatgttataaccggtaatgttcaatttatttaaaacttgtaagattatgattttggaaattacgctaacatattaatgaagtaattatttaatatttatttttagtaaagtggagactaattatagttattattttatgtcacagtgcaaagtatccagagtgacaattattacactaaattaaggtaattatgcgccaagaagcggttttccggatgataaaaatttgaatgatcaaaatcgtgataattatgacccaagttatgataattatggtccaacttatgataatgatagcccaaaccgtgatgctgatcaacgttatccaaaaaatggtattaatagctataatgatagcgttgaaacgaagtttatgttataaatacaaatataataatatcaatatgcctattatataaaaattttggagataattttaggaaaaattcaatttaattattttaagaaattggcaaatgccaaagtttcttcaacttgcaccatgtcaggcagcaatttttatggacttgnagctagaagacgaaaaatcaagaacagcaattngaagtcaaaaaaatga

SEQ ID NO: 64864 - DNA, 262 bp, Heterodera glycines
tatagaggaagctattcccgcaggattcggtctcccctttatctgggcgcatcggttcggggggactgccccgaaaatttaaaaattgattttttcaagtgtccgtttggggtactcaaacaattatcggggagcaaaaatccaacgcagaattaaagtacaggctatagggaagctattccggaaggattcggtctccccataaatctgggcgcatcggttcggggggactgccccgaaaacaaaaaaatcgattttttca

SEQ ID NO: 64865 - DNA, 632 bp, Heterodera glycines
atgttagagtgcctgaatacagcaagccaaataaaaattatcaatgacaaaaattcaattatccattttaattttgtttttgggcttaagcgcgccaccgtttggggattctttactgataattcgaacgcgttggcctcgcgttttcggtgttcatttcaaatggtgcaattaaatgctccttctgtggtaagttgaaatacgatttaatgagagaaataaattattttaattaattttccatttaaaggaatgggacgtcgctttggtcactttcgctgaccgttcattgttgagaaacagttggaatgctctttccaatgcgattcatacagctttaattcgggtaggtacatataaataaaatgtttttcaataattatttccaaatgatcattactagggctgtaaattttaggcaagaaaaatcgtgaaacattatttaaataggtacaagaaagacaaaatatgtaggtattaaacaggtacaaaaattccaaaaaatgtattaaacaaagttttattaacgatttttttagtctaaaaagcaaataaaaaggttaaattttggttcttttactgtgttaaacgaataatttaaatattttcttagaaaatttaatatttttaaa

SEQ ID NO: 64866 - DNA, 2092 bp, Heterodera glycines
atgccaacggacaatttgtgccaatggctcaaaattcgacggattggaagaagaagcattgccaacgtccgtgatttgcaatgcgtgaaaatcgcttctcataaattcactaaaatatataagtgattaatttatacccaaatttttttttgtttttaaaatttttttattatgtgttaaatgggaaataatttggcttttctataatatttttcttctctaattatgtgccatttcctttgcctctgactgccttttattcttttaattcaattctctaattatatgctattttccttttgtttttctctctaatgtattcctatttttctcaatcgatattcctttgcttttcttctcccttgtgctttcctttattcattctatttggtgttcacaaatttggacctcagacttttctcctctaaatattttgtgtgtggactcttaattttcgtcgtcttcgcattgaatttaaattaaataaattgaactgtccccgactatttcgccgtccttaattaataagcattggccccgtttgtcctttctgtgctaattaattatttggcccgagaagaggaaaagccgaacgaagcaaagcaaaagagacgagcccctccgaccaattggactccaatttttgcacgtggcgctcctggtcaactgagtaagcggtgccgggaatttttggtttttcgaaaaagggcgagctcgggaacaaaattggaagggagaaatttgtggttcacgggaattcaacaaaagtgaagtagtccgtctgtcggagctttacttagttgttcatcaaagcgaatagcccgtttgccggggttcgttatctcgccgtttattgcttgcctgtctgccaggggcaataaagcaacaaagtgaggacgaggagcaagggacatttcagaaaaacgcatagctgcgattctgaataaataacgcattgttgcgcttttcttcgagttgcatttgtgtcccacaaataacgcattgttgcgataagtgtggacatcgacaaatcaccgacaaatcgggccgtttttcgaggatcgccgtttaactttgtttttgttttgttgagtagtacctctgcggtagctcaaacaaaatgcctgttctccgaacgccaccactaacccggacgagggcactcaaccagggaatcattgttgaccgcgatggaaacgcaattagggctgaaaattttggagtttcggggggcaggccgactcgcccttagcaaacaacgaaaatcagcgactggacgacaatcatgaaaatgttttagcagagactgagattcgtcgtcgcctgctttacggaggaatggaacaaagcgcacctgaggaacaattggagtacgacgaaatggaaaacggcgacgaacaaaatgtcaacggtatggtgcaacaaaatttcgaaaatggagttgaagctggggatagagggagttttggaaacgatgcattggacgcacatgggttgcgagcgttttcaacgccgcttaacgagcaaaatctaagcgctctgcagcgagacctaagaatgcaacttccggaaaatttgagcgtcatacaaaaccaaattagggttatgaatttcatgcaaaatcaaatgccaaacccagtcgcgcataatttccctgcattgaatccgattgcttgccgacccaatggccagttgtacgaaaacgctgcggttaattttgagcggcagagagaacagcagataaggctcacacagcaaccggttgttgaggaccaacaatcacacgttcggcgaattcctccgccacatgcctatacacaaggacaccgtcggtcccaggacgaaggatttgagtttcaccaaggacagcaacacccaaatttcaaaaaaaacctacctataagagccaatcaacaaaatcgtcctgagtgcaatcagcaaccggtcccccaccctgggctggtattcgatggcatgatggcacaggccattcgaagcctcgacggtttttcatatacgatgacactcaacgcaattccgaacctggacggcaacagaggtactgattcggtgaatgctttcttcaagccaa

SEQ ID NO: 64867 - DNA, 646 bp, Heterodera glycines
atgctgctcaaattggccgactatttccaggtgagttcctctgatcacttatcaaaacctcatttaatgtttaaattttctctatcagcctgtaaaatttttatgaccaaaactattaaaaaaatttgtgtttttttctaatttttttgtaacctaattaaaaattctttaaaatttggaggctaatagagaacattaatggccataaatgaccccaaattcgctaattagtttgcttataaaaaagtgtcgcttcgctttgaggtgaccgcgttgaagtcgcgctgtgaaaagcatctgatcaattgcgtggaaattccgctgatcgaccgtttccttctgattgaacgcttcggactcggcaatttgaaagtgatttatttttcaattaatttaaattatattttcaatttttagtattattttttggattttgatgtcatcaaattgcgtacctttttcaacgcgaaccatgaacaagtctttccttttatcagcaaagaattttttggtgaattattgctccgagtttgtggatgaatgaatttgttaaactcttttgatcaaattgattttggcattttcaatttctttacgaaattaattttcggtgataaaatttgttttattttttttctgatctgga

SEQ ID NO: 64868 - DNA, 998 bp, Heterodera glycines
atggggaaatgcttttcatcgctaaagcgtcatcacaatttgcaagccgatgatagttcagtgaaggagttccaacatttttcaaagggtttcaagcagcaggccgggacttcatcaacaattgcccaacacaatgctgcatttaggcataaaaacgggaattaacattgcatttaaaaacaagcatttagatcaaactcaaaattggcaatgcaaacttctttttcatctattggaaatgcacgatactgtcgcaatcagcaaaaattgtcaaatgatatgtcaaattgtaaaaatttgcagagaaatggagcaaaaaatgcatactgtatttttttgggtttaataaccaacaaaataagcaatcaaaatgaattttgacttcagctgagggagtgtccacttcattccaagccattcaaaaacttgttgcaatgttcgcatacgaatctcggtctgacgaagaattggagtttcaggcatgcaaaatttggacaaaacaatgattattaccaatgatggtctttattcagaaaggcgacatcatgtatttaatggaaaactcgtaaattgcaaattttcacaaaaattggcatttttgtgtttctattaagcaaccttgactggtggtatgtcagaaacatgaagggtaaacagggatttgtgccgagttcctttgtcgcatttgtgaaaacgccgcaagcggaggaatggtttgctggtcgaattccgcgcactgttgctgaacgattggtggtggacaaccattttccgcccggaacttttttggtccgcgaacgggaggtggaccaactggaatacgcattgaccatccgtgacatggacactggacatgggccatgcgtgaagcattacagagtcagacagaccgatgatgcccaaggctacttcataagccataaagcggtgttcaaatcgttggatgcgttggttaaatattattcaggtccaaatttattttttcgtgttactttact

SEQ ID NO: 64869 - DNA, 308 bp, Heterodera glycines
atgtatgcgtatggcattatgcttatcgctggatatggtgctttgatttttgctggagcgggattaatcctcgcgcttgctgcgttggtgatcccagttgtcaaccgtatgtggaagctcgagaatgagtcttcgcgacaacgggatgtgctcaatgcactcaaaagtcaagtggacaacaatcagtccgaatgcgacaaattgaactttgaagtttttaaattgaacaaaaagtgtgcacacttgcccagtgactagtgtaatattggtgctacattttttagaaaaatatttcgctttttatctga

SEQ ID NO: 64870 - DNA, 575 bp, Heterodera glycines
  unsure (1)..(575): unsure at all n locations
atgagaaaaacaattgttggcactgaatggatgatatataaaaatcgtgatattggaattatgctttttgcatcaaaaattcaattagaagctgctaaaaattgcaaagtaatggtagcagacgctacatttgagatagcgcctagaggatttagacaaatatggcttattcatggactggtaaaaatcaaaataactttgtgcattaaaaattactaaataatttaaagacgtatggtgctatttatatgcgctgcctttgctacacatccaaacagaattacaaaggctgtggagagaatatatcaaacagaaagaagaaatagctaaatttataaatacattaggggtgccgggtctactaaaaatcaaatgcagcgaaatagtcgcaccttaaaaaaaatttgaatttgattaggatttaaaagaaaatttaaacgaattcttcgttactttgaaaaagaatggattaaaaattgatacaaggagggtgtggaagttcaanggaatcaagaacccgaaacacaaatccagcagtagcttggcattctgtcatttaaagttaaatgaagaaa

SEQ ID NO: 64871 - DNA, 690 bp, Heterodera glycines
atggcacgcttttctatcggcggattgaacattttcgagtctgaatcggccattgcttttgcaatgagtgaacgacggaacccaaaagaacaagctccacatggaattgagcttaaaatgcaggaagtgccggtgaatgcactcggagacgaaaacgacgaaacggtacgaggagagtactccaaatgctaccacacgtaagagactaattataggcactatccaacagagtaactttcaaattccgtttcagttttcaacaaattggaaacggaacttttggttcagtgaaattggccactcaaaaaggcactggacttatggcagtatcgaagtttatttgcaaggacaaagtgttgccagaaagttggattcagtgcccgaaaagagcgaacaaaatggtgccaattgaagtccatctgctggagaatctgagccatccaaatattgtgcgggtgctcggcgtgtttgaaaacgacaagtattatcagctggtgatggaaaagtgcggctgtggcatggacctattcgaattcatcgatcatcagcccaaaatggacgaaccgctgattagctatattttcagacaggtaacaaaatctgttgtaacgccacgtttaaggctttaagacatttgaattaccttccttttgaagaggaatttattaatgggaaaatcattaaaataaa

SEQ ID NO: 64872 - DNA, 626 bp, Heterodera glycines
atgcgtggtacttatgacgaagatggatacggctcgcttgaggacaaagaatgcgacaaaggccaacagttttgctacttggcaaactgtaaaaccggtaatgacattggaatgcgttatttgacctcgcttaaaagacccaaatttggtactaaaatgcgtatgattgtcaataattttttgtaaatatttttttttcaaaaaaaactaactaaactcaaaatttaagttaatgaaagattttctagaaatgactttttattcttttcaaaaaaaatttttaattaaaataattaatttattaaaatattatttaaaaaattcattaaaattaatgcattttcttgttcaaataacttgtagacatggtcagctatttgtcttgggattgtgcgaaagacacggattgtgccaaaatttcggctgattggaccatgaacagaggcggcggcaattactcgtgcgagtgcacatttggcgcccctggattaaacttgggcaacgaaaagctgcacattccgatggcacgtacgattgtgttcaccgaaatggaaatccccaacagcggaatttcttcatgtaatatgcaaattggtggtgccattctttgggtgctgggtgattaa

SEQ ID NO: 64873 - DNA, 327 bp, Heterodera glycines
atgacccggctgctccttgatgtggaattccacgtccacgtcggacttgacgagcaacaagtcagcaggatgtggtcgaaggatgagacgtgggtaattggagatgagagcatccaccagcaggtcaaactgtcggacttggaggttgctgagcgggtagcagacgctaaccggtgtgaagaccagtgtgtgatcggatttccattgccaggagatgatctcgctgatcgttcgcccattgccgatgagattgagctgctcttcagcaagctccgatccatctcgacataccagcagcgcgcctttgctgggtttgcagtaaggtag

SEQ ID NO: 64874 - DNA, 393 bp, Heterodera glycines
atgaatggaggtggcagcaacaacagttttctctgtgtaatttttgactgtaatgcgtataattggggctgtgtggtcgctgaacgcggtgtgtctacgcttaacgaaactgtctccgcactaattgctctttgcaatgcgcataatttctcctcgctcggaaatcgtcttttgctactcgcaaaaggagccaagcaacaagaaaagaaattgttcaccaacgaacgaattactgcgaaagaattgacaaattttgggccggccattgaaggaattattcatcaaattttggctaagaatgtttctgctgaagaaagccctttcaatttgtccagtgcattgtctttgagtatttgcggtatgttaatgagattacatcatgcatttacctaa

SEQ ID NO: 64875 - DNA, 2030 bp, Heterodera glycines
atggaagatgacgcaatggttgagcttgcaaaaggacccgaatattttaacaaattttgcgcggataaaggattaattatcaatgagaaaaaccaatttgtgtctgataaatatgaagtccaccttggccttttgtatgttatgcgaatgaaatggaatcatgtgatggaaacgcgagtaagcaaattctctgtatattaattaattaattaattaactcgacttgacaaatggttagcgataatttgggcaatggaaccactgggcccacagtgaacagtttgggaaattgttgtaaaaaactaattttcaacaatttcgtgatttaccggaactcagaaatttttactgtactcctccacattcagtctgatcactgccccaaaattatccacggccacaatcaattgtccaaataataggcaaaaccatggccaattactaattataccggagacaaaatttaaaaaagccataataaaaggcaacgtataagcttcaaaccaattggaaaatgtgtttttttatgcttaaaatatcggaaattttaccatcttatttttaagcataattcaagcttcattaatgaattggaaaacattcgccaatttgctttcattctctacgaatacttcttctggcaatatgttgctgaatatgtaaaaggtaacggaatttcgaacccaaattttaaattgaaatttcaaattaaattaaatcccgtaaaattttctagcagtagacccaactttagctgaacaaatttccattacaaagaatcccattaaaccaaaattaaaaagcaacgggagagaaataaagttttgtgaagcgatcctagattgggcattcgtttggaagaatcaaatgtggggcggaaattattctaaaacgacacgcttaattaataaagaaacgctaattgaaaattatggaataaatttaaacaattggtatgagcaagaatcattgtttgacatgacaaaattgaaattggaattgaatgccaattcaaaatttgacaattcatttccccgtcttcgcaaaatgttcgatttcaacatggcaaaatgaaagaggatgacactggagaaggtgtcagtaattgatatgctaattgaattttcttcaataacaaacgaaacattgatttggcatattaatgacaagccattttatgaaatagacaaagcggtaaatgaactggaagtatttttggcgctttcagtgatgcttgaggagagtctcaactcgagacaagtggtctcggccttttatgagtctcggtctcgggaaattttcggtctcaagcatcacctaggtactttgcgccagggaaggcacgggattccgattcttgtttgccgagatttatgggatcggaattcaggttcctgaaaaaattttggaggttcgttggcattccgatttccgaaatttttttcgacacaaatttttcagacataaaatcttaaatggcggcgattcactgctaaaatgagtcatttttctattcatcgaaaaatttttgacaaatcctctcatgaatttcaaatttttattttatgtccaaaaagtcaatcctgggggagatgtacgtatgtttctttcgattttaagaccttttattatttggttcttgtccaaaatagtaccaaatttccggtaaaagtcaaaaaatagtgtgaaatatgacttttattcttgtatagccctaagcatacatataaatataattttagatcgaagacaacatatttcttgttgttctgaaagaaatgcgtgttgaaaagtttggtgccaaattggaaacggcgccattaagtgccaatgccaaatcattgatccattcacagaaattggaaatcaagctctatcttaaaatcatttatttgatgagactcaaatggcaatgtgcggaaattgagaattaccgaaaagaatgcacaaaattccgaaaatatttcaattttttgtatgaatatctcttccgaacatacaatgaaggtattgtgagaaactttgtttaa

SEQ ID NO: 64876 - DNA, 967 bp, Heterodera glycines
gttccaagtcgccttcccttcctttctactctctcgacccttcattttcagaaaacgattgcccgaatatgcaaatcgtttttcgaaattgtttgatgctaccgccgaccacgggcccgccgttagcggtgcccacaatacaaatgtttgtgcaagggctggcaaggacttgatctcgtcgctggtttccggattattgaccattgtgagtgtggggcagtgggctgaccatttgaaaatccgccatgggataataaaaagagattataaaattcttttaatcaaccaaatttaacgctttggtatcattcgaatgaaattctgaaatctctatttttgaaattaatattctgatgaaaataaaagctattgagaataatgataccaatttgtttaatttggttgactttaagcaattttattttattttattatcccatgtcggaatttaggaatgtcctagcaccgggttgtcgtaaaagtagaggaggctgaaaacagtgacggatttacaattgacattttcagggtgaccgttttggcggtgctttggacggggccgcgaagagtttcagtgaagcaatggacacgggactgagtgccatgcaatttgtgaatgagcagaagcggctgggcaaactcattccggggattgggcacagagtaaaatcggtgagactgggggggggggggggcacagcgacgaaagaaatggcggcgattgttcagataaacaacccggacaaaagagtggaaatactgaaagagatagcgaagaacaagaccttcttcaaacaggagacgcctctttttgactacgcactcaaagtggagcaaatcacaacttcgaaagtgacagcaaacccagacgccctcctcatcagaaaatttgtttagaagcccaacttaattttgaacgtcgatgagcgaattgcgacaattttcgtggacattcttcgccattcgg

SEQ ID NO: 64877 - DNA, 895 bp, Heterodera glycines
gaacattgtcaacataatcataatcgtccaccaattcggcttatgtatcatgtactatctgttcattgcatcgacctttcaaacggttgctgtgtttgtattgcgtttatcaaaacaaaaactttttgcaggtctttgataaagaaaaagctgacaatgagcccaagggaaaagacccaagatggtttctcttcatattgcttccgattgtcgctctcgtaagtggatgagtcatttgttaattgctgtgcactttaacaccttttcagaattccattatgtccatgcgtatcctctcagttatgtgccttgtcggagatgggttgacgatcaccagtttgacactcattctctttgtttgtgctgatgttttgtcaattcttttcttttcactctttcagatgctgtcccaaattgtattcacggaaagagcccattccattccgtttgccctgccatccgcagaaggctttttcaaagcgagtggtaccatcattgtctcttgccttgcccagtcattggtacgatgtcataatgtttgtaaaattgtcaatatcttcggttatttttaggtgcttcctttggagaagcgaatcaaaaagcccagtcaaatgttgggaccctttggcgttttgtccggtggtatcgctatttcgactatcgtttacgcaattgtcggttttctcggctattgtgcttatggagaagaaattcaatctactgttttggaacatcttgaatgtgttaagtaagtgaagttttgtgcatcattgtatagcaaatttctttttccagtaacgcaaaagagttgactgttttgacttttatcattcgggttgccctctgtctgtccatcttcgcttcttttatgctcccaatgttcgttcttgtcggg

SEQ ID NO: 64878 - DNA, 56 bp, Heterodera glycines; identical to SEQ ID NO: 52733

SEQ ID NO: 64879 - DNA, 309 bp, Heterodera glycines
atgcaagagaacattgaaggaattttgaaaaataatattaaaaataaagacaaaaatgtttttaaataataaaaataaagacaattaaaaggtttaaagagattaagcctcggcagcccatgcgggtgtcaagaatctcggagattgcgaatttcggggatggaatcagattagcggtcgaacccgtcaattttcttagggaaccgaccgagccaaatatgatgtacccacaatttgttagtaaatttattttttaggcagttcatcgaaaattaattttaaaaaattaattcaaattaaatttttcga

SEQ ID NO: 64880 - DNA, 175 bp, Heterodera glycines
ctgctgtaccaaatgttacaattccatgacgggctgtcttcagaagtgcatcattgagcacaagggggacccggcctgtcgcaagacttgcaagcccaatgtgtacaaatgcgctgccaaatgcgggccccactgtccgctaaattggacgacgacgacgccgaagagcggctaa

SEQ ID NO: 64881 - DNA, 2027 bp, Heterodera glycines
atgcaaatttttgtgtgtcaatttatttacggcgggcgatttaaatcctaaaacttttaggcgcacaaatttattcaattttaaagggggaaacaatcattgacaagccgtggaaaactggaatttaaaatgcaaaatgagctttcccttttcccacacaaaatttcatcgatccgtcggaatatttttaggaaaataaaataaaataatatttaatttattaaattgcttttttaattgatttagctaaatcaattaattgcggattttttgaaaagtttcagtcgtccgcctgctcaagccaagaggaaatttgggtcggtggtgccaatttggagcgaccactaaatacccaggtaattaattaaaaaaacaaatatgaattaattaattcatttcatagtttaaatttaattttttaatgtttttttcatctttacgtacccaaattcatcattattaaatttcgttttttttattaattttcaaaagctcttaaaaaatttaattttcaaaaataaaaaaccttttttacattaaaaattaatttccaaatttaattttcaatttttgcagctttacttttcgccctccgctgctgacagccgccggtgttcgacgttggcatcgccgcaggtaaaaaagtgaaaaaaagtaaaataaaatggcaaatcgatttaagagtgaatttgcattttgttcaccttttttgaatcgctgtgaataaattagcattttttgtttgtgccgccgccgaaagcgtcgcggcatttgcgccgcgcgctaatgacacaaaacactttggcaaaacggggagaaaaatgggacaaaacaatttttaatattcacaaaatgccaaaatatacaaataaaaccaacgattattttcgggttggaaaaagtaaaaaaaaaactaactttttaagattttaggactaattaacaatttggcattttttttagatttttgtaatttttttaaatttctaaaataagaaatatccattactttttaccgaaattataaaaattgtttaatgtttcttttttttccaaaattagaaatattcctttttatttcacagaaatgattccaaaaatgtttagtgttttcccaaatgttcagagtctactcagttccggcatgcattcggcgagcagtgccgtcgcgtggagtccgtgctcaagccgttcactttcgccatgtgcctcgccggccaactccctcaaggggtcatggtcatacggtaaaattagctaattaattaaataaaaaataaataataaaataaatatttaaattcacagacataatcaatttgcctgtccatttggaacgacacatcaaagtgctaaaggtaagcaaaaaaagaagacatttttaatatgctaattttattgtttaagaatttacaaaaatataattaaaaatttaaaaatattacttaaaaattataaaatatcaccctaaataaaataatttattgtaatgaaagaatattttaaatttactttcataaaaattaaaatatttagtattttgattaatttcgaataaataaaataattttcacaaaaaaaataatttttctcgcaaattaatgattctaacaattatttaattgacaattcaaaaacttgacatggtaaaataaataaattaaattatcaaaaataaattaaaaataatattttaattttattaattttaatgcattttcaattttcaatttaagtcccatttgccccttggcgttgtgttggatgccaacattgacaaagcgatcaacggatgcgtggtgaaaagcatttgcagcaaaaaagcactggccaaagacggacgaattcaggtgaaaaacaaaaagcgcaaaaaattaattaaattttttataaattcgaatttttatattttttagcccggcgatcacattgtgaaggtgaacggcgaaagtctgcgcaatgtgacaaatgcgcaggcgcgtgccatcatgcgacgggcaaatctcgtcggggcacagtgcgggtga

SEQ ID NO: 64882 - DNA, 1690 bp, Heterodera glycines
atggcaaagcgaaacaatggcaatttaatgaatgaattcgccggcggagtaatggacaatttttttcgatttttgccatatttttccataaaatgaaaaacaaaatttcaaagaatcattttttccgtcctttttatggcttatttaacagttttttacgctgaaaaacctattaatatttttaaatttctttattttgtttttgcaataaatttttcactaattgttttaagaaatagaaagcattttctttattacttaatttatttttctttactttttttaatgaaaaaattttttaaaaatttaattttattaaatttatgccaattttcagaagcatcgtccgccggcttctcctccgatcagcaaaagtcaacaacaaattgaggaagctgccgctttgatttcgtcttctcgaaaaatgggcacggatggtcaaaaaacaatggcacaaagtgaaaaagtagcagcgaagacaatgccggaggcaataatttaatttaaaataaaaataaattaaattaaatttagtcagccaaatcgatgaacttttggagtgaaccacgcacagttacattgagcagaaggcacaacgaaacattcggtgggtttttcgcattacaaaactataaaatttagagttggacattttgaaaaaaaattggaaaattttgaatatcagaatgaaaggaaaatcgaatatgggtaaatacattagtttatggtaccatacggtacataggatggtagaaacatttcttattgacatttcttgggtaaaattttgtaaaatttcgttaaaatatgatcagaaacccccgacgatttaggctaataaatattaccaccgcattttgcgccacaaattattccaattttaaaaaattacattttccgccgatcaaaaaagccgtatttggcattatgccattctttgttttgtgtcacaggtataagcattgttggtggtcgcgtggaagtcacccaaagggacagcattaccgacgccggcggcactctgccgacgacggcagtgccaatttgcggcggcggtgccgccgctgatgaggagggcacagcactggtggctaaaacggtgtccggcattttcatcaaatcggtggtgcccgactcgccggccggccgatcggggcaattgtttatgggcgatcgggtgcttagggtcagtttattttaaagtattttagaaaattcaatttaaaaaaattcaaattcaaaattttttttaataattatattttagcaaattcaaaattaaatttaaatttttttttaattcaaacttttaatataattttataaaacctttaatttttttctaaaattataaatgatgtttttcttattttcacattaaattagaatttttacaaatatttaaacgtattcccttttcattatcttcatagattcaataaaaaatatttgttaatgtgtgcaaattttagaatattttataaattaaaaaagtaattaatgtttttatttatttttattttttttttggcttaattccaaaatttcccttcgttttctgcaggtaaatgacaccgatctgagcaacaccacccacgattatgcggtgcaagtgatcaaaagtgccaaaaacccagtcaaatttgtggtccaatcgcttcagtccctccaggcgtttgtgccgagctcg

SEQ ID NO: 64883 - DNA, 88 bp, Heterodera glycines; identical to SEQ ID NO: 55892

SEQ ID NO: 64884 - DNA, 643 bp, Heterodera glycines
  unsure (1)..(643): unsure at all n locations
atgggcgcttatcataaggacgncatagtantggagcacaatnggaaagggttatattttttattactgccaaattaatcatacgcccataatccgaaatacaaatttatttttattttaactatgcatttgcaaacaattaaagcacaattcattttttcacccattaattaaaaacaactcattagggttgggttcgtaggtccaaatccccgtggtttgaaattttataaacttttccaattaaaaaaaaattttttgaggaggtgtccaaaacttcagttgtattttgttgcttttgccgtccgttatatttttatgaattgcaaaaatgtgtagtgttaaaaaaacagttacaaatcaaatatttaattatataaaaatgcattgcgttccttaataaaatttaattaaaaaatttattttaaatatttatttttaaagacacgagggcaacgaaacattggaagaatatgaccgcaaatttgttgattcattacgtctcaatttggaggagtgtcgtaactttatcatcacccttcttgcaatcgccgagaagcagatggatttattggtgatgagcaacgaagaaaaacaaaaactatctataaaaaaggaagaatatatgtcattttataattaa

SEQ ID NO: 64885 - DNA, 172 bp, Heterodera glycines
atgagctgtccgccaccagttgttgctgctgttctgctgatgatgatggtccggcttggctctcagccggcaccggctgcaaaacgcgttgccgatgctgctggtgccgatggagatgatcatgctgtcgatattgctcatcagcaacagaatggctgccatcatcttcttg

SEQ ID NO: 64886 - DNA, 214 bp, Heterodera glycines
attttcgaatataaaattgctaattcgtaatttgttactttttttaaagttgcaaaaccagattacaggagctattagacaagtgtctaatagagaggtgccacaataagtcccccagaatttctttgcaactttcaaaagggaatgaattttttataaagattatcacagaaataaaacaaaataattaatttatcttttgttggctgtttta

SEQ ID NO: 64887 - DNA, 53 bp, Heterodera glycines
attgaaagccatccattgcctgccgattctcgtgacaataaagcactaatagg

SEQ ID NO: 64888 - DNA, 633 bp, Heterodera glycines
atggcagtgattgagcccggcggaacagccaatgccaacgaggcccagcagcgaaagaggagggtgagttcgggcaaattctgatggactgtgggtccttgtcgggcccagcttttgcttttctggcccagataagggctcacccctgaggtgtgggcccagattgggctcacccttggggtgtgggcccatgttgggccccttttgtcttttggagccctgattgggctcacgggctgtgagccctgctgtgtattaatcatttaataaaaaaaatttttttttcataaaccgcgttcgggggcagccaagcgaaaagcgaaggagcgatctgttgctcaaccaagagcacctgctgctactaccaacaacccgcacatgccgtttccaatgatgatgccgatgatgatgccaatgatgatgcctttcaatttccccttcccgcctcctccccctccaccatcacaacaacaataattttttttttgcattttcacatttatttttatgcattttcatttatttatttttgtgcttaccttcaataaatcaaattacaaaattcacggtcgaaattttcagtttttcttaatgtttactaataattcaatcaatgacagtgtgattaaataa

SEQ ID NO: 64889 - DNA, 112 bp, Heterodera glycines
atgtgcaagttggcaaatgaccgatccattcaattagaaatggacatcagagccggggcaatcaattcatcattccatcatccaccatcatcaacatcatcagcatcaagag

SEQ ID NO: 64890 - DNA, 1088 bp, Heterodera glycines
atgtccaacgaccacaatttatgcaaaatcttttgtgaattatataccgtatgccctcccatttgccacggcaatggcacagcccaatttgctattcaaattggtgccgtccgtcgtgtgtattcatcaaacattattcacgccaaagcatttattggtgcggagggtggccgctctcgactctcgccctgccgtggcgaaattcgccggccaattttcctcgccaatcgaatgaccaattcagtggcatcaacagcaggtgtgtgtggtgccacactttttatccctctcaaaattcattatttgttgaatgaatggtgccgcaccacctcaatggcacattggcgtattatgtcttaattacatgtcctttctgataattcgacttttaattatgaatattttagcttcgagaaaatttaaaagcagtcaattctgtacgaagaagaaaagtaaagatattaaataattttttttaatttccgagcgctaaaatatgttcgaagtttagtcttccccgccccatatttttgcttttggatgaaaagccttgaacatttatcagcttatcacccagcctattcccaacatccgtcaaaaaattagcaagatttttttttgttgatttattgttgtttcttattatcttttcttattggcaaccgttgcttctggtgatgattgattacggattgggaatgctttttttgagtttgccgatgagtgcctctgctgatcatcttcttgtggttttgatggattatgctcacttttctgttggtcattttgagactcgacaaaaaaacaacactaacaaaccaaataattaagcttcttgatcacattttctctcgattatattagactgatcagaacaaacgttaagtcactgccgattttgtgaattcaataaggtcaatcttacgaatttggcaccctaatttattccattattcctagtatttctgctcaagaatttcgcgccatttctcggtctcgagcctcgggaaattccagtttcgagcacactattaatttgatcagacaaacacaatgagaatgccgaaaaattttcccgcaatgatcca

SEQ ID NO: 64891 - DNA, 506 bp, Heterodera glycines
tatatacgtgccgagcttcatcttcacggccgattggactcctttttggatgctaaatggacaaaatcaacaacaccaccacttcacattgtccaatttatgtgcagcagtaacaaatggacgcaaaagattggcaaaaatggaaaagactatggcaaatggccaaaaaatgggaccggcggcacaatttggccaagtcggaaaatttcgcttggattgacacgaattgatcagatggacgagaaacagcaaaagaagaattatcatcgccaccaccaaattcactccccgggatggtcaacttttgacgcgatgactccccttttgtacgcatcgaaggacaatgccgagcagcaacaggacgaactgcacataaacgtacaaagggacaaatgattgggatgggcaaagggcgaacagaaaaattgttccgagactccatgcaaacgaaatttttgaacaatttaagccggattcataggttcaaatcagcgaaacattgaaaa

SEQ ID NO: 64892 - DNA, 581 bp, Heterodera glycines
aatgcaaaaggaagccctaaaatgattaatttcacaatttccgttccgacagagatgcgcttggcacaacatgaccgtggactttcaccagttgggttggtccgaccgaatcattgcgccgaagagattcgaggccggcttttgcggcggacattgcgattatccgttggaaaatgtacgacaaaattattaatttatattaattatatttataaatttatttaaaatttttatcaatttattttgacttcaaacaaacggtaaacaatttaacttcaatttattttatcaaataattattaaaattttccattatttacaaaaataatttctttgtttttgccaaggagtccaacccgtcgaaccatgccattctccaatcactaattgcaacccaacagcaacatgaaggacaagcaatagcagcagcacaaccacggcgccgaacaatggcgtcgccttcggccgtttgttgcgcaccggcggagtttgactcgctgacgctgctgtactttgacgaacgggacaatgtggtgctgaagaactacccgcggatggtggtgatgtcttgtggctgtttg

SEQ ID NO: 64893 - DNA, 592 bp, Heterodera glycines
atggacaaagtgcgcaaaacggcggaatatttttcttacggtatggccaaaggcaatgtgaacgatgctgccaatgatgcgcaaatgccgacagaaagtgccggcgatggaaacgattttgacactttccgacgattgaaccgacgccgaaaaatggtgcaaaaaactgtgcaaagcatggaaaatcaaaaataatcactatattaaaaagttaaaacttcattgatcattaatatccaaattcttccctggggccaatttgtcatttaaatcggcacgaaaaatcgaaatttcttaaaattctatttataatttgaatcagtctattagttttattttagagaaaccgaaagtcaaaatccgcgcaaaaaaaataccccggctttgatgccaacgacccgatgctcggctttggcacgcccttttcgccatggcaacggatgtcgccgtcagtgaatcggcggaccaaaatgttgcaaagtcccaacgctggcacatcactgaacgacattctgggcttgcgagaacacggctattggttcggcaccgaaatgggtccgaaaattaattaattttttaacaaaaataatta

SEQ ID NO: 64894 - DNA, 289 bp, Heterodera glycines
acaaaattttgtggaacgaatggagttgctacggtgttgaatacagtgcacaacgcttgagcaaaatccgaatggacactgttgatcagaaccgtgccagagacaacttgccaccccgtgccaccggcgatcagtggcaatgcacggcacaatttggaaagactggtgtgagcatgagtaacgcactgtttatgccgccgttggtcaaaattgtgtaaaacacagcgtgaaaactttaaaattaattataaaatattttgatcgggttttctacacaaaatcaatcgaa

SEQ ID NO: 64895 - DNA, 95 bp, Heterodera glycines
taattattttttccgtttgacgcacatccgaccaaactgacaaattatcgtagaagatactagccgtaagaaataaaaaattaaaaagtcaagaa

SEQ ID NO: 64896 - DNA, 487 bp, Heterodera glycines
  unsure (1)..(487): unsure at all n locations
atgaattcctttccttcgccccttccgaaattttctaccattggcattggcactttccttctgttgctggtgatcaatttccatttgattgcgagcaacgaatttgggcctgaagattcggtggaccgcaaaaagacggcggaaaataatgaatcatttgctttactccgacgtccgaattattttgccaaaaaactcatcgtttcgatggacgctttttcggacacggacagcgaagacgaaacaaagcaaaggacggcacatttcgaattgagcgattcggaggaagaatttaaggaatggcaggaaaggcaaagggaaaggaaattggaaaaggaaaatgccgaaatggaaaaagcggcaaaaagggaaagtgccgaaaagggaacggtgaaagacaaaaaaggaaaattaagcgaaaaaaagagtgattggaaattataaggngccaaagaacatttccaaagaaattagaaacaacctttga

SEQ ID NO: 64897 - DNA, 1168 bp, Heterodera glycines
atgccaatgattggttcgaatgccaatgttgattttgaagccgtgcttatcgagaagcgatttttgcgtttttgggactcaatgaacggcgatcggcggttgccaatgagtgccaaaaacgggggaagtgccgccgctgcgctccctccgcctgcaattgtctcagtgagcgggggccttttggacgaattcattgacgagggatggactctttcgcgtgcggtgagtgtccacgcgcacagcgcggcgatcgaccgaatttgggcggaggcagaccatttgtgcattgtttggtgcaatgaaattgtacggtcagttggccaacgcaacgcacaaacattgcgggatagagaaggggcggggggggggggggcttttaggttggaatccaaaagggggggggggtaacatttctttaaaatctatttaaaaagcttcccaacggctttttcgctcatttttcagagcctataatttagaaaaattaaacaaaaaatatttttaatggcgatgtggaaaaatatcttcgaattcctccgtccgaatttttttgttcctaaaatatgaaattttttgttgtaaaaattgctcaatatgtgccattcactggtgccatccctccaacgaagccccccttcaggcaaacttctcgctttcttttcgattacgccgcctctccgactgattttctggagaagttccacgacttcgcccatttgcattaccattcgcttgggctccgactccgtccgatcacttcggaatcggtcgctttgactgatttaaatgtcagcctttgtaccccaaaggtcattttgcgattcgtccgatcactgatcagtcggctgatcacttccatttcccctgtctctttcagtgtccttcgcaatctgtgcatcaaaaattcgatcttttggccaattccatcggaaaacgccgcctccttttgttggccattgccaatttgactgatcgggacaattcggtcccaaaatttgaccttttaacggcgtccaaatgcggacaaaatccacaaagtgttggtggcactcgctttttggacaccgatcatctctttgccgttgccaatttatcaaattgcgagggacggggaaacgttttggtcgcaccgaacactaatttatgggtgctaattgacccccattaa

SEQ ID NO: 64898 - DNA, 1729 bp, Heterodera glycines
atgctttgcttttcctccaccaatgcttctcgttgtcaggccacgctgctgttcgtctacaacaatgtgcacgtgccacaaccgcaggagacacccctgtggattctgttctacggctccatgggcacgtgcattggcttttggatgcttggccatcgtgtgatcagaacggttggccaagagctgactgagataaatcccttctgcgggttttgcatcgaactcggctccgcaatcaccgtggtgatcgccagcaaattgggcattcccatctcgatgacactgtgcattgtaaggaggggaatagcgagcagagaaacagaagaatgatcggggaataatgaccaaaaaacaaagcgatcgagtgattaaaatcacaaattgaaaggatcaatgatcaaagacaattatggcttaattgccaataattggtcgataaccggataattccaatccaattcctatcgatctgatcactccccccaatccccgcaatttcaggtgggcagtgtcgtcgcagtgggcgccgtgcgcggttccgtgcccgtcaattggcccctctttcgcaatgtgttcctcgcttgggtggtcactttccccgtaagcggcattttctctgccgcttttatgtttttgctcaaattatttttcttatagcctttaattttcggatttttctttctttttattgctgaatttgtgatcataatttattcccacgtttgtgcgttttgggctaccaaagggcgttcagtttgtatttttgtattaaatatgcgaagtcagtcaatcggaccagattttcatttaaaattactgataattaaatatatttaattatatttgataaaaggaagacaaaaaaagaaaattgctaataaaattgtgataaagacagagtgaagaaatcaaatttaattattagcaattacctaaaagacaaaaaatgatttaaaacgaaagtaatttcaaatgcaaaaacagacaaaagggagagatcgtcaaagagaagaaagctcatcggagtgataaaggcagaaaaagtggaaaaaacaatcaaagaaaaaaggaacaaaaaaagtgtaaggaatttgaaaaagagatgagggaaaagaacggacaaatttaagaggggaaaagggaagagggagaaaaaggaaaagagagacaacgcaaaattggagacgaaaaaggggtcggaaagggaccaaaattggccatatttggccaaattccatacgcaagtgaaaatgtgaggaaattggaaaacaaagacgggcagaagcagcagaagagaagcggaggaaaaagcgatggcattgcccgtggagacgaaacgccggtgcaaagcctgtcaaaaagggaactgatccgacagatttgggaccatagaacgaacccatttataaatgcaaaagtgatcggatttaaaaatcattagctcatgggtgattatatcctcctatttggattcagtttttgtgtttaggtctcggctttcaggcttagaaattttgttgtatttattttagttcagccactacgatcctccacgctcagacaagtgccaattaaatacaaaaatttgttccttacggcaatgttcaaaaaaaggccaaacaccgccagagggaaagtgttgttggtgaacgtcgtggacagcgcaaacagaaagaagaaaagaacactgagagaaagagacgaagtgaaagagcaaaaaggacgatga

SEQ ID NO: 64899 - DNA, 3630 bp, Heterodera glycines
atggcacagacgaaggaaaaacggagaaagagagtggcaaaatgccaaagaaaatcttaaaaatccaaatttaatttcagaattcaaccgaaatgcaaaaaataaatgtgagcagaagcaatagcgacataaaagccttttcaatgaatgaggacgacgaattaacgcgggagattttggcattgtttgattatgaggacaaatgggacaaggcacaaaatcggacaattgacacacaaaggggcgaccattcgaatggctcaaacggtggggggggggagggagaattggcacaacgaacgaacgaattgaattggtttggcctttttcagttaattgggcaaaagccacaaaattggagacggaacagctgcagttcagcatggacccatcagcaggtgaatgttttttattcaatgccaaaatgttaaatgttcagcgaattcgaccaatgaatggacgacgaaaagtggcgaaaaaacgggcgaaattcaaatggaaaagggacccgcgaaagagcagcagcaattagcggaatacgaccaattagcatctaatggccccacaaaagtggagacaatagtcacaaaaacgacgccagaacaagcggaaatgacaatggcaacggaaaatgcaagcgaaacaacggcatattcacaacgcaatcattcaatagcaaaagccgatttggagagggaagtgaacggaacggaaatggcacaacgaaaatgggaaaaagtggcaaacgacggagagcgaaaaggcaattcatcggaaggggaagaaaaagtgccaaaaatggaagaaaacgggcacgaaaaggaaatgccaacggacgagacggagaacaaagccaaccgaacagagaagggtcagtgattgggcattaatgggagcatctcaacttttttgcttttgattggtgcttttctctttcagtcggttcggttcttccggtttcgcccttttcttccgccccaacggtcccttcccttcaaattgccatgccatcagtcggcattttggaagaagctttaggcattggcacggcatcaccttcaacgattacctacagcgaaaataaactaaataaatcgacagaaccgagcattgaattcacaaacattacaatgccattggttggcactgaaatggcaccgtcaaattttaaaagcattaaaaatgaaaatgaaacggaaatattagccaaaaatcagtcggaaaatgccaaaagcaatctgacaactaatacctcacaatcaacaacagaattgaaaattctttacccattggagtcggaactttctttgccattactttcgccaatgcctcccacggaattgccaatgataaattacgaagcgaatggcaccgatacctttgttgaagaaatgagcaatcggacagaggaagggaaggaagcgaatggcacatcggcaggagaaggcataaagggaggagcattggaagagttgaagcggaaggtggaaggaaaaatgcgaattgatgacgcagaatgtgagcagaaggaggagggaaaggggtggggagaagtaaattaagtaatgaaggtgattagggagaaggggaggagagagagaggaagagagagagagagaagagagacaaagagaaagggagagagaggaagagagagaagaatcccatttgatttcgttctgttttcagttgttgagctgagcgagtatcggcagcatttgcggcaaattctgtcggacgtcgaatcggtgttgtccaaatggcccggccaactcgcccacttttccgactttcccaaatcccgacggtacccttttccttttcctttttgcttttgtttttcctcttcctctcctccgtccccttccaacttccccttttccctttcccaatttcagttttatttccatttcggcatcgatgccaaatcgcaattccgatttgttcatcgcccgtaaaaatgccatttcggtttcggtgtcttccaattttgaagagattcgcaaaagtccggtgaaaatgggcacaacggaggccataacagtccaaatggaaaaaatgccaattttaacgacgacggaaaagacgaaaaaggaaaaaatagaccgagagaaagagacagacggaaaagagacaatgggccaaaagacaaaaacaatagaggaagagacaaatacagaggagatagtgggcaaaaaaggagggaatacagttgaggaaaagaaagaaacggaagaagagacaactgaaaaagagagaatggcaaaagagacaaagacaggagagaaagaggcaagagagacaatggcaaaagagacaaagataggagagacagtggcaagagagacagaggcaagaaagacaacagagacgagagagacagagacaagaaagacagtggcaaaagaggagacagagacaagaaaggcaatggcaaaagggatagagacgagagagacagagacaagaaagacaatggcaaaagggacagagacatgttggtaaagagagaaaaagacaaaaatgtgaatattacctaaatagcacatccctccgattcgcttgaacccatcgccggtcccctcagttcggaatccgactccgacgaacggccacattcgaacagtccgaagaagacgggctttttcagggccgaacacttctcgtccaaatatttctcattgattcctttggtcggtattatttatttattttaaaatgtttaatttttatttttaaaatttcttagcgaaatatcagtgccgtggatcactgcaaacatttggcacaggatgacctcgtgcatgagttgaagcagaagggcacttacaaccccgaactgatggcatgggcaagcgatcggaaaagcgaaaaagtgccgaaaaagtcattttgagtttaggatgtcagcggagtgttccgtttcctcgacaaaaccatcactgaccaatacgaagtgatcggagggggggggcaattaaaatgggaaattgggcaattaaaatttaataggggacaatgaattaacataattgcattaagcgccaatcaaaagccccaaagtcaagtgaccaagcagtgaagagaaatgttgaagcattggaacgactgctgagtgagctgaacttgcgatgtgtaaggaagggaaagtcacaaattaacgcaaaaaaagccaattgactaactaactaactaacttattaatcaattagaggcttaattactgggtttgattaattgtctaaaggataatttattttaaggacgtgcgttcccccgaagtgttgtcgcgactcggcaatttgacaatgcaagacgaaatgagaagctttgcgacagcttcaatgaattttggtgcttttgctttaggaacgaatcgaagcggtcgatcatttcgccgtcgttgcggcagcaaaaggcgcgccatttttggcataaatagcgaaaaacccagcatttaggatcagtttcagctgatgcgccacaaacgcaactccgtattggcacatttggtggggaaaaacgacgaaaaacggcggaagcgaagggcgacgaaaaaggaggacaaaacggagcaaaagggcgggagaaagcagcagagaaagcaaaagcaaaagcagaaaatgatcg

SEQ ID NO: 64900 - DNA, 2188 bp, Heterodera glycines
atgcaagaaatggtacaattgctgggccatgcacttcgagtccatgttgcgctgaaaaccaaaaattcacatacttttgtatgtacaaattcactaatgtaaaaaacattcgattttgagacaaattccttttgttttgccaattttttaatgttttgtcattaattgcagtggaaaaacagaaagaagtaaaattgttttttctgtgttctctttggcaaaaatggtttagccaaagactcacaaatcaacgtcatttcaagtcgttaagaaattcgtaatttgaaaattccaaatttagcattttggcaattacaaattttttgcgttttgttcaaaaattttttgttcaaaaatttatttatttttggtgcaatttattgggcattttttaataatattggttgattgattataattgtaaacatttaggcatcgtctcggcaactgtttgaacttggccatatccctcatttttgggaatctgtttgttgtgccgggaaaatgcacaaatcacaaatttgtaaaaaaaatctgttggtaatttagtttatttttattttttagcaatgctcaccatagaatatcttttgtcacaacatgtttgttatgccatgcaagaaatttaatgagaatctaaacatcatacagtatcaataatattttattttaattaaaatttcatattgaaccttttttattttatactcattgtttaattaataattgttattgtttgtttggttgttgttattttggttgtgactttcacagcttacaattttcgtgttctttcattcttttccaacacttcgttatgattttattcaatattttaaattaattaccacattatttgtttaattgttaaaagtaaaaagagccagagaaagtaaagtataatgatattttattatatttaagattccaattacataagctgattccaaaattgattcgcgaatttttctaatacttctctttatctaatctccctctttctaatttttctctaatctctctcactctctctctctctttttccactcccccccccctccttctcatacatctctcctttttctttctctttttctctctgtctctctcttttcttttttttctccctccccctcatttatccctcctttccggtctacctcagttcggcccccacggttcggccccagcacgtttcggccccaaataaaacaattaatttttcaaataaaatttcacgtaaaaattagcaagcaaaatgactacttttttaaattaatagtgttattcttatttttatatttttaattttaattcgaacataaatttaaactttttaagatttattatgtaccgtatgcaacatcaaattgacgccaaaagaaacaggtcaacgctacaacatgatggccatctttacaaatttgctaagacaagtaccgacgggacgattaaattttggcgatgtgagttcaaagacagcggtgtggacaagttcaaaggacggatttggacttcacttcgagatgaattcatccgcatggcgacacctccctcacacatatgaacggaatccaagccacgtcattgcgcaaaaagtcacgactgccatcaaaaggcgtgctgttgagacgatggaagctccctctgtaatccgtgctatttctcttcaaagcattagttcgcctgcactttcagaagtgccgtcaaaaaaggcaaccaattttgtaaatcttttcaatcaaaatttgttaaaagatctttcggccgatgcccgaattctggcaaaggttcagatttattacgtcgacatgcccaacaacgatgatcacaattatattaaccgtcatccccgtagaatcgaatatttgaaaggtatttcccgcaattaccagatgaatccttgatcagtttttgtatttttgtttttttaaattttaatattgttattagtagggctgctaattttaggtaaatacttaaaatttttgcacacttaatacacggagataggcgcgaaaaacgagtttttagcttggtttggagcttctatacccacttttataatacctatttttacctatttgggggtttttctacctattacctaggtacctatttttatacctatttcggcatttttgttacctattttaaggattttcaaaaaattcttaacaaaaatgca

SEQ ID NO: 64901 - DNA, 300 bp, Heterodera glycines
atgaatctgtgcaaaagcccagtccaagccttagtcaaaattaagaatttttatttcctcttgtcgaatgttttttgtttttttcagaaatacgaaaaatttttcaaagtgagtcttatattaaattttttttaatttttttaaagaatttccttttaatattgtgcaaatttcagcatgacgctgggaagatgcaaaccaattagcctagaagcagaaatagaaacaaagaaaaagcttgaaggcgcgacatgatgaacattatttgttaaaataattgattatttaattgaaaaatga

SEQ ID NO: 64902 - DNA, 2371 bp, Heterodera glycines
atggataaaatttccggctccgaaaattttgtttttttcggttgcgggattccgactcctgaaatgttgtgcaaagttttgaaaaattttgcggaagttattttcgaatttttatatccagtaaaaatttcagtaagggcaccgaatacatattttccatatatttatacatttcagtccattttttatccaaatttcggcatttcatggaaatatttttttttggaaacaaatcttaatttaaggaaagttttcgtccaatgtgtgattattcatctgatatccatcatttcaattccattttatcagtgtaagtttatgatatgcgtttcaagataatttttcgccaaatatttaagatgttttcttcaacacttcttatttgttcgttacttgtcttttttatttggcaattgtaattcgtctggcatggattaagggttaattaaggatttaatttcctaaaagattggcacaactcatttttgataggaaatttgcaaatttttgaaaatataaaatgaacaaattttataacaaataatttaattaaaatttcatacaaaaaaatattcaattctgacaattaattggtttaccgtagtttctttatttgaatgcccgtctctggtagaatgcctctctctaattaaatgcttggaggggttgaacaatacaatgcccgggcattcaaatagagaaagtacggtaacttctactatgtttggcacatcatcacaaattttttggtaaagaatttgcagattttatataatttaataataaataataataataatatttaatgaaattcaattttaaaatttaaataattaaacacaaaaaatattcgatcctggcctaattacaaaaaattaaatccaatttttcgaaatttttttgccctgtagaactaaatttaaaattattcttgccgaaatcggttgggcttaaccatggaaaatggacaataaataataatagttttttgcatgtttttatttcaattataagtgaaagtttcaaatttttttttttgctctaaatttataatttttggttaatattttcttaaattttttggcattattcttcataaacatttatttaaatagttcagaatttttttttgtaattattcctcctcacctttttcataaatgagaccagtacattttaaaattttaagcacaaaagcgccgttggaataatgccgccactgatgcggcgacggcacaaaatcctttggacaaggaaagtgcgcgaatcactgtggtatgcattgccgtccaaatccatggcatatgttttgtgttacttggtaatctcaccattacgccatggtacacgatgttgacgatatgtacaaattacgacccaatcttgcaacaattgtattacccaatcaatgcgttcacatcgttgttttacatatcagacgaggcaattaatttacaatttaattatttggaatcaaaaaaatttaaaattaattaaatatcattagggtgcgaattttttgtttttaacggatttttttttgcggttttattccgctgtgagagaactgcttgaaaaacacaaataaataaatgaattaatgaaatgctgtaagcatcatcggcattgaaaaaaggtttctttgcaatgacatagaatttgttatttttggacaccaaatttgaatcgtctaattataaatttaattactttattgacactgaggcaaattttcgaattagcccacactgacaatatatttttggttcaacctagcaccgttaaaacattaattaaaactaaattaattcgcccgtcaattgtccaaaattatttttgcagctctttttgttggccgtctgtatggacatgcgtgtgcaatttgcgcaaatgattcggaaaatgtttgtgccgtttcggaggcgtggaactcaaacaatgacagttcaaactgtgcaggccaatttcaatagccgaatgcggcacaatgccaatgcgaattagtctcgacatacactctcgaatcatcccaggacttgactgaattgctaacaaatgtcttggaaaattgttttatagcaatttaacatttcatcgataaacaattacttatttcgagcacttaaaatcgttttttaaaaaaagataacaatgaatgaaacaatgtaaaaatttgtatttaattggtcaatattattctacgcttttcaatattagctgacttaattaaaaatttttaagtttgtgttaatttgtggaaccataaactgtagttaatttctgacctttgtcggcttacccatttattcgtcaaaaacatatttttaaattcttgaaaattgtttttgattaaatatttattcacaataaa

SEQ ID NO: 64903 - DNA, 64 bp, Heterodera glycines
atgccattttggtcatgtaaaaaagcaaataattcggattccccggaaccggttatccctcgag

SEQ ID NO: 64904 - DNA, 1898 bp, Heterodera glycines
atgtgcttgtatatgcttttcctttgtccatacacacatcactccacctggccgttggattcggatcccgaccccctcactccccgctccgaatcgggaaagctcaccattgttaaacatgtaccgatcggaataaaggatattattccacatattgtactttctgtggtgggcttatcaaaggtacgataacaccataatcagggtcatctcataacaatacaataacaaataattttttgacaaattcaacacatgtgctctctctaaagcatgagaggcacaatagtgtgcatcacaaaataatacattttaaaaaacgttggcaaatttcacttctgtgtctcatggattaaagatggggtgaaaataaggaagggatgcgatacgaatggggaccggtaaattggacaccggaaaattggacaccggaaaattggacaccagaaaattggacaccaagcggaaaaatggacaccgccggaattttggacactaaaggaaaattggacactaagatttcctttttaaaaaaaatcaagaattaggtgaaaataaatttgagtagaataaatgggttaaatgagggatgattgatcaatgggccaaaaaatgaaccaaaaatgagtaataaaacttattgatgtagtgattttctcgaaagtgagcaaaaagttgagtggccgaccgacaggttcaacacttcagaaatgaaataacaaccaattgtaatccaacagcatcaatacaaaaatcacttcatcaaaagtattgggccgacctgcagttaatgaaaaaaatgccgaagcggcagagagaaagtaaattattcaaacctgtagaaaattcaatttaagtaatcaattcatttttgggaaatttaacaaaaaatttttgaactttggcagaaaaatagagcactttattcttggtattgcaccattttttaaatttgatccctataactcaaacgcaccaaaaaaacatgaaaatttctcgacatagttcttcattattattccgttaaaaaattcttaattaactttccatgtatttaataaaggtgtgcattttatcactaattgtaagtaaacacacgccacttggtattaacgagaattttaatgaaatttaggtatttttaatcattgtaaaattaaaaaataaagccatcacgcaaatttgccacacacacacacacaatgctcattaagtaataaatatgttttaataatcacgcaaattggccacacaaacaatgctcactaagtaataaatattattttaataatcaagcaaatttgccacaacacaatgctcattaaataattaatattttcttttactaatccctcccccccctacaattgtgaagagaacataaaatccattcatatatgctatataaaataactgattatttatttttaaattcatatttatatgtatttttatttaatcgatttaatatgaaattcagcagtcaaaaattttaaaaaattacaaaaatattgttttaaattggtggtacatgattataaaaaaagaatgggcattgactgtgtgtacaaaaatagttttctaatcatcaaattttcaacatctcattttgtgaaattcattgtaatttattttcaaataaatttattaacctaatttttgtcaaaaaacagcaaatgaattgcactatcataaattcgttgtcacctctgtcgaaagtgcgcgacgcctttcggatcacaaattttctgatttgtatagcatttatgattttgtgcgcttttccaatgtacaggttggctcgagaacgcctgacattgtacatggtgatcagcaaggtatggtttttcatcggcagggttgatttgatcagagttggtcatgatcactcgggctaa

SEQ ID NO: 64905 - DNA, 1006 bp, Heterodera glycines
atgcatggtcttcttgaagacgacaaaatttgggacaaaactctggcggaggcagctctgtcgcgctggccagatcagatgagatggctctttgtgagcatcctggtctatggccagccgagtaatgccatagaattgtggaacaagtacaaagaccaaatatacaatccgcaaggcattaccacaccggcacaacgccaagcagcagagcttgaagccctagccgacattgattggcggctgcacagctgctttaacttaagctgtgtgcattttagcctgccagacccgccaacttcaattgccaaaaatactgacgcggcaattgaagagtttttctttggcgatgatgatttgaatttgcctccagggcaaccaaatcctcgtccacagccaaatacccctccgccacttaacagcgaccaacagaaggtctttgatgctgttttgttggcaatacagtcgaaccctagggattcgactgtcccccgccgtttcttcatatacggcgatggaggcacaggaaagacattcctgtttggccaaattattaggcgcttgcgaaaggccccatacacctacaaagtgcttgctacggcatccactgggtgtgcagccattttgctgccatatgggaaaacagcccattccacgtttcgtctgggtagagaagtgtcattagacaaactcccaagcattccgctggagagcttctttgcccgtcggattcgtgaggcccaactcatcatcattgatgagatcaccatgcttcacaacacggtgattgaggtcatcgaccgagtgtgcaaagagatggcaattcgccagcacaaggatctcctcttcggaggaaaaacggtcattttcagcggtgacttcaaacagtcgctgccggtcgtgcctcatgaaggcttaaccgctcaagtgacagcctgttttcaaatgtctccgttgtttggtcaattcaccacgatgaaattgaccatcaaccagagactgggccaag

SEQ ID NO: 64906 - DNA, 313 bp, Heterodera glycines
atgcgtaggaaaattcaaatgccaaattggtcgaaattgtctcgatttattcatagtgccactttagcgtgttctcgggtcggatttggcctttttggcagaatttcatggccaaacgatgggacaaaaggggcggaaaagaaggacaaatgggccaaatggctgagtgtggagacaaaagcgaggacggtgtcagattgtgtcagacaatgttacgaataccgattttggtcagtttgtggagggaagaccatggatcaaagcgagaatcagtcgggaatgagagtcgggaatggaaagggtcgagtcgaga

SEQ ID NO: 64907 - DNA, 306 bp, Heterodera glycines
atgccgaaaaatgttcaatttccaacgcaagtgtgcccttgtgccgatcagaaatgcgttgccgagtggaaaattgcaataggcaccgcccaccgggcacatcagaaagatttgaatggcaatggaactgataaatgccgatcacttcttccaatgttagcacgtcagaaggaactgtgagaaatgcattagacaaaaattagaggatatttgcattttcggcactttgtgttataatttggcttttttaggcttaagaccgacctcgcgaatggagaaatatttttaagcattcccattgtttaa

SEQ ID NO: 64908 - DNA, 278 bp, Heterodera glycines
atggctatcactaacctaaggactgaaggtggtgatcacaatcagttcctttggaatgtacattgttttcctttttcggcattttccagtgcttcatctcgtgccaatttcagtctgatgatgatgactttatcatgccgttcggttttaccaatcaattgactggggagcgattggcgtttaaaagtgccaacattttggggcgactgggatacaattgacattgcattaatcaggaagaaatcggaggcgggtcagtaaattgagaacaaaataaa

SEQ ID NO: 64909 - DNA, 481 bp, Heterodera glycines
atggctttgaccagcgaaatgtcctcggcaaattccaatgcgaccaaagcgacgccaaaaggggcgaccaatgcgcggaccaatccctccactgcacactttgcagggtgagcagagaatgccatgggaacaaaaaacaaacactttgccaacaattaattcaaaattcaatttcagcattcgaatgtcaattctttgtataaattttccaagatgcaaaaaatgtctattccacgaatgacactcaaatttatggacattttgttcgaattaaaatttttcagaatgccaaacattggccaattaccgccaggaaaatataattggcgagaatttgaaaaattacaaaaagaaattggaaacaaaatagaacatctgataaaaaatgaccaattcgatatgggaatgtgcagatatgatttgaaagacagggcgaagagaagggcagaaatggagaagaaaatgcaaatggaaatttcaa

SEQ ID NO: 64910 - DNA, 5115 bp, Heterodera glycines
caaaaaacggagacatcactctgatggacgtgtgctttctgcgcaacttttggttatacgtcgaaaaattaaaaactaaaaaatcggtggaatttgaagaaatgaacgcattttgtgagcaattggaaatgcacgtaacggagttaaagcatccagaacaattcaagaattttgcaaagcaatttaacatgtttttgtcggattgtcatttcgtatatttggacaatttgttgacggaaagggaaatgcgaaagaattcgaattttaggcaaatttttgaaattgaaaacagaaaaacggacgaagaaagtgaaatgacgcaaagattcagagaactgacagcaaagaatgaatttgatcagataaaacatgccaaaaggataatgattgcttttttgatggatcagagcagcgtggaccaattggaattgaacaacccaattctattggcgattggtagggcaaatagcactaatcaacactaatcacaatttcgtactttaattttcaggaattgagagtgatgacttttttcgaatgttatatgaaggaattaacaaaaatggatttaatggaaatgtgatgttcatcaaactgtccattttattcgcaaaaattattgcacattttgcaaattgtcaaaagaaagacagcataaacaaatacaaaatttattggaaacaatttgacaaaattatgggcaaaaacgacgaatggcgcaaagaaagtaacaaacagaaaatattggcacaacttgacgaactgttggccaaaatggacagcgaatttggcacatcgaaagtgacagaacgattgaaactgattctgaatgatcttgggagatgtctgatcgaactttacctggaaaatgaggcattcaggaacaattttcgtgaacaacccgaaaattgggaaggagtgaatgtgagggggggggaagagaagggaaattggttagaaagttaattttgccttgcaattaaaaaaataaatttaaatagaggcgtctggtggtgggtgcctttctggcatttgccccttcaaccaatgcctattattttagaagctctttgaatccgccgtttcttcaagctgtgatgattcgttgttgaacaaaacaatggaattgtttgaaagtcgtagtatcaaataaaattgaaaaatggaagttatataattcaaaatacttatattttttgatttaaggaatcagcaaaccacaaaaagacgattttattaataatgccaacagaagttttgttaaagaattgaaggaccaaaatatcgaatttgagaacacaaaaggtgcggtaggaaagggaattttaattaaaaatatttagttatttgataattccaaaccatttacagaacaagatgccataatcgtgatgaagcagtacatggagcttctaaccactgaatcggctgataatttgagaaaggattcgccatttatgcaaaatttgaaaatgcatgcgacacattggtattatcgaaaatgcatcaactcgtttttggaattagccgatacgctaattgaacaacatggacaacaaaatgccaaattcaaggacagaatagacaagtacaaactcaaaggacaaaacctatcgggccaaaacagtgaaaagagtaacggcagaaagagggaattgtgcatgacgtacaaattggcttacgaattggccactgatcagacgctgatcaaaatgaattcggattggaaaacggagattgaaaaatttgtgcaaaaagaaaaggaagatttgagcaaatatacggtcagaattacattatttattttgaataattccataaattaaaaacaattagaaacaattagaaagtccgtccattctcccattttccatttctctgctcccgtgtttcgttcaacactttaaaaacagcgctaacttacttttgggtttagcaaatgactgttctgccagagaatgtcgaaactgaatgggcaaatatggactgtgaaaatgatcaaattgttgaaatgttttttgatcaaataactgattcgacaaagattggacaaatccacttttttgcgatcagaaatttgattgatcgaagcataaaatttagagaatttttttataaaggcacttccgaacggaactttcttaaaataaaggagaatttagtgaaaatggtcaatgtgcaaataatgtttttgttggagaacttttacccggacattttccatttcagttaattaatactttaatttcaaaaatgacttttcttttcattcagaacatctcctcactgctcagtacctctcccttttgacgagacaaatgcaatttcaaagcggcacactttgcgccgaattttttgaagctcggattatggcgccaaatttgatcaaagcattagaaatttacgaagctaatctggcaaatggtgcgcccaatttgtccgcgaatgcacaaaatatttatttggaaaaaattgcgaatgcgaaagggcaattttttgaggaacaacaaaattcgaagatgggaaaacaaaggcaaaggcaaaatgtgtgtaaattaattgaaatggcaaaattcgtagagcaatttttgatgaaaaacagcagaaattctcagggaattaatgcgaaaaatgtgacaaaaattgtgaaatggaagccgacagaatgcgaaacggaaaagggcgtgaagagggcactggcggagcaaaggcagcgaatgcgaaagactcatttcgaatatttggaccgacttttaagcgaagaattctttagggccaaattcaacaaaataagcggggcaaaagagcgaattcgaaaactgctgacagacggcacagacaaaggcgaagaagcgaatgccgagaaaataagggcaatgttcagaacgccggaatgtgtgcgcgaaggtaaaagcgaaggatggaaaaagcaaaagcaaacaaaatgctaattggaatatttagcttttttgaatgcacctttgagccaattttatgaggaagcattattggacgaaaagtgccaattccatcagatggcaaattggttaaaggcggacgttgtcgtaattgcacaaaagatcgaattggcactggagcaaaatgccaaacgactacagcccttgggaaagttttgggaaaagaataaatattcatttatggaattgttcgaccgaattttggacagtgaaatatcagaaatagaattgagagtcatggaatttgtggaattaattgatgaatacatggacaaagtgatgaagaaatgcatggaaatgagcctaaatggggaggaagacaaagcgatgaaacttttgtgtttaaattcggatgataaaacgtcggacagacaaaagaccgaacaaaaggccgacgcggaattttatggaaaatggataaacaatttacatttcgacactttgaccaaattaatggccgagaatggacagatgaagagcaatttaaaaaaaggttggtttaaaaaacaaacaaataaaagggggcgaaaattattttaagtttatgagtcatcggaagaagcgataaaaacactaatgaatcgttttggcattgaaagggcaaatgaaatattgataatttgtggaacgagagaagaaataaaagaacaatcggtagaagagattttgatggaaataacagagaaagaaagagaaaatgggataaaaaagaataacaaaaacagaaggaaaaaggaaaacaaaaagaagcaaaaggaaaagccgacaaatggacgaattgaaaatggaggagcaaaaacggaaacaaagtaaacccatttttaaattgctataaattggatcgttaaggaaaaacgaaagcgaacttagcaaaagcgatagcaatgaaatggaaaataaaatattaagcgacgaagaaacgcagaaaaatgacgacggacaaaaggacaaaacattagtcaaaatgaaggtaaaaaaagatgataaagtaacgacaaaagaggatgaaaaaataacgacaaaagatgaggacaaagtgacgacaaaagaggaggacaaagtgacgacaaaagaaattggtgatggccaaaatttagaagacattcaatcagtaagaggtggaaaaatgatggaacagattcatgcagctgatcaaaatgaaagtaggacaaatgatcaaacattagggagtgacaaagggacgacaaatggtaacaaaataattggaaatcgaggagaaaaagcggacgaaaaaaggaaaacaaaagaagaagaactgagctcagaagtaaaagacaatttgaagagaaatttaaacgaattaaaaagtgagagaaaagcgaactacgaatcagaagaagaagaagaagaagaagaagaaaattgcaatggcaaaatgccaaaatttgatggcaaagtgccgaacagaaatgaacaggaaatggcaaattgggaaacaaaaagtgaagaaaattcggaagaagaggacaaattggaccaaaatgaattgcttcatctgaaaatcgggcatttttcagacgataatttgctgagtttgaaatatggcgaactgttttgggcagtaagcaaagaaagttgggaaaatgacgaggaaaacgatgctttaacagtcaaaactttgtgttggacgctccatcttggagtttatgccaacgaaatttcgaatcggattggactttttggcactttggaggaattgaaaataattggcaaaaacgaaaaattggaaattgaaaagcaatgggaaaagcttaaaatggttgaattaagcaagataattagcttatgcgagaggaacaaattgatggccaaattgcatttgttgctgaagaaaattgtggcctcaatggacggattttgtgcggaaaacggcacaaatttatggacagagattgaggagacgaaaagtcagctgcactcgagaaaattggccaagacaatggccaagagcgaaacggaacgccaattaaagcgcaaaatggacaaagtgattttggcactgattcaaacggaaaacgatgggcgcgaggacggaatgccaaagcaccgagcggaattcgaagagcaattaaaggccgtcaaacactttgatgggcagagaaaattaggcaattaa

SEQ ID NO: 64911 - DNA, 1120 bp, Heterodera glycines
  unsure (1)..(1120): unsure at all n locations
aacttaaaaaaactcccttctctaatagttacttaaattcaaccaccttataattcactagtaccaaaaatgcaaagtgaggattttgatgatggatatttacgaacgacacctgatccgtttgttgtcttgataaacaattattttttcttgtgtctttttagaaattcatttaaattaccgccgactgaattaagcaaagcacccgacgaagtgttcgatgtaattagcaaaattggcgaagggttattttgttccgaactgcttttcatttgcattgtgtaaatttaaggtcttacggctccgttcacaaagcattacacagagaatctggccacacgcttgccgtaaaaatggtgagccgtaaattatttcgggtggggcggtgtttactgtttgaataattatgctttcattgcaattccttctattaaggtaccagtggacactgatctccaagaaattatcaaagagataacgattatgcaacagtgcgattgccgacacgtcgttaaatactatgggagttacttcaaagactccgacctttgggttgggtgaccgatctttgccgatgctttttccatgtgcaataatttgagattgtcatggaatattgcggtgccggttctgtgtccgatataatgcgattacggcgtaaaactttaaacgaatgcgaaataggagcgattctcaaagacactcttctgggacttaattatttacacggattgaagaaaatacacagagacgtcaaagcgggtgctaatttaccataatatgctaaacatctcaaaatatgaccctttgttctgtatcaagggaatattttactgaacatggatggcaatgctaaggtacggatggtttatggacttgctttgcgaattaatttaatttagctagcggattttggcgttgccgggcaaatcaccgacacaatagcaaaacgcanatacggtgagtgtgatgctattttctgacaatatcaattcttgttaaggttattggcactcctttttggttaatcgacagcgtttctttaaaatgttttatttgcacctttaggatggcccctgaactgattcaggagatgggctacgacatgaaggcggacatt

SEQ ID NO: 64912 - DNA, 211 bp, Heterodera glycines
aaacaaaaaaatcgatttttcaagtgtccgtttggggtactcaaacatttatggggagcaaaaatccaacgcagaattaaagtacaggctatagggaagctattcccgaaggattcggtctccccataaatctgggcgcatcggttcggggggactgccccgaaaacaaaaaaatcgattttttcaagtgtccgtttggggtactcaaaca

SEQ ID NO: 64913 - DNA, 168 bp, Heterodera glycines
atgatcattttattcaacatttataattattttaataacattttaaactattcagacgatgatgagaagaagttaagaaatggacgccgtagcaagtggttgaatgggaccagcgttgctatggaaaaatgcttgccgaagagatttggcaagaattcctcgacaaag

SEQ ID NO: 64914 - DNA, 293 bp, Heterodera glycines
agcggagacatcgttcgtgtactgctcgagaacttcctctaccatttcgacgaggaattggacgatgcaaaaatgtctggaggagggagtggtgctggtcgaagacaaagccgcagtgacagttttgtggtttcactgtggtcaacactgcagcgcacattggcactcgggccgcaggcggacggggacagtgacgggtcggactgttttcccccgcatagtctgtcgacgctcatcctgacactgctgctctcgctcgtctattacccatcctttgaaggacgaaccaacgc

SEQ ID NO: 64915 - DNA, 493 bp, Heterodera glycines
atgggcacttatgcatttgacaattatggctttttatggattaacggaaaagaaaaaggaacaaatatcgaatatttctaccgtgttggcgataccgtaggaattggtgttcatttattcactcgacagctctttttcaccaaaaatgggcttcgtttgggttagcaaataataaataatataattttacgattttaaattacaatttggttatttgtctattttatgctaatttattttatgtttaaaataatcaaaaatcccttaactttttcacagattcctccggtcttttcgttgatccatcttttgctgatggttctctttatccattcgtttctttgtttggctctggttacaaaattgaggcgaattttgggcccaatttcaaattcgatttggcgactctctgatggaaggattaattattcactaatgttgttgatcaatttgctctttttaatcatttttatgtttttcttcttcaattaaa

SEQ ID NO: 64916 - DNA, 455 bp, Heterodera glycines
ccagacaaaataggcatcacaaaagtcacaaattaaatctacttgcgaaaatgtttttgctttgctttgtattgctaataaataacaaattacaatcttagctatattacgacgtccgcgttcctcagagatatgctcaaagtaaagagctaataaaacttgaatatgaaaaggcaccaaaaataaaacagaagaaaaaataaacgaaagataaaaaaggataaataacgaaggatatggcaaggaaaatattgtcggatggactaaccaacggagaaaggcccgcaaaagggagaaaacctaacggataattgagttaatggtataattaaaatttaaaatgaaaaaacgggcggaatggaaaataatttacaaaacgaatgaatgggcgaacggtcgtccgtttttggctatggacaaacaaataattgcgtgattcatacaatgcgtcgtct

SEQ ID NO: 64917 - DNA, 2650 bp, Heterodera glycines
  unsure (1)..(2650): unsure at all n locations
atgacgacgaaatcagaagacgattcgttcgataaaattgctgtgnagcaaatgaatgagtcaatgaaaaaattcacgggaattaagccagacaacgtacaaacaacacataatgtgcacagaagccaaactgaggaccgagatttcgagagaaacttcggattcccaaaaggtcagtcaagaggattgagaacatttacaaatagcaaattcacattgcctttttatgttgttgggcgtaaatttatgtcaaaaaccaatgatttgtcacagaaacgtgccatcaagatttgtcaaaattggtcgaaacaatagtgcctgttcagggatatctcaaatatttgaaagaggtacaaaaaatttagaacttacattgtatcgtcctaaccaaaaggaatacaccttttgggggcatcaatgtttactccttaaacattcggtccaattttggacgaatttactgaatgatccattcgacatcaaaagtcaagaaatgatgccgatttctgccgaagaatgccaagaaatctccaaaaccaaaaaatgcagattcggcattctagtaggtgactcagacggtaccatgataacagaaaataaactcatttatgagcattcttggtggtcttggggtaaaaagtctgttgagacggttaattgcatagtcaacaatataacaatcattggatatcccggatcccaaagaattgattcgattgtcggagacctccaacattgtcaatacgacgacggcagatgcagtttacacgattctattgtagtttgggatgttgatcggtatcacacatctgaaccatgggcggctcgacacggacattgcgtttttaaaagtttttcaaagaaaaatggaaccatttatcgaataggttggatcagtgacccaccggacttagccctaacatttggggaagatccgacatttattacttcttgtttaagaagattggtagttagccaacaaggattcgcaatcgaagaaagagaatttgtaaaattcaaccgacaattggacagaactcgccgaaatgttaattttgatgaaccgttggacggtgaagttcgcacatcacaattagatgctcaactcacagcacgttcgatgttcgcagataaagaaatgagaaaagtattgcaggcatattttaaacttatttgtgactccatctttggctcagttttgggcactgatctctcacatctcaatccgaattttttgattcgtcagctttcggacaaccagcaaatcgaagccgaatggatttcacagaacattttggaaatttggccatgttcaccagtttatgagtacggattcgcacaaaccaaggataaatgttacaagaaaatcccagtaaaggtgacattagttaggaaagacaagccaattctggcttatttggacccaaaaaccctcataataagtgcagaagctagaaaagttgattgtcagacagatcgctacaaacatatcgttcttgaaggtcgactttatgagattgatcaagttttaggtattaagagtcctgttaaggaaataagtgagatagaaatcagtaacaaaatttggaaatcagctgtaccgtcaacttctctgcaaatctttcgtcttttgatcataagtaatctgacagaaacacaaacaaaaatgatgagtgagttaaaggcgctgagagcaagtttttcagaatttccgttggattcagcttccgtgcggggagggtcgagtgagtcatgtgaaaatgatcactcgaaatttccagttttggaaacaaatgttttaaaattaataggacacaaaattttggcttgggaaaatttggtcaacgcggtcattctgctagttttagcagaatggatgtggaaaatatacaaaattttggtcgggaaatggatagaactagaggtgaaaaaggaagtgaaaagggcaacgaaaaaggaaattgaattaagtgaatttttgaaagataaaccaaaagagaaaatggaaaataatcgcataggaaaattaaaatcccaaaaaattccttttcaggaagtgatcagtggaagcgattctgaattcgacacgaaggcagttatgcctaggaaggtacggaaaactattaagaggggtcggcaaacgtaaaaacctaacaacgctgtttagcgtgtctttcgtttcttaatgggagtgtcgaaaatgaactatttatagttattttcgatttacaaattctttctatgttttctctcccccgggggatgttaagcaaaggactctctctcctttgcttagtctctcttctattggctgttcagtcattggtcttcagcgaccgccgcgaccgaacggcgctaatgtattcattttccctttttcctccttttttttcagcagaagcaacagtcagccgatgaaatcgccgtctttgccccctccctctctgttccgccaatctgcatttctccactgcacatccatcgcttcatctctgctcccccactgcttggtcatccgtcgtcccatctgccgtctcatccgcccccactctctctccatcgcacatcattcgcaccatctccgcctggccccaacgcttggacaatgccattgaagaacgacggacgaaagacatttcacatcgtttaa

SEQ ID NO: 64918 - DNA, 885 bp, Heterodera glycines
atgcgctcgcttcgctcgcgcacctcgcatttgctccgcgaatcactcaaaggggaggaagtgcgctgtataagaagcgatgccaacaaccattttctgatgatcatagttcgggcgcaacaaagtcgaaaaggttccgtcctgttgaggaccaaccatcgcacagcgaatggactcaggcaattcgaccaatccgtcctgttgaggacttgcagcaacatcagtccagctcaaatccacgtctccaccgccaacagcagtttccggtcaaggccgtttacgatttttggaaattggaaagtatcccgccaattccgccgttcatcaatgacagagcaccattttgccgccgtgtccgggttgaaaaaagagaattgctaggattttttaatcagcaattttacttttcgaatttcaacgaagcgtatgaattcgtcatccacgaaagaacctaccgatgtgtggagcagtattactgtgcccaaaaagcgttgtatctgaaacgtttcaacgcggcggatgcgattatgctggggacaaacaaatatggcaaaagaataagcgcatttgagatgaagaaattcgcaaatatgaacggggaggacgaagtgactgtccgagaatggactgagctcaaaattggcattatggaagaagcacttaaagccaagttttcggtgcccgatcttaaagatgtgctgttgagcactggatctgccataatttgcgaattatcacccgaccagttttggggggtgggttgtagaccgggactcatttatgacaaatggccaacagcggacatacaacagtggaacggttcgaacacactaggacgattgttgatgcaactcagagatgatttgaaggaggcaacaccaaaag

SEQ ID NO: 64919 - DNA, 144 bp, Heterodera glycines; identical to SEQ ID NO: 57282

SEQ ID NO: 64920 - DNA, 538 bp, Heterodera glycines
atggttttcttttcgcattatatgcaggcttgccattctccgacaagaattgcgcggaaaaggaaggcgtcaacggaacaatcagcagatttggactttgtcttggacaagagacaaacggtggaaatttgcatttggaaaatgaattaaatttcatggacaataattcagaatgattaaaaacattgcatttagttaaaaaaattgaaattttttttttttttttggtttaaactacacacccattttaatcaaaccattaaatgttttccagggttcaacaacagcaaagaaagagaccgattttgtggactatgttttgggcaaaaaacggaaacagcgacggcgccaacaaaaattttttacatcatcagaagaggaggagaaagaagtatggtgttggaataacatatcgggaagatgtgatttaaattttaaatttaccattttaaggagaatgagcagcattccgaagttggtggacaagtgtgatcttctatctcatctttattgttttgcttacaaatttttggcataa

SEQ ID NO: 64921 - DNA, 305 bp, Heterodera glycines
atggcgtcagaattggatcattcaccgtcaccctccatcattggctcaaacaataacagcgccaaaaggtcctcaagaagcgcagaatcttctgccgaatccacccggaaccgacggttccttgcaaatctacaagcaacactaggaggaacgggaaaatcgcaaaattcgtcgcctagaagagggaacaaaccgcgcaattttggacggaatgttttaccaaaaacagtcgattcgctggaggaagccttaagacttatcaatttatcagagggacgacgtttgcgcttcgctgatggacgtta

SEQ ID NO: 64922 - DNA, 397 bp, Heterodera glycines
atgacaagtacggaaacttcggcagatcgcctcgctgtgataaactcatcgtttgcggatggaccgcaaaatgaggagcagcgatatgatgggtttcaagtggagaaacagcggttcaacacgggtccatgtgcgagtaaaacactccctacacaatttgtgtgtttagaatttatttaaaaacaatttatgagaaaatcgtttttcttcagcatgtcgtgaccgcaagcgagtggacaagctcaaattgaccaattggacaaaccgaaaagtgctcattcttcacccgaagaacaacaacaccaacaacaacagcaaattgttcaacaagttcaagtgctcagcaacgaatcgtcagattttagtctttgttcggaaaaggagctcgaagtcttaa

SEQ ID NO: 64923 - DNA, 404 bp, Heterodera glycines
atggagcgcggacataaagatcccgcgttcgcgcatcgcagattcaaattgccgcggtcgcgccccacccatggtaagaaatttaaaaacgaaattccgagattaaaattattcatgagaaatttgggctaactctttccattcgtaacattgaaggagaaataaaacaggttgacatacaaaaggaacaaaatgaggatccggaaatgtcaattttaattcaattcttaaagtcaggtgaatttccaaatgaaatgctcaggcaagaaaaagacagactatcaatattggccaaagatttatgcatagagtctaatattctctattttcgtcagaaagacactaagccaagaatttacattccagcatcattaagggctcttatctttgactctttcccttag

SEQ ID NO: 64924 - DNA, 538 bp, Heterodera glycines
atgattactatcataaagcataaacaattttcaaagtcaccattttacaaattgttcttcatccgtgccgttgctgtaagctctttaaaaaaatatatttcaaaatttatttaaattggaatttattttaggatattcttagtttagtgcccaattccttgggcattttgcttccagcattctttggccaacaattgttgtcaatttacagcaccgtaccaaattgggcaatcgtcttgttaacctttttcacaaaaactttggtattccaagtctcaaacattgtgacagttttcattttgttgaatcgtttcactgcaattgcatttccattgcgtcacaaaatggtaattaatatttaaattaaattaattaatttccgttttttttaaatttttagctatggaaaaaacactttaggcatctgatggtgtttttgttgattgtaccaatgctaattacttttccaataatgcgaatgcgcacaatcattgttttttatgacagcaacagttttctcttagatgacaaagacccg

SEQ ID NO: 64925 - DNA, 390 bp, Heterodera glycines
atgagaaaaaagagatagccattttttggtcaagaattttttttgtttgcgtttcaaatatcgtaagattgtttgatagggccagacaagagaaggcaactgttggtaccaagtttgcggtaaaaaaatgagaaaaaagagatagccattttttggtcaagaattttttttgtttgcgtttcaaatatcgtaagattgtttgatagggccagacaagagaaggcaactgttggtaccaagtttgcggtaaaaaaatgagaaaaaagagatagctattttttggtcaagaattttttttgtttgcgtttcaaatatcgtaagattgtttgatagggccagacaagagaaggcaactgttggtaccaagtttgcggtaaaaaatgagaaaaa

SEQ ID NO: 64926 - DNA, 544 bp, Heterodera glycines
  unsure (1)..(544): unsure at all n locations
atgactttttattcgaagcatgtggcaatatcaataaaaacattcatgaatttaaaagtntatataagcagaaatgacttttttgtcggtgttcgttacctaaaaagtaattataaaaatatttaatactttaattcaatttttgattgaatgttgataaaaataaaataaaattattcttaaaactcgtcattcttaagactgaaaatccgagaaatagtttatcgtttgttgtagaagttgagcgggaccgcaaattttggcaaatccgggaccggcacttgcatggacaaatttattaatttcaaaataattttggatttttttatctattatctttgaattcaattaaattttaatcagctatgctgaatgttttaaaattaaaaatttaatcatacttttcgcaaaagttgataaggttttttttaaataaaaccaaaatgtttcagacatgagatttgcacataaaaaatttctttaaaatctatttaattttattttatttagcctaaattaaatgataactatatgtaaaaataaa

SEQ ID NO: 64927 - DNA, 785 bp, Heterodera glycines
atggcattccgaggcccaaaaatgtcggaaatcgaaattcagtgccatccccggcatgaaccagggatggcattccgaggcccaaaaatgtcggaaatcggaattccgtgccatccctggcatgaaccagtgatggcattccgaggcccaaaaatgtcggaaatcggaattccgtgccatccctggcatgaaccatttcatggatttacaccgcccaaacaagtatgctctccaaacttcatgtccgcagttttttatttattttcttgacaatactttttgatgtttataatgatatatctcaatactggtttggattaatgttttgctttctggataaatattttacaattttgcaccagtaaatttgaaagttgttagcgactatttgtccattttttgcacctaggtgagagttttttagaacctaaaaactaactgattttgacaggtgttagaaagaatgtgtttaaattttgaaaaacgaagttgcctgagactgtgagaatgacaaaaagccgataatttctccagatagctctctccagcccttctgatggagacgaacgattgtgtgtgggatcgtaagaacacatgaatgtgcaacatggcttaggaccaccaattaggagtcataagggaatttatttattcgttttgagaggcagctcacaatgagcccgaaataagtgagtccagaggcaactacttccttagcttaatgtgaattgccgcagaaaaacgctaaattaatacaagattagttaaataactattttttttaa

SEQ ID NO: 64928 - DNA, 645 bp, Heterodera glycines
atgaaaaaaataattaaaaaaaataatgctggtgtggtaagtgtgaagaactgtgttcctccaggcaaaaaattctaagaaaatttataagcatttgtagggttctcagcagtttccctgcaaaatttggtgagcttctgatcagtctagaacgttgggtgataaaatgaaaaaaataattaaaaaaaaataatgctggtgtggtaagtgtgaagaactgtgttcctccaggcaaaaaattctaagaaaatttataagcatttgaagggttctcagcagtttccctgcaaaatttggtgagcttctgatcagtctagaacgttgggtgataaaatgaaaaaaataattaaaaaaaaataatgctggtgtggtaagtgtgaagaactgtgttcctccaggcaaaaaattctaagaaaatttataagcatttgtagggttctcagcagtttccctgcaaaatttggtgagcttctgatcagtctagaacgttgggtgataaatgaaaaaaataattaaaaaaaaataatacttgtgtggtattaattcataaatattttttttcagaaaatgctctgaaacgcaccaaattttatttacatgttagtttaggcactctgatgctttttctatcaaaaagggagatga

SEQ ID NO: 64929 - DNA, 351 bp, Heterodera glycines
  unsure (1)..(351): unsure at all n locations
gattcggtctccccataaatctgggcgcatcggttcagggtactgcccngaaatccaaaaaaaaattttttttggataaaaattatttaaatgaactgactagataatatttaaaataggttatttctcttcctttcagtatccctgctaagtttggtgcgcttctgatcagtttctgaaaaaaaagttaagcctaaactttttggcctgtttaaaaaggaattaaaaattttttaaaatttattcatctccctttttgatagaaaaagcatcagagtgcctaaactaacatgtaaataaaatttggtgcgtttcagagcattttctgaaaaaaaatatttatgaattaat

SEQ ID NO: 64930 - DNA, 264 bp, Heterodera glycines
  unsure (1)..(264): unsure at all n locations
atgattgtattttgntgttttatgaagaaagaaaaagatatattttttaagtttgatgaganggaattggntngaagagttggggaataagngngataggngntgagttagaaaaaaaaagaattttgtatatttttngtttgatttnagtaataaatgggtaattttaggtttaagttttgaaatnttaaaggatttgtgggatggagangataggtgtngnaggggaaaattttataaaaatcccaagttttttcattttaa

SEQ ID NO: 64931 - DNA, 192 bp, Heterodera glycines
aaatcaagtgtgtttatgcgaaaaaatacaaatttttaacagtctatcaatttcgcgaaaacaattgcaaatcggatacattcgaggtgttcgggggtaaaactcattcgattatcggccaaaattgatttgtaaattgaaaaactgcattcaacgtcacaagaagtcaccggcgcatatttcatagattcc

SEQ ID NO: 64932 - DNA, 1053 bp, Heterodera glycines
atgtttattgccccattcactctaattctgtcaggggccactgggagcggtaaaacccaatggctaatgaaattgctgagaagctacgctgaacttatcgatcctccgcctgctaaagtattgtattgctactctgagatgaaccaatcagtcattgagctgatgaagcgcggaatcgagacacataatggcgttccggatcaagcattgatccagagtcagccgaaaccattgcttcttgtgcttgatgatttgatgcttaatgtagggaacgattttttggatttgctgttcacacgcggttcccacaattggaatgtcagcgttatttttgtcacccaaagcctgtacggacgtaatattaagaccgcaagggcgaacagtcacttcctcccccccccccccccgaaattcttttaaaaaaaactacaaacaaaaatataaaagaaaaattcctaggaaattttttattaagaaaatttcaagaaaaaattttttgaaaaatttttagcgatttttttggaaaaattttttgaaaaaacttatttccttctcgtaagttttatttaaaatcttaaaatatacaaaattaaaaaaactaaattcagtaaatctaatgatttaatttttttcaaaaatgaacgattttcttgatgtatttgccaacttcagggcccattctgttcggtcgattcggtttgtttgttaaaactttttgtaaatgttgtttaatttaaaaaatgttcatcataatacctaaaatccgtattattattatgaccaacaatttcgttttcgtcttttttcagacaaatcggtgccaaaactctcacgcatattgttttggtctaataactgctatggattgtttcggaatgcaaactcatcattgccgctggtacccggtaattatagaaaaaatattttttcttattttattatttttcttttttatttaaaattttgatttttcatattttaaaggccggcgcaactccagataacctacacttcccagtgtgtggcgctgcataaatttaataagataataaa

SEQ ID NO: 64933 - DNA, 266 bp, Heterodera glycines
atgtacaacaacccgaagagggttagcagttgaagaagcatcatttttataaagaaaaaattcaattaaattgaaaataaaaaagaaatttcagtctttaaaaacagcaaaaattaatgctcattaatattcaatgtgagcttatttatttaaaaacgcattaaatacatttagtttttagctttaatttattgaagagattttattatgtttttacttttcaaaatgaaatgacaaattttaatgctcttaaaaatggatttaaa

SEQ ID NO: 64934 - DNA, 435 bp, Heterodera glycines
atggtcaacaaacacattcagcccgaatttgcgtccgttgtgccggcaattggtgagaatggtttctcaaacctttggtggatctatttggagtggcaaccagatatggtgatgaagtaagagctttttgttttattttattttcagcatttccattttccgcttttcagccgcgtcgtgggccttgtcgtcctggccggcccgttcacaacacaaaccgacatccgcggctacgacgtgcgcatcatttttgaccaccacaacttggagcacgaaatggcgatgcacggctggcaggagtgtgtgccgcgcatgagcaacatttgtgccggacaaattgtggagttcacacgtctcaaagtgcgcgcccaaggtcacaatgcgaagggcagcgtttcccttcactctgctctacaaagcggagtcgcgctgtaa

SEQ ID NO: 64935 - DNA, 84 bp, Heterodera glycines
atgcactgcttgtgcgttgcttcgtgggatcatgtacttgtacgtgttcttacgttacttgctcagctcggctgtggtgttttg

SEQ ID NO: 64936 - DNA, 65 bp, Heterodera glycines
gaataaaatttttaaaatttttaattcctttttaaacaggccaaaaattttaggcttaacttttt

SEQ ID NO: 64937 - DNA, 2340 bp, Heterodera glycines
atgaaggaggaagaatatgagaagtttgaaggatggtataacgagaattttgagaccgaatttgagctaggttagagaaagtgtgttttaaataaaattttgtatttttttaggagaacagcttaaggtttactgtgaaaacgatgtggaaatactgatggaggcaattatgaagttccggcaattgtttttggatattactgacgggatggatgtgttgaaggacagtgtcacaattgctggggtcgtgatgaggatattcaggacgaaattcttgaaggacaggcacattccgatcatgccggagggaggatatgaaagggctgataatcagagcaaaattgccgtgaagtattttgaatggttggcgcaccgggaaggcataagggtcagacatgcggaaaatggtggtgagattaaattcggtgacctcaaagttgattgcgtcattggtggtcagaaaagaataattgagtttcaggttttcaaaaataaaagtcatccgttaatgtgagttctttaaggggtgtgcataccatgggtgcaaaaattgttttttgccctgggctgttggaccgaatggtttatgcatggaagagaattacagaaggacagagatgcggatggaagtattgagagaaatgtgtaaaaacttctcggtggaggaagtttgggtttgccaatttccaacagttattgattattgattgaacaaatttaggaatgtgaggtgaaagcggaattgaagaaaaataaggagatgaagaggttctttgaaagtgtgccggataagggaccgattaatccgagggatgcttacgcaggaggacgaacaatgcctttttgcttgtatgcaaaggctacggaagcagttgagatttcgatgtttgatattatcagtttgtacccctttgtgaattatggtaaaaatccgcttgcatttttaatattgccattcacttaagacactccttatcccgttggtgtcccaaaaattgtggtgagcaggaattttaatgtgaattggacggtgcccgacgatgtgccctatgatggactgctaaaggtgaaggtcatccccccgaaggaactgctgtaccccctcctccctgtgcacattgatgaaatgctcctcttcccaaattgtggtatttgtgcgagaaaggccaagaacgagtttgttacgacgaaggatgtgaaaaaatgtaaccatcggccagagcagagagcatttttggggacgttcacttcgattgaactgcggaaggctttagagctaggatatagaattgtgggattctatcgagcgtatcactttgagcaatttgacaatcaattgttcaaaggatatgtgcggatgttcttgaaaataaaggtggaggcgtcggggtggccggcggaggtgaaaagtgaagaggaaaagagagcattcaccgatatgtacaaggcgaaatacgatatctgccttgatcatgacaaaattgtctttaacccaggccttcgtatgatagcaaaattggtacgaaatacgcaaatattaatttatcagcaatgaaaattaaggggttgaacagcttgtgggggaagttttcgatgcgcaacacgctttcgacgagtgagatttttaacagcatggaacggtgggtcgcattgtcacaagacaatacgcttgatgtttcgacaccaatacaaatatgtgaaggagtagagcgtgttgtatatcgtaaaaaggaggagttcataaaggagcataaggtgtcgaatatagttttatctttgtggactacgagcgctgcaaggataaagttgtacgagtatatggagcaggtctacagggaggagggatgtaaaccactgtattgtgatacaggtgttttattataaacaaaatttccataaaattttatatttagattctctggcctttgctcatcggaaggggcggtgtccgttgaaggaggggaagtttttggggtaaaatacaaatttttgaaactctttaaattggctttaagggagatgactcgagaatattccgatagcgagattttggaatatgtgtcagctggtccgaagcagtacgccctgaagctcaggaggaagaaagatggggagatttgggaaaagaccaaaattcggggattcacgttgaataggtccaacaagatgcggtatgaagaattcaaggagatggtgttgggctatcaggaaggagtgaaaaaagtgtttcgttatccggaaaagattgggccgacaagggatagcaggatactctcaagggatgtaaagaaagaatatgggcccgtgcagaggaaagggattgttgatgaaaactttaat

SEQ ID NO: 64938 - DNA, 471 bp, Heterodera glycines
atgtcgttccaaaatacgccaaaagaagttcggcgtgcgagaaacacacgtcactttttcaaggcaacccctgacaagggaaagtgtctcgaaaagattgagagccatgtcaacgagcgagccaagtttggtataagggagcacgtaactagtttttatttcaaatgcccaccaaatgaagatgcggaaaataattttagaataattatcgataaactaatacaggaggcaaaggaaaaagaacctgcacaaggatggaagacggaaagaattttgctgaatttatattgtgctgctttgtctgatcctgttatgataccattgagaccactacaccaagtaacttcggatgttgtgctaaacgaatttatgcatcgtcagcaatcatttggcgacgtaaaccttatggacgaaagaatttctgtgatcgtgaccacttttgcatatcctctcaagtgatcttatgtgaaa

SEQ ID NO: 64939 - DNA, 514 bp, Heterodera glycines
atggcgaaaaaagcggagagtagcagcagcagcggtggtgccaatgccaacatcgataaacgggataatgatgacagtgatgaacagcatggtctgaacgaggaacaactgttgatgatggacaaccaaaataacaagaaacatcggtaggatgtattcaaatgatatcgagataatagaagttatgcgatactcgagacggagtgttggcttatagaatcaaacttttcgatttaaattttcaagaccgagtcttagcttaaagagacaaattttgattttccgacattcgagaacgagccttggcttaataaatgattttcgacttaccgatactcgagaatcttggctttatgaatgaaattttagatttactgatattcgaaaacagtcttggcttagagaatcaattttcgctttactgattttcgagaatcgaatcttggcttcgagagtcaaatttttaattaaccgaggaggcagccaatgtttggcttcgggagccaaaatttaa

SEQ ID NO: 64940 - DNA, 685 bp, Heterodera glycines
atgtcagacgaccgaaaagaggcagagaaaaaaatggcaaaagcaatgtaaaatcaaaatcccaatttcaattttgttttcccttttcttcagcttcatctccggcgacgcatggctggcggtgtacgatttgcttccgccatcacaagttggactgggaattgcgacgatcagcctccgttatgactattacgtggacgaacatctcaagacgcgaaaatggacactgaaatttatccgaattcgaagcaaaattggcgagaatggcacggaaatagaaattgtcaattccgatggaaaagcattgccaattccgcaaattgaagtgccacgcaaagtcatcggattcgaatacatcagcatctcgtaaaattgggcgcgattatgcaaaaatttaagcaacttttcccctttcattttcagttacatcgaccacaatgtcatcgcttttgtcaaccgttttcgtccaattttcgatgtctgtcaaatcaatttggccatccgatcggcaggtgctcgcgctttggagaacattaagaacaacatttggccaatgatcaaacgaaacatttgtggcattcatttgtgcgaagacattttccaccgtttgcgacaattcgtcccgtcaattcacaacggctgtccatatcacttcgctttgtctctttccgttctgaggatctga

SEQ ID NO: 64941 - DNA, 256 bp, Heterodera glycines
atgttgttcaaaatagaaaactatataaaaagggtaaacaactaatgtgaaaaatcccaataataatgtgccaaacatttagccggcgaatgaagctgcgtttcgagcagttgttcaagatgtggagaatcgggccaatcaagcagaggaagaaattgaggagcgtcacaaggaagaccgagaaaccatcaatgcacaacaacaagagctggaattgttgtatttgtgttcccgtttagttcgacaatttcggaag

SEQ ID NO: 64942 - DNA, 858 bp, Heterodera glycines
atggactcaaatctccggcattctaaacactgggactcactcaacccaccaactttcaatgacattccaatctctgggactcaattatctgactttccaatcgctgggactcaacccaccagcatttcactggactcaatccaccaacattccaatcaacgggactcaacccaccaacattccaatcactgggactcaatccaccaacattccattcaacgggactcaacccaccaacattccattcaacgggactcaacccaccaacatttcaatctctgggactcaaatctccggcattccaaacaatggactcaaatctccggcattctaaacactgggactcaacccaccaacttcaacgggactcaatccaccagcatttcaatcactgggactcaatccaccaacattccaatcattgggactcaatccaccaacattccattcaacgggactcaacccaccaacatttcactgggactcaatccaccaacattccaatcactgggactcaatccaccaacattccaatcaacgggactcaacccaccaacattccaatcattgggactcaatccaccagcattccaatcactggcactcaattctcctacatttcaatcactgggactcaacccaccaacatttcactgggactcaatccaccaacattccaatcactgggactcaaccctccagcattccaatcactgggactcaatccaccaacattccaatcaacaggactcaacccaccagcattcaatcactgggactcaaccctccagcatttcaatctctgggactcaaatctccggcattccaaacaatggactcaaatctccggcattctaa

SEQ ID NO: 64943 - DNA, 1190 bp, Heterodera glycines
actatcactgagtttaaacgggaataaactcgaaaccgaagctcgcaagaattgggatcgcttctacaaaagaaattcggacaattcttcaaggaccgaaattggacaaagcgagagattgagcaaatgtgcgcaaaagacatggaactgagtgtaatagtgaagcgaaaatgattgaggggaagaatgactcacgaggaaagggggacgaaagtgaacttcaaaaatggaatttaacccacgggactctctttctctccttttctacgccttttgcagcggaatgccctcctcacaaattcacaaatcaggcaacaaattccaattccgtggcctcgtcacttctcgggtttcggttatgatacaaaaaacgacctcacgttagtcgtggtttatatgtacgaaattcacccaactttctgcccaattcttttggttccaaagatttttctcggcctttactttttaggctcctttgactttgcttgacgccggttgcggctgtggcaacactttattcccattggccaaattcttccccaattggactttctgtggcgtcgatttttcctcaaatgccctctctttgcttcagcaaagggctgtacaaattggaactaacagttcggccgtttttctcattccattccatttcatttttgccttttcagttcataccgaattggtggatctgtcgggcgataccctcgtcaatttctcttcgcttcctaaagctgatctgatcactctgatcttcgttctctcctccatttccttggagcatcattcaaaagttgtccagaatttgagaaaacttctcaaaccctcgggcagtgtcattttccgcgattacggcgactccgatcagttgccattgacttttgcttaattgtttaattatagcgaattcagtgctatgcatcgattcaacacaaagtccaaaattgttgatcgtttcttcgctcgccaggacgggacaagggcctatttcttctgtccaggttaaacgaactgaaaaagaaaacccaaacatttccgtaactacaaatgcagacgaaacgaagaaattattcgaaagttgcggcttcgaaacaattaaaagcgaatacactcacagaataacggaaaacctaaaggagcaaattcgcatcgaaagaatttttgttgagggaagattcaaggcaccagcg

SEQ ID NO: 64944 - DNA, 1456 bp, Heterodera glycines
atgtcgagacctaaagtcttttttgatataaccattggtggaaaagcagctgggcgtatcgtgatggagctttattcggacattggtaaatcataaggacagttactaatcattttcatttttttaaatattaagttccaaaaacggcagaaaattttcgttcgctttgtaccggcgaaaaggggatgggaaagagtggtgaggacaatctagtataattatcttcaaaattttgtttttaggcaaacctctccattacaaagggtctaaattccaccgtgtgattccaaatttcatgttgcaggtaaaactgacaagttacaaaggatactaaaaaatattttagggtggcgacttcactcgcggtaatggtaccggaggggaatcgatctatggcgagaagttcgtggatgagaatttcaaagagaaacacacccagcccgggattctctcgatggccaacgccgggcccaacacaaacgggtcacaattctttgttacgactgtgaagaccgaagtgagtttgtgtgagaaatgcttatacaaacgccctttcgaagcacctaattattaaactatcgtatttcgatttcactaatataataaggtcatttggtaatttagtggttggacggtaaacacgtcgtattcggtcgcgtcactgatggaatggatgtggtgaaagctgttgaagctcaggggtctcagtccgggcgcgcttcgaaagacattatgatcgctgactgtggacaattgtcgtgagaatagggccaagaaaaaccggattttccaatgttatgaatggtattgaaacaagttaaggcaatctctaattttaattattgagggcgatgataaatttgtgatttattaatggccaatttttctatttttgttggtgcggtacaacaaaataaatacatgtccatgatcaacgacccttgtaaagaaaaaaaatcatcaagagatcccctctatgacttttcatcgggcctaataaactgcaaagtgctaaacaagcgataaaatatgtgaagtggaaaatcactctttcgctggtgccttgaatcttccctcaacaaaaattctttcgatgcgaatttgctcctttaggttttccgttattctgtgagtgtattcgcttttaattgtttcgaagccgcaactttcgaataatttcttcgtttcgtctgcatttgtagttacggaaatgtttgggttttctttttcagttcgtttaacctggacagaagaaataggcccttgtcccgtcctggcgagcgaagaaacgatcaacaattttggactttgtgttgaatcgatgcatagcactgaattcgctataattaaacaattaagcaaaagtcaatggcaactgatcggagtcgccgtaatcgcggaaaatgacactgcccgagggtttgagaagttttctcaaattctggacaacttttga

SEQ ID NO: 64945 - DNA, 971 bp, Heterodera glycines
tgctgcttctgctgccgggcggtccctcgggcgtcgcttccgccgcccctccggcgcgtccctccgcttcggccctcgtcccctccacggtcctttcgctgactctgctccaacttgcggtgttcttctgcttcaagtcccttttcatcatcgccatcttcacgcgtagtccgcgtcttctgtgcgttcagctgatgttccaatattgcacctgcgttttcctcattctcaacgcgtcgttcactttggccgccgatttcggtcagtcttttcggcattttttttgccgctttttcatcgtgccaatccctcccccctccctatttttttggcggttacgacgaacggcgcatttacgcgaagcgcaaccctttgcttattcgcttcgtcgctttcttttctttggcgttcattcccgttcaaatttacttgcgtctgatgacagttccggtgtacaaatttctgagggaccttcgcaaatttaggcaagtcaaaggaacatttgttggttaagaattttacatttggcacccaccacaacagacatgcaatttacaatgggaaatggcgctatcggaagagagtttacttcacttactgctcgctgatgatggaacaacagcagaagaatttggccaggaacattcggccagacaaagtccaattcggggaatgatcagcaattgagcaatcattgaaatgatcagggaatgaatggaagtgatcagagcatcccttaaggttgactcatcggacgaaggccaacacacactgctgacagtgacggacgaaaatggcagcagcagtgccgcggaaaggggcggaggcggcggtgccgcaattgtcgccgcgcctttgccacttccgcaacgaaaacgcaagaagaagcagcagcaaacggtgaagaagcaaaagaggagcaacaaaaagagggagaagaagcacacggaggaggaggaggaaaaggaaaa

SEQ ID NO: 64946 - DNA, 773 bp, Heterodera glycines
ggcaagaatgtcttcattaatcaagaacgaaagtcattggttcgaaggcgatcagataccgccctagttctgaccgtaaacgatgccaactagcgatccgccggtggatttattcgccctggtggggagcttcccggaaacgaaagtcttccggttccgggggaagtatggttgcaaagctgaaacttaaaggaattgacggaagggcaccaccaggagtggagcctgcggcttaatttgactcaacacggggaaactcacccggcccggacaccgtaaggattgacagattgatagctttttcatgattcggtggatggtggtgcatggccgttcttagttcgtggagcgatttgtctggtttattccgataacgagcgagactctagcctactaaatagttggctcattgcttctgtgggcacaacttcttagagggattttcggtgttcagccgcacgaaattgagcaataacaggtctgtgatgcccttagatgtccggggctgcacgcgcgctacactggcaaaatcagcgtgcttgtccttccccgaaaggggttggtaaaccggtgaaaatttgccgtgattgggatcggacattgcaattattgtccgtgaacgaggaattccttgtaggggcgagtcatcaactcgctctgaatacgtccctgccctttgtacacaccgcccgtcgctgcccgggactgagccatttcgagaaattcggggacggttagtgttccggcttcggtcggtatgcagactggaaccg

SEQ ID NO: 64947 - DNA, 478 bp, Heterodera glycines
atgaaaagccataaaatttttggtctcatgaaaatttctggcataggtacacagaaaccctgaaaattctgtcgcataaacaatcgcattcttattcattccttagatttgtttcatttgatctttggccctccaattttgtaaaaatttgttttatttcaatttttgactctcattaatttgtaaaaactgtcttctttttctgttcaaaattacacttttacataaaaaccccattttagaagacatattcactcgatcaaagaacggcttgacaaatatggaggttgaggtgaaacagcaagagggtttctatctgaaggcaattgtgaccgatgtgttggagaattcgctggacgttgtttatgaccgtggatgccgaaagccggaaactgtggaattcaggtttcaaactcagtgaataagagggcatttctaataaggatatttccatccattcggagggcaaatgaatgaa

SEQ ID NO: 64948 - DNA, 260 bp, Heterodera glycines
atggacaacaaaattgaccaaaatcacaatcaaaatgatattgttggacaaaacaaagaaacagtcaaaagaaacaaatccaataatgtgcgtacaaatttttttcgtataatcaaactatttcagaattttgattgaaatttattttaaattttatatattaatagggaatattttgagataacgaagttttatcaaagtccaaaaaatggagaaatctaaattttattaattcttttttgaaatttaatataaataaa

SEQ ID NO: 64949 - DNA, 464 bp, Heterodera glycines
atgacattccaatcactgaaactcaacccaccagcattccaatctctgggactcaacccaccaacattccaatcaacgggactcaattctttccagtgagtttattgcatggtattggccgaagagttggcggacatggaaatgctattgggtcggcgagaaatgatgtgcagtatacgcagtcgagattggacggcgcccacccagtttttgtgcgtcaaatggctgttcactcccaactgacagctctgcgtcaatcggctaaccaactatctggtatagcgacaaattcgtccgaacaccttgcttaaaaccctcaagcggagaacattctttgcatcaacaatccgcagcaacaaattggcaatttcagcagaatttgccgcggcaaacggttcgtagaattgacaatgtcggacatgacgattgcaattaccgttgtgacaggagaaacatatacgtag

SEQ ID NO: 64950 - DNA, 184 bp, Heterodera glycines
aagcaattaaaaaattttttaaatgagaattcatgcgagattttctggaaataagcttaatagggcctagttaagctgtaaaaaaaaatttggggtgatttgaaagagaatagaaagaaccaggttcgatgaagttttggtaagccaaaaaaaaaatccaaacatttaaaaatctattaaaaaa

SEQ ID NO: 64951 - DNA, 610 bp, Heterodera glycines
atggtccacaaaaccgggtgcaatcaacgttcatttaattgctcacacgtaattattagttgagatcggcacaaatggtcgatcggttattagggggtttcggtaaaaaaaaagtcgaaaaagccgaaaagaaaaccgcgacccctgcccatctcgattttattagcactaattaatgcataattatgcgtaattatatgaaaaaaccttaagacacgacgatttgggttggctgaagacggccgacgattactacacgggaagtaagttcaacaaaattgttttattaatattaaataaataattaaacgctatttttattcggttaaaagacaaaaaattatactaaaaaatcatgaaaaattcaaaattttcttgaagaattttttttttttaaataccacaattaaccgtatttaaacaaattgtttatcaagcttatacaaataattaaaaatacttcaagcccaaatatttgatcgagttttttaatctatttatgctttattaaagcaaaagctgcaattgttccggtcggtgtacagttcattctgaataccgtaattgaagagttggaacggtaacagattttttaattctaatcaataaa

SEQ ID NO: 64952 - DNA, 328 bp, Heterodera glycines
atgagcaattctggtgtagaagcaaggcgaaagcggaaggaatggcgccgggatcttggtcgcagtgttggttgaacaccaaaaagtgacgaaaattgaccaaaattaattttattttaaaaacactgcattttccagggctaaagcagaccaatgccgcgccaacagcagatggagaggggacatcgacccaagccactgaaagtgggccgtcaacgtcagcttctgaccttcgtaagtcaataaatcactattttataagaaaaacttaaattaaggcccgcgttcaagcccaaggccattgtcagcaactccgatcagacgccat

SEQ ID NO: 64953 - DNA, 1941 bp, Heterodera glycines
atgcaatttcttcgtcaacacaaaatttcgcccgaggaaaattgtaaagacaatcgcaactttttggtttcattacaaaatggtggatgcgaaagtgagaaagaacaaaaacaaatttgttctttggaatttctcctcactctggaaaaacttcccgaactaaatggaaatgaaggacgagagcaaatacggacatttttcaaaaaattttcgttagctaccgaagaatggccagaaaaacgccgaatttcagcactcgagtgcaaagtaagtggaaaggcggaacgtgctttcagcgccgctgcagtgaatcggccggcgaaatttgatgcaatacgaagcgaaatggagtcacttttggacgaatgggattgtaccgcaattcaagcattcaacgaattgtgggatggaccaaaacggcgaccaggcgaaaatttggaagaatttgcagaacgagtttaccaacttgtgctttgtgcatatccaggtttgccgttggatttgtacaacgattatgcggcaaaacacttcattcgtgctttggaaaatgccaaaatttcgattgcattggaaatggctcgtcgtccgggtttgagctacgacagcttggtcgcgttggctgtgcgtgcggaaatagcgcaaaaagccgcaaagttaattgcagaggatgaaaacgcacacatagcacgcagctttaaaccaaataaggcggaaaagacgaccaccgattgggaaaaattttacgtccgaccgacaaataaaagcgtctgttataactgccgtaaaattggccacatcgcgcgaaattgtaaggtcaaattcacttggaaaaaatgcggctttgaacaaaataacagcaatatgaattttcaaaaagagaaccaaagaattaggaccgacaatttaccgagagcaaaaattttcccaaaagtctccgcccctaaacgagcaaaggatggccgaaacgaacgcaatttgtcgcagaaaccgatagagtcagccgatgcttcaacaatttttgctggtctttttgcttcatttttggttgttgccaacgcgttttcgaatgtgaaggctaaaactcatagccgccgaatcagctctacggctagtagcagctcgaaattgccggcattatggaatccgttgaatgttgcatttgaaaaattgaggaaaagggaaaattccaaagaaaacggaatcaacagcaaagtgaaaacaccgaaagggaatggccaattgaggacaattgttttttcgaaggctggggaggaattggccgactcaacaggtccaacgacgaagttgttgaaagccgacacagaacgaaaattgtcagccgttgatggcacaattacgaataaagctgcgtcaagtcacgctatcaggcctgttcaaaattgtagttttcgttttttccgcacattttacaggtcaaattatgatgttggtctgtgccactgctgattgtccacccttactgcccctcgatggatttgaagcgctgaggacatcgctttgtagagggcgaggatgtcatatcattgttgatttgaattattttggcgttttgttttagtttttgtgaccctttattttttttttttttggggtatgtgtgatatatgtgctcttcctaaatttgtaattgattgctgtgtgctgttttattaattggaagtaaaagaaagcagtgaaaagagacggcgatttggttttggatttgggatacaattcccctttcccattggactattctttttcctacgacgttttttttcttgccgttttggtttttgtcattttttcgcgtcctcgcgacgacgttttattagctccttttagatatttttaatttaatttaatgtacttttatttaacctttatttttcatcaacaataattttattaattattaaatgtttcaattaacattaatca

SEQ ID NO: 64954 - DNA, 583 bp, Heterodera glycines
gtagtaacacggccattggatcgcattgaactcttttacaacgatattacggacccaaacaaagaacgttccttatataaacaacaattcattgaaaaatgttctgaaattggttcatcaccattgattgttctggttgtgagtatttcaattttcgaaaaatggcattaagcatccaataatcatttagcattggttcaagtaaaatgtttattaaaaaataaaatgttttacaggacatgaagacctccctaaagactgcttgccgtttgccaacacaggaacagatggagggatatgccgaagttctggagctttttcagaaaattgaaaagcgccattttcaaaatagcgatatcattcgcatggaagaataccaacatatgaaacgctgtaattaatgaatatttaaaaatttatatattttttgattaatccatttaagcacttttggtcaattcaaaggggggacaatacatacaaagtcaactaaaccaaagtatttagttctacagacagcaaacagtacagatgccagacaagcattggtcaaactgaactcggatttgcgtggcgtgcaagg

SEQ ID NO: 64955 - DNA, 846 bp, Heterodera glycines
atgtcaaaaagtaaaagcggcgaaagaatgaagaggaattatgataaaaaggctggtaaagcgaagaattttgaaaatggacagccgatttttgcgcgaaattaccttggtgggccaaaatggatgcagggacgaatcttagaaaagattggagcagcaatgttccgtgtaaagaccgcccgtggagtatggtgccggcattttgatcagctcaaagctgatttgacttcgacagctgacaattgtgatcaggagtccgaatcggaaagtgagacagatgcggaatcggacgacgaacaacaaccgcaaccaattccgattgggtgtccacgccaagaaattcggcagaaaattgcgcctgagggaggtgtgcctgatcaggcattgcgccgatcaactcgcgatcggaagaaaagggtaatttttgacccctcgtgaggcgcattccgctcaaagaagggggaaggaattgtagtgtttaagtggatattttgaattttaaatgcccacatttcccgcccattttactgcccataaatatggaattgtttccacttcctttgctttttccaccattcattttgtcatttaatttatctgcatttattatttgtcctttgacctaccaattttctgtgttttatttatttggaataaatcaatattccctttaactgttgctcggacacaacacaaacgaataatgttaaaaagaaataatatgattccatcaaagaaattcttttgttacgtaaatattttttatttattcagtgtcaattctcggaatatgtacactctaataattacttagaattacaaacgaataatgttaaaaagaaataa

SEQ ID NO: 64956 - DNA, 468 bp, Heterodera glycines
atgtcttcaatgaacgataatgtaacggtgcaaggtgaaagaaatggacctcaaacggatatcgaagctgtgaatactgacaaggtccaacccaaaccaaacacccgcagcatgatcaaaaaaagtcgctgggacaataattgtgcaaaacctgtgcaaaaggatgctgaagaagcgccagctgtcaaaaagaggaaagtcgaggacaacgagctgtggaaactcatgaagggaaagtatctattgggcttctacctgtgtgcgggtaatttttaaaactttaacaaaggtcatttaaaattttaagaggattggaacaagctgtacttcaataaaggaaaggtgctgcgcgctgtggatcatcagcacttctctgtgaactttgagatgtgcgaagattgcgcccgaaagaacatttttgccaccgatttgctggccccaccaaaaataaaaaaatataatgagtga

SEQ ID NO: 64957 - DNA, 802 bp, Heterodera glycines
atgaaaaaatatttttttagcagaaaagtgattttgtttcttaagattgcaattccaacaaatcaaatgggccaacaacaaaaagtgaatttgatactttcctgttttgggtcgacgcaccccaaaaatttaaaaaattccacaaaaacgcgcccaaatttacgcagtcgtaaagcattttttgggcacataaatgcaacaacaattgttgctaaaatctctttgaatggctcatcttgagaatattatgtgatatttgtgaaatttcgcgccgattttttttttgtttaatttaatttttggtgtgcgaccccaaaataggaaaacatcctgaatttagtcaaataattaatttatcattaatgatgattaaaatgtacaattacaaatagttaatgatccatcacaattttagctcgtcgaaaaagcgaaaagcaatgacaaggatgtgaaacttaaagcagtgactgaaattcatagaatgctcaaggacggctttaaaaacgatgccgccgtgatgctggtgatcaacgaattcatctcagccggcgtgttgggtccgctcgtcgaatgtttgtccatagacaatccgtctcatccccaactcgtgtccaatgccatggcggcactcgcaatcattgcgtcacgaaaagcagagcctattttggaactactaaatgtcatggattatttgaattatgggcgtacatatttgcggggcgacgaagtgaacaaaaatgttgcttccattctaaagaatttcatgcacaacgttagaattttagctcagattatgagataa

SEQ ID NO: 64958 - DNA, 514 bp, Heterodera glycines
atgtttaagccgttcaaattcatgcttttcattgcactgatcattggagatggggcagcagctatcactggcactgttctgattcagatagtaataatcctttggctccaacaaaaaatgatctttgcgctcttgttccgacgcaccctccaacaggtagtagaacacgtggtaattcataaaaaaaaagaattttacaaataaattttatttttagcgtccaggtataaggtgaatgattttttggattacatataatcctctatttattttatcctataaattgttaattaatggataattgacttcgaaagtcaagagcaagagtctctgctggaaccttacaaattagggatacgacaaatctcaacacgtaactcgaaaccaatacctttcgccaactgcctgtgagatgattcttgatttttcgagcagataaatttcaacattagctccacaaacaatgccattttctcggtaattcacctaagaaaacataaaatagtataataaa

SEQ ID NO: 64959 - DNA, 862 bp, Heterodera glycines
ctgctggccccgttttggaggcgttcggcaacgccctgtaattgcagaacaacaacagcagccggtttggcaaattcatcaaggtacgtattacggtagtagaagtacacggtattttttataattaaaatgacaaattaaacctacttttcaaaaaacagtagtgaagagtattaaaaaaactataaaaaaaaacatatttgaatttaaccgcatccatactaaattaagataaattttaattaataaatatttattatactattttatgttttcttaggtgaattaccgagaaaatggcattgtttgtggagctaatgttgaaatttatctgctcgaaaaatcaagaatcatctcacaggcagttggcgaaaggtattggtttcgagttacgtgttgagatttgtcgtatccctaatttgtaaggttccagcagagactcttgctcttgactttcgaagtcaattatccattaattaacaatttataggataaaataaatagaggattatatgtaatccaaaaaatcattcaccttatacctggacgctaaaaataaaatttatttgtaaaattctttttttttatgaattaccacgtgttctactacctgttggagggtgcgtcggaacaagagcgcaaagatcattttttgttggagccaaaggattattactatctgaatcagaacagtgccagtgatagctgctgccccatctccaatgatcagtgcaatgaaaagcatgaatttgaacggcttaaacatgcgatgggcgctgttggattttcggaaaattcgcaacaaaaaatttatggcatgatttcagccgttttactgctaggcaacattgagtatataaag

SEQ ID NO: 64960 - DNA, 2893 bp, Heterodera glycines
atgctggacaaattgaaccattttttgcgcacaaatgaatactacgaagtgccgcataagcgtgaagcagcattcatcattgcgcactatgcgggaaaagtgaaatatcaaattgctggttttcgtgagaaaaacaaggatctgatgcgccacgatgtggtcagagtttttatagtcaaacccaattaataaattattttaatcgatttaaaaaatcgattttttcaatgaaatttgtcaatcagaacttttgatttttttaatttcagaatttaaacattttaaaaatccttaaatttccaaaaataaatataattaattttatgaaattaatttttttaagtttactaatttggaaaacttttttaaaataacaaaactatttttttaattgtagatgaacacgttgaaaggcagcaaaagtgcctttgtgcgcgagttggttggtgaggatccgcttgcggtgttccgatgggcacttgtccgtgcaacattccgtgccgcgtatgcattccgcgcagctgggaagcggaacaaacgcgcgggtattttattttccaaaattcccaattttctgtatcatataaaatgatttaattaatttaaattttttttttgtaaaattagagacatttaggcagtgttgaccgctatgggacttcaaccgttggcaatcatggcattattggcacaaaaattaatggcgactgtgccaatggaagcccaaaaatgttgcatcggcgctcatcagactcgcggcttaacgcctttctgcgaggggaattagcgtaagtttggtatttccaacagtaactatttgatactgtaaaaataatatccctttatttttaatccaggcccagcattgtgcccgacttttgtgacacttcagtgtttaagacaattgttgagcgggcgagaaaggtgtgcgaaatttacctgtcataaggctattagcaaaataataaaaataataagccgactaataaatataatgttgatatttattaataaaaattaaaaaaagtttctgatttttaacaaagaaaaagctcgaaagaagcttaaattaagaattttattttttgtttgaggctatttttattttcttcaatttgtaagaaattatttttaattttattttccgtttttagaaaatttaagtgtcaaaatgatttataaagcatgtgctatgtttaaggcgccaaagaagccgcacaatgacaggttcagcaatttgagaacactacaacaactcaagggaatcatgtccaaaaagaagcagctttctaataagccaagttcggtaagaataatcgcaaaaaaacattattaattaaaattattgaaaaaattataattaataattaaacacaataataaaaaacatatttaaaatgccaaaaaaaggaaaaaaatcagtaaaatatcttccgaaggaaatggtttcataatgttcttccgctttttatattctttaaattcaatttttcatcacgctaaaaacattcccggatatgtttactttttgctaatgaatttaataaacataaaaattttattttttggtcagcaaaatttcaattagtctatttattccgattctttgttccggcaaaatttaaaaaaaatgtttccacaaattttatatttatttaattgaatctattttttttttcaattttaaattgggttgatgattgattattcgatattttatgaaatcaaataatttcttcgtgaccataattcggttttgattagaatttattctaaaaatttgattaataattaagcttttttgtgaataaatttttattcatgcgactttcaatgaattgaaaattcttaagtttttcaaattttaggttagccgccaatttggcgaatcgctatctcgactgatgaaaacattggaccgggcatcgccctacttcatccgttgcatcaaatcaaacaacgataaaattccaaattattttgatgacaacatcattttgcgccagcttcgatacaccggtatgctggagacggtcagaatacgacgggctggctacagtgtccgcattgaatacggggtactgtacaaaatacaatagaagcaacaatttgtatatttgataagatatattgttaaaaatttttttttagtctttcgcaaatcagtaccgtactctgcttccaaatggccataatgtaagttttggaattcgtaatttattttccgccaaatcattaaaatatttgaatgaaactcgaattcccgtctttgaccttgagtctcgaccttaataatcagaccttgcgaattcttgaactgttgtatcggattttatgctcatctcgagtactaggaaaatacgactctcgaacatttgtacatattagagaccggcaattcaatcggtatttttcaataaagttccgaaaaaatcgataccgaaaaacatgtgaaaatttctacatcaattttttaaataaaatatcgaaaaacacgaaaatttcttgatgggtttttttaattatcgtagtcatcgatattaatatcgactgataaatcaatcgtgccggtctctctctgtctttaacccaaagcgcctgacacctcaaatatatctctgacaggtcgaaggatattttttttgaaaattctcatttttagtcgaccaaggaagacatccaggagttcattcggtccatcccggtcatcgactacaacaatttacagtatgggaacacaaaaatttttatgcgtgacacggagaaattgttgctggatgaccacttgcatcgggtgataatgaagaacatcgtcacactgcagcgctggtttcgtgccaagttggagcagcaccgttaccagaagttcaggcagggcatcatcaaattgcag

SEQ ID NO: 64961 - DNA, 470 bp, Heterodera glycines
atgcttcgtcgagcagctagcacagaaagtgatcaaattcaacgggaagaagaccgaaacgctatggttaaggtgggggttatatgaaattcaaaaatggcacagatttacaagaaatttcaaagaattttttaaataaatttttgcaaattttcgcttgcacattttcagattaccaattccttttcaaaagtggcaccacgtgccaaaagtggttttatgaaagcgaagaagcacctgaaaactttgctgaccaagaccgggcgtcagggcaccacggaaggcacattcagtgaggaaagcctgaacatggaaggaccgtcttcgtcaacaagaaggtcacaaagtgtgaacaactccatggatagccatggatacaaattagaacaaatattattaaacaattattaaatacagaattttttggcaaaaatttttttgcataatatgtttttttcttggcacaaaaa

SEQ ID NO: 64962 - DNA, 1101 bp, Heterodera glycines
atggttagagtgccggacggagtcccggacataagcacgcttccgaaaggcaaaaacccgtataaaaatcagcttaatgcgcttctgtgcattgtctgtctgatttacaacgaaaaacttgaaaatgagacggattataacctacttaaaggcaaggaccatcttcaaaatatcagcaaaaatacttctttcccgggagatagaatggattctcaaaaaagtccgaaagtaaacggaaaaaatttgatgggaacggaaattaaggattttttgggaaaattcgacggaattgtggcacaattgaggacaattgtttttcaagggaccgaggaggtaatggagacggacaacatcgactttgccttgacctgggatatgcagtgcggcggactcggaccggagcatcgaaattgcgtccaattgacaaccgctgatttggacccagttttggagagggccggattcggactcaaggtggccgaaggcaggctgaagccacaaaatgcaaaatttgggcttaaggtcgtgggaaccccgttgaaggctttgttggccacttttctgttaaaaaccaacgccatttcttcatctgcagccggcagaaagttggcacaatcagtgattggagcaccagttgggttcgaactgatcactttcatcggaagccgcgaagaccaaatcaaaagtggccgaattccggtggaagaagatttggaggccatcctcgagaaatggaccgaatgctgtgcagttacacggacgaaattggcaaaatgtggatttggcgccatcaatgtgccaattccgcgctcaattgaagacctcccagaaggagaaggaaaaccgtggaccgaactgctcggaaaagccggatttgtgctggagaaagtgaaggccacgtcggtgctgcgcaaacaccaattcgttacgtcgccacgcataattattggagactcaagcgcaaagcaatttgaggacttgtggccgacttctcagtttattggcgccacccaaggaagtgtttggagatgtaattcgggcattttgacgcagtggccctgtcgtcaaagtcaaagtgggcgtgattataatcgggcgtga

SEQ ID NO: 64963 - DNA, 492 bp, Heterodera glycines
atgaccccaaaagtcggtccgcaaatgtcggtccgcaaaagtcggtccgcaaatgtcggtccgcaaatgtcggtccgcaaatgtcggtccgcaaatgtcggtccgcaaatgtcggtccgcaaatgtcggtccgcaaatgtcggtccgcaaatgtcggtccgcaaatgtcggtccgcaaatgtcggtccgcaaatgtcggtccgcaaatgtcggtccgcaaatgtcggtccgcaaatgtcggtccgcaaatgtcggtccgcaaatgtcggtccgcaaatgtcggtccgcaaatgtcggtccgcaaatgtcggtccgcaaatgtcggtccgcaaaagtcggtccgcaaaagtcggtccgcaaaagtcggtccgcaaatgtcggtccgcaaaagtcggtccgcaaatgtcggtccgcaaaagtcggtccgcaaaagtcggtccgcaaatgtcggtccgcaaaagtcggtccgcaaaagtcggtccgcaaatgtcg

SEQ ID NO: 64964 - DNA, 272 bp, Heterodera glycines
atgccgaccaaaatagtgccatcccacctggtgcttctgctggagctgcttcctcctcccttttgctgtgctgttcgaagtcggccgtgtcagtcccttgctcgcgacggccgttgccgctcggccagcagcactggtgttgttgtgccgattgcacgcgactgctacagcccgtgctgggcgtgtgctgcagcagcaaaccgttggcagaatttgaacggtgtaattgtcgaggattatgctgaatggggtgggagtgaagtggtggtgag

SEQ ID NO: 64965 - DNA, 945 bp, Heterodera glycines
atgaaaagtcgacgggcaaaagccaagggaaggaaaggaactgatcgaaaggttgaaaagcgtaattggtggagaaatgcaagaaatgcgcactcaaaaaacattgcttgttgttttgagatggtcacttcttccgtttgctccgccccaactgcgcttggaaagcatcgcaacccaagcggcagcggcagaagcgccccgtcgttggccaacgcccccgcggcgacgaatggacccaaaaggaggggccgaaagcgaattgtgcagcagcaggtggagcaggagatgaacaacaaagacgatgggcaagaagggcatcagacggagcagaaggaccgaccgaaggaggaagcgcaggcttcggacaaaccgacgaagcaaggaggtgccaatcatcattttgaattggcaatgccattgttaccgggttggcattccgtcagatggcacccctttggcctcttccgacagcggaatttccgagtccaacgcggcggaggaaggccttttgtgcacaaatgttgtggtgacaacaatggcacggcatcagcagcagccccacaaccacaatgtgaacaacgcccatttgacatccatcgcggaggaggagccgaatggggggacaccgccggggaaaggcgcgagcggtgccaaaagttacggcacgccgaggcaaacgcaacggacgacgaacaaccccgttacggtagtacagtagtcataaagaaaattcatttggttgtttgtgcagtcgacgagtgctggcgaagcgttaaacggcaggacaaatgtcgcggggacaaagcgccggaggggacggccacggaagaaacaggcggaagaagcgatggaagaggacgaagcggaagagagcagcaggagaggcatggaagaggaggtggaggaagagccgatggaagaagtacggcacggaaggacatttaa

SEQ ID NO: 64966 - DNA, 735 bp, Heterodera glycines
atggaggaccaagacaaacaaaatcaacaggaaaggaatgataaaaacgacagccaagaagaaccagaacaaaaacacaaaaatcaggaccaaggtcaacaaccacaacaacatgagcagcaacagcatcaaacttcacaggatggcaatgggcatgcgaacggcgatttattgagcagaactttatcaatgccggcccgtgtgactggctcagatttcgtatcagcggatgtgaatgaagtgttggaggatgcacgacaaattatgacaaattcgcaccaacgaaaagacgaccatcatcaaaatgaacaagtgttggtcagtcagtttgatgatgacaatttaaatatgggaaagctaaaaaagcgcaatttgttaggacgaatcaatgcgggtcaaagtgacgaagacaggaggtgacgaagaccctttggaagtgtcggtgtggcggtcaagactgctcagacgtcaggccgaagaagaagcgacggaggctgctgatgctgatgcgagaggtaattcaggggggggagataaagccaagagggaaaagttgggaggaaaatgacaaacatggcataaatgccggtaaatgaccaaaagggaccatttaaagccgctttaaaggacccctcatcagaggaatgaatttaaagggtttgaatacaaaaacgaatctttcgccaagagaaatttgaattaaaaaaatgccaaatttcacgcaaaagtccccga

SEQ ID NO: 64967 - DNA, 178 bp, Heterodera glycines
atggctatgagcccggtcacagcaatcgaaacatggattatgaaggtaataaaaatttttaaattaattaatagccatttataaattacttttttttacttaggctatgcctattatggagaatatccgttggcgtttgcaatttgtttcaaaaacatctacatttatgacttgctga

SEQ ID NO: 64968 - DNA, 660 bp, Heterodera glycines
cagttccctgtgccaaattcggcttcttcgctggctgccactggcattgccaacactagcagcaacaacaatggcacagagaaagaagcattgtccggcactgaagaaggcgccagtttgtgccactctcgcggatatggcacggaaacaccattttcgacaattgtgccgtcgtcaccatccgtgtccatttcgaactttgagtgggtcgaagacattcaaatcggcgatttgcccaaccaaaatgaatcatttgcgcgggtgccatcccccgccactcctccgccattggcaccatcggcactgagcaaagacattccattcgatgccacttttgaacattttcgggtgccaccgcccgccactccgccgttgtcgtcctcgtcgtcggtgctgacaatgagcacaactgcagctgaagacagtagcaattgttctacgatcttttccacaacgacgacaccaaaagccgatgcaattgacaacgaaaacagtgccaattgctatttggaccgattcggcaaagagtggcgtttgctcgtcgaagcggccgccgatgtcaaacagttagaccaaattgcgggcgaacattgtctaaatcgcaaagggccgacgaaaaatgatgggcgcatttacttcaagtgggtgacgatgagctga

SEQ ID NO: 64969 - DNA, 55 bp, Heterodera glycines
atgcaaagtgaagcaaacaagcaaaaagacggagatttggttgacaaacaaaaat

SEQ ID NO: 64970 - DNA, 723 bp, Heterodera glycines
atgcgtgcccaattggcccagtcgcttctcgacggcactgtccattcaatcgtagactcgctaaaagatttgcaaacaatccaagaacagtaagtgaattaaaatggacaaaatctgtaagattagcttaacaacccaatggaggtgaagaagttttgttagtaatttcacattttttaagacattcatttcggtttcccttttcgtcggaatgttaaaaaacaaaagataaaattccaattaaagttctttttgttaggctcatttctttcacaatttcagacatttgtgggcacaacgtgaagaaaaaccctcacaattaaattgcgatggaatttctgatgagaaggaacgccagacaaatgaggacaaagcgattttggagcggattgaccaggtaaaaaagtatcaaagaacagacagttttttacatcgcaacagttttttgcgcttttttccaagaaacttctgaaaattggggttttatttgaaagcgatttattgttactatatttccatttgtcagattgcgcacgagcaacaaagcactttgatctgtgccggtttgcctctgttcaaaagttcggacgacgcgagcgatttgcgcattcaaatggcactcatccaattcattctttcgctgggttcaatttacagggattgaacggccaccaaacaatacgaagggattgggagttccctcccaagcacatttttaataaa

SEQ ID NO: 64971 - DNA, 1439 bp, Heterodera glycines
atgcttctctccatccttctcaaacagatccatgccaccgacgtgaccaacgcgagtcgcactttgttgatggatttgcagaaccgcaaatggtctacagaaatgtgcaccttttttgacattccgatcaatgttctgccggaaattcgaagttccgcagagatttacgggcaccttcagaaaggtcgtgttggaatatttggtcgaattagccaatttgcatctttaggacctttggaaggcattcctttggccggctgtctcggagatcagcaaagttttaagcttttgttggctttaaaccatttctgacccccaaggtgctctgcttggtcacggctgtttgcaggcgggcgaagcgaaaaacacttacggcaccggcacttttatgctttgcaacacaggacaaagggcgtacatctccaagaacggacttttgaccacaatctcttaccaagtggacaaagtcgcccattagaaggtctcattttccccaattcgttcagttcggccaagcgtcgcccgtttgctacgccctcgaagggtcggggtccatcgggggaaacgtcgtccgatttttgagggacaatttaaaattcttcgaagtaatcaaaggaacatggctcttcatctcaatctctaacgccctaatttcgttcagaaaaccgcggacattgagggattggccgcgagtgttcccaacactgaggacgtttatttcggtaagtcttggcatttgccaattgtttcggtttatcggatatttgccatttcctctccatttctggtaatgcttcttcgtccgttcagtcccctgcttcaccggcctttacacgccccattgggactcgacggcacggggaatcatttgcggactcacccaaagtgccacccgagcgcacattgccctcgccgcattaaaggcattccaaaaataattcgggatgttcaagaccgacttgttcactttttcaggcagtcgcatttcaaacggtggaaatggtggaggcggtcgaggcggatatgtccgatttgggcgcgactgtcctttcgcttcgggtttttgttcaaatcgtttcacgaatgaattcaatgattaaaggctgacgggggaatgacccaaaatgcgctgttcaaccaaatccaagctgatctgcttgggctcctcttggaatgctccaaaatgactgaaatcaccggatggggcgccgctttggctgctgcaattggggcgggacagataaagtgagaaaagggcaaagcgaaatgccaaagatgaaaaacgaccccatttaagtgcgaatacaatgatcgaattgcaacaacgcattcgaccgcaaagcacaatattttaccagccaaaaacggacgaggaacagagaaagaaggaaaacggacggtggaaagaagcaattcggaaagcattcagatgggcataa

SEQ ID NO: 64972 - DNA, 255 bp, Heterodera glycines
atggaaagtggcgaattgttcaccttcgcttttggcgcctttgccatcgctttgattgccctcgtcattatttattacaaatgcatcgaccgacgtttgtgacaaaacatttgaaaaaaaaataaaataaatttaattatttaagcgccaaaaaaacgattttattaaatgggcacaaaaaagagaaaattgaagaaaaagccgacgaacagaaaaaaggaaaagcgacgagcaaagaaagaaagaaaaagcaaa

SEQ ID NO: 64973 - DNA, 1200 bp, Heterodera glycines
aggtcgtttatgtggcaatgaattggactgatgggttggcaattggcaatctgtgcaaatctcaaaagcatttggcactttccactctctcccaatttgcggccgctttcaaaacgaattttgtttccaatctgtccaaatttcacagcttttcaaactttaacactttcatataaagtgacagacgaaagcaaaaaatgaaattcattaaaagtcggaacgatgaaaagcctcacgacttttgtgttctttttgataattgccgcacttccgccgattgtttctccaggtaaaattattataattatttaataattggcaactaatatttacttgtagttaatctgattttgttcagcccaatctccgccttatggccaacttcaaattaagggaagcaaattaatgagttcgagcgggaaagaaatcgtactgagaggtgagcgaaacgtttctcgaaaaattgaaagcctttttaggaatgtcacttttttggagccaatgggacccaaagtattggaacgcggaaacagtgaaacaattaaagtgcaactggggcataaacatcgtatggacaaccaaatgaaaatatttcaaaatatttcaattaattaagctccgcgctccgatgggcgtcgagggaagcgacggatatttgcaaagtgcggcggcgagtgctgcgaacactcaaaaactgatgacaattgtggacgcgtgcataaacttgggcatttatgtgataataggcgagttaaacaccatttaattggacgggggaaagtgttccattaagattggcattatacgagtgggaaagcgtacacggcacaagcggtggactttttcaagaaaatggcacaaaaatatggcaaaaacccgcatgttttgtacgaaatttggaatgaacctgttggggtggactggaacaaagtgctgaagccgtaccaccaaacagtgatttcggtaagacaaaacggaagggaagagcaaatgccaaagcacatttggcaacaatcaaaggcaatccgtgccattgaccccgacaatgtgatccttctcggcacgccaacctattcgatggatttgaacccagtgatcagcagcccaatgggcggcctaaagaacattatgtacgttacgccagtattcatttagacaataacccaataaattagtgacaaaaattatgccgaaaaaatc

SEQ ID NO: 64974 - DNA, 521 bp, Heterodera glycines
caaaatatgctcaaaaaggcaatcaaaagcggattgccggtgtttgtcactgagagcggcgccggctcaggcggaagcaatgcgcccgttaatttgccagtaatgaaccaatggtaattagcagtaatgggcaaagagttggcatctttcccattgtacaggtggtcccttttggagcagctcaaaatatcccaaatcatttgggcagtgcgcggagagggaaatttacaaaatccgctgaataaaaacacggcacccgcaaacattggacagaattgggcactaacggaatacggaaaagtggtgaagaatgtgttcacgaagaacgcaaagccgattgggtgttaaggggagagaatgaaaggaaaggaaacgaattacgaaaaagggacgaaaggaaaagccaaaggtacgatggaaattaacagaaatgagctaattacaataacaaatgtcacattaacgcatcaagaaataaaaatagccaattgaaaataacaaacactcaaaattaccaaaaa

SEQ ID NO: 64975 - DNA, 1940 bp, Heterodera glycines
atgtacaataactgtggtcagcaaaattccaattcagctacagacgaattcattcaaacagcgaaccaacgacagttccaaacgcacttttgcggggcgcaaaatgagggagacagagcgatcggacaacgacccccaatcggcgggggaaatgtgagtgatcggagcggaaaatacaaagggatggaagctgatcagaaaggagcggcgggagttagcaaaaggactgagagaaaagcatggaagtgagagaaaagggataggagtgatcagaaaagggacggaagtaatgaaacaatgaacggaagtgaacataaaaggggtaaaagcgatcagaaagggtgatagtgatcaggaaaggatgggagagatcagaaaaggatagaactgataaaaaggggacgaaagtgatcagaaaaaggggaaagaagtgatcagaaaaaaggacagaagtgatcagaaagtaaataggagtgaatcaaaaagagacgaaagttatcataatggatagatgtgagagaaaagaaaatgaagtgatcagggagtgatcagaaatggacatggaattatcgacgctttaatgcttaagaatgcattggtgccattggacaaccgacagacaaacttttaccagcagacaatgggcggagttggaccaatgaaaagggcgtttagtgaacacgaaaatgttgatgggagaagggaagggacagacgaaaaagtgccgaaaaggagggggggggggagggaatgaaacgaacgaaatttaggagaatcagcagccaatggccaaacgtatgcatttgtcagtcacagaaagtgccgaaacaaaacggcacaacgacgggaaatttggagagcacggggaaaaggaggaagaagaggaggaaaaggaagaggaggaggaggagggagagggagaagagggagaaaacagccgaacgacaaagtgagggaggggcgaaagatagtgccacatgcgcttttgcaggtcgagcagttcggcagaaaacgaagagccgctgggctgctattcgtcctcagcggggcacccgcagcagtcgcacctttcggcccatttgatggccacgccgctccaacggactcagcacacatcggcttcgattgtataccccgaatttggccagctaaacacgccaaatggccaccgtttgcagggaaatcctttggctcactcgactccctatttgggcgccctttcgctcaattccttcccgcaacagccgctggactattggggcaattgcttcggttgttcgctgccattgaactcattgacctcctttagcaggaggtgtcgcgctgcatcagcagatgaactcccatttttcgttgatggcttccaacaaaaacatcgccgcggggggtgcctttatgccgggccacgcccccctgggccaattgacgccgtcgtcgtccgcttattacagtaacccatacggaccacaacagcacaatgtacgaagggatcaatttgagatgttgctgaagatggatgctcattcgaatttttcagcttatggcaccatttggggaaatgacggcaaatggcggcggaggcgttttttcacagcgaaatgtaaaaatattaagcattcacaggatattaacctaaggccggtccaccatttccagcagagtttccatcccattttgcaaaacaattcgtccgccaattcgccgtttcaaagccggcaattccatcgattaaaattgaaaaatgattgagcaatttcagtgacagtggcgtaggaagtgttagggcggagttaaaaggtgggtttttgaacacggagagtacacaatgggaagaatcgcagaagaagggcgaaatgagacgaggagcagcacgtcgggagggtcggacgaaagcggaagcagcggaagtgccgtgggactcaattggctgcgcgttgggg

SEQ ID NO: 64976 - DNA, 629 bp, Heterodera glycines
atgaagagatttatcaccccggctaacaactactttttgaaattgactccggaaaaggaaaatgaggggtttgttgaactgttttattattattcttattattatttaaatattattcattaaatatttaaagtgtaggagaagcaaatgatgtgggtggaaagaagaagaagccaaaaattggaaatgaggacgaaaagagcactgagactcgtaaggaggaacatcaacaacagcagcaagaagtgcaagcagatgaatcgcctgcaaaagaacgaaaagtggaggaccgcgagttgtggaagctttgcaagggaaaattcatgctttctacctacttatgccagggtaattgtataattatacctataaatgtgaaatgacaatttttaagatgactggaaccatctttaccacaacaagcaaaaagtgacacgtttggaaaatggacgctactccgtcagctatgagctttgtcccgagtgtgtgtgggcaaactgtcgagcaactgaccttgtggcaccaatgaagaaaaaaggaaaatgaccaaaaaataataacaataacgaacgattgattgattgaccgatttattttgctatttatttttatttaatcgaattaatgta

SEQ ID NO: 64977 - DNA, 1548 bp, Heterodera glycines
atggagagtgagcttattgctcaagtaaaggaatactgcgacgccttcctgtcattgaaagtccatgttaatgacttgaaaaacatggcaatcaatttgtcttcaagaacagaattaattgaaaagtgggccaccaattcggtataatattagatattttacttttatacacttgaataattttagcgctatagcccatacccaaaaggaattggctcaacaatggcaccggcagttatgcgggaatcatttcaactgttaaagcaacagtcgaaccaacgacaacaactggaacaacgaattttgcgcgacggcaatttcgaagaaactgtcatgcgcactgcgattgcgtcactgaaaggcacaatcaatgcggcatcggctgcccaatcatcatcaccaacgccacttgatgatgcaccgacttcatcatcatcatctatgccaaaaattgcccaaaagcgcaaatatatggccaccgatggtctgttgtcggaagaggacaggggtaatttgattttaatttgaataaatttataaataaatatttttcaaaagaagtcgccgccctcgcacttgctgccttcaatcatctgaaggtgcacattgagcagaaacaacaaactttggagctaaaactcaacaaaattgagcatgagtcaaaggcaaagagcgaatggcagatgcgacaactgatgaaatcattggaagcaaatttcaaactacagattatgagtatggagcaacggcttgacagaaaatggtcagcattgattggaaaagaaaaggaaagagctcagcgaatagcgacacaggcggctacggtgatcggtgagttgattgcggaaggaggaggaaaggggaaggaaaaacaatgcagtggagtgatgtggagtgacaaatgtaagtggtgtctggatgctgggaatgtatgttttggatcatcaaactgtggtcatgcttttgtttgtcctcagtgttctattactattgcgggatctgatcaaccaaaatgtctcacatgtttttgtgaatctactgaatttgtgtacttaggtatggaaaaataatcataaaaaatgaataattttttttaacttaatcagcatttgttgtttttatattccttaatttctaatgcattaattaatttatttattttgtccatcatttactttatcatcacttattgctttttattccttaatttcaaatgcattaatttatttgtattgtacttccatttatttaatcaacatcttttttattccttaatttgaaataatgttgtacaaccttttatttaatcaacgtttattgcttatgtatttcttaatttcaaatgctttaattaatttatttgtattgtgcttgcatttatttattcatcatttaacttgaaaatgtaataatttaattatttgattgtccatccatccatccatccatcaatttacttaacatcatttcaaatcattcattcactgctcttcctcatcaacatctttatgaccatcctcgctaacacatttcgccatgcaattggga

SEQ ID NO: 64978 - DNA, 416 bp, Heterodera glycines
gtgtttcggaacggatgtgaaattgaagacatggaggaattttggaaacaagcgcaacaaatacaaacggacaatcacgaattgtccgaaagagtgtcttctttaactcgagaggtttaacagatggggaaataacaaaaaaaattacaattacagcacaaccgaattcttgtcgatcacaacactcttcgcaccgaacatgaacgaattcttgtcgatcacaacactcttcgcaccgaacatgaacgaattcttgtcgatcacaacactcttcgcaccgagcatgaacgaattcttcagcgacagcttgacgatttccactattgggtgagtattgctaaaatttaaaaccatgacagaagagtttaataatttttgcaaaattttagattctttgtttcgccttctttatcccg

SEQ ID NO: 64979 - DNA, 275 bp, Heterodera glycines
atggcgaagtaggcaggcgaaaatcagtgccaaaaaatgcaaaaaaataataataatgttcgtgtattttatttcagtagaaaactcgagaatcgagattctcgacgagttttgatcagtgaatttttaatacaaaaatgttccatcactagtgatcataattccggattccgaccagggaactctgaacaaaatttgtacgaagaaaaactgagactttcatgatagtatcggacttcatgctcagaagaggaacatgagttttgatcaataaa

SEQ ID NO: 64980 - DNA, 244 bp, Heterodera glycines
atgagaaaattcattcggttctaattaaattttgttattacatttttattttatttttcagattggcagttttaacaatagatgaaattatcttttttaatgaccaatagtcaaaaattgtttcacaggggataaaatttaacaaatttattcgaattaaattatcaaaaattaatgaaattcctaatttagtaataatgctggaaatatgttctgtatgtattccagcaatgtgcaaaataaa

SEQ ID NO: 64981 - DNA, 827 bp, Heterodera glycines
ctcatttgtccattttgccgtttcgatgtctccaccaaaacgtgccaaagtgtcagccgatgatgatggggagacaatttccgacgacggggagccatcaacgtccgcgggggcaaagcgaaagcaaaaggcgtcgaaaccacgccaacggaaggcgcatgaggcattcattttgctggtggacgtgggccgttcgtctgccgaaaactcggcgggggcacagagcgatcacggcaccaccactgacctcgaccgatcggtgcaaatcgtcgattgggtcctttcacgaaaagtgcgaatatttatctgggaagcggggcggaggatggaaaaatgttcatttgcaaaaaagaagggattccttccccatcccctcgggtttttctccgcatttccatgcctgaacaaaagccacactttgctttgtctcgacagattttcaccgaatcctccgatcgcttctctctgatgttcttcggccacgaaaacacgtccagcgacgaccatccgaatgtttacgtgcacaacgaacagttcgccacggcgcggatcgaatggctgcacgtgttgcagaacgaagtgcagacgaacgtcaaatgccccggcgattgtctgaatccgttggcactttccgcattttccccccaatttcagacgtcgacgccctttacgctgcgttggacgcactgaaagtgcactttgacgacgcaaaagaggcgggcgaaccgatgagcggagcgacggtcactttggtgagcatttgagcggattggacgacgagcgggcggtgatggacggagtgggtgacatcgcggccggctttcaag

SEQ ID NO: 64982 - DNA, 592 bp, Heterodera glycines
gaatccggaaactggcgaactgcgcagctgtggcactgctgcagcgctgcatggcgaccttgacagcgtgcagcatggcatatgcccgtcctcgttcgtttgcaagcgtgacgtgcagcgacgaaagcctgcaacaaaaggggaggaagcgccgcgcgtatgctgttcgccaatcgcattttgccctgatgcgcgactgccgcaggtcgacccccgcactcggcatgcaaaacggtaagactactttaactaccgtaatccatttaattgagaggcgaattactgtgggtacggctcaattatactgtaacaatatcccaaattttcgttatgtctagctgtttgtctgctgacgtcaaagcatcgccaactgctggtgcagtgaaaaggcatcaccattactatggcgatagtgacaatgattatggtaactgtaccccaccgtacacctgccagccgtctaccgtatccggcatttttgtgtgctgtaaggtgccaccgatgacgggaatttaaggtcgtaattacatgacctctatttcgacccattaaattttttgtaaatgtatgccaggggaggttattcaatcga

SEQ ID NO: 64983 - DNA, 994 bp, Heterodera glycines
atgttcaacaaatcatcaaactacgataaggtcctccagcaccttcctccacgtgaagactactgtccaaatcaaatgatgaaaactgacctccaaaagttcatcacctggtataataacaactgtcaccaaaaattcgacctcaaagaaaaactgcccgaatactgctgtaacgacgtcctaatcctcacccacgccctcgtggaactacgtcgggaattcaaacaacttacacaaagggaaggaaaacacggaggaatagacatcctcgtggcaagccatcgacgatcgccaaagcttgcatacttaactttgcactcaacctcaacatccagacggcacactcccggtacggcgaatacgttttcaaaagagaagggcgggcaggtgtaccaagtggacggctacatcaaaggcacaaatgggaagcgggacaaaataattgaagtgaatgggtgtgtctggcatgggtgtgaggagtgttttggtaatatggatgaggagacgctgatgccgaacggaaagaaactgtgtgagataagacagagggaaaaaaagaagcacgaaatgctgaggcgctatgttgacttagaggtggtgtgggaacacgaaatcaacgagcggttgaaaaaagacaaaatgatgaaacaatttttcaacaactggaaggagaattcacccatcaaaattcgggacgcatttcatggaggaagaacagatgtgaaaaaactaattcacacaataaaaccgggacaaaaaatcagctacaaggacttcaccagcctctacccgtggaccaatttttcaacaagctacccgctcggacacccaaaaatcatcaacctgccacaaaatgagcaaatagtcaactggcgcaaaccatcagacaacacctacaaaggaattttaaaagttttacttctgcctcctaacaacaacctcagcgttaccgtaatgcctgtaaagttcaatcagcgcctactcttcccccttt

SEQ ID NO: 64984 - DNA, 1089 bp, Heterodera glycines
atgtcgaacagtttcttcgtgtttttgccaagcaatgtaacggattacccggaaaatcaacccaataaatttcgtgttcggctccctaagcctttgcattttaatggtacatgggtgtgcgggctgcacagtatcagttaccccttctcatggtcaaccattggtacattggacgaacagtggattgacattcacttcaccgaccgcaacgctcctgatgaggacaaacagcgagtgattagggtgccggtgcccaaggcggcacataatagagcggaacagctgaaagactttttgaccgtaacattgcggaaccatagcgatgcaaaactactgccactccctcgtgaagtggagcaggatcggaatcgcacaaagcctctcgaatctccaccaccgttaaagagagtcaaaagagataccggcaccataacaccgtcacaaccaccatcaccacaaccaccaccaattttagatgagcatgggaaaccgctcggttctcccccaaagtacaaagaaggggaggaaaatgtgattgattcgccgcctctttatcaagaaacacaaaaagatggtgtaacaacctctgtaggatcaaaagagccgtctccgacgccgcccactcaaagctctgctaaaccagtaactgcaactacacctgttcctccaacatcaaagccaccgccgtcttctattcagtcggctgcctctgttaagccaccaattacccctaaccctgcaaccaaaccatcaactcctgcggctgctgctgctactgttagtccaacgtcatccactcctgttaatacaacagctcctgtagtagctgcaaaatcctcaactctcacaaagcatccagtccaaactcctacaactcctaaaacagtagcatctacagctagtgcagaacaaactacgtcagctccacctcctagtgcccaacctaaagccacaaacactgttaaaaagtcagcaactacacctactacctccaccacacccgaaactgttcataaacagaccgttagtcccacaaaaactgaacaggatgatgctaaacaatcatccggtccagtggcagccgcgttg

SEQ ID NO: 64985 - DNA, 851 bp, Heterodera glycines
ttgcgttgacggttactacggagaccctcggcttggcatcaatttgccttgcaagccatgcccttgtccgggtgggccgggctccggcttccaacatgctgactcatgctatttgacgccatcgccgagtccgacagttacatgcaattgccggttggcgtttaactaactaactaatttccaaatggattttctctcgctgtgtattgtgtattgtttgatcacttttgtaggtctggctatgctggcgagcgttgtgatcagtgtgccgtcaattattggggaaatccgcgcgaaatcgggtaaaattatttgcgtttgattcttatcagttttcttcttatcacaatcctcagcacattataatttcaatttgcacatatttagcgcctcatgtgaaaaatgtgcctgcaatgggaacattgatttgaatgtctgtgattttgaagatgcttttgaaatcaaatatcaattttctttattttgatttttcctgaaaggtgccggagagttgtgatgcgacgactggggtctgcttgaaatgcttgtacaacacggtcggagtccaatgtcacctctgtgtgaacggattttttggtgatgcgcaagcacgcacatgcacacggtggggagcgggtcgggacgggagtaatttggcaaatgattttatcggacatttttctaatcttttttcagtttcgttttcaataatttgggcgccaattcgagtgctggctcttgcgatcgtgtgtctggccaatgcccatgttatgccaatgtggtcgggccccagtgtgaccagtgcgcccctctccactacgatttggccagcggaaaaggtggaatgcgcg

SEQ ID NO: 64986 - DNA, 689 bp, Heterodera glycines
gtcctcatcagtagggtaaaactaacctgtctcacgacggtctaaacccagctcacgttccctattagtagggtgaacaatccaacaattggcgagttctacttcgcaatgataggaagagccgacatcgaagaatcaaaaagcaacgtcgctatggacgcttggctgccacaagccagttatccctgtggtaacttttctgacacctctagcttaaaattctaaagaactaaaggatcgataggccacgctttcacggtttgtattcatactgaaaatcaaaatcaagtgagcttttacccttttgttctacatgagatttctgttctcattgagctcaccttaggacacctgtgttatcatttaacagatgtgccgccccagccaaactccccacctgacgatgtcttccacgtagctcacccgcacaaaagcacaggcttccatctagaactgggcacccgagaggatggccaggcgctacataatggtataagtaaaacgacattagaagtagtggtatttcactgttggcagagcctcccacttatcctacacctcctaagtcatttcacaacgtcagactagagtcaagctcaacagggtcttctttccccgctgatttttccaagcccgttcccttggctgtgggttcgctagacagtagatagggacagtgggaatctcat

SEQ ID NO: 64987 - DNA, 134 bp, Heterodera glycines
atgcaagtgccgccgttgctgtacgcttaccagttggtgagcaatgacggaaaattgcttaaaaaagaaaccaaacaaactcatcaattgttagctcccgttgacaacccgaagggtccattggggcaatggat

SEQ ID NO: 64988 - DNA, 653 bp, Heterodera glycines
atgcggggcggaaaagcagctgaaataatgctaacaggggcgagcgttggacacgaaagtgacgaaatcgaatggaaaaagctggcaaaaaaggtgagaaaagtataaaaaaaattgatatggtgggaaacctaagagtgtttaaatcaaaaacaaagccgcaaaaattattcgatttataaaaatgcaaaaatttctcgtcacattttttaaattaaaaaagcgaacttcggtaaatatttaccgttaattgtcgtccggtctctaaatattgtataaataaataaaattgggaataaatgtgcgactaattaagggtgttaaatttcttatagatggtggaaatgagaattttgttttgttttttttgtacaggcagtgatcgccctgatgtttcacaaaatacttgatgagcggcaacggcgccgggtgaactcggtggccattcctcgagtggggatttaaatggctaattttgaatgttaacatctctaaatttcggcacactatttttcaggccaatgttggaccgtttctactcagtgaacagaagatggttgtgcccaaagaattttaaagagggttgttgaaaatgtaattttatattttactgtttctgtgtttaatctgttggaaaaatcttataaaataaa

SEQ ID NO: 64989 - DNA, 228 bp, Heterodera glycines
atgcttttcgtctctttgttggccaccttttgcttccaaccgtcgcgctgtgccttttttgacaagcatcggaaacggaatgccatggacaatgccgacggggaatgtgccgaagacggatgcgtcagcgatgttgaagccggaagtggtgccgaggacggggatgaactgttggatgacgacgacgttcagcagcagcagcatttgagaagtgatgaatcagagtga

SEQ ID NO: 64990 - DNA, 466 bp, Heterodera glycines
atgcgatatgctcggcaccatgtcgataatgccgaagaagtcgccgacaaacttttgcacggaccaaaacagttggcagaagtcgacgatacggaagagcagcaaaaaactgaaaatggggaaaacccgaatttctttgaaataaaattgaaatttcacataatttcaattgaaaaaaatgtgagacgtgccgatattcgtgcaacagcgaagcgccgacgggcacaattacgtaagagccgtaggtccaataaacatggaaatcatagcagcaaaattggatatttggaagtacatgtgtttgcgactgctcagctcctaggtgacagaatgccaaattaggaaacatttaaaaattatgtttgaagtgccgcaaaaaatttaatttccaaactattcaggatttgtttcacacacctctcaggaaatcgctgaagatgcacaaatcgagttgctcatcatatga

SEQ ID NO: 64991 - DNA, 66 bp, Heterodera glycines
ttgatcgtcggcaacaccgaattgaccgttgaccaggccaaagtgcaaatgtccatctgggccatt

SEQ ID NO: 64992 - DNA, 697 bp, Heterodera glycines
cggcgttattcccaattttattgttcgattctgtgcacttttccattggaattgaaaatgtttggccgccaaaccatgcggcaataaacgaacagagaaaacacatcgacgtggacacgagttggacaggcaaagagcaaaagacgcaacaggtggagaaaacggggggaaaatggaaaaatgggtaaaaaaaaggacaaatgggtaaaaatgggacaaatggtaaaaaagggacaaaaaaaacagatcggtcttgacgccagtgacaaagaacgcgctgtggtcgatttgctgacggagcggaagcagctcgccgcatcagctcacggaaatgtggcggcagcggaaacgagcgatggaaagcgggcgcaagtgcaaagatttggggacaaaggcggaatagcgcaagtggaggggcacaggtgggacaattggggaggcaaaagcattggcaaaaaagggaaaaggaggaaaaggcaagggtaaaggcaaaggaggaaaagcattgacatgaaaaggaagggaaaagctgctgaattcacatttcgccataaaattgaaacagtgcgcaactgaaaacaaaagagaacgcggaagggcggcacgcgttgctaaaggcggacggcaaatacgaattggacacaatggcgaaagggtcgctgaacgaaacgaaagacaccgaattcgaaagcgcaca

SEQ ID NO: 64993 - DNA, 284 bp, Heterodera glycines
aaatttttaaaaattttccagcaaataatggaaatttttttcgaattcccccctcaaacgaaaattaaaaagtttaataggcaaatttcgtaacaagtagcactcaaatttccaaaaattttttccggcggcgcctatcggcaccgccggacctcccttttccactatttttacaagttttttgccttaaaacggccaaaatttggtcatttttagtgaaaaagtgcagttgttactcagcagtagaaaaaaagttattggttaaatagcaaaaaaaaaaagaa

SEQ ID NO: 64994 - DNA, 336 bp, Heterodera glycines
atgagaggcaggctgtgcccgcatggtatcacttcgtgctgtgtggacatttcggtgcgcggtgtacagcaaatttcggcttactgttgttacaaatgtgccgccgccgcttcatcatcagctgcgattgaagcgaacacaacgacgacgacggcaaccagtgatgggggcggcacgttggccaaagtcgcaacagtcgccgacgattctgacgggcaactgactgtgcccgttgtcgctgccaacaacgatgacgaaatcaaaatggagcaacagcaccactcgccgccggcacagcatcggtctcccacagcgaccgcaactgtttacaattag

SEQ ID NO: 64995 - DNA, 722 bp, Heterodera glycines
atgggtggagctagcctgggacctctcaaggcggtaaagggcggtgcggggagttccattggagcacgcattgcacggaatgcaatcgagcggaattctgggggtatggtgaagctccaagtttctaacttgcccggatcggtggtcactttggatttagaggtttggttattctaactggtaaatctcatgttaaccttcaggaacttttccaagacttcaatgttttcggagtcgctgttcattatgatgagatgggcaatcatttgggaactgctgacttgttcacagaccaacaatctgccaccaacatccttaacgaattcaaaaacatcgctatcgatggttgttcttaatttaagaatttctattaaaataaattttaaggccaagaaatcaaattttgtttggttactgaaggcgctgattctgttggaggtaaaagagggaacattcgcgaccgtcttcaacgaattagcggaggacctaatccgataagaaaaaagcccatggttcgtaaacgaatttctggaggaccaatcagaaaagtgtcgcgcactgttggaggacgacttaaaggttaatagcatattttaaatggcctacactaaatttgtttatatttattagttgctggagctgggactagcaaagcggcacctaaggcaaaaactgctgatgaattggacaaggagctggaagcgtacatgaagaagctgtag

SEQ ID NO: 64996 - DNA, 859 bp, Heterodera glycines
atgactttcgctgttgaggaaggggagtcccttttgcttggcgaggacctttctcaattggctcgaaatgacgccgaaaccattcacggttcgatttgtgcacggtacgaacggaagaagcgcttttacgtaagttttaaaaaggcagccgcggtggcacaaattcccgattggcagagtcgcattggcttctccgatttgctggcattgaccaccgaagggcaatccccgactttggccttctctgacccttccctttttgccccctttttgtcttccgatcactccaacgcccacatttttgcgacagcttcccaaacactaaatgaactctgcggagatggaaaagaagcggccattgtcttctgtggagaggcgggcgcgggaaaaacgacgaatttattcaacgcaattcgatttttggcatttgcggaggaaaagagggaaaaattgggcaaaggtaaaatatgaggggattaaatgaataaatcgagcaattgacagaaatggggaactaatggaaaggaacattcagtaaaaatacttgaagaatcattagagaatttggagggagaggggaagagaacttttgccatcggaccctaagtttggcaatttaattttaaacgaggaattgtagacctattcgtgttcaagccgatgttattggcctttctttaatcacgtacagtatatcagcaaatccttttacagtatatgggtgacccacaaaaattgaccagattagattgccaaaatgaattacctattcgagaaaaactgtaaattataacgagcattttatttcacaggaagcaacaacagaaatgacgcaaatgttacgcgcaatttattgaca

SEQ ID NO: 64997 - DNA, 838 bp, Heterodera glycines
atgactgacggcaaattgaatccgaaggccctgcaacgccaacttcgcattctctccgtttcggaccattgcctcgccgttcgccacggattccaacacaaaattccaatcaaaaaattcgccgatttgtttcacgtccttttgccagaagaagtgttgttttcgatattatatttttaaatttaagttatttgaggtcgtccatggccaaaattcacaccaaattgccaaggatattttggatgcccagggcattcgttatgccggcctatttgaattcatcccgggtcatctctttctgatggagtctcttttcgctaaattatgccaactgaaacagtccacgctcactttggccgccttaatcatccaaaagaatttccgaaaatttctcgcgcgtcagcattttcttctgaaacggacggctaccattcagatccaagcggcttttagaggatggaaatgccgaaaaatgtgtgggagaaaggcatggacagagaaaaaaatgaaatcactgatggaagaaagactgagagtaggggcaaagaaagaggagcaaagagagatatcggaggacgaagagagcgatgagggaggaaaagacatgatgagaacaatgatgaagatggaggacatggaagaggagaggcggcgagagatcagtgcgatgctgaacagaactgattatgccggaaggaaggccaaagccgagcacaccaaatgggctctcttccgggagtgctccgactacgtccgatcgacttggccaccagcaaaagcaaagggcccctccttcggtccaacaatcacttttgaacaattcgccgagcaaatcaaa

SEQ ID NO: 64998 - DNA, 878 bp, Heterodera glycines
  unsure (1)..(878): unsure at all n locations
acttatctgcgagaatttggtcatctgaagcacaatgagaatggcctttcccatggcgttaagtgcgtttaaataaaatttcaaaatgaaatattttaaaaatcacaaatattttaggcatttccaacgctttttgggctaccggcagacgggcaatgtcgacttggcaacccttcaaaaaatgtcgtggaaacgctgtgccaactctgacgagggctacacagcacaaggtgggggcggatcgatgaattatggcatttgccaggattattttggagtaaagaaaaatgccggaaatttggccctaaaaatcaaaagtcaaactaatttcttggcaaagttaccaaccgagaatggcacttgcattacacaaagtgtttaatgcaatggcactggctgtgttttaaataaataataattattattttttaattagtccgataattaattaattacttaattattcgcatttgtttttttcgctttagacccatcgcaactttgggaacgttcgacattgttctggaacctgaacgcgtcgcaccccaagcagttcactcatggcgaaacgaagtcagccaaaatttggcacaatttgccaatttgaattagcactcattanacatgttttattacatgcttttgcataattaacttaattgcgcttaattttgcaggggattaattgcgcaagcattccgcgcatgggaaattgtgatcaaaatcgactttctggagacgaacaatgcggacaatgcgcagatcattttcacatttgaaagcgacggagcaaaaaaggagaaaagcaaaattggggaaggaggagaaaggaaaggaagggcaaaaaagccaaatcactttctgatttaataaacacc

SEQ ID NO: 64999 - DNA, 318 bp, Heterodera glycines
atggaaccttttatagtgcgtatcagttacgcagggaaattgcgcccctatgaactcgcagaatatgaaactattgcaatgttaaaagtgcgtgtcgccgttttcgaggatgtgcctccgatccagcagcgtcttttttttcaagtagtcaatttgtcatagaaaaaagtcataattttttcattttagatcaccaattggcgaacgagggagtcatgtccaccatggtgcaattctcattcgtgtggcgccgcctggtggcgaactcgtctgatgtgccaagacagttcggaatctccatgttttttttgtggttga

SEQ ID NO: 65000 - DNA, 681 bp, Heterodera glycines
  unsure (1)..(681): unsure at all n locations
tttggtcagttgtgacgacgccgccggtngccatgtcaattgggaggaacggcgagtgtttgcggacagacgaagtgcggcaatgacagtttgcttcgcttaggcggcgtttcaccttacgtttccgcaaggcatgtgagtgagtcaattagcagccaattggggagcaattaattagtcgctaattaggcttaatttgccaattagcatttgtttgtttccctttttggccattcatttaatgttttcgccttaccttttgtctttttgttagcatcgttctatgattggtcctctcattgagaatgctttgtccgattctgacctccgttcctctgacattgacgcggtgtccgtttccaattgtcctggcctcgtttattgtctaaaaggcatttcattactttattcatccatttaattcagtcgtttctctccattttcagttggtgttgagcatgcgcttgcttttgccaggtgttggaaagaattaatgaccaaccgtgcccaattaatcaattggctaattagtcctaattgacttagctaattgcctctctcccccttttgccttttcgatgctttcgtcgtcccctgattcccgtccaccatttgcgtgcccactctttggtcgctcgtctgctccatccccacctctcttttccctttctcactctcatc

SEQ ID NO: 65001 - DNA, 1046 bp, Heterodera glycines
atgcgttggaattacaactatgccaaacgaaaacaccaagaagaggtggatgaattttgcaaaaaaaaaatattttaaaaactaaaatacagtttttcctataatacagtactccattggtaatgacgttgacccgttcggcaatgtgtacactttcaatgcgggcgaaggcatttacaaaatgccattttttgtgagcattccgtttttaaataatgcatatacaatattttctttttaaaagtaaaaggtttaaaacctccttttttgaggtcaatgactttgccgacggagtgaacagagtggcgatggactcctcaacagcgggcaaaacctacgaatttgtcgggccgcactgctacgaaatgtgcgagttggtaagtaaatcgaaacgtattttcatgtccatgggagtcgaacaaatgacgggattgaaatttaatgaaaaggaattttcattatgtggttaacgaacaagaaagacatttgtcgtttattaggtaaatggagctgaattgtatgtcataaatggacggggggggtcagaaattgcctttaccaaataagaaatatcccccatcaggccaaaattgaaaaaaaggctcaacatttttttaaccttttttttgcgtggcgcgctttttccaaaaaatttgcggaaggggggcgggggggtccggcggtgcgaatagacgccgccggaaaaatgctgcaatttattaacagatttattttcactaaataatccaaattccataaatgattgaagaggataatatgtgggcaaacagaattgcagattttcaggccgctccagcggatggcataagaggtccacacgaccgacggaaggcaaaatacatacggcaagacaacaacctgcaagctttagtcgctaattttgaccagcgtgatccgcttgaataccttcgcgcatgtgcctaccacttacacttttaaaaaattaagaaaatcattcaaaaatatatcacaatttaaactatgtaattattttaacaaaggtattccaaatatttgtgcgataa

SEQ ID NO: 65002 - DNA, 386 bp, Heterodera glycines
gaaaaggttataggacatttgcggtccggacatttgcggtccggacatttgcggcctgctggaaatcggacatttgcggcccgacaaatgcggtcggacttttgcggtccggacatttgcggcccgtttctttagggccattttcggacatttgcggccggacatttgcggcccaagggaaaatcggacatttgcggccaacgaaacgccaaattgtcattcctttttcaaattaattataccaaatatttttatttaacacatttcaccaattattttgttcaatgacttataataattttcaactaatttttcgaaatatttttaactttttttcacaatttgattatttaatttaaaagagcttgctgaaggctccaaccagc

SEQ ID NO: 65003 - DNA, 105 bp, Heterodera glycines
ccacctcttcttggtgttttcgtttggcatagttgtaattccaacgcatatttgatggtgaaggagcagaagctgccctaacttcaattggcaaatcggcacgca

SEQ ID NO: 65004 - DNA, 56 bp, Heterodera glycines
tgaaaatctgcaattctgtttgcccacatattatcctcttcaatcatttatggaat

SEQ ID NO: 65005 - DNA, 603 bp, Heterodera glycines
atgagcgtggcacgcgagtgtggcataattcggcccaacaaacgctcatttttgctggaagccaccaaggcgcacgatggccaaacccatttgacgctaaagcagtcggtgtcctcctccgaggaagtggtgcgttgtggaataaaacttggatacagttactagtgctgttcgagaccgaaaatttcccgagaccggttccgagacttgaccccgagactagatatcgagaccgagacccaaaaaacccgagacttttctcgagtcgagaccgagagtctcgaacagcactaacagctaccctccgtcgccccccccaaaaaaagttgttttgacaattttctctgggaagcgtttttttttgccacaaaatttaagtatgattattatatattacagcttgaattcgatgagaatgtgtccttctacgatgccgaacagggcaccggaggaggcgtcagcggaagcggtgttggcaaactgttcaacaataataatggggacggaagaattgccgagtccacgtatcatgtggcggtgtccgggccaacactgagtgcgtttggtggtggtggtggtggtggtaatgttcaaaagcaataa

SEQ ID NO: 65006 - DNA, 757 bp, Heterodera glycines
atgccgcagaatatgcctgaggcaaacattgatagagaattggcaccgctgcagcgaactggagaaacagcgcacccccaaagaaatcagaaaaattttgaaccaggagacttaatatggtacaaagaacacactggaaaatgggttgcggggatacttttacagccaatgggcgaaagaatgtgggagattcaaattgagggcagtacagtgaccagaagtgcgcatgtggaccaaataaaaggaagaagagttggtccagtgcgtcacaattgaggcagcgcatagaccctgtacatatccctttcgtcccataaataaaataaaataaaaatgatggaaaaaaattttcagtttttttttttttacaatttgatgataattgtccctcacactttatttaaataattcgacacttgactatgattgtgcattttcagaattaaattcaatcactaaaatgtcttctgggaaaaattctccttcaaatgaattggaacgtctcgaaaaagaagcgcttttgtcaaaaaaatcaaaatcgcgtgacgaaaaagttgcgaaagaagtgcgcgagttggtcgaacaactccaaagcaaaacggagaaggagatgcgcgaaacagctgaccagctaaagggcagcattaaattggaaatggcggccgctgtggacggactgtggaaaaaaattgagccttggctcagcggtcaggtcggatagtggggaaaaaaaagaaagagaataatggaaaataaa

SEQ ID NO: 65007 - DNA, 59 bp, Heterodera glycines; identical to SEQ ID NO: 52421

SEQ ID NO: 65008 - DNA, 59 bp, Heterodera glycines; identical to SEQ ID NO: 52421

SEQ ID NO: 65009 - DNA, 59 bp, Heterodera glycines; identical to SEQ ID NO: 61858

SEQ ID NO: 65010 - DNA, 59 bp, Heterodera glycines; identical to SEQ ID NO: 52422

SEQ ID NO: 65011 - DNA, 59 bp, Heterodera glycines; identical to SEQ ID NO: 52422

SEQ ID NO: 65012 - DNA, 59 bp, Heterodera glycines; identical to SEQ ID NO: 52421

SEQ ID NO: 65013 - DNA, 59 bp, Heterodera glycines
  unsure (1)..(59): unsure at all n locations
aacatttgccttctctagtctggctctaccaaacactcacacgatatntgaaatgctaa

SEQ ID NO: 65014 - DNA, 363 bp, Heterodera glycines
gctgtaaaaaaaatttggggcgatttgaaagagaatagaaagaaccaggttcgatgaagttttggtaagccaaaaaaaatgcaaacatttaaaaatctataaaaaatttaaaaatgagaattcatgcgagattttctggaaataagcttaatagggcctagttaagctgtaaaaaaaatttggggcgatttgaaagagaatagaaagaaccaggttcgatgaagttttggtaagccaaaaaaatccaaacatttaaaaatctataaaaaatttaaaaatgagaattcatgcgagattttctggaaataagcttaatagggcctagttaagctgtaaaaaaaatttggggcgatttgaaagaga

SEQ ID NO: 65015 - DNA, 377 bp, Heterodera glycines
aaaatctataaaaaatttaaaatgagaattcatgcgagattttctggaaataagcttaattgggcctagttaagctgtaaaaaaaatttggggcgatttgaaagagaatagaaagaaccaggttcgatgaagttttggtaagccaaaaaaaatccaaacatttaaaaatctataaaaaatttaaaaatgagaattcatgcgagattttctggaaataagcttaatagggcctagttaagctgtaaaaaaaatttggggcgatttgaaagagaatagaaagaaccaggttcgatgaagttttggtaagccaaaaaaaatgcaaacatttaaaaatctataaaaaatttaaaaatgagaattcatgcgagattttctgg

SEQ ID NO: 65016 - DNA, 542 bp, Heterodera glycines
aggtacaacagcgattagaagaggtaaaacagtgattagaagaggtacaacattggtcagaagtggtaaaacagtgattagaagaggtaaaacagtgattagaagaggttcaacattggtcagaagtggtacaacagcgattagaagaggtacaacagagattagaagaggtacaacagagattagaagaggtacaacagagattagaagaggtacaacagcgattagaagtggtaaaacagtgattagaagaggttcaacattggtcagaagtggtacaacagagattagaagaggtacaacagagattagaagaggtacaacagcgattagaagtggtaaaacaatgattagaagaggtacaacattggtcagaagtgtacaacagtgattagaagaggtacaacagcgattagaagagtgattagaagaggtacaacagcgattagaagaggtacaactgtgattaaaagagagaggtacaacaaatggcagaagaggtacaaaaatgcattaataatttttaaaaattgtaaaataaa

SEQ ID NO: 65017 - DNA, 2261 bp, Heterodera glycines
atgggatgggatcaatcgggcttctggttttttggtgttcgatacttctgtgtcagctgtgaagtgacgtacgatcgacctgaaagacacagaatggagtataaggaacgctgcaaaaaatgttgtcggatggggttcgggtttccatgtacggatgtctgcgatgagattcactgcggcgaatgcaatctcaagttttacaacccggaatgttttgaagcgcacaagaaggcggcttgtattgagtacaaaaaatgcgaaaagtgccgagagacacacaatactcggaacaaacacacgtgcggggaaaagttttgcaaactgtgcaaagtttgtcacccagggcggcaatgtttcatcaaaaaaattcaagtgcgaccgcagaaagcctacagaattgtggcatacgacctggagacgactgtagatgggggagaacaccggcctaatcttgttagtgttgcacgtacttgtaacatttgtgcgggagaggagcgggaatgtgagatttgcgaaggccccagtaaaatcacatggtcagtagcggatggttttgagccaatgagcgagtttatcgtttggataatgggttttcaacgatttgaaacgattgctttcgcgcattatgctgggaggttcgattcacactttgtcttgtccgagctaacaaagaaggaaattgcgacggagttgatgatggctgatttgaaaatttatcaaataaaggcgggaagagtgtactttcgggatttttggatgcttagtcagaataaattggcggaccttccaaaaaccttggggttaaaaactgcagctaaattgtattttccacacaaatacaataagaatgagaattttgggaaggaagaagccgtaaaattggaagcatggcacaatgagaattttcaaacggaattcgaactaggtagggaaaatagcattttttctttgaaaataaaatttaaggggaacaactcaagacgtattgcgaaaacgatgttgaaattttgatggaatcaattttgaagttccggcggttattttggggataacaggagtaattgatgctctcccccctccaaaaacacatcggctttggatgaataaaggacagtgtcacaattgcgggagtcgttatgaagatcttcagggcaaaatttttgaaggacaggcatattccaattatgccagagggagggtatgagagagcagagaaccagagcaaaatagcggtgaaatattttgagtggcttgcccaaagaaaaggagtaaaagtgcggcatgcgtgtaacggaggagaagtggaatttggtgggctgaaagtggactgtgtgataggggcagagaaaaaaataattgagtttcaggttaagaaaaattatattttatcaatattttaatgttattcattcaggggtgtgcatttcacgggtgtccgagatgttttttaccttggactatagcgccaaacggacggacaatggaagagaatcaaagtagaaccgaaattcgcatggaaattttgagggaaaagtgcaaaaatttttcatcggagaagtttgggtagaataaaacatttagaaatatttattaattgtttgttttaggagtgtgatgtcagagaggaattgaagaaaaataaggagatgaaaaagttctttgaaagtgtgccggacaagggaccgataaatccgagggatgcttatgccgggggaagaacgatgccattttgtttgtacgcaaaggctaccgaagaaattgagatatcaatgtttgacatcattagtttgtacccctttgttaattatggtaaaaatctgcttaatttttgttagtttcctttcgcttaagacaccccataccccgttggagtcccgaaaattgtagtgagcaggaattttaatgtgaattggacaacacccgacgacataccctatgatggacttttgaaagtaaaagtgatcccaccgaaaaatcttttgtaccccctgctccccctgcacatcgatgacatgctcctcttccccaattgttgggcttgtgcaaaaagggccaagaatgagtttgtgatgacaaaagatgtaaagaaatgtaaccatcgtccagcgcagagagcatttttggggacattcacctcaattgagttgcggaaggctttagagctaggatatagaattgtgggattctatcgagcgtatcactttgaacaatttgacagtcaactgttcaaaggatatgtgcggatgtttttgaagataaag

SEQ ID NO: 65018 - DNA, 51 bp, Heterodera glycines
atggggcatcagcacgcggagtgcattgacaagctcggagtagtagccaga

SEQ ID NO: 65019 - DNA, 205 bp, Heterodera glycines
atggctaaaacttcagctcttcttttaattttgcttttgtgttagtgttttatgtatttttattgttagaattaaagtaaaataaaagaaaattattagaaaagaatagaaataatttaactcaaaaaaagataaataaaatttaaataaataaaaataaatttaagatgaaagaaattgcttgagaagaagtttttaaatttaa

SEQ ID NO: 65020 - DNA, 577 bp, Heterodera glycines
aacactctgaacattgagccggaaaaacggatgactgctcgtggaattgtggattatttgaacaaaaaatgcattcccgggacctcaaaacaaattgacaatgttccgtcgcttccattctttcacaaagtcaccgttggaattctgaggagaacatttgaaagtgaaaggaatttaaaaacaatttaaattgaaatttaattaagagagaaaagatcaaaaaatgttgggtttgcttggcattgttgaggagaagcagagaaaagcaatggatgagctcagaatgcggggcattacatgtgaaaccaaaaacattttgttgggcgaagaagcaaatgaattttcggttggatttttaaaataattattaaaaatatgcattttaggaaaatgatgaatttgcaaaaagcgcagaaaacgaatcggggcaaaatgaagaagaaaatgaatcaaagagcaaattcaaacgaatgttttcacttaaatcaaaagaaaagccgaaaaacgatttttgggcaattgcaaagacaaaatacagcaaattgagcaaaaattcccgagaagaaggcgacaagcc

SEQ ID NO: 65021 - DNA, 4682 bp, Heterodera glycines
ctgacgaagttgatgagtggcatttgaagagaccgacattcacaggtggggggggagggggggaagacgaagggggtcttgcccgggggcatcggtctcgaatctcaaatttggagtcgcgatacagaacagtcaatgacttttcattttccccaaaggtggtggccgagttggcgacctgtgtactcaaaacaccgactgtcaggtggcgttttctccgtttttcccctctccatccatttggggttggcctgtccagtccggcatgttctgctccgttggccaatgcatttgcctgtccaattacgtgcctatctcctccttttgttggccaagtctttcccccttctttggccatcattttgactttgttttccgtttgaagaagttaaccccggggacagcggctgtgttggcgatgtccaatgcgaatccgtgtggcccggcgcgcgttgtgccaagggtgggctgtgccaatgccccgattattacgtgccggcaaagacgcgggacggcacaatgtgtgttgcagtaagaagcacagcagaggaagaacacattaaaactggttttacaaatataagagcagcgttccaccggcttgtcctttgcccgagccgaataacgcaggtaaagccgaaaagcctaagaaccgaaagactcactcggccgaactttgtcctatccctccccccccccctctctctctccccggccacagaagcgccgtcccccgtcactttgttggccaatccatcgacacacccattggcccccggttcgtatatgcctgtcctttgtaccagcagttcggccgagacggacgactcaaatggaggcgacgggtcgacttggtaagaaacggggggagaaggggatactgaaccaagcagtgcaacagatattaatctgcttgctgccaaggcaagaatcaaatttctttaaatgaatcgtcccgaattgaatcgacgattcccagagggaaaagggcgttgggaatggattgaatggaatggaatttgctaaccaactgtcaaaaggtactgttttctgactgattttgccattccaaggtgtatttacccggatggtgaacgcgatgtgcccattgtggatttgtacaattgcgtgccccacccgcaagttcggcccgaatatttccccgaatacgcaccgactgtcgacggaatttgttgtcatagccgaggcattgccatcaattaaaattgatgtttttgatttgaagctctctaaatagcatttgtgtgcatccaaccgatggaacagggagaagagccatccgtcccacggtggtggtgaggcaaaggcaaaaggggacactttgaggcccttattagcgacggaattcgaaatgatcgtagccatttgaattgatcggcccacccattcgcttttttagccattggcgttgaatcaatcccatcgcttcttctgtaatttgtgctcaggtacaactccgtaaccggtacttgcacacaattcctttgggtaagcacagttaagtcaaaaagcccaaaaaagtctgaaggatccggcacaatcggacggagtttcaccgaataattttcggacgatggagcattgcgagtcattttgcagggacagtaagtggttttgccaatttgttccgctccgtctcgacctgctgtccgttcgttagtccgtctttagcgtgtcggcgtggccccgctcagttccgtcgctctctccgcgcttcgctctccgacgatttccccgtcgccaattgcgtgcggcaaagcggaagttgtgcccccgaaaacacttgcgtgcaaatcggctctctgcagcagtgttgccccaccgtcggtccgttttcgttttctgttcgtctgtcaatgcgtccgtccctttctcagcccatttgtgcagtgccgcgggtgggcgcactttccccttcggggcattgcccacgagcggtggtgccgacgcgttgttcgaccctggcattcaaattgccggaagcgcaccgaccagtcgcttttattacgacgcggagcagggaaggtgagcggaaggaggaaggagaagcagtccaaaattggaaatggttgtgttttgaggtgctccaatttcatttacgagggcggactcggcaatttcaacaacttcgtcaccaagcaggactgcgaacacttctgctccaagcgtgggcgctcctttctttggctttccctcagttcctttccatttcagtggtctgcgaattgggccaaccgttgcgcgtggccgagggccaatggcaaaggtgcgaattgggtaagtaagaggcggggggggggaagggtgtcgtttggccatttgaattggcgccttttccttccgccagctgccgactgtcccaacacgcacagctgcgactcggcccacagagtgtgctgccctaccgcgcgttcgcacgatcacttttcaatttttggtcgaactcttttcattagaaacgatttgcacacagccgaagagagtgggcgaatgcacgggaagtgtcagccgatattggtacaatgcggtgagcaattagcatttattttaatttgggtgctagtgccattttaatgacgttttgcctcaggggactcgccaatgcgaattgttcgacttcaccggctgtcagggcaacgacaacaattttgagcagttgattgagtgccaaatgaaatgccgcaatatcgcctgtctgttcccctgctgtgccatttcgggccaattttgccaattcagcggaaccgcgctgtccccaggggcgtgcccaccgcgacctttccggtcttttcacgcgctgttcattggccgaaggctgtccgctgaaccacgagtgtcacttcgacggacaaatcttcggctgctgtcccctccgggcttggacttgttccttaggctccgaccgcggcacccaatgcggcgccggccgttccttccgcttcttcttcaacgcggaaaagcaaagctgcgagtcgttccaatacgaagggtgcgatgggaatgccaacaatttccaatcgttggacatttgccaggaatattgcggaattgggggtgagtgagtggacggcacggcattgttcgtttcgtccttttaaggctgtcctaacggcggtcagccgttgcgcgaccagaccagcaatcagtttctgagctgtgccgactcgcagccatgcccaagccgcgactcgcgcgagtgcgtgccgatcaacgcaaacggagtgatcgcacatcgctgctgtcccaccaaaggtcgattggcattctctgcttgtaaatccgctgcatgtgccattccgccccttttttcagctttcatttgttcgctgccccctcaagtgggcaccgtttgtcgcaaggcgtcgttgacgcgatggtattttaacattgtgacgcgcgagtgcggcgagttcggcttcggtgggtgcaacggcaacatgaacaacttcgaaagtcgcgagcagtgcaccaaattctgttcttcggcaggtgttttcctacaaattcgaatttgcctttccgttttaattttgctcatttttcctctctttgccttaatgcggctctttccaatatcttttgccctcatttttcagcttgtgccccgggtgaaattgtctatcgccgggagggaaacggcgacggaaggagcggcgacgggtgccaatgggccctttttccaccatttacccccccccccccctcccattgtttctttgtcagtgctttttcctccattttccaatgcgattccaatgccgcccaattgcgctgcccgcgcgactttctttgcgttcgcgacgaattgggccatcgccacgtgtgctgcgggtcgccatcttcggccgtttgtgccgagggcgaaaagcctttttgggaagcggcggacgaaacggtaaaagggggaaaagaaagcgaagagaaagcgcacaacttccgccggactgccctttgttctttttgaaggtccgagaatgccaagcgaatgtcgccggctcgtgcccttccaatttcctttgccgtttttccgcagcccataacaagtcaattattattgatttgtccgattgatcaattaattgatctattagctcatcgattgattgataatttgattagtcatttgtcactttcgtttttctctccctttttaggtatttttgttgcgctccgcggaatggaagtaatttatcactttcattttatctttctaaatttaaatgtcaattctcattctgtcagccgtttgtccctttggccattctctctatcgtacccccaaatccctccgacctttgcgttgctttgtcggcacgagtgaaataacgccgttggggcaatgccccgacggattttcgtgtcaatcgcgcgtctcttccgactctcaaggccattgttgctccgtcgaacgtaaatttttcgaaatttcaatggtgaattcatcccaacgtttagcgatttgtcgcgggggctctccatttttagtcgaagagctcacccaaatgccgaagaattgtgtgcccggggcattcgccgagtgtccgcgcgaatttcagtgcgaaaaaagtcacgcaaacgcaatacaaagcataggaatttgctgtagaaggagtcggagaaaagagaacgacgagaaaactacggcgggtaagcggaaaatt

SEQ ID NO: 65022 - DNA, 2568 bp, Heterodera glycines
  unsure (1)..(2568): unsure at all n locations
ttttgtggctcactttggacctttgcatgggattcggtgtacctggttgacatgttcgtccggtcgagaacaggtaagcaaataancaccttccgatgttttggcaatggacgcacaaaaataacgggcgaatttcggatcggaaattctaaaggggggggggggagggccaaaagaccgcttttttgcggtcggtcactcgtcgcaccatttggcagcatcgggcagagatttttctgagtcaacccattatcattatcaaaatcactttgtgccattcaggttatttggagcagggtctgttggtgcgcgacgcgcgcaaaatccgctcgctttacctccgcagccgccacttcgtcgtcgacagcgcttctctttttccgcttgactttctcgttttttttgtgtggcgtcctctgcccattttgcggctcaaccgtttgctgcgaaaagaacgcattcagcgctttatggaacagacggagacgcgcacggcacggccaaacgcgttcagagtcggcgtggtggtgtggtacattgcggtgatcatccattggaacgcttggcgagtcgggggggggggggagacgcggggaaaaggcggcggaaaggtggggggagacacgggggagaggcgggggcgggaggaattgaccaagggaagggaaacaaaacgggacggacactaacgaacatttattcagcttttacttcatgatctccgagaacatcggcctgggctctgacccgtgggtgtacggcaaaaacaacaaacaaagcatgccggacggcatcaatgacacgctgacccgacggtacatctacaggtgagcagaaaaggagggcattgccattcggagtgttcagcttctactggtccacgctgatcctcaccacaatcggtacggcactggcaaaggtcagtcaacctccgatctgatctctgtctgtcccgttccaaggcgaagtgcccgggccccagcagaacatcgaatttgccttcgtcaccatcgatttgatgtgcggtgttttgatcttcgccaccatcgtcggaaatgtcggaaggtcagccgacctcgcaaatcacttgccgacggaccttcgtccgaactgatcacttccccttcagcatgatcgccaatatcagtgccgatcggaccgagttccaaaaccgaatcgacaacatcaagcagtacatggacttacgcggggttggcaaacaggtgaaagagtgccaaagaaagaaagaaaagcaaatggaagaccaaaaattggaaaaataatggaaatttatgcaaaaaggaatgacatttttgataatgaaatgatggacattccgaaaattaagttggaagtgcgagtgatcaaatggttcgattatttgtgggccaataagcagggactgaccgacgcgcaagtgctcaaagtgttgccggacaaactgcaggccgaaatcgcaatgcacgtccatttcgagacgctgcgcaaagtccgcattttccaggcgagaaaaaagcgggggaagaaaactgtgggaggggagagaatggttaaaagggcagaaaatttcaattttactaaactaacacattaaatttttaattaggcgctaatcggaaaattaaaaaacattggcgacagttgctttggcaattaatgacaccaattagctaataaatcacaacattttcaaaatgtccatcggcggtatatgctttatattttacacatagcaaagtctctaaaataaacttataatcgctgatttgtaattttaatcactcctaatttcctaattaggattgtgaggctggtctcctcgccgaattggtgctgaagttgcaatggcaagtgttctctcccggcgactacgtttgccgaaagggagacatcggtcgtgaaatgtacattgtgaagcggggaatgctgcaggcaattaattgaccgatcagtcgcactcgaaagcactgatcgatcggccgtttgtcaatcgcttatttgccgcaggtggtggcggacgacggcgccaaagtgttcgccactctgtcggagggtgccgtcttcggtgaattaagcattttgaacatcgcgggcagcaaaaatggcaaccgacggactgcgaatgtgagatcagttggctacactgatctgtttgtgttgaacaaaaatgacctttggaccggtaatatttgaagggaccgttaactcaacaaatgaaattgactcattaagcgttgcgcgaataccccgaggcacgaaaaattatgataggaaaggtaggcaaatcaattagccactcctccgagggcttttggcaaacgaaggcgatggacaattagagaaaaccaatcgctttttctgaagggccgcgaattattacgcaaagacaatttgctggacgaaaatgcgccggaagagcgaaaaacggcggaggaacgaatcgaggagctgcgagcgtccgtacgtgtgctgcaaacgcgaatcgcacgacttgtcgcggagcacacgaacacggaaacgaaagtggggggaggcatttcggaatggaaaaactgctgaacaaatacg

SEQ ID NO: 65023 - DNA, 751 bp, Heterodera glycines
cctgtaagaaaattcgatgctaaaatttgaatgttttctcttcaggcaattgctgtgcctgaaattgctaaaaaattgaaatgcacattaattccaggcaaataaacaaaattcaccaacttccatctttattcccgcacaattttaggcgatggtgttggacctgagctagtttatgccgtccaagacattgtcaaggcgaccggaataccaattgagtttgaggaagtctttctcagcgaagtgtactactcgagatcggccagcattgtcagtgattgtttttggcagatcattaattaagaaaatattaattgataaaggaagatgtggtcgactcgattgcccggaacaattgtgtcgcattgaagggggccatccagtccagccttgacgacaaaacggatgggttgaacacgcagctgcgcaaacggctggacctgttcgccaatgttgtgcacatcaaagccctggaaggcatccgaacacggcacaacaaaatgttggactttgtcatcattcgcgagcaaacggagggcgaatattcgcgcatggagcacgaattggtgccaggtgagcaccaccaacaaaccatagagagcagagcctttttattgaaattgtggaaatttaaggtgtaattgagtgcttgaaaattatgacgcgagtaaagtgcgaaagggtggccaaatttgcatttgattatgcaactaaacatggccggaaaaaggtcaccgccgttcagtgagtg

SEQ ID NO: 65024 - DNA, 63 bp, Heterodera glycines
atggcattccgaggccccaaaaatttttggaaatcggaattccgtgccatccctggtctcatg

SEQ ID NO: 65025 - DNA, 181 bp, Heterodera glycines
ttctgctcaaacgattctcagaatgtatcttctcattctacaaaccaaattgaaattgaagcaaagaaaacggagcacggttctgctggtctctcaattctagaaattctacttttgtggctttctcgtttctctgttctcgaaatcgtactttgggcgcttgtccctgtcgttatttggt

SEQ ID NO: 65026 - DNA, 567 bp, Heterodera glycines
atgaccgtcacatccaacaccgaattccgactcatcgaatgtgtgccaatccttgaggaagttgctcgtgaatttggctgtattacgccactaccaaaccttgggtatgtttctttcgttttacaacactaactccagcatacagtagccatcgtgactatcgtgtaagcggatgtatgatgattcgcacgctgacatcgttgaatcgactctacattttcgatgctgaagactgtattgaggttaatgtaaaatatgtttcatattttattgctattttaggtgaagggtttcttaaggcaagaggacggtacgagccaaaaagtggtcaacgaatattatgaaaaatatgatggactaaatggatttgctgaatttattcggaattgggcctttacctttttctgtttccatgcctttgatgatgatgacacacctgatgaagactaatttcgttaatatttattctatgctctttgttacaaaccgataaacaaatccatcagggttatttgaacgattcaaaatttgcataatattttcgaaacccaatccgacggacataaa

SEQ ID NO: 65027 - DNA, 305 bp, Heterodera glycines
aaaattccctcaaagtataaacggtatattgcgcaccgccctccctatcatgctcgagatcatttgtatgtgtataaaatttatcaaaaaaagagatagccatttttctgggataacctttaaatataaaaatcctctgtgaaataaaatggcgattgcgcacagccctccgtctcatacgcaagcgcttttgtgaggtataaaatttctcaaaaaaagagatagacatttttctgggatagagtataaatttaaaaattccctcaaaaataaaaggtctattgcgcaccgccctccctatcatg

SEQ ID NO: 65028 - DNA, 76 bp, Heterodera glycines
aattactggagttagcatcatagcagtgcttttccttgtctttttgatgccctcgcaaaatctgggtcgcttctga

SEQ ID NO: 65029 - DNA, 86 bp, Heterodera glycines
tttgatagaaaaagcatcagagagccttatttaactttaattaaaattggtgcgtttcagagcacgttctaaaaaatatttatgaa

SEQ ID NO: 65030 - DNA, 1674 bp, Heterodera glycines
atgaaatttgcgaatttatttctgttgaaagtatttattttggcatttttcgacaattaccatttcgcaattggtgaacgtctttacaaagaacgtaagttgctaaaaaaaattcttagtaaaacctattttaataccaaaattaaaccctttttaaataattttcaaatttcaaaaaaaaaaacaattatccaaattttaattacatcatttgtttgtttatatttgtttaaattagggtttctgcccaatcgctataaaaattttcaacaaaaaaattagccataactttgctcaaaagcaactaacattttaatttttaatatcttttcgtaccccgaagagttttctgttagcctaaaaaaattcaaaaaatttatttaactttgaacaaagttatggccaaaagcaatcagggaccaggatttcaaacttttgaacctaaaaaaaattgaattttttgcaggttagtagaatacacttatttgttagggcttcaaattttctgtttaattttaatttgttaaattttttaataatttttttagcgccaacaacactttcgcgctatttaagaggccaaatttgggataacaatgatgcagtggattattatgacgtcgaagtgattggagatgatgtgcaattcccggtgcttgaaacaaggcttgactggaaggacgagaagcaattttggatgtatatgaagctgaaaaacaacacaccaatcgtaatgccaaaaatgggaattttgaattttaaatatattttaatttagctccaagtgaacatcaataaaatggtcactgggttgtcagttggattccgtgcaacaaaggcaaatattatttaataacacatacataaaatttgtttattgaaaaatattttttaatttaaaaataataataataataatggtaaacaatattttataaattaagttaattagtcatggaggtaccgtgtcgttactcaaaaaaccattaaaataaaaaatttttacagaaaataattcataacttcgcacaaaatgaatcaaattttataaatcttgatattattcggtagccctatgtgttttctattaatgatattaagaattaaaaatttggttgctttttaggcaaacttatatcaaaaaatattttattttgtcctaatcggggagtaaattgtcttaaatcgaaaaaaggttatagaaatattttttaaaccaaaaagccttagaaactcattttcaagacatttttattcagtttggagagtaacggtgagcttcgaaatttcctgcatcagatcaggcggctgaacccaattttataccctttcgaaaatccaaccctggatttttaaaattttcaaaatttttgaaatttttaggaaactgtgcatgccttcgttttagaggcgccaaatggcgaaaaagccattgatttcaccaaatattatgcctttgatttgactgagcagcaaatttttgtgttccccacattttctgccttacaagaagaattggagcgccggaaaaatatgccaacgcccgaacaaattttggcaacattacggcaggcattggccgatttggactcaagactgagcgaaaaattgaaaacggaaacagtgtaataaagaaaaattaataattatttagtataatttaatttaattaaa

SEQ ID NO: 65031 - DNA, 197 bp, Heterodera glycines
atgtttaaaatttcgagttttattttcgtgttgtgtttggttcgcttatgtgtgtccatggttagccaactttcttcaccaaaaaatgtggttaagccgcgctcgacaggttaaaaaatctaaaataaatttaaaaaatagaaattaatttattaaaaaaaaaatgaaaaaaataatatttttagaattaaattcaa

SEQ ID NO: 65032 - DNA, 2888 bp, Heterodera glycines
atggtaaaatttaaaaaaattatttaaaaattataattttagaggatttaaaatacccaaaaaaccggagaaattctcatatcgtaaaatcatccatttcgagaggctcattttgggatggcattaaaattcgttttaattacggcaatcaacttaaaataatgttggaaaacagcattgaatataagaacaaaagaaaatttttgtcacttcaaattgtcggcacaattgaagaacaatcagttagtttacagaatattaaaattaattaaaaaataattatttttatttttaaatttatacatataattagatttgcatgagatcaagaatttgggaaaagccgagatcgggatttttcgggatcataaaagtaaaacagaacaggttacaatatttaactcggaaattttgaaagtaaattttttttaatattttgtttgccgtattaatttttccaaaaaatttttggtagacggggcgaggcaggcaggccggcggtagcgatagggctttgccggagaaaattatgaaaatttatttcgaaccccatttggacaatcttaatttcaatttttcttttaatcttaactcttccagttttacacattctaccagtgcttatttttcccggttgcccaaccggcacccggaccggaagtaaacttaaaaaaccgtgatagcgacctgggaggatcggtaattcccaaatcgatcccggtcttggtcacgtgaaagcctacatataacggaacttttttttacgaaaatatataaaatcctattaagttatttgcatttaaaattcaattcaaaatataaaataattaaaattattaatacacttcaaaaaagaaaattattaaaatttcaaatttttaataattttttttaattgtagcctggccaaggctacaatgtgtcggcactccaagcagcggtagagaaggaagaagaaattttaatgggcccccaaattggtggatttgaacatattttaaaaattgctactgtaatgatggaagcaatcaaccagttaaatgccgcagcaattggaccggtaaaatttcaaaaaaaaattatgaattttttttctagtattccactggcgtcaggttttctgtagtttacgggaaatccggctaatctgaattgcgaattttctaacaaatttgcgcctaatcgcgtgacagatagataaatatattaatccatagcaattctcgagagtcttaatctaaagattggttattcaaagttatgcgtccggtgtgactagaacccacggcatttatgctgtgaaatgccctaaccgactgagctacggcgcccacctttagaggttcccccataccctaaatcccactttctcccacattctgcgtacttctggcaccacaaaaaatttataaaattttcaacaaaaaaaaattcccagcgaattttaaaaaaaaattaaaaattagaaatttttcaaattttatttttctacaagataccagaccgaataaaagtggaacagttgcgcttcattggcctcgtgcttgcccaccttgtgctccgtgatgacccaattgttgatccggagactggcgattatgtgttcattgcgcaaatggagccatgcattgatccgatggatccgcacgtgtggcgacaaatgcgcgaagagttggacatacaagtgagcgtaattttgaaattataatttaataggcacgataaaatttcaaattttatgatttttttgttgtatttttcttttgtccttaaatttttgaaaattttgttttcaattttttgaaaataatttctttttttctagccatttcttaaaaaataattttagaaactttttcataaaaatccttttttttaataaaatcgtccgttttggctcgtggcctggaaccaggcctggacttgaattttttgtttttgaaatcaaggttttccgtgccgaacctggacctgggtttcttttttactatttgacctgaatcttgattctggacaaaaatcctggaaaaccaggtctaaaaatgcatgcctgggtccaggtccagttcgaactctagtttttagtaattttctaataaaattcaaaataattttataataaattttttaaaaagttatcgatcttaaagattcgtgcccaattcgacgtgccagcaaattttggtcgagcaaaagcatgcggacggcattttggctcgagaaggaactcgtttgagcatttgaaccgcaaaattatgcgtggcattccgaagagcgcggaattggtcaaatggcgcgaattggcggaaaaatttcgactgatctcactgaatcaccacaaattgccacattttaatctcatttttcgtacattcatcgcttttggtgaagaggcacccaaacttattcttcttgtctgcgcaagtttttttaaacaaattttaaattaattaaaaatattacgaagttgagacaacaatatttcaaaattttgagttcatttcagtttgatttttcatctaagtatttatctaaagtggagactggtgacgcaaatcgggatcttgctggattctcgggatcccgcgggatttgctcgggaccggaatttggacaggatcaaaaggtccctccctccctctccatcgtttttccaaaatcatgggattgatcggaattttgccgggatcccgacatgggatccgtccaaccaagttgtcaggtatacgggatcccgaccttggggttcctctcgagccgttttccaaagtctttgggatgatcggaattcggtcgggtcccgactacggattcatttgaccccagttatccggtctttaatagaaagtttatcccaaattattgaaaaacgaaatatattcggtcaa

SEQ ID NO: 65033 - DNA, 494 bp, Heterodera glycines
atgatttatttaaaaaaacggcggtacgaaaatggcggtacgaaaacggcggtacgataacgtcctggcccgctaatcttgaaggtggctcacatttttttgaatttaaattttttgaatttttatttacatttttgttttaaggtttgtattttagtaaaaattactatagtccccaatttttctttatctgatcacttttggagagttgtgatgatcaaaatttcaacaacatttttatcactatgcctttatccgagtaaaattagcatttagtctaaacatttttatcaacaaatttatgtgaatgtctaatgatctatctaatccctcaaaatccgaattgtttcgcgacagatttcagttgttttgacaagatttcgcttggcatgtgatgaatgaatgctaataagtctgcgtttgatcccttttttaaaaaattgtcaaattgatattcattgattgctccttccaataacacctaaaagaataaa

SEQ ID NO: 65034 - DNA, 199 bp, Heterodera glycines
tttatgacatccaatttttcatcattttctacgcggattggatacgaatttgtggtcaaaggcattaatcgagagtggttcccacataaattgccaactgtattcatgcttttttcatttcgatggtcatcttttgcttatggacgacattcccatcccacccaaatagatcccggaccaagactcggaactcaactat

SEQ ID NO: 65035 - DNA, 92 bp, Heterodera glycines
ggattatttttcaaaacacctcgtagactgggggataattggagactgtgggattaatagagactgggctataattagagcatatacggtaa

SEQ ID NO: 65036 - DNA, 773 bp, Heterodera glycines
atggcccaaaggaacgaaaataatccaaaaaagaattttaattgtgagtaccctccgaagcaaagaaattaaccacaaattgcagttactgtggtgactgtgctggtgcatgaggtgccccacgagatcggcgactttgccattttggtccaagcgggcttttccaagtggaaagtgagtgccaaagccgaactatcgcttttccttccccaagcccatttgcttccctcttcccaggccatgctcatccaacttttaacagctttgggtgcccttgccggctgcgttctttctctttggcacgttgacgcggcagcgcttgcggaagcggccgaacaaagttgggcaattccattcactgccggcggtttcatatatattggaactgtacgtttatattaatccgcttaatatgctaattggctctttcctttgaggtgtcaatgatccccgatttgttggaaaaatcaactgtctgtcagagtgtgaaggaaatttgcgcacttcttctgggactagcaatgatgtacgccattgccttctttgaatgattgcttttccgtgggttgggtgtttttcacttttcatgttgtattcacgggaatgtttttttacttaaaaagcagtcaaaaaattatttggggttggggattcattaatgtattccatttgttaacaaattttgactgcctatgtaaaatttgttgccaattctttaatcattcattaatttatttttaaatgaaaattttataaattaatgcgtacaggta

SEQ ID NO: 65037 - DNA, 207 bp, Heterodera glycines
atggcggtggccattctgctgtttttgttgccagctgaaaatcccctcggggcatccgccggaagcaaaagcaacagcaaagagcaggacaacaccacaaattcgagcagttcacgggagggcgacaacaacagcaacaacaatgacgacaatagcatggctggaaaacggcttatggactggccaacaatgcagaaacaattcccg

SEQ ID NO: 65038 - DNA, 59 bp, Heterodera glycines
atgtctctgtggaccaacatttgtttaccattttgctgcctcccgaatccgcgcaacat

SEQ ID NO: 65039 - DNA, 487 bp, Heterodera glycines
atgaacatatttaaaaaattattaaaaactcaaatatttaaacgtaaggaatttaaattaaattcaaaaacaacagtattaattatcaaaacaaaatcaaaaaattaaaattatattaaattatctttttgaataaaaactaaattctagtcaaaagaaaaataaaaccctccttttaaaatttttcaaaaaaaattttcaataaccaattaaaatttttaaacacatcacaagactcccaattcatcaagtttagaaaaaatataatatttttaaagtacacattgagaaaggcaactcaattttatttttaaattgtgcaaaaaaatacattacattaaaataaaataaaaatatatataataaataatagaaaacttaatgtagattatcaaaattaatttattgattattttttgtaagtaaaaaatatatattttagcaaatatcaatttattagaaatgcattaatatgctatatcaaaaa

SEQ ID NO: 65040 - DNA, 1075 bp, Heterodera glycines
atgtcaatactcgaaaaaattcaagagatcgaaaatgagggtaattaatcaagatgcttctttttgttattatgtgaattcagatggcgaggacgcaaaggaataaggcgacgatggtaggcatagaattttacaaaattaagtcttgttcatataaaaaaaatgatcgctttttacacaaaaaaacgaatcaaatgaactttatttcgtctcaattaattaccattaataggagttgatgctaacaaactccaaattttggccaaactaaaaagttttagttttcttttcaaggtttttaaatttaaattttatcttgttaagcactaagaatttgataaattgaccaagttacatgtcatctacaacgaccaaaaattttgcttttttgatgtaaaaagtatgctaatttttttgaccaaactctatttaaattcatattttttaaacgatttaagaacaaatttaatgtctcattttaaagcttatcatcagatattacataattttgtttccattagcagcttttaaaaagaaaaaacaaaaaacgatcattttttatgataagacctaatattacaatctaatattactatacttggattaactggacaaaattaaaagaatattaatatttactgacaaaatactgattctcatgcgaatttgttttaagggtcaccttggcttactgaaagcacgattagccaaattacgacgagaattaatcagccccaaaggtttaaaattcaattcccagtaaattgtttaatttttattcctccgtttaggtggcgggggaggcggcggcggcgaagggttcgacgtggcgaagacaggcgacgcacgcattggatttgtcggtgagtttatttttatcaaaaaaaactaatttatcacaaaaacaattggtcaattacaatatacaaaacagcagttgaattgtttaaacaatgagtgagctgatccatccgccgtttgtcagtcattcaaaattatttttggcgttgcgttgttcctgatttttgacgagtcgtgccttccccccgccggtgattccaacagcctttcgtag

SEQ ID NO: 65041 - DNA, 1154 bp, Heterodera glycines
gcaaaggcgttggagtgcggatattctgtggacagattttatagagcgtggcattacgaagaagaggcggatgacttatttaaaggatacgtgcgattatttttgaagctgaaggaggaggcgagcggtttcccgaagggggttgagacggaggagcagaagaatatttggagagaggaatataaagaaaaatatggaatagatattgaattggcaaaagtgaagaagaatccgggattacgatacatcagcaaattgatgcttaatagtttatgggtaagaaacatttaaggaattgtagaagaattttaacttttaactttaggggaaattttcgatgagaaattgtttgaataagaatgcggtgattgatagggcgtcggaattttataaaattgcgtgtgatcataaagttgagatgtgtgatattgttgaatattcggatgaggcgattagagtgatctacagggacaaggaggactttgtgatggagcacaagtccagtaacattgttatcagtttatggtgagataaatgtcaataatttttaatatttaaaattttccaggacgacgagtatggcgcggttaaaattattggaatttatgagggaggccgagggaaatggcggggagattttgtacacagacacggacagtatttttgttaggcacgatagggacgtggagccgattacgacggggaaatttttgggagaaatgagtgaggaatacggtgggcatgagattgaagaatattgttgtggaggggcgaagcagtacgcattaaagatgaaaaacaagcagacgggggagacggaatacgttatgaaaattagggggattacattcgacgtggacaacaggaagactttgcattacgatacattcagggagatggttcttagttacgggaaaggggaggttgacccggcgttcttcgtgtacaagaatgattttgggtacgtttttcaaacatttgactcattaaaaaatcaatatttaggccaacgcgggattcaaaagtggtgacgagggagaagcacaaaatgtacaggccggtctgccagaaggggataatcgatgaagaacttaatgtgataccatttggattttgttaatttgtattttattgttttttttttgttaaataaa

SEQ ID NO: 65042 - DNA, 536 bp, Heterodera glycines
agaggacacccccggttttgaattgattcgaaacggaacgaccagcatcaaggtgcaatttaatgagcctataaaggacggcgggtatgagatgatcgttctgggggaatttgattcgattttgtctattaatgctaatcgtgtgctcagtagcgacggaagcatatgatgaattcttacgagattgaaatatttctatccaaacatccgacaacccgaaaatattttatcggcgtttttgcttccgacaagatgccaaaattgaaggacaggcattttccgtactgttttgtggcgaataccgaccgggtgggcacgataggtgaacactgggtcgcctgttttgtaaattcgccgacagaaatagaatattttgattcattgggcgattatcccaacgaagatttaagttcatatcttaacctattcaaacgaattctcattaacgaccgcatcgtccaacatcaattctcagatgcatgtgggcaattttgcatttatttcttgacacaacgatgctatggaatcacttattg

SEQ ID NO: 65043 - DNA, 2609 bp, Heterodera glycines
atggctgcaaaacgcaatggaacctctcaacaaagcggaccgtcgactaaaaaatgggatttccgatcaatcgggtaagtcatttaaataaattattaaataatatattagagataagcaattcgatttttaatcatataatttttcagaaacaattttattgaagaaatggaaacttttaaattagtggattatcgttcgacgatttgcgaaaaatttggatttacgaagaatattgcggaatttgtgatcaacccggatgtggagcgccccgatgaagcgatgcaggatgcggtcgacacaatgatacaggtggcttttaaaaatacggaagaaaggatgatgaggaaagtacgaatgtttggtgtggccattacgggcgccgggcttgctttcccggtgtgggtgccgtacagggcgtacccgcagaacaatgcggaagttattatgcaggagattaataagctgggacagagcggggatggagaggagaataagaaaatgctgttgctgtctgagccaatcacgatgaaaataacgtgtgtgacaatgcccagtggagaggggccgaggaatgttcataaatttgactttgggttcaaggaacaccagcggataaggtaagtattttttaaataatttaacgaagtaggaaaaatgaatagaaaaacgaaaaaaaaaatatatatatttaaaataattatttttaaattaaatttaatgaagcaaaagcaaataaaataaataaataataaaaaaaaaatttaaaaaaaaaaaaaaggaataaaaataatatttgaatagaaaaaaaaaacaataaaataaatttaaaaataattatttttaaattaaatttaatgaagaaaaaaaataaataaataataaaaaaaagaaaataaaaataatatttgaatagaaaaacagaaaaaaaaaataataaaaaagaaaataaaaataatatttgaatagaaaaacagaaaaaaataataataaatttaaataattatttaaaataagcaaaaaaaaaaaattttttttttaatcaaaaaaaaaattaataattgaaataattaaaataattataataataatatttattaaggatttctaatggggataaattttgtttgttctacgcactggcttcgtcgatgaattatttggttatggataaatattcgtttattcgttttatgaagaatgttgtgcgacagaaagagacggcatatgaacttttacggaattgtgagattaatggaaatgaaatgaattatggagtggagcatttatcgagtgttcagaattattgggtgggtttaaatgaaaaaatgcaaaattaataaatttttcaggatgagatataccccggaaagtaccgggttgttgcatttgagaaatctgcggatccgcggaaatcaatccgtgttttgtggaagggccctatgggacgtgaaaatgtagtgccgatatttttggagaatggtcactgggatggtctgaagaattacgtctgcttttttaatcgtgggagaaaattctgtattgattgcgaatgtttttattcgcgggatgtttttcatacgttggagtgccgggcgagatgttattattgcaacagagttggaggggtgccctgccaaaaggagagtggagtgaagattgaatgcccgaagtgtcgacgttacttttacaactgggaatgctacaactatcatcaaggacatacttgcaaattatggaaacgttgtgtgatttgtgacaaaacttatcgatttaacccgaagaaggaccatgaatgtggagagacttattgccagctttgtagtgtgagccacgaccccaaacgtggatgttatattatgccgatcgaagaaaaagaagacaaggacgtgtacagaattgtcgtttgggtaagttttaataaaatcaacaaaataaaacctaactttcaggattcggagacttcgcaggacacggtttacaagggggaccagaaggagcatgtgattaattatatttcggtgagagtgacgtgtacggaatgctgtgacgacaaaaataggacgaattgcaaaatatgtggggaggagaggaccaaggattggagcgaggcggtgggacatgagccgacgaaggactttgtggaatggattttaactgcttttaccagttatgatacgtacatttttgcacacaacgccggacgatttgatggtaatgataaaatttaatccttactttttttaatcctaaaatttcaggacattttgtatttaattatctctgccgtaccgggaagaacccgataccgctcatcaacggactgaaaatttatgaatttaaagtgcagaattcgaggaaacattcaatgctgatatggagagactcatgcttattaatgccggtgaaactcgagtcgctgaaggcgaccttcaatttggactgtgaggacaaaccctttttcccctactactacaataagaaagaaaattatggaatacgattggaacatctaccaccgatggaggactattcgccgggatcgatgaataaggaaaaatatgcaaaattcgaaaaatggtaagaaaacatgaaaaaacaacaataaa

SEQ ID NO: 65044 - DNA, 801 bp, Heterodera glycines
taattaaatccattccttcgggggaccgtgccgggtgccgcggggtaagcagtgctggttcgtttcatcacggcaccgaaccttttggctagtcagcaatcgttgcttaacttgccagatcggacgggtgcgcatgattccactgttccaagcaccccaccaaaagcaaaacgatataaccaaaatataaggaaaaattttttaaaaaattttttctccatcttcctttttgatactaaagcatcagagtgctaaaattaagttgtaaataaaatttggtgcgctttagagcactttctgaaaaaaatatttatgaaacaaaaaaatcgattttttcaagtgtccgtttggggtactcaaacatttatggggagcaaaaatccaacgcagaattaaagtacaggctatagggaagctattcccgaaggattcggtctccccataaatctgggcgcatcggttcggggggactgccccgaaaacaaaaaaatcgattttttcaagtgtccgtttggggtactcaaacaattatggggagcaaaaatccaacgcagaattaaagtacaggctatagggaagctattccggaaggattcggtctccccataaatctgggcgcatcggttcggggggactgccccgaaaacaaaaaaatcgattttttcaagtgtccgtttggggtactcaaacaattatggggagcaaaaatccaacgcagaattaaagtacaggctatagggaagctattccggaaggattcggtctcccccataaatctgggcgcatcggttcagggggact

SEQ ID NO: 65045 - DNA, 143 bp, Heterodera glycines
ggcatgtactctccgccacatgttggccaacttcgattgcgtcgtgcagtcgcccaccggcacaggcaaaactttagcttttatgcttccaacgcagcaaattttggtgcaaaagaaactgaccggcgcaggagaaggggaaa

SEQ ID NO: 65046 - DNA, 347 bp, Heterodera glycines
aaaatctataaaaaatttaaaaatgagaattcatgcgagattttctggaaataagcttaatagggcctagttaagctgtaaaaaaaatttggggcgatttgaaagagaatagaaagaaccaggttcgatgaagttttggtaagccaaaaaaaatccaaacatttaaaaatctataaaaaatttaaaaatgagaattcatgcgagattttctggaaataagcttaatagggcctagttaagctgtaaaaaaaatttggggcgatttgaaagagaatagaaagaaccaggttcgatgaagttttggtaagccaaaaaaaaatccaaacatttaaaaatctattaaaaaa

SEQ ID NO: 65047 - DNA, 560 bp, Heterodera glycines
ggggggactgccccgaaaacaaaaaaatcgatttttcaagtgtccgttggggtactcaaacagttatggggagcaaaaatccaccgcagaattaaagtacaggctatagggaagctatccccgaaggattcggtctcgccataaatctgggcgcatcggttcggggggactgccccgaaaacaaaaaaatcgattttttcaagtgtccgtttggggtactcaaacatttatggggagcaaaaatccaacgcagaattaaagtacagactatagggaagctattcccgaaggattcggtctccccataaatctgggcgcatcggttcggggggactgccccgaaaacaaaaaaatcgattttttcaagtgtccgtttggggtactcaaacaattatggggagcaaaaatccaacgcagaattaaagtacaggctatagggaagctattcccgaaagattcggtctccccataaatctgggcgcatcggttcggggggactgccccgaaaacaaaaataaatcgattttttcaagtgtccgtttggggtactcaaacaatta

SEQ ID NO: 65048 - DNA, 739 bp, Heterodera glycines
caaaatgaagcgaatgattttttagttgccaacaaaatacgagtcgatgtcaatgatccgaaggaagaggaacaggtgacacgataaccgtgccaaaaagagattatggagtgcaattgaatattgtctcttatcaacagtgataaactggcgtcgatggcggaatataaaaaatttgtctcaaaattgccgagcattggcgaaaagcgtaaatcagtgggaaatttcacacgtttggtcggtctgcttcaacgacggctgattgacaaattttttactggcattcttcggtgcgaacagggtatgataccaggaatttattttgtcattctttcttaattattttgggaatagccgattgcttaccccctaattgttccattttaattataatttctaaatccctgaccagtaaaatcaataaaaaaacaattttatagacattttaaagaatgcccagcccgacaaagtgattcccttcattgaaaatgctatcattgagagaagggacaaagtgtcaattctccgtatgatcgctattcagtcaatgtacgcaaagggtttgaaaccggttgttctgcactcttactccaaactattggttcaggttctttcatgctgtttttcaaaaatcatttttttaattttgcagagctatggtttttcaatgcttaaatggcttttgaagttacaaatagcaggaataatacgtgacgacttttccgactcaaaaatcgag

SEQ ID NO: 65049 - DNA, 354 bp, Heterodera glycines
atgttgccccacggctgtttcccattccgtgcctgtctcgactgtatccaagggccaagtctgacggccacacaaagttatgctcagctgagagaagaaatgcgcactgtgcgacttgatcgcaaccacatgggtgtgttgtgcaagggaccgggaattttaggcaaaatcggtaccagaaaagccgggatcggtgcatgaattttcaatcgggaatttttccgtaaaaaggggtgggtaccatattaaaagtattaacattttttcaagtttaaaaaattaaaaatgaccatttttattgttttcacttctttaaagctaaagcgaacaattaaatcataaatagacaattta

SEQ ID NO: 65050 - DNA, 415 bp, Heterodera glycines
atgctttttctttttgttattgtcggacaacttctgctggccagtgaaatggttgtgcatggtatgtcattatttaattcaaatttcattacaaaatacaggaggccattacggtggttacagtttcgagcaaccaagcattgagcgtgccgaaactgatcaaattgacagcgacaaagacaccatcagcgacgaagcacttatcaatggctccaccacttccacctttggctcatcatcatcaccggcactcattcgtcgtgttgatcgatcggctgatactgatgactcatcagaacatttgcgatcaggtataaatcagggatgggccaaattgaaaaataaaaagcgaaatgcgaaaagccaaaatgtgcgaaaaggcgaaatgcgaaattttcaaaaattttaccaatag

SEQ ID NO: 65051 - DNA, 524 bp, Heterodera glycines
gcgttctgtacaatgccacaatgtctttccgcgttggccaagccccaacggcggagacggcgtacaacactttggtacggtggatcatcgaccgtaacaacttccaagtgggccaaagtggccttttcatcaacccaatgccaagtccgttcggcccgtgctttatggtaagaggatgagtctgtcttctcttttttgcaacagtttccctttttagaacgattgccaccccaaaggcatttgcattgcgacggggcccaattcgtaccgctgcgaatgtgcgcatgggtaccgcgacatgtcggtggccaacccgggccacgactgtgtgccgttgtacggcatcaacgaatgcgaaaacacaacactcaacgaatgctctgagcacgcgcaatgctttgatttggtaattaaattgagatgatgcccactcatcattctcatgtcccttttcaaggagtatttgtaccgttgcgaatgcctccgcggcttcaaagacatttctccgaagggcgccgtcgcgg

SEQ ID NO: 65052 - DNA, 232 bp, Heterodera glycines
atgctcgccgttgtcgctgtaagtttcggagccaccgttacggtaaggaaacgatattaatgtattttaagaattttttttttttgaaaggtgacttcaatcattataacaatttgtctacagcgaagtcgaattcgaaaattaatggccgagaaaaatggaaaaatgacaatttacggagaataaaagagcaaagatgcgatttaattcataatatttgcatagataaaaa

SEQ ID NO: 65053 - DNA, 324 bp, Heterodera glycines
atggatctcagcaagcttgaaccctgtctcaaagaatattacttgaactgttacccgtacgatctcattttcaaatggctttcatattcgaatagtgagtgaatttggcatttagggcacttttatggtaatgctttttgtaagtaatacccccaaaagtgccggcatttattttcatctttcgtattgagtaaattttcagagaaccgtgactatttgtcgaagagggaatttgctttcatcctcgagaaagatgaacatctccgttttctttcctttgtcgaacccaaagaatttattgtaaaattatatcaacttcggtaa

SEQ ID NO: 65054 - DNA, 55 bp, Heterodera glycines
ctatttggtgttatgagcaattttgtctgacactggggcgtacccatagtgctgt

SEQ ID NO: 65055 - DNA, 2086 bp, Heterodera glycines
atgtctgttccaaaaccgcgtcgattcacttattttgagcgtctcaagtccacctttaatgccgtccatgaccaggaaaccaaggtaatccaaattttctttttttaattactcatacaccggtcggtccattcgaattacgcccctttttttgatggacaattgcccgtctaaattcggagcttggtttacaaaaatgcatatttttacctgacaataagaaaaatacgataaatgcttattgtttgaaattatcgagacaaacacaattcttgtaattctgcaaaaacaatcacttgggttttcataagttttatttgataaaaaaagaactgcttacgaaaggaaaaccaatttttttttcaaattcgattcctcattttttgcacagtttctgtgcgacaaattgctctccttcttcgaaaactgttcctcaacaaatcccgccgcctcgtcggacattgtcgatttcactgacacatcgatggaaagtggcgttggcaaatttttgaaaaaccatgacgactttgtcaagcaaattttgggtcagtgatgaaatgtttttggggatttcaacttttttttgaaaatgggttaaattcaggcaaatatgtccatttctcggagagaggggagttcgacgtgttcggaattgaggagacaatgaaaaacaaaaatcgggtaagaaattacattaattcacacatttttggcccggttcaccgcccaaaactcgccaccaagacaaaacattggcaagcatatttctgctcctactgctgggtgttgttgattttgaaaattaattattcaaatttgttcaacattcgcaattttattaattttatatagtacaataaacattcctctccctccttacaattagcccaccggaatctcaaatttgtaaaaaattcaactaaatcgagtgcctcattcccctccaaaaacatatgggtaccacccacccatgcacccccacacccaaatttttgtaatttcccaattttgatttttgagatagtgttttatctttacattttcagcacaatgcaatggtgaaaacggttgaccaacactgttaccaagtgctgtgtttgtgcgcattgttctgtccggtggacatgcaaaagggcgtcatggacgcactgtttgcccatttgtgccgtatccaaccggacagagtgttccgccccgtggaccatgcactgtggacagcacttttgctgctgatcaacccggtgaagctgaagcagcaatgtaagcaattatggcgaaatatccatttttatggccaagacatgggtttagattcgaaaaaaaaattttaaatgaaatttggtaacaaattcaaaattttgggaaaacatattggcgggcgacggggagtgaacccgggtacattttattctctccgctcgacgtttaaaaaacgtttgaaattccaaaaaataaaacatttaaaatttttaaacaaatttcttgacttttaacaattccaaagaaagtttcttcgtttttggcttacaatattttatcatatttgtttatcggcatgaaattgggaccaaaaatttttaatttttccatttcggtgccctttgacctcttcccatggttagggactttgacagcacccaaaaattaaggcgacggttctgtcgaggtgttcaacaatttcatggcggtgttgcgccagccttccaaatgtgatgagccggacaatttttgtttgaagggcaccatttcacttgcgttgggtgtggcaataaaatatgcacgaaattcactcggtaaaaaaaaaaaatttttttttgcttttaaattttcctcaaatttttcaggccttggcatttcgcatgaacttgacgaaattgagttggtcaacgacggcatcaaaaacatggcatttgaatacatgcaggcgttcattgtgaaggcgccggcattttttgaattccctttttcaattgacgtggtcgactcgctgatcaaaaatttcatttgctatttccgcgacaaggtggacaatttgattgtacagtttaacaaatggtaccaaaatggggtcaatggcatttcgtag

SEQ ID NO: 65056 - DNA, 102 bp, Heterodera glycines
atggccaagctgatgctggcacccacccagctgtggtgcttgtacgtcgacgttgtcgtcctccaatttgacggcaacgcaatggacgcaatttcgttggcg

SEQ ID NO: 65057 - DNA, 443 bp, Heterodera glycines
atgcaatattttgttggcacccgctatcaacgaggtgccggtcttctgaagaatgtggcccgtttcctgatgccggttgcgtcaaatttgctaaagacggtgtcacgtgaaggacttacggccggcaatcgagtgcttgaagacatttcccagggcaaagcgctccgagagtcaattcaggcacatgcaaaacatggtatggagaacttggctgaaaaactgagacagtgtggaaagggtgccgccaagacaacaacaacactgacaaaaaacaaatcaagcgttaataataagaagaagaaatacccaagttcagtgatgacaaagggaaagagacatgtaattgaccaacttacatttgcaccttgagttgctctgacgaccaaaaaaaaaaatgtataaaagggataccaaaaggcgtgtgacgtgcatacacaggaaaa

SEQ ID NO: 65058 - DNA, 783 bp, Heterodera glycines
  unsure (1)..(783): unsure at all n locations
atgaccgtgccttcgtttccacctgcacccactttggaacttaatgcagcgttgaaagccggctataccgtcagaaancttttttatgtcctacaatacgaccaatggagcgacaacatcttcaagtcgtacgtgagcgaaatgatggctttgaagatccatgccactggcttcccgtcgtggtgcggcagcgaaggggaaaaagacgaatatatcgaggaatgccgacaactatttggaataaaactcgacaagcaaaagatgaaagctgagccggggaagcggtacattgccaaactttgcctcaactcactttggggccgcttctccatgaggaatctactttcgaaggcgctgataacagatgactgtgacaaactactacaattgaatgacaacaaaaaaatcgaagtttcgggcgtcgaggaaatggatgaagaaaatgaaacgtatttgatcagctacaaagagaaggaggaatttgtcgaggaaaatccatactccaatgtcgtcatttcactttttacaacatctgcagcacgactacatctctatggaattttaaagaaagttgcggatacacctaaatgcgaagttctatattttgatacggtaatttgacaatttaaaaaatatttaaattttatgaatttttattttaggacagcatcatctacgtgcatcctgaggacaatgacccactccctacaggaaagggacacctcggtgagctgacagacgaaaagccggaccatgacattttggagttcatcagcgcagggt

SEQ ID NO: 65059 - DNA, 128 bp, Heterodera glycines
gtcattaaaaatctgtcgaaaaataatccccccgtctccattaaaggccctgtctccaattatgtccccctttctgaggaggttgaaaaataatccccccggggccttaattagagcaaatacggtat

SEQ ID NO: 65060 - DNA, 327 bp, Heterodera glycines
atggacaaaaaagagaagacggagggcaaagcgacaaagaaaggacggctgcagaagaggcggacgacaccttatgacatttgggaggacgaaggtgcaaaaaaagggtggaatttggggattggcattattgacacttggacatttaacccaacgttaaagcatcctgataaatttagttcgttcgtttaggcgaacaaatcactgccaccactaaatgcaaacgcgtgaaatacgtgccgaatttgctcccggctgtggtgccacctcccgagggaatgtcttacaatccgccgattgacagttatttggtgaggaaataactga

SEQ ID NO: 65061 - DNA, 95 bp, Heterodera glycines
ggattatttttcaaaacacctcgtagactgggggataattggagactgcgggattaatagagactgggctataattagagcatatacggtattat

SEQ ID NO: 65062 - DNA, 1855 bp, Heterodera glycines
atgaatatgtcgtgtcactttacggtgccatcggggggcctttcctttgttggggtaagctttcactttatttgtccatcatttgcagtttgtgggtgttgtgttgtcaaggatttttgttccattcccttttccgaatgattcggtttcgattggtaaattaaaatggataatccccccgctccccatcggttcggttcgatctaatcgtcgtctcattttttacatacatttgtttactgaccgaaaagggttctctttcctctcattggtcattcccgatcagatcagccggaaaaaacttcatttttcaaacggtttattagctagggtccgtccgggtccgtttttacaaaaaaaaaaaatataaaattatctgcaaaattaactaggtcgttctagagaattagacagttttcattcatcagcaaaatcggcatttaagaaatggcaacgccttttaacaaccgcattttcaaagtgccatccaacagaataaattttctgttttcgagaagctatttctttctttctttttttgctaaatttgctagacagttttcggaacattttgatcgcaaacaaaaaagaattagtattttttaagccttactaatgtaacttcataatattggatagagaaaggcatttagactaaattaaaacaatattcattaaatcaaattaggggatacacaaggcaaagtgccaccaaatgtcttaaaataatttacaatttgctttgtcaaaaagtacataaaaacaatttgtttttcgtgtctttttattgtaaaatataatttccggacattttaactgattggcacattacgtcaaagtgtttcatggtgaaatttttgtactttaaattgttttcaacacaattaataatttaaaaaataaatttaattttcttttctttttcattataaatgaagtcttacattttcacactcagaagacaaatattttttaaatactctgaataaactttttcaatttttttaattgtaaaattgccaagaaaatatttattctgctttgttatttcgtaattttttttaatattttcaaattaattaagctaaatgttgtccatcctttcttttgtgtgttattccatttatgaactcgtctccatcccgttgtatctgcgctctgatcactaaaaaataattttcttcaccgttcttccaatttttgagcatcattggcattttggtaataatttcaatttatgggtcagataatttatttttttataaatttaattgtttttttaaataaatgtaaggaaattgcccattttgtggtcgatgttgtgttctatcggttgcccatttttgctcccacttgcccatggttcggcacgtcgcccttggcactttacaccattggcacatttttggtgtattttttcgaatatccaatttatgtgcttcatattgccatcacccttaatcgctgctcgtgcgtttgggccccaatccggcacaaagaagtaaaacaaacacataaacaatttacaccattacattttctcagttttggtgccgtgcttgtgagccgacaattgcgtttgcttttgctctttctttggcattttctgcccaccgtttggtcactattgcccagttggtccaactcgacaaaacggacccgtccaagggctcaattccgctcattgtcacctaccaactttattttgtatgttcaaatttttgcgaattcatttgaaatttttgtggcacttcgtatcgctctttgattttcttgggattttcagaaattgaacctaacttttttttaatcaaaaacaggaaaatcgcgttttctaatattttattgtaaaaaa

SEQ ID NO: 65063 - DNA, 588 bp, Heterodera glycines
atgaaaaacaatttcgatatttatccagcaactcctaaaaagcagcttaatgttcttatttcgacaaaatatataagaatatattaacaaaaaatgtgtaaaaatcatcaggaagagatttgcgttgtccatggcaatgttttggcacggagtgcacggcacatggccaacaacacccacgggtgactttcggtgccaatgatttccaccaggggctgctgcatgaacagaaagtagttgagctggccaacatcaaaaacattgtccagcaggccaaagtgcaagctgaggccaaaacataaatatttatacaaaccgtttttcaagcttttttataatcaaaaataatgaacaaatttataaaatgaaaatttatgtgagattgaaaatattccaataacacggaccacttagcaatgatttgctaattcgaccttattttagaaacacattgatttgacaatcttctgactaagaattccaaagaattgtaattgaaagaaaaagtgtatcatgtcaccaaatttgtgaagattaagcaataattagttgggatttttacataaaaatatgaaaaaggcgaataaa

SEQ ID NO: 65064 - DNA, 1134 bp, Heterodera glycines
atgtcagttgaaaaagatgggtgtatgggtaatccaatattaaatatatacatccatcaatcacatttcagatgttttgacaagacggtgatcactttgttgaaggattggcagtcgtttttttctggcggagtttcgttggaacttttggacgtcggactggccggaatggtcgtttggcagctgtattccgaacgattgttgccactcattggaaaagacaaaatcttcgcatttatcaaaatcagttacaacggaattttgtgcttgcgccatctcaccggatttggacttggcgactttgtcaaccttcaaaagataagtctcagcattatgactgaagatgagcgtctcggcttcacctccgttggcgaaaacgaaatgaccgctagccaaagagtcgccgagtggcttcaaacgccgctttcaaatggtcagccgaaagtgctcatgaccgactttgcttatgaggtgtacaaagtccaggatttgcgtcgtctgctcaaagaggtggagcaataaaacgattttaatgtccttgtttctaagattattcctttttgtgggttggattcatagaaagaaaatggttgtccttttgtttgctgtccaaacttttgtgcaaggggttcagggagtcattccagagatggtcctttggtttcgacttgggcgggggaatacccccgggcgacaagttttttagcaaaaatttaacaaattttttttttgaaaagtttgggtgaggttggtcttggaggagcaggggtttttttccctccaaaaaggattttaatacagaaattttttggtttttcttagaaccttttctttcaaaaatagagatatgagaaaaccgtagcctaccttaacacatttgtaccttcagctgttcacgtccgcttcctctgctgccaaatactttttcattctgccaaaaatggcttcagactcgttgaatttggtgaacaacaacacgcaggaacgcatgatggaccgaatcatcaaagaaaagtgttggctcatcagagccccaattggtgacgaagtattcacgaacgaattggatgaaaaggagctgaccaaagtctgcgagaattcgatggctgccggtttttacgaaaaagacattgg

SEQ ID NO: 65065 - DNA, 702 bp, Heterodera glycines
atgtgtatccctaatctttgcttgcttgtccatttcagtgttttctcaaaattgacaattactccgatcatttgtaaagaaatgactgaaattgtttgcaaaaaaattgtcattcgctggaccgaaaaggaagaatactcggcgattgtggctacaattgatgaaggcgtgacaacgcaattcgtatgtccagtctggccgcgatacaaattcattggtttcaaccacatcgaattgcggtgagtgaaaattcctttttaaccatattagtgttcatataatttttttgcatagctaaactaaagtctgtgtatcatattgcttaagaaacggggtcggacgttcattggacagaaaaatgatccattaaaagcataaatctgaaaagaggggatttttacggtcaatgcttaagtattgttggtaccaaacgttaaaggctatagaatttttttaaaccaaaattaattttcttgaatatactcgaaaaagctgcgtttcgtttttctcgttgtagtttttcttaatgtcagttgaaaaaggatgggtgtatgggtaatcaatccaatattaaatatatacatccatcaatcacatttcagatgttttgacaagacggtgatcaatttgttgaaggattggcagtcgtttttttctggcggagtttcgttggaacttttggacgtcggactggccggaatg

SEQ ID NO: 65066 - DNA, 575 bp, Heterodera glycines
atgaggaggagcattaaaatctgtaaaagtgataacacatacagagaaagaaagagatggacaccacgaaagagagagacggagagaaagagagagagagagacagatagacatactgacagagatagaaaaagagcgaacaagagaaaggaaaaagagacagacagacaaagagggagaaagaaaaagagagacatacagaaagacagagatggcgaaaattggtagaagggatgagagacgaacagagaggcaccagtgaaaaaagataccgtagattttttatttttgtagttatttttctcaaaaatttttggagagagagagagagggtggcggtgctgatagccgacgcaatataaaaatttgacccagaaattggcaatttccttataattccttaaaattggctcaaatcgcaaattctggtaatttctttgaataaaacctattaataattcaatttcagcttcaccgagcttccttccacaaaattcttcttgaaaaagagttccgcaaaaaagagatgtgaaaataaaaaagtgaattcttatgtgataccgagtttttattaa

SEQ ID NO: 65067 - DNA, 2228 bp, Heterodera glycines
atggccgaaacggtgtggccaatgatcagcaacgagaacatcaaggcaatttgcttgtatagcgggaagcgtttcgtggtgctgcgcaataccaatcccgcggcgggacgctgcgagtgcgaaaagcgattggtgtcgcattcgatggccatgtgctgtacggattatgctcgaaaggaatgggcaccaatacagtgtcaatgggtgcgtcgtaattatcatcaattaacaaaatgtgtaattttaattggagtaaggacgggaatgggaatttaaaacggacgggacttgtcgggaaccgggatttaaagaattagaaatttttattatttttcccaaacaaaaatattaaaatgtaaaaaatatttttttcatttcatttatttttcatgtgaaaaaaacaattagactaaattaaactcaaaaaatgttttaaaatttattttaattcatccaatcccttccaaagaaatgaccaaatacaatgcgtatttcgtaagggactagaagaaatcgaaatagaactaaatttattgtaaatttaaataattgaattaaacgattagaggataaatctggttttgaacacaaaggcttttaacttcagaaaatttattggcaatttttgaaaaatcctatgtatgggaggggggccggcagtgctggcagacacaccgccggagaaaagaatctgaagtttcaatttgattttcagaaatagccaagtttgggaggttttgagtcgattttttttgaattaaagagtcgttactgccagcgatgccgactggcgccgctgggcggtgcgcggggctagcaagggcgtagctaagctaggccggagctttaggcttaagcttaggctttattttgtaaaatttattgtacggcggagttgtccatcagtcgaattgtcccattagctgagttgttcgtcagctgactaaaccagaagccctttaaataattaatggatttttgcgaaataataaaaatttataatttgctataatttagttaaaaaatttttaaaaaatcaatttgtctcattggattcaatcaattttggtacttattttagttaattttttttaaaattattaacagacagatttaaaatgttagttttttggaattaaaataattttaaaaattgaaaatattttgaagtgaaggtaaaaaactgtgacgtagtaataaattaagttcaataaaaaaagttttataatttacttaaaaaatatattatacactaccaataaaaaataaaatgaaaaacatttgttcataggggggaaggatttgatcgcgcattgctgcgcaattgcttcaagctttttcaaaatatttaaatggtttttgaacataattttggcctttcatactttcttagttatcagattgttttattggtctctgattgtaccgtaatcattttagtgtttggacggtaacgacaagaacactttctggcaggagttatgcaaatttttgcatatttcgtcgatggaaccgatgttgacaaaactcacggaagtaaaaggggggcattttggaatttggcacaaaaatggcgcaatgaaaattgtgcactcgtaggcagaaaagtgtgaaacagccgaaaaagagctctgaataggaatgatttaagaaatgtggggcacctgcgagtgagccaagagcggcacgtggtcccgcgtgggattttgctggatcctaatccgaaaacgtgctgcaaaattaacgaattgaaaaaactaagaaacatttacgtaaatctgaaaaaaatatttaaatctttctggccttcgtaatgaaacagtggtacttttgatcagacattcttatgaaattagaagaaatctgagcaaattttctcagaatttgggaaagattttctttgttttagtgttttgtccatatttttcttttatattctactttttttgtccatgttaaaacttttccagcatttcggtgagaaattcgttcccatcaactccttcaacagttcattctcccaaatgcatggttcatttaaacattccgagctgcacaatgtgccgtcgaataacactctaactaattgcatttggggctgctgccatttcgaaatgcactctcgaattcgtcgtgaaaacttacggaaaactgaagaagataatgatcagatctgttttgataagaatgccgtcttctttagctttcgggagacggacattgggtaa

SEQ ID NO: 65068 - DNA, 564 bp, Heterodera glycines
atggtggtcaccaacaaggaatcgacaggcagtaaaccgacacacatgcagaaagccaaacaacatcgagagggtaaaacattgagaaggcaccaagtcaacaagctcttgtccagcgctgcaacgttacgaccaagacgcaagcgagaatcggttcccaacagcacaacaccaatcgtgattgatctttcttccgacagcgaaggaaactcatccgatgtcgagatcatacaagacccagttgcggatcaacaaatcagctcatcgaacaaacattcaactgctccactgccgaaagaactgcgaagatcaacagcaacaaagcagagttcatcaaattccacgcgaccagtatcattccgcaagcgaacacaaggaaaagcagctccttccgcaggaataagccgaacattcgaacacagcagccaaacaaaagccttgtcgccaacaactaaagaaaagagggcaaaccaacaacacgccatggcactggaaggaagtaccgatccaacgacaaatacttatgattggcaatcagcgaaattctccaagcatatgctttaa

SEQ ID NO: 65069 - DNA, 1998 bp, Heterodera glycines
atggtcagcctaatccagaagggcatcacattcacactcaaggcgctggatagtgccagaacgaccacggcactttcactacatccagacgccgacctctcaaactgggaaaacgcagtcaaattggagactcaatgcactcgcgtgaacagagaagtccaaacaatcgaagcacaactggacaatctacgcgacctctccaacaattggattgacctgctaaaccgcctagaaggagcagaaaaagacaaaggcgagaaagaatacgtcaaattcgacacgcatgagaaaattgccgaacgccatgacgcagctacaaccaaactccgggatctgcgggatctcgaagcaacgctcagtgccgatgccaaactttaccgaggcagaacagaaagagaagcaaaggcggatcagcaggcaaatccgccaccacaaacagcaatgccaccaatggcagcaccgacattcacggcaccgctctaccaattccagccaatccagcttgacaaattcttcggccaaaagcgaaaatggcccgaattctacgagtccttcaaatcggccatcggcagccaatcaatcagcaaagcacagaagctgaacttgctccgcaatcttctgggcggagaagcacgggaactcatcgctgggttccgcctggaggaccaaaactacgagacggtccttcagttgctgaaggacacttacggcgcacccgaagagcacatcagagcgctacactttgagctggccaatctcaagccgtgccgaagtcttcgagacacaaaagaattcctgcttcagctcgaacgactgacaagagagctgaacaatgccggagaggacatcgagggaccgcaggtgttcctcatgttggagaaaaagctgactccagcattcctacgcaacatcctcaacaaaaagggagaggatccggcaaattggacaacaacaaaattccgggacgtgcttaacgaagcagtccgcaaagaagtccaaatccaagaagtgatgggcgaatatggacatcactacgttcaatcaaaggcagaagtcgtttcagcagcacacgtccaatcgcccataacagcaaaccaaaggtcacgaaggcctaatcaaccaagcacacaacggcatgagtcattcatcgcctcaacactggatgagagtctaaggcagcaagcctataagaagcaacaggacatgcaactagcaaacagtcggcatccacaagcgcgagaccaagcacaaagcatcaacaggattccgccctatccttgcacgttctgcaacggcaatcattggcacgacgagtgcaaaaaagtgagcacactcaacgaacggatcagcatcgtcagagaaaagaagttgtgcttcaaatgcctgaaggcaaaccatcaagcatcgaactgcgctcgaccgtccaagtgctaccattgcaaacgtcggcatcccacagcactctgcagagatcagtgcaggtctgagaatgacatcaatatgccaagcaactcgtacagtgaaaagaagccaaatgaccaaaacggcaggcgatcaacagcgatcgaacaacagcagatgtgcaatgccgtccaaagcagggacaccagagcattgctaatgacagcaagggccacgattttcaatccggcacaaccaggcctcagcatgatggcaacagtgttcattgacccgggaagccaccgatcgttcatctcaagcagtgcagccaagcagttggagctgaccaaccttggaacggaagaatgtttcctcacaagctttggcgaaagagagccaaagagatacttaagcgaccgcgtcgcaatcggcattctttgtcctgacaacgacagattcatcttcaacctgaacgcgttgaagttcctgttgaacgaaatgccggtactacaactgaatgcggtggatcacgacgagcttcagcagaagaagcttaacctgccaaatgcgccacggcaaccagacatcttgctttga

SEQ ID NO: 65070 - DNA, 626 bp, Heterodera glycines
atgcgtttctccgctcctcgtcaagtgctcaaatatttctataaacggacaaacgcattttgggacaaatcgatgctccacaaggagcgagtcgcatatgcaaagctccggctgaagctgtacggcgcgttggtgctttccatgtggtatatgtagtaagtgccggtgaatgttttttgggcggattccctatgaagccgattcgccacttaattgtgacagaattatgcaattccaattttgctgcctttttgtggtacccctggggccagttttggtgccccaatttccacttttctccgttaatttgacttctgtcagtgaattcgccactcctccgcctgacgtgcgctttgacatacggtggttcttcagcagctcatttgccaattatgtgcagacaaagggtgccggtggcttggacattgcggatgagtgagtgaaaatgacaagttaccgtaggaaatggcatggccaacaaaggcacgggcttactgtaccgaacaaaacactaaaatttaatcccctttcaggaccatgtacaaacagttctcattttcgaagggcagattgttggagaatgcgctcgaaacgccggagggacaagcgatgggattgtccgaaag

SEQ ID NO: 65071 - DNA, 660 bp, Heterodera glycines
atgacaaacaaattcacatgtacatcttttacgggaataggccgttcatgtgacaaatgcgtcgacggacattcagccgaacagcacggaatcgcaaaaagtggtcgattgggtgaataattgggtcgcccctttctattttgtcacatttccactccttttttgcatagatttggaaaaccgaggcaaatccaacactttcttccgccgtttgtcagcttcctccgttactttggtccttttctaccattcgcttggcacacgttcggtcagtcagaaattgtgctgcaaaatgtatgaaatgctgtgaaatttctccataaatttgcttccattttaaatttttcaagatttttcacacttaaaagatgagaaatccgatcatatttttttgtaaacatttaatattgttttaaagtccaaaggtgaaaaaatgttttttatgttccgggcaagatcgaagatgagataatgcggaagggggggggggggaattctttacatggcgctttttttatcggagctcactttaatcattaataattcctaatattattcgaactcattttttttgttttttagccatgctatttgtcattgcccttctcgtgattgcactcatcgccttctgtttggtatcggtgtttatcggcacttggg

SEQ ID NO: 65072 - DNA, 207 bp, Heterodera glycines
tcggtctccccataaatctgggcgcatcggttcggggggactgccccgaaaacaaaaaaatcgattttttcaagtgtccgtttggggtactcaaacaattatggggagcaaaaatccaacgcagaattaaagtacaggctatagggaaactattcccgaaggattcagtctccccataaatctgggcgcatcggttcggggggactg

SEQ ID NO: 65073 - DNA, 406 bp, Heterodera glycines
gtttgattgaattgtgtgagggaataaagaaagggaaaaatttaaatgcggaagcattttcaaaaaattggcaaaaaatggtcaaaattggcacagaaaatgggggaaaacaatggaaaagcgaagggggcgaaaaaatagcgaaaccaaacgaaacgatacagaaaatgcattttgaagcgatgaaaagcataaaacaacagggaaatgacacggaattggatgagataattggcaaattgatgcaaggttttagtcaactattaatagaaggagcaaatccttgctaatcgttttcataaatttaaaattcttttattaaaattggataaaagaaaaagcaccccacccctccataaatttaccttacctatttagaatctcagataatgcacgtttgaataaa

SEQ ID NO: 65074 - DNA, 242 bp, Heterodera glycines
tttaggcacgtcattcgtaaacgtaaggaggaggacaagcccatctggtacagcaaataccttataaatgacccgaaactcggcacccgctacttttggacttttgctggggtgaccaccgttctgttcggtgcatacattcgccgctgtcttcgctgattggacaaaacgatgggaatgtcttattttcggaagtgtatatgttatttagacggaataaattgttaggataatctcaaaaa

SEQ ID NO: 65075 - DNA, 394 bp, Heterodera glycines
atgtcagaccgccgaaaagaagccgaggaaaaaatggaaaaagcaatgtaaattaaaattaaaatgccatttttaaatttcaatttcaattttaaattttgttttcctttttttcagtttcatttctgccgattgttggctcggagtgttcgatttgctgccaccttcacaacttggccttggaattgcgatgatcagccaccgatttgactattacgtggacgaacatttcaagacgcgaaaaagggcattggcatttattcgaattcgatacaaaatcgaagaaaatggcaccaagggaatggaaattgtcaattctaattgtgaatcattgtcaattccgcaaattcaattgccaaagaaaatcatcggattcaaacggatcagcatctag

SEQ ID NO: 65076 - DNA, 1248 bp, Heterodera glycines
atgcagcttctggctgacccgcttctgaagcagattgccaacaaaactgcatttgtttcaattgaggtggttacttttttgtataaaaacgaaaaaataataaaatttattaataacttttgtccaaaaatgctatttttacgattttagcttataaataatcacttttctgatttattacctctaaattattatttagttgaaccatttacagtcttttctagaaatactgttgcgtatttttaggaatttgcaattcgcttcaaaaacattcgcatgaactgttcgatggaaattggcaacgaatgtgcggctggcaccaagctgatcatgttggcaatgtcgggcagaacctcatttgagaggcgaacgggcgcgagagagacatggatgaaagaagcggtagggaacaatttaattgaatttattattattaatttaataatttattggcgaaataacgggggaaacaatttaaagcactaattaagttggtttcatcattgtattgatgaaacacgttgtgtaaattatttaattgggttaatcaattttgaattttaaggaattcaattaatgagaaatgtcgaataaattaatagtgagaaaaaaataattgaaatattcaattaaaaactaaatttgatcataataggactggctgcactcatttgaattttaaaatttgaacaaaatggacattaattgttttttattgattggataaatataattttggatttaattaggcacccggagaaattctccgttttttcgttgccgacccatcggcaggagaagcggcagatgtgaaacaaaaattagaagaggagcagaaaaagcatggtgacattgtgtttttgcacggctttgtggataagtacaagcatttacatctcaaagtgatcagcaaatgacaattaattaattaataattaattttctttcaaatgataaaaacggagaaaaaaaagcatttattttggcaattctttgacaaatttaatatgtcggatttacataagcctatatttgcagtggttcggtgctctgacatggcaacaacggcactgtgccggtgccgaatgggtggcgaaggtggacgacgacacggtggtccatctgcgccggatggactattggataaacaaaaaatttcgccaaattgccgatgaccatccgctgattatttttggggatatggacgccagtcgaaagccatttcgggacagggaaatcaaatggtag

SEQ ID NO: 65077 - DNA, 1290 bp, Heterodera glycines
atgacaacccacaaaagttggcagtttcatgaatacattaaaaaaaaggtgaattttgttttaaggtatgccatttcaaggatcaaagaaaaatacttaaagatcgatgtaacattttttaaaataatttttaaatttattattagatttgaagggaactgcattccaatcgtttaaatattttgaaactcgacgaacggaaatccgtcaaatttttcggattgaacaaaaactctgtagaactgttgacaaatacaaaaaagaattatttgggtttgtattttaaatcaattttaatatgaatttaattaaaaaattttagtgatgatcaatcacataaatattgtgtgtatactcgtagaggtgattttgttaattttgcttgggcttccaataaagacttcactgagcagggcatcgaattcggagttaaatatttaatggtaattaaatcaatttacgttttcaatatttttattcaaaattaagggatcctttaaaaacatttctgtcgtcttgttgggagaagacaaacaatttttgaaggatttaaaaatcaatcaacaggtaataatatatagatagggcttatatttttaggctctaaaaaattcataaaataagctttaaaaatggaataggttctaaaaagctttaaatttaataaataataattttggtcctttggtcgcttcttaagaatgtgtttttctttttcattgcatttttttaaataagttttggcatattgccaaaataggcaaaaaaaaaaatggtttttcaaaattttttaggcttttcggtttaaaattaaaaacctagaaaataggccctaataactcgaaaagtaggtttattaatatgataaatttaaattttatagttaattgtcaacgtttatttgccaaaagcaatgccgcgaattaatgacttggcattttccatcataacatgcgattcgttgctgataacagcaaatacttcaacatggggttggtgggtcgcttatctgatgccggataatgccaccattttttacaattcaaaattcggcaaaggtaaggcttgtttttttttgaaaattgaatttcggttttgcactcatctaatttacttaggttttccacataatcgagaaaactttttggctgaatgggtaccgatacaattgttcaacggaaagatgactttagattaaattattattaaaattatcaagaacctacttaatccaattcgctgagctattgttaaattaccattttacaattatttaattgttttaataaa

SEQ ID NO: 65078 - DNA, 54 bp, Heterodera glycines
atgcgcacccgtccgatctggacagttaagcaacgattgctgactagccaaaag

SEQ ID NO: 65079 - DNA, 677 bp, Heterodera glycines; identical to SEQ ID NO: 63383

SEQ ID NO: 65080 - DNA, 1421 bp, Heterodera glycines
  unsure (1)..(1421): unsure at all n locations
ttgcgcttggtatcacggatgagatgcgaactgaaccggccgactcgcgcttctccgagcacgaggcccaatggcggatgaacaagcgtggcatggacggcgaaacgctcatccacctgttgttgaacaggaaggagttggtgtgccatgaagtggcacgtattttgatcaaccgttacccgggcatggccagggacatctatttgggcgaagagctgtttggtgaaattttgaaccagttaaagtcaatttaagaatttcaatctgtttatttggttctagaaatgcccaaatgtgatttttgtaacgttcaaatcaagaattcccaaattgcgttataaactctcaatttaattgccgcctggtcctggccaagaattatcataaaattttatgggaaaatctgcaaaattgatattttggcataattacggaaattttcttgaggatttcattttttcaaatttaaaatccgatttattgtcatttcaaatgtcatttttgtcgaacctaaaaattaaggccaaggttgtcttcatttggcaattgtcaacgatgattatgacacggtaataacaatttgaaatgataattttttttcatccttcacaggccaaaattctgctggaatacggtgcttctgtaaatgcgcgtgccaacggcgatttctttatgccggatggctatgagcccggtcacagcaatcgaaacatggattatgaaggtaataaaaatttttaaattaattaatagccatttataaattacttttttttacttaggctatgcctattatggagaatatccgttggcgtttgcagcttgtttcgaaaacaaagacatttatgacctgctgatacagtatggtgcggacccggacaaacaggacactttcggcaatacaatagtgagcgctacaatatatttcaatgaaatcgtaacttttcagctccacatagtgcgtgattcacaacagaaatgtaagccttttgtaatttaagttgtatgttcgaaattgttgtatgtaaattaaaaattacaaaaaaataaaaaatatttaattgcacaatttttgctaaaaaaaggttgtttaagtcattgtacagctattcggccaagcattggcacaaaccggcacacagtctcgagaactttgctggccaaacgccgcttacacttgctaccaaattgggcagaaaacaaatttttgaagaaatgcttgaattgatgaaagtgagtggnnngggggaggaataatntagtaagattgatcatttgatcagaaaagggttgataacacggttcaatgaaaaatagtcaaaaaagtttccgaaaatcggaaatacgtctaagccaaaaataatcggaaccctaatggttatatgaaagcatagcagttagaaattgtatggtttttcaaa

SEQ ID NO: 65081 - DNA, 679 bp, Heterodera glycines
atggttttagcaacgaaactccttgtcaatataacgtatatattaactagcgggtgcgtgaaccgtcgaatctggacctgggaaaaagcgcttcgcgctttgggagcttcgctacctagattagctatgggttgtggagtaattgttggtccagaagagagttacaacaaatgttagaagaagtacaaaattggtagaagaggtacactgggatttttaggctgctttgtggagaatagaagaggtacaacagcgattagaagaggtacaactgtgatcagaagaggtacaaaattgttagaagaggtacaaaagtgattagaagaggtacaactgtgattgaagaggtacaactgtgatcagaagaggtacaaaattgttagaagaggtacaaaagtgattagaagaggtacaactgtgatcagaagaggtacaaaattgttagaagaggtacaacagcgattagaagaggtacaactgtgatcagaagaggtacaaaattgttagaagaggtacaaaagtgattagaagaggtacaactgtgattgaagaggtacaactgtgatcagaagaggtacaaaattgttagaagaggtacaaaagtgattagaagaggtacaactgtgattgattagaagaggtacaaaaattgaatgcaatttattataaattttaaaaa

SEQ ID NO: 65082 - DNA, 812 bp, Heterodera glycines
gcactccgacgacgaaagctgctctttggctttggggttggcactgtcatcggcgccggcttttactacatggacaaaaacaacgaaaggcgcttcaaacgggacaaagtcagtccatttgaagattttatgtcgagtgtgaagtccatcaaaatcgagacggaagtttgcaattcatttcaatttgaggacgtttatttcgtgtccaatgcgcatgcggccaccgttgacaccaaagcggcgctgaacaaacgcccgtccggctcacttccgacccgcgcggagctgttgaaaggaatgcgtgacgaggaattcgacatccttgtgattggtggcggagcgacgggcgcgggggtggcattggacgcgcaaacgcgaggtcatccattttttgtccacttgtgccgtggcactttcagtgcacttggcaatttaaggtctgaaaaccgcgctggtcgagttggacgacttctcttcgggcacaagtgtaatttgtcttccccgtcttgtctttccctccgttttgatgccttttcccgcttcagtcgcgctccaccaaactcatccacggcggagtgcgctatttacaggcggccattatgaagtttgaccgtgagcagtacaaaatggtcaaagaggcgctgttcgaaagggccaatttggtgggcaaaaaaattcgatttggttgaaaattgacaatttttacatttaaaaatgtttcagttggaaattgcgccccatctgagctatccgctgccgattatgctccctatttacaagtgacacacacgtttttgttttatttatttttt

SEQ ID NO: 65083 - DNA, 864 bp, Heterodera glycines
atgccgccatatggtccggctcacaaccaacagcaacaaatgatgccaccgtcggcgctggtcggcgttccaccgggcgcagctgcaacgaacacttggatggattggaattcgtcagcggcgatgccaccacgcggcacttacccgatggcgccgacgaacgccatgaaggcgggcacacagacgggcacgtacattccgccgcagagtggcggaatgatgccaccgcctgctgggcaggtgccgtactacgccgttgggatgcccacgtcgaccactgctgtgcacggtcaaccgatggaaccggctgcataccatcagcaacaacagcagcaacattaccaagccgttcagcagcagtacacaaattaccaccagcagcagcagccgaacatgatatacaactcacagcaacagcaacaaatgctcttccatcagcagcaacaacaacagctcaatcaacaaatgatgatgcagcagaggcagcaacagcagcatcgccaaatggtcgcgacggcaacggcaccaccggcggcagggacagcacagcagaaagcagaacttggcggagtccaggcaggacaaccggcggtgcaactgggaagctacgcgtcgtcagcagctggtggtggtggtggtggcatggcgccggcggcgggcggtccgtcggcagtgaattctgctgcacagcagcaacaccaatggcctggcagtgtgacgcctgttgaggacctttacgtacgttttcatcggcgggttggttttggaaagagcaaaaatgcttgggattttgttttaccattttttatgtccccatttctacgcattaacctaaccatcgccatgtatgatataattgactaa

SEQ ID NO: 65084 - DNA, 166 bp, Heterodera glycines
ctgctcgcatccaacagtcgacgactgtgaaaaacaaggacattcggaaattcctggacggcatttatgtgtccgagaaggtggccattgccgatgaatgagcacacaaagataaaaaacccattgttaccccttttttgttggtcagaatggataaagaaatgtt

SEQ ID NO: 65085 - DNA, 258 bp, Heterodera glycines
atgaacagatcagacagctttcgcctgctttcaagtgtcgcagttgaaggtattctaatctttgttggtatggaatgggtggaaggctgcatttgaaaagaactcttttggtgaaatatttttgacatttttcaatttttttaatattttttagaagagatggattccaaacctcaggagcatattccaataacggtctaacataagttttgtacaaaataatccaaatcctagaagattttgatttaataacccgaa

SEQ ID NO: 65086 - DNA, 2022 bp, Heterodera glycines
  unsure (1)..(2022): unsure at all n locations
tttagcataaatcaaaaatattccccccttaccaatgtgttgttaagaaattttaaatggaggtgtattccaataaaggcgtttaccaaagaaagattttgactcctaaaatacccaaaccttttatttagcacccattaaaggaaaagcttaaattttttcaggcaagcttaaaacctgcccccatctaaaaaaaagcactattcggatagcatatctttttcaattaaaaatacaaacaaaataaataccataaccaaattgagaaaaaggctattcaaaagggaagaaattctatttataaatatatacaaaactttaatgtcaatccctttgaaatacctaatctgatttatgaagataaatgctatcataacagtgctgagaaatgtgaaatatttgccaacttatttgccaattcatttaataataaggaaacagacccaagcaatacatacttgggtaatattatagaaaatgatcaatgctttatatcggatataaattttaacatcatcgagacccaaaatcttatgaaaaaacttccgaacaaaaatggcacttctccagataatattagctataaaattttaaaaatttgccattcttctctgtcaactgttattactgacttgtttaggatctcattagacactggttcacttccagacatctggaaggaatcaattgtttttccgctttttaaaaagggtgacaaaaataatcccgaaaactataggccaatttcattaacctgctcactttgcagggtaatggaaagaattttaagcagacattttacaattttctactaaaaaacaaaaaaatttcggaataccaatttggttttgttagaaataggtctacaacgagtcaattaataacagttgtggaagattggtatgaggcaattataaatggaaaaaatgttgactgtatttatattgactttcaaaaagcatttgactcagtgccccatgaattacttttatacaaattggaaaaaattggtataaggggcaaacttttaatttggataaaggattttttgagtaataggacttttcgtgttaaaattgaggaggctttatcctcgaataaaaaagtttgctctggcgtcccccagggctctgtcctgggccctttattatttttgatctatattaacgatcttcctgatgctttgccatcaggagtgagaattaaattatatgctgatgatgttaaattgtatatttgttataaagcgagagctgacacagaaattatgcataaagcattgcataatttatccgaatgggcaaataaatggcaaatcagaatctcaattaaaaaaacttttgtacttcatttagggaacaaaaaccccaaagaaatatataaaattgatggaaatataataaatgttgtggatacaattagggatttaggcataaatattgataataaattgcaattttccaatcatgtcgcacaaataataaagaatgcatatttacgtatgcgttctttatttcgggttattaaatcaaaatcttctaggatttggattattttgtacaaaacttatgttagaccgttattggaatatgctcctgaggtttggaatccatctcttctaaaaaatattaaaaaaattgaaaaatgtcaaaaatatttcaccaaaagagttcttttcaaatgcagccttccacccattccataccaacaaagattagaataccttcaactgcgacacttgaaagcaggcgaaagctgtctgatctgttcatggctcataaaataatttatggccgaacagatctgaatccctttgaaatattcaaaccttctgaacgctttaacattcccttttatagacttaattcgaaatataaactaggcaaaaaatttatacctgttgcagggcgagtaactaaaatttggaaccaactcgatannaagctttattgaaataactcattannatcatttaaaaataaaactaaaactatttcattcctgtaaaatagaccggnaaaa

SEQ ID NO: 65087 - DNA, 546 bp, Heterodera glycines
atgtctggaagtgaaccagtgtctaatgagatcctaaacaagtcagtaataacagttgacagagaagaatggcaaatttttaaaattttatagctaatattatctggagaagtgccatttttgttcggaagttttttcataagattttgggtctcgatgatgttaaaatttatatccgatataaagcattgatcattttctataatattacccaagtatgtattgcttgggtctgtttccttattattaaatgaattggcaaataagttggcaaatatttcacatttctcagcactgttatgatagcatttatcttcataaatcagattaggtatttcaaagggattgacattaaagttttgtatatatttataaatagaatttcttcccttttgaatagcctttttctcaatttggttatggtatttattttgtttgtatttttaattgaaaaagatatgctatccgaatagtgcttttttttagatgggggcaggttttaagcttgcctgaaaaaatttaagcttttcctttaatgggtgctaa

SEQ ID NO: 65088 - DNA, 695 bp, Heterodera glycines
atgtacatcatcggtgctgtggaaatatttctcatctacattatgccacaggcgaaattgttcgaggacatggtgagcaaatcaaaaatgtgcaaaaaattaaataaaaattcgagactctctcgagagcaaatgtaatctgatcaatttgatcagagtgatttccgatcagcaaaagggggtggcactcttttggcattttccccacttgtccaactttcccatctcatctgatcaattgatcagaataagagttatttccgatcagcaaataggggtgggactcttttggcttttcccccttttttgcccaacttccccccccccccacttcccatttcagtaccacaattttcgtctgttcggctcacttttgctcattttggtcggtcttattgtgctggcgggcgtcaaaattgtgaacaaatttgcgctcccggccgtgctgattgtgatcgcgtgcattgtgttcacttttgtcggcattttcctcaaatttgacgggtccgactcgctacagtaagtgcggcccctgtcccgccataaaagcacaaaacatttctcattactagagaccggacaactgaggcacgatgagggaccccgagtcggggtcccaactttaatcccgcgatcccgagaaaatcccgcaggatcccgaacttaatcccgcggaatttgaacggggccattga

SEQ ID NO: 65089 - DNA, 1080 bp, Heterodera glycines
atgaattcccaattgctttgcatctttctgctggtcatttgcaccgtttccattggcacactgacacaagcaaagccaattccggaagaagctgcggcaaccgaaaccaaagcggacgaaggcaaaaaagaggagccgaaaaaggaagaagccgaagcgaaaaaggaagaagcgacgaaggaggagccgaaaaaggaagaaacaaagaaaggagagggcaaaacggaagaagctaagaaagatgaagccaaaaaggaggagccgaaaacggaagaggccaaaaaggaagaagcaaagcccagtgccccggccgtcttaactgaagctgccgataatgtgaacaaagcggtcgatgacttaagcgttaaacaggtcaattaattatacaaaaagtcaagcaattaattataataaatgtttacttaaaataataatcactcattaggcaaaagcattgaaaaacgcggccgaagcaacggcagagaaaacgccggaagagcaggaaaaagcattgaaagaagtggcagaaaaaggagggaacgaacagctgaaggcaaacaaaacaaaagcatcgaaacaattaattatttattaattaccccaattaagacggctgtcaacaaaattttggaggcaaaagcgaaaaacgacgcggaattggaaagcgaagtgaaaacgaaaacggcaacactttctgaggacagcaaaaaggccagcgcagaggtgaaaaagcaatgaaattatttattgaaaaagcaattgtcagtaatttgattttaaatgtcaatttattttatttttttgcccttttcagttgactttgataattgaagacaaaaagacgactttggacgagaaggtgaagcggacggaagagctgacagccaaaatgtcggacaacacgaagaaggagctgaatctgaacaacagtgccgacgtcgtcgccttcgtcaagtcgtactccgccgtcgccgtgccggcggtggccacggagggcaaagcatgatcaatcagtctgatcggaggattcggcattgttgtgtgatgaaatgtagccaataatgaaattcattgattaaa

SEQ ID NO: 65090 - DNA, 799 bp, Heterodera glycines
atgaggcacaccccacggcaaattcataatggtggacgcgcggcccaccgaaacctatccaggtcaaggaagtgtagtgtcacagcagcagcagcaacggaggagaaggaaggagtggagaccaacaacaacgacgacgacaacgacgcggacaaagacgaagacaaagaagtgagtcggatggaatcgaggagaattaccaaaacggggagaagagggatgggtaatcaaaccaaaaccggagagggatgggtaatcaaagggatgggtagcggtgggtggcattgcgcggtgggcgccgcgcaaaattatgattttctgactttgatctaatcacacacacacaaaacgggcggaggaggagcagagcacagaacagcaataaacaatcaaaatagtaaaaatgtcaaacaaatcggtggggtaattaattttaaaaatcggatttaatttattacaataaaaaaaatggggagaagcgagagattccatcggtgacgacagcgaaggtcaagtgcgcactttttgtattgggtacgagtaaaaaatgaaggccgaaaatagattattaaaaaatattctattaattttataaaataaagaattttcaattaaactttctcgggtccgggtaccccaccgagtacagacacacgcggcttttccaagacactgacccggtacccggatccgaatttcagtgaatccaaatgttcggtatccgacccggtaggtccgggtcttatcgtacaaaattcactggtaagaattggaagggaaggaaaaacagagaaataaa

SEQ ID NO: 65091 - DNA, 1142 bp, Heterodera glycines
atgctctttttcccaattgccactgttttgctcggtgtcttcgttggctcccttcaggggaaacccaccggtacagcaaaaagcgatccaatcaaaactaattatctgcgaatttcagaacaaaatgccgaaattaagccggcagcacccctcggtaaaaaagaaaaataaataaatatttttacatttttcatttttaaatttcctacagaggcaactcgcaacgaaatcaaagacacgccgcaacgcacagagaacaaagaaatttcgcgcagcgaaatcaacgaaatcaaagagattccgcgcaacgaattcaaaacggcgccaatcactggtgacagttttgaatatttaaaaaattaaataaaaattaattgttttaagagagccgtgaaagaccgttcattaaaagcgaaatcatccgcgacatcagctccgcaatgaacttcttgaacgagcaaatccgggagtactcggaacgaaccaaggacagagtgagtggagaggccaaggggaagcgaaacggaactcaaaatggacaattagcaggaggaattcaagggcatcattgaggccagaaacaaactcgagacggccatcaaaccattgcacggaggtgagcaaacaaattagggggcagcactaattgggctacatttggacaaattttcagtgatggagtccgacatggcttcttcgagcctggagacgtcgatgaccaactcggccaacatcgcccgacaagccctggaggagttgcccgtgaaacaggcatggcatttttgaagtaattagcactaattaaccctatttaatttcacaggtccgacaaatggaacaaattgcggaggagggaaagagcaaaacggtggaggagcaggagagggcactgcgcgagtacgcggagaagaacagcgaaagtgtgaaggtcggcggagcaacccccattcaacacaacaactcttcctctaaacggtcccataaaatttcagaaggctgttgaccaagtgttcgtcgccaaggaccgggcggacatcgctttggagacgtacttgaggagccacgctgacaccttctcccaggaggcgcgaaaggccaacgaccaggcaaaaagccaaattcaaaaggaaaagcatagctaa

SEQ ID NO: 65092 - DNA, 284 bp, Heterodera glycines
atgccgcaacaaaatgcgtttaatcaaccgccaaatggtcaaggccaatttggcccgaacggcttcaatttgaatgatcagcaaatgatggcacaacaacaacaacaacaacaaccgaacattgggcaaaacgcatttggacaaccacaacaaatgccaccgaaaggcaagttgattatcattttataatttttttaaatattaaatatttttgtcttcagcagaaggaagtggtggcattttttcaagtttggcacgcaaattgatgaattttatggccaaag

SEQ ID NO: 65093 - DNA, 182 bp, Heterodera glycines
atggctgaaggacaatgcgacgttgccgttggaggtgtacgcgtcgcgcattctgaccaatccggacaacggttcgctgacatttgtccactttgaggacattgacgagggcgactaccaatgcttggcattcaacggaaatggcacggcatattcggagaaaatgcgcctgcaacaagcat

SEQ ID NO: 65094 - DNA, 266 bp, Heterodera glycines
atgcgccggcttgtgaccattgacgggcacctgctcaaggcggggacgatggtgtgccaataaatttctgcggttcaaatggataaaaaagtgccaaataattaaaaatgattctttataatcaattcaggtattcgagaacccgacagcaattttgtcgagaacgattcctggacgagaatggaaagctaaagcgagtgaatgaattgatcccattctcagttggaaaatggtaacttttggtggattgtaatatatttaataaa

SEQ ID NO: 65095 - DNA, 511 bp, Heterodera glycines
gtccaggcctggatccaagtctcgaggagcctggatttttcatggacctggattttcctggatttttgtccactaaatccaggtccaggtttttccaaaataccgatctctaatcaccatatcctcaaaaggtactgtacaacatggacaacaaaatcaaggccaaactgcacttctgtcagtgggccgaacaccttaaccttggacaaaaattcagaatgtggcgctacaagaaagaagacgatccgtattacatcaacacgggtatcagcaagctcaagtcgttcataagccaagatccttcgcccaaggaaatctgtttttagaggatctgatcttcttttcaagtacaaacggttcccgaagagaaggcggaaatcagtactagggctcccatttttaggtgctaaaaatgatgggaaaataggtgccaaacagtttcaaatttagggggtgtaaaatcgtaaattttattcaaaaagcaattaaaaattcttttcaagaaaataaa

SEQ ID NO: 65096 - DNA, 52 bp, Heterodera glycines
atgatttctacaaacgatgacactgattcaagttggatagccattgacaacg

SEQ ID NO: 65097 - DNA, 1020 bp, Heterodera glycines
atgacaaccaatttgtcatcattacctttgccattgccattatcccccgaggtgtcgtttgtggtgcgcagcagcagcagcggcacaatcagtgggcacaacggcaaaacaaacgatggcacggcaaaagcagaacaaaagcagaagcatcagatggaaggtagaagcagaaacacaacaagagaagaagggcgaaaatcaacagaaaaggcaatggaaaaaacggagaaagggaaaacgaagacgacgaccaaattgataataacaattagtgcaaatgacaacggcactttggaaaatggggacaaaggaaatggcacattgataaacggtgctaaagacaacggcactttgataaatggtgccagcaacgcaactttggaaaatgggaccaaaggcaatgacacttctggaaattgtgccaatggcaacgacactttgataaactgtgccagcaacgcaactttggaaaatgggaccaaaggcaatggcacttctggaaattgtgccaaaggcaacggcactttgataaacggtgccaaaggcaacggcactttgataaacggtgctaaagacaacggcattttgataaacgatgccagcaacgcaactttggaaaatgggaccaaacgcaatggcagttctgtaaattgtgtcaatggcaacggcacttttgggaattgtgccaatctcagcgctaacacggaaagaggaatttgtgcgggcagttatattttggcgaatactactaaggagaatgatattttgaggaatggtaccaaggacaaggacaatggcacttatacggacaatgcaatttttatgaatggaaccattgccaacggcactttggaaaattattctgccaaaggcaatgacacccttataaatggaggcacaacaacaacagttttacccagcaaaataatgggaaaaagtgccgtttcgactccgacaaatggcacaacaaaaacaacaccaaatgaagcaattagcaaaggcaacaacagcaggtactaa

SEQ ID NO: 65098 - DNA, 694 bp, Heterodera glycines
atggaaaacaccaatgttcgaccagataatataaaggagaaaaaccctttacagttcgatttgaacattcccttaccggaaataaatgaagaatatgaaaatgtgaaagaagccttagagcctaaggataaggaaatttcggacaaaaaagcatcgctaacaaaagctgatcaagaaaaaaatatgtcaaataaagatgtaccaataacacaagaattaaacaagttgtcaataattggcgagccgttgataagccgagaaaagcaattgccagttaatccaaaaaggacgcaattggagaaagaatcggtgagaaacccttttataaatgaacctataaaatggtggaagaaacgatttaaaaaatggactttatgtggtgcgacattaattcacatattttaaggtcactaattcaagcgccaattcaagtaaacaagttgccctaactgatatacatcccgaattgtcagaaagaaatgaagcaaagccgctacaggtggaactaaataccgaaatgtcaaatagaggcaaagcaaagtctgtacaaatggagacaaatcaccaattgatagaaaaaaataaaataaagtccgttcaagtgggaccaaatgcgagattgattgaaagaagcgaagcaaggccagtacaaacgggatcaaaggaagcaattgacagaaagcagcaaagcaaa

SEQ ID NO: 65099 - DNA, 1577 bp, Heterodera glycines
atgttcaaatgtaacgtcattcaggaatcaagggaatttttggcgatcctgttttcattcaactcaaccattcacaatggaaagtgggagttagagcttgccagcggtgctgatgttacagtgatggacgagatcgactggaaaaacattggaaaccaaaaattggaaccatcccgaggattggttgcctatggcggaaaatccatttgtggcattttgggaaaggcaaaggtgaaagtgacgcacgaaggcagaacaattgagtccaatattcatgtcataagtggtaagcacaaaaatttgtgcggtcgcgatttgatcatgggactgaaaattgatttgaaccgagctttcggaatttcgacaattcgtgccgtggagatcaaacaggaattggacgcatgtttgggtcaatatccggaagtgttccaggacggtgtcggacgatgcaaaaagatggcgtcactgaagtttaaagagggatgccaaccgaagcgatgcaagccgagacctgtgccattttcacttcgcaatgaagttgaaaaggttttggaccaatggcagtcggagaaaatcatcgagccagtggcaaccagtgaatgggccactccgctggtcattgtgccaaaggcaaatggcaagcttcgactgtgctttgactacaaagtcactgtaaatccatgcttggatgtgcatcaataccctcttccacgccccgaggagctgtttagcatcttgaatggaggcgaaaaattcacgaaaatcgatttgaaggacgcatatttacaacttttgcttgacgaaaaggccaaaagttgtctcacaatttgcacgcacaaaggacttttccacttcgctcgattgccattcggagttgcttcggcacccgcaatttttcagcaagtaatggaagaagttctgcagggcattgatggcgtggcggtttatctggatgatattctgatcacagcagccactgatcagcaacacatcaaaagaatcgatcaggttcttaaacggttgtctgagaatggtcttcaagtaaagcatgaaaaatgtgagttcctcaaaccggaaatcgaatatttgggacacattgtggacaaaaaaggtttacatgcgtcacctggcaaaattgaggcaattttgaaaatgccggagccgaaaaatctgaaagaattgcagtcatttctgggaatggtgaactactatggaaaatttgtggcatccctggcaacgctttcagaaccgctcaatgaattgaggcgaaatgatgccaaatggacatggacaaagagccaacaaaaggcattcgatgtgatcaaaaaggttttgacatcaaccaaagttttggtccattatgacccgaaaaaaccactttttctggccgcggacgcatccgactatggagttggggcggtcatttttcataaagatgaaaaaggaagagttggtgtgattgcgtatgccttccgaacgctaaattcttcggagcgcaattactcgcagattgaaaaagaagcgagggcaatcattttcggagtcgacaaattcaagcagtacttgtacggtcgaaa

SEQ ID NO: 65100 - DNA, 779 bp, Heterodera glycines
atgggacgcaaaaagacggaggcggtcacggttttgctgaaggatgcggggatagcggatcgcgttacgatggaccaatacattgcggagtacgacaaacacgtccttcaaatcatgcgcgctcttacggaggtgcaattggtgtgccttgctttcgcttttttaaaatttttgctttgctacgcttcgcttctttttatttcatttaatgaagtgtaaatgcaattgttaggaattgcctggtgccaccaaattgatcgaccatttgtacgcccacaacattccaatggccatctgtacgggatcggacaacgaggagtttgcaagcaaaatgcttaaatttgacgaatggcttaagaagattccgcttcgtgtgctgtgcgggagtgatccaggcgaatgaacgctcaaacccaatttgttttattgtaactgtttcagaggtacgcattggcaaaccgaatccggacgcatacgaagtgaccattggacgttttgctgccaaaccgacttcgccgaagaatgtgctggtgtttgaggactcaattaacggagtggaaagcgcgttgggtgcgggatgcacggttcgagtttaaaactgttacaatacggtacatcagcaaatttgtttccttgttcaggtggtgatggtgcctcagcgtgagtttctgccgaatgattggcccgagaaagaactccgttcgcgtccaaattttgccgccttgctcgattcgcttgacaatttttgcccgaagcaatttggattgccggattatcgc

SEQ ID NO: 65101 - DNA, 227 bp, Heterodera glycines
ggccggccaacgcctgtccatgcgttttcaagaacatcaggttgagcgaagtgtgggacgaatgttaggtcatttaaaacaaatttttaagttactaaatatggaagcacaaggagcaccggtcatggcaacgaatacaaaagtgcagattggaaagtgatacggcggaaacaccattttttgttgtattgtttgaatattttgagtttaatacattttgaaagata

SEQ ID NO: 65102 - DNA, 213 bp, Heterodera glycines
atggcagctaatcggctgcctccggcagagccggaggccgaggaagagccggaggttattccatggcaaggtaaaagtttatgccttttaaactaaatcgcctaacacaattcagcgcgtagcgcggatgacgatgatgatcatgatgatccggatgcgcccgacaattggcgaagtatgctatttattttagtgttttttcaaattgaataa

SEQ ID NO: 65103 - DNA, 224 bp, Heterodera glycines
atgacacagcagcaaggcgcaacagacactgaccttcgaacggtttgtttagtttttcacatttttaaattggacatcactccgttcagttccgcgactttttattccaatataacgcagtcaccgagcagtgtttcgacgcgtgcatccgcgatttcaccagcagagacataagcgagaaggaggaacggtgctcaaaaaattgcatggacaagtttttgaag

SEQ ID NO: 65104 - DNA, 333 bp, Heterodera glycines
catgaatctcgacggaatgtggtaatttaaatttccactttgggtagaaacattcgtctcactgcctttaatttaggcggatatcacctgttataaatgtggcgaaaaaggccattacgcaaatcgttgtacgaagggaattttggcctttttgtccaacaccgccacagcgagcgaccagcagagagaacagccgcgagacaatcaacagaagaaatacgccggcggagagggggggacgaaaacgcaaaatgacggacaggaaaatttcgattgatattttgttttgcaaatttatttgttgctatttccctctaagagagaagaactgaa

SEQ ID NO: 65105 - DNA, 495 bp, Heterodera glycines
atggtcgggtcacagacagccgatgcccatttggacgtacaatcggcacaaattgatcagttggacaccacactgaatgaccaaacattgcgcagcattgttgatgaagcatcgcaaaacatagacaggtattaaatcaattttaaaaataattattcactttaagggataaaataattcttaatttaagggattttttagcttagttaaagattattccaacataatccattaagagaatttttttttaaatttgggccaatttcttagagaattgcgtaatttgacttacgcttgctaattgcgtttggtttatttcattattctcatttgtcagggcaatttcgaagacaaatgaagagctgaaaataagcaatccgcaagacttgctgaaacattttaaatttgttggcaaacggccgacgagccaactgagccgagcgcgtgaaatttatgaggagagtttgcgcttgattgagaagcatgtcgaactcg

SEQ ID NO: 65106 - DNA, 4237 bp, Heterodera glycines
ccgacatcaataaagccagggcatggaaattcagattttttaaaatcaaattatacgcatatttggcattatgtttcgacataaaaacaaaaaaagcggtcggggtcgttttcgcgccgccgttttcgcgccgtcgttttcgtgctgacgttttcgcgcgggggtcgttttctgcatttcaggctacggggagctcaggaaaaaaatagtgaaactataaatatcatccctattcataactgtgcttattgaccttagttctgttgttgcaatgattcctgactaaatttggcttattttggtcaatttaggaaccaaagtgagaatttaaaaaatatttttgttcgaaacgggttcgtggttcgaatttagtcgaaatggataccgaaaacccttggaagcatgtttttatgacattaaaaaaactttcttcaaaaaagggggtgatcccgagctaataaaacattggaatttcaaaaaaattttccttggaatcaaaatttaggttcccccgggcaaagttacccaaatggactgattcttttgcggataattgcctcccggggacgaaattggacagtgagcaaagggaaaacataacgaaagagcgaaggaatgaatttggaaaaaaacaaggcgtagataaaatcggagaaaaacgtaaattataaatggggaaaagtggaagggaacaataacaatgatggatgatgggatttggggggatttggggggagggcatttttatcagattagtgacgatggcatttccacttttagacttattgtaattggaaaaacgcaaagacaaaaaaataatatccaataaattatcaaaagatcgcatttctttttgcaaattacggaggaacgaaaaatttacataaacgaaaatgttgaaattcaatacccaaaaagaaacaaaaaatgagagggatttacttggaatttgttttttccgtatataatccaaatcaaaatccccccaatagtgaaaatggcgaatttatcctccggtgaatgcgttaatcccttaatttggcacagatggattagtggcacttcgccaatggtgaaagaacaatctgaaaaagtggtaaattgtaaaatgtgagaggaacgaggaaacattaaacaattataaattaagtattaggggaggaaattgtgcagagacaatcaaagtgagaaagcatttgaacatggaattataagtaatttttcattagaatttttaaatttcattgcatttttagcgatctctaatttccctttctctctctctctctcattcccatttttgtccgacaattgtcattatttgccgaacagatcaaattgccacaaaatatgccgccaaaaaggaaaaaattgcgacggactgaattggatgagaagggagggaatggcacagaaagaagtgccattgtttgtcgaagaattattttttcgttgaagggttttcatccgatccaaagctcgaataacaaaaaagccttatatttaaaaacagcgaatgtttttctgctttagtgccgccccaaatcactgcccaaccgacggaagcggtgcgcgagggcgaattcgtcactgttcgctgtgagtcgcaggacggaaatcctttgccgcgcttccaatggcttttcgacaaccgcacgcgggtgccggacgcgtggttccacgaacggcacgaaggtggcggtggaagcggaacaaagccacgcgcgataagcacgttacaatggcatttgacacgcagcgacaacggcgcctatttaacatgccaaacttggaacaaagcactgcgagagggcgaagtgatcaatgcggagacgaacagacttaacgtgagaaagggcgagagaagagagcgagagagtgaaagggaaacaaaatagtgtaaccaggaagagagaagacaatgaaacaaacgaaatacagaaacagacgaaataagaaaagagtgacagaacacaaaaggatcgaacagaaagtacggcatttgttgaacaggttttgtacgcgccacgggtgaaggttgtcccaacagtgcccgaattgaacatcgaggagggcgagctggccgagctaaagtgcaccgctgatgcgaatccacccgcaacaaatttcgcctggacgcatttgccgtcgggcgaaacgcacgccgaccgcgagtggcgcgtacacgtgcgacgcgcacacgcgggcgaattccgttgcactgccgtcaattcgttagactcggcttctgatcgcatccgtctcaatgttctttacgggccaaccgtacgcattcgaacagtcgccgggggcgcatcgggcggttcggtggtgagcccggcggagggcgatcggctggtggtcgactgcgaggcggacgccaacccaaaggcggacactatcgcatggagcggacctgggggcttccaacgtaacgggtcgcggttggtgatcgaagcggtcaatcggttggtctttttttgattggtattttctcattttgtttttccatcccattccagcgcacattccggcaatttcacctgcaccgcatggaatacgcttgccttgtcctccgtctccgcttctctgtccaaatcgccatcatcgtccgtcgcttcccccaattcggccgttgtcatccgtaccggttccgcccgagtgctcgtcgatgtccgtcgtcggcctggatcggcaacaatcagtgccaaacagacaacgcttaacgtgggcgagacgatcacgctcagctgcggcactgacggcgacgcgggcagtccgtcggcgcatttccgctgggcggggccgccaacgaaaggggcgtacgaacggaaagccaccgaatggaacaaagcgcagctgagactgccggacgcgcagttggcacacaacggcatcttccgatgtgtggcacacaacgaactcggccaaggcgaagaagcgaccgttcggattacggtaatggaaaaacgaaaacaaaacggtcggaaaattaaattgaaaaggttgtcgaacccgcgcggatttcgcgaatgccaatgccaagcaaaatactgaacaatggggccaacgatgtgaccatcgaatgtgaagcgcgaggctttcctcggccgtccattcgttggctgcgggacggagtgcaattgcccatcgaattgtttgtccattggacagtgacggaacgcatgggggacgcatccccggagtaattaatattcactattatacccaattaattcattagtcattcattgcttatttcctttaattaacattgtttgttccctcatttagtcattgtcttcttcttaattgtcccttttagttaccgcttccctttctcttttcccttaattagtgtcattaactcacttgattagtcgttgcctttccctttttcagttgtccttccgatgagagttgcgtccgttccattctgtccattctccgatttgcgcattcgatcagttgggctgacaagggcaattactcgtgcttggcccacaattcggccacttctccgcccgtcagcagtcaatcgctgctcagtgtcatccatcagccgattgcattgaatgaacgatttgtggacggattggcactgacagcggcagagattggcgcatcggtaggaaaattcgaacataatttgcatatggcaataaattaattcgaattaaggctcaaattgtgtgtcggatttcggcacggcctgaaccaaaagttacgtggagccgagacggaacagaaatcggcacggaatttggagggggcgattacaaacggcacatttcgcgggtcaaaggtcagtgacgcgggaggggggaggggggctgtccttcacttttccctctccgttagatgccgtagacgagtttgaggcggttttggagctgagagaggtctccgaacagcactttggcgtgttcacttgtgaggcgaggaacggagtcggggcgaaggcggcggtggacattcgattgcaggcaccaagtaaagtgccaaaattgacaaacggaagggcctttgatcaatccatgccattatttgttttcccctttttcggtcgtcctcaaacgccgcttcaggccaggcttattcagtccggcaccacttggcttatggtcggatggcgccccgccttcgacggcggtgatcggcaacagttcgagttggaatatcggctcgtggacccgtacaaaggaaaggccggcggagacggacaaacggacacttt

SEQ ID NO: 65107 - DNA, 6144 bp, Heterodera glycines; identical to SEQ ID NO: 7521

SEQ ID NO: 65108 - DNA, 239 bp, Heterodera glycines
aatgttcaacccgacccccactcgcagtgcggcccatacaaaccgaattggagggaagcggacggagccgactttttgtcaccaacaaaacaactcgataattcaattggattcggttttgtatggcataacagcatgaaattaaaaaaataatatttagataaagaggaagaagcatttggtggctcaaagaaccagtggagagaattggcattgttttggtcgattctgagggaaat

SEQ ID NO: 65109 - DNA, 75 bp, Heterodera glycines
tccaagtggggaattgaactcaggcgaaaaattatgaaaggtagaaagtttaaccactacaccacatgtgcaagt

SEQ ID NO: 65110 - DNA, 796 bp, Heterodera glycines
ggactcaattctcctgcatttcaatcactgggactcaaccctccagcatttcaatcactgggactcaattctcctgcatttcaatcactgggactcaaccctccagcatttcaatcactgggactcaacacaccagcatttcaatcaccgggactcaattctccaagacttcaatcactgggactctattctcctgcgtttcaatcacccggactcagtttttatgcattccaatcaccgggactcattctcctgcatttcaatcactgggactcaaccctccagcatttcaatcactgggactcaattctcttgcatttcaatcactgggactcaaccctccagcatttcaatcactgggactcaattctcttgcattccaatcactgggacctaacctcacctggtccttcggcattccaatcactgggactcaattctcctgcatttcaatcactgggactcaacacaccagcatttcaatcaccgggactcaattctccaggacttcaatcactgggactcagtttttatgcatttcaatcacagggactcaattctcctgcatttcaatcactgggactcaaccctccagcatttcaatcactgggactcaattctcctgcatttcaatcactgggactcaaccctccagcatttcaatcactgggactcaattctcttgcatttcaatcactgggactcaacacaccagcatttcaatcaccgggactcaattctccaagacttcaatcactgggactctattctcctgcgtttcaatcaccaggactca

SEQ ID NO: 65111 - DNA, 1357 bp, Heterodera glycines; identical to SEQ ID NO: 35578

SEQ ID NO: 65112 - DNA, 1327 bp, Heterodera glycines
atggcagaccgtaatttttcaactaaaaaaaccagcataagggaattatatttggaatgtaaaaaaattttatcctgaaaaaaaggttttttttataggcatttttggtattttactttttgcgagttttcgccggaattaaaataataaagatatttttgtacggttgtgacgattagcgccgctgggaaattttgaatttttacgatctaatagatttgtattaatgaattgttgagaaaatttaaaatgagaaaaaaaacgaggatttcgaggtcaaaaaattgaacgaaacattccgaacaaaaaatttcaggtaaatcacacaatatcataagtttagactttcattattaaaatgcttaaatttgcaggcagttttcgacggacaacagttgcgcaactgcaagcaaatcaacaacacgaagatggacaacaaattgcagctgtttctgccaatagccacctgatgctggcgcccgaatttgccgcagtgaaatcggcactaattgtccaaaaggcattccatcgatttgcactaattgtccaaggcaaaccgacgaagtgatttataattaaccaattattgttaaggtttcattgccggactgacttttggccatgcattgttcgcttttttcgtcgccgatttggttttggaccatttttaaatttagtaatttttgggttaaaatatttacaatcatttgtagcattttctgcaaagcaatgtgtggatgactgctcctgtccatggctttttccacttttgtcttgcgattggagttgtcgatgcgctggacaggtgacaaaattgttaataatattttatttttaaaaattgtttaattttattaaaaattcaaataataagcaaattaatttcaaaaattgtaattctctttttgccaccactttaaatctttttattattaatttttttttaatccaatttcatattgttttaggtttaagtttgtgacagttttccaaattttttgctctcttccgtccgttggcattttggcctgcttttttgcttttttggcatccatttcgtctgcacaaattgagcaactgttggcccaacaaacagagaacgaagacccaattctttggtacaataaccaaattaatatatttttttacattttataattaattttcacccctaaagggatgttcaaattttgttcaccgtttggcaactgttaagcgccgtccgttccgtcagcgctctgttcggatggcttacaatggcatttcgcccaacggcaaatgccacgcgcgaaactctctccaaaatgctgccgtcaaattcaatgaa

SEQ ID NO: 65113 - DNA, 848 bp, Heterodera glycines
atgaataaattatattttcccttattatttgttgccacaattttcatttatgccgtcgcattacctcgccttaatctgccgattaataagcacaaaaacaatactgaacatttaacaaaaacaggtattttgatctaaaaacataaaattttatgcttttttaaaattaatttagttcttattttttactttataaaatttatattttaatttggtaaatttaaaattatttattaaaatgttatatttataaactatttaaaaataatgtgttttataaataaattatatgatttttttttaatttaaatattcaaaaatggtaaaacatttcccatttagaatatcatcattctcagcatcaacaatcgtcaacacgttcatcatcaccaatcatcatcatcatcaaatttcccatttttggcacaaggcccaacgccagattatgtgcaggaagccagcgaaaaggcacgcattgaatactggaaaattttcactgatgacaaagggcaaatgccgaagggcgaattgaaagcgatacgattaaaatgggcggaatgccacggcatgagggtaagagaaataaaatgaaaaatttaattattaaacaaaatataatgtttaatgaaaatttggtggggggggggcgggtattaaaaaaactaataaattattgaaataatgacaataatttattttaaaatattttatttggtcggcttaaatttttttgcagaagcagaccgataatactttttttttgatagataggtaccaaataaaaaatttaagaatttgccgaaaatttttatttttagatcttgaagcataactttaaaaaaaactaa

SEQ ID NO: 65114 - DNA, 615 bp, Heterodera glycines
  unsure (1)..(615): unsure at all n locations
atgggtgaaaaaggttatccagagttggctgatgccaatggcgacgcccgaattgtattcaagggtcgagaaaggcatttcacatgtgcctggcaagccgagaaggcatggaatgcacccgggagtgtctggaatgaaaggcgacaagttaataaatttaaaaaataatctgatttttaatttatatgaaaataattttttttttttttgaaaatcttgaaggattttttaaaagaacaaaaacacaatatgataaaaatgcatttgtttgcacatattttggcattttcgaaaactatttaacgaacaaatttctttcttccatcatcataggtttcatctaatttctttgcaattattttcttgctaaactgtttgtttcatcaactttgaaaatgcttcatctttcttaatttttatttttagattatttccacaatttaaattcgcttactttggaatatttttgcaccaattcctttctatttttttccaatccgtaagcgctctttctcctattttcaatttcatagcgtttattttatattaatttttggatttcgttcttttattccaaatatttatttcctatttttaaatttatntctcattaaa

SEQ ID NO: 65115 - DNA, 112 bp, Heterodera glycines
atggaaaatatttttttcaattttattttatttaccatttttatcgtttttatgaaagaaaattgttttgcatgcggtaccgatgagtgtccaattgactgcgaagacaaat

SEQ ID NO: 65116 - DNA, 2118 bp, Heterodera glycines
gtatttcttttgcattttcaaaatattaatgagtctttcggagcttttcctaaaggaactgataatggttcagaaaatacatcgtgatctgatcagtggtccaaatccggtgaatttggcacaactttacaacaattttgtagcgacaaattgtgctccattgaccagaacgaatggcaccgaaattggacaaattggacatgaacaacagagacaatcgccaattggcacaaatttggccagctcttcacgacaaactcaaacttggccaaatggtctgcatcggcagcaattccgtactgatgaaaaacgaatgcccaactcatcacaagtaggggaacctgacgaaaaatcccatttggccaaaatgccgtgccaaattaaatttcataaaaaagattggcttagggtcagtcacaaagtagggcgtgtaattatatgaaaatccatattttttttcctaaattgtggaaggccggaaacgcatgaaaacatgtttttatcttggtttgaagcttctaggatagagttctatactaaaattttccatatttcgcgatttatgtccatatttgtatattttgacattatgtccatattttcgcattttttataaaaaattctcattcgaattcttcctttattaaagcggccctttgtcccttaaagccggaaaaattttcaaaaaaaaatttaggattttttgagaatattaataaaaaatatctacaaaattggagatttatgcaaaatagtctaaaatggaatatttacgatttttaattaataaatttaagctttattattatttgattctaaaatgatttttaacactatatatagccattttttaaagttttactttacatttagcgaatttgaagaaatattgagaaatttattgctcaatctagaaaaaaattatgtccatattttatgatatatccataaataccagccctactgataagaaagatttgaaaaatttacacaatttttgaagaaaaaaagattttttgttcttttctctaacattaaatttcaatatttttgtgttttccattattaattttttttaatcatttacaaaaatatgttgtcaacaaatttggttgaataaaaatgttaaatgtttttcaggcttctcatgtgactgcttccggtgttttggcgccaataaattcattaagccatcatcataaaaatccaagtgtacaaacaaatttgcccgcaaataaaaaagatcaaaatgcagaagtgaaggaacaatttgaacaacaaagtacatcaaatgccactcaaatgccttttgaattggcacaaattgtggcaaaaagtgatcagcaggagaaaaatgggacaattttaaacagaaaaacatcaaattcaatgccacaaattgaggcgaagaaagtggaaaatttgaaccaaggcgcgggaaatgatcaggaaatagatgaaatcgatctgttcatcgatattgaaacgattgacccctttgatcagcctgaaccgtcaaaaagattatttgttgatcgaattcaaccaaattggaatgatcgacgtcagtgtttaaatgtgattaattcagaaagtgtcggaacatcatcaagttttgagcggtcaatttacgaaagtgctgacaatgagtcggcatcatcatcatcatttgatcattgtggtcagaatgcgaatggagaaacagaagaatcggcaataatggacaaaatatcaaccaaaattgatcatttggacaatgattgggaggattttgctaattggaagaaaagcgctgggataaaagttgaaatggtcgaaaacaagcaaatagaaaacaaaagttgtaaagaacaaatttggatcaaagaagaagtttcggagtttgatcaaatggtggaaaatgatcagaatgccaaggaaaatgaaaaaataaaaagtgccaacgatgaaaatgaaaacggtgccaaagaaaacaaaaaatttaacagaaacaaaaaaattgttgtacaaaatattataagaaagtgtgaatgggctgaatgtgaattgaaatttgaaaatgacaacaaattgtatgatcacctcaaaacagtttagttttttaaaaaggaaatttaa

SEQ ID NO: 65117 - DNA, 819 bp, Heterodera glycines
gaaacaaaaaaatcgatttttcaagtgtccgttggggtactcaaacaattatggggagcaaaaatccaacgcagaattaaagtacagggtatagggaagctattcccgaaggattcggtctccccataaatctgggcgcatcggttcggggggactgccccgaaaacaaaaaaatcgattttttcaagtgtccgtttggggtactcaaacatttatggggagcaaaaatccaacgcagaattaaagtacagactatagggaagctattcccgaaggattcggtctccccataaatctgggcgcatcggttcggggggactgccccgaaaacaaaaaaatcgattttttcaagtgtccgtttggggtactcaaacatttatggggagcaaaaatccaacgcagaattaaagtacagactatagggaagctattcccgaaggattcggtctccccataaatctgggcgcatcggttcagggggactgccccgaaaacccaaaaaaaaattttttggataaaaattatttaaatgaactgactagataatatttaaaataggttatttctcttcctttcagtatccctgcaaagtttggtgcgcttctgatcagtttctgaaaaaaaagttaagcctaaactttttggcctgtttaaaaaggaattaaaaatttttaaaaattttattcatctccctttttgatagaaaaagcatcagagtgcctaaactaacatgtaaataaaatttggtgcgtttcagaaccctttctgaaaaaatatttaagaattaattttgcaaaaaataaataaaaacgaaagact

SEQ ID NO: 65118 - DNA, 504 bp, Heterodera glycines
caaaagttttttacaaccacttattgccaatataatttcttgcagattgaaagccatccattgcctgccggtctcggcacagcaaagcactaatagtgtgtttgactcacttcaaaaaataattcattacccaaaagttttttacaaccacatatttccaatctaatttcttgcagattgaaagccatccattgcctgccggttctcggcacagaaaagcactaatagggtgtttgactcacttcaaaaaataattcattacccaaaagttttttacaaccacttattgccaatctaatttcttgcagatttaaagctatccattgcctgccggttctcggcacagcaaagcactaatagggtgtttgactcacttcaaaaaataattccatacccaaaagttttttacaaccacatattgccaatctaatttcttgcagattgaaagccatccattgcctgccggttctcggcacagcaaagcactaatagggtgtttgattc

SEQ ID NO: 65119 - DNA, 680 bp, Heterodera glycines
atgataagctttcgaataataccaaggttgtcgaatttcaaaaaaaatagtccaaaaacttaggctggcgccgaaacgatgcagacccattaatttattgattttatttttacatattttggtttgggttcgggaattttttttacatgttttatggtacacataatttgcttttttatacaaaaaaaaacatttaattctaagcctatttagatttttatggcatttcgtgttttttgacacttaacgcatttttattcatattttaggtataacatttataaaatttttagaatttgtctccctaaaaaggatatgtgtgcgattattatttaaaatgcaattaataaaattacaaaaatttttatagaataactgagaaaccaactggactagagcaaactgtgggcaaaaaagagttgctgtttttttatgtgtgccttcttcgacggatgaacatttttttggatatgccaaataaagaaaaaatattttttgaatttcatgaggtattaaatatatttatataaaaatattttaaatatttaaaaataaattttttttaggaaactgtcgaattgatacaatttatcggccagtttataacgaaattcatgtttgaattaacccaaattcataaaatggaccaagtcggggtaagctcaaacggagctgtctaa

SEQ ID NO: 65120 - DNA, 3078 bp, Heterodera glycines
atggatgagtcgaaacgggaaaatttttcccctcaaaatgatgatgacgtcatcacaattggagacaacaacaacactcaaacactgcttgacctgcaaccggggccctcaaaaaggggacgcaagcctcgcttggacaaaatccatgaggaaattgcttccgcaatgaagaaagcaaaagccatggaagctgaaggtttggctttttctgcaaatttctttaaattagccaaattttagtggatgaatcgcccaaaaaacaaccgaccaatgtgtttgagtacccgaccatattttggaaattggcccgcccaaaggttttggctaatatttaatttgaaaaaataggaaaatttcttaagtatggagtgttcacgttcatgtgcaaagagtgtcgtgatgacaatttccggcaggggaacagccgattcaaactcatcaatcagaatggcgagcagcaacgccttgagttcacccaatcgttttgccaagactgtgcaaagctgaactttgactgcaccgatctgatcatgaagcacctaaagaaggatgaaccggcaacgacgacgacgacgacgacgatggcaaagagtttccgctggatcaaagatgggggaaagtgaaccgagatggcacaccacgatataaggacgatctcattttgaagaatttatacttgttgatcaaatgacaaactctttctttgtaattttgccgagcaatacgccaggctttgttggaaataaaacaaacaaattcaaagtgcacttgccaaagaagttggtgtttgatggggccgggtggatggttggactgtctggcataatttacccaaacaggtgggcgaaaatcatggctattgggtccgatttttggcttaagttgggcaaagctgggtacatcagaccgacaatatgtgattgttcacctgcacgacggccgaaaataccgtttccgtgtgccaaagggaagttttctctcgccacagcagcttgagaggggcattcatcatggcatgattgccgaagtggaacggctgttgacacgaaaaaggtccgcaccggtgcatgcaagttttgggaacattgacgacgacgatgaggaggagggcgagattcttgacgtctcgtttgttgaggaggaagaagacaatacgggcgaagcgcccttaaacccactttcatatttgaccaagcaatcagcggctcaacaagaaacgttgcggcatgaaaaatgagcacaagaagagagaaagcgaagggaagaggagcagagaaagcagcgagaaaatgaacgtagacggcgagaagaagaggagaggcgtcgtaagacagaagaagatagaaggaagactgcagagaaagcagccaaggaaaagaaggcaaaggaagagaaagaggcaagtgaaaagaaggcaagggaggaaaaactggcacgggaaaagaaggaagagcagagaatagcaaaggaaaagaaaggcgagaaagagaccaaggataaaaaggctgaggaggagagagtagcaaaggaaagaaaggcagaggatgagagagtggcaaaagaaagaaaggcagaggaagagagagtggcaaaagcggaagcggagagagtggcaatggtaacaaaggcagaagaggaaagagcggcaaaggcggaagcggagagagcggaaaacgagaccaagaaaaagcaagaggaggaaaagcagttggaagagcttaaacgacagcaacaggccataagaaagcaaaaagagttggagctgctcaaagagttcagaccgtggcgaggcgggtacatgaggctggtgcacggcaaagacccaaccccagacgtacactatctgcacgaaacggatgattaccactttgtgaatgctgtacacaagtaccgtgtccggcactcagagctcccctgggaggcgcccgagtttaacccatccgcgcacatccaacagaatattggggagttccgtgagctgtttgagcaagaggtgtacgatgaaaactatgcggtgaaaacgcgagaggaaaaggaggagctgatcgagctggtcaaagggttccgcttttacttcaccgagcaaattggcagatttgagctcaaagttttcaacgggaaaatttcgcacattacgctgactgatcagctggcctacgtgttgggctatgaacaagagcagcagatcagaaatgaagagcttgcaaaatatgcggttgatttgggtggtggtgtgagccacctgtgcatttacctgaacagtggcgtcattgagagcatgattgtcggcaacacctttgccaatctgctccaagtgattgccgttgagggaaagtcgggtagtgtggtagagaaggacttccaggcgccgttgtttcacaaaatcatagcaagggaggtggatgtgcttgacgttgagattcgcactctgaccgggaggttaggctcttcagcagggcaattatttctaatcacttatttaagggaggtgccatttgagtttggccaagttgttttgactcttcagtttaaaaaggtgttaacgttctgagagagatggttcgcgtgatttttgacggctcaaatttacggctcgagaaaatttatccgcaaagtggaggcggtggaccgatcagcgtctttgagggggcaccaacgtttcagcggggatacggttatttcttgggtgtcccccgacagaagggagcaggagttggctctgtgctgcgcaacctgtggcgctaccttcgtccaatggtcacagcggcacgaccctatgcagcaaacattgctgccgagattggcaaagagggcctcgagacgggtgcacgattcctcaacgaggtgtcaaagggtggcaacatcaaagacgcgctggtgtcggaaggaaaagagggagcgaaaaaattgctggacaaggcctcttcatcactacaaaagggacgcggaagaaggaagagaagaggaggcgggaaaaaagctgaaatcattttgaaaccctcagacgttgttggacaaactgtttcccaaaaagctctgttaaagaaaaaaagatttgactcactcggttattattag

SEQ ID NO: 65121 - DNA, 547 bp, Heterodera glycines
atggtactccctctgactgctgccctatccaaactgctaaactgtaaacccgaaaatttagcagaatatttgaacaaccccgaggcggtgaacaaagcgaacgcttacctggccggcaaaaaactcaaaacaacctaccagggtcgtgattccaagaccaaagaggtcaagttcggcacattttcggtgaaagccgctgcggaaacctacgcctttgagggatttcttggcaagtttccaaaaattcagtttcggtctaacacacatgcgttcagaggttaaagtccaccagtatttctacataaagcaccggatccgcctactgtaccctcagctgaagtgcattgttgagtaccacaacaagggccactgcaaatactatcccttgggtataaaattttgtcaggaaaaaaatcaataatcattttcagagttgttggccgttgaggagggcggtgagagtgaacccgtcgaaagacctgccgctgaaaccgactacctggactacttgaactttcgcagtgggtggcaatcaacactctactga

SEQ ID NO: 65122 - DNA, 982 bp, Heterodera glycines
atggcatttttggacagtcgttgggtcagaattgaaagacccaaacaacaaaaaattatgtcattaaacgataaatgtgaaaaccttgttcggttctcgagtcaaactccgagtgcgtcgtgttttgctcatgttcaccgccaatgcgatcatttttcatcccatttgccgctttgtccgcagcggttgtgccgatgtcgtcgtcggcattgttgccgttaattccgtcacatttgcgctttttgttgttgctggcaccggcacagtccgtctttttgccggcatcggtcccgtcgccagtgcccggggcggctgcgattggttgacgccgacaaaatgtgtccaaattggtgcgaaatgtgccgagttctgggtaaaatatttatttttaaattaataataaatataagtgggaagtggaatatggaaagagacaaattggcaacagtttcctggtttttgagtataactcatttcatattagtgcgaattgaaccaatctattatcatttggtaactctaaattatctctattaggaatgcaaaaatttccaaaaaatttcgttgtataacaaaaaaaaaaaattatgaccaaaaaacttaaaaaaaaacaacaacaactgggttttcgagtattttgacaataaccaatcattatcatttatagccctaggctttcgtctattgcctgtaaaatttgtaaaaaatttgttagtcctcagaaaagttaacaaaatgttcagaaaggcaagaggacgaaccatgtaacaaatttactaaattaagaattttaggaaaaaaaattaaaaatccgacggtgccagatatatgcattcgtggaaattaattaacattttacaggaaatgaaaacctttttcagtgctgaaacagatgacaaacgcattgagtgaacacagtgtgccattgttgggctcggcaggcggcgtcgaattccgtcgacggaatgcgattgatttctaa

SEQ ID NO: 65123 - DNA, 588 bp, Heterodera glycines
atggaaatcaatgaattttcattcagcaacaagtggaagagcaaagtgaaaatagagggcagagcaggtaaaaaatttgaaaaaaattaattaaaattaaaaaagcgaatttagacacaaagcacagggactgaatcgaactgagagaacagagagagagcaagagtaagagagagagtgagagagaatgggaaaacgagagagagagagaggagaatagaaaaaaggatttcaaattgaaatagcctaatccaacactttttttgttaaaatttttcaatgggtcataaaaagagtgatattccgctagatctaagttaattttccagggtgtcatcaaattttttacaatttaaaatgacacaataaatgaaaattttataaaattaaatgaaatgaaaaaaaagaataatcaattaaaaaaataaattaataaaataattaatttaaagcaaatgacgatttggattttttaaaaataaaattaataaggctggatatttatttatgtgtttaaaatcaacgcaaataggtacctaaaaatgctaaaaaatatagaataggtgtttaaatcccgaaaagcccaaa

SEQ ID NO: 65124 - DNA, 451 bp, Heterodera glycines
atgcttggctcggcattgttcaaaattcgcttcccgctcttatcaaaagaagatttttcgggaaaaattggtaaaaaataatatttcttttagttacaaatctttttctaactattcaccagtcgtttccatatttacagttccatccggcattttaacaacaaacgaagtggtcggcgttgaagaatatcataccattcagaatttgcaatttccgagtcaccagcgaattaaggcatttggaacattattaatggacattgaaaaagtgtccgaatttgcgggagaggaagttgggagcaggcgacacatcgaaaatgtgtacataagtggactttcatggataatattggcacaaattagaatgaaatggagaagcactgacaatgagaaatgtttgggaatttatcttttgtgcaccgagccaaaagaaggtgcaattaactcttaa

SEQ ID NO: 65125 - DNA, 1403 bp, Heterodera glycines
  unsure (1)..(1403): unsure at all n locations
aatctcgacattcncatagcaattctgcagtcgnaagcgcttaagccgcgcgcctcttcactgttcttttggtttgctttgctcgcctttgcgatggtttcgattgcgtcggccgccgctggcacagtgttcgcaagcggtcgcattcgcagccgacaacggcgatacgcaaaaacgtggaagccggaattcccagcacaagagtcgaaaagtgatccataattttgaattacaaaatttaatttcttatatattttaaaatggaattttcccatttttagtcgccaaaaattcgctggcaactttgtgcggtggggtcggccctggccactatcagccgccgctgattgacggcaacacacaacagcatctgttcaacgcgtacacgcaacacaaccaccaccagcaaaatgcctaccaattccatcagccgcagcagcaacagcaatatttgatgttcaatgccggcagcatcagcacggacagttgcgcgtcgtctaccgccgcgtcggccattccgctgattcgccacgcggacagtctgaacagtttgacgagcaatgtgcacgcaaacaatgccatcaacaacaacaacaaccagcaacagcaggagcatgggtgaaaaaataaaataatttaaattaattacatttatttttggtattatttattttaattaattatttaaactctcaattatttgagaactttcctcttgggataaaataaagaatatataattttaaaaattttcagtcaatttcatcagctaactgaccggaagcagcagcattttgggcccgcccaatatcattcattagtctctcataacaaacagcagacaattcactcaaattcgtaataataatttttattattttttaatttataccctttttcaagtgtccacccccatcatgctcctcctgctgctgctgctgctggtacgtattgctcacgctcgtcctcctcgggcattggcggatcatcgacggaacattctccgatcggtaaaatctttttgaaaacgatttaattttgattattagctatcatgcataacattcatttgttgtcagattcgcacggtcgaatggtcgaagacatggaaagacgaaagttgttggcccaccttcgtgaaaaggccctcttttctccgattggactgttagggcttgaagaacggctggagcctcaactcgtaagttaaaatggaaactttgtttattataaatcaaaatgctaaacaggtgaatgcacctgatgagcgtggtcgaactctgctccatttgctgttccaaaacccgaacttcaaggcggacgacgagcagtgcctggtgaacaacattcagttgctgttcaccaagggagccaaaatcaacgcgttggacacgggcgagtga

SEQ ID NO: 65126 - DNA, 623 bp, Heterodera glycines
atgccaattgaaagacattgcgaaaacggatgccgaaatggtggaaaatgcgggaagacgaagggttggcaattaaaatccaaaatttatttaaactttaaaatcatcatcagatggctcgtggggatgcaaatgtttgaccggctttgagggagaacagtgcgaaattgagcgaaatccgtgctcaaaaagtacacatagaaaaataattttattaattttgaataacatttcgataccaataaattaaaacaaaaataaaattgcattaattaaaaattaatctgaaaataataaaaatattatttattaaattacaggcccatctccgtgcaaacacaagggcaaatgtgtgaacattggtaacgatcggtaccgatgcgattgtgccccgggttggattggcctgaattgtgaagagaatcgcaacgactgtgaaaaaatgtggcaaaaataataataacatttatatgcatgccctttttaattttatttttttaagtgtctgtgccaacggcggaaaatgccacgacaaagtcaaccatttccaatgcgaatgttcgcgcgggttcactgggcgccattgtgaagtgattttctgggcaacatatttatgaaataaa

SEQ ID NO: 65127 - DNA, 449 bp, Heterodera glycines
agggatctgttagctgtcaaagtcactgttcgcttcaaattgccttcctgcgtcggactcggctcttccggtcagtgccgtttttgcccatccgacaaaattggggtgaaggcactttgaccaaaattcaattcccggcctcgaacttagtcttggtgcctgattttctctctcaatagattcgggcaaatattttagccaaaaatatccgtccaaatttgtgttccacccaaaatgccaatcccttccctcctcaggagcttattgcgtttgcattgcgcccgccctccttcagacggccggcctaatccccccgccttcggtgtccgccgaatcggacgaactcacttgggacgactcagtgctggacatcatccgcaagtggtcttccgcagccgagtcgctgatccacggccgcgcctctggcctggacgcggccatttgcactt

SEQ ID NO: 65128 - DNA, 751 bp, Heterodera glycines
atgcgaattgtgctggccaatggcactgaggcatcttttggcccggagagtgccgaactgcgtgccgtcgcgtgcggattgggcgcctttggcgtcatcaccgaagtcgagctgaatttggtggccaccttcgacacgatcagctacaatttcgtcaggtatcatacacatatttcaaaagttgctataccgaacctaaaaaagtcgaaaatgggggggggggtaaaaagtttaataataataaatattcatgaaataatatattgtctctgaaatatttaattctttatatattcatagtcgtccaaataattgtctaaatttccttaaatttcaattcaaattaatttttgaattctttgaatatctgtaatttttttttttgaaattaaataccctattaatgaaacatttatttgatagagctatcgaatggcatatcaagaaaatgaatgtctatttggttactttgatcattttattatttattatttttaaaatagtttgtcacaatattaatttaatatttactttcatttctttctttttttttatctttgccccgttgaaacttttttcggtcggttaacatattttgaaaccaaattttcagtgctttttcttcattttttcaattgttcagtttgccaaccgaaagtctttacgcgcattttgacgaaattcagaaaatgggcaataatgttttgcttatgacatcactggcgaacgaaactttgtgggacaaagtgac

SEQ ID NO: 65129 - DNA, 601 bp, Heterodera glycines
atgcgcaaaagagcaatttctacccttggtatgtcctttgtagcgtttctgactttttttaaacttttccctttttgccactctcccttcatttgagtttttcttacttttccacttttcttgaggtcatcttgccgatgtcgttggtgacgaacaattcgaccgaatcgtggagaaagtccttggcacttgtgcagattctgaaactgagctcagttccctgaagacatttatcatttctgttattacaatttgtcgcacttcgggcgctcgctttgccaaatttttgccacaggtttaaatcaacaataaactatttaatatttttattataaattatcagattgtgccaattttgatacaaaagtgtgaatcggtggaggacgatgaattgcgcgagatttgcttacaggtaaatgcaattgaaatcagtaattgacatattgagagtgtttttaggcgtttgagatattcgcgtttcgttgtacgactgaattgtcgccatttgtgccgagcattgtgaagataagcgtcgaaatggtttcttatgacccgaactacaattacggggctgaagaagaaggcgaggagagaggaatgg

SEQ ID NO: 65130 - DNA, 532 bp, Heterodera glycines
atgcgcaacataatcattttcccgtgccacagacattgctccttgcgcgacgattaccgcggtgacactgatctccgagtacaactcgcccacggccaaaccatctacgggatcgattatctgagcttgttttggtgtgtatgtgttttccaagtggttttgttttttacttggctatttgtccttgattccaaggacggtttccttgaaaatcggcctttaattggcaggaaaactcgccgaacaaatttgctctctcccctccatttttgagttaaaaaaataaataaattcccaaacaaatgggaaaatatgttttacagcggaatccttgcatccatttcttcgaattccgaacccgagttcgatcgctgttcccgctgaaaaaagcgctatgattttttcgaatcttatattaaaaaaatttcgaggcggataaagtgcaccctcatattatctaccgccaatggagccccgaaatttgcggggctcccggtaaattggacattattggatataaaataaattaaaa

SEQ ID NO: 65131 - DNA, 2155 bp, Heterodera glycines
atgaatggagacagtggagcccaagcaacagtcatcagcttcaaaacgtggatcaaattgggtcaacccaaactctctccaacggacatcgaaacccgcaactgcaatgacaccgcattttcaaccgaaggaaaattccattgcaccgtcagttgcttcgatcggccatccaaaacactgatcgcttacgtcagcagtgacttaaagcatgatttgtttggccttccgtggattgaggaattcgagctcatcccaagagaaattttgtatccaaagagcatcaaaggaaagccaaacgcgtcaatcaacgccaatgtcgtaaaggcaccaaacccggcgattggcatcacggacgaatcctcgctcaccgctgtgttgcaaaacgattttgaggaagtttttaagagcggacttggccactgcgcaatcaaagcgcacctgattctaaaaccggacgcccgacccatcttctgtaaagcacgaccagtcccccatggtgcaatcgaagctgtcgacaccgaactggaccgcctcttgcagattggcgcaatcaaaccggtagaattcagccattgggccgccccgattttggccgtcaaaaagaaaaatggaaagacccgggtgtgcatcgacttttcgaccggattgaacgattcgatcgaactgaatcgccatcctcttccgagacccgacgtcatatatgcagctttaaatggagccgcatttttctcaaacctcgacctgagagacgcctacctccaaatggaattggatgaaaaatcgaaacatctttgcacaataaacacccaccgcggcttatttcagtgccaacgtctcccatttggcgttaaatcggcaccatccattttccagcacttgatggaccaaatctgcgcaggaattccaggggtcttctcttatttggatgattgcctaatcgcctcaaagaccctggaagaccacgtcaatgcgcttcacacgcttttccaacgcatcaaggactttggcctacgaattcaactcgaaaaatgcaaattcctccaaaaagaattactttttctcggccacatcgtatcttcaaatggcatacgccccgacccagcgcgctcagaggcaattcagaaaatgccagcgccgcacgacaaaacgaccctccgttcatttttgggagcgctcaattattacggacgttttgttaaaccaatgcgagaaatcagggcgccattggaccaactcctcagaaaggatgaatcctggagttggggagatgaccaacagtccgcgttcgagaaagcgaaggcaattatggtttcagaacttctgctgacccactacgaccccacacttccgatcgtcgtagcggcagacgcgtcaaaagatggcatcggcgccacaatcagccacatttttccagacaaaaaggaaaaagtcatcgagcacgcctcaacagttctgaccaacgcgcagcagaactacagccaaattgagaaagaagctctggcgcttgtgttcgcagtccaaaaattccaccggatgcttttcggacggaaattcacactgctcacggaccacaagccattgctggccatcttcggctccaagaaaggcatccccatttatgccgccagccgactccaaagatgggccctaatcatggccaattacgattttgagatacggtacatcaacaccgcatcatttggccaggctgacgttctctcacgcctcatcgcaaattatccccgaccagaggaggatattttgatcgccaatatctgcaccgaaaccgagtgctatatcagcacactcctgcaaaccaagacggatcaacttcccgtcactgcagacgaaatcgcagaggcgacaccgaaagatgagattttaaagaaaattttggcattcatcaaatcgaattggccaaagaaaagcagcgacccggacatcgcaccgtattttccgaaaagggaaaacattttggaaatcgagggctgtttgctctaccaaaatcgcgttgttgttccccaatcgctccgcaaccgaatgctgaagtccctgcacatggcacaccccggaattgtgcgcatgaaggcactcgcccgccaacacgtctattggccgggcatggactcggaaattgaacggattgtccgtcaat

SEQ ID NO: 65132 - DNA, 2199 bp, Heterodera glycines
atgagcgcggaccaaattaagcaactccttgaggccatgcgagtgcaatcggatgccatccaacagctaatgggccaagcaccgcaaaacgccgcgtcagcgagtctgaaccatgcaaatttgtcaagttccatcgacggccaaatttcaaaattcaattacgacgccgaaaccggaaacactttcgaacagtggttcaaacggtttggagttttgattgaggaagatggtaaggacctccccgagtcgacaaaagtcagactactactcggcaaactcggcgacgaggagtacggcaaataccgcgacagcatcagtccgacccagcccgacaaagtcacttgggtggactcgatcaccaagctgaaaggattatatcccgaaacgcgttcactatttgtccggcgctacgaatgtttcaaaattcgtcagcaaccgagccaggacatatcatcgctggtcgctcatatcaatgcgtcctgcgaaaacgccaatttgagtccgaccaaagaacagctaaagtgcataatcctggtcattgcactcaacgacgagcaccacgacctgaggcaaaagtgtctcaaaatgctggaggacgcagaaaagacaggcacggacatcactctccaaaaagtggaagaggagttgaaggcgattcaaatcgttaaagaaagtgccctttctctgcttactcaaccggtctcaaccagcgccatccaattgcgacctcagcaatggcgagagaccagcaaaggcaaacataaggcaaaaccgggacccaaatggccacaacatgaatcggcacccaaatcgccacatcatgcgccttcgcctaagcaaaaatcggacgacaaagcaaacagaggccgtccaccgcacccatgtgcatcatgcggtagcaccgatcattggcgatcggactgcaaatttgccaacgcattttgcaacaaatgcaaccggcaaggccacattgcgattgtctgccgtcagcgctcgtccaacacagcacccaaatttcaaaatcgatctttccacacggtcgtggccaagtcacattgcatggtgattggcacaacccaaggccgatggtggaagatcccggtaatgatcaatggcataaatttgaagatgaatggagacagtggagcccaagcaacagtcatcagcttcaaaacgtggatcaaattgggccaacccgaactctctccaacggacatcgagacccgcaactgcaatgacaccgcattttcaaccgaaggaaaatttcattgcaccgtcagttgcttcgatcggccatccaagacactgatcgcttatgtcagcagtgacttaaagcatgatttgttcggccttccgtggattgaggaatttgagctcatccaaaaagaaattttgtatccacagagcaccaaaggaaagaccaacgcgtcaatcaacgccaatgtcgtaaaggcaccaaacccggcgattggcatcacggacgaatcctcgctcaccgctgtgttgcaaaacgattttgaggaagtttttaagagcggacttggccactgcgcaatcaaggcgcatctgattctgaaaccggacgcccgacccattttctgtaaagctcgaccagtcccccatggtgctatcgaagcagtcgacaccgaactggaccgcctcttgcagatcggcgccatcaaaccggtagaattcagccattgggccgccccgattttggccgtcaaaaagaaaaatggaaagacccgggtgtgcatcgacttttcgaccggattaaacgattcgatcgaattgaatcgccatcctcttccgaggcccgacgtcatttatgcagctttgaatggagcagcatttttctcgaatctcgacctgagagatgcgtacctccaaatggaattggacgaaaaatcgaaaccgctctgcacaatcaacacccaccgcggcctatttcagtgccaacgtctcccatttggcgttaaatcggcaccgtccatttttcagcacctgatggaccaaatctgcgcaggaattccaggggtcttctcttatttggatgattgcataatcgcctcaaagaccctggaagaccacgtcaatgcgattcacacgcttttccaacgcatcaaggactttggcctacgaattcaactcgaaaaatgcaaattcctccaaaaagaattactttttctcggccacatc

SEQ ID NO: 65133 - DNA, 686 bp, Heterodera glycines
atgttttctcgccaaatgctaaagggatattatgcaaagcgtggatataactttgatattagaacactttttggtttgttacgcttttggactagggttgcaacttcaacgtcggggttgggaaatatcgggggtcgaggtcggagacaaatttcgaaaatcgccaaaaaaaattttggagacggtttgcaaccctattttaggaattattgcaacaaattacacttttatctttttattattttaagatggtattgataagcgaattgatgcgtgtgccaagggattcaacgaagatccggtggtgctttatggtaaaaaaaacaaacaatttttttaactgatttattaaaaaaacaaaaataattgttgtttttttgggctttcgaattttgccactccatcaggcggacagagactttcttgtacaaacaatgggcacagttatcaatgaattatgtccaaatgtaattctacaaaaaaaaatttaccggaaatttttttttttaatttttcgatagataattgcatttggactgctcatcgcccaccgtcaactcgtcacattagtacgcatgaaaaaactgaacttggacgcgccagatttcaacacaattgtggtaaataataaaaaaaattctaattttcaacaaaaaaaacaactaaaaatttcagaatctaattga

SEQ ID NO: 65134 - DNA, 49 bp, Heterodera glycines; identical to SEQ ID NO: 51181

SEQ ID NO: 65135 - DNA, 209 bp, Heterodera glycines
tgtttgagtaccccaaacggacacttgaaaaaatcgatttttttgttttcggggcagtccccccgaaccgatgcgcccagatttatggggagaccgaatccttcgggaatagcttccctatagcctgtactttaattctgcgttggatttttgctccccgataaatgtttgagtaccccgaacggacacttgaaaaaatcgattttttt

SEQ ID NO: 65136 - DNA, 184 bp, Heterodera glycines
atgcttttattcgaattcgccaaattcacattgttatccatcatatttatgcatttgttatgccaaagcgatcaaacggcggaattggcgcatggatcaaacggagttggaggtaaaggaagtgttaaccaatttcaagaaaaaataaatgaaatttttgaaaaaattttcagcgattttttga

SEQ ID NO: 65137 - DNA, 121 bp, Heterodera glycines
ttattccgtctgtccatctcagagcggttcatttccaacatggttaatgggccattccgaaaaggccctttcatgattagcatgaccatttgtcatcatcgatggacggcagacccgtata

SEQ ID NO: 65138 - DNA, 3467 bp, Heterodera glycines
ggcgaaatcagtattaattttcggaaataaactcaaataatttttttcttgtttttaggttctgagaaagaccgggtcgttggtcggattcagcatttgcagaatgaattgagtgatttggcctttcacaactaccgcacttatgtggacgtcggacgaacggccgaacattgtaaagaaatggtcagttatccgtggtaactttattcttatgtttgttctatttttaagtttgctgaaatgaatagctttttggtaaagctgaaagcggaattcccagacctaattgggtgtattaatctggccaattcggactcagaaaagttcaccgaggagtacaaattgctgcatgaagtcgagtcggtcagcaatatcatttggaaggtgttgcgtcttccaaaggtttttttatttgatgtcatttggacaaatattttggtcattagttaatggacaaatacattcgcacgggtcgttatgagcaagcgtattctctaacaaattttgcaatttctttaaagcaaagcaaactcacccaaaagaatgctatgcttgcggtaagaagttgtttaggcggaaaaatacggcactaaccatttattttcgcattaagaaagttgtcgatgtgttaatcgaagcacgccataatctccttaatgaattgtttagcaaatttgcgggtccgattgacttatctcggagcattcaggtttaaattgaaattctttggaatattaatcttcaaactgaattgtgatgtttacatgacggtttcgcatttgaatttttgattcttttgtgcccttttaatatttactctttcctaattgactcagattgtcaataacatcagaaagatccccttcatctcaaatatccaactcagagagtccattctccagtacagagacatttacatggacaaaaatattcagcgtgtcatggtaaatacgtcaaccttcggcttttacgaaaacagtccttttcagtccgaacccgacttctttttgcgtgcgattgatgtttacagggaatgtatgtacgacacaatcgtcctttacttggctgtttttcccgactgtgacgtgcaacataaaaaattcgttcgtccatggaaatttgaattgtttggataagaattatcacagttaaggcagcttctagtgaggacccgcgttgggagagatggactggcagttctcagaatttcctccttcattcgtgggcccagagaaacattgagagactctccagtcttttgcgtggatcggagaacaagaattatttggacatggaagtgatgcatacgaaggtatagggaaagggaatcgttactttgccaaaatatgcaacggaatggagttgtatcttcttcagctcatgagtttcgccttttcatttgggcggatggggttggacttcaggccgctggttgtcaacgaatttgctcaaatggttctggaaatatgcaggagaagggtcgaaacagcgaccaattggtacgaaaatatttataaaacttaacgacttggttgttatagtttaacagagttaaaaagacttgaccttattgatggggacatttttgaaaatactcgccaagactttgaggacagtggtcacccgtccattgatttgagcgttctttcggcaccgcttgaactttgcatttgggatgatatttgcgtgtttggcaatttgctcatcgacattttgaatgatttgcgtcattcattttcgattattcttgtatttacttaatgatttctcttctttattctgatgtttcttcttttaggtacgtcaagtttttggcatttttcttttttgcctgcaaaacgttttcaaatgggtcgattcttttctttcggtttctgctgaaattgtttctgccaagagggccatttctcttctgctcaaatatttcgttccgttcttcaaccgatgcttcttccattgttttccccatgagaaatgcgttcactttttccgatcttcacattgtcctgtggaggattatgtgagtgtcttttttgagtttcttctattttatccatcatcgagtccgtatccaaagggtgggggaatgaaaaatatacgggtctgccgtccatcgatgatgacaaatggtcatgctaatcatgaaagggccttttcggaatggcccattaaccatgttggaaatgaaccgctctgagatggacagacggaataacaaacatacaggaaaaggggaggtgctttcgcaattggaatttttgggtcaggtagtgtcggtagacgcgccgccgatttataaaataaaattgagtgcaatttactttttgggaggaaacgttgtgacccccatcatttttcatttatgataactaataacttacacatcatttccttttcagcgcaatgcattcaaattccgaagcaaaaccctttttgtattgtgtaaacatgaaagtgtcttcaatgaaatattgagtgatgtgcaaacgaacgaaagcgatgaccaacagaaatggcaaaatgaggagggcgaggggagggaaaagggaggaggaggatgggaacgaattgaacagaatgaaagtgaagcagaaacaacaaagacattggaaacggtggagcaatttgctgaagcaatcgacgaaggaggaaaaaatgaagaagcgcaatgagaaaggggaggacaaccaaccatagccaaaggggtttcggagttataaaactaaacttttattttatttgctatattaaagactatcataaattaatggtaaaatcttttggcaaattgacatttttttggttaactcgcctaatatttgtttcattttatttttgttaattttacggtttttcatcacacttttacacagtaatccaatgtctctcactacaaaattgcgaagattgcggaagaaacccccggagggatgggacttaattgaaccgacattggaggagttcgaggcgaaaatgcgagaggccgagactgaaccgcatgaggtgggctggcaatgagtgggtcgatcaaccattgttaaattggacaaaattcaggggaaacggaggactgagaccgtttggccgttgttccgggtgatttttcttctattaaatggcctttcatttcttttagatccatcaccagcgttcccgatacatttacgaccttttctataaggaagagaaaatttctcgcgaattataccaattttgcatcgatgcgagactaatcgacgcccaattggtggccaaatggaagaagccgggttttgaaaatttgtgttgtttgcgttgtattcagacgagggacacaaactttggaactaattgcatttgtcgtgtgcccaagtcgaaactcgaggcggtgggtaaaacattagtcggcattttccttttctggcgacacctttcattaccaccagccccaccaaaatttattttctttaaaaagtactgcaaaaagt

SEQ ID NO: 65139 - DNA, 1295 bp, Heterodera glycines
atgcatatatccaagcaaatttgtccaatttgggattctccagagtatggtttttcaactttattgaataaaaatttgccttttagaataaactgcaatataatgcagaggaggatattgctaaggcagaggcagaagttaacaagactccaaacatcgaattactcgaccatgagtacaagcggctaatcgaaattaaatgtgtcgaatttgaggatcttatggaaggaaaggcaagaactaaactcaaattttatagaagacttggttgaccacaataacaaattgaatctctcttttaagaaaaagcgaagaatactgacaactccgattttcttgttgaatggtatatcatttgattcctcttggtctgttgctaacgaatccgaaagaatttttacccgggactgaattggcaaaatgacttagggactgaaccgtccaacgtctaatctccaagaaaatatataacaatcggttcctctcgggaacatagtgtaaaaagttatgggctcggggatcaaaagaatagaaattggtgagtgtattttggccaaaacaccgcacactcgaatacggcggccaataggtggggcgagactacgggctagggaagaagtccgcgcgtgatccacaggcggttgactgattggcgggggcccccgcagtcaaccacctgtggcgctcgtcagactgcttcctccaccctccgtcttcgcatgctcaccaaggcgggcgctgcttagtcacgggcccataactcggcccaaagtggtttccgccaaaaaattctttcggattcgtgcattacagaccgagaaacgtcgaattaaatatcactcgtcgaattcggcgaggtacacatattctttaattttaccaccaattgtaccaaaagcaaacaattaggtatgaccatttagcacatcatttaataattagccaaaatctcccaatctactaaagcgtaattcaatttatttgcgtgcaaatacaaaacaggaaaagaatgtcattcgcgtccatttgagtgattgtggccctaaagagggccgtttgggatattttgtttttccgtccgatcaccaccgctttcatcatctcctgctcattttgacgaggtgtacttcgtcaccgccttggtcccctcggacacggcatttttggccaactcgccgggtagaatcagtcggacagccgtctgaatttcgcgcgatgagatcgtggaccgcttgttgtaatgggccaatcgcgaggctttcgtcgcgttgacaaaccttaaaatgaaaaataaa

SEQ ID NO: 65140 - DNA, 973 bp, Heterodera glycines
atggctgcgaacttcgaccaattagtgagattgatgacgcagcaacagcaacaatttgaggaccaacaaaaattggtgcagcagcagtcgcaacaaattgcgcagttgctagcaaaccaaaatgctgcaaacatcgcagctggtcaacaaaatccgccaaatgcagttgccattccttcgctgccggacatttcgctgttcgaagtgtgtgatgagaagagtcgtgtgagcgaatggctcgaccgattcaaattcgccctcgactgcgccgcgccaacagcaagtgatcaaattaaggtgaaatcgctgatgaacaagctgagcgagatggctttcagcgagtatagccgatctgttctgccagcttcagtcacagatttcgatttttcgacgacagtgcagaaactggagaagcttttcgccaaaccccagtcaatcttcatcgataggtatgaatgccttaaagcggtgaggggagagggcgaggagtttcggcacttcataaatcggcacaaaaagctgatcaacgacttcaagttcgacgatttgaagaaagagcaattttatgcattaatgctcttaacggcacttaaatcgccgagcgacgcagcactgaggcagcgaatattggctaaattggcaacggatggacaaaacgtgtcgtatgatggaattgtggaagacctcatcaacttccaatcaacgattgcggaggctcgagcgatcgaaacgccgatcagctctcgaaatgttaatgctgtccaccaaaagggcaagaaaaacttcctgccgaagaacaaattccccaaaagtggacaaaccacaacggcgaacaaaagttgttggcgatgcggagaatgtgaccatcagccaatcaactgccgattcaaagtgacaaagtgtcacaaatgtggtgccatgggtcacttgggaaagaaatgtgaaagtgttcaggcatggaagaaacaacaaa

SEQ ID NO: 65141 - DNA, 3973 bp, Heterodera glycines
atgctcttaacggcacttaaatcgccgagcgacgcagcactgaggcagcgaatattggctaaattggcaacggatggacaaaacgtgacgtatgatggaatagtggaagatttaatcaacttccaatcaacaattgcggaggctcgagcgatcgaaacgccgatcagctctcggaatgtaaatgctgtccatcaaaagggcaagcagagtttcctgccgaagaacaaattccccaaaagtggacaaaccacaacggcgaacaaaagttgttggcgatgcggagaatgtgaccatcagccaatcaactgccgattcaaagtgacaaagtgtcacaaatgtggtgccatgggtcacttgggaaagaaatgtgaaagtgttcaggcatggaagaaacaacaaagtgcaaagatgatgggaaacaagaaaatcggacatttgaggatcggaatgacctcctgttcgatcaatgcactttcgttgatgcagatcaaaattctgctgaaccaacaaaaagtccaattcttcctcgacaccggatcggacatcgacgtgattgatgagtttacttatgccgacattggcaagccaccgatcgaagcgtgcgacgaaattgggaagacctttgatggaaaagaagttccattcattggaaaaggtattggcatattcaaattcggcgagattgaagtgaaacgaccattttacgtggcaaagaaaggctcacttaatctgctgagttgccaaaccatggacaaatttggtttgttggacgaaatgaagctgaagatcagcaacgtggcagtaaacttgtgcaacgccggccgcccaaagggagagaaaattatccccagtggcacaaaacaaatggccggcacagaagccaaaattgaggcattgaaaagggcctttcccgaagtcgttaaagacgggttaggactctgcacaaaggagaaggcacggctgtcgttaaagaagacgccgcaccaatttttcgaaaggcacgtcctgtgccatacaactctttggaagttgtcgaaaaagaattgggccgattggaaaagatggacgtcatcagcaaagtcgatcatttgaactgggcagcgccgattctaattgtgaaaaaggccgacggctcagcacgactttgcatcgactattcgacaggtctaaatgatgctcttctcgactgccagcacccgctcccagttccagaggatatttttgccaccctgaatggaggtaaaattttttcccaaatcgatctgagggacgcgtatttgcaaatcgaattggacgaagaatccaaagatttgtgcggattggccacacataaagggaattaccgaatggaacggttgcccttcggtgtaaagtcggcaccaagcatattccaatcaattatggataaaatgctggccggactaaattttgccaccgcttaccttgacgacatcattgttgtcagcgggacaaccgaacaacacgttcgacatttggaagaagtattttcccgaatccaagcctacggattccgagtaaaattggaaaagtcatccttcttccgagaccaaatcaaatatttgggtcaaataatcgatcggaacggacgccgaccggacccagcaaaaactcatgcaatcgctcaaatgccggctccaaaggacatttcgtcactccgatcattcctcggcatggtaaaccattaccaacagtttgtcaagaacatgcgcttcactcggaagcctttggacgacatgctgaaggatgacgttgaatggaagtggacggaagaacgacaaaaagcattccaaaaattgaaggaagtgcttacatcggaactgctcctcacccattatgatcctaaattggacataattgtggcagccgatgcgtcggaactcggaattggggccgtcatttcccacaaattctcgaacggacaaatgaaagcaattgcacatgcctcaaggtcgctcactccagcagagaaaaactactctcaaattgaaaaagagggcctggcattgatttttgcagtgcaaaagttccacaaaatgatctacggcagacacttcacattacaaactgatcacaaaccgctgatcagtattttcggaagcaaaaaaggcataaggcagtgcagcgcaaatcggctgcttcgctggtcacttactttgctggcctacgacttcgacattgaatatgtcaacaccaaagattttggtcaagccgacgcgctttctcgcctgattgccaaagaatttgagtgtgatgatgaacgagtgatcgccgcgtgtaacatcgacgaagatcttggaatgattttggatatggcaaaacaaattctgccaatcaaatttgaaaatttggtctcagagtccaaaaaggacaaaacaatgcaaattgttatgaaattcgtcagagacggttggcctgatgaacgcaaattggcgccacaatcagaagaaattgagcttttcggcagaagaaaagccgatctgacaattctgaaagactgtctgatgtatggcgaacgaattgtgatccctgaaattttccggaccaaaatcttgacactgctacacaagggccatcctggaattaaaaggatgaaacaactcgcccggcagtatgtcttctggccaaaattggatcaacaaattgaggaattcgtcaagaattgtgcaccgtgtcaattggccgctaaggcaccgacgaaaacggatttgcactcatggccaaaatcaacgcggccatggcaacgaattcatgccgattatgcgggccctttcttcggaaaagaatttctgattgttgtggactcatattcgaagtacccggaggtattcgaaatggccactaaatcagcggccgcaacaatcgaacgactgcgttatctcttcacacgtcacggtataccggaaacattggtaaccgacaacggaacgcagttcgccgctagtgaattcgcaaaattcacagaagcaaatgtaattgcacatctcttttccgctccgtacaacccaatgtccaatggacaagcggaacggttcgtggacacatttaaaagggcttttcgaaaaataaaaggggagggagtgccaaataaggaaatcatcaacactttcctggtcacttaccgcacgacaccgaacgattcgctgccggatgcaaaaacccctgccgaaatgctccttggccgaaaaccgcgcacaacgattgatctcctaatgccgcctcttccacagccaacggagagagacacaaaaatggagcacatttcaatcgccggtttggcgcccgaccacagaaatttgtgtcaaataagccagtttgggctcgacaccgactctcgcagaattggagagctgggacaatttgtgattgctccggagtcatctacacggtcaaattccccgacggttcgacaaatcgctttcatgcgaatcaattgagaaaccgggaaaacaccgaaaatggccatgaaccattggcaattttaaatgaggcattccatctgccgatcaccgcaccgaacgttggaattgtagggcaggaccttgagccaaggcctgacccgatcaacgatgagcaccaggacgagatcgaaccggagcaggcccgtcgaagcccgacaccgcagcaacaacaagtgccgcgccggagtggacgaaaccgccgagcccctgatcggtactcgcccggatgagcccaatcaaaaggggaggtgttcgggtgatgaccccgagagagacatttaatttattttatttatgtaattccctctctctgtctcccgcactatttctctcatttaattgtgtctgcactccctttgtaaaggtcagacacatcatccctcccccatattgtgacccccgctcatttccaatattcattctgttttcttgttgtattcccacatttttcctccgattgtcctccgccccaaatatttatttatttgtttcca

SEQ ID NO: 65142 - DNA, 4250 bp, Heterodera glycines
caaattcatttggtactcaaacagaagcataatgccagattgaaggatgtcaaaatgaaattttggcacaaattcaatcaaattggcgtcgcttttggaaaacacggcacgcaacttacaaatatatgccaaatgatttgtatgaacattgggcagcagtgcaaggtcaatggtaagatttgacatttttggcgcgccaattagtccaacaattagtgaccgataaagataatgttgctaaatattttcaacacataaagcaattgttgccagagcggaatctgttttatcagttggctgaggagcatgccaaaaacataaccaggtgaagggagaacctttgatcactgatcagatatcacttatctcaaatggaagtttttggccactactgtagtttgctgtatccctcttaaaacgaaaagggagacctttttgttttgaaaattttttttttatgacaacttgttattaacccgaacccgaacaaaaggataaaatgatttgcatgggaaggaattatataaaagatcaatttgatatacctatttgcaattatttttcaagaaatttggacgctaggcttaagaatttttttttatttctaggattttctcgggagcctatctcaataacccgcaaccgatttcaccatttcataaaaattataacaaactttccgcttttgtaggctaaaactggggtcacagtggtcccgtccacacatgtgtatggagtagctctattatgtcttgaatttcatagtaaattgcgaaaattcttattgaaaatacaggaaacaaacttagttttttattaaatttattaattctttttaaatgatatgtatttgaaataaataaaatgcaaataataataataaaaaaaagaaactttaagattggcagagacaaaaaatgcatttagtgaaagtcttaaaaattcactgctggaaggaaaagggaccaaatttcggctccaaaaatttttctcgcttagtctgggcgatattgcattatatgagcaaatggttagcaaatttcctcaattaaaaaatttgtctagatcaggtaggtgcatttaaaattttttttataaaataaatttaaatatttaattgattttattatataatagaattaacgaacgacgaaataacggaattacaaattcgaacttatatcaaatttcttgacaataaaaatgatgagcaaatttgtagacgcgcaaaatatttgctcgatattttagcattttatcaatggtattttaaaataatttttaataaaaaaaaaaaactttttaaggttaaaaaataaggacgacattttaatggacaaacaggccgaagtgttaaaacacttggagttgtacgaacttttgatggtcattaaaatttatattttttagttgcaaatttctttgttttttttcaatttgaaattaataaataattaaatatttttattttaggattcggtgccaaatttatctcaaaatgagatcaataatgatatgattatacagctgttgtacgaacagagaaaagaattatttccaaatttaaatattgtaaaattttcaaattttgacagcccccaaggcggtgaaacggatgctaaatcggcacaacaatttttgcacggcaaaatcctccaaaaattggttttaaacagcgaatttttgacgcagttaaaaggtctctgaaaaattctttaaaaattagcaaaataaaaaataaatattaatttaaattttagattagatacaatatttgtaaatttcggataaggaatttaaatttagataattataaataccgtatttcctaaaatagagtccccgggggttttattttcaacccccctcaaaagggaggctttatttcaggggcggttctaatttaggggggggggctgtattttaggaaataaggttgttttatttaaaaaattatttttatttttaaatttttgaaaataaaaaattggaattttttagaaatctgtgccgacattgaccggttgcatgagttatgcaacgaaccagtggttgaacaaattatcacgcaaaattgttgcaataaattggaaatgccaaaaacggatgccaaaaattcacatttggatgaaattgcttcatcatcatctccttctatgttcatgaaattgagtaagcaaaattaattaataaatttaaacaaaataattataaaattttttttaattcaaaaaatctctcaacaggcgattaataaaccttaataacactttaatgaatttgggttaattataatataaaataaaatgcactaatgaattaataatggatcgggggtcagttttcggtgccgaccgtttgggcgtcgccaaatttgaaatgctaaaactttttcctttatcagttaacatttagcaaaaatgccatcaattgaaaataaaaccatgaatccttttctaaacaatttgattaattttttttaaattgaaaaaaacttggaaaaattagcaaaaataattttaaagttttttcaggagaaaatatagttttatttgaaaaaaattctatgttaaaaaaaagttatggcatgcagcgacgaaaagccagaaaaagcccgaattaccgaattatacaaaagcatttaatttgggttgctatttagaagagttattaaggagcattaccaacggtgctgaaccggccggcgccgaactggctggcggcgtgctaaataatgcttttcgggtcgggtgaattgttcaatttaatgacaatgtacaaaaatgtgatgtttaaaggacgaaaaaataatgatgattcagatggtgtaattttggaaaagtcagaagaagacctcaattttgaggcaatttattttcaccacaaaacggtattaaaagaattggtcaaattgctttgggtctttcaacgatatttcagacatattaggtaattaatgtgaatatcatttaaaaaccaataaataatttcactaaaattcatcagcaattaatagagcccggaaatttcaaatttgcggatcccgctgcggggttggaactcaaaatttttttgggatacgggatcccgtgggattaatcccgaaaatcccgcaatttaaaaaaaaaattcgggattgcggattgggattccacaaaatcctgcacgggatcccgtctcgtaccgggcactagtaattaatccattcataattcgataattaatacaatttggaggtttgaaattttccataatttattctctataactaaatttcacaaattaaactgttctcaccttggctttattttaatgattttttttagaaaattatgaattagatttattgaaaattttgtttcatttaatttaaaattattaaaaaaaatttttttttaaagaattaatgatgaaaaagtgaagagactaatcattaaattgaatgtggacattgcaatggctgaccttttcgtggaagtgaatgatccggcaaaaaaacgtgccaatctttgcctaatggacagtttgttgactcatctggtggcaaatggcacattgtacacagaagtccaagaatggcaaacccacatgctttatgaacattttattaatcatgtaaaattacaaagataatttatttattttttaaattaaggttctttggttaatgtttaatcatgaaacttgttcccgaggggtttttgacgacctctgatcatgaaaatgacatctattttggccaatttctaactaacccgaactcggacaaaagtttaaaattccaattgtccatttatgattttttgttcaaatttaagccatttttaaagtagcgcaacaaattccattgatttaaagatgaatttaaaatctttaaataattccaaaaaaaaacaaatgcaatttctttttttgctaagaatttcatacagtccatgattagaatcaatcaatatagccgcattgattgatcagcttcaatcaataatgattgttggttgaccaaaaccaatcaatcctcattattcagaacgaaattccgcgtccatcggatgccgatttgcgctgggccaaaccggagtgccataaggcggaggtggcccaagcggcagtgagcaaattattgggccaaatgtatttggtggtacaatcgcacagttttgtgctgggccaagttgcaaaggattgtgccgaatttgttcaatttgtcaaccaaaatgggaaaggaattttgaaaaatttatattgcg

SEQ ID NO: 65143 - DNA, 289 bp, Heterodera glycines
atgcctaaaataacatcatgcattttagtcatattttgggatataattttgattgatgcacccaaatttcaggtgtggatgtgccgttttgaacatctgttgagcctccaattgcccgcagttaggcaggaaatagagaaaatttggctgttcttccggtgttactatgacatcatcagcgattttgagccgccgattagcacggaaattgattggcctttagcggctgccacaaacgaattaattttgggtaattaattagtgaatttattactttataaattaatca

SEQ ID NO: 65144 - DNA, 593 bp, Heterodera glycines
atggacacaacggggaaaacagtgctctccaaaaatgccatcaatcatatcccattcgacaaaaccgagctgactgctattctgaaatttggtgctgcagaacttttccgggaggagggtgaagaatcgcaggatcttgagcttgacattgatgaaatattgaacagagcagagacgagagaatgcgagaacatggagtgagttaaattgtggtgtacacagcacaggcaatctaaagcattaaaacaaatgtaaacacaaattaagatcagcgaatgatttgctcaactcattcaaatatgccaattttaccattgacgaggagaaggatttggcagaaatttcgcagttggacgactcaggcatgggcgagaatagtccaaaattgaccgacaattcgcttgacaacagcgtgaaaagggacttggagaagcaatgggatgaaataatccctcggcaagaaattgagcgattgaaagaaatagaacagagcaaatcgggcgaaggcgacattttgttgccgaggaacagaccgagtgtttcaaatgtgaattacggagggttcactgatgaatcatcggacgatttggaca

SEQ ID NO: 65145 - DNA, 1076 bp, Heterodera glycines
gcaaacggaggttttctatcaagttgtggaagacattcaccgattgtttcaattgtctaccaattgctgctttaatcgacgagaaaatcttctgttgtcatggaggattgtctcccgatttacaaaatatggaacaaatccgcagaattatgcgaccgacggacgtcccggacaccggtaccacgcctaacacaagatagttgtttttagtgtgttgttcaggacttttgtgtgatcttctctggtctgacccggacaaagatgtgcagggatggggcgaaaatgaccgtggcgtttcattcacttttggcccggacgtggtagcaaagttcttgaaccgacacgacttggacttgatctgccgtgcacatcaggtcactcaattttatacacaaactcgcaggggcgtatctagaaacatttttcggggggggcccgacctgaagaccttttttttgggtaacaactgcactttttcactaaaaagacccaattttggccattttaaggcaaaaaacttgtaaaatagtggaaaatggaggtccggcggtgccgataggcgccgccgggaaaaatttttggaaatttgagtgttatttgttaccaaaattgcctattaaattttttaattttcgtttgggggggggaattcgaaaaaattttccatttttagttttaatagacatttaaaaatttaaaattattttttccttattcataataaatgtatacagaaaatgatttgccacctcaattcaaaaaacgaattccttatttacttacagtctaattttattgtaactaactaataacgaactcatttaccatggctttgattgtttttttatttttctattttttatatagtccagcaaactaagtttatgtaattgtcgtataaaaataataaacatggaatacatgaaatgtaaaaaattaaggtggtggaagacggctacgaattcttcgcaaaaagacaattggtcactctgttttctgcgccaaattactgcggcgaatttgacaacgcgggtggaatgatgtcggtggatgagactttgatgtgctccttccag

SEQ ID NO: 65146 - DNA, 260 bp, Heterodera glycines
atgtatcttcatgttatattaccaacaaatatacataaacaaatcataaattccgagcagatatggatcataattataaggaagcggacaagttatgtgaaatgaataattaaagaataaagcaattatttagttggaaaacaaatatttatcaataaaatacaaaatatctattcaaataaaatgaataacaatgaaacaaataatttatttatttttagcaaatgattgttaattatcgttagattaaaagcaataaa

SEQ ID NO: 65147 - DNA, 804 bp, Heterodera glycines
atgtgccgccaaatcgggcttctagaaaccggagagcacttctggattcctccgcagttcctcgttaagagcaaggaagagctgatagattatgtctatcctaacttccaacaactccttggcaatgacaaggagctgctcaatcgtttgattctcgctccgcacattgacacgtgtgatgaagtcaacgagatcatgatggcgaatgtgccaggtcaagtgcgggaatacttgtccacggataagccccttgacgaccggccactggacatcgatgagattgagtccgaagtggctgcgttgaaccggcgcacagactcgggcatgcccccgcacagtctccggcttaaagtcggatgcgtcgtcgtccttcttatcaataaaagtgataaggaaggactgatcaatggcacacgcatagttctggaagaacttggcgatgatcgcctcattggtcgtgttatcaatagcaatgctattggcggccaagtgagattctttcttgaaagaacacgaaatgtctatgaagacaaatcgcctggcggcataaaatatgagcgtttgcagttcccaataaaacctgcattcgctatgaccattcaaaaaggtcagggccaaacaatccgcactgtcggcattgatctggaaagggaagtattttcccacggtcaattgtatacggccttctctcgggcaacggacggaaacaatgtccgtgttcatgctcccaaccgggaaattgatgcccaaggccgagccaaagtgctgaatattgtagctactaatatgctcaagttacaataa

SEQ ID NO: 65148 - DNA, 462 bp, Heterodera glycines
cgttacattgacatcggtgggagtgaaattgtgcctctctcgggcgtgctcagaatgcatcgggaacacagccgaattgtgccgctttgcatgcagctgaccctggagagtataaagccaccgaacagagccagcgaatggctgcccaaagagtgcacttttttccgcagtttaatccgaacggacagagcgatgagctgtcgaattcgacattcgaaccaaaggtgggcctgccctttgaaaagggacggatgtccactgaatcctttctttggtagcgccaattatcagccgagcagttacaattcgtcgccgcaaagatggtcaggagtgtttggcgtcacttctttgctcaatgggaactttcgagtggaagaacaaatggtcgggggagttgagaacggagaagggaatcgcgaagtgatggccgcgtgggccaacctcgagaatgggttccactga

SEQ ID NO: 65149 - DNA, 120 bp, Heterodera glycines
atggttgtgccatcgaactgtccagaagatttgccccgaacaatgcaagtggacccatttgttgagcaaacggcacgccaaaaggcgaccgatgttgcacagcgaatgattgatgaaaaa

SEQ ID NO: 65150 - DNA, 1657 bp, Heterodera glycines
atggaccttaacaatggtttttacgacagggaagaagacaaagtgaaattgattattgatctcacaactgttgatgaaccaaaagtggacaaattcaatttggatcaaagcaaatcaaacgggacaatttcgatggaaattgaaaaagtgtcggaatttgcgcgagaagtcttttggagtgaacgtaaaagtgaaactgttcacatcaaaggattgccatggaaaatatgggcacaaataaatccgaaaattggaagcactgacaatgagaaatggttggccattttcctttggtgcgatgctccaaaaggaggtgcaaaattactaataattaatatatatattaacaacaattaattaattatattgagcagaaacttggagttgcaaatgttcggcaaactttcgaattgtctctctaaagagcggagtgtcggattttaaattagaattaaatgacgatgtttttgacaataaatggaacaacaggggatactttaattttatttcaattgctgtaagtgacaattaaacattcccttaattgaccaattatggggtaattaagcaactgatggacccaagcaaaggcttttacgaccaaagcgaggacaaagtgacattggccattgatgtcacagtgaaagaagcaaaacggaggacgaaacataaatgcccaatatgatttggggaaaaatgcccattgaatatcctccatcctatgatgaacctgtttttttatttattaatttttcttgattatactttcaaaactgctgatatatgaattaattaattgtcggagctgttttagtagactctcattttttttggacttggatttattgcattaattttgttaggatttacgtaaacatttttttaaactttttttttaaaattgaaaccattcctaattgactgatcattttttccttttatttaagcagaattttttgggaccagaaatttgggaaccgggaagtttgggcttattaaattaaaaattgaaaaactattactaattacgctatgatttcattctttaataatccaagctgcgcttaaaaatttatatttactacaaaattaaaatatggaaaagtgacaattttattatttagtcaattcttacagctgtttaaacgtggtgttgagtgtcaattgtacataattccttaattggcataattattattaattaagaaattgatataagtcagttgacggaaagcactgacaatattgagaaatgtttgggcatttatcttttgtgtgccgctccacaagaaggtgcaaattaaatgctaattgataagaattaacaacgatattaatttgcgttatttgtacattttgtggcatggatttgatatttttaaaggcatcaaaaggagcgcagaattgcaaaaacatttgttggccacggccaatttgaagaaagctcaaattgtgttacttatacccagaaaataattttcgcgcttagtctgtgaaattctttgcgtctcaaatccttgctaaaaatggaaaagtaaattttgttttgcacagaaaattggagctgcaaatgttcggcaatcattcgaattgtctcacaaaagtgcgatgtggcggatttcagaagagaattaaatgcgatgtttttgacaataaa

SEQ ID NO: 65151 - DNA, 1405 bp, Heterodera glycines
atgtataataaattaaggattttaagaccaattaattgctgctgtctgattgtgagatcgaaaaacccttgactttagactttttttttgtaaaatatgttcctcaaaaaatgaatgtttttttaagtttgtcaaaagccaaacaatcattagagggcttaaagaaatctcggtctcctaaactcgaaaacctctaccagaaaaactcgattcttttctcgctttggcactctcagagaaagactacattttaaagattatttttcctttaaattttagaattttgccaattgttgtttggcttacattggcaaaaatgcggacactttgcttaaaacggatgcttttttgcaaattgaccaaaaattgttgtgcgaaattttggagtgtgacgaattgcaaatccgtggagaaatttcaatttggaatgcggtaattttaacaattaaatttaaaaactgtaaattttattagtcatttaattatttccattaaattttttaaaggcactccgttgggccgatgaaaaatgccgtgaaaatggcattgattgttcagcagagaatcgccgtcaaatgcttggcccggcactgttcaaaattcgctttccgcttttgtcaaacgtggaatttacgaagaaaattggtaaaaaaataagtcaaaatttcaaactcattttctgatgagatgccgtaaaaaattcatagtttttgtggcgatttttaaaaatgttttttaaaatttatttttcaataagttaatacatatttacagttcccttcggtgttttgtcaaaagatgaagtgatcgccgtttatcagttcaaatcccttccaaattgtcatgggatttccgacggaattttcccaatgccattttcgactaatggacggatttctgatcgaaaaagggcacagttttgatggacattgaaaaagtgtcggaatttgcacgagaggaggttgagagcagtcgattgagtgaaaaaatatacataaatggacttccatggaaaattgaagcagaactaaatgaactcgttgacagtgagaaatggttgagcatttatctattgtgtgatgctactgaaaaaggtgcaaattaactgttattaaatgctaattaacaacgatgagtaataatcattaagattcgaattggcgctgctgcgttcgttcggcaacttttcgaattatatcgcaaaaaaatgtgacggagaattccattgggacattttgtgattatgtttttgacaaaaaatcaaataatttgggattccctaatttcgtttcgtttgcggtaagtgccaactcaaacaaatattttaatttgacattcgtggaccagccaatattgaagttcatttatttatttgcctggtgtaaagaaatcataacaaaataaa

SEQ ID NO: 65152 - DNA, 566 bp, Heterodera glycines
atgatggaattgcttatcatgtcccaatcagtgcttgatcggatgaagcatttgttgagcacgggtgaggacgcggatgtttattttttggtgggcgacggagacgcaaaagaggcgagtcttcaaattaaaaatttaatttattaattataaattggaaatttagtgaatggtaaattttgttgtgttttttaaaatttaatcctcttaagcttgtgccagcccataagctcattttgaagttggcttccgacgtttttgaggcgatgttccgttttgatgccaaaaaggaaaaagcggaattcggtaaaaacattacttaatgacatttacaatttagtctctgcaaattaccctaattaattttcaatagtcctccgctaattacactaataattttcaattagcctctgctgattgtcccgtggaggtccccgacgttgaagcagcagcattcaaagtgatgttgagcttcatctatacagatgatttgagcgaactgaacgtagaaaatgcaatggctgtgctttacgccggtggatttaattttatgtgacaaaaataaa

SEQ ID NO: 65153 - DNA, 274 bp, Heterodera glycines
taattaaatccattccttcgggggaccgtgccgggtgccgcggggtaagcagtgctggttcgtttcatcacggcaccgaaccttttggctagtcagcaatcgttgcttaacttgccagatcggacgggtgcgcatgattccactgttccaagcaccccaccaaaagcaaaacgatataaccaaaatataagggaaaattttttaaaaaattttttctccatcttcctttttgatactaaagcatcagagtgctaaaattaagttgtaaataaaa

SEQ ID NO: 65154 - DNA, 689 bp, Heterodera glycines
atgcatgaatgtggtgaaagaatttccatagccaaatatgatcaacaaggatttcggcgaaatcaaattagacgaaactcgaaaggtaatttaaaaaataaaaagatctttaattaagatttttagtatttaaaaataacaaaacatttttaattcactttaagacaattttcaaattttaaaaagtctgaatgaatataaattttctgtgtatgaatcaacaaaaatgttgaagaaaatttacgaacaaatgaaagaaatctcttatggtaattacaattcttttcatggcaacaatcaaactgaagaaaaaatgccaaaaataattggagaattaattgagcaaattcataaagatttcagaatattgcatgaagtaaaaaaattcgaattttacttattaaaaattataacggattattttgaagaatgtgaatattttcgactacaaaaatatattttggtaaatttggagagaatgcttaaagaaaacggaattgcaaatgaaaaaaacgaatatcatgcgaatgttgacaaatttattcaggaaaaatttgaaaaagaatgcaaaatgtaagatttaaaagtgaattgaaatggattaaacttgctacaccttggaaaattttagctgtgcttatttgcaacaaagtacttgtaaaaaaaaacattttgcccaagaatgtaaa

SEQ ID NO: 65155 - DNA, 60 bp, Heterodera glycines
atgtgtttcagcgtgccttgggtagcggccaatggcgcaaattcggcaaaacaattcaaa

SEQ ID NO: 65156 - DNA, 1462 bp, Heterodera glycines
atacattccaattccaacaacaacaactggaagcgcaacaacagcagcagcaggaggaggaagaagagagggaaagcagcatgaccaaggaggaggagggcaagaagcggcagcacatcgatgtcaagcggggcccggtggaaaagaagggcagacgcggtgcggttccgtgccggagtgtcggaaaggatggcaccaccaaaggtagacaaagctgtttaggcattggcttttacccacccgtcccacaagaaaaaacccattgaaccgtcccctcggaaaagactgaaaaaggacgataataggaagtgttttttagggtcgaaatatttcatacccgaagatgtttggcgtgactatttgggcactgaatgggtggacatggacaacctccaattggaggaagtggaccagccccaatatgaaccgatgatggtagaaaaattaaattgaaatttaacaaaaaatgaaagtatttataatgccatgttccgcattttcacacaaacttactccatttttagccactcaacccggacaagccgggcgaggtcgactgttgggtcaaggaactgcaggacgttgaggacaacgggctcgccaggggatgggaggttggctgattttttggaccttttgtagtttgtcgaacaaattataacacccaaaaagttgttttggcgccctttgacccccaccgggtaacaaacgcatgacacattcaaattcaaaaatttaatcaattccctccctcccccttcccaggtggagagtgtcattggggtcagtgcaaaggctgcggatgggacgcgtcagtgttttgtcaaatttgtcggcttcaaattgccacagcaaattccgctggctgttgtccaggaaatggcacccgaggtaaaatgaaagcttttttctccaattcgaccaaattgttcgttattatccaataaaattatgagtttactttttttaatccaattttgagttttggtcccatgaatttgtttctctttctcttttcgtcattttatttattttttaaattaacatattatttttgttccaggccttcatccagtggtgcacttggcagaacggcatggacaatttggacaaatgtggcgcctattgggaggaacagttgcggcagccgccctcctggatgtgccgtcggtcgttggacgcctttgctgcatggaaggcgtccaagttgaagcagtgcaacaataatgctaacaacggaagcaacggctccaccattgcaaacagcaacgtcttttgcgatgatgacgacgacgacaatggtgcagctgctgatgatcatcgacaaggacaaagccaagtggagctgccaccgaaatggaaatgggcaccaccagaagaggaggaggaggaggcggaggaggaagagcgggaagatgacattgaggaggcggaggacatcgatgatggagatgacgtttag

SEQ ID NO: 65157 - DNA, 1866 bp, Heterodera glycines
atgggaaggatagcacaccttctccaatcggatggattcttccgcacgcacagccaacgtcgcttttcaagttcatcagatgtaaaagacgaatcactgccgctggttcgaatttggaatcgccatcaatggcgagaatatatgtgttgtcagcctaagcatcggtgcgaacattgaattattgcacagattccacgagggcaaaatttaggctcaaaagacctgcaattgtttgtcttatacgctcaaatgtgagtccataattcgatgcccgagcaaaaagtacatgtacatcacttgcgaccaacgctttttgtgtcggatcaaacgtttgtctttgagatgcacaaaaagaagtgagccctacattcaagcgccagcacaagtcgacctccgtacggagtgttcagaagaatacggctgtgcatgtgcggttcgagggggggtgggcggcttgaccactcccatacgcaaatatgtctgctagagggatcgactgagttactgtttcagcgtcatttccttctcacctgtgaacatccacctttagttggcatgatgacataaatgcgtcgtgagggcagggggaacggatgggtggtgggtgatagtaatggtaatgtttttcccacgttaggtccagtgaagcaaaaagttttttgttatcctccctttctcggtcggtgtgattcatcgcaccgcatagaaaacatatttttcattggcaaatggcaaacttactactgtcccggggtttactgtatacattgaggcacacaatttgtgcgcgtttttccactcacaactaaattttgccattttaagtgccatggaaacgaagaaggaacatcaacaacaacaacgacttgcgcatggtcaccgtcagctgacaccggaaacggttcaaatgcacggagttggggagcaggaggaagaggagcaacaacaaccgccggaagatccctctacttctggtgatgatggtgttgctaccgttgctgttccgggtgccgcttcttctcccgttgcatctgcagccgatggccagcaaacgccgccgccattgagtgctgatcgtcgcgcagcagtggagcgtgtcaaaagttcggagagtgtgtcgccgcttgcttttgatgagcgcgacttggacgaactggtcaccaccggcggttgtgacgagccgcgcacatcgccgccgcacatggacaatgcggacgaagcggtggaggaggaagaggaggtggaaatgggcgaccaacaacagcaaccgatggtggacatggacaacggtggtggcgatggtggttcggatgatgttgttgctgctgctgaagctgttgtcgatgttcaacagcaggtggtagtgcagcaggatgctgatgaggatgacggtaggtgtctttgcattttcttatgtcaactgaaaaggggaataatttttgtttgtttgtttggacaatcccccttctatccattttaccaaattaaggggctttgtgttggggggggggggagttttgtgtattggaaactgaatgagtgagggtggcacttaagtgtttttgcttcggtttgttccggccggtttggtgctttgagttatcccaccaagcttttgagactcatttttgccaatctaaagcaattctatgacatccaattgttcatggcgtacaatttatatacggataatccgaaattaacaatgtcacagaggacaatttaatttttattattgataaagcgagaggtggtggaaaagttggaggcgttggaatcattggcttgctccgaatggaaggaaccccaccacaccacatcacattcgtattaacgattgattggttgtttgtcactaatgtcacg

SEQ ID NO: 65158 - DNA, 978 bp, Heterodera glycines
tggtcaattaaatgtttgcttgtactttaccttcatcgctcaggctgttgccattcgtcggctggacacttttgaacggcgtgccattgttactgacccatgcaaacgatccctttggatggactgtgaataccttcagtgttgcgatcgtgggaagttgagacttggggaagagactttttgggacgaattgatcgacaaatatttgaaggtgggcttttgggtcaaatgcaaattgtttcttttttgttcaatggcttttctttagccagtcgagaccaccacccgagaacaggcgcaagtcgcgaatggactcgtcgcattgcgaaaccgaattgcattttccatcattttgctcaattgtttgcttgtgctggcaattttccttctccaacgacacaaagatgttctgtccgtcaaattcactccttatggtgggcattgttagctctttttcacttcctttattttaaagatggatttaaatggacgaaaatgaatgaaacgaccgggaaatttgaagacacgactgaggccctgaaagttgacccgttgggtatcggaataatcttttttctgatgggaattctcattgtgagacctttttcaattgaattcactaattaattggaaaaggttcaaaccattggcatgctcatccatcgtctaaacactctcgtggaagcactgcacgaactgagtgagatgaaagacgtacaatacaacaccttcacatttactgaccacatcaaagtgctcaatgaaggtggcttttcatcatgtgccatttgcatttgtgtctacttttctaattgagctcgtcaaatgattgacaccgttaattacgaccgcgcccacggggctgatgggtacactcgccacggacttggggaccaaaaagtgcaaaagaatgtgctttacaaactccaaaagtgacaaaacaatcttttatatttaagtattttgccttgtttttca

SEQ ID NO: 65159 - DNA, 78 bp, Heterodera glycines
  unsure (1)..(78): unsure at all n locations
atgcccgtggcctttcccgctgctctctttctctcttcttcattntcttcttgtgacagcaccgccgctatggcggag

SEQ ID NO: 65160 - DNA, 866 bp, Heterodera glycines
atgaagcgtcgttggcaaagtgccgacgaaaaaagggaatgcacaacggccgaagacaaccgcagcaacggcatttgcggaaatggcaagggaattgggggagaggcggcaaaggcactggcggacacggcctcaacttctgctgctgaactgagcccaccgcaagtgaaacgcgcgaaaccgcagcaaaagcgacagaaattcagctcaatcgaacatttgcttagggaggaaaagcgacgagacgaagaaaatggaggaagaggagaagaaaggataagacggaagaggagcatagagaaggaagaggaggaggaaggaggacgagagggagtgggaccaaagagtagaaaagagggagagagagaaggacatactaatgagagatacgcaagggagagagaagaagaaagagggaagataatgatggaagaaggagggagcggaaaagatagggaagaggaggaacagagaggggaagaagggcggcagagaatgggaccaaagaggaagagaaagggcgaggaggaggaaggcattgaaagggaagaccaggagggggaggaggaagaggaggaggaggaagagttgaagaggaagaattggctaagggcaatcagtgtgccggacaatggaagtgcgttggacggactgaactgcgagttggagaacgccgagacgtggtcaatgggcgggggggggggccttggggagaatttgactttgctatggggggaattggacatgatttaattgtcctaaaacttcgggagttctgctgagccaacggagtttaatcgagaaaccgaaggggaggcaaaagtctcgaaaaattcaaccaaaaatgcttttcagggtaaagttca

SEQ ID NO: 65161 - DNA, 1392 bp, Heterodera glycines
  unsure (1)..(1392): unsure at all n locations
atggaacgcgaatttgtggctaacaaatatttgagtgcttctcaacgtgaaaaattggccaaggaaattggccttactgaaacggaagtgaaagtgagttttatagcaattttaatcgtttttttaaaattattattaatatttgtttttattaattgcttaggtttggtttcataatcggcgcgaccaatggaaatggcaaggatcataagaagaaacacctgctgggtaactaactaattagtgttaaacagcacccacaaaaaattactaaattttatattttcaattaaaataattaagcgatctgcaacacgaaaaggaaaaaatgccacaaaatggggaccaaactgagctaattggacacaaagctagacaaatggtgttataagccattcatttaaatataaataattccattttattaagaccaaactgcaaaacttttcgtccgaccaattggacattttgaaatgcgcatttgatgagagaaaatacccggacattttcatgctcgaggaattggcacgggagacggggattacggtggaccaaattcaggtaattagagggaatttaaatttctaatttattaaaatatttaaatttaattaggcgtggttccaaaagcgacgagcccagcacagacagcataaagaatgtaaagcaaacgacaatcaacaaaaaaatgtttgtgaaaatgatcaaaactatgcaataagaataattatgccgcaggttcagtctcagccgaatgccaatggcattggcattgattctttcttctgcccttcggtttgtgccatttttggccgtgccaaatgccgtcgtttaaattataaaatattaaaggatggacaacaaaagcttttggctacgccattcaaaccattggatttggcccctcaatttaaaccattggaaggcttatttaagaagacaaaatatccgaatcgtactgaatgtacttttttggcaatgctcagcaatcaatcgataaaccaagtcaaagtgagaattaaaatctcgaatttgggattttttatataattaaattttggttaattaattaggaatggttcaaaaatcgacgcgatgagttggaacgccagggaaacgaagaagcattttggtaactaatgaattaccgtaaaaaataactaattaatcaaatatttgtaaatatttaaaaattagtgatgtaagcgaacaaaacccaccacgaaatgttggcaaaactgaagctgttcaacaaaaagacaccatggaaagcaaacacaaaattcacaacaaaataatattgtgagttaatcgtgtaacttaatcttatttntgaatttatttctctttttaaattagggtgaatattaattataaaggctaatcaataaa

SEQ ID NO: 65162 - DNA, 1207 bp, Heterodera glycines
  unsure (1)..(1207): unsure at all n locations
tactctttcagctgatggttatagaccaaccatgagcagaatagagctcataaaagatatgtcaattcctggcaatgtcaaagaagttaaaagcttcctgggaaaagcaagtttttgccgtagacatatcaagaattttgctacaatagctgagccttttttgagcctttcgaggcaatctgtcaagtttgaatggaaggaggaacaacaaaaagccttagaaatgcttaagaaattcatttccgaatctccaaacctaatttttcccaattatttcaagccttttcacatctttacagacgcttcaggatctggacttggcggagtgttgatgcaaaaaaatgaagaaataggtaccttctcggcaatctcttactgcagccgaacattatcggcatctgaaaggcgatggccgacggtacaaattgaaatgtgtgcaattatttacgcactgagggaatttagaccatttatttttatgagtgacattgaactgcatactgatcataagcccttagcctatttactcaaaaaagcggaaacccatccccatttagctcgatggctcgttgaacttcaaaattatcagattaaaattgtccatgtggcaggtcggcaaaacacactggcagatgccctgtcacgtgctgctgaggaagtgccaactaaggaggttgatggtttgccagaaatggaagacatagtccaatttccaatatgtttttcggttcagtcaagatctcatatagtttttgcaccgtttgttaatacgataaccctgaggcatgaggatgggaatagctatcagatagatttggccgaagaacagaggaatgaccctgaaattttggcatacattgactttctgaaaaatggatcatttccggctgatttctcggaaagcgaaaaggaccaactttcaattttggcatgtaatttattgctaaattccggagttttatactttaaaattggaagtaatgtcccacgaatttttgtccctgtgtcattacggtcacttatttttgaatccttccacagctccccattaggaggagggcacatgaatattaaaaaaacattaaaaaagtgtaaaaagtatttttggccgaggatgcattcagatattgttctctgngtgcaacatgtatacatgccactccgactgacccactcagctatcgtgcgaaatgcaagtggtccctgt

SEQ ID NO: 65163 - DNA, 2756 bp, Heterodera glycines
atgaaagacgatgttaaactgctaattgaggcgtgtgaaaagtgccaagtgaggaaaattcagccagggcaggccaaatcggctccgagtgtcccaatcgaaccatcaaatggcccatttcaaagaattcattgcgatttaatgggtcctttaaagaaaactgaaagaggaaacttgtatattttcttggcgattgatagtttttcaaaatgggttatggccaaagcaatcccggatcagaaagcgaatactgtatcagaaaattttgttgaaatggtggtccatcaacattcaactcctgagattgttgtgactgatcagggaagacagttcacttcgggaatttttaatgatttggcaaaaatatacggttttgagcatgtcactacaacaccatatcatcagcagtctaatggaatggctgaaggggctatgcgaatcatggctaatattatttctcaaatggtcaatgaaaaagggaataattgggatgaaattctgccgcacgctattttttcatacaatgtttcaatacattcagctacaaaattttcgccattttttatcattaatttacgacagccaaaattgccaactgatcggttacttaaactcccatcccccgatgagcttgtgtccgatatttcggtctatacaagaattcagactgaaaaagcagctaaagcgtgggaaattgtgcgaaatgaaattttaaaagcgcaggaaaggaacaaagaagagaatgatcgcataaggaaagcgaatgaaagagaatttgaaatcggtgatttagtgttgtttaaaaaagaagttttaagccataaatttgatcagcgttggctgggaccaatgcgttgtgtaggcgttgaaaaagaaaagaaaaatgtcattttacagtcaattgatggaagagccaaattaagaaaagtacaccaagaaaaagtgaaacattttaatggaccggcaattcttcctctaaggcagtcagatgaaccattaaattgggaaaagtacgtagatgatccgaatttagaacaggaagaaattgaaggtgaaagttgcgaaagtgactgtgaggaaacgcaagacaatgaaaatgcgcagtcaaaaaacaaaatgggattaaaagtttcaaaatatggctttgagagttctgacgatgagaatgattggaatattgttgcgtttgtaagagaaaaccaaaattctgaggatgatgaaggcccggaagttataatggacagaaaccccgaaatcgaaataatgccaattttcacaatactcgaagtccttattgagggttcatttactgaagtatacaccggatggagagaccccgtaacaatctcattaatctcaagcatacctgaaaacctagtaagggaaaattgggaaatttatgttaatggaaatggctcaagatttgttatggcatggatttttggcgaaagtttcgaaattttcattgtcaacgaatttgatcaaataatgttgggaattgatgcgcaaatgttgttgggtgaaagatggcgaataaaaactgaaaatgaaattgagacatattgggaaatctacttcgatgaaaatgggcacgaatttgaaattcccagaattcctgaaatccttttttcagaaaaggaaaatttggaaattgggtatgggccaaactttgtaactctcgagattcagaaggaatgataagtgatcaggatgatttagaggaagtaaatgatttttcaagaacagacattaatgtgataaattatgtaaaaccgtttaaaagtttattggatttttcaaacgaaattgatgaagatgaaggaaatgaagaattagtggaaaatgccggagaaagggagagaaatatgaataattctctagaaattttagggagaatggaaaacgaacagttgaatgagaaagggcggctaaataaatcgaataaaacacaaaataaaaaatatgcgagccattcgtttttcaaggaattggaccgaatgacatcaccggctccattacacttcgaatccttgactgatgacgaagaggaatcgctgagacgattggaaagacgtctgcaggaacagctgaacaaagtgaggcaaacattggcccaagaacaaccggaggagtgccatgtgaaggcaagagaagaaaaatgcattgagcaactgaagcaacagacggtaaaggatacggtagaccaaaaaggaacggcggaaaaagaagaaaaaagtggagaattatgtgaaaaaaaagaacctgaggcaaaaaaagccgaaccggaagcaaaagaccgaaaaactgatgaggatggcattgtgcaaacaaaaatggagaaagagaaaagtacggtggaagatgtgttgtccttaggagatgaagaagaagactctccttatgaagcagcgaaggtatttgagacggggacgtctttttttgaaagcgcgggggtgcgagcgaattcacgccgggaacttgaggaattgacaaagtcccgaaatgaagcaaagataaaggccaaaaatgagttagagccgccggcactgttggacatgccaaaggaaagacaaaatggtcgtaaacgattgagagagggatcgccaaacaaaggcgaattgttcacgaacaatcgttgggatgagaagatgcgcgagattgaagaagtgaacaaaaattcgaaagaagtgcgcaatgccttgaatggacttttgacgatgcgtcaaaaaatctttgaaatacaggatgaagcccaa

SEQ ID NO: 65164 - DNA, 1464 bp, Heterodera glycines
cgattacgaatgacccgaggagactcccatccattagtgtccgtcttaatgatttgttaacagcagccttggttgattcatgtgctagtgtatcctactgtagagaaagaacagcaagaaaagcaggacttaaaattttggagcaaaatgacggaaaaggaaatttgactgcggcaaacgattcgagcatagaaattttggggaaaactatggcaaaacttcgaattgaggataatgtgactggaaatgtcggagaatgggaagttgtattgcttgtctcagtggacgaacattgtcccggccctttgcttattggattaccacttcttatggaattaaaaggtgtaatttccctgggagagaaaagagttagacttggtgatgagtggacaaacattgtgtcagtaattgggtctgaaaagccaaaaccaccgtctgtgatacttgaaaatacggaagttttagagccaaggtcggaaaatatactttcggcaaaagtaaacgaatgttttccaatggaacaaaattttttggtgaaaggaattaagcttaaatatcccggaataattgttggacgaactttggtttcaccaggaaatagtaagaatgtaacaatacaaattttaaatgcgggaaattcagcggttaaattatatggaaagtcacatttggcagatttggaatcggttcaaattaatgcatcaccaggagatgaaatcccagcaaaagattacattcctcccgagacacgatggagcgaaaatttaccaaaattaccggaaaacggactaaataggccaccatcaaaaagaatcaatcttgagggtacaaaattaagtgaaaatgcgaaaaatgatttaaagaaaattgtggatgagtgttcagaagcttttgtaggggatgatggaaaaattggcaaatataacggaccaattgtgcataaaattgacctaattcctggttcgttaccatttcattgtcggccatatcggtacccaccggagactcagaaagaaatcgaaaggcaaatcaaaatgatgctggaccagaatataataagggaatcggaatctgagtttgctagccctatagtgatggtccctaaggctgataaaaagtcgtggcgttttgcgattgactacagaacactgaataaaatgacaaaaaagagagtatttcacttgccaaacattcaagagttgttagatctgatgggggcaaagaaattttacacgtgcatggatttacagcaaggatttaggcccagagcaggaacatgcttttcaaactctaaaacaaatgctcacaacagtaccagtgctacagtccccaagattcgggaggacattcacaattgagtgtgatgcttcaaaaaaggccattggagcagttctcctccaggagaatgggcccgttgcttacatttcaagagcattaaatcggcacgaaacaaattacccttaa

SEQ ID NO: 65165 - DNA, 51 bp, Heterodera glycines
atgcttttactgcacctatactttagtacgactccagaccgtaactacatg

SEQ ID NO: 65166 - DNA, 483 bp, Heterodera glycines
ccatttgtggagcagcagcgcgagaatcagcaagtgatgcgctccctccgtgccaacgtggtcactggtgcgcactgctgcatcggacttgtcgacttgttcacttggtttgccccgctcctttggtttgttctccaaccgcccgtcaaagcatcggtcggtgcgaaacgaaactcatttttgggctgaatgttaacaaatgatgaaaatagcgacctcagattgtgaatatttatttataattattaatattttaacccagtatatctttttttatgcctaggttcagcagctttcatcactctcagccaaataaaattatttttcctaaattcccctctttcagttgtggtccgatggcggcggtgacgggcacgaacagcgtcagatggtccaacgagtggtggagctgatgcgctcgtttggcatcagtttggtcaggactaccggggccgatggaatggcgcgattcgcatttgaacc

SEQ ID NO: 65167 - DNA, 742 bp, Heterodera glycines
atgaatcctccgaatttacttttgttcgttttgttcattttttctttccaaattcattttgcccattcggatgacaatgtaatttgcggaattgcaagtaatcaagtgttaacatttaaataccaatcgaggaaagaaccaaaggaaatggaaatcaaaatttcattatatgcaaagaaatctggtgtaattttttctaaaacttaacttagaaaccaactaatttcaggaagggtcgggtcaattaagtaattggcagatgcatttaagtgattgatccttttcaattaaattacatttaattgaggaaaacaactcacaaatagtggaaaattctgcgaaatttatctttcaatttcttaagtaatcttttagaattaattatgcttttttaagactgtgatttttgatggttttatcaccgaaagtgataatttgagcaagaaacaatgtgttgtcatcaaaatgtatcgcaaatcagatgaaaagttttataaaaatagcgtaaatttgtggaaaaaattgaaaaaagttgatcagaaaaatgaatactttgtcaacataattgactagtaaattagaattagtttaaatcttaaaaaatattttaagaaaaaaaattataaatatatatatttaattttttgttgaaaaatgtaatggccaactttttttagtggcgaatttgacgaatcaagcaagcactaatgtgactttttttaaaaacatcatgcggtaaaaa

SEQ ID NO: 65168 - DNA, 610 bp, Heterodera glycines
atgctgaagcagcacgttgaggacgtcatgaaggccgagcagtacgcggcttggcacgtcaacaagtaaatgcagcgtagagaaattggcacaataggacacactttcagggtaaagctcgagctgaagcgcaaaatggcattgaaggaggaaatccagaagatggttggcatgcttcatcaggtgaagcacagcgtaagaatgggaagcattggcaccgtttgctttcagaattcactcgaccgcgacattgagaaggccgaaaagacattcggcaacttttactccgacttggccaatgcgccgtggctgccggagaagcgcgagattcagagggagttcaagaagtacgacgacgagttggcgaagttccgtgaacagatcgccgagtacatcaacgccatttcaaagatcaaatcggaaggtgcgcaatggcattttgttgtttaacggactccaaaattcagcggaattgcatgccaagttgccgttcagaacattcgtttatgctctcgccaattattcaaggcaatcgggaaaagtttgtcagctgacgaaaagggaacagaagaaggcaaaacaggtgaaagtcatggatttaaagcagtaa

SEQ ID NO: 65169 - DNA, 754 bp, Heterodera glycines
atgccttcaaattcattttacgttatccttccttccaacacaagtgttgatggaaaccgaacaaactccttccgggtgcgtctgcctctcaaaatccaattcaattccgagtgggaagtgggtttggcggtcattgtttatccacattcatggccctccattgggacggtggaagaacaatttgtgcaggttgattggcagaccggaagcacagtgcacattgccgtccccactacaaatattaaaaatcctgatgatctgagtaaaagtttgtacaggctgttgggcgagggaagcgaaccgttggcaaaaaaagcgcgtaccgctcagttggcattcaacaattccgcctcggttgctcgccaatgggccaaggatgagtacattcgacgaaaaacacgagagaagcgagccatccgggatgaacaaatgctcctggacgcactccaaactggcggcactgacagcactgttgatttgatggacgcagcagcccaaggcattgtgtcgagggagaaacgtgcagagtcaagccaaattccgttgagagaaaagatgtatgacaaggacacataccaaaacaagctggacaattatttttccaccctcaagggggaggatttggaactgcttgatgaacttggccgaaacaaattgaacgatgagattgcaaacatgtttgacgaagatcgcacaatccttgacgccaccaaagaactgggccttgaggcgtggatacaggcatacaaaaagg

SEQ ID NO: 65170 - DNA, 56 bp, Heterodera glycines
tgaccgtttggggtactcaaacatatatggagagcaagaatccatcgcacaattaa

SEQ ID NO: 65171 - DNA, 1155 bp, Heterodera glycines
atggcgcttcaatcagtgccatcaacaaatattgcattggcgacaatttgccgcacagggcaccgtatgaaatcagcacaaccgcagccgtataatcagcatttatcatactgtaaattgagtgtttttcaattaaaagcaattcaattatttggatgggaaataatattaattacttctgcaaattgacgtaaaatttgccattggtggcaaattcgtcggtgaggaagccgcggacaaggagctgtaaaaaggttttaattctagagaatttattaatttaaacttttttaaaattataaaatacacttattaaaatttttgatttgaaacaagttgtataataatctattttaattttaaatattttagtgaatgtgtttaataataaatattataataaattttaattaaaatgttttaattaaattttttagtttatatgtaaaaatcaaatttttaattaaaatattgtttttcttttaaaacaaaataataatttttttaatgtttatttattctaccgataattccaatgtgaacgaagtcagcatcattgagatggtgaacgatgcgaagccgtagcggcgcaaaaaagcgaccaaaaacccaaatccgatgatcaaagtgccgtgcacatcttggaaatctgaaaaactacgctttcaactctattttttaatttaaatattatttatttattatttttgcctgtgtattttcgctgtgcctccgctgcggccacattgccaaggggaattgcggacggcatggcattgggctcatgttgggagaacagcccgaacaagaccaggaagaacagttgagcaatgcccaacagcacacagaattggttgtgtggcaatttaacggttgcctgaaaaagttataaaaataaaatttccgtcgaaatagtttttttttcaataatattttttatttttcagggtaccataaggagaaggaccagcaaaaagatggccggagagacgagaatcaaagcctctgtcaaatattgtgaaaatgtagcattcattttctctttttttttgctaaaattagtttaaggaagaaaattgaatttttttttttttgaaaatccgatttttctaaaaaatgtttcatatacagtaataatggcactatttatgctaa

SEQ ID NO: 65172 - DNA, 396 bp, Heterodera glycines
gcaccggcatcgtcaactgcaaatgatggcacaattgaggatgaagaggaagaggaggaaagcgccggaggggcgacgaatgccaaaaaccgtaaaaataggaaaagccgacaaacccaacaacaacaacaaaagcagggaccaaagaccaagtcgaacaaagaattgttcaacggagtggtggaacgtaagtgattggtcattttattagccaattttgacacgagttttgatcccgatcaaatatttaaaaactaaatcacagcagtatgaagttaatttgaagtccgattctggcatggaattgagagaattggaactgattgaatgcaaaaatcataaatgtgtattttaaatgatttaagtccaagtgtttggcaaagattttggctaaaa

SEQ ID NO: 65173 - DNA, 370 bp, Heterodera glycines
atggaaatggaaaaagaagaggaagacagacaaagagagaaaacgaaaagagaagaggaagagaaagaagaggaaaaggaggaggtcagagaaaaagtggaaattttattgcctaaggcaatttaaaaacaatcttaaggaaattgaaaaaagacaagataaagaagaagaaaaggaagaagaggatgaaaaggatgaggaggaggaggaggaggaagaagaggagcaacagatttgggaaaggagtcggcacggaaagaaggaaaagcgagtgccgtcatggcgtggcacacaactccaagcagccaaggtggcacaattactatagccacggaacatggcattaattaacatggatccataaattaaa

SEQ ID NO: 65174 - DNA, 1561 bp, Heterodera glycines
atggccattctgcaggcggtggaccaccagggcatcatcaagttggactccatgttcgagaccgacgacaagacatttgtggtcatggagaagatggacggcaacatgttggagatgatccttggccaggtaaagcaaaacaaaaaaaaaagcatccgaaattgggcattaaaatatatttttaatttgatttttgctccgattcatttaaaaataataatttagtttatacatttctacaaatatctttattttgtggcatattttacctattccaaattcattcttaggccatgggacggctgaacgaacggagcaccaaatttttgattatgcaaattctgagcgcccttcactatttgcactatcgcggaatcgcccactgcgatttgaaaccgggtaaaattcggataaaattctgaggacaattggacgacagagtgagcggaatagagacgaattgtttctttcgattgattaatttgatattaggtttaattagggtttctatcccaaaaattgggttttaatgcgaattaatatttttttgaaaattgcaaatttttattaaaaagtcgaaaacataatgcctttaacttgaacagaaaatgtgctcctttccgacttccattccaactttccccagacgaaactgtgcgattttggctacgcccgtttcattggcgagacgcaattccgaaagacaattgtcggcactcccgcctatttggccccggaagtgctcaagaaaaagggtgagacaaaacacaatgccattgtctgatcactgatcagagcgaaaagatgatttgaaattacctaaattcagggtataacaaatcgttggacatgtggtcagtgggtgtgatcatttatgtgacactttccggcacatttcctttcaatgagtgagttgtgccatttggcccaacgatgtgccaagttgaaaaaaaacattccgtcaaaggaacgaagaaattgctgaacaaattcaaaatgccgagttcatgttcccagcggcgccttggcaaaatgtacaaaacataaaaaacaattttctcattttttggtttcagatcagtgccgatgctgtggatttgatccaacgactgctcagagtccaagtcggttaatcagtgaagccccgggtttatcaaaaagccaatccttttcaaaattattaaattttcaattgtccttcgatcagatcgaagaacggctgaccatcgacgaatgcattggccaccgatggttgaaggacgcacagacatattgggatttgatctgtctggagaaacggcttggccatcgctatttgacatcggaggccgaagatctgatttgggcaccccaactgagtgccatgggactcattcagacggcgacgacgactacggcacagcaaaatgccaacggatgcgaagcaatcgaaacgacgggaaaatgccaacggacggaacagcaaccgatagaacagcagaggagtaccattagcatggagacggacccgcaacaacagcagggagccacagcgaacattgtggatctgctgggcggttaa

SEQ ID NO: 65175 - DNA, 2236 bp, Heterodera glycines
  unsure (1)..(2236): unsure at all n locations
tgttcaggtcgaacgaacgagactaattggggtaattaaacaaaatcacttttcagacagaaagcgcgacaaatggtcgaaaaacagttgcaacttgagtcgtctatttcgtctaacggaggccatccgacgggcacttccgcgcaggtcacagccagcgaggtgcagctgtttctgcacgactacaaaagcttcaacatgctgacctgcctaacatcgttggcacaattggtcggtaaatagccgagaacggcacaattatgaccaatttgagaaatttaattgtttaggacaatggaagtgtggtggaaatcattcggattgatcggagcgaaaagccgaccaaaccgcacttgctgcaggtgaacactttcgtgacaccgaccttttgcgactattgcggcgagatgctgatcgggctggtcaagcagggagtgcaatgtcgactgtgcaagtgcgtcggggttaacagtgccgatctctttcaactgatcgtatttatctcctgatcagttttagcattttcagcaaaaatttaatcgcgtaataaaggttacaataatattcaatcgcgcttgagattttcaccacttttgaccagctgctgaattttcacaggtgcaacttccacaaaaagtgcgccttagccccgcgcaacaattgtgccaagtcagagactgtgccgaccacctttttggccggtgccggacagtttcccgtgccgagcattgtgggaagtaagcgaaaaacgactcactgaacattaagaaatgcaatttatttaaacaaatcatcggaatcccttttaaggtacgactgagtcacaacagctccattcccatcagcagcagaagcagcagccgtacttccaactgccgcactctctgtggccacacaattacagaacgccaacggtgtgcaaagtgtgcgacaaactgttgatgggcgtgttcaagcaaggcttacgctgcaaggattgccgagtatgtgcttaaaattttgtggattataatgaaatcagataagaaaagttttggatttgcaatgaaaatccgaggctttcggcttgatttaatttgaaaaaaacccttctcaatttcaatcaaagaatgtcacaattttccatattatcaattaacaggtgaatgtgcacaaaaagtgtgtccatttgttgccgccaaactgtcaaatgaatgccgaaaatccattgacattttccactgatcagccgaatttgccaatgggcggcactgatcagagtgcgtcatttggcgtcttccagcaggacaatggcggggcaacggaacacaaaagacacagccaacagcaggcaatggaagtggctaacccgtcgttggacgcgatgatcccattggccaggttgccaggtgagaaaggggcaacaataagcagcaaaaggaaggatggcatttactgggttttgtggaaattacggtaccaatgcaatgcctaccgtacctccctccccctttcagggtccgcgtcttcacgttcggtgcggcacgccgctgctggccaaccgttgtgcgaaggatggctgatccattttctgctgcaagaaaaggagcgacggcgtctccggcactattgggtgttggccaacggagtgatcagtttgtacaacgaatacaacgacggtgggtgtttcacaaaactctgatcgcagttttgaccgacccgcctgggagaattgtcgacgaatcaattgttaccaaatattgatttatcctttttctaattgggcggcaccgaacaaaaaaattgactgatcagtcggtgactgctgatcactcactgatcgacgcgtgtccccctttttcaggtgttaacacttcccgcgtgttccgtcacattcatttggctgaaatcgtcgctttgattccctatgaaggacttccgattgatccgaagtaggtcaaacattacatcaatcacaacgacaaactgtgctggtcagcatagcatttcttccatttaaatatattccttttttattccataattttaaataataaaaatattttcgatttttaatgccaattttttggtaatgccattttcgctttttctatccgaattttgccattattggtaaatcccttttcccatcgcatagatttgctcctcatgcatttgaaattcgcacctcctcgggcctgactttttgtgttgnagaaaatttgggagctttggttggctctctcggcacaaatac

SEQ ID NO: 65176 - DNA, 283 bp, Heterodera glycines
atggatcagggaaatggtttttacaacaaaggcgaggacaaaatgacattggccattgatttaatagtgaaaaatgcaaaagtggcaaaattcactcatgatccaagcaaatccgacgcaacaatttcgatggaaattgaaaaattttccgatttttcacgagaaatcatttggagtgaacgtaaaagtgaatctgtcactttcataaagggattgccatggaaaatattggcacaaataaatcaattgatggaaaataaatgtttgggcatttaccttcagt

SEQ ID NO: 65177 - DNA, 303 bp, Heterodera glycines
aaaattccctcaaaaataaaaggtctattgcgcaccgccctccctatcatgctcgagagcatttgtatgtgtataaaatttttcaaaaaaagagatagccatttttctgggataacctctaaatataaaaatcctctgtgaaataaaatggcgattgtgcacagccctccgtctcatacgcaagcgcttttatgtgtataaaatttatcaaaaaaagagatagccatttttctgggatagagtataaatttaaaaattccctcaaaaataaaaggtctattgcgcaccgccctccctatcatg

SEQ ID NO: 65178 - DNA, 102 bp, Heterodera glycines
aaaattccctcaaaaataaaaggtctattgcgcaccgccctccctatcatgctcgagagcatttgtatgtgtataaaatttatcaaaaaaagagatagccat

SEQ ID NO: 65179 - DNA, 441 bp, Heterodera glycines
atggtggcggaattgaaacgccggctcagatcatcgcagatgcagctcagaccgagccagcggcggcacccatgccaccgcctccgcctcaggacgtacaggcaggctcaagaggcctatttttgtttcaaatatttaatttgttatttcatttccaatttaataattatttttcttattcttgccaatatttgttcagtaggataaaatttaatgagatatttaatattaaatatttccaatgagttaatttttatgctttctaagaaatcagtagaattgcgatttttgtcatgtataaaaaacatattaatattaaaattatatttttgaaaaatagatacaatttattttgagaattttctaacaaaatgaaattattactattgttttattcaattttaattttaattaccctaattaatccaattgaatcaacaa

SEQ ID NO: 65180 - DNA, 165 bp, Heterodera glycines
atgcctctgttggctgcaacaccgggcaacccggttgagcatatcgccgggctgatcccggtgggcgatactctgttcagtggttttaacattttcatcactgtggcgttgattgtggtgatgccatttatcacccgcatgatgatgccaaaaccgtctgacgtg

SEQ ID NO: 65181 - DNA, 400 bp, Heterodera glycines
atggctagtatgtaaaaatttgcggtcactaataaaataaaaaatggctaatatgtaaaattggcgtccagaaatttttagactaatccgaagcaaagcacgaatgaattaaagaggcgaaagaattcacagtatcgtttctaatagggaaatattgacaggatattcggctaaaaacgggtttgatcatttttagcgcatttttaggtatacatttgagacaagggcaggacaagaaaagaatgaagttgatgcctcatgaaactcggaattggttatgtttagtcgaaaatatccttacataatactcataaaaaatacaaataattcaacccacctattctatgaccacattctgaaaaaaatcccagaaatacgaggaaagatatgcttggtcaca

SEQ ID NO: 65182 - DNA, 368 bp, Heterodera glycines
atgcaccatttgggtgccattgcgacttccttctgcaaatacaaatacaaattccgctgttccacgccggtcaaagtgcgtttggccagttcagtctcgcgtcattccattcatttcccccatttttaattcagtttgacctgctccacaaagtgctttccgactgtgagccgttgttcgacgccaaactgatgcaggacagtcaacgattggaggactttttcgcgctgttctgtcccaagttgaaattaatttatccgccaacaaaaaaagattcgattggcaaggcgagaaatccgggggaaaagaacacagaaaagagtccatctctcatttcagtttcaactctattacaactcgacgaatga

SEQ ID NO: 65183 - DNA, 660 bp, Heterodera glycines
gttctcggggcagtccacctgaaccgatgcgcccagatttatggggagatcgtatctttcgggaatagcttccctatagtctgtactttaattgtgcgttggatttttgctccccatatatgttagagtaccccaagcggactcttgaaaaaatcgatttttttgttttcggggcagtccccccgaaccgatgcgcccagatttatggggagaccgaatccttccggaatagcttccctatagcctgtactttaattctgcgttggatttttgctccccataattgtttgagtaccccaaacggacacttgaaaaaatcgatttatttttgttttcggggcagtccccccgaaccgatgcgcccagatttatggggagaccgaatctttcgggaatagcttccctatagcctgtactttaattctgcgttggatttttgctccccataattgtttgagtaccccaaacggacacttgaaaaaatcgatttttttgttttcggggcagtccccccgaaccgatgcgcccagatttatggggagaccgaatccttcgggaatagcttccctatagcctgtactttaattctgcgttggatttttgctccccataaatgtttgagtaccccaaacggacacttgaaaaaatcgatttttttgt

SEQ ID NO: 65184 - DNA, 852 bp, Heterodera glycines
atgcaggtgagtattttgcagcaaattttgaaggatcaacatcaattaattaaatttttattttattttcaaataaattttcagtaatttaaatggtaattaataacgggaaattcaggaacagctttttcagcggcaagagcaaatgttggccaaaattgacgagttacaaaagtccgtttttgcattaaaagaaggacagagctcaattggtgggttaattaaattaaacagatcataattaaattaatttttggaattattttaaataattaaattcatcattttcaatttatcttaacttttttaaaaaaatcattgacacaataaagaaaagtttaaacgagaatttggtcttaagggaaaaaaacaacatttttgaggattttacatatctagggatgattttaaaaaataaggacgatattagtgccccgtcatcatggcttatgaaattttgaaaaatgtttttttaacaaaatatttaaaaattcaaaattatgccaaacatttgtgtggaatttatgccaaattaaaatgtttttactttagtttctgtttttgaaaagcaattttcttcgctgggaacaaaattggacgataaaattaatgagttgatgaactcaaaaacaggatcgattggcgtacaaatggtgaagtttaaaatttaatttacaatagaattctttttttaattatttctttttcattgctttgttttatagtggacttggaaatttcagttttttgacgccgaaattcgcattccgataatttatcggcggatttagaatctaaattattgtaataattaacttaaaaaaatttctcaaaccctaaaaatcccacgaa

SEQ ID NO: 65185 - DNA, 476 bp, Heterodera glycines
atgctatcgaatgagcagcagatgacaccatcatcgtcaggaacaagttcagtcactgacgaaactgttggccaacaagggcaaatgccatggcatcaaatgccagaggcacaatttggacaaactccaactgaaaattggcaccaaatttatgcggaacaaacgctttacaatacttatccaactgatcaaaattgggaacaatcattgtctttggatttgtggtggcaaaaatatgcccagcaatttgtagcaggagaacaaatttattgtccatccgatccgccgaattggcaacaatcgcatgagcttcaccaatttgcacagcagggaatgggcggattcgatcagtttaatcaaaatgattttcaaatgcaaatggacaaagcgatgcaacgtcaaacagagccagagcaaccgattgatgcatttgcgccgcaatttgcagaaatttcgctggaggagttgcaacaaat

SEQ ID NO: 65186 - DNA, 1427 bp, Heterodera glycines
  unsure (1)..(1427): unsure at all n locations
ttatttacattttccgtcccctntctttcctttccttttccccccgggggtcattcattcccttcgcttgtaaaagtgccaatttcccttttctcctctcgtccttttttggtcaattacccattcgtgtgcccatttggccttactttgcttctcatttgaatgcgtccaatcgctgtaattccttttcctccttttctcttctcttttcttccctttttttccttttttcctttccctccgccggttttcctctgatgatttattgcaatttgttattattattattattatttcttgttatttttctgatgggtttttttcaaggaaatcaaaaaatttaaaaataatttccctttttataaaataaaaaataattcctttttttttgcccttaaaatgtttaaattcgtccgtcgctcattcaaatgaatgaatggccaacttttccttctccatttattcgccgcccattgtcagttgcaccggcaaaaaggtcacttttttgtgtctgtcctccgaaagccccggccattaattaattaattaaataataattaattaattaaaatttttcctaggcactcaccgattcggccttcgcccgtccactctttctgatcgcttatttgtctctgttttttgtcggtttcgttggcaattttctcgtcgtttgggtggtcgccacttgcaaggtcccatcaaataacaaaatgtcattttattaaatttcaattcaaaaacagaatatgcagacggtgaccaacggtaagacgaacaaaaattgtggaaaatttcaaaggaaaaagggggggggggaagaaaaaccgaaaaacgaacggtggccatggaaaggacaccgccaacaatcaaaaatcgcttcttccgtccgtcagttttcatcgccaatttggccgtgtccgatctgttcgtctgctgcacttccatttggcttacgccttcttacactttcatcggtcattggatttggggtgcttggatgtgttacgcactgccattgttccaaggcgcttccattttcatttcttcactaactttgacagccatcgcattggacagacattgggtgggcggagaacggaggggaaacgattaaggaaggaacggggaatagggaaggggggggggcggaaaagggggaaagggaagcggaagacggtatatgggaggcggaagcggaagatatatgaaaggggaaagcggataaaggatatgagagaggggagtgggggagaagcggaagacggaacagcgggaggagcaaagggagggggaaggagtaatgagaaacggaagatggacctttgcaggtgatctgccgttctcagcctcgaactcacgcatcgacctccaatgaggtgtctgttgtctgttttcctttgtccgatgagtcggtcatttgtccg

SEQ ID NO: 65187 - DNA, 881 bp, Heterodera glycines
tcccttctcaacggcgacagcgctcatccggcggcaattcgctgaaatgtctatactgcccgaagaaaattgtgggcggccaagccgaactgcaagcgcatttggaagactgcagaatggtcagaatgcacgagtgcacgcaatgcggaaagcggttcaaagcacgcggcggactgcagcagcacagcagtacgtgcagcggaggagggcagctaacccacgtttagcactcaattatccaagacatttaaaaattactcaaaattggcaagtcaagtgttaggccattcctacgtgatcagagtttgatcacattgcccattgggaacagatcaattatacaaattaatcagctttttcatttgtgctcgactcgtagtcaaatttgggtggggggggggggggggaaacggcatttggtattttgtattcaaattttattttattaattttttttaattttcggcggaattcattattgggtgttccttaattgctttgcacatttttcaaccgcaaaagtcgtattcttttaaaaattcacatcaatgatcgcccttaccattgtcgctattgccccaaacgatttacgcaaaaggtcaaaaaacgcaatccgtcccatttcattaattggtgttgcagagccatttggaccagcacgagcgaattcacaccggccttaagccgttcacgtgccaatattgcgggcgtcaatttgtgagtgccatttgacacgcattccttccgccaattaatcgcctttatcccacccaaatcccgataaaatgccattttagcggcaacggtctcagcaattggggcacgaggcaacgcatatgaacaggcaaaggaattccatgggcgggatggcgatgagtgcc

SEQ ID NO: 65188 - DNA, 781 bp, Heterodera glycines
aggtgctttggatggtccatacttcagggcatttgcaaattacttcaaacggtaatccacttacataaattaattatgttatttgaaattttgttgagtttcttcgaggaataccaacgaagtgccaatgtcactttttggggccttacactgaccaacgaaccgttgcacggacaacggccgggcatgtcaatgaattcgtcagtccaacggtgggtcccgggaagggcagcaggggaagacgaataccgaaactcgagatcgagaaattaccctgaaaccgagaaataccccgagaaccatgactctcacaattaattcaatagtgccagcgaaattttggcattttcaaattcgagtttcgataattttgacaaattccgaacttaaaatgtgaagagaaattgccataaaaactttagttaaaattgctaattaagcgatttggtagttttttaaatattaatgaaaaatattccacagcgattgggccaacaaaatattggcaccgcttcttcaacaatcgccaatctccaaaaatgtgaccataatggcgcatgatgacaacagacatttgcttttcgatgcggcaaaagaaataagatttcgtaatttaaaatattttaattttattattttttagatttttggccaatggaatgagtccaaaaatgccatcgccggccttggcgtccattggtactcccctcccgaatatccgtacgacgtgctctcacgagtccacacgcttttccccgaaaaatttttattggccacagag

SEQ ID NO: 65189 - DNA, 259 bp, Heterodera glycines
atgacattttggaaatggaaaaaagaattaatgccaaattgtcataaatgtaagcaattattttaattttgagaatttttttattcagttaaatatgtttttagcaccaaataaatattccaatgaggaaaaattaagaaagataaagcaatatttcgaaaccaaagaaaagaatccaaaaatttgtgatgaaacaaaagctaagaaattgagaattgcgagtgacactctgagaatatggaaaagaaacttactttag

SEQ ID NO: 65190 - DNA, 549 bp, Heterodera glycines
atgacaactctcaagaaaatcgacacggcgagtgaggacggtctcgaggggggcctttcacttttcgacatccctccgacgaatgttgcaattaataaatccagtattcgggaattgctgccactttcagcaataaatcaatctggaccgtatatctttagacttttttcagataatcagttttgtgatctcaataaaacttttctttatttgtcaacttcaattgagagaaaagacaaaagcaattggattccgattaccaaggacagtgaagctgaccaacatgtcggtgtcattcaaaattttgggcacagctttgtcaaaaccttaaaggtgtcaatttcaggtgttgagtcttatgattccggcatttactatgcgtttagggcatatatgatgaatgaattgggattttcagaagatgtcaaaaagggtctctgtgaagcgtcctgctattatgtcgacgatgtcgaccaggatgattatacaaacagtggctttaaaaacagagcgtcacgttttgctgatggtgcaaaatgtgaaacaatg

SEQ ID NO: 65191 - DNA, 4209 bp, Heterodera glycines
gtctttccccccaaatgggcatgaatggtataactccctgaacccctccttctaaattgagttttctatatcttccgacagtgtgcctgatcgttcatatctctaaaatttatgagaagaggtctctgacattttcagcaaatctcaatatgatctaggggtccagcactgctggagcccatgaaattgtcacctcaacgcaggaacctattacctgtaagccacatagaacccctttcaaatatcgggatgagctcaaaaagcacatagaacaactccttaagtctggtgtcatggtccaatctgacactccgtgggtgtctaacatcgttcttgtccagaagaaagatggtggactccgtccatgcattgatttccggaagctcaatgaaataactatccctgaccattatccccttccccgtctcgaaacaattatggagaaaattggccactgccatttttactcttctcttgacctatcttccggttatttccaaatccccctcacaaaagaagcctcacgaaaatgtggactaatcatagaagaaggtgttttccaaatgacacatctcccttttggtcttagaaatgccacttctgcttttgccagaaccatggcccatgtcctctccggacttgatgggtttgttgttgcctacgtggatgacattcttgttttcaccaaacccccctcattttctgaccatctctccgcccttcaaactatttttgaaagatttcgacgattcaatctaaaactctctcccaaaaaatgtacttttgctgcctcttccatgaactttcttggtcacactgtctcatcaaaaggttactccccatctctctcacgcatcgaagtgatcaaaaatattcccactccccaaaatctaaaacaagtaaaacgaattgttggcatggccagcttttatcgtcgtcacattcccaatttttcaacaattgttgagcctttaacttctctcaccaaaaaagaaaagaaatttatttgggacaaggcacaagaagatgctttgaccagaattaaggaacttctctctcaaaatcccattctcacttttccggattattctcaaccttttcacattttcactgacgcatcagtcgttggtcaaggcgctgctctcatgcaaaagaaaaatgatctattttccgctgtagcatatgcctctcgcactctatcagcccccgaacgtcgttggccccctgtccaaatcgaactcggagccattgtctatgccctcagaaccttcaaaccatatatttatatgtctgaaattgagctccacactgaccaccgtcctttggcatacctccaagcaaaggcacaacagcatgcccacctggcccgttggctaatagaactccaaaattttaacattaaaattgttcatatttccggtaagaaaaacgcacttgctgatgctctttccagactttccgaatctgatcctcctcaaattccaagtgactctcaagagttacaagacatcattgaatttcctgtatgtctctctcttgtcccttttgatcgcattgtccataactttgacccaattctctcttcccttactattcgtaccaaggatggtattcctcataaagtagacctttttcaagaacaaagaaatgacccccaagttctttctcacattaaatttttagaagatggctctcatccagatctctctgaagctgaattacaaaaatttctttcagaatcagaacatttagttatctcttctgacatactatactttcatcctcccaacagttacccccgcgttttcatccctgtctcgctcagatccctgatttttgactcctttcacattccaatcatgggaggaggtcatatgagtctcaaaaagactctacaaaaatgttcaaaaaaatattattggcccaaattgcactcagatatttttcgctggatcaaacaatgtcttgtctgccagctccggcataatcccatccccatgttccgagctgaaatgaaatcggtcccttccaacactctctttgccaaaattggtttagatttagctggcccctccccatcacagaaatgggaaatcgttacatcctaaatttcgtttgttggttctccaaatatgtcatctcagtccctgtccctgacaccaaatctctcactactgcaaaggctctccttcgacatgtttacttaaaattcggtggttgcactgaattaataagtgacaatgccaccacattcacctcagacttctttaaatcattttgttcccttctctatattaataaatcattctccaccccttactggtcccagggcaatggtgcaacagaaaggacatttagaacttttcataatattctgtctaaatatatcaatcccaaagagcccaatttcgatgaatttctagacgcagctaccttctgttacaatacttccattcatgaatcaactggcgaaagccccttctttctcgtgtttggcagagacccaatctttagtattgatcaaattcttgatccctccgtccatctaccactccctcacaatgacttagctgagttcaaaaccctccttgtcctttccctaagaaaagcctggaattctgcagctgactcaattaaagaggctcagaataaatcaaaagtacaatatgataagaaatttaggaatcccgacatttccattggggaccgtgttctgttacggaattatactggaaaaccgggcacttcccaaaaatttcacaatccatggaagggcgttttcagagttattaacatagaagaactccatgtcaccatcgtaagttgttcctccccacaatccaacccatttaaagtccatattaatcaactgaagaaactttttgagatttccggtcctcccagcacctcccccgtcctctcttctgctgaaaaagctgctttagaagcagctgaagccaccgagataccaaacacgataggcttcaatcatacccctgatatttcaccaaaaaccctcccttctgatacccaaaaatccaatgtaccccaaattttacctacttctattgacaaagaacaagcggttttccctcagcgggatctcttgcataaaagtaaatacaatctccgctctcgcccaaggtctaacagttttaaacaataacaaatgcacttttctccttacccattttcatactcacaattaatttttaacttctcacaccacttttttacaacatctttcccctttttgttttcattccttcacaccgccttgcacccaaaatttttatgattaattcgcgtttccctcccttccccaacagaatgatccccttcctgtccaacatccccgaacacaaatacctctccaacttctaccccgcccccttcttctaccctccctcctcctgtcacttcctttcgtcagaacaatgttaccaatccacaaaagcaacattcttccaaagatacgacatagacaccgaaatcctgaaaaccacctccccagtcgtagcaaaacgactcggggcttgtgcccaaaatgaagctgaccccgcagcagtaaaagtgtggcacagcacgaagcagtcaaagatggaagagattctcttccacaagttcgaccagaaccccgccctggcagagtgcctcatttcaactggggagaaatttttggttgaagcgagtcacactgaccgattctggggcgctggtgccaccattgacgacattcgtcaatggaactttactgggcgaaacaccatgggccaactgctaatggaacttcgtgaaaaattaaaaggttttaggattcctcattccccagcgtcccttctcaaataaacatcataagtctcacacctttattccccccccccatcttcctctttcccttccaaaattatcgacccctcctgtgcactccaagttctccttaaatgctttgttttgtttgttttactaacaatgctttaccacgtttccacattgctgtgttgctttctaatctcgttttgtcctctcctcgaatatctcttcactgccacattaagtatgccgaaacgacaatcgaaaccctggattccaaagatgaaatgccccagactccttccgacaactcctcttgaagaatcgctccaagctctgacaactaatgctgattcgaccatcactccggcagcatattctactgaacctgctgac

SEQ ID NO: 65192 - DNA, 400 bp, Heterodera glycines
atgactgaaacatttgacgcaattgacaacgaaattgccaaaattgagaaacaacgccaatttgagacaaatttatgtgccgtttcgttggtcgaccactttttggatgcaattaacaacaatgaacagcgcaaaaagaatggcacaatgccattggcacaggacaaatattttcagtaaaattttaattgaaaatttattaaaaattaatttgtttttggttgtttttaattgctgagacggactgggcaaaaacaggataaatgaattttataaaaaagaattctaattttaaaatccctttttacaattgttatttttcaaggaataatttaacataaatgtttacagcatggaatccctccgatcagtgtgctttgacttttatattgctgctaat

SEQ ID NO: 65193 - DNA, 260 bp, Heterodera glycines
atgggcgacccattggaccgtaacacaaaatgggtactgtcatatgtgtcggacaaaggctcataccctgtacttggcaaggacgcggagggaaggttagtgatttaaaaatcgaaaattttgcaaaattacgggaaaattcgaaaaaaattttcagggaacgaatgaatgctctgattgttggacattttgatggccatacgtttgagaagttgtttgaacagcaaatggactttgttggcggctcatttgcttatcag

SEQ ID NO: 65194 - DNA, 1216 bp, Heterodera glycines
gtgctttgcgttggttggttggcgtgggtgactgtggtggttgggccgtttttgcgatattatggctggaaaaaagatgcgatttcgctatggggagcgcggccgtctgggttcaagtgcttgcttgcgcttgtgctcggcattgaacggtgatggctgctgctggggtgccacctttgtcgtggcctcagtttctccagcgattggcagctgtcgaaatgaataaacatgcagctcgtctgtgtgttaaagaaatttggcgagttaattgacttgtgtaaatgtggcctaaggcacaaatgctgtggggaactcagcactggggatgctgaacctaaagttgggtggtggtgttggtatacgagtgagtggcgtattgccatggttgacaagccctatgagttcgtggatcggaactccttgcctggggaccagtgtgcttgcattcgaaaaaacacgagacataagcgcccgaaggcctttggcctgaggaagtgtcctaaccgggaaatccggagtgctcgtgtgagtgcctgtgcactgccctcggagctgtgtccagcggcgagatggttcttcccaagtccgggaagctcggatgcctggccagcgctgtgtcattaccacttgctcggtcgccttcgccgcccatgcgcacgcttgcgctgaacggagttgtttctgctgaaactatccgtctttacaagacggctgtaatagcggcgcttggcaacgctcgctagcagctatctggttgatcctgcctgaactgatgtgttcatttcaaagattaagccatgcatgtgtaagtttaacctgccagacagggaaactgcgtacggctcattacaccagctataatttacttgaccttgacttcttacttggataactgtggtaattctagagctaatacatgcaccaaagctccaatctccccagagcggagcgcatttgttcgccacaaaaccaagcgccctccgggcgtccagtgttgactcagaacaactaagctgatcgcacggtcttgtaccggcgacgtgtctttcaagtgtctgccttatcaactttcgatggtagtgtatctgactaccatggtgatgacgggtaacggaggataagggttcgactccggagaaggggcctgagaaatggccactacgtctaaggatggcagcaggcgcgcaaattacccactctcaacgcgaggaggtag

SEQ ID NO: 65195 - DNA, 60 bp, Heterodera glycines
agagcccgtgaacagctgcatcggatgcaagtgccgccgttgctgtacgcctaacatttg

SEQ ID NO: 65196 - DNA, 1026 bp, Heterodera glycines
atgatgcgcatgatggaacagtacgccaacaatttggagaagctcgtgcaagagaggaccggccttttggaggacgcgaataaacgcgcggacaaattgctgaaccaacttctgccgaggtgccctcccaaacgaaggatgggatcaatcacttttgttaagctatgtggccaatgaactgaaattgggccggtcagtgccgccgaagacgttcaaaacggcctcggtcatgttcaggtttgccgttgacctttgcccctttttcactcggcacaaaccctttccatttcagtgacattgtcggcttcaccacactctgttcatcttccactcctcttgaagttgttacaatgcttaacactgtttacaccggattcgacgatttgatcaacaaacatgaagcttacaaagtggagacgatcggtgggaaaaaagggcggaggagggggagaatggggacgggggtggcaattggagggatggcattacgaaagggcatttttgtaactgtgaaggaggcttaaggcgatgcttacatggtggtgagcggcattccgcaggagatcggagtgcgccatttgatgcatctcagtgacatcgctttggaatttttacacgtaattttattttggcgtttcatttgcgtattttcaatgttaagtacctcaaaagctttgaaatcccgcatcgaaagccacaaaaaatcaaaatccgaattggactgcacaccggaccagtgagaatgccaagggaaggcaaaatcaaaaagaaacgcacttttgaaaggtcgccgccggcgttgtcggactgtccaccccgcggtactgtctgttcggagacactgtaagaccgtattctttttcggtgataaagcataaaaacaatggacttaaaggtgaatatggcctcgcggatggagtccactgggcttccggagaagattcagtgcagcgaatattacatggaggcgctgcacaagcattaccccgagttcagaacggtaccacgtgggaaaatcgatattaa

SEQ ID NO: 65197 - DNA, 907 bp, Heterodera glycines
atgggctgtggtgaaagtttcgaaggagtggcagtcggagcggacatgttccatcagcaaaatgtgaaggcattcatagggccatactgtaacgcggaaatggatgcggtaattagggatgagttatggtaactaaagaaaaacaaatgttaaggtgagcaaaatggcggctttttggtacgttcgtttttttgttttggaacttttttcaggggggggggggctaattgagtcccgactcttttgtctaaacgctttctctcgaaggaatgtgccaatcatcggctacatggctgccagcaacatcttctccgacaaaaacatttacaaaacacttgcccgcgtttctctccgcaccgtatgtccgcctaattgactttctgatcccttggccattaagacaaactctttggccattgcggtgtattatttagtccgccattacaattggaatcgagtaagttcatccttatcagtcaatcacccccctttttcgttatcagcgactcctaattattttttaaataaaatgccaaaatgattgcccttttcttaggttgccattgtgaccaacacgggtatgaaatgaaggcatcgtttggaagggaataagaaaacaatcgcaggtccaatggcatttgagcggacgcaggcatttgaagaagtcttccaccagagacacgtgaccgtcgtcaagaaaatactgttcgaagagaacgcagatgccaaaatgatacaagccagcggatatttggaggatctgaaaaattcagcgaggggtcagtggcagggaacagagggcattcattggccattccattggcaatttcccttggtaattgccattgttaattgccattgtccattaccattgttaattgccatttgccattatcagggccattaa

SEQ ID NO: 65198 - DNA, 1126 bp, Heterodera glycines
atggcactcggaaaggagggaaagcatggagatggaagaaaggccgaagacgaattaaagacggacaaacggaagaaagaacgaatgggaaaagtgagaaggaagaggaagaagatgaaagaaagaggagcaaaagtggaaaagggaatgccgacggattgactgacaaataagcaccaatcaatcagtgattgtcttggatctgatctgtgatttatgactaatctaatgtgatcaaaatgatcaaaatatttgaattaattttttaaaaaataaataagattaattaaaaagttttagtggaagagaaaagtcattacaatgaaaattgatacaattatataaaagaatattaaaaaaagaaagatagtaaaacttcataagaaggcataaaattcgaatgtattcgatttgattcggtttcattgcgatttttctgccgaatattcgttcggtcatttgcctaatgatataaaagtgtttgtcgaattttggcatagtttctttcacaatcttcccgcctggttgctgctaccttttatgataacacccgacgccctttttcaatttattttattttcccgttggatttggatcatcccttatcctttttttccttccctagggatttgttgccaccaattttcccgcctgccccgcgcgttggccaatacggtcggctttcctttgatcccccccccccattagttaattggtctgacggatttcccttatccgcgcttagtgttgttagtggcaattgctttgattggctttgccccgtcctttttggccggcttttcctttccgtggcacttccttccaaagtttcgcgtccatttgtccttccctttcccccaatgtcctcgctttttcccctcctccttttctcctcttttttgccatgtgttcgtctccagcaaaatgcttcttcttcctccaaattggtaacggcttcttctcggccctccaattcttcagcagtaaatcaactgaacaacgtacccaaaattatccgatttgttttttgctcgccaatccaacgaaattctttgttctttaggcatccgtcgaaacgaccaccgcccgttcattggagctgatgaacaaccccaagttcaagtga

SEQ ID NO: 65199 - DNA, 705 bp, Heterodera glycines
atgggaattccatattttggaaggattgatatgattagagcatttattggcataatctctatcaaatggggtgagcatcgacggcgctttaactgcttatcgaacatctcgaatctctgctgatggatagattttataaataatattcttaaaattttttaaaatgattaatcttgtgatagctattttctttctatttatcggaatttttattcaaaatctctccataaagtatttataaagagtgtctttggtcggaatttacaagtgatcagcgtgtgttgtatcttcatgcttgcacaattcgaattagtgttttatgtttattttcaacaaactctcctattattgcgttttccatcatttgctgatcagctacgaagatattaaattattaattttcgatataaattcatattaattattttctatcaaccaacatcgtggtggtttctattcaattgtccttcttaaaaatcctaattaatgtcttactttgctcatttctttatctctccctcggaatcaaggagtgagtcccttcggtgcaggaaaattattaaggaagagagttcattatttatttgttttttgcataattaatttataaatatttttttcagaaacgggttctgaaacgcaccaaattttatttacatgttagtttaggcactctgatgctttttctatcaaattgggagatga

SEQ ID NO: 65200 - DNA, 245 bp, Heterodera glycines
atgaattttcttcaatccgattcattttcattcattcaaggaccattcaagtaagaagataaacacaatcaaagacaaaatgttagccattttttaaattctttagggagagaaatgacgagcgaaatacgacatttgatcacaatcaattatcgaaggaagcggaaggatttaaagagaatattcggagccaaatcagcacaagggtggggacggatgagaacacgtcactgatcaatgcttaa

SEQ ID NO: 65201 - DNA, 1127 bp, Heterodera glycines
atggttccggacaaaatggacgtaagttttttatttccgcctaaaaaaaaattttctatcaaattaatgaataaatttttaaaaatcaaaatttaaaatttcatttttccgaaaagcatagggctaggaattatatgtaaaaaaattgcaaaaacattaaacatgtaaaaaaactcgtaaatatttaccaaaatatacagataataaaactatctacaaaaaaatgtgaaattttggatttatttacgggcatttatgaaatattttcttaaaaattctcaaaaattgcaatattaattactatttaaacatgcttttggcgcgtgttgaaaaattaaatataaatttattatttttttaaattaaatatataatttttaattttgtaaaaataaaaaatatataaatttttacttttgttctcagaaagttcatctgagcatcaccgtatgggattacgataaaatgagcaaaaatgacttcattggtgaagtaaggcatttcagagacattaaaacttcagggtttggccaccccctctcctcgcatcctcaaaaaaatatgaaatttttacgatttctaggctcaagaaccgagatttcgaaaaatttcgatccattttggggtatataactgaaaatgggaaattatataaattgcgaggccgtcaatgtgaagaacgaattccaaaatttcgagattttttgtgtctaaaccgggagtctcgaacaacactaagaattaattttttttttttttaatttgtacaaatcgccacaaattcggaaccgacaaattttccgtccgccccgtttttcaggtgcttctttcctctgccaatctacaattggcttccgtcagtttagctgctcaagaacagtggaatgagatgatgctgaccaggaggccggtaagaatgtttttttgaaatttaatttgaaaatttcaagtttttttttaggttgtccgttggcacaccttgcagccgagagacaaaaaatgaagaagaaaaaaacagaatgccagatgataatataatttcgattctgtatttttaaaataatttttgtctttatttttcacaggccatcattgtttttgcatttttaaaaattttcaaaattaaa

SEQ ID NO: 65202 - DNA, 664 bp, Heterodera glycines
gttttcggggcagtccccctgaaccgatgcgcccagatttatggggagaccgaatccttcgggaatagcttccctatagtctgtactttaattctgcgttggatttttgctccccataaatgtttgagtaccccaaacggacacttgaaaaaatcgatttatttttgttttcggggcagtccccccgaaccgatgcgcccagatttatggggagaccgaatctttcgggaatagcttccctatagcctgtactttaattctgcgttggatttttgctccccataattgtttgagtaccccaaacggacacttgaaaaaatcgatttttttgttttcggggcagtccccccgaaccgatgcgcccagatttatggggagaccgaatccttcgggaatagcttccctatagtctgtactttaattctgcgttggatttttgctccccataaatgtttgagtaccccaaacggacacttgaaaaaatcgatttttttgttttcggggcagtccccccgaaccgatgcgcccagatttatggggagaccgaatccttccggaatagcttccctatagcctgtactttaattctgcgttggatttttgctccccataattgtttgagtaccccaaacggacacttgaaaaaatcgatttatttttgttt

SEQ ID NO: 65203 - DNA, 706 bp, Heterodera glycines
tttggtgcgtttcagaaccctttctgaaaaaaatatttatgaaacaaaaaaatcgattttttcaagtgtccatttggggtactcgaacatttatggggagcaaaaatccaacgcagaattaaagtacaggctatagggaagctactcccgaaggattcggtctccccataaatctgggcgcatcggttcggggggactgccccgaaaacaaaaaaatcgattttttcaagtgtccgtttggggtactcaaacaattatggggagcaaaaatccaacgcagaattaaagtacaggctatagggaagctattccggaaggattcggtctccccataaatctgggcgcatcggttcggggggactgctccgaaaacaaaaaaatcgattttttcaagtgtccgtttggggtactcaaacatttatggggagcaaaaatccaaaaatccaacgcagaattaaagtacaggctatagggaagctattccggaaggattcggtctccccataaatctgggcgcatcggttcggggggactgccccgaaaacaaaaaaaatcgattttttcaagtgtccgtttggggtactcaaacaattatggggagcaaaaatccaacgcagaattaaagtacaggctatagggaagctattcccgaaggattcggtctccccataaatctgggcgcatcggttcggggggactgcccaat

SEQ ID NO: 65204 - DNA, 723 bp, Heterodera glycines
atggctttgttggccctccatcgttaccatttgcggttggccgactcggggctgcccaatatgagtgttgaccagggtcagtcagtcagtcggtgcttcggttgtgaagtccctcccagggttggaccttctcgcggtgatggccgatgtggacacttttgtggccgattactgttacgatttgaacgaacaagtcggagtttgccgaaaaggccttttttagcgattcggatggcgcttttcctggacatcaattttagtttttcatcgaacgcaacgaacacggaaagacacagctgaacattttgcgggtccatcaggtgatcaattcggtgaaaacccacggactcggcattctccactctttggcatgttttgttttgtccattttcaaattggtcgttcattatcgtaaagatcaattcggcttacaaatttctgcgtgtgcaattccaacgcctttcgcgctgtctttttgacgaacgcatcaaaaagcttttgatgcaagagattctgttttatcgtgacgcaatggacgaattggaccaaatggtgctgggaatgtgcccattttgattgacttttcagggaatgccttttcagtacccaatgggccgagctgagaaattggccaatgctttacttcgttttgactgtgctgcgcttccaaatgctatggccacaagtgatgactgtctgaacaaacttcgggtaattcgttga

SEQ ID NO: 65205 - DNA, 746 bp, Heterodera glycines
atggcactttctttgcgaagcaaattttccgttttgaaaggagacatcaccaaaatgactacggattgcattgtgaacgcggccaacagctcactgcttgggggtttgtgtccaaacgaaacaaaacaatggcacaaaggcctttctttcaaaatgcaggcggcggtgtcgacggggccatccatcgggcggcgggtccacaattgttggaggaatgccgaacactgaaagggtgcgaagtcggcgaagcgaagatcacaaaagcgtataatttgatgccaaacatcaaaggcaggacaattcaacgacgatttgctcacaaatcgtccaaatgtttagctatcattcacaccgtcgggcctcaaattgggactgaagtgtcggacgaacagtgccgacagttgcgcgactgctacgccaactcgctaagcctggctcgcgacaacaaattgagatccatcgtaacttacaaggggttttccttctactcgtattttaggcttttccatgcatttcgaccggagtttacaacttcccaaaaaaggaagcctctgaaattgcgattaaaactgtgagagattggctgaccgaaggccaaaacaatgaaaaggtaggggacggagtaaatcattagttttagttttctgttaaattaacaatttaagctcgacactgtgattttctgcgtgttcggcgatgatgaccttggattttacgaaaaaaacattcctcaatttatcctatga

SEQ ID NO: 65206 - DNA, 526 bp, Heterodera glycines
atgagcggattctctgaaaaacttatgcgcgatcgcctgcagaaactgtccaacacagcccattcagtaattcattcccatttcactgttttctcattgggctgggcgaaaaggaaagtctgagaaatgttaaaaatgattttatggggaagccgtcccttttctcttcggatttgtcaattgtccctcagattcaaacgctctccgcttggcttcttcaccatgcaaaaaaacacgcggattgcattttggactgttggcttaaggttcgttttttatgacttaatttgacaaattcttttattattcgttaaactaatcccttttttcccaggaagtgcgcaataattcggagaacgaacgactgatcagtctgattaatttggcaaacgatgtgatacaaaacagtcgaaagaaagtgccctcctttatggcagccttttttgaagtgttacagccggcatttgtccatgcctccgagtgtttggacgaatcgcaccggaaaatggtggcgcgaatcgttgcg

SEQ ID NO: 65207 - DNA, 868 bp, Heterodera glycines
atgttcgacttcccagctttgcctagcagtgcttcgtttgcactcagttcgccagttgcccaattgtcccattcgaacgccgtcctcgtccaggacaatgaacgactgaacgacagagtcggggtaatacgataagacagggtgtatctgataggtgatggtattgtgccgctgttccaggagttggaactgatgttgcgtgaccatgtggcccacatcaactccatttaccactctctgcactctttgcacggtttccatgcgcttcaattgcccgacggtcaaaaaaaaaaagaaaaataatatttaaacccaaagatcaattcattttaatttcagggggaattggtccatctgtcccaattccacggctttcctttgcgtttcatttgcaccaaaacgaccgaaagtgaagcgattgtggccgatgaggagcagcaccgtattctcgaacaggcgacggacaaccggcatacggtgggccaagcacggcgctttatgctgcagcagcgacaaaggcatcgtcagcagcaggggagcgtgaatgaggtggtacggtactcccccatggtgtcactgtatgggaatgttaccgttacagtatgattgggtgggcattactgtttttccgcttttcgcccttcctccaattttactttcctattgtcagtcgttgtcctccggctcctcctcctccttcgcctcctcctcgtccaccttcgactcttcgtttgctgctgatccgactgacttttccctggcgatgatgcgacgtttgtgcattcgcccggtggcacgggacgacagtgaggaaatgcaggtgaagagaaggagattcgcagtgtccaaattcgaatggccaaattag

SEQ ID NO: 65208 - DNA, 394 bp, Heterodera glycines
atggtgcttctttgctgttcccaacataaaatggaccgctcattgcccaattgcctcagggggtgccgttgtggcattttggtcggcagaaaagggaagaaaaatgtgccgaaaagcagcggagaggagggaaaagcggagcaatcgcagcagaggaacgaacggaaacagaacaacgaaaattattattgttcagtggaagagatggcttacgatgcgatgtacgacgaaaaaatgccggcggatgaacggtgaaacagacaataattagttgctaattaggcaattaaattaattgttcttttgtagggacaaaacgggcacagtgcttcaacgagttgcgatggcacttcagggaaaggccggccccgaacaataccaacagttcaaatga

SEQ ID NO: 65209 - DNA, 423 bp, Heterodera glycines
atgaaaaagctatcaatctgtcaatccttacggtgtccgggccgggtgagtttccccgtgttgagtcaaattaagccgcaggctccactcctggtggtgcccttccgtcaattcctttaagtttcagctttgcaaccatacttcccccggaaccggaagactttcgtttccgggaagctccccaccagggcgaataaatccgccggcggatcgctagttggcatcgtttacggtcagaactagggcggtatctgatcgccttcgaacctctgactttcgttcttgattaatgaagacattcttgccaaatgctttcgctgtagtccgtcttgctacggtccaagaatttcacctctcacgtagcaatacgaatggccccgtttgtctctgttaaccattatctcggtcagcaaaaccaataaa

SEQ ID NO: 65210 - DNA, 666 bp, Heterodera glycines; identical to SEQ ID NO: 35722

SEQ ID NO: 65211 - DNA, 710 bp, Heterodera glycines
atgcagtacaatgcttttaagccccgccgtgaggcgggacagttccaaaattttgtaccacattttactgtggaaagtccaagtaccttattggacaactacgtgtcaatgagcacagtcgcctttggccagttgtggaacggaaaaatgggaatatcagatggggtgcgctcttttctaaaaattcctcttttcgtctaaccatccctcccttttgtgcactatttcgtttcaaaattgaataattttttttggctttttgaaataaattgtgaaaaatatacgaaaattattttcggttttaattatgctgtacaatgcttttaagccccgccgtgaggcggctccccttttgtgcactattttagtttttaaaattggttccggactttttggctttttgaaataaattgtgaaaaatatacgaaaattatttagcttttaattacgctgtacaatgcttttaagccccgccgtgaggcgggacagttccaaaattttgtaccacattttactgtggaaagtccaagtaccttattggacaactacgtgtcaatgagcacagtcgcctttggccagttgtggaacggaaaaatgggaatatcagatggggtgcgctcttttctaaaaattcctcttttcgtctaaccatccctcccttttgtgcactatttcgtttcaaaattgaatcattttttttggcttttgaa

SEQ ID NO: 65212 - DNA, 391 bp, Heterodera glycines
gcttaaaagcattgtacagcataattaaaaccgaaaataattttcgtatatttttcacaatttatttcaaaaagccaaaaaaaattattcaattttgaaacgaaatagtgcacaaaagggagggatggttagacgaaaagaggaatttttagaaaagagcgcaccccatctgatattcccatttttccgttccacaactggccaaaggcgactgtgctcattgacacgtagttgtccaataaggtacttggactttccacagtaaaatgtggtacaaaattttggaactgtcccgcctcacggcggggcttaaaagcattgtactgcataattaaaagcgaaaataattttcgtatatttttcacaatttatttcaaaaagacaaaaaaaa

SEQ ID NO: 65213 - DNA, 618 bp, Heterodera glycines
caaaagtcggctcttccgaagaaggaattcctgtttttgggagtgccaattgaaatggcatttatttttgcatcaaaagacaaattgcccacctcagctgacaatacgcggatcaatatgaacaattttggaatattcgcgaattattttgtcgaaaatattaaaaaactgataaattctgacaatttcgacgaaaaaatgaatcagggcgaaatgaaaattcaacaagaccttttagacaatccgagttgttttcgcagttagattaatcgattaaaaaataattaaaatattttataaattaaaattcagataaatttgaaatggataaaattttgaaagagaaaagacaattagaaataacaaaagaaaaagcacaagaaagaagaaaaatagtgggcgaacaagaagcaatgctaagggcactgtcaagtgaaatttataaataaatcgaaaaaaaataataataattttcagggaatttaatgaatgaaagaattttggaaattttatcgcccgtccaaaaattggacaaaaattacaataaaaaagtgtttaatgaaaatagcaacgaaaggctgcgcgttgtactcgcatatttggaattgtgggccaaaa

SEQ ID NO: 65214 - DNA, 65 bp, Heterodera glycines; identical to SEQ ID NO: 57115

SEQ ID NO: 65215 - DNA, 1454 bp, Heterodera glycines
atggcattgcaattgctaataattcttccactttttcgtttttatattttccaacaaacagttggccaacacacggacaagcgcgagttgcaccgtcagtaccgcctgccgctgggcgtcgacccgggcacggtgaaggcccatttgaccgcgaccggaagtcgtctgacggtcaccgcggccggcaacaaagcgacgggccaaccgccgcctcccccggcggtgttggccactcacggcaccacttttggacaaagcatcatcccggtcaaacacgtgcccgcttcgtcatgtgagttttggcacggccaataattggcttttctaaattcattttgattaatcatttggcttatttcactttgctttgtcagttccgatcactcaaaaaaagcaaaagttccaagtggaattggacgtgcaacaattcggaccgcaagagattgatgtaaggctctgcatgtttaattttataaaaaaacgcaggtgaaagtgagtgggttcgatgtgatcattcattgtctgcatgagaaaggtgaattgggacagaaagcgatggcaacacaatgccaaacattcaaaatgctttatttttgtggaccagaaaatggtctatattttttcgttttgtcattttatgctacaaaatccatttaagggggggggggagggaattgaaaggtgctgggtcgttacttaaaaaccatcataatgggcgttacttaaaaaaccatcattatgaaaatttttgtcgaaaaattatttataactttgctcgaaagcaaccaaatttttaattcttgatatcatttgatagccctaagtgttctctatcagtctgcaaaatttcaaaaaatttcgttaagtttcaaaaaagttatagctcgaggaactcaaaaaactttgattttcgaacatttttggccataactttttttaaacttaataacattttttgaaattttacaggctcataaagaacatttagatctatcgaatgatagcaaggattaaaaatttggtctttttagagcaaagttataagcaaaaatgttcattatggtggttttttaagtaacgcccattatgatggtttttaagtaatgacatagcaccattctctgtccatttccccgtgatcagtgctcagccgaagtgcgcagagttagttgtatgcaattaccaccaacaaatacataaatggaggagtagcaacacaaccagtagtcactcattcattcttcttctgtcagttgtcgtacgtccatttgaatttgaatcgccctaagtgggcagcattaaattaaattgaattgtactgcccccgaggtgcttctctttttactgacttttttgcttcgctaattaaattaggtatttgcttcattaatttttgttgaaaatcacatcaaaataacattgatcaatttttctgttcttaattcacttttcaa

SEQ ID NO: 65216 - DNA, 1385 bp, Heterodera glycines
gcagaatatggctttgtgatggccgacaaaattggcacttcactgttggaacaaaacagggaattgcaggaaaagtcagtcggtggcagttttttttaaattttttactttcaatcctcaaaattttaattttcaatcattttttctgatttttcccatggtttcaggaacgaatttctggaggcatcgttggccaccagccgtgacaatgtggcacagctgaagcgccagttggagcagcgctgtgacctgttcaagaagttgcaactccaactcgagggcatggaggaggaggagccgaacgggacagacaaataccatcagacggggtgagcagaaaactgaaaattcttaggacgaatttaacacagattttttgtaaaaatttcagccattcaaaattttttgagtttgtcaaaaaaaattttttccaaaaattgctgaaaattttttcttgaaattttcattggaattttgatagtcagacgctccgcttcgggcgggggtcgaattcaaaaattcgttaacgccattgaactcttacctcaaattttctatgtcaaaatgcaaaaataaacaacaaaaaaaaagggggtgggcgccacagcaccactttattcctccttcaagtggtttgtacgggtttctgcctgccctttctgggcatgggggggggatgacatggattggatgagaacaaaggacagacagaccgaacactgatggaggatggagatgcccttgaaaatcgcagcaacaaaaaaaaacccatgaaaattacccattgttttcgcgcatgagcaaaaaaaaaaatatcgtatattgtgtagtaactctacggtagcaaatcattgtgcaaaaacaaaaattaatgacagccaattttgcttcagaatgtgcagctcaacggcggcgcaattggagagcaaaattaaacgattggagggggaaaataaggaattgcgaacaaaggtggggggaaatgagggagggagagggggtgggggacaattcaattaattgagagagagattttgaaaattcccagatcggaatcaaagactcgaaaatgcatccggaccggaatttcgggactaaaattcagttttttccgggttcccttctccggttgcaaaaaagatataacctggttcgagtttctacccggattccggatcgggagcccgggaaatccgtaccggaccatcccaatccaccaatggtatcgaacaattaatgtgggggagaggagaggacggcggtctcatttttcatcattttatttgcagacaaaggactcggatgaattgagagtgattgcggagaagcgcgaggagcagcggatcaacgagtactgctcacgcttgaggggagcaaacctgaag

SEQ ID NO: 65217 - DNA, 372 bp, Heterodera glycines
atggttgaaggcgggttgccgttgaaccgtcaatacgcgtcgccttgtgaatttccacaaacttgggcggtgtccattgtaggagaatgtgtttgcaaggataaatgcaagtaagctaactacgaggagccatatgaaaaagttcaaattaagatatcagccttaaaagcttattttgctgccaaaaatgaattaaaataattaaaatcggtttttaccaatgtgatatcaattattctttttgcactagaaacgcgtaaaatgaacaaaaaaattcaggcaattcatcgaatctctggtcaaactggctaatgatcgtggtgtgaaaatgggaatgccaccaagggttgacatgactaaggcaattacatt

SEQ ID NO: 65218 - DNA, 212 bp, Heterodera glycines
atggaatttcataatattccgactttgatttttggcttttgctttcatttatctcatgtgtttgacattttaagtagagtgccacgggaccgggaccgggccgggaattcccggtcatccgaggtcccggttcccggtcccgggtttttaaaagctcaggtcccggtcccggtcccggtagggcaaccgggaaccgagaaaaacaagcactg

SEQ ID NO: 65219 - DNA, 67 bp, Heterodera glycines
tgtccgtttgggtactcaacaaatatggggagcaaaaatccaacgcagaataaagtacaggctatag

SEQ ID NO: 65220 - DNA, 767 bp, Heterodera glycines
atggaagaggaaggtgccgaaattgacggccaacaacggcgcgacggaattgctagtcaaatgccgattatcagaatggtttacatggagcaacaacagcaaaacattggtaattttgaatttttttttggacaaaaatcatttaggggttaaaaaaatttttttgaagttttgaaacggaaattaatttttaaattgtttatttgatattttttgttaattcagaagcaataaactccgccaatgagcagcagtcattggaggaattggaacgtgaattggaagaggtgttttgaaaattttggcacatttttttttggcatttttccccttttttatttagttgggaattgaggaggcaaatttggccaaatccgaggcggaggaaggcgaacgaagcgcacagctcacagtcgaacttgaacagttggacaacgaagagcaggaacagcaaaaggcatacgaaacgcatggcactgagttggtcaaaaattgaaaaattttcttggtgataaaattcaaaaacatgggtcaaagctacattttttaggaagttggaactaactttttctcacgaatgactgggccagttgggtgccctaccccagaaaaaaaaatattttcgtttttaaaatttcttattgttagaagtttttctagtaaaaatctaaaaaaaaaattgttgaaagaaattaaaaaaaaaaattttgggaaggcgcgagggagagagggcggggtgaataagggggggataaataccgaataaa

SEQ ID NO: 65221 - DNA, 117 bp, Heterodera glycines
atgggctgcaacgaggccctgtctcctggtgacttttccgaacatgcgaattttgctcgactgtgccgttggcatggactcgatggcctcctttctgccatgtcccgtggtccgaag

SEQ ID NO: 65222 - DNA, 182 bp, Heterodera glycines
tgtcttctttgccaaaaatccttcgtcttcccaattcgattggcttcactgtttgcgggtttggcctttccattggtgcatttattgtcggtgctcttcttttggacggaccgatgtacgcgtacaccgaatgggttcagcaacggacagacaaaggaacagaaaaacaaaaagtggaatga

SEQ ID NO: 65223 - DNA, 895 bp, Heterodera glycines
atgacgtgcaaaagccaaaatattcaaagtgatcaacgagaattgaaacgaaaagcaaaggttgcgctcgatttgttggagatcggactagtggcatatgccttacaggacagtgagagctggaagaaagcaaagacagcaatgaacgtgctcggaaatgttcttttggccgagtctctagctaccgtcaaaaaagaaaacaaaaactctccggattcacctgttgctcaaaatattgcacagccaaaggccgcgcctcaaaaagaaaccaccaaaaaacgagaagctagcgaagaaaagaaagacccaacaaaaagccatctagactctgcttccacgcaaattgatgacgtcagcgtgcctaaggcggataaaaaaccaaaaagcaataatgaagaagaagacgtaggtgacattgataaaactcttgatgaattttttgctagcataaaagcagcgaccaccggtatgtaaaatgcatatttaaatcattcacgtcatcattacaacataaactaaaatgcttaatacaaaatcatttgttgataaagatatttgctttaaactgccttgtggaattattatttccggaacacagtttttattgaaatttattgacgagttactaattattccacagcctgtctctatactgtattgttttggggaaatgaatttgcagttccggcacttcaacgggctggtgttgcagtgtacttggcgtcccttctgaagaattgattaaacaacattgcaaacctctcctactcattctcgacgacctaatgctgtccatttacgaacgttatttgtcggagttatttaccaaaaaatcccactaccaccaatttgcggttgtgttcgtcactcaaaatttatttgaacgaaaaataaa

SEQ ID NO: 65224 - DNA, 694 bp, Heterodera glycines
atgggcggctattgtggcgtttccttcagcgcattgtccaaagggtaagtgaatgaattgatcaaaagtttgattggggatgaccattcggattggccatatcgtttttgccaaataaatcatttgtactttttttcctgtacaaattatttgctttatagaataaaaatgccctctccctctggactcccttggcttcccgtggagaattgccaatgtcctattttggacaatgagtgcattcgtccactcaattacacaaaacccgttatctgtgctcacaagagcatcaaaaacttgttggattttgttgcttccccaggggaagaacacccgggtactcacaatcatttacctatttattttttctaatttttaattaatttagtgttcgcgaatgcccatgccactgatggtggtggttcgtgtgccactcagtggtggctgatcgtggttctgcagctacttgttgtgctgctcattgtaagtttaaaatttaattttcaaacatttaattattttgtatttttaatctcaatgtttttcacgctatttaattatctattttcatgcttggtctgttttttcggcgatgtaaagcgggtaccgttgccgcaaatatgtgatgcgcggccggttgaaatgacagcgcttcgccggcagggttttacccgccgtcgtggtaaataataaa

SEQ ID NO: 65225 - DNA, 640 bp, Heterodera glycines
actcaacccaccagcatttcaatcactgggactcaacccaccagcatttcaatcactgggactcaattctcctgcatttcaatcactgggactcaattctcctgtatttcaatcactgggactcaacccaccaacattccaatcaacgggactcaacccaccagcatttcaatcactgggactcaacccaccagaatttcaatcactgggactcaacccaccagcatttcaatcactgggactcaatccaccaacatttcaatcactggtactcaacccaacagcattccaatcactgggactaaacccaccagcatttcaatcactggcactcaacccaccagcatttcaatcactgggactcaattctgcatttcaatcactggcactcaacccaccagcatttcaatcactgggactcaacccaccagcatttcaatcactgggactcaacccaccagcatttcaatcactgggactcaacccaccaacatttcaatcactggtactcaacccaacagcattccaatcactgggactcaattctcctgcatttcaatcactgcgactcactccaccaacatttcaatcactgggactcaacccaccagcatttcaatcactgggactcaccccacca

SEQ ID NO: 65226 - DNA, 403 bp, Heterodera glycines
atgcacgacaatgtgatgggcaacctcgcgacacttctcaaagtgtgttttttggtggcgatatgggcagacgaaagagcattgattcagaatcaaaaattttttcgctaaatatgatgatcacatctccctcttatgtagaaattgtcaataagcatggaaattttgttaatttttttgtccatgaatcagtactagtaggtgtcgccaaggaattaaactgactccgctatgaagcctaaatttcttcaatttaaggctttgtcagacaaaggaacattgctcgattcttgcatcgtcaaggggttcacccgtctttatgctgttcttgcggacctctacttagatttgccagccgcttttgctttggcacagctttggattaaaaagtcgctcaaagcgg

SEQ ID NO: 65227 - DNA, 141 bp, Heterodera glycines
cggttgatgagctgagtaaggacgtgccgaaactgtgtgacacgttggctgtgttaattgctaagctggttgagcaaaacatcgtcacatcgaacgttatttcgtttttggcctataaaaattcggatggcaaggagtccg

SEQ ID NO: 65228 - DNA, 212 bp, Heterodera glycines
gataaaatgaaaaaaataattaaaaaaaaataatgctggtgtggtaagtgtgaagaactgtgttcctccaggcaaaaaattctaagaaaatttataagcatttgtagggttctcagcagtttccctgcaaaatttggtgagcatctgatcagtctagaacgttgggtgataaatgaaaaaaataattaaaaaaaaataatacttgtgtggta

SEQ ID NO: 65229 - DNA, 658 bp, Heterodera glycines
aaacaaaaaaatcgattttttcaagtgtccgtttggggtactcaaacaattatggggagcaaaaatccaacgcagaattaaagtacaggctatagggaagctattccggaaggattcggtctccccataaatctgggcgcatcggctcggggggactgccccgaaaacaaaaaaatcgattttttcaagtgtccgtttggggtactcaaacaattatggggagcaaaaatccaacgcagaattaaagtacaggctatagggaagctattcccgaaggattcggtctccccataaatctgggcgcatcggttcggggggactgccccgaaaacaaaaaaatcgattttttcaagtgtccgtttggggtactcaaacaattatggggagcaaaaatccaacgcagaattaaagtagaggtatatcgaagctattcccgaaggattcggtctccccataaatctgggcgcatcggttcggggggactgccccgaaaacaaaaaaatcgattttttcaagtgtccgtttggggtactcaaacaattatggggagcaaaaatccaacgcagaattaaagtacaggctatagggaagctattcccgaaggattcggtctccccataaatctgggcgcatcggttcagggtactgccccgaaatc

SEQ ID NO: 65230 - DNA, 56 bp, Heterodera glycines; identical to SEQ ID NO: 59278

SEQ ID NO: 65231 - DNA, 598 bp, Heterodera glycines
atggaattttttgagaaaatcggtaaaagcggatttactaaagaatttattttatttattcttacaaagaaagaaaaataatttaagattttgaatattaacggaaaaacaatttgaatatgttttttccttccaatttttctaaaataaatcaaatcaagatttttaaatttgattgattttgagtgaagctgtgaataattttttttttaaattttcttttgttggtttttttaggtttgccaatattttcaaaatttgtgtttaacctttttcagttccatctggtgtattaacacaacaagaagtgacaagcgtggaacagtactgtagcaaacctaaaatttgtggtggtacgtccggtgggataccgtacccattgaaatttccgtgccatgagcgtaatttgacatttggcaaaattgtgatggaaattgaaaatgtgtccaaatttgcgcatgaaaaaatgtggcacattcgatgcagcaaatttgtgcatataagcggaattccatggagaattgtcgcaaaaataaacacaaacgaagcgttggcattttacctccaatgcgatgtttcaatgaaaggttcgcattaa

SEQ ID NO: 65232 - DNA, 445 bp, Heterodera glycines
atgtcagaatcggagcgagttgttttcaatctcagaatcggggttccaagcctaaagaaagtgatgtcgtcatccttttggcttttggcacagtttaaaatggcacattttttgttgacactctgtctcactttcgcattgttggcacattgtgtctccgcaaaacggcggcccggcttgcgcacttgggactttgaggcgaagccgggcatggacaattcggtcggcaaagcgaaggatgaacaggatgaagatgaggaaaaggaaccaaaagcggatgatggtgtaggggataaagcagtaacagatccgattccgccattcaaaatcagcagcacaacgaggcaagcaaaaatatgaaatattttatttttaaaattatttttttaattttaaatttatttctagtataaaattaaatgagtcaactattggaatccattta

SEQ ID NO: 65233 - DNA, 817 bp, Heterodera glycines
taattccttcgggggaccgtgccgggtgccgcggggtcttcagtgctggttcgtttcatcacggcaccgaaccttttggctagtcagcaatcgttgcttaacttgccagatcggacgggtgcgcatgattccactgttccaagcaccccaccaaaagcaaaacgatataaccaaaatataaggaaaaatttttcaaaaaattttttctccatcttcctttttgatactaaagcatcagagtgctaaaattaagttgtaaataaaatttggtgcgctttagagcactttctgaaaaaaatatttatgaaacaaaaaaatcgattttttcaagtgtccgtttggggtactcaaacatttatggggagcaaaaatccaacgcagaattaaagtacaggctatagggaagctattcccgaaggattcggtctccccataaatctgggcgcatcggttcggggggactgccccgaaaacaaaaaaatcgattttttcaagtgtccgtttggggtactcaaacaattatggggagcaaaaatccaacgcagaattaaagtacaggctatagggaagctattcccgaaggattcggtctccccataaatctgggcgcatcggttcggggggactgccccgaaaacaaaaataaaatcgattttttcaagtgtccgtttggggtactcaaacaattatggggagcaaaaatcccacgcaaaattaaagtacaggctatagggaagctactccggaaggattctgtctccccataaatcctgggcgcatccggttcggggggaactggccccgaaaaaaaaaaaaa

SEQ ID NO: 65234 - DNA, 1210 bp, Heterodera glycines
atgcgaagtaaatttatggtaagggaatactgtaaggaaagaagggaagagacgtggtaacatcacaagttttaaatttacagactgatttaggacaaagtacagtattatattccgcggggcagaattacagtaattcctttgccatcggcagcattttaagaaagaaatttgcaatttggaagtggaaaaccagttcaatccacaacaatgcactcactcattcacatcactttcattaccaattttccaatttcaattcccctcaaatcgctgctcaagtggtcggtcgttctgttgtcctttttgttcgcctccttctgaaaaggttttgccaattccttttcaaaattcgcttttcaattcgaatttattttgtataaaatgcgaatgaatcggccaaaaagtccgtccgtccattcatttcatatatttctccgacatttaaattttcttcctaattcctttttttgtaagcaaaaatattcgtggccctttgaaaaataattccgtgggaacagaaactcaacaaaaagagcaagttcagaattgagaatgttttcaaagttggcaattgccttatttttcctttcttttgcaacgaattgccaaattatttggcctttgtttcatttgggaagaactcagtccgtcggggtacgcttttgccgtcgaaaatgcttttctttttatgctttgttttaaattcacttttgggtcactggcaaattgctctgtaacagcgccccggccgcgggaattctcgtcaaattgtacgacgacgacggttcatttttggctattgtttgcttttgccttggcatttcgttcgttttcccaaggtctgtttggcttcgacgatctgttggccaaaggatacaccgaccaaaacggacatttcgccatttacggctcaaccaacgaaattagcaaaattgagccgaaagtgaacatttaccacgactgcaacgacattttgccatgccaacgaaaaatatcagtcggtgccaagaaacagaggaccaaaaaacaattggacaacacaatgttcgttcagataagtgtaccggacggagtcgtctacgaaggccatcgcccgtcggggcttttctcggtcggagtgttggaacttgggaatgactacggaggagaaagtcgagactgttttcatcgctgacattgtcaaaatatccaaataattacaaaaaaa

SEQ ID NO: 65235 - DNA, 305 bp, Heterodera glycines
atggataagcaaacttttggtggagattcttctgccaattcggcagcggaagacaaaatgagcggttgctgttcagaacacattgtggaaattgaggttcaaaaatagagagtggtatttaaaattgagtgatttaaaacgaataaaaattgaatgaattggcctttcagtggaaacatttcgactatctctccgccctcagtggcctttacacggcatcggtcgaacgtcgaaaatgcaatttgcttgtgctcgtgcagggcaatttggacaatttggaagggaaaatggtcgaaatgaattaa

SEQ ID NO: 65236 - DNA, 883 bp, Heterodera glycines
atgccaccaaatacattatttgatcagtgtgtttcagttggattttccgtcgatggtccgggggttggtgttgatccattgcacttcgacaacccacggaattgtcgaaaacatcaaagagattgtgagcattttcaccaaatacttaatatataaacctgccctttacaaaactaagttcgccgggttgcgtctcgaagacggcgaaatgactcattcggcgtggaattatttgctgactcaccgttttggaaatgcacgtcattcccatgcttattaaactaagtgaaaagcatatccattgtagcacaatttggaccaaacccaaaagcattacgtggacttgctgaagtcggtgatgaaccaacgcaatttgagccgttatttgtacagtttcggacaccgaagcgatttcactgaccgactcaaagaaaatttggcgaagtcatttggattttacgtgattttaaccgaaaacattgccattttcagcgtggatgttcttttggtgagcggagcgaaggcaccgcacaacgaagtgaatcttttaaattttcgaagtttcggaaatgcatttaaaatgcctctaaggcaggggtgccagcagaaaaaacttcaatcagaatgattgtcaaaacatcaaagttttaggggcattttgaggccaaaatcagaataaggggattttttaagaaactttgcctaaaaatgatcaaattacggttacggttcagtaccctcgaaatcaaatcattttatccaaattttgtgggataattctttctttttctctcagaatatgatgcacatgttcaaaaacatggccaacgaccgtaccggtctgctgatggcggaggactgcgtggacgtactgtcggaggcg

SEQ ID NO: 65237 - DNA, 166 bp, Heterodera glycines
gacgccaccgatcgcttcaacgtctcctttttcctcgacgacgacggtgcgccgacgtgcccactcattggccgacttcccgcctctttacaatttttcccagcgcccgttgactcacattcggcacagcagtttgggtgaaaacagtggagcggacccaaatttt

SEQ ID NO: 65238 - DNA, 1007 bp, Heterodera glycines
atgcatttacaagaaaatcaaaatattaaacataaggttaaaaattaaaatttacggggcaattttttttacatcagccctttaaaataatgaagtgtctatggtgagtcatagaaatgccatttgttcataataatacactgccattttatggacaaaatgatgaataacaatgtcatttgtgcagtcaatgaaatttcattcgttaaatcaaatgccaaaattcggcttattcttttcaattattttattatcatccgaaaatgatttttggtctctctgtaaaagcattttataaagtcactcaatgatagctttttgtcaatttaaatattttatttatttttatactttaagtcgcgttttgtttcttttttagcaatgggtttggcatcaacattttcattgctattcttcataaaaattgctctgttctcatggaatgttttgggccaaaaaagtcatcagctaataaacaatttatttattttaagttttaatgggtaaaatcatattttaatgcctttagatgatcgacaacttcggaagccagtaaattgtgaattgctgaaggatggcaattatgtgtgggactgcagcaggtacatgtcaaaaaaacaaacattttgaaaataatattaattgattagtgaaatagccattccgaaaagcatgacaaaacatttagtgggttaattaatggacaagagtcaagacaaaaccgtaacccttacaaacactaatgaactaaaaatagctatcatttttatttgaatttatatttcagttattactcaatttgtgccaatgggcgcgaattgccgatggagtgctattccgggctgaagctgaacccgaacaccaaccaatgcgatacgccaagtttggtggacccgtgccacagaaaacatcggccttcgaatgtgctgtatcgcgcggcggacccgttcaattgccaagtgagcagcggaccaaagggggagatttaggattttaaatctacaaaa

SEQ ID NO: 65239 - DNA, 718 bp, Heterodera glycines
  unsure (1)..(718): unsure at all n locations
atggagcaggacatgcttctgctcggtgcgacggccatcgaggacaaattgcaggacggcgtaccgcaaacaatcgcaactttggcagcggcgaacatcaaaatttgggtgctcaccggcgacaaaacggtgagcgaattttgaagaattaattttactttaatttttataaatatttttttaaggaaacagcgataaatattggatattcatgtcgccttttgacggaagaaatgcgcgaagtgttcataatcgacgggaaggaggagaaggaagtggaagtgcagctgaaggacacgcgacgacgcatttgtagcgccaaacagacacagcaggcaaaagaaatgaaaagagaaaaataattaggggtaattaagggtaattaaggggattaatggggggtaatggacggtagggagtcaattaagcgggagggaggggtcggaatggagcagactttcaccatcctgactcttcaggtccatttcaaatatttaaaaaaacaacaaaatgctttttaatcatttgttttttaatgggtaattaattattatttattaaatggatattatttttttcatttttttcccttttcttttttctcacatttccccaatttttgtcttcttctaagatccaccgaatgtgcaatcaaaatgagcgcaacaattttttttattctcaaaatttgacactttgtncaattactaaaagcaaa

SEQ ID NO: 65240 - DNA, 661 bp, Heterodera glycines
atggcccgacgtcgtgatggttggaccaaaaagacaaaatttggggaataaataagggaaaactcgaggaaatttggggatgtgtgtccaataaatttgccacatttttttatccattcccccatttttatagaccaaaaaggcaaagaaggtggcaaggacggggagagcaacgggcagacggtgcaggaacattttgcattcggcgacttggaatactggggcaacgaaacggagacggtaaggaggggaaagaagggagagggatacagtcagtttcgtaatccaaaattagaaattttttttctgcgaaaattttaaacgcaaaagagaaatttttgtcaccgattttaaatttttgaaaaaaacataattcataaaatctcgaattaatttgctgaaatgtttttcttttaattttggaaaaaattacatacttatttttttcagaataaaattttaatatcacaccaattttgaaacagaatttcccaatgccggacggggtggacaaattcaccaaaattgcctcaatgaatgctgaattggtggcactggcggacaacggccaactttacgcgtggacatgggcaaagggcagtgtgccgtcaaatgtgccgcatgttgtcaacagtcaatttgcaatcacaggttgagaaaa

SEQ ID NO: 65241 - DNA, 1150 bp, Heterodera glycines
atggaacaggagcgcaaggcacgacagaaagcggccaaaaaggccggcggcggcgtcgtcaaaaaacagtccaaaaaattggcgacgaccaatccgttgtcgtccattgaggcgctggcgaagcgagtggccaaagacgaagtataaaatccaccggaattgattgttttgtttttaatttggaaatttaatttttgttgagaaaatatcatgaaaaaatggcattttcggcagttttgtttgcttttaactaactaataattagggggttatatttttactactattttaatttaatgaattaacttacaatggcaatttgtgcaggcgctgtcaacaaaaaaaaatagaaattcttggaggggcacccgaagagtcccaaaaatttttttattcaatgtatttttctaaattttcggcgccgagggagaaaaaaaaggaattttcgccaattttggtcattttgggacctattttggaaaaatgggacccagccatgtctttaggcgtctgccgtgaaaaatttaaaaaacttttgcatcaaattccttaaaaaaatgagttaaatttttcaaaaattcacccgattttctttacaatttttcaggggtcagccatttcatttatttttttttacaggacaattacaatgccaaccaatttttggtggattcgcttccggaagtgccgggcgcgacgacggaaaacagtgacacaaaagccggggcccgtgccaatgccaaatcggtgcgttcatttgcggccgaagttcgacggaccatcgaaaatgcggacattgtcattgaggtgaatattggcggaaaaaaggatttaaacttgtctgactgtttccacttggatttggggttttttttgccaaaataatttaaaaaatataaaaactggacgaaacaaaaaccagtttatcaagttcatggcgttttactaagtccttggaattttttttttaatggcgcctctcacatccagcaaaatccttcaccagaaaatttcaatctcctgaaaagttgcattttactccactcaaaaaattcgtattttgtacggagcgccccgacatttgtgcctatgtccaaaattggacgcaaagttgaattttttaagccctgatagcctaataagcattaaa

SEQ ID NO: 65242 - DNA, 3220 bp, Heterodera glycines
atggagcatcttaccgatgcgcctccatgggcttccgcaatgttgggactggtgaaccaaatggttggaatgtgccgcgagctgatctccatggtacgcgagcaggacggaggaagcaacccgaacagtgtttttgacgaagaacgacgactgcacagcgttgtcatcgcgcaattgcaggaaagcaacagccaaacgccaactcaacgtgcaaccgatgacttggcgaatgtcaaagaactgatggaccattgtgacatcgaatgcctgccgacccaagtgtacagaatgggcaaaaaacaagccgacggacgtccaaggttgctcaaagttgaactcccgaccaaattccataccaatttatttttgcgcaacaaaaacaaaatcaaaaattttaacaaattttccaaagttttgttgcgcccctccctatctaaaagtgatctcattgaccgtgcccgactcattacactgtgtaaatctcaacgtgaaaatgacccatcctgtgattatattgtctatgcggggcatgtgcttgcccgcgacgacattcccgcctttaaatctgacctcaattttaaatgtatttgtcataacaaatcttaatgtgttttgggtgaccactcacgaggcaataaccttaatttagctcttttacaaactaaatatagaaaatttgaacaccccatagaaaattcgaaaactttactaaataaaaaacaaaattttttatattcaacatttatcaatatgcgatccctaaataataagcttaacgaatttactgcgattatagccctaaaagattttgaattagtttttgtaactgaaacgtgggcaaaagaaaaaatacctttccaaccatatatcactaacaattacaaaatatatgaagctagcagaagcggaaaaaatggtggtggagtaatgattttgacaaaaacgagcgtaaattctttttctgtcttatctgctctaaattcaattgtaaaatccaaattattcagataaatggagcaaaaaaattaagaatagcattactttacagaccaccgaacacttctgctaatttcacaaaaaagattctgaacctcaattttatcattatgggagattttaacctaaatgcaaaggacataacttggaccagtggaacgccttatgctaagtcggaaaaaggaaatattttttgtgaattttttaataagtatggcttattccttatgacgaacggcccaactcgtggtagtgcttggcttgatctgattctctcttctaaacctgattttgttaataatgttttaattgaggatatttttagttctgatcatcttaccactaacttttcactatcttttcccagtaatagaactaaaacaaacacatttacagtacgcaattataattctactaaacttaatctactaaatttaaacttatcttcaattttaccctacaaattactacaaaaatttaccattgaagataagtttaatcatttttaccttctttttagagaatatgtagaattatacttgcctaaaatcactgtcggtcaaaaatccagaaagcctaactacccattgagtcttaaactgtcaattaaggaaaaagccagactttataaactacaaaaaataaaccgtgataaatataggcatttgtatgatagcatttcattacatataaaaattcaaataaataactttgttacaaaaaatgaaaataattttttgaataaaggaaaaaatgctatctacaaatatattaataaatttacaaaaaattttgaacaaattcactctattaattatgagaaccaaactatttttgatgattacttaaaagcagaaatttttgcaaacactgcccaagtgtgcaaatggcctaatggctagtctccttgactttcccttcttctttcccctggttcaatccctctacagaaattagattattttcaatttttttttttgtatactcgtgggtttcctataaagaaaatatgattcctcatagtttttttttaaattgatacatattttatcattttttaaatgaaaatcctaccaattgagcttaataatcgcaaaaaccaacctttttttgttgaaaatctgttaacaaattgcacccaaatttttaaaatttcccccggcggcgcctatcggcaccgccggaccccttctttcccaaaagttttttgaaaaagcgctccgaaaaaagtgatgtgaaaatcaaatctgaatttctattaatattcgatgatttggtccaaaaatgattaattgtttgaaataattgaagaaaatttgtttaaaaattttcattaatttaatttattaaataaaaaaccaaataattttgtattattttcacttgatataaattaaaatttgaattttttttttaatttttaaaatttttttgaatttttaaaatttcccggttggtcccggtttttcttgcggtcccggtcccgaaaaaaatcgaggtcccggtcccggcttctcaggtcccggcaagtcccggtcccggttttggcaaaaattcccggtcccgtggcactctagaaaaaattattgcaaaaagcatttataacttccttcatcagaataatttaatatccgaacatcagttcggttttgttaaacaccgatctactaatactcaactaattacagtattagaagattggtacgacagcatatacggtaagaaaaatatcgactgtatttatgtggactttcggaaagcttttgattcccttcctataaacattttaataaataaacttcataacattggcattaagggaaaactgctaagttggttatctgaatttttaagggataggtcttacagagttaaaattaacaataaatcttctaatttacatccgattcagtccggtgttccacagggttctgttcttggcccactgttatttttaatatacattaatgacctcccgcaggtaatcccttcggtagttagcatcaagctttttgctgatgatgtcaaaatttatgtctcttacaaaactcgtgatgaaagaagcaaattaaatattgcattggaaaatattggaaaatgggctaatgcatttggtttaaacatctcccaaaataaaacatttattcaaaacaacaatataaattatttaacaatattattaatgaggttgaatctattagtgatttgggcattttgattgata

SEQ ID NO: 65243 - DNA, 413 bp, Heterodera glycines
atggctcttgtataaattggttttttaaaatttttttgaatttgtccctgttaagagtgaaatgggcattttgacttaaaagctattattttgtttagttttagtgtccttatcttccagctttggcctccgtgaagtacacccggtggttgaccgtgtccagcgccaggtggtccagctcggccaggtcgatgttcaccaacaccaatgggttgccgccgtccatgtcggcacgtgccacctttgtggccacaccgcccttgccttggtcaagccaaaacagcaggccccgatcagaatccaccgcaatggcaatgggttgcgcaaccgcggtcggtgtttgatcattgtgcaggatcaccgcccggaactgttgttgatcagagggagaggatgatttttattgaaaatca

SEQ ID NO: 65244 - DNA, 246 bp, Heterodera glycines
cccctgtccgtggcgcaaccaatgccaatgagtacgataccgttgcaaccaatgtacccgatgcaacagcatatttatggcccactgggacccgataagaatgatgcaactaaaccagggacgactccaacaccaacacgcaccgagtgcggaaccgcaacaggcgcaacttcccatgcaagcgtcgaatgcgcaatggcaacaggcgcagccgcaacatccgatgcaaccgaacggaatgccagg

SEQ ID NO: 65245 - DNA, 304 bp, Heterodera glycines; identical to SEQ ID NO: 51570

SEQ ID NO: 65246 - DNA, 444 bp, Heterodera glycines
atgggtgtattggtttggggggaatgtttagaaaaaaaaaaaatagattttttaaagtgttggtttggggtattcaaataattatggggaggaaaaatacaacgtagaattaaagtacaggttatagggaagctattccggaaggattcggtctccccataaatctgggcgcatcggctcggggggactgccccgaaaacaaaaaaatcgattttttcaagagtgccgattggggtactcaaacaattatggggagcaaaaatccaacgcataattatagtacaggatatagggaagctattcccgaaggattcggactccccataaatctgggcgcactcggatcggagggactgtcccgaaaacaagacaattgattttttctagtgtgcgtttggggtactctagcaattatgaggagcaaaaatcctacgctgaattaaa

SEQ ID NO: 65247 - DNA, 309 bp, Heterodera glycines
atggtaaaaagtcgaaatttttaagtttttcttaataaattttttacaggctagaaagtcttttcgcttttgtaaggctaataaagcatgtaacgagccgtatgctaggacaatttggattttgttgacaaagaaaaaagttataatccaaagacgtgctggggcccaactgagcgagtccgtgacaaataatgctaaaaaaagtcttacaatcaatttttcattgtcatctttatggtgaaaatttcgaacaaatgaatttttgtctgtttgtaaaaagacttttttccactaatgtacaaaaataaa

SEQ ID NO: 65248 - DNA, 1469 bp, Heterodera glycines
atgcagaaggtttttaaattgaaaactccattcatctcaatttatattgcccgtttcattcagtgcttattttactatgctggccataaaatatggagttttgcaggttcgaaagagctcggcgcgctcttcatattcagacgtatcaactaagggcctatcgccactctcaggcgagatatggccaatcaaagcagagtgtgacgcataatcacgaagcactgctccagaattcttgtaatgtttcacggcagatttttgtgataatttttttcactgatttcttttatctctacgcatatgcattatttgtttaagctcaaggccttatcgaaaaaattgtcaataaaaacaaagtttgtttaatgaatatttacatcaacaaattaatgacaatttcgaaaaagaaagtcaagtaatttttagaagcttttatttcatgttttgttgctcacttgttgaaccgcacatgagccgttggaaatattttcgccttttcttggcaagttttttcccgaactgtttcacgacagttaattgagtcaattattttcgccagtttcttttatctccaagcgttagttattgcatttcacttaccttggaaaaagattacagtaaaataaaatattgttttgtgaaaatttacgacaaaaatttatcgaccatttctaaaggggaaggaaaataaatgtttgcctaatatattaatttatattttcaaatgattgaaccgcatctgttgcttatgtttttaatattttttgattttgccatatattttggctttttggaatttttccaatgtccgaaaatttatgtttgcttttacatgataagtaatgatttggttatttttgtatttttcttcttttcatcatgaaagtcatttagccattcatcccctctaatgaaaatagttttctgcagctgatttaacaatatttttctttgcactatacatgtagtatagcactggttgcgccttcaattctgccccttaatagaaggttcctcagcaaaaaataatactttctcaacaaatgaattcgcttcgcccaccccttagtattgtgataaatctcgaataaaaaattctcaactattttcccaaaaaatgcagaaggtttttaaatttgaaaactccattcatctcaatttatattgcccgtttcattcagtgcttattttactatgctggccataaaaatatggagttttgcaggttcgaaagagctcggcgcgctcttcatattcagacgtatcaactaagggcctatcgccactctcaggcgagatatggccaatcaaagcagagtgtgacgcataatcacgaagcactgctccagaattcttgtaatgtttcacggcagatttttgtgataatttttttcactgatttcttttatctctacgcatatgcattatttgtttaagctcaaggccttatcgaaaaaattgtcaataaa

SEQ ID NO: 65249 - DNA, 273 bp, Heterodera glycines
atggcaatccttttaaaacccacaaaattgcccatgcctttcggtgtgacaatgacgcaattttggccaattgccccgggctttcttgggatttatttggtagcttttaaagaaataaaaaaggaaggcatagaatttgtcatcgctgcattaattaattcatcctcagcttccaaatgcgcatttatttcagtgtcggcactttcgaattgttcgaattgctctcgagactcattagctctttacactctgactaatgagtcttttttttaa

SEQ ID NO: 65250 - DNA, 755 bp, Heterodera glycines
attaattgaaaatattgatttgtattccggttattcttccgtaaaaaatgacgccaccttagccattatgcctagaaaaaagagctctttcgaatggtaccttcaaatcaaaaaacgactgtcagggagctgagctgcagaaaaaaattccaagccaaggccaagccactatagcagtatagtgtcaaaaattaattgaaaatattgatttgtattccggttattcttccgtaaaaaatgacgccaccttagccattaggcctagaaaaaagagctctttcgaatggtaccttcaaatcaaaaaacgactgtcaggaagctgagctacagaaaaaaattccaagccaaggccaagccactatagcagtatagtgccaaaaattaattgaaaatattaatttgtattccggttattcttccgtaaaaaatgacgccaccttagccattaggcctagaaaaagagctctttcgaatggtaccttcaaatcaaaaaacgactgtcagggagctgagctacagaaaaaaattccaagccaaggccaagccactatagcagtatagtgtcaaaaattaattgaaaatattgatttgtattccggttattcttccgtaaaaaatgacgccaccttagccattaggcctagaaaaaagagctctttcgaatggtaccttcaaatcaaaaaacgactgtcaggaagctgagctacagaaaaaaattccaagccaaggccaagccactatagcagtatagtgcc

SEQ ID NO: 65251 - DNA, 2503 bp, Heterodera glycines
atgactgatcagtctctacaggtgttaagcaatataaagcgatcaggaaatgtttgtgcttagagtaatatgagaggatgagcaaagtgatcggatgggaggagagtcgaacatagagcccggtgcgggattttgcggatcccattccgcaatcccgcaagctcaattcgtccacgggaaatagatgaagtggcaaaaaatttcttgagtttataattttggaacggagcatatacctagatgtaaataaaaagtaaatgactaaattatgagtacataagtatttgtttttcattggattattatgttgtactatatgtgtcagggctgttccgggtgacccgaatcccccgacatttttccgtcccgaaacctgaaacccgacccgatatttttctcgtcccgaaacaattggataaatatggtaaaaaactcgttttagaagaaaaaaaagcaatttcttgagaaaatcgaccaaaaatcgaaattttccatttttttgcttatttttgacataccaattttttaagaaaaattaaatttcatcaattttttcgacaaattctgctaaaaaaatgactttttcagaaattttttcggtctttaggggtcaaaaaggccaattagctgatgagggccgttctaatagaggttaaaaatatggaaaatatggatatggaaagtcatcctagaagcttcaaaacaggctaaaaacatgtttttcttgcgtttcaggcctcccacagtccaggaaaaaaatatggatttccatataatttacaaactctagtaataataaacaaagagggaaacaaactaaattttaaattattaacttttatttattttttaattttttgtgtccgaattatgctcaaataaagacgataataaaaaacattggaaaagagaaataattcaaaaaatgtttctgttatttgaatgttattattattattatattttatatttgttcaaaatttccgacttaaatacccgcaaattttttgggcctcgaaatgatgctattatccctacagctgaacaccagcagatcaaaatttaatctatgatttttccttgacctgtaaaagaaaagtcggggaacagaggtaacaaatttcctgacaagatttgtcagtatggcttgagaaatttaaaaaatataggtgagcaaaatgcttgtcccgaacaaattaacttaaatcataaaaaaaaatttaatttttttttgtcttggatggcacaactgtactgacacaaaatcgccaccctcgagatgtgccactgtattagacacgttaagttaaaaaaatgatgatttttgaaaataattttgatgcttttccaaccaattgaataaccttggtgtatcatttgaaagctcttggaaagaaggaaaatattaatcatagggcccaaactcaaaaacacacaaaaacacttttaggttttcttatgcgctgaaaacgattaagcaatccaaagtttttaagcactatttaactttaaaccggtttttgaaagagttcaaactacggagaaatgtacaaattgggctctcctaaccatttaaaagggtcaaagccgggcaaatttggtatcaatcggcagctcttgatgagttacatttaaaaccaatgaataaagtctcaaagttaaaaaataacaattttgtgcataaaagaataaaaattaacttatttcttcggtactgaaaaatctattttcactgggactcagttgtctcggtgatcagatggcatcagatacttttattgggtcaaattattaagacagatttgacggatttaaattagctaagcaaattgaaaaacagaataagtgaaattattcagaacacataaagcaaaagaaattgcggaatgctgagatcttggcaaatcccatgcccgtctcttaataagattatgaataaatatattttttattaatttcaggggagggtgggaggctttaagagagagagagagaatggctttgaatggctcttcaaatggttcttttataggctcttccaacggggcggaggcgttcctggcacggatgagcggcagaagacagaagaacaaccaagagatcaatggagcaaaattggagaatactttttttatgggataaatggggaaaggcggagattaagggggaggggtcacgggaaaggtggaaaaaacggcaaaattcctttggaacgaacgatttgatccggctccaaagttggcaaaagatttcttttgaaaaagatttattggtgatcattgatcaacagcagtgtccagttttatatcctaaaaaccttgtgtgccaaaaaacatcgccacaccacctgaaagctctcctttgttttaattgtgaattttttaatcccgaaaccggtccggatcaaagttctcttatccttacttatccggaattttcaagagtcggctcttgttaacatcaatataatccaaattttttatttaatataaagaaaaataaa

SEQ ID NO: 65252 - DNA, 1934 bp, Heterodera glycines
atgaacacttccgatgtttttgaggcaatgttccgttttgactcccaaaatggaaaagcggaaaatggtattaatattaatgatgtaaaattgggaaatccaattagtctgctaatttccctaattaatttaattagcctcagctaattgtcctgttgtggaggtccccgacattgaaccaacaacgttcaaacttatgttgaagtacatatacgtggctgattttagcgaattaaacggagaaaatgcaatggcagtgctttatgccggtggatttatttttaaattaaattaaataaataaaaaataataatttttaattagcaaaaaagtacaacatccccgccctggtcgaccgatctttgcaaattcccatctccgaattgcgcaatgttttcatggcttatgcctatgcttgccttttcgaattgaaggttggaaggacagatttaaattcatattttaatatatatccccctaatttaaaaggatcatcagtgtttttttgtataatttttgataatttaattatattttttaaggattttgccaacaaatgtctgtcttatatttgtcaaaatgcagcccatttgttcaagtcagatgactttttggaaattgatcagaaaatcttttgtgtgcttctcgatcttgatcgtttgttgctaagcaatgaatttgaaatttggaaaactgtaatttcgactttttctttttttcatttgcattataattttcgttttttttcaaatttaggcactccgttgggccgatgaaaaatgtcgtcagaatggcattgaatgctcctcggataatcgtcgttctgtacttggtccggcattgttcaaaattcgttttccaaatatccctgaggaggatttttcaaaattcgttggtaatcggacaataaaaatttgaattttcttttggggcatataaatttttacattttttttttaaatttttcagttccatccggtctgttaacagtggaagaagtgtttggcgtttatcagttcaattcccatccgaatctttatcttcgtggagtgcccgagctgtactcgttgaaattcccaagccatggacgaatttctgattggaacacagccaagcgcaacggaagagggacactggcgttggaaattgaaaaagtgtcggaatttgcgggagagtctgtcgggggttaccgatgcagtgataccgtatacatcaacggattggcatggaatattcaagcagaaatcagggaaggcactgctgctgatgatgagaagaaatatttgggatttttcttatggtatgagcgaacaaaacacggtacaacaattttaattaataattaaaaattaaagaaaaattaatatttgttttttacaaataatagaaaaacctttgaactgccttttttcggcaacatttcgaattgtgtcggaaaagagcgaaacggagaattccattgggacactttgtgattataacaatcaaatgaacagcagttggggatttggaaatttcattagctttgaggtgagtgccaaattgtttccttaattaatattaattaataattatggctaattaaggaagtggtcaacccgatcaatggttattataacagagaagaggacaaagtgacactgaccattgatgtcatgactgttgatgaaccaaaaatggacaaattcattttgggtcaaaacaaatcgacagggacactttttatggaaattgaaaaagcgtcggaatttgggcgagaagtctttggaagtgatcgaaaaagtgaaactgtgcacatcaacggattgccatggaaaatattggcaaaaattcaaacgaaaaatggaagcgttgacaatgagaaatggttgggcatttacctttcgtgcggtgctccagaaaaaggtgtaaatgaactaccaattattgcctaa

SEQ ID NO: 65253 - DNA, 633 bp, Heterodera glycines
atgatattacctgataacatattattcattaccctaattaaaaaattttttagaagagctggtcgaacggatctgtacggatttgaatttgtgggaaaaatgttaggtttgtccttaaaagtggttacgaaaaatttgaattattttatttgctaaaattgccgctaaaaaacatttactttctatatttctgttgtttctataaaaattatcttaaaaaattgttatggaagcgctacgaaaatattgaaaagattttgaatccgaccaaattttgacaaaatatttggcgactggtgggtcaaaaatgaaagagaagaaagtttaataaaaattgaacaaaacgcacaaaatgattattcaacagttgatcagagtggtgaagaaatcgaaagcgacccaattgatcaatttactgataactctgatcaaaacattgccaaaagagaaggaggaaaatgacgaacaaaaaagtgaaataattcaaaaatttgataaaattaaagaaaagttaagagaaatgggaaaatggaaaagaaaaaatccaactaaattgagaggaaaattggaaaattattaggcacaagtcgccataaaatatacaaatggaaaaacgaattaaatttaaataaa

SEQ ID NO: 65254 - DNA, 600 bp, Heterodera glycines
atgcctataacaaatctgacgtccatttcgaattgcgaattcgataaaaggtgtaaatgtgagttaagttaaaaggcaattttcgattttttgttcacggataataacgataattcctttgccaaaagttggtgtttgttgtttattgaaaatgatcggccatcataaacaaataacaagtcaacacaccacacaccatcccaaaaacgagagatgaaccaataaatagagaacatagagaaaaatacgtctctcactttagcgtactatttctttactctgctaacctttttctgataggcctaactaaaattttcaagaaaaattttcctaaccccctaggaatttttttcgaaaatttccccgattacaagccatttttggcttttcaggtcaccatgaaggagtgatttgatcaagttggtgtaagagacttttttgatcagtatcaaaagttagcttagcagaaattttttcagaatattttgcctacttggaattgaaattttggcgattaactattttgttcatttacttttgcacctgactgtatttaattataaaattatattatcaagacattacagtataatttttgta

SEQ ID NO: 65255 - DNA, 396 bp, Heterodera glycines
atgaaatttgaccaatttgcgctcgtgatttttctcgacaaaaccgaccaaagcaagttcgaccagagaagagaaaatgaaagagacgcagacaaagaaccaaagatcaattgcctgaggcaaatttggccatttttggaggaattcaaaaataagagagactttgacgaacgaaacgcggggcaaatttttcacgacatttccgaattggaaagtcaatgccatgagactgaagtgaaacaaaatgatggaaaacggaacggcaaacgaacggagaacgaacgacctggacacgccgagagtgatccgggcggggagtgcacgactgtccagccaaaaggcgatccagctgacacaggggggataaaacaaacccatttaaatcatttggataag

SEQ ID NO: 65256 - DNA, 1367 bp, Heterodera glycines
gatgcgtacaccctgaatttgtcggattgggcttttcaggcgcttgggatcagctgaaagtcacttttcacttcaaacgcctctacggttattatgtgctccaaatgtacctccccacttatttgtccgtctttatcaggtgggccaattcgaatgggtcaatcatgataaattataacattctaaatttaaaaagatatggcaaattactcaaaaaataattattttctggccttgagctatcttaaaatctcaataatttttgattgattgacaacaaaaagttcttttccaaaacacaggcggttttttgggatgacaagcaaaagaagaataataaaatttaataataaagaaaatttataaatttatttactggtagagactaccggtttctcttatattcaacaattaacaattagttatttttgggttaaacctgttttcttttagtttacgggtggcgcgtccgttaaaaaaagccgggggttagccgccccctccccgtaaccaattttgactaatcccttaatccaccttatccaaatgatttaaatgggtttgttttatcccccctgtgtcagctggatcgccttttggctggacagtcgtgcactccccgcccggatcactctcggcgtgtccaggtcgttcgttctccgttcgtttgccgttccgttttccatcattttgtttcacttcagtctcatggcattgactttccaattcggaaatgtcgtgaaaaatttgccccgcgtttcgttcgtcaaagtctctcttatttttgaattcctccaaaaatggccaaatttgcctcaggcaattgatctttggttctttgtctgcgtctctttcattttctcttctctggtcgaacttgctttggtcggttttgtcgagaaaaatcacgagcgcaaattggtcaaatttcatcgggaaaggctaagccgacgcaatccgcacaaacattcgacaaggcatttcccttttttggaattttaaaatttcatttttaagctccaaaccgcgaaattctctcgctctccctaccacaacacttaacaataattcacaaaatgacgatcaaattagaaatggcgaagttgtgagaagcggatcactgctcaaaagggtgtacagtcggcgttacagtttgctaaggcatagggccagaaggtaatcgtactgtaatagacgtactgtcattctttgcggcatactgtatgcaccacttgttcctttaaagaagcttgatctacgacgatgatgaagcgtatatgcactggcgaacgcccaccgagctgagcaaccgcgtggacgcagtcgccgcgcggcttttcccggcgttatttgctttatttaatggt

SEQ ID NO: 65257 - DNA, 304 bp, Heterodera glycines; identical to SEQ ID NO: 51570

SEQ ID NO: 65258 - DNA, 234 bp, Heterodera glycines
gtataaaatttctcaaaaaaagagatagccatttttctgggataacgtatatatataaaaatcctctcaaaaataaaatggcgattgtgcacagccctccgtctcatacgcaagcgcttttgtgaggtataaaatttctcaaaaaaagagatagccatttttctgggatagagtataaatttaaaaattccctcaaaaataaaaggtctattgcgcaccgccctccctatcatg

SEQ ID NO: 65259 - DNA, 222 bp, Heterodera glycines
atgccaatgtcatcaaaagctttttcgacattttatatagggaaaggtgcacaaaaattaaatttaaattgcagttacagaggaatttgtacgaaatgagcatttcccgtgcattgtgaaggaatggagtgaaaagggcagatatgttgagcacttacggcgaaattcgtgcatttcgtaggtaaatttttaaaataattaaaaattttatatttaaataaa

SEQ ID NO: 65260 - DNA, 128 bp, Heterodera glycines
atggagattatgacatccaaaacattaaacgagccaacctcatttaatgttaacggacgagttcatcgaccggaagacggagcagagcaaaaccaccaaacgatgcacggagcagcggatgcgtctaa

SEQ ID NO: 65261 - DNA, 250 bp, Heterodera glycines
cagtgatgcagggcagtgagtcatcaccaagactaaagctgtacttttctcaacaattcagtgactgatggggttgtgatgacggctgatgaaactgaaatttcgcaacagacttggcgcccacagtagaaaagaatgattgacaaatgtgcaataattttaacatccataagttaatagtttccggattatgaactatggactgtctcgtaattattgtcgttttttgataaagtgaaaaattcaaaaa

SEQ ID NO: 65262 - DNA, 1495 bp, Heterodera glycines
atggcactactcatcaacggcaccgacaaacactacgacaacgcgtacagagaggacagttatatcactctgcaggtgggcatcagaagcagggccatgtgggcaaagcaggccacttagtggtgcctaattatgctaatgagctaactgactgacataattagaactgatcattaccgttaactgagtgtttccgtttttaatggtccattttaggaattgcaagacactttggctggaacagtgagcaaattgtccaaatggcctattctctttgagtcttttcagattaattggccaagatatctgaaaaatattttgccaaacgaagtgattagccgaaggtattccgaagcaattggaacagtcaaagtgcgaattgcggaagttcaactgattaaagttggagccaacttggcaactcaactcgcacaaaatgaaatgttttcagaaattcgaaaaattggcacggagtctgtcgggacaaatactcagtgattacatggattggaaagtgatcctcagcggaattggccacttggacaaccgctttttggaggctcaatttgtgcgcatggcttcttcccatttgtacaattgttttttaaaccatttaaggaattggaccgcgttttgcaaggatctttggcacgtcccgcccaatggaaagaatgcaaaaacgttgtgctcggcttcttccccgctctgatcgaaagaggcgatttgacaatctttttttggcatttctttcccttttatggtcacttcactttcagtttatattcaccggcatttggaagtgaatgcaaccaaaacgcagttgaaggaaatgttcgaagatgtgaagacgtccttccaccaaatgctcgaccttaatttgtggatggagcccaaaacgaagtcggaggcattcgaaaaggtcaaaagggtgccatggaggggaggggagactgagcattggcactttggcatgccattatttgccaattcaatcaaaatgccaatggtttgttcaacttcagcttgagagactcaatgttttgatcgaatacatggacgccatttttaatgaaacgaaactaaaaaatcatttcaaagaggtcggtcgttctttacaattgccaatcccccccccccaaaaaatgcgtttcctctcgagtacgacgtgcacgaaaggacagactttccccgaaatggccttttctttgtccaaactgatgaaccgcaaaagtttcctgcaactgctcgagcccgttgaagtggaattcagcagtttggtgatcaatgggttttattacccaattaaaaattcaattggtcagtctttccatcccttttatttgctgagttaatttactcatttcagttcttaccggaggaatccttcaggttacaaccaattccagcaccattttaattttttttttttattatttgacaatttaagggcgtttttttcaattcctcccgaccgatgtaaaacccataaaataaa

SEQ ID NO: 65263 - DNA, 829 bp, Heterodera glycines
atggccaatttggacagattggaggccaaaaatgtgaccattttcatcccggaacttcacttctcttcccaaaacggagtcattgaaatgagcagcttcaacatcactgccgacttcctggaagtgaactcagcagaaggtgggcataagtcagacaaggcgcagcggaattggggcattttccgaattttaatcgctttaaatgagtcgattaaaacattgcttaataaatacaaaattacggatgctatgtttaaactctctgcttggtctgtccctcccaattaccgtcgtttgtattttcacccatcctccgtaggtggtgatcagcaacgagccgactcttcgccgaagacaccgccgcttctgccttttgcaaatgaacccttctcgtcaccgagttcttcgttcggttcgaatctgttcgaataccccgaactcgttgcatcgctaaatctgagtttaaacccgtgcgataatttctatgaattcgtttgcgatggatggatgaagtcgaatccgatcgacgaggacaagacgagtgccaaccaattccaactgatcaacaatttgatcgaggacagagtgaagggtcggtcagctcattgccaacaattcgacttttcttcgattattgtgtattgttcagcgattttggacgaccgtgctcatttccatgctcttcccccctacgatcggatgatgttcgccatgttcgatgcttgcatggtcacaattgtctcccccttttgttgaccctttcgcttttccttcaggacaatgtcagtcgccgtgtggcgggcagcaacattctgctgaaaacattaaa

SEQ ID NO: 65264 - DNA, 179 bp, Heterodera glycines
  unsure (1)..(179): unsure at all n locations
ttacgcatcggcaacacncaacggcccttaatggcgcgagtcgatgtcacgaggggaatcacttacgaccttttgaaggccatttcctcttcatgcaacaacaacaaacggggcgatagtaataaataattgtttttgctcaatttccatttgcctttttgtgttttaaaattttactt

SEQ ID NO: 65265 - DNA, 297 bp, Heterodera glycines
atgccgttatcttcgcccgccgatgccattgcaattgtcgcatttgtgttgaagccgacgccatacattgaagaatttttgcaccgtttgtctttgttggaatatccggacaaaaacagtcgtgtcaatctgcgcatttacaacaaccaaatgtacaaaaaacgacactttgaaacttgggcaaaacggcgaagcggaaaaaaaaagacgatttgggattgtgcaaattttgaatggcacggcaaggggcaaaccaaaattccagcggaagcaggggcagtgaaatttgaaatataa

SEQ ID NO: 65266 - DNA, 208 bp, Heterodera glycines
atttctccacaagtccgacaaaaacagcgaagattttgtcatggtaactaacaaatacatttttgttccttttaaattaccatttttttcctgtacagcttgaaaattttctgtacaacaccaacccgctcattttgcatggcaatgggccgtccaagtcgcaactgaacgtgctggagaattacttgactcgtggcaaaatttatca

SEQ ID NO: 65267 - DNA, 159 bp, Heterodera glycines; identical to SEQ ID NO: 53078

SEQ ID NO: 65268 - DNA, 885 bp, Heterodera glycines
atggaaatggaacagaaaaagcaagagggtaagggaaaagagtgaacaacggttactgtacctaccataatatacctaataattattactatattaaatattattttcgcttaagaaattcaaaagattaaatacattaaaattaattaataatttttagttagtacagacaaaatcgaacatttgcaaaatgaacagaaaagaaatattaatgcattggaaaaggagctgaaaaagaatcagatggaaatagttagttgaattttaattttaggcacttttaaatattatatttgaaatatccaaaatttaatttagataaatatagttgaattttaatttaggcacttttaaagttccgacaaaattgttgggatgccaacaatagtcataataacatcgacataattgatgacaaatgtttggcggtcaatcataaggaaaatgaatgtaacttttataaattttaatttataaattattattttttttaattaagccgagttttgcaaaatcttcgctacccatccaattttatttgacaaggatttctccaagattttttactttgaaattgaaatcaaaaagatgcaaaagtaacagtaatataatacataataaaaatgtttatttttttcttatttttaaaattatttagttcctttgacaatttcctctccttcggattcagcaccaaacaacagaaaaacgttgacgaaataaacacttattcatattgtaatcacggcttttttatcattaacgccgaatatcattatcaagaagctcaacaagatgattccttcaaagaaaatgatgttgtcggatgtggcattaattcggccacccgacaggttttcttcaccaaaaatggacggcgtcagg

SEQ ID NO: 65269 - DNA, 549 bp, Heterodera glycines
atgatacgcattttgtgctctttccaacaaccactggtcggtctggacgtattaaaccccgaagaaatggtcagttttcatccctttcttttgtattattacgctgtttttctattatttcagatcactcctggccttgaccgcgaattggtgcaggacatgttccgttcattgagcatgttgcacctgcaacagcagttattggcaacgaagagcaaaagcggaggaagtaggtcagtggaacgaccgacaaaggcactgttccctccgaacgattcgatggcgcagagtgacgaactcagcgaaagagttactaatctgatggaaaccctacggccaatgctcacccaagcattggcaaattgttttttggattaatatcgttgtatcatgttcgtttgaaataacttttttgaagtttttcaaattaccgcttggaattgtcatgcaaagacaaggcttacaatgagaaaataactttaatcaaacagaggacataccgagttttttcaaaaagacaatccaagtcaaacccaatctttaagaaaa

SEQ ID NO: 65270 - DNA, 185 bp, Heterodera glycines
atgaatggaggagtggcagcaggcggaggtggaggaggaggagctggaggtggcggtggtggtgggggaggagtaggaaacggaggaggagcagcaaatggtggaggagcaggaaatggaggagggaatggcggaggagcgggatcagggggaggatttggaggaggatctggaaatggacaagg

SEQ ID NO: 65271 - DNA, 310 bp, Heterodera glycines
tttggtaaaacttttaattaacaaaagaatggcagaaaattattttctttttttagtgcgtccataaactgtttgagcgttaagcagaacaaatatatactatttataaagattaaaaccatttcgagcaagcaattggattggcctatttatgtgtgtctcacagtgaacccaggttaagctgaccaaacaaaaagtttctttttttatcctcattcaatgatttagcaaaattttattatacccaaacaaaaaatatttttaattattttctttgacagaagatcagtcactttctttatttagtcga

SEQ ID NO: 65272 - DNA, 680 bp, Heterodera glycines
  unsure (1)..(680): unsure at all n locations
atgaacggaaactgtaccgatcncagctacatgaagacgtgtcttgacccggtcagcaagcagtacactaactcattagcaatcataagtttccattacagaattacaacactctgtccatgtccaaatgctgcatcacttgcacaaaagtgcgcaccgcagtcactgccagcctcaacatttccatttcgttcagtagcagcagcagtagcagcttgcaaactcagaatggaaagtgattgccgatgagatattaaaattcgcttcctctttttatgggttgaaaaatttaaacaatttgacttttattcctatatttaatttgtttcaacagtattgatgtgtgtcattatattttttgacagaagtatgttatcttataaacgcagttcgatatatatatatatattttttataaaaacatatgtctggcatttttttgagtcaggtatcatatttagttgatttttttgaatttttcatgattaaaactccaaggaggcataattattttttattgaagaaatccattaattaatatttcttttaaaattacataataattattttcccagttaagctcataaattaataattttttacttatttgtaaaaactattcttgcttagattctatttataagaaatacttggaaacataaaactttcgactaaataaa

SEQ ID NO: 65273 - DNA, 395 bp, Heterodera glycines
aggaaacggaggaggaaaaggaaacggaggtggaaaaggaaacggaggtggagacggaggaggacgcggaaacggagggggaggaggaaacgaaggaggaggaataggaaatggaggaggaagcggaaacggagggggaggaggagaaggtggtggtgcaggaagaggaactggaagtggtgacggaggaggaggaggagacggaggaggaaacggaggaggaaaaggaaacggaggaggaataggaaacggaggaggagacggaggaggaataggaaacggaggaggaaaaggaaacggaggaggagacggaggaggaataggaaacggaggaggaagcggaaacggagggggaggaggagaaagtggtggtgcaggaaaaggaactggaagtg

SEQ ID NO: 65274 - DNA, 1036 bp, Heterodera glycines
atggcgaacattttgctgtcccacactttcgagtccatgcccttcaatggggtggacgaactgctccaaatccttggcgacatcatcaacggattcaatgtgccgctgaaggaggagcatcgacagtttctgtttcgagttctgcttccattacacaaatcacccgcgctgccaatgtttttctccaagttggcatattgtgtgatgcttttcgttgaaaaggacgcctcattggctaaacccgcgataaaatcactgctacggaattggccatcaaaaagtggcatcagagaagtgggcaaaatgaaagtgacaccggcgaaaatagttacactttcagattctgttcatcaccgagttggatgaaattttgagccaagttggtgaggaccaattccgagcaattatgaagccattagttggccgattggttcgatgtacgaccagtcaaaatgcacgagtatggaaattgtcgacttggcatttaaaatggataataatgtttcagctggcagaaagagcactccttctctggaagagcccgaaaatgttgacatttctcaaggacaatcaacttgcattccctgaggccattcgggccattgacaaagcacagagacattggagcagtggggtcattgcaatggtcagtcaatttttgggcatttaagcagaatgccaatcaaacaaaaaaaacagtcggccaaaacgatggatgcgctgcgaatggcactgacagaagcgggacaaacagcaacagaggaggtagggagaagaaaaagcggaaggaatttgagggaggaacaaaaattggaagaggaagagagcgatctcatcagaaatgacaaatattaattaataattattattgacgctgctttcttttttgaaacaattttttataaagttcacgaaaaatgtgaaccaaatttttaattttgttttgcagaaaatgacaatttgtttgagtgctccttattcttcaagtcgtcaccagtttaagctaattcagcagaagttccaatctctgaaataa

SEQ ID NO: 65275 - DNA, 1357 bp, Heterodera glycines
atggcaaattttggacacaaaatcaaaaagtgccaaaaatttcttcttttgtatactgcgcttggtgtgtacagaaagggaatttcaaaaaaaaaaaaaattacagtattcgggtaccgtactctatttttgcattttccgccaatttttttgtttaccgtcaatgcgatgcattcggagaatggccgcctttgcctcggccatccgtcggcattggaccaagaagcggggcgactcgctgaggaagtacagaattggcacgcatggggtggcaaaagcggcggaaacgcgttgcaatgtgcgccagtcgtgcgcaaagtaagccatgatggcgaacagcacaaaattgggtgacctgtgtgcaaatttgatgaattcatcaattggttttgcccatttgtctgtattggatggacacggacaattgatcaaattgacatttgccatgggtaccaaccaaccaggcacgtaacaaatttttaagaaaaactgggcaaatttttttttaaaattgtaagcatttttcataaaaagtgcgttaaaatttccaataaaagattttcctggcggcaacaaacggcaccgacccaattttaccatatttttgatcataaaaaattttttcggactatcgcggcctgacgggtacccaattgctcacattactggactaattgatcagttaacactttgttgtgttgaatgttgaattatagaaattagtaaccataaccatagacaaatgatcaattgtctgattgaataaaatggacaatccatccagagacattttgtcataaaatttcttaaaaaatttctcctaccaagtgatcaagttggccaagcagaagcgatgcttttttgggtaatgttccgatgtaaaaacgaccaaggtgaccttgaaaaatgggaaatttgcatgatttctccagaaaaaattctttttttttgggtttaccatagttccagcgttgaaaaaattgacaaaaaatcggacaatggtaaatgaaagcaaatcgaaggtgaacgaagtggcaaccatcgacaaaatgcacaaaatcagcgcaatcaacatgattttgcgacgtccgtatgagtctgacaaatagccgaacagcatggagccgaaaatgacgccaatcatcgaaaataataaaaaaaaatttgtcaattggaaattttatagtaagacaaattattaaataaattattaaatgattttatttttacaaaaataatgatataaaaatgtaattaattatatcaggggttctatctgttcttatctgtaagaaatgctctgattttggagggtagtgacacagtttggttctgatttattgaaattactaataaa

SEQ ID NO: 65276 - DNA, 90 bp, Heterodera glycines
atgggagcaaaatccaccgcagaattaggtacagactatagggaagctattccggaaggattcggtctccccataaatctgggcgcatcg

SEQ ID NO: 65277 - DNA, 1005 bp, Heterodera glycines
atggtgccaaaaccgccggagggagtggcggaaaaagagcgaattggcacgaacgaagagaggggggaaacggaatcaacggacaatggaaataacggacaaatgcatctgaatgcatttaaagggcagagaaaagtgatcggagaaggggcgggtggaagtgatcagctggacattccgacattgagcgaaagaacggacgaattgagagaagagaagcagacggaagcggagagtcagacgacagaagagagacagacgcgtgcagagaaacatacaaaagtgccatttgaggaagagggaaagacacaaccgaaaacagcggaagaagcaaagtcgagaactgatcaaagagacacgggagtccaattagtcgacgaaggggcgagaagcagagatttggaaaagcctaaagaaacggcatcgaaagtgtcatccccaatgaaaagaatggccgtgcaagaaaatagttgggaattccataaaaagtttgcggaaagacttgtgaataaaacggcaaaagatgaggaggaaatgggcacagatgaaaagagaaaggaggaggaggaagaagagaaaagaagtgagagggaggaggaaaaggaggaagagagtgtaacaacggaagagagccaacagagagagaggagggagagacaatcgaatttaaacacaacgccagcatttggggaagtgtttaaggggagaaacgatcaacaacaattggaagaggaagaagagaaagagggagaggaggaagaaggagtatgggaagacaaacagaaagagaaatgggtgggacggagagacgaggagtcagagccgaaatgcgaggaaaggccaaaagagggacacatggcacaaatgccggcggagattgaagtggaggaggagaaccccgccgaaatgttcgattctccaccgctcgacgaaatgacaacggacgaatcgagcagttcggcgggcgaagaaacgccgattgtggtgagacgagaacggatatga

SEQ ID NO: 65278 - DNA, 745 bp, Heterodera glycines
  unsure (1)..(745): unsure at all n locations
taaagtatcagcctaaatagggaagctattcccgaaggattcggtctccccataaatctgggcgcatcggttcggggggactgccccgaaaacaaaaaaatcgattttttcaagtgtccgtttggggtactcaaacaattatggggagcaaaaatccaacgcagaattaaagtacaggctatagggaagctattcccgaaggattcggtctccccataaatctgggcgcatcggttcgggggtactgccccgaaaacaaaaaaatcgattttttcaagtgtccgtttggggtactcaaacaattatggggagcaaaaatccaacgcagaattaaagtacagactatagggaagctattcccgaaggattcggtctccccataaatctgggcgcatcggttcagggggactgccccgaaaacccaaagaaaaattttttggataaaaattatttaaatgaactgactagataatatttaaaataggttatttctcttcctttcagtatccctgcaaagtttggtgcgcttctgatcagtttctgaaaaaaaagttaagcctaaactttttggcctgtttaaaaaggaattaaaaatttttaaaaattttattcatctccctttttgatagaaaaagcatcagagtgcctaaactaacatgtaaataaaatttggtgcgtttcagaacccttctgaaaaaatatttaagaattaattttgncaaaaatanataattaatgaaaaagt

SEQ ID NO: 65279 - DNA, 1039 bp, Heterodera glycines
atgtcacgatgctcttcagttcagtcaagcgggcccgagttcagctcgaatgtgtccgttgaatcagcgatttttgacgacaatgagaagatggagcaggatcagaacgagggaaaagcatcggatgacaaagacagaacgatggttgcaaacggcgaagggatggacacggcaatagtcaaggaggagggggcgacgacgagcaatgggtgagtgggacgggagacaaccaaaccggcggaataagtgcgtttaatttcagcttcaaattggagttgagacaacaacggcagaacgctcacagccaacagcagctgaacgtgccgctccacctgaattccagcgacccctctctcagtgacatggccaagccattggcaaatttgcagcatcagtccgcttttcagacgagccccgccttcccatttccgttcggccagaactcttttattcagccgcccttcaatcgcttcttttgaaggacgaaaatgagcctttttggaatactcacttctatcaattgactaaacgacacccaatttgcttttgcctatttattattctccatttcactttctttgtcaaaatattgcgggcctttcttttgagtctctttttaatttatatttccatttatcaaaagcctcagacactcacgggaacccatttctctttgtaccttctttctccatttgacctcccatttttgccagcaggtcttttcgttgttcagcttttactcatataatcaaatttgtttttatttatttattttctctatttcacttcataggcattccaaaatcttacctttaaggttgctcataacggttttttcacccgtattttttcaaaattagacgaagaacgaacataactgaatataaaactaaaaaacacaatatctttggaattcttaatccagtatgaatccaattttgggaccataatcaaattttgtacttcagttaattataaaattctcataaaatcccaccactctgctcgaaatatgcgtttgcgcttccctcaaatctaa

SEQ ID NO: 65280 - DNA, 1072 bp, Heterodera glycines
atggccgaggccattgagaagctccgcctcagtgtcgtacagctgaaaaacaacggcacacagaagcgacaggagtgtgccaaactgtcccaggccatcgcgtcggtcggcggagagggaactgcgaacgctgggacaaaccacgcaaatgtggggggtgggggttacggaaaaaataaaggttttttggaattggattttttgggctgtccctcccccgttttctgtcccattctatcggcctaatttagcattgacaagctgactgcggatattgtgaagtgtgagtcgcagttgaagcagctcagcgacttctctctgtaggacgacgtgtggaaaatgctgcagggcattcatgtaattaattgaccaacgacaattgattacaggaaaccccagttttactgactctgcctaactctgattacctttttcaagacggacctgaacacattgcgcatggacatggtggagttggccagcagtgccggggacgagggcaccgtcggcaaagccaacgcactgttggaacgtgcgggcgacaaattggacctgtccatggagcacattggaacattaaagcgtcgggtacagctcagcaaccaggtggaaaatggcattactgactgacattaaattggctttttggcactttcagttggccgagttcaaagactgtcgggcgaacgccagcgaaaaagtaattcaaatggagacaattcgggagagcatcggtgacaaggcggagcaggtcaaacagttggagcagctgatcgccgccaccggtcgcgaattgcctgagacggaacgccaattgcgcgccatggaacgctcgaagaaggcaaaatgcgaaagtgctaaagcaatttggccgtttcttttcaaggagttggaaatgacggtgcagcaaaacttacgcaaaatgacgctcgacgtggacagcatcaacgcgacgctagacaaaatcaccgagatgggcgagtccaacgagcgcgaccgtttgagcatgttcgccacaccgacggactttcgtgaaatggtcacacacccttttggggataaaattaattaa

SEQ ID NO: 65281 - DNA, 679 bp, Heterodera glycines
atgaacccacaacaaatttggacgaggataaggtgggtaggcgcaatgggcactgattgggagagggaatcactttcattcattcataggcactttttgattttggtccaaaaatttcccatttttatggtttctcccctttttcggctaatctgtcctctgttctgtcgcgtttgtcaaacacattccgtttcatatggaaaacattggcgaaacgtggaaaagttgggtccaaatttgaaaaccgacgccgtcggcgggcggcggagcaatcggagcacaacgcatttactaggcggacgacttggactttgaggaggacgaaaatgcgaatgtaaaaagacgagaatttgcggcttttaaatggaacattttgtttgacagcaaaatgattgagggggaacagaacaatcgccgctccggcaacagagaagaggacgaaatggagctgaaccgctcgctgcaactgattgtcatcacttacgtccgtcggctcgtcgagcatttgcacttggcatgccgtcccgagtacatctacagcatggccaaggacgagaacggcgtgtcgcacatcaaagcgcaccgacaaatttcggccgccggcgacggggacgacgaattggaaatgtgtctacttgagccaaaaaattttgaaaaacactcaatctcatcacattga

SEQ ID NO: 65282 - DNA, 816 bp, Heterodera glycines
taattaaatccattccttcgggggaccgtgccgggtgccgcggggtaagcagtgctggttcgtttcatcacggcaccgaaccttttggctagtcagcaatcgttgcttaacttgccagatcggacgggtgcgcatgattccactgttccaagcaccccaccaaaagcaaaacgatataaccaaaatataaggaaaaattttttctccatcttcctttttgatactaaagcatcagagtgctaaaattaagttgtaaataaaattttggtgcactttagagcactttctgaaaaaaatatttatgaaacaaaaaaatcgattttttcaagtgtccgtttggggtactcaaacatttatggggagcaaaaatccaacgcagaattaaagtacaggctatagggaagctattcccgagggattcggtctccccataaatctgggcgcatcggttcggggggaatgccccgaaaacaaaaaatcgattttttcaagtgtccgtttggggtactcaaacaattatggggagcaaaaatccaacgcagaattaaagtacaggctatagggaagctattcccgaaggattcggtctccccataaatctgggcgcatcggttcggggggactgccccgaaaacaaaaaaatcgattttttcaagtgtccgtttggggtactcaaacaattatggggagcaaaaatccaacgcagaattaaagtacaggctatagggaagctattcccgaaggattcggtctccccataaatctgggcgcatcggttcggggggactgccccgaaaacaaaaaaatcgatttttt

SEQ ID NO: 65283 - DNA, 658 bp, Heterodera glycines
tgatgaaacggaaggacgggaaatgcgaatgaaagacaaatggaatttgtcagaatgccaaaaaaagttgggagagacttcggcagcgaattgttcggtttgccacaaccttcgaacggcggacaaagcccaatggaaatgtttttcaatttgtttggacgaaaaaaaagggaaacggtgcaggaaggaagaaagaaacggagcatcgaaaatttagccaatttggggaagccgggctcagagtttgtgacaaaaatggccgaacaagcaaaaaacgatgacaaacaggacgagaaggcggagatcaagcagtacctggagaagggagtggccactgcggaaggaaacaaaaaggcggagaaattggcctatgtttggtactcggaactgctgtattggacaaacaaatggatcgaggtggacactcccgccgaaccccaaaaatttagcacctttttaaggcattagaaaatcgggtgatgggagtcaaacccgaactggcacaacagttcgtattctcaaaaacgggaatggccgcttacagggagctgaaggaagaggtggacaaatgcgaggcgaagttggccaaactgaaggaatggatcggcgactatttcaagtgaaaatggagatgaccaaccatcccatccacacagcc

SEQ ID NO: 65284 - DNA, 96 bp, Heterodera glycines
atggtatttatttccactgcaaaatcactgcccctggtcacttacaatttcaatcagccaatccaactgcttcgacttctcaaaatgaacccgagg

SEQ ID NO: 65285 - DNA, 388 bp, Heterodera glycines; identical to SEQ ID NO: 51536

SEQ ID NO: 65286 - DNA, 641 bp, Heterodera glycines
atgttgctcctgctcctcctcctcctcgacatgttgctgctgctgctcctcctcctcctcctcgtcagagttcccctcgatgcgcactaccacctcctcaatgggcaatggaacccgggggaaaacctggtcctaaatcaaaaatttggctgttgccatgtcatgactcatcattaccaagggtaccctttctgcattgcgtagcccgaacacctcaaagttctcagggtgggcaccaccgacccgtgctatttcgctaaattcctgatgtttatttgctgattttcgccccaatttcctcacatttggcgtgctctcgttatgttgatggcaccggcaacagctgcatgggtatacacagcttccatcagacgagcgagggtatacccaatctataaaatgcatttcaattcttaaatccccgttctcgctaattttacatggctgagaacttcctcatctttgaggtactggtgatcggatgattggtacctaattaggtaccaaaatcgaacaacgccacagacggtgcattgcgccttgtcgtacaagaccaaagacgtcacatcatactcagtggtgccatcgtcctcttctgctcgatcgtcagcgtcctgatccgggtgtcgatgttggcacta

SEQ ID NO: 65287 - DNA, 2195 bp, Heterodera glycines
attaaatctcggtgcatatgtgtaagatttgcgatgggactggaggaaggggtgggggggggggcgcgtcagtgtccaaatgacacgcaaatcctgtgatttgttatattttcagaccgcttttttcggcgcgctttttctaaaaaacttttgagaactgatgggggcatggtggatccggcaaaatttttgaaaattagtgcaatttggtaaaagattttgtaaagaataacctattttgtgatttactagccattttttttaaagaaaattaaagttttgtcagcttcgacgtggaaaaattggaatttttgaaacgaaaaggatttgtcagctctgacggggtaaatatggaatttttaaactaattttcgagaaaaataatccaagttttcaaataattttcatttaaactttggatattcaaaaaagaaaatcgcttcaaaaaaattttctttataaaaattctgccccaaaaatgcgcggcgcgccgcgcataaaaaaatcccgcggtcacgcatcgcggattcaaattttcgcggtcgcggatcgcgcaaaaaagacgccgcgattcgcggatcgcgcaaaaaaaaacgccgcgattcgcggatcgcggtcgcgtcccagccctgataggcacagctggagaaatttttgaaaatttaatgcgatttgttaacagattttgtctaaaattgaccaattttgtaattttgagttaattttttaaaagaaaaaatagggtgaaggccatccggcggtgccgataggcgccgccgggaaaatttcacaaattttgaatgaaatttgcgataaattttaatatttaatttattcaaaaatatttggcattttgtccataaaatttttcaaaaaaatcaataaaatcccgcagaatcccgcacaaaaagtcaaatttgcggatcccgctgcgggattggaactcaaaattctttgcgggacgggatgtttatgcgagttttatgttttggtacgttcgttcattccttgcacttattctagccgaaattatttttttgtttcttacaggaataatcgaatcgttcgaagttaggctcgccttgctggtccctttccacgttttgttttttctcttcctttggacaatggttcaaacaatgatcgctcctaatgaaagacctccggacaatgtgcggcacacagtgcacattttgatcactttattgtttttcaattcaacattcccgcccaaattgatgaagaattgaagggcatcatcagaagcagagcatataacaccaaagaattctacgcaattattgaacgttatgtaatggatcagaaaattgagctcgcttgcagggcccaaaacggaggtggaactcattcattttggaattgaattggcatcattttgacacgtcgttttgttaagctattcgcttttgcatgcgatgcgcctgcattaagcccgacagatgccaccattgttccacctgtggacgttgctttctgtgagcatttaacattttctggttgttcctttcaggaagtacgaccatcattgcccatgggtgcgtttgtgatttccgtcggatacaatccattgactccttttcccttctatcagattaatgcctgcatccgtttcaacaactataaattctttgtgcagttcgttggctatgcttggcttctttccgtttttattttctccaccatttttccctttttatgttagtttcattttttccaatttttctaccagtaaaaccattttcctctaagtttagcacattttgggatgaagtttgccggattctcgtcacttttctcttcgttctgatgtttttgcttggcctttctctgactttctttttaacttgacatctttgtttgatatccaaaaatcgtacatctcttggtgaatttatgtgatcttttgatcatccctttcttctttattgaatcagaaatgatcgttggtccgccggtcttcacatatggcgaagacaagcgtgcctttgacttgggcattcgccgcaacttccacgaagtgtttggcaccgtcaaatggaaatggttttttcctctgtttagcaggtgagtttatttagataattttttatatgggtttttcgctgatgagtttgtttttcagccaaggtgatggcgtaagatttgagcgaagagaagaagttcaggcagttgct

SEQ ID NO: 65288 - DNA, 2261 bp, Heterodera glycines
cttatatattttaaaagccaaaaatggaattttcccaaacaactctcgaattagtatcgtttttagcacaaaaaaaattttgaaaatattttactgccctcaaaaacaccaaatttaagcatgaaatagggagtggtggcacaaattagttaatgaaggggccatttgggtacaaaagcgaacacacagaaagaaaaaaaagaaatgctagtgaagaaaacactttgttaaaaaaaacaatcattttaatggttattattaggattataaattatatgattttgcatatttttctgcaccaatttaatgcatcaataataaatgatggaagcagaatttgtaaatattaattaatgtaaaaaagaaaagaaaaatttttctaacccttgttgagcagcagtttttttggttacccgacatttgcggaccgacatttgcggatttttaaagccgacatttgcggacaaacacttttgcggatagaaacattttttttttcagttattaaacaccaaaaattaacaaaattttttatttaatttccctaatatcgattaacaaatcacgaattgtttaacaaataaacaactgtaagtatttcttttggagcgttgcgtacagcagcaaaactgacattccttcgatgtttttctttatgcgacttttgaaccattttcgccttaatcttttttatccaaccataaaggcaaatttcggttaaagatgtttttccggtaacgtcctccagataagcgaaaacagatcaggtttccgatcatttattgtgttgccccatgtgtattcaccgagttgaacggttatggggaagaatttgaaggctctacaataccgacttattaaaaaacagttttgatcgttgggatgattaaattcgaaaggaattaacattgattgagaaaatttttgttgataaaaaataatgaaaaaagctatccgcaaatgtcggtccgcaatataattcagccgaagaaaaaaaagaaattcagccatacagcggagcaaaacaaacaaaaatttcgcttcctaacctttttaaagtaaattagcgcaaaatgtccttaagtttaaaatcaaaatttgtagtgcgaacttatctttttttattttatcgatactatgacgaaaaatcaaaaaattatgggcctcaaaaaattgagatgcttccataaaattatcaaaaattttagttacctagcctaatacgaaaaaatactagaaaaattcaaaaagaaaatttcaaggaaattcaaggaaataaaatcgaccctgctctatccaatggtatataacacatatgcattttccgacttacagttcgggtggttcccttgttagattttcaaaaaagctaaaatacttttttttcttcaaattttttaattttttttgcggcgacgttatgtcccggcgacgttttgtcggcgatgttttgtcctgttccggagcccaccttaaatttttaactaaaaatatcttttttatgacttaaatttgttgaaaaacaggactgtggttacttttaaatagcttaattgaacattaaaaaagtatcacttaattttatagccgattttggcgtatccgccatcatgaagaacaacgagcgacgcgactcgttcatcggcacgccatattggatggcaccggaggtgatcatctgcgagacgttcaaggaccggccgtacgactgcagaggtcatcgtcgtctaatgtccttttttgggccactgttttccctattaaaaagggcacaaaaaactgtgcaaacactccaaattattaattaactttgtttaatagcgacagattttgcgtttgcgcaacgcgtggattgactagtcaatccgtgcacaaatctgaccaattcccacgagtcattggccttaaaccaaaaacatttcttattcttataattagttgccattaattaatgatattattatttggaccggaaacccctcactgattttgacaatatacagcactggttgaagcacacctgcttaattttaaattttttagctgacatttggtccctcggcatcacttgcattgaaatggcacagatggaacctcccaattacaatatgaatccaatgcgcgtggcgttcaaagtgcagaaatcagagcctccaaccctcgaacagccacacaaatggacgaccgaattcagcgactttctgcttaaatgtctcgtcaaaaaagtggacgaacggtggggcgcttcacaattgctaatg

SEQ ID NO: 65289 - DNA, 802 bp, Heterodera glycines
atgagaaggggaagaaaatcgacccgcgcaaggacctgtgtccacgaagccactcatggatggatattatggaaaacaaaagattgtagcgacacattcgaaatggtaagaggtcggaagaaaataaacaaacggtcataaccattgttaacgaaattcttaccccaaaaaatcaggctggaattttaacgatgacatttttagtttttacacattttttggtgcgctttaaaaaaatgggacgacactaggaaaaattgtatttggcgcctataggcaccgtcggacccactcccctccccgttccttaagtttggaattaattggattcacaaaaaatgtctcaagtccacaaaaaatgacatcatttcaatttttgtttcctatttattagctcaaagttcggaagaagccgggtcggttgaacaatggatattgctcatacttcacaacaaaatggtatacccggcctgaactcaaaggcaaattacttatgacgatgggaggacgggcaacggaagaagtcttgtgggcgttcaattggacatcattcggacagagctgatgcatggatactggcagataaggttagaatttgagtcaatgatgagaatttagcttcttttttcattggatattcaaattgctttaaagacctcgtgaaaagttcccggatttttcggggtcgcttaccacgaatctgatataattttgtcccgaacccaaaatcgaaaattcttttttaaatttaatttttggtccttgaaagttaggttaagcattcggaattggctttaataaa

SEQ ID NO: 65290 - DNA, 2020 bp, Heterodera glycines
aaaaaattaattagttaaaaaaacatttgaacctcgcgaggtacgcattaagcgcaaaccaaaccgaaatgagcaaaagggaacgaccatttttggacattccaaggcgaagaatgaggcgaaagaccactgcaacaagcaaaatcgtcaaataagccgaagaatggcatttgcaaattaattaattagttccaaattaacccgaatttatggcaaaagcccccagcacatttggaagtgattgacggaacaatttcagttcaatgtccgaattgtccattcttagtgcgcgcgaatagctaaagcatgcgatggcatttctcgccaattattccccattagcaaatggcacctgctcggctccagccaatggtcgagccaatggccgacactccgcgaggcattggtcgccagcaaaaatgccaaaagcgaatgggaaagccaaacgacgaagtaaaagcacaattcgacgccaccgattggataatttccgctgattttggaccacattttagcactttttgttgtcatttccatttagccgattattttaaaggcgaaaaccatgaattaatggcattgtttctcttttttgttgtgccgaattaataaaaccatccttaatgaattaattttctaaatcaataccattccgttaacaattttaacctcgtctctgcagaaatgccgccactaattgtcaattttcacttttctccacggcatttcaaatccattggaagagagagaaattcgatgaacatttagccaaggaaagaatttatttacttttggtatttcgaagaattttaattattttctcacaaaaattttcggcaggaatgaatttatttttgtttctttcattttcattattttcttgtgtctttttaatttttatttgtaagtttattttcattctccttttcctataattttgctatttttagttttgctcaattcgcggaatttttcaatcactgaccaattaactgctaatggtggcagccgttccgtggctttaaggtgcagtttttgtaaattgaaatataaaatagataaaccgatttttaaaaataaaattaattaatattataatttaatatttattaactttttccggaacctttgcttttcagcctggtggcgggacaaaattattttgttttctttatgtttatttagagtctctttcaaatttaatcagtcaatctttaaaattaatataaaataattattcattaaatttaaaattaatggaaagaaattttttggcagtgaaatcgaaaggctaaagacagaagtgaaaggactaaaggaaaaaattgagcaaatgcaaagcattgacgccaaagtgttgcagacaaaaatgtgagttaacggaggaattgaaaataatattcaaaatttaattaaaatatattttattcattaattaaccgtgcgtaaattgtcagtaattatccgcccgtgcgacagcgaaacgaagcgcaacggaagcgcattctgatcacgggcggggcgggctttgtcggctcgcatttggtggatcggctgatgaccgacggacacgaagtgaatgggtggcacgaaatgagcagaaaagacaatctgccgagcaattagagggcaattagcagagactaattggcggtgaaaaaccaaatcaattgttactgtagttgagaattgtttgttggcatttcaacaacatccaaaacaggtgatagcgttggacaatttcttcaccggaaggaaagggaacgtggagcgatgggttggccacccgaacttcgagttggtccaccacgacatcgtcaaccctttctacagcgaaggcaccgtttgattttggcattttcctttcaatgctttgtcagttgaccaaatttaccatttggcctcgccggcgtcgcccccgcattatatgtacaaccccgtgaagacgttgaagacgaacatcgtgggcaccatcaacatgttggggttggccaggtcggcacaacaagtcccccccccc

SEQ ID NO: 65291 - DNA, 79 bp, Heterodera glycines
atggacaattcggacattgaactgaaattgttccgtcaatcacttccaaatgtgctgggggcttttgccataaattcgg

SEQ ID NO: 65292 - DNA, 1392 bp, Heterodera glycines
atgcctgtactgcccgtgaaatttgatcagcgacttctgttcccgctgtgccgtacgtgcgctctgaaacatccgcatggagccgtcaataaagactacgagtgcacacatcgtgaagatgatgagcgggggtgggtgtccactgtgacgtcaattgaggcttcccggacgaaattggcacaaccgaggaagatcagcagcaattcgtagaggaatgtgaggaaaaattcggaatccgtattgagagggaaaagatggtgcacaacaaggccaagcggaccatcgcaaaactgtgcaacaactcactttgggggcgattctcattacgcaacgggttgtccaaaacgattgtgaccgactcgcccgcggaactgcgcgctctgcttaacaacccagcggtggaggtcagctccattgaccagctgaccgactaatgcgtattggtcacctatgcggccggaaacgaatgggtggaggaacacgagtgctcaaacattgtgctctctctttggacaacatcagtcgcgcgcctccacttgttgcggctaatgcagacggttgttcgcgcgccaaactcggtgctcatctacaccgacacggacagtgtgtgtttcgcccatcgtgaggcggacgggtgccctctggagacggggccccatctaggcgacctttcggatgaatggccggtccatgaactcgtgtaatttgtttccggtgggtgcaaacagtacgccctgcggatgcggcaccgacaaagcggggaggagaaaacggtgctaaaagtacggggcataacactgagcgtcactcgaatggttaaaaagggcgtcgcaattttaaatccgccattttcgccgcattctgcactgttgtcaacatcattttgacaaaacaaatatagcagcgaaatgcctttaaattcggttttaataaagccatatcataaattagttttttattccagagataatattaataaatgattaactaatttaattgttagctaattaatagagatatttttgaaaaaccggttacagggattaatctgtgaaaatctatttttgtccaacatcactgtgccaaaataatatagcttccacgaaatgcttgcaagtgacagtgttaaaattcctttcaaatttcagagaaaatattagagttgagcgggaccgggaattttgggcaaaaccgggaccgggacttgccgggacctgagaagccgggaccgggacaacgatttttcttcggaaccgggaaccgggaccaaccgggaaattttagaaattcaaaaaaattttaaaaaattttaaaaattaaaaaaaattcaaatttaaatttatttcaagtgaaactaatacaatattattattttgttttttatttaataaa

SEQ ID NO: 65293 - DNA, 294 bp, Heterodera glycines
atggccttcatcacatctaaggtgcaacaagtgctcgtattttgggagtgtgaaatcaacgcggagaagcgcaacaacgacgaaatgaagcgcgcctttgcacagtataaggacagtggtccaattcggttgaaggactgctaccatggaggacgtgtgggtccacaacgactgcattatgaggtgccaaaggggtggcggatgaaatattacgacgttcgttcgctctacccacacgaatgctgtgacagcatatcctgcgggccacccaacacgagtgaacatcatcggtga

SEQ ID NO: 65294 - DNA, 669 bp, Heterodera glycines
atgccggtgccgctcggcgctctgcccggggcgttcggactcaatgtgcaggataaggagttcttccctcatttggcgaatgttgaggcgagttatgggcacattctgcagtcgctaccgccaaaagctgactacttatacggcggaatgacgcccgaccgacagcgcagattcgaccagtggtacgcagaacaccaccatcagcagttcgacctatgtgaacagctcgcagcctactgcaccaacgacacgcacaactaattgaggcgttggttgcttttggcacagtttttggcgatcagagacccgttggagtggcatggatgcttggatgacgaggacgacgaagaggaggaggaggaggaagaagacaacgataatgcattcgatgtgattgtcggtggcatcgacataacctgggagccgatgaacatcgccagtgcctcgatgagacactttcgcctcaatcatctgaagcgagatcagctcgcgatcgtgcccgagtacggctactacacgacaaacacccagagccttatagcgctcaaattcattgactggtacgccaaaaagaacggggtgagcattcagacggcacactcgcccgacggagagaaaaaattggccaatacactgtggacggatacatcgcggcgaccgacaccgtga

SEQ ID NO: 65295 - DNA, 1419 bp, Heterodera glycines
atgggcgaagaacgaattgtggcaagtattagcactgattctggaagtgccgtgcataatgcaattgaaaaaggacttccgattgtcaatgacgatctgatcagagccgctgaacaggatcagacaatcctgaaggtcaaaaagttcgtcaaaactcaatggccaaacaaaaaggcaatttcggacgaacttatgcaattccaccgcaggcgagaggcattgacaatcgaaaataattgtttgttatattccgaacgagtcgtggtccctgcctctctacaaaatgaggtactgcaacttttgcacaaagggcaccccggaattaaacggattaaaagcctcgcgcgccaatacgtttattggcctggaatggacgagcacatcgaaaacatgataaaatcttgccaaccgtgtgctgcagaagcaaaagcaccagtgaagactgaacttcactcttggccgaaaacggatggtccatggaaacgaatccatatggactacgctggaccgttcttcggaaagatgtttctcatcatcgtggactctttttcgaagtggcacgaagttttcgagatgcgttcatccggaacaaccgcaacaattgaaaaattgcgcggcatttactcgacttttggcttgccggagactttcgtcaccgacaacggcatccaatttacgtccaacgaattcaagcagttcgtcactcgaaacggcattacccacctattttcggcgccttataaccttatgtcgaatgggcaggctgaacgctttgtcgacacgttcaaacgaacgtccagaaaattaaaaggggagggaattgccaacgcattggagacgtttttggtcacgtataggacgacgccaagcgagtcgctgaatggcaaaagtccggccgaaatgttccttcagcgcaaagttcggacaacattggacctgctgatgccaaaacaaagacagccgatcatccgtgacgaagcaatggaaaagaacttcaaccgacgcttcggagcaactccgagattttttttagttggagataaggtttatgctcgtcaccggctgtcgcaacaatggaatgctggacacgtcacgtcttgcaaaggagtgatgtacgacgtggagttcgtgctcggatcaacatcacgttttcacgcgaaccagctgatcaagagtgacaccgatcaattggacgtggacccactgaacgtgtttaatgaagattttggtttgccaaaaatggcacatcaaccaaatcagcgcccaaatgaggccgtggttgaaccaaatattgtggacaatgctgagccagcaaatgatccaccacctgtcgaacaacagccaatttcaccgattcgtcctcgacgacagtacccgaaacggaaccgtcgtccgcccgatcgctactcgccgaagtga

SEQ ID NO: 65296 - DNA, 304 bp, Heterodera glycines
aaaattccctcaaaaataaaaggtctattgcgcaccgccctccctatcatgctcgagagcatttgtatgtgtataaaatttatcaaaaaaagagatagccatttttctgggataacctctaaatataaaaatactctgtgaaataaaatggcgattgtgcacagccctccgtctcatacgcaagcgcttttgtgaggtataaaatttctcaaaaaaagagatagccatttttctgggatagagtataaatttaaaaattccctcaaaaataaaaggtctattgcgcaccgccctccctatcatg

SEQ ID NO: 65297 - DNA, 122 bp, Heterodera glycines
gcgcttttgtgaggtataaatttctcaaaaaaagagatagccatttttctgggatagagtataaatttaaaaaacccctcaaagataaaaggtctattgcgcaccgcccctcccctatcatg

SEQ ID NO: 65298 - DNA, 630 bp, Heterodera glycines
atgccagtcatcaccgtcgagcgtcaatggtgcgtctgtcccgttgtcatcagaagcagaaacggcattggccatggcaccgacagctacggcagcggctgtgacaccgtcaataacggcgccggtggtgaacaatcaacacaaacaaattataacggaacagccggcggcactgaaccaacatcatcacccaaactggcacgtaaagcgggcttttttcgtttcagaattcgaattatacagagggtcgcttgtccaaaaaacccttttaaaagttgaaacttttttggtcgcttgtccaaaacccttttaaaagttgaagtatgtttttaattattcaggtattttgtggcattagaacgagacgccaacaacacaagaggcaacagcagtaacaatgactccgccgaactgctccgtgacgagcgagtgtggcgaatgtttgctcgcagccaacaacggtgtgcagcgattcgcgacgcgtcacgcgcacgtgcccaaattgccgccgggcgacgcgctgttgtagccgatttgttgaccggtgggtcgtcggaatcgatgtactcccaaacatcaccgcccaaatcgcctggacctggacaaaatgtcgccgcaaaaaaaaaataa

SEQ ID NO: 65299 - DNA, 1456 bp, Heterodera glycines
gtggaaacgctcggcgtcggctacaaccgcacattgggcggtcgtcagttgacacttcgactccgcgaccaccttgtccgcgcgttcaagcaacagcacccgtccacgagcaataccgttgaacagaatttgagggcaatggccaaactgatgaaggaggccgaacgcgtcaaacaggttgaattttcagaaaaaaatattagaaaatttgacgaaaagaaaaaaaaattttttttttgtcttttagcgatttttttttttttttgggaaacatagccagtgggaatgccttctcggtggcgcctatcggcaccgccggtcagaaaatttgaattttaacgacaaaatgcaaaaatgagtacttttttttttggcggaaaacagctacaaaatttctgtttttttctctcggttgctcacattaaagaaaagcttttttggcccgaatttcaaaaaaaaaaaatcttcgggttccccctccgaatttttggtttttggttacgacttgaacatggcatcttacaataggagtaagtatcgcaattcctggtaattattcttatgatatttttggtgatttcataaatacgctcttttaaaacccatagattttgtcggcaaacacggaccattacgcccatgtggagagtgtgtttgaggaccgcgacttccgcgtcaaagtcacccgggacgagttggaggcgatgttccaagactttgagcaattccacatggagcccatcaccgacgcgttgcggatggcccaacttacgctggacaaattggaccgtgttgtgttgatgggtgccggcacacggatgccacgcctacagaccgtcctcggcacatttctccaggggttggttggcactatttaacgattgcaagagtttggcgacatcggcagcttttttgggcccattgacccattcattttgacccaaaattcaaagcctgtcgaaaatgggaccggattaaaaaaaagcgaaacagtttttggtcagaaatgaacaaaaagtttacaaacaataggaaaaaaatttgggagagcgaaataaaacaatttttttttattcttttcgggccaaaaattttaaaaaaaattttctcctgtgtcatttaaaattatcagcgccgggaggaaaaagcaggaatttgtagccgtttttcgccaaaacatgccaatttttgccattttgggtcaaatcttcacaaatatggtaaaatgggggtttcgcggtgtcgtcaagtgcacccatgaaaaataaaattttttttttttggaagtttgaagttgaattattaaaatttgcttaaatttcctaaatccgatatttaatttaaaaaatatcaaatttggagaattgcaaaatgatgatgacggtaattctgttttttgtttcaagcaaagagataagcagacagttgaacaccgacgaggccattgtgtgggcgc

SEQ ID NO: 65300 - DNA, 1052 bp, Heterodera glycines
ggaccgggcagaaggcttcgcaaaatgtggccaatgttcggaaacacatagactacatcgcaaacgcactcaatcacatggaggtaagcaaattcatcagtaaaatgtgctttttattaaattcccgcggttagattatgtgaaagttcataaaaaaaaaagatggaattccacctctcaaagagaaaaatcttattttataagtcatttgggaaaattgttgtctcctgtctctcccaattcattttctatcatttgatttgggtaggggatggttcgactttcccccgattcgttcgtatggacgagagtcgccggagtccaacacgttcattcgcttttgcctttctttttgccttcttcaataggcacgcctttggcagtctccgcaccgtcgccaattgcggtgggaacgtccggtcattcagccggacattctctaccagtcgtatgtgttaatgccgaaacttacgccagaagtgccggtggattgcgttttgagtaaatttgtgcgtgccgcgatgaacaaagtgaagtgtccgatttactcactttgcgttcgtttgttttcttccgcttttttccttccaaaaagtgttttcagtggaccccggagggcaaacgactgattaccggcgcatcatccggtgaatttacgctttggaacggaaccgcgtttaatttcgaaacgattctacaggtaattgggttctaattggattggcactttctgtctgaaatggggaggggtggtttggagtttttgtgaatgaggtcagacagtgcatttaatttaacgattttttttttttgttcttttgtgatacgcataaaaaaactcaattcatattttaggaaatttttaggtctcccattttggggtctgcctccgttagcatgtttattttttttgttttacgtgagccgctctttgcatttgcaggcgcacgacgtggccattcgggcgatgaaatggtcccacaatgaccaatggttggcgtcggctgaccaaggcggctttgtgaagtattggcagccgaacttcaacaatg

SEQ ID NO: 65301 - DNA, 2390 bp, Heterodera glycines; identical to SEQ ID NO: 7581
  unsure (1)..(2390): unsure at all n locations

SEQ ID NO: 65302 - DNA, 398 bp, Heterodera glycines
gaaatggtaaagacattttccgcgttaatggatgcgcacgagataatgagaaaaagtgcccgacagtgttctacacattctgccgggaatcgggtgggaatttgtttaactgtcgccattgtgacgagttggtcgacggcaaagtgtgcaacagctttgatcagttgatcaaccttgatcagtctgaggagcagatgaacagcatttacaagtcgcacagtcatcacagtaacagcagcagcagcaaagccgagaagcttggccctgtttccgccttcacctggatcagcagcaatttgttgctgctttttggtaatggggaaaaaaactaaaaaatatttcggcaaaaaaggatagaatttgaagaattaaatgaaaaaaaattataaaaaaataaa

SEQ ID NO: 65303 - DNA, 1099 bp, Heterodera glycines
atgctttttgaaaaagtccctgagcattttatatgggcaaaggacaaatggaacaaaaggaaatataacctaacaaagagaccaccaatcggtcgaattgttcctgtacccccatcggacccggaaaggttcgcgctctattcacttatgcgtcactttcctggagacccagaccatcttaagatggttaatgggttgctttgtacctcattcactgaggctgcaataatgcatggtcttcttgaagacgacaaaatttgggacaaaactctggcggaggcagctctgtcgcgctggccagatcagatgagatggctttttgtgagcatcctggtctatggccagccgagtaatgccatagaattgtggaacaagtacaaagaccaaatgtacaatccgcaaggcattattactctggcacagcataaagtagcagagcttgaagccctagccgacattgattggcggctgcacagctgctttaacttaagctgtgtgcattttagcctgccagacccgccaacttcaattgccaaaaatactgacgcggcaattgaagagtttttctttggcgatgatgatttgaatttgcctccagggcaaccaaatcctcgtccacagccaaatacccctccgccacttaacagcgaccaacagaaggtctttgatgctgttttgttggcaatacagtcgaaccctagggattcgactgtcccccgccgtttcttcatatacggcgatggaggcacaggaaagacattcctgtttggccaaattattaggcgcttgcgaaaggccccatacacctacaaagtgcttgctacggcatccactgggtgtgcagccattttgctgccatatgggaaaacagcccattccacgtttcgtctgggtagagaagtgtcattagacaaactcccaagcattccgctggagagcttctttgcccgtcggattcgtgaggcccaactcatcatcattgatgagatcaccatgcttcacaacacggtgattgaggtcatcgaccgagtgtgcaaagagatggcaattcgccagcacaaggatctcctcttcggaggaaaaacggtcattttcagcg

SEQ ID NO: 65304 - DNA, 395 bp, Heterodera glycines
atgttctccgtccgcttcttcgctttccttctgctgctggccgtcctttgtttttccctcgtcgagtgcggtctcatcggtatttcgactgtttttgcggattaataatatccaaaattcgtccaaatccgtttaggcattggtgccactcccattgaagccgcttggtgcggcgtcgtcggccaagagtccacccattgcccgggaggtgcccttcacggcggatttcccgccgtcggcggaacatacggatttggccgatagaaagcggcgcatttggatacggtaaatcatttagtaaatcgtttaaatgtattgaaatataaatttaaggattcttttggactactgacaaatcgctgatgagagtgaaataaataagttgaaataattga

SEQ ID NO: 65305 - DNA, 409 bp, Heterodera glycines
atgccattggcaaacttggccaagcgacggtcatcaatgaggacgaactcaacgctatgcttaaggttggatggactggccaaagtttaagagacctgcacattccaggccttgggcttgctaaccgctggaaatcaaaattaatttcatccaattttggtggattttttgaaaatttacccctttggggttagccgagtcaaaaaatttctcttttaatcgcttcattctcctgttttttctttcaaatcaacaaaatttgtataaatttagcgtaaattctttagtttttcataaaaaacactccgttccatggacagggagacaatataaaaaatttaaacgtttttttttgttgaaactgaaagtatattacctccattttttcaggaagtctgttccgcgctaa

SEQ ID NO: 65306 - DNA, 567 bp, Heterodera glycines
atggcattggcaaaacttaaaacatcagtttttgccatttctgttgtgctttttgtttcaattgacaagtgccgatgtacaaacattctgttcacctttttccatgacacgggaagccatttccaatcggtgtttccattgatgcaaaagtacaaatattttacaaaattggaggggatttataagatagaatcaattaactagctaattaattaatattaattgaatttaaattggatgtgtgttttgtttaggctggcgagtcggggcaataatgtgtccgttttggacacagtttatgagcaggaccatagccttgaaatccatcactttcgggcgcttttgcccaaacaccataacgatgaaacagttaatggcaattaaaaattgaaaataataataaaaatgttttttgttcagtctaaacgtcactttgccaatgacatttggtcacgccgtctttccgccactgatttgggcctttattttgggacatgtgacaaggaactcggaattttgatgcaaaatcacagccaaaaagcaagcactaaagcattaattaataaa

SEQ ID NO: 65307 - DNA, 236 bp, Heterodera glycines
atgcgaatgaatgaaagtgagtaacaaacaaaataaagcggcaaatcagcgacagcttatcggaaataattgggaagaaaaagataaaacaaatgaatgaattggtcattgtgaacaaataaaattaataataattatcattttagagaaaaaaagcaattattttgtcaaaaaggaaaatgaatgagcaaattttgtcgcgttatcgtacaataattcgtttaccgtatatttaa

SEQ ID NO: 65308 - DNA, 224 bp, Heterodera glycines
atggcattaacagaaaagggcatgtgcttatttccaacacagaaaatatacaaatgtgcagaaaaacgaatcgaggggagaatgatttattggacagttggcaaatgatggcaaaatttgctttcaattttttgccaatgttaatgacttcatccattcatctgtttttaatccatttcactgctccatcgcttggaatattttcgttctactgtcaatcgtaa

SEQ ID NO: 65309 - DNA, 387 bp, Heterodera glycines
atggtgagaaatgtgtacaattggggcgaagcaaaggcagtaggagagagagagcagcaaatagccgacacaccaccagaagacggagctgagcatcgtccgcaaatccatggccaacgaatgggcgcagtacacccaaccgacggcgaacagttcaaatgccaaaatggccaacacagtgacgtaattgaggaagccgctggccaattcgtagccgaaggcaccggcctaaaaaacacttaaaaaatcaaaattaaaaactggggaaaaaggacctgagtagcgaaaaagagggaggaagaagcgcagaaaaggcacacgaaaagtgcgagggaaaagcgaggacaacactaattggggacagcaacaaatgagaggcatttggga

SEQ ID NO: 65310 - DNA, 2958 bp, Heterodera glycines
atgtggtttgaggacagaagtttgtccaacatgaaggtgatttaattggacgaattcgtaaaattaatgcaataattaattagcaaagggtcaattaaatgattaattaattcgatggcactttctgtttgttttggcattctctccattcactttggcattgtttgatcagtttttcctttgttttttgttttgtccatttcttccgatcaattcctcctcttatttttcataggtttcttctctgatcgtcgaggaatggcgggacatttggtccgccaaatccgagtttatgtttgccgcttttgcctatctcttcgccaccaccaattttctgaaccttcccaggcttatcctcgacaacggcggacgtaaaaaaagaaaaattacaaaaaaatgaaattcgtttttaatttagccgcctttttggtcgcttatggcgccgcactcgttttggtcgttttgccaattgttgcactcgaaatttgccttggtcaactgaccgggcgggggcctgtccaggcattttacaacatttgccccgtcttcaaaggcattcatttaaaatatttttaaatttattttatttaatttaggtgtcggaatctcccaaattttgttttcccttttcgttttggtcagtgcccatttttcacatttttcatcaatttggactgtctaaggcgacgatgactcactttttggcccgacttatcattttcatttatgctctcttttggacattaaccgacgacagacccggtaaagtgtggccggactgattcagtcccaccgttttaatcattccagtcccggccttactaaaattttaggcctgccttggctccattgcaaaaactttcccgagattcaatttgggccctgcagagaatcgatgtcggtgatcagtcagaacggcacctcggccatcgttggcactgtccaaagattggccacctttcacgaggagtcggcgatgagcaaatttcaaaagtaaagggaaatcggacaaattcgaattattttttgtgaacatacaaaaatactgaagaaaatttttttacattcattttagccttttggatcacaaaagtgacagtgtcgtcgacgttggcaattttaattggcattttctcgtcgcccaatgccttatttggattttggttttttgtgccatttgtttcggcgtccgttggcttggcaaagtgattgtggtccgtcctttctctcttttcgcttcttttcgctttaatttattggccaatttggcagttctctttcatggttccgctcgctttgcttttggccctttgcggtcgcgcgatgttcgcctcgggcgccgttgaaatgttccaagaattttttgtggattcgttggattggcacaaattgaaggattatttggtgggagggcaaagggcgaaataagcaataattgtcgaggcaaatgcattactttcgctgtgctaaggtttggaaaacggccgttgagcaggccattttggccagtggtgtcggcttcggcgctttgatcaccgtcggatcgtacaacaaacggtccaacaatttggtgaagtgagtgccctcacttaaaaatgcatctaaatctcgagaataacccttaaaatgtgcagagactcattcattttggtgtttacccacgcgctgatcagtgtcctccaagtggccactgttgttgcgctcgtcggccatgtcagtgccaaaagcggactcagtcccgaccaactgattgaccagggtctgtgattttttctgttacagtaccccttttcctctctttcggttacggtgtttggcattttaaaattggcaattatttttcgttcaggtgagaatcagttttaccagttgctcgtcttccttggctttctgcctcatgccaagattctctccggcctctttttgtttctctgcgccttcgttcttctcaatgtttttgttcgtctttttatctttttcccgcttttgtcttacagtattaccgtttcaccccccccccccccttacagtatcttctcgcactttccattctcgccactttggaagatgcgttcggcgagaaatggtctcgggttggttttaaatggatttattcccaaatgcctctcatttgttgctgtccccaattagtgttgtcctcgcttttccctcgcacttttcgtgtgccttttctgcgcttcttcctccctctttttcgctactcaggtcctttttccccagtttttaattttgattttttaagtgttttttaggccggtgccttcggctacgaattggccagcggcttcctcaattacgtcactgtgttggccattttggcatttgaactgttcgccgtcggttgggtgtactgcgcccattcgttggccatggatttgcggacgatgctcagctccgtcttctggtggtgtgtcggctatttgctgctctctctctcctactgcctttgcttcgccccaattgtacacatttctcaccatttttcccaattttaaattttcccccaaggcaatttccgtcctcaacgttctcggctattccttcgccaaatattcgccccaattgcgctcttgggaatggtccgaatggtgcggcgtcgccgttgcactttttccgcttcttcccattcccttctgcgcccttttggccattttccgcgcctgcgcccgcggcggtccgcgttcgctttgccgggtgtttcccattttcaattattattttttgaatttcgtttttcagcgcttctgtttggctttccgttctccgatgcgctacgaactgatgaagggctcagtgagcagtggcggggtgcaccaccgcgtcacctctcaccacggcctcccccgttcgtcccgcttttccgccgcttcttcggcgcccaccggcggttacgttctgttgccgcaggcgcccctcgtcagtcagaattatttacaa

SEQ ID NO: 65311 - DNA, 204 bp, Heterodera glycines
atgggatggaaaaaggaggaagatgaacgaactgatggatggaagagagggagggaatcagaagaaaaacacggactaatggggagaagagaaagcaccaagaagagggaggaaaagggaaaaggagaaaaggaagagggaggaaaagaaaagagggaagaaggaaaggaaagggaggaaggagaggaggaggagaagcactga

SEQ ID NO: 65312 - DNA, 527 bp, Heterodera glycines
atgttcgaaattatcttgtctctttttatttattggtctctactttttttccaacaaatcccggatgaaagtaattaatttaaaattattataaaataatttaataatattttaacattattaagacattgattaccctgatcagttggaccttcgtttcacaaaaacgggacagctccgaataccaactaccaaagaccaaggtaaataataaaattatgtaataaataaagagaaatattcactttaagattaattttaaaaaacaattaatataaattggcaaattttctttgcttttccgaataaaaaattaaattatagacaattgcgggtgctgctgggccatctcgtcgactacagttttttcgacggcggtattcgatgcacggattgggcaaaaagatcgattgttgaatttctccgagcaatacttggtcgattgtataagtgagaaaaaaaagcatttgagtggttgccaaggagtgcccattgccgactcttttgagtaaatctttgttttttta

SEQ ID NO: 65313 - DNA, 644 bp, Heterodera glycines
aaccaaaaaatcgatttttcaagtgtccgttggggtactcaaacaattatggggagcaaaaatccaacgcagaattaaagtacaggctatagggaagctattcccgaaggattcggtctccccataaatctgggcgcatcggttcggggggacgccccgaaaacaaaaaaatcgattttttcaagtgtccgtttggggtactcaaacaattatggggagcaaaaatccaacgcagaattaaagtacaggctatagggaagctattccggaaggattcggtctccccataaatctgggcgcatcggttcggggggactgccccgaaaacccaaaaaaaaatttttttggataaaaattatttaaatgaactgactagataatatttaaaataggttattactcttcctttcagtatccctgcaaagtttggtgcgcttctgatcagtttctgaaaaaaaagttaagcctaaactttttggcctgtttaaaaaggaattaaaaattttattcatctccctttttgatagaaaaagcatcagagtgcctaaactaacctgtaaataaagttttgtgtgtttcagagcactttctgaaaaaatacttatgaattaattttgcaaaaaataaataattaatgaaaaagt

SEQ ID NO: 65314 - DNA, 215 bp, Heterodera glycines
  unsure (1)..(215): unsure at all n locations
ccgggactcaaatgtcccgctcaggccaaaaattttttctatttccgggaaaaaatcgaaatttttccgaaaaaaataccagtcgatagagctcgaaaaactatgttttggaagtggtctccgtttctctgggaaattcgttanaaattcctaaattcaaaaacccgaaaacgntttttaggcctagctcgaaaaattttgaaaattttcgaaat

SEQ ID NO: 65315 - DNA, 135 bp, Heterodera glycines
tcaacatcgaggctcaagacgggcgcttcgcgcccgtttttaaatttgttggccttggacgggcgcttcgcgcccgttattcaaattttgttggccttacagagattagaagagatacaacagtgattaaaagag

SEQ ID NO: 65316 - DNA, 228 bp, Heterodera glycines
aatttatcaaaaaaagagatagccatttttctgggataacctctaaatataaaaatcctctgtgaaataaaatggcgattgtgcacagccctccgtctcatacgcaagcgcttttgtgaggtataaaatttctcaaaaaaagagatagccatttttctgggatagagtataaatttaaaaattccctcaaaaataaaaggtctattgcgcaccgccctccctatcatg

SEQ ID NO: 65317 - DNA, 107 bp, Heterodera glycines
gtataaaatttctcaaaaaaagagatagacatttttctgggatagagtataaatttaaaaattccctcaaaaataaaaggtctattgcgcccgccctccctatcatg

SEQ ID NO: 65318 - DNA, 318 bp, Heterodera glycines
gtcaaatgcgtttatggttgttgtgccgactgctgacaaaataaaaaggctgagactcatccgtgccaatgcgactggtcctcccccactcagtgtttacatgctttcatttgattccctctcccaaatgtcctttcgtcggaatttgccaaaaacgatggcgtttctcgagaatgaaatgaaatctgttgtttttaatggtattttttaaaatagtccaatcaagctacagtttttcttccaggttataatattgtcggcgatggcacaccacaggcatttattccaattttgacggcacaaacggaggaggaattg

SEQ ID NO: 65319 - DNA, 301 bp, Heterodera glycines
  unsure (1)..(301): unsure at all n locations
cgtctcgccatacatgtggcatagcggcgcgggaaaaatacgccacgcgaaagggtaacttcgtcaacnaaactggcacttcgataacgtttcctcgtcaacggctaaatgcttttgaatgatcaaattattaaaagaagacaaaatgccctaaccaattcctcctccgtttgtgccgtcaaaattggaataaatgcctgtggtgtgccatcgccgacaatattataacctggaagaaaaactgtagcttgattggactattttaaaaaataccattaaaaacaacagatttcatttcatt

SEQ ID NO: 65320 - DNA, 541 bp, Heterodera glycines
catttcaatcactggcactcaatccaccaacattccaatcactgggactgcattccaatcaccaggactgaacccaccagcatttcaatcactgggactcaattctcctgcatttcaatcactggcactcaaaccaccagcatttcaatcactgggactcaacccaccagcattccaattactgggactcaattctcctgcatttcaatcactggcactcaacccaccaacatttcaatcactgggactcaacccaccagcattccaatcactgggactcaattctcctgcatttcaatcactggcactcaatccaccagcattccaatcactcggactcaacccaccagcattccaatcactgggactcaacccaccagcattccaatcactgggactcaattctcctgcatttcaatcactggcactcaacccaccagcattccaatcactgggactcaattctcctgcatttcaatcactggcactcaacccaccaacatttcaatcactgggactcaacccaccagcatttcaatga

SEQ ID NO: 65321 - DNA, 296 bp, Heterodera glycines
atgcaatgcgataccggggaagcaaatactcaagttttaaagattgtaggtaaagaagttttttaaacgatttctttagaattttttagtcaatatttaaaaaattaaaagattagggagctgaaattcgcagttcacaaatctgtaatgtacgggctaaaaacatgggatttcacgggatatggacactaattgcgctaaaaaatttttctctatatttaatgaatacttgaaagtcggaatttattttagctttataaaaaagaaaaatacgcaatattttatatcagaataaa

SEQ ID NO: 65322 - DNA, 165 bp, Heterodera glycines
atgtttggacaaagtttgagcaacagtactcaggaagccaggttatcagaatatattgaccataattttatgaaacttagccaaatttttgcaattttgcagaccagaagaaatgccattagagctatcaaataatatcaagaaaatacaaatgtgagcaataaa

SEQ ID NO: 65323 - DNA, 927 bp, Heterodera glycines
atgggtgtttccggttcttcattgtctgcttacgtgcaagtcgcagtccacgtacgaaaagatgtttgacatgatcagaaaccgctggccgacattttcaccaacaaatgcgtccatggacttcccctccgcgcaaaacatccacaatgctcaatcaacatttgcctattccatttggtgcgcaacatgaaagcacgtcttaccgacgagcaaactcacgtaagaatttttttttattaattttgaaattctcaaatttagcgtttcaaaacagacgcagcctttgcacgatcagccaaaatggtcacttcgctggcgttcatgccgctggctgaccttacacccgcgtgggcagcactagaagaccatctaccaaatgagcttgagagcgttctcgattggttggttgaatttatttttttcaattttattagtaattttaaaggtttataatcaactacgttggacgtcttctcaacaatgacacacgcactcgtccattgtttcgtccagaagaatggagtgtgtatgagcgcacaatgaacagcaccgaccgcacaaacaacttcgctgaagcgtaccatcgcacgttgcaacttgccatcggacaaggacatcccccaatatggaaatttataaacattttgcgcgagcaccagaaaataattgacgtggacttcgaacatttccttgccggaaatgctcctgccgatgaaatctaagcgttaccgtgaagtggacagacgaattttgagcatattacagcgctacaatgaggaaaaacagcagccacaaatcaacgatgatcaccaatacggcaaaaatcaaaataacccgaatttgttcattgaaatgcttgggggaatttcgagcaattatcaaatggattgttaattttttgttaatttatttgctattacattttga

SEQ ID NO: 65324 - DNA, 277 bp, Heterodera glycines
aaactccgtctcgccaactccgtcttggggccaactccgtctgagccaactccgtctagccaatttcgtctggcaaactccgtctcgccaactccgtcttggggccaactccgtctgaaccatctccgtcttgccaactccgtctggccaactccgtcttggggccaactccgtctgagctaactccgtctggccaactccgtctggccaactccgtctggccaactccgtctggccaactccgtcttagtgtataaggggccaactccgtctcgac

SEQ ID NO: 65325 - DNA, 562 bp, Heterodera glycines
gcggacggcaataacaagagaaatgggcggctggcaataacaagagaggcggacggctggcaataacaagagaggcggacggctggcaataacaagagaggcggacggctggcaataacaagagaggcggacggctggcaataacaagagaggcggacggctggcaataacaagagaggcggacggctggcaataacaagagaggcggacggctggcaataacaagagaggcggacggctggcaataacaagagaggcggacggctggcaaaaagaggaaaatagcgggaaatgaaaagaaaaacaccgtttttatgtagaatttttacgattttatttgaatattttttaccaacccacttataaatattatagaatgtatttcaaagttttttttttaattttgcttcaattatgtcatgttcaaccacaacaaggcaagttttgtagtttaagcaaacaaaaaatcgaaatcaattttcagaccgattagaacccgataagaggacaacgaaaagcaaaacgatgactgtttttgaaggctatgaaatgcgtactgata

SEQ ID NO: 65326 - DNA, 477 bp, Heterodera glycines
atgaaaactttatttctattttctctgttatttttctcttcatatgaaaacccaattcgcaaacaacgagctgttcgcaatgaacgggcaatagctgggttagcacaattggcagcatcacttgtggccgtgaaagcatttattgccgcaaatgcagctttaacggcttctacagccgtagctttggcagcacttggaaccgatatctaccttgctattgagctcgtgagatgtaagtttatgataattgaaaaggcggttgtgactctaataactcatgttaagcctctgatcactatgaggaattgctcaaagacttcttcccgttaacatttgttttggacgattatgaattcactgtctcggccaaagattataccccggattatatttttagaaaaatatcacaacattttggccataagacagaggaaatatgcataaacagtatgttttaataaacaaaaatgtttttta

SEQ ID NO: 65327 - DNA, 429 bp, Heterodera glycines
  unsure (1)..(429): unsure at all n locations
ggcggacggcaataacaagagaaatgggcggctggcaataacaagagaggcggacggctggcaataacaagagaggcggacggctggcaataacaagagaggcggacggctggcaataacaagagaggcggacggctggcaaaaagaggaaaatagcgggaaatgaaaagaaaaacaccgtttttatgtagaatttttacgattttatttgaatattttttaccaacccacttataaatattatagaatgtatttcaaagttttttttttaattttgcttcaattatgtcatgttcaaccacaacaaggcaagttttgtagtttaagcaaacaaaaaatcgaaatcaattttcagaccgattagaacccgataagaggacaacgaaaagcaaaacgatgactgtttttgaaggctatgaaanntggact

SEQ ID NO: 65328 - DNA, 284 bp, Heterodera glycines
atgtgccgtggtattacaaacgctcaccgcccattttttgtggcgtttgtgtgcccgtttatttgggcgtttggtccgttcgtaagttcatcgttgtgcttggctttctgctctttctgatcggaggtctgctactgctcggccttctgctcatttgcgtggccatcgaatgttccgctgcgtttgaccccctttttttcttcctttatttgtttttttttcagtgccgggggtttacttccgttcgccttaatgcttatcatttgtgggctaactacttttga

SEQ ID NO: 65329 - DNA, 49 bp, Heterodera glycines; identical to SEQ ID NO: 57477

SEQ ID NO: 65330 - DNA, 3724 bp, Heterodera glycines; identical to SEQ ID NO: 7591

SEQ ID NO: 65331 - DNA, 3230 bp, Heterodera glycines
accgcagtacctgtcgacaaattcaatcgaacagatttgatggacaaggaaaactgcaagaaggcgggatgcgaggccaaatacggaaaccatcgatgtgattcggaggtgatttgttgaaaaaagtcgaaaataaataataataaattttaaaacaataattattatttgaaatcccaaaaaaaaacaaattaaaaaaataaatttaattttagtgcaatttatttgcgtgccaattcgacggcggcgattgttccacaaaacaggcacaaccctttggcaaatgcccacaggcaagctattgtgcccatgtgtttgcggatggcaaatgtgacgaagtgtgtgggctttatgtcactatagcaatttatttttaaatttgttcgttttccatgtcactatttgcaaattaatttttaaataattgtaattatttttttcaattttctccatccatccctttgaattaagatttgcaacaacgagcgctgcttgttcgacggctttgactgtttggagcggcaccaggcgacgtgtccatggatggtcgactgtgccaaagtgtacgcggacggccattgtgacgagcagtgcaatcaggcgaactgcggatgggacgtgggtggcacatttggaatatcaaaataattatagaacggacaattgatccaaaggacgagggaagtgctggggccgattttcatatgaccggctcaattttatcagatttaaacgatttttaaatttgaaaattcacagggcggcgactgtgcccacgacgcgcatgagcccgaccccacggcggatgaccaacccaaattgctgctgggcgagctgttcctggcggtcgcactacatccgtctacactgttcaacgatacggcactgtttcgccaatttttggtcgcattgagtgcccatctccgtgcgtcgttggcactgtcaattgaccgatacgacaaaaaggcatggaaaatttaattttaaattaatttaaaaattttattgtattcagcccaaactttttgaatggcgatcagacaaaggcattggcaaacgcattgaattgtcaccggaagtgaacgcaacggcactgttcaatgtccgctacgatgagaaggaggaggaagcgggcaaacgaagcaaaagaaaggcggaggaaaagggtaattaaccaaatatattattatttgagttaattgaacaattactgagtaaaaataataaattcaaaaattctttaatatttatttcataataattatattattttcatttttattttcagatgttgtcgaaggcattgctttgtttttgcaagttgatgtcaccatgtgcaatatgtaagagagaaaaaaaacacttacttaaaatatttttctattaaaattcttggctttttttaaggatcactcccggcagtttggcacagtccacccaattggtcggcgttcacaaactgtgcttttcggacctggaaaatgttgctgcttatctgggagccgcaaatgccaaacaggtgattggattattcgaattctattaatttacagttttaatattctccggtttgaccccgcttgatttgaaagacagtgtctgggaatggcaccaatttgccgatttcccaccttgtttttgcacattgttttcgacttgaaggataaatgtaatccgccatttttgacagggattaaattttcattacaattaaatgcacatagtaaaatgacaattaacaaagtgggagataatctccacgtaaaggctcggaattgacgtgaaaatcaaaaaagaagtgctgtggcatatttttattgggtggggcaaaaggcaatttggggagggacacataaattttggggtggacatttcccatggagacactacataattggttataaagaagaattaaattcatttttatgaatggaccccaattaaataattttacatgcctaattagcactaattaattcagttcccgtttctttgcttaagaatctcgacattcccatcacaattctgcagtccgaagcgcttaaaccgcgcgcctcttcgctgttcttttggtttgctttgctcgcctttgcgatagtttcgattgcgtcggccgctgcgggcacagtgttcgcaagcggtcgcattcgcagccgacagcggcgatatgcaaaaacgtggaagccggaattcccggcacaagagtcgaaaggtgatccataatgttgatttacaaattcaattttatttcatttctatattttaaaatgggatttccccatttttagtcgccaaaaatttgctggcaactttgtgcggtggggtcggccctggccactatcagccgccgttgattgacggcaacacgcagcaacacctgtttaacgcgtacacgcaacacaaccaccaccagcaaaatgcctaccaattccatcagccgcagcaacagcatttgatgttcaacgccggcagcatcagcacggacagttgcgcttcatccaccgccgcgtcggccattccgctgattcgccacgcggacagcctgaacagtttgacgagcaatgtgctcgcaaacaatgccatcaacaaaaatcagcaacagcatgggtgaaaaaataaaatatctaaataatttagaaaaaaataataataattttcatttttgcattgatttattttaatataaatatttcaaatcttaattatttgacaatttttataaaatagaatatatatattttttaattttcagacaatttcatcagctaattgacttgcagcaacagtattttgggcccgcccaataccattcattagtccctcataacaaacagcagacaattcactcaaatgcgtaataataatttttattatttttcaaaatatttaatttatacccttcttcaagtgtccacccccatcatgctcctcctgctgttgctgctggtccgtattgctcacgctcgtcctcctcgggcattggcgggtcatcgacggaacattccccgattggtaaaatcattttgaaaacgatttagttttgattattagcacccatacaataacatgcattttgttatcagattcgcacggtcagatggtcgaagacatggaaagacgaaagttgttggcccaccttcgtgaaaatgccctcttttctccgaatggactgttagggcatgaagaacggctggagcctcaactcgtaagtaaaatggaatttgtttaaa

SEQ ID NO: 65332 - DNA, 669 bp, Heterodera glycines
gttttcggggcagtccccccgaaccgatgcgcccagatttatggggagaccgaatccttcgggagtagcttccctattgcctgtactttaattctgcgttggatttttgctccccataattgtttgagtaccccaaacggacacttgaaaaaatcgatttttttgttttcggggcagtccccccgaaccgatgcgcccagatttatggggagaccgaatccttcgggagtagcttccctatagcctgtactttaattctgcgttggatttttgctccccataaatgtttgagtaccccaaacggacacttgaaaaaatcgattttttttgttttcggggcagtccccccgaaccgatgcgcccagatttatggggagaccgaatccttcgggaatagcttccctatagcctgtactttaattctgcgttggatttttgctccccataattgtttgagtaccccaaacggacacttgaaaaaatcgatttttttgttttcggggcagtccccccgaaccgatgcgcccagatttatggggagaccgaatccttcgggaatagcttccctatagcctgtactttaattctgcgttggatttttgctccccataattgtttgagtaccccaaacggacacttgaaaaaatcgatttttttgttttcggggca

SEQ ID NO: 65333 - DNA, 525 bp, Heterodera glycines
  unsure (1)..(525): unsure at all n locations
atgttcgaatccgagttcggggttcgaaatgaaccgaactagatgacataatcgtattctccgaccctaaaaacctataataaaagaattttatttctaaaaaaaattttgaaaatttttcagggctaccattttacactagagaccggcgcgggacgggatcccgcacgggatttcggtgagcggcagaaagaaggccttacttttgtaaaggacagtatcctctgcaccgtactttcccagaattttggaagggccagcaggagtcatgtttaaaaaggtacatctatctcggaaaccctagtgctggtctaacttttttttttccaaaatttctgccagacttacaaaaaatgttctaatcaaatttaatttgggcttattnnatgcgctgtttcccgcagatcnaagcgacgaaaaatttctccttttcccgggccccagtgacaaggggaaagaaaaaaggggttcaattttggaaaaaacaaatcggattttttttttcggggggttgggaaaaataaa

SEQ ID NO: 65334 - DNA, 781 bp, Heterodera glycines
atgagaaaatttttggaggtaatactggagaattggtgtcacggcgaaaaataaatttaaaatttttcttttcgagttttccggtgtaaaaaaatatgctgattacggatctgagctcagaattcgaaaaatcattgatttgtctatgatttttcatcaagaacttgatttttttaataaatttttatgtaagaaacatgaaaacatgcattctggggttttgggagttgctgatcatgaatatgactttagttttggccaattccgaatctcggcccgaactcggacaaaatatcgaaaaattgatttttatgtatgagcattttcaatttcgactttgttcgagtttgggtccgggataaaattactcaaaattaatgtcagattcgtgataattaatttattttcgccgggacaccaattctccagtattaccaatgtctatgtgggtcaggtggacaataaaagttcagcgggaggaaataaaatttctttcaaaattgcttgagaattttttcaggcgctccaactgcacaccaaactgatgaaggaagcgttggacagagacgtgaagcaaaaaaggggcgaaggaggcggcgatttggccaaatcgaacgaagtgatggaaaagcgaaatgggaaaaaagggattttaaatggtacccttttcaaggtgaaacacgcaaaagcggaggcggaccgacgtgccaaattggacacggaaaaggaaggcacggcacgagacgcaatcaaagaattggagaaagtcggtgttgaataa

SEQ ID NO: 65335 - DNA, 622 bp, Heterodera glycines
atgcaaaatgctttacgtgtcaaattggccgagttacagaacagcagacgaacaaaagaagaagaaaaggagcagcagaaagaggaaccaccacaaaaagttggcattttgggggtttatttgtattaaggaagtgaaagaaatgaaatggatgaatgccattttccgacccaaataaaaaatcagtccgggcatttgtgcttatgtccaaaatcggtttaaatttttatattttgcttcgcaattatactaaattaagaaatcagttttttagaaaattaattcagacctttttataatttttataatggtaaaaaatgtgttctaagttcccacttttggtaagctaagcgttttcccctgcccctttcagttagatttttccctcttcgacgactccgaattcgcgaatcgttcatgggtcgaactcattgaagaggaggaggcggcggcgcggaagacgcacaaagcaaaagcggcgaccgctgaaacgaccgccgcgtccgctgcccctccaattgcttctgttgctgcggtcgcttcgtcttccgcttcccccagcaataagcgatgcaacagcgaaagagcggaaaagggagagaatgtgccgaaggcgcaaaag

SEQ ID NO: 65336 - DNA, 198 bp, Heterodera glycines
atgttggagagggtaaacgatggcgaagaaccgctcaatggtcagcgaaatgatggcgaaattgctcacgtaaattgccgtgttccaagtgaaacggacggagaagcaaagggcgaaactgacggtgtcaaaattgacaaacattcgcacgaacatgctgagaaggaccagcgaatcggaggccaacagcaccaaaat

SEQ ID NO: 65337 - DNA, 996 bp, Heterodera glycines
atgtgtgcttctttgttttgcatgaactattgttggcaaagtgatggatggcttactaaagattcggattttgttttgctgtttgttggcatttccttaataggaaacggcgtttattgtgccgttttgatgtgcctttggtcctctacagcctaataagcagtgatggcaaatgaattcattttttggcacaatattctctccagaaaatttatttattagacactttcccttttggtaaatttacaatttctttaaaattgcacaattttttcatttaattattttcagcgtccttaaattattgtctctgccgctgttttcgtttcgattggtttcatttggagactctttttggcattttccgtctgcacatcttttgtcgtcattgtggtggaccttggccttattgttgcccgttttcgaagccatttgcgacaaaattctttccgaaacaccgggcttcaatagtaatgctcgagaaaaatattctgacttttgttcgtttggaagaatttgagaaagtttttgaggttgtacatgaaattgaaaaggacgtaaacgaaagggacgacggccaacaaaacattggtggcacgcatttcgccggggcccgtctcgccttaaagttttgttgtaattaaaatttgaaaattggaatttttagttaatttgtttactaaatgtatcaattagcgttttcacagtgcgtgacttgaaaatgggtcagtgaatcagaatatcttggaaaaaacgagacccggtagtataatacttatatcttgattggtatctaaacaagcttacaacaacctatttacagtataatttttttagggattgggtaaatttcaaatttctttagactttaaagaaactttgaaaaaattcagaacgaagtttttaaacaatttcgaccttttataaatgctacagtactttaatttagaaatactgtattattgacttatttttccggtaacttacaataataaa

SEQ ID NO: 65338 - DNA, 63 bp, Heterodera glycines
atgagcgctacaattatcagagtgccgaaaatcgcatgtgatctaagcctagcaaaaaatggt

SEQ ID NO: 65339 - DNA, 652 bp, Heterodera glycines
atgattgtcggtactaagcgccacttcaaaaagttcttcctcgaggaggagggacgcgagggccgtccgttcaaccagaatttaacgccaggctccgtaatccaagagaaggtgacgcgcgcggacatcacggaattgtaagggagaaattttaatcgcattttgtgctttggtttttaatccacgcattttcagctttcttcagccccacgcaccgattcaggcaaatttttttgttttttcactccatccaatttaaccgacaaaaaaatttttatttgtttccagggaacgggcaaacccgtagaatacgccatgttggaggatgagattggcatcagcatggacgaattgcaaggagtgattatggcgttgtcttactcgcatcaggtaaataatgttgatgccgattctccgagaaaaattgaaattttgtgtggcctattagtaaaagagtaaccgtttttagtgcaattagtctattttctccgttaaattttgcattctcattgtcagattgtcaatgttgcggtgagcatgcccgagcctgtataccaagcccacgaattggccaagcgagggaaaaacaatttcgtgactttgaagtatggccattaaatgttgaacttttttttaatggtgggggattaaa

SEQ ID NO: 65340 - DNA, 374 bp, Heterodera glycines
atgcacgcgttttgcgctcgagctatttatcatcgggcttgtcaatccaaagcgaaacaacaaagatgctgttttgaacgaataaagggcataggttattttgaagaagtgtcaaagaacatgcagcaataagcctgcaaaatctaataagtggaaaatacatgagtatagaatttattttcagaaagtgtcaacagacttttggaatatatatttgcaatttatcaacaattttgagaagtgagttagaaatgataaacttcacgattcaaaccaattttcgttgctctaattaaccgcgataaagacattcgaatcaattaaatagcttctgagataataaggtttatcataaaatttcatttaaaaataaa

SEQ ID NO: 65341 - DNA, 469 bp, Heterodera glycines
atggtttatgttggcattttcagtcagctaatgcggcttgcacatcagcagcaaaggccggcggaggtgaatcgacgccaacgccaaaatgctaacgacggcacatttgataaatgagatgagtgaaaagaagcaatgatcaatttaatttgttttatatttacaaatttattggcaaaattaaagacatcaattacaaaaaatatcatttgtcacttcaattattgcaatattttttttagttaaattttaaaaattaatgtcctttaatgggctgaacttatggaagtaatattttcaatttaatagcatttcctaatttttcattcattaagacaaaaaaaaacaaaaaattggagtttcgtatagagagagcctcattaaatgcttcaaattatattatttgtaaattcatttgttttatagaatctatctaatcttgtcgcaaaggctgtttaatgtaaataaa

SEQ ID NO: 65342 - DNA, 333 bp, Heterodera glycines
atgtgctgctgtgttcgaatcgttgggcttaatttcggctgaaaaggaggaaatttatttgcaatttgaccaatttttgaaggagaaaatttatgtaaaaaaaatatttaaaaaaatattttatttttattttcagccaatttccaaagcgatcgaagcatttctcggcactatgcgcgaatgtgcgcagatggcacgcgactcggcacgcgcgtgtgccatcttttcgcaatggagccgcgaatttggggaccaattgcaattgcagccgaattgggaggtgaaaagagaaaatttaaattaaaaaagaaatgcaaattgtttgaaaataaa

SEQ ID NO: 65343 - DNA, 463 bp, Heterodera glycines
atgactcgacgccgcttttggccgcgtgtgaaaatggagacgaaaaaattttggccttccttttggaaaaggtaaaaccacagatcattttgaataaataaaatatattttttaatttttttttttttgacgggatgataatgataattaattaatgataagcggatgggaaatatttaatttttgtgtctttcgaatgaattatccatcaaattcaataagcagtagagctcgattgaacgacctggaaatgaagctttttcgctcctaacttgggcctgagttttttcattttcgacctggatttcctagacaaaaatccaggaaaagcccaggctttgatccatggccagcaggtcgtgctctaacaatgactgcttctctcatttgtggtgtttgttctctgttaagaaaggcgacccttcccgttgcaacaaacaaggccaaaacgcattcacaataa

SEQ ID NO: 65344 - DNA, 63 bp, Heterodera glycines
  unsure (1)..(63): unsure at all n locations
tgaatttagaaaatattatcatgccncggtggtacagttactgcttgaaaacggcgcagaccc

SEQ ID NO: 65345 - DNA, 590 bp, Heterodera glycines
atgccaactgttcgcgaaatacttgagagtctgcaaaagcgagtaaaaaagcctcgcattgctacaaatgaagacagcgtactgaatgttgagaggacagacgcagaacaacaaattgaaggcacttcaaccaggaacaatttggacgtcgcttcgagtgatgacgaagaaaattgtgagcccgttcaattcaaacgtggagaaacaatccggggagctctttgtctttggtatcaaggtgttactagttttttttgatttttatttctttattttcaggctttcgatttatcaaaaacagaaaagatggtagctggttcaggtgcgaacagcgcaattgtccagcgacagccaaattggacgacaacgatttgatgacaggcattttgggcgcaaaaggacatcaccatggttgcgcaccatcgcgttatgatgcagagacgaaacgaaatcagatgaagcgcctgatcaaggaggagccaaaaacgaaaccatgtcaaatccgcgctcaaattcggactgacatcgacgatgaagtcttcgaattgctcggcaccaatgaagcgctcgaccaaatggcgaacaggtag

SEQ ID NO: 65346 - DNA, 439 bp, Heterodera glycines
atgaaaattttgagaagcttcaaaatttccaaggaaccaaaaatttgtttagaaggaattttctttgaaagaaaattaattgatgtggaaggagcgcctcaccttttggtaatacattggtttgtctacaacccccatttttcaaaaaaaaaaaagttttgttttaatctgtgtaaaacgccttttcctggggtttcgaggtcgctgataataagcttgacaaatagcgaatcctgaattcgaacaaacatagaacattcaaattttcgaaaaccccgggaagatgttttacatgacttttttcgaaaaattgggagaccacaatattatttattaccaatttttccattgcagatcggtggaaaagataagcagtttccgtgccacgagatgcccaacaaaattcgcttctgtttcctccaaattgagtaattcaata

SEQ ID NO: 65347 - DNA, 348 bp, Heterodera glycines
ggcatgcgcgactcggccacttcgtcgtcgtcggcatgctctgcttcatcgacgcgtaagttttgcgctaatgatttcatttgtctcttaaactgtcgaagcttaatttgcttcgaattttctcacagttcgtcgaccgttcgaccatcccaccaacctctttttgtgccaacaagcgctgaactcgtccaacaacttgacgctgaacggcatgcccacgaccaacaacgagctactgttcccctccgccacaactcctctcctgcaccaatacggcaccaccgcccaacttggcactgctcaattcggcatctccgcccaacttggcactgctcaattcggcatctc

SEQ ID NO: 65348 - DNA, 168 bp, Heterodera glycines
ccatttgaccggaccaagcgcttttacaacatcagcgactacataagcagtaagtgtttggtggtctctttcctctctcctttctgtgcgccggtgcggttgggccccaaaatttcgtttcccccacccgtttgagccaccgtcgtgtccattgcgcccgccagcgaa

SEQ ID NO: 65349 - DNA, 324 bp, Heterodera glycines
atgttcgaggcggccaacgacaaggaggcgtactatcacatgttggcggagaagatttacaaaatccagaaggaattgcaggtaaacaaatgcgagggaatcaacgcaatgccaaaaatgtttttcaaaagcgatttttgggaggcataaacaaacttttaagaattttatttcataaaaataaatatagaaattttttagacggagaaaaattcttttaaaaagccatccaattttattttggatccaaccttcaaaatgaccgttcgtgttgcattcatgggctgttcctatttttgcaggaaaagaaaaaccggaggctga

SEQ ID NO: 65350 - DNA, 430 bp, Heterodera glycines
atgcatggttcttcaccattaacagaggctaatctgtgcatgaaatttgagtcttctttttcatggaaggattgggttaggtaaaagctatttttatataagccgtcaaaatcaaaatttgctcaggttacgtgacacttggaatgccgttgttacgtcgcaatcgcagattcacaggcattctgaacagctcgacaaaattgtttcggaggaaagcagttacagaaattatgtgctgcgttgcgcactgaccccaacttaattattattttaggcatctgacattcaaaatcgacaaattatgatccaaattgtggaaagaaatgtgaacaaagcgagggaattggtacgaacggcgcgatatcagttgaacgctttcaattcggcgctgagtcaaagtgaaaaaccaatttatgtgcaaaggaattga

SEQ ID NO: 65351 - DNA, 553 bp, Heterodera glycines
atgaatgatcaaaatggaccaacaaatattgaaaattttgtgcaaagattatttgtagaagaatctaatcaaatttttgatgaaaatttggaaatgaaagatgagaaaagtgaagaaatgtccacaaattgtgatcaattggaacaaatgacagaaaatagtggacaaatttatgatcaaattccaattttaaatgataaacaaaagagagaaattgttgaaaaattccataaaataaaagagaaaattaagcaaatgggaaagaaatattcaacaaaagaatggaataaaattgaaagaaaaattgccacaaaattaggtgcaaatcaaatgaaaatttacaaatggaaaagagaatttggaatgatgaagaacaaaaattattcagttgaagaaaaaagaataatgttaaagcaatttgatcaaatatatggcaaattaaaaacgaaattaaatgaaaaattggaaggaaaagggacaaaatgccaaaaataatagctaaaaatttgggcataaatattagaagtatttataattggaagaaagaaataaa

SEQ ID NO: 65352 - DNA, 1668 bp, Heterodera glycines
atggcaaaaacaatggacgaattgcaaaggaggacagtgaaagtgaacactttgatgacaccgacgaaggaacagcagcaaaagcaaagcgaacagaagcatcagaaagggggagaagcagcggaaaattgggcaaagcaaaacgacgcgggacaaaacgccaaaggaaatgccaaagacggagaaggcacaattgggggagaattgagcatgagagataaggaaatgtaagtgccaaggggggattaatagggagggcactacaaaagccatggccaaggggccaaagagttgagtgggacgaggacttgggaaaagcgcaagcagagaagcgaaattcgaattcatcggactcaaaacgaaaaagagtttatttttattccaaaaatatattatttatttaaatttaatttcttacccaaattttacgtcagtttttttaagtgaggaaagatttaaatgatttttccattgtttgcttaagaatcgcccgctgttggcggaaacgaattgcgaccgatcggtgcgaccttttccacaaaacgatgctccgatgcattgaggcgagcccaaaactgaatgaaatcatcgcatgcggaagatactgttaccgtgacttgacaaaatggccaaaactgaacagaatttggttagttttggggcggggattaaaaataataaaaaaatatttattaaattaaatattaaattttattcggtcaaaatgtccacagaaaaagtgccggtttccaccatgaataaaaaaatattcatttatttagccaggcgcagttcaaattttacgaacggctcatctacgagctgaacatggacgagcggcggatggccgaccaatgcacgcggctgggcaaaacgcacgcggagtacgcgcagttcggactgaagccgcactttttggacatttaccagcagagtctaatcggtgagggcattcaaaaggaaatgccacgggggaggaaattattttgccgattttaaaggtacataattttatttttcagcacttatttccaaaatggaatttgccgacgacaacgaaagagcagaaacgattaacgcatttggacgactgatcagattcatcgtagaagcaatgatcgaagggtatggccaaagagtgactgagttgagaacggagcgaaggggcagcggagagacgacggaggaaaaagggcaaatcggacgacgaattgaaaagtgatcgaaacgaactacaaaacataccatagattattcatacaaaacaaaaacatacacatataaatatgtagccttaaagcaatgtttgagagatttgttggtgatttgagtaccggggatggacggatggagccccgaggcccaaaaatgaagttgaaattccgagccaaaaaatgtcggacgcaacgcggaattccgtctggtgagtagcttcccggtgggaggctaatttttgagacgtccgtgtttttattttccaaaaacctctattagaacggccctcatcaacaaaattagccttttttaccctcaaagaacggaattccgaaatcatttattagtaaattttcttaagcattttgctaaacatttaacttaaaaattggtaaatttgtgtcaaaataactaaaaaaacgcgaaaagagccgtttttcgctaattaataaa

SEQ ID NO: 65353 - DNA, 732 bp, Heterodera glycines
atgaccgccattgtcgggggagagcccaagccgaacgttaaatggctgcttaatgagcaggaaatggacgccgtcgacaaaaatgtgcaggtcttttttatgaaaattcaaatgatggcattgaaacggtagaaatccaacgaagatacggtatctgacccaaaattgacctaaagatcacttccggacccggcggtcgccaaagtctgcgaattgggcagacaaacgctgcgcaacactccggccatttgatggtacgtgccgaaaacagcgaaggcgccgccgaatcgtcggccgacgtcaccgtacagccaaagccgggcccaccgtacttcagccgggaaccccaagaccacgaagtgtccgatggagtggagtccgtcaagttcagtgccattgtgcatggcaacccggtgccatcagtttactggcgagtcactctcattatttaattgccttgataatgaatgctaattaattttttgaaaaatgattttcattaatttaaaacaataatcggcaggtatctgaagggcgaatgcctcgtcagcggggacaatttgcgcgtcaaatatgacgcggtcagcggcaaaacgtccattcggctgttccacccgaacacggacgactcgggcgaggtgaaagtgatcgcccaaaatgtgcacggacaggccgaggctagcgcaaaactgaaggcaattgaaaaaacaaaattggaataaatatgggcaa

SEQ ID NO: 65354 - DNA, 438 bp, Heterodera glycines
atgaccaaatggttgttcacgccttgtccgaatggtgtgccgaagtggctccaatgttttgtgaattcaccggttggtcaatggtcgtcaatgatggaacagattaaagcggtgattatccctttttaattgcttttttctatgattttttgtcccattttaggcattttccaatgcttcttcggttacttttcgcattcactttctgctgtcttctccgattgactctgttgttccatttgttgatcggatcaacgaagtgactggggaggaattggcacttcaacaatcaaatggcttttggctcacccgttgtccaattggatgggataaccgaaattgggataatgtgtgggaagaattaagtgctcgacagaacccaattgacattgtgatcaatagggatcggattagcggattcgtgttgagtatcctatt

SEQ ID NO: 65355 - DNA, 1065 bp, Heterodera glycines
atggaggaatggaaacaaaaaaagaaagcatttaaggatataaaacgaaaaattaaaaagtaagtatttaaaaataagaaaaaactataaagtctaaaaaaatttaaaattttttgagttatttttattagggcctccttatttacatattttcgtatatatttctgggtttttgtacatatttcatacatattttagcattttttatacataataagcgatttttcttacacaaaaaagtaagcactaattattatatttatttaaattttgaattttttaattaatggccaaaataaactaacttttctaaatgaaactttttctttttgaattctatgcctacatatgattgcttaatttaaattaattaattcaaaactttttttttaaattaaattttcaatggaagaaattaattttaaaaatgcaatttccaaattaagtgacattttcgataagaccgaaaagggcgctgagttttcatttggcaatcacattttcaatgccgtagagcgcaaaaatggtatagtgggcaaattgttgtacgattgggagaagaagaaactgtacgaatgggaccgtaaccaaatgagcatttgggtggcaaaacagtacaaaaatccggacccgccggaacacagtgagttacagacagcatactactgtatatgcatggtgtagtgttactgtatgtaaaatgaataggaataatataaattagtagaatgttactgtatgcaaaatgaatagaaataccaaaataccatttggtacctctgcacctattaagacacttttttatggatacggaacacagtgagtgggttacagcatactatactgtacattagtagaatgttactactgtatgcaattttttttgttgatagaaaattctaagaaaaccagcaaaatgtgaaaaatttttaattaattctcactgatttagattttttttttaccaaatattgtttttttggcatttttaaaaatttaattggtgccatttgtttagaagaaaaaaaaattgggtaaagctaaaatttattaatttttaataaa

SEQ ID NO: 65356 - DNA, 237 bp, Heterodera glycines
  unsure (1)..(237): unsure at all n locations
gcaaggcattcggcgtcaaagatccgtacncgncnggacatccgaatttgcacgagtgagaaggagaacgagtgggaagaatcggacgaggaacgtgtggcacgccatgcaaaggaacgagaggaggaagaggagcgtgagagaaaggaagaacagaagcgtaaggaagaggaagcggaacgcctccgtcaggaacaactgcagcaacaacagaatcaggaacagcaacctcagtag

SEQ ID NO: 65357 - DNA, 869 bp, Heterodera glycines
atgggacgcactttggccccattcgctggccatgaccacggcatttccgtgttcggattcggcgactcgaccaccggcgattggacggtcttctcgctgaacgaagagaaagactgtgagaatttggaggaggttctcaggttagtcggcgaattgctgacaaaggaagttcgtcgcgttttcagcgtgtacaatcgcatgactccaaacatcgacctcagcggaccgaccaatttcgcgccgctgatttaccgcgccatggaaatttgccaacagcggagagacgtgacaaaagcatttataatcaaaagtaatcactttgtttttcagtatcacattttggtaattattgcggatggccaagtgaccaatgaaaaggccacggtgaaggccatcgtttccgcgtgtcaatttcctttgtcaattattgttgttggagtcggcgatgggccctgtgaaaatgatgcgggtcgatcaacaggccaattcagtccattttcaataattttttaagatttttgatgagtcattgcccaaaaggccgtgggacaactttcacttcgtggagcttcatgaactgatcaaccaaagggctgatcagccgattgagtcgcgagaattggcatttgccgtccattcacttttggaaattccggaccaagtaaaggcaaaacaacgcattgtccacggcatttttcattattcagtacgcgaccattcggaagatgggtctcttgtcatcgaccgcttttttcactcgtcctccttctcattcgcctcgtcggtcaaaatcgccaaaagcggcgcagaaaatcaatggcacaacagcagacgacgagggggcgcaggagaaggagacgaactgttga

SEQ ID NO: 65358 - DNA, 577 bp, Heterodera glycines
atggttttcaatagaaaagaacgattacaaatttctaagaaaattggtaagcaaagagacaaagggaagagattgtccaacaaaaatgtgaattggcgccttggtaaacaaaatcaatttgcttaattatctgctaattagttacattttttgtcagtaaatttggagaaacggaagcaacgcgaaaggcaaacaattgaagaatatgaagagaggaaaagcaacactaacaaggaggaagaagaacatgtggaagaggaggagcagcaacatgaaaagcagcaatccgattcgaatggcgtggcaatggaatgccaaagtgaaaaaggtgggaggagggcgacggcacagtgccaatttcagatattggatttaaataagccattaaattgtctcggcgcttgacaatgtttttttttttgggaacgacacgaatgataggatcgttgtaggaaaagagaaaatcgtggttcatcattccattttagaaggttggtattcgctgactgttgcgttgccgggcacaattttggacaatgttcagacgtctgagctcaaaacctatctgagtggagag

SEQ ID NO: 65359 - DNA, 348 bp, Heterodera glycines
atggaaggcgcgagtaccgtagacgcatgtcatattttgcgcataatactgtaccagatttgtctgctggttttggatggtgatgatcatttcgctggcgcatcggtcggtcagtccgaaaacggcgaaagtcatctgaattcgaagaaagtgaacggcggaaatcgatttcaaatacaagaatgggatatggtaaaaggattaatggcccgtgtcctactgtacagaattcggtggcaagtagacatagaatgtcaacgcgcaaaaatgccaaaaaagacaaataaaagtggcataatccttcattcgacttaatctatttaattttaatcagtgtataacattaaa

SEQ ID NO: 65360 - DNA, 603 bp, Heterodera glycines
atgcagaagaacgtgcgctttgtcggcgacagtcccctgcagagcaaagccatcattcagttagatggtaacattcccatgatatctaaatttgtcaaaatggatcctggcacaaaatctatggcaaaattttcctcttgtaaaatctggattaaggagctaatcccggttggcgtcccgacgtttttgaattaggatatttcagttttgttaacattaccataaaagattccacaaatattttgttttctgtttcagcaaagaaatcggccttcttcccggccattgatcttatcgaatttgtttgccgatttctcaattctcgccctgattacatccaaaatgatttctcacagcccgcgaaggtgcggaccatcgtcaaacagatcaaaggtgaatgggtgctaaatttacatgtccattaaatatatttttttcattttaaaaaatgaattgctaaattaccaaaaatttcaggtcttgctgtgcaaactgtgcatttgccagaaagtcaggtaatgtaaaattatatacatattgatcaccaaagtttttttttatatgcgataccaaaaaaattttgacaatttcttaataattaaa

SEQ ID NO: 65361 - DNA, 61 bp, Heterodera glycines
acatttatttgatttattttaccatattcacaatttgatcagaatataggtggtcaaaagt

SEQ ID NO: 65362 - DNA, 1404 bp, Heterodera glycines
atgccttcccgtgcttttcaaagacaggttcttgtggaatggcggaacaaatcgaacacaattcgcggcaaagtgaccaaagcacagctagatgaacggcgtcgttttcatgcacagtgtgtcgaaaatcgtcagagagacggtcaggattggattgtctatgcaggaagcgttatcttacgggaggaaattcacatttttcggcgccaaatgatagataccgattctcgtaaaaattgactcgagacaaaatcacctaagcatttctcaaaaaattttcaaaatttaaattgctgcctaattaatattaggtcaataatgaacaaaatggaagagatttcactaattttagaagccaaaaaatacaaatcttaacattaactgaaacttggacaacagaaaaccaggacatacctttttgtccttggattaaagaaaattttaattatatctttgcttcaagaaaatctaaaaatctcttacgtagcggtggctatggtattcttcttagaaaagaaattaaattttttgttaaattttctgatactaaatttaatagttaaattttggttctacaattacaaaatactaaatcaattaggcttatattaatatatcgtccgccaaggactacttttaagcaaacaaaaaatctttttagtttttaaaacctttttctgtgtaaattctataattttagacgatttaaatttttctaaaaaagacctagtatggaaggaaggcaaaccattttccttgagtaattttggtgaaatattttgtgacttctttaataggttttcttatgttaatgccactcatggaccctcaaggagaaattcttggctagacagttttaccagcaaatgataaaattgtaacacaatgttctatcgaaggaggcattttttcgtcagatcatttagcccaattttttatattaactgttccggaattaattcctaaatcaaaaacataaatattaggcgatttactccatcaaatgtgtcacttttcaatgtagttattgcctcaaggcttagagctttatcatgtggaataatcagagtaaatgaaaaatatgtatcttataacaatgcatagatatattgttatgagcagtgtattggaaaaattcagcaataattttattatttactgtatttaccgtaattattttgacaattatttcaattttatatttaaagttttcaccaatcggaagaggatacaaattaataagccgaaatttaattacaattattatttcttttttattaattaatgacaaaattttctcggcgagagggtcacataaatgtgacaaaaattcatatgaaatttctgatcagcaaacgccaaaatttaatgaatcacaaaatattattgttcataaaatcacaa

SEQ ID NO: 65363 - DNA, 857 bp, Heterodera glycines
atgatcgaaccacgaaccagcctgatcaaattcgcagccgagttgttcaacaccaaggctgaatttgtgcagtgcattgtgctgacccgggccgacaaacgagagaaattgatcatggaactgagaaaggccgacttcaacggggtcaaaatttggagcaaaatggacacaaagccaaaagtaaatttaaacgaaaattggtgggaattcgttttagacatgccatttgaagccgaatttggaggcaccaattcggtggtcgaattaaacaaacaaataaatgatgattttcgaccaaatttgtcaaaattcggaccaggtttagtcttaaaccgaaaattttacccgatttcgggaataatgctcgaaggagtactcgatatttatgataaatatcgagaattctggtggaaaattgaaaaggaaaacacccaaattcaaaattctaaaagttgccaaaagggtgcaacaaaaataatgaatgcaaatgaagaaaaagaaaaaactatcgaattttttatggaaactgatgaggattcggttgattttgaagccgaatcggaattttttcaggaagagaaggagcaaaattcggccaagagggctgatgggcgtctaaaactgacggtaaaggcgaattccaatcaaaaccgtgttttgacaattaagggagttaatgctaaatgagagcattttggacgaaagtgatgaggactcttgtggaaagtccaaccaaaaggccgaaaaagtgaacaacgccaaaaggcgaaaaatcgtgtatgagtgccatgagtgccaaccgtcaacgagtgcgcaaaacgcaatttcaaatcaaatgggttttggtatagaaaata

SEQ ID NO: 65364 - DNA, 98 bp, Heterodera glycines
acttcattttcaactactctctctcactaattgttgcacattccccaattttatttcttccttagtaagtagtattggtgcacaatgcgcacttttct

SEQ ID NO: 65365 - DNA, 485 bp, Heterodera glycines
atggttaaaaatccaattctttccaattcgttcgtcacagcggtgacactcggggggctgaagttcttcttcatcatttgtgccaacggttttggcagatttcggtcagagcggcttcgatcgcgaagagcatggcggccaagtcggggttcggttgtcggatgtgatttgccaattcgtgcattgcttctgccgcggttctcgccaagtcctgcgcttgtcggtcggtctgatcagtgctgttttgccattttgggggtggaaatgagcgccaagtttcagcttgtgggggggggaacgccaatgatcaggtcggccacagaaaaagtgtccccgcccgcgccctcttgcgaattttgttgttgcgctgtttctttcttctttcagtgctgtgccgagcagttgtccggcaacagtggccaattgggagaccaattgggggttggcttggaccaaaccgccgatttcggaacctgtttcgttga

SEQ ID NO: 65366 - DNA, 752 bp, Heterodera glycines
atgaagtgtcattggctgagtttggcaccgcttttatattggcactttcagcgaaaagactgcacggcatgcaaatgcgaagcaatatcgcatggaagacggtcaaacaaaaatcagatagcacatgccaatgaagagagtgggcagagaaataaaatatctgtgcaaatatgggatacatcagagaaagagagtcagtcatacatacataaaatgttcgtccaaatatgggctacatcagagaaagagagtcagtcatacataaataaaatgttcctgcaattatgagatacaccagtgaaagagatcggcaaaatacagtgccaatattcatatagagaaatagatttctgtttttctcataataatatacttctatgactattatagcccacactatacacgctatggaactatgcgcccaattttggcatggtcataaatctttgtttgcctgtaagcattttgcatgcccacttttggcagagtgccaatttattgctgacagcctaataaggggaaattcgcataaaaatgagatttatgccaacaccaatgtgtgtataaaaatgtgattgcacttatgcatctgacaaacaacactaagacatgacaatcattgtttaagcatatgaaaaaaactatacgattttttgcctcgcgtccaattcagtcccattttattttaatgcctcatgaaatgaggctaggtaatatataaacaaacttcaaaagaaaaatattgtaataaa

SEQ ID NO: 65367 - DNA, 278 bp, Heterodera glycines
atgtcaaaaccaatacgcatgcgtattaatccatcatggagaaatctgagagaaagattaactcaaataagaccggtggttgaagctcaagagataacaccggaagaaatcgaattattaagaaaatcacttgtaaaacttaaacgttcagtgaattttattgatgaaagaattgaagaatggcgaaattacatggctaatgttcaagccgcacaaagagccgaagaagaaggcctttttgacaatctaactaataatggacgccacataaccgaatg

SEQ ID NO: 65368 - DNA, 720 bp, Heterodera glycines
gccagacagtccaaagtatgattccccaattttagccggttcatctggcagtccgaaaaaaggttataaattgcaaatttttactccaataaattaagttgcattaaaattgatgaacaaaaaacgtaattaattattaaataaaacgtttattttgaatgattcaaataatgaaaatgtgttattaatcattttatttttcgccttttaggaaaatcgccacatgccgatccgaaaaaaggttataaaaaaaaattcataattaatttttcttttaaaatataaaataagcaatttttgcttgaatgaaataaaaagtaccatttaacaaattcataataaaatatcgaaaacaataattttagcccagaataaaagtcccatttaaaaaaattcataattatgcaccctaattaattgtaattaagctgcttcacaccttgtgccagtaacaccagggaaagtatgatgagcaaggtaaccaacagaaccatgctaccggttgccaaattttgtaatcattagccttaaaatggtgaagaaactgtgtggaacgatgatgccaaccatgaacaaacccaaagctgttgtagtagatgtagaaaaaaaactgtggtatcatcacgctattattgttgtgtaaaaaacgatccgtttttacctcttttcgggaaaaaaaactgcaaaaaattcacaaaaaaaaaaatctcacattgtgca

SEQ ID NO: 65369 - DNA, 747 bp, Heterodera glycines
aataatctcctaaagaaggatagtgaggcagcactaagcggtgaaattgttggcgatgaacgggaaactgaaaatattgttcgtactttaattaccatcatcgattcatttgaagaaaatggtattcctctgaaattgatatattttctaaaaaaatttaagaattcttcgcgcaaggactttaccgattgagcgggtctttgactacgcaacaaaatgcacttaatattatcgaaaatgccaagggacgggaattggtttgtttttttatttttggagctctcagcaaattacatacaattatgttagctaacaataagactatgctctcaaatcctcacaaaatctcattataaaaagattgtcaagattttaaaaatttattttcaaaaatgactaaatttaaagattaaaaaaagattgtttaatacttgactttggtctttaatgattttaaaaatcaattgaccaagtaacggaaaacgaaactttaaacgaaagcgagaaaaaatgtcaaaaaaggacgaaacacaatttcgtacattcctggctccaatccgaatatttcagaaactttacttcatttacgagttgaatgccacggataaggcgtcttgcattaaaactcttttgcgtaaaatgcccgacactcttttcccacactgtcaacgtgttgctctgctcgacctttctgggtttgtgtttgttgcatttggtttgggcgccatgttatttttgctgaattag

SEQ ID NO: 65370 - DNA, 385 bp, Heterodera glycines
catttggtatattattatgtcaaatttacaaaattctcctgcttattgtgtgcttgtgaatgaccaaagggatggcgtgttgcgcgagataattgaccatcttggtcttttggaaagtggcgggcttggagcccagcaaaagaaaattggttccgaaactttgccatgccacacgctccacttggacacaaagtattacacatgcgatgttcctctgctcagttgtcactcatttgtgcgtttcaaatcaatttgtgcagctgaacgacgaagcaatttgtcagtgttcgctgtgctcttttgtgtcactcggcaacagttgacagatgactttctggcaacggtctcaaaatactcggccagtttggagaaggcggaaatgaag

SEQ ID NO: 65371 - DNA, 663 bp, Heterodera glycines
atgccaattgaatcatttgaattggtgaacgaacggacgaaggaaaagctgacactgaaacagaatatcgatgaattcgacgtaaatgtgtgtaattggttgttgcaacggtgcccaattggagagacggcgacggcgccagcaattaaatggggagacagcttaaatccgagtgccaatttgaaccatatcagatttgttctgtggagtttcgataaatccattgggtgagcagcagcaatagcatttgaattttatcgaaaaataaaatatttaattaattttaggccattgtcgccactagcggaagaagataaagaagaagataaagcggatcaaagcaacaaaaatgtcgtctaaaatgtacggaaatgatttcgataattatatttgagaaatgatcgatctcaatttgttgtgcttaatctcagaaaaatcgattcagaaggcaagataaagtatttcgtgcatttgaaccggttttggtgcatatttagaatttttcgaaaattgaattttcgaatttttgttcgagtccgggtcaggggttcgaaatgggccgaaatagatataagaatcgaattcttcgacccagaaaacccataaaacaactttatttcgaaaaaattttttgaaaattttctttatatcattgaaaaccta

SEQ ID NO: 65372 - DNA, 375 bp, Heterodera glycines
atgagcacagagaacaaaagcagtgacaaaaccgaatcgaatggaccaaaagtgcttagaattcttgagattgtaaaaaatgcacaacaaaagcatgggcttagacacgaaaattatcaacgttacaggtaacaattgagaagtatccaattctcgaaattggccgcgccggcccggtttttgggcgttaactcctttcatagttttacaaaatgaacaacatttagggctatcggatataccaaattggttcgatttgtacaactaatgaaacgagttatcgcctcgggtcggcaccctgttggtcggcgctcttttgtccctcaccgcccatgctttatgatggcagcacttcggacgaaaaaagaaacctaa

SEQ ID NO: 65373 - DNA, 559 bp, Heterodera glycines
atgaagttttggttgagccccgcttccgttattctcgggtccttggcaatttggtcagggtacgttcatttgttcgtccagattcgccaatttcactcaatttctacttaattttaggctctcgatgttgattcggcttctgcgtttgctatccatgacaagttcttggctgtcggcttccaatcggggcgcatttgtttctacgatcacatgggccacgaaacattgcattcggtgggaacaatcgtaaaaatacactcattcccattgctttatgtttttagtcgtcccgttaccacaaatgtgccgtctcctccatttccattgatcgacctggcaattattttatcagctgtgccaatgatttcaccgttaacattttcggcattggttcctccgagtttaaccaggtcatcgtgccaacaaacattcaaccattcaaatgttgttatatttcagcgcctttttcttccctattcggccaaagtggtcgaaatcgcctccgatttctctcgacttggttccaatcaccggtttttggtcggttctcgcgatttga

SEQ ID NO: 65374 - DNA, 969 bp, Heterodera glycines
atgccgaccatggaaatggaagtcaaagcggcggccattaaaagcacgaaaaagggaaagcttcttcaggtgcagtcattggactaacttattcgaaataaaaaatgatttttatagttattctcctcaaccgagtccgataaacgagcattgcttctttcggctgaaagtgagacggaattgcaattttggctcttctcaattgaacgagcattggcatggaataacagaggtggaaaaacgcttttcattgtccattttccaaatatttccaatttaagagatgatgcttgctcctgaagaggataatttgtcgttgaattcgtcgggccgtgacaattcctttccgccgtgcctttcctcactaaacgattcggaaagtctggcgagcgaagacagtggaggcagtgagtgttaatggataacgtttgccttgtttttagttcctacctctttttttaggtcgtgaattttccacggctttctggcgaagtcgaaatgcggcagccaaagctttgcaaccgccaattgtggagcggcgcaatattttttcgcttttttgggacatggaagtgtgatttgataaaaaatctttttattttaaatcatttttgtaaaagaaaaatttagcctttgccagaaggggagggagaaaagagtacgttgggtgaacaactgagtgaaacagaacagtgcaacgtggagcgaatatcaccaattccgagcagttcagcgacgacgactagtttggtgttacggccaaattttggtggcaaaagaacgacgtcccatgagccatcctcttttgatgaggaaacaaagggacaacttgcagtcagagaggacagccaatgcttggagccatcgaaatctgaatttgcgggtgaaaagccggccattctgttcacggctcagcttagacaattggacattcgaattcgtatggccggaaaagaacacgccgaacag

SEQ ID NO: 65375 - DNA, 3672 bp, Heterodera glycines
atcgagcctttcttcgcccgtttgtttctcttcgattccagccttggtgtccgtgtatcggaggaattccatgtcgcttttccgtcacttcactacgatatgcttcaacaaaatggacatgccaaccttgttaaattcgccaactctgctccctcctcttcctttgcacttaacggtgttttggccactgagaaagtcaatggagtcagcttggaacagattcggaatgccaataaagtgatattaatttgtaattatttttacattttggcattgaaatgttcagcttatttgctcaatacacaaccctcgtgctgatttgtttttggtcgttttggtggagcgaatattgtcggacgtgtcagccgacatttacatgaaggctaataatgcaactgacaataaatattcgtctaaaattcaaaaatcgctgtccgcatcaattccgaaacttggccatcttcgaacgttgttcgcatggaccgcgaggcaatttattataaattttttgattttcttggttctttctctaattttaggcctgtctttccgtctttgtgctcaggcagtgtctttgcttctcaacagttggcgatgagcagcaccaacaattgtggtagcctttgcgatggctctaagaagtcctcgttggccacgtgttcgctgtacaaatgcgacagcggtcgactcactgacggcgatttacagaaattgttgatagaaatgcaaaaggccgacaaattggccaaattggtggtcttcccaagcgcctctttggttctcgaaacagacgtcacttccgtcctctgcgaatttccaagtcgtcccaacttacaataatttttgttgcttattcaattggtttaagtgcgtatttcgccctcttttttgccacttcgtccctggaaatgcattccgacttcgcctgataaaccgtccgctttgccttcgtctgagctccaatcatttcttgaccaatcgctttgttctgaaccacaccgtggccgtgttaaccttctctatgtaacttttgtcattttcagaataattatttatgtggaacaatcattgcttaaggtgtacccactttcgttgaattattcaacccaaaagacattctcccgcgcccgcaacatttcctgcacagtacattatgtgccttcgtctctcgtcagaacgacgcaatttgctcacggaagggtcccttgccatgctaacattttccaccgtacacatccaaacggaccttttgttgactcatttgtttgtggtgtccaataccatgagcaaagtccgcaatttaacgcggaagtaaaaatggatctgccggtggcgttgggagaggacgaccatattctgttcacatttcatcatgtttcaatttcgaatgccatcaccaacaaaaataaacctttcactgaggtgggtgggtatttttggatatcgtcaagagtatttttcgctgtcattattatatgccgtatttatagcacaacattgagactccggtgggttatgcatggcttccgatggtcaaaacggattctcgtggccttcctcacttcgtcatgtctgacaaaagtcaggagtttgaacttccagtaactgccaacttgtcttcaaaatactacgaatttaagccattgtcctcttctggcacgagagaggtgagtcatttaacaaatatttgtttcaatttataaccgacaggtgtcccccaattttgatctcaaatttgttgaatatggtcgtcctctattccgcgttcgacttcgactcgtttcgtcagtgttcaccaccgatgaacgccttcaaaacttttttcaattgtgtcacctgatttatccgaacataacccagtccaaccggaaccctttgacgcaactacccaattcttcatcgaatcgtaacttcaaacattcatccaatatgaatttctatgccaacaacgcctccaaaaatggatgctctgcttctgatatccaagacgacagtttgtccccaccgcattttgctattgaacgtgatttggttgaatcaattgaggtagcttcatactttcttacaattatatattcggatagaaatatctcctagttttcaatttagagtgatgatacaaaaaagtttctttgtttagaaactgtcatcaattgaccttgaccagctgattcctttcttggcggttatcttcgaccgtctttttaatttacttaccttttcaaaggccgaagacgtaatgcttagttctttgaagtgggccctaataatttgaaattttcatggaaataaataaatttcagtgccattatttatttggctgatcaactgtttatgcatcgaaaatcgaagagagaacttttacgaaattatgtcctattgttcttcaagtgccaaggtccgcaacgcaaatgcgatgccgacggtgaagaatcgacccatggcgcaatttgcaaatgcattcctctgatggtatacactgaaaagcgagtgagaaaataataattgtttgtcaattttcagatccacagagcacaaagcagcaaagatgggacgataagcatcacaaaattgcttcgtcagctgtggtttttgttggattgtgcggccaaatcgatggcacattggctcatcattcataatttgttgaaagtgccgaggcggaaccgatttcccaccgatttgtatttttcgctggaagagctctttcacacaatcacggaacgaatcattttcatgcaaagggagtgcccccgtgaaagtcggatggccaataatgcacttggcaactttttaaaggtgcaagcaaaacagagaaaagggaaaattcctttggcaataaattgcttaccgtttcatttcagcactgtttaagtttgatggacagataccaaataatgaaggaactgtatacagtggtcaagaaaatggacacaatcgaaaccagggtaagccaagttggaaaggattaaccaattttaaaaggttttaagtcgtttcgtgtttacaaattcgaactgcttcaaattttggctggtcatgaacattggctcccgctttgcttgccattgttgactgacaaatttggcattatattgcgtggagatagctttcgggtggaaggttttctaaaaatgacgaatgcgttaggctcatttaatgacaaattaaggctcctcttcgacccaaacgcaacagcaaacgacgaagcacaatggggggaccagtttattggccaaactgttctctcaaatcttttcaccatttcacggaataatttcagaatcgaatgaagtggagaaatgtgagaacaaacataactctgtttaaagtaattgtttaatcatttacagtttcatcatattccgagcatttctacttgagcaaaacctattgctccgtgcactttcccatcggacttcttctccaagaattgtcgacttctctgcgcgactcgagagactatcgtcgtaaagtgattcagttgctacgcaatttgcttgccaaacacagccaggacgaacgctatggcgacacggtattacttacaaataaaaaaaattattcactgaaagaagtttgaaattctcttttttaagtcagcccgaaatcgaattgcgattttgaccatgccattgttgaggatcgcaattgaaaacatcaaagaaattg

SEQ ID NO: 65376 - DNA, 2434 bp, Heterodera glycines
atggtggaagcattgaacaaagcgaaagccaatcctttcagcaatggctatgtttggacgaatggcaccattaacgcaaataataccggcaaaagtaacaacgagcaacaacaacgctcttcggacaaattcaatcgggccaaacgggagcactcgttacgagttgtactagcaggagagaatggacaaggtccttcccaaaaagaggaattactttgaattattagttaaattatttggattaaatatcataattttaatcattttaataaaatacatcgaataaacgccaaatctgaatggacaacgccaactatttttgattttaatttttacataatttcttatttcttaagaacgaagttcgcgacttgatgctttgcgtcctttacacgctgaacattcttccgaagaaaatattagcagccttttggaatgtccaagaagccattcagccaaccaaaacaatgccaagttgcgacgattcggtcacggaattgcctaagcaaccccaacaaaatgtccttgtcgactttgtccgtattttggaactttcgcttttgctgtttcgctacagagggcgaacgcaccacttaatgttacaagcaaaaaggtaaatatgacataattcgacagaattttcaaactttatttaaagaaacaaagcgacaaacccgaacaaaacgcccgaacttctgctgaagttcgatgggtcgaattcgtacgtaatgagcagcaaattttccacactgactgatataaattttggaggtaagcacttaaatttaatcatttaattctttgccagtagaaagtttcgactcgagaggagtggtggacgaagaaggcaaaggcggcgaggcgacaagttttttgatggactgtaatttggcgcaagaagtcgcgctgattgtgttggagactatccaaacaatagccaaccaaattgccgtatttttttgccattttcaaatttaccctttcattgttcaattcaggcaaagacgcgttacacctccaccagcagtttggatgtcatttttgttcgtcttcttcacttacagctcgaattgctcaacgaatattggcccgaaactgtccgacttcacactctctctgcgctcgctgtgtttgtcaatttggttggtcctcctaatttattttaataaaaaattaaacataccttttttggttccgtacagttttccgcccatttccttaactctggtccattggattgtctgtccactttgatcaaagcgctgcttctccagttgaatagccgtatcgtccgtattcaacatgcaactgccgctttgttacatttaatccttcggtccggatacgatctcgctttaaattcttccgtttgtatgtttttccttattagtatttttaattaaatatgaatttaatgacaaattattcgttttttagccaaattcccctccgacttctcttccatgtccgctcctgatggatcgaagaattcctcgctcactgaacgactcggccgacccggggctcaaatcgcgccggtgttggctcgtcttctgagcgaaaaggccgttttcttgaatagtttccgtttcgagcgaggtctgtccgctttggaatcgcttattggctgtgggtcggcgacaaaaagcggtgccaaaggtgcggcttcttctgcacttgtgctcacctctctctttgacaaggctgtcttggtactactgcttaatgcctaacgcgaacattacaaacaaatgattatgctaattcttacaattaggaattggtgaaacaacttcgtggtgtgctcgaggcaacgcaggcaatttcggacacgattaatgacccggtcagcggtgatcatctttctttttgttttcatttatttcttcagattcaattggccgaccttcatatccaattggcaaatagtttccgtggttcggctgcacttcgggcagaatttttcgacgcattggctgcacaacacattgccggaggttttattatgcgccgacatttcatatttctcactccgtcgtctcctctctcttttagcttggtactcggaagcagctgtgtgtcaagcccattcgctggtgatcatcggaaaggaactgcaaagtcggggactgtttcgacccgattggacactgttgagtgtgctcagtgagagaattactgctactgagggggtcaacgagagcggtctgatgagcagcactcagcaaggcggattcacattggtacaatacctatttggtactgttttggttgaacggacagagaaactcatttcaggaggaatttacccgaaaagttgaagcgttagtccgcgttttattactttccgaacggtatgaagccgttggaccaatatgtcggttggccattcccatctttgagcagaacaatgattttaaagttcaacgtcatg

SEQ ID NO: 65377 - DNA, 683 bp, Heterodera glycines
atgccaacaaagggtggcagagagaaggaacaacgagtcgcttcaatgaacaatggcagagcaagcgagcgaccgatggacgaattgaaagaggacaatgaccctatgggttacaacctgcacaccaacatcagcacgttcattcaagaagagcgactggtggaccatgaagtgcccgaaaatgcgcctgaattggcaaggactgcactccgtcgactgactttgactggtctgactcacagcagccgaaaaacatattcctaacctttttaagtgggaaactctttccctgacacgcgccgacgccaaaggattgtgaagactgaagaagctgtgcttaatccgttggaattggcctgtgaatgtctgctcttcaaaactgctcaaattcggcacattctttcggcagcggaaatcccccgagggttccattgtcacatcggcgctactgtggacaaaaatgcactgaaaagactggacttgaagaagttgcaactgtttttgcagggttcagtcagtccatctgtcagtttgttttagtttttaatacttttaaaatttcattttcccatttttaggtcaatgctggattgttggcttatgccgaaacgtttaccgcctcagcccaaagacatcgctatggaaaagacggcatttgtcgattggcaaccgctctgaagtga

SEQ ID NO: 65378 - DNA, 452 bp, Heterodera glycines
ttgttgaaaagtgtttttgtttaacacgaccagaagtgtcatagcggcccatcaggccaacccgttcaacctggacagcccggccagggcggtggagcccctcctcccggccctcctggccccggtggtcctcctggaccgcccggtccccccggaggcgacggacagcccggcggagatggacaagccggcacttctggcggagatggcaaatagtaaaacggggagaggggaggcgaacaaaagcatcatccccactattatttgtcagttgcccttgtcctaaccgcggctcgtctggcggtggcgttccaagcgaaagcggaggagtaagcgggggaggcggaggcacaagcggcggctacgggccgggcggaggaccgagcggagggagtgccgcggcggaagtgccacccagcggtggcggcgccactgagagcggcggcgcctcc

SEQ ID NO: 65379 - DNA, 831 bp, Heterodera glycines
atgaatattttgctctttgaggacatcaacaatatgtacgacgagatcatcgaggatttgggcgagttcaaagtgctcgccaacgacgcctggtcccaaatgcaggcggtccaagtccaaatggtcggtggcaaagcacaagccgcggcatttggccgtgacttcgccgagatgatccgtgaacgacgctcttacgctgccgggggaagcggcggcggcggaggcggcgggagcggatacgcgagcgggggaagctcgggaggaggtggcgggagcggatacgcaagcggaggcggcggagcgaaaaaaggaggaggtggcggcggtggtggagggtacgcccgagctggaacttcgggagggggcgctaccgcatgcccggccggtccacctggcccgcctggacagcccggagctgctggaccacccgggtcaccgggtcaaccaggaggacctggagagaacggaggaccaggaactccatgcccagccggcggctcatgtcctgcttgccctggcggaccgcctgggccagcgggtccgcctggaggttctggaccgcccggatcggacggagaaccaggacagaacggcaatggcggaggtggtggacaaccaggtcaattggatggcatggttgtgttaaataattgtaaaatataaattatgcaggcccaccaggtccgcccggagattcgggaccgcccggacccccagggggttccggaccacccggtccgcccggcaacccgggcacgtgcaccggaggcggcggtggagcagtttcgggaggaagtggaggtcaagtcggatatggaggaggtcgtcttc

SEQ ID NO: 65380 - DNA, 646 bp, Heterodera glycines
atgtcctccaaattgtcttccaaatgggtcgtttttggctcgtgtctgctgtttttcgcctcgggctgtgttctgtacgtcttggtaatgacgcggcattttgtcgacgacgaaatcgaaatggccgacgaaggacaaaaagtcgacgaaggcacagccaaatgggagctgccaaatgagtcaaaacaaaacggaaatttggtcggaggcgatgaacagcaaaaagatcagcagaaagaaaagcaacaatcaaaagtgttgctgttggaacagtccatgccgaatggaaatgttaggggcgggggagagaccggggggggggggggagacggatggttgcccatggccatgccgttgatggattgttgatcccgagacagttcagtctcgcctttgtcttattggaggtcgtttctttctacaaaatgcttttgtcttaggaagtttcaagcctggacccgcgcgttcactacgaaaagagtccggacggacggatgaaagcgacgatggacatcactttgcactaccaacgccaaaaggtggtgtcggcggcgcaaggtcaatgaaaggggaaaaagaggagtttggaaggatgaagaagagaagagtttggaaggatgaagaagagaagagtttggaaggatga

SEQ ID NO: 65381 - DNA, 1161 bp, Heterodera glycines
atggaatcggcattttgcaagaaaaaatgcgcaagtggtaataaatgaaaaaacaatttaatttcgaataaaatttgttgtgcatttcggacgatttgatcgttctcgaattggatttggacggcgaattgggcggtgccgtgcccgcccccttggccaatcacattgtgagagagtgcaatggccaacccatggcccaactgtgcctttgttcagtgccttcctttcatgcacggtttccaagacgacttttattggagacaatcgatgcgtgccaatcggactgaggcactccgagtgacgggatggggaagcgcacgtgggaatttaattgggcaattaagggcaattaacgatattcagcggacaaacagaaacccagccaatacggaaaggcctatccgaagctgcaaatgttgaaagtgccgaacatttggaggcacgaaaaatgcgcacggaaaagggccaaactgtcggaggaggacggactgagcctttcggaggacaaactgtgcacggtggaagagaaaagcagggacacgtgtctggtgggagacaaatggactcaaaacaagagccgaaaggcgggggggggggggataaagggagataaaaggggataaattaaaggaagggggcaattaacaggggaagggggattaattaaaaaagaattaaatgttttgcttcccattctcagggggacagtggcgggggtttggtcggcaattttgaggacggaaaagggcgccggcggtggtttattttgggcgttctttcgtcgggtggcgactgtttgcagctccaacaaggcttagagaagcctctgatgcaggcaaaagaggcgaaaatggcaaatggtggtcatttgattgttaaggaattcacaaatgtcactttccacaaaaatgccatcgaaaagtttgtgaacggaaatttaaatgaagagaatccgacgacggaagaaacgaaaaaagaaaaagtcaaagaagacgaggaggacgaagcagaggaaatgtggggcgattgtcaatgaaaaaaggacggagagagggaccaatgccaatccaatgccaaagacaaagaaatgccaaaatgcgcgaaatttctctactcgatcgatctgctttcgtaaagacggcatccccagaaaaaaataaa

SEQ ID NO: 65382 - DNA, 597 bp, Heterodera glycines
atggtgggatggatgacattcatcaccactaaaaatcccagtgatccgttcgctttatttgccttttattgtcaagaaatctcgaaaataggacgtaatttgggactgattttgtcaattgttatggcacataaaaagcaaatatttgtttggccaaaaagtgaaagtatttaaagagctccaaaatgttttttcggcacattcaaaaaatattcattctgcaaaaagtcaatcattcgctgcttatcattggaaatggcttcttcttcaaccatcaaaatgtaatttgtcactcatttccaattttaaatttaatttttaagcttttccctttttctgcttgtcctttgcattggcttggccgttgaacagtcccaagcttatgtgagaaattttaaaataatttaaatttatatttcgttaagtggggtggctacgcatatgcctatccctacggcggatggtacggcaaaaggcaagccgggttcggcccatccgcaagtgttggcacttttggcggtgacggagacggaaatgccaacggaggaagggcaccgccgccaacaaattgataaagggaaagtgataaaggaataa

SEQ ID NO: 65383 - DNA, 643 bp, Heterodera glycines
atggccattttggagccgcgtccggtgtggttcgtctactcgggcatgggcagccaatgggtcggcatgggacggcagctgatgcgcattccgctgtttgatcaatcgctgcgcgagtcgtcgcagacattggccgagtttggcgaggacgtttatggaatgttgacgaacgcggagccgaagcagtacgagaataacacgctgaactgcatgttggcaatcacgtccattcaggtgagcgcccgggaaaagcatggatttaattgcatttcaaattggaaggcattagcaatataattgagcgaggagagtgccattcacaaactctctaaaatgccgtttttcatagattgctttgactgatttgctgttcgctttgggagtgactcccgacggaatcgttggccattccaccggagaaatgggctgcggttatgcggacggagcactgacacgcgcgcagacgatgatgttggcatactatcgcggaaaaacgataatggcacacaaagaacgaatgcgaggagcaatggccgcggttggactcagctgggaagaggcagtcaaacgctgcccagacggagtggtcgccgcttgtcacaacggtgccgactccgtaaccgtttcgggggacacggaaaag

SEQ ID NO: 65384 - DNA, 410 bp, Heterodera glycines
ggcaccgcgtcgcagaaatcggccgccggaggaactacgtcacagaaatcggcagcggcacctgctggaggagcgtcggcgctgggcaccgtgtcgcagaaatcggccgccggaggaaccgcgtcgcagaagtcagccgctgggggaaccgtgtcgcagaaatcggcagctggaggagccgcgtcccagaaggcctgagcaaccaccggacggcataagaacaagacgctctacaacccgcttcaatgatatttatcgacagtgatcagtaatgatgtttaaaagaccccgtattgttcccccacatacctatgcctaattgctctattgtctgtgatcacgtatatcatttgtaaaaccgttgtgtgatcattatttgtgtatatgtatgtatattgtatgtatgtgtt

SEQ ID NO: 65385 - DNA, 482 bp, Heterodera glycines
atggacgccgacatcattgagttgaccgggcgagacaacgacgagcactttctgcctcaccacgccgtcatcaatcccaagaaactccgaatcgtcattgacgccagtgctcatgccaagggcactccaagccttaacgactgtctccaccgcgggcccgtactgcttcccgatctttgcgggatcctcattcgcttccgatcggcaacgatgcctgttctggctgacgtccaaggggctttccacgccatcgaagtcgagccggacgacagacgcttctgcaaaatgctctggctgaaagacccctcccggcccgtctcaggcgataatctcctcatttatcgctacaaacggctcgttttcggcgcaacttgctcccctttcatcctcgctgccgttcttctccaccacttcgataggcacgcccacccattcgccaaggaattggccgcgaatatgtacgtcgacaacctcctcatcga

SEQ ID NO: 65386 - DNA, 526 bp, Heterodera glycines
atgacagcagcagatcatccgcaactattttcaacggaattggtggcattgaagcgaatgacggcacttccagcgaagcgacaaaccgccagcagcagaacaacgacgagtgatggaacacagagaaagagagggaggagagagagagtgagaaagacagagagggcgaccgtattcaatgtgaaatgcatactgtaactttgtgtattcaaaaacaataccggagaagcataccgtacaacacaattaatcgagaattttttaatttgggcatttttaaaaaataaccaaaagtctaaagggaccaaaacattatacttctattgcattctttggtttaattgtatatggtattcttataatatcttactgtctcatatattttttaattaatttccctttttacatcacatttcttccatttagacggtgcataatatgtgaatgtgttacagtgaattgaaaacttaccgtaatttacaaaaatgttttttattgttccattttttcttatatttcctcaaca

SEQ ID NO: 65387 - DNA, 1050 bp, Heterodera glycines
atgctgcgcgccattggtgagttgtcatttgatcactttagccattcaacatcccattttaggcatttcgaactcatcggccgccgactgtgcaaatgtcgcctacatcagctcgttgattggcacgcgcgccgctcatctctgcgcctgtgggcttgccgccatcctcaaccgcatgcagaggccccgcgtgactatcggcgtcgacggctccgtgttccgcttccatccaaccttcaaattcaacctcgaccagaagatcaaggcgctgttggccgtcaaatgcgaagtgagttacatagtttctaatatcgtttcggaatgatatgaataaatctcctctaatttcagttcttcatggtgctcagcgaggacggaagtggacgaggcgcagcagtcgcagcagcggtcgcattgcggatgaatcgccttgtgggagcgtgaacagcctgtgacgatgccgtccgatgtcagatgtgtgaatcttaggccccataatgtcatatgtattgtaatgttaggcattttgtcccatgtctgtctgtatataaggttgaattcctaagcacaatgatgttccattattcacaatttgtatcaattgttcatttgtattgtgtggtgtgataaatgagaaaacatttatgtcgttgcaaagaagactggaaaattgattgcctatttcaatttcagaagttggtacttgtttagcgggtttttttttggggtgtactgtagtcaaccccccggaaaaaatgacataaatgatataacaatcgattcgtctcgacgagctatgcacgaaaaagtaagtctccagttgcggaaatgccaaaaaaccggtttttgaaccggtttaaaactcgaaaatttgagtgaaaaggggggctcctgaccttttaaaacgcccaaattcggacaaatttggtatcattcgaaagctcttgatgagctaagtctaaaaaacaaggtataaactcgaaccaatgccatctaagcactgggacaacttagtcccagagaaaatggacacttcagtaccaaaataaa

SEQ ID NO: 65388 - DNA, 219 bp, Heterodera glycines
acggacgattcactcagagcaccgatgagacgctcgagttccttgtacgacttctttgtatctcaacaacctccagttcattctcttgcgaaaaagaataacgaagccaaatactatgcgaggaattgggaattgtttccgagaagtttcgtttcgtcgtcttcgcatatgatatgcagaccaaaaggaaaagaaaaatatcatattttgccaaactaa

SEQ ID NO: 65389 - DNA, 263 bp, Heterodera glycines
ccgtcttcgtatgctcccttttgcgaaatttttccttttaaatggttatttattttggtactgaagtgtccattttctctgggactaagttgtcccagtgcttagatggcattggttcgagtttataccttgttttttagacttagctcatcaagagctttcgaatgataccaaatttgtccgaatttgggcgttttaaaaggtcaggagccccccttttcactcaaattttcgagttttaaaccggttcaaaaaccggtttt

SEQ ID NO: 65390 - DNA, 265 bp, Heterodera glycines
acagttttggcacggttcggaaaaataccttgtaatatttctttcatctttttagtttgtctgttgcgccgaatttgccaaatgtatctgcaattgaaagtgctgggaaaaacgcattttgggtgggtcgtgagaatggcacgatagagagggtattaattttggatttgaatgtttgggccaattagtatattcagtggacttctattaacgaagcgcatggcactggcgggagtgagtctttttccctcctttggtccctctc

SEQ ID NO: 65391 - DNA, 303 bp, Heterodera glycines
aaaattccctcaaaaataaaaggtctattgcgcaccgccctccctatcatgctcgagagcatttgtatgtgtataaaatttatcaaaaaaagagatagccatttttctgggataacctctaaatataaaaatcctctgtgaaataaaatggcgattgtgcacagccctccgtctcatacgcaagcgcttttgtgatgtataaaatttctcaaaaaaagagatagccatttttctgggatagagtataaatttaaaaatcccctcaaaataaaaggtctattgcgcaccgccctccctatcatg

SEQ ID NO: 65392 - DNA, 1517 bp, Heterodera glycines
tgcattcaatttttttagaatggcgacatttgcataacctttttgcacccaccggttgatgacccgcacagtggcgaggtaaagatttgcatctccgtcctttttttattggtttgcctttacggaagttcagtgtaatggcgtaattaattctaaaaactagaaaacaaagtcatgttactactttttggttgtatgcaagaacggtcctaaaaggggtagcgggatacgtagaaaaagaggtctatgcccccttcaagccgaattctgggaagcacgtaaatttttatcaacctccccccaaaaaattgcaaaaagaaaattgctcagtcacctttcccttttctcagatgccttccgagcgatggaatccaacacaaagtgtgcgcacagtgttgctgtctgtgatttcgctgctcaacgagccaaacacgtcatctccggccaacgtggacgcatcggtgatgtaccggaaatacaaaggtgaaatttcttcaaaaatgaaacaaatttttcttggacaccgatggctggaaaggtgtaatacgtccaaattacacacacgcacttatttcagaccacggggaccaggagtatgcgactattatcaggttcgttgttggatgtgttttcaaaaagggatgtgctgcacatcggttcgaaaaagagctctcgtctggtctcatgtgggagcagttcgccccccccccccccctctgggtgccttcctcaccgccgggtcagttcccctgtattgtttctccccaaaattaaaaaaaaaccccgaaattttaaaacgttttttaattatcccatccactgtatcttccggtcaaaatcatggtaccatttccaggtttataaatacaaaaaattgctaatttgtttgtttttttatctgaacgctgtgtgattaagaaaacaggtggaaaagtccaaagaggaggccaaaaaggacggcatcaaagtgccggaaaccatcgacgaatacgtggtgaaagcgaagccgagagtgcagggcaacgagtccaacgatgtgattgagctggacgaggattactacgactacgaggacgacgacaccggtgagggcgacagccgaataacttaaaaagcattttaaaacaaattattttctttttaattcagcgaaaggcttagtttacttttcggttttcaaattttttacccgtggttaccgtttcaatttgctggcttttttgtcaagaaaactggtaaattccctctggttttattaggggtcattcattgattatgcatatgtctttcattccagacaataccggacctcgaatctgagttttagcgaaggtttggattttccatcttaaaaaggaattccccactttcccctgattttgggcttgtcccaccccctaaatggtacaaatttctttaccaaaacttcaatttcaatcaaaaatgtgcctccataaaaccccatcccccattttcccccagcagatgaagacgctgaatacggcggcgaagaagag

SEQ ID NO: 65393 - DNA, 999 bp, Heterodera glycines
atggcattttttaaagtttgtccaaaaaagcgctgaaaatttttaaaatttttttttacttgtgatatcttataaaaacttttctcagattctttttcttgaaagaattcaaagtttgaaaattttttaaagttttcggcggcgaaattttgggtgcatccgttttccatctgtccaaattagtaaattgtattttttttttcaggtccgtctctttcgtatacccaaattctgcggcctcctcaaaagtgcgctgcgctgaccgaaccaacgaattgtgtgactgcaccacatgaaattcatcgtcttcgatgaacactgtcgtcatcacaaggttttttttctcgtatttttgccctattaatgggtccgtatgccataaatattgtctttggccaaaatactcttttaaattaatttaaaagtaaaaaaaaaaactaaaaaacagttttatatttggtaccattcggtgcaataatgagtttaatcaagctgaagaaaattttaattcaaatagttaaaggctaaaaaaaatttatgggtaaacataattattgattttgaatttttgacatcgggaattgtacctctgatttcctactattttgtttttaatttaaaaaaactaatttagtaaatcttttgtcaaccgtcgtgatcgctatttgctgatcgaagacggttcactgttgaccgactttttcgtcgacctgttccgcattgttggcgacaatccttccggccggcggatgaacatgtcggatttcccgccgtggtaacaatttcgccgatacatccggagacaggtaaaaaaaaatttttcatattgtttgatacaaaacaatttttttttttggaaaaaaacgcagattttcaatacacttttttcaaaaaaatttcttttactttttttcacgtttccagcaaaaaggagacgacgacaatccaccggctggagttcacgctgatgaaaggctatttcaaactgttcgaccctag

SEQ ID NO: 65394 - DNA, 944 bp, Heterodera glycines
atgaatttggataacaaactgttccgtcgtttgcgacaattcgtcccgtcaattctcaacgattgtccgttgttacgcgttgtctccttcagcgaatccaatcttttcaccgaatttccggccgatgacagtgccacggcatcggatggacaagcgatggcaaaatggcttttcactccacttccaaccaatgtgccaaaggtgttgagatgcccgttgaacaaagattatgtgaatttggcgtcaacaattgaagccttcaaatcggtgctttctaattgttttatttggcacttagtttctttgggtttcgctgatctgacaaaaaatgtttttttgcccaatccacttatttagatatggtatgattgttttaagaaaatgaaaaaaattgagttttcgattttttgttcgaaatatggtccgaggttcggaattggatcgcaatggatatcagaatcggattctcagtccctgaaaatccctaaaaaaataaataccattttaaagtgcactttggctttttgtgatgaccccaatatcattaatcattttttcacattttaggcttttgcctcggcttcatctcccgtcaatttcattgtcgtgctttggtttccgaaatcttttgctgcctccgtcatgctctttgatttggccaacgaattgactcacgaacaattggcattgaaaagaactgtctttaacacccgctttttgctaatccgttgtccaattgtgcgagacgcgaacaaatgggcgaaatgggaagaagaagcggctaattggctaatttattatcaatggaacagaattgacattgaaattaatgatgagaaaaatattggggacgggtcagtcagtgttgaatgcttattcaaaaatccaaatttatttatttttaggcttctcggcgcaactcccggcccaagtgatcagcagaa

SEQ ID NO: 65395 - DNA, 1742 bp, Heterodera glycines
atggcaattgtccggcaaaaagacaaacggcggaacagcggggatcaattagcatcattagtgtcagcagcatcatgtgaaactgtgccgtgccgaaagcccatccctatcagcagaagtgccaattccgttcgtccaaaaaacgccggcggcgccgccagcagtcggctgcttctcctctcatttgcactttcactttttctcactttggcagatgcacgcaaaaacaatcaccactacaaagtaaagggagaatattacaatttttttaaattgattttttccaaaacatttttacaaaaatttgttctcagttccataaaaaatttggatatttttatatagataaatttttaatttcttgaccagtcagctgaaaagaaaaatttaaaaaaatttttttatttttctaatttttaatacttgaaaacttagaaaaagattttgatttttaaaattaagatatacataccagcaatgtttgcagacgccctaaaaaaaattgcaacaatcggaattccgacgactgaaaaaaaatttggcaatcggaaatcgtaattccgatccaaaaaaatgtcggaaattggaaattggcattacaacatttcactgatacataatcctttttcaattttaatttaatttccatttaccgagataattattaaccccgaagagatcaatgtccctgctgatccctaattagtctgtcaaattaattaatgaaaggtaacggctgcagaggacccggttgtggtacaccatgagaaaacagcggcatcacataaacaaagtacagccaaatcagctgcttcaccagcaccggaagcaaaggtactcacttggcgggacagcccattttcagtctcgaatttcggattcatttcagtctcgagcttcgagattaagcttcaatttaaaggattaacttaaaaatttttgatgattttgttggaattttctttcagtcaatacagtttttaaacttccattgaataagaaatgtgcaaaatgttaggcgcctcgggtgggaattgaacccactcatccacatttccgcattttaatcacacagccagcttcttccttacaattataaaatatgcaattaaaaaattttcgaaaaatttttctttgaagggacaacggaccgctcaacgacaacaacaacaacaacaacaacaccagcaacagcacaataagcagcagcaacagatcgattctgagttctccattgaggatgtggacgaggaacaaattgacgaaattcttcgggacactgccaaaaatttggttgtatttttctgtaagagagaatgaatgaatatgtataaatgatgagtgtgatcagtgatcgatcgcttttttagatgacggtcgtgcaaagtgtccccagtgtgggacagcgttgtccgaggtggaagagattgacgacgacatcgaggcgactgggtacattgaggtgcgcgaaccggatacggaaattaaaccaatgagaattggaatagatcgcatccgagtgatttggtcttttttttatccggcattttgggataatcctataactttttatgcaaaattctccccgacaaatgaattactcgccgacattttttttttaaatttctcccgccatccctgagaaattatgttactcatcaatcccaagacttttcttgctccaaggggtcggggaggggggagggaacctaaattaaattgtagaaatttattagaataaa

SEQ ID NO: 65396 - DNA, 546 bp, Heterodera glycines
atgggaggggggggagctacgccattctttgtccctccacgtgaaaactcgccacaaaacaacgcagggcaaccatgggcgacccccttacctggagaaggtccctcgcatccaaactctccgtacaaccaaccaggacaaaacggatacttccctcctgctccaaatgccatgcccgcagaaccagggtatccaaactactatggtccatcgccgtccaacgcaggtagttcatccggctacggcgcaccaaactctccaccgccattccaacaacaaggagacgcaaagaatccgtacaactatgagcccccaccaccaacgtcgccagcaccgacgtcggcttacatggcagccacgtccgaagtctcgtatacccaaatgtccgacgtgacccagtcgagtagtgggtacaagccgcccatcgacacaaaggcttcacccttttccaagggtgcagtgaacccaaacgccacgcctgtccatcgtgcggatggtccaagtggtggcgcccaggctccgccacaatacgatgcaccattctga

SEQ ID NO: 65397 - DNA, 152 bp, Heterodera glycines
tgtcgaattggacgacgaagtgcggacactcgacgatcggttgctgtgcatgcgcgtggaaatggggcagaagaggcggaaagtgcatttgaacgcgtgcataaacggcgaatggggccgcgaggcactcatcaaacacaaatggcgaaacg

SEQ ID NO: 65398 - DNA, 803 bp, Heterodera glycines
atgccaaattgtgtgaaattcgatactcaaagagttttggaagttagttaattctcatattttaaattaaaaaaattaatagtaaatagtaataattctactttcagctattgaatttttgtgttcgaaagaattcgaatgggattgagcagttcgacgtcttttatctgcaccttttgctgaacagcgaaataaattgcataatgaacaccgaaattggacttatcaaaaaggtttgtggatgttcccgaattggctcaccattgaatgaatttgctcctaaggaagcggctgccatcctcgattactgtatgctgcgaaatgcccgcaatttgcttgaaggagcctgtgtccgtctgcttgagggttggctttcggtgatgaatgttctgtccgtgcactgtcccttgcctttcatcgatgcccgtcgctttccctttgcaataaattcaagatttaccctataattcagaaacacaccaatgtcttctggtcgatgcgctttttcttctccgttcctattgcaattgcgtcgaaatgagttccgaattggcctcttctgttgcgttgtgcatttcgcgaactgtgcgggcaatttgtggcattttccatagaatccgcgaggtccagccaaatctttcgcccattcggcgttctctactgcccattctccatctcctacttcaaatcattgttcttcctggtaaaaccaaacattcatgattcaataattgtaaattcaggctacagcaaatcaatcgctttcaaaatggagctttattcaagttgtctacgtgttttag

SEQ ID NO: 65399 - DNA, 685 bp, Heterodera glycines
atggacgaaataaataggaaaaatagggacaaggtcatcagcaaacaaaccatcagcagaagtggaaaggcaaagcattcattcgcaattcaattgtaacaaaaaaattaattcgttcgtcggagaaaaaaagggaagagaaaaaagagaaggaaaaaacttggaaaaagagacggaacggaaaaatgagaaaggaagggacattggcacaattcggaaaaagtgccaacatccgatggagctgttgcaaaaatgttgacaactgtgaatgagattaaagggttgacatttttcaaaagatgatctcttattaaatggattttataattcatttatttagaaggaattttataaatttttaacatgacctctcatttcatgaaaataattaattttaagaaactaaaaactcaagtaatttggagaaatcttttgaaattttaaaaatttatttttttaattttttgtgtcttttgagttttttcaaaaaatattacttgattttatattaatctatcgaaaatatttattttaataattgtaaagcacaaattctttcgtgaattttttttcaaaatttgaatattttttcaggacccggttgaccttgttgaaaaacttggacccggatccggcttttgtgggcccggaaacacccggacccgtgcaaattgctgttttctga

SEQ ID NO: 65400 - DNA, 222 bp, Heterodera glycines
aaattaaccaaagtgttagccgaagcaagcaaaggttagccaatttaacacttcttttttaatagctcaaataattttaaagggagtcactcaatcgcctcattattcggttcaaacaaaacggacaaaaagtgatcggtggctcgaaaactaaccaacgattgttactatcttttggcccctttttattttgtttttttttaaatattctatttttaaaca

SEQ ID NO: 65401 - DNA, 335 bp, Heterodera glycines
atggcaattaatggaatattaagcgaagaaaagaccaaacaaattatgcaagaaattggcacaattaagcagcaaaatgatgctaaattggaagcaattaaaaatgttgaattgcgcaaaaaaattcagcaaaaaaatcactcggaatttgaagcgcatttgataaatttgctattttcatttgctgttcgacttgaggcgttaataaatggcaaaaacgaagaaggaaacattgtggaagaaaatgggcaaaattcaaaggacaaaattcgtgcatttttggctgttttaaaatgccttactgtggttaaagagtggcgaaataacgaactcag

SEQ ID NO: 65402 - DNA, 706 bp, Heterodera glycines
atgaaagaattaatagggtcatatttttatggtcatccaaaaaatgtaaggacatttaaatgcataaaaattgttcaaacttaaattaattcactccgtgcttgatacgaaaagatagcccaagctcaccacggttcaattttgactgttgtcgaaaaactttgagagagatgttaaaagtcgcacactttacaaataatgaattgatacagtagattttaatgatatgaaataaaaacccaagacaaaagcatgataatctttattaagaattaattgcaatactatattaccaaatttaaattaaatcactaaaatgtatatataaataaaataattaagataatatttgtcaagtgtaaattcttacgccttctaaggtttcaacaacggtagatgctgatctgaagaatagactgattaccaaaaggacttatctgacatcgttattgggtttgggaaaataccctggggcggcggaaaatcaaaacagaattaaatataccaaaaaattatttaattatttctttaaatagagttgacatcgttttcaatgagatgtcaatctcaaccagcactgtgttcatataatattgtattaaaagttaaatttttttgaattttaggccttccaataaaatattacgtcatctaaagtgtgatgaaaatactatattaaaaatacgaaaatccttaattatctata

SEQ ID NO: 65403 - DNA, 2933 bp, Heterodera glycines
  unsure (1)..(2933): unsure at all n locations
atgtcaccagggtcgccggcccagcacagtccagtgcgataccggaagctgaccaccgccggtgagttggcacggcccatgttcacagaagcggcaccaaatacggttagtgtacggtgcggacgtggaacggagacggagcatttccgaagtgtttgaggtgaattttgaaatcattcgcggatatntaaaaaatgtcgaaaaatttttgtttatttttgagtcgaaaatttaacgaatatgtaaaaatcgtatttttcctagcattttatccgtacagggtgccgcgcgccgcttcattgtcgcggctgcgcttaaaaaggtgtccgggcgtgcgtttgcctccaatgctgccgcgtcgtcggcagagagtgctgccatttccacgggtggcattacttcggcaccgatcagtaaaatggcacaaagcaaaagcatgcaatccctggcggcactacatcaaaggccgatccaggtgagcatatgccttttaaacggcggactttcccatttatttcaaaaaaacatttaaatttataaaattgaataaaaataaattttattactgattaatatagcaatggcttattcaattttcatttttaaattcatttttatgcattttttattgaatgtacaaaaaaggataattttggatccggcaatgtcgaagggttgcattacgttccactcagtttagaaattttaacttaacatttttcgagaaaaaatcttagaaaatgagaaaaaaaatcttgaaaaattttctagcttttttttcaaatttttttcttgaaattttcttataaaaattttttttctttaattttttcttaaaaatttcattttgaaatttaaaaaattttcaggggaaacaaaatgccggcagagcaaaaaaaaattatgaaaatcattattattttactataaattctcagctgtcggcacacgaactgctgccagatttggccgagtcggccaacgaggaatggggcagcggccgagccacaattgcctcaagtcaggcatcaaatgtgggccgacagcaggtgggcaaaccaattataggcaattaaatctgaggtatcaacgaagaagacccacagacaaaagacccccacaactttttttaaataaattcttaattaattgattttaatttcttaatttgagtttaatgtgagaataaaaagacccacgaatcatttttgagaaaattttctttaaattattattaggggccggatttatatggacaaaaaaaattccaaaatatagattattaatatagactaaacatttgtaatatggacgaaatatggtcaaaacgctgaaagatgtacaaaaaatacgaaaaatattgacaaaaattcccaaaattttttggtttgagggacgtattttccaaaaaatttccatatttagggatgtatttttcgaacttttgtgaaaatgccgatagaaatatggacaaaagtctcaaatacagaaaatattgaaaaggtaaattagaagcatcaaagcaagcttaaaatactatttacgtgaaaattttcctagtttcaacgtaatactttgcaattattagtttcgcttgtcaattgatattttttctcacagattaaactcaaattaagaaattaaaaattaattaattaagaattatttttaaaaagttgtggggggtcttttgtctgtgggtcttctgtcactacgccaaatcaaacatgtcattaaaattcactaataggctttgatgggcaaacaaagtgccgctgctgtcgctgttgtcggcgaacaacaaagggcggctggacaattggcggaacaacaaaagcaacaggtggactcatctgtcaataatagcatatccttatttgatagggccaggcatacaaaaatcgccaaaaaaaggcgactttattttcaagaattaataatttacacaaataaaaatgcggaaaaaaattttttagagtgcttttttaaattttaaagtctcattttctgaaaacccagaaatatactagagatagatatttgattttagaattttcgccacagctaaagtaattatgccattgttttggtgtttgatccctattatcacacctattttggcatttttgagacagttcgtaatagttaatggctgttcatactgattttaatttattttcatagagaaaagcacggattttaaaatttcgtaaatttttttggtatttttggtcactatttagttaattattttgagatattatttgacaagcatttgacacacaaaaagtgaaatttgttaaagattaaaattcatctggggcaaaattcggcaaagatattagtggtaaaaaattggataattatgtccgtccgcctctgatcggtttacttcacaccacgtttgggcccccccagtcatgttttttgactataaattttttctttgccaccaaatccaacattgttggtatcattcgatagccttaaatgtcctctatttgcctgcaaaattccaaaatttggtcaattttgaacaaatttatggccaaaactacatcagaaaccaggtttcagcagtcatttttgtcataacttttttgaacctgatcgaaatttttcgaaattttgcaggctaatagaggcctcttggtccatgccaatgattttaaaaaaaattaattttgttgatccaacagcagcaggtggccatggttagcagcggtgccgaaacggcgtccactgctgcgaatggcactggagatgaggacagagtgaatttggagccaacggaagagaaagtggatgacattatgggatggtgggaggacgaaggaagcgaagacaatgagagaggaggaggagaggaagagaagaataatgggatgatgaagatgagcgatgggggaggacgaagtttggacgaaatgtga

SEQ ID NO: 65404 - DNA, 2691 bp, Heterodera glycines
tttcatttatttcaggccgtaacagcactttgaaaatgctaatgctcactgttgtgatgtaagaagcattaaaaaagaaatacagaaattgtgatgctaaaataaaggtccatgctccgctccttcttcatcataatggccatggttttgcttgtgctgttctacgcctacactggtgtgattctgttcggcatggtcaaatatgggcaggcggtgtcaaagtgccataaaaaaatttaaaaaaaaattaaatctcaaaatttaaaatttaattttcaggcacgtgaacttccgatcagggttcgaagcattggttgtgctgtttcgcagtgtcacgggcgaagattggaacgacataatgcatgacacatccgtaaaattattatgtttatttgggcactgactttttaggtgccaggaaatttattgcccaaaatatttttaattttaaaatttaatttgaatgcgttagaaaacataaggggaggagtgcagacgtggtagaaaaaagtgtgccgcccgctaatgacttgtttccacccatgaaaatttttgcacttatttttttgaactgcttaagaagctcggtctcgggtcccgactcgatgaaaatttcgaatttttactatcttaggaattttcggtctcgagtagcactagagttttattccatatatgcacatatgttgctattaaagcggagtgcaccgttttgctattggttgccgggcgctaattactggcagacggactgtggcaattactacggtgccctaatttacttctgctccttctacctgatcatcacgtacattgtgcgcaacctgctggtggcaattatcatcgaaaacttctcgctgttttactcttctgaagaggacgcattgctcagttatgcggacatccgcaacttccaacaggtggttgtcagccagggcgtttgagtatggcatttttgaggaacagtctcaattctttttttggccaaatgattcttgggccaattagtagtgtgcctaatctcggcgggtgacgttcgacccccccccccgccgccttaccgttgcagttttcgacttttttcgggaatatgaatcccagttctgcatttcatacttcctaatccgggttttcgaatttttggggtcctagctgacacccctaatttgggcaaattagtagtaatctcgataatgagattgttgcaattagttttaatgagacaaaacaaaaatgaaaatttgacattcaagaaaacgaaatttgaacaaaattttgcctaggtttggaacattgtggacgtggagcagaagggccaaattccgattggccgtgtaaaatttttgttgcgacttttgcgcggtcggttggaagtggacccgaacaaggaccggctgctgttcaagcacatgtgctacgaaatggagaagctgcacgggggtgacgacgtgtcattccacgacgtgctttagtaagtggacaaaaaatgtgccaaaatttggtaaaattaaaaaatactttaatttatttaaatcaagatttgattctattgccttttcaatccatgatcataaacctcgaaaattggcgtgattcacttgatccgtgttgtgctggccaaaattatctaaactttgagattttagagtcatttttaaggaattacggaatttttagtccggcggtgccggtaattctatgaaattttttttgaaaaatttgtcattgtaaaaatcataaagaacgcgcagcctaggagggataaaccagaaaaaccgttaacaaaacctaaaaccgaacggcattttttgcacttttaaggaaaatccaattaatttttcttttctcgttaaataaattgttaaaattacattctcacaatcagaaaataacaatgtacatttaaacgaagagaacttttctaattcgcaaaaaatccacctgtttaggtattactaattaggcataaaaacatccctacttaaaaatttatgtcacaatgtaacggcatttataaaattttatttttataaactccattcattaaaatttctttcgataatttagatgttattttaatttcttaccacggttactgtaattccacatagacccttgttttactgtaatttcttaaaatttaaccccttttcttcgtgctgggtcatttcttaaaaactgccaagttgaaggaatataaaaaatctaagacatataaaaaaatttcattgattttgaaaaaagttctggacaaaaaattccgtcttaatatttggtgaatattggctccataacttttttagaatttcatataaaaattttctaaattaatattctgatagagaacactcaaagctattgaatgataccaagaattattaatttggttgaaattggaccaagatacgaatttatatgtcttacattttttgttttcctacaacttggcagtatttaagaaacgacctagcacccttttcttcagcatgctctcttatcgaagcgtggacatacgaaaatcgttgcaactcgaagagctgctccaacgggaagagctcgagtacatcattgaggaggaggtggccaagcaaacgtaagcaatttaaaaaataaattttcaaaaaaaaacgagatttttccagcatcaaaacttggctcgagttctgcttgcgccgtcttcgttcccccggc

SEQ ID NO: 65405 - DNA, 526 bp, Heterodera glycines
atgccatactcaaacgccctggctgacaaccacctgttggaagttgcggatgtccgcataactgagcaatgcgtcctcttcagaagagtaaaacagcgagaagttttcgatgataattgccaccagcaggttgcgcacaatgtacgtgatgatcaggtagaaggagcagaagtaaattagggcaccgtagtaattgccacagtccgtctgccagtaattagcgcccggcaaccaatagcaaaacggtgcactccgctttaatagcaacatatgtgcatatatggaataaaactctagtgctactcgagaccgaaaattcctaagatagtaaaaattcgaaattttcatcgagtcgggacccgagaccgagcttcttaagcagttcaaaaaaataagtgcaaaaattttcatgggtggaaacaagtcattagcgggcggcacacttttttctaccacgtctgcactcctccccttatgttttctaacgcattcaaattaaattttaaaattaaaaatattttgggca

SEQ ID NO: 65406 - DNA, 609 bp, Heterodera glycines
atggcaaatcaacctttttattgctttttgcggggtatcaatttaaatgtgcgtgtatgctgactgatcatttttccaggtacattgaccattccgtgatcacatttctccgttccaacaagcaaatttttgaccgaaatgtcacctatttggggttggatatatttacagacataattgaaaatgatgaccatccgatttggccaattttggcccgtcaaatttggccaatttttgcgacaaacattcacattttggactgtgccgatgacaatcatttggacattttggcgtaccaaatttcaccgacaattctcaccgatgttgatcaattgaatgtaatcgcttttgatattatgttccttgatggaattgatgatgaaatttctactggccaattgttgtccgaatggttgcacattccgagaaaaaatggtaaaccgaagaaattgtattgcggcaaaggatttaatgttgaacgacacttagattggatcaacagtttcaaggaggtgcgtttggtcacattctcataaaatttgggttaccgtacttacttactgcattagtacccccctctgtattaaaaccgccctttcgagagaggga

SEQ ID NO: 65407 - DNA, 528 bp, Heterodera glycines
aaatctgggcgcatcggttcggggggactgccccgaaaacaaaaaaatcgattttttcaagtgtccgtttggggtactcaaacaattatggggagcaaaaatccaacgcagaattaaagtacaggctatagggaagctactcccgaaggattcggtctccccataaatctgggcgcatcggttcggggggactgccccgaaaacaaaaaaaatcgattttttcaggtgtccgtttggggtactcaaacaattatggggagcaaaaatccaacgcagaattaaagtacaggctatagggaagctattcccgaaggattcggtctccccataaatctgggcgcatcggttcagggggactgcccgaaaacaaaaataaatcgattttttcaagtgtccgtttggggtactcaaacaattatggggagcaaaaatccaacgcagaattaaagtacaggctatagggaagctattccggaaggattcggtctccccataaatctgggcgcatcggttcggggggactgcccc

SEQ ID NO: 65408 - DNA, 1026 bp, Heterodera glycines
  unsure (1)..(1026): unsure at all n locations
atgtataatcagggaggacgcacttttcgcncaatatgtgaatggagaagagcatgccgacaatgtggagccataacctatgcgaattatccacataaatgtccagcccaaattggccaaacggaatgggtgcgctgtgcacgatgctctggaccccatcaaagtggagacccttgttttattcagcctctcaaagatgaaccaatgaggaggagaaggagaagaagagggcaacagcaacaacaacaacaaaataataataacgatgacgaagacgatgatgatgataatgatggtaacgaggagggagacgacgatcacggtcatgatgctgataatgaggaagaagaagaagttggaacaaatcggtcggtcagactttgctttttcgacgctgaaacgtcccaagatttaccacttcaactgcgtacaaaggttgtacagaaacatgttccaatgctcattattgccgaaattatctgcgaagcgtgtataaatgaaggaatttcggttcattctggtgttggacaatacgcaaatgggtgtgtgtgtggtcctcctgcgggaccaagggggcgtcgctggtgttctcctccgtttctgaatgcacctggggatgacaatgctctatcagccaatgtccactacaacccacgaagactgtttttccatagttttgacgacgctaccaacaatgacccggtggacgattttatcaactttctcaccggaagtggtccacatggtgtgaaaacaatttgtttatcacacaatggcggaaaatacgacattcatttaatactggaggcacttcaccggcgcaatttgccaccaaagcgtatttgcacaacgggactaaaaattttttcgatgactttgaaagggaaccatcaacgacacgtgatctttanagactcgctgaactactttttctgtgaattggatgcactgccacgcacatttggattgaacgctgaaagtgcaacagcaaaaccttttctttccttatctgttcatccggcgtga

SEQ ID NO: 65409 - DNA, 564 bp, Heterodera glycines
atggctcgacttctgcttttagtttttggcttggccttcgttttcgccgttttggcctttggcactgcgcagcccccgccgcccttccaagggagcggttcgttcagagaaggtgaagccatcaatttaaatatttaatttgttatttttggcattttaaggccaattcggcgcccctccgtttggtggcaattcggcggacgtttcagtctcggcgagtgattcgtcggaatgcagcggagaaggaggaaatggagtgcaaggaggtgaaaaaaacgcgcatttttactttataatttatttttaattcaggtggggaatacggtaatggcaatggcggctttggcggaggcggtgccgaaggtggccaagggatggacatcgatgtggatgttgaacaatcatccgagaagtgaatgattttaaccacggttttttattgaatgtgatttgttttcttggtgtatttagaattcggaaatggacattcagcaacgataaaattattaccaaattttatggctttaagttccgcattagagccgtgaaaaattatcatttaca

SEQ ID NO: 65410 - DNA, 1716 bp, Heterodera glycines
atggaaagcggagttaaggaaaaccctattctaacagctaaagataggccagtgaatgagatttcgagggtaccactaacaaaaagatggccgtctcctgaagaaatggaacttaataaaacggtcgcaccaaaggggccaagtaagaaaaatgtgatccaaacaaggagactaaaagaagaacggtgtgctgtacgtacaaccgcaagacaggatgtcggacagatgcaaaacgagacagttttagctctaattgaaactgagaattgggttccgaattttaaaaagaagggaagggtcaatcatcatgacgcggtgtttctcgtcgatacgggagcacacatcactttatgtagtgtccaaacagcaagaaaattgggcataaaattgctgcataattcggaaatcccaggagtggttggtattgacgggaaaattgttccaataatgggacaaacagaaattttgattgaattgatgggccacgaagtcaaaagcataatctcggtcgttgatagaaatattggaaaggggtcgtatgacattattttaggacgaaatacttttcaaaagttgtcttttttgttggacttacaaagtgggaaattgatggagaaaacaaaaaaagtaatggtagccgaggaaaaggagacgaagactcaaattttggaagaaatgctcaaggaagtgggaacaaaaaatgaagatgagatagacagattaagagaatgtctcaaagaaaattgtaaagctttttcggaaaatgattatgatttgggaacatgtaaaattattgctcctactcttttaacttcgacggaaatgcctgaacgagttaggccttatccaattcccgaaaaatatgaatcggagttaaaggctcatattggaaaaatgcttgaagttggagtgataaaagagagcacaactccttgggtacataacattgtgctagttaaaaaggctaatggccagctgcgtccatgtgctgactttcgcccattaaataaagtgacaatcgcagacccataccctctcccgcgtatggacaaagtcatttttagagcagcagggaaaagatggtactcaactctagacttagcctcaggattttggcaaatcccattggatgcagaaagttcgtataaatgtggcttgattacgccttgggggttataccaaatgttaaagttgcccttcggactaagaaatgctccaagcatttttcagagaacaatggaccaaatacttaagggggtaccgaacgtaatggtttatatagatgacatattaatttattcggaggaattggacgaacacattgagagtttgaggaatgtgtttagatgtctctgtgaaaatggtttgaaattaaaaggccaaaaatgccgtttccttcaaaaggaatgtgtatatttgggccatattttatctgcatccggttatcagccgtcgctgtctaatcgtgaagtgattgagaatttcccacccccaactaatgtcaaagaaataaaaagattccttggaatggtttcattttttagaaaatttatcccaaactttgcacaaatagcatacccattaaacaaattaacccgaggaggagcatttgaatttgaatggggagagaacgaggagaaagcaatgaatttgttaaaaaatcacttacttaagtcgccgagtcttcgggcgccaaattatgcactaccgttttaa

SEQ ID NO: 65411 - DNA, 455 bp, Heterodera glycines
atggtttcgagaagtcaatcaccgattgatcaacaacgaaataatggctctgattttgattcctccctgttcaccctggaagaaaacgaattcttccaaaatttgttaccgagactccgttcctttgaagctgccgtgtgcagccaatttcgtcagatggaaaacgaaatgagaattgagtcggagaggaaaggtgaacaaatcagagaattggagagaatggtgaatgagcaaattacagttgaagaaaggagtaattttgacttcgcggaaaggattgtgaaattggaggatcaggcagaagagaatgccaacactctcaaggggtacaaacaagcggccaagataggtctgaaacgaattgttgaacgcatagaaagtgaattaaaaaatgtcaagaccaccatcgggaaactccaagaaaagattgaaactgtggaaaatgattttcaaga

SEQ ID NO: 65412 - DNA, 939 bp, Heterodera glycines
cacaattttaaatccatggcaacatcggctaaccatcggccaatcttcgaatttattgtcgaattgggtaggtaaatttttactatttttgggcttttctgcaattttcaaactattatgttccatctttttaattccaaaattacctttccatttaaatattcgagaaatgtccgattttgccgggaccctcaaatttcggcattttgtccaatacgaaccccgttccgaatcgaatttcccccatttatttcccctcatttgggcaggcattcgtctccaggccgattcgctgaccgtcgcctttgcctcggtgtattgccatcgcgtgttgcgccaaaaggcttttccgggcgaccaaatttgtccctttgtgagcttttttttaggttatacgcaaattttatggctttagtgagttttaggcgtccaatcattactttcttttgcacatttttcttatttggtcaactctatgtttttggcatcaaatgaaagcaaaaaactctatagaatttttttgtggacctaaattcttgactaaaagcaacaaacaaaaaaggtattcttggatatgctcgaaaaagcaacttttcgtgttttaccgttgcaattttttcgtaatgtcagatttgcttttttctttttatttttaaattcccgggactttaagctttcatttggtaccaaaaagataggcatttgccaagtaagaaaaaacgtatggccaaagaaactaaagattggacgcctaaagtggcactagagccaatttttgaatcaattttggccgtttggctctttttttgttgaaaatgcttaaaattttccggttttgtcaaatcccccccttcagacaatggcttccgcctgtgttttggtggccggcaaagtgacgaacgacgcgcgcattaacacgcgcgacgtgatgaacatggc

SEQ ID NO: 65413 - DNA, 526 bp, Heterodera glycines
atgagcggatgttggagtgcgaaattggttagaccaaactgggaatcttgaaaagcatccaatgggatttacccggagtaatttcagcaacaccacaaatcgtgataaattatgcactgtttttggaggacaaccaatactttgaggatgctttcaaggcgttcgagaagggaattgggcttttccggtggccgctcgtatttgacatttggaacgtttatctgaccaaattcatccaacgatatgtgctgtgtttttggtctatttaaactataaattttcaatttatagggtggcaaaaagctggaaagagctcgcgatttgtttgagcaatgcttggacaaatgcccacccaaatatgccaaaagtaaatgttgttacttaatactacattgattgtaaatttccaattttagatatttatctgctttacgcaaaactggaggaagagcatggattggcacggcactcaatggatatttacaatcgggcaaccggagcagtcgaaaaggaagaaatgcatctg

SEQ ID NO: 65414 - DNA, 163 bp, Heterodera glycines
atgttcgatgctggtgggttgagtcccagtgattggaatgctgttgggttgagtcccagtgattggaatgctggtgggttgagtcccagtgattggaatgctggtgggttgaatcacagtgattggaatgctggtgggttgagtcccagtgattggaatgctg

SEQ ID NO: 65415 - DNA, 243 bp, Heterodera glycines
atgccctgcagatcagcaagaattcaactggtgagtgttttagttacattttattttaaccttatttgaaataactttttatagaatttttattttcagattattttgatcgacgaagtgttatctttgcgaacaaaaatccacgaaattgagaaacaaaatgggcaataacaatgtgagaaaaaatgtttaagggtcttttttaaatattttatacttaattaagcaatttttggaattaaa

SEQ ID NO: 65416 - DNA, 692 bp, Heterodera glycines
tcgtcgtcaaaaaatgtcgaattagagaaaaaagaacagcagcgactggcgaagaaattgaaccatacgcaagccatgggacatcatgataaagtgcagcactttaattacataatttaaaaacgattggatatttttcagccaacaaatatcagcgtcgccaataattcaagcagtgattttatgaataaaaattgcgtattttaatttaaaaaaatatttatcagaaaataatgttacatcgcgcaccaatgtccttgtaactagcaaaaatacaactgatggtgagtgttatacctatttacgttttattttttttatcaattggtgggcaatctttttaatccgatgagcttttcaaatccttgtcaaatattttaaacattgtagtcagtgtttgatcgacaaaaacaaaaaaaattaattagactttttaatgaacaggtgattacttgcacgtgcttttcccgcccttaccaattgctgtagtggtaattatgaatatttcctcatccttgaaattgtaatacattaaaatttaatttacagcagcagcgatcggcaacgaaattgaacaatacgcaaccaatgagccatcattatcaagtgcagcacattaaattacttaatttaaaaacgattgaatattttcagccaacaaatactcgcgtcgccaaaaaatcaagcagtga

SEQ ID NO: 65417 - DNA, 443 bp, Heterodera glycines
atggagcggcataaacagcaaccagtaaagattggagagctgataaaagagaatcgcggttggctctgtgccttggtcaggacaaaatccggaaaaaaatgcaggaaacttatacgaaatgcaaacactgaacaactactatcgctggtcgaaatttgtttgaatctcgtcgcttcgcgcttccaactgacaaccagacagaagaagcgactaatgccttatgtggatactgtacgccgaatcagcagagcgagaagtgaacggggtgccaagcgagtgcttgtccagaaagacgcaggatttggcggattgtacgctgccctattgacacccgttctaatggaagtggcaaaaatcctttgtgaacaaaaacgcataaatacctctcatcattgttgaattttgtgaattccattattcatttaacagagatggcaaataaa

SEQ ID NO: 65418 - DNA, 418 bp, Heterodera glycines; identical to SEQ ID NO: 53014

SEQ ID NO: 65419 - DNA, 838 bp, Heterodera glycines
caaaatgcatagaattattgctgcggttaaaaagctcgtagtgggatctgtgctagccgtccggtgcacacttggtgtgttactggtttggttggcttttctgccggtctctccccggcgttggcctttaccggtcggcgtcggtgggctggcgagtttactttgaacaaatcagagtgcttcaaacaggcgtttcgcttgaatgttcgtgcatggaataatagaagaggatttcggtccgattttattggttttgctgaccgagataatggttaacagagacaaacggggccattcgtattgctacgtgagaggtgaaattcttggaccgtagcaagacggactacagcgaaagcatttggcaagaatgtcttcattaatcaagaacgaaagtcagaggttcgaaggcgatcagataccgccctagttctgaccgtaaacgatgccaactagcgatccgccggcggatttattcgccctggtggggagcttcccggaaacgaaagtcttccggttccgggggaagtatggttgcaaagctgaaacttaaaggaattgacggaagggcaccaccaggagtggagcctgcggcttaatttgactcaacacggggaaactcacccggcccggacaccgtaaggattgacagattgatagctttttcatgattcggtggatggtggtgcatggccgttcttagttcgtggagcgatttgtctggtttattccgataacgagcgagactctagcctactaaatagttggctcattgcttctgtgggcacaacttcttagagggatgttcggtgttcagccgcacgaaattgaccaataacag

SEQ ID NO: 65420 - DNA, 785 bp, Heterodera glycines
cgaaatgccatttcgcgaccgaacggcggaattcagaacagtggcaaagtcatgtcaggttggtttgttggatttttttaacaataaatatgaaattacattaattggcagcttcgacagcagccaaatggatatatgggaaagagcgaacgagaaaaaatcgttaattcttcaattcagttcaaccaattggccaagttgttttgtagcattttctgtggtagtaatcggttttaaggcgcattggtcgggatttaagtatgacatgtgccaaaatggagaaattggcacaattggccaagaaaaaatcattgttcgatgacagagctggggaagttgaagaactttcacaaattatcaaacaggtttttgaaaattttatggaggtggcatttgaccaaacaattttcaggacatcacgggcctcaacaaacaaatcgccaatttgcagcaattggccactcaccgcacttccggcggctcttccgtttcgttgcggcaggagcaacaaagccaaaaccactccaagttggttgtgggtggggttgcagtcgaagctcgccaacattagcaaaaacttccaaaatgtgctggagattcgaacagaggtaaaaccgaggaacggattttaggaggaaattttcgtattgacagtcctttaattacgacaccaagtttgtaaatttttagaatttgaagttcaaaagagagagacgagaaaagttcagtcagtcgggggcaattccttcgaatttgcccccttccacaagaagtggaccaagcga

SEQ ID NO: 65421 - DNA, 845 bp, Heterodera glycines
atgatccccagaatcctggcatggaaaagcaaagtgagcatgggactcctctccttaaggtatgtaaaaataaataaaaatgtgaaagggtgtaaaaggaattgaaaattaccatataatcgacgcggtcctcagcgagccaatgaaatgcttttatgaaaaaaagaacaacaaactgaacaacgaacaccggcgaaaagtcatcgcgaaaaacggctgaataaaatcaatgaattcgagtcggacagaacacgcacttactgaatgccaaacacgtctccatcagcgtgtgccaaacgcgttcctgggcacgttcgacctcggccactctcagctggccgaagaaaaggcatcgaagcaacgaaaagaccaggtaactgaggacggctgcttggaagtaaaggacctaaaataagcaaacgcaaatggaaatgaataggggagagacgaactcacggccatggaagtggaactcttggaaagatacacaacggacgggtagaactgcttcttgaggaagaaagcattcaaaatggtcaagacggtagagacaaagcttgccaggaccacaaatgacaccgaaattcggaccattctctttctttcttcttaaaggaactgatggaacgaaggaacagacagacaataagacagaaatatgagaatctttctaagaaacgaacaaatacataaaataatttattcagaagcggaagagtcgcaaagctatcacatggactaaagaggagtggaagagtttaaacagaagaaggaacgggcgaatggaaccgtcacaaagcgattttcagaaagacctaatgatgaccaacaattaacacaataaa

SEQ ID NO: 65422 - DNA, 2480 bp, Heterodera glycines
atggtccgaatttcggtgtcatttgtggtcctggcaagctttgtctctaccgtcttgaccattttgaatgctttcttcctcaagaagcagttctacccgtccgttgtgtatctttccaagagttccacttccatggccgtgagttcgtctctcccctattcatttccatttgcgtttgcttattttaggtcctttacttccaagcagccgtcctcagttacctggtcttttcgttgcttcgatgccttttcttcggccagctgagagtggccgaggtcgaacgtgcccaggaacgcgtttggcacacgctgatggagacgtgtttggcattcagtaagtgcgtgttctgtccgactcgaattcattgattttattcagccgtttttcgcgatgacttttcgccggtgttcgttgttcagtttgttgttctttttttcataaaagcatttcattggctcgctgaggaccgcgtcgattatatggtaattttcaattccttttacaccctttcacatttttatttatttttacataccttaaggagaggagtcccatgctcactttgcttttccatgccaggattctggggatcatttcccttctcagtgccattgactcttacttcatttctcacgctttcttcacaactttgatgcggggggccggcgctcaaattgtgtttggatttgaggtcctaatttggaatcatttatcaaaataggattatgattataataataattgcaaaagaggctttgcacgttaattacttccctcctcaattagtacgccgttcttctcacaatggttgcgcatatgaccatcaattacattttgcatttgcacgatttgcgttcgccgcacccctgggaaaacaaagctgtgtacatgttatatgccgagctgctgacaagttgtgtttgtttctcctttcctgaaatctgcaagttttctaggctttcttcgttgtgccctttacctcgcttttgctgctgttatgatgaaggttcgttgtgacacagagaattcaaactttaatttaaaaaaatctttcaacatgtacaatttttattaattttcttacgaaattttttatttggaatatttttaaactttttttattatagtgttggtttggaaaatttgctttattaaagtttgtaaaaaaatttatacatttctttctcaccgctcttccagatgcacactttccctctgttcgccatccgtcccttttatttgaccgttcgtgccttccgaaaggctgtcaacgacgtcattctgtcaaggagggccataaatgccatgaacaatttgttccctctggcaacagcgcaggattggcagaaagtgggagaagaaaagtatcagtcagttgtgccattgcctttttcactcttcagatgacaacacatgcattatttgtcgtgaggaaatgaccgtcgaaagtggtgccaagaagttgccatgcaatcacatcttccacccgaactgtctccgctcgtggttccagcggcaacagacttgtccgacctgtcgaaccgacgtcttgagttgtttgctcgttcagtttggaaatgtttgccctttcgttcagtccaacggcgtccgtctaccgctgccccggcacaaaatgcgccgccaccccaggcccagcgtctcttcgccgctcctcttccgccgtttgcccacccatttcagtttcaattccaatttggagcggcccaacaacagaacaacttcccgccacaacatccgccgccctttttggcgccgccttttgcctttgcgcctccgccacaatttggggcgccacaaccccaacaggtggccacttctcaactgtggcatgaataatcagaatggaatttaaggcgcagcagaatccccaacagcaacagcaggcggcggcatcgcttgcgaatggttccgtcggtgaacagcctcaaacacttgaccaggaaagggtgcagccgcaacagtcagcaacggatgggacgcagcagccaagccagcaacaagcgcagcacttcccgtggtctccgcagcagcctttctttatggttgtacattcggtgccattgtctctcattctttcccctcttttagcctttcgggggtttgcctccgccccctccgtttctgcctttcccacaacctccgctggtgcgttttctgtttccgttttcactgggccattgccattttcagtttgccggtctcagtgatgctgaaattgccgcaatggaagggacggaaagacgggcggtcgaggcgcgcattcagtccctgcggaacatttcgacccttttggacgctgcactgctgcagttccagcaatatttgagcgtctctcccgggatagcccctcaacaaacgcaaagggacgaaaactttgcgcaaaacctttcgacatcggccgacagcgcaacggatgcggaaacaaacggcagggaaagtcagcggaatgagacggagac

SEQ ID NO: 65423 - DNA, 371 bp, Heterodera glycines
atgttcaaatataacacacggcagtttaatttttatccaattataaagagtacgagttttggaccggccttgggttgagaggcctatattgctttggcgactgctgtacttttgtatctaacataaagagtcttaaatttaaagttttgtcacttatttccactttatttttatatattaaatttttaataaataatcattttgtttcattaccttttgggtaattaaatctttcaggtaattttttgtgttggatatttgtgaccttttcattatttaaattagtttggcgttttgttggcgtctttcctttattgttttgttaatttattttccctcagttcgtaattattgttagttttattgtctta

SEQ ID NO: 65424 - DNA, 759 bp, Heterodera glycines
atggcaagtgccacaacaaactgtacgccaacatatgccacaagcactccaacgagtgccacaacagtcggcacgacaccgagcgtcacaacgactggcacaccggtacttaccaccaccacgagaccaccaacaaatggcgtactgtgcagatgcacacgaaaagagtaccgtatgctcaccgcagacgaacggacaagatatgtaagtggcggaggaagaaaaaaatagagatagaaaagaattcaaaatttaacaatgatagtatttttatttttgtgggattttaggagaaacgctaaaatggaacaaaatatttttaattttttttcttgtttaggaccaaaaataaattataaaaatggatttaatacccgaaaaatagcataacaaaagcatatgaatgtgcttttttcgtatattttaaccaagggaagctcagtaagtcctattgtagaattaaccgatataaattataatgacaaaaaatacttaaattcacagaaaattgattatttcttctgtccatggttaatttgtcgtgtgggtttttgtctgtggctcttttgtcacaacgctaattggaccatgtcaatttttcttggcaattaaattatagaattttggcgtaatattcataatgtttcattgtttattatttaatggtaattagtagggcttccttttttaggcacaaaaaatcgcgaaataggcattaaataggcacaaaaatcctcaaatgggcactaaaataggcaa

SEQ ID NO: 65425 - DNA, 287 bp, Heterodera glycines
atggtgccaagccccgtggtggtgcccgatgttgaggcggatgcattcaggacgatgttgggcttcatttacacggacgatttgagtgggatggacggagacaatttgttcgacgttctttacgcgggtaaaactttatttttgggttttcccgttcagtttaatccccaattttagctaaaaagtacaacattgtcggcctggtcaacgcctgcttggactttcccatcccttcgctgcccaacgttttcttcgcctttgcccaggcgcgttttctcgaagaaaag

SEQ ID NO: 65426 - DNA, 555 bp, Heterodera glycines
catttgacaaagaagtcgtgttgatggatcattatttgattgctttgcttattggagaaacggaaatcagtcgaatgaccaacaaattggctgctgatctgtccgttttcgtccattggtccgactcggaaccaaagggggcaaaaatggacaaattttggcagaaaaagcggacaatcgaaatgcatagaatgtacgacggactgtttgacgtggaattggaagtcgaaatgacgaaaatcgcattggcattcgaagaaacgatcaaagggatgaaggaatttttagcggctaacagaaacgccggcatagaaaagaaattggcagaggaatgggacaaaatggcgaaaaaagcagacaaagaaacgaaacggagggcggacgaaatgccaaaacggacgaattggaataatttgatggacgcaacgccaaaatgggtgaaggaattacacgcggcaaaattcaaaaaatatgctgataaacggctgggaagagaaacagaaaacgcgttctttgttcacccgggagaaagtcttattaatgaattaaaaaagg

SEQ ID NO: 65427 - DNA, 310 bp, Heterodera glycines
gaatttgagaagggcatatgcgacgatcatcagcagatcgggaattgggacattccaaaatttgacaaaatggaagcaatgcaaatttatgagtcaattatggcacaaggagaaaggggcaaaacaattaatttatattgtattggcatgctaattgaaaggttcattaatatgcgaatatttttctgcaaaatggatagcgatcggctggtacaaagcaaagagaagctaattacgttaattggggagatgggactgattcagttggagcaaatgtatccggaagtgatgaatttctgtgggttcaatg

SEQ ID NO: 65428 - DNA, 623 bp, Heterodera glycines
ttgaaattcttagaaatttttttgtacgagttgccctgtgtacgagttgcctattgtacgagttgccaattgtacgagttgccctgtgtacgagttgcctattgtacgagttgccaattgtacgagttgccaattgtacgagttgcctattgtacgagttgccaattgtacgagttgccctgtgtacgagttgcctatgtacgagttgccaattgtacgagttgccaattgtacgagttgccctgtgtacgagttgccctgtgtacgagttgccaattgtacgagttgccctgtgtacgagttgcttattgtacgagttgccaattgtacgagttgcctgtgtacgagttgccatgacaccatgaaattcgtatttttctgttttaatcaatcgcgcggaatcccgtccctaaaatattttttaaaattctgcaactctcagcgggatacacagattagaaatttctggtctttaataatgagatagtctctaattgagaaattctcggttattatgtgtttcggctcgaatctctagctaaattatcggttcgcaagccaagggataaattattaatcactcgagtctcggaaatactcatcaaaagcaacaatataaatca

SEQ ID NO: 65429 - DNA, 684 bp, Heterodera glycines
atggcaaaaagcaaatcgttgggcaaacaaaatgatgtaaaaacaaaaaatgatttaaaacattctgatgcaaacgatggtgattctgatgatgaacatgtccaacttttgtccaccagcgtgagggatttggccgggaactttgatttattggttgaaaataattcataaaaaaaatatattttcaaagagtgctaaaaattcatataaatgggaataataattttaaatggaaaaaaaaatttaagtaataagaattaattaattttattagctgggttaatttgcaaaactttcattgaattataaatatattttttatttaattgaggtaaataaagtttttctaaaaagaaatttattttatattttaataaaatactttttttaaactcaaaaaatgtttttcaatttaaaattttatttattctctcaatcggattaaaaaataattcattaatgagataaaaaagaaattatgaaaaaatttattcagttttttgttcttaatattcatttctatttttagaattcaatgattttataagaaaaatctttcaaatttgcagagacttggcaagatcacggataacatcatcaacaaaaagcatgacgtacagcttcgtcccgttgttgacaccagcagaaaaagtcgaaatctgcagcggaacaatacggcgggaa

SEQ ID NO: 65430 - DNA, 582 bp, Heterodera glycines
atgggttggatttggttgacaaagaaaaaagttactgcccggagcccaaacgtgccggggctctattgagcgagtccgaactgaatactgacaattatgtaaatattcagaaaaaagtgatcagaaaagagatccgacaacatggatggacactgccagggaatggtctggttggatggtaaaaaaaatgataaattaatttaatggcaattaaaataataatttaaaattcaggcgaataaattgggaaatatatatagttggagcaaagctgaaaccccggctgctgaacaatcatcaccaaatcaaaaaacaaaatcgctaaaaatggtcaaacaaaattcttcaccaaaacgggaagaaattgtataaaacgattttatttttaattaattatagttttatgtataaaaaaacatttttaaagctaacaacaaaaaaaaaattaattttttactatattattttttattaaatttaatttaagaattatgatttaatattaatattaaatatatctctcattattctttctatatataagtgatacaaaaatttattttattttttttatataataaa

SEQ ID NO: 65431 - DNA, 1889 bp, Heterodera glycines
aaacttgctcaaagagttggatgatttgattaatttgattaaaaatgctcgggacaatttcacacatgccgaggtcgaattgggtgtggcttcggcatttaaacacaaaacaaatgacattgattgttggattaatgatgccaaattcaaacaatttttggatggccaaccgattgcaattgatttgttgccaagaggcgatgcaaataatatgcaatacattttggacagtttactgcaaaggcgtgaacattttataaatgaaaatttggggaaaggaaaggtatattttcaaagaaatttagatcatttggccaatttttaaaacaattctttctttttatttctttattaatatttgatgaatatctataagaaatcaaaattctaaaattttcccgacgtcactcggcaccgccgcacagtatattttctcatttaaaaataaaaaattcatatttttggcactttttggtaaaaatctgttaaaatgaaatgtagaagaaagttcctttaaaattttcaaattttatagtaaaaataccgtacttttatatatattttagcaatatttgggtcgcttataaattttcttaaactgagtgatgatactgcaaaagtcattatttaattatcattataaattaacccaaaaattgattattaaattaatttaattgtattaatataattaataattatagaatatacaattattagactaccataaaagagcatgttaaaaccaattaaaaataattttaatataaaaataaatctatttaaatgaaaatttttcagttagaaaataagaatgaccataacctcatcaaacgcatggattcagtgataagacatgtgaacaaagcaagaaaatttctaaaaaaagcagaaggtggtagtagcgaaaaaactcgtgcccattcctatattacggagaaaaagatgaatcaaatatttaaaaaaattttgaatggtgaaaacgtaatgccaattttgttgccaaaaggtggctcgtcatgtttagaaggatatttagacaacctgataaaacggcgtgaactgatggtaaagggttcattaaacgagggcaattaaatgggcctaatttgtagaattgaaaaatgggtaattaaaatttcaatttgtaaaattattcataaaaataggatagggagggcccccaactcagcctccgagcccgaaaacttgttgcattttacggggtataaccaacacctgatttagcatttagctaatataaatttatcaaattcaaaattaatttatcattttgctaatttgcgataaaaaaaatctgaatgaaactgtcgaatagtaattagattagctaattacagttatcaaatttaaaaataaaataattaaagcgcattaattagccttcgtgcatgagaatctgatcgagactatataacttctgaatggattttgaactcattaaaatataataaacaaagaatagtgatccccgataaaagtattcattaaaaataattatgttccagcggtatggtggggaaggtttgttagaaggacaacaacagcagcagaatgaagaaaatagtgatgacaatgcgcaaaaacatttgcaaaatggtgacaattattacagtaaaccctatgacaaatacagtaattcgcatggaaagtacggtaaatcaaaaagtttgccaacaaatggtgacggcaaaaagcaggcaattgaaaatgaaaatgaatatagcaaatcgagaagcatgccaaccaccggggcggaatatgaagaaaaaggtacaaaaaagcatacggtaacatccaaatcatccatatacccaattcatccaaccgtgacacatttcataatgcccatttcatccttgtcctaa

SEQ ID NO: 65432 - DNA, 2623 bp, Heterodera glycines
atagaagaacaaccgcataatgaagatgaaacagaaaatgatgaacaaagcgaagatgggcaggaggaggtgaaattttgttaaatgaaggcttttattaaattattttaattaaaaataataattgtaaaattcaaagctattttgatcttataggaattggaaaatattagctcaaaacctcttgttgatcgacataatttcgaaaaggtcaagttaaatattttctcaaatgaatgcttttattaaattatattatttaaaatatttaattcgtaaatttaaatcctacaggaattccagaatactagctcaaaacctattattgatcaacataataccaaactggtcaacttatcaactttcattattagggcacggatttttaaaatattttaactattttttctgcagcaattttttttgcagagatagcacaaaaacactcgttttttagatttataagaaattgtcttaacacaaaagcaatacaaacaaaatacgcacctaagaatggatttaaaaactcaaaatttgaatttttgctaggctgctattacaaattcgataatcttttgaaaaagtgccagaaaaatagctttaaattatataaaattttcagtttaataaaaaaaaaatttatttcattactttaacgagtcttcttcaactagtgataaaacttttttttattcatttttccttgaattatttaatattttgatactttttcatcattttttttgccattttttcattactattttcgtaactaagaatccgcgccctattatatatatatattaaatttttaaattgtgttttaaattaaaattaattaagttatttaaattttgtttcattttcagagtccacctgaaagcagtagaaaacgctaccaattgctgcttgatgagaaggtttttggcatcgttttagtgattttggaaatttaattttccaaaaatacaaaaattaatatcccctccccgtactctaacagacgccaatttaaaaaaaaaatatacacctaaaatggaaaatttttttctttttttttattaaaataaaatgttcctccctttttcataattattaaataagcatttagaaaaataatttaatattcttttttttaactgatgacttagaaaaacattttaaaaattattaaaaatgaattattttaaaaatttcaccttttaggggcctcaaatattggaacgattaaacaatttaatggaggcaattaagcggcgaaaaacggagttaattagggatcaagagaatggcttaatgccagaagatcatggcaaagcattgctccaaaattgtgaagtggacgacgaattgttcaacaaatttttgtatggcactgacattgaacatgaattgttgtccaagggtgggccaaactgtttgcacacaatttataacagtttggaaaaacgtcgcaataaaatggtattttttgttgatattttttaagagaccctaatttatttcaattagttgtaattaaacactaattttagcaaattttaatccaataaatcttctaaaaagcatcatttttctataacatatggaaatttttttgctctaattttactttttgtcattacatgccaggcgcttctaaaaccagtaaattgtaaatttttaatttaaaaaacttaattttgttcattttttatatttatattttttgaaaacttagtgaacaaaaaattatttaaacaagtttttattaaaaacaaaaatttccttagagggggtattgaatgttttgcaacccgaaaaagaggtgctaaaaagctcactaaatatcttaataattgaaactgataagtgtgattttgatgatttttttctttaaatcccatcatacatagaatagtctcgaaaaaatataggaaaatctaagaattttcattcaatttttgtaatttcaatttagattgagaaaagaccgtcattggtaaagatgaaaccaaatgtcagcataaaaattaatggatcagaacaggatagcgatttaatgcatattgcaaaaaatttacggccaataaaaacatcaaaaaatttgccaaatgaaaaaacaaaaaaagtggacaaaccgcataaaaaggacaattcgcctaaccgtggcatcaatagcccgacaaaaatgccaaagattgaccattacatttcgccaaaattggtcagcagcccatccaaaaagctcatcaatagcccatcaaaggttaaaataaagcaaactgacaaattaccgaaatgggacacttggccaaacaatggtatcattagttcacccaagacgacagtaattaacaatgtcaaattgccaaaatggaacacatggccagaaactgacagtaatggtccaagaaatgcagtacccaacgtcgacaatgtgcctaaattggacaattcacctaaacaaggcattaataatccactaatgacaagggcaattaacagtgataatgtgcctaaattggacaattcaattaaacaaggcattaatagcccaccaaaagaagggacagtgaaaaatgataatgcacagaaattgaacagttcgccagataagggcaaaaatgtgcaaattcgagtg

SEQ ID NO: 65433 - DNA, 277 bp, Heterodera glycines
ttcatttgccgtctcattgtatgggcgtgacgatggatttgagcacaaacggttgcgcaaacaagcggccaaaacgctgaaacaatttgagtctgatccggcacgtacagccgatgaccaggagaagatgaagcacatggtgatggccaatttgccatcggaccaagaaatgtccatgtacaaagacagcattgggctgtacgcggattattatgcggcaaaaagtggcaattttgttggcatcgcggaatgccaagcattgtccatacatttaaat

SEQ ID NO: 65434 - DNA, 300 bp, Heterodera glycines
atgtccgacaattcccaaattgctatccagcttcaacgaatggcttttttgctggacgaaaaagaagccggattggaaacaatccaaaaacttttggtcgccaaaaatgaatttttggaaaaaatcgcagctgatctgttggagcgacagaagattcagcatgcaatcgaatcccagcaaaatgcgcgtgctcagctactgaacgaaatggcgaacaatcttttgaccgctgcgagcgatttccaatttcatttggatttgcatattattggggaaaatcccccatcagaaagtccttaa

SEQ ID NO: 65435 - DNA, 3738 bp, Heterodera glycines
ctcctttttatggtggcaattgctctcagtttgatgctgcgcacttacgccgacgtttggatgtgcaaaatgatttttgattcttttttaaaaatttctttccctttttttcaggattcaaacgtccacaaaaattgaggcgtaagtttgggttttccctttttttgtttaaattttttttacaattaaatttgagtgcaatcatttcgcggcataagccccgtttttggaggtcgcttaccgaatatttgttgtgtatgccactcgtttcggtgatcaactcatttttgaaggtcgaataattttttgaaatttttttcgaaaaatttgtcccgttccctaaaattttcagtccaaattctcgaaaattctcatttaaattaccataattcccgacccttttagctgagtctttgcgagttgaaattgtgcttccgcgaacggctgactcaccacttttacgcgcagtatttggacgggttcaccttctacaaaatgaccaatttggacaatcgcattgccaatgcggaccaattgctgacacaggacgtggaccgcttctgcgagggcatcgtcgagctgtactccaacctttccaaggtgacttttcaattcacataaattcaaaaaaaacatattcccactcggtgcacttcgaaaggtcgcggaaggctatattttttgggtacgccccaaaaccttgccgcagaaatttaaaaaaaaacaaaaactttttattttttggattcacatgaatttttattttattttaatgggttgttatattgctatagtttttttaatctgattgttcatgccctcaggcaaggcactgtgctgtttgacatttgttgaagcagcgatctgaagttgcgcattgctattggctgacgtcgcagttgcagcagcgcactgttggcggcggcggcggcaccaatttgtttttcataaaaatcgtaattggatttttcttcgcgcgcaaaatcggagtcaaccggatttaggcgattggcaatagtgaaattattagaaataaacattttaaattcatataatttttatataactccgcaactttttatttttttttattaattgaatgaaacaattcaagtattagtagtaagagatttgtaatttttggtgagtcagctgtctcacttacaaaaagaaacatttttttttagatttaatgtaaataattttaatattatggctcaaatgtttatttaatttagtgcttgagcgtattcggaagtgtgcacgcattttggaccacgaccaatgatgtgccaaattgatgcgaaagacaaagatggtcgaaaatgatcaaaaaaaaattttttttttaatttttacatttttgtattattattttttctactattttattgttaaatattttcaggccctcaagcgtggaattaaataaattgaaattttatattgaacttgcaattgatgtcttctttttaggcaagacattaaaaataaaaatatgttggaaatgttagacaatttgtgaaatttctaaaacgtagagagtcggcaacttacatatagtgtttctgataagctcagaagtataaaaataattattgacttgtagaaaattgtgattacgtcccgtcctaacccaaaatgattgaagtgttcgatttttggtgtcgattaaacttttatgctgaactgttggcctacctccgcgacaagaacaactggaaaaaggtttcggctgtgggtggtttagccataaagctgcgccatgaacaatggcggccaaatgcacccggagcaagacaatggcgcactctcttacctgatgtatggtaatggagttgaccgaaaggtcacaaccatctttcggaagggcaaggaggtgctgccgttcaccgacgagactgatgccggccttgagcggttttttttgtttttttttgtaaaatggttcaaaaataaggttttttaacgaaattgtgaatggcccattgccgcaagagtggcgatatggcacacgctggtttgtgccagacgctaagaccaccgaaagctatcggctgattagtgaactgttcaattcctgtaatggggcatatgggaaaatggtttgagctgaagattttggtattttgagtggtaaaaaaattagggactcgacaaggatgccacgctcattcgtgggatctgcgcaccgcccgagaccagcctgttcgccctccaccgtgaggacgagcatgtccaccatttgaattacaactaaggaccgggtttaaaggttttttggttctttagttaaataaaaaaaaattttgaaaatccatgaaaaattcagttgtggctcttcattggcggggaattcgaacagcaggtttcccaattgggccaggtgctgttcaccgatcgttggcccaattgttcaaatccgcttggacacaatagtttctttttctcccctgcgcaactgcgtcaggcgggaattacctttgaattccacatccagcggcccggtgatgttgtgctcaccgttggcctgcattgcgggatcaatatcggagcttcggtttgccttgtgaaggagttgtgtagcccgagggcagcaaaacaatttaaaagtaaaaaatgggctccgacaatgacttttcaacaattttaatgatttagaagtgggggaacacactcgttgtgactgcaaagagcgggaagcctataaattcaccgaaaagcaaaccaaggagtatcttggtggaattaagtgagatgaattgtctcattcacaactaagtcaaattttaaagagccatggaaagcgaggccagggtcaaggattatcgcctgaaatatgagcaaagcggaaagcgcgtgcgggcggacaacgaagtgttgccagcccagcgccgtgctcagagggagaaacagaaggcggaggggcgagtgcccatcccgaaaaagaagggcacctcttcggtcatcaatttagacgagatcgatctcgaataatttcattgatttggttaaataaattttgatgttaatggttactgtgctactaattcacaagatctttccaagttctcgtcctcttcctaaggtcatactttcttggttccgtatccgttttttcattgacatttttctcctcatcggcttcaatttctggtcttgtttccggctctcgggcgtggatttcctctaaattttcgccttcccgggattcggggtccatttcatttcggattcacggacctttccgaactgacttcttccacattttgtgtcttttcaaggcactttttctcttcaactggttgtgttggcatagtgcagggagggcccaaaatttcgaaacactttttaatttggtttaagtgaagtctttttgggttcgaatttggcgaagtgcaactaatcacagtaacataaatgccatcaattttgatgacccgaaaaattcctcgccacggtaaatggaattttttggatgtgcctacccgtccgtcgtagtttctgatcagcactcgatcaccaattgtgatttgttgtggccttgcctttctgtcatattgttccttcatttttcgctgagcttttgcatattcatcagctgcggcgtgccacgcgtgtcttatggcaacgccaacttctgtttaaattcatttcggtccgaaattgctatcggatcacgaacctttgggtcaattatttggtctacacaaaaaattgggtcacgcccaaacataa

SEQ ID NO: 65436 - DNA, 486 bp, Heterodera glycines
atgcaggccaacggtgagcacaacatcaccgggccgctggatgtggaattcaaaggtaattcccgcctgacgcagttgcgcaggggagaaaaagaaactattgtgtccaagcggatttgaacaattgggccaacgatcggtgaacagcacctggcccaattgggaaacctgctgttcgaattccccgccaatgaagagccacaactgaatttttcatggattttcaaaatttttttttatttaactaaagaaccaaaaaacctttaaacccggtccttagttgtaattcaaatggtggacatgctcgtcctcacggtggagggcgaacaggctggtctcgggcggtgcgcagatcccacgaatgagcgtggcatccttgtcgagtccctaatttttttaccactcaaaataccaaaatcttcagctcaaaccattttcccatatgccccattacaggaattgaacagttcactaatcagccgatag

SEQ ID NO: 65437 - DNA, 1971 bp, Heterodera glycines
ataatgcctctgccttcacttccgaatttttcagagaattttgctccatgctttacattgacaaaaagtatgcctgtggcaaatgcggggtcacgggagcggatcccgatttgcagcacaagggtggggatgggtctaacggcaccaccactcagttttggagtgagtgaacctccttctcgtgcgccgggatcggtcccgattccaatcaccaaaatggggaggcgaagggaggggatgggcttcggatcagaggagttgatccgaccccgtacgaatttggctgctcttgacgacgcggaccctggggcgaggaatgcccccaaacaacgaaaattggcgatttccccaaagagaggggctcgtcccttaggcaaaaaggaacagcaaaccaaacaaccaaatttatttgccaaaggggaaagaaaatggcgataagagtaaataggtcaacagaaggcaaaattggggatcaacaaaaaaatggacgcagaaaaagagaaggagaagaaggaagcaggggggccctgtgattaaatagcccccgagcaaaatatgcaaaaacacgtgaataaggagaaaagtgggcatttttgagagacaaagggaaaaaggcatcgctgaatatgttggggggatcagagtacagaaaatggatgaaaagaggggatggcgggcagaaagataatggtaaacattttgagaaaaggatgcccaatcgggccgaacaaaaggaatttgaaaatgtgaatggatggaaaaaatgcaaatggggcgaagaaaagatggagaaaaatgcagatgtgaaatggtagacaaattagataatgagaaatgaaatggaaaatgatgatttaaataatagggagaaaaaagaaggggacgaaaaggaagggaaaagccagattggcgggggtttcgtcatctctccgatcttctgctccgaccgactgaccaacgggaatgttcccgatcatcaatggtaccacggcttcttcttcttcgggcccgagactcgtgggggtgcagtaaaccatgcgcctggggtggcccatcggttctcctcctcctcatcgattttacgggcattgtagtgcccgcccgagccccgggtaaaggacaattggcccgatccttcaccccaactctcgtcgcggtttcgcgacaatgcctgtcctcattggagtcaaggcaatgcgtcaactgaacgcacttttcggacatttcacaacatcttggccaaatatttcgaagactcagcccgacttcgatgaatttttggatgctgctaatttttgttacaacacgtcagtgcatgcttcaacgggtgagactccattttttcttatgtttgggcgtgacccaattttttgtgtagaccaaataattgacccaaaggttcgtgatccgatagcaatttcggaccgaaatgaatttaaacagaagttggcgttgccataagacacgcgtggcacgccgcagctgatgaatatgcaaaagctcagcgaaaaatgaaggaacaatatgacagaaaggcaaggccacaacaaatcacaattggtgatcgagtgctgatcagaaactacgacggacgggtaggcacatccaaaaaattccatttaccgtggcgaggaatttttcgggtcatcaaaattgatggcatttatgttactgtgattagttgcacttcgccaaattcgaacccaaaaagacttcacttaaaccaaattaaaaagtgtttcgaaattttgggccctccctgcactatgccaacacaaccagttgaagagaaaaagtgccttgaaaagacacaaaatgtggaagaagtcagttcggaaaggtccgtgaatccgaaatgaaatggaccccgaatcccgggaaggcgaaaatttagaggaaatccacgcccgagagccggaaacaagaccagaaattgaagccgatgaggagaaaaatgtcaatgaaaaaacg

SEQ ID NO: 65438 - DNA, 101 bp, Heterodera glycines
aaaattccctcaaaaataaaaggtcgattgcgcaccgccctccctatcatgctcgagagcatttgtatgtgtataaaatttatcaaaaaaagagatagcca

SEQ ID NO: 65439 - DNA, 379 bp, Heterodera glycines
  unsure (1)..(379): unsure at all n locations
atgtcatcatccatcggttcgccagatacatttttccgttcagaaactgatcagggtaatagaaaaattttaaaagaattacgaaaaataaaaaaataattatttaaaataaaatacaaaatctctaaattttatcacaatcagaagcagcagcaggagcagaagaagtgggcaaatacgaagtgttcagttggcacggaaatttgagtgatcaattgtcagccgaattgttcgtcactgatcagcagntgctgaaggtgngcccttttgaatggacaaatgatcaaacagcgggaggggaggggaggccaaaaacagagaaagatttatggaaaatttagttcgaaatttccaatccgttttaaaagttttggaatga

SEQ ID NO: 65440 - DNA, 243 bp, Heterodera glycines
ccttaaaaaatcgatttttttcaaaaaatgatatatcaaaaattaatttgtaaaatattcaaatgtgattctaagcctattttggtcatttttatggcattttgtgcctatttcactttttacgaagaatttttttccaaaaaataaccattaaaaaaattttatttacatattttcctacatattttgaggatttttgtacatatttcatacatatttttagcattttttattacatatttt

SEQ ID NO: 65441 - DNA, 2355 bp, Heterodera glycines
cgatgcgcaattaaaagaacgactcgggctgccgtgtgcaaatgtcaaagaacttggaagtgtaccatgggacatcggagcgcatttgtttggtcaaggggaaacttgctgctacaatgattgtgtgagttggggagggagggtaattgttgttttatgattaccgaaaattaaattattttgtttagaatgggcgcaattttggaaaaaatccaggaaaaaattgacgccaaccacgcttctgaccatttcgacctgaagggattggaccggaccaaagaggttggatgacgagggcatttccaatgcgacttttaatttgttgcagatgaaatttgttgtgccaaacacttccgccggaatggtcataggaaagaacggcacgagcatcaaagagattcgggacacaacaacgggttggttcagcttgacatttgaccagcgcaggaattcaaatgttgtaattttgggttttcagcaaacatccaaatctaccccaaggcgggctctgaggaggccaaaatttcggccgagagagtgattacggttggccacgaatcgaacgaagttttactgagcgcagtgcaacgcgttctggaaaaagtggtggctgatccgatgcatgcgcagccagtcccagcggagagtcaggcgagcaacaaagggaccaaaacaatttcggaatttagttttattagggatattattaataaccaaattcattttttaaaaagataattcaataagaaagcatttaaatgcaggacataaaaagggcgtttcattatattaaatgttttctcctcactttgtcagttggcttcgggctttgaattcggcggatcgcggctcagtgccgggagcaatcagtttgggggaatttcaaacatgggcaacaattcgggtgagcagaaaccaaatgtgacattcgtgtgtcttctaaaacgcctttattttcagaagcaatgcatgggaaatcatttggagggccttccttcaaattcaatcccctccaggggacgggaaacaacgaggcgagtcattgttttgaatgacttctccattcagtgtatatttttctaaaccattcccgttcagctgttggcttttctcgacaatttgcagtccactttgcgctcttccggattcaacgaccaatcggtgtcagaggtgatgcaggcgatgcaagtgctggccaaatacaacataatggtcaattccatcaaattcctcgctgtgattcccctcatttaacgtgtgactttagggtcttggcctgggcctcggtgttgcggcgatggcccaaatgcgtaacactgagagtgcgatggcccagcagaatgtgctgcttggtgctgccgcatcgaatacgccgttgcaacagcaacagcagcgctacgatatcatgtcacagtcgaacatcaccgggtcactgttggactcgtcgcagaacattgaccaggtacaggagaaatttggcatttgatttttgcctttgcattcagtcaatcgttggaggatcgggcggtgttctgatcgatgtgatgagccaaaagaagtcgggcacaaatggaacgaatactttcgccaactccgtgatcaaagaacgcgttgtggaggatggacacactgaacttgaggtggacaggcgtttttcctatttctttggaatttgagcacttttgcataaaatgtgttgtttttaaattatttttattttttgcttgaatttttgacaataaatataagacagtttgttgcttctttgaattcaacaaaaacgtgtttttgggccacaattaaatcaaattatagaagttgattattacaacccaccccacccatctctttgatttttaatttagattgagtttcttgtattaattttcctaattttatttatttttattcctgctggcgttttcatattttttgtgttatgaatttatttattatttttcaggttcccgataacattgtcggcgccgttttggggcccagggcgaagacactgatcgaaattcagcagctgagcggctgcaaaattgaggtgcacaagcgtggcgcgaacaccgccagcccgggcggacgcgttgtgaggtcggttttggccaaatgtttgttccccgccggtgtttccctccgtgttgatcattttgacttggccattcgtctgatcaacgccgctttctttcatttatttgtcatgcactttccgatcatcacgctcctctctctcttcagtttaactggagacaacaatagcattctgaatggacgcatcatgatcgagaaagttattaaccaggaacagcaacgtcgttctatgatgggcaccgctcgctgagtgtgcct

SEQ ID NO: 65442 - DNA, 1183 bp, Heterodera glycines
atgagacggaagagcatcgttggggagcaaaaggacgaggagagcgcaggctcaagcaaaggaagcggaaggaaaaaggtggggagaggggggggggggaatcacaaacagatggacggagcagtggaatccttcccaaaagaagtcaccccgtgcttcaactcatccaagacaaattatgaggagacagcctcatgtttataatagacgacctttgcaaaggattcggctgtgacgacaatcttatcatagaactatttaatacgaaagaaaaaaatcaagtaaatcaaatattgaatttaaatttcagggacgattcagcaatttggcccgtaagctcaacattcggaggaagccaagcattggccttcactccaaacgcctctctccggcgctcgcgccacagccaacgcctcgcgcattgcaaagcaaagtaaacgaattggtcgagcagaacaaattgctgacaggcatcaacgaagcgcatgtgctgactttccaagaattggccgcaaaaattaaggcaattttctcgatgcatttgcttaccatttattcccctaaacaccacacttttcagcaattggagatggaaatgtctgatcgtcaggctcaggaccgacaactgcgttcactgctcatcccaaccccaataaatatcacctgcaaaagacacgaaaacggcgagaagggtaatgatgcgttggacattatgtgggagaatgccattccgctgatgaattccgtggactgtgagtttttcagtttattagcggtttattgaaatttacaaaagcgtccctctgcttgtactttcagcttatgaactgttcctaaacggaaagcaatgcgactcggtcaaagccaaagctcggcgactgcgcattacggacttgaacccggccgaagacattaagtaaaagccgtttttttgacacagttcttgattttcccaagggtggcaattcgctctgtgtcttcgtcaatggatggtgttaaatcggcaacctccgaagttgtggtcgttaagcggtgcacggacgaggagggaaaggaaaacagtgcttcagtgattggccggccttttccgatcattaaatgataggctatctatctattgactcgcttaatgtgaaatattattctcacttagttttatcattgtttaaaaatgtaaaataaa

SEQ ID NO: 65443 - DNA, 194 bp, Heterodera glycines
aggaaaagccaaaagaacggagtcattcggcgatggacgggtgaggacggaatgaatggacaaataaggggtttaccattttgtagttgtgacacgaatcggacagtctcaacgcttgtcctaccgcctgtttcgcccacccgcaccgttattttgtccggcagcagtttcgacaccgtccgattgaatttctc

SEQ ID NO: 65444 - DNA, 260 bp, Heterodera glycines
gtctcccccataaatctgggcgcatcgggtcgggggggactcctccaaaacaaaaaaaacaattttttcaagtgtccgtttggggtactcaaacacttatggggagcaaaaatcccccgcagaattaaagtacaggctatagggaagctattcccgaagggattcggtctccccataaatctgggcgcatcggttcggggggactgccccgaaaacaaaaaaatcgattttttcaagtgtccgtttggggtactcaaaca

SEQ ID NO: 65445 - DNA, 156 bp, Heterodera glycines
taagcctaaactttttggcttgtttaaaaaggaattaaaaatttttaaaaattttattcatatcccttttgatagaaaaagcatcagagagccttatttaacttttaattaacatttggtgcgtttcagagcactttctgaaaaaatatttatgaa

SEQ ID NO: 65446 - DNA, 200 bp, Heterodera glycines
aaaaagttacgcctaaactttttggcctgtttaaaaaggaattaaaaatttttaaaaattttattcatctccctttttgatagaaaaagcatcagagtgccttatttaacttttaattaaagttttgtgtgtttcagagcacgttctgaaaaaatacttatgaattaattttgcaaaaaataaataattaatgaaaaagt

SEQ ID NO: 65447 - DNA, 372 bp, Heterodera glycines
cagtccgagcgctggacacgcgaaaggacaaatccgtccgacagaatacgctggacggtcttggggaggcgatgaaggtgtggtttttggcattcacaacacattttaatgcccaccaaaatttaaggaagcagcatcgaaagcggtgggcgccgagtcgaccttcggaggtgagagaatttgaatcggaaatgctcaatttaattaaccccactaattgcattttctgttcttttcagctattctgctgaaggtgtcacagacggagtccaaaatggcagcaggggaacgccaactcatccaatcggtcaccacgcaaaccttggcaagcctccggcacctcctggagaacgaactgcgcaccgtccaggc

SEQ ID NO: 65448 - DNA, 195 bp, Heterodera glycines
atgccatggcatgagtttgtccgttacttcaccgacatttgcgtttgccaactgctcacaatgggcacattgaccgaatgcaaacagccgcaacagaaacaggcacagagaggggtcagcttgaggaggaaacagctgagcatgcaactttcgaacgtcacaattgggctaacggagaagcggtggagagaatgg

SEQ ID NO: 65449 - DNA, 562 bp, Heterodera glycines
catcatcagtgttttgtaattgattaatatttcatcatcagaaatgaatcaaataatttttatagacttgttaaaaaatatttttttaaattaattttccatgccaacagataatcaaagagcgcgagttggagctgcaaaaggagcacaggcgccaggaggacaacgacaaactgagacgagaatttgcacgacaggccaatgaattccaccaatggttggcggacacacgtggcgaaatgatggaagcaagcggatcattgggtgagtatggcaaaccaattatcccgagtggatgcctaattttgtagggccgtcgtaacgataaaagatttggaggggtaatcaatcgtttttttattccgcccaaaatttaaagcacataaatttttcaattctgatgaatgccttccgctgggaaaatagaatgtttaagagcaacaattggacacaatacgtcgcaatgcgcaggacatcaaagcacagcgggccaagctgaagaaagtggaggatttgggcgcactgctggaggagcatctgatcctggacaacagatacaccg

SEQ ID NO: 65450 - DNA, 93 bp, Heterodera glycines
atggggagcaaaatcccaacccagattaaagtacaggctatagggaagctattcccgaagggattcggtctccccataaatctgggcgcatcg

SEQ ID NO: 65451 - DNA, 125 bp, Heterodera glycines
  unsure (1)..(125): unsure at all n locations
atgcaagtgccgccgttgctgtacgctttagcgttgctgtgcaatgnnacgaaatttgcaaatcagaananacccaatattatcaggaatacactctnccatctcacccgtagacaaaccgaatg

SEQ ID NO: 65452 - DNA, 2687 bp, Heterodera glycines
atgatgatgatcgccagagatgccgcctactgtagcaagagggcggggccaggtacggtagtgccgaaatgggcgacactgcacaaaggagccgtaatgggaaatgataggagcggaagggacgaagagggcacgggagcaggcgatgccattggagggcaacagttcgagtgcaattcaaaaagtcgaatgcaattcggcacaacggctttgaaaagtgcgccgatttgccaacacttggccaagtgagaaaagttaatgggcaattcaaaaatggtaatgacaaaagtggaatgattcaccaaaactgagttagcatcaaaaattagtgccaaaaaagaaaaggttttaaggaattggttctggaatcccgacattttcactcaatattcgtgacaaaattttcccaaaaggttttaccaacagttcggcattcggcactttgttttggtgggagttttggcattttatgccgtgtttggcggtcttttgtttcaagtgataaatttttaaacaaattaattccctctttaaatgattccctaattaaggcgattgagaaggaaaatgaatacatcagcctaaataaaaacaaagaagctttggacgcaatgatcgaacaattggctaaggtcaatataagatttaaattaatttataatttttgattttttcgaaataaaattaattacagacggttaaactataaattaggactaattaactctctccccaacaaattagaatctcactgtgctgctaaatgttcagccatcggccgacaaaatgatcgcgatgcaacagctgatcacgtcagttactgtatcagtcacagtattccctgttacagcaatcaaaaattaaaatactgtaaatttcatttcagaaaagactatcaaatattgcttaaggtaaattaacgaagtttttatttatttatttatttattttgattttattttcaaagattgaaggcaaatacgtcggctcagtgttccacaaatatgagcacatcgtattccatctgaattggtgttttggaagctccatattctacggtaatgaaaaatccatacaattgtttacagtattattggttttcttcggtcatttaaattttcaaattcaaactttgtagcaatgacactcttcacgacaattggtaattagttttcaattaattgctaattatttatacaattaataatatgtaaaggttacggtaccatcgcttgccaaacgcctttgggcagaattgtgagttgaatcaaaaactttttcaaaaagatatttcccattaaattaagttatccatcttttatgcactgttcggtaattattaattaattagcatttattggccaacccaattaaatttatttgtttaattgccaatcccttttatgtattcctcttatgcttgtcgttctcagcgatattggccaattgatgttgtgctttttgacctgttgttacaatcgtctctgtgatataattaggtgaagcggaaaagtcggacaatttaaaattaattaattattaaattttgtcagtttttggctccgttcattggcttttcgcattttggaaattgacgaggaagcggcacaagtggccaaggagaagaaggcggagcagcaactgcataaactgcagctgaacatcaacactaaaaataccggagaagaagcagcgcaacaacaaaaacaacggcacaacgcgtggggtgccgccagagacacggcgcaaacgcaaaaaacagaagcagcagcaggtgaccaagcagggcacaatcacaataagctaattatgacgcactttagcagcatatttaaattttgtaacgaatttttcacaaaataaaatgaattttatttgtaggttttggggggcaacaaaaggcacggatgcacactaattatcatatgtttatctcttattaactcaaaagcttaattataccccaaaaattattctgctggtttctcgatgccaatttttgcctaaattggcagatttttactacgcgaccgactcggaaaatatgctgatcagtagcaacgatcaagaggaggacaacggcatcgatgccgaccgttcttcgtcgtcctctgccaccgctttcgatggcactttcgctgccggccaatccgccgccgatggtttgccattgttcgtttccgtgccgcttgtgctcctctacctgtgcttcatcgcgtttgtggtcagctgcttcgattggcccgaccaacggacgggcgacgacggaccgccactgtccttcggcgaagcgttttattttgcgtacggggcgacataatggcaaacaatgagatcgaaaaaagggacaagcatttttctgaacagcttaaatcctccgaaatccatggacttaatttagttttgtggtttttggaaaggtcgtagagatttattaaaagtgagtttttttgggggttttaaatccaaaaattggcagctaagtcaaaatctgttaagaattttcagctaattttaaaaaaattaacaaatagcactgaacagattaaaagtcttgtgcttatccctccaccgattagtgaatttgttgtttaaatgaaatgacttattaatcttttgtcattatttaaagatttaattgcgaccaaagctctaattaaattaaaataattagaatgattttttaa

SEQ ID NO: 65453 - DNA, 1202 bp, Heterodera glycines
atgacaattggatgcgattttgattatgccaaaaatgcgcacgacgcaggaggcggtgacaataatgccaatgttgacactcgccaaaaattgagccggcataagtcaacttcaaacgtttggtggaggacagcaaaaagcctagaggccatttcgaacaattttggaatgaaaatgtcacgaaatttggctgaaaatgaagcaaaaaatgatgacattgaaatgcaacgagacgaaaacgaaattggcacaatggcaaaaagggaatacgaagcgaaggcaccgaccgaacggagaatatatttcaaaaaaggtggtcaaattaggcaagaaaaaagaaaatcaaagtttgtgaaaattgtagtaaaaattgtcaaaaaagagcaccagcagctgatcagagtcccaaatcatcctctccaacaccaacaatcagatcatttaaagtatccaaggaaccatgttttcagacatttttggccgtaactttgttcaaacttgacaaattttttaaaatttacgtgagctcatagaggactctagataatgaatcaaccccgattaatccagcaattccaaaattcgggtttgtggactgggatcccgactgcgcggggtaattaattgagtcccgggggcatttattaggaagaaacaaagctattttgtctaaaacccttgtgctatttttcaagtttgaagatgtacattttgtacaaattgcccttaaaaaattaaattaaaaaataataattattattattttaacagaaattgccgaaagtgcggcttcgagcagtacagcagcagcaaccactaattacaagcagatccgccgcacgcacagtgaacgcgtgtcgcaacgacggcgccacgcacacggcggcgcccagctgtacgtgatcaatgagggggagtcgcaccagcagacagtcgccgggggcgagcgactgttgcgcctgcggcgactgcgtcggcaacgctcgcgccaaaacgtgtcgccgttagtgcagcagcagcagcagcaacatggagacagcagtggcacggcatcagtggcacaaatggaaagcggcgatgagcggacacagcgatgttgcgacgaaagtgtagcatcaagtccgagcagttcaagacggttgcagatgcacgccgggccccaaccgccgatgggcgcggacaattcgacgaacggcgaatga

SEQ ID NO: 65454 - DNA, 389 bp, Heterodera glycines
atgggttcctttccgctgctgacaatttgctctatgattggcgttgtgcttttcgtcgtgtcaccaattcaaacacaaagttatgggtttgaccaaaatcaacagcagcaggggggcccaccaatgggaatgggcggaaacggaggaatgtccggaggaggaggaatgcccggaggaggaggaatgcccggaggaggaggaatgcccggaggaggaggaatgtccggaggaggaggaatgcccggaggaggaggaatgcccggaggaggaggaatgcccggaggaggaggaatgcccggaggaggaggaatgcccggaggaatgggaggtggcggaggaggacctggaggaatgcccggggggatgggaggcgatgccatgccattcgg

SEQ ID NO: 65455 - DNA, 841 bp, Heterodera glycines
aacgattcctaaaaacgccagcaatttacccaaatcaattaaatgcattgaaacattacggaacaacattgcttgattaccttctcacgaatggtgaaagcaatttgtcgcaaaaattggtccaaatcgatggcatgccaaatttagtcaaacatttttgccaatttttgggctatggtttaatgaaagatgcagacccaagcgaaaatgatatcaaaattgagctgccagcagaatggaaaatattctgcaaaaaatacatggaaaagattagcaggaaaatcagtggttattccgaacaactcaaatccaattgtaactgatcagtgatcactagtgatgcaaattatatggaaattattccatttttcctggactgatgcaaggcatgaaacgaacgaaaaacattttttaagcttggtttgaagcttctagcatgggtttctgtaaacatatttttccatatttcgcgatttatttcgtaaaatttggtaaatttagaaaaagttgtatgaaataagtactatttctgccatagcttatgttaaatttgatagttttattaagttttctaggctaatagagaaaaggcttgcttattgaatggtaccaagaatgtaaaatttaattgcctttaagcaaagttatataccatgttttgccgaaaaattcgctaaaatggcggatttcacgaacgacccagcacggttataaactcttttgtggtttgtctatactattatgggttctatcctccattgtccatgtttttcgcttttttaaaatttattttttatctacaattaatttattttaattcaaaaatatataaattaaaaaa

SEQ ID NO: 65456 - DNA, 158 bp, Heterodera glycines
taaaaaatatttatgaaaatgtttaattacattgcttttaagtttaaaatacaaattttcttaataatttttatttatgaaagcccaaaacatttgacgttaaaatgaatgggtaaaaatggtctttttttgtgcatttctcatcaaaataaagctgc

SEQ ID NO: 65457 - DNA, 48 bp, Heterodera glycines
atggcgattgtgcacagccctccgtctctacgcaagcgcttttgtgag

SEQ ID NO: 65458 - DNA, 676 bp, Heterodera glycines
atgtcgtcaacgcgttcgcgacgttcgggaattgtggattcgggtgggctgaacccatcaacgattcatttactcccaatggcaagagtcaagaaagaattagaagctcgcggtgcgcattctttctgttattaattagttaatggaccttaccattaaactttcagggctggatacaaaaggcagtgcagctgatttggcttttcgtctccaagaatatgttagacttgcaggaggatttgtgtcaaaattcgatccatcgcccgcctcagaaccaacaacacctctcaaaaagcgaaagaggaaggttcgtttatctgcttctttgcgcaggcaatttaacatttatagttacatatttacaacaatttttgtctttcttttcttattttgacacaatttttagcaactcgatgttgaagttgatgagaatgttgctggctttgatagacaagaagcatcttcgccagttgccgccaaaacatttcgacacttttcttgggcaattgcacccccaacggcgccacaccccgcgaaagaggcgaaaaaagaagaaataatagaaagcggaaatgaggaggaaagggacgaagaggaagaagcagaaaaagagcaaaatgatcaaattcaaattggacgaaaaattgaggaaaccgaacggcagcaaaagacgaaa

SEQ ID NO: 65459 - DNA, 690 bp, Heterodera glycines
aggaaaaataacaccgaacagacgcatcagacaaacatttgtccttgccgaaagtgccgagaaacggcacacactcgtccgactgttgcaactcgagaaggaacagaacgaacaattggaccgtatgtggattttgaaacagtacatgttaaaaaggccgatttttcaggttcaaaaaaacttctcagcacgatggttttcgtcaacacacgcaacgatgctgaaattgtgtgtaattttttgaattctcgcggattctcagcgacgacaattaatgggtgcgttctctcattctctgaagttcgctgcaaatacttttagtcgacgtgaccaaccaacgcgtgagaaggcggtgtgggacttccgaacgggcgaattccaaattatcgtcacgacggacgtttgtgcccgtggccacgacatcaaaaatttggagcgcgtctgttaatctaccatttattaagagggtggagggggagagtccaagactaaacgaattatcggatggtcaatcatttgtgcaaaccatttcaggtgatcaatttggatttgccttgtgctgacagtgcggaggatgcctactacaaatatgtgcagcgtatcggacgtaccgggcgaatccaacagggaatgtccaccacattcttcgacccggccactgacatggatcttgctgcacttctcgtcgag

SEQ ID NO: 65460 - DNA, 535 bp, Heterodera glycines
atgtccaaaactgcgaaaagaacgatttcaaaaaatgggacggacgaagaaaaactcaaatggacatggctattttcaaggataaaggtattaaagctgggatgaatgtactttaaataaattccaattacgatcaacctatttcgtatttaccgaggtctttaaaaataccgtaacaaaatccgtcgtggtatccaaaaaaccccacttaatttccgtgtttcagcttgacgacgagctgtttcttacttttatcaaagaacaaacaaaatttgaggaaatttgtagagaagaaggagaagaattatggacgaaaattggcttgttatcaaagcgaaaaggcaagggcacatacgatattggggatacggtagaatatttgacgaaacagtacgaaggttatcttggtattttgtatttattgaaagagaaatggcaatgtgacggaatcacggagaagcaaaaaagagagaaatgtgaaaagtttcagaaatatgttgagattatttttattattaataaaattattagctaa

SEQ ID NO: 65461 - DNA, 199 bp, Heterodera glycines
atggtgtcagtgggatttccgaatttgaaacttggtgggtgtgtaaagcacccatggattcttaataaaaaaaaatatccgagaaattatattattccaaaatataaaaagacaaatttgcaattataattttattttttcaggtttttagtacgaatatttgacaagaattctcataactaataccgtatataattta

SEQ ID NO: 65462 - DNA, 408 bp, Heterodera glycines
atgcgccgttttggagctggtggtccaagaaatcggtttgaagctgatgctgttccgatgacagatgcgattgagctaaaccaaaagaattatggtttatttatatgaataaacgtaggggaataaaataaattaaaattatattaatttattttttttaaattgcgatttaatgttatagagagttttaatctttttttggcatgtgatggttttgtttattttgcatgccgtatttgccctaatactaacatttattattctacatttgcagatcgacttttgcggattaaattgttaaataagatagtttattaatgaattttcaaaaaatttcaatactccaaagaaaagtgtttaacactaaaaaatcttttccatgtgtcgacattaacgtatcttaataaa

SEQ ID NO: 65463 - DNA, 1190 bp, Heterodera glycines
atgattaaggacagcagccagcaacaaaatgtcaagctgtacattcacagcggctgtaattgctccatggtaaggaatttcaatcacttttattaatttggatgtttttacaatgattaatttgtatgacattagttaattagctgtttcgttccattattttttaattggtgcacctttcagttcatcaaatcgcttaatcctcatgggccattcactatggtgattgtggaaaagcaatgcccatcattaccgattgatcaggctttttcggttggccccactgatcgcccatcattaccaattgaccagactttttcgattggccacactgatcgcgtgccaatttccgtctcattcacagcattgactgatgccaacatcaatagcatggcggtggaactgctaattgcctccgatggtggggcacatgaggatttatggaaatagtgattaatttggaatgattttattatttccttagatggaaataatcggcaaataattagatttgacattggcacggacagcgatttgacagttcatttggcatcaggggtaattaaaattgcaaagctaatgctgttaatttgggaatttaattgattttttagatgaaaaatgagtttatcagcaaacacacgcgactggccaagggatcatatgaattgaaagtggaaattgagctccatccgtattattatgtgatcataatgaacggcaccaaaatgggcataaagtattggcccaaacaatggtggaacgaattccaatggctcggtgtcaatcagattaaggtgttgcttatttttaaaatattctatttttatttaactaaattttttgatttgcatttgatgaagaaccactttttttgttttaaatttttttattattttttttcactaatgctaatgcgagaattatttgctgttattaatttgtcaatactttctggtgtatatcagggatggcacggaattccgacttaaaaaagcccggaaatttcggaatttctttttcaggtcggagttccatttgtggaaaaattttgggcctcggaatcccgaaagtttttggggcctcagaatgccataccgaatatgcgtggaaccaaaggcattttccaatccgtgcaaatttcgactgagctttgggcaaaatcactggaacaattctttacattttaa

SEQ ID NO: 65464 - DNA, 743 bp, Heterodera glycines
atgccaatccggtccggtccggcagaattggaaatctcggtctctaataaaaagattaaaattggttttttacattaaaatgggacattacttattttgtcaccatgtaaaaaaataatttaatttatttgtttttacaaaactttgtcagtcacataactcggcattcatgcttatttagaagaaataaaaaacacttttcttatgaatccataggtactgtatctacccaccaaattttcattcggaaaccccacggacacccggggaccttcctttgttagtacctcgatagctttgtggtttcctttgttaactcataaattttaaattcattaagttataaaaagctattgtcttaaaatctgaaattctcgatttagaattttttattgtaacattaatttttaaaattatatttttttctagagaaacttaaagctatctccttgtatccaaggattaattacgcacacaataaaatttgatcgattgccctccccccattttcagagtcccactttttttatttggctttcgaaaatgccgtctgcacggaatatgtgactgaaaaattttggaaggcattacgaaatttgatggtgccaattgtgttgagtcgaaaagtgatggaagaagtgggcattccgaacggcacttttattgcggtggacgactttaacagtgtgaaagcattggcagattatttgaagattaaccaaagagaagaaaatgcattataa

SEQ ID NO: 65465 - DNA, 1596 bp, Heterodera glycines
  unsure (1)..(1596): unsure at all n locations
atggtgccaattgtgttgagtcgaaaagtgatggaagaagtgggcattccgaatggcacttttattgcggtggacgactttaacagtgtgaaagcattggcggattatttgaaggaattgcaaagggacacggacaaatacatgaggtaattaggtggaaaattagggaaatgattgccaataagggttaattagagagaaatgattataaatgagtgtaattaattaggatgaggaaagtcgtgtaaatttgtgacattcttagctatttcaaatggacgaaaacgtaccaaaagcttcggagtgggaatggcattcagccgccgttgtgccaattgtgcgaaattgcgcacaaacaacgacacaaggacacattcaaaacatacgccgtacaattggacaaattttggcctaaaacacaatgcgaaccaaattttgtgcaaaaaagattcaaggatctctgacaaataggcgaaagagacgaagaagaagaagaagaagcggataaacagatgaaattggataacaattaattaaccaaaatttaaatatttttttctttgataattacaatttttcttaatgctttttgttatcatataatttttgagctttttaaatgcaacattgctgtttaatcccgtcattaattatttatatattaaaatccagtaaaacagataaattttatatttgaaagttttttacgcaaatcgcaaaaacttggattttaaatcccaatctcctgggttttcatccccgatccaagtcttacgaatcccaatttccagttttgtcatcccgctttccctgctaatcacaaattctatttctgacttatattgttcgtgataaaatttgatactaataatttattagtaataaaaatgggctgccgagtgagtctctttcagtcagcaggctatacaaagcttggtttagcactcggagtcgaagctcgaactttttcgcatatttttttaaataaatttaaattatgcctttcaaaaaagtaacgaaaatattttaaattattattataaaattctataaaataaatgaaattttttaagcaaatgaattaattgtaagtttaggaaaattgataaatatagggtgtgcaaccagcagcagaagaggagccgtgatagaataagcacgcggtgtgaaattgtttagaagattagcaaaaattacctttttctcaaaataatttaattacttatttattttttctcacattttgagacaacaaataaatgttaacaaatgaagaaaaatagatttttatacagtaaaaaaatttataaaaacatcagaaaattcaacaaaaaaattaattatttttctttacaataaaaatttaaaaaaacttacaacatcttcgattcccaggacgaaaggcccaacgttgcttaacttgacagatcggacgggatggcatgctttcaacgtgatatgtcgtaagcgaaagtgctccatttgaaagcaattaaatagtcaattttataatgcattttcttctctttggttaacctaatgattaatctaaacatggatagttaaagaatttaaattcacttanataaggtaaaa

SEQ ID NO: 65466 - DNA, 434 bp, Heterodera glycines
atggaaaagccattcaaccgacgcttcggagcaaaaccgagatttttctcagtcggagaaaaggtttatgctcgtcaccggctgtcccaacaatggagagctggacatgtcacgacttgcaaaggagtgatgtacgacgtggagttcgtgaacggatcaacatcccgtttccacgccaaccagctgatcaagagggaaaccgatcaaatggacactgatccactggacgtgtttaatgaagaatttggtttgccaaacgtggcacaacaaccaaaccagcgcccaaacgtggccgtgcttcaactaaatattgtggacaatgctgagccagcaaatgatccaccacctgtcgaacaacagccattttcgccaattcgtcctcgacgacagtaccctcaacggaaccgtcgtccgcccgatcgctactcaccgaa

SEQ ID NO: 65467 - DNA, 1229 bp, Heterodera glycines
atgtgcgagaagcaccaggcctgggtcaagaaatatttggcaaagaatgccaaccaacggaaacaagtcaattatgttaggcttggagggttgaagattaacttagttaatcaacccaaacgcctgatcgaagcgcccgtcaacgtcgatgggaacgcaatcgaattcgtgatggacccgggtgccgaaatcaccgtgctgaacaaggaatcgcatcgattagttggcactcggctgagctcctgcagtgagcaggcattctatcacgacggatcccaatgccgtttgtttggcaagggaacagcaactttttcgatcggagggcgtatgacaaaaggaacattttatgtatccgacgaaggatcattaaaccttttggggatcgatatgctggatgctttgggtctcatggactcatttcggacgaatctgacagatgttttgaagctcaacaatgtccaattttcggaacaggattcgactttggaaatttttaaagaaaaattttctcatattgccgacctcgtcctgtgccatacaacaccaaattggtggttgaggccgaattggaccggctaacggaactcggagtcattcgtccggtggaacacactcgttgggccgcacccattgttgtggtcaaaaaggccaacggttccacgcgcgtttgggccgacttttcaactgggttgaacagtgcacttctgttgcatcagcaccccttaccagtgcccgaggacatattcgcgacactgaacggaggacaagtgttctcacaaatcgatctcaaagatgcgtatttgcagattgaattggacgacaattcaatagaattgtgcaccatcgcaacgcatcgtggtaactttgagtaccaacgacttccttttggggttaagtccgcccctggaatttttcaatccattatggattcgatgttggctggctgtaattgcgcaatcgcatatttggacgatgtcatcgtggtgagcagatccgccgatgaacaccaacagcatttggcaaatgttttccaacgaatggaaaacttcggatttcggatcaagccagaaaagtgctccttcttccaaagccaaatcaagtatttgggctttattgtcgacaaagacggaagaaggccggacccagcgaaaatccaagccattgctgaaatgccagtgccaacaaatgtttcggaattgcgttcgttccttggaatgatcaatcactag

SEQ ID NO: 65468 - DNA, 384 bp, Heterodera glycines
atgaaccgacggtaaaagaattttaaaagtctaaattcagcattatttagctaaactgttttcctatttcagttggatttgtaacgacgtttggatggacattttcccatcctttgaccatgctcaactcggcctcaaattggcacttctttcgccacgtttcaatgcgttggtggacaaacatttcaatggcaaaagcgaattgacaatttggagaccaatcgaaattagcaaggacaaaggaccagaaccgaagctgattgtacaaatggatgacaaatataacaaatttatggaatttccattgccggaccgtccgttgcccagcaaaatccgatttaagcgccttcgaatttagtaattaaaaatcagagagctatgaca

SEQ ID NO: 65469 - DNA, 1021 bp, Heterodera glycines
atgatcgacttcatgcggcacaaaaaggaaagcacaacaacagcaacaacgaaaatggaggacggcggcggcagcaggggaagggtactgtagcttgggatgggtttttgtaacaataatatactgtagctagttggcatacagtaagcggtgggccttttggaaaaagttgctactggatgtgcgccagtgggaatgcaggataatctgttgtaagacaatccgccgtcggttatggacaatctgtcagtggacaatccgtcaacaaattttttttttaattctctgacgaaatgtcctttgacggaacgtcagtctactgacgaattgtccttcactgatgaattgtccgtcactgatagaattgtcttccgaaagattatccactgacggattgtccggaatccggataccgtcagtggtgggaccgcattccgggagctttttgcgacggaattacacattccggcatttatggcttgccgaacacctccatggcatacacatttaaaaatggcattttaaggcgaaatcaaaacattcaactggctccactgctggtggtggactatcagtgtcggcgccaaacaatcggaagaaaacaccaaatcaacaacagcaaaaaggaaacagcgaagggggaggagaaggaagagaaaatggggggaaaagagaggaaaagggaggagaaaaaggagcagcagcggaagcagaggaaaaggaaaagaaagttgcagttgaacatcatcaaaaacaacaacaacaaaagcaagaagttcaagcagtacagcagcaacaacaaaagcaaattttggtgggaatggagatgaagatggataacagcaaaaatggagaaacaagggaagaggtggaaaaggaaggaaatagcactggggaaggaggagagacggaagagaaagagaggaaagggaaaaggaaaaattcggcggaaggaagagaagaaagaggagagaatgaagcagaaaagagagaggaacagcagcaaattgacactttttaa

SEQ ID NO: 65470 - DNA, 863 bp, Heterodera glycines
gtaacaattgacgatgaaatggctaatcaacgaggaatgggcgatttttacgattcggatgatgaaactccgcccgaaaataaatcggaattgaatgacagacagcacaattttggagatgaattgggcggagggcagtgggacggcaattccgaagggaatggcgaaagggaaacccgcgcgcacgaagcggccaatggttacgcatggactgtggtgcgactggcgattgtgcgacatatccaacacaaattgcgcaattttgtcgagatggtcggcttcgacttacagggcaagcaaataaccgaccgaaaaaaaaaatatttcggaaaacgcacttaccgcacaacttattgttagtgttgcagcaccaaaatgactcttgataatgttacaagtggaaataactgtgtattttcagaacaaagtcaaatggcacaaaaatttaaagaattccttgggtaataaacacaaataaaagcgctaaaacagcttcaaattgccaaatggctttcgtggttttttttttgtttgcttacaactagaaaacagccaattccgttctctattgcggtcatttcaaaccccaatttataatttgcgtttcagagattgcgcacctttcccctaaacttaacctcacaatgaagcggttcaattcatgggcctcccaattggagaacgaactcgagggatggaaggacggatgtccctgcgactttcttccgaatatgtcgccaatttcggttttccgcagggcctttatgctaatgtccaatgtcttaaggatgcaaatgactcctcttccctctcctcttcttcctcctggtcttcgccactccttcacaaatatcgcttgctaa

SEQ ID NO: 65471 - DNA, 399 bp, Heterodera glycines
  unsure (1)..(399): unsure at all n locations
tacgtaaatgatttcnaatcggtacatgacgtccttgtggttactgtacttcccggcatctatttgctttttgcattgattctgttcatgaagagtcgcataatcaaggacggaccaccaccaatggttcacagaaaaaggcgtgtaaaatgaattaaaattgaaattttaagtaaaggatacctcctaaactttttatccaattaaaaatttttaatttaaaattaattaaaaaaaaattcagatttttgtccaagttgttttgatcagcagcgtaaatgcaattgcttcaggaatttatgtggtcatgcaatttgtcccgttaagcgaatttctgttggtcgctggccaattttattggattttggcgcatggtaaaagaaattaaattttaataaa

SEQ ID NO: 65472 - DNA, 240 bp, Heterodera glycines
gaacaattgctgaagttattcaacgtcgtccaaaggataattttctccgcaaaaaacggacgcctcgcgggcgaagtgacagcaaaagcattgcgagcacttttgggagtttcccttttccaacggatggcactcgtgccggaaagcgctctgaggtggtttttcaacgggtaccatccctgaaaatcgaaattggggcagggaaggcaatggcatccgatgaagatgccacggcactta

SEQ ID NO: 65473 - DNA, 660 bp, Heterodera glycines
gttttcggggcagtccccccgaaccgatgcgcccagatttatggggagaccgaatccttcgggaatagcttccctatagcctgtactttaattctgcgttggatttttgctccccataattgtttgagtaccccaaacggacacttgaaaaaatcgatttttttgttttcggggcagtccccccgaaccgatgcgcccagatttatggggagaccgaatccttcgggaatagcttccctatagcctgtactttaattctgcgttggatttttgctccccataattgtttgagtaccccaaacggacacttgaaaaaatcgatttttttgttttcggggcagtccccccgaaccgatgcgcccagatttatggggagaccgaatccttcgggaatagcttccctatagcctgtactttaattctgcgttggatttttgctccccataattgtttgagtaccccaaacggacacttgaaaaaatcgatttttttgttttcggggcagtccccccgaaccgatgcgcccagatttatggggagaccgaatccttccggagtagcttccctatagcctgtactttaattctgcgttggatttttgctccccataaatgtttgagtaccccaaacggacacttgaaaaaatcgatttttttgttt

SEQ ID NO: 65474 - DNA, 59 bp, Heterodera glycines
cacggcaccgaaccttttggctagtcagcaatcgttgcttaacttgccagatcggacgg

SEQ ID NO: 65475 - DNA, 386 bp, Heterodera glycines
cttgttaggccgctttgcagcctcagtcgggcgcttcgccggtttttcaatttttgttggccttggacgggcgcttcgcgcccgttttttaaattcgttgaactcatacgggcgcttcgcgcccgttttttagcttgttaggccgcttcgcggccttggacgggcgcttcgcgcccgttattcaaattttgttggccttacagagattagaagagatacaacagtgattaaaagaggtacaacagtgattagaagttagctcttgttgtggagatttggaatttttttaaaattatctgggacttttaggccgcttcgcggcctcgaacgggcgcttcgcgcccgttttttaaattttgttgggcttatacgggcgcttcgcgccc

SEQ ID NO: 65476 - DNA, 209 bp, Heterodera glycines
aaacgggcgcgaagcgcccgtctgaggccgcgaagcagccttaatagcccaacaaatttagaaacgggcgcgaagcgcccgtctgaggcctcgaagctgccttaatagcccaacaaatttagaaacgggcgcgaagcgcccgtataagcccaacaaaatttaaaaaacgggcgcgaagcgcccgttcgaggccgcgaagcggcctaaaa

SEQ ID NO: 65477 - DNA, 393 bp, Heterodera glycines
atgattgtactctttttaaccattgttgtaccattccaacaatttttgtacctctccaacaattattgtaccttttcgacagtggttgtacctcttctaatcacttttgtagctcttttaatcacttttgtacctcttctaatcaccgttgtacctcttctaatcacttttgtagctcttttaatcacttttgtacctcttctaatcaccgttgtacctcttctaatcacttttgtagctcttttaatcacttttgtacctcttctaatcaccgttgtacctcttctaatcacttttgtagctcttttaatcacttttgtaatttttttttacttaaaaattttcattatgtattttttgaatttgcaaaaaaattaatttcatttcaaatta

SEQ ID NO: 65478 - DNA, 841 bp, Heterodera glycines
atgaaaagaagtatattaatttttttaattgtgaaaaactaaacaaaatcaatttttttaaaattactaaataataggaaaggtgtgaatatttgaatttttagaatttgtcggaacactaaataaaattcacttaaaaataagtacccaattaataggaaagttttgcttattttttttaatttacaaaaaccgattaaaaaataattactcaaattaatttaaaaaaaaatacttattaaatcaaatgaacaattttgcaattaatatattagtgtatatatagcgcgagaattaaatggtgtgattgggttggtggaacaaacgttcaaacacttcgtcattatcattatcattatcaccgaaatcgccggcagtgggacgactaatgagtgagtgcacgacgacctcgtacagcactcactctccaatcggcgtaacaaaaatttgttggttattgaaggaatcaattaattaactaattaattagcagcagcaacagcgccgctcattaattttgtgtcgtcactaattagtgcggggaaatgggacgatttgcccgcaaaaccatttaccaatcaccccttctgtttggtgctactactcgccaaattctgtaatcacgaaaatgtcttcttctttttgggtaacacgatgggggtacaccacaagaattagttaaatattataaaagaattattaatgtgaaaaatgcagggcagatgacattcactagccacaaacaaggagcaattaaaaatagttggaggttggaaaatgatattttttgttttcagatccccctgaaaaatatatttttgaaatgtataataatttataa

SEQ ID NO: 65479 - DNA, 823 bp, Heterodera glycines
atgcctgttccgacaaacgtgtccgagcttcgatttttgggcatgatcaaccattaccaacgattcgtgaagaacataaggttcatccaacagccgttggacgaattgttgaagcaggacaaagtgtggcaatggtcggctgattgtcaaaatgcctttgagaaggtgattaaaattttgaaatctgatcaattgctgacaaactacgacccggcacaagagatcagtgtatcggctggtgcttctgagcatggaataggagccgtgatctctcatcgcttttcggatggaagtctaaaagccatcgcacaacagcatcgtcattgtccatagcaaacgaattattctcaaatcgagaaggaaggcttagcgattgtctttgccgttcagaaataccacaagtatcttcttcgggagatatttcattctgcatacgaaccacaaaccactgttgtccatttttggcaacaaaaagggaattaaggcatgcactgcgaatcaattgcagagatgggcaatcacattgctgggctatgacttcgaaatcgaataccaaaatactgctgattttggtcaagcggatattttgtctcgccttatcgcgaagactccagtgctggacaacgaagtaatcattgcaaacattcgtgaaagcaatgaaacaggagttctgaactttgtttcaaagactcttccgttgggcacaatgatttggccaaggccgcggcaaacgataggtgatcaaaagtttcatcgaattccgccactacgatggacaatttgcgctcactttgtgccagttacggccttcccgaaattttag

SEQ ID NO: 65480 - DNA, 535 bp, Heterodera glycines
atgacaaaaattaaggaagacattggtgaagcatttgtctggatttcagtggacgagactacggataaaatggggcgaatgatcgccaatttgttgttaggcaaattgtatggcaaaaaatggcaccccccgcatttaatttctgtgaaagcgcttgaaaaggtggacagtggagcaatggcgcgttttgttaatgaaggccttggtagtcgtttagcttttattcctagatattttttaattttagacagttttctgctaatattaagaaagagcgagtgctgtttttggttacggacggggctgcgtacatgaaaaaggccggaagacaattaaaagttagaaaaaagaaaattcaaataaattttttctctttttcaggttttttacaccaatttgttgcatgtgacatgtttgtgtcacgcattgcaccgcgtggccgaaaaagttcgtgacgagtttgcgcaagtggacaaattgataagcaaaacaaagcaaatatttctgaaagcaccgcatcgcctttctgtatatc

SEQ ID NO: 65481 - DNA, 562 bp, Heterodera glycines
cgaaggatcaaaaagcgacgtcgctatggacgcttggcctccacaagccagttatccctgtggtaacttttctgacacctcttgctggaaactttacacattcaaaaggatcgataagccacgctttcgcggtccgtattcgtactgaaaatcaggatcaagtaagcatttgcctttttgctctacgagaggtttccgtcctctctgagctcgccttaggacacctgcgttacgctttgacagatgtaccgccccagtcaaactccccgcctgacactgtcatcggcgcgggtcgccgggccaccgggtggcccgacttaacaccaaaatggacaccctttcgggcgcactcccgttttaccgattaagtaaggaatcgatgaaagtagtggtatttcactggcgccttgcggctcccacttatgctacacctctcatgattcttcacaaagtcagactagagtcaagctcaacagggtcttctttccccgctaaatttgccaagcccgttcccttggctgtggtttcgctagatagtagatagggacagtgggaatctcgt

SEQ ID NO: 65482 - DNA, 466 bp, Heterodera glycines
gttgtgccacctcattcatttctgaatctttcgcgcggaaggccaaccttttgggcaacattgaccgttccaattgcgagacaatttatgtgccgatttttggaggtgccaaagtgcttggctggtgagtggtggacaaaaaacaccatcatttgttttttttttatgagggggtcgtccgtttcagggatttcttgaattttttgaaaaacagtagttcgtcataaaaaaaattcataagattttttttagaatttgttggaagaaagactttgttttaaaaattactatttcttctaaacgtgtttaaattagaaaaaaatttttttcgaaggcatggcttaaaaatatacacttgatttcttttcacgtttttcagggctaacgatgttcaaattcgaattgatgagctggattatcaatttgtgtaccgtttgggggtgatggaggacaaacatttgccgat

SEQ ID NO: 65483 - DNA, 692 bp, Heterodera glycines
cgcaactaaaaagtccgacagcatttcaactcaaacctcaacagccttctaaacctcaagctccgccgtcaggctctccaccccgttttgaagaaacagaacatcaacagccaccaccaccaccaccaccaacatcagcagctcaaatagatccatcgcgtttgattcacacgctcgacccaccaaaaatattttttagaactcctccagctaatcaaaaccctctgacatatgtgcccaattcagtgtttattctgtatgaaaccaatatggaacgattcaaggtggtgttcaatgaggagatcatcagccatttgtccttctcaccacagctcgggtatgtgcttggctttgaaaaccctcagcatgtggtgtcaaatgaagttgccaaatatgggtttgatctacgaggtggcatatcaagttttgcagtctactcaaaaggactaactgaaaatatgataattggcaattcattgagctccttgctccgggttgtgtctatcagcggtgctatccccggggagtataatgagaagatttacgactcgccaatatttgcgcgagtgttgccacgtgagatcaacgagattgagattgaactgcgcacaatggacaaaggtcgtctcgtgccattcgcctatgggacaacgatggctgtgttgatatttaagaaagtgataaatttttga

SEQ ID NO: 65484 - DNA, 1041 bp, Heterodera glycines; identical to SEQ ID NO: 36048

SEQ ID NO: 65485 - DNA, 220 bp, Heterodera glycines
ggcccttttcccgaatttggccccaattattcctcgccatatttcactcgcaccggcacttattccttcccgaatcattaccatttgcaaaacgaccgtttctacagtgccttctttcgcgcgtcttaccgtagttccgactacagtcccgagagtctctacagtagtcggatcgcttaaagctgaatgaaaataattctgctgctggtggatgcgcaaa

SEQ ID NO: 65486 - DNA, 1371 bp, Heterodera glycines
atgttcacgccacaatatccaatgtgggttatggaaaagcatcatttctatgacaattaagcttctattattggaattttttaccgattttccggaaaaaatgttttttcgaaaatttttgacataaatgatccaactttcggtgatttttaggaccaaattacgagtttcacttatcgaaagaatttttttgtaggcgacgcattacaaaaattgccattttttttggcgaagatttttttataccattagcaagatttttggtactttataagttcatgggaatgaacttttatttgtggtttttgcgaattttttaggaaattctgtgcacaaaatttttaaattcaaattgattttgccttaagaggaaagaaaatgttttccatttttaaggtatacggaatcgccatcacggctgcctcagcaattggaagcgaccaaagagacagtggccgaattggcgccagccgaccatcaattaccgccaaatgggacagcaattgtcagcgatgatggtggcggcattgtggtgccaaccgtgtccgaactcaccgaaacaacagtcacaacaaccaccgtacaccacacgcaacaacggcatgcggtagagacgacggaacaacaacagcaattagtgcccaacggtgcaaagccgtaccagcaccaacagcagcatcaacaggaggaaaacgaacaaaatcacgatgagcgtcaacagcaacaacaacagcctactgtattgacagatggtgagtgaatttgcatttaatgcatggtactgtaaagccataaattttgagatgttctaattgagaaattttaaattatacaattttgcgacctgaattttttttattttattttgtcaaatacaattttgcttgaatttcatttgaaatttttccgataatttttttcttaaatttaactgttaaatgtaattagaataatttttttttaatttaaatatattatacaaaaaactttttgtagaaatgcctcaacacaatgcgatcactcaaaatgggcatgcagaaccagcattaaatggagaactaaatggcgacatgcatcatccaaatgaacaggcacaaatatttttaaaaacccatacatattaaccaaaagtttaaattttctcgcaggaacatcacattctcgaggaaacgtatgagattgtcgagaatgaggacggcacaaagacaacaattcacaagagcatagaacggaattttcccataaatgacggaccaacagcggaggatgaggaggaggacaagacggatcagcaacaacagttgctgcacaatcaacagatggacgcatcaatgagtggataaacatgacatatttaatgatcattttcta

SEQ ID NO: 65487 - DNA, 365 bp, Heterodera glycines
atgacggagaaaatgatggtggtaccacccgaagctgatcgttttcttgctgattttgttgatgaggtgtatcatgttgatgaccatttacagatacagtagcagttgtacggccaaacactgtcaaatttgacggataaggtcaaataaaaaacttgttcattcttagccaatttatcttttttttgcctccaaactgatatttctagattaacctggattcaaaccaaggttttttttttgatcgagagattatagtaaaaccatttcctggtttcgaatattccttttcaaattcataattcgaaactttttctgtctttcgatttccaataccttccagcacttttttgacaattagccaa

SEQ ID NO: 65488 - DNA, 833 bp, Heterodera glycines
atggcccctctcttccatcgcttctcatctctctttgtctttctgatgccgttcctttccgttgtgcttctcccgtcaactgtttgtaccggctctgacagtgccgccgcgccgttcgaccgaaagaattatccgaaaatcgatttgcgagtaattaaacgcctaattagcatattaaaaacaatccaaaatcccctttttagctgttcgagtggcccattgcttcacattcgggctcgtccgctgaggtctcttttatcgccgtcgactgctacacccaattggaccgttctttcatctcgaccgatgccgtgctccgtctcaacaattcgttagcacttcggcaccgcgcctgtctcttgcgcattccgacggggacgcggctgacagtgaccgaaatgcaaacgaccaacagaaaggtaaataagtgattggagagaaattggatgggagggggagcagtgatcgaaataaactttgcttttccaatttagagttatgccaccgttttggccggcgcttcgcactacgaattgccgttgcgcactgagtacatccgcaaaggtgggaaaaatgcattgcaattcaatatctaaacagttttccctccaaatttaggacaaaaccaaaacttcggcccatggcacgtgccgtgccaacaggcgtatgtgctgttcaactcgcgcgggcgcaaaatggaatgggtcgaatttcgtctggacgacgaaacggaggcggacaaagagatggcgagcgcggacgaatgtttggcggacgaagaggaggacgaagaggaagaggagaagggataccgcaaaaagcgagctcattga

SEQ ID NO: 65489 - DNA, 117 bp, Heterodera glycines
atgggcaattacggacaatcggagccaaaagaatgccgccgcgtgttaatgatgccaaatggatcaatttcaatgatattcccatctcccacaacgatcaaaacccattcatttcgg

SEQ ID NO: 65490 - DNA, 1135 bp, Heterodera glycines
  unsure (1)..(1135): unsure at all n locations
atgttaacaatttatatttcgaatttcttctcagtttccgccaaaattcggacgcttagcgatttccattcgcgcatcgtttgccaacaacagccgccgagcagtgccgaaattgtgacgacactgcgctattttcagcaaacactcgtcgggcaagtggccgatgaatttttaggaacaatcgaacacatttaaatgatccattaatgctaatatttgagttttaattattttcgaaaatagaaacttataatttttataattttaagttttttgaaagaactcccggctaagcgcagcgaattgttcgaagagttcagtgccgagaacacgacagttcggaccgggctgtacccgaacctgaactattcgggactgttctacggcattaccaatttgttggacgccttcccaatgctcagttcggcacacaatggtccttttgtgatggtcaacactcagagatgaaaaatgaatggccaacaattcagatattgctgaggccattttggacactttgaaggcgctgtactttttcgttgatcgggactgtgttggtcggttggggtattatcttccgcattgtccaccgtatattaccttcccatattaccgtatattaccttcccatattaccgtatattacctcccgacgttaccgtatataacttaccgtattctattataagtttgcattatgtataatcagatattaaggtttattttactatccaatattaccgtatatcatttccctttattaccgtatatcacagtctgatccgccaccccgcccagatcaaatgccgcttctgctggctgctcaacttggcgttttccctgcagagatggaccgtcggcttgtccacttgctctgcgattgcattttgccgtactctttcggcgaaggtgccaacggtcgcgtgtcagttccccgcggtgcttatgctcatccttcaccacccgaccgatccgagtgtctttcaaaattaaatattttggataattacattcatttaggcattcacacaatggcagtcgaaagtctaatgcgaactttgcccgacatttacaatggtgaaaaacccttnaatatcgtctgaacaaataaatttaggcaatcggacaaataagg

SEQ ID NO: 65491 - DNA, 1866 bp, Heterodera glycines; identical to SEQ ID NO: 7639

SEQ ID NO: 65492 - DNA, 715 bp, Heterodera glycines
atgaaccgacgtttaaggaaaaaaatgtgagaaattttaaaatgaaatgtttttcggcacttttgcattttcatgagcccttacgagaaaaaaaaatcacaaggggtgaaggagggcttttttttggtaaaaacccaactcgtactgttacaccaactcttactaatttttccaactcgtaatgtcaaaaaatcagagatttgtctctacgagtcgagttattcggcttttgatttgaaaatttttaaaaatttgctccctccccattttgttttgtttttataattagttttacgttcgcatttcagttggatttgtagcgacgtgtggatggacattctgccatcttttgaccatgctcagctcggcctcaaaatggcattgctttccgaccgtttcgatgttttggtggacgcgcatttcgatggaaaaacggaattgacaatttggaaagaaatatcaattaaaaaggacgaaggaccaacaccgaaactgtctgaacggatcgatggcaattttgtggaatttccgttgccggaccgtccgctgcccaccaaaattcgttttagggatctttggattgagtaatttaaaacttttgggcgctagtttaaagaagccctcttttgaaaattttttcacttttttttgcataatttttttttatgcagaattgattttttaacatggaacgtattgcatactatttaataaa

SEQ ID NO: 65493 - DNA, 150 bp, Heterodera glycines
atgaaaggaaaagcatttgaattggctcaaaagtgggtgtccgccaattacaaactttaccagaacaacaaaaattgtgggaagaaaatgtgggaaaagatttcagcggatgcagccaggccgggcagaggcggagaatacaatgttcaa

SEQ ID NO: 65494 - DNA, 304 bp, Heterodera glycines; identical to SEQ ID NO: 51570

SEQ ID NO: 65495 - DNA, 405 bp, Heterodera glycines
atgcagacaaatcttcgacctgcccgtctcaatttccatccttcccgaccttttgccggcacttcttcggctgatggagcagcgtttctcgggccctctgaatttgatcagtccggaaccgatcagtctggccaaaatcctccgcctctacaaagaagtgatgattcattcatatttgatatgctccttaattcattcatttgtccttatttttgccagcatttcgacccgaatctgtcggattttgaggcgattacagccgaatcggagaagggaaaacagctgatggccaccaaagggaactgcgcactgagcaccgatctgttgacgaaactgtgccccgaggtgaagcgaagcagcgacgatttggtggccaatttcaaacggatgaaagagacgaaatga

SEQ ID NO: 65496 - DNA, 1137 bp, Heterodera glycines
atgggaaagaaatattcaaacaaagaatggtataaaattgaaaaaaaaattgcacaaaaattgggaacaaatcaaagggaaatttacaaatggaaaagagaatttggattgatcaaagatagttattcagaagaggaaaaactcaaaatattagaacgatttgatcaaatatatgaccaaattaaaatcaaattaaaaggaaaattggatggaaaaggaacaaaatgccaaaaaataatagcaaaacaattgggcataagtttaatgagcatttataaatggaagaaacaattaaataatgtaaattcggtggacatccaaaaaactgatgatgaaaaaagagaaattatagaaaaatattttaaaataaaaaacgaatttatgcaaaatggaaaacattcacagaaggaatggaaagaatttagagcaaatattaaacaaatgattggtgtgaatttttggacgattgaaagatgggcaaagaaattaaatattaaacaaaattttcaaaaggttgaatttattttgaagggttttataaatatcaaaaaaggttatccaatttttaaaagattatgaaaaatatttgttttgttgaataatcaaaaagggaatgtgccgtatcatttaattaaatccaattgactaataatattttaatttattttagctccttccgcttcggctgacagaaaagagaaaagtacaaccaaaatattacttaaaataattacatttttaataattaaaaatgcaaaacagtagaaagaacagataaataataatttaaacaaaaattatcgaaaatttaaaaaaaaaaatttaattttttaaaataattattaccattttcaggaaaagaacaaattatcaaccaatttaataaaatgaaaaacgaattcttgaaagcaaatctaaaggctaataacagaaaagcagaatttaaaaattgccaagtaaatgggccgacgattcaaaacaattaatcggcggcgcaaggagctgaaacagaattctaactgacaaagagcaattggcactgtttttaaaaaaaccggcacgtcgccaaggaaaattttaaaaattttgatgaaattacagatttatttaaaaagcatcaaaaataagtaaatcaaa

SEQ ID NO: 65497 - DNA, 1227 bp, Heterodera glycines
atgtgcgctccgcatgagtgcatttgggattgggcaagcaatcagaattacgcattgaatacactcatcacgggcaccaccgttgccacatacattggcatatggattatacttttataccgaaatcagaatgcccaaaatacgagtaataaatatacaaaaatattgaataattatataaacaaaaaacataattagttaaagaaaataatttttcagatttttttgaagactcattaaaaattggatttcaaaaagtagcaaatgaatacaatcaaaaataaattaaaaaactatttttaaattatcaaattaagtatggcgctaacatataaaaacaaaggcattgttatgggtgttaaaaatggaattccattaattatttaattaaattttcaaaattgccagacaattcatcggatgcttggacccgtcgaattctgaaggcattggcatttttggtggcacttcagctcgccgggcacacattgtcaagcattggccggctgaccattccgcaactccaattgtctgtgaccagtaaagctgtctcgacatttttgctcagctgcttgacaaacattgtgctggctgtgaatgggccagtgctttacaaaatgaagtaaattttaggggaaaaatgattttaatttttaatgctacgtcttatagatcaaaattttgaaaagtataaatatggatctgggttcatgtttggcctagaaccgtatgttctggacaaaaaactcataaaaacccagaaatagaacctgctctggataaatccaaaaaatcactaaaaaaacataaaataaatttattaatatacttttaattatgactaactataataaaaaactcatttttcttcaaatggagataaatttaattcgaacgaaaaaacacataaatttgtaatttgaaaaaaattgtaaattaatgaaatttaatcgtttaataattccaaaaaatcagataatttaattattaaaaatatttcagcatggaatatcggaaagcatttcaaaaagtgttcaagtttcttcaaccaaccaattacgcaacaagcataggaacgcagcaacaacaatgggcaattcgcgtagcaacagcgaatgttcggaattgaatttttacgaattatttcgaattttcaaaatctccaatttcaaaattgttcattataaaattattattatttgccagttaaaaaattatgcgaataaa

SEQ ID NO: 65498 - DNA, 951 bp, Heterodera glycines
atgaatcaaaacgaaacggtatttaaaataaatatataatataaaaataataaaaattttggtgtttagctttttgagctttatgcggaagacggtttgccatgggcacttatcgctttaacagcggtacgaacatttatctccacaattgggataatatgtaacttagcgctagtatacgtcaccatcaaaaccaagtaataacaaatgataaaataaattaaatcatttttatttgttagaattaattatttttcatttttcattttttagaattttttttaattcgaaattttttaaaaatccgctattttaattttaattttgtgaaaaaatagaaaaaatttattttttaatgaatttccgaatatttttcaattattttacaaagtgccgaaatcaaaaattaaaatatcattaatttagctcattgaatggcccctgcaacattctgatcgcttttgatgcagctgcttgtgcctggtttgaaattggctcatggattggcatgttccaaattttggtgggccaacaatttgtgccaattcgtttgtgctgtgtttacctgttgctaccattcattacgggagtttatgcttcaatgtccgccaatttgttgatcgcttttgatcgacttctcagcatttgcttcccaatttggtgtcttatttaaaattgccaaaaaatttttattatctatcattaaatttatctttttgaaatttttgactaattacctaattaatataaatttgaaaggtatgccatgcgtaaaccatcacgtctctattcgttttttctcgttttgctgagttcgttgttatttcccggtttcattgttcaagcaattcttcgtttagtgctaaacataccggaacaaaagtaaaaaaatatattttcttggcattatttagttttgagtccaaagaattaaattttcgaaaaaataaa

SEQ ID NO: 65499 - DNA, 732 bp, Heterodera glycines
atgtctacgcggcggacgaaacggcggtttggcttgacccgggtggcgggacatccgtaccaaacatcatcgaccgcttcaaaaaaacacttgttttgtcatggttggcagaacatggatggacaacgaattgacgacggagtacttggaaaaggtgcagaacaatgacaataattcattaatagaaacttcttaaattaagattttcgggaatttccatttcggcgcccgtctcttggtttgtaaaaaccgaaaaattttctttttgtaagaaacttttggaaaattttttttatttaacttataaaaaatttttaaaatttagaaattcaatatttttgcaattgtataaaaaatgctccttagcccttgttgtggtgatttcaaagtcaattcttaatgtacacacaatttttggcatttttttgaaagataaaagccattttttggcagtttttaaggcatattttagtgcatatttgggtatttttcgggattttagtacatatttgggagatttttagtgcatatttatgcgcatatttggcattttttagtgcatacaacttcgaccctagccataagaaaagggtccactgcgtttgggcgctggcgtttgagcgcggccgtttggccccagctcgtttgagcgctggcgtttgggcgccaaaaaatatataaaaattcaaataatttggtaaaacaaaaactttttattaaatataaaaaaca

SEQ ID NO: 65500 - DNA, 535 bp, Heterodera glycines
gtcccgccacccgggtcaagccaaaccgccgtttcgtccgccgcgtagacatgtgtgtagctgaaaattagtcgtttgaaaaaaaatttctcatttacctacttctttttgtgtatgagttgttgaatatataatatgaagttgatgatgatgtttttgtatgcatcgggttctttttgcgctactgttgtcggtcgacgtaaggaaaatttatgacggtgcatgaatttttccagccatccattactagcctaagtgaaaaatgttcaaaaatttttcgaaatgttaccgcaaaacattccatgtcttcgtaggcggcgctcattttgattgcttgcgcagcaatcatatttcgtgtcacccgcactttcttttgtcgcaattcagacacccactggaacacagcttcttcgaagttcctgtttggaactttccttccgcccccttccaaacgttttcgttttgacgattcggccctaaattaaacgaattaaaacattgtgacattacaggcatcttactctttcctcaaatt

SEQ ID NO: 65501 - DNA, 1308 bp, Heterodera glycines
atggagtttggcgccatggtcaacgctcgcagtgaacgcgccgacatgacgctgtcaaaggaggaagtcaaatgcttgattttcatcacaggtctgagcgacgcgcacaaagaactccgacaagagtgtctccgccaaatggaaaaagcgcgaaagtcaacgccaccgaggtccatgactttggaagcacttatggaagagtgccgctccatccaatcgcttcaaaattcggccgccgctttgtctggtcccgggcaaattcattcggtgcaggtttcggccaggtttgggcgtgtgcacgaagatgaaagcaacgcttcatttgaaacctggtgctcagcccgttttttgtcgagctaggcccgttccgcatggagtttcggaggccgtcaacagcgaattggaccgtcttgttgaaattggagcgatccaccccgtcgatttttcgcgttgggcggcacctgtcctcgctgtgcgcaaaaagtctggtgaaattcgtgtttgcgtcgacttcaggaccggactaaatgatgcgttggaactcaaccgtcatccattgccacgaaccgacgacattttccatgcacttcgtgggtcaaaagttttctcacaacttgatctgcgcgatgcatatctccaattggaattggatgaaaagtccaaatcgttagtggggattaacacgcataaagggctttttcagtaccaacggttgccctttggtgttaagtctgccccttcgatttttcagaagattatggatcaaatgacgtccggtattcctggtgtttttgcgtacctggacgacattatcatcgcttcagcaaacattacggatcacattgaatctttgtccaaattattttcaaaaattcaggattttggattccgcattcgtttggaaaaatggcattttttgcaaactgaattaaaatttcttggccacattgtttcagccaaaggaatccaacccgacccggctcgatctgcagcgattcgcgaaatgccgccgccaaatgatctgagcactttgcgttcgtttcttggcgcactgaattattatggtcggtttatcaaagagatgcgtgtaattcgcgctcctttggacattcttttgcgtaaagacgttccttgggcttggggaaatgatcaacaaaatgcttttgaaaaggctaagcagattctccagtccgacttgcttttgacgcactacacgaccccgcaaaaccaattatcgttgctgcggatgctagtcagtcaggaattggcgcaaccatcagtcacaagttccctgatggctctgaacgc

SEQ ID NO: 65502 - DNA, 93 bp, Heterodera glycines
agaccaaagagttggaacagaaccttcgcgatttgcccacttgcaaattgattttcccctcaacgtcggcgctgcaacgaaatggagctgacg

SEQ ID NO: 65503 - DNA, 775 bp, Heterodera glycines
atggcgactaaaactttgccaaaatgcattttggatggaaatggcatggcaaaatgggacggaatcccatcggaagggattaaatgccaatgtgagattttacaaatgaaagcccaaaaataaattaaacgaattatataaattatagttgaaaacttatgcgaacaatttgacgaaaatccgtgcggaagcaatggaatttgtattccgctgaatggaacttacacatgcaattgtacaacgccaacatatcggttcaacagaaaagccatttttggccaacaatgcgaaggtccaacttttaaataagaaaaaatggcaaaaataaaatttatgacaaaaaagcgaattaaatgaaaagggaacgtcaaaaaataaataataataaatattaattttattttcaattagaaattgacttatgctccgctgacctttggccttgttcggctggcacttgcaaaagaacggcccatcccccgggggcttttcccccttttgagtgcctttgccccgagggcactcacactttgtacgacgacaaaaaagcaacagaaagtgtaaaaaggaagctaaattactaaactgtttgcctctggttaattaagcaattggtcattccctcccgccaatcgcttctctccgcatattcctgcataagtaaactctttcttttgaattatttaaaattcatttaattttagctcaacgatgtcaaaaaccaacgtcagctgaagagcaattcgtcatccaatcatccgacccactgcatctc

SEQ ID NO: 65504 - DNA, 668 bp, Heterodera glycines
ggtgcgaatacagcgaaaaattattaatcgcaacactgcttgaccctgcgtacaagggagcgtttttcaaagatgctgtcatttttgagcgtgccaaagacatgttgcttaatgaagcggaaagaattgccataaaatgtgttgaggtaacataacaaacaattttttattttgatttttactattaagtttgatacgagtgaattattagcgatgcctgaaattgaagcgtcggaagatccatttttggcttttggaaatcacacaacagaaaatgacaatagttttatgcttccaatcactccaacaccatcaccatcattagctagcgccaaggctatggcagctggggtgaatattttttgttttattttaaatattttttcatattttagcaagtggctgattatttaaatagccaaactgtcgactgtgaatcacacaatttttgggcaaatcaaattcaaacagccaaatatccattacttattccattagtcaaaaaatatcattcggctccatgtacatcagccgagagtgaacggatgttttctgcggctaaacttattgtgacagatttgagaaaaaatttagcaggagaaacgttgaaagaactcctttttcttcaacagaatttgcctctttatggatttaaattcgaaatttaa

SEQ ID NO: 65505 - DNA, 3342 bp, Heterodera glycines
gaaacggattgcgttcatttttcaacgggttggccccaacaatggcacgcgaaattcccggctatttttgcttcttcggtgcctacgaactgagcaggacaatgctgagaccggacgggtccgccaaggaggagattggttggtcttttttggtggccaccaaaataaatttccaaaaaaaaactaatttatgcattttttaattttggcaatttttattttgtttaactctgtttattttttcggaaaatttgagcattttaaccgaatttaaggcattgcgaggacggcactctccggtgcatttggaggaattgttcgtctttttgacatttattttttgaaacaacttatgatttctcaatttaaaggctctttggactgcgatttttcccgtcgacgtcggtgagaaaatgttacaatattaatatttaattacataaaaaattacacatttcagttaaaagtcgaatgcaaattacgggagaacaaaattcgacccaactgtttttgcgcattgtcaaacaagaaggtgactagtttgattttgttcaaatttaggcttgaaaattattaaggccaatttgatcatttttggcgctataatggcgactctctctaaattaccataaacaaaaattttgcaaaaaatttcaaaattaattgggacgaagaggaattaaaaaaataggtcgtgggctctgggatttatcggggggactctcagttcagtgtgcaccagtcgagaccgggaaacccgtaaatcagttaccacttccgcatgtttaccaaattcgtgtctctctctgtgttcattcgtacattttggcaattcttctcgctaggtgtcagcgctctgtacaagggtctgttcccgacactgatccgaacatgctttgccagcgctgcgctgttcatcacctacgagaacaccaaacacattttgcatgccatctgatcggaggaggacgatgaggaggagcaacggggaattaccattttttgattgttttgcacccattttcagttattttgaaattaattgtgtgtttcccccccccccccccggcgttttcttcattgttgttatcattgatgtttttgttgtctgttttgattgctgctcactgatcagatcgtcatcgccaacatcttaaaaaaggaaaacatttttacacattttaacattttttacacaaaatttgaataaattttattaaaaaatcttcacgtgacatcatttcattcgctacatatgcatatgtatatgcacatatttgttctgctgttgttgctgtaaataatgtttatttacacatttgcaatttggtcatggccataaatgaaagaatatttttttgaatgtttgcttagcaaatttctcggattgtcgtccctcccaaacgcgtgctaaaaaaggcaatttttgctctcataaatctgtccatttgtgttaccaaattgactgactttgactttttttattatttattatctttgttcaataatgtgttcttcggccgatgagcaaatttcgcgccacgccatgttggcgacctcaatggttggggtggttattgtcgaaaattctattaatggatttttttttataattttgtcaaaagcattgttagagcttacaattaggtagattggcctcatggagaaataaagaattgaaggatttgtcaaatatatcgcacaattttcgaaataaaacaaattttcaatgcctaattgggggcgggtggaaataaatttgacattcgtgccgcttttgtagctgtgcaggaaccggtgcggcttctacggcacgccccagtgcgacgggttgtgctcacgctgttggcgcgactttcagctggagagcaagcggcaaaatgactaccaaaacaacatcaaagtgttgcgacagcaccagcagcacgcgacggggccaagcggtgcgggcggtggaagtgcggcggcgctgtcgtcggcggcggcggtgacgcgcaaaggctccgacgcgcgcttcaactcgctgaagacgctggtgaagaagtcgccgtccgtgttatccgccagcacttgcggtgggttggccgatgcgaagggcatagcaaaatacaaaggggaattgtgccccggcatttcagtcgaatttttttttgtcagacttgcttttttgaccgaaaactgacacggaaactttgggtttggttaggccggtaaccaagggaagcggaaattaaatattaataaaagcgctaattcggttagattttccaaaaagttttcccccaatttctctaaattggtcacttttgggcagaaatctgtcaacgtgtaaaaatataatttttttgttttcccgccccttttaaaatagttttgccttaccaaatttttcaaattttttcatgggtcgctaatttgcatcttttaaaacacattccgaattttagaccaatcgccgctcatcactttggggccgaggtataaaacataattttatatattttattggcgaaaaaagtgtcgacgaaaacctctcaaacatcccaaacatttcgacctgttcaggccaccgagtccggacactgtgaccgcccaggagcatctacaccaatttttagaggccaattttgcccacgtttatgccaaagagttggacaagcagtgccaagtgttcattgacaacttgttcaaggtggacaggcaactactttgtctatttgtgcctccccccccccccaattttagagtgaatttttgccaagcgatgagctctctctgctcgtccaggcattttaccaatcgatcaaagaaagtgccgtcaaatttgctgcgcaaatgccaccgcccgccgccgcaacggcgggggacggcgccgccacgccgtgcagcacctccgacttcatgacggaaattgagaactttgtgtgcactcgtgcgtaccccgtgctgtttggctcacggtacggcacggcgccatttgttcctctcattttgaacgcctcccctctcccaactccagaaaaaaagcatttttaaataagttttttcagaagaaaattcttttgcttgatttttttacaaaatttattgaaatttaaagagttttgtgtgtttttcaatttgttagcatttaaaagattgaaaaataaccaattaaaaaaaatccgctctctaaaatttatatttgaattaaaaaatcatttaatttttaaattaattgcctccagaacggaggaagaagcggaggacctgagcttacagacgcggatccgttcgttgcattgggtgaccaatggctatttggagacggcgctgagcgagtcgtcggccccaggtgctcaa

SEQ ID NO: 65506 - DNA, 616 bp, Heterodera glycines
atgaacgacaaaagttcggcgacggtgccgataaattcggcactgacggacactgctcacatttcgcatttaaaagacggaatgatcgactttgtggccggcacagctggtgagttgttggaaattgcttgaagtctcttctattttctataatcatcccataaattgaaaaaccgaaaaaaagtcattgatattcgaacaaaatgaattattgtgaagccgtctcaatcgttccgctctgattgcactcccctttttggtttgttttcattttcctccccgtttcacaggtggcgttgccacggtttacaccgcacaaccgctggacacagtcaaaggtttggaaactgatcacacatagtttttagtatcaaatttttgcttcattcactctccatgttccgttgcttaagtgaagatgcaaacatttcccgccttgtacggcaattgggtgcgctgtctgagacggacattccgtgccgagggcgtccgcggcctttacgccggtaagcattggcactaaaagttttttaaagaaaatggggcgattttttaaaatttcaaatcagttttcttaccaaaattcggtaaaagttttgtgtgcggaaatattaaa

SEQ ID NO: 65507 - DNA, 206 bp, Heterodera glycines
attcgttcgccacgggcggcacggcgtggacacggacggacttgtccatgctggcggacaccacggacttgacatcgtcggcaaaacagacgccggtgactggctgagagtgcgcgttgaactgggcaatgttgttccaacttttggcctggaaaatctgcacgttgctgcccccgacggccaaataggcgccagactggtcaaaa

SEQ ID NO: 65508 - DNA, 133 bp, Heterodera glycines
aaattagtcaaaatacatgtcagattcgtgattagcgacctttaaaaccccagataacaaattatcatgcttttttatctcaaaaaagttttgcaaaacaaaagggtccccccttttgaaaaaattttcaaaa

SEQ ID NO: 65509 - DNA, 813 bp, Heterodera glycines
atgcccatttccccccccccccccggtgttttgttgtttttgctgctactacccagtcatccgttctcgcttcagatacgaatttggaacgcggatgatcaaagtgccagaaatgttattggcatccacgaccgacccgtcactgacgtgtctctgcacccaaccggcgattatgtgctctgttcctctgaggattcgcattggtcgctcatcgacctcaatgctggacgtccgttgataaaagtcagtcacagagacattttgccaactgttttttttgggggggggagacaaatatttttacaatgttttcaaagccgttttgatggcgatagtcttaaaaaatgtggagaacaaagccaggttttctagccccagaaattttaagtttttaaattgtttattgttaggatatttttgtaatttctcatttaatttgtggctgggtgcaaacaatttttaaatcaatcaaccagtggaaaaagtgcactatacatttttccaaaaccaaaaacattggcacaggtgaaatccgacgacgacgatgtgccgggaatttgctgtggccagtttcaccccgacggactcatctttggcactggcggcaaaaacagcgtcgtcaaaatctgggatatcaaggagcagatcaacgtggcccaattcccgggccaccaggaggcggttgttgccatttcgttttccgaaaatggctactacttggccaccgggtcaacggacggcgaagtgaaaatttgggacctgcgcaaactgaagaatctgaagaacttgacactgtacgatgtgaagcaggcg

SEQ ID NO: 65510 - DNA, 524 bp, Heterodera glycines
atgctaatgaaagaccccggcttgcgcttcgacatcactcaggtgaaatgccacaaaatataccctcttaattagtgccctctttttgaggggtttgaaaatataaacccctcgggctcccggaaaatgcgtcggttaaattttaaaaaagtactaaaagatccataaaatacaaccatactgtaattgggtttattgtaaatatgttctcctatattttgttcacatacctattgaactttacaatctcaatcatcacaatattctgtattttatttcgtttttctgtttcactgacgcatttttccgccgatcacacccctcgggcgattaatagggaaaacagaattataatttaatttaaaaatgacacgaagaaaataatatatatatatatatattttcagccatttggtggaggtgacggagcaggaagtgaccgagtccattcgcatgatgccgcacctcggcacgctgatcctcgtaaaagcgatgggccgcaaaaaacatttggcaatccgtaa

SEQ ID NO: 65511 - DNA, 690 bp, Heterodera glycines
atggtccgtgccgacttcgtcaccaaaatggtgcgccattttgaaggtgccattgtaccaactgcaatcgcttgtttctttgtggagaacagttttggggacaagttgcagaaaagtgagtcggtcgcgttgactttgtactttatttttgcactttccaattcgacagttgctccttcgtttaatcagtcattttggtacaaaatggcgattcccattcaatgccgaggccgtcgtctgaagcaggcttatgtttctgagcagttgcgtgagcacttcaaactgtacaacgaactgatgtgtcagtaccagagccaatacccggaactgcttaccggactcaaactcacccaggtctttttgttagcatttggtgtcctgtttcaaaaacaacccctttttccagcaagctcgccatattctgttggaacgttctgagcaggaacagctcgtcgagtgccttgtctgctttgaacgggtcgcattacgtcggatggtctgttgcaccgcacccatcgaaagtccatcaacgggcggtgcctctcaccagcacatcgcccaggagagtgagggtgaagtgctgctgattgaattgccttccgattcgtcacgggtccaattgctatcgaatgaacgagaaagtacgactattcttctgcaatttgcacttacaagggaaccacccgaact

SEQ ID NO: 65512 - DNA, 707 bp, Heterodera glycines
atgccaccatcaaatgccgaagtcgtcgtcgaaccaaatgccacaacaacaaaagtcaaattcaccgcacgacaaaaggtctgcccatcaacaacagctgcaaaagtcgtcgccacccaaaatgccggctgctcatcatcatcaacagcagcaaatgtccgtcaaccgtcgttttcgtcactttccgccgaagcaatcgcacgacaaaaaaaagggacaaaaacaacaaaaacaaattcaacaaaaaacaggcaagctttaataaaaagtttaaatttcatagcatttaaataattaaaaatattaacctttcactgtctttttaaattattataaaaattgttttaattatttttatcatatcttccaaagatttttttttacagccgccgcccccatcaatccgcattcctaagggcaaaacgccaaagaaggtccgtccacgccgcccggaacccgaccaaatttttttgaatttttacatttaaaatatcaatttaaatttcgatttaatttttaaattttcagattatcaagggcaagaggattggtgtttatcaacgaaaagcgatgccctggagctgacgcacttccacgacattgactcgcccatggactccacgcttcatgccattgtgggccgaccggtggcgccatttctacaacaacggcttaatgctcgcccactttttcatcaacgtaataaa

SEQ ID NO: 65513 - DNA, 441 bp, Heterodera glycines
agagaaatgagaagcaaaaaacaatagggggaccaacacaagggaaggcctgcctagcgcttttcacagctccgaaataagcattgaaggggggaccaacacgagggaaggcctgcccatcaacacccagatattaggaaatgtgaaagagagagagagagagaaatgagaagcaaaaacaatagggggaccaacacaagggaaggcctgcctaccgcttttcacagctccgaaataagcattgaaggggggaccaacacgagggaaggcctgcccatcaacacccagactttatgaaatgcgagagagaaagagagtgagatagagaaatgagaaagaccaatccacctttgccctttgcgctggtgtgacgtcgacagaagatgagaacacaaatggcaattgttgcttgaccacttgcagaccattttgctgctgctg

SEQ ID NO: 65514 - DNA, 405 bp, Heterodera glycines
gtaccgttggtttattcttcgcgattatcacctcgatgtcactgtaagtttctgtcaaaattcgaatttcccaattttatttgtgccacgggtcggtttcaactctcttcaatttcagggtccaatgatgattatggtccaaaaagtgaccgttctcgccttttcacttcatgacggatcaaaaaagtcggaggaactcagccgaattctgtccaaagaatcattgaggtgcggtgattcactcggaacagccaaaaacactaattgttcagcaaagtgccgccaattctcaactttttggcgtacactttccaattccaaacggttctcacggggccaatggttttttactcggaatttatggaatttgtcagcggagaaaactttagcaaagcgttgaaaaag

SEQ ID NO: 65515 - DNA, 76 bp, Heterodera glycines
ataaaattcccatatttatgacacttgacgataaattaacttttcctccattagaagaacaaactgctcgcaagag

SEQ ID NO: 65516 - DNA, 524 bp, Heterodera glycines
atggttaatgtgattatggtggtggtggtggtggtaagtgctattcgcccccccgccccattcacatcaattaatttgctaaaaataggcaatgttatttgtgtgacatgggggaaacagctgaccccacaaaaaaaaacaacaatgttttctaaaaattggatttttttaaatttcttattttggaaagaggaggagcgacagctgaccaccgaaaattttcaattttcaaattaaatgatttaattaaattttgctggtcagaacggtgattgatgaatgtggttgcttttgaaatttttgccacgtcaactgacagcacagcgaagaaaaggcaaaaaaaaaaaatttttttttttgaatattaagcatttttaaattaattaatacaaaaaaatacaaatgactgttctaaaaaaacaatttttgttcgtataaatgggccttttaaataaaaaaacaaaaatatttgcagataaaaatcacaaaaatgctaaaaaatacaaaataaagttttaaatcta

SEQ ID NO: 65517 - DNA, 439 bp, Heterodera glycines
aaaatggtgtaagtaaaaatcgtaattacgctcaaaaagctcctcaaacaattttagcgcttccaattccttctacaatcgcctttatacatcccattatgagcgctaaaattatcagagtgccgaaaatcgcatgtgatctaagcctagcaaaaaatggtgtaagtaaaaatcgtaattacgctcaaaaagcttctcaaacaattttagcgcatccaattccttctacaatcgcctttatacatcccattatgagcgctaaaattatcagagtgccgaaaatcgcatgtgatctaagcctagcaaaaaatggtgtaagtaaaaatcgtaattacgctcaaaaagcttctcaaacaattttagcgcttccaattccttctacaatcgcctttatacatcccattatgagcgctaaaattatcagagtgccgaaaatcgc

SEQ ID NO: 65518 - DNA, 1284 bp, Heterodera glycines
  unsure (1)..(1284): unsure at all n locations
tgagctcaaaacttggtgagcaaaaaaaaacgaacggactgacaataaacaatgcgcacgaagagacaaaaatggagccgattgaagaagcgaatttgaaaataattgacacggacatcggatattgtcgctacggaaagggcccagtcaattttctgttcatttgcggtggcgtcggtccgttttcgcgtcctcaaattttaaattccccccccccccctcctcactttggcaggctgttacaaaaaagattatccggagtgtgtactgcgtgcctttgaccccaactttgccaccataatttgcatcgacccgccaggatacggcaccagtcgtccgcccgatcggaagcaggaggtgaaccgttgcaaaatggacgccaaatactgcttgaaactgatggaggtcagtcagtttggaagtatacatccgtaccgttttaatgtgccacttcccccgttaatccnataaattccgtttattgtggtacttttgccttgctgcaattccctcatttcagaccctcaaattgacgccgtttgttgtgttgggatggagcgaagggggcagaacatcgatacacgtggcaggccaagggaagggcctggtcagccacatggtactgctttcgtccggctcccaagtggacatgcggggagacttggcattcaaaggtgttggaattcccatttaaaggaaacgtattcttgactttaactcattgaaaggcatgcgaaacacggaccaatggatgcccgcggcaaaggcaccctatttggagcattattccaacgaatttctcaaggaacaatgggccggactttgcgatgttgtagcaaagtgtgtgcacatgaatttttgaaattcgacctaatagtcaattaatttatcaaattcctttttatttttgaattaaaagggaagaaataatcgaaacaaaaaagcggttaaatctttttaaatctgctcatttagagtgtacaaggacctcggaggaagttttccatgcgaccgcgttctaaacacactgaagatccccgttttgatcgtcaacggtaacatggaccggttcgtccttgacccgagcttgatgagcaagaaattggaaaatgccaggttttcgccatttcatttcttacaattagcaggaatgtaatttttaggattgaaatacatgcccagggagggcacgaccttcacatcaaatacccacgttggtttgctttaaaagtgactagttttgtgaaggaatcggcgaaaagtgatgtgaaagcgaataggaaa

SEQ ID NO: 65519 - DNA, 86 bp, Heterodera glycines
attccgacagaagccaaatattattttgttcgttgggttgtcgggttcaggaaaaacgacactgttcaccaagttgataaactcga

SEQ ID NO: 65520 - DNA, 1946 bp, Heterodera glycines
atgcgtgcccatttagtgtccatgcatgccaagtatgggctgcacgtgtgcggcgagggcggtgagtatgaaacatttgtgctcgactgtccgatgttcaagcgacaacgcattgtgagagtgtgatgccaatttttaaaaatttatttgggaatttgaaacaaaaattcgttgggggaaatgaattgatgttctattgcttcatggctgggcaaaactaatcaaaaccaacaagaaacgagaataaaacattttcggatccggcctcaaaatttggggtgcaccccaaaatttcgtcgcacgaaatttcgcgggacataatttggccgccaaaaattaaaaaaattaaactttaaaaattttctggatgccaaaaatggcaatggtcaagaattggtgtcccgacgaaaaaaaatgttaaaaatttcatagatattttatctaggcttaaaaaacgagccgatcacgaatctgaattcagattttgaaaatcactgatttttgtctatgatttttatcagctacttgattttttccaaaattttaagaaaatagtctggcataaaaaaactcataaacagatgttgtagagcttaaaaatcgaatgagctattgaatttatggaaaagacaagtttcgatttttaatgattttttgaaattaataattaatccctaggggtcacatgagacgggggcctggggttcgagtccgcttggctgcggtttatttttttatgacacttgatgaaaaatcatagataaaatgaaggttcatgcataatcagtgctcagaatcatgatcagagtattttttaaccccaaattcaaactggcatattttcttgcaattgatttttgatcaaaatgagtaattaattaattgccaattaagtcattgtcttctgatcagtgatcactcaaaaaacattcaaaaattttgtggcgatggcattccgttgtgactgctgcctgttcacctttgcctcatttgggctgctccatgaccatttactctacatgggtgagcaagcattttgtaatgcgtttgtattgtggtctctaaaagtcttgacgaattccgattggaactggacttaattggattttaattacgcaacaccgtggctcgtaattacggagtgtttaatcgattacggaaatccgtaaccccgtaattacgggagtccaaaaaagccttgtatattttcccccaaatttattttcaaacgggtaatgagggctattataccgaacaggggtcggacaatccgtcaataatggataatccttcagtgaacaattaattctcagaaaaaaattttttgagcaccgatcaaagattttcgagaatgattgttaaatttaataaataaaatttcatatttcttaaacattctattatttaataattcgatttaatagattatttatagaaatttcattttttaatataaatttattgacatattgtttactgacgaatgttcgggagccctaattccgacgcccaaaaatttttgaaaatggatttctgctcccaatgcagaaaatgtaattccgaatcatgtctatctttgtaaattgttgcgacagtgtccgcctcgtcgttgtcccatgccacgcattcgttcgtctgtccgttgtgcagcgtgccgtccccgtcgcggtcgtccgctccaccgcaacaacaatttgccagttcatttggttgcgcaagcgtttgccgaacacattgacatggcacacgtggcccaaacaccccacgaaatggtggattgatggctcatcggttaagagccttggacaatctcaccaaagaggcacgggcatttggacgaaagactcactccatttcccactccaaattttttcacggctatcaaaccgctccacagaaattctgacagaatttatttttttttaatgacaacatcaaaatacata

SEQ ID NO: 65521 - DNA, 941 bp, Heterodera glycines
atgccaattaatgaaatgattttgcaattggaaattgaatcagcgaatgaatgtcaatctaatgaaaatttagacggaataatccaagaaaaatttggaggaaatgttcaaaaaagcagaagaaagggaaaaaaagaccgtttatggagagcaaatgaaataaatgatgacaaacattggataattttggaatcgaaattcgattatatatatatatatatatatatgggtgagaattaatagaattaacatttaatggaaattaactaaattcaaattaagattgaagatgctctatttttggaatttgtcaaaggattagtgacaaattttgataaattttttgaattacctagagaatattctaagggtttgatgcaaaaatataaaggcaaccttgacgttttgtatttaatgcgtgagaattggcactgtgaaaaaattggtaaggaatttaaagaaaacgaaatgacagaatgccaaaaatatcggaattatgtgaacatttatatgaatatttattccggctttatgttgaaggtttgttgagttttacatagtaaagcgggaccgggatgagaattcccggtcctccgaggtcccggttcccggtcccagattttgcaaagcccatgtcctggccccggtagggtcggcccaaccgggaaaaacatgcactggtaagaatgtgagtctgagcaaaaaatcaatgagcgaaattggggaaaaggaaaatttttgataaaaataatttaataatatttattaaagttatattttcaaatgcacaaatggtctagtggttaattaaaaaagcagccttttttgttgcaaatttgttaaaaaattgtactcaaattttcaaaattttcccgacggcaccttttggcaccgccggacccacttctttcccaaaagttttttggaaaaagcgtgccgaa

SEQ ID NO: 65522 - DNA, 655 bp, Heterodera glycines
atgatccgattacatgaatttgtggcccggaattttttgcggcaactgccacttctgctgtcaattttattattgtttttacggtggctcttggtgtcactgtgccgccttttgaaattgttacgaacggacaagggaaaaatgatcctttcaagaatcgaaaaatggcgaatgaagcctgttggttctcctcgcagaatgctcattatctgctgcccgattaggtaagcataatcagaacaaatgtgaattggcaaaaggaggcgttgactggcaaattaatgagatggaacaaaatttttcaatgaaatgagctagacgacgcttaaattctattgaattttgggtgctttacataattgaatattttgatgcttcaaattttatacacagcggcccaattttgggctccaagtacaaatatgctggatttttcgtcttagtggtctgtgagttagtcaccaaaaggggggtctcaagttcaattcctccttgtgtttgtgtataaatttcaattttttaaagcaaataaataaaataataataaatacagaacgccaaaagaacaaatacaaacagtaaaaggtacacactatattttacccttgattttatgaaatttttttagcttataacttggtgaatactagagcaa

SEQ ID NO: 65523 - DNA, 304 bp, Heterodera glycines
aaaattccctcaaaaataaaaggtctattgcgcaccgccctccctatcatgctcgagagcatttgtatgtgtataaaatttatcaaaaaaagagatagccatttttctgggataacctctaaatataaaaatcctctgtgaaataaaatggcgattgtgcacagccctccgtctcatacgcaagcgcttttgtgaggtataaaatttctcaaaaaaagagatagccatttttctgggataaactctaaatataaaaattccctcaaaaataaaagggcgattgcgcacagccctccctatcata

SEQ ID NO: 65524 - DNA, 202 bp, Heterodera glycines
tcgattttttcagtgtccgtttgggggtactcaaacaattatgggggagcaaaaatccaacgcagaattaaagtacaggctatagggaagctattccggaaggattcggtctccccataaatctgggcgcatcggctcggggggactgccccgaaaacaaaaaaatcgattttttcaagtgtccgtttggggtactcaaaca

SEQ ID NO: 65525 - DNA, 79 bp, Heterodera glycines
aaccaacgaactgaactcgcgctggtccaccaccttcttcgtatttatgctgttggtcgcctttctgatcgcaacttcc

SEQ ID NO: 65526 - DNA, 1742 bp, Heterodera glycines
atggttgtctatcaaagactttttcaagttgttcgaaacgctgtcccagcttggaatccacagacttttatttcggattttgaaaatagttcaattcaggccgtgaatcaggtgaaaaagggaggcaagtattggttgaaatcaaaattataggtttttccactctctcggcaaaaaggttgtttgtttcatatgtcccaatctgttttccggcgccttcgaaaattgccacatttaaattcactttttttggcccaaaaccaagaaccgcatcaaacaaaaaccaatgtcaaatgtttaatttcgctcgcattcgttccaagcggttctgcttatctccatttctgtttgatcatgtcacaatttgatatggaaaatgaggaagttcagagtaataataactagggattagattttatgcagcttcctaaaatttttgcgctcgtaatatgctgaaataggcacaaaaacgattttttatcttggtttgaaacttctacgatcaattttataatgcctatttttgcctatttcggactttttatgcctttttaagtgtctatttagtatgcctaaaaatctaatccctaataataacaattgaattttaaaaaaattaaatcccatttgagaactggccaaatattttgcaaaaaattggcttggatgccgtcaaatttggcaatccgatcctgtaaatgatgatccggctgtgggccattatcaacatgtcgatttgtttatgcgaaactggattgtccaaaaaaattaccaaaaccgtaatgccacttttccaatttcattatggaatatgtgtttgaatttgaatgcgaatttatgccgtaccaataactccttggagtcatggcatagagtttggaacagcaaatttaagtaaaaaattttttttctattttatttttttcgaattttactttttcgatttagaagtggtcacccgaaagttagtgaaattgttaggggaatcgaatctgaagatttgcattgggcaaatgttgttcgagactgggatgacacgcctgtgaatggaattcgtggtaaaggcatgaaaagaaaagaaatttatgttgaacaagacgaaaatttgctcgcgctttacaacacacgtgaacagcgccatccctaccaatatttaagagctgtggcctatcgaatgccggacccaatttaacttttccataaaaacggaaataatttcgaaacaaaaataattattttgcttactaaatgaaatagcattgtcttttttaaaactaccatttactgtcgaaaagtccactgtcgaaaagtcctccccttaaacaaaaattttttctgtcgaaaagtcctttactgtcgaaaagtccgctgtcgaaaagtccttctgtcgaaaggtccgctgtcgaaaagtccggcgcccgtttggattgagtgttgaggcctagatatggtgcaacattcggaccgggtacatgattctcaatcactaccttctgtggtctattttcaagtatcccctttaccgtacgcctttctttatagagccaatcgtgtctcttcgccttgaggtcctcgcttatgccggggtcttgtaaattctgagaaatttttgcgtctaaactcgatttttcattttggagataatcaccactattcatcgcactccgtagagccaaatattccgcctcgggaatcattaacattttctttgcaaatttcatgatgttattttttctaataaa

SEQ ID NO: 65527 - DNA, 1213 bp, Heterodera glycines
  unsure (1)..(1213): unsure at all n locations
atgtttgctgatttattggactcgtccgccgacgaagagcccactgaaaaaatcctcgatctttcgaacgagaatgatttggacaatactcgnatcagtcagtaattgatcactntcggtgccacgagaggctattatcagactcgcagaattgatctcgccaaaaatttctcaaatatatgaaaatcgaataactgatattaaccctatacaacaacttcaattagcattgttgttctatgcaacaggtgaatctacttttttgctattagcttaaaaggccgattatttggaggtgatcaccaaaaaacattggcggcagcttgtggtgtccatcaaacgaccatttctcgagccgttagtttagtaacggatgctcttcttgaatttgcgcatcattatgtatgctttccatcggccgaacgaatacaatcagtcaagaccggtttttatttggtgattaaagatcattagtagttcaagaaaaatggcaatttctagaaagccggaatgcctcaagtgattgcttgtgttgacggtacatttttaccaattcaacgtccgacaaaccaattagattatgcctatgtatgtcggaaaggctttactgctctaaatgcaatgggcgtctgtgaccatcaaaagaaatttattgcatttttttgtaactaccctgggtcctgccatgatagttacgttttacggtatttttaagattctgacaaatataaaactttattctttgattagttgctctaaattttattcgagaatggaggaaggcactcttgacggaattgtgctgggcgattcggcatacccgcaaaagaggtggctctttactccattaagaaacccacgcacagaaaaagaagaaaattataatgctgcgcacgctcaaacccgggtggccattgaacaatgttttggcatttttaaaaatcggtggagatgcatgatgtataaatgcagattatcaccgggtattttgttagttaaatggcactgctaaaataacttttaagaaaagttgacaaaaattgctactgtttgtagcatgttgcataacatcgcaattgattgtaatgcaccattaccaagagatttgttggttgctgctgacattgaaggagaacaacaaggaaatcccgatgaaaatgttgctcaaagtgcagaagcaatccgaaatgattatattaatcggaatttttaa

SEQ ID NO: 65528 - DNA, 601 bp, Heterodera glycines
atgtcttttaaacgcgtgaactctgcccaacccaccgccgtgccaatggccaaaaaatgggacttccgctcaattgggtaagtttaataagcaataacatataaatagctaatccgttttagaaataatttcccgatggagccctttaaacttattgaccaccaaactacaaaatgcgaaaaacataacggaatttgtgatcaacccggatgtggagcgccccgatgaaacactgcgagaagcgatcgatatgatgataaagaattccatatcgaagacggaggagacaatggggcgcaaagtgaaaatgtttggcgtggcattgactgctggacttggacacccaatttggctgccgtaccgacccttcccccaaaacaacgcggatgttgtcatggaggaaatcaataaattggggcagagcggaggagaagaaggggaggaggacaaaagaacaattctgctttcggaatcaataaagatgaaggttacctgtgtagcgctgccagctggagagggaccgcgaaatgtgcacaaatttgattttggtttcaaggagaaacagcggattaagttgcatagataaattttaatcaataaa

SEQ ID NO: 65529 - DNA, 375 bp, Heterodera glycines
atgcacgcgttttgcgctcgagatatttatcattggccttgtcaatccaaagcgaaacaacaaagatggtgttttgagcgaataaagggcataggttattttgaagaagtgtcaaagaacatgcatcaataagcctgcaaaatttaataagtggaaaatccatgagtatagaatttattttcagaaagtgtccccagacttttggaaaaatatatttgcaatttatcaacaattttgagaagtaagttagaaatgataaacttcccgattcaaaccaattttcgttgctttaattaaccgcgataaaaacatttgaatcaattaaatagcttctgagataataaggtttatcataaaatttcatttaaaaataaa

SEQ ID NO: 65530 - DNA, 394 bp, Heterodera glycines
tcaaagtcgagtgaaagcggcgaaccgcctgcaaatggagcagaagtggcgcaaagtcgcaagaaacgtcaggccgaagaagtgaccactgaagagccaccatcagaaacaaacgatgccgaaggtgccgaggatcaccaatctgcggcagcgggaaatggaaaagcaccaaaaaataagggcaaaaagaacaagagcgacagcagcgactcgtcaagttcgtcgagttcgtcgagcgaaagtgacgagaagaagaagctgaagaagaagaacaagcactgagcatcggtcgactcactaatgaggccgcttaattggattggggtcattagcgaagagtggactgtcacaattaatgttgtcaaaattgtaaagcttttattctttgatggga

SEQ ID NO: 65531 - DNA, 552 bp, Heterodera glycines
  unsure (1)..(552): unsure at all n locations
atgtctgcggaatcgccaacaacatcacaacgccgtgctcgcagtcgcaagacgaagaaacgtgcggccagcgctggcgagaccaaaccactgcgacgctcggcacggattgcggcacagaaagcggcgaaggaaaaggcagccaaagtgacgttttcggacagcattcctcctccgtcgtcattcatttccccttttttcagcagaaagctcgtgacggctccaccgcgtcaacgaagtctgctggtcgtggtcgtcctagtcgctcgccgaagaagtcaggcccgaagagtcgtcgctcgcccgccggtcgtggaggaggacgttctcagacgccgcacaagaagaaacaaccgctgaagaagaaggcgccgggcccgcgcagtcgcactcctggtcgacgcgtgaagaaaccgtcaacgaagaagtcacctgctcctcgccgtgcaaaaacctccaccaagaagcgcggacgtcctgccaagaaagcggaacaagccgaaccatcggacagcgngacagtcgccgacagtgaccgcgacgacagcgaac

SEQ ID NO: 65532 - DNA, 341 bp, Heterodera glycines
atggacacgggcaaaattcctgaaatttggaaaaagtttattgttatacctctctttaaaaaaggtgaccgaaatgacccacataattacagacctatttctcttacgtgctgtctatgttgagttatggaaaaaattattgcaaaaagcatttataacttccttcatcagaataatttaatatccgaacatcagttcggttttgttaaacaccgatctactaatactcaactaattacagtattagaagattggtacgacagcatatacggtaagaaaatatcgactgtatttatgtggactttcggaaagcttttgattcccttcctataaacatttta

SEQ ID NO: 65533 - DNA, 1085 bp, Heterodera glycines
atgaaacactgcccggaaaatttcaacgaattttgccgcggaatggaagatattttgagcgaatgggattgtaccgaaatccaggcattcaatgaattgtgggaaggagtgaagcgaagagcggaagcgttggacgaatttgcggaacgactttatgggattgttgaacgcgcttacccaggtttgccgccgagctttgtcagcgattttgcgataaagcacttaattcgtgcgatgggaaatcaggaaatttcggttggattggaaatagctctccgtccaggcatgagcttcgacagtttcgtcgctctcgcagttcgagcagaggtagtgcaaaaggccactaagtcggccgagtctggaaatgagcgccggccgaattttaggcagaaaacgacttttcagccgcgaaatttcctaatgccaaggacgaagccgatagtttgctacaactgcaacaaagctgggcatatatctcgcaattgttgaatttactttggaccgaagcatttcgactgtccacaaaatccgccacaacatcaaaattttgtgaaaaaggcgccgattttcgaaaaattcagaaggcgagaagaaaccgaatgattttaagttgtctaatcaaccaccggcacaacgaacgaacacggaagctggaactaaattgaaagtgtccaatcgaccgcacatttcgtcgtcgtcatgttatgtaaaaggaggaaagaatgaggaaaacccgaccgaaaattccgaattgtttttaaattcaattgttgctacgttagttttgttcgccggtgcagtgtcgaagcaaaagtcaaagtgtggacgaatttgaaaaagtaaaggctcaatgagtagcaccgacgaagtgaaaggacgcaaaaccgatggaaaatgagcccaaagcgctgaggacatcgcttcttagagggcgaggatgtgatatcattgttgatttaaaatatgtttggcattttgttgtttaaatttaatgtcatttttgtttgtgattttgttagtagtagttagtttatgctgtcgtcagcaatattgattgtcctcgcctattttaatttgaaattaaa

SEQ ID NO: 65534 - DNA, 382 bp, Heterodera glycines
atgccatggacaagagcaagtgtgatgccagaaggaacggagtatgggagaaagtggataaaggacctgagagaacctctaaaattagcgcccgtagctcagttggttagagcacggcacggattgctggggtcgtgggttcgagtcccaccgggcgagttaccttttatgttctacatggcgctcctgggcggatcccctccacactgccgggaccactggaccaaggagagtccaagtccgtcggtgaagtgccaaggagagcccgagggaccggtcttccgagggaggcggaatgtgatgccagaaggaacggagtgtggtagaaagtgggataaaggacctgagagaacctctaaaagtagcgcccgtagctcagttg

SEQ ID NO: 65535 - DNA, 993 bp, Heterodera glycines
atggttttcgagtatgtggagaaacggtatgtgcgagttgaatttgaacacacaaattttttggcatttttcgaaatagtctccgaaaaaggctaaaatttaaaaaattgcccaatccgttttctttcagctcattgatggaccttcctacggacaatccgttgtgcgaatttacggcatggaaatatttccgagacgcgctcaaagggctcgaatattgtgggccaattaccatttcaaaaaatgccgtaattaatgacctctctctggttttggtttttcagtgcatttccaaaaaattgtgcacagagatttgaagccgtccaatttgttgttgtccgacacagaaaatgtcaaagtgagtcgccaaaaaattgccaaagattgagagaaatttcaaaaatgagaaattttctaattataagtgcaaaattcaaatttttgaaagtttaattaggggagcagaattgaaaatgttacaaatccttattttacgaaacattgaaattttttataatttaaatttttgcaaaagcaaattctaaattaattctttaaatatttttttctaaaataaaattgttatttaatttttaaaattttaattttttaaaataattttgccaatatttttcacagattgccgactttggagtttcctgtgaatttgaaggtgattttacgacaataaaaagttaggtaattaatttattgcatcattttccttaaggaattgatgcctttttgacggtgaattgtggcggcaaaattttgaataaaaatttaaaaaattttccattcatttttcagggtacggccggcactcccgcattcatggcacccgaggtaaatgccaaataaaattttagaaatttgatcatagtttctgaaaggaaaatttcacgcaatttttgttggtttcactttttccaaatcctgatcagaaaatagtcagggtaatataaattcgtgacaattaaattaatttacaaa

SEQ ID NO: 65536 - DNA, 688 bp, Heterodera glycines
agcattccaatcactgggactcaacccatcagcatttcaatcactgggactcaacccaccagcatttcaatcgctgggactcaacccaccaacatttcaatcactgggactcaacccaccagcattacaatcactgggactcaacccaccagcattccaatcactgggactcaacccaccagcattccaatcactgggactcaacccaccagcattccaatcactgggactcaacccaacatcatttcaatcactgggactcaacccaccagcatttcaatcactgggactcaacccaccaacatttcaatgactgggactcaacccaccagcattccaatcactgggactcaacccaccaacatttcaatcactgggactcaacccaccagcattccaatcactgggactcaacccaccagcatttcaatcactgggactcaacccaccagcatttcaatcactgggactcaacccaccagcatttcaatcactgggactcaacccaccagcatttcaatcactgggactcaacccaccagcattccaatcactgggactcaacccaacatcatttcaatcactgggactcaacccaccagcatttcaatcactgggactcaacccaccagcattccaatcactgggacacgacccaccaacatttcaatcactgggactcaaccca

SEQ ID NO: 65537 - DNA, 962 bp, Heterodera glycines
atggacgacgacaatcggcagaatgaaaagaaaatgacagcagatgtggtgtcaattgagaaggtgatggatgatgatgatgatgaattgtaaaaaacattttgccaaagaatcaacagaaaaggggggatacggtagcaataaagtacggtaggtttaaagaaaaataatatcagtattttatttatactaagaaatgctaataaataaaaagtagagtgccacgggaccgggaatttttgccaaaaccgggaccgggacttgccgggacctgagaagccgggaccgggaccgggacctcgattttttttcgggaccgggaccgcaagaaaaaccgggaaccgggaccaaccgggaaattttaaaaattcaaaaaaattttaaaaatttaaaaaaaaattcaaattttaatttatatcaagtgaaaataatacaaaattatttggttttttatttaataaattaaattaatgaaaattttcaaacaaattttcttcaattatttcaaacaattaatcatttttggattaaatcatcgaatattaatagaaattcagatttgattttcacatcactttttttcggagcgctttttcaaaaaacttttgggaaagaaggggtccggcggtgccgataggcgccgccgggggaaattttaaaaatttgggtgcaatttgttaacagattttcaacaaaaaaggttggtttttgggattaataggctcaacaatttactatggattttcatttaaaaaatgataaaatatgtatcaatttaaaaaaaactatgagtaatcatattttctctataggaaacccacgagtatacaaaaagaaaattcaaaataatttaatttctgtagagggattgaaccaagggaaagaagaagggaaagtcaaggagactagacattagggcatttgcacacttgggcaatgttactttttaagaatataataaa

SEQ ID NO: 65538 - DNA, 1757 bp, Heterodera glycines
caaatcccattatctctcttctcactaaaattttcttcttctgaaagtgccttttgggggacgacgaaatgtgtccttcaaaaacgcaacacttggaacagttccattcgcttaatattcctatgattttcattctctccgcacttttctcactttctgcgacattcgcacagtttgtcccggccaaaagtcagtgaaactttttaagggaaaggcaaagaaagggattttcacctcagatcgctgctacagttgcgcatcggacaatatgaaagaagtgagtttagccgggggggggggtattttgaggcttcaaaaactcgaactttgaagctaattaattaatgtatataagcccccctaaccgcccgtgggcaatcccagaaatcatttttaaatatgtttgtatattaatgttttgaatttattgtttaaaaataatatttaaaagaaaaagacaaatataaatactaaaactatgcttgataggttctggttcttggtgctcatttgctagccttttgacttatgttagcacatgaaaacggtaattaccgtccctttgtccttaattgccgcttttctctgttttaaacctttcaaattaattaaatggaaaaaaaatttcgaaaagccgcaccattgttagccgtccttctcattactcctccgctttttgtccccagaatttcctcacgcgcagccgcggacccccggggcgcgtgcgcgagccgcgtctgttcgattcgatgtgcgactcggacacgtgggtaattcgggaaaaaagtgccatcgaatgtcagggcgcttgcttcaaatggcagcagacgctgaacaattcgggcgtcctttcatacgccaccatcagaggatgctacgaacgggtgagcatcgaatggcacggggaaagcgaaacggcggcggaaggaattgcgaaaagcattggtcggcgggacaatgctttttgttaggccaaatttgataagggatgtacgagattctcgagtcgagaaattcgaattcgtctcatttctctgtctcggcttctctcatttctctgtctcggcttctctcatttctctgtctcggctttttcttggggtgtctcgtcccctctcatttctctgtctcggctttttcttggggtgtctcgtcccctctcatttctctatctcggcttttttccttttctattctcgatgaaattcactccccctgatcttttcagatgttcgattcgtccgttggtggccccactccctcctccgacagttcgtcgtccgtcgccttcaacactgaatgcaaacacacgcaacgcgcgttggtctgtctggacgagttcagctccgtcgaggagtccacctgctggtgcttcggcgacttttgcaacgcggcgacggcgaaaggcgacggaattcgaaatgccatccgagcgacggcatcggcactttttgcatcatcacttttcatgtcattttggaaattgcaacaaataaattgcaaataaatatacaaaattaattacaattaagtgagcggggaattggataaacaccgaaatttatctagaaaaagtgaaaatactcaaaaaattttaaaaggaattaaaataacgaatacaaaaaatgaaaaataaaattaataaattcaaaaatcatttaaatgacccgaaacaaaacataaaataaatagcaaagctaaaatgctaatttttaagaaaatgtttgtttattttcataataattaatttgttccaa

SEQ ID NO: 65539 - DNA, 1436 bp, Heterodera glycines
gcaatgtcatccaatcgtcgaaggacgcggcttatttggcccgtcacatcggcctccgagttggcgttcccgtccatgtccctgccgttactgttaacaggctttgcggctcgggcttcgaggcgattgcgcagggaggccaagtaggagcgaccaaatggaaaaaagttattttcgctttgtttttcagcaaatcctcgcgggtgactcaaaggttggcaaaataaaaacaaaaaattttgtggagacgtgggctgttactttgtttttcgtttttaggttgttttggcgggtggaactgagtcgatgagtcaggcgccgttcgcagtgcgcggcgctcgcttcggcacacagctcggtgccaagattgaggtccagctttggggaagggttttttcaattcaatatcgatttcagttcgaagacgtgctttggcaaggacttaccgacgcgcacgcgaacatgccgatgggaatcactgcagagaatttgggtgccaaatacaatgtgacacgagaggaggccgacgcttatgccattcggtcgcaaaaccgctggagactcggtaagcatttgacttacgtcaatttcttcaaactcattcgtattttgcctgatatttccgattcttttgaagcttaaaatatttgtcctttcatttcagcaaacaatgccggctatttcaagtccgaaattgtgccggtcaaattgcagggcaaacgcggcgaggagaaactgttcgatgtggacgaacacccgcgggaaagcaccgccgagcaaatggccaagctgaagcccgtcttcaagaaggacggcctcgtcaacgcgggcaatgcgtcggtcggttattatttgatattttcattattattgtaattttcagtaaagtggccttcggtgcctagtatagaaagtcgtaatctttcggtttttagggcgtttgcgacggtgcggctgctgtcgttgtggcggacgaggaaagtgtgtccaagtaccatttggacccgttggtgcgtttgttggggtggcacgcggtcggctgtgaccccacaattatgggcattgggccggtggaggcaatccgaggactatgcaaaaagacgggcattgcgttggacaaagtggacattgtcgaggttgagggggtagaaaagttgtaatagatttttataaaccattttcaggtcaacgaggcttttgctccgcaagtgctcgccgttcaggtcaaattaaaaatacatcttatttcatacatttagctttaaaacatttgtaaatttttatattttatcttttcaatggttttaaaattcgtttcagaaggaattgggcttggaatcggatcgtctgaatgttcatggcggtgccattgcgcttggccaccccctcggcgcgtctggcgctcgaatcacggcccatttgacacacgagctcaa

SEQ ID NO: 65540 - DNA, 706 bp, Heterodera glycines
atgtatggcaatgatttgttggcacggcttaaagacgaaacggaaggacctggcgagaaggattttcaatatgcactggagacattgttgggaagccaacgggaagacagcacaacattcaaaccgaagaaaatcaaagcaaaaaaggtggtaaatttttaaaaagcccaaaatgagagagtttccctggggcttctttcaatttccgtcttatcactgatctggtgtcatattttgaaatttctgtttcaaattataaatgttttctgtcgtcatatcatatttacgacatcaggaatatgatataaaaaatggaaaaaaatttggcaaaaagtataacattgaggtcgtatttaacaataacatgaacacgtgctgagatgaaccgcaaaaaatctcagtgtcaataaaaataattaaatttaattttacgattcaatgattttcgatagcaattttaacttgtgaaatagtaataatttcaacatacaaattttacgtgttagcaaccttggacaccacgtaaatctaaatttattttattatttttattttaaattccatgtcatcattttttgtttatcctttttttacattgttgtccataaatgaagcaatttttagtcccaaaatttcaacccattccattttattcttgcatagtgtcacacaattgcagggacttccacaatgaaatgaaaataaa

SEQ ID NO: 65541 - DNA, 567 bp, Heterodera glycines
atgcccattccgatggaatttgcattacccgaccacacccgtttgtccttggttgatttccctctacatctgccgcttgaactgcttcaaattgatgccatccttcaaatactcactgcaataatgcttgaatacaaagtaaattagtttgaaaaatattcaaaaattcttttgtttttgtgtaaaattttaatttttaaattattatcataaattattcattgcctttttaagtctaacaaaaaatttcaattctaatattatttacccttcaaatatgtgggtaccaaacagggacggcgttccgaggcccctaatatttcggaaattgaatgcttgaacccaaaatatggaaaagccggttttcgccaaaaaaattactaccttattttgttaagaaatgtgctaattttcaataaatttgcccatttttcatgaaactttttacaaattctttataaaatacgcaaattccaggtcattttgcagtcgcgcaactgtaacgcagtcagtgtttgcgtgatggcattggtggcacttttatatccgttagagtatgtacaataa

SEQ ID NO: 65542 - DNA, 73 bp, Heterodera glycines
aatcgaacgctaacggacgacctaatggaaaaaaatccccgaaggagagaatttaattaaatccattccttcg

SEQ ID NO: 65543 - DNA, 864 bp, Heterodera glycines
  unsure (1)..(864): unsure at all n locations
atgaaagcagagaaaagcaaagtaaaaatgacaattagaagaaacattgtgaataggtatttgaataaatattagcaattaaataatatattttctaaattttagaaatattttattgagtgaatgcaaatcccgtgaacgatttacatttcagccatttttggccaatgatttcaaaaagcgcttttttgttgacctttgcacaaattcacgtgctttgccgttgaaaatgtccgtgtactgcttcaacttagcaaagtgaaaagttggcgtcagaatgcgtcgctgtcttttccattttgcatcggtgctcagcagcaaaccctcgcccagccactgcttgaacaagttgtaatcattgccctttgtcagttccatcgaattttccaatatttcctaaatcaaatcatattcnccttgaaatttcatttaattttactntggcactctctgaatccaatgcncaaatgtgnagctcagaggcaaaccaccagcacatcgcattgtgcncatcgcgaagtgcccgatttgcatggccaattagaaactccggcacatctgctcattttgaagattaattaaaaatgaaatattgtcatataaatgtgagaccatatctagattttgggaacaggtggagatgaccgatcagcggaaccctggcaatttgccaaaaattgtcggacactttcaaaagtcgccgataatttgaaaaggcagtaaaaagccaaaaaatgaaagcagagaaaagcaaagtaaaaagggcaatcagcagaaacattatgaatatttgaataatattaacaattaaataatatttttatctaaattttttaaatatttcatttaattgattattttgga

SEQ ID NO: 65544 - DNA, 583 bp, Heterodera glycines
atgtcactgggaaggaacaaatcatttgccccggggcttttgctgataattcttccgctgatcagtttcaacggacaaatcgcgatcgcttcacccattcccaacgccaaagaaagaaacaacgaaatacaagcacaggcatatgatccatcagcagggaagttggcagagtttggagcgagagaaagacgccaaaacgcgatgctttgctgctgtcagatgggcgcaggcgggggacctcaaatgccaccaccgatgggaccacagatgcctcctcaaatgcccttaggaccacaaatgccaccacctatgggacaacaaatgccattgggaccacaattggcaccaccgatgggatcacagatgccacctcaaatgccattaggaccacaaatggctccaccgatgggaccatcgctgggacctcaaatgccaccacctatgggacaacaaatgccattgggaccacaattggcaccaccgatgggaccacagatgccacctcaaatgccattaggaccacaaatggctccaccgatgggaccacaaatgccaccaccaccaccaggccaagcgaatatgg

SEQ ID NO: 65545 - DNA, 1298 bp, Heterodera glycines
ctttatctgcagcgattgttggcttttggtgttcgattttcttgcgccttctcagcttggcctcgaaattgcactgattagccgccgctttgacatttacgtggatgaacacttcaagacgcgcaaatggacgttgggcgaaattcgaatttgctacaaaattgaagaaaatggcaccaagcaaatgcatattcacgatgccgatgcaaatccattgccaatcccgcaaaatccgttgccgaacaaaatcatcggattccgaggcattaagatcgtgtaagaaaccgatcatccagattgttttgatttaggacactgactaacattttcagctacatcgatcaaaatgtcgtcgcatttctccgccgttttcaccgttttttctccatttgttcaacggaattgggcattatcacgtgcaatgatcacattttggaatttgttttgctcaacatttggccaatgctgcacgactccattcgtgcgatgtattttaacaccatcacttttcgttgtttgcgtcaattggccccggcactgctcagcgattctccatcacttcgctttgtctctttcaatgatgccattctccctgttcttccgcctgatgaaagtgccaatgcgacggatggccaagcggtggcaaaatggctgttcacgccccattcggatggtatgcccaagtggttcagctgctctgttaattcacttgatcaatggtcttcgacactggaacagttcaaaacggtggatcattcccccctatttaattgggttttttgtcccttttttaggcattttccaatgcttcttcttcagttacttttcgcattaactttctgctgtcttctccgattgactctgcagttgtgccatttgatctgatcaacgaagtgactgtggagaaattgacactgcaacaagaagacgaagatgtttggctcacgcgttgtccaattggatgggatgagatgaaatggggaaatgtgcaggatgaattattgaatgacgatccactgaatgcaattctatttttgatcagagaggacagattcgacgacgggtgaacgattttaaaaattcaaattgaattgattttaatgatgcaaaaatgcggttaataaacattgaacagtatatgatagatacaaaaaaaacaaaataattaggatgttagttggttgactcataaaatgccattggccccataaaaattgaatgctcttaaagtgtaattaaatcatcatcgttttttcaggcttctcgacgcagcttcccaagggccgagtgatcactga

SEQ ID NO: 65546 - DNA, 1198 bp, Heterodera glycines
atgaatcgacggtaagaaaaattttttaattacaaattttcatttacccatacatttttaacgcatttcagttggatttgtggcgacgtttggatggacattctcccatcgtttgaccatgcccaacttggcctcaaaatggcattgctttccgaccgtttcgatgttttggtggacgcgcatttcgacagaaaaagcgaattgacaatttggaaagcaatcgaaattcgcaaggacaaaggacgaaatgcaaacgaaaatggaccaacaccgaaatttgttgtacggatcggtgacaatgacatttctttggaagaattgcctattggaccgtggggtgacaatgttatgaagtttccggttgtacttgtccatggcaattttgtgcaattttcgatgccgaatcgtccgttgcacaacaaaattcgttttcattacctttatatcgagtaatttgaaccttttgatataccacttacctattaaagcattttaatatttcttcagctacattgactactctgtgctcgcatttctccgttccaacaagccaatttgggacagaatgggcaccaaattgacattgtggccatacagaaccgagaaagatcagtcaatttgggatgtttttgttcgcgaaatttggccaatttttgcgccaaacattcgtcatttgggctttcacgatggcgattatttggacaaattgcgtagtcacacttcaccaacaattctcactgatcttgatcaattgaatgcaattgattccggttttctattcccagaaggaattgctgattttgatgtgctgaatccaactgctgcccaagcgttgaccaaatggttgcacactccgagcaaaaatggtcaaccgaagaatttgtattactttaattctccacggaatctcggatgggtcaacagcttcaaagaggtcgtctcgccagaattttcattaatttgtttttgttttaccaatttttgtgtttaggcattccgtcgtgccaccacttctatcagttacaaaattcgatttaatttatatttggaaccaatgccaattgaaccatttgaattggtgaacaaacggacgaaagaaaagctgacacctgacgaaggagatcgacgaattcgacgtaaatgtgtgtaattggctgttgaacggtgcccattggggagacggcgacggtgccagcaa

SEQ ID NO: 65547 - DNA, 622 bp, Heterodera glycines
atgccaactgaacaatttgaattggtgaatggacggaccaatgagaagctgacactgaaacagagcaaggaatgcaatttggttatttggctgttgcaacggtacccaattggggagacgtcgacggcgccagttaaatgggaagacagcgtaaatccgagtgccaatttgaacagtatcagatttgatctgtggagtttcgataaatccattgggtgagcagcagcaatagcatttgaattttatcgaaaaataaaatatttaattaattttaggccattgtcgccaccaacggaagaagaaaaagcggatcaaatcaatgaaaatgtcgtctgattaagtgtacggaaatgaataattgaataattctatttgagaaatgatcgatctcaatttgttgtgcttattttctctcagaaatgcttttttaattgtttcgttccaattatataaaaatatgcttttttgttgagcaatttattaataattagggtttgtaatcgagaccggataagagggtcggtcgaacggtttcggttaaaaaaccgaaccgaaaaaaaccgaagaaaaattttcggtttcggtttttttgaatttttttatcttttcccaaaaaaaaaca

SEQ ID NO: 65548 - DNA, 505 bp, Heterodera glycines
atgtccagcgtggacttggacctgtaccagccgagccgggcaaaggacgtgcagacgctgtaccgggagtacgcactgttgcgcgagacggagcccgactgtcccagcctggacatcagcgacatcacactgtgtgtacactgtacagtacacccaaggggggtgaggtgcacaattcatcccctccctcccctcccgccgtttcccccgtaaaatcttaagaaaattttcaaaaatttgggggaaaaattagaaaaattttcagctattttttgggcaaacgttagaaaaagttatagaaagtctttaaattttctcatataaaattttataattttttaaaaatttaaaaattggggagggaacgagctgctcccagtgggacctgaggctccaagaaagccggaaccaaatttcacctaacaataagcgcttggttgatctcgcaaaaattcgactcatcgaaaaatttaaatttgcctaatcatcactctgatttgctgaa

SEQ ID NO: 65549 - DNA, 60 bp, Heterodera glycines; identical to SEQ ID NO: 52045

SEQ ID NO: 65550 - DNA, 285 bp, Heterodera glycines
aacaccgaagagccttctgagtggaacaaatgcattgaattattggacagaaagaaagagacggacgagaaaatctcacaacaagtgacacttgtggcgaatttgggcaaagcattcgacgagggcattcagcagaacgaaggcgaagaacagcgggaagaaaaggagaaggaagaggttgagaaggaggaggagaaggaggtgcgtttggaaatcgaatggaacggacttttagttttagagaaaaagttttttcgatttacaattattggaccaaaattctaa

SEQ ID NO: 65551 - DNA, 786 bp, Heterodera glycines
gagaaaatctttcgttctgtgctctgtccaaaatcgttttggtctctttcgcaggcgtcgcgcgaccacctcgaggtttgcttacggaatttcaaaaaatccgggacgaatttcaccaaattttcctttttaaattgtggcaaaacccatcaaaaacattcggaattgtgctcgaagttagcaatttcaaaattttagctgcggaacatgcaaacagataccggaaaacatccttggacccttaaattttccctccttttttcgttaaattttcccatttttgcttccttttcagcattttcttcccctcccttccatttcgtccgccattaaatcatcgtcagtttctgtcgctcgtcgcaattgtggcgccccgctcgacgagttgctcagttgcgcattcaccagcgacccaaatttttgctttggcaatccgttggccaaattttttgcgcgcattcgaagtaaggcgaacaaagatggaagagttttgaaaattgggccctagagaaaaagctaaggttcaatggtttcacattgtgggaggaaatttacgtataaatttagaaaaaaaaatttggaaggaaaaataattccaaaaacatttatttatctaatttaaaattctataaacaatttttgttttcaaaatcctcaatcttcagatggttacttcagttcacccgaacaagtccaactgagggaccaccggcgagtgctgtacgaccattacattcgccactatcagatgaacttgctgaagaccctgttgatcaactcccatgt

SEQ ID NO: 65552 - DNA, 49 bp, Heterodera glycines; identical to SEQ ID NO: 51181

SEQ ID NO: 65553 - DNA, 63 bp, Heterodera glycines
atgccgactgaaacaacggaatccaacgaaaagaaagaaaatcccgaagacatttcgagcact

SEQ ID NO: 65554 - DNA, 1380 bp, Heterodera glycines
atgacttcaagaagtgccaaaagaagtttgaagaaaagtgatggcttgtccggaaaagagtccgtctcaaaagcacagcaaattgagcaattttttggcattgacgaggcaaaatgtgaaactgccgaggtaagaaattatcagcaaaaagtgagaattttgaaaatttcaaattttcgactttgttcgaattcgtgctttttttatggtcgtgtgaactgcaatagagccaaaaattgcccgaccgacatcggaattatccgtaaattacattcacactttgccattttcagcgaacgtcgaagtcgccgagtgccaagcgaagccgaagctcaacaaacacggcagtgcaattgctgaaaaagatggcgaagcacaaaaaggaattgaacagcagcaaagaaacgcgacgagaagaggacgagagggaaatggagaacattccggacacattggacgaactgaacagtcgggggacggaggacgaaaggggcaaagggtgcgaactttggcaaagtgccgaaaaagacaaattaaaattagacaaagcaaaaaatgacagaataaacacaaccaactttaggtgttctagaaaagtttcatttctcttcaaattctgcctttattttcggcagccaaaatccgaacttttacattcaaaaaatgcatttgtgctaccaatcccggaaaatgccacttgaatttggggattacaaattcatttttctgaattgtcagaatggatttctgctcttcatcgaccattctgttctttaagaactgaaagtgtgcagacggtgaacgaattggacgaattgctcgactcggagacggccaaacgcattcaatcggaaagcgaagtgaccatccgattttgctgtccgctgctcgccaatgtcggctccgttgggcaatgtctgtgttttgttttactttttcccattttattttttgtttttctttgtcagtgttttccatcgacgacttttcccccctcaaaactctctcgtcgtcttccaatctttccgtccctccctttctctgtccgttcgttttccttttcctctctcgccctcactcgcgccttcgctgcactctcttcgaccgctttcgccaaagggccgtcgccgccggcggagcgatcgccgtcccttacgacacttttgtgttcgccgtttgctacgcatttcaggcattttttggccaaaaagatggccatttgtcaattttattcttatttaggtctctcccattgctttgcatttttccgatgtgtcttcggacgtttcatttgagcagcaattggacaaattcgctgctcttttcgtctcctcaaaagttcgatgtgcccagcggaggcggtgccttttctatgcgaat

SEQ ID NO: 65555 - DNA, 361 bp, Heterodera glycines
  unsure (1)..(361): unsure at all n locations
atgagtgtaattttcccatttatgttcatcgtaattccctcctccccctgtccaccncagggtcgaaaaagccgaaggaggctcgaccgccatcgccacagccaggcgagcattgtgagcggaatgcttggtattttcgaagccaccgaaacaggcggtggtgacgacgacggagaagatggaggaggagacgcaggaggaggcggagaaggagaaggaggcggagcagtcgccaacgaccagtgcccgtcagtgggaacagttgccggacaaatgccgtgcctatttggagttcatacaaaatcaactgggcgtacccgtcgaatacatcggagttgggaagggacgggagcagctgatt

SEQ ID NO: 65556 - DNA, 72 bp, Heterodera glycines
aaatccgattccgattaaatcgccgattccgattatggccaaaaatccgattaattgcgattccgattacga

SEQ ID NO: 65557 - DNA, 140 bp, Heterodera glycines
cggtgcaaattaataaggcaaaggaattcaggggtttactaaaagcaatgagttctgagtaggaaattttctgtgccacatatacactatattttaatcacctgtgaatttttaacatttgatttatttttattagagtt

SEQ ID NO: 65558 - DNA, 393 bp, Heterodera glycines
gttataacgactgttgacaccaaaaaacctcttttggatttctgtgctggttacaccgacaatttcgttggcctcattgaaattggacgatctgatgacgacacaaacttctttaaactttacgagattggacgtcgaagggacttcgatgaggaagaagaagaccaggatgaacaagtgaggggattaacagtcatttattattactgttaaagtaagtatcttaaaatgaatattaagaatccggaagaagaggaggacttttcactgggaagcagttcgccgagcagtagtagcagcagttccaacaattccgacacagaatctcattatccacatgaaaacggaagtataagagacattgaggagggagcagaagaccaggacggacag

SEQ ID NO: 65559 - DNA, 820 bp, Heterodera glycines
acatttttggaaatgacgagtgccaacgcttgaacaagtgaacgattgacaatttctttaattggcacaatcgaaattaattaaattttgatttggctatttaagggagggatcggtgaaagcatttggcgaaatgacagaacaaatcaacgcgcaattggcacaaaagggacggccgcgcatttcggtgtccgaagcggcgcttggctttatccaagtggccaatgaggcgatgagcagacccatccgaagactaactgaagtcgggccaaaggctcgagagaatggcattttcggttaaggccaaaggcttcgacacttcgcaacatttgttgagctgtttcggcggtgcgggaggacagcacgcatgcgcaatagcaaggacacttggtgaggggggagcacacttgggaaagcattttcaattgtggaaaagggacgagtcgagcatttgccatgtttatttatatatttatttttttgggggggggggggggccgggacggcattcggcagcatttacacacagttaaaatcaaattttcgcggtccaggttttgcgaccaataatttctggatttcaatttgtacttttgcttttttaaatgccaagcatataattttaatgcgaaatttgattggtcattatatccgcccgcaaatatcggaaaattcttaaaacggcggaggaaagaaaaaaaagtcgcatttgaggtattggccgagttttggtccatcgccaccacggcgttctgtccgcctacggtttggtgctggcggacgtgggaaacgagcagcaggaaggctttatgaacacttt

SEQ ID NO: 65560 - DNA, 623 bp, Heterodera glycines
aatcgcgatttcgacgttgacgcagaattagccgacgttgacttaagtgacaacagaggtcagtcattaatttttatcattttttacgccttaaatttaagagaaatcaaagtccaaaagtgagaaaatgcagcggtgggcggaggaggagcgccgttgggagaccgaatttgatgaggcaaatacgaaaagtcggacggatggacgacaaaattaccgacaaatgggcgcgaagatgccatggggtgagcgaagaacggtcaatggcatcatacgttaagggggtggggcctgccatttacgaacgaatgcgaaggggtcaacgggaggggattaatgatgactaattccacggttcatgtcatgtaaatcgatgatttctaaaaaacctatctatcttaaattatttcaaatgaaaatttgatattttaagttaacggaacagagcgacgacagaacggtggagacacatcggccggggctggtataattttaacttcaaaggagtttaacaatccgtcataatttgttaatttcagcaactttcgccatcaccccgtcgccgccctcggcttcttcgtccgtttttcgtggagggagtgcaacccgcgcgaggggaggag

SEQ ID NO: 65561 - DNA, 174 bp, Heterodera glycines
atgtcagatccccagaatattactcttgaccatctattattttttacgactttcgctaatgaaataatcaatttttactacattactattttatacattcacgacttttcaaagctacgttttcatgtgatttttaatgagttgtcactgaatttggattcagttaacccattg

SEQ ID NO: 65562 - DNA, 261 bp, Heterodera glycines
atgtcagatccccagaatattactcttgaccatctattattttttacgactttcgctaatgaaataatcaatttttactacattactattttatacattcacgacttttcaaagctacgttttcatgtgatttttaatgagttgtcactgaatttggattcagttaaccccattggtaagtagctgcgaatgttagcattataaaagatttttatagaaagcgttgcaggaacgtggtcacaaaagaaaatgcataattaa

SEQ ID NO: 65563 - DNA, 449 bp, Heterodera glycines
atgccaacggcacattggcattgggtcaccgacgtgagcaaaaaaacagaaacaaatttaatttattaattttgcattttggtgacagaactcgttccagaggcggccattccacgcgttgccgcgactgcgagccgatcgccgcccggcggagggcccttttgaatgccacggggttcaggtggtgttggtggtgccattttgttaggggtgaatttcatttgccctctccccgcattttttttaaatcccagaaactgaaaaattggtttaatttttttttgaaatctttgagacattttaaaattttattttttgaattacattataaaatttttttatttcaaaaaaagaacgaaaaatacgttttttaaatttcagtcttggccaaatgcgccaatttttggacatttgtgcaatgcgaatatgtcgagcaacggcggagccgg

SEQ ID NO: 65564 - DNA, 90 bp, Heterodera glycines
atggccagatttgtacataaaaatttggacaaaagctcagcaagaagacaacaaattaaccgacaaatcataatcaatttgattattcag

SEQ ID NO: 65565 - DNA, 473 bp, Heterodera glycines
atggcggtaccaataggcgcgccggggaaattataaagatcatggttcaattccttatcaaactttccataaaaaaggatcaagtttctataaaacaatatgaaattctgaaattttcagtttttccagcgtaaatttttcgcggaaaacccgtgaactgtccccgtgaatctcccgtgaaattcacggtaaccgtgtccgtgaagcacggcacatctcttccatttgccataaattaatccattcgtaattttatttaggtattttagtggtttaataacactgagaacatatgttgcaatgctatcatttgtgtttctatcggaattgtaaccgtgatatatactcttattgttggaaatgactatataaatctttccttgcttaaagccgaagaaatatttcaaattgaacaacttttgggtggcaatctcaacgactttgtgacatattgtgaacgaaatgtgagctga

SEQ ID NO: 65566 - DNA, 248 bp, Heterodera glycines
atgtgtattttgggacctaagaaacggcacgtgactggtcatgtgaccgaatatttcacaatgaagtgcaccgcgcggaaaatgactcctctgtcaacgaaaaatgctgatttgccgaagaaaaatgcggccaccctcaaaatgaccccagcaaatcccgaggggagtggtacgcaccaaaaaatcgttggcccacgtgcttacgtgtggtcaaaatgctgcaacaattttatgaaagcggcacgagt

SEQ ID NO: 65567 - DNA, 273 bp, Heterodera glycines
atgagccacgagtgtttccaagacaggcacaggtatcagttttcatctaataacttaattgattaaattttgccatttataggacgaactcagcactaccgtatcctactacagttttgcaccatggagtgaacgatcagagctgagagcacgcatcaaattgctcgatggggacaccacacatttcaacatttatttgctccacgacgccattgaacctgtcaaaaactgtaaaagcgcattttggatacggtggttgggcattttaataaa

SEQ ID NO: 65568 - DNA, 275 bp, Heterodera glycines
atgacgatgcagcttttcaaaaggcacttcgcgattccattcacgatcaaaagtatattttacaaaaaaaacttttctattaaatggcatttattataagttaatttaaaaatatttttatttattttttagatgaaagtgtgcttctacaaaagaaaatttttgtgcttttgttacaaaaatatgaaaataaaattttcatttttgaagtttgtatttatttccattatatctttagcacctatttaattatttggaataagaataaaatttaa

SEQ ID NO: 65569 - DNA, 1670 bp, Heterodera glycines
atggaaagtgatctggacaaaaacaatgtgtgccaattccaaacaacatttccattacatgattatctcaacaaaattaatcgggatttggaagttgagcaaaaatgtaagatttgtgaaaattaaaaaaaatattttataacgaaatttatataagtgtatttatatttctataaaaaatggttatttattctgtttttgtttgacctaacgtaaatccatttttaattgattattaaaatacctcctaacttaattatttatatacacaattttcggcaattaaattcgattaatttccaaatttattgaaaactgaaatgaaaatcttaataataaaattataattatctttatcttttgcacaaagtcaaacagttttttaataaactctttcttttaaaaacaattttattaaattaaataaatatcaaaaaaaataattaaataaattcatatgtaataataataataataattattattttttagttaaatcagagcgccagcttaaacgttttattaactttgccaaaacaaggagttctccaccaataaattctgatgtgcatccaatttccaaaatttcaatttcgatgaaaaattttccaattggcccgtatgaattattcgattttcagaacaagtcggaaagtgtaatgattgaaggtaaaaatatataatgtttcgtgtcccgacatttgcgcctttgtccaaaatcgggttcaaaataaagtttttttcaatccctgatcgcataaacagctttaaataagcgattgaaagtgattgtatccgatcatttgatcttcaaaaatttttaaaaaaatagtaaaatttttcaaacaacaaattattgaacataatgaaccaaaagaccgtgttttcttaattttattgctaattaggcgctatcagagtttgaaaaaactcaactttgagtccgattttggacataggcgcaaatgtcggggctgcaaatgtcggggctcctaatgtttagatgaaaaaatgtttttattctcatttgcaaaaatggaaaaaaaattctccgagatttttgaaaaagagccttggataaaaaagaatatatgctgtttctccattttatctgcatgaaaacgccgcccataaataataattccaacatttttatttaaatcgaattcaaaaaattaatataaaaaataaataaaataaatatattttcagctgtgcaacaagacgcaaatgaaactgatcaatcatcgggcattgcaaatatgattgagataattgatcctttgaaatgcagcgagctttgtggggttgccgatgaactttttattgaaaaagatgaacatcaaagctttcgtgtaagtaacaaatgtcacattggcgcgggtacttttggcgacttaaaatttaaagtgtcattaccaattgattagggtaattaaatttcatttaattatttgttcgatttgatggaataagtgttttctttcgcctggaaaatttaaaaagtttaattaagaaatttaaaaaaacattcattttagcgggggagtacgaaaaagaattaaatgaaagtaaaattaattcgaaatttaatattaaaattagctatatataattaaaactcattttgcacgataaaaaataatgataaaatgctttaaaatttaaaa

SEQ ID NO: 65570 - DNA, 737 bp, Heterodera glycines
atggcgaatgtgccaggtcaagtgcgggaatacttgtccacggataagccccttgacgaccgcccactggacatcgatgagatcgagtccgaagtggctgcgttgaaccggcgcacagactcgggcatgcccccgcacagtctccggcttaaagtcggatgcgtcgtcgtccttcttatcaataaaagtgataaggaaggactgatcaatggcacacgcatagttctggaagaacttggcgatgatcgcctcattggtcgtgttatcaatagcaatgctattggcggccaagtgagattctttcttgaaagaacacgaaatgtctatgaagacaaatcgcctggcggcataaaatatgagcgtttgcagttcccaataaagcctgcattcgctatgaccattcaaaaaggtcagggccaaacaatccgcactgtcggcattgatctggaaagggaagtattttcccacggtcaattgtatacggccttctctcgggcaacagacggaaacaatgtccgtgttcatgctcccaaccgggaaattgatgcccaaggccgagccaaagtgctgaatattgtagctactaatatgctcaagttacaataaatggcttagtccagagcagttgggcacatggtttttggagagatgccaatcccattcccatctgcactatgttgggtgcgaaaatggtgagaagcttggatccgggacatggaccggtcagccctctttag

SEQ ID NO: 65571 - DNA, 204 bp, Heterodera glycines
  unsure (1)..(204): unsure at all n locations
atgatctcgttgacttcgtcgcacgtgtcaatggtgcggagcgagaatcaaacgattgagcagctccttgtcattgccaaggagttgttggaagttaggatagacatagtctatcagctcttccttgctcttaacgaggaactgcggaggaaatcagaagtgcttctccggttttctcgagccngatttngcgcacatttgcaa

SEQ ID NO: 65572 - DNA, 582 bp, Heterodera glycines
atgctcggaagaaacgggcaattgtcacaatttggcagcaaagatttggaccgtttggtgaaagaagtgattgagccaatggcatccgacggcctaagaacgatttgtttggcctacaaagactatatagcggacggatcagcacaagtggaggagaatcagctggcatttggaggcgaaatcgattgggacgacgaaagtgcggtcattagtgacttaacagtcgtcgcaattgtgggcattcaggacccggtcagatcaggtctgcctctgtctgtccatttagcttctttaattaccatcgtccatttcagaggtgcctgaggcaattgcgaaatgtaagcattcatttgaaacattgaaagcactgtttaaggcaaatctgatgtaccattttttttgttgcttaggtcaacggtctgggattgttgtccgaatggtcaccggcgacaacataaacacggcccggtcgatcgcgacttcttgtggcattttgaaacctggagaggatttcttagcgcttgaggggaaggaattcaacgaccggatccgggacgaggacggcgaagtctgccaggagaa

SEQ ID NO: 65573 - DNA, 591 bp, Heterodera glycines
atgaaatttggtgggtggatagatgacgcccagattctattgtgagatgatgaccatttttgcctgaggaccatgattgacgtgatatgacgtgtgaatattcttggctgaaccaaataataagataaacaattgcaattatgcatatttgcaaatgtatttcatgattgtttagacttataaaaaattatggcgtactgaactttaatatcttattattattcctattaaagatcgtactatttacaacatgatcataccgagcaggtgaaattagaacaacaagctagctttgatgacatatgtgacagagatgtgtcgatggagcataagaaattctctgccgcattgatcacgtgattcaccgagatattgctgatcagtaatcagattctacaaaatacccgacgatttgatcaattttttgatgaaatttttggcagtaaaaaaataagatagtgaagaaatgtccaataattgcgatgaattggaacaattaaaattgggatccacctcaaagaaaatttatgaattgaaaaaagattttggattgaccaaaaacaccacctcttatgtggaaaacgcaaaata

SEQ ID NO: 65574 - DNA, 763 bp, Heterodera glycines
gtatgagaatgaccagggctgttacaacgatgagttcaacccgttcgccaacgtgtcgcagaattacgtggaaaagcgcgagaaacaattggaccaaacgcgacagaaaccgcggctgaccctccgccagcaacagatcaaaaaagacaacgaaatgtgggagaacaaccgactggccagatcaggtgaaggggggggggggtgattagagttgactgactaacaattagcatgatagttaagtaggattcgaaaaacatggaaattcacatataccgcacattcagccatttttgttaaatgggcatccggcggtgcccgctaacaggccgttatttcgctaaaattaataaatttatcttctttttttttttgaaatgttttttgttgataattcattaaaaattctgaaaatttttccccggcggcgcctatcggcaccgccggcccccaaaaacctatttttacttaaaaaaattagccaaaaatatcaagcaatgcattcatccatcattcattccaaagcttttgagaacaccaactcgggtcataaaaaattatgcatttagttttagcaattttcattcatttgcacttctgtttgtttgttcaggcgtggtcactttctccgaggaactcggcgacttcttcgacaacgaaactgacgagaacagagtgtctctgctcgtccacaacataatcccaccctttttggacggccgaattgcgtacacgtgccaaactcagcctgtcattccggtca

SEQ ID NO: 65575 - DNA, 616 bp, Heterodera glycines
atggtccaattgcacatttttacaaagaaaaaataataatgcgtgaaataattgtgcaatttggaaattctcttgataaataactgaaaaataattttttcattacgaacttaacagatgattgaaatggaattgaaaggataaaaaatgaaatgaccaatttgctatctaatcagcgattctctccccctgatttgtgaataaaatttgggtacaaatttttgggcgctagggatttcagccactagagcatttaaaaggagcagctaaaacatttaaaatcagccccgataaaacacttagaaccagatagaattacaatgtttaccaaatctttaggaaatgcatcaacttttcaatattattatataccatttcttttcaataatcgtttttttccaaggttgcaatttacttttgattaatttgttatgcttaattaaacattaaattctttaaaatcatttttttagaagagaatgattggccaaccgagctggatttgcgctactccaaaaaaggagagcgacggattccataccccggcgatcaagggaaaaattttttcaaacagcatgggaatttaaaaataacaatttgaaaatgcttcattaaa

SEQ ID NO: 65576 - DNA, 475 bp, Heterodera glycines
atgcgaataatgcgaaaggcgaaatgcgaaaagcgaaacctaggcacatccctggtacatatgtgggtggctggacatttcgacaatgaccgtttcgccaatttaaatataataaaatgaatataaaaaataataaattaattaaaaaaatatattgatgaaatttaaagagaaaaatttaattaggtagttatattttttaaatttaatgaatgcattatctatcgcctattatgtatgattattaatagtgaagaaagaagacaaaatgagacggacctataaccagtttttaggcgtttttgagggtgctaataacggatcttaactcgggtttgcccaattccgaactccggacccgaattcgaacaaaaaaaattgagtttttttaatcaagaatagttttttcagggtaaaagcttctaattcattatcaactatttaggtgtaaaacaatgtttcaatttttaattaa

SEQ ID NO: 65577 - DNA, 610 bp, Heterodera glycines
aagtttgaacatcgccgggaacgtgctcagtttggctccgattgagggcggcagcggagaatacgtggccatttgggtttgtgtgccgtgtccaattggacgagtgccctcacttggccatacgctttgtttctttcagaacaccgctgacaaagagccgaccaaaaaagggacacggcaggacattgaatttgtgctttcggtaagggcgtcgaatgatcagcgaaaagtgatcggaaaacaacaaaaagtgatcgatcacttatggaacattcattcccatttccaggccaaggacaaaacattgagcaaaaatttgcaagtcaaattttacccccacaacgacacacacgcgggatggggacagaagttggaccaaatcacttggcactgctccaccaacgacattggccatgtgtttgtgttggaagagcaaactctttaaagcgaaagacgacaattgcattttaaaaagcgatgggcggagatcaaacggagacggccaaaattaattttcaattcccatttcaatgcattcattcatttctattttctttaatattttgcaacaaaagttcaaattagcaaaattgtttgcccattccttttt

SEQ ID NO: 65578 - DNA, 815 bp, Heterodera glycines
atgggctcttttctgtaccagatgaaatcgttttaccaaatggccaatgaaattcagaaagattttgtgagtttttttcgaatgattttaaattgcttttccccctttagagtctgatctacaacgacgtgtgctacagagtggagaaggcgaagaaggaccagacggaactgcgtgcacagattgagggcacaaagcgcaatgttttggagaaattcttaaaacattcggtgggcgttagccgaacaattcaaattaatcgctaattatggctctgaaaaatgccacaagttttatgccacctttcaccccattttgtctaggtgtttgtgctcaattcgtcgtcgtccaactgtggcgagttgtcgtccgatttgtccacagccgcggtcgccgccgcttcggctgccgttgggggcggtgccgaagggtccgcgcacattcgccaaggctatctgttcgtgctggagatgcgcagtctgttatccaaggcggtccagtccaggggcactccgaccagaaattactgcgtctactccaaggagtccaggtgggcaacttgccattgggccgggtaatcaaatgcgataggcatgagaaatctttagatttgggagattgatttttaacatgttcgatttccaggattttgacgcttatcccggtgaacagtttgaccgtcaagacggtatgtccttattgttttgtaatgtgattctctcccatttactatttaaggatatgaagggctgtttggaccagaccatttcgtacaaattgaaaaattgcgcccgaaggccgtccgattcgattga

SEQ ID NO: 65579 - DNA, 183 bp, Heterodera glycines
cctttctctccaacatcccagcggcaaaagttgtgcatccgttcgcttcccaagacacgtgttccaaggagggctgttgcaagtgcacaggcgaaagtcgaagcggcgaagccaatgcccgcggcaaagccatcgacgcgaacaaattgcacgacgagcggaaggaaaagagcaatttcgaag

SEQ ID NO: 65580 - DNA, 401 bp, Heterodera glycines
atgtactaccaggcctggatggaagagcaggcacagaaattgatcgatgccaccactcgcggtatacaaatagaaaaattggctaattaatagagcctggacgggaccggggcctgccgggatttttgccgagactccctctgtcccggttttttggacggtcggaaaaacgggagtcccgggattccgtcccggtcgattttctaagtcccgaacatttcaaaatccgggctctcctaattaaaatggatacggtcatcaaatacacactccattttatgggtttagttttaaaactgaatttgctttcagcttttacatcgcagcggatgttggcaccaggagctccaggatttgtgccgcccccgactggcgttcccgtcatgattgtaatgttttga

SEQ ID NO: 65581 - DNA, 489 bp, Heterodera glycines
ctcatcatcatcttcatcattcttgcggttgctgtttgattgaggttcgaagcgcagccgacgaagccaatgcgccgttggcattcaccgcaatgccggacgattgtgccgcggcaacagcggccattgctgcggcggtgactgccggcgtcggaatggcactcaaagcggcggcagtcattgacggcattccctgcggcaacaccggcggtgtgaagaagccggccgccgaagggatcaccggcggacgcacaatcgacatcggattaacatacggagcacgcggtggcttaacagaggaggtgtaaatcaagcacatgggattagttttaaaggccattggcaaactgtacaaaatacaaacctacaataggatttttttaattttaaaaaattgaagtctagataggctgccccccccccgtatcgtttcccaattttttaaaataatttatcaaacttgaaaatttagatatttttggtaataaa

SEQ ID NO: 65582 - DNA, 896 bp, Heterodera glycines
atgcgccgatgtgccttctcccacccaaagccgcgcttccgccgacggcacttacggccatccgtcaacgctgcgccaattgccgccggcaccgcccacacaaatgcggcgcaagtcgcttctgaaatgctcgctggcaccgccaagtacttccgtgccgcctgctgccgtcgctgcgcccccgaaacagtcgcagtcgccgcgcatgcgacgctttgcggaacgactggcagtcattcaaatttcgctggacccgcccagtccgcccgaatttgcgctgcaatcgccgcccgacgaaccgccgccgtctttccatcccttttggctgtctccggcctacgaaagtcacttccggcccattgaagattcgctgttgcttcaggtggtaatgatgccgtcatttgactttggaaaggcgcgtttgccgccccacaggtgccaaaagtgaacgattgcgaagatgcccccgacccttttcgccaatgttcgccgccgccccgtcgctgctcattcgcgtcaacgctcagcgaatcgtcgtccatctccctcaacacttcctaccaatcgcttctcttttcgccttccggcattgatcagacgccacacctcgcccagcgatgtccgtacggacactcgcggcgacggtcgaggtaattaaacggagggaagaccctaattgagccaatttaaacggctgatcgataattaattcggggtccggacaatctgtcagtgataatccctcagtggtcaatccgtcagtgaaggacaatccgtcagtaatggacaatccgtcagtggacaatccgtcactgtataatccgtcagtggacaattcatcagcaaatttttcttgaataatgatcaaaatcttgcgaaaatgattgataaattta

SEQ ID NO: 65583 - DNA, 319 bp, Heterodera glycines
gcggcttttctttgccagacgctttgtatcagttgacatacattgaatattttgaaaatggcaccgaattaggcaaatggcgaacaaaaatggtcatcgaattcaacctgtacaattattggataaaaaaattggttgatgaacaacatgaagaaattgaaagaattcaaagtaatttcaattattatacagtttgacatggcggcctttaaaaaatttttgaattcaccagggattttatgtgaatattttttcgggaattttcaccccgatccgagacttttatatcctcgaataacggtgatgaaacaagattaaa

SEQ ID NO: 65584 - DNA, 75 bp, Heterodera glycines
tccaagtggggaattgaactcaggcgaaaaattatgaaaggtagaaagtttaaccactacaccacatgtgcatgt

SEQ ID NO: 65585 - DNA, 805 bp, Heterodera glycines
atgacaacacccaatttgccttacggtgcaagagaggggagcggccagttcagtacgggcaccaatttcagtcccccaccaccgccgtatgacgccggcgccagtagtccatttgaacaaccacaccaacagcatcagtcaccatcgccctacggaatgatgtacagcggtggcaatgtgccgtcgccaccaccgccgtcctctccttaccaccaataccaacagcaggcgccgccgcaaatgtccccgccgttccaaccaccaattggggacccacaacagcaggttgggggcatgccaagccaagccaaccaagagaaaatcgatgcaaatgatgggattgggttgggatggcatggaaatggacatatggaggaatttcggattttttaaatgttttgggttccattagggttgtactaatggaattgcacacaggtacagatagatgatcatttaaactgaaagtttcggtaacaaatgccaaaagtttgccctccaccaaattttagaaaaaaaattgtcaaaaaatggatgagggcgacaaaattacaaatatcaaattgtgaatccttggttttctcaattcgatactcgaccaaaaaagttgaaaaaattttcaaatccaaaaaattttctacggaattttttaaaataatttcttacagttcatgtacgacccgttgttgaacactgcgcgtcatttgggtggtcaatttgcggagcaacaaaagcaaaaggttcattcattcatcacacattctacaaaatgaaagagcattcattttaaatgggctcaattaaa

SEQ ID NO: 65586 - DNA, 102 bp, Heterodera glycines
gtcagtttgtaatgcgaccaatgagtgacactgtcggttccctctctgaagcattgcaaaacgaagacccggggattgagctcgtgacattctacaattcag

SEQ ID NO: 65587 - DNA, 723 bp, Heterodera glycines
atggcaattttatcatcaacaactacaccaagcctttgcattggattcgaccaatcaacaacaacaacaacaacaacagcagccgcaacaaatacaaccgggaacagtgcaacaccatcctacgcagcagcagcaacaagaagtagctgtgcaacaccaacaacaacaacaacaacaaatcactgcttggcttcaaagtcaacaacaacaacaacagcccgtttaccatcagctgcaaaacgcacaaaattatcaactcaacccccagccaatggcagacgaaatttttatttatgaggatattgtaaattcaattatataataataataataataataataataatttccaaaaaaaggatgcgcaccccgctacgagtgcggccagtggtggtgatggtgcaccaggtcccagcagtgcctcagcaagtgccacgcggcgaacaacacaagtgtgtgaaactttgcatttcactgaaaaaaaatgtttttcgatatttttaagcgcaacactacgcgccgtggggggagaggacaaagtcgaggacgaacgacaacagggggagatgagccggttgtaaataattaaaaaaattttaatatttataatggatggtttcaaattttttaaaaatgttatattttaaaaatattaatggaattttttgaataatttttttaaatggaaaaaaatttaggatttgtttaaaaaactgaaataaa

SEQ ID NO: 65588 - DNA, 280 bp, Heterodera glycines
aaaatataatggaaaaattttttaaaaaattttttctccatcttcctttttgatactaaagcatcagagtgctaaacttaagttgtaaataaaatttggtgcgctttagagcactttctgaaaaaaatatttatgaaacaaaaaaatcgattttttcaagtgtccgtttggggtactcaaacatttatggggagcaaaaatccaacgcagaattaaagtacaggctatagggaagctactcccgaaggattcggtctccccataaatctgggcgcatcgg

SEQ ID NO: 65589 - DNA, 396 bp, Heterodera glycines
atggcccaaattcagcatgttgttgatgttgtggttgttgctgctcatagtagttgtgatcatgcagatgaactaactgacttgctgcaacaggcaaaggatggggcaacggtacaggcaaagtatggggcggcggtacaggcaaaggatggggcagcggtacaggcaaaggatggcgcggtggtacaggcaaaggataaggcggcggttctgccagatactgagaagggtattgaggccattgcatcagcattggccgggttggcaaagggattgggggacgccaagacggcctttggtgccgcgaaaaacggctctgagggtaatagggacgaaattttgggcgatccgaccaataccaaggcatttggccgaatttacccaaaagaaaaataa

SEQ ID NO: 65590 - DNA, 582 bp, Heterodera glycines
cagaattaaagtacaggctatagggaagctactcccgaaggattcggtctccccataaatctgggcgcatcggttcggggggtctgccccgaaaacaaaaaaatcgattttttcaagtgtccgtttggggtactcaaacaattatggggagcaaaaatccaacgcagaattaaagtacaggctatagggaagctattcccgaaggattcggtctccccataaatctgggcgcatcggttcagggggactgccccgaaaacccaaaaaaaaattttttggataaaaattatttaaatgaactgactagataatatttaaaataggttatttctcttcctttcagtatccctgcaaagtttggtgcgcttctgatcagtttctgaaaaaaaagttaagcctaaactttttggcctgtttaaaaaggaattaaaaatttttaaaaattttattcatctccctttttgatagaaaaagcatcagagtgcctaaactaacatgtaaataaaagtgggtgcgtttcagaaccctttctgaaaaaatactctagaaggaattttgcaaaaaataaataaaaacgaaagc

SEQ ID NO: 65591 - DNA, 309 bp, Heterodera glycines
  unsure (1)..(309): unsure at all n locations
atgaatcctgatcttgaaatcgctcaaaaatttttcttgtgtaaagaaaacaaaaaagatgtcgcaacaatttttctcgaattgcttaaggttggtatttgaattgtgctttattataacagcaaatggataattttcataatttgctttttaaagagtcaaaatttgagtccgaatctcgtcttctatcaaaaaagactgaaatcccttgcattcagagcattactgacaacgaaatggcgcccttttacgaaatacgccgccctcaactncgcgtgcccattgacaaggctaaactgcnaacactga

SEQ ID NO: 65592 - DNA, 224 bp, Heterodera glycines
atgaccacaagcagcacttcttctgaaaagggtgattatgaatttcattggaagaacccaagggagattaaacagaagtaaaatatatatatatttttaattttagaaaatataaaaacatttttagatgggagtcattcgcaaaatttgggcaatctcaagctcaagcaactcaagtcactgaaatcacagggaaaaacttcgataaatggtgcacaaattaa

SEQ ID NO: 65593 - DNA, 847 bp, Heterodera glycines
  unsure (1)..(847): unsure at all n locations
tatttaaatcaattctttcgggggaccgtgccgggtggcgcggggtaaagcagtgctggttcgtttcatcacggaaccgaaccttttggctagtcagcaatcgttgcttaactgccagatcggacgggtgcgcatgattccnctgttccaagcaccccaccaaaagcaaaacgatataaccaaaatataaggaaaaattttttaaaacattttttctccatcttcctttttgatactaaagcatcagagtgctaaaattaagttgtaaataaaatttggtgcgctttagagcactttctgaaaaaaatatttatgaaacaaaaaaatcgattttttcaagtgtccgtttggggtactcaaacaattatggggagcaaaaatccaacgcagaattaaagtacaggctatagggaagctattcccgaaggattcggtctccccataaatctgggcgcatcggttcggggggactgccccgaaaacaaaaaaatcgattttttcaagtgtccgtttggggtactcaaacaattatggggagcaaaaatccaacgcagaattaaagtacaggctatagggaagctattccggaaggattcggtctccccataaatctgggcgcatcggttcggggggactgccccgaaaacaaaaaaatcgattttttcaagtgtccgtttggggtactcaaacaattatggggagcaaaaatccaacgcagaattaaagtacaggctatagggaagctattcccgaaggattcggtctccccataaatctgggcgcatcggttcggggggactgccccaaagacaaaaaaatcgattttttcaagtgtccgtttggggta

SEQ ID NO: 65594 - DNA, 236 bp, Heterodera glycines
atgagcagtgaattccattctatgaacagaggcacaatttgcaaagatgaaaagccaacggaagccgagcggaagagaagagaaaatgagggagaagaagaggaagagaaggagaagggcacgaggacggccaagaagaagaagccgtacaaggagctgaccctggaggaaaaggtggagctgattcgacttgcggaacgctgctcaaacctcagccaggcgagcatcgcggaacg

SEQ ID NO: 65595 - DNA, 954 bp, Heterodera glycines
gtgctttgcgttggttggttggcgtgggtgactgtggtggttgggccgtttttgcgatattatggctggaaaaaagatgcgatttcgctatggggagcgcggccgtctgggttcaagtgcttgcttgcgcttgtgctcggcattgaacggtgatggctgctgctggggtgccacctttgtcgtggcctcagtttctccagcgattggcagctgtcgaaatgaataaacatgcagctcgtctgtgtgttaaagaaatttggcgagttaattgacttgtgtaaatgtggcctaaggcacaaatgctgtggggaactcagcactggggatgctgaacctaaagttggtggtggtgttggtatacgagtgagtggcgtattgccatggttgacaagccctatgagttcgtggatcggaactccttgcctggggaccagtgtgcttgcattcgaaaaaacacgagacataagcgcccgaaggcctttggcctgaggaagtgtcctaaccgggaaatccggagtgctcgtgtgagtgcctgtgcactgccctcggagctgtgtccagcggcgagatggttcttcccaagtccgggaagctcggatgcctggccagcgctgtgtcattaccacttgctcggtctccttcgctgcccatgcgcacgcttgcgctgaacggagttgtttctgctgaaactatccgtctttacaagacggctgtaatagcggcgcttggcaacgctcgctagcagctatctggttgatcctgcctgaactgatgtgttcatttcaaagattaagccatgcatgtgtaagtttaacctgccagacagggaaactgcgtacggctcattacaccagctataatttacttgaccttgacttcttacttggataactgtggtaattctagagctaatacatgcaccaaagctccaatctccccagagcggagcgcatt

SEQ ID NO: 65596 - DNA, 809 bp, Heterodera glycines
atggccgctttgaaccccttgctagctaggaatgtgccggcgaagaatggtgatccggcattcttcgagatttgccagcaaatctgggcaattctcggccaattcttgggtaagtttgtcttatttggtatggggaaggcgggagatggggggaatgaaaacggcaaaatgcaaaaataaatgcttgtaaggatggtaaagggaaaaatgagaaagaaaaattgcgagatgactatcagtggatcagtttaatggccgagaaatccattaggggaggggcataaatgtgtgcaaattatgtgatttatttaaaatgattgaaaatgattttaaatatatatatttatttgaaagaaagttatgaaattataattacatttaattgatatttaattaaatttgtccttgaattgtccttaaatgctaacttaaaaaaaaggaaaaactttgggatataatgtgaggttactgtaggttatattaccgatccggctttaaggggaattgaatccagtgactttcggctatttgaccaggccggaggaactcgcaacggcatgggcaacagtatgccggcgcaagttggcctgcatccgctgcaccattcgttgccaatgaagcgcctcgtgtcgtctttggcgcacgagggcctgcacatcctagaattccaacagggaaggcagtggccgagggctggcaccagcacgaagcacgatcatgggccattttttcgtgccaaatgtgccgaatttgatgagatttccggtggactgatccagccggaaatgcaagagtttgacccattgtga

SEQ ID NO: 65597 - DNA, 924 bp, Heterodera glycines
atgtgctccaagtgcttcaaagacatgatcaagcggaaacaggaaacgggcaacaccgcgccttcgacgacagctgcggctaccaccgcagcgaataaaacgacggaaacaatgccggtcgatgcggtcgtcgccgcattggcggcgagcggtggcggaacgactgagcagcagcggagcacgtcctcaccaggtttaagcgaaacataactgaaaatagtcctttgagctggtgcaatttctatacgagagaaagaggaggtcgaaattataaaaatcaatcaaattgaacgggaaattgaaaattgcttacaatagctatagcaaaaagaagaaagttgaagagagcgaaaaaataataataattatttaaaccgatagttttctgattgttacttttcttacagttaaaataatcgtcaattatttgaattttaacgtgccatacaaaatatgttttcagaaaatgcaatcacgggattgtctgcttcgtctggcaccactgcctccacttctcatccgggaatgctttcctgctcagccgccacaacaacaacggacgcaactaacaacacccatgcggcgccaagtcctgcgccgggacaacagcaggaagatacccagcagaagaagaagccaaaccgatgcggggtgtgcagcaaacgggtgggacttaccggtgagcgaaggggaagggttgggcgaaggagggaagaatgggtgggggatggaaatccaataggaggtacacaaacctaaggtggtaccaaagactaaagcctgtgatttttaggtttcgaatgtcgctgcgggggtctcttttgtggggagcatcgttacgattctgcgcacaattgcactttcgactacaaaacggccggacgcgaagaactgcgtgccaaacatcctcaggtgtgactaaaa

SEQ ID NO: 65598 - DNA, 165 bp, Heterodera glycines
atggacatcgatgaattgaaaaaaatggtttattttccaccaaaatgtttatttatttgttattttattattttcagagtcctgagcagcaaaacaaggtttaatatttttacagagagactgttattcaatttacttagatttttggacctaatgttgaataaa

SEQ ID NO: 65599 - DNA, 1089 bp, Heterodera glycines
atgggttaccctcgccaggaagtcgttcgtgcgctgcaagccgcgttcttcgacgccgaccgtgccgtggagtatttgtgcaatggcatccctgagggactttctctacaagagtcaaattgtgagttagagtagttcagcagtattattccccgttttctttaattttagctgatgctgacaatgatgcggtcaatgaagaaggggaacttatggaatcattggagaacccgcaaggactctcttttttggctcaatcgccgcagttccaacagctccgagacatcgtaaggggatgaggatttattttatggattcaattttgattttcttttcaggtacgtactgatccatcgatgctgccgcaaatcatccaacaaattgccgccgccaatccgcagttgatggaggcaatcagaaacaaccaaggcgcgtttttgcaaatgctcaacgagggacaaccattgggcggtgggaccgacgctggagccggtggagaagcggcggccggcgttcagcaggaagcggcgcaaagaagggtcagcattccagtgaatgcccaggacagattggcaatcacccgggtttgtcagcgaatgcaacaaaataaataaataaaaattcccattggctttttcagctcgtttcaatgggatttccggaagcgttggtggttgaaggtggttttgtccgttattttttgttttatttacaactttcttttttagcttatttcgcctgcgacaaaaacgaggtgtcgcttcaattaaaactattaatttttgtaaattaaaatgcttttttaaggatttggctgtcaattacatcttggcgaggatggatgagtctcagaatgaacgggcgggtgccgggcagcagggcggacaataaatagggtaacggaggtgcagtaatgatcgcaaattcctcatatcgtttccctaaattatgatcattttttgctcctaaagtgcatgttctgttctattctcgccctttggctgttcgttgtgttttattatgaccatattaaattgtttgcggactgaaatgaccacatttacatgaaatggctcaaagatattcaga

SEQ ID NO: 65600 - DNA, 1690 bp, Heterodera glycines
atgacaaaaaaagggggacgagaagaaaagggagacggcgggacagtggcagggaaagaggacaccggcacagtttctgttgcggacgaagccgacggagggacaacgaccaccgccgctggcgcaaacgatggcagaacaaccgcaaccatcgaggacaacaatgccaatgcgaccactgtcgacaacaatagcagcgaaactgttgccgaaaacaatggaggcagcgccgctagcgttaccaataacagtggcagcacaatcgcaaccgtcaccaccgaccacagtggcagcacggccggcaccgataacagtggcagcaacgcgaccacctgcgaacaaagcactgcgacgccagtgcagcaacagcgcacgtatgactcgaacaactcgcttagaccggtgttcatccagggctacgacttccaagtgtccaaggtgtggtgattgatgtgtctgctctttgtttgtttccattgttttgttttgtcccctcccattaggcgcagtattgggtgttccagaaggtggctgacagtcagaacaaaagcgtggacgaaattgagttggcgtgtgaagcgattgtgccttcgcgagtgatcggacgaatcatcggaaaggggggacacaacgttggtgcattcatttgggggatcagtttttggtttcattattcagcttttaggtcaagaagcttcaacagagcagcggggcccgtatcaaagtgaaaactaacaattttgttttgttttaaaaatgtttgaaaggtgccggacgacatcagaggcaacaccaagagcagtggcgactgggctaccgttagcatctatgggaatttctacgcggtgcaggcggtccagcagcactttggcgcgcttatcagcgaagtggaatggcgtgacagtcgcgagtgagtgcattgaacccttttaactccgcttttgtctggcactcaattgtctgtgttttcagacaggacgagagacgctcgcgtcattggaacggcggaaacagtcgctgatgagccgaaaaacaatttgtgtcaggaaattaaatatgtaacgatttgtgtggagaataactttgcggattgtttgtttgtttttatggccgtcagattaacaattgattatgtttattattcattgtctgttgtgcattttcgggtaatccttcgggattggtgtcccgacggaaaagagataaaattttcttcaaattttttctagggaaaaaaaaactctgatcacgaatccgagaacgcacgttctgaatggtgtagattcgtagagttttagaatgagttatcaaatgtatggaaaactttgttttcactgcggcttttggctcctgacagggagggaggatttataaaacggtcgaatcctgacaaatttaatatcattgtcctaaacatgcggatgaaatcgattcaatgcagtttgagagatcttcgaaccggtttaggattctaaaatgggtaatccttcggaattggtgtcccgacgggaaaaagagagaagaaatttcctttacacggctagtcaattttgggctccaagtacaaataagtttattatttatttagtaatcagaacgccaaaactttgcaaaactttaaattttcttgggattttcccttgtaaaaatggaagagccgatctcgagttaaaaacttaagtttcacaaa

SEQ ID NO: 65601 - DNA, 348 bp, Heterodera glycines
ctaacttgtcatattgtacttttgaccgtaactgagcttctttaatgaccgccgcagcggattcccaagcttttctaagagacttaactaatttctgcttgacattgtcaacttcactggtgttttcgggttcggtgttgggattcagaatttgctcaatgcaaaatatcgggtctcgcccaaagaccaaaaagaagggggtctcctttgtggaagagtgaattgatgtgttatagcagaaattggcacattcaagaaattcatcaaaatctggttcttcacttgaaatatatttcgcaagtatattgaaaggtcctaaaagatcgctcaactactgcattgccttgg

SEQ ID NO: 65602 - DNA, 773 bp, Heterodera glycines
ccaaggcaatgcagtagttgagcgatcttttaggacctttcaatatacttgcgaaatatatttcaagtgaagaaccagattttgatgaatttcttgaatgtgccaatttctgctataacacatcaattcactcttccacaaaggagacccccttctttttggtctttgggcgagacccgatattttgcattgagcaaattctgaatcccaacaccgaacccgaaaacaccagtgaagttgacaatgtcaagcagaaattagttaagtctcttagaaaagcttgggaatccgctgcggcggtcattaaagaagctcagttacggtcaaaagtacaatatgacaagttagtacgaaatcaaaccgttcaaataggagatagggtcctattacgcaattacgcaggtaaagtcaaaacatccaagaaatttcaattaccctggaagggactttatcttgtcattgagattaatggtgtccttatcacaatcgtcagctgcacatctcctcaaacaaacccaagaattgtacacattaatcaaattaaaaagtattttgagtactcaggacccccttgcaccacgaaaaatcttcaaaaagatgaagaacaagcactaaaggaattagaatcaagagaacagaccaatgtacctggctattctcatgattcctatcaaaatatctctgataacacagtattaatagaaaacgcacctgcactcacccctaatccctcaccctcttcacagtccaataatcaggtaaaagaaaaagaa

SEQ ID NO: 65603 - DNA, 1048 bp, Heterodera glycines
atgtcatacgctgcggcgttcgttaattttgatctgggagatatgaagaagatttcgctaactgatggccattgcctaatggcatttcaaggatcgaacgatccatttagtaacttcttcttttcgccgttcgtttatgagggggaaagatactcctgtgtggagcaggcgtttgtcatgaagaaagttcgcacattcgaactccatggcgtggcggcggagttaatgcgatttatccacaaggacgacccaacaccaaactccccgcggtggccagacggtcacccgcgtgaattaaaatggttcggacgcgaagccgaagagagagccactcccgccacaaaaagaaaatggtcggaaaacacacaaagaagtttcatcgccttccttgtggagcagaagtttcgccaaaatcggcacttggcagctcttttgctggcaacaaacgacatgtggattgcggaagcgtgtaaagatcgaaagtgggccgttggatactacaaagacgacccattcctgtgcaactacacaccagaaaatggcgcatttgggcgaaattggatgggcaatatcctcatgagcttgaggatgcgaatgctaaatgagcaacaaagtgttgctggtccttctaggcaaattggtaaatgggaggactcaatagcttataattaagaaaactctgaggagttaatataattttgaaactttggtctttatcttatctcttgtcacagaaccaccgtctgctcctgtctatctcatagcacaagagcttgccaatggactgataggagctaaaattgattttgacaacagctttccgcactttgttctgctcccaaatcgtttattgtcaagtggtcttggtctgggtgacttctttactcctggtaaattggaagccgacaacagatttaccatcctggcttcaaacgtcacggagatgacaaaggagaggaaactttggattaatccaaattcctcaattttggcggtccaagcgaccgtaattgacatcaaaagtaaatatctaagtctaagattctga

SEQ ID NO: 65604 - DNA, 452 bp, Heterodera glycines
atgacctttgttgggcaagacgctgatcccgaagtagtcatcacatattttggaatgacctcggtgggtgtaaagcgttcattgatttcgacaattgtgccaatctcagtgatttgttcagattgccacatttctatggtaaaatatatataaattttcagaatcttagacttagatatttacttttgatgtcaattacggtcgcttggaccgccaaaattgaggaatttggattaatccaaagtttcctctcctttgtcatctccgtgacgtttgaagccaggatggtaaatctgttgtcggcttccaatttaccaggagtaaagaagtcacccagaccaagaccacttgacaataaacgatttgggagcagaacaaagtgcggaaagctgttgtcaaaatcaattttagctcctatcagtccattggcaagctcttgtgctatgagatag

SEQ ID NO: 65605 - DNA, 575 bp, Heterodera glycines
atgaatgattgcctttgcgccaagtgggggcggggggtaaatggccaataacaaggacattaattatgcttttatttgctatgctttgatattaaaaataaataccaatgctttgcggggaagtgaaaaaaaggaaataactgcaaaaatatgtaattaattagtgatggtaaaaaaaataataacaacacaaaatgcaaattaaagtgagtgtttacagcggcggcagagattatttgggccgagcgacccaattagggccaagggactgagggcggcggagagattggcgaagccaaaaacggcgaaaacgccttggacttctccaatttaattaaaaatgatatttgcacatttgttctctttttttccggccacaaatcccccgcttcattaagcccaacccccaaaatcccaaaaaatcaaattttaaccaccgccctcagccggaaaaagttggacagaatcggccaagacaaaagaaaggtcaggtgatcggtcggcggtcggtccctttgcttttcccttccgccgctgcgccgtttttttcattcatttcgcagcctatcgaaaga

SEQ ID NO: 65606 - DNA, 514 bp, Heterodera glycines
atggacgaagggacaaaaagggaaaggacgaagacgacgaacggagtcagtgcggaagagatcaaagcacagcccctgggcacaaaactcaaagccggacggaagggaagagacacagctgaaatgcttctcctgaaaaagacggcactaattggattcagacggagttggacattaatggaagactaatattgcttattgcttttggcaattttgccagcagaccaatgtttccgactcttctgactgtctaatgatgcttttacagtaatagccaaataatattaattctctttctcaatgaaaggcttttcctttggcactgttggaataattaacaatttcccaatttaatccaattttcccatttccgttatttcagaatattaccgttctttcttctgctttcaaatgacctcttccgaagaaaaggagaaaaatgaagcaatgaatggacgaaaaacagcgaactttgaaaaagcagcaactcattagaactaatgacaaaaataaa

SEQ ID NO: 65607 - DNA, 670 bp, Heterodera glycines
atgctgatcaaaaaaggtagcaacaccaagttgatcagatcactccttcatggtgatctgatcagcccattttggctgggaacgaggggtaaatttcaaaaaaaatttctagggggttgggaaaatttttctggaaattttgagtaggcccattttatagagcacaaaattctctacaatattcaaaaaaccgcatgtctctatgacttataccggctgaggtatgggcacttcaattttgacgtagtgtaaaatgcactattttcttaagaaatacagtactttttataggcaccgaaataaaagtcgacgtatctcagcgggcctaaatcgtagacccactattccaaaggcaattcggtagcaaattttgtgctctataaaatgggcctactcaaattttccagaaaaattttcccaaccccctagaaattttttttgaaatttacccctcgttcccagccaaaatgggctgatcagatcaccatgaaggagtgatctgatcaacttggtgttgctaccttttttgatcagcatccaaagttatgcttacctgaatttttttagatttttttaatgctgatccagagaagcaatattttaaaaatgaaatgggacaacacttttgaccacctatattttgatcaaattgtgaacatggtaaaataaa

SEQ ID NO: 65608 - DNA, 66 bp, Heterodera glycines
cataaacatttatttgatttattttaccatgttcacaatttgatcaaaatataggtggtcaaaagt

SEQ ID NO: 65609 - DNA, 1037 bp, Heterodera glycines
tttttggccgtcctgtcaaattattaatttcaatctttttctctttatgagttcacccgacttcttaacagtcagttgcaaacttcttatctgccgaactccacgaagaaggttgaactgcaccaggaactgcttgttttgctatggaaatgttgtgagtactaccaggtcctttttacagtggctacaattttcactattttatcggattgttacagaaattcctttattatgtgctgaaaagcagcgatgtgcttgaacttctcgtcccaattttgttccatctcaatgattcgaggacggacccaagtcgggttttattttattcttctaagtacccttttaattgaatttttgttcttaagctcggattggtttgattcatatgggcgttttcctaattcttcttttgagtggtgaaagaaatttcggtgtccgattgaataaggcaagtcaaaattcgactgataaaacacgattgaaattatattaattactccatttttagcctttcacttcccgaggacttattgacgtgccaatttttaccggatctcatgccgatttgctgataattgttattttttaatcatgtttttatttattcaaaaatgttttaggttttccacaaattaatcactagcggaaatcacaaattgcagtcacttttcgattgtcttcttacaattgtcgtgaatggtaaagttttcttttgtttttgcattattttcaattcgttttttcagtttctccttatctcaaatcgctatcgatggttactgctaataaattagtgcatttggttgaagcatttaggtccacccaatttgtcagttgtttttttacattcaaattttcctttagcactccttggttcattttctcaactccaacaaatcaccatttgattttctttttgcttgaattgttcaacaacatcatccaatatcagtttgacggtacttttttctacctttttcaaaatactttttttttacatttaggcaattcaaatttggtatatacaatcattcgaa

SEQ ID NO: 65610 - DNA, 1670 bp, Heterodera glycines
atgagaactttggatgagaaattgaaagagataatgaataatggaattgcatttggtggcaaagtcatgctttggacgggagactttcgtcaaacccttccaattcagaaacatgccacgagagctgagatggtcaatgcaactataaagagaagtgagtattggagattagctaaaagatacagattgacaaagaatatgagagctcttgcaacagagcaagaatttgcgaaagatttgttagagattggaagtggaaaatggaataatgagaatgatgagataattttgccagagatttgtataagcattggtgatttagcagaagagatttttggaaattgtattgtttctgagaattggaatgaaatggccaaaagtgccattttagcaccgaagaatgttgatgttagtgaaataaataatagagttttggaaatgttgcctggagaagaagttgtgtacacgagtatagacttggctcaagacgagaatagacaaagagcagatgaatatttggatgagtatttgaatgctttaaacccttcggggtttccacggcataagttgagacttaagaagaatgctattgttttgttaatgcggaatttgaatatcgaaatgggcctttgtaatggtgcgagaatgaacgttgagcaaatgcaaccgaatttgattgtgtgtaagattttgactggagacaaggcaggtcagactgtgtacattcctcggatcacgctttgctgttctgaagagtacccttttgatttgcatagtcaccaattcccgttggtgttagcttttgcaatgacaattaataaggcccaaggtcaaacccttgagcaagttggaattgatctgaggaaagatgtgtttagccatggacaattgtatgtggctctttcgagagcaagagcttggaataagttgagaattagattagatgatggcaatttagagagaaaggtgaagaatgtcgtgtacagagagttattagataacagtgattagataatgtgttagactagcattggatttagatttagtatagtattagaattgattttgtatagacaaatctgttgttctttgggttgctcaagacagtacgaacacaattcaaagtaagtcattctttttaatttcatactttatcctttctccaaaaataattgttcataacacattcgtactacctagcgggggatgcgccgaaggcgctgaccccgctagttttcttaaaaaattcatctcaaaaatttgtattgattttcttgacaatttaaaacaacttttttggcagtttttagcaactataaattatccctattcatcacttatataaatgagtacagaaatagattttccacgaggaggaacctcaaaagttttacaactcggattgcataataggtaatgaattggatctttcaacaaataattccttaattatgcaattttagaaaaggagcgaagagaatttctccttttagcagcgcaacagctaaggtccgttggcgtcgccattcacaaattttcatagctttagaaaaaaacgaagattgagggagatgacatcgttccttatgctggggtttttcgccaaaaattcacacgtgaaatcctcacacaaaatttgcgtggattggccatcattaaatttgtaacta

SEQ ID NO: 65611 - DNA, 793 bp, Heterodera glycines; identical to SEQ ID NO: 36239

SEQ ID NO: 65612 - DNA, 49 bp, Heterodera glycines
ggaagctattcccgaaggattcgatctccccataaatctgggcgcatcg

SEQ ID NO: 65613 - DNA, 502 bp, Heterodera glycines
ataaaggtcgattggactcataaagtgcattagagccgaaaagccacccccgcacacggggtccgaaggctagctcaaaccaagtggaaaattcgttttttatgcttaatatcggtagggtacgattcggtgccgccgtttcggtgcccgccgtttcggagccgtttcggtgccagggtgggttcactgccaatcaacgattatggctactcaaattctaacaaagcgtggaagaaaaaaattgttacacgatggttttctgtatgtcttcgaaaaattaaacaaacggggtgacgtcaagttttggaaatgtgaatttttcggacccaggacatcaaatgcaaatgtcgtttgcacactgatatgaatgacaatgttttggaggtttaaatatttaattattaatgttagatatgtaaattttaggcaatcggcatgcacacttgtccgtctggagccgaaaatatcaaagttcaaacacttacgacatcgctgaagaaac

SEQ ID NO: 65614 - DNA, 369 bp, Heterodera glycines
atgcctgggaaaccagaattgttgctgttggaagggaggggaccgagcacagtcgtcgttcatccgcgcccatctcccgccacgacgccatttccgaacgacgactttgtcgacaaaagctcatcggcggagcagcgccataaaaatttgcgagttgcccccagcactttcacttgccatccaataaaaacgagattgaagccgtgccgaggcctttcctccccaagtgttttcaaagcaaccgcagcgccttcaccgtcttcacaactcttctgtttccgagtcggccaaccaatgagtgacgagacaattttaaacgcaacggacagcgattggcccttcagcaaaagcgaaactcggaactcaacg

SEQ ID NO: 65615 - DNA, 160 bp, Heterodera glycines
atgctctgttctctacgtggagttttgccaaatttcttcaaaagacatttatctgttgccattcaaaaaaatataccggaggagcatgacgagggttttgtggacgttgcgaatacggagatactgtgcaaatatgttttcatcaattaccagtttggag

SEQ ID NO: 65616 - DNA, 340 bp, Heterodera glycines
  unsure (1)..(340): unsure at all n locations
atggtttgtgccggtattttgggaatcattctttggtttatcaatgatgcagggagggttttgaggttttgtttagcggtacaaattgttaattatgcaatttcgagcaaaatttccatatgaaaaacatatgaatttaatttgttttaattggcaaaatatattttggcttggctttacgatacaaaaaacaaacaaaaaacaattatgttttgtgtcatgaattaattaatttcccattttcagtgcgttcgcgtgcgcaaagtttgaaagagttttatgcggtacgttcataaaattatggcaaatgtttaaaaaaagncaatgaattaaatgtgaa

SEQ ID NO: 65617 - DNA, 247 bp, Heterodera glycines
ggagtcgcttggcatggcttttaaggagttgttcaagcgttggtgtgtcactgagtctgatcgctctgtaaattatcgtcgttttgttgccggttggtcgggcaaaaaatattccgaatgtctcaatgccttaggcaatttgttggccggcggtttggccggaagtgtcacctttttcttcatttacccgttggacttctcgcgcactcggctcgctgttgacatgggcaaaggttgacccccagct

SEQ ID NO: 65618 - DNA, 116 bp, Heterodera glycines
atgactaaggaaaagccaaaggagcagtgggaaaaacaatgggcagacgaacctgagaaaaaagccatgaaagaacttgaaaagaccgacaaacaattcaaggaaaacaatcgaag

SEQ ID NO: 65619 - DNA, 608 bp, Heterodera glycines
gaatggtaaaacaatgggcagagaagaaacggccagcgtaccacggcacaatgcccaaaacaacaataaccgtgtggagccggaggaggaggaggtggacagtttctggtcggtgaaagaggacgaactcgtgtggggccgatgaaccaacagaagcgatatttgagggaagagaagggaatgagcgaagagatgcccgattttgtactcgtcatgtcttttttgttttgtttattcgttttgcctttccaaatgttctgcttttatacaatcgtcgttttttgtcgccatttttggcttttctcagctttttaaagtggccttttcaccttcgattgttttccttgaattgtttgtcggtcttttcaagttctttcatggcttttttctcaggttcgtctgcccattgtttttcccactgctcctttggcttttccttagtcattgctttgttagcggaggatttgtttggactccattccattcattgtacgaatgtcccccccccccccccccaattaaagtgcgttttctttgatactcatcgtcaattcccccttttgagcctctttctctcatttcgttgtcatttgttccttaattagatt

SEQ ID NO: 65620 - DNA, 611 bp, Heterodera glycines
atgaagaaacaaaaccgactgaagaaatgggaaggaattgtcaacaaatttatggaggaaaagggaaaatatttgcgtaaaaaagaacctaaaggcaaaaagaatatccatcatcgagaaattgatgagcaaatcgccgaaacatggggcactaatagcagaacaatttacagatggaaaaaaaattgggacagactcgtgagttttattttattaataattttataaatatggtaactgccaaacttcctattaaatgacagtcaaaaaatgatcattaccgataattagggttacaatttttcagctgaaaattttggactaaatgtgtaagtaaattttctaaaaatggttgttgctaaaaggtcctcattaactcgtaagttttattttatttataaatttataaaaaagccaaaaaatgccaattaaaaacagaataaatttgtgaaggaattaggcattttaaaaaagacatttcgcaaatggaaaaaagaattactgccaaattgctataaaagtaataatttttttttattaatttcaattctatttttaagagaatattaccaatgcggacaaattagaaaaaacacggcaatattttgaaa

SEQ ID NO: 65621 - DNA, 1056 bp, Heterodera glycines
atggataccagattcgtggtaagtgcccccgaaaacgcaaggaacttgtttttatgacaataaaattttcactgacgcattttctactgacgcattttccactgacgcattttccgggcgcccttcacgcaggagagaactgatcaaattggacgacgctttagctgtggatttgtgttttgtcagttaccgcaagttgtaagcgtggcctattcttaatttattactaattggaattcctacggaattggttcatttagcatcattaacaataatatgtatacatttcagcaatgggacattgccgttatcacattttaccgaactgtggttaattgggatggattaatgcttcatctttatgacgttttgaccgcggtaagttttaacaaatttataaaaaccaaattgttttaaattttctcaaaagcgcagattgagcaagggattaaaccaccaaattttccccggcggcgccgtcacaagtgatatgaaaaacaaaacaaaacaaaaaagtcatcacttttcttttttgaaaaatctaaatttttgttttcgtcattggcttagttattttttcatttattgttttttgtatacaaaattcacgttacataaaatgtggagcataaaaaattaaaaagataatgacggcacttttcttaactcattggctgccgccgttccatcgtctatttatctcaattaattttattaaatatttaaattcaattattttttttaaattaaaaatattcaataaaaataattataatcataattcataattcataaaaacttttatcaaatcaaattaacaaaatataatgttttattaaaagcttaaaaattgatggattaatattttgataaaaaaataaaattaattatagaatattttttatttattaaaatagaaatttttcaagaattaatcacttatttaaataccctaatttgctattctcataactattgctgctgctgcttatctgcttggttaatcagcttttcgattaatatttaatctataaatctacaaaattcacaaataaa

SEQ ID NO: 65622 - DNA, 388 bp, Heterodera glycines
  unsure (1)..(388): unsure at all n locations
caaaaagcccagcgaattgncaaattgcgactgacaaacacgcggacgcaaatgcaaatgcatcgcaaaacaccgtagtctacgggccaatgtcagttgggcaaagggatacggtacatcgacctgtctcgagaagaactgttcgcggatcttatgttttcttgtgtttgctgttcagctttcccgccgactattggcaattgcccccagcgcttttagccgcgcggctgaggcgtttcagcaaggcggacattgtgcgaagccttcggcaaaatgcccgacggatgggcgtcgatggaggcaaactgcgtgcggtgatgcgacacatcgaaataatgcgacgggaggaagcgcagctgcgcaatcaccggcactatcagctgcctga

SEQ ID NO: 65623 - DNA, 890 bp, Heterodera glycines; identical to SEQ ID NO: 36254

SEQ ID NO: 65624 - DNA, 691 bp, Heterodera glycines
atgttggacttggaatgctttacatttttgcaccgtgccctcgaatccgaagtcaacccggtcattgtgttcgccaccaaccgaggccggagtaaaataaggtgtgtgcctcgggtggaaatgtcacattacgcgtaccttacatccgtcaaaactaatttgctcttgtgtacaattcatattttatgttaactttttgattttcaagaaattcggatgaaattggcttctacggaatcccaagcgatttgatcgaccgtttgctgatagtgcccacccggccctattccatcgaagaaatgtccttggtttgtttgtttgttcgtggtggatatatatgtagaccggcgggtggtcccactgctgatcgttcagattgtgagaattcgtgccgatgccgaaggcgtactgctcgaccccggggcgttatctcgcctttgtgagctcggtcaaaaaacttcacttcgttacgtaatgcaactgttaacacccgcaaagctactcgcccacattggcgggcgtgagtccgtagaggttagaaggagaaaaactgtatttttagcatagaaatgacatttagattgttgacattgacgagtgcgtgcaattgtttatggacagcaaaacatcaactaatctactcaaaagcaagcagtcagaaggtggagacgacgatgtggagatgagttga

SEQ ID NO: 65625 - DNA, 443 bp, Heterodera glycines
aagtcgactcggctttggctgaacaaattcccgttgttgagaagcccataattaattatcataaaagagcattcgcacaacgggtaacaatttgtgaggcgatcaacaattgggccaatattcggagtagtgtccaagtagaggattattcttttatgctttactatgccaacacgagactacaaaatgatcgatcattgatcaaaaattatgcgatcaatttcaacagattgtatgagcccgaatatctgttcgacatgcaaaaactgaagttgcaaatcagtgccaattccaaatttgacaattcgtatgccccactccgccgtatatttgaccaccaaatggggaaaatgaagacaaaagcgatggcgaagtttgtgtcaagcgccttttcttgtcatcagcacctcagcatgttttcaagaagtcattctatggcatag

SEQ ID NO: 65626 - DNA, 328 bp, Heterodera glycines
atgcattcagttttttacttaatgtttatttttgtatttattcatggctccatatgtgagtgatatcccattttgaaggaaaattgatttggaaattatttattagtctttttatagaatttatttttattatttagacatttggaaaaattcattattaatttaagaaaataatgattattttaaaattactttgaattctatcattttttaattttctttacagtttattaacaaattagtaattatgtaaatatggttgaatgaaattattttaaaattgtcgctcaaaactcccggtttcaaacattgccgcatccttttctta

SEQ ID NO: 65627 - DNA, 199 bp, Heterodera glycines
atgacggagtatgccagtgttgcagtgagaaagcatttacacgcagctttatcttaaatttgtattatactaaatcaaatttttttaggtatttattgaacgctttttatgatttatcatttttttttggggttttatcgtataaaaaggcaaaaaaggaatttcattttctccgaaaaactctcggattaatttgaca

SEQ ID NO: 65628 - DNA, 422 bp, Heterodera glycines
atgggaagtttttgggcaaatttatataaaaatggtgccaaacttgtgaaaagtgccggtgccgtagcaacaaaaagtttattatgccagttgggtcaactcgatcaagtcattgtcaatacatttgccaactcattaactcaggtttttaagtttaattaaatttaatttaaattcttttaaaatactcagattttctaattttaatttattttaaatttatatattattttttagcgttttttattttttggcaaatctccaattgattatgttgaacaaaatgatccggcaatgggacaccttttgcaaaatttgtacaccatttaccaaaaacttaagctgttgaagtttttacgtaatgcaattaaatggaatttttaacaattttatataaaagttttttcttaaaaattaataaa

SEQ ID NO: 65629 - DNA, 294 bp, Heterodera glycines
atgcctttgctttatccatacgaaaaagacggaagcgagagagaaaaacaaaattttaatgtaccctatttttgcctctccattagagatactttcaaaacagattgccaacaaatgtcaggctgtaaccgccaatgcaaattttgcatgtaaaaatgtttgccacgtttaaacgtgataaaaagacgtaaggcacgacggaaggggaacccatcaacaaatgttttttgtataacatgatgtttttaataattttttaagaatattgattccagcacatgcacgtattcttga

SEQ ID NO: 65630 - DNA, 337 bp, Heterodera glycines
ttaaatattcaaatttttctctcggcggtacacttccatctagagctcggcctggaactgtatccaggcctggatttttcctggatccaggtccaagtctaggccatttttcggcaacctgggtttttcctagacctagattttcgccggcccctaaaaattcttattcttttaaaaaattggctcaaaatcgtgcaattttgtcatgtctttaattttgaccctaaaatcttattttgaccagcgatgtacttatttcgggaaattttcaagggtaaccctggttaaaatgccctttactttcattggcatttaccaaatttattattaaaaatta

SEQ ID NO: 65631 - DNA, 1514 bp, Heterodera glycines
tcgttattccaaagtgatttggcgaagtttaaaacgacagaggccgtcggccgtgtgttttgacatggactcgacactaattaaagtcaaaattaatgataataaaaattatgaaactaaaatatttattttattttaaactaatttttcaagaaaatactgctcaaaaaagcacttttacacttctcaggaagaaacattggatgcgtatagcagctttttcggcttggatttgggcggaagtgccatcactgaaaaagcaatgggcggacaaattggctttaggttaagccagttttcaaatataagaatacgcatatttaaaaaatatattaaatttatgttaaaatatttttggattttgttaagaaaagcactggcccttcgcttggaaatgctaaggccaacaaaagcccaatacgaacgatttttgaacgaattcaccccaacattaagcgatggagtaataaattaaatttctggtattttccattcagtgccccaattccaaattaaaaaatccatcaaaaggccgcgaaaatcataaaatagcatgcgcaactctctttgttcttcaaagtgaataaatagttccttcttcttacaggaatcatgctgcagaaatttcatttgaaaatttttggaaagagcaatgaaatttaggggaattttaaagaaaataaataaaaatggggatgatgaaagagtaaagtggaatggaaagtaaaattcttttgccattggccaataatttatgcagaagaaatgggcggagtaaaaattgtcaatttcttaatttattcattggggaaggaaaaatgctatttgcgcgcccttttggtggctttttttcatttgaaatggcgctacagaaagggaaagtacaaaattcctaaataaatccgcttacctattttttagttatactttaattaggttgaacagttggttactgtactccgtgggtacggtgtcgacctttacattgtcaccggcggattcgtggaggtcgctaaaagggtggcacagcgtctgaacatccccaacaaaaatgtatttgcaaatcgaattctgttcagtgctgacgggtgttatgagggctttgacaaaaggcaaaaattacataaaaaatgaaaagaaaaaaataataataatttagtcaattgacgagtcaatcgggcgcttcgccaattggaaaagcgggcgtttgccaacttttgaaggagcggtgagaatttggcaaatgccattttgggcaactgatttaaattttgggtcaaataaaatgctaatttgtcaagaaattcctacaaattgcttgtgatggtcggcgacggaggcactgacatggaggcacggcccccggccgatttgttcgtcggttatggcggaaatcaggtcattaaatttaaacgctcaacggcattcttggttggcaggtgcgcgagaaggttcggctgggctccgattggtttgtgcgtgattttcgaacccttaccgacgcaatcgaagag

SEQ ID NO: 65632 - DNA, 688 bp, Heterodera glycines
atgcgttcgctggccgcgttaatccaacaattggtcagtgctctgaacacactgaacacagtcatgcaacaacagcagcagagataattaattaattggaagaaagcaaaaacattgtggagagaaagaagagataccgtatattctctaattaaggccctgtctccattaatcccgctgtctccaattatgtccccctttctgaggatgatgttgaaaaataatcccccgtctctatttatccccccgggggataaatggaattattattttttaaaaatcttatttttaataaaaattaattttaattaattctaatttgaaattcatttaaatgtttaataaacatgaaaaaataatacagaaaaatcacttactttactcaagtccgaacataggtaacccagcccggtgctatgtcgttattagagctcggtattttgaaaaaagcctggacctggacctggattccatgttcgacctggacctggatttcctggacaaaaatccaggaaaatacaggtccaggaaaaatccaggcctggatccaggtccaggccgagctctagtcgttataaaaaagccgtcaaaaagggggcaatcattaataattggtgtcccgacgaaaaaaagtgttaaaaatttgtcggatattttttctgattgtgagcttaaaaaaatgcgctga

SEQ ID NO: 65633 - DNA, 489 bp, Heterodera glycines
atgcggcaaatggaggagcttggccagttcctccgggagcgttatgccgctgcaaattttttgccccaacattttgacagaaaagaggtaagaaagtgatcaattattgattgattagggctatcaatttgtaaatattaatctccgaaatcaaaaagtacaggcaatttttaactggaatttgatctgaacgcctaattgtagataaaagaaaaaaaattatcctattattaattcatggacattgatttatataattaatttaattattttatcaatcattgagttctttcgcatcagctcagcacggaattaattgtaaagccaaattgggaaggtgaccgaaagttttcgccactgttcgtttcgtcaccgagaaataatttaaaatatttctggattttttttatttttaaattggtttagttttgatgcaatttccaggtaaatttccgattaaatttaaaaaatggattaattagagtttga

SEQ ID NO: 65634 - DNA, 386 bp, Heterodera glycines
atggagaaggcctgcaaaatttggagagattatatcgattttagtgcgctaggttcgatgaaactttttaaaatataagcctaaactttttggcctgtttaaaaaggaattaaaaatttttaaaaattttattcatgtccttttgataggaaaagcatcagggacccttgtatacgtcttaattagcattttgatcggtggggatcggtttatgaaaaaatatttagtaattgatttttcgtcagagggtagatatagtaggtctaaaagttaatataaaatctataaattcagttttgatggagttatcgtcatatcagtgattttccctgtatttcagattctttaacaagatatggtccgattaatatcagattgtaaataaa

SEQ ID NO: 65635 - DNA, 206 bp, Heterodera glycines
taacttgtaaataaaatttggtgcgtttcagagcagtctgtgaaaaaatatttatgaattaattttgctaaaaaaataaaatagtgaagctttaaaaattaataaaaaattttaaattcagaattactggagttagcatcatagcagtgcttttccttgtctttttgatgccctcgcaaaatctggttcgcttctgatcagtttat

SEQ ID NO: 65636 - DNA, 327 bp, Heterodera glycines
atgaccgcggcgggggcaagagtggatggggctgttcagattttgtccaccctgttccttatcgccaactacgcaatcgtgctgccaatgttcctactgtgttggatgatggttgtacactggctccgccgctccggcctcatgcctccgcctcatcaatcaccgtcgacatcccaacaccccaaccgctacggtggccttcacaccatatttgaggacaccgttgagcagaaggcagggcatgagaaagacgtacggcaacaacaacaacgccacacgtcagctgctgctgctgctgctgctgatactgtcactacagaggcaatg

SEQ ID NO: 65637 - DNA, 162 bp, Heterodera glycines
gaatttcccccgctctctccattcattttgcgatgcatcaaagcaccgtcgcgccgtcctccgccgctgctgcgcagagtttgggctgtaaaattgagcccccaaagccaagggttgacgccacgcgggcgaccgactcggacaaacattcgacagcaaaaa

SEQ ID NO: 65638 - DNA, 126 bp, Heterodera glycines
aataacgtaataagcaatcagctacaaaccaccccggccatatatcctatgagaaaaattgagatcaggagtcttttcatcccgcgtggcacttctgacctttcacacaatgtttttacaagcatt

SEQ ID NO: 65639 - DNA, 809 bp, Heterodera glycines
aaaaaggttttggcattttggaatttgattggagcaaattgtggaaatcttttgggggccgaggctttgtgttggactgcgcaatgacggaagggttggcttacctgggctcttttctgttcctctcccgtcatgagccgtggctttggcacgaggaatttgcccttttctcgggtaaatgtcccatctatcggtaattttctttttttcgagattaatctttgtttttggccattcgtttgaaggacttacgaaacggcggacagaaaatggatggcagtgggagctgtggagccgaaatttcagcagaaactcttcgaaagtatgaagattttcgaatttggcacttattttcgattgctttgcagttttgggaatttccaccgaaaaaattgacggaatggcgaaattaacgcgcgaaatggaaaatgcgttcaggggaaaaacgcagagagaatgggccattatttttgaaggtgaaaatgaaaagggtcgccttgcccctcccaaacggtgccattgaggggaggacgcgtgtgtaacgccggtgctgaacatggacgaagtggggcactacgagcagcacaaaagacggaacgcattccttaggggggaagtggagggagaagccgtttgggtgccgagggcagtgccgaaacggatggaaacggagaaaagccaaacgaaagcaaaaagtgaaaggacggaaagggaaaaaagccaaatgagggccaaactgtgagcacggccaatgaatgaatgaatggcacaatgtcttccaaatgcctttctctcccaaaatgccattc

SEQ ID NO: 65640 - DNA, 49 bp, Heterodera glycines; identical to SEQ ID NO: 51181

SEQ ID NO: 65641 - DNA, 381 bp, Heterodera glycines
agggtcatcacaatggagtcgtgcaatcggttcagcggagttgaacatgctgcttacctgcactatatgcgcaactccagcgtgtatttcgggcccggctgtaacaatggcagtcaaacaattgaaaaactaacgaatcaaaaaaatatttaaaaatttaaattttcatttgaaaataaattttttttattttattcagaaatactggtcattggtcggcttgtttcacgttggaatggtacaaattatgctgccaaattgttaactttcattttcttcccaatttcagtgccgatcattgctcatttgtccggcgatgacgcactttctgatcgaacaggtcggtgattttggccgtttcactcattaatcaaatcatcg

SEQ ID NO: 65642 - DNA, 1320 bp, Heterodera glycines
atgcgatggaggggcaaaaatttgggcaatattgttgaggaattggataaagaaggaaatgatgacggtgatcagaaaaatgatcagccagataaaagagagacaatgcgaaaaggagagaagggaaaagatggcagacaaaaacagtcgggtgacgaaatagttgaagaaaaagagaaaaatgatagtgaaaagggcgaagcagtgaagaaggaccaatttgctactacagtattccggatattgtaaactttactgtattaaaaaatggagaggaataaaataataagattatgagtttattgctgactttcttggactttaactttgagactgggattctggatttttttaaatctgtaaataattgacttaaatgtataaaaagatttttcgccggcaatccatttttatgaaaaaacctaggcaaaagggggtgtctttttgaaaatacttttaatgaagcctaattaggatttttgttcttgggcttttttgggatctgaattccggaaacaaaaaacctattgactcataaaacaaataaataggagggcctataaaatgcaggagtttttaactttgacataatctatatatttggaaatctctgtaacaacagtatcccttcaggctatttatgcactaaaaaactgtattcaaaatgggaattaaaaaatatattataaacatatctatatttttcttgcaaatatagattatatatctttttttgataaaaatttaaaataaattcgaatatttatttcttttttaaagtgcgctcaaaaaagtcgcgtcgcgcattgcggacacagctgaccaagcgcacagagacaacgcaattgttgtggtgttgttcatgtgttcgaccattctcatcttagttcaagtgaaaaaaaagatgaaaaattttgaattaaatcgaataaatatttttaaaaattttttaattattaatttttataattaatttaggtagaaaccaatttgtgctccaccatgtttcaaaatgtcaaaattgaagttgaagtgctgcgtcaaattgtgttcgacccaattgggcgtgtgcttgcccaaacgcaggtggacaattgaaaaaaaagtcaaattaataatatttttttaaaaacaggtgcattacgttcccacgtgtttttaagctttttttaaaaatttcttagtttcaaaattaaaaaaaaatacgggcgtgaatcaataggggggggggcggactagctgctcccgagaaaacccttaataacatttaaagtttcaaagttataaattaaaaaaaaaaacttagaaaattttaataaa

SEQ ID NO: 65643 - DNA, 203 bp, Heterodera glycines
acattcgaaaactgttgtccaccgtggacgcgaccattcaattccatgggaaaacgacggtgctggagaacaccattcgggacgggggcaatgtgctgttgaacattgacgactatttggaaaagatgcgcaacctgaaggaggcaatcgccttttttgccacccatccagtctacagaaaccacgagcacattgtacggtag

SEQ ID NO: 65644 - DNA, 618 bp, Heterodera glycines
atggcaaaggttcaaaaaatcattaaaaaatggctggccgaaaaatgggctcccggtaaattggacactatcgtataaaaataaataaataaaaaataaataaaacaaaattttggtttggctaaatgattttattttattctgcacatacttatgttttttataagcgtaataaaacggaaataaataatgtttttattaacataaaacttcagcaaaagaaaacaaccataacatccaaaagaaaaaagttttcttttggataggattcccatcttttgtgcaattttagcacattgaccaatcttcaccctttttcgtgcattttttttggcacattgatcaatcatcttgcatgttgaatgcttgattctaagtgccttaattattaatccatttaccctacccaaatttatttttcaactcaattcctgggtttattttaggatggtgtccagttttcccgtgtccagtttcctatttggagtccagaatccgaacaaaaggagaaaattaatttttctctcaagaatgtgatgcgagcgcccccagaaaaccccccgagtattactccgaaatgcataaaaacaactttttaatcttttttttatgggacca

SEQ ID NO: 65645 - DNA, 164 bp, Heterodera glycines
atgataactcctgtaagtaggctttttaaaatataatttaaattattttcataatgttttttcttggtattttctcattttttaattttcaggaacaacaccaaaagcggctcgaatttataaaaaggaaaaaaatgaatagcgtgggctgtttcggcttggag

SEQ ID NO: 65646 - DNA, 383 bp, Heterodera glycines
atgtttccaactctgaagaaaacgcaccgaactcatgtacggattgatgcgcccgtgcgcgcggtaagtgcgccgacgcattttggcggccgcttgcacgacgatgtggtcaatgaccaaatggtcgacgtccaggcccttcacctcggcattactctccgcatttctgtgcaaaaatgacgatacaaaatgcaaacacttaacatttggtcaagtttgtttattatgaattttcttgtgggtaggctaggatatacggaaaccaaaatggaattccaaataaaatgtttttagggtcccaaacagaacggccttttacctgagaagttggagaaggaactcggcggactttttcggccaacgtccctgtgttgtgcctaaca

SEQ ID NO: 65647 - DNA, 503 bp, Heterodera glycines
atggcattgccacgcgccggtgcccggcagttgcccccgctgaccatcggcagaggcggcgtcggaaacagcgaaatggcgactataatgacagacgatggaggaacaggtaaacaggtctaattgttattgtgggcaaggaaggcgcagtggcaagacagggacaaatcattaaatgcgcaaacaacggcattttttgatgtgccgtaattacaaacggactgtccgggacaaaacttattatatctgtggaatttgcccattttggaagagcaattgctgcccaaatgctgcttaaaccaatcaatttcctattgatgctttagagtcaacaaatcattgccgcgacggcgacgaggagccgccgcagcgacgccgccgcgggccgaagttggcactggacgaattggacggatgaaaaagggaaaatggacgaaaaagggggggggggggaaggcactgttttactctttatgagagattttctgttcaattaaaataaa

SEQ ID NO: 65648 - DNA, 631 bp, Heterodera glycines
taattaaatccattccttcgggggaccgtgccgggtgccgcggggtaagcagtgctggttcgtttcatcacggcaccgaaccttttggctagtcagcaatcgttgcttaacttgccagatcggacgggtgcgcatgattcctctgttccaagcaccccaccaaaagcaaaacgatataaccaaaatataaggaaaaatttttttaaaaattttttctccatcttcctttttgatactaaagcatcagagtgctaaaattaagttgtaaataaaatttggtgcgctttagagcactttctgaaaaaaatatttatgaaacaaaaaaatcgattttttcaagtgtccgtttggggtactcaaacaattatggggagcaaaaatccaacgcagaattaaagtacaggctatagggaagctattccggaaggattcggtctccccataaatctgggcgcatcggttcggggggactgccccgaaaacaaaaaaatcgattttttcaagtgtccgtttggggtactcaaacaattatggggagcaaaaatccaacgcagaattaaagtacaggctatagggaagctactcccgaaggattcggtctccccataaatctaggcgcatcggttcgggg

SEQ ID NO: 65649 - DNA, 892 bp, Heterodera glycines
atgaggactccgccaccactgttgtgcagcgctattcgctgcctgatctggcttcatcaacagcaacaacaacgccaaaaccaattcgcttgcacgcgaacaaattttcttggcacgataatgccaacatcaacaatttgtgacggcgcaacaacaacaacccaaggaatggcacaccgcgtaccacaaccaccaacagacaggggcaggcggaagcggacgctaccgcgaaggtattgcaggtaaaaaagcagacggatcagctgcacccagtgaccacgaaactgaaacagccgaggcagcgtctcccagcttggtactgtttatattaccaattaggcattatttgataccggtatatcctggagactgttaattttagttaatgctattttttgtgtatatttgaacaatatcccaaaaaactgttactgtactacaaaaacgggcaaaatgtaacaaaatgtgcttccgttttttaaataaattaacaatttgcttttaattgcctcacataaatgtccttctaaaaatttagagtttttatcaatcaaaatttttaaaatttcagcgaatcgactagccacggtggcgcaccaccaacagctgagccgattaaaatgccaaataataagcggtttattatagacgaagccgagttggaattaaaatatgcttggattcggcactataacgtaattaaatttgaacgttgcattaaatttatttaaaatttatttttgtcctttttaagtaaaaaataaaagtaataatcattttataatgtttattataaattgacgaatttcagccaattacagctcttgccggaggacctcggatggattggaataataacgataaaaataatgaaattgtaacaaaattttaa

SEQ ID NO: 65650 - DNA, 148 bp, Heterodera glycines
atttgttaaaaagtccaattatcactgcattcttatgattctcgcttcttcgtcaaagcgattagcttgtcaattcctcatccgaaaagtgcctcattttgctgtgacttcctcgagaaaagagtattttgttgttttgtcgacatga

SEQ ID NO: 65651 - DNA, 1274 bp, Heterodera glycines
atgtgttacaacccaaaatttttgaaatttattaaaaatcgtaagaaacaaaagaaatatatgagtttacatatttgaaccgctgtgacgtaggaattcggcgggggtttcacgactttaaaagaaagccaaagttaaagtcacatgacgaaatttaaaaaatttaaaacattatgccaaatattaaataaacattatgccaaaataatatttttggcattttgaattaccaaaaggcaaaatttcgttttttcggtgttcctctgctaattccttccatgttaagccattgtacatgtttaatcctgcctttctttaattctctcaacaattcctctgtaggcagctgtcactgtttggtcaatggtttggattaagcctgaacggttgttatttggacacagtttttggtaaaaaaaaaacaaattgcaaaaatcgtaaccttttcttttattaggcattctgaacgtgccaacccgtatttttgtgcttcaacgtcgaaaaggccatcgtgaagatgagcagcaacggttttcgcatcagcaaaaacagcacagtgacgtctcctcctcatcgaagggttgaaaatgaattttttaaattttgctaaattataaattaaattccaaatttcagtgctcagcggaggactgtcggctttgtttgtgtccaccatcgactcaatttttgacactcgtccgccaccctatcgcatcatttaccagcgagaattggacgagggccaaattgcgtggggtcagtcagaggctaatgactccaaaatttggggatgggccaaactgggaattttggctaaaattatttttgtaataaatttaatttctaattttcgcttttttctgaaattaatcatattaatgcgatttttaaattttacaaaaattcatccaaatttttcttccgtttttcatctctcccaatattttccagtgattgcaattgccgtcgattggcgcgatgtgttggacaattggcaatgtttggagacttcgctgttgccaattttggaggtattttcaaagtaatagaaaaaataacaaaaacaattcctttttaaattttccttttcttagtcattgggcaccgatgagaacgaattggagaaatttgtgctgacaaaaattgacgggtttttggcgctgcgcgatgaaatggaacgccgtgaacatttggtggccgacggtggggaggaggacgatggcgccgagtcggctgccggtgaaattttacaaattaaattcaaaattccataa

SEQ ID NO: 65652 - DNA, 199 bp, Heterodera glycines
atggcacgaaccaagcaaacagcccgcaaaacccaatcccaaaaaggcttttcgtcgagcagtggcagccaacacatgcagagtcaactgcacaacttgagaaaacagttggctacgaagcgtcccaacccaaaacgagggatcggatacaaagaattgcctcctgtcaaaattgcccaaaaacgtcatcataagaaag

SEQ ID NO: 65653 - DNA, 1095 bp, Heterodera glycines
atgattggaacatacggagttcccaaaagtgtgtcgattatgtcaattgcttggcggaagccattgcgtgcagtctttaactggctgatgatttcttcgttgccctctgaacggacgagcttgattttgtcggcagcgtggatggcgtcgtattctgaatgtttaagttgtatgttaggtaaataatatttggaatcaaaaatatttaattattggacacttctcaaacaacaaatttgaggggcggtgttgactgccttccccccttccaaatatttgccattttcgtctgaaattagcgattgtcgttggtttcaatcacaataacaaacgacttattttgcgacagatttggctttagtcgttcgtaattgtgattggcccgggttaaaaatgttaaaatatatcttaatcaattaccctaattttcgcatttttctatttattttcaaaaaatttttagtcaacatctactaaaaagtgttaaatgaattcataaaaaaattacccgcggccccttaggcaccgcttctatcccagagcttagctgtgatgacccttacttacattgaaaaatcttactacacacacacacacaaaaaaaatattattttttattaacctttaattaaatcgacggggattaatttattttcagttgttggaacgccaattaatgccacagaaaaaataattggaaacatcagaaaatacagtgccatttttgaatactttatgaaaatgattgtgaacgtttcgagataaaatgaatggaaatgcacagccaaaaggtcatttataataatgggttttgtgaatgccaacgcataaaagggaggcacccaaaaggtcatacatccatttgtgcagagcaccataaaaatttaaatatcagatggaaaaggttatgtaatgagtaatatttttggggcaaaaaaaaggcaaatacaaaaattgttacacataaatttagattttttattttgtttcttaaaaattattttttaaagaattgatgaattatagaaattttggtttagtcatatgtttagactcactttttaatcctataatgttcataaaagcaaaaatgta

SEQ ID NO: 65654 - DNA, 117 bp, Heterodera glycines
caccaaaaagaccctgaagtttcttggagaaatgacgcaactgagggtgtgctgggcaagctcaccacgacgatgggcccttgtttctgcaaaggaacagcttacttaatacattcg

SEQ ID NO: 65655 - DNA, 128 bp, Heterodera glycines
gtgacccatggacaccatcatcgacgcaatttgcgcctccaaattgcccgtgtcgcgcattctgtgcgaccagatccgctcggtgggcaagtcgatgctgctggtcgggccggtcgagtcgtccaaat

SEQ ID NO: 65656 - DNA, 168 bp, Heterodera glycines
tgttgttggtgttccgcacttgggccaacatgtgttggaagtccaacgggcggccgtccttcgcctccatgtacgccgggtcgaggccgtcgtcgccaaacgtgaactggaccacctcgttggtggaggtgcgcaccgtgttgccatagttgacagccaaatcctggc

SEQ ID NO: 65657 - DNA, 574 bp, Heterodera glycines
atgaaattatgcttatttttatccgttttaattgcatttttaattgtgctaattgaaattggagcagaaaagaaaaaattggaacaatcatttgaagaaatatttggagaaaaatgggaagaaaaagaagaagaaaatttagaagaagaaaataaccaaaatgaaaatgatcagaaaaaacgagaaattattgagaaattttacaaaattaaagaaaaaattaaacaaaacgaaaaaatatataccagaaaagaatggaataaaattgaacagaaaatagggaaaaaattggggacaaatcgccaatacatttacaaatggatcaaagaattaaatcttcaaaaatataaatgccacaaatcaaaaacggatgaacaaaaaattgaaattattcaaaaatttaattcaatgaaaaatgagtataaacaaaaaggaagaaaatattcaaaaaaagaatggaagaaaaatttgcagaaatttataagaaaattggaattaacgaaagaagaattaacaaatggaagaaacaatttggaatgaaaggaaaaataacggaaaagaaaagatagaaaaa

SEQ ID NO: 65658 - DNA, 548 bp, Heterodera glycines
atgatcgtcttgcaaagccaaatcacagcgtcgattacagtaaccagtagattgacagtattcatagccaaattttcgaatacggcaaaaactgatgagaaaaatgaactggacgaagaagaagatgaagttgttgatgaagatggagaacgggaagaagaagaaggtgaagatgttgatgaagatggattggcttaaaaagaaaatgattttatgaccaaagtcattaaaacaatggcattgggaaatctttccggaataactttttcatggcttaccctccgtttctgatgccgatctttggttggcatttgcacgcatttcaaaggacagcaaataattcacaacttcgattcgcccgtgaaaggacgcggcagtgatcgcagcgcgacgcaattgatcagagaaatggactctttccataaagaattggactaaaagtttattggccaactaataattttgaaaaacaataactttatggtattttcccgaaaattttcatttttttagtgtattttgtgggagtcccaaaagagatgccataa

SEQ ID NO: 65659 - DNA, 243 bp, Heterodera glycines
atgcacgcgttttgcgctcgagctatttatcatcgggcttgtcaatccaaagcgaaacaacaaagatgctgttttgaacgaataaagggaataggttattttgaagaagtgtcaaatgaacatgaagcaataagcctgcaaaatctaataagtggaaaatacatgagtatagaatttattttcagaaagtgtccacagactttgcaaaaaaagatttgcaatttatcaactaattttgagaac

SEQ ID NO: 65660 - DNA, 371 bp, Heterodera glycines
atgcgcaggcaatgggcaaacaaattcgcgcgccttgccagcatttcccggaagacgctccggtcaaacaaagccggcaccgcctcgcatgaggtcggccacagcgtgatcatttggcttcttggggtgcgacaatttttgaaggttagtttagggcgaggcttatggggtcggggtcacttcggcgcggaccatttcggcgccgcaaattttgaaacgctataacttttttatttgtcattaactttagctaatctggcatcattcgaaagctctgggtgcgctctttttataaactgactaaattttttgaaattttgcaggctaataaagtatctcaaaagctatcgaatgataacaaaaatatttaa

SEQ ID NO: 65661 - DNA, 527 bp, Heterodera glycines
atgctcatcggcatgctgttcatcctcagcgtgcagtcgctgatgctgctgacggtgctgcgctgtcgttactttctgtcccagcgcgaattgcacgcgatggcactgcacgtggcgcagaaaagcgtaagtcacacaatagagagaacaaaacattggctaattaaattggaatttcaaccccctgcctccaatttgtgaggattcaaaaaattcctggatttacaaatatttatgaattattaattaattaaaagtgcccccaaaaaacttgaaaaaatgttcagcgccaggattacccgaccatccaaattgtggtgactaatggctccgttctttcctctgctgctgcagccgccgaaaatggctttgttgcaccgccgcaggggaacggcgttgtggggaacagtgccggcacagaaatggccaatggacacgcgacaacggcacaaaatggacagcagcaacagaatggggggcagcaggacgaaccgcaggatcagcccattctcaagggaattgtgtga

SEQ ID NO: 65662 - DNA, 337 bp, Heterodera glycines
atgccatttggattcgaagagaggcttttcctattcccagtgaacttcgcgattacatcgttaatgctctggtcgaaatgggcgttgaagtggccaaacactcgttcagactgactccatcatcctttttggcaatttcgaattcgcttatttcagtttagtaatcacaataatcgaaggtttaagaataactcttccgtggataaagtgaatgtctatggaattgtccgttcctttcgtgccaacccggccgagtccattcttctcgctgttccaatgcgttcttctaagattgaagcggttgctgttgccttagcttttgctgattatgctaaaa

SEQ ID NO: 65663 - DNA, 840 bp, Heterodera glycines
  unsure (1)..(840): unsure at all n locations
atgccggaggaactggtggcgctcagtcccggaacgcgtgtctccggccgctggaccatcatcaagaagcttggggcgggtgcgtttggagccgtctacttgtgtcaagaccgagatggaaggacaatggcagcactgaaaaccgaaccgatcgacgctcagcgaccactgctgtatatggaggtagaagagcaatggcgagtcaacaaagcattcgttttttcatttttccaggcccacgtgttgctcagcctgaacgaacttcgatcaaacagtggacgccatttttgccgttgtctggaccttggacgcgatgaacaaccggatgccgattctggacagacgatggagttcaactacgttgtgtgagtgacaacgcgaaatcgagaattaataacattcccttattttcaagcatgtcgttggttggccgtccaatggacaaactccttcacgaatccggtgaccgcttcagccccggaactgcgatcggcacttcaattcaacttctcanagcgcttaaggcgttgcacagcgttggatacctccatcgtgacattaaccagcaaactcggccatcggcacgcctgagacgaacgaacagcgccttctctacctcctcgactttggaatggcgcgcaaatatgtcagagaggacgtgagctgctcttctttttaattaaaaacatggcaaaaacagtttctgttttcagggcacacaccggcgccaaagggacaccgcccgcttcagagggacgccaatctacgcaccaatctctgcgcacatcaaacgcgactacagccgccgggatgacattgagtcgtggttctacatgctga

SEQ ID NO: 65664 - DNA, 1383 bp, Heterodera glycines
atgacaaaaccgcaacaggttcttgttcttgatccgaataacgaactcagcttcaagggttggtttacactgctttgcttaattacctattctctacgctattgccgtctaaggaccgtttactgagtatgtgaatgccaatctcacactgtcaaatccctcgcgaaaggacgtttatttcaaggtgaaaacgactgcacctaagttttattgtgtccgtcctaactctggtgttatcaaggtgaataagcatacccaaagttttgtggcaattaaatggacagaaattaaggcgaatgataaaacccaaatcaacgttatgctgcagccggttgaatcgcctgagactctcgagagtgagcggagccggcacaaatttatgattcaggtactttcgccacctctgcacaaacaaaaaaaaaaaatttttttttagactgcatttgcgcctgatgacgagcagcttcctgtggaccaattctggaaaactgttgacccaacattagtcatggattcaaagctccgagtggtgttccagcgaccttttggatttggcgatgaaaacaatcgggacgaaaccaatgcgactggtccgtttttcaatttcaacaaaacgggcgaaccgaaaaacgaacagccaacgcaaactccaaaatcgaccgtaatactttgcactttgtctttgagttaatttttcccatttgaggaagcaaattctggcgatattcaacttgctttgcaaagggaagttgaacttcggatgatgtatcaggacgagaaaaaaaacctcgaaaaggagaattacgcactcatcgtaatccgaatgcctttttctgaaccattcgtcattttctgtttcaggataagctcgaaaaattgactcacaatgctgctgcgggaggcgttcttcagcaggacaatgtgcaattgcttcatgtaaattccattaatttcaaaatattaccataaatcagtgaccggggcggggtgtcgcctaacgaaatcgccctattttgggaattgggaggggaggacctttaccgctccgttaatttatgctatgagaatagtaattgtaaaaaatgccttcagtgcgccctttgttgacattttttaaaattttgaggtgtaggcacaaaaccgaaaagtacctaaaaactagcaaaaaattgttaatttttgtgagtaaaacctggttaaaaaacttttcttcaacaaaaattggaaatttcgcccgaagcttttttaatgctaaatgcacaaaaaggttttgggcctaggtctgcacaacatttttggttatgaaatttgcatccattttaggctattttgtttgccgttctcgctcttatggttggactcatcgtgggcaaattgatgtga

SEQ ID NO: 65665 - DNA, 2826 bp, Heterodera glycines
atgaggaagaaaagaagtggagttcacacgccgaacagcatctgtgaaaaagagcagaaaaagcctaaaattggaaatgaatctgctgaagtgtgccatttccaagcggagaaatttgttggagaatattgcactgtccacacgcggccatctctcacagtgaaggcactctccttcaatagctcaattggccgtttgtgtgtaatccgtcaaaatgaatcgactgtcaggttcgtcagtttaaagtttttccttctcaactgaaaattcagccagcagttcccggctcaattgtcccttgttgaattttacaatgcagacaatttgccattgattttcctggaaaaaagcattccggtcaatgaccgatttgaaacgcttgtttgggtggacaattgggcggtgtttggagggttgggaggccgtctgaccgcactgtcaccattcaccagcaaatttggtgtgagtgggttttttaaaagttgggtcgattttttcggatctgttaagcgtgttcaactgtgcgtttctgatattcttgtgatgactcgtgccggagaaaaccatcagtttgttgctgggaacacttctggtgaattgctcgttgtaaacaaccgcgacttcgacgaggagggaaagtgcaccaacaaagtccccactttttcaactgtccaaaccattaaattgtccaccgatgagcacattaccgccattggatgttctaacaataagaccctaacaccgcaaatgatggcagttgggaaggtcaatggactttccttatttttatatgaatcggaatggaagaagcacaaagaaatcgacattcctcggacgaaagagagtgcgaacgttgtgtggtcacttatttttgtgtgagttgcgctttcaaaacgacaatttttaaatgcgtttctttctctcagggaaacttttcttttcacgggcgattcgcgtggccaattgagtatttacgacgcattgaatggaacacttttgaaagtcgatttttggtgtatttttcgacactgatttgtttttagacactaaaaacgcaccaagcggcagttctcaccattgccacgaacggtaaagaggtttttgctgcgggggcagattatcggatacaaatcgtaaaaagaatatcgcatgacaatgtacagtcgatttatgacgtttttatttaaattgacttttgttaggtccgtttcgagtggcaacaaagtggccagcgccttttccatgccaacgacgtgagggctatttgtgtgttggacaaacgattgcttgtttctggagggtccgactctgagcttttcatttctgataaattcactcatgcgaacccccagataaaagtaagcactttaaatgattcggttatctgttcccctgctttatcttcagtcagaatgcgctttcttcgtctcaaagtccaattgctatgtgattgtgagccaccatttgtctcatcttgacttatggtataaaacaatcggaggatctcttatggaccaaaggttcgattaataaaaccaagacaattataaaacgaaaattagcgaatgaacttaaatgcacttttaatggttaaagcttaacttttgtcctaattttcattcaattttagaaagcgtttgaaactatttcttcgaattaccagtggcaaattagggtttatcaaacaagtaagctttcgaatgaaatttgccttgggtcattgctcctcttgagtttcagttttgtgtctcttccgatgggaaattccttgcctttgctggtgctgttgcaggtgctatccgtgttttccgacttcactgtgaccaaattactactttccttgcgacatgtgcccccgaacatatagaggacgcacaatcaagcaaattgatcaaactaatttggagcaatgataagggcgatgaagaaaatggcagcaaacgaacaggacacacgggggggaggacagtgtcaggtcgaagcggcaaaatgaaaacgcaacagcgaatttaaaatttagcaattcattgcacgaacaaatttttgtattttgcacgcggagaatttaatttggttcgtttggatttacaaaacaaaaggcttcgtacttttgcatcaaaaggttgtgaatgtttgtttttgagctggttacacccaatcccttttcaagtgaatggtggtcatgtcaccaaaatatgcgtcgattcagctgacactcgacttgtggctttaacagtcgcgggaactttttgtttcgacctgaccaaattaacgcatgaaaatggtcaaatgggagaggacggattaatttcattggaattgccacagaaagcgcatccgtatgactgtgtcttttacgacaagtgcaaaatcgtcattattatggctgacttgaataagcacgtcataatctatgatttaaattcaaattcgattttgtttactattggcaatgccgagttgggtttggtttcaaatgaatgggtcgcttatttgcatgtgaatatgagggggactgtcgttgcaacaacaaacaaagcgcggttgagacttttgagcatagaagaggtaagaaagaatgaagaacatgtgtctaaaccaatccattttaagagcaaaatacgtctatttgttgatgaatctgcagaatccaatgagcatgaaatcgctaagagcagtgattcccgaattgaacctttttggctcgaggaccgatccgatctatcgacaaattgtttaaactccagatttgttcttgtaaagcatgtggaagagaatgtttcgacgagaatcccctgtcatctaagattttttgggaaaaactga

SEQ ID NO: 65666 - DNA, 1240 bp, Heterodera glycines
atgccattgcatgggaacttcaaagatattgtggcagaagtgaaatttacaaatcgcattgaaatggtgtggatttgcagcaacacgaaaaaaaagatgttggcttacaggtatttgttattaaaacccaaaaaatatttcccaaagccaagactttgttttctttttcaacggatatttagtatttaatgcttgagcagcttattcgaaattttaccattctttttaaatttttggaccccaaaccgggattcaaacattaagtccaaacctcaaattttcgaatttagcactttttgaattttacttttgttcgaattcgggtacagagatacgaaattggtcgaaatggattgtcatattcgtgatcaacgatccaaaaaccgtcctaaagtaaatatttttaaaagtacataatttaagcacatttattagcattaaaaagtggattgtatctgatgcctaaactacaaaagtatctatttttatgactgcctattttttttttttttttgttctctccgacgacatttattaacagcatttgtatgaaaaataaacgagggttactattttgagtcaattttttttagaagatgaaggggtttttgtccgccggcgttgccattagggctacccggggattttttatttttatttttaatgaatttgctaacaataaaaagtataatacatttttggaaagccttttttccttcgcacttaccttcctgtcgtcctatgcaattcttcgaaaatgttcctgcatatttttgttactactgttttcgtatttatttgctaaccaataatacaattttcagttacgaagttccattccaaaatgcatccaagctgatcatggacaaactcatgcggtggtaccacagcgaaaaccccgacaaacagttttcgcttgttccgcttccatttgaaaatgttggacggatgagagaagcgctgaacaaagagttggatgcgaactacgacggttgtcgggatttcgtaggtataaatattatcgttgtgctctttaattgaattatttataaatttgctaattgttatacccttttattagcaaaagggggtaaaatttgttaacctttttagcaattgcaatattttaaatgggtgcacaaaaaatcgctgaaaatttcttgagacatttttttcttaaaattttctttaaaaaactctaagatttaaaatttgctaattgtaagttttgaaacagcta

SEQ ID NO: 65667 - DNA, 432 bp, Heterodera glycines
atggaactcattaaccaattctggcgcgatgatagcgaaaagcagtttgaagactaccaaattcccgaatctccgccctattggtccagcggtttcctgtcgattcagtacgcaattgacaaggcgttcatcgaattggtccgttttaatatatatatttttgaaaatggacttattgttagtttgtcgtttttcacagtgtgcccaattaaaaaaatatatagagatttcacttttttacgtgcttttaaggccaaaggtgacgatgctttggcaaatgtttcgctccgtctccaccgtttgcccattccgtcgtacatgaacaagcaaatggccaccataacggtgcccctttttctgaccatgcttttgtttgtgttcgccttttccatgctgaaggacattgcggtggaaagggagtccggcatcatg

SEQ ID NO: 65668 - DNA, 616 bp, Heterodera glycines
  unsure (1)..(616): unsure at all n locations
atgattaatagaagaggcttaaatgaatatatggagtgttataaaaggaatatattcacgtaataaggagctattggctaaattaaattaataataagaaaagttcaattttttaaaattgaaaaaatgataataaaaatttgtaaatgctttggcaaaacagtaaaatatataaaaaagatttaaatttaaaaaatttttaattaaaggcatcactacagatttaaagaaaatttaattaaattaatatcagtaattctgcttcaagggatggtaaaagcatatgacaatttaattaaatttaaccataatcaaagaacaaatttaataaaaatatcaatttaaaaatgaaaaatacaatttttgaaagaaataaaaatgtattttttaagaatataaattaacaaatcatattaaaaataatataaatgaaaaaattgtattaattattaaaaataaataaaaatgaaacagtggatgaaatagtggaaggagataagaaaataaaaatgctaataataaataaataaaaatcaaagaatgtcgatacagaaaagaatgtgcatgcaatgatatttaccagattctctnggactcaacatgaaaatttaataaa

SEQ ID NO: 65669 - DNA, 740 bp, Heterodera glycines
ttgtacctcttctaatcactgttgtacctcttctaatcgctgttgtacctcttctaatcactgttgaacctcttctaatcgctgttgaacctcttctaatcgctgttgtacctcttctaatcactgttgaacctcttttaatcactcttctaatcactgttgtacctcttctaatcactgttgtacctcttctaatcgctgttgtacctcttctaatcactgttgaacctcttctaatcactcttctaatcactgttgtacctcttctaatcactgttgtacctcttctaatcgctgttgtacctcttctaatcactgttgtacctcttctaatcgctgttgaacctcttctaatcactgttgtacctcttctaatcgctgttgaacctcttctaatcgctgttgtacctcttctaatcactgttgaacctcttttaatcactcttctaatcactgttgtacctcttctaatcacagttgtacctcttctaatcgctgttgtacctcttctaatcactgttgtacctcttctaatcgctgttgtacctcttctaatcactgttgtacctcttctaatcgctgttgaacctcttctaatcgctgttgtacctcttctaatcactgttgtacctcttttaatcactgttgtacctcttctaatcactgttgtatctcttctaatcacagttgtatctcttctaatcactgttgtacctctgctaatcactgttgtatctctt

SEQ ID NO: 65670 - DNA, 1124 bp, Heterodera glycines
  unsure (1)..(1124): unsure at all n locations
atggaccaaaatatggataaaaaatgccaaaatatatgttgtaaacccccaaaaatcccaaaaaaggtgtgcatatttaatatttgcttaaataaacctaaaaagtacaataaacaaccaaaaaatggggtttaaaacttaaaaatgcatattttttattgttgttcgttgtatcaaaaacacctccaagtttgccaaatttcgaaaaaattctcattaaaaaaaaagaaatgttcgcaaaaaaatgacgaaaatatttattgaaaatgccaaaatgacgacgaaaactcaaatttttcgtgttttgtggggtgtaatttttaaaaatttccaaaaagttgatctttaggggtgtatttttcgtttttttttcatttttcttgtgaaaatttccaaaaaatggccaaaatatggactaaaaacccaaaaatggcgaaatatggatttattcccgaaaaccaccaaaatatggatttatatggactaaaaaccttcaccaaatcaaaaaattttaacgcagaaatgctatttttaagcccctttcttcatagcatatgcgcagaaaaaatatgttaatccatataatttacaaccctaattattaatgaagacaaaaccgattttaaataatctttttgttcctgccacagccgagaattattaataaaaaaatttttgtttgcatgacacaagaaggcatacacaacccnatgcatgtgcaatgggaaacaatttatatcaattcataagtaaatcatctaaaaaaattctaaatgaaaaagacaaaaagttcatttattttaaatatattttaataatacagaaaaactgaaatgttctaatatcaatttataatatccatcaattaccagaaaaagaatttcagaatgggtgttaaaagtccgaatggacaagtgtcttttttcaaaaatgaaatcaaatatttgggtgtgatcattgatcaaagtggacgtcgaccggatccaacaaaatcacagccattgctgaaatgcgcattccttcaaatgtcagcgaattgcgctcatatttgggcatggtcaattattaccaggaatttgtacgaaatttccgattcattcgacagcccatggatgaactgctaa

SEQ ID NO: 65671 - DNA, 247 bp, Heterodera glycines
  unsure (1)..(247): unsure at all n locations
atgctcagcaatggaccaatgtgccgctacgcctctgacttgccgttggcacttgcggtaaatttcaaaggaaaaaatgacaaaaaaaaataaaaataaatttctccaatcaaattttntaattagcagaaaaacaattagggctctaatattagccaaaatgtntaagttttatataaaaatttttttaaatttaaatattggtgtaaaaccttttgtattttttttgttatttaatttaaataaa

SEQ ID NO: 65672 - DNA, 646 bp, Heterodera glycines
atgaatacacaaattctctgcacgccgctctcagaggactccacacagtcggctacctccactgcaacatcaagtcgagcaactcgaccatcggacgtccggaatcaaacgaacatcagggacgacgtgagtttgaatgaagcgctttgaaaaaaacaaaaataattttgttccctttcctttttcagggccagcaacaccgcccgcgcacttcgtttttccaaaattaaaaactaacaaattaaattttgcatgacgacatgaagtacaccgacaagcccgactacgactggatcatcgcgacattgcgcagcagcctcagcaacgccggcgtccaggaattcccctacgactgggagacgggcaagcgcaacgcggcaccgggcgctggaggcggcggaggaggagggggaggagacagctacttcaactgatgagccgtgcagcagcagcagcagcagaagaatcgccaagaagcgtcaccgtgcagaattgatcatatgaccactattactgtattgtatgtattattttgtgtccatgctgccatccccgatatacacatgtattgtattgttgacatatgtattgattgaaattgttgttgcataactgtgtttgtacatatggcttttgacgaaataaa

SEQ ID NO: 65673 - DNA, 647 bp, Heterodera glycines
atggacactcgagaagttgagggaagactttttgaaattaaattgatcagagagggcaaaatgggcgaagtgatcagagaaacccaagcggatgtggcaattgtttttgacaaaggcttggaaaagtgaggggcaatttaatttaaaacataaatttaaatttaaaactaaactttaaatttgaaggatgggcaaagaagcgggagggcataatgccaagcagcaaatctttcggaaaatgaacccgctacagattaagttcactgacacaaaagttggccatcgcacgaaatttctgcttttctttttgcgtctgtacagaaaaatgatcggacaaattggggcaccataccaaggcagtgccgaactgtacgcggttacggtaggcaccgcggggccaaaaatggacataaaattagggagaagcaaaacgaaattagcttatttaaaacaaattaaggaaaaagtgaaacggacggaccgcgaagctttgctaattttgatgagcatggcaaaagacgaaatcatggcctattttgggggatatttgaacattaatgcatttaagcaacacaaattggtaaataaaattttaatgctaggaaattcagaaaaatattttcctaattaaaaatttcattttttaa

SEQ ID NO: 65674 - DNA, 197 bp, Heterodera glycines
tttctttttgattattttaattgtatttcatccctgaactttttttaataaacattttcaaactttcaccttattaatttaaggcgaattttgccttttttaataaattctcttgtgaaaaggcaaaaaaataggctcttttaaatatgcctatttaaatgactttaattgctgtcctttcgcttacgaccatacca

SEQ ID NO: 65675 - DNA, 1213 bp, Heterodera glycines
atggcctgcgacgtggccagcaaaaacgcaaagctccttagtggaagagtcttgcagaaaagtaatgggccgccaaaaacattatgtgacaatgtcttgtcatccgttccgattccgacggtcagtgcggttttaatcaaagaaagatttttatgagaccctcactcatcctgttggattgcaaattatccattaacaattttaatggttttgcgttgagttcacataggaataaaattttcggtcctaattatttagtggaaatgagcttgaataataacgcatttttgacatttaatcaatttctcaggaggtatggaatcaactcgtcgacgtcactttggactttggcataggttctgccgttaaacgcgtaaaacgacgcaaggaaaaggaggcaaataaattggcgcttaaaaacattaataaataaactgcccacatttgaaagatttattaattatttgatgaaatgtctttaggcccgggacgcccgctaaatgggatttttttgaccgggtagctcgagcctggttaatactcctaacaataaacccggggccggcattttcaaaattccggtctctagttgattaattattcagtgcaataaggaattaaccaaattaataatatcataaaagaatttgcacttattttgcattattatttattttatttttttaaatattttttgaattatttggtttttgtcgaacacataaattatttgtgggttaatcctaacaaaaagagatagaatttatttggcattatttttatttgctcaaaatttcagaaacttgttgacccgttggcctatgtcggaatgctcgcaaaacgcgcgcttggtagtgccttgaaaataagcgaaaccccaacaaagtgcggtggcagaccaagcgatggtctcttctgttcatcattttgggaagatttcttttcttcggttaagacggtcagtgcttttgttggttttacaaagcaataaatcgcatttttaaagtaatgctggtcgagacccaaaatttcctgagactcgagactgagatcagcagaaaaacatgactttaaaaaagtttaaattgtacacttgaaacccgattaaaacttaattaatttaaataattcttttttattgaaatttcaaacaaattttgccgttgcgaattttggttcaattacaatttatcaatcaatcgttattttaaaa

SEQ ID NO: 65676 - DNA, 53 bp, Heterodera glycines
atgctaaaaaatcagctggcggcaattcccccaaagaaggaacatttccaaat

SEQ ID NO: 65677 - DNA, 747 bp, Heterodera glycines
cgaagttactcaaatcggctaatggcaacaccgaatcggcatcggctaacggcaacaccgaatcggcatcggctaacggcaacaccgaatcggcatcggctaacggcaacaccgaatcggcatcggctaacggcaacaccgaatcggcatcggctaacggcaacaccgaatcggcatcggctaatggtaacaccgggtcggcatcggctaacggcaacaccgggtcggcatcggctaacggcaacaccgagtcggcatcggctaacggcaacaccgagtcggcatcggctaacggcaacaccgagtcggcatcggctaacggcaacaccgagtcggcatcggctaacggcaacaccgagtcggcatcggctaacggcaaaaccgggtcggcatcggctaatggcaacaccgagtcggcatcggctaacggtaacaccgagtcggcatcggctaacggcaaaaccgagtcggcatcggctaacggcaacaccgagtcggcatcagctaacggtaacaccgagtcggcatcggctaacggcaaaaccgagtcggcatcggctaacggcaacaccgagtcggcatcggctaacggcaacaccgagtcggcatcggctaacggcaacaccgagtcggcatcggctagcggcaacaccgagtcggcatcagctaacggtaacaccgagtcggcatcggctaacggcaaaaccgagtcggcatcggctaacggcacaccgagtcggcatcggc

SEQ ID NO: 65678 - DNA, 506 bp, Heterodera glycines
atgtgccaaaaaagggatgggggagaacatagtaaaatgaaagtgaatcgtcttaataaagaaaaaattattaaaatttcagaaaaaacctgaagacgcacattttcttcttcttccaccttctgattttggcgtcggcaaacatgacaatgaaagtgcaaagaaaaataagatggacaaagaaaggatggataacagggccaagacatttgccaaagaacagaagccgaaaaatacaaaaaaacgtgccaatgaatgggacgcggaaaaagcaaacaaagctaccaacaagctaatgaggaaaatggcagaggaaaaaacaaaaatggcaaatgcaatgctttaccctacgaaaggcaagaaggatgccatgtacaggtgaagagcggggggggagggggggaagcaaattgcaacatttggccatgaatttgtccggaatttcggattgcaaataatttgattcaaaatggcttactctatggtcaaatgaaaatttttcgaaa

SEQ ID NO: 65679 - DNA, 172 bp, Heterodera glycines
cagcacaccatggaattggagcgaatcatcagcaaatcgggcaaagtgtatgagcaattagatgctgcatttagtcgtaacaatatgccaagaaaaagtattaaacagcaccaagagagttgtaaacatggcctgtcaccggtgtttgaaaaatttgaaactggcacatcgc

SEQ ID NO: 65680 - DNA, 688 bp, Heterodera glycines
atgttttttattggaattgacagaatgattggaattatatttggcgaaatgtaaggaatatattcaaaaaatatatattttaattccactgttttaaggcatagcaaatgcaaaatccgactgtatttggctacgataacaattatttgctgcacttttagtttaggttcatgtctgacattttatcagaatattgaattgaatggtgatcaaatgatcactggcacttatgccgattttttcatggtaaataaattcttggtcacaaatcaacaaaaaagaatattttagggttcttctcaatacagtttaatatgtctctttctcatcgtaattaccatattcatttatttatttgtcggactcattataagaattaaatcggcaggtaataatttttaaaataataatggtgaattagctattttatttaatgtttaggtttgccttccgctgatcagattaattatcgtacgtttcgatcactttgttgcatcatcgcagtgaatattggaggctattttatctgtttgttttttctcactctcatcaagcccttaattccatcaccgatcactgcttggtttgcccactttttgacctcaatcccaatgaacattggtgcggcatcaaatgcacccattttgtacgtcacaaggtattagaataattacttaaattaattaaa

SEQ ID NO: 65681 - DNA, 471 bp, Heterodera glycines
atgaatgacaactcaacgaacaacaacacggtagtcattaattgaaatatttaaaaattacttttttaaaatttttttgcagttttatttggccttcaaagatgtccatcccagctggtcattaattggatgcgcactgatttttggaatcattgcggtaattggcatcattttcaattcttctgtcattggtgtaacctttttaacaaagtgcgtgaaattaatatcgataaaatcttggaaaagcattattaattatttttaattgaaccttaattaaggtcattccgtggcaccgttaattaccttttggcactttgttccttttttgaaatgctccatcagtttggccattttttatttgtttatacagcattttcgggacaaaatttcattgagtatcgtttggcggcaaagattttaatgattcctttgtttgggttaggtaatttactcaaactaataattaaa

SEQ ID NO: 65682 - DNA, 697 bp, Heterodera glycines
  unsure (1)..(697): unsure at all n locations
tgaatggagacgaggacaccaagaagtacaaagggaagacagtgaccaacgagacggtgagctgttcatttatttccaaaaggaattttatttttttaaatgtattttctgacaggaacgctatgaaggagtacgccactgtcgttacgtcgacgaaattctcccaaattccccttggtatgtctcggtcgatttcctcaagcgctataaggtgagaaattcattttgaaataactgttaaaaatttgcaggttagcgggaggaagggaaacgtagtccattctcgccagggatggcaggngcccctcgtcccacgcactgactgacaattccccgtcgattttcagacattcgaatcattcaaaaaaaattggggattagttatttcattttctatttaggcttgatgttatttatgagttttggatggtaattgtcaaccatggaaatggtatcggaaaatttttagatcgatttcattgcacacgatgcacttccctactcggcaaaggacgaggaggacttgtacgagaaattccgtcgcgcggatatgtttgtggtcagtttaaaacgcggggattatgattgggttggaaaagaagatattataagatatgataatggattacctcaaaatttcgccatcgaaattttaaaaaaagaattgaataattctagctttttcgaaattttttaa

SEQ ID NO: 65683 - DNA, 228 bp, Heterodera glycines
atttatcaaaaaaagagatagccatttttctgggataacctctaaatataaaaatcctctgtgaaataaaatggcgattgtgcacagccctccgtctcatacgcaagcgcttttgtgaggtaataaatttcatcaaaaaaagagatagccatttttctgggatagagtataaatttaaaaattccctcaaaaataaaaggtctattgcgcaccgccctccctatcatg

SEQ ID NO: 65684 - DNA, 488 bp, Heterodera glycines
tggcagaaagtgctcaacgaggaagaagaagcggaagggacacagcccgggacagagccgacgaatcagtacatccaaacgacgtttatccaccgggacgcgaatagttggagagagaatcggacccacaaaaatgaacaaccaatgccaccacagatgatgaccgcgagttcgcgcagttcacccgccttatgttggcctacgttcggccccatctgttggcgcttgcccatgtgactgtggacaacgaaaacatcgactgctccgtggacgatggtcatccccgttgtggggaatatccaatggaaaagcctttccattttttggtggtcgaagactcgtaagttggcacaacatttgagtgacataattttttcattttaaaggcgttccggtgccgctgtgtatagcattgaacgcatgcggaattggcacgccggcggaagccgagcgcgcacaatggcacggattgaagctgcccttttgga

SEQ ID NO: 65685 - DNA, 198 bp, Heterodera glycines
ttttttctttttgattattttaattgtatttcatcctgaaattttttaataaacattttcaaactttcaccttattaatttaaggcgaattttgccttttttaataaattctcttgtgaaaaggcaaaaaaataggctcttttaaatatgcctatttaaatgactttaattgctgtcctttcgcttacgaccatacca

SEQ ID NO: 65686 - DNA, 358 bp, Heterodera glycines
ggaattttttttgattttttttttcaaaaaattagcaatttttatacaattttctgttaataaattgccttgaaatttttaaaaatttcccggcggcgcctatcggcaccgccggacctaaaaatccttaattttcttgaaaatatgctagaaatcgctaaatttggccattttcgtggacaaatctgttaacaaatcgcattaaaaatcactaaaatttttccagcggcgcctatcggcaccaccggacccctccccctattacccaaattttctaattttctttggaaatgcgcgccgcaaaaaagggtgtaactgtcccaaaaaaaaaatcaaaaattgtataattacataaaaa

SEQ ID NO: 65687 - DNA, 471 bp, Heterodera glycines
atgggtgcacagaaaaagaagtatcgcgatgccgacgcacggattcttcgtctcgtccaacgctataacgatatcaataacaatattgccctcaaaatgatcacaattatgccaatgccaatgtcaatcccgaaaaccttaacaattttctcgctggtattttccgaaaaatgagatgcgacctagtttgtcccggattttgttattattataaagatgaattttctacaaaattttatgaatgggaaacgaaaaatgataaattttggttttattagttcttaagtttttctatttgaatctgacgcttgtacaagaactcgtaagaaaatgtcccccgtacgaaaacggcggtatgaaaacgaccctgaccgcttgcttggtaatgaaaaatttcttcagctctcattttaacaagcgttgtgtaccgctataactgtaaagaagtcatatttttagaatctgtattga

SEQ ID NO: 65688 - DNA, 520 bp, Heterodera glycines
atgactaccaccgatgagaaacagcttcaagtggttgttgctggcaatgagaagaaacaaaataagaaatcagaagtcgtggcagccaacgagaagaaacaaattaagaaatcggaagttgactttcccgtggtattgaagcgtggggtgcagggacgtggtctgtggtttttggcaatttgtgaagatcattggtcccgaaattttttaattaatttttttttctaaaaattttttaaacacttttataggggtgttttgaggcgctgagcacgaatccggacacaatttcggccaattccgtatccctaacctgaactcgaacatttttcgagaattaaattttaaatttttttaaaatttctcttaaaacattgttttgtgttttcggggtcgttaaccttagacaaaaaccgtttcaaaaccaaaaaatggtcaatctgtaaagatacgaacaaaaaatgaattttcgattttttgttcgagttcggatccggtattcgaaattggtcaaaataaa

SEQ ID NO: 65689 - DNA, 507 bp, Heterodera glycines
  unsure (1)..(507): unsure at all n locations
atggctcaatttcccaaatcattgttccggtgttcgttttcncaagtgagcagaatttgtctcacttcgtcttgaaggtgtgacttaaacgtagattcctcatgattcgctccatgcatccgctgctgcctcattggtaacattttgtatctttagtgagctcttaaaaatgtcatgtacattgactcaaaaaagttactattgccacaattgcaatagccgcgccggaccccgaacccggattcgaacatttttcaagaaataaaatttttttattttatggaaaattgcagagcgtcaattacataatagtgaaaatgactttcaaagcgatgtcacggaccaggcgagtatttttgccaagttattgtgataaatatatggcaatcgcttagatcattggtcccattttaagaatttgggcccaaaacgtgcaaaaagagaaaatttattttttcggatacttcttaacacaccgtccgaaaaaacgagatgtgtaccaataaa

SEQ ID NO: 65690 - DNA, 76 bp, Heterodera glycines; identical to SEQ ID NO: 53815

SEQ ID NO: 65691 - DNA, 185 bp, Heterodera glycines
atgttgcaggcaccgacagcaccaatcgatgtaaattaaaattgaaaaaaatcaaaatgtaaatgtaaatttatatttttttttatttataggcctcaaaatttgttgcctatgtgcatgagagacgaaagaagaggatattgttcaaaggcgaatttttggtgaatttttatttatttttttaa

SEQ ID NO: 65692 - DNA, 703 bp, Heterodera glycines
atgtcgacgagcaaaaggggaacaattacccgtaccgtattcagggacaggtaaatcggacttaccctttttaaactaattattttcgttttcagctataaattgattccaatcaaattggcatcctttgtgaagacctttggcttatcgattgaaggagtggagaataaaaaatatttcccgcacgggttcaacaaggtttgagctaattttaaatattcaaataattattaatttaggcggaaaactacggaaatgtcttggacaatttgccgcccatcgaaagttaccaccctggaagcatgttgccggacgacagaaaggccctcgagagctggtatgcggaaaaccgtgagactcgctttgatctgcgagaggtcatcgccgactactgtaaaacaggtaaaataaataaataaataaaataatgatttcaacatttagacgttcaaattcttgcccatggactgattaagatgcgtgaactcttcacccaaaagacgggtgccgacattacggattcaatcacaatcccggtaatttttttgtattttatttaaataaatcaatatttcagtctgcttgtatgaggttcttcgtgacattggccatatgggaaatgaacgcattgctatcgttccccacttgggatacgagaagcgagggaagcaaagcaccattgcgcggaaatatctcaaggtaa

SEQ ID NO: 65693 - DNA, 531 bp, Heterodera glycines
atggacgaccgaagcgacgcattcattcggccgacagccgaggcacagaggcggaaaatcgccgcgccaatgccatcggcggtgatgggatgtcgccatgtgaacggacaattgaatttggccaattactgcgatgacttttggccattaaacggtcagcctaatcggattcgcactttcattagtcctcgtcccatcatcgattggcaattgccattctttcgaattaatttccattcattttttcagtgttccgatcgattgctttcgaagtgtccaatcgcaaggaaaagaaagggaagggacagctgtcctcggaagagtttttcactgatctgctgattttcacgcacttcccatgtttttgcccattcaccgcttaaaacaatgggcagcgatcaatgcgatgaactgatcacacccccgcgggttggcttggatcatccgcggcggaagacagatcaattccaactcattttttctttctctctgtttattcgttttatgtatgtttcttccttacaaattaaa

SEQ ID NO: 65694 - DNA, 88 bp, Heterodera glycines
atgacctcgtccccctctgctatagccccggcttttcatccgctgatccacccaccaccatcagaagcaggcagaaagatcacacaaa

SEQ ID NO: 65695 - DNA, 80 bp, Heterodera glycines
aagttctagttatggaccgcttatacagacgcgttatcgaatgttggtgactaatttgtcatcacgctgttcatggcagg

SEQ ID NO: 65696 - DNA, 3913 bp, Heterodera glycines
atgcagcaacccgtaccaatgagagccgtgccacaattcctccaccctccgccaaatgctccggtaatcttgagtctcgttttcggttgttttttcaaaatcccgagtgcattgtttttcaggaaattggtgtgggaccaattcatgatgggcaacaaccactaccactaagagcgttgccacaattcgcccaacctccaccaaatgtgccggtaattttggctcgtttttttgttgctttttttaattcccgaatgttttttcaggccgttcgtgtccaaccaattcaacaaccgataccattgagagacgtgccgctatttgtcaacccaccaccaaatgtgccggtaattttggctcgcttttgttactttttttcaagatcccgaatgcattttttcagataattcatgtccaaccgatgcctcaaccgttgccgttgagagacatgccgcaaattcaccattcaccgcgaaatgtgacttcaatttggatcaaattgtggttgctttttctcagtctctgggtgtttcttcagggaattcatgttcgacaaattcaacgggaatacgccgtaccgcaatttgctcatccgccgccaaacgtgccgtatcatccaccagaaaacgttccggtaatgttgggtcttgtttctcatatttccggatgtttttcagccagtgcaaccacggcaacgaccgcgccagctgagagacgtgccactattcgaccacccgctgccaaacggacaggtaatttcagaccctgtcttttacctaacaccgaaacatcttttcttaagcaaatgcatcccaaccccccgagagtgctggaagtgatccgacggctgggcgagtggagaggaagaccaagggacccaagacgtccgcctcaatgaatgaatggaatttggattttgataaaatttgttgttttaatttgttgaattgataagggttaaatcccgttacctaaattgtttgaaaattattaaaattttaagaaattagatgctaaacctaacctttgacaaagattatgaaaaaatgaaaagaaatgacgaaatttttggaatgttccttctttttattatctatggattttttttcatgtgcattattttggtgttagtaagatattgccgaatgaattaattggttttttctcttcattttaaaacatttcacgtccccatgccctgcccacttcccgcggaactgatcaaggaaataattgacgctctcccccctccaaaaacacatcggcttttgcacgtaaattttgttttggcatactttgttaaatgtcggttttattccatgatgagaagattgtttcgcccagagcatatatcaataccaatggcccgaagaactggaatttatttctttttcgatgttcttactccccctatttattttccactctaccaataataacatttaaataaaattataattttttattttttatttgattaatttcgatcaatattttttgataattaaacaaattgtatttttcaaaaaagacctttctcgcagtagcaactcatcggcttttttttactcccttcataaaatgtctcgcttttgccccctcgcccaaatcaatgaatcgggtcggcttaacacaccaaaggggaaatttagtgagttccaaacctatcaaattaaaaaagaattttgatattcgttttaggtcttttttacgctttggaaattgctcgaacctaccaactcatagggaaaagtataacggaaaacaaattccgttatctgatgaagacggagaagaaacaaagggaaatggccatggaattgatggaaaaggcagggataagcacagatgacaaaacttttggtacccaacaccttgaggctgtacaaaaatactgggacagggaattcccggatatgtttcgcattgtggcttttgaaatggtaacaaaattcgcttgaaaaatataaagttacatatttttagaagaccgggcttaggccaattttcaagggagagggtgttcgtaaaaatgaagtgggtgtgataagagaaggagaccattgggatgggatcaaatcggcttcttggttttttggtgttcgatacttctgtgtcagctgtgaagtgacgtacgatcgacctgaaagacacagaatggagtgtaaggaacgctgcaaaaaatgttgtcggatggggttcgggtttccatgtacggatgtctgcgatgagattcactgcggtgaatgcaatcttaagttctacaacccggaatgttttgaagcacataagaaggcggcttgtaatgagtacaaaaagtgtgacaaatgcggagaagtttaccaaacacgttcgaaacacgtgtgcggggaaaaattttgcaaactgtgcaaagtttgccacccagggcggcaatgtttcatcaaaaaaattcaagtgcgaccgcagaaagcctacagaattgtggcctacgatctggagacgactgtagatgggggagaacaccggcctaatcttgttagtgctgcacgtacttgtaacatttgtgcgggagaagagcgggaatgtgagatttgtgaaggccccagtaaaatcacatggtcagtagcggatggttttgacccaatgagcgagtttgtcgtttggataatgggttttcaacgatttgaaacgattgcttttgctcattatgctgggagattcgattcccactttgtcttgtcagagctaacaaagaaggaaatcgcgacggaactgatgatggctgatttgaaaatttatcaaataaaggcgggaagagtgtactttcgggatttttggatgcttagtcagaataaattggcggaccttccaaaaaccttgggcttaaaaactgcagctaaattgtattttccacacaaatacaataagaatgagaattttgggaagagattatccaacctgccacctttggaagactattgcccggacaatatgaaggaggaagaagccgtaaaattggaagcatggcacaatgagaattttcaaaaggaatttgaactaggtagggaaaatagcattttttctttgaaaataaaatttaaggggaacaactcaagacgtattgcgaaaatgatgttgaaattttgatggaatcaattttgaagttccggcggttatttttggggataacaggagatttggatgtgatgaaggacagcgtgacaatcgctggtgttgtgatgaagatatatagggcaaaatttttgaaggacaggcatattccgatcatgcctgaggtagggtatgagagagcagagaaccagagcaaaatagcggtgaaatattttgagtggttagcccaaaaaaagggagtaaaagtgcggcatgcgtgtaacggaggagaagtggaatttggtggtctgaatgtggactgtgtgattggggcagagaaaaaaataattgagtttcaggtaaaagaaaaaatattttctttttaaacaatacttaaggggtgtgcatttcacgggtgtccgagatgttttttaccttggactatagcgccaaacggacggacaatggaagagaatcaaagtagaaccgaaattcgcatggaaattttgagggaaaagtgcaaaaatttttcaatcggagaagtttgggtagaataaaacatttagaaatatttttattttttggtttataggagtgtgacgtgaaagaggaattgaagaaaaataaggagatgaaaaagttctttgaaagtgtgccggacaagggaccgatcaatccgagggatgcttatgccgggggaagaacgatgccattttgtttgtacgcaaagactaccgaagaaattgagatatcaatgttcgacatcattagtttgtaccctttgttaattatggtaaaaatctgcttgcttttttgttag

SEQ ID NO: 65697 - DNA, 303 bp, Heterodera glycines
aaaattccctcaaaaataaaaggtctattgcgcaccgccctccctatcatgctcgagagcatttgtatgtgtataaaatttatcaaaaaaagagatagccatttttctgggataacctctaaatataaaaatcctctgtgaaataaaatggcgattgtgcacagccctccgtctcatacgcaagcgcttttgtgaggtataaaatttctcaaaaaaagagatagacatttttctgggatagagtataaatttaaaaattccctcaaaaataaaagtctattgcgcaccgccctccctatcatg

SEQ ID NO: 65698 - DNA, 383 bp, Heterodera glycines; identical to SEQ ID NO: 51114

SEQ ID NO: 65699 - DNA, 919 bp, Heterodera glycines
atgcaaataggctacggtagagcaccagcagcagcagcagcagcaggtaattcacagcggaacaacaacaacaacaaagatgacagcggcggcggcggcggcggcggcagtggtaatgaccgccgaagcgaagcagaaaacaacgccagcaatccggaagctgatgatgatgatgaaaaaggcggcgctactgctgaccaattgtatgaagagaagcagcactatgtgcatcggctggagcgtttcgcactgcagcggcacgtcaccgagtttgtgctgaacggtcagcatgagaggccggacgaggctctccgcgacgcatttgagcgcatcatcaaacgagcaatacgcaatgcggagcagcagcagcagcagaacgaacagcagtctaggaatcaggaggaggagcagccacaagacggtggcggcgccgctcaacaaaacccaagacgacgagtgacaaagattggaatttttctggatggaaacggtactcattttttttttttggcaaatgtccccatcgaacatccatcatcatcatataggcctgactgaccctattgtgctaccgatacggccacctgagcagaacacagccgacactctgatgggtgaactggaaaagctgggacagtcggacggagacgaagacgtgcatggcggaggaatgagcaagcgatccctgttgctcagtgaaccggttcaaattgtcatcacctgcattgcaccgccggttggagcagctccgcgcttccaccattatcagcactggggttacaacgagaggcagttgatccgaatacggaatgtcggtgaccatttctgcctgttccacgcgttgattgccgcccgttcttacactgatcatgacttgacaaaaatgattgcaacacaacaacaatgccaacaaggggac

SEQ ID NO: 65700 - DNA, 141 bp, Heterodera glycines
atggcggacaccagcgccctgtacaacaccagcgacatcggcgaacgcaaatggctgctcgatttgctgatggaggagtcggacccggactcgggcggcgaggagcacatcacggagcaggacttgaaggaaattgtcaag

SEQ ID NO: 65701 - DNA, 1037 bp, Heterodera glycines
atggcatccaaaaaaccacaggaattgggcgtagcgatgcgttcgttgggccaaaatccgacggagcaagaaatactggaaatgatcaacgaagtggacattgacgggaacggacagatcgaattccccgagttctgcgtgatgatgaagcggatgatgaaggagacggactcggaagtgagaagccaaggggaggaggggaattaccaattaattagggggaacaaaacaaacaattagaggggaaattaagggacaaataggcgacaaataaggaccaattaggaggaggtaagtggaccaagaactaattaggtgagggactaattaagggaagcaaattgaccgccaattaattaataacaaataattaatgaaaacaaaaggaccacaatcatggattaatttattttgcatggacattgttcagatgatcagagaagcgtttcgagtgttcgacaaggacggcaacggagtgatcacagcgcaagagtttcgctattttatggtgcacatgggaatgcaattcagtgagcaggaagtggacgaaatggttggaatttgaacggaatttaaatttataactttggctttgcgttgaacagatccacgaagttgacgtggacggagacggagagatcaattacgaggaatttgtgaagatgatgagcgatcggtgaagaatgacaaaacagcagacccaagcggaggaaaaagaagaagaaacatatcgccaaaagcgccaacggtggaaaaacgaaaaatgaaacggacggaaagaaagcgccggtcgaaaaatttaaattttataaaaattttatcaaaatacatattactacctaattgattgatggtggtgttaagcatgaaaatttgaaagcaaattactaatttaaaggaaagaacatccgtttttcattgttacaattaaacaccacaattaattaattgatcaattaattaattaatgtttctcccatttttgtctgttttttcacattccatttaaatgaattatcaaaaaaataatttgataa

SEQ ID NO: 65702 - DNA, 2736 bp, Heterodera glycines
atggtgaccattcggcgggacgtatcgatcttcgcaccctacactgctcacgagagatagttcatagtgattggggagagagaatacttaaattaattagggggtgggcaattagagtaattggaatgattggggagagaaaacattgaaattaattaggtggtaatcgagtaattagaatgattatgtcaaaactacttaattatttgaccatctgactgactggtcaattaatcatttacattcgcataactttttcacgttcagatcagtgttttctcctgccgaggcggtcagtgatcaatcactttttgagactcaaaaaaacgatcagaaaatatttatcctggaaattctgattgacaaatttagtgaagaatgagctgaaattgactgaagaggtgcgccgtccatttcgttgtcaaatttagcaaatattttaatgcttttaggacgtgcaaattgtcaatgaaaaaggcaataaggtaattaattaattaccgagtaattaattaattgattgtgcggcagtgattaattaacctttgcaatcattcaaaggtttatttcataagagcacctggcaattactcaattagcttcaaacgtatcaatgtgctcaacaatttggtgggtgatgtcaaagtttcaaatttattgaaaattaaaaatggccataaaataggcccatctgagcggagagttgggcatcactttgcaagtgccaatcctcgaagggcccgccggtcagtcaatttctgttttggcattccccttcgaaattggcatttttcccccaaaaggcattcggtttgatgttccgtacacaatggttccggaaacgggtcttttgaaccagcaatgtgacgaattcagtggcattgtggagcgcgacaaacggcagtattggtcagtgaaaatgccaatgccaatggaacgggggaaaatccaaaaattgccattttttataattgaaaatgaaaagactctcatttgtcagttccactttcttccattaagccgttactgcgacttgtgcggactgactgatcaaattgagaatcgattaacccgcactgattcggacggtcaccgatttttgccggctttggcggcgggcgaagaggcgccattctcaccgcggtgcgaaaagatcgacgcacgcacttacgaatttcgtcggacaataaatttaccgggaaggcgcgagttggaacaaaaagcacggcagaaaatcagcggagtggacgcagaaattcggaagagactgaacaaaggggtgagaatagagagggagtgttgattgagaggagggtggcagagaaagagagcgacgagggaggcatgggaagaagatgatgagagagaaagagagtgacgagggaagcaggggaagaagagggtggaagagaaagagagcgactagggatgcttggggaagagaggacgaaggaagagaaagaggggaacgagagagagagaacaggaaacttgcccaggggtgaatatcaaattgtgaccaatacgattattggccccgaaaatttgtttagcgaggccgtttccaagtgtttctgaatctgatcagtgctgatcagccgccgatcactcaaaaggcgtggttcgacggctccgaacaatgccgctgctgcggccgcgacaagtgagataatctaagctaggatgactgatcagtgaatgactgccgataatcaatcgaccctaccgatcacccctagggacccaaagtgccacaaattgccattctcccctaaattgccattctctcccccaaggatccaaagtgccacaaattgccattctctcccccaggaaccaaaatgccacaaattgtcattctcccctaaattgccattctctcccccagggacccaaaatgccacaaattgtcattctcccccaaattgccattctctcccccagggacccaaattgccattctctcccccagggacccaaattgccattctctcctccagggacccaaattgtcattctctcccccagggacccaaattgccattctctcccccagggacccaaattgccgttctgtgctttctttcctctactgcaatgtcgaagactgcaaatcagcttatgcgcagcagtgccttcacaattcggcaagaatagttgcctgttatacggtggaattcaactacagaatgaccacgcggagggacgaagtccaaatgtttctacggtaaattaaacttcggcgttttgctaatgccccgcctctttcagtgaaaacaattaccctgatcaggatgccccgggcactgcgccaccctcgccagcgacaattagcgctaatgagtgcgataattaaaaatgaataaatattttttaattgctttcattagcgcgtcttcgagccaacgaagcgcggcaccgccgcggttaaatgtaatcggagacgaacaaagggcacgccagccgaaggagctgagcacgctctgtgtaattaagtttaaaagattaattatttttttcagtcccattttaccgtatgctctttccttctccaaaccgtatactcttttctttttgcttttattaccgtatccaatgtcccttctttcatttcatcctcataccgtacccctttttcaggtctctcaaatggaaactcggcttacgcatttgcgccgttactgtacaattttttggaatgaaaagttgtgctgttcgcactgtcccggcatttgt

SEQ ID NO: 65703 - DNA, 682 bp, Heterodera glycines
atggccgcgccaaaatggccgcgccaaaatggccgcgccaaaatggacgcgccaaaatggacgcgccaaaatggacgcgccaaaatggccgcgccaaaaaagctcgcgccaaaaaagctcgcgccaaaaaagctcgcgccaaagtgggcggattgcgaaataagtaccaaaaagtcacgtgacgattgcgaaatcaatagggatattacgaaaaagagaaccaattaatcagttttgattgacaggtgacctaattttgggaccatattgcgaaatatttggaccaaaaaaaagtcacttgaagattgcgaaatgaacagggaaattgtgaaataaggaaccaatcaatcatttttggtgataggtttgcaaaattttttgagagttttttccgtcctattttatttattcattttcaattttatttttaaattgaatttaaataattaatttattgtcaattcattaatttatttatcgtgctgccattataaattaaatttgcacttacaattccattatcgattaatttgcgctgcggcggcatcgcggcgcggggcggggagggagggcggggagggggaggggatgataaaaacgcacggttttatcaaattttcgaaataagttttaatttcaggatcagaaaaacatcattaaaaaaatctaatgatttgagaaa

SEQ ID NO: 65704 - DNA, 639 bp, Heterodera glycines
  unsure (1)..(639): unsure at all n locations
atgagttcgaatgccaatgaacagagcgatggtttgtcgttgtgtcctttttacattttaatttaattaaaaatttttaaattaaataattgtccaaatatcaaaaactatgaaaagcgtaattttgcagaaatattcgccaccatcacaatccatgaccaccaccaaaaacaacggaatgagcagcggcaaattgacattcggctgatgcgtgccgaagaagtgcaagcatgtgccgaaataatacgagatgcttatttgggtagcacagcacaaaccagggatggcatggaattccgacttccagtttctggcatttttggtgtcagaattccgatttccgagaaattttagatataggacttccaatttttgaaaaaaaaaaatcggaatcgaatttttttttttgacaattcaaaatgtttaatttaaaaatgtgaaaaattttcttaaaaaattggcctaaaatcgcaaaaagttagcaattttcttacaaatgtactaaaacaagttaattgatttgaaaaagatgatgaaaattattgaataattttttcaagcaaatatatataccaaaatatttttgaaatttcacctttcactttttaatttatnnggttctattttaaaaattgccta

SEQ ID NO: 65705 - DNA, 1312 bp, Heterodera glycines
  unsure (1)..(1312): unsure at all n locations
atgaccgaacacaacttcgagcagattcgccggactaattcgtcaattatacacgaaggaaatgtgcaattcgccaacgaaatggatgaaaacgaaattcggcgtcgacttcttaaagtaatgatgagacaagatggaagtgcagatttggcgagacatggcaatcagaacattggccacggagaaaacgaaaggccactttttgatgaggcccaacggccagcaattccgcgacggacaccaccaaatccacactcattgatgcagagtggcaaccaaattcatcagcgacataacagtcaaaatattgccacaattaaccatcggccaaacggattcgaagacaacgagcgacccgttccaaatccagggcttatatttgacggcatgatggcacaggccattcgaagcatggatggtttttcatacacaatgacgctgaacacaattccgaatttggacggcagtagaggctccgattcggtgaacgcctttttcaagcaatttgatattgcgaatgaagaatggcctgaacagaagcgagttcgggcgctgcgttccaaatgttttggcaaagctgagagagctttcaattccgcggttgctgaaaatcgccatgactaccaactgatcagaacatcgatcattcggcaattggacgacacggacgccaaacaattgacggcgtttgaccaactgatcaaaggagtttggcttcggccgaatgaaggcattgatcagcttggcgaacgtgtttcgcgcttggtccgttgtgcatatccggggctcagcgaacagctctacgacgaatattcggccatgcatttcattagggcactccctaactcagaattggcaatgactttggagatgactcgtaaaccgggtgcaacattcgatgagttcatcgcacaagcagcacgagccgaggcagttcaaaatgccgcacgaaattcttggcgaaacagccaaaacaacggctgtttccaaaaccaacgaaggcatattgtttgctataattctggccgagtcggacacacttctcgaaattgctattcacagccaacacatcagacgcatcagttcagtaaaaactgcaatctccggtcgacaccaccaccactattgaatcaacaaaatgacgaaccgccgaaaaagggaaatttgttagttggcgccataaacttggaacaccgtcccgagattgagaaattcttcggaaaagcaacgaatgagtcggataagggtcgatttttggaagaaagcccggcggntggtaaaattttggcgaccaaagtttccggtgttggac

SEQ ID NO: 65706 - DNA, 478 bp, Heterodera glycines
ccgatcatttggcacataagcaaaatgagcagaaggaactttgggttaaagttgacgaattggaacagagacaaacagcggattcggaacagtggaacaccgccaaagaagggattctggtgaaaattgatgaggtcgacacgaatgggcaatttaattttaattagaaatatttaaatgatttcttagagatcgagccagaccggatccggtaccggattttccggaatccgttccggcgattttttggaaatagggattgactggattatgagagaccggatccggaacccggtcgtttttgaaaataccagtccggtctggtccgacagatttggtaatctcagtctctcatatttctattgatgattccaattttgttcagcggttgcttcaagcggagttaaagcatcagaaactgctgaccgaacacaacgcactgatggtgaaagtggccgagatggaaaaggaaagaaat

SEQ ID NO: 65707 - DNA, 60 bp, Heterodera glycines; identical to SEQ ID NO: 52045

SEQ ID NO: 65708 - DNA, 721 bp, Heterodera glycines
atgcgcgacaacggatggactcttcgccatgtggaaagccctggcggcgagtacaaacatggcaacttcctgctggacggcatgctggagcggatcggcgaggacaaaaacttggcgattgaagtgaacgggtaaagaaacacttgccaaacttatgctaatttttctcccttcaggtgttattggcacgcgtgcccgcactgcttccccgaggatgacgcaattgttggcggtggagagacggccggtgccattcgagcgagggatgagaagaggattcggcaaattgcgcgggatttcgaggtggagatcgtgtgggagtgccagctcggccgaatgctggaagtggacccgccaatgaaggcattcttcgacaacacgcccgactccggcccgattgacttccatgatgccttcttcggaggtaatttttcccatttttagttaaaatatgcaaattttgtttacaggtcggactggcccagagtggctcggagcatcgatcatcccggacaaagaaggacaggctgggcgaaccatcaaagtcaaggacttcaacagtctgtacccgtccaggtagaaaataaattaaataatcacaaataatcaataattaaggaacatgttcaccaactaccccgtcggtcatccaaaggtcatccaaatggacaagggacgtcactggactgcgaaggacacattgtggacgacgacggcgtga

SEQ ID NO: 65709 - DNA, 1502 bp, Heterodera glycines
atgccgccccaatcgaaggaaaggcaccatgaagtcaacatcgatgatgccaacgttcatcggaaatacatgctgatgcgcggaacgggacactataaccttttttactacaactgcaagcactgggctgaagaatttgtgataaatagtgagtttaattgaaaacattttaaaaattgaaaagtctattaattttttgaataaattcagttttggccaagactcggaataaggacgaaaaatgtggctgtctgcagtttcacttccgggcaaaatcaattgaaggtgaggaaacaatataaaattgaaagtcgtcaaatcttagggcaatttttcgaattgaaacaaaaatgaaaagcacattttgtgttcagaaaaattaaggaaattaaaattaattctatttaaatgtaaaatttcttgcaaattttcagctcatcgaaattcccgtgattatgtcaaccttgtgcgatttgagtgcaccaactgtcggcgcgagaatatgatcatcagcatactttatacagaagtcggaaaaggaactcggtaagtaaagcacattttactttctctctcactctcttcttttctcctttgactctctctctctctctttattcttttatctctcccactctttctccctctcttctcattcatgctggtatgcacaatgtttctctctcccccttctcttcctctctcgttccactccgaaacgtgccaactccgtctgagccaactttgagtcaactttttaaattgttgactctttgatatcattggaaagctcttgacaggctctattagcctaccaataattacagagaatgtcgaactgtaaaaaattctcctcttcttttcttccctctatttttattttctgctcccttattgtctcccgctccctttctctcctgtcccttttatcccggcaaaattttatatttatttatttttttgatggggctgttatgtcgatcgttatgccggacaaaggcaccattatattgacatgccttttaacgaccttcgagctgtttatgatgcgatgccggaccgggagtcgtatgctaagcatcactacgatacttttcattgggcgagagccttttacaagaaaagtaattattttgaatttgtagcgcgtccctacattttcggcccgacttttacggctgtacatttttgacctgttggaaatcgaaaattaacgccccacgccaaaatcggattttttctgccaacggaaaaaggatgataatttggcattctgttggtcgcgaaaatcagattttggcttgggccgcaaatgtcggggccgcctccgattggcgtgcataatcaattttcatttaaaatcgattatttaatgtttagttacggggttctggtgatgatacaagccgagctttggggcccaatttcaaattcgaattggccagtcgctgatgaaggacatttgatcatgttatgttttctttgattttttcttttcatta

SEQ ID NO: 65710 - DNA, 159 bp, Heterodera glycines
atgcacatggtttctctactgctcatcagcaccataccaatgctgcttctcatcgtgttcacagctgtaattggggcgcgtgtaatcgacggaaccaccgccatggatttgttggctggcgatagcgaattgaaacaatcgcagtcaaaacaatttgca

SEQ ID NO: 65711 - DNA, 304 bp, Heterodera glycines; identical to SEQ ID NO: 55978

SEQ ID NO: 65712 - DNA, 287 bp, Heterodera glycines
aaaggtctattgcgcaccgccctccctatcatgctcgagagcatttgtatgtgtataaaattttatcaaaaaaagagatagccatttttctgggataacctctaaatataaaaatcctctgtgaaataaaatggcgattgtgcacagccctccgtctcatacgcaagcgcttttgtgaggtataaaatttctcaaaaaaagagatagccatttttctgggatagagtataaatttaaaaattccctcaaaaataaaaggtctattgcgcaccgccctccctatcatg

SEQ ID NO: 65713 - DNA, 1493 bp, Heterodera glycines
acagattggaatttgcagtgttttttacgttttttgtgcaaatcacataaaagaagtgagtaaccattcactgatcacccatcgaattggtcgactcaaatggccaattgtttaatcactgctgatcatccaaaagtgacagtggaaaaccactgatcatccactcccaaaatgtccaaataatcagtcactgattaccccaaaaatgacaaagtgatcggtaattggtcgtccaaaagtggccaaataatcgggcactgatcacttttcaagaaagtgtgaatttttaagtttgtcgactttgaattcccttccttcacttatccgaaatacatctggatgttctccatctttgtgcccatggttctgatcacttttgtccgttctcttcgtgccattgccgtgctcagttccattggcaatgtcttttgtattgccgcgctcacttttattttccaggcaaactcttcaaattatatatatatatatatatttatatgtaaatattaaatattctttctttagtatctcttccgagcaaaacaccaaaatttgtccgactttccctcaaatacaaattttgacggcgtaatggccgcgtgcggtgccgttttatattcgtacgaaggacaagcgatggtaaacagagaattgaaaaacatgaaaatcatttttaatcaaaataaacaattaaaaacactcacttttatatgttttttaggttcttccgcttgaaaatcgtttgaaaaaaccgtcacaaatggtcggtttctttggcattctgtccgttggcatgaccgtagtcactgccgtatattccgcctccggcgttctcggttacatcacttacggctctcaagtgaaggggagcattacgcaaaatctgccacaaaatgaaatgttcgaccaaatgccaaattggcgaaatgtgcttattaattctaaatgatttagccaatttgtgatcgtccgcttgcttttcactttggtcatgtttttcggttttgctattcaaatgtacgtcgtggtggaaatgctgtggcccgaatttgtcaaatttctgcgcaatttatgtccaaattttggggttaataatgagaatgatcacaaaaatatggtcggcattgaattgctcttccgtgccgcgctcgtcaccgtctccagtgagtggtgccattgtcttccttttaattgcctttaattgctcgttcaattaattaccccctccttacttccaagtgctaattggcctcgctgtgcctgaattagagaatatcattccgttggttggtgccaccgctggaatgcttttggcactgattttccccgctcttctcgaccttctcgtttttctgcccattcatttacaacggcacagaattcgtcaaactttttggcttctccttgacaattggacacttgtcaccattggagtctttggtttaattgccggactgagggcgaatttgcggaacatttttacaccggcagaa

SEQ ID NO: 65714 - DNA, 1099 bp, Heterodera glycines
atgggccaagaaaagggacaaaacatgtttaggccgagggatattcttgccgatgtaagccgggatttgccgatgtgtcgccccaaaacggaaggcccggcacagtgtgccgaaggcagcagaacgaatgcggcagcccaagcacatacggtggggaagggagcagcagaggaggggcaaatgagcagacaaacgaaggggcaaaaggaacgaatgcttttcagccgtcgattgcgaccaaaacgcggcatgcgttgacactgccggtggttatgagtgccgatgccatccggggtatacggacatttccgagtcattcagtcagctgccgggacgaaaatgtgtggtggcggtgaacgagtgcgaagatcggtccaaaaatgactgttctgaaaatgccatttgtaccgatgccaaagaagggtcagtgaaaggggaagggcggaggaaatcactttgatcagtgtcaaattcactcttcagttacacatgcacttgtaatcccggctttgttgacgcgtcggccaatgttggcaaatacccgggccgaatttgcaacaaaccctttgaaaagttacaatttgacactccgacaaatcaatgcgacccgaatcaatcaaatccatgcccagcaggacaagtgaatggatcgaaattaaaccaataaaattacaaattttaagatttgcaagcaaaactctgccgggcattacaattgccaatgtggcgaaggggcgacatttgtggacggaaaatgccaaatagtcgcggcatgtcaggtgaatgagcagaattaattaggaccgacgaggcggggggaagtgaccgatcagtgagtgagcacattgtgaaagccaaacgatcaggtggacccggaatgtgacaagaatgccaactgcatcaacgtgctcggctcctactcgtgccaatgtaaacccggctttttcgacgtggacaaagtgacgccgggcagagagtgtaaacaatgtgagaaaaagggatgaaaatgccgaaaggacggcagtgatttgtttgtctgaagtgtcaaatgaatgtgccgatcggcacgactgttcgccgttcgccaaatgcgtggaca

SEQ ID NO: 65715 - DNA, 643 bp, Heterodera glycines
atgatgttatactctagccccaaaacggaaaagtaccattgtttgttatgatgactctggcattcagcaggctatgaagaagaagcatttataattttggctacaaaagcgggtctcgaaagcgtagtttttcatttttttataaataaaattaacgcaaaatggaaaaagttatttgctgttttttggaatttaaataaattaaccattaaacaatgtagcttctttgcacttttaatactttgtcatagcactgtttatggataaccaaattttcaatttttttgtcaatttgtaagctaatagaaaaccttagtgctatctaagatagtaatatttaaaactttggttgattttgaacaaaattataggcaaaaatttttattttgatggatttttaaataacctcatacaaaaaacccagaaaacagcggaaaaaagacaaaagcaaagcaaagaatgggacgacggagagaaaatggaaataattaaaaagtatgacgaaatgattcaagagtacaaagacaaaaaaggatttggtggagaaagtaaaatcaaaatagaatgtgccattgccaagcaattgggcacatcacgtgccatggttttcgaatagaagagggaattttgtaagtgaaataaa

SEQ ID NO: 65716 - DNA, 525 bp, Heterodera glycines
aggttaatcccaaaaaaaacggacaatgtcagcgccagacggccccgtttgatgtccgctttgatggcgttgaaaatggagaaaatgaattggtgcaaatccgtctccgccaccgccgccgccgcaccacagcccttttgcacgcattcgttgtactttttgcgtgccttaattagtttttttttttttgcatgagacttttgaagaaaaattggccgggaaatctcgaaaattttgactgacccttaaaaatcattaaaaatccaaatttttaacggccttaaaaatataaagcaaatttttctcttaaatttttcttttggagcaacttaaatttgaatagcgaagcaataagcgaacaaaaaaattattcaaaatcagtggggaaaaaaagatttttttttgcgtttttaaatggccaaattaattctctgaaaattacttggcaaagtgtgtgcagcgcacggacagttgaattggcggcatccatcagttgttgctggaataggcacaaaaagaaataaa

SEQ ID NO: 65717 - DNA, 814 bp, Heterodera glycines
gaaaacaaaaaaatcgattttttcagtgtctgttggggtctcatacattatgggagcaaaaatccaacgcagattaaagtacaggctataggaagctatcccggaggattcggtctccccataaatctgggcgcatcggttcggggggactgccccgaaaacaaaaaaatcgattttttcaagtgtccgtttggggtactcaaacaattatggggagcaaaaatccaacgcagaattaaagtacaggctatagggaagctactcccgaaggattcggtctccccataaatctgggcgcgtcggttcggggggactgccccgaaaacaaaaaaatcgattttttcaagtgtctgtttggggtactcaaacatttatggggagcaaaaatccaacgcagaattaaagtacagactatagggaagctattcccgaaggattcggtctccccataaatctgggcgcatcggttcagggggactgccccgaaaacccaaaaaaaaattttttggataaaaattatttaaatgaactgactagataatatttaaaataggttatttctcttcctttcagtatccctgcaaagtttggtgcgcttctgatcagtttctgaaaaaaaagttaagcctaaactttttggcctgtttaaaaaggaattaaaaatttttaaaaattttattcatctccctttttgatagaaaaagcatcagagtgcctaaactaacatgtaaataaaatttggtgcgtttcagaaccctttctgaaaaaatatttaagaattaattttgcaaaaaataaataaaaacgaaagact

SEQ ID NO: 65718 - DNA, 306 bp, Heterodera glycines
atgtccgagtatgaagtggttgtggagtatttgccggacaaaaaattcggcaaaaagtacattatggtcaaaagaacggacattttggcaacattgaaacacaaaatcagggaggcgtacaccaaggcttacccaacaaaaatgccattcagcatagttcaactcgtcaaaaaatttaaatgtgccgaaaaatgtggacaagaaatgcgtgtggaggatgttgagcaatggtatgatgatgctgacgccgaaaaaaccatggacaaatgtggcattggcgaagggtccattgtgttcatgttttag

SEQ ID NO: 65719 - DNA, 611 bp, Heterodera glycines
atgcctttgcctgttccacacttctctgagctgaaaagcgccaaggaatgcgtcggtggtttcggcatttggcttttccaatttgcaggccttgaaaaaaacagggaaaatttcccaaaaccagggggttgggttggttatatggtatatcaaatgtattacggtcaaaaatgcgtttctgagcatttcattggcaaacacggcgccgtccgtcaggtgcgcaaaccgtgccaatgccaccaccaccggtggggcgttgtcggcgtcgacggcactggcgctgtgttggcccttggcggccaattggtcgcggaccgaaaaattgggaaataattttgagaatttatttatttttgagggattttctttaccagttgataaagtcggcacaacacggcagttttgccacagcctgattggccatggaattggacaaacagtccggcacttttttgccgaatttcgtctctgaaattttttttttatttttttttaaataatacaaaataatttaatcattaaaatttttattaaaagaatataaagcgattttaaattctttgaatattttaattaaattatttttgtattaaatttgaaaaagtgaaaaa

SEQ ID NO: 65720 - DNA, 749 bp, Heterodera glycines
atgtcggtccgcaaatgtcggtccgcaaatgtcggtccgcaaaagtcggtccgcaaatgtcggtccgcaaaagtcggtccgcaaatgtcggtccgcaaaagtcggtccgcaaatgtcggtccgcaaaaagtcggtccgcaaatgtcggtccgcaaaagtcggtccgcaaaagtcggtccgcaaatgtcggtccgcaaaagtcggtccgcaaaagtcggtccgcaaatgtcggtccgcaaaagtcggtccgcaaaagtcggtccgcaaatgtcggtccgcaaaagtcggtccgcaaaagtcggtccgcaaatgtcggtccgcaaaagtcggtccgcaaaagtcggtccgcaaatgtcggtccgcaaaagtcggtccgcaaaagtcggtccgcaaaagtcggtccgcaaatgtcggtccgcaaaagtcggtccgcaaaagtcggtccgcaaaagtcggtccgcaaaagtcggtccgcaaaagtcggtccgcaaaagtcggtccgcaaaagtcggtccgcaaaagtcggtccgcaaaagtcggtccgcaaaagtcggtccgcaaaagtcggtccgcaaaagtcggtccgcaaaagtcggtccgcaaatgtcggtccgcaaaagtcggtccgcaaaagtcggtccgcaaatgtcggctaaccattttgaatttagtttttttaaaatgttttaactaatttaatttaaaaatatttttaattttaaattaatgccatttcaaattataataaa

SEQ ID NO: 65721 - DNA, 363 bp, Heterodera glycines
atggatttgcttttccgtctttacgctaaagacaaggatacacagccaatttggaatgcttttgccgctgaaatttggcccatttttgcaccaaacattcgccatttgaagtttaatggtgatcttgaaaatttgcgtcgccacatttcgccgacaattctctccgacctcaaccaattgaattcaatcaattccgatactttggggcccacggcgattggtgatgatgggccaaatgcaactgatggccaagcgctgtccaaatggttgcacactccgacaaaagatggacagccaaagcaattgtctttttggcatttttctgagtgtggaaccactaaattgctgaacgatttcaaagag

SEQ ID NO: 65722 - DNA, 279 bp, Heterodera glycines; identical to SEQ ID NO: 58736

SEQ ID NO: 65723 - DNA, 273 bp, Heterodera glycines
  unsure (1)..(273): unsure at all n locations
gctgtaaaaaaaatttggggcgatttgaaagagaatagaaagaaccaggttcgatgaagttttggtaagccaaaaaaaatgcaaacatttaaaaatctataaaaaatttaaaaatgagaattcatgcgagattttctggaaataagcttaatagggcctagttaagctgtaaaaaaatttggggcgatttgaaagagaatagaaagaaccaggntcgatgaagttttggtaagccaaaaaaaatcaaacatttaaaaatctataaaaaattta

SEQ ID NO: 65724 - DNA, 917 bp, Heterodera glycines; identical to SEQ ID NO: 36421

SEQ ID NO: 65725 - DNA, 1290 bp, Heterodera glycines
atgccaggagcgccaagtgatgttctttggttctttgatgcggaagagcaaaagatcaacccacggtgggactcgaacccacgaccccagctttccgtgctgtgctctaaccaactagctacgcaggcatcctctccattgctctcttctctctcctatcttaggaggagaatcactctcttaatctccttcactgccgtcttggcacaaggggagagagtgaccgcatttatcacaatagggtttgttcgaacattcatacttggtaccaatttcaaatccttcctcactcaaatttccaaaaaaatttgctaaattattagaaaaattgttaagatcgccaaaattacaggtaatatttagtgaaattaccggtaaccgcttttattctaatatgaaattataaacatacactgactttgaccccattttgcagagtaatgatgatacgcatacttgttcatcaaatccggtattaataaattatagaaattggaaatgattgtttcataaaaataaaggtagttggaattctctgttatcctagaatctctgttttttcttttaatttattttagtttctaatttcattttttttaattttggttgatttttaaattttaaataatcaaatgaatttattttaatgatttttatcgagttaattccacaattttggtgccctcttttttgacacatctggatttgacgggcagcaaccgagcttcgcccgtccctggtgcccatgcccgtatttttgaaattgcactcggacgataggaactctttaaaacaataactcaaaaagtccataaagcccgcagatgcgatcgcgggaacgttatgacgatctataatagatttaaatttaaattttttaggtttatttttttacaatttatcgcaaaaccgttgacatcattgacattaaatatgaaggtaaaataattttaaatgtctgtaaattgttttttgttcgggacgcaatcccgtcccgcatctgctacaggtttcaatgaaacttacagtcattctgatggttctggaattgtttgttctgtttaattgccagaaaagaatagcaaatttaatttcctaatttatttttatttgtatagaaatttccacttttgtcgatgtgccaggtggacgatggagattttggaatggcacttttatacccaaaattggtctccagtgctcgccactttggagcgaattggaggcggagcagtggattttggtaatagattttggtaaattgatttaaaatttgagtttaaaaataaa

SEQ ID NO: 65726 - DNA, 1717 bp, Heterodera glycines
atggaacaatacggttggccacaatttgctggtgaagaagaaaaaattcgtcaagcagttcaatttccaaataagaaacatgtggtggaaagcgtttggcccacgattcctcttcctccttctgccgttccatctcaatcgaagcactcttcattaatagcaatgatatttttaggatctaaaaactgccaaacaaataacatttgggactaaaaaatggactgaaaatgagaacaattggtccaatatgatcgagcaaaatggggagctagagagggcaaggtccgtagttcagctggtagaacaacaatggtaaggaaagccaaagccactgacaccggttaaaagtagagaccggacaagaaggtcggtcggtcggtttcgttataaaaaccgaaaaaaaccgaaaactcaaaaaattttcggtcggtcggtttcggttaaaaaaccgaaaaataccgaaaaaaaccgaaaaaaaaccgaccggtccgatctctagttaaaagccagcccgccccatagtttttccagcaaaagcttccccagctcggaatggggccaactgcgtctcaggcaagtttggaattcgtaacttttttaaaagttgcccaatcgaacaaacttggtatcattcgaaagctcttaacaagctctatcggctctccaaaaatcacaaagattttccggcatataaaaaagttataaagaaatatatgcaaaaattctgacttttttgcggttttcgggttgcagcttttaataatttgttcaatcgattagaataaatagcttatcaataatttctaaacataaagagctttcgattgatgttaaacttttaaaatttgatcaattgagaacaaaggttataacttcttaaagttgcctgagatgcacttggccagacgcatttgcccctaccgtctacagctcatttatatattcataaataaattttttttatgaaaatattgcaaaaaaattgatttttactatgtatttttcaatttttttatatttttcatacggaacgggtcagttccgtcccgccagttttccgtaaataggccctaaaaagtttcagatttaggggtgtttttgggccaaattttttagcttcggagtcgcgttttagaaaaatattatttttttttcattttaaggcacacagtatttttgcctacaaagaacagacaccgtcatatgctttacaacagcgacgctattcacttctgaagaggatggcatccttttacaaaattggaacttccgtgagtaagcagctcccgccaaatgaatttttgtgtcttttgaacaactttatgtgaaaatttatttaaacaattcaggcgcttccttattatttgatttgctttttctttaaatttacacaaaacaaataattagggatgccaatcatatggatggataccatatttttttcctggactgttgagggcctgaagcgcacgaaaaacatgtttttagcttggtttgaagcttgtaggatggatttctatatccatatttttccatatttcgcaatttatgtcaatattttagcattttgatccatattttatgtccatattttggcatttttcaaaaaaacctcaattagaacagcccccagcagctaaattagcctttttgagcccaaaacccgaaaaatttttcaaaaaataattttttcgccaaaatttctcgagaatattga

SEQ ID NO: 65727 - DNA, 1762 bp, Heterodera glycines
atggtaagtacaaaagggaaatgatggtgatggtggtggtcatgtttgtgattgtttgttcttatgccgacctccccccgcccttcccagcagacatcccaaattttttcacttttgaattgccaattgtcagtcaattatggggttgtggttgtgatgcgattcgtccttttcccgcgaaatgctgcgtcactttaattgtttcgtttcattgccctttgtacacagtcacatttaaagttcgcttttttcaaaaatataatttcagataaggcttcgttttctcatttttccgaatgtgccgtactgattgcccttgccctcctcttcctccgtcctcctcccctcctcccgccttttcttcctcggcccttcccttccgtcgttctcaaatgccctccccatcgtttgcaatgttttcagtctcttctcgctttgcactttttctgcccttcaaaagttccactttaaaatcgcttcattcatggtaaggataacaaacaatgcaaaaatcagtttctcttttcttttttttcaatgatctgctgttttttaaattattttttgtttcttttttctctgatttttgtctttttaggcttcccttctttctcttgcgaaagttttcccatcggttgctccatttggttatttcattgacttttattttgacaatttggcacttttggaattggcacgtcgaacggtggaccaatcgaacgacagttattatcgtaagtaattctgaggggcgtcttaccccctcccctttcgcttattaatttttgttttaatttgtttttgattacgcccactcataaacgacctgaacgtcttgcggacatgaccaggttctttttcccttttctctctgttttctcattttggttgggattttcagattttcgcaaactctgatgcatatttctgacctccattggtacaattttagccatcctaaaacgattttcatcgttttactcactccgctgttagggtcgtcatcgaagatgccaatgcgacttcggatgccgttcagcgtatcctcgtccgttccggtattcccttcacttacttctccaccaccacgaagcccggcttccccaaacgcggatggagccatcgcaacgtcgggttggacttcgtccgccaacactacgctctcttccctcacaatggggtcggtccgtctctccgttcgtccgttgcctctctttgcctttgaaattggtttttcttccgttcgcaggtcgtttattttgcggacgacgacaattcttatgacattcgtctctttgagcgctacatcaaaaaagtgagaacgattggcatttgggcagtcggtgagtcattttttgtgccttttaatttttgattttttttttcttaggcctcgccggttctgcgattgtcgaagcgccgcacgtggagaatggcaccatcacaaagtgagttgtcaattcccctcacatttgttccactttccctttcttcagatgggatgtcgtttatgctccaaaacggcgtttcgctgtcgacatggccggctttgccgtcaagtgaatgtgttgccttttcattttgccaattaccctttaatttgattcaattttcagtcttcggctgatcttaaacaaaaagtagtaactgtttccgtcccttcaatttctttctttctttttgcttccctttttagtgcctctttcaatttgggctgtgtccgcttttcgcctgagtcgtgttttcttgcgcaggtaattta

SEQ ID NO: 65728 - DNA, 1093 bp, Heterodera glycines
atgtgtcagaatatgctgctcattctgttcgtcctcctcctcctccattgcgtttccgtcgtccgcttggatttgcgcctgcgccttccaatagccctcgagcaatgggaaattggccattggcacgagagcaattggctgatcagtcgggaacagatcggacagtggcaaaagcagggggaaatcactctcagcatatttggaagccaaagcctccagcgaattgcacgcgtccggcagaagggagcacagagaaaaagaactgaaagggcagagaaataatccaacgaatgaatgaatcatttcgaaattcaccaaaaatcgtcggacaaaaaggcactttgacttcgccctttgtcacaaattcggcccacccaaacggagttttgctccaaagtgagagacaaacgaagggacgacgcattcagtggaggcaaagggcgcgaaaggacaatttggccgaaaacgaaggcattggaaaaagaaaaagggaagggcgaaagaataccggacaaaatgagcaaaaagccgggcaatcggacggccgaatggccctcagagtcgcaaaaggggcgcatattcacatccaaagaagcgagggaaaggttcagcaaacggaagggtactgtacatgggagagggtacggtaaagggggagaggcgaaattcaaaattaaacaatcgccgttttttgaaatggaaggcaagcccaaaatgccgaattgtacctctttctttggctttggttaaatcgctcactctgagcacactttcgctgcattccatcgaagccaaagcgacccaaaaaagagaagggacaaccaaagggaggaacagacgaaaaagggcagaatataaaattggcattttaaaatcggacaaattttatggggggggggggggaaattaattaaatgggacactaattaacgaatggttgacaggtgaggtggctcatctgctgatttgaaaagggcgatgggtcggtcggtgggcttttttgaaaatgcaggagaatgattgacagtccattttcagagagaaaattaaaaaatattatcaaagcaacattaattaaaagaatgaaaataaa

SEQ ID NO: 65729 - DNA, 520 bp, Heterodera glycines
atgccaatgcctttggttcggttggctttcccccgcagtgtctttttgttggccctcttttgccggttcgcctccgccgaattcaggccccatttcagccaatggctcgctcaacgctttggcgaagacgtgcgcaacaacttggagaggtgtgtcgtacgaatttgactcccatttggtgccgttttcagacgcgacctcggcatttggggctcttttggggggcgcaccgccgcggaggagccaatccgaaaccaaccggtggtgttcgtgcacggttgtctgttctgttactgttgcaattcaattggaatgccctcaaacttttgaaggtgtttcaaatcgcgcgtgcgacaaaatgaaacaatccgccgactttttcttgcaagtgccaaaattaacataatttggcaaattgttgttttaaactaaaaacaactacagtaaccacggctacactttttctgagctgtacggtacaacgtatgccaatggggaccaaggcaatccgctacagtaa

SEQ ID NO: 65730 - DNA, 363 bp, Heterodera glycines
atgattcattcattcgttggattatttctctgccctttcagttctttttctctgtgctcccttctgccggacgcgtgcaattcgctggaggctttggcttccaaatatgctgagagtgatttccccctgcttttgccactgtccgatctgttcccgactgatcagccaattgctctcgtgccaatggccaatttcccattgctcgagggctattggaaggcgcaggcgcaaatccaagcggacgacggaaacgcaatggaggaggaggaggacgaacagaatgagcagcatattctgacacattttggcactgaaaattggcattttgtttcgttgggcaatgatttgcatgaagacctttaa

SEQ ID NO: 65731 - DNA, 288 bp, Heterodera glycines
atgactgtaattgcctttattttaccatgggtccaggcaaaggcaaatgtaagcctagaagcattttgcattaaacttttaaaagcaaatttaaattacagaaaatgaaatatcgcaaaatgtccaaaaaatttatgcggcacgaacgggaattggcccgactcagatttgaatgtcgaatgtgcggaggacttgaagattcgtccgggacaatagcatgtttcaagtgaacgcaattcattttaatttataaatcataacaaaaatattgaaattaaattaaataaa

SEQ ID NO: 65732 - DNA, 544 bp, Heterodera glycines
atgagtttatttaagaaatcaggacaaaatttggtcgggtacctccaaatcaggacaaatctgacaaatcaggacactttcattttatcagatttgaaccctccaaatcaggacaaatctgataaatcaggacagatcgcacccctggtttaaccccacttctttccacttctttttaaaccagggcttccatcgaaaaattttcaaaatataaacaccaagcccaaaataagattttagtctcaaaaatatgaacatttagcaacatttttccaatcagttatttttccaatttattcgatcaaattttatatttttagtctcctattatcaattttgataattttggggaggaaaatgcaaaattataaatttcagtaaattcgggaccaaaagatcaaaaaaattttgcggcagaccttaaaatttcttgaaaaatgtgacattatgccataaaatttcaaaactataagtatatttaagaaatcagaatatttagtcactacccccccccccccaaaatcagaatattcttataaataaa

SEQ ID NO: 65733 - DNA, 436 bp, Heterodera glycines
atgagaaattggtggcgagaatggattccggacgagaactcgtcgagaattagaggcccaacatggcggagtgagcagtggcgagatcgcgattgtggcattcatgtcaagcataaaaggcaattaaataaatatttaaatgtaatatgttattaaatttatattttaaaaaataatacaatgaactcggaaatcgacttgcagagtcatggtacaagagcggttcggtgtatacaaaagttagtacaaaaagagctacccatgtgttaagaaaatgtgatcaatttcaaatcattatgataaataatatgaactaggtgtttctaaaagtgataaagcatcgagagtgatagtaaaatagaaatataaaaaaaatataaatagtaaccaattatatggaacaaatattacatttaattattataagaaaaataaa

SEQ ID NO: 65734 - DNA, 279 bp, Heterodera glycines
agcagcgctcattgactagcagctcttgcgttattcaaattaatgctttaacaaccaaatccgaagcaataaacaccaaaacaacaacaacaatcaaacaacaattttttgttgttcggtcattcaccaacaaatacataatttttttaattgcgtaaatccgtgcatcgcaaattgtgcaaaaaagaagaaaaatttgaggaccgaccacaattttgcgttttatcttgcggcctttgttagcaaaatgctgtcacctgaccaattgcctgacgaggt

SEQ ID NO: 65735 - DNA, 959 bp, Heterodera glycines
atggtcattaattattgcaaaatgattaagggcgagttggcggatgtgttgacatcgtttgaccacgaaattgaccaggcatcggtgcaccgagggaagcaaatgtacgcaatatttgggacatttgctttttttgggcattacaaactttttcatccggcgatgtcgacaggcgccgcagcggaaatttttaccgaattaaaaaaaactgcaatccggggcccatcccatctagatggtcctaaatggttttgaaatttgtcattaagaattgataaactgaccggcgccctgtaccttggcgagctgatccgacgcattcttgcccagctggtgatggaccgtctgctgttcagcggcacactcgtggaggcgttggaccggccggacactttccccaccaaatacatctccgaaatacttgggtatgttggtacaaatgctgatttttgataatgtaaggttttacaaaacctattttcgcaattaaaatattttaaatttaattcgaaattcgaattttccatccatattaccgaagaggagagtttaaccaggacagggagtattaaatccgtaattaaagaggccttcttcaattaacaaaaatgagtaactcgcaattgcggtgtacaaaaatgtaataaacatttgtgtaatcacatctaacccaggagtaaatgacacccgaaaaatttgaccagaaaaattatgcaatttgatgtactagtaacagatttcgttctacagttgacatttttaaaactttcttcggtgccgtccgtttttgccggcaccgccggactcctttttttgaacatttcgttcatcaattaattgattgttgtcgctcttttcatttcagcgacaacagcggggtgttcaaaaattgtcgtcgcatttgtgacgagttggaggtgccaagccacgggagcaacgactacctgatcatgcgcgag

SEQ ID NO: 65736 - DNA, 554 bp, Heterodera glycines
ccatttattgtctgttacttttagcccagaatttagttaagcaaaaaatctataaaccaagttttcacttgataccataataaactgagattgtcattgtttgaacgcgtgaactcgaacattgtttaaaatgatcatttctctggaatttttcagttatatatttttgtttattaaagtctcgtaaaattgccaaaacaattcttttcatgtttaagtccattcttcgcaaccgaaacgaacggtcgccaattaacaacgaagaattgcagaaaatgtgcaaaagagatattgtggagtttcttcctactccgaaggaggtaccaacaatttaaagctattaggccttattttaattagattttgggtgatttcgttttcgagaggagcgccgggaacaacagagagaaaaggaagccgaggaaagggaggccaatgtcagcgtggaaaagtaggaaaatggacttgtcgagcagtgacgaggagagaatttaattcgcgaaatatttattgtatttgtttttgttatcacccattttgcaattatttttttc

SEQ ID NO: 65737 - DNA, 243 bp, Heterodera glycines
tttttccttctccttttgtttctctgatcagaccgttgatctgcggcatcaaattgtacacgacgaaaatggtcatttgtttggtccatttttgcgagtggcctcctccacgttgtgttgttaactcctcctcattctccgcctcctcccaccatatatttaattataattatcacaatcgtttttttatcacactcttaacatgttttttgtggttgaccagcaaataaatttttaatctgc

SEQ ID NO: 65738 - DNA, 213 bp, Heterodera glycines
atgcgcgccttcgtctcccattgcggttttaacagtgtcaatgaggctgtccaatttggagtgccaattttggccattccgctacttggagaccaactgtacaatgccattatggcacgtgtgaaaggcatcgccgtacaattggacattggccaactcaacagggagggggccgaacagctgctggttgatgggcttgacaaggctaattag

SEQ ID NO: 65739 - DNA, 65 bp, Heterodera glycines
atggctatctcctttttctcctggggatttgaccgcaaacttggtaccaacatttgccttctcta

SEQ ID NO: 65740 - DNA, 59 bp, Heterodera glycines; identical to SEQ ID NO: 52422

SEQ ID NO: 65741 - DNA, 59 bp, Heterodera glycines; identical to SEQ ID NO: 52421

SEQ ID NO: 65742 - DNA, 59 bp, Heterodera glycines; identical to SEQ ID NO: 52421

SEQ ID NO: 65743 - DNA, 59 bp, Heterodera glycines; identical to SEQ ID NO: 52421

SEQ ID NO: 65744 - DNA, 59 bp, Heterodera glycines; identical to SEQ ID NO: 52422

SEQ ID NO: 65745 - DNA, 59 bp, Heterodera glycines; identical to SEQ ID NO: 52421

SEQ ID NO: 65746 - DNA, 130 bp, Heterodera glycines
atgcaatttttatttacgaaaatcacaatttttatttttgtttccgttgcgttttgtgccaaggattctaaaaaagcaggcgaattggctgttgctttgttcaaattcatctacaacaatgaaaaattat

SEQ ID NO: 65747 - DNA, 454 bp, Heterodera glycines
atgacgaagttttgtgcggtgccattgctaacagcgaatggtggtggtaatggtgaggcttttgaatgcgatgatgagcagcagaatttggcggcggcggcgggggacaatggcgtgaagaatttggtggcagtgggcgcgatgaacgcatttcaaattctataataaaaatagagaaatattaaaatttgaatttgaaaaatcagtgggattttgtaatatttttaaatgggaatgcaaatgaggaggttttcgacatttaaacaaatatcaacagaaaaattgcaatgagaaaattcggaattcattgaaaataatttttttatctgttgccctagcccagaaattagttatataaaattctatagactttaagcttcaagttgataccaagaatggaggttatggccttggaaataggatattcattgtttggacgcataaaatgaactag

SEQ ID NO: 65748 - DNA, 179 bp, Heterodera glycines
cactgccaccaaattcttcacgccattgtcccccgccgccgccgccaaattctgctgctcatcatcgcattcaaaagcctcaccattaccaccaccattcgctgttagcaatggcaccgcacaaaacttcgtcatttgaagcgcccacccaatcggagttgaagcaaatgctggacgag

SEQ ID NO: 65749 - DNA, 405 bp, Heterodera glycines
  unsure (1)..(405): unsure at all n locations
atggccgatgaaattcaacaaaaaattgttcagggaattggtccggattttttttctgtgacctctgatggatggtcgcaaattacaaaatcacccgcactcttaaggttctctattccttttcatagtttataaaaacagactttagtgttactgtacaccatataaatcaacaatttgtacgcgccgattttgtacttgatgtgattccaatgacaaatcacacaggagcagacatagcggaagaaattggaaacgctcttcggacaaatggattaaacccagaaaaaattatttgtttggttcgtgacaacgcaaaaaacatgataagggccacaaatatttgcctgagttggcaggactcatttccaaaattcggtcttggngtactttttttcgtacaaa

SEQ ID NO: 65750 - DNA, 231 bp, Heterodera glycines
atggagattttgttggaagtaattttgggcagttctgtcgaagaaatgacagaagttttgaaggtttattctaaacaatatggtggaaatttgtcggaggatattcaaaaaattggggagaaggcccaagggaaaaactcaaaaggaaaaaatgacactgaggaggcaaaagctgtccgagaaattttgggtgatcggcttcaaaacttgaaggaaagagcggcaattaaa

SEQ ID NO: 65751 - DNA, 1103 bp, Heterodera glycines
atgaaaatcgaaaaatccctaatttacaccgagtcgtacgtcgccggcctttcttccgttggcgtccgtaacatcgggagagcgactgtgaaactaggaaatgtaagtagacgtaatctcgttctggaaaggcgctctcttctggaaatgtacgccgactttttcggtgaacagaatgaattttggaattttgaagagcacttcccatttttcagcccatccagacgaattggtcagcgcggcttacgaaaacacacccgaaaaaaggtgttttcttttcttttcgctggacaaaatcaccctaattcttttacagattccttgccgtcctgaagtactatctgaactccttcttcccggctcgcaaaagtgtcgtcgccaagaagccgtacaatccgattttgggcgagacatttcgctgccgctggacgctgccgggcgtgccgttgaccacggagcggactgccggtggaccgttcccggaattgaaaaatcgcttttaaatagccattttaaacaatgaaaaacctcctaaaaaatgcgcaatttcaatcgacaaattgtgtataaaaggacgaaaaagacaaaaattcacttataatgtcgaggctcacaatattttatagtttatataatttttttattgcaggatcgatggctttcatttttgtttccgagtatttgtagtttttaaacaaaaaaatggatgtcagtcagtgcatgatcagcaacctcgaaattctttaaattattttctaaaataagttagggctgacattcggcgccagcccagtttttggactataactttttctttatcaaccaaatctaacttttggtatcattcgaaagccctaagtgttctctattagagaccggcgcgggacgggatcccgcgcgggattttgcgggatcccagtccgcaatcccgcattttttggaaaatgcgggatttgcgggattaatctcgcgggatcccgtcccgcaaagaattttgagttccaatcccgcagcgggatccgcaaatttgattttttgtgcgggattttattgatttttttgaaaatttttctaagacagaatgccaaatatttttaaataaa

SEQ ID NO: 65752 - DNA, 128 bp, Heterodera glycines
tatggcacggaaagacttccggtttccgacatttttggggtcggaattccgacttccgaaatttttgatgaaaagtcgtaaattttttaatttttttttttaaaaactagtaagttttgtacaatttc

SEQ ID NO: 65753 - DNA, 61 bp, Heterodera glycines
atgagtcagtcatttcgccggcggagggaaggagaaacatttgatggaccaacggaaaatg

SEQ ID NO: 65754 - DNA, 406 bp, Heterodera glycines
atgaatgtaaataaagaagaggaacgactggaaaagaaagtgaccaaatgggctattatgctaaccagtgaagacaaggtgagcatgggcattcctcagtatgggattttgggtaatacataatactgaaaaattgcggtaaaaaggtaaaacagaaacccataaataattcgatggttttgcaaaatctaagtcagattcgcaatttagcaattttttttactggatttatttcagagaaagttttaacttggaatcgcaattctgcaatactaccgggcccattctgcaatattactggattttgaatcttttcttatagattgaacatgccttgaggcgattggatcatgttgagattaacttacaacttttgtcttcgactggttggagttttttaaataaa

SEQ ID NO: 65755 - DNA, 126 bp, Heterodera glycines; identical to SEQ ID NO: 54981

SEQ ID NO: 65756 - DNA, 564 bp, Heterodera glycines
atgctaacgaagccgacgacggcaaaaccgcaacaacaagcatcacaacatcgtcatccaccgtcctcaacatggttaagcaatggccaacaacaacaacaacaacaccaccagccgccgcaacaggggacgcctcctccgccaacagctgggcgggcagcaccggggggaaaagccgccgccggcgccgagaacggcaatagcaggaaaacctcggcaaatccggcactactaccaaagatgtcgacgacaagctcaacagcagcggcggcggtaccaccagggccaaaatcgtcttcaagcagttcaacagcagcagccgtggcgggcggcaggccgaggccgccgccaacgcagcgaacgacaagccgagattcggcgtcggcggcaccggaccgcaaggtgtccaagcaatccagcgggagcaggggaactgcaaggtcggcagtggtcagcaagcggccggaactgcgcagggcggtgttgctggcaaatgcggaggaacattcccacccggacgggctgttcaaggtggtcaatcagtcagaaagcttaattaagtga

SEQ ID NO: 65757 - DNA, 316 bp, Heterodera glycines
  unsure (1)..(316): unsure at all n locations
tcgggaatagcttccctatagtctgtactttaattctgcgttggatttttgctcccccataaatgtttgagtacctcaaacggacacttgaaaaaatcgatttttttgttttcggggcagtccccccgagcgcgatgcgcccagatttatggggagaccgaatccttccggaatagcttccctatagcctgtactataattctgcgttggatttttgctccccataactgtttgagtaccccaaacggacacttgaaaaaatcgatttatttttgttttcggggcagtccccccgaaccgatgcccccagatntat

SEQ ID NO: 65758 - DNA, 1006 bp, Heterodera glycines
atggaaatatgcgaagaacggcaaaatgatcaccaaaaaattgatcaaaaattcacggggacaatttgcaaaacacctttttctgctgttgatgaagggacagaaacaatttcaaacggtggaaaatgcagaccatcaatttcccaaccgaacgcgaaaaagttggaaaaaaagaaaaaatatttaaaaaatattaaaaataaatttagaacaacacattcggaattgtaaagaaaaggaagaaattgtgaacaaatttagacaaatgaaaagggaatttgccgcggcaaaagacaaaagaccgtacgaagaaattaatagggaaattgcgaaggaattgggcgtaagcattcgcacaatttcactgtggcaaagggaattgggagtcggtaagttaaaataacaaattttaaagaaaaaatttaaaaattaacaattttattttcgctaagaaatggtatcatgggcttttcgtggtgcttattgtgaacactaatctgatttcaagtcgtttgtacttcaaaaaaaaaaattttttttgtattttattccgaaaatttaaaaaaaatgaatttagatgacgtaacaacataaaacaaagttttacttcatgctcagtaccatggaacccattctttaggattggctaattctttataaagaaatatttcttgtttttcatatctttgtgtctcattcattcgtgaatttcagcaaaaaataataattaaatatacggaaattttccataaaaaatgattttttaattttctaatttttcgtgagaaaaatcatgagaaattttaatttgaaatttctaatctgagaggctatcaagtctttcatttctaatccattcttttaaaagtcaaataagagaaaaagatacaactttctgaggagagggtcaaaaaacatttctaaactcagtatttgttttaatgacgaacctaaaaacaaaaaccaatctacaaataaggcttatatttttagcctctaaaataaa

SEQ ID NO: 65759 - DNA, 387 bp, Heterodera glycines
atttcttgcagattgaaagccatccatgcctgccggtctcggcacagcaaagcactaatagggtgtttgactcacttcaaaaaataattccatacccaaaagttttttacaaccacttattgccaatataatttcttgcagatttaaagctatccattgcctgccggttctcggcacagcaaagcactaatagggtgtttgactcacttcaaaaaataattcattacccaaaagttttttacaaccacatattgccaatctaatttcttgcagatttaaagctatccattgcctgccggttctcggcacagcaaagcactaatagggtgtttgactcacttcaaaaaataattcattacccaaaagttttttacaaccacttattgc

SEQ ID NO: 65760 - DNA, 891 bp, Heterodera glycines
atgaggaggaggaggaggagaagaagagggcaacagcaacaacaacaaaataataataacgatgacgaagacgatgatgataatgatggtaacgaggagggagacgacgatcacggtcatgatgctgataatgaggaagaagaagaagttggaacaaatcggtcggtcagactttgctttttcgacgctgaaacgtcccaagatttgccacttcaactgcgtacaaaggttgtacagaaacatgttccgatgctcattattgccgaaattatctgcgaagcgtgtataaatgaaggaatttcggttcattctggtgttggacaatacgcaaatgggtgcgtgtgcagtcctcctgcgggaccaaggggacgtcgctggtgttctcctccgtttctgaatgcacctggggatgacagtgctctaccagccaatgtccactacaatccacgaagactgtttttccatagttttgacgacgctaccaacaatgacccggtggatgattttatcaattttctcatcggaagtggcccacatggtgttaaaacaatttgtttatcacacaatggcggaaaatacgacattcatttaatactggaggcacttcaccggcgcaatttaccaccaaagcgtatttgcacaacgggactaaaaattttttcgatgactttgaaagggaaccatcaacgacacgtgatctttaaagactcgctgaactactttttctgtgaattggatgcactgccacggacatttggattgaacgctgaagttgcaacagcaaaaccttttttcccttatctgttcattcggcgtgaaaatttacatcaaagattgcgtggtttaccggccaaagaattttatcagcctgatcacatgaaagcatcctag

SEQ ID NO: 65761 - DNA, 223 bp, Heterodera glycines
atgcagaaggcaccacgtcatgaacagatcgagcacgaacaacgaatggtgaggaaaggtcaacaagaagcaaatcgacatcttcaaccgaaaaagcggcagcaaaaagaaattcaagaagtgccacattcaacaacagaagagcaacaacgagaaaccaaacgccaacaaatcgaaagacaacaaaatgacgaacaacgtgccatcaatcaacaaacacgca

SEQ ID NO: 65762 - DNA, 56 bp, Heterodera glycines; identical to SEQ ID NO: 52733

SEQ ID NO: 65763 - DNA, 621 bp, Heterodera glycines
atgtctctccccgtcccttggctaatgaaagtgttttctgttgtggccaatcactcggctgtccggcaaatgtctgttggccatgttttcggctctattattctccagttggccacatacgccagcccaacacaggtggttttgcctatgagtcggtcggtcggttgtccaatggccatttggccaaatgatcgattcgcttgtcatccgtcgtcagatgtatggccatttcgaagtttgcaatttgaaatgaaagaaggcatcgctttgatatatttatgataagctttaacaatgtttataagcgaatgcttttcggatttgtgctgaatttgtaaatggtcattctgtaaaattcaaaaagtgctgaaacgaaagatactccaattcatgcgaattttgaaaagcagtcatcaaaaatatccgtaaaactttgaccaactcatttttgaccaacttatttttattgttccaacccattgtttttttttggattggaacgtgaaaatcgaggtcaaatcgatgaattttgaggatttttttggtgtttctcaactcgggaatgcttttttgtagacaattggccgcgtttctcgccgtttaacaattttatcgttaaaa

SEQ ID NO: 65764 - DNA, 472 bp, Heterodera glycines
atgtacactaaaaacgtgaaatacaattcattttttggtttttacacaataaaacgtgaagtcgcgattaggtaattttctgtgtttttgtacactaaaaacgtgaaattacaattttgtgggtctaaaacgatttaacctttacgtgcacttgtacacaagaaaacgtgaaatacaaattacaattcatttttgggcacttttacgtgcacatgttcactaaaaacgtgaaatacaattcattttacgggattttgcacaagtttttcaggtaaagaatgaaaaaaaataaataaactaaaaaaataaatatatttatttagctccaaatatcatgaaataatgaaaaatgaatttccttgtgtcaaatttttgctgtgctcaaataatcataaaccgccggtcgttgttgtatccgtgtcataatattatgaattaagaatttagtttttttagcaaaattatgaataaa

SEQ ID NO: 65765 - DNA, 127 bp, Heterodera glycines
tacggtaggggtcaactccgtctggccaactccgtctcagcaatgttcaaaaagctataacttttttctttgttggccaaacttcacaatcatggtatcattcgaaagccctagatgtttagaagat

SEQ ID NO: 65766 - DNA, 767 bp, Heterodera glycines
atggctttgctgaactcagttacatcagtcaggtgccgtacagcagaagtgtcactcgcagcaattatcacactcataatcagagtgatcagtctctattctctcaataatcatcattcttttgtctatctcatttgtcaatgccaatcagtctcagcactggtcagaatactcgctgatcagtcacttattcaattcgctgatcggattaaaggtcgtccatcccatttcaaacagaagcgtggcgtgtcaaatttcgtttcttcacccttttgccttttttttaaattccttcgatttttcctactcgaatttcactttttattacacaacaaagttgaaatatcaactttaaactgtccttttggcctttatccgattgctttccgttggcggggggacaaatgcctaaaatagggaatgccaattttgtttaattctgtccgaaatttcattttgcatttgcctttcagcttcaaattcgcgagtgccggattggccgcattgacgagggtgccctcgggggactgttcacggtcggctctgtccaacttcagtccaaccaaattgtgcgactgtcgcccggttggtcttccggcatggacaatgttggcaaattggtgttcacttacaacaccgtgcgtgagccgatggtgtcgccagaatgccttcggcacgacggcgcacagcgattcgaatttgcggacaatacgctgcactgctcatgcgcactccaatggatgatcaacgcaccggaggaggagcag

SEQ ID NO: 65767 - DNA, 1188 bp, Heterodera glycines
ctatataagctgtgtaaaatcgacccacaaaaaggggcactttatgatagcattagtttacacataaaaatacaaaacaaaaaaatttcattctcaacttgaacaaaaggctatttcaaagggaaaaaattcaattttttaatatatacaaaaatatgatgttaatccctttgaaatatcgaatttggtttctgaaaacaaatgctatcataatgaccaagaaaaatgtgaattatttgccaatttatttgtaaattcgtttaacaattctgaagttgatccaggctttctaagcttggacaacacttttgttaatcaaagctttatatcagatatagaatttaacatcattgagacccaaaaacttttaagaaaacttccgaataaaaatggaacttctccggataatattagctataaaacattgaaaaattgccatccttcattagcaactgttattactgaccttttcaggatttcattagactctggttctcttccagatatctggaaggaatcaatagtttttcctcttttcaaaaaaggggacaaatttaatcctgaaaattataggcctatttctataacctgctcactttgcagggttatggaaagaattcttagccaaaatatttacaactttctcctaaaaaacaataaaatttcggaataccaatttggttttgttagaaataggtctacgacaagtcaactaataacagttgtggaagattggtatgatgcaattattaatggaaaaaatgcggactgtatttatattgattttcagaaagcttttgactcagtgccccataacttacttttatacaaattggaaaaaattggtatacggggcaaacttttaatgtggataaaaagctttttgagtaataggacttttcgtgttaaaattggggatgctttatcctcaaataaaaaagttggctctggtgtcccccagggctctgtcctgggccctttactatttttgatttatattaacgatcttcctgatgctttgccatcaggagtgaaaataaaattatatgctgatgatgttaaattgtatatatgctataaagcaagagcagatacagaaattatgcataaagcattgcataatttatcagaatgggcaaataaatgtagaaagaaaagtttcagttcaaaaaacttttgtattatatt

SEQ ID NO: 65768 - DNA, 231 bp, Heterodera glycines
atggcagaatttacggaaaacttagaacagaagaatagaaggggtgccaaaggattttacgttgaccctgcccttgaattacggtttttgtccgcgggcgatcgaaacttcgaactgatcagacgataccgctttcctgatgaagaaattgatttcatttcaagtcttgtaaaggatgaccttcagccaaaacatggcaataaaggaaatccaattcctgttaaactacag

SEQ ID NO: 65769 - DNA, 413 bp, Heterodera glycines
cagaaaagaaaaaattggaggaaaaaacatttgacgaaatatttggagaaaaatgggaacaaaaagaagaagaaaatggaaataaccaaaataaaaatgaacagaaaaagcgagaaattattgaaaaattcaataaaattaaagagaaaattaagcaaaaagggggaaaatattcaaaaaacgaatgggataaaattaattcgaaaatagcgaaaacattggggacaaatcgccaatacatttacgaatggatcaaagaattacgattgtacaaatggcacaacaaattgaaaacggatgaacaaaaaattgaatgtgtgcaaaaatttattacaatgaaaaatgaatataaacaaaaaggaagaaaatactcgaaaaaacaatggaacaaaaattatgcagaaatgtgaata

SEQ ID NO: 65770 - DNA, 546 bp, Heterodera glycines
atgactggtggctttacaattgttctgttcgattcttcataccgaggcggtgactcaagtatcggtgaaggttttggtggtgttttttgtttaggaggaggtggtggtggttttggaaccgttttcgcgggctttagcttagacgcgggcgtagtctttacgggagaaggctgttttactgctggtggaggagaactaggtttgaccagcggaggcggtgtttttgtcctggtagtagtggtagtagtagtagtggtaggaggagaagccgttttagatggaggaggagaaggaggagaagccgttttagctggaggaggaggagaagccgttttagccggaggaggaggagaagcggttttagctggaggaggagaaggaggagaaggcgttttagctggaggaggagaaggaggagaaggcgttttagctggaggaggaggagaaggcgttttagctggaggaggagaaaccgttttagctggagtgggtgttgttactgatttagcagtaggtgttggaggagcaacaggagcaatcggttga

SEQ ID NO: 65771 - DNA, 1042 bp, Heterodera glycines
ccgcttccgtcttccgtgttggagccaatcctcgaccgaggcaactacgacccgcgcagtgcgcccgcctttgtggaggggcgtccggtggaagtgcgcgttggcatccacgtgcaatcgattgccaactttcagctggccacaatggttgcctttttgtgtctttcccacttcaatccctcccccccggcttcaggattacgacatggacatgtggtaagtaagcatcaatcacttcaaaatgccattgatccttctgaggttgcgcatgagttggcgcgacccgcggttagcgcaaaatctgagcacgcccgttctaatcaatgacgagcttttccttcggtttgtccccacttttggtggcccttttttgcatttcgtcacatttccaagtcgaatttggcgtccggatgccttttttgtgaatgcccgtgacgcgcttttccatcgcgtgacgcgtttaaacttttacgcgtttgtttttccgactggcggcgaagtgttcatggaggcgcggctgtacttgaagccgaagagccaattggttctctgcaaatacccacacgacagtcagacactgcgactgcgcatcagttcaagtgggagggcgaagcaggggaaggcctactgattagagcaatggctgatcagcaggccattcgattgatagccaatcattgggcattttcatggtcggaaaatcatatttagtccttaattacctcaagttgcttccacctacggttcggtgcgctttcgttggttttccgccccttccaatgccatccgggtccatggacagctccaactgcccgacctgtacatcgacgggttgcaaagcggagagtgccgcagtgcgagaaaaaccggtgaaaagggagcggagaagcaaatggacaagcgaaactcattttgttgctgattaaggcaacttttcttgcttggaagcgcgttttttgatgaaaaggagcatcggataccatctttggcagacttatgtgccgacagcacgtgaatgagggggggggggggggggaaaaaa

SEQ ID NO: 65772 - DNA, 1023 bp, Heterodera glycines
ggggggggggggggaccgtaagggaagaaacaaaaggtatcaaatttgtttttgttcagagattgtcaaagacaaggacgggatcagtagaatcactgatagctactgcttttctttctccgttaattgcctctccccactctctttctgtctaattaccgttaattgcctctccccactctctttctgtctaattaccgttaattgcctcctcataccacggttaatccccgcttcctccctccctcctccataggcgttttgttctcttggatcagcgtttggctgcccgaagagttcgtcgaggggcgcgtgttcgtcgctctgaccgtctttttgacattgagcgctgagagcagctcggccaaagagacacttcccaaagtgtcctatgtgaaggccatcgacgtttggtttggcttcaccgccgtttttgtctttgtaagcgatgcgaaaaaagtgagcgaaatcatttcgagagagcaaaccaaacaaatcttctaaggacgggccgaaattcttaacaaaggtccctgcgcaattcggcacattttacagtcattttggccaccatttgaggaaaaaattaatcgttttacgattttactgcaaaatttcgtcgccgctaaaagccaattaatttgtaagcaaacgactctcatttcttcagttcacaatgctccaagcactgctcgtcatcggtttggaacacatgagcggtcgcgcggtgacaaaacaatgaaattcaaacgaaaaaaggttttaaaacagcgaaagactgtggtggaacaagcgggcgaactaagcgcgccgaaagcgatcattttgatgatggactgtcgccgttaccatcggatggcaaggagtttggacgactttttcaaggtgtatcagcaacaaacgatgtgcaacaatgaatgaaaaatgttgaataaggtgatgtacccggtgatattcgtcgtctttctcatcatttacattttcgtggtgatcgaaggagaagaacagaagtgtcttcagcag

SEQ ID NO: 65773 - DNA, 484 bp, Heterodera glycines
atggcggacgaagcgtcggaatacactgacgaagaatacacatacgaatacgaggcaaaatgggggggggaaatagggggacatggaaaagggactgttaattgatgttaattgagacaaatggaaagacaaatagagagtgacagacatgagtcaacacagatagagaaacaccgacacagccaaatgaccactcacacattaattaattattaattaaggatgaggaagaaccggaagccaacgagaacgctgctcccgcgccagttgaagagctcgtaagtcgagaaagaatgccaaaatgggcaattttaaattttggaaattgcagccaaaggacgaaccgaaaaaagcgggcgaagacgcagcagcgaagaaaaaggaaacatcaccaccaaagtcgctgaagaaggaggggtcgccgccaaagtcgcctaagaaagaggcgagtccgaagaaagaggcgagtccggacaaatcgccg

SEQ ID NO: 65774 - DNA, 564 bp, Heterodera glycines
atgaagtccgagggcatcatccccatccaggccggcaccaacaaatacgcctcccaacgcggaatgaccggcttcggacggccacgtgacgtggtggacaaagtgaaaagtgagaatttggcagaaatcacagacgaagagaagttggcatcgctgaagggcaggtcggttgacagtttggccaaatgcgcttttttaaaaacattctccgtccttttcagtacttggcttcagtccggcaccaacaagttcgcctcccaaaagggaatgaccggtacggcaccacgccaattcacacatttaaacaacagttgatcgaataaaagataatggcactttaaggaattggaacaccgcgggacgttaattaccgcacgaaagggacgggaggggcgggcgaagtgccggaggacaaagcacgcttaacggacggtgacatggggaagggaggaaatggaaaggaacggaagccatttaaagggattgtgccgcttcagtcgggcaccaacaaattggcgtcgcaggccggcatgacggggatgggaatgccacggatcatcgacg

SEQ ID NO: 65775 - DNA, 416 bp, Heterodera glycines
atggcagggtttggaaacaaagtttgtcgaaaaaatcatccttatttggattttttggcccggccttgccgttaagggcacctaggaaaaaaattgaaaaattatgtcaaaaaaggacaattttaaaaaacagacggcttaacatactccataattttgatgctaattttatgtgaaaatagtctataattacaggcatgtttcgaccttttcatgccttatggaggccattcgcttgttgcccgctgcaaagactgtgtcaaatacagttgtgagcaaaagtgtgtgtacagtatcgagggatgccaacgctgcatcagagggaactgtgccaatatcggaatggccaacagttttggaacgttttgaaaaagcgaaattttcaaaaatttatttaatatttaaaaatgaataaa

SEQ ID NO: 65776 - DNA, 49 bp, Heterodera glycines; identical to SEQ ID NO: 51181

SEQ ID NO: 65777 - DNA, 656 bp, Heterodera glycines
gttttcggggcagtccccccgaaccgatgcgcccagatttatggggagaccgaatccttcgggaatagcttccctatagcctgtactttaattctgcgttggatttttgctccccataattgtttgagtaccccaaacggacacttgaaaaaatcgatttttttgttttcggggcagtccccccgagccgatgcgcccagatttatggggagaccgaatccttccggaatagcttccctatagcctgtactttaattctgcgttggatttttgctccccataattgtttgagtaccccaaacggacacttgaaaaaatcgatttttttgttttcggggcagtccccccgagccgatgcgcccagatttatggggagaccgaatccttccggaatagcttccctatagcctgtactttaattctgcgttggatttttgctcctcataattgtttgagtaccccaaacggacacttgaaaaaatcgatttttttgttttcggggcagtccccccgaaccgatgcgcccagatttatggggagaccgaatccttccggaatagcttccctatagcctgtactttaattctgcgttggatttttgctccccataattgtttgagtaccccaaacggacacttgaaaaaatcgattttttt

SEQ ID NO: 65778 - DNA, 401 bp, Heterodera glycines
ccctcccttccctttcaatttggcattccctcccaaattggcattttcagggccagcagtcggcggcgtcgtcggtctgacgatgccgcgctattgcctttttggggattcggtgaacaccgccagtcgaatggaatccaacggaaaggataaaattgtgggggataaaacaaatccattcatatttcatcgagttcaaatcgctttttgaccagcgtaatcgaaccaagtggcgaagtgattataaaggtaattagggggaattattttgctaattaattgcctaattaattcattagggcaaaggtgtgatggagacattttagttgttgggacgaattggcgaagtccatttgcccaaggggacatccgtagcggaaatgcgctgattgatgggaaaa

SEQ ID NO: 65779 - DNA, 436 bp, Heterodera glycines
atggtttcgtctcatttgttttgtattggtaactttatggttgtttttctggtcatgtttctggttttgtcttttcttttgtctaatcataacaacggtggaaaaccagaaattaatgaacagtttctggttaggctcatttctttgtctaaccagaacaacggtggaaaaccagaaattaaactgaacagtttctggtttggctcatttcttttgtctaatcagaacaactgtggaaaaccagaaattaaactgaacatggtttcgtctcatttgtttagtattggtaactttatggttgtttttctggtcatgtttctggttttgtcttttcttttgtctaatcataacaactgtggaaaaccagaaattaaactgaacagtttctggttaggctcattctttgtctaaccagaacaacggtggaaaccagaaa

SEQ ID NO: 65780 - DNA, 1265 bp, Heterodera glycines
atgtcaaatagtttcttcgtgtttttgccgagtaatgtgacggattatccggacaatcaaccaaacaagttccgggtcaggcttccaaaacctttgcatttcaacgggtcttgggtgtgtgggctgcacagtattagctacccatactcatggtcaacaattggtacattggatgagcagtggatagacatccacttcacggatattggggttcctgaagaagacaaacaccgcatcgtacgcgtgccggtaccgagatcgtcacacaatcgggttgaacagctgagagactttttgacgacaacgctgagaaaccatgccaatgctaaactaaagccgcttcctcgagaggaagaggcggaccgtaataggacaaaaccactatattctccaccgcctgctaaaagaagtataaaagatgtgaatgatttgtctttgtttccttcacccccgagagttgatgagccggaaaagccgcctaagtctcctccagcacatgtaccacctactgaaccggtaactcctcctccggcatcacccccgagagttgatgagccggaaaagccgcctaagtctcctccagcacatgtaccacctactgaaccggtaactcctcctccggcatcacccccgagagttgatgagcctgaagagttgcctctgccccttccagcacatgtaccacccactaaaccgataactgctcctccggatcataaactagaatcaccacctccaactgtaaaaccttcatcttccccacctgatacaacgctcccttcttcaactccagttgcaactcaacctccggcacccataccacagccaactcctcccaaaccttctgctcctccccctgcttcaacacctcccaaaccttcagctcctcctcctactccgacggctcccaaaccttcagctcctccccctgctgcaacacctcctaaaccagcatctcctcctccccctgttccgacacctcctaaaccagcatctcctcctccccctgtttcaacacctaaaacagcatctcctcaaaaacctcctaaaacgaagctagctcctcctccacctccagcacaaacacagccatctcctgtcaagaccacacccgcatctaaaatattgacggctaaaactattcctagaccccctcctcctaagcaaaaaacgtcgcctccagaaattcctacacgaccatcaatttctccaacactcgagtctccgcctcggattgatgagtcgaatagaacaatagtaaagcc

SEQ ID NO: 65781 - DNA, 227 bp, Heterodera glycines
aatccgaagaaggaataaaatgacgccaacttttttggaatacatgtttatcgttatggaaaaaatgaaaataagtgtgccttaaatagtgatgtcagtgctgatcgatcgattcttatccaacatcaccagcgagtcgcactcgcccatcaccaccaacattattcctccagcgggcaccgcctgattaaatttgatgctcactgctgtggtcccgttccttatca

SEQ ID NO: 65782 - DNA, 534 bp, Heterodera glycines
atgagtgaacgggtaaattttttcctaaattcattaaattttcaggttggcctgcatcttcctggcatctgttccgaatatgtgcctagtgcaattgaaagtttcaatgccagcgaatttgaaggtgcattttaaattattaattacaatttgaaggattaatgccaattttaattggaacccacaatttaaaattgctcaatcaaattagcaatagataaaatataaatatttaattaatttaaaaggtgtcgaaattgagggcctaattggcgtcaatattttaattaattattttttaattaaaaggtgtcgaaattgagggcctaattggcgtcaatattttaattaattattttttaattaaaaggtgtcgaaattgaaggcccaattggcgtcaatatcactgcgctgttggcagccggtgtcaacttgacagagttggccgaaaaattgcgcaatgatactgaagttgatcagattttgtctcgcactcaggacattaatcggtcggttgtggctcagcataattaa

SEQ ID NO: 65783 - DNA, 622 bp, Heterodera glycines
atgaataaaacagttttcttaatactttttggtttcgcaatcggccaagcaaatagcgattgttgttgcctatctaatgaagaaaaacagcaattgaatgctgcgagaaaaaccattgaaaaagcatttcgggatacgctcagattaaatactgaagcccgagatttcgcggctgcatctcatagggcaattacggaggcagaaaaaattaaagttcgtcatcctgaggcaccgagtatgaaaacatggttcggtaggctattagaaggggtgagaaaagtacaaggaatttccgaaaaaattaacgaagaaaaaaagaaaataggacacattagaaaagaaatggacaagtgtttggaccgaaaagatgtgttaatatgacgagaattggctgacgaagcaaagggggcatttgaaattgttaagcagtatagacaagacgtcggtactgcgtaccgtaacgcctatacacaatctgacctcgggatcggggaattggccgaaaaagttaaggaaatgcttaaagaatatttatcccgccccggaccctccccaagacctagctttaatgatgaatttatatctgcttaatgtataaaagagaaaaaaagataataataaa

SEQ ID NO: 65784 - DNA, 338 bp, Heterodera glycines
  unsure (1)..(338): unsure at all n locations
taaaattcgtttgaaatgccaaatttcgacccgaaaatgccgtctccgtttcgccttccatttttgctgctccttttcggcactttcctttggtntgcgctgttttctcccatttaaaggcttatttcgccctttgtcagtttcgtcccctttttcccctcttcggctgcccaaaggttcgccagtcagtcgaagcagcagcgaagtcgccaaatccgtccgtttcgacccctttttaatggccaaaaaatgccgaagttttgcagatgcccagtcccaaattgtggccaatctcttcgccaattacgacccgaaccaacggccccccgtccgaggtc

SEQ ID NO: 65785 - DNA, 446 bp, Heterodera glycines
atgccgagcactagacaagatggtataaaaacaaatcgaataaaatgaacaatgtcagcagaaatctttgaaaatgaaatgaatcggtggagaatggagcaaaaagcgtggaatttaatgattggtcaaaaacgatgacatgctcagagagatgaaagccatttggcgatagaaatagagaaggaaaagaaagaaagaaaaaattttaaacaaaacgccaaaaaattaaaaaatatataaaacaaaaacgccaaaaaatttaaaaaataataataactagcgcaggcggcgctatgtaatttcgacactgggtaaattcgacactgagtattttcgacactaagtaatttcgacactacattttcgacacaaagaaatttcgacactgaagtatttctaaatctttcactgttttcctgcattttcgagttagtatttataataaa

SEQ ID NO: 65786 - DNA, 190 bp, Heterodera glycines
atggaagtttttaagaaacgcactatcattggccagaacagtgctcgagattctaacgccgatattaacgggattgactttaccattattgttgttcgacctcaaccttgggccaactctcactctcgactttattggccaaattatcgattctatagtgatcaggaaaatgttctaaaacttaggcctg

SEQ ID NO: 65787 - DNA, 91 bp, Heterodera glycines
ctaaaaatccaggtgctctaaaaatggaagagctcaaaaatatcgccattatttttttgtaatgccaaaatatttcgtaaaatttgtatga

SEQ ID NO: 65788 - DNA, 1356 bp, Heterodera glycines
atgtgggccacaacaaatgccgaagaatattatggcgtgccgttgggctcacttcgcaacggcactcttggaatttctggcaatgtttggctggccaattccagtgccattcaaatcaccgatttcaaattggacaaaaatcaaagtgtagatgggttaggggatgtatttttcacaaaatttcaattttcatttgcctttaattttttggcacttttggttttcatcctaaaattttgcttcgcttcgtttttgatttttttaatgtggcaaatcgtgccgacttaattcagtcagactttcgatcccaaaaaatgccaaaaatcggaatttctagcccaaaaaatgtcagaaatcggacttccgtgccaaccctgctgtgtaacatttggcatattttaacacaataattgtaattggcacttttttgagcaaaaaaaaatctttggcaccgccaggaccttcccttaaaaaatttcttcttattttcaacaaaattttgcatgaatacaatttttttgctcattttaagagcatgaaactctgttcgcgttcgcctcgcctgacgcaaagattgaagcagtcaaatcgctgtacaaagtgatcactgatgataatggtgaagaagcactgacaccaatgtcggggtgggtttaattttaaaaattttaattacataaatatatcctactctaaaaattgcaaaattattactgtattgaagcaaacaaaaattcctgactcctccccctgaataaaattatataatatcttttgttaaaagatttcatctaaaatcttagccgcctaaagatttttgtcgacaaatttcggcattttcttgagtgccgaatttcaccagaaaattacaaatttttatgcattcttatcaagctaaagttagttcaaaaatcatgcccacaccacattttttttccattgaaaatttaaaatgccaatctgtgagagccgctgataagtgatcacgaattcagcacccgaaaccaaacaaaagtcaataagttttcttttccttcgaaattcctattttatggttgaaaaccaaatttatgagaatcgcttattgtcagtctaaatgggatgccggattcgtgatcagcggccatgaaagccccccatatattggcatttttatttaaaaaaattatttccctatcccctcgggcatcggcattattcagaaagaaaaagcatttgggcgccatcagcgaaacggctgaagagccgcagcaacgattggtggtgatggcaccggccggcaaaagcatcaacgattttggacagtttggcgtagtgaacggcaaaacgatggtgtgtttgtttggcacaaattag

SEQ ID NO: 65789 - DNA, 645 bp, Heterodera glycines
atggattggatttgcactgatcactttgtttgttcagtcagggttaagcgatcgctttctgctctgcttatcattcatttatccctttgcacattcattctctcgaataccttttgcacatcaatcatttgggcatttttctgggtcatttaaaaccgatcagaattgatggatatgagttgatcttttttttcgacactgatcagccatcattttcttctccgtttctgcacttttaatcagtatcaattcgaaagtgttacaaaaaaaaaataaaatagtaaaaacggaaaaaataattaaattagattcgaataaaaaatagttttttttttcaaaattttcttagtttgtaaaaataaaataaaatgaaatttgagactatgtattttcagtgccttccaaaagctaaatattttgtttttcaaaaaggagttctatcatcgaagtattacataacgcccttgaaacccgaaaaatgggcaaatttttgaatgtcaaataattcttttaccgttacaataggtattaaaattataaaaaatagttgccagcatcaaaaaaatgctcaaattttgcatttttggtgttgttgcacaaaaagccaacaatcggcgtagatgaaacggaagaaaaaggaaaaca

SEQ ID NO: 65790 - DNA, 838 bp, Heterodera glycines
accgaagaaattctgccgaccgtaccgccggtgccgggcattgatttggacgactactgtaagcagattcaacaacgatttggtaacccaaaaaacggtgacacaattcgacgactgtgctttgatggcacaaatcggcagcccaaatttattgtgcccaccattgagtattgccttaaaactggacaaagcattgacggattggcattggtaaaaaaaattgagaatttctgagattaactttttcaagatagatctagtctttggaccaatcaaattgttaagaagaatttaataaataaaataatattaattaaatattttatttaattttttgagaaaaatagtaaaaaaaacctgtagatacttaatgataatgatttgatcagatctaaccacatttagataaagggccaaaagttagatattaaataaggccattaagaagctgacctttgcaaatttactaatacttttccaacatttttccaggtttgcgcactatggtgccgctactgttatggcaccgaccagaaaggacaagcagttgagccaaatgacccggcctggccacaacttcaggccatcgcatcccgcgcccgggacaacgatgagccgaccgtttggctgtctatggaacacatttatggcagtgttggccaatcagacgcatttcgtgtcgtttttgccaaaacgcttcgtcacctgtggcaatttggcaccgaaagtgcgctgaagcgctatttgggcaacaaagcaagtcaatgaatgctgcgataattatgatcattttcggatatatcattgaatagaccatggatcttaaaaaactaataaa

SEQ ID NO: 65791 - DNA, 730 bp, Heterodera glycines
atgagcgacaagcggggcttgctccgacaaattcttggcgaagcggaaattaccgtgacaacatcgggcctgacgattagcggcccccgtctgtccactccacggttcctgccgtttgacgagagtggccgctgccgctcatgtaaggcaactgaagtggaggtcgacacaatggttacgaaggagggggtcacgatttggtgcacacgcatcgacaaagtccaattcgtgccattcgatgtggtctacgaattgccaggtcactgcttcttccgactgaaaaacaagtcgcgcgtgttcaaccttccatatggcgacctgccctctgagtcgtgtgaaattccgctaattcaacacgtggacgaagaacgggacctcaagcgaaaggcaaaagctgcgctcgaattggtggaggccggactgattgcggacagcactgtgcaggacggggcccgtttgaaaaaagccaaaactgcgatgaaagtgatcagtgacattctgctctctgaaccggtgggagatgatcaaaagaagacggttgaagtggcagttgtcgacaagcagccacaagagcagcaaccagcccctgtacaagagaagcccgtcacggcacccgctgtggaacagaacactgttgaagtgaagacggaagaagaaaagaaagatgatcttggtgacattgacaaaacactcgatgaattttttgcgagccttaaagccgcaaccacca

SEQ ID NO: 65792 - DNA, 419 bp, Heterodera glycines
atggctcaattgaaaaaagcacggcacgaatatctggagctggtgaaagtgtttatggacgaattggaagaggcggatttgtttgaagaacaaaatgtggcaagagtgtgcatacacgaggccgggcacaccctcattttgtggttcttaagaggatcggaaaaatttttggaggtaattgaaaatatttttgtacgaaaataagctttgtcgattagatttgcgtagtgccggacccaaacggagactatgatggctacacggcgagtgagccacgtgccgaaagcacgcgcagccagattatggcagaaattgcgtgctattatggaggcaagttagcggaagaattattttgcgagaaaagtatcggccacagcgacgacatgagacaagccaagaagctgaagaaatggcgttaa

SEQ ID NO: 65793 - DNA, 2757 bp, Heterodera glycines
atgtatccggtagagaaccaaggacggggactaccgcacatccatttgcttttgacattggcggagcaagacaaattgattaatggtgaagatgttgaaaagaaaggaattagtgcgagaataccagacaaggaattagaacctgatatgtttgatttggtgaaaaggtttatgatccatggcccatgtggtaatttgaacccaaattgcccatgcatggaagagtttgttgacaagaatggtatgagcggaaggaaatgctctaagggatatcctaaagcatttcaagaagagacagttgttcttgaaaatggtttggctgggtatgcaagaccaaatgatggaagaatagttgaagtatttgcaaatggaagaagacatgtattagacaacagatgggttgttccgcataaccaatacctgttgaaaatgttcaagtgtcacattaatcttgaaaaggttaatagtgttagttcagtaaagtatttgcataagtatgtgcataaaccaccagacagagcaagacgggaactagaagagaaaaatgatcatgatgaagttaaagagttcattgatgcgcggtatgtttgcccgcaagaagcagtgtggagaatttttgaattgcctatgtatgatagaagccattgtattatgtccttgcctgtacacctacaaggtgaacatatttgttattttgacgagaatatggaagaagaagagattcgtgaaagaattgcgaatggttctgagttgatggcatattttgaattgaataagacaaatgttttggcaaaaactttgttttatcaccagatacctgaaaagttttgttttaagaaaggaaaatggacagagagaaagacatattttaacacaattggccgaatggtgaaggtgtcaccggctgagccggaacgataccaccttaggctgttgttgttaaatgtgaagggagcatgctcctatgatgatttgaaatcagtttttgatactaatggcaatgctaaagtttgtgaaactttttcagccgcatgtttagaaagaggtttgattagaaatgatgaagagtggaaaagagcattagaagaagcagagagttttgagatgccatggaaattgagagcgttttttgcattgattttagtccattgcaatccggccaaaccggaagcgctttggaatatgtttaaagactcattgtctgaagattttagcaggaattttagaaaagaagtagcttatgctaaagcttatagagaaattgcacttagcattatgaaggctggaaagacacttgccgattttccaaccatggaacagataaatgttgatgatgatgttgaacaagtgtttgacctagccgaagaattggatttgggacaaagaaattatgctttgatgtatgatgaacagaggaatgtttgtgatgccattttgcatagaatatggaatcctgtaaatgaacccgcgttctactttcttagtggaccgggtggaacaggaaagacacatgtgaacaagacaattgtacatatgctgagaggtcagaagaagaaagtttgtacaatggcttttactggcatcgcagcaactttgctgcctgctgggagaacattgcacaatagatttggattgactttggatatgagtaattcgagtattagtccgaggtcaaaggcatggcaagagttaaaagaaacagatttgtttgtttgtgatgaagcgcctatgataaataagcgcgcaatgagtactttggatgagaaattgaaagagataatgaataatggaatagcatttggtggcaaggttatgctttggacgggagactttcgtcaaacccttccaattcagaaacatgccacgagagctgagatggttagttcgaccataaagagaagtgcgtactggaggttggctaaaagatataaattgacgaagaatatgagagctcttgcaacggagcaagaatttgcgagagatttgttagagattggcagtggaaaatggaataatgaaaatgatgagataattttgcccgaggattgtattagcaatggtgatttagcagaagagatttttggtcaatgcattgtcttagaaaattggaatgaaatggcaaaaagtgccattttagcaccgaagaatattgatgttagtgaaatgaataataaagttttagaaatgttgcctggagaagaagttgtgtacacgagtatagacttagctcaagatgagaatagacaaagaccagatgattatttggatgagtatttgaatgctttaaacccttcggggtttccacggcataagttgagacttaagaaaaatgctattgttttgttaatgcgtaatttgaatatagaaatgggcctttgtaatggtgcgagaatgaaagttgagcaaatgcaaccgaatttgattgtgtgtgagattttgactggagataaggcaggtcagactgtgtacattcctcggatcacgctttgctgttctgaagattacccttttgaccttcacaggcaccaattcccgttggtgttagctttcgcaatgacaattaataaggcccaaggccaaacccttgagcaagttggcatagatttgagaaaagatgtgtttagccatggtcaattgtatgtggccctttcgagagcaagagcttggaataagttgagaattagattagatgatggcaatttagagagaaaggtgaagaatgttgtgtacagagagttattagataacagtgattag

SEQ ID NO: 65794 - DNA, 638 bp, Heterodera glycines
atgaaaatatttgtcaatgacaaagaagcatgggaagatttgatcggatttgtatcaacagataaacaacaaatcattgacacaaaaatcatttttgaaaaaatcaaaaattctccaattctcagcaacgaaaatgaacaaaatcttgcgacaatgttcgtgcatttaaatgcgggaactgcgataattacgaaaataattaaatgtatgggtttggtatattttaaacacaatttaaatattttaaaaaaattttaattggggctcgacctagaccggatcgaggtctggatttttgttcaggaaatccaggtccaggcatttttcaaaatttatcgagctctaattttttaactattttcccattttaagcaaacagtttcaccaccgcaacaacgacactcatggcaacaaatagaagacgaaaacgtatggataataataataacaaccaaaataacaataatggatataacaatgtgtatgaaatgttgcgtcaagcacagctaatccatggccgaagacgggtggccgataatcagcctacacgtgttgattgtgttgttgtggtcattattttagttggttgtgcgttactccttgattccttgtcgcaatatgttgttttccaattctga

SEQ ID NO: 65795 - DNA, 1164 bp, Heterodera glycines
tctcgttgctcaactttttggagcctgaacagttcgccaattccgaggcttttctccaccaatttggccaatgccaaacggaggagcaagtgcaaaagttgcaggagatactcaaaccgatgatgctccgacggttgaaggaggacgtggagaaggaactgcagcccaaggaggaaacaatcattgaggcatgtgccagcggtgccaatgccaatggagttacaaccgcattccggcacttttcgctttagacgggatcaggatcccatgggagtttctcgggatccttcccgatcctttttttccttctacggcattaatcgggaccggatttcatcgggatccctcccgatctttttcaaaaactatgtatatataccggcattctggcatttttaggctatgttaggggtgtaaccatccgaattaaggcacgttgttggtgtgccaagggtatatccacctgaattaaggcactttttgggtgtgtcaaggggaaccgcccacttcggcgccggccttttcggcgccgttgctaacaacttttttcctgatcaaccaaattaaaaatttttgttataattcgatagctcttcagattctctattagcctgtaaaatttcaaaaaatttcgtcagtttacaaaaaagttatggccaaaaaacctcaaaaattaactttttcttggctttttcggcgccgcgtggcataacttttttatttttgaatcattcatttctatttttacatgtaaatatagagcacacatagagctttcaaatgatgccagattggctaaagctaactgacaaataaaaaagttatagcatttcaaaatttgcggcgccgaaatggtccgcgccaaagtgaccccgacccgtgtcaagggtgtacccacccacatttcgacagtttttaaaaaatttttggcaaaatgcgcaacttcggtaccacatttgatgtgtgggtgccacaaagacaatggcactactctgcaattttttgtgatgaaatcccctctaattttaaggtccaactctccaacatccagaaaaaatattaccgcgcagttttggagcgcaatttcacccatctgatgaagggctcaaccccgtcactgatcagcctgaacaacacgatgatgcaactgcgtaaatgctgcaa

SEQ ID NO: 65796 - DNA, 191 bp, Heterodera glycines
gtggcagcattttctctctcgacttccaccctagcggatgtaaactcgcaacagcaggacaggatccttctggtgctggtcttctgattgtgtgggatcttggctttctaaactgcccacccgattcgaaggagttcaattgcagtcaattaccattgacacgaattccccacacaagttgtacactttaa

SEQ ID NO: 65797 - DNA, 304 bp, Heterodera glycines
aaaattccctcaaaaataaaaggtctattgcgcaccgccctccctatcatgctcgagagcatttgtatgtgtataaaatttatcaaaaaaagagatagccatttttctgggataacctctaaatataaaaatcctctgtgaaataaaatggcgattgtgcacagccctccgtctcatacgcaagcgcttttgtgaggtataaaatttctcaaaaaaagagatagccatttttctgggatagagtataaatttaaaaattccctcaaaaataaaaggtctatttcgcaccgccctccctatcatg

SEQ ID NO: 65798 - DNA, 2310 bp, Heterodera glycines
ggttttccgtgtgaagcgccattattcgaacgattctgaggaaagcaaaaacaatgacaaaaagggtcacatcgtccgtcgatcgctgcccactcttttttccaaccgcgttattcccacacgcactgtgatcggattcagcaatttggcttacattgaggtacgtttcacactcattcttttgttatatcaacggaatatgaaatttgtttgaatttgtcaccggaatcatgtcacttttcgtagggtcctttgcaactcgtgcaaaagaaaaggaactgaatttttattttatttttgtgacaattaaacacaaaagatttgggcgtttcacttttgatagaaactttttaagtgtttaattggtcggttatttggtcattccaattttcagatgttgtccgaccctcgagagggtttcgtgttcagtgtccccgattttctccacgtggaggtcgacttcactgtgaaacggacgtattacgtgctcaaatgagtcatttcccatcgtttttaacgcttctaacattttgtaaaaacttttactatctctttttcgtattttttgtcattcatttatccttttttatccaaatccccttttaattctttccgtgctttcatttgcactttttctgaattgttttttttaccttttctcatttatccattgtatttacaacgaatttgaatttaattctttcacttttacaaatttattgttgaatatcaatgtttattgtcttttaaatccgaatgatctttgtaaatgtgttaattattcatttgttagattaaatgagcgacgatttgcgcaaagaattggagggactgaatttgtgcgctgggagaggccgacgacagcgggcgacagtcgtcaccgagtcgatgatcgacgacttctgtaaaattgtctataaggcgatgctcgtcacgcccgagggatacctttacacgtcggacattgcgaataatatttagtgagttatcccttcttttgtcgggttggcatccaaataaacatgggtctggttataatcagggattcttttttatgaaaatacatgttttttttcctggattctctatagcctaattgtaggaaaattttcttttttgtgtttgcgaacaaaaatcgggacttttatagtacttacatattttgggatttttctacatattttggactttttcgcattttttttgtacacattttcattttttgcatactttaagaattaatagaaatttcttataataaaaaaaaaaattttggaaaaatatatctttaaaaaaagcaatttttttctcataaaacagataccaaaaattaattcttaaagtactaaaatgtgattctaagcctattttggtccttttatggcatttttttgcctattttactttttacgacgatttttttttccaaaaataaccatttacatattttagtacatatttggggattttgtacacatattccatacatattttatttacatatttcgcgattttcttacataaaaaagaatccctggttataatataaatgaattaagagtgaaattatcaacaaccattttccaatattcagtgatgacattggcatcgacccgtacagaagggccttggacctcggcttcaattcgttcaacgccttcttacattcggaacacatgaaaaagtacatcgaaattgactcgacgggaaacgttctcaggtgcaacgcggaataaataaaaaacaaacaaaagtttttgattcagttaccatgctattttaacgccggagttgctcctcacaattgatcacattcaaagggagcggcagacttttttgagtatgaagcgcatgtaagcaattttggaggctttaaacgtcagacaattagagaaaactcctttttcataagattctatatcttttttagttacccctcgcgtcgtacaaatggattcaatcaatcggaagaaatgggtcctttgcagtttttgaaggagcgcatgcaaaagagggaattacaagcgcaaatgggtggacagacgcaagaggaagaggttggcatcgttttaaattaagtgggcgaggactaatcataaagcgtttaattttaattaatttgcatgagctcccatcttcagactcaatcggaaacggtgcaggaaccgtcgtttgtgatgaatgagggccaatacggaatcgaagaagagttttttgaagagattggcgaaaatgagcagttgggactcgaccggatcaaatgggttcagaacgattccgacgaagaaggcgaggaaacactcatttttt

SEQ ID NO: 65799 - DNA, 676 bp, Heterodera glycines
atgggaaatgagcctcaaaatcaaaacatctcggaactcattgacaaaattaagacgttaagacaggaaatgtgagttaaagcatatgaattttttaagatgatattttaattttagtcagaagtactcgtttatggtattggaggtgcgtcgtaacgaagtccttttgaaaaagaagaatgagaatttggtcattcaacttcaacggagtgaatctgcacggtaacttagtcaactttttatattttaatgtttaaaagttcagcaatgatttgttacggagcaacgaattactggaacaaaagttggctactcaatcggtggaaactgacgaactgaaacggcagatcaattcgctcatagagtcttgcgcaacagcaacttccaattgctttcgcaattcaccgtttaattctccgattggtcgtcgacagaagccgccattgttttcaaaacagaaagtcattgttgggttgtctcctcccacgcctttgccgaagccaattcagaagaccacaacattgacacagtcaggttggtgtgctttcttaactctttctttactatagttgctaaaaatgatcaatttccagcactaaatgcatcaatttgttttgctatccccggattcgtccaattggctgcaaaaaatgaatttatcgtttgctcggagccc

SEQ ID NO: 65800 - DNA, 490 bp, Heterodera glycines
atttattttagttttcttttctgcagattaagattggtattaatttccaatttttgatcagatttaatccatatgatcgcgctccgatgcgcactttgaaaattgccgacgaccaatcgaaggcaatgggtgtgtaaataaatgcattttccattattattgggtctttttatgttttaatacatttcagaggacactgtgcttttttacacggcctaccaacgctttgcccaattggccaatcattcggacaaccaagtgacgctcactcttcggcctggcactgtgcttttcatcgacaatttccgagtgatgcatggacgaaaagcatttcaagtgttttatagggaaagggaaaaacaatattaataaatatttgttttgtattctttgtcagggtgaacgagtgatgtgcggttgttatttgaatagagacgtgtttttggcaaaggcaaggccaaaactgtcgccagaattctaccgaaatgtg

SEQ ID NO: 65801 - DNA, 793 bp, Heterodera glycines
gagagagagagggagggcgagagagagagagggagagaggggggggggaagagagaggaagtagaaacacaagaagaagtgaccaatttagtagaacagcaaacgcaacagaacggaacgacgatgtcaaaacagctgatgaagaagagcgacatccttcagttgagggaggaacaggtgaaagagagggggaagggtactaataaactaattaaaagaatgaaaatgtttgcatttaaagtaccactgaaagtcaaaaaataattggcacagatcggtgaattagaagatacaatttgagaatgaatgaatggcattgccaaaggcatttcacttttcacagatgcgcagaagtgaaaaagagaggcggcgaaatgagcggaagcaagaaggaaaagcggccaaaacactttcggccattctgttcgccttcattatcacttggaccccttacaatggtcattactaatcagtaattaatcattagctaattaatcattttgcgtctctctccgctgatttatcccccggtgccctttcagtgatcgtttgcctcgaggctttctaccccaactcagtcccatcatatctcttcacacttagttactgtacgtaccgtacgtcgtcccttggccaatttgttcgcctttcagttctttcctatgtcaattccaccataaatccgctctgttacgcgctgtgcaacgcgcgcttccgcatgacttatttgcggattatcaaatgcaaatggaggcattcaccaatcggtcgacaaatgtacgcggcggacgga

SEQ ID NO: 65802 - DNA, 65 bp, Heterodera glycines; identical to SEQ ID NO: 54797

SEQ ID NO: 65803 - DNA, 167 bp, Heterodera glycines
catttatgggggagcaaaaatccaacgcagaattaaagtactggctatagggaagctattcccgaaggattcggtctccccataaatctgggcgcatcggttcggggggactgccccgaaaacaaaaaaatcgattttttcaagtgtccgtttggggtactcaaaca

SEQ ID NO: 65804 - DNA, 775 bp, Heterodera glycines
atgctttcggagccgaactttttgagccctgcaaatctcgaggcactcgtaagaagagcattcgcatggaatgaatattttttaactaattcccctctaatttcagctgatgtttcgcgtcaatccccagcggtacaatgagagggtgaaacaatgcgtgaaggagtcgaacgtggcgcttgaaagtgattaccgcgatattccaaacgatggaggaggacgccgtgcatcgatctaaccttgaaactgtgatctttttcatatgaaactcgttttgattgtacataatacgaatcacacacattgtccattcgttattaccgcgatattccaaacgatggaggaggacgccgtgcatcgatctaaccttgaaactgtgatctttttcatatgaaactcgttttgattgtacataatacgaatcacacacattgtccattcgttctcatatgtatttattaatcattgtgtaaaattaaagaatttaataacttcgctttttctgataaaaaaattatatatccaggaaaaagcctagaatttgaaaatttgaggttgggaatcaggccgggataggattcccaggattcaaattctggaatttgggtcgaaattattaaaattaacataaaaattctcaagaattttcgaataattcgtatggtcgggaggccttacttacacgcataggtgacattggaaaatttgagatgttgcaattggtggaaaaaagtcgggatctggatcagattccgggaaaatccacatgcggaaa

SEQ ID NO: 65805 - DNA, 382 bp, Heterodera glycines
atgtcagaccgccgaagagaagcggaggaaaaaatggcaaaagcaatgtaaaatttaaaatgccaattttcaattttaaattttgtttccctttttcttcagtttcatctctgccgactgttggctttcggtgttcgatttgctctctccgcgtaaacttggcctcggagttgcactgatcagtcaccgatttgacttttacgtcgatgaacacttcaaaacgcgcaaatgggcgctgaaatttattggaattggaagcaaaattggaaagaatggcaccaaggaaatggaaattaccaattacaatcgaaaagcattgccaattcctcaaattcaaatgccacgcaaagtcaccggattcgaacgcatcatcatcaagtaa

SEQ ID NO: 65806 - DNA, 568 bp, Heterodera glycines
atgtccagattctcaaataaccaagtttttttttacattttggttataaatttcttgaaacataactaaatttttgaatttttcaggctatagaaaacacgtatggctaccgaatgaaatatacattaaaaatttggttggtttagaacacagttatatcaaaaaattttttgttcgtttttgactacgtcataacttggactccaatttatagttgctaaaaactttcaaattaatggtgtaaaatgttatccaaaaagcaacaatttattacacttttatttgttttattatcaatagtaaatgataatcgttgatattctaatttattaatgcataaattttaacaatgtaataatatttttctatttaaagctcttttgaaggagtcagttttttccatttgctgattataatatatatttttagaaaaaattggttttttttggttttcgtttgaatacaattatttttttctgttttggttttgcttcattttttatctcatgtcttatagacttttgctttaactgcagattgattcgtatattcaatagatttgtattta

SEQ ID NO: 65807 - DNA, 1012 bp, Heterodera glycines
  unsure (1)..(1012): unsure at all n locations
atgaccnaagaggttggaaaatctggttttttgaattcttctggccatattttttttatggcgtgacatccatttgcaccagcaacacaaaagcgcttaaggttcacacttttgagctaggcaaaaagacagtcaaaattttcggtttttaatgtcaaaaaatgctaatgtctggttaatgggggcttagagggactacaagatagcaatgttcttcgaattttgtggcgccaggatgataaacggcgaaatgttgattaatttggtaacgttttttgaaatattgcggggttatttttttttgattggtttgaagttcttaggacggatttgtatatccatgttttccatatttttgtcattttatgtccatatttcgcgatttttgggtgtattttatggacatattttgcgattttatctcaatataattgggaaccctaatgattagcaaaaataagtatcaattcatattcagcgcataaaattacatcaggaagaaaaaaatttaaaaaaggaaagaataaatatttgccactttctgagaaaagtgtttaagaaatcttaccattgcttttttgtctattattcgtttctatttcttctgtcgttataattgttgccaatttttcttcaataaattgcactattcaaaaataaaaacaaaaatagattcaaatattatattattttttgcccatttttttgctttttttgaccaacaaatatatgtatgcacaattcagcaatttcagcagaatgaacctttagaaattttgtacacattaactgccgtgtgcgtgaacagtcggcggatgtggactgggataaaacgctgcgcacttttgaagcttggctacctaaaattgcaattgggtactgaacaggggtgtgacttgtctcagaaaagacgagagcaagagtttggcgagagttgtcacacctctggtacagaagcgattgtgttttttgaattaccgattgacaaaatatgacgaactttactaataaa

SEQ ID NO: 65808 - DNA, 4974 bp, Heterodera glycines
atgaattcaatggtaagcatcattttgttgatataatcgtcagtttagaaacttcattaaaacttttataaaatgaaaatatctttgttagaatttatagaatttttggtgttttaatatatacaaaatttactgacggattgtcatggagccaaagactgtgcccaattgtccctgtgccaaattgccgctttgccaaattgtccctgtgctaaattgtccctgctgtgcccaattgtccctgtgccaaattgctgctttgctaaattgtccctgctgtgcccaattgtccctgtgcccaattgtcccccggtcgatcccttttcaggtgttggacaacaaaatcggagagggcgaagaagtgccaaatttgaatgtgattagagaagatgacccggtgaacgaattccttggctttttgcactacgaccaaaaattgggccatcacattgccaaagcgtacaacgaaacagtgttttgtgccgccaaaaatcaaattcccaaaagggtggtcgaccaaattttacaactgaccttctcattggccattcggataacgctttgtgtgatgtgagttttgaaattgaaataatcaaaaagaacaattcctattgtatccttattaaattttgggcttttggcacaaattttgttggcactttttccattgcaaataatccttaattaattgaatatcttatcaataatatttggcaatttaaatatatttttttcacattacaaataccatccttagttatgagaattatttctcgcgtttctatgaagtcggtgggtggcaattggaacaacttttgtccgtttttcaaattttatcggcacaaagaggcggcaccaacgaaaatgggtaaaatatttttcttccgtttttaattttgtgatttgctattaattacttttttaaagaatttaatttaatttacagaatatttccttttcaaatcattcgcattgacgcgcaaaccaaaaaacatttttgggatgaaattaaagctaacagcgcgatagaaccacaatttattggtgggtgaacaaagcgattaaataaaatttaattacaattaaattacaaaggattatgaagctgctttcaataatttaatttttatacataaaaagatttttaatagttttaattagtttattaatgttgtatagcaaaatacaactatattaatatcattggaattgtaagctgtctattggtgatttggcaattattaagaaaaagttctagcattaatatgttcagcaatgaggaaaatcatacgtatctggatcattacttacgatttcgacgtacacagggtcaaaaaagtgggaaatagtttcgaacacgaagtcacctttgcagcggctaccgtcatctgcaccaattgtattaataatggagaatggaaaaactcactagagggaaaacaatgtgctatatgtggccccaaccgtacaattacattctcaccatttgattacaaagagacaacagtagatcaaaaaattgtcacccagcaaactctacgggaatttgtccaatggctactatttgaacaaaataaaaaatacccaactgtagcctttgcacactttgggggtcgctacgacatgacaatgatcatcaaggaagttattgcacaaggtacaatttttaatattcatagattatatattttttaaggtgttcacgatccacaaattatcaaacaaggaaatcgtctttatgaactcaaaattaaggataatgagcatgccccactaacaattttccatgacagctacaatttgatgcctatcaaattatcgggtctcatcaaatcatttggactcaaaattcaagtgattaattttcataaaaattatcaattttttttttgttttaggataaacaacactttccacacatgtttaacaaatcatctaattatgaaaatgttcttactaatttaccgccgcgcgaagaatactgtcccaatcaaaagaaaaaaactgatctgcaaaagttcaacgaatggtacaacaccaattatgaccaacactttgatttaaaagaaaaattgcccgaatactgctgcaacgacgtcaaaattctcacccacgccctcgtcgagttgcgccgggaattcaaacaattaacacaaagagaaggaaatcatggaggaattgacattctttggcaagccatgaccatagccagcgcctgcgtcaaaaactttgcccttaatcatttgagatccaactctctagctatcgtcccggagaaaggctacaccccacaacaaaaccaaagtgcactggccaacaaatttcttgactggtactctcacataaacaacgttcatgtacaaacggccagttcccgctacggagaatatatgttcaagcgcgaagggcaggtttatcaagtggacggctacattaaaggcacaaatgggcagcgggacaaaataattgaagtgaatggttgtttatggcatgggtgtgaggagtgttttgatgatatggatgaagagacgaggatgccaaacgggaagacactgggggagcttaggataagggaacagaggaaacatgaaatacttaggcggtacgtcgacttggaggtggtatgggagcacgagatcaataaacaaatgaagaaagacaaagagatgagggagtatttcgaaaactggaaggattgttcacctatcaaaataagagaggcatttcacggaggacggacaggaccaatgaaactaatccacacagcaaaaccggggcagaaaatcagctacaaggacttcaccagcctctacccgtttaccaacttctctacaaaatatcccctagggcatccaaaaattatttctttcacgaccaatgagcaaacggtcaattggcgttctccaactgacaacccctacaaaggattacttaaagttcttctccaaccaccagacaacaacgtcaaaatcactgtaatgccaataaagtttgatgagcgcctgctattccctctctgtgaaaaatgcgccaaagttattagcaacaaatacccaaaaggtctcaaagacgacaactactcctgcccccacttcaacaccaacgaccgcgccttcgtatcaacttgtactcatcttgaattaaatgcatcattggaggctggctataccgtcagaaaactttttcatgtcctacaatacgaccaatggagtgacaatgtcttcaagtcctacgtgagcgaaatgatggccttgaagatacacgctactggctatccatcatggtgtaataatgaagaggagaagagaaaatacattgatgagtgctggagaaaatttggaattaaaatagaggataacaaaatgaaggctgaccccggaaaacgatacattgccaagctttgcctcaactcactctggggccgcttctccatgcgaaatctcctctcaaaagcaataattgacaacgacgaatgcctgatccgccaatactctgacgataaaaagattgaactaattgatgtcgagctaatggacgaagacaacgacgtgtatatgctcacctataaacctaaggaagaatttgtcgacgaaaacaagtactcaaatgtcgtcatttccctcttcactacttcaatggcgcgactatacctctacgaagctctgaaaaaggtcgctgacgctcctggctgtgaaattctttactacgataccgacagtgttatttatgttcatcccgaggacaacgacccacttcccactggaaaaggacaccttggagagcttacggacgaaaaacctgaccacgatattttggaattcatcagtgctggctgcaaaaactacgggctgaagcttcgccgaaaggacaacggagaaattgaatatgatttgaaaattcgtgggtttactctagacgaacagacggtacaaaagatacattatgatagtgtgaaagatcaaattttacgctatggtaccgaagatcccgctgatcctatcattgttacttatccccattttatccgtcccaatcttatcaaaggcaaagtgtacactcattccttcacaaaacagtaccagcctattttcaccaaaggtattattaataattcattccaagttctagaatttggtcatcgcaaatgaattgtataattttctctcagctattttctttttagaatcaaatctccggatttttattgtctctatttatacctcactcgcattagggacgggatgatccctggttgatcctctccaacactccaggccatccatctgagatgaaggtggatgagctgctcattattgcaatgagcagcctggtgcgtgagtgtttggattggggaccgaaggctaaacccgatttccttggtgcgtttgagcttatatttaattgaatttaaatcccggagaattttgattttatttatttcatttgcatttattcaatttttaactgtacaatttgtctttgtaattaaaatttttaataaaaatattctttgagctcaaccaaatgagtatttaaggactgactgatttgaattagtaatcccaagattaaaaatgtcttcagtgtcctctaagaaagcccttcaatcagtagtcgctaaggatcccgaaatacatagtagtgaaaaaaccgcgcatgagaaggaagcggaaaaaactgtccgaaaatcaaaatatgagtataatttgcttgatcatcaacgcttcttctggaaattggcccgcccaaaatttgctgtaatgaatttcctatgcccaacgtgtcgtcgaattaattacaaacataaggaccagttcaagttgatgggagaagatgagttccactttacccaagtgatgtgccagggatgtgtcaagtacaatatgatgcaaactgatatttacattaaacacactaaaaacccacactaaattgtatttaagacaataatttattattatataagtatcccaa

SEQ ID NO: 65809 - DNA, 1853 bp, Heterodera glycines
atgtacaaaaatttattaaaaccagacgccggggaaattaatgttgataatgctaaaaataaattgtcttcacttttgaagcagcgaaaattggactccgggacaaaaaatttactttacaaccaggaattgcgtcgtttcttaaaactaaggaaggaaatagaagacaaaccggtaaaggttgagctcaccgacggctcattaatggtttttaatccaagacatcgcgaaaaagacagaaaaattcctacacagattgtgaaggaagatgatgaagaagaattggatgaaacgggatctattccaacgtttgaagacccttatgcgacagctgaagagagtgatgcggagcctactacaacaacaacaccaaaatcaagaccacttttcagacctttacgtattgggacaagtaaatttcgtcaaaagcaaaagtctttcatagataggaaacaacaaaaaattatgtcgattataaataatgaccctgaaaaatttggggttggctctagaggacatatactgagagctgatggtacggcatatttaaaaagtaatattaaacaagcattagagcgaatacttagacggtcacccgagaatgctccatcacccataggtacaaaaactttagagcaacgactgagaaacgacccgaggactagtggaatattaaaacaaaaatttaatgaacaatcgggatcgggccttaaaaataaacaacaaaaatttataattaaaaaatggagaagttactaaacaaattgtataatgacccaaattcacctgcgtgttatgcagggcaggaaagactttacgaagaggcacaaaaatatgactcttcgattacaaggaaagacgttgaacactttctcgagggagacagaacatatactttacataaacctaggcgtgttcgatttaagaagtcaagaactgtgcccgctggattcatgactgatgttcaggtcgacttggcagattttcaaaaattatcaagagaaaataatggattcaattatatattgttgggtattgatgtgttgagtaagagggtatttgctacaccggtaaagtcgaagaatttcaaacatatgagagaagcgtttgacaaattgatcagtcaaatgccaatggttcctcatagaatattttcagatagaggaacagaatttgaaaatagagaaatacataaatatttccaagagaagaacatacaaaagcacaaggctcatactagtacggtgaaggctgcgctagccgaacgttgcataagaacgcttaaacaacgactatatcgttattttagtcaatcacatacaattaaatgggttgacgttttgccaaaaattgtaaatgctttgaataactcaaaatcacgaatcaccggtatgaaaccagttgatattaacccggataatgctcaaaaaatttggaaaaaggtctatggaaatgaattttcacgaaaaacttatagaagaccaagatttaaagagggggatcatgttagacttgcaaagtataaatccagttttgaaaaatcataccttcccaattattcggatgaaattttccaagtttatgatattaaaaaagcaaatccttatcggtttgggataaaagacgataaagaagagccgtttgacacccgattttatgctgaagacttggccaagaccagaaaggacgcggagacaacatacagaattgagagggtgctgaagactaggacaagaagtggacataaagaacatttggtgaaattttacgggtacaaagaaccggagtggattaaagacaatgatattgagagatgaatgtatttaagtgtattgttattatgttttagaaaa

SEQ ID NO: 65810 - DNA, 384 bp, Heterodera glycines
atgacattccaatctctgggactcaacccaccagcatttcaatctctgagactcaattctcaggctttccaatcactgggactcaattctccggcattccaaacaatgggactcaaatctccggcattccaaacactgggactcaacccaccagcatttcaatctctgggactcaattctccggcatttcaatctcggggactcaaatctccggcattccaaacactgggactcaacccaccaactttcaatgacattccaatctctgggactcaatccaccagcatttcaatctctgagactcaattctccggcattccaaacaatgggactcaaatctcccgcattccaaacactgggactcaacccaccaactttcaatga

SEQ ID NO: 65811 - DNA, 615 bp, Heterodera glycines
atgcaatcgccaaacctgcctccagtcaaagtttttgaagatgatttggatgagaacgaacggaagttaagggaacagatcaataaattgaaagaagaattggaaaagacggaagaaaagaaaaaggtgattgagaagagaagaatggagcaaatgaaattggccagggttgatgaagtggtcctggaagatgaagaggatgaagaggaggaggaaccaacctcaaaaaagtcccgtcttaatccgacggcgacgaaagaaattgtgcaaaaaataattaatgaagaattggttgccaatgatttggtcatgatcgatccaagagggatcaatgatcgaaatggaccggaagatgtgatcgaaagtcggagaattgaagatggaataagagcaaaaaataggagtgtaaatgaaaaagcaatgcgagaattcgtgatgacgaaaacatcgctcgatcatgcaaaagaaattaggacgagagcaatgaatgaagtgaaatatgctgaaaagccaactgatccgtcaaggcttttgagaggtgaaattcgtgcggcgaaatggacatttgcgaaaagcaaacgaaggcaattccgcctgaagggaaacgattggtga

SEQ ID NO: 65812 - DNA, 803 bp, Heterodera glycines
gtgccgggtgccgcggggtaagcagtgctggttcgtttcatcacggcaccgaaccttttggctagtcagcaatcgttgcttaacttgccagatcggacgggtgcgcatgattccactgttccaagcaccccaccaaaagcaaaacgatataaccaaaatataaggaaaaattttttaaaaaattttttctccatcttcctttttgatactaaagcatcagagtgctaaaattaagttgtaaataaaatttggtgcgctttagagcactttctgaaaaaaatatttatgaaacaaaaaaatcgattttttcaagtgtccgtttggggtactcaaacatttatggggagcaaaaatccaacgcagaattaaagtacaggctatagggaagctattccggaaggattcggtctccccataaatctgggcgcatcggctcggggggactgccccgaaaacaaaaaaatcgattttttcaagtgtccgtttggggtactcaaacaattatggggagcaaaaatccaacgcagaattaaagtacaggctatagggaagctattcccgaaggattcggtctccccataaatctgggcgcatcggttcggggggactgccccgaaaacaaaaaaatcgattttttcaagtgtccgtttggggtactcaaacaattatggggagcaaaaatccaacgcagaattaaagtacaggctatagggaagctattcccgaaggattcggtctccccataaatctgggcgcatcggttcggggggactgccccgaaaacaaaaataaatcgatttttt

SEQ ID NO: 65813 - DNA, 126 bp, Heterodera glycines
taattaaatccattccttcgggggaccgtgccgggtgccgcggggtaagcagtgctggttcgtttcatcacggcaccgaaccttttgactagtcagcaatcgttgcttaacttgccagatcggacg

SEQ ID NO: 65814 - DNA, 708 bp, Heterodera glycines
atgacagcacagagaaatatttgggcatttaccttttgtgcgtccctccaacgaatggtgaaaattgagaattttaattgcattaattaattttgattaccaaagatggaaattggagcttcgaatgttcggcaaccctacgaattgtttcacaaaagaacggaacggaggatttaacgaaaaaaattgaccatgtttttaacaaggaagagaacgaccggggattcaaatatttcattacttttacggtgattgtttcacaaaagagcggaacgaaggatttgactttccaattagacagagtttttaataataaattgtggcggttcccacttttcattacttctacggtgagtggcaatcaaaatcctttttcatagtttaataaattagtgaaattaaggaattgatggacccgagcaaaggattttacgacaaaattgaagataaagtgactttggccattgatttgacggtgggagaagaaaaaggaaccaaaaaacgcaaattgaccgatgaataagccaatccaatcacactcattttctattattttctcattttcaaattttatacaatgcatatttatttttattgaaaattttaaaatttttgaatcattctcacaatttaatcaaccaaaaaaatattcgaaataatttttttttattttctattaaattcttttgttcgaagctaacaaataaa

SEQ ID NO: 65815 - DNA, 739 bp, Heterodera glycines
atggacgcccttctatccgatttaaatcagacccttaaccgccataaaaataatgctgaagttgcacactttgtgcaaaatcttgagtccattctcgccgaaaaccccactgatccccccgttgaatacttggattttgattccgaaaacagcagcgattctacatccaattctgacaacgaggagttgtttgttgaatccccgaaccgtgatccccgacaacaaaaataccccattgaaacgcaaagaaaaatcgtacagcttttggacgaagggacttcttataatcaaattaaacatctctatagaaaaattaaaagcaataacgagattgcgaggtttttaaaatttttggatttactaaattctttgtttaagaattcgtaaatatgttgccagtggggggagtaaacctgaaaaaatatctgtgattgatcggcacgtttttgagcgattttatgaggcaaggagtcgtaatgaggccatgcatgacatagacctagccactttgggcttattaaaagcccgggaaattggactccaagattttaaggttaagaaattgacataatatttgttgaccacccaatttaaggcctgtgccacttggattttggaattcaaaagaaagcacaaaattgtggggcggcgcgtaaccaaaaactatgcatgaaaaaatccgccgctgtttccccaattttaacatttcaaatcgtaaaaatattggtcgtgtattaaa

SEQ ID NO: 65816 - DNA, 70 bp, Heterodera glycines
caaaagatgattagtaaacattttttgaaaaaaacccaaactagcgaagaggcaataaaattttaaaaag

SEQ ID NO: 65817 - DNA, 1982 bp, Heterodera glycines
atgaccaatttttgctcagtgtttcaaggtaatttgcttttattcggcttttgttattattacgattattggatttacaattttatccattttagggacagaaattgggcacttttccgtcgtccaaatgatgctccgtctccatttgcgtacacaatttttcaattgtcgggaaagggccaaggacacagccgaatcagtcagtttcaggaaaattacaaaaaattttcataacacattcaagaaagctattttttgaaaaacctttagaaaaattcatcaaaaatttgaaaatcactgaaaaattttattgaaatttcttaagaaaagaatttttttttgaaattaaaaatattcggcgggtgggggggggggtaaacccgtgcacctaattttgatagggcaaatcaaatacaacttttttttgctctttggtccctaaaattctttcggcaaaggcgttttgggaagattttgtggtccagtggtactgattaggggtggcatggaattccgaaattttttttggtccgaattccgttttccaaaaatttttggggcctcggaatgccatccatttctctggctggtgccaatgagcgcggccgcgaaatttttttttttttgcttactttttttgtttttagtttgggattgtgcctgggcctcggacgcccatttgtttgccacttgctcacgggacaaaacgctgaaagtgtggcgcatttgtgccgcggtggaacaccaacaacaacaacacgacgaagaattggaagaagtcaaacaaattgccaattttgtcgggcctgctccccaaacggcagttgacattgctccaaggaaaatccgagataggttagggggggggggagcattcaagaaatttcgacatttttttactttacccctccccctcgaaaaaaccataggggtatataattaaaccgagaagacataaatgattataggctctatgagaatcactgatcgatataagcactttgccattcttttgcgactgactgatcagaggtccaactccaccgcatgtttgattttgcgcagaaaagtgaccgcctctctgtcgtcgatcaggcgatggtcgtaagtgagtgcggtgtacatcatcagacgaatttcgacctaaaccaatgggttgtattggtggtacaaaacaaactgagttgtccgatctcgacaccctttctcgacgtgcctttgcatccaccgccacagtcagatcaaaaatgccgagaatggccgactgcggtgggctgatgttcggagtgccgagctagcgctacaatttgttttacaaggaatctgaattggggggggggggtctaaatctgaatccaaactcttaatggttgtgcattcgtacacctttctcgtacacgctccacttttcttcattttttgacggcaatgattcggctaaaaacaaaaacaatgttcatacaaaccccaaaaaatgaatgcccaatgttttaacttacgattggaattgtcagccgttaataacacacacataataagtgtacgttgtagatgttgcatttgtaatatgcatacttccaattccccccacaccgccgcaccgggcccccggctcgggcatctttttaatgcgttttcttagcgctacaatttgttttacaaggaatctgaattttgggggggtctaaatctgaattttagtgtttttgtcatggattttaaaaaaacaagggaacgctgccaaaaaaccaatgccccgacaaaacaaacctcaaacaccgagaccaaactcttaatggttgtgcattccaatcctttgcacataccaaacttgttggccttggagttttttgatccgactaaaaacaattaatgcaaatcccaaaagtgaatgcaaccaaacttacgttcggtactcgtaggcacagaaaaagactatttctttctctgcttgcagcgctggtgaatgcgtgcgtcagaca

SEQ ID NO: 65818 - DNA, 825 bp, Heterodera glycines
atgctaccgtgggataacaatgtgcttaccttttttaaacacgctcaagcgctggaggaagcccgagcggggggcccgatgcggcggtgcggggggaattataagtatgcgtactacaaatgtaccaactgcgagtaccgaacgtaagtttggttgcattcacttttggggttttcattaattgtttttaggaggatccaaaaaatccaaggcgaagaagagagtggcatgttcaaaaaattggaatgcacgaacattgaggtttgttttgttggggggattggtttttaagaaaacgcattaaaaccatgcaaacgttttttcgctctattttttggtttgttctgttttctcattggttttattgttgacgcacgcattcaccagcgctgcaagcagagaaagaaatagtctttttctgtgcctacgagtaccgaacgtaagtttggttgcattcacttttgggatttgcattaattgtttttagtcggatcaaaaaactccaaggccaacaagtttggtatgtgcaaaggattggaatgcacaaccattaagagtttggtctcggcgtttgaggtttgttttgtcggggcattggttttttggcagcgttcccttgtttttttaaaatccatgacaaaaacactaaaattcagatttagaccccccaaaattcagattccttgtaaaacaaattgtagcgctaagaaaacgctgcccgagccgggggcccggtgcggcggtgtggggggaattggaagtatgcatattacaaatgcaacatctacaacgtacacttattatgtgtgtgttattaacggctga

SEQ ID NO: 65819 - DNA, 187 bp, Heterodera glycines
atgggcttcgaaagtgacaaccaagttcacatgtacaccttttacgaggatagtccgtccatgggattaattgcgtcgacggaaattcagccgaacaatgcgaaatcgcaagaattggccgattgggtgaaggggcaaattgaggggaaatttgctgctaaaatagtgcacgaattggaattggaag

SEQ ID NO: 65820 - DNA, 135 bp, Heterodera glycines
atgcatcaatcgcttgctttcaaaattattgccattttggctggcattttggcattgttcgggcccatcgattgtcgcgcaacccatggcacgtgtgtccaccaaggcagacaataccgagagggcgaggaatgg

SEQ ID NO: 65821 - DNA, 508 bp, Heterodera glycines
gttctgctcaattttcgacgacgcccaaatgtttgtgccgattcatttgaccgatggccgagtcatttcactgccaatcgttcgttttccttttcagtttaaaatttatttaatccgtttttattttcggactcgcaatcgaccgcctttgaattgtgcgaaatgttgtgccaacaaatttgtctcaaagatgcgtttggcttcggcctttttcttgccgttggtcgccgttttattcgttctttgggcgttggctccgaatgcgtggtaaaattagataaaactttaaaatccaaaaaaacaatttatcttttacagattgacgcaattgcatcgcttgagacgaaaagcgaaaaaaattggcgaattttctttaagaaagaattgtttagagcccaccaaaggtgcgttgccatcatttcctgacaaatgaagccttcctttacgactgactttccgtttaagtgaatccgacgaccctttggccattgaattgacctttcggcaa

SEQ ID NO: 65822 - DNA, 788 bp, Heterodera glycines
atggaagttgatgaacatgatgatataatgatcatcgaaccacagacaagtggacaggcagttgatgccattctcacccaagcccaagtggccggtgaaaaccaagctgacatgcttggtttggtgtcggagtcttgcatcccgcaagaaccaatcgcgcaggctgatgatgtaatcttcgtcagacctaagacgccaccaaggcgatcactgcgcgtgcaaaaaaggctttcagcttctgttagccgttcgccttcaccggcgccaaaacgacccccgccagcaaattcgctgggaatggcaacgccgatcacacggcgttgctctgcatttcacaaggggtggcaatgcgctgcagcagcagccaaacatttcccggaatattgtgactccgggaaactcggtgacaaaaaatgcgccgattgcggtgcacatctcttctcacatgaagacagtaacatttgctgccggaagggaagagttgtgctgccaatgcttaacccgcatcctgacgagctcaaagagctgattgtggggaataagcaatcccgtgaagggaaagaatttgtgcgacacatgtcgcgttataacaacctgttccaatttgcgagcgtttccgctggcaacaaaccaagccctgctggcggtccgatggccgttattcttaacggagaattccatcgccgcataagcagcatgcaggctggaaacactcagattcctggttttggccagttgtacattctggaccccagtcgaggctatggaacaacgccaaaacaccccag

SEQ ID NO: 65823 - DNA, 536 bp, Heterodera glycines
gaaagaacgacgagttgccaagacgagtgttgggaaaagaatggtgttgaaacaacggcagatgaacggcagcgaaaacaataacaacgcttatcaaaatcgcgaaggtaaaatctcggtcactgaaaggccagccaaattaattttaattttgttagtgatcgttccccttcttgttttcccacataaatgaaacttgtttaggtaattttttgaaaaaaaaattattttttatcaaaataagcaatttttaaatttctttttggctaagcgatactggtgagaggagcggaatactgcactcgtttttttaatatttgtaattgtttttcagttgaaatcatgcgttcacagaagagaaacattgcgatgcctccaattgctgaggaaacttcgttagtgcaccgaagtgagatactgcaacgattggaccaccaaatgcgcaaaaacccgaacttcgaaaatcgaataaaatcaatgctgagagtttggacggacgacatgtcatcgccggccattggcacttcaattttgga

SEQ ID NO: 65824 - DNA, 141 bp, Heterodera glycines
attttgcgcaagcggttggaggacgagcaaaatcaacggccgacgaagcaggccggggtggaggagttggagaagaagtgcaaggaggtcaaggagaagaaccagcagctgatcctgcagaagcaggacctgcaaaaggag

SEQ ID NO: 65825 - DNA, 205 bp, Heterodera glycines
atggtgattagaagaggtacaatggtgatgagaagaggtacaatggtgattagaagaggtacaatggtgattagaagaggtacaatggtgattagaagaggtacaatggtgatgagaagaggtacaatggtgattagaagaggtacaatggtgattagaagaggtacaatggtgattagaagaggtacaatggtgattagaagag

SEQ ID NO: 65826 - DNA, 3730 bp, Heterodera glycines
atcaccattgtacctcttctaatcaccattgtacctcttctaatcaccattgtacctcttctaatcaccattgtacctcttctaatcaccattgtacctcttctcatcaccattgtacctcttctaatcaccattgtacctcttctaatcaccattgtacctcttctaatcaccattgtacctcttctcatcaccattgtacctcttctaatcaccattgtacctcttcaaatcatcgttgtacctcttccacccgtggtaaacggttgtgaagagcccgcacaagcttaacaaaatttaaaaaacgggcgcgaagctcccgtttgagttaaaaaaaatttaaaaacgggcgcgaagcgcccgttcgaggccgcgaagcggccgaaaatgccaaacaaaatttaaaaacgggcgcgaagcgcccgtttgagctcaacaaaatttgaaaaaacgggcgcgaagcgcacgtctggtcacaaccaaatttaaaaaacgggcgcgaagcgcccgttcgaggccgcgaagcggcctaaaaatcactgaaattctttaaaaattcaaaatctcttcacaaccagatagctaatctaggtagcgaagctcaagaagcgcgaagcgctttccccagcgccaccctcgcatgcaacacccgctagttataagtttataagacctttcattttaatgtaaataagtgatacattattttataagcaaataattggaccaaagacaatgatagtcatatttttgatccgaaaaatgattaatatcataaatataaaattatttcaagaaattctggttgctaaattcggaaacaaaataaataaaagtaataggcaattttactttataaatgtaacattatttaaaactgctaaaatcgcaagaatagatacgaatattagcttttttcgtgtgcggaatataaaaattgcattttaagtcaagttttaacgcgttttgcatgcatgaatttaataaaattaataattggttttattttactagctgtgcaccaacaagttttggtatgtattgagaataataaaaattttaattctttataagtttataagacctttcattttaatgtaaataagtgatacattattttatcagcaaataattggaccaaagacaatgatagtcatatttttgatccgaaaaatgattaatatcataaatataaaattatttcaagaaattctggttgctaaattcggaaacaaaataaataaaagtaataggcaattttactttataaatgtaacattatttaaaactgctaaaatcgcaagaatagatacgaatattagcttttttcgtgtgcggaatataaaaattgcattttaagtcaagttttaacgcgttttgcatgcatgaatttaataaaattaataattggttttattttactagctgtgcaccaacaagttttggtatgtattgagaataataaaaattttaattcttatatacgttatattgacaaggagtttcgttgctaaaaccattttctcccggccgaaggccgggagcgccctgaaagtagtggaagggtcttacaactttttgaggagcatccgggaaaactatagagaaaaattcagcgcggacgactgagtcccggggaccgatttctcactttttcttgcagtttagggcctgtaactttttttctaaaacccgaatcaaaaagtgcccgctgtgagggcactccccacaactgtcctctacatgctggtattttttatttttttattagagccaccccctggcctgcacgcttggctaattgaagtgtgctcaaaatgtacacttcagtaccaggcgaataactcgccaggggttgctttgaccgaaaaattgtttctgagcaaaaatgtgtagtatttgaaaggctatccaaccaagttttaaaatttcgaaaattttgaaaatttttcgagctaggcctaaaaaacggttttcgggtttttgaattttaggattttttaacgatttttcccagagaaacggagaccacttccaaaacatagtttttcgagctctatcgactggtatttttttcggaaaaatttcgattttttcccggaaatagaaaaaatttttggcctgagcgggacatttgagtcccgggtccataactcgtcaggggttgattttagcgaaaaattgtcttagaacatttttgtagagcattttaaatgctatcgaatggtttactacatgatgtaaaattttcaaaaattttcgagctaggccccctagaaattttcaaaaatttttttggggtcgaaaaagggtgtgaaaaatatttttctggggtaaaataaggtgctgagtacgaatatgatgtctattttaagtttcagaattttgggaattttttaaaaattctttattttttggcaattttttggccctcgggattttggcctaatatttgaaaattcataactaacctcagggtaagtcaattttcatacaacaaagctttaaaaatagagaaaaatcaggagaattttatgggatttatttaggttttctaacatcaatatgaaaaaagttattccagaaattctggaaattttagatttttcagaaaaaaattcgtaactgccttctgaaaagctatttgagaaaagtaaaatactacaaaaatccgcaatttttttctctataatataaattttattttaaatttttatcacatttttaaaaaaagatataaaaataaaagtgattttgtgattcgggtccaaaggggggagcacatggtttttgagtggaaaaatttttctcacaaaaatcttccaaaaatatgtctttaggggttatttgggccgctgatcacgaatacgtgatcagattttacttttgacatcgtcaagacctcagaatccctgtgtgattggggattctgaggcatcattttgaggggggggggggcaggttcgaatccggacggtgtaacattattttttttgtgcatttttacgttattttcaatgaatttaattaatttaaaatattttgttgagttaataaataaaaaattatatttaatttaattttttttttgataaataaattttataagtttaaattaattgtttttttaattgatagaatttcatgtatttttttaattaaatttgttaaaaatattttcattttaatttaatgaatttactaatcactgttgtatcaatttatatttaaagatttgttgtaaattaataataaaagaatttatgtaaaaaataacaattatcttttaataaagaatttcatatttttttaattgaatttataaaaattaatttcatattaatttaaatattcaattattgtacatttcaaaattctctttttaattaataaaaggaataattaatttattttttaaaatttataataaattgcattcaatttttgtacctcttctaatcactgttgtacctcttctaatcacagttgtacctcttctaatcacagttgtacctcttctaatcacagttgtacctcttctaatcacagttgtacctcttctaatcacagttgtacctcttctaatcactgttgtacctcttctgatcacagttgtatctcttctaatcaaagttgtacctcttccatttacttttgtacctcttttaatcaccgttgtacctcttctgaccaatgttgtacctcttaaaatcacttttgtatctgttct

SEQ ID NO: 65827 - DNA, 307 bp, Heterodera glycines
aacagatacaaaagtgattttaagaggtacaacattggtcagaagaggtacaacggtgattaaaagaggtacaaaagtaaatggaagaggtacaactttgattagaagagatacaactgtgatcagaagaggtacaacagtgattagaagaggtacaactgtgattagaagaggtacaactgtgattagaagaggtacaactgtgattagaagaggtacaactgtgattagaagaggtacaactgtgattagaagaggtacaacagtgattagaagaggtacaaaaattgaatgcaatttattataa

SEQ ID NO: 65828 - DNA, 653 bp, Heterodera glycines
atggacggtctttccctggacatagtgcttcaatcggtcggtcgcgtcgaggagaaatgggtgggccgaatagcggtggcggtcatcaacggactgacctatctgaaggaacagttcaacattttgcacaggggtcggtccgactttttcggcatttgtgctaaaactgttgtcgttgttgatgtgttttgaagatgtgaagccgtccaatattctggtgaacagccagggcgagatcaaactgtgcgacttcggagtctcctgcatgttaatcgacagcatggccaattccttcgtcggcacgcgctcgtacatggcggtgagaggggatgggtcatgccggaattcatctgttgcatttaaaaagcaaattcgaaagtcatttgttccctttctttcagcccgaacgtttgaccggcgcccgctacagcgtccaatcggacgtttggagtttcggtctttcgctggtcgaactcgtcatcggccgctacccaatcccggccccgtcgcgcagagagtacgccaaacttttcggggtccatccgaacgatgtgaaaatggaaaagaacggaacggaggaggaacagacggcggacgacctaacgccgaagacaatggccatttttgaactgttggattacattgtgaacaga

SEQ ID NO: 65829 - DNA, 399 bp, Heterodera glycines
cagaaatttgaacaaaacaacaacacggaagaggaaaaggaagaaaatggcagaggaggagaagaaggagagaatggaggacgaggggaggaggcaaatgatggggaagagaatgaggaaaaggaggaggaagaggacgaacaggaagaatcaattgttgaagaggaggaggaggaagaagagggagaggaggatggaagggaagcatttttggaggaattggaagggacgatggatgaagaggaggaagaagaagaagaaaaggaggaggaatttgtcggagaagagaatgaggtagaagaaaaagaggaggaagaagaggaggaatttttggacgaattggaaggggaaagggatgaagaggagggggcattgggaggaaagaagagcagaattttg

SEQ ID NO: 65830 - DNA, 723 bp, Heterodera glycines
atgccaaaaattaaatcaaaatcggccagctttcgggaatggattcgaaggatcggaggaactgacttttattcaacaactggcaaaataatttattgtcaattatgtgaacaacaggtaactgcgacaacatccgtcgaacaacaacaactaccaataaaaaattcacagattccttgcacgcaattcgcgcatctcaaacaacacaacgaaacggtaaagcacaaggcaaaattggaacggaacaaaggaggacaacagcagcaatttttgacaacaccaaacaatgttccaaatcaattcaaccttgatttgtgtgaagcctttgtctcagctaacattcctttccaaaaattggagaatgaaaaattcaaattttttttgggaaatgccccatcgttacacacttcaaaaaaattacttgcggttgacttttgaccaggtcattcaaaaaacaaaaccaaaaacagtaattcattttagacaatagagaaaattaagaggtattttaggcatttgcctcttctttaaaaaaaaataattaaatgtaaaatgccattcctaaataattaccagccctagtaatgagcaataagtgtcggtgttttgcctttatgctattgattttgccgtttgtccactccgcttttctgcttctccttttcaatgtctcttctccctttcgttggcatttatctttccattctcccaacaacaataata

SEQ ID NO: 65831 - DNA, 203 bp, Heterodera glycines
ttgttcttattgcatttttgttaaagaattttccaaaaaatgtcgaaatagtgaaaaaatagtgacaaaacgccaaaatagtgatttttaactattttagtgacaaaaccccaaaatagtgatttccagtgacgaaaagtgacgtccaaatgaaaaaattttaacgcagaaatgcgttttttgagctcctttcttcaaaacaa

SEQ ID NO: 65832 - DNA, 108 bp, Heterodera glycines
atgacaaaacctgacactttggcagaacgaatgaatttgttgctaagcactggccttggtgcggatgtgtactttttagtcggagaagcagacgcaaaagaggcaaat

SEQ ID NO: 65833 - DNA, 704 bp, Heterodera glycines
atgcttttaagccccgccgtgaggcgggacagttccaaaattttgtaccacattttactgtggaaagtccaagtaccttattggacaactacgtgtcaatgagcacagtcgcctttggccagttgtggaacggaaaaatgggaatatcagatgggggcgctcttttctaaaaattcctcttttcgtctaaccatccctcccttttgtgcactatttcgtttcaaaattgaatcattttttttgtcttttgaaataaattgtgaaaaatatacgaaaattattttcggttttaattatgctgtacaatgcttttaagccccgccgtgcggcggctccccttttgtgcactattttagtttttaaaattggttccggactttttggctttttgaaataaattgtgaaaaatatacgaaaattattttagcttttaattatgcagtacaatgcttttaagccccgccgtgaggcgggacagttccaaaattttgtaccacattttactgtggaaagtccaagtaccttattggacaactacgtgtcaatgagcacagtcgcctttggccagttgtggaacggaaaaatgggaatatcagatgggggcgctcttttctaaaaattcctcttttcggctaaccatccctcccttttgtgcactatttcgtttcaaaattgaatcattctttttgggtttttgaaataaa

SEQ ID NO: 65834 - DNA, 78 bp, Heterodera glycines
aaaagagcgcccccatctgatattcccatttttccgttccacaactggccaaaggcgactgtgctcattgacacgtag

SEQ ID NO: 65835 - DNA, 1044 bp, Heterodera glycines
atgtacaatccgcaaggcattattactctggcacagcataaagtagaagagcttgaagccctagccgacattgattggcggctgcacagctgctttaacttaagctgtgtgcattttagcctgccagacccgccaacttcaattgccaaaaatactgacgcggcaattgaagagtttttctttggcgatgatgatttgaatttgcctccagggcaaccaaatcctcgtccacagccaaatacccctccgccacttaacagcgaccaacagaaggtctttgatgctgttttgttggcaatacagtcgaaccctagggattcgactgtcccccgccgtttcttcatatacggcgatggaggcacaggaaagacattcctgtttggccaaattattaggcgcttgcgaaaggccccatacacctacaaagtgcttgctacggcatccactgggtgtgcagccattttgctgccatatgggaaaacagcccattccacgtttcgtctgggtagagaagtgtcattagacaaactcccaagcattccgctggagagcttctttgcccgtcggattcgtgaggcccaactcatcatcattgatgagatcaccatgcttcacaacacggtgattgaggtcatcgaccgagtgtgcaaagagatggcaattcgccagcacaaggatctcctcttcggaggaaaaacggtcattttcagcggtgacttcaaacagtcgctgccggtcgtgcctcatgaaggcttaaccgctcaggtgacagcctgttttcaaacgtctccgttgtttggtcaattcaccacgatgaaattgaccatcaaccagagactgggccaaggtcagcaagcgtacttgcaaatgtgccgccaaatcgggctcggagaaaccggagagcacttctggattcctccgcagttcctcgttaagagcaaggaagagctgatagactatgtctatcctaacttccaacaactccttggcaatgacaaggagctgctcaatcgtttgattctcgctccacacattgacacgtga

SEQ ID NO: 65836 - DNA, 257 bp, Heterodera glycines
  unsure (1)..(257): unsure at all n locations
aatcncttcggagtntggcaaatatcgtcctttgccatccgacagaaaatgttcccgcaaaggctgcgccagcgacccgcccccgggccactcattgtcagcccggacattcttctgaaaatgggactgtccaaccgacgaaaacgagcagtttgatcagctcaaagaatggatgcgctgaggcggaggaggagcaatgcctttttgtggaacattttggcccaattccccaatacagcgaaacggacgaaaaagag

SEQ ID NO: 65837 - DNA, 946 bp, Heterodera glycines
cccgcggcgaattgcgccgctgcgcccaccaaccgccaaactttggccgccgcgttggcccacccgccggtgggccaaaattcgtcgcgccgccggcgccgcccggtggccaacatggacaacacattggacggactggtggccaagcgggcggagcaaatgccgacgccgatgaagcggcgctaccaaagcgaaacggaggccatcgaattgccggacgacgagcaggagactaaggcgaggaggaaaagcctgggattttttctggaaaatttttaaattttgcccgaaatttcagcgcatggaaactgatccggacgtgtgcacgcgcatgtgctcagtgtgcggctaccagggcaaatgggtgtcggagatgatccggcacaagcgggtgcacaccgcggaaagggttggttggtggtggcaccggcacgcaaaaaatttcggcatttttcatttttgcagcccttcaagtgcaagtactgtaaccgtaccagcaagtggaaggccgacctgatccggcacgttgcgagtaagtgccgagaatggaatgtttcgggaaatcaaatccagactcccgatatgcttaaagcgatactttagagtttgagactaatcggcgtggctctttaatcgattgaagctaaaattattgtacgaatttcaagacaaagcttaaaaatgacgcttcgaggcgtaaaaaacgaaaatttcctctgtagaaggaaaaagaataccaaaaataacagccaaattttaggcagaaatcttagaattttgctcaagaatctagaggagttttagaacagtttatttttgaaaaaaaatcgttaaattgctaaaaaaatttttggccccttatagaaacccatggaattcgtgtggtgtcaagtacagccgtaccaaggcgttcgagcttggaaaaacgcccaccgacgctgacgcc

SEQ ID NO: 65838 - DNA, 816 bp, Heterodera glycines
atgcagaaattagtctttccattagtgaatctttacaaggacaattgccttcaactgatgcacgaaaagctgaaaaaccaacaattggacacttgggcacaactgaaaaatgccattttgaaagaaaaggaagcgaggtaaaaaatgaagaaaaattattattataaaaattaactttaaagagagcaaaaaatgaaagaattaatgagccaaaaaacaaacaaaattagcacaaagaggccgaaggaaagggtaaacaaaaatatatacaaagtattagatgtagaccaaaccctaattgttcagggaatcgactaccattacttctatcggtttgatgccaatgcgatcagttgccgccactgtccgtaccgccgaccggcgcaaaagaacttgaagccgaccagcacgttgaagagccatctgaagacgcaccatttgactgtgttggagcagtacagaaggagcaacgacattttgaaggaggacagcggaaaagagcaaaaagaagaaggaggaggaaccatcaaaacagaagcaaaacaatgggagagcagcatcaaaacggaatctttaggctgacagagccctaaacaaatcaaatttttaaaaaatcattggaacgcaaaaaacgggtcggtgtcgtttcggtgcccatgttttggtgccaggcccaagtttttgaactacaaattttttcattgtcaatcaaatccaacaatttcggtatcattcgaagcttaacatatttcgaagctgtttataagctatttgcttctcgattagacaattaccaaaaagttcataacatgaaaa

SEQ ID NO: 65839 - DNA, 390 bp, Heterodera glycines
atgggcctttgtaatggtgcgagaatgaaagttgagcaaatgcaaccgaatttgattgtgtgtaagattttgactggagacaaggcaggtcagactgtgtacattcctcggatcacgctttgctgttctgaagattacccttttgacctgcataggcaccaattcccgttggtgttagcttttgcaatgacaattaacaaagcccaaggtcaaacccttgagcaagttggaattgatctgaggaaagatgtgtttagccatggacaattgtatgtggctctttcgagagcaagggcttggaataagttgagaattagattagatgatggaaatttagagagaaaggtgaagaatgtcgtgtacagagagttattagataacagtgattag

SEQ ID NO: 65840 - DNA, 102 bp, Heterodera glycines
ggaagctattcccgaaggattcggtctccccataaatctgggcgcatcggttcggggggactgccccgaaaacgaaaaaaatcgattttttcagagtgtcct

SEQ ID NO: 65841 - DNA, 1805 bp, Heterodera glycines
atggcactgtcactgcttgtaccaatgttggcccaatgctgtggtggcacgcgcatggccgcgttcacttccggcgacaacagccccaacgagccgcccatccgcgtgtacccgtgcggtgccggcccgaccgggtcgcgcttccgcgttgtgcccgccaagttcaccggatcgcacaaaatttcgccgacaaagtaagtccttttcttgggcgggaagggttactaagaaaattaggtttttttatttttattttaaagtttagagtttttttgtatgagatgatcattcttagagttcgacttgggcctctggatccaagcctggataggtccatgacatttcggtaacttggattttttcctggacctagatttttctgaatttttgtccaggaaatacagaacccacgtggaatccaggtacacaaatccaggcttttttttcaaaatgtcgagctctaatgatcacaatgaaaaattcgcttgttatgacacttaactcatggcaaagtactgattctcaagggcgttcttgaaatcactaaaatctttacaaatgtattaccatttatatttgaaattcctcttaaacactgtctttttgatttgccaagatttatttatctaaattttgaatttaaatttagaaaaaaattcttaattttcgcataagacaatatcaggaagcaaccaatttcaccaaaaattatcaactaaataaaatttgtttttatattatttttaatattttatttgttttcaacttttatttaaaaattgatacttttcctaaaattattttaaaaacatattaaacataaaataaattttttttgttttcagtgccggccccgtgccggtgatggaggaaattgccaaggtgcagccgggctccaagaactccaaagcggtgtccccatcaattgatgaacaactgttgctggaccaactggtggactcgacggacgcaaagccattaatccgataaaggcgccaaaaattgaatttgaattttttttttcacggcggtggtgatgaggacgacgacgacgattggcattgggcacacaatttcccccccccaaaaaaaacaactaaaaatggcacaattccatactatttgttctgtgggcgagcgtgaataacaaaaacacagaccaacaacacatttaatcataatcaatcatccccaatatgtttgatgaatgaaaaatatgttttggcgttttgattaggtgttatttttgaatttcgaaatttgaaaatttaattatatggtaggggcacattgaatattcaaatgatcataaataagcctaccaacttttatagagggataatatgggccaaaaataaggtaaaagtcccaaaggatacgcagagataatgattttatatttttaatttttttgttattaattattttttaattcttttaacaaactttgatttctcataattattcgaaaatttctcactcgttattattaattattcgtattttaaggtttttatttttagcaaagttcaaaccctaataactttctgaatagtttgaaaacaaagagcataaaactcaaaaaaaacccaaaaaatttatcttcaaaaaagttaattattttcgtagatcactaaactcaaatgaacaaaaagttaattacacaaatttgcattttatcaacaaaaaaaagattttcgtgtctttttgcaatcataacagcatcatcaaatcacttaatcattcattcacattcatcttttactttaactttggtgactattagctgaatttgggtcaacata

SEQ ID NO: 65842 - DNA, 1238 bp, Heterodera glycines
tcaatatgaaacggatgagctaattgcacgcaatttggccagtgcaattattgcctaattataaaataaaaataattaattaatttcagctcctccaagcagtgaaaagcaaaaaatgcgatctgaaacatatgggcacaattctgtactgtgcttcacaaaatcaggcattaaaaattttgtcatattattagcatttatttaaatttaaaaaaatggaaaattttgaattttattaaaaaccaaagaggggaccctttttggtttgatttaatatgaaaatttattccagggggttttgggggtccctgatcaccaatcgacacatattttatccaataaacgacttcctaacctaaacctaaacaaagaaaaaaatcataaaacaagaaattaagtcataaaacaagaaatttgaattttcgactttagttcaagttcgggtaagggattagatttggtcaaaatagatgtctgatttgtgattagaacaaattttcatacattattatcacaaaaattttgcaacccaaaagggtctctttagttttttaataaaattcaaaaatatccgcttttaaactagcgccaaaatttttattccaatttccaaataaaaatttcattttgcttaatgaaacgaaaatgtaaatttatattttacggctatcaatttgagttataaaataaaaaaatatatttaaaaaacattttaaaaattttatttcaaataataaatgtaaaataacgcatttaaaatgaaattgaattaaaaaaataatattttttttgccaggataaccgcaagtgttgctcgcatttgaatttgtcggatgcaaaattgggtgttggcgagcgctgcttgcgcttctgcgacccgggcggtgaggccggcatttcatccattgcccggtcggatgtcacgtgtctgttcaattggaatggtaaaaattaaaaataattaaaaaataaattgattttggcattaattaagaggccaattaattaattaaaagcaattaaattagtagagaaataattagtagataaaatcaaaaatattttttgactaaaaaactgaagaatttttgattacaaaaaattggttgttttttgtgcttttaatgagttcaattattttctaatcatttaacaaatcttgcaaattaattgcccctaattagcgctttgttaatttagtgctgatgtattgtcaccactcaggcattaaaatggtg

SEQ ID NO: 65843 - DNA, 643 bp, Heterodera glycines
agtggacaaatccctccaccaatcactttcattccaaatccaatcccaactacgaaatccccgcaaaatgaggctattcagcatttgcctgcttcttcttcctctccttttgcttcttcttctccccccaccttttgccaatgccttcgaggaggaggaggaggaggacaacgaaatgcgggcccaagggcaactttcggatgaggtaattgttgccaatgccaatgatgatggtgggccaaattcggaacaggatgaagaacaaaaccaaatgcgggcccaaaggccaacaccactgccttggcagccaacacagtggccaaccaagccaccgcaatacccgccggggagaccgtggccgggatcaagcaacggcaagggatggggaaacaagccatggtatggcaacggaaactatggcaagggcggcggcggaggaggacgacccaaccatcgaagcggtgccattatgctgcagccggcaacgccgcgttggcgcacgcctcctccctttttcccaactcgtccaactcgttggacaaaattcccaacttaccgacctcgtccacgcccaacgcgtaggcccctcatgcccaattttgtgccgcagaatgtgatcccgggaatgccgtcatcgtactga

SEQ ID NO: 65844 - DNA, 925 bp, Heterodera glycines
tttttgggttttattttttaattcaaaaaacccaaatattaaatttttgctttttgtgaaaataaggattaattttttccaatttttaggtgcgctgtgcggacgaacgcctgctgggcaaggcgtcatgaaatgtgccagtgggtcccgccccgccgaacccactgttctccaccgtcaatcaattcatgctccaatggacacgtcgtttgcgcgacagaggcacgccgatctctgactacgagctggagatacgcgagcgtggcaccaagctgatgtgccggacacacgaatcaaggtgggggaaaacatgagccgttcgtccccctccccctcgtttcatccccccccccccccctcgccgtaaatttttttaaaatttacaattagaaatttaaagaaaatcttagaaaaattttatgcgacttttcagcaattttttgcaaaactgaaaaaatcgttagtttttcaaaaaaaaatgtttttttttgatatttttttataaaaaaatttctaaaatttcttgtaaatttcaaggcttgaatttttttcaaaaacttttcgggggtaaacgatacttgaaatttgtctaaaaaagcactaaaaattggcatcactaaaggtgatcggcgtaaaacggcagcacatctacgagttccgcgtggccgcagtgaacgcggcgggccaaggcgagtggagcaagaactctgtgccaattgctgccacaccatcctcctgtaagccgttgatcaccaagggactgtttgcatgcgacatgactgtgctggtgggtgaacaggccaagctgctggtgccctacgcagcgaaaccatggccgaaattcgtttggagcaagaatggcgaagcgatggatgtgtgtgccgacccacgcgctgaggagaaaatcagcggtaagtgaacgcgc

SEQ ID NO: 65845 - DNA, 607 bp, Heterodera glycines
atgagcaaacaaatctcatcggctggcacatggccaaaacagctggcagcaaaactatgcgccatctacgattttcctgtaagtaaaactacaaagagttttatgataattggtttgggccgtcccaattttgagggcccgaattttggcacttttccaaaatttttcaggttgccgttccgtgctgcaacggcttcacctcgttggtgttagcattacgctcagctaacattggaccgggtgccgatgttttgatgccgtccataacatttgttgctgtctcaaatgccgtcctcaatgttggtgccaatcccgtgtttgttgactctgctgatgaatgggactataatccaagttggtctctgctgttacgagcggcaactcagaaaaccaggcacgaaaaaatcttggaaacgttttgactggggcgtaaaattataatgaaattccatatttttttttcatggactgtcttaaacggacaaaaatatattttatcttggcttgaagcttctatgtaaattatctatgtccatattaagggtgaaaatgttatgaaagtcttttttaaaaaaaggaagtttacgaatttattttatttaataaa

SEQ ID NO: 65846 - DNA, 1751 bp, Heterodera glycines
  unsure (1)..(1751): unsure at all n locations
atgtcggaattatgtcatttgccgaatcggtaccgtaaaatataccgaaattgtgccgtctcgtgcacatcagttggcacccgctcctccgttcgccagcatgccacaaaaccatttgatgccagctgcagttgcgcaccattgtcagcagttggcttcagcctccgtcttggcacagttgaagcggtggttgtacccaatgggagcagcacagtttgttggaaaggccttgacacaacggcaatgtcgcgccaaagtgcgacaagttggagctaaaattaaaattatatatatatatatttaaataattatggcacaacttggtgacagttgaagagcaatttatcataaaaaattattttatttattttttaatccaatgtcatcatttgccagtaatctttgcacacataaattttaaattaatatttcaccaaattttgaatctttttttttcaagtcccattcatcattgaggaagatttgaattattctgcattaattttagccgtgctggggcgtttcttaaaaattgccaagtgggcgagaattaaactacaaatataaaacaactatagagaaatatttttatcaaaattttattgatataagtttttatatatccgtatttcttttttaatttcttattctttaaagtgttcaccaaaaacatgaactgacaagcataacaaattctaaaaaataaactagagtgccacgggaccgggaattttgggcaaaccaagtcccggtcccgtgggcactctacaataaactatttaaaatacaaataaaacagacttttgttaatgaacattcagcactttcatacaaacatttgcaaaagcttttgtcgcaatcgtagcgttttttagattttgtttatatagcataaatcatggtaataacagcaatcatcgactatattatttaaaaatgtataataaatttaaaatactttatttaaacctttttaaagttgcaaaaccatattactggtgctacaaagcatgtgtcaaaaaatgaagtgccacaataagtgcttcaatatttctttgcaactttcaaagggaaatattaattataataagcttatcagaaaaaaatgaaaataattaatttatcttttgtggttttcttattagttcataatgaccgtagcgccaacttggcagtttttaagaaacgacctagcaccccttaaacacattagtttttgcggactttgggcagttcaacgctggaaattggtcacatctccaataaattgtatctcctaggtgttctctaacctagtaaaattgaccctcatagaccaatttttttttcagctccgtgttgcgactcatatgagaggctatttgtaaaaatcagaatgattaaataaaagaatttatatagactcaatgcctagagagttgcacgtggatgagttgcccgtggatgagttgcacgtggatgagttgcacgtggatgagttgcccgtggatgagttgcacgtggatgagttgcacgtggatgagttgcacgtggatgagttgcacgtggatgagttgcctgtggatgagttgcctatggaatgacctgccactgcgccagnttctgagttggttccatgtgacactaaaaaatgactttttcggaaaattttccggtctttaagggtcaaaatccaaatttagctgatgggggaccgttctaatagaggttttttgaaatatttggaaaaaaatgggaagaaaaagaataaa

SEQ ID NO: 65847 - DNA, 500 bp, Heterodera glycines
atggcgccgtcggataggccaaccaacaattctgtctcggacaaacaggccagtgcggtgatcgactgggagctgttcagcgcaaatgcgattttggacggctcggaaagcatcacaaagtcgtccaacttgtccaacatgtacaagccggtgccatcggagaacagcaaagtgaccattgcatcggcatttggtctgccgggtgctccatctgtttcaaaatgccatgctgactttctctatttttttcccaatgaaattgttcaacaccatgaacttgctgcaacgtgatgttcagcaccagttcatcctcgtcaaatgtaattttgttgttgctgttcagcaccattacatccgttgttgctcccgttgtactgctctgcaccgttggtgtcgttgttgctattggtgttgttgtaatcggcgttggaatttgtgccgttactgttgtctcacttgtgccaacatcagcaatgcccaactggaactgttggtgctga

SEQ ID NO: 65848 - DNA, 643 bp, Heterodera glycines
atgaagtttggcgaatttgtcaacgttaaaaccgtggcattttcgcaggtgtaaaaatggcatcgcataatgcccaatttgtcgcggacagcataaattcgttccttaaataataaaataaataaataaatttttacagtattcttttttcaaaattttattaagtaccgtaatctctgagacaacaatttgtgttattggcactccgtccgctgctttgatccgttcaacatgaacaatgtgttccacattttgtggtgagatagtattattgatgaactgctgctggtgatgatcattggacgggttcacattgttggagcctagataaaaacatgcacataatgccaaaagttttgttttaaaaggatttgaaaaaaaaatttagcattgcataaaattatagcaaatcactagggatgggatttttaggcaaaagcctatttttttcctgagctccccgtggtccgaaacgcacgaaaaacatgtttttttgggctgttgttaagctatttttcgagttattagtgcctattttctaggcttttatttttagcgcctaaaaagcctaaaaaaatttgaaagagcctatttttggctattttggcgttttgcccaaaattattaacaaaaatgcaataaa

SEQ ID NO: 65849 - DNA, 891 bp, Heterodera glycines
atgtttttcgtgcgtttcggaccacggggagctcaggaaaaaaataggcttttgcctaaaaatcccatccctagtgatttgctataattttatgcaatgctaaatttttttttcaaatccttttaaaacaaaacttttggcattatgtgcatgtttttatctaggctccaacaatgtgaacccgtccaatgatcatcaccagcagcagttcatcaataatactatctcaccacaaaatgtggaacacattgttcatgttgaacggatcaaagcagcggacggagtgccaataacacaaattgttgtctcagagattacggtacttaataaaattttgaaaaaagaatactgtaaaaatttatttatttattttattatttaaggaacgaatttatgctgtccgcgacaaattgggcattatgcgatgccatttttacacctgcgaaaatgccacggttttaacgttgacaaattcgccaaacttcatttatcggctagccgaagatgcttggaatgggtagagaaataaatacaaaattaattaattatttgatctcggattcaattagaacaaataaaaaggcaattagcaacccaaaaaaaatgaatatttaattatctattttaatttaattggttttttagatttttatattatgccacaacggctggcgatgtgttcaccacaccgatgctgccgttggatgcgagccaaaattattcactgtccatcacgcgtcgggtcgaaaataattattaaatattttaaaattaattaattataaatttttacgtattttaagttagctgaattaccagctgtgaacagtttggaagtggatttggctgaacaaaagctgatcactgtcagccgcacaggacaactgatca

SEQ ID NO: 65850 - DNA, 118 bp, Heterodera glycines
atacacaaacacaaggaggaattgaacttgagaccccctttttggtgactaactcacagaccactaagacgaaaaaaccaacttaattgtacttggagcccaaaattgaatcgccgtg

SEQ ID NO: 65851 - DNA, 869 bp, Heterodera glycines
tcacccttctcgtggagagtggcgccaacgtcaatctcggggacagcgaaggagtaacgccgataatgatcacttctcgtttcggaagggtgaaaaaagcaaaacttggaaaaacttggcattttttgtttgttcaggtcgaacctgtgcacttcttactttctcacggtgcaaacgttgaacagatggattacagcggtggctttttgcccgtttttaaataattattgcactaattaatatgtctttttcaatttcagggatgcgatttgctcttttggacgccgccgctgatggccatttggaggtgtgccgtttactggtggacgattgggcagctgacgtcaaccagcaagcgatcgacggtaccacgcctttgatgggcgcgtgcagcttcgggcactttgaaattagtaagaagcaactggtgcataattcgactcaactttctgccccaattttcagcggtttttctcatcgaacatggcgccgacattgaccacgctgacatggacgggtacaacgcgttgatgtgggcagtgaagtacgagaaggctggtgtggcgcgacatttgctagcgatcggcgcgaacgcagaccaagtgggaattgacggtgggtgggcccaaaaagggcttaattgtaatgctccaactgattgactgctctccccctcccccatttaaggcaaaagggcgatagatttggcccaagaaggcagacgtgccgaaatgatcgacctttttcgaaccacagctaacaatgagcagcgggaggatggcaatgcgtaagaaaaaaaagaatttccgatcaaaaaggatatttttgatttcaggcaacaggacgagcaaccaccgcagcaacagtaa

SEQ ID NO: 65852 - DNA, 872 bp, Heterodera glycines
gacttggacggtcaaattttgcacggacgcaatctcgactatgggtggactcagctgctcagagagccaccacattgtggtggattatgtcagggacggacgagtgcaattcaccggcatccaattcatcctttatagtggacttttgaccggacaacgccctcacgcgttcactttgtctctcaatgctcgatgtaaactgttcccgaatagcgttgattttgcgtaataatttgtcgcgatcagattccggtggcccatgggataatcttttgatggcactgatcacccgctttcgtcatccaatcgcatttgaactgcgcaaagtgttggaaactgtggacaattaccaggaggctgttgacaaattgagtcgcatcactacggttgcgccatcctatttaatcgttggcggagggaaaggagacggcgcgatcatttcgaggtgctaattaagcaatttaagaatgaacgtgattttttcggcttattagggaccgatttggagtggccgatgtgtttttcttggactatttgcaccaccggtggtttctcgtggagacgaacagcgacccatgggagcgaatgacggacaagcgaaggtgtgcagaagattagccatgccactcactttcaattgcccacagaacaaaagcggcccaatgcctaagacgggtcggccagcgtttcatctccccaattgcgctgtcctcccgcgtcctcgccattccgcccgtccgcaatgagtcggccgggccaaagagccgaaaattgggaaaaataatttcagacagaccatcttcacaacggtaatgtcggcggaacagcccaatttgatttacaacttcacaaaagtgtggccaaacgcagaa

SEQ ID NO: 65853 - DNA, 739 bp, Heterodera glycines
caaacctcaagcaaaatgaactgtgtacattccaagcattcacttgcgacaataacaacagcagatgtcgtcgcgttacgaaacggcgaaaagcaaagggacgaaacggacgcggaatcaatgggagagggaaacggacggaacgacaacggcaccagcagcaacagcagagaagaagcactgatcagactgatcaaaagccacatccgactcggtgccatgtgcggcagcattggctcgttcatttggcacattcaacggcaggtaaaagaggccatggcacggagagaatcattttaatatccatttgaactgttcagattttctacgcccattgtgccaaattggtggcactgttcgctgtcgccgtcgcccaccttctcttcctccacccttttctcgatttgttttcgcgcctcgaaaaatacgccagccaattggactttagcagcgtggacgccgaactgatcagacaaagtgtgcacgacttggccgatgtgagtgttggcacggatttgtcggcttaagtgtcggttgccgcccagcggggacacttttggcatttgtccaaattttgtgggcctttcccccgggccctctcagcacaagcatttccagtacaaaaagaacgtgtggatgaccgtggccgtgctgtgtgtcggactgtccaccagctccttcttcctgtttctgctgccctcgtcgtcgcccgtgcgcaaatgccacgtttatttggtgg

SEQ ID NO: 65854 - DNA, 600 bp, Heterodera glycines
agtcagcaatcgttgcttaacttgccagatcggacagcactgcatgattccactgttccaagcaccccaccaaaagcaaaacgatataaccaaaatataaggaaaaattttttaaaaaattttttctccatcttcctttttgatactaaagcatcagagtgctaaaattaagttgtaaataaaatttggtgcgctttagagcactttctgaaaaaaatatttatgaaacaaaaaaatcgattttttcaagtgtccgtttggggtactcaaacatttatggggagcaaaaatccaacgcagaattaaagtacaggctatagggaagctactcccgaaggattcggtctccccataaatctgggcgcatcggttcggggggactgccccgaaaacaaaaaaatcgattttttcaagtgtccgtttggggtactcaaacaattatggggagcaaaaatccaacgcagaattaaagtacaggctatagggaagctattccggaaggattcggtctccccataaatctgggcgcatcggctcggggggactgccccgaaaacaaaaaaatcgattttttcaagtgtccgtttggggtactcaaac

SEQ ID NO: 65855 - DNA, 921 bp, Heterodera glycines
atgatggcagactttcggagacgcactgaggcggaggaggaagcgattttgaggtttgtttcgcattgggttttctttctcttgctctgactaagtgaattttgcaaccctgtcaaaaaaaagttgaatgaatacagagttgactgatgtttgcttatttcgctaaaattttcacaatttttttaggtgtgtggtgaaggagcaaaaggatggacaaagtggtgatcagcagcaattagacgaacaacagctaagacaaaaggtctgtcgccggtggtcattaggcaatcatttgtgacgaattaaaaatagtcattttttggcgaaaaatggattggatacaaacccatgtaaaacatgcctcccaattcatgtttttttgaaaaaatacagccccgaaagtcagtgtgcccttaaacaatttgtttttacgtaattatatgtttatttcagggggcaaatgtggactacatggaaatgggcggggaggaggaggacggactgtccaacggcggaggacgcaaaatgctcaaaatggagtcatcgtcgcccgtcaacaacagcaaggcatgtggttaactgggggaaaatgagccgaaccgtggaatggacggagattatactcttgcatttttagatgattttcattggtccggtcaagcccattgtccaacaatcgccgaccgcacctcaaaagctgcccaaggtggagctgcgcaaccagtccatcatgttggacctttctgatgttggttgggttgggtaaattgggcgttgggcggtgggcaaattaatggacggacacacaaaatcgaaatacggacaaactcaggaaattaggtgaacaggtcgagacataatgagcgagggagtgtcttaggtgttagggtccacattggtgaccattgacatgtaagagaa

SEQ ID NO: 65856 - DNA, 49 bp, Heterodera glycines; identical to SEQ ID NO: 51181

SEQ ID NO: 65857 - DNA, 551 bp, Heterodera glycines
atgatttatttatttccattttcttttaagggaaatctgtcacggattattttgccacacttaaattttgatctgcttggcattgagttctatgtgaagtttccgaccaaccttcttttcacgattgcttttagcagtaatgcgccatttctttatatgttcaggtattaaaaaaaattaaaattttaatttaatttatttattttattttattttatttgcagcactgaccatcaaaaggcattccgttcacaattcaaacggatctttggcaaaaacgaatcaaagcatttaattgttgcattcgctaattaatttcatcgaaatttttaaaggcgcttcaaaacaaaaacaaaaaattgactttcgattactaatttttttgataaaatttagcattaaaagctcttacctcaaaatcgaagctttgcgctgtctatagcataataattctgttggttttatcttcaatatttattctaagtaccagcttatttttattttaaaatagaaacagagggtgctatgacgttagtcaaaaaaccatcaaa

SEQ ID NO: 65858 - DNA, 407 bp, Heterodera glycines
atgcgttcttttttcttcgccagcctcgctttggtgctcatttgtgcctccaccactgtttcaaagccccacccgacggtattgtggtcatttttgaaaatgcatttaactgtaattttttttcttttaagcctgccccatctgccaagaccaatgaaaaaggttgctatcaagtgtgctttgtcgttgtgtgcatcaacatttgccctaaggccaaggttggcatttttttgtttataaaactttgggttcagaatttatgtgctaaaataattcaatttaattgccaagaacgatgaaaatggtgctgctgtgaaatggcttaacatttccgtgccaatccccgacgccatttccctgccttcctttaacatgacaaacattacccaaggcgaggagcaggaaga

SEQ ID NO: 65859 - DNA, 495 bp, Heterodera glycines
atgctcgatttgctgtgtaaagttttgctgtcacaattgggtgtgtctgtggaggttttggccgagtcggtgatcactgtagcggagaccatccgggccaattacgccaaccaggaattctttgcacaatccacagtggctgaccaggacggcgttaggtgtgtgtgtatagctggaagaaaaaaacaaaaatactgataagttaaaattgtaagaatttcatgaataaaacaatgaaaatctcctgaatttcacgccttttctaaggcccgctttactgattttgcttctgtcgatgacttctgaacgacaacccttccgtcttcgacttgccgttttctattgttttctctgttatttgtatgataatgagaagggcaaagtcaaggtttctcaattcattggtttatttgcgacttttattattttctatcagatcattgacatgcttttgccacaaaatgacaatcgttcttctgaagaggaaggcaacac

SEQ ID NO: 65860 - DNA, 196 bp, Heterodera glycines
tgtcaacaatgtcaccgccgttttggatgcaatgttacgcatcaaattgtccgttgtgcccggcccgttgctcagcgtgttcgtgcaaaacattgccaagctgtacaccttccaactgtgcaaattggaggcggacgacgattgggacggaattgaaacgttggacaatttgctcacctccaaattgcccgagtag

SEQ ID NO: 65861 - DNA, 584 bp, Heterodera glycines
tcgttgttgttgcacgtatgcgcatgatgattgcgtggaagcggctggggttgtactcagtgtttacgccacgctgcgcaattgccaaaaattgctcccgagataaaggttgaacatttattttaaaaacaacagtataattggaaattgaacacatctacaaaacaatggacaaaatttcaagagggaaaaaagttttgtgatctccgcctccaaattcaacgacgcacggcaagttggggtggcgcaagcggatgccatgctttatgtaatagtgcatccggacctttaaattttttgttaccgacaaacaaaacaaataaaaataccgttatgccgaggtagcctcggtacgcgggggccgagtgggtgtccaggatggacaggtcattacagcggaccggaaaattgcgcacggacgggcgcaggtgggcggtgcgcagttggacggagcgcaaatgctccacaatgtcccggcgtttctctaggcttttgaaaagcacatgcagctcgtgggcgttgcatttgaaccgcttgcagaggtaaacacgagcggaacggggcgacggcgttcggcacatgca

SEQ ID NO: 65862 - DNA, 794 bp, Heterodera glycines
actgagcaaggaacagcagaatcagaaaatgaatccaacacttcgtccggtagcgttaaactgcttgaaaatgacgctgaattggacagcaacaacaccagtaacacaaatgaaattgcatcaaatgtgaatttgagggcagcaaatgtgtctgatgttccggtaattttctaaatattattttaataattcattaattgggttttgttatataagctaattgattaactaattaattaattaggtttttgattacaaaattgaaaattgaaaattttcaatacatttaaataggccacttcactcacaatcagctgcacataaattttatgataaaatcttcaaaagttctgataacattttttatgctgaatgaaattcttatatttatttatttcatatttatttataaattaaaattttccaatttcaatgggaaatttttttaaatagcaaattattttgaaaatttgttttcagacaacatctgagcaaattgtctctgtgcctgacgcttcacaaaatgtttctactgagaacgatgaaatttcgttaaacaacctcacaaccgtattgcctaccgaagaaactgttactgtaacaactaccgtaagcactacaaccgctgcccctactacaactaccataactactacaaccgctacctctactacaactaccgtggcaaagcaacaaacttcacggaagccggtcaaatttgcaatgagtgaagatgatcatccccatgtgtttttgctgggtgacgaatgcaaggtggacaattaattaataaa

SEQ ID NO: 65863 - DNA, 618 bp, Heterodera glycines
agagagcgcaaggaggcagccacaacaaccggacaacgacgcaccgacgccacgcacagcgccgcagggcgccccacgagcgcgcaacccacaaagaagcagcgaaccagccaggcgaggcggacacgccaccgacacaaggccacgcagcagccagacacaggcggacacacgggcagcacagagcgggagaccacagcaccaacgcaaggaagcaccccaaaagcatgggacgcgaggcagctgccccgaaaagcggggcagcggccacaagccagcacgaacgaccggggcccaacagcggacgggggcaaacgggggggccaacgcgagcccaacaggacagcaggcaggaggcgaagaggaaccaccaggggaaagagccagcagcaggaacacccacagcgaccccgacacgacgagagcccggcccaagccacagcgaggaaaccggaaccagacagcacaccgaccgaagccggaacaccaaccgcccccgaagaacacgaaaaggctcagacccgggcagcgacgggcggcgagaacaaagggcagggacgaatgcagagcgagcggatgactcgcccctacaaggaattcctcgttcacggacaataa

SEQ ID NO: 65864 - DNA, 480 bp, Heterodera glycines
atggcattccgagaccccaaaaatttacgaaatcggaattctgaccccaaaaatgtcggaactcggaatttcgtgccatccctactctgtaagctggggtcacatatgaaataacggggatcacgaaagtctagtagacagtacgggagggtgagggaggagtaggcggttactgtactgttttttatttttttcacacgctgagcacgaagacggcacttcgaattttaatcatttaattttatttttaaaattccagcgccttctcaagcctcaccagcaattaccggacggaggcgaatattcgtggcgatctcttcggcggttggcgccggagcagcgccgattagtggagagggagggcgttgaaaatgttccggtgatttggccaccttatttaatatttttgtaaattactgtaacaattgtatgactttttactgtattgttttaccatttgtgaattttcgtataaataaa

SEQ ID NO: 65865 - DNA, 1601 bp, Heterodera glycines
atgaaaggacggcccgtgcctttgcaaagtgtgatggactgctcaaaacagctgtgtgcctttagtgaactcgccgttgctgaacattttcccacttttcttcgcccttctgacgctgtcgcttatttggagtcgtacgtgcgaacattcgaattggcacggcacatgaaacttggcacggaagtgaggagaaaaaaatgggaaaagctcttccgttttgtgcgctttaggttaaaacgattcgccgatcggagtgttggcaaaagacagataattagcgggggattggcaattaaaccaatggattaattaattaatcccttttcaagccgatggattgtccaatgggcggacagtgaacagccgaacaacggcccatcggaaggacagcgactggtcgaggaactgttcgatgccgttctcatctgttcgggcgcccgcctaaggcggtggcgccccccggagtaccgtatggagagggcgttcaaagtcgaattcgaatttcctccgccaaactccgtcccctccctttgcttagggcacagttatccattcggaacagttcacacattcgtccgactttcgtggtcagactgtgtgcgttgtcggccttggtaactccgccgtggctatttccattgcattggcacacacagccaaacaggcactttatgagcttggctttttgtttccttatgcttcacattgcgtgagctgacctttcattttttgcttacattttcaggtgtttctgtgtactcgtcgtggtgaatggatattaccattgcttcaatccgacggacagaagccatgggattggcctttcagcagccgatggcatttttggggtcgccgatgggtgccgaaatgcctccgaaatttttgttgggaaatgagtgcccaatcagtatcaccagactgttcacaaaacaacggaattgggcgaccaatgcatcgattgctgaggtgacaccgctaaaagacttctgcggaatggcctggacaaaatgccaaagtttagtgccaatttgacatttggagctgaacagctctgcccactgcttgcttccggccgaattcgaattcgcccaaacattttgtcattgtccgactcgaatttggtcgaattcgccgacagaactgttgaacaacacgtggacgcgctggtcatctgcacgggtttcgaattcgactttaatttggtcgaacatggcaaacctttgcgagtgatgcacaacgatttccatttggtactgcggacaatcaaatccgattttcggatttgccattgccttcactttttcacagtataagcatatgtacgcgccggagttggcgccccaccacactttggccgttgtcggacatgtccaggcacctcttttcacacccttttaaacaattggattgcttaagccccgcgggggaagcatttggccaattgccgaactgcaggcgcggctgtttttccacgtgctcagcggacacacgcaactgccaactccctttttgatgaaggccgaattggagaaacgccgttgtgccgtgtccacggaaatgctaaagacacgaaggcacacacagacggtactcggcactga

SEQ ID NO: 65866 - DNA, 746 bp, Heterodera glycines
atgccaataagccaatttatggatgaaagccaaagagaagtgagtgacgacgacggaagttctaattgattgattgagcggactaattgattaattgttagtggccgagcgattaagcggaaatggcagtcggtggaaaacaagtgaagcaaaagctaagctattgattcttaagcatttcagcgattgcccatccctacgacaaattaagtaataaacggagggagaccaatcaaacgattaaacaattgacgaatatatttgttttattcaaaaaaattgccaaatttgacaaatccatccatctgcttagattttttcgagagtacgacttttcttcggattgactcaaaccgaaatccaaatttccaatcccagcggttgctaggacgagggacggggccgaaagagagggggaaggaacgggagaggagtggggggggaggcatcgaatacgtggaggcgggggggggcgaggggaattcgcgatggatttatggtggcggcgtacttaaaagccgtgggttggcacaaaaggtaactaattgacgagccaaaaacatcggtggtatttgcaggcaaacttagcaacagagcatcaattgcatatgaaaatatgcaattaagctcaggtcaacacatgacaattaatattttcatgtcaaaatttaaggaattaattaatgagttttagagcaggcagaactctcatttttatgtgtataattaattttgtatgtaatata

SEQ ID NO: 65867 - DNA, 696 bp, Heterodera glycines
atgccaccgctcattctccgcgaatggaaaccttatatgagggagttcgatggatgttatgaaacaaacggacaaaggagtggagattgcccattgaccgatcattccgatgcatcatttggaggagacttcttccatgtaattttgcacactcacgaaatggatcttcaacgtgtgtgcgacggaactggaacttgaaaattaatcaaaattatcattgcttataacaaatgattgggtttcgagtgtgggcgattggcctgtttttctaacattgtgtacatccgtcgttcaccgatctgtttgttctgcgtctgtccaacgtttagtggcccataattatggattcccgatcactatttcgaaatttgggaattcatcttattttcttttggcaaaaattgtgtccataaaaatatgggacgacatatttgacattagcctttaaaattttttccggaaaattttaaaaaactaatgttgaatggtccattggcaacaaataaaaattatttgtcccttacttttatatattttcaggccgaagacgagttcactctttcccacatcccttttctgggcgatgccgaggacgacacgtcattctgtgccgaactgatgaaaacattccaggacggcatccacggcacggtcaaaggctgcggagagttcgttggcccaccaatttgtctgtaa

SEQ ID NO: 65868 - DNA, 368 bp, Heterodera glycines
atgacttttaggctcgtcgtgaacattcctggcaccgaggtggacaagggcgatgtgctaagtgaatatggttagttattttatttatttttttaattttccgttttaagttggttcggggcctccccaggacacgggtctgcaccgttacgtctacctgatttaccaacaaaagaacacaattaaagacaccgaacacggccacctgaccaatcgttctggtaatatttggtttttttctaatttatctaaatccctggagaaaattatatattaaaatttaaggtgacaaccgtggagggtggaaaactgaaaaattcgcgaaaaagcacgaacttggcgacccggtggctggcaatttttatcag

SEQ ID NO: 65869 - DNA, 185 bp, Heterodera glycines
atgtggcaaaatcaaaaggggtcagaacggcgaaacggcgatgggaaaaggaagggcattcgggcaacggctggtccaaaagggccacacaatggcaaaggaaagggagggcactcgagcaggcgcggacagggagggcactcgcacagacagagagcagcgaaggccgggtgcagtgaaaggcg

SEQ ID NO: 65870 - DNA, 217 bp, Heterodera glycines
tgtcgtggcgacaaaaaatttgcgtcgaactctgcggggtgaaggggacgggaaggggatgaaatgggcgaggcgcgcagagtagccggtcgggggaacgtagggggtcgggaccgatcggagagcgatgagtcgtgccggttttcgtccaggcaaatagaccaagttgggcacaattttaataagagtatgtttattgtgtcgacctcaaacttgg

SEQ ID NO: 65871 - DNA, 661 bp, Heterodera glycines
aaacaaaaaaatcgattttttcaagtgtccgtttggggtactcaaacaattatggggagcaaaaatccaacgcagaattaaagtacaggctatagggaagctattccggaaggattcggtctccccataaatctgggcgcatcggttcggggggactgccccgaaaacaaaaaaatcgattttttcaagtgtccgtttggggtactcaaacaattatggggagcaaaaatccaacgcagaattaaagtacaggctatagggaagctactccagaaggattcggtctccccataaatctgggcgcatcggttcggggggactgccccgaaaacaaaaaaatcgattttttcaagtgtccgtttggggtactcaaacaattatggggagcaaaaatccaacgcagaattaaagtacaggctatagggaagctattccggaaggattcggtctccccataaatctgggcgcatcggttcggggggactgccccgaaaacaaaaaaatcgattttttcaagtgtccgtttggggtactcaaacaattatggggagcaaaaatccaacgcagaattaaagtacaggctatagggaagctattccggaaggattcggtctccccataaatctgggcgcatcggttcagggggactgcccccgaaacc

SEQ ID NO: 65872 - DNA, 969 bp, Heterodera glycines
atgaaaacagtaagaattttttgaaaatttttaaaaatcaaaatttagtctgtttgaactttgcttatttggcccaaagtgtgtccattcaattggccgttattgttgatggtcgaactgtgtttcagattacagtatcgggtgatttcttactgtatttgtgtttggtaaaaacagggagaatacaggaaccgacagatttttgaggggaggcggaattttgccaaatttattttaatttattcattcacaaggaattatttttcttggattattttgaataaaaaatatttggcaatctatcacttagagttttcccatttttcaataatttttcactattttaaaatttaaaattcttaatttagccataaatcctccgccaatttgcttgcctttatttgtcggcgaattgtgctttgaattttacaatgtaaaaagaaaaataatttagtttaatttaatttaatttttaattttttaaattttttagctcaatgtctcgcataatttgttcagcggatgtgccctttttgatatggttttgctccatcaaaaagtcattcacgaagaattgggctgcttcaaaattccgtgaattttattttaatttatttttttaaaatttaatttatcaactttaaattttgaatttagagttccaattgcttcggaaaatgaacattgaaagatgccatcgagaattagctaatttttgcgatgaaattacgattataattgttattggagaaatgattccgttttatttggccctgaaaaaaaagattgaaattaaatattagaaaaaccgcaagttaggcttaatgaataatattcctaagccttcttttgagaataatgaatttgctcaaggataaattaaaatattgcggataaaatttagaaaatttataaaattggttttttcttaaggttgaaactcggcacaaaattttaaaaaaattatta

SEQ ID NO: 65873 - DNA, 301 bp, Heterodera glycines
atggtaataactattaatatcccattttcgtgggatggagggggacgggggctaaagtattgaggtgacgagagatcggttggccaaaaaaattaaaatggttaattaggattaattcaatttcaattttgataggtgttcacaaagccggacatggtggagcgtttctttccggatcccaaagaagcccatactgttgaagcaattcgtaaggtccaagcaatgagttgggcactcggagacgacgaaaatgaagcgaaggaaattaaaaaggcaaattaaaatatttaaaaaaattaaa

SEQ ID NO: 65874 - DNA, 453 bp, Heterodera glycines
atgaattatacggaagataatttggatgaggatacaaagaagaaaattgaatctttactcgatgatcgtttctgcgcggtaaaactggcaatgagcaaaaaggaagtgatcgaagcaataaaaatggttcaaatttaataatgaataattttaaaaattaaaagaaattttcttttatttcctccggaattaaaaaacttatataagtatttatccaattttactatattaaggccgccaaaaaactacttgagaggggttttctattgcctcacgacattgaaaagtaatatatatatatatatatatatatatcagataaaaatttttcagaatttaacaattattccaaaaaattgtgacttttatatcttatttggttaaattttaaaaaaattattaaaattttattctttattcttttattagcgatgttaaattccttaaaataaa

SEQ ID NO: 65875 - DNA, 1236 bp, Heterodera glycines
atgggtggaatattccggtgaggcttatatttagttaagaaagcttattcagaaaaaggaaggtattggaacttttttaaaaatttgaaattagagtgcgagaatttcatacgtattcaggacggattttaaaacaaaaatcattattttattaaatatctatgaaaaaatttagattcatttggattctttgcctataccatcaattgaatgcaattgggctgttggaagttgccgagcacgagtgtgcacacttggctattaacgaaattggagagatttactttcagttcttaaacgtaagtttaaagagaatattaaactttatatgataaaaagaaagcggataaggataaaagtccaaaagatgggattatactatggacgaaagatgttttattttaaaattgaaaaataaggataaaaattcttaattaattttgcttttttgcccaattttaaaattttgcctttgcaattctacccaatttctttagcattttaacagatgattctgtgacaaattttgatgcaaatccaaaaaaaatccttcagattgtaaaataaattgaattattaatttcctttctttcttttatggtgtttcatatcaaattcattatttttctgcaaaggcttattatatgtcacaaaaacttgtttgttttcgtcgattggtaatgcgcaaaatcataaaaaactagcgcattaatttttatatgcaaaactgaatttaatatgttagttaatttaaaatttttcttttattttataaaagtaataagcaaagatgttgtaaaatacaatatctcttaaatttattctaaaaatgctcagcttgaaattttttcaagcttctaaaaagcaaaaattttattatgaaaaatcataaaaaatagcacagcaatttttgtattcaaaactgaatttaatatggtatttaatttaaaatttttcttttattttataaataatgattttatctaggtaaaaaaagtttaaaaatagcgaaatgaaaaattctgcttggtaggcctttttacttaaaaatcaataaagtttatattataagttattattttggaaaatatagaaagattcatatacataatttgcaattttatttatatttcagtattcttggtctctttcttagggctatattttgttacccattttttaattcaataagtttcagctcaacctggaaaattaaatgaccacttaattaataaa

SEQ ID NO: 65876 - DNA, 932 bp, Heterodera glycines
atgcaagtcaccgactgtggaaagcatttccttattaagttcaagcaaaagtttctgccacgcgagattagagtttgaagagagttggaccacccgaacctcgtctacttgtacaacgatttccagtggagcgactatcagttcctagtgatgcaattggctgttggtggagacttggtaattccctcttttgttttatgagtgttgcattacttcaccatttactcttcagctttcgttcctccaaaaatgtggccccgtcagcgaaacgacctgtcacaattggatgctccaaattgttgctgctttggattatctccaccgtaagggaatcgctcatcgcgatctgaagctggaaaacgtccttctttgtgaaaacggcgtcatcaaagtcactgactacggattctctaagcaggtggtgaaaattgtttttgcttatttgaagttgattttcagagttctgatttgtcttcaacattttgcgggtcgcgttcctattcgtcaccggagattttgcttggcatcgcttatgacatgttcaaatcggacatttggtcaaactctgttgtgccatcctttttatgctgatcataatttcaggtcattaggcgtcgccgcgttcatcatgatcacaaacacaatgcctttccatgaagacttgcccaaccagcaaatcgttgactcgcagcggaagcgccgttacaaatacccgtcatggcttaacattacgaagcaatgccgcactgccatcgatgccttgctgacttaccaaccggcttttcgtccggtagggttttgcttttaattcgcttctcattttctttcccattcagaacatctttgaatgtgccaagttggaatggtttgcccaagattccgcctctttgtggtgcggtggtcgtcgtgccggtgttggagtgatgggtcaa

SEQ ID NO: 65877 - DNA, 862 bp, Heterodera glycines
cgagattcgagagtggagggttcagcgaaattaaaaaaaaattttaaaggcaattaaaatgtcgatagtttagaaaattgtccaacagcgaccaaagtgactttgatcgacagactcagcgattgtgggctcaaaaccatcgaagcgacaagttttgtgtcgcccaaatgggtcccacaggtaaaagaaagaaaagccactgcaattaattatttctaatcatttatcctggaataattggcaaatccattaaaaacaattagtgccattccgttcagcacagatggccgaccatgccgaagtgatcagtcgctgcaaaaaatttgccggcgtcagctatcccgtgctggtgccgaacctcgccgggcttcacaatgcggtctcctcgcaatgcatcaataaatgtttaaatcatcaacagaaagcttttttgttaatttaaaatataaattggaaaatcaaaaaaatttacaattaaaagtgaattcacaaaaatttaaaacagagtaagcgctcaaaaaaaataaattaattaaattacctatatcaaaaataaaatatttttaaaataatttttctgtcagatcaaaaatgggaatgtgcgtgaaattgccgttttttgtgccgcgtcggacgcattcacaaggcaaagaccaaacaaaaggggggtgggcggatcagaggttcactttttttactttttggcacttttctaaattcgggtccaatgccattggattttttccagaatttgacaaataaatccttaaattttcatttaaaaaatctgttaacaattcgaataaattgcatctattagggtagtaaaaatattcaaataaatacgaaaaaaagaacaaaa

SEQ ID NO: 65878 - DNA, 811 bp, Heterodera glycines
atgaaaccgaaatttttatttgctataatttttgcatttttcatcggtttttccatttttgaagggacttcgtcttacgaatgggactcggataacttggctaacaatgtccaaacatttgccgaatttatggacgatctttatgaggattacaaggagaagggaaaaatgggtgagtttatagcaaattcaaaactaattaaattatatttttaatatttaatctttttaaaacatattttaataaagtgtaaacttttttttaattattttaattaattgtcattatataggaattaaatcttctataaccaggcatgaatttatatttgctaaaaaaaattccttctatgagccaaagttgccaaaattaaagtataaacaaaaatttaatttggtatttttatcgtttctaatttgaagggctatgatttttaggcaaagtgtaaaatttggcgcacatgatacgcacagataagcacgaaaaatgcattttccgcttggtttggtgtgtttacgatgacttttataatgcctttttttgcctatttcggggtttttgtgcctattttcagttattttcacttctgcctttttaggtgctatttcgtgatttttgtgccgaaaaaacgaatccctattaataacataagaatttaaaaaaaattaattatttttgatgttttgcttttgatttaaaaattttgtataaaatttttaaacttttttagacataccttggctaaacaaatcaaaactatacacggaaaacggatattcggagaagcaaaaaaggaaaggttcaatttga

SEQ ID NO: 65879 - DNA, 704 bp, Heterodera glycines
atgaaaaaatttttcggcggctccaaggcaaagccggcgccaaagcaggtttattttatatttaatttaaaaaaaataattataaatttggttttatgtttaataataagaataaattttaaaaactaattaaaaaagaaatttctttcaaaatattaagtgagaggattgaaacttgtaaatttgaaaagtcaataaaattttaggaaataaaaaaacgttatttcatggcctaagtccagttgacccttgataaaaaggcaattagattttctctttggccttcttatcactttcttgagcattaaaatgaaatttttccagcaattagctggttttgagtttaatccctttttaattgatcaaggcatattgatgtcccaagctcccgctccaagtttgagaacgcgtaacgcccgcggagatactcgggaaggactggtcgtgaaccggagatcaggccgaaaagagtggggacggggaatcgggattggcttaattttaaaatggtggcttctgctcccgtcatgcccttgttttacgcagtccttctgtcattgtttgccattatgtccacgtggattataatgacaatgattgataaaaattgaagcccaaccaggcaaacgtgtgaatgaatgaatacaatttttgaatgcttataataataatgcattttttctttttcttatgctatttcttaa

SEQ ID NO: 65880 - DNA, 1405 bp, Heterodera glycines
atgtacatagttaggcattttggggtagctcgggaatggaaaaaaataggaatcgagatcggattgatcggaatttcgcggtaggacccgacaaagagatgggatcgatcgacacctcatgatgtgactagggaccggacaaaacagggtcaggaaacttttagaggttcctggtctgtacattctgggaaaaatgccacggaactcgggtttgtttcggttatcctggcccaaacattgccaaactcctccaaacttattgttttttaatttattaattctcagcccccccccctcacaaaaaaaaatttggggattttttgaaacgaattcggacaccaaacctaatacaaaattcaaaattttgttggcacaccttggcgaatatggcccaaaattcccatgccaccgccgttgttggtttttgcctttgcccttcgcaatgtgttgttgttccggtggtcaatgatgaaaatttgctcagtgtgactgaaggcacagcccattccattcagacattcattaggcacaaatttaatggattaaacatttaaaaataaaaatttatgcttaaatattttggtaaaatgccccaaaaatttcccaaattttctaatatttttttttattttcaaagaaaattgtgttaagggtttccgggtcgtagaatcagattctggcatcaacttagacataaattaaatcctctagagcacaaatacgaaaatgtttattttcgtttttttgttcgagttcgggttaaggggttcgggattgagcgaaaacgaacggtagccggattgatggatgattagtgatcccgaaaggtccagggaatgtgttttttcatgacctaccgattttattttaaaaatattttcagttcgagattttttttaattttagtaaattttttcataaaaaaaataccatgaaaaaaatttttaaacaattttttagggatttttgaaaatttatgataaattactaataatttttcccataaattcgctgaaaatttaaaaaatatatttttcttgaaattttcttatgcaaaaacctaagctttgtctcccttcctagaaataaatcggttcattagaaaggtgaaaagtgtgccgtcgtcgtccatcgttcgtcacgaatgccaaagacagaaaaaaaatacaaaaaattttatcgcctcgccggcgaaaatcccttccccccccccatttaattaataatagtgtcttttttggatttaatctgcggccgacgtgccttggcaaaagcacacgtacactgaaaattgcttgcgaagaatggaacatttgtggattatttatatttgttgtttttgtgtcctcgtgccctaataatgccaccgcaattccattgcatcgattggattagtctcaataaa

SEQ ID NO: 65881 - DNA, 109 bp, Heterodera glycines
atgggctgcacaggcgacagcgaagaagcagcagcagcgatgtccgcttcattgagcatcgggcaaaagcgcgtgtgccgtcggtggatgagccaaaggacaattaggg

SEQ ID NO: 65882 - DNA, 280 bp, Heterodera glycines
atgccgccatattcaaatgccattttatgtattcataaattgccttcaattaatctattatttatttgcggccaatgcaggtatgaatacagtattcatctcattgttaccgtcttcactacctacagtacaccattcttgtccctgtcctttgtacttgccaaatttctgccttttttcacaaaaatggtgcagaatttgggcaagtgcatggctgcggagcaaatgaatacggtggcgagcgacccgaataaataaattggcacgaaaaattaataaa

SEQ ID NO: 65883 - DNA, 255 bp, Heterodera glycines
atggttgagatgggaaccgaaattcaaacatcccgaaatgaacttaaggcttttcaagaagaagtagataaagccaaaaacataacattggagcatgtggaaaagaatgacttgaaaaaagcaaagaaatcagccgacgtcgcaaagggaatcgccagacaggcaaagaccaaatatacatcaactctcgagggatataatgataaatcggaaaagggttttagcgggatagtgataggcttaatgaggcgctcg

SEQ ID NO: 65884 - DNA, 75 bp, Heterodera glycines; identical to SEQ ID NO: 54636

SEQ ID NO: 65885 - DNA, 75 bp, Heterodera glycines; identical to SEQ ID NO: 54636

SEQ ID NO: 65886 - DNA, 2094 bp, Heterodera glycines
aacattatctttttttctctaaatttttcgtcttcttttgtcgtactatataatatttttattattaggaaaaacaacatttacttcgctatgtttagcttattttgtatatgttagatccataggaaattttgcatatcgttagagaaaaaaattctgcatctattaatgctgaatttatttttgttaatgctctatttcaaaagttataagaaaaacaaaattttagagcctcataacttttctctggtacaccaaatcgcttagcatttgcttagaaaaagcttctcattatcaagagctttcgaaagataccaagattatccaatttggttggcaaaaaccttcaaaaataattcccaaatatcgtgattttttaatattttgacaaaaataaatgaaaatattcatgttgcacaacggacttgagccaccaccctttgtccctttactatcttacaaaaaccactgagccacacatgcaaatcttttctggtacaggagctcatttcccggacgctgtgtaaatacacggaaacgaagtgaaagtcatccttggttcaataaaatattaaaactttttttaaaccaaaaatgtgaaattcgaaaatctgatttttcgacattttggttcgaattcgggtctggggttcgaaattagtcgaaatggatgccggattcgtgatcagcgaccctgaaaaccattggaaccatgttttcatgacttttgaaaacaaaaaaaaatttcttcaaaaaaggggggctaccatcggcagtattaccgttaattttctggaatgagaaaattttcattagaaaatgagattttgagctcatattccgatttttaggtttggaggaatccgaagattaggtagacgtagataagtagctgctacctaattactttcttcctcatttaaaaatgcaaaatacgctatttggcgtaataaacatttaaaaattttcaattaaaaaaaactgaatcggtatcgctttgtatctttgtaatatgccgcacagtaccatacaaattcccgcggaattttttttggactaactctatttaagttttaatttaaataaagatttttatagaattaattctcttgatattttattgtgttttactgttttttatattttgaaaatggcttctgcacaagttgtgtcccaagtggaagtgccagttgagaaaaccatcgaccgtgaaaaggtaaatatttaataattattttatatactagttcatgtgaatttattaggtttgtcctctgttactacggattttttgtgcccatggacgtcataattcgaccagtgattattcgcgtggtaccgtccctccaaacgaacttcaaatttacacctggtcagtattggaatcaaaaagaaaaaccttttttgaattccttatttaggccacatgaattttaattttgggatataaatgtggattttggtgaaatatgtttcaggtacacttgccaccaattgggcagcggcgctttggtcgtccaacttccccagccgtctcttgtggaaacgatgaggcacttaattcccatccattaaaacacaaaaaaggttcattttgtgtccaggcttttgctttgggattgcgatgatcgatcggtgttattcatttttcatcgaagtgtccacggaccaatgcaaatggatgaaagtggcggacgtgaatgagcgcaggtacaacgaacacactttactaattgataacaaatgaaaaatacacttaattaatgaaaacatttgcaggagttggcaaactgtccattttatacgacaaccggtcgttttcatccgcatagttggtgatagaagaacccgatttaatctcaaaaagcaaaatttgcgatcgcttcaggcacatccaattcggccaacgaagtgttccactgtgtacattttgaatgtccggcaatggaaacggacagtgtctcagaggaggaacggctcgcccgactgcgacgtatcgtcacaaagaccattgaagacaacatttcgcctccgtccattggtgtgccgagttcgtcgtccattttggcctcgtctcaaaatgctttggattca

SEQ ID NO: 65887 - DNA, 2044 bp, Heterodera glycines
atggctggacccgactctcgttttattctcgaattcttcaaccgtgaggctaaagagattggagtaacgcaggaattgcttaacaattcacaggtttttgactttatgatcgtttgaattttatttttttttattcagcagtccgatcagttgatccaggcctactactttctgtgtgatttgatttttgaaaatgtcggcaccaccaaagagaacgagtgtgaagtggccactgatctgacgagggctcgtcccaagatgatcatccgaacgcaacagcataggtacgttggtttttgttattttgatcttacaattagtattttcgtatagttttatatacattgcatccacaatttgttcagcaatttggtgttcaacaagttgttcgatggttctaacgaatttctctactccgatctattgcaaccggacccccgcagaacgaagatgcacattgctcaactgattcgcttgtacaccacaaagtgtgacattgccaaagagctttccgcggtggacaatcacattgtgagtgtataatttggcggagtttactagttttagtttatcaattgggctaatttattcggaatttacaaatttaaggatgaacaaatgaaagcgcatgactttgagaagaactgtgaacgttccacacatgctgtatgagatgatgtgtaattatacgcggaagagtttttcccttttagcaactgaaagatcgcgaagaagcgcttaaccgcatggagacgcgaaatgacgaaatgggcagcaaagtgcgacgactcaaggacaaattgaacgatcgacaagcgctagcggaggatgagaaaagaaatgtcgaacgcattgacaaaattttgttgggggcacagtgcgaaaatgcaagtgaaaaatgaaatgctgaaaaaggggcggaaaattgtcaaaaactttggatttattaacatgttattagtgatttttcgcttatttttaataaaaattataggacgaatgcaagaaattgtttgcccaggaagaggaaaaccgcaagcgattggacaacaacattgtgaactcaccggaacgcatcatcgaagagctgtccaacatggaggtcgaagtggaggacatccgtcgcaaaaatgatcaagcagtgtcagttgtccattcgttcggtttttgtaattggtcatttattttgttaggcaaaacgaccgaaagttggagagggaatacggcgaacaacgcgtgaccagccaatgcgtggagagtctgatcaacggcatgcaacaattggagatgatgcaggaacaaatggtggagatgcgggcgaaggaagaagagcgacgaaaggtcgtcccatttggtgatttaataccaatttaatttatattattaagcaaatggacgacttggaaatgacccgcaaaaatttggtggccgaaattgaagtgttggagagacagtcgacgaccgacttggaatcgttggggggcgaagtcaaccacagggctaagtcgctggcgatgctcaaccagcagaaggcacagctcgaaaggtgccgctgccaatcagtgggatttggagagagttttcctgaaattgcatcaatttttattcccatttaaacctccctattttattgggaaagtaatttaacactgaccatgagagaatcggttcatgaattctaaatttaaaagttaaataggtaactaattaattattcagtgatgaaaaggagttggccaagcaactgaaggagaagaaggacgacattcgccagcatcagcaggagatcaagcgaaaagaccgttctttcatcattctcaccgacacttacgacgattccgtggccaaacttttcaaaaatttgagccttgtggagcaaaaggtgtgggaaagggcgtccttttgtcttataaatccggcaaatatgaaaacatatggcggaaaatgtgattttttcgtggtcatttttcaggttcaagtgagtcgctcgaaccttctcagcctgttcaacgagagcgaaatttttggtccgttcaatcagtga

SEQ ID NO: 65888 - DNA, 1455 bp, Heterodera glycines
atgtgtgccccaattgagacacaaacagcggtaaaaatttaccgaaagagggcagaaattctcgcccaaatgtctgatcaagatctctataagagatttcgatttgacagggaagggataaaagtaccatttttataaattcatttagaaaagtaaattaagtacattactaatttggtgcgtgaagaagttgagtctaacggccgttcgagagggggagcaattccggtagagttgcaagttgttgcaactcttgcttatttggcatcaaattcttttcaaatgatctgtggtgatttgctgggatttgatcaatctacagtgtcccgatcagtgctaagagttactacagcattacgaaatttggctggaaaattcatttattttgctccttatgaacaagtaccggaattatgaatgaattttggtcaaaaaattagtaccctttgcaggccagagaaataattataccaagcttttataatgttgctaattttcctggtgtaattggcgccattgattgtacacacgtgcgaattattcctccagcatccgctcacgaaaaggactattttaatcgaaaaggatacccctcgattaacgtccaaggtacaatacatataaaatggaccgaataattcattagcaatgtgattaggtgttgtcgatcacaatggccgattttcaaacatttcttgccaatggcctggttgcagccacgatgcctttgttctccgccagtcaaacgtatgggaagctgctcaacaacaatataattatgcacatgcaaaaacaagggttattgtcgagaatgcatttgggagatggaagcggcgattccatattttacattccgaagtacgaattaaattgcagaatgtgccaacattgatcacggcagcagctgtgctgcacaacattgcaatcgatcgcaatttgccagattttcttaatgaaacttttgttgacaatcagccctctctcctccaaattaattcacttcctacatttcgatcgcttgacagttttaatttgcgcaataatattgccgaaaacttttttggtggctcttcgtaatttattttattttttcttttctattcatgccaaaaaatgataaatctttctgatttattaatttttcatctttaaaaaatttatttttttaaattttctcactcgatccgcgggtgctacgtcatttcgcgacaagtgcaaaaagggcacttcgcgacagtgcaaaaattgggcacttcgcgaaaaatgcaaaaattgggcacttcgcgacagtgcaaaaatgggcacttcgcgaaacgtgcaaatttaaccgaaagagaccgggcctcatcagtacggtgtctctttgggttaatttatttaaattaattattatttgtgtttcggccctaaaccgtatacacacaaagccacagcaatcaagcaaagcaaaataaa

SEQ ID NO: 65889 - DNA, 882 bp, Heterodera glycines
atggcacgcgagaggtgcttgattcaaattttggagttttcaccgcctctccgcgtggcacagtgccaagaacggcataggactttccttcttcaacaacaacttgctgtgaggaaaattcggcactttcctcttgttctcaagttcgatcaagcgagccaccatggcttcattgaatcgcgccgccattaataattttaattttttggggaaattgatttgggaaaaataagaaagaatggcaaaagaaattgttttgatgtaaattcaccgccatcaaaaacatagtttgggtaaacaatctttcagttattgatcatctaggttaatccataaattatgcaacaacaaaaatacaaaaaacccaaatatttaatattcatggtaaataaagtgatccacggatcaggtcgatttagaggaaaggaaaatagcgttggatttgatgagaactactgaggaaaagaaaaggaatacaatccacggatcgagatccatggatcacccaatccgatctttatgcatacggattttgatccacggatttttcgatcctcgaatcagtgattcgtggatcacgatccggggatccgatcctgatctttatgcatacgggtacggatgaccgggaattcccggcccggtcccggtcccgtggcactctagtaaaaatagaagagccgatctcgagttagaaaagaaactcaaaaaacaaaagagaattcaatagagtgggtcgaaatatgggcctatgcaaaatttcaagaaaattggtcaataggaaaattttttttcaaggacaaagttttttttttctctcattttgacgtactatttccatgtctctaacatataaaataacacataataatttatttgtca

SEQ ID NO: 65890 - DNA, 3590 bp, Heterodera glycines
atgtcggatgaagaggaggagaaggagcagcaacggggtgaaaaggagcaaaaacgaacagcagcagttggtggaagaagaggagaaggaggagcagcaacaggacaatcgccccaacaacaacaccaagcagcactgaccaggatgagcagtgacccacaggagctgatcatggaagaatgtgtgtgtgcgctgttccattttaattggaaaattaatttttaaatcataaaaaagtaatgtaaaatttttttcgacgaaattcgaatacaaaataacggatataaaaataaaaaaaattttgaaaaataatacacacgaaatgaatagtcttacaattagcacctaaattccttatttagacttcattcaatcttttttaaatgcaattatgacatttttctattgttttgtcactttcaaatatccaatacattaactttttatattgactatattttggcatttttaccattaaaattttttgattttttccgaaatgttgcgttaaattaattttttttttcccattcaaatagcccaatatttgcggcccagacactgatttgccacaatttttcagattttggcatggatgagcgccattttcggtcacgggctggcacggtggacaccgaaatgaacggggcgaacacaaacggagaggaggatgatgtcatggacattggagatgatgagctgatcgagaacaaagagtttgaacagttgaccgaggaggagaaggcattggtgagaaagggcaaatggttgttggaagagtttgatgggttgaagtttgtgatagaccttgtcatatattaaaaaaaatttttttttaatatatactaatttctgcccaaattttttatgcttttaaaactcgaaaataagctaaaaatctggttacccttgatgtgcacacttcccaatctaaaaacttatttttttttatatatatatatataaatcgccgtgaaaaatggcggtgatgtgaaaccaaaatatgagaaattccggtacttttctttttgggttcgcacaacaaagatttttaaaaatcaacaaaaaaaagcgcgcaaattcacacaattcagtttgactttgtgtacccaaaataatgctgcccgtgctttgtgaatttgctggcatttttttgattttttttaaaattttgccctgcgactccaaaacagtaaagtaccgaaatttcattttcaaaataaaaaattactttttgcagctatcccctgaaatgctcagccaaaaggaggacaaatatcagcgccgtttggtgtccatgctgcccgtctattacccgggcatttccgggtgccgaagtgtggccgagtatgagtgcttgaacaaaatttcggaaggcacttttggcgttgtgtaccgggcgcagaacaaacggacgggtgggtatgaccaccatatttttttggtgtcccaattttaaattttatatgaaaattcataactaaaaatagggcattattttttagtccgttttttgcccaatttttcgagagaaaaaaatcaggggcgtgagcaattgctttgctaacttttgtcagggaattttacaccaaaacctgggatcaattttttgtttatataacttttcaataggttgagttttaaaattattaaatgactcattaaaattttttggtatttcacctcgcttaggcgtgtagcaaaaccaaaaaaaaaaaaaaatttagatgaaattgtggcgttgaatcgacttaaaatggagaaggagcaccagggctttccgatcacatcgctgcgcgaaattcacatgttacttaagtgtggagcgcatccaaacattgtcaatgttcgggtgagcaccctttctacattttttgcaaaaaaaaaaaataataattacgcctaaaatcggcaggaagttgtggttggctcgagcatggacaaaatttacttggtaatggattttgtggagcacgatgtgaaggcattgattgagctgatgaaatcgcggaacaaaaaatggacaattcgtgcgttttttaagattttttttttccaaaaaaaaattggtaagattttaccaaaaattttatacaaatttttttgtttaaagcgcaagtcaaaacgcttcttcgccagctgattgccggcgttttgtacatgcatgaccagtacgtgatccatcgcgacttgaagacgtccaacctgttgttgtcccatcaaggaatattaaaggttggttggctctatcgctcttttttcagaatagactatgaaaatttctgaaaacaaaaatataatttacatattccggatttttttttctaaaaaataagaagagggcaaatatttcagaaattttcttattgaaactttgaaaacaatctaattattttttttagattggcgactttgggctggcccgtgagtttggcgatccgatcaagccgtacacgccggtggttgtcacgctgtggtaccgtgcgcctgaactgctgctgggcacaaaggtatggcttttttgggccaagagattattattttttcttgacgagtgtccaagcgttgtaacggaaaaaattactttatattactagtaattagtttttaattgttcaatttattcagctttatacaacgcctgtcgacatgtggtcggtggggtgcatttttgccgagtttctgaagcttgagccgctgtttccgggccgcaccgaaattgatcaaatgcagaaaatttttaaggtatctgtttaaatattgtcaaattttgatggaaaatgaaattctacactgaaaaaattatcaaatttattttaaatccataaaaaaaatttttttttttaaatttgtctgtcattttagaatttttttagtcaaaaataatatattttaccaaaataaattacacttattttttgttgttcaaaggaagtcggcacacccaatgagcaaatttggcccggctgtatggaattgcctgggatgaaaaccggcgtttttgcggacacaccgtacaatcagttgaggaagaaatttgccgccgagctgcctgatgatgacggctttgagctgctgaacaagtgcatattcttatataaaaatttttaaaaaatcatttttattaatgaaaaaaaattgctttttcccccattttcgactgctcacgctgaacccgtcaaaacgattggacgccgagacggcggtggtcagcaaatggtttaacaacgacccaaaaccggcacatccctccacatttccaactgtgaattttgcactaaaaatacaattaaaattctctattctgttaaagttaaattaatatttttttgtgttttaattaaaattttgttttaatattattttaaatttaataattatatgaaaattattattttatttcgcacttttttaggttatgcaaaaattaatatattttaattaaatattttatttagtggccagctaaaagtgagcagaaccgtcgtccaataagagatgttggtgctggtgggggccgtgctcaacaacagccgccgccgaggccgaccggaggatttacgcttcgatttgatgcgccaaaattttga

SEQ ID NO: 65891 - DNA, 460 bp, Heterodera glycines
atgactttaaaaacaaatcctaaggttttctataacaacgcaaagaacaaaaccgaggaatttgtcatctgcgcggatgaagccgaatcggaggaatgtgcgggaaaatattggtaagcaaagaaaggcacaattggaaaacaatttcaaaaaatgtgccaaaactgttgttcaggttctacaatgttcgggaccatttgaattattttgggaaatcggtgtccgaatggggagagaagggatgtgccaactgacagaaaaggacaaaaaagaatgaatgaattgtgcaattaataattcactaattgtagtagcaaaataataatccaaaatattttttaattttttattattattatccgaagaatgaaacttaaaaatatattaaattttaagggctctttttgatttgagtgggccattctcaactgaacatctgccaaatgatcccaaaaaatga

SEQ ID NO: 65892 - DNA, 753 bp, Heterodera glycines
acaagcttccgctgagcactaccaaaagcgaattcgtctctcacttctgatcaatgcgcgagtgttggtgtccttgaaaactgcaattgatttggatgatgcactgtttgcccttgaccgtgctcagctggacccagccgaacttggcggcactgtgccattggcagacaaattgcaaatgtccattgacgatctccgccaattccataggtcgtaaaatagtatttaaattcataaattctcttacaaaaaaatttatttttatttatttaatgattttataaatatcaattcggcatttaaaatttgcattaaattaatttttttcttttatgataagtaaaaatattgttttttgaataaaattcgaggtacaatttttcaatttttttcaaaagaaattttccaatttaaaaaccttaaataaactaaaaaaaaaagcgagaataaatatttagaaaaatatgttcaatagagcctgttaaattctggaaaaaatacgtatttacataaaataataattattattgtaatttttttttaaattcaagagaaggtgctcgggttgtcattttggtgctcagcaatgatgagcagcagcgactgaacgcggacgagcaccaatcccgacggatcatcaaggggcttgaccgcttgtccgcctcgctgttcatccttcattttgcgccccgcggtgcgcctccctctgctggaccactgagcgcacaattcaacggaagtgcactcggataa

SEQ ID NO: 65893 - DNA, 2432 bp, Heterodera glycines
atggtcagcattggcggaaatgtccagcaaattaatgcggtcaaaacggtgtttgaccagtgtttgttaatgaacacacacgcatccatgttgtacggcgtatatccgcttcatacttctgctcgtaagcctttttcttctttttttctgacaaaaacccgaaaaattgtaaattttttgtcggtttgtccttctaaaaatacttttttattttaaaaaggaaaatctgcttgtaagcccttatcgattttttaccgtaaatcctgtaaatttatggtcgctctcctttttatgctttttaatgaagatttttttttgaaaaacagaaatttctagcaaaataaatattatattttaactcttttaatgatatttttttaattttaaaaataaaattaaatttcgctttttattgaaaaaaaagaaaattccaatctaaattccgttaaccttggattcacaatttcctatttcgggattttttatgggattttttttatggggatagcccaatgttcctttcctggatttctgagattttgtgcgattaaagcgaaaagttaagattaaggaaatcaagaaagtgctaactgaagtatttcaatttttagatatattaaatcagaaaattttttctatacttgtgacgggaatgttttcaacggaattgtccaaaagatcgcactcatctgaatcgttagaatatactttctttgtcatcaaaattttggcatttgtccatcaattgaaagataaaaaaagtgccaaaaataaaattgaaatatgttggaaagttttatccgactcgggagaaactatgacatcaaatgaatccattgatgtgcttaaaccaattttggcagaatttgaggatcaatttggtggcaccaacaaaatgccaaaaaattatcaaaatttgattcaatcatatggcaaatttttaatggaatttttacatttggatgaaaaatttcgaagtgaattttatgaaaggacagcagaacgtgaaaaattgatgaacatttttttgattgttgacaaggaaaaaacatttttggacaaccaattttggaaacattttgatggttggtaaattattaattattatttttatttaatttttattaaatttttaagttcattcaacagaaaataatgttgaagaaggcagcagcaatagcgaaataaaattcatgaaaaaatacaaagaatgtccaaatgtaaagcagcctaattttttggaaaattcagaaatagctaatgagggtaattttgaacataattgcttattaattaaaaaggcagattctgataatttttattctttgataaatgaataatttattggtttcaattttcattaataaaatttaattaaaaatttttaagacaaagaagcacatgccctgatgaaatcgtacattgatttaatgaaaaatgcacaaaatgtgcaaacaaatggacaaatgaacaaattgacagaaaatttggaaacgaatgccgccgtttgggttagcaaagagcaaataaacgaattgctaaaatttgacgaatcaataaatgacaaaagtgaagaatttattgaaaaaattagccaatacaaaatggagtggtacaaaatggcgacaaaaaatggacaaaatgtcgacaattacaaattgttattttcattttacaaatttttaaacacacttattgaggatgatgagttgaagttgaacaaaaattggaatttacatgtgaaaaatttgttgaaatggtcaacaaatttgtttgaaacggtcatattagaaaaatttatatatttaaaataattaaacattaaattagacattgttttgttccacgcatttgagaaattaaaaaaaatcaaaaacaattaaattaattataatgaaaattttaaaattaaaaagggttaatttttcatgaacattcaatgttttattaaaaaaatatatttattaagaaattaattcttcgggttcttccaatttgcgcaaaaaacacctgcgcattgtcagatgaaaaaatggcagccgagtttaagcaaaaaatgaaaaattcgcaaaattggaatgatcaaattcatttccatgcactgacccaattgatcaacaaatttgacgaatttacacatgttttgtgctatggaagtggagaaatttcaaacaatttgatgagggaacgacttagtttgattgtgccagaaaaagcattcggtgccattgaagcatttcatcctgaaataatgggttatcgtaagtaaaagaaagagaaaagtgttaaaaattcattttaatttgcattcttaatggttttaaaatttattatccaaatattcaaatatcatgattaaattataatttacttttttatcatttatattttgctaaaaatggctgagtatttaatttactaaaacattgata

SEQ ID NO: 65894 - DNA, 1875 bp, Heterodera glycines
atgtccgatgatcgaaaatttgatttaaatgttgcggaaggatgggataacatttttccaaatttattgaacattgacgcgatgaatattaatcatgaaaagaagaatgagtacaaaaaatggattggccaattgcacaaaaatgcaatcatcaaactgagccgggaggacaatgtttttgcgcaacaattaagaaaaggtgacaaatttaattgatatttgaaatgagtttaatcttttcaaatttatggaagaaaaaaaattaaaattttaaattttatgcatatttaaaaaaaattgttttctttaaaacagagaatttatttttcaaattctttactgttttttctaacaatgagaaagtggaaatattctgaaattttatttatttatgttttatgaaaataatattttttatttattaaattttaaaaaattttaaatttagaatattcttcttctgaaaatgttttatttcgacggtttcttgttgatttggttggagaatcaaaaaatgatgaagaaatttggaaaacaattcaagttgataagtctgatgaaattgtcacagaaaataaattcaataatttaaatttaattgaaaacctttcgccaaaaaagggaaccaaagaaaaaattgtggaaaagtcaaaatgcaaaaataaaaaaccaaaaaagaaaaataaaaacacggagaatattaagaaaaatgaaaacacatccaaaattgaagacgcaattgaatgtgaaaatgaaattgaaccagaacaaattagcgaaattagaaataaagctaattcaaatgaagaaattgatcatattttctggggaaaatcacccaacaattctcaaacaaaatttgatggaataaaactggctaattttgaagatgaaaattttgtggccaaaattttcacacaaatttttgaaaattttcaaaagaatccaggtttatacagttcttttttattttattaatttatatttttaagataattttgtgggtttattttcgtctgctcaactgttacattttggcatttatgccaacgaaatttgtaaccgaataaaactgatcaatcagctgaaagaagcgctgcccgaaattggaattgatcacattgaaaacattgaaaatgaatgggatcaattgaaaagtgtcgatttgtcatcattaaaaaattgtaacaaattaattacgacactttttctgttattaaagcaaattgttgcaaaaatggacaaatttgaagtgccaaatgagcaaattgtaaattcaaatgaagaaaattttgttaaacatttgttaattaggcaaaaatttgccaaatttattgtcgaacagtatgagaagcacaattggtcaaatttaagccaagaaaataaaattggcataatgaaagcaatttttgtggatgaaaacattgatgatgaacttattgagaaatatttgctagaaagtatcaaaatgtttataatgaactatgaaaagtttaattcgcaaatcaaaatgggtaggacataattaaattaattaattatttttatatattttatatttaagataaaaatatttttgaaatatcaaaaccaaatcagtttatggagcaaaacgcaaaattatatttcgaaatttcaaagggatggcaagaaattgattatgatgagaaaacttctaaaactgtgaaaaaattcaataaggtataaaacaaaatttatttgtaaatttatattattttttagtttaaaaatgttatagagcaaaatggatacagtgatgatgatttaactgcaaaatttaagaaaacaattgaattaaagagcatgtttgaacaatgggtaattaacagaggatattttatatttaaaatttag

SEQ ID NO: 65895 - DNA, 866 bp, Heterodera glycines
atgaccgccacatttttccatcatttgcgacaaatggcgccatcaattcttaacgaatgtccatcacttcgttttgtcaatttttatgccggtgatctctttgccgaattcccatgcgatgacagtgccgcggcatcggatggacaagcattcgccaaatggcttttcactccgcttcaaaacaacgtgccaaaagtgttcaaatgcgactcacacaacgacgacagtttggcgacgaaacttgacgtcttcaaactggtgcttattaatcattaatggcattatttattaattaattaaattgttttttttttactaatttttacacattttagacattttcctccgcttcatctcccgtcaatttcattgtttccatttggtttgatgcgtcgcctttgccaattcccgtggtgccattttcgatcaccaacaaatcgactggggaacaattgatgctgaaggaaattgacgacaagagccgtcgttttctgctgatccgttgtccaattgtgcgtgacgcggacaaatgggcgaaatgggaaaaggaggcgcttggctggcatattcgtgatcagtgcaatcaaatgcgcattaacataactggttctgacaaaatcggggacgggtcagtgaatgaatgattgaatgcttattcaaaaattcaaatttatttttctgtttatttttaggcttctcaacggattgctcggcttaagtgaatggaagttaagaaatggacgatcggtttgaattaaggaatttaaaaatgatttttgccgtgctcataaaatgttttctttttttgttggaatgatcactttgcttatacgtattttttaaaagcactaccaaaaaaaaataaa

SEQ ID NO: 65896 - DNA, 231 bp, Heterodera glycines
atggcaaatgaaaaaggaaatttcgaatgtgagaacaaagaaataaagcgaagcttcgaaagtgccgtctataatgcatttgccgaagacattttaatggggcatttgaacgcactttcgaatttattgaagccaaaaaaaggcgaggaaaagccaattcaaatgggaaaagcagaggaacagcagaaagacggcacaaataattggtgtaaataaaaagattaaatggaa

SEQ ID NO: 65897 - DNA, 1051 bp, Heterodera glycines
gccaaataaatattccttgaaatttttttattgcaattatggagttggagccgatcatcaaacagaaacacaaattgccacgagaaaaggtattgtatttgtttagaatttttaaatttggtgtttttaatgttcaaaagagaaatccttacctcaatgtcaccagggactaagattttagcctcagactattctttagggtatcttgaaaatcctttttttacaaataaaagattgtttgattggtcagtttcccaacgacgtgtggcacagagagcgttatgcccgtgacagtctgataatgctcacctttggcagtgccactgttatcggtgtcatttacaccaccagaccgacctggtccaagtggcttttgaagctttctcgcaacagagttgggaccaaaggagcaggttctccaatttttacttctttcttacacattttagcaactgacttcccaactttgtattttttaattatttgttcgaattcgacctgaaaagaaagaaagacccgggtttgggttttggtctgcgaaatacagactggccaatgtgaagccctgacttttaaaaatctttttattgtcttccattttgttttttcctttaggttcgtttcgccccaaaagtgccgcccttcttgtgccattcgtcccgatgttgtccaaccgtgccaatcactccactttcccgcacaatttggtctccccaacagtgcatcgccgttttgtggttatttttttatttttacctaaattagatgccccccaccccttaaaataaagacgacacatttttcactcggtcatattaaaaaaagagcccgacgggcttttgctgggccagtttcaaaaatacaccgggcccgtgccgcccggttagacgtactttttttgctgggcctgacaattataacagtccggtactttcctacattccggactctattaaaaagcaaaacaaatagttgataaattattttatatttcagattgtcggccgagtcattgctctctccacctttttattcgccatgtatattattc

SEQ ID NO: 65898 - DNA, 3634 bp, Heterodera glycines
gtcccggtaattataattagctaattaattaggtgtgattcctcccaggtgcctcccacatcctccgattctgccacttcccctccgctgtcctccgcatcacattttcagcaacaacaacagatgcttcgccgttttgggcccgacgcgcagcggggcgaaacggtcgatttgggcgatgtttaccggcaagttacagtattattggcacactgtagccaattaccgcactgcgggtccctctttaccgtactgtgcttcagtgtggtccgtttctactcattttggcgcacatgcacttcattccaccgcattgtaacgatgattgaggtgatttagtcaattttattggcggatactgtaatatttatttcggtaattaggaaaagatgaaaagctaaaaaaatcgccgtttcctctgattacagaggatcggtcagggctcaggtgcggtggtggcggcgccgacggatcagcgccggtcaccgtcccgcgctcgcaacagcggcgccggcatagccgagcagtggtgcccgcccagtcagcagcagctgcacccacgagcttcgaccagttcagcggccactggcggttcggagccgacgtcgtccgtggcgcatggcgatgcctttggcgggcggtcgccgcgcggattgcctgactttcagaagcgcctgtttgtccagtatttgtggcgaaatgccaagcccagcgacaaggcgcgcgttcaacgcgaattcgacccacgcaggcaacggctgctcaaatacgtgacggacaccgcggcgcggaaacgggtcggaaagcacacaaatttatgcatttcgcaaggcgaaaaattgacgtaatatttggcaaaaattggggggccctagacgtctgatcatttggcaaaaatcacctattatcactcgcttaatcagctgatccaatgcttttccctgctgctttaagatgaccagtgccaaagtgcagtggcgcagcggaagtgccggcacttcgactgacaaagcgacaaaatgggtgaaaatgggggggggggtctaaaaattgaaaaacagggggaaaaataattgttttaaataatatatttcaatttacactttcagcagtcccttcaaactccgcccggctccgccacggcgcccattttttcgccttccgcgccctccgtccgctggcgtttgccgcccggcgcctccgcgtccgcgggcgcgccgagccccaaccgttcgccaacgcattcggcttccccctttgctgccgcgcgacggctgccccattccgcggtcagcgcatcgctgagacggacgcggacaagcgcggatatgcggacaaagaagtgaccagaacgagcgaaattgatcagaaatgatcagagagagacagacagaaagaccgagagagagagagagagagcgagagaaaataagaaaaagtgagagacagaaataaaagaagagagaggaagacgacaggagagagagaagagatcagaatggacaaaagaggggagggggaatcagagaaaagcaccgtaaaattatgctcatcaatcgaagattggaattggaatagacaaaatgccgactaaataagtcgagatcaatttgaaatcaacctctcgagaatggaatggacagaacaactgactgatcagcgagaaagaaagtcgatcagtgttactctttttgagaaagccgatcagtctttaagaatcatgagtcactttttgagtcaaaatccgtcgttccattcgacttttgactgacttaagcaaagcccaaaagcattccaatgtccattttcgattgtcctccttttccagtttttcgtttgcattttatttgcacacactttgcatatcataaaaaattgttaaaataattttttcattttcaatttttcttatataaaaaataaaataaaaattatattaaataaatttttaataaaaatcaattttgctatttcttttcccaaaaagctacaataatcagccccttcaatttgcagaaaaatgtaatcaagcagcatatatgccagccctgctttaagattatataaaaaaacataaaaatatcaatgccaacaccattggcatagccttagcaatgccaatgccaacgccagcagcctcagtttttcatgccaatgcctgcagcctaatcatgccaatggcttcggcttaataatggcaatgccttcagcttaatcatgcgccacccttacaatcactcgattggtcatgccaatgccatcccacgcatttcacgtcaccattttcggcattggcgcaattatatgaattaagagaaggaggaggaggggaaggcttttattataggcagattcaccagcgatgccatcattttacaattttatctccccaattaaagtaatttaataggataaccgatgaaagcatttacattttatatatgtacaccacctacctaatctggagtaagacattttgaaaaagactaaaaaatactggggacctaggaacgggtcgaactccacacatcaccaaactatttcactttatccgttgaaaatggcaaaaattccaaagtttcagttatcttaaagttcaaaatggcacaattttcgcttcgctcgttggcacttttcggctctttcacaattttgaccacatttttcacacggtcaacctttggagaatggccgggtaaaaattttttttgtgtgtttaatacatagttttggcacttttaagggaacacaatatcggagaagatcgacctgctgattgcggtataccctcagaatacgataagcaaagtgatgggttactgtaaggaacagaaggaaaagtgcgaaaaagaatggaaaagctcgaaaagctcgaaagcagaggaaaagctaatagaaaagctgaagaaactgtggcacgcggacgaagagaacatgaaaaagaacaaaagggccaaagatttcaaaaacaaaatgaaaaatgaactcttcgccaaaacgtcattttttggaccggcaattaattaattgggaaaattttaatagtttaaaattttaagtggtcaaaaaagtttcgctcgaggggatttaaaaaattaatataaactttataaagagtgccaataattcaaatcatttttattggattaaatttagcaaagaaatttttttttaattccaattatttaagttaattaagtttagtggtcccgaggtcatttcaaagtacatcggaccatttgcaaaatgtgtgtttgacagctaccgcttaaaagtgggcaaaaagccaacttggatttgaattctcattttcaatttaagtcgttttggcagtcgacgctgcttaatttgctaatgcttgagcgaaacggaggcaaaagcgcgggaggggggagaacggagacgggaacacaaatggacaacaaaatggagacgaacacgaacagaacggacaaacagacggacttgggaacgaattcggacatgccaaacttggacatgccaaactcagataaatgggccaagacgaacaccaataaacagacggacttcggaacaaattcggatatgccaaattcggacaataagcaaaaatcaaagttgggcagtcccgacaaaacggcacaaacaaagg

SEQ ID NO: 65899 - DNA, 88 bp, Heterodera glycines
tagtgagcttatttttcctgtgctcttcctcctctcccattgcttcttctgctgcttatgcgcccgctttgcttttaggtcgtcactt

SEQ ID NO: 65900 - DNA, 539 bp, Heterodera glycines
atggcactcaattcttctgcatttcaatcactgggactcaacccaccaacattccaatcaatgggactcaattcttctgcatttcaatcactgggactcaatccaccaacattccaatcaacaggactcaacccaccaacattccaatcaacaggactcaacccaccaacattccaatcagtgggactcaacccaccagcatttcaatcactgggactcaattcttctgcatttcaatcactgggactcaacccaccaacattccaatcaatgggactcaattcttctgcatttcaatcactgggactcaacccaccagcatttcaatcactgggactcaattcttctgcatttcaatcactgggactcaacccaccaacattccaatcaatgggactcaaccgaccagcattcaatcactgggactcaattcttctgcatttcaatcactgggactcaaccctccaacatttcaatcgccgggactcaattatcagactttccaatcgctgggactcaacccaccaacattccaatca

SEQ ID NO: 65901 - DNA, 565 bp, Heterodera glycines
atgaaattatttccgctacttttattaattatattatttttaattgtcaaaattggagcagaaaagaaaaagttacaacaaaagtcatttggcgaaatatttggagaaaaatggcaagaaaaagaagaagaaaaacgaaatgagcagaaaaaaagagaaataattgaaaaatattataaaataaaagagaaaataaagcaaaaaggaagaaaatacccaacaaaagaatgggataaaattaactcaaaaatagcgaaaaaattggggacaaatcgaaattacattcaaaaatggatcaaagaattggggcttaatcaaaagaaattttataaatcaaaaagtgatgaagaaaaacgtcaaattattcaaaaattcattaaaatgaaaaatgaatttaagcaaaaaagaaaatattctgcaaaagaatggcaccaaaattatgccgaaatttgtaagaaaattggagttggccatgacacaattaaaaaatggaagaatcaatgtggcattagctgtaaaataacggagaaagaaaaaactggaaaaaattaaaatttattggaaa

SEQ ID NO: 65902 - DNA, 54 bp, Heterodera glycines
atgcgaataatgcgaaaggcgaaatgcgaaaagcgaaacctcggcccatccctg

SEQ ID NO: 65903 - DNA, 80 bp, Heterodera glycines
atggcatttttcgtcgaattctattcgagttggtgcgggcattgcattgagtacaaaccgcactttgttcgttttgcaac

SEQ ID NO: 65904 - DNA, 735 bp, Heterodera glycines
  unsure (1)..(735): unsure at all n locations
atggcaaactccaatcataatcaacttcagcaaggacagtcagcacttggaaatgtatattttggcacatttaatattaatatatcattaaaaaaaatgggttgttttactcaattgatctgactagccaacatagatttgtcatttatattaatttccataattgttcaagaatgtattctgcaccgatggaacgcacaatattcagttcttgaatggatgcgttacccaaattggccaacctttaccgtatgtttttttgatggtgaagactttaaatttgtgttccaagaccgctctgcctgatcgttgtttcaattgatcaccggcccgaacaacagactcccgcaggattgctttctgtgactaatgttgtgttgcgcaatgccgatggtcatcggattgaagcttcgggatggcaaactcaagcgggtgttttggcgtcattgtccataggaactgcttactggttcatgaactgtatggcacgttcacggtatcagcgactggattgttggtaccgaattggcgttgatggtagaaatgctaccataattcctcacccaatacaccaggtaatttttattattattattattattaaaaaaaatcactgattagcaaacaaccaatgctcgtcctaatgaatcagttggacttcgtcactcaatcgcatctattttgggggaacaaattcaagtttttanaaatcaactaaagttgtgtataatttaa

SEQ ID NO: 65905 - DNA, 85 bp, Heterodera glycines
aattttttttgtttgcgtttcaaatatcgtaagattgtttgatagggccagacaagagaaggcaactgttggtaccaagtttgcg

SEQ ID NO: 65906 - DNA, 330 bp, Heterodera glycines
gtttgcgtttcaaatatcgtaagattgtttgatagggccagacaagagaaggcaactgttggtaccaagtttgcggtaaaaaaatgagaaaaaagagatagacattttttggtcaagaattttttttgtttgcgtttcaaatatcgtaagattgtttgatagggccagacaaaagaaggcaactgttggtaccaattttgcggtaaaaaaatgagaaaaaagagataaccattttttggtcaagaattttttttgttgcgtttcaaatatcgtaagattgtttgatagggccagacaagagaaggcaactgttggtaccaattttgcggt

SEQ ID NO: 65907 - DNA, 624 bp, Heterodera glycines
atgtcagctgcagaattcagtgcaaagttgcgagaacttactgcttctaaggtataggttgtaccaaatcagtatgtgcttcctccatgcttgtgctttggtttccagtttagcgtgaattatttatgtttaggacagaggcacattgttgccttatctgtcttcggctctaccgttgttgcgtcagtctgtgtgcaatgatgaacaatcggagcttctacaattactttctttgaagtcagacgattgcgttagtccagttaagaaggccgcaaatgtaacaaagaaaacgtcgaaaagcttacaaatatattaaaattatagtcaactgatgttgagcggatgtcaaaagattttgaggaaatttgttcaattcgtgaaaaatgcaatgatggcaagaagcgtcgattgaaaatacgactaggacccgatgtgctagtcaaccgttctttgtacgagttagcagtggatccgcattctaggtgcacggaaatttcatggaccagtaaaacaaagcgttttagtagctacacaattccatccgacggagctagcagcaacttaattccatccgacggagttaagcttgccctttcagcacaggtgattacgaaatatgcttga

SEQ ID NO: 65908 - DNA, 1759 bp, Heterodera glycines
ctataaaagggcagccattttgtctcagtgatcattctcaacaattcatttttgttgtcatgtgggggttatgtgggggttggcttgtcatcccacggggtgggtcgcctgcaggaggaacttgctccggcccaccccacggggtgggtcgcctttcaagtgctccagtttctttaaattttttagattattaggtgatatgcgtatgcttaaagctattttaacagccaatataccaaattaattattgactttattcatctgtcttcattacaactgggttttcattgtagagaatttaccatccgaaggattttcctccgactgtatcatttccatccgacggacagacaactggtacaactattccatccgagggcagacaaacatgcaccgcccgcataacttgaaggaagcggagggagaagtgcagaaagcaatgtaacaacaaaagcaactgtattcttaacactcgtttcacgcttccagtttcatcgctgctgactgttggttggaggtgttccgattgcttccacgctctcaggttggccttggtattgcgaccatcagtcctcgctttgaccgccgagtggacgaacactttaaaacgcgcaaatggacctttggagatcttagaattggcgtcaaagctgggaaaaatggcacaaaggaagtggcagttgtctatggcattagaaacgatttgccattgcctcagcgtccgttaccaagcaaattggttgccttcggccggatttcaatcaggtcatcgacaatagaattgctttacatgcgcttgcctacataacttttgtctgacttttttaccaagcaaattggttgccttcggccggatttcaatcaggtcatcgacaatagaattgctttacatgcgcttgcctacataacttttgtctgacttttagttactttgatcccagtgtgttcacttttatcggactattcaacaaccgtcttcctcaatcatgcacagcaatgctcgacatatccaatgaaaatgtgcacattttgcggcacatcatgcacagtatttggccaacgttcaaagatgccgtcagtgcattgcgcttgacaccgtgttcgtttcgtcttttgcgccgatttgccccgaccatgctttgctgttgtccggggctgcagagcattggtttcaattcggacattttgcccgaattcccggccgatgacagtgccatggtgtcggatggacaagcgttggccaaatggcttttcactccccgtcgggacaatgtgccaaataaccttctgattgaatttgccaaccctgtggtggtgaagtcccaatggtcggctgtcgaagcgatcaaaacggtgcgtaaatccatgaagtgtgatttttatagttttactgttttagcagtttctcgccgctacttcacgtgtttcgttcaaacttacgcttttgaacagacagtctgctgactcttcggaaactgttgtgcccattgttccgttcgagcctttacataacgcggccacgggggagcaattgacactggaacaacaagatgcaaatatctactgcattgagcgccttccgattgggggcgacaaacatgattgggtgacccacatgcttggagagcttaacaagaaaaaccattttaatttgttctttgatgaaagcggcgtttcgctgtgattggctagcatttattgttttatttattcgctgcttttatgtctgtcccatgcacccatcattttttttgataca

SEQ ID NO: 65909 - DNA, 752 bp, Heterodera glycines
atgcacaaacaacttttcaatatcaaacttttttacaaggaaatagatgcggttcgaactgcgatggtgtatggcttggaaaagcgattctttgatctgcgattcaaacggtgattttaagtggtgtcttttataattttttattcaatttcttttaatttttagttgcattgccatttcgaccttcttggacccccgattcaaggaccgtctggtgatggaagacgcggaggttttccgtgaaagagtccgcccgtggcttttcgaagaggcatcaattgctttcaaccaaattgaaaacgaagaaaatgatttgattgctacaacttctattgaatcgccgccagcaaaaaggaacgaatcattttttgctcaaatggaggaaattgccaattttgcacaagaaaaaagtcgtttttgttatcattttatttttcactttaaatattttagctcaaattgcctctcaaagcgacattaactcagaatttaacgaattacttagtttcgacagagcaccaatcaattctgacccgtttgaatggtggaagaagcatggaccaaaacttccaatgttatcaaaattggcgatgaagtatttgtcagcccctgcaacaagcgtgccgagcgaacagactttcaaagtggcgagggatgtttatgattatcgacgttcgagattaaagccgaaaaccgcagaaatgttgatatttttgaacaaggccatcccaatgttggactacaaatactga

SEQ ID NO: 65910 - DNA, 273 bp, Heterodera glycines
attttatggaaaattttatgaactttttatcatccaacaaaattaaatcagtatttgtagtccaacattgggatggccttgttcaaaaatatcaacatttctgcggttttcggctttaatctcgaacgtcgataatcataaacatccctcgccactttgaaagtctgttcgctcggcacgcttgttgcaggggctgacaaatacttcatcgccaattttgataacattggaagttttggtccatgcttcttccaccattcaaacgggtcagaa

SEQ ID NO: 65911 - DNA, 650 bp, Heterodera glycines
atggccctattttttccagcaacgaccgatggcacaaccaaaaatggcaatcaaaaaacgcttttcatgcactctttgcacaaaaagttttgactggttctcagacttaaagagagatatgcgcgtccacacgggcgagaagccatttgtggtgagttacagatcttacattttaataagtaagataaaaaaaatgcaatttttattatctgttaacggagtaaagaccgtttaagtttaaaaaagaaaattattttctaagtttattttttaacaaatggagtaattaaataaataataataattgaattttacttattttttcaatatagtgagaattttgtgacaaggcatttgctcgaaagcatcatcttgactgtcatcaacgtattcatacgggcgaccggccctataaggtgagttgaaaattgtttttgaatttaaaatttagtcccccacccctcaaaaaatttttttattttttaataatgcgattttggggtataatgatttgaaaaaaaaatttcaaataattttaaaagatgaatttacaatttatttgttagtgtgaccattgtggcaaacgcttttcggatggcagcgccatgaaacggcaccagcgcatacacacgggggaaaagccttatggg

SEQ ID NO: 65912 - DNA, 687 bp, Heterodera glycines
tcggttcgggggggcatgccccggaaaacaaaaaaaatcggtttttttcaagtgtccgtttgggggtcctcaaccaattatggggagcaaatatcccacgcagaattaaagttcaggctatagggaagctactcccgaaggattcggtctccccataaatctgggcgcatcggttcggggggactgccccgaaaacaaaaataaatcgattttttcaagtgtccgtttggggtactcaaacaattatgggggagcaaaaatccaacgcagaattaaagtacaggctatagggaagctattccggaaggattcggtctccccataaatctgggcgcatcggttcagggggactgccccgaaaacccaaaaaaaaattttttggataaaaattatttaaatgaactgactagataatatttaaaataggttatttctcttcctttcagtatccctgcaaagtttggtgcgcttctgatcagtttctgaaaaaaaagttaagcctaaactttttggcctgtttaaaaaggaattaaaaatttttaaaaattttattcatctccctttttgatagaaaaagcatcagagtgcctaaactaacatgtaaataaaatttggtgcgtttcagaaccctttctgaaaaaatatttaagaattaattttgcaaaaaataaataaaaacgaaagact

SEQ ID NO: 65913 - DNA, 242 bp, Heterodera glycines
gggtgcacatgatgaaatagaagaaggaaaagaggaagagaaaaaggaagaaggagcagatgaagagaaaaaggaagaaggagaagaggaagagaaaaagggagaaggagaagaggaagagaaaaaggaagaaggagaagaggaagagaaaaaggaagaaggagaagaggaagagaaaaaggaagaaggagaagaggaagagaaaaagggagaaggagaagaggaagagaaaaagaaaagtg

SEQ ID NO: 65914 - DNA, 665 bp, Heterodera glycines
atggagaggaagacggtaggcaggacagttactagggatacggcgactacatcagcaaaggatatgaatatggtaggctatggaggtggagcatacggtgactatggaaagggatacggtaggattaaacttattaatgaattcctcattaattaaactgtcataagattactcaaatggaaagggaaattacggtgccggaggaacgggttacggtggttacaagccggcgaatgcggattcatccgattacagccagacgaaagggacgactgcatacggcagccaaaagtaccaactgcaacagcagggcaaatacagtagacctttcaacatcaacagctacagaaagcattactacgacagtgagacagtcaaatgcgatcaaatttggtgaatactgtaaatatcccaccaaggccattactgctcagtgcacggttcattttcattggcaatggccactgaatatagtaaagactagctgaaagaggcgacgacatatggtaccccaagcgagttattattcaaaattttaaatttttttattcagcaagtgaaaatgcaaatgcttatcagcagcagaaaaaggtttactctccgtacaaagcgcggtactacacgcgccaattctgtcgctacacagccgcgtcaagcccacgcgc

SEQ ID NO: 65915 - DNA, 706 bp, Heterodera glycines
atgtcggacgaagaatttgaggaaattgagcggattgtacttggcctggacgaggttggtttgttaggccggccaaccgccgatttcaaaaaaataaaataaataaataaaatttgatgggatccaattttttcaaaattaaacataggctttaaaatgggcgtaaaaggaggatcaaaatcctatttttatcaatttatttatctacaatcattttgatgttttaaaaaaaggattgtataagatggttgccggacgaaacgacgtcggtacttaacgtcgccgcaaaaaaaataattaaatacttgaagaaaaatttttaaaaatggttttaaaattttttgataacctaaattctacagaaaaaaaaaatttgctgaatatccacaaaaataaacaaaaagttgaaattgttttatttcctggaattatttcgaaattttgcgagaattaggccaagttactaaaatttttaataatatttttttctaaaataaaaaattttaaaaattgacaaaaaaaatgagttaagcctgacactgatctgtacgaccgtgtagcctatttggacatggtaaagcaacaccaacaggaacagcgcagaaagctggccatgttgcgcgaagttgagaggtacttttaaggggcgtttttagcgaaatttttagcttgtagtcgatttaatatttttatgggtaataataaa

SEQ ID NO: 65916 - DNA, 662 bp, Heterodera glycines
aaacaaaaataaatcgattttttcaagtgtccgtttggggtactcaaacaattatggggagcaaaaatccaacgcagaattaaagtacaggctatagggaagctattccggaaggattcggtctccccataaatctgggcgcatcggttcggggggactgccccgaaaacaaaaaaatcgattttttcaagtgtccgtttggggtactcaaacaattatggggagcaaaaatccaacgcagaattaaagtacaggctatagggaagctattccggaaggattcggtctccccataaatctgggcgcatcggttcggggggactgccccgaaaacaaaaaaatcgattttttcaagtgtccgtttggggtactcaaacaattatggggagcaaaaatccaacgcagaattaaagtacaggctatagggaagctactcccgaaggattcggtctccccataaatctgggcgcatcggttcggggggactgccccgaaaacaaaaaaatcgattttttcaagtgtccgtttggggtactcaaacaattatggggagcaaaaatccaacgcagaattaaagtacaggctatagggaagctattcccgaaggattcggtctccccataaatctgggcgcatcggttcggggggactgccccgaaaac

SEQ ID NO: 65917 - DNA, 80 bp, Heterodera glycines
gtcctgccaataatatctgtggcatggaataaattttggaactgcgctgcctaacggcggtgcttaaagtgcgctaaaaa

SEQ ID NO: 65918 - DNA, 80 bp, Heterodera glycines; identical to SEQ ID NO: 51817

SEQ ID NO: 65919 - DNA, 101 bp, Heterodera glycines
ttgtctcctccgccgtcctcctacatatttatttgtattttaatttgtcttcaataaatttgtttatttgttcgtctcttcgacatttcggggaccgaaca

SEQ ID NO: 65920 - DNA, 1561 bp, Heterodera glycines
  unsure (1)..(1561): unsure at all n locations
ttgaataaagaacaattcaactgtctaatgttgttgacggcattgaagtcgcacaacgattcggcacttcgtcaaaggattttgtcgaagctttcagcggacggggcgaacatcacttacgacggagtcgtggaagacctgattaattttcaggcaacaattgtggaggcaaaagcgattgaagcaccgacaaattggaggaacgtgaacgccgtgaatcggccggtaaagcaaaacaattcgccgaaaatgcaagttgccaaagtgccagagaaacggcaggcgaacaagaattgctggcgttgtggagctgccgatcattggggcagcgaatgccgattcattggagcaaaatgccgaaagtgcaaattcacagggcatattgagaagcaatgtgaaagtgtgcaacaatggcggttgaagaccaaaggaaaatggttaggcaacaagcgaattggtcatttacaaatcggtatggtaaacccgaaaaatgacgccgattcactgaggaccaaaattcggttcaaccaaaagccgatcgcatttgcactcgacactggatcggatgtgaatgtcgttgatgaagactcacatctggaggctgggagcccaccgatctagaagtgcactgaaattggaagagctttcgatggaacgccgattcgattcatcggaaaaggctttggcacatttgaatttggaggaattttgatcgcgaatgaaccattttacgtggccaagcgtggttcgcttaatttgttgagccgccaaacaatggacaaatttggatttttggatggcattaagcagcggatcagcgagcatgtgataaattcctgcagagccaccgatcaaattggaaagcacattttggaattaaggaaagaatttccgggtgtttgcgaagatgcactaggccattgcatcaaagaaaaggcacaactcaaactgaaggaaggagtcgcgccaatttaccgaaaggccagaccggtgccgcatcattcaaaagaagtcatcgaacgtgaattggaccggttggaaggcctcggaatcattcgaaaagtcgaacatttggattgggccgcacccattttggtggtgaaaaaggcggatgggaatgcccgcctttgcatcgattattcaacgggattgaatgatgcattgatcgactaccaacacccgctcccaattcctgaagatatttttgcgacgttaaatggaggacaattcttttcgcagattgacctcaaggacgcgtactttcaggtggaattggatgacgagtcaaagaaattgtgcggactttcaacccacaaaggcaatttcgccatggaacgtttaccgttcggagtaaaagcggcgcccagcatttttcagtctattatggacaaaatgctcgcaggcttgaattttgccacggcttatttggacgatattatcgtcgcaagccgatcattcactgatcacattcagcatttaaaagatgtgttcagccgactgcagtcatnatggatttcgtgtcaaaatgacgaagtgcacatttttccagagaaaattaagt

SEQ ID NO: 65921 - DNA, 1025 bp, Heterodera glycines
atgcccctcattgtgctgctaattgctttcctaataagtgatgtcacttttgcaatggaaaatgaaaagaacggttcgtttaaaaagcattatttgtaagcataaatattattctttaaatatttaaattcacaggaaagccttctgctcctgctgatggtaaagctccttcaccgtcgtcggaacctccgcaaaatggtattttctgatttgtttcacctcgctttttaaaaaatattatttttactggcctccaaaaaataggtttaaaaaatggattaattaaataaacaaacattttttaaaaatttatcggtttaagataagttgctttttatgagccaataaaagtaatggtaaaaataaattataaaaaatatatttattaaattctgcgttgtattcttggcgaaagggccaaaaacccaaatcggcccaaacaaaataatttacttttgtaaaacttttgtatttgtttggatttataatttctggggggggggggcggggttcgtattcactaatcaggaaacggaacttatttgaccaatcccgaagccataacgagaattgacaatgaagaagattaattttttatttgaatttatgactcaaaaattgttaattgaaaacattagaacatttccaatgtgctttttgaattaatttttttggcttgataaaacgcaattgattttataaagtgaattttttatttttaaattcgacaattggggcttttgagatgggcagaatacggtcagggtcgttttcgtactagctggacttttgaaatgggtagaataggcatgcagtccaaaaaataaaactaataggacaaacagtgaaattccgcgccaagcaaactaacgttttaatggctaaatattttcttgccttggtaaaaccttttatttaagaaaatttctcagaaagttcttttgaaactccgaaagcaccgcttaaaggggacgacgaagactcatcacccaagtgccccggggctcccctaaaagcaacacaaa

SEQ ID NO: 65922 - DNA, 672 bp, Heterodera glycines
aaagaggaagtgaaaaagcctgaagaaaagagacaaaaagaagcggaagaggaaaaacggatagaggagcaagaaaagagaagaaaagcggaagaggaaaagacggaagagaagaaaccaaaagaagcggaagaggaaaaaagaatggaggaggaagagaagagacggatggatggggaagagaagagacgaaaagcggaagaggaaaagccggaagagaagaaacgaaaaaaagctgaagagaaaaaacggactatgaatgaggaacacaaaaaacggatggatggggaagagaagagacgaaaagtggaagaggaaaagccggaagagaaaaacccaaaagaagcgggagaggaaaaacggatggatgaagaagagaggagacgaaaagcggaagaggaaaagccggaagagaagaaaccaaaagaagcggaagaggaaaaaagaatggaggaggaagagaagagacggatggatggggaagagaagagacgaaaagaaacggaagagcaaagacggaatgaagagaagaaacgaaaaaaagcggaagagaaaaaacgactggatgaggaagagaagagacggatggatggggaagagaagagacgaaaagaagtggaagaggagaaacagaaggatgaggaagagatgagacaaaaagcgaaagaggaa

SEQ ID NO: 65923 - DNA, 79 bp, Heterodera glycines
agaattgtcgaaaaccatgcatggacaattttttttcactgagatggctcccgactgatccgactgtcccctttggctg

SEQ ID NO: 65924 - DNA, 161 bp, Heterodera glycines
atgaaagtgacgcggaagaaagcaaacgatgccaatggatggggccacggaaagacagaaggccattcattgtccgttttaaccttctttatgtcctttccatgttaccttttgtttttcccatccgctgctttgacttcactcatccgtttgattgtccg

SEQ ID NO: 65925 - DNA, 784 bp, Heterodera glycines
tttcctccgcttttcagctgttgccgggaggatgcgttctgtgctcggaatgcgctctctccgcagtgtttgcgttgcgatttccgtccgtttgtcttcttggtgattttattgtcgtcaattgtactcagtccgctgcctttgtcaattgcgctggcgacggcgtcgtcccccgtgccaatgtccccgccgttgtacgccttcaagcaaagtgccgtttctgttggcaacttgaacagagcgaaattatgtgtgaggagcggaagaactgctcgaccaacgagttgacactgtacatgatcaaatgctgggagaaaccgaacgcaatctatgcggggcggaggcatttcttcaaaaatgtccgaacggtgcgttatcgatcagcagcatgactttgttgatgatgatgatcctttttttcgtttttccattgtcagttggcattggacgagtgggcacagctggcggaaggcgctttttctgtccttcactctcggcgggttcggcgttgacaggtggtgaaaaggggcaaaagagtggaatggttctgccaattttttcgcttaggttttatttgggctatcggaaaagtgccatcggaaaactgtgagtattttttatgcactaaataattatttttaaaatctttggaaaaaaatgaaaaatttctcaatgttctatgattcgaaggttctctttcggtggtcttggcgtgtggacacttctcgacattgtgctcattgacttcggttacattcagcccgctgatgaatcgctttacatt

SEQ ID NO: 65926 - DNA, 621 bp, Heterodera glycines
atgccggggaaaacgagcttttacactttcggaagccgactcccggcccagcaaatgatatgcagagtgatcgcagctgcagaggaaggcaaagacgagtgccaaacaactttgttgcttgacccgggaagccatgtcgacggcgcagatacggagctaattcaacaactcgaaccgcaacccatcgacaagcggccgcttacagttcaagtgttcggaggaaagaagcagcggattcggtcagcaacttatcgcctacgactcaaacggaccgacggcaaattggagagcattgaggtgtccgaagtacctcagatctgtacgccaatcagaacagaactcatcgagtcgggagcaacacccgatagcgacccgcgaaccatcacacagacaacgcaacctcaaataatgatcggcattcgaaagttctgggattacgtggtcggatttcggaaaatcgagagtggcgcgcatgtgattgacaccgtgtttggacaagttttgtgtggcgaaggcacccaagcgagcagcggggcaactcccgcagcatcaatcctaacaaccatgccatgcggaaatatccaccaaactcgaacaaataaacgacaacaaatcggagaa

SEQ ID NO: 65927 - DNA, 459 bp, Heterodera glycines
atgtcagcttcacattcgcaaaaaaatcccgaattaaatatgaaatgtatgtgctatggtcaaccaggtgagagatggtcaaaattctgatccaaaattaacaaatatttatcctacagtaactcaattttatacagggaaaaattctgaaaaaaattctgctgagctaatttttgatgctgataaaaaagtcttttgcgtcaacttgatcagattacttcttcatggtgatttgaaaccccgaaaatggctacggaaaaatattcaaaaaattcctagggggttggtatatttttttagaaattttgagttggcccattggaaagatcactcaatttgcaaccgatttgccttttgaatggtaggcttacgtcttatacccacagagcaagagaggatgaaaaattggacaactcaaaaatgactgttttcaatagtacatatttcaagggaaaatga

SEQ ID NO: 65928 - DNA, 981 bp, Heterodera glycines
atgaaactgttgttctacagcctgctgttcactgttttgctgctgtttgctgactatgcgtttggatacggtaggtgaactacggtagggcagcggagggcccaacatttattactgtagatttaaaagggctaacaatgtactgtatttcaggaaaacagcccaaaactgggcttgagagacgccctcaatggggcctggagttgaatagcaaagccgacggtaaacttgggcagaacaaattctgggaccgctacgggcgtcccgcgtcgcacggcatttggcacggttcggtggcccttctgacgcgaaatgggcacgagtgggcacgtgccaaacagcaatttggacgcattggccatggcggcggtttcaatggacagccgggcaaagggacacgcgaaaacgagatggagaagtacaagcaggagcaggcggaaaagcagaagaaaaagggtggcggcagcactgatcggaaaagtgattgatgtcatggaaactcataaaaagacttaagctaggcctaagctttaggcttacgcttaaaaatcaggctttattttgtaaaatttttattgtacgattggccattgactcaactgattagggttggttgataccgtacccgctaccatcaaaagcacccatttttttctctactctgaactcgataaaaacgttctcgagatgaccaaacacaatcacttattttaactttttagtttggtcagagaatttatttatcaacacattaaattccagtaaataattatagctttacatttatttatttttttgctaacattgcccttttccgtcgtcctcgtcttcgtcctcctcattttgcattccgattggcacaaatgccaaattcgttggcactttcaaatgcgcaatcactttgccctccgtttccaacagaaattcaaaattgaactcacccttacctttaatatgagattaaatttattaaataagaaa

SEQ ID NO: 65929 - DNA, 272 bp, Heterodera glycines
gaatattcggcatcccttttgtggaccttttcgctgtaagaatgtcaatacatatttaataaaaaaacaatttaaaatttatattttaaaataatttaaaatttcagagtgaatttttaaatttattttcttatttaataaatttaatctcatattaaaggtaagggtgagttcaattttgaatttctgttggaaacggagggcaaagtgattgcgcatttgaaagtgccaacgaatttggcatttgtgccaatcggaatgcaaaatgagga

SEQ ID NO: 65930 - DNA, 344 bp, Heterodera glycines
atgggaatgaacatcatgttactaaatgcaatcaacgttgatttgcctaaccgcagtgcatttgttactggtggtcgatcaaagccatttgtaactgaagtaattttttatttgatttttgctgtaaatttattacctgcgccagttttaataatttttagttttaatttaaaagaaaattttcaggaaagatacacaaaccgatgggctactgttttaaaaattgaaacacttcaggaataccatggtatatagaaaattctcatttcattattacattcctcaaaatgagttccataaaatttatctaccattttacacctaattgaataagttttataaaa

SEQ ID NO: 65931 - DNA, 638 bp, Heterodera glycines
  unsure (1)..(638): unsure at all n locations
atgaatgtgttcattttattattttccatcatttcaatggcttattcattggacaacggactcgcaaggcaattaatttaattatctttgctaattgttattttataataaaataaaaatattttttaaatatcatttaagcattatattttatggtgattatatttaatggaaaatattttaaatgagtaacatttataaaagaatgctttaagaacccctccgatgggttggatgtcgtggaccaaattctattgccaaaccgattgtgccaaacacccattcagttgcatcaatgaacaactttatatggtaataaaataaacaattaacagtaattacgcttcattaaggaatggatagattgaaaatgctcataagaattaattcaaaatatatataatattttttaattattcattttatgcgctaaacggatagccaatgaccagttattctaatttttctggtcaatccgcttttttttaaactgccaatttcgtaatcatccattggcattgtttgatcaggacatggccgatcggctggcagaggacggattccgcgaggtcggctaccaatttgtgcacatcgacgactgttgngcggaaaaggcgcnggactcacagggccgaatt

SEQ ID NO: 65932 - DNA, 352 bp, Heterodera glycines
atgaaccgacggtagggaaatttttaaaaaattacaaattttttcgtttacccaattctttttttcatctttcagatggatttgtagcgacgtgtggatggacattctgccatcttttgaccatgcccaactcggactcaaaatggcattgctttccgaccgtttcgatgcgcttgtggacatgcattttgatggaaaaagcgaattgacaatttggaaagaaatatcaattaacaaggacgaaggaccaacaccgaaactgtctgaacggatcgatggcaaaagggtggcatttccgttgccggaccgtccgctgcccaccaaaattcgttttagggatctttggatttag

SEQ ID NO: 65933 - DNA, 463 bp, Heterodera glycines
  unsure (1)..(463): unsure at all n locations
atgaatttaaaaaccatgacccaagtttcaagtaaagtataatattaattatttacatcagaaagacgaattgaaccaataattaaaattaaataaaaataattgattcgcttactaaaatactgatattaatttccaatcataatttttattataatttttttgtactgttgagtaaattatgaataaattcacaaattactagttcaaatttttaaaatttatttataagagatcaaattttcaattttaaaaagatgcatcaacgcaagagtgcataaaatatatagaaaaagatagaagaattgagaatatgtgtaaaagatgcgaaacgtaagcgttcaattggatgtcaaattttattaacattaatggataaaacgttaaaagtttaatgaacgcctaagcatatataacaaatctatgaaagatatcaaattannagcattattactcaaaaaca

SEQ ID NO: 65934 - DNA, 63 bp, Heterodera glycines
tattatatatatgttatataggttttgagtttcgtttcaaaaaacaaaatctcccggccgaag

SEQ ID NO: 65935 - DNA, 69 bp, Heterodera glycines
atgtattcaatgatttatatttcggatacaatagtgagtaagaacgaatacggtaagaaagaatataca

SEQ ID NO: 65936 - DNA, 101 bp, Heterodera glycines
tttttcgatttttgaaaaagaaagttgcattgaacggttttcccgggatgtacacacaaatgatgatgatgatgatgataataatgatgacgatgatgatg

SEQ ID NO: 65937 - DNA, 1552 bp, Heterodera glycines
atgacagcaaaacaactgatcaaagcaatgaaacgaaattatttggcattacaaaagtcagttttaacgcataaaataaagaagcatttccaaatttgaaacgaatttattacttaatgaatttttacgctttttctccaattatcaaaacccaaaacaggtggcagtgattattcgaccaaaaaagggatgtgtaaacgaccgaaaggtttatttggcggaagcctccgctgatcagcaaaatgatgctcttcccgccacatttgcggatggatcttcagaaactggcgctattctttcagggaaaaggtcgtttttcaaacaaaaaatgcattaaaatattaaatttttattaattaaatttttaagtgtatttattatttttcatatttttgttccattttagagctgttgaaatcgtccgaagtacaaaagaaactgcaaagatcagtttgaatcatatcgacgcgcaaatttcaatcatttccattggaaatcttttcttcaatgtttttgtccgtcttcgttctccaaaaatagaaaatgtaaaagtaaatgcacaattatatacagtaattaatagtaattaattccttttattgcaggcatttcagtcatcgctttgtgtccaaaattgtccggacggcgcaaaaatggacaaatattcggcatttttaaacagcaataaagaaaataaaggtgtctatataattttttaattttttgaattattaaaaaattagaattatgctcaaaaatcgtcggtgaactgacagcaaaagatggcgaagataaaagtgccaaccgacgacacaattggatcagttccatctgtgaaaaggatttggcaaaagcatcggcggcaaaagcaacaaaaaatgcttttccaacgacgcattggcttaattcattgatttacgctgctacggaaattgaagttgcttctgtaaatggccaattttacaagtaaaataaaaatctagttaataattaatggacaatgcaaatttttcgacagaaattagaaattatcaataggaaaattttacaattaattacagaagagcattgatcagtctgatcacttttacatcgtattttgaaactgatcattgtcaatttttaggaaacaaagaccattttattacaaaaggccccaattatttttcactttgattctttaaattctataaataaactatttgtgaaaaatttataattttttagcgatagtagacaaacgatcgacaaaatctttgatggtgatcctttgtccaagaatgacaaagtgtcgcctttcattgattctgggcgtttatctgacaaaaaagcgatcaatggccatcaaaacaaagccaaagaatttgaatggcttccccattcgaagcacaaatatttttcttcaaaggcatacgacaagtcattatcattggcattgccatctcttctcatattcttgcaaatttgttttattatttattatgtctattaatttattttaacaaatttattttatgaatcttttgcaaatatttattattatttttcaaaa

SEQ ID NO: 65938 - DNA, 580 bp, Heterodera glycines
atggacaaacatcgcttgttcaagtcgctgtccgccattatgcttttcgttgtcggctcttactttttcatttgtgtctttgttttgctcgcttcttccatgccatcacagcccttcttcaccttccatgtttttccatcaatcctcgcccttttgacttgcgttgccgccagtagcaatgcgccgttacttttcattttcaggtgccggggcaaagggaaaagcgacgggaaaataaaatggcaattaaaattcagcaattgaaaattcaattcaaattcagcaaggattatcgcctcgcgtttcgcaaacagttcgcggaatggcctctgatcggaaaatggctgaacagaatcggaaatgttcaagtgaacgtggtcagaaacgtgaacatgaatgtttcgagtacaattcccctttgaaaatgaaaatcgatctttgtacttttaaatctttttgtaattattctttatttgtggtactttgctaatcgaaaaggacattagagtagaaaaaatgttttgtccataaattaattaatgtattttcgggttgtgtttcggcagatgggcttaataaa

SEQ ID NO: 65939 - DNA, 454 bp, Heterodera glycines
atgacatcaaagtcccaattccgaaaatggaaaaatatggccaaagagtctcaaattcggtattaattaaaaaaaaatttctatattaatgtatttccaaaaatgaaatttctggatacaacaaaaaaaggtttcttgattcattttagccgggatgttttaaatgacatttgacaaaggcatcttttgctaattatgcaattaatatttaaaattgacaaaattaacagacttctgacaaatgattgtgtgcaaaagggcgccgttgaagaacaaaccgggcaaagaaagaagccaccggaaaagcgaggaaaagaacaactccacggagaacactccatggccaaaccgagcaaatgcccaaagttaacgataaccaataattgaattaattaattaaattattttaccgggttttccatggaataattttgaaatgacatttaaatggaaa

SEQ ID NO: 65940 - DNA, 271 bp, Heterodera glycines
atgattatttcgtaagcatgtaaaaatgttttcttaaaacattcaaaaatttaaaacttttagtaaaaatatgaaagatcgtattgaattaacacaaaaataagaaaatttaaaaaatcagaacatatactttttaaatttcattacaccttaattaatttacgtctttttaacatattgtatggaaaaagtaaaagctgaaaaaatttgtaccaaattatttaatttcttttttgaaattttgttcgaatcacgcaattattacaataaa

SEQ ID NO: 65941 - DNA, 1350 bp, Heterodera glycines
atgcacccaaaaagaatggccaaattttggtgggagaaaacattgacatttttatatgcagaaaagcaatgggaaaatattaacacaattttaatgtgtcactttattaaataggtataaaaagtaattttaattgattaattggactgaaaagagagcaaaatcattcatttccataaattatgaagatccgtaaataaacaaagtgagaaatcgaagaaaggacaacaacaaatgaatgaacggagagagaagagagtgagtgatcaatcttttgtcaatcacccactgatcagtccgatttaattggccaaaaagtgtcggcgtttgttcacttcgccgcctgctgttgccgactttgcaaaatttctttccgcgatgcttcctatgggcaacagaaaaaactttaattaaaagtgaaatgaaaaagcgaaaatagcgccgccctttccttttgaattggcgcggtaaaatagagtggaattaatagggaattactcacaattagtcatttcatacaaaaggcacccccccccactcatttgcaaatgtccctaaatgatggggggggggggtctaaaagaggagagagagggtgtcgcgacaaagaattggttaatccaaattttatttttcgccatcgcctggacctcttttctcctcccttaaagtatgaatcattttaatgggaattgaattaaaccatgggaaaggtgccaagtttggcgcttattggcccacctgaagcagtgccgtgtcaatgccatccgtcggaaggtgaacatagcgaatgacggagccacggacgaagcaatttttcaccgaaatcatgtggggatgcctgcgggggaagttgtttaattcccataggtaattcctttaagtgcttatggcttttcatttaaatttgtaaatttgaacggattttgcacaaaaaaaggaattttatgaaatgtaatttgttaaacgtaaaaattgaaaatcatctgcacatattctggggtaatggcgttttcccagccccaactcgttttcggagtttgaggcaaaaattgactttttataatattcaatttgctggtccctttttacctgtcaacgtccgtcaccgaaatgtcgttgattttcatgttcaaatattggtctacagaatgtaaagtgccacaaatactgaaaagaatttggaatgaaatcactgttttttaattccacctgaggtcgtttttcagctcgacgatcacttctctgccgaccatcgacttgaaaaaggagaagaaaagcatttgccaagttacgatttaaatgcctttgttgtgaaaaatggttattatgatcatttaaaatggaaaa

SEQ ID NO: 65942 - DNA, 322 bp, Heterodera glycines
gccattgtcgccacaaaacggaagaagaaaaagaagaagaagaagcggataaaagcaacggaaatgtcgtctgctgattaagtgtacggaaatgaatgattgaataattctatttgagaaatgatctatctcaatttgttgtgcttttttctctcagaaatgcttttgttaattgtttcgttccaattatataaaacatttattttattggcttttttgttgaacatttattaattatcaatgaaacgattatttatagaatgtggaaatacagtagtttttgtttccttcctcctcgcttagaaaaaaattcactagggta

SEQ ID NO: 65943 - DNA, 573 bp, Heterodera glycines
  unsure (1)..(573): unsure at all n locations
atgggcagtttaanttattnggacggagatgacgacgaagcaccggttcaaggcactcattccgccagtttacgttcggcacccctttttaactttgtcaacgcggcaccgtttggagttcatggatggctggcgcattttggcaaaccttacattggcaccactcaattcgagattgatcgtggagcggaggcatttgaacccaatgctgatgtcggggcaatggtaaagattattggactaagtttttagaaatcattttcaggggtattccgaggcgcttattacgaatttcaataaaatgattaattttccaaaaaaaaatccaattcaaaccattctattttactaccgtatttggtgaaaaaattgttgagaggagcttagatatttcggcgtttttgagcactaaaagcctaaaaatagctgcaaaaaacatgaaaagtgactaaacaatagcacacaaaaattgggggtgtctaattaattggactcaaaaatgcaccggaaccgataattcctcctgctcttgagcagtcttaattggtgcatttatgtaaaaaaaggaaagaa

SEQ ID NO: 65944 - DNA, 243 bp, Heterodera glycines
gcatttctccgtgccaccaattcttctgtcaatttcattattcattttgaactgttcgaaccaaagccaattgagccgtttgaattggtcaacgaacaaacaaaggaaaagctgacactgagcaaagaatcagaaaataattgggtgatgaagcgatgccaaattgggcaaattgttcaatggaaggacgaaaagttgaacaatgtcagcattattttgagtggtgtcaattgcattggttga

SEQ ID NO: 65945 - DNA, 301 bp, Heterodera glycines
atgttcatctctggcacattttcttgtgacgcattttataatgatgcattttttgctgacgcattttccactgacgcattttccactgaccgattttccggtcacgaagctgactttaccattattatgaatttatttctattttttgcaattttccacgccacttttttgccgttgacttactgtaggtaagtaattaaatgattgagaaggaaggatttactaattttaattgatgaaatatatttgaataactatttaaaatgcagtttattggggaattaactccagagcagtttga

SEQ ID NO: 65946 - DNA, 297 bp, Heterodera glycines
atgattattaggattgcgcatagtatggaaaaggtaaggtctcaaatatttactaaaaaaacctactatgtagtaaaaataaaaaatttcaaatatgaacaaaaatataaagtaaaaatcagaaaacaaaaacgtgtgaaaatcaaaaataagccaaaaacaaaatttttagcaaattcatttaatttacagtctatggttttttgataaagaaatttaaaatttttacaggttaaaatttcaaaaaaaaatattattgaaaatttatcaaaaaaattttttttgcaatttcaaaaa

SEQ ID NO: 65947 - DNA, 612 bp, Heterodera glycines
atggccgacaaaactactattaatcttattcttcaacgacttgaagtgattgaacgtaaagtcaacaacaacaacaatgccgttccagttcagttgaatgaacaactgcaaagcattgttgaccgtttgtgtgacatcgagcggaaaattgacaccgcaaacaacaccaactgcaacgcgacggactcggaggacaaagagcggaagcgcagtcttgtactgatcggccttccagaatcaaccaaggaaaagccgacagaacgggccaaagaagacgccgacatggtgtccaacgttttggacgctttggatgtagaagtgtgcccacagatggtctaccggatggggcgccggaatgatggcaagcggaggggctctcgcctggtcaaagttgtgcttccggcgagcacctttcaacgcttcgctttggcacaatggggacgacgccgaaatgtactccgcgcaaaaaacgaggagtgggatcggctgcttgttcgaccgtcgttgacgaaagaggaacaaaaggcggaacatgaggcgcgtgtcaagaaaagggaggagtacgaacaaaaacgggatggagtgacaattcgcggacaaaaaaacaattga

SEQ ID NO: 65948 - DNA, 789 bp, Heterodera glycines
  unsure (1)..(789): unsure at all n locations
atggtacaattaggtaaagcacataggattttcagcaaaaatattttggtatcagaatatgatcgcacaaccttgcaagaagagaggcatatttgtaaaaaaaaaagtgacatttgggtgcaatttggaaccagttttgattttttttttcaaaagctatttcttagtggataatttttcatttttactgaatttttgtgaagaaatttaacaaaaaaatgcgaaaattttgttaaaaatttttaaaaatattcataatcttttttatttttgaaagcaaaaataattcaaaatattgtaaaaagtattttatttatgaaagccaaatatttttttatttcttcatatggacgttaaaaggagaaatttggataaaaatgatgtttttcgtgcatttcccatcaaaataaagctgccgcagaaaaaaatattcaaacatttgctgatggtctaaaatttaaaaaaaatcgcaaaaagaaaaaaggtttaaacccaatttcgtttaatctttaaaagaaatctttataaatatcttaaatgaagaaaataaatttctaaattctttttgcattcagacaaattaacagcaattttgggcgaaaaagtgccgtccttgtcggacgaagcagccaattggccaatgcttagacgggctgatgccataaattttagacttgaacaatggnctaatgccacgtgtagcaaactgtatttggccatctccgttggaggcaatgagaataaaattaagtaattcatcatgatatgcattagcctaaaatgaataaa

SEQ ID NO: 65949 - DNA, 955 bp, Heterodera glycines
atgccgttcagacgggacgaatacggtgggcagtggaacagtgaggagaccgtctccatcaacccgtggttttacgaggatgaagaggcggaggacgcggacgcggccaagcaaatctcgccgctgaccatggccggcgttgtgttggcctatttggtgtcggatgtcattttgactttatctaaaaaagaaattcaaattgaaggccctcggtgccattctgttgcctctgttcaaaggccaatttgactttgtcaacggccttttctactcgtatttgtgcttcaccgccattgaatatggccatttgatcccagaaaagtgagaaagaaccagttacagtaatgcatatacatacagtagtttccaatcaccctaattaattaatccctcactgtattgccgtgtatcattaatagttaatttgctgaatttaattttcagcgatgcgttcattcccttcgttctcctttacatgtgcgttggcctggcaatttcgaccatcgctttgggttttgacatttaaaatatttctaattgaaaattcgcattattcttttcagacattggatcaaattacgtgaaaaaattgtattatttgggcaaacgagcaacttccattgcgcatgccagctttttctatggcggaaaacagttgaggggtggggggaggacgaacgaaccaaattcaatttgaatcaaatcaaaccgaaacgaatcaaacaaaatggaataaaaaaagtcaaacaaaagaaaaaagggaatttcgaagcaaaatttggcatatcaatgctaaagattgaagttccatgttaagcatctccgttcgcgaccttttggatgccgtcggtatgcaaaattaaaatggaattttttgctattccatcacaaatgttcaggccaagcgatcgggatcagtgaggatgcgttggaaaaggtcgaccttgaccgaatg

SEQ ID NO: 65950 - DNA, 606 bp, Heterodera glycines
atgggtcgtccacgagaacagctggttggtgaacaggaagagattttgggtcatgcgtcggcagttcaagagtttcacccgttgatgagaaagttaaatgagaggcaaaaagtgtcggccaaactgttgttagggaatgagtgttgtttgatctatcaaaatgcgccaccaggagttggtaagacttatgttgcatcaattgtggcggcgattctcttgtcgataaatgaaaatgttaaaattgccattgtcacatcagcgaatcttcctcttgcaaaattagcccaagaattagacgaagtgttaggtagtgatgaaatggaagagtcgggatcgattgcgttcttctcgggttacgcgaaagaaaaatatagagagatggttgagaagttgaagcgtcacattttggtgtcaaagctaacaagtgaggaaattcagagcaagttggaagagagaagtgaagagaatcatgataagagagatgtgagagagtatcgccaaaattatgaactcaggcctaggctgacacaagagagaaaaatggcatcgttgtatgcgccaagcggcgaacttgagaattgttttcgctacggcatctatggctga

SEQ ID NO: 65951 - DNA, 2914 bp, Heterodera glycines
atgcccgtccaaataaccaatgagcaaagccaatacccccaacaacagccgcagcaattgcctcaatctccttcctccgattctgaccaaaaagaacaactacaaccagtgccggtttcaacacaggaagagacttcgcagcaagttcagccagcaagtccagtggcagagccatcggaggccgcagaagcagcgactgaagtgccggcgccgagtggaagcgcagcgacggggtacggaggcgcagaatcgccggcagccgcgggcgaccgattgcaggaagtgcaggaggagccaaacgcagcagacgaattaagtgcaacgacaaacgaagtccaaaaaccaaacaaaacaatgaatttggataattttgacttttctcaacaggaagaaaaaagcaaaacggaccgaacagaacaaaaagcgaagcatcagcagaccacggcggaacagtcgccaattggggcggaagcgacggcagcgaatgcatcggccaaaacgaacaacgaaaatgccgatttattcgtggaaccgatagacgtcagccaactgcaactgaccaatgacacggagtgcaacagcgaagaactgaggcggataataaccaatgttggtaaaccaatccaagggaaacaaatgcgatggggggggggtagatggccattttacgatgaagaattggccaattcattttgtaaaaatgcctaaggcccattgtttatgctacagaacatggacaatgagctgaatgttgccaaacggtccatccaattggctgccgaagctcggttcggcggtcgcttcgatgtcgtctgttcccaccacgacttttcttacataacaaacactgtaagacctttcattggcacgttcaaaagtgaaatgtcattgcaccaatcacaggaattgtggtgccaagaaacgcgggaaacgacgagttgttatgcgtacagacagttggggtactgaactgaccgacgactgactgacggacggtcaaattaaatcattttcattttgcatatttaaaagtccaaactgaatttgctcatctctttttttgccaaaataaatgttgtgataattttattcgattaaatggttttataatattcattttgcaaaaccatttcccgaacggagcaaaaactataaaaaaggcaatggcacactgaaaaatgaagaaaattaaataatatgaataaatgtgactgaaaatatatttgaaaataatttgtcattttatatgaatttgataatggagaattgagagaatgttttgtcccgttgccttccgctgaaagcccaccgcttcgctccgttcgtcgctacgcctccgttccgccgggcattgcctccgtcgcctcgtcacttttcgtcggttcgtccatcgcttccatctcttttatttccctggtgctctatcaaaaaataacttttaaataatattttatagccaagacaattttgagtgggatgggaagtgaagtggtcaaaccgccgggggccttttggtgattatcttatgctaattaaccgatgagccatcccaacactccttttagcgggtgcttcgttgttgagtcaattatttcatttcattttgcctattaggcactgcttcctcgtcccatataaccgatacatttgccaaaaaagagaagaatcacctccaaaaactgttggaatttcaccgacttgcacaacacttcgttgttaagcacaaactggagaaattcttcgatggaattccttcgctcggcaatcgtttgagggtcggtggcaccaaaatatttgggctccgcaaaggaagggaatttgcccttcagataaagctaaaaaagtgctaaaggtttcagaggtcaaaaaacgcggatttataaaccgatcgatgtatggaggcgagggttgagtaaagggcgctcaactctttgtagcgagtgatcaaaccgaataaccgcggctcactgtcaatggaattgtgcggtgtggccagaaaaaggaaaaggtacaataaaacgagtcgcagccaatctaaccgaaatctccaatttgtactcaacgtggccgaacagtcggctcgtgggcatagtcacatcgacgactttgggagaaaaaccaaaatgctttctttccatataaaccaaatttccgagcacagatttgcagccagtttcatccggcaaaagagaatacatttaacaataaatttgattattttatcaaaactatttaattaaagaattttaaaataaaatagtttaagttggccaaatgcttttaataattattattttagcatcttttgatgcacttccgaatgtttaaatgaaaattaataatttgtttctgttaccccggagcagaagatcagaacgtacaaaaaaccacagaaaaagtcctcaaaattgcagcacaaacagacgaagtaagtacggcatttgaggtaaccaatgctattttcttgtcattctaaagattttgctccgctaaaccaattgtgtcgctattctgtcggcccatcacgaattcgtacaaaggaagaaatttgggatggattcagacgattcagagcaggcaaaacgaaccataatttttggtttagttagaaaattaccaattttaatttaggagacatcgtcagaattatcgacgaagacgaggggaagggatattttgcgcaaacagttgcatttatcaccgatgactataccaaccaatttgcgatggtcatttggcttcttccgaaactcagccgcaattcatttccaaaaccatttgagtttaatgccgacagatttcagcatggctttggtttgtcctttttttgaccattttcattttgatgaattcttttcagccgaagaacgccccgtcccaatcaaagcttgtaaaaagattcctatttcgaaag

SEQ ID NO: 65952 - DNA, 468 bp, Heterodera glycines
atggcgaacagacagtccaatgttttggcgccggatgagtgttcgaatctcacccgaaacactcggtcaattgtccgccattttgaggcatttgtacggaaattcggttcgaaattcgaatccgtttttcattatcaatattctttgttttcacaggtgaagaaccattcgacgaattcgaacggaaaggcttttggaaaatgttgactgtcaaggacttctcgggcgacacaatgattatcgtgacggtccatccgcacccgaacagcgaagtcgggtgggcccggacaaaaggcgaaagacgcacaattcttttttagattaccgataatgccaaaacaaagctgagggaattctttttgccttcggatccgttcagagatgaagcggcacagtttaacgtcacttcgttttactggcaagaacaggcaaatgcgggggacgagcgcatttacgagcacgtggccg

SEQ ID NO: 65953 - DNA, 192 bp, Heterodera glycines
tgtcgttttgtttgttcgcacatggctgaaccgttagcgttggacccgtacaggaaatatcggaatgtccatatgttaatcccgtgttatttccttttctgtaccaacgaacttaaaatttttgttttattttcgcgaataaatcgttaacaacgaacattaaaaaattattaaagtaagagtacaataaaa

SEQ ID NO: 65954 - DNA, 1067 bp, Heterodera glycines
  unsure (1)..(1067): unsure at all n locations
ggggggggggagggcccccccccccccccccccccccccccnccctaanaaatgtatgctatacattgtagagacattgacaatgaatggtagttttcctaaataatgttgttcagaaacggcctttcgttgtcttggatgtgtgctgtggggctggcacggtctgtctttttgctttctcatttgtttatttttttttgcattataagtcaccgattcccgccgaacttcttttgtctccctctcctctcccaattcctttttagtctcttataaaaaaatagaaaagattttcactcaacaattggtcttcagatcagtctttgtcttatgcaacgcattcgcaaagcaattctttcgcttccttccgcttctctctgtcccatttccttcggttgcgttggcatcgaattgaacagagaggcggtgagagatgcgcgaaagaacgcatctgagaatggtttcgacgcaaaaaggtgacgcaacttattttacagctcaaatgtctgtttttgcttcagttgcgtttacattgacggcgaagcggagaaaattttcaaggaattggaggcaattaattgttcattttaaaaccaatcatcgaatttgtttcagtaccacatgcctttcggttgtccattaaatagttcacaaattttcggagtgattgacccgccgagggcgggagtgtccgacaaagtgatcatcggttgcaggagggtaagggcattggtcatagtgcagaatactcattccattgaattttacgcgtcccgtgaaattttcagtttacaatttattaatgggacgcgtaaaagcgtgttctgcactaattaacccaaatgctaactaattttgtttaaaaattcgtttttatcaagctcaactctctgcgtacgctgtgctatgtttcctgcgacccaaaagcggcaaccaaaaatttaattgatttatgcagacccccgtcaagaaaattcgatggcgacccatttcgaattgttgacattcaacccgttgatttgttcccccagactgaacacgttgagtgggtgatcaaattgaagcga

SEQ ID NO: 65955 - DNA, 826 bp, Heterodera glycines
  unsure (1)..(826): unsure at all n locations
atgagcgctaaaattatcagagtgccgaaaatcgcatgtgatctaagcctagaaaaaaatggagtaagtaaaaatcgtaattacgctcaaaaagcttctcaaacaattttagcgcttccaattccttctacaatcgcctttatacatcccattatgagcgctaaaattatcagagtgccgaaaatcgcatgtgatctacgcctagcaaaaaatggtgtaagtaaaaatcgtaactacgctcaaaaagcttttcaaccaattttagcgcttccaattccttctacaatcgcctttatacatcccattatgaacgctaaaattatcagagtgccgaaaatcgcatgtgatctaagcctagaaaaaatggtgtaagtaaaaatcgtaattacgctcaaaaagcttttcaaacaattttagcgcttccaattccttctacaatcgcctttatacatcccattatgaacgctaaaattatcagagtgccgaaaatcgcatgtgatctaagcctagcaaaaaatggtgtaagtaaaaatcgtaattacgctcaaaaagcttctcaaacaattttagcgcttccaattccttctacaatcgcctttatacatcccattatgagcgctaaaattatcagagtgccgaaaatcgcatgtgatctaagcctagcaaaaaatggtctaagtaaaaatcgtaattacgctcaaaaagcttctcaaacaattttagcgcttccaattccttctacaatcgcctttatacatcccattatgagcgctnaaattatcagagtgccgaaaatcgcatgtgatctaagcctagaaaaaatggt

SEQ ID NO: 65956 - DNA, 651 bp, Heterodera glycines
atgcacgacgccaacgcacattgggtggagggcgactgcgtgttcattgccaatgcgaccaccacgcgaatgatcatccccaggggaaacaacgggggatttgaggtgcgtataaatagggactcggcaaaattattcaaatttttatattattttttcaacccaagcgaaagagaattaaaattgcaaaattccgcccgaattccaacaaaaaatcgaaaattaaaaaaagtgcaactcgaaaacttgaagatttgacttaacgttcgaattcgggtcccggcttcgaaattggttgaaatggaagtccgaaaattcctgagttttaattcacgtaacaggcacaatataaatacatttattagcatttgacattttaaaaagtatttgggtgtttttctaaaaaatttttgtaaatttttcctcgcatttatttttttgtttccaggaagttcccgtgcccacggttgctcagccatcatatgtgctcggctttcgtggcacaattcatttcaacggcacactcagcgacaacgcactcgccttcttccgtcacgcgttgcccccgcccacaacgctgtaccgcttctcggtgctggacgaattttatcgtgccaacggactgctgagcccgttcaaaacaacggaacg

SEQ ID NO: 65957 - DNA, 147 bp, Heterodera glycines
gtcatccgcacgttcaagcaaatgtatggcaaggaactgatcccggagttgaaaagcgaactaacaggcgacttcgaacacttaattattgcacttatggaactgccggcagtgtacgacgccgcacaattgcgccgttcgatggag

SEQ ID NO: 65958 - DNA, 370 bp, Heterodera glycines
atgtatggagcgacaccaagagcaattgaatatgccgaaaaagcaacttgttttggtaatttctttccattctaattcaaattcggccaattttaagtcagttccgacgagatggaattcgacctaccgaatgttggcagctttcaaagagcagaaaaaagttttgctggcaatgcaatttgaaagagaccaaagaaatgccggaattttgtctgcaccaaaaaaacctcggatggccgagatggaaataatttcatcattgccgtccatttcattcaaagacttcgaacttttgcgccaaatttgcccaattcttaaaatttttgacgtggaaacccaaaaagtaaaaaatttctttttgctcaataaa

SEQ ID NO: 65959 - DNA, 285 bp, Heterodera glycines
atggcaggtccaggacggctgccaaactttctggtaataagacaattgctcgaaacaattcagtttgtttaggtacgacccgaagaacctaaaaggatacattcattcatgcccagttaatccgttttctattcaaaaaggtaaaaatagttatttggatatttatttattcataatatatttaagggggtccgcaacgctgtcatggaaaatgggttaagaaatcgaaatcgaaggggtcgactgaaacgtgtgtctctgaaaaagaaggcacaaattccgagg

SEQ ID NO: 65960 - DNA, 154 bp, Heterodera glycines
tttgatgaagaggtacaaatgtgatttaaagaggtacaacagtgataaaagaagtataaaagtgattagaagaggtaaaaaagtgattagaagaggtacaaaagtgattaaaagaggtacaatggtgattagaagaggtacaaaagtgattata

SEQ ID NO: 65961 - DNA, 3404 bp, Heterodera glycines
  unsure (1)..(3404): unsure at all n locations
atgacgccaaatttgttggcgttttgcctttgtcccatcccccaaataaagtgccaatttttcgtctgtctgatcactaatctgaattctgatcagccttctgacaaatcatcaggtgatcagttcttgggtcggctttttcttcgacgtccgttccgtctctgcgcgcattacgcttggcgtttcgtcactgcttgcgttgacgtttcagtttggcaatgtgctacggtatgtgccaaaaacggtatttaaattggggataaaatggcataaatttttagaaaataaatttccaatgattaggaaaattccaaaataaatacaaattttttacatttttagacatttgccacgggtcagctacataaaggtgagcaaaaagacctgaaaattttgaaatttttcattgtttttcagtgccttgacgtgtggatgattttctctgtgatttttatttttatgtaagaaaaaacaatttaaattaatttttattttataatattttaggacattggtggaattgtccatcatatgtcaagtgagtatttgcggaaattgagcatgcttttttttattaaaatgttaattaatttactttaattaatataaattattgaataaatttaatattattaaaaataatttatataacacttttacaagaaatttgaataaataaaaattttaaatttattactatggtttaataaaagtctgcacaaaaaaaagattaatatacaaaaaagcttattttacttaatataaaacattttcatttttaacaaataaattaatttcatgaaattttttttgaaaaatattttcgaaaaattaccaataataaattattttccatggccaatttgttgttacagttaaatcgctgggaacgcgagcgtcaaatcggctccaaagtgctgggccattggcttaaccaaatccgcaagacgcgcaagcagacagggcgcgccagcgattacagcggtggcagcggcgccgatgggtcgggcgccggcggcggcatccgcaaacgctttttgctttcaccgctgaagcgaagtgagtgcgtcgggaccacggtgatgccgtgttatgcggcacggattttttttgggggagggaagcgaaatagtttcgcgattttccgaaatttttatcggcattggcatttgccgcaatttttttttggcgcggcatttaaatttctgccattttcagtcactcattcgccgtctccgtccccaccgcctcgggcacaaattcaaaatgcgctttcgatcagtcgcagtgcgacggccacagatttgccgtccaaagaaaagtgaaattttgaaatggaaactggttcattaaagctttgaaatgcgatttttctattttgggtaattagtagagcccgaaatttcaaatttgcgaatcccgcgggatttcgcacaaaaaaaacaaaacaaaattgcggatccctctgcgggattggaactcaaaagttttacgggacgggatccccccaggactaatcccataaaatcccgcattttccaaaaatgcgggattgcggactgggatcccgccaaatcccgcaccgggctcttgtattgtaattgttagttacaaaattaccacttaccaattttacaacataataatattttttgtagagtagagcgggaccgggaattttttgttttgctatttatttaataaaatccaaagttaaagctaagttaaattaattaaaattttaaaatcaaattttcttcagtcatttcaaacaattaatcatttttggaccaaatcatcgaatattaatagaaattcagatttgattttcacatcacttttttcggagcgctttttcaaaaaacttttgggaaagaaggggtcccggcggaggcgataggcgccgccgggggaaattttaaaaatttgggtgcaatttgttaacagattttcaacaaaaaaagttggtttttgcgattattaagctcaattggtaggattttcatttgaaaaatgataaaatatgtatcaatttaaaaaaaactatgaggaatcatattttgtcgataggaaagccatgagtatacaaaaagaaaattcaaaataattaaatttctgtagagggattgaaccaggggaaagaagaagggaaagtcaaggagactagccattaggccatttgcacaattggcagttttacttttaaagaatatattaattattatttcttaattttttccctttaactccaattttcttcactaatttttgactcagacccccattcttaccagtgcttgtttttcccggttcccggttgccctaccgggaccgggacctgagcttttcaaaatccgggaccgggacctgagcttttcaaaatccgggaccgggacctgagcttttcaaaatccgggaccgggaaccgggaccgggacctcggatgaccgggaattcccggcccagtcccggtcccgctctactctaattttttgtattgatagtaaaacagtaaaattcaattattatttatttcttgaaaaaatatataattaaaatattcattatttaaatttaaaaattccatcttcttttcctccctgttttcaggtcacctccatctccaatattgggacgtcaaatgtgtaataataacaacaacaacaataacaacatcaccgccgccaccggaggcggcgaaagtgaaaaattttcaaaaaaaaattttaattcgaaaaatttttcttcagtgattcgcgtctcgtcggtcagccgttgggccacttttcgcgagggatttgcagggggtaaatctttggtcttttcaaaaataattttttaaaaattgcaaattttttgcctaaattttcagcaggcggtggtgacacgagaacagcgggcagcgaagaaggtgaggaaatttgggcactattttaatttttttttaaatgtgccgaattttacatgaaaagccatgccattgaggcgccaaaattagtaattaaaaattcaaaatatttgccttttttcctggatttaaaaagtttttttcgcaagaattggcaacttaatgagaaaatttaaatttaaaaattcaaaattattaaatatttttttgcagcagacgatgcacttttttcatcaaatgtttgttactttttttatttatattttatattaatataattattaaaattattatttttaaagcatttaaagaagaaacttattaaaatgggaatttttatttaataaatgattgtttcaaataaatattttccgatttttttagcgaaagccccgctttttgaggacaatttggcaccagctgaagaagctgaacccgtgcagctcgaagcgcgaatggtccatcncttcggtccaagtggcccgcaaatggatga

SEQ ID NO: 65962 - DNA, 215 bp, Heterodera glycines
ttctcttcccactttcctatttggtgttcaatttgacctattgcatttattatttgggaaagatcggcaggccgctgtgaacgcaatgaacaatttgtggtgcaacaacacccatttgattagcgaacattcgcttaaactatcattttattgaaataataatgtattttggaattcgttcattgttttttctaattatattttaaaatttttaa

SEQ ID NO: 65963 - DNA, 1069 bp, Heterodera glycines
atgagcattggcatttttgcggcccaattgcgtctgagggcaaaacaaattttttgcatttcgccctccacaattaacacatgcggtgccatcaatacggtatagattagtttctcataaaaaacataataaatatttcgtaggtttgctttgacaagaccggcacactgacggaggatgggttagttagttgaaaatttggggattttttttcgtaattttaaagcctcgactttaactgtttgcgtgccgtacataattgcgagtttgggcgcgaatttggcaacgagctgcacgacttttgcacagatgaactgccccaaaatggggagttgctgaaggcggttgccacctgtcacagtctgactcggtgcgtcatcatcttgaatttaaataaattttttggctttttttcccaccaatgtgccgattttttatatattgtttcacaaaataatcccccttttttgtacagcattgacaaggagctcaacggggacccgttggacctggtgctgttccgcaaaactggttggatcatggacgaaccgaccgaaagtgcggtggtggacgagacgtccatgtacgacatgcttcaggtggggatgtgacctgcttgtaaaagctaaaaaaaaaattttaacattgggctgccaaaaaccaaaaattttgatttgaaaaatgcaatatttcagcccaccgtggtccgatcgccgccactgcactcggcggttgagtccgacgtggaattggcgatcattcgacagtttacattcaggtgggtgtaattaaaagattaaaaaactcaaaatttttataatttttttatttccccgatatcccaattttgttgcagttcatcccttcaacgaatggctgtggttgtacacaaccccaacgaggactcacacattcaccatttggttggtcaccatttgatgataccgtattcctctgtatctccttttttgcagtactgtaaaggcgcaccggagaaaattgcgtcgttgtgtgtgccggaaactgtgccaaacgacttccaaacttacgtggacaactacgcacaaca

SEQ ID NO: 65964 - DNA, 844 bp, Heterodera glycines
  unsure (1)..(844): unsure at all n locations
atggtgtttataataataattaggaatgagagtcacgagaaaatccaaaaaagtcatggaaaaatagccaaaaagtaacaaaaaaatctggggatcagaatttcgaaactaccgaccatgggttcgggcttagacagttgaagtcttttataataaaaaaaacataaaaattccaaaaagtaaaaaaaaccaattaaaataataatgcatttaagaagctttcaaacaaagtgtaaaatattttaaagtcattttaaggccatttaattttatttgtacatattttggttgtgttatattttactgaaaaatgtaccaaaattgtaatttcttttcactttgaagctaattttgaatataaattctggctttttgctgcgatttttattaaaatgtccgaatgcaaaattggagaatttatttcatttcataataaaaaaaaatcgaaattttagaggagaattgttatgattgttttcaaatttgtcaaagattggacaacccagaatcaatcagtgatcaacaacagatcgaggtggacgaacgcaacagaaacaataaaaatggaaataaattttaattattaatattataggaaattcgtctaaactttgccaaaacggaaatggaattgtgcgaaacgaaacaattgtgcttaattaagggtcttcgactcgaaaaagcgagtttttatttaaacattttttaaatttgccataatttttaaaaaaaatttntagagggtacttcaagcagagttagcccaacaatacggtacagaaaattatttgctgtttttttaataattaagcataatttattttatttttaaatttgaaataaa

SEQ ID NO: 65965 - DNA, 455 bp, Heterodera glycines
atgtggtggtttcacgaaattccaacaccaccgcccccgcaatttcttccaacccaacaaggccgactgaaaatgcgctaccaagggcacgattactacaaaaaatttgaaggagccaatgggcaggtgtactggaactgcgtccgttttccgcagaggttgggcgcgtgcaaaggcaaggcacaggtggtgaacggaattgtacggcaacgaatccgcacaaccatccgcctaacaatcatccgcctgccgaggaatgtaagtcggaagaatgagtaatagtaaactttggatataatttggccaatttttaggacccaaaatgtgacaacacacaagaaacggtggaccgtacgcaaccaaagaactgagcacggaatttccctaaaaatggcattgatcagtcatccccccaattgttatttgtgatcggataattgaaagcgcaaaataaa

SEQ ID NO: 65966 - DNA, 217 bp, Heterodera glycines
atggatggcactgccgcagttcctggcacgtctcagcagccgcctttcggcacggccactgacatggcgcacttctccaacgcattgcaactgcgacaactgcaactgttgcagcttcagaaacaacagcaggcggcacaggtcgcaaaaaatttgtcatttttggtgcaacaacagcagacggttcggtcgggagagatcggctacttcacgcaag

SEQ ID NO: 65967 - DNA, 520 bp, Heterodera glycines
atgaacccgaaaaattttgtgccttttggcctaaagtcaaagaaaatgcgtccaaattcactcaaattgacattgccatggacgcatttaacaagtggattaacacatcggatctgctcagcaatgaacaggaacagatcatcactttttgggctgaagttttttgcaaaaggctggaatcccattgctatgaatggcctgaattggacaaaaatatttttgcccaaattggtaatgaaattttacaggatgacaaataaatttttttaaattaataatttatagctcgtaatgaacggtggatgttatgactagagaccgcaaaaaaaagcatcaaaaatcgcgaaaaaggaactataataggcaccaaaaattgaaaaaaaggcatgaaaaggcacgaaaaccccgaaaaaggcataaaaaaggcatttaaaattttttttattaaggatttttagggagcaaaacacgtaaaacttattcaaaaaacttaatttttgtcatttaaatgattattaaa

SEQ ID NO: 65968 - DNA, 712 bp, Heterodera glycines
atgccaaaccaaaaggacggagtgacaggaggcaaacgaattgagcaggaacttgccgtgtttgaccttcccttttacatcgtcgcattggcctttttcctaaaggcgttcttccgtctgtatgacttgctcgtcttcgtcccattcaaattatttgctgaccctgagctggaaaaggaacgctctcgtgagcgaaaggttttgcgctttcaaaagtaaaaaaagcaaataaaacggagggtttgctttaggccatgcccatcgatgggaagccgacttcgtcctggagacacgtcgataccattggcactgctctgtacaccgaactgtttgagggctgtccgacgcttggcaaaatttgggacaaagcggcacagttagtaattggctttatttatttatacatgcgtttatgtttgaattgaggttacaccgtggacacaattgcatgggcacgcgcgacattctcaatgtcgtcgaagaacagcagccggacgggaaagccttccaaaaattggcacttggcaaatgcaattggatgaactacgaacatgttgatgaagtgatcgtggaagtcgcttctggactcagcaatttgggcattgtccaaggacaaaaagtggtcattttctctgagaccaggaaggagtggatgatctcggccatcgcctgcttcaaattgggccttccaagtgcgctttactacaaatga

SEQ ID NO: 65969 - DNA, 355 bp, Heterodera glycines
atgaattacatcacgaaaaatgaacgggcgaagtgaaaacaaataattaaaaagaagggcgggggactttagaagcgtgtaatctttgctttcaaatatattaaaacttttttttgcagaatatttggccaaaaagggaaacagcaaattaatgttgaaagtgccaatggcactctccgtttttcagagggtttatgccttttaaaatccggcacattaatccgttgtccatcacgtgcgatgtctagaccatcttaacatttcattttctaaagcacaaagttcgattccgttactgctgtttgtcagagtaaaaaaaatcagacaaattaaaaaatcaaatttaaaaaaagga

SEQ ID NO: 65970 - DNA, 66 bp, Heterodera glycines; identical to SEQ ID NO: 62826

SEQ ID NO: 65971 - DNA, 179 bp, Heterodera glycines; identical to SEQ ID NO: 57272

SEQ ID NO: 65972 - DNA, 146 bp, Heterodera glycines; identical to SEQ ID NO: 57274

SEQ ID NO: 65973 - DNA, 146 bp, Heterodera glycines
  unsure (1)..(146): unsure at all n locations
atggctatctatttttttgagaaatnttctatgcaacaaacgctctcgaacatgaaacgaagtgcggtgcgccgtggccattttatttttcaaataatttttaaatttaatatatattccagaaaaatggctatctctttttttga

SEQ ID NO: 65974 - DNA, 974 bp, Heterodera glycines
atggatggaggtaggcaaaaatagaaactattcaattattataaataattaactatggatgcatgaaaaatgataaaaatcacaaaatttgatcattttttagtgaaaatctgtcaacaaattgtaatcaaattttcaaattttttcgcggcgccgcctgccccctcttcacaaaaagttttttttgaaaaagcgcgcctcaaaaaagcgttttattgatttttaaatttggaataaaatttaaaaaaatgatttttgctttatgattttaattattaaaaagttgtagaaaaaatttcgcattttcgcatattttagcttttcgcatttcgctttttttcatttcgcattttttagtttcgcaaatttcgctttttatttttcaatttggcccatccctgctaaaaagtaataccgtttttgcacccaaacttcccccctcccattcactattgatataaaataatgattttgaggtctgctcgcaaacaatccaagcctggaactgttggatgaaataagcaaggaaaatgcattggcaaaacaacacaatgtatgcagcagttgaccagttttatttagttttttttcaatttttacattttcaggaaccccagtatgagctggagtgttttgtttcgcttggcactggcaaggcaccgactgaaccggttggcacaacatcgttggagattgggactgaacttattggagcaattaagaatctggcggggattttgatggatcaggtacacacacacacacacactatatatatgtgtgtgtaaagcaaatcattttaaaactaatttcaagctggggttgtatatttccccttcctcacaattgtttctgaaataattgctttttttggaattagactcaaaattttcaatcgaaaaaatttgagtgcgtttcaggcctcccacagtccaggaaaaaaatatggatttccatataattggaatccctaa

SEQ ID NO: 65975 - DNA, 1007 bp, Heterodera glycines
atgatgattttggcgaacggagcgggcccgaacgcgactgacagcgctgccatgttgccattggcacatgtgttggaggttcgttagcgggcaaaaaacaaattgcttgaggggctaataattaatttgtgtccgttttttgcatttttactgtgaattctttgaatttttgttggggtccggatttagttaggggtgcagaatgactaattgagtgaatcgtattcagcaattactaaaaccccttaatgcgtttccatgatttttttgactttttgaaaatcgtggtagagttttcccaattaaaatatcaccaaataagtattatttggtaaaatttagaaagttttaccaaaaattatattttcacacattaaggatgaaacaggcaaattccaaattgccaagttgttgctttgcttccatgcacgttgaatgtgccggccggaaagagagacaaaatgtattttaattcttatttttgattgttaacattgaatactttagcaatgaaaaggcattggcgaagctcgtggccaaactgaacaaacaaaaggtctcagaaatttttgtttcatattttccacttggaaaattctttttttttttttgctttaatttatttaaacattttttgtttagaagaaaaagacgggcacaaaatcggaagagtcgaccgttaaaaagccagagtgtgtggatgttgaggaagcaattaggaatgagtgcagcaaatggcactgaaaacgagaagaaatgaacaaaggaaaaccccgagacgcaagggcacgggcgtccgagcactttcactggacggtggcggaattcgaggcattgtattagtgcaggttttgattcgggactttttaattaaaaattaaattttcgattaacaatttgcgacttaaataattttttcctgcaaatgaaaaattggggtttactttcttgacaaacagttaaaaaacacttccataaaaaccatattttttaaagaagcatccaaa

SEQ ID NO: 65976 - DNA, 2288 bp, Heterodera glycines
atgttaattgaaatggagtcgctgatgtacggcgagggtttgcaagcgggtggccatgaaaaaaacttcgtacaaaagaacttcaattgggttatcgggacgagcaccggagcggtgagagcaaaaattaaaattatcagttttaacttgctaagtatcatatttgtgcaattttgggtctgatttcaaaaaaatgcaaacattggagggggggggggggtggcggtgaagagaaattttcgaaaatttgttaatgcattttccaattaaaaaaattatttgaactgatcaattaaagatgttggacattgcgaatttcagatcgttgcgttggcacttgtctcgggcacctcactgatcgacgcactgtgagtttttgggagatccattttaaaattggatagtcgcagaagagccatttatagttttttgaactttttgaaaaattaattttttttttgtttttgagtgatggtcatcagtgaaatttttaaaatattgatgactcagaacatttgttattggtctctgccaaactgaatattttttcagagggctgaaaattgggtaagcccgtccgtttgttagcctttaaattgggaaaaaattttgctattagaaaattttcaatttttttggttttgctttaatgaattttcaaaaaaaaattgcagattgtttactaccgcaacatacgttggccaaaaaccttcccgacttgtcaaattcgaaacttcacttcggacctcaacgaatacaacccatacaaaaccaacatttggctagcggcgcgctattcaagtgcggcgccaacgtactttgaaagtcgggacaaattcatggatggaggtaggcaaaaatagaaactattcaattattataaataattaactatggatgcatgaaaaatgataaaaatcacaaaatttgatcattttttagtgaaaatctgtcaacaaattttaatcaaattttcaaattttttcccggcgccgcctgccccctcttcccaaaaagttttttttgaaaaagcgcgcctcaaaaaagcgttttattgatttttaaatttggaataaaatttaaaaaaatgatttttgctttatgattttaattattaaaaagttgtagaaaaaatttcgcattttcgcatattttagcttttcgcatttcgctttttttcatttcgcattttttagtttcgcaaatttcgctttttatttttcaatttggcccatccctgctaaaaagtaataccgtttttgcacccaaacttcccccctcccattcactattgatataaaataatgattttgaggtctgctcgcaaacaatccaagcctggaactgttggatgaaataagcaaggaaaatgcattggcaaaacaacacaatgtatgcagcagttgaccagttttatttagttttttttcaatttttacattttcaggaaccccagtatgagctggagtgttttgtttcgcttggcactggcaaggcaccgactgaaccggttggcacaacatcgttggagattgggattattggagcaattaagaatctggcggggattttgatggatcaggtacacacacacacacacactatatatatatgtgtgtgtaaagcaaatcattttaaaagtaatttcaagctgggtttgtatatttccccttcctcacaattgtttctgaaataattgtttttttttggaattagactcaaaattttcaatcgaaaaaatttgagtgcgtttcaggcctcccacagtccaggaaaaaaatatggatttccatataattggaatccctaattatggcccctcgaaaatggtagaactttgggcgccatggtgccgataggcgatgccagaaaattttgattttcattgaatttagttaagaaaatgttgcacgcactttgaagtcataaaacgaaaatttttgcgatttttcaagaaaaatttgtttgttttttgacatttttaaagtttttggttgcagttttgcataaaaatggccagattagatcattttaacaatcattctcatacatatgttttccttttttcacataaaattctcttcttatttcggttttgattttagcttacaaattttctacaaaaatttttcatggatttggacgcatttcttcgtttcttcgctggggtttgcaatttattttaatgtttgtcttaaacttttttttttgtccagccgcagcagcagccggcaccaatgagtatttacgaacgctttaacaaggaagtttgcgaaaaaaacccttga

SEQ ID NO: 65977 - DNA, 1005 bp, Heterodera glycines
atgatgattttggcgaacggagcggacccgaacgcgactgacagcgctgccatgtcgccattggcacatgtgttggaggttcgttagcgggcaaaaaacaaattgcctgaggggctaataattaatttgtgtccgttttttgcatttttactgtgaattctttgaatttttgttggggtccggatttagttaggggtgcagaatgactaattgagtgaatcgtattcagcaattactaaaaccccttaatgcgtttccatgatttttttgactttttgaaaatcgtggtagagttttcccaattaaaatatcaccaaataagtattatttgataaatagaaagttttaccaaaaattatattttcacacattaaggatgaaacaggcaaattccaaattgccaagttgttgctttgcttccatgcaaagttgaatgtgccaggcggaaagagggacaaaatgtattttaattcttatttttgattgttaacattgaatactttagcaatgaaaaggcattggcgaagctcgtggccaaactgaacaaacaaaaggtctcagagatttttgtttcatattttccacttggaaaattctttttttttttgctttcatttatttaaacattttttgtttagaagaaaaagacgggcacaaaatcggaagagtcgaccgttaaaaagccagatgtgtggatgttgaggaagcaatttggaaggagtggcagcaaatggcactgaaaacgagaagaaatgaacaaaggaaaaccccgagacgcaagggcacgggcgtccgagcactttcactggacggtggcggaattcgaggcattgtattagtgcaggttttgattctggactttttaattaaaaattaaattattcgattaacaatttgcgacttacataattttttcctgcaaatgaaaaattgaggtttactttcttgacagacagataaatgaacacttccataaacaccatattttttacagaagcatctaga

SEQ ID NO: 65978 - DNA, 499 bp, Heterodera glycines
gtctgctcgcaaacaatccaagcctggaactgttggatgaaataagcaaggaaaatgcattggcaaaacaacacaatgtatgcagcagttgaccagttttatttagtttttttcaatttttacattttcaggaaccccagtatgagctggagtgttttctttcgcttggcactggcaaggcaccgactgaaccggttggcacaacatcgttggagattgggactgaacttattggagcaattaagaatctggcggggattttgatggatcaggtacacacacacacacacacactatatatatgtgtgtgtaaagcaaatcattttaaaactaatttcaagctggggttgtatatttccccttcctcacaattgtttctgaaataattgctttttttggaattagactcaaaattttcaatcgaaaaaatttgagtgcgtttcaggcctcccacagtccaggaaaaaaatatggatttccatataattggaatccctaa

SEQ ID NO: 65979 - DNA, 1029 bp, Heterodera glycines
atgatgattttggcaaacggagcgggcccgaacgcgactgacagcgctgccatgtcgccattggcacatgtgttggaggttcgttagcgggcaaaaaacaaattgcctgaggggctaataattaatttgtgtccgttttttgcatttttacagtgaattctttgaatttttgttggggtccggatttagttaggggtgcagaatgactaattgagtgaatcgtattcagcaattactaaaaccccttaatgcgtttccatgatttttttgactttttgaaaatcgtggtagagttttcccaattaaaatatcaccaaataagtattatttggtaaaattgagaaagttttaccaaaaattatattttcacacattaaggatgaaacaggcaaattccaaattgccaagttgttgctttgcttccatgcacgttgaatgtgccggccggaaagagagacaaaatgtattttaattcttatttttgattgttaacattgaatactttagcaatgaaaaggcattggcgaagctcgtggccaaactgaacaaacaaaaggtctcagagatttttgtttcatattttccacttggaaaattcttttcgatgccagaaaattttgattttcattgaatttagttaagaaaatgttgcacgcactttgaagtcataaaacgaaattttttgcgatttttcaagaaaaaatttgtttgttttttgaaatttttaaattttttggtagcagttttgcataaaaatggccagattagatcattttaacaatcattctcatacatatgttttccttttttcacataaaattctcttcttatttcggttttgattttagcttacaaattttctacaaaaaattttcatggatttggacgcatttcttcgtttcttcgctggggtttgcaatttattttaatgtttgtcttaaacttttttttgtccagccgcagcagcagccggcaccaatgagtatttacgaacgctttaacaaggaagtttgcgaaaaaaacccttga

SEQ ID NO: 65980 - DNA, 2358 bp, Heterodera glycines
atgatgattttggcgaacggagcggacccgaacgcgactgacagcgctgccatgtcgccattggcacatgtgttggaggttcgttagcgggcaaaaaacaaattgcctgaggggctaataattaatttgtgtccgttttttgcatttttactatgaattctttgaatttttgttggggtccggatttagttaggggtgcagaatgactaattgagtgaatcgtattcagcaattactaaaaccccttaatgcgtttccatgatttttttgactttttgaaaatcgtggtagagttttcccaattaaaatatcaccaaataagtattatttggtaaaattgagaaagttttaccaaaaattatattttcacacattaaggatgaaacaggcaaattccaaattgccaagttgttgctttgcttccatgcaaagttgaatgtgccggccggaaagagagacaaaatgtattttaattcttatttttgattgttaacattgaatactttagcaatgaaaaggcattggcgaagctcgtggccaaactgaacaaacaaaaggtctcagagatttttgtttcatattttccacttggaaaattcttttttttttttgctttaatttatttaaacattttttgtttagaagaaaaagacgggcacaaaatcggaagagtcgaccgttaaaaagccagagtgtgtggatgttgaggaagcaatttggaaggagtggcagcaaatggcactgaaaacgagaagaaatgagcaaaggaaaaccccgagacgcacgggcatgggcgtccgagcactttcactggacggtggcggaattcgaggcattgtattagtgcaggttttgattcgggactttttaattaaaaattaaatttttcgattaacaatttgcgacttaaataattttttcctgcaaatgaaaaattggggtttactttcttgacaaacagttaaaaaaacacttccataaaaaccatattttttaaagaagcatccaaaataaacaccaatatcattcgataaacctaggtcttccattctcctgcaaaattccaaaaaattcgttctgcttcaaaaaagtcattgcccgaaaacctcaaaaaaaaaattttatctaagcattttgtttataaattttccgaaacagagaatattctttaaaattttgcatcctaatagagttatcgaatgatataaagaatgtttaatttgagtgtttctttaaaaagttgtgatttacttcatttgcaaaattatttattggccgtgtcttttttatggtcatgtcaatgcaatagagcggcttaccaccatatttttcgctatgcttatcccttatcaaatttgcagatgttaattgaaatggagtcgctgatgtacggcgagggtttgcaagcgggtggccatgaaaaaaacttcgtacaaaagaacttcaattggattatcgggacgagcaccggagcggtgagagcaaaattaaaattatcagttttaacttgctaagtatcatatttgtgcaattttgggtctgatttcaaaaaaatgcaaacattggagggggggggggggggtggcggtgaagagaaattttcgaaaatttgttaatgcattttccaattaaaaaaattatttgaactgatcaattaaagatgttggacattgcgaatttcagatcgttgcgttggcacttgtctcgggcacctcactgatcgacgcactccgactttacttgcgcctgaaggattcggtgtttggcgcccgggcgcagctgatcggttacaacgcgcaaaatttggaaacattcctccaagcgcagtttggcgaacacaaaaaaaaatggccgaattatcgcgtggaaacattaagtgagtttttgggagatccattttaaaattggatagtcgcagaagagccatttatagttttttgaactttttgaaaaattaattttttttttgtttttgagtgatggtcatcagtgaaatttttaaaatattgatgactcagaacatttgttattggtctctgccaaactgaatattttttcagagggctgaaaattgggtaagcccgtccgtttgttagcctttaaattgggaaaaaattttgctattagaaaattttcaatttttttggttttgctttaatgaattttcaaaaaaaaattgcagattgtttactaccgcaacatacgttggccaaaaacctccccgacttgtcaaatttcgaaacttcacttcggacctcaacgaatacaacccatacaaaaccaacatttggctagcggcgcgctattcaagtgcggcgccaacgtactttgaaagtcgggacaaattcatggatggag

SEQ ID NO: 65981 - DNA, 360 bp, Heterodera glycines
atgaacgtgaaattgagtgatggtaaaggcagctttgcggaccgtgttttgttgatggaacggtaaatttgaaatttaattgaaaatgccaaaaagaatatttacttaattgaatcacatttatttcaaatatttgccaatttttatttcttaatatttgttttttcagtctttgtccaatggtcaacaaaatgggagtagctgcaaacaaaagcaacctgatcatgcagccacttgagtaagttttattgaaaattcaaatccttcaatatttcttataaaattatttgagcataattagtgtggggtttaaaacgattttgtgtttttaatattttggcaaaagatattcaatagcca

SEQ ID NO: 65982 - DNA, 927 bp, Heterodera glycines
atgagcccacctgcatcaaatttggcttcaccgtatccttcatcagcacagccaacgcgccggcaacgcaaagatcgtccgcagttatcggattcatgtcccgatcatttgctaccacaattttgccaatccgttcgcgcaaatccgccagccccatgcattgggccagaatggccattagctgagaggggtggagaaagtttttggatgaattagttagttttttcaacaaaaaaaaatccaaaaaaacggctgaaaattgttttcttgaaattttgttaattaggcctcgagagtctcgagccaaacaaaaaaaaacaatccatgccgacattggcacggcatgttagtgtaacaggttgtgtaaaaaaaatcactgcagagtttggaattccggacacaatttggaattcatcatttttatattttctaaaatttcattcattttttatgtgcaaggttggcacggcatagatgaacgcacttcggatgagacggtgatggcatattcggtggtccgcttgtgcttctgctcttgcggtccgtgcccaatttcaacacggcgcaacatgcgatcattcagatcaaccacacggcccaaatagatctgatcacggtccaaattcagtcgggcaaactgtcgtcgctgatcagtgctcagctgttccgcgtcctcaaccgccggaaggcccaagcgttggaggcgacgcttttgcgcatcgcaaagcggacgctttcctgtgccaaagtgtggaaaattgtgtgatcaaaatggcaaaatgatcggaccaatgtgtgttgatcagagacaaatctgatcaatgaacctttaagaaaaatgatcaaagtatctgatcaaaatgttcagctgaatttgatcagaatatggacaaaattaagagtcatttaaaaaatgatctaaataaa

SEQ ID NO: 65983 - DNA, 4114 bp, Heterodera glycines; identical to SEQ ID NO: 7791

SEQ ID NO: 65984 - DNA, 604 bp, Heterodera glycines
atggaaaatggcaaaaggcaaagcgaacagagtcagaggatggaagccacaaaaacggaggagaagaagccattgaagcaaataatgtttctggacgattatgaacaagttcaaggagaggaagagggaaacgaaatggcaaatggaagggaagggcagcggagagaagggggaaaagagggggaggaggaggaaaaggaggaagaggcatttgaggaggaagagaatgaggaggaggaggaaatgttcttcttcaaaccgagcggtgggcacgccctaagtaaggacaaacggacgaggaaatgggccatcccaaaaggacactccgttttaagggtgccgcaaggatatttcccaaacccgccaaattggcgcttattgacaaaaaaagcattgttttaaattttaagcaacctaattaagcaaattttataccatttaatagctcttattcaatactctctgtataggctataaatttctattcactcatcaaaaattttaaaattgctggccaatagaaaataccgaaagcttggatttaaaatttttgattttgagaaaaataaggacgtcgaatttatgaaatgctaatggtggcgga

SEQ ID NO: 65985 - DNA, 723 bp, Heterodera glycines
ccgaaggattccgtctccccataaatctgggcgcatcggttcagggggactgccccgaaaacccaaaaaaaaattttttggataaaaattatttaaatgaactgactagataatatttaaaataggagatttctcttcctttcagtatccctgcaaagtttggtgcgcttctgatcagtttctgaaaaaaaagttaagcctaaactttttggcttgtttaaaaaggaatttaaaaattttttaaaaattttattcatctcccttttcgatagaaaaagcatcagagtgcctaaactaacatgtaaataaaatttggtgcgtttcagagcattttctgataaaatatttatgaaataaaaaaatcgattttttcaagtgtccgtttggggtactcaaacaattatggggagcaaaaatccaacgcagaattaaagtacagactatagggaagctattcccgaaggattcggtctccccataaatctgggcgcatcggttcggggggactgccccgaaaacaaaaaaatcgattttttcaagtgtccgtttggggtactcaaacaattatggggagcaaaaatccaacgcagaattaaagtacaggctatagggaagctattcccgaaggattcggtctccccataaatctgggcgcatcggttcggggggactgccccgaaaaaaagaataaatcgattttttcaagtgtccgtttggggtact

SEQ ID NO: 65986 - DNA, 677 bp, Heterodera glycines
atggttttcactggcattgatcgactgattggaattgcttttttggaattgtatgaaaaaatacaatattatcaaattgttaattacagtaattttcagttacgataaccttaaaaaacgactgtatttggcactgttaacaattctttctgtggtctatggtgtctgcttctctgcttcggtgtaccaaaatgcaattatggaaggtgatgagttgaccaccggatcatatggcgattttttaaaggtgttgtttattgcttttttattactaatttaaatattatatatttttagaataaatcaattttaaatacaataagttttatgcttatttcaatgtctttcataatttatgtttgtcttggaattgtggtacatctcaaagcttcaggtaaaaaaagaaaagaaaaagcatatggccctctcgtcggcaacgaaattgccgacacctcattgcactgcattcagtgaagtaaaaaaaatttttgctaaatttttggctgaaaattatatcactataacgtcactatttcggactttttttcactattttggcacttttttagttaactatttcaacatgtttcgtcactaaaagtcgcgaccctaatcattatcttatttcaaatttgagtgtttaaatttgccggaaaatttttggaaattgtaataaa

SEQ ID NO: 65987 - DNA, 367 bp, Heterodera glycines
atggccaaatattgtttaagtaagaaaaaaagtcaatcaaaaaaacagtaaaattttccattttcagaaaaacaaagcaaacggttgacctgcaagaagaagttcaaaattcagcgcaaagttcgggaacactcgcgaaaacttaagaaaatgtccaaaggtaaaaaattaaaacgaaaaccccttggatttttcggaaatttcattgccctaaccctaataaaaattttaaactttagaatccgagcggaaaaagaagacggaaaagcaaatttccgtgcccagcaaatgtccattcaaagaggaaattttgatggaggcggaacagaaacggacggaggcaaaggtttccccaaaaaaacattag

SEQ ID NO: 65988 - DNA, 1263 bp, Heterodera glycines
atgtcaaacgaagaagaaaatgttgaagagcaaagagagttttcccctcagcaacagcagcagggcgaacttcgctatttccacgagggatttacttatgtgaaagatcggctcagtgccgacggcacaaagttattttggcgatgcgggaaaaagattagttaatgggtaaatattaattgactcattagtgccttctgttttaaacgatgccaaacgcatgcaatgggcgcatttggacggatgccaaagacggcactttcctttcgatgaggacgaaacattcgtgcagagaggggagggaagacacggacgaagccgactcccacggggacggcaccgggcctatgacccaaagtgccacggccattgtcaaaggtccgcgggagggcgcggcacagcgcaaacactcgcggcatttgcttttcactctcggaaatattcactttcctttccaatcgcttgtctcatttcgattcaaagtttctttttgggatgaaattgctgaaatccctcccttaatttaaagaaagagtcggtactgaaaaagacattttcagttgaagcgggcgacagtttgaccaatgccattctgggcattttgccccaacaatcggccgacgacgccgaggctggcagcactgggaacggaccaatgcattcagcggaacatcaccagcacgagacggaccagcaacagcagatgatctcttcagggacgggtgccgcgtcggtggaaggaaatgccatcgccgcgggggttcggcgccattctctgctgggaccgattccaatacgttcacagcaacagcaatccgtcgaaggccaacagtcgaccattggccagccgatggtgcgcaatttgccacctgcgactgttcgcactgcgaattttgcgcaaaatcatccggtgggcaagggacttctgaatgttttttggcaactgtgacttcgtttcgggaacattctttctcactgtgccgccccatttcaattaattaattaattgagcagcaatcgctcgtcaattcgcagcatccgaccgtggccaacaattgccattccgagcagcacttcgccggtcgcaagaggcgggcattccctccgccgccgcagtcgtcggcactgccgctgaacggcttctcaaattgtgtcggcgaagacggagaaacggtggaacttcgactgaaacgcctcaaatgcgaactcattgaggtgggagcagcagctaattgtgagagaaacaccacaaaatggcattaa

SEQ ID NO: 65989 - DNA, 928 bp, Heterodera glycines
atgtccgacctgcccaccggtactgtaacggtggcggtcattctgtccgtcatttctctcagtgccattctcgtcggagtgccgctaatgctcaacgatttggtgaaccttcagcttgagtttggactgaaaagccaagcgcacttggacatgagcaacgttttgtggagagacataatgaaagaggtggcgacgattggccaatgggacaaaagggagcaaaagcagacgatacggaagcggagacaatgtgcgaaagggacggacaattgaccactcgaaacaaatgccgttcagacggaagcggaaatatcggcggagggggcgcgagcagtccaagtgccacttgccctcagggagcgcgaggggccccgggagtgccgggggcaccgggagagccgggtcaatcaaagccaagagcgaagttgctaacaaagaattgcctttaaggccaagacggacaacccggcacttcgggattctcgggctttccggaggattttgctcacgtgtcgcagtgccccacttggtgatttatttcgccatgacttaacctgtgtttctctttgttaaagtccaattggtccacctggccccccgggatacaaaggaaggagaggctttcgcggtgaaaagggcccaatcggtacacatttaaatagcccaatggcgtcattcaattttaattttaaaggacctcccgggtcgcctggtcgcgatggccatcccggtgagcagctaatgaacggattaagccgtgtgaggggaaattgtactgtttttttatcaggtgacgaagggcccgaaggcgaaattggacttcacggagatttgggagagcctgggccgagaggccctcccggcgagacgggcattggatacgcaaagggcgagccggggcccaagggagagcacggacagccggggg

SEQ ID NO: 65990 - DNA, 2162 bp, Heterodera glycines
  unsure (1)..(2162): unsure at all n locations
gcgtttttcaacgaatgtgtggacatgaaccacttcctgtgggagttccagcgtgatcccacctcgcgtccgatcaccgccgccattttcgccgttgtctattcgctgatcgttctggtcggcgtctctggcaatatttgcgtccttttgtccatcggccggacgcgttctctgcagacggtgtccaacctgttcatcttcgctttgtcctgctccgacatcgtcgtctgttgtgtgtccgccacctttacgccttacaccgccttcactaaagtttgggtgttcggagttgcgctttgctctttggccaatttcaccgcggtcagtactttttggctaattggcattggcattgttttgccatttgtcatttgctaccactccctccctcgtccctttagggtacatccctttgcttttccatttttgtcctcgccgcaatttctgtcgaccgttttttgctcattcgctttccgctcaacaatcagcttcggcataaccacgcgttgctcattatcccggtgaggaggagggaaacggaattatctcaatttgcatcccatccaaaccaacagattctttgtttgttcgcaatgttcgtcagtttcccaatgattttcacacaaaaattgctgcggatggagggatactgcggcgaattttgcgttgaagattggggcacaaatgaattgtatcgtgaaatttacggcacccttctgttggtaggcaaaaaagctttaatttataaaaaacaacgctattctggacttttgaaagattgtccaattcttcgtgcctttgctcataattaccatttgttacatcggaatttcggttcggctgaacagagtgagtcgaatcagccaagtgatcagaagactgatcagtcaaaactaacgaatttagaacattttgctacgccgtaaaaagatgggcaattcgtggctgcgccatcgccaatcgatggccgatcggagaaggcaaaggacgaatcggatgttcattctgatgtacgatctcccacagccattaattgatcaatcttttccttttagggtctgtgccttcgttctcaggcaatttcttccccgccccccaaatttagcaaatttttggcaattttttgccgatttcagttggatttggttcattctgttcaaccttttgcgcgacttgggccttctcccttactttatccgagagcaggagtttctgtacgggatcatcactcatgccattgcgatgacttccactgtaaatttcaaattgtcccctttttagccatttgtcccccccccccaatttttgttaagatttggaaccccattctgtacgctttgctcaacttccaacttcgctccgcttttctccgtttggtgcccgaaaatgcgcggaaatttatggcgaagcgaaaattcggacaattggggagcaaatccaaactgacgccgagggatgccaaattggtggccccgactttgctaatggcatccatcggccagcaaaaacaccgccaaacgacgatcgctttaacggccacctctcccctcgtagtgccaacataaaatgcgaaaagaaaggacaaagaaagccaaccgaagaaaagccgacacaaagccaaacaaaacgatggcaaaagccatcgaatggcaaaagaaaaacggaagaagtggcgacgaatggacaaataacaaaacaaaaattaattgccttttgatgttttggccaatggccgaacaaaaccaatcaaattttaatatttattattaatttttattgttttaaagaatttattgaagtcagaataaattcatacattagcagcagtgaaattaaaataacattttgtatttagccgaacttacaaagtgaaaaagactatttcatttagtaattcaaatggataaaactaattgtttattaaaatattaattgcttttgctttcgcttctcaaaatgtcttaaaggtgtcgcgtgcgaagggcggcggcaagtgccaatttgttataggaagaagaacggggagggaaaacagcagcggaaggtgcagcgaaggaagacggagcgngaggcgcagaagcggcgcgttgcgaagcgtacggcggagggggcgcagcgacgggacgcgccgaaacgggcggatggagggcggaggctgaaaa

SEQ ID NO: 65991 - DNA, 92 bp, Heterodera glycines
caagggaatgttattattgtcacagaggtcgactgatggagctgtacggggacaacggtcaaagcgtccaattagaagccgtagtagaccga

SEQ ID NO: 65992 - DNA, 724 bp, Heterodera glycines
atgcctaaaattaaatctaaatgtgaatggatgcgcgagtgagtcaacagtgagtttcactgtcgaaaaccttgagaaatttttgatttacaattacaaaaacaaccgatataatttatgaggaataaaattttttaataaatttagacccctaattttcaagtttttttgtgcatatttggtgcatattttgcgatttttgtgcatatttgatgcatatttggctattttatttgcatatttatgtgcatattctggtcacttttcgtgcatattttttgcagccctgataatgacatcagaatcgaaaaattttaaaatgtgttttttgagcttttttcttcaaaacaattgagcaaaaaaaaataatagttaaagcctaaaaatcgcatccctagtaataaaataatgcttattatttcctatttccaaaaaatattatacatatgtaattcttttagaaaaattttctatcttttcaaaggcaatgaacaaatgccaaaaaagggtggcactgccagcagaattgattttgggaactgtccaaggcaataccattggcaaagtgccacacaatgaaagcaaaactgagaaaaaagtcgaagaaagcgaacggcaaagaaatgctactcgtaactgaattgagaaaacgatcgaaaatgctaacaaaattggtaattgaaaattaaaaatcaaatttaaaaatttcattttaccaaataaa

SEQ ID NO: 65993 - DNA, 721 bp, Heterodera glycines
taattaaatccattccttcgggggaccgtgccgggtgccgcggggtaagcagtgctggttcgtttcatcacggcaccgaaccttttggctagtcagcaatcgttgcttaacttgccagatcggacgggtgcgcatgattccactgttccaagcaccccaccaaaagcaaaacgatatatccaaaatataaggaaaaattttttaaaaaattttttctccatcttcctttttgatactaaagcatcagagtgctaaaattaagttgtaaataaaatttggtgcgctttagagcactttctgaaaaaaatatttatgaaacaaaaaaatcgattttttcaagtgtccatttggggtactcaaacatttatggggagcaaaaatccaacgcagaattaaagtacaggctatagggaagctactccggaaggattcggtctccccataaatctgggcgcatcggttcggggggactgccccgaaaacaaaaaaatcgattttttcaagtgtccgtttggggtactcaaacaattatggggagcaaaaatccaacgcagaattaaagtacaggctatagggaagctattcccgaaggattcggtctccccataaatctgggcgcatcggttcggggggactgccccgaaaacaaaaaaaatcgattttttcaagtgtccgtttggggtactcaaacaattatggggagcaaaaatccaacgcagaa

SEQ ID NO: 65994 - DNA, 851 bp, Heterodera glycines
  unsure (1)..(851): unsure at all n locations
atggcattgctttccgaccgtttcgatgttttggttgacacgcattttgatggaaaaagcgaattgacaatttggaaagcaatcgcaattcgcaaggacaaaggaccaaaaccgaaactgtctgtacagatcgatgacaaatttgtggattttcctctgccggaccattcgctgcccagcaaaattcgctttaaggagcttcggattaagtaaatcaaaaactatacagaaaccaattaatatggttggtcgtcgtcttcattgttcccccttttcagctacattgaccattctgtgctcacatttatccgttcaaacaagccaatttgggacagaagaggcaccaaattggatttggatgtgccttcagacaacccaactgatgtccagccaatttgggatgtttttgtccgtcaaatttggcccatttttgcgacaaacattcgccagttgggcttcgaagatggcaatcatttggacaatttgcttcgtcgcacttcgccgacacttctcactgatcttgatcaattgatttcaatcgattgcggttatctgtgccccgatggaattgctgacgatgggccaaatggaattgctgatcaagcgttgaccaaatggcttcacactccgacaaaaaatgggcaaccgaagcgattgtatcgctataattattttggtccacagaatctcgaatgggtcaacaacttcaaagaggtggcccgccatatttttttattaatctctttgnttggatcaatggcaactcgtacaaaaaaaaatttttctaagaattttcaactaaaacttagtatttttagataaaaaaatctaaaatggattttctagcctag

SEQ ID NO: 65995 - DNA, 364 bp, Heterodera glycines
atgcgtacgttgatcgcctctctcagcaccgacaaattggtcaatttactaaacattgaatacgcgccggaaggcacggacaaacagctgacgccgctgatgctcgccacggtgttgggggacgcgcaaatggcccaaatttttgtgagttaattcaatggcattctccgctgatttatgcactgattcaatgctattgtcagcaaaaaaaaaaattcaaatgttcaaaatttaaaaaaaaatccgttttttatttcagctggagaaaggggccgacccccacagaatgtgcctaaagaaaatcaacaccgatgacaatttaatcagtgaattgagagaggaaggcgaaaaaatggacaaatga

SEQ ID NO: 65996 - DNA, 1563 bp, Heterodera glycines
atggcggcacttcagcaggtaattttgatgtttaaatttgaatgcttccaacttttaatataacacaccgagagtgcaccattttatagtcgttaccatcaatgtcaatttgatttgttcttcaaaatcattttcagttttatccaacaaaatccttttgattttctttgtatgtatcgaaaccttagcatgaggaatgaatgcttttgtctaaaatgaaatttcaaatattcggttttcaactgaattgagtgtcatctttggtctctcattgtcctcgctatctgtgcgatatttctttgacatgtctatcctttagttattttgtttctccattttcgttccttgacctatgctttcatagcggtgcttttggttctctcagttttcctgggcttttccttcggtttgttgtgctgcgactccaaaacatttcgccggataaagccaatgatctgaggacaaacacaagaggaaattgatcaaatgttttcttgttgttttttcatccagctgtccaaaatgaaaatgaaccaattcacacgcccttacgcataggaaatgctctgcttgccatgcccgggtgtgcctctgtcttcatgtgttacggcggttgctctacgcgtcaacgagtgccattaaccccaaatccgcttcaaccgcggcgaccctaccggtatgccaatgccaagcagtggggtccaacaacgaatgcttcttcctctggagcgatctatgaattgcttttgtcggttccaagcactgattgccgcgctagacggcttctcatcaacaattcattgtttttccatttcatcaccggcagtaaaatggcaaaaattggaagcgtcctctgccagttttggtaaaactgttgtcaaacaattctcaattaacgacacaaatcactcattcattcacccccacgaattgtcagacatattctaatcttgatttatcgccttttcataacttattcttcaatttcatttattttcaaaggtttttgagtgctaattgcttagaaaattcgggtttctcattaattattcaagcatcccgatttagaacattgtcgaacaactttttgaaaacgaaggtcacaggggtttccgtgtggttcttccccggatccacagcgactcggcgaggcttcacccgattttcacctctcatcatactctcgcaccttacaccaatccctccgctcaaaatgctcatcggttggtccattaattttcgaatttgatttctcttggtttgacaatcatatgaatagaggaattcttttcatttttaaaatgcatcacaaatttagcgatgaccttagttaaactctgttaacgccgatccaaacccttacaaaatcagtttttattaatcctttgttatgaaatacaaaattgaaatttccagagaattgctttggaaaaagcgatcaaccaggagaagagtccgtttatcactttgatctttttcaatttctacactgcgttttgctaaaaccgcttaaaaatgaaaacaccaaatcttcttcttttgtttgaatataattatattaaa

SEQ ID NO: 65997 - DNA, 610 bp, Heterodera glycines
atgaaggagcagaaaatgaggtaaaaatgtgctgctgcatatattttagaacaaacattgacaatgaaaaagagaaaagaaagagacggggaaaggcgcgacgaaagaataaacgaacgaacgaacgaacgaacgaacgaacttcgttattttgttgtggcagcaatttcgcggtgattgtaatggaaaagggaaaatggcttgaggcaaagtcggaagccccacagggcaattacctgaagaaagacccttagaggacgaagggatgaacggaggaggatgagggaaggccttggaagaagggaagggaaggaaagggatggaagaatgattgatgaagaagggatgggactgaagtgatgatgagcgtagagggaggggggggggcagtggggtggggaaggaaccgaaatggaatacctaactcattttctccatcgggctagtcaaagactaacttttacaatcaaattttaaggcatgtataatttgagtaatatagcaaaaggcatactttttactggtctgaacaaaaaaatgccgaaacacgtcaacagagattgactatctaatttaagatttttactcacttttcttaaaaattaataaa

SEQ ID NO: 65998 - DNA, 872 bp, Heterodera glycines
atgttcaacgatgaccaggcaacatttgtgttcatgaacccggcacacagtcaggagcagttggtggccgagcgggacctggtcaaggaaatgctgcagcaggcgttggttcgacatcgtcagcttgtcaaccaggcatattcattcatttttatatttttttttgggggggggggaattgtcggagccatggacagcaaaatttgtaaatttttggactggtatgtctgaaaattttttataccgcattttgtattcataatttgagaattcgctgaaaaattggtaaatcaaccgagtgatccatggagaaatccactaaaaatttgatagtcatcttaaaggaaaaatcacgaaaatataaattccattgactggggaagagacctaaaaaaaatccaaaatccaactaaattccatggaccagaaaagtgtgactcggttcattatttcgattttgtctggttttcttgggattcaaataggaaatttaccgaaaaatagtagatgaacctaaaataaataaaatttaatccttacgcaatctgttatttatgaaaattatttttccaaattttttttcggagtttaaaaattacgaaagggaatggcaataacaaagaaaaactaagaatttccagcagtgaacccatgacaaattaatggattttttcatggattaaaaaaaaattttttttttgaagatggcccaacagtcggccaagggcggctcggagcgcgagcgggaggccaagcagcaaattctgcaacaaaatgcgcatttgttggacatgtacaagcatttggtggcctccaaactgatcactccgtccgacttttggtccttccattataaaacggtaacaaataaa

SEQ ID NO: 65999 - DNA, 237 bp, Heterodera glycines
atgtcttctgctcgcaacgaacttcaggcaaaagccaccgaaatggcaatgcgcatcaacaatgcgaaggcggtgaaggaggagcgaaagcgcatggcgtcaacaaaaccggaaagcctggtacgacgccgctggaggcttcggtcaagcgggtcaacgacgacatctccggcagaaatttggccaaggctcactcgcctagcccgcaaaagctggcgcgttcgaagaccatgttaa

SEQ ID NO: 66000 - DNA, 548 bp, Heterodera glycines
tatttacatcattccttcgggggaccgtgccgggtgccgcggggtaagcagtgctggttcgtttcatcacggcaccgaaccttttggctagtcagcaatcgttgcttaacttgccagatcggacgggtgcgcatgattccactgttccaagcaccccaccaaaagcaaaacgatataaccaaaatataaggaaaaattttttaaaaaattttttctccatcttcctttttgatactaaagcatcagagtgctaaaattaagttgtaaataaaatttggtgcgctttagagcactttctgaaaaaaatatttatgaaacaaaaaaatcgattttttcaagtgtccgtttggggtactcaatcatttatggggagcaaaaatccaacgcagaattaaagtacaggctatagggaagctattcccgaaggaattcggtctccccataaaatctgggcgcatcggtgcggggggactgccccgaaaacaaaaaaatcgatttttttctagtgtccgtttggggtactcaaacaattatggggagcaaaaatc

SEQ ID NO: 66001 - DNA, 768 bp, Heterodera glycines
atggaaccccgaaaacgatcctctaacttttccattgatcatattctctccgcgcccaaaaagccccgtcaaggcttcctgatcaatgaactcttgggtgtcgtacacttccttggatcggtgcagcaaggcgaaggaacatcaaaagaggcaaaggactacgttaaaaaattggacaacagcatcgagcacatggccaaattccactacgtcaaagtcaagtcaaagttcaccattacggatttgccgagcacacctgaggcactgttggctgggattttccaacactgcatcgacgaagcaattgttgaaagccgtgagcgcaacatcgaacctacacacctcggctgtatgatcagcagtcctatgttggaaggcggagatatcccaatcccgatacgacaaatgacaaacaacactctcgacaccattctcaaccagttcaaaaaagtggcgcagtccaaacaacagaaaaatgtatcgttatggggtgagccgtttaccgtcaccatcacgactctcgaccgtaatggactaccatccaaacgtcgtgtcaaagggggagctcgtcgccctgtcaaaacggccgttcaccaccgaattaatgaccaatgcctgattaaaattcgtaataacgacaaccacttctgccttttctacgcgctgcaggcaacaatggtcgacaaaacatgcaattggacacgatggaagtttttggactacttgcacgacagacacgaaaagcagggacaactccatcatgatact

SEQ ID NO: 66002 - DNA, 141 bp, Heterodera glycines
atggctacggaaataatggcactttttggcttaacggattcggcctggttggacagtcggcatttcacgaggcgatgttgtcggatcggcgttaatttgttcacttgtcggatgattttcacaaaactggacagcgaatgg

SEQ ID NO: 66003 - DNA, 1962 bp, Heterodera glycines
atgttttatgctcgccattttgtctctcttgtgctcattttggcattgtccatcgatggtgtgaacggtggaccaaaaagagagaaaggtaacgaacggggttaattatgatttgaaaataaaagggatttgaatatattcctttgagttttttctttttaaaatcaaaggtaagaaaccgacgtctcaaacaatttttcattgcaacgaggctaattacagagaaacagtccaacaacttaccggtgggttttataaataagccatcaatttaaaatttcatttaattaattgttaagtatatgaaatttggtacaatgtcaaaaggacgaacaattaattgtcaattgtataaaaaataaataatagttttttgcacttttaagtttttttttaatatgtttgaagtttaaaggaagggttccattaggccgggaggagaaaaggcaaatcaatgaatgggaatttaaattaatagaatttcaatttgaaagatatttgagttggagaatcgaaatttctcgagattgagactcttctgactgttgtacataaattagaaacttttaattgcgttttggaggaaaatgagggcaaaattaaattttgatttaaattgagtaaaaatttttcaggaagaaccggaaacagtagcattggatcatccaatttatcagccaatccgtttcactatggccaacagcctacggataacaggcagtctatgccatcatcaggtaaagcaataaattagaattaaatttgaatgacatttgagtctcgggattgggacggattggcgtggatttgtggaaggaattgagaagatgtatgaaaagatttgacaggaaacgcacattttcaagaaattttctttttcttactgtaaattttctgaaacacaaaagactcattaatttttgagtaataaaatatgagcactttatatccgacaaatttattatattaattattgttttaggttcatattggcgagacttgatcagccaagtcgaaggatctgcagcaggaaacgcgttcaattcatcatcaaatttcgccgcaccacagccaccaacaggtaaaaagcaatgaatttaatattaaagtcggtggcacttcgtcgctttggcgatttttaaaaatgcccaaattttggcaaaaatttaaaaaagataatatgaattttatgtgttatggctgctgcactatttcaggccaatcgtctgtatccttcaattcattgccaaattctgccttcatttcgtttaactccaacaattcacaatcatcacaacaaggtgaacagagttggaacattggaaataaatataattctaaaataagtgaatttaacaatcattcgaaatttaatttttgtgtgttacacttttataattttcctattaataattcaaaatgagcaaccatggggtcatttcttcaaaatttattattattaactaataattattaattatgattaaggtggaaatcagcaagacgaagtgttggatgttgagccaataaacaccttttatccatccgccggtggccatggctttgctcaaggccgttcttcaaaaggatctaaaagaaaaggaggaagacattgagaaaccatcggacgctaaacggaggaggaaaaagaaagtttcgggaattggcatttgacaatttggcattttccatttggctttttttctgtgatttggcattttggtaaatttgcttttgctggattcggttattttaggttatttaaccaagagatcttggagtggctaacaatacgacatccatttgctacaattatgattaatgttagaaaattgcgctgaaaatcattcacactaaccacactaatttacgccttggttagattggcgccgttttgtcgccaaaaatttcttaaattcctcttcagattttaacatgacaattcgagagaatctgaataaa

SEQ ID NO: 66004 - DNA, 723 bp, Heterodera glycines
atgtgtgcccgtgttgggtgagttggacttgcgtttacaaaaagcgcaaaatttgaaaatgccaaaaatggtcatggaaagggttgtgtcttgccgactgagttccggcaatttttttaacggagcaaaatgaaatttttgaaaattttatatcatttaaaaatcgttgaatattaagaagctattattataaattattggttaattgattaaacaattttaaaaattattgtacaacttttctagctcagtaacatccaatttgaaccatttcattttaataagtgttattggattagctgattggaatgttaagtgatttgttggatttgatttaatttaaaaacacgtcatcattggacgaaccaaaaatccgatttgtaggcttaacccattattttctcgattaatttaatttctaaatttctggctttatgattgcattttatcaaaaattaaatgacatttcagaaagaaatccgatcactggcgaggtgaagatgccgaagaaaatcacaatgtgattgagtttttgacagcaaattccaaggatatgattttaaggaaatccgtccgccatttctatgctttttgatcgcttccattaattatataattaccaattttcatttgccattaacaaacaaatccatcttctgtctgtctaaatcgaaacttgtaatacaaaaaaaatcatattgtgaaaaatgccattttaataaa

SEQ ID NO: 66005 - DNA, 652 bp, Heterodera glycines
atgcgcacccgtccgatctggcaagttaagcaacgattgctgactagccaaaaggttcggtgccgtgatgaaacgaaccagcactgcttaccccgcggcacccggcacggtcccccgaaggaatggatttaattaaattctctccttcggggatttttttccattaggtcgtccgttagcgttcgattgctctagtcaatttttcaaaatttttgttgaaatatttgtcgtgctctgaagggcgtgggaggggggggggcgaaggcccaccacgaggccgcgaagaggccgagtgagtaccttcggtgcaggaaaattattaaattttttaattgctttttaaatatgccaaaaaatgtaggcttaacttttttagtgaaaattcgatcactcatattttttgctaattgagcagaagcgtaccaaactttgcagggatactccccggtaaaggactaacttacactgaaatgagcgccgagctagctggctcaaaaaaatttttcgaaaatctgagtctttcgtttttatttatttgcaaaattaattcataaatattttttcagaaagggttctgaaacgcaccaaattttatttacatgttagtttaggcactctgatgctttttctatcaataatggaggtgaataaa

SEQ ID NO: 66006 - DNA, 310 bp, Heterodera glycines
atgtcaaacaatccgctgcagcctaccacgagtttgactgacacaaacgaattacatctgctcgaaatgctgacatttgaggaggaagaggaggaggcaagccagggaagaataattgcttcggcaagccaaaacgaagatcaaactaggaatctttctagggaaacttgtactaatgaattcggtgtaaaatcagttgcttcggcaagcaaaatagaaggggaatgcacgggtcttatggaaggaaacggggcaggaaacagtgaaacaaataaaaatataaatgaaaatattgcttcggcaagccaaa

SEQ ID NO: 66007 - DNA, 155 bp, Heterodera glycines
gaattggaggattgtctagagggcccagcacagtatttcaacgacataagccgaagaagcagcagcagaagcgccaacgacgacgacgagcaggacgaggaaatggcaaaaatgcgggcactgaacgaagtgtgccggcaaagggcggaggcgca

SEQ ID NO: 66008 - DNA, 564 bp, Heterodera glycines
atgatcaatttatggaaactttttggcaccggatttcgatttacggaaatttcggggcctcggattccaatgatcaatttatggaaactttttggctccggatttcgatttacggaaattttggggacttcggattccaatgatcaatttatggaaatttttggcaccagatttcgattaacggaaattttggggccgcggattccaatgatcaatttatggaaaatttttggaacaggatttcgatttacggaaatttgggggcctgggattccaatgatcaatttatggaaaatttttggaacaggatttagatttacggaaattttggggcctcggattccaatgaacaatttatggaaatttttggcaccagatttcgatttacggaaatttgggggcctcggattccaattacaatttatggaaaatttttggaacgggatttcgatttacggaaatttgggggcctcggattccaattacaatttatggaaaatttttggaacaggatttcgatttacggaaattttggggcctcggattccaatgatcaatttatag

SEQ ID NO: 66009 - DNA, 454 bp, Heterodera glycines
atgattttgaaaaaagaaaagaaaacaaaaagccataaagaaaacgaagaagaagaggaagaagaagaagaggaagaaagtagcagcagtagcagtagtaatgaagtttctgatcagcagagtaacgacggtaaactttcaaaaataaaatatatttataaataaaaagggagtgatgcgcaaagcgggcctaatgagtatggccaactgcgtctgaacaaccttaagcagtgccataacaagtgctacgatttatagttgctaaaaactgccaaaatacttagttaatttttagtttcaaaaaataaccccaaaatagatgctaaaaatgggaaaatagttgctaaaaacattcaaattttggggtataatatcgtaaaattttatcaaaaaagggtacaaaattaagtcaaaccagtattgagataaataatcacaaattcttgtcaataaa

SEQ ID NO: 66010 - DNA, 332 bp, Heterodera glycines
atgaccactaactttctcattgtccttcaaactcttgactcaaaatcttcaaataaaggtgcccagacatcaattctgtccgagagttgtgctcgacgctgtgacattttgaaatacgtggaccgccgttaccgagtgcaggcccatgggattggcgggtcgcaaaagatggtagggaggtatgttaacggtccctgaacatcccaaagggagtaagaatattaatggttgggtagttttccagaatcttcgcctgtcaagtgcaggtcgatgacaatgtttttgcgtgtccctttgaagtgatgagcgacagagacgtcgacattttgtga

SEQ ID NO: 66011 - DNA, 2526 bp, Heterodera glycines
  unsure (1)..(2526): unsure at all n locations
atgagtgtaatgcctaataacgaccagcagaagcagaatttggacaccaaaacatctcaggtgaagaggacatttagtgatttaaacaacaccttatttatgggtgtaaagtctgttggccagggatagggagacctgaaaacaatgacgttcaaaaactcgaagtgatagaaaagtgatttaaaaaaaacaaattttaggaaaacggccaattgtcagattcacacgaaacggcagttataaaagcgccgagtggagggaacagaaaagtgccaaagaactgctggaagaaggttaacattgacttggagtacaacacgagcagagaaatttcgaggaggcgacagttggcatggcgtggcgaaagacgcggcggcgaaacgtacggacggagggatcagccgaaagagcagaggaagggaagcgcaagagtggcggaagaaagcagcgccaggaaagacgaagcagccgaaaagagggacagaaacgaggcacaaaaagagacggcaggggaagcggaagacggacgagcggagggaggaggagacgaagagacggcacggaagaggacgacggccccgacaggcggcacaaagacgaagaacggaccgaatgaggacggggcggagacaggcacggaccaacaacagcaacagtcgagggactactggtaatggcagacggggaaacggcacggcatttggagggggggggggtgaaatctgaaatatgccatgggagacacggcaatggtagaaaattgaatattataagagcatttgtgcacttctcatccatttcgcatttattctttaaagttatttgacttattctgttattttatctgtttcccatgtgcgtcttcataaaggctggtgatttttattttcactgatcattggtctgctcactgatagataatcattcatttgattggtgaactcttaaagggattaggccagctctattaaatgtcatccataggtcttttttaaacctggaatgtcaaataagaaattccctgtaattcatttacgtaataaattcccataaaacatttcgtttttgaccagagagatccaaaatgccctttgcaattttatttttctcatttcgtttcattgggtttctctgctccttcagttcatgtttttgtttatgatcggacttcgcttacaatttgagactaaatccgattcttcatttgtttacattacatcttgtcctcaagaatttaatcatacctgctaaatcagaaacaaaatgcaatgtaatgagaatatttcctaattttgacaatcctcactcgtattccttctgttcctaaaaagggacggagagcagaaaagaatcccttcccagaatgggatgtaaaatccaacgattcacaaaattcactgattcatttcttccttataaaaataaatgttatgtatttttgccttgtattatttactgatctttttgcactgtcaaattgtttatttgtcatttagtgcctcaccactccctcacttcactgtttttatgcttttacagtttcacctccttagaaaggatttatcatcgcaattcctttcccattcgctgccttttctctagtgtcctactattttcatttccttttttctttcccttgctctttcatcccctttctctgtttctcttttatgagtgcctttccacaattcgttctccactgttgtgtaataataaccacatctgtcccaccctcttttagggtctgttggtcaaaatttacttatacctatttaattttgcattgcttttctcattttttctaaatgctgattgtgattgaatatgggcggtcggggtggcaatgattttgattttgctgctgatcagagtgttttgtcttgtctgtattgatatgttatgatttgatttgctgtttcgcacctctcttaagcaccagcggtgctcccaaaataaataaatacacaaaaatttcaatttattttccaatcttttctctctttcccttctcataaactcgtccatttcttatttattccatccgttttactctcacacatttcttttccattttttcattccaacgttagtcttctcccaacatttacactttctgtccatccgtcgctctttcttttccttcgttcttttgcttttctgtttcttttcccattctttaccattgacacttcgtcctctcttccgtcctctcctctttttcgcgtgtgttcacagttactcctccaacaaccagacaattcattatgcactgtgccgctccactccttcctccccctctaaaatgccttaccacgccttcccttttagaaaacacaattaaataacaattcattgtttcattgacttaatagaaaaaaaaacaacaacaaaagtcggctaatgtctaaattttttttataggtactntgatgaaatgtccaacggatattattaccaacactcgggatcgcatggatggaaaaagacgggcacggaccaaccacaacaacagcccagggactattg

SEQ ID NO: 66012 - DNA, 647 bp, Heterodera glycines
cggcgggtcagactccgttggcgagtcagtgccatccgccgcaaattccgcgccgaaactcatttcaattgatcacaatcagaaatattgttgagggactgcgcaatgcatcagagcctatttcaacctcacaggaaaagctgagcagatatccgtgcgaagatgaagcaaaggtggacacaagggaagaagtaatcggtggtcggggagagagggaaggggtaaggggaagagagtgatcggagagagagagggaagggggagagactgatcggatgggagagggtagaaagggaagagagtgatcgaatgggcgagaatggtgtagaaggggtaaggaatgagagaggaaagggaagtaacgcggtaaaataatgatcggagatagagggaaaggaaagagagtgagcgggtgatcggataggcgcgaatggggtagagggggtaatggattaatctgagggtgtagtaatgtggggaaaaaagtgatcggtcagagaggcaaggggtaagggggaagagagtgatcggagagagaacgtgaaaattttattcccgaagggggctgacactaatgccgtgactgccattgcctaatgattggctaaccaaattcgtcacttcagacactgctttgctgtgcactg

SEQ ID NO: 66013 - DNA, 63 bp, Heterodera glycines
tctctattaatcccgcagtctctaattatcccccagtctacgaggtgttttaaaaaataatcc

SEQ ID NO: 66014 - DNA, 728 bp, Heterodera glycines
catttcaatcactggcactcaacccaccagcatttcaatcactgggactcaacccaccaacatttcaatcactggtactcaacccaacagcattccaatcactgggactaaacccaccagcatttcaatcactggcactcaacccaccagcatttcaatcactgggactcaattctgcatttcaatcactgggactcaacccacctgcatttcaatcactgggactcaacccaccagcatttcaatcactgggactcaatccaccaacatttcaatcactggtactcaacccaacagcattccaatcactgggactaaacccaacagcattccaatcactgggactcaattctcctgcatttcaatcactggaacccaaatcattccaatcactggcactcaacccaccagcatttcaatcactgggactcaacccaccaacatttcaatcactgggactcaacccaacagcatttcaatcactgggactaaacccaacagcattccaatcactgggactcaacccacctgcatttcaatcactgggactcaacccaccagcatttcaatcactggcactcaacccaccagcatttcaatcactggcactcaacccaccagcattccaatcactgggactaaacccactagcatttcaatcactgggactcaacccaccagcatttcaatcactgggactcaacccaccagcatttcaatcactgtga

SEQ ID NO: 66015 - DNA, 1369 bp, Heterodera glycines
atggttcttcactcggtaagaattaacggttgaaagttgttcttaaaatatctcgcactaatgggttgtgcctctcctaaattatagcacagcaatttttttaatttataatattgtttagtaagtatcttcaatttttactcggtctcgaaatttccactctcgagcggactttccgtttaaaattaaaaaaagcctggcatcatgcaaaagcccaagtgttatttattagcctacaattttttttagaaaagctgaggctagaaaacatgattccaaaaaacccttataaggatatcaggaaatgtaaaaatttggtgcttcaaaatttcttttttttgtccataagcgtcccaaggtgaggtgaatttacgaaatgtcccggcacggattgtgccattggcgctgtgtcataatttttctgctgaattttcctccgatcactttttttccagcaactccgtggcgtacacattgcgaaattggcgtggcccccgaggggtgtccagtcgccctatctgagcaaagcaatggccgcgatcgaagagaaccgcagtctgtcgctgtatgcgttggcggtcggcaccgcacttgcggccgccctttggttcggtcgcggccgaacgtctccgcccccgggcaaccgtttcctggcggagcccagcgcggacagtctgctcacctgactgatcagtgatcaccagggccgttgggggactgatcggagtgcggaatcgttcattttgatcacttcttttgatcattttgttgtgatcgacgaacgcaataattgatggatgctttaacaacctttgtttataattttctcagtaaagaattttaacatatttttgtttgaatatatttagggttggtaggggccggaagagtcccaaaatgccggccgatggaagaagccgactttgtgagcgaggaatgagcccaacaacggcgggagcccgtaaccgtcacccgtttttaaattccaaaatagcttttttggatttgagaatacaaggaaatatatttcttaagaattacataatttcattttttcgctttcattcatgaaggctatgtgttgaatccccttttgacaaaatcatttatttaatttaatgatcaattttcacttatttattttgtacaacttttcttctctctccaccgatttcctctcccatcctaaccaatcgttacactttactgtaaacccaagccaagccaatttgtgtccatcccagctcactctcgactccaccccttttctcttttgctatttaaactgaattcattccttgcattattacccttttttttactcactttgactcattcccattttacttgcctttctcacttttgctaa

SEQ ID NO: 66016 - DNA, 534 bp, Heterodera glycines
gcgaatctcaaggagcttacgcagctgttttccgcatttggtgaactcaacttcatccgattaccaaaaaaggtaaattcagcaaaataaaagggaaggcaaaagtgagaatttttggtttcggagaattattatgtgcctttttggactgtggcacaattggctagaaaccaaatattttggaatatccaaggcatacacttggatatttttaaatctaaatattttacaatattatttttattcagcctggctccgaaggccaccgcggcttttgtttcgccgaatttctctccgtgagcgacgcgcaccgcgccatggacgcgctggtgcattccacgcatttgtacggtcgacggttggtgttggagtgggccaaaccgagcgaagaaagcgcggaggagaagcgacagcgaacgcaggacagaatggcaatggccgcgggcgttgccggggcgaagaaaaggccgaagatgcgatcattttagagccagtttcaagaattggcactttttaaccgttaattacattaaa

SEQ ID NO: 66017 - DNA, 56 bp, Heterodera glycines
gctatagtgaagctattccggaaggattcggtctccccataaatctgggcgcatcg

SEQ ID NO: 66018 - DNA, 230 bp, Heterodera glycines
atgcattctttcaagctttttgcatcgctctttcttgtactttgtgtggtaggttttaaattttttaaaaataattttttcccattttattgaattatcttttgttttttaggtttcacttgtcatctgccaggacaagccagcagcagtaaaacgggggcatcttcttaattagaacaattagttaacctaaagaaaaaccaaaaacactgatcaaaaacaaaaataaa

SEQ ID NO: 66019 - DNA, 1237 bp, Heterodera glycines
  unsure (1)..(1237): unsure at all n locations
atgaaattttccattaactcatttgcaaaagttgaaaatgtaacattaaatttttttaaattttataattttaattattgactattgaatgctgccacgataaaatttgttgtcatatgccaaaatataattttaaaaaaataaaaataacaaaaacattatttaaaccaccagtaaaaatgctcaattatttaataaacaataaattaagggttttaattgtctgcaattaaattttaaaaaatttaaaatttactccagtggctgcattatcatgttgtctttgtttgcagcttctcccattttattgaccattggacaaagactgaaaatggacaccaaattttatgaagaaaaaaaaaattggaatttttgtgccaatattcattaagaataaaagtgtggcattttaaattaaatccaaatttaccgctccatcaacaaagcattgtacgcaaagctgcctttaccatctttcaatttcacgtccaattgtctaaacaaatggaaaaagttgtggagaaatttttttgaaaataataagcaattttttttcgattacaaaaaaaatgtatttttaattgtaaacatcaacactttgtgaaaaattgtgatcaatttgctaggtcaagaaaacccgagattgggcgcccagcagtactgacttttcaacgtacaattagactgtgatttagacgatttaaaattgggcatgaattttcatttaaaaaatcgtgtcagtgaaagtcagaaaaaaaatattcatttcgttttaagtttgataaaaaaaagtttatggccaaaaaatgcagaaaaaatttttggtcctaaaattggttccacaaatgaattttttctttcataaataaattgtcaaaaaggggagcccacttgtattggtgccaataagcgtcacaatcggtcgtgggaaggaaaccctaaaagaaaatagaaatcaaattaaattaattttaatttattttcaggttacagctttgacgtatcgaatgatcgaaatgtntcacgttggagttcctttccgctggggttctcacacgagatgcatccgtccagcaacagcagcaccatgtctgacgaacgagcgagggaacgcggagcattaagcattttttattcgggtttaaggcccccccccccctcccataattacggggattacgggttttcatgctgggtgatttcgtgcaagctgtcattttattattttttcaataaa

SEQ ID NO: 66020 - DNA, 571 bp, Heterodera glycines
atggataccagattcgtggtaagtgcccccgaaaacgcaaggaacttgtttttatgacaataaaattttcactgacgcattttccactgacgcattttccactgacgcattttccgggcgcctttttgactcccaaaatttctaatgtaccacttttcctttttaaaaaaaaatctctcctcatacatttttttagcaatgctttaatttattttttcaattaaaaataatgctttcaaaacaaaagcagttttttaatttttcctagtttttagataagtttttgagctatttggttttttgggggagggtctatttttggcgtttttgatctaaattcttctcattttttttaaaattacatttcaacaaaatttattttggagaaatttttattacatttaataaaaaaaagaattggtcggcataaataaagtcaacaaactaactttgtcgaaaaattttcaaaaatattaatatttaagttttttcccgatttcagatcagactccaccttccgaccatcgacaaatttgagaaaaactttatgattaatgaccatgtcatgcag

SEQ ID NO: 66021 - DNA, 1770 bp, Heterodera glycines
atgattaaaaaaaacttgtccttgactgttttcaaacatgataaaaaaaattttaaattttgcttcgaaacaaaaaagctcaagggctatcgaatacagtacgagttggcctagtacttgtacgagtttgccttctttgttcgagcccataacctttttagctcaatttacgccgaccaactcaatggggcactgcccgaacttgtcaagctgtactttaatgatgccccaccgaacactaatcgacgcacgttgaccatgcaaatgtgtgtggtgacgaattgcgagccgaagaattgttgtaaattgaccgtttgttatgtgggacaaatgaatcccgccaatgggccgctcaattctcgatttgaattggaaaattttgaaaagagtgaaattgcggaaaaatgccgcaaggcacaaaagaaatcttggccccaatttggtgacaaagttcttcatggatttgaactttcttattattacgtgaacaaatcgttgatggtctccacttcgtttaacccgataaggtgattgtcgagattaatttcaatagttaattgacagagattagtagtgtaacaccaccgttaattatccatgacgagtaataattttttttgcctcagcaattccaaaaataaatagaatttttgtaattaaagaattcgtagttaattgtaattttgttcctaaacgttataaggcaaaaaaaaataggttttttttggatacatcactttctacaatatttttcaaatgtaactgtcggatatgtgtcagatttttcgcatccgaagatttaagccttattttggtttttttttttaaaaaaaaattgacggcaagtgtacggaccgtgaaaattcctttatccaaatttggttgtgcttaagtcaatactttgcattcaacgaaagcaatgtcacaaaatgcatcgatgtgattcttggcgagaatggatatttggatggatatgttcaaggcgagcgaaaacagttgcacgagacatacaaagtgaggcaaatgcacaccgcactgctgagcatggagaatggcatcaccgcattggcatacgactttttggccggcattccccaggggggcgcgttcggcatcatcggagacggcggcgcagtgggcgcagcttcatggattactttggcaagcgtattttaagaataatttaatgttattaatttccggtttatgtcgcattttatggagctgaaggatctaattctcttaaaaagagttgccagtccataatactcaatggttgtggttgtgttaattttaaaaaatttatagaataatactaacttttttttcctaacaatttgttatttttttggaaatatttcgacttggcgctatcggcacgaagacccgctcccccattatttttttgaaaaagtacggcaaaaaaaaacacattttcgagttaatagatgacaattacaaaaaaattttgattattaaatttttatttgcataactatttataattgagttttaacttaaaaatcgattaaaatttgttttgttttttttgcgattttaaagttttaataacaaacttgaaaacattggtccgatcaattcaaaattgctgatcactgtttagggttcttttttgtcccaatttactcaaaaaataaatgaaaaacttttttagaagggcgatgggctgtacaaatgcaagggcaaacagtgcaaggacagcatgccaaaataaatgaacggaactctttaaaagtctaattgaataaa

SEQ ID NO: 66022 - DNA, 49 bp, Heterodera glycines
ggaagctattccggaaggattcggtctccccattaatctgggcgcatcg

SEQ ID NO: 66023 - DNA, 778 bp, Heterodera glycines
atggacgcaattcttgcaaccgattggctccacaatgcgttcccagagcgaaagacaacaacaacaacaacaacaatttctagtgtggaagaagaattagacgatgccgtcaaagcagtgagttttacacaaaaataaatttaaaaaaataaaataaatgaataaataaaatcaaggaagagcaaatcagttggcttaaaattatcgaagaggaggaggagcgaggaaatgaattgcaaactggtgaaatggaagtggaacgagcgaaaggtttggttgtttacaagaaaaaaatgaaaaaaaatttagagattgagccgccaaagcgacaacacttacagtccaagtgtagctgtaacgaaaagcaaaagagtgtcccgctgattgactttctctgccaacactacaaatgttctgttaaagagcttcacgttctgcttcagacgctgaacaaacgtcgcgaaatttcggaaatgttgcgctctcagcttcagttacgcaccaatcatctgcgtcctgcctggaaaaattttcgcgtccattgcaacgaactgacaattcatcctgctcaaactgcatatgccatgcgcggttatcttggcattacggttttttaatttaaatttatcagctcctcaattgtatagatatacattgtttttaggtccgtatttactactatgtgaagcatggcgtaaagctcgtttatcctcagcttccctgtgttcttcaatttggcggtggtgccattgttctctgtttccgcttgagtgtctga

SEQ ID NO: 66024 - DNA, 1667 bp, Heterodera glycines
atgcgtcatgcaatgcgaatgtttctcgtcccggaggacgtctttcagtcggtatttgttcaacaccacacaacagcagcagcagcagcagacggtgccgacggcacaccaattgggcttttgcgctcgcgcatccaacaaattgagcgcagcagggagctgaacgaagagcagaaggccgcgcaataccatcaggaattcaaacggctcaacaaactggtgcgcgagcaggaggagcagccgatcaatgttcgacttcagcacgaaaaggagagagaaaaaaattcagcaacgccgctgccgccgccgcaaacgatcaatcattcaacgccaaaaagattggagaaaaacattgtaccatcagcgtttgggttgaggaggcaaagacaccactacacacaaaaggctggggcattatcaaatcgcagacctgcccaaaaacaacaaagaaaagcagcagcagcagaaacaccaaacagcagtggaaatggagaaacggaaaaagaagaggggaatggagatgatggggaacagtgggacgacgcacaatcatcatcgtccacggcgtcaacaggtggtgccgcagcaaaaagagtgctcagagcaagagatggggaagcaggaaaaggaggaggagaaacggctgatcgccttcaaacaaaacacaactaccaaatgaccaaaaatgcactgatcacacatattcgaaaaaaggggcacagtctgggagtcagtgatcagggaaaggttttgcgcgcagatgggtccgagtttaaaacgagcaacgtggaggcaattgtcagccatttgttgaacagggacaagcgaagcgaattcaaaaggccgcctgtgggctataaggaatttgctgataaggctagagaggatccgttgctaaaaaagtatttgtttccggaacagcctctacaatttggcaaaggcctgactgactttaggcatggaaaaagacataaaaagaagtgcgaagggggaggagggaaaagtgtcttcaggttcaaaccgacactatggtgatagaccgaaagaaagaacagctgttggaccaactgtacaaagatgttaactcatcggtcagctttaccagcgttgagccgcttttgcgcgaggcgaaaaaggtgaacaatcaaatgagtagaaaggatgtagtggactatttggccacccaacgcacatacaccattcatagacaagcgaagaggcgctacaaacaactatcaacactcgcttctggactgcacaccgaatggcaagcagacctgtctgtctttgacaaattgtcgcgagagaatcacggctacaagtaccttcttgtctgcatcgacacattgagcagacagctctttgttgagccggtgaaaagcaaaaagagctccgacatggttgctgcttttgaacgcttgtttaaacgctccaaatacataccatggacattgttgaccgaccaagggctcgaatttaaggcaaaagaggttcaggaatatttcaaaagtaaaaacgtgaaaaactttttcatgtacacctcaccgcgaattcacgcagggatggcagaacgggccaaccgaaccatcaaagagcgactttatcgctatttcacggaacggggtacccaaaaatgggttgatgtgatacagcaaattgtgcatgga

SEQ ID NO: 66025 - DNA, 1604 bp, Heterodera glycines
atggagagccacacaacgcacaaactgccatctacgtatacagatgagcagttacttgctgagcagttacttgcgttcatagatctcaaatttggtaatttaagcagcttagagcaaaaataaaatgtttttaaggtggaataggtaacgaaattgctcatcatggaaacgagcaaggtgggaaaggtgatatgcgttcgattcgatctgcggcatacacatatgtaagttaccttttttgctctcactaaattattttctatataatttaaaattaataaaattaattatttaaaaaatttatataattgcgtcttctacctcgaaaaatttctgatttatcttctcgaaattttggtgtttcgaaaagcgaaatattggcaggccaaatgtcaattaactttcgataaaataaaaatttactttaggctcatatgccacaggatccagctttatttatctattttattttatcgcaaaatttatttatttttggtgcggtatctcgaatcgagcgtcgcccgaatcgccaaccaccgaaaaatttaaaattctgagtttttaatttttaatttaatcttatttactttttcatttaatttgagcagaaccctatctttagaatataaattcataatttttgaatttcttaggtggtgaagcagatatttggacttaaaaaaacgggactgtttgctcttccgactgtacttagcaccgatgttgagagccaaatgcaaaaaatcattacagaaagaaaatgtgcagtggttgctcgacttcaacaaccagaaatcaaagacaaaaccgagcaggtaataatttgtttattttgcgtgtggttaaaaacaaaaattttatttggtaaaatgaggcttctctaaaattgtgatcgccacgaggcgccatttagaaacaattcacatttgttctaaaatttttcttgtatcacaaaaataatgaatctaaaatgtaaatgtatccgttcaactctagctaaattttttgggctaggtctgtgcttaggctttattttgaaaatttataggcgctattgaacttcaaaattaaaaaaaattcaaactattccggttaatgattttattcaatattcagtgaattttaattattttattcgaaatccaacaaattttcagaaaaatgtattggcctttaaaagcttctgtaaaggtccatttttccatattttcgattcggttcaaaatcttgtttaaatgcaataatatatgattcgctaaacgctttctaaatattaattaattttttaatctctttagagttgaaaaaagataaatttttgattatagactccttgaaggaattgatttgactgaaaccactgatgaggactcgtcacaagaggtccgagtttaagtatataatcatatttctattaaatcacaggacgctaattaccatgaagaaataacctacgtgtttggactctgcgacaattatcaggtcaggttagagcaagcatgtaaaagttgcgtgaccggaaattgcgttagtggaaaatgcgtcagtgggaaatgcgtcagtagaaagaaaatgcgtcagtggtacaaattttttgaaataaa

SEQ ID NO: 66026 - DNA, 135 bp, Heterodera glycines
ggaactgctggcggtaacaatgcgaaagggccggctggtggcggagtccaactcggcgatttgttgcaacacccggaaatgcttcgtcagttggttggtcaagtgccggttgatagcagtgaggcgacaacgaag

SEQ ID NO: 66027 - DNA, 1144 bp, Heterodera glycines; identical to SEQ ID NO: 36808

SEQ ID NO: 66028 - DNA, 365 bp, Heterodera glycines
atggttaaaaaagctgaaaacaatttgaaaaaatttacaaacgaatgggatgaaatggtcaaaaaagcgatgttagaaggaaatttaaaattgaataaaatggtaaacataattattaatgagcccagcgaattaatgcagaaattgcatttcaaagagttgcaaaaatattttgaaaatgaattaaaaaatgatgaaaattttgcagaaatattggaaggtgattattaaaattaaatttattaataaatttattgaaaaattacaaatattttagatttgcataaaaataaaagcaatgagagagaaaatttattaaatttgttaatgaaaaatgacgcagaaaagtttatacttcaaataaa

SEQ ID NO: 66029 - DNA, 143 bp, Heterodera glycines
atgcccccgtccgctgatgggcacaggtcgttcgagatgacttgtggacgctgcccaacattacggggcagctgcctcacgagccatgcttttggggtgcttccatacgttggagctgtggtataccgctcagtgctgcacat

SEQ ID NO: 66030 - DNA, 440 bp, Heterodera glycines
atgtgcaaacgcatactgatccagccaaatgtttggcaatttgccgctgttttcacaatgaatccacgaacattggcagggattagaaaaaagactgaactcttgtttggaatacttgacaacaggtagataattgttggcaaaatctaaaaggcaaaatttggaaattttttcggaaatttcctcgctttttattgcacatattttggtgtttcccgccgttgtaccgttcatgcgcgaaaaccgcaaaaaaggatatttcgctaaaaccgcaaaaattttaattattaatttatttaaaatgttattaagtaaattaattgaataaaattatttattaatttattaaagtaaattcctgatgacatttgcggaccgacttttgcggaccgacttttgcggaccattatttctgggttgaactgtctaaaaaaacaaaa

SEQ ID NO: 66031 - DNA, 839 bp, Heterodera glycines
atgaacgactgcttatcattcattattcgttgcaattcttatcaaatcctgagattgtttttcattaaattaaacagacaaatatctcgtgagtagatttcatcgtaaacaaaatttgggcatttaaatatatgttttaattttatcataaaattcttgaataatcttgggatttctaattgattttgttggggatctcatcaagggattggcggaaaaaggttaaagaaatttttaacttaaaaaactgagtacttaagagaatcgtgagctcttaatggatttctttcctatccacgtttttgtggatgataaagaaatcagtgtccatcttgacgaattcaaagtcgatatcttattccccaaaattgctgctttgtttgaatcgcctgcggcttcttttgaccaaatttgtttttatggttaataaattaaataattattatctttttttatttatttttgttaggtgttgatgggtcgccaaaacgaattcagaaagaagaaaagcaacttgcactgttgcttttgtatgcatcacacaactttggcaaattgaaattgtttaaatgcgatgactgacttatcgtagaatattttgatattaatcccttatatatttggatatattttattttttaaacttactcgtatatttttggttatttttattttttaaaatcaattatttgtttcacttaaattgtagttcatattgttaaatttatttttttaattcactaaattatccgcaaatgtcgatccgcaaatgtcggctaaccatttaattcaatcaattttgatctatgatcacttgaaaatgtccacttttgaagtaa

SEQ ID NO: 66032 - DNA, 332 bp, Heterodera glycines
atgtgtgtaaaattcatcgataggtttctcgacaaacaacgtgagaaatctcgggctgtaacacatttgctcaaatgataaaaatattataatgttattcatagagcagaatttgctctttcagatatgattgaaactattaaattttttattaaaaaatttatgtcgcttgttcaaaattcatagatttttgagcacccatgaagtcaaactcgcaaaaaaaattactcataagaaattctttttcgtggcataaagccgcagttcaaatggtaggtcgttattcctagagaatgactaaaatatggggtatgactcttatcataaataaa

SEQ ID NO: 66033 - DNA, 465 bp, Heterodera glycines
atgccggaccaaatgagatttgggacgagaaaattggaggaaaaaggtggcaaaaaagagaggcggatgaatgagaggcacttgacgaatggcaccagaaaaaggtaagacgaagagcatttctgtcgatcattcttactccatttcagaaggggaatcagccggcggcggtggactaggcgcataaagctataatttgaaaagtgcaagaaaatatgttttaatgaattactaaaaaaatcaatggattaattttaaataaaaataaacaaaacagctcttttttattataggtttttatgggcatttgaaaattgcatttaatttgtttgatacgttagcttacttcatttagcaggtcgctgacttcactcatgaacccgtcccaggcatccaaagtggcgaaaaaggtgaccatacaaacgtcccattgctgtttgattttaaaatatttaattaaaagaa

SEQ ID NO: 66034 - DNA, 782 bp, Heterodera glycines
atggcttttccatatttagtcaatgtcccattaatagaggtatgttttgtacatatttattctcatctccatttaagctcactttccactttccttttcaattgtcccattttccgacttgtcggcaaaccgcccccccccctccccccccaaaattgcttaattgtccccatggatcacctattggtaaagcatcgttctctcccagccgaactcttcgacgaaatgtcccgtttcgttcccggccttttttgccgtaaaattttgagcaaaacaaactcaatattttaccttttgtttcgatgcacaaaacgtgaaaaacgatggaaaatcgaagtacaataatttttaataataattttgaaaataattgctctaatttgttgccagtgggaaataaattgcagaatggttttaggtttatagaaattaaaagaaattttggccaccttaatattttttacttttttctgagccttaaaaggttttcccagataaatacaggtgtaggcttttcaaaatgacagtttctaccagcaaatctctaaaaaattgtcctaggacttggaggcacgtgaggccaataccacttatgtgtcaactggcccttctccgcacacaatccaggcactgattcctcgtctacactggagttgggcttctttctcttttgatcatatccacgatctcatcaattactgttacgttggtgctaatgagagacgcttcattgtttctcttctgccaccgcatggccacggggtttaagccatttaaataaa

SEQ ID NO: 66035 - DNA, 1566 bp, Heterodera glycines
atgcgttcaagtgctggtgatcgaatatcaagaccaacttttggccgttggtccgactctgatcaaaaacaacgaggtaaacaggctgaagacgctctaccgactgatcaatcggacacccgacggaattcccaatttgctcaacgtcttgcacaaacacatcacggcagaaggactcgccgccatgcatgaacacgcggcggaaattgtgacggtacatttttggaattcgatttagaaaaaatcatcgaaatttgaatttaggacagcgaaaggtacgtggaacagttgctcaacatgtactcagtgttctccgaactcgtccgagatgctttttacaacgactcgcgctttttgaccgtcagagacaaagcatttcaagaagtggtgaacaacacggaagtgttcagattggagttggacccaaaccgaacgaaaaggttgaaaatgcgcaaaagcaattttaaaaataaatactaaacagtggacgcccagcgaacatcgagtcaaagtgcccggaattgctagcaaattattgcgatttgttgctcagaaagtcggccctgacgaaaaagttttcttctgaagagatcgacgagagactgaacaacgtggtgagttagggcagggcggtccaatggttattttacatttgaagtacaaaacggaaaagaaatttgacttctttttggtgttgttacgtattccgcatatttcgccacttcgttttttagcttttggtgctgaaatatgtcacagctaaagatgttttcatgcgttatcataagacgcacttgagccgaagactgattttcgagttggtggccgaccaagaaaaggaggaaatgctcaacttggccctaaggaaatcgctggaaaagggcagctgcagccaaatggccggttgacggaacactgaacgacagacattcattttggtttttcagattgtgtaagcgtcaaaattctgaatgccagagcatggtcgaggagtcgagaccgttcgcacctgactttgccacgggaattggaggatttgaccccggaagttgaggacttctacaaaaaagcagcactgcggacgaaagctgaattgggcccaccattggtccacgggggacggtaattagcaaattaacattgaaataaagttcacaaatgccaaatgttctgtcgaaggtttcgttcaccagcagagcgggaaggttcgacttggaagtgacctctcatcagatggccattttgttctgttggaacgacagacccaacgacaaactttcctttgcgacagagtcgtctcgcgactgaattgtccgagggcgaattggcgagaagtcttttggtccgttctccgttttggctgcttttcactgctttccttttttcagactggtgaatttccccaaagtccgaatgcgactgatcctttgcgaaatcgcccaacaaccgttgaccccaaaaagcttcaacgagccggcctcgggagttgaaatgttggcaatgcttcacgccattgttccgaaaaagccattcctcaagggcgaggcgcgaattgcatgcggatga

SEQ ID NO: 66036 - DNA, 357 bp, Heterodera glycines
  unsure (1)..(357): unsure at all n locations
atggcacgnatggcattggacctgcggtatgtggcactgcacgagattggccatgcacttggccttcggcattcgacctaccggcactcggtgatgaacagttattacaggtaagcagaaaagggggggcaagagatagagtgagaaagatagagagagaggaaaagagagagagagagggagagagagtctcattagggattagctaacattaccatttatacagacaaaatttggcacttttggatgaacaaacggaagagttcaaactgagcaaagatgataaagcggcgatttgggaattatttggggagaaatgccaccagaagaaaaagaggaggaaaagctgacaataaa

SEQ ID NO: 66037 - DNA, 565 bp, Heterodera glycines
aaaggaaaaaattgcaacaaaagtcatttggcgaaatatttggagaaaaatgggaagaaaaagaagaagaaaaaagagaaataattggaaaattttataaaataaaagagaaaatcaaggaaaagggaagaaatattcagcaaaagaatggagtaaaatcaatgcgaaaataaagaaaattttcaaaaaaagaatggaaccaaaattataacgaaatttgtaagaaaattggagttagtcaaagaataattgagaaatggaagaaacaatttggattaagcagtaaaagaataacggagaaagaaaaaatggaaaaaatgaaaaaatattggcaagtaaaaaaagaaaatccaaaaatgagtgacacggaaattggaaaaattttgaaaattcatcaacagagaatttcagaatggaagaaacattttggggaagaaattttgaaggattgaaaaaacggaaaaatttacgaaaatttggataaatttatttaaaaaattatctgcgctctaaaaaatagatttgttatataaattttcaaaaatattgtatttgtatttgataa

SEQ ID NO: 66038 - DNA, 693 bp, Heterodera glycines
atgttatcgttgatggtcttaacattgctgagaatggaatcgtcagaattgtgcgggacgaaaattcattatgcccgagaatttatgaagtgcgcgcttgtgcgttcgattctcatccgacttatatttatgaatcaataaatttttgcagatgtccctttttcgctttacgtggtatgttatggtgttgattctaaacattttttgctagcccaccaattaatatgtcaaaaaacattgaaacaacctaggataaataatattgaatgtttatttatatgcctgccttccacagtttatgagaatttccaatttttattgctaatagaccattaaaacataatatttttcttatttagttctgcatgagaacaacgcttacgtggttggtcagttatatttttgtagtgtttgatacaagcgtcggtgttccgtccggccctttggtgcaaaacaggctgattgtgagcctagtctggcataagcctggtttcagacgactggtgatagcgaaagtcctatctctagggctacacattcgcgctctggacatttgcgcctatgtacaaaatcgggttcaaacttaatttttccaatccctgatagcctaaactgaattaatattaagaaaataaggtcttttgttcattaggagcattgattctgttgtttgaaaattgatggatttattca

SEQ ID NO: 66039 - DNA, 205 bp, Heterodera glycines
agccaattccctaccgccaattccctactaaggcatttgggccatttccataccaaaagtgttgaatattgataaacattgagattaaaacacacaagaaaatttattcactgctttttagacagctcgtcaagagctttcggatgataccaaatttatcaagattcgatcgttttaaaaaagttagaagtgacaaatctctcaa

SEQ ID NO: 66040 - DNA, 2256 bp, Heterodera glycines
atgaggaatgtgccacggaacactcgtggcgaaatttgtgaactgcgcttcctgccgctggaggacacacagcggcccgacttgttgatggaggtgctcatccagcatctgctagaccgtgtgctggacggtcacccgccgccatccctggttggtctgcagctgcacccaccaggctttgaccggccgtacgtcatccgccttcgcccgcccgagcagaacaacgctgcggcactggcggcagccattgagcggctcaatgagcagtcggcagccggcattgacctgtttgctgggacaacggtcgccaaagttctggcggtgtggccactcgagccaattcgtgcggacccacaaagaggaggtttgttcttcgattttcaagcacattacgttgaaaaaaaaaacaggtggctgtgatttggaggcggaacaccatgcttcgcacaccgtgcaatcattggtcgtgtcgttaacccaaacgaccgtctctgcctggcgcgtgccgtccttctgggtctgcgggaccgcgaaacgagaatggctggtggcggtggccgtgcagcatttacggagtacgcgcgtcatcaggagcaacatgggcgtgacgcagaagagctgctgacgcgtgccggcattccccttgacaaagggatgtacacgctggtggacgtggctcgactacagcggatgttaaacaacacaaatggaattggccaaatccgcctggcggtgtttgaaaaggagcgggaataccttattgtctataagggtcaggggtaaatttctgtcttaaataatggatttcaaatttctggtctaattaaagcatggcggccaaattcaatttgtgcctgctgttggaacgcggccatttcaactaccttggccgcgttgaacaactgttcgatgtccaacgctactgcatcgactgtgagcggcgagcgcacttgcgctaccacttctccggttgtaaagttgtgtgccgcctttgtttgcggtttgggcccgaatatccgtgtcaagcacaacaggtactttcaagataattaatgaaaacatataacaaaaaaactaagcttacaaacggcgcaagtactgcccgacgttgtggtgcgtgccagttcatctttcccaacgatgattgctacgactaccatctgatcgaacatgctccagctccaatggatgcccgaggacagcgtcagcgtcagccaatctgtcaatggcgccgagtgtgccgtgattgtgggcgcatcgcctaccagggcaaacatcaatgcccacgtcaacaaacagccgacaacgggaactgtagacgttgcgacgggcctcacaccgccgaagagccctgcttcatccagccaatttgtgatctgtctgctcggcaacgcgcatcagttgctgttgacaacgacgacaactcagatgacaacggtgacgatgacggcgaagacgacgtattgccgcttcgactttgcttcttcgatgcagagacgtcgcaggacagcccgctccagcttaacaaccgattggtgcagaagcacgtcccgctgttgatcattgcagaagtcatctgtgaacgttgtcttcaggttggcatcagcgtcaacgatgggcttggaagaagagctcctgactgtgtttgcatgccaggaatggtgaggggacaacagttacgccagtggtcttcaccaccgtttgccaacacacgcggagacaacacagctgtgccaatggaggccccgacattcaaccagcgccgtttctactttcactcattcgacaacgaagccgacgacccagtggaccaatttttggattttttgacccatcacggtccaaaaaaggcacacacggtgtgcattgcacacaatggcggcaaatatgatttccacctgatcctggaggcactccatcgccgaaatcagccaccaaagcgcctgtgcaccaccggcctcaagatttactccatgcgtctgtcagggagccaccaacgacgggtcacattcaaagactccatcaattacttcttttgtgaattggatgcgttggtgaagagctttgacctgcccgaacatcaggcgacggtgaagcccttcttcccctacctctacatacagcgacaacatctgctgcaacgcctcgacacactgccagctcgggagttttactccccggacacgatgaaagcagagaaacgggccaaatttttgcggtggcatgccaacaacaacggcaacgggtttcaactgc

SEQ ID NO: 66041 - DNA, 506 bp, Heterodera glycines
tcaggagctcttcttccaagcccatcgttgacgctgatgccaacctgaagacaacgttcacagatgacttctgcaatgatcaacagcgggacgtgcttctgcaccaatcggttgttaagctggagcgggctgtcctgcgacgtctctgcatcgaagaagcaaagtcgaagcggcaatacgtcgtcttcgccgtcatcgtcaccgttgtcatctgagttgtcgtcgttgtcaacagcaactgatgcgcgttgccgagcagacagatcacaaattggctggatgaagcagggctcttcggcggtgtgaggcccgtcgcaacgtctacagttcccgttgtcggctgtttgttgacgtgggcattgatgtttgccctggtaggcgatgcgcccacaatcacggcacactcggcgccattgacagattggctgacgctgacgctgtcctcgggcatccattggagctggagcatgttcgatcagatggtagtcgtagcaatcatcgttggg

SEQ ID NO: 66042 - DNA, 3108 bp, Heterodera glycines
atggtgaggggacaacagttgcgccagtggtcttcaccaccgtttgccaacgcacccggagacaacacagctgtgccagtagacgcgccgaccttcaaccagcgtcgcttctacttccactcatttgacaacgaagccgccgacccagtagaccaatttttggattttttaacccatcacgggccaaaaaaggcccacacggtgtgcattgcacacaatggcggcaaatatgatttccacctaatcctggagtcactccatcgccgaaatctgccaccaaagcacctgtgcaccaccgggctcaagatctactccatgcgtttgtccgggaatcaccaacgacgagtcaccttcaaagactccatcaattacttcttctgtgaattggatgcgttggtgaagagctttgacctggctaacgaccaggccacggtgaagcccttcttcccctacctcttcatacagcgacaacacctgctgcagcgtctcgacacactgccagctcgggagttttactccccggaaacgatgaaagcggagaagcgggccaaatttttgcgttggcatgccgacagcaacaacggcaacgggtttcaactccgtgaacaactcattatgtactgcgccaacgacgtggccattttgagggaatcggctatccgatttcggcagctcatcgccgacaacacgcagggcctcgaccccttcctcaacgcatccacggctgccggtcttgcgctcgccacgcttcgtcgttgtttcctggccccgaatcgcctggtccactcacccgagggcggctacctgcgcggacgccgcgcatcggctgagtcgcagcggtacatccgcttcttcgagctggagaaccccggagcgcaagtgcagtgtgcgcattggtccgtcggggaggcacacattgaggacaccggctaccgcgtggacggtctttggcgacgcgatgcgcctcttcgtcccctggccattgaatggctcggctgttactatcatggtaatttttgttgtttgttttccaaaattgacaaaaaaaaaaaaaatcaaggatgcccaaagtgcttccccgaccgacagcagcgactggcggcggggcggactgcggaagacctgtacgaacggacggagcggcgtctatttgagctggagcacgaacacggttgtgagatccacaaggtgtgggcatgccagtggagtgaacgactacgccacgacccggagctgaagcgacggtacgatgccgtgttcgtcccctgcccactggacccgcgcaacgatgccttgaggggaggccgcacggagccgttcaaactacaccacgtgtgcagcgacaacgaagaaattttgtgcatcgacatcgtgagcctatacccatacgtcatggttggtcatttgaactgttcccttaatttttatagtcaataattcagaaggcaaactgcttcccggtgggcaacccgcgggttctgacgcgcgaggtgctgctccatccccccacggcacccctcccgtggactgcgccggaaaacaacaccttccgggggctgctgcttgtccgagtgctggcgccacgcgacatccgtgtgcctctgctcggctaccgcacaaaggatgagcgcttcaccttccctttgtgtgggtggtgtgccgaccgacgacagcagcggccgtgccgtcacagtgacgacaagcgttcgtgggtgaccgcctacacccacgtagagctgaacaaagcactcctacttggctacatcgtcaccgacctatttgaggtaattagttattataaattttgtataagaaaaaaaataggtgtgggactacgatgagtgggacggcacgctgttcagcagctacgtcaacactttcgtcggtctcaaagtgcaggcgacggggtggccagaaggatgcgccacggacgagcagcgtcagacatttgtggaggactttgagcgcaccgagggcatccagctggaccctgccaaaatggaattcaaccccagcctgcgcctcatcgccaaaactttggcaaactcactttggtcattaataataataaaaaatttatttttaaacgaaaaatttacaggggaaagctcgcgcagcgtgtgggccgaaccgaaattcgctacacgcggacgccggctgaattccacgagctgcttgaagacccgtcgctggacaagttggattttgtccacgtgtccgagtacatggaccgctgtgtcgtgcggaagcgccccgagttcgccaaggccccgctgaccaactgtcttccggtcgcttcgttcgtcacttcatatgcccgcctgcatctgtacgactacattgagcaggtgttggcgattgacggagctgagctgctctactgcggtatgctgttttttcacaaaacatttggtgtacacgcttatgctttagacacggactccatctactacgtaaacaagatgggtggtccgtgtgttgctgagggcgaggcactgggccagatgaagcgagagcacactgatcgcagaatcgtcgagttcgttgcgggtggtccaaagaactacggcatccggcatactgcgcgggacggtacggatgagcgtgccaacctgaagatccgcagcttccgcctgtcgtacgcggcccaacagttgctcaactttgaggcgatgaaagagctcacgctggccacgtacaaaattgacggaccaatgtgagttttgcaatttatcattaagtttgtaaataataaaatcttagcgacgacgtgctggacaatgacgacctctacgtgtacggaggcggtgagcatcgcgccattcgggtcaacttcccacatattgaccgcaacgcttacgccgacctttacacacacgaggcacacaaagactacaggcccttctacgcaaaggggcgtgtccgccccggaatgcagacgcgtccctttggctatgtggaggatgatggaccaccgaacgatggacaacggacggagcgacgaaagagaaattttgttgatcatgaccccgcccaaccagggcattccgggtggttttgatgttgtctttttattttttgttcatttcattcaaataattgtaaata

SEQ ID NO: 66043 - DNA, 709 bp, Heterodera glycines
atggatttaattcttgccaccgattggataaacaacgcttatcccgaaatggatttacaggacgccaacaaagagccaacgaaaaagcaagaggaggaggcggatgatcccagttggatcagcctgattgacgaggagatgaagcgcgagccgctcgctccaattggtgaggagacgccagcaacaagttgcttttgttttaaacgtatatttaaatttaaatttaggcactccaaaaaaatgtgcatgtgccgaacgccgtcgccccgttccgctcgtggaccatctctgcaagcggttcaaatgcaacgctcacgagctgcatgtgcttttcaaaagcttagagaaacgccgggacattgtggagcatttgcgctcgtccactgcgcaccgcccacctgcgcccgtccgtgcgcaattttccggtccgctgtaatgacctgtccatcctggacacccactcggcccccgcgtaccgaggctacctcggcataacggtatttttatttgttttgtttgtcggtaacaaaaaattaaaggtccgcatgcactattacataaagcatggcatccgcttgcgccaccccaacttgccgtgcgtcgttgaatttggaggcggagatcacaaaacttttttccctcttgaaattttgtccattgttttgtagatgtgttcaatttcaaattgtactgttgtttttaaaataaa

SEQ ID NO: 66044 - DNA, 2236 bp, Heterodera glycines
atggacgccttccaacaatttaaaagggaggatggacaatttcgtcatccattcacaatgattgtgtctgggagcacaggaagtgggaagtcagagtggataatgcgtctgttgcgaaatgtggacaaaatgatctctacccctgttgaacgcgttatttatagctatggtgagttgaacacaaatgtgatgaatctgcagcgcgccggcaaagttgccaatgtgccagtcactgtacacagcggcgtcccacgcgcggaacaagtgcgggagtgtgccaaaaaagaaaaaaccttgctggtgctggatgatttggtggtgggtatgagtcaacaatatttagacgcactcttcacccgtggctcacacaattggggcgtcagcgtaattttggtgactcagcacctgttcaacaaagagctgcgtgtggcgcgcactaattcacactatttagtattaatgcgtaatcctgcgggggcgttgcagatacgcaccatcgccacccacctcttcccgtcaaggactgcccattttattgaggcctaccgggacgcatgcgcaaaaaattttggataccttctcgtggacatgcacccagagagtccggaagatatccgccttcgaacaaatatatatgaacaaaaacaaatagtttacctaccaaaatgaaagggtcacaaataataacaataaataaatgctttttggagacactgtgtaatgccaaaaaggcgaaagcccttattcgatatgcatccgatgagcaacttttgtgccttgtcgaaatttgcctaaacattctaaagggccgagtccctttgcgtccccggtatttgaataagctgaaagctcatgcacaggtgcttcgtcgtctcgccagcacacgctgctcgcgctctgccaaaaaggttttgctacaacacggagatggcctcccagctattgtggggctcattgcgtcaattgctctcccgcttattgctgatgtcattgaaaaatataaatagtttccaaaaaattaaaaacaagaaaaaatgcagcatacaaagcgctatttgttagtccccgaagagatttatcagagtttggcagcaccgccaccatctgacggaacaccaattgggctggtccgtacccgaattaaacaaataaaaaatgatgacgccataaatgaggcggaaagggcagtcaaatatgagcaggaagttaagcgtctcaacaagctcacaaaggacgaagatgaacgtcccgtgggtgttaaattagaaaatttgagtgatgtggttgacgccatgccaaaaccagtcaacgttacaaggccaattgttgtttctacgcgtcgccatcttaaagttgggcgtgcgcgaaaagaaaatgttgaacaattagaagatactgatgatgatgatgattatcaaaacccacggtcgtcaagttcaaataaacgacaacccacacaaacggaaatcttaaaattaatttataaaaacgcccaatctctaggggtgtcggaggaagggcaagttttgagagccggtgggcgtccatttataaccagcagtgttgatgacattgttagtcacctgttgaacaaggacaagcgtggccaaaataaagagccaacggcattcaaagaatttgttgaaagggcaaggcagaatccgctcttgagtaggcatttatttcccgaaggccaatccggcaaaggaatttataaaaacaccccacttaagtttaagccatcattatggatttgaaaaagcttcgcttgcgcgagtttttgtacaaggacctaagttcgcctgtcgcattcacgagcgttgaaccgctgctgagagaggcgcggaaaagtcaaccaaaaatcaatcgaaacgatgtccaaaattatttgaccagccaacgtacatacacactgcatcgccaggcgaagcggcgctaccgccgattgccaacattggcgcccggcttgcatactgaatggcaggccgatttagctatttttgaccgacttggtaaacaaaatcgtggcttcaagtacttattagtttgtattgatacccttagtcgacaggtgtttgttgagcccgtaaagaccaagacgagcgctaacatgatcattgcctttaatcgtatattcaaaagatcaaaaatatatcccgtggaaggtgttaacagatcagggaaaggaattcactgcccgggcagtacagcagttcttccgcacaaaagacgttga

SEQ ID NO: 66045 - DNA, 2789 bp, Heterodera glycines
atgtccaattgctcagtggtaagtgacttcacatatttgacaacgttcagaaagccttcaaacacatccgaggaatcttccgactcaaaatacattcgcatcgttctttgaattatgtcaaatttctccatgtcgaaggctctattaatttccttaattcaaacggacagatttgtttatcgaattttgttactcacttcatgggtttttttaattttccgaacacagtcttggaaagatatttttgtgtccaaaatctcttcagcggaaatcataggcgcgccatcaagttcgaccatcttaattaagagaaaagcgtattaaaatccaaaaaaatgaagaagagtaaaatataaaatttaaaaaagattagcatggcgaaatgttttttgtaaaaaatttgaattaaattctttgaattcgcagattttcaaatttcagtttaaaacttccaataaatttatttaagattgtcctcagtttgtctttttcatccttttgacttctttttgtcatttccgatgtctcttaatccatcggctgaccctttggctggcatttatcagaaagaactcactgaatacgacttggttttattttcactatacttttctaaactttttctttagaatcgattgccgcatactctgaaaaagggggaggatgatcagttgctgaagcggtccgatttgattgatacgctcaacacggaattttcatgtccaatttgcttggatttgctgaaaaacactatggtcacggtacgaatgggtaacattctgtcgaaacccaaaagttgaacactatttgtaccattttttctgcttttgtttgcttttacgttaaaactttaaggaatgtcttcaccgtttctgttccgaatgcatcaaaaaatgcatttacaagggaaatgtaagacaaatgaccaccattatttaatttatcaatggaatgaatcttagagggaatgtccgacttgtcgaaagaaaatcatttccaaacgcaatctccgagccgacccaaacatggacaaattgatcgacaaagtaacagcagcaacaaattccaccgttcttctctggactaacggttgttcttccgtttttcagatttggcctgatcgtgagcagtacgaagcgttgcaacgcgagaaggcgcaaaaatggagcaaacatttcgatgttgtcgcattgcaacggagcattgcggagggaatgcgggcgcaagcgaaggcactcattcgccattcgaatgccgacgtaaacgaaccgacgacgacgaaaagggcggaagggtcgggacaggtggcgaataaaggtgcgattgggaaaaccatgttctaatgcaccgtttcttgtcctttatcagcgactcgttgtgccctccacgaggctttcagaatttaaatgtgactaatattttaattgatttgttccagcaaaaaaagcttcgccacctattcaacacaatgcaatctgtgctcccaaaaaactatgtcttcttcctcgtcatgtgatggaaaatgacatcgcaaatggtgagtagtaagtaataaatgggactggtgtctaaaaagcaatcatttcgaaattttgagattggacatattgtggtaatgtgttgtttttctgctgcttttcatgggttttccttataaaactacagagaaattgtgaagggacaaatttctttattaaaaatgcaaactgacaatgactattgttgttgttttctttgtttattgttgttttcagctgacttttacactgattcttcctctgaatctccatcatcttcatccggcaaagacacttccttcgacccaacttctgatgcggggaagggcacgcaattgtccaaaagtctcatcgtcgacgtggacgtgggtctgttcaacaaaagcgttgatgaccgattcatcggacaattaacgagcagagaagctgaattaggcggtaaaagaccatttattcgaattggccattaaattatagtgaaatgtgacccaccaactaaccccctcccgtccccaatatccatttctaatggttatcactgctaattgttaaggtgcgtcgtcaaatgtggcaatgccgtcgcctctttcgtgtcaaactgtggaggatgaatcgtccggaatttggaccgcctcttcctcgtcgtctccttttcccgccaatgaaattctgcgtctttacaccccaaatcctctcgatgattgcaacaccaattttgggtgatctttttgacgtttatttgtatgactattggatgatagtattgtggttcattattttgaattaatgtttaatttcgaggagttcagaattaacgtttcgatggaatcggcgttgagagagtacgtgtcgaagacgggtcagttgggactgatcacagttgaaatcgtacctttgcccaaacttcgccgacccatcgacgaacgttttcgaatgaaattaatgcatcgggcgaccggttaattcatttgttatggtaatcggctcataattttttttccagtggaagaacttcgtgttaaattcgtgaacatttgtaaaaacatggccaaagtcgaactcagtttcttcgttcaggtgacactccgcggataccgccttttctcgtcaagctttgtttattttttcagttgtataataataaaatgactcgtctttatgctaatgaatcaatgtgcacggtgttggcattggcgagacggccgaacttcttcgattacccaactgtctttttcaacattgaagccatttgatcgcttattgctgaataaa

SEQ ID NO: 66046 - DNA, 1089 bp, Heterodera glycines
atgtatcggctgctctccaaagtcgaccaataccccgaggcgtcccgaatcgttttcgaccgcacagacgtggccaagccgacgctgtccctttctggagtgtccgagtacttcttgaacattaaattagaaaaaactgaacgcgaaggcaattggagtcagcggccgctccgtctcgagcgtaagtgcattttgatggccattctttggcatttattttcagagaaaaaatacgcggcgcaagacgcgcactgtctgaatcggatcttcagaattgtggcatcgaaattgaaaagattgaaggacaatgaacttgccaaggagttgaaacggcactcactgatcgatttcaacgaagaaaaggcaaagccaacgatggcaattccgctgctcagcggacaattggtgcgagtgaaggaaggcgaggaggacttcattttgaacgtgcaagtgagtggaggggaaggccagcagatgccgaagccaacaatgccattttgagaaagccgccgtggaaattgagcgatcagccaacggagtgttggacggcttcagaaccattggagatgtccgcttcatcgtcgactcgatgcttttcgggttgggcaaacgtttacgcaagtgcggcttcgacacgcgaatgattggcgaccgtgaacaaattgtcgagttttgcaagcagtcgaaggacgaaaaatttgtggtgttaagcgccggcaaaggacataaacaggtcaattgaggcatttggagaatggtgtcatggagatttattggttatgttttgcaaagccatggcgacacttggcacactttcagctcgccctccaaatgccagacaatgaagtggtcaatgtgccaattgcgaccgacggcaccaccccaccttccctgttggtcaggaacttgttggacgaactccgcatcattctccgtccttccgacatgtggtcacgctgtgtggagtgcaacaagcggtccttcgtccgtataccaaaacgaattgtgcagaccttgtgctttatgaccgcagttcggcactcggccgaatggatgggtgtcgatgaacaggtcgacaaattccaatga

SEQ ID NO: 66047 - DNA, 1245 bp, Heterodera glycines
atggttgaagttgcgattgctcaaattaaaacccttttggagaacgaagtgccaaaggctgtcttttggatggaccatttgaatctgcgcgaccatttcccatttaacacagtgagttttgattcggaataattgatagacttttgatataatttaatgaccctatttagatcgtttgtaaacttattttggaaaaccaaactgctttgatttatcctttcgtcggtgaaagtcaatttcgacgtaataaactcattcattatttggacaatttgttgggccttgttttgcgcaacagacgagcggaggatgaatatgagcgggaaattatgaaaaaccaaaaacaattggagaaggttgggtaaggggccagagtacaaattggggcagtcaaaaatggcgattcttttcgtaaattttcagaaatgtcgctttctcacttttaattgttattgttacccttatactgttccgcttaatgctacgagaaacttaatccctatttaaatttagctcaccagaaagtttgtcaagaatttcgaattaacggaaagtgaagtgcctaatttgatgaagcttggtacgcaaaatgctttgttatacaatcactatcgttggtgccacaaagaaattacatggagtcaatttgaggagatagcgcgcgtaatacttttttaatttgtgctttttgccaattgttttttcttcccccccccccttcgttttctttccattctctcctttctgctgatttctttcctcgtcctacctttgcgttttcgccctttcttcccacttttctgtctctgtttcagcatgctctgcagttctcttccgatgttcgtgaccattacttccgccgtctgttcgagtccaaattgccagaacgagcgtgtcattttgcggaattgcttgaactcagtgagcacgattacatccccgaattgaggcattattgtcagcaaaacgcggatgaagtgcaacgaatccgcaaccaaatcagaaagtgattttatccgattttctttccattttcgcacatttagagacattgccattcgcctgcagaaccaacagattgaagagcagtgcgtctgcgagttgacccccggccaccaaattgtcctcgtcgacacgtggccgaagttagagcaactgattgaccatcttcggcacgacaacgaggaactctttggcatcgatgccgaatggcgtcctcactatctttgcgcagcagaaaagtga

SEQ ID NO: 66048 - DNA, 682 bp, Heterodera glycines
atggtgattttttgggtaggtatttttgtggctgatttcaagaaaatgaaaagagatacagaggcagagaaaagtgagtaaatagagaaaagttaggattataaaaagtaagaaaaaaaatttttattacctaataaatgaattatttgagggccgagtctgaaagtggtctccaaaaacggcatttttcggaaccaccgctaacaattttttttgtaatgccatttgaaaacactgaatttacttaatcttggctaaatcggccacgctgagtccgaatatggccttagatttgagctctgtgtcaatgagcatgtacagcttgaacttcatgcacgaagttgaagcagtacaagctctggttgaaaagataggacagatttaaggccatatttggattatacgaccctaatttgttatacaaaaccgtttcatgaatgattacaaaatttctgggcgcgctttttcaagaaatttctaattctaagaaaatatactctttaaatatttggtcagtcacctttagttggaaggggccggcggtgccgatagacgccgtcggaccgggacctagcttttcaaaatccaggacctggaaccgggacctcggatgaccgggaattcccggccggtcccggtcccgtgactctagttttacgtgttttctttcaaaaaatcctaa

SEQ ID NO: 66049 - DNA, 1227 bp, Heterodera glycines
atgttcaaagcgatcagcaagttttgtgccattctgatcattgacatttttggcatagacgccaccgtcgcactccatgctgctgtgagcagtgtaaaagaaaaaagaaagtttgaaattacgaaataattcataaaaattggtgtcaggccgtaattgagataaaactgagatccgagaattttggccctatttggaatatagcaggacttgaaattatatggaaacctatttttctcggggctttttgattccaaaagactgaaaatgttatggaaatttactcgataatattgttaaatttaaattctttcttataaaattggggaatttgtagcaaagttattttatatgtatattttacacgaaatttcagcgccgccaaggagaaaaattaggcatttatagccgtttttcgccaaaacaaagactaatttggccactttgggaccaaatttcaaaaaatatggtaaagtgggggtctggtgatgccgctaggcgccgccgggaaaatttttggacctttaatgcaattttttaaatttaacatggtaatttgttgtgtggtcggcaactgaaaaatagggaaaaaccagcagcactaaattaatggacgaaattgcttctgcggcttatgagaagaacatcacacaccagagaaagggaggaacaagttgcagtttggtgacgtgtttcacacacatttgtatgttctctaaccatatgacagatatacagcaagaggaaaagattgtttggcagagagaaaagcactcaacgcacgagacgaagtcaaacgctgattggctgaatcaggccgaaggcgggcggcaggccggcaacgagagggaaaaactgttagccagagagaaaattaaagacacactgcttggcagagagaaaagggaaaagtgaaattttggcgtattatctcttcatttttaatcggaaaacaattttatctcgttgacttggatcctagtaaatccgctttaaattttgcataccattagatagagaattcttgatctaatataggctttttgtataataattgagatatgttttttaaatccaagtttattgtcattaggagacctaaatctcttatagttgttgattcttttatttatggccatatttttgcgattttatatccatatttttccgagccctactaataattgtttgtacggacaaatttggagaatcaatggaaagcagcca

SEQ ID NO: 66050 - DNA, 228 bp, Heterodera glycines
atgtcagcggcactcaaaccgtcggactacaaaatattcccaaaaagtcagaaatgcgtcccctccaatggcaccgaatcaaccgccagcggcgcaaccgaagattcattctcagcagaggatcgaaaaacggactggcgctcaatttatttggccgctttggtgtgcttttttggccaagttcagttcagcattttcctcaactcgcaattcgcctttatgaaaacg

SEQ ID NO: 66051 - DNA, 959 bp, Heterodera glycines
atgaatttgttcttttttcttatcggaacagaacaacatgggtcatgggattggttggttgtggtcattgcaatgattaatattaatgagtgtgtgcacacacaaaaaccaaatttatttgaaataacaaataaaatatgaaaataaaagaaaaataattaaaatactaaaaactctaaaattccatttatgttatttgaactttcgacaacagaataatgcaactttattgcagcaatggccttctccatttggtgctctgcttcaaacaaaatgttaaaaatagcggcgtttgtgtgtaataatatgataataattgtggattaatcgttatgcaaaatattttttcatttttatattaaagaaaatataaaaaaataatccaattagggaaaagaagagaatttttatgttaaagtgcctatgaaaaaaaagttttaatttaaatgcaaatattgtgtttcccgttgaattgatggatgaattaaagacaattatgaaataagaaacaatgttttttttcattaaatgatagtgaaatgaagagactcccaaattttatagcctcagattcgctgatgtaattgatgcaatttggccggttgatccacctacacttcgaatggctttatcacgggatgaaactgacaaatgaacacattggggagaagaaacattgacgaactgataaaagacaaacgaatggaagagataagagataagcagcaaagctaaaacagaaatttgatcaaattaacaaatgttttgaaatatcaacaaaatgaaatgagtacatttgtacgcagcgattgggggaaacatagggacaaatgataggagaaaggccgaaaagaaagaagcacgatcagaaacatctgaccacaacttacgggaaggcctgtgctaattgaacgttacaaaaaaatgttgaaaggattaattacactatttggagtgga

SEQ ID NO: 66052 - DNA, 385 bp, Heterodera glycines
gttggatttgtaattacgtgtggctggacattcttccatcttttgactatgcccaactcggtctccaaatggcactgctttcttaccgtttcaatgctttggttgacgcacattttgatggcaaaccggaattgacgctttggaaaacaacaaaaattcgaaaacaaattggagtgccgaaatcggtgttggcaaattatgccgattctgtgcaatttccattggccgaccatccgttgcccaacaaaattcgctttaaggaccttcgcatttcgtaattcaaaattcagtgaatttttcaccgatgaaagcattccctttttttcaggtacatcgatcactctgtcatcgcatttctccgttccaatcaacaaattttcgacaa

SEQ ID NO: 66053 - DNA, 282 bp, Heterodera glycines
atggtatgtcaataaagtatttctgatttttaaacaaaaattaaaaattcagaaccaatggcacggcaggtgctgcaaaagcatgcatcacaatttcagcagcattgtaaaaatgcccgcagaggaagtgccgtggccaaatgttgcagtgccatcagaagcataatgggccgattcacaagccaaaaaaaggcaatgaaccaaatgctggccaagtgtaaagcgggcacaacgccaagcgaagcacagcaaatgcgaagaaaattggaaggatcgaataaa

SEQ ID NO: 66054 - DNA, 499 bp, Heterodera glycines
atgccaccaaaaccatccggcaaaggagcgaagaaggcggtcaagtcgaccaaggcggtgcgcacgggagacaaaaagcggagaaaggcccgcaaggagtcttactcggtaggtttttttctgcattttcagggatttttcaggagggttggaaaaattgtttttgagttttcaatgatttgacaaaatgaaattataaatttaacccgccccccccccgcccttcaaaattttgaaaaaaaaataaaataataggagactcagaattttgaaaattttttataaaaactgatgacaagctaatgtgataaaacaggttaattatttcctttcagtatccctgcaaagtttggggcgcttctgataagtttctgaaaaaataagttaagccgtaaactttttggcctgtttaaaaaggaattaaaaatttttaaaaatttattcatctccctttttgatagaaaaagcatcagagtgcctaaactaacatgtaaataaa

SEQ ID NO: 66055 - DNA, 983 bp, Heterodera glycines
gggtgtatgcgtacagagtcaattacgacacgctaaactggcgaatgctaattgcgcaggtgctttttattacaaaggaattaaattttaaattttaattattttttattgattaattgaccaataaatttttagtgttaattagttattatttttttaattgaatgatttagctgcataagaatcatcaagagataccgacaatgtcgcgcatgcaattaatcgtcgatggcgaaacatttttgcgccagtcggccaacactcagttatttgtccaacttttaaggcaaattttttaaatttttattgaaattatgaatatttctatttcatcattaaattattaaaaacctaaaatttattttaaaaaatcgaaaaatattcacaaagcaattttaaaagtcatagcacagcaacccaatttcgatcattaaaaaattttaaaatcatttagtcactagggctgttcaagaattgaatttctctggagtcgagaatctgagatcaagatttggcccgagatttgtaaaaatccctccacgttttcagctatttggcccacgaggacgaccttggcgtgttgttggtcggcctggacgcattgcatgcgctattggagctgttcagtgccagcgatgtgttcggcactatgcttgtccattttgtgccggtaattcaccagttggaccgtcagctgagcttgactgctgcgcacggcactgatcccgagttggccgctctgtggctgctcagcccgctgcgtttggccaagctttatcagcttcgatgtgctgcaaatttgggcacttgcgcagaaaccaaacaggtccatctggactaaaaatggcaccacgaaatgctgggataaatcatgcccaaatctggcatttatgatttctggtacaaagctagtactctggtcgagttaatgttcgacaatctcttgcaggtgcgccggtggctcgcccatccgaccgctttag

SEQ ID NO: 66056 - DNA, 222 bp, Heterodera glycines
ttcgtttggttggtcgcctttttcggcaccgctttcctcaacattacgttcggcttggccctttctctgctgttctccttggccatgttcggccttcgcaaattgaatgatgccatcgccacaaaagggcgacgcgcttcgcccgaatcgtccgccgacagcgaaaggcaattggcaaaattgccacaaattgtaaatgttacgctagcggaggaaaagtga

SEQ ID NO: 66057 - DNA, 181 bp, Heterodera glycines
tacagtttctttctttttaatcaacaccagaaatcaccaaataaaaacaacaaaacaattgcgaatacttccacatgaatacactgtctcaattaacaatctttgccttcttcgtctcttttccttcctttttcgtctcttttccctctggccccttttgcgctgcgtttttcgtctctct

SEQ ID NO: 66058 - DNA, 306 bp, Heterodera glycines
atgcacaaaacggtccctaaattgaagatcacattgccaaaattggatctgaatgatcctgccagtttggcggcatttgcatcgcccgaatcattggactcgcaagaattggacgaagacgacattttgttggacaatgaatggaacgaaccgatggacgatgaggaggaggaggaggaagatgaagatatgatgatgatggaagaggatgatgacaacaatgatgtaggggacctttttgatgtagaagatgttccaccagcggaagcaatgctcagatgcagtcaaaatcggtgattataaaaa

SEQ ID NO: 66059 - DNA, 818 bp, Heterodera glycines
taattaaatccattccttcgggggaccgtgccgggtgccgcggggtaagcagtgctggttcgtttcatcacggcaccgaaccttttggctagtcagcaatcgttgcttaacttgccagatcggacgggtgcgcatgattccactgttccaagcaccccaccaaaagcaaaacgatataaccaaaatataaggaaaaattttttaaaaaattttttctccatcttcctttttgatactaaagcatcagagtgctaaaattaagttgtaaataaaatttggtgcgctttagagcactttctgaaaaaaatatttatgaaacaaaaaaatcgattttttcaagtgtccgtttggggtactcaaacatttatggggagcaaaaatccaacgcagaattaaagtacaggctatagggaagctattcccgaaggattcggtctccccataaatctgggcgcatcggttcggggggactgccccgaaaacaaaaaaatcgattttttcaagtgtccgtttggggtactcaaacaattatggggagcaaaaatccaacgcagaattaaagtacaggctatagggaagctattcccgaaggattcggtctccccataaatctgggcgcatcggttcggggggactgccccgaaaacaaaaaaatcgattttttcaagtgtccgtttggggtactcaaacaattatggggagcaaaaatccaacgcagaattaaagtacaggctatagggaagctattcccgaaggattcggtctccccataaatctgggcgcatcggttcggggggactgccccgaaaacaaaaaaa

SEQ ID NO: 66060 - DNA, 2063 bp, Heterodera glycines
atgaacaccgaaaaagacatgatcaaagccattgaaacaaaaatcatcgcattggaggaacataaaaagaatgaagaaatttttattggcgttttgaaagaccgatttggaaagggtaaaaatgaaaatttaatttataaattttaatatttttaatttaatttttagagcttttaaaagctgtgcacccggacattcgcaagaatattgttgaggtgaaagagaacgaatagatttataaaacatgaaaattattttagaagttttcgtacccaaaacaaaactattgggatgccaatgccagtcacaatgatctcgaagtctttggcacggaatctttaaaagtctattacaaaggcgatgggagcggtaagtgaattaatttctgaaaggtacgaaaaattcgagttacaaatccacaaaatcggaataaagcatttctaagaaaggacggggacatggagaaaataggttaattttccgagttacagtacgtggagttacagttggtgagctcccttgtaggctaatttatactgagttatagacatacagtaatggatgaattatttattaatttttaatactaatatatattttataaaaaaataacattaaggtcgtcgttctgtcttcgctaaacattcaattttgttcaccgaatcaggcatttttttcttcgaaatcaagattaaaagttgcaaaaggtagcactaccatatgaaacatatgaaaatggttgatttttattttcaatttcagtctttgctcattcggatttgccaccaaagcgatgccattggacggaagtgttggccaaaattgggacagttgtgcatatcaaagcgatggccaattttgggtcaatggaccaagcaatattggaaatgcgaacttttctcgtggcgatttcgtcggttgtggcattaatttggccactcgtcgggtcattttcacaaagaatggccaacctttgagttgcttattttattttaaattatttatatttcaattatttttcagatacttccgatttattcctttcgcctccttttggtcttccattgtttccatttatttctttgagtgattctggcgatttaattgagacaaattttgggccaaaattcgaatttgaccccgcaaaagtccagcagcaggtgaaaaagagagaacaaatataaattatttaatttaaaccattaaggcatcttcaaatttccggcaaaattattgggatgccaatttttgtcatgagaatctcgaaatcattggcaacaaaagtctcattgtccattataagaaaaattcttatggtattttttaaaaattatataataaataaattctatttcttctaaaaagatgcatggcgttccgtcttcgctaaatatccgattttgctcaacaaggattcgtctaacattttttactacgaaattttagtcaaaaataaaaattagtaatttattttgtttcaatccaatttatcagattactaaaatttgaaattattattaattttattcatttattattttaattgtatttctttttttaataatttttcattttcagttggttcattagctttggattcgccgtcaaacagaagacaaaattggatggaataattctatatgaaaagggcatttatgtatatgaaagtgatggtgaaatttggttaggcaactcaaaagaaaaaagaacaaattacgaatattcatacggtattggtgatactgtaggaatgggcatcaatttggccactcgacagctcttttgcaccaaaaatggacttcgtttgggttggcaaataataaacaaaaatgagcaatttttaaaataatcattttaattaacttttttatgaccattaatttttatttgaattatcaaaatcatttaactttttttataggtttctctgatcttctcgttgatccatctttcgctgatgattcttttcatcccttccttactttgggtcattctgatgacaaaattgaggcgaattttgggcccaatttcaaattcgatttggcaactctctgaggaataaa

SEQ ID NO: 66061 - DNA, 1118 bp, Heterodera glycines
  unsure (1)..(1118): unsure at all n locations
atgtcattgaaccgtttttgtgccatttgttgttcccaaatgtatcggcgccattggtcacaaataattagcaaatatttattggccattattcttttgttcgctttggcaatttctgcaccaattctttggcattctgtgtgctttcggttgtctgaagtgagaacaccgcttgggcaaggacagcacaaaatggacggccccgtgttcatggaaattccaacacaagtaaaaaatggaggagcacaaaataaagaaaatttattttaaaacttgaataaattattttgagcaaagattttccgatttttttttacctcgttggcatattgtgtgcttttgccattcttagtagaggtcggcattttcaaactgcaggcctcgtgctcgggcttaaatgttttttgaatggttgcccgacggacatgtgttttttcaaaattctggaaagatgattataaaaaattatataatcttctatttgcttgtggttataatttgaaatgacgtacgattccatattcataaaagctttaatttttttagccttaaaatagcttcggagataaagttgatcagagtgatcagacacaataacataatcagacagtcagaaaataagaaataatgtacaataaatttctagagatatcactaaaaatcgaactcaaaataattttttcctgcttatacaatgggttattaaatacaatagtaagtaatttatataattttttttaattgttttttttattttctaaactctgattcaaaacttttttgaaaacctggcattggaattatgatcttcggtctaatttttaatttaaaattattaattatttttaaaataatatttttctaaattttcatcattttagcaaatttattacaatatcaccaaaatgtttgccatttgccacttggcttttctgctctttgcttatccgttaatgtgccgaaggatttaggcaatgaatttgaagcagaggagtcaccgtggttgaangtcgaatggtgtacggcatcattttgctttcaattgcaaatcttctctttcgcatttatctaatcacttgggtaattnnttaactctttattgatagcaaataattaaa

SEQ ID NO: 66062 - DNA, 104 bp, Heterodera glycines
ccgggactcaaatgtcccgctcaggccaaaaattttttctatttccgggaaaaaatcgaaatttttccgaaaaaaataccagtcgatagagctcgaaaaactat

SEQ ID NO: 66063 - DNA, 222 bp, Heterodera glycines
atgtcggaagtcggaactcggaagtcggaagtcggaattccgtgccatccctggtacacaatggttaaaaagggtacaatcatggttttaaaattaaataaatttccttttattaattaaaaaagagagttttaaaagtacaaggattgaatatttatttaaattgaaattaattttacaaattctaatttaaaaaatacaggagttctttaataaaagtaa

SEQ ID NO: 66064 - DNA, 192 bp, Heterodera glycines
atggtacaattggcaaacggagggggcgcaattggagacgaagttgggacggaagcggaacagcagcagagggacagaatgggaccagcaaagaaaaagacgaaaaggccggcggagagggaacagaacgatgatcaacagcagaaagggcagaggagggccaaggagagggaagacaaagaggagaagaaa

SEQ ID NO: 66065 - DNA, 109 bp, Heterodera glycines
atgtctgaggaaaaatttgaagatgttgatggctctattattggacagaagcgacaaaatactgaaaacggcggcccggcctcgaagaaggcgaatgtgattgagtccg

SEQ ID NO: 66066 - DNA, 1456 bp, Heterodera glycines
gacgaactgactgaggcgatgaaaaggcgcgacacaacactaaccattcatttgttcggacgacgtgggcagaacacactttcatttgacgagtttcagaagtacggtaaattaccgtgttcataacataatacggtatcatcggacgaatgaaaaaacagagatgaatcacccacgaattattgttggttcagtttttaccatcgtctccagcgagaaatcattgaaattgagttccacgagttcgcccggggcaaaacccgaatttccaccgtcgattttgcccggctcgtcctccgatactccattttgcacaaggaggagcattcgccgtacattcgaagggcgtacgaacggaggtggcactttttgaggacattttgaattttctaataaagaatatttacaaaaaatagtcattcgaaatttcgcttttttataccaaactttcaattggcattagtttggctttggtattctgtgattgtaaccgggcgtggcttattaccattttcaatgatttagatgaggcattaaatgtttcactgtcagtgagtatgatgaggaggtgagtgggcgaatagatgggtttgaatggttcgcaatttcattgtcagggcgttacactgcagcagttcgagcagttcagcatgttcctcaataatttggaagagttcaggtgaaacggatttcctattttttgcttttatttttatcccgactttctccatttttggaccataactttttcccttctcaaccatattaagtattcttggtgttgttcgatagctttatgtgtctattattaacgggcaaatattcaaaaattttcgttgtgtcataaaagttatggccagaaagaactcaaagactcagttttttaactttttttggcctgcttttttgtacatgaataaaaaattttgaaaaataatttttatgactttttccatttttcctatcactttttatgtctttcattcccatcactttctcgatcattttttttttgttgtctttttccatttcccgatcactctctccttccttcgttctttcagtaaggctgtgcgtctctattcgttggccgatatccccgtgtcccaaagtgagttcatccgtgcagtcaaatgctccactggcttttcgcttgactcggcactcgtccgcgtaatatacaaaatatttgacgcaaatgcggacgacaaactcagctatcgcgagtttattgcggtgatgagcgaccggctgagtcgcgggctcaaagtcagtgcaattaatgggaaattaattacctgatatgggaattggccatgggttaattaccctattgacaggcactttcaaaaaatgaataaataccaaacatttccatttccagaagcaacggacagagcaaatgttttggctgaactccttcaaagaatgtgtccggaacaaattaagcggaatt

SEQ ID NO: 66067 - DNA, 721 bp, Heterodera glycines
actgcttcatcccgtcgtttgcaaaaggttgactaattacgggcttttaactttattaccatatgggatcagaacttgaatctcttggctgacctaaaatctcacttcagtgcttttttaaaaattctttttcatgattgaaactattcttctaccttactaaaatatttactatatttactaacaggaactttccgaaatgcgtgggaacaattcgggcgctgttcgtgttcttgaggttgatgagtctaatttgcttcgctggagccttatgctttatccggtaatgttttatacgttatagcaaacaaacaattagattaatgtgctttctttaggaccgtgaaccatacaacaaaggtgcttttcgtgtgaatgttgattttccaactgagtacccattcaaaccgccatccgtgacattcgcaaccaaaatttaccatcctaacatcgacgataagggccaagtctgtctcggcatcattctcgcggagaattggaagccggcaacgcgtgcagagcaagtgatgaacgcgctgctgtcgctgattgccgagccggaaattgctcatccgttgcgctccgatcttgccgaggaattccaacgggacaagaagaagttcttcaaaaatgcaggtggagtgtcttgctattttaatttttcttacaattaattttagaagactacacgaaaaagtatgccgaacgtcgcgactgagtt

SEQ ID NO: 66068 - DNA, 451 bp, Heterodera glycines
actgacaattcatcaaaaggatcaatatcaagcccaaaatggaccgactaaatacgaaccgaaggcggaaggacagcacgtgacgagttcagtaacaaccgcaggtgttcaatacaacaatatcctgacgtttcaaaacattttttgagctaactcaattttttttagttttattctgtggaattgtgtcgggattgaccttttttagttttataatatcaaaataattttcaaaatcccagaagcaggaaagtactcgagttcaagcggacacgcgagttcgtctgaaagtgaggaagaagaccgctgggaggagccaagaaagcggtcgcgaaaccgggaaagagatgagcgaaacggacgccacggggaaggtgaagacaaagcagcgaaacggtggtacaaaagcgacgagtcgaaggaagagaaaagagatggaaaagggagagag

SEQ ID NO: 66069 - DNA, 349 bp, Heterodera glycines
atgattcgttcgcttctcggctcgcccctcgaaacaactccgcttcgccgaccaccagcgggcgattttcgccccgttcgtccgcaccgccaactccgtctgagacgggcgccagtggcgccggagggggcggcagcggagggaaaaaggcgcgcaaggcgaggacaattttcacggacaaacagctgcaggtggcaaaagcgaaacggacaaaattcaaacaattttaattgtttttaattattttaggaattggaaacgatgttcggatcacaaaagtacagaaaaccaagaaaatgcaataagcaaaatgccaaattattgaaggtatttgtcggtgcaggacaga

SEQ ID NO: 66070 - DNA, 253 bp, Heterodera glycines
gcaatttacaaagtcatccagcaacttgatggtgagagattacaaattaattaattttaattgaatacatttaatttaatttctttttagaaacaattcccgagttctttcgagagccccaatttgtggaacttcttgaacaaaacaactaatgatgatcgtgaaaaggaagagatgaaatggaatgaaatttacctgctgcccagttatcccaattaaatagctatttacatatgctaattaaccaattaaa

SEQ ID NO: 66071 - DNA, 831 bp, Heterodera glycines
atggcaagtcaagcggaaatggcaaatttatttcggcaattaacggatgccctccaaaacattgcaacccaaacaaacccaaacccgaataaacaaaattccgacctattcactacaattaattcacaattgtctgagtttgtgtataatccggaaacggattctacatttgacatttggcatgatcggtttggcgctttcatcgagaaggacggacaacaaatgccagacgacatgaaaacgcggttacttttgggtaaaatgagttcacaggattacgcgaggtattctgagagtattttgccacaaaatccaactgaccttggttatcaggcaacggtaaataagctgaaaagcttgttctgccagacaaagtcaatttttgtgaaaaggtttgaatgttttcaacttcagagggcaccatcacaaagcgtaatggactttgccgaacaggtcaacgcctgctgcgaaaaggcgcaaatggcactttcaaaagaggagatcaaggcgctaatttttgtaagcggtttaaattcaggtgatcgagatttacgtgagcgatgccttaaattgttggaggagagtcggacaaagaacgtggcgatcaaattcgtagcaattgtcgaggagtgccgcaccattttgtcacttcgtagtgcagcggcagctctggaacaacccggccaatgtttcaatgccaatgcaattgctttaaaaccccaacaggcaaaagagcgacatagtcggcatcaaaagttcagtccttcatcacgccgtgaaaacagcggaaatcagtcccgctctccatcattgaacattcgccgatcataa

SEQ ID NO: 66072 - DNA, 1920 bp, Heterodera glycines
atgttgtatgggaggaaatttacactattaacggatcacaaaccgttaattagcatttttgggtctaaaaatggcatcccaatttatacagcatccaggctttcaagatgggctttgacactgttcaatacgatttcaaatttagtacatttccaccaaagattttggacaggtcgatgttctctctcgattgatcatgcagcaccgcgaggcacagcagacgacgaccatgtcatcgcaacggcacaaacaattccgatttcaattcaagttcagaagattcaattgaacatgccacggctgccgttgagtatgttttgcatgcaccaattaccggtgacagcaacagaagtggcagagaaaacaaagcaggacgaagagttgcaagaagttttgcaaaattgtcgtaatcattggccaaaaacggcacattcttcccttctttctgcattttatacacagcgtgcacgtctcacggaagttgatggttgtctgctcatgggcgaccgtgttgttattccgagttcattgcgcaaccgcattctcacggcattgcattttacacatccaggaactgtcagaatgaaaagtttggccaaacaattcgtttattggccaagaatggatttggacattgaccggtgggtgagaaattgtcaggagtgtctgtccgctgccaaaatgtcaccgaaagtgccgttgagtccatggcctttccaagcgaagtgtacgaacgattgcacatggatttcgccggcccgtgtgcggatggaaataaatatttggttgttgtggactcgtacagtaagtggccagaaattttcaaaatgaagacgacgactgctcgaattttggtcgataagtttagtcttgttattctctcggtatggctatccaaaagagattgttaccgataacggacagccatttaaatcatttgaaatttccaaattttgcagagaacacggaattcggcacacttttgcaccaccgtaccatcccatgagcaacggtcgcgctgagcgctttgtggacacgctgaagcgtcagttaaagaagtgtggggaaacagattcgcattgggtccaaaactcgttgttggcgtttcgcagcacgccaaacgcaagtctaaacggcaagacgccagctgaattgtttctaggcagtccagtccgcacaattctgtcattagttaggccagacgaaaagaaaaagcattcggacacaactgataagcaataccggcacaaaatggcacaacaattcaaccgccattatgggacgaaacaacgcacgttttgcaccgacaatccagtgcaatttgccaactacaggaacggctcaaaaatgtggttgtcaggaagaattgtttccggaaatggtgtcgtttggcgaatatattccccacagttaaacgcagtggttactcgccattccaatcagatcaggaaatcttttcccatcccgtacagagacagttcagaaccaaacgagcaacaagatcaggatgaacagcaacaagaagcacctcagtcaccacgtcatgtgcgatttgccgacgaggagaatgagccgcttgaacatgtccaaatcattgagccaagacggtcaacacgtcaacgaaaacaaacacaaatatttgacatggacacgacgagagcaaaatacgatcttgtcaatcccgggcaaaatatttaaaaagggagatgttgggataagacaaaatagacatgcattaatttattttctctatcttttcccttcgctattttccctcaatgtcttttcctttctctctgcccgtcgaagtgcataaatagtgactgttcctttcgttctctccccattcattcgcaatttgccttctcttctcttcattcactctctctctcctcagacttttattatttaattttgtca

SEQ ID NO: 66073 - DNA, 708 bp, Heterodera glycines
atgccaaaggaaatggcttcttcaaatggctttatcggaagggtgcgtttgtagcttgttgatcacctgctggtcattttttacttaacagttcgaccattctcccccgaagtttttctttgctgggaaaagcaagcgctggcaatgacaccgctgggacccctcgctctcagatggcattctaagctaccaagtgagcgccattagttttttttttgcgcaatctctgatcactaaatcgcctaaaaatagaaatttgaaaaaaaatttggacaggcaccacgctgagctgattaattatacaaattttgtttgactcattccataaaaaacgagccggggatgccaaaagagagcggttcggactggcgtttccgtttctttcttttttaaaaatttgtcttgcaattttttaactgatttaacctattacagctcaaaaacgtaatttttcttaagtcgggcatccacttaaaaaagtttcacggctgcatatttcagcttgacaatgtggccaatttggaattgttcaccaaagttcgaattttgtccgacggacaaacatttttggaggcggccaactcagtccaaagtgcgcaacaaactgaaggcgccgccaacgaaatgccattcacttacgtggacaaagtgcgcatctgcgacacggccaacggtgatgaggtgaaccaattgaatgcttattcctaa

SEQ ID NO: 66074 - DNA, 686 bp, Heterodera glycines
gactcaacccaccaacatttcaatcactggcactcaatccaccaacatttcaatcactggcactcaacccaccagcatttcaatcactggtactcaacccaccagcattacaatcactggcactcaatccaccaacatttcaatcactgggactcaaccctgcattacaatcactggcactcaacccaccaacatttcaatcactggcactcaacccaccaacatttcaatcactggcactcaacccaccaacatttcaatcactgggactcaaccctagagcattacaatcactgggactcaacccaccaacatttcaatcactgggactcaacccaccaacatttcaatcactgggactcaacccaccaacatttcaatcactggtactcaacccaccagcatttcaatcactggactcaacccaccaacatttcaatcactggcactcaacccaccaacatttcaatcactggcactcaacccaccaacatttcaatcactgctactcaacccaccaacatttcaatcactgggactcaacccaccaccatttcaatcactggcactcaacccaccaacatttcaatcactgccactcaacccaccaccatttcaatcactggtactccacccaccagcattacaatcactgctactccacccaccaacattacaatcactga

SEQ ID NO: 66075 - DNA, 605 bp, Heterodera glycines
atgccattttgccattttagctttgctgccgttgaatcacgagagcttatttgttagccaataaatcagttgcattgaaattctttctttattcacctttcacatatttttttatttccttttttattatttttaagattttatttttgtaaaacattttatttttaattttatatttaacccttaaggatgatcaaatcatttttgtttcgcttttctctttttgccctagcaatacatggtgctgtttcggtttttattggtcagtttttttaattaatttttcttttcaattaaattccaatttcatagatccgatcgaagtgaaacatttggcgctatttttgctcgacttttataaagaattctgtgatcaaaacgaacaatttgccttttgtcttgcaactcaagcgaacattttggacacatttcatgtggaattaaaacatcggagtacggaagtgatgaaaagcgagaagccgcaaaacggcggccaattgcttttattcatcgaattggaaaagcgtttgaaaatgaaaaagcaaaggccggcagaccaaacgggcggcgcaatttgtcgatttgccggtaaagaaacagcttaa

SEQ ID NO: 66076 - DNA, 960 bp, Heterodera glycines
atgtatggcacgtcaaatgtctacggattaactgttgtaatgggaaggatgctcatggaaggcaattctcctctggtcatcccaattcatcccagaaatggtcgccgttttaccagcgaagaaatcacgacggattcggtggattgtatgcaccattttaataaactttttgttctaatcacaaaaacattaagcgaaatgggagagataagagaagaccaaaacaattcaaactattccccaaatattgttcataaacaaaaaatgtcgcagcaacaaatgcagtcgaaaatgtgcaaagataaaacgagcaaaccattaacaaaggttggacaggaggaattagcgaaaaaatgcgtcagtgatacagtatttgtagaaagcaatatactgtaatggactattaatcttacaatttgtttttacgcctccaatgactataaagtcgataggacttttgtctaacaaaattatggattaataacaaaagataaaaaaactttccttagattggatgatggactgtagtagagccgttggaagataacacacaataagcatatgcatactaagaaaaaggaggggcttcaaaaattagcaaactttcctttgaaagagataatgatgatttattgggggggggggggggaaaggggcataaccaaaatatcctttggtgatacgttctgtggttacaaaaaccgaaaatattgaaatataatttttagcaaaatgtttttatagcaggttgaccaacttctttatgaacttccacaacaaaacaaattctcaataaattcgctttgtcaaccgccagagtttcttaaagtgttcagtgatatgcgttgtttggtgggcgaaaaagcagtttttgattgtgtgcttttgggttctccacgccccgagggtgattttcaatttatatctgaggcattatgcctaattatgcttaacttccag

SEQ ID NO: 66077 - DNA, 837 bp, Heterodera glycines
atgaccgcaacaatcacatggaattcaccaaagaaaaatcatgggcctgaagtattgaataataaaaaattatttaaaatattttaatttttagcaatattttcttttgttcgcccaagaaccggcaccgcaatttcagtattggcgccgttttgaaattggaaaaagcaaacgattcactctgactgaccttagccctgacacgaggcaaaaatttataattttaatatatttgataattagggctgctaattttatgtaaatacatattttttttcctggtttctccatagcctaattagtaggaaaaacactttcttttttgtgtttgcgaacaaaagttgggacttttatttacatatttttacatattttcggatttttctacatattacatatgtacatatttttatacatattttggactttttcgtacatatttcgcaatttttcgtacaatttttcatttttttacatattttgaggatttttgagaatttatagaaattttttgtaaaaaattaaaaatttttttgttgaaaatgtatccctaaaaatcgatttttttcaaaaaatgatatatcaaaaattaatttgtaaaatattcaaatgtgattctaagcctattttggtcatttttatggcattttgtgcctatttcacttacgaagaatttttttccaaaaaataaccattaaaaaaattttatttacatattttcctacatatttgaggatttttgtacatatttcatacatattttagcattttttatacatattttatttacataattcgcaaattttcttacataaaattagcagccctataaataaa

SEQ ID NO: 66078 - DNA, 118 bp, Heterodera glycines
ttttgaaagataaataccgtaaacagtgactaattactgtaattatggccgccacaattgcgtcccatgcgccccaaatgaaacaacaaaatgtgcagattgctgaagaagaaacatt

SEQ ID NO: 66079 - DNA, 368 bp, Heterodera glycines
atggataaagttggagagggacactctttgggcgggcatcgacgcgatcctcgcggacgaacaggcgtacgagccgcggtacaaagaggcggcggacgtggacccggtaaattgggggggggggggcgggcggtgattagacttgtttatttaaatggggacgcgagcgacaaaagttcgccgcaaaaaaatatccatagtttttgcaactcgttacaaaggcaactcatataaaggcttacaattagacttgcttgggcctaggggtgcacccatttaaattacataataaaatttcaggaaagaatgcgaaatttctttcattttattgctactaaaattataaattttctaaaaagggttttata

SEQ ID NO: 66080 - DNA, 1273 bp, Heterodera glycines
atgcaaaatataagggaatgctttttagtaatcaccaatataaaatgcattctccaatttgtcttttcacttcttaccattttcttaattcagcaagtaattgcaattattttccgttaatgggcaaaaacaaaactcgtcacttttcagggccattaataaatgaaaaatttacaacaatattttttattttctttttttttttttgccttcggttttctcttattgattctgcgcaacagtttcaaattcatcgcaattaaacagtccaatttattattattattattgttctgttctgttcaaattgcagcagaagtgatacaatcctttagaaaatgaatggttttattgtctaaaaaaatgcagaaatattttaaatttattaattttttgatgaataatttaaataaaaataaaaaagattaaaaacccttttgggtttaggactaaaaaatgcacggtaaaggatattttttaacaaattttaaatttatcttaaatattttttaacaaaaaaatatcttaacagttttttttttatattacgacaaaataaattattatttttattaactttaacaattttttcccatttatttttctccctttagaaatgccgtcattttttgccattttttcattttcgttgctgttcattttgtgccatcattgttcatttgccgcttttttgatcaccaattatccaaatccgttaaacaacgcttcgctgtggaaatgcggcatttcctcgccgggccctttgtgcgacccggactcgctgctcaacgaaacggcacggcacgaggcattggagcttttgaagcagttccaggaccaaacggacattgatgtgggagaaacaatgaaaaaaacaaaaaaaaacatttaaaataatgatatttaaatttaatagagcggatttctcgtttttattgtattttaaaaatccaaacattatttaaggaaatcagaaaaattaaattaaaattccgattattatcatttgtcacatcaaagaaatttaaatgttgaaaaaacataaattattataattttattgaaggacaatggcgatggcagctgcaaaggcaaaggagtgattgttgggttggcgctaacgaaacagccaatcattgcgagggtattaatttttaatttaatgaccaaattaccatggaagtcgatactcattcagtcttcggacttatttggcccattccgttttatcactcctttacactgccgaacaaaatcaaaaagcatattttaa

SEQ ID NO: 66081 - DNA, 854 bp, Heterodera glycines
taattaaatcccttccttcgggggaccgtgccgggttccgcgggggtaagcagtgctggttcggtttcatcacggcaccgaaccttttggctagtcagcaatcgttgcttaacttgccagatcggacgggtgcgcatgattccactgttccaagcaccccaccaaaagcaaaacgatataaccaaaatataaggaaaaattttttaaaaaattttttctccatcttcctttttgatactaaagcatcagagtgctaaaattaagttgtaaataaaatttggtgcgctttagagcactttctgaaaaaaatatttatgaaacaaaaaaatcgattttttcaagtgtccgtttggggtactcaaacatttatggggagcaaaaatccaacgcagaattaaagtacaggctatagggaagctattcccgaaggattcggtctccccataaatctgggcgcatcggttcggggggactgccccgaaaacaaaaaaatcgattttttcaagtgtccgtttggggtactcaaacaattatggggagcaaaaatccaacgcagaattaaagtacaggctatagggaagctattccggaaggattcggtctccccataaatctgggcgcatcggttcggggggactgccccgaaaacaaaaaaatcgattttttcaagtgtccgtttggggtactcaaacaattatggggagcaaaaatccaacgcagaattaaagtacaggctatagggaagctattccggaaggattcggtctccccataaatctgggcgcatcggctcggggggactgccccgaaaacaaaaaaatcgattttttcaagtgtccgtttggggtactcaa

SEQ ID NO: 66082 - DNA, 505 bp, Heterodera glycines
ttggaaaagagcgcaattattggtccaaccgatggcaccgattcgtccgtcacaattcaattcgttacgatgagtcagtgtgacaaatgccgtttatcatcattaattcatttccaattcaggcacactttcaccattttgggctgtgcttctcaaggaacagacatacctggtggaaattatggtaataaggcacaacaaacaattaattgggttattttaaatttcgggtggcgatttgtttcgtcctcttgccaaaacgaccccccccccccctccctcgtaccgctttatcttcgccacattaaacttttttgttttggagagacgtggcgtggtgagtctgaaaatgggacagtgcgaatatttgtaaaacaaatttgttttcaatttcgacaaattttcctttcttaaatgtgtcgctaaaaatgatttgcttttcagttgaataatggacagaatcccaatgaacacgtcacttttatgtgcgatgaaattaagcaaa

SEQ ID NO: 66083 - DNA, 143 bp, Heterodera glycines
atgaattcggatgggatggattgtgacgagatttgtgctttggaagagaaatggaggcgaatgaacgaatcaaaaacaaaggacggcactgaaatgggaagaaagaaacaaacgacggtttttggacgctatgagtggacact

SEQ ID NO: 66084 - DNA, 1012 bp, Heterodera glycines
atgcggtcgatgaaatggcgtgtgcccggtaatcgaaaaaataattaatataaatttaaaaatatttttccaacaaggtgtaatggccaaatttgtgaccaccattcaaatttggcaattcatcatctccgtcgccattctgtgccacctggggtggcttgttttcgtggaaaaagtatctggtttaaaaaacaaaacattccataaaaaattaatttcgtcttttttaaggttagctgtgacttggacacgagagtgttcacttttgctgtcgcaatggacggtatgcttttttcttactgttgttaattatgttggtgtacggtaacgaaaaccgagagaaaaatgaacttgtaaacaatatttggccattaaacataatgttaattttttaaagttatttgtcaaaaaaatttttggtatgggaatttttctacaaatttctgtccaaaaatgatcagtttgtgggcataaattaaaaaaacttctaatgaaattttgatagacatcattagataaatttcaatcaataacttggtttttatgaaattaggtccaatttaaacaaaaattaactagttttgcataaaaacaaataattatatacgactttttaaaaaaaatttaaaatttccttcatatacagtatcgtatctgattctgttcatcaacttcttcctccacgcctatgtgtacggtggtggcaagtccaaataccgtagtgctgatcagaaactgaatggttcttcgctggctgatcagaagcagcccaatgtggacaagcagcgcaatggcaccattctgctgatgggcaacaacaacaatgccaatgaggcgacgccgcgaagggatggctgatcagtgcaagtgatcagcagaaagtcattggatcaacgatcagaaaaaggaaatgccacaattttggaagctattgaccaaaattgaattaattcaaaaggatttgattattatgatattattgtcggctcattttaatagattacccaataaa

SEQ ID NO: 66085 - DNA, 469 bp, Heterodera glycines
atgccggtagttgctgataacttaatgagttaatatttttcgttatcttttttcactttttcaaaattatgttaataaaaacaatcaaaaaaaatttcggcggtgcctttcggtactgtttggcacccaaattatttatctatctaacgaacaataaaaattaagaaatttaaacagaaaaacaaaaaaatatatatgttttgttaaaaaccatcctggtctgattgcaagaaattctttataaaaatttaaatattgatttaatttttactactttttaatattctttaatagtcaaatatatcaaacttgtcaggttaaattctggagttgcacgggaccgggaattttgacaaaaaccgggaccggacttaccgggaccagaaaagtcgagaccgggacctcagttttcgtccgggtccgggaccgtgaaaaagccgtgaccaaccgggaatttattttccaatag

SEQ ID NO: 66086 - DNA, 279 bp, Heterodera glycines
atggcggtcctggtgagttatttattattattattattattatttaatttaataagtaagtggaagcaaaataaaattaattttagatgataattatttcttttataaatcattcatgtagatcccatgatttgttgaatgaatatgagcattaaaatctgtttttttataatatttaatttgtttgcaattcgaagaccaaaaactaagattgtttcattaatagttcattcaaaattaaatttattcttttgccggttcattagtttagaaaataaa

SEQ ID NO: 66087 - DNA, 705 bp, Heterodera glycines
atggtttgtctgttttttttaatatttttattttatatggaatgaaaattaaatcctaagttaaaaaattaaatttatgagttaattgtattatcatgttatttctaaaattaaattaaaataaatatacattattaggttttataaattttgagttcgttttttctataacttccttttatcattttgatttatcattacaaataattgagaaaatatcctgtaatttaaaattttttaattacgataataataaacactgtttttttaatttctataattcatttcaaattcaataaatttgctcttatctaattggtttttataattactaaaaaaaaatatttttaagtatttttcatctttaaaaatgataattagcttatccaaacaaccaatacacatggaactgccacttgttacttacttaattttttaattttatctattactactttattaagatcggatatttatttgaaatccacttgtagagtaaagaacagcaaccaaaaccaagaaatggtctcaagaatttattttcatttatcttacaacttttaatctatgtatatttttaattttagcataaattattataaattcgtttatatgtttacaaatcttccattttcaagttaccggaattatcttttttattatttttaattattatgctttttaaaatttttgcgcttgaataaa

SEQ ID NO: 66088 - DNA, 499 bp, Heterodera glycines
atgaacacacagagatttgcagttgggcctatccgagcggtgggtcgccaacccttctcataacaatcgaattaatgttattggaaaagcttggcccatatgcgttcgtcacgtaaccctaatttttcaacaagaaaaaaaacactccttaaatttagttttggtctttatcaagacttaaaggaggatcaagtgataaaaaagagaattgtgtcacttctttattgataaacttggaaaaataattgatgtattttttggtaattggaaatttcgcaaatcatccatcatctcactggcatcacgctgggaaatatgtcctcttctcttaagaaagtttatcaaagaataccagcataaaatgaaaacgggaaaagcaatgagatagtgggcaagcaatagaagttgtatgaggaagttaggatggtcgcttttgttttcaaatgttaatacctgtagaatgttaattaaagagcctaaaaagacacaatttaataaa

SEQ ID NO: 66089 - DNA, 369 bp, Heterodera glycines
atgagcgctaaaattatcagagtgccgaaaatcgcatgtgatctaagcctagcaaaaaatggtgtaagtaaaaatcgtaattacgctcaaaaagctcctcaaacaattttagcgcttccaattccttctacaatcgcctttatacatcccattatgagcgctaaaattatcagagtgccgaaaatcgcatgtgatctaagcctagcaaaaaatggtgtaagtaaaaatcgtaattacgctcaaaaagcttctcaaacaattttagcgcttccaattccttctacaatcgcctttatacatcccattatgagcgataaaattatcagagtgccgaaaatcgcatgtgatctaagcctagcaaaaaatggt

SEQ ID NO: 66090 - DNA, 414 bp, Heterodera glycines
aaaatggtgtaagtaaaaatcgtaattacgctcaaaaagctcctcaaacaattttagcgcttccaattccttctacaatagcctttatacatcccattatgagcgctaaaattatcagagtgccgaaaatcgcatgtgatctaagcctagaaaaaaatggtgtaagtaaaatcgtaattacgctcaaaaagcttttcaaacaattttagcgcttccaattccttctacaatcgcctttatacatcccattatgagcgctaaaattatcagagtgccgaaaatcgcatgtgatctaagcctagaaaaaaatggtctaagtaaaaatcgtaattacgctcaaaaagcttctcaaacaattttagcgctcccattccttctacaatcgcctttatacatcccattatgagcgataaa

SEQ ID NO: 66091 - DNA, 673 bp, Heterodera glycines
atgacaagcacggaggtgcacaacgtgatcgcattcggtggcatggccagatacgtggagaagaacgtcgaccgaggttttgtgcacattttgttggggattttatacaattttttctgcaacagccagctcacccgatttaaaaatttacgttatttttttctttgctaaggaaccgtccgatttagggattttactttttccttgctaagggaccccatccattttaaatttacgtttttttttgctaagggacccgtgtttacttgaccggacgtcttcactacactggcggtcagctgaacgcggacgggtcgcgctccccgcgcatttgttcagtcaacttggagagcatctacccgttgtccaagccaggtgattgctaaactctatgcaaaactttaaattaaaaaaaaattgtaggcgcgatgtacagcctcggcggcggcggtggtggcgcttctcgcgaaggtgctgatgacgggcttaaggattgaatgaatgaaatgatatcaattgttttgttgttgatgcggacaatatacctatgtgttgtacgcgagcccaattttttgatttttgataaattttgacacaccaaaagcaaggttatactttgtcaaaatgtggaaaaataccatatttccttttgttaagtcctattttcaataaa

SEQ ID NO: 66092 - DNA, 2602 bp, Heterodera glycines
atggacgccttccaacaatttaaaagggaggatggacaatttcgtcatccattcacaatgattgtgtctgggagcacaggaagtgggaagtcagagtggataatgcgtctgttgcgaaatgtagacaaaatgatctctacccctgttgaacgcgttatttatagctatggtgagttgaacacaaatgtgatgaatctgcagcgcgccggcaaagttggcaatgtgccagtcactgtacacagcggcgtcccacgcgcggaacaagtgcgggagtgtgccaaaaaagtaaaaaccttgctggtgctggatgatttggtggtgggtatgagtcaacaatatttggacgcactcttcacccgtggctcacacaattggggcgtcagtgtcattttggtaactcagcacctgttcaacaaagagctgcgtgtggcgcgcactaattcacactatttagtattaatgcgtaatcctgcgggggcgttgcagatacgcaccatcgccacccacctcttcccgtcaaggactgcccattttattgaggcctaccgggacgcatgcgcaaaaaattttggataccttctcgtggacatgcacccagagagtccggaagagatccgccttcgaacaaatatatatgaacaaaaacaaatagtttacctaccaaaatgaaagggtcacaaataataacaataaataaatgctttttggagacactgtgtaatgccaaaaaggcgaaagcccttattcgatatgcatccgatgagcaacttttgtgccttgtcgaaatctgcctaaacattctaaagggccgagtccctttgcgtccccggtatttgaataagctgaaagctcatgcacaggtgcttcgtcgtctcgcccgcacacgctgctcgcgctctgccaaaaaggttttgctacaacacggagatggcctcccagctattgtggggctcattgcgtcaattgctctcccgcttattgctgatgtcattgaaaaatataaatagtttccaaaaaattaaaaacaagaaaaaatgcagcatacaaagcgctatttgttagtccccgaagagatttatcagagtttggcagcaccgccaccatctgacggaacaccaattgggctggtccgtacccgaattaaacaaataaaaaatgatgccgccataaatgaggcggaaagggcagtcaaatatgagcaggaagttaagcgtctcaacaagctcacaaaggacgaagatgaacgtcccgtgggtgttaaattagaaaatttgagtgatgtggttgacgccatgccaaaaccagtcaacgttacaaggccaattgttgtttctacgcgtcgccatcttaaagttgggcgtgcgcaaaaagaaaatgttgaacaattagaagatactgatgatgatgatgattatcaaaacccacggtcgtcaagttcaaataaacgacaacccacacaaacggaaatcttaaaattaatttataaaaacgcccaatctctaggggtgtcggaggaagggcaagttttgagagccggtgggcgtccatttataaccagcagtgttgatgacattgttagtcacctgttgaacaaggacaagcgtggccaaaataaagagccaacggcattcaaagaatttgttgaaagggcaaggcagaatccgctcttgagtaggcatttatttcccgaaggccaatccggcaaaggaatttataaaaacaccccacttaagtttaagccatcattatggatttgaaaaagcttcgcttgctcgagtttttgtacaaggacctaagttcgcctgtcgcattcacgagcgttgaaccgctgctgagagaggcgcggaaaagtcaaccaaaaatcaatcgaaacgatgtccaaaattatttgaccagccaacgtacatacacactgcatcgccaggcgaagcggcgctaccgccgattgccaacattggcgcccggcttgcatactgaatggcaggccgatttggctatttttgaccgaatcgctaaacaaaatcatggcttcaagtacttgttagtctgtattgatacccttagtcgacaggtgtttgccgagcccgtaaagaccaagacgagcgctaacatgatcattgcctttgatcgtatattcaaaagatcaaaatatatcccgtggaaggtgttaacagatcagggaaaggaattcactgcccgggcagtacagcagttcttccgcacaaaagacgttgaacacttttgtatgctcacttctccccaatttcatgccggaatggcagaacgtgcgaatcgtagcatcaaagagcgcctttaccgctacttcacggagcgtaacacgtacaagtggattgatgttgtgcaagacattgtttgcgcaattaaccactcgacaaattcgagcattggaatgtgcccagcagacgtgaactttaaaaacgcagaagcattgcgacaaaaattacatgatgccgttgaaaatgttgtacgacgcaagccaaaataccgtgtgggagatcgcgtgcgcattgaaaagtacaagcacgtgttccaaaagggttacctcccacgcttcaccaatgaacttttcacggtggcagag

SEQ ID NO: 66093 - DNA, 1058 bp, Heterodera glycines
atggacttacaggacgccaacaaagagaacaaagagccaacgaaaaagcaagaggaggaggcagatgatcccagttggatcagcctcattgacgaggagatgaagcgcgagccgctcgctccaattggtgaggagacgcccgcaacaagttgcttttgttttaaacgtatatttaaatttaaatttaggcactccaaaaaaatgtgcatgtgccgaacgccgtcgccccgttccgctcgtggaccacctctgcaagcggttcaaatgcaacgcccacgagctgcatgtgcttttcaaaagcctagagaaacgccgggacattgtgaagcatttgcgctccgtccaactgcgcaccgcccacctgcgcccgtccgtgcgcaattttccggtccgctgtaatgacctgtccatcctggacacccactcggcccccgcgtaccgaggctacctcggcataacggtatttttatttgttttgtttgtcggtaacaaaaaatttaaaggtccggatgcactattacataaaacatggcatccgcttgcgccaccccaacttgccatgcgtcgttgaatttggaggcggagatcacaaaacttttttccctcttgaaattttgtccattgttttgtagatgtgttcaatttccaattgtactgttgtttttaaaataaatgttcaacctttatctcgggagcaatttttggcaattgcgcagcgtggcgtaaacactgagtacacaaccccagccgcttccacgcaatcatcatgcgcatacgtgcaacaacaacgactaaaactgtggcagcactggtcttccaatcggcgcgtgtggtcctcaccggagtgccccacccaagcagcgacgtagaacaaggaggcgtgggaattctttaagcaaatggtgaccacctttcacagctactgtgccattggcggttgggcccacggcgtgcgcctgttgttgcaggagttgcgcaagctggcaacctctgcggcatcgtccctgacgctgacgtcaaattctctgaagccaccgccgcagctcccattcagttcg

SEQ ID NO: 66094 - DNA, 247 bp, Heterodera glycines; identical to SEQ ID NO: 62022

SEQ ID NO: 66095 - DNA, 346 bp, Heterodera glycines
aatgtctctctcttcgaacggattgtctccattttatgtgtttttggtgtcttcgtcggactgttcgccttcctctggtcactggtcattctgtttgatttgttctccggttgggagaataaacctcggtgggctcttccggcattggcattttccactttttctttggcatcggtcgccgctgtcatttatttgttcagaggatgcagcgaaaatgacagtaatcatttaaatcaatttgacccaattaatcgctttggcctggtcagacttcgtctcccatttgacctcctccccgtcttcgccttcgtcgtctcccgtcgcaaagtgttccctccactacagt

SEQ ID NO: 66096 - DNA, 971 bp, Heterodera glycines
gcaggtatcagttctttctccaacttcggcacgacattcaaacgggccgtttggactgtcctcgagaggctgtgatcgatttggctgcattggcattgcaatgtaatcgctgatcagagaccttaatgccaaaaatggtcactcactttccatcttatttagccgagttcggtgacttcagtcccaaagagcactccatggaatttgtgtcagaatttcgctttcacccggcccaggacgagcacatggaacgcgacattttgcacagctatgccaccaaatgcagcggaatgtcgccctcccaggcggagttggcatttctgaacaacgcgcgactgttggacttctacggggtggacatggtcaaaaaacaaacattcataaattaatttaatttttaatagggaaatcctgtttttttttgtaaattagaaaaaatgccattttcagcatccggtggagggccgtgacgggaacacctaccgactggggctgaccccggtcggcatgcaagtgttcgacgggcgccagaagatcggactgttcgtgtgggaaaaaatccaacggttggactttcgtggacgaaaattgaccctcgtggtggaggaggacttggaacagccggtgagccaaatatcgcaattttggggggtttatacagtcagaaggatgcttatccaatttcatttaatttttgaaaatttgtccgtttttatcatgagagtatcctgcaatgtatgatagtctgactggtaaatgctcgagtaatttgccaatcccggtggatccgatcagtcctttcgggattagtctcgactcatttctccgtccaaataacttctaagaggaattcaaatctctttaatacatccaaaataatttattattaattttctttaattgattaaccccaagttgccatttgctttcttatctgttttcgttttttggcattttccctcttttcccat

SEQ ID NO: 66097 - DNA, 885 bp, Heterodera glycines
atggcctatgattatggaggctttaagtctgagagcaattgttcatgccccaattcgcagcttattgccaccaaattcattgtggtaattaatcattgtatagatggttcaattaaaatgaaagtgacaaaagacagcgactttaatattaaattattatttttatttattttaataaaattttattttcgcgtttaggctgaatatgactgtgatgatgatcatgatagcgcaaaaatattgggtggaatgcgaaagatcaatcgtgcgggattgtccgccttgaccggcctcggcctttcaagcccgcgacagagttcgttctcaatgcagaagaggaaatatgcggaggtatagaattgttttatatttgtttgtattcattttttttaaacgaatatttaatccaaaatgtttgataattcagtttaaactttaattagatgttgtccaaaagagtttggaggtgcaattcaaatgtgagcagtgtggccaaattgtgcacaaaacctacgaaattcgccagaatggtaccaaatgggacactttcggccgtcacacggacatacatccggtgaaaatcagtggacccatttacaaccgaacctacgaggacgttgagcgcatttacgatgacatgtggtcggactacagcgtgggcaccagaaacaccaaggattgggtggaggaaatgatccatcgtctttaagaagagatcaaaatgatcgggcaaattatgccataattgattgccctttgggccgaattcttatggaaaattaacatttattcattgcgagttacatcaacgaatttatgacattttacattgccatttgcgcttttgagcttactttgctttgtttattttaacaaaataataaa

SEQ ID NO: 66098 - DNA, 133 bp, Heterodera glycines
atgactgaatctgacgaaggcaccaattgggttgagtctcatccgtgccgatgtggtgccaaaaattggacagccagtcacatggagcgtgtgatggtcaaactttgctgcggtagcgaagaagtccaaaact

SEQ ID NO: 66099 - DNA, 676 bp, Heterodera glycines
atgaatgtaattcaaagtaaaactgtaattaagaagaaatcccaatggaaaccgctggagataggaagtaagtctgagagattaaggaacaaagtccggaactttcagtccaaaacgagattttttgttcagcaacgaaaattccggacccagaagaattgcctttcggaattgtacagactgcattccgagcttcagatcggatgcgcacgacctcagaagattcggccgagtcttttgacgcctatggaccggagtgggaagggaagggacggggaattgggaacagaagggaattcagttcgccaaatatgaccagttcggggagacgaatgagcatcacagaacgcttatttggacgtccagtgccccaagaacgaagaaactcattgggagaggaacaaatggggcaggaaaagccgaaaagcatcgcggaggtttattcgctaattattctccctgtattctatttctattacagaacaaagacttcaaagaattaatgaagcgtcagcgaaaaattttgggcgatgatgagtggcaataaagaaaggcaaaagaaaagaagccattagaggaaaacaaagtcggaatggatcaaagggtagaaaagggaatgacaatttatttatttgtttatattatttaacacttcttctgatttttcaataatgaa

SEQ ID NO: 66100 - DNA, 582 bp, Heterodera glycines
atggccttggccgggtttgacacgtcaaaagagaaaatgccggacaatccgtgcgataccatgctgatcaatgcattaataatggcatggtaagtccaatctggcattagcatctatttaattttatttagcagaaaagagttgtataaaatggaaaaataaaagttatggattaattaattttttaaacatttaaaattaatttaaaatgaaaattaaatacaataattattccttggttatataaggcttattattagtttatatattttttgattgtttaatttcttaatcaaattaaaggaaaaagtttgatgacaaagacgcaattattttaattgtcgctggtaaattataccgagactatgagcaatatcagctgaattatttgatggaaaatgttggaaatgttaaattggcgttttgacctttttaattattttcatatttgtactttgttctccacgccctttccccccttctcattgtgtttataaggagaccattcccctcctttttggtccttccctcattcattcgtttttattatatttttgcattgtccaccgaccaatcaataaa

SEQ ID NO: 66101 - DNA, 528 bp, Heterodera glycines
tcgaatgaacgacgaaacggacgaagtgaaagtgccaacggcgacaaaaaaaagaaagtgaaagtgaagaagggcccggccgactgtacgacgcatttgcgcaagcggaattggtggcggaacggcttaaattgttggactacgagcgcgaatttgtgcccctcggcgacagccttaaaccaattccgaggcaaatgccgatgaatgaatgccatgccaacgaattattttttgattttaattgtttttttaattatttaatgggtcagacattacttcgccctctccacaaacattggcgagcagttccatttgttcaccagcctttgcgcgtggctcatcagaaagtcgggcgtcgatccatcgatggaaatgccacacgaatttgacgaccctaacgcaacgatcgcacaaattttggaatcactgaaagcgaaggtggcgggcggggggagacggggctaaagagaaactgtcgagactcttgaccgagcttttcccccaacaaatcccaattaggatttgcat

SEQ ID NO: 66102 - DNA, 358 bp, Heterodera glycines
atgaacggctacagcattctgtgtgtcatgctgctcgtcgagctggtggtcgtgccaattgtcaatgggtcacccgttgtgtaagttgtgtggtgtgccatgaaaaaatcgacaaaatttttgtgcttaatgagtttggcatttttcttgatttttaatatttatatatagaaatgtattaatttaactttttattaattaattagcttaatatttcagtaagtatcaattaggaaaaagaatatcgtttctcaaaattattgagcaaatcttgcggctaaatgttttactatttcaatattttttgacatttttagaatcaaaatttttactattttttctattcaacttttattga

SEQ ID NO: 66103 - DNA, 186 bp, Heterodera glycines
atgactgccatcggagtaccaatcaaaatattgcatgaagcagagggacacattgtcacgctcgaaaccacaattggtgatcaaagccaaacagatgaattttgactgaatatttcaggtgaggtatacagaggcaagctgaacgaggccgaggacaatatgaattgtcagatgagtgatgtgacg

SEQ ID NO: 66104 - DNA, 1037 bp, Heterodera glycines
atgcaggcaattctaacacaaaagaaccgtacaaagcttcaacacaacgggcattcatacatttttcacaagccgagtgccgatggtgaagttcgcttttggtcgtgtgaacaccatcacgcaaaagacatccgttgcaaagggcgccttcacactaacctcaacaacaacgttttgcgtgaagttggaaaccaccaatgtgaaccaagtgcagctcgaatggaagcgcaacgagtaatcactaaaatcaaacgccgggcggaacagacaatggaaccaccagcgacaattcgctctttgtcactgcagaatgtggccacgccagtccttgcgcaactccctaccaagaatgcgatcaaaaaagttttttctcttttttttgttatgagatttttgtgcttaggtaatcaagcgtgtacgtcatgaaataaacgcaccaccgccaattccaaacacgctcacagacttaatcatcccagacgcatacaaaatgtatgggcgcaccgaagaacaaactgaacacgatttggcatttcattgaccttctgcgaaggatcaaaagttatcggatgatgacttcgcgaagtgttcaactggacaagacccaccgcaaaaggcaaagaaatatcgcgaagcagaccgccgaattctcacgatggttcaaaattatttaccactcaacaatggagaccccaatgtttttccacttgagcagcgctttaatcatctatttatcattacctttttgatcggaatttctcgaaattatgaaatgagaccgtgatttgaaacagataaaatgttatttaattttcttgcttgtttgaatagtactgtttattaatattcatactttggtagggaaatggcccaaatgccttagtagggaaatggctggtagggaagtggcggtagggaaatggctcgatccctttgatgagaagcgtcaaagtctgatttttaatgacgcatagtgacttcagaatcgaaaatttcaatacagaaatgcttttttgagctcctttttttcaaataaa

SEQ ID NO: 66105 - DNA, 90 bp, Heterodera glycines
ttttgcaacctcttcagaaagggggacataattggagacagggcctttaatggagacggggggattatttttcaacagatttttaatgac

SEQ ID NO: 66106 - DNA, 341 bp, Heterodera glycines
  unsure (1)..(341): unsure at all n locations
agagggatttgcagccgttggttgcttgacaaccccattcggttattcttttttttaatagatatcatttttggttaaggtttggaggggttggccatgtggtgcaaatagatgaggcacttattgcgcgtcgaaagtatcaccgggggcacagagtgcgcganatttggttgtttgggatgtatgacgtgcacaccaacaattggagtggttcgcatcgtaccagacagatctcgcgctacactcttgccgataattgagaatttgtggtggcagggtccagcatacattccgatncaatgggcgcatacatgggtggcgcaattcagccatccctgtca

SEQ ID NO: 66107 - DNA, 356 bp, Heterodera glycines
ttatttttttggccttcccccaacaaaacctgtccttccgcttgtcccaaacacaacaacaatttacaagcaatggcaatgtttggcgtttggagggacaaaaaaagcgaaaaaaagagaggaaaataatggacaaaaatggaaacataatgacaattggtaactcataatctaattaattaaatattcaaatgatggaaagaaataaatgaaagtgaaaggcgtcggcgaatttttggtcatttcgccccgagggaaagagcgccaacgaaacgcgaatgaatcttcggcgcggctggtcaattgcacaagggttgggtggatggatcatcaccagcgccagcatcatcagcaga

SEQ ID NO: 66108 - DNA, 477 bp, Heterodera glycines
atgagagtcgatttcaagtacgcacttgccattcaagtacgaatccatgctatgcgctcaacattcaaatcaaaaacaagatttcgtgcatttgagcatgaaccgatcggtgagaattacaaaattcggaaaaaaccctaccagcagagctcgtttttccacgatagcttttttctttggcatccaaatccaacaaatgctctattaaccttaccaaaatcgaaaggattatcaagcctggaaaaattttattaagaaaaaacttcaaaaatctcgacttttttaggttttaactaaattttttgctcaattgttttgaagaaaggagctcaaaaaacgcatttctgcattaaaaattttcgattctgatgtcattatcgttcactagaaatagaaatcactattttggcattttgtcactatttttttcactatttcgacattttttggaaaattccttaacaaaaatgcaataaa

SEQ ID NO: 66109 - DNA, 65 bp, Heterodera glycines
taaggtaaacatttatacttttaaatgataaattaatgaaattcacactaaaaatgaaacacaaa

SEQ ID NO: 66110 - DNA, 809 bp, Heterodera glycines
gaccaagaggcccgctccccttggacatgcatttcacgttttctgccttcaactcagacaattatgcaattttctgagggtatttccagtcccgaaatcataaatattcattttcctattacaggccgagctccaacccccgaagatcgaattgtttacgtctgtggctcttttgaccttttccacattggccacctttgcttcttggaagaagctcgtcgtcttggcgattatttaatcgtcggaatatactcagaccaagtggaccaataaacagcttttcctttcaatggcatcttgaattcaattaaggacgtcaattcgtacaaaggacagaattacccaattatgacactccacgaaagagtcctcagtgttttggcctataaggtacctacgtttccacttaatgttattaccatagtaatccattctttttccaatcagcccgtttctgaggtcgtcatcggcgcccctctgtgcgttacgaaagaattgatcgaccgatttcgcattaattttgtggtgcaaggcatccgaaccgaacaccacactgctaccgaggaagcagattgttatgaggtgccaaagtgagggaacaaattggattttggcattggaattgcattttaaggcatttgggaattttcaaaacggttgattctggaaatgagatgacaacggaacgaatcattgagcggatcatcaagaacaggcaatttagtttatttcaaaaggattgacaggagggaccttttgctaaagattggaattcgaacaacgcaatcgtgcgaaagagaggaaagaaa

SEQ ID NO: 66111 - DNA, 508 bp, Heterodera glycines
atggttgctcacgaaggtgtgatcagtggccacttggacaggccgttttcgaacggcgccgccgccgccgctgctgctgtgcatcaccagcaacagcaacaacaattgttccatcaacgacatcaccaactgcaacaacagcaacaccaccatcaccatcaccaacaacaacaacatgctaaacaacacccttcctcatctgttggtgattgtggcgaagaacctatggacagcgcgagtggcgcgggcacattctgtgccagtagcagcaccatcagcaacacaaccagctcatccaacatggtggagaagtgcgagccgagcacggtggcggacgaggcgggcgaaccgatgccggcgaacattgccagcagcaacagtgggaacaacaccaacaacaacaacgccatgatggagtgcaacagcagtaacaagttggagatgggacagccaccaaatggatcaacaacaacagcaccaaaacagcacccatcaacaaggggaacac

SEQ ID NO: 66112 - DNA, 84 bp, Heterodera glycines
  unsure (1)..(84): unsure at all n locations
cttaagttaaaaatataagaaaattatattctgaaagagaacaaagaaagctattgaatgataccacgaaantattaatttggt

SEQ ID NO: 66113 - DNA, 170 bp, Heterodera glycines
cttaagttaaaaatataagaaaattatattctgaaagagaacaattaaagctattgaatgataccacgaaatattaatttggttgaatttgagccaagctattaatttaattattttacccattttttgttttcaaacccattggcagttttaacaaacgcgccagcacg

SEQ ID NO: 66114 - DNA, 306 bp, Heterodera glycines
atgaagaacgcgagaatttcactcggagattcgataagcaaatttttaatccaatttcgaacatttggggcttcaattcgttcatcactttcaaggcaattagttataaaacaattacaaatggtaaaaattaattaaggaattgatggacacgcgaaacggactgtacaataagaaaaatacagtaaccctgggcattcaatttactgtggaaggcgaagacggaggtgaacaacaagcgatggaagccgactgaagaagcatttcgaaacacaaagcttgaagccggacactatcagtaccaaa

SEQ ID NO: 66115 - DNA, 126 bp, Heterodera glycines; identical to SEQ ID NO: 54981

SEQ ID NO: 66116 - DNA, 3320 bp, Heterodera glycines; identical to SEQ ID NO: 1013
  unsure (1)..(3320): unsure at all n locations

SEQ ID NO: 66117 - DNA, 894 bp, Heterodera glycines
atgtgccgccgtcggcggcaagggcgcagccgcctcaccgccaagcagcacaatgttgctggacgtgccagtggttgttgttggccggcacgactacgacacgtacagagactcggtggaacggctgaaagacaccggtaagcaaagcaattaattaaattaattttataatccttaattaccctcattaccgaaaatatcctcacttaggctttgagcttggcctgttaaatgtggaggcggagacggaacttgtccaactgcggccgcacattcagcaaatgatgtgtgaacaccaaattttgccgtacgacccgggcccggactggcgctttctcgactgtgagtttaattctgaaaactcagcgggggtccggcacccgagtcccaaggggtggcattgatcagcggcattttggctagcgatatggcctgctttttttaaattttgcctcacaaattccgtcaatgccttttctcagatgtgtccaacgcggaggagggcactttccgcgtgtcgcgtcaccaggagcagagtcggacggtggccgacgtgtgcacattggaggcggaggagggcaccagcagcagagcgggcattttcattttggacgacgctttcccttcaatgagtgcccgggcggcggccatcggaggacacgaattggtgttcacaccggccaaaatgaggtgacatccaacaccactttcgtccctgatttgaaaaatagagaaaaggacaaatcattttccctgactcaaacggtccccggttttccgattgatcgggctcagattttgatcgatgttcgagccaaagcattttccttggcattctcccgatctctgattatatatggtcccgaatcgactttgatctggaaattaccttaa

SEQ ID NO: 66118 - DNA, 252 bp, Heterodera glycines
caaagctgcgtgaagtcggcctgcaaaagcacttgcggcgacaatttgtcggaaccgaagtgcacggaatgttacgacaaaccgcacgaatgtgcgccaaaataacagaggacggaatgccaaaacttgaaatggaaacgaatgacaattaattgaggatgaggaaaaggaaaaggagcaaattaatcggaattaaatttaattatttttcgtattttaatttgtggaattcaaagaaaatgattaaacaat

SEQ ID NO: 66119 - DNA, 2930 bp, Heterodera glycines
atgaacaaagcttttgcgaccatcgttctgctcgttgtactgctcgctgtcgaggtgcagaacagatcaagttggtgtaacagttttttctcagcaattttctttaaactttccatttttagtcgtcaagcgcgccaaccagcagaacgcatatggagacgagccggtggtgccctcgggtgcgcatcaggcggcaccggcaccagctgagcaaaacgcgccaaccgtgcagcagccgagcccggtaagcccgccggagcaagcacaggcaggcgctcagccgagcccgaacgctgcccccactgcaacacagccgcaacagggcgaagcagcagcggtaccgtacagcggaggagcgaacgcgggcgcacagccctcaaagccagcagaagcggcagcatcggccccagcagcagctgaacaagcgccagcagctgcacccgcgcaatctcagcctgcccaagctgcacccgcaccggcaacagccgaacaggcacctgcatctgcagcacaacccgcagccggcggatacgccgcagccaacgctggtgaacagaaaaaacctgcggaatctgcccctgcaccgtcagcggctgaacaggcgcaagcggctgcaccagcacctgcgtctcaacctgctcaatcagcacccgcaccagctgaacagccggctgctgcacccgcaccggcagcggccgaacaggcgcccgcagttgcagcacaaccagcagctggcggatacggcggagccaacgctggtgaacaacaaaaacctgcggaagctgcacctgcaccggttgaacagccagcagctgtgcccgcaccagctcagcctgctccagcacaacccgcaccagcccaagcagcgcctgctggatatgggaatgctgccgaacagccaaaacccgctgaggctgcccctgcacctgctgcggctgaacaagcgccagccgcagcgcccgctccacctcaacctgctgaatccgcgcctgcaccagctgcagctgagcaaccaaagccagcggaagcagctccaacacccgcagcgcaacccgcagaacatcccgctgagtctgcacctgctcaacaggcagccccatcgcctgctgcaagctctggttacggcgcagcagccgcggaacagccgaaaccagcggagtcagcgcccgcacctgctgtggctgaacaagcgcctgcgcccgcacaatcccagcctgctgaatcagcaccaggtgcagctgcaccatcggaagtgaatattttgcatgactttttgaaagttatttcctttaatcgttagggaccaaaaccggaaactgccgagcaaaagcccgtagagcaaccgaaaccatcagaagctgtttcttatcccgcagcctcaccgcctgaggtgaatatattaaaaaaacaaaaatactttttcactttaggcgcctaaaccggcagaaaacgcgccgcccgcttcgaatgccagcccgactgaagcagggtcagcatcagctgcagctgcgccttccggaggtgccgccgtttacggaaatgctcagccatctgctggaatcccgtcagtcagtgcaccaacttcggaggtaggctattaaaattctttaaaatttttctattttttacttttcagggttctgctgctgccccgccgagtgaagccaaccccgctcaaggcgaacagccagcacccgcagcgcaatctcaagcccagcctgctgaagcagcacccgcaccagctgcagcggaacaaccaaaaccagcggaggcagctccagcaccagcagcgcaacctgctcaagccgcacaaccagctgctggttacggaggagctgagcagcaaaaacctgccgaagctgcacctgcaccagctgccgttgaacaaccaaagcccgctgaagctgctcctgcacctgctgtagctgaacaagcgccagccgcttcacccgctcaatctcagcctgcccaagctgcacccgcaccggcagcggccgaacaggctcctgtagctgcagcacaacccgcagccggcggatacggcggagccaatgctggtgagcagcagaaacctgccgaagctgcacctgcaccagctgccgttgaacaaccaaaacccgctgaagctgctcctgcacctgctgtagctgaacaagcgccagccgctgcacccgctcaatctcagcctgcccaagctccagcttctgtttacggaggagccgagcagcaaaaacctgccgaagccgcacctgcaccagctgccgctgctgcgccggcacctgccgaatccgcaccagctcagtccgcaccctctgccgcagcaggttatggcggcgctgagtccgcgcccgctgccgcacaacccgcaccggccggggcaaatgctgctgcaccagccgagcagccggcacccgcgaacgccggtggaccaagcggtgctgctcccgctccagaagcctcggcgcagccccaaccgtccgcctcggcaccggcggaacaggcaaaacctgcggagtccgctgccgccggctcgcctccgtatgcgggcggcgctgcgccaaaaacggcacccagcggttacggtgcctaagtgttgacaacaacgaggcgactggggacgactgactactgtatgggatgatggattacggtggatctcttagtggtacaaaaagacaaaaccaaaacaaatgatcagtgatcggaagagaatggagatgagtgggagagattattggctgatcgtccattactcagtttatgccactctcattttatgtcccattgattgtgccgtgcccgtctttctcccaaggcattgtttttgttcacctccccccttccttttttgccatcgtttcacattatttccaaatatttttattttttgcatttcgcgttcatttttttgtaatcattggtataataaa

SEQ ID NO: 66120 - DNA, 3836 bp, Heterodera glycines
cggcagcggactccgcaggttttgcctgttccgccggtgccgaggcggacggttggggctgcgccgaggcttctggagcgggagcagcaccgcttggtccaccggcgttcgcgggtgccggctgctcggctggtgcagcagcatttgccccggccggtgcgggttgtgcggcagcgggcgcggactcagcgccgccataacctgctgcggcagagggtgcggactgagctggtgcggattcggcaggtgccggcgcagcagcggcagctggtgcaggtgcggcttcggcaggtttttgctgctcggctcctccgtaaacagaagctggagcttgggcaggctgagattgagcgggtgcagcggctggcgcttgttcagctacagcaggtgcaggagcagcttcagcgggttttggttgttcaacggcagctggtgcaggtgcagcttcggcaggtttctgctgctcaccagcattggctccgccgtatccgccggctgcgggttgtgctgcagctacaggagcctgttcggccgctgccggtgcgggtgcagcttgggcaggctgagattgagcgggtgaagcggctggcgcttgttcagctacagcaggtgcaggagcagcttcagcgggctttggttgttcaacggcagctggtgcaggtgcagcttcggcaggtttttgctgctcagctcctccgtaaccagcagctggttgtgcggcttgagcaggttgcgctgctggtgctggagctgcctccgctggttttggttgttccgctgcagctggtgcgggtgctgcttcagcaggctgggcttgagattgcgctgcgggtgctggctgttcgccttgagcggggttggcttcactcggcggggcagcagcagaaccctgaaaagtaaaaaatagaaaaattttaaagaattttaatagcctacctccgaagttggtgcactgactgacgggattccagcagatggctgagcatttccgtaaacggcggcacctccggaaggcgcagctgcagctgatgctgaccctgcttcagtcgggctggcattcgaagcgggcggcgcgttttctgccggtttaggcgcctaaagtgaaaaagtatttttgtttttttaatatattcacctcaggcggtgaggctgcgggataagaaacagcttctgatggtttcggttgctctacgggcttttgctcggcagtttccggttttggtccctaacgattaaaggaaataactttcaaaaagtcatgcaaaatattcacttccgatggtgcagctgcacctggtgctgattcagcaggctgggattgtgcgggcgcaggcgcttgttcagccacagcaggtgcgggcgctgactccgctggtttcggctgttccgcggctgctgcgccgtaaccagagcttgcagcaggcgatggggctgcctgttgagcaggtgcagactcagcgggatgttctgcgggttgcgctgcgggtgttggagctgcttccgctggctttggttgctcagctgcagctggtgcaggcgcggattcagcaggttgaggtggagcgggcgctgcggctggcgcttgttcagccgcagcaggtgcaggggcagcctcagcgggttttggctgttcggcagcattcccatatccagcaggcgctgcttgggctggtgcgggttgtgctggagcaggctgagctggtgcgggcacagctgctggctgttcaaccggtgcaggtgcagcttccgcaggtttttgttgttcaccagcgttggctccgccgtatccgccagctgctggttgtgctgcaactgcgggcgcctgttcggccgctgccggtgcgggtgcagcagccggctgttcagctggtgcgggtgctgattgagcaggttgagacgcaggtgctggtgcagccgcttgcgcctgttcagccgctgacggtgcaggggcagattccgcaggttttttctgttcaccagcgttggctgcggcgtatccgccggctgcgggttgtgctgcagatgcaggtgcctgttcggctgttgccggtgcgggtgcagcttgggcaggctgagattgcgcgggtgcagctgctggcgcttgttcagctgctgctggggccgatgctgccgcttctgctggctttgagggctgtgcgcccgcgttcgctcctccgctgtacggtaccgctgctgcttcgccctgttgcggctgtgttgcagtgggggcagcgttcgggctcggctgagcgcctgcctgtgcttgctccggcgggcttaccgggctcggctgctgcacggttggcgcgttttgctcagctggtgccggtgccgcctgatgcgcacccgagggcaccaccggctcgtctccatatgcgttctgctggttggcgcgcttgacgactaaaaatggaaagtttaaagaaaattgctgagaaaaaactgttacaccaacttgatctgttctgcacctcgacagcgagcagtacaacgagcagaacgatggtcgcaaaagctttgttcatttttggaatactttttgaatataaaaaagaaaatctaaatgtgatcagaaatgtcatttgtcggcttattggggatataaattaaaaaacattgtggcaccacaaaaagccgaaataggaatggcataaatcattttttggtttttgggaaagggaaaagcgctaaaaatttgcacaaaaggaggcgatgcgacgcaatgccgcgggcatttgggcaaatgaatggctgctgatcacttgagcgggggcgagtgactgatcagatagaggcgggacttgctcaatgccccgggggaaagagacaaaatttaaattggaaaaacgatcggtagaagaaggcccgaacaaatgtgcttttaaaataagaaatgttgctttttaattgcaattttgatcagaaaagcgattccgtccaaaaagcttcatccgggcgcaataaactgggttaagtattggtttctccgtcgtcccaattcgggcggattatcctcccctccaccgggggatcgtccctatcccaaacatgattgaaatgactggttgttctcctgcagctgtacagtgtttttggagggctttgggtggaatcgtcccaacaagtcatccatcccatcggcagcttttccaatttatccatccgatcacctctcactctctgtgcccccatattcggcggtggcgtccaaccggtcaaccttcgtcgcccccgccgatcacgtctttccatttccagtagcagcggcagacaattgcaaagtgatcgatggattttggtgggatgggatggactggattaagctgctaatgatgatgattatttgggacgaatttgccgcttcttcccatttgtcccatgactgccggggcggggcgaccgacggacggacaccgaaatccgccgccacacaccattcatcggcaggccaaggtgttggctaaattgatggctcacctgctgccgccgccgctgcagcactaagaccaaaatgcgggccaaatcggctgctgatcggtcggtcggccaatcgacggcggtcccagtggccagaccaacccctgccgactgacgacgacgacaggacggacagaggcggggggggggaggagggaaggaggcagagcggacttggattgtgagcattggcggggaccgcggcggtatttattccctcccgccccattcatcaaacccaaagccattaattcattcatttatgcatcattcattgaacccctcggggtttcccttgggtcggctgatgtccccagagggaacaatggaagcggcggcggagggggggggggagaaga

SEQ ID NO: 66121 - DNA, 638 bp, Heterodera glycines
atggcttcccaataccatcggctgaaccaatcgcccgtttttcggacgcccgggcttgccaagctgttcagtcagaagcaggaacaactacatcggcagcagatgatgatggccattctgaacgaggcgcctgtggacacaccgccgctgacggacgacgaggattacggtaaggaaaacggtgaagagatcacagggactgacggatacggtagaattagcaacggcaatagacagcaaaaacattgttagttatttacctttccgtttttcattattcagtttaatttctcattctttctgcgaattacagtaaacgttggagaatgtattatgggatacggtagtgcagccaattcttacattgaataattatgttactaattgataatttttctaattaattagtcgacgaaatggaggacgagtgctgttggcatcggctggtggaggaaggacagcgccaagcgccggcgaatttgcccctgccgacgaatggccacggcacggcacagccgcgccgaaactcattcagctgtgcctcaacaaatacaaactcaaattagtgctttaattacatctctctcgattttttgttgtataattttgaattttgcattttttaaaaagcaaataaa

SEQ ID NO: 66122 - DNA, 342 bp, Heterodera glycines
atgcgctttcgcttccgtcgctgtgttctgctgctgctcggcactgtgcttaccgctcttctgatcattttgctggtcacacaacggcacactgtaagtacagtatacggcagggtacggtagggcgcggcaaatgctcttccgtgcctttgacttgttaccttaggaatttggcacttaatttcccgctagcttaacaatagttcgtcatctcagagtaccaatcagcaaggcggtcattcatcaaacggagacgaaatcgggacaaatgagggtaattaatgctgattatcatcattaaaagcaattaaccaaccatttaattatcttctggccaataaa

SEQ ID NO: 66123 - DNA, 564 bp, Heterodera glycines
atgcttttaagccccgccgtgaggcgggacagttccaaaattttgtaccacattttactgtggaaagtccaagtaccttattggacaactacgtgtcaatgagcacagtcgcctttggcctgttgtggaacggaaaatggaaatatcagatggggtgcgctcttttctaaaaattcctcttttcgtctaaccatccctcccttttgtgcactatttcgtttcaaaattgaatcatttttttttgtcttttgaaataaattgtgaaaaatatacgaaaattattttagcttttaattatgctgtacaatgcttttaagccccgccgtgaggcgggacagttccaaaactttgtaccacattttactgtggaaagtccaagtaccttattggacaactacgtgtcaatgagcacagtcgcctttggccagttgtggaacggaaaatggaaatatcagatggggtgcgctcttttctaaaaattcctcttttcgtctaaccatccctcccttttgtgcactatttcgtttcaaaattgaatcatttttttttgtcttttgaaataaa

SEQ ID NO: 66124 - DNA, 390 bp, Heterodera glycines
gcttaaaagcattgtacagcataattaaaagctaaaataattttcgtatatttttcacaatttatttcaaaagacaaaaaaaaatgattcaattttgaaacgaaatagtgcacaaaagggagggatggttagacgaaaagaggaatttttagaaaagagcgcaccccatctgatatttccattttccgttccacaactggccaaaggcgactgtgctcattgacacgtagttgtccaataaggtacttggactttccacagtaaaatgtggtacaaagttttggaactgtcccgcctcacggcggggcttaaaagcattgtacagcataattaaaagctaaaataattttcgtatatttttcacaatttatttcaaaagacaaaaaaaaa

SEQ ID NO: 66125 - DNA, 1115 bp, Heterodera glycines
atggaaaataatgtgaatgatatagagataggcaaagttggagaaatagcagaagaagaagaagaggaagaagaagaaaaagaagaagaggaagaagaagaggaagaagaagaggaagaagaagaaaaagaagaagaggaagaagaagaaaaagaagaagaggaagaagaagaggaagaagaagaggaagaagaagaaaaagaagaagaggaagaagaagaggaagaagaagaaaaagaagaagaggaagaagaagaaaaagaagaagaaaaagcgaaagaggaaaaaacggaagtaaaaccaaaatggaaaatttaaaaaaaaattaaattaaattttaattttaagctaccaaataaaaatgtgaagaaaaattattcagaagaaaaaaagcaaaaactcgtgaaaaaactattgaagctaaaagaaaagttaaaaggaaaaattccacagcaaaaaattgataaagcatttgcgaataaagtgggaagagatttcgcaacaattcgcaaatggaagcgcgaatttggactaacaggtggctaattatgcaacgataatgtaattgatacaaaaataactaatattcagaaaaaagacgggaatattcgactaaagaaaaaggggaaattgttgagaaatttgcccgattaaagaaagcatttgccaatgaaaaatgtgaggaaaaaaagacggcacgagaaattgactcaaaaattgaaaaaataattggctttggcattgcgacaatttatttgtggaaaagggaattggccttaaccggtaataaagcagcaaaggaggggaggaaatatttgacaaattattgtaatattattccattaattaggccaataattatatcaaaataatacgaaaaatttaatttcagaaaaatgtccacgtaaaaaatattcgtcagaagacaaaatgaaaattgtgcagcgatacgacgaaatgaaggcagaaacgccgtacctccgcttgaaggacatcgccaaaatgttggaagtgccggagagaactctcatagcaatgagaagggaactaagcacagagcaaagcccaaaagcatcgagtaattaaagataaaagggcaattaagacgctaatta

SEQ ID NO: 66126 - DNA, 104 bp, Heterodera glycines
aggttggcttttcttctacaacatccaacggcagctacggactgttcgattggcccgagaaaatcacccgccgtttttcccctgggctatgtctgattcggatg

SEQ ID NO: 66127 - DNA, 660 bp, Heterodera glycines
atgaaaattgtatactgtaattggaaatcaggtaggttccttcacaaaccaattaacaattaaaagttttcagaaaattttactatagtaaaactctctttcgatctctcatgcattttcctctaccgtattttctcaccagcagtgagattaaatcattaaatcaataatgatcactatatatatatatatatatatatatagaaaaaaattatttttcttttttaaaattgaacagccagtgacaaaaccgtaagccaacaaatgcccgcggttaagccaaaatttcaatacgacgaattgctggaacccgtgcttgacgaaatcgaacatttaattcgcatttcaatgttttattttgacgagaatttcaaacggactgaaagttacaaattgaaaggcttttcccaattggaaacgaagccaattttgctgaacgaaaaacagttgaaatattttcaaaataattttcagaaaaattcggaagtgaaaattcggaaactttttgaggtgaaaatgagcttaatgttcaaaaatacgaaggaaaatgcggagaaggagaaggtcgaaatggaagaagaaacggacgagcaaaagtggaagaaataccgaaacaaatttttgggatttttgaattcgccattactcccaattgtgtga

SEQ ID NO: 66128 - DNA, 817 bp, Heterodera glycines
  unsure (1)..(817): unsure at all n locations
atgctcgccttggccgttacatcgccatcaatgaagacgacccacgccnacatcgacaaacctcccngatgtgaagctgttaacgtatcaaatggacagcgcattggtgagacatgcggtggctcaggatcttatgcgacgggagactgcagccgatccggaggaactgcagcagcctatctacttggatccggtgcaagaattcgaagcacaggttgttttatctatcctcatagaaaagacaagaaatgggtatcatctttatggtctttggtaaagggatggaacccatccctatgggcattggtaaagggatggagccctaatatcccttttcgtttcattaaaataacgacaagtgttttaaagggtggcgtcatcaccgctgatgacgtgcgtgagttaacgcgcggattgaccgctcttgagctcgatgcgaaagttagagcattgaaggagaagaatgaccggatgtatgaccaaattactgcgcgccttcgacaacagaccgacgcaattacgcggctgcgtgcgcttaaaagcgtgcgacgtcgtagaccagcagttgggcaaaccaagaaaaagacttcagtcagtggaactggtaaggaaaaagtataatcaaaaaggatggctgccatccctttagatgtgatccatccccctagcaagtggtatggggatggtttctctcccagacaattttttaaactaaatattttagttgctgccaaaagacagaagaccgtcccgagaaatgatcaggagattgcaggccgtcatcgcaaagttatcattgacgattcatcagaggaag

SEQ ID NO: 66129 - DNA, 1139 bp, Heterodera glycines
  unsure (1)..(1139): unsure at all n locations
attctgcgctgaatgaggaggagcctcaaattcggctggaaaaatcgaacattgtccttcttgggccttcgggagttggtcggtttttcttttttttcattctattgagtttattcgtgttgttatattattaaggaaaaacatttgtcacccaagtcttggccaggatactcgacgtacctatcgctttgtgcgattggtaatattcaaataaacattttaaatcatttaaattacttcttccatttgctatagcacctcaatgacccaagcgggctatgtgggcgaagacgtagagtcagtgctgcaaaaattgctgcaaaatgcgcaagggaacgtggaaaaggcgcaacgtggcatcgtatttttggacgaaattgacaaaattgctgccactcgtgaggcgatcagtcacgcgtacagagacgtgagcggagagggcgtccaacacgctttgctaaaaatggtcgaaggtcagcaaaacattaaaaatccaaaatatcagtaacaaaattttcaaattaaataattataaaggtatagaattttactgctttattcgcttctttgttacaatactaaatttctaggcactgtcgtaaatgtgaagacaggacggaaaggacagcaggtaattcgagtgccactttcttgttaatggaaaatgtttcattcggaggaatctgtgccgatggacaccactgacattctcttcatcgcaagcggagcattcaatggacttgagcgggtggtcagccgacggttggacaaacggacagttggatttggttggaacatcttcttaatctttgtgtagaaaacgaaggattaaaggtgctgcattgctggaaaatagcataacggacgacgacaaagaacagcaggtgatcaaccagaagcgggacaaattattcctccaagcagaccaaggcgatatgatcaaatttggcatgatcccagaattggtaacctttttgaagaatccaaatttaacggaactgcatctctttaggtcggccgtttccctgtactcgttcctttccacagctttgacaagcaaatgctcatccgtgtgctgactgagcccaaaaactcattacttgcccaaaatgaaatttcaattctcaatgngataacgt

SEQ ID NO: 66130 - DNA, 1455 bp, Heterodera glycines
atgcgtcagattaccaaatgcatgggtggtctgcaaaacttgcaggatttgcccaccaaagtcgcactgccgaagagacttcacatcaaaacgatgacacagtacaacgcagaggtattgtttactgttgcgcaaggacgaaagccccaaaaccttacaaaactttaattgtattacccttaattttagtttccattccccattctgttccctcccgtgtcccatcaaaatgtgctcgctgaatggctcagtaaactgaaagtgtctcaattccattgcgcaggtttcaatttatcatttttaaatttatttttaataaaatgttttttagagtccgaaaagtatgcccatgtgactttctttttcaacggtggacgagaagaggcatttgagggtgaagaacacgtgatggtcccatcgccgagggttgccacttatgacaagaagccggagatgaactgtgaaggcattgcggacaaagtacgaaacgggtcatgtttagggatggtctgggttaattctttgaagaaaaaacagaaaagcgcttaaacaacaccaaatcggggtatccgcccaagcctcgaaaatcctaaatcctctgtgaccatcgctaaggcagttttttcgggagggggggggggggagggggggagacccacgatttttagagagtaaaaaacatgaaattgtttccaaaaaatgtttttggcatttcaattttcctctacttttaggtggtcaaacaaattgaattaggcaagcacccgttcatcatgtgcaattttgcagcacccgacatggttggtcacaccggtaaatttgagccgacggtgaaggcgtgtgaagcgactggtacaaatccacacttttgtttctcatttttagatttaatttcccctaattttctaagatgtggcaattggacgcattttggaggcatgcaaaagtcacggttatgtgctgttggtgaccgcggaccatgggaatgcggagcaaatgatagccaaggatggcggcccacacaccgcccacacgtgcaacaagggtcagttttcattaactgtaaaagcttaattttgaacactcattttttgcatttttcagttccgttcgcctgctcttccacctcacactccttcaaaagtgcgccgcccatcactgcggagggtgtgccccgggcgcgagcattgtgcgacgtggccccgactgtgctttaccttatgggactgactaagccggaggagatggacggtcagaacttattgggaacggcggcgaattaagagagagagagaggcaaatgaaataattattaggacgattttcactttctcctgctgttgttagaattgatgttctgtcatggacttgattggtttattgttaatttcactctgatctcgttttgaaatttattttggcgggtaagaattttttgttgttgttttgaataaa

SEQ ID NO: 66131 - DNA, 1298 bp, Heterodera glycines
atgattaataatcacttagtggaaaacaaatgtgtgctgattgttattgacggatggggactgaccgaggaggaacatggcaatgccattgcaaatgcgaacacaccggtgatggaccaactttgttccggcaattggcaacagttggaagcgcatggtgaacatgttggacttgataaggagcgtatgggcaattccaaatgtggccatctgaacatcggagcgggtcgcgtgattgaccaggtttttaagattaaattaagacacattggataacgcatagtcacattttggcaatatacaatttaatttttagtcatcaaaatttttagtgcttgttgaaatgtggggacttcttggttgaaaaaaatcgtgtaaactgcaatagtgatgaaaatcggcaaacttttcccgaggttttcagagtcacatttccgaatccctattcagaaatataaaaatgtttttacgctaggcatcatattaaaataaattgctgtccaattgggtctctattttttcaaaaatttacaaaagtgccacttttcaattaacacacaaatttcaattgaataatcacaacctcattcattcataatttttctgtttaggacattattcgcatcaatttggcagtgcgcaacggacaactgattgagaacagggaagtgatcgacgccgcagaacaagcaatcaacggaaacggacgactccatttgttgggtttggtgagttttataaaaaatcgttttttattccattttctccaatcaaatacaaaaatgttcagatcagtaacgccggtgttcactcacacataggccatttgtttggtctgttgcattccttcaaacaattacaagtgccaaaagtttttgtccatttttttgccgacggccgtgacacatcgccaacgagtggaggtaaaataaaaaattcaatttaacaaatctgcgattatatatgctcccgccatttttagccggctttttgcaacaactgcttgacttcttaagtaaggaaaaatatggcgaattggcaaccattgttgggcgttattatgccatggaccgtgacaatcgatgggagcgaattaaggcactcattttcgaaaaaaatatcattttttggattttcatttttcctaaaggttgcctacgaggcattggttggcggagtgggcgaacagtgcgaaccggcgaatgctgtacaattggtgaacaagcgctacgcaatccaagaagagactgacgaattcctgacgcccatcgtgttttcggacgaagcgcgtgtgaaag

SEQ ID NO: 66132 - DNA, 517 bp, Heterodera glycines
atgacattcttttttaccaattccgaatcacgaagccgagttcgaacaaaaagtcgaaaattcaaaacttttttgacttatcatttgctattgacataaatagtgtattttagggaattgcatctcacagagtcaatcaaatgccaccggagaaggataaagcggccaacattgagccgacgggttccgattaccctgacagtgaagatgaaagttatattttgtttatttaatggtcaagatttattctttttttcattgtttagtggcaattttggaatggtttgacaagccgatcagcgaagacattttgaacctttctgtaattttactatttaaaaaaaatttgtgtacattttggtccattcttttttagaaacatccaccgccacaaaacaaaattcacaatctgcaaccggctcgcgaaaatgatgatgatgatttggatatcattgcatatatctgcaaaaacatgaacgagggatgggggctcggctggggtttaatgcattattaa

SEQ ID NO: 66133 - DNA, 1124 bp, Heterodera glycines
atgaaactgaagccgaacccggtgaagcagcgcgagcatcggactcgtcttgaaaaatacatcaactccgaggcgtgcgctgatgacactgcggtttttgacatgttcccccattgtgctgatgattttgctccggtacgcctctttttttaatggtataatcgacaatttggcaattgtccagttcgtgtccacttatttgttatggttttcaacacattgacaccgcgaaatagtgtatatcatagaagttcagtgtcttgacaactcgtacaataggcaaccgtatatatttgctttgggtttattttgtaaagtttactattgcgcgttttgcctttacgagttgccatagactcaaattttcgaattcaaacaatatttaaccaaaaagagtatacacagaaggggtcggtcaaacaaacataagcaacatttcccttaccatttgcttttgtcataaattgtttattttagggaattgcatctcacagagtcaatcaaatgccaccggagaaggataaagcggccaacattgagccgacgggttccgattaccctgacagtgaagatgaaagttatattttgtttatttaatggtcaagatttattctttttttcattgtttagtggcaattttggaatggtttgacaagccgatcagcgaagacattttgaacctttctgtaattttactatttaaaaaaaatttgtgtacatttggtccattcttttttagaacattccaccgccacaaaacaaaatcaccaatctgcaaccggctcgcgaaaatgatgatgatgatttggatatcaatgcatatatctgcaaaaacatgaacgaggtatgtggctccgctgggtttagtgcattattagggcttgaatcgttggtccggttcggacttgacatgcataaaaagtgatctaaacgttttggtgtatctgaggctatttgttggaaaatttgtgtttatccctctaaaatgctaattggcatggaggctttttgttttgtttttttttaatgggggtgctgtatgctgtaccaaaaccacgcgcgacaccgttgctctaaaaaattgtttgtttgccaaatataagacaatacgaacatcgaaagca

SEQ ID NO: 66134 - DNA, 243 bp, Heterodera glycines
atggacggaaaggacgtggacaaggacgaggtcaacacgatgaagacgatgcagttcaagcgaagtgagcagcaaatgccactgcggaacggaagagacattcaattagctgacttgggaagagcaaacaaagaggacctgctcaaaaaggaagacgcgtcccggacagacgacaatctgacggggagtctgatcagcaaaagtcactttgatctgaaagccaaacaatcaatcggtcgctga

SEQ ID NO: 66135 - DNA, 937 bp, Heterodera glycines
gtcaatgcgccaatttatcccatcgccatgaaatacgactcgcgcttcggcgacgccttttggaactccagcgagcagagctattttcgctacttgctgcagatgatgaccagctgggcactgatctgccacgtgtggtatttgccaccgatgaccaaagaggtggggtcaaagaaaaatgggtggggggggggggtggggtcgactccggtacatcccaaaacaggcgccgaaacacagccgggaataaatttttaaaaaatttttaaacagaaattttttaagaaaaaaatcttagaaaattttttcttaggaaattcgaagggaaaaaaaatttcaaaaaattttccagtgatttttttgattttttttttgaaaaaacttagttattcaccattaaattttgaaaaaatcgctctggaaaatttttcgagaatttttttttctttgaattttctaaaaaaaaatttttaatacttttttttgaaaaatttctaatttcgttaaattttcagcgattttttggaaaaattttgaaaaatcttagtaattcacaataaaaatttcaataaaagagtggttaaatgaccatgaccttgtggtaactcggtagaataagggggacggacaaaattccgccaccgtaatttcgccgggacaaaatttcgccgcaaaaattaaaaaaaaaattgaacagaaattttttaagaaaaaaatcttagaattttttataagaaaatttcaaaaaaaattttttgaagtcgtcatcacaaaaaaaaaagtcctatgttttttagcccggcgaatcggccatcagtttggccaatcgggtgaagaaggcgatcgctgtccgtggcggacttgtcgacttggactgggatgggcagttgaagcggtacaaagtgccggcacggatggttgacgaacagcgggaaag

SEQ ID NO: 66136 - DNA, 469 bp, Heterodera glycines
atgcgcatcggttcacgtgctttctcggcactgatcttcttccatgacagtcacaacaaggcacagagtggcggtaattacatttcaaaaatttttatttcatttaaaaaaaaatttttttttaaattttttccaatcaaaaggcatttgcgtggccaaccacacatcgcccattgacgtggtgatcctcggctcggacaccgcctacgcgctgatcggacaaaaacacggcggcgtcatcgggctcatccaacgggcactcagtcgtgcgtcgtcccacatttggtttgaacgctccgaggccaaggaccgctcgttggtgtgcaaccggtgggtgtttgtcctcaaaaaatgtggcctaaagttcctcaaatttttcattttcactgcaattgtgcaagggatggaatttataaaatatatcttagaaatttattagcgttttctattatgatgatactcatttttt

SEQ ID NO: 66137 - DNA, 879 bp, Heterodera glycines
atgagccatcgtcaatttttattgcaaaattcgatgccgattttcattcattttttaaaatttatttccgtccattatttatccccatttcccccaaggcattatcatccgcgagacgtccatccagcacttggacgagcaggaccagtaccagcagcaggagttccaattccaaacgttcgtcaattcgcgcggatggcaaggcattcgggactccatgtacttcataaaggtgtgtgtgtggcatggcattaatttttgcggttatttttaaaaatttaatgacaaaattcaattttcccaatttttgttttgttttttgcaatttcataataattttctaaattttatatatttttttaaacctttgaaaatctcaaaatttctttgaatttcaataaatttaaaaattattttacgaggattttttctaaaatttttttaaaattttcgttattcacatttttttaatcatttttttaattgcaaatttttccccaacttttcaaggccggcgttgaggcgatcattgaggacgaagtgaccagccgattcaaggcaaaaagggcccaaaaaatgattatttatttatttttattttttaaaaattttttccattcaggccgagcagttggcctcgtggaatatgctgacacggaccagcgtcagcttctaccaatttctgaggtgctcaaaaataaacaaattaattaatttctctttccatccaaattggcgggcatttttttttttgcgatagtttgacaaattttccaacaatttttcctgcttttggcgaggggcgtcagtttgtcataaaaaaattttctatgaaaattacaagaaaaattttgcaaaaacttagtcattcatattaaa

SEQ ID NO: 66138 - DNA, 168 bp, Heterodera glycines
atgtcccttttgctgttgtcggccacggctgagcatctgctggtgctgtccgccttcttcttcccgcccgctctgctcattgtgcttttggtcgtcgttttggccacttttggcaaatcgttgggcctccgcgagcgctatgtcagcattttgatccgaatttttgag

SEQ ID NO: 66139 - DNA, 655 bp, Heterodera glycines
atgattttgcaattggcaattgacacagcgaatgaatggcaattaaatgaaattatggacgtaataattcgagaaatttttgatcaaaatttagaggaaatgtttaaaaaagcggaagaaaaggcaaaaaaggacaaaccatcgagagcatatacaataaataatgacaaacataacataattttatattcaaaattcgacgatcaaaatacatgggtatgatttaattaaattaaaataaaaaataaattattacccaattttagtttaatgatgctttgttttgaaaaaaatttacgaaagaaaaagattcgaaattgaatataattcgcaaatatgatggcacacttacgacaattcatttcttactgttttctagtccaaaagttttacctaaaaatgcgcttttttctaaatttagttaaaattataaaaaaaaatttcaaaactacgttttcggaaaaaccattattttggttttttgaattttcaacaatctttttcgttggttttacctcttttttttttactttgtctgaaaattctcttatatatttttttggataaatttagaaattatttgtgggaattaatcattttttcggtattatttttaattagtaccctaatttaaagtagataatgatttagacca

SEQ ID NO: 66140 - DNA, 671 bp, Heterodera glycines
atgattagaagaggtggaacaatgattaaaagaggtacaacagtgattaaaggaggaacaaaagtgattaaaagaggtacaaaaatgattagaagaggtacaacaatgattagaagaggtacagcagtgatcagaagaggtacaacattattagaaggggtacaaatctgattaaaagaggtacaaaagtgatcagaagaggtacaacagtgattggaagaggtacaacagtgattaaaagaggtacaacagtgattaaaagaggtacaaaagtgatcagaagaggtacaacagtgattagaagaggtacaacagtgattaaaagacgtcataagtgattaaaagaggtacaaaagtgaattaaaagaggtacaacattgattagaagaggtacaacagtgattagaagaggtgcaacagtgattagaagaggtacaacagcgattagaagaggtacaacagtgattagaagaggtacaaaagtgattagaagaggtgcaacagagattagaagaggtacaacagggattagaagaggtacaaatttgatgaagaggtacaacagtgattagaagaggtacaacagagattagaagaggtacaacaatgattagaagaggtacaacagagattagaagaggtacaaatttgatgaagaggtacaacagtga

SEQ ID NO: 66141 - DNA, 971 bp, Heterodera glycines
  unsure (1)..(971): unsure at all n locations
tgtgaaccctcttctgatcactgtgnaacctcttctaatccctgttgtacctcttctaatctctgttgtacctcttctaatcactgttgcacctcttctaatcacttttgtacctcttctaatcactgttgtacctcttcatcaaatttgtacctcttctaatctctgttgtacctcttctaatcattgttgtacctcttctaatctctgttgtacctcttctaatcactgttgtacctcttcatcaaatttgtacctcttttaatcacttatgacgtcttttaatcactgttgtacctcttcatcaaatttgtacctcttctaatctctgttgtacctcttctaatcattgttgtacctcttctaatctctgttgtacctcttctaatcactgttgtacctcttcatcaaatttgtacctcttctaatccctgttgtacctcttctaatctctgttgcacctcttctaatcacttttgtacctcttctaatcactgttgtacctcttctaatcgctgttgtacctcttctaatcactgttgcacctcttctaatcactgttgtacctcttctaatcaatgttgtacctcttttaattcacttttgtacctcttttaatcacttatgacgtcttttaatcactgttgtacctcttctaatcactgttgtacctcttctgatcacttttgtacctcttttaatcactgttgtacctcttttaatcactgttgtacctcttccaatcactgttgtacctcttctgatcacttttgtacctcttttaatcagatttgtaccccttctaataatgttgtacctcttctgatcactgctgtacctcttctaatcattgttgtacctcttctaatcatttttgtacctcttttaatcacttttgttcctcctttaatcactgttgtacctcttttaatcattgttccacctcttctaatcattgttgtacctcttct

SEQ ID NO: 66142 - DNA, 639 bp, Heterodera glycines
atgattaaaggcattattatgctcagttcgccagcggatgagtcattttttgcccaactcgataaatatgatattccggtggtggtgattggcaaagttgaaggtcaatatgcccatgtttattctgtcgataccgataattttggcgacagcattgcgttgaccgatgcattaattgaaagtgggcatcaaaatattgcctgcctgcatgctccgcttgatgtccatgtttcggttgatcgcgttaatggttataagcagagcctggctgcgcataatattgcagtgcgtgatgaatggattgttgatggcggttatacccatgaaactgcattaaaagcagcacggcaattattaagccagtcaccgttgcctgaggcggtgtttgccactgacagcctgaaattaatgagcatttatcgtgcggcagcagagaaaaatattgctattccgcagcagttagcggtggtgggttatagcaatgaaacgctgtcatttattttaacgcctgcaccgggcggcatcgatgttccgacgcaggagttaggtcaacaaagctgcgagttattattccgcttaatttctggaaaaccgtcaccacagaatattaccgttgccacgcatatgacgctgaaataa

SEQ ID NO: 66143 - DNA, 380 bp, Heterodera glycines
atgccaaaacaaaacgaaatcgttttaaaatattcctttctggacttgacttggtttcttgatatcgaagctgttttctacgctatttctaaaacggttataccaaaccccagatttttgaatccggttttcagaaaaaatgccttgtggtgaaaacaatatttcacatttcactccataactttgtgagttcggcacggatcgagaccgggataagaccattggaaagagcagctcgagctctacaagaaggtatggaaagaaatagttatttctgggactttttcagaaatcagaattaattctccaatgtggcccaaattttaggcccccagccacagccccttgcttctcccagttttaagtcttggatttgtcaa

SEQ ID NO: 66144 - DNA, 1132 bp, Heterodera glycines
atgatggaactggcttctttggctgttcctttattgaaagatgatggtcaaaacaaacttttattaatgaaattgctacaaaaatgtgtatcacactttttgtgccgtgcaaattttttggatttaaatgaaaaaaacaattttgaacttgaaaaatctaaatggcatgagttaggaaaaatccaaagtgctttttgtaaagaaatggagaagggggaaattttaaaagtaacggaagaaaaaacgaaaaatatggcaattcaatttgccaattattttgaagagatgaaaataaatgaagaaaatattcgaacgaatgttcaaaatgccaatgataaatttgtaaaatattttggaaaggaaagcgacaaaattcttaagaatcttttcgatgcatttaaagtgttcgttgaatcaggtaaatttagacaattttgggtttttatttctctcaatttttctattaaattttcagtcaacaatcaaaaaatgtgccgttttcggcaccaaatttccatcgcaaaacatatgcaatcgttggctacagaacttctccgaagtgcattggcaacagtaattgaaataattaacaataaattagattccctccattctcatgagaaattctttttttcgcacccaattatatggtacaatgttcgtacccattcttttaggttactgtaagtactgctggtctccaacaaacacaacgacgccgtaagcgcatgcacagttttgacggtgttcagcaaccacggcaaagtcaagccggacgaagccaagttggagctgttcagcatcaggagcatcgtccgaactggagatgcaactgcgttttgacgatcgcttttctttcccttggcactttattttacgccttttttttgcttatccaaaaagcaagtgaggcccacgcattgttctttctgttcgccttcataacttttgttttgagtcttggcacatatttcaaattttgctccttaatttgtcaatgattgaaaagaatggaggaaaaaagcattggccggcggagcaacattttttggaattaatcccattgtttgtcacaagcatttataaaaaaaattaaaatttgtcttttttctgttccgcatgaaacaataaa

SEQ ID NO: 66145 - DNA, 1124 bp, Heterodera glycines
atgagacttttaatatcgaaaacggggattttggatgtcacaattacgaggcaccacaaaagttggcacagttttttgtttccgactcttttgaattttgttgaatttaagatttgcaatttcaagaatcaaagagaaatacttggaattgaaggtatgtaagtaatttatatttaaaaaactttttctcataaaactcattccttattttgaggggtagcttgtcttataaattacaaatattttgaaacgcgaagaatggaaatgcgtaaaagttttcaaattgggcatgaactctgtaaaaatgtgacggcattcaaaagagaattgtttgggttggtattcaaaacaaatattttaaatcactgcatacagtgccggaaaaaagtttaaaaatttttaaatttttgtattttacttgggaacaatatagaaaatggtttgttttttccgaagcgcattttgaatggtgcgcatacgtttgatagcaaaaaagtgaagagggaattaaaattcagtaaatggcaatgagcttttgtttaacatagttaattctttattttcgttaaacaaaacattttctatcgttaattgttcccaagtaaaatacaaaaatttaaaaattttagttcgttgcataaactttccggcactgtattttgtttgtaattatacgcacataaattacacgattagttgaaaatgtgtttttctctttgcttcacaattatgtgaaattttcaaaatattcgttagtataagggctctaaagcctataaaatttacaaaattttcaattatgcataaatattataaatctgttcgcattttttgtaaaattcttttaaaaaaccatgccaaaattttacgtgaaattttctagttttgaaattaaatattttggaattttgcagctccttgtaaacttatttcttgaagatttcaaatcatttctgtcattaataccgactaaataatccactcgctcctttgttgcctctttgtaaatttagccctgtttgcacataaccgaaaattggtccaactatccataaaatttatggcatataattacaacctataattattcgtttttaattatattttaaaattttgcaatttaa

SEQ ID NO: 66146 - DNA, 979 bp, Heterodera glycines
atgatcaggcgcacaaattttgcgtgcacaacccgaaggggagattttgtctcccggggttgggaatcgaaaaaagattttacagagcaaggaatcaattcggatttgaatatttaaaggttgttctaaatgtcgaattgcatctcaatattattaatttaaatttcagaaaaatttaacaacatttccgtttccgtaattttaatgcgagaagataaacaatttttgagggatttaacatttaatcgaaaggcaattagcattgttgaacatttaaattaatttttattttttgcttttctccaatgtttacgtgccgaaaccaatgtttagaaggaatgatttcgcttttggcgttatggcatgcgattctttgctgattacggcacaagtgtcaacttttgcttttgtattgcttatttgatgccggatgacgcaactattttttacaattcgaatttccccaagtgtcagtcttttttcatctttttcaaaatcaacgagcataaaattaattgtaaaggctgtgaaatattgaaaaatcttttggcttcatttgaatttagacacctgtagccgagaaggttatttgcccgagtgggtaccgttacaaatgattaacggggcaatgactctcgattaaaccgcggacgcaaatggaatatctgcaagaaaacgagataattttcaaattggatttcattatatctattgctgaccatttataaattaagtgattttaaaaaaggttttgtttattgttttaaaaagttagaggaattcgtttagtaatctttttaatttaaaatttctgagttttgagattgtacaaaaaaaattaaagaataatccaacattaaaaaaaaaaaattattttcattattttttattaccaatgatttaaataattgccttggacagcgcccaaaaaaatcgcatttaaaaaaaaaattatataaaattttatttatcattttta

SEQ ID NO: 66147 - DNA, 446 bp, Heterodera glycines
atgatttgtgctaaattgcatttagttaaatggagcaaaggggtcaatcagtgagtcaatgactcattaaattagtttttacaaaataaaacagcttaggcctagcctgagccattgtacaagctgccttttgtacgagttgtcatgacacccaattagtttgtcgtaaaagagaagcaacgcaattaaacatatcgatttccgttgctaggaaatacacacggtagtcgagtggcattattcccatgaatcattccaaaattttaagaatgaaataaatacacccattttaggaccaacaaatcattacaataaaaagaattgaaagaatgaaaaaattagaaaaatgaaaaaaagatctaaaatgtttgtttattgtgcctcgctttcaaagaactccgacggatgtccttgccttgcgatttgtccgttgctcatttctgtca

SEQ ID NO: 66148 - DNA, 164 bp, Heterodera glycines
atggacgagaacaatcacaagctgatcaggtgggcaaacaacaagtgatcggagaattaataaatggttgttttattacagtcaattaatcgcgaggatgggctgtacggtgttggccattttacatcggacgaccggactggcggaatttgactggatcatcg

SEQ ID NO: 66149 - DNA, 318 bp, Heterodera glycines
atggtccaaccattggccaagtccgatggacgaaatgcaattgagcagcgattggtcgtcgacggagggcgaggaatcattggccaagcgaaggcaaaggttgtcccgaagagtgcccgagaagaggaacggatgctgggagcagaagccgaactgaacagcagcaaaagggacttaatgagtgctaatgagttgcccaaaacaccgaccaatgaccgcgccgagtccaatccgacactgtccaagtcgatcacttcgtcaacaaaaatcttcccactttcaagtggcactgctcggagaagggcctttaggggataa

SEQ ID NO: 66150 - DNA, 479 bp, Heterodera glycines
  unsure (1)..(479): unsure at all n locations
aatgctgtgccgaactcgcccatcatcgtggaggagcagcagtctcaggcaccgaactcgcccagcatcatcatcgttgaggaggagcagtctcattgtcagcaagaacaacaaccaaaacaaactgttgatgctgttgctgttccggccaagagtgcaccaccggacagtgttgtcgtcgttgtcgctgctgttgaacatcaacaacaacagcagcagccgccgccgccgccgccgctgtcgtcgtcgtcgcactgtcctcctccgccttctgttccttgtacgagtgcctccccttccatcgctacgtcttccattgttcttacgtcaacttcttcagcagctccaccagcagcagttgaacaacagcaacaacaaccaccgccaccagcgcagcagaataataacagtancaatcagcccgggcagcngcngcngccggnntcngccgctgngnngcttgtcncttcnttcntgcg

SEQ ID NO: 66151 - DNA, 81 bp, Heterodera glycines
ttacagcttaactaggccctattaagcttatttccagaaaatctcgcatgaattctcatttttaaattttttatagatttt

SEQ ID NO: 66152 - DNA, 129 bp, Heterodera glycines
aaattgtacaaaacttactagttttttgaaaaaaaaagttaaaaaaatttacgacttttcatcaaaaatttcggaagtcggaattccgaccccaaaaatgtcgaaaattggaagtctttccgtgccata

SEQ ID NO: 66153 - DNA, 255 bp, Heterodera glycines
atggccgcctaccgaatggagcgcatttattcggtgatcggcaccattctgttcatcgtggcattcatttgcatggtctggtaagtaattagaggattaattagggaagctgattcgtgccattttttgattgaatttatttttaaaggtatctgatcgactatgacatcaatcgtggacagttgatcgctgctacggtaaaaataaaaaattaggaaatttaattatttatcactgcttttaattttcggttca

SEQ ID NO: 66154 - DNA, 1210 bp, Heterodera glycines
cttttcgacagtggttgtacctcttctcatcattgttgtacctcttttaccgtggccatcagtgatgccaacccgaacccgaaacccgaaacccgatacccgaaatccgaagtttttctcaacccgaaacccgaactcgaaatttttcgagtgctcgacccgaaacccgaacccgaaatttttctcaacccacggcatcactggtgtgaagggcaggcgacctgtgcccccgcccgccggcggggaaatggacaaaatagaaaaaatcagcggcagagggaggagggattatcggaaaagttaaaaaagtgcgaaaggaaaagcataaatgtgggaaaacattttgactgacaatgagtgcggaataagtgggagagttacttgatgaccccttttacaacgaaaagcatatgcctaattaattttaataatttttaattgttttctctatttttcaaatttaaaaaggcacagttgttgattcaaattatatagaacaatttttgaaacatttcaattagtaatgcgcgccctttcaccaatttttgcgctgcttttttgccaaagtgcattttgcaacagcggtaataaattgtttttttaaatttaaatgatatttcaaaaattatgcacttgcatgcaagcgtggtgtttttacagaggatggcgatcttggcgtcaaaatgcttggtgccgaacaagcaaaaggtgggcctttaaatgcagggaaggaagcataggtgggggattggctttgtatgctcgagaccaaaagattctcgacaatcaccgaataatagattttttgtcttttttactcaaatcccatccctcgtctaagaaattttccgtataatgtgcaaagatttttttcaagaaaaactttcgcgtttgaatttataatttttcgcattgttttaattaggaaaaaacatttattaatttaaattaattttatttataaatctttaaattaactattttttgtcaaaattttccgccagaaaaattgggttaaagaatgtagcaataacaaaaccaattttcaagaactgtccttgcattcagtgacggatttgaaaacgaatattttgttctttgagttagctcaaaaattttaatacatcaaaaattacttataatccagaactgctgaagcagccatgccatcctgggttgaagcaatgttgtgcccttttctgcccatcag

SEQ ID NO: 66155 - DNA, 706 bp, Heterodera glycines
atggtgttggaaggtacatggcaagcagaaagtgaggtcaccgacgaggggatgggttgggtgagggggtcggttgtcaaaaaaaaatggcaatatatgcaaaaaagacgccgggggcggggagcaaaaggagagggtaattgtccccatgatcggctatcagcaaaaattgctaataaaagtaaaaatgccggggtggggggagggggagtaatgattctgcttcatcattgtgtggtctcagcatcctccccgttttttcagttcgataacgaaaccaatattaacaataaaattatatgtacaattgcaaacaattatgtttcatttaaaaatatttattccaaaagaatttgtgtaatgtgtgcgaaaatgctctaaaattaaaggggaagacaaagaaattgttgaaaggggcagactgtataaattccaccgcacaactaccgtatcagttgaaagttatcggaaagtggctttgactagagaaaagcaaaaaattggccgatattttagctattaaagcaaaatttgcacttttcagataaggtcgaaggcatacggtagccgacagtataaaaacaaattcatcaagaggatgagaaggagatatggaatctgtgcacatttaagacgaatacacataaggaattactcaataccaatatcatttttaatgtccaagccaatggccaaattcggctaa

SEQ ID NO: 66156 - DNA, 257 bp, Heterodera glycines
atggttaaaaagggtacaataatggttaaaaagggtacaatcatggttttaaaattaaataaaggaaatcgtttattaaaaagtaagattaatattgaatgtaattaataaatttttaaaaataaaataaattattccttttattaattaaaaagaaagtttgaaatgtacaaggattgaatatttatttaaattgaaattaattttacaaattataatttaaaaaatacaggagttctttaataaaagtaaataaa

SEQ ID NO: 66157 - DNA, 581 bp, Heterodera glycines
atggctttgtgtgacttaacatgggtatgtcatggaatggtatggcatttactggtatgggaaggtaagtagttactaccccctatttggcccctaaagttcgagtccccttggctgcgaattattttttagaattaaatctcatcgcttcgacccaaaggtgtgaaccatatttttttacaatttttaaaaaatccaaaggtgtggaccgtttttttgcaattttttaaaaaaatccaaaggtgtggaccattttttttgtaatttttaaataaaagtgtataccgtttttaaaatcaaaagtgtgtgattaatttttttaaaaagtaaatatattttagcacttattcgaggggaggaggggtggtggtaaataacccaaagccttttgttggcctgttaacatatacccttaggttattttcccctattttgtaaaacctgtgtctatacacaaaaaaattttttataattaagaaaaattgttaagaattcctaaaacataccattagatacaattagtttcagaattttcttcaagaaggggtgatctaaagacattatccctttttttttgctaa

SEQ ID NO: 66158 - DNA, 543 bp, Heterodera glycines
atggagactggcatattatttttcaacctcctcagaagggggtatataattggaggccggcagattaatggagactggcatataaaaagagtatatacggtaatcatttttatcgtatcaattattaaaataattttaaggcacaacaacaacaaaatgctgctgttgttggtgccaaagtttgtgttgagtgtggccaacggattgtccaccaaacggtgccgcagtctcagctgaatgccaatgccattggcgttgcttctgtcggttgcacttcggtcagtgccgctcgtggccgtgccaagtgccgtcgtttgttttggcgtgccgtcacttttccagtcagtctttttttaaattaatttttgctaccgtataccccctctttcatcctccattacagtattttaagtctacttttttcagatgaatgccatcgccaaattggtcaaaaaagtgcgatcagcaaagtgtgcgaaggctaacaaagccaaaaatgagaaggaataaattacaaataatgggggatttgatgcaattaaa

SEQ ID NO: 66159 - DNA, 276 bp, Heterodera glycines
atgaaaaaggcctcgctgctgttgtgcatgggccgcgtgttcttcttcgagcaatggcatttgttcgtcaccgccatggaaatgtaccgtatgcaacgcgtggacaccgtagtcgcttatgtgatgagtgtgcacccgacactgtacgaacttatgcgattgtacgagagggacggactgctcagagtgagggcgaacatggaaatgccgacggagacagtgcacggcacggccgacaaattcaatccgaacggcgagacggagtggagcaaccag

SEQ ID NO: 66160 - DNA, 76 bp, Heterodera glycines; identical to SEQ ID NO: 53797

SEQ ID NO: 66161 - DNA, 1135 bp, Heterodera glycines
atggaactgacctcgggatggtacggcgaccgatacgtgggctttgtgtacccggaagaagggattagcaaagaagcggaacaggtggacaaaggagggcaattagaaattaattagcaaaggaatcaatcgcctcccgcttaaggtattgccggcatttttgatattggcagagcaagtcaaaagtgagagcagcggaaaagaagcagaagaccaaaaaggcataggtggacagtgatcggcggagggagcgattggacagaagctgatcagcggcattgatcaaagggatgtagcatcaagagatcagcaacaaacttaaaaccaattagcttggaaaataatagaatagttaattcacttggcaattatttttatttattgtaattgtaattttccctctcaaattatgcttactcagaaatattgtagcctatttcatgtattcacatttactagaaatgacaactctgataaaattagttttaaattaattttttcttagtcttcgaaaatggtactcatttttcggtgcttaattcaattcttaagttttttattacttgtttagttttcagaatggtttgaaaggctctcgtctgctaaaacaattagtgtttcggtactaaaaataacttaaattcaaaaaatgttttaacaaatttataattatcgattcttagagggtggagcatatttttatttttaatgtatttaaaaattttggaaataatataaaataaggaaggacaaaatggggacccgttgagttttgattttgggattaattccgaaaaaataaaaataactctaaaaactggagaccaataattaagcgtataatttcaaagaataaatagtcaaaaaataccaaaacaaaaattatattccattgccaatttgtccatctgttaaattattataaaatatttttgtccttgttttattttccacttttgcttattctttttcttctcatttatcagcttcttttcagcctgttgaactgctcgctgctgtcgttggggccggtgaatttgttgaattcgaaactggcaatatgccaatttgtgatgaagctttgttcccagcagcagcagaaaccaacacactaaacataatgcaaaaattatga

SEQ ID NO: 66162 - DNA, 786 bp, Heterodera glycines
atgcaagtcaagaatcactttttaaaattcgaatctccaatatttttaatagacggaagttatgccatcgcgtcaagcaacagtgttaatcagtcacttcacgcttgtctaattagtgatgttgtgccttcactaccaagcaatggttccttaatgttcaggtaaaaattggaaataacggaatcaaataaactaatataacattgatcacttttattttactattaaaaggcgcatttttcatcatttgagtttttttaatcccaaattaattgcaacaatacttaaaaaaacgagggcaattaaaatttcattcacaataataataattgtaatttactttaagaaagaatttacaaaataaatatctcgtcttgccaaaatatgagacacaagaaaagcaatatgccctggtaaaaggctgatttgcaaaaatggatgaattactttttttcattttatttaacaacttttggtattaaaaacgatctctattaattaaaatagttattttaattcagttactggacaagtccatttgtggttttgaatgtatgccagaaaattgaccaaattccactcaatttgacgacaatgtgccaacaaactccgctcgtccaaggcccgggcccagcaaatgtcacaatcggagcatcgacgggtccatttcaagtagcaaaatccgtgctttatcattatttctttgtgtgtttcattgacaaaaaatccaacaatttatgaaacaactgacaattagcaccgctaaattattttatttttaataaa

SEQ ID NO: 66163 - DNA, 313 bp, Heterodera glycines
atgccaaatttgaactgcgtggagttcgacgacacttgcgcatggcacaattgccaaacgcccgctgcccagctgatgtggtttcgcacttcggcaaacataagcagtgatcagatgatgaccacgacgggcactggagtgatgccaagttgggatttcgctatctcaaaaatcagaatttttttttcatttttttattggtgtccaacgaaaacaaaaagtttcgacgaattttccatgaaaatatattaaaccttctttttaaacgaccatttgctatgaaaatcacggaaaaagcattaatttaaataaa

SEQ ID NO: 66164 - DNA, 480 bp, Heterodera glycines
atgtcagagccaatccgaactgctttggcaacaatggttgaaaaattaataaacagaatggaaatcgttcatccgattatagaagcccaagagagaacagaggagggatttgataaattaagacaagaaagagtgctccttactgggctattagaaagaatcgaagtcaaaaataaggaatgggatgcttatatcagagatataggggcagaagcccaaaatgaggaaaatgagaggtatcgattactctctcacagaggaaggcacttttacgattgggtagaggaaggaagagaaacagtaagcaaaataaatattattttagtaaatgaagacggaaaagtttagctgaaagtgtcaaatctttaaaaatatcagatcaagaaccaaaaagagaggaaaatgagaatgaaattgggaaatcaattaatgaaattggaattaatttttctagaagaaataatcgggaccaaagagtag

SEQ ID NO: 66165 - DNA, 622 bp, Heterodera glycines
  unsure (1)..(622): unsure at all n locations
cggaagttcatttagggcacatctacaaatgagcagattttgattacnngaattaactttccnactcactttcctccatccagactggcttcaaccattgttcaaagacacctcgtgaattgggcaaaattcgatggcgttatatgcgccgcatcacgggccaaaaacgtttcacagacttttagaaaagcggctggatcgtgtcgggataaattgaatgccagtacgatagtgccacgtttgaaaaccgaagaacagtttttgggaaggggcggtgggggcaactgaaagggatagccaacatatggtaagcatcaaccagccgaacagttgtttttcaactaataatagcgcctgaaacacacctcgaccatttctgccccgtcgattcgtcgcggtaagcggccgcgccgacagattccaaaagtatgaaaaacatttcccaatgttcgctcgcgtgtaaattggcagcatttgcgcggaggagctgatggagaccgaaagcaatttgacgggagaacagaaacaattcgggtggtcgaagtgccaacagttcacagcccatgaaatggagcacttcgtcggcacaattgctggcgcggtcctggacagtctgctgatt

SEQ ID NO: 66166 - DNA, 1486 bp, Heterodera glycines
  unsure (1)..(1486): unsure at all n locations
ttctcgaccatttcttggatgtcggaaacaggtacggcatgcgcttggtccgacacaattaagttggcccgactcggaatagcaccggggctgctaatgggacgaggtgttttcaaatctcaatgcaaaaatcaccactttccgtcgtccatattagacttgcatattcaccagagcattgtggcagccaaacaaaagagcaaagttgggtcttgtcgggggtccaaatcagactaatttgtacgcattgacattcgcctaatttataaaagcaattagagcactctccgattggtgtattcaatccatccattccatcacgtgtaaaaacaattgtcttatacacataatagttatcgatttcttcagttctccaaagcgacgtttgatggccatttactgctcccaatttatagggaattatttgttgccattagcgtttcgtcattaacgtataagtatcattctggagagtcattatcaagtgccattttcctgcaatattgccgtaggcactcacgaacaacaggcgatggagtgttcctttgtgtccacttgtcagaatttccaatcggaatctcttccgtttaggacaacatttcacaccaactccaattgaaaaggggaaacaaacttcggaagcggtgatagcaccgaatttggcaagacaaaagcaatcgcagcaaatcattgccggacaaaacaaatgcgtggtgattgtggtggacccaatggacgacgacaaacagcacaagcaacaacggggcgacgtgacgaacaaaggcagggcatcgataataaacaaattgaaacgttaattttttgtttataaattggatttttagttcagattcactggcttccaatcagcagactgtccaggaccgcgccagcaattgtgccgacgaagtgctccatttcatgggctgtgaactgttggcacttcgaccacccgaattgtttctgttctcccgtcaaattgctttcggtctccatcagctcctccgcgcaaatgctgccaatttacacgcgagcgaacattgggaaatgtttttcatacttttggaatctgtcggcgcggccgcttaccgcgacgaatcgacggggcagaaatggtcgaggtgtgtttcaggcgctattattagttgaaaaacaactgttcggctggttgatgcttaccatatgttggctatccctttcagttgcccccaccgccccttcccaaaaactgttcttcggttttcaaacgtggcactatcgtactggcattcaatttatcccgacacgatccagccgcttttctaaaagtctgtgaaacgtttttggcccgtgatgcggcgcatataacgccatcgaattttgcccaattcacgaggtgtctttgaacaatggttgaagccagtctggatggaggaaagtgagtnggaaagttaattcnngtaatcaaaatctgctcatttgtagatgtgccctaaatgaacttccg

SEQ ID NO: 66167 - DNA, 306 bp, Heterodera glycines
gctttgactacagcacaatgcgggaaaagacacccgaactgtacgaacatttggcacagtccgccctcgtcattttcaagggggacatgaactatcggaagttggtcggcgacagggcgtggccccaccaaacgcctttttcggttgctctttcttccatgtactcaaaatcatttcccccttctttgctccctttcaggaagctctttgcggcttttgcccaaccactcttttggcacttcgaacattaaaagcggaaaccgtcgccggtgttccgctcgaatcgctgcgcaaaaaaaaagaaaa

SEQ ID NO: 66168 - DNA, 318 bp, Heterodera glycines
atgtctgtcaaattttgtgaactcggaaaaagcactgactcgggcaaagaagaacacgaaatgctcttcacgcctgaattggacggacaaatgtacggccttcagaatgtgagcaaacagatcgaacgccaactgcaactgaacgtacggcgcttttcgctgttgtttttaattgttttgcgccgttacatttttcagttgcatttccaagcggtggaacagcccgaaattgagcagggatattcgacgagtcaactgcacagtgagctggagcacgacgtgaagattctgcaggcaaattctatgggaaaaagctaa

SEQ ID NO: 66169 - DNA, 817 bp, Heterodera glycines
atgggaaaagtttcgctgggcacattgcgaaaacccgagaaaaagcacaacaaagtgatcagcccttacgggtacgaaatacgaatgatcatttgtccgcttcgtctccatcttttgttttattacactttttttcagtttgccacgcaaggaagagacaaagaaaatgatcagttccttcgtccgtttgtccgttttggtatttatcgttgtcattgtgatggtggtcgaccacttttactttcgcctcctccaaattgtggtcacccatgggaagattctccgcggtcagaagggcggcaacagtctgaacattgtcagtggttttgtcttgggatttgcatttttgctctaattccatcctccgcaggttgtaaatggctctggcgcagttgctgaactccttcgcaacgtgttgcagttcaactattccaaggacctcgacacagacttggacaatttgcactgtctgacccaaccgaacgcacccaattggacattcaacgcgtggtatctgatgggcccactggttctgatgtttctgctacaggtcagtcggagaatggcattttgatcagtcgcggagaatggcactttctctccccatttgcaggtgttcctcggtttcgttgtgcagcgatttgtgctgttttttgtgcttggcttaatgtttccgcgcagagcaaaggcccgcatcattcacctctacaacaaaatgttatttggccgagtgaatttggacaaattgtcggcagctaagaaaaatgtgaatgaacggcaaatgtcgtcgaatgcgaatgatggctctgatgattag

SEQ ID NO: 66170 - DNA, 306 bp, Heterodera glycines
atgagaaatgaatataaacaaaaaggaagaaaatattcgacaaaagaatggaagagaaattatgccgtaattgggaagaaaattggagttggccaaggagtaattggacaatggaagaaacaatttggattgagtggaaaaagaatatcggagaaagaaaaaatggaaaaaatgaaaatgtattggcaaatgaaaggagaaaatccaaaaatgagtgacgagaaaatttcaaaaatattgaaaattaatcaacggaccattttcaaatggaagaaacaatttgaagaagaattaaatgaggattaa

SEQ ID NO: 66171 - DNA, 336 bp, Heterodera glycines
atgaaaacatttaaacatttccaattaaaacaaaggcatcgcgaaagacgtgaccagcagctggacgagttcaaaagggagctgaaggaggaagaggcattggcacttggggaggtggaggaggaagacgaacaaacgcgggaggagcggcaccaacgggcgatgttaaggcacagacggacggagcgggaggaagcgccgttggaacaggaggacttggaggaggaggctgacgaggcgagtcaattgaaatgtcatttcgatccaccgatatactcgttccgatttcagaaactttattctttcaaaccatttacatttactgatttaggatga

SEQ ID NO: 66172 - DNA, 281 bp, Heterodera glycines
atgcttatagatgagatcaacgcgttacatgagatgatgatggcactggaagctgactttgaagaagcggaacgtgaagccaaaacccatccggacatcaatgggggcgatctggtgcacaacatcatctttcctgagccggacggcatggcatttgacgagtgtcaaaatggcactgccgctgatcagactgagaaggcggcggaaaacggagttgatcaggaagatgaagccgacgaagctgatcagttgaagaacaagctgaaacagaatttggagct

SEQ ID NO: 66173 - DNA, 408 bp, Heterodera glycines
gcggtgatgcaaattgtggcactgctgccggcggcggcgatggcaccaattctgctggtcagtcctcctcttcctcctccgcgtcgtcaccaaccgtcggccagcggacaccgcgcaagcggtcggacgccggcatgggcagtgctgagccggccggcccgctgcccagcattccggaggaggacgcgaacagcaggaacagttgcagcggcacgagggaacgacgccgggcaacggcatcgtcgacgacaatgacgtcatccgctgcaccgtcaacagcgtcgtcggaagtggcgatggtggacactgtgggaacgacaacagaagcagcgtcggcagttgaagaccaggcacatcaactacgagcagtacaagcaacacaatcaccaccaccacttgctggagaag

SEQ ID NO: 66174 - DNA, 382 bp, Heterodera glycines
atgagacaaattaatgctttccgtcgaaagagggtggcacaattggagagcaaaacgaggaaatgcatttttcggttcagagaaacgtcgaacggactacaaccggcacggaatgtgccggccagcagaggcggcgttcgcctcggcacaccgacggcggacagcgccggccgattcccactacgcccaccaccagtcccaccctttccatgctcatttccgttcccctttcggtcggtcactttccccgtccgttcatccgcttcttctctctccccgcttttctcagatattttccgtgaatttttcggcgaccctttgtcatcgtccgactttcatcgttcgccgtttttcgcttttcccgccaacggcggaatgaaac

SEQ ID NO: 66175 - DNA, 384 bp, Heterodera glycines
atgacttgcgcatacgctaaactccttggtccgtgtttcaagacgggtcgaacagatgaccggcttttacaccgagaacgcacaactgagagcccgagctggaccgaactggttgctggtacgtgtcgcacgcgaccgccaccgacccccagctcgagtcaacacggacccgaaaccattgcacaattcacccagagtaaacagcactcccccgatccgggtaccagaccccgaaaggctggcctcaagaccgagctcacgcagctactccgagcatctcagcgcactccgcctgcaaatgccccattcgccactgaacagaaagaaggacagcaaaccccagtctggaggctagcagcccaacgtacagcaacaaacgggtga

SEQ ID NO: 66176 - DNA, 835 bp, Heterodera glycines
atgctttttaatgctgaatattttttcattctctattttgcctttttgttctgctccgccgatgccttgggcgataacccctcaaatggacccgtcattttaaacccatccaaatttgtccataatcatcgggaaaatgaaatgtcggagcggaaccccttaaaagaccaaaattttggcaacaaatcggcaaaaccgattgctgctgataaatactcccaacttgttgggccgtcaacgaatgtggcaaaagagtggttggagcggaacaacccaaaaaaggtaaaatcaccgagcagaaaagacactattgggaagattgggaagtcgagattgcaaaagtcatcgacgaatgatgagaaaatggagaaagaaccacaattggcaaaaggtgtttggaaaagtttaattgaaaaagcaaaaagggttttatttagctggcacttttgctagccatcgattggcatcatcttctccatcatcggcatctgctcacgacatgaccaaagcaaacagatacggcaaaagtgccgtttacagctcacgcgtgggccaaccggtcggcctaacacggaacgcgacagggattggacgaactgtaaacttggacaaaaaagtgccgagccacggatttgcaactggagggttctcaagccgactaatggaaggcatggcaaacattaatgccagaatgaatatgaaaaagaacgcgttgcgaccattttaaatgggaaaaggaagcctttttagaaggacaaagcgtttctgaaattgttgtgattgtcgttaaaaactgttaaacattttatgctatgcataattttattttattaaa

SEQ ID NO: 66177 - DNA, 1344 bp, Heterodera glycines
ggttaaacgacgccattgaggaggaggccaaaacggtgctggacaatgtgaagatggcatttgccgaagtgttggatcaaacggaatggttgagaaatgagacggacaaagcgaaggccaaggagaaattggccaaaatgagcaatttcatcggaaaggcgccggccatcggaaatcccaaagacccggaggacccggatttggcacggatcgacgaacgctacgcgccgtactatcagtttgatgtagcagtgaatttattaattgcattgtaaaccaacaaaattggcaggattcgattccctacgtggaaattgtgcgttctctgatgcgccagtggcgaatcgtcgacttggccaacccggcccaattctatgggatgggcgtccacgaagtgaacggctacaacatttaccattggaactcaatgcaagtcaccgggggaatgctgcgtcctccgttcatcgcgtccaatcagtcgttagcacaaaattttggtgctcacaaatatatacttttattttaattaacaactaattgccaaaggttctgttggattcatcattggccatgagctgggccacagtttcgactcgtacggctatgaatacaatgcggacggagtgaaggacgaaaagtggtggagcaaagcgtcgaagaattcatttgtgaagcgaaagaaatgttttgtggaccaatactcggcatataaggtgagtaaattggtggcaattgattattaaggctttatctttttggttaattattgttaattgtcctcctctcccccaatttccaattccattcatcctcccctcctccgtttttgccgtagatgacttttgagggcaatggcctttctgtgaacggcacgcacacagtgttcgaaaatatcgcggacaatgttggcatccgtgcctctttcgccgctttgaaggcacggctggccaaactgagcacaaacaaacggaggcgggaggagaaaaaggcgcaagagcaaatgcaaattgaggaagagaaactgagcaatgaacaactgttcttcctcagttacgcttatgtgagttacaaaagcaattcttttaaatacttaaattttatttgaattttgcttttattttaattgacttttaatttttagttttgttttaaattacattttaaatttagtcctggtgcggacgaacaacgcgcgaacgaatggccaaatatgtgaagcgcgacccgcacgcgccgcgcgaagtgcgcgtcaatttggcactcgccaactttcccgaattcgccagtgcatttggctgcgcctccggcactccgatgaatccggaaaagcggtgcactctttgg

SEQ ID NO: 66178 - DNA, 639 bp, Heterodera glycines
atgccattgcgacaacacttcaaaagttacgcgggccgagcggacaatgcgatcagtgtttatgacgtggcaaaccgacacattgacaacgaactgttcagtaagtaaatctaatcaaaaaaaaataaaaaataaaatggatttaaattttgaaaagtggaaatttaaatttagcatttttggagacgtacgaacacagcaaagggtcggattttcacagaagtcaaatcgcacgcaaaatgctaatgttccacaacaaatgcattgacgaaagaacgcgggcaaaacaggccggactgtccattgaaatgcttatcaaacggctcaaaacaatgcgcagcgatggatttgtaagttgaacaaaacattaataagattaattaaaaattatttttaattttctatttctataaagcattcattaatgattattcaaccgttcagtcgacgaccgacatgatgatcgaaatgtttccacaaattccatttctgttcctccaaaaatggatagacaagcacatcgccgttcaaatcaactttggccttttctacaatgtgtggccattgccaaattgggacgaagatgtcagagcccttctgaaggatttgctcaaggtggcatttgattttgccttttga

SEQ ID NO: 66179 - DNA, 485 bp, Heterodera glycines
cgcaacaacagcaggctcaattcggccaaatgagtgtcagcgacaatggcacggcttctcccccgcccgccggcaacggatcctaccgggccaagcgaagtccttgctgcgattttggctcttaccctttcatggagccaccatcgcgttacggcggtttccgctaccctttcatgggcccaccaccgcgtcgcggcggtttccgtcgcggtggtcggcgacgcggaccgaccggtagcaccgcttctccgtcgtctaccaacagtgcagcattggcggaccagttcatcgtaaacaacgaaacggagacgaccccaacgccaacggaggggacggaaagcagcagaagtacggacggaacaaccgcaacgaatacggacggaacaaccgcagcgaatacggacggaacaaccgcagcgaatacggacggaacaaccgcagcgaatacggacggaacaaccgcgacggacaatggccaatcgtaa

SEQ ID NO: 66180 - DNA, 804 bp, Heterodera glycines
  unsure (1)..(804): unsure at all n locations
atgaaatttgcaaaganaatgttaatgattcccgaggcggaatatttggctctacggagtgcgatgaatagtggtgattatctccaaaatgaaaaagcgagtttagacgcaaaaatttctcagaatttacaagaccccgacataagcgaggacctcaaggcgaagagacatgattggctctataaagaaagacgtacggtaaaggggatacttgaaaatagaccacagaaggtagtgattgagaaacatgtaccaggtccaaatgttgcaccatatctgggcctcaataaccaatccaaaccacaggagaccgaagaaccacggaaaataattattcctaggaaaagacttgaagagcaaactcctgatcctgaatcagataatgatacacttgaggagttaactccggagccccaaacaacatccacactcaaaacacacattccgatcaaaactattatacacccgacccttttaaacggtctttttaggtacgtgaaggaaaacaaagatttatttaaaattacggcggccggaaaggtacagtcgaacatgaatttgccgattgaaaacagtaattatagagatgttttgttgtatctcgcagggaagaaagatgaaacgccgcgcggtgcaaaatttctcaaagatcggttactgaaggatccaacagtaaaagacatggttgataaatcaaaggtcatgtggggacgtggaaggaaaaaggcaataaaatctataaaaacacccggcatagtgcgagagaagaaacccttcaaaccactaatatgggcaagactgtag

SEQ ID NO: 66181 - DNA, 990 bp, Heterodera glycines
taattaaatccattccttcgggggaccgtgccgggtgccgcggggtaagcagtgctggttcgtttcatcacggcaccgaaccttttggctagtcagcaatcgttgcttaacttgccagatcggacgggtgcgcatgattccactgttccaagcaccccaccaaaagcaaaacgatataaccaaaatataaggaaaaatttttaaaaaaatttttctccatctccctttttgatagaaaaagcatcagagtgcctaaactaacatgtaaataaaatttggtgcgctttagagcactttctgaaaaaatatttatgaaataaaaaaatcgatttttcaagtgtccgtttggggtactcaaacaattatggggagcaaaaatccaacgcagaattaaagtacaggctatagggaagctattcccgaaggattcggtctccccataaatctgggcgcatcggttcggggggactgccccgaaaacaaaaaaatcgattttttcaagtgtccgtttggggtactcaaacaattatggggagcaaaaatccaacgcagaattaaagtacaggctatagggaagctattccggaaggattcggtctccccataaatctgggcgcatcggttcggggggactgccccgaaaacaaaaaaatcgattttttcaagtgtccgtttggggtactcaaacaattatggggagcaaaaatccaacgcagaattaaagtacaggctatagggaagctattccggaaggattcggtctccccataaatctgggcgcatcggctcggggggactgccccgaaaacaaaaaaatcgattttttcaagtgtccgtttggggtactcaaacaattatggggagcaaaaatccaacgcagaattaaagtacaggctatagggaagctattcccgaaggattcggtctccccataaatctgggcgcatcggttcggggggactgccccgaaaacaaaaaaatcgatttttt

SEQ ID NO: 66182 - DNA, 478 bp, Heterodera glycines
ggttcacgagaaagaattgctgtttctgaatgagcagacaaagtgtgaatgaatcacatttggacaatttaaatgcaaaaggaattattgcagagccgaaattcacatcgaaattattaatgacgacgaatatgaaaagtcggaggaattctttgtggagatgggcacgccggaatggagggatggaaagggccaagtggggcccaaggagggacagcccgacggaagaccgattttgggtcagtgacggacgaatggcaccacaaaaggccattgttcaggggaacattcgcgctgcaaaattttgatcactgaggacaaggagttcaagaatttcatcgacaaaatggtgaccaatgccaatgtcggctttcttgttggcacccacagctggaagcagcaatttgcagaggctctaacggttgaggacatcgacggaggtgggcattcccttgggaaattgaaagatacggactga

SEQ ID NO: 66183 - DNA, 893 bp, Heterodera glycines
gttgcactcgaggcggccaaagtgttggacgacaagaccatttgggtggcgttgggcgaggccgcgctgctgcagggtaaccaccaaatcgtggagatggcctatcagcgaaccaaggactttgagcggctggccttcctctacctgatcacggggaaccgggaaaaattgcagaaaatgttgaaaatcgctcaaatacgcaaggatgtgcacggacagttccaatgcgctttgatgctcggcgacgcgcaagagcgcaccaaaggtactgctcgaacactatgtggttgtatttatgagtataggtgaaatgtagggggatgttggcccgactgcataccaacgaagatcaggagggttcgaaagacctccatttcatcccagtcattacaaagttactccattttcgcccccccccccctcatttttatttcactcctattttggaaaaaatttaccacttggagtgttcagactctacgccacccctccgcccccccgtgaccgtcccaggggtatagttagtcacaaatacaaaaaataatttaatctcgctgaaaatttttctttacggaagtctgtaattgactgtaaaaaatttgcagtgctcaaagaacttggccaacttccgctcgcctatttgtcctccgtgactcattcgcttgacgaggatgcggaacagttgcgtgccgagttggaacagcgtcaaattgcggtgccggaaacgaacacaagcgcaactccactgctgccgatgacacctctcaatccgctggtggacaattggccccagctgaccgtctccaccgggccctttgatgcacagcaactgttggccgcgacggcggcctccagcggtggcggcactctgtccaccgcaattggaaaatcga

SEQ ID NO: 66184 - DNA, 347 bp, Heterodera glycines
  unsure (1)..(347): unsure at all n locations
atggccgaggaaatcggcaccacagaaattgccattgagcccctagtgacaacaactccaaaaacaacactaacaatgggtgcaaaactgaaaaaaccgttgctgaacaaactcaacaaaatggtaaaaaaaaattggttttacgaaaaaattaaaatggggttaaaatcaaaaaattggcatttttgaaattaccccaaaattcgaaggtattttaaaaaaaatttaaggatcctggcgaactgcgccatctcgtggccgacatgcagtcaaggcttgnccaggtggaggacacgaatgttgaccccccatgtaaggctcagcacaatgccgtagaggagcgtgat

SEQ ID NO: 66185 - DNA, 1639 bp, Heterodera glycines
atgtcatttcaaactaaatcctactcagcaacaatacaactgacagatgaacaaagggagcgggttaagcaaaacagggaaagggcgctgagaatacaggcggaaaaggccgagcagagaattaaacagggtccaactgcagcagcaagtcaacttcttccccacatggatggaatggccatttccaacaacaaaccaccaccgctaattggagaagttggcactttcctatttttactgaattttattatgtctctttaaagagacttgtgtgccctcgtcccattcaaattcaaccccctattacaacaaaaaattccaattcgccccgaccttcgacgagttctgtgcagaaagtacttgttcaaatggacttttctctaattaacgcgaatcgctttaaggtgatttcactattcctgtccacaaaataccattttaataatttaggtgcaatttactccttttaatagagatgtggtggacaaactcaagtcaattccttcacggcctttcaatgcagacgacaaaacatggtctttccttatcgatgattatgaatcgaccaaaaaggcattgaacggactgaatcgcacagtaaatttgaaactcgccgaaattccatttgacgtgagaagggtcagtcaagtctatgtgttttgtacttttaaaaccgtaattaaaaacattttagttgtttttgactaaaagtaatgccaaacccaaagtgaatttggccaaaattggacaacatctgctagattcgctattttcttttcagcgctgtggagtaaggtccttttccacattatctattttgataattttcaatttctgcaaattttaagcgttggcattgaaagagatggacggattttgatagcggacgaaatgggccttggcaaatccatacaggctttggccatcgccaattactaccgtaacgagtggcctctgcttattgtctgtccctcctccgtgaagtacgcctggatggggcagttcaaacgatttatgcccaatgcaaatgtttacatcatcgaaaaacaaagcgaccctttgcctatctcacgcaacacttccgtcgcaattgtaaattttacgaaattttactagtttttccacttttcttcaggtacttagctatgacctcatggtttccaaggccaaacaattgaaaagcaattccatttatgttgttgtttttgtgagtttagctaagttattatttaattggaaaggaaacaaaattaggatgaatgtcatttgctgaaggagcagacaacgcagcggacaaaagtcgcatttgaactttcggtaattaccaattccttataaatttagtcattaatttacagaaaattgccaatcgcgtcattcttctcagcggcacacccgcgctgtcaagacccagtgaattgttcacgcaagtccgaatgattgacccgaaaatatttcctagttgggtgaaatatgccgtgcgttactgcggaggaaaaaagggacgttttgggtttgaggcgaaaggaaggtgtgcactttgtatgtcatattttgcatttggaagaaataatttcgaaattaaaggtctaaccccgacgaattaaaaactgtgatggataaaattatgataaggtaa

SEQ ID NO: 66186 - DNA, 600 bp, Heterodera glycines
atggctccgacgtattacgacctcaattcattcccggatggcagtgacgcaaaacggaagctgtacgccataatagcgacaagcaagaaaacccaccaatgaatctgaccggcaggcacgaacagtttttattttgtcatattgtatttttaaagcaaataaataaagaaaggaattacaattgggaaacaattaaaagttccaagactctttctatacaatggctcacagatgtcctattgcattctttgcactccaaaatccatcggttttatgcgttttgtcaccggttctccattgtcatcgccacaattcatcacgttaaagaaatccgtgataagcgagctcgccccacaatatttctctgagttctcaatgccgcgatagcttaaacatattcagaataaccaaaaaagcgaataaaaacaataacatacgtttcgttagagagattcacttcaccgagcactttcaattttgagccaaccaatgaccaaatatccatgtcagccgtcttacgcgccagcaaatattgaacatgcacagaatccttctgcccgactcgatgagctcggtcttccgcttggatcattaacttaa

SEQ ID NO: 66187 - DNA, 880 bp, Heterodera glycines
  unsure (1)..(880): unsure at all n locations
cgcaatccattaactggacggccgtatacgcaacggttttgggacttgttgaagaagaggatggggttgcccgtctgggactacagggagaagttcatggaattgttgaacaagaaccagtgcattacgctcgttggtgagactggcagtggcaaaacaacacaaattccgcagtggtgcatggactttgcgcgggagaaaggcgctttggccaatcggaagtacatggtgtcctgcactcagccgaggcgagtggcggcgatgagtgtagccacgaggtaagaaaaatgatgtcgttgtgacacttagtttaacttccaacatttaagggttgccgaagaactcgatgtttcggttggtcccttttcgtgcattggtgtgcagcagctttaattttcacaattgttttttagttgggccaggaagttggctattcaattcggttcgaagactgtgtcagcgatcggacagttctcaaatactgcactgatggaatgcttttgcgcgaggctatgaacaacccacttctggagcagtacaacgtggtcctcttggatgaagctcacgaacgcactttagccaccgacattttgatggggctgatcaaggttacctagttccaaattttgcgaaaaaatttcccacgtttaggaaataatccgacagcgtcaggatctcaaaattgtcgtgatgagtgccactttagatgcggggaaatttcagaattacttcgacagctgtccgttactttcggtccctggccgtacttttccagttgaaatattcgtaagtgaaatccanaattttttgaaattcatgatctatttagtatacacccgagccggaaagagactattgggaggccgcagttcgaacagtc

SEQ ID NO: 66188 - DNA, 152 bp, Heterodera glycines
caggtccagcaacaacaggccgtcatctccgaacaagaccatcaactccaacatttcaaacaacataaaatgatggaagaggtcattcaagaccatgagcgtcggcgaagcgtcgtcgtaatgggtctacccgaatcgcagaaacaaaagcc

SEQ ID NO: 66189 - DNA, 278 bp, Heterodera glycines
atgagtgcaacgaagctacccggtgtgaacacccgacgcgatccggccaacaccgatcacgaagatgcatcctccccctacccacttggatttatcgccacactgcatcgcattggcgcgggcgccgctgccgatgggcagccctggcccgagcgcaatctgagcctcgggcgcagcatgcagatggccgatgcggattgcgcgctgggtggcctgcgcgtggtggcggagctgatgctggcggcggagcgcacgcgacagaacggcaccgacgaaga

SEQ ID NO: 66190 - DNA, 1048 bp, Heterodera glycines
  unsure (1)..(1048): unsure at all n locations
atgattagaagaagtgcaccattgattagaagaggtacaacagtgaattagaaaaggtacaacagtgaatagaagaggtgcaacagtgattagaaaaggtacaacagtgattagaagaggtgaaatagtgattagaagaggtacaacagtgattagaaaatgtacaacagtgattagaagaggtgcaacagtgattagaaaaggtaaagcagtgattagaagaggtgcaacagtgattagaagaggtacaacagtgattagaaaaggtacaacagtgattagaagaggtgcaacagtgattagaagaggtacaacagtgattagaaaaggtacaacagtgattagaagaggtgcaacagtgattagaaaaggtacaacagtgattagaagaggtgcaacagtgattagaaaaggtacgtgattagatgaggtacaactgtgattagaagaggtacaacagtgattagaaaaggtacaacagtgattagaagaggtgcaacagtgattagaaaaggtacaacagtgattagaagaggtacaacagtgattagaaaaggtacaacagtgattagaagaggtacaacagtgattagaaaaggtacaacagtgattagaagaggtgcaacagtgattagaaaaggtacaacagtgattagaagaggtacaacagtgattagaaaaggtacaacagtgattagaagaggtgcaaaagtgattagaagaggtacagcagtgattagaagaggtacaaaagtgattagaagaggtgcaacagttatcagaccactttttcgccagaagaaaaatatgaaactcaaaataaatgttatattcatgatcagtggccaaaaaatagcccagaaaaatcattttcaggctatttttgaagaaaaattttgtccatctgaaaaccaaatgggtctcccctttcgtcaggaaattcgaaacaacttttcgggcgataactttttttgaagaagtgatggataaatagtgcaagtaancttttttgtagagctaaaaattacggattttttggatcattaaa

SEQ ID NO: 66191 - DNA, 846 bp, Heterodera glycines
ttttgagtttcatatttttcttctggcgaaaaagtggtctgataactgttgcacctcttctaatcacttttgtacctcttctaatcactgctgtacctcttctaatcacttttgcacctcttctaatcactgttgtaccttttctaatcactgttgtacctcttctaatcactgttgtaccttttctaatcactgttgcacctcttctaatcactgttgtaccttttctaatcactgttgtacctcttctaatcactgttgtaccttttctaatcactgttgtacctcttctaatcactgttgtaccttttctaatcactgttgcacctcttctaatcactgttgtaccttttctaatcactgttgtacctcttctaatcacagttgtacctcatctaatcacgtaccttttctaatcactgttgcacctcttctaatcactgttgtaccttttctaatcactgttgcacctcttctaatcactgttgtaccttttctaatcactgttgtacctcttctaatcactgttgcacctcttctaatcactgttgtaccttttctaatcactgttgtacctcttctaatcactgttgcacctcttctaatcactgctttaccttttctaatcactgttgcacctcttctaatcactgttgtacattttctaatcactgttgtacctcttctaatcactatttcacctcttctaatcactgttgtaccttttctaatcactgttgcacctcttctattcactgttgtaccttttctaattcactgttgtacctcttctaatcaatggtgcacttcttctaatcattgttctaccttttctaatcactgttg

SEQ ID NO: 66192 - DNA, 2313 bp, Heterodera glycines
atgttctgccagcttttgctctttggctttttgcttgcaattagcatagtcaccgtctgcgctgctaaaagggaaataaatttgtccatttatccgcctcccatatccaacgactacaattaccgtataaaaatttgctgtaatcaaaacagtaatagtggagcagctgttgaagtgccattttcacttcaccaacagaagttaattgccgaacatactctgtgtggaacgaaaaattcagagcagaatgtgaacgaagggcaattcctcgaaaatggtaaaaatggaattaatcagtcccgttaccaggaaaacaagggatgccaaatgtcgcaccccctaaataatttttttttgaaaagtaagtaacaggaatatttggctgttattcgccctcccctttccgaagaaataccccatttgaattttaaaatttttgatttaattcagagaaaattgctgaaaatttgaaaaaggcaggccaagttgtttatatactagcgctttccgagcgtctcggtctcgagtccctctagagtttttttttttttgctgtctttctcacggggtttcggactcggtcttcgagagtaaggctttttacactttgatttatagcaaactttataaatcgtttatttaaaatttatatattttcggtaattttttgcttctttgtcgtacaacatatacataagtattcgagttcaaaaagtcgaaagtcggaattccgcgttgcgtaccttaaagttgtccttaaattattatatttttaaattacaaatataaaggcacagataaacaattgaatggaaaacaaacgcaactcggtacagttgctcaaaacaaattcaattttacaatttcaatgcccgcaaaagctgaggaaaatttaacacaatgtgccaacaatgaattgttcatcgaaattgttaaaatttttgccacaggttttttaaatcaaagagaagagaaactggtaagaccccttcttatttcttggcataactttatatttgaaaacgaaagtgttaactatgcatattaaaaccttgaaatgtaggaaaattaaattgtaaatcatttttcaaaaattaaaatccgaaaaattatttttgtgtattttaattcttttaattgccgcgatttttttttataattttccgtgttgagtttttattttgtcagaatgcctctattttcatccaaaatcattaatttgaaaattttcatttttagttaaagctcgagcgaatgaccattgaacagtttaaacgaaccgacaaattagagtacgactttgaggaggaatactgtaaaaagtttgagatcatttcacacatggaaaagcaaccatttgaattcactttacgcatctcaaaggcatccggcgttagcagccaaaactttatcctccagcaagattttgttgtctacaaaaagacgctgaccggtggtactgtaaatattacggtccctataaccaaagagattaaaatcagcgaacgtcgtgacggcatacaaatcaaaatcaattctgtaataaataatatcattgtatcatttaaaatttataatcaaaactgattaaaaaattaagcaaattgacaacactgacaacgaaaatgagacaaaaaattttgtggtaacatattttttaaattaaaatataaaaattattaacaacaataaaaaattttacagaaaatctaccgaattaacgatgaaatgtggaacaattacagttcatttaaaattgactttaacaaaagcgatgtcagcccgctgaatacggtagaatcgacaaacgacaatcataccatacaacaaagagggaattcgaacattcaagtgaacaaaaaacagatttccatggcaaaaagtaccgtaacacaaaacggtaaggcaaaagtgattgtacagggtgaacagcagcggaaaaagcaaggaactcgcaccgtacaataggagtaacaagtcagtcctactgtgtagcagaaagaagactgcatttttcatgtgaacagcagaattcgtcgatattttccatttcttattttaaacaacccttttactttctttctttgctttttattgttgttgttttgcgtgtaaaaatcgtttttagatttttgaaatgagtcacaacggatgtaccgctttttatatctgtatgcgtcgaatttaatcaagaactgtgtcaataaggtcgataatcgggtccgctttggacgtaagcgatgggcagagtccaaagagcatggcacataaatcccaaggactctaattttagtgtttgcttcttgaaataaa

SEQ ID NO: 66193 - DNA, 373 bp, Heterodera glycines
  unsure (1)..(373): unsure at all n locations
cgccatcgtcgctgacgatacacaacccaaacatcgaccaaataaacaaccgagcagagaatgagcgcggcgaaaattgtgccgatgagcaacggatccgtcgacggcacgacatgccattggagaagcaatgtttcatcactgtccatatgtagaaaattccgatgggaaatatgtgcaagaattgtcacatttgcacaaagcattaatccagcagaaaggagcgcataagttaatgactccttaattgataggaagagatttatggctaaacaaatggaatctttanaacgaaatttgtcattagaccgggaattttgggctaaaccagaaccagaaaagccatgaattttcaaaaaaattttaaattttt

SEQ ID NO: 66194 - DNA, 279 bp, Heterodera glycines
gagtcattaacttatgcgctcctttctgctggattaatgctttgtgcaaatgtgacaattcttgcacatatttcccatcggaattttctacatatggacagtgatgaaacattgcttctccaatggcatgtcgtgccgtcgacggatccgttgctcatcggcacaattttcgccgcgctcattctctgctcggttgtttatttggtcgatgtttgggttgtgtatcgtcagcgacgatggcggacatgggttacggacaaatcgaactataaaatatag

SEQ ID NO: 66195 - DNA, 1003 bp, Heterodera glycines
atgcagaagacaaaaagtgatgatgttcttgaaaccatttcaagcactgttcagtttcattcggaatggtaatttaatgtttttaatttttgtttttcgtttttttttgtaggtatttgggctccgagcgccaatttgtgcacgacttcaacacttccattaggaaaagcataaaatgcaagcagtgtaggacaaatctattctgctgttcagctgcttattatgacgaagaattcttaaaaagtggtcaatggcttgccaaaattgcggaaattgtatgaaattttgttgaattaaattttaatttaaaaatttttttatttttacccagccaacaaagttaaaaatattccacagttattgctgacttaaaaaaggttctaatttaacttgattggtcaaaattagttgggaaattccttcgacctcatcaatttcttaggacgttagctttgattaaccttttttgatttttttttatcgttagagcgcgggttttacgggtttcaaattttttgtacatttagatgggcctaaaaatcaagtaaatagcgtttttgcttggttttatgcttttagaatgtgctttattcttacttattttttgccatattttttgattttctcgtccatccgctatctacttatttgcttaattatatagttcattaaaataatccaaagaaaatttatcctaggcgctatgaaaatatataaaattatttattcatttcattgaaatattttttttcaatttaattacaaatctaactttaaaacaaaataattattttttttgttttgccagtgcatttgcctttttattattttggtttctcttttcaacaatggattttacggcgaagttgggctttcaattgctgttgctgcagcgtctctgacaatttcttgtgcttttgttgtgatcaaactgagaacattgaatcgatgggcaactcaaaaacaatggtttattatggtagttatttattcttcattataa

SEQ ID NO: 66196 - DNA, 65 bp, Heterodera glycines
gtataaattgaaattgaaattgtcttttgttaacagatttcaccaaaattgtaacttttatgaat

SEQ ID NO: 66197 - DNA, 598 bp, Heterodera glycines
acgccgaaccgtgtcgaccctcgtttgccactggacgacaacactcagacgccgaaccgtgtcgaccctcgtttgccactggacgacaacactcagacgccgaaccgtgtcgaccctcgtttgccactggacgacaacactcagacgccgaaccgtgtcgaccctcgtttgccactggacgtcaacactcagacgccgaaccgtgtcgaccctcgtttgccactggacgacaacactcagacgccgaaccgtgtcgaccctcgtttgccactggacgacaacactcagacgccgaaccgtgtcgaccctcgtttgccactggacgacaacactcagacgccgaaccgtgtcgaccctcgtttgccactggacgacaacactcagacgccgaaccgtgtcgaccctcgtttgccactggacgtcaacactcagacgccgaaccgtgtcgaccctcgtttgccactggacgtcaacactcagacgccgaaccgtgtcgaccctcgtttgccactggacgacaacactcagacgccgaaccgtgtcgaccctcgtttgccactggacgtcaacactcagacgccgaaccgtgtcgaccctc

SEQ ID NO: 66198 - DNA, 216 bp, Heterodera glycines
atttgaatgagaatagaaagagccaggttcgatgaagttttggtaagccaaaaaaaaatccaaacatttaaaaatctataaaaaatttaaaaatgagaattcatgcgagattttctggaaataagcttaatagggcctagttaagctgtaaaaaaaatttggggcgatttgaatgagaatagaaagagccaggttcgatgaagttttggtaagcca

SEQ ID NO: 66199 - DNA, 290 bp, Heterodera glycines
atggcttttgtaaattctttatcgtccaacactaaaacaattcactttttgaagaagtctttacttcttgcacacagtatgttctttgcattgttattttcaccaattttgttttttttaattccacaacatttttagattattgcactttttcgcgcgaatggtctgagatggaatatgaaaggcacgctgaggacactttggtggcactcactgagtatttggacacattgccggaccgtgtcgattgtgaatctgtaagcatttaatcagagacattttgatgtaaa

SEQ ID NO: 66200 - DNA, 501 bp, Heterodera glycines
atgtcctcgcttttcgattccacttgggaaggccatctccaacatatcaaattttggcgcagcgaagttgcccttgatggaattaaacatttaaatcctctaattaaggtgaagcgatcactgggcgagtccatttcgaatgtccaattggtgaagggagcggacggaacaatggcagttgttggccttgcgactgcaccgggcgattcggcacacgtccaaatggtcatgcaagccgaactgcccgacatttctttgggcgacgacttcgagcaggacgagacaaagcaaaggccgactttggaattgcagccgctgttttcgcataaaaccgaagcggagcattcgacggacgcatcgcctcggaaaataccgcccgaattggcgttgcattacgaaagaatgcgtggccaaatggtggacggagtggacgacttcaaattgcacgagaaaagcggcgcggtgctcttcaccaccgccaaagaaattagcatttttaag

SEQ ID NO: 66201 - DNA, 270 bp, Heterodera glycines
atgaaatcaattcgaacactaattgaacaacagcagctactgaaggcaccaaaacgcacaagaaagtcgtcagatttcgacgacaacagccacaattatctgccaaatccagtgtgcttccacgcagagcaaaaacgcaacaaaattaagaagacagcgatggaaaacccgcgccaaaatccatccaaaatgctggcggaagtccatgcagacaccaaggacgaaatctttgttgctatgggcattgatctcacactggcggcagaatga

SEQ ID NO: 66202 - DNA, 247 bp, Heterodera glycines
atggcgaaaacattgttgcacgacagcgaaggcaccaccaaaaagggagaagtaagttccgatggtccgtcccaattcaatggttttttcttcttttaagttttaggaacgtgaaacaaaaagaatcagcagcaattccgcattatttgaaccgctgaaatggagattgcgcgacaagttggctcagtcgcttctcgacggcactgaacaattgaacatgcagagccagaagattgaaattttataa

SEQ ID NO: 66203 - DNA, 187 bp, Heterodera glycines
caaaatctgtgcgcggtttgctctgtcctgtcagcggacgtgtcgcttcttccgttcggccatcccctgagtcttgcacccgaacataagtctcctctcggcaaatctgtaaacattcgtaaatgcattgttaattacccctctatagtagctatttagcccactctttgctccaatcaatgctttg

SEQ ID NO: 66204 - DNA, 989 bp, Heterodera glycines
atcaaacgcaaaataagcgagcgaaagggcactaaagggtcaagagcaagctctgcggcgtcaagttgccgttcgctgtcaccagtcagtagcttggccgcaacaacgcctccaaaaccagcagcaaaaacgccacagataacaccagcaacaaaaggcacacaagccaaaaaacatctggcaattgactcaaaaccaggaccatccaaccggttttctggcgaaagcgttgctgtcgttccaccaccagctcccaaagtccagcagaaaaagccaactgcgcaaactgaccagcacgctgaagcaacaacatcagcaacaacagcaagcaaagcgtttttgacacgtgccgaaccaaatggcaactgcttcttcaatgccatttgcttgacattgttcggatcagaaaaccacgcagaccaacttcgcaagcgaatgtgcacatttctccgaacaattcttgctgatcagcggctgtttttgcggcagaatcccaactacaacaccagggaaacatttctgactcgcattgaccgcatgttgcttcatgggactgatgaaggaataacaacattggaggagtatgctggacggagggagaaaaaccgggactgggctcaggtgaacgacagcatgctgttggccatgttgtttcaacgaaccgtcgttatcattacaccaaatctctcgcgacgagaaattgaacgacaaaatccacagtggaactatgctaaccaaaatttatatgtctacttcccggacggcgaaatgcgggtagataaaacgcaaataataccttttaatattaaaaattcatgtagcaatctctgcgcaatgttcctgtggatcagctccaaaagtttaccatggtccaagacgttggaacccatgtggacagacggcctgtcaacaatgcaattgtgctctactacaatggcctcaaccactttgacaccgtcacttttgtaatgcaaaattaattttgaaaa

SEQ ID NO: 66205 - DNA, 1983 bp, Heterodera glycines
atgagcgacaaattggaaaacctccttcaaaaactgcttacggcgcaagccgatcagcaaacccaatttactcaagctttaaattccttggtcaacaacaatcccgacaaagaacaggcttcattgttctcgacaattaattcccaaatttcagaattcgtgtatgaaccagagaacgaccagacatttcagacatggttcgaacgattcggcgagtacatcacaaccgatggcaagctcctcacggacgcgatgaaggttcgggtggtagtcggtaaattggggagtcaggagtacagcaaatatgtggagcgcatactcccacaaaaaaccggggatttaaattttaatgacaccattaaaaagcttgaagacatcttttgtggcacaaaaagcctcttcgtgcggcgctacgactgtttcagaatggcaaaggcaccgagtcaagcagttttggattttgcctcgcatgtcagtgccgaatgcgagaagtcaaagatgcaattgaccaaagaagagatgaaggcgttcattttcgtcagcggcctggacgagggagaccgtgacctccgcgaacgatgtttgcgcatgatggaagaggcacgacaacgcaacgcgaccatcacattcgcaagtttgattgaggaatgccgatcaattctttcattacgcagcacagcagctgccttttcccaatcatcatctttaggcgctcaaacaaattcaatttcagtcaggccacagcaaattacagagcgttcgagcagaccagcatcgaagggacagaaccgaacattcaatcatcgttccccttccgttcaatcacacaggtccgatcaacagcgaaaaccgccaccgccattcccgtgcaaatggtgcaaacagatgcattggaacaacgagtgcagaaatcggaacaaatgcacaaaatgcggaaaattcggacacaattcgtcgacatgccgatcgcgcaattattcaaatgatcggaaattcaaccgcggttcgatgacggtaatgtctgtgcatgattcgagcgagccatggatcgacattcattgtaagatcaatgcgtatccggtcaaactcatggccgactcgggatccaaaatggcagtcattcagacttgcctctgggaggaaattgggaaacccccacttaatcattgcacagctaatggcacatcatattcaggcgatgaatttgaaatttcagggtggttcaattgtcaggtcacttatggtgacatcacgctcaccttaaaatgttttgtcacgcccaaaggtgtgatgaatttatttggtttgccgtggattcgtgcgttcgaaacggcactccaacggccaattgcgaccactttgccaatgcccttgccaacagcagcatcacatcaaagcatggcgattccatcatcaacagaattggccgacctactcaaacaaaatttcccagatgtttttagttcagagttgggacattgcaccaaaatgagggctcatttgtatttgaagccaggcgcacagccagtattctgcaggcctaggccagtaccgcatggagcacgagatgctgtcgacgcggagttggaccgtttgttaaaaatcggtgcaatcaaaccggtggatttcagtaaatgggccgcacccattgtggcggtcaaaaagaaaagcggagacattcgggtctgtattgatttctcaacaggtttgaacgacaggctcgagctcaaccgccatccgctgcctcggcccgatgacattttcaatttaatccgtggcgccactgtcttcagtctgatcgacttcaaggacgcctacctacagatcgaattggactacgagtcgaagcagttagtatgtttaaacacacatcgtggtctgtttcaatttcaaagacttccatttggcattaaatctgctccatcaatttttcagaaattgacagatcagctcatcgcaggcctgcccgatgttcatgaataa

SEQ ID NO: 66206 - DNA, 1926 bp, Heterodera glycines
atgatttatggccgacagttcacattgctcactgatcataagccattaatttcaatttttggttcaaaaggtggaattcccatttacacgggttccagacttcagcgttgggcactcattctcctgaactacgacttcaaaatcaaatacatttcgactaaagagtttggtaaagttgacatgttgtcgcgactaattgccaaacagcgagaagacgacggagatgaccatgttattgccaacatcaatcagtttcccatttcagaagaggaggagcaactcgatttgtgtgccaacgcagtcgattacattttccaggcaaacattgaacagttaccggtcacagcattggaagtggccgaagcaacgaaacaagacgaagtcctgagcgaagtctcacagttttgccgcaacgaatggccaaggaaagttcaatccccattgattgaaccatattttacgcatcgttcgaaaatctccgaaattcagggatgtttgcatttcggggacagagtcatcattccggcaaaactccgtcagcgcattctcacggcacttcatttttcccacccgggaatcgtccgaatgaaagcgctggcacggcaattcgtctattggccacggattaatttggacattgaacgttggtcaagaaattgtgccgattgttcccttgcagcgaaaatgccagcaaaagtcccacttcaaccatggccgacatcgcatgaagtcttcgaacgacttcacatggactttgcaggaccgtgtgccgatggaaacaaatatttgatcatcatcgacgcgtacagccgttggccggaagtgatcaaaatgcattcaacgacagcacgatttgtcattgatcagtttgtttggttattctcacggtatggatatccaaaacaaatcgtaactgataatggtccaccattaaagtcatcaaaaatttttgatttttgcagaaaacatggcatcgaacaggtttttgcaccgccatatcatcccatgttaaatggacgagcggaacgttttgtcgacaccttcaagcgacaaatggcaaaatgttcaaggacggattcaaattgggtgcaaaactccttattggcataccggagcacaccaagcgacattctcagcggaaaaacaccggctgaacttttcttagggcgtaaaataagaacaattttttccctattaaagccaaaacaggagtcgcaacatcaacaaccgaggaccgatcacaaaacgcagcaaatggaggcacaattcaacaagaagcacaacacacatgagaggatcttcaaagtcggagacaaagtgttgttcatcaattaccgagacaacaagaaattttggttgtttggtaaaatcgtaagagggtcaggggtcatgtggcggattgaggcgccatgtctgagtgccatagtaaccaggcactcgaatcaaatacgacttttcaatcccatcccatacaaggaaaccgatcagattcagcactctccgcagcgtggtcaagcacagaaccctcccgaacaaattcaagtggagcgcgagatcaccccgccgagagcaccgaaaaaggtccgattcgccgatgaacagcctcatcatcatgaacagccagctgaagaagagcaaattcaagagacaccgaatctgaggcgttcgacccgcgtcagaaaagccccggaccgtttagatctttaaaagggggaggtgttgggtatgactaaagtccatttcattcccttccttcttttattgcatttctctatcctttattattgattgtgtctgaccatttcattcgcatataagcgcatgcattttcccccattttggttgttcgctctcattcattcatttcattttatgtttttcatctctctcttctttcgcatttattttatttgtgttttccaaaca

SEQ ID NO: 66207 - DNA, 1351 bp, Heterodera glycines
atggattcaccaaaagcgcctgaagtggtgccgttcgaggatgaacagttaagtgcggaggaaaaacaaattttgaatgatattgaagtgctgaaaacgaaactggaagagacaaacaagcgaaaaagtgaactgaaaaagcaaaatgaggaaaaagagaagataaaacaagtggacgaggtcatattagaagatgatgaagaggaggaggaagaggaccaaacgcccaaaatgagtaaaaagccgcggttggacccggttgtggcaaaatgtgttgtggaaaaagtcataaatgaaaagtgggaaggaaacgatttggtggtaatggatccaagaggaaagggatcaatggaagagcaaaatgatgaagaaagccggaggaaggaagatttggtgcgaattggccgaagaaatgatcacaatgaggcctggcgagagtttctgaccacaacgacttccttggacagagaaaaggaagagcgattaaaagcaatgggcaaaattggtttgggggaaaatggccgaagaatggcagagaaaagtatgagagcagcagagaaaacaatttttgaaagtccgtgcttacagccggaggggatgagaaggaatgtgattaatgaattggagagccaagaggagcgagagcgaaggaagcgtttcgccacccggactcctccgagtggccaagcatttgcaaattcggtttgggcggaaaaagattggaaaagggatgatgagggggaaaaggatgaaaaagaagagcctgtcttcaccaaaataataaaaattcaacggaagttaaaagaagcaaatgaagaattaaaaatgctgcaaaagagataatgaatgtgtttgtaaaaatgtgtgaaaaataacttaatgaatgtgaacagatcgccaaaagtgtgttcaaatattatcttctcacatgccccgtccattgaagaattggtccccaattctgatcagtttccccgggctcctctgatgcgacgtccccggcgcatggcggcgatggcagtgcttttcattgctgatctgttgaaattctgaaatggaaaaaaggaaaggagggatggatttgcctttggactcaaaatcaaatgtgccgttgtcagtcatgggaatgccattctgatcaaaacaaattaaaagctgttccagccatggggttcccattctggttaaataacaaatcaaattttaatgaaggcaaaatgtagttttgcagcacagtacaaattaaaagaaaggggaattgatctcaatcgaagatggcatgttttgggatgatcgtcggttggcattaatgttcacacatatttttcacacacatacaaatttaatgaga

SEQ ID NO: 66208 - DNA, 4135 bp, Heterodera glycines
atggctttgtggatcccggaaagagtgagattgggccgagcagatgccaacgagggagaaatttttggtagacctgcagcacattcgacatcgattaatgaaaattatggccggctaaacatgcaaaatctttcgagtccgcacatttcgtatggtagtgttttgagaaaccgggctgacgaagcacggagagttgaacgcctggaaaatcaacgcggacaagaattaatggataggagggcaaatttgggtgaattttctttgttgcgaggccgcgaagtgcaaagagaaggagaccggaatggacagaggccgcgtcaaattgagcagagaaacgaattagcggatggaaattttttgaggcgtgaaatgtatgaccaaagaggcaatgaacatcgaagggttgaccggttagccgaagaaagagaacggagaaatgatttttaccgaaatcacgaacaacatcccgaaattgaccaaatgagaatgggggaaagaaattttggtgaaaattttgtggggttccctagaatgagtgaaaatttggcccttcaaatgtaccggatgacattggccacacaatacgcaagtattttgagagagattccaacaattgaagggactgagggtcgcgacaaaattcatgattttttcctgacggttgagacgctgacggctgattgggaacccgaaaagcaagtaaatgttttgaaaacaaggttgaggggaaaagcactgaaagcactgaacatcgccctttcaaaatttggtcccaatcccccattcaaaattttaaaagccgagatcgcttcgactttgagggaaacagattgccgcgaagcatcagcttttaccgagctgacccaattcggaaaacgcacaccaaatgaagatttaatgagttttggtgagaaaatttatcgtctggtaaaatgctcatacacagggctcaatgaaacccaattggacgaaattgccaagaaattttttgtgatgaacataaatgatggcgatttggcgagatttttggagtgccaaagcaggccgggacaaacattcgacgaattgttaatgttggccaatcgcatacatttggcagacccagaacgagtccgggcaaaaatcgagtcgaaatcaggacggacgcagcaaaatcaaccgtttcacaatagaaattggaaccggaccgactcgaacactcaattccagaacaggcaacaaaattacggaaatttttgggggaatcgaagaaatttcccaaatcaaaaccaaactcaaaaccaaagccaaaattggagaaataatcagccaattcgcttcaccggtggcaatgcaatgcctttgaacgctaatccccccgaacaagaatcggaaagagcaaacccaagaagtgcaaacacaatttttcttaaaaaaggcgaaacagaaaaagaaagtagttcagttaatgttcgacagctcggtatggcggaacacgtaaaatttttcaatgaactgacattgcacgcaaaccaatttccggcagaaaatcccgcctttcctcaaatttcggagtgtttggttttgaacttatctgtcgttggaaattcggcagacgcactttccgactcaggggctgaaactgccattgtaaacccaatttttttgcatatgttggtgaaagaaaagggaataaatttgctagattggggatttagcccaaacaccgggaaaagcaaattgccttttgctgtttcgtcatttaccgacacaaaaatcgacgtaattggtgtggttaatgttcccattcaaatgaaaacagttgaatgccaaataccgtgtctaataacccgtgattccttttcttatgacctaattttgggcactacggctttgcacaatttgggtttttattttggaaattctttgacaaaagaaatcctcaattttccatcaaagaaaacgagcaatggaaagggagaaatgcgtgaagtcaaagtctttgaaccacattatattccgccattttcatcacaaattgttcgaactttcattaacaatttccattgtttagaaaccaaaaaatttctaattatggatcaaatggacaccgagtccttgctggactacgacgaagaacagcaacagaatgagccggttttaaaaatgagtggaaaagacgaagaggcggcactgaaaaaattgggagtgatcgaagagacggagaaggaaaacacgccggtcaaaagtggtggaacattcgtcgagccatgcattgtcgaagcggaggaaaaaggtttcgtcaaaattttggtacacaataaatcaccaaaaatgctgactttggaaattggtgaaaaaatcgcaaaagcagaaatggtagagacaatttttgagcctggtactgaaatcctcccaaatgaatttgatggaatttgtcagccaaaacatacggttttctgcttaagaaaaaacggaaacgaagaccggttttctgagttgttgtcggtactaaaaatgaatttgggccagctggaaaaagctgaagaaaattcaatggaggaaatttggaaaaaatttgaaaaaatcttgattttggatgagtccgagctaacacaaacaaatttggttgagcataaaattgatacgggcgacgcagctcctataaaatgttcaccacgtcccataccattggaattaggaccaaaatttcggaaatgttggaggaatatctcggtaaaggtgtcataagaccttcaaacagtccatgggcagcaccggtcgtattaatgaataaaaaggatgggagtttgcgaatgtgtgttgattatcggaagttaaatgcaataactcgtaaagacagctacccaatcccaaacatcgaagaaatgctaatgtatcttggagaaagaaaattttctcaagtcttgacctagtaagtgggtattggcaaatcaaagtccatcccgaagacgtccctaaaacagcatttgctgtcccgagtggcctgtttgaatttgtggtgatgccttttggtctgtgcaacgcacccgcaacttttcaaagggttatgaacaaagtgcttgaaggtttggtgaacaaaagtgtgtttgtgtatttggacgatattttggtggcgagttcatcgtttaaagaacacatgcacgatttagaaaaagtctttgaaagattgtcgcagtttggattacaggttaaagcgaaaaaatgcaaatttgcacaaaattcgataccatttttgggacatatcctaacaaaagaaggccttaagaaggatctcgaaaaattccaaccaattttggactttcctagaccgaagactgtaaaagagctgcaaagatttgttggaatgttaaattggcaccgaaaattcatcaaagattttgcgaaaattgctggtcccttaaatcggttgatgaaaaagtctgaagatggcaaaaagttggagtggaatgattctgcggaaaatgcttttctgactttaaagaaattattgttgatgatgttgttttaaaatatccaaattttgaaatggcacaaaaagatgcgaattttcgcttccatgtttatacggatgctagtgcaaatgggcttggagcagtcctttgccaaaaagacatttctggtcagatgcgtccagtttgttatgcgtcccgacgttgcagcgatgcggagagaagatacggcccaactgtcctagaatgccttggaattaaatttgcgacaacaaaatttaagcattacatcgcttggttgccaaccgttgttgtaaccgatcacaaagcacttccagcgatgtttcggacaaaaaattcggttggaaacgcgagagtcgatcgatggattatggaattaggtgcaccgtttcagttggaagtgatttatagtccaggaaaaacgaattacgtcgccgatgctctttcgagggcatttcccaatgatttgcagtttttaaaaaaggaagaagaatcggtgaaaattttgacagtgatcacgcagaaaaaaattaattttcctgaaaatgtttcaaaagatcaatggacagccgaagttgaaaagtcagaattgaatttcatttttaagtttttggatcaaagatgcctcccagcagatccgaaacttcgacaaaaactgctaa

SEQ ID NO: 66209 - DNA, 1332 bp, Heterodera glycines
atgactggtgcagtccgagtgtcgcgccaggagcgccaagtcagctttctcgggggttcgcagcagggattttgggggaaagtcagagtcaaatacggcgagaaaaacgatcggtgaattcgaagaaatgtcaataaagttaaaaccttcactcagccaccgaatcacaaatttgatgataaatatttattttaaagagagaggaaatttcaatataattataaaatcggagagaaaaaactaataacgtgaagtgaaagataatgaatgtgtgtgtaaaaatgtgtgaaaaataacttaatgaatgtgaacagatcgccaaaagtgtgttcaaatattatcttctcacaattcaagtaatttaaattgttttaaaaatgaacaattttggtgatttttatacaaatttttataaaagtggaaatagaaatatttaaattgcttaagcttaaaaaattctactaactaaaggaaaattgtaattcagaaaaaataactttgtataaaaaacaaaaaatagtcaaaaaatctcacgcggcaaaaactgaagatagacgtgattagcaatattcactttaaaattaattaataggtttgaaatgtaaattaaattaatttttaacagtttcttcatcttcaattaataattctgcaatccacaattgcggacccactaaaagccggcaatttgagcaaaatgaaattatgttcagcccggccaaaaactattctgtacaatcaatttcaaattttattatttaaatttgaaattaaagaaagaattttttgaataataaaatgaagtcaaaaagaaaagttggtcggacaaagatgaaacatttcagtaatctgatcacattgacttaaaagtccttcacttagtttaataaattaacaattcgtttttctcaccccaaaaggtcggataattatcctaacatatttaatttactttttttttgattatttcttattctcaattttttttatacataattaacaataagccagtccgactcggtctttgcgatgtgattcattttccattccaccgatggcccactaattccatcccacttttccatcccaacacattcgtgtttatgaaaataataaaatgcatagaataatataataaataaatgtttaaaaatattcagaaatagttcactggaatgccaaaaatggaataataatcttcgacttgtacggatcaacaacttgatgaatgtatcggaaacctggtatgtatatgccaatagtgtcactgatcaaaaatgcgttgatcaagtattcatggttaatgagtttattagtgacaaatggtgaaca

SEQ ID NO: 66210 - DNA, 376 bp, Heterodera glycines
atgccatttgtcgcttttagcggcatcattttgaatttttccgttttcgttatgacatatttttacattgagacggagaaacaccatttacaagttaatatatattatttaaatttatatttattaaaaaaataaaaataaatattttaataattaaattttaaattaatatttaaagactaaatttttattataaataataaaaaaatctaataaaaatatgtagaaatttaaaggaaataatcagaagtttgccaagtgattattttgtgttggtcggtgttgttggacgaattttggacacagccaattatgtgtacacatttaccagtgccctttgttgggtagacgttttgctacggtaaaccattaaaaa

SEQ ID NO: 66211 - DNA, 2275 bp, Heterodera glycines
atggttttgaatcgaggagatgcatcgaccaaaggaatgtggagccatttgaagtcgatgcatttagaggaatacaatgaattgcaattgcaggagccggaaaagccaaaaaataaggttataatttaaggctattaagtttatttcacaaattaagacaattgattcctttttgcttaaaaaacatgacgagcaaaaggaagttgaggaaatgttgactaattttatggtccagcaaaactgcgccttttcagtttttgaaaattcaattcttcttaaattaacgcaacgtgcataccctaattttgaggtttgacagtcagccactatttagaatgagatattattcagactcgcagtgaatcgcattttcgaaaaattgtgattccaagaatggctgaaaatcttcaacaaaaaatcaaagacaagattggtactggttattacagcatcacaagcgatggttggcaactacctacaaaatcaccctcattgcagaggttattactaattaaaaactataaaaacctaatcaatgttatattatcattttttagtgtgacaattcattcagtcgatgaaaattttgtgcgaagcgattttgttctcaatgttgcgccaatatatgatgctcacaccggcgaaaatctcgcagatcacattgaaaagtgtttgattaataatgggttttcaatggaaaaattggttatgatggtcagagatgacgcaaaaaacatgatcaaaacatgccgaatattagaaattgaaaggtaaaatataattggtaaaatatttaaaaatattgtttagctttcaatgtgttaaccattttttgcatcttacaatatgtgatgttttgaaagaaccgaaattatctgatctgatcgagaaagtgagagaatgggtgaaagagtgccgtacaacaaaaggagctgcattatttcggaaaaagcaaaatgaacagggtcaaaaaacaacaaaactgatcatggtaaaaacagtaaaatgaacatggcgtgattttttaaattttagtcagttcccaccaggtggaattctacctatgcaatgctttctcaatttcgccagcaaaaaaaaacaatccttgcgcttgagtttgatcgaatgcattcagaaattcgaacggttaagcgggcaaaagtcgaaaaaatttctaatgatttaccgagaattgatgcagtcgattttgatttattgcgtcatgtctgttcgattttggacatttttgatgcggagactcgaaaagttagaagattttcatctcaaacttagttacaatgttttatcaatcttagttttctactgaaacatccatcgctgcatctgttatcccaactttaaaaaaaatccgtgactttctcgctttgacaccattcaactcatcagttcaatttcttgcgaattcattggcaaatgcaatcgatcgccgtgtttctaatttggcacataacacagcgcttcaaattgcaactattcttgacccacgatttgcgtatgatgaaaacatttggcgtaaaaacttatggccagatattgaggaagaattgaaaaattttgccaaatcaagtccatgaatatttatttttaattttaattttttgaattcagttgagggccaaaaaaatgtgtcggtcgatgatgagcagttggatgatcaaaatgccgccttttctggcttagttcaccatgataacgtcgatttgagtgctttggacgaaggtggaagcagcgatgagagtgttcgatgttcgaaattttagcaatttttttgattttattgaatttaagatgacatttgggttactcctaaatcgccaggtgccgggtcaattccatcaacactttcgggagaaattaatgctgatctcaattccaaaattgaatcacaattggctcattacaaggccattgttcgtccggcaattgacgctgatgttttttgttggtggcgcgacaacgcaccaaaatttccagaattggcaaggctggcacggatttttctcacaacaccggctacttctgtttgtagtgaacgtgtcttctcgaaagcggggctcctttacgcaaattcgcttagaaatcggttttaacattttgtgccttaataaaaaatttaattttaaggctttctggtgaaatggctcaaaacttgttgatcatcaaagcaaacatgaacaaattatttttgggaccatctaatgatattgatgaagatgaaaaagatgatgaaaataatgataacgaggccaaataa

SEQ ID NO: 66212 - DNA, 867 bp, Heterodera glycines
atgtttatgatttcatttattattatgaaattatttcaaaacttagttttatttaaatttcagctttttatactcactcgggaaattcctaaagatgggcttgacacggcacgtgctgccgaatcgcgtgccgaccatgtgttgctgctcggatcaaccattattttgacagttgaatgtgtttgtgaggtgtattgcttttttaaatttaattatttatgtaatttaaaaaaattgatttttctaaaataaaaaggaaattatattatttttagttggtcgaaatatcatatttttcaccaaagaagaaaatgcactttgtgaccaaacttctggacattttttacagtttatttacgcaggtaaataaaaaaaaaagaattaaaataaatttatttttaaaatttaagttggcaaattggtttgagatttattgcttgaagaaaattgctgcggtcaatgatgatttggtcaaaagaattcggaacacaatgccatttgtcgcttttagcggcatcattttgaatttttccgttttcgttatgacatatttttacattgagacggagaaacaccatttacaagttaatatatattatttaaatttatatttattaaaaaaataaaaataaaaattttaataattaaattttaaattaatatttaaagactaaatttttattataaataataaaaaaatctaataaaaatatgtagaaatttaaaggaaataatcagaagtttgccaagtgattattttgtgttggtcggtgttgttggacgaattttggacacagccaattatgtgtacacatttaccagtgccctttgttgggtagacgttttgctacggtaaaccattaaaaa

SEQ ID NO: 66213 - DNA, 1211 bp, Heterodera glycines
atgacccaacatgtaaatcctgatcagatttataaatgggtttccgagcatggcaattttggtggcaaaaatcctttgctggtgtctgaaatagtatcagtgatcgatctgttccgtacaatgccgcacttcaacatgttagagccaaaggatcaagtaatctttgatattaaaaaacgaattttaaaaaatatttttaatttatttttgttttaggcaattcttttgagttttgttgctattccactaatttatctgaatgcccgtttttactcatcaaaaatcaattcaccgattgtaaaaatcattccgaacagctcatttagcccattatacctttattacaaaaatccattctacgccggtgataaaacgtaaacaattttttgtatcgggaaaatattttattttaaaaatttttaattattttttatatttaagaaattttgtcagtttaattttctatggttctttttattaataaaaaaaacataattattagcatccaaacattgtccgaattaatgtatgtcaaaacgatggatctatttaacaaattgcaacttacggatgaggaatttcttttggttcgtgctttgatatcgtcacattcaggcaataaataaattatttaaaatatctaaataaattaaaaatattattgaaacaaattaaagaatattaattttttggaaataaaaatacaatattctcgatatttaaaatatgcataaaaaagcaaaaaaagagttgaaaagtatcaaaaactgtatgaaaatcaaaattggaatgaaaccttaaaagtctgaaaattttctattttaaagagcaatttcaaaaagatttaatgaatttacagattaaaaatatagttttaataattttaataataattatcaaattcaaaaagtttttatttcaacttttcagcagttaccggtctgtccgctgctggtcgtctcaccctgcagcatttgtccgaacattatgccaatctgttgatgcattatttgcgcaccaactacggcaacattgccggcgcacaccgttatgccgaattggtccatctggccgagtcggtgtttttcaacgcggagcggcaccgtgaattcttcacctatttggccatggtcactgaccagggccgtttccatgccgcaattccgcccatttttacgccgatgattttgcatgggacgttggatgaatga

SEQ ID NO: 66214 - DNA, 710 bp, Heterodera glycines
atagaaagagccaggttcgatgaagttttggtaagccaaaaaaaaatccaaacatttaaaaatctataaaaaatttaaaaatgagaattcatgcgagattttctggaaataagcttaatagggcctagttaagctgtaaaaaatttggggcgatttgaatgagaatagaaagagccaggttcgatgaagttttggtaagccaaaaaaaaatccaaacatttaaaaatctataaaaaatttaaaaatgagaattcatgcgagattttctggaaataagcttaatatggcctagttaagctgtaaaaaaaatttggggcgatttgaatgagaatagaaagagccaggttcgatgaagttttggtaagccaaaaaaaaatccaaacatttaaaaatctataaaaaatttgaaaatgagaattcatgcgagattttctggaaataagcttaatagggcctagttaagctgtaaaaaaaatttggggcgatttgaatgagaatagaaagagccaggttcgatgaattttggtaagccaaaaaaaaatccaaacatttaaaaatctataaaaaatttaaaaatgagaattcatgcgagattttctggaaataagcttaatatggcctagttaagctgtaaaaaaaatttggggcgatttgaatgagaatagaaagagccaggttcgatgaagttttggtaagccaaaaaaaaatcc

SEQ ID NO: 66215 - DNA, 516 bp, Heterodera glycines
atcggttcggggggactgccccgaaaacaaaaaaatcgattttttcaagtgtccgtttggggtactcaaacaattatggggagcaaaaatccaacgcagaattaaagtacaggctatagggaagctattcccgaaggattcggtctccccataaatctgggcgcatcggttcagggggactgccccgaaaacccaaaaaaaaattttttggataaaaattatttaaatgaactgactagataatatttaaaataggttatttctcttcctttcagtatccctgcaaagtttggtgcgcttctgatcagtttctgaaaaaaaagttaagcctaaactttttggcctgtttaaaaaggaattaaaaatttttaaaaattttattcatctccctttttgatagaaaaagcatcagagtgcctaaactaacatgtaaataaaatttggtgcgtttcagaaccctttctgaaaaaatatttaagaattaattttgcaaaaaataaataaaaacgaaagact

SEQ ID NO: 66216 - DNA, 221 bp, Heterodera glycines
attaccaaatttgttggcaaaaaatgggcaaaagaccaagaaaaaatatacactgattcggcagaatttgtttctgataccaaaacactcattggaaaagaacaccctgatttggtccttaatacagaccaatcagggttcgaattagaaagtgctcttatatggcgccaaaaagaaacaaacaaataaaaagtgtcaacttaaaaatacaaaatgatgta

SEQ ID NO: 66217 - DNA, 770 bp, Heterodera glycines
atgcaatggaaaccggaagtgcgtacaaaagtgattagaagaggtgcaaaagtgattagaagaggtacaactgtgattaaaggaggtacaaaagtgattaaaggaggtacaaaagtgattagaagaggtacaaaaatgattagaagaggtacaaaagtgattaaaggaggtacaaaagtgattaaaggaggtacaaaagtgattaaaagaggtacaaaaatgattagaagaggtacaaatttgattagaagaggtacaaatttgattagaagaggtataactgtgattaaaagtggtacaaaagtgattcaaagaggtacatcagtgattaaaaaacgtacaaaactgattaaaggaggtacaaaagtgattaaaagaggtacaaaaatgattaaaagaggtacaaaagtgattcaaagaggtacatcagtgattaaaaaacgtacaaaactgattaaaggaggtacaaaagtgattaaaagaggtacaaaaatgattaaaagaggtacaaaaatgattagacgaggtacaaatttgattagaagaggtacaaatttgattagaaaggtacaaatttgattagaagagttataactgtgattaaaagtggtacaaaagtgattcaaagaggtatatcagtgattaaaaaacgtacaaaagtgattagaagaggtgcaaaagtgcttagaagaggtacaaaagtgattcaaaaacgtacaaaagtgattcaaagaggtacatcagtgattaaaaacacgtacaaagagtga

SEQ ID NO: 66218 - DNA, 1708 bp, Heterodera glycines
atggaagtgtttccatgtgtcaacatttcgctacaggacatctcatacaggccaatgaatgaatgtcgcctctacattcccgtgactgcgcactttcccgaccgagctatcgcagctttcctggatccggaacttcgcatcatctcgctgacagcacaacaggcaagctgtaatagctaccggttccatcatcttcaactgcgaagcaatcccaacatctggttatggattgactctcgaaccggcacagcacgacgaatgccgaaggactacgtccacgaattgtacgaaacaacgatcaaccaaacgaatagcaatttggaacttcatccattgatcttccacgcatggcaactcgacaatgagtctgacgcgacacgcttcccgcacatcaacgaattcatcaactcggagcagttcaaggacaagctggaacagcacattacggcaaggactgaagctttgggcgcgttgaagggcggaatagaaggattcaccatgcgctggctaaaaggccttatcgacgaagcaatcacatggtggattcgagtcgcctgcgtttattcaaccttcctcatgctgcgcggcattgttctcccatgcactctggcgtatttactcaatcccatccgagtgactcttctcagcctcgttggagtacgcccgcactcgacattccgacccaccgtttccaaaccactcgggatcgaagagggaatgccgctgcatgaaatgccacaaacccccaaaccaccagcgcgcagggcagagcaccgatccatgtcaccaatcaaattggacatgatcgccagaacggctcggtaccaacaaccacgaacacagagccatctcgacctcacagaagactcgccctttgggaggcccagacgaaaagaattctgacgggcccatcttttcacgccggaatgtcggaactctgggattccgactgccgatcaattgatcagcagaattgaagaaaggaagtggcgacccttccccctccctttcacatgcgtcacaccccgttccactcctctgccccccatttccctccaaattgttaattgtttttctgctttccttccatgccccgcgcacaattaatgaccaatttgtcaaaaccgcaacttttctgccgccgtccccaattcggcgaatgagactccaaagaacgatgaacccccaaatttcccgttttccgcccattttgttcatctgttcattttgtcccccgttttttcatttcgtgcccaattttcggcccattttcgttctgctcacatttgccactttttatttaactttattgttatttaagcggccaaaaatgtcccccaatttcacaaccaaatttcatttggcaattttgccgtttctctccccgcccccccccatttgcctttaactgtgatggccccccaattttgatcattctttgaaccccccgattgttgatctttgatctatggcccggtgccctccatttctgtttctcccggtcccattcattgatttctgtgatttcccatttgccccagtaccgaatgcttcctttctgaaaattttcctgtcccatcccggtccccaattcatttgtgattaatcccccggtgatggcattttatctgtgatcaattttgtgatattttgttcaccatttttaaatttttgtttaattacccaagtttgaggcttttttcccgga

SEQ ID NO: 66219 - DNA, 1023 bp, Heterodera glycines
atgtctgggccaatacaaaaagggatcatcaatgcactcaaagctctggacaatgccaaaagcgccacctcactccttctacaccccgacccggacctgtcaaactgggaaaatgccgtcaacttggaggctcaatttgatcgcgtcgtcaaagaaatccgtacaatagaaatgcagatggacagtctacgagactcatccaacgcttggattgaacttctcgcccgcctgaccggagacgacaaagacaacggcgaaaaagaatacgtcaaattcgacaagaatgaaaaaatcgccgaccgatacgacgcagcaacaaccaaacttcgggatttgcgagatctcgaagcaacacttagtgccgcagccaaactgcacagaggcagagccgacagagaagcaaaggcggatcaattggccaatccgcagcaacaaccgcccatgccaccagcaatggcagcaccaatgacaatgccaacattcacagcaccgctctaccaattccagccaattcaactggataaatttttcggccaaaagcgaaaatggcccgaattctacgaatccttcaaatcggcaatcggcagtcaatcaatcagtaaagcgcagaagctgaacttgctccgcaatctgctgggcggagaagcgcgagaactcatagcgagcttccggctggaagacgcaaactacgaaacggtccttcagctgttaaaggacacgtatggagctccggaggaacacatcagaagtcttcacttcgaactggccaatctcaagccgtgccgaagcctccgtgagaccaaagactttctgcttcaacttgagcggcttacaagggagctgaacaatgccggagaggacatcgagggaccgcaggtgttcctcatgctggagaagaagctgactccaccattcctacgaagcattctcacaaagaaaggagaggatccggcaaactggacgacaaccaaattccgggatgtgctaaccgaagcagtccggaaagaagtccaaatccaagaa

SEQ ID NO: 66220 - DNA, 920 bp, Heterodera glycines
  unsure (1)..(920): unsure at all n locations
atgccaaaacaaaacgaaatcgttttaaaatattcctttctggacttgacttggtttcttgatatcgaagctgttttctacgctatttctaaaacggttataccaaacctcagatttttgaatccggttttcagaaaaaatgccttgtggtgaaaacaatatttcacatttcactccataactttgtgagttcggcacggatcgagaccgggataagaccattggaaagagcagctcgagctctacaagaaggtatggaaagaaaaaatagttatttctgggactttttcagaaatcagaattaattctccaatgtggcccaaattttaggcccccagccacagccccttgcttctcccagttttaagtcttggatttgtcaaataaattcaagacttcaaattaatattcaaaaattctcttaaaatttttttaaacccaattcaaaaaaggaaaaaaatttgcagtcaaaaaattattcgaatttctccaattttgtttccataatttccgaaagttattcggtatcataatgccaaaacaaaacgaaatcgttttaaaatattcctttctggacttgacttggtttcttgatatcgaagctgttttctacgctatttctaaaacggttataccaaaccccagatttttgaatccggttttcagaaaaaatgccttgtggtgaaaacaatatttcacatttcactccataactttgtgagttcggcacggatcgagaccgggataagaccattggaaagagcagctcgagctctacaagaaggtatggaaagaaaaaatagttatttctgggactttttcagaaatcagaattaattctccaatgtggcccaaattttaggcccccagccacagccccttgcttctcncagttttaagtcttggatttgtcaaataaa

SEQ ID NO: 66221 - DNA, 86 bp, Heterodera glycines
atggcgcacgcgaagaaggaaaatttgtgtatgagaaaggctgttcctgtcccagtccgcagcttcgtgctatcaaattcaagaag

SEQ ID NO: 66222 - DNA, 292 bp, Heterodera glycines
atgacagcgcaaaatgcaataaattttctgtttcactcattggacaatttaatgccctttttgcttttagcattttttatttgtataagtacaaagtgtgtaaaacaaaataaaaatgttttattcaaatattttcagatttattttttaattcgaaaaagttctttttatttggattaatcacatattttatctctcataatatcactggcaaaatcttttgggaaaaaagcgggtggggggggggagggggggggaaggtcaacaaaagtgctgaagaatctacgaaaca

SEQ ID NO: 66223 - DNA, 1389 bp, Heterodera glycines
atgattttcgacgaatttgtggcgttagcggcgagagctgaagcaacccaaaaagcgtcgaagctttcaatgctaaaggcaaacaattctcgaagattcgacagcgaatttcaaatgccgcgatacagcccacggccaatgcaacagcattttcgccaagaaaattttccacaggccaataaccagcaacaaaaccgcccaacttgttataattacggaaaattcggacattttgccaggcaatgttcggagccacaacgaaaccaaggcacacagaataacaacagctcggcaacaaactttgttcgtcaaaattttcttgttgaacaacaggaaaaacctccacaacagaatcaaaatctttttgttggtggcatttcgatgagtcctgctgatgtggaaaaactgtttggaaaggatgggaccgaaaacgagacgaaaaatttgaataaggtttcgatcgggagaataatggccttaaaggtatcggtttgtggtttgacggcaaaagctatgttggacggaggtgcccaaatttcgatggtttcttccaaattctttgcaaaattattaactgagaaaagaatcggtaccgaacagcttcgcccatctcgtcacaacactcgcgtgatcgacataaatggaaatgcagttgagtgtattggaattgtgtctctcccaattgtcaggaaaggcaaatgtgtgtggattcgtttccacgtctcacacgcatcttttggctaggaatttgtttttgggacaaatgcattggctcgactaagttttaaacttttcgacgaggcaaatgacgaattggtcagtttttcggaagttaataatgtggaacgcaattctgtgcacgtcatttatcatgcgaccataccatctcgtaacaaaaatttggttcactcggcccagcaaatgaaatttaagagtaacgctacggcaatttttacaaattcgggcaccaaaagtgaagtggaaagcaaacggacgtcggaattttgtgccaccaaaagcagccatcggccaagttttcgtcaaaagcggaagaaagctgaaaaggcaccaaagaacatcgtgcccaatgtggagaaccgaattatcagaaattgtgatgagaaagggcacaaaaagttcggcccaaaggaacaattgggaaagaaattcgaagtgcaaagtggcgatggtgaaaattcggtaaaaagtggaaggatttttcgaggcaaaaattctgaagttcaattagggacaattgaaattttggaaggtcggaaggagtttgagagaaaaagattgaagttgggcagaaactctcaacgagaaaagattggacgaaatgtctcacttgatggaaatggcccacgacgaattatggcacaaatttga

SEQ ID NO: 66224 - DNA, 718 bp, Heterodera glycines
atgagccgtgaaactttgccatttgatcggggttgggtcgagttgaccgcctcgtgtccggattcaacttcgacttctgctgatcgacaaccaatgatgcgcggacttcggtgcaatggcagtgagctgatcccaaacggacctcacctttcgacagccggatgcgggatgtgcagctgatcggcagggacgcctctcgtcagcggccggggatgtgttattatttaaattagtgcgtaattgcttggcgttttgaccatttattgatgtttgttttattcattctcatttttcatgcacttcttctcccctcttagagttttgtcatgtttggctgttctcagtaattttggatttgattgattgtttggttcccacctcgtcttccgactttgttttattttgttttgtgtgttttaataaagtgaaagcctatttggtcatttggttgtgagtgttcttcaacagaaaatatatttatacataaaataatatacataaattaaacataaactaattttaataaatgctctataataataaaaaagcaacaaaaatatatatatatataatcatacacaatcttttaaatacgatattttggtctaaaagtaaaatacattttttaattagaaaattttaaaaactttaaaatatcagttttgaaagggtggaagattactaataaaaatcggactgaataaaaattaattcaaaa

SEQ ID NO: 66225 - DNA, 334 bp, Heterodera glycines
atggtaatgggaaaaaataatagaaaataaataaaccaataatgaagataaataatttaataaaaaatatatttaaaataatttaccaacaaagggacaacgaaaatcagcccaaaaaataataaaattaaaaaataaattaataaattacaggcaaagggacaacgaaagtcatcaaaaaaaaagtgggataaataaaataattaaattttaaaaatatattttaatttatatgtaaagataaacaatttatttgcaaatgcatattaacaaagaagattttcaaaacagagggaagtgggtccatggggaaaactacaagagtaaaatagga

SEQ ID NO: 66226 - DNA, 194 bp, Heterodera glycines
ttttcaagtttccgtttggggtactcaaacaattatgggagcaaaaatccaacgcagaaataaggtacaggctatagggaagctattccgacaggattcggtctccccataaatctgggcgcatcgggtcggggggactgccccgaaaacaaaaaaatcgattttttcaagtgtccgtttggggtactcaaaca

SEQ ID NO: 66227 - DNA, 314 bp, Heterodera glycines
atggaccaacttatcagtgggcttctcggaggtggcggcggaggagaagcaaattctggtgataatcagccgcagcagggcggcggaggcagtggcaatcagttggcagatatggccggggtaatgaacaatttttttttaaatttaacatttaatttttattcccccaggaattaatcggaggatttcttggcggtggcgggggaggaagcggcgccttgggaggaggcgcaggcggcggggtaaaataaccgtcgatttctaatttttagttcttagccatttcagctttaagcctaattgaaaatttaaaa

SEQ ID NO: 66228 - DNA, 447 bp, Heterodera glycines
ctgagtgcctaaaataacttaaaaataaaatttggtgagtttcagagcagtttctgaaaaaatatttatgaattaattttgctaaaaaaataaaatagtgaagctttaaaaattaataaaaaattttaaattcagaattactggagttagcatcatagcagtgcttttccttgtctttttgatgccctcgcaaaatctggttcgcttctgatcagcttataaaaaaaaaagttaagcctaaaatttttcgcatatttaaaaagcaattaaaaatttttagatttttattcatctccctttttgatagtgtaagcatctgagtgcctaaaataacttgcaaataaaatttggtgcgtttcagagcagtttctgaaaaaatatttatgaattaattttgctaaaaaaataaaatagtgaagctttaaaaattaataaaaaattttaaat

SEQ ID NO: 66229 - DNA, 1158 bp, Heterodera glycines
atggccgacccttcgcccgtgacgcaaaaagcgttggcagccgaagaagcagcgatggccgccacactgctcgagtcattactgtcctcctccacaatggtggttatggcgaaaaaaaagatttttgaaatttaaattttaaatttttaattaggtttcgtcgttggagcgttcgttggaactgtccgctgcgcacagtgacggactgtcggacaaagaggccaaactgaaggaggtgaagaccaccttcaagctgacccatcgccggacgtccagtgtgagaattttattactttttaaaataattatttaaagtccattaaaatacgcgaatttttcggctaatggtacggtaaaatggcgctaattaccataccaaacattagaattttcgttagcatttattaaattttattttcaagtttggacaaccctttgaaaaaattttttcgctttttcttaacaattttgtcccttttttcaaaattttcttgaggtacggcaaattttttatgaaaaaaatcattttgtttagcattttcttacttttcgttgggttttcggctaatggtacagtaaaatggttgatcattaccgtaccaaatattgatgagttttcattagcattctcatttattaattttcattttcaagtttgaacaactctttgaaaaaatttttctcttttttttcaacaattttgtccatttttcaaattttttgaagtccgaaaaattttatgaagaattataattttgagtcaaaaattagcattttcacagtaaaatggttggtaattaccgtaccaaatattgacgaattttcattagcatttataaaaaaatttttatttaaaaaaataaatatatatatatatatttaagaatcctatcaattttttgcgctcaatgcctgcccaccaattgtccacctcatcatcctccgcaaatggtgccaaaagtgttgacaatcggcaccaaaatccacttgccgaagatggaacaacaacagaagaaagtgaagaaaaggatgaagaggaggaggaagaggaggagcaaatttgacaactaattaattattaattgattgactaatgaattgatgaccggcattcgtttaaaaaacgctgaaatataatttatttttccgccaaataaa

SEQ ID NO: 66230 - DNA, 263 bp, Heterodera glycines
atgaatgcgtcgatggcaatgccaacaataacaacaacaacaacatttggcttagtgcagccgacaatggcacaaaaacatgttgtttggcaccgaacacgtgccaatgtgtccaaggcggtggtacaacaacagcaacttcaaaccggagaaattcaagcagtccaacgacgacaacggcaccgggtaccagcaattacaacaaatggccatcaccaacaaaagatcaccaccaccatcaccatcattttcagcataaagag

SEQ ID NO: 66231 - DNA, 2463 bp, Heterodera glycines
  unsure (1)..(2463): unsure at all n locations
atgcacgagcttcgacatgcgcaagagattcgccaaatgtacgaggagaagctgcaacgggtgaacaaaatgcacacaaaaatgtgccgcttcacggaactgatgaacgagcgaaagcgcgacaacgaacgcgtggcggatgcaacgcgcgagcggttggcatacgacgcgcattggcacgccacactgcacgagtggcatgccgagtgcgggaatggcatgctgagctgcgccaacaggcggcgacaatggcggcacgacggggcgacgatgccgtggcgcgcacgaacgttccaaaactggtatggaatgcttatattctntaatataatttaatttattaatttaattttactttatttaatttattattatttaaattattttattttatttttttaaatttaatttaaattgatttaatttattttattttaatttaatttatattttaacatatggattctattatatattttaattttatttttaatatgtatagtgtttttttatttagctttaatggattttttaatttgattttaaaaaataataaatattttttcaatttcatattttatttttgttttattaatgacgaattaattcattcaaaattagtcattctataattaattttaaaagatttaaatacattttgaatagttgaaaaaaatggtttttaaaataatttttaatattttataaatattattaccatttttgaacttggcattgtttaattataaaataatttattaattattatacagcaaaacaacagcaaggaggagctccggcatattctgttacgtgccgaaacggccaaaacggcggcaatgcttacccatgggcatgaagaacccgtcgaacaacaaaatcaacaacaatggccaatgagagcaagcagtgcattcaaacttggtggacagcaaaggcccaaatgcataaggcaatttgcaaaaaaaaaaacatatttttcctttttttatatatttttcgggatttccaaaaatcgagaataactaaatccatttgccctcctgactcttacaaattagggtcaactcttggtaaatttccaacgccaaatctccgtctcctactgatccttatggccaaattatcttggagctcttggggtgaaaagaatctcggccttggtctcgaaaatggaaaatcgagatccagtccaagacctaaatcccgaaatttttctcgagtcgtggcccgagaactactaaattaccgaaaattctcggtctcctgattctcatggctgaaaagagttgatctcgcatattatggtcaagcctcggttagtttttgtttcgaaaattttcacactctcaaacttttcctgtcattttatattttgatgtccattaattatcataattagctattcagtcccgttaaattaactctcttaattgtccaatttggcgcttcattcttcagtcaatcgccgccaactgttgggcgagctcaatgccaagcagtacagcaggctcgtccggcaatgcttcgcatgacatactatgactatgacggcactggacgacggcacattggccaaaaagtgatggcccaaccgcagcaacagcaacaacattatgccgataatcttcggggtgggagaggatttggcacaaatttaaatttgacaaatttggaaaaaattaaattacaaaatttgatgaaatatttcattctctatttcttctattttgctgctaaatttatatatggttttacttttagttcgaaaatttcacgtcaacaaatttcgtcgccgatggtcgcaggtaaaaaaataaataaataaacggtatttgtcaaattttttcgaaaattgccctaatttctttgtctctctactcgcttataaatgtttaaattcgtctaatttttcaaaaaaatttccaaattctcacaaaatttttatccacgtggaggagtactaaaatttcttacaaaatttaaaaaaaaaaaaactaaatttatctaattttccttaaattttttgcgagggacaggagaacatcgtctaggtatataatttgaaaattgaaccctggcgatttaaaattttcctggcgattctccacaaatttcttcaccaattctaggctcagcagcctcctgttcgtcttcgtctcgggattgttcatcagctgaagataatgatgatgataatgaacacccccaacaacaacgagaccaacaagtacccgcaacccaaccaccaccagcaggaggagcagaagcagtagatgcccaaaaacgcagaaaaagttgtcgccattgtaaaacaaataaacggaatatgcaaatgatgatgatgaaattgcatcatcaattgccagcgacgacgacggcaatggtgccacaaattacggcacaacagcaacagaaagttgttgttggacaactgcaggaagaggccagaatgngctcatg

SEQ ID NO: 66232 - DNA, 1254 bp, Heterodera glycines
tgccaattatttgttcgttgccggccattacccaatttattccattggaaagcatggcttctacaacaattgcttagccgaaatggaccacctgatgcgcaacaacaaagtcacggtaataaacacttttctgtttactgttaagaattttatttctttttaaatttcagaatttctgtaaattaaataaaatttgagtatcttaatacaaacttaaatttgtttttgtgtttggaagatgagccaattcatagaataagcatacatttggaaacgctgttaaaaataaaaatcaaaaataattaatttttggcaattgtttaaatttcttcaatttatgtacaaacttaaaaagaaaaattgatttaaatttaaatttatttgttttaatattttccacaggcttacctgagtggtcatgaccacaacctgcaacatttgcagctgaccaagccggacggcaacacgttcgactacataatttcaggcgctggcgcagcgacggaccgaagccaagaacattgggatgaattcaacaagacagccgccgaaatgaagggcaaagcaaaagtccttctccagtaagaaaagcattaaaaataatttaaaaataaaattttattattaaaaaggaaaataaacaaagataattgcctaatttaaattggtggtaaatttaaattagaaaaaaacaacttcttttctatcaaaagtattcatgaaaacttaaattataaaaaataataaaaatgagcaattattcttcattttgaactttaaaattgtgtctcagttttccgtccgcccattggtggattaaatttgctggcgaagaattgctaagttggacaaccggcggctttatccaagcgcaagtgacgccggacaaaatggtgctgaatttctattctggccaaggtaatttagcatttaatagaagatttgaattttctgtgtcaaagtttttgggaaaaaatattttccaaaaaaattttaactgttaaaaacttttcccaggctctgtttgtcttgatcaaacgccgcttgtcggaagtctgcttggcaaactgccatttgtcaaccacaattgcaagagtttgtacggcaccacaacattgtgtccacgggacaaaccaaagtgccgggaggaagcggctgctcaggacaaaactggatggttcagtgggccatggtggtgtatgaagttgtgctgatcagtctgaccaagacaatttgtgatcgggcaattattaa

SEQ ID NO: 66233 - DNA, 515 bp, Heterodera glycines
  unsure (1)..(515): unsure at all n locations
atgaanantggagcggcaaagaaaaaattgcaacaaaaaacatttaaagaaatatttggagaaaaatgggaagaaaaagaaaatgaacagaaaaagagagaaattgttgaaaaattcaacaaaattaaagcgaaaatcaaacaaaaagagagaaaatattcagcaaaagaatggaataaaattgaattgaaaatcggaaaaaaattgggcacaaatcgaaacaaaatttacaaatggatcaaagaattaggattatacaaatgccataacaaatcaaaaacggatgtacaaaaaattgaaattgtgcaaaaatttaatgcaatgaaaaatgaatataagcaaaaaggaagaaaatattcgagaaaagaatggcaccaaaattatgccgaaatttgtaagaaaattggagtaacccaaggagtaattagaaaatggaagaaataattcggaatgaatggaaaaagattaacggagaaagaaaaaatggagaaagtgaaaatatattggcaaataaa

SEQ ID NO: 66234 - DNA, 98 bp, Heterodera glycines; identical to SEQ ID NO: 59716

SEQ ID NO: 66235 - DNA, 403 bp, Heterodera glycines
atggacgagccgaacttcggaaggggccgagcggaacatggccaaagagtcgtggacagagccgaccaatcccatggagggcgaactgggcaaagtgatggctatcatgaagagactgagcaacttcgaacggttcgagcgcgaaatgaacagacggtctggcatgtcaaaactcgacaaatttggcactttcgaacgcgaaacgccaacgaaaaggtaagaaaagcggacgaattggataggcatttgaaaccattgattggcagaatgtcgggccgaggaatccttcgaaatgatcgcttttctcttcaaaatgcatacaactcacgcagaaaagcgttacaaaaacaagacgacgtggacgaagtgttggagttgttggctccctctgccgatgttcccg

SEQ ID NO: 66236 - DNA, 2077 bp, Heterodera glycines
atgaaatataaaaccaatccgattaaagccgattacaaaattggcaacaatgtgagtttattgtgtgtttgggtggcattttcaacaaattcacaaaaatggcatttagaaataattgacgaatccatcccaaaatctgattgttttgaggttaataaataatggcatccgtatttttaaggttcttggggtcggaatcaacggaaaagtggtggaatgcgaacatcggacggacggaaagaaattcgcattgaaaattctgcgggacattccgaaggcaaagcgcgaggccgaattgcactttgtggccagtgggcacgcgaacattgtgaatgtttacgacatttacgaggtgcggctggttttgccattctcatccatccaattgctgctttcttatttagaacaattacaatggcattccgtgccttttgttggtcatggaatgtatgacgggcggtgaactgttcactcggatacaggcaaaaagaaacaaatatttaacagacactatttttaaatttggaatcggttaattttaatttgatttccgttttaggaacggtctggcggtgctttcactgaacgtgaagcgtccaacataatccattcgatttgctccgcagtttcacatttacatcaaatgggaattgcccacaggtctcccaaataaattttgctcaattaaactattatttacattttacttattggcaaattatgcccaactatttcagggatattaagccagagaatctcctctacagcgaaccgagtcccaccggcactttgaaactcactgactttggcttcgcaaaacgatccgaagatggcgaaaaatcactggtcagtgactgttggattggactttgggcaactgtttccctctaaagttggcaatttcttcaggtcactcccctctacacaccttactacagttcgcccgaagtttgctttttgtgaatgcgtcctaattgtccgtaataacccattaaaggtcttcagctcacaaaaatacgacaaagcgtgtgacgtgtgggcgattggcgtgatctcttacattttgtgataattatttttgcttgattttgctcatttcaacgcccttttcagattgtgcggttacccaccctttttctccacccatggccttccaatttccccgggcatgaaaaggtgggttttcacaagagaaagcaatctttagaatgaatgaatgatgctttcgttttgtttagccgaatccgagctggccaatacaatttttcgggccccgaatgggaccgcgtgtcagaagcaggttccttccgccaatcccttgcctttttgccattttttgttttattctcagcgaaggacttgatcagacgttgtttggtcaccgacccggacgaaagggcgacgatcactcaactaatgcagcacaaatggatcactcactacaacaaaaatccggcgactgcattggccacccaaaaagtgttaaatgaaagagaggtcgactggtccaacttttcggtgattttttttctttttccgcaaacaattgctgacaaaagcacgtcgaatggatcaacttgagaatgtgaattgtgtatattagtacgcattttttgttgattattttaaattttggcgacccgaaagcaggaaaatgtcgattttcttccccctgtgccatttttggagaaatttaaaatctaatcttttgcctcatcgaagaaactaacaaaaattaccagcaatataaattcataaaaataggaagagatggaaaatgcattagcgacgatgcgagtgggcgacgtgcacatcaaacaaatgggagacgcgcgaaacgcacttttggagaagcggagaaaacggacaacggaggaggaagagcaaaaagagacactgccggaggggacaacgacggaagagggggactgaaaatgacgaaacgggaaagaatgccaaacacagcccaacaacgacgactaatcaaattgccagatcaaacaaacagctgatatctccatttttcaatttcatattgctaaatttttatttaatttaagaattactaactttttaa

SEQ ID NO: 66237 - DNA, 838 bp, Heterodera glycines
tttaatatttgaattgtttaggtaaaagccgtttgcgaatgttttcacatgtccaaggacacgggctacaaagtgtaggagttttcttctcattttttcatttctgttttattttcagtgttattcatatgatgccgaatttgtaaattttaatttttatattaatattaattaatttattatttctctatagaccaaacgttgacattgaacgagacattgaacaggtcattccaacaaaacaatcaatttgataaaatccgttttcattgtcagtttattgaactgtttgaaaaccccgagttccgaccggacggcctcaaaatttacccgacactcgtcattcgggggaccggcctctatgaactttggtcagcaaacaaataccaaagttacccaccacaggttttatcttgcttttcgcaaattaacaatcatttcttcagtacattacatccgatttctgcttcaggtcctcgttgatttggtcgcccaaattctctctttggtgcccccatggacacgcgtttaccgagtgcaacgagacattccgatgccattggtaacgagcggtgtcgaatatggcaatttgcgagaacatgccatggcaaggatgaaacagttgggagtgaaatgtcgcgatgtgcggacacgagaagtgggcattcaggtgaaaagaagggatggggggggaaatcgaaaggacggttcgaaaaaagcgacccattgtcaggaaatccacgagaaagtccgcccctaccaagtcgaactcgttcgtcgcgactattcggcaaatggcggttgggaaacctttctctcctacgaggaccccgaccag

SEQ ID NO: 66238 - DNA, 378 bp, Heterodera glycines
ctcaatggaagcctgatggtgaaaaaacaaagaaattggaacgattaattgctgaaatgatcgcagttgacatactgccaattagatgcgttgaaaaaactggtttccagagagttttgaaatttttggcacctaattatgaaccaaagtattaaattttcattagtttatccttaatttctcatttctaattcagaggacgtaaattttttacgcaagaaattgcccaaatttacgacgaactttttgaacgtgttaaaaatgacctttctgttcaaaaaagcatttcacttacgacggatatttggacatcatctcaggcaacaatctcaattttgtcactaacggcacattttatcaggtatttagttaattaaa

SEQ ID NO: 66239 - DNA, 91 bp, Heterodera glycines
  unsure (1)..(91): unsure at all n locations
atgcacgtttacggcactgctcaattcccagcttcgttcccgttttatccgccnaacatgactttcctcaccgacattcttcatccgaaca

SEQ ID NO: 66240 - DNA, 172 bp, Heterodera glycines
atgacgcaatctagtgccgatgttgaggcggatgttgttgaaaatatttgtgtgaaaagttacacggacaaaaatgaagaccaaaatggacaacgcatcaaaggaatcaaggacctaattgatgaacaagacaattataagatgatcgaatttttgaaatacgagattgaaa

SEQ ID NO: 66241 - DNA, 1646 bp, Heterodera glycines
attatgctgttgctcttcataacaaattcattaattatgctcatttttctcccactgcaatttgccgttgcccaatacccgcaaaatccgtcgctcggtggcacagccggcggcgattttggcgccggcggaattgggcccggtgccatgcccgccggggtaggtggcgtcccacccgtcgctggcgccgggccaaacattgggcccggcggtggtgccacgcttttcaccggtggcacagacaatttgctttacgggggtttgtccaaaaaaaattgaaatgctcaattcggcattatttacagtaaatttggtgccatttggtcccgaggttggcgaccacaaagtgcaccccggctttttgaccgcagggcaaacaatcggcaagtgattcatgccaatggcatgaaaaaataaagcacatgccattctcagatctgtacatgtatttcccttactacggtggtctttacaattacactacggtattattatcatactttgaaaagccaggggacctgagtttaaaattggagttggtagaagagtttagacttcataaagaatgaattctcgggtttcgaaaggcaaaatattaatttaatattaaaattaattattgcctaatttgccagctttccgtcaacgggtacatggcttttgcgactgtgttggaccaggggccgaccatcaatgtgggccccgaagcgacagattggccacgacagcaggacccggcaatgatcgcgccttacctatgcaaacagcaggtaaatgaatatgtaattagtgctgatcaatattactggtcagaatgatattaaaattattaaacaaagaattaatctatttaaaggaattaattagccaaacaaaaacaaaatttgccttacttagaattgaaatgattagtttgaattgaattcattttcaattgagttcattttttgtttttttgaatttaaaagaaaccgaaggattgcaatatttttataattaattttaaggaaatttctaaaaattgtcaaaattgggtcagaaaaggcaaaaattaataaatattttcgaccatttggagctttgttattttaaaaaaattcattttatcaaatttttttaaatgaccagcaatattttattcctttaaaatagaaattttaattttcaatttaaatctccaattgaaaagcatggctaatcacaaattttggtccccaaaatgccggttaagtttttgcaataaaattctaattgcaagcccattactatacgctgactaaatgccgtagattccgcaaagcagcaacgtggcattgagggctggcatttactaccggctgatcatgcgccagtccatctttggccgtggcacggccacaaacattgggcccgacattggcaccatgcccgagtccagcttcttcggctttcgctttcgcaagtgtccggccgcgtccgacaattacgtgcgctgcgattccaacggcgactatttcctggaccaaatgatgcgatggctgcagggcatgtcaaaatgccaaaaaaaagggaaaataaaaacaaaattgcaaacaaattccagagggcgtggcaggcgcggccgcgaaaggtgccgacgcggcgctggtcgtcacgtggtacaacac

SEQ ID NO: 66242 - DNA, 327 bp, Heterodera glycines
gagggcggcactttgttggcgcccgaccgcgccgcgtatttgcgccatttcaatgtgaacgtcgtcggcaccgtggccaccaccgccgcctttttgccattgctgcgaaaagcggcggcaacaaattcggagggccaaacggaggagcagcaggcggcgcccgttgtccgcgtggtgaacattggcggagcgttgggatgcattggcaaagtgttcttaaagccatcggagtgtccgtatcagaacatggcctatggcatgagcaaggcaaaaacaaaggggcaaattgatggaagaagagacaatcttaagaaatggaaaaaataa

SEQ ID NO: 66243 - DNA, 882 bp, Heterodera glycines
  unsure (1)..(882): unsure at all n locations
atgttgttgaaagcgatgccaaccaaaagcattcctaaaaaggcggaaaatgaaaaaataagcggagaaagtgccgaagagaggtggcaaatgggccaaacgaaacaaatggccgacgcaaagtgcggaggcccaaaggacgaaaagggaaaaaagcgatcggacaagctgatcaggcacttgttcatcggtggaaaacaatgtcaaattgggagaagcgatcgacgaattgacgacgatcagaggggaaatgaaaggacgcgcgaaaagagcgaccaaagtgccgtagagagagaggagaacgaacagcgaagtgagcaccaaattgacctggcaaaagcttatacatatcatttctcataattctttttgctattttaaaatgccaagaaacgaatgccaaacccacttgtttattggacacaatccgagacaatttccccaacagaaagagcggcattttacagttggccgacctaaacgcgaaatggacaaatggatgaaaaggcaaaggggggggggnnnagggaggggggagttggcatttgtcaggggacatttggctaaaatgcagacaaaaactgagactctgcgtaaatgctagatattaattaattgcttgtcattactgactgactaattgcggattgtctcagtcgatctttcagcgccctaatggagagacaggcttaaagtttaaactgtctcacgacataaggcgataatctgtgggacgaacaaatggaggaactaaagaaggggaatacgtaactaataattggattatgaaaatgatagttgaaaatgcgtcaggataacaaactccattcttgaaataagatatcagataagtgtaatttgcctcaaatgaaaacaaggaaa

SEQ ID NO: 66244 - DNA, 419 bp, Heterodera glycines
agaaagtggaagaggaacagaaggcggaagagaaagtggaagaggaacagaaagcggaagagaaagtggaagaggaacagaaagcggaagagaaagtggaagaggaacagaaagtggaagaggaacagaaagtggaagaggaacagaaagcggaagagaaagcggaagagaaagtggaagaggaacagaaagcggaagagaaagtggaagaggagcagaaagtggaagaggaacagaaagtggaagagaaagtggaagaggaacagaaagcggaagagaaagtggaagaggagcagaaagtggaagaggaacagaaagcggaagagaaagtggaagaggagcagaaagtggaagaggaacagaaagtggaagagaaacagaaagtggaagaggaacagaaagtggaagaggaacagaaa

SEQ ID NO: 66245 - DNA, 171 bp, Heterodera glycines
atgccacccattccgatcattccaagcgagcggacggcacagccccatcagcaacaacaacatcggattgtgccaccgcctccgcctggtccgccgcctccggcaacgcatggctcacaaagcggcggtggtggtggggctggcggtattcaccatcaaccgagtttggag

SEQ ID NO: 66246 - DNA, 539 bp, Heterodera glycines
aggaatatatttttaaaagcattgatgacgctgaaagtaaaggagcacctattctacctgaggtcctcaataaacttcaaataaatagtcttcctgatcatgaacttaaactcaaaactaattgtgttacaaaattaataagaaatttaaacgtaaatatgggattatgtaatggaacacgtttacaaattcttgatatcgaaaaaaacgtattaagagttatgatcttaacaggagacagaatcggagaaattgattttatccctagaataagtttaatagaagataaaaaattccgtatgtacttaaacgacatcaatatccattaaaattagctttttgtatgacaattaatagtgcacaagacaaacttttgagaaaattggtgttgatctaacacgagatgttttcgctcatggccaattgtatgtggctttatcaagaacacggagctgggaacgaattaaaatcaaatattccaatgaaaataatgaaaaaaagcaaagaatatcgtatggttggaaactttaatataaatt

SEQ ID NO: 66247 - DNA, 1599 bp, Heterodera glycines; identical to SEQ ID NO: 37080
  unsure (1)..(1599): unsure at all n locations

SEQ ID NO: 66248 - DNA, 1039 bp, Heterodera glycines
atggcatggatgacaccaaattatgtcagaaacaatgccaacaacagaaacaataacaatgtgccacagcaacaaagaccagccggatcagtgtgacaacgatcagtaattactgatttgtgatcaatcacatgaaagatttttgctgattaaaaaaaaattaattctttggcataatgtttcaatctcaaatttcaccaaaaacatttttagattttttccaacatttgcttaactgtcccttatttatgtatttatttccttgtaattttttaaataaaattgttttttattatggaatattttctttctttttttccccaatggcacacaaggacaaattcataccctgatttatttacaaaaaaaaattaaatagctcaagaatgttgtgcattatactggcaccggaaaacaaaaaaaaaaaaaaatttttttttgaaaatttccatgattaaattggtcgggatgaggcaacaaagtctgttggatgaactttcatcatgggacagcagggatgtaccagggctgaaaaattctctgaattgtttgaaaaccgataaaattcttgaaaatctgctaaatttggcatttttttttggattttcaaaaaatttaaacatttttttgtcgtagaaaaatctattttttttcatatatatatatatatatatacattaattgtagtttctgcatcttttgccattttcttggtgcatcgattttctccgtttattctcaacattctacgccgagcggtcgttccgttacatccattaaatttgtcacctcatttttagtaatgatgcattcattttatacacccttaagaatctacctaaaaaaatttcaaaaaatacacccctaagaatcaagctaaaatttttcaaaatatactcctatgcaatgaaaaaaaattttctcaaaaatttactttcttggcaaaaaaatttaattttaaaaatttttttaggtaactattttgggtttttttgtcttaaaaatcccagtcctacgcatttgcaactgcaatcagtga

SEQ ID NO: 66249 - DNA, 1794 bp, Heterodera glycines
atggaacaattggagagaaagtgtcaagcgaatggcttctccgaaaaaccgaaggagcttaaaacattgggcgaatccttgcacaaagtcgaaacgcgaatttatcgactgagaaacgcattgaatgcgtacaaactcagaattgacaacgcacgacgattcaaagaaataatcggggaggtgggccgtgaattcatttgtatgaatcctcctcaattagaatatttcacagttccacaaggaatgtgacgcactttttctgatgctttatgagaatgacggcgttggaaagaaccgaatatttaaagtgaatggaggccaaatcaaagatcgggtcaagtcagtaaaggagcgccaagctaaccttggtttaattcggtcaaatttctctttttcattttgctattatttagaaaaaaaatttgagttggcgtcagagacttcatcatctttccgttttttattgctccaatgtgaaaatggggaacacaacagcaacaaaagaatggattttaatactgaagaggttctcctgcaaatctctgtagattccgaagcactgacaaagcgtcgacagcgatttgccaaattggtcgaattttgggttcagttattaaactctcagtgttcaatttctctgcataagaacacaaatcacatttcggcaaagatttgtggaggctttctaatcgatgctgtggacagaaagcgcgaaaacgatgaaagaaaactgagcaactgcaactgatacataataagagaaaaagcgaaagaaaaactcaatatctctgatatgctttcaaaaagtttcagtatttactttataccttttttattagaatatttaaatttatgtgcgaatgaaaaatgaatattttttagaatgttccttgtatggcaacttgatttactgttgaataaatacagcaaagaaaatgattgctaaaattcgcgctatttataagcaacttgttatgccttagttaccgattccagccactcattttcaagccctataaaagcagagaattatgtttgcattttcatccccttcatcattcacttttgccagcaccgtcaattgcacacgcgtaatttctgaggcccttttttctgattgtcatttttttttcagttacagaaacagacagttttgctcaagttcatcaacagtaccattctcaacaacacctatcaaaatggcacgacgaaggaaagaagcgggaaagcagtcgtacaaggtacagttcacaacttgcttaaaaaacaaccaaattgggtaattctccccccccccccgcctatttcagctgtacgttcgacggatgctgaagcaaactcacccggacaaggaaatctcaacgcgtgtgttgaacatcatggagtcgtgagtttcggccgtaaaggctcaagcaatgaattttaatttttttcatccaattttttcaaaatttcatgttcctcaacgatttgatggatcgcattgcagcggaagctacgctcattgctctctataaccgccgcaagaccatgaatcttcgtgatatgcagtccgccgtccaactgtgcctccctgtcggaatggccacgcgtgcgaatcgcaaggcatatgatgtggtggcacagtacaatgctgctaggaaacggaagggcatcttggggcaattctgcagttggttgtgattttgagggagcaatgaggacgatatttttgacatttgatgtacagtgaatatattgtaatgcaagtctgtatcacatgttcagttgttatgcataatacttgtcaataaa

SEQ ID NO: 66250 - DNA, 217 bp, Heterodera glycines
  unsure (1)..(217): unsure at all n locations
gtttggccatgatggacnggatggtcgtgattatgttatcctgagcaagcagacaacaaccgaaccttcgcttactgtgccggaaaaatactgtaatgggcacaataacgacaacaatggtacgctaacgccgccaacagctgctgaaacaagcagagaagcaaagaaagggaagaaaggatgtcggaagaaatagtgcatgcggcatagaaataaa

SEQ ID NO: 66251 - DNA, 563 bp, Heterodera glycines
atggtactcagtatgacagtagtcaatttgttcattttaatggcagttgtcatttatttattgctttttctcgcgataagaaacgtatcaacaggtgattaatttatatgccggtaaaagagttggaatttcgagccatgggaattaattaatcatgctgacgttttataaacccgccaatgtaatcagcatgcattttatataaaatgaattaattaatttttattcaaattgtcggtcaggcggtgccgatatgcccaccggaaattttttgaaaatttaatctacttctgaacagattttgtccaacaaaaatgggtggtcgatcatttcgtcactgatcgtttcgtcactgagaatttttttaaaaaaaagtttggcacatttacataaaattagcatccctattcattatgatcaaagggctctcaactctgctgatttatcagcattttgctgttttcaaggggtataagctgctctttgaccccaattgctgtttattgtcggtaaaatactaatttttaaaatttttagccctgattatgaccacaagtgtgtaa

SEQ ID NO: 66252 - DNA, 359 bp, Heterodera glycines
atgaaatcacttttattttttaccatttttttccttttcctattatttgtgattgccacgccaccagcttcgaaggaaccacgaaatgttgaagagatggaacagataaacaacgaaataaaggaggaaggaatgtaagaaaataaattagaaaaaaagaattttgaaaaatatttgcttgagggaggtcagtattttgaaaaaagcctggacttgctggacataaattcaatgttggaactgaaccacaattttatgcataaaaatccaggaaacccaggtccagcaaaaatcctggcttgcccaggcctggacatggatttttaaattgggttttaaaagtaacaaaggataattaa

SEQ ID NO: 66253 - DNA, 1218 bp, Heterodera glycines
atgacaaggcaatcaacaaactcaaaatgcggaaagacaaaattaatagtaagaaatttagaagtgaaattccgaggttaatatagaatgataatggctagagaccatctagaaattaacaatatacaggagataaaagtagcaaagactaggcacaaatacaattaattaatatatgtaagtgaccggccgaattataggttggtaatcgagcaaagaattttattttgagtctacatatttaagttaataataattagattatttattttatgaaatattaaaagttagtttttgtaaaaaaataattattatcacggacgaaatcccttactgacgaaatcacatggtacctaacagagcccggttatggatggatatttgggtaaattaaaaaaataagggaaaaagttttcaaaattttcatgttttttttgaaggccgaaaaaattaactagcattaaattttaactaaaatttattttgatatttatttttcatgaattttttcgaagtgcccatttgataaatcacagattagggcgctctactggtgccttattaatttaaaataaaataattgataaatcactgtttatacaataaaaatgctctattagtgccttaattgataaatcactgaatagggctctatctattggtgctttattgaataattaaaaaattgataaatcactgaaaagggctccactggtgccttatttgcatataaaagtagaaattatctgaataaaaagcaagacaaataaagaataattacatttatttctttcatcacgtcaatttccactttattttattttatgaatttttaattgtttttttggccagttaagatgtttaattctgtataatttataattttaaatgataaactttttttgtattttctttgttaagctattttcaaaaaaccattggattaattattagctttcagaggcgagacggaaagtttcaaaactttttaataaaaatataattatgaatttcacatgaaaaatgatgaaaatctctaaaaaaaatctcattaaaactgttacatgaaaaatgattaattaattttcttttttacagttttatgcattttctgttaattttattgtcactttggatagttaaaatctttcaaaatgccatgagttttgagaatcataagactttggcactcaaaaattgtaattaaatgccaataaa

SEQ ID NO: 66254 - DNA, 731 bp, Heterodera glycines
atgtttaccttttattgttcggtgcatatcgattcagtgccgacgattcagtgccgacgattcagtgccgacgattcagtgacgacgattcagtgtacgttgaaaaaccgacaattcagtgtcagaaaatttggcaaaaaaattccaaaaaacccaaaaaattgcaaattttattaattggaaaacataaataacgcggtcggccagtgtaattgttgatgagggccggttccgtctcaaatatttttggactcaaattttttaaaatcaataactaatttagaaaaaaaaagtaaaaattcttttacttcgcagcctaccgcagcctaaatatacctggttttttaaaagttgtggttaattaaaagtatattcgaaaataaaattttttgaaatgaatttaacattgcaaatgtccagtaattctgctcgggattctcagtcttggtcctcgtgtcgggaaatttagcagccttaatgtgtccagcactttgtttgcagcgaatccggcacccattttggaccccgaacccggaatataaagattaatttacataaatttcgtctaattttcaaaaatacaccccctgagaaatgaaaaatttcctcaaaaattttgttattttatacgcctaaattgaaactttaacacctattttgaggtttttagaaccgaaaacctaaatattttggcagtttttagttttgaacacccaaaaatattaggcata

SEQ ID NO: 66255 - DNA, 111 bp, Heterodera glycines
tacaaaaagggccattactttgtgaagcgacccgcgctcgactactttctcgacatggtcggctaccccaactttgagttggtcatatacacatcggaaacgatgatgcag

SEQ ID NO: 66256 - DNA, 547 bp, Heterodera glycines
  unsure (1)..(547): unsure at all n locations
atggagtccctaataattaataaaaagtaaatcattattatttccacagacttctcaatggctggaaaatttgtgccgaatggaagcggcggttgaattgacaaactttggcatttttctgattttgccaagccacacttggcaaagtgtcggggccgaacgtcccaacagcggtgaatgacttattcgaaacaattggcaccacagaaattttggaacaaattaacgatccctgcgacacaaattgcattgatcagatggtgaagcaaaagttggagctgatgagtaagccattaagccgaagtttaatactgcgattttaattcattanaagactaaaacataaataaaattttgtttttanaaatagcattttcctttgttttattcgggttcgtttggccatttggatgtcattttcgcgatcatcgccactctaaaaatgccataaaaccttcattttttaaggccattcatattaaatttcagaccatctgaaagacaatccacgatgactgaactaaaaggacattgtcgaaggaaatga

SEQ ID NO: 66257 - DNA, 968 bp, Heterodera glycines
  unsure (1)..(968): unsure at all n locations
aaattcgagcgcagcagcgaaagcattgacaaaangaaagggctaagaagagcggagactcttttcttgacactttgttggacatggagggcaacgacactttggagccggaagagttgcgggagcaggtggacacgttcatgttcgcaggtccattcggccccctcccggaaaatttgctattttttgaatgtcttggattactggagcgtcctttgtgtcccattatgccccatggtacagtatccaacagtaacgcctttattccggggaaggatacaattcttaggccattctacccgattcggtctcggaaacagagaatgccggcggaaaggaccgatgtgaattaagagtgatcgagagaaagatcccgggcggcgtaattaaagagggaggagatcaaagaaccgcccattaggagagaaacaaatgtttgggacacaaaatagaaaagtgtgaaagatgaatcaaaaaataaaaggtaaagaattggataaaacgattaatattattatcatgttcggcatcaaaagtttagatttttctgctgaccctttccccgattagggtaattaaagtgttcctttccattcggctttttcatttaggccacgacacaacatcccacgctctgatctggacattgtggtgcattgcgtgtcatccccaataccaacggcttatccatgccgaaattgatgccaaatgccaagaaatgaatgccaagggaattgtggaggaaatttcgtttaagccagcggatgtgaacgaactgcgctacatggaccgctgcattcgggaaagtcttagaatgttcccggcagttccagtggtcgagcgacaactgcaaaatgatttggcggtaaatgggaaagtttggccccgcggggcattggccgttgtggctccgattctgatcaccacaatgagcaagtaaagcacagcattcaaaatgaatctacagc

SEQ ID NO: 66258 - DNA, 228 bp, Heterodera glycines
gtaaattttgtaaatgagaaggaattcgatgttgaggaattgacgaaatttaacgagaaagcgcaagagctgaagtcgaaaaacggaagaagcaatgacaagccaaaagtgatcggaaatgaaaagactgtgcccaaaacggacaatggcggacagaaaagaggtcaaaatggaaaaagatgggcagaaaaaagttggcactggggcatcaacagtgaagaagactag

SEQ ID NO: 66259 - DNA, 559 bp, Heterodera glycines
atggctctctctgcccttctcctcctccttcctctgcttctcaatgtgcaaaatatcccaggtaattcccctcaccctttgctttgttccattggctgtcccttaagatgagtccgtccaatcggatgtgaaagccgttgattcggccatttcgtcgctggaacaatggaaggacccgcgcaattcgttggcatcactcgactcacagctgacagagccccaacgagcactggccaaaatgttttgggaattggagaccatcgaaaaggaaaagccgaaggcaccgccacaattcgacttgggacttttcttggaagctttggaagcgatggtcgaaatgaacgaagaagcaaaggaagtgaagctgagaaaggacaaactgaccgaatgggcaggcggagagaaagcaaacgaagggaaagaagggaagacgaaggaggaggagacagtgccggaagtgagagttaatgagaatggaaaggtggaagtgacgaacggcgccggaggggacggaaagatggaagtcaagcgaggaaaggacgagaacggaaacgagcag

SEQ ID NO: 66260 - DNA, 487 bp, Heterodera glycines
tcatctaatctgatctgcgatcgttccggtgtacagaaaatttcgtttcagacgggcaaagaattggcacagcggtggggacacaaaacgatacgccacatttaaaaaaaagtttcacagatataccaacatcaaccggcagtacgaaccgatgtacttggcacctccggaaagcgaagtcggaactcgaaacattacaatatattttttcaaatattttccagaaaggcaaaggcgtccatggatgttttccccgtgttgaggacaccttccgcaaaattgtcgccaaatgctacggcgacattttgatcggtgcgttttggggttttggcactttctattccaatcaccaaattttttttataaaacgatgaaatttatcaataaatatttttctttttcagtgtcccatcaaggcccagtggccgccctgcaacggatgttgaccggaagcatggaattcggggggagcgcaacagtgagcaag

SEQ ID NO: 66261 - DNA, 2263 bp, Heterodera glycines
atgccttcccccatccgccttttcactcttttctctcttttcctgtttctgcttcttctcctcccatttttgtccttcgccgctttgtccccccgagagaagcgccaattcagcttcaccgatggcttctcaagcggcacaattttgcagccgggcggcggcggacttttgggttcgtggggctgatcatttggccgaacatgcgaagaatgagaagagcatgagcgtgattattcaatgttgacgaatttaattgtcaaaaattatcttttatttatttttaattcatcatttataaagaatacggtatctatggtatacctactgtatgtaagagagtgaattgtttgaatttgaattccaaagactgaaaaactttaaaagaacggattaaatacatgttgaattaaacaactgcagaagcagtcgattcgcgcagaggcggagaatctttggaaatattccgagactctcgaaatgttcaatttcaatttgaaaaacaaaattaaaaattcgatattacaattaataattaaaaaatattttttgttttgttttaggcaatattgtttaatgattcattgcgttccagcgaaagaaaggattattcatcatttgaaaatgctttgtaattgtatcgtttcgtttcggtgaatgtgtgggcatttgtcgcccaatcgccgccatttatttgttattttctttttttcgatgtttttatgaataagcatgaacaaatttcaatcattcttgtcgatcacccaaacattgtcattcatttgccattttaaacgctcccaaaaatgatatttttaatgtcaaaaagttaaaagatggcgaaaaacgcatttaaaaggccgttgatcgtttacaaaaacataaaagaaaagttattctcaaaacgaaggatcactaaagagaattcttttttaatcattctcgaaaatgccaccgacttgggccttagtgccgcttttgcttctgttctttgtccatttcattgatgtcggattcgctcgtcgctacaaagcgtcaacaaaatacaatccgccggcggaagaaacgacgacagaaacgacagaattgacaaccccaacgggtttcaattattaattaatccgctttcaattgcttttccttttttctgactgtcaccggttttttcaaaaaaaaaaaaaattggtgttggttgcttttccaatgtgaacattttccgccagaatgccctgcgccggtgtgcccatgcgaatgtcccaccgaagaaacgtctgaaacgcctccttcgacgggcgggggagggggcactgacgacatcggtccgcccgaccgttcaaaattcaaaatattgcttacaattagtgtgcttttaacgccgcatccctttttagtgacctcgccggaaggagaggagacgaccacgcccgtctccggttgtgttccgggcccgccggggcctcccggcccaccgggcccagcggggcaaaaggggccccagggaaaatgcggcgacaatgcgagcaaacgcaaaagggaagcagcagcagtgccgaaggagtttatggtaaaagagcgaaaactgggcaaatgaatgccatcagtagttggaaaatcaaattaatagtaccaaaagatactaattatcttattccgaatcattgttcaaaccttttaatcttaagacgaatttggaaccgaatgtgccagtcaaacgtgcaaaagaaggagaagccgttgcaaagacgcattttgcacgtggccatgtcaaggggggctgtccaccgggtcccccgggggagcctggcactcccgggcctccgggccctcccggagacccggcgccatgcccgaagcacatgaaaagcgaagcgcaaagcgtcgatggcaaacaactggctaacagaaacaaacgtggggagacggtgctgaatgctgcaaaggaggggaccgaagtgaaacgccaaattgtgcgccatgggttcgtttttgggcaaatcgccgtgggcgaaacagtaccgaaagtgcaaaattgagaccattgttttgtatttggcaacactattttcaaactcattgatgagttaattaatcggtcgggttgaggggtacctaacaaaaatattggaatttaagcattggaccgcccggccccgccggaccgccgggagaagcgggcgaagacggagagccgggcccttgcgaatgttacaaagaccaaaaaagtcaatgaacgaacgcaatttatgcgaatagcacacgaaataaa

SEQ ID NO: 66262 - DNA, 1886 bp, Heterodera glycines
cttttattttatatttcaacattagtgtactaaattaagtaatattttggtgattttcccttcccggcacctttcaacacatttttttattaacataaaaaaacattagaaagagcacaaaattttctgcctaaatttgggaagagtgagtttgggtaggggataagagaaacgagagggaaagggtgggagagagagtacacatagagtaggattccagagaaatgagagggaaagagagagctaaagtaccattcgtgtaactctagccttgtctactcccattccaaatagtaataattattttcttcttgccttctccttgctgggcacacacccacccctcatgggtttgggacctctatgaaaaatactttttggaacggggccagtccgtaatggccctttaaataattaattatttcattaatgaagcaatctaaactttggaaatgaaacgatcattttcaatatccggcgggagtccaaataagaaattgattcatttataatgcagtcaaaattcaagttagtcagatttaaagcaataaaaaattttttcaccaaaataaatttaaaaaacattaaatttgctagttttatttcgtgtgctattcgcataaattgcgttcgttcattgacttttttggtctttgtaacattcgcaagggcccggctctccgtcttcgcccgcttctcccggcggtccggcggggccgggcggtccaatgcttaaattccaatatttttgttaggtacccctcaacccgaccgattaattaactcatcaatgagtttgaaaatagtgttgccaaatacaaaacaatggtctcaattttgcactttcggtactgtttcgcccacggcgatttgcccaaaaacgaacccatggcgcacaatttggcgtttcacttcggtcccctcctttgcagcattcagcaccgtctccccacgtttgtttctgttagccagttgtttgccatcgacgctttgcgcttcgcttttcatgtgcttcgggcatggcgccgggtctccgggagggcccggaggcccgggagtgccaggctcccccgggggacccggtggacagccccccttgacatggccacgtgcaaaatgcgtctttgcaacggcttctccttcttttgcacgtttgactggcacattcggttccaaattcgtcttaagattaaaaggtttgaacaatgattcggaataagataattagtatcttttggtactattaatttgattttccaactactgatggcattcatttgcccagttttcgctcttttaccataaactccttcggcactgctgctgcttcccttttgcgtttgctcgcattgtcgccgcattttccctggggccccttttgccccgctgggcccggtgggccgggaggccccggcgggcccggaacacaaccggagacgggcgtggtcgtctcctctccttccggcgaggtcactaaaaagggatgcggcgttaaaagcacactaattgtaagcaatattttgaattttgaacggtcgggcggaccgatgtcgtcagtgccccctcccccgcccgtcgaaggaggcgtttcagacgtttcttcggtgggacattcgcatgggcacaccggcgcagggcattctggcggaaaatgttcacattggaaaagcaaccaacaccaattttttttttttttgaaaaaaccggtgacagtcagaaaaaaggaaaagcaattgaaagcggattaattaataattgaaacccgttggggttgtcaattctgtcgtttctgtcgtcgtttcttccgccggcggattgtattttgttgacgctttgtagcgacgagcgaatccgacatcaatgaaatggacaaagaacagaagcaa

SEQ ID NO: 66263 - DNA, 382 bp, Heterodera glycines
atgccaacaaacgatggaaggagggaaccgagtgaaaagtgagaagcaacgaagccgcgcataaccaaatcctaatattgtcttaataagcagtaatggcggaatgcgcgaacgaacagatgacactgcacgtccaattcaacgaggacactttgcaaaacggacggttcaccgattggataatcgtacgaagggaatgccaaaatgggaatggaattatattttgaaaataattcaaaataaaaattgaaattgaaaccccaaaaggtgggaatgacaacgcgacccgaatgtcgcctgaagggaaacggcgaactccgctacatcgtgcaaattgccgttctgaaggacccatgggccaccaaattaatggcccctggca

SEQ ID NO: 66264 - DNA, 293 bp, Heterodera glycines
atgggtcatcataattcagcgacgttcctttttggcttacttttaggtaagaaatttaaaattatttataaaattataaattcaaatattatttttcttttaaaggttattttttgcccgaattggcggcacagcttagcaaagatgagcaggattattgcgtcaaattcagcaacaatcttcgcagcaatgtggccactgggaatcagcagaacaaaggcggcggcaaattgccatcggccacgaatatgttggagttggcatataacgagacaattggccaaactgcgcaa

SEQ ID NO: 66265 - DNA, 222 bp, Heterodera glycines
atggcaaaaaaagtgccaaaaaatgttaggcttttgctcacctgtcggtcagtgaaaggagtcgcgcatgcaattgttggatgtattcacggacagagtcaagctgtcgcaacatctgttcaccatcgtccagcgaaaaatcagtacgagaatattcacgatcaagatggtcctggaatggagtcaattgcgataatttaggggcccaatcatttaaataaa

SEQ ID NO: 66266 - DNA, 56 bp, Heterodera glycines; identical to SEQ ID NO: 57643

SEQ ID NO: 66267 - DNA, 218 bp, Heterodera glycines
atgagtaatagtgatattaaaaagacaattgacatttggattggagaagcagaaaagtcagacctccagcaaagggaaatttgggtttttataggagttgaagaaaaatttgtaattgagggaaattttggtaagaaaagtttgaaatagtagaattatatattgttttttttgaagaaattgttggcggtctggcagaactcagaactatttattga

SEQ ID NO: 66268 - DNA, 144 bp, Heterodera glycines
aaacatgacatcatcgaaattgcgctattaatctatattccgatcctgatcagtcaaatttggcatcaacgcattttcttcccttttcagcaaccgacggcaccggtcaatgccgtgccacagcagcagcaacaggcggcacag

SEQ ID NO: 66269 - DNA, 1225 bp, Heterodera glycines
gtgttgccggcggcgaacgaaggagggaccagcggcggaagtgagcagcagcaggccgaagcagcacagcagaaaccggggcagtcgagcagcgagaacagtgctccgagcgcagcggatggaccacgggtgggttaatacttttttaaattaatcgcttttctggcatttttagggtctcttaccacttagatgtatgtgataagagtcataaaatatgagttccgggaatgcctcgactgttttcgacactttctcgtgccaaaagaaaaactaataatcgttaatctctcgttaaaatctttgagttttttttaaatttcttacggatggatattttttaaacttttaaaaaatgttgtagagaaaggtggggatgacctgctcgcgcccaggcgaagtgccgagcaggatatttagggaaatttttttcaaaaaaatccctcattcattactattaattctatggcaaatttcttgaaaatggcaggtgtcggcggggaacgacgtcggaggcagcagcgcaagtgatgagcagaacagagcaggaccaattgcagcacaaccacaaaaacaggggccgagcaacgcgagcagtgcgccaccggccgaagcgcaggtaaatgtgaaggcgaattaagtggccataacaaatatatatttaaatgcaattttccatgtttttcagtcgttgggccaacaggagcagcagccgcacgtggaaaaagtcgagggtaaaaaatattaattaatagatgggaaaagcgcgatcatcagcaggggatggcggggcggcacttggattggaaatggcacaatccaagaaaaaaatttgaaacattttaaacgattttttggtaaatatttaaattttgttttcaaaatttaatttggtcgaacattttcagcaggtggtacttcgccatggatcattgttggctcgatcttcggaggcattggagccggagcgatcattgtttggatcgtcattagttgtgttaagagatgccgtaaacaccatccatttgacatatttaatgctttaaataacattcgattattttattaagaaagaaacaaatgcacaacggaggaggaggagaagccgaaaagtgccgaagtgccgccggaagcacagcagacgacgacgacgagcagcagcagaagcagatggggcctgagaggcttcagctatacaaacgccgaattcccgaaacgtaataaa

SEQ ID NO: 66270 - DNA, 56 bp, Heterodera glycines; identical to SEQ ID NO: 63336

SEQ ID NO: 66271 - DNA, 816 bp, Heterodera glycines
aacaaaaaaatcgattttttcaagtgtccgtttggggtactcaaacaattatggggagcaaaaatccaacgcagaattaaagtacaggctatagggaagctactcccgaaggattcggtctccccataaatatgggcgcatcggttcggggggactgccccgaaaacaaaaaaatcgattttttcaagtgtccgtttggggtactcaaacaattatggggagcaaaaatccaacgcagaattaaagtacaggctatagggaagctattccggaaggattcggtctccccataaatctgggcgcatcggttcggggggactgccccgaaaacaaaaataaatcgattttttcaagtgtccgtttggggtactcaaacaattatggggagcaaaaatccaacgcagaattaaagtacaggctatagtgaagctattccggaaggattcggtctccccataaatctgggcgcatcggttcagggggactgccccgaaaacccaaaaaaaaattttttggataaaaattatttaaatgaactgactagataatatttaaaataggttatttctcttcctttcagtatccctgcaaagtttggtgcgcttctgatcagtttctgaaaaaaaagttaagcctaaactttttggcctgtttaaaaaggaattaaaaatttttaaaaattttattcatctccctttttgatagaaaaagcatcagagtgcctaaactaacatgtaaataaaatttggtgcgtttcagaaccctttctgaaaaaatatttaagaattaattttgcaaaaaataaataaaaacgaa

SEQ ID NO: 66272 - DNA, 1845 bp, Heterodera glycines
  unsure (1)..(1845): unsure at all n locations
atggcggcacaacaacaaaaggccaacagtgcgttcaagaagaagctgaaggacaatttgcgcaaaaagatggacgagaaaatcaaaagggacttcgagaagggatggttttacaatgtaaagctgagctcggaagtgacggagcgggaaaagctgcgcaattggtgggctaatggggcaacaattattgaagtgattaaccggggaacttaatatgtgttaattattgaggactgataattatgaccagggttgccaactcaaaattttcaaaatcaacatttaaaaaccaacatttggggtcaaaaagtacctttttggaaatttttccaaatgaaaaacaataaaaaatgttttttttttgcggcgtaatttttcaaaaaaaaaaaacaacttatttttgggaacaggggaccggcgatgttgataggctaacactgtttatgatcataattaattgatggagaattgtaattatgctaaacctattaaaaaaatattattattgttttttcattttaggataattgatccaaatatctgacaatgaaaatggaatcgatcgtcgcactttttaatttttgctcctaaaattgtacttttaattttgttaataaacaaaagaattacaagcatttcatcttcaatatgtagacaatttttttgtggaattttacatgacaaaaagaaagcttttatatgtganaatttgcccacattggnnagacaattgataagaanattggcaaaatgttttttgggttttgttttgtcactttgaattcgttgaaaatgggcgacacattgcttaattgggaaagacatatacatttggaaataaaaggggcaaataaaagcgaaaaagcgaaaaaagggggaaatggtcagcagatgccattcccgcccgaatgctgatttttacaattccgatctcgagaaagcaaagactgggcaatgatgagatttttaggcaataaaggcataaattagccaattgtgaaaagaaatatttacttttcttatttctgtgccaatttttgcgtttccgtgcctaaaaatctcatccggacattgcatcgtttgtcggccttttgtccgttcgctgctaatccctacaaatggtcgaatttgaatgaaagcacatctctcagtgggaactcttccaacgcttcttgtctccatctcgtccactgttgctcagttctgccccgcttcttcggtccccgctccatcagaaacatttgtacataagtccctccggggacacgtcgaaatgagaggcgttcattggtttggccattgtccaacacgaaattgtcaagggcgaggccatcgaaagcatcgaaattgggttttaagccagggttgccagcggataagctcaacttcaagcacacagagaagctgataagtccaaggaaataatgcgaaatccaaaaaatattcaaaatttgcctccgatccattggaccaatttccaattgtgtgcttttggttggcatccaagaaggaaaagcaaccctgtttaaaaagagagatttgttcgaacacaaccaaaaagttgaccgatgccgtggcattaaaaaacaactgaaaatgagaaaatttgaagtctccgaaaaaggctaccgttttgagttcgtccaccacagcgggaagaagttgacgaactttgatcactttgggctgcccatcggagcgtgccgtgtgcagccatttggacaagggatggagaggcgaagaccaaatgcgatcggacttgacataagcgaaccaatcggcgatataaatgatcagtcggatagtggtcgaccattggcacttaaatttccatttttgatttaa

SEQ ID NO: 66273 - DNA, 163 bp, Heterodera glycines
gtcctgattggagtgcaaatcgttggcacctcagaaagctcaatactttcccattctccgtccagccgtttgagcttcactttgtatcttcccgattgtagcttcactttctttccaccgaacacttggattgccagctggtcactcccgactttctcggtgc

SEQ ID NO: 66274 - DNA, 2602 bp, Heterodera glycines
atggagcgacacgacgacgaccaattcaacgaaaacgcgaatcagggggatcctcccccctctgatcagcaggacgagaggcgagcgatcggagctcagccagctaagcccaagacaatcttggaagcgcacggacttgggacaagccaaccgggtgttacacccgccgtgacgaagaatttgcgtagcggactaatcgcagtgcgatcggcacgggaccaaatcgaaagagcagcgggcactcttgccgcgcgaatcgtcgacgcgcgggagctgatggacgacgattacacaaggggcgaagcgctcgaacacgctgctcggatgatggcaatggagcgggggttcggagaagtcaagcgaatttttgaagggcattttgagaagggcatagccgaagcgggtgcggcacctgatgaacggcaggacttcttctatgattccattgccgcccctttgccagctgcaacgaaataccttcgactgcgggagcacccaactcccgccgaactccttcaaattgcggccgagcacctcggggatctgcgagcgatgcggcaaacattcgaggacgaagaaagggagagcatctctcgatcgagcagatctgtcgaaaccgagaacaatcaggcggaggaagaactcccacgtgccatgccacgacggagcatgcaagagtgggagacatcgttcagagaagcttatgttcgacagcatgacgaactgttcggccagcagcaaccattggtcaaccaagcggaacgggtggccacacccgtaatgtcaaacatggccgcgcttatccaacgacgctcaaatgctccctcggtggccagtgttcgtgtgaacaatccggtcagggagtggatggcaaggaaccaaggggtcgggaacggacccccggcacaggcccaacaaccaacacaagcgcaacgcccgctacaggccgtacagcaacgcctcgaacaacttacgctcaacgatccaagagccaatttccctcgggcagcacctcatttccatgtccgacgggaggaacctcccactcgggaccgtacccgagctcagggggtatttccttcacggcctcatcgcccagacgaatcagctggcatgttaacaacttttgaagcagtgcgcctacaaccgccgacattttcggggaggccggaggattggaccactttttgggcctacttccaacgggccgtggacgacaagcaaattcccggcttcgagaagcagcttcatctgctgcggtgcttaaaagaaggatcgccggcacggagagcggtggaagtgtacccaccgtcggatggcaattatccggttgtggtgcagctgctgaaggaacgatttggggacacgaacgacttgcaaagagcgatccgagctcagcttctacacttgcagccagcaaaggacaacgtgtcgagcttgacggcagtgatcgacgaattcgagagaggagtgtgccagctcgaacaactgggagcgaacgtggacgacgagtcgttcggcccgttgttggaggccaaactcccggtccacatcctcacagaattgaggatccgggagagtacgatgggagcaaactggacagtgcgagagtttcggaaagcggtgggagtgcaagtcaagtgcatgagggccgccgaatccgcgttggcagcaatgaaaggacccgaacgccgacatgagcagcgatcggagcccgagcgaggcggacggaacgcccgaacaggacaaggattccagcgggcatttatgatcagagatcagcccccggagaaacgaacgtcgaacgaagcaaccaccaggaccgaagtcgcgatgccacccattcgaccaacgaatccgaatcgtgtgccgctcgggagttactcccgaccgatgggagcgcattcccaagcacaggatggacagggaggacaaccccgacaagggtgctcgttgtgtggacaaacgggacaccaaccaagccggtgtggcaaatatgggtcagcacaagccaaaaggaggagactgatcgagcaacgccgttgtctcaaatgcctgggatccgatcacaccgcgcagcagtgtacacgaaaaacagcctgccggacgtgcgaacaaatggatcaccactggctgatatgctggaagggggagagaaggaacgaaccccctagccactcgagaacggaagatgcacaacaaaatcggacgatgatcattcgggaaattgaagcgaagcacttgcgcactccccctcccaccgagtccagcaaggacgggatgggggctaaaggggaggacccacctttgctcgacggagagcagagagcattcaccaccgtgggccagcaactcccggcctatttaatggtgtgcccggtggtggtggcatcggaggatggcatgacagaatgcaataccaatcttcttctcgacccagccagccatggcgattatggggatgcggctctgatcaagcagctgggcaccgagaaagtcgggagtgaccagctggcaatccaagtgttcggtggaaagaaagtgaagctacaatcgggaagatacaaagtgaagctcaaacggctggacggagaatgggaaa

SEQ ID NO: 66275 - DNA, 4783 bp, Heterodera glycines
atgccatcggtcaaagcaatcgaccagttttggtcggttgaagcgatcggaattcgcgacgacccaacacaagacgccgacacggaggcgatcatccaattcgaacgatcagtgcggcaacacgacgacggacggtacagcattcggctcccatggcgggaggaacatcccgagctgccctccaattatgcggtggcttatcgacgactgatcgggctactccagcggcttcagaggacgcccggagtcctcgagcagtaccaaggagtgatcgaggagcaattgcgggctggcgtgattgaggaggcgacagtggggacgggaagtaccgagtatttcatccctcatcaggccgtgatcacccccaagaagctgagggtggtgtacgacgccagcgctcatgccaaaggagttccctccctcaacgactgccctttgagaggccccgtgtggctgccagacttggccggaatgctcatccgttttcgggcatgccaagtacccgtactcgccgatgtggagaaagcttttctgatggtcggcattgaagaagctgaccgagaagtgtgcaaatttctgtgggcgcgcgacccacttggaccactgacaacggccaatttggtgccataccggtttcggcgattggcgttcggcctgacacccagcccgttctgtttggctgcggtggtacgtcaccacttgcgcaaatacaactccgaatttgccgagcaactcatccgggatacatacgtcgacaatgtgttaattccggccgacaccattgaggaagcgacggcaaaggcccgagaagccaaacgaatgttcacggacgcaaaaatgaatcttcgggagtttctgacgaatgacagagggctcaatgacagcttttcggaagccgacgcgctgggcaaaacgacagcgaaagttctgggactggagtgggactcagtggacgattcaatccaaatttccttcccgggagttactcccgagggagagtgccgccaaacaaggaggacagtcctcaagaccattgcgcgactgttcgacccgctcggactgctcgcaccggccaccctccccgccaagcagtacttccaaaggctgtgggacactacccataattgggacacgcctctcgaaccggacgatgcgcgagattggaacagagttttggcaagttgggaagggggactcattaccattccccgagccgtccgggctggaggtgtccaacccggacagctgcatgtgttcaccgacgcttcggagacagcatacgcagccgtggcctatctccgatctgagggagccgacgggagatttcactcccgactcctcatggcaaaatcgaggctgaagccgaagaaagcggcagcgacgtataccatcccgagaatggagctgatgggactggtcctgggcacgcgactggcagcattcgtcaaagcgcaactgcaccgcccaatttcggaggagcacacttggagtgattcgatgattgcgctgcagtgggtgaaaaatcgagcaccccaaccacaattcgtggccaatcggttggccgagattcgccgggccacagctacgaccttccatcatgtgccgaccggcttcaacccggccgattcggccactcgggggctttcccccgcgcagcttcaaaattacgatctgtggtggaagggaccgaagtggctaacatcgccatgggcaacttggccaaaggagctggactttcaggtggactcagccgaggacgaggcgatactcccggacgaagcaactacgacggcactcgtaaccaggcgggagcacagtcccgagcaaccgaaggaatggtcggaggagctgctgaacagatgcagcagatgggtgaaagcactgcgcgtgatggcctgggcacgacgatttgccaacaacgcacgaagaaaagccgaggatatgcacggaacaatggggggatctgacccctctcggcgaaaagcggcaattcggggacaaatcgtggctctcccaacccacgacgaagagacggacgcaaaatgggcaattgtccgggcaacacaacggaattgccaaccccgggacggcatgcgaaccgagctggacgaaaacggggtgcaacggctcatcagtcgaatcggctggtgcgaagaagcggaactcagtcggccggtgatactcccgaaaagatcaagagcaggagcgctcattatcgacgacatacatgtgcgactccatcacatgggaacggacggcactctgtcggaattcttgaggagctggtggtgtcccagtgcacgacaacaagttcggcaagtacttggtcaatgcaaacgatgccgacggctcagggggatgccctaccccctcccgacaatgccacaactgccaatggatcgagtgagacgacgattgccgtttgaatcagtcgggctcgactacctcgggccgacagtcactctcgacgataagggacaacgaaggaagacatgggtgctgctaatcacctgtttgacgacgagggccatttatgtcgacgcgactcgagacttatcggccaacagcttcatctcagcactgaggagattcatcgcccggcggggagcaccgagtcgaattctcagtgacaacgcgccaaccttcactgtggttggcaaaacgctcgccgagttcggcatgccgggagacaatccgatcgattttgcggactcccgaggcattaagtggcgattcacgccccagcacacgccgtgggccggaggaattttcgagcgggccgtgcaactcgtcaaacgtgccttgcagaagacattgggaagcactgtactcgactacgacggtttggtcacgctcttggccgaaatcgaggccaccgtcaattctcggccaattacatacgtcaatggcaattcgggagagcctctcccgctccgtcctatcgacctcatccaagaaaatggccgattatgggtggacccgccgcacccatctgcacaacgaggagacgaaccgcgcgatccgacgcacaaacaattggccaaacattggcgagactcgcaacaacgacttgaacatttctggcgacgatggcaccgggaatacctcatgaccttgcgagagagggccggctggcatcatcctcaacgacgagtgaatgcacccggggcaccggaagtcggggacgtcgtgcttgtggaagacaaattccaccctcgcaacttatgggccatggggcgaatcgaggagctcagaggttcagacggtcacacccgcagcgtgctgatcagaatggcaaatggaaggatttgggggagacccgtaagcaaaatttgccccctggagagaagtccagaaatgggggaagcacaggaccaaccagacgaagcagtacaggaagaggaactcggcgcggtggctgggacagaagccgaaggtcagcccggggaggacaacaatgctccccgtggcttgagtggcagtgagggagaaaaaactgtggaggctgaagaagtcgcgcaagacgaagcagaggaagggcccattccaccgagtttcgttcaaaacgaagtcgggagcacctctcccgtgtcgcagacaaatgaccggtctctattggaaaccatgaaccgagagacggaagcggagaaagctgactcaccggagggagcgaacagcatgcgaggaattgaaccaagaaggtcgcttagagtccgacgaattcgagaagtatggtcaccggaccgatacgccccgaaaaggagggggattggaggccccctagtcagcttggccatgctgatcatgttggtttacccgactgtgacattcgggtgtcaaccgactatccgatccgaaattgttgggaaacagtcgctggagttgccaacaacgatgttgccgtgccacatgcggtgtactgaacgcggagtaaaagtactgagcaagcagcgactcgaaaaaatggaaatttgttgcccggatggatgctgggcaattgtgcccacttcgacggagatcagttacgagctaccatccagcgagagcagaatgcgatctgatcagttgctccttctgttgggagcagctggccaacccgacatgcaacccgcggtgggcatcctctttcttcggttttggagccgcaattttgctcggcatcattgcttgcctctgctcaatttttgggcgatttttgtcaggagccaagttgctctcgaaagccgtggcatggggagttcgttaccccatcgggctgatcaattgggcaaccggacgcaattacgacggcggtcaagcggtgcccatcggctgggtcatgccgcggcaacatgtgcaactcaatccggagtgagacggtcattcccgaattggccgagctgaacaaccgcccgggacactcgttttgcatgcgtagcaccagtttctggcagaacgcctgcggacttccaacagcctcttgcctcttctacagatgggcggcggtaccgacaacgacggtttgaggagtttacttgcctcgaatgggacatgcagatcacggcgtgggtggagctggagacgaacagtggacaagtcgacacacatctgctgactctacacccgggagtctcggaacagtggggaaatatgacaattgcggtcgtccccacttccctcccgcccaattatcgtgtgctcttaattaaaagatgtccatagttttgacttaaatgaattatggttttcagacttttaaggacaaattttttctataaacagttcacagatgttgcggtgaata

SEQ ID NO: 66276 - DNA, 250 bp, Heterodera glycines
gaatgctgtaccgtccgtcgtcgtgttgccgcactgatcgttcgaattggatgatcgcctccgtgtcggcgtcttgtgttgggtcgtcgcgaattccgatcgcttcaaccgaccaaaactggtcgattgctttgaccgatggcatttgatcccgctcgtcctccccacatgggggggatcgcgaataccgacgaatcgggagtaactcccgtcgtggtctgaatctgctccccgcaaatcacagtgccga

SEQ ID NO: 66277 - DNA, 1270 bp, Heterodera glycines
atggcagcagcagaacaatcgcaacagaacgaaatgggcgaagtgcagcagaaaacggcggaaaatgcagcaggtgagaggaaaagcatggataaatggatgaataaatcggtgcttttgcctttttttgcttcactttttgctttcgcagtgattgaattgctttcgcttattttccttcccttgcctttgatttcggcacattccctttccccttctttctctctctttctactgatcgggcactctttccgatcactctccctgcctgatcactttcttccgttttctctctcctttagtgcctcttttaccccttcccccctcccgccatttcccttttcccattgcttcaattgccgcctttcctttcccataaagtgccgcctgtcgtgcgtcgtttgaccgacgatgcgacgactggccatgccaatgccagtgattgcctgttggacgcggtggtgtcccccgccggcggctgcggtcgcgtggtttcctttgtgcaacgccgccgtcggaccgcctcattcaaaagtcgcgtgtcgcgtccgcccaattggcgccattcgatgcgattgggccgaacagcgacccaagtggaagatgaagcgagcgaagagatgttgctgagcatcacgcactcccagcagatgcagcagcgggcgacggccgcgccgggcgcccaacgccacacgccggcgccgcccgaggcgccgcggtcgcccgtttttatgctgagcattgcccgcaaaggtcgcctgcttctcccattcttcgcttttttcttacaattagttttttgttgacctttttttatttttatttttttttgtgctttctgtgacaaaataaaaaggaaatgtttttgctttcgatggcttttcgtttgttcaaattcctccgtttgaattttctttgatttttcgctgtccatttgctgctgcttcttcctccgcctttgcttctgctgatttgtcccttcgtttgcttaattgtctcccctccgcttctcagctaatgtcggcgccgtcggcggcggtggcgacggccgtctccgcgtcactcagccgcaacagcaaacgcagcagcagcaacagtcgtcgccggagcgatactcgagcagtacaaatgcaacggcaaatgcaatgttccagcagcagcagcagaagcatttgacggaggttgtggcggaagaggacgaggaggaaatgtgcagaagcatgccctggctcaacacactgctccaatttggccgcaaagtcgactttga

SEQ ID NO: 66278 - DNA, 663 bp, Heterodera glycines
gaaaaaaaaaaatcgattttttcaagtgtccgttttggggtactcaaacatttatgggggagcaaaaatccaacgcagaattaaagtacaggctatagggaagctattccggaaggattcggtctccccataaatctgggcgcatcggttcggggggactgccccgaaaacaaaaaaatcgattttttcaagtgtccgtttggggtactcaaacaattatggggagcaaaaatccaacgcagaattaaagtacaggctatagggaagctattccggaaggattcggtctccccataaatctgggcgcatcggttcggggggactgccccgaaaacaaaaaaatcgattttttcaagtgtccgtttggggtactcaaacaattatggggagcaaaaatccaacgcagaattaaagtacaggctatagggaagctattccggaaggattcggtctccccataaatctgggcgcatcggctcggggggactgccccgaaaacaaaaaaatcgattttttcaagtgtccgtttggggtactcaaacaattatggggagcaaaaatccaacgcagaattaaagtacaggctatagggaagctattcccgaaggattcggtctccccataaatctgggcgcatcggttcggggggactgccccgaaaac

SEQ ID NO: 66279 - DNA, 49 bp, Heterodera glycines; identical to SEQ ID NO: 51181

SEQ ID NO: 66280 - DNA, 622 bp, Heterodera glycines
atggcaccaccgggcgacgaaaacgatggcaaaagcaatgcccaaaatgataatgctgctttcgatgacaatgatgatgccatgctgcgacgggattgtgagggacaaattgcgaggtatatatgttacaatagggagcagttcgccccctgccccccttcaaaattaggaaaaattcaacgaaattagagatttatcaaaaaacatttttttttaaatttttcatttggaaaatttttttttaaaaaaacttcatataatttgaaaaaaatgctgaaaatttttttaattataagattttgttcttgaaaaatttctaattctgggatggtgatgatccgagagggtggcaaacgaatatgactttttttcagagtgtggcataactgaaaagtaccctgatttttgccgtttccctccgccccaatgtgtgataagaatatgccaccctgaaagaaagaaaaaaacaagcactttttcaaacccatccaattttttatgtctttaaaaatgtgcatttttcagttcactgctgtccaattggcactccgatgcggtgacagaggaccaaatccgaccaattgtggccagaataagtgcaattccgttgtgtgtcttttga

SEQ ID NO: 66281 - DNA, 373 bp, Heterodera glycines
atgctctgtatgcttggatttttggttatgcgttcaatttgctcaaaaagaaactcatttgtaaaatcatatcctgcaaccacgctgccgatgattattggtgtcaacacggcagtcactgccccaattatgagcccaacactgatcaggtctcgttcatttcgagatttggcattttcagtaatgttttcagcagaatttggtgtgcgtttaccctttttttgcattttttgccacaaatgacaaaagatatttatgcaaaaaattagaacaaaaatgacaaatttttatttgttctttttaaatttatcttgaaatataatggtataaaataaatttaattataattaattcagtgacacgttctatataa

SEQ ID NO: 66282 - DNA, 400 bp, Heterodera glycines
  unsure (1)..(400): unsure at all n locations
atgaaaagcattagtcaaatttctcaaatgattatcncaatgtgttttttgcttctgcttttatcaccaccaaacgcaatcggccaaaatttgtgccaatgggacagcggcaaatgcgttgaccgagggtgtccatatggttgtccatatgacacggaaccagaatgtggttgtacttcaccaaaggtttgttgttggatttgattttggcaatatttaaaaaaaaaaagtcataattggggcctccggcacggcatttaaggcagtgaaataaaaaaaaaaattttaagcgttaaaaatccgctaattaccaagcgactgatccttttttaaaataaaccttattttattcagccggattctgtgccaaaaatccggtccaagccttaatcaaaataaa

SEQ ID NO: 66283 - DNA, 243 bp, Heterodera glycines
ggaagaagcaaaccaattagcctagaagccgagaacgaaacaaatcaacagaaaaaaggcttgaagcagggacgcaggatgatgtttgccttaattttaacttattacatagagaaaacggcaattttaataaatttcacctctacatttgaaactttttcgcccctatttcgcgaattttttgcccctatttaagtccctaaattggaatttttcgcccctaaaaatccgcaccctaatgat

SEQ ID NO: 66284 - DNA, 981 bp, Heterodera glycines
atgccaatcgtcgatggcaacgacgcagttgacatccaactgataagagcaaaacggttcttccagaatgaacggtcctggaacatggagcagattttggaagccatactgtgtgtgttcattccacctgctgctgtactgatacacggaggtactgtagatgtacagtaatgccattacaaaaaaaataaaactttaacttttcgaaaaattttcaagccaaagtcttggttaaatgtttgatcaaatggatcacaatattgcaagtatggacatttcttggcaactaaaaatgtttattatttagattagattaattttttaaaatcattaattaataacacattactaaaaatatgcaattcaaaaaaaaaatttaatacagtagatatttttttttgggatttgggtaaacttcaattttttgaatctataaaattttttaaagaatctgaactaaatttgtatacaattttgtaccttttgtaataccataattaatgctaaaatatgtattactgacatactgacacattttctgggagccctttatatcaattcaatcgcaataaaaaaaatgttcaggacacgacatgttgctgcacatggtcattaacattgttctgtggatatgcggatggattcccggaatgattcatgcattttggtactgcttttaccgggattgaacataattaatggatggaacgaacaattaattaaatcaatgtttttaatgtattttaatttaaatgcatttaatgatgaaaattatatatttttactttgtattttcgcataaattggataaaacttaatgtgtaagattatcttaaaactaaaaaagaaaatttaaatttttttttctccagcagcgcctgagaatttaaagaaaaactttaaaaattgaaaaaaattgtttttttttgagaaaatctaagggattctttaaaaatttacctttcatataaattcaataaa

SEQ ID NO: 66285 - DNA, 433 bp, Heterodera glycines
gctttggattctcggctggattcccggcaccatccacgccttctggtactgtttcttccgctagatcgatgaaggatgatgatcaacaccgatcgagacccccatcattgttgaagaaccggcccaagaaatgagaatcctgccgccttatttttccgatcattttatgctttttatacatcaaccacaaaacacaacaacaaatcgccaacatattttccatatttggataacaaaaaaaaagcccgatgatgatttcgatcagccccatcaattttttaattgtttttttctccaatttttaaatttgttcaaacaatttgcttgctttttcgcacctccctcgtcgccccccccccccactcatttatttggtttatatgcttttatagaaatttttttaatctcatttaatgaataaagttctacaccc

SEQ ID NO: 66286 - DNA, 621 bp, Heterodera glycines
atgatttacaatttactgttttgttgcatgattacggcatgttttatcaatgttggcacatgcatttacgacattaacattggcgagcgcccaaaggtatggcacaaaacattaaataaaaaataaaatattagaaaaaaatattttagcgggaatgattttaaatttatttatttatttattctctttaaataaattgttttaagaatagttaatagccagtaatagcatttttaattgttttataaaaaaaattaatagtttttttttttatttcaatgaatgatattttataaattgcgtttctgatatttctaaaaaaggtttcaaaaatattaataaatttactttactttagaaaacatttttaaaaaataatattttctttattatataatataataaaaaattaaaatttttatccttcttaattatacaacttataatgttagggttacacggggccgggtgtcagacccggacgcccggactcggtaaactaattaataatccctaacttaagaaagaattttttgcagcaattttaaaatgacttttttttacaattgaaaaagaaaattttcttaagtaaatcaaaaaatttaaaaaaaatttaataaa

SEQ ID NO: 66287 - DNA, 2069 bp, Heterodera glycines
atgaatgttcctgtttgttttgtggccaatttgtacaaccaacagcagcagcagtaagggaacaccaaaaaatgttaaggccaccaatcaattttatgttgagtcatcgctgattgttcaattcaattcatatttcacaatgtgatgattatttcatgggaataatacgcaaaaaaaaaacagcaaaacgccaaatcatcgccaaaattggtgcgagaggaacagcaagccaaaaagggtggctgggctaatgatgagtctcgagagtcccaaacagctttctatcttggagttgtacgggatcgcaattcaaaaaataaaacgggctaatccgcgaaatcccggccttccttggattagagcactaatttttttttagatcatgtaaaaaaggattaaaaaggggttttatgcaattctgcgttgtactcgagggaggaacagccaaaaatgatgcctattgatgagtctcgagaattccaaacagcttttttggaaatgtacgggatcgcattacaaaaaaaaaaaatcgggttaatctccgaaatcccgggccttcctcggattaaggcccaattttttttctggtcccataaaaaaaaggattaaaaaagggatttttttttgcaattctgcgttgtactcgggtggttttcggggatgctgaaacgaatatgacatcagatttgtcacttgatttcactaaatgcccttttagtctccgttaagggtttagcttattctataaacattattccgtaattgatgatagtaaaataatagaaaaaataattgattaaaatataaatttataaaaaatcataaatagatgcaagcatatgacaaaatgtaatattcgtaagcactcccgaaaatctccgcgccgagtacaatgcagaattgcaaaaaagcccatttttaattctcttttttatgtggccaataaaaataataattatccaaattaggcatttctggtgaacaagttgtctttttatagtgatttttggcgttaaaacatgatcaatttatgaattttttgacctaattttgtaaaaaattaagggaatggcggtgtcgattggtaccgccaaaattgctaaatctaaaaatttactgtaaaaattatataattttcgcattatttcaacaaacattataaaaatgctgatgggtgtccttgaattctcctccccaaaataactttgtccaaaaaaataaattagcaatttttacattttctgccctcgcttcatttggagcaattaattactacacacagcagaaaagagaattgtttttgaattgtttttgaagaattatttttaaataacatccttgaaattttgacggtattttcaaggacatttaaatacatttttattttttccacgaaaataatgtaagcggcgcaatttgacactttagaacttttcttaaaaacgaccaaattcaactttcttggcatcattctatagccctcacaaatcagtgtcctctattagcctgaattatttcaaaaaacttaaataaatttcaaaaaaaaaaaagttatgaccagaaatgttcgtgcaaccatgcttttttcgaagtttaataaatttttcgaaattttgcagactaataaaggacattgataatgagcgctatcgaattatgccaaatattgaatttggtctttttttagaaaaaaaatacaaaataatgttaaatttagttttttgaagaaaattgagtaaaaaatagaaaattttccattttggattatttgaagtattatttccactttttctaaagtcacattgtttaaaataattttcaagaaaataccaaaaggcaaaaaggccgctttaatagaggatttttggaaaatgccaaagaaatgcgacatatgcatatgaaacttcattttacacgtgttaatctatgctaaaaaaattttcttgtgttttaggcccttcacagttcaggaagaaaatattcgtgagcacttaattggaaaccctaggcaattagagtaattaaaaaacttcgcattaatgagtcattagaaaatccattccaaacaa

SEQ ID NO: 66288 - DNA, 149 bp, Heterodera glycines
acagacaaaacatacacaatcagtggaacaccaacgaaaccacccatttgggagtaatgactaatcacccaatttgaaagcaaaagagagagattggacgaatgattagtgatggcattagagaggaacgaaagaaagtgtcagaaaaa

SEQ ID NO: 66289 - DNA, 101 bp, Heterodera glycines
tctaacgaaggtagtcgccaaagtcccggagaagggccaattgctcgttggtgatgataaagtggagccggtacttctcgcgcagggcacacagcttctcg

SEQ ID NO: 66290 - DNA, 736 bp, Heterodera glycines
cgtccgtctctcttctcaccatcgtcgcaattttctgtttgctgtgcaaatgttgcatttcggcaccgcgtaattaatccttccttaactgtaattaaatattaattaattgcttttcaatagatccgtgctgtcccggcagccaaaaagtcgtttcgctgatggccaattacgttggcactttcgcccattccttttccaagtcatcgctttgttcggatgccaaaagtgttgcgggcgcattgaaaggccaactgatcggctgctcgaagggcggcgacgcaactcttttggccgacatcgaagcatctcttgccaaccattcttctggtattgatggactaatggatcaaatccattgccaaattagccaattaactttatttttaattattttaatgtttttcccctttttgatgagtgtgcccacagcctcggcttcgtccgtgccatgttcaccattgccgcctccgcttcttcccatgccagcaacaacagtgaatggcaggcattgagtgccaagtttggtcagcaaatcagtgaaattgactcgaaatgtgccgagtttggcattagcattgccaaagtgtcttttgagggccccaagggtaaaaccaattatggagaatatctcattatttatttgcttacaattcaaggagaccactcccaacgtaatgtgcctggtacgaacaatgtgattgccatgcccggattgaccggctcacacaaacaa

SEQ ID NO: 66291 - DNA, 1383 bp, Heterodera glycines
gtgctttgcgttggttaattggcgtgggtgagtgtggtggttgggccgtttttgcgatattgtggctggaaaaaagaagcgatttcgctgtggggagcgcggccgtctgggtttaagtgcttgcttgcgcttgtgctcggcattgaacggtgatggctgctgctggggtgccacctttgtcgtggcctcagtttctccagcgattggcagctgtcgaaatgaataaaacatgcagctcgtctgtgtgttaaagaaatttggcgagttaattgatttgtgtaaatgttgcctaaggcacaaatgctgtggggaactcagcactggggatgctgaacctaaagttggtggtggtgttggtatacgagtgagtggcgtattgccatggttgacaagccctatgagttcgtggatcggaactccttgcctggggaccagtgtgcttgcattcgaaaaaacacgagacataagcgcccgaaggcctttggcctgaggaagtgtcctaaccgggaaatccggagtgctcgtgtgagtgcctgtgcactgccctcggagctgtgtccagcggcgagatggttcttcccaagtccgggaagctcggatgcctggccagcgctgtgtcattaccacttgctcggtcgccttcgccgcccatgcgcacgcttgcgctgaacggagttgtttctgctgaaactatccgtctttacaagacggctgtaatagcggcgcttggcaacgctcgctagcagctatctggttgatcctgcctgaactgatgtgttcatttcaaagattaagccatgcatgtgtaagtttaacctgccagacagggaaactgcgtacggctcattacaccagctataatttacttgaccttgacttcttacttggataactgtggtaattctagagctaatacatgcaccaaagctccaatctccccagagcggagcgcatttgttcgccacaaaaccaagcgccctccgggcgtccagtgttgactcagaacaactaagctgatcgcacggtcttgtaccggcgacgtgtctttcaagtgtctgccttatcaactttcgatggtagtgtatctgactaccatggtgatgacgggtaacggaggataagggttcgactccggagaaggggcctgagaaatggccactacgtctaaggatggcagcaggcgcgcaaattacccactctcaacgcgaggaggtagtgacgagaaataacgagaccgatctcttatgaggccggtcatcggaatgggtacaatttaaaccctttaacgagtatctatgagagggcaagtctggtgccagcagccgcggtaattccagctctcaaaatgcatagaattattgctgcggttaaaaagctcgtagt

SEQ ID NO: 66292 - DNA, 977 bp, Heterodera glycines
atgtcggacgttgacaaattgtcggatcggatgaagcgtttgctgtgcacgggtgttgatgcggatgtgcactttttggttgggcaggacgacaaaaaagaggcgagttcggatactgaaaatgttataaatacataagaatgggatgaatttaggcaaaatgcctattttctcatcagctaactttgtataagagttgccgcgagtcggtaaaaaagtcggatcagattcctgtcgatagtcccgcaatttcaccaaacaattcggaattgcctttttgggtcccgcaaaatccggcccatgacctgcccccgcaccgatttaatctgaaaaactgagtcgggaagtcatgtcaggaatatcttgcctaaaaattcttgtctaaaaaatccacatttagttcaattttttttttgaaaaatcaatttttaaataattttccaattaaacaattttaacccaataaaatatctaatttttgaatttgattaatttaattaaagcttctaccagcgcataaaccgattttgagagtttcgtccgatgttttcgacgcaatgtttcgatttgacgagcaaaaaagtggaaaaaataattttaattatttttcattttttaatataattttttttaacattgtcagaagggaatgaagaccctattgaaatcccggacgtcgacattgaagcgtttaaaactatgttgagctttatttatacggacgatttgaacggagtgaacggagacaatgccatcgaagtactttatgccggtaacaagaaaaaaaatgattagaattttttttaaatttagctaagaaatacaatttgccatcattgatcaaagcatgtgttggcgttcctattgcgaagctggacaatgtgtttattgcttttgccaaagctcgtcttctggccgaaaaagtacaaaataaagaaataagcttaaaactcatttatttttccctcatttcatga

SEQ ID NO: 66293 - DNA, 1332 bp, Heterodera glycines
tgcctacggccggtgacaaagcaacatgtctgctcaaattcgcggaccttccgtccatgttgtactcccagaacacgggcacaaatcaatgcttggaattgtggcaaaaatggcgtttatcggccggctcaaatctcacacaaagttacgccgaactgattgagttcagcaacaaaggtatgaactccgttttggccgttgtatcattcattaattgcgtgttttgaggtgccaaattaaacggttactccgacgccggtgccatgtggcgttccgtctatgagcttccggcacaattcggcttttactcggccagccaaatcgacatcagccgccagatggaccttttgtacagccaattggctccgctgtaccaacaactccactcttatttccgcgcgcgattggcggcagtttacgcgcaaaaagcaaacgaagacagtgaaaagggagggcagcaattgagcaggttaaacgggtgttaattagggtaattagggatcgtaaacaaaaaagcatttttagagatggtccattgccaattcatttgctgaagagtttgagcggcgacagttggacagtgcattacgaacagacaaagccattccccgaagaaatgccggcggaggaacagaaaattgccaatgaaatggtcgactcattccgagcacaaaattacactgttcggacaatgttttccaaggtattctaaggatgttcaaacatcattaatttttcatttttttaggtgtaccgtttcatgaaattcgttggctttgaacggcttccccgcactttttggacaagttcaatttttacgcgtaattggagtaaggacatgatttgtaacccggcaactgcgtataacatggtcaaaaaccacggcatatgttcgaattcccctgacactgttttagatgaacggacagcaggacgattaccgggtgaaagtgtgtgcccaattgagtgagcaggtgcaacaaaacaccaattaattaattaaacgttttttgtccaacaggactttgtcaatgcgcaccgtcttttggccaaactttactatcagtacggttcacgaacacagcccattttgttgcgggacgcacccaacccaaggtaattaatcaaaaaatgcttatttaattatttgaaaattaagcctaagcgcggcactcgccggtgcctttggcatcgttgcgcttcatccggattatctgagagcacagaaattggtgtcggtgaaaaccgagcgcaatgccgaggcagaagtgaatcgattgtacagagaagcgctggaagacattgtgaagctgccatttgccattgtagcag

SEQ ID NO: 66294 - DNA, 961 bp, Heterodera glycines
atgtacaaaatgatgtcctccccacgcttttcgcgtaacgcggctggaatgaaaaggcaaattggccctggacatcgacgtctcccaacaacttcctcttctcgtgccgcatctattcattcttcaaattgctcactaatgtttcgtcagtgattttgtcactgaaataaaatttcaaaaaatgcttatttctaacaaaattgctcaaattgatcatggaaaaatcaaaaatataatattggaacattttaaacgtgttttgaataaattttgtaaaaatgaggcttttttgcctgccaaataaggctttgaaaatttttatctgggaactgccggtagtgctgctcgagactctcggtctcgactcgagaaaagtctcggtttttttttcggtctcggtctcgggaaattttcggtctcgagcagcactagcaaatccctttcgagtctcgccataatcccccagcccatccggccttaataaatgctaaaatgataataatgccatttcagtttgtccagcaatatttcgtgtccgactacgacccgaccatcgccgattcgtacacaaagtgttgtttcgtggacgacgccctttacaaagtgggaatgggggagcacattcagagcccaaaaaactgctgatgaatgaattttggcaaatttttattttcattttttacaggtcgaaattttggacaccgccggccaagaggaattcgcggcgatgcgcgaccaacaccttcggacggggtaagaaagaagcacaaacaattaaatttaatgtggaaagagcaaatataatgtatggatgagataattaggattaattaattaatttaataatttgaaattaaaattgaaaattattttcaattcggacatttataaatgccattttccagcattagagaacggaatcatgaaagctcttcttgacctggattattccctggactaa

SEQ ID NO: 66295 - DNA, 2207 bp, Heterodera glycines
atgattaactctgcttcaacaattttaattgtatttaatattactttccaatttttatttacgtgttcaaatgcaaatccatcggtgagttaattaattgggataattaatttaaattatcaattataattagggtgacgacaaaatactaattgcaattatgaaagggtatccgaaaattaaaattagtgaatattcaaagcataaatacgaagctcacctcggcattctttattttatcaaaacaaattggcaatgcgacaaaattgaagcggaatttgaagaacatgaacggacagaatgccaaaaatatcgcaaatatttggatattttgtacgaatatttgtgccgagaatactttggaactcccacaataaaaccaaaatttgtgtttaaaggccgaattgaaattgaaggaccaataattgatgcggtaaaatgcttagccaaaatttcgctgttttattttaaatctcattggaataaaaaatatgaatataaattaaacaaacttttcactgattattttgaagtaaaactgttgaaagaggagagattaaattatgaatttaagttaaaaaatgaatcaaaattagcaattaatggccatattttacaattggcaattgaaactagggttgcgccccgagccctcggggggcaaaaaatcgggggccggggacctcggggggcgacatgtcgggggtcgggtcgggggggagctcaattgtagggggtcggggaccccgatcgggtagtgatcaacgaaattttttgacgaaaaactcaatttttattttaaatgctcgtaaatcttcctttttttcactttaatcatcggatttcattagcgccagcaagagtgagtccaagctagcctttaaaccaagggttacccttgaaaatttcccgaaataagaacatcgctgcgcaaaaacaagattttagggtcaaaaataaggaaaattggtcatttttggtgaaaatctgtgggcaaaatgaactcaaattttcaaaaaattctaccggcgaagcctatcggcaccgccggccctaaaatttgatagcattttgatcaaataaattgtaaaaatttactgatttgaaaaatgttgctaattgatattatttttgactctaaaatcttatttttggccttgatgttcatgtttttaaaattaccgatcggcaccatggttttagggggctggcggtgccgataggcgccgccggaaatttttttgggtattttaatgaattttattaagaaaattcgtttaaaatttcaaaaattttcaatatttcccgcctttgtggatgaattaacgggcgccggacttttcgacagcggacctttcgacagaaggacttttcgacagcggacttttcgacagtaaaggacttttcgacagaaaaaatttttgtttaaggggaggacttttcgacagtaaatggtagttttaaaaaagacaatgctatttcatttagtaagcaaaataattatttttgtttcgaaattatttccgtttttatggaaaagttaaattgggtccggcattcgataggccacagctcttaaatattggtagggatggcgctgttcacgtgtgttgtaaagcgcgagcaaattttcgtcttgttcaacataaatttctttacttttcatgcctttaccacgaattccattcatgccaaatttgacggcatccaagccaattttttgcaaaatatttggccagttctcaaatgggatttaattttttttaaattcaattgttattattagggattagatttttaggcatactaaatagacacttaaaaaggcataaaaagtccgaaataggcaaaaacaatacggggggcgattgatacagcgccaaaattcgatccctaatttggggtttggacaaaaaattccaagttttgcaccttcttgaagtccgctgtccgcttcaaaggcatattcaaaaccgccgcttctgattaactctcggccacgcttgctttctgctagaaaaaattggacaagaccagctggttcctctgcttcttcaaaggcttagagttcggccccaatttcaccttcttcgggaccactagaaccagaagacatttttcacagcaattcaaaaatattttcagtaatagttatgaatggcatggtcactcttttttgggccggtcgagaaacggaggtcaaacaa

SEQ ID NO: 66296 - DNA, 304 bp, Heterodera glycines
aaaattccctctaaaataaaatgtctattgcgcaccgccctccctatcatgctcgagagcatttgtatgtgtataaaatttatcaaaaaaaaaaatatccatttttctgggataacctctaaatataaaaatcctctgtgaaataaaatggtgattgtgcacagccctccgactcatacccaaacgcttttgtgaggtataaaatttctcaaaaaaagagatagccatttttctgggatagagtataaatataaaaattccctcaaaaataaaatgtctattgcgcaccgccctccctatcatg

SEQ ID NO: 66297 - DNA, 280 bp, Heterodera glycines
tattgcgcaccgccctccctatcatgctctttgagcatttgtatgtgtataaaatttatcaaaaaaagagatagccatttttctgggataacctctaaatataaaaatcctctgtgaaataaaatggcgattgtgcacagccctccgtctcatacgcaagcgcttttgtgaggtataaaatttctcaaaaaaagagatagccatttttctgggatagagtataaatttaaaaattccctcaaaaataaaaggtctattgcgcaccgccctccctatcatg

SEQ ID NO: 66298 - DNA, 593 bp, Heterodera glycines
atgctaaccaagcgcatattggtcacattttctggccaaaaatcacctgtgccaaaatgtcccgtcattagcggcagaaaatttttttcctccgatgcattcaatgtgagttgcattatggatagcttattaactattaataatgttttaataattaataaatttaattcaacgacttttaaaggttgaccgaaattgcacgcgccacggcggcgaattggtggccaatgtgctgaaggtaattgaatgcataaagctcggtcttgtcacaacatttgtgatgaaaataaattcatttatttccgttaaaaaatacttttttaatatttttaaatattttaactttatcctacgaattcatttgtgcccggacgggactaagatcctttgcatgattttctcaggatggctcttgttttcctagtcatgttataacaagatttattcctgttcattctgtcctgctggtccaactcggaaatcatttgtccggatttattcaaaaccgcgctcttcaattcccgaaagttccagttctcttttttttaatctttgtcaagctttttgaaaatttataagtattttgttgaaaa

SEQ ID NO: 66299 - DNA, 364 bp, Heterodera glycines
atgaggaatgtgccacggaacactcgtggcgagatctgtgaactgcgcttcctgccgctggaggacacacagcggcccgacttgttgatggaggtgctcatccaacatctgctagaccgtgtgctggacggtcacccgccgccatccctggttggtctgcagctgcacccaccaggctttgatcggccgtacgtgatccgacttcgcccgcccgagcagaacaacgcagcggcactggcggcagccattgagcggctcaatgagcaatcggcagccggcattgacctgcttgctgggacaacggtcgccaaagttctggcggtgtggccactcgagcaaattcgtgcggacccacaaagaggag

SEQ ID NO: 66300 - DNA, 274 bp, Heterodera glycines
atgacgagtagcgaaagagaacaagaaacggcatttggagaaaacccccaaatagggaccggagaagacagtgctaatgcacttggtaatggtcagaatcggtgagttgcggcaccgttccgctgatatcactttcattgatccaggggtgtgcacgacgtttgtgatgaggaagagggaagagatggagagacgccaccaagggcattccaacccacccatttgaaataaatagcacaattccaggcatattcaatttgtttggaccgggtaa

SEQ ID NO: 66301 - DNA, 1272 bp, Heterodera glycines
atgagaaatttcggtttgtcttctgatcagcgtccattgatttggagccgaacagacagaaggttttcacacaacaggtgattttttctttaatgcgtttttttactttcataaatttggtatctttttagtctcgacccaaatgaagatcccgtcagtggaatagagcgagtttcctccacatcgacccttttttcaagacgaaggagagaagaacggctgcgagaacaagaggaagtgcggagacggcaatttagtggcagtcggaaactttctgatggcgcatcggaacatacactttccgagaaatatgaaagtctcgactatgaattaatcgagaacgaactttatcgtgctgctgaaaaggataaagggcatcaggtgagttccttttttatcttttgagcatcaatcaaagttttaaaacagcgaaaattgttccgacaaacggtcgaccgatggatcgtttgctttttgattggtgttgcaaccgcttcagttgcagcattcattgacgtgctcgtttattacaattcaaagctaaaattccacctcatcatcaacaattgcatgtttaaataataaaaaatatattttaaattttatttttaattgtatttttcctttccagtaattcactcttgtgaggagggcagtgtcggcagttcgggttgtacgtggacaattctttgggtttgggcattatacaattgcgctttggttgccgtggcatcgtttttggttatctttgtctccccagtggccattgggtccggaattccgcaaattaaatgttttttgaacggaatacaaatacctggcgttgtgcgcctgaagacacttcttgccaaagctggtgaaatttttaacgtcttttttacaaaacaacgatcttttcagtcggcgttgcatgttctgtgggtggcggattggctgcaggaaaagtaattagaaataaatatcattaaaagagttttaataatttttgctcacaaatttttctgtaccttttttcttataattaggtcgaaatcctcaaattgtttggcttcttcctctttaaaccttaatatattttccattgttcaggaaggtcccatgattcattctggcgctgttgtcgccgccggtatttcccagggtcgttgcttatcattgcctgtggacttcggattgttcaagtatttccgaaatgaccgggaaaagcgcgattttgtgagtgccggcgcagccgctggtgtttctgcggcttttgcctcgccaattggtggc

SEQ ID NO: 66302 - DNA, 433 bp, Heterodera glycines
  unsure (1)..(433): unsure at all n locations
atgcagaattttttgtctcaaaaggggttcgacctgcgaaaacttaagacggttagtgcttttttgaggctatcaattgtcaattcgttaatcactttgtgtttctcaggaggcccccacggcgaaattgcttaaggatattcccttggccgatgcgttgcgtccctccgccagtgacttgctttacaatgaaaaatggcgtcacatttcgcccattcacatgaaagaagtgtccttccattttccctatctcccaatgttttactcttttagattgatgcttctgattcggtgatcaccgacgagggctttgcttattttttggaatgtcgaaacatagaaaaactgcgactgaatttctgcgattattttgnggacgaagcaatcgcacggcttgcgcaggggcggcagtcaaaaacgttgaaaggaattg

SEQ ID NO: 66303 - DNA, 1748 bp, Heterodera glycines
cctctgttcatttcactaatgacattgcccccgtcgctctttgcctttgaccaaatgccaactttggacccggcaattccgactcaaaggttggtcaccgacggcggagggttgatcagctgctgactcggtttgatcagcatttctcttcatttgtgatcagtgttcccaatcctccccctcaattcccttctctttccccctttttcttttgtcagtccccacttggctccctcttccgattcgtgtgttggccaatgcgctttgattttcactgatcaaatgcgctcccaattgggctcggaacattcgacgggactgctgaatttgaattacaacgaattcttggctgccttttccaattcgtctttcttcgattccttttgcaagtgcgcaaaaaaaaacaattaaaaaaataattatttatttatttttgtaaattaagtatttatcatcaattcaatttttgctacacaaaatgcccacaaggatttatgcaagaattgttgagcagaagtgccgaaatagtggaccatttttgtgtgtggaattacaaaggtaaattaaatttacaatttcattttgtaatattcattctccattttaaagtaaaattaaaagaattttgttttaattgacaaacttttgcagaaataaagacaaaattcggttgtttggtcgctttggaccgcgaaatgtccaaaaagtgtcttcattcctgcgctgggtgagcaattagaacttaattagtatattacttaggcattgactacagtatttcccccccccccccataaaatcccattatcccgaaaaaagagatttttcttaagataattttatgctctaataaagaatctgacgttaaaaccttcagtctttgattttatttgacttacttcatatttaccaaactatgaatctatataaatgccctgttaatttcctttatggttttattaccgtacacctaatcacttcttttgttaattaccgtaatcctaatcgcttcatttgtttgagtaccgtaatcctaataatcccttttaattaccataatcctaatcctttcccaaatcccttcctttggtcctttctcttggctgctttaattactgatttctctctctccctttaggcatcacaaagctgtaagatgagagcagagaaagaaaacaatggacagtcagacaaaagccaaacgaacaaaaagcaattaaggtcacttctctgatgcaaaacttcaaacatttggcgatgaacagcgacccgacggaggccgaaaaatatttgggagaaagttgcgaatacgtcggctgcactttgcactgcgatgtgccggccattgacagcctttgcggcacggacaccgcagaattagtgggaaaagagaaacaaacactataattagccaattaacaaagtcattaattttgaggtggtcaacttaacaaagaaatcctttgattctttacaacggatggccctggacacgggagcaattggaaaatggccgacactttgtgacgacattcggacatatgttgtgccaaaaaagcatgagaaaccgtcacaaaacgacaaaaacgaatcatcgataaacggggcattattcagacagacggagtggcaaatttgcatttggtcattggcattttcttttttagtattagtttacttgcagaattcggcacaataatattttagttgtcagagttacagtttggttattagttccaatgttaatt

SEQ ID NO: 66304 - DNA, 145 bp, Heterodera glycines
cgcatcagccagttcttccacaaggaatcctgcggccagtgcaccccgtgccgtgaaggcaccggctggatgcaccgcgtgctggagcgcatcgtcgccggcaaggccacgatggaagacctgcaccagctgaaggcggtggccg

SEQ ID NO: 66305 - DNA, 213 bp, Heterodera glycines
catgctgcgcggtgaggccgattgtgccgtgcattcgctgaaggacgtaccgatggagctggacgcgccgtttgcgttgccggcgatgctgacccgccacgatccggccgatggtttcgtctccaacctgtatgcctcgctggaggcgttgccgatcggtgcgcgtgtcggcacgtcctcgctgcgccgccaggcccagttgcgcgcgctgcg

SEQ ID NO: 66306 - DNA, 247 bp, Heterodera glycines
atgttggccttattcgcctcaattttcgaatgcatttttctgctctttagcacatttggcgccctggcttcagtcatgcgaccaaaggtaattaaaaataaatattattttaatggcttaaaattttcagatgaagggctttctgttgctcgcattgcttccgctggtcacatttttaccagaaacaatggcgaaaagtatacaagccgctgaaatgtcggaaatgaacgacgaattgtccgactaa

SEQ ID NO: 66307 - DNA, 717 bp, Heterodera glycines
atgttcgcttctgggtccactgacaacatcaaactttggaaatttccaaacggcgatttcgtgcagaatttgagcggacataacacaatgataaattcattggttgtcaacgaaaacggagtgctcatttctggaggtattttccgataaataatacaatccatccttcgaccagatataagtcaacaagaaaacattataaaatactaaaaattttagttttaactgcataaatttccttttcccctccacaaccctccatttacaatttaatcatttaaggcgatgttggcacgatgcacttttgggacttcaagtccggtttctgcttccagaaggaacacccgccaccacagccgggctctatcgactccgagcgcggcatttttgcgcttacttttgacaaatccggcacacgactaatcacgggggaggcagacaaatcgatcaaaatgtggaaagaggactcggaagcggtgagaaatgttcacatttatattttaattacaaaaccagcggcaagaaaatgtgggagggaatgattggctattcatagtttgattctcttccacttttagtcagaagattctcacccgctgctgtggcgtcccgaaatactcaaaaaacagcgtttttaatcctgttgttttaattttgcattatacatgtttttaattataaatgaacaaacccaaaaattacaaacgcacaaataaa

SEQ ID NO: 66308 - DNA, 1382 bp, Heterodera glycines
  unsure (1)..(1382): unsure at all n locations
atggctaaccattcatcagaacataatcgggttactgatgaagccgggtccaccgcaacagatcaccagccattaaccgcgaaggataaggcacttcacaattacgtcttccggtctatgaagagagcgcatgacatgttcctgcacgactatgagaaattcccagaaaatgatgaaaaagcgtcagttttatcactaaactaaaagggtgggcaagggctagcaggtattacaccccaattcgataaaagttaggaaaaaagtgcccttaatccaaaaagataatactgggagaattggtgtcccggcgaaaaataaattaaaaaattttttttttctaaaagtcgttaaaagtatttatggaggttttctgggttgctgatcacgaatctgacattaattttgaccaatttcgaaccccggactcgaacaatagtcgaaattctcacacataaaacaagtttgaattttcgactttttgtctgagttcgggtcctggattcggaattggccaaaactaaggtcatattcgtgatcagcgactccaaaaaccacagatacatgtttttttacataaaaatttatntaaaaaaatcaagttcttaccaattctccagtattacctccaaaaattttctcatgccgccgcatttcgctttgtattctcacaatcaagcaatctccgtttaataaatatatcaaaatatttttttagagagcgaatttggcgcaataccaaaatccgaagtgactttcgacacgtaatgaatgcggtcgaagaggcgaagaagcgaaaggcggcggaagtgcttcgattaccgaaaagcaacagagaagcaattgcagcagtcgtaagcaatgaaagtgaggaaagcaaaatatcagaaaaagctgcattattgtccacggcatttttttctttttttattttaaaaaatgtccacataatctccaataatattccttgtcagatgcccctttggctatcacagctggcgatggtgctgattttaccggcaatttaatggtcgccactgttccttcaaagcctcaacaagacaatgcgaatttgcgcgctttacttccttcccgtgccaatttgataaccaagccaaaatggcatgcgccgtggaagctgtacaggtcattcattggctgtcttcccttaaaaagcaaagttctgtatcggtttagagtcatctctgggcacacgggatgggtgcgggcggtggacgtggagccgaacaacgaatggttcgccagcggaggagccgatcgcatcatcaaggcatgttagtcacatgtatatgtaaaacaaaaatattttagatttgggacttggcaagcagacatttgaaattgtcgttgaccggacacattag

SEQ ID NO: 66309 - DNA, 404 bp, Heterodera glycines
atggttatttctcaaattgctaaaacactatggtcacacaaaaagaagagcatttttgcagttattgctacggcttacggggcgaacgctttaagggcacgtttaaggtaattgattagaatggttagagttgggaatttcttctaaattaagacgttttaaaatcttagttaattatttaattaataacttttttaaataaatatttttgataattttacagagatgaccgaattcgatacagttttgcagaacgagcccgtaaatatggtctggtaagttttgggcccgcccagcgacttcgccgtgtcactgttttggtcaatcgcgagtcgggcggacgacgggcggccgaccttttcaagcgcaatgcacttcccctgctcaatttggccgggctgcaa

SEQ ID NO: 66310 - DNA, 1017 bp, Heterodera glycines
  unsure (1)..(1017): unsure at all n locations
atgtgcagtggttgctcgacttcaacattcagaaatcaaagacaaaaccgagcaggtaataatttgtttattttgcgtgtggttaaaaacaaaaattttatttggtaaaatgaggcttctctaaaattgtgatcgccacgaggcgccatttagaaacaattcacatttgttctaaaatttttcttgtatcacaaaaataatgaatctaaaatgtaaatgtatccgttcaactctagctaaattttttgggctaggtctgtgcttaggctttattttgaaaattataggcgctattgaacttcaaaattaaaaaaaaattcaaactattccggttaatgattttattcaatattcagtgaattttaattattttattcgaaatccaacaaattttcagaaaaatgtattggccttttaaagcttctgtaaaggtccattttccatattttcgattcggttcaaaatcttgtttanatgcaataatatatgattcgctaaacgctttctaaatattaattaatttttttatctctttagangtgaaaaaaagattattggaaaaaagaaaacgcaagaaggtggcgacgtaatttatatgaangtgaactaagatcgtaagtnaaatttngatgacaaaatggtttaagctttacatttaaaatttttgattatagactccttgaangaattgatttgactgaaaccactgatgaggactcgtccaagaagtccgaggttaaggaattaatcttattccattaattccaagaccctattaacatgaaaaataaccctacggttttaactctgcaaaaatattcaggtcagttaaagcacctttaaaaaattgcgggcaggaaaagggttaagggaaaatggccccggggaaaacgccaaaaaaaaaaaaatggccccggggaaaaattttttaaaaaaaatttttgaaaaaaaaaatttgggtgaaaaaaaaatatttaaaaaaacttttttggggtttccaccccccccccaaataaa

SEQ ID NO: 66311 - DNA, 502 bp, Heterodera glycines
atgccagcagcagacagcccacccacattcaccttttcattcacagagctcgtcccaatggaaagttcgactgcacatcagcgtaaaacacccggagagagcggcagagataacggtggccactctacccgcgggaagcaatttcatgctctttttgcagaagttttttgccgaggtgttttttctaatccgaaatgccaacggatcaatcaaatccatttgatttcaggtgcatatccctgtggaagaggatgaagccaaattggttgctgaactccaagaaaagaattcgaatcgtttgttggccgcaatgaattcactcaatgaggaaacggatggcattggaaacgaagaagaatgtgaggagagtgacgaagagaaagagggaaaatacgaaggaagcgagcgaagagaagcaacggcatcacaatcaccagcagagaatccaaaaggagaggagaaagaacgggtggagggcaatgaagaagagaacgaggaagaa

SEQ ID NO: 66312 - DNA, 420 bp, Heterodera glycines
atgtctttgttaataaaaagtaaaacaaatgcgtcactatttttgtttttgcttgttttgtttgttgtacaaggttagtacctattaaaaacataaaatcctgtttttaattgctttttttcagcatttcgtttcgtcagtgctgatttattatgcagaaattgtgggcattcggtcacaacggcatcggccttaaaaaatgtggtcagcccaaaggcatttgaacattggaacatgactgtgcttggggttgagaccgttgttcaagtgttcaagaatagtgttcgtaagttttatttaaaataaatttaaatgtttaaaaaaaaatttatagccgagaaatttaatctgatcacagtaaatggagccgatctgaaatttgccggcaaatcttacgttgaagacacgtggtatttgtaa

SEQ ID NO: 66313 - DNA, 258 bp, Heterodera glycines
atggcactaaatgaatcggaaggaaccgttgtaaatggaaaactaagcgcaaaggaattattcacgcgatgcgtaaatgaaataatcgcccaattaattgttgcacaaaaagagggaagagatgtcaatctgaacaagctaaaatgcgaaattgcatccaaatacggaataaaaacgcagccgaaattagtcgacataattggggcggtgcctcctcagttcaaggcaattatcgaggaattaagagatgccaattaa

SEQ ID NO: 66314 - DNA, 315 bp, Heterodera glycines
  unsure (1)..(315): unsure at all n locations
gcgagtacacgaataaaatcaaaatttttatgtacaatttctccaattttacaaaaggccattttttggaatgaaaatgatcttttttccttcttcttcgtcgtctttaaatatgccgctccttaatcgcagcagggnggtttgaagcagcgtgcatatcaacaaggagatagccatacagtttattagtcgcaatccgataggcagaaagaaataatccagttttcccggaaaaagtgcactccaatgttccgaatcgccagcgcggaattcggagctcgcattaataccaaatattgcgcattctgtctcgca

SEQ ID NO: 66315 - DNA, 105 bp, Heterodera glycines
tggccgtttgggggactcaaacaattatggggagcaaaaatccaacgcaaaattaaaggacaggctatagggaagctattcccgaaggattcggtctccccataa

SEQ ID NO: 66316 - DNA, 849 bp, Heterodera glycines
cgtttgtggcggaaggaaaaaatttcgaagcgatcgccgcatcgctcgggggtaaatggtcagcggatgacgttgccaacttttattcgctgaatcagctcgaacttcggcttgattatgtgcgtttttggctttgtttaagggctggcttcaattaaattgatcacattatttgcatttttcatagttttcgtgctttccgagtttcttaaaacttccatcccactcctctcacttgaaaaattcttaaaaatttgaaaaatctttaaagaattaagaaaatactataaaaatgaaaaataaatttttttgaaacttcataaaaaaaattttgaccaataagaatttcatagaaaaaattagaatttgataaagaaaaatttcttttttttaaaaggtttaatttttaaaaatatcgacaaataatttttaatagaaattttttttctctttaaatttttacaaaatttttaaaatcttccctcaatttctttaaatattcaaggattttttcaagtgagtgggcgggtaacagtttttaaaaaaaccctttcattaactttttctatctcataatttgattgaaaataattagttttaatcacttaattaattaattttcagttgatttctctctatgagcgtgccaaggcggacgaacgaaatgtgccggcacttcgtgcgaacactgctcgtaataatggacaacagcagaaaaaagtgcctgctgctaatggcgggaagaagaataataataatggggtgccaccggtggtgaagcagcaaattgttgtgatcagacaagcagagcagcggggagagactgtggcgaaacgagaggacggcggg

SEQ ID NO: 66317 - DNA, 217 bp, Heterodera glycines
ggtcgcagttaccccccgcctccattcgcccctttggtcgccccccttttacgcccggcaggtgtccgccattcgctcattctttgtcagtcagaaaacggctgaacttttagcggaactgcgtcaaattgaacttcgtcgattcatccaacaaatcgaggctgaggaatcattgaagaccaaacgaaatgaaaggacgtcccatcgtccgtcggtg

SEQ ID NO: 66318 - DNA, 474 bp, Heterodera glycines
atgatcatcagaatctcaaacatgctgtggttttattattttcttttttgttttataacattttatgctgttaatttttcaaaaaaatgatttttttcattatttacaaaatattcttaattttttctattttaaggccattaatatttggagcatttaatttcaaatgatataatgaaaatatttctgttgaattgttcaagaaaccatataactctctgcactttatttttattaattggtattttatttttttctggtcaaatatttgtttctacaaagatacagttattattataaatgtaatgtaattttatttttatatttatatttttgctgaatttgtattatatcataattagcacattctgtttaatgataataagttgaaaaaaattcaagttcctctggttttaggataaaaataaggatgagtgaactttcgttttttacagttattttcataaaaataaa

SEQ ID NO: 66319 - DNA, 509 bp, Heterodera glycines
atggccgatgtgttggaggcgttctcgcccccgtgctcgcttggcacctttcttcaggacatgaccatctacgcgggatgtccctctctgcacatgtgtaattaaaacccgataattcgacatgtcgcaaaattattgcttttaaaactcattgcactcaaaaaattgtcaaatttcactgggttttcccactaattttcaaatttccagctttaatggtgtttctgctgcgcaatcagttgctggtccaactgcacaccttcttcttcctgctgccccttccatccaatgacgccaacgacaattgcaaagccaaccagcaacagcagcaacacaaccacagtcaaagggaacgggggaggagggacagcggagcctcaaatgatgatgccaaagaaggcgaggaggggggagaggaggacggtacagaaacagcagcagaacaaccacaacagcaatgggttgggccgccaccgccccccgcggcggagttgggactgtcgccagag

SEQ ID NO: 66320 - DNA, 638 bp, Heterodera glycines
atgcattcggatgtgatcatggaatggaaagtgcgcaaagaatttgtagaagtggtggccaatgcgatgcgaaattacgcggccataagccaagcgatggactcggaagagatttccacgtattttaaagtgagtgctcttaacactcaaagcaattagcaaccgttcgtttatcacccggcaattaaactcaatttgagcatttcttgagaaaattgcacagttttgaataatttttggcattttcgcacaattttagcgtttgttttacacattttttaaatttttaagtatttataaacccgttctgtgtttatttatcacttaatcttttcgcttggtgaattttaagcgcattgaaaattaaaaggaaccttaaaattcaaatcaattaaaaaaacaaatattttttacaattgctttaaattaaaagcagcaaattttgtgtttcagatttggatttttccgtggaagtaaacaattgaacccggaaatttcaaatttgcgttcctatccccctgcgggagtggaactcaacattttttgcgggacgggatcccgcgggattaaccctacaaattcccgctttttccagatggaattgtgtgattttgaaattcgaattttgactttaaata

SEQ ID NO: 66321 - DNA, 56 bp, Heterodera glycines
gctatagggaagctactcccgaaggattcggtctccccataaatatgggcgcatcg

SEQ ID NO: 66322 - DNA, 526 bp, Heterodera glycines
atggtatctacacgtaataaaactggaaaatttatgaagctaagcaattctgggactgaagcaaatcgaaagcgaaaggaatggcgccaggagcgtgctcgaaaaggcggctcgacgccaaaaagtgacgaaaattgaccaaaattaattttatttgaaaacactgcatttttcagcgctaaagcagaccgaagccgaggcaacagcagacggagagggtacatcgacccaagccgcagaaagtggaccatcaacgtcagctttggaccttcgtaagtcaaaaaagtcactattttagaagcaaaaattaaattaaggccctcgttcaagccctaggccattgtcagcaactccgatcaggcgccatgtgggtgtccgtccaaaaactaccgacaaagcaacgaacatggaccttacaactaccgacaatgcaacaaacacggatttgacaacgatggacaaagcaacggacgtgaatttggctgatgatgacgccgcgacacttaccgagcaattggacagacag

SEQ ID NO: 66323 - DNA, 58 bp, Heterodera glycines; identical to SEQ ID NO: 51962

SEQ ID NO: 66324 - DNA, 628 bp, Heterodera glycines
acatctctgcccttgccggcgttgttccataccccgttacggatgattcttccctgctgctgttggacccggcattggccaccgcctgtccgctgatcaacattatcgattcgccaaaattgttggagggaactgacaatgaaaagaccgaaaatttagaggttagtatcaagaagtactgtcaatttgcacccaattttgggtttccctctccgcttaatcttccattttcgaccatcaaatcaaacaaatattttgtttaggccgaactcattgcgatggaggaaagcttaaaggaattggacaacaatcagctcaaaatggaaacgatgggagaagagaaaaagacggaaaaggcaccggtggaggagggaaaaaacagcccatgaattgatgatatatgttgaaatattttcttgtttatttggagattttaaatttatatcttttatttatcaatgttccgtaaatagatacggaaacagcacaaattggttgggttggcatgaaaacgatggatgaaattgaacattttgaaaaggttgttttataggcaattgtgtagaattgtttagcattgattttgtaggggactttttatcaggtacttgattttttccaaaataaa

SEQ ID NO: 66325 - DNA, 675 bp, Heterodera glycines
atgaattttgtaaatgatagggtggaaggcgacctctacagaaccaataacagtgttgaagcttggcacagaaatctgaacgcgttattccgttcaccatcgccacgtctaagcatttttcttcggaaagttcggcaagaagaaagccattggcgtcagcaagttaaagactttgcaaacaacccagcaaatggaatacgtggcaagggaatgaaacgcaagcaaacttatgtggaccaagacatgaatcttaatgagttatacgtcacgcgaaacaatcgccatcctctgcaatattagcgcaatttcccaccgaatggcagaacctctttaggacaaaaatcaatgatttttcatgtttatagtttttaaaacgtaactaagaacctctttaggaataataattgatttatttttcatttttaaaattaaaaataatttttaaaaatttaattttggtgtcgtattttccgggtgtcgcattttctgtttttttataaaaaaatttacggtgtcgcattttccgccggtgtcggattttccggtgtcgcattttcagggagccattcgtgtgggggtagagcgaacgaacgtcgtaatatttcatccaccacccctccggcaccttttatttattgcatttattttgtttacttaaaaaatttattctaccta

SEQ ID NO: 66326 - DNA, 166 bp, Heterodera glycines
atgcattacatccccggcggcgcagcggccaagccgttcaccacccaccacaacgcgctggacctggacctgtacctgcgcgtggcgcccgagctgtacctcaagcgcctgaccgtcggtggcctggagcgcgtgtacgagatcaaccgcaacttccgcaacgaag

SEQ ID NO: 66327 - DNA, 81 bp, Heterodera glycines
attgacctgcgcttcaagaaaacgcgtgccatgcgcagagagttgaacaagcatgagctttcattgaagacacacaaacag

SEQ ID NO: 66328 - DNA, 421 bp, Heterodera glycines
cccgttatcgcactggaatggcctgacactcctggctgtagatggcacgttgtggagaacgcccgatacgcccgaaaatgacgcagccttcggacgcaccgccaatgagcacgcgcgttccgactggccgcagcttcgcatggtctgccagatggaggtcaccagtcacttgctgacaggcgtgagcttcggcagcgtctcggaaaccagtgaggttgaccttgctgcacagttggctgaacagacaccggagcactcgttgacgatactggataaaggtttttatgcgctgggactcctccatcactggagcgcctcaggagcggagaaacactggatactcccactgcgcaaagacgcacagtatcgggtacgggtaaaggggggtgcggggcaggagctcgttgagttgaagttaagc

SEQ ID NO: 66329 - DNA, 1030 bp, Heterodera glycines
gcaacgtcaaactcataaattcgaacaaatgcgtaaataccgataatttgtttgccgagaaaaggaaccccggcaccggcggtttgaaatgttatgacgagatcaagcaccaatcttatgactgctcctgtcacggtgataagaaatgccttgctgaagaaaaatgggctcacgacgcctttctttgtccaataataaaggtaattaattaatttattattattaattaatgccaaaagacaccgccacagacaaatttcatataatataggcaatttaatttttaagtagagtgaagcgtgaccgggacctggtaacggacaactgaataccaaggttccggttttgacatggacctggactagtcccggttttcccagccaaaaattaacggtttttcaactcgaaaaggtcccggtctggtcttacccaaattcccggttccgcttaactctattttttttttgtatcgaaaaaccggaaataataaaaaaatagggacgataaactggaataaggataaatatggcaaatgataaaaactctattttattaattaatttgaaaattcaggtcaattcaattcaaatcaaaggaagccgacaacgagtgtttactaacccaaaagattttcgatacaattggactcggattgaggttgattgttatgtgagttaggtttttctaatttcaaaaatttgtttaattgattaattttacagaaggccgatgcgggcaccgtaagcttttggggctacagtaacccggagacaaaggaaatcattcgggtggacgaagtacactgtttgacttatgaaactgctagagtgccaaaacggttcaaaagtttgcaagtcgaagaacagccgccgatgaaaaaactgagtccaagtccattcttggccaataatgcttcatcacttatccatgtgttcgtgccatttgttggccatccatgagagaagggcgaaatcagtgatcagtggatctgtctgctgagtgatggtgatcagttggccaaattccatca

SEQ ID NO: 66330 - DNA, 346 bp, Heterodera glycines
atgaaaaaaatatacttatatgcaaatttgacgaaaagtagccaaaatattagagatcggtattttgaaaaaagcctggacctggacctggattccatgttggacctggatttcctggacaaaaatccaggaaaatccaggtctaggaaaaatccaggctcctcgagacctggatccaggcctggacctggattttttgaaatttttttaaaaagcaaacaaatgcctgaaaaaatcaattatttgctagaagcatctaaaaatatctaaataataataataatgtgtttttaaatttatttaatctgtttttgaaaacttgaaaaaacatcggtcacttgaaaaa

SEQ ID NO: 66331 - DNA, 763 bp, Heterodera glycines
atgattattttttcaatgtttttgaaaaataaattatgccaaattttaattggtaaaatatacaaatccatgtgtttggcattagttttgtaattttgttaagaaataaatttattcttttttttctattcatttgaagtttcatgttccgtgggttgaatgattttatttggttgataagctgttttttaacaacttactatattttataattaaagttattaaatgattggacacattaacaaataattattttgaaatgatttcttaattaattatataatttgaaataaactgtcacctgaaaagcttttttactcattttaattttaaaaatttgcttattttccatattttgtagataatacattcctgaaatcaaaaaaacttcaagtttcggaatttataaatacaaaaaaaaagaaatatttaataaacttttcctggaagctgaaattttctagaaaaaattttaacaatattttttggttttttatttagtaatatatttttccagatttaaaattaattatttttatggcataattcttgcgaatttgacccatctacgatctgaattgttggcaatggatttgtacaatatcaataaatattagatattcaaatgtatttatttaaaatttttattcaatattttaattgtagacttattatttttctgatttacaagttcaattattcttttgataaaatttttttagaaaattaattgatttgttattccttaaaataattaattaaa

SEQ ID NO: 66332 - DNA, 367 bp, Heterodera glycines
aagaagtgattgaagttgaagatgcaaaggttgagcagtataagaataagtcattaagtggtgccaaattgagagattttgtgggcttttgggtgctcggcttggacatgatcccatgggatgcgcaacggatgagacttttcgtcatccggcactgcaactgctcattggaagcatgggtaagaaaaaatgccaaaatcaaaaattgaaatgccaaaatcactttttttaaataaagtttttgcgaccatccgattcggagccaactgatcccaaagaggcatcgatgggcacgggacgctttgaggatcggtacggtatttaaattttttgattctcaggccaaatccaattgtgccaaaataaa

SEQ ID NO: 66333 - DNA, 847 bp, Heterodera glycines
tgattgctggtcacgaggcaactgacattgttgagtcggttggcccaggagtgcatggcgttttgccccggcgtccatgtgatcccggcaccgatcccgcaatgccgtagctgtgaacattgctacgcgccggagtcaaatttgtgcaaactttttcaatttggaccagagtaataattatttattatcattaattagcggattattaataatgattatttattttgattaattaacgggttaaattttttcgcatttttaaattgttaaaatttggttttccaataaagcataaataaatattattttatttatatcttttattatatttaaaaacaaaattcttatcacaaacatattaaggaaaaaaggatcggaatttatttttttaaaaaaattaaaaaatagttttccaccagttgtaaaatctcggcacaaacaatgctagatgggaccacacgctttaaatgccgaggccaagatgtgtatcatttcattggaacaagcacattcagcgagtacactgtggtgttggagagttgcatttgcaaggcacttttttaaaataaatattttttattaaaattaaattatttaatcaaaaaacataaaaatgcttttcagatcaatccaaaagcgccattggatattgtggtggcgttgggctgtggcttcaccactgggtacggtaatccgttcaacgtggcaccggtagtgccgggcagtacggtgggcatttggggcattggcgcaattggacttggcgtgatgttgggatgcaaagaacggggagcaaagaatatcattgcggtggatccggaaccgaaaaagctgcaaataggtgaaa

SEQ ID NO: 66334 - DNA, 292 bp, Heterodera glycines
atgggtgttgaaaagtttattttgaaaaaaactctttacaaaataatacccttgggagaagtgagtggaaaacatgatttcaaaattttcaatgttttctagtctaatctactcaaaacgtttcagaattcaataaaaataacattcacggtgcgaaaaatggggtttgacaagtttattgggggaaaaaagactttacaaaataatacccctgggagaagggagtgggaaacatgatttcaaaattttcaattttttatagtctaatctactcaaaacggttcagaattca

SEQ ID NO: 66335 - DNA, 64 bp, Heterodera glycines
atgcctggacctggacctggattccatgttggacctggacctggatttcctggacaaaaatcca

SEQ ID NO: 66336 - DNA, 330 bp, Heterodera glycines
atggaatttgtacttgaatggcaagtacgtacatacttgaaaattggctctcatgtgaaaaaatttgaaaatttgcttttttcagaatcttgaaaatgagcattcaaaaaaaaacttcaaaaagactgatcatttgatcaacatgcagaaatgatcattgatcaattctgaagcatttaattttattaatttaaacattaatattcgtcaaaaaattttaaagaaattacaatttcaaactccgatttgatttgatatgcccacagcaaaactccaaaaaatcgactaaaaaactcatagaaaatcaccaaaagatcgcaaaaaattaaa

SEQ ID NO: 66337 - DNA, 556 bp, Heterodera glycines
atgtccattctcccagcagcagtattcttattttccaagcaccaccatcacatcacacacagccgcagcatcgttctgcttcatcattcattcattcatcggttatcgtccgtcacgcgacgcatcatgaggaagttcgcctacttcaaactgtgccaggccgtgctcacttccgtttttctgtggcaaattctctcaacccaccaattctgtggcgaatttgacgagcctacggtgtgctttttcggcattttttgatttctcaacccatctaattaaaatttcccatttttcccaggccttcttcaattccgctgtctcctcctcctctgctggcggccattgcgaccatcagttcacgctcatcggaatggactccaccactggcgaatacggtgccgtgccggacaagcagaagtggcacatgcaactgatggcgagcagcggcggcggacaaggccaaccaattgatgaacaacaacagcaacagaagaatcagatggaggaattttcgtcaaaattgccgactgttggacgtcactgcattccgattgcg

SEQ ID NO: 66338 - DNA, 716 bp, Heterodera glycines
atgcgaatgcgaacggcattagtgaacgaagaagaaaagttgaagctgctgcccctcgaaagccaaacaaatcgcatcgacggagtttggaatttgagcagcgatcaggtggagggaagtgaagcggaaaagagaagaaagaatgaatgatcacaagcacttaagggaaatttgggagtgatggtaattacgaacattcgggtcgtatggtatgccgcactgaacctgcaggtaaacgggaaacaaagcgatggaacaaaaaccgggagaaataaatcgagaaaaatgattggaaacatggcatttggactgagttaatatgaaaggtgagtggtgcctctttcagtacaacgtgtccattccgttcctgcagctgcgaagttgccgcattcgcgactcgcgctttggccatgcgttggttttggagacgtcgctgagggtaatttggagagattgacaagcaaaaggaaaagcatttgaagagcggcgagtacattcttggctttcaaatcaaaccagaagagcgcctggaattcacttgcaaagccgtccaagcccttctcagtgcttttcaatcgtcgcccattttcggagttcagtacagtcgccaggaagcggccttttcacaacagcaggaacagcgacaagcgatggtgccgaacatcacggaggagaaggagccggaggaaaaggcattgcgagtggacgcatttgcg

SEQ ID NO: 66339 - DNA, 50 bp, Heterodera glycines
atttaaagccatccattgcctgctcggttctcggcacagcaaagcactaa

SEQ ID NO: 66340 - DNA, 254 bp, Heterodera glycines
atgagggaaaatgtccatcaaaatgtcgttgcaaatccatctgaaatgtggggaataattatagtgacaaatatatacaagaggtgggtacaccccaaaacgtcgccgccgaaacgtcgccgggacataacgtcgccgcaaaaaaaattaaaaatttttcaaaattttaagaaaatttaaaattattttagcttttctaaaaatctaagtgttaataaaaactaaatttgttgatttctaagaaaaaaatcgaa

SEQ ID NO: 66341 - DNA, 134 bp, Heterodera glycines
aaacgtctctattttgtgtcgagaccggacagttggacagtagacacctggacagtgggggcgtttggacagtaaagcatatttggacagaagtggacaattttgtgcagtgcacactacgtaagtaaatgcaa

SEQ ID NO: 66342 - DNA, 135 bp, Heterodera glycines
tatgaatcgaattctaagcaaaaatttattcaatcggttctttgtcggttatgaaaatctcccgtcttgtcggcactacccaactctccgttcctctgctaatgcgccaaaaccagatgatttgtatgaaccgag

SEQ ID NO: 66343 - DNA, 831 bp, Heterodera glycines
atgtatttccggccttcaccaactgatggtggtgcccaattagaggtaaacggcctaatatacgacaactcacatgtcgtgccgtataatccttatattctgctacgttaccgagtacaccataatgtactgtttgcatatggtaacaaagcaaatattaaatacgcactcaagtaccctttcaaagggccagggcattgttatgtcgagtgcaaacaagagtccggcaataaaatcggaattgatgagccggctcaatatgccaagatgaacttccgtggtgcaacggaagcatatgccattgtccattcactgccatttgccaaactttcacatcaggttgtcaaacttagcatccatatgcctaatcaacaaccgattgtgtacagggcttttcagctggtgagcaaagctcaacaaatccagcaaggcgaactgccagagacgcaatgttctgcctattggaaacaatggcaaaatgaatggaagcatgatccgaagctcaagggcatgctttttgaaaaagtccctgagcattttatatgggcaaaggacaaatggaacaaaaggaaatataacctaacaaagagaccaccaatcggtcgaattgttcctgtacccccatcggacccggaaaggttcgcgctctattcacttatgcgtcactttcctggagacccagaccatcttaagatggttaatgggttgctttgtacctcattcactgaggctgcaataatgcatggtcttcttgaagacgacaaaatttgggacaaaactctggcggaggcagctctgtcgcgctggccagatcagatgagatggctcttt

SEQ ID NO: 66344 - DNA, 4248 bp, Heterodera glycines
atgaacgccgaacaaattcaacaacttttgaccgctttgctccaaggaaatgccgcttcaagcataagccaagcgaatttggccagctcaatcgacagtagaatttcaaagtttgtttatgaccccgagaatggtcaaacatttgaacagtggcacaaacgcttcggcatattgattgaagaggatggcaaagacttaaccgagcaagccaaagtccgactattgttgggaaagctcggagacgaagagtacacgaagtacagggacacaatcagcccggagttgcccgacaaagcttcgtgggctgaatcaatcaacagattaaaagagttgttcgctgaaacgcgctctcttttcgtccgccgatatgaatgctttcgaatcagacagcatccaaaccaagacatcagttctttggttgctcaaatcaacgcagcgtgtgagcatgccaatttgagccttaccaaggaacagctcaaatgcatgattttggtgatttcactgagggatgaacatcacgatttgaggcagaaatgtcttaaaatgatggaagaagccgagaaaagtggcaccacagtcacactcaaaaagttggaagaggagttaaaagcaatccaaattgttaaagatagcgctttgtcactcctttccacgccagcttcgacaaatgccatccgaactcgccctcaacagtggagagaatcaaaaaccaaggccaaatcagcaaatgccgtgcaacaaaaccacccggcacagcaaaaaccggccacaggaggaaaagcaattcgtggacaaccgacccagccgtgcggctcatgtggtggtactgatcactggagatcagattgtcgcttccgagaagcgacatgccacacctgccaaaaacaaggccacattgctaatgtttgccgaaagggagcattcacgacaaagaaccaacgccgttcatttcacacggtccaagtcaaagcaacatgcctacaaattggcacgactcaaggacggtggtggaaaattttggtcgaaattaacggcacaaaaatcgaaatgaatgtcgacacaggagctcaggcgacagtccttaccattgaaacatggaccaaattaggacaacctaaattgttgccaaccgacattgagactcgtaactgcaacgacgtcacatttaacacaattggcaaatttatatgtcttgtcagcattaagggacaaccagccaaaaagctaacagcttatgtgactgaagagctcaattacgatttgtttggtttgccatggattgaggcaacggaactgattcccaaagaaatcatgtttccggagacgcacacatcggttggaatccgcgcatcatctgccgcacctttccaagaaatcgccgatgttaagtcactcacgacggctcttaaagaaaattttccggatgtttttggtaaagagctaggacagtgcaccaagattaaggcacacttgattcttaaatccgacgctcgaccggttttctgtaaagcccgacccgttcctcatggctcactggaagcagtcaacacggagctggaccgcctcttacagatcggtgccattaatccgatagaatttagccattgggcagcacccattttggccgtcaaaaagaaaaatggcaaaatcagagtgtgcattgatttctcaactggcttaaacaatgcacttgaactcaaccgccacccactccctcggcctgatgacatttatgcagccataagcggcgctgcatttttcacaaatttggacttaaaagacgcatacctacaaatggaattggatgacgaatccaaacagctctgcgttttgaacacgcatcgtggcctttttcagtgccaacgtcttccatttggcgtcaaatcagcaccggcaatttttcaacatttgatggatcaaatatgtgctggaatccccggagcatttgcttatttggatgatggactaatcgcgtccaaaaccctcgaagagcacctttcagccatccatcaattgttcacacgattcaaagcatacggattgtgcattcaacttgaaaaatgcaaattcttgcagaaagaattgctttttcttgggcacattgtgtcggctaatggaattagacctgatccaggccgctcagatgcaatccgaaaattgccagtgccacatgacaaatcgactcttcgctcatttctcggagcccttacttactacagtcggttcatcaaaaagatgcgcgaacttagggcgccattggaccaacttcttcggaaagacgaactttggaattggggtgaagaccagcagaaagcttttgaaaaagcaaaagagatcatgttgtctgatctgcttttaacccacttcgacccctcgcttccaataatcgtcgcagctgatgcttcaaaagatggaattggagcgaccataagtcacattttcccagacaaaacggagaaggtcattgagcacgcgtcaagtgttctttcagaagcacagcggaactacagccaagtcgaaaaagaagctttggctcttattttcgccgtccaaaaatttcacagaatgatttttggaagaaaattcacacttctgaccgaccataaaccgctgatttccatatttgggtccaagaaaggaatcccaatttacgccgcctgtcgactccaaagatgggcgcttatcttgtcaaattacgaatttgacattcgctacatcaataccactgcgtttggtcaagtcgacatgctttcacgacttatcgcgaattatccgcgacctgaagaagatattttgatagcgaaaatttgcaccgaaacagaatgtttcatcggcacaattttgcaggcacgaattaatcatcttcccgtcactgccaccgaaatagcagaaatgactgaaaaagatgaaattctccaaaaagtggccaaattctccaaggaaggatggtcacaaaagtgtaatgaccccgacctcgcaccgttctttccaaaacggaacgaaattttgcaaattgagaattgcctgctttatcaaaaccgggtgatcattccaacaattttgcgagataggacgttgaaagcacttcacatggcacacccaggaattgtgcgcatgaaggctctcgctcgccaacacgtttactggcccggaatggactcagccattgagaaattggtaaaaagctgcgaagaatgccaaatcgcccaaaaagctgctccaaaagcaccactttctccttggaatgccaccaaacggccattcgaacgtgtgcatattgattttgccggcccatgccaagacggtcatgtttatctacttttagtggattctttttcaaaatggcccgaagtttatcagatgaacaccatgacagcgaaagcaacgatcagtgttctcagattaatcatcaatcggcttggaatcccagaagaaattgtctcggacaacggacgacaatttcgatcgtcagaattttccgaattttgtaaagaatttgggattcgacatatgttcacgccgctatttcatccacagtcaaatggccaagtcgaacgctttgtcgacacttttaaaagggcaatgcagaagtgttcgaaaaaggacaaaaattgggctgagaaaatgctcctgtcctatagaacaacaccgaattctgcaattaatggacattcaccggaccaattattctttggtagaaaactccgcactcaattgtctcttacacatccgacaggaaaagtcaatgagacaattgacaagacaatttttcatcagaaacaggaaaaataccgcacgaaaatggcacaaaattttaatgaaaagcatggagttaagtcaaatgagtttcttccgactgacccagtgcttgttttgaattaccagcatggtaagacacattggctccaaggtacagtcatcgaacgactcaacaattcgccaacttatcgggtaaatgtgccaagactcggacgaaacattcatcgacatgccaaccaaatgcgccgtcgatatgtcttcgaagaaagtttaggatttgttggtcccgcccaggtggcaaatgacccaaatcatcattcaccggcacatcaaaaccatccaacaccggcacgccaaaacacgacaccgaaatgccaaaagcggaagcagcccgacgaaatccacccaactactgccaattcaccacccatggcattgagacgctctagtcgcaacaccaaaccgccgatccgcttctcgccaggctga

SEQ ID NO: 66345 - DNA, 4246 bp, Heterodera glycines
aagccattaaatacgtaaaattaccgtaatccccgtaatcctaatcgaataccaatatgattaaatgaatcaattaaaacctaccgtaatggctaaaaaacataaaaattcaaaaattcccccttctccttgtagaaattccgcccatggtcaaccaggccaagcaggtggcgatgagcccgcgtgaccagggcaacagcgtgcgctggcgcgacgccaacgaccgcctgctggactcggtgcgctcggtgggcgacgcgatcaccggcatgccgtccgcgcgcggcacacctcagccgccgccggcgcagacgcgttaccaaccaactgtaacgcccgtgccggtggagcagtacaaccacgcggcgtccgcgtatcggccgccaccgtcgcaacaggcggcgtcgccgttcgactccagctacaatgtgcaacagcagcgccaacggtcgccccagttgccgcccagcacccactcggcgagtttctcatcccatggagaggggatcgattagaatacaatcgctagcattgggttacggtagtaatatagtgtagcattagagagttcgactttctggacggtagtgatgctcgtggacacctatatgcactcggtatcgggtagataaatttgtgttcttcgactctcatcagtggattaattctctaatgagagtgctacagtaacgaggagttgtggaatacggtagtaccgtagcataacgaaatggttacggtaccgaccccctttttttgtccgcgggtggtaatcaacaatttgttgatcaacctcatttttttgattaatttgtgatctcgactctcatcattggattaattctctgatgagagtgctacagtaacgaggggttatggattacggtattacgtagcataaagaaatagttacggtagcgacccccttttttgcaccactaattttggatcattaattatcaaaaattcaggtaatggagcagccgatgcgcgccccgggcgagccgctggtgcacaatcggctgattgtgcgcgaggaaatgccggccccgcgccgtccgacgccgcccgtcgaaatttcgcccgccccgcgaccgccgccgccgcccgagctggacgaggaggaggagacgcgcgccttctgggagcgctaccagttgcccaacgcccaataccagcccatcctgagcgcggcacacaacctccaccaggtgggcgggcggggcactaattgtgagacgcgcgggatggggcggaattcggcactcgagcatagtgccactggatgtcgatcggatggcatcccataattgccatgtgccacccatcccatgtcgggaatggtcgcattcgagaatagccatgtgccactcccaatgtttggaaatgcgacactcgagaattgccacataatctctgggatggcatattgtcactcgaggattgccaaaccattttgaccgggtgcttgatctcattcgaaagtcttgtttggtgcctgttagggtggggccgccgtcattcgagagttcggcactctataaaagccatctgccgcccggtctcgagaatggcactcgataattgtcatataatctgggaatgacacaaaattgtcattcaagaatttccaaataatttttttggctaaagtagctataccaatcgattcgtctcgagaagataagcacgaaaaaataggtctcacgcggaaataggtttaactcgatttttgaaccggtttaaaacccgaaaattgagaaaattaatgccatcattggccacaggaattgcgccagtggagctccaacgagaatgacattgtggcagctgccaaacgcatggccattctgatggcacgactgtcccagctggtccggggcgagggcggcaacaaaaaggatctgatcgactgtgccaaggtgggatcagacaagtggacaaaaacttttaaatttggaggacaaatggtcgacaaaaatgccgcgacaaatggacaaaataaatataaaactgtccttttttgtaggggtgggggggggggtgggggaatttcgtaattttttaagggttcgggttttaggactctgatttctgaaaaaaggactcggattttcaatttcagatttagaaaattttgatcgaaattggcaaaaaattgcctattttggacaaaggactaatctttttatggacaaatggtcgacaaatatgtataaatgtgcgacttttcacaggcaattgccgactccagtgaggaggtgacccggttggcggtccaattggcgcgcctgtgcacggacatcaaaatgaggatggtcagcgaattaataaatataaattattagggcttccttttttaggcaaatgcctaaaatttttgtgcacttaatacgcacagataagcacgaaaaacgcgttttccgcttggtttggggtgtctacgatgacttttataatgcatatttttgcctatttaggcgtttttgaagtgcctaattttaggattttcgaaaaaatccttaacaaaaatgcaataaaaacgaaaaacacacccctaagaattgaaaagttaaaaaaaaattaatccaaaaatttaatatatattttttcttaataaatatttttgatttaaatagttctttatttggaaaaaactttaaactatttaacaatttcatttacaactatttcgcaattttttgtccctaaaaaaggaagccctattaatcacgaatatgacacgtcattgatatctacggcttatttttactttaatttatgcgattcaaaaaaatacatttgtacgtgtcatttttaaacatgagttaaagaacaagtcggcagaataaacaatacaacgaccactaataaaattatcgtttatagcccaatttcttctttagaaattttcctcgggttttggggaagaagtgcgcggttccatcttaataataaaagaatattacatgaaagatgtgactgtaaactagcaaaagcgaactgaccatctgtgcaagagggtaaatggcggacaattgactgcacgaaaaggatcgtttacgagtggcgcgcttcatttcgccatctttgcgggaaggcgtcggctgctttcctccgattggattcagtgcgcgaggagcagtacgaccacacgaatttgtggttacgaatacattgcgtcgagaagcggacgaagtcgcgggacgattcggcgttgacggtttcaaaggagtcgaaaactgctgtaattagaggttcaaaaacaatcaatggatgtatggtaacgaagaaccttctgagccttttgcacttctcggtcttggtgataactttgcatcacagattcggcgtatttgtcagctcgcaatccctcgacaataatgtcgtttaattggaaatttttgacgtagtcgttgcataactcacaaagctcgttcagcaatttcgggactttttgttccacgatttttctttgctaaaagtttcatttgctcaaaattatgaatccgattaacaaaagggacatactctcccattagcagaggaaaaacaatttttggttgttttcaaaccgccgaactccatctccgtttcttttatccctatttccccattctacacaaaaaggaccttcagttttgtgttcagactcccagccctgttcttgtagaaagacgcacgacacacacgccgttcggtgtccaatttctgcttccaactggccatccattcgttcagtttgtcaaatacgggcttcgctcgctcgtacatttgctgacggattcgaacttcctcctccaaatttagcagttccttctcgctcagattttctgaaagattacatataagattaatcacgcaaataagcgttttgaaatttacaaggatttcaatgacttttactttgacaattgtcacttactcaaatttggctttgctggaaactccgtagaaggttggaaacattttgcggataactcgtctaatttaacgagcagctcgtcatagcggaagacgacctgttcagcccacaagtcgtgatggtctttcagctaaatttgtaggggcataagcaaacagagatcgttaagcccttcgttcgatcgcccttctttgaactcactctttcattgaatttttccatcttcttcagaaagtcagacgataacacggtggattggttgtacaagtcaacacgcaaaaaatggaggtcgtcttcattgaaactattgatggacgggcg

SEQ ID NO: 66346 - DNA, 618 bp, Heterodera glycines
atggacaccgaacacgcagaagttgattttgaagatgaaggcgattacgagcaattaaatgccaatcagaatagaaaacagaaaaaggccggaggatggcaatctatgggtaaaatttcacttttgcctattttggcattggccaatgaccccgcaaattttaaggtctcgaccattccgtcttcaagggcatccttcgcaagggttatcgacagccaacgcccattcagcgcaaagccatccctttgatgtgcgacgggcgtgacctcgtggcgatgtcgcgcaccggctcaggcaaaacggctgcgtttgttgtgccattgctgcaacgactgaaacaacgcgatgcacgcggcattcgtgcgcttctcttttcgcccacgcgcgaattggctctgcaaacattcaaaattgtcaaggaggtgaaaattcaatttaaaagggatctcgcttttctttgtttagccctctattatcgctaattaaccatatgtgattttatattgcagctcggccgtttcactggtctttactgtgcctgtcttatcggtggcgacagtatggacgaacagttcaatgcccttcaccaacacccggacatgtgagcaccacaattaa

SEQ ID NO: 66347 - DNA, 1026 bp, Heterodera glycines
atgaaaccttggctgagctacgtaaagcggttttacgacaaggataattgggttctctcttggaaaagccgacgtattctggacgaacttcatgacttgaagaacgaaggacgttggttcttataccacgcaacaaatggcgctcaactcactatctcaagaacgttcgatggaacacgaccatttgccgaatttcgatatgtggaagaaggacacctcgtggatctgactccaaaccaagtcatcttccgccaaacggttccagatgagcccgaagagagtccagtgagcaataataaaaagttggaagagaaggcagaaaaaccggcacgcaacgacaaacgaacaactctggccactcggaaggtggaggagtattgcacggcagagatgaagcagaacagctactgctatgacatatttaaaccgtgcgacgcaacgcacgaaacgtgtgccaagtcggcaacgtacagcgctcttgccgaaaacagacacaagctcgaagagttcaacaactgccatgccagctgcctctttgaggccctcatcttcagctggctgtcaaggaacacaaatctgcccggcaacgaagtatcaagaatgcatgaagaactgatcaagcccaccacggaattggaagaagtggctaaacttttccacgacgaacaaatcgtgaaaaacaaacgcggactcgggaaggatcaacaagtgatgaaagtcatcgaaatctggagaaattcatgcgatcgcttcggagagcttttcaccaagccagcgatgcagcagatcaaattccggccaatcctgattgaacacaatggccagtataaccaatggatcaaccgccaaaacacgcgaatggcggaattattttccaaaatgcgaacgaaggctcagcatccgacctacttgagctacaactgcacaacggtgatcgtcggcgataacgtagcggaactttttccaccccactatttgatgatgccaaatggttcacgcatttcccagcggacacatgccgattga

SEQ ID NO: 66348 - DNA, 155 bp, Heterodera glycines
atgcagacattgcacgatgcgtcgctggtgaagtccctcctcaaaaacgcgcaaatatcgtgccgtcgatgcgagaattctcgactcttacagggttacaataccatcaacaacatcaaccctgcttaccaaaatgatcaaaattaccatacaat

SEQ ID NO: 66349 - DNA, 745 bp, Heterodera glycines
atgccgaaaatgaggtgcctgggcgttctgagtcgcgccctgggagttcaaccggccgccgttctttcatggccaatcatcaccgccgtaatgatgctgggtgcaaccgccacgaccggattccgatccgcgatcgagtttcggcgtctaggcgacgcccggaattcggaaattcgcgttcgaatatcgccgttagcactcaccgccaccgatacctgacgggtcagccgaatcgcagctttatgtgacttttaagcgtcggggcgccgctttctttgaggggcgggatgtgataattaatgttttattattaaattttgacttgattctggcattctgtttatttttgtctttccccaaattttgtttcccatcttcaaaaattttatgaattttggaatctcgctcttctgataatttttaattgtaattgtgcttttatttaaattggtcgtctcataaattgttggatttgatcaaaagtgtgaattggacgtgtttcccaaatttgaagcggttttgaatccaagcaatttcccaaaattgcctttccctccaattacacaccgcaaatttattttgacatggcgctttctgaagctggtgagtgctagcggtttctttggttttacttcgggtaaaagcaagttttgcgtgcaattgggctgcttatatttgggtttggaaaaattttaaaacaggtacagttcaatatctaggcgatattgttctgatttggtggcaa

SEQ ID NO: 66350 - DNA, 69 bp, Heterodera glycines
atgcgaataatgcgaaaggcgaaatgcgaaaagcgaaacctcggcccatccctgatttgcagttgtaat

SEQ ID NO: 66351 - DNA, 726 bp, Heterodera glycines
gtaaaagcactgaattggccaataaatttccagcgattaacccaatatttttgcattatcacttcaatgatcatatgaagttaatttccgtcgtcaaaacactgaatgatatttcgaaatgtttttggcagagcaatatcatttgcaataaattggttttggtaaatgaggttgattttaattatgaaattaaagaggaggaaaattggtttagcaaatttaaacaaaattttatggaaaaaattaacggcacaaaaaacggaccaaaaaatgtgccatcaaacgaatttgaagaaaacattcggcaagaatttgagcaaaaaatgaacaaaatgtatgaaaatacgaaacgaaattccaaggacgaaaaggcaaaattggaaaaagcaattggaaattcggaaaataatgaagaaaaaaaaattctagaaaaagaatatgatgacaaatttggcactttcatttcatcgccattttcatgaaaattccttcgtctccacgaaattcattgacttttcggatatttacctcatagaaattatatttgattggattttaatcaaaaaaaaacaaaaacaaatttctgcacggtcaaacaaaaaactacccaatcatatcatagcctttatcaagaaaaaaaatattttaaattttccaaatattaaggggtgtatttagttaatttcttataaaaaaagattttttatttacttttgtttaaataaa

SEQ ID NO: 66352 - DNA, 319 bp, Heterodera glycines
  unsure (1)..(319): unsure at all n locations
atgaaggagaaatggtctgataacagagctgcaattgactttttgatcaaaacaaaagttataacaatgtatttttcttatttnttctctataaaaaatttacattcttttcaaatacagtaaacttggtaaaaaaattgcaaataaattggaatgatcacaaactcggtgtaaatttcaagagaaaattctcaatcttcggcattttgaacttgaacattaaatagtatctttttattgcttttttcaattgaaaattattttcattttcagctctaatataattctaaaatttaagtttcattgccatttaaataaa

SEQ ID NO: 66353 - DNA, 856 bp, Heterodera glycines
agcaagaatattgctatcttgcctaggcgggattctgacttagaggcgttcagtcataatccctcagatggtagcttcgcaccattggtctatcgaccaagcacatgaaccaaatgtctgaacctgcggttcctctcgtactaagcaggattactatcatagcaacaggtctttagtagggtaaaactaacctgtctcacgacggtctaaacccagctcacgttccctattggtgggtgaacaatccaacgcttggcgaattctgcttcgcaatgataggaagagccgacatcgaaggatcaaaaagcgacgtcgctatggacgcttggccgccacaagccagttatccctgtggtaacttttctgacacctcttgctggaaactttacacattcaaaaggatcgataagccacgctttcgcggtccgtattcgtactgaaaatcaggatcaagtaagcatttgcctttttgctctacgagaggtttccgtcctctctgagctcgccttaggacacctgcgttacgctttgacagatgtaccgccccagtcaaactccccgcctgacactgtcatcggccgcgggtcgccgggccaaccgggtggcccgacttaacaccaaaatggacaccctttcgggcgcactcccgttttaccgattaagtaaggaatcgatgaaagtagtggtatttcactggcgccttgcggctcccacttatgctacacctctcatgattcttcacaaagtcagactagagtcaagctcaacagggtcttctttccccgctaaatttgccaagcccgttcccttggctgtggtttcgctagatagtagatagggacagtgggaatctcgt

SEQ ID NO: 66354 - DNA, 158 bp, Heterodera glycines
ttttcgcgtggccattttcgcgtggccgttttcgcgtgagggccgttttcgcgtgagggccgttttcgcgtggccgttttcgcgtgagggccgttttcgcgtggtgacgttttcgcgtggttgcatataaaagagaattcataactcacattatattt

SEQ ID NO: 66355 - DNA, 918 bp, Heterodera glycines
atgaaatttgcaaagaaaatgttaatgattcccgaggcggaatatttggctctacggagtgcgatgaatagtggtgattatctccaaaatgaaaaagcgagtttagacgcaaaaatttctcagaatttacaagaccccgacataagcgaggacctcaaggcgaagagacatgattggctctataaagaaaggcgtacggtaaaggggatacttgaaaatagaccacagaaggtagtgattgagaatcatgtaccaggtccaaatgttgcaccatatctgggcctcaataaccaatccaaaccacaggagaccgaagaaccacggaaaataattattcctaggaaaagacttaaagagcaaactcctgatcctgaatcagataatgatacacttgaggagttaagtccggaaccccaaacaacatccacactcaaaacacccgttccgatcaaaactattatacacccgacccttttaaacggtctttttaggtacgtgaaggaaaacaaagatttatttaaaattacggcggccggaaaggtacagtcgaacatgaatttgccgattgaaaacagtaattatagagatgttttgttgtatctcgcagggaagaaagatgaaacgccgcgcggtgcaaaatttctcaaagatcggttactgaaggatccaacagtaaaagacatggttgataaatcaaaggtcatgtggggacgtggaaggaaaaaggcaataaaatctataaaaacacccggcatagtgcgagtgaagaaacccttcaaaccactaatatgggcaagactgtagagaaaattttatcgaaaattattttaatttaaaatctccgggcagttttgctggaattcaaaaaatttttaaatgcggccaaaagatttgaccgaaatacgaccgatgacgtta

SEQ ID NO: 66356 - DNA, 1967 bp, Heterodera glycines
gaaaaattggatgaatattgttcaaatgacacggacattttaatgaaagcgcgtataaaattgagaaagatttttattgatataacaaaagataaagagacaccaaatgggatcgatgttatgagattatccacaacaattgcatcttcatgcatgaagtagggaccaaaataaaaataactaaataaataaatttcagcatttttcgtgccaaatttttaaaaaatagtgaaacattgccgattattcctgagagtggatttgagacaaaggacagtcagagtaatatagcgataaaatattttgaatggattatgcatcgggacggcgtgaaagcgagacatgcaggaaatggggggaaatatcgcattttggtgacaaaaaattaaaaattgattacataattggagtccaaaaaaagatcattgaatttcaggtgggaaataaaacaaaattaatgaattaattactaatttatagggatgcgcttttcatggatgtaaaaaatgttataagggttttatgattcaagcgaatggattaacagcggaacagaattatgataggacacaaaataaattggaaaaattaaaagttgcgagcaaacaatgggatatactgtagaggacgtttgggtatgttccctaatatatatttttataaaaaaaaacattttaggaatgtgattgaaacatatgaacgagcggggaagcttttgagtgaaaaactatggggcgggccggctttgaaccggcgtctctggctttccggaccagtgttctaccagctgaactaccgaccctgccctctccagttgagactcaagaaagtggtcttcggggatttgataatggtccgcaaaaatatgtgacaaaaaatgatggagagtccttaatataatttaatccacaattaaaaacataaaactttcttaaagtaaaagtgtcgaacgattccgataggcatcggtggttcaaaattttaaaactcgaaaacgaaactcaaaaagtgacgaaaaaaggggacgacacgaaatttcgcacacccgtgctctctatttattggcacatgtctttttttgaaatggtgtgtgtgtgtacctattttaattttaaaattttttttaaattttttggaattcgcgcattctcaccttttgggcttttctcactttctcgcacattcattttggtctcacaacttccctgctcccccccccccacccattattcttatctatgggatgattgataaggtaaaatggaaatcgcacgagaggagaggacacgcacattgattgatccgtctccattttatttattatttatatattttgtactatttgtttacaattaacgataaatttgtgcgaaatttccttattttaacgaacggacaaaatgcaaaatgtaacaacagaaaatggagcagcggtgggagaggaagaattgaacgtaccggaaaatgtgtttaggtatattcgacggatttttgtgcttggcctcattttaattcaaatcaattaattaattgattaattaattagctgttttcttttacacaccgagtcaacaaattaaacccaaactcatcaatgaacaagaaatgccacattgcaaaaactaaatggtgcaaaaatttaatgatttgataaatcgaaaataatttttgaaatttttaattttccgaagaaacaaataaaatattcatgttgcgcaacagactcgaacttatgccctttgtcaattgactatcttacaaaaaccgcttggccacacatgcaattttgaactgagtgccaaaaattgactcggtgtgtttaagggcgtccttgaagtcaaggacctcatttctgaattttaacttttttcagggattcccagttgaaatggaacggatggggctacaaccattcattctttgcgctgtctgccagcggccaaattatgatgcatagtgacgagtga

SEQ ID NO: 66357 - DNA, 1259 bp, Heterodera glycines
atgatgaggaagaagaggaagcgaaggaggaggagaaagaggaacagagggaaagatagaagaaaggaggaaaagctagacgtagaaagtgaggggacagaggaagacaaagagggaaaagagaaggaggagggggaagaggataaggaagagaaaacggaagtgggaaagatggagaggaagaaaaggcaaaagaaacaaaaaaagagttgttcacccgaaaaattggtgaaagagaaaaaagaaaagttggagggatgcagagaaaaaaaggatgagggagaagaagcatcttccgttaaggaagacgagaaaaagcgcgaaaatgatgatgatgaaaaggagggagaaaaagacacgaataagaaagcggaagaagaggaaaaggaaaaaatgaggaagaaatcaaaaaggaggaaaaggaataggaatggggaagctcaattgaagaagcatttttatgaaatggacggggaggagaaggacaaagaagaagagaaggaagaggaaaaggaagttaatgggaaaaagaaagaaagaaaagagaaaatggaaggggaaaaaaagaagagagaggaggaaaaggaagaaatggaagaggaggaaaagaagagagaggaggaaaaggaagaaagggaagaggaggaaaaggaagaaacggaagaggaggaaaaggaagaaagggaagaagaaggaaataagagagaggaggaaaaggaagaaaggaaagggcacgaaaaacaaaccgaagatgaagaaaaaccaaaaagaatttcaaagaaaaagaagaagtacaaagttgaagcagcgcaagtgaaagaggaaaagacgaaaatttgggaaaggaaatggcaaggactgtccaaggaagaacggttggaatgccgatatcggaagagttgttatgcgacaggaacgaagccaccaattcgaagatgggcgactcaggaagagggggacgaagatgaaaagcgggggcacggttgggaggaatggcacaatttatgggtgacaatggcaataaaaaatgaagtgaaagaagaagaagccatcgaaggatggcacggcatggatgaacggcacaaaaaactgaagtgccaatatcggaagagttgttacgaacgaatggagcagcgaacggaggacgacggaacagcgaacgaaacgcagcgaaaccgaaggaaagaagcgaaacaaagggaaaagccgaagaaagtggaggacatcacgcggaagacgaaggcacgagaaacctccgg

SEQ ID NO: 66358 - DNA, 1555 bp, Heterodera glycines
atggatttgcttctctttttcctattttacgccttgtttttctgtgcatcattcaacagaatgtcggcctccccacggaaagaccgccgtgggcccattttcgacgtttcgcccccgaggggtcgcctttgtgccgcggcgtcggaggatcggcaaaatgatcaaacaccattgatcgatctggccacgtcggaggatcggcccaatgatcagccaccactgatcaatctgccgaaggaaggacagtcgtcatccaaaagacagtcaaagcatcgaaggggcagcagtgccattcccctttttgctgatgcgtactttccttttttggcacaatcatcggatacaaatcggcatgcatcgccgcccactgtgccgcgccaatttatggcaccgatggacggcgacatttctggcaccaataatcagccgtcaccaccaaagcaccgaaggcatagaagtgacattctcatttttgcaagcagtacccaaacgaatgatcattcacacaaacaaaataatgtaaatgtagcgaaaagccgaagaacacgcaggccgagcatttcacaaagcgatgccattgccaagcagctaaatgaattggtcatccaagaacgaatttgtttgtttttttgtataataaaaaaataataattaaatttaaaattggtaattattatcgtaattatttaataattatgccgttaatcgaaccattatcaatgaatgaattcacagacaatcagacgccgacacaatatccaaagatgccaattaacaaatggactaatctccgattgcctgtccattccgaacagcttagagcgggaggaaaatttgatgtcaaagagaagtgtcctgaagcgaccaatgaatttgacaaaattgtcgaattcatggatgacacgggaaaatggattaaaatcgaaatagagcaaggaaaagccggtaagaggagcattaattgggagaggccgagtctcgacccattaaaacctaagggttaatctcggcattttgaatctctttctcgagcggaagaaggaaacaaaaacaaacgtacatttgggcttctgtactaaattttgccaattttgacggtttttgagtaacgaaccggcacctttaaaattcgaaaatttgagacaccatcgcagaaatttacaaaacttagccgttctaaaagcttttttacgcggtttatttaaaaattgaaaagtgaaagttatgctaaagagtttaattattatttcagtggttatttatttgcgtgatttgctcggaaatccgcttcaaattgaagagccgatgaatttgtcctttggcgggaagaagcgatttttaagaacaaatggcacagaaattctgtatccgacagaaataatatacagttggatgaattttcaattgccagtcaacgccgaacacctcgaaatgggaggacaatttgatgtgaaagagaaatgcccagaagagaccagggaatttgacaaaattgccgagtttatggatgacacgggcaaatgggtcaaaatcgaaataatacaaagaaaagccg

SEQ ID NO: 66359 - DNA, 54 bp, Heterodera glycines
atgttatttaatttttttgttattttgtttaaaagaaattacgaaaagcaaaaa

SEQ ID NO: 66360 - DNA, 871 bp, Heterodera glycines
atgaacaacagtaccaacacaacaatggatcctacgaatactacggtaacagtaatccattttaaaattgcaattagtccttaattacacagctcggctatgtgatcagttcaaattttgttccgctttgttttttgtttggcctaaagatccccattttggtgatggccttctttttgagcactacgccaatttatttgactttcaaatcaaagtgagtcttctcccattggattttcatttgtcgaatggcatttttgaatttttttaatttgaaaaagtaaaaattactaaaatttatctttaggattttgagaggcaattgcaactttctgatcgcactgaacttcttcaacttgtcgcttcagcttcccgccgctttgatcagtgcgactgtcgtccttacgggccaaattcaaattcgtctggccaactgtttcccgctccaaattgggccgtacattggcgccaccgcgcaatggaccatttgcttcgccatcgctttggaccgtctcgtcggattgtttttcccctttttgtaaaaattccaaaatttaaattttaaatttaattttaatttggcactaattattttagctattcaaattattttgggaagaagcgcatcgttgttgtgctggtcgccctcgcgtgttacacttacacattttataaggcgctcatttcgtacaattattcgatggccatccccgagaagtatttgcaattagtcgctttatcaattttaagcaatacatatttcaatttctattaaatccattttcattttgtgtaggctcgtcatttgtgggacgactgacatttatccgagtcaaaattccgtcgtcgtgctccaaaacttggcaataaa

SEQ ID NO: 66361 - DNA, 600 bp, Heterodera glycines
atgcttctcctttcttttctgttcgtctttttcctttccgtctccaaaagtgaggagtaagttttgttttccgattcattgccttttcgcatttcttttcggcattttcctaattgatttgtgttatctaattaccgatatttcccttttatatgccgcgtttgttttccgtctccgtttgactttctttgttcagctgttgcgatgtgtgcttcaatgcttacgtcctctgcaattattcgtgccaaacgcttcgcccggcggagggcggcgccgcgggggacggcacgaagttcagacattgcagggcgaactgccgcatggatttggccgagtgcgcgttcagatgcggcccggactgtccccggcccaacgacgtgctaatcggctgacccagcgaatgccgtgccaatggaaaaaaatcctttcattcctttcaaaattcttttttttattttaaacttttgacaactaaattttgcaaaatattgccaagtgaaagttaaatttccctttttttaaaatcgtttacggttaattaatcggaccgataaaacaccgagcaaaaaacaaaaagaaaaaatgttcatgggaaataaa

SEQ ID NO: 66362 - DNA, 641 bp, Heterodera glycines
atggctaaattaaaaatatttttctttgcatttttgattttgtcacaaaatttgacaatttcaaaaccaattcgtcgcaaagaaagagaactggggactcttgcggctattgcaattatttcggcaattgttctaactccaataatacttggttcggttgcaaccggcattgtaattggttatactttaaaagatggaagtggtcgtgaatgtatgaatataaatttaaatttaaaaataataaataaaatgataattaaaatattaattaataatttaaaaaatcaaaaaatttgttcagataaggagtacctcaaactttttttccccatcaaattttcgtttggcgaccgcgaaatttcaattgatttggaaaactttaacaattaatttttgtttcgaaaaattggtgaaatgtggtccatgccaaatttggatgagatttgtttttttggtatgaaagaactgataaaaaaccacataaatcagccttcctttcagatttaaaaggaacaaaaagacgccacactcgatcgggacaaattgaaatatttttattttatctgtcaaaaatggaattgcctgtttcactgaattcttgttgattgctattttttctcgttagcccttgagaaaggcga

SEQ ID NO: 66363 - DNA, 173 bp, Heterodera glycines
gcgatgattgtccatttgcgaagctgtgcaaatagaagagagcagaagcaattaacacatagaaaagatgcattttgctctcttaatataatttaaaatttttaaattttaaatttaaaaaatcattgcacaattttcactaatttagtcatttttagggatataataataaa

SEQ ID NO: 66364 - DNA, 513 bp, Heterodera glycines
atggttgagatgggaaccgaaattcaaacatcccgaaatgaacttaaatcttttcaagaagaagtagataaagccaaaaacataacattggagcatgtggaaaagaatgacatgaaagaagcaaagaaatcagccgacgtcgcaaagggaatcgccagacaggcaaagaccaaatatacatcaactctcgaggaatataatgataaatcggaaaagggttttagcgggatggtggttaggcttaacgaggcgctcggtgggcattttaaacgtaaggaaattgaaaatagacaagtttcagaagctgaaaaagggccgcaaaaaagagagagattagccaatgaggatgttcaatttaactacgacagtattgatcaaaaatttattgtctatctttcctttgccgtcacccatatagatttgtcaaaacacctcgcatatgttctggggtttaagaatacaaggctatttcacgcggaagaggcgacttatatgccggatttgacgggaggt

SEQ ID NO: 66365 - DNA, 801 bp, Heterodera glycines
  unsure (1)..(801): unsure at all n locations
atgaaatttgcaaagaaaatgttaatgattcccgaggcggaatatttggctctacggagtgcgatgaatagtggtgattatctccaaaatgaaaaagcgagtttagacgcaaaaatttctcagaatttacaagaccccggcataagcgaggacctcaaggcgaagagacacgattggctctataaagaaaggcgtacggtaaaggggatacttgaaaatagaccacagaaggtagtgattgagaatcatgtacccggtccgaatgttgcaccatatctaggcctcaacactcaatccaaaccacaggagaccgatgaacaccggaaaataattattcctaggaaaagacttgaagagcaaactcctgatcctgaatcagataatgatacaataaatgagttaactccggagccccaaacaacatccacattaaaacccattccgatcaaaactattatacacccgacccttttaaacggtctttttaggtacgtgaaggaaaacaaagatttatttaaaattacggcggccggaaaggtacagtcgaacatgaatttgccgattgaaaacagtaattatagagatgttttgttgtatctcgcagggaagaaagatgaaacgccgcgcggtgcaaaatttctcaaagatcggttactgaaggatccaacagtaaaagacatggttgataaatcaaaggtcatgtggggacgtggaaggaaaaaggcaataaaatctataaaaacacccggcatagtgcgagagaaganacccttncaaccactaatatgggcaagactgtag

SEQ ID NO: 66366 - DNA, 1467 bp, Heterodera glycines
atgtcccccctccgtttcttcgtcgccctttttctgatcactttggcaattttggccgggacccacggcactgttgagaactcagtggatggtgggccaaacatggcatcgccgattatccgtgaacgccgtaagttttattttattttattttaattgttgaattgaattaaaggaaggttgcaagttgacataattcatgaacctccggaaacagaaaaagtgagaccaaatgtgacgagggtcataattaagatcgtgatcgatgaacttaactatcccgaaagcatttattgagataggcaatgaggttgagtaacaagaactgaccactaaactcttgatcgagaccgagactatcgatcatcccaaattgtccaaaaaataaagatgtttttcatttttaaaataaaatataaaatttcggagcatttaaagaagtttaaaaagcgaagcttacttatataaaccagttccaagtcaaaaattcatttgtttgctccctttttagtcaaacatataaatttatgagatgccaatcacataaattttaaaagtgcagctgaactgagcaaaaaagtaaacattgcaaatggaaattgttacaaaaaaagactttaaaaatgattaaagaatttttctatttaaataactattttgaattcaaaatgaaataaattattttgaattaaaattgtaaactttatatgtatgccgttgggttagagttaaatctgtccaaaactgacttcaaccaagttaggcttttcgaaaaatttcagctcaaatttttacgaatttctataaatattaaaaaataataataatttttttgtccctaaaacggtacatggcattcattgactgtgaattgcgcggaaaacgaagagaaattttttcaataaaattcttttaaaaaaactcgggttttaaatttttgtggcattccgtcaggttagcttggcatgtgcttctgctgaagcttttgacctatacactaattgctgcttcttcttctcctgtcactgattgataaatgcactcaatcttgtgtaaatataaaattgtgccgcttttccgcgatgacaaattgaatttaaaaatttaatgcccgcgggggggggcaaagatgtgccatctcgaaagtacaaagtaaagggcgcataaaggatttaaaagaggcataaaaaatacgggatttaagtcataaaaatcactcaaaaagacaaattttaaattgttgacagtgctgaaaggcatccagcaaaatttttttttgaaaaattaaaaaatttaggtttattccgggagcctcagctgcattcgagtgccgaatgtttgtgccgagtcggtgatgacgcgaaaagtgccaaacaaaagggccaacaaatgttgggaagggacggtcaaagcggtgacaattctaagaatggaaatgaaatgtattacttacaattacgattttag

SEQ ID NO: 66367 - DNA, 658 bp, Heterodera glycines
cagttggattctgtcgaaagtgtgcacaaatattggccaattaagcatcgaaatttacaacaacaacaacaacaaggaactgcccgagattaatgagttgaaacaaattgtgacagaaatttgcaaagaaaaaagtgatgtgcaaaatgccataaaatcattttatgccaaaaatgacattggcacaattgttgaaaaagcgatgaaaaatgggcaacacattttggaagtgatgaagcaaaaggaggacgagaatgaacttgaatgcaacaaccaactgaatgaatttagccaatttgcaaaaaaatttcaaatggaatttccggaaattttgaaaaattcgacagtaaacgaactgatggacaaagaattgctaaagcccagtgatttgttcgaatttgtgctaaacaaattggaatttgaacattttgctagtgaaaggaattcgactggggcaaatggtggcgctgctaagaaacttagtgccgacgctaagaaagttagtcataggcgccgaaagcgcagcggtgatcccattccgtttcctctgctgatcattgcattttttgtctttgcatattacactcatattttcacttcacccattttgttcattttcatggctttttgcttatttcttgctgccagactttcatga

SEQ ID NO: 66368 - DNA, 810 bp, Heterodera glycines
atgaacagtgtgttggagggcatttacaatggcgtgccgatgatttgtgtgccattctttggtgatcaattttacaacgccgaatcactggcacgtcagcagatcggcctggttgttgaccgtctacattacaagggcacggtacagcaacagcttactttagcacttgccatcgcactgaaacttaatgagaggtgagacaaaattatttttaaatagggtacatatttttaattaaatgtataagagttatcctggttataaaatttaaaaaaattagaaagtttaaaaaattatgagcctggaccgctagaggcagtttaaaaagcaccactaactgacaatgctaataaaaaaaatttatggtgcgcgtaaattttggtccgaataaaaagaaaatagcattaataaaataatttaaaataaaccaatcattatttatttatttagtaatgtctctgagaataaaatcgaaatggacaaattgacgacaataagcgcagcattacaccaaaaaaatattccaaatattatttccgacgctttccgagtgattgaagacgaaatgtgcacaaatgatagaaaaacaacagtgattggggatttgctgacgagaaacgaagcttcctatgaacctgttggatggccagaattaattatttaatttgttaaaactgcgattttttggagattttttttagtcaaatcgaaaaatttaccaatgacacaatgaaaaagaaattaaccctaacggaaaatgtaaacataacattaatgggatctttgtccatgttttagtagaaaaataaa

SEQ ID NO: 66369 - DNA, 434 bp, Heterodera glycines
atgacattctatgcttctcttgttggatacacgggaagaaataatagttagtccttttgttgaatttttagaaattctatccgtccaatcggcttttggaattttaatgagtaaatcaggaaccgtaaatgacattctctgcttctcttgttggatacacgggaagaaataattgttagtccttttgttgaatttttagaaattctatccgtcatatcggcttttggaattttaatgagtaaatcagtaaccgtaaatgacattctatgcttctcttgttggatacacgggaagaaataatagttagtccttttgttgaatttttagaaattctatccgtcaaatcggcttttggaattttaatgagtaaatcagtaaccgtaaatgacattctaagttctcttgttggatacacgggaagaaataatagttag

SEQ ID NO: 66370 - DNA, 300 bp, Heterodera glycines
atgacattctctgcttctcttgttggatacacgggaagaaataatagttagtccttttgttgaatttttagaaattttatccgtcaaatcggcttttggaattttaatgagtaaatcagtaaccgtaaatgaaattctctgcttctcttgttggatacacggaaagaaataatagttagtccttttgttgaatttttagaaattctatccgtccaatcggcttttggaattttaatgagtaaatcaggaaccgtaaatgacattctatgcttctcttgttggatacacgggaagaaataa

SEQ ID NO: 66371 - DNA, 127 bp, Heterodera glycines
atggccaacaaatttttaattgctgcttttattttgacaattgccatttttgtcaatggacaaagtgaggcgccgaacaattcgtcggaaatggcatcggaggagagcaattcggaagagtcgggca

SEQ ID NO: 66372 - DNA, 509 bp, Heterodera glycines
atgggacggtcaaagtcaatgccgtcgctgagagggccgacgaacattcagcagttggtggacaaaatgtgggagaaggacacagaacgagtgaacgagtcgatggtgagagtcgactggcagcagcacatccccagcagaagggtcatcgacgtgtccgatagtccgtgagtcgttttggcattcgtttggcattctctcccatttctctccttttttggtccgtttccttttgttcgttttgtttctcttttcccaatcatttcggattgtttcacttggccatcgtccctttctcagttttctcgccgtctctgatgagtctttcctccaacggcccattttcgccgccctcgtcgacatttacaacgagcaattgttccacccgcccgtttgtcagggagaagcgccgatgaatgagcagagacgggcgaaattcgacacactttgggcactgatcactcgcagtgaaatttatcggatggcttacgattatttggacagattgg

SEQ ID NO: 66373 - DNA, 534 bp, Heterodera glycines
atgctcggccaattcatttcttcgcctcctcgtacattaattatggcttttttattggccataataatgccaatatttgttgttggtcccaaaataggttccatcggcaaccaataccaaattcatcctcctgagaaatacaaaattatagtcgttttctatgctcctggtaagtaaaaaataaaaataaacaatttcaaatggtttttcatttccgacttcaaagccgagtttcaaacaaatgctcaaggagagatcaaattttcatttgacgatcgagtgttcaaaaacccattcgtcaatcaggagttgcaggactcaaatacagtcaaagtggctgtttatgtgtacggcggtcaaaacaatgagctacgacttttgcatcccttcaaaatgtttgaatataatcatgctaatgagcgtaaattggtgcgaaaagttaattataccgatttcgagaaggaccgaaaacgcaatgattatcgactgcacgaagtgtttcatgtcgcatttaaagatcttccattggtggag

SEQ ID NO: 66374 - DNA, 53 bp, Heterodera glycines
atgcgaatttttattcttgggttaccaaatttaccgccattctacaaagaatg

SEQ ID NO: 66375 - DNA, 90 bp, Heterodera glycines
accgtatatgctctaattatagcccagtctctattaatcccgcagtctccaattatcccccagtctacgaggtgttttgaaaaataatcc

SEQ ID NO: 66376 - DNA, 66 bp, Heterodera glycines
cgatccacaaaaaaactcagtgtgggcgatccacaaaaaatctcagtgtgggcgatccacaaaaaa

SEQ ID NO: 66377 - DNA, 65 bp, Heterodera glycines
ctatagaccacgaatcgaccaactgaagttcaagctgttcagcagcagcatccatcgacgactgt

SEQ ID NO: 66378 - DNA, 1491 bp, Heterodera glycines
atggcggcgttcggcgccaaaatggccagaaaagttcaatttgttgaggtttttggccgaacttttttgtctctgttaaattttttaaaattttgcaggttaatagggagtcaagtgctttaaagcatatcaagcttctttaatttgggagacaaatagaaaggttatagcgtttgcgcaaaaaagggctggcgcgaaaagttggcggttccccaaaacgtcaccacccaaaatgccaccagatcagcagggcttggatttatatgtgtccactatttttggcatataataatgtaagagattatcagagaaattgtgaatatgaaaagtgcaatttattttgtttcaaaaaaatgctctctcaactccccaaatggctatatatataattagaaatcattaatcagtaaaatgccaatgaatttataaaagccgttaaattcctttttaatttttcccctatctactcccctatcttgtgatgtacagtatgcttttctcactaatctcacaaaaatttaatgcattatttatattattttattgcctttttaatttgttatttttcatgtcccaattaaaatgcaatgcgtatgtaaatggcaataaattaaattataatttatttagaattaatttttaaaaatggaaaatgtccttgacgttgttggcgaagaaattttggagcgcattcaaaacaatgagtttgaaagagatgtaccgtgaattgcaaaaaatgataatttgaaatttaatattttattccttcattaggttgaggggttcatcccggtgtcgggtgagacaccgtccccatcattcgcactgctccgagaccattggcttcaggcaataaaaattgataaaattataaaataaataattattttgctaatattatagagagatggtctttttgaagacccggagtttccagtggagacaattccaatgtacttcactgaagggccagtgccgatccgttggctgaggcctggcgaaattgctgatcacccgcagttcatcaaccagggcccaattgctggggatgttcggcaaggaagcattgggaattgttgggcgctggctgcggcgtcggtgttggcgcagtatgggcccctgttttacagggtggtgccgcctgaccagggattcggccaaaattacgccggtaaatttataaaatcaatatatatttaaattaaatattctacaaacaattcttttttaatgacatataatttggtagggatcaactgcgtcttgggtcaacttcatctgacaatgagccaattttgtctcggccaactccgtcttcgtatataatgggtcaactccgtctctgacaaaaattcaaaattaaatttatttgttttttttattataaaacgccattttttggcaatattattttaaaattaagtgataattttatacaactaccataaaaatgttcaattttccattggaatactgtagtttttgggacta

SEQ ID NO: 66379 - DNA, 370 bp, Heterodera glycines
atgcacgcgttttgcgctcgagctattcatcatcgggcttgtcaatctaaagcgaaacaacaaagatggtgttttgaacgaataaagggcataggttattttgaagaagtgtcaaagaacatgcagcaataagcctgcaaaatctaataagtggaaaatacctgagtatagaatttattttcagaaagtgtcaacagacttttggaaaaatatatttgcaatttatcaacaattttgagaagtgagttagaaatgataaacttcacgattcaaaccagttttcggtgctctaattaaccgcgataaaaacatccgaatcaattaaatagcttctgagataataaggtttatcataaaatttcatttaaaa

SEQ ID NO: 66380 - DNA, 45 bp, Heterodera glycines
atgaaaattaaaattgcactgcccccagaaaatcttttagaagtg

SEQ ID NO: 66381 - DNA, 186 bp, Heterodera glycines
atggccataaaatatggaccaaaaatcgcaaaatatggacataaaatggcaaaaatcgcgaaatatggacataaatggcaaaaatgtcaaaatatggacataaatttttcaaaattgagtgcaaaatttcttcaaatttattggttgaaattgcatatgagatacatttccaaattttttgactcg

SEQ ID NO: 66382 - DNA, 144 bp, Heterodera glycines
taattgccgaaaaaattcgagaccaatttccgaatgttgaccgactaattgcaaaacgaaagccgtctttgtcaaagcgccttaccgagtcaaaaaatttggaaatgtatctcatatgcaatttcaaccaataaatttgaagaa

SEQ ID NO: 66383 - DNA, 461 bp, Heterodera glycines
aatcaaacgctaacagacgacctaatggaaaaaaatccccgaaggagagaatttaattaaatccattccttcgggggaccgtgccgggtgccgcggggtaagcagtgctggttcgtttcatcacggcaccgaaccttttggctagtcagcaatcgttgcttaacttgccagatcggacgggtgcgcatgattccactgttccaagcaccccaccaaaagcaaaacgatataaccaaaatataaggaaaaatttttaaaaaattttttctccatcttcctttttgatactaaagcatcagagtgctaaaattgacttgtaaataaaatttggtgcgctttagagcactttctgaaaaaatatttatgaaataaaaaaatcgatttattcaagtgtccgtttggggtactcaaacaattatgaggagcaaaaatccaacgcagaattaaagtacagactatag

SEQ ID NO: 66384 - DNA, 762 bp, Heterodera glycines
tacgaggaaagatatgcttggtcacaataaaataaaaaatggctagtatgtaaaaatttgcggtcataaataaaaaaaaatggctaatatgtaaaattggcgtcttgaaatttttagactaatccgaagcaaagcacgaatgaattaaagaggcgaaagaattcacagtatcgtttctaatagggaaatattgacaggatatacgactaaaaacgggtttgatcatttttagcgcatttttaggtatacatttgagacaattgggcaggacaagaaaagaatgaagttgatgcctcatgaaactcggaattggttatgtttagtcgaaaatatccttacataatactcataaaaaatacaaataattcaacccacctattctatgaccacattctgaaaaaaatcccagaaatacgaggaaagatatgcttggtcacaataaaataaaaaatggctagtatgtaaaaatttgcggtcacaaataaaataaaaaatggctaatatgtaaaattggcgtccagaaatttttagactaatccgaagcaaagcacgaatgaattaaagaggcgaaagaattcacagtatcgtttctaatagggaaatattgacaggatattcggctaaaaacgggtttgatcatttttagcgcatttttaggtatacatttgagacaattgggcaggacaagaaaagaatgaagttgatgcctcatgaaactcggaattggttatgtttagtcgaaaatatccttacataatactc

SEQ ID NO: 66385 - DNA, 972 bp, Heterodera glycines
atgcctgttcagttggaaatggtaaatgccaatcagaaaagcagtggtgccattttgatttggtcgccagggagagaatggacgaaaaagcaaactttggcacagaacggattgagaaaagtgttgaagagagtgctgacaatgccaataatagggccaatgttcccagaagagaatttgggccaagaaattaatttgctaaatgcgcaagtcatccgctggaaaatgcaagaaggtttttaaagcaaaaataatttaaatgtatttttctgggttatttaattttccgttttttactaattgcagcgataattcacctttggcacgggaatgatttgtcggcattaaatgaattgaacaaaccaacagaattcattgagacggtgtcttatacatttgtggcattgttttaaatataattttgcatttagtactccgattttattgcaattaaatgcgtcggctccgaattttttattggaaaattctgtgattttgttggcaaacgaattgggcacaaatttttaaattattctgaagcatttttggaggattcggtcgaacttttgcatttatatcccaaaattttgaaccttcagcctcaaattaaacaacaaaatattcaacagagcccaaaaaggttggaatcatttaattaatgtataacttttaatttaaaaaattttaaattttcaattaattaaagccaattttaaagtaatggccaatttgaaatgctgtggattgtcggaattcattttaaagctaatttaaaatacaaaaagatgaaagaaattaaggaaaaattgggggaaaatttgaaaacaaactttgatgttgaaactgtcaatgactttcaacaattcgcctttttcaatgtcaaattgcactcaacaattctcgagagaaatgaactcaaaaaactattgaattaatttccattttcgttctctatgtttagaaaatgtatga

SEQ ID NO: 66386 - DNA, 730 bp, Heterodera glycines
atgcgcaaaaacttcaacaactctatagctgctgcagctggtggtggtgaattgtgccaacaggcaccggcattttcgaacaaagtgtgccaaacgaaaattaaaattctttaattaacagtttaatgactctttacatagcaaggtttttataagatttgtttttattttttaaatccatttaatttccgtatttcaaatttcaatgccattttgccaatgctttgttttttgtttctctccgattttcagctccgttcgctggtgttcattttcaccaccactgtttggaccgctctttcgctgctgcccttccgacttttgatgctttattggatgtatttggtggacattgatcatttctgtgtcgaaaagtgccaatggttgcaatggatttacaacttcgcctgggcattcctttgcctgctcaaattgaatccggcaagaaaacgcatcggatagatatttaatttaaattagtattttaaaataatttgcaattatttttttcaatttctgatcgtaaatccgttcatcaccgccatcatttaccacccctatcgctgtacgttgcgcagaaaattctcaatgccaagaggacgaatgagagggtcaacgacaatgagcagaagctaaagggcattccacacgagaaaaactgtccataaaaagagacggtacttgtacagtttacaccccatagaaatgtttttatatttttagtaataaa

SEQ ID NO: 66387 - DNA, 700 bp, Heterodera glycines
atgagtgttcataatgatagccatggcgaagattgcaatgcaacctcaaattgtcatgcttctcgttggctcgaagattcatcacaaaatttggttagtaaaactttgaaaaaatttcaaatatggtggggttttgaaaaattaatggattatttttccctaattgttagtttgacaactcgttaattggcctgtcactgatttcgattgtcgccaacattttggtgatcatttgcgctcgccgactttttgtgtataattgcgacacaattcacatttacattgccagcatgacctttggcgatttggttgtaggtgtgtttttatgtttagggacttcaatttttttttgaataataaaagttgcttatttaatttagtgttttgccaaatttttgagtctttcgaaagtcggcgtccctttcttggcgttgtgccgtgcatttgcgtctatcttttgagatgtctgggcatcgcggtgtccgcccttgtcgctggtgttgctgaacggagacaaactgcttttttttactttcccatttattatcgcgtgatcaaatcagtgcgaagggcacttcgaatgtgtgcagtgatttggacagtttcattggggagagaaaatttcctcatttttgtagagctgcggaaggcgtctataattttgaaattaaagcggaaattgatcaaaagtttaacttaa

SEQ ID NO: 66388 - DNA, 526 bp, Heterodera glycines
atgttaaataactttctgttcagattggacccaatttgttgtgagtcgccgcaggtaattgttgatcagttgagctgtgccacggaacgactaaatttggcactgatgccatttgaacacacaatcgtaacagacgacttcatttacaggcaaaaaaaattaatttaattaacaatatacttttgttaaaggggcattcattgttggcaccaatacaatcaaagcggcacaccggtcgattttgtgtggaaaatggaaatttgccaattccgtgtcaatggcatcgccacaacgggattggcagcttcatcatcctctccttcatcatgtaataattaattaaaattaaactaattcattttatccatcataatccccccctcagatcggagctgtcccccctgcgtgtgccattgcggcatcagtgtttgcggcaacggatttgagccggtccgagtcacacacaaaattatgggcccaaaatgcgcgtgtaattgttcttgtcgatacgaatgtgtataataaa

SEQ ID NO: 66389 - DNA, 245 bp, Heterodera glycines
tgtgcaatcacggctaccgtatctcttccattcgccgtgtgaattccgcccatcaacgaaaaggaatcgttttgggatcatttgccattgagtgccaaccgattgtttcctcgggaaaaacaaatttaaaagtaggaaatggggaaaacaaagaagagagaaatggaagaaaaagaaacaatacacccaaatgtcaaataatttacataaaaaccctcgcatggagcgacggatttgacttttag

SEQ ID NO: 66390 - DNA, 325 bp, Heterodera glycines
aatcgaacgctaacggacgacctaatggaaaaaaatccccgaaggagagaatttaattaaatccattccttcgggggaccgtgccgggtgccgcggggtaagcagtgctggttcgtttcatcacggcaccgaaccttttggctagtcagcaatcgttgcttaacttgccagatcggacgggtgcgcatgattccactgttccaagcaccccaccaaaagcaaaacgatataaccaaaatataaagaaaaattttttaaaaaattttttctccatcttcctcctagtggggaaagcatcagagtgctaaaattaagtttaaataaa

SEQ ID NO: 66391 - DNA, 518 bp, Heterodera glycines
atgttccccggcgacgatgggtacgaatcggaagatgacgaaattcacttgccgcctccgccgatcccgccgcaaattgaccaccctccaccaaatgtgctggtaattttggtcttgctttttgtcagtttttttcaaaatcccgagtgtattttttaggaaattcgtgtgggaccaattcatgatgggcaacaaccaatgccgctgagagttttgccgcaaattgtacatcggccactaaattttccggtaatttgggctcgcttttggttgttttttctcaatttcccgagtccttttttcaggccgttcgtgtccaaccagttcaacaaccgataccactgagagacgtgccgctatttgtcaacccaccaccaaatgtgccggtaattttggctcgcttttgttacttttttttcaagattccgaatgtattttttcaggtaattcgtgtccaaccgatgcctcaaccgttgccgctgagagacatgccgcaaattcaccatccaccgcgaaat

SEQ ID NO: 66392 - DNA, 481 bp, Heterodera glycines
tcgattttttcaagtgtccgtttggggtactcaaacaattatggggagcaaaaatccaacgcagaattaaagtacagactatagggaagctattcccgaaggattcggtctccccataaatctgggcgcatcggttcagggggactgccccgaaaacccaaaaaaaaattttttggataaaaattatttaaatgaactgactagataatatttaaaataggttatttctcttcctttcagtatccctgcaaagtttggtgcgcttctgatcagtttctgaaaaaaaagttaagcctaaactttttggcctgtttaaaaaggaattaaaaatttttaaaaattttattcatctccctttttgatagaaaaagcatcagagtgcctaaactaacatgtaaataaaatttggtgcgtttcagaaccctttctgaaaaaatatttaagaattaattttgcaaaaaataaataaaaacgaaagact

SEQ ID NO: 66393 - DNA, 65 bp, Heterodera glycines; identical to SEQ ID NO: 54797

SEQ ID NO: 66394 - DNA, 438 bp, Heterodera glycines
atgtcagaattcaaaaagtggggtcgcgaaaatagtaaatctgaggttattggcgcttatcaacctgatccgtctgcaacacttaaacagtttatatttaaagcctaattagcagaatgtgaaattctctcatttgttactttatgatcatttttgtctaattcgcaaaattacagctcattcttcgcgaaatataaactgaatcagtgtttgcggaatgaccgagctgataatcgccaataatcttcgattacaattttcttggtcacctttttggaattccaccatttcaactccttatcctctaaatatacccccccccccccccccccccctaatatttcaggtgacttacagtgtcatcgctgacaacgcgcacatccccctcggcaataccgtcgcttccgcctaaatttataaagattgtgatcgaataaa

SEQ ID NO: 66395 - DNA, 109 bp, Heterodera glycines
gcccgcactgctcgccgaactgatggccaacgaatgaggagggatgagaaggaagtgtgcgcaatccaagcggaagatgaaaatattgtggatgaaataaatattcatt

SEQ ID NO: 66396 - DNA, 184 bp, Heterodera glycines
  unsure (1)..(184): unsure at all n locations
atggcttctcaaccgccaaatttggttgaagagacagaaaaacccattattgatgtaaccaaggcaaaggaatggaggagtgctgaagacggtgttgaaacagggcgaagacccgaaaattcatccggncaagggcgattgttgctacgtccattacgtgngcaccatcaaagaaagcgaaaaa

SEQ ID NO: 66397 - DNA, 1966 bp, Heterodera glycines
atggacgtgtgggatttcggggcattggcacttttccacaaaattggcaccaaaaatgttgtgcttacacacaatttcccgatcatgtcacacatgtacaaatacatggaagaagcaggatggcaaactgagaatagcgaattatttaactaccaaaaacaaatattgggcaagggagtgccaggtgaaaaaattaattattacttattttaaaataaacataccgtatttcctgaaataaagcccccaagggctttatttttcaaccttcaaaagagggcttttttctggggtggggcactattcggggagggaggggactgtattatcggaaatacggtaagtaaattataaattaattaatgaaatataattaaaaattataaataaacaaataaaactattttacattttactaataaactatatttttacagaactgttctcagcagtcattaacgacaaaaatgttggaaaagctggtgcatacaaggaaaagcataacgaaagttcggatattttctcaaaagtttatgaaattgctgtaagtttattttaatcaaaattaatataatttatttttctttttaaggatcaaaaattcaaggaccttttcacggacaatgcatttcctactctggaacaattgttcagagatgcaaaagctttgttcgtcaacacaaggcctttattggattatgacattggcagtttgccaaaacgcgtcaaattcattggtggcattgatctgatgcagcccgatcacaaggatgtaatactatacagtagtaaaacagtatacacagattaagaaaatcccatatgaaacatttgaaaaatttaaatccgagtctattccttatttctcttaaattaaaagcaaataatttttaagaaattgaaaacagtatcataataaaaatgatttgaaatttcgaaaattttcagcaaatcacgcgatgccgaaaactcagaaaaacgatattataattgtaatatttaaataatttccctaaaaattaaggctttaccgcaagtttttgggcaacaaaaaccggtgatcgtgttcagcatgagttctttactagaaccatccaaaatgccattggacaaatttgaggcggttattcaaggacttggaatgtgtaaagaaaaggaagtgatttggaaatatgcgaaacaggaggataatggtcggaagtcattcttgcaaatgcatgctcctaatgtgcatcttgtggagcattacgatcaagccacagttattggtctgtaaattttatgtccatcaaaaaaatgccatggcatggttaggctaatctaggctaatccaccacggccggcgcaaaattcaaaaatttggaatttaaatttaccatttttattggcaaatttaatgaaaaatttcaaaaaattttccgatgggcttgggtcaaccgattctttacgttttttcaatttttagcccccccccccccgtaaaatacagtatggctggcctctgtctacggtatcatattgtaaaagtgtgccaccattttcaggcaatgaaaagacggaattggtgatcagcgaatgcgatattcgtatcgtaatggatgcgttaagcagtggaaaagcattgctttgtctgccgatgtttgccgaacagttttatgtgtcggaaaagctgcgacgcatgggcgctgcggttgtgcttgatccgcgcagtgacagtttcaccccggaggggattttcaaaagtatcggcgaagcattgacaaagcggtaatgtgcgcgcaaaatccttataatgatactttataggagagttgctcgagttttcggctctaaagtcgaggaatttctcggctttttagggtcgagagtcgcgactctcggggtcaatgactctcgggctcaatcccaagtcttggaaaattacgactcctcactctcgagcagtcctaataatttgttgtattag

SEQ ID NO: 66398 - DNA, 979 bp, Heterodera glycines
atggccaattttgatgatgttttggcactgtgcagtcaccataaggtggtgccaattgttcgcgcaaatgcgatgggtgcaagcagcaaatttggctcacagcaacagcgcggtttctaccacacactgttgcgcgaaatggccaacaaatatggcaaatcggcaacacaggtggcaacaggcactcactgattgccaattaagaaacaattaaaattttcttttagtataaatattttcataaaatgctatgaaataatgggtgaattttttgagtatcaattttcataaatttgaaattgaccggaaaatgctgtatggcaaatgagcaaaaaaaaggtcaaaaccaggaaagtgtgccgactccctcaaaaaatttcggcaatcggaaattgtgacgactgaaaaaatttcggccggaattccgagtcccaaaatgtcgtaaatcagcattccggcaaatctcgagttattttctggcaacagggcctagtctaattaatcatttcgtcagcaggtgttatgccgatggttgcaccaacatggcatggcggtagtgtgcagttgtggcccaacaactcaaattggccaacaaacgaacattttcgattttggcataagcaacgaagacatgcgacgcttgaatagcttgtacaacagaaatgtcattgcgcggccatatcagtaaattaaattcaaaaataattacttaatttcattttaaatcacaaattaatggaagaattattggtaaaatttttcgatttaaaatttcattaatttgcatccaatagcaaccgatcttttttgtggcctttaatgaatgaataatgctttaagaattttgagtgtattataagtcaacaatgaacacaatgcttaagcccatttatttatgagtattttacaaaaaaaaaaatttaaatatgtcaaaagaagccgaaaacaaattttgtattatttcatgggcattgaggta

SEQ ID NO: 66399 - DNA, 247 bp, Heterodera glycines; identical to SEQ ID NO: 62022

SEQ ID NO: 66400 - DNA, 76 bp, Heterodera glycines; identical to SEQ ID NO: 51235

SEQ ID NO: 66401 - DNA, 193 bp, Heterodera glycines; identical to SEQ ID NO: 61360

SEQ ID NO: 66402 - DNA, 163 bp, Heterodera glycines
ccaaaatttttcaaaatttataaaaacaaaatgagtctaatttaggatttttagggttttcggggtcgctgaatacgaatataccatttatattaccccttgcctaaccttaggcccatctgaataataaaaaactcaaattcgagacttggacatttcgtgg

SEQ ID NO: 66403 - DNA, 1069 bp, Heterodera glycines
cgattcacgtcaaaaagctgctcattcgacggccaacaacaatttggtcagaatttataaaatattcaattagcgtatccaaaattttcgtctatgtaaaaaaacaggtataaaattagttttttataatcctagaggtcataatcagcattaaatagtgattgtaattcataatttgaattttttttttaatgattaattattagagcccggaattttgaaagtaccgggacttttcgcaccataaaataattttttgaaaatttgaattttcgaatttttgttagaatacggatccggggttcgaatttagtcgaaatggatgtcagattcgtgatcagcgaccccgaaaacccccttgaaatttttttataagatttataaatattttattttttatggtctgtaaaatgcgtaagtgccgcgatttgttaacagatttatcaaaaaattaccaaattttgccagaaataacttttttctttaccaataaaatccaacatagttggtatcattcgaaagcttaaagtgtttagaagcttttcctaagctattgcttcgcgattagacaattactaaaaaaactaaacattaaaattgcaaaaagtcgaaatttttaagttttttcataactacagttcctctggttcccaaacccattatcacttgatggggcacttggcttgatgccgtcaacttttactctcacaatttcgaagccattaaagaagtgaatgaattgatttaagtaattaattttaaaaattcgcaggtcgtcgattcatttgaccctgaggaggcccagtgtattgccaaatctcagaaatgcttttcgatggcaacagtgctccttgacattgcctacattgaagcaaattttggatgtctccccggggcaatcactcgtttggagaagaaagggtttacaatacacgaatctgccaacaatctgtgtgaagtccgtgaagatgtcttttcgtttacgggagaaattggagcgaaaatccgtcggaaattcgatagcgttatcgcaaaaaacccgggatttgatacaatttgtgatatttga

SEQ ID NO: 66404 - DNA, 742 bp, Heterodera glycines
attcttccgggcattgttctcactaaaatgtcacaggaagtcacacacttagaaaaaccgggcttttttagtccgacacccgaaaagtttgtcaattcggcacttcgtacagtaggacatgccgacgaaactaccggatgctttgcccatcaaattcaggcaattttattttgtcggttatttttagggaatcaaacataatttttaacttggttttgaagcttctaggacgtatttctaaatatatattttgcaatttgatctctaatttgtaaggccaaaaaatggatattttctcgaaatattaatagaaatttaacttattaaatttgaaaatttatgccaaaaataattcaaaaaatggaaaaattcaatttttttattcaaaactacgaattacgtttttctaaatgcttttcatacaaatttagctagttgaatttaaccaatttgaaaaattttagaaaatttttgcttaatttgtaaaaaattatttgcatatttttcactttgtggtggtgttgaaaagcatcagcagagcacacaaatcggctgatgatttacgttcagcaatttattaaaatgttcagactgagatggccatgatgatgccaaattggatgttcgaaattgcatcaaagctgcaaatcaaaagcattgaaaagaaaaatagaggaaattcctgagaaaacatttccataaaaacattatttttttatggctgtcgcatgtgctgaataaa

SEQ ID NO: 66405 - DNA, 108 bp, Heterodera glycines
ataaaagtcaacgtagaagcctcaaaccaagtggaaaatgtgttatttatgcttaatatgtcgaaactagtgcgcagaaaaaaaggcatatgcctcaaaagtcggtct

SEQ ID NO: 66406 - DNA, 901 bp, Heterodera glycines
atgaaatcatttagttggaaccagacgaattggacggtacgaccgtggaagactttttttcttttatcctttctctctatattccttatccttttctctttctcatccatctctctccgctctccatatcactttgttctttctctctctctatctatctcttctctctatccctctttcgctttctctatctatcattttgtctttttctctctattcctctctttcttccctcatttttgtttttttctttccttttttctcttcaacgctcttcctttctctctcgctctctctcgccttctctctccctctctctattttcttttttcctttttctctctccctccttctctttatttctcttttaggaaggaatcaacttataaaaacttgatctgaatttttttttcattgttaaaaacatttttaaaaataaaatttggcattcactgtcgtaatattgataattttttatatcatattttatggatcattttcagatgtttttcctcatccgtgcaacgaaattttcaattcaacaccgaaatttggtcctccttttcatgacaacaatggctcaacagcagaaagcgcatttcacgacttttatggaaagcgtagttttgggaataatatgtgcaaatgacagtgtcaaaacggcggagacacagagatgaaatatttttgtgtttaatttttttttctattttttttgacctaaatttatatatcgtggaatttgccataaatttcactaattttttttttgtgacacaatatgtttaaaaggaagaatacggagtttctgatagttggatttaaaaaacggcattttggacacccgaaggaaaactggacaccatattcctaaaataagccaggaattagggttgaaaaa

SEQ ID NO: 66407 - DNA, 917 bp, Heterodera glycines; identical to SEQ ID NO: 37304
  unsure (1)..(917): unsure at all n locations

SEQ ID NO: 66408 - DNA, 631 bp, Heterodera glycines
atgcaaaatcccttttccacgagaaagccgaaatttcagattcgtaaacaacttttgtctttgatcgatgccgcttatgagctgaacaaaatatccattttcttttttgattcaaaattcagtgaagaaaataaatataaattgaaaaatttattcaaaaattcaaatggaccggagctgctaaatgaggaggaattgaactataaaataaatgaggaggagaaagaggaggaggaggaggtgaaagaatcgaaggaaaaaatggaagcaaaaagtgccaaaaaaccggaggaacgaattaaaggacaaagtgccatagaattggaccagagaatcaaagaaaaaagtgccaaaaaccaggagcagagaatgaagggacaaagtgccaaagaatcgaaggaaaaaatgaaagaacaaagtgccaaaaaaccagaggagagattgaaaggaaaaaatgccaaaaacccggaggagagaagcaaagaacaaagtgccaaaatatttcccgataaaattacaaaaaaagttaaaagaaaaacgaatgaaaaaattggcaaaaaagttgaaaaaaaatcaacggaagagaaaaaggacgacaacaaagcaaaagaacgaatcaacaaaaaaggag

SEQ ID NO: 66409 - DNA, 353 bp, Heterodera glycines
atgccacaaaagccaaccgcagcgaccaaagagccgttggacaaaaaggtaaagttggcatcgaaacctaaaggaatgtgccgaagaaccaaagccatgggcaattttgaaacacctgtcaaacgcagcgtaacaaagagaccaagcgcagcgaggacgagcacttcggagagcaaatgggacaatttacggcccaaccatttgaatttgaggtcggcaaaggcaatggccaagttcatcgtgtatttgaacatgcccatccaaatcatattcaggaaaatgttgcccgacatcttctcgatgttgtagacaagggcataagtgatcagagtgaccacgaaaagactgaatga

SEQ ID NO: 66410 - DNA, 1381 bp, Heterodera glycines
cagcaaaaggacagaattgaagttgagtcagtccctgcagttggtcggcattatccccggctctttcgtcttcggttggctcagcgatttgtacggccgtcgtctgaccatgctcagcgcgttggtcctttgggtgttcgccatgttggccacgtccttttccgcttcgctggtcattttcactgtgctccgtttcgtcgtctgttttttcaacgcgggcattgccgtcactttgatcgttttcacctccgaattgtacccaaaaaagcatcggttctgcctcatgaatttgatcacttgggtacgttttgcatttgtcttttcttttcgacaaaatgttgtctttccccccacccccaccaaatgtgccatttcgatttcactttttttaccgtttgttttccccacaggcgcccaattacattctcttcggcattttggccagcttcatccccaattggcaacaccttcaacgcgtgttggcactcttcgcattgccttgcatgggtctcattcttttcctcagcgaatcgccccgttttttgatcagtgcacgtaaaatgaaagaggcgaaagaggccatcattcgaatgcataaattcgacggcaagaaaattatttgtttatacaaatttcaatttttaaattttcagggcgtccgtatgacgaaaaggcgttggacgcactgcttgaaaaggagctacaacaaatgttggaactttccgtcactaaaaagaagtacaattatgtgagttatccgacaaatcatactaaaagacaataacatttttcaatttccatccccaaatggccacttttccgtcattggcactttgtccctttagctgcacctcttctacaacaccaaattcaccatgtacactttgtcagtgtcattcagtcttttcgtggtcactctgatcacttatgcccttgtctacaacatcgagaagatgtcgggcaacattttcctgaatatgatttggatgggcatgttcaaatacacgatgaacttggccattgcctttgccgacctcaaattcaaatggttgggccgtaaattgtcccatttgctctccgaagtgctcgtcctcgctgcgcttggtctctttgttacgctgcgtttgacaggtgtttcaaaattgcccatggctttggttcttcggcacattcctttaggtttcgatgccaactttacctttttgtccaacggctctttggtcgctgcggttggcttttgtggcattttgttcaactcggacaaattggccggcagcgaactgttccccaccggagtgcgcaatttgtcctgctcctttggccaaatttgcagccgaattggcgtcgtcggcgccccaatgcttttctttttggtccgctt

SEQ ID NO: 66411 - DNA, 312 bp, Heterodera glycines
atgagtaataatttggccgacaaaattagcggcgacgagaggccaaaagaggcgacggaaacaaagccgcttctgtcggatggcattgccggggaaggcattcacggacagtcccaaagggatgggacagcaaaagcggacttagtgaacgacgcggaaaggacggaggaggacgagcggaaggaagacgacctgaagctggacgactgcttccgcatgggctggtacatgctcatcgtctgcactctctctcaattgctcctttttgttgaggtcggccagcaaaagccaattcctccaatttgccaatga

SEQ ID NO: 66412 - DNA, 2292 bp, Heterodera glycines
tcggcggaaaagcaccgcatggactctgacgcttctttcgtgcttcgcgggcggagtgttcatgggcacttgcttccttgacattttcccgcatataaagtcattttggcattggcatttggttgaaatggcaaatgtttgcaaatttagtgaacactacgaacatttccgtgataagtcccaatgggaaattgaattccctctgccccaatttttcatttgctgcggctttttcctcgtttatttgttggaagaactcattttgaaggtgttcgcctccaggttttattatttggtcagaaaaatgcatatttccacccgttcagtgagcaacgcaaacagaagcaagccttggccaaatttggtgccaatttggccaatgttgagcagctccgttccgccgccctttccgcctgctctaagccggactgtgccatcggcgcaaactccgccaacgaatcggtgaacaactcgctgaagccatgcccttcctgcttggacatgctcacccacgagtgcgtgacaattggctatatttggggtgatcccctgctttcaggacagtgatcaacaaatatctgaacagttcggaaaagtcggaaaaggttggtgatcagcaactggggagagcattaatccccacttttgtgctccaggtggacttgttgaagtcgttcacctttgcttttgccatttcgttccactccgtgctcgaggggttggccatgggttttcaggtgggttcggatggttttcgggtcattgactgtttttaggaaactcccaccggaattacgactttgttcttttcgctgatcatccacaaggccatcgaagcattcagtgtcggccttcaattgagtaagtcgcgcagcaacagtttggtgtgctgtttgatcagcgcctacgctctaatgactcccctgggggcgatatttggcgacttcattacggtgagtttaattgaactgattaaatattcatgaattaagcattgaaattaagactctgaacatggacgagatcaaaaaggaagccatcataatcattctcgagtctttggctggtggcacttttatttatgtgacttttttggaagtgctcgcgcatgaaagggccaaagaacactcgcatttggttaatcagttgcaatttgcaaccaactgaatggcactttccctctgatcagatccaactcggcgccattttcctcggtttcctcgtaattaatgcgctgcaactttacgagcagctgaccaattcggggtataaacaatttgtgaatcccttaataaaagttaattagccatcatcaccatcaccactgaatgaatgaattgaatcgtccaattccaaggagcgaatttatcaaaagcgggcaatatatttattattttaattgtttttataataaatttaaaatgaatatatttgtacaaacttttttatttttttaagaaataaagaaaaatattgcaagtgatttttgctattgttttcaaatttttcaataaaaaaagaataaataaaaatacgcactaaatattttttaaaattgaatgtgaatattttccaattgattcttttagtctctcttttttattaatgataaatatttgtgaatgtgctgtattaaaagttatttattctattttcttaataattgatcaaattcgcattcgctataaaattacttacaattaatttatcattttttggtttacaatttttttttctctccttctgctgatcaattagttccaccttttgactaacattaatgcctgcactttaactaatgatgacgaatcagttaattaattagtgaatgaatcaattaattaatgaacccgtggctgtgccgcgtcatcggctgaacttcggaagtaattttattgtgcaaataaaaagcacgaggcaaaagtgagtgaatcgatgagcgatgaatgtcacggcttacgattagcgacgcattgggcgctggtcacagaattaatcggtgtccccccacgtgaagcgaaagaacgaacgaacaattgttggcgggaaaagattaatattaataataaaatccatcccttcgagaacagacgaaaagggaggacaaaaacggataaagagacacagggagggataaagggaggataaagcggaggaagggacagagagagggataaagggagagacagaatgaatggccattggcacagcaaaagcgaaaggaaaagcgatgagtcatccgtccgaagaatgcctttgcatcccaacactttccctaagcagcagatggca

SEQ ID NO: 66413 - DNA, 101 bp, Heterodera glycines
ggattcggtctccccataaatctgggcgcatcggttcggggggactgccccgaaaacaaaaaaatcgattttttcaagtgtccgtttggggtactcaaaca

SEQ ID NO: 66414 - DNA, 544 bp, Heterodera glycines
tatgcatgaaatcttcgcccgtcttcagtccattccatcggcgagaattaaactaaaggaactgagcaaagcgaacagtcagcacagccaatacgcaatagcaatggacaatatcaaacacatttgcaatttggctgacactatcgaaaaaacgcacgagtcggtcatttgttactaaatgaaacaaggatttaaaagtgattttcagctttatactcgacgggaaacttttacttgctcataaaaatgtgatggagttggagaatgccagggatgacttaatgtttgaagtgcacaaattgaactctgaacgcagagaatacgacaaaaatgcactgttttttcatctttttcataacaataactcgttttttatgtttagttgctcaaaacctatttttccgatgtggacaaacttatcgaagacttgggcaaacagatttggtacatttgttctcgagctttggaagcagttcagggcaatgacagcgctctgcaacagttggtctccgcgttgcgaataattgagcgtgaagaacggtag

SEQ ID NO: 66415 - DNA, 632 bp, Heterodera glycines
cattccaatcactgggcactcaacccaccaacatccctataaagtggcactcaacccaccaacatttcaatcactggggactcaacccaccaacatttcaatcactggcactcaacccaccaacatttcaatcactggcactcaacccaccaacatttcaatcactgggactcaacccaccaacatttcaatcactggcactcaacccaccaacatttcaatcactggcactcaacccaccaacatttcaatcactggcactcaacccaccaacatttcaatcactggcactcaacccaccaacatttcaatcactggcactcaacccaccaacatttcaatcactggcactcaacccaccaacatttcaatcactgggactcaacccaccaacatttcaatcactggcactcaacccaccaacatttcaatcactgggactcaacccaccaacatttcaatcactggcactcaacccaccaacatttcaatcactggcactcaacccaccaacatttcaatcactgggactcaacccaccaacatttcaatcactggcactcaactctcctgcatttcaatcactgggactcaacccaccaacatttcaatcactgggactcaacccaaga

SEQ ID NO: 66416 - DNA, 785 bp, Heterodera glycines
atgcacccaacggagattccgaggcaaatgcatcaacagccaccaagagaagagcgtggatggcagcaacaaaacagtgttttgtaccgtccagtggcgcgacagcagcaaaattttccggtttacgaaaaccaaatgctgccaccccaaagccaaaatttagcggttttaagtagtctggagtacaatatggtccttgaaaggatcccagacctcaacggaaaggaagggacggacgaagttaagcgttttttcaaaaaattcgacgcttacaccgacagttggccggatgaaaaaagaattaagggaatagaaagcaaagtgtatggccgagctgaaagagcttttgaagcggcgaaagcagtcattccaataaggtatgaactgcttcggggtgaaatgatgcgacagttggaggaaacggactcaaaaaacttgaatgcttttgatgagctgatgttaggagtccgacgaaaacccaacgaatcgattgatgatttggcaggtcgaatttcggggttggtgaagagagcctaccctggtctttctttccaattgtcagacgaattctccatcaaatatttgatccgatcaattggtgacccaactttgtcacttaatttggaactcattcgaattatcaacaattttgagaagtgagttagaaatgataaacttcacgattcaaaccagttttcggtgctctatttaaccgcgataaaaacatccgaatcaattaaatagcttctgagataataaggtttatcataaaatttcatttaaaa

SEQ ID NO: 66417 - DNA, 593 bp, Heterodera glycines
aaatggaccgcaaatgtcggggccgcaaatgtcgggccgcaaaaatcgggccgcaaaagtctggaccgcaaatgtcggggccgcaaatgtcgggccgcaaaagtcgggccgcaaaagtctggaccgcaaatgtctggaccgcaaatgtcggggccgcaaatgtcggggccgcaaatgtcgggccgcaaaagtcgggccgcaaaagtctggaccgcaaatgtcggggccgcaaatgtcgggccgcaaaagtcgggccgcaaaagtctggaccgcaaatgtctggaccgcaaatgtcggggccgcaaaagtctggaccgcaaatgtctggaccgcaaatgtcgggccgcaaaagtctggaccgcaaatgtctggaccgcaaatgtcggggccgcaaatgtcgggccgcaaaagtcgggccgcaaaagtctggaccgcaaatgtcggggccgcaaatgtcggggccgcaaatgtcgggccgcaaaagtcgggccgcaaaagtctggaccgcaaatgtcggggccgcaaatgtcgggccgcaaaagtcgggccgcaaatgtctggaccgcaaatgtcggggccgcaaatgtcggggc

SEQ ID NO: 66418 - DNA, 4399 bp, Heterodera glycines
atgaagcgaaaagtgcggatgtttggagttgcaattacgggtgccgggcttgctttcccggtgtgggtgccgtatcgggcgtacccccagaataatgcggatgttatcatggaggagattaatgagctggggcagagcggggacggggatgaaaataagaaaatgcttttattatctgaaccgattactatgaaaattacatgcgttacaatgcccagtggagaggggccgaggaatgtccacaaatttgactttggattcaaggaacaccagcggatagggtaagtgttttaataaaataaaattaaaatagaaaaaaaatcaataaataaatttaaaataattatttctaaaaattttaatgaagcaaaaaaaactttttttttaaaaaaaaaaatgaaaaaataataatttaatgaaacaaaaaaaacagaataaaattaaaaataaagaaagtaaaaaataaatttaaaataattattttaaaaaattttaatgaaacaaaaaaaaaataaacttaaaatatttatttttaaataatttaattaggtaaaaaaaaaaaagtaaattttaggattgtgaatactgataaattttgccttttttacgcactggcgtcgtcgatgaattatttaattatggataaatattcgtttattcgttttatgaagaacttagcaagacaaaaggaagcggctgttgaacttttacggaattgtagaattgatggaaacgaaattagttatggtgtggagcaattgccgaatgttcagaaatattgggtgggtttaaaaacggtgaaaaacatagaaatgaccaatttttcaggatgagatttaccccggaaagtaccgggttgttgcgtttgagaagtcagctgatccgcggaaatcgatctgtgttttgtggaaggcccctatgggacgagagaaggtcgtaccgatatttttggagaatggtcactgggatggtctgaagaattacgtctgtttttttaatcgtgggagaaaattttgtattgattgtgagtgcttttttgacaaggatgtcaaacatactttcgagtgccgggcaaggtgttattattgcaatagagtgaggggaatgccatgtgaaaaggagagtggagtgaagattgaatgcccgaagtgtcatcgttacttttacaattgggagtgttataattatcatcagggacatcagacttgcaaattatggaggcgttgcgtgatctgtgacaagacttatcgatttaacccgaagaagggacatgaatgcggagagacttattgccagctttgtagtgtgagccacgaccccaagcggggttgctatattataccgatcgaggagaaggaggaaaaagatgtctacagaattgtagtttgggtaagttctacaaataaaatcaacaaaaataagtctttaactccaggattcggagacttcgcaggattctatttacaagggggaccagaaggagcatgttattaattatatttcggtgagagttacgtgtacggaatgctgtgatgacaaaaacaggacgaattgcaaaatttgtggggaggagaggatcaaggattggagcgaggcagagggacatgagccgaccaaggattttgtggagtggattttaactgcttttacgaattacgatacgtacatatttgcacataacgccggacgttttgacggtaatttcaaaatttaatttttaaatcctaaatttttaggtcattttgtttttaattacctctgccgtaccgggaagaacccgttaccgctcatcaatggattgaaaatttatgaatttaaagtgcaaaactcgaagaaacattcaaagctgatttggagagactcatgtttattgatgccggtgaagcttgagtcgctgaaggcgacatttaatttggactgtgaggacaagccctttttcccttgttattacaacaagaaagaaaattatggaatacgattggaacatctgccaccgatggaggactattcgccgggatctatgaacaaggataaatttataaaattcgaaaaatggtaggaaaatagaaaaatttttgaataaaattctttttttttcaggtacaatgagaacaaggagacgcccttttatttggatgaagaattgagaaattattgcagaaacgacacggagattttattgttgtcgattattgagtttcgaaggatattgattaacgacattactaagggatttgacccactaccgaggagttgtacgaatgcgggggttgcgatgaatatttttaaggcaatgtttttattgacggagcagttatcgattgtgccggagaagggatatgagcggtgtgatcgcgccagtgtgatggcaataaagtatttggagtggcggagccagcgggatcgaattgagatacggcacgcggggaacggacgagaagttaaaattgggaattacaaattggatggatttattgcgaataacggagctagggacaaatgcatcgaggttatgggatgttacatacatggatgtttgaattgttatgacccggcggcggaactgattggaggaaggacggcccaggaattgaacgatgagactcaggagagattagtggagctacggaagactttggatgtcgaagaagtttgggtatgtttatttgacatttacatttttattgtgaatttttaggggtgtcaaattgagaaggaattgaaaaaggatgaggaaatgaggggcttcttcgacgacagaggaaatgagaaggggccgattgatccgaggatggcatatgcgggagggaggaccggaccgatgaaattgtttgcgaaatcggatgagaagaaaaagattagtgtttacgatattgtgagtctgtatccgtcagtgaattacggtacagcttacccgattggtttgccggagattattataccgaagagcgatgagattaatgtaaattggacgagaccggaggatttgaagtttaatggattgtataaagtgagggtccacccgccgcgagggttgcggattccggttctgcagttgaagtgtgatgagagattattattcccgttgtgttggagatgtgcgtcaacatttaagaaggaaactacgagatgtgattacaattgcccccatgatgaggcacagcggagatacgtggcgacatatactagcgttgaattggtaagaacttatgtgggaaaattttaggaaaattttgacatttttcaggcaaaggcgttggaatgcggttatactgtggacagattttatagagcgtggcactacgaagaggaggcggatgatttattcaagggatacgtgcgattatttttgaagctgaaggaggaggcgagcagttttccgaaaggggttgagacggatgagcaaaagaatatttggagagaagagtataaggaaaaatatggaatcgacattgaattggctaaagttaagaagaatccaggattgcggtacataagcaagttgatgctaaatagcttatgggtaagatttagggttttccgaaagagttttaacttaaaattttagggaaagttttcgatgagaaattgtttgaacaagaatgcggtgattgatagggcgtcggagttttataaaatagcgtgtgaccataaaattgaattatgtgatattgttgaatattcggaagaggcgattagattgatatacagggacaaggaggactttgtgatggagcacaagtcgagcaacatagtcattagcttatggtgagttcaaaaaattataaatttgtatataacctaatttttaggacgacgagtatggcgaggttaaaattattggaatttatgagggaggctgaaagcaacggaggggaaattttgtatacggacactgacagtatttttgttttgcacgatcgggatgtggagccgatcacgacggggaaatatttgggagagatgagcgaggaatacggcggctatgagattgaagaatattgctgtggaggggcgaagcagtacgcactgaagatgagaagcaagcagacgggggagactgaatacgttatgaaaattagaggaattacgttcgacgtggacaacaggaaaacattgcactacgatacattcagggagatggttttgaattatgggaaaggggaggtggacccggcattcttcgtctataagaatgattttgggtgagttttgtaaaaattatttgcttcattaataaatcaatttttaggccgacaagggattcgaaagtggtgacgagggagaagcataaaatgtacaggccggtctgtcagaagggtatcatcgatgaggagcttaatgtgatgccatttggattttgttaattttgtattttattgttgtttttttttgttaa

SEQ ID NO: 66419 - DNA, 813 bp, Heterodera glycines
atgagaaattgtttgaacaagaatgcggtgatagatagggcgtcggagttttataaaatagcgtgtgaccataaaattgagatgtgtgatattgttgaatattcggatgacgcgattagattgatatacagggacaaggaggactttgtgttggaacacaagtcgagcaacataatcatcagtttatggtgagttcaaaaaattataaatttgtatataacataatttttaggacgacgagtatggcgaggttaaaattattggaattcatgagagaagcggagagccatggcggggaaattttgtatacggacacggacagcatttttgttttgcacgatagggaagtggagccgatcacgacggggaaatttttgggacagatgagcgaggagtacggtggctatgagattgaagaatattgttgcggaggagcgaagcagtacgcgttgaagatgaaaaacaagcagacgggggagactgaatacgttatgaaaattcgggggattacattcgacgtggacaacaggaaaacattgcactacgatacattcagggagatggttttgaattatgggaaaggggaggtagacccggcattcttcgtctacaaaaatgattttgggtacgttttaaaaattatttgcttcattaataaaccaatatttaggccaacgcgggattcaaaagtggtgacgagggagaagcacaaaatgtacaagccggtctgccagaaggggataatcgatgaagaacttaatgtgatgccatttggattttgttaatttgtattttattgtttttttttgttaa

SEQ ID NO: 66420 - DNA, 141 bp, Heterodera glycines
atggacgacggtgaaagaacaatgtcgatcaatatacaaaaatttgtaaacggttggtgcttcttcgtcatcccgatgacctctactctagaggacacccccggttttgaattgattcgaaacggaacgaccagcatcaag

SEQ ID NO: 66421 - DNA, 83 bp, Heterodera glycines; identical to SEQ ID NO: 62531

SEQ ID NO: 66422 - DNA, 287 bp, Heterodera glycines
caatttttttacaaccacttattgccaatctaatttcttgcagatttaaagccatccattgcctgccggttctcggcacagcaaagcactaatacggtgtttgacacacttcaaaaaataattcattacccaaaagttgtttacaaccacttattgccaatctaatttcttgcagatttaaagctatccattgcctgccggttctcggcacagcaaagcactaatacggtgtttgactcacttcaaaaaataattccatacccaaaagttgtttacaaccacttatt

SEQ ID NO: 66423 - DNA, 305 bp, Heterodera glycines
aaaattccctcaaaaataaaaggtctattgcgcaccgccctccctatcatgctcgagagcatttgtatgtgtataaaatttatcaaaaaaagagatagccatttttctgggataacctctaaatataaaaatcctctgtgaaataaaatggcgattgtgcacagccctccgtctcatacgcaagcgcttttgtgaggtataaaatttctcaaaaaaaagagatagacatttttctgggatagagtataaatttaaaaattccctcaaaaataaaaggtatattgcgcaccgccctccctatcatg

SEQ ID NO: 66424 - DNA, 231 bp, Heterodera glycines
gatacattcgcatggcacgcaatcgcaacaacaattgcggcatcgcttcccacgcctctttcccattggtctgatcggagtgaatttgttgcccttgcgctgattcagagacatttcatttgattaatcgtgcaaaatgataagataattgataatccatcagtcaatcggtcgatttccattttttatgttcgcaattttattcacatataaataaattacttattttat

SEQ ID NO: 66425 - DNA, 940 bp, Heterodera glycines
atgcacattgaaagaatcagctgtgccgctcatgacctcaatttatgtgtaaaggattgcttttcaaaagaaaaagacgaaatggctcaaattttcgaaaaatgtcgaaaaattgttggaactttaaaacattcggcaaaattgatggatgatttaaaagatgttcaaggcgaacttggtctaccgaaagctaaattgcttcaagttgctaattatcaaatactcatttaattttcatttcaaaggacgtaagcacgaggtggaattcgacattacgtatgatcgaacgtatgctggaacaatcggctgctattgatgaatttttggttagaaacaggaaattcgatctgcttctaagtcaagaagaatggtccattctcaagctaattaaggcaatttagtgttcaatattttcttatgttttaaaattttaaggaacttctaaagcccaccgaagaagtctctttacattattgtaaagaaatcctctccgcccgaattccgctcgctcgaactttggtctccactttggaacgagttgatctttcagtgacaattgatggcgaaatcaaaataattaacgaagttgagcaaatgcgtacaaggctgattgaggcggttaaaaagcgttttttacaaaaagaaaataggtatatacttaaaatactattatattataaattgtatgttgagtacttttctcgaccctcgcttcaaggatcgtttttccgacgaaagtgacatattttttgcgcgcgttgcacgttttttgaaggacgaaggaacagaagaaaatgacattttggaaaatttggaggatgaagtgaattcgactcgcattttgccaccagccaagcgcgcttgttccattgtggagataatgcagaacatagccagttgtaccaaaaaaggtggtaccaaaattgcaattttgatttaa

SEQ ID NO: 66426 - DNA, 659 bp, Heterodera glycines
atgaacggtgattgcaccggagcggtaagtttgtctccttttaatcactaatcattgacactacctcaggcgtggcgaagaccaatccctcgctgtaaaactgttaaagagttgaatatggacgtggtcattgagtacagtgggcgagccgctgaattgaagcttattggagaagcaacaagtggatcgggcaaggacataacgaaagcaacggatgtaaaaaaaaataaaaaattgtttttatttatatttttttatagataattatgagcataacaagaagtcttgccatggctggtggacctgaacggccttggttgaactatgaagtctgtttcactttatttttagacttttttcatttttaagattgctaccccgtctgcttctgacttggaatggttcagagctaaagaacgcgaaattcgaatgaatgccgaacgaaggcagagaagcaagtgaccaaacactgggtttgaattttgtttggtatcagtgaatagaaatggaattttcaggaatgcatttgtgctttggcaacagcgttggatgagagcccaatgtgggaaatgaacgaagacgagttgaaaaagtttttcgacgattgggacgcaaaaagcgcacttcttctaccagcagccctcccgggacagaactga

SEQ ID NO: 66427 - DNA, 1326 bp, Heterodera glycines
atgctgcttatggtcgtactttttggcttcatttcaatgggccacggcacttatcaacgaagtaagtctttaaaaatttttttttaaaattaagatattcaagattaattataagttttaaaaaatattttgttatttttttcagagttaccatcggccgaggaaagagcggaagtaaaagcatttaaaatagagctgcacgggaccgggaccggggcggaaaatcccggttttttcaggtcccggtcccggtttttggaaaaattgaaatcccggtcccggttttttcaaaattcccggtcccgtgcagctctaatctaaaaataagaatcttgtaacagattttaacttaaataaaaaaattttgaaaaaagtgggaacaaaaaaaacgggaaatggtcgtttcggcgccagcgcccaatcttttttggccttactttttaattgtcaatcaaatccaacaaaactgtcattcgagagagttctacccatgaaaagttatagtccaaaaaaacttggactggcgccgaaacatgggcgccgaaacgatccggatctaaaaaaaaaccgagaattttttaacataatagcatttctttacacaaactgaagcactaattaattccaaattggattaagattaacagatttttttccgccccctgtccggccgccgacagcgtcgacattattgccaacagcgccagcgccgacacatgtccgtccgcagacagcgccgacaccgtcgccaacagcgacagcgccgacaccgtcgccagcagcgccgacaccgtcgccaacagcgccagcgccgacaccgtcgccaacagcgccagcgccgacaccgtcgccaacagcgccagcgccgacaccgtcgccaacagcgccagcgccgacaccgtcgccaacagcgacagcgccgacaccgtcgccagcagcgccgacaccgtcgccaacagcgccagcgccgacaccgtcgccaacagcgacagcgccgacaccgtcgccaacaacgccagcgccgacaccgttgccaacagcgccagcgccgacaaccacccctgaaacagacccaatgaaaattggtaaagaatgattttgctaatcctttaaattatcaaattttaagaaataataattcaaatttttagccctttccatccttcgcaaattgggcaaagaagatggaaacaaagatggagattatgaaaaacaccaaaatttaaaattatgaattaatggtctgttggagattttaatttaattaagatatttgttttaattttatcccattaaaaattgcattaaacataaagatgtaataaa

SEQ ID NO: 66428 - DNA, 83 bp, Heterodera glycines; identical to SEQ ID NO: 62531

SEQ ID NO: 66429 - DNA, 324 bp, Heterodera glycines
aaaatctataaaaaatttaaaaatgagaattcatgcgagattttctggaaataagcttaatatcgcctagttaagctgtaaaaaaaatttggggcgatttgaaagagaatagaaagaaccaggttcgatgaagttttggtaagccaaaaaaaatccaaacatttaaaaatctataaaaaatttaaaaatgagaattcatgcgagattttctggaaataagcttaatagggcctagttaagctgtaaaaaaaatttggggcgatttgaaagagaatagaaagaaccaggttcgatgaagttttggtaagcctaaaaaaatccaaa

SEQ ID NO: 66430 - DNA, 1167 bp, Heterodera glycines; identical to SEQ ID NO: 37333
  unsure (1)..(1167): unsure at all n locations

SEQ ID NO: 66431 - DNA, 340 bp, Heterodera glycines
aaaatctataaaaaatttaaaaatgagaattcatgcgagattttctggaaataagcttaatagggcctagttaagctgtaaaaaaaatttggggcgatttgaaagagaatagaaagaaccaggttcgatgaagttttggtaagccaaaaaaaatgcaaacatttaaaaatctataaaaaatttaaaaatgagaattcatgcgagattttctggaaataagcttaatagggcctagttaagctgtaaaaaaaatttggggcgatttgaaagagaatagaaagaaccaggttcgatgaagttttggtaagccaaaaaaaaatccaaacatttaaaaatctat

SEQ ID NO: 66432 - DNA, 368 bp, Heterodera glycines
caattaaaaaattttttaaatgagaattcatgcgagattttctggaaataagcttaatagggcctagttaagctgtaaaaaaaaatttggggcgatttgaaagagaatagaaagaaccaggttcgatgaagttttggtaagccaaaaaaaatccaaacatttaaaaatctataaaaaatttaaaaatgagaattcatgcgagattttctggaaataagcttaatagggcttgttaagctgtaaaaaaaatttggggcgatttgaaagagaatagaaagaaccaggttcgatgaagttttggtaagccaaaaaaaatccaaacatttaaaaatctataaaaaatttaaaaatgagaattcatgcgagat

SEQ ID NO: 66433 - DNA, 396 bp, Heterodera glycines
gaagctattcccgaaggattcggtctccccataaatctgggcgcatcggttcagggggactgccccgaaaacccaaaaaaaaattttttggataaaaattatttaaatgaactgactagataatatttaaaataggttatttctcttcctttcagtatccctgcaaagtttggtgcgcttctgatcagtttctgaaaaaaaagttaagcctaaactttttggcctgtttaaaaaggaattaaaaatttttaaaaattttattcatctccctttttgatagaaaaagcatcagagtgcctaaactaacatgtaaataaaatttggtgcgtttcagaaccctttctgaaaaaatatttaagaattaattttgcaaaaaataaataaaaacgaaagact

SEQ ID NO: 66434 - DNA, 522 bp, Heterodera glycines
atgagaaccaaaaatctgccttctaagctttccaattccgaagttttaacaagtgatgctagttcatcgagtgttgagagccctgcggggaccatttatgaatcattcgatgcgttgagcattgatagctcaaaagcagctgcaagccctgaggggtccgctaatgttggggctgaaattgttattgaagggactgaatccaatgaaaaccctgcggggtccgggtatgatgaagtgagaaacgagggtagtaacgtcacatttaaagcgatggaagtggcgcttgaccaagtcgatgcagagggttttgcgaataatggctttgatgatgaggagcctgaagcatgtcctccggctaaagatgtgagcaaatcatcgcttctttatttggtttcgcaagccggagatggctacgtaattgcttgcaagaagtcgcctaagtcgaagccaaattggccattcttcatgaacatcgaagacaagctgattgagtcggccccaggctttcagcgtaaacttgaa

SEQ ID NO: 66435 - DNA, 503 bp, Heterodera glycines
caaaagttttttacaaccacatattgccaatctaatttcttgcagattgaaagccatccattgcctgccggttctcgcacagcaaagcactaatagggtgtttgactcacttcaaaaaataattcattacccaaaagttttttacaaccacttattgccaatataatttctttcagatttaaagctatccattgcctgccggtctcggcacagcaaagcactaatagggtgtttgactcacttcaaaaaataattccatacccaaaagttttttacaaccacatattgccaatctaatttcttgcagattgaaagccatccattgcctgccggttctcggcacatcaaagcactaatagggtgtttgactcacttcaaaaaataattcattacccaaaagttttttacaaccacttattgccaatctaatttcttgcagatttaaagctatccattgcctgccggttctcggcacagcaaagcactaatacggtgtttgactc

SEQ ID NO: 66436 - DNA, 177 bp, Heterodera glycines
atggcgccaggcggtggcaccacctcgacgcagaagggcggcaagcagggagacggcgggggcggaagcggaggcgaagcggcgaacggcggcggtggcattgccatcaccaccggagaaggcggcggaagcggaggagaagcggcgaacggtggcggtggcattgccattacaacg

SEQ ID NO: 66437 - DNA, 907 bp, Heterodera glycines
aatttccccccattgactgtccggtgaggcactcgcgtttaacccccccccccccgcttttccgcttttaacccttccgctgctgtcccacagtttggtcacacctattctttccgctgggccgcttctgttcagtccgccccctcttccgcctccggtgcccgtccctgcgccacctccgccgcctccgatcatgttccagcctctgtctccgccgcaggtttgccaacaattttaaggagtatttgactttcactgatttcaaaaaatggcccgatcaaccgagagcttaatctttcccaaacacacaaatctcgagagtcatttggagactcttgccaaaattttcttgtgtatcttccctaatctcacaactgctgaactctcgacttaagtcttcaaaacccatgggattattcatttttcccaaatccatggttcaattgagtgatcgttcgcctccaatatattctcgaaaaacatatccggcttaatctcgagattatctcctacttagtccttctggggacttaattattggctcgggaatgtcggcttttgggttgctaacccttaatacgaccccttccgccgaaggtgttctgtatcgcacccgcttactgtgctcccccgctaccgccaccgcttccgccgcctccgcctcctaccgttgtaatggcaatgccaccgccaccgttcgccgcttctcctccgcttccgccgccttctccggtggtgatggcaatgccaccgccgccgttcgccgcttcgcctccgcttccgcccccgccgtctccctgcttgccgcccttctgcgtcgaggtggtgccaccgcctggcgccatggtcgccgccgcgggcccaccgctggcaccgtttccgtcgcctccaccgtacccgctgcacc

SEQ ID NO: 66438 - DNA, 2264 bp, Heterodera glycines
atggaaattaggtggccgggaaggagtccatcgcaatggaagcattcgcacgggcactcgccaaattgcccacaatcatttgcgacaacgccggactggacagtgccgaaatcatttcgcatgtgcgagccgaacacagcaaagggaatcgccaatttggcattggtaagaaaaaagacccaaacttagaagttattacgtggattagatgttgaaaatggtcgtatggcggatgtttacgagttgggcgtgttggagtcgtacaacgttaaattgggcgtgctttgcagtggcgccgaagcggccgagcaggtccctccggcattgaattattgtcaatagacttttctttgaagcttctccgtgtcgattgcatcatcaaatgcgcgccgcgccctcgcacgaaggaccgtcgtccgtgctgagaaaacgcagctagcgaatgcgaattattgaagacgcgcacaggaaaaggaatacttcattgcttgctttaccgtactttgttattgttttttgacatgttaaaaccttaaaaaccgagccatcactgcgtaattaaatctcgtcgatttttctttcataaatcgaatgctttttccttaaaagttttgtttaatcgaaacattgaaagtgtttattaaatattttccatttgaatttcaactttaaagtgtcatccacctttttcagcttgtccttttgtaattagcctgttcgtaaatccgttctcaatgttcgttcccccccccaattcgaatgcttttgctccttttcagggcctctcttttgtcgcgggtgctttacgtcacttcgatcttcttcgtctttttgtacctcctggtgcctgcactgtttttcttcttccccacttttatgcagcacattttcttccttcattttggtcatttccattcccattgtgcccttttttgtctttttatgattccttttttagtttgctttccattcgtcgattaccacaatttggctcaccacggcgtccgttcccgggggcgtaacttttatttgcgtgagcgcgaccttaaaacggcaaagagtacagaaaatgttgcgaaagatgagccgaccatcggagtatggcacattttacccgcttctctctccgctgagaaggaacgatcgatggatgacgcggagatggagcaatcgctgaatgaagggcccaacgcattgttcatttacctgcacggaaattccttcgatcggaccacgagccaccggtgcgaattgtacaacattttgtccgccatggatttccacgtgcttgccgtggactatcgcggtgagtgggaaagaaacaaaagtaaagtgccattgcggtaagggaaaatggcatttgttaggttatggtgactcgacagggcatccgaatgaggacggcgtgaatgccgatgcgcatgccatttatgactacgccagactaaaagcgccgtcgaaggacatttatgtgtggggccattccatggttagccatgtcaaacaaaccgctttcttttttactaatttacactccattttcaagggtacgggcgtcgccacgcgactcgttgccgaactgagcgacgccggcagagcgccgaaagcgttggtactcgagtcgccgtttaacaatgtttggtttctgctcaatgcatttaaaagagcaatgataaattctcagctgcgcgacgtggtcagaaatcacccgttcagtttgcccttccgctttttgccttggttcaacacgaccattgtccacccgctgattcagtcgggactgagaatgaattcggacgagcgaatccaacggtaagatcgagggagtgtgggttaaatttaaaaaaaatgatttcaaattttttcaaaatatcatcccccttaaaagttttttttaaattttctcccaaactgaccttccatgcggtcttttccagggttgcttgtcctattctcgttttgcatgcggaggatgaccatatcattcccgtcaatttgggcaaaaaattggtcaagtcggcgagggaggcacaccgcgaagtgacctacttggaatttgagagcattttggagtacaaacacaaatacatccatcgtgcgcccgagttgcccgatgtgatcaggtgaaagcatttgaacacttcgcaatgggaaagagaaatgaatggcattttattttgcagagagttcttagagaggggacaccttcagaaacggagcaaaaaccgaattgagcagggaaacgaaggagtgaaggtggaatt

SEQ ID NO: 66439 - DNA, 681 bp, Heterodera glycines
gttggattcgctcgtccgaattcattctcagtcccgactgaatcagcgggtggacaatggtcgtgttgaaccaaggcaaaaagcggaagggcaaactgaacgggtgatttctgaccacgtcgcgcagctgagaatttatcattgctcttttaaatgcattgagcagaaaccaaacattgttaaacggcgactcgagtaccaacgctttcggcgctctgccggcgtcgctcagttcggcaacgagtcgcgtggcgacgcccgtacccttgaaaatggagtgtaaattagtaaaaaagaaagcggtttgtttgacatggctaaccatggaatggccccacacataaatgtccttcgacggcgcttttagtctggcgtagtcataaatggcatgcgcatcggcattcacgccgtcctcattcggatgccctgtcgagtcaccataacctaacaaatgccattttcccttaccgcaatggcactttacttttgtttctttcccactcaccgcgatagtccacggcaagcacgtggaaatccatggcggacaaaatgttgtacaattcgcaccggtggctcgtggtccgatcgaaggaatttccgtgcaggtaaatgaacaatgcgttgggcccttcattcagcgattgctccatctccgcgtcatccatcgatcgttccttctca

SEQ ID NO: 66440 - DNA, 538 bp, Heterodera glycines
atggtgcgtgcaatttgcattcataatcatccgattccgaacaccaacgatgcgccgagctgtcagattattattcctcaaaaacaagtcggccgcagttttggtgagtcctaaaaacaccgttgcttctttcgaaacatttcccttcttattgttagacatttacgtgtcttgcgtttccaattccaaccaagtgactccaaagccgtggttcatcgccactgtttcgaccactgttgaaacggagaaccccgaggctgagatacaaccggcacttcaattgcttggacccatttttgaaaagttgtatcaagaagagttaaaaatgagaaggttttttaggtttgtgacaatatcggatttatacgagccggtggacatgggctatgagtctcaaatcttcatttcgcgttctttcgacgcgaccactcactttgagaccacttgcttggatgtgctggacattttcaagaggggcactacggaggaattcgacttctccaagatcacccatctcagtttggaggacaacgaatga

SEQ ID NO: 66441 - DNA, 67 bp, Heterodera glycines
cttttctgtgttcattgcatggttttaatacacagatatttgtagaattcatttcctagtgaccaaa

SEQ ID NO: 66442 - DNA, 753 bp, Heterodera glycines; identical to SEQ ID NO: 37345

SEQ ID NO: 66443 - DNA, 1063 bp, Heterodera glycines
caatccttcaacgaattccgactgcttgcgatggcaatgttttgctacggtttggcattgaaatgggcatgccataaatcggtcaaaggaagtgatggagcggatagcgcgctcctttcactctgtgccgctgagttgacgacactgctcagaacgaatttgcacgcggactctcagttggaggcggaaatgcacgaatgcgacaggaacatggtcgttggtgttgttttctttattgtataataatcgtcaatttcacaaacatttgcaatgccattctccaaacataatactggttttaattaaatttaaaaaatttatacgaatttattattgtacgaactagttttggtactaattgccattgactcataagaatattgttgccagttaattttcagtttctttccgttctttagctcctctccttcctccgctgttattcttcatctgtgccttctaaagactgtgcccaatttggcacatcggtcacttcttttcttcaaattgatactaccgacccaattgctctttcggaattgcgtttcgatgtccttccccttttgctggccaatgcttggcctcttcgacgaaacattcactttcttagacgattggcctttattctcgcttattcttctaatctaaactgtaactctaactttaccattaattactaattctttaatttttccagatcatcttgtgcttgatcctcttttgatgggcttgtccaagtgttcaactcgtgaaaatgtcttcctttgttgttcccctgagaatgtcgcaattaccgacgtcaaggtgttgtatatcttattgcttttatttactttctatttaccctgttctccagattttcctcgttcgactttcttcctacatgaaactgtgcaaactgtatgatgaaggcgttttcgttttcccatggattttccattgtgcgcccaatgttcagcaacaacagttttggagctacattaattctctgttggatgggaaacaggaatcggaaaggtcgcagttttattcgtcgaaatacaagtcaagagatcgaagataa

SEQ ID NO: 66444 - DNA, 185 bp, Heterodera glycines
  unsure (1)..(185): unsure at all n locations
atgaacttatttattagtctgactggtaaaaagtatattccagtgcattggcataattgctttctcatccttttttctctcaaaatttaatttttcgttttttaggactccttcaagagtatttgctcccgnaattttgcacctgttgtcccacaattcgaaggcatttatttccatttatttaa

SEQ ID NO: 66445 - DNA, 1241 bp, Heterodera glycines
atgccattggatgccctcctcaaaaatgcactgccctttttggcctcctcattaaatgattcgagtggtggcggcggcggctcagcgactgattatccagcaaaggcaccggaccaaattttgtcggtgagtttcaaatttttcaaaaatttttgatcgcaaacagagcccggctgaagagggcacagaattcattcaaaaattttactaaattcaattatgtgtaataacgtggattttgctcgattttttgtccctttttaaacaaaatatttctgatggaccgacctggatccaggcctggatttttcccaatgttcagtttccaacaacctgggtttttcatgaacctgtgttttcctggatttttgaaccaggaaatccaggtcaaaatatgaaaaaaaatccagatccaaattagacacgaaaaaccaagattttttggacaaaatttttttcaaatgaccattttcatatcaaccctttttccccaagaaattggtccatgaaagtgcttccctggcgtcaaccgctcgtctcgacccgtccaattcgacactttccgaatttctccaccggtgtgccgcactgctcacccatccggcaacccgacctcttttgaggtccaaaattctactgcttctttccaatttttgtgggtgggggcacataattttttttttgtttgtttctgtcccatggatgtaaccgatttttaacaattttttggactcccaattttttttttggacctcacatttctgaaatccaaaattttctgccagttacacatccatggtcatttatgagaatttttccacaccctttttcggttctctattccgttttcagttctctacaatgttttattgcgaaaaagtgctgcaaattcggcccaaatttgcctggcaatttgccactgtttgagggccgcattggacgaacatttgggcccccaaaatctcatcgacgtacttcgtgtcatccaggtgattttagaatgggaattcaactttttttaaattgaataatttgaaggggtacatttaggccttctcttccctttctccgttttttcaacccaaaaaattaaaaaaatttttttaatcaaccacctgaacactttgtccccttttagatgctcacttatgaacgcgtcaattttggcgattggaccaacgaattgttgccttttttgacgcggcaaatgtatgaaaattatggggaggactcaaaataaa

SEQ ID NO: 66446 - DNA, 285 bp, Heterodera glycines
aaatttttaaaagttttccagcaaataatgcaaatttttttcgaattcccccccccaaacgaaaattaaaaagtttaattggcaaatttcgtaacaagtagcactcaaatttccaaaattttttcccggcggcgcctatcggcaccgccggacctacattttccactatttttacaagttttttgccttaaaacggccaaaatttggtcatttttagtgaaaaagtgcagttgttacccagcagtggaaaaaaagttattggttaaatagcaaaaaaaagaaaaa

SEQ ID NO: 66447 - DNA, 788 bp, Heterodera glycines
gtttttgacaatggggctgtttactcgcccgatgtgcttgatgtgacgacggctgatctgcttgcacgtttccaacaaggtgtgctcaatgtggccgcactttcacttggcatcggctacccgaccaaggcatcggcgcctcatctgattgccaatgctttcaagaacttgttggccgttgctgccgaaacggacgtgacgttcaaagaggctgaaaaggtttggggaaatggatggatgtgcttattttagttagatgaacgaaaaactggttcgccacaaaagtcgacatttctttttttatttggaaatcgtgaaatatgttcccagggggtttcgggtttgaactgatcaataatttggctggctttaatatttcccaatttctaacctataagcctaatttcgaaaaaaaatcgagaatcccaaaactaattctttaactttgtgttaggattaagtattgggatttggtcgaaatgaatgcagtattcatgaatcagttcgatcccgaaaatccccaagaattgccttttcggtttaagtcaacaatagcacatatttaattcgacaactttaaagcgatgcaaccagaattgctgttgcttattccaactgtttaggtcaaagagtatttggctgatccgtccaaatttgtttccgccgttgccgccgctgctccggcagccggtggtgcccccgatgcaaaggaggaggccgccccggcaaagaaagaggaggagaaggaggaatccgacgatgacatgggctttggactgtttgattaa

SEQ ID NO: 66448 - DNA, 155 bp, Heterodera glycines
gcggccgattcagtccgcgttgaggctcgtccaaaaagtgcagctcacggtcaccggcaccgacaaagtaacgtgcaagccacggcagaacaggtcgtgtcaactgagttttaggtggatggttgcatcccacaaaaatttgccaaaaaatgcca

SEQ ID NO: 66449 - DNA, 556 bp, Heterodera glycines
aatttggtgcgtttcagagcattttctgaaaaaatatttatgaaataaaaaaatcgattttttcaagtgtccgtttggggtactcaaacaattatggggagcaaaaatccaacgcagaattaaagtacagactatagggaagctattcccgaaggattcggtctccccataaatctgggcgcatcggttcggggggactgccccgaaaacaaaaaaatcgattttttcaagtgtccgtttggggtactcaaacaattatgggcagcaaaaatccaacgcagaattaaagtacaggctatagggaagctattcccgaaggattcggtctccccataaatctgggcgcatcggttcggggggactgccccgaaaacaaaaataaatcgattttttcaagtgtccgtttggggtactcaaacaattatggggagcaaaaatccaacgcagaattaaagtacaggctatagggaagctattcccgaaggattcggtctccccataaatctgggcgcatcggttcagggtactgccccgaaatccaaaaaaaaaatttttt

SEQ ID NO: 66450 - DNA, 641 bp, Heterodera glycines
atgggacaaaatcgtcgaattgatggactcggtggacaaattgggctcggcggaagagctgtgggcagcagtgaagcagaagacgccgatgctggccgatctgctggagaacgatttgtggaagggaagcaaagagcgatggacaaagttcgagggcaatttgggcgacgaggcgaagcagtacaaggaaaatgtgagagagagaatgggagacgataaagcaatgagagagataaggaagagagagtagataaagagacagaaaaaagacgtagagaagagaaatttgagaggtagagaagtgaagagaacctgagagagacaagagacgatgtgagagagagagagagagagaggagagagagaagagataggtagagaagagcaaagagagatatcgggtgagggagaagagagagaagggcaacaaatggggagtggaatgccagaattcatcaattaaatctggcgagatataactccaaagaatcaggcccggggtataattaggcaccaattgggacatgattttgggtactcaatcggttggctaactctcaactcgttcgcaaaaagtatttaatctcgcactttttcgatttttagctactagaccaattgtttccttgggtgtactatag

SEQ ID NO: 66451 - DNA, 1695 bp, Heterodera glycines
  unsure (1)..(1695): unsure at all n locations
atggccaacaaccatttctggacttacccctacccgtattgggctcgtcaccggggatatctgtgagtgtttggcactttcgctgctgccatttcaagtcactattcagcttcgactatgcaaatccgtcgttttactcgaaggaattcgatttgcattactacgaacattgattgaccggcggaaaaacaatggcggagcatactgtagcatactgtagagaaacgcatttatagaacaagcaacgcgaaataataataataaaaatgtttaaaattatgttttgggttttcgcccatcaccgtactttttgttttgtgttcctccctttttactactgtataccgtagcgatgagtgcgtttgccatcggcccattcgccgatcagccgataattcgtcaaaatgcggtgcaattgcgagctcgcactttggtatttgcctatttatgtccaatttgttgaaatgccattgccactaaaaaggccgacttgagccgatcctttgctgtcggcgacagttccccctctccgaatacggcactctcctacaaaatgcgttcttggtcttggcgcaccttccgacagtcgcgtttggtaccgtaacaaattgcttggttaattttattactctggtagagaagtgactaagaccggccttttcaggacgatgtgtcctacgcggacgattggttccatttcggcacttcctaccgtacttttccggtcttggaaaaattcgaccgtcggttggtcaacttatgccacaatcaatgctttagcataatgctccattgttttatcaattttttttcagtgattacgccgccataccgtacacttattggtcacgggcgtattgcaccgaactgtaaccatttgctgctctaccatatcgctaattacctgtctttttcaaaggtatccgtccgaccgtactgaaatataccggcgcatttacgagccgtacagagacgaatactcctacaaattgtggaacgcatcacgcagagcactgctcagcagagataatcgactcatgtgaagagaaagaaatattcttgcttttgattgactgtgaacattttggcgattgattaaacatttccattcaattcgtactgtggggggagggggggtacggtatggagaggaaaggcaacacaaagaaccacggcatttttgaaacattttttcatttgtgattttatttttttgacagttttaacaatgacagataaatattggctggngcctttcagaattaccaacgacagagacaaacgacaaacgatatatttgtcgttagtatacgccgtttgtcgtttttcatcaatcagaattaaaaattttgccgtttgtcgtatgtctcccgaaatttgtcgtttgtcgtctaaaattaggcgtttgtcttctattattctgattttatttcagacgacaaacgccaaatatttggggggcgctcaacaccacccctcaaatttgtcgtctgagaaatgtcccaaaaagaccaccacataattttcatccaaaaaattgtatttcatgttaaaattatgttcctagggataaattagtcgctgatcatgaatccgatctcagattttcattatctatgtttttatcaatgatttttgataaagttatcaaagtctattgaattcgtgttcatgattggaatttgaagaaataaa

SEQ ID NO: 66452 - DNA, 206 bp, Heterodera glycines
agccaattccctaccgccgattccctactaaggcatttgggccatttccataccaaaagtattgaatattgataaacattgagattaaaacatacaagaaaatttattcactgctttttagactaagctcgtcaagagctttcggaagataccaaattatcagaattcgatcgttttaaagtaagttagaagtgtcaaatctctga

SEQ ID NO: 66453 - DNA, 278 bp, Heterodera glycines
atttgtcgcagaatgtcccaagtgcgtccaaattcttacgtaagactctgtttctctgcactctctcccaaccaaaggttctctcgttcagctttcgcttgagggctttcccgaagggcaagggtactgtgcccgtacgcggacggtgcccgacatgacaggccatgtgcgaatgtccgaccgttataagccccactggggcaaataccgagacgtatgtcccaagagcaaaaggaaagcgtcgttaccccccggggcgacgtttccttcccaaaacg

SEQ ID NO: 66454 - DNA, 157 bp, Heterodera glycines
gattgtacgtacctaattgccgaaaaaattcaagaccaatttccgaatgttgaccgactaattgcaaaacgaaatccgtctttgtcaaagcgccttaccgagtcaaaaaatttggaaatgtatctcatatgcaatttcaaccaataaatttgatgaa

SEQ ID NO: 66455 - DNA, 383 bp, Heterodera glycines
atgccaaaacaaaaagaaatcgttttaaaatattcctttctggacttgacttggtttcttgatatcgaagctgttttctacgctatttctaaaacggttataccaaaccccagatttttgaatccggttttcagaaaaaatgccttgtggtgaaaacaatatttcacatttcactccataactttgtgagttcggcacggatcgagaccgggataagaccattggaaagagcagctcgagctctacaagaaggtatggaaagaaaaaatagttatttctgggactttttcagaaatcagaattaattctccaatgtggcccaaattttaggcccccagccacagccctttgcttctcccagttttaagtcttggatttgtcaa

SEQ ID NO: 66456 - DNA, 369 bp, Heterodera glycines
  unsure (1)..(369): unsure at all n locations
atgccaaaacaaaacgaaatcgttttaaaatattcctttctggacttgacttggtttcttgatatcgaagctgttttctacgctatttctaaaacggttataccaaaccccagatttttgaatccggttttcagaaaaaatgccttgtggtgaaaacaatatttcacatttcactccataactttgtgagttcggcacggatcgagaccgggataagaccattggaaagagcagctcgagctctacaagaaggtatggaaagaaaaaatagttatttctgggactttttcagaaatcagaattaattctcccatgtgggccaanattttaggcccccagccacaggccctttgcttctcccagttttaa

SEQ ID NO: 66457 - DNA, 377 bp, Heterodera glycines
atgaatattgaaatttttattgttggcgttcatgaaccagtttttcaaaacagcaaccgggccaatttagaactcgcactacccagcaatattgacttcaaacatattttaaaactgataaatcacacgtatcagtgcgctgtatttttaagattgtcaaaagtactaattgcgtttctcttattgctttcgtgtgagatttttcttgatgaaattagggaatagaatggtcagcaatcaatttcagacgctttttgcaggtttaacgtataaataatgcttttccagcgattgaatataatcacaagcaatttcaattattgccaatgaagctttgcaagaaaaatgatgttgacttctatgcgagggtttattaa

SEQ ID NO: 66458 - DNA, 46 bp, Heterodera glycines
atgaaattctctgcttctcttgttggatacacgggaagaaataata

SEQ ID NO: 66459 - DNA, 300 bp, Heterodera glycines
atgaaattctctgcttctcttgttggatacacgggaagaaataatagttagtccttttgttgaatttttagaaattctatccgtcaaatcgtcttttggaattttaatgagtaaatcaggaaccgtaaatgaaattctctgcttctcttgttggatacacgggaagaaataatagttagtccttttgttgaatttttagaaattctatccgtcatatcgtcttttggaattttaatgagtaaatcagtaaccgtaaatgaaattctctgcttctcttgttggatacacgggaagaaataa

SEQ ID NO: 66460 - DNA, 646 bp, Heterodera glycines
atgcacccgagcagcagttcatcgccaaaaataacatcaattggacagcaaggtaatgtggaaatgaatccagtttaaaaattggccttaaaaatttaaattgttgatattccctacagaaagaaatgtctgacaaatcaatgaaaattgctaattgttgctttaccactaaagcttttgaaaattgccgagtttttagcaaaactgccaactttataacaaaaagaaatcgtagcttttcataaaattaaccaaattaattattcattagcattcgatatgtagcttaaggttccaccaattgttcagatttaagtgaattttgagttaaattctgaatttaaggaaaacaaaagttaggaattctccaattatttattagtattattaaaaaaattttgagagccaaaaacaccaaaacatgaggctaaaaatgcagcgacaactgtcgacggttgtgacggaggaacgacggcgacaacgccgaagagtacggcgaattcgcaacagcaacaatctgcagaaaaagagaacaatcggagcagtagcaggacgagaagcagcagagagaggaagaagcagaatagcagtggagaggaagagggcgacagagaagacgagaaagggaaagacagggagaaaaacg

SEQ ID NO: 66461 - DNA, 1047 bp, Heterodera glycines
  unsure (1)..(1047): unsure at all n locations
atgattgccgaagtggaacggctgttgacacgaaaaaggtccgcaccggtgcatgaaagttttgggaacattgacgacgacgatgaggaggagggcgagattcttgacgtctcgtttgttgaggaggaagaagacaatacgggcgaagcgcccttaaacccactttcatatttgaccaagcaatcagcggctcaacaagaaacgttgcggcatgaaaaatgggcacaagaagagagaaagcgaagggaagaggagcagagaaagcagcgagaaaatgaacgtagacggcgagaagaagaggagaggcgtcgtaagacagaagaagatagaaggaagactgcagaaaaagcagccaaggaaaagaaggcaaaggaagagaaagaggcaagtgaaaagaaggcaagggaggaaaaactggcacgggaaaagaaggaagagcagagaatagcaaaagaaaagaaaggcgataaagagaccaaggataaaaaggctgaggaggagagagtagcaaaggaaagaaaggcagaggatgagagagtggcaaaagaaagaaaggcagaggaagagagagtggcaaaagcggaagcggagagagtggcaatggtaacaaaggcagaagaggaaagagcggcaaaggcggaagcggagagagtggcaatggtaacaaacgcagaagaggaaagagcggcaaaggcggaagcggtgagagcggaaaacgagaccaagaaaaagcaagcggaggaaaagcagttggaagagcttaaacgacagcaacaggccataagaaagcaaaaagagttggagctgctcaaagagttcagaccttggcgaggtgggtacatgaggctggttcacggcaaagacccaaccccagacgtacactatctgcacgaaacggatgattaccactttgtgaatgctgtacacaagtaccgtgtctggcactcagagctcccttgggaggcgcccgagtttaacccatccgcgcacatccaacagaatattggggagttccgtgagctgtttgagcaangaggtgtacgatga

SEQ ID NO: 66462 - DNA, 738 bp, Heterodera glycines
atggatgagtcgaaacgggaaaatttttcccctcaaaatgatgatgacgtcatcacaattggagacaacaacactcaaacactgcttgacctgcaaccggggccctcaaaaagcggacgcaagcctcgcttggacaaaatccatgaggaaattgcttccgcaatgaagaaagtaaaagccatggaagctgaaggtttggctttttctgcaaatttctttaaattagccaaattttagtggatgaatcgcccaaaaaacaaccgaccaatgtgtttgagtacccgaccatattttggaaattggcccgcccaaaggttttggctaatatttaatttgaaaaaataggaaaatttcttaagtacggagtgttcacgttcatgtgcaaagagtgtcgtgatgacaatttccggcaggggaacagccgattcaaactcatcaatcagaatggcgagcagcaacgccttgagttcacccaatcgttttgccaagactgtgcaaagctgaactttgattgcaccgatctgatcatgaagcacctaaagaaggatgaaccggcaacgacgacgacgacgatgacaaagagtttccgctggatcaaagatgggggaaagtgaaccgagatggcacaccacgatataaggacgatctcattttgaagaatttatacttgttgatcaaatgacaaactctttctttgtaattttgccgagcaatacgccaggctttgttggaaataaa

SEQ ID NO: 66463 - DNA, 547 bp, Heterodera glycines
atggtactccctctgactgctgccctatccaaactgctaaactgtaaacccgaaaatttagcagaatatttgaacaaccccgaggcggtgaacaaagcgaacgcttacctggccggcaaaaaactcaaaacaacctaccagggtcgtgattccaagaccaaagaggtcaagttcggcacattttcggtgaaagccgctgcggaaacctacgcctttgagggatttcttggcaagtttccaaaaattcagtttcggtctaacacacatgcgttcagaggttaaagtccaccagtatttctacataaagcaccggatccgcctactgtacccacagctgaagtgcattgttgagtaccacaacaagggccactgcaaatactatcccttgggtataaaattttgtccggaaaaaaatcaataatcattttcagagttgttggccgttgaggagggcagtgagagtgaacccgtcgaaagacctgccgctgaaaccgactacctggactacttgaactttcgcagtgggtggcaatcaacactctactga

SEQ ID NO: 66464 - DNA, 199 bp, Heterodera glycines
atggatgagtcgaaacgggaaaatttttcccctcaaaatgatgatgacgtcatcacaattggagacaacaacaacaacactcaaacactgcttgacctgcaaccggggccctcaaaaaggggacgcaagcctcgcttggacaaaatccatgaggaaattgcttccgcaatgaagaaagcaaaagccatggaagctgaag

SEQ ID NO: 66465 - DNA, 1035 bp, Heterodera glycines
atggtactccctctgactgctgccctatccaaactgctaaactgtaaacccgaaaatttagcagaatatttgaacaaccccgaggcggtgaacaaagcgaacgcttacctggccggcaaaaaactcaaaacaacctaccagggtcgtgattccaagaccaaagaggtcaagttcggcacattttcggtgaaagccgctgcggaaacctacgcctttgagggatttcttggcaagtttccaaaaattctgtttcggtctaacacatatgcgttcagaggttaaagtccaccagtatttctacataaagcaccggatccgcctactgtaccctcagctgaagtgcattgttgagtaccacaacaagggccactgcaaatactatcccttgggtatacaattttgtccggaaaaaatcaataatcattttcagagttgttggccgttgaggaaggcggggagagtcaacccgtcgaaagacctgccgctgaaacggactacctggactacttgaactttcgcagtgggtggcaatcaacactctactgatcaatgaagcgtgtgcggcaatcggaaaagttgggcgaattcccggagattgagttcgccgtcaacacaatgggcgtcacggtgtactgcccgcggcacctgcaaacgcctcggtttgtgccatgggaccagcccgggcggtgctcgagctgtagaagcggaactgttgagctggactacatcatccagcccgagggggtgcccatcttttcgaatcggctaaagacagacggcgagaactttgtgccgtttgatgcaattggtaagctgcaggtgtatgtcagagtttgataagtggactttgccgatcgtgcgaaattccgcattagggcccggaacaaggtgttcacgctaccgctgcgacacccggaggtgcacgccgccggcccaagcttggaagacggcgtaaaagaacaaaaggaaatgactcagatggcataaacacttgtccatttttctattgttgatattctgatggactacccaaga

SEQ ID NO: 66466 - DNA, 840 bp, Heterodera glycines
gggggactgcccccggaaacaaaaaaaatcgattttttcaagtgttccgtttggggtactcaaacaattatggggagtaaaaatccaacgcagaattaaagtacaggctatagggaagctattccggaaggattcgatctccccataaatctgggcgcatcggttcggggggactgccccgaaaacaaaaaaatcgattttttcaagtgtccgtttggggtactcaaacaattatggggagcaaaaatccaacgcagaattaaagtacaggctatagggaagctattcccgaaggattcggtctccccataaatctgggcgcatcggttcggggggactgccccgaaaacaaaaataaatcgattttttcaagtgtccgtttggggtactcaaacaattatggggagcaaaaatccaacgcagaattaaagtacaggctatagtgaagctattccggaaggattcggtctccccataaatctgggcgcatcggttcagggggactgccccgaaaacccaaaaaaaaattttttggataaaaattatttaaatgaactgactagataatatttaaaataggttatttctcttcctttcagtatccctgcaaagtttggtgcgcttctgatcagtttctgaaaaaaaagttaagcctaaactttttggcctgtttaaaaaggaattaaaaatttttaaaaattttattcatctccctttttgatagaaaaagcatcagagtgcctaaactaacatgtaaataaaatttggtgcgtttcagaaccctttctgaaaaaatatttaagaattaattttgcaaaaaataaataaaaacgaaagact

SEQ ID NO: 66467 - DNA, 642 bp, Heterodera glycines
atgtggttggaattcatgtgagtgttgagcagaaaaagagatagacgttttttcaaaattttcagagccaaactcgcccagaaagaaaatccagaaaaattagggtcgtcgctactattccgaaaatgtggttggaattcatgtgagtgttgagcagaaaaagagatagacgttttttcaaaattttcagagccaaactcgcccagaaagaaaatccagaaaaatcagggtcgtcgctactattccgaaaatgtggttggaattcatgtgagtgttgagcagaaaaagagatagacgttttttcaaaattttcagagccaaactcgcccagaaagaaaatccagaaaaattagggtcgtcgctactattccgaaaatgtggttggaattcatgtgagtgttgagcagaaaaagagatagacgttttttcaaaattttcagagccaaactcgcccagaaagaaaatccagaaaaattagggtcgtcgctactattccgaaaatgtggttggagttcatttgagtgttgagcagaaaaagagatagacgttttttcaaaattttcagagccaaactcgcccagaaagaaaatccagaaaaattagggtcgtcgctactattccgaaaatgtggttggaattcat

SEQ ID NO: 66468 - DNA, 500 bp, Heterodera glycines
  unsure (1)..(500): unsure at all n locations
atgatgactgcttcgaatgtgttcgaatcgatgttccgttttgatgacaanaaaccanagactgaaagtaaaaatttagaaaagtttaaatgtttttcaaatattttaaattaatttttagctccttccgctaaaacggatagttcggtagaaattcctgacattagtgcgaatgctttcaaagtgatgctcagtttcatttatgctgaagatttgagtggattgaacggagaaaatgccatggcagtgctttacgcgggtaaaaatatttttgaaatttttaattttaaaatattttagcaaataaatacattttgaataataattatttttaattttaaaatattttagcaaataaatacaatgtctcttcgctggtcaaagcttgtttggaattcccaattaatgaattgccaaatgtgttctttgcctatttccaggctcttcttctcaacgaaaatgtaaaatttgggttttaaaacatttacacaaaaaataaa

SEQ ID NO: 66469 - DNA, 684 bp, Heterodera glycines
atgtgcgccgcgcaccatgaatggctgacaaagcaaaagggaccaaagctaggcaagaagatgaatgccctgcgaattggtggcctcatggtgaacatcctaaatggatcaacacgactgatggaagtcacgatctgggtgaatgacaatccgatcaaatttgtgcttgactcgggtgccgatttgactgtgctggacgaagtcgcacatatggctattggaaagcctcggctgacccactgcaatgagcaagccgtgtaccatgacggtacaagctgtaagcttttgggaaaaggcacagcacgtttttcatttggaggaaaaacaattaatgggcaatattatgtgacgaagaaaggatcactcaatcttttgggaattgatatgttggatgcctttggcctattggacgctttcagaagggaagttgaaaaggccatgaatgtcaatttggtgaagaaggaagcgaaaaagtcgccgattcttcaacaggagaccactttggctgcgcttcaaacaaaatttccgcttgtttttgtggagggacttggacactgcacgaaagcaaaggctcatttggaattgaggcctgaggctgtgcccgtctattgtcgtccccggccagtgccttacaacacacgtttggttgtagaggaagaactggaccgattgttggagcagaag

SEQ ID NO: 66470 - DNA, 342 bp, Heterodera glycines
atgtttggcctcactgaatttgcgtccaattcgtccgcgtttgacggcggcgaaattcgttgtgtgctgaagcggttgtacagcgatttcattgtcatcgaaattccgtccgatggccacgtgttgaggccgaacagtgcggcggcgccagcggcccaaaacggtgccgccggcacggaatgtgaaaagtgccaagaagatgcaacaacgactacgactgtgcctccgtcggacgatggcaaaggggagaagccgacacggctcactgatcagcaatttgatcagatgcaacgggtggccgctgggacagacgaagaggggaaaatggacatcgatttgaag

SEQ ID NO: 66471 - DNA, 392 bp, Heterodera glycines
atgaaagaggaagtgaaaaagatcaccgaaaatttggacactctgcaaagccgtgtacaaattttggagtttgaaatggacggtgaaatacagaggaccgagtggatagatgatggtcattcggtggaacatgaccaattaccacttcacagtgcaaatggaaaggaaccgaatggcggtgaaggacagaatgaaatgcacgtggacgattgtgaaataatgataatggatccgtttttgggtggaatcactcctttggaagggtacgacggaaacccgggaatttcattttcccgttgggtcgcccgatttgaggacatgttggcattatcccaatatacggagacccaaaaattaagcagactccgaattttgttaaaggggcaagcaag

SEQ ID NO: 66472 - DNA, 902 bp, Heterodera glycines
atgttcgtcaatgggttggcggagtgcggcaccaaaaactgtgtggcggaactggcaaaacggatcaagagcaaagtgggtacttgaacaattggccatgacaaaaataagcgaaaagcaccccccgtttcagcaagtgtcccaagcaaacgctgtgaaggcactgctcgcactcactcagctgccggcaccgtcggacaacattctcgaggagatggagcagttgtgcagctccgaaccggtggaaagtcagccgaccaccaaacagtcgtgttggctgacattcggcgcattggtcaacgaagtgtgccaacataagacggaaaagaatgcggaagaatgtgccggagaaacggcgaactgtgcgcagtccggcttctccaagaaaggccaatgcccaatggacaaaaagcagaagtacaaggaggtgggcacaatgaaatttgttgggtaattaattaattatttgttaattccaggcaatgctggcagtgtaccaaaacagcggatgcatttacgacaaaatagtcgcactgagcgcacttggcaacgcgggcatggacaactcactgaaggagctggagaacatcatcaaggacccgcgcgaaccacgcgtggtccgcgtgatggccattcacgcgacacgccgtctccaagtgaccgagccgtgggaagtgcagagcgtactgctgccagtctttctgaacacgcgtgaacagccacacgtgcgcatcgccgcgttcgccaatctgatgaacgaaaacgggcagccggagccgcacgtggtggaccagctgatgtacaccatcgcgaacgagccgaacaaggaagtgcaggcgtacgcctacaggatgatgaaagcgatggccaagtcccagaagcccaacgaaaagcaaatgtaa

SEQ ID NO: 66473 - DNA, 1497 bp, Heterodera glycines
atgcgcacattcgcgcttttggccctcgtcgccgccattctctgtttgagtgccggccgacgcaccttcccgaacacttcgccaagagtcggcttcctcaattttggcacccgcaacagtccgaactcagcgataaagccattccagcagaagaacaccgagtacacattcatctacaatgcccagatcgcctcggggttacagtcagaagaaaatgctgcgaacccacagcaaaaggcggtgacgcgcatccaatgcctggccaagattcaattcgcttctgagcgacacggacagttgcaattggaagagtgtcaggcgggacagcaaaatgagcaaatgtcggaagcgcaggaggtgcagccgatggaattgtttgagcaggtgattggccaagtgtgtggggtcggttggcatgtcagtaaatgctttagacgccgataccaagccagacaaagctgcagctgcacaaaccgtgccaattcaccagcgcagacggagtcatcgaacgcgtgcagtgccaagaagacgaaaccgaatggaccaagaatttcaagaagtcggtgctgaatataatccaggtgagtgacccattcattctctgtttgttcgctttgaactgccttcccttgtgttaagctgaacctgaagcgcaacaacgcgcagggattgagcagaaacgacgaacgacagcaaaacacggcggagaaagagtcgtggcagacgaagcagggcaaatcattcaccattcaggaggttcgaaactgatcaaccgcaaaacaaaacacaatgaatgccccgatcagatcacattggaaggcgcatgtcaaacgacgtacaccatcaacagagcatggagcggacagcagttcaacgtcacaaagaccatcaacttcaagaagtgccagaagatcgcggacgtagcgaacggcttccaaacggacccaccgcaggcgcaatgtgcacaatgccaacagtaaaaagcaaatgaaaaagtgaatggaacaaagccgaacttaaggtattgggctcaacagcagagtggccaaaatctccagcaaagcgactcggaaacggacaacgcacaaaacggagaacagaacccatgtgccaagtgcgacccgaaggaagtgaaagagcacgaggtgagcttacaacaaaaaaagcaaactgaacaactcttttcgcgtttagttggaccgttccacggtcattcgctgtcaaatccaaggcgagcccaccaagcagtacacactgcacagctgcgagatgcgctcccaatatttgtaccgtaactcgaagagtgccgtgggaaactacggtgccgccatgcaaacgatcgttgccgccacattgcatgcgatggactccaaacacacataccagcaaatcccggcgatgagtgcgagcacggaagagacgctgatgtactccaacagcaaggaagtggatgagaaacgcttttacagggtcagaatccgttggcaaccgaataaa

SEQ ID NO: 66474 - DNA, 400 bp, Heterodera glycines
atggggaccggtaaattggacaccggaaaattggacactgtcggaattttggacaccaaaggaaaattggacactgtcggaattttggacaccaaaggaaaattggacactgtcggaattttggacaccaaaggaaaattggacactgtcggaattttggacaccaaaggaaaattggacactgtcggaattttggacactggaaaactggacactaaattcctcttttaaaatataaacccaggaatttaaatactcaatatgcacaatgattgatcaaatgtggcaaaaaagtgtacaaaattagacgatgattgatcaagatgccaaaaaatatacaaaattgcgtgatgattgttcaatgtaccaaaaaatgcgcaaaaatgggaactccataaaa

SEQ ID NO: 66475 - DNA, 84 bp, Heterodera glycines
atgcccccacgtccaccaccaccaccaccaccaccaccaccaccaccaccatgtccttcaccgctgatgctgctagtgctggag

SEQ ID NO: 66476 - DNA, 1329 bp, Heterodera glycines
gtcgcggcaggaatactttacgaattgactgatgcgccgacatggattattggcaagtgttattagacattgatgattcaattcattcactttaactgtttaaatagatccaattgatggtacgacgaattttgtacatcggtaatttacaattaaaataatcacatggaattaccaatttattcccaaagcatcccattcatcggaatttgtgttggtcttgctatcaacaaatctctctgtgctgggatcgttttcaatccaatcactgatgagctatacaccgcaattgaagggaaaggcgccttgaaaaatggctttccaatttcagtttcatccgcgaaaggtaattttggtttcaacaataattgcttatatgagcgcagctgttatgcatttctaaccacttttcatcattgatcgtttcgtttagcacttgatcaatctgttatttgtcaaacttttggtcagcataacatcaaagaaaagggagaaaaatggttggacaatgcattcggcaatttgcgctccgcagttctttcgggcacccacgggtacgttagttcatttttgagtcatcaatttcacgatcactgaagttgtgcatgtttagggggtctgcgattacttacgcttaatgtgtacatttcgttgttgcaaaaaaaccaattttccccacactaacaataaataataaaaaatagttccaaatctttcgttgtttctctattattcccgatttaccacccatcagattttgagcaagctttgctcgtttctcagatcggctctgatcgatcgtctgcccaaatgaattcattcgtttccaatttccgcactttgctgggtgaacgaaatgtgcacgggtcggttataaatgaggaccttaaagttcacgaacttcaatttaaaagatttttaggcatcgctcttttggttccgctgccatcaacatggtctgactcatcctatcatcggctcccctttagctttaaatttaagatgttcttggctcagggttcgcttgacgcttacgtggagtacggcatccattcttggttcgtttagttgtgtttgctataattttaaaatattaattttttcgtttttccccttcagggatatggctgcggcagttgtaatagtgaaagaagcaggagggactgtcaccgacccgacgggttttactctttttttaagtgatatatggtcttcattttaggagctgaattcgatctaatgagccgcaaggttctctgcgccagcacgtcgcaattggcacagcaaataagcaaagtgctaacgcacgtcgattttgagaaagaggcc

SEQ ID NO: 66477 - DNA, 712 bp, Heterodera glycines
  unsure (1)..(712): unsure at all n locations
atggagcgtaaacagtgatttcttcctaataaaacccaatcatttgaaagctgtgtatcgcgcaagaaagaatggtagcaacaataaagattaaaattaacttttttaaataaatttaaattcagccaatcaaaatttgtatgccaaattcgtgctcttcccgcatttggccattgtctattatgaaaccaaaatcataaagaataacagaaacatcaggtaagtattgatgttcgatttttaaagatatgcaaaggctggttgaggttgaccacatcctatggattggggcttttcagtgtttgctttgttccagaggaaatgaaaattttattaaaattccgaggaaaattgaattttttataaatttactttcattctaaaaaattcctttctaatatgtagagaggagagtaggaatctaagaaattgtggacaaatttaaaaagctgaaagtcggcctttggtattggaagccgatgctgatttgaatttgatatcattaggcatttacagtaccatttcgattggaatttggacaaaatccgacgacaccttttacaaatattcaaacaatggcttcattttcggacacagtgccactggcttgngcggatatccatcttttgcagagggcgacacaatcggatgcggcgccaatttaacatcgatggaaatcatttacaccanaaatggacaaaaattngagtga

SEQ ID NO: 66478 - DNA, 243 bp, Heterodera glycines
cagcaaaagcaaattgagacgaatgagcaaattgaaaatgaagcacaaaaaacggtggaaaaaacgcaccaatgccccgaaaagcgaacaaaaggcaaaaatgggaggacggcgaaacaatcggcagaaaaaatgggtcagaaaaagggcgctcccggacaatccgacagtgagaacaatccgacaaaagagcttccctatagcctgtactttaattctgcgttggatttttgctccccataa

SEQ ID NO: 66479 - DNA, 372 bp, Heterodera glycines
atgatttttaaaattttctcaaaaaggatttttgctcttttcaaggtccgtcaacaagatgatcaggaagcgggcgctgcaggacgtgttgcggtgatgaaggagccgcgttcacgtgccgacacgctgccaccccagcatccaatttgcacactgtcactcacgctgcctgactacattggaccgttgccttgcatcagtgcgcaggctgacatgcaacgtggtgacaaacagcagccaccggacggcggtgcaccacgcgtgccgtcagtgagcgaacgttacgcagaggcgctgcatgcaaacctggccgaggcatacccaaacgtgccgcttgaactggtggctaaacgaatcggcggagactggtaa

SEQ ID NO: 66480 - DNA, 544 bp, Heterodera glycines
ggccatgacgacgcattttcagtgatcacattggacagagttgttgaacagttcttccgctggcgcttaatgcttccacgcgttaaggtaaagaaaaatgaatggatttgatttgatttgattattaattttcactaaataaaataaattattttatttataataaacaacatttattttttttttacattaagcctttctacgccgtcaaatgcaacaatgatccaattttattacaacttttggctaatttgggatgcggtagaaattaaatttgcactcaatttaaaaaaaacaatacattttttgacaggttttgactgtgcaagtcgtggtgaaattgaatcggtaatcaaaaaaatctatatatttttttaaattatttttgtttataataataataataatttgagattgtcaaaaatggtttgtgctccggggacaacattgtgtacgcaaatccgtgcaagacacggtcatacattcgtcacgctgaacaaatgggtgaataaaatttaaaaaatatatttttaaattcataaaa

SEQ ID NO: 66481 - DNA, 181 bp, Heterodera glycines
atgccgacggcacattttatgcgctatgtgctgataacaggtaggatttaaaaattaaatataatttttaaataatttataggaatttattgaagaatataaaaaaaaatttttttttaaaaaaataattaattttaggcgcaacagatggaatcggaaagcaggcaagcaaatgataaaa

SEQ ID NO: 66482 - DNA, 370 bp, Heterodera glycines
atgaacgttatgaagactggagaagaacatgacatcaccaatttcaaacttgggaaaactcaaaaggtatgcatttgtctttggtctgaaggtagaaacttggtaaaaaataagaaacattttaatctaataatttttttataatttcctctttgattcatttgcattttagtacctctttgccatgatacccgaccttttccgactttatttttgaagtcagcagaagcaccgatagacaaatggacgcagcgagatcagctcgaaatttcgtgcacaacatgcgagttttggggatcaaacatacaatgatgatgaaaaaattcgtaagctaatgacggctcttagtctccagttcgtgggaaacgca

SEQ ID NO: 66483 - DNA, 3573 bp, Heterodera glycines
atgcttcatgagacgtcgacccaggacactcgcgcggtactggaggaggaccggagagaacattcggtcgttcttatgggcgttcccgaatcggacagtggcctttcctccacacggcgcgcaattgctgaccaacagcaggtgttggacattctggacgtttgtgaaatcgaggcaatgccgaccaaggtttaccggatgggccaaagaaaggaaggaagacccagacttctcaaagtggaaatgccaacccgaaagatgacacaatcatttctccgcaataaaaaccgacttaaaaactccaaatttcaagctgtatctgtccgtccgtctctctctcctgaacaactcaaggagcggcataatttgatcaattgttgcaagacagcccgcgaccaatttccgaatcacaatttcattgtttatgctggacatgtcattccccgaaacgatgtctctgtttttcgcgatgaccctggtaattatgcctgtttttgccataaatcaaattcataaagtcttgcggggaccacccataatggaatttcaaaaaattttacaaacgtaaattcaggtaccgcaagatttttcaaaagtcctcataaggttaataaatgtatacaaggtgctttagttaatataaggtctatctataacaaatgcgaacaaatagaaacaatttttgaatccttaaatttagactttatttgttttacagaaacctggggtaaaaatgaaaaccaatttccttttcattcaaattttcttcaaaatcatacaatttcttacgctaacagattgaataagcgtggaggcggcatagctttcagttttttgtaaagttttctgaaacaaaatttgggtgtgaaatattagttttacagtttcaaaagtacaattcacttaatttgattcttatttatcgccctccatctactaatttaaaaaataccaaaaatcttttcaaatttcttgacctttacatttcagaaaactgctgtatacttggggattttaaccttggaactaaagatttaactataaaaaataaaaaacctttccctttaagtaattttggtaatttattttgtgatttctttaataaatataatttgacatcctgcattaatgaaccaactagggagcaatccttcctagatttaatcctttcaacaaaaactgacttaataaatgcggtagaagtaaaaggtggacttttagatacagatcatctaacaattctttttgatttttgtgttttaaagcaaaatgcaaccaagaaacaaattattcttaggaattttactaaatctaatacctttctattcgatgcatatttatcctcatttcttcctcaactactacaaaaattttatacagttgaggataaatatgctattttctttagttctgttcgaagaaatcttgaaattaatattcctgaaactattttatctattaagtccgccaaaaacttttacccaccgcatttattggcttcaattagggaaaaagcacgtctatataagctaatgaaagaaaatagaggaaaatatgaacctttatataaaagtatctccttacatattaagactcaaataagaaatattcaatcccgtaaagaaaataaaatactatccggtgataagaatagattattttcgtatcttagaaaatactttaagccagtagaggatccaccagttattcagtataatactttgtttgtttcagactcaacttctaaagcggaaatttttgcaaaaattttttctgaaaactttactgtaaataattattctcttgattttgatacttctttttcttctccaacaataaacgacgttgaatttaatattatttctgttggtaaagttcttaaaactttacctaacagaaataacacatcaccggacggtattacctttagactgttaaaaaattgttctctttcgtttactccttttgttactgaaattttcagactctcccttgatacaggaaaacttcccactatatggaaacaatcgattattatccccttgcataaacaaggggaaaaaagtaaccctatgaactataggcctattgccttaacttgttctttatgcaaaattatggaaaaatttattgtttgggctatttccgattttcttttaaagaacaatttattctctgaacatcaatttggatttataaagggcagatcaaccacaacacaactaatttcaacccttgaaaattggtatgatggtatttataataataagaatatcgattgtgtctatatagattttaggaaagcatttgatgttatcccccataatttacttttatataaggttcatagaatcggtattaggggtaaaatcttaaactggatatctgactttctttcgaaccgtacctttagggttcgggttgataatactctctcttctgagtataaaatgagctctggcgttccccagggttctgttcttgggcctcttttgtttctgatatatattaatgatttacctgaattaattcctaaacaaatttctataaaattatatgcggatgatgtcaaattatattccgtacataaaacaaaaaatgatagaattgctatgcaccatgctttaaatattctctctgattggtctaagaaatggtatattaaaatttctattaataaaacttttatcatttacttcggaaagaataaccccagggaacaatataaaattaatgataatgcaatttgtgaagttgaaactattcgtgacttagggattcttattgacaataaatttactttttccgaacatataagcaaaattacccgtaacgcctactaccgtatgcgtttacttttccgtgttattaaatcaaagaaaatttcagtttggaaaaatatttatgttagttatatccgtccacttctggaatattcccctgaatcttggaatccgcaacttaaatcgcatattatcaaaattgaaaaatgtcaaaaatattttactcgaatcgctttcagaaaatgttgtcttccatatattccctatgaccaacagctccaattttttaaattagctactcttgaaaaacgaagaaaaatttttgacctcctaactacttacaaaattttacatggttttacacatttggacccaaattctctgtttaaaagaactaacttaaatactcgaaacaagtcatttttccggttaaatgttaaattacaatctaaaaaatcttccaaatcttttgttaacagatcagtcaaggcctggaatgcccttgataaaacgttaatgtctagctcattaaacacctttaaaaaattattagaattgactcttgattctgaaagcgccaatgtataaagaaattattaacttttgaggcattttattgactttgacctcgattttattttcatataaattttttgttattgtttatttttaacctgtgatctcacttgatatttattcacttactctgtgactattttactgtgatcagtcatcagagtaagtggttcccgcccttctgatggcaattttttctttatcgataaataaa

SEQ ID NO: 66484 - DNA, 964 bp, Heterodera glycines
atgagcagaggacaaatggacaagaacaaaggagcacaatcgaacaacaaagtgatcagcagcagggacagtgatcaaatggaagaaaagggaaagtgatcaaatggaagaaaagggacagtgatcaaatggaagaaaagggaaagtgatcaaatggaagaaaagggaaagtgatcaaatggaagaaaagggaaagggatcaaatggaagaaaagggaaagtgatcaaatggaagaaaaagacgagaaaaggaaagtgatcaaatgaaaaagaaaaagacgagaaaaggaaagtgatcaaatgaaaaagaaaaagttgtcaaatggaagaaaaagatgagaaaaggaaaagtgatcaaatgggagaaaaagagacactgatcaaatggaacaaagatagagaaagagagtaggaagagaagttgcagggacacatccctttcacctttctctttacttcatattcaaattgtaaattatttaatgattctgtgacaagactctgaaacatttttgctatttagggcataatgatcaattaattgttaattgagcacagttgaatggttcctccttctctgatcagtgagtggtcgcgcacctttagcttacgccagggctatcatagcataaataatgaaagataaacaaacaaaacggaatggagaaaaggggataattgtggtggtgattaattatacgacttttcctaattagaatcgttaattgtcagaaatggaaagcgaatttagcaaaatgaaattcaattttcccacacagaaatatttagctcgactctttcgactgttatttaacttaattactttaacccatttttctgaaaatgatttccgatttgtcccctaattcaaaagtagcaaatatatataacaaattcattaattactaatgttaaatgaatatttcaatttaaattgtattgataatttatgccctcggaaaaa

SEQ ID NO: 66485 - DNA, 670 bp, Heterodera glycines
atggagagggagaatctcgactcttccggctcggattttcgagggtgagcacgtggttcgggttctagattgtattcgactctaacaggatgccttttaatgcttcttctcagatcactccttcatgttgatcagttatatgggagaatttaggaaaaaatcctaggcgttaaaaaatttttgcgcaattttagtaagcccattggaaagagtacaaaattgctacaatacccaaaagaccgcaagtccctacgactaatacccgaaggtatgggcatttcaaattttgtatgtgcaaaaagtactgtatcaaaagttagttatgaagaattttttcagatttattggcccaaaaatattgagttgaagtaaaataaacaaattttccatagaccacctaaaatgggcgctataccaattcacaactaaatactttaatataaaacttatttatgcagaaaagtgcgtggcctaaaattatgcaggattgcgcagaggacgcgttaggcaacgcaccgattgaagagagcgcggccaactatcaagctgcttctgtacgggttaaaaaggctattgacctaagaggtccagcaaagtatgttccctcatttcggcaatttttgaagaattgttgtgtcgtttatcaacaacaacaaatataatcaataaa

SEQ ID NO: 66486 - DNA, 49 bp, Heterodera glycines; identical to SEQ ID NO: 51181

SEQ ID NO: 66487 - DNA, 764 bp, Heterodera glycines
atgtttgccccaaaatttttgcttgctttactggtctgtgttgcttttgccattggaacaaagcatggaaaaacggcacgcaaaatggcaaagaacaatgtggcaaaggacgagctcgaacaggtcattcattcattgggaggaaaacagaagagatttaggaccagaaatattggttaaaggttttttttggaagaaaaatggacacccaaattgagcatcaaaatttccctaaaataaaacataaaaattagggctaaattatttatttactttttgaattcagcataaaatttacacaaatccatggaaaggagttaacaaaaaactaataccgatttcctaaaaaagagcccccgggggctctatttttcaacccccctcaaaaggggaactctaatttagggggcggggggggggggggttatttctcgaccccactcaaaaggggggctttctttctcaaccccatcaaaagggaggctttattttagggggaggctctaattaagggggcgggggctttatttctcaattctcaacccccctcaaaagggggggggctttatttctcaaccctcttcaagggggggggggctaatttaaggggggggggctatatttctcaaccctcttcaagggaggggggctttattttagggaggggggctctaatttaggggaggggggggggagactaaaatgaatgaaccaccaatgaagatatttgaaaaatcgacgtattaggattgctttggaataaa

SEQ ID NO: 66488 - DNA, 536 bp, Heterodera glycines
atgcttttttgggcttctctcgccataactaagccacagaaagctccggtggcaccagcaatacaaaccccacagacaaatgttccgactcttgccaaagaaaatggaccagaaccgaaggaggccagtgaagacacttcaaaatcatcgcaggttgacaaaacaatcacagaaaacgaaaatccaaatccactctcaaatattgacaaatttctcctccaactggaatcatttcgaaaacaattcccccagtgcttcgataaatagttctgcagacctccaacaaatcgaaaaaaaaaatatctctacacaatttcctaaaaatttacccaaaaattttttctcaatttcctataaaaaccaatttccctttgcttaaaatttcaacaataatgtcacaactacccattgacctcatttcattaccaaatgtaaattgtcttctttcacttctacccatttgacctctcgtatttccacctcaagtgtaagcggcagcaatgcccttcttttggttatttttatttttgaataaa

SEQ ID NO: 66489 - DNA, 323 bp, Heterodera glycines
atgagcaaagcgatgaagtgtttattgatgaaatcagagaggaccttcagtcaactttcacaaatatatagtgcaaaaagaacaagtctttcggccgatcattcaaaaaagtaattcccctccaagtagttgtttttcttctaatttttcaaaattattcatttttcagtgggaattcaatcataattttaacaattaaattcgtaaaatattttaattttttggactaaatcagttaacaaattgcacttaaattttaatgaatttttgttttgtgcgtttttgaaatgataaatattgtgccaaattgaatcaaaattaaa

SEQ ID NO: 66490 - DNA, 347 bp, Heterodera glycines
atgtttagcgaatttgaggtcaattatttgcgcaatttggccaatcaaattgcccaaaacgcatatgtggcaaagccgctgacagtgcaaacaaacattcataatctgacaataacattggcaatttttcgaaaaatcattgccgagcttgaaactaatcccaatgtgttcatattagacagcctgaaaagtgacaaagaaattgcaacaaattttttgcatctttgcgtttcgctgttggacgccaaatttgaacactttcagaaccaagtgttggcacgtttaaacgaatttgaccggatccgaaagggcattttggacggctaagggcaaagctcaaaatccaa

SEQ ID NO: 66491 - DNA, 1484 bp, Heterodera glycines
atggacgaagaaaagaggaagcagcgccagaaaaggagaagaagaaatttctgggcacactcagctacaaattggaatatgactttgacaaaagcaatgtgaggagaaaatggggaattggaaattggttggaaaatgaaatggttaacggaaattgagtcgagttcagctgacggtgggcattgtaagtgccgaaagtctgccggcgatggatttgggcggcaccagcgacccttacgtcaaattgtttttgttaccggtaaaataaatttaaaaaatattatattttaccgtaattacccaaattcaggacaagaaaaagaagttccaaacaagggtaagacaacatttaaaagtgtatgtatattaaattaaaggtgcaaaggaagtcgctgaaccccgtgttcaacgagtcctttcaattcaaagtaattaattaacgaattaattggttaattagttttaaatggcatttttgtctttgttcaggtgcccttcaacgaaataaacagtcagactttggtgctcaatgtgttcgacttcggtctgaccagcaaaaagtcacaaaaacaattcgcttatgcattttcctcagatcggttcggcaaacatgaccaaatcggccaaatttcgattcccctcggcaaaatcgacttggccacgaccatagaaaagacggcaccaatcgaagcaccgccggtcggattaaaaataaagaaacggaaaatgaaagaaagacaataaagggacggccattcattagggagatttaattgaaacctaattagttaattaataatttggctaccgtatcaaattcatttgtggaaattctatttcaggaaaatcggctcggcgatgtttgtttggcattgcgttacgtgccaaacaaaaacaaactgacggtggttgtgatggagtgcaaaaacttgaaaaaaatggtaaaattggagggcgggtgactcattaaaagcaaacatttccaaatgattcaatcaattaattaactaattaccactttaggatgtgctcggcctttccggtccgtccctttttccgattttttgccattcttttcaaaatttcctttgtccccaaaagatccgtacgtcaaaatttatttgatggcacagaacaaacggttggagaagaagaaaacgaccatcaaaatgaagacattgaacccgtattacaacgaatcgttttcattcgaagtcagccccgaaaaaatgcaagtgagcgaaaaaaacgaaagaaattggcaaaaaggaaaagccatgccaacagcgaaaaagtgcccccctttccattgcagcgggtccatttgcatgtgattgtgtccgactacgacagagtgggctccaacgaaaggataggacacgtaaggaagggaagggaaggccacgatggtcgagacttctgaatttactcgagacagagatttgaccctcgagaaatcgaatctgtgactttttttgagtgag

SEQ ID NO: 66492 - DNA, 863 bp, Heterodera glycines
atgtttttatcaaatttattagctttttattcgtctgtattcccatttttacgaatgttttacatgttcaatattttgccagatgatttttggcgagacgcccttctatgccgagagtttggtggacacgtacggcaaaatcatgaaccacgaggagatgttcgagttcccggaggacatcgacatcagcgacgaggcaaaggacctgatctcgcggctgatttgtgcccgcgagacacggctcggcaaaaatgggctggccgacttccgggaccatccgttcttcgccgacatcgactgggagaacatccgaagcggtcggtaaaaacacagagaaaccaaaaaaaaaaaagcgtaattttctcgaacatataccggaccaataataactggaaaaaattgtaggggaaatttcaagtttttttttctggcgcttgcccccccccccaaagtttttaatattttaaaaaattgtgttcaaccggcgcaggtcgtccccccccccccctcccgccatttcgcttgtgaaatattgcaaattaagaatatttgcaaaaaaaaaattgttaggaatatttttccgtaagaaaatttcaagaaaaaaaatttgaaaaatttttcagcgattagtggaggcgcctttgcttttcctcaccccttaaattggcgtaaatttttaggcccaaaaagagtaatttttgaatacctatttttggaccaaagcaatttttttttaaaataattttaagaatctacaggaaatataattgtaatttttaaatttctcaagaaaaagggtatattttataacaaatcgttttttattctttttaaagagcaccttttctatttttttctaaaaa

SEQ ID NO: 66493 - DNA, 706 bp, Heterodera glycines
atggtagtgacctcagcattggatgatctgcagaggaaagcgcgtcttttggaaaatgaaatcgatgctcaacttatttctctgaacaagttcaatccttcagacggtggactcattatatatatttttaatttaatttcaattttataaactggaccgatttcatttaaaatttgtccttttgtttttgttgaattaaatgttttccttttcagctctttcgtcttactcttacaactcaaatcagacaaagggtcaaggcaaacgggcggtgttcgattcgttaacaactgacattgaaaataaactctcaaaattgagcgaaataaacgatgcggttcgttttgcagaaattatggtgaattttagactttcatttgcacttccctcttcagatgcgcgattgctttgagaatgatatggccgagttcagcaaaacttccgtccaacacattgtgcgacgacaccgcgacattctcagggattacagcacggaattcactcggacaacttcgaacatcggaaaccaactgcacaggttaaaatgcgattattcacttttttggattataaaattcagagaagaattaatggccatcgaatcggagtcatcggtgaataatcggtgcaaaccgacggactatttactaaaggaacacgaaagcataagcaggcattaattaacacattttgtattaacggatca

SEQ ID NO: 66494 - DNA, 47 bp, Heterodera glycines
atgagaattcatgcgagattttctggaaataagcttaatatggccta

SEQ ID NO: 66495 - DNA, 429 bp, Heterodera glycines
  unsure (1)..(429): unsure at all n locations
atgacgtttatttttagccataacgtgttttacgtgacattttacgcgaaaaagtgagaaattaaaaaatttaaaaaaataattaggtgccataaaggcaaaaaatttcgtaaaatctcataaaaaaacatcatttatggttttttagttgtttccttacatttaagccgattttgaaccaaaaaaacgaaactagaaaaaaaatttgaagtttcgactttttgttcgaattngngttnaaggttntaattgggtngaaatggatgtaagaatnggattntnngagngtgaaaannnntaaaatgantttaatttaagaaaaaaaatttgaaattttttngaaaggggggtggagtaataanantgttanntttttaaatttttgatgttatattttanttaantnantggaaaaaagtnatggttaaa

SEQ ID NO: 66496 - DNA, 222 bp, Heterodera glycines
tttacaaaaggttgaaatacggctcctaaaaatgcatgagggagaagaatgaacacacttttccgatttcaatttcacttttaacttttgttgtcaaatgtcaccaattaattttaattaaaattatttggtggtattaatctataattggcactttcatcgtcgtgtgagcattaacagatataatttcttattttttgccggttttctgtttttgtacgc

SEQ ID NO: 66497 - DNA, 1157 bp, Heterodera glycines
tttttaagccgtgataaacggcatttgaaataaaaatttgtttaaggatccctcggggattttcgatctgattgaggtggtcggcaacggcacttatgggcaagtttataaggcaaggaaaagggggaaaagcgaagaaaaaaggcacaaaattattaagggaaggcatttgaaaacgcaggcattagcagcaataaaaataatgaacataaacgaagacgaggaggaggagatcaaagcggaaataaacatgctcaaaaaggttgggagggaatcaaaaagaagggcccaaaaaagaggggaaatggctaaaaaaggaggaaaataaccaaaaaagaaaggaaaaatggcaaaaaaaagaggaaataaatggccaaataaagggggattaaatggcagagaaaagggggccaataattggcacattaagtgggctaatgggacggatgaacgtgcaactttttagtattcacatcacccaaacatcgccacttactacggcgccttcatcaagaagttgccctcctcaactggcaaacatgaccaactttggctcggttttctcgccccctccggcatttcagtctttccgttaagtgatggaattttgcggcagcggatcggtgaccgatctgatcaaatcgttcaaaggcggttatttgaaggaggaatggatcgcttacatttgcaaggaaatcctttcggtaggcccaattcttctctgaaggacatttccccctttaggggctaagccatctccacaaaaacaatgtgaggggggggggaagagagaaggggacgaggcgggagagatcggacaatgccattgcaggtgatccatcgggacataaaaggacagaacgttttgctgacggacactgccgaggtgaaattggtcgactttggagtcagcgcacagcttgacaggacagtgggcaaacggaacactttcatcggcacgccttattggatggtggggagggaggggaaagggatcgcatttctgggaaggatggcatgggatttggaggatggccactcgcaatgggttttaggcccccgaagtgatcgcttgtgacgagaatcccgagtccacctacgactcgcgcagtgacttaagggttgagacttcccatttgcaattggcaatctttcat

SEQ ID NO: 66498 - DNA, 631 bp, Heterodera glycines
atggccacactttgcgcaaaagaaccaaattggttggatgagactcaccagtgccgacgcagactctctattctcgttagtgacggagaaatgaaagcaagtgaaatgacggaatgtcgagccaagaaagccgggagcacaaatgcggaggacttggcggataatgaagaaaaaccaacacatacggagctgatacctctttatagttctgaacaacagaataacagcggaaaaatggacagcggtgggaatgtatttttttgaaaaaaggaccatccgtgttcaggtatttttgaatggaccgggagcgatggagaaaacggcggggcaacaactgcggatcgggaagaaaacaacgaaaaagaggacaccgacagtaactgtgagaaccatgccgacgacagtacgacgcgtagtcgcaaaaggtgtgagttctattacttacttattaactcgtttgaccttgtcatttaagtgcaattgaaaataagttgccgaactgcacagagaaagaagggagcacttttatacccaaaattgtcacgaacgatgaaatggattcaggcctagtagcagatatgtccccagctgcagaaaaacaccaacattttcagttgccgccatcacctga

SEQ ID NO: 66499 - DNA, 372 bp, Heterodera glycines
atgcctaaagcagccaaatcaaacgctgttttaaatcgtcactggatttcaaagttcccggaaggaacttattcaactgatggaaaaattaatccgggactttacaaattgattgatatcgccaaaattttgattggaggtcgggcgaaaattgataaagactgatattaaatatgatttttttttgcgtaaatacacttggtttttccaatttttagcacatatttttgcattttttaacacatatttaggccttttttttttggtttttagcacatattttgggtttttttatcacatattttattacatatttcaggatttttagcacataaaaatcccagccctatttattaacaaaaattcaataaa

SEQ ID NO: 66500 - DNA, 1294 bp, Heterodera glycines
atgttgatgaaggtattaatccatctcacagtcagaacaagaaatttaaaattggattacattaacacaaatttttaataatgtttacccattcatagataattaataggatacaattttcaggatgcgattgaaatagttttctctaaaactttttattatttcaatttattaccttttattatagaatagccaactatgcaaaacataatattatttattcataattatataatataaaattttttattcatttatttttaaaattttttaatattttaatatatattaattgttaacgtaaaagtttatatttaaaatataatatttattgtttttcaataaatactgagctgattatgcatttctaataaaacaaagaattgttccatataaaattttaccaaatttacaatttataaattggtgttagtagggaccgtttctttttatggttttgatgttcattttgtctaaacattattaatgtatttgtttccttcttcataaaaaaattataaattttaattcttcaatttaaatccttgtccaagttaccgcttaattttccccatttatttgccccaattatgaattgtttttttttaccaataaaaatctgataaggtttgttttattttatttgtggcatcactgctgggtaaattataatatttatgattttgtattcttaaaattatatttttgttttatttcataaattatttattccttttctatttgctttaacatataaatagcattagtgccattgttataatataaataatttaaattaattattatgtgtgtttcggccctaaaccgtatacacacaaagccacagcaatcaagcaaagcaaataaattttattaagcaaaataaatataatttatttatattggtttatttatttaagttaaaattttttaaactaattttatttgaatatgtttaatcagttttataatttgttaaatgttatttaattccctaaaaacctttaaaactgctaaaaccgtattatccactctcatcggagctgccggaggggcctcccaacgggacaacacggcacggcattccctctgtcattgccctgccaaatcccacgttcataaaatctgttttcaggatgcaaacgggaagcagaaagaaatccacaaagacgaagaaaaccttccccttatcctgctatattgcttagccaatggaaaacgtttagacttgtacgtgtgtaactaatttacacagaataatgcaaatgttggagccttgcaagctcaaaataaa

SEQ ID NO: 66501 - DNA, 4043 bp, Heterodera glycines
  unsure (1)..(4043): unsure at all n locations
aaccaaccnttttgttctcattgcaaagatttcatctgggggactgaacaaacaaggctttcagtgccaagtgtgcactttggtgggtcaaaacgcataattaattaataacggagtcaaatgccaatcagcggggaatggttaaaaggcgaacggacactttaaaaagaataaatcagcagcaattaactaattaatgcgccaaatctaagggaattaattccttttggattttccaataatcatttttcttaatcactccttctattttctctgttcgtctcgtccattttcctctctttttccatgccttttatccctcccctcccttttttccccttttctcaggtcgtccataagcgatgccatgagtttgtcagtttcgcgtgtcccggcgcggacaaaggggtggacagtgacgtgagtttggagtgggaaggagcttaactaattttataattattataattcgaaattaaggacccacgacagcagcaccgatgggaggtgatcggattggatttgttgaagctgatgacccactcactcattgacattttgcccctcaggccaccacttattcgtcgcccaccttttgcgaccattgcggctctttgctttacgggctcattcaccagggcatgaagtgccaatgctgctacacctctggtcagtgccaaattgcccttcacaaaaaagctcgcacaattaggcgcatttcagttcatcatcgatgtgtcaaatacgtgccgaatatgtgcggcatggatcacacggagaagagggggcggatcgaccttggcactttcattcaggtgaaatgatatcgggggaaagaggacacaatgccaaagcgaaattcccattccaaggatggtgttcttcacatacacattcgagaagtgtgttgttgggttgacaatacattttttgctgataatatggtcagaaattcaggcacggaatttgattccgatggatcccaacggactttcggacccttatgtgaagctgaagttgatcccattcgaagatgagcagggaaaggccaagcaaaaaacgaggacgataaaagcgacgctgaacccaatttgggatgaacatttccaattgtgaggagccgatggcttaaagtggtttaatgccgtgggattgtcaatcagtgcccttcagcaagttggagccgtccgacaaggaccgaagactgtcggtggaagtgtgggattgggaccggacgagccgcaacgacttcatgggctcactctcattcggtattagcgaactgatcaaagagccgatgaacggatggttcaagcttttgaacgacgaggagggtccgtttcctttgcctttctcttccgccgtcacttcgctcactttggcaatttttcttccttcaggcgaatattataacattccgattccgcctgaggacgagaaggacattgagcggctgcagaagaaaatggccgatctgcacggacaacggaagggcgcacttggcgaagagggacgagccaaatcagtgacgaaacaacggcaaagtgcgacggcactcgagaaccgagtccagcgacacaaagaagtggtgaaggcggctgacttcaatttcatcactgtgctggggaagggatcatttggaaaggtgagatgcgatggaaagagcaaaatgatctgatcaggcggtctttcgaactaatcaggaggaatgacgccacctgatcagatattctttcgaaccgctgttttgatcaggcaaattgccatcttattctgatcagactatgatcatttcccttgtcaactatgcttttcccttaggtacttcttggggagcacaagcacttgaaagaactgttcgccatcaaaattctcaagaaggttttatcgcaaaacttccatttatctttccaatctttgactctcttcccaggacgtgatcatccaagacgacgacgtggagtgcacaatggtggagaagagagtgctggcactgcccgacaagcctccctttttgttggcactccattcctgcttccaaacaatggtcttccaatggcatttccgtcctccgtgccattgtttgattccccccgcccattccttttaggatcgtctttattttgtgatggaatttgtcaacgggggtgatctgatgtatcagatccagcaggtgggcaagttcaaggagccggtcgccgtgttttactctgctgagatcgcctgcggattgttctacctgcattccaagggcatcatctacagggacttgaagctggacaacgtgatgttggagagggacggacacatcaaaatcaccgactttggcatgtgtaaggagggcattcagggcgacaccaccaccaaaacattctgtggcactccggattacatcgcaccggaggtcgctgcaattggcactttttttaaatcaaaatggcattatgctgcaccctttcagataattctctatcaaccgtacggaaaatctgtcgattggtgggcttacggcgtccttctgttcgaaatgctcgctggacaacgttagtaattccattcgattggcgggcgctataattttggctttaagcgccgtttgacggggaggacgaggacgaattgttcacagcgatcaccgaacacaatggtaagtctgactgatctgatcagataattgatcattatgagcatttgattggccattttcagtctcttaccccaaatcgatgtcaaaggaatcggtgctgatttgtaaaggatttctgagcaaagcgccctccaaaaggttggggtgcagcgcggacggagaacggcaagtcaaagtgagttggcaaagcttaaaagcaattcacatcggttttgaactgattgtttggcattccgtcaaaggagcattgctttttccgtcggatcgattggcacaaaatcgaaactcgccaagtgcagccgccgttcaagcctaaaattgtgcgtttttcccaatgattcaattttttcgttcgcttttcgtcccgtttttcgtccgttcgttcattcgttttgtccgcattttcagtctaacaaattcgccaccgaaaatttcgacccgctttttctgcgccttccgcttaaattgacgccgcccgaatgggacattttggaggggatgaaaggcgacgagttcattttgttcgaccattttaattcgcaatatttcgctgaagcagcgagtgccgagagcggagcttatgcggaggaaacgctgcagagggactgcagccgaaacggcgacgacgcgatcagcttgcaacttccgatcactcccgaccattgagtctcggtttcttttcgttaagccaaccaagaatgaattagccccccccttttccatcggttttatagacttttactgttttcctcaattttgtgtttcgatggcactttacttgctataattcattcacttttgcctcactttttgtgtgtccttgccaattttgttttttttctccttccgctattcccaatccctcccctttctctctctctctctctctctctttctctctcgctctctctctctctttctctctcgctctcttctctcctctccttccccatctttctctctcttcccctctgtcatttcccttcattgtacattcaaagtcaaatttatacgtcataattcttaataaaatgagttttgctgtcttaattgcctaattaagcatccttttttgtaatttgtgcctttttggttctcattttcggcattggcgttgtcttttcgtcgctctgttcgatgttcgctttccttttttgtgttttattttgcccttttttctctcagcgatccgccgacgacacttccaatttcgactccgaattcactggcgaagcgcccaaattgacgccggtcgaccgattgttcctaatgaatttggaccaggtcagtggccaatgttcgcttttgcctctcattctctgattattcttttgcctgccttcagaacgaattcgaagggttcacttttgtcaacgcggaatttacgccccagggc

SEQ ID NO: 66502 - DNA, 600 bp, Heterodera glycines
atgttggagttgctgaaccaactcgacggattccaacccaacgacgacatcaaagtggagtggtggagcaagccaatcaattcacattcattttgttttcatttaacgcaggtcattgctgcgacaaatcgtgttgatgtgctcgacccggcccttcttcgctccggacgttttgaccgcaaaatcgaattcccagcaccaaatgagaagggcagggaacaaattcttcgcattcattcgcgccggatgaacgtcgagtcggtgacagaattttaggaaaacaaattattcctcgttttcagcaaaaatgtcaactttgttgagctgtcgcgctgcattgaggacttcaatggagcacaatgtcgagcagtttgtgtggaagcggtgagcggataaacattttttgaggatatgcgtcagcttatctcatttttacagggaatggttgcacttcgtcgtgactccactaaaattctgcatgaggatttcatggacggaattttggaggtaattaataacaatttgagaaattttggaggaataagccaaaattttcaggtgcaaggcttgaagaagaataatctggtgtattatggctga

SEQ ID NO: 66503 - DNA, 716 bp, Heterodera glycines
atgcagtacaatgcttttaagccccgtcgtgaggcgggccagttccaaaattttgtaccacattttactgtggaaagtccaagtaccttattggacaactacgtgtcaatgagcacagtcgcctttggccagttgtggaacggaaaaatgggaatatcagatggggtgcgctcttttctaaaaattcctcttttcgtctaaccatccctcccttttgtgcactatttcgtttcaaaattgaatcatttttttttgtcttttgaaataaattgtgaaaaatatacgaaaattattttcggttttaattatgctgtacaatgcttttaagccccgcctgcggcggctccccttttgtgcactattttagtttttaaaattggttccggactttttggctttttgaaataaattgtgaaaaatatacgaaaattattttagcttttaattattctgtacaatgcttttaagccccgccgtgaggcgggacagttccaaaattttgtaccacattttactgtggaaagtccaagtaccttattggacaactacgtgtcaatgagcacagtcgcctttggccagttgtggaacggaaaaatgggaatatcagatggggtgcgctcttttctaaaaattcctcttttcgtctaaccatccctcccttttgtgcactatttcgtttcaaaattgaatcatttttttttgtcttttgaaataaa

SEQ ID NO: 66504 - DNA, 529 bp, Heterodera glycines
gcttaaaagcattgtacagcgtaattaaaagctgatataattttcgtatatttttcacaatttatttcaaaaagccaaaaagtccggaaccaattttaaaaactaaaatagtgcacaaaaggggagccgccgcacggcggggcttaaaagcattgtacagcataattaaaaccgaaaataattttcgtatatttttcacaatttatttcaaaagacaaaaaaaaatgattcaattttgaaacgaaatagtgcacaaaagggagggatggttagacgaaaagaggaatttttagaaaagagcgcaccccatctgatattcccatttttccgttccacaactggccaaaggcgactgtgctcattgacacgtagttgtccaataaggtacttggactttccacagtaaaatgtggtacaaaattttggaactgtcccgcctcacggcggggcttaaaagcattgtacagaataattaaaagctaaaataattttcgtatatttttcacaatttatttcaaaaagccaaaaa

SEQ ID NO: 66505 - DNA, 51 bp, Heterodera glycines
ccattatcccatcaatttcccctgtaattcttcggataaataatggcgaaa

SEQ ID NO: 66506 - DNA, 950 bp, Heterodera glycines
atgatggtgatgcccaccccgttgatggaggagctgtacgagttgctgttgaccacagagacgacagtgatcgaagcgttgaagcccggcacttcaatgtccgcagcttacgaagcaggcattcggcattttcgcagcaaaaagcccgactttctgcaataccttgtcaaaaatttcgggtaactatttttgttgacaaatattatattttcacttgaattgaaattttgtttattttcagttttgtcactggcattgagtttcgtgagtcccaatttttgatcaacgaccgttgcgcgcacaaagtgcatccgaacatggcatttgtggtggcggtgggccttcaaaattttcccaaccaatcgacggaaaacggaaagaaaatgatgtccattttcctcagcgacaccattctgatctgcgaagtttgtcttttcctatgacccaacattttatatgaattttaaccgtgataagcccagagaagcattccaattaaagcacataaaaatggggaaaaactttttggtcgaccctttttaaaatttgcctgtcctatttataggaaagagaatttgcacaccgacatttcaggacggacccaacgatgtgctgacaatggtggccaagagccgactgcgctccaacgccattcgctttcgggaggacgagcagcagcagcaacaccaccagcagcagcagaaggcgaacagagacactcaagaaatggccaacggcgggcgcaacaaacggtcggtggtgttgcaggaacaaacgcgggtaaaatatgcaaaacaaggcataattatgattggtaatttgcataaattaaagcacaaacaaacaaatgaagagaagcggaaagagcgccagagggaattggccgagcaactgaacagagaagcgcgggagcgtctctcaatcaaatcgggcggagtggaggcacaaaa

SEQ ID NO: 66507 - DNA, 89 bp, Heterodera glycines
acatttacgaaaatgccgacactttgatcgaatcggagggatttttgcaaattgaccaaaaaatgttgtgcgaaattttggaacgcgac

SEQ ID NO: 66508 - DNA, 832 bp, Heterodera glycines
  unsure (1)..(832): unsure at all n locations
atgtcctcccgcgcttcggacgccatccaggagttacgaagaatggtcagtgatcagaaccgcatcatcttcaacttgcggtcgcagttgatagatcaaagggcggtagttttacaaaatcttgcgcgcatcgaacaattggaatgcttcacatcgaatgtaatttttattttaaaccccggggcagtttaaattttaaaaggtgagatgttgtaatgcacattttcgcaaatgctaatttttttaaatataaaaaataattattttgttaaggaccgtgctgggcgcggaaatttccgcctccgctacagtccaatggcagctgttgagctcactctactcgggcaacgtctcgaggatagagctcgtcgccatcgaatggcgataggcgcaatagcatcaacttccacttcgaatggagccaatggggccgggggctcggctgagggagacgcagcaaacaatgagaacggttggttaaaaaaataagttaatcaaagaaataaattaaaaaaattaaaaattattttaaaaaataaggttaaccaaaataaataaacaaagcaattcagacttttcaactccacgtacttcacgtgtaccgttgtccgccataagtataacatcaataatctcatatatttgtatctaatgacaaaaactttttagataatgtgccagctgatcaaaatgcgcatggaggaaatgcttcgggtgatggaaatggtaaataattttaaaataactcaatttcagtctgaaaatttcagtcccctcgtttggngcaacgattgaacgcacatggagagatctcgtcgacgttgctgcatga

SEQ ID NO: 66509 - DNA, 168 bp, Heterodera glycines
atgcattggccgagaaagtgtcggaaactgaggccaaattggaaaaacaaattgaaaatggcaagtattctggcgatgtgtctgctgttcgcagcggtgactttggcaacttcaaatggcagcgaagaaataattgccgacgcaaataacggagacttggcgatgact

SEQ ID NO: 66510 - DNA, 369 bp, Heterodera glycines
atgccattttttgtcacaggtggtggcaatttggcattaatgacaatgttgacatcaaacagatggaaaaagaaatcgaagatggtaaaaaatgcattaatatgcacttttttattaattattttctgctcttttctaatctgtaggaatgcgcgagaatcgaaatgcgatggccgagaaaatgtcgggaattgaggccaaattggaaaaacaaatttaaaacggtaaaaattcatttaattgaatttttatattttattttaggaatgcgcgaaacccaaactttgttgtccaccaaattggaaaaccaaattgaaaatggcaagtatttttatttaaaacataaattaatttatttaattaaataaa

SEQ ID NO: 66511 - DNA, 504 bp, Heterodera glycines; identical to SEQ ID NO: 60631

SEQ ID NO: 66512 - DNA, 324 bp, Heterodera glycines
acaaaaaaatcgattttttcaagtgtccgtatagggtactcaaacaattatggcgagcaaaaatccaacgcagaattaaagtacaggctatagggaagctattcccgaaggattcggtctctccataaatatgggcgcatcggttcagggggactaccccgaaaacaaaaaaatcgattttttcaagtgtccgtttggggtactcaaacaattatcaggagcataaatccaacgcagaattaaagtacaggctatagggaagctattcccgaaggattcggtctccccataaatctgggcgcatcggttcagggggactgcccc

SEQ ID NO: 66513 - DNA, 281 bp, Heterodera glycines
atgccgacaatgaacaccaaggtgtacgagcagaaccacgcgctgtgcttctccaccgagccggtcaagcaatgcccgcgcggcaccacaacgaacggcggcgaagaagccgatcagcagcttagcggggaaaagccgaagcgtgtccactttgtgtgcatggaccgcgcggagtcggaggcgcgccgtctgatgcgccaactgcggcgcggacaacgctcggtcaaagtcagcagcgcccagggcgagtccttctcggaaatgatggacgagccgcagca

SEQ ID NO: 66514 - DNA, 1615 bp, Heterodera glycines
atgttattcttattccctttgccccttattttgcttttgctcgtggccattgttttggtcagccagtgctgcggcggttgtgtgaaaaaggtgtgttcagaaaagaactttcgttttatcaatttaaaaatcccttttccctttttgcagaaaggcggcagcaaaacggacaagccgaccgaacaaggagaaggaccagcacctgaaggcggcagcaaagaacagccaactgacaagggagcaacagcagcaaccggcgacagcaaaacaaagacgaggccagggccaacgccgtgtcaagaaggaggaacgacttccaaaggcgacagcaaaacggacaagccaaaggcccaggaagaaggaacttcaaaaggcggcagcatcaacaccaagaacgcgccaaacgctcaggtagatgaagcaacctgaaaaggcggcagagcatcaataacccaacaaattcccaggtcggcccgacagcatctcgacgtccaaaacaaacatcaggcggcagccaaatggacaagctgaaagcccaggaagaaggaacttcaaaaggcggcagcagcagcaccaagaacgcgccgaatgccatggtagatgaagcaacttcaaaaggcggcagagcatcaataacctaacaaattcccaggtctcaacgaacgcgccgagtattgccaaaggaggaggaacgacttccaaaggcgacagcaaaacggacaagccaaaggacaagaaagaagcaacatcaaaaggcggcagcagcagcaccaagaacgcgccgaatgccatggtagatgaagcaacttcaaaaggcggcagagcataaataacccaacaaattcccaggtcacaacgaacgcgccgagtattgccaaaggaggaggaacgacttccaaaggcgacagcaaaacggacaagccaaaggcccaggaagaaggaacttcaaaaggcggcagcatcaacaccaagaacgcgccaaatgctcaggtagatgaagcaacctgaaaaggcggcagagcatcaataacccaacaaattcccaggtcggcccgacagcatctcgacgtccaaaacaaacatcaggcggcagccaaatggacaagctgaaagcccaggaagaaggaacttcaaaaggcggcagcagcagcaccaagaacgcgccgaatgccatggtagatgaagcaacttcaaaaggcggcagagcatcaataacctaacaaattcccaggtctcaacgaacgcgccgagtattgccaaaggaggaggaacgacttccaaaggcgacagcaaaacggacaagccaaaggacaagaaagaagcaacatcaaaaggcggcagcagcaccaccaataacgcgccgaatgccatggtagatgaagcaacttcaaaaatgcggcagagcatcaataacctaacaaattcccaggtctcaacgaacgcgccgagtattgccaaaggaggaggaacgacttccaaaggcgacagcaaaacggacaagctgaaagcccaggaagaaggaacttcaaaaggcggcagcagcagcaccaagaacgcgccgaatgccatggtagatgaagcaacttcaaaaggcggcagagcatcaataacctaa

SEQ ID NO: 66515 - DNA, 85 bp, Heterodera glycines
gtttttttggactcaaatcggcaaaatgactttgacacacattcgcttttgatcagattgtatattctgtttcaaattaaggaaa

SEQ ID NO: 66516 - DNA, 170 bp, Heterodera glycines
  unsure (1)..(170): unsure at all n locations
atgtgcctgaatcgtgtggtattggggcctgaaattacgcgaaggccggcggcgatgccattctgggccgatttggcccagggcaataatgacaacagagacggggccaactggngagggagcgcggcatttcgaacattggctaagggagggggagtagagcccataag

SEQ ID NO: 66517 - DNA, 879 bp, Heterodera glycines
atgtcttctctgctgctctccatcttctcaatggtctttttagtctgttgccatgcaatgccaagtaaattcaaataaataaaaaaatgtcaaattttaaatatttaaaccattcaatgtaaatgtttatttttccaaaaaggtatttaacaaaattatttattacatttaaattccacagaattcccgtgctgcccgggcagtcagcaagtggttgctgtgatgtccaaatacattgacactttctctgctgctgatgtggacaaatctacagtatgctcaaccgcgaaaaatactgtggatggaataaaaagtgatttgttctctcgcggcggatgcccaagcggaggagaagcacaaattgtgggcgaaatcgatcgacagctgaagagtaattaaacaaatttcgaaaataattaaagaaaatttttggagagatgtgaattttacgagagtataattaatttaaaaatattgactaaattaactcattaagacattgcaaaaatggagatcaattatgaggacgagtgtccatacaatttgggctttgcccgtgccatgttcgacttggccgctgctgctgctggccatgcgggcaccgacacaaaatggcaaaatatgaaaggacaatttgaacaagaaagccaagcaatcaaagcaattggtcaagaattgaacattacagttacggatgtgcatgttggacacccaagcaaaggcaaacaaaaaaatttaagtaaatatttgtttaaaatgatttccaaggattttccgcgcatcaaaatgtgccaagtccaagccatgtggttgccaaccctggccaaaagagttcggttggccatggaaaggatggcgaaccgttgtcatctgatttag

SEQ ID NO: 66518 - DNA, 284 bp, Heterodera glycines
  unsure (1)..(284): unsure at all n locations
atgacttttttcgtacatttctttcactttttaagaaaatgccgaaaaattgccatctgtgaaataccaattcaaatacggtatcaaaataagttatggcccaattgttttaaaatttcgaaagttttttgaaaataatttttatgattgtttaatttaattatttatgcagtttttgtcaaaattggttgcccccatcagtttttgtcttatgattttttttataatanataaacggaaaaaggatgacctaatatccctattaattgnngttgtcataacta

SEQ ID NO: 66519 - DNA, 2172 bp, Heterodera glycines
atgttttataattccaccaaaaaatgtcaagttgtgccaacaattggggagaatgtgcgcccaattgcgttcaatgaattgcatgccaatgccaatgccttcccatttggccatcgcagtgccaatgtggcaaaaatggcgcaaatgggaaaaagtgagcagaaacattttatctccgaagaatggcaaattagtaaaatccgttttaattgtgctgtttcagcaataatggcaccatttgctccgttctccgagcactccaaacgaaaattgagcacaaattcagcagcagcagctgaagaagcgaatgggacaaaggcggggacggcgattgatccgcgggaatatccgcaggcaccgcggcgaaatgtggcggataattaccatggcattgaagtgatctttatacattaatttaatatataaattttttaaatttttcattttatattttaaattttcatttttttcttaattattttatttcctttctgcttttctcatttttcaggtccccgacccttaccgcgccctggagaacccggacgcaaatgtgacacggcaatttgtcagccaactcaaccaaatttcgcagcctttcctcgaggccagtccattgcggcaaaaaatgaatcaaacgttcgtttcgttttaaataattcgaattaaaatttttttttttttgccatttgaatttgccttaaatgatggcttaaaaattctaaaaattaaaatataaagatgcgatgcccttctcgtttttctttcaattcttctcaattcagcctcaccaacatgtggaattacgcagaattcttcaagccaagcttccatggcgatttgttctattattaccgtaacagcggcttacagagtagggaaaacggaaactgttaatcaattctctttatatttgaaatgccttttgtgatttttgaaggaatttagtgccctaaaagtggaaaatgttttctttctcttttaaggccaaagtgtgctttatcagtccaattccatggacgagccaggcaaagtgtttctggacccgaacacgctttccaaggacggcacgacggcagtgaccatggaaagcttctcgaaggacggcacagtgttcgcatacggtatctcagaaaagggcagcgatgcggctactgtgaaggtgggccaaacgaagcatttttgggttcattcacagatttttagtttaaacaaagcaatggtgatgagctgcccgatcaaattgctgacgtcagattttcgggactttcatggctcagcgacggcacgggactgttttattcggtaatggcacggtacaatttaataaattgttaaaaaagatttaaattttaaaatggcctctttcagaaatatttaaaacaattggagacggaggaattcaatttccattcgcttttcttccacaaaatgggcaccgactcggagaaggacattttggtggtaagaacggccgacaattttaatttgtcagttgattccatccgatgacgttaaggtgcaaggacgcaatcagtcggatttgctgatgtgattttaattatttttaattcattttaattctttttttagctatggccaagtgtcatcggatggtcgctttttgtttgtgtcttttgggggtaatgcgaacgaccaaatgttttactgcgatctgccggctgacaacaaccgaatcaccggtccactgaagatgaagccgctgtttgaccaatttgacgcggattatgaagtgagcaaaagttgttccaagtacatacatacagtatagctgtgatggtgtatattgtaaatgaaattatggtaaataaaataccaatcacttttttagaatcaattaaaacacaaaacagcacaatggtcaattcaatttttgaattaattaatcacttaattaatttgacatacaaatggacagatggtggactcagacgaacactcggcactgattttcaccaacaaagatgcgccaatgtacaaattgatcagagtgaatctcgagggcagcacgacacagaagccgcaagaggtcataaaggaggacccaaagcgaagaatgcgatttgcttaccccgtgaacaaagacaaactgttggtttgctacatggacaatgtgaaggtgctaatgaccaggggaccattattaagtaa

SEQ ID NO: 66520 - DNA, 103 bp, Heterodera glycines
gcgtgatgaaccaaaacgtggtggtggcggatcccaatttggagaattcggagcagctggactcgatggaaatgagacggcgccttttgaacccgaacaatga

SEQ ID NO: 66521 - DNA, 165 bp, Heterodera glycines
ttcattatttatttgttttttgcataattaattcataaatatttttttcagaaactgctctgaaacgcaccaaattttatttgcaagttattttaggcactcagatgctttcactatcaaaaagggagatgaataaaaaatctaaaaatttttaattgccttttt

SEQ ID NO: 66522 - DNA, 1222 bp, Heterodera glycines
atgatattaaaattgaaagctccaattctgctgtattgttttgttcaatgtttaaggtgacaatctttaaattcttaatgatcgttgttatttttttttaaattagtgctgtcaaagtggacaatgccgagcaatccgaccaaccaactggcgattcttcctccggacaattcccaatttcgtatcctccaataaaatatgaaaacgatttggcctatgtggagaaaccgagtggcaacgagcgttgtctattctacgcggaaggactttctgtcgtcgtttttgccactaaaaaaagtcaatcggcgtgggcggactatcgctctgacaccaaagaaagtccgaagtataccgcgtcaattgaatgccaaggcaatatgaatgtgggcagcagctttgagtaatttacagttattgtaattcatgaatccataattctttaattttttcagtgtctatttgaaaattgacggcaaagcggaaggagttgtgagagctgacattggaaaaaaggacgcaaaaagtgtcttcactgtcgaaggagccgaatttatgtgtgtttcttctcttgtggtggtgacgctgtcccctccttcagactcaacttcaacgtcacacaagtcggcttttggcaattggttggtgccaccgtggaaagaattgaagtgaaaggctcttcggatttcctgaacaaagtaattttgttattatttttttattttttttataatattttaacaattcagaatttgaatgtcgacaaaaaatggactttggagccttcagttgttccatccacaaacattaacggcttcaaagattacagctttgcttgtggtcagaccaacccgatagtgtgggccctaaaggactcaaatgattacgcagtcggaattacgctgaacaatgtgcaggtagaaagaaagaaagaccatcaattataaaaaaaaacttcataaatccactcctttcattacataaattcttttcaatttatcttgttttggcctgtcaaaacggttggcagaaattaaggctctattgcagttcccacgagtataaaaaaaggcacgaccataaaataagttagcaatttaatgcaccatcactttttctagaagcatctcaattaaacattattgaaatcattcactagctctaagggtactttacagcacccgtttttaccaatttcgaacccctgacccgaactcgaacaaaa

SEQ ID NO: 66523 - DNA, 1475 bp, Heterodera glycines
accgggctcgtcgaacaatgggttttggccaagaccggtcaacaatgcattgccactcggaaccaatcgacagcagcgttcgtttttcgatgactttttgaaatgcccttttttaaacatttgctttttcactattactataataataccccattttctagtcactgcttcgtcttttgccaactccgcccaagtccgaccgtcgactgctgccaaaacgagcaatgttccattcaatgcttcggttgggtcgattgatacctccgttgggtcaacagctccgggtttagtgattcaagaggactattcaatggacgaagccgaaagtgacaatgatgttggttttgattaatttgaaaaccattattttatttatatttatttgaaaattaaaaaaaaattggctatgatgacactttttggtagcgatttgtccgaactgtttgtgattttttgtttgtcagttatgcggacaaaaggccgagtctgagccaaaatccaatttttatttgatgaatatgccaattttttcgctttttaggcccgtcttcacaccgattcagcaaaaaccgacccaatgttaaagacggcttttgcgtccggtcatcagaatggaatcccggaacaaccaccgcttgatttgttggagccggacaacgaacctttgtcattgcaccaagtcaaactctcaaatatggacagacgtgctttcgattcggcaccaaacaaagaatttactccccacgaattggaattgcgtccccatttgtccttcttggaacggtaccgagaggacccaaattcgaactcatggtgagacatgaaataaaaaaggacaattacattatttatttgtttatttcatttagcatccgtttggaaaatgttcccaaaatggtttacgcggaacaactcgccgaatttctcggtgtccaattcgatgcgccatatgaaaacattgcgcggatgcaaaacggcgtcctttacattaatttggtaagcattttctcccatttggcaaaatttttctcttaaaatgattaattttcttaggcggttttttggttgccgatttcggacatttttttataaaaactaaattaagtattgtaaattttaagccaaacgaagcaatggccacaaaagcggcaatacggaacatgaacattctcaacggacatcaaattgccatcacgcagctgaaacgggcggagatggccgacgcaatccgtcagaatatgataatcatccgggaaatggtgggtgaattagtttcccttttttccatttcaattttcgttccttttcagtaccgggtttccgtcgttgcgcgtggcttccctttggtcactcagctgaacgaagttgttgcgctgttcgagcgctttaatttgaacaaagacggggccgagaagtgtacggtgaagccgagcgacaccgtctcaacatttcttctcacatttgcatcttcgcag

SEQ ID NO: 66524 - DNA, 3935 bp, Heterodera glycines
atggaacaagtgattgccgatgcacaagctctcgccggtgctgcaaaacagcaaagtgcaccaagtggcgctgttcaacatttggggcagcaacaaacggccggagtgaaattcaccgcagatgataagtcagcgaaactagcagaccaatcggccaaggatggagcacaatggaaatttcaaagtgaaggtcattttcggtctttgggcgtgggggttgggaatgaagaatttcgaaattgtcagaaataaggaaaaccctctctcgccgtgcaccgcgaggtattcattgaactgccaaccacaccctctttttgtcatttggatctaatctcggagaaaaaaaataggcaacatctcataaagtgttgaaaattaatctgcctttttgcgtacccacaattagaattaaaatcgctcgcactcgccgtttttgtagacataaaacttgttaaaagattttgaatattcgaaccttctgactcaattcccgatacgaatttttgacattcaatcaaaatgtctcatgtctgcgtctccataagtgaagcgctccttctccttactcgccatttttactgacgaattaatattattttgacactcctttcctatggtacgaactttacccttggatttttaaatcaatacattgttgaatttaagtacctaagatttttctaaatagaaaaagtaaatactgtaccaataattgctggtttgtcgccccccccccccccccctcccagttgatatacaactctcatttaaaagatgaaaacatttctggggcttttcggggtagatttctgatgcgagatttaacaaataaaacatcaattactgtgtcagtttcgtggtcaacgacacggataagccacggaaacacgttttcacaatttcttaatcaaaaacagggggagggagaacaaaacacaatgttattccaaaaaatgtattgtacaatcagccggccacctatcatttggcacatcgtgtccttaagcgtaatacgctttttaaatttaaacgacattattagtcaaattcaaatgctactccatccaaagcatcggagttaatttactttcaatgcacacctttccccaccttgaacattgtcttaaatgtatgtaaattttaatgtttgttaacgcataaattttgacatgccttaatatataattaagtaccagacatctcccatttgttcttttctgtccttcgctttatgccttatttgtaagctacgcgccaaacggcatgcttatttgagcatgacagaatttttgtcaattgtggtataatagccaaaagcgaatggcttacatatggttaattaatgttccacaaaaaatgttaaatgattttacgtagttactgattccactgaacatatgatcagcgttttcgtattcaccgatcacatgacagccatttaagttgtcgaacgacaaaatcaaaattgtaacagacaaaaattacaaaaacaatagaaaattgaatatttctgttcaattcagttatgtaggagttcgttcttttttacattttcacattatttgtcttcagttgcgcttcctgctgtatcttcttcgccttccatttccacggcttttgctccacaacaaaccattgccccgttgtatcaacaattgtttggcggtgactcgtggaagaatcctcaacttcaactgccacaaaacgtgccatctcaacaattagctgcttcagggcaggggtcgcactcgcaattgctgttccatgagcaggctgctccgcccgtttctcagtcggcacccgtcccggtctttcccggctccactcagccgtcttttggcggagtccctccgtcgtcgttgggccgtttactcggttcaccaagcaaaacacaacagcaattgccaaacataccgcaacagcctccgggatttcctcctcctcttaacgtcccttcacagcctttgcaagcggctggtgttgcccaacaatcgcaggtccttttttgatcaaaattcaatttttgtttttacatgatacagaaaagcagcaggaagataataatattgtcatgttttgaatacagctgaagacattatttttctcacaaaatttttttttgaaatttaaatgataatttggcataaagaccgactgaattactaactgagtaccgggcgccgtttattgaaaaatactggaaatgtataaaaaatggtagatattctcattgttagacaattcgctcagctgactccccattgaaccgatccttattttttattcgttgaccaaagagaattaggtatgtaatgtttattaccttaaaaagttttaaaaaaatcacaagaattgggacttttcgccgtttagcctgtgactttttcaaattttagccacgtccttcgaatccatcttatgccggtgatgggtttttcaaccagcaacctgcggcaggctatcacaaccaacgttttcagactcctaatcagccaattcaagtttataaccagcaacaaaatagaccaacaggacaaggtggggaaatgaaaggccgatatttgcttcatcataattcctttgcagctccttctcatcatcaagctcagtttggcatgccaaatcaggggccaattgcaggacaatatcgtccgtctcgaccgccatttggacgaagaggtggcgcacacggaggagccgttcaacagcaatttggtggaccaacgcatggagttggaggatttcctaacgcctattctgagtcgaaaccgatgggcggagctcattatcagcaacaacagcactttcaaccccgacaaactcattatcagcaacgttttgaaggagggattaatggaccaaaacgaaaacggagcaggtaattgctttttttaattgacttttgcagtttacaaaatacaaaatttcaggtcaccatcgggtccgatggacccaagaaagcgtttttatcagggaccatcagctcatgggaatgaattcaagccatccgcgcaattttctccaaattctgccgcttttcaatcggagcctttggtgaaggaacgcgtttgtgttcaattgtcaaatgtgccatacaaagccacctttttcgacgtgaaacagtaagtgcattatatacatgctacattatttactgcaaaaaatttaaaggtatttatcaaccacgaatgctgaatgtgtgaaagttacccgcgtctatcagcctgatcgaaattattccgaccgttggattgttgaatttgacaacgagagggacgccagatcagtgatcagataccatggcgagattaataaccgaacaattcggtgagtgaaaaaacagtgaagctttttggcttttcagacctttttgcacactttaaatttcttccccacgagtatatccacttaaaatttctaggacggaacgaataacggcacggaaagcggacgagcaatacgcggtcatggagccggacgataaggacaggggagacaaaaggtcttcagacgatcccaacagcagaagagagcgcggacgaggggagagggcggacagagacaggccaagggagagggagcgcgacagagggaccaatcggagcagatccccgcgggggcgaaacggacgaggacggtcaaacgaccaaagccgatcggagaagggggctgctacctcatcaacatcatcatcaacggcagcagcaacaacgacagtttgggcaaaggaggagcggacgaagccgagtgatgagaagaaagaggaagagactgacagagacaaacaagccaaggaacaacagcagagacaacgcccagcccaacagcagcaaccgccggcagcggactcggccaatccgatgggcccactgaatttggtttcaaatgcagctgtttttggagcgttttcatttccggagaatcacgccaataat

SEQ ID NO: 66525 - DNA, 991 bp, Heterodera glycines
atgaacgtcttccggtccgccctgctcaacgcgggcttccgctgctccatctcccactgcaatccgcgggcagtcaaaacggacgcgccgacctcttttctgtgggacgtgtgccgtgaatgggtgagaggagcacgcggagagtgccgatgcaaatgatcagtccgttccattttgcaggcaaaacgaaacggaatcacagccaaaggaatggccgaggcgggggaggacagtccgcgcagtcgcattttggcgaaggaaacgaagtccgaccgacccattccatgattattattagtgaacgtatgttttttaggtgtgaaatcaacttcagcactcatcccggctgcagaacaaagagaccattccaagccaacgacaacaaaccgaaacatttgttaccattggacaacgggtgaattttatgtcaaaattgagttaattaatcaaatgaatggaatttccatgttgagcatttgtttgacacgggagaacgagacgagtcgcaagtcgtccgtctcttcttcgcagtcttcgcggactcctctcctcacaatcagtcaattaccgaagactcccgaccattattgggacatcagattcccgactcatgacgaacagcgccagaggggttatttgaaattcacggattctccgctctttaaaaaaactgcgaagcgccgtttattgtaatgattggcttaatgttggctccctaagaatttgagtttttgcattattttgtttatttccttttttattctactttttattgttatttttgttgtttttatatgtcatgtcacaaaaaagagatttgtgtacctttttaatgggtttattatggacctcatcaatatttccttttaaataattcttattatttattgttgagaaaaaagttattttttaaggaaacaaatgacaaagttcgaagagaccaaatcaaaattagaggcagaatttgaaaagcttcgaaatttggaaaaag

SEQ ID NO: 66526 - DNA, 351 bp, Heterodera glycines
atgacttgcgcatacgctaaactccttggtccgtgtttcaagacgggtcgaacagatgaccggcttttacaccgagaacgcacaactgagagcccgagctggaccgaactggttgctggtacgtgtcgcacgcgaccgccaccgacccccagctcgagtcaacacggacccgaaaccattgcacaattcacccagagtaaacagcactcccccgatccgggtaccagaccccgaaaggctggcctcaataccgagctcacgcagctactccgagcatctcagcgcactccgcctgcaaatgccccattcgccactgaacagaaggacagcaaaccccagtctggaggctag

SEQ ID NO: 66527 - DNA, 56 bp, Heterodera glycines; identical to SEQ ID NO: 52733

SEQ ID NO: 66528 - DNA, 674 bp, Heterodera glycines
gtccgaagaaaatgccagatttatgtggaatgatcatgagattcagactcaaaaaatatgtactaattggcgatatcgagaaagcatttttacaagttggtttagacacaagtgacagagatactacaagatacttatggattaaaaaagaaacaataaatgaactcaatttaactaaaagagatgtcgaaatgaaagacattgaaattcgaagatttaagagactaccatttggtgttaatgcttcaccatttttgttagcagcagtaattgaactccatctatccaaaatcgaaccaatgtatgaaaatttcaaaaatttaaatacacatgacactgatctgaatctatccgataaaaaagataaattcgaaaaattatgcagagaattagctgaaaatgcatatgtggatgatttcgtaatgatgtgtgaagatcataacgagataaaatttaaacatttttggatcaaagaaatttttaaaattgcatcaatgaatttaagagaatttatttcaaatcatgaagaatctaacaacgaaatacaaaaaattgaaggttctgaaataccaaaattgagcaagcttcttggaataaaatggaatgtcgaaaatgacgaattaacaatcccaataaatattccaatcatagccaagggaacaactaaaagaaat

SEQ ID NO: 66529 - DNA, 1652 bp, Heterodera glycines
gttcgcctttgctttgctcaacagttcgtttttgccaactccctattaaagctgatttcccttcagtttgctacgcccaattggcccctccgacgacgcgaaactttcgctgcttttccaacggctgctgtgaccaacacggtgagttgggtttggtcatttggagtacgaagttggcattcgttttcttggcatgacataatgccattataagaatcgaagcatttgatgagtttcccccccccccctcccctcagaatggtgccgtttctgggcatccatcggcgaatgcctatcgaacgcagattggatggcaataaactgtcagttggcttgttcaacttgctcccgcgcgaattccgcgtccgcccctccgacgcgtcctccgccgcctcccgcgccggctgcgactcgtccattcatcacagaagtaatcacaacggcgacaatggcaagcgtaacggcgagaacatcggcagagaggaaaaatacagtaaggaggaaaagaacgaaaatacggtaaccagaaatggtggaagatacggtagcgaatagaaagaaaaatatgggtataaaagtcaaacaaacttaaaatgtgaatctgtttgctttggctttccattgttcgcctttggcagggtccaatcgcgggttcctgcgaagagatttcacgcaatccgtccaccgctgccactcaactggccaagtcggggctgctgaatccgatcgaagagtcgcgccagagtctgtccctggacgacatcacccgcgcggtcagctcgggctgtgtccccgaggtttgtgccgtggcacgtcccccgccccccgtcgctattttgccaatcttcgtccgttgttcagtcgtcccccggggactgttcgcgttcgctgtgttaccatctctccttccgaacaatggatggaatgtgcaacaacctcaacaaaccgttgatgggggcttcttttcgcccttatttgaggtgagattggagaaaagaacaaaaaaataaggcagaaaaagaaacgaaaatggacaaatttgattaaaatattaaagagatgagagagagagaagaagaagaagcttccccgagaggaagattaatggacctattgaaacgacaatgatcatatatgcttgagcaaatcgggaattgaatgttggtagtttagctggcagaacactgtctggaaagccagaaaaagtcggcttaaagccgctccaccccatagtttttcccttaaagacttcccatgatcgctcttatattcacggcttttggttggaatgggaaaagcttttcgccattctcttctttttccgttgccattctctttctctttagacatttgccggccgaatattccaatggcttctctgagccgtccggtcggttctccgttcggccttgcccccatatttctccaatgttcatttggcaggtgtgggcaaaccgaacgcgcgcgaggcgtcccgtctgattttggcgagtgcgcaagtcgtctcccacgaccaactgaactcgctgctgatgcagtggggacagttcatctcccacgacatggccagaacggtcagtgactgtcctccttcttcccctcctctctctgatcactttttccgtcgcttcccccactgaatgatcgctttt

SEQ ID NO: 66530 - DNA, 923 bp, Heterodera glycines
atggcactcggaggatggaagcgcaagcgtgctcgactccgttctctacaaaacctgaaccgcctgttcgtccgcccagcgctgaccaaagaacaactcaaggaagaatatgaagcgcgcgtacgtccgagtcgaaagacggcggttggttgggcctcaacttcaagatggtccaggatttttttggcggcttccctgtcttcctgaacacgttccgatgggcgaatggcattgctttccgggaggccaatgaagaccagggtgcgttgtcgttcttgctccgcgagtgcgacagcgtttgggtccaggtcctgtgcaggtgccattgaacgttttgcgcgaggcggagtgatgtttgatgcgttggttcgcttcatgtcgaataattagcaagaataattgttttttgcgatcttatttggactacagagagacaaattaaattaagtatgtttgaaaattaataattttagacctattttaaggtgtaaaaaaagtttgtacggggcaagggtggagcgcgactgcgacgtgcgaaatttttttgtttgcacgatccgcgggatttttctgtccgcgctccacccttggtacggggtgtcatgacaactggtactaaggcaactcgtacaatttgtttagacttggcctaagctttaggcttaaaagtctaagctaggcttattctttattatgtaaattttttattgtaagagttgccattgacttgtgtacggtacatggtcatcatgcgaatttctacataactacagtgatgccgaaaagtaattaagaaaaataataatttttttttctcttcattaacttttagcaccaattttcagaaccaattttcgaaatcagattccctccaccacttccttttgtactttttcacatgccctgtggacattgccatttag

SEQ ID NO: 66531 - DNA, 150 bp, Heterodera glycines
ccaggactcaaatgtcccgctgaggccaaaaattttttctatttccgggaaaaaatcgaaatttttccaaaaaaaataccagtcgatagagctcgaaaaactatgttttggaagtggtctccgtttttctgggaaaattcgttaaaaatt

SEQ ID NO: 66532 - DNA, 504 bp, Heterodera glycines
atgaactcgacggtgtggcacactttgaccggctttgtgatgtatttgggcaagtccggcaaatgtaaaattgacgagaatgagaaaggtgtggcggatgggattagttttttcactttttagcaaatttttgaggttggcacattcaatacattgaccaggaggaggagttacgtcgtcaaaagttgcagcagcgcgccaaacaggaaaaggacgacgaggaacgaatgcatgaacaattgcagagacaaattgaaaggcaagcggaaggcgggggatggattggttgaccaaaggcatttaaatgccgaaaattcgtatgaaaagccttcccctttagagccaaggagaagcagggcacggaggacggagacgaagtcgccaaagagccgcaggaattgattcgcaacgatgacacgaaaatcgcattttccgttggcatgaagaagccgatgattaccgacataaagccaacaacgacggcatttttcaaaattggcgggg

SEQ ID NO: 66533 - DNA, 56 bp, Heterodera glycines; identical to SEQ ID NO: 52733

SEQ ID NO: 66534 - DNA, 814 bp, Heterodera glycines
atgacaaataaatgtgaaacgacggaaaagggccaactgtcagccgaagaacgaatggccaaacgattgacacggaaagagtgagtcaaacgatgacatctgatcagagtgatcactcctgaaggaattttgggcgatcgaaaaatcttaaattaaaatgagtattcgaaggaaatttttgatgggagctaaaaagatttaaatggatgaattgccagtgattttcgagagtaaaaactcgagaaaagtctcggttatttgtgcttccaagcaataatttaaaacgtttttgactttatcgatttccaaaatgatcaaagcaaaaaaaagaaaattaatttaaaaattaataaatttttcgtttatttaaatttatcgcaaaattcttctaaatttgttaaatgcgtaaaaaagaattgctccatcttttgattcgctgctcaatggttgttgctcaatgtgccgtgttggcggtgccttcggccgtttcgtccatttccgaaatcgccgttttgggccgctcgaacttttggcccttaaacaaaaattaaaatcaacaacaaaataatatatctaattaaaatcaaattcactgaaagcaagttttattttattttatttgtctttttgtagagcctggaattttgaaaaaaaacccggaacagggcccggatttatgaatcggacccggacaggattccggatcaaaaagtcctattttaacaggactccggaccattttacattttccaaaaaaaatacagggcccggactaccggactagggccctgggaaaccctggctgataattaaa

SEQ ID NO: 66535 - DNA, 836 bp, Heterodera glycines
  unsure (1)..(836): unsure at all n locations
atgggtaagtgaatcgtacaatttcaatggaattctgctcaatggaacgcaaaaattccgtctccaaatgtgccattgtgtcgggaaaggccccaattaacacggaatcagctgaagcaatagatgtaattcttgatttgtcgttaatttccaactgtttttgttccaggaattgaaaatgttgctgccaatcttatcggaggggacaaattgcaatggacggccgaggaaaaggaacaaatcgaccaaatatggcatttcatcgggcgacactaatgaaacggaagtgcccgtctttcccgcgcgggcaactcggccttaatggaccgtttacatttttgatgaaaattatttgcctggtaaacttaccgactctgtgcacaaagagttttgctttgggtgggaaatggaaattgacggcaaagtccaacaagggaatgtcgacgccacgcgcagcaatgtcagtgacaaccaacagaaagcattcgccgtttcgaaacctgaaaaccaaaaccctgagcggttgactaatttgaagttggttttgtggtttcgacctggcaatgttctgcttgcgagcgcccgggtccaactgactgaacaaataggccgggtccaaattggcttcttggaacacagcgaccacctaaacaatcgtttatgactattcccgcctgaatttttttttgttgaaaattttgtcattttcggagaaattttttgaaaaaattaataatttatcataaattttacataatcacgaggaaagtttttagtttcttataaattccgacgnatttttttgaaaagttctatcattgtttgatttaaataaa

SEQ ID NO: 66536 - DNA, 849 bp, Heterodera glycines
  unsure (1)..(849): unsure at all n locations
gtggtcgctgtgttccaagaagccaatttggacccggcctatttgttcagtcagttggacccgggcgctcgcaagcagaacattgccaggtcgaaaccacaaaaccaacttcaaattagtcaaccgctcagggttttggttttcaggtttcgaaacggcgaatgctttctgttggttgtcactgacattgctgcgcgtggcgtcgacattcccttgttggactttgccgtcaatttccatttcccacccaaagcaaaactctttgtgcacagagtcggtaagtttaccaggcaaataattttcatcaaaaatgtaaacggtccattaaggccgagttgcccgcgcgggaaagacgggcacttccgtttcattagtgtcgcccgatgaaatgccatatttggtcgatttgttccttttcctcggccgtccattgcaatttgtcccctccgataagattggcagcaacattttcaattcctggaacaaaaacagttggaaattaacgacaaatcaagaattacatctattgcttcagctgattccgtgttaattggggcctttcccgacacaatggcacatttggagacggaatttttgcgttccattgagcagaattccattgaaattgtacgattcacttacccattaattttggtttttcactttggcactttaagatggatttgcagcgtaaagccgaaaatgcaatggccaagtatcagcggactcggcaacaaccatctgctgagtctgtgcgtagagtgaaggccgagttcagacacatttcgccgggcccacacccattttttgnggaccccgttctgtttccggatttggcattggaacaac

SEQ ID NO: 66537 - DNA, 378 bp, Heterodera glycines
atgaaaatagcattggggaaggaggagagacggaagagaaagagaggaaaaggaaaaattcgaagcaagaagagaaagaggaggaaaaggatgaaaatagcattggggaaggaggagagacggaagagaaagagaggaaaaggaaaaattcgaagcaagaaggaggggagaaagaggaggaaaaggatgaaaatagcattggggaaggaggagaaagagagagagagagaaaaaggaaaaattcgaagcaagaaggaggaggagaaagaggaggaaaaggatgaaaatagcattggggaaggaggagagacggaagagaaagagaggaaaaggaaaaattcgaagcaaggagggggagaaagaagaggaaaaggatga

SEQ ID NO: 66538 - DNA, 846 bp, Heterodera glycines
atgacggggattgagagaacttttgacgccttatatgtgccattctctccatatttatttgctgcttgctttttgcccgcggagtccccttgcctccctcgtgtcattgagtctcttcgactattctcatcgatcttaaccaattggtttcaatccattcatttggtcggttgcccgctgcgattggtgacgattttgatgggccaaattcaacaatttctgctggccaagcattgtccaaatggttgcactctccgagaaaagatggccaacccaagcaattgcattgcgaagatcacaacgaacaaacgaacactgattggatcaacaatttcaaggaggtgtggtccggggggggggacaaaacgtagccgcaaaattttattttaattaaaaaaattatttaaaatttagttatctagcctaaatcaaaaaaaaatagataaattcgaaaaaaattattaagaaaattcaaggaaatgtaaaaaagtcgtttttttatttttggaaattcagaaaattagtttttatacgagacggcgacgttttaggggtgtacccggtctgtggatggcattctgagttattttctgaaacccgaccccaaaaaagttataaatcgaaaatttctgaaaaattccgaattttatcaaaaatttcggaaatccgaattctgtgccatccctgctggtgtggctccacatttttggcaaatgactgatttttgttttccaaattgtttagcattttcttcgtgccaatgccatttcttccgtcagttacgaaattcatttttctgttcgtgcgccgtcaatgccaatggtgccatatacaaaaatagttata

SEQ ID NO: 66539 - DNA, 796 bp, Heterodera glycines
atgctgctgaagagtccgccgccttcgatgcatgcattacggacgagtcgccgtcgatctgccgatttaaatgcttacatttcgccatcaggcgaaaggacggtgtccagctcgagcctactcaatcgtacgttcttgactcatttgattttattgatttgcatcttcacaggttcacccgtttgggctgacctcgccgcgaccattcgaaatccttccgtttgtccaattcgaccgttgtcaaaggcaatttcattggatcgttctgtcgaacatacaaaacggtccacttcaattgatgtcaatgcgaacgaatgtgagaagaaacgcgaagataaagacaaggtgaccgtaatttcgacgaagtaaaacgagtcagttttaagaaattaacggatccgatgcttcggtctcgccaaagtgcgttcacaggacaaaagggaaaaccccgaagattttgtggccgtaaaaaatgcgcatcggaggtgcgaatctaacaattcgtaagcaaaaatatggtccaaaattccagaacgaactaattgatggcggtgatcagcttcagagttcggccaatttttacctaagccatcattcgaccacttcgtcaagtgtttctccttcgtctttctgtccatccaaagattctcacaactcttctggaatcgaaggcccatcatcggctgattcggagagttttaatgcaaaaacaaaacaaagcgctgacagagccacggaaaacgtgggacaaagtcggggaaatgtgaaattcgatgatacaattatgaagggcaat

SEQ ID NO: 66540 - DNA, 702 bp, Heterodera glycines
atgactagccgagaatgcatcgtggaagtgaaggtgagtgagcagcgtattgctaaacaatccgttaacattggcactcacttcattaattgcctcattagcaatcatccactttcttttaacaattcttttccattcattccactaattgcgtcattatcgcttaatttgtcgttcctttgcctaacctttctaattcgttcgctttatatttgatcatcctttctcttcttcgcaggtcgcctacctgcagtttctgctgcactgttacatcgacacggacatcgaactgaaggacgccagcaacggcgagtatttggacgccattttggaggatgccatcgcggatatgggcaaactgagcacgcggctgcgccagatggactaccagccgaagtttgggccggagatcgtcgcgttggagcggtacgtctgtcagacggtgacggaagtgttggtgcgcgtgtttgagcccgcctcttacggtcactcggcacacattgacattcgcgtgggtcatttggacaatggcacaccgaaaagaggcgcatttgcccatttagcagcagcaaaaacgcttttcgaccataatgcagcggctgagcgagttgcagaacggcgtgctgagggggcgacgccactcgaactgctccaagaactggtaccgtattgtggaatgtgcgaaaagactgacgaaatacg

SEQ ID NO: 66541 - DNA, 396 bp, Heterodera glycines
atggagaagatcgtctacttcaagctgatgcaaattgtgctcactttcgcattcatttggcaactcatgtcacttcacgaattctgcggcacttttgccgacccaaaagtcaattcatttaccaaatttcactaatgatacataatgatgtgcttttttcaggcctgcatccatgacatctctgtgggccattgcaaacgctttgcgttcatcggaaaggactcaaaaagcggtgaattcggcgttgtgtttgaccatcacaaatggcacgaccaactgtcgatgagcagcaccaatggccgatcattcgaagaacagcaacaccaattcatggacgaattggccacgaaattgccacccgctggacgcctttgcattccgataacggtgaactag

SEQ ID NO: 66542 - DNA, 363 bp, Heterodera glycines
atgtcggcacatccaactgcgtgcggtccgttggcgagcagcggcaacacattgccaactggcggtggtggcggtggagaagtcgtgccattcggaggagttggcggtggagaagtcgtgccattcggaggagttggcggtggagaagtcgtgccattcaacggtggtgacggcgatggcgtcgttttggacggcaataatcccataacaaatattgatatgaaaaatttaaacggaataaattattttcgataaaaatggcacaacaaacacctctctatcagcagaatttgggttttttggtttgggaggagaagtccacgaaacggtggacccaaccaatttttgtcaaagtcgaccaaa

SEQ ID NO: 66543 - DNA, 938 bp, Heterodera glycines
atggcaataattcttaatggagaattccatcgtcgcataagcagcatgcaagcaggcacgacccagattcctggcttcggtcagttgtacattctggacccagtcgaagccatggagcaacgacgaaaaaatcccacattcacgggtgaaaaaattacgaacgaagaagagtttgtgcagggtcatcagcttagtgatgagacccttgaagttttggaacaaatgatccaagaaaatcacccagcagcatctgcttataagcaggctcgtgaacagctccaagagttgttaaaacaacaaaggactgaagagcttcggttcttcagaatgactttgttggatgagcgctctgctccgggtgctatgaaagacccgaagttgcatccccaccagataatcaccccctcaacgggtgaagggatgttcgcgattcatgcggatctcaacggtgccccggcaccaaaagggatatgggtggaaaacaagcaagggcagctgaacgaaattgctcctctcagtccatggactgatagcttaacctatccattgattaagcctaagggcgacgatggatataaaattggcattccatatgccaaacccgcacaaagaaagcggaaaagcgacatgtctgatgatatgtttgacaatcaagcaatgtcagatgatgacatttgcgataccgagtcaattgcatcgtctgggtctgaagcatcgatgcagtcagtgaccagtcgctatgacaaatcaaaaagatttgtctccctgcgcgattattgcaaatatcatctcgcaataagggatgaaaatttggagtggcaataccatcacattctttcatgtggcggtggtcttggacagcgctgggtcttagaccaagcgtccaaaatgactggcaaattgccacttttttgcgccgtccagacatggacaggcgc

SEQ ID NO: 66544 - DNA, 1114 bp, Heterodera glycines
atgtacgttaaccccaaaaatattctttttctactccaaaaatattttgaaaaatataatgaagaaaccccattaaatggttctgaaattgctattgccaaaaattttgcttctgaaattgaacgatgcctcaaaaacaatgaagaattggactttatggaagaattggtgtttgatcaaaatgccgaatacgttaaaattgaagggcaattgagcgattccgattttgattataattccgaagaggaaattgatcaaattaatagttctttcggatcaggtccattgataaatatcttatttaaaaactcaaaattttaaattcagaaaattcaagcggatcaagtttttttacgtctcctgttaaaaaagtgcctcgagatgattttgcatctttttcggacaagaaaaaggcccttcaattttatcgttcggctgataaggggcatcgttcattatcatgtatgaagtcgacttataaggccaaaaatatatatgcagtggcgaacaccagtcatattatgaccaaacaactgatggttgaatgggtggacaaagttctttgtcctgctcttcgcccaaaccaaaaatcgcttttgatcgttgacagttggactgggtggaacaattttcatccaaaaaatggaattgaattggctgttaaacaaatcccaaagcatggaactggaatttgccagccattggatgtctatgtttttcggtatttaaagggtcaattttcaaatacaaaaaaatttagaatttggaaagaatttaccagaaaaattacgcagtttgtttttgtttatgacataaatatcaatctccacgaccgcgacaacattataaaattacagtcattaatacacaatcagctccaagcaaaaaaatttaacaattggcttaattttgcatggcgcaaatcagggttttatggtgatgagcctttcccagaattcattcacccagtaaaatattgttttgaagtgcccaaacacaatgacgaatgccaaaaattaaattgtgacaataacattttgctccgttgtgctttttgtgaaatttttttatgctttaaacatttttttaatgattatcatttatgtgaaaacga

SEQ ID NO: 66545 - DNA, 2565 bp, Heterodera glycines
aaagacggtgaggggagcgcaacaaattgacgacgacttcgacgaccgattggtccgaagaagacgaggaagtgactgtaattttttctcatttgtttaattattctatcatggggagagtattggaaaaccaaattgggcattgttaattaattgaattcatcggaggcttcaaacggtcgtcagccactgaaaggagtgtctgaagaaggtgaagaaattgcgaattccgaattggatgagaaaactgtggttgaactgaagaagcaaacttcgttcgatgcgcaaagccaattggaagcagtgactgagcaaattgcatcctcaaaaagtgacgcggaaaaggttcgaacttcgaagagtgaagtcgtcgtcctttgcttgtccatttgtcctccatttttgttgctgtaattcttcggctttccctttcattaatttttagcttgtgttggtggttggtcttttctctttttttccatttcgttgactttgggtttttcaggagttcaccagcgcacgttcctttgactccgtccaaaaatcggccggtgctgtcactcgcagtcgctccacggggcccgaagtcgcttcaatgtcgagccagaagcaagcggcctctgttggagcggccaagatgaaaaacatcaacaggtcgagagtcaccgttggctccggggggggggggggcgactcaatggatcgaattacagcaattcaattcaaacccatttgaattaacagttcagcattttctgatcttttcctgatccccaatgctcctttttcaatgttttgctttagattctccaatttcgtgaaaagtggcatggaatcgtacattctcgccactacgaaattcagtggacaaccgggggaaagccatgaaataattttggtgggttcttcattaataaataaatgttgttgtgaactgacaagaggaccttcacagctcggaatgttcctttgtgagtgtgccctgaataatttattacccttcatttaggttggtgctgaaaggaaatggaaatgtgccgacgattatggctacacttgcatggttacgaagccaaaaaaggaatccaagctgaaggggctgaaggtgtgcctttctttccctattccctccgcccttttttcgtcagagtttcatcgcgtacagtctcacctgctctttgaccggcatccaagtcgctcgtcgctacaaacatttcgattggctccatgagcaattgtcagccaaatatttgccaattccaatcccaccattgccagagaaacaagtggcaggtggcttagaaccaggccaactgtaataaaaatatattattggaaggcctttacgaggacgacttgatccaacaccgtcgttcggtcctccaactttgggtcaacaaaatctgtcggcaccccgtgttgagtcaagtggggcaacaaattgaaaacttattgttggaatcacctaattaaactcattttcagtcgggagtatggcgtcattttattagctgcacagatgaggcatttcgaagttgactttttaaaactaatctgatagttttgagaaccaatggaagaaaggcaaacgattggctgaaaaagacgaatatgttggaggtaactttttcaattgcatcacagcaccgactgagcagctgaatttgcaagatttgtacgaaagacccacacgaaattcaaaaaatacgggtttttagcgaacaacaaattgagaacttcgcccgaagttcgcgaagtttggaagaaagttgcaaaattttgtacgaacgaatcactgaggcgcagaaacggctaatcggacgtaaaagagcatttgagcattcatttaaatttacaaatatgtattgttaagcacacaaaagcaattggcagaaattggcgcagtccttcgaattggtggggcaatcgctcgacatggaccaatcacagcgaaatggcaaggccgacgacacttttcactgcaattccgacactttagcgaataatccggtaaaatcggccataaaagtcagtgcgaacaatttgcatcggattggctctcaacacgaagaccatggcaaaaaggacttggagcagttggttggagtttctctacgtcagcaaaggcgtgtacgcgtccattccggacactgtgaacattttcaaagtgactgaatgatcttttggcattgtgcaaaatatttcttattctctcagtctgtcctcacaaaaatgcacgaaaataaacggctgcaaaaggaaggcaaaatctctgatggcgacgttatgctattcgtgggccgggtggacgtgtgcgcctatgccatgtgaataattaaattggccttcttatgatttgaatcacttcgataggcttgctgaatgacgcaccaacaggaagagagggacttggacctcgccatcgcattcggctcttttttctgtgaatcacattagatgggtttatatatttttacgatatttgctctttccttaacagcacaacaatccgccttctatcacaacattggcaaccaattctctcaattggccgaactcttcaaa

SEQ ID NO: 66546 - DNA, 1049 bp, Heterodera glycines
atgggactgctggaccaacagttggcactgcgctggatcaacgacaacatcgcacagtttggtggcaacccgaacaaagtcacacttttcggtaaggttttttttggcattgtgccgcatgagaaaaattactatttttttttacaaaaatatgaaaatttgagcgattctatgccaaatttgaagttcaatgactaaggtcggaaatttatgtaaatattttgttgaaaacactccaaatttccaaaaaaaaaaacgttattttcccgtcaccaatgatcagcagctgatcattagggatcgaatttcaagtttttgtggttggaatttcaaaaaatatatgctttttattactctattaaaatagcattcaaaataaatttatatatatatatatatatatatatatatatatctactagcttatagaattatggaaaattttactccaaagcgtttgaaaatatttattattaaattctattcctaaactgaaattttaaaaagaaaacttggaaatatggagatttttcgggcattataatcacactttaaataaatacagtaggaaaaggaatactgtaaacatgggaagatttccgtatattaaatgcacacgaacaatatacagtaggaaattaattatttataaaacgatacagtaggaaaataaatactgtatataaacaggggaaagtgccggcggcgcgtcagcggcggcgcatttgttcgcgccggacagccaccgcctattccgctcgttgatcgccaaaagcggtgccatcgtgaacaactgggccacaaagccgaaggtggccatccgcgacatttcaatgcgactcgcgcaccggctgaactgctcgatgtcgacgatggtcgactggaaacggcgccggaggcaccggcaccgaccgcgacgacaacggcacgacaggcggcgcagaagcggaccgtcgccggacaacaacagcgatgacgaggagggcaccgttgcggtggctaatcaagtgatcgcctgcatgagccgtgtgcctgctcagatcatccag

SEQ ID NO: 66547 - DNA, 84 bp, Heterodera glycines
ctacgcaaaacaaattttttacatattttttggttggggattatcccaatggtcccatttttcgcataaatatgaattgctaat

SEQ ID NO: 66548 - DNA, 1059 bp, Heterodera glycines
atgggtgtgcattttgttgttgattttgttgttttgtcacttccgtccattccaaaattgaattttggggcgcagaatctccgaccaattttaaaagttttggagaataaattacaaaatttgatctatgagactaatttgattgaagaatatgatccgaaaaagagagcacatttgaaatggaagcttgaagaagagttatttttagacggtaattaaaaactaattaaaatttactaaggacgatcgacaggaattaaattaaaataatcaaaacgattagaaaaaatacgaacaatattaatttattaattatttaaaaaaatattggtcgaagaaaagaaattaaatttttgttttatttttaaaatataaaatatttaataaactttatattacacttttacaattgaataatattttttattatttgaaactgtaaaacatagaaaaaatagagattatgaaatttaagttcttcatcggattcgtctgtgtaaaattattctaaatgagaatgaaatattaatgacagcacattaaaatgtgtcttttttaaaatatttttgcaacttcatttaaacattcaaaatggaatagtgacaaatttataaaaaaattttgtctaataaataaaattataatttgaaaaaaagatttaattttaagacaccgatgaagacaaagtgcaacgaattttgaaccaaattgacaaaatgaataatgaagatgcatcgaaaaaatatcatgaattgaacaatgtttccaatgaaacaaaaagaatgaatcaaataaaagttgaaagtaatcgaaagacaattgaaaaaatgcgagcaaatttgaacgttttacggagtaataataattaaaaaatgaaaatattatttaaaaaattatttaaaattttagggcactcttacgaactaaaaattctcgaatttttgttacctaaagaagaattatcccgattaaatcatcttcttgatgaaactgtgatgattggaggaacactgacaaaattcagagcagtttatgctattttggaattatgggcaaaaa

SEQ ID NO: 66549 - DNA, 301 bp, Heterodera glycines
  unsure (1)..(301): unsure at all n locations
ttaaattttcatttttttagcttttttcgaaaaatttttgtcttttttcggcaggcactgcctctgacaatgttttttatttattagaaaaaataaattgattttttttcttttgnatttattttaattatatttcattcttaaattttttaataaacattttcaaactttcaccttattaatttaaggcgaattttgccttttntaataaattctcttgtgaaaaggcaaaaaaataggctcttttaaatatgcctatttaaattactttcattgctttcctttgcttacgaccatacca

SEQ ID NO: 66550 - DNA, 352 bp, Heterodera glycines
ggaatcgaaggtgttgtaagcttttttcctttttcacttgtaaatttatttaaattttcaattttttttagctttttttcgaaaatttttttgtctttttttcggcaggcactgcctctgacaatgttttttatttatttagaaaaataaatttttttttcttgttgatttattttaattatatttcatccttaaattttttaataaacattttcaaactttcaccttattaatttaaggcgaattttgccttttttaataaattctcttgtgaaaaggcaaaaaaataggctcttttaaatatgcctatttaaattactttaattgctttcctttgcttacgaccatacca

SEQ ID NO: 66551 - DNA, 307 bp, Heterodera glycines
atggttgccgcaaaaaaattccttcggattcttccaatacagaccgagagctaccgattggtatatatttcgaccattttcggcttgggccatatgatcaatatttactaaatattttccttaatataaatattttcctaatttccatttccttttacatcccttatataagcccgatcatttttttatgtcagattttttgaaaaaaataataaatatcagctggaagacgaacaaatatacctctttggacttttgtcaatcgccaaagaatttattttatttgcaaatatttaaatattattaa

SEQ ID NO: 66552 - DNA, 490 bp, Heterodera glycines
atgtcggcggattacgccaaaagagtgattgaaaatgagcaattgaaaaatgatttgacaaacggacgaacggacggacagcagaggaataagccaaaacgccaacaaaaagaaaatggaaatggaaatgtgatcaaacatcactttggtgggagtttaaaattttgaaataccccaaaatttattgggttttgtttgaatttcaatttcccaaaatttcgtcaattaattggtaagcataaaatttaattatccctctgctgcttctgtttactcagtccatcagtgacttcctttcccttttccaacttcattcattatgaaagtcaaaaattaatttttaatcctccctcaaattgcgccccttttgtcagaaataaacggagaatacgcaattgacccattggtcttggggcaatttccccctaaatatgtccaaggctccaacaacacttacccccacaactcaatgtccaatgaaaaaagttga

SEQ ID NO: 66553 - DNA, 76 bp, Heterodera glycines
atgaatttttatattatattttttcttgtgattttttccacctttttttgtcagctgctgattgtaggagcaacag

SEQ ID NO: 66554 - DNA, 139 bp, Heterodera glycines
gtggaattcgattttccaatgaagaaaagatgaacaaaatgaatatttattctaaaatgaagaatgaaaaaccgtctttaagttacaaataaattgctcaatttttgagagtctcattagccaacagatggaaaaaaga

SEQ ID NO: 66555 - DNA, 1418 bp, Heterodera glycines
atggccctggttcgattcgacgaagccaaatctaaccgaggaaaaattctgctttctcgccttggtttcgagtattccttcgaaaacttttcccgtcttgaggaaggctgggagtattggaaatgcccacggcgtccgccatactgcccgggtcgcgcgtctgtccaaattccatggcttgtcgatgaaaatggaagtcgttataagatgggccgcataactgccgaacacaaccatggcgcaatctttggacaacttgctgtgagccaatttggcactcttataggaagggttgctagaactattattttaggagatttcaaaaattaatttgtatgtgttgccttgaaaatttattttaaccctgggtcccctggtttggtcctgatgtaccctacataatttcgttctactttgtgaagataagacaagcaaacaagcaaactcgggaagaggcccaacgcgactttcccacgacgagtcgcaatattgtgcgcaatgttcgggcgaatctttcggttgatgctcgtgtgaacgcaccaagtccagtcaatatgcgcaataactacaatatagcaaaacggagacaccaagaagagctcacggaaaattaaaatgattgatagggagggaaatgcaccaaaataaagtgaaaaataatataggtcggagatgttggccttgatgttttgcctgttgaaaacatcgtactgcctgatgctcttctaaaccgcgtcatttgcaatgaaatttttaacggccatcgaatgattgttttctgttctgcatctgctctcgaaattcttcgacaatacaacaccgaatgtgccattgatggtacattcgaagtaaatatacgggggattttggggtcactgatcacgaatatgacatccgtttttctgcaaaatgggggcagacaaagttttacccaaaattgttaggcaaagaatccttggtactattttaaattggcccgcttaagtcatgcccgcgtggatttgcacagttatacacaatgagcgctatcatcgaccattgctcagttccatgcgtatatggtttactgccgaataaggaaggggcaacatacgtgcgtttttttgaagcaatcagagacagtgttggaaacaattgggcaccgcaacgtctaatgagtgacttcgaatcagcagccatcaattctacgcgaattgtttttgccaactcaacccaaagtggctgcctttttcattttggccaagcaatttattgccgaattcaacgacttccaaatcttcacactcaatacctccaaaatgttgagcttcaacgaaacatccgatcacttcaagctttggcatttgtacctgtcgaccttgtttataactacttttgcatcttggtgtcgacgctccatccaactgctgagctacagg

SEQ ID NO: 66556 - DNA, 476 bp, Heterodera glycines
acaacttcgccagtcagcaccgccggggcgggcgacagtttgccgaatgggacaacaacaaccgccgccaccgctggcgacgtcacccccaaaaccggtggtggaggagatgaggacgagaaaatggaggaggactacgtggggggagcagctgcgggcggcgccaccgctggcagcgtgccgccgaagaagacgtccaccggtgccgccgctactggttcagcaacggccgctggtgcaaagccaacagctgccgccgagcaaaggttcaaaatttcatcactggggagcaaaaagcaggaatttgtagccgtttttcgccaaaaaattacaaattttcgccattttgtctaaaaattcaaaaataagacaatgggagtcttgacatcgccggaaaaatttggaaatttttacacattttgttaggaaaattattaaaaaattacaggattattttatttacagtagtatggtaa

SEQ ID NO: 66557 - DNA, 405 bp, Heterodera glycines
atgtttgagcaaggtatagcactggaagtaattgaacgaacattaaatgttccaactgtggaattgaaatgccgttttgcacgactttgtaagaaaatagcaataggcgttataaattaaaaaaataaatttaacattttttaaatataattattagggatgggaattttatgtaacacatatttttcctggattccccaaatgctctgaatagtagaaaaaaaacacattcttttttgtgtttgcgaacaaaaatcgggacttttatttatatatttttacatatttcgagctttttagcatatttacacatttcgggctttttgtacatattttggactttttagcaatttctccataaatttttgagaatttttaaaattaatcaaaatttcttgtgaaaaa

SEQ ID NO: 66558 - DNA, 576 bp, Heterodera glycines
atgtttgtggtcaaacagacgcgaaatggccacgaaagaggcggcaccgaacaacagaacgtacagcacaacaaaaaggtcggtgatgaacagacgacgaaagcagggcaaaatgcgacaatggatgtaaatctgagtggaaagacaaatggactacgaccgtacgaatactccaacagttcgatgctaatattggtacggtatggcaaagcaacggtaatgaaaaagagatacgataaggaaggtggcgaaaaagaaggcggtggaggcgtgtcctgagtagaaactgcgacgggagtccaatattttggcgttgttatcgtccagcctttggcaggtgtacaagtagaagaaatgggtcgagtcgttgtttgtctgcagccgtccaccccgtttttgtacttcaagtccgttgggtaacactgctcgatgaagtcgggtcgcaatccgcccaccgacagcttcaccaggttgacgcaaaacaggtcaacagcaatgccgagcagccaaattgctaaaaagttgttcatttaaactacattccatttgacacgaaaaaacaacaaaagcacacaa

SEQ ID NO: 66559 - DNA, 239 bp, Heterodera glycines
atggacggcgccgcacttctacccgcttctgacaaccccgtaagtgcagctgacaagctcagacaaaaaaaaataaaaccataacagcagaattaatgctcctaataaacttgaagactgtattttcttaatcttaatgtgatttttagactatcaggtcctgaagaaaaaaagttctagtttgaatccgattttggacatagacgcaattgtcgaggctccaaaaacttaacaataaa

SEQ ID NO: 66560 - DNA, 767 bp, Heterodera glycines
atggattggattggacggatgaatcatttgcaattcaaaggatcgatcaatcgatcaaaaaggactttggtcgaaaatgctctcaaatcagaatcttgggcttatgtaagtaaaggaaacctcctaattgatttgtatatttttgaatctgttgacagattccaaagattgcattatttttcgattaattattgtatcatagaaaattccatttgttattcattttccttatgtgtgttcaatttataggttggtatgtctccctttttatttctttacactattataattgtgatgagagtttattggaacacttaatttgatgtcatttgcataatttattcaacgaaaatgtcttttgcctatggaaagtccattcagcagaatggtggtcccaaccgtgtcacattcattctgcgaaaaggtgcaattttcttcactgggatggttattggaacagtcgttgtttttgtatgttttcaaaaaagaatttgttcttcaggtttaaacattgttgttgcttcagaaggcatttaagccaacgcgtcccttcgacgaagcggcagaacgtggaaaaagggagctgttggagaaatacacggaggagtacaacgcgttgcaggaagagctgaggcaggcggaagagcagcagcggaacggagggatgccgaagaggcggaagcgagaaaggcttagccgatgacaataataatgatcaatttgggtggaagggttgtaaatcctctgaagtaggatcacactgctaa

SEQ ID NO: 66561 - DNA, 144 bp, Heterodera glycines
atggagaaaaaaattcttattaagttaatattagggttggccgggtccgggtacccgaccgggtccagacccggatacccggtcttttcaatacccggacccggtctcggttttttgaaaatccaatacccggtacccgacccg

SEQ ID NO: 66562 - DNA, 1290 bp, Heterodera glycines
  unsure (1)..(1290): unsure at all n locations
atgagcaaaggagaaanaagcaaaaacagcaaaaaagaagtgaaaagagaaaaagaaaaagcacataaaaagaaatatgaaagggtagaagaaaaaaattgttatgaatatttttacggaaactagaccaaattttccaaaatttagaatcaaaatttagaagacttgcatctttttatagagaaaggaaaaaattcagggtgatgtgaaaagcacaaatgtgttgaaatggggaaaatttcctaaaaaattcttagggggtttgaaaaattttttgttgttgttgttgaattgaatgaacggacagaaagagtaaaatttgtaataactaaacgcaaaaagatgagaagtaggtaaatcataaaccccataatttgtgatttcaaaaaacgaaaaatacacccctaaaaatcgaatttttgacttcagccgcccccccccccgaagccaagggtctggctaagcccttgctgctgttgtctgatttgtaactataaatattgattgttcctattttttggtctgataccgctcgtatagagaattttaaacagccgagagaagagtgacaggacatttgaacagtagtcagttcgtcagtgaacatttgcacactaagtcatttggacagaagcggacaattgggcattacgacagcgaatggaagtttatttattgttataaattgcttagcattgaaactttattattattctttttaagattgcttacaaattagcattgaaactagatatttttgaggtcctaagaatttgaaaaaaatttcattgctaaagaaatttataataaatacggcttaaacaaactgaataccaaaaaatttggttcttgcgactattttagaccctcgatctcgattcacatttaccttgacagcagtcggctgaatcagtacagactggtttgataagtaaagttgaaagttaccacgcaaagacagatgtaattggttttttctacttttttaacttttttcaggaaaacgatttacaaaattgatgaaaaagaaagcagtggttcaagttctgggatattttttcttgttttgaaaagacgcaaaattttatcaactatttaatactgtttataatttaataccctcctcataatgattaatttaaggcaccatctccaagtccatctgccgtgaagacaagacaaaaagccgaagtggaattaaatgaatatttacgggatcaaaaaatcaaatccagggccaacccatcattatactgggaaacaaattcacaaatggccattgattggtga

SEQ ID NO: 66563 - DNA, 361 bp, Heterodera glycines
atgtacggcacttcactggaaaatgccatcgctagcgactgctctggcgcttataaggtaaggcccatcgcgagaaaaattccggggatgggagaatccgctggacagcccctctttcaatttttgattataagagaatatgtaatgtttgttatacaataaaaagctacatttaaaaaatcgtcgtattttgacattatgcaaatgatatttatttaacccaatttataattgtaagaaagcgatttcatgaagcgaaaacattgattttccaggatggtttggtcgctattgtgaagggatattaccactgattgcttggcactgctgtgaagaactttcaaacgataaaaaagttaaa

SEQ ID NO: 66564 - DNA, 1240 bp, Heterodera glycines
atgtttaaacccacaataaagttatgcgctaaaacacgcaaatactccaaaatagggttgcaaccccgacgtcggggttggaaaattcggggttcggggttgtcggggttggaagtgtcggggttcggggtcggggttgccaaatcgttcggggttcggggtcggggtcggggtttttcaatttttgccttatgccaaatagtcaaaatttttttaatattttttcggaaataatatttattaatttccataataatatttgtattgtttttatatttttttatttctttttatcagaaattttgtatagaattaattttttttttcttgaaattttaaaattttttattacttttttgttttccaaaacatcttttttcacgtcgctcttttctaaagacttaaggagaaagggtacggcgtccggcggtgccgataggcgccgccgggaaaaaatttggttagatctgttaacagattttgtccaaaatatgctaaatttttgcgattttgagccaatttttttaataaggtttatgactttttgggccctgtgatgccgataggcagcgctaaattttggaattaagctttattttctaagatttttcaccaaaaaaatttatgaatttcggtaaatttttgtttttcttcgatatgtattttgtcaaaatatgccaagattggtcgatttctatgagtatttaatttaaaaaaaaaacaatttgtcacaaagaaaataattaaagaagaaaacgtcaaacggtatcgaactcacgacagaaagtaatgtcaatggcactaacctctacaccacattccaaatgtccgaaattgagcaaatcttctttatttaataaaaatttggcaaatggttaaaaaaaattcaaatttcgtctaacttttttgcattttctcccacgaaaatgccattcttaggggtgtatatttaaccccgaccccgatcggggttaagggtcggggttcggggttgtcggggtatgaagcgtcggggttcggggtcggggttttccccgaaaatggccaaaaatgtcggggttcagggtcggggcggggttgcaaccctactccaaaacattgccgacttcataattttgcacttttctcagtattcgctcatcggttccttgtaccttggcctttttgatggaccttcctgacctctaacatattcttcataatctgatctaaacctttctgaatttttcttaaatcgtca

SEQ ID NO: 66565 - DNA, 1411 bp, Heterodera glycines
atggtcgactcgccgacgccaactcgccgatggttgactcgccgacgccgactcgccgatggtcgactcgccgacgccgactcgccgatggtcgactcgccgacgccaactcgccgatggttgactcgccgacgccgactcgccgatggtcgactcgccgacgccaactcgccgatggttgactcgccgacgccgactcgccgatggtcgactcgccgacgccaactcgccgatggttgactcgccgacgccgactcgccgatggtcgactcgccgacgccaactcgccgacgccgactcgccgatggtcgactcgctcgccgatggttgactcgccgacgccgactcgccgatggtcgactcgccgacgccaactcgccgatggttgactcgccgacgctgactcgccgatggtcgactcgccgacgccaactcgccgatggttgactcccgactcgccgatggtcgactcgccgacgccaactcgccgatggttgactcgccgacgccgactcgccgatggtcgactcgccgacgccaactcgccgatggttgactcgccgacaacacgactcgccgacgccgataaattgtgcaaaaaaaattctgggaaattttaatttttaaaagaaaaaatttaagaattattttaattttttaaagaaaattaaattttttaaacgaaattttaattttgccgtatagataaaaagacaaaaacataagcaagaaacaaaatcagtgcaagtggaatggtgcaattttggagatgtgaaattcgtggctgtcgtggtcgtatatggacgaatttggaagatggctctttagtttcagagcacggaaaacatatttgttcagaagccggcgatcctgtaaacgttgaattggcaaaaattcatacagcatttcatggacggcacattttcggcttctcctccgctttttcaacagatttatttcattctttctcgacgtggtgacttcgtttttccggtgttctcttttgtcttcttcgaaacaaagatgcagctagctacatatgcgaaacttttccaaatgatcaaagatatttggccacaattcaagagcacagcattcatttgacaatctgcgaatttgctgacaccaagattagatgctgttttttcacctcatacaaaacttacgcaaacatttgtcttcagcacatcttttaggtcgttacaatacggatgcaaattttgcacttcattctcgaatgattactgcgattgcattcattccggaagaggatataattcggtccttacaggaactcgaagatcatactcttgatcattatccggaacttgcgactatttttgaatggtttactaacacttatgttggaagaggaacaagggcacctccaaaattttcctatgatatgtga

SEQ ID NO: 66566 - DNA, 457 bp, Heterodera glycines
atgagaattttcattgtaaagatcacctccgccgcaaaatgtgtcgaactgtttggtgtgtgcaacaattaccgtgtcgactaccgatcgtttgacgcacagccaattctcggcttggaaccacactttcatacggtaatggagttggccattggcacggcacagttcagccactttctgctcgagatcagcaatggcgtgacccttctcgagctcaatggccaactgggattggtaaaaaataatgtaaataattttagggtgacattactcacattttcaaaaaatcttgtcacgccgtcaccaactcgcactgctcttggacaaaaacgtgccaaacttttcgggtcaaacacctaaatcttaggagaatgagtaaattgtcgtcaagactctcgagagttttatctgattttcaatttataatatcggaaaatataaatttcacttcacccaa

SEQ ID NO: 66567 - DNA, 677 bp, Heterodera glycines
  unsure (1)..(677): unsure at all n locations
atgccaacttgcccgctaatccnccactgggttaggggcaatgtagtagaactaatagaaaggagaataccgtctaccaaaaaaggagttgaaaggtgtgaaaagcaaactgtaacccaattgtgcaaatttattattaaaatgcacgattttgttttgtcggactataagctaaaaattgattaaaaaaccatttcaatgtccgtgaacggcatcagaatgatgggcgtctgtgcactgtccacaaagaatgggcagcgtttgatgtcaagcggcggcttcatcgtgtttctgcccatcatcgcaagcaaatcctgagcaagtgatttgttagaaatcggcaaaaattaaacagaaatcatggccaaaatttttttcaaggtttggaaattgcgcgccgaatttttttgagtatgaaatttcagagagaaaagtcgaacaaatttaaaagagaccgacggaatggactgatcagcaagaatgtcaaaatcttttcaatttattgtaagaaaaaccatgaaattggtaaagtttttaggcatacttcacgtccgtaactgtgcttggcaaaaatggggtcgcaggtctaaaaatggaaacagttaaatgcttgtaagaataaggtttgtcaaaaattaaccaaagattatggaaagtagagggaattttataataaa

SEQ ID NO: 66568 - DNA, 965 bp, Heterodera glycines
atgagttcgccaatattggatataattcacgggttagttaatcggatagaggttgaattaaacagagaaattccgataaatcccggtcaaaatgcaaccccaaatacaatccaaagacatttatacagagcaaaaaatgcttgtgatgagttaagcgaaattttggaagaaattcagggaaaacgcgtagaaatggcagaaagtttgcaaaaaattgcagttgcagcgcgcgaaaataaggaaagagtttatgtagacttttgtacacagcttgacattgaggcaaaaattaatcgagcagtgattaagaaaaatgaatggcaaaacaaaaaagaacaattggaagatatttttgacataaaccctcaaaattcgctaaacagcacaattcttactccaagaaatcagccaatcaaaagagtgaaaattctacaaatacaattgaaaaatttgatgggtcagttgaaaaatggataccattttgggagacattcagagtacatgtccacgaggatgattcggttaccaaaattgaaaagcataatttattagagtcaaatttagaaggggaagctaaggagctaattgagggaataccaatttcggaagatggttaccaaattgcaattgatttacttttggaaaaatacggtaaaagtacaaaactaataagggcactcaatcaagaaattaatttatttccccaaagtgacactgttgaagaagatgaaaaattgtacattaaatttgaaaaaatttgccgacaattgtcaagtttaaatcaagacatggatttatcccctcattatttatcgcttgaagggaaattatcacctttagttttggacaagtatttcgttataaaagatgccgaagataatcaaaattggaatactaccaaatttagaaatgctctatcgagagcaattgagcaaattaaaaacagacaagaagtgagacaaaag

SEQ ID NO: 66569 - DNA, 4474 bp, Heterodera glycines
atggaccccaatcagcttaaactgattttggaggctgttttgaaggcatcggcgggacaagtcaacaattctgcggcattggcgacatcaatcgatgcgcgcctttcgacatttgattatgaccctgagttagggcatacatacgacgtttggctcaagcgctatgggcagaccatcgcccaggatggacaagcactcagcgaccagtcaaaagtccaactattgattggcaaactgggcgaagtcgagtacaagcggtacatcgacagcatcgcaccaaagtcgcagaacgacttcaactgggatgagacgaccgcaaaattgaaacatttgttcggtgaaacccgatcattgtttctccgccgttttgattgcttccaaattcgtcaagacgcgcatcaggacgtgcaaagtttgatcgcattgatcaactcgtcctgcgaaaatgccgatctgtcgctgagcaaagaggagctcaaatgcatgatactgatcattgcattgcgggacgaattcaccgatctgaggcaaaaatgccttcagcgcttggaagacagtcgaacgagcggacggtcgacctcactgcaagagctgggagaagagtgccgcaaataccaaatcataaaggaaagcgcgctctccctcggctcaaatccctgcagcaccagtgccatccgagccaaaccgcagcagatcaaggacaagcagaagcccaaaacgaagccgcagcaaagccacaaaggccaaaatttcctgccgaaaaattcaacggcacctaaaggaaaagtggaccaacgtgatcagccctgctattcatgcggaggcaaaagtcactggcaaaaagactgctggttcaaaaactcgacgtgtgaaaaatgcggacggaacggtcacattgcgaaagcatgcaaaagcggcacagagatccgacgtgttcgtgcagtggccactgattccgtgaaggacacgcacattcacaccgtctcaattaagccaaaatgtatggctattgaaggaagcagcaacaaatggtgggaagtgatcatccaaatcaatgggatggatcacccaatgaatgtcgacaccgctgcccaaatcacggtgatcaaaacggactcatggcaaaagcttggcaaaccaaagctaggcaaaacggccatcaccgtcaggaattgcaatgaaaaagcattctcaatcgaaggcaaattcaaatgccaagtttcgtacaaaggacgaacggcaagcctgattgcttacgtcagcgacgaaatccatcaggatttgctcggcatgccttggattgaagaattggaaataatcccgaaggaattgatgtttccaaattcgtcgcaaatcgtcaattcactgccaacgaagccaatttcatcacaaatcagtgatgaaaagtcactcatttcggcacttcaaaccaattacgccaatacttttggacctgaacttggccattgcaccaaattcagagctcatctgatcctgaaaaaggaggcgaagccggtctactgcaaggctcggcctgttcctcatggagcattggatgaagtcaatgccgaaattgatcgtctttcgaaaattggcgcaattaaaccgattgagttcagccattgggcggctccgattttggcagtgaagaaaaagagcggaaaaacgcgagtctgcatcgatttttcgaccggcctaaacgatgcgatcgaactgcatcgtcatccactgccaaggcctgaggacatctacaacgcagttggcggcgctaagtttttctcacggctcgacttgcgtgatgcctatctgcagttagagttgtcggaagcctcgaaaaatctttgcgtgctcaacacgcaccgaggcctgtttcagtgccagcgtttgccgtttggagtcaaatcggcgcccgcgatttttcaaggattgatggacaaaatcatcgccggaattccaggcgcattcgtctatttggatgatgttgtgatcgccaataaatcactgaccgatcacacctcaacaattttcgcggttttcgacaaaatcagtgaatatggccttcgaattcaattggaaaaatgcagtttcctgcaaaaggaaacgcttttcctgggccacattatctctgaaaatggcattcgacctgacccatcaagggcagaagccattgagaaaatgccggcaccgaccgacaaatcaacgctccgatcattcctcggcgcactcacttattacggcaaattcatcaaaccgatgcgtgagctcagaggcccgctggatgaattgcttaagaaggaggccaaatgggaatggggagttgagcaacagaaatcttttgagaaagcgaaagaaattatgctttccgatttactgttgactcatttcgatccagaattgccgatcgtagtcgctgccgacgcttcgaaagatggaattggcgcgacgataagccacatctttccggacaagagtgagcgcgtcattgaacacgcctcttgtaccttcaacgcggcacaacacaactacagccaaatcgaaaaggaggcacttggcttggtcttcgcagttcaaaaatttcaccggatgctgtacggtagaaaatttacgctgctgaccgaccacaagccccttttggccattttcggatcgaagaaaggcattccgatctatgccgccagccgacttcaacgttgggcgttaatactctccaattatgaatttgacataaaatatgtcaacacaaattcgtttggaaacgccgacgtcctgtcgcgactgattgcaaactacccacggcccaacgaagacattctgatcgccaacatttgcgaaaagacagaatgctacgtcaacttcgtttttcaggccaaagttgagcaattgccgatcacggccaaagaaattgctgatcagacgaaaacggacgaagtccttcaacaaatcagcaaattcaccaacaaaggatggccacaaaaatgcacagacactgatctgatgccattttatccaaaaagagaccaaataaccgaaatcgatggttgtctcacttatggcgaccgtgtaatcattccaacgacacttcgcagacaaattctgaaatcccttcattttgcccatccaggaattgttcggatgaaggccattgccaaaaaccatgtttattggccagggatcaacagcgaaattgagcgcactgtccgccaatgcgacgactgtcaaatggccgcgaaaaacccaacaaaggcacaaattcagccttggaaagcggcagacgaagtttttgagcgcatccatctcgactttgcgggcccatgcgaagacggccaaacgtatctcgttgtcgtcgacgcctattcaaactggccggaagtttgggagatgagtcgtgcaacaagcgaaaagaccgtcgctatgctaaaatcgttcgtccatcgaatgggaattccccgagaaattgtgtccgacaacggaacacaattccgatcagcggaattcgccaacttctgcaaggaattcgacattcgtcacacgttcacgccgccatatcacccgatgtcaaatggggcggccgaacgattcgtcgacatcttcaagagggccatgaaaaagtgccgaaaagaaggcaaagattggattcccaaagcacttttggcctacagaacaacgccaagtgcagtgctcgacggacactctcccgacgaattattccttggacgccggatgcgaaccaaaatttcattggtccatcccaccaatcagaaaatgccgaaagtggatttgaaaaattttggcaattttcaacaaaattaccgtcaaaagatgaaacggcaattcaacgacaaaaacggcgccaagcccatcattttccaaaatggagagccagttttcatttggaatttgaaaggcaataaggcaaattggttgccggcgacgattatcgagagagttggcaactctccgacttatcgagtcgacgttcagacgctccgtcgcgcagtacatcgccatgccaaccaaattcgccgtcgtttcccaatggaaatggagacatcgcaaattggccaagcaaatggaaatattttggctgggaaccaaccaaatcggacccccattaaggagattgaaaaagccaaatctccaattggccaaaatcaaaatgcgccgcgaagatcagcacgcgccaagagggcacctcagcagctgaacatggacccgtcgaagcggaagtacgatgtattccggccatgatctcgcgcagagggatttttccaaaaaagggaggtgttggataagggaacaaccctattgattatattttccctttcactccctctcttattgtctctcgccccgccccttgaccagccccataaatatgtctccctttccctcactccaggcattctcccattcattcctccatttcattattttatttatttattccctgctgtcctccatatttatttgttta

SEQ ID NO: 66570 - DNA, 2018 bp, Heterodera glycines
ctatcaaaaccgccaacctctccccccccggttcccctaaagtttttgaaaaaatttgcagcaaaaaaaatcttaaaaatctgattttttgattccgtttctcaaaattattaaaaatgatcatctgaggcgaaaatacaaaaattgatattaattgattaaattgtaaaaaaattatttaaggctatgttgttaaatgttctcatttttgaaaatctgattttttgggcatgatattccaattttgaaaaatttctataaaaatctgatataattcacatccctttttttcttcaatcgaattgatcaattataaatattagataaacatttgaacaaaacttggcacaaaatgtaaaaaaaaaaattgggtttgagcaaatcccgataatcccgcgggatcccgaaaaaaatcttcaggattgatctggatcgggattcggtcgggatcccgacccgggatccgtcccgatcgtttttccaaaatgttcgggattgatcgggattaagtcgggatcccgactcggttccctccgaccccagttgtctggtctctagtttaaaatgaaagaaaaaaaaattttttttttaaattaaaatttcattaaaataaagaattttatttattaatttctatttttcattaaaatgtatttgttaagcaataaattgttcatcgttgttccgttttcttatttctcatgtgtgtgctataatttgttattaatccagtaatttttcgtaaacaatttgtcatgccattcaattccgtatttgttgtcatatgcatttaaatttttttagttttcccaattttttcgtatttaaataaattccctaaacgaagtcactcaaataaataattgaaaaaagaaaagctaatcgtttgattttcattaaatgttgcctacttttttgctttttactacaattccattgttcattttcctgcattctgtccttggtaaggtggttgagagttcctggattaatattaattgctctaaacacttttaaattcataatacatatttagccggcgttcttccgggatgcggagatgacgagcccaatgagtacgattgcctgaaaaagggggtgaatatgtgtcatttattttaattttttttcaataaaaaccccaatttagcggggggggggggggtgagaattgaaaattgaataataatgagaataagcataaataatatttagtgcgacttgattaaatgccctaatggaaaagtgtgcggttactttgtcggcattgccaaattaggcaaagggccgtttgaaaagaatgagtacccaaagtgtgtgagtgacccttccgaattgaacgtcacaacgccaaatgatggaaatgcgcacattgaagtggatggaccaggagtatgagaagaacccctttatttaattaacaaaaactaaaatttaaaagccatttttacaaaaaaaattagtgtaagtcggtggagtgtgccgaagggtttcaatgccaagtgcggatcacaatcgacaaacatggcgatcgaccatatgcacagataattggaggtcggttccgtgagttcaacgatttgcatggctttgccttggaaagattccctaattatttatatggaccaaatgagaaaataaataaatgggtaaaagcattaggtttgacatcacagcatctgctcagaaaaagatattcgttctgtcttggaaagatttatacggtacccattttgacagtacaggtttcccacaatgtgtgaatgccactggtggatcgtttcaagagccaaattatttcattgttggaggcccaggggtaaaaagaggcagtttaatgataagaaggataataaaatttagtgtgaccaattgccttctccctgcccatcaggcacaaaatgtgttacaattgttggaattgcaaaatatggcaaatacccatgggcccaggtccatgcatattttataaaagtaaacaattcttaaagtttcagttttttgagcccgtttgcaca

SEQ ID NO: 66571 - DNA, 307 bp, Heterodera glycines
atgtccgtttccccggtgatcagtcgcatgctcagcgtggagatgaaggagaagcagcagcgaatgatcactttggacgaattgggcgtggacatggaccaattcatggagtttttggaggccatcacttatctgaacggaccttttatgcccaaccgtaattcatgatactgtacttattctattcaatcccctaaaaaatactcttccatttttatggggttgaaaatataatttttttaaaatatgattccaatttttagccacaaatgtgctgatgcttctcaaattggctgattacttccag

SEQ ID NO: 66572 - DNA, 389 bp, Heterodera glycines
gcgaagcggccgaatgtcccccaaaaaattaaaaaacgggcgcgaagcgcccatcctgaggccgcgaagcggccgaatatcccccaaaaaattaaaaacgggcgcgaagcgcccgtcctgaggctgcgaagcggccgaatgtcccccaaaaaattaaaaaacgggcgcgaagcgcccgtcttgaggctgcgatgaattgctaaattacatcactttctagcgacgcggcgaagccgcgtccctgagcgcgaagcgctttccccacagcaacagaactcaattgataatgtttttgtatgttttaaaataacaaatgagggccatatattaccaagccacgcatgcacaccatagccaactgctcaccctagttactatatatgttatat

SEQ ID NO: 66573 - DNA, 397 bp, Heterodera glycines
atgatgcgcaagtttcccgacattcccgcggagtttctcaccgttctcctccaaattcgcgaggacattggccgaagcgaggcaaagtaagtaaaaagactgttttaatatgcaaacttcgtttaaatcaccattctctctcttatccgttttttgcagaaacatcgctgaagaggcgttgaacaacacgcgctaccacccccggggggacgcgcaggtcagacgactcttccaactgtgcaaatcgggcggaagcggcggacggcgagcactgcccgcgttggagtcgacggtgcagaatatgtttgcgacaatcatcaccaccactaagtcgacgaccgtttcctcaaatttgggcttcaaatgaatggaagcctttcaaaaaatggacaataaa

SEQ ID NO: 66574 - DNA, 427 bp, Heterodera glycines
atggagaaggcctgcaaaatttggagagattatatcgattttagtgcgctaggttcgatgaaactttttaaaatataagcctaaactttttggcctgtttaaaaaggaattaaaaatttttaaaaattttattcatctcccttttgatagaaaaagcatcagagagccttatttaacttttaattaacatttggtgcgtttcagagcagtttctgaaaaaatatttatgaattgattttgctaaaaaaataaaatagtgaagctttaaaaattaataaaaaattttaaattcagaattactggagttagcatcatagcagtgcttttccttgtctttttgatgctctcgcaaaatctggttcgcttctgatcagtttataaaaaaaaagttaagcctaaaatttttcgcatatttaaaagcattaaa

SEQ ID NO: 66575 - DNA, 129 bp, Heterodera glycines
aaaaggaattaaaaatttttaaaatatttattcatctcccttttgatagaaaaagcatcagagagccttatttaacttttaattaacatttggtgcgtttcagagcacgttctaaaaaatatttatgaa

SEQ ID NO: 66576 - DNA, 94 bp, Heterodera glycines
gttggagagggctctgcgagaaaccattacgcgtgcagctgaccaactttgggtgcagcagctgcaaaactcagtgactgctcggaatggctgt

SEQ ID NO: 66577 - DNA, 171 bp, Heterodera glycines
atggacaatttttgtactgtcaaggaaaatatgaaacaacttttacaactatttccatggtataattttttttccaattatttaattagatttgaaatataaaattttgcttttaggaaaacaacacagattgtctgtggcacaaatttatggttagctatttgcatttaa

SEQ ID NO: 66578 - DNA, 460 bp, Heterodera glycines
atgcgaataatgcgaaaggcgaaatgcgaaaagcgaaacctcggcccatccctggtacatacagtctttaacaaaattctaagtccaagaattttttgaactttacctacttcacatggaccaattgagctcctcaattttttatcaagcataccctccacattaatattaagattgacagaaaaaaaattgaaagtgcagaagaaaaaaattttaatgaattttcacgaaagttgcccaaatttgctgttacaaaaatataggtccaagatttcgaaacatataactttttttctagggtaagaaaggaccaaaaaaaattcatattattataacttttatgcttatcaaaaagccaattgcacccagcgatcagatcaatccttcggggtgatcgggagtgatgaaaattttaacacccccaggggaattgagctttttctgaaaattttcaaacaca

SEQ ID NO: 66579 - DNA, 499 bp, Heterodera glycines
atgtcgtcatttcgcaaaagcatgctacgttgtcttgaaatgtttttatgtgctgatcaagggaccataagcgacaaatgtctctgtctcgaagctgatccatgcccattggctaaaagcaaaaaagcaacaatctcgagaaccaatcattttaagcggtactcaagaccaaaagttgactccgaggcaggggcatataatttggaaaaaattatataattttaattcgtccaattaatttaaattaaataattataaccctttacatttttattaaggtaattgttataatttactttcaaaaataactgatttaattttgaatattattttataattttcaaaaaaatttttcccgagaatattttatttccaccggaactaaacattggcaattcctctcatataaatgtccatttaaacaatataaaatgataaaaaatattattgttattttcttcatttgatcatttaaaaagggttgaaaattatttttata

SEQ ID NO: 66580 - DNA, 520 bp, Heterodera glycines
atgaaactttattttattcacatattgccattaatttgttcagttcacgtagttttgactgaagttggtaataaattttttaaattttgtattttatttcaaaaattaaaaaaatccatttatttttgtattttaaaataatttataattattattaaaaattttcgaatttagattcaaccgacttgctgtatgccgattatattcttgcgccatcggattttcctgaggaaaaacgcgaaagcattaagcggttgattttctttaagtattacgataattcaattgacacaaccatcgctaatatgacaaaaacagtaattgccgtatcacaattgagttacaatacgaatgcaagtaacttcgttcttagtaaagttttgcaaaaactgaacaaactcaatgaaacatggaaagaatatcaggccagtttcaatttaagtgaaattgtgggaaaaaaagttgacagtctgaagacagtacagtaatcaggacgaaaataattaatatttttaataaa

SEQ ID NO: 66581 - DNA, 930 bp, Heterodera glycines
atgcgccttaacaataaacaaaattttatgagtccatttttgaataagcaatttatgcaagctggcggcggtttggtgaatgattacggagggacagaaggtaagaacaataatatgtttgacgggattaattaatgaggatatgtacggtaattttgaaaaaagtcagaaaggctttgaaattaattaccctattatggtatcaaaaatttagccaaatgcgtaacataaattgtatttttattgtccgccaggaatgtttgatccatttggtggagatactggtgcatacccatcaggtaacgacagctatatacttttatttttaattaagccactattaaaaatagggttctgctccgacccctcggggggcaaaatttcgtgggccggggaccccggtcggaaaagttgcatttttttactcaaaataaaattttggtcactacccgacctggctaccggaaaatgtgtcagtgcatttttcttggaataaatacaattttcttgggtttttaaagtcactgatcttgaatattgtatatatttcggccaattccgaccccggagccgaattcgaacaaaaagacgaatacattaattacccaattggggtgtcacaatttagccaaataagtaatataaattatattaaattgttctccaggaatgttcagcggagaagatgatgcatacccaccagcaggtgacgacagctgtataccatttttatattaatatattattaaaaggcctggaacaatactaccaatacggttagggatacggcgctgatccgatatacagtgtggacgaaccgtagggtcatgaaggtggattttaattttgatgaccagcagatgatggatgatgatgatatatgatggcaaaatgtattattatttgtatctacaaattaaaaaaatgata

SEQ ID NO: 66582 - DNA, 1554 bp, Heterodera glycines
atggtctgtcaaaaaaggatgagttttaatggctaagcgttttggacccatattaatttgactaaaatttaaaactcaatttcgagaaataaaattttataccttttttataataaatttattttaaattgtaccaacaaaattagtaaattgtttattgtgcctttattcttgaattttttgggattttctgctacttttgtcgacttgaacccaatagtgagatcctcgaatagctagctgtacaacaattcacgcttattcagtaaaaagtgccataatttaaggcacatttgtccttggcacaaatttttggcgacgccgatgccgtgccgaaactgtcaccacccatccagctgtacgacttcattgctccgagagcgtatgctaattggcctaaagtggttggccaagcgcttaacaaacggaaacaattgcatgaaaagattgatgataacgaagataaagagcaactgcaacaaggggagcgtttcatcaatattccgtcaattaaaaacatatttaacaagggtaagtcagaacgtaatggatcataaatttaaaaattacattggaaattatttgaaaaaaataggcactttaatttatagttatttttggagaaaaattaattaaaattaagagcaaatatttcaatttatcctattagaacattaaaattaattcaattttatgacagaaaaatcggagaaaccccaacttgttactaatttgtaagcgaactcgtagtgcctcgactagtattttttcgacaaattcgttttaacttttgtcaaagtcaatcaaatttaactctaatttcattagagttcttaattttcttgcaaaattaaaaaattaaaattttttttatcatgtttcaaaaaaggttatgaccaaaaagcgtaaatttttgcccatttttaaattggtcaactttgacctaatttaggacattttttcggaagacattacgagtcgggcaatgcgagttggtctggtacgagttgggtttaacgaacaaaaaatcatatgtttaatgacataaaagatataaaataaattcaattattttaataatttaacaaattttatagctcttccttatttggtcaaagttatgccaaatgttgcaccaactctctgcgcgctgaaaggttgtccgccaggaatgcttggccaattcggcggaattggtggatttcctggtggaggtggatttcctggtgcataccctggtggaggtggatttcctggtggtttccaaggtaaaaaatatcctggtatggcatacgatccctacgcttaaggagcgcccgggtacccaagcaacgaccaaaacggtggagcatggaatggtggtccgcagtacggcggctaatacgccggcgcttggcggtttacaaggataaacatcgaaacaaatgttatcgtgaacaaatccatgaattttatctgactaaaagatttgaggatatttgcatttaatattattattatttgcttctatttaacaatctaaggattcaaacaattaatgatgcttattacgga

SEQ ID NO: 66583 - DNA, 832 bp, Heterodera glycines
atgaaaaactattacagtaattttgaaaaaaaataaataaaaaaaactatgtaaaaatttaaggaaattcatttattcaattttggagcggatttgtgccagtactgaatcggatgggtggaaaggatgtttcggaggtgtgtaaattaattcaaatttacaatttttcccaattaaaaattcacatttttgaaggaccatcatcttttgccctcccattttgaccgtacaacattttttggcgttccgcgtccgttcggcgccatttcaaacattccatttcccccaccgccgccacccccaccaccgacaccgtttccgaaggaattgcatgacaaaatgatggcacagggtgccgccaatggttgggcctagtttttggaggcgttttttgaaatttaatttttagcggcgttttctacaacaaaaaggccgggcacggaatcaggcgaatcggtaaaacgtgccgaaaaaaaggattaaaaaatttttttgtccgattagcaaatgtatccatccaaaatgccggacaatggcatcatcagtaaaacggcggaatttaatccgaattggggttggatggtgttgatcggtgtcacattaactgtcatcaacctgtgcattctgattgccatctccagaaaggtgtgactaagtttttttttaaaattttccaaaaaatcgcaagaatttttttttgaagtgcattcgacaacactccgagggcaaaaagaagtttcaatatcagagctatgcaagcggtggcgtgccacctccattgccacccatggacatgaattatgcattgatggcacaacaggtgggcaaaaaa

SEQ ID NO: 66584 - DNA, 504 bp, Heterodera glycines
atggagaaggcctgcaaaatttggagagattatatcgattttagtgcgctaggttcgatgaaactttttaaaatataagcctaaactttttggcctgtttaaaaaggaattaaaaatttttaaaaattttattcatctcccttttgatagaaaaagcatcagagagccttatttaacttttaattaacatttggtgcgtttcagagcagtttctgaaaaaatatttatgaattgattttgctaaaaaaataaaatagtgaagctttaaaaattaataaaaaattttaaattcagaattactggagttagcatcatagcagtgcttttccttgtctttttgatgccctcgcaaaatctggttcgcttctgatcagtttataaaaaaaaagttaagcctaaaatttttcgcatatttaaaaagcaattaaaaatttttagattttttattcatctccctttttgatagtgaaagcatctgagtgcctaaaataacttgcaaataaa

SEQ ID NO: 66585 - DNA, 774 bp, Heterodera glycines
cggaggaccaaattcagtttatgtggacaatgcgcccgtgtacgacccggaactgctcggtggtcgtcttccgctgctcggcatttgctacgggttccaagtccggtccaaatgattcatatttattgccagaatttgagtgcattttttccttcccattttagctaatcaacaaacacttcggtggctccgtcagtttgcagccgcggcgggaggatgggcgaactcagatccaagtcagcccaaagtcggaccttttccactcgttgaagccggaccaatttgtgctgctcacccacggggacggagtgacaccggaaacgtcagccaaaaatgggtttcaaccaattggcttcagcggggaatttgtggcgggtaattaattaattggggttaatgaacaacaaaaacttgagtattcagccatcgaaaatactgaacggcgcatttatggtcttcaatttcatccgggtaagagaacaaatatttaaatgggaattggcaagggatttacgtattttgcaaatagttcgaacccgcactttttcagaagccgacctcaccgaccagggtattcaaatcatcgacaatttccttcgtcggatttgctcactgaagtgccattacacactgcgcaatcgcgaacaaatgtgcgaggaacgcattcgaagtgcggtgggagagaagggcgaagtgctcgttttggtgtcgggcggcgtcgactccaccgtttgtgccgcgttgtgcaccaaagcattgggcgcagagaaagtg

SEQ ID NO: 66586 - DNA, 797 bp, Heterodera glycines
atgacgcttccttcttgctcaaaagatggtgctgcaagtctcagtccaatgtcattcaaagaaccaaatgcttgtccaatgttggaacggatgcattaccagcgaatcactggaaggttttccttttagacaacacagcttcatttgttagttcttttaggttttgtgatgcatgtattttcgttaaagaccgccagttcagtgctcacagaatggttttggctgcccatagtccgtattttgattcaattttgcgtcacaacaaaattgcgaaagagaaggtaaagagcgtttgttaattggaatcctttgttatttgttattcccttcagattatagtcaattgtcaagatccgactgtgttcgatcgcattctcaattatatgtatagcggctcagtgacaattgacagagccattgttgtggaattgttaaaattggcgaataatttgctagtgggttttgcaaaattagattcccattttaaagtttttttagatgatccgcttgaaaaattactgtgctgattatctgatgcgttacattgatgttgcaaattgcttggcaattcgtgatttggcctcccgttacaatttgccgcgcttgcaaaagcatgccaacgaattcttcgactcaaatataaatgggttgttcggtctattgtgtgttaagagcaaaagccgtttcagatgtcttttggaaaatgctgatgtgcttggctgggaacccatcaaattggtcgaattgcttgaaatgccacggcatgcgagcaacgtccgtgccgatgtctaccttaa

SEQ ID NO: 66587 - DNA, 974 bp, Heterodera glycines
atgctcaactcgcgcttcaaaaatcgcatcgcttacggaggccttggcaccatcgacctgttcaagcgcacatggaaggtggttggcggcattcatcggcgatagggggagtggggaggaataggcacggcccaagaagggtggcatgacaacactcgcacaaaaagggaactcgtacaatggcttaggctaggcctaagcttcagactaggcataggcttagacttgtttggcttaggctttattttgtaaatttttattgtacgaattacctttagtacgagttgccattaatccccaagaggggttggcacaactccaaatttaagggtttatgctaaatcagttgggcatgaatgggggagtactgggttggcacagtcggagaacagtgacatccaaatttggtgggtaggagcgtttggcacgttcactgaaccgattgagagagattggcacggctcagaacaaatgtcactacagaacccaaccaaatacataattgtttatcccttaggacctttccgagtacattaatgttgagtgtgacggggtggacatcaccgccaaaattcgcgagttcaaattccactgcattctgttccacaacatctctttctacgccggcggcaccgtcccgtggggtgccggcgacggagtgcaagtgaggcgattaatgtgttaattagtagtttttggcaaaagcattcaaacaattagttggcaaataatgccattggcattttggcaaaataaatttggcattctgctcaccaattttactgctccgatttgaggagaactgtggcgaagtgttctcccgtccgtcgccatgtgatggcaaaattgaggtgctcggcttcaccaccgccactttggccgccctccaaatgggcggcaaaggcgagcgcatcgcgcagtgctcaaaggtgcgcattgagacgagcaagccgatcccgatgcaagtggacggg

SEQ ID NO: 66588 - DNA, 929 bp, Heterodera glycines; identical to SEQ ID NO: 37540

SEQ ID NO: 66589 - DNA, 2864 bp, Heterodera glycines
  unsure (1)..(2864): unsure at all n locations
atgagtgatgacgaggattacatgtcaagtgctttcttggcaaaagtggaagatgttaagccaggtgctgtgacccattcacccatgaaattgttggtatttgatttttggtaaaataattcccttaaaggtgtcggcaccggaagagaggggcgtcgaattttgcgaattaatgccaaccgagaagaggcgattgaaagacagcgggtggagaagccaaagtcaaaagccgaacttgaaagggacagactaatggagggactaaacgatccgatccgagcggagtcaaaaggctttcaattgttggccaaaatgggctacaaagagggcatgcgaatgggaaggagcgcagcggacgaacagcagatggacagtcggacgaaggagcccattctgatccaactcaggattgatcggtcgggcgtagggatggacgagcaccgaaaggagaagcagagggatttgtgtgaagcgcacatggagcgaatgaagcgacaggcggacaatgaggtgggacgcaattggaaaatgatgggcggggaatcgatttttaaaggaagaattggccatcgatttccgaagacgcaaaagggcagcaatggaaatgaagcaactgatctcggagatccaaaaactgagaaagacgtgccaagagatggacatgcggtgggcattgngagggagttaagcgaaacattggatttgttcagaatgggcaaaacaattccagacgaattttggttttggccgatttattcgaacaataatgaattggtcgacatggtggaagtggtcgacaaatcaaaccaatcgatggatgaaaacaaacggacaaaacgagagccttcagaaggagcggagggccaagtcgagcgatacacatacggcaacggggaggaggcaccgatggcactgaatcttaacgagttggacaatcggcacttggaagagaggtgggagatattgttgggcttcgtctagcacggcattctcccattattcaatacggtgcttttctgtcaattgcaacccgtgggaggctgaaaagtgaaatattcaaaattgcatgaaatagttttcccctttgtggactctagtttttctctgcttctcctgggggtggtttagtatattgtactgacaatgaatcagaggcttttgcggttaagtcaatttaagaaacattttagcttgacaaaaatcattgcgtacatgcggaaagtgcacttttattgtctgtgtgagtgtatgggttgtcaccaatttgcttctcccattctcagattgcggatgcgcattttcttcttcagaagagattgattttgagtgtccgggaatcattcgcgatgatcatgaataatttattcgtacaataaaattttttaccaaaataaaagtagccaatttttttattgctgaaacgtcaactgattcttagtttttatttaattttttggctagtcattctaaaattttaaagcatgaatacgaagacaaatcaaaagccgatcaaagttttatgtgcgggcgatgtcaatggaaagtttgcgcactctcagcgcgtgttaaagcggttgaccaaaaagtgctttattatgaagttgatccatttctatgtgtttgttttttcagtgcggccctttcgatgcacttttttgtgttggcgaatttttcggaccgaacgacgagcagaacaaatccgttttggagggagagatgcagctgccgctgcccacttacattctcggtgtgcgtacttacaattagcagggtgcctaatgtgccgttctaaatgagttaattgccaatttgataatgcttccgattcccaagcaggtccttcttgccagttcaccaccgtttactttccgtctgaaagttcggagctttcccaaagtctcacatttttgggtagaaaaggcattttgacaacagcgagcggaatttctgtcgcttatttctccggcgttgaagaaagccctggaggacaccagcaggacgagacgaaaccatttgaattcgaccagaaagcggttgatgatttacttttgccactctccgccaattcgggctttctcggcgtcgatttgctgttgacctcagtttggccagccgatgttatgccttcccttcttcatatgttacctaatccaagtgattttcaggtttggaaacactcctccaatcagcccacttctccgcccaatgggtccaaattgatctcgcggctggcggcggggcttaaacctcgttaccatttttccggttactttcaatgccaaattattcatttgcattatttaatgataaaaaaggtcatggagtccattacgaacgctcgccttacaggtgcttcttctttctgtttaatattctgttggtttttgttaaggaatcaccgcgttctgcttgaagctgcacaacacgtcacgcgattcatcggactttctccggtggacaatgcgaaaaaggaaaagtggctttacgcctttggcattgtgccgatgcgcaacctcccccggggcgaattggtctctcagccccaaaactgctcggaattcccttacatggaaatccttcaggtaacttttctcttaatttggattgccttttctaaagtaaaatattttaggattatcttcggcaaaaggctgaggaaaatgaacgacgaaaagccgcggaaggggcggcggtgcaattcttttacgatatgcaaacggtggaggaagaccaaacggacgtcggggaaggtcgaaagcgacggaggggaggcggacggccaacggacggacagcggaggccacggctcgacccgaaggcgtgttggttctgtctgtccaacgcggaagcagagaagcatttaa

SEQ ID NO: 66590 - DNA, 687 bp, Heterodera glycines
tccctccctcttctgttttccgcgtgggatggctcgccagtgatgtgaagatttctgcccgtcattttctctcatttttccctttagcatctccaatttcaatttgttccaattccaaaaacaaaaagcaaagcattgcgcagtacgtttctcaatttggcacgtctcaagaacattgaattttcatttttaaaggatgaagacaatgtgagttttatttgtgtccgagtgttaatctctttgtttttcttggtttttgtttcatttgtttttaattaagtgaatctctaaaatttactcaatttcaagctaaccaaacccaaagtcgaaagaaacaaaatgatactacgagccataaaatactgttactcttttccattttacagctttgggatctcgtcggagagggttctccctatttttatgccgaatttcccgacggcagcaaaatgttgagccgttcaatggcacagtttcccctccaatttgggagagaggtaaaaaccagagaaatatctaaacatattttttatggctcaggtttttgccaacaaggcccttttggactgtgaagaaaaggtggattggaggaactgttcgctaggcaaaaaggaagaagagaagctgacaatagcacttaaagagggatttaaacctttcgcttttacgggcgatagttctggagat

SEQ ID NO: 66591 - DNA, 83 bp, Heterodera glycines
atgccaccacctccgactgcgatgacactgggcgacgaagccggtggagcagccgttggcaatggaccaccgccaaccgcggg

SEQ ID NO: 66592 - DNA, 1568 bp, Heterodera glycines
  unsure (1)..(1568): unsure at all n locations
cagcaacancggagttcatcaccagcagcagtcttaccccgcggttggcggtggtccattgccaacggctgctccaccggcttcgtcgcccagtgtcatcgcagtcggaggtggtggcatgcttcatcccggctcaaatgcggcagctgcggcgggcatggcacgcgctccgacattcaatcaccacacccagcagcaacagcaaatgtttaacaaccaaagcgcggcggcattctatgccgcttatcaacaccagtttttccaggttttatttttttgaaaacagtgctcttttatacaaaaacaaatttgaccatatgaccccaaattttccctacgccggatccaaatttccttttattttttgccaaggcttacaattagcctcaaaattttcaaatttttgcaaaaatgactaaaatttcccgtttttcccacggtagacaaaaattcaggaaacttacatttgacaaacaatttttgaccgaaagagaaaaaaaagttccaactgctcctcccgaaatttttttaagtttacgggcctgggacaaaaaatatagttttgtatataacctgaaaaccaaatccaatgttatatcttcgtaatttcagatggcaccgcataactttgtcaacccacaagcggcgcacctccatcaccagcaaccgccgaacaatccgttggccgctgccgcctcagccgccgctgctgcagctgatgctgcacaacagcatcatcagccacaacatcatcaccaaacagcagaatgggcaagcagcacaacagcagcaacatgttcatcccaatctgtaccagcgacagcagcaaccggctgttgtccccagcatggcgccggtgggcaatccgtgcgcgaccttcgcaccgtcgaactgccattctacgaccagatcaaagtgagctggttttctaacaaaaagaaattttctatttattaacaaaaagttgtcatttctcagcagatttttatcaattattttggttttaataatgtctgattgtgagtgagaatttttcttgtttcaaaaatttaaatttttggcatacaatttggttaagaattatcccccccccgtcccggccgggctttcattgcaatttgtttaggtgattgtgccaataactgaactgcctccgtatccggtgcctattcgacctggcgatgcgcgtgcttcgcattcgtttagcgtacccagtgaggacatacaaaaggtgcactatcgcattgaggaacaaccactgccacggtaattgtcgtctctctctctctcttgccaatctcgagcaatttgggctctaccaataagtagcagatttttttagaatttctgaattattcctttggagaaatgataaatcatctttttgaaattaataattcacaattaactctcacgtaagtgttgttggcaatttaattcagtcccatacaattttcagttacgagctccagttgcgcatgtttttgttggagaccagtgaggagcagcaggacgcttttccgcccggctcgacggtgcgagtcgatgaacacggagtgcaattgccg

SEQ ID NO: 66593 - DNA, 514 bp, Heterodera glycines
atgaaaaagccatcagtgaccatccaaaaagaggaggaaaagcagccagcacaagccaaatcaaaatcgccatctccgcgaccagcaaagtcaccgtcaccgaatccgaaagaggtgggtactgtacaaatggtaccggtgccgtccgcgtgcatcattaccatattccctccggcgggtcgccgggaagtggtcgaccaattcggcatttgcttctactcttttaaatgcattttcagtgtgtgctaattagccacttaagtattcatgatacggtgtcctgaatttgatgagaccgtaatcatcgaaaattccgtaaatttatgagccgacaattccaacgcctaatttttgcagttttttccgtttattttcattttgaagcttttttgaattaaattgcatatattttggcagttattccgttgcaactaacaaagctaatcaacaaaatgccaagtcaacagccgcggcgcgtaattttgaaaaaaacgaatcgcattttttggatgga

SEQ ID NO: 66594 - DNA, 361 bp, Heterodera glycines
tatacatcccattatgaacgctaaaattatcagagtgccgaaaatcgcatgtgatctaagcctagcaaaaaatggtgtaagtaaaatcgtaattacgctcaaaaagcttctcaaacaattttagcgcttccaattccttctacaatcgcctttatacatcccattatgagcgctaaaattatcagagtgccgaaaatcgcatgtgatctaagcctagcaaaaaatggtgtaagtaaaatcgtaattacgctcaaaaagctcctcaaacaattttagcgcttccaattccttctacaatcgcctttatacatcccattatgaacgctaaaattatcagagtgccgaaaatcgcatgtgatct

SEQ ID NO: 66595 - DNA, 543 bp, Heterodera glycines
aattcaaacgggtttacatgcgctgaaccaatgtacgaatcattgtcagacacggaggaagttgaactgaaggttaaaaaagtggaggaggcgaaagcaaaacgcttggaagactcgcaaaaaatgctgcaaaatgaggtagaaaagttaaaaaaggaattggttgaattgaaaaagaaggaagtgtcaaggaagagaaaaagattgacaaaaactgaaaaagtggaagggaataaagtgccaacaaatgtaaaagaagtacaagagacggaggatggagaaaagaaggatgaaaaggaattaaaaggaattggaaatgaaagagatttgaaggaggttaatgaagaggaaaaagaaaagaaagacaaaaaaggaaaagaagaagcaaaaaagaaggaaattgtgttaattgattcggaagaagattggaaaaaagtgtcccaacatgaagacgaggtttcgttaggtcctgaggaggaggacgacgaggagcgaaaactgctcattttctctcttcccacaaatcgattaatattcatttga

SEQ ID NO: 66596 - DNA, 2047 bp, Heterodera glycines
atggccgacgtgcaaattgcggcgggcggaggcgccaatttccgtctcggccgtggcacaattattgtccctcagatcagctgtgttctgtttgatgaaaaagtgcatccggctttatccttcaattttatctacttccgctttcttctaaaggtgtttcccaatgctcgtcggtttcttccggagcgctttttgaaccaaatgggccaattggagcgatttgaggagctgattccgttcggacttggcaaaaggttgttggcttcacgcctgttcacattgccggctcggagggccctggattctcaaattttaaataaacaaatccagtttttttaaatttctgatatctgtcgccaaactcaggcttactgcaaatgcctggcttgggctgtcgaaaacgaggcaaaaaagtgtaaattctttattatcttttagagtttgcatgggcgaatcgctggcccggatggaattatttctcttcacggcaaattttttccgaaatttcactgtaagtggtgaaaaaacatcgtaagcatcacagtctgatcactaaatgtcaaggttttgcccgtcgatccgctgagccctccgtcttctgagaaggaaaagggcttttctgtccatcccatcccatacaaatgcagaattgagccgcgcacatgaaaaagatgccttttatgcgatttggggaagtgatcgggaattacccaatttcatcgctctatcaatatgtgaaaatttcgaggagcaatacggaatttttcaatactgattcaaaagatgctagggttttgctcctggttctgtaaatcgggccaattttttaatttcaaaagccagtactattaccaatttggccctatgttgcaaaagaaagaaagcgggtgggagaaagtgggataaaggacatgggaggtggagaaggatttaacaattcacgacttgaaagactcgatcagagtttttttagatttcgaaagtcgattcagatttttgaggaattctataaaatgaaattataaaattgatttgtgtaatatggcatttgttatgccagagaaaccgcgcaaaaattcaacagtttggaatttatgattagggctcgtttttaggcacaaaaaatcgcgaattatgcacctaaaaaggcagaaaaaatcacaaaataggcaaaaaaaatttttattaaccctttttaggtagtaaaacacgtaaaaacttaaatatttcaattgtaaatgaaattattaaataattcaaacttttttcgaataaggacaaatttttaaaccaaaaatttttattaagaaaataaaatattaaattttgggattaatttttggaaaaaaattttcaaacttaggggtgtattttctaaaattttattgggccatttcttaggggtgtgtttttcgttttattgcatttgtgttaaggattttttcgaaatccttaaaataggcacattaggcacaaaaaccccgaaataggcagaaataggcattataaagtcatcgtagaattcccctttgaaaatattgccatgatttggcttagattttgcattaaaaaatgcaatttttgtattttggcagaatttttaaacacaaaaatagaaagttagttaagaaatatcatagtatgtattacacagacaaaaatagtaaatgaaaaaatatttaattcctaggagggaatcgaaccaagagcaacaagtcgaaaaccaggaagaatagccactaggccatttgagaataaatttttttttcaaaattttctttctcccaattacattacaaattttccatcagaccaccgttcttaccagttctttttttccaggttggtcccgaccataccgggaccgggaattcccgttccggtcccggtcccgtgcaactctacttactaaacgtttataaaattaaagggactaatttataaatattaaaaattattaatgcatttacatttattttatataaatttaataatattaacaaaaaaaaatagtttataaatttaacagcaaaataatattaataaa

SEQ ID NO: 66597 - DNA, 252 bp, Heterodera glycines
atggacgaggaggagggaaaggaagtgagaattggattaagaggagaaaagggggagaagtggaatggcagaagaggaggaggagaaggctctgggagagtaaaaatgagagaaagaaatagagagaatgagaaaagaggaaaggagaaaaagagagggacagaaaaaggaagaggaaaagcaaaaagaaacggaaactaaaagaaaaaggtagaggaaaggggaaaagggaaaaagagggcgaggggtaga

SEQ ID NO: 66598 - DNA, 183 bp, Heterodera glycines
ccctaaaaaatcgattttttttcaaaaaatgatatatcaaaaattaatttgtaaaatattcaaatgtgattctaagcctattttggtcgtttttatggcattttgtgcctatttcactttttacgaagaatttttttccaaaaataaccattaaaaaaatttatttacatattttcctacata

SEQ ID NO: 66599 - DNA, 642 bp, Heterodera glycines
caaaagttttttacaaccacatattgccaatctaatttcttgcagattgaaagccatccattgcctgccggtctcggcacagcaaagcactaatagggtgtttgactttcttcaaaaaataattcattacccaaaagttttttacaaccacttattgccaatctaatttcttgtagatttaaagctatccattgcctgccggttctcggcacagcaaagcactaatgcactaatacggtgtttgactcacttcaaaaaataattccatacccaaaagttttttacaaccacatattgccaatctaatttcttgcagattgaaagccatccattgcctgccggttctcggcacagcaaagcactaatagggtgtttgattcacttcaaaaaataattccttacacaagttttttacaaccacttattgccaatctaatttcttgcagatttaaagctatccattgcctgccgggtctcggcacagcaaagcactaatagggtgtttgactcacttcaaaaaataattccatacccaaaagttttttacaaccacatattgccaatctaatttcttgcagattgaaagccatccattggctgccggttctcggcacagcaaaacactaataagggggttgactc

SEQ ID NO: 66600 - DNA, 609 bp, Heterodera glycines
atgggagaaattaaaattatgaaaaataatttaaataaaatgcgcagagatttgtacagaaattttgaagaaacgaaaataaaaattttggaaattttaaaaaaagacggagaaaaaatgggaaaattaaaagaagaaaatgaccaaaaattcgaagtgcaaaaagcgacgcatcgaaaaacatttgaaaatgtaacgaaaaatatcgaagacgaagccgaaattgggcagatgaaaagggaatgttcgctgtttttccaaaggttcgaagaatgccatcggttcacagaagagaaaatttacgaattggcgacgaaaaacggcgaaattcggaaaaatttgatgcaaataaatgtcggaggaaaagcgcttcaaacggtgggccttcaaattcgccttacgcttttcgacggcatcgaaagagcgatggaaagtgagcaaagcatttggggaaatgaaaaatgagaattttaggtgaaaattcagagttttcccgttttgaaattgtgtccgagtttttgagtttgggctaaagaactatgattaatctatgagtaatcgctaaatttttatcaaagcaggaaatctgatacttccactaattcaaaa

SEQ ID NO: 66601 - DNA, 867 bp, Heterodera glycines
atgtcttcatcaactgctgaactgaatccggaagatggtggtcatccgccacagaacaccgccgtggccatcgagcagtcgcaacaggtgggggcaattaagcggggcaatgaatgggtaattaattgctactaattggaggtggtggggtaattaagaggaagacgattatggatatccatattgaactgatcatatctatcgatgtctttaaaacaaatcatcggactaataattcggcttattaaatttaggattaagcctcgacccgatgcgggaaattactaatttcgtctatttcactccatattaggggaaattgtgtttaaatgagtttctgagactttttgccttataaaaagtttccttttttcgactgttaggcttaggattaggcttttttgagaaattcctacccgacgagggtgttcccgaaatttttaaaatttctccaaccaatctcgacaaattttgtcgaggaatttccctccacgattcccgacttttccctccccaagggtcggagcttaaccctaattaaatcctcaggccatccatccgccggcacaaagcggaagcggcaaaattgccgcgtgggcatcgccgaacgcggacgacacggagccgtacgggtgagtaattaacataaataattttttaatttaattttaaataattttttaaatgttttcagaatttgcgcaaagattctgatcgttctgtcctacatcatcacaatcatcacttttccgatctccgtgttcatgtgtattaaagtaaataattcaaagaaaatataaataaaaaatcccctaatttaaatgctttcaaataaattttcagattgtccaacaatatgaacgagcg

SEQ ID NO: 66602 - DNA, 826 bp, Heterodera glycines
  unsure (1)..(826): unsure at all n locations
aaacaaaaaaatcgattttttcaagtgtcgtttggggntactcnaacaattatggggagcaaaaatncancgcagaattaaagtacaggctataggnaagctattccgaagggattcggtctccccataaatctgggcgcatcggttcggggggactgctccgaaaacaaaaaaatcgattttttcaagtgtccgtttggggtactcaaacaattatggggagcaaaaatccaacgcagaattaaagtacaggctatagggaagctattcccgaaggattcggtctccccataaatctgggcgcatcggttcggggggactgccccgaaaacaaaaaaatcgattttttcaagtgtccgtttggggtactcaaacatttatggggagcaaaaatccaacgcagaattaaagtacaggctatagggaagctattccggaaggattcggtctccccataaatctgggcgcatcggttcggggggactgccccgaaaacaaaaaaatcgattttttcaagtgtccgtttggggtactcaaacatttatggggagcaaaaatccaacgcagaattaaagtacaggctatagggaagctattcccgaaagattcggtctccccataaatctgggcgcatcggttcggggggactgccccgaaaacaaaaataaatcgattttttcaagtgtccgtttggggtactcaaacatttatggggagcaaaaatccaacgcagaattaaagtacaggctatagggaagctattccggaaggattcggtctccccataaatctgggcgcatcggttcggggggactgccccgaaaac

SEQ ID NO: 66603 - DNA, 49 bp, Heterodera glycines; identical to SEQ ID NO: 51181

SEQ ID NO: 66604 - DNA, 533 bp, Heterodera glycines
atgattttcgctttcaattgcggcttaatggcaatgttttgtgctgcttttgaccgactttttgctgttgcattgccttttaagtgagaaaaataaaatataattaatggtttttgattgtttggattattttataaatatattttatttatttataaattattttattttttaggcattcggtcattttcacaaaatacaagtaccaatatttgttcagccatcttttcatttgtataaattacggagcttttattgtgtacaatttgcttaaatttgctttccaaaatgcgggaaagtatggcgctaaatttaaatactttttctaatttaattttaatttaggccaaccactggcttagtgtccgaaagttttcaagactatgtgaacgatttttttactgatggcatttacattctttctctgtgcagcgcctgttgttatatggcaatctttgtgattatccggtgcaaaaatggcggtaaaaatgtgccaattttgcacttttgccaactcaaatatatttattaca

SEQ ID NO: 66605 - DNA, 399 bp, Heterodera glycines
  unsure (1)..(399): unsure at all n locations
agcaagaatattgctatcttgcctaggcgggattctgacttagaggcgttcagtcataatccctcagatggtagcttcgcaccattggtctatcgaccaagcacatgaaccaaatgtctgaacctgcggttcctctcgtactaagcaggattactatcatagcaacaggtctttagtagggtaaaactaacctgtctcacgacggtctaaacccagctcacgttccctattggtgggtgaacaatccaacgcttggcgaattctgcttcgcaatgataggaagagccgacatcgaaggnatcaaaagcgacgtcgctatggacgcttggccgccacaagccagttatccctgtggtaacttttctgacacctcttgctggnaactttacactttcaaaa

SEQ ID NO: 66606 - DNA, 79 bp, Heterodera glycines
atgaagcaccagcagcaacggcaccaactcaccaacaaaatgccaacatcgatgccagcaacaacaacaacaacgcgag

SEQ ID NO: 66607 - DNA, 715 bp, Heterodera glycines
atgaatcaagcaggtgccccgttggtgcaacaccagcaatttgttttggtccctgcctttccttttcacactgaacaccgccatcaacaacaacaacaacaacaaaatgttcagcgacgccagcaacaaccacaatttctgccgttcactccaactcagcaaccgcaacaaaacattgcatatcagcgtcaccaatttgtgcagcaaccccaagatcatgactaccaacaccttgaccaccaccagcaacaacaacaacaactgcaacaattccaaaacgctgcgccggaaccgcagcaaccgcaacaaacaattttgcaaaatcaaagcgtaggatcgccgcaacaacaacagcaacaacaacaatcactcattcaacagcagcagcacgaacaggcaacttcacaacaaatcctgccgcatcaaactccgcaatttcaacaacaacaaccgcaagaagaacaaacaaatcgtctgccgcaacctccagcgccgcaacaacaacaacaaattttgtaccaactgcaaccaatgcaaccttatcagggggaagtccaacacatttacaacgaaattcatgcggtaaaatgcaaaaaaaaaaaaattatgatataaaatataggatgaaatgctcatccaatcaacctcggctggtgctaatcgtgccactggtggtggaccaaatgctaaaataattgaatcactaaattcatga

SEQ ID NO: 66608 - DNA, 311 bp, Heterodera glycines
gcatttattagaattaaaaagtgctggcgaaggccaacaaaatcccttcgtatttattgcggaagcacgttggaatccaagcgatcacaattttgaagtgctgaacacagaaacaccaagaggcattcagaaataataaaatattaaatatcaaattaattaaatatcaaatctatattatattaattttatttaatttatgcatttaaaagattaaaatttgtaaaatatgaaatgaaaaaaattcaaataataatgaaaaaatttttagaaagtattaataagggaaaaaaaaattttttttaaataaa

SEQ ID NO: 66609 - DNA, 931 bp, Heterodera glycines
atgtgcggtcggactgtgctgtttgtgcccggctgtgaccatgcgggaattgccacccaagtggtggtggagaagaagctgaagcgcgagcggggactcagtcggcacgacctcggccgggccgactttgtgaaggaagtgtggaagtggaagaacgagtgagtgctgcgggcatcggattcatttttcaatgggaaacttgcgctgttttttcattttgatcgttttttttattcgttcagaaaagggcacataatttatgaccaactgaaaaaaatgggcgccggcgtcgattgggaccgagtggtgttcatgatggacccggtaaacccaataaattcgaatgaaaattttaagaaattttttggcatcgaataaaccccatttgatcgtcttttcctagaaaatcatgcgcgctgttactgaagcatttgtgcgaatgcacgagaagggtgtcatttaccgaagcaaacggctcgtcaattggtcatgcgcattaagttcagccatttcggaaattgaggtacaataaactgacttttctaatagcacagtgacgaagatataaaaagtgatcaaaaaattcaaatttgaacttttttttaaaaaacgaatcatttgtgagaaagttttgattttcaaagcatcgcattttgattccattctcctaaaagaacgttttgttttatttcaggtggaaaagcgtgagattaccggtcgcactttgctctccgtgccgggccatgccgaaaaggtcgaggtcggcgtgttggtgttgttcgcctacccactggaggaggaagtggtggaggaggacggcagcaaaacccgtgaaattgttgtggctaccacgcggctggagacaatgctcggcgacgtggccattgcagtccatccggaggacgcgcggtacaaacgaatcattggcaaa

SEQ ID NO: 66610 - DNA, 3061 bp, Heterodera glycines
aatagccaaaaaattcttctcccaagcctattatcaattaaattctctcgcccatttttgatcaaaaattcgcctatccttgtaaatgcccccagttcgttattataagaatttaaaatgtggaaaagcggctcgcaatgacttaaatttacttattttgttattatttcttcagcttcggaccataatgttattctcatacatggcctattgcatttttattgttctttttatatttttctccaattggccgaaatccgttgccacaattctgatcaccccccccccccacaatcatccccttttttattttttcagaatgtttttccattgtgacaatttcactgctggaccgcctcgaccgacaccatctcgcaggcgctcgtctttcgctgatccgggggaggtgcgcggcgatcagaccgtgaggacactggtcttcaaacggcgggggacgtaggataaataatgatttatccttattttattgttttttgcaacgattgtttttcgcgttaatttaaaatatttttgcatccttcatttaattttccttttggtcttcgtctttgtcttcgtgttctctcaagtttttatatattttgtgcttttgaatcattgtaataaaactacaaaaatttggtgcttttctccgtggactgtcatccaacaacaacaaacgcccaaaggcttaattggtactgttgtttgagtttctaattgcaattcaccttattctctaattccttgtcagtaaagtggtgttgaaaattaagtaaatctttccttgaccccaaaatctcaacccgaaccccagcaaatcccaaagtccctcaccgaatatacaccctttctccaacgcatcaagtttgtaaatttttattagaaaatttttggggacaaattttggggaaaaaaactttttgtttgagttgactgtctaaaggcttagttcgaatctctgccatttgatcaacgttaataaaactgacagcaaccacgttcctaaaatcctaaacttgggaaaattaaggccttggaagggatgtgcccaatttttcaacggatctggttgcagtttttcgttatcattagattttgccatttgttaccgaaaaattctaattttttttttgggggggagggggaatatgaccctcgaaataggtcaatttcaatttgtattgacatttgtccgtcttccaggtgacatatctcggcaacatgttgacaatcatgggcaagggcgacacgtccattgaccgtccgttggaaggttttaatttttttgggaatttttaggactgaaattggttgaaattttaaaggattttctgaccttggggggtacccgttggaaaaaagagtcttccaaccaatttttcagatttttttcgtgtttttttcaatattacttctctttatttgtcccgaaaatctttttttttttttttgctttaagaaaattatttcttacaattagcacgaatcttgcaatcttttggaaaatgacgcaggggatcttggatgaaactggttgtgagcaataataatagccaggcaattccaaaaatttttttttaaattctcgaaaaattttcgagcctgtggttcgggttagtaattgagccaaaataaggcaatgcgtgctcagcgcctcgggttacctaaataaattttaaaaaaattcaggaccaatgttcgttactattgccctgatttttgggctttttccgcggcattcattcattgaaatttctcttaacttctaacaccatgaaaattattggcccaacagacaaagaagattgttttaagccttttccgttttcaattcatcgacttaaaaaggcccttaaattttaaaagcgcaattgcccaccctccgattttgtagcggctttttgcaaaaaatagacagatttcaaaaattacggtttgcatttttgccattgcgttttttggcgctttttttaaattatattttttgtgtcctattttccatttttaacactttcctccccctcccctcggcagtgattacgcgcgcgtggggcgccaccgtcgccaaaggcgcgacgcgccacagcgccggcgccacttttggccagcaacaggcgcaacagttggcgatgcgcctgtgcgtgtgccggtctgggctcagggccgagacgtgcattgggtgagtttgtttggtgcaatttgattaaaaatttcaaagttttcaccggcgacgcctttctcactaccctccctctccttatttttatttttttgtttgaaaacttttttttctttgagaaccacggcaaaaaaattgccgtggtgattgtttttaattgaaaatctaaaatttcaaataaaaaattatttttatgttaattaacgaccagcaattttttttcgtaaatttttatatgtaagaaattcaaatttaaattttcccacacttttcagtgtcactgaatattttacgcaccgaatcacttggtcggcggcgcccagtcaatacccggtaaaagtgcaaaaaaaaatttttttttttaatttcccctaaatttagcgcgtgttctgctggatttacaaggtgcttgctgctttggctatgtttctccatttctaaacgttttttcaatgaaaaaaatttaattcgttttttcaaacaaaaaaaaaacaattttctcggagtttttaaatggaaaagttgggacccaattaaaaatcacaaaaataattgattaaaaatttgattccaggccttggatttcctgtatttttgtttggccagaaaaccaggccaaatatgaaacccagatacaagtcctaattcggcacgtaaaacattgatttttgaacccttagctttggttttttcaaacaaatttaaaattgggaatagtttttttttacttcgttttttgtaaagcacgagggcaagcggatgaagcccgaactgcggtgccatgccgtgctctgtcgccgggcggacgagccccaacagatgcaccaaacattgcgcagacatctccaatcggcactccaagtgagtaatcggagggag

SEQ ID NO: 66611 - DNA, 138 bp, Heterodera glycines
gacagggtttgttcgcctgctggcactaccattgctggactgcgtgagcttgaacgctctggggtcagatcggcattcattgaagcattaagcgcttccactcgtcgtgccactgaaatggctccgaagacaaactaa

SEQ ID NO: 66612 - DNA, 183 bp, Heterodera glycines
atggctaacccaattgcaaccaaaaaacaaaaagtaaaattgtcttacgaaggccacctttacaccttcgctaaaatgagttctgatgggatgacaaaattttagagatgcgagttcaaaaaatcatttgacattatttttggagttctccggggaattctcgcactatcgaatgacccgtga

SEQ ID NO: 66613 - DNA, 1757 bp, Heterodera glycines
gctcggctcgattacctccaattccatcggttcagccggcaacagattgccaaacttgtcgtggagtaccgctactggttgaacatcccgcaggaacgtatcgatgcccggtaaattacaaaaacaaaacaaaaaaaattcctgttttatttgggttcgaacccttagagtttccgaaaacattttttaaaagtcggtcaagtggtgaatgttgttggttttcccatactttgacacgggttcgagtcccgttcgcgttatgaaattttgttctgtggtaagtggtgtgcatcgttccttttaacttgttttgtgcaggttcgaaccccgacgcatttttttaattttatattattgtggaaatgttttccgggtttctctaattcaaacaaaatttttgtcgtacaatttaaaattttttttctttttttttgccagattgggctggttgcagcgtcagttccatctccgcgccgacgaactgcgcctggcaattgtcaaagagccaaggctgatccaatttggcgtcggcccaatccaggtggcaaaatttctcattacataaacccgtcattcgtaattacggagatgtttccaattacggagtccaaaaaatggtggaaaagaaaccacgaatttaacaaaccgagctatctcatctgtttacgccttttttcctttccttccgcccactgcagaagtgaagaatgggcctaccgacaaaacggaatttttgagtttttaatgccctgcgaaatttttacattagctgccagacaaatccaaaattattacaggttgtttcgacattgacccgtaattttggggggtccaaaatgcttaaaaaattcctaaatttatttccattcgaatgctctttctccagggtctcattttggcgctgaaccaaacgtgcggcttcacccagcagtgcctgcaacaaattgtgctcaaagacccgcgcgtgtttctgtcggagaagccccacgtgttgacctcctacaactacttggcctacgtgatgcgcatcaccaacgaacagattggtgggagcacatttttgaaatgtttttttaaatatttatccatggaatggagagggacgaaccctcaatcagaaagtgttcgtattgagaggccatacaaaaaatcaggggctagggtccaattgtctgactttgtttttcgtatagaggtccctataaaatggcaagactttgtgttaccaatttttttgttttctttccgattattttttttttaaaccttgacaaatagcaattcaaaaataaaatgcatgaagtgagggacagaagataaaatgaaaaaaaatggttgggttaattcgaaatttttttttgggaatcaaatgacaaaatcatttaacgcaaattgaaattcatgaatgatttctaaagccaattagtcattttgaagccttcattttctgtctcggtttaaatctcgaaattcggattattttttctttagaaaactaaattttatgcaattttatcgcacttttacattttccacaaaataattcagtggcatttccgctcgccctgcgctgtccgttgtcggcactgcgccgtcgccacgagttcctttttcgactgcgcaaggccaactacgtgccggagacggctgatcacatcacactggagcagttctgccatcccagcgatcgcttctttgccgaagaaattgccaggacaccaatcgccgactttaatcgattcattaaaattgtttaa

SEQ ID NO: 66614 - DNA, 1131 bp, Heterodera glycines
atgagccaagcatttggccaccaattgctattgctccgttgtcgtcgtccctcattttcaccatcgtcgtcgtcggcattgttttgtccattatttcgtgccaccgccgccgctttcgcaacggttggagccaaaaaacaatcaaccgcacaacaccaaggcgaacagcaacaaaaacaggctcaacaagtacaacaacaaccgttgaaaaatgccaaattgcaaatgggcaacaatcggcggatggcacggctggtcagtcatttccgtaccacaatctgttcaagtcgaactgggttgggtcaacaaaaatgaactttttggcacatgggatgttgaaagctgaaaaaatcgtcgacctttccaagtcgttcaccaaaaataagtagaatggcacaggctgaagtcaaatccattaaaaaatatatttgaaaggctggtgggtttgaacccggccaggcccatcccaagacaagagttttaccaactgaaccacatacgttaaactttttttcgcgttttttcggcgccactggtataaattttagaatccaagaaatgcattaaattaaaaatttttgactaaattctgtattttgaaggcccacgctgacgacgaatcggccgaccaattggctgcccgggaggactgggcccattttgaaatggttgagcgtcagctggacgaactgcttgaacatcatgcggacaagttggacgaggagggtgatgtgctcggcgttgacatggtggcggacccgctcaacgaggtcagtcagccatggcaagggcatgtgaaaccctataaatttcggagatctcaaattttttttatcatgtttcaaacaatttaagaccgaaaaggtgtgaaaaattgcttccaataaaacatgataaaattttcttgaattttgcgcctacatagagaaagaaccttaatttgtaagggctattgtatgtgacactaagaatctttaatttggctgactttgacaaaagttttgaatttttttgtttttggattcatatttaaagaaaactttacaggctggtggtcttgaacccggacttctcccctacaaaaagaccacttggtcattcttttcgttcattcattccctgtcatattaa

SEQ ID NO: 66615 - DNA, 1391 bp, Heterodera glycines
  unsure (1)..(1391): unsure at all n locations
gatgcgatggcatgcggaaatgttcatcattttcattgtctcaatggttgtgcacaaaataatcttgatgttgtgaagagaagacattttcgctcataccgggtaaaaaacgggtggtggtttcgctgaaagggctttgtctaacaataaatatgattttggttcagttcgccactttggtcggtctttggctaatcccttttatggtgtcacttaaaaatggctggtggtgattcattctttcctggactgtgttcacttcttcaaatattttacgtttggcggagggtcaatcagccggcaatttccggatcaactcnccaggttttcagtggcttttacgcaaaaaagggaaattcgtccatttcccttttaggctcgtctacaaatactttgttcatgcataaactcagttacatttttggtattgtcggttacttttcactcgtctttactgtcattggaataaattcggtgttcggtaaaattaaattttctaaaaattcaaaaaaggctttttaaggaattagcagtaatctgagcttggattttggcgtgcatttgttgttttattgcctttattacggtgtgcttggacgtgatttggcacattctctgaccgacagattggcctgcaaaatcggggttttaaaaatgaaatggagagattaacacattattattatttttctagtattttactcatgacggattgccaaaacggtaccaacaaaacggaattgttcactgtttttttcaccattttagggttctcgagtcggatatgtgcgccgtctgcgggaataatttgcataaaccgtcgtccaaccaaaacaatttcaattcgttggatgaagcgaatggaggagtgatgaccgaagctcttgaactgccagaagaaaaagtttgtcacggttttgttcgttttttgacactttctttttagacgtatgctttggcatcgtaaccacgtattccacgagttttgcatccgcggatggtgtgtggtgggcaaattgcagccatcgcccttactcgtgagtgttggaacaaatcaaattctccacgttttttttccaatgttaacgataggcttttaacttaataataagacagatttttatggcaaattaagtacttccttgcaaatttacatatatgaacttaattttatatccttgccattttcaggcaaagaaaaggtggacctcaagaggatgttcaagaaacccgtggggttttttgtcaatttcctctcgatttttgaatttagatggggaaaaaccacatcttttctacgggaaattgctgggattggaccttggactgggaatggagcttatttgatgtatatgcacgttaaagatgcaataacttatttattgttttaa

SEQ ID NO: 66616 - DNA, 147 bp, Heterodera glycines
ccaacgcagaattaaagtccaggctatagggaagctattccggaaggattcggtctccccataaatctggggcgcatcgggtcggggggactgccccgaaaacaaaaaaatcgattttttcaagtgtccgtttggggtactcaaaca

SEQ ID NO: 66617 - DNA, 455 bp, Heterodera glycines
gttcggttccagttgttggtttgcgcatggggagaacgaacttcgctctgtctctgctggttcgtccttttcttcgcccatcgggagccgtaaaccgcgttcgttgttgccacgcccgcctccgccgctgatgttcaaccattttttgacccatggtttcgctcatttcctttgctgtttaggttcggttccagttgttggtttgcgcatggggagaacgaacctcgctctgtttctgctggttcgtccttttcttcgcccatcgggagccgtaaaccgcgttcgttgttgccacgcccgcctccgtcgctgctgttcaacattttccccaaaaatccctgattttcccgagaatgctttttttttccgcactcaccgtttttaatttttgaaatcaaatttacattttttattgtcaaagtttttcaaactttcgaataaatttatgatctgtt

SEQ ID NO: 66618 - DNA, 1526 bp, Heterodera glycines
  unsure (1)..(1526): unsure at all n locations
gtcatgacgggttacggatgccgtaactgaaacccagttacgcccagccctgcttttgattgaaaaagataaaatgaactgattgtaccttttttgtcctgttttttgattgcccccctttttcagctattatttgatccaactgtacattccctgttggtgatttggacctttaacaaatgatcaattcccattgttattacattctttcattggcaggtgttatgttagtcgtcgtttcgtgggttagataaatttaaaaataaattaattttgcaaatggccaattttttaggtgtcattttggcttgacaaagatgcaggtttatgcattttacaatatctttttttaattaatttaacaatttttgctttaacttttttagtgccggcacgcgtttcgttgggcgttacaacgtaagcaaaacaaaactctctctctctctctctctctctctctctctccttttttaattttaattcattttgggctgctaacaatgaccactcaagcatccggcatcaactctaaattaccgcccgtttcatatattaaagtgagtgtttaacaaatgttccaattttaaaatgtttaaaaaattcaaattattaaaatccaaaaattaaaatgccaaattgaaaaggccgtcgacgtttggatcggcgcatgcctcgccttcatttttgccgctcttttggagtatgcgctcgtcaattactatgggcgaagggaatttatgaacattgagaagcggggaaagtcgggcatcggacgactgagcatggcatttcagcaggtgaatgaagaagccaaccaacaaaagcattctgtgatcagtcataagcgcatccatccatcattaatcattacatcgatttaattaattcattcggcgattaccatttcccttcctcataccgtattaccgtatttactcgattagaacccccctcgcgattaaagcacccccttctgaggggagttgaacaatagagtccctgtgggctataatcgagtaaatacggtaaattgattacccccctaccgtattcaggaatgtctctgtccgccccctcccaacatttatcacccggacttttttgcacccaaatcgcccactaagagccaacaacaaccacagaaacaactgctcactgtgccgggcaccaataacaacaacaataacagcaacaacaacagtgccatcgtcggcttcgtcggcgatgccaacggcgaccatccgccgctgagtctggagaacaacacattcttcccgcggcgcagaagtggctgttcgtcctcaaagcgccgtcggcgtgagcgaccgttcgccgtctttggcagggccatgcgacggttgcgccatctcttcggctccggcgtggacctgtccaaacgagtggacattgtaaaagcaattgattgctaattaattaattanattttattaattaaggtgtcccgggtcgcttttcctacgctttacctcgcatttctctggtcgttttccctgcttttccgtcca

SEQ ID NO: 66619 - DNA, 60 bp, Heterodera glycines
gtttttattcgcttttgaatttgggtacattttgcctatcgatcactcgccgaccccgac

SEQ ID NO: 66620 - DNA, 569 bp, Heterodera glycines
cgcggatggacgccgttgtggagcggatacagcttcgcaatggttagcgaaacggaggcggaaaagccgagactctcgggactaattggaacggataaagaaaagccgagacttttgggtcatttaaggtcatagttttagcgaatgttatccaatgtaatgccaagcacacctcccttccgccaattccctgttttaattttcttttccgcagcataccgccgctggcgctgagggcaccgggcagaatttcgagtcgccggggagttgtctggagacattcttcgcggtgccattcatcgaatgccatggcaagggcacgtgcaattattacgccaccaatcacggcttttggttggccgtcgttgaacaggtggacacagttgggcacacgatacaggcatactgtactgtcagaaagggttacggttactgcgcaattcaaattttaaattattttttaatttccactacagtacaaccaattccgaaaaccgatgccacaaacgctgaaagcgggcggactgaaggacagagtgtcgaggtgccaagtgtgccggaaaggcggc

SEQ ID NO: 66621 - DNA, 634 bp, Heterodera glycines
atgtccaattgtggctctgatcaacaaattgatcaacaaaatcgtccattgcacgatcagccgcaaagatacattgacgaggacatcagcttgacagttgaccaaaaatttgagcaagaagcaaaaaagccactaattgaacaggtggggcacttattacaaaaattaataaaaaatttaaaaaatatgtcctggatatcttcttggataaaagggttattcttgaaaacatatccaaattatgaaaattttttacttgttcttattaactttaattcataaaataaacaaattgaattaatttattaatttaatataaacttgggattttgtttttaattttaaaaaagtttttttgacatttaaatctcaatttttataagaaagtccaaactaagaatttaagattgtgcgaatttttgataattctaagtattcagaatgttatcaaaactttaattttgctttccatgtctttaaatttactttaattttttttttatataattaccgcatttctttaatcctttttgtccaaattattttttttttaattttgtataagcaaatctttttcgcgcatctactgttcttttatccattcattttgcagggtcagacaaattcttactca

SEQ ID NO: 66622 - DNA, 650 bp, Heterodera glycines
atgttggtttttacaacaatatttttgtctttagaatgccttgaaattttcacttacaaaaataatttacataagatgtaacgcgaactctgcagcaaaattttaggatttttaatctatgtgaatttttttgtgaaaacagcctttaaatttttgataaaaaatataacaaattctaaggaaatttgggctctcggtgccgatagtaaacgccgagaaaaaaattaagattttgatttaccgctaccgattaattaccggtttttctaaaatgggtcggaaatggtaattacttggaccgttgaatttcatggagttttccattttccagtcgcttataacttgcttagaggaggggtgtcgatctgaaacaagacaaaatctcggctcgacaaaaaatatgtgaatggtctttctttaaagatttgatcggcgcaagaattttgaatttttaaatttttttttattatagatattttttaatcgtttttgttatctgcccgagattttgctgttttaaaaaaaatgttcagacggggagtatcggagatgcaaaatatgtgttgatacttatgagagagagaaagagaaataaatgatcggttggcttctcgatcagtaatatcgataatgaagaaattgaaaataaa

SEQ ID NO: 66623 - DNA, 827 bp, Heterodera glycines
atggtggatttggagggagataaagatgatgatgatgataatattaataataatgaggatgcgcaattggatatgatttttaatgaggggggaagtggaagcagtagaagaaaagaggtatttttaatagattttttcataagggcttaaaatgttccggcatatagagctagtaggtagagctaagcgtgagcctttgaatttccttggccagagaactgaccaccgcttgacatttatttaaaaaatgaaaaatagcctaagaaaaaacttcactaattaacttataattttgttatcatcttctgcagggttcgcaaatttttttttttaaattcaggacaaataattttaaaattcagacttttttttgtgaaaattgatacataaacaaaattttgtcgaactcttaaaggttataagtgttcgagtttcggaatttatgaccagaaattgcttatatggtaacaaagttcgaaattttataggtaaatgagaaatctgagggctattttgaatgatcccaaggttttttggctttattacagttacacgactttaaaaaaaaatacattgccacaaaatgtttgcctttttataaactttgataaattttatgcttcctaacattcttcaaaagcattttttaaatattcttagtgccattcgatagatctcagctttctctattttaatataaaaatttaaaaaatttaatttttagtttttttttctttggaagactgttcttctatttttttaaaagtgaaattagtttaattcgacgtgagttagaattgttgtgtaaaaattgtttagaaaataaa

SEQ ID NO: 66624 - DNA, 856 bp, Heterodera glycines
atgccttcccttaacggacttggagaattcatgaaactgttcaaaaagtctccggaacaacagcacttccagcagatgggaaggccgtgcagcagcggaacggtgaatgtgcagcagaggcacaacggatgcgaaggtgattaatagatgaaacaaagacaatgtaccaaattaaataaatatcaattgataaatatttaagtgacaattggcaccaaacgccaacggagcacttgcacaaaaagaagcattggcacggatgaggtaaaagctatttgaaagtcatttgtaaaaaaaattaatgacaatttcagcactctgattttattggtgccgaagtagtgaagaaagcggcactatcaaagccctatgaacaatttgagttgcagaaaccgagtcaaattggttagtttttaaaattcatttgtacataattatactaattaatgtctcggcattttcagttggcacaaaagtggcctcaactttggccacttcttccgtggtggtcatttctcctccgccacctcagaacatgctgaccccgcccaattcggaccagtccgtttactcaacgagcaatccaagcccaaacaacacaagcagaacgagcagtaacagcaccagctgcaacggtagtcagctaggcaatggcggaaacatttctttgagatttattaacttaatgacacctttttagttgtgcgtccactcgccgtcaatgtcgggaacagatatgcacaacaaccgcagaaccatcagcaacagtgccaggaaatgcttcgccatactgtggatgtccagcagcaacagcacattcatttggaacataatcagcacgttcagaaagtcagta

SEQ ID NO: 66625 - DNA, 99 bp, Heterodera glycines
atggcggaacggaaagaattccgacgcatgtttgacgagacaaagatgccaaaagcaaacccgcactttgaccaattgttgatatccttcaaatcgggg

SEQ ID NO: 66626 - DNA, 169 bp, Heterodera glycines
attgaagaaatcgttcaatgaattggaccgagaatcgctggccaagaatcttgcatttacagcaggtagcaaaacatactaacgaataacaaatctattaccgattgatccttttctttcatagtccgtctcgacagtgatggtgttgacaaaatacagaactcatttt

SEQ ID NO: 66627 - DNA, 222 bp, Heterodera glycines
atgaaatattctttgctccgaccgtttgtgaatcgaatttttacgcccggcaaagagcagcagcaattggtgcaacgaaaccaaaatgaatttggaatggtcaaaacaaacgccgggcaatcggccattttattgcgatttgtcagttggataagcggcagggaacaaattgagcagcacttcagccgattcgggaagataaaggagacgctaatgttttat

SEQ ID NO: 66628 - DNA, 1761 bp, Heterodera glycines
atgggcggcggagacgagtggcgaccgatggaatgccaaagtaagaaaaagaattcttttcatttttttggcattttacggcaggcaccgcctgcgtttgcccgtctccgttccttcaccgactcgtccttctcttccgtcactcttccgccgatgggcgcgtacgaagcggaggaggacgacgcgttaccagcgtcggggcccaaccgaccgcttccgactcccgccgttatcggcgccatcgaagcatcgtccggcgcgacatctgttagtcggcggcgcagcagcacgacgccacggcacaccggcggaacggaggcatgtggtcaaaagccaaaataaaagcgattaatttacggcaaggaaagaatctttaccagtgataaaaatcatttataattccattccggcactgatcaaattaacactttgtctttgatttggttaatggttcagtcagatgctgatcagacggaagtcgacgacgaattgtcgcaatttgtgccgatgcaagcggcacgggcgcattggatgcagctgcacaagcagaacatgcaggtgaatgggaggggcgggggaggaggaaaagcatggcatcaaagggcaattggcatttgattggttggcgggtccaatcattcattgatccattcactggcagttgactgtgctgcaacggatgtttctccgactgctccaccggcacgccccgtttcgcgccctgtggccatttgcgcgttgctttgacacaaccaaacaaaagttggacgaactgttggcaagtgccgcgttccgacacttttgtgccgcgtatcaggcaattaaaccaatttaaaactgaatttggaatgtttgagttgttgcagacctccttcacgctgatcatggacaatgtggacgacgagccttcactttgtcaaattctgcaggaattgggcgccaatcactttttctacgatgccaacgaaacgcattttaaggttgggaaattacggtattcgggtaccataagataaaaagggtgtctttacagaaaaacattgaaaaatttgacaagaatcagtaaaaatgattttactttctgtagatgatgcgcgaagagtttttgctgtcacttgacgaatgtgtggtgggaacgaatgaacaaattaacgacgaattggagcaggactgggaccaagttagtttgacgggagggacagtctcttcgccaattatttaatttaaattttaataaataaattttttaagctttgggccaaaatggagtccaatttggccttcggtctcgccgtccaacgccacaattatttggcccattgtgtgaccggcaaagagatggacactgtccgctcgcaatggcaaaatttgttggaggcgaagtgccgaatggatgccctgggggcatcagtccgggaaggcggcattcaagtgatattcgaagatggacaaaacacgaaagactcacttttcagacattcgccgatgggctgaatcgaattggcctcggaattgagactaataacgaagttaagcggcaattcacagtggcggtgaacgatttgctatgggtgggcgttgaaaaagtaattgggaatgaaatttctacaaggcttcaggccatggcgcaagccattgaattgtgggagcctggcacgggctttctgcgcctctgtgccgagattgactcacgatgcggcggtgcttttgatgtgattcggacgagcagttcggcacttttgcgcacggcattcattgcag

SEQ ID NO: 66629 - DNA, 1406 bp, Heterodera glycines
  unsure (1)..(1406): unsure at all n locations
agatcatttgtaattgttccattttgaggagggcaaggaattggtggacaaattttacttcaccaccgccttcaaaatcccggattggaatgtgcgcacttcgctgctgctcatttggcgcaatatcaccgctcgatactccgactttcaggtgccaaatcgggcacttttattgcttaaattacatcgattcttgaggcccttgtgtttgatgagaacaatttcttcagcgaccaaatgctcgagttgaaaaacacgacggttggaattagaaaattaattttagaaattcggtggatttttaagtaatcgaatgcctatttaatttattctctctcgattagattaattttattttttatgaatctaatgtctttctcagttgtcctccctgggcaccgccattctcgccatgattttcatttgcgttttgttcatcgccgactcttccatcgtcttttgggtgtcctttatgctggtcagtgagtgtgtggaaaattggctaattactgtcggctaacattggctccctcactatcatcattttgtcaggtgtccatggacatcggcgtctgcggctatttgtccctatggggctccgatttggatccgacaacggtggtcaacattctgatgagcatcggactttgcatcgattttgccacccacgtgggctatcggacgtaccggtccaggtgctcatcacttatctctcggaattaacaattaatcgccttcctcctaattgccattgccctcccttagatgtcgagaccctgaccagcgcatttccgattctctgggcgcaattgggtggcccgtcgttcagngcgggagtgtccacctttctcggcatcattgtgatgcttttggtcccgtcccatgttgtgcgcatgtntgcccaggtggagtttgagtcctaggggttggaatttttatatatttaaatattttttctgcatctttattttgatgagaatgcaagaaaaaataatttttagccaaaatatttcgttttattgtcgcattcataaacataaaaaaatcgatcataataaaaaattacaaaaatatttttacttttatcaatgttttcttaaatattttggcatttttcttaaattatttcttttaatattttgtgattataatatgattccaaaccctattgatcagaattttgaatcagactgacaaaataaaaacaaaaaacattgaatttgttaattcctcttttaaaattttatttttttatcaatgagaaatccaaaaacaatctgatcaaatcgttcagaacgatggtgttggtggtggccaccgggctgttccacggtctgttccttctgcccattatcatccgatcgtttgcgtacggtgtcggcgacccggtccaccaatgcgattcg

SEQ ID NO: 66630 - DNA, 604 bp, Heterodera glycines
atgcacagtattactacaacagctattactatcccagctataattacggctatggtggctactattatcccaacaactacggttatggcagcaattacaatggctatgggaataattactatgggtacggtggctatggcaactactacggtaactacaacagaggctactccggctactcaggctatggtagagcgataaattaacgatttggatttaatttaatcacctattgggtgtttttatttttaataaagccaaaaagaatgggtctgtccacaatatttcccgttttacaggaagttccggtacttacatgcccggcatttattgctcccatgccaaagtgtgcggacggagatgagagaagaaaagcgggaaagagagaagccgaaagtgaagaagacaaataaaaataatcgatatttaattaaatatttgatatatatatatattttttaattaaattttgtcatttcatcacgattcattggttttaattgtaaatgaatttaaatatacgaaaaacagagaatttagctaaagaaaacttcagaaaaattaagaaaaaaaatgaaagaaaaataatgtgcaaataagaaaa

SEQ ID NO: 66631 - DNA, 735 bp, Heterodera glycines
actcaacccatcaacatttcaatctctgagactcaattctcaggctttccaatcgctggaactcaacccaccagcatttcaatctctgagactcaattctcaggctttccaatcgctggaactcaacccaccagcatttcaatctctaagactcaattatcagactttccaatcgctggaactcagcccaccaacatttcaatcactgggactcaacccaccaacatttcaatcactgggactcaacccaccaacatttcaatctatgagatcaattctcaggctttccaatcgctggaactcaacccaccagcatttcaatctctgggactcaaatctccggcattccaaacaatggactcaaatctccggcattctaaacactgggactcaacccaccaactttcaatgacattccaatcgctggaactcaacccaccagcatttcaatctctaagactcaattatcagactttccaatcgctggaactcaacccaccagcatttcaatctctgggactcaaatctccggcattccaaacaatggactcaaatctccggcattctaaacactgggactcaacccaccaactttcaatgacattccaatcactgggactcaacccaccagtatttcaatcgccaggactcaatccaccagcattccaatcactgggactcaacccaccagcatttcaatctctgggactcaatccaccacatttcaatctctga

SEQ ID NO: 66632 - DNA, 366 bp, Heterodera glycines
  unsure (1)..(366): unsure at all n locations
aaaaagccaaagggggcagcggacgaccaagccgaaccaaagaagaagccggaaggagtcgatgagaagccgaagtcggagaagaagccgaaggaagaggaaaaccaggcggacgagcccaaaaaggcaccagagctaaagacagcggaaaactcggaaaagccaccggtggcacaggaaaaggcaccgccaaatggcacagccgaagatgatgtacaagttggcaagcaaggggaggaacacaaaaagcaagagncaatgcaacaggcagctgaccaacagcccaatcagacgaagcggcgcccgcgcgtgggaaccgacgccgacgggaggcaaaagtcagncaagaaagatttaatattttaa

SEQ ID NO: 66633 - DNA, 1223 bp, Heterodera glycines
tgctaccacctctcaacatcgaaaattgttcataggcgggctcagccatgagacgacggatgaacaggtgcaaaaacaaaatgaatgacggaaatgggctgagacagacggacaggtggttgggtgccattggcaccgcccgcaaaaacttacggggcgcgggtcccaggcgtttgttgtgtctctatgccaatgaatgtgccaatggcacacagtccatccatttcattaactattcggccaatcaaaatggattggtaaattgtatggttagggacccgtacttgaaaaaggagaggaatttgtagacctaaattttgtaaaaaaaataatttgttttttttactccatttcagttacgtgattactactccaaatggggcaaagtcattgactgcattgtgatcaggtagctgaaaaatgattggactggtctaatgagacacagctatcgaatatttcggatttttttaatttgttaaaaaaatgtgttgggtaccctttcgaaccggaaaactaactaaaaatctcaagggaacatttttgaaagtcacttcccaagattacttccagggaccctgtgacgaggcaatccagaggctttggctttgtaacatatgcaacaattggttagttttttaattgtattttgttgattttcaacgattttttggacacgaggcatggcacaatacaaaaacagaattttacttttcgaaagggcctaattgtaaaaaattttttcgttggttggtcgtcataaattccattgcttttccagagatggccgactccgcgatggcagaccgtccccacacaatagctggcaaggtttagatctgattttgatcagatcgaccgggaaataggatgggaaataaaaaattattttggtgcctctgcgaaggggggagggggtaaaaaaagatttgtttttttttgaaaatatatctctgttaaacccaccggtgggattaagtgcatgcgccaatttatataattttatgtatttttacatgagatgggtaattaaaaaccgaatataaatttataaaagacaccgaaccgagccccctccctatttgcaatttttttaatcccccatttttaggtggttgatccaaagcgtgcaattccgcgcgagcaaatgctgcaggcgaccagctgtccacccgcctttctcgacgttgagcccccctccgactgcaaattgtttctttcgg

SEQ ID NO: 66634 - DNA, 580 bp, Heterodera glycines
atgatcaacgggcgcaaggtcgacattgcgcgggtgagttgttcggaaggggttttggcgggggtcaccagggcaaaattcggacaaaaaaacggaaaatcggggagaggacggctggcgtacgactcacagggcgatatggtatcaggatttgtgtctgtctagggtaatggcacaaagccctggttaccattagagattgacattctgaagaaagcatgtatctggattcgatgttggacctggacctagatctcctggacaacaatccagttccaggaacaaacccagacctgggcgtccattctgttcttccctcccctccgacgggaagggggggggggattttttgctccttaaaacttgcgttgcttttttgcaaaaaaaaaattggccctcaatttttcatgccaagaaataaatccccctatttcagcagcagggtacagcagcacagcatcatcgtcatgtcaagccaaagtcaccaccattgaaatgttgaaccgccgtcttctccctcccccctccccaattcaatttaaatggttaaaactacatacatacatatatatacatataa

SEQ ID NO: 66635 - DNA, 1454 bp, Heterodera glycines
caacaagtgcacaccgaggacatttcagtcccatggggccaggcgccggacccgcttgaccaacagttcggcaagtggcgtctgtccgtgttccaggatgtgcaagagtcgtgggatgccagcaaactgtactttctgtacgacccggtggctgacgagtcgtgccaaacaacgtcagtcatccatcagccgctgtggcaaaatatattttggaaacagacaaaaagccgaatcggtgaaaaacggacataacgccgcattttcccatataacctctgacaaacaaaagtcggtattttgtccattttagtcgtgtcggggtgttttgtccgtttgatgctttatccatgcaccgtaaccattttttaaatttaattctttagtggcggcagaaaagcgatgacctgccttgccgtttttgacactaatcggaaatgctttgtcggtgaaatcccactccgagttcaaggtgaggagggtatttcaggaattttagacgacacaaacaaattgcggcaaacggaatttgaggcctcaaaatgggaaattgttatgacctttaaaatcgcgaaaattcggattccgagtgccgagagatttttaaaatgaatttggaaatctgcggaattccatttcatccacggaaatttcaaccaaaaaaaagacaaccgaacatttttgggtactttttcactttacgccacataaaatttttttttcgttattttttgtttttcttgtgttttcggagtcactgatcacgaatatgacattcatttcgaacaattacgaaacccggacccgaattcgaacaaaaagtcgaaaatcaaaattttcaaaattctcacttctgttctaaaaccgatgaaaacaagataaatttagtcgcagaccattaacgggtgtcattttagggatcagcatccctgaaaaccccctggagctttaattttaagccttaaagcaaaatcgacaaattattatttttttggctatttgatgcgcttgttttgaacattggacaatgtgtacctaaatgggaattgagcccaaaattagcgcacgacagggggaggaggaggaccatgtgaaggtgtgaatttgtttcggttttttgccattttccattctctcccccactctttttgtttcccataggttgcggtccgttgtcgtcccttaagccaacaggaacaccagcaaggacaccgggccattgtgcagacggatgagcacggaaaatgtgtcgctgtggcccacccggacaaccaaaatgttagaaaaaagtgcattttgtaagaaaaaattaaaaaaattccaaatctgacagcaaccccagaagtgctatttgttcgacgaactgttcggccccaacgcgactcaagcgaccgtttacaattcgttgtgccctgggagggtggaaaatgtgcttaggggttacaatggtatgttga

SEQ ID NO: 66636 - DNA, 444 bp, Heterodera glycines
atgttgcgccccaacaccgcagtgccagggatcacacatcagctccgtaagaagccttcactttcattgcgcctttgggttttgaacacccaaatgacttgcgcatacgctaaactccttggtccgtgtttcaagacgggtcgaacagatgaccggcttttacaccgagaacgcacaactgagagcccgagctggaccgaactggttgctggtacgtgtcgcacgcgaccgccaccgacccccagctcgagtcaacacggacccgaaaccattgcacaattcacccagagtaaacagcactcccccgatccgggtaccagaccccgaaaggctggcctcaagaccgagctcacgcagctactccgagcatctcagcgcactccgcctgcaaatgccccattcgccactgaacagaaggacagcaaaccccagtctggaggctag

SEQ ID NO: 66637 - DNA, 345 bp, Heterodera glycines
acacccgctgaacttaagcatatcagtaagcggaggaaaagaaactaacgaggattcccgtagtaacggcgagtgaactgggaagagtccagcgctgaatcgcagctcctctggggttgcgaggtgtagcgtatagaccgtgagcttgggttggcccgcttgttcaagtttcccttgaccggggctccagagaaggtgcaagacctgtccaactggcggtgcctacccatctttacgtgtcttggagtcgggttgtttgggatcgcagcccaaatcaggtggtaaacttcatctaagactaaatacggccacgagtccgatagcgaacaagtaccgtgagggaaa

SEQ ID NO: 66638 - DNA, 540 bp, Heterodera glycines
atggccgcacttatccaacgccgcccaaatgccccctcagtggccagcgatcgagtgaacaacccggttagggaatggatggccaggaaccaagggggagagaacgaacccccgacgcaacagcagccacaagctcagcaaccgatgcaagccgaacagcaacgatttgagcgactcacgctcaatgaccagggacaagcattccctcgggcatcctatcatgtccgtactcggagggaggagcatcccactcgggaacgcctccgaactcagggagcagctccctcacatcaccatcgttcggaaactcgagcagaaacattgacgactttcgaaacggttcgattgcagccaccgacgttttccgggaaaccggaggattggaccaccttttgggcctacttccagcgggcggtggacgacaaaccaatcccgggattcgaaaagcagcttcatctgctgcggtgcctaaaagaaggatcgccggcgcggagagcggtggaggtgtacccaccatcggatggcaattacccggttgag

SEQ ID NO: 66639 - DNA, 136 bp, Heterodera glycines
atgcttcgtcgagtggatattaatgtcgccaataacactcccatcgcccacggggtgggcaaaggtcgaacgcctaaaatattcggaggaacggccgggcaattgaaggatttgggaaggaagccaaaggaagacg

SEQ ID NO: 66640 - DNA, 492 bp, Heterodera glycines
cggaagtgtcgcgctattcgacacactttcgctctctcctctgtctgttcttcgccaaactcattgctcttttgtcaccgccctttcatttttgcctcaacggtcgtgcgacgtcaaagatttaggccatatcggtgaaactatttcgcacaatttgccttcaaagcgctgttttttgccggggatttgcgccgattttcgttgtgcccttgtctctgtgagcgttgaccgaacaattcaggtgtttaaccacaaaaaaatactaaaacaaattgtggcacttttcaggttcaccaatttcccttccccactcaaagttctttctccgccttccttttccgtctgtcaattctgacttctgttctctacgttcttttgtggactctttttgcataaataaccattggcattgatttgttgtgatctttgaatgtctctaaattttaaattgtgaatctgtgatacatacgaaataataaagttttttgttaa

SEQ ID NO: 66641 - DNA, 438 bp, Heterodera glycines
aaaatggtctaagtaaaaatcgtaattacgctcaaaaagcttctcaaacaatttgagcgcttccaattccttctacaatcgcctttatacatcccattatgagcgctaaaattatcagattgccgaaaatcgcatgtgatctaagcctagaaaaaaatggtctaagtaaaaatcgtaattacgctcaaaaagcttctcaaacaattttagcgcttccaattccttctacaatcgcctttatacatcccattatgagcgctaaaattatcagagtgccgaaaatcgcatgtgatctaagcctagaaaaaaatggtcaagtaaaaatcgtaattacgctcaaaaagcttctcaaacaattttagcgcttccaattccttctacaatcgcctttatacatcccattatgagcgctaaaattatcagagtgccgaaaatcgc

SEQ ID NO: 66642 - DNA, 4680 bp, Heterodera glycines
  unsure (1)..(4680): unsure at all n locations
atggtcgtgaaaacctcgacgtttggagtggaaacggactcaatgcttgatggtggtgcccaaatatcactgataagtgccaattttctttaccaattggtaaaagagaaaaatttggatttcgactcccttgaaccgtcgcaaacaaacgtgcgagttctcgatgtcaacggcaaaatggtgccatgtttgttaaaagtgaatttgccaattcatcgtcgtggtctcaaatcagaagttaaaatcgcggtgcatgtgacaaaagctccgatcggttttgacatgctgatcggcacaaatggacttggaaaattgggctttaagctttatgacgaggcaaatgattcgatggttgaatttgagaattcagaactgaactccaaaaatcttcttactgtaatttacggtacaaccatcgagccacggtcaacgaagattttggaaatgggagtcaatgaaaactatgaagctagtgagcttctgatttcatcggataattcaaatgatctgcacgtcgagccgacagttgctattgccaatgagggcaaaatcattgtccctgtaacgaatcggtcgcattccaaaattgcgcttgaaaaagggcaaaaagtcggagaagttgagccgatttttgaactgggagaaagtgatgatatgttgataagcccggtcatcgtatccatgctatctgagccaaacggggaaacccttgaaaaacaacaattgttgtgggaaacggtacagaaaaatgttggaattttgaacgaggaacagagtgaagaattaagagaattgtgtgaaggttttggagaaatttttgctgcaagggacgaagatttgacccaaacaaatctggtccagcacaaaatcgaaacgggtgacgcaccgccgatcaaaatcaaaatgaggaatgtgccatatgcataccgcgagaaaattgcggcaatgcttcaagactatctgggaagaggagtcatccaatcgtccatttctccatgggccagtcccatcgtattagtgccaaaacgtgatggtacattacgtttttgtgtcaattagcgagctgtgaactcggttacgcgtaaagatagcttccccttaccaaacattgacaacatactgttaatgctaggaggaaaaaagtttttcagtactctcgattttatgtcagggtattggcagattaaaatggaagacaattcggtggaaaaaacggcgtttacaactgagtacggtctttacgagttcaaagttatgccattcgggctaacaaacgcagtcgcgactttccaaagattcatgactcgtcttttcgacggcatgatcaacgattttgtcttcatttacatcgatgacattttgatcgcttcagaatcgtttgaagaacataccaaacacttgcacgaagtttttgaaaggatcaaagcggccggtctaaaattgaaaatgtcaaaatgtaaaatgtgtgccgaagaattgccttttttgggccacatcttaacgagaagcggaataaaaatggatgcagacaaagtgaagcccgtcgttgatttgccaattcctaaaaataaaaaggaacttcattcactgcttggatttctgacatactaccggaaattcattcactcgttcggtacgatcgccgctcctctgtttaagttgttgagcgaaaaagttgagttcaaaatttgtgacgacgaaattaaaatcattaattatctgaaaggaaaaatcgttgaggacgtcttgctgtactttcccgatttcgaagcagctcaaaatgatcaaagtcggcgttttatcataatgactgacgccagcaaaatgggaatttctgcaatattaagtcagcctgatgccgagaaaaggatcagaccgatttattttgcttcgagacagtgcaatgttcatgagtctcgatattctgccaccgaacttgaggcacttgctgtccgtttcggtgtgaagaaattcgcgcagttcgtcacaatgattccaactcgcgtaattaccgaccacaaagcgctaatttggatgtttcggagcaaaaacgaaacgggaaatgcgcgaattgaccgctggctattagaattgaattcaagattcattcttaaagttgaatatcagcccggaaaaaagaacataattgctgatgttttgtcacgatcgggaactggcaacgaaattgaagaaagcgaacaaaattccgaagaaatcgcattcatcggtaaaattcgaacaacagaaaatgatttggagaattttggtttgatggaagaaagacaagaatgggtcgaacagaccaaaattggcgaaatgaagccaatttacgagtttcttgaacgtaaagttttgccaaatgaccaaagagatcagcaaagagtcattgataaatgccataaatttgtcgtcttcaaagaccttttgtacctttccgagaaggaaggcaaaatgagactttttgtcccacaaaaattcagaaatgagttggtgaaaaatcgccatgaaggaatttgtgcaggacatatgagtggcaaaaaattgtttaagcaactttcggaagagtatttttggccaaatatgctcactgattgcattcgggcacacgaaagttgccgaatttgcgctcacacacgcatttcacgggctaatgaaccgccgttgaacgtcgtcaaatcgttagaaccattagaattggtctgcatggacatcttagatgtcggcccaagccaatcgaacaaaaaatatatttgtgtgatcgttgatcatttcacaaaatatttggtcgcagaaccaattccggataagtcggcagaatcagtggcaaaagtttttgtcgaaaaattcattttggtttatggcaccccacaaaagatccattcggacagaggaaaggaatttttgaatgcgacaatggaagaaatttcaaaagttttggacataaaaaggtccttcacagcggggtatgaccctcaggccaatggattggccgaaagaataaacagaattatcatcggaattctgaaaaagtcgaccgcgagcaattggacttgggatgagagattggcgtatggcgttttcgcctacaacattacaccgtcaaatgttacggggtactcaccctttctgttaatgtttggccggaatgcaaaatttccgctcgataaacacgtaccatttcgggttaatcctgtttacacgatagattccggaaaatacattcaattattccgagaaaatctgctaaacatgttggaagaagcccagaaaaattcggaagaagcgagggaacagtcgaaaatttggtatgattcccgaccaaaagtcacggccaacaagttccaaaaaggagagaaagttatggtcgtctttcctggtcaaaatcgtcgttcgcctcacaaaaagttactttggtcacattttggaccatatttgatcacagaaattggtgattcatcggcaaatttggtaccaatagacaaaaaggagatcaccccaataaaagtgccgattgaacgattggttaaagtcccaaaaggcgtcccagacatttcgacactgcctaaagggaaaaatccgtttaaaaacgacctaaaattgttgtcgatgtacgcaggaattcgttcagaaatttgcgaaatgactggaaataagtgccgcgaaattgggggaaaaagcgaatcgcaattggggacaattgcttcagattgtttggggggaaattggaaaagcgactccttttcagagccaatggatgtcggaagtgtcagtgccggatttggatggacttcggagtgcagtggaggcggctcggggcacgagctgtgcgagaaaatcacgctgggaagtatcgacccggtcctgaacatgtcgaatctgggatcggcggtagtcaaaacaccgcttcaagcccttctcagcatctttctgctccgatcgggcgtggcttcatcgctcacggcagcccaaactttggtccagacaattgttggagcagaaccgaagctggagttgtgtatgtacacagggaaaaggggggaccaaatcagcaccggcaaatacccaacggaggaggaccaacggcaggctttggagaagtgggtcggatcgtgctttgtggctcgacaggctttaaccgagtcgggatataagcccttgtcgatgcaaatgccagagggagtcaattcgctgcccgattctgagaaaaacaaatggcacgaggtcttcaaagacagttcatgggcactcgaacgtgtgcgggccacgattgtgcataaagcgagccgctttttggcacatgaccgtgttctgctcggagactcatcggccgaaatgctcgccaaacacatcaacagctcctactgcatcggaggagagagttccatggccgacttaatccgccaatttcagccgatcgttttgtcaagccgtgtcaaggcactgctcattttggctggacgtgattctctgatgcagggcgaaaccgaaaaatcgatcgcggcccaattcgaaatgatcgtcagcctgtgccagcgcttcccgcacgtgcagatattttggtgccctccaccgtatgtgcacgccaaggcaacggaatgcgaggagctgatcacgaaaatgcacgccatcatctccaaatcgccgatcactccaattttcncccccgagaaaggccgatca

SEQ ID NO: 66643 - DNA, 1726 bp, Heterodera glycines
atgataattcgctctccgccattgacacgacaaagagcgttgaatttgcgaacctttgcgcaaaaccaaaacgcagcggttgaagagcagcagcaacaacaacaggttgaaggagttcatggtgaaaatgaaccattggttaacgctccgatctcgccaggacttaaccgaaatttgagtttgtcggcggaggaaaacgaacaccattttagtgaaatggaagcagcagcagcaaattgaaattcggcggcgccttctgcatgtgtccatccaatcgaatttgccgccgcgagcaaacggtggtggtaacaatggtgccgaacagcagcaaattcgcaatgcaaatgttggtcacgaggactttgttgaaggtttgcgtgaagttttgagaccaaattttggaaacttattggtgcgggaagaaggagtaaggatgagattcgttgagaatggcaccgaaaataggcatttcgagcgaattaacagaaatttggttcgggaaacggcgccaaattcacgtcatgtttcgcaaagcgaactcattgggtgtacatcgacgccaataaattttaatggcgaattgcacaactttccaattgtaagcaaccaaatccggcaccgagaaatttatgaggattttggcccctaccgggagcacgaaaattttcgctcaagccaaattcaaattcgccaacaacctgcgttagcgcggcaacaacaaaacgcaaacttcggctttttgccatgcgaacggcaacacaacgaattcgtcggacgacatctttttgaggatggacgtcaaaagatgcacccaacggagattccgaggcaaatgcatcaacagccaccaagagaagagcgtggatggcagcaacaaaacagtgttttgtaccgtccagtggcgcgacagcagcaaaattttacggtttacgaaaaccaaatgctgccaccccaaagccaaaatttagcggttttaagtagtctggagtacaatatggtccttgaaaggatcccagacctcaacggaaaggaagggacggacgaagttaagcgttttttcaaaaaattcgacgcttacaccgacagttggccggatgaaaaaagaattaagggactagaaagcaaagtgtatggccgagctgaaagagcttttgaagcggcgaaagcagtcattccgataaagtatgaactgcttcggggtgaaatgatgcgacagttggaggaaacggactcaaaaaacttgaatgcttttgatgagctgatgttaggggtccgacgaaaacccaacgaatcgattgatgatttggcaggtcgaatttcggggttggtgaagagagcctaccctggtctttctttccaattgtcagacgaattctccatcaaatatttgatccgatcaattggtgacccaactttgtcacttaatttggaactcattcgaacgcctcgaatgtctttggaccatttcgtctcgctagcagcgcgtgcggaatcgacacagcgcgcaacgcaacgttttgtgtctgcggaaaagtcaaagattgatcggaatgaaactcagtttcgagaaccccgccgtaattttagtcgggaatatcaacggcagcacgaattccaaccaatttttcgtgattggcagcccgaatttcaaccgaataatggaccgatcagacaaaacaacccaagttttgagccaaaactgtggaaatgctacaattgtaatgaa

SEQ ID NO: 66644 - DNA, 497 bp, Heterodera glycines
atgtattttaatttgcttttgttttgtgcttttttcgtttctttggcgagaacagcagcacagaccgtccaacaacatgaacatgttcatttgtggaaaatcactcactccgaaatgaaaaagccgagttatttgcttggtcagtttatttaataaaatattaaaatgtgtgttccccttcccttcccttaccgtagacaaaccaatgcaaaaaagcaaaagcaaactaaataaaaattttttaaatttttaaaacatttccctgatcaactagctgaataggctcacaattaccaattagcaggttccatattttgacatatgtttgcattctggactttcgggtttattccaatttattttctttacatatctaaaataatactctaattaagcttatttaggtacgacgcatgtcccatggaagatactgtataacaaatgtaagttcttcaattactgtgccgttttacaaaaatgacgaatttttattccaa

SEQ ID NO: 66645 - DNA, 360 bp, Heterodera glycines
atgaaccgacggtaaaaggcttttaaaagtcacaaattcgtcatttatttgactaaactgttttcccatttcagttggatttgcaacgacgtttggatggacattttccccagttttgaccatgctcaacttggcctcaaattggcacttatttcgccacgtttcaatgcgttggtggacaaacatttcaatggcaaaagcgaattgacaatttggagaccaatcgaaattagcaagggcattggaacaaaaccgaagctatctgtgattaccatcaattatggcacttctgcgtattttccgttgcccgatcgtccgctgcccaaaaaaattcgctttaagcaccttcagattaagtaa

SEQ ID NO: 66646 - DNA, 75 bp, Heterodera glycines
agcaactgctaaccgatttgatgagtctctcggcgaaagtggacaatctatcggcgaaagtggacaatctctcgg

SEQ ID NO: 66647 - DNA, 1791 bp, Heterodera glycines
aaacaaacgcatcaacagttcgccatttcgccgtggacgcctcgtcaccattagctgatgccattcccccacctggtgaacaacaacgccaacagccatacgacaacggcgaaaatgggacgcaaattgagaggacgacggcacttggccatcagcaacagggggaggaggcgaaggagggcaccaccaccaacaatttggccacacaaatggaagcgctgtgccgtgaaaatgcgctgtaccggcgcaccaatgagcggttggagtactggctgaccgcgttggagtccgagaatgaaagcatcggcgaatacatcgctttgtaccgcttccagcgaacccaaattcagcagcgcattgccgagaaggatgccgcactgctgcagctccagcagcagaacacacagcttacggtttgtctcaaaattttgtgaaattttcaaaagcaaattttgacgtttttggagcagtcccccctccgcaaattagaaaaaataggaaaattcaaaaaaataaaatttttatgcgcttttttcaaaattttatgatcatacagaagggggccggtgtaaaagaggtggcgggagggggtccgcagcgagggggggtcgcaaatttatattttctaattttttttgaggtaaatatttttatatcttggtttcattttcttcacagcatttcctctgaactgcttgaacaaattggaaattgttaaacaaattttttgagaaattaattgtgactcccatttttgccaccattttttaggccattttgaccgagttgcgcaacgcaatgttggccattatgcaaaaaagtgatgccaacgcggcaacattgccaacagcgacggcaaaactgtccgtggacaactgctgtaagaccctttattgcgatgcacccaaaaactccgccaaggaaaaaaatatcaaaacggaaattttcaagaagtaatcataggaaattttttcttgaatacattttcaatgaattttgaaaaatcgctggaatattttttgaaattttttaaaaaaaatttttaaacagagtttcgtcggcggagttttgtcctgttccgccttcattgacccgttttattcgaaactgaacactttgcaattcagcagccatcacagagggaaatgatgagcactcggattgtgcaaatccaacggaccaacaaaaacaacaaatccatccgcctccgatggaccaattgtcggccgatcgcttaatgcgcattttggaacggagcgaggtattttgcgacttagggtcaattttttaagaaagattagtgagttttacttactgccggaaaaaaatattacaaaaattactcaattttcaatttttttaaatttttatatgaattaattgaccaatgcaccgttatttttggtgcacttggcgagagatatcagtttttgattctttgaatttgcgcgtctttgcattggttttggtgatcagtgattgcattttccatctttgaatttaggtgatcagcagacaagcaaatttaaggagaaattactgactttgtttcaaaattttttacatttattcccggctgtgttttggggtgtaccgtaattttcggtgctcttgccgaaagatacagtttttgatttttttttatatttgtctttgcattggtttggtgagcatattttccatctttgaatttaggcgatcagcagacaagccacttgcatggcggcgaaccaagcacagattcactgcacgggatgtgtggaatgccaaggcgaactgttcaacatttga

SEQ ID NO: 66648 - DNA, 2343 bp, Heterodera glycines
atgaaggcgcagttggagcagtccattgaacagcaacgaagcgaactgacaatgcgagacatttacatcaaacaattgaccagacaaacggccaacaacacaacggaattcgaaaagtgtgccgatgccattggccagcaaaatgttgcccatcaacagagttccggtggtggtgaaagctcacaaaatcaacaaggcatgtgccagggttgccgccagatagaaaaaaataatcggattttggctttttggtcattgggtttcagcttatccaaggaggatcagctcgtccccccacccggatcagttcccccgtatcgttacactccgaaaaaatattcaaaaaatcttagaaataaatcgctaaaagcatttcaacattttttaaataattttttttaaggggggcataatgacacaaaaaaaattccagtaattttcatttaaacttttcaagaattccatttgaaaattttaagaaatccaacaaaagcgtgatgacgatttgaaatggcacaggaataaggtgctcgagttgcaaaaacagctgcagttggtccaggaacagcaacaaattgaaaattcactggcaaatgccaacgcgaaaagacttgtcgaacaggtacaaaatgtgaacataaatgggctcagctcgtttcccaacctaaagttttttttttaattctcaaacatagaaatttttcaagaaatctgaaaaaattaaaaaaaaattcttgaaacaaaacgaatttttgtttttttttgtcaaaaatatacattataattattaagtgtattcaaaaatttcacaaaaatcgctgtaaattttacaggaaataaacgtagggcaccaaaaataaatattcaaatttattcttaaatttaaaaatatttgtcaggtcaatttattattaatttcaaatatttatattaaaaatcgagtgatttagttggacagtgtgaaggcacagaatgcccaattggagtcgttcaacaatgtgttggaggaacgccttcgcattttgcaacaaaaacttcttttgaatgacaattcaccgccaccgtccaacaacaacaacagaaatgaaaatgccaatttgacaaattctgcggatggacaacaaaatttgctaccggaaactgagcatttgagcgaaatgaacggacttatgaaaagcgtaaaggaattaacgggggaaaatgaaaaattggcgagcaaattgtgcgaaagtgaacagctggtgcaagaaaaggtgagaatttctggcaattttttgacaaaatatgggccaaacattttgggaaggggtgattcaaatttttattcgtttttttttttgaaatggaatttacaatttttaaacgctttttgcccggggttgaaatcctcgaattctgaatgataaattgtagttgtagcagttcggcatttaaactgagtgtttttgttttcttaaagtttttctggcacaggaacacagtcttgaccagctgcaacagtcgttggccgaagctcagtctcgaattgcccaacttgaacagttgcagaacatccaatcaacaataaacgaagtaaggggggggcgggaaattgtaaatttggtaaatattcgcggaatatgacaaaatatcgccgtaaaatgtcgcctagacttaaattggtcgcaaaaaaacaacaaaattcacatgctgcctaatcttaaaatgaattttctataaaaattctgcgaatattttaatgaattccttttttccagtgcgttaggtcttccattagcgtcttttggtcccggcaacatttagcccgtgtcccgacatttgcgcctttgtccaaaattgggttcaaaatcagtcttttcaatccctgatcgcatagacagcattaaataagtgatagagatttgtctgaaaattggaaagaatcattaattagagctatcatagcttgaaaaaattcacatttgaatccgattttggacataggatgtaaatgccgggaccccaaaaaaccatggctctatttatccggccattttttgtggtgcaccaaaataatcattaaaaatttcttaattgaatacctattatattttaaactaatgtcgtcaataggacgtttctctgcttgctgcgcaactgcaaaatgagaaggccaccgtttcgcgggcagtcgcgcagaatgtcgagctgaagagccaactgaaggagttgcaggaccgactgattgcagtgatcaacgagagcgccgccaaggaggacgaacggacgaccgcaatggccacggttgaacgcctaaccaagcaattattgaatgccaacaacaacgaggaggaggacgaattg

SEQ ID NO: 66649 - DNA, 731 bp, Heterodera glycines
agcaaaaatgcagcaaattcccattctttccctctccaatttcctccccattttctcacttatttcggtgccctttttattgtcctttccttccacggccttcggttgctcttgtgcacccaccaaattcaatgagtcaatgtgtgtggccaaatggggtaaaacaaagccgagggataaacaaataaatgaatcaatggacgggtgggaaattggaggaaaattcgacttaatttatggaaatcgatcagcagaatgatcggtttgattgtaaatttctgtttttgttggtcaatttgtccggattaactcacttttttttgttttcattttgttaagtgtcccatgtgaaggtgttgcaaaacacaacaacaacaaactcccaccgcattttcactgtccgacatttggaagtgttcaaagtttgtcctaattaaccaatttggccattaaatagtccattttgacgaaatgcccccccccccatagagtcccaacggcaccgctcacaatgaccaactgattgggaaggaaagtgccgtttggactcccatttttacggcggcgtgcggagtgagagaattggacactgaaaaggaatatcttttggctggtgggctttggctccgttcatggcgaataattttcacgttcatcgccttaggcactgtggacaatttgggaacaaagaagattaatctttgtctgtttattccaatcgaagacggaca

SEQ ID NO: 66650 - DNA, 124 bp, Heterodera glycines
gagttgaccggctacgaatacaatttgatgggcatcgactcaattccggaggaggattaactgaccaacgagtgggattttagaacattagacgatgacgaattcctcgattatccattatgct

SEQ ID NO: 66651 - DNA, 59 bp, Heterodera glycines
aacatttgccttctctagtctggctctaccaaacacgcacacgatatttgaaatgctaa

SEQ ID NO: 66652 - DNA, 59 bp, Heterodera glycines; identical to SEQ ID NO: 52421

SEQ ID NO: 66653 - DNA, 59 bp, Heterodera glycines; identical to SEQ ID NO: 52421

SEQ ID NO: 66654 - DNA, 59 bp, Heterodera glycines; identical to SEQ ID NO: 52422

SEQ ID NO: 66655 - DNA, 59 bp, Heterodera glycines; identical to SEQ ID NO: 52421

SEQ ID NO: 66656 - DNA, 798 bp, Heterodera glycines
atgaagcagcagcaaatgatggatgagctgagctcagtgaagacgcaggtcgagaagattggccaggaacaacaacagcaaaagaaggagcagcaggaaaagcaggaggaggacgcaaagggcaaatacggtaatatcaagggaatactacggtaatataggaattcagcactaggaaatatggtaatggaggaagagggaatacggtaatgggccctatttaaaacgaccagaaatattctgaaaatgactttttaattatttaagcttccatcgaccaattcacgcagctgcaaaatgaacagaagacacttttggaaaaagtggaacaaatggtgaaagaatgggagagggaggggaagcgcaaaaggacaattaagacagggctcgggtcgggcaacttccctttccaaggatgggtataccggtttccaagtaaggggaaagttctattaaattttttgaaaattagagtgccatttttaacagattttcagcaaaaaaaggcggattttgcgattttgagataatggggatgaccattttttacttttcacaacacttcttgcgagcgctttttccgaaagactttttgggaatggggggggggggaagaaattgttaatagatttttccaaaattgataatttttaacgcttttggtgtgtcttttgaatctaatttaaaaaatataaagagagatcccggcggtgtcgatagcgccgcctggaaaaattttgggaatttttgtgcaatttaataccaggttatgtaccaataatgcaataagttaataaa

SEQ ID NO: 66657 - DNA, 258 bp, Heterodera glycines
tacaaaaataaaagtgattttgggattcgggaccaaaggggggtaaccaggatttttgagtgaaaaaattttttcaccaaaaatctttcaaaaacatgtcattagggctattttatgacgctgatcacgaatacgtgatcagattttacttttaacatcgataagacctcagaatccctgtgtgattggggattctgaggcatcattttgaggggggagggggcaggttcggatccggacggtgtacattaattttct

SEQ ID NO: 66658 - DNA, 697 bp, Heterodera glycines
tttggtgcgtttcagagcattttctgaaaaaatatttatgaaataaaaaaatcgattttttcaagtgtccgtttgggtactcaaacaattatggggagcaaaaatccaacgcagattaaagtacagactatagggaagctattcccgaaggattcggtctccccataaatctggcgcatcggttcggggggactgccccgaaaacaaaaaaatcgattttttcaagtgtccgtttggggtactcaaacatttatggggagcaaaaatccaacgcagaattaaagtacagactatagggaagctattcccgaaggattcggtctccccataaatctgggcgcatcggttcggggggactgccccgaaaacaaaaaaatcgattttttcaagtgtccgtttggggtactcaaacaattatggggagcaaaaatccaacgcagaattaaagtacaggctatagggaagctattccggaaggattcggtctccccataaatctgggcgcatcggttcggggggactgccccgaaaacaaaaaaatcgattttttcaagtgtccgtttggggtactcaaacatttatggggagcaaaaatccaacgcagaattaaagtacagactatagggaagctattcccgaaggattcggtctccccataaatctgggcgcatcggttcagggggactgccccgaaaac

SEQ ID NO: 66659 - DNA, 838 bp, Heterodera glycines
ccattttagcggaagatgggttcgactttcgcgagattaaggttggttggctctgccatatatctatctgtgataatgtgctcttttcaaggagttcacgcagcttctccattcccctcgacgagtgccgccgccgcgttacatttgccacatttgttatcagcctggccattacatcaggtggtgcagagagagagtgtatttacgaaaggctcatttaaaattaccagaaaagcgacaacccttccaaaatttaaccaaatattctttcttaagtgactgtcccgctcgcttcaacagtccctatgaggagctgacgccgtaccaaggccgcaagaagtttgtttttaggcttaaaaatatatattaagcacaagttacacaattctttcaggtgctatggcgaatttgtgagtgcttttggctctttttttaaatttttaaaataattgacaatttttaaagcaatgtgaacagtgcaaacgcaaatggacatcgcagaacagtgtggcgaatgaaggtgagggagggaggagcaaggaattctgaatgagaatttatgaataattaataattgcgtaatttcgtcgcattttagcgcaaagctgcatcaaatgccacgtgccggtctttccgcacaaacaggttgggtaaatggcacttaattgtgttcaataattaactcctcctttcttccatgttcagcttcccgtggacaaggctgtcgcattgggattggtgagaattttttgttccctttttagttgttttcaaaaacgtatgctgggtcatggttttttggaggacccggaaaaaaaatgagtggtataaattatcc

SEQ ID NO: 66660 - DNA, 417 bp, Heterodera glycines
ggagacaacaagcggatttgtcggcattgtgccacagcgttttcttaacattttcttcgatgcgacagccgatgaagaaagtcactttggggaatcgtcaacaagggaaaatgaaagatccaacgatttgaccggtgtttcgttttcacacgcctctaaataaatgcccttttcattttgtcagaccaactcaaaccgtgggatgttccgattttccaatcttcgaatgtccccagcatccaaaaacaaggatcattttcctgtcgctcttctctttccggttacgattccgctcaatgggtcgactcgacagacgccgccatttcccatcggccaccgcctcgtccacctccgccaaaattatgccaaacaacatcggaagtgacgtcacccagacgacactttcatcagtcccac

SEQ ID NO: 66661 - DNA, 896 bp, Heterodera glycines
atgggggttcctgtgccgactcgtccccccctccctcgtcgtcccccttttcgtcctctcccatttcgttccgtcatcgccaagttcctccgtttctttgtctctgtcccaacggatggactggccaaatatgtgaccaacctttggagaattgtcgcgtcaattcgtgccaaaatggtctgtctttgttcatcgaatgtttaattcttaaatccctcaggtgcttcttgccttgtcgacccgaacagttccttcggcttcgtctgtcgttgtccgcacggatggcgagggattttatgtggggaaaaagaagaggtcgacgaatgccgaacaacgcaatgccaaaacggaggctcttgccaaaaaatggcggacggatttcactgcgtttgtcggaagggattttggggagcgaattgccaggaaaaaatggatgaaaacgaaacgggaaaagtgccaacgaaggaggacttgagaaggatgggagcagaggaagtgtcaaaaggacaaaagtaaacggacaaaggcacagccatcgcagccaatggcacttccttttgcagctgttcgtcctctcgtccccccgccgctttcccctccgtttccgtgcccatcgccctgctgctgttctttctgttcgcctttctcttctccctcagtgccgccttttccgcttcttcccccaccgtctcttccatttcgacaatttcacaaccaaagaatgttttcgaccaccgctctctcttcgcgtcgtcggaaagtgccaactccgaacccgcgcggtatgtgtgcgagccgaccttcagaatcggaccacaaagtcgacggcacttggaagaaagggcactgtcagcgatgggagaacgaagggcaccgccgcggacaacggcgaatga

SEQ ID NO: 66662 - DNA, 560 bp, Heterodera glycines
cactttgcccaaggattctgtgcccgtggaatgggaacatttttccgccaaggaagtcatcgtcgatccgaagtaaattttgggaaattgcccggggcaattcacacaaattgaacatccgaaagttctcctgctttggtcaacggactgcgaagcaaatcgttgcattaaattagctcaatttgttgtagcaattcctccaaaagtgcaattgaaattttcggggggggggggggggaaagatcaaagaatacaaacaaattgaatttaaaaaaattgttttaagaatggcacacacttatgtgactgaattggccggcggcattccgtccgctcgcggcacaaaatattcctacacttatgagtcccgagttgaggaggaggggaacaacgaattgttggaacagagccaacgaaggcgggaggagacggacgaggaggagatgaaacagcaacagccgatcaccgagttgaggagggaagaggaggagcacgagttgggcagggaattgaggagaggggaggacggcacggaaagacactgtacatctacgcaaaag

SEQ ID NO: 66663 - DNA, 743 bp, Heterodera glycines
atgagattatattttggggattcctatcaaaaaatttataagacaaaaattggaaattcaatcaaggaaattatgatgccactagccgatttacaccgaggtataaataaaaaatttaaacacattaaatatttatttttcatagctattaatcataattatcaacgaattatttaattaatttttaaattttaaaataatttcttggtcagaaatgtgcattgatcacagctaactaatgtgttttgatcacctgatcagcagcgacctccgaaaatcgcccgaatttatgatttaatataaaaaatctacccaaaaaaattcatgagaaatagaaataccgattttttaactttttcaattcttttttctcttgccataagttaaaattttttatttttcagttgcggtgcatttgaattttaaccccgaaaatttggtggtgtctaataaaaacaatgctgtttctgttcgaagacttttctccaaagtcgaaagcacaccattgaagctgatcggactggagggggcattctttttggaaatggggcgaaacattgaaaaaattaatgacgatgaaattgagggtcatcatcacttctcacaaacagctaatggacgatacatggcaccggaatatttggacaaaaaggtttatacataatttgcaatttataaatatttgaatattttttatgtgtttaaattaattgtcattttaattatctatcagcaaaaataaa

SEQ ID NO: 66664 - DNA, 153 bp, Heterodera glycines
atgagcacatcatggacttatttggccagtgagcaattttaaggcattatttttgtatagtatgaaattaattatttaaattaaaaataatttaaaaaataattgaaatgatttttagtggtcaaattagcgaagaaggcaagagcaaattga

SEQ ID NO: 66665 - DNA, 849 bp, Heterodera glycines
atgccaatcacttttcaagggtcccttggcggtgcgccgccgcctccgccgccaccgccgccgcctttgtggaagggcggtggcggaaagtcgccggtgtcttttgcggatgcaattcggcaaaaggccatcgaccggggaggatccgtcggcgcagaacccgaagagaaagcgccgcaggcgaaagcgcccccgccgccgccccctccggcgaaaacggcggtgcctttgtccccaattgccccggcgttgtctcccatacgtagtcgaaggccaaccccatttccacgcaatttggcaccaatttctgacgaatcggcacaacaattgacgccaattagccgtcgaagggggactccgttggtgcggaaagtgaccgagtcagcggaggaggacccgcaaagattgggcagagtcagacggatttttgcatcggaagaaagcgacggaagccaagtggagaaagcagcgaccagaagacgtcattcgacagcgtcggtgagttcggcactttcctttgcgggaagtgaagtgacaacgccgacgaaaagccgaaagcgaaagggcacggcactgccaaaacgaaaagcggcacaaagagcgatcattgaaactgaagcggaagagcaatcggaagaaatcgaattgggaagaaagggacggaataaatggacggaagaccaaatggaagaaatcgaattggggagaaagggaaggaataagcgagtggatgtgtgggtggaagagcagcggacgatgggccaaaaggcggacgaatcggccgaatttgtgccattctccggcgaattggtcaacgaaagatttgcttatgacaaaatgccaggttaa

SEQ ID NO: 66666 - DNA, 61 bp, Heterodera glycines
gggcagtccccccgaaccgatgcgcccagatttatggggagaccgaatccttcgggaatag

SEQ ID NO: 66667 - DNA, 369 bp, Heterodera glycines
atgaaaaatttgcttcaaaaatgccgtgaattggacaaatgggctactgccaaggccattgtgctcgcattggtcagcagttacaatgaattaagggtgagaaaatcgactatcttttagattctattcgttttattcagctgattccgcaagacaccgtcgaccacgaaagtggagattctcaggcacttcccaaccaagaaaccatcgtggaccaggacagcgaacacttccaagcattgcgagaactcgccaaacgtttggctctttcgtttggagtggacagtttcaaaaacagggaggctcttgctgttatccaccacgtaaataaaagaaatgtttcgaaattaccagatttttaaatgacaa

SEQ ID NO: 66668 - DNA, 457 bp, Heterodera glycines
gtttcaaatatcgtaagattgtttgatagggccagacaagagaaggcaactgttggtaccaagtttgcggtaaaaaaatgagaaaaaagagataaccatttttggtcaagaattttttttgtttgcgtttcaaatatcgtaagattgtttgatagggccagacaaaagaaggcaactgttggtaccaagtttgcggtaaaaaaatgagaaaaaagagataaccatttttggagaatttttttgtttgcgtttcaaatatcgtaagattgtttgatagggccagacaagagaaggcaactgttggtaccaagtttgccgtaaaaaatgagaaaaagagataaccatttttggtcaagaatttttttgtttgcgttttcaatatcgtaagattgtttgatagggccagaccaaagaaggccactgttggtacccagtttgcggaaaaaaatgagaaaaa

SEQ ID NO: 66669 - DNA, 236 bp, Heterodera glycines
tttttttaggtcgattcttaggggtgtattttttggttttattgcatttttgttaaggaattttccaaaaaatgtcgaaatagtgaaaaaatagtgacaaaacgccaaaatagtgatttttaactattttagtgacaaaaccccaaaatagtgatttctagtgacgaaaagtgacgtccaaatgaaaaaattttaatgcagaaatgcgttttttgagctcctttcttcaaaacaat

SEQ ID NO: 66670 - DNA, 677 bp, Heterodera glycines
  unsure (1)..(677): unsure at all n locations
atgcccacaacattgggcattgcgcttgtgcatggctaccaacgcgtggaccccgacttgattttgccaacaatgcgtgccaatgttgagcgccaattggacctaattgccaagggaaaagcggactatcagacggtggacaaatcattaattaactaactaattgcgctataactaatttaattaccaatttcaagacggagaaaaatcattaattgactaatgaattatctgactaatgttgtattattaatgagttaaggcattttctttcagaataataaataaaataattagtaaattaaatttttaaaatttaaaaaatctcaaaatatttaactattgaaattgcgtaaaatatatttgtacttattttttctaaatttaatttcagatcaagaaccaaacacttgagatttttcggcagaaatttctcaattttgtgcagaacataaatttggttgacgcactttttggaggtgaatgtcgccaattaattgggcccattaaccaattaattaggcccattaaacaatttttaaattcaccattttaccccattagattcatttacatcgctggccgactcgggcaaaccgtcagcaatgtggcaatggcggcgctacatgaagctgntcgagacgctggcccaacgattgtattgcccgatttgcgat

SEQ ID NO: 66671 - DNA, 388 bp, Heterodera glycines; identical to SEQ ID NO: 51536

SEQ ID NO: 66672 - DNA, 544 bp, Heterodera glycines
atggcccgtgtcgcttcgccgccgctgccggcggacggcacggcactggccgaacgcatcaaagaggccgaagcgcgagaagaagcggcactgacagtcgacgccgatgaaacggttgcggatagacccccatttgttgttgatggcatcgacgaagtgctagcggacgacagcgaacatttgcgtgttgtcattgttgctaaagggaataaaagtgattagctgatcaatgatctcatgtaactgttttcgtctcgactaattcaagaaaaaaaattataaattgtttaaaaataattagcccctaaaactcaaatcgtaaatcaatgaaaagcattgaaaaagttgttgatggtttaaattagagtgccacgggaccgggacgggaattcccggtcatccgaggtcccggttcccggtcccgggttttgaaaagctcaggtcccggtcccggtagggcaaccgggaaccgggaaaaacaagcactggtaagaatggggtctgagtgaaaaattagtgaagaaaattggagtcaaagggaaaa

SEQ ID NO: 66673 - DNA, 202 bp, Heterodera glycines
atcggcgtcgactgtcagtgccgcttcttctcgcgcttcggcctctttgatgcgttcggccagtgccgtgccgtccgccggcagcggcggcgaagcgacacgggccatcacgtcaagatcacccgcaccagcagcagcatcggcacagaggtcgagaacggtggtggacagaaacgcgagtccggcggcgatgccattgcag

SEQ ID NO: 66674 - DNA, 2650 bp, Heterodera glycines
  unsure (1)..(2650): unsure at all n locations
tgtgattttcaaaaataattatntaattactttaattatttntaagagttatttccctcgtgttgagcaacgagaatggcgtttacgtccgttatactacgaccaacacaattcaacgcccatgctgacactgtttgtggtcacaacaagcgaaggtgngcgtggaaaattgcaatttttatgtgtaaaaattaattgactaattattagggagcgttaagatgctcgagagtcaaaaattattttccagtaacttggggaaaccgagacagaaaattgaaatcttagaattgatgctgaaagagatcaagacccaaaataacatcacagataaatttctcgactagagaacaggggccgagaatctcgagagcagcccaactaaatattgtaaaacacttaactatgtatgatggataaaagtagatttaaaattcaacaggttggccaggcattcggcagaattcgatggacactacgtatgaggaccaaggtgggggattcaataaatgattcattaatgttttcaaagattttttcgaggggtgggggatacaggttgccgaaaaatgacctgtatctgttgaattcaggaaccattatcacaatggtaaaaagaacatttttaacccgaaaagttttcgttatctcattgtttttattatcccaatggtgctatgtcattacttaaaaaccatcataatgggcgttacttaaaaaaccatcataattaaaatttttgcttataactttgctctaaaaagaccaaatttttaatccttgctatcattcgatagatctaaatgttctttatgagcctgtaaaatttcaaaaaattttattaagtttaaaaaaagttatggccaaaaatgttcgaaaatcacgttttttgagttccccgagctataacttttttgaaacttaacgaaattttttgaaattttgcagactgatagagaacatttagtgctatcaaatgatatcaagaattaaaaatttggttgctttcgagcaaaattataaataatttttcgacaaaatttttcataatgatggtttttaagtaacgacccagcaccatcccaatttgttttttggattgaaacgcgaaaatcatggccgtatggttgaaatttctgatatttttttttatcaatttaagcttataaaggcatttttattcaattttaatattttgaataatttaacacacaaatttaggaaattcggtttttcaatgtttatctcgaacctcgttttttgacgaaatttttctttttaatacgacccgaaaaacatgtttccagaggttttcagggtcaatgattatgagagcatgatatctgtttttaacgataacaaaagaaaacttttttctcaaaaaattacaaaacgaaattgaccaaaatgcaattaaaaatgtgtaaacaagcttgaaaattatcttcgagaaagagaacggagtgatcagagccaatcatggaagtgatcagactaaccgacaaccaatcacaaattcccattttcactctttttaaggcccatcgccgtattatcgtgtggaggtggcactgttttatgtgatgtttttcatcgtgttcccgttcttcttcgtcaacatttttgtcgccttgatcatcatcactttccaagaacagggcgaagctgaactgtccgagggtgacctggacaaaaaccaggcaaagcaaattcaaaaatattataaccctaatttttggtgtttccaaaaattcttcttttacaatatatgtacaaaaattaggacacttccgggttatgcttcccccctaccttaagttttttttaggagttaaggtctttagagacctataaagaccgaaattcaaaaacaatttttttttttttttaattggaaatttatgccaaaatatatcaaaaaatggaacaacattttctatcttttatttattattttttataattaataaatttttgatttactttttattttttcttctaatatggcttttcataccatatttagcttattttcaagatttttagcctaaatttaacgaatttgaagaaatttgagaaattttaccctaatttgaaaaaatttatgtatatatttttcatatttatgtgcaataaatattcaacaattgatgtataaaaattcagaagcaatgcattgatttcgcgttgaatgcccgtccccgttcgttgttcatgccggaggacaaaaattcgatgaagtaccgaatttggcgtctcgtcacgtcaacaccatttgaatattttatcatggccatggtcagtaagaaaaaactaaaagtttaaaattaaaaaaaatttcgatgtggaataataatacggaggaaaaaaacaagtatgtgtagaaaaagaagagatcgatgggttggagaatgcagaagagattcattttttatattatataattttaattttttttgacaactcaaagcttctttttttataaagaaataaattttatttttattaaataaaatatatttttagattgtattgaatacaatcattttgatgatgaaattccacgggaattcgccggaatatgaaaaagttttaagtaaatgttttgtatttatttttaaataaaattttaaataaatcaattattttt

SEQ ID NO: 66675 - DNA, 1358 bp, Heterodera glycines
atggtatgaaaagccatattagaagaaaaaataaaaagtaaatcaaaaatttattaattataaaaaataataaataaaagatagaaaatgttgttccattttttgatatattttggcataaatttccaattaaaaaaaaaaaaaaattgtttttgaatttcggtctttataggtctctaaagaccttaactcctaaaaaaaacttaaggtaggggggaagcataacccggaagtgtcctaatttttgtacatatattgtaaaagaagaatttttggaaacaccaaaaattagggttataatatttttgaatttgctttgcctggtttttgtccaggtcaccctcggacagttcagcttcgccctgttcttggaaagtgatgatgatcaaggcgacaaaaatgttgacgaagaagaacgggaacacgatgaaaaacatcacataaaacagtgccacctccacacgataatacggcgatgggccttaaaaagagtgaaaatgggaatttgtgattggttgtcggttagtctgatcacttccatgattggctctgatcactccgttctctttctcgaagataattttcaagcttgtttacacatttttaattgcattttggtcaatttcgttttgtaattttttgagaaaaaagttttcttttgttatcgttaaaaacagatatcatgctctcataatcattgaccctgaaaacctctggaaacatgtttttcgggtcgtattaaaaagaaaaatttcgtcaaaaaacgaggttcgagataaacattgaaaaaccgaatttcctaaatttgtgtgttaaattattcaaaatattaaaattgaataaaaatgcctttataagcttaaattgataaaaaaaaatatcagaaatttcaaccatacggccatgattttcgcgtttcaatccaaaaaacaaattgggatggtgctgggtcgttacttaaaaaccatcattatgaaaaattttgtcgaaaaattatttataattttgctcgaaagcaaccaaatttttaattcttgatatcatttgatagcactaaatgttctctatcagtctgcaaaatttcaaaaaatttcgttaagtttcaaaaaagttatagctcggggaactcaaaaaacgtgattttcgaacatttttggccataactttttttaaacttaataaaattttttgaaattttacaggctcataaagaacatttagatctatcgaatgatagcaaggattaaaaatttggtctttttagagcaaagttataagcaaaaattttaattatgatggttttttaagtaacgcccattatgatggtttttaagtaatgacatagcaccattgggata

SEQ ID NO: 66676 - DNA, 1399 bp, Heterodera glycines
  unsure (1)..(1399): unsure at all n locations
gaggagagtccatttggtggcccaaagccccattgtgccatattcgtccatgttcatttggcaccgcaaacccaatttccgtgttgggtgcacagtgtggtggccaccaaatattttgaaatggtagtgttttaaaacatatgcaaaattttgatgaaaatttcgattttcctttttgatatcccctcaaagatttttttttaattgcgtgaattttccagagttttgtcaaaaagaaaaaagttttttatatcatccatttgaatattgttttggaaccccgcctaaattgaattattttgtttttacaatatttattagattttaatttaaaataaaatcattacaaaaatcaaaatatttttttttcaaaggttgtcatggctgtgatctgtgcctcttccatttcgttagctgccgaagaccccgtcgatgacgacaatccgcgcaacaaaattctgcaatacttcgactattgcttcaccggtgttttcgcctgtgaaatgttgttgaaggcacgaaataatttttaacaattttattaaattttattgccaatttgaatattgtacaaatgtatattccacttaaaaaaagtaggcggacgggaaattttgccaaaaatcggatgaaaaatacattaaaaaggtggagagaggtgattttttaattttcccaccgcatcattttcacgaaattttttttaaaaactgaaaaacttggtattttttttgacttcctttgatgggttttcaatgtaaaatgtgacttttttaaaaaaaatcttggcaatggtaacaaaaattttagctaattaacttaattttattttctgaaattctaattaagtacaaaagctatttttatttgttttttttcaggaaatccggcaaatatttataaatgtatatatttttttgttctttagctgatcgatcagggtgtcattttgcatcgaggctcatactgtcgtgatttttggaatgttttggacggtgttgtggtggcgtgtgcacttgttggcttcgcattttcgtaaattttttaaatacaatttttttttaattaaattttaaaattattttagcggcaccgccggggcaaccggcaaaaatttgagtacaatcaaatcgttgagagtattgcgcgtgttgagaccgttgaagaccatcaaacgtattccaaagctaaaagtagcccctggggaatttttanattaattttaaatttaattttttaaattaatttttaatttttanatttccccattttaggcggtttttgactgtgtggtcaattcattgaaggtattgttattaaaaaaacagccattaatcctttaaattcattattattaagaatgtgttcaacatactcctcgtctattttttgtttcaag

SEQ ID NO: 66677 - DNA, 1906 bp, Heterodera glycines
tgcttttatatgcttaaattttattttaaaattttggtaaaataaattaaccatcccgtcgcctcccctttccccaattacattttttaaattattttttatatatttttaattaaattaattaatttgagcatttttaagtttgcgaaatttggtccgatcactgcttcattcaatgcgttccatcatttcactgctgtttctgttgtttttgttcattgttattttcgcactgctcggcatgcaattgtttggtggaaaattcaattttcaagtaaaaaaaatatataaattatttaatatttgaattttaaatttataaaatctttctaatataaaatatcataatatttatttaaaaaaataaaaatattaaataaaatataataatttttataatatttttttccagaacatgcatccgtacactcattttgacactttcccaatcgctttgattaccgtattccaagtgaaatatttttaaaattattacataattcttaaataaaatttgtcagaatgggtattttctaccgaattttgcattttgatagcttgaaataaaatcttggtccagtgaaataataaatccgggaaatccaggcttttccctggacctcctggattttttggcattacaaaatttttgtgtagattttgaccggtgaagactggaatgaggtgatgtacttggccatcgaatcccagggcggtgtgtacggtggcggaatggtttactgtgtgtactttattgtgctcgtgctgttcggcaattgtaaaaacttattttaattttatttttaatattattatataaccaaaaattggttaatcatgagaattttggtccaaaatattgggtaaagaaaatttaatatgtcgaattatttccaaaatccgttcagttcgaaaatcgaaatgtgatcattttgcaaataattaaaaatttttgcattaatataaaaatatttaaaaaaaaataataacgttaagacactttgctcaacgtgttcttggccattgcggtggataatttagccaatgcgcaagagttaactgctgcagatgaggtcgaatatttcgatgaacccaaaaaattcgccggacgatttttttgacccaaaacttttttcattgttaaaccgaattaagcaatcgctcttatatgtttattattagacctgtcaaaatcctttgccaaaatctcaaaaaagaaattctctgtttctaaaattttttgccctggttttttttacatgacaaaaatgttcatattttacagattaatagaatttatcaagtgcttttgaacaataccaagaatgtttaatttggttgaaaaagaaaaaagttatggcccaaaaaatgtcctgcgacggttcggctggcgataattttatagaaattctttttaatgttattctatttttacctattgttataggcagacgaaaaagccaatggaatgtttgaggacgagtcggaaacattgggtaataaataatgaatgatgagctcatcgattttttcaaattaaaataattaagattatgatgaacatgatttggaggctggtccggatggggaatttaccagggaattggacggtaattttatcaacaacaaaaaaaaatattgttaaggagcagctcgtctctgccttccgctccccccccctcgcatatcgtttcctcccgaaaaatcttaattttatagttttttttttcaaatttatgacgaattaaaaagattttcggggaatgtggagaggaaactgatactggagctggacataataatgcacccaaatttctatattctttttgtccctgattagaagaagagtgtgacgaggaggagagtccatttggtggcccaagccattgtgcatatttcgtcatgt

SEQ ID NO: 66678 - DNA, 935 bp, Heterodera glycines
atggcaccactgcttcaaattgggctgttggttctgtttgcaattgtcatttttgccatcatcggattggtcagtgcgtcagtcatttttaagcctatccctcgtcttactcaagcctatctgctgttctcaccaaaacccacagtctctcgtccctactttatttctttaacttgttaaaaaatgaaaaaaaatatttttttatttattatgtttacttttaaggaattttattctggcatttttcatgccgcctgctacaattctttcggcgaaattgtgaatttctctgaaaagccattcccttggtgctttattattattttttttttataacaaatttaaaatttaataaaattttagctcgaataaatcgtcttcaactggtgcctacaactgcgacgtggtatgatggcgttaggaatgaaattccgacgtctcaaaaaaaaattttaaaatcgaaaagcggaattccgaagccctaaaaatttttaaaacctgaatttcgatctcaaaataatcctttcccgacttgattccaatccgactttttcaaaattccgggctttagtaagaaattcccttttgtttagccgggtgccatttgcttagcccaatggattggaccaaactacggcataacttcctttgacaacattgcatttgccatgatcacggtgttccaatgcattaccatggagggttggacaacaatcatgtattatgtgcgtgattctttcgagatctatttttttaaatataattttaatatttttttttcattaaattatcagacgaatgactcattgggcagcacttacaattgggcttactttatccctctcattgtgcttggctcattttttatgctgaatttggtgcttggtgtactctctggtgaatttgccaaagaaaggcgtgtccaattaatttaa

SEQ ID NO: 66679 - DNA, 731 bp, Heterodera glycines
attcgtcgaatgtcttccacaaagtcttctcacgttgtgttcgaaacttcgatgggcgcaatgtccattgagttgtattggcaacacgcgccgcggacttgcatgaacttccaggaattggccaggaaaggtacggtagtccgaatgtattcatttaaattcctttttagggtattacaacaacacaattttccaccggataattgctgattttatggttcaggtgtcactgttccctgtggttatgttttttatttttgtttgtttagggcggtgatccgacacggacgggtgggcgttttatggcgcggcgggaggcaaagtaaaatccgagttaaggcagaggtggcacgtccatttacggcagtcgatttgcagacgaaatcagtgacgagttgcgacacacgggggccggcattgtgagtggactgttaaaattcgtccatatttcatgccgttaacagatttccatggcgaattcgggtcccaacaccaatggttctcagtttttcattaccctcggcccaactcagcatttggacggaaagcatacaatttttggtcgactagcgacgggcatgaaagtcttgcagaaaattggacaggtgacgacggacaacagcgacaggttatgaccgacaacacgcgaaggcgcaattcgttctctgtttaggccaacgaatgacgtgaaaattgttaaagcttatccacgcagcgaaattttgtccaat

SEQ ID NO: 66680 - DNA, 1224 bp, Heterodera glycines
  unsure (1)..(1224): unsure at all n locations
atgggcccttcgcgtggtcnaaccatcgcgaaaacgagagggattcgcgacggtgccggacgtgcgatgggaggacattggggcattgaacgcagtcagagaagagttgaaatggtcaatattggtgggaatttgagaaatctgttggccaatagagacacttccatttcattcagtaccccatacaaaagcccgaactgttccaacactttggcacttccgcacagccgcaaggcattttgctgagcggaccgcccggttgtgggaagactttgttggcaaaagcggtggccaatgagacgggcatgagttttatcagtgtgaaagggcccgaactgctgagcatggtcagtaaaaaggcaaattgacggcatttcccatttcttttcagtacgttggcgaaagtgaaagggccgtcaggacagtgttccaaagggcgcgtgattcggcgccgtgcgttgttttcttcgatgaaatcgacgcgctgtgcccaaaacggtcgcaaagagaggttattcttttaaaaaaataaaattttgatagatttggcaatcaaattcagaacagtggtagttcacggctggtcaatcaattgctcaccgaaatggacggattggatggacggagaaatgtttttctgatcggagccacaaaccgaccgggtgaataaaaatgggctaacaaattgtaggttttttttgtccttttcagacattgtcgaccccgccatcactcgcccgggtcgtttcgacaaaattctcttcgtcgattttccttcaccctcagaaagggcggacattttgcaaaaggctaccaaagtgagttttttaggattcatttttatggtttctcattcctcagaatggcactcatccgcgcatttctccatctgtccgtttcgatgccttcgcttcaaattcctcccttgattttttcacgtaaattccctaccgtttgctctttcctattcctattgtactattgtgtttcttcctcttaaggggtgccgatctcgtcgctttagtccacgaagcgactctttgtgccctccgagaacgcattgaccaaaatgattcgcgcattgactccgtacaatcgcaccattttgaagaagccctccgtcgaattcgtccgtcagtgagacaatccgatcgagaacattacgacaaattgagggagaagtacgcagcgggaacagaaacaaagccaatggacaacgaatga

SEQ ID NO: 66681 - DNA, 337 bp, Heterodera glycines
atgggagtggcggttacggcagtggcagttacggtgggagaagctacgggagtgggtcatacggtagcagcggttacggcggccgaaattatggaagtggcggttacggcagtagcagttacggtggtagaagctatgggagtgggtcatacggtagcagcagttacgatggtcgaagctatggctagcggaggctatggaggcaggaattttgggaacgttggtttaactgctggcagaggaaccatggctttggtagtggttacggtagtggcggatatggctaattctttgtgcaagatgaaacaaggctttcttagttttagataaaaagcta

SEQ ID NO: 66682 - DNA, 3552 bp, Heterodera glycines
  unsure (1)..(3552): unsure at all n locations
atacaatgtaaaaagcaattttattaacttcttaaaagaacaattcgtttaagatttattgtattatttgaatataatgtagtataatactcattttaaaatcattgtcaattttttttaattaattattttattcatcaatatacacaggtggaaaaaagttttggtacaaagtgttttttgtcgtaactttgtcaaatgtcggctcaatctcaacgattttgctatcaaaaaataacttaacgaatttcagttgacctatttcggcattttttaactaaagttaaaccattttttaaacaaattaaagaattattattttttttattaattataaaaaaatatgaacttaatatgaatatttttataagaaatttaaattttatgtaaaaaaagctaataatgattcctgaaaaaagtccagttccattctttaaatcaaaaaatattaaaaaaaactataataaaattattacgcttaatttttttagtaaaatgaaacgagatataaaaatattagactaaaagttaaaaaaattgaaattgagttagaaaataaaataaacatgaaaacaataaaatgtgatgtaaatacgaacctcattataaaaaaacaaaaatttagaaaattaaatataaaaaagtactgcatgaaaattttcattaataaatcaatttttatataaaattattttgtgattgaaaatttttattatgatgatgaccaatatgcaggtagtagtcccttatagaaaccattatgtgtaacaatttcggttcaattcagtttaaattgaagtatgcatattctttaataaataaataacaaatgtgatgaaattttttattaaattcataatacttagaatatattacggtattctagctagtaaaatcgaattacgcctacgtacttcttttactgctttaaagcaatcaatatgataatataaaattaaacattggaataaattaaagctataaatttaaaaaaaaatcattatttaaaagagaaactgtaagcacgaaaaataaattaataaattgaaatatcaaaaaaagcttgcatcgggcatgagattaatacactgcttggcgagtcacttgaataaaaaaaaataaaagctaataaatataaatgtaatagtgagatatatgaaatataaataaaataatgaaatattaaaatatcactcgaaggaaaacaaaccttaatatcttttaaaatgtttttattctattaaagccaataaattacaaatactaacttaatggaaaatatgtataaaaaagcataagatgaatgaagccgtatcatcaacttgttcaggacacatctgacatcccttggttcaaatatgtcattccgcctaatgcaaaggaatttgacaacagaattagactatttcacaaaaaaatatttgggctctgcaatttacaagaccaaaaaaagacatgtctataaactcttaatgctataaaatgatttcaaaaaatctttaattaagaatttttaaaaagctatggttcatcggcaaccgatttttagtgctaaatcaaataaagggaattttgaaaattggcgaaatttaaagtaaaaaaaaaattgtttcaataagaagacatttgcacgaaatggataaaataaattttaaattgcagattcttattctcgtaagaaaaagaataaacattattttagtataatattttatgaatattttattactaatactttaaaacaaccattgagtcgaaaatattattgataagtcaaatacaaaatggcaaaatagcaaattttgtagtcgacgccatataataatagcggtcatggttagcggtcatggttaacacaaataatagaagattctttttgcaaattatatatatatatatataaaagtaaaattaattattaccagtttaagatgtcacttaatttcagtgaaaaatagagaattattatgtatgaaatataagttatataaattttttttaaatttaagattaaatgcattaaaaatttctattgaatttagggaattgaattttatgagatataataaattataaattttaatttaaattaactattcaaaatttgaaatattcaagtattttgtatgattgcacggtccgcgtatttgggcaacaaccgggtccgggttaaaagcttatactttaaaaaatcaaattctttattatttgtcgaatgtttttattgctatttaaaccacttttttgctgtgcgctttttccaaaaaaattttcataggcaaggtcggtccgatggtgccgataggcgcagccgggaaaaattttgaaaattgcttctgatttgttaacagattttattgaaaaaatgaacaaattttgtaataacttttttttacgtaaagaaatctccagataacagttgtggaagattggtatgaggcaattataaatggaaaaaatgttgactgtatttatattgactttcaaaaagcatttgactcagtgccccatgaattactttcatacaaattggaaaaaattggtataaggggcaaacttttgatgtggataaaggactttttgagtaataggacttttcgtgttaaaattggggatgatttatcctccagtaaaaagttggttctggcgtcccccagggatctgtcctgggccctttattatttttgatctatattaacgatcttcctgatgctttgccatcagaagtgagaattaaattatatgctgatgatgttaaattgtatatttgttataaagcgagagctgacacagaaattatgcataaagcattgcataatttatccgaatgggcaaataaatggcaaatcagaatctcaattaaaaaaacttttgtacttcatttggggaataaaaaccccaaagaaatatataaaattgatggaaatataataaatgttgcggatacaattagggatttaggcataaatattgataataaattgcaattttccaatcatgtcacacaaataacaaagaacgcatatttacgtatgcgttctttatttcgggttattaaatcaaaatcttctaggatttggattattttgtacaaaacttatgttagaccgttattggaatatgctcctgaggtttggaatccatctcttctaaaaaatattaaaaaaattgaaaaatgtcaaaaatatttcaccaaaagagttctttttaaatgtagccttccacccattccataccaaaatagattagaataccttcaactaccaacacttgaaagcaggcgaaagctgtctgatctgttcatggctcataaaataatttatggccgaacagatcttaatccctttgaaatattcaaaccttctgaacgctttaacattcccttttatagacttaactcgaaatataaattaggcaaaaaatttataccttttgcggngcgggtaactaaaatttggaaccaactcgataaaaagctcattgaaataaactcattannatcatttaaaaataanactanaactatttcattccctgtaaatagnaccggaa

SEQ ID NO: 66683 - DNA, 888 bp, Heterodera glycines
atgttttttatttatttattgattgagaacaaaatccaattcaattctgtagatttaagtgttgataatttgtttttgtatgtatgatacatcattcaaactttgcgtaatcattttttaatgcacaaattcgaattgcaaatttttagttattctagaataaagtttttgtctattttagagattccgacatagttttatcgctattgctgtacttatttttcatttattccctttcagcctaatcttccatttccaataacatacaaattagccactttcaattccctcgcccttcttttcttgtctcgcaccaaaattttgagattgaacttatcgtcaagaagccttaaatattatttattttatcttttgttgttttttaaatcatcgacctttgtgttcgacatatttgagattgaagctatcttcattcaccattaaaccctatttataatttatttattttttgttgatttttaaaatatttcagcttttaaaaatttaaagagccgattacttttaaaactgatgaaagttttcatattttcgttttattaatagtgcttttttcggtatcttcttgctccaaactttcggttgttacggcatggcacatctcaatatatttcttttaatcaaaagatgtatattttttgcttgaaatatctttattttatttattttaaatcattttaatttatataaaatgccatatatttgtattatattcctttttatttgttatccattatattatattcctttttattttttataagtccacaagataaatgccattcacgaaaagcttaaaaattgccgtttataaacgaattgtgtttagtaaattaaaataattcgcatgaattctctattttgaaatga

SEQ ID NO: 66684 - DNA, 104 bp, Heterodera glycines
cccaatgcggccgggatcacaacgcgacgacgttcgccctcgcacattgaggtcatggcacggtccattccggcgatcacttcgccgtggtggagacggaaaat

SEQ ID NO: 66685 - DNA, 804 bp, Heterodera glycines
atgaaatttgcaaagaaaatgttaatgattcccgaggcggaatatttggctctacggagtgcgatgaatagtggtgattatctccaaaatgaaaaagcgagtttagacgcaaaaatttctcagaatttacaagaccccggcataagcgaggacctcaaggcgaagagacatgattggctctataaagaaagacgtacggtaaaggggatacttgaaaatagaccacagaaggtagtgattgagaatcatgtacccggtccgaacgttgcaccatatctgggcctcaataaccaatccaaactacaggagaccgatgaaccccggaaaataattattcctaagaaaagacttgaagagcaaactcctgatccggaatcggataatgatacaataaatgagttaactccggagccccaaacaacatccacattaaaaacacccattccgatcaaaactattatacacccgacccttttaaacggtctttttaggtacgtaaaggaaaacaaagatttatttaaaattacggcggccggaaaggtacagtcgaacatgaatttgccgattgaaaacagtaattatagagatgttttgttgtatctcgcagggaagaaagatgaaacgccgcgcggtgcaaaatttctcaaagatcggttactgaaggatccaacagtaaaagacatggttgataaatcaaaggtcatgtggggacgtggaaggaaaaaggcaataaaatctataaaaacacccggcatagtgcgagagaagaaacccttcaaaccactaatatgggcaagactgtag

SEQ ID NO: 66686 - DNA, 943 bp, Heterodera glycines
atgtgcttcggaggcaaaggcaccagtcaagactacccttcattcatggccaaaatccgatggcccatggaagcgagttcacatggactatgcgggaacattctttggaaagatgtttctcgtcattgtagacgcatattccaagtggcccgaaatattcgagatgaattccaccggttcgagccgctacgattggtaaattgcgctatctttgcgcacggcatggattgcctgaaacgttggtcacaaataacggtacccaattttcgtcgaaagaattcaaggaattcacccgactcaacggcataaaccatttgttttcggcaccttattgtccgatgtcaaactgacaagccgaacggttcgttgacacattcaagggtggttgtgtgaaaattaaacaatcgatttctgtattccaattaattccgagaaatttttggagagggccaattagtcgtttggcctctgggagctgggaaatggcttcgacggaattagaacaaaattctctaagtggcatggaagccttttcaaaaagcttaattgattttaaacatttctcgtttgcctctgatgggttgtttgacgaaaggaacacattatcaacataaatgttatttttgatttcatttgaaaggggggatggattttgagacagatggtgctgaatagtagccgcaaggaggaagggggatggacttaacccaaatgagactcgagtaaaacggaaaattttaagattagacaaggaaaggggggtttcaatgttttcatggttcacctggtcttgttcaaaagcgccacgttcgtttcgctgatgaagtggatcaaaacggtgccattgctcgagaccaacaacaaatcgccgatgtcgccgacaaacaaatcgaagttcgacgttcagaacgtcaacggcgtccaacaaagaaattggatttag

SEQ ID NO: 66687 - DNA, 318 bp, Heterodera glycines
atggaccccaaaaatggccaactgtcacgcgcaatgcgaaaccgagcggtggaattggcatttggcatggacacagtttcagttactgctgctgcttctgctattaaaccgcccgtttggagtgccaatgccgtggatgttgtcagtgctgtgccattattaccacgggcggaactcctttcatcatcattgaattcaattgccactcccattgtgccggcttcgtcaaaacaattgcagcttgtttcgcagctgcaacacaaattggatgggtaaataaatctgacaaaacattgaatcattctgtcaaaattttga

SEQ ID NO: 66688 - DNA, 986 bp, Heterodera glycines
atgaatttaattttatgggatttaattaatattttttgtttgcttaacaataaattctttaaaggacaactaaagtgagtaaaaccgacaatctgatcagaaattgaattataaaaaaggataaaaatttggccattgtctattatgaaaccaaaatcataaagaataacagaaacatcaggtaagtattgatgttggatttttaaagatatgcaaaggctggttgaggttgaccacatcctatggattggggcttttcagtgtttgctttgttccagaggaaatgaaaattttattaaaattccgaggaaaattgaattttttataaatttactttcattctaaaaaattcctttctaatatgtagagaggagagtaggaatctaagaaattgtggacaaatttaaaaagctgaaagtcggcctttggtattggaagccgatgctgatttgaatttgatatcattaggcatttacagtaccatttcgattggaatttggacaaaatccgacgacaccttttacaaatattcaaacaatggcttcattttcggacacagtgccactggcttgggcggatatccctcctttgcagagggcgacacaatcggatgcggcgccaatttaacatcgatggaaatcatttacaccaaaaatggacaaaaattgagtgagaaatattaatttatcatgaaattaagcagatgaagactatttttagacacctcaaatttattcgtttttgacaacgaattgcttccatttgtacaagttaatacgcttggtgatgtgattgaagcggatttcggacctgtctttgagtacaaaaatgtttcggatttgttcgctacacaaattgcctaatttaacagagaagagaaaacttacaaaattaatttttgcttttgtttttaattgtatatacatttaatttactttattttacacgcattttaaaatttatatattgtttctgcataaaataaa

SEQ ID NO: 66689 - DNA, 1339 bp, Heterodera glycines
atgaatttttggcattttgcaattgttttgcttcatttatgtatgcaaatgttgtcagaacccactgctgaagtgcaggagaatggtatgttttttttgttcaatttttaattatatttttcagtgaaaaatattcgcgtcgaaattaatgatttacgcgagaacatttcacgacttttcaccaaatttgtaagtttttctaaaatatgccaaattagcagtcaaattacagacaaaaattgaattggaacagaaacaaattgaagaagcattgaatgaccaattattggttactcaagaacaaaaatcggcagttgtgagtcgccgacaaacttttaaataaaaacattttgatttaaaagtaatatttaattataaataaatgatgatgacatattgcgtatggcttattaagaaaccaaaaataaattttttagaacgaaacacgagaaacggagcaattgaagacattggaatttaaagttagatttgaagaaaatatttattattattattattattttttactttaagccgaaaaaccaatggagtgtcaacaaatctgatagcgaattgttcattttcaagcccaaacacttgaaagccattcatcgtggaaaagaaataggtaaaagaaattaattatttatttattttttattactatggcacataatataaaaatatactaatgctaataatgtaactttttcattgcttaggctaaaattgcacaaattctttgtataataaaactaaaaatagaagattctttgatactttaacattgagaaagttttttgaaaatttttgcataatttgttgccttttcaattaattaagtcattttgccttaaactttttttaaatttcattaaacactttttaacaaattcattccaccttttatgccttttgatttggcatttttaagcggcatattttaagggcggcgccgggaattaattgcggaatctgtgcttctcccatattttgaagttgtgtattatgagacgaaaattataagaaagcaactaaatattgaaggaagctcgtaagtaatcgaaggaatcaaataacaattttatttaattttaatcgttttaaaataaatttaaaattttaatgatttataaaaacttttaagatcgatcggaattggactttttggaaaaagcctttacatgtatggggacaatggcttcatttttgggcacaatgtgaatggcttctggggatatccctcgtttgaagagggcgacacaatcggatgtggggccaatttaacatcgatggaaatcatttacaccaaaaatgggcagaaattgagtgagtaaaa

SEQ ID NO: 66690 - DNA, 691 bp, Heterodera glycines
gctggaaacagcttgttaaaatgcacataaaacaattttgtgccttggtttgaaacttctatgacccatttcgatatgcatattttgtatatctgtatatattcacgtctttttgtgattatttttatgatattggagctctttttaaaaaacgaccattaaaactagcaccttaattatattggaccttttgactcataaggacagaaattttcataaatcaattagaaaaatatttggcattttaataataatataattataaatctttataaaaattggcaattacgacaaaatataagatcaaaaagaaattttctatttttagttgttttcttagaatttataaatttttagcgttttccctttagataggcatatcttagctattttcgagagttgtagcttaaatttaaaggacttgaagaaattttgagaaattaacctcaatttggtaaaatttatgtgcgcatttcttcggttttatgagcacagaattaaaagccgtcaaatgagattatggggcgaattttaaggcaaaaattttaaggaatgtcagattaattcgagaaatccggatttaaatagcgcgggaaaggcaattcattctcaagattttcaatctaatttcatattgaaatcattcaaaataaagcaccttttgaggtaattaaacaaattatatatgaaa

SEQ ID NO: 66691 - DNA, 141 bp, Heterodera glycines
atgcccccgtccgctgatgggcacaggtcgttcgagatgacttgtggacgctgcccaacattacggggcagctgcctcacgagccatgcttttggggtgcttccatacgttggagctgtggtataccgctcagtgctgcac

SEQ ID NO: 66692 - DNA, 160 bp, Heterodera glycines; identical to SEQ ID NO: 55175

SEQ ID NO: 66693 - DNA, 307 bp, Heterodera glycines
tgctctttctattgtcgttccgttgatttcttactctgttcttccatttaccaagtagcacacttttatttttctgcccttattttatatttagcaatccttcaacgaattccgactgcttgcgatggcaatgttttgctacggtttggcattgaaataggcatgccataaatcggtcaaaggaagtgatggagcggatagcgcgctcctttcactctgtgccgctgagttgacgacactgctcagaacgaatttgcacgcggactctcagttggaggcggaaatgcacgaatgcgacaggaacatg

SEQ ID NO: 66694 - DNA, 145 bp, Heterodera glycines
ccggcgcaaaagaggagtgcgtgcacatgctaaatgcagaaggccgatggaacgacgcgcgctgcgaaattcaaatgacaggcgcgatttgcaaaaaatcaaatttttaaatacaattgatggacgaattttaatgggcataagc

SEQ ID NO: 66695 - DNA, 453 bp, Heterodera glycines
atggccaacgtggccaatgactatctgatgcggcgttatccgagtgagaagcccaacaaacaaggaaacgtaaaataaaataattattcaggccgacggaaggcgtgcagagaccctttggcattgccatgcgttgggtcgccttactcggcactgaacgaattgaatttcgacgagaaatgatcagagcacaatcaatggatgtcttctgtcccccccccccctctttggtcccctttttcattcatttccaattgtgtcccaaataccctcgcgtccattcaattcatacgcatggccccgcctcccattgtccctcccgccttcctattgttcaaaattgggttgatgggggggggggggcgtcagtgatcgaagtcgtcgataagcgaagggcccttcactgtgttctttctctgccattactcgcgccgcgcatttttcaaaaataaa

SEQ ID NO: 66696 - DNA, 91 bp, Heterodera glycines
atgcccctttccgagtgccaaaaacaccaaaagaacgaagggagcaaaggagttgacaaagaagacaaatatgttaataatatcattttgg

SEQ ID NO: 66697 - DNA, 665 bp, Heterodera glycines
  unsure (1)..(665): unsure at all n locations
cttaaacgtttcaacaaatatttttctgtcacaatttttgctcaaattctgccaaatacaaacaagcgctttcatgaattcgattatggtaaacgattcgctattattgaacaacttcatttgggacaaaattagtcaacaaaatgagaccaaaataatgacaccatacactgaggtaattaaaaaataattactttttctcaatattattttatttaaaatgaaagaaataaaaattaaggtttttcctattttaatattatattccatgtttaattcacaaataccatttatttcgaaagaagggcccccgggggctttatttttaagcccccctcaaaggggatgctttatttctgggcaggttctaatttggggggggggctgtattttagaaaaaaggtaataggaaaattatttgaaattttattcaaaaattatgagcgagttcagatgaacttaaaattttaagctattccattcttaataatataaaagaaattaaatataaaataaactttaatattataatttatattttattttctcagtttttattcgacttggattctaaccgtttcaacggctttttaattgttataacaaacaaaatgcatatcactnggcgagtcgtgccacctgtttnggcatctattctcacttga

SEQ ID NO: 66698 - DNA, 362 bp, Heterodera glycines
gttcgggccgatggtcagactgctgatcctttctctcttgttttctcctgcgcagcagctgagcaaaaagggctcaattctaacacttcaagcacagtgcctcgtgctcaaaatgctgctgctgcatcacggccgaccgatccacggccaaatgcaatccaaactgtacatgctgcatctgctgctgctgttggaggtggcgactttttaattcctctttatattcttcttaaaataaaataaaaaataacccaaaaaaatggaaaaaaataacctttttaacaatgggatttttgttcgactttcggttgggaactcaaagaaggagtcaaggcttttcagtttatttatttccaaattaa

SEQ ID NO: 66699 - DNA, 122 bp, Heterodera glycines; identical to SEQ ID NO: 59085

SEQ ID NO: 66700 - DNA, 783 bp, Heterodera glycines
atgtcttccgttgaggacgaggaggacagtggcaccaacgcgggtgacgacggttggatggtggtgaagaaggagtcgttcaagaagttgtgcgacttctacgagaagcgtcgtcgcgtggagtgcggcggtggcaccgtcgccgctgacccattcgcggaacaattggaacgcgaatttcgcgaggcaacgatggctgacaacaacagcaacaaccgcaccgatgaacgcgtggatgagaaattgacggcggagagtggtgagttgggggagggggataattttcgaagattttttaacttctaagttaggaaatttttaaaaattgggggattatgaaaagttcaatttggtctactaaaataactgaatttacggtttataataaatttattagtccaataattgagtctcttgtttaaaacttaaaagatattcacaattttagccgaatatgctcgaactttctacatgacaaaaccatttacaattagtgttttatttccctcaaatgcttcattttgattgctgtatttatttgtagaaccgaaaaaggcagacgaattcgtgaaggaagttggacaagaaccggctgccgaggtttatgtggcacaaattgtggatttgaccaccgaaaaagatggaaagtcagaaaaatcggagaaggtggtacataattcttcagtaaaagagggaaaaggaacattttttaagaccactccctgtgtccattcggttgtgatgcgcggcgtatgtgccggatgtggacaggattttcgtcag

SEQ ID NO: 66701 - DNA, 3418 bp, Heterodera glycines
atgagtgagctcttgcgcatctccattgcaccaatggtggtgcgtctcaagatgtacattgagacagcccaagaaaacttgggcaaagagctggcggaccaaagtgtccgtgcagatctaatcgcggagagacaaaatctctgcaaaacaatttctcttttggagaaatacaatggaaaatgggaagccatttttctgagagtgaagggacaagctcttcaagatgaagagcaaaattacagagactttaagcctgaagggaaggctttcatgcattgggttgaccaagcccgagggcttgtcgacactattgaaggggctttaggcctctcagagctgggggatgcaattccccagccaaaccaaccagcacaagttgtgcagcagccacaacttgtgcatcagcgtcatgatgtgacgcttccgccgataacattgcccaaattctcgggggaaccccgagaatggcctttgttttggaagctatttgagacttccgttgaaagtcttcaaattgaagacttcaagaagcacatttatttgctgggatgcctcccagagaagtcagttgctaggagagcaattgacttatacccaccgtcagatgaaaattatccaagggtagttgaaattctgaaaaagcggtttggggatgaaaaaacgatggtggagtccctccaagcggagttactccaccttcccaaaccagcagaatccgttcagtctctgagacaattctcagagtccattgaacggatttgccatcagttgttggactatggagaaaatgaacaaaataagttcatggcctccactattaagtccaaactgccttatcaccttctcacccaagtggtggagaaggaaatgagggcaggaggtgcctttaattgcacagagctccgaagagctatcacttcaatcgttgaagtgaaagaagaagtacagagatgtactcaggtttttcgaggtgaggaaaaaccccggaattttcccccacattcaaatgggggaagagctaaccaagggagaggaacaccgttccgtttctcccagccgttccggcaagaatggcagtggaggccaatggaacgaaacgaaccggtgaggaggatgtctcctcaaccgaatcgttccttctcggccattaacaaatctcaaacccctatttcagatagggggtcaaatcgcttatgctccctttgtgaagcaaaggggcatgcaccgagtcggtgcacgaaatacaccactccgggggctcgaaggaagcgcctcgcggaccaagacaggtgtattaattgcctcattatggggcataattctctgaactgcacctcaccccgcaggtgcagtcaatgtggtgaaagacaccactttatggtgtgttatggaggagaaaaacaatggaatattcctccgcaagtgcagaggaataatttccatgggatggggacagagtcccctcccaatcagtttatccagggtcacgagagacccgacaacagaaatgattctgtggggatgatgtctccccaagtaaacagatcatttctgacattgacaagtccccaattttctcaaagaaaaatagggacagggacaagacaaacttgttccctttgttgtgctatgggacatcctccaagtcgatgtccccaatattccacaccaggagcacgcagaaggcggctcgcaaaacagcgaaaatgttttaattgccttatgaaagatcataaggcacaacaatgccaatctccaaagagatgcttgaagtgtggtggaaagcaccactatatgatctgttatcatggagatgctccaattgggagcactccgcaacagataagggaaggaaggactgttcagaagaaacagtcctccaaacaaagaggagagtttcctcgttctaaaaccctttactcaggcgtatcctctagagtagaggataaaccgtctgaaagtattgctttcgactgcagctcaaccagtgggttgaaaaatgtgacaaataaatcacattcatttttttgtcgtgccatggtcatgccaaagcacgaccaccaaaaaatgatcgaaaagtcagttcttttcgatcaaccgagtcagatttcataccaatctgactctcatttcggtgagcagaagacaccgaaagtaactcccacagataagaaaatctgtggctgttgcataaaaaagaatggcgttgtgagccattcagttttttccattcgtattaatcgaatggacaataaatgggaagaaactcttcctaatcgaacagagcaatcaatcatagcattgacgctttgtttttacatcagcataagcctgatggttctctcaattttaaaagccctttctattgggcgtaaaaccattgcttggctaatgatccaactcaaagtatcattactttgttttgaggatcagagcacgccttgctttcaagaaggaaggcaaagaggggcaatccctcaattttgtacagcgcgccatattttgcaaataatggcgtttactgtaattttagcatgtttgttccctcttcccgttaaggggggaacagaaacaaatgcttatccaaccaatcactgcaatgaatgcaaacttctttgctttaacaaaggcgttaaagcaaagattccaaaagaaatcaataaagttgagctctgctgtgcagagaactgttacattcatgagaatgtaaagcagctcacttacgagctaccaaaggaaatcctcctaaatgacttccaatgtgaaggtcatttttggatggattcgaaacacatgttcaaaaaggacatgttatgtccagcagttgatgagtgcgaactcatcgaatgctatttttgcattgaacagttagcgaatccaacctgttacccattgatttcatcaatgttagcagggggactttgcttatcactcataagcattagctttatggccttttccatattaaaagtcctgttttcaggattttatatggtcatttggctgataattcaatttatcaggccaataatttacttagctggcccaaatcggcttccgaaagagaggaggccaagggcaacagcttctcaaaattggacatcacgccgtgtttacagaacaatggcgtttgttgtccttatggctaactctctccaggatttgactggagcagagaccatagcagtcatggccaaatcggaaaaatgcattaaaaatgcgacaagcatgagatgcattgtcgaaaactcagcaatgctgacgttgctgccagttggccaaacaaacacacttcttctgaaaacagatgaaggtgttatccttggctcaataaacgttgtgcttaaggctttagctttggaatgccaaagcttcactaaagcctggcaacgttcatacgcaattaatgtattggccg

SEQ ID NO: 66702 - DNA, 377 bp, Heterodera glycines
gtaacagccagatatgttcaacggcaaaatggtgcaaaggctttggtgaagttccaaagccatttgaagaccttcgatttgaaggtttaattggacaggactgaatcctgtcaaggcaattacttttctcccagtatttctgagttggtaatttttgatgtttaatggaagtctcctctctggactttccattaacttttcaaggttatgtgaacggcaattgcagttcactaaacctgatgaatggtcaggtatgcaatcagtgcatgcctgaactccaagactgcaattgaaatcaattgcttcttgccgatttttacagttgaagtcaattgtaaagggctctcgggtcagagccatattgctcccgtcaaaaa

SEQ ID NO: 66703 - DNA, 1063 bp, Heterodera glycines
actttcaaatcatccttccacggaatgcctattcccatacgagaagggccttatttctcggctcgccgggtggtcatacccgaaaatgccgaggtcttcaatgatcgcctttacggacttggcgatccacgatttgaagaggaggagagagttcctcgctggcaggaacctcctattcctcgccaaattgagtcattgagctcatggattgagcggtcttatggaccgcattggtatgaaacagcacgggagcgccgtgctgtcgaagcccgccttcgcggagaacttcgcgaaggagccacgctacttggcgaacattttggcagaattgccgagatccattttgatggattcacctgttatggtccggagggtctcttcatctctccgggcataacacttttcgatcattttgtacggttgggtcttcaagtagacccagtaaaaccgtgcatacaagaatatgtagggtttagccctcgcgagcaagggatgcttgtcgacatttatccgatcgaactggtcaacatccgaaccagaatcggagttgcttggagagcgccagcagttttggaggaacctcaccctcctctacgtgaccaccagttaccagatggacgactggagaatcgtcctccgagggtggctcgtcgacttccaaaccgatgatgaaaagaattttggcaaagagacggcaacagatgtcgccatccttgaggcccggagtatgtcgccaaagcgacacaaatttctttgaaatttcttttatttttgatccttttcgtcgatcaattttctcccttcgctcgctcctttaattatgactcatcttttcttttctccatattttcgctatgagtcatcatttttgagggaattttttccctttgcttgtgcacatttcttcacgtgcctggccccgcccccatcgattgtgagggtataaaagcccggcccattctccattttcttcactctgatcactttttgattaagtcagtcgtgacagttttctgtccaagcatttgcattaaattgtaattgtgcaattgaattgaataaa

SEQ ID NO: 66704 - DNA, 106 bp, Heterodera glycines
gtgtccgtttggggtactcaaacaattatggggagcaaaaatccaacgcagaattaaagtacaggctatagggaagctactcccgaaggattcggtctccccataa

SEQ ID NO: 66705 - DNA, 119 bp, Heterodera glycines
ccaacgcagaattaaagtacaggctatagggaagctattcccgaaggattcggtctccccataaatctgggcgcatcggttcagggggactgccccgaaaacaaaaaaatcaatttttt

SEQ ID NO: 66706 - DNA, 417 bp, Heterodera glycines
gacactctgaatgcgttgggtttgttgttgactgggcttccttcctccttccaagccttcttcttggatcgaattgaggagtccttcgaatggtcccaaatcgcctctgccgacgctgacccttcgcaattgttcgagtcgcttagccacgaagtttacctccactcggacagtcgcattctctcgatgctggccctaatccattcattttgtcaacatggcggcaatgttcggaaacaaacaaaatgttttgaaatcaaatcattttagaattcgctttcgattattcccgatttcgtgatcaaccgacttgctcacaaagtggacaatgaggcacagctggtgtatttccttcgcattgtggtgccgtatttgcagagaattcacgaaaaggagcggaacaaacacatgcccgag

SEQ ID NO: 66707 - DNA, 209 bp, Heterodera glycines
tgcaaatgccccattcgccgctgaacagaagggacagcaaaccccagtttggaggctagcaggccaacgtacagcaacaaacgggtgaatgcagtccagatacgccagctctgtccgtttccacctcatcggtttcacgtcctctttaactctctcttcaaagtgctttgcaactttccctcacggtacttgttcgctatcggactcgt

SEQ ID NO: 66708 - DNA, 153 bp, Heterodera glycines
atgggcagggatcgacctgaattcgacacaccagggaaacttggacggatgaccgaccgttgggggaagggaaatgtcggaaaaagcgaaggacaaaaggacgacgtatccctcgccattctcacaaaacaactcattcattctgctgaatac

SEQ ID NO: 66709 - DNA, 335 bp, Heterodera glycines
tggacacacttcaaacaatggtccattacctctgctcttctatcaaattgtcaggaagccgacctcattgccctcgccggtgtatatcgccgatgaatatgtgagtcaattcaaataacaataaaaatatagaccgagaatcgaaatcatttaggcgaaacgcggtcgaaacatctactcacactacgccaagaacggtattgacaacagcaaaaatttgcagctcttcgcaaagaacaaaggggtggaatggccgctgcgcacttatgcggacatgaccaaagtcctttcttttcctcaacaccacctacctgagggagctgcgcatcaacgcc

SEQ ID NO: 66710 - DNA, 94 bp, Heterodera glycines
gtcttgttggcggctttgttctgtctctgcttgcccagtggaccgctccgacaatgggcagcacatcgatcggactgcttttcagtctctcgag

SEQ ID NO: 66711 - DNA, 799 bp, Heterodera glycines
atggtggaaaattttaagactttgccgattttgtcggttttccgtggagattgtgagagaaacaaccccctcattttgacgtgctatttctaaacaaaatttcttactgattttctttaaattttgcatattgattgattgagaaagaaaaaattttagcacgattttgattggcaaaaagcttcgaaaaattttctgaaaaccgtccacttgttacttttttggcataaaaaatcaaataataaaattaattactacttttttgacggagtctaaaattgaatcggtgtataaaaaagtatggcaacgtctctggtaaattgggtcgttgatcagtctgtttgttactcattgatcagtcagacaaattgaccaaaaaaacggtcaaagctggaattttttcttttcaaaattaagaataatttaaaaattgagattagaactcttaattttttcagtaattattctctgtgacgtcactgatcagaaagtgatcaatcgttctgatcaaatcttctacgaatggatgatgttaaactgaccggataaacagaagtcgttctcctggcacacctttataaagagaaaaggctttgttggcaaattgatgaccttttttgatgccaattaaatttttaaaaaccaaccaattcattgatcagtcgaggaaagtaatcctcgggcagttgtcgccatgtcttcaaaaaatttattaagtttaacaacatttttcaagaaatgaatgatgatgaatgaatgaatgaattgtcaagaatcggtgccgagtttcgagaataaa

SEQ ID NO: 66712 - DNA, 76 bp, Heterodera glycines
acctcttctaatcactgttgtacctcttctgatcactgttgtacctcttctgatcactgttgtacctcttctaatc

SEQ ID NO: 66713 - DNA, 909 bp, Heterodera glycines
atgtcttcagctcgatgccggatggctttggggcccgcgctgttccgacttcggcaacatgtcactacggccgaaaatttgctggacgagcccatgatcaatgccgagacgaccgaaaaccttgaacaggaacgggggcacatcacccgtatcctgtcaaggatggaggtcgagctggacgcgtggggtgccatcatgaacggactgcaaggccctgcgagagaggcggaggaagcgtttttcactgcctttattcgagatgaccggcacttgacggagtggttggaagatgcgcgagaaatgctggctcacatagcagcagaactcgcagatgagcccaaccagccaatcgcggcgggaggacagcaaccagctgttgctgtgaatccacccgtgccagccgtgccattcgtcaacaatgccgcatttctcggcggtgccaatgttcaacagccagctgctgttgccaaccatgccaatcagccaccattggtgccaattaatgcccaaatcgtgccaaacttgccggctgttgctgcgcctgcgcctttagccactgctcggctgccgcagctcagtcttcctgttttttcgggcgaaccaatggaatggcccgcgttttggcagagtttcgagagtgccgtcgaccgtgccgcccttgagcccgtcgacaagctcaactatctccacggttgcttacgcggaaaggctgctcgtgccgtaaccgcctaccgtggaggggacaattatgcccatgccgttgccgcactcaggcgactcttcggagatccacggaaaattgccgaagcacttcagtccgaactgatcaatctccggcctgtggacgatagcgttggatcactgcaacacttactcgagactttggagcgtgtgtgccgccaactttga

SEQ ID NO: 66714 - DNA, 560 bp, Heterodera glycines
atgcccatcggcatcaccgctctgctgcccaccgtactgttccccgccctgggcatactgtcggcccgtgccgttgcccatgagtttttaaatgtatgtgcgtgcgttagttactgtaaacccctcacagaaccagaggcactagagacggatcgggggaccccgagatagggtctcttccaaatcccgatcgatcatgaagattttggaaaacgatcgggacggatctcgagtcgaggtctgtcaaaatttcccggtcaatcctgaaaattttgaaaaaaatcgggacgggtcccgagtcggtatccgtccaaacccccatcccgagcaatcccaatgaattaaaaaaaggctcgggacggatcccgaggtaggcaaatcctgcaggataaagcagatcccgtccggtctctatcaggcacacacattaaagtacattttgggtgtgggtctttttggtcattaaaatgcttttcaggacaccaactttctgttcatcggcggcctcgttgttgcggccgctgtggagaagtgcgggttgcatgaacgcgtggcactca

SEQ ID NO: 66715 - DNA, 212 bp, Heterodera glycines
  unsure (1)..(212): unsure at all n locations
acaaaaaaatcgattttttcaagtgtccgntttggggtactcaaacaattatgggggagcaaaaatccaacgcagaattaaagtacaggctatagggaagctattccggaaggattcggtctccccataaatctgggcgcatcggttcggggggactgccccgaaaacaaaaaaatcgattttttcaagtgtccgtttggggtactcaaaca

SEQ ID NO: 66716 - DNA, 798 bp, Heterodera glycines
atgaagattggaaaacgttttatatacaaattaaaattcaaggaagagattgtgcgtgtgctgatcgagaatggcacaacactggtgatcaagccaaacggtgccgagggcactgactcggctggcgctgtccgtgctgaacttggccaacagttggcgtccggctggcaccacgtggcgctgcatcgcgacgcacaaacgctgcgcgcaatggttgacgacacgcatgaggagacgctggcggcaccaattgaagacgcgtcggatttgttggtcagtattttgtgtagttttctcgggattttaactttttaaattcggattcgggaattggcttcgagactgaaaatttgctatgaaacagaaagtctccggactttctaatctaaattaatcaagttcatagttttttttttattaaatttgatcgagccttagcttgaaaatgtaagaaaagtttcctaaaaatatattttttttggcaaatttttttgaataaagttagttcttggttctttataaaactttaaaaaaaacgctatattctcttcttagaaacaaaatttttaagatttttttttaaatttcgaacttacaattagaaattaaaacaaaagatttctgggaggaaatggcaattaaataaattatgaaaaataaaaaccaacaataatacaatcaatcacaatgtcatcatctccaaattttaacaaaatcatgatcaggaaattcatatcttttcagctgttcactttttcatcgtcgcgtcaacttaattaatattcaagttaaattaaa

SEQ ID NO: 66717 - DNA, 382 bp, Heterodera glycines
atggattcgcccaaatgccaaactttgaattttgcccggccgtttttcccaaataattttgtgcttttggaggtggaaaagtcggtggctgatgctttttcttcgtccaatatgatcactgatcaatttaatcacgaaaggtccattttgtgatacgattggtctttttcgtttctgtattagatcgatcggagcccttgtttggtctataatttggattttgaaaagcacttccattttcagtctttcgcttacaatccgtggccattgctctgaccctttggtcgtgtgcacttcgtcccgaacattcggcgcaaaggacgtcgaagtgtccaacactttgctgttgctcgacgggacgccaaacagcgccggagcaaat

SEQ ID NO: 66718 - DNA, 224 bp, Heterodera glycines
atgacattttacgcgtcccatcacattttacgagtcccaacaacactttacgcgtcccatcacattttacgagtcccaacaacactttacgcgtcccatcacattttacgcgtcccaacaacactttacgcgtcccatgacattttgtgtccatggcggggatggcattccgaggccccaaaaattttcggaaatcggaattccgtgccatccctggtctcatg

SEQ ID NO: 66719 - DNA, 350 bp, Heterodera glycines
gtggtataagaggcggtcgtggacgtgttggcggctttggcgtgagcggaggtggttttcgttggcgcggtgctgctggcgggcgcggagttggaggtgttggcggacgcggaggtgttggcggacgcggaggtggtggtggacacggaggtggtgctggtcagggatggcacggaattccgagttccgacttccgacatttttggggtcggaattccgacttccgacttccgaaaatttttggggcctcggaattccgacttccgacttccgaaatttttgatgaaaagtcggaatttttttgagttttttttttcaaaaaattagcaatttttgtacaatttatgtta

SEQ ID NO: 66720 - DNA, 3561 bp, Heterodera glycines
atggatacggatgtgaatgccaaccaggaagtgccacccattcaaacagaggaagagtttgaaaatgtggaagaaatggacgaatcacaaaattcggttttaaaatatttggtatgccaaacggacgcgaaaagcgtagttggaggcaaattgagtggtcagggccctttctttatgggcatcccggatgaaattgtaagcgctaaaaggcgtttgcaaatgggtgatgttgtgatggtaagtcaatgggtatggaaagtcggttttgaaaggttgtcgtacgacataaaccccgttgatgaaacacgtccatggtacgtacaaggccgaatcaatgtccaagcaatcgcacaaaatatttctgatgtgagtttcgttacaggtacgttttgcccagggatagtcactgacttaaaaaggtataagggcggagactttcggtcggcggtcgtaatggcatcccaaatgctaagaccacagacaatttatgcccgtcatttgaccgaaatgagtcctggaagggtaactttgaatcaggtgctttatctgcagttggcatccattacgagtcctcaagaatggtggatgggtgagaattatttattgccccatccaacgccttacatgaaaggagatgagattaaggcccatgcaaaccacgtggttattggtgccaaagattgtaatgattctttctgctttcccttggatacattttcagaaagattgatgggagcagcagcagcggtacaaaggacccacgaaatggtaaaattggccaagcaagctgtgactgttcaattggtctgggacagaccacaagtcagggatgaggaagttcagagaaatttgaaaaaggcgcaacttctctcttttgattggaccttaacaaacaaatcttcagtcgcagactttttagaagcatgggaggaagatacgccggtgaatgcaaaaattgccaatgacaccaaggcccattggtgcgctcatggacacgtcatttcggcatcggcaagtgaaataaacccgggaattttcacaataaaggtgaaattaattttgagttttcaggcaaaaaagggttatgaaaaggcctgggaggactgggaaaatattttggacgagatggagtcttatttggtcttggtaccgaattatggcggattaacatttagagaaatgtgcttcgaaaaaacgattttgtccgatattgcgcagggtaatgcccccgtctctcatattttaagggttttaatgggaaaaggaacggacgaaacgagaacagccgtcaggctgacagaaaaggttggaaaattgaacgaagagcaacggattgctcactcattgtttttggaccaggagacgcgagtaatttttatgcaagcccccgcaggtactggaaaaagtgtttccgtagcggagtgcattgccagtgtgctgaaaaaggaccctgatgccgccattcttgccgtttcccctctgaacgttgcggtgtgtgagttggtaaaagatacaatggaggcactaactgaaaaagttccaatgctggcacttttctctggtcaaggtaaagggcgatatatggacagaattcggcccctcggggacaatttgttggttgaggcagtccaaaggtatggaaatatccctcccacggaaggagcaccaggaaagaggtggaatgaggaaaaattatttcagaaatacgtggacgattttaaccgggcaccgagaagggcacgagagcggacgaccactgccgctctactgaacatgacgaaataccgtgtgtatttcatgaccctggcattggcggaggagttggcactggatttgggaaacatcaattatgtgttggttgacgaatgtggtcaagccacgctttcagccattctgtccacattaacccaatttcgcaaggtaaggaaaattctactaactggcgataagcaacaattacgagtgcatttgccaagtcaaatgcttccgattcgtggtaagtacggatttgagtcggttttggaggttttggaaagggccaaaggaattgatcgaactgtcctttcgcgttgttacaggtctcacagtgccattgtcaaatgcctagacgcgggagtgtacgcaccagccggtgaccgactcgttccaggaaaacccgacactgagatgtcattctttctgaatttcatgggaccacgaattgtcacagaaaattgtccagtcatactcattcaccaaaaaacgcccgctcaacaggaaagcgtgtcattctcttcacacaatccggaacagcgtgaaacggctttggaatttttggggataattcagcggaccttttcgggactaattcaaattgtttgtttttatcaggccgaacgaaagcaggtgacattggaaattgaaaggaggaattggcaaaatgtcaaagctggtacagttgattcgatccaaagtcaagaggcagatctcgtgatcgtcttgacaacacgcaccggagctggacggactgaagatgttaacattgggaaagaattctgggcggatgcggcgcgcacaaccgttgcggtttctcgaccacgttttggtttgattgtcattggcgacctcactctgttgtggcacaagggagaagtgtggagacggtttctcgaccaagcacttaaaatgacggttgcggtaacccctgactatattggcctaataagcaacccctggccgaatcgggtgggaaatacaatcacccggcccaatggatcagtcccaatggcctatgagttttacgcagaaagggatagcactttgagacatgagagtctaggccaaaggattaacacaactaatttttcctctcccagtttcttaggcaattctttctcagtttttgcacaccctgttttgccctgtgcgaacacttcttcccttgcaccatcctcggcacattcattcggcatgatggtcattgacacttccgttccaccgccagcagtgtatgctcggactggacgagcaggaccaaatgtacgcatgacgccttatccaccacaacgagagccacgaacgagttacgcagaagcagtcgaacatggccgaccagcaccgaaagaacgaaggacggatgttgtatgccgcagatgtggaagattcggacacattgaaaaacgatgccgaacgtgattttttttctgttctctatatttctcactcattcctttttcatcattttcacctctgggctttatcaaaaagtgatttaaaaaaaaaaatttaaattttcggataccaccaaaattttactcatcgatcggggacgatcgcttcaagggatggaggtgtaaaagggatttcttaattggatttttggccttttccgggacaaattccttcccgcattttccttcactttcccatctctttatctccgttcaatcagtcattttcttatccatttcatttccatccttcgccatccgcgttatatccatcattcacttcattttcacatttcgttttattcaccaatacgtgtggtttaattacccaagtttgagatgggagaataaa

SEQ ID NO: 66721 - DNA, 730 bp, Heterodera glycines
  unsure (1)..(730): unsure at all n locations
atggctaagcggaccgtaataaagaaacttcaaagcaaaaaatcagtccaaaaaacgtggaacaattgngaggagagaaaggcgcagacgcagagggcgacagaagcccgtctggccaagaaaagtgagttttttcatcaattttaactcaaaaaaatcatgactcggtgtgtacaaacattcttggtatcattcgaaagcttaaagattagggaatttataaatacaagaaaagagcaaatactgcaatgagaaaaccggaaatgcatcattttacgcgtataatcacgaataattgtttgtctattgccattatctcataattttgcaacagaaaaacttttgtagacttcaagctctcgaatgataccaagaatgtttgtattgaccaagtaataaaaaaaggtatgacctataaaagtgaggatagtcactgattggacgtgtaaattggaatagagccaaaaaatcaacaatttataaaattataaacagaaaaacttagtggactttgatttgggcaaacactttatttttcctaccatcagttttccatattatttcaaaaaaaaacaatttttttaatgggaaaggtctgccgaagaagttttgcactatataaattaaaaatttttttattatttaatataattttaatttaattataaccaaaaggcattatcataccagcagattatcagtttgtaaatttacataattaattatttaa

SEQ ID NO: 66722 - DNA, 2733 bp, Heterodera glycines
atggatgccatcatggaaagagttgctaattgccattactattcctctttggatttgtccagtggttatcttcaaattaaacttagtgaggaagcatcccgaaaatgcggtgtaattactgaagacggagtctatcaaatgacacatatgccttttggattaaaaaatgccactgcggcattttcccgggcaatggcaagagttttaacaggtctcaatgacaatgtaattgcatatgtagatgacattctcattttcacaaaatctcctgattttgaagaacatttaagtgcattacgtaaagtctttgagagatttaggcaattccgtttaaaattaagtccgaagaaatgcgtctttgcttcttctcaaatgaatttcttaggctatgttttagatgccaaaggttatagacctagtttaagtcgcatagaaattattaaaaatttacaagcaccaactaatgtgaaagaggtaaaacgagttattggtatggcttctttttacagaaggcatgtgcctaatttctctacaattgtcgaacctctgacaagtcttactcgtaaaaattctgtctttaattggggagacgaacaaataaaggctttccagaaaatcaaagaccttttatcacacgagccattgctcacttttcctgattactcaaaaccttttcatgtatttacggatgcctctttagtaggtcaggccggagtcctaatgcaaaagaataacaatggagtattttcggcgatttcgtattgtagcagaacattaagtgcctcagaaaggaaatggcccacagtccaaatagaattaggtgccatcatttatgctcttagagaatttaaaccctttattttcttgtctgatgtcgaattacatactgatcataaaccattagcttacttacttaaaaaggcagaagctcatcccaatttggcacgttggctaattgagttacaggcctatcaaattaaaattgtccacatcagtggaaaacaaaacagtttggcagacgctctgtcaagagcacaggaaaatatttcaattaaggaagtccaaaatttggacgaactggatgacattgctgaatttccaatttgcttgtctttgacaattgaccagagagtaatttttgatcctttcataaataatttaattcttagaggaaaggacgggcattcttatgacattgatttaaagaaagaacaaagagaagaccctcagtgttcaaaattgattaattttttacaaagaggcaaatttcctgatgaaatggaccctcaatctatggaaaatctcaccgaaaatgctaaaaatcttgttatggactcaggaattttatattttaaatattccgaacaatcaccaagaatttatttaccaatttcattaagatctctcatttttgattcatttcattcttcaccattaggagggggacacatggacctgaaaaagacattaaagaaatgtcgtaaatattattggcctttacaatattctgatattttatcctggtacaaacaatgtattacttgccaattaaggcattctccatctccagcttttagagctgaaatgcaaatggttcccgcaaatactttatttgctcgcgtaggccttgatttggccgggcccttcccaatgactattagtggaaataaatatattttgaatattatttgctggttttgtaagtatgtcatttcggtaccattacctgacgctaaatcacacacaatagcgatagcctttttaaagaactgctatttaaaatttggtggctgcactgaattagtcagtgataatgccaccgcctttacatcggaatttttccgagaattttgttcactattatatataaataaaaaatatgctgtaccccattggtctcaaggcaatgctgcgactgaacgtacctttaggacttttcataatattttagctaagtacattacgaaagaacagccagattttgacgaattccttgattatgctaatttttgttataatacatcagttcattcttctactaacgagaccccttattttttaatgtttgggcgcgatcctatattttgcatagatcaaattttagaccctaaagttagagacccggtagcgtttactgacgaaactgaatttaaacaaaaactagtgatctctcttcggagagcgtggaaaagtgcctcagaagtgcatgcagatgcacaagaaaaaatgaaaatacagtatgacaaaacaatgagaacgcctaagctaaaggaaggtgatagagttttgctaagaaattatgcgggaaaaataaatacatctaaaaaattccagttgccgtggaagggcgtctttaggataattaaaattgacggtatttatgctaccattgtaagttgcaattcgccccaaagcaacccgcgccgcgttcacattaatcaacttaagaaatgcgttgaaatcctaggaccagcttgcacttctccctggcttagtcccgaagaaaataatgctcttgtggaagcagaaagcgaagaaattgctgatttacctggtcattctcatccaattattataaaagaacaaatagagttacctgcgcaaaaccatgctaatgacctggttagtgatactcaaaacatagaaaatgatacatgcgaaccaacacaattgcctcattatgctttaagaaatcgtacaaaacttaacaaaccagcgcgatatttagattag

SEQ ID NO: 66723 - DNA, 2018 bp, Heterodera glycines
atgtttaatgtcacagatatcaactttcatgcttttattcataatttagtcaaagtaagtgacataacttaccaaattcatcaacatgatactaaattatcttctgctttttccaatacttggcaaaaaacgagggatgaattacagaaggaaatttttggagattggtcttatatttggaaagtaataatcactattatttctttgatttcattgatcgatgttttgttaagatttggaatttttgcactacagatatatctgggaaatggtcgtttaggatcacttcttttaggaaaccaaacaattaggacagctcaaaatataattcaatcattgcctcaatcatccaattcacaaccctcccaatctcccattgaatcttttgacattaaatttgttcaagttaataaaattccatccccttcaaagcaaatgaactctcctcagagagacagcaaaagtgaaactatttgtgaatcaatatttatgcttcgttcttatgctgaatttaaagaatttggatttattcctgcaaatttagaccttccgattttcctaattaagattaatggtgttgaatttagagctttagttgatagtgcttctgaaacctcagttggctcagatcgaattctttatttagcaagtgtacccaaaagtgcacaaagggaagttaatatccgattcagatcgcttggaatgaacccactcgaagtttcgggtgattcattagttggaaaaatagttgcatgggctcatttagcaaaaggtgaagatattttaggagaagctcctttattgtttactgatcattcggtttttgaaaacgaatgttttgatttaataattggtgccaatttaatcgatcgttttggtggagtcacaatccttccaaaagaacgaaaaattatttttggttgcactctcacaaataatgttagggcgatatctcccatttctcaagtaaatgaaatttcagtagcagaaagtgaacaaagtatcaaaaaacggataccgacttcggaacggttcaaaagaaaggggcgttttaagcctcactcccaatccaattcaattgatgaagaaagtggatcaatcacctcgctttgaaaagatttctgttaattttcttggctcaatttcacctaattgctcaattattacatcacgaattaataatgtgaaaaacccaagtctggttgatactggagctagcattagtgtagcgccaaaattgatggctcctatttggcaatgcataccatatccaacatttgtcaatgttataagtgcctcgggtcacacacttgaacttactgaaaaagtttctgttgttttttctatagggaattttgaaattaaggaaaccatttatcttgtggacgataacaaatttaaaacatcagcctataatcttctaattggttgtaatatccttggtaaattgccaccttttacttttgactatcctaatagtaaattcagtgtaggtaattttatcaccccattaggctctttaccaaataattctctcttgaataatttaagaatccaagcaatcaattctctaattcttcctccgaataaagggaccataattcaggctcaatttgatccctcaatagtttctgataaacccatttatattcattctcttgataaaaaacttttgaatgaacatttcggattaattcctttaattgtggagccctttcgagggacagtgaaaattcttattattaatccaactgctatgccttttcaaatttacaagggtaaacatttggcttatgccgacgaagtcagacaaattaacaattatacaatgagtaatagctctgaagacctaatggccatgtcaattagtgaaggtgttgttgtcgacccgaattttaaaatagatctttccaaaagttctgtagtaggtaaagacttagaaaaactaaaatcgctgtgcgatgaattttatgatgtttttagtcaatctcaatatgacttaggttcatttacggagg

SEQ ID NO: 66724 - DNA, 2274 bp, Heterodera glycines
agatacgaaaagccaccaggcaaagatggaagcggaaacggaagagaacaaatgggaaatgttgaacgcgcggagcagggaggagcggaaaaaggccatggattgtgtcaagggctcggagttgattaaggcgttccagcacaaaatgttctcggatgaaacaacatcggagcaactgggaaagtctataagtgaatgaatttttatgtaatttaattatatcaaaaattaccctccggctgcattgggtggtatcccaatcgtattggcgaaaaatagggtttaaagacctttgaaaattcgtaaacaaaaaaaaaattattatttttctttaatttttttttgtaaatattttattattaatatttttcagaaagttatgtctattttttgaatatgtttggtcataactttctggaaacttaatgaaatattctgaaatttttcatgcttatagagcaagccaagagctatcgtaagatagtaagattatttttaggttttatttaagaaaagttatgactgaattttctcaaaaattctgtgaatttggcagttttacaaaacgcccatgttggcagtttttacgaaacgatccagcacgttacatatcagggatggcattccgaggccctaaaaattttcgaaaatcagaattccaaccccaaaaaacgtcggaaatcggaaaattttcaaaaaacacaaaatataataaaaattttctaaataataggctaatttttaattcttaaaaagtaaaaggtgatttcaaaaatgtatttggtatattcgcttgaaaaaagtattctggttttcataaaaatcttttcatgtcattttacattgtttttttgtggcgcgtttttccaaagaattttggggaatatgggggggagggcagggcgtccggcagtgccgataggcgccgccgggaaaaattttgtaattttttaatacgatttgttaagagactttgtcaaaaaatgatcaaatttagcgtttgagcaatttttcaagaaaattaaggatttttaaggcgcggcggtgccgaaaggcgccgccgggaaaaaaattgaaaatttcagttcaatttattaacagaaattgtagaaaaattacttctaatttttgaaaaaattaaaaaaaaaatttccgaaaatttccgacttttcatcaaaaatttcagaaatcggaagtcggaattccgacgaccaaaattttttcggaaatcggaattccgacccaaaaaatgtcggaaatcggaattccgtgtcatccctgttacatatgtacatattttatacataattcggactctttcacaatttttcttacatattttgcaatttttgaggattttttaagcaatttttattaaatacctcaaaaaatccaaaatttaacaatttttcgttaaatattttaattttttacatattttgagaatttttgaaaatttagaaaaatatcttgttaaaaaatttaaaaaatcatcctcctaatacttggcatagtttttcgttttcttcattattccgatctttgtaatttatttttttccaggaaatattgccgaactcaaagttgacgttaacaagacaaaaaagctgcacaaacaaaatagtcgcacaaggcgatcgcgtcggcataaagatgacgatggtgatccgatcaatttattaaaacgaaatttatctcggcgaggagaattttcatacggaccaccaccaccatcacattcatcctcatcatcattgtcatcatcatcatcattctcagcatcgcatcgtttacgtccaccgttgccgcatcggcgtaagagttcaccaccagcagaagtaaaaaatgttgatttgtcatcgtcccctgttgctggcacatcaagcggtccctttgatgttgccgaaaatgtacatggcttacctattttggatgagtcatacaaatttctgcgctctaattctgtgaaagaagcagaggaaaagcggcgacaacaaaggcagcactatgaagcggttgtgcgccgtaatgggtcaacaaaaagtcctaattgtatgggaggaaatggattggatgatgaagatagtgatgatgttgaggaaaaggtggaaaatgatgaacccaactttgatatggactcaccaagaaatgtccaacaacaaagttaccacgacggtggtcatcgccgccttgataaaagcgaaagcaaaaaaatgttggcagacaagaagcagcagctcgcggaagctgaagctgaattagaaatgcaactga

SEQ ID NO: 66725 - DNA, 1354 bp, Heterodera glycines
atggaagaaattaatcccaaattaagtgacattttcgataagaccgaaaagggcgctgagttttcatttggcaatcacattttcaatgccgtagagcgcaaaaatggtatagtgggcaaattgttgtacgattgggagaagaagaaactgtacgaatgggaccgtaaccaaatgagcatttgggtggcaaaacagtacaaaaatccggacccgccggaacacagtgagttacagacagcatattactgtatatgaatgagtgtagtgttactgtatgtaaaatgaaggaacacatatataaatacattttttggatacggaacacagcgaattacaccatactactgtatgttaatagaatattactgtgtgcaatgaaaatgaataccaattggaatactactaatagtttaatacatttttgtggggaggggagaatttgtaacaccaaaaatttcatgacaaaggctttttaactttgtttgaagcttatggctgcagttaaaattctgctcaaatattgttctattttttagttcatagaaaattctaaaaaaaacaacaaaatgtgaaaaaatttttaggggttttcactgatttagatttttttttttgcccattttttaccttttttaattagggtcctctattatagttactcattttagaattcttctaccaatattacggccattaatttcagcctttcttttttggcatttaaaaaaaaatttaatttgttccattagccggcggcgcccattccttaattcattttaaaattccgtctccacgctctttgatcggtcattatttcatttcagggcacaaattatacgaacatgggctaacaaattcggacaatcacgagcgcatccacctgatcatccatgtgctgcttgtggacgcggtttttgatcgtttggcgcgcgacctttgcagcaagacggcatttgaagtccaattccgcaactgggccgcggtggccaaacaaatggagggggaggagatccgcaactacgtgtgcacacccttgaacaatgtaaactgcttgctgagtgcctgctgggctggtggtggtcatgtttggcccaagggtttatggccaaattttattgctaattatcggacccaactccgcgaccgaccctgggctggcaaaattcgccaaaatgtttttcggcacaaaaaaattgtcataatttctgggatatcctggatgaagcgaaacccggcttacgaccccaaaattcgggaacaacaactcggaatccattccaaaaagtctaaaaaattatttgttcgagagattttttcaaaatttaaattcagattttataaattgtcattttga

SEQ ID NO: 66726 - DNA, 804 bp, Heterodera glycines
atggtaaaaaacttattagtggaatatcgtactgagtgttttgtaaatccgcataaatacagtagttgggcatttacggcactttggctgtcaattactgtaaaaaacttattagtggaatatcgtactgagtgttttgtaaatccgcataaatacagtagttgggcatttacggcgctttggctgtcaattacggtaaaaaacttattagtggaatatcgtactgagtgttttgtaaatccgcataaatacagtagttgggcatttacggcgatttggctgtcaattacggtaaaaaacttattagtggaatattctactgagtgttttataaatccgcataaatacagtagttgggcatttacggcgctttggctgtcaattacggtaaaatctgtttcttcattttcatttatttattactgtggtattattttctcatcaaagtttttcgctaataaaaaaaattatctatgaaggaaaatgaattcctaattaattaattaattattaatttaattaattaattattatccgtatttaaagatcatcctttgtttgggattaacaatttatcatttgcttgttttggatttatcgtttgcattaacaaatatttttgtgggtctgtacatcggagcaatgatcgccagtttaatcgaaatttttgtaagttaaaaatttaatttattatttatatatatatattttttagattttttctttggtcagaaaatctaatcagaaattgtttgatttgcgccctggaaattataaaaatcaaccattaaggttcggtaccag

SEQ ID NO: 66727 - DNA, 922 bp, Heterodera glycines
  unsure (1)..(922): unsure at all n locations
aaaattacggcggctggaaaagtacagtcgaacatgaatttaccgattgaaaacagtaattatagagatgttctgttgtatctcgcggggaagaattcaaaccattaatatgggcaagactatagagaaaattcaaatctccggcaggaattcaaaaaatttaaaaaaaaattcgcgagattaaatacagtaccgagtggcttccacaccgattggcagtgtgatttgtgcatatttgatcaattgaaaaagcataacgatggttacagatatttattggtctgcatcgacgtgctgagtcgaatgattttcagtgcaccggccaagtcaaagaagagtgaggacatgatcgaggtatttgatcgggtgttcaaaaagtcgaaaattatcccaatgaaaatatatagtgatagcggaatcgaattccaggctggaaaaatgaaaaagtattttgagggaaaatttattatcaaaaatgtcatgtatagtcccgacctccacaccggagtagcttaaagggcaaaatcgtacaataaagtaacggttatactgatattttacaaagatggaaactctacgatgggtcgacgtaatagataaaatagtctcaaacattaacaacagtgtgaataggacattgggggtcaaaccgtcttcaattaattttgaaaatgcccgggcgttctgggaaaaattatataaggagaaggaaattaaaatttcgaaaaagaacaaatttaaaattggcgatatcgtttgtattagcaaggaaaagggaaaatttgcaaaggggtatctcccaaacttctttaccgaagaattatntaagatcgttgttgttaatccaacgacacctggttcattcaagattgaacattttaaaggaaatttaataaaaagcatattttataaccaggagttg

SEQ ID NO: 66728 - DNA, 545 bp, Heterodera glycines
  unsure (1)..(545): unsure at all n locations
aaaaatttctcactccaaaggtgcaatgtgcgatatgctttggtctgatcccgaagtacggcatttttgtaccaagattttatgttattcttatntaattttttgaattattggtaaggagtgcgtcggcttcgctatcagtcctcgtggtgccggctatctgttcggttctgatgttgtgaaattgttttgtgaaaagaatggcgtagaaatgattgcccgtgcccaccaattggtcatggaaggatacaaatggcactttgacaacaccgtaagtaaaacgcaatgtttaacagagaaacagcgaaagatatttcccatctttcataggttctcaccatttggtcggcacccaattattgttaccgttgtggcaatgtggcggccattctcgagatggacgatgtactgaaaaaggaatttttgattttcgaggcggcaccgcaagtggttggaacaatatttaaaaaagaatattttgaatgttttggtttttcaagggacgaaacacaccaatgaaggggcctatgcctgaatatttcctt

SEQ ID NO: 66729 - DNA, 60 bp, Heterodera glycines
atggcgggaattggcaccaaattatggggggacagtggcggaggaggcggaggaaggacg

SEQ ID NO: 66730 - DNA, 1336 bp, Heterodera glycines
ggcgaatgcggtgtggttgtaagcgcatcgccagcacatcggctgccgattcaggacgacaaagatggacatttgatctactcaaatggggacagaattgacaacaaatgtaagactataggtggtcgtatttgtttttcccgtccgttttctcacaaaatttattaagattggaaatttttcgttacaaaatttaaaaacaattgccattttcagttgaaatcgtgaagactctcggcgagggaaccttcggcaaagtcgtccaagtgaaagacttaaacaacccaaaggggccgcaacgggcgctgaaaatcatcaaaaacgtgtccaaatacagagaggccgctcgactggaaattaacgttctgaggaagttgaaggacaaggacccggacggacgcaatttggtcatccaattgttggacagtttcgactatcagtgggttttgggtttggggaaaagcacagaaaacaaagcaccgctttcagtggacacatgtgtttggtgttcgaactgctcggactgagtgtcttcgactttatggtgcgccttttattccctttaaccgacaaaaaaaaaattccgtttgtccttttttcttgctattttttttacccctttaaagaaattgaacaattaccagccttacccaatggaccaggcgcggtatatcgcttatcaggtaatgacggtggtaatggttgtcggccaatggaataaaataatttattagtttccaattttcatttttatcataaatttggtccctttctctttttagctgatccacgcagtcaaatttctccacgacaacaaattgactcacacggacctgaagcccgaaaacattttgttcgtcaacagtgagtctgacgtggtcaacggcggggaggaagccaagcggaaaaagcaatttcgggttattaaggtcgaatggatttggaaaacaaattaaaattggaaaatgggcatttaaggacgcctctgttcggctgatcgaccttggctccgccaccttcgaccacgagcatcattcgaccattgtctccacgcggcactaccgggcgcccgaagtgattttaggtcagaatttcgcatgtcaacagtttttaattcccatcatgcattttttacatttcagaacttggctgggctcaaccgtgcgatgtttggtcaatcggctgcataatgttcgaattgtactccgggatgacgttgttccaaacgcacgacaaccgcgagcatttggcgatgatgcagcgcattttggatggcatcccttacagaatggggcggaaaagcaagtcagttttgagagctggacttatttgttaa

SEQ ID NO: 66731 - DNA, 131 bp, Heterodera glycines
atgctgtcgatctcaattgactttgacctcattgactttgacctcattttattaatatattttgattttatttttggtcatccatatatttatcacttactctacgacatattatctgaacagtcgtcaga

SEQ ID NO: 66732 - DNA, 55 bp, Heterodera glycines
cataaacatttatttgatttattttaccatattcacaatttgatcaaaatatagg

SEQ ID NO: 66733 - DNA, 1160 bp, Heterodera glycines
tgcccctcaaaattttcaattgattacattttgtccattcctgcgaaaaagccacgtcatggcattcaagcgggagctggaacttcatcggctaagtcagcaaaggatttcgtcaaaaaattggaaagcagtatcgagcatgtgccacggttccaatacgtcaaggccaaatcgaagttcagcatcgaggacgtcccagcgaatcccgaagggctgcttgccggcattttccaattttgcattgatgaggccgtcgtggaaagcgaacagcgcggagtaaaaccaactcatcttgggtgtttgatcagcagcccactattgactggcggtgacatacccatcccaattcgccaaatcactgacaacaccgtggacaccatccttaatcaattcaataaagttgcgcaaagcaaacaacagcaaaatgtgaccctatggggcgagccgttcacagttactgtgaccaccgttgaccgaactggacttcccgacaaaagaagtctgaaaggtggcgcccggcgcagtctggcatctgtacatcaccgtatcaatgatcggtgtttgatcaaagttcgctccaaagaatgtcaattttgacgagaaaaaattaagattcgaaaccaggatggatattgtcttttttacgccttacaagcaacgatggtggcaaaaacgcgtggatggcctaagtggcaattttacaactacatgcatagcagatatggtcaacagggctgtcttcagagagatgttttggacttaatgcagcaaactggtgctcggcctggtcttaatgcctacgaagccgaagtttttgttccaagagtggttgactattggaataacaacaatgaccaacaacaacaacaacaacaacagcgatttgctgtgtttattttcggctcttctggacaatacaagcctctctacaaatacataaacgaccgctatgacaccccaattgtgctgtacttcaacaacgaccatttcgatggggtgcagaaggagtatgggctgtttggccaaaactattgttttgaatgcgagaagccatatgatcgtccgtcgcggcacttaagttcatgcaaagcacactgtttgctctgttctcgcgttggaccacgcttcccatgctctccgttgagaggatttttccggga

SEQ ID NO: 66734 - DNA, 1172 bp, Heterodera glycines
atgagtgtacaaaaaatgtaagcattttgccccaaaaattcgtaaagaatgccaaaattttgccgaattttccaaaaattttttaggcctcggcagagttcccgacggttggcacttgtcggctgtgtcatttcggtgctgctcctctacacatttctgtttggatggccaggccccaacatttacagcaacaaacaaccggccattgagcactgtgtggccgaccatatgatcaggtcccgtctcagtcccccgcggattttccatttttttttgaaatttcgaaaaaaaatcccctagattttttcgtttaaaaaaaccgctggatttttttgttttgtaaatgacgtcgttgatatggatggataatactgccgatggtaacccatcttttttgaaaaacaaaaaattttgttttcaaaaatcataaaatttgtttccaagggctttgtggtcgctgatcacgaatctggcgtccgtttcgaccaactccctacattggacccgaattcgaacaaaaactcaaatttttttaattcgcatttttggtctaaaaaatgggttaaatttttccaaaacccctacccctccgagggggttgaaaaatagaggcctaactaaaattttcaaccaattttttaggtttggttttattttttaatttccccaaaaaattttaggaaaggcatttcccatccgttggtaaatggacaagccgaggacggcacatattggcgaggttggcattgtgcaaaacaagcgatgaaaatggcattttggtgcccttccccctcaattttccatatttttaacccagaaaaccgtgtcgcttttgctggcaatggcttcctgggcattgacatggcattggaccgtcggttggtgctgttggccaacgaaagtggtcgttcccatttgcacaccggcttccacccgttggcacgtcatttattatttttttaaagatttttcaatttgaaaaaaaacaaaaaaaaaatctagcgaattttatttaatggaatttcaaagccagggcaattgttaagattattggtcataataaaaatccaaaaaaacactttattttttttagggttttatggcgacgaatacaaatacatacaattatagacgcttgctcagagtctattgagttgaccagaggtctgtga

SEQ ID NO: 66735 - DNA, 363 bp, Heterodera glycines
actttagctcaaatttcttagagaagagtgcgttctcttaatttttcaacaaaatttatgtgctccgacaacaacgaattgctgaaggacccttccgccgcccacaaattgacgcttttgttggccaaccgccaccgttgtcataaaagcagaaaaactttggccgattttttacgaaaaaaatttcattttcataaccgtcgtgtgaaaaactgtgccaccaatttgacgacgacgacaaaattttttaccgatattagaaagggttgttacacgaaaagcattgaaagaggaggaggaataagctaacaaaagtcgaggacaaagtgccgaaagtcgagacaaacgaacaaaaaaaagtga

SEQ ID NO: 66736 - DNA, 1272 bp, Heterodera glycines
atggcgttgtgccattgcggaaattgtggagaaaaatttgaaacggacgtcggaggagacgattcgcgcctgttcattggccgcactgatcagtgtccaattgggtgtgtgttgtgccttttttttacacaaaaatgccaatagccaacccaagaaataatttgggtacatccaaaaacgtggcaaaaaaaaaaatttaaaatttaattattttttttgaaagcctaaatataatttaaaaaaatttttttgtgtctttttcttaatgtaatttttttcgaattaggccaggcataactaaaaaacttgcaaatttaaaacaaattgtggcgagattatgtcccagagacgttacggcgtcgacactttgtcactgttccctaaaatttaaaattttactctaaaattctacaaactttaaatttttcgtcaaaatttttatcttattgttcgtgcctgatcctacatctttttcttggccacaggtgttgatcttgagaacgagctgtgtgccattgtggaggcgatgtgccaaatgtgcgcggatggaaccgccgccgaagcggtgcgtgccgcgtgtgcccaagccgttggcatttgcgtctatttgagcattgaggtgggtggatgcacgaggattttcaaatttaaaatcattccttccccctgaaaaattaacaaaattttaaatttttttgcgatttatttttaaaaaaatcaaactaggtatcatataagtataaaattcttaattgaaattttctaaaaagatagatttcttttctttttttgcgctggaatttttcacacgaattcgaaaaataaaattttttttttttaaatttctcaacgacagagtcgtggccaccgtttcgctgcgttgcaaacgctcaaaaatgtttggcttggcatgcgaccgaccggcaccgacggcacttcgctgttctcatccgcaattgcctcatgggcactgctgttggaaagagtgagtcatcgtccaaattaacgaattaaaaattatggaaaatccgtaattaccggtggtaaaatttcaaaaaaaaattggtaaaaatccaatttatttttgcttaaacattcctcgctacaaattgcaattacaaaatctaattaattaattgctataattactagggttggtcgggaccgggaccaaaacacggacaactgagtatggaagttcccggtttttcaacccgaaaagtgccggtcccggttttgcccaaaattcccggtcccgacctactctattaa

SEQ ID NO: 66737 - DNA, 134 bp, Heterodera glycines
tggcaccggaatcaccgcagccgccaatgtccgctccgccgccggtcatcgacgagtgcacactttccaactcgtccatttcgctgagcaactccaaccgttcacggccacacaccgaaccgccaccaccacct

SEQ ID NO: 66738 - DNA, 867 bp, Heterodera glycines
attgagccgtacacttcaaatgtgtacagccgtcgtgtcctttcgggagactttcaagtaaaattgccaaaattttatggatgaccaaagaattcttaaacatgtaagattagtttctctatgtgttttaagattgtcaatccgcatttgatgaaggatttaattgaactcaatctttgggatgatcaaatgaagaacagactaatcgcggagaacggatcggtgcagaacatcaagcagttgccgcaagaaatcaaagacctgtacaagaccgtgtgggaaataccgcagaaggacattttgaaaatggccgccgatcgcgccgctttcattgaccaaagccaatcccttaacattcacatagcgcagccgaactatgctaaactgagctccatgcacttttacgcctggtcattggtcggttatcgactaattgttaataaataaatggttgtatattagttttatgccttttattccttttttataaaattgcgtaaaaaagaacacctatacgtttaggacgataataaaaataccatgaaaaaataaattcaaaaaataatgcaaattcgaccaaacagggggaggggtcactatgtatgttacgactcattaatgggtaccatcgtttagggacttaaaaccgggatgtattacctgcgcactcgtccggctgtcgatgctgttcagttcactgtggacaaaatggcccttcggggaacaattgccaaggacgaatctgtcgaaatcgacgttttgaaagacaaggaaaacatttctgccaattcggagttgcgcttgccgtccaaacgcaaatacaatgaacaattggaggagagcgatgggtgtttgatgtgttccggt

SEQ ID NO: 66739 - DNA, 56 bp, Heterodera glycines; identical to SEQ ID NO: 52733

SEQ ID NO: 66740 - DNA, 343 bp, Heterodera glycines
atgactttgttgacttcatcaagttcatctttggaagatttggctgcccttgacggctgctcaaacacatcagacattttggtaaaatcatagaattaattaacaaatcaataaaaaatatatttaaaatcttttggaaatgggatcccttagtttgagttaattaaaattcgaatttaaaataggtaccatttaaaattttatttgtttttagcttgccgactctttgctcagtgacattgaacattttgccacacattgtctggcacttcgcaatttattggccacaacagcagcagcaacagcacacaaaaacggagcaacagcaggtaaaatgtgataa

SEQ ID NO: 66741 - DNA, 318 bp, Heterodera glycines
ggtgtcaactacaaagtgggcaaattccctttcgtcgccaattcgcgtgccaaaaccaacaacgacgtggaaggctttgtgaaggtgatcggcgacaaggacactgatcggctgttgggtgtgcatatcatgggaccggttggttttaaaatttcattcaaaaaattattttgcattttgtccatcaccccaatgttttttttttttgctcacagaatgcgggtgaaatgattgccgaagcgacgcttgcgctggagtacggtgcctcctgtgaggacattgcgcgagtgtgccatccacatccggtcagttggtttt

SEQ ID NO: 66742 - DNA, 751 bp, Heterodera glycines
atgataaaatttgaacaaaatgaccaaaacgagcaaaatgaaaacacatcaggagttgatcaaatgggtgaagaaatgggaaatggtccaaatgatcaacaaaaaagagaaactgtcaaaaaatttgatgcaattaaagaaaaattaaaagaaaaaggaaaatttgaatggaaaaaccaaagcaaaactgagagaaaaattgcgaaattattaggcacaaaccgaaattcaatacaaaaatggaaaaatgaattaaatttaaagaaaaacaacaaaaagaaaaaacaattttatgagcagaaaaagcgcaaattcattgaacaatttggtgaatttaaagaattatatgcccaagggaaacagaaagaatttgtgaaggaattgggcatttctaaagacacatttcgaaagtggaaaaaagaattggcaccaaaatatcataaaagtaaaaataagagatttttaaaaattttattattttatttttgtttaagcacaacataacaatgttgacaaattgaaaaagatgaagcaatattacgaaattaaagaatcaaatcctcaaattagtgaccgaaaaattacagagaaattgggaattacatgtcggactttgttaacgtggaaaaagaaatttgcctcattttcgaccatttgattttgcgggtgataatcggctcaaattttttttaaaaacaaaaaaaaaaattttaatgcgttaatgaacaaccctaaagcattttttgataca

SEQ ID NO: 66743 - DNA, 2365 bp, Heterodera glycines
atggacgagttagtcacaggcattcatggagttttcgtctacctggacgacttcatcgtggcaacaaactccatggatcagcatcagcaaaccctttacaaatttttcagtcgtttgcaggaatggggattgcgagtcaaattcgagaagtgtaaatttctctgcaccgaactgaagttcctgggtcacatcatctcagcggaaggcattcgaccagaccccgaccgatcgcggatgatcaacgagatgccagcaccaacggatgagcaaacattacgctcttttctcggcgcaattaattattattcccgttttgtcagccaaatgcgcgagatccgtgcaccgctggacgaactgcttaagaaggatgttcaatggcgctggggaccggatcaacagcaggcatttgaaggggcaaagaaaatcatcacttcagatttgctgctcacgagttacgacccggccaagccaatcgtcgtcgcagcggacgccagcaacaaaggactaggcgctacgatcagtcacacattcgccgatggcagcgaaaaagtcgtcgaacatgcgtcccgatcattgacgccagccgagcgcaactactcccaaattgagaaggaggcgctgtccatcatcttcgccgtacagaagtttcatcgcatgttgtatgggcgaaaatttagccttttaacggaccataagccgttaatcagcatttttgggtccaaaaacgggatccccatttacacagcgtctaggctccaacgctgggcattaattctgtcaaattatgatttcagcataaggtacatctcgacgaaaaattttggccaggccgatgtcctctcgcgactgatcaaacagcatcgcgacacacttcaagaggaggacaaagttattgcttctgcacagatggcacaaaatttggacaattccgaggacgataacattgagttttgtgccgcagcagtcgactacatgttccaaacaacaattgatcaactgccagtcacggccgacgaaatcgcagaacacattaaacgtgacgaagaaatgaaaaaggtcattgaacattgcaggaatggatggccaaaaacagcaaacgaatcgaccatggcagcattttatacgcaccgactgcgaatcagtgaagtcaacggctgcctgctcatgggcgatcgcgtcataatcccatccgcactccgttttcgcattttgaaggcacttcatttcacccatcccggcatggtcagaatgaagagcctggcgaaacaatttgtctattggccaaaaatagacatggacattgaaaggtgggtaataaactgtgaggaatgtcgttcagcagccaaagcgccatcaaaagtactgcttcatccttggccatcatcaaccgaagtctacgaaagactgcacatggatttcgctggtccttgtgctgacggaaacaaataccttgttgtggttgactcctacagcaaatggccagaggtgatcaaaatgaccacgacgaccgccagcatgctcatcgaaaagtttgtttggttgttctcgcggtatggttttcctaaggaaatcgtcacggacaacggtccgccattcaaatcaaatgaaatttcccaattttgcagaaaccattgcatcaaacagacattttcaccgccattccatccgcagagcaacggacgtgccgaacgattcgtcgacacattgaagcgccaaatgaagaagtgcgcccgagacgacgtaaattgggtgcaaaattcgcttttggcctaccgaagcacgccgaacgcaagtttgaacgggcgaacgcccgctgaattgtttttgggtcgtccggttcggacaattctttcccttgttaaaccccaagttgacaagcaggaaaaaggcaacgacaagtacaagcagcggatgatcaaacaattcaatcagcaccacggcacacatgaacgaaagttcggcattggtgaccaagtgcagttcatcaactaccaacatggcacaaaaacttggttgaagggcatgatcgagtcaggcaatggtgtagtttggaaagttcaggctccgaagttgaatgccgtagtcacacggtattccaatcaaatgagaaaaatttatcccatcccatacaaagaacaccatgaacagttgcccgacgaacacccacagcaacaaccgccaaacgatcaaccggaagaagttcaacccagatcgccacgtcgtgtacgatttgcggacgaactaaacgaaccactggagagagcacaatcgccaccaacactgagacgatcaacacgcgaaagaaaggcaccgaagattttgaacccggatgcctcaaaagccagatatgattatgtctatcggg

SEQ ID NO: 66744 - DNA, 344 bp, Heterodera glycines
atgttaagcggtaaggaaattaggaaaataaaaatttaaaaaataaattaaattaaaaaaataaatattgatgacagaaaccgtgaaaatcggatttatcggagccgggaaaatggcacaggcattgggtaagcggagcaaaagaaaattgagaaaattcataatttaatttgaaaaaaacaattgtttagcgagaggacttatcaattcgggtaggaattgggcaaaaagaaaagtcggataaatttgtgataattagggcgttatccatcagagaatttgatggcgagttgtccaaaggtacgtaaaaccaagcaaaagcaaaaaaaaaattatttaataaa

SEQ ID NO: 66745 - DNA, 749 bp, Heterodera glycines
atgagcgaccacacaagagcgaaacgcaacgtgcaacccgaacaactcgcttcacagctttccgctgctcaacttgccacaacaatggcactctcgcagctctacttgaaggaatgccagcgcaacgtgcgcgtcagcaacccaacgcttcaggcacgaaaactcctcaagcgcgaaaatctgcaagcccgatggatcagcgaaacaacaatcgaagtgtttccctgcgttccaatctccctatccaacatcagctaccgaacaacaaaggactgctacaagttcattcctgtcacaatccatctgctaaacacaacacaagacgcattcctcgacccggagatgcgcatcctctcactcatctcaaagatcgcaagttgctctcaatttcgctaccatcatctgcaagtgcaacaaaaacccaacttgtgggtgcgaatcgactcaaaaaatggaaacgtccaacgattggcacaaacagccatccacgagctctacgaaacaatcctcaacaaaacggacaacgatttggatctccacccactgatcttccatcagtggcagctcgacaacgacaccaactttgctaactttccgcacatcgacgaattcgaagactcggaagacttcaaaaacaagctggaacaacacacgacccaacgagccgaagcactcggagctttacccggcggaatcgaaggatggactatcagatggctccaagaacggctacaggaagcaatccaatg

SEQ ID NO: 66746 - DNA, 83 bp, Heterodera glycines
atgcgtttctccaccttgggcagtgattgttcttcttcgtattacggactccccggaggggtcgaagagccaattacgacgag

SEQ ID NO: 66747 - DNA, 427 bp, Heterodera glycines
atgcttaaaggatgtctgtacgttatcttagcgttgattgctgtcagtttgattcgttgggcgaatgttagaggcgatttaagccttttggcccttaatttctcctgaaaacttagaaaattcaacataactctccccaaaagacatatttctgtacgcaaaataaacagaaatgtgaaaaaagatttgttctttcttatagcttgttttatcagtttctttttagtagttgttgagatttttcttagttttccaaagtgtccttattctaatgcaacaccccaattttggaaaaaaattcgtaaaattttttccgacatcctttcgtattcttattgttagaatcttaatatttcagaattgctacgtacagttaaaatttcagatcgattggttcatgggaagtggtcaaactcccaaaaaatag

SEQ ID NO: 66748 - DNA, 1585 bp, Heterodera glycines
atgctttccttgctctccttactgctcgcttccggcacagtgcttaaggctgacaccgaacgatggacgtcacaaatctatccgaacccacggcggaatcacacgggctgcaacacgtgggaaaactccacgctgtgcgaccccgaccacattctgacggaccaatggagggcacagatcaacgagaacatccgaagtcaaatgacaagtagaagaggggattggttaacgggaaaaagcggaaaaccaaagaactgacaaatgccaatgtaacgttagcggaaaaggcgccggcagaatgccaaaatcaaagcgagaggatcactatttatgtgctgctggccaaacaaatttggacaccaaataacaaaagtatccctggaaacgatttggtaggtgacgaaagaacagatttaataacgccaattcattaattgttgacttttttagacaaattttggcgatgaattggcccatcggtacggccttaatgatttgtcatgcaaaacattccttcttctgattggaattgaagcagcaaaactcgcttatgtgagggttggtaaaggcggccctcgcggtgttctcatttgtcggttcctccgtttgttaagacgggaaaagactttcgaatgccggcggatttgatgcagcgggtgttccacgagtacaaactgttcagcgcaaagagcttcatggcaggactgaacaaaataatagatgaaatcggcacacaattggacgatcctttcaaggtaaaattggaacgaagaacaaaagggtctgaatggaaatgaaaggagcgggcacagaccatggccagcacagccctcggcaaatgccaccgacacggcagcaacttcgctatccgagattgtgaacgcattgatggaaaagaacggggacggagagggagggccaaatggaagcgcaacagcggcgccgagcgggggccaagtggacggggaagtgcgagtggcggagagggaggaacagcaggagaaaacggcacggcagtacaatggcacgccaatggtgacggcacaatggtaaagagaagggagtaggggggtgatcaatggataatcaaaaggggaagggctctgacgccccaaacgatcgacgactgttaccaagggcccatgccatcagacaaatgctcgtttctccttactcccgtggatgtttgtcaaccatttgtcttgcgataaatttccaccacttgccataatatccgaggccgacccgcaaactctttttaaaacagccaaattgacaacagagtggtcgcagaaggaaacagtagaattatctggcagttcggcagatttaacacaatggctcgaatacatcatgaaacccgaataactgcccctacatatttacactatttaaacaattctgtttttttcaatttgttacaaattattaaaaatgaacaaaatttgtattcatcaagtaaaatgttgtcattactgtccatgtcattatgaaatttgtaaaagatgtaggacacaaagtctattgcattttggcaccgtacacttcccctgggcagaaaaatgttggatgtgcccaatatgtg

SEQ ID NO: 66749 - DNA, 400 bp, Heterodera glycines
aatcgaacgctaacggacgacctaatggaaaaaaatccccgaaggagagaatttaattaaatccattccttcgggggaccgtgccgggtgccgcggggtaagcagtgctggttcgtttcatcacggcaccgaaccttttggctagtcagcaatcgttgcttaacttgccagatcggacgggtgcgcatgattccactgttccaagcaccccaccaaaagcaaaacgatataaccaaaatataaggaaaaattttttaaaaaattttttctccatcttcctttttgatactaaagcatcagagtgctaaaattaagttgtaaataaaatttggtgcgctttagagcactttctgaaaaaaatatttatgaaacaaaaaaatcgattttttcaagtgtccgt

SEQ ID NO: 66750 - DNA, 288 bp, Heterodera glycines
atgttttgctgctcaattttcttcttttttcttttcatagaaagtttctgtgcattgaaagcaacaagttaaatttttatttttaaaagcaaaaattgaaaaaaatttttaaaataataattttaaaaatatttgaaattttcagcccatttgaatttttcaccgattgtcagtgaactcgcgctgaaaattgttgaagaatgtttggatgaatacggacaattggtcgaaactcgaccattcataaaaagaatttcgagccccgaaacggtgttcaaaaattattga

SEQ ID NO: 66751 - DNA, 653 bp, Heterodera glycines
ttggccgagttcaaagacagacgggcgaacgccagcgaaaaagtcattaaaatggaaacaattcgggagagcatcggcgacaaggcggagcaggtcaaacagttggagcagctgattgccgccaccggttgcgagttgtccgagacggaacgtcaattgcgcaccatggaacgctcgaagcaggcaaaaattgatgttcaaaaatcaattttgctatggttttcaaggagttggaaacgactgtgcagcaaaacttgcgcaaaatggcactcgacgtggacagcatcaacggcacgctggacaaaatcacggagattggcgaggtaaatgtcaattgatatttttagcattttccttctctttgttaatgtatagtaatcatttatggcctataggtgttcctgctccttttgacggctattgtcatttgcgagtgcggcgcaggaagaaaaaatggtcaggcgggatgtgagcgacacaccgttggacggggcggcggaggcgcaaccggccgaaacggagcaggatcgaagcggggaggaggacgtggcggcggtcgcggtggtggaaaaggcaatggccgcggcggtggaagaggcggcggcgggaagggaggagggagggcgcagcagccggaagctgaggaggacgag

SEQ ID NO: 66752 - DNA, 797 bp, Heterodera glycines
atgcgaatcgaagtcggacgaggaaaggctcagactagagatacgatcagagccgaaacaaaccgcgataaaagtgcagtttgggatggaataactgaacacagcaatccatgggatggtaatgatgaaaagttacagttaaatgtgcatggcgtggacatttgcgtcagtgacgaggtggtctcccaactggcgccgttcattgaaaaccccgcagaaaatgcacaccctccagcacttgagctgtccgtacagaagtgccggattgaaattaaagtaaatatttgtggggtttaagaagttatattaaaataaaaaaacttggacaacaggacccgaagaagaaattcccaattcggattggatttgatgaactcaaattcgaagacggaccagtaagcagcaaacaaacaagtgcttcctagtgattgaacctggcatatccgcgttttgttcctccatctcggggatttatttggccttttgattcttttttattgtggatgatcgaatgttgaacgcttttgctgaccatttgtttgaaactagttcctgtctttctctccacagttcattagaaatgcgttcgttgtttgttatttacgggatcgtttttctttcttttttctaacatatcgtgctcaatttaagtctctgttgatgtcatattgtactgtgttacaacaccaatgaaaaatgatcaatgaaatattttcggtaacgaaaaaaaacttatttttataattttagaatctatttgtttccttaattttattaaattcatattatttatttca

SEQ ID NO: 66753 - DNA, 890 bp, Heterodera glycines
atggctcgtttctttctctgttcagcgatattttcccctctcctccttctgatgctttttgacaaaattggggagaagggaatggtcgaagcgggctgctgttgttgctgcaagtgcgtgggaaaccatttgagcaaattcccccccccccccccctccgccaatttttatgaaagagttttcgatatcttagggccgtaattaagccattttcgtaagacacgagttcgaacctaaaatcaaaaaataaaacaaaaagtcgaaaatatgagttgtatttgccccaattagcaagtgctgctgctgtccctgctgttgcacgtgctgttgttgtcacaaagtgagtaaaaattgtaaatggtatcagaaaaacaattaaattatttttacaatttcaggggccaatttgcataaaggtgggcacaccaatatttaattcatcggttattatctccgtcataaaattaacttgaccaccgatcactctgttatgggggaggctcgaatttcacaaaaattcaagaattgaggatttcgagcaataattattctcccgcttcttcctgctgtccatctccgccccccccccctccgttcagttgccctgcgtttgtccctgctgctgtaagtgttgctgctgctgctgtcagcctccctcatgttcgactcttcctaacccttcacttttaagccttttccctttaggccttagctgcggcaggcgaaaacgcgcggccattcgcttcttcaaaaggaaggcttgggaaaaaagccaagcggaggaaaaattcgcaaaatatttattcagccgatcggtttgagcagaaagacaaaaaatagctgatcagcgcttaattatattgtgagatgaaaggatttctattaataaa

SEQ ID NO: 66754 - DNA, 228 bp, Heterodera glycines
atggattatgtgaaggtgctccttcccccctttgttctttactttcgttttctctcaatttcctcctttttcactttttcagagtttgcctttgcacgacggagtggaaaaacagcagaagaaaatggtcggagatgcattaaatcaaaacgttgaggacgaaaatttgcgcgtttatttgttaatggaaatacaggccaagggattttaaacgaaggcaaaaataaa

SEQ ID NO: 66755 - DNA, 96 bp, Heterodera glycines
tctccaatccgtcctttcgaattctgttcaaaaggctttcagacaatcattgtcgcctttccctctcctcccaaatgcacaccgtcgtcccaacga

SEQ ID NO: 66756 - DNA, 56 bp, Heterodera glycines
gtgaccccccattttttgactaactcacagaccactaagacgaaaaaaccaactta

SEQ ID NO: 66757 - DNA, 507 bp, Heterodera glycines
atgccggagccaatggagttggatcaagagcccgggacgtcaacgtcaacaagttcagcccggcccggaccatcaacaaatcaacaagtgatcagctcgctaatgctgatcagcattctttgcctactcttcaccggcacggcacaaggacaatcaagtcgacaaaagcgattcgccgaaatcaaaacatggcatggcggccatgtttccaacttcttcaacatctttacggagcgcgaccgacgagcatcaacgaaatacagcccttacgttcaacgatacataaacaaggttctcgcattaaaccgaagtttgagccaatcaacaaatccgctgacaccgacaactccgacatggacaacgacacaacccacaacaaccacaagtcaaccacgcacaacgacaacaactgcgactacaacgaccacacgcacaacaaattggccaacaaagtcaaacacacggccaaccgcacgaataacaacgacaacgccaatgccatggtaa

SEQ ID NO: 66758 - DNA, 636 bp, Heterodera glycines
atgaagcgccttatggtgctggcggtagcggggaaggttgccgaggtgaaggcggtcgggcattcgtccggctgggaagaggacgagaaggattggtgccgcgtcgccagaaaggtaactgaaaaatgaattgaaaatgaccagttcaaattggcaaaaccatgcgtttcggtctcaaaaaaaaattttttgtaaattttctgactcaaaactttgtttaaaaatacatggaaacaaagcgaaagtcatcactgtttcaataaaatataatttcaactatttttggattaaaaatggaaatttgttagagcttttgttcgaattcggattagaattggtcgagagggatgccgaattctcgaaacgtgtttttagaaattacaaaaaaaaaaaaaaatttctgggaccagtaaaacacattgttgccgtttaattgcagcctcaagacttaaaaaagtgaaacaaaaataaataaacttataatttaagcttgccatgacgtcgacaagatgggcagagattgaaggggaggaggagaagagggcgtttgtcaagcgggaggtccggcggttagagggatgggccatgagaacggcccggaaggagttggacgccgaatggccggatgttttgcgg

SEQ ID NO: 66759 - DNA, 944 bp, Heterodera glycines
  unsure (1)..(944): unsure at all n locations
atggaaaatatatcaagaattaagtaagtaccaatttcaattcattttctggcgaaccactagtcaggatcttatccgatcagagttaaataaaatataaattaagcgctctgaaagctctatcgaactatatagagaagttggaaaaaattagaaaaaacttattcaagaaccctgaagatttgtcgggaatttattttgcctaaaatagggtggaaaaatattgtgggataattaacttatgatgaatttcagattttgaacttgagaaaattttaaaaaaattacttctttcggactcggaaatttataagaatttttttaaattcataaataacccaaaatcgatgttgttaattttctatttgttaagttatttgttaaataaataatttcagctttttgattcttctagaatggagtcctttatccatatttcgcgatttatgtccatatttccacattttttattttggcatttatcaaaaaaacctctattcgagattccccatcagctaaattggcctttttgaactctaaataccggaaattttccgaaaaaaaatcattttttttaattttctcgaaatattgttaaattcaaatttcccaaatttcttaaaaattggtaacatctgtgtaaaaatttgtttaactaacgttataacgccgaaatttcattccaaacccactataacatagaaaaagcaacgcttatcgcttaccaaatcattggccaaatggaaaatcaatgaatagttggttaacaaccggacgccattcgtatttggctcccaatttctgtgcattgtgaatccaaaagccacggactgcttttgggcggaccaccaatttctcggcgttgtacgtttcggccgcgcggatgccatccgacaacaatttgcgcnaactgaactcagttggactgctcactaacaaataaa

SEQ ID NO: 66760 - DNA, 566 bp, Heterodera glycines
aactcctgccgagactgagacaacaccggccgagactgagagttcaccagccgagaccgagacgactccagccgagactgagacaactccagccgagactgagacaactccggccgagactgaaacaactcctgctgagactgagacttctccagccgagactgagacaaccccggccgagactgagacaaccccggccgaaactgagacaactgcagccaagactgagacaacttcagccgagactgatacaactccagccgagactgagacaactccggccgagactgaaacaactcctgccgagacagatacaactccagccgagactgagacaactccagccgagactgaaacaactcctgccgagactgatacaactccagccgagactgagacaactccagccgagactgagacaactccggccgagactgaaacaactcctgccgagactgagacaactccggccgagactgagacaactccagccgaaactgagacaactaaagccgagactgaaacaactcctgccgagactgagacaacaccggccgagactgaga

SEQ ID NO: 66761 - DNA, 129 bp, Heterodera glycines
gccgctccagcggatggcataagaggtccacacgaccgacggaaggcaaaatacatacggcaagacaacaacctgcaagctttagtcgctgatttgaccagcgtgatccgcttgaataccttcgcgcat

SEQ ID NO: 66762 - DNA, 49 bp, Heterodera glycines; identical to SEQ ID NO: 60106

SEQ ID NO: 66763 - DNA, 227 bp, Heterodera glycines
gttcgctattagccaataaattttcaaaagtttcatttgaatcttttttttcaatcacttagattaaaagaaaactcttagaataataagaattgggcaaatgttaggcctcggatgggaatcgaacccactcgtgcaccctttccatgggcaagctctaccattgagctaccgaggcacatccgccctttcttttatggattatcaagcccgctttccacgtttta

SEQ ID NO: 66764 - DNA, 1091 bp, Heterodera glycines
atgaggtagtctattatttttacagatacactatcacaaaatttttcataatctttattgtgttggattatgttttatgtatatcattgcatttttcattattttatttttattagggtgggaaataagtcctgtcatagcattttattttgttttataattttttatgatttttatcagcttcccaaaatgcaattttttcgtagttttttgaatgaatcttaattccgagacctagcaataggaaaaaacaattatgaataccgtacctattgaattagtaccaccgggggttctatttttcaacccccctcgaaaggggggttatattacagagggaggttctaattcagaggggggttttttcaacgctcatttttcaaaaacccaccaaaaaatggctacttattttgtaaacatttcgccaaaaaattgattttttttgtaatttcatttgttttattcattctccatatttttcatcttttacgaatgacggacgagagaaacccttctgcatcgttaaaaaaggtagttcaaaattataggttttaggtacctacctgttcataacttgttcattatacaattaatttcaatttaggtgtgctgttactgcaataacatctgttctggagcgcaccagtgccgcaaatgctcaaagccgtgccatgcaattgctccgtgctctttttgcggccgaggactacgagggattcagcgcaaaagtcacctgctgcaactgttggctcaacgatgatgacgatgatgttgtgatggacaaaaaagcgaacttcgccggtataaatgaagcgacaaacaatgaccaagacgacgacgcattcgaacaatttgccaacagccaaatcatcggagaggacaatgacaagattgatgcgtcggcttcatcatcaactcacaaacgtcgcggatacataatcgaagagaaaatccgcattttggactgcgccaagatgtcgtccattcacgtcgccagcagacgcttcagcatggaccgaaacacaatttgaggctcgaagaagcaggaggcggcactgaggaaaatgtaaatttaagtgttgtgtttttca

SEQ ID NO: 66765 - DNA, 583 bp, Heterodera glycines
  unsure (1)..(583): unsure at all n locations
atgtgcttatttcatttgtctcaatcggtattacgttatgtacaggtaaaaatacctttgttgcccctattattttacttcagagacatggtcttatccgtgaatatgaagctaatgaaaacttagaanaatatatacgctcattagctgcactcgcttttcttcaacctaatttggttgagggttctctagacatattgtatgcacgggctccaatggtagctcgtcctgtttttgaatattttagaaagtaatgttgcaaattattcgtctttaattagatgttttagaacctatataatcagggataatggtgaacagccattatttccggttgatagttggaatcatcaccaggcggttattgatgatttatgtagaacaaacaatgctcaggtatcaaacttgaggggtcaaaccgatttgttattaaaaataatttaggaagcatttcatcttcgctgcccgtcaaaatcccgacgcgtcataatcccgatgcgtcataatcccgatgcgtcaaaatcccgacgcgtcgaaatctcgactaagctaaaaagagtcataatcccgataaatttaaaaa

SEQ ID NO: 66766 - DNA, 592 bp, Heterodera glycines
atggaaacgtatttaagaagttagagctaattaagtaaaaatggtcattttcgaggtaggtatttttggtggctgattttgagaaaacgaagagaggatacagaagctgagaaatagtgattaaatagagcaaagttagtactataagaatactaaaatataaagttttatttcataaaaattgaattattgggggggggccgagtctgaaagtggtttccagaaacggcatttttcaaaaccatcaaataacaaaattctttaataggggtcttggaaattccgaatttaattgaactagttaaaccgaccacgctgagttcgaacatagccttagatttgatctctgaattctcactgaacctgtacagctccaacttcatgcatggaattgaagcagtacaagctcaagtagcaaagataggtcagatttaagaccatattcggattctgctggtctaatttacagaaaaagtttgtctttgttgtatcagctttcattttcgaccataaaaaatccgagaaaaattagtaagccaatttccaattttggcatggtttggaaaaaaggcagaaaaaatcgatcaagcaa

SEQ ID NO: 66767 - DNA, 495 bp, Heterodera glycines
gggtaaaactaacctgtctcacgacggtctaaacccagctcacgttccctattggtgggtgaacaatccaacgcttggcgaattctgcttcgcaatgataggaagagccgacatcgaaggatcaaaaagcgacgtcgctatggacgcttggccgccacaagccagttatccctgtggtaacttttctgacacctcttgctggaaactttacacattcaaaaggatcgataagccacgctttcgcggtccgtattcgtactgaaaatcaggatcaagtaagcatttgcctttttgctctacgagaggtttccgtcctctctgagctcgccttaggacacctgcgttacgctttgacagatgtaccgccccagtcaaactccccgcctgacactgtcatcggtgcgggtcgccgggccaccgggtggcccgacttaacaccaaaatggacacccttgcgagcgcactcccgttttaccgattaagtaaggaatcgat

SEQ ID NO: 66768 - DNA, 921 bp, Heterodera glycines
atgccaaaacaaaacgaaatcgttttaaaatattcctttctggacttgacttggtttcttgatatcgaagctgttttctacgctatttctaaaacggttgtaccaaacccccagatttttgaatccggttttcagaaaaaatgccttgtggtgaaaacaatatttcacatttcactccataactttgtgagttcggcacggatcgagaccgggataagaccattggaaagagcagctcgagctctacaagaaggtatggaaagaaaaaatagttatttctgggactttttcagaaatcagaattaattctccaatgtggcccaaattttaggcccccagccacagccccttgcttctcccagttttaagtcttggatttgtcaaataaattcaagacttcaaattaataatcaaaaattctcttaaaatttttttgaacccaattcaaaaaaggaaaaaaatttgcagtcaaaaaattattcgaatttctccaattttgtttccataatttccgaaagttattcggtatcataatgccaaaacaaaacgaaatcgttttaaaatattcctttctggacttgacttggtttcttgatatcgaagctgttttctacgctatttctaaaacggttataccaaaccccagatttttgaatccggttttcagaaaaaatgccttgtggtgaaaacaatatttcacatttcactccataactttgtgagttcggcacggatcgagaccgggataagaccattggaaagagcagctcgagctctacaagaaggtatggaaagaaaaaatagttatttctgggactttttcagaaatcagaattaattctccaatgtggcccaaattttaggcccccagccacagccccttgcttctcccagttttaagtcttggatttgtcaaataaa

SEQ ID NO: 66769 - DNA, 756 bp, Heterodera glycines
ccgactcagcgacttcgcttggatggaaacattggcgtggctcggtcgtgcagaagtgggcatgaagctggcgctggtcaacacccggttcaacatgctggtggacaagcaattcatgctacggcagtggcgctttggcgagtttcacatctgcgagcgggaaggagcacaacgaggcggcgcagaaatcatgacatcggaagacggcaccaacttcatcacgttgccactgcccaccacgccgatgccgagcagtgtcgtcggcttccaatcactctccatttggttgaaaaaattcaatcaattttcacaatttccccccatttttgcaggttcatcaacgcggacgtcatcaaatttctgcgccggattcgccgtctgttcgccgaggacatcgcactggaattctccactcggcacacggagtttcgcagttggcaagtgattgcgcgacatgtttggccactgttacgggacgggatcagcacattggtgtgcctgaggaagtgcgatttggccatgctgcgcaaacacgtgtcgccgaccgtgctgttcgactgccctgacctgcaccaaattcgcacggatatggtgcccgagtgtccgtccgatgctgctgaaaatactgacccaacatgccgtgagctgtacacgtggattcactcgccgcgcgactatcgacaagcgccgatctccgtgaaactcatcaaatggaggcagaccaaatgggacgagtttatgaacaatttgtgcagg

SEQ ID NO: 66770 - DNA, 225 bp, Heterodera glycines; identical to SEQ ID NO: 50965

SEQ ID NO: 66771 - DNA, 159 bp, Heterodera glycines
atttataaacgggcgcgaagcgcccgtctgaggccgcgaagcggccttaatagcccaacaaatttataaacgggcgcgaagcgcccgtctgaggtctcgaagctgcgttaatagcccaacaattgagaaacgggcgcgaagcgcccgtataagcccaac

SEQ ID NO: 66772 - DNA, 191 bp, Heterodera glycines
atgccattgcacattagcaatttcaacggcatttgccaactgaggccggcccagtttggcattgtgttggaatggatgaatttgggcagtgtttgggcatttctcagtgaacaaaaaacgaattcggcaaacagtgtaaagcagttggacagcaaagatttgttgagaattgccattcaagtatgggttgg

SEQ ID NO: 66773 - DNA, 366 bp, Heterodera glycines
atggccaaacgctttgttggtgagaatgtttttaaaattttatttgaaaagatattaactgctaattttatttttaaaattaaaaaagcaattttaaatccattttataaagcaaatcaaaagaaaaaagcaagctttgcgacaacatctgctgcagatgataataaatttgcaacaactttggcaactgaaacatgggctgtgaaaaccttgattaaattggtaaaataaattcgtaattttattaaattttatttttaaattaatattttccttatagcttccaaccatttccaagaaggaattgaaaattggaccgaaaatttcttcggtaaaaattactaaatttaatgtttaaaaaataaa

SEQ ID NO: 66774 - DNA, 677 bp, Heterodera glycines
atgaatgttcccgtaaaaaattgagtgagaaaaaaaaattcaaaaaattaggtagaaatttttaaaatcaaaattttaaaaatattggtgataaaaagaaagaattttttgtggtttattggaagaagtcgccgataaaccttctgagcacgatcggcactaatcctgaagaaatcattgaaatattttcttattataataaaacatatttttaaataaattcaattttaatacaaaataattttaaaatttaacataatcatttgtcaacaagtgtcagtatttcttatcaagtaattattccttttatgtgatgtgaattcttttattgataaggacctttcaagaatatttatctgttgaacccaaataaatattaaaaaaattattgttatttttttgttaaagttaaacaaatccgaaatattcatggaatctacagtatatttatttgacattatggactgtaaagacatcggtggatattgcaattttacagattttcaggcaaaaattttgtactacaatacaattatttgaggaaataataatttcttatttttagacatggtattgtgaatggaaggagatggatttgtttgaagaactttgcccaatgccatcaatgtaaaattaatttgcctaattaatttgaaattttttcatcaacaaataaa

SEQ ID NO: 66775 - DNA, 959 bp, Heterodera glycines
atgaaatttgaagaactgaatggcctggacgccgaaaattttgtgtcaaagttgggcaaaatttttgaaaaatcagcttgggtagtccaagaagcgtacggagaaaagccatttgaaagcgttgaccaattattcaatgcaatggaacggggtaaaaatttttaaaattaaaaaagtatatatttaaatattttttaacagttttaatgaatgctggacgagaaaaacaactgaaattgatccaagctcatcctgatttggcggggaatgaaatgtttagtggcaatctaactcagcattctacgagcgagcaggttggtatcagagatgctcagaacgtcccgaaatgctcgatcccgagatcttttgctttatgaataccggcccgaaaatttttgaccgttgccacccaacccaaattttttttctcatctggaaacattcctggttggatttgcaggcatgttgagggtcggggaaaagcccaaaaaaagacaggggattcggcgagtgtcgaaggaagtttttagaaaattaaaattaatttaaaaaatcaatcctaataggctaatgctgggcttagcgcattaacggctcagcaattggctgagtttaattcgctgaactccgcttacaagtctcgcttcaattttccgtttattattgcgcttcgagaccaaaaagaaggtagtaatataatttcatatgtatcatattttaatttatttatttaataaatttttaaattttttggcattgatggcattttggcggcatttcgtcgacgacttaacaactcggaagaacaagaaatcaatgaggcactctcacaaattggacgaattgctcgccatcgattggacacattgatgatggagtcgaaatgagaattttatcgaaatgagaatttaaatgttaaaaaatgcttttataaaattttaatgctttattgtataata

SEQ ID NO: 66776 - DNA, 635 bp, Heterodera glycines
  unsure (1)..(635): unsure at all n locations
atggtaattacaaaagcgtctttttctaagcgatttcgtaattgttgtgcccgactcggcgacgggtgccaacaactgtgcagctatgatcagaacttgggcacggtaaattttttgttaattaggattagcgtaaaatattatcccatattttgattttaaaatttttatctattcttgaaaatctataaaatctcttaccattttcattttgcctttttcagatacaattggccgtgctgaccggaagtaagaaaaacaaagcgtatacagtatccactgacactaatccaacccccctccctcctactgtaagggtgtccggtgagtcgcgtcggtgaaatgatggtgagaaaatgaggcaaaaatgaacaaattatgaccaagtttaaatttaggtatgcgctagtggaaatgaggtaaaaaaaagggggaccaattaaaaaaatcacttctgaaaaagtaaaaaattaacggaaacaaaacattgtttagtgattttttaaattgttatttttagcgctaattggcataatgacttttttatacccgcctctttttcgcatgaaattgaaaaaagattttcaattttttcaggacgccaccgcctgttgccaagcatttgncgtttttga

SEQ ID NO: 66777 - DNA, 304 bp, Heterodera glycines; identical to SEQ ID NO: 51570

SEQ ID NO: 66778 - DNA, 1070 bp, Heterodera glycines; identical to SEQ ID NO: 37791

SEQ ID NO: 66779 - DNA, 1850 bp, Heterodera glycines
atgatgccagagaagcgacgacaattcgatcattggtacgagcagcatcgcgaagagccttttcaactcgatgaagcactagcgaggtaaaacatttttaaattaaaatatttattttggactttttcagttattgtacgaatgacgttgaaattctaatggcagctctcgtcgcattccgccgcgagttttttgatgtgtcgaagcggaacgaatatgtcgacggaatcgacgaccgggaaaaccacgatgggattgatgttctacgggaatgcatgactgttgccggtgcgtgcatgaagcacttcaggttgaaccatctgccggcggagcaccttgccattgtccctgaaaagggctatgacaacacccagaaccagagcaagctggctctccgctttcttttctggtatgctgaggaaaacaacgtacaagtgcagacagcctactcacctgatggagaaaaaaagattgcaaactacactgtggacggttggattgaggcagaagggtgtgtaattgaagtgaatggtaatttttctatatttttaagcaatttaaaaaaaagttgtttgcaggttgtgtttggcacggctgtagaaaatgctttccttctgacaacatgatgttgcccaacgggaaaactgctggagaacaaagggagcgcgatgccaagcggttacagttcttgaggactcaagtgacacgagttgatgtcttctgggagtgcgagattcaacgaatgttggacagaagcagggaaatgcggaaaaaatttgcagaataccatcctacggattggacgtcgaagacaaaccctttttcccgcatttggccaagatttttggtttatcaccgttcacctccacggctcacatccccgcctcgtttgaaaacaaaaattgaaccaagaccacctccaccgcgtcctaccgccaagagagaaaaacaacaggcaaagctggattggaagaaaaaccaacaccctactccagcgcctcgggcgaaaagagagccagaacttaagctggacccgcggccatccacgtctaggcaagccgggtacttccctcccccgacaaccaaaatagaaccaaaacatgcaccaacaaagaggcccgtaccataccgtatcccggaaagagagccaaaaatcagagaaaaaccattacagcaacaacaacctcctcctcctactgctgtcgtcgaagaaatgccctatgttcctccgcctaggagggggaccaaacgcccccaccccgtaaatgatgagaatggtgaggtgcacataagaaaacgggtgaggcaaccgagaagggtaagggtacagtattcgccagagccaggcccttcaacatctgcacaagcttatgaacaacaacaacaacaacaacaacgtgaactgtttgctattcagtcaaatcagctgaccatgactcagcggattgaacggctatacatcaaatgcaaccattatgcagatcgtatgggcgttcggggaaatacaattaataccgcaaacggcaaaccgttggcgcatagcaatttgcgaatggccatcaagtatataatagaccggagagcgggccgccccaccattaaaccaccaggagcgaacctattggaagagcggcttaggaaggacccaattttgtattcatggacggccccaccaaagagaccatcacagagcaaaaccacccgaacggaacggacaatcaagaaggaatttcgcccaaaaaatggagctgatcaacaccactcttgacaaaatgtacaatgatccatcatccccagcggcattcgcaggtgttacagcgctgtggaaagaggcgcgaaagacgattaaa

SEQ ID NO: 66780 - DNA, 1217 bp, Heterodera glycines
ctctttccaaaattggtggcgatgagttggctgacagtgtgcaaatgcgtcttcttcgtgatgaaaatgcgcgtcttctctcagcgctcggcagtgttaaggcggacaaagccgtgctgaagaaacagttggaccaactgcagcagaacgacgcattggcggagcaccaacagaccaatgttttgaagcaggtatttattggcacaagacgaattttaaacactaatttttctcaattcgcttttctctcattaattgaaaaaattttaagaaattcgaagccgtaattaacgaatgacagaaaattaaagatttttttgaataatcgacaaagcctccattcctggtttttacatttttttcaatcaaaaattcatagtttggtttttcagataaattattaaccgattacaacaaaaattgtcggaacaggtcgttctcccctgcgtcgtttcccccttaaaattaaaaaaaagtttggcaaattttctaaaaatcgttgaaaactttttcgaaatttttttaaattttccgatggggaaacgacagagggggttgaatgaactgcacctaaaaaagccttcaatggttaaatgtttttttttcagtcgaaactctcaccgacgagaacggaaaagtcgcagcaacggcatgtgttcactttgcacgacaacaacaacggattcactgggtgcacgtcggcgcacaaccaacaacataaatcaccgcaaaacatcagcaacagaaacagccgccgctgttccccccgctgcccacacaaccggcactgtcctcctccccctcctcgtgttcatcaccagcatcatcatcatccgccgcactgtcatcatcgcccgcaattcctccatcgtcttcgtcgttgtcccatgtatcgtcttcgtcttcctcattttccacaattccgccacgtccgcccgccatccgcgcgtccgccagctttccgctccatctcggctcttccccctcctcgcctcctgtttcattgtccttccatcaacaccaccattcgtcctcccctccatcggccagtggtgctgttgttgttgttggcggtggtgttgacaacaagaaacggcccaccaccgcgccggagggcagcagcagcaaccgaaggacggtggtggcaaacaacgggggacgaacaacgatgctcggggcaaaaggcattagcagcagtaacagccaacggcacatga

SEQ ID NO: 66781 - DNA, 531 bp, Heterodera glycines
atgtgtgtccaatcggcacccgaaacacgcgcaaacaccgaattacgtcaggctgtccaggacaaacttgacgttgcacaaattcaactgaggaccaagtgagtcattccctaactgccccctttttggacaaaatttctgggaaccaaaaaaactttaaaaatttcaaaattttcagctattttctggaaaatgtagcacttcatctttaaagctttttttattggttacgatttttttgaaaaactccggttcgaggcccccagctgggtttatttcacagtaaatacggatgcataaattctcatttcagagcgctgctcgagtcggacgccggcattgatgtggagatgacaccccgtggtcgtgaggtgctggacacgctcagcttccagctgtgctcactgaccgacctgtaccgggtggcgaacgcgtacggactggaggaggtgaagctgagtgtgctgcactgtgccggccgttacgatgccgaagtggtggagggcgtgtggcgtgacttcttgcaaaaag

SEQ ID NO: 66782 - DNA, 672 bp, Heterodera glycines
atgaatcgctacaccaaaatggtcgacgacgtaacgggtgagtggtgtgttgaaaatttcagggaatgccatatgtttgttgaatttagtcaaacaaaaaaggatttatgacccaaaaattctgttctattttgcgatgcgcaatttccgtactgaatttttctgtgattttgtggggccaactaagaaaaatcagaggtccaaattaattaatgatttatatagcatttaatgagtgttaattatgccattccattgtgattaagcacgccttttaaagacgtccattcttcccgagcacatgaaaacatttacgcggaaagagtttcgtgaagcgccaaaaattacagacgaattggcggccgatgatgagcttatggtgagaaaagtgttatttttattaaaaaataatttgtgttttaaattggtttctaattatttttagccatatatgccacgaccgtattacagccgacccaacagattggacaaggactattttgactttgacttgcaacattccgtcgacatgtaaatgattttagaaattatttttattttattgacaaaatacgtccaattttaaggtaccgtagaccagaaggaaaatatttaccaacaccgtaaatttaattttatttttaatttcacaaaaataattaacacaataaa

SEQ ID NO: 66783 - DNA, 612 bp, Heterodera glycines
tctgtattctgtgcattttgtgtaattggtacgacccgggaatgacaaggcatttctctttttctatttacgtaagactttgccctgataaaatgttctctggataacagaagtttgaccggaagttatgcgaccaaaggaagcaacgaaaccgtcgcaacagtgctcaagttgatgaaggtcggacttttggaagggtacgccgtgagacgcatcaaaatgttcaacgaccgcgtgtttctgtcacgctacagacggagttattggttcgggacgagatattacgctttggacaacaacttttttcttgacactcgcgaaacatgcgcctatcgaatgagggaggaagagcgggacggattggaatacgaagagaatgcggacgaaccggtgctggacattgtttaccagtgagtagttgtgtgcaatttgacaagagatttgcaaaaagaatggatattgaacggaacacagatgccaaaagtatgcccagttttgctgcggattggattgctgcaaccgattctgaccaatgggaaccgatcgccatggacccaaagcctatacgctccacgcccccccccctccatttggtgcttgcccttttgagtg

SEQ ID NO: 66784 - DNA, 845 bp, Heterodera glycines
atcattcggtccgagcctatcttcggcttcatccctaggattcgcttcagtgacaagggttcctacgtcgaatcggccaccaaagactacgaccatgtgagtcctccttttcaattatttactcctttttctcgcttaagatggccttcaaatatttgtcatgggcactctttccgcttttgggcagttacgccgtctattcgctggtgtacgatgagcagaagggctggtacagctgggttctgtgagtttgtcggcgcattttccctttgtcattatttccttcttcaagtggcatgttgtacggctttctgttgacattcggctttattatggtacggatattcaaaattcccattcaattagcaaaaacgccgttcagatgactccgcaattgttcatcaattacaaattgaaatcggtggcccatttgccgtggcgaatgctcacttataaattcatcaacacttttattgtgaggccactcaaacgatactcatttagtcccctcttctattaaaaggatgacctcttcgcctttgtcattcgaatgcccacactttaccggctcggctgttttcgcgacgacatcattttcctggtccattaaatggctttgtagtgcgatatttgggaacctgcatgcgcagattgaccgtcataaaatttaaaatatctaaatctgcaaaaatctgtccgcaaacttttttcagtactcgaaaccccttttttaagatttacatttaccaacgatggatttaccgagtggacccgaaacgtgtcaacgaattcggcaccactggcgatgatcagacgggcacggaggaatttcgggcatcgaggcg

SEQ ID NO: 66785 - DNA, 864 bp, Heterodera glycines
atgagtaagttctgagattcatatatttttcacgaattttccagaaaatttaatcaattttttttacaaataattaattgctccttgaaattccaatcaaaaccaccaaacttcttatggcgaacaaaagttttaaaagaaaacaaaaaaaaaagtcaaaatagcattaatttaatgtaaaagatttaagcaaacctttattttgaattgaaaaaatatttaaataaatataataaaaatgcgtgcctcaatgccgcgtttttgccgccacttgagccccggacaagccatccgccggcataaaaggacgagcccgaagtgaaagcagtggtccaataagccaaaaagaacatacagagccctgcgagcacagcgattgggatcaaagtgcggttgaaaaactaaaatcggaagcaaatgccaccatttgggaaagtgatcaaatggggcgtacggttgtcatactgtaccgtggtggccgggtcaaagcgcgggtatttgtcatggccaagcacttgccacccaagcccatggctaagctctccgatttgtgagtcgagcatttctacaatacattaataaaattaaactcaaaataaaatatttttcacccgataaaatttggttggaaagtaaaggtttgtcgggttttttgtccattgaaatcttaattaggaaacagattttaattgataattcaattaaaatgaaatcaaaaactcacagcatcatgtggcaaaacgacaaagaaacggaagtggaggatgcgatgctcacgacgaggatatccatccaaaaggacaatttgatgcttggagaaggagacactgcagcagaaaaaggagataaaattgtttaaataaa

SEQ ID NO: 66786 - DNA, 339 bp, Heterodera glycines
tgcgatgccaaaaaagatggcgaaataaatctgcgcgagttcaaatgctttgttaaatcactgctcgcctcatatttggtggacgaggaccggaacaaatgcatcacggaggaggagctggagagtttttacaaagaatgtggattaaaagaaatggaagaggaaatgatgggagacggatcagtgcgaaaagagtgatcggggagaggacattgggaaaagagcgatcaattgataatgtgatcaatcgataatgcctagcaataatatggaatttatcggtataagatatatgattagaatggtcacgtagaaataaataaacgacggtgattagta

SEQ ID NO: 66787 - DNA, 1922 bp, Heterodera glycines
tatttacatgatgaaaaacaataattatttttgttaattaatttttcatatattttttattttatttatcgctactggccaaaacagccgtctcttccgatgaaaaatataacaacagctgctcattttttggccatttgtgctcaaatgctgcaaaagtgaagacagcataaacaggaaaaaataacaactgccattatttggcaaaaagtggaaataaaatgatgaccctcaaatgtttttaggaccaaattttgaaaaaagagagcaaagccatgcccaaccaaatgaatgggaataattatgttttttccttaaatattaaggaaatattttttttgtgaataaagaattgaatggcaaaattcgttgttttcatttttacgttggcattttttgcgagcgcaacaaatggccaagttgtgacgggacaatccgaccgaacgcagcaaggcactttagcatttgaagccatttatcggaaataaaaaataaataaaattaaaataatttaataagagatttatttttcttccaaattatatatattaaaagttaatttgtgcagaacttgcgctgtttggctggacagttgggctaagaacggcctattgccagcaggtgccagcccaagaattagtcgatccgttcaaagatgcagttgtacggatgctgaacagacattgccgaaatgcgtcggcatgccggctgaagaaaaggtcggcggatgtttaaaagggataattaatatgtgtttttgtggtttcaaatactggacaatgaatgagtttttaaaaagatatttatagtagaaacaaatttgcgtaattttacggatttatgtaaaaaaaaatttattcccctacaaatgaaaaacctaatccaaaaaattaaaattttatttaaacaattttatctcctttttctgctgcagtgtctccttctccaagcatcaaattgtccttttggatggatatcctcgtcgtgagcatcgcatcctccacttccgtttctttgtcgttttgccacatgatgctgtgagtttttgatttcattttaattgaattatcaattaaaatctgtttcctaattaagatttcaatggacaaaaaacccgacaaacctttactttccaaccaaattttatcgggtgaaaaatattttattttgagtttaattttattaatgtattgtagaaatgctcgactcacaaatcggagagcttagccatgggcttgggtggcaagtgcttggccatgacaaatacccgcgctttgacccggccaccacggtacagtatgacaaccgtacgccccatttgatcactttcccaaatggtggcatttgcttccgattttagtttttcaaccgcactttgatcccaatcgctgtgctcgcagggctctgtatgttctttttggcttattggaccactgctttcacttcgggctcgtccttttatgccggcggatggcttgtccggggctcaagtggcggcaaaaacgcggcattgaggcacgcatttttattatatttatttaaatattttttcaattcaaaataaaggtttgcttaaatcttttacattaaattaatgctattttgacttttttttttgttttcttttaaaacttttgttcgccataagaagtttggtggttttgattggaatttcaaggagcaattaattatttgtaaaaaaaattgattaaattttctggaaaattcgtgaaaaatatatgaatctcagaacttactcatccttaaaatcctacaaagctgaaaattcggaaatttttgattgtttacgattggctatttccaataaaactcagattattgtggtaaaaatggcatattgcctattccaaaagcttatctctcacctttagaagaacaatggaaatcattgaagaacaaaa

SEQ ID NO: 66788 - DNA, 623 bp, Heterodera glycines
atgccaatcattgcgccgaatgtcgaagaaaaagccgcagtcgaccaacaacaacagcaaaaagttgccaaaaaaggtgccacaaacattcagccacaacaacacgaagcgttgcccaccagcggcgccaaagggcctcaggcggcacaaaatggtcggcaaatttccatttcacaattagagtgatgtccgaacaaagtccaccatttaaattaatttttaacatgtaaaacgtaattaacatgctccctttgactaattaatgcacacaaataaaatcctttttttattgaatataaaaaagtataaacaattattttaaataaattaataatacgacaatataaatttaattaatttttttagggatccaacaaaaatatttgggcccggcaaagggttcgctttcttcagtgtccggctcgagcagcacaaaacgccgagagatggaagagatggatgacatggtgcccgaaattgtggtgatgcacgcgcacacctcgtcccaggaaagcagagaaacggcggccagcggaggccgacgcgtgtcgaccgccgcggaaaaagggtatcgagaatctcgacaaaaaagttatgtgtttttcaaaaattacccaggataa

SEQ ID NO: 66789 - DNA, 1038 bp, Heterodera glycines
atgttgctggcaattgtcttttttgtgtgttccattgcttttccccaaccaattttttccgtgataaaatcaaagcccaaaaatttggtattgatcgaccgccaaatttatgagcaaaaattggcagaaaatgatggcactggggaattgcgcgagtttatccaaaaattggaggaccaaaacgaaacgatggccaaagtgatagaaaaatgtgaagcaatcgaagaacgggaagacgcgaaattggccaaaatttacttcagtttaaaaacaaaactcggagaaataaaaggaggagaaggtaattgggtaattaaattaattaaggatgatttaaatgggcaattaaattaattagcgaggtaaataagtaattaatgagaagaatggtaattgggtaattatttaaaaatttaattataattaacagggattctttttttatgtaaatacattttttttcctggattctccatagcctaattagtaggaaaaacactttcttttttgtgtttgcgaacaaaaatcgggacttttatttacattttttttcatattttgagaatttatataaatttcttgtgaaatttagatttttttttgagaaatatacttctaaaaaatcaattttttttcaaaaacagataccaaaaattaatttttaaagtactaaaaagtgattctaggcctatttgggtcatttttattgcattcctatttcaccctttacgaagaatttttccaaaaaaaataaccgttaaaaaaatttttatacatattttcgtacatatttgggagtttttgtacatatttcatacatattttagcattttttatacatattttatttacatatttcgcgatttttcttacataaaaaaagaatccctgataattaaagtattagaatctgtgtgtgatgtagcagcagttgagagactaagaaaaaatgcggtcgaagcagtgtttctgttagccaaacgtatgaaaatccaacgggagaaaattgaagacaaagcaaacaaaaatgaaaataaa

SEQ ID NO: 66790 - DNA, 283 bp, Heterodera glycines
atggcgcacccagccggagatgtggtgagcgattggtgcttttcattttcttctatgtcatttcattttttcaatttttcagaccgacgcccaagtgctggagatgtcttccgaccaaattgacgaacgcgtacgacagctcgacgaagaaattcgcgtcatgagggacgaaatgcgcaaaattgcgtacaacatcaaaacaatgggaacgaagacgaaggagaacaacaaacagatgcagaaagtgagcaaacaaacaaaaggaggaacgacaaatttatga

SEQ ID NO: 66791 - DNA, 498 bp, Heterodera glycines
atgaacaacgagaatggaactcttccgagtgtcagtaccattaaaaagaaagccaatgccacggggggaggttatggcgtcgtaattcattccttcgattcgcaaaacaaaaacagtgcacaaagcattgtctacgtggaccacagtctgtccattcattcagactgactctcggtttgctcattcgctgctttttgttcagatcgacctctttatgttgtgccacgctatctcttcgacgtcacttatctgaccaaccaaggcttctccaagtcgcaagtgaacaaacggtccatcgaactcggattcggagctaacatccaatttgaatcccgaggcaaccaaattgtctatttcgaccgatgttccaagggacaggactggatcaagattggtgaacaactgctcttacaggacaaggacaggcgatttttttttgaagacaaggcaaagaattacgtgaatataaaatcaaaagcccattcttggtcctcttaa

SEQ ID NO: 66792 - DNA, 345 bp, Heterodera glycines
atgccgataaaaaggcggaaaagatggattgattttgtgctttttgtggatcagaaagttttttctaattgatttcatctttgatagagttttatgttgaaaaaaaatgtttagatttttgtggatttaaaaaaatttaattaaaatcaaaaaaatgacatttttagaaaataattgctctaatttttattgggttcaaaaatgtgatggagttctcagaatttttctgtcggtacttatccaaatttaaaaaagtaatgtaatgaaaaaaattattaaatttttaattaattgaaagactaccacttttttttacaaaaaatcaaaataatattgaataataaa

SEQ ID NO: 66793 - DNA, 1157 bp, Heterodera glycines
ttttgtgcccagccaagcggagaatggtcgttggatggtctgtttggcggcacacgaattgtacgggcacgagtcgcgcagtgccagcattcagttggatgtgctgtacgcgccaaaagtgcgcattgaaaccatcccggaggccagtcaggtgcaattttgaaatttggaaaatgtaaaaatttttgttttgggtcggtcgtccgagtcatttttaaaatttctaaaaaacttttggattcattcttcaatttataccggcaaaagttggccgaacaataataatgtcaattatatttcctttttgcctaaataattatgtttttctcttatgaagcaaaatattaattaaatttatataagcaaaattttcatttattagaaattacagatttacgaaggcgggtacatccgattgcattgtgccaccgatgcacgtccgaatgatgttaaattgcgctggagttgggacggcgagcccagacggttggaggtggtggacgcgcaggtaaattattaattagtgaattaatttaaatagcaatcataaaataaacaatacaaatctaaaatcattggttgttaatacctaagaatttataatgtttatgaatttttatcaaagcttcacagatctgaggacaaaacgcattttgtggttttaatgagtcagggagggtttttttctattttgaaatgaggatctgttattttattttataatagattagggagttttcgctgattatttttaaaatatttccaaacatggttttctttaaagattgattttttgatgatttaaaaaaaaattggtaatcttatcgattttccaaactttgatcgcttttatctgatcaatatgggtgtgggaaaaagccaaaggttttcagaagtaatcgaggaaattttgctgcaatttcacgaatcacctaaaattttcaattatttttctggaattacaaatctatttatattaaatatttcatcaattaatattatttattaaaaattgaaattattataataaagcattttttaatttaagaatgttctgattaacggactacgattcaacgacaatggacgtcgtgtgacgtgcacagcggagaacaccatcgatgttggcaccggcgtgttcgagttggacgtgccat

SEQ ID NO: 66794 - DNA, 944 bp, Heterodera glycines
  unsure (1)..(944): unsure at all n locations
ttcggaatatgcgagttcggccatttttcaccgcccattttttcccaaaagaattttcctccgtttttaggaccgtgtcgaatacagtcgcacttggcagggcatttattttaacatcgccggccattttttctccgtttattgcatatggaagctgatcatttgcacggcaagttcattttttataaattttgtttgaaatttaccttttttcaggttaatattgtgttcgaccgcgtcggaaaggtcgacccaatcaccaaaggcattgaaatcattgtcaaacactttggctaccaaattgacgtaagtcaattgcctttgtttttgctaatcatttgctggcaaatgccttttttcatcgaatttcccaatttggccctttttaggtccctttttggtcccagcagtgctcctttttggtgatcggtctgatcgccgtcacatccatccgcggccttttgctgaccatcgccaaattcttcaacgccatttccaatcgccagtcctccaacctcattgtgctggtccttgcccatgtcatggtctgttgtgccgatttgaggactgttcagtgccaaaaattggcatttttttaatttcagggaatgtatttcgtgtccagcgtccttctgattcggatgaatatgccgcccgaatatcggtaaacctatcaaattactggcaaaatatgctattttaatcaaaaaaaaaagtttttcctggacaatttattaacttacggtctttcaaatcgactattaaaaaatgtcagacatttgctttctctctctctctctgttcagaacgatcatcaccgaagtgcttgnggaactccagttcaatttctaccaccgatggttcgatgtgattttctcctttccgcactctcttccattctctttttgtacttggcgcacaaaagacaccaaatcaataggcaa

SEQ ID NO: 66795 - DNA, 1582 bp, Heterodera glycines
  unsure (1)..(1582): unsure at all n locations
tctccccagagcggagcgcatttttcgccacaaaaccaagcgccctccgggcgtccagtgttgactcagaacaactaagctgatcgcacggtcttgtaccggcgacgtgtctttcaagtgtctgccttatcaactttcgatggtagtgtatctgactaccatggtgatgacgggtaacggaggataagggttcgactccggagaaggggcctgagaaatggccactacgtctaaggatggcagcaggcgcgcaaattacccactctcaacgcgaggaggtagtgacgagaaataacgagaccgatctcttatgaggccggtcatcggaatgggtacaatttaaaccctttaacgagtatctatgagagggcaagtctggtgccagcagccgcggtaattccagctctcaaaatgcatagaattattgctgcggttaaaaagctcgtagttggatctgtgctagccgtccggtgcacactttgtgtgttactggttcggttggcttttctgccggtctctccccggcgttggcctttaccggtcggcgtcggtgggctggcgagtttactttgaacaaatcagagtgcttcaaacaggcgtttcgcttgaatgttcgtgcatggaataatagaagaggatttcggtccgattttattggttttgctgaccgagataatggttaacagagacaaacggggccattcgtattgctacgtgagaggtgaaattcttggaccgtagcaagacggactacagcgaaagcatttggcaangaatgtcttctattaatcaagaacgaaagtcagaggttcgaaggcgatcagataccgccctagttctgaccgtaaacgatgccaactagcgatccgccggcggatttattcgccctggtggggagcttcccggaaacgaaagtcttccggttccgggggaagtatggttgcaaagctgaaacttaaaggaattgacggaagggcaccaccaggagtggagcctgcggcttaatttgactcaacacggggaaactcacccggcccggacaccgtaaggattgacagattgatagctttttcatgattcggtggatggtggtgcatggccgttcttagttcgtggagcgatttgtctggtttattccgataacgagcgagactctagcctactaaatagttggctcattgcttctgtgggcacaacttcttagagggattttcggtgttcagccgcacgaaattgagcaataacaggtctgtgatgcccttagatgtccggggctgcacgcgcgctacactggcaaaatcagcgtgcttgtccttccccgaaaggggttggtaaaccggtgaaaatttgccgtgattgggatcggacattgcaattattgtccgtgaacgaggaattccttgtaggggcgagtcatcaactcgctctgaatacgtccctgccctttgtacacaccgcccgtcgctgcccgggactgagccatttcgagaaattcggggacggttagtgttccggcttcggtcggtatgcagactggaaccgatttaatcgcagtggcttgaaccgggcaaaagtcgtaaca

SEQ ID NO: 66796 - DNA, 1558 bp, Heterodera glycines
  unsure (1)..(1558): unsure at all n locations
cggacggggcattggtggtgccaacgctagcccacaggacnagcaggtaggtggtgaataggaatcacttgggtaatgatccagcagcaggttcacctacagctaccttgttacgacttttgcccggttcaagccactgcgattaaatcggttccagtctgcataccgaccgaagccggaacactaaccgtccccgaatttctcgaaatggctcagtcccgggcagcgacgggcggtgtgtacaaagggcagggacgtattcagagcgagttgatgactcgcccctacaaggaattcctcgttcacggacaataattgcaatgtccgatcccaatcacggcaaattttcaccggtttaccaacccctttcggggaaggacaagcacgctgattttgccagtgtagcgcgcgtgcagccccggacatctaagggcatcacagacctgttattgctcaatttcgtgcggctgaacaccgaaaatccctctaagaagttgtgcccacagaagcaatgagccaactatttagtaggctagagtctcgctcgttatcggaataaaccagacaaatcgctccacgaactaagaacggccatgcaccaccatccaccgaatcatgaaaaagctatcaatctgtcaatccttacggtgtccgggccgggtgagtttccccgtgttgagtcaaattaagccgcaggctccactcctggtggtgcccttccgtcaattcctttaagtttcagctttgcaaccatacttcccccggaaccggaagactttcgtttccgggaagctccccaccagggcgaataaatccgccggcggatcgctagttggcatcgtttacggtcagaactagggcggtatctgatcgccttcgaacctctgactttcgttcttgattaatagaagacattcnttgccaaatgctttcgctgtagtccgtcttgctacggtccaagaatttcacctctcacgtagcaatacgaatggccccgtttgtctctgttaaccattatctcggtcagcaaaaccaataaaatcggaccgaaatcctcttctattattccatgcacgaacattcaagcgaaacgcctgtttgaagcactctgatttgttcaaagtaaactcgccagcccaccgacgccgaccggtaaaggccaacgccggggagagaccggcagaaaagccaaccgaaccagtaacacacaaagtgtgcaccggacggctagcacagatccaactacgagctttttaaccgcagcaataattctatgcattttgagagctggaattaccgcggctgctggcaccagacttgccctctcatagatactcgttaaagggtttaaattgtacccattccgatgaccggcctcataagagatcggtctcgttatttctcgtcactacctcctcgcgttgagagtgggtaatttgcgcgcctgctgccatccttagacgtagtggccatttctcaggccccttctccggagtcgaacccttatcctccgttacccgtcatcaccatggtagtcagatacactaccatcgaaagt

SEQ ID NO: 66797 - DNA, 495 bp, Heterodera glycines
ttctgctcctcgctagcgcaatggtctcaatgctttgcctcatctccgggctgttccttctcccgccggacattcactctttcagcagcacaccttcagagcaaggcgtcgattggcaaattgaatttaatttcgaatttctttgtatataaaaccgttaatttaacagatgccaaccgccaaattccgctgacaaccgtcggccgattgtcctgtgtcactgaggcgggatgcgttttgtctgacacctcgcaactgaattttttggtggtcggcgacatcggaggtttgttttttgggcacattttcattcctcaaaaacatgcctttagctcaacacaattttcaaaatttcagctgtgttttgttcttttaacataaaattgaaaaataaaatgcgaaaagcggaaaaaatttagagatgtaaaacgtaacaattcacagtttttgttgttttaaacattatttttaggccttcccgtctttccgtattat

SEQ ID NO: 66798 - DNA, 866 bp, Heterodera glycines
atgtttaaaactgcaatgcaactgtcaattattgaaaatggaatttgttacacaattattatcatttgtggattcaaaattgccaaatttgtcaataaaaatgcatacagaaatgcaacatgtggacaacaggttcacaaacagttgacaatcaatttgataattaaggtctattttaattaaaaagaacgatttttaaaataatgaaatttttagaaatatattttaaaaattatatgataaaaattctcaatttgaaaaacttcttaagaaaattggtagaaatttttaataatttattgataaaattgctaaaatctattaaaaaaaaatcaaatgcatttttaaacaaggagttatcattctaaaagcggggcttaatgatgcccaaaacaaatgagatttcaaaaagaaatctgataccgtacactcaattacaaaatttggccatttaattttttttttaattttgcaatttgcttttaggccctgctaccgttagcgatgaacatcctcaacttttccgtcgccatacaactgctattcttccagacggaaatgtcgccaaattttttgtttcttcaaatgtgtgcgtccgttcccgcctattggctgcccgtgctcaacccgttggttacgatatgtacagtcagcgactaccgtagtgctgtgaccatactcattcggtccacaacgagaagccgaagtcgggattccggtgtttttgctgctgctgatctgccccaaattcgtgtaatccgcccaacgaattatgccaatccgatcatcaacaattatgtttaatgaaggagttatttgtaccaaaattgcatttttttttcccctcttgaagcaaaatttcttta

SEQ ID NO: 66799 - DNA, 152 bp, Heterodera glycines
tcgctgttcaccttcgagctgccctacgcgtactccgccgacgaccggctcgacctgaacagatacgacccgtacgagctgttggcccgctgccggcactttgtgcagcagagggacctgctgaacgcagtgcgggtggccaatctgatcag

SEQ ID NO: 66800 - DNA, 429 bp, Heterodera glycines
taagtaaaatcgtaattacgctcaaaaagcttttcaaacaattttatgcgcttccaattccttctacaatcgcctttatacatcccattatgagcgctaaaattatcagagtgccgaaaatcgcatgtgatctaagcctagcaaaaaatggtgtaagtaaaatcgtaattacgctcaaaaagctcctcaaacaattttagcgcttccaattccttctacaatcgcctttatacatcccattatgagcgctaaaattatcagagtgccgaaaatcgcatgtgatctaagcctagcaaaaaatggtgtaagtaaaaatagtaattacgctcaaaaagctcctcaaacaattttagcgcttccaattccttctacaatcgcctttatacatcccattatgagcgctaaaattatcagagtgccgaaaatcgc

SEQ ID NO: 66801 - DNA, 242 bp, Heterodera glycines
ttaaacaaattaagcaactaattgctaacatgacatctttgaacaccacggcaccaaataattatgaactatttcttttgttctgcggcgatgccgttgaattattgaccacatttgttggcattccgttgtccattgccaatctgattttcggtggctcgcacatcggtcatccacccgaacatcgaaagccattctcatcttccagagtttctttattctcttggtaaatattgaataaa

SEQ ID NO: 66802 - DNA, 834 bp, Heterodera glycines
atgggaaagaaacattcaacgagagaatggaataaaattgaaagaaaaattgcaaaaaaattgggtacaaatcggaacaaaatttatgaatggaaaagagaatttggaatgatcaaaaagcattattatacggatgaggaaaagcgtaaaatattaaagcgatttgatcaattatatgacaaaataaatgaaaaattaaataaaaaattgaagggaaaaagaaaaatatgtcaaaaaataatagcaaaacatttgggcacaaatatcagcagtatttattattggaagaaacaatttcaaaaaggaaactcatcagtgaacaatcaaaaaactggtgatgaaaaaagagaaattgttgaaaaatattttaaaacaaaaataaaatttatgcaaaatggaaaacattcactgaaggaatggaaagaatttagagcaaaaattaaacaaatgtttggtgttaattattggacaattgaaagataactgtcaaaaaaataagtgaatttatcaaaaaaatcacattttttatccatttcgctagtacaattctaatcaaacgtgctaaaatttgaggccaattggtcggagggggctcgtctcttttgctttgcttcgttcggcttttcctcttctcggtccaaataattaattagcacagaaaggacaaacggggccaatgcttattaattaaggacggcgaaatagtcgggaacagttcaatttatttaatttaaattcaatgcgaagacgacggcaattaagagtccacacacaaaatatttaaaggagaaaaagtctgaggtccaaatttttgtgaacaccaaataagaatga

SEQ ID NO: 66803 - DNA, 1070 bp, Heterodera glycines
gtccggggcaaatttttaattggcatatttgtgcccgatttgggtgtccatcaatttcattcttggccctctgcaagcagttggcaacgaatttgcgcacattcaaatgctaccgtaccaagagcagctggtgtacgatagcaaattgccagaattacgggctaattgacggtcccaccgtccagggcaaggccgtctgcaggcaaatttctttaatattttttttcaaaaaataatttacgaaatttaataaaagttcgttttcaattaaaaatgttttttttataaaaaaaccatgaattaaaaataaaaaatacgaggtttacattttaaagccatttaaaataattgtctaattgagctgaaattttacaaaaaaaagacttttgctcaaaaataaaaaaagcgtatttttcagaattattttcattgtcatcaagatttgatcaatgttggaattttttgaaattaactatgaatgttacagtctaaaaaaactaataaacaaattttcgtttaccactaagattcttaaatgattttttcatctttttgttccaaaaaattaaaaattgtaattaagtaacaaaaaaaaaaaatttaatttttaatttcgtaacgcctttttatcatttaaacttaattttaaaaatgcgtaatacattttttgaaaatttttttttgattagattcgctttcgggaccgttggcgttccgtctgtacccaaatgacaaattggaccagtattgacacgggcaccgcgtgccgtaccatgggctatgatgacggcgcattttggcgcttttttcagcgcaacaacgacacttacccatttgtaatgccggcgcccaaatgtacacaacgccaaagtgggaaaattaaaaaattttaatgccaaatttaattttatttattttttgaaatttaagactctctgtggaactgtccaggctttgaggacaaagaacatattccgttgtccgaaaatttgtgccaaggtgaggacgacattggcatttattgttggggaaggccaactttcactggatgggctcgccattggaaaggt

SEQ ID NO: 66804 - DNA, 510 bp, Heterodera glycines
atgatcatcctcggtcgtgattcgctggtcaaagacgagaccgttgatcagatcatggaacagtgccaacggatccaacaactgtgttcccgttttccgtccgtttcgttcatttggctgcctccaccgtatgttcgtcagtacgatttggcctatcacgaaatgatcggccgtctttctgaactgctcggcgattggtttgttttcgtgactccgtttggtaggagtttgattgaaatctggcattatggcgattcctttgatcggagtagtgtcaatgcagatggatggatgactgaaaatggcattaaagcattgtcggcgtggatcagcacacaaattccgaaatggccaaacaacagacaacttgggaggattcgaacggtccgctccagcgtttcggtcactaggagagtctatgggttgggtctatgcgaccgccgcccgaattctcgttctcgatcgccgtttagacgccgcgacaaccgccaatcacaaccattcgtttga

SEQ ID NO: 66805 - DNA, 1430 bp, Heterodera glycines
atgaaaatattattaatatttttattattatgcgcattaatattcaaaaaagcaattaaccaaattgaggctggcaaaattatccaagaaaaaagttttgctgaaatatttggccaaagatgggacgacggagcagaagaagaaaacatctgtcaaaatgatcaaataattcatggagaaattgctgatcagaataaccaatttggacaaaatgttcgtcaatttgatcagaattttgatgaaaatgtggaagtgaaagaagaggagagtgaagaaatgtccacagattatgatgaattgggcgaccaattgccaatgccaacaaataatggacaaagttgtgataaattttcaaatgaaactaataaaaataaaagagaaactgtggaacaatttcataaaattaaagaaaaagttaagcaaatgggaaagaaatattcaaagaaagaatggactaaaattgaaagaaaaattgcaaaaaaattgggcgtcagtcaagagaaaatttacaaatggaaaagagaatttggaatgatgaagaacaaaaattattcagttgaagaaaaaagaataatgttaaagcaatttgatcaaatatatgcaaaattaaaaatgaaattaaatgaaaaattggagggaaaaagaaaaaaatgcaaaaaaataatagcaaaatatttggacattgatattagcagtatttataaatggaagaaagaaataaaagttggaaaaatggtgaaaaatcaaaaaaatgatgatgaaaaaacggaaattgttgaaaaatattttaaaataaaaaatgaatttatgaaaaatggaaaacattcacgaaaagaatggaaagaattttatataaaaattaaacaaaagtttggtgtgatttttcagacaattgaaaaatgggcaaagaatttaggaattgaacaaaataattcaaaaggtgaattttaaataatgttttaaaaatttttttgtttttttttcaatttacagagcgaaacatgttatcaattgctgaaaaaatggaagtcattaaacaatattatcaaatcaaaaaacaaaatccaaaattcaaagaatacgaaattgccgcaaaattgggaattccaatgagctcattagacaaatacaaaaccaaatatggcaatgaatccaaaaacaaattgctataatgaggacaattattattattatcccaagaagattaaatgaaaaattacaatgaaaaaaatttgaaaatttcatttttttcttgagaatttgtttaaatttgagtttgtgataaaagtttaatctctttttttcatctgtttacaaaaatattttaatcattaaaagcgtcgaatggtctaatgttttaggtgattaagtttaaaattatattaaatgttcatattattttaatcttgaaaaattggcaaaatatgtaa

SEQ ID NO: 66806 - DNA, 854 bp, Heterodera glycines
atgctgcggaatattggcattttgtcattgttggcatttttcttcctctgtggcacaattaatggacaacaaccgccgctggccaatgggttggagccgactcgacaacgaattcgcaacactctcggcggtttctactcgggcaatgtgacactgtacttccgtaactcgccgtacaggtgccatgaaaaaaatgggaaatttattcaaaaaagggcgggacaggggaaataggtaaattggacacaaaatgtaaaatttgggtcgcaggcgagtcgtgatcccacccaaatcccgatcccgaacaatccctaagattttgagaaaacgatcgggagcgatcccgagtcgtggtcccattcaaattccgataccgaacaatccctaagattttggaaaaacgatcgggagggatcccgagtcgtggtcccattcaaatcccgatcctgaccaatcccgtggcttttatttcggaatcccgctggatcatcgggatttgcttaaaattaaaatttaaatgttgtcgcccaggcggtgccgatgggcgccgccggggaaagaaaattttgtaaaattttaactaaaatattctgaaatttatagaaaattttttctttctagagttgagcgtgaattaattgtcgaatcgggcgcaacaatcacaattgagacgggcgtacaaatgtattttgacacgggcgttggcatgaaaggtgggtgtaatgtgacaatcggcatttttgatcggcatttttaaaaatgccttaacctggattctatgttgtatgtggacctggaattcctggacaaaaatccagcaaattccaggtccaggcttgtcatggcctggataa

SEQ ID NO: 66807 - DNA, 765 bp, Heterodera glycines
atgaattatgtcttggtatgtaatattaaaattttaaacaaaaattttttcattttacagacattttttgctgaaaaaattttgaattttccgatggaaaatccaagccaaatcgatctgtctccgtttttgcttttctttaattcttcgccctttctccccgccggcgtcgtctcacaacagtggacaaataaatgcatttttcccattcacattttatctatcgtcatcctccgtccgacctctgatgactgtgctgggccaaacagcgctaaggctaacatacccaaaaataaaatgcccacaataaaatgactcatcgatgtaaaaaataattatattttaattttaaatgtatatttttttaatgttttttaatcgacccataactaattgtttattgaaaaagtaattagtagggctgcttaagagtcgaaatttccgagactcgagatcaagacccaacccccccccccccaaaaaaaaaggccgagaaatttcagtacaagtttttttgagaatttttagaatgtatataaatattttcccaacaaaacattttttccaccttttattttattatttttgtgggcaaataattaaataattatcatcattaaatatttcaaaattcataaaaatttaaaaggcctatgctcggcctaacagctaagaccaatccaaagcacccaaaaaaatataaaatattcacaacaaaatgattcatcgatttttaattttaaattaattatttttgaaaataaa

SEQ ID NO: 66808 - DNA, 2890 bp, Heterodera glycines
atggcttttttggaattttgcaataactcagctgcggttgctggtgctgcaccggccgtcgtccaacctcaacacgttcaagacataattccttggtgagaacgccgccttctcgaagcttcttggagtacagccgatctgtttgccatctgtagtcactgattttggatttggcgacacgattgaaaagttctcgaaaagctttttcccattttgcataaattcattttttgtttttaaatattttccaacagtttctcttttttgctcatcagttttttgctttttccatttttctcaattcagctttgtatttgcgtaatgagttttttggaatgtttaaaattttggcaatttcgtcttctttgaattttggattttgttttttgatttaatattgtttaatcttttccattttttcagcaattgataacatttttctctctgtaaattgaaaaaaaaacaaattttttttaaaacattatttaaaattcactttttgaaatgttttgatttatctttaatttctcggcccatttttcaattgccgtataagccacacgaaaattttgtttaatttctgctctaaattcttcccattcttttcgtgaatgttttccattttgcataaattcattttttacttttaaatatttttcaacaatttctcttttttcatcactaattttttgctttttcaccatttttccaacttttatttctttcttccaataaaaaattgttttgatatttgtgcccaaatattttgctattatttttttgcatttttctctttttccttccaatttttcatttaattactagcgaaatggataaaaaatgtgatttttttgataaattcacttattttttgacagtttttttttcaattgttggcacatattttggccttttttgagctttttagcacatattttggagcttttttcaatttttggcacatataaatccgttccctggcaattacaacaaaaaatagaaaaaaaaaaaacaaccttcaaacattatgcataatacttttaacttacataagcaacaaattggaaaatgaatgaaatgccgaataatatataaatttttaagaaatttaaatttatcaaaacctaacaatgaatggccctgaaagcttaaaaatattctcagtcaatccgtgacaccttcactttttctcttgaattcagatttatatctttctaaagatctttttgtaatatttaaaatttccgcaatttggcgatcgttgagctttgggttttggtttttcaattgataatattgttttattttttcagttttttccgcaaatgtataatgcttctgccctgtaatatattaaataataaaaatttttaaatttaattaataaataacaatttgtttaaaaatttcaccctttgaaagaatttgatttaagccaattttcttgtcccattttttctttgcgtgaatgttttccattttgcataaattcattttttattttgaaatatttttcaacaatttcaattttttgctcaaaaattctttgatttttcatagttttcccattttttagttttttcttccattgataaatgcttctgatatttgtgcccaaatgttttgctattattttttggcattttgtcctttttccttccaattttccatttaatttcgtttttaatttgccatatatttgatcaaattgttttacttttttatatttttcatcatccgtataataatgctttttgatcattccaaattctcttttccatttgtaaattttcctttgattttcacccaatttttttgcaatttttctttcaattttctcccattcttttcttgtgaatttctttcccatttgcttaactttttctttaattttatcaaatttttccacaatttctcttttctttttgtcaattccatttgaaaaatgatcagaaatttgtccaaaatttattggcaattgttccaattgatcacaatttgttgcactttcttgtttcacttgcaaattttcatcaaataattgatcaaattgtgtctcatgtaataattgagcattaatttgatcattttttgcctcattttggccatccatttgttcaattcttccattttgatcagtttctttctctccattttcctccgatttttcgtcccatctttggccaaatatttcatcaaagtttttttcatcgtttatctttccagcataaatattatcagcatttttgaaaattaataatgaaaataatattattttaattttcatatttcttaataaacccattaaaatgattagaaatacttttacgaattcatttttattcccatatttatgctgatttattgcatagctttactcagcaaatctacttattttttaaaataatgtttacattttttcgaaattctacttattaatgttttattttttataaattatactcattttgattaaatgaaattatattatatttttttaattattttgaaaggtgtcattttaagaaaattttgaattaaaaattctatttttcaaaaaaagcataaataatataaatttttttttataattttcgaatttttagggtcccgttttaattgccaactcaacaatttcacataatcgtggccatggaattgttattgagagcacattggatggacgagcatttgtcaaccaaagtcgaattgaggtagcaatttaaaaattaaaatgaaatattttggtaatttattttaggctaattatggcgacggaattttttatcgccaaaagcatgacggattgtcgtcaacgcaaaaccgtcttggccttgaaattggcattccgctctcaattttggacaaaaaatcggcattaagtgaataa

SEQ ID NO: 66809 - DNA, 982 bp, Heterodera glycines
atgaaaattaaaataatattattttcattattaattttcaaaaatgctgataatatttatgctggaaagataaacgatgaaaaaaactttgatgaaatatttggccaaagatgggacgaaaaatcggaggaaaatggagagaaagaaactgatcaaaatggaagaattgaacaaatggatggccaaaatgaggcaaaaaatgatcaaattaatgctcaattattacatgagacacaatttgatcaattatttgatgaaaatttgcaagtgaaacaagaaagtgcaacaaattgtgatcaattggaacaattgccaataaattttggacaaatttctgatcatttttcaaatggaattgacaaaaagaaaagagaaattgtggaaaaatttgataaaattaaagaaaaagttaagcaaatgggaaagaaattcacaagaaaagaatgggagaaaattgaaagaaaaattgcaaaaaaattgggtgaaaatcaaaggaaaatttacaaatggaaaagagaatttggaatgatcaaaaagcattattatacggatgatgaaaaatataaaaaagtaaaacaatttgatcaaatatatggcaaattaaaaacgaaattaaatggaaaattggaaggaaaaaggacaaaatgccaaaaaataatagcaaaacatttgggcacaaatatcagaagcatttatcaatggaagaaaaaactaaaaaatgggaaaactatgaaaaatcaaagaatttttgagcaaaaaattgaaattgttgaaaaatatttcaaaataaaaaatgaatttatgcaaaatggaaaacattcacgcaaagaaaaaatgggacaagaaaattggcttaaatcaaattctttcaaagggtgaaatttttaaacaaattgttatttattaattaaatttaaaaatttttattatttaatatattacagggcagaagcattatacatttgcggaaaaaactgaaaaa

SEQ ID NO: 66810 - DNA, 1213 bp, Heterodera glycines
atgctgattgagtttatgaaccaaaaacaattgaaacagcatgttaaagaaccgaccagagaaaatacgattttagacttagtaatgactagtgaatcagaattaattaatgaattaattgtattggaacatttttcaacttccgatcataaaatggtcggatttaaaataaaagaaaaattccggagtaataatcccagtgtttatagaagagattttaaaaatattaagtcgggcgatacttgaaaatcgaattgatttatcaataaactcagtgtacaccgttgatcaaaaatataaagaattcttaaataaagtactgaaattatatgatacttttataccaaatagacctcttaaaacaatcgtatcctcaaaaaataagagatttattttcagagaaattacggttacataagcttgtaagaaaatttcctgaaaaaagtgaaatcatttaaaaattacaaaattatttctaaggaaatgaaaaaacaattgtacaaattaagaaatgaacaagagtcaaaaattatttcccaggggcaaaattcaattaacaaatttattagaaataaattctcaaaagttaatgaaattcctacgttaattgatagtgctggaaatatgttttccagtaatgagcaaaaatgcgaaatattagcagaaatatttcaaaaatcttttttagaaaattcagttgttaatggttcattgactcaatcagcacagaataagactaagctttcggatattgaattaaatgttggcataatttggaatatattaagaaagcttcccaggcgaaattccacttcaccggataacatttcgtacattttattaaaaaattgtgctgagccaattacaaaaatattagctgacatatttcgacttgctttgtattccggtcaaattccggaaatatggcgaacatcattagtggtaccaattttcaaaaaaggcgaaaaaactgatttgttaggcgtttgattctgtaccaattgatttattacttcaaaaaatcaaaaagattgaaattgaaggaaaatttttaatttttataaatgatctgccgccctttattgcaaatgaagcatcatcagttggcataaaaatctatgccgatgatgttaaattatattatgcccatgaaaatgatgataaaacaaatcatttagataaagcagttgaggctttggaaaaatggtcaaaa

SEQ ID NO: 66811 - DNA, 505 bp, Heterodera glycines
atgcagaggtattacccgcctgcctcaaatttaaaaaaatcaaatcactgtcaaactcctcacacgccaaggaataagattttcctaattactccaagcaattcataaaattaaatccgcctctatatattatcatttttaaattaaatacgccaatgacgaacagcaataaaaagaaaatcaaatttgatctttccaacatttccttcctcttccgcctccgtgcggacatcaaacagccgctcacaatcagaagcacttgcggtgcacatcctcatgttcagcccggccaatgcaagaatttggaatttgtcatgagtcatgatgttggaggagattgagtgtattaattaggcccgtacccagaaaatgtgcacaaaatctaataattttaatgaggaagggagaaaacttaaatcgggtcgtgccaaatcgtccgccccttttttggtattcccttagaaagcacccatccgttaccgtaccgccgtttggcatcccttga

SEQ ID NO: 66812 - DNA, 809 bp, Heterodera glycines
atgagcagtgcaatttgttgtcgcaccaaattagtgagtggttggttaatgggggagggggaggggagggtgccaacgcagcagcagtggaaacaccaaatggcggcacaaccgctcgctttttgtttatgttgtgacagccggcggtgcactaatgaattagtgccgtaacgatgtgagggagtaaaaaaaaagagccttcaaatgggacagaaaattttgcatcaattatcttgtttacttaaaaattcataaaaaaaaatttaaaattcataattacgggagccatcagtataaatgagtgtttctttgtcttattgatgccttaaaaataggtgcagcgggaccgggacctgaacaaggacaactgagtaccaaggtcccggttttgaccgggaccaggaaattcccggcttttttcccggtttttccagccaaaaagtcccggtttttcaacccaaaaagtcccggtcccggtcttgcccaaattttccggtcccgctgcactctacttaaaaatttggagactgatctttttttttgtttggatttttatttgtgataaattttccagaattatgtgacacttacatacgcctatgcataaaatctgtttcaaatcttaatttccccaattttaagtatcaaaattgaaaaaacttaaatttgaaaccgattttaagcataggcgcaaatctctgcacacgtgcgggagcgacataagcagaaatgtttgaaaacacagaagaattaatcaatttgtttattcaatttcataaatttgaaaattttaaggaattaaaaataaa

SEQ ID NO: 66813 - DNA, 2467 bp, Heterodera glycines
atgagcgactatcatcatcagcagaagggcggtggtggcagtggctacccacaacatcaatccagctacggatatccggcaatgtgagctatatatgttggcacacaattggtggtcggtcggtgagcaaatgcgatgtatcggcacgggaattccatggaattcttttttggcgattttttgccaagcgttgaccgtgaaagcaaaaaatgattggtgttgcttatggttctcgagtcatgaaaattgcttgtttcggttgaatgggatcgggattctcgagggggattcggtcccagttaaaattgattgcgcgcgaacttttctaaaaacaaatttttgtgggagacagaaatggttcaacagagttcagcagatggagttatatacatacagtagggctaatttacatgatttatgggttcttttctgttttgtgaccccccctgaaattttcaaataaaaagtcatttctagggtaatttggggcgtaggcttagggttcagcttaggcctaggcttaggcttcagcttaggcttaagcttatgcttaagcttaggcttaggcttcagcttaggcttaggcataggcccaatacgtattcagcgacctcgaaaacccataaaaatatgttttccttgtaatttatgaatttcaaatttatgttcgaattcgggttcgggattcggaattttgaaaaataaatgccatattcgtgatcagcgccccaaattaccctagaaatgactttttatttgaaaatttcagggggggtcccaaaaccacaaaaaaagttcgatttatgttttgttttcattcattttttgttgggacttttttatggatttattttgaggatttcaagccgtttattgtggctcctctgttcgcacaaataatctaccaaaaactttttattttccaaggcattgcaacatttctcggtcgtatcttgaactcaccgaattggagcgaaaatgtttagaacaggtagaggaggaagtcgtaaaaattttttcattaatgatcgtaatatttaaatttaattattatttaaattttattttgcagaataataaatcatgatgtagctcaaactttatcatatttttatggtcaaataaaatatttgaggatgttattccgtttaacatcaaaaggttgtttataatttgattaactttgagctaaattatgatttattttctgaaaatgaatttaaaaataataataataaatttaaatttgctattattaactcttattattttcgttttatatgtgctaaaaatttgcacaaatcgtccattgaaccgatcccgatgaaaaaaaaaaattgacataaaggctagcagtctgcaaaaattttcgattttttggttggagtgccatgtgacagaaccgtttagtgaactattagtaagcctcagggcttctagttcacgaggcggggtttatatttaaataaatacggattttgcgaattaattctataacaatagcaaaattaagagaaaatattgacaaaacggtagattaatttattatgtaattaataatagtaattaagagaaaatattgacaaaacggtagattaatttattatgtaattaataatagtaattaagagaaaatattgacaaaacggtagattaatttattatgtaattaataatagtaattaagagaaaatattgacaaaacggtagattaatttattatgtaattaataatagtaattaagagaaaatattgacaaaacggtagattaatttattatgtaattaataatagtaattaagagaaaatattggtgctttctgttgtcctccattgtcactttttgcttgtcaatgcttttggtggtcatttggagggtatgtcaatttgaaagtcatttcaacaaatatttatcttagagtaatggacaaaacatatttatttctttaggcgattaattcgacaaaatgttgatcaaaaaaagtggagaaaaatctcatttcaataaaaaaaatttttttttgtatgaatataaatggaattgatcatcactgttgtttttggcgtgccaaaattttgtcgggcaaaagtttttttcagtttatgtcccaatcaaaaaagttggaaatttatttgttaccaaaaattttcataattctttctaaaatatttttaattaagttacaattatttttcagtaaaataaaaataaaattttattaaattaaaatgccaatttatgatttttgttgcacatataccacagattgtcacccatgtgtgttttcaacagcgcgaacggggcgccggtgttgagccacttgtgcagcaacatgacgacatcgaagggtacaaacaacaacagcaacaagcagccaagggcggtggggtcggcggtatggatcagttgcgcaaggaggagccggtccaaattggttggatgaccgaggccaaggattgggccgg

SEQ ID NO: 66814 - DNA, 388 bp, Heterodera glycines
atgctaccgggacgggatcccggcattcccgatctgggcgttttgtctaaaagaaacgggaccgggagctggttaaaagctccggcgtgggcccctgctggtcccgtccggtctctaataattatggcatggcatacccggcccaatccttggcctcggtcatccaaccaatttggaccggctcctccttgcgcaactgatccataccgccgaccccaccgcccttggctgcttgttgctgttgttgtttgtacccttcgatgtcgtcatgttgctgcacaagtggctcaacaccggcgccccgttcgcgctgttgaaaacacacatgggtgacaatctgtggtatatgtgcaacaaaaatcataaattggcattttaatttaataaa

SEQ ID NO: 66815 - DNA, 2018 bp, Heterodera glycines; identical to SEQ ID NO: 1044

SEQ ID NO: 66816 - DNA, 833 bp, Heterodera glycines
atgggtgggtggggaaggagaggaagtggggtgtctcgtgagcccagcccaggtgccaatgccatgaaatcctttttagccaacattatgcgtgtcatctccatcaaaaactactcgtccgacatccgggttattgtccagctgatgcaataccacaacaaggtgttgttcatacatttttcatgccattatatgcaattttattcaattaatttgcttcttttttttaaggcgtatttgctgaacatcccaagttgggtaagtttttattcatttactataatattttaaattatttttatgatttatatgtaacaaattcaatattcattttgtttcaaggattggcgacggggtgacgatgtgatctgtttggcagagcttaaggtaatctccaaagatgggtagtgagtttttaaaagaattatttgaaaaatacgagagaaaaagtccgagcgtttaggcaatttaaaccgaacataaaatttaatccgggaaaattttttcaatcaatttaattgcgcgttactacatatacatatgtatgtaccggaacccgtcagttggaccccggcacgtttgggccccagcggttttttggctataacttttttctttgtcatccaaatcaaacattgttggtatcattcgaaagctgtaagtgtcctctattagcctgcaaaattttgaaaaattatgtaaaggttcaaaaaaattatggccagaacaactcaaaaaaccagattttccaacttttatggccataaatttgtacaaaattgacgcaattttttgtaaatttgcagactaatagagcatctgaagggctttag

SEQ ID NO: 66817 - DNA, 3210 bp, Heterodera glycines
tcgcctcacatggccgaatggctgaacgaatatttgcgaggtgctggcatggagtaagtaaattcatcaattaacaaattaatgactaggtcatttcgtaaaactgacatattaagtgttttttcaacaattacataatttttatcataaatttaattaaaattaacaaaacatacattcttgttatcattcgatagcaagtaaattttcctctactcgccaagcaaagcaaaatttcaatgaatttcatcaagtttaaaaatatttcttggaaacgaaatacgatagtatgataatttgaaatcttatccctgaatattgattatgaaaattttttttaataaccatttcacagtatatttttttaaagacatttaatttttcaaaattttattaaaattttgaacgagttccaaagtctgtgactgtttcagaatgaagttttctcaattaatgttctacatttctattacaatttaaaaaaatttcaaacaaaatttttcaaaaaaaaaactacaaattctttcgaaaattttgaaaaaatcgcttcaaattttttctttaaatttttctaatatacatacctaattcctaattctaaaagagaattggccccgagaccccaatcgagtgaaccagaaccattacactcttgcatatatctcaactaaccaatcatttgattgattgcattttcaaataaatgccattgactgaccctttctttctctatgctaatttggaggatgtacaccgaaacgatgagtcactcgttcgccggaatgcgcttccgagacgcggctgagtgagtacagcagtactgttgttgtgtggtgcgaatttatatagtaataatttttttttaatatttccctccaataatttgtaaggctagactttcaaaaaattgaaacactccctaaaatggaattcattaaatttttatgaaattaagatgttttttcttgaaatatttaaattttttgttgcttttcctcccccatatacatattatttaattaattaatttgttttgccgtttctgtgcattgtttgtctaaaaaagtcagtcagaattttgaactagatatgagtattatgcaatttattaattaataattttatatatgtaaaatttaatttataattttttgttaatctccttaaaaatatttcccaccaaatttagtccaaacatacaccagattggctgtcattgtgagttactcgccataaataaatatttttggcttggagcaaaaaataaaataaaatatttttttcagtataaagtataaaaaatcgatttttaataaaaaaaattaaaaaaaaacgaaaaacattttaagcaaattgatatttaaatgtatttatatttatgagtctaagctccaacgcataacatattatcttcaaatattcaataaaacttaatgaatgtcattcatttccagctatctttgcggggcaggcatggagtaagcgcttaaataatcttacactttcgataggttctttggccttacattgggattttttttaccaaattttttttcctaattttgtctagtttcaatgaacctaacatgcccaatttttttttttctaaaatcaaaggctattttcgggcatatccgtaacctgaaattttcgaccggcaggtggagaacctgaaaattctttttttttctctaatttttaatttctccccccccctggttacggagcctgttgtcggtagtatttctgtcacatccattgcgtcatttctccttttttgggatgtacaccgagacattgagccactcttttgtcggcatgcgtttcccagacgcggctcagtctgttttttttctttctctttttgttatctgagtgctgttggtgatcggatggaataatatgggtcagagaaagcctaacaaaagtgcctaacaaattggcaataatttgcttcagcttttaatcttatctctgctcgcaccagagacgtccccaggaattctgcttggacgggatactttttttgtttttgtttttttgcttttacctcactttttcgatgcgcttttttgggtttagtgtggataagtttggtctatgaatgagttgggtgaacccgtcaattatttttattttaagctttaagattttcaaatattaatttttatttttttagaattttgtttttcattatttgactttttttttaatatttttaaattttactatgtattcatttcattcgaccagggaatttacatcttttaagttttttacatcccttttcaggcacaaaaaaaatcataaattgtttttctcgatggcaattatatttctcagttgatgaatcttatattaatagataataatatatagttttcgaattattacttaaagtaaaaatttcagcctaaacggttcatgggaaaggtctaacttccgaaaaaatggggtgtgtaatatcataacagccaatcgaattgaatttctgactgactttttgctgttgttttgttgtatgtgtatttaaatcttcataaatcacgaaaaatccatttttaaattcaaaatccgttcaacaatttgcagacttttgttcactcgtctgggccttttgctgttggccattgagctgaaggatgatgaaaagaaggagtgcaacattgccattaatccgggcccaagcacggtgatccaatcccaaacccaaggctttttcatcgcccaatcggcggatgaagtgaaacggtgggcccacttttttgggtggagggagagccactcgagaattcaactcgagaaatttctcctctcgagaaatgggaacgagaatttcgggagttcttttttctaacattttagttaggggctttatttttaggattttaccttatgctaacatatttcttgcaaaacttccaagtcatcctaaaaaaaaatcttgtccgtatgcgtcagttctaattgctaaaaatatgtagaagcccctaattatagtaaatcgttgaaaactttttcattaccgtacacgcttcattttttattcctaatccactgaatttgctgctggcttactgtattttttccttactgtagtgccttctattggtgtaaaatttgtcacgctgatgtgtacgacgtttcgttgatcaaaaagtgcaaatgcaaaaatttgtcactgtttcgcaaaggcggcaaggcaatgat

SEQ ID NO: 66818 - DNA, 1727 bp, Heterodera glycines
atggatcaaactgatcacagtgccgttggtccctcctcatcctcgccttccctcccagtttcgtccaccgtcccgcgaaatgcgcttttattcgacccagcggcaccggcggaagttcaacagcaacaaaatgcggcggaggaggaggacgaccaattctatgaactgacggccgaagacttgcgcaaaatgctcaaagcgttgcaggatgagaggtaaagaaagaggagagttccgacttgtttttcaattgaatattttggtccataaattggcatattcttccagcaaaagacagaattcgctgttgccaaccaaactgatgaaagagagggaccaacagctgaagcacaaggcgtacaaacattcgattgtgcgctttcgcctgaacaatggtcaaattttacaggcgcaattcctctccaccgaaccaggtttttgctaattggccttttgtcccaatcccatgttccaatttatcaaattaaacaaaatggagaaattcagtttcggcactgttcattttcctgcgccaaatcatttcgccaacgattcgtttcgaattgcgccaaattccgaccaccagtggaaaattgaaatcagacgactcgaccacttcgctgttggacgcgggcattacgccgaaaagtgtgctcattttgaaaattgtggcggccgacaattcaccggaatcacctgagcaaatgaacgccgaccaaatttttgtggtcgacagttttcaaagctgcacacaaacggaagcaaaggccgaagctcaaaaatggtaaagttcaacatggatttattctccttaaaattgtataatcgttatgttatgggtactaatttggtttggatccactttatgtatttgttcgaaatggttatttgaaaaattcagcgatttatgaccataatttaaaaaatgtccgagcctccaaaatttcttccgtcccaaaaaatcagaaagtatttggaaaaatgatctgtggttgtcaaatctctctttgggctcttgcttaaatttctgccacgtcgattcaattgaatttgtgtattggcaataaacgattttgataattaaaatcaaaaattagacaaaactagtacaatttttgttcacttggccaactccactccaagtccaaatttaatgataccctcaaaaatagccacttaacgcttcattgcttacaattagtttacttccgcattcttaaaacttttttctcattttaggctgtcgtcaaacaccgaattccgtccctatttggacaccattttgcacatgttgccctccacagacaattcaactgcaacagcagcagcaatgccaagtccggtgatgccttcctcgtcggcaccacacgacagtggcggcggtggcacgaacagtcaaagcagaaacaacagtcaacgaacaacgaagccgagttcagaactgccgaaatggttgaagcggaagtgatcaaaagcaaaagccaagcggtgatgacagacaacagaacggacacattaattaatgccgaattatttttgtttgccttttcttgctgtttatttatttcggtaatagtttagatggtacacccccttttttaaaaatttttttcaactttcaaaaaatcataaaaacatgttctaggggttttcggggtcgctgatcacgaatccgacatccatttcgaccgattccgaacccctgacccggattcgaacaaaataaa

SEQ ID NO: 66819 - DNA, 100 bp, Heterodera glycines
atgccggagcagttcacgcttggtgttcagcagccgtccgacccgatttgccacgcgtgggaatgtgcacgcgacgcaatccaacaacaacagcacgatg

SEQ ID NO: 66820 - DNA, 1101 bp, Heterodera glycines
tacaaaaatgatgggaagcgcgtctatttgccatgtgcgttcggctgctttaatttacattacccgatattctaatccgttttcagttgaccccaagccaattttggagggcactcgcatcaacaggtgcctctgcctggatcattctgtcccttttttaatttgtccatttcaattagtccccattatctttgtcaactgattgtccgtgagcctggcattcaacgctttacgcttgtcattgcgcaagtacaaatatcatatattaatttattttaatattaatttagtttaccatatccatctctcccaatattttcttttacagtatgaaaagatgaagaccatttactacagtttgcgggtgtattcgagcgcagattttcgttgcggtaatatgccaatgccgtacaaattccaccgcaaagtgggttaaggaaacaaatttcattgaaaaaattgaaagtaaattttaaggaagcggcggaatggcgtggcccaactgcaggcggatgtggaaacggggcgagcagagagacatttcagtgagcaaattggcaaactttaccttaagcgcgttgctcataattggactttctcaaaactgattataaatccgggatttctcgagactaaagagcgatcctcctctcgagcagctttatcaattttttttaaaccaatcaaaagaatcgccaaccattaatcaacaaacattgatttctgcagaaacaatcccctctttcacctgtgtacggaagacggcagtgatgacaatgctctgctggtggaattgcgcggtcccaaggagttcagtgtcggcttcgaactcgcaccggtgtctctgaccagaaatgaccggacttttgagacaaaagactcgggaccgttcaggtaattcagctgttttgttatcatcccaaagactgtcggcacaatattgtcattccgttttccaggcctggcttcaccgttctccaattggatgagctgccggccggcacttattccattcggccgatgacttttgtcgctgggcaggagggcccgttcattctgcgcgtggactgttcatgcaaattcgagttgaagcgagtgcaa

SEQ ID NO: 66821 - DNA, 56 bp, Heterodera glycines
gctatagggaagctatccccgaaggattcggtctcctcataaatctgggcgcatcg

SEQ ID NO: 66822 - DNA, 191 bp, Heterodera glycines
aggatgggcctccgtgggcgcgagttgctcagacagacgggcaaaatcgcggcgcaaatgggcggttccttcggcgtttttatgaccgttgcgcaaggcattcgatgctgagggacggccgagagagaacgttttgtgctttttatattttatttagctgttttttgttggcctaataaattatattctca

SEQ ID NO: 66823 - DNA, 408 bp, Heterodera glycines
atggcattaatcactttaagagagagggaggattactacgatgccgtacgagcagaagaggaggaggcggagaaggcaacattgacaagcagtacagcagcaaacagaggcaacgaaaagcaacaagaagaggaggaggagcaggaagaagcgagacaattacagcaaatgatggcacttctggtggccaacattgacccggtgccaatggtttaccgccaacagcgaaaagccaaaaacgatagcacaaacgatggcaccgacaaaggcagcaaccgcgttgacaatggtctaaagtggacggggaaacgtacgacgaacggacagaagcgggcaaagacgacgaagagacagacgatgatgatgacgaagagcatgaaacccgcaaaatggttgacacggaattga

SEQ ID NO: 66824 - DNA, 1210 bp, Heterodera glycines
atgtccatgattgcctactcggaggatgccgacgatctgtcggattccgaagtcgtggccacttttctgctgtccaacacttcaaacatttggcttaggggccttcagttcagtttggccgaaagcatggagcagttcgtttgcactgcgatgctttctctgactttcgcttttcctcagatgttttgacgccctcaaaaattccggccttcccatcagtgcagagccaagcgaagacggaatgccatggtgtaacgcaacttgggacaccgttttatgctggtaggacgaacagtgacgaaaagcatatccgatcagccaaaaccgatcatttggactgactgtgccaatgaatgggttttggtttggttgaataaagtcactcttttccgctccccctcagttccatcattcattttgcttgttttaggcccgcgatccccggaggtcaatcggtgtccctcaggtattgtgctttcatatgagtcggatgattatggcattgttttttaaggtgccctcctctcaagggattggacaccaccagtgagtcatttcgtttggcattgccttgggggggagaagtggccaatgccatccagcagactaatccctgattaatttgtcagagtccatcaccaaattctgtcatccgtccggccaatggatgggcaaaacggaggacgatttttcccgtccgcatggctggacaaacttcacaatgtgttttactcaagaggcaggcactttcattaattggcatttgctcctttggcctttatttttctgatcagcgactgatttgtccgttcttcaggtcgtggccattatgcagaacatggacaatggcactcttctggtgattttaacaaaatttttcaattggtctttttccttgtcagatggcacaagaagtggcaaaaaacgtgcgcaaattggagttcgtcgggctcggcctttctctgatctcacttttcttcagtgtcgccattttctccttgtttcggtcccttttaattaattgcctattttattatttcccctttttaggcgtttacgtgtatttcgcaacttaattcacctccatttgatggtcgcactgctcgccgtcgttctcattcgtctcgtcctttacattgacctcattttcaccgaccgaatgggccaccaacaattggtcaatccgcacgggaaaacgatcaacactatg

SEQ ID NO: 66825 - DNA, 214 bp, Heterodera glycines
atttagaaacgggcgcaagcgcccgtctgaggccgcgaagcggccttaatagcccaacaaatttagaaacgggcgcgaagcgcccgtctgaggcctcgaagctgccttaatagcccaacaaatttagaaacgggcgcgaagcgcccgtataagcccaacaaaatttaaaaaacgggcgcaaagcgcccgttcgaggccgcgaagcggcctaaaa

SEQ ID NO: 66826 - DNA, 947 bp, Heterodera glycines
atgcgtcacgcaatgcgaatgtttctcgtcccggaggacgtctttcagtcggtatttgttcaaccccaagcagcagcagcagcagcagcagacggtgccgacggcacaccaattgggcttttgcgctcgcgcatccaacaaattgagcgcagcagggagctgaacgaagagcagaaggccgcgcaataccatcaggaattcaaacggctcaacaaactggtgcgcgagcaggaggagcagccgatcaatgttcgacttcagcacgaaaaggagagagaaaaaaatgcagcaacgccgccgccgccgccgccgccgccgccgccgccgccgccgccgccgccgcaaacgatcgatcattcaacgccaaaaagattggagaaaaacattgtaccatcagcgtttgggttgaggaggcaaagacaccactacacacaaaaggcgggggcattatcaaatcgcagacctgcccaaaaacaacaaagaaaagcagcagcagcagcagaaacaccaaacagcagtggaaatggagaaacggaaaaagaagagggtgatgaagatgatggggaacagtgggacgacgcacaatcatcatcgtccacggcgtcaacaggtggtgccgcagcaaaaagagtgctcagagcaagagatggggaagcaggaaaaggaggaggaggaggaggagaaacggctgatcgccttcaaccaaaacacaactaccagatgaccaaaaatgcactgatcacacacattcgaaaaaaggggcacagtctgggagtcagtgatcagggaaaggttttgcgcgcagatgggtccgagtttaaaacgagcaacgtggaggcaattgtcagccatttgttgaacagggacaagcgaagcgaattcaaagggccgcctgtgggctataaggaatttgctgaaaaggcaagagaggatccgttgctaaaaaa

SEQ ID NO: 66827 - DNA, 297 bp, Heterodera glycines
atgtcatgtaaaataaattttggcctaaagagcagattgaagaaatattgataatattttatttgctaaattttttattttgggctaataaaattagagaccggaaatttcaaatttgcagatcccgctgcgggactggaactcaaaattttttgcgggactggatcccgcgggattaatcccgcaaatcccgcatttaaaatttgcgggatcccgtgcgggattgcgggattttggaaaatcgaaaaaatttcaattaaattcaaagaatttccaaaaatcaaaaaatgctgaaaa

SEQ ID NO: 66828 - DNA, 1049 bp, Heterodera glycines
atgttaagcttcagaatgataccaacaatgttggatttagatgacaagaaaaaagttatagtggaaaatcatgctggcgcccatccgtgagcgcccaacagaggtaaaccgtcattctttattacttttcttagaaacgaccaaattccactttcttggcatcattcggctgccttaagtgttcgttcttctattagcttgcaaaattaaaaaaaaaatttattaagtttccaaaaattattgccagaaaaattcaaaaaaccggattttcgaacatttttggccataattttttgaaactcagttaacttttttgaaattttgcaggttaataaatgacacagggctatcgaatgatgctaagaatgtatctaagaaaagttacaaactctcaaaatatgccgcattaaatggctaatgactccaccgcccttctttgaattctttttccttttatgaaaaaaaattatcttttcttcgtgcaaattattttcacaaagcttttccttcaatgaatttggcacaatgccaaaaaatttgatggccctcctcccccgccgcccaaaaattgttggcacaatggcccccaatttctggcacagcgcaaaacacattgattttggccaccactttttaaaaacataaagcatgacactgctgctggtcgtcgtcgttggcgccgcggtggtgatggagagcctagccttggccgcagcaaatcggtgcgccaagatcagctcagcagagcgccgtcgggtcgccgtttgctcgaaagattggtggaagagaaacctgtgacaagcgtgagcaccaaaataacaaaaaggtcctgctgtgcaattgcattttgtcgcccgcccggtgggcatcgaacccacggcatttccataccgcgtgggaatgctctgaccgactgagctacgggcacggtgctatttcgttattaaaaaaagccataaaaagggcgttataaaaaaactaacaaaaatgaaattttcaacaaaaaaatacccgtaatttttctcaaaacctttatttttttttatata

SEQ ID NO: 66829 - DNA, 169 bp, Heterodera glycines
atgccattgtcagcaaattttaccaaattagcagctttttcaattggcattttggcgttgctaccaattttatcagcagaagcgcaagcgatggaaactgcagatgatgagggaattgacgcgcagaagctgctttttctcgcttgtattcagggcaaattggaatcgg

SEQ ID NO: 66830 - DNA, 304 bp, Heterodera glycines; identical to SEQ ID NO: 51570

SEQ ID NO: 66831 - DNA, 141 bp, Heterodera glycines
agccctccgtctcatacgcaagcgcttttgtgagtataaaatttctcaaaaaaagagatagccatttttctgggatagagtataaatttaaaaattccctcaaaaataaaaggtctattgcgcaccgccctccctatcata

SEQ ID NO: 66832 - DNA, 691 bp, Heterodera glycines
  unsure (1)..(691): unsure at all n locations
atgttgaggacggacaaggacgagctgaaggaggagaagcagcggctgaaggaggtgagaatggacggcaaaaaaaacaacagcaacaacaataaagcgatgaaaataaacattttgttggcacatttgtatgaaaaaaactttattttttaaaatttttcgggcgggggacagtgaattgtgtacgggaaatttcggcattttctttggcatgcaaaaaaaaaaatagcggttttaataaaaataaatttcaaatattaggttatttttaaaaaattccaggtctttctgtgcgccaaccaacagggctgggccagtccgaacgctgttgcgcatgtgaaccgttgcaatgtgtcgctgggaatggacatttggctgcactgttggcttggccaaatgctcaaccagtttgtcctcaaattcatcattttttttattaccattttcaaaaaaaaatcaaaaattaatattaaaaaaactggaaacttcgaaaatataaatttatcggggaggggaagggaaatcagctcagctatttgatttcgtccgtccgatggttagtcaattagcattcattgtcagctcttttccatgcagaactcggattgccaccgtggacgagggtgaattggctgcggaactgtgcctggncaccgcgtcactaacccagtggcgtgcctgtgcgaaatga

SEQ ID NO: 66833 - DNA, 541 bp, Heterodera glycines
atgaaagaagaagaagaagaagaagaagttgttcaattgtattttgaggcaaagcaatcgaaaaaaagaagaattcaatggccaaagaacacagtgaaaaggcaacacaatttgagaaaagatcaaacaaatacaacgacacactcattaagcaattaattaattatgtcattaaaatttaacaaaaatcttttccttttgagattaaaaatgaaaaaataaatacaataaatacatttaacaattttatttctatagaaaatgttgcaaattgtcgctagtctttttcataatgtccttatcagcttatcactttacaatatgaaaaaagtgagcaaaaaatcgcatgtgacaggattcgaacctgcgcgggtcaaaccctttgcgtcttaagcgcaacgccttaaccactcggccacacatgcagtggacaacggacccaaattatcattttctgtgtgaaagggcataaataaataatcagtgattggtatttgaccacccgaatgtcacgccaaaataagcacaaaataatcaaaaa

SEQ ID NO: 66834 - DNA, 392 bp, Heterodera glycines
atgacagcaaaaaggatgggagacggtaatttgaatgtgattaagtgataagcggataatgagagacaaatgggtggagataattagtaaatagtcattgaacattatgtaattagatggacaaaaagcaaaaggaatgtgagacattattaagtaattaagacattaaaaatggagacggacaactgacaactgacaattgattaaataaaagataaatggataaaattggagccataaaatgagtgaaaattccgtttccagaaattgttgatgttgaaagcagcggaagatctgaagaagcagcagatgatgaaggagcaagaacggcaagaagtactcagcaagcgaattgtgccattgcccgaattggactcacgtggcgacggtga

SEQ ID NO: 66835 - DNA, 1473 bp, Heterodera glycines
atggtcatcacacgcagtccgattttgacacggcaacgagcgttgaatttggagattgccgttgacagaaatggacatcagattaatgtcggtggaaatcagcagaactctccacaacgccaaaatcacagtgctggagaaagttttccccaaaatcagcaaattgaaaactcgccaatctcacccactgaactcgcgggctttaatggggaaaatggtgatgacagttctcttgttttagaaccaaatatgaccgaagaggaattgcgcagacgcttgttggtggtcagcattgaacgtagccagccgccagccaacggaaatgccggaaatggagaaaacgccgaaggtttgcgaaacgcaatcagggaaaatgatggacgaccgaattttggagtaaatggtcaaacatttgcccaccaaaggaggccgcatgacactttcttatcaaatttgatgaataatggaataggaaactttcctcaaaatttggtccatgtaccgcgcacttctaccccaactcgaaatgttgaatttgaacagcaaataggaccattcccgtttgttgttgaccgcaacaacagagcaccaaccccacctttaaacatacggcaacaaattttccaccccatcccactgaatgcacaccgcattaaccaagtgtcggttaacgcgcaacgcaacattgacgttcagtacgtaccaaataattgcgttaatgtcccgccaaacgtacagcgtcattgcgacattcagtacaccgctcctaaccctgtcgccgcgccatcaaacgcgcaacaaattcaagcaggaagtagacttattcaaaacattccaatgcaggctcagctttggcagggccctgatggaaaaatgactttggtttacccccaagaccaacagcaacaagtgcagatcgagcaacctaatttggctcaaaatcatcaaaaattcactcgccaggtctttcagattccggaaacgaatcaagagcctagacatttccctacctacccccaaccgaatgttgcgccaagcaacctcgaattcaacttgattttggaaagaattccggatctaaatggaaatgagggtacagattctgtgcgccgctttttcaaaaaatttgatgcatacaccgacggatggccaaacgcgaaacgaatttcggcgttagaaagcaaagtttacaacaaagcagaaagagcttttgaggcagcaaagtcaaagcgccttaccgagtcaaaaaatttggaaatttatctcatatgcaatttcaaccaataaatttgaagaaattttgcactcaattttgaaaaatttatgtccatattttgacatttttgccattttatgtccatattttgcgatttttggtccatattttatggccatatttcgcgattttatatccatatttttaccatccctaatcatgaattaaaaatggcaaagggcgaccgattgaattaa

SEQ ID NO: 66836 - DNA, 1067 bp, Heterodera glycines
ctggtggaacgacaaaacaatcggcgcacagtaaaggccaataccgcacgaaaagtggtgcaaaaagtggagagaaaagaaggaaggcatcaatgcctttggaaatggcaacacaaactgccaaaaacaacgccaattttcaaaacagtccgccattgatgccgcagcatcggccaactcccggcactttctcccctccgccgaatcgttcgctgtttccgccgcaaagccttgggattgttcaaatcggaagtaattcttgaatattttatgttgttcacaatttccctcactttagcctcacttcctcctcaaaatgagcagcctttgcttcgctttgccccttttttgcctcctccgccccctcagcacggcattttgcgtccgcccgtcccgctttttgtgcctccggcggccgatgctttcattccatcgcaatttgcgccttcgtttgactcgtccgcaacggcgtcaacaatcaatgctatgaacatgaacatggtcattcccccgttgatgatgctgcaccaacagcaacagtccaacaacaatgccgagcgaacgacggcgacagcggcggcgacatggacactttttgaaatgttggcaaaaggcacaacgccaaatggtcagcaacagaaaaacgaaatgggacaacaatcgcaacagaataataacacaaacagaggacaacaaaatggcacaacagaaaatgagggaccaataaatgtgtaagttgtgaagagaaattttgccaattattttgtatttgaaataattttaattatttgacaaatacaaaaaacacatgccaggtgttttcgacagtgattgaatttgagtaaaagctaaaatttttggtgattcgaacgatgcgaaccaaactcgactcgagaacaaaaaaccaaacgaccgaaacacaaaaggcaattctttccaacaaattcagcacttctccttcacattctttggttgtttgttcaccaaatttgctgagaaactcagaaagtgacgcgcaaattgatcagctaatggatcaaatgattgctcaaagacatgccgacgat

SEQ ID NO: 66837 - DNA, 598 bp, Heterodera glycines
tttttgactgtccgttttcagttggcttcgtccctttcactttttcttccgccgtttgtgccgcgtgcactgtcatggctcattttgacctcgtcgttctgttcctttgctgctttgaacttgtccattccgatgtcttcggtcccttcgctttgttttgcttttgttccttcgcttcttccgccactcttttggctcattttgcgcttctccgatcgtcggatctgttccaaatttcgtcttccgattttgttgaatattgccgaacttttgtcacaattctcgcgtttggttacgcttttactccggtgataaggtgagaaagggggataaatgaccaataattgtttaattgcaattttaggacattgaccacttcaattagcactgacaccatttacgcctgtgccattctgctctttttcgccagtctttttgtccacgactacggcataaatgtgccggtgttcgttcgtgccaatgttttattttctttttaacgatggcatttcccgttttagcgtcagtttgcctttgtcggcaaatctttgcctcgccgcttccgtttttttgatttctcgtctccaatccgactttg

SEQ ID NO: 66838 - DNA, 180 bp, Heterodera glycines
atggtcgaccgctttcagaagggtcaatgtgcagcagttgaacaacagcaaaaacagaatgaactgaacaacacgaacaacgatgaggatgcagacgaacacgatgagttggtgcagcagcgccagcagagaacgccaattgcgccaataatgcgccaaaattcgctccatacgctccca

SEQ ID NO: 66839 - DNA, 127 bp, Heterodera glycines
cagctttcttctggctcctcctcgtccgcgtcgggtgcagcagcgggacgcgacgtgcacgtgcggacgccactgaacgacccgcggtcaccgtttaagccattggcttacacatcttttgagccgg

SEQ ID NO: 66840 - DNA, 363 bp, Heterodera glycines
atgtcgcgtaaggcgcgggatgtgatgatcaaactgcgcgaggtcagcatgcgacttggcggtgctcagtatttcaagaagcgcagcaacgaagccatttcttgtgaggtaaaatgtggtggtaattgctgggcaatacgaaatgatttactgatcggaggctgtcttttaccccatttatcatatgacagctaaaatatacaataaaaatcactatgctcccttgtcgcctttcctcattgtttttcgtatttatttcccctttttcagaaatgtggcaaactcgtcatcaatcgtctgtctgatcacgcttactctcacttggaggggtgcgacctgttcaagtgccaacagtgcaacttg

SEQ ID NO: 66841 - DNA, 257 bp, Heterodera glycines
atggcgcattttatgcaaattgaaaattctgccgaattgtacagtaattctgccaatattcgcaatgcatcaaaactgtgcccaatgcgtttgtttgtaggtgccatgttcagcagattaagggacgatttcgccaaaatcgaaggtagcgaaaagtggcatttcgatgtggtacgaggtctggcatatttggatttggaattttccgatgtcgcattgaagaaacgcagaatcagcgaagaacaatgcactaaaat

SEQ ID NO: 66842 - DNA, 744 bp, Heterodera glycines
atgacccatttgttagaaggggcgggcgatgccgagttgggctgtgggggacaatcagttcaaagagagagatgtaacgacacaaagtgcgaattgtcaccagtgaacgacggagggcaatggggcgaagtgagttaccgacccccgggggataaaaaccgcaaaatcatttgccaatttacagtggcaaccgtgctcagtgagttgcggcatcggatttcagttcagagaaagactttgcgcagacggaccatgtgccaacagcgggaagcaggcgaggacatgcaacgttcaggtgaattccaaagccaaagccttggccacttgcctcttaggactgttcccgcgtcctcggcatgcccgtgtggagtgggtggtccctgtggagcgtttgttcccggacctgtggccaaggcattcagcaacgctttcgacgatgcttgaacggactttgtcctcccggggaagctttgagagagcaaaagcgatgcgttcttggcccatgcccgcaggcagttcacacaaacgacacacacacacacacacacaaaacccttttattttcagtggtcaaattggtcccaatggaccaattgtgcgtcttgcagtgtttttgagacacgcaaaagacacaggcaatgtgtagtgaaagtggcaacagcgaacggccaacaggaagagactgagttaggacaggaggcatgcaattcggcaggtggacaaagcgaaagcacggaaatttga

SEQ ID NO: 66843 - DNA, 60 bp, Heterodera glycines
atgactgttttttttcgtatccgattaatgagtgatggtccccaacaggaagcgcatttg

SEQ ID NO: 66844 - DNA, 845 bp, Heterodera glycines
atgttccataattcgacgtattttctcattgtttttttgcttcatgaaattctcatttttacgtcggttcattgtacgatggctaaaaaaaagctacatcaacagcagcgggaggaaaactttgatagtacgacgtcagcattttcaccaaaatttgaggtatcatttagaaaaaataataaaatatatgcatatatacatttagaatatatataaatattacatacaaaattttcaaaaattttttacatgattttattttcatacattgagaaaattaacgcttttatgaaacattgatttttcagaaaagcatttattttattttatttaacttccgattaataaatatagaattttcagctccaccgtcgacatcataagcatcgactgcggcgtgccgtcatcaaaatttgcgtcgatttcaaccggcagcccattgcatgcaaatgggaaacagaggcacagttgcgcaaaaagctgatggcatgccatttgagcatcatcacaatgccattctgccatcggacagtgccgaaaattacgcggaaaatgcataaaattcaacgggaccggcgaagaggcggaattttctccgcattatagacaaaagcgtgaagaatttgagaattgtgaatttctattaatgaattctaattaacaaatttttttatcattcttgagaaaattactataaatttttttgaaaattttagggcgttaaatgctcaaatgatttcaaaagttgctgaaaacatatttttcatccctttcagtcagctgaaagtccaggaaaaaatgcatgcgcatataatttctaatcttgtacttaacttttttattaa

SEQ ID NO: 66845 - DNA, 441 bp, Heterodera glycines
atggttttgggctttgaattctttgctacattatccttgcttgccaattggatggtttcggtatcagtttgctgctcgactgttacggtatttttggcatttccattctttacttgggtattgtttgaatttgctttctttacgacggtatttttggtactggaatcacaattctttccatttgttatataaacaaaattcaggacaacaaataaaagcatccaaatgttcaacatttttattttggtttcaaagaatttttttcgaattatacaaaaagcggaatttttttctttttggctaatacaacaaatataaatggatgcaatttaataatggaaatttatattttctcttcagatgatgtggcatttgtgatgacgttgatgaatctttcataagcacatagaatgaatgcaatgatgaaacaatgccaataaa

SEQ ID NO: 66846 - DNA, 1229 bp, Heterodera glycines
atgtccactgtccaattgtccggttttgtccaaatgtccacgtcgaaatatccactgtctaaatgtccagatgtccactttccaaatgtccggtcatgcccaccacacgcctccccaaatatttgtttttgatttcaattattatttcttaaaaagataaatttcgggaaacaaacgaatgtgttttgagtaatttgattttttttttttgagttcctttgtgtctaatttttttgaaaatgaacggaattttttgaaattttgcaggaaaatagagaacacttagagctacgaatgttatcaagaattaaaaatttttacttgtgaaaactaacagtatatattaattattacaaatatgtcgtgtttttatcatttccgtagttttttgtccgtaattgttgaaatggcctcgtgtctaaaatgtacaacccgttattatttgcatttacatttttcatagtatcgcaatttgaatgggaattggtttttaccagttaacaatcgaaaaaaatgttttataaatttttttattataatttcatgtataatatttaatttatgaaaaaagccaatttaagaattttttttcattgggttgcatttttgtttttattgaatatttttaaagaaaaaatggttaattttttaggattactgaaattgttgttgaaattattttggataattgcgaattgttgaaaaaaattgataaaagcataacaaattttattgatgcagaattagaacaaaaaattattcaacaaaattgtgacgcattgaaaaatgacaaaaaaattgacgatgcaaaactgtctggtgaacaactaccaattctgatacaaaaacatgggcaaaaaatgttagaaaaactgaaagaaattgaaactgaaaagaatgttgacaaaatgtcccaaattttggcaccgacaaatgagcaacaacagcagcatcaaccaaattggcacaatgatcaaaaaatgcaaaaagctgtgataatttttaattttttgcgggaaatttttgctgttctacaaagcgattcaaatgctaatgatgatgatgatccaatggccaaaaatgccaaaagtgtcattcaacaatttttaacaacccaaagccaaaagcctacggtagtgccaatgccaagtgaactaatgggattggtcatcaaactttggcctatcatatacaacaatgcaccgcagaatcaacgaaaaaatcagtag

SEQ ID NO: 66847 - DNA, 698 bp, Heterodera glycines
cctatcgagactcgttcgtcgatgcttttacggtgccggagagtgttggcacgggacaaattgccatcgcattttactcgggactttgggcatacaacgggtggaactatttgaacttcatcacggaggtgcgccttgaagagaattttatttaaatttatattctttattttttttaatattttaaattgactcggatatctatttaaatgataataatttagttaaaattattattattattattatttccatacttaatcaaactttatttttcaaaaaactcgcaaaattaagatttttgttcttttaactaccttttaactcaataaaacatttcataaccttatgatagttgtaaccaattaggaattgattcccataattaatttcttattggtcaattaggaaatggtcaacccggtgcgcgacttgccccgtgccattttcatttcctgcacattgtgcaccctgttttacgtgctcgcaaatgtggcattctatgctggcacatcgccagacgaactgctcgaatcaaaggccatcgctgttacagtgggaatttatatttaattattttttgttaattttattttgttcaatcacaaattcaaatttaaaatttttcgccattgcacagttcgccaacaaattttacggtgcttttgcgtttgcaatgccaattttggtggccggct

SEQ ID NO: 66848 - DNA, 1081 bp, Heterodera glycines
gagaagaacgtgcgtcgccttctccgaaacgttggacgaagtgcgtgtacagcatcggacaacaaatcgacaagacgaatttacgttttaacatctttttttctttaaattcgccttataaattttcccaacactttttaggaccaaatacagcgtcttacagcagccttagaagcggagaaacagaaaacgaaactcgaaaataagtttttttttaattcggaaactaaaagccaattaaaattaatcgacaaattttaagacgaggagttggcgcgtgaacgggtggcccgtgcgcaagaaaatctaaaacataaaataagttttttacaattttttattatttttttttaatttttatcaatttttcaggaggaaattcgtcatttgtattcccaaattcactaatctgaagtcagaaaatggggcgactcgaaggagaccatcgagcgtgaacgagtcttacatcaaatgggaaattgaggacctgaagataagttaataagccgctttttaagaaaaaataatttaaattaataattttattttttacacttattaataagtttttagtgcttttttacgaaaaaataaaaatttattaatgctctttgaagaaatgataatttaaagaaataatttattatttactattattaataaatttacagtaattatttaattcatctataatatactattaattaacttttcacaagcaaatcgggctgctggttgacagcttggaaacagctcaaaaaaaaatcattgagctcagtgacagtttggaagccgctgatcagaaaattgctcggctcagtgacagtttgaaaggcgctgatcagaaaattgctcagctcagtgacagtttgaaaggcgctgatcagaaaattgttgaactcactgtaaatcattgaattgaaataatatcttttaaatcaatttgaaaatataataattaaataatattttgattaaatttccgtcaaaatcaggcggaggtgaaggatttacgagctgcggctgaactccaagtgcaaaatggtgctgtgccgccggtgccgaacttggttgcagaacg

SEQ ID NO: 66849 - DNA, 418 bp, Heterodera glycines; identical to SEQ ID NO: 53014

SEQ ID NO: 66850 - DNA, 998 bp, Heterodera glycines
gccgcggtaattccagctctcaaaatgcatagaatattgctgcggtaaaaagctcgtagttggatctgtgctagccgtccggtgcacactttgtgtgttactggttcggttggcttttctgccggtctttccccgggcgttggcctttaccggtcggcgtcggtgggctggcgagtttactttgaacaaatcagagtgcttcaaacaggcgtttcgcttgaatgttcgtgcatggaataatagaagaggatttcggtccgattttattggttttgctgaccgagataatggttaacagagacaaacggggccattcgtattgctacgtgagaggtgaaattcttggaccgtagcaagacggactacagcgaaagcatttggcaagaatgtcttcattaatcaagaacgaaagtcagaggttcgaaggcgatcagataccgccctagttctgaccgtaaacgatgccaactagcgatccgccggcggatttattcgccctggtggggagcttcccggaaacgaaagtcttccggttccgggggaagtatggttgcaaagctgaaacttaaaggaattgacggaagggcaccaccaggagtggagcctgcggcttaatttgactcaacacggggaaactcacccggcccggacaccgtaaggattgacagattgatagctttttcatgattcggtggatggtggtgcatggccgttcttagttcgtggagcgatttgtctggtttattccgataacgagcgagactctagcctactaaatagttggctcattgcttctgtgggcacaacttcttagagggattttcggtgttcagccgcacgaaattgagcaataacaggtctgtgatgcccttagatgtccggggctgcacgcgcgctacactggcaaaatcagcgtgcttgtccttccccgaaaggggttggtaaaccggtgaaaatttgccgtgattgggatcggacattgcaattattgtccgtga

SEQ ID NO: 66851 - DNA, 804 bp, Heterodera glycines
  unsure (1)..(804): unsure at all n locations
tgccacacgttatctcaccaatgaatttgctggtttggtgttaatggtggacaattacagctcggacaattgtttgaaggtcgtgttttggattatgaattaattcgttttgtttatcttttttgctcaaagaatccatttcttcctatttgcgcattatttttcgaattaattcccatatttctcatttaaggtccattccgattgtcaaaactcaacaaatgttctttccactcgttcttctttgcttgcgttcgattccatccctccgctgcatcgacaggtccttctttatcgcctgtgacttcaataattgtttatggacaatgattaaaattgcgtgtcatatgaacattttgccgttttgcaatcttttagtgattttaaatgaaaagcaaaatgagtccattttaaatgggaattgctttccctgattttttctgtaaaaaagtcccctccccactttcttcaggttgtcactcttttgacgcacttcgaaccctcccaatcttttatggtcactcatcgatgggtttaccaccaaacaaaattcccacaactgcgcgactttgtgccctgcactgaatttgcttccgctcagaattttccaccgttacaaacggaaacaatcggttatttgcatggcccttttccggtctataaatgatttgttcacatcttctaatttcgtcaaacatatcttttctatttcttttgtggatttattttttcccatcttcagcatctcatacatatcacttccattgtatattttcctcctttcatncatgaatttattgactt

SEQ ID NO: 66852 - DNA, 252 bp, Heterodera glycines
atgccaatgcccgcaaacgataaggtttttaatatgtcgccagatgcccaagaactggaacagcggccactacctgaaccacaacaagccgaactgttgaaacaaactggagaacaacaagaagaattattgattcaaattggtgatgttgaagatacattgcttctcaccgaacatgaaggagaagaaaggaaagatgaagcaaatcaagaattagggagaactataatgttgagcaagttgaacaattga

SEQ ID NO: 66853 - DNA, 706 bp, Heterodera glycines
atgaaaaaaggcacaggcaccaaaaagttcaagctagaagcttcaaaccaagttaaaaactggttttcgtgcgtattaggccatagcaagttagcaaaaaaaggcatatgcctcaaaatccagtccctattcataaagtaaaaacccaacttgtactgtttttcgacaaaaaaatcgtcataacttttttcaaagtcgaccaaattaaactttcttggtatggtatcattcgatagcccttaaaattttctatccaattacaaagatttaaaaaatttctgtagcttctgcacagttcgttttggcgcgatccctattttttaggcataagtttttctttgccaaccaaatccaacaatcggagttcagaattttttgtgaaaaatcgaaaatttctagaatttctggaaaaacttttaatctttgtgttagaaaaaaacttaaaaaaatacataaaatttccagcttttttattttttaagctttattccactaatattgtccaacttgaagtgagttatgagtttccaaaattagtctaaatttcctgggctcaaaaacgaaaatttttaaaaaattccactgaaacttaaaataaggtttatttatatttgtgtctaaatattttgatggtttgtcaatgttttgtaaatattttcacatttttcaaatttttcaaaatcatgagatctttaacaaaaatgca

SEQ ID NO: 66854 - DNA, 403 bp, Heterodera glycines
atatatttcataacggttagtaaaattgcctatttaatgaaatgtggtggtacggtggcccgtttaattgtttatcattctctgagtacggtatttaattttttggtggatatttggctaattaaaaatgatgtcaattaaaaaggtaaataaagatcatagtttaaaactttgtggcggtctctgagtcataagacgaattttgtcctttacaaaattagtaaatttaaaatataataactttataaaagtataaatttggagagcaaacggaggtaaaagaaaggggacgagaaaatttgtgtgatgatttgtcactaattattacacacattttatcagtgaaaccatcgaagaaccaaccatcccaatccatcatcatcatttgttaacactcgcagca

SEQ ID NO: 66855 - DNA, 399 bp, Heterodera glycines
atgggtggaagaatagtattattagtattaaagacgaattattttcttttagaaagcccagcgcgacttggcccaggcgaaggatctcctcgggaacgtggcacaacatttggcacccattccacgtggacaacttcgcaattgtaagttcattaagtgtatcttaaattaacatttaccgaattaaattccttttagtgatcgcgtctttttttgaggtcgggtacacctttggaatgactccgccccacgaagccaatcatgccccgactcaagaaaattttaaagtgcagtttgacagaatcaccgaactgcttcaaaatgcagatgccacccgaattaacaaggcatcacagtgttagtcgtaaacactgcatgttaattataatatataacata

SEQ ID NO: 66856 - DNA, 304 bp, Heterodera glycines; identical to SEQ ID NO: 51570

SEQ ID NO: 66857 - DNA, 235 bp, Heterodera glycines
tgtataaaatttatcaaaaaaagagatagccatttttctcggttaacctctaaatataaaaatcctctgtgaaataaaatggcgattgtgcacagccctccgtctcatacgcaagcgcttttgtgaggtataaaatttctcaaaaaaagagatagccatttttctgggatagagtataaatttaaaaattccctcaaaaataaaaggtctattgcgcaccgccctccctatcatg

SEQ ID NO: 66858 - DNA, 541 bp, Heterodera glycines
atgacctgtaagtgtaactatttttttgctaggttcaatatcattgaaaagaaaatttcttgattgttattctgagttcaaaggaattaaacgtgccaaaaatgctttcacggtagattgagctaaaatgtttttaaatattacaaattttcagtcatacaaaacaactttggattatgtcgccaaatggtttcgcaccgaacgttatccggatcatattcaatggctttcgcttacagatcggcaactagtccatgagaatgtcattgaattggcctcaacttttccccctgatttgtccgatactttgttcgatgaagttagtcaggttaaccacattttgatcagcatcgacgaagcagaattcatgcgactgacaacagagcaaaaatggcaaagaattttcagcgctgattttcccagtctgtacaggctcgtaagcaaattaatgcaatgaggctttttgacccaaaatgaggcttttttgcttgccaaatgaggcttttgaaaattttcatctgcgaaccctgaatatattaaa

SEQ ID NO: 66859 - DNA, 56 bp, Heterodera glycines
gctatagggaagctactcccgaaggattcggtctccccataaatctggacgcatcg

SEQ ID NO: 66860 - DNA, 1223 bp, Heterodera glycines
aactgtgcttcacttcgccaatgatcgagcgtttgggcgccgagttttgcgacagtttgaagtacccgcgactgctgaaaacgcacttttcttgggccaacttgccaaaacggcatttacaacagtcagcgacaacaacaaatggcactgctcagcccaagtacattttcgcggtgcgcaacccgaaggactgctgcgtcagctatttccaccacaaccgcaacttcaaaatttacgaatgggctcacggcaaattcgacgactttttcgagctgttccttgaaggtcggctgatggcattcggcgactattttgagcatctgctgagttggttgccgcatctgagtgatgccaatgtgctctttctgaagtcagtttggagttcaaagtttattcaaaaaattttttcctatttttgctgaagtttttttttgaaattcgtcgtttttataaaattattttaaggtacgaggacatgctcaacgacttggaagggagtgtgcgcaaaattggtcactttcttgggggacatgctgaaaaactggtgaacgaccaacagacattgtcgcgtattgtggcagaaagtcgattggaagcgatgcagcgcgaccaacagcgatggtttcccggcacggcactgtaagaagaagtccaactgaaaaaaaggggggggaggggatcagaattattgggaatgagaaatcatcatttaggggctaaaacataaaataaattaaaattgggacttttggctggtgctaatgctaattgtaagagtcatgcccatcactaatgactctttttgaattaaattggggttttaaaattcttaccacatccattggttcagaaacggcgagtcattcgttcggaagggcaccagcagagactggaagaattacatgagcaaggagcaaagtgatcggatgggccgcgcgttcagacaaaagttggccggcacagtggcagagaattggtggagaacggaaatgcgatggaacgaagcggaggaggaggaggaggaagagaaaaaggaggaaaaggaggaggaggaaaaggaaaacgagcaggagcaaagagaagcaaagaagaaggaggaagacgactcgggcatggaaagcggcgacgatttgttggaacgaagcgccaaagtgtcggacgattcattgcgtttgaacggctcgcccgccccgcagggaccgacgacgacggacagcaaatga

SEQ ID NO: 66861 - DNA, 379 bp, Heterodera glycines
atgcggcaaccaactcagcagatgctcaaaatagtcgccgaatgccatcagccggccttcaaggaacagctcgaaaaagtcgtcgaatttgccgtgagcccattcgtaaattttgaagttgcggttgtggtggaaatagctgacgcagcagtccttcgggttgcgcaccgcgaaaatgtacttgggctgagcagtgccatttgttgttgtcgctgactgttgtaaatgccgttttggcaagttggcccaagaaaagtgcgttttcagcagtcgcgggtacttcaaactgtcgcaaaactcggcgcccaaacgctcgatcatatgcgctacgacattccactagtgcagtttaatgcacgaacgatggcggattaaaaaa

SEQ ID NO: 66862 - DNA, 1419 bp, Heterodera glycines
agctaaattagcctttttgagcccaaaaacccgaaaaaattttcaaaaaatcattttttcgccaaaatttctcgagaatattgaataaatttaaattttcttaaaaattaataaattatgtcaaaaataagcaaaaaagcgaaaatttcgcttttgttgttgattttgcgctaaaaaaattaataaattttagcttttatgttttttttcttttaaaatgattgcacgtaattgccgaaaaaattcgagaccaatttccgaatgttgaccgactaattgcaaaacgaaagccgtctttgtcaaagcgccttaccgagtcaaaaaatttggaaatatatctcatatgcaatttcaaccaataaatttgaagaaattttgcactcaattttgaaaaatttatgtccatattttgacatttttgccatttatgtccatatttcgcgatttttgccatttatgtccatattttgcgatttttggtccatattttatggccatatttcgcgattttatatccatataattacactccctagtgatatgtctgtttacaccaggctattttaattaaattattgttttttttaattgattgaatttttgggaatgcgtaaaaatttttagtgaaaattttgtcagcgaggagttcgattaacactttcaatgccatttaaacaaattaaacaactgaagaaggcatttgcgaattagctttgctgtgtgcactgttaccaaaaaatttaaaaattggtagtaaatttgtctggataaatttctttgtctttctttaaaaaactatttcctccaatattcatgttcaaaagaacggcggcaaatttttcccccctctctgaacataaattcgttttattgagatttcataattgctttttaatttaacattcgattattttgaacattggcaaaaaaatttgggtgtttattttatttttttaatccgccatcgttcgtgcattaaactgcactagtggaatgtcgtagcgcatatgatcgagcgtttgggcgccgagttttgcgacagtttgaagtacccgcgactgctgaaaacgcacttttcttgggccaacttgccaaaacggcatttacaacagtcagcgacaacaacaaatggcactgctcagcccaagtacattttcgcggtgcgcaacccgaaggactgctgcgtcagctatttccaccacaaccgcaacttcaaaatttacgaatgggctcacggcaaattcgacgactttttcgagctgttccttgaaggccggctgatggcattcggcgactattttgagcatctgctgagttggttgccgcatctgagtgatgccaatgtgctctttctgaagtcagtttggagatcaaagtttattcaaaaaattttttcctatttttgctgaagtttttttt

SEQ ID NO: 66863 - DNA, 438 bp, Heterodera glycines
aaaatggtctaagtaaaaatcgtaattacgctcaaaaagcttctcaaacaattttaacgcttccaattccttctacaatcgcctttatacatcccattatgagcgctaaaattatcagagtgccgaaaatcgcatgtgatctaagcctagcaaaaaatggtctaagtaaaaatcgtaattacgctcaaaaagcttctcaaacaattttagcgcttccaattccttctacaatcgcctttatacatcccattatgagcgctaaaattatcagagtgccgaaaatcgcatgtgatctaagcctagaaaaaatggtctaagtaaaaatcgtaattacgctcaaaaagcttctcaaacaattttagcgcttccaattccttctacaatcgcctttatacatcccattatgagcgctaaaattatcagagtgccgaaaatcgc

SEQ ID NO: 66864 - DNA, 841 bp, Heterodera glycines
gaagaaaatatttatgacataaaaaaatcgattttttcaaagcctcctttgggggtactcatgcaattatggggagcaaaaatccctcgcagaattaaagtacagactataggtaagctattcccgaaggattcggtctccccataaatctgggcgcatcggttcggggggactgccccgaaaacaaaaaaatcgattttttcaagtgtccgtttggggtactcaaacaattatggggagcaaaaatccaacgcagaattaaagtacagcctatagggaagctattcccgaaggattcggtctccccataaatctgggcgcatcggttcagggggactgccccgaaaacccaaaaaaaaatttttttgaataaaaattatttaaatgacctgactagataatatttaaaataggttatttctcttcctttcagtatccctgcaaagtttgctgcgcttctgatcagtttctgaaaaaaagttaagcctaacatcggttcagggggactgccccgaaaacccaaaaaaaaattttttattgaataaattatttaaatgaactgactagataatatttaaaataggttatttctcttcctttcagtatccctgcaaagtttggtgcgcttctgataagtttctgaaaaaaaagttaagcctaaactttttggcctgtttaaaaaggaattaaaaatttttaaaaattttattcatctccctttttgatagaaaaagcatcagagtgcctaaactaacatgtaaataaaatttggtgcgtttcagagccctttctgaaaaaaatatttatgaattaattatgcaaaaaacaaataaataatgaa

SEQ ID NO: 66865 - DNA, 286 bp, Heterodera glycines
attttctaagaaaaaataggagttttgggggcgcggcggtgccgattggcgccgccggggaaaaaattggaaattttgatcatttataaacagtttttcactgaaaattagccaatttataggtaaaattttgaaaaattttatgggaatttaatccaattcttaggggtgtaaaagtcgcttttcgcgccaaaaagcgaaatgcgaaaagcgaaatgcgaaacgccaaaaaatgcgaataatgcgaaaggcgaaatgcgaaaagcgaaacctcggcccatccctg

SEQ ID NO: 66866 - DNA, 390 bp, Heterodera glycines
atgacacatacactatgggtaccgcctcccatcgattcgtctactcaacaattcgtctattcaacgattcgtctattatacgattcgtctactcagccaaaatgtgacgattcgtctactcggtcaaatgtcaacgattcgtctattatacgattcgtctactcgacgattcgtctactcagccaaaatgtgacgattcgtctactcggtcaaatgtcaacgattcgtctattatacgattcgtctactagacgattcgtctactcagccaaaatgcggcgattcgtctactcctccaaaaaagttcgaaaaccgggattcgaactcgaacaaactttaaagccatttttccggggtttcctacttaaaaaagcagttaccatagtctga

SEQ ID NO: 66867 - DNA, 627 bp, Heterodera glycines
ttatgaagtattctaatgaggaaaaattaagaaagacgaaagaatattttgaaattaaagctaaaaatccaaaaattagcgactcgataattgctacgaacttgggaattggatgggcaactcttaaaaaatggaaaaagaaacttgcctgaattacgaatttgtggtttttttgacgtgctgagccgaacctatatcaatttaataatatttaaattaattattaataacttagcttaaacttagtcaaattaatgaaacatgtggtattgggcgatagctctatgtattctcttgaatcttatgtaattaaaaaatctagcaaaaatttttacaaaaagttataactaaaaatttcaaaatttagattcaataatgtcgttccctaactattaaaaaaattttaaatttaacaaaattttatagaaatctttgagctatctaatcgtattaaggttgtataactaaattgcagtttgaacactatttacatgaattaaacgaccttacatttttgtatgaccttaaaaatatgaccaatttaattccttagtaactttttttaagaaacaaccaattataaaatttgactaagcttaagctatgttatgattaattatttagcaa

SEQ ID NO: 66868 - DNA, 3455 bp, Heterodera glycines
atgaaagcttttattttaacatttatcaacatctgccttatcgcttcaatgccaagtaatttttgaaaagataaaaaactccttcaaaaacaaccattgtgttttaatttaaattttaaccgattttattttgaattttaaatataatgaaaatttaaacaaaaaaaaaatcgttaattttccctatttgaggcactccgtgtccactttttggcactctgcagcttgagctgaacaatttcttggaatatgccaacgaaccagtcgggtcacttcgtcgtggaaactccgtgaacattcgcggtatgtcctggcaattgagtgccgaactcactgaatcagctgctgaggacggcaccaaatatttgggattgaatttgtattgcaacaataactgcaaaattggtaagtaaattattttaatttttttatggtttatataaaatgagtaatgttaaaaaatgtatgaataaaaattttaaaaattttgccaacccaaaattttacaagaaaaatttaattttggctttatggttataggaaagtaatatgtggttgcttattagtaaaggtataactgtcatcgatctattatgtaaaacaacagttttatttgtagtccataaattttttacctttttaagttcctaatttttaagaattttcttgttttaaaagtctaaaatattttgaattgtcggcctttgaggggaggcgcgatttcgacccaaaaattggcttttagggcgtacccagtcacttgtggccaagacatttgctgtcaagaaatttatggcccgaagattgcggtcttgtctaaggcccgacaattactgtacaaatttaaaaaaaggtttcaatcacccactttgtcaatctttattatttttaaatgattttaaattggatctgtggttcactggacctgtaccaatttttaaatcaggcccttgatggtaatcggctcgatacaccaaaaatttgataggaatacagaatttcggatggcaccggaataaatagttaaatttttttttaaatcaatgttaaatttgaattgaaaattttgcatcaataattcgattaattaagacgctaattggaattgtttctcgatgctggaatttcgtataactgttggacaggttgatgttatgtcaaaaaagcttcccgcaacaaatttcactgctcaaaattcatctctgggaataacgaattttattaaaatccaggtaagtgaaatgaaatgaattaattattatatgataatgtttaatttaaatcaaataaaacattcatttatatatgctaattaataaattttttttttatttgttattcaataaatttcatttgaaaatataataaaagtgttttagaatttggtagatgtatgtcgtcatctaaaagattacactgtccaaattgttgccaatgtaaagccggaccaaccctgtgggactaggtaatcatatttattcaattttaaaaaaaattaaattaattaaaaaattgcctaaaatttccggtgccatggtaatactaattaaaactcatccatatttttaatatcattgcattattttagtctgccaagaacagatgcaattttagtgaaaacaagcaatgatcaaattggcgttgaagtgaacataaacagaaatgttggtattttaaataattattaattttaatccaatttttaaatagtgtcctcgcgctggactggggattttaaaatttcaaaaaatttaaatttaacaaaatgaaatatcttttctacaattttacttttttttcctctttgtcataagttatgagtcataatataatttttgcggcgcattttcaaaatatttataaatatattttgtttaaaaaattaatttaaaaataaataaaaaaagagatgcaaaatgctttttctttgtagcttttggcagcccattctagctcgttcaacgattttttcgccaattttcaaccgccagctgaaagtacgtcctcaacaggtggattgagtatcatgcttgatgccccatcaaccgcggaacattttgaacaactgatggacttgttgcactatggtgattgtgtgctggaaggtaaagttttaagactaaatctataaaatgcaggtctcgaaaatcaaattttataaaatttactcagccttaaaaactcaaaatttccaaaaatactaattaaattcttttcgctatgtctattttgaaccaaaaattttgaatttgtatgaaatttcttagcagattttttaaaaagttaaaatattgattattattttttaatcaactaaattcttttagttttagcccatttttatttgccgtttatatgaaatttattaacagatattttttaatttcaattttgactattattgtcaataaccataaaattctcaaaaatttttgaactgaaaagcaaaaccacgaaccttcaaaaaatttctcctctgaatgtctaataattaataaatgaggaataacctcgtaattcacatatcaatcattcattacgtgtcaattaaactatttttttaaatttaaatattaaatttatgaatttactgaattattgggaccttttcatttatttattaatttcttaagacgaaaatttggaaaatgttttgcgtttggcgcagcaattccatctgcatgatattgtaagcaaatgtgcacgatttcttggcagtacaaattgtaatattcaaacaatgaaaaaatatcaaattgcagacatttatggattagatgcactgaaggtatgggaattttattattttttaaatacacttattatgggttcgatatttaggtttttgcctattttttcctgagctccctatggtctgaacgcaggaaaacattttttgtggttgttaagctatttttcgtgtttcggcctcaaaattcagaaaaatgcacacctaagaaccgtccctaggcttttgaaacctaaagaaatgaaaaattttctcaaaaattcatctccaaatttattaatttattttttgacaacaatttaaatttttaaaattttgtttttgtcttttaagtacaaaaattatctatagtaatttttgaatgttcttattttaaatagaaatgttaaaatatatacaaaaatataaaaatgccattaactgcgcttgagtaataaattaatttttaaaattataataaataatttaggaatttattttgtacaatttgcttcaagaatccgattttgttgcgcaatattttttgcaaaatttggaaattattgagcaattgagcgatggtgccaaaattgcactaaaacaacgcattaaagaactgcttgaagcagctcagtaattactatagtaattagctgaacgatgatagatcgaaacctgagaacattctgatgaaattgttgatgaattaattattttttaaagaaaa

SEQ ID NO: 66869 - DNA, 611 bp, Heterodera glycines
atggacgatgaacaatttgtggcatttgctcgtcaccggcacgccaacgccgaacgcatttcgacatggatgcacgacgaaaaacagaggccccgcgagttgggacagaaccaactgggcttctttctgatgtggttgcgatatgagttgaggtgaaagaacggactttataagtggttttgtacggcgaatagttcattgtgccagaagtttgaaggaatggaattttatttctatcatcagggaaaaagagaaggcgggatggctgtcgaccgttgaaattcgcactgaaggcctttccacggaccaagacgaccttccagtgtccatttccgtgtcttactttgcactcgcccttcaggggcccttccaacctctcagcaattattacgcgttgccatttgagttcaaaggtcacagactcaatggcactctctcgacaaaaataaacatcaaattcaggcgagtcctatcggtcggtcgaacattacgcctaccagcgccttttcgaggctctgaaatttccgcctgaggaagtgatgcgactgcgcacaactgttaaaccggcggacgtggccaaatgtgcgcagaaagtgttcgataagcagcag

SEQ ID NO: 66870 - DNA, 511 bp, Heterodera glycines
tccattttcgaccaaattgaacctgcggatgtgcgtgcagtgccccctcgtgtccaccccctctgttggtacgcaatttggcgtgcaacagatcgtttccgtgcattgaatgggcgattccccggaagcattgcttcttctcagaagggagatgcaaaggaattgaaggaaatcgtcgggaaattgttttctgagactcaggtggtcgtttgttatcttttgcaagttaacaaacttccgaattttgcagaatgccgagctgatctccagccaggacgaattggttccaccggaaactatcgctgaagtttgccgttacggtggctcagagccgcacgttgtggccgctatcctcggcggctgcgttgctcaggaggcaattaaactgtgcacacaccaatacatgcccgtggacaattcgctgctgttcgatgcccattcccaacaggcggcctcttttcgggtggtcgcctcacaaagagaggaacagcggaccaggaagacccgttga

SEQ ID NO: 66871 - DNA, 575 bp, Heterodera glycines
aagaaaaatgaagaaaatcgggagaaaaaagtggcaaactttttgtcagagaaatgggccattattaaacaggaaaagccacaattggccaacattttcacgcttttacaaacttctttcaatactttaaaaggaggtattgaataatatttattttaattttatccaatttcactaattaatagattttggtaatgtaaacgcgttgaaaatgttgaaaaagcaaattgttgatgcggcatttctgctcactgatcacatccaaatttcgcatgatcaaattttgcccttgaatagacaaaacggcttgaacatgataaaagaattggccaaattatgggtaaacagcagggaattcaacggtaaatgtatagtagatgagaattacggtaacaaaaatgaaaatcatggtcaaaccggtgaggatgatgatggtgataattatgatagatctcgtcaatggcaacgtaaaattttacaactgattttgtcggctgttgatgatgaaccattgaaaatggcgacaaatggtatatttagaataaaaaaataaactgatttttttataaaataaa

SEQ ID NO: 66872 - DNA, 80 bp, Heterodera glycines; identical to SEQ ID NO: 51817

SEQ ID NO: 66873 - DNA, 368 bp, Heterodera glycines
atggtagatcaatttgtacaacccgaaactgcggaggagcaacaagtgaaagctaagaagccacgcgttgatgagcgatttctttggaaaatcacgcggggccaatttgtactagcgattcggctgtgttcaggttaatcaaatttttgacgaccaaattaattgacaactttcagaggactggaacaatttatttcacaacaaagacaagacacgtcggctggaagatgggcgagtggcgattggactcgagatgtgtgaagaatgtgccagaatcaattgctgtgtcagtgatatgattgccgatcaaaagaagaagccaaaaaccaccgaataattcatcaaatttttcgcattagttgtagcca

SEQ ID NO: 66874 - DNA, 148 bp, Heterodera glycines
tgaccagttcaagtgggacgatgcggcttcacgcgtgcggacattggacgaggcgttcaccaagctggtcgacatgaacaatctgatcaagcagcagccgccggtgccatccgtgaagagcaacaacaccaacccgtttgttgtctga

SEQ ID NO: 66875 - DNA, 2290 bp, Heterodera glycines
  unsure (1)..(2290): unsure at all n locations
atgccctccaacggcttttcncacgttgcggtaccgtacagcagcagcagcagcagccatcactatcccataccaccacccgccagctgcattactgtgccatcgccgtccaccgaattctcacggctcgacatttcgttggcaaacccatgctttggcctactgcccgccgtcgccaccgccgccacaaagacggcaacaacagcagcaactaccgtacccatacaaccacaacagtcaccagcgacgtactcggcgtcaggccaacaaacaaagtgcgtacatacagtatgcgctctgatatactgtagatcattgtactgtactgtctcgtcctcctctcgtttctcgggtccgggactgaactttgatttattttgaaattgggctcatattcaaattatcggtgctaattgattcggatcgattacgagtcctagtctttttttctttttgtaatttcttaattactaatctgctaattcaacaacaaaaaaaaatatatttttttaattaagcaaattggagcgacaatcagtgccattccatcatcgcaccagcgaagaatcgccgccgctagcacaaaattgcgaaaatccaatctttgatctgataatgatggcggcaaacaacaaaagcgccgcggggggaaaacaacggcaattgccacaaacggcaaatggtggtggcaccaaaaaggaggatgccgaagatgatgaacagcaaaagcacctgaagcggacggcacctcctcctcctccaccgcggtcttcgttggcacgcttttcgacccgcgcttgtctgccaatgccgtccgaacaagacgaacatgatgaattggcatctaccgaggaactgttcagaataggaggcaacaacggcattggtcgtggtgccaacaatgctgcttcccgcctaatcggcatgagaaatgccatcgatgatgatgaggataatgatgattttgatggcattggtgttggaagaggaggatggggaggaggacgagcggagaaaaggaccaaaaaaatggtagtgccaaatgaagacaataatgatgatcacgacgatgatggcacttttgccgaaaatgttggtgtttctttggccggagatggtagtgattgtctgcatcattttgtgaagaaaccgtcgatgctccatgctgttgaaaaaagcagtaatcagcacaggtggttgccgttgtttttgatcaatctttctcgtctgttcaattaggcaaatacgcgacagttttaattgagcatttggatttctgatcaatggcattttcagggggagtgccttcagaaaccgaaaaattttaaaaaaaaatcgtgaaaaatggtagagtgttagccccttctcccgaatccaagggtctggatttttcaacaaaaaaaaactaatttttttaaatagaggccgcgccgggcctttccttaatatttatttgagaaataagcatatttgaatttcgaagaatgtggaattgtacccatttcaatgccaccaaaatgccattggcgggtggcgccgtcggcgggcgacagttgctctccaattttcggcatcattttcaacccaacaggcttttgtccaccattgcacataataataataatggctcatcatcatcatcatcatcatcgtccccatcagttcaacagcaggcaaataatgattaaaatagccaattgaaacgttctcgagagaatctgggtctcaaacattactaatttcgaaattctcaaacaaaattttgaaatttttttgcttacatgcttctgttcagcagcagcagattgctcggcatcatcgccacaatcggcttcaccaccaccaagcagcaccaccaattgttgttggcccgacatcatcatccttctcctcctcaacccttgcggcatcgtcgtcgtcctcctccgcccccattgtgcttcctcctccaaaacggaagtatcatcatcatcagcaggtccatcggctgctgatggcatcgcttggcatgcgtagaaatggtgccaatgtcaacaatggcactgctccaactactgctactgttggtggtcagcatcgacgacgacgaggaacgcactttcggcaccagcagcagtcaatgttgcccaccgttccggacatcgacgacaaggaggaggagacggagcaggacgagcttcatcatggtaatcatgatggtagcaacacaaccaccaactgtgccgctacagcttgtgagggtggaacagcagcggaagacaaaagccacgagattatggcagtgcaataa

SEQ ID NO: 66876 - DNA, 171 bp, Heterodera glycines
aggaaaaaaaaaaattaaatctgagggaacgaataaaaatgttcaatttcttattgcatttttgttgataacaattttccgaaaaatcctaaaataagcaccaaaatcgggagggattctcgaatcgggattccgtccaaatccccgatcccgatcaacccccaatgaatt

SEQ ID NO: 66877 - DNA, 304 bp, Heterodera glycines; identical to SEQ ID NO: 55978

SEQ ID NO: 66878 - DNA, 320 bp, Heterodera glycines
atgctcatcagacacaaaaaatcgaccggtggtggtttctcaaaaattgtcatgctcccggacggcaccgaattcaacgtcaacacgaataaatgtgaaggactctgggctcaattgaaacaaaagacgaaaagaattcatggaaccagtacaaatttaacgaattcatatatgtgtgaacaaatttttcgacttaatgctaagactaaaggaaaatctatttttaatgctttctgtgatcttcttcgccataattataatttcattcgccataattgtcttgttaatgtttaatattcattattatgtgtaaaaataaa

SEQ ID NO: 66879 - DNA, 582 bp, Heterodera glycines
atggttggtggtgtcgaaattgacataaaaactgtgccgtggacagtgctatttcaaggcttagtgaaaagaaatgaacaaaataaaatgataatatttcaaaattgcgctagcatatttatttcgccggaatttgtgctgttagccgcgcattgttttgacaaaatcaaagagggaaaatactttcatttgggtaaaaaataaaaacaatttaaatgctctttaaatgctttgcttataactttgctctaaacaatccaattttaattctcgatatcatacgatagactaaatgttttctattagtctgccaatcaaaaaaatttgttaactttcaaaaaagttatggcctcaaaaaccaaggttttttgagttcctctagtcataactagggctccaatttataattgctaaaaactgccaatataattagtttttagtttctaaaaaacccccaaaatagttgctaaaaatgggtaaatatttgctaaaaactttcaaatttaggggagtaaaatcgaaaatttcttcaaaaagcaaaaatattatgccaaatcattaatgagatacataattttcaaa

SEQ ID NO: 66880 - DNA, 56 bp, Heterodera glycines; identical to SEQ ID NO: 52733

SEQ ID NO: 66881 - DNA, 59 bp, Heterodera glycines
agcccgtgaacagctcgcatcggatgcaagtgccgccgttgctgtacgcctaacagttg

SEQ ID NO: 66882 - DNA, 465 bp, Heterodera glycines
atggcccgccatcaagcccaatgtgttggccagctattccgtgtccgatgccgtgtccacctattacctgtacaccaaatacgtgcacccgttcatcttcgccctgtgcacaatcatcccgctgggcccggacgacgtgagttggggtggaaataaatcccgaattccggcaatttcctcatcaaacgcttcaatttcgacatttttctcaactattcccgattttcaacatttttcggtactttttaagtttacgagggtatttttaacgatacattttcagattcctataaatgtgttttagaaattaatgaaaataagttttaaggggtcgtcgaaggtcgcctgatcacgaatccgggctcagatcgagcgctaccgattcactacgatgagctgtacgagggacaaagaattgataggcttcctgtaccaataataccctcattggcgagatgcccgtga

SEQ ID NO: 66883 - DNA, 699 bp, Heterodera glycines
gacgagtcaggacatccgccggcggttgagcgagcaaatttcggtggaccagcggcgctacaaagagttcatcgaccaccaaatgctcgtcatccttggtcagatataccatatctgatcctagtattatccacacttgttttccaggtcaattggatcggccctcgaaaatcttcgattacctttaccttggcacggaatggaacgcgtccaattgggaggagctgaaggcgaatgggtgggacaaaagatagataatttacggactatctgtcggcaaaaatgagtcgaaaccgaaaaatgcctaagtatggattgaaatttgattatcccggaaaaaacttaaaatgctttttaattaaatttaactcgatttttcagtgtccaatacattctgaacgtgacgaaggaagtggacaatttcttccccactcagttcacttaccttaaaatttgggtgtccgacgaggcgaccaccgaacttttgatgcattggcaacgcacttacgactttatcaaggaggccaagtgggcaaattgccaaaaaagtgccaattttaaataattcaaaaatattccccgcagggaaaagggtgccaaagtgttggtccactgcaaaaagggcatcagtcggtccgcgtccactgtcatcgcttacgcaatgaaagcgtacggctggggactggacgaggcgttgga

SEQ ID NO: 66884 - DNA, 447 bp, Heterodera glycines
atgccaatggcccatggaaatcgttgtgtggccatcaaagtggtggacatgaacaaaatcgagccggagaaggtgaatcagctgaacaacgaggcggccattctgcacgaactgaaagcgcgcggagtgaaactcatcccccaactgtacacaatgtacggtagaaaaacgaaaggggaactcatcccccaactgtacacaatgtacggtagaaaaacgaaaggggaactcatcccccaactgtacacaatgtacggtagaaaaacgaaaggggaactcatcccccaactgtacacaatgtacggtagaaaaacgaaaggggaactcatcccccaactgtacacaatgtacggtagaaaaacgaaaggggaactcatcccccaactgtacacaatgtacggtagaaaacgaaaggggaactcatcccccaactgtacacaatgtacg

SEQ ID NO: 66885 - DNA, 155 bp, Heterodera glycines
ttctgaaaaaaatatttatgaaacaaaaaaatcgattttttcaagtgtccgtttggggtactctaacatttatggggagcgaaaatccaacgcagaattaaagtacaggctatagggaagctattcccgaaggattcggtctccccataaatctg

SEQ ID NO: 66886 - DNA, 4605 bp, Heterodera glycines
atgattggcggagagcgcgaactttccctgtctgcttcttcatcgtcgatcggtgcgccgaatggcaccgtccctccggcatcgtcggccaacggcgcctcctctcaaaatcgatccctcccaatttcggccgccctcctcacgcagcaacaatacccacacggacaacagcagcatggccaaattgtgaccaaagcgcgcgactttcccatcacaattcggtcaatgcgaatttcgctcgctctgctcaccaattatcatccaattttggtcggtttttatttattttttccgtttcccctcccctttttttaatttagtttttaaagcaattcctttttttcttttattttaggcctcccaaaatgaactgatcctcaccattttgctggaccttctctggatgcccaccaattcgtgggaggcggcggtggctgtcgaagtttttcgaaaaatcattggccaaccgacgcttttgaagtaaaagaaattgttaaaaaataccccaaaaaagcctttaaaatttgcagatggctttgtgcgagggaagagggcgcaaagtttgtcgagctgctcttttcccgtttgtattcattcctgcgcaaatgtttggaggaaggtgaaccttttgcggttttcgtgtgttttggacgaatagtcattccattacgctaatctttggccctcatttagctgctaatgattccccgagtatccgtgacgagaagattggccaacagggctttatcttcaaaggcacgtgtttaattcattcatcattggcatttaatttttccgctttaggcgtgtttttgccactcgacgaaacccaactgagccaaaagcgttctattctgtgcgtctttttgccatttttatttatgtttttggcatttatcttttgtcctcctctctctcccttcagcttggattggctcgacaaacacagcgcggagagaatccccgaggcgtattgtctgtccgttggttttgccactttggtcgatgcgacgggcgccgtctgttcagcggttgagagcggcgaattgttgccggcacagaacggcgcaacaacggcaaaggaggagatgccaaagtcggaggagaagtgccaaaaagccaacttggacagttcggcatccctgcctcaagcatactccggtgggaaatgggaaggcacacttttctaattgataatttaattgctgaattgtagacattgccaaagagctgttccaagtggcccattcctttctctgttcggccatttccactttactcgacttcaggttttgtgtgcctttttagtgacattccaatgccaatttcctttttcaatttatagtgtcgacgattcaatcaccgaacatttgttgacctgtctctcatcattggtcactttggcatgcaaatttggaaatgccgatgccaaacactcgctgttacgggcgttttgtcgcgcagttagtcccttacaaaatgccaaaacgagttccaatttcccaggctttgccatgccaatacttctcgcgtttcgtcgactcccactcatcggcttcgcttgcgctgcaaagcggcgcaatggccaatggttcagtcggcgccaacagcgatttgagcttaaaaggtggcccatccaatccaaatttgccattttggtcggtcattcggtgtcccgtcacattttgcagattcgtcggttgaaccaacccaagtggtcgcgatgggcactgtttgtccgagtccgcaccatccctcccaattcttcaacaccaccgtaatggtgcgtaaatccttttttgaatttattttcctatttttattgcatttcacgtttgtataacataacatttatttatctgttgaagttttagcattgcataattttcagatgaccgccaaaaacttgcaagttgcgcgacttttgatcggttgcgtccaccaaaacggccatttgctgggcgactgttgggaaatggtgttgactaccatccaggtgaaacgcgcacagggattatcattggactaaatgttccgttccgtttatttaagcactttgtttggatcgtcggcctccgtcccacttccaccggcacttttcgtgccggtggcgagacaaaatcagcctcggaaggcggcggtgttatgtccaccacgtcagcttcggccgcgagtacggtgattttgacgacagcagccagctcggaattgccggatttggtcgggaaaacggcggagtattctgcagcctttgacactaatttttgctctttgtcagaatcaccagctgaatgtcctgttcgagtcgacctcgaccctggacgaagtgtccatccatcacatcatcgccgctctttgcaaattgtccaacgagtcgatgacggtctgtctctccttattttgccactttttgtgccatccgtccaattttggccaatttttaggtggcccagacgagttctcgtgaaacatcgttcttctccatcgccaaactgctccaaactgcactggtcaaccttcctcgtttgcatgtgttctggcgacctgtcaccgcccatttgctcgaggctttaaacaattaaatttaattgtcattaatttttttttcaatttcagctttgcgctcattccagcgccgcaacgcgcgagtggggcgccgtttcgttgactcagttggtccgaagtgcgatgaaacaaacaattgcggaacaacgcgagttggaaacgaacaaaaaaacagcgaaaaacgaagagacaatcgtaaattgcctaattagcatgtcttaattgttttgattatatttttacagaagagggaacaacttattctgaaccctttggcggcaatttgcgaaatcgaatttttggatgtccgcgctaagcaattgggtcaatatcaaattcatttaactaattggattatttttaattgctcttccccacagattgtcttatgcgcattctccagtccgacagtcgccccattgagccgtctttgtggccttccgtcgtgcaaattgtctcttccgtggtgatgcccgattcgcggatgaacacaatgtctgtgattgtttgatttgcttttctgatcattttccttttagcactgatccccagctgatcgatcagtctttccgtgtcctttctctggtgatcaaagagtttctcgccgtcgtccctttcgaatgtgtccaaatgctcgtcgaaacgaacgcactttatggccaacagcaaattcaccttaacgtcgcattggcttcagttggccaattggtcggtgctttttcgtttattaaatttaattgaaatttaattttgattcctttaagtgggacatttccgactttgtgcgcagggcgcagcaaaacgtgggcaaagaggaggcggagacggcgtggctttgcatttacgccgccttgggcagactgtgcgtcgacgcgcgaccgccggtgcggaaaagcgcgtgcgacacccttttgcaaacagtcgcagcgcacggacaggcactcggcacacaaaaatgggcagaaatgctgacagatgtaagccaaagattaagaaacaaatactttcttctgatttttgagatgtattgtttgtaaaacggaaaaataaattcgtaattaattaaccaatcattatttaagttattgccaaatgcattcctctcaccccttttaggtgctcttcccaatgttggaccgtgttcgccacctcacccaaacggcgtctacccaccgttccaacacttccacgctcggcgcaccgaacttaatgattcatcactcccgagacacgtatcaaccgaatgggctaatcttctcctttaatgtgcaaagtcatttagcgaatcaaagcaatgggccgaaacgagcgtaaaaacattgggtggcgtggtgaagattttcaacgcacaacggccaatgctgctccaattgggtacagacttaatttacactaattattttttttaacaattccagaagcttttcccgacttttggtcgcagctgttaacgcacatcgaattggccgcaaaagcggacagtgccgagatgagtttggcagcactgaaaaatatgcaggatttgctgttcggtcggcagcagcaaacggagggacagcaacaacaacagacaattggcattcgtgggaagcaacaaatgtcgacaaacggcaggtggggagaaaatgagggaaataaaaacgacaattctgcaaaaaatgggccaaaatcgtgtcaacccaacccaatgtccattcatccccacacagtagaaccgagacggatctctccacaagtgcgcccttgcccgacccgttgtggatggtctgctggtcgttttggctgcgcgtcgcccaggccatcgtttcgccggactgtcccgccaatttggagttcgccccgtcgttgcgcccttcctccgacgacccctccccgttcattccgacgacaaagtgacaaaccaaaaatggacagaaaacccaacgacaactgaattttttcagaaaacattacgtacccggcctttaccatctgaccactcttctggagatgttccaacagcttttccaccgcgttcggcgtcaaattccgatcgaagac

SEQ ID NO: 66887 - DNA, 643 bp, Heterodera glycines
gccaatccaagctgaagggagagagaggaggacaaaagataaatgccaaaaacataaataaaaatggcaaaaagacgcacagaatagaacgcttttggctcagttgggtttcgtcgagtggcaaaaacacgcctaaagcggaaaaattaaatgccaatgatgaatgaattaaacacgtgcctttgaagataaagccctgttggccaatcttctcgtcacggatactcggggaatcattagcagctaaatgagggccaaagattagcgtaatggaatgactattcgtccaaaacacacgaaaaccgcaaaaggttcaccttcctccaaacatttgcgcaggaatgaatacaaacgggaaaagagcagctcgacaaactttgcgccctcttccctcgcacaaagccatctgcaaattttaaaggcttttttggggtattttttaacaatttcttttacttcaaaagcgtcggttggccaatgatttttcgaaaaacttcgacagccaccgccgcctcccacgaattggtgggcatccagagaaggtccagcaaaatggtgaggatcagttcattttgggaggcctaaaataaaagaaaaaaaggaattgctttaaaaactaaattaaaaaaaggggaggggaaac

SEQ ID NO: 66888 - DNA, 1317 bp, Heterodera glycines
atgccattgaattacgcggtaagaaaatgaacgcattccaaagggtcatgggaagtgcccgtcaggcattactgccaaaaggccccaaactaaggaatccaaaagataatttctttgggagaggtgggaaggggagaagcgggttacgtaccccaccccccacaaatttttagagaaaaaatagtatttttgataaaattttcgatttcccttgttggtaccccctccaaggcctccctcatccagtctaaaactgttattaaattgcactcgaattttctaaaaattttcccgtcggcaccgacccactgtccccacttttaaaagaatgccgcaaaaagtggcatgaaaatcgtaaataagtcgtcgcccgagggcgatgtaccccaccccaaacagaaattccgcgaccgtcccaataattgggatagaattttggccaattattagaaataaaaaattctccacacctctttgatgtgattgtgcttcttcttcgcctccgtggaaagtgttcgcaagtcgcccatcaaataatccaccaactttttcggatcattttgctgaattccgccggttgaagcggacgaagaagccatttttgtatctgttctttcaccttttctcctttcgatttattcaaacaaaaaaataatttagcaaatgaaatcaatatgcaaaaagcaaaaaacaaagaaaaatgagaaaaagacaaagaaaggtgaacaattcattcatcattcgtcatcaaaggacgaaaagaaaaaacgaaacgaaaaacggaggaaaaggtgaaaattatgaaaaaagtggcaaaatgcgagatccaaagttggttggtcctaacagaaaacagtcgatggattaggcaaaagtgagaatttttgaccaatgatgacaagtttggtgtgtgtgctatagaatattttcagtaaatggagaaaaaacaatgatttaacggaaagagaaggggagaaggacaaagccaaaaaagagagaattctgaaaacaaattcacaaatggccgattttatttcaattttcttttttttcgttttggctatgtcttgaatgaacatcaaaattttgattcaaaaaataggaattgctgaaaatgccggaaataattgagtaaacaaatgggcgatgattgattggcactctctcagtgatggccgccagtggcgggaacgggtggcactgccgaaggttttgaggctatcaaacccaaaatattttcggggataagcgtccatagataatcccaaagtgcgaaaattgatgccaacacatttttggccatctgaaattggcaaa

SEQ ID NO: 66889 - DNA, 1652 bp, Heterodera glycines
atgcttcgtcttccgacattcttcaagggctacttgtggctgctttacctgggagttattgtgcttttcatttattatttccgtgttcctctcaaagcctatgagaaatttgagtcgcgtaaggagtttaatatttctacaatttttaaatattctattttttaagtaatattactttttaagtgctttcaatgagcatgtacttcaataatctcacgccaaaattttacgttgcattgaccggcacatccagtctcgtatccggcatcattctcatttttgaatggtggtacttcaaaaagtaaaggatattttctttcttttaattttcttatttttctaaccaataatttattattttatcattcaattctttaacaaaaaaaagagtcaaataaaagcaactaaaacttttcaattaatgagggcacttttaatgccttttcactgaaaaaagaaattattcactcataaatttgtagtctctcgccccattcgctttccctttcttcccattacgtaaattaggcggtcggttgaacaggtgcaatgccataattattaattgccattgcaccgctttggtcgccgatggcaacaaagaaaagaccaataaactttttctaatgagtgcgtaatgcatttattccataatttattgtaaatatatttcacattaaacctccaataaaacgggttgaatgatgatatttttgctgaagttagtcatttggcatggttttcaaaacttttctttcttttaagcaatgccatcgaaaacgctttggaaagtgaagacggaagcgacatcgacgaaaattacgacggcacaaaaccattaccaggtcggttttcatttgtaaattgcgtttttaaagaacgaaatttttcagagctcactgagtacgacgagaatgggcatgaaggcaacgactgcaaagtgtggcgcaatccgatggcactttttcgcggtgccgaataccaacggttcacacgcgagacgggccaagaaccgctcactttctacgatttgaatctctccgcgcaggaccaccaaacctttttctgttgcgaagccgacgcaggaaaagaggacttggaaagtgcgtatttcaaataatgtttcaaaacataattcttttttaagttatgtcaatggtttggcgcgagagggacagccaagtgcgaatttccgaagcaaaaagggcgttgaaagtgaattcggagtgtgcgccggcactgattttgtcagctcgaattttttccactttaatattttcaaaatttcagattagcagaagaattttgccaatcagttgcagaagtcgaggagacactgaggtggaattgtgaatgaatatgacatttaaaacctcatcacttctaaattttcccaggaaagcattgagaatcgtcgagggaatgtacaaacggagtcaggccgccatgtacccggaccccgagtcacagcaaagtgcgtttggatccgattaaacgcccacattggcttattgtaattttcaaatcattttctttcagagagtagggacatcaacatgttggtgttcattcgccgccggctcgccatgtgcgcacgacggcagggacgtgtaagggaggcgatcaaaatgatgcgggatgtgagtgattaa

SEQ ID NO: 66890 - DNA, 2139 bp, Heterodera glycines
atggacgacgccaacatcgctgctattttggcatttgttagtaaactgcgattctctttttgcaatgttttcaattttagtataatttattggccgccaaaattggcctggaagactgccaatcgctgaaggaagtgcgcaatttgatgccaattttagccaattacatgtaacatttatttttcgtttcctttttccatctatctttttactttgaatttctcaccagaaagtccggcacacttactttcattgacgactctaactttggttttcgaaatgccattgatatcattgcgcatggtttggatgaggagttccattcgcatttgcgtcctgaggctgcggagagcggggatttgtccgaggcgaccaaagttgcacccattttttgtcttttcacttttctgacactaagattcatttggctatgctttacactttccgtttacttcaaacggaggcattttcgactatttgtgaacggttggaggacaaacatcaacggcactttgccactgtcgtaagcttcgtcctacaaatactgattttttgtccttgtatttatttagattgaatgtcttgacgaccgtcgctgttggacttccgctccatggcctaaactgttgcacaccgacagcaatgaggaggacaaagagaacgtcgagtcggtccaacggcgtcggaagagttcgctcaacttaacgcaaacgccgaagctcgactctgccagaaagtcgtttttccctagcgggaacagtccaattctcaaggtccgtggggttttgcgaatacatttacgggtgatggatgagcacagctgaactggttttctggccattctcgaaaaaatatttcattcttgagcaaccccaatttcaatgtaataccgttttatatacaggtcatttcgtcaccgcgaggcgaggaagtggttcgaatccatgcgcttcagcgggaagtgaaggctctgcgccaaatccgtgacgttttcggtcgcgagaaggacaaggcggaagagttgtgtcagcagaaggaacgcgaaaacaacaatctgttgaagaagatcgaaaggtaaacacatggaatgcttcgtactgttatggatgctttttactacggtttgggttaaaattaaaaatcccgagctctcttcaggatgcaggctcaaatcgcatgcattacaccgtgcgccgaacgcactccggtgctggaggatcaactgctgatgatggagacacaggcagcgacaaacgccaggcagctgcaggacgcggagaaaagagcacagaatgcggagaagttcgcggcggacttgaagtttgagttgaagaagatggacatcaaacacgacaatttggagaagattgtggaggagcaaagcgcaaagatacgaatgtcacgggacgattcggacgcggtggaacaactccgtaaggtaaagaaaacactcggaatatgtgatgaaggcatcccatctactcccttattttgtcgaacccaagagcgaatcaattgagagagttattgacgaaaataaatgcaaagaaaaattattatttagggggggggtgatatttgaacgcataacccctgcacaaatatgttaagataaacgggtttctgaaaagttttcaggagttgatagaggcgcaacaccaaaattctgtgagcgcatcgaccatcagggagctgcaaaacaaattggaataccaagagagggaattcgcaagtcgattgaatgataaggcatttctttgaattgtgatagatttccaatcggaatatattttcttaaggaccaagaaaaggacacttattggaagatgatagaccaatgcaaagcacgatcagaagagaacactcagaaggcctatgatgagctgaaaaaaacgcaggaggagaagcgcaatttggagcgcgagttggctgagggtaaacggacgatgaacgaactccttgaacttgccgagcaacagaaggaagtcatcacggcatgcgacagtgacaggacggagctggagaaggcgcagaaggagttggacacggtgcagaaacagtcggcggagagggagcgcttttggaagagcgaaatggagcgaatgcaaagggaaattgtggctcaggaaaagacgaaaa

SEQ ID NO: 66891 - DNA, 1014 bp, Heterodera glycines
  unsure (1)..(1014): unsure at all n locations
atgaatgaacttagtgccagatcaacncaagcgaatgtccagcagcagaatgacatggaacgatcatttcgctcggggatgaacagaacgcagtcaatgagcgtcacattcgtttcgcgtcttggttctgcgatgtctcaccaggaaacgttgtccaatttggactctgccggaatgaacgacgatgaaaggtgagcgaaaaagttgaaactgataaaacaaaagatatttctgatatttatgttgccaggctgaaagaattgcgcgagcggaaccggcgttatcctccgcacatgcgctcgtattatttgccggagtctgctcatctgaagaacagcgagacggatttgaatgttatgccgtgagagggaataattggcaaaatctttatcaatggaatgacccaattcgcttttttgaactcattattttttctgtgatctgaatattgatttgattgctttaattagaattatcatctcagaataaatttgacgatttgaaacaatggtaaaattagccagaaaagtcattttacggtttcaaatcttaatctttttcgaaaaatggggggggggacaaggtaaaaaaaattcagtggaatgaaaaaggagaagtaccgtatgtccaacgggtttgtgatgacacgctgataggggacgaatgcttaaacaccaaaaaacttcatgccatccaaatgtctacgtcaaacagagagagggagggagaggaccaaatttcagttaataaattgacacacgcttaatgaccatcaattcaatttatttcggaacacagatggaagtccgtcaacgtggacatctcctgcgacgccttcgaccccggcagcgaggacaccaagggcgaccgtggagtggaccaacacgccggacccagccgccaccgcgttcaagctcgagtggttccagggagacgggatggtgcgccgaagaacttgccgatcgagtacaacgtctgatggaaggatgcttcgtcgcctcaacatggacatga

SEQ ID NO: 66892 - DNA, 411 bp, Heterodera glycines
atggcgccctccgtttattccaatttcgcttcggatgcgtcggttcaattggcactgaatgttccccttccaaggaatgtttgttgtacccaaattgacaatgtccatacccaaattgacaatgtccacgaggtgggcacatcaattcaccaaattgtttgcagtttctcattttcagatgctttaccttttgcttcgccaccgccgtttccgtgagaagtttctcaacgacgacgataaccgcgagctcaaaaagcggcttctccgtgcgctgatgcgcgaagagataatcccatcggaagaaaactgagaaaatcggcaaaatttttggaaatatgccatttgaaaaactgctttttgattgttcattgctttatcatttcattttattagcgaaaaacatcgggtcaa

SEQ ID NO: 66893 - DNA, 321 bp, Heterodera glycines
tttttaggccccggggtcgtttgggccccaacccaaaaatcgaaaaatgtgcttttttaaaaattaagattctaaaaactaagcctgagggatccctcgccacttggcataagttaggtttaattaacattcgctcattttttacaattttacttattccaaatcctattattttttaatagttaaccaatttgatgtacattctgatttggacatttttcagaaatggctaacccaattgcaaccaaaaaacaaaaagtaaaattgtcttacgaaggccacctttacaccttcgctaaaatgagttctgatgggatgaca

SEQ ID NO: 66894 - DNA, 819 bp, Heterodera glycines
atggctggattcattgcatgccatatgagtgcgctctcaaagaacaggagtttttgggctatggcctcatctaatcattccattatggaagaaattgttgctaatcatacaatgacgccacgcttaacagcgacagtccgttccctgattaacaacagaccagtaagctgtctggctgataccagagcaagtgtttctcttgcgccgatgagtcttatcaatgaattgaaatgcaaaatttttccgacaaatcacaccgttagttcagcctccgggcattggatcaacataacagcagcagccatggtacatatcgaaattgcaggtcagaaaatttttggcgaaataaaactcattcaggatgaagttatgagtgacagaagggattatcaagtcattcttggatgtgacttgatggcaaaacttccaccgattacttttgattttgttcaaggtctaatcagtatttcaggaaaatctgtaaccatgggagaaagaggtgacttgctttactccaatgtcaaagttgtggcacgtcatcatgttgacattcaaccaggatcctatagcatgctgaccggcaaacttgattcacaaattcaacttgatcaagttataacacattcactggatggacgactctccaaaatgcatctcgggatgatctcaactgtcgcaaagcccgtggagggatgcatcaagatgatattgaccaacccaactgatgcaccaatcagcatttgtgccggaatgcacgtagcacttgtcaatgaattgaaacaaagcgtggacggtccatggcttgaggaacaatcgcaa

SEQ ID NO: 66895 - DNA, 100 bp, Heterodera glycines
tgtcgttgatcactccaaactcacaaaagcgacagttttgcacttggaagcgtcgactgggcggcgtaaatgcattcgtagaaatgctttgttccaaatg

SEQ ID NO: 66896 - DNA, 96 bp, Heterodera glycines
atggctgatctgcaaaagttgagtggtgccgatcggctgctgctgtgccgtcgatatttccatgtgggcttcgtctgtctccctcttctctgggcg

SEQ ID NO: 66897 - DNA, 577 bp, Heterodera glycines
atggaaaaggaacgctcaacatcaaccgaggtaaggggagcaaatttataatagggaacaagatttggtggcacaaagtaacactttcagaaatggctaaatacggtataaaaactcgttttagaagaaaaaaagcaatttcttgagaaaatcgaccaaaaaatcgaaagtttccattttttgcttatttttgatataaattaaccaatttttaataaaatttaaatttatcaattttttcgacaaaattttgctaaaaaatgtctttttcagaaattttttcggtccttaggagtcaaaaaggccgatttacctcatgggggccgttctaataggggttttttggaaatatgccaatatatggacataaaatatggacataaatcgcgaaatatggaaaaatatggaaatatggacataaatcgcgaaatatggaaaaatatggatatagaaagctatcctagaagcttcaaaccgagctaaaaacatgtttttcgttcgtttcaggcctcccagagtccaggaacaaatatggatttccatataattggactccctattgatcatggacaataaa

SEQ ID NO: 66898 - DNA, 88 bp, Heterodera glycines
ggattatttttcaaaacacctcgtagactgggggataattggagactacgggattaatagagactgggctataattagagcatatacg

SEQ ID NO: 66899 - DNA, 591 bp, Heterodera glycines
atggcaaaaatgtcaaaatatggacataaaatggcaaaaatgtcaaaatatggacataaaatggcaaaaatgtcaaaatatggacataaaatggcaaaaatgtcaaaatatggacataaaatggcaaaaatgtcaaaatatggacataaaatggcaaaaatgtcaaaatatggacataaaatggcaaaaatgtcaaaatatggacataaaatggcaaaaatgtcaaaatatggacataaaatggcaaaaatgtcaaaatatggacataaaatggcaaaaatgtcaaaatatggacataaaatggcaaaaatgtcaaaatatggacataaaatggcaaaaatgtcaaaatatggacataaaatggcaaaaatgtcaaaatatggacataaaatggcaaaaatgtcaaaatatggacataaaatggcaaaaatgtcaaaatatggacataaaatggcaaaaatgtcaaaatatggacataaaatggcaaaaatgtcaaaatatggacataaatttttcaaaattgaatgtaaaatttcttcaaatttattggttgaaattgcatatgagatacatttccaaattttggggtga

SEQ ID NO: 66900 - DNA, 3453 bp, Heterodera glycines
tacgcaattggtgtcaccaatttggtcaacattcgccccctttttctcttcttctgtttatgcgcttcgcgtgcacaccccccccccgtttgatcagttggacaaatcgttggccgactcaatcacttggcacatgtgcagcaccgaattccgtaaacatttcgacaaatttttaaaattgattgaacaaacagaattttaatctgaattcagtaaccggattttttttttgacaccagcacattttgcacggataatttgggaaaatccatgaaaatttctgataaagaaaacacggggaaaacaaatactcaaaaaattgtttcttttcaccaaactccttccccattccctttctctctcttttttttgccaatttttgttgcgtgtatattttgctttccataaaaccttccatatttgtatctgagaaatttatgaaatttggcatcaagaaaaaaaagtcttagaaagactttttataagaaaattctaacaaatatgaaaaaacattttttgcgaaatttttatggggaattacaaagaattttcaaaaaattttccaaaaaatcgctgaaaatacatcaaaaaaatttttcttagaattttcttataaaaaaaaaaactttctttcctcagttcgtaatgaacagagaaaaaacaaaaacaaaatacgcaaataaaaattagtaaaaatgttaaatatatattaattagtattcagtattacaaaaattctctttgaattacctcgccataattttttttttaatttaaaaatatttttccaagaccctggcacgcctgaaataatttgtgaaccggacaaaattggtgtgcgcgcaagcaccaaaaaacagtttgatggcattgtttttgtgcaagacaattttgatcgtgccgaatgccgggcgggacctgaacactttcccgacccaaagtatttaattgaaaaattaattttaactttttaagaatgatgggggtaaaatggcaccattttttgattaatttgttcataaaaatggcattttccagaatcattggcatcaccgtgccattcagaaattgcaatgtgcgtcgatatcgatcggtaaaatgaagaatttattttctaaactaaatattttaattaatttataaataattttcaattcctttggctttattttcagcttaatccccgtggaatttttgtagagatggcggtaaatcttttaaaagttttattgaaaaaaaataaattattttattatttttaggttgtttttatgttccatccagtgtaaaattctaatttatttaaaacaatttatttttaaacgaattaatttaattaaaaattcacacaatttattgctcaatttttgtagtttcatgacaaaagttgaccaaatggttaaaattcaatgcttttacatggaggctgagaaagaagtcaaagtaccgatggaagtcaggcaaaaaattttttttagaagtttcataatttaattatggttaaataaatttttgcgaaatattttataaattaatttaattttatatttttaataaaaaggaaattgcatttcagtcaaatcacaacccaattctatcaacaagtgtaccaaatgccacgctgtgaatacacactgcgcaaggaccatgcaaatggcccggtagtacagtatgccgtccttggtaactcattatttttcttttttcatagaaaaaaatagttttatttaagtatcagtaagtttgcaaggcgatcgagcactataaatttacagtaattatttgggcagtaattggaaatttctgtaattgaaacaatctataaaaattaaaactgtctatcattatgatgcattgataaactaattagtttaattattttttgtaggtcaaagcgtgttccataggtgggaatgtgtggaggagctgaacggtgatcaattcggaatgcttgtccactcgtgttttgtaagtttttctaattaaaaattaattggacaattaacattaattaaacattccgttttttgattacatttataataaccacgacctttaagaatgaatttttttaaaatgaaaaaccgttatcaccagtttttggttaggccgggtttgggcccccgtttttcgaggtttggttcggttaaacaaccgtgacctaccccactaattataatgtaatttgatcattgtctgcaactttgattggcaacaacaaccagcaaataaattttttatttattgaattctgcaagtcaattttgttttcggttgataatggtttcggtgatcgggtggacattctcgactcgcgtggctgtggcttggatgccgtactgttgcgcactcccgactacgacagcacattgaggctggccaccaaggaataccatgtgttcaaggtagtccaagatcattgccaattatttgaaggctgaaaataatggcacacattttggcacgtcataaaataagaaaggaaagtcgcttcaagatattgtaattttttcaaaactttcgcttactttcaagattcttttgttggtaattttacattttttggaaaaattgaagctgaatcgtccaactcacaaaattaggctaaatgaattaaaaacggctaaattaagtatctataagtgctttttagcaatttaatgtcaatctttattggtaattttttacataattttaatctccaattaattaccagtaattgattccccttcctacagtatgcagaccgccctgtgctacagtttcaggtaaattcttaataaatgttcaagaagaaaattatattggcaaattaaaatcaattctataaaaaattgtgaatgtactgagaaacatggctgggcgtgactggatttccagttatggaaacccgtaatccgtaattattggcattagtttctcaattaccgaattccgtaatccataatgacggggggggggtccaaaaacgccgtaatttccagtaatccgtaattacgccaagcagccctgttgggaatggatggaggagtaaggttcggttcccacacgaagcgcctactaacattttgcctattttatttttcggatattaattcagcattcatttattcgtttgtccacttttttaagtgccaaattacattgtgcctaaagttggacaatggctgcgctggcataacaccgccaaagtgtgccgcaactgtgccacggcacaccgtcaccgagcagtacaccactcgaagacgcaagtcgaaaaggcagcgaaaggtgcgcagcgttgcacaagcacagcaaaacgaaagtggccaagttattggagatgaacaaaatggtggcacgaaggtggacgtgttcacaagaccaattatggtcggttttatggaaattttaggcaatataatttattaattaagggataatatagcaaataatgaaactttttagaattca

SEQ ID NO: 66901 - DNA, 693 bp, Heterodera glycines
atgatcttggactaccttgaacacatggtattccttggtggccagcctcaatgtgctgtcgtagtcgggagtgcgcaacagtacggcatccaagccacagccacgcgagtcgagaatgtccacccgatcaccgaaaccattatcaaccgaaaacaaaattgacttgcagaattcaataaataaaaaatttatttgctggttgttgttgccaatcaaagttgcagacaatgatcaaattacattataattagtggggtaggtcacggttgtttaaccgaaccaaacctcgaaaaacgggggcccaaacccggcctaaccaaaaactggtgataacggtttttcattttaaaaaaattcattcttaaaggtcgtggttattataaatgtaatcaaaaaacggaatgtttaattaatgttaattgtccaattaatttttaattagaaaaacttacaaaacacgagtggacaagcattccgaattgatcaccgttcagctcctccacacattcccacctatggaacacgctttgacctacaaaaaataattaaactaattagtttatcaatgcatcataatgatagacagttttaatttttatagattgtttcaattacagaaatttccaattactgcccaaataattactgtaaatttatagtgctcgatcgccttgcaaacttactgatacttaa

SEQ ID NO: 66902 - DNA, 46 bp, Heterodera glycines
atgaactggcgtggctatggaggcagcatgggaagcacatggggag

SEQ ID NO: 66903 - DNA, 438 bp, Heterodera glycines
aaaatggtgtaagtaaaattgtaattacgctcaaaaagctcctcaaacaattttagcgcttccaattccttctacaatcgcctttatacatcccattatgagcgctaaaattatcagagtgccgaaaatcgcatgtgatctaagcctagaaaaaaatggtgtaagtaaaaatcgtaattacgctcaaaaagctcctcaaacaattttagcgcttccaattccctctacaatcgcctttatacatcccattatgagcgctaaaattatcagagtgccgaaaatcgcatgtgatctaagcctagcaaaaaatggtgtaagtaaaaatcgtaattacgctcaaaaagctcctcaaacaattttagcgcttccaattccttctacaatcgcctttatacatcccattatgagcgctaaaattatcagagtgccgaaaatcgc

SEQ ID NO: 66904 - DNA, 677 bp, Heterodera glycines
atggtgagttatcaagatttacaacaacaaaaaaaaattacgtaatttggaaaatggcagatcagccggtctcaaacccgtttaaacttggagtttccgaaaataggccaactgggttttcaataaagctactttcgataccaaattattaaattggttgcgataagacaatcttacggcaaaaaaacatcttggaacaagatatatgttatatctttttgtaaaagttttaaaacaaacttcttttcgtatacagaagaatggtttaaaaaagttttggtactatttggtggagttgtataaaggattcaagccggtcacaacgttggaattggcggaatttaagaaatttgtcaagttatgcgaccaacagaatattaaagatgtgggaaataacatattgaaattttataatgtgtattattagacaaaatgttaaatttaatttattagaatccaaaatgagcgaatattttatttattaaatatttttgccacgaaaaaaattataaagatttataaaaagagaaattaatgaataagaatttggtgataaaatttaaaaaaatgaaatcttttttaaatatgaatcaatatttttaaaaaatcgtttaaattcctaaaatcaaagaaggaacaggaaatattcgttcaagtaaagacaaaaaaaaaacaca

SEQ ID NO: 66905 - DNA, 910 bp, Heterodera glycines; identical to SEQ ID NO: 37937
  unsure (1)..(910): unsure at all n locations

SEQ ID NO: 66906 - DNA, 155 bp, Heterodera glycines
acattgcacgatgcgtcgctggtgaagtccctcctcaaaaaacgcgcaaatatcgtgccgtcgatgcgagaattctcgactcttacagggttacaataccatcaacaacatcaaccctgcttaccaaaatgatcaaaattaccatacaatgttaa

SEQ ID NO: 66907 - DNA, 78 bp, Heterodera glycines
  unsure (1)..(78): unsure at all n locations
gacggacgcattcaaatggctgaatcacatcaaaaaatattgaatatattgctaatgcttgncacgaagtgacgaaat

SEQ ID NO: 66908 - DNA, 146 bp, Heterodera glycines
atggctatctctttttttgagaaattttctatgcaacaaacgctctcgaacatgaaacgaagtgcggtgcgccgtggccattttatttttcaaataatttttaaatttaatacatattccagaaaaatggctatctctttttttga

SEQ ID NO: 66909 - DNA, 146 bp, Heterodera glycines
atggctatctatttttttgagaaattttctatgcaacaaacgctctcgaacatgaaacgaagtgcggtgcgccgtggccattttatttttcaaataatttttaaatttaatacatattccagaaaaatggctatctctttttttga

SEQ ID NO: 66910 - DNA, 146 bp, Heterodera glycines; identical to SEQ ID NO: 66908

SEQ ID NO: 66911 - DNA, 118 bp, Heterodera glycines
tgtccgtttggggtactcaaacaattatggggagcaaaaatccaaggcagaaataaagtacaggtatagggaagctattcccgaaggattcggtctccttataaatctgggcgcatcg

SEQ ID NO: 66912 - DNA, 1716 bp, Heterodera glycines
atggtggaggtaaaaacaaatttcaatttataaaattgatctaaaaatatcattttttaaaataattatttcgaattttgacatttttcacccgtaattttttcaattaagaaatattttacgaatccgaaattcaaatatttgtaatttagttattactatttttgaaaaaaatttcggaaaaaattaaaaagggtggagcagctccaatgtaagggagccttgaaattcttccatttcatttatgtaattaaaataccagaattacattaagtccaattaataaattaaataattaattaatgatttattaaatcgtttttccctacaggcgcctttctgataccgtaccttgtgatgctgttggttggcgggctgccaatgttttacatggaattggcgttgggccaattccatcggtcgggctgcttgagcatttggaagaaaatttgtccaatgttcaaaggtccgggaaaaatttgtttaattttgattgctaaagttcctaaaattaaatatttgttacattcgttttcaaaaaattttagaaaattgaaaaaattattttacgaattttaaaaattttttccagttttagcaattttaacttttcggtattgacgaaatttctttttccctatttatttgtgatatgcgactctctcaaactaatgaagagagctttctttcccctaaagttgggattgaaaggagtgcaaaggcgccctgtgtagctcagtggttagagcattccacggaaaggaagggacgtgggttctaatcccaccgcaggctgatcttttgcacttacgccatccgccaataataccacatattacgcctaaccttcgattatttataattttctcccattttaaaatatttacaaataaatgtgacaaaatttttttttctatattttcttttcttcgatccttttaaattgacggttttctctcttttttggttcctcggatttacgtctaacctccgattatactaataaatttaatttttagtttttttgaaatttttccaaaattaaatttctttttaattattaaaatttcatatttttcaagggattggctacgggatttgcttcatctgcacgttcatctcctgcttttataacacagtcattgcacacgctgtttacttcttcatcagctctgttggggtcaaacaaaaattttttttttttttgaaaaatataatgccaaaaaaatacaaattttagtgggaagtgccgtggcaacgctgcaacaacacatggaacacccaacagtgccgtgaatcgctgaacgcaacaatgggaaccgaggatgacaacggacaacagctgaggacgccgtcccaagaattttatttgtaggtttaggggggggttgaaaatttacaaaaaatttcaaaaaatattttttacagatattcggtgctcgaaagtaacaaatccaagggaatggatgatctgggaggcattaaggtgataagaaaaaaatatatcaacaaataaatttattttatgattgaaaaattttatttatttttaattgtattaaatataaaaaatatgtaatatatttagattattaaatataattatataattctttttgtgaattttacttttgttaattaaaattaaatataaaaaatatttcttttaaaatacaattcaaaatattaaaaaattgttcaaaattatataataaa

SEQ ID NO: 66913 - DNA, 151 bp, Heterodera glycines
atggcaaattcgtggtctgctggaggcggttatggcaaccttttggccatcgatgacgacgagaacaccaccactgaggaggaaaaaagtggcactggcattgccggaggcggcggtggcgaagggttcaccgtcgggcacggcaccgaat

SEQ ID NO: 66914 - DNA, 521 bp, Heterodera glycines
tccctcatggctatttagaccaccatcaccaacttcaccaccaacagcagcgccgctcctgcttccatcttcgtacaatggcaataatgcatggcggcgccggcgacaacggcggtggttcatcgacggtcgcgtcagtgccacaggggagcagcgcgggcgcagcggctgcggcgcagccaatgtttggtgacatggcggcgcgccatcgccggcgcagctattggctggcgacaacgacggcacagccgcaacaacaacagcagcagccgcgttcatggcacagaaacgcccgtggtagatgcggaagtgaggggcaacaagttggagcagtaaagcagcagcagcaaccacgagaagttggagcagtacaactgcagttacaacaaaaacagcaacaacaacgacaccaactaattgttggccagggtcggtgtatggctttgtattttcccctaagggataaaatgggaattttcaagtcgttcagtgccgagtttagggatttcgaaattgcgtaa

SEQ ID NO: 66915 - DNA, 908 bp, Heterodera glycines
atgtatgaagcatatacaaacgaagaaattgtttctaaattaccaatcgaagcatcatccatcggaagctatggtttgttttatgaacaactttctctttatgagatttagtttcgaaaggaaaattattcattggatccagacaaggccatctcataacatgcaatcagaactcagcaggttgtttgtgccgtcaattataaccaatcgtaatgtttagacacttccaaacttcattatgaatatcaagtatgtcgtacttttgaaagacgtccaataattgagcttcaagtggttgagtcgcacgatctaattatatgtttaacggatgtacatttgtcaattcatgatgctgtagaaccatttaagtttgtgatttacctttttttaatttggtcctctattttcaggctcttggatgtatgttctaagtacaaatcaatttccgcattttctcattttgtgacagaggtgagcaaagacgattatcaatagtttttgttttttcagagccaaactattcatattgcaatttccgcaagaaagcatttacacattttcaaatatttattgggtgaactttgtgaaattaacgactgtgcaccgattactcttcctgagaatgcccaagccgttgtgtggtatgtgttaaatacacttttttttgttagatttgcgtaaattatcctctgtaatatcaattttctaaccttcgtgctccgcataatggatttaatggtcattacttactgttaatacttattggtaatttttaaccaattttaaggtgcggtgtcaacaatttaattctggcatttaaatgcgagttccaattctgggacatggaccatttcctccacagagatgatttgatcggcgaaaaagtaacaaccaatttatttttgtga

SEQ ID NO: 66916 - DNA, 1699 bp, Heterodera glycines
atgctggcaaaaggttcagcaccatcaacagggtggtacggatggattacaaattggtttaccgaagaagggaataatgacagcgaggctcaaaacggtgctaaaattatgagattcatttaattagcatcattttgtagaactcaaaaactgtggcaacgatgtgaatgaggcactgtatttgagcatgaagccgcccaaactgaaaaagcacaaattggaccccgaattgaaggcagtggaaagtcgaatggaagccgaaatcctacaggtaaaactggcaaatgattattagaaaataaacaaaattaaatgagtttcaattggttgtttctgcagatgcttaatgagtcgtgggatgagtcgaccattttgcgcagggacaatttattggcagagattgtgctgaacgtagccaaagtgttcttcagacttagcgaagatgaggaagaaaacgaagccaaaatggagcaaggaaaagtatgaaagaggggtgggggggggataaaattctatatgggatttagggatgcgaaaatggaccaaaataaatgtaaaaaattggaaataaataaaaaaaactgcgaaaaaattaataaaacatttagactctatcataatgggaaatatcgcaaatttccacttttactatcaacgaataaaattcaaaaattaaaatgtgttttttctatccgtctttttcccatttagccttcctcctcttcgctggtcagtgaccgcggcggtgccggcgttgagacggcgtcttcgtcttccgctgctgccgatgttcagcagttgctcaccctcgacctcagtcggctgtgcagtcgcattaatctctcgccgaaagagcaccgcacggagctgtcgctgagtgtggccgacctaacggtgcagcgagtaaagcaccaccagcagcaacaccaacggcacaggacgacggaatcgccggcagaaaactgtggcgacggagcagcatcagctgacggcaaaagggcacgcttttggggagtgccattcccttacctccccttgccctattcccatttctaaaccatttttgcatatattcgtccctttttgaattgtacattattttttcagaagactgcggaaaaatcaccacttgataccgatgaattgggcttctttggctctgatgagtttgatgaatcactgttctacgggtttcaacagaaaaatgtacaaagtacgcaccttttgctggccattggacgaacatacggcgaaaattacgcaaaagaggcaaatggaaagcaaaaaaggtcgcaaatttgcagcatttataaggaatgggtcaaatgattcatcgggataaaagacattcattacatatcggacccttttttatttcagaagtaaacggtccaatttgcgtcaaaaaggccaacaaattggtcgtcgttctgctcatagtccatcatcatctaccgctgctgctgctaaaccaactgattatggtcaccaagcggaggacaacaacgcgatattgcgcctgttctacaagcgacttgcccccaaattggaggtgtaccacgagctgaacatctcctgtgctccgctgtcaattctttgcgatgagtgtgcgctgagcggaattttcgagccattcacacaaaaggtaggcaattaacatttgataaaacaaaagcgatcaattaactgcaatcaaaaa

SEQ ID NO: 66917 - DNA, 1601 bp, Heterodera glycines
atgaagagcttacaacatttagtgctgtcccatcattctcaactgaaagatacaatcgaagaccaactgtgcctggcttccattcactacctcagagcgcatttccaacaggcaattgacatttacaagaagattttgtcaaagaacaagaactttatggcgctgaatgtctatttggcactttgctactacaaattggattattatgacctgtcgttggaaatgctgcaaagctatttggacaaatatccggacagtccaaatgccgttaatttgaaggcttgcaaccagtacagactttacaattcgaaggcggcagaaaatgaactcaaagtgctgaaggatttgtcgagcagtgaacttcgctttgcaaaggatgtaatccttcataataaggtgtgaccaatcaacaacatcaaacgcaaattgcattaattacataggttgtattccgaaatggggacggggcccttcagttgttgccaacattggttgacgttgtgccggaggcacgcctcaatttggtcatttaccatttgaagaaaaatgacaccgactcagcccatgtgctgatgaaccatctggagccacagagcacctacgagtacttgctgaaggcaatcacactttgcataaaaggaaacgaagaaaattcggtacaccgacttttaatcagatggaacaatcaattagcgttaaacacagaaagaattgcggaaaacagcggcccattgcttcaaagtggtgggcgaatcaccggccgaatgcgatacaatcattggccgccaaagcatggcttcggcttattttcttcgacaacaatatgtcgaagttttggtgtacttggattccattaaggttcaaatcattattctctcaactaattaatgttattttttttttctacacagcctttcttcacaaacgacgacacttttaattttaactatggccagaatcagttgctgtgtgaacacttcgccgaggcggaagaagcgtttcgaatggtcacagggcacagcatcatctccaacctgacccattgtctgtgcattgcccgtgcttacattgcaaacaaaaagggcaaagcggcatggagcttgtaccagaaggaaagacacattcaaaattcgcaacaattgctcaaactggtcgccatggacagttatcggtcagacaaagagcacattaattacagctattaactacactaattaacctaatttgctgttaatcattcaaatatttacacgggcttttctgttgaacaaattgatttttaaaattttttcttttcccactacaattaaattaatatatttttacacagagctgaagactatgtaacggcagcaaaggcattcgacgagttggacaaacgcggtgccatcggtagcgatgacggcaacgaagaggaaaactatgccgtggcaaagcaggccgcatgtgttggcgttgtcaaaatgttcgcagcgcgacaatgcgacacgggagagttgagagacgcgatgaaaatgctgggcaaggacagagacacaaatgcgaaaaacattgtaacgacagtgaagaaatgggcagcagagaatggcgtgtacatatga

SEQ ID NO: 66918 - DNA, 513 bp, Heterodera glycines
atgaccatcgccagcgcctgcgtcaagaactttgcactcaatcatttgaagcccaactcgctcgccatcgtctcggagaaaggctatacaccacaacagaaccaaagtgcactggccatcaaatacctcgactggtactcccacatcaacaatgtcaacattcaaactgcacactcccgctatggtgaatatgtctttaaacgcgagggtcaggtgtatcaagtggatggttatataaaagggactaatgggaagagggataaaattattgaggtaaatggttgtctgtggcacgggtgtgaggaatgttttgaggacttggacgacgaaacgaaaatgccgaacggaaagacgctaggacaattaagagagagggaggtaaggaagcacgagattcttagccggtacgtagacttggaggtgatctgggaacacgaaatcaatgagcagctgaagaaggacaagcaaatgagggagtttttcgacaactggaaagaccactcaccaatataa

SEQ ID NO: 66919 - DNA, 60 bp, Heterodera glycines
gctcggatttacactcaattggaattggacaaacttcgccagcacattcagtctcgacaa

SEQ ID NO: 66920 - DNA, 130 bp, Heterodera glycines
atggctttttacatcactctgattgccctcgtgttggcggtcattcgctttttggtcaaaagtcggtcgaacacgacgtaccgtactgtgacagtaacaccgccgatgctggaggagtgtgcacagaaga

SEQ ID NO: 66921 - DNA, 688 bp, Heterodera glycines
atgaggaaaagagcagaggagaaagaggaagaggaagagaagaaggaatggaagagaagtgagacggaggaagagaagaggagaaagaggaagaggaagagaagaaggaatggaagagaagtgagacggaggaagagaagaggagaaagaggaagagaagagaaaaagaagacaaaactagagaataggaagaagaaaaagaagaaaggaagagaaagaggaagatgaatggaagagaaaagaaacggaggaagagaagaaaaacaaaggaagagagaaaaggaagacaaagacaaaacgagagaagcattaggaagaagaaaaggaagaaaggaggagaaagaggaagatgaagagaagagaaacggacgaagaagagctaaaaaagaaaagaaacgacggcaaaaaagaaactgacgaggagcagtagttccgtttaaatcaagctaagacaattaatttgtttattttctggtggcattgcccattgcttttcttcccctccccctttcggcatttgtgccgtaatcctttcttgctgatgggctaatggccgtttttcatggcaatgtttctttttcgtttacgatccctagcggttcatttgcctaattgccagctgatttgttgtgcgtaccctttagactcctcgaaaatcccctcatggcatcgcttttcgacaaataaa

SEQ ID NO: 66922 - DNA, 567 bp, Heterodera glycines
atgccgggtgagttctctcgttgcgcggtgatctctttagagttgtcgttggtctaggtggttttgacctatttcaaagtagtttgtgcttgccccatctgtgcatggtccgaggacctataggtgaattaaccgtagcagaagcgtctcacacttcgcagtgatcctcctcgtcaaaggcttcgctcacacggaaatgagtgcggttctagtcggaccaaaatactttttgagactcggagtgtttcgttattatttttattgggcacaacttgttcttaaatattttttcagaaagggttctgaaacgcaccaaattttatttacatgttagtttaggcactctgatgctttttctatcaaaaagggagatgaataaaatttttaaaaatttttaattcctttaaaaaaattttcgaaaatctgagtctttcgtttttatttgttttttgcataattaattcataaatatttttttcagaaaatgctctgaaacgcaccaaattttatttacatgctagtttaggcactctgatgctttttctatcaaaaagggagatgaataaa

SEQ ID NO: 66923 - DNA, 1228 bp, Heterodera glycines
atgcctttgactaaacaacacgaaaaagacgaagaggaagcgaattcaccaatgaaaacagcgaagaaacgccaacgaagcgaagcaaaggacgacaacgaaaacaacgacgacggcaccaaatcaattggcacaacatcaacaaggccttcatcaccaccagcagcagatgaagtgcggggacgacggtttagcgaacggttgcaccgcaaaacagtccgaggccaagccgaacaattgcagtattggcagtgccatgttggggaagaagcgggcggcgaaggacaacggcggaatgcaaacgccagcgccaccaccaacacgacggagaggacgacgaggaaaagggtggcggcggcggaatcggcgccgacagcaaaagcagtgccaactccgtcgtccaacatcaacaaaataactccgccgctcgccaccgccgtgccgccgccgtccgaaaagcggttgcgcctgcagacttatcaacagatcgctgacgactttggactgcgtcttacggcactttggtgagcacagagcatgaggggaaatacaaaaaattttgaatcattttaagcgagtttttcaaaatttataatgaattacataaaaaatttttcaatattttctttcatgaaattttcttataaaaaactttttcggggagggtggtggaccagttgctccccaattcttacaaatcaattctcattaacacttcgaaaacctttccctgcggcgcttttcggcaccgcttgaaccccgccgttcacaattttttttttttttgaaatttggcagccttgacatagagaaaaccttgtaatacctatttgtttttttacagtgaacaatactttttctcattgctcaccaatgccagcgtttgcctcgtgctcacaattgaccctcgtcaacagatggccaaaatttcctacgaaagggccttgggatggtgggtgattttttgcaaaaaaaaacaaaaattttaaacgccatccgaacatacgttcttttttgaaactcagaaatttaaaggttttattttgaaattcatataagacacagccgataaatctctataaaacacgtgaatttacacttcaaaatcaaaaaaaaagtgcgtccggccatcgattttttttctttacccccaaaaaaaaatttttttttttgaagattatttgagtttgttaagcgctttccattttaatttcttttttgtttgcca

SEQ ID NO: 66924 - DNA, 1321 bp, Heterodera glycines
atggcaaacgaaacatcgtccattccgatcgttgaagaaccgccggaagaagacgaaaatgaccacgaacaacaacaaaataaacacaccgagggagaggaagaaaaagccaacggcactttttcagtcaccgtctctcacccgtaagtttttgggaacaatttttcattcttttttgaatgtctcaaacaatgactccgttggtctcacacacctctcattgttatttttttgttaaagtttgatagctagtcaaaatcaaaaatggtatgccatttttggcattttgcaagttcattgatctttgggtcattcgaaagtgatcccttagttcaccggtttttttaacccaatttcacaatttttattttattttaggatttttaacatctaataggttgcccctttacagggatttgcgattggaaaggattgctggcgatttgctgctgcgtttggccatcgttcccgggtgtgtgatgcttttggcatttgcgtaaaaaaaattcatttattctttaacggcattatttcatttttattttttctgacttatttatttttaccacaattttggcactttcacagaaagcgtattcaactttcaccgcttgagcaacaatacaccaaaaagaatcggacgaagcaaaagggcgacgaatgtttgacttttgaggacttcaatgtggcgaatgacgacaggggatggatccgagtgattgaggggggcggagtcaggaagaatggacaacgcaaggtggaaaacaattattaataattaactaattatataaacacaccaaatttggaacatctaatcccattatattcgggtcattttgagcggaaaaaagcatttgcaggcacgcggactcgaaccggcagcactgggtagtgtggtggtatcgtgctctcggactatgtgggtccccaccggttcgaatccgcgcgcctacaaacaatttttttttgtcaacacaaaaacctaatcatgagtgaaaacgtctcttttactaagaaaaatattttgttaatttttattcatttttttccaaaattttggttgaatatgccaatttcaggcaacccggacagagcattggttgaagatttctcgggaattgttcacatatgccatcattggtgagcaatttgtaaattacctaattaatattaactgataaatgattttttgcaggaaaaagtgcagcagtttttcaagaaatttttccacgtgcaacaaacggcggttgacgacaaaacatcagcagacagatcaaatgaagaagataggaagagaagaatggaattaaagaaataa

SEQ ID NO: 66925 - DNA, 1151 bp, Heterodera glycines
atgatctgttgcgactactgtcttatttggtaccacgtcgaagggtacgggttgtgttgttttacagtgtcttatttttattgcaataaatcatcatttttgtgtcctttttacagtgtcaaagtgactgaaactcaagcaaaaatcttcaaaaaatttgcgtgccattttttgcaccgccaaaagacccaaagctgtgtaacgctgcacaagaaatgggccaaggggtgttgtgatgagcaaacatcgggggcacaaaaagcggcggaagcgccaaaaacaaaggttttttttgttgttggcattattgcaatttgctggaccaaaaaaatacttttacatctaataccataaattcttgatatcatttgatagccctgaatgttctctattagtctacgaaggttgaaaaaaattcacccaagattcaaaaacatatgacaaaaaagtgtaattttttaatttttggtcataacttttttgaaacataacgaacttctttgaagttttacaggctaatagagagagattaaagctatcgtatgttaccaagaaggtttaatttggatgcttctagaaaaaattatgatactttaaatttgttaaatttctattcgtgtgaactacgacagagccggttttttatcaaattttggtcataattaaacaaaaaacaattcattggggttttaaataataaaatttggctaattaattaaattaattaatccaactcccattttagagcaaaattctggcaaggaaaagaagggcgaaagggagacgaaaagtggtgggacagaaaaacgacgaagggaacgggaacgaagcggcgaatcgtcgtccaaaacagcagcaacaacaacaacaagcggtggtggtggtgccaggaaaagcaacaggaccaagacggacggcgaggaaagcgaagagacgaggaggaggagggcaacgcccgaggcaaatgccgtgccgccggcggtgccgccaccgcagctgccgccgttgacggcacagcagaagcaccagctggaactgcaggaggccaaccagaatttgcggtgcaaaaattgcatcggtaagcggtagggttgggtcaatatgattgcggcaaaagtgagttcccccaaaaagtttccatgcttcttgaa

SEQ ID NO: 66926 - DNA, 617 bp, Heterodera glycines
atggcggacatcaacatcagactggacgagctggaccagtggaagaacaatgtgcaccaattcatggtggtgttgaagagcaacaccttcgacaacggcaccaccatcgccatggacaacgacggcaccatcgctatgggacagcagcaacaacagtcaacgacgacgacaaaacgatcgccaaatggtggtgccgatgccaatggggacgacagggatggcggaaatgattgccatgctgcagaaaatggaagtgaggagaaaaagccaacaatgacgacggcggcagtgaagaatgaggacgagaatatggtaagtttttggagtactgcgcgagattctcggccttttgggtggtcgagaaaagcatccgaatacagacagacgccatcgggaattttttttggacgcttagcttttcaactgattgtgaacagtgttgcattctgttaaatgctaaccgaatttggtttaaattagttctcatttggttcatgtttcagctggtcggatgtccggtgtgccatggcgaattccaaatgcgcgaaatttgcaaacacgtgcacacatgctttgtgcgctcggagcgtcaaacaacgtacggcacggattaccaa

SEQ ID NO: 66927 - DNA, 92 bp, Heterodera glycines
gttgtctatctgaccgcatcatttccctatttgatgctgttctttttgcttttgcgcggcctttcgttgcctggcgccagcctcggcctcga

SEQ ID NO: 66928 - DNA, 396 bp, Heterodera glycines
atggactcggcacaaattcgaaatgctcttcttgagttggctcaaccgaacagacaaaatgaaggacaagagaacggagcggaaaacaatggaaacgaagaacaacgcggaggtttgcgaatgagattccgaaatgtgggaacaaacgacggaagagaaaattggttggttggagacgaaaatagaaatgatggtcatcgcaatctcaaccaaaacttgttgcctcgaacatccacgcctataagtggcccaataattccggaattactcattcaaaacgtgcatcagtctgtacaccaaaatttgccaaacagacaaaatatgggtgacaaaaaccaacagcatggtattcctaaaaccgcaatgccgcaaccacaagtcgttcagcaacaatag

SEQ ID NO: 66929 - DNA, 573 bp, Heterodera glycines
atggtatgtaacacatatgcattttccgagttacagttcgggtggttcccttgttagttaaacaccacttaagacatcgaagctcaaattcagccggaaacgcgtgaaccaccaaagcgagccagcagaagaccacgatcgagatcaagctcacacagtcgtgagcgattgagtaagccgtttttggtattttgcgccagaaattccatgttttttttttgtaaaaatataataatgatctatttgcccaatgaaaatgtttactttttgatcataccctggaaaagtgatcaaaatgttaacttcattcttcccggcgttcctatctgttcttcgggcaattaattaattttgataaaaaaaatattaatttatcaaaaaaaaaaaatttcagtgatgtacgaaaaaatttttactaaaatttttttaaaattttttttccattttcaggagctaaccttaatcactcatcaagccgaggtgaccctgatcggaattcagtgcaatggcaattagatgtagaccattattcaagaaatgctgcccaagaaacttttgagccaccaagtaaaa

SEQ ID NO: 66930 - DNA, 263 bp, Heterodera glycines
gtgatcaatttttgactgatccaaacgaagttgaaattgtgcgggaaatgatcgaaaaaagtgccgaaaaaggaaaagacaaaaaaacatcggaaagagtagaaaaaattgatttggagaaatttgtcggacgaatttaccaaacaattgaaaaatttgtcgataatagcaacaaaatgtgggcgaaaatcaaaggacaaattgcagctgcacaaatgggcgaattaacggagaaacgaaaagcattggaaacggagggatat

SEQ ID NO: 66931 - DNA, 2812 bp, Heterodera glycines
gaattggcacgttatctccacctgcgagatgaacagcaaaatcgtccaactaaagttgagattacaaaagggttaaaagcactgatcaaaagaggagatcaaagtgatgaagaagaacaattttttgatttggggtcagatggagcccaacgccccgcttcacaaagtcgcagacgccttcgacgccatcgccattacaatgatgatgaggaaatgccattaatgccgccttctccaccgcttcaagttgaaaatagggggcaaaaacggaaagcaaatgaattttattcctcatgggaggagggcgcaaagagacaattgcgccacgaagatgcaccggttccttcttcatctaaaattgctaatagacaaagaagaagaaaactgcctccagtttcatggagaagagaagaagaacaaattcccgctgacattcagcaggaagaaccatttcagccagccccacaaccgtctattcctatacatccacaacttaacagaaaacggaaggcacagcatgctttgaatgatgttcgagaatcaaaaaagagtcttattggcttggaagagctaagacctccttcgcttcaacaagaggcatccctacgtttcaaacagaaaaggacaagcaaatcccgagtaaccctaccacagcattcgaattcattggccttggcaaaactgcgtaatcctccgagggacttactggccgaggcagcctctgccccattaccggacgatgatggccatgattttgaactcttacaaagccccggggtcgctgctcaggtcgagcctctcccacctgggcctccgttgcctagtaaagccaaaaagcggaaaagcaataaagttgatgaagataccgaaagaaaaagaagcagaattgactctcgaaagagggacttactggaagaggcagcctctgcccctttgccggacgactttgaactctcacaacaacccgggacctcggctcaagtcgagcctctcccacctggacccccgttgcttagcagaaccaaaaagcggaaaaccaacaaagctgaagaagaatataccgaaagaaaaagaagcagaattggttctcgaaagagattatcttcaccaagtgttaccaaaaatctgccaaaaaggcaaaagaactcgggtagcgatgcactctccgaagagcagcgtcgtcagtttgcagaggatcaacatcttttcagcattccaaattcgcaacttaccaatgagcaaaagagaagacggcttcagttcgtatttaatagaaaccccgccaagtacggtgttcagggtgacaccattttgaacagcgcaggaaacccaataaccgacagcagtgtcgcccaagcattagactatattatcgaacgcagagagggacgaattcctcaattcagacagccaccaggaacaaaattcattcgagatcgaatcaaccgagaccttattttgcgaacatggacggctccaccagtaccaccaagaggacccaaacggaaattgatacaaacagaccaagcgccagaattaaagcaaaaatcacaaaaactcagaggaatgagacaggcgagattcagggagcaagaaggattgatgcttcctttcccaacgaggggagtcaagcggaagtcgacggtcctgccaacagtagaaacggaaaccccaaccaaaagccaacgtctcaggccacaaaaatggaaaaatcaatagaaaatgtgttagaaggtctctacaatgacccaaaatcccctgctgcgttcgccggtgttgacagactgtggctggaagccaaaaaagaattaggaaataaaattcgtaaaaatgatgtaaaacattacttggagggacatcgcacctacactttgatgcgcccaaggcgcgtaaattttctgcgcgctcgaacgactgcagccggttttatgaccgactgtcaggttgatttggctgattttcaagcactttcccgacacaacagcggcaatcgttatttaatggtggtaatcgatgtcctttctaaacggattttcgtaacacctcttcgtaccaagaaatccgatgatatggtagaaggctttaaacgagtgttttcaactatgccaatgaaaccacacagaattttctccgacaagggtacagaattcagaaatcagcagctgaaaaaactttttgatgaagaggaagttgagaaatatgagagcacatattctgagaagaaagcagcattagccgagcgcgcaatacgacaaatcaaaaatcgtgtatatcgctactttgcccaaacaaaaaccctcaattgggtggacgtaattgatcaaattgttgatggcattaataaatcaccgagccgagtgcatgggatgcgaccgattgatgtgaactttaaaaattcacaacaaatatgggaaaagatgttcggagaagatcagcatagggccctttttggaaagcacagaaaaagggccaaatttttgccaggacaaacggtgagaatgagcatagcaaaaggacaattcgagaaaggatatataccaaactatggcgatgaaattcttgaaattgatgaagtcaaacgccacaagaaaccaatgcaatacaagttacgcgatgcaaaaggagagaagttcaaaggatttttctatccggaagaattggctcccgtacgtagagatgctgaaacaacttacagaattgaacgcgtttttcggaaacggaaaatgcccgacggaacaatggaagtgctcgtgaaatttgtaggatacctgagagagaatggattcatgagactcaacttgtataaatactt

SEQ ID NO: 66932 - DNA, 1806 bp, Heterodera glycines
atgagtatcaacctccacgacaaaaagtcgctcatggacaacattttgccggtggttgagataaatcaaaccaacaacggcattacggttagcagtgaacgaattgcgataccacgaacggttcaattcgatattcttggcaaatgtcgagaatgtaaggcaaccgaatgtgagacggaatggtgcgtttccaaggaaggcgttaccatttggtgcacacgcttcaaaattagcccccgttttgtgccatttgatgtgatctacgatttgcctggttacacatttttcaaggtttgtttctgtgtgtgtgtttttttttgcatcaaaaattatttactcaacagattcgaaacaaaggacgggttttcaacgttgaccacggtttccgttccaatgcgtgcacccagaccccgactcccgtgtaccatttgcctccacctcctccaccgcctcagctcccgaaaagaaagcaggaaagtcaccaagacgcggaacaacgtgttgccaatcaattcttcgactctgtgtcggcagcaacgacgggattagacattgcgcggcaccaaacgcgacaaggcgatggcaaagaattttttggtgcagtttcagcggcgaccatgggaatggacattgaacaaaaaaacgagaagcctaaactgagaaaacaacagaggacagacgcctcagatttcttttcacccatttcggccgcaactatggggatgacccccgaacatctaaaacccaagcctaagtcgagacaacagccagttgatgcctccaatttcttttcttccatctcggcagcaaccatggggatggatgtaggacaggacaaaccaccaaagccaagccaaaaagaacaattaaattccgatgccgcagaattcgcagtttctctttctgcggctacgaaggggtttgattttgctgaagcgacagttaaaaagccaaaagaaccgaaccaggcggatgcttccgagctattttctgctgtttccgccgcaacgatggggatgagtagcgaacaacaacaaactagaaccaaaaaggaaaaggagcagacggaccaagaaattctcgatgaatttctcgagagcgtgtctgctgcaacgactaacatggatgttcccgagaaaagaaagccaaagaagaaagtaaagaaggagatggaagatgaggaaatgacagcaattgcgtcgatcacccgtaaataataaagtatttaaaagcatgtgtttgttcgatttagtctaaacattcatcatgattggaaaccaattttacacagataaagaattaaaactaaaaatgcccttcggtatgcttatttctggtccatcggggagtggaaaaagcagccttctcgtcaagtttattgctgagtcctcagaacttattggccctaagcccgcttccattctttacgcattcggtgaaatgtccagcattgtgcctaccctccaaaaatgtggtattagtgtgtattcgggagtccctccggaagagttaattaaacgcttacctaaaccactgcttctaatccttgacgaccttttgctatcgattgatgaggcctatctgagtgctttattcaccaaaaaatcgcaccatcagaactttgccgttgtttttgtcacacaaaatttgtttgaaagacggattaaagttgcaagacaaaacgctcaatatttggtactaatgcgggcccccaactcagcacttgctgttcggaatattggagttcaactctttcccgggaaactggattattttctctcggcataccgtattgcgaccaataaa

SEQ ID NO: 66933 - DNA, 384 bp, Heterodera glycines
atggctcgccaatcgacaattttaccaatctacaaacgacaatcgcgaagacagcagcaacattaccatttcgaaaatgtaaaacaatttttaaaattcaaaaaacagtttatttatttcaggttttggtatttgaaggagcacgccatcgacagttccaacttagctggttctgcatcgcactgatcgtcatactttttgttgcctggttcctttggtaagtgaataatttttaatttacaaaatttctatagttaaattttaagaaagggccgacggagacaatccaaatggtgcatgaaatggatgatgagattgatcaaaaatgatcccaatttggttttttctatttaataatattttaatccatttctctcagggcaa

SEQ ID NO: 66934 - DNA, 635 bp, Heterodera glycines
atgcggaagagaaagtggaagaggatcagaaagtggaagagaaacataaagtggaagagaaagtggaagaggaacagaaagtggaagagaagaagaggaacagaaagcggaagagaaagtggaagaggaacagaaagtggaagagaaagtgtaagaggaacagaaagtggaagagaaagtggaagaggaacagaaagcggaagaggaacagaaagtggaagagaaagtggaagaggaacagaaaaagaaagcggaagaggaacagaaagtggaagagaaagtggaagaggaacagaaagtggaagagaaagtggaagaggaacagaaagtggaagaggaacagaaagtggaagaggaacagaaaaagaaagcggaaaaggaacagaaagcggaagagaaagtggaagaggaatagaaagtggaagaggaagtggaagaggaacagaaagtggaacgcaattttcatgtataacttctttagaaattgtctaatcataaagcaatagcttagacaaagcttttaaacatgttaagatttcaactaataccaacaatgtaacattgttggctttggattaccacgaattaacagtataaaaattgacaaaaaaatgtttctgatccaatttaacaga

SEQ ID NO: 66935 - DNA, 890 bp, Heterodera glycines
atgattttggacaaatttttcggtcaaattgatcagtcaattgtgccaattttgtcagaggattttccaaatgaacaaaaggtgatggtagagaaggcaatgcaaagtctgaacaaaattaaaatgggccaaattacgtccgaagatgaagtgattgaagtgaaaagtcaatttgatgaattgttgtccaaaaaagccgacaatttggattggcaaaatgtgccaatttatgacatagtgcaaatttcaaattggcagttagcaatacgcagttttggcgcattgtctgaactgttcaaaaatggcaccggggggcacaatgccaaaagtgaagcaaacagaaaaaaggaggagaaaaaagcgaaacaccaacaaagaaatgggaagaaaaacgaaaataatgggcaaggagaagaacacgggagaagcatttttgagcaatggttgaatgacaatgcgcaactcgtcaaaagcgtgtacgatcgattgtttccggaagacggtagaaaagggcttactgtaatcacagaaaaataaaggcggggagggaacgcacagccggtgaattttgacacttgtacggggaaacggggacaaaatttctaattttcattcttaagtttactaaaaataaaaatagtaattttactttttatataattatgtatttttatccatccgaacaccgtatactacgtatttacagtgcttaaacaactgcaaaaaaagcgacggcgacgtcgcaagattgattgtgaagcatggctgcagtgcatcagcttaattctgctgttcattatcatcatttgggtgatcattgccttttttctactcgcgggcagcaaatcaggcggcggtcgtagcagataccgtagcagaagctccagcag

SEQ ID NO: 66936 - DNA, 911 bp, Heterodera glycines
gtggatcttggcccagaagcagagtttgctgtttatgttcaattaaatattttatggaccagcattgaacttggaaggaaactgaaaacagtttcgcgtgtagtcaaactgaaaatttttaagccagattatggcaaaatttatcaattaaatttgggccaagccggatattccaagattagcttctcagggcagttgagtttcgatcaaccaattcgggagaatgaagccattgtggcatttgttgatgtgccattgatgagcgagagtgccaatgaaacatcgcaaaaaatcgacaaattttcttcatggttctcattgggctctgaaactttcataaaaaatggttcaaaattgaataaaaaccgtaatggggtataattttattgttaataaaaaaattaatttattttaaataaaaatttacattttaattcataaaaataggttttctatttttccttagtgatttatgacaaaaaaagtgaaaatatgtaaattgaaaattttctgaaattttcatctttttgaaatattctatttttatttttggtgatcgtatttttagtttttgaaaataatttattctaattaagaaagacgcttacaaattaaagctaccaagttaaatagaatattaatttaataataaatcacatttttaatttgatatttaggacgttaatttatcttacaatatcccggttgatttgagcaaattttatggaaagcaaatgtttggtttaaccgttaacatttacaaattaaaagtaaaaaatctttttcttaaaaacaataataaaaataaattttagacttacattgaaaatgaaaaaacaaaacttggaaactgtccaatttgtttaaattctttttgttccaaagaaaagatttcaaaattccaattaaca

SEQ ID NO: 66937 - DNA, 661 bp, Heterodera glycines
aaaacaaaaaaatcgattttttcaagtgtccgtttggggtactcaaacaattatggggagcaaaaatccaacgcagaattaaagtacaggctatagggaagctattcccgaaggattcggtctccccataaatctgggcgcatcggttcggggggactgccccgaaaacaaaaaaatcgattttttcaagtgtccgtttggggtactcaaacaattatggggagcaaaaatccaacgcagaattaaagtacaggctatagggaagctattccggaaggattcggtctccccataaatctgggcgcatcggttcggggggactgccccgaaaacaaaaaaatcgattttttcaagtgtccgtttggggtactcaaacaattatggggagcaaaaatccaacgcagaattaaagtacaggctatagggaagctattccggaaggattcggtctccccataaatctgggcgcatcggttcggggggactgccccgaaaacaaaaaaatcgattttttcaagtgtccgtttggggtactcaaacaattatggggagcaaaaatccaacgcagaattaaagtacaggctatagggaagctattcccgaaggattcggtctcgccataaatctgggcgcatcggttcggggggactgccccgaaaac

SEQ ID NO: 66938 - DNA, 647 bp, Heterodera glycines
aaacaaaaaaatcgattttttcaagtgtccgtttggggtactcaaacaattatggggagcaaaaatccaacgcagaattaaagtacaggctatagggaagctattgccgaaagattcggtctccccataaatctgggcgcatcggttcgggggactgccccgaaaacaaaaaaatcgattttttcaagtgtccgtttggggtactcaaacaattatggggagcaaaaatccaacgcagaattaaagtacaggctatagggaagctattcccgaaggattcggtctccccataaatctgggcgcataggttcggggggactgccccgaaaacaaaaaatcgattttttcaagtgtccgtttggggtactcaaacaattatggggagcaaaaatccaacgcagaattaaagtacaggctatagggaagctattcccgaaaaattcggtctccccataaatctgggcgcatcggttcagggggactgccccgaaaacccaaacaaaaattttttggataaaaattatttaaatgaactgactagataatatttaaaataggttatttctcttcctttcagtatccctgcaaagtttggtgcgcttctgctcagtttctgaaaaaaaagttaagcctaaactttttggcat

SEQ ID NO: 66939 - DNA, 364 bp, Heterodera glycines
tctcccgggtgtcggtgatttccgtgtccgtcgcattaccattctgtccgacccgtgccctttgccagccaatcggacggcgaaacggactttgaacgaacgtgaacagattgtttacgcaccgatgtccggactcgggggactcgtctacgacaaagacgccgtttacattgacattggcggaagcaaatccttctccagagcggtgggaagcaaattacgaatttttgcattttgatccaatggaattcagcggaacagagacgaattcatcgaagcactcgaaggaatcaaagagccgttggattcgaaaatgggaaaagcgactcttaagcttctgaaggaaaatcccgacttggaattg

SEQ ID NO: 66940 - DNA, 1121 bp, Heterodera glycines
  unsure (1)..(1121): unsure at all n locations
atggcaggacattttaaaaattcgaccaaacgaattgaggagctgaaaggattttgtgaggaattggaggtgcggaactaagaaatgaaaaattctaagctgttaatttaggttgaatttgaacgcttgaatcgtcatgggccaacaaggtggacatcgatgcacagcgtgttgggcaaaattattcggatggaatctgtcttaatcgcctacttttcaaaacctgacaaatgtccggcacttctttacgacttttttttcgtttttttctgaacaatcgtttgtggtcattcattttttataccacgtgctaggcctctttaacaagacaattgactttttcaggttgttatagtaattatgaatgaaaattctgttcataaattcagaaaagaaaagccattttgcccgaactcttgctggaaatgnacaaatttagagcgaaattgaacaacgaaaacatgaacggttttatggtgccgatttgaaaaagttgatgagagcacacgcgaagcgttggaggaacaatttcaagtaaaaattaatcggttgcttattaaatttccaaattttccagtctttacacctcagttttggcatatttggacaaatggcatcgcattgaccgatttccggaaaagttgcaatgggttgctttggcatcccgcaaaattccccacgacgatgcgttgtctctggcacgacaaattgcgcccgagttaacaaatgatttgtttgacgatgttagcgaagcaaaccaaataactgaattcttttccaaatgatgaatttcaaaaattaacccccgaacagaagtggaagaagctgtttgaagcaaatttgccgcatctgctcaagctggtcagcattgttctttccgttcctgtctcgaatgcatttgttgagagggtattctctttgtgcggatcacaatggactgacacgcggaatttgttgaaagttgaaacagtcaaggcgttgatccaaaccaaagccaattttgatctttcttgctcacaaatgtaccaaatgctcatttccaatcacaaattgttggagaaaatcggcggatgggaaaaatacttttgataatctatttcaattgtttttgcgctaataaa

SEQ ID NO: 66941 - DNA, 926 bp, Heterodera glycines
agttacattttggaccaaatgttgcacaacaagcgcaaaagttacaccaattttgacactttgttggccgacgaagaggaggaggagcaggaacagaaacgccagcaacacctcaacaccaagcaggacaaggagcagaaccagtcggtgcgcagttacgtgccggaggacccggaaacgggtgcaaccactacgatttgtggtggcacatgtggcgatgatgttggcattatcgatgccaataatgtgcaacaacaacaccaagcagtaccagcaggagttggcaaccaacagccgcaaattgttgccgtgccgtccacctcgtcgttgaacagctcgtccaccgagttcaagtttggtgcaaccactagttcagcagcaacgcgtgaggacgatgagctcagcgagttggaggacaccgggacggcgctcgttgagggcgaagtgttgtgagtgtttttttcctaaatttttgcgaaattctatttgttatgcctaacatgagttttggatttttggtatttggagcgggcaactcgctgggaaaaaacgattttttaaaggaaattgcactcaacaattagaaatttttcaaaaaaaaaatccttttggatgcggctgcaggattaaatcccaaaagttattggttgatcggattcggaccggatttgagggattagtcccacattttcaaaaaaaggagactgcgaattgtgttcccgcaatttctttttaccattttgatctcgttattaaggctggaagggcatgaaaaaattgcgctgggcctgcaagtgtgcgtggacgacgtggagacggtgcagcgcatgttccaagtgtttgttggccacgccacgggccatccgatggtgcgctatttgctgttgaccaacaagttcctgtacctgctcgctgttgatggaaag

SEQ ID NO: 66942 - DNA, 1943 bp, Heterodera glycines
atgtttcatcacttcgctcccattggccttccacaaaatgctgccgcatttaaacccacaaagggccaacatgagcaaattgagcggagcattaacggggcggtggacgaaattctcaacaccaacggcggcggcggcggaacgttgggcacacaaacggcggcggccgacaaaaagtgtcgattaactaattaatgggttaattagtgcaccactaattgctgtccttcccgcagagtgcacacgaaaccgtcgatcacgtacaatttggcacatccggacactgtcattctgctcaagagtcttgacgcgttcttcgcccatgggtttttttttgttttgtttattacaatttaaatttcgtcagtgttaccaaattttggatactttttgattgtgctcattcatacaccctcaaaatttacaataaaaaaggcacacaaaaatgtgtgtgtgtgcagagttaaagtgcatttcttggcgacataaacgctacaatttgaaaacgaaaaaattttgagttattttattggtccgttaattaaaagttgacattttcattattataatattggagaccggaatgacttttggtaatagtcgatcaaaagttgagaattgcatccgaattgactgattgtgagtgcggcgggaggtgactgactttctgtgaaattctcgactgtatgccttttctaattatggtttcattacatgccatttaaaagttcaaaaaaaaattaataaatttgcacccgattttggtcatgtacaaatgctctaggcgcaaatatatctatgcactcctaaaaatcaccgaaaatttatttgtttcggtattttaaaattggattttcaacttgaaaaaaaattaaaatgtattcattttttaatttttcattttttgcagattgctgaagacagacaaatgctactgggcttttgcgcgcgagttcatcccaagcgcggagcgtgccgaaatgcgcgtccgttgggtgtgccgaaaccgccgcgcgctgtcattggcatggctcaaagactcgttgaacaggttgacccccggcttttatctgcttgtgcaaataaattcattgaaatttttgggtaaaaagaaggtcaaattgggagcatttcattctcccacgtcgttcccccacccctccaataaaaaaaaaaattttttttggtgaatgaccgaaaacttttttcgaaaaaatcggatggaattgccgaaaaatcgaacattataatccattacatgctttttagggccaatttgcacttccaactgttgtcattcatcgcttgtgctgacgcgctgaagcgggcccattacgagcgcaacgcgtgcatgcgcaacacggcactgctcaagcgcatttgtgtacgcgttgaccagctcaccgaactccagttcaacatcgaggcgagcaaaacgaatttttgggccatttttattggtgtttttgaggcacatagtaaatttttagcttttgccaatgctaggaaaaaacaaaattttttcgatgatgggttggttggatttttttcttatttttcactgaaaatttcttttgaaaaacgctgaaagcatgtcccagcaaaccgaataagttcttatttttttaccatggaaaataaccccgttttttagcccccatatgttttccatccggaggacacgccaatcgcattgccaagaacaatgacagcaacaacagcagtgctaatgagcacggcacagttctttgacggcacaatgtctccaattggtgggtcaagcagttgcaactcgtcactgatcaatggcaccgctggtggacaacaacagcaccagcggaagcaacaagttcgagttgtacaacagcaaacgccaaatgtgccgatgaacatccggcgacgcatgacaccggcacaaaatgcggcactaccaaagtcatttg

SEQ ID NO: 66943 - DNA, 778 bp, Heterodera glycines
cggggtaagcagtgctggttcgtttcatcacggcaccgaaccctttggctagtcagcaatcgttgcttaacttgccagatcggacgggtgcgcatgattccactgttccaagcaccccaccaaaagcaaaacgatataaccaaaatataaggaaaaattttttaaaaaattttttctccatcttcctttttgatactaaagcatcagagtgctaaaattaagttgtaaataaaatttggtgcgctttagagcactttctgaaaaaaatatttatgaaacaaaaaaatcgattttttcaagtgtccgtttggggtactcaaacatttatggggagcaaaaatccaacgcagaattaaagtacaggctatagggaagctattcccgaaggattcggtctccccataaatctgggcgcatcggttcggggggactgccccgaaaacaaaaaaatcgattttttcaagtgtccgtttggggtactcaaacaattatggggagcaaaaatccaacgcagaattaaagtacaggctatagggaagctattccggaaggattcggtctccccataaatctgggcgcatcggttcggggggactgccccgaaaacaaaaaaatcgattttttcaagtgtccgtttggggtactcaaacaattatggggagcaaaaatccaacgcagaattaaagtacaggctatagggaagctattccggaaggattcggtctccccataaatctgggcgcatcggttcggggggactgccccgaaaacaaaaaaa

SEQ ID NO: 66944 - DNA, 438 bp, Heterodera glycines
aaaatggtgtaagtaaaaatcgtaattacgctcaaaaagcttctcaaacaattttaacgcttccaattccttctacaatcgcctttatacatcccattatgagcgctaaaattatcagagtgccgaaaatcgcatgtgatctaagcctagcaaaaaatggtgtaagtaaaaatcgtaattacgctaaaaaagcttctcaaacaattttagcgcttccaattccttctacaattgcctttatacatcccattatgagcgctaaaattatcagagtgccgaaaatcgcatgtgatctaagcctagaaaaaatggtctaagtaaaaatcgtaattacgctaaaaaagcttctcaaacaattttagcgcttccaattccttctacaattgcctttatacatcccattatgagcgctaaaattatcagagtgccgaaaatcgc

SEQ ID NO: 66945 - DNA, 65 bp, Heterodera glycines; identical to SEQ ID NO: 54797

SEQ ID NO: 66946 - DNA, 287 bp, Heterodera glycines
gaaattattgaaaggaattgactcggtgctgcacgctaaggctgatcaacatgtacagaaaaatgaaaaagttttgtcatttgtggagcaggcacggaatgccatgttggacagggccaaactgatgaccaaccaagttggcaagcaggtcaaggacggactgatgctggcatttggccgtgttgtgttcacattcgtctgatgagttgccgccaaattttgatgacgagacagatggccaaggacggcaaaaaaaatttttttaatagaattaaatattttgtaaa

SEQ ID NO: 66947 - DNA, 325 bp, Heterodera glycines
atggaatgctcaacaacgacggagcaacggccgggcaccagcgaacacattgacaacgacgaccactgctcatcgccgcccgttaaaccggtgggtgagtctgtttgacattaattcgctttatttaatcagcctaactaaatttgaacgtttagtaaatgaataatcatgactaatttcctttcagttgacttatgcgcaagcagcggccaatagaccgagaagaatactgcgagcaatttggatacaaaatccttcccttattcaaccgtcaatgattgaatttccctataaatttctgattttttccatcactgattgctga

SEQ ID NO: 66948 - DNA, 468 bp, Heterodera glycines
cttgtcctaatggcggaagacaggcgacaagttgagaaacttgaagcaacgactaaaattcgtgaaatgttcgacctcattctaaaatgcaacgttgacgaacagctgatcaacaaatccattccaaggaacgtttttggttttctcgttgattgtttgtccgaggacaatgcgtcacatccccaactcgtggccaatgccacggcggcactcgcaaacattgcgccacaaaaagcaacggacatttacgatacaaaacatagtaaggtcttgatttatttggagaattggataaagagttcgacggacgaagaactgctgaaaaatgcaatatccattctgaagcctatcatagcgaaggatattgttcgggaaatggactatagaaaattttcaaccttattcaattcgagaaataaggaaatttttgaagaggccttgtgtgccgcttaccacttgatcagttaa

SEQ ID NO: 66949 - DNA, 193 bp, Heterodera glycines
atgccatgcacaaattgtatggcggaatatacacgacgcagaaaagaagtgggagaacttgattatggatcaaaatgggaaaaaatgccatccaaatcagatcggttgtgccgtatgtcgtttcggcttttgcgagcgatgcgttggccaaaagtgcgctgtgccatcggtgtccccgagcaaaccggtgccg

SEQ ID NO: 66950 - DNA, 76 bp, Heterodera glycines; identical to SEQ ID NO: 64756

SEQ ID NO: 66951 - DNA, 536 bp, Heterodera glycines
ggttcgatgaaactttttaaaatataagcctaaactttttggcctgtttaaaaaggaattaaaaatttttaaaatatttattcatctcccttttgatagaaaaagcatcagagagccttatttaacttttaattaacatttggtgcgtttcagagcacgttctaaaaaatatttatgaattaattttgcaaaataataaataagtaatgaaaaagtcagaatttcgaaaaattttaaaaacaacaagcgttggcattttttcaggttaagttagtcctttacaatggagaaggcctgcaaaatttggagagattatatcgattttagtgcgctaggttcgatgaaactttttaaaatataagcctaaactttttggcctgtttaaaaaggaattaaaaatttttaaaatatttattcatctcccttttgatagaaaaagcatcagagagccttatttaacttttaattaacatttggtgcgtttcagagcactttctgaaaaaatacttatgaattaattttgcaaaaaataaata

SEQ ID NO: 66952 - DNA, 194 bp, Heterodera glycines
atggaagccctaatgatgacacttagtctaatataccatgaaaggattggaagaaacacagaaggtggcagggctgtgcaaattttttctgcttatttttcgaatttggctcagccctggagaaagtttaagaacatcacgattggtttgaggatttacatgaaaggacaaaaactaatgcacagaatctgctg

SEQ ID NO: 66953 - DNA, 384 bp, Heterodera glycines
atggggttccccggctacttcctgatcgtgatggagtttatccagtggtcgaaggacaacaacgtgccggtggggccggggcgcggctccggtgccggttcgctggtggcctatgcgttgaaaatcaccgacctcgatccgttggaattcgacctgctgttcgaacgcttcctgaacccggaacgtgtctcgatgcccgacttcgacgtcgacttctgcatggagaagcgcgaccaggtaattgagcacgtggcggagatgtacggccgcgaagcggtatcgcagatcatcaccttcggtaccatggcggcgaaagcggttatccgcgacgtgggccgcgtgctggggcatccgtacggcttcgttgatcgcatctccaagctg

SEQ ID NO: 66954 - DNA, 49 bp, Heterodera glycines; identical to SEQ ID NO: 51181

SEQ ID NO: 66955 - DNA, 660 bp, Heterodera glycines
gttttcggggcagtccccccgaaccgatgcgcccagatttatggggagaccgaatccttccggaatagcttccctatagtctgtactttaattctgcgttggatttttgctccccataattgtttgagtaccccaaacggacacttgaaaaaatcgatttttttgttttcggggcagtccccccgaaccgatgcgcccagatttatggggagaccgaatccttcgggaatagcttccctatagcctgtactttaattctgcgttggatttttgctccccataattgtttgagtaccccaaacggacacttgaaaaaatcgatttttttgttttcggggcagtccccccgaaccgatgcgcccagatttatggggagaccgaatccttcgggaatagcttccctatagcctgtactttaattctgcgttggatttttgctccccataaatgtttgagtaccccaaatggacacttgaaaaaatcgattttttttgttttcggggcagtccccccgaaccgatgcgcccagatttatggggagaccgaatccttcgggagtagcttccctatagcctgtactttaattctgcgttggatttttgctccccataattgtttgagtaccccaaacggacacttgaaaaaatcgatttttttgtt

SEQ ID NO: 66956 - DNA, 3120 bp, Heterodera glycines
atggcagcggtaataaaggctggaaaaggccccggaccgtttttgccagagatgtgctgggcgacatggtgggaacgtttcgaatttttcatccagcttaaaggcgtgaccgatgtcgcaacaaagcgtctgctcctgttcacagaaatgggtcaggtgtacgaagagcttcggcgaatggcacagcctgaggatgtccgaaccatggaccttgccgaaattgaacaactgatggtggaacgatttggcgaagcaaaatcgattgccgcgtgcaggcatgaattgttttcagccaagcagcagacagggcaatcgataagggactattcggtgcgattgcgaagtttgatagcaaaggcagaatggagccgcgacagcattgacatgtgtctttgcgcattgtttatcaatggcatctctaatgatgcaatccgggttgaattgatcaaaaagggcgacaaggacctaaaattcaaggacgcagtcgaatcagccgttttgttggagcagtccaatttggatgcccaagcaattggctcaaatgcaatgccggaggtcgcgaaagttggcaatcagcaaagaggaccaagaacgccgacgaaaagcactagaagttgctttcggtgtggaaaaccgggacattttgcaaatgtgtgcccgaatcagaattcgacatgcagaaaatgcggagaaattgggcattgggccgttggttgcaaaagcaaaaacagagacggtaatgccaactttggtcaacaatttggtcaaaagccaaagaccaacggacgacaaatcaagaacattgaatgttcaagtgtcagcgtcattcatgaaattaagggaatttctgccgatcctggtttcattcaactcaacattcataatggaaggttggagtttgagctggacagcggtgcggacgtcacagtgattgacgagattgattggaaacgcatcggcaggccaaaattggaaccatctcaaggattggtagcctatggcggaaaatccatcggtggcattttgggaaaggcaaaggtgaaagtgacgcacgaaggcagaacaattgagtccaatattcatgtcataagtggtaagcacaaaaatttgtgcggccgcgatttgatcatgggactgaaaattgatttgaaccgagccttcggaatttcgacaattcgtgccgtggagatcaaacaggaattggacgcatgtttgggtcaatatccggaagtgttccaggacggtgtcggacgatgcaaaaagatggcgtcactgaagtttaaagagggatgccaaccgaagcgatgcaagccgagaccggtgccattttcacttcgcaatgaagttgaaaaagttttggaccaatggcaggcggagaaaatcatcgagccagtggcaaccagtgaatgggccactccgctagtcattgtgccaaagacaaatggcaagctgcggctgtgctttgactacaaagtcacggtaaatccttggttggatgtacatcaataccctcttccacgccccgaggagctgttcagcatcttgaatggaggcgaaaaattcacgaaaatcgatttgaaggacgcatatttacaacttttgcttgacgaaaaggccaaaagttgtctcacaatttgcacgcacaaaggacttttccacttcgctcgattgccattcggagttgcttcggcacccgcaatttttcagcaagtaatggaagaagttctgcagggcattgatggcgtggcggtttatctggatgatattctgatcacaacagccactgatcagcatcacatcaaaagaatcgatcagcttcttaaacggttgtctgagaatggccttcgagtaaagcgtgaaaaatgtgagttcctcaaaccggaaatcgaatatttgggacacattgtggacaaaaaaggtttacatgcgtcacctggcaaaattgaggcaattttgaaaatgccggagccgaaaaatctgaaagaattgcagtcatttctgggaatggtgaactactatggaaaatttgtgccatccctggcaacgctttcagaaccgctcaatgaattgaggcgaaatgatgccaaatggacatggacaaagagccaacaaaaggcattcgatgtgatcaaaaaggttttgacatcaaccgaagttttggtccattatgacccgcaaaaaccactttttctggccgcggacgcatccgactatggagttggggcggtcatttttcataaagatgaaaaaggaagagttggtgtgattgcgtatgcctcccgaacgctaaattcatcggagcgcaattactcgcagattgaaaaagaagcgagggcgatcattttcggtgtcgacaaattcaagcagtacttgtacggtcgaaagttcgtacttcaaaccgaccacgagccactaaaaaagatttttgggccaaaaggagagctcccgattgtggcggcaaaacgacttcatcgatggtcactgacattgatgaacttcgattttgaagtggtgtactgttcgacaaaagaatttggcaatgcagacggtctgtcgcgattgccgtgtccggaagagacaaccatcgactgtgttggactggaagttcagcaagttcaggccgaaaatatttcatgcctgccggtcacagtcagtgccatcgcaaaagaagtcaaaaaggatgaaattcttcgaaaagtgaaagaattcatcgaaaaaggatggccacaaaaagtcgaaggactaaaaagttttcatgtcatccgaaatgagctcgccttaatggaagggtgcatcatgtttggaaatcggacaattattccgtcaaaatttcgcacaaaaatgttggaaattttgcacgcgacccacccggggatggtccgaatgaaggccctggcacgtcagaagatgtggtggccaggaatcgacaaagaaatcgaaataatccgaaaaagatgcaaaatttgccaagaagaggcgccggatgagcggaaagtgccattgcatccgtgggaatcaccggaaagaccgtggcaacgaatacacatcgatttctgcggaccattttggggatcaatgtggctgatcatcatggatgccaaaagcaaatggcctgaagtg

SEQ ID NO: 66957 - DNA, 212 bp, Heterodera glycines
atggcaaaggcaatttcagaaagcaatcgaagtgctgcaagaaaatcagcaaatggtcactctgagcacgcaaaacgcgaaaaaggcggcgaacgaattgaaatccatggcggacattctgtcgagtgcaacggaacagaaaactttggcagacgaattgctcgacaaagccgaaagcctttccgtgtgaccgaagccaaatccgccgacaa

SEQ ID NO: 66958 - DNA, 136 bp, Heterodera glycines
atgaatgaggacgatgattattgtacaaagtgcaaaattcctacggtcgatgaaattattaatggaaaagaatcaaaacttaaggaccgggtcgaagatggactccaaaaaattaccagtaaagccaagaaaatag

SEQ ID NO: 66959 - DNA, 1141 bp, Heterodera glycines
atgcaaatggaacttcttatgcttttttgcctcctcaaaatgttttttctctgtccgacatttttggcatttgacaacgaaataaaagcgtatgaaaagggcgaaatgaacgaattacaacgatggtcgacggaggaagaagaagaaatgtggcaaagtggggaagagaagggcgaaatgccaaaaacgaaaagccgatcagtggcaccgattcagtccctttgggaggacggaccgatcagtccgattgaccagcggacgatcaatgaattgccaagggacgacggccgcgggacaatggtcgacgtggacattgtgaaggggcggaagggtctttggatgagaccgaacgttgtgaatttggtggacgaaatcagagacgacggcgaagggatggcgtcccctttggcaatgctttcgcccgccctttcgctggtgccgaagcgacggcgacgaattggcacaacggacggaaggcaaacgaagaaaaatgtgatcagaaaagaagaaagtgagtggaaacgaacacactgatcactgtgataagtgatccaaatttctgaactgaccatttcaaaatgcttttatttcagaaatggccaaacaatcagagccaaaggaaatgccaaaaaatgatggcattggcctaaatgtgcaatcggattttgtggaaaaaagtgggggcgaagaagcaaagatgacgaacacagaaacagaaggagaaggagagaggacgacggagaaaaaggaaaagaagaaagaggaggaaaaggaaaaagaggaaaaagaaaaagagaaaaacgaaacaggaggaaagagtaaagaggaaagggaaagagaaaaggagggaaagaagaaggaaaaagaggagggaaaagattggacgatgaagcagagcaatagcaaaagccaaagccaaaacagcactcaaacagaaacagtgaaaagagacttttgggccaatgcgctgagaacgctgctgatcgaattcagaaagatgcacccggaactgatcaggggaggaaaagctaagagaaggacgacggaacagagcagcaacagaacaaaaagcaaaacaaacgaagaaatggcgagaaaaaggcccgggggtagaggggagccgagccccatcagtgattga

SEQ ID NO: 66960 - DNA, 504 bp, Heterodera glycines
aaaaatttaaaaatgagaattcatgcgagattttctgaagcttaatagggcctagttaagctgtaaaaaaaatttgggcgatttgaaagagaatagaaagaaccaggttcgatgaagttttggtaagccaaaaaaaatccaaacatttaaaaatctataaaaaatttaaaaatgagaattcatgcgagattttctggaaataagcttaatagggcctagttaagctgtaaaaaaaatttggggcgatttgaaagagaatagaaagaaccaggttcgatgaagttttggtaagccaaaaaaaatgcaaacatttaaaaagcaattaaaaaattttttaaatgagaattcatgcgagattttctggaaataagcttaatagggcctagttaagctgtaaaaaaaaatttggggcgatttgaaagagaatagaaagaaccaggttcgatgaagttttggtaagccaaaaaaaatccaaacatttaaaaatctataaaaaatttaaaa

SEQ ID NO: 66961 - DNA, 837 bp, Heterodera glycines
atggacacaacgacgataaatcggattctagcgggaaacacaaagaccagagaactctacttgggatgcttcccttgcgacaaactcccaaacataatcaacaagtacccttcaactttggtggcgaataatgacccatcgaataaggaaggaacgcattggatagcaatgttcatcgttgacgataggaccgtctactatttgatagttttggtaggaaaccgaacagatgtatcagccagtttttacggaattatgaaaaagtgatttcgaataagccagctattcagtcagtctttagtgagaattgcggttattattgcatttattttatttattgtatgtgctcattaggaggaagaaattatgagagtaattttgaaaaagtgacaaaaaagttgataggagaagataatccagatttgtttgtcgtgaattttgttaaaaaaatgataaaaagtatttaaggaatttatcattaactcatttataaaaatggaccgattagacacaataattgcttctcttctgaactgtcccgcacgtaacttgtgcgactgcttaaatcacccggatgagatacaaaaagtagaaaaatacctcaaagggaaaactctacagacaacatacaaaaatcaactagatgaatagaaagattttgagtacggtggaattacaagagaaagtgcccgtaagcaaatggcttacaatggattcaagaatgtgaccgtcgaccagaacttttatgtacgtcaccgcatttgtcgtcgctacgccaataatccttgcgtaattgagaagcacaaaaacggacacgaacgattctaccccacttga

SEQ ID NO: 66962 - DNA, 799 bp, Heterodera glycines
atgccaaaaatcaagccgtaccgcattattgcatatgattttgaggcaacacaagacaaaaaaatggagaacaaatttgagcacgtggtcaactttgctgcggcaaccgttatttgtaccgattgcatcaacaacggctactggaacaactctcttcttgggaaaaagtgcaacatttgtggaccccaccggaccatcaccttttcgccattcgactacacgaaaacaacagttgatcaaaaaatcatcacccaaaatcctttgcacaaatttgtccaatggttgtttttcgaacgtaacaaaaagtatccgacggtagcatttgcacactttggtggtcgatacgatatgacaatgatcatcaaggaggtcatagagcaaagtgaaattaattttgtaagatttattttatatatattaataaaggtattcacaatccggagatcatcaaacaaggaaaccgactttacgaactgaagataaatgcaaatgatcatcgcccactcacaattcttcacgatagctacaaccttatgcctatcaaattatctggcctcatcaaatcctttggactccaaattgaggacaaacaattttttccacatatgttcaacaaggccacaaactatgacaacgtcctcactcatctgccctctcgcgtagactactgcccaaaccaaatgaaaaaggcagaccttcaaaaatttaacgattggtacagcaacaacttgaaaattttgcaattacgatttataatttaaaaaatcctaaacagctaaatattaaaagaaaatttaaa

SEQ ID NO: 66963 - DNA, 195 bp, Heterodera glycines
atgttgtatttggatgtcaaagaaaaaagctatcgtggaaaaagagctggcgccgaaacgcgagcgccgaaacgcgagcgccgaaacgcgtgggtccgtttgtacatttagtctttctaaaatattttatgaattttaaaaaaatactattttttcagaaaattttttatgttttaaaagtttttaaaataacaa

SEQ ID NO: 66964 - DNA, 321 bp, Heterodera glycines
atgaagcggactctaatttttgtggaaaagtttgtagcacaaaaaaggatcaacgaaagcaaggggccagccatcacatggtccataagtaaaaaaaaaccaaaaaagggtgagaacaagaaaaggccgtaagttataacataactaacgaaaacatgtaatcagaatttttgctttaaaaaacaaacttaatttttagaattacagagaaaaatagacaaaacacaattggattatacttattgaaagctgcctataaaattcatttattataatcattaactcaccaagattttttcgacttttagaccatgaaaaata

SEQ ID NO: 66965 - DNA, 115 bp, Heterodera glycines
accgattagaacccgataagaggacaacgaaaagcaaaacgatgactgtttttgaaggctatgaaatgcgtactgatagaataatagcagcaggccaaacccaggctatttttca

SEQ ID NO: 66966 - DNA, 167 bp, Heterodera glycines
atgtatttttcgttttttgaaatcccgaattatggggtgattttacaaaatttttcgccgattttcgcaaaaaaaattaagttaaaaaataaatgaaaaaaatcaaaaagttaaatttttagtcagatttgaagaaagaaatgattaaataaatattttttaataaa

SEQ ID NO: 66967 - DNA, 1030 bp, Heterodera glycines
atggccaccctttcctcgtccaccgtaatgctcctctttttgctgctgtttgtcttggccctcatttacgtggcgtttttcttcacccggtggcaacttcgatgccaacatcatccttctgaatgaaattggaaaaatgagaataagtgggcaaaacttaaaaccaaaatttagtaaaaagtgcgatttattttactgctttactttaaaaatctgattttatttccatttttttttgcaattttgttaatttatccgctcgcttttccttttttcggcatttttgtcctcttttacattttctctgattgcatttcacattttgagatggcattgccatttgaccaccattcaaatccaattgtgccaaaaaaacccctagggacacacagcgctaaaaggggcgaaaatgtcaatgatttgccttttaaggaggcgagggcgggcaaatggccatggaacaaaaggaaaatgccgaaaatttaagggggagaaaagttccgttttttgttccatttgtcaatcaaaacatttttgggaagtaaaaaatttaacaaaatattacataaatcattgaaaattaattcaaatttaattaaagggtatccttttattattaatgatttttggcttaattttgtcgcattttttcgtccttttcaccgtaaaaatccttttaattagcaatgaacatcatttggcttgtgtaaacgggctcaacgagtttaatattggcatgttttttgtgttttattaattggataataaataaataaaataattttcataattattttgcttaggcattttgcacttgcgaggaacgcatcaatggcaaaatatgaggtgcagtaaaagccgaatgctaatacattcttgctgcattcaatcttaaaattaaactcccaaggcatgccattgaccaatggaatgggcggcactcgcccgtttttggcttttaccttagcctcattagcccaaccgatgcgtcggccaggtttttggttttaattttcgtattttataacca

SEQ ID NO: 66968 - DNA, 1057 bp, Heterodera glycines
  unsure (1)..(1057): unsure at all n locations
atgccttcgnccgtcgaacgctacggaccttttctgaagcacattcgagaacgccttagacacacaaatattgtgaaataataagccaaaataaattcaaaaattagcacaaattgtttagcttctgtacaccgatgaccttggcattgtccattctctgcttgtccacgcctccaaaatgaacatgtcgcaaacgcgatactcatatttggtgtccaatatggtgaattaataatcaaataaaatttctaattttgcaatttaaggatttgcatttgttggaggattttctcggccccgaattccattgcaatatcaccgggtttcagttggtccgtcaacagccgcaaataaaagtgaaaagtggactcatttaaaatgaatgtcatttctcccccgttaatttccctttagcgactaattcaattaaagtcactatttgaaaataatttattagaatttcctactttttcggagtgccattaatatttgttcaaatgtgaagtgacttggccggtcacggaatttctgttgcaattgcaaatttataaacaattccatttgtgttcatattttgattcttctaatttatccgaaatctttcgccctttggtcaatcggagacagaaaaaaaaagaattttagggagtttatctttcttaatcactcttttgttcagactgatttggccctggcaatggatgccacggcattggtcggtgccgctgtccacgcgttacgccagcgcaatttggagcccaaaccgcaccaattgttgtgcgatgcgggcgaccaatggacagacggaatgttaatgcaggagcaaattcggagagtaagccatggcatttattttgaattttaattaataaattgtttattatttatttcatgtaaaattccattttcatgtttaatttttcaggtcgatttgactgatgcggccaccggcggacattcggcgacgtcggcaattcgtttcaacgaaaccaccggcgaacgaatggacacttcccttttggcaatcacgcgaatgcccaacggcaccttcacagac

SEQ ID NO: 66969 - DNA, 837 bp, Heterodera glycines
ttgaacagtctatggttcgccgttggctcacttatgcaacaaggaagtgacgtaataccaaggtgaaaaggcgaattagcaaagaaaaaggcatttatgactttttagagcggctgctacacgtaccgtagccgtcatatggtaacataccgtaaaaaacattaaaataaatcttcgtttttcaggtggttattcacgttaattctgatcagttcgtacaccgctcaattggccgcatttctcacagtcgaacggatgagcacagcggtggaaagcagcgccgatttggccgcgcaacaacgcataaaattcggtgatttccgttttcattaaaattttaaagcatattaaaaaggtgaagataaaagttggtggactaaataattgctaagaagtatcctcaaaaattctgtaattactttttttaatttttctctccacaggaactttgtccaatggcagcacaatggaatttttccgtgagtcgcgcattcccatttatgaaagaatgtggtcaattatgcagtccaccacgcccaccggtggttttttattttgaatttatttttattattttttaattttaattttcgtttactttttccattttcagtgtttgttaattcaagcagagaaggcattgcgcgagtgaaaggcggcaattatgcttatatgatggagagcacaatgttggaatattggtgagaaaaagggaaaaaacgaattgaaacaaaaattaattaattagttattcaccagtttaaaatcctattttttaaatttaggattggcgaagactgtcagctccaaaccattggcggactgctcgattcgaag

SEQ ID NO: 66970 - DNA, 678 bp, Heterodera glycines
gggggactgccccgaaaacaaaaaaatcgatttttcaagtgagtgtccgtttggggtactcaaacaattatggggagcaaaaatccaacgcagaattaaagtacagactatagggaagctattccggaaggattcggtctccccataaatctgggcgcatcggttcggggagactgccccgaaaacaaaaaaatcgattttttcaagtgtccgtttggggtactcaaacaattatggggagcaaaaatccaacgcagaattaaagtacaggctatagggaagctattcccgaaggattcggtctccccataaatctgggcgcatcggttcggggggactgccccgaaaacaaaaaaatcgattttttcaagtgtccgtttggggtactcaaacatttatggggagcaaaaatccaacgcagaattaaagtacagactatagggaagctattcccgaaggattcggtctccccataaatctgggcgcatcggttcggggggactgccccgaaaacaaaaaaatcgattttttcaagtgtccgtttggggtactcaaacatttatggggagcaaaaatccaacgcagaattaaagtacagactatagggaagctattcccgaaggattcggtctccccataaatctgggcgcatcggttcggggggactgccccgaaaac

SEQ ID NO: 66971 - DNA, 1456 bp, Heterodera glycines
ggcgaacaatgccaaaatcaaacgatttatggagaaaaacaatttgcacaacataacggaattggaaaattattacatccaacggttgcaagtgattgtcaaggaactttttgaagaacgacaggaaatggcggaaggacagaaaaaagcgaaacaaaagaaaatgattttttggcaggaagtgttcgacaataacaaaccggtaaatgccgaagatcgacgggcggtccgtccatctgatgggaatgccccgcggagtttccgtccgtttcgtaaatttcgctatttaagcgccttttcgagaaatagtttttctcgaattttgctatataagtcaatggctcgatgttctatatattattcagaattaaaaaagagagaaatgaattttttgctttttttgttacagctttttgaaacctatcgaaattttttgaattttttgtttcgaccagcggcatttttataaagagaaaatgttaaatcttgagttaacagtggatttaaaaaagcagtgtcaaagaaaaataatctaattaaatatgattatcagttagccataatccctcttaaattaattatatatattattttattgaatttatatttttgttggcattcttaggacccttcaaacacagttgtgcacaattggtattcaagaacaacgcaggagagatttttggacacaaaacgtgcggttgagaagggtttccaagtgttggtctcctcgtgctggtcagtttttatttttccggagaaatgaattgtatatttgttatttaaataatttttatagtaaaataaataaatttaattggtaaaaaattatgctcctaaattaggtaccttaattacatcaattatggccccgattggcgtgatggcactggcacaacccgacaaatttactattgcgaccctcgcggtttcgagggcacttatgagcagaagcaattagtgattggcggcattgcaacgatgtggggcgaataccttgacgggaccaatttggagccaaatttatggtagataaatatttgtaatacttattttgaatgtccatactcatattgtaaattattttgattttttgattgtttttttgcctttcttttgtccgtgtgtccgttgtttttgttggctctttgtccgtgggccctttgtccgtgtgggtcctttgtcattgtacgcttattttgccgatggattggccggggctgattcggccaacccttccttggtcacaattaaattgtttaaatttaccaggccaagggcttctgcggtcgctgaacgcctttggagtccgcccgagttgacccgtttggccgacgcggcttggccacgtctgcaggaacaccggtgccgaatggtggccaggggctaccgcgcggagccggtcaatgggccggacttttgccagacggaattggacgagcaaatgcttaaataa

SEQ ID NO: 66972 - DNA, 240 bp, Heterodera glycines
atgctggcagaaattgccagcgttgaattgccgggtcagttttttggtaccaaaatccgaatttcaggtgccaaaaatgccaaactcggttctggcttcaagaatttggccaaaactttttattttatggaatccataatttttgtgacttgtagaaaacaagtcttttatgtcaacggattaccccagacagttgttggatcagaaattttcattaaaaacccgaaaatgataacataa

SEQ ID NO: 66973 - DNA, 181 bp, Heterodera glycines; identical to SEQ ID NO: 52969

SEQ ID NO: 66974 - DNA, 65 bp, Heterodera glycines; identical to SEQ ID NO: 56492

SEQ ID NO: 66975 - DNA, 59 bp, Heterodera glycines; identical to SEQ ID NO: 52422

SEQ ID NO: 66976 - DNA, 59 bp, Heterodera glycines; identical to SEQ ID NO: 52422

SEQ ID NO: 66977 - DNA, 59 bp, Heterodera glycines; identical to SEQ ID NO: 52421

SEQ ID NO: 66978 - DNA, 59 bp, Heterodera glycines; identical to SEQ ID NO: 52421

SEQ ID NO: 66979 - DNA, 681 bp, Heterodera glycines
atgcacataaatatttttgttccatttttatttctatttgttatttttaatggttgtcaggcaaaagaactgaaaatttgtgtcaaatatgagaaaacagtggcaatgcgcgaaacgcaaattaatttaactgcaattagagtgaacagcaaaaatgaataccgaaatattaaagaaaatataaaaattggtgaatgttttggcatttccatccctcagcaggaaaataataaaacgcaaaaaatcacttttgaatttacaatttatgtcaaaccattggaaaatgagtaccaaccgccggcggatgaccacgacgaaaacccatccgatgaggggccgtatgaaaaccgaattttagacatcaaaatggacgacattcggacaatggtccgacgcaacaactttgtgatccatgagcctaatccgtcaatggtgtacacgttcaatttgggcacaatcgatccgccagggtttttgtggaaacgcaaaatttttgttttgccggagaacgatttgggcaattaccatgcttttttgtatgccgttgcctacaaaaatcaacggactcaggacaatttgaatagtaaaagttgcatgaaactgttgagatatgcgccatttgtgaaaattgacaaagaaattgcgcccaccttgaaacggatgacaaaagggtggaaataa

SEQ ID NO: 66980 - DNA, 270 bp, Heterodera glycines
atgtgtgagaatttgcgctttgcacaaacattcagcttgctgggcggcattccgctgctcacctcactgttcggttgctttccggtcgagccgttcaccgcgtccgaatcggaaatggcggcgctcggcgacgcgtcaaatgccgataaagatgacgccggcgacaacaacaatttaaacaatttatgcgcgtctcatcagcgaaaggcatcgaccgaacgcggcacacaaacagacgccgggcatctggcaattttgcacgatcaatta

SEQ ID NO: 66981 - DNA, 607 bp, Heterodera glycines
ctgagtgcctaaaataacttgtaaataaaatttggtgcgtttcagagcagtttgtgaaaaaatatttatgaattaattttgctaaaaaaataaaatagtgaagctttaaaaattaataaaaaattttaaattcagaattactggagttagcatcatagcagtgcttttccttgtctttttgatgccctcgcaaaatctggttcgcttctgatcagtttataaaaaaaaagttaagcctaaaatttttcgcatatttaaaaagcaattaaaaatttttagattttttattcatctccctttttgatagtgaaagcatctgagtgcctaaaataacttgtaaataaaatttggtgcgtttcagagcagtttgtgaaaaaatatttatgaattaattttgctaaaaaaataaaatagtgaagctttaaaaattaataaaaaattttaaattcagaattactggagttagcatcatagcagtgcttttccttgtctttttgatgctctcgcaaaatctggttcgcttctgaccagtttataaaaaaaaagttaagcctaaaatttttcgcatatttaaaaagcaattaaaaatttttagatttttattcat

SEQ ID NO: 66982 - DNA, 652 bp, Heterodera glycines
  unsure (1)..(652): unsure at all n locations
gttttcgggcagtccccccgaaccgatgcgcccagatttatggggagaccgaatccttcgggaatagcttccctatagcctgtactttaattctgcgttggatttttgctccccataattgtttgagtaccccaaacggacacttgaaaaaatcgatttttttgttttcggggcagtccccccgagccgatgcgcccagatttatggggagaccgaatccttccggaatagcttccctatagcctgtactttaattctgcgttggatttttgctccccataattgtttgagtaccccaaacggacacttgaaaaaatcgatttttttgttttcggggcagtccccccgagccgatgcgcccagatttatggggagaccgaatccttccggaatagcttccctatagcctgtactttaattctgcgttggatttttgctcctcataattgtttgagtaccccaaacggacacttgaaaaaatcgatttttttgttttcggggcagtccccccgaaccgatgcgcccagatttatgnggagaccgaatccttccggnatagcttncctatagcctgtactttaattctgcngtggatttttgctccccataattgtttgagtaccccaacggacacttgaaaaatcgatttttt

SEQ ID NO: 66983 - DNA, 678 bp, Heterodera glycines
atggaacgtcaaatatcccggtgagtacaaaatatttatttttaatgattatcagatgcgcccaatcaccaaatccgatatcaccgattaccaattccccattcttctctaccacaacaacaaccactttgacggcatcaaaactctttcaaaatttttcaacaaacgttactattgcatctcctgtgaatctgcctacagccacaaatttgaacactcttcaaaatgctcttcactatgtcacgggtgccgtgaggtgggcgtcgactatccctgcgaagcccaacaaggctacttcaaaaaatgtttgcactgcaacaactatttctataacaacgactgctatggtaaataaaagatccagtttgaaaatgggcattaaaatcaaaataaaagcagaatgcaggtatttctatttttcgacttaatgttttcagtaaaaattaaataatatcaaatcgatgaaaagaaatgcacaaattttgtgtccattaacgaattctatgcctttttgaattaattccgtccgttcatttttcttcgcgtgtttcgattgattttatgtaatttaatggaaagaacgtaaagaagatgatgaaaattgtgcaagcgaaaaattggaaaaagagagaaatggtgaattaaagaaaagggaaaatgaaaatggcaaagaataaa

SEQ ID NO: 66984 - DNA, 575 bp, Heterodera glycines
ttatttacgcgaccaaagctcgccgtgcgttggcggcggaagcggccacggcgttggacgacggcacgaaggagcccatcgatgccaccgaaatcttcgaacacatccgcgacattaacgaccccgagcatccgtacacgttggaacagctgaacgtcgtccaagtggggaaggggcacagttagaaattccgtgttttttttttttgacttaattttaggatttttgggaaaatttttggaaaattagtaaattattataaaattcgaaaaaaatattaaaatttattcggggcgaacgacacgatattggagagggggaacgaactgctcccgttttttcggcttggtattaacacggccgtttagtccccgcattttttgaaatttatatccatttccattgaaaccaattgcccccccccccctttacttttcctctgttctccaggaggaactgatccaagtcagcgccgacccgaccgaccctttcgtcgacgtgcgctttactccgaccattccgcactgttccatggcggcactgattgggctggccatctacgcaaagttgagacg

SEQ ID NO: 66985 - DNA, 812 bp, Heterodera glycines
atgaccgacgtcaagctcatttgggatgtttttacccgcgaaatttggcctatttttgcgacaaacattcaccgtttgggctttgacgatggcgatcatttggacaatttgcgtcgtcgcacttcgccaacgattctcactgatcttgatgaattgcattcgatcaattccggtcatctgtgcccagaaggaattgctgacatggacccaatgcaactgctggccaagctttggccaaatggttacacactccgacaaaaaatggacaaccaaagcaattacgtttccgtgcttatgtgagtccaccaaatttcgaatgggtcaacagcttcaaagaggtcgtctcgccagaattttcgtcaaattgtttttattttaccaatttttgtgtttagacatttcgccatgccaccacttctgtcagttacaaaattcaactttatttttgggtggaaccgacgtcaattgaaccatttgaattggataacgaagtgacgaaagaaaagctgacactgaaacaggagatcgacgaattcgacttaaatgtgtataattggctgttgcaacggtgcccaattggggagacggcgacggcgccagttaagtgggaaaaccgcgaaaatccgagtgccaatttgaacaatgtcagatttgatctgtggagtttcgataaatccattgggtgagcagcaacagcatttaaattttatcgaaaaataaaatatttaattaattttaggccattggcgccaccagcggaagaaaaagaaggagaagaagaagcggatcaaagcaacaaaaatgtcgtctga

SEQ ID NO: 66986 - DNA, 186 bp, Heterodera glycines
atgcaggcgatcaaatgcgttgtcgttggcgatggcgcagtgggaaaaacttgtcttctcatcaggtaactaactaattgattatgtttcaaaagggaatgtcatgcaatttcttcctccagttacacaaccaatgcctttccgggtgaatacattccgacagtgttcgacaattattctgcaaat

SEQ ID NO: 66987 - DNA, 1056 bp, Heterodera glycines
cgattttattattgtttttaggttatggtcgatggcaggcccataaatcttgggttggttgtactcaatacgatgtgataaactggttttttgtttagactttgggacactgctggacaggaggactacgaccggcttaggccgctcagttacccccagacggactgtttccttctgtgcttcaggtcggtttctccgatgtccattccttgacatttgttgcccatttgataaaataattactaatgtaagtaatatttatcatttcagcatcgttaacccggcctcttttgaaaatatccgtgccaaatggtacccagaagttagccatcactgcccccagacgcccatcattctcgttggttcgtatcactgagtcactcatttttttttattagaattaagcatttctaaaacttttatcggtacaccccaaaacacagccgcagaaacacagccgggaataaattcttaaaaaatttgtaaacaaatttttcaagaaaaaaatatttaaaaaattttcttagaaaaattcgaaggagaaaaaaattatataaaaaattttccagcgatttttttgaattttttttgaaaaccagtaattcaccattaaattttgaaaaaaaaattttcttagaattttctaacaataagacttttttgaaaaatttctaagtttgaaaattttttaatttatttccggctgtgttttgtcctgttccggacttttatacccctaatattttgtcattgccaaggtacgaagctcgacttgcgggaagactcaaaaacgttggacaaattgagagagcgccgtttggcgcccatttctgtggcgcagggccatcaaatggcaagggaaatcaaagcgaccaaatatttggagtgttccgcactcacacagatcggccttaagcagggtaataggtttcatacttcgaaaacccttttgtctttctaattcccttccccccccccccttaagttttcgacgaagcaatccgtgccgttttgtgcccagtccaagtcaagccaaagaagtcttgcgccattctc

SEQ ID NO: 66988 - DNA, 658 bp, Heterodera glycines
atggaaagctgtcagtgcacttggaccaatttgtacgcttcttttattctctacgggtcgtactttttgctgttctgcaacttcttctaccaaacgtaccttcgacggggaaatcgctacgcaaacaaatcgaaggcgaaaggcggaaaggcagcggctgaaagtgtcgtccacgcgaatggcacggccaactgctcaattaacgacgaaagtgccaaaaccaacggaagtgttgtccaccaccaacagcagaagtgaggaagaaggacacacttgtccatccttttgggcaattttttgcttattttccttccttttttggtcgaaaatttctagttaaaatggttagcccatttggggactttttcgcccatccaacgaatttttttggtcattcgatttcacctgcatttttggttttacaacgaacatttttctatttctttcggcgttcctttgattctctcgtcctttttaattacgcccgttttaatttatttatggcgccacatttttttgcgccaaaaataaacttcccatggtccgttcacattcactaattgagcaactttatttggaggaaataatttagcttttcataaaaaaaagcaatttcattttaggtttttcagtccaaccgccgttgacgaaccgatga

SEQ ID NO: 66989 - DNA, 637 bp, Heterodera glycines
caagtgtccgtttggggtactcaaacaattatgtggagcaaaaatccaacgcagaattaaagtacaggctatagggaagctattccggaaggattcggtctccccataaatctgggcgcatcggttcggggggactgccccgaaaacaaaaaatcgattttttcaagtgtccgtttggggtactcaaacaattatggggagcaaaaatccaacgcagaattaaagtacaggctatagggaagctattcccgaaggattcggtctccccataaatctgggcgcatcggttcggggggactgcccctaaaacaaaaaaatcgaattttcaagtgtccgtttggggtactcaaacatttatggggagcaaaaatccaacgcagaattaaagtacaggctatagggaagctactcccgaaggattcggtctccccataaatctgggcgcatcggttcggggggactgccccgaaaacaaaaaaatcggttttttcaagtgtccgtttggggtactcaaacaattatggggagcaaaaatccaacgcagaattaaagtacaggctatagggaagctattccggaaggattcggtctccccataaatctgggcgcatcggttcggggggactgccccgaaaac

SEQ ID NO: 66990 - DNA, 498 bp, Heterodera glycines
atggagaaggcctgcaaaatttggagagattatatcgattttagtgcgctaggttcgatgaaactttttaaaatataagcctaaactttttggcctgtttaaaaaggaattaaaaatttttaaaaattttattcatctcccttttgatagaaaaagcatcagagagccttatttaacttttaattaacatttggtgcgtttcagagcagtttctgaaaaaatatttatgaattaattttgctaaaaaaataaaatagtgaagctttaaaaattaataaaaaattttaaattcagaattactggagttagcatcatagcagtgcttttccttgtctttttgatgctctcgcaaaatctggttcgcttctgatcagtttataaaaaaaaagttaagcctaaaatttttcgcatatttaaaaagcaattaaaaatttttagatttttattcatctccctttttgatagtgaaagcatctgagtgcctaaaataacttgtaa

SEQ ID NO: 66991 - DNA, 315 bp, Heterodera glycines
atgtcacgagaaattttgcctatttttgtgacaaacattcgccatttggacattccggatggtggtcatttggatcatttgcgtcgtctcatttcaccgacaattctcttcgatctgatcaacctgaattcaatgtgctctgctgatctgttccccgatgtgatcgctgatgatgggccaaatgcaactgctggccaagcgttgtccaaatggttgcacaccccgagaaaagatgggcaaccgaagcgattgtgttgcaagttgcatcatgtgcctgtcaatgaagcaaaagaatgggtcaacaatttcaagaag

SEQ ID NO: 66992 - DNA, 683 bp, Heterodera glycines
atggaacagaaatcgttgggtccaattgtgataccatttggagaacagcagaaggagaaaaatgaacaatcgaacattgaggaaaatgtgagccaaatttggcaattccatggcattaagcaatcgaatgtcttggttctacatttcagttggatttgtactgatgttttgatggacattttccctctttttgaccatgcccaactcggcctcaaattggcactgatttcgccccgtttcgaggttttatcgaaaatttgagtgaaaaggggggctcctgaccttttaaaacgccaaactcggacaaaatcgacacttcagtaccaaaaaatgacgtaagaaaaaaaattaaaagcaaaaaaaaacgcaaaaaagagatgcagagacgtaacaaataggcctaagcttaagcataagccgaagcctaagctgaagactaagccctgacctaagctgaagcctaagcctgggtgagcagcgaggcagctttttgtttgacttattaaattattcatcgaatattcaaattttaggccatttgtctccgcccacaggtcaaaacaacgaaaaagacatcaattcatgaacctatggccattgggaagtgcatttattatttaagaaatggctcgcgccaggatcagtcagctggggacaaatcagctgacagacaacttagctga

SEQ ID NO: 66993 - DNA, 1405 bp, Heterodera glycines
  unsure (1)..(1405): unsure at all n locations
atgattagaagaggtgcaacagtgattgnaagaggtgcaacagtgattagaagagttacaacagtgatcagaagaggtacaaagtgattagaagaggtacaacaatgattagaagaggtacagcagtgattagaagaggtacaacaatgattagaagaggtacagcagtgattagaagaggtacaccagtgattagaagaggtacaagtgattagaagaggtacaccagtgattagaagaggtacaaaagcgattagaagaggttcaacagtgatcagaagaggtacaacagtgattagaagaggtacaaaagttagtaaaataggtacaacagtgattaaaatttgaacaaaagtgattagaagaggtacaatcatggattaaaatgaaataaataagaaaattgtattattggatgtattataaatttatcaaattaaaaaatccttttacttattaaaaataaagttagaaatttataatatagaatatttattgaaattgaaaggaactaatttctcgaattttataaaaatttaattcaaataaaaaaatgtaatttattattaataaaataaaaaatattttaaatgaataaaacaatgaaaacacgaaaaaaatggtagttattaattaaaaacaacgttggaaattattaattgaatatttatttaatttgaaattaaattattttttttacaaattcaaaaaaaataatgaaattctttaagttaaaaaaaataaatttaaataatttaaaagaaatcttcaaattaattaaaaacagtcaaaataacccaaaaatgcacagaaaaataatgttacaccgtccggattcgaactttgcccccccccaaaaatgatgcctcagaatccccaatcacacagggattctgaggtcttgactatgtcaaaagttaaatctgatcacgtattcgtgatcagcgtcataaaatagccctaatgacatgtttttggaagatttttgacgaaaaaattttttcactcaaaaatcctggtcacccccctttggtcccgaatctcaaaatcacttttatttttataaaaattcttaaaaaagtgataaaaatgccaaataaaatttatataatagagcaaaaaactgcggaaatgcatttatacataattaactaatattcataatatttaatataaaaaccaatttcacataatatttaatattctatgaattaaatataagaaaattaaaaatcaaatcattaaattagaatttataaataaaatgttgatttagctatattcaaatttacaaaaatcaaaacaaaacttcaaaataaaaaagtaaccgcattacatgaagcggcgcacgcgataataatcaaggaattaaattaaaaaaaactaggaaagtatatgtaataaa

SEQ ID NO: 66994 - DNA, 836 bp, Heterodera glycines
atgagagttcagcctgttcgagaagtcatggttaaaggatcggaagcaaatgtgatcgatgtgtggattattgaaggaaagaataaagcacgtgtgtcggcttggaatattctggcattaaaattaattattaagctgttttaagggttgcttgatcaaattacaaaatgtcattttcaaagaggattcatacaaaggcgaatataatttcgtgtttaccaagtcgtcaaaaatttctattttggaaaaaacagaagaaaccgaaattgctaagactctaatgcacctttcaaaaaagcgtggtttagtttcatgtattttctgttataatatttaaaatattaaataaattaaaataaataatttaaataatataaattattaacttttatttttaaagtaatatattttaaaattcaattattaaaaaaggcgatgtccgagtgcaaattgcgagaaagcaaacggttctgaatcttgcaaatagacaagatgggacgttgtgtgtcgacaaagagcacaaggcgcaactgatttttccaaattcaattcagtttgatcaaaaggaagaaataacgctgcaaagcgtgaacattgattgtaacgacggtaacattaataaaaattttaattaatttattcttaaacaaaatattaagatattttaataatttcattaattttaagctggcgtgttgactctcactatctatgacaatggcgcatataaaacacatactgaaaaaccattcaaactcatttgaatgaagtggattatccaccaaccgaataattttttaagtatgataaacacaatgaatttttactatgtttta

SEQ ID NO: 66995 - DNA, 591 bp, Heterodera glycines
  unsure (1)..(591): unsure at all n locations
atggttcgacataaacagaatttttctgttggtaatgattttccaacttcttcaaaaaatgatcagcaaatgaatgaagggttcatagctcccgtaaaaaaagcggtcaattgaatgaaagggttgaaagctccctaaaaaagcagattgacaaaaatttcaatgattatgaaagtataaaaagacagaaaaaatcgcttaaacgaaagattgatgaaaatgatgagactatcgatttagacaaagttccaatgagtttttttgacgctggtggtaatgaaagcatccaacaaaacgaatatgtaatagaaactgagcaattttcgagccaattttcacacatgggaatgatatccaataaaaaagacactggaaaaaatagtcgaaatcaaatgacagaggaacaacgacaaattatcagggcaaaaaacgcaatcgccgcaaaaacgtatagaaaaaaagtaaaaaacgtagattttttgcttttgcaagcgtctgaacaaaacacttataatgttgaattgtatgaacttagtngatttaaagtaaagtgtaagcattgtccggttatacatttttcagaagaagaaa

SEQ ID NO: 66996 - DNA, 1207 bp, Heterodera glycines
atgttccgttggggaattgaaccaaagaaaaaaataatgaaggtcagggcaatgaacgaggtaatgttacccgggtagacttacccgggtaagttattaactcagggcgcgtatctgtcctgatttatctgatttgtcctgatttgaagggtccaaatctgataaaattaaaatgtcctgatttgtcagatttgtcctgatttggagggagtgacccaactttgtcctgatttcttaaataaacttacaattttgaaattttatggcataatgtcactattttatcaataaaatataagatttatgacaaaatttggttatttttttaataaaaatctgttaacaaatcgattaaaaatcgcaaaaaattttccggcggcgcctatcggcaccgccggaccccctgtccatcctccaaaattttttgaaaaaatgcgacgcaaaaaaagcgtttttaaagcaaaaaagtcgtcgcttgacttttaatttaattgcaaaattggcattttttggtgaaaatctgttaacaaatcagaacgaaattacaaaaaattttccggcggcgcctatcggcatcgccggaccctccccccctcgcccatttcctaaaagttttttggaaaaatgcgccgcaaaaaaatagttaaaaatctttatttttttgattccgaatgcgctaaaattgatgatttgctaattttctacccaaaattgttaaaatcgataatgggagacgaaaaatataatatttgatacatttttgatcgaaaaattgtaaaaataactgatttgaagcaattttgcaaaatgtcctgattttcgaccccagaatctgattttttgggcttgatgttctgattttgaaaatttttcgatccgagccctgatattagcgcactcaatatgaacatttatttttacatattaagacttacaagaaaaaataaataaataacttaatccgataaaaacttcaaaaataaataaaactgaaagtatatgcaagaaccacgccaagttcacgcgcactaatggagcaatgatgcaagtataatctttaaaaatgtttattttttttaaaaacaaaataagtgtaaggcgtaaatagtttcagccaatagcgggaagggaccgccccaaacataccgagagaagtcatcttcaggaaaatgattaatattcttttcgccagttttacaaaaataaa

SEQ ID NO: 66997 - DNA, 383 bp, Heterodera glycines
aaaaattttattcatctcccttttcgatagaaaaagcatcagagtgcctaaactaacatgtaaataaaatttggtgcgtttcagagcattttctgaaaaaatatttatgaaataaaaaaatcgattttttcaagtgtccgtttggggtactcaaacaattatggggagcaaaaatccaacgcagaattaaagtacagactatagggaagctattcccgaaggattcggtctccccataaatctgggcgcatcggttcggggggactgccccgaaaacaaaaaaatcgattttttcaagtgtccgtttggggtactcaaacaattatggggagcaaaaatccaacgcagaattaaagtacaggctatagggaagctattcccga

SEQ ID NO: 66998 - DNA, 1278 bp, Heterodera glycines
  unsure (1)..(1278): unsure at all n locations
atgtanctaaaaattaaaatgttcgagaaaggtgagtttgctttttttgagcaatatgcaagataaatttataatcatttttcaatntatagcacaaatactttcttcaaataattaaaacaaattattaataattcgaaagtgaaacacgaaaagactaaaaataattacaaaataaataattaaacaaatactaatgctacggtactacctctaccgtaactctacacttcacatcaaatccgacaagaatgataaaaaaattatctggtaaaataaaaggcaaagaatacaaacaaaatataattaatattaacttatttatttcattgtagtcaattaatcaaaattaagtttgaaagaatcatgcaaatgttcagaaaaaggaattaaacgatattaaaaacaatatcattataacaaaaaaatatataataagtagggctggaaattttatgtaaatacatattttttcctctggcttctccatgctctaaatagcaggaaaaccactttcttttttgtgtttgcgaacaaaagttgggacttttattttcatatttttacatatttaggggtttttatacatatttgatacatattttggaattgtttcttatatattttcatttttttttacatattttgagatttttttacggaagtttttgggaattctcaaaaaaacacaaaatttcggcaaattttttgttaaattctccaaataataataatgttaaaattttcggaatgcctttgcgccacaactctgtcctaatattttctattatttacatgtctaataaacaaatcatatttttataattttatttaaatgaaaataaatttataaataaaattattaattttagtattaattctttttctaatttactttttttattttggtttaaatggcttaagtttgtattatttatactaaaaagttttcctaaaattaatatttaaattaaaatatttattaaattaatataattaacatatacgaaatattaaataatcaaaaaatttgagaaaattaattttttaaaattaggggccttaaaattttttaaaagggaattataaatgacaaaatataaaagaaatatgaaagacaaaatctttaaatgacctataaactgattatttatatattacatttcttttcatatttctgttgtctgtctcccccatcttatgtgaatatatattaaataatcctttactttgctgctatgcaaaattatttcacaaataatttaaatttaaatacaa

SEQ ID NO: 66999 - DNA, 410 bp, Heterodera glycines
cctttggtacaaaaaaatttcgcgggcttcatttttatgaaacatttgctggaggttgagcagaaagtgcagagaattcgcaattcgataacgataattcccaagcaattttatgaccgttgtgtttcttttgagtcgattttagaatcaagttcgaaattaaattcttcattgattgcttgtgccgacagattctcggtaattaaatcaatcacaaaaaatgatgacgaattccgaatttaagactcaaatgccgagcccaccttcggaaatgttttacgaaattatccgtcagacggggcccttttctatgatgccaccgtatttggccttggatttgttgtttgtgttcgaaattggcaaaacgtttcccttctttcagcggcttagcatcagcgataaggtaaaaa

SEQ ID NO: 67000 - DNA, 210 bp, Heterodera glycines
gtgaccgatgccgtcgccgcgaatctcaaaaatcccttctccgtcagaaaactcggcacccccacgccacaattgcacccgcggctttgcgctttgcccgccttcaattgccacccgcgccatttgcggcggcactcgcccagggcattggtttgcctggcgagccgaataacgcacgaacgggcggatctgctgcagagactgctcgcc

SEQ ID NO: 67001 - DNA, 1232 bp, Heterodera glycines
atgtttgttttccttttttcaaaagccatttcacccagcaagtcgaatgcagaactcgcagaacaatttattgatattgaatcagaagacagatgccaactgatcaaggtgagccttgaaaaaaccgcgcaaaacggcaacatccaaattgagaaagaaaatctgaattggaaaatattttataaaaacattttaaatataattaaaaatttaatttttgcactgaatcatctcaagccggtcgggtcgggaagtattgaaaatggaaaaggaggatcgtgaggggggggggggaggaaccaatccggacatttggacaatggatgttccagcagcagacatttggacaatgaagtcatttggactgatatggacaatcggacatcggacattatgaatgttttttttaattttaggaattaatttttttttcaaatttcttgggacttttgataattcttccagtccaatgtccaattagtcaattcaaaagcacctctaataaataaacagcaattaaatttttatgtttcataaatttactataagccaatcattaggggtgtatttttcactttgaaaactcgattgttaggggtgtatttttcccgaaacttcgggtaaattatccgaagctcgaagttcgaagcccaaaaaccgcgaagttttcgaagctcgaagtttcgcccagccctgaccggcaccgccggaccctcattttaccttttttttgaaactctgaccccaaaacgacaaaaatagccctttattttcctcaaaaatattggctcaaaaacgtaaatttggtcattttttgggaaaaatctgctaacaaatcgcattaaaaatacaaattttttcccggcagcgcctattggcaccacctgttctgcccctgtgctcgaaaagttttttggaaaaagcacgccgcaaaaaaaaagcgtttacctatatggttttgtttctttaaaaaatcttttggatatttttccagcgattaaattccgttttttgttaataaatttaaataaaaaattcattcagaaaaattgtttacaattacgggtcacggaaaccacgggggttttggggtgccgtgatcacggttcacgggtcacggatttttttggaagccccgtgatcacggctcacggatttccgtgattggaaattcaatcacggccagccctggtgcgagagcgtagaaagagaaagagagaggatgaaataaa

SEQ ID NO: 67002 - DNA, 400 bp, Heterodera glycines
aaatgccaactgttcgcgaaattcttgagtgtttgcaaaagccaattaaacggcccataaatccaacaaatgaagacagcgtactgaatgctgagaggacggccgcagaacaacaaatggaaggtgtatcgaccagcaatgatttgaacgtcggtgagagcgatgatgaagaaaattgtgagcctgttcatttctaacgtggcaaaacaatccgaggagcgctttgtctttggcaccaaggttttaaaaatttttgatgtcgagtcaaaacggaatcagatgagcgattggtcaaggagaatccaaagcaacacccatctcaagccttggacgcaagtgttcgtcatcggctgttacgtgaaacaatcgatggtcgtcgcagcgcaagccttaatgcctg

SEQ ID NO: 67003 - DNA, 768 bp, Heterodera glycines
atggcaatcgaaagggtaagcgaattgaaaattcaaatgaaaataatgccataaataatactgaacctgttcagcccatctcagcgcaatcctctgaccaacagcaaatcgtattggacaacccaacggcaaatccattaaaagtgcgggaagcgatgggcactgacactgcggggaatgcaacggcagatgtggggagtgtcggaaacgggacggcggacgaagcgatgagcacgacatcgacctacaccgcaaggcaaaggcagaacttcaacaaaaaacaacggaaacaaaatgtgggttatatttaaaatttatagaattcgtgcacaaaaaaaagcaaattcttagggccaaatgttcgtggacgcgccggcagaaaaatttgggcctagggttcgcaagaaccctaagcagggaaaatacgaggtgcaggccattttggccacgacaacgtacaaaaaggatgggcaattacgacggatcttctatgttcagtggttaggtaaattaatttttaacaattttatacaattcttaataaaatgtattcaggctatagtcaaaaagactatagttgggtcttgagcgagtggatggacacgcaggagcttgtcacagagttcactgttaactctgtgatcagctgggtcttcaaggcaattcgtggcgaggaagtgccggaagaaattgccgaaaagctcaggacaaatcctgagtatatctcgcgtaagtttttatggggaaattgatgaaataattaataaa

SEQ ID NO: 67004 - DNA, 331 bp, Heterodera glycines
atgctccacaaaagtgtgcttctgatcactttacttcttctgatcggtgctttcatgcaaataccaaccaccgatgcatggggtaattattttcattttaaataaatttaaatcgaaaaatcacacacaaaaaattcaggtggttggggcggtggcccgggatggggcggtggacgcggctggggaggcggacgaggctggggcggtggcccgggatggggcggtggacgcggttggggtggcggccctggatggggaggcggacgcggctggggatggggcaaaaaataaaagaaaaccaaaattaattccatcaaaataacctcatata

SEQ ID NO: 67005 - DNA, 362 bp, Heterodera glycines
gtgcttttcgtgtgaatgttgattttccaactgagtcccctttgaaaccgccatccgtgacattcgcaaccaaaatttactcatcctaacatcgacgataagggccaagtctgtctcggcatcattctcgcggagaattggaagccggcaacgcgtgcagagcaagtgatgaacgcgctgctgtcgctgattgccgagccggaaattgctcatccgttgcgctccgatcttgccgaggaattccaacgggacaagaagaagttcttcaaaaatgcaggtggagtgtcttgctattttaatttttcttacaattaattttagaagactacacgaaaaagtatgccgaacgtcgcgactgagtt

SEQ ID NO: 67006 - DNA, 226 bp, Heterodera glycines
aaaattccctcaaaaataaaaggtctattgcgcaccgccctccctatcatgctcgagagcatttgtatgtgtataaaatttatcaaaaaaagagatatccatttttctgggataacctctaaatataaaaatcctctgtgaaataaaatggcgattgtgcacagccctccgtctcatacgcaagcgcttttgtgaggtataaaatttctcaaaaaaagagatagcc

SEQ ID NO: 67007 - DNA, 1153 bp, Heterodera glycines
atggaaaacattgacactgttgtggtgccgatcatcgagactgaaatcagcgaattcgttctttgtgtaagccgtgccaatttcaattcaattggaaattcaaatttaattttattgttagcattatttcattgtttttttaatgttagcttaattagccgttggttaagctttttcagcctcagctgatgaaagttctgcaaaagttccccgaggcgagtggtgttcttgtccgcggccatggcttttttgcgttcggcagcaacacttggcaacgcaccaaaatgatgtgggaatgcctttttaaaattggatttttatttaaatttggaaacattggcattctgcacaggttggagtgttacgaatatttgtttgagttgggctgcgaattgattcgatatggcattccgctggtgaaggacgaggaggaggacaagaagtccatttccaaaagcaaagtcgaagcatagtgaagaaatgtggggaggacgaaacgccaaatgagagagagagagaaagagaatgagagagagagagagttacagtatgccaaacgaccatttattaccgtatacactaacgtaaagcactgagacaccgtagaatagatcagcagaaaggcagcaaacgcgttcaaataatgccctttgactttgggaatacagtcgatagtagcacaattacagtacctgcctttttttgttttatactgtttgtaattcatattttgtgaatccttttttctgttatttttttaatgtaataaattcttcacttttttatttacacttctttttgccgcaaataatttctaaacaaatagaattggtccgctaaaaaccgcctaaaactagttgcaatcaatctctaatgacctctaagcatcataataatagtccctaggcgcggaaaataaaaaacggttttttaatcggtttaaatcacgaaaaattgaaccaaaatcaaccagaaaaacattttaaataaaaattttcagcaattttggcatgattcgaaagctcttgacaagttaagtctaataattggggatgaagtcgaacctgctgcggatcacgcgcggatttcttccggagcccgtagtctcgccccacctattggccgccgtagtcgagagtgcgctggtttttag

SEQ ID NO: 67008 - DNA, 251 bp, Heterodera glycines
atgtgcaaaaagaaagtgacgaggagcaacactgaaaagaaaagaaagaaaactatgaaaggggaaaatgaaatgagaaaattcactgaaaaaattttaatttttatttattttagagtgccacgggaccgggaccgggccgggaattcccggtcatccgaggtcccggttcccggtcccggattttgaaacgctcaggtcccggtcccggtcccggtagggcaaccgggaaccgggaaaaacaatcactg

SEQ ID NO: 67009 - DNA, 4419 bp, Heterodera glycines
atggaaaattataaattgatggattaccaatcgacaacttgcgaaaaatttggatttacgaaaaatattacggaatttcgtgtcaacccggatgtggagcgccccgatgaagcgatgaaggatgcgatcgacaacatgataaaggtggctttaaagactacggaagaaaaaatgaagcgaaaagtgcggatgtttggagttgcaattacgggtgccgggcttgctttcccggtgtgggtgccgtatcgggcgtacccccagaataatgcggatgttatcatggaggagattaataagctggagcagagcggggacggggatgaaaataagaaaatgcttttattatctgaaccgattactatgaaaattacatgcgttacaatgcccagtggagaggggccgaggaatgtccacaaatttgactttggattcaaggaacaccagcggatagggtaagtgttttaataaaataaaattaaaatagaaaaaaatcaataaataaatttaaaataattatttctaaaaaatttaatgaagcaaaaaaaaaaaattttttttaaagaaaaaaaaaatgaaaaaataataatttaatgaaacaaaaaaaaacagaataaaattaaaaataaagaaagtaaaaaataaatttaaaataattattttaaaaaattttaatgaaacaaaaaaaaaaaaaaacttaaaatatttattttaaataatttaattaggcaaaaaaaaaaaaaaaaaaaagtaaattttaggattgtgaatactgataaattttgccttttttacgcactggcgtcgtcgatgaattatttaattatggataaatattcgtttattcgttttatgaagaacttagcaagacaaaaggaagcggctgttgaacttttacggaattgtggaattgatggaaacgaaattagttatggtgtggagcaattgccgaatgttcagaaatattgggtgggttaaatgaaaaaatgcaaaattaataaatttttcaggatgagatttaccccggaaagtaccgggttgttgcgtttgagaagtctgcagatccgcggaaatcgatctgtgttttgtggaaggcccctatgggacgagagaaggtcgtaccgatatttttggagaatggtcactgggatggtctgaagaattacgtctgtttttttaatcgtgggagaaaattttgtattgattgtgagtgcttttttgacaaggatgtcaaacatactttcgagtgccgggcaaggtgttattattgcaatagagtggggggaatgccatgtgaaaaggagagtggagtgaagattgaatgcccaaagtgtcaccgttacttttacaattgggagtgttataattatcatcagggacatcagacttgcaaattatggaggcgttgcgtgatctgtgacaagacatatttatttaacccgaagaaggaacatgaatgtggtgagacttattgccagctttgtagtgtgagccatgaccccaagcgggggtgttatattatgccgatcgaggagaaggaggaaaaagatgtctacagaattgtagtttgggtaagttctacaaataaaatcaacaaaaataagtctttaactccaggattcggagacttcgcaggattctatttacaagggggaccagaaggagcatgttattaattatatttcggtgagagttacgtgtacggaatgctgtgatgacaaaaacaggacgaattgcaaaatttgtggggaggagaggatcaaggattggagcgaggcggagggacatgagccgaccaaggattttgtggagtggattttaactgcttttacgaattatgatatgtacatatttgcacataacgccggacgttttgacggtaatttcaaaatttaatttttaaatcctaaatttttaggtcattttgtttttaattacctctgccgtaccgggaagaacccgctaccgctcatcaatggattgaaaatttatgaatttaaagtgcaaaactcgaagaaacattcaaagctgatttggagagactcatgtttattgatgccggtgaagcttgagtcgctgaaagcgacatttaatttggactctgaggacaagccctttttcccctattattacaacaagaaagaaaattatggaatacgattggaacatctgccaccgatggaggactattcgccgggatctatgaacaaggataaatttataaaattcgaaaaatggtaagaaaagaaggacaaaattaacaataaataatttttcaggtacaacgaaaacaaggagacacctttttatttggatgatgaattgaaaaattattgccgaaacgacacggagattttattgctgtcaattattgagtttcgaaggatattgattaacgacattactaagggatttgacccactaccgaggagttgtacgaatgcgggggttgcgatgaatatttttaagggaatgtttttgttgacggagcagttatcgattgtgccggagaagggaaatgagcggtgtgatcgcgccagtgtgatggcaataaagtatttggagtggcggagccagcgggatggaattgagatacggcacgcggggaacggacgagaggtcaaagttggaaaatataaattggatggatttattgcgaataacggagctagggacaaatgcatcgaggttatgggatgttacatacatggatgtttgaattgttatgacccggcggcggaactgattggaggaaggacggcccaggaattgaacgatgagactcaggagagattagtggagctacggaagactttggatgtcgaagaagtttgggtatgtttatttgacatttgaatttataaattctactttttaggggtgtcaaattgagaaggaattgaaaaaggatgaggaaatgaggggcttcttcgacgacagaggaaatgagaaggggccgattgatccgaggatggcatatgcgggagggaggaccggaccgatgaaattgtttgcgaaatcggatgagaagaaaaagattagtgtttatgatattgtgagtctgtacccgtcagtgaattacggtacagcttacccgattggtttgcctgagattattataccgaagactgatgaaattaatgttaattggatgagaccggaggatttgaagtataagggattgtataaagtgagggtcaacccgccgaaggggttgcggattccggttcttcagttgaagtgcgatgagagattattgtttccgctatgttggagatgtgcgtcaaaatttaagaaggagactacgagatgtaactacaagtgcccacatgatgcggcacagcggcgatacgtggcaacatacaccagcgtcgaattggtaagaatttccaagaaaaaattttaaagaaaattttgacatttttcaggcaaaggcgttggaatgcggttatactgtggacagattttatagagcgtggcattacgaagaggaggtggacgatttattcaagggatatgtgagattatttttgaaactgaaggaggaggcgagcggttttccgaagggagttgagacggatgagcagaagaatatttggagagaagaatataaggaaaaatatggaatcgaaattgagttgactaaagtgaagaagaatccaggattgcggtacatcagcaaattgatgcttaatagtttatgggtaagaaaattaaaaaataaatatatggtcattaattttaacttttagggtaagttttcgatgagaaattgtttgaacaagaatgcggtaatagatagggcgtcggagtattataaaatggcgtgtgatcataaaattgagatgtgtgatattgttgaatattcggaggaagcgattagagtgatctacagggacaaggatgagtttgtgatggaacacaagtcaagtaacataatcatcagtttatggtgagttaaaacttataaatttgtatataaaccaattttaggacgacgagtatggcgaggttaaaattattggaattcatgagagaagcggagggaaacggaggagaaattttgtacacagacacggatagtatttttgttttgcactatagggacgtggagccgatcacgacgggtaaatatcttggagagatgaccgaggaatatggcggctatgagattgaggaatattgttgcggaggagcgaagcactacgcattgaagatgaaaaataagcagacgggggagactgaatacgttatgaagataagggggattacattcgacgtggacaataggaaaacattacattacgacacattcaggcagatggtactgaattatggaaaaggcgaggtggacccggcattcttcgtctataagaatgattttggatgagttttttaaacattatttgcttcattaataaa

SEQ ID NO: 67010 - DNA, 1056 bp, Heterodera glycines
atgagcgtttgttggggaaaatttcgctcaaaccaaaatttatcgatgaaaaaagtggtaaagagttaacaattgtggaagcgatgcgacaaattgtgacggcacataaaataattttcggtggcaaaaccaaaaaaattattataaaatgcatcgaatattgtaacatcaaaaagcaattgccacaaatgcgctttgagaacaaagtgaattgttttgaggttggtaacgactatttatttgcaaaaaataagtaaaattactgtaaaaaccaatcgaaattgtttaggtgatcggttgggcatttgttctcgagaccactaatgagtgtcaaatgaaagaaagtgcattaatcgaattgaaatcggttaagcaatatttgttgttactctccgatggcaaatatccacagttacaaattacaaagccaccaaaaaagccaatgcgaaaaggaaatggtaaaagaagcgctagtcacagatactaatggacgggggaagtagtatatagcgtcaaaaggttgcgggttggttgcgggtgtttcccgcacgagcccgtgcctatgggaggggtgcagccctttgaagttgccgccccatcaaaaaatccacgatggggggtgtttcaaaaccaaaacctattggaccactttgaagttgccgcctgaccaaatccgatttcccaaattgttgcgggtgtttttttcccgcgccgcgcagcgccgcgggaaggtcatcaatcatccacctgtcaccaaagtgacaggtggaggaaattcaatttaacttttgcaaattttaatcttttgtttcaaaccttttagcgttttattttctcaatcctgaaatttttttatgatgattttttgatcctgaaattaaaaattctttttgaaaattagccaaaatcgtgaggttttttcatttccactcactccctgccgatgcgccgcgatgccgagtcgcgcaaaaaaaaaaatcgataacggaatttggaagaagtgcaaattaattgatattggcagcaaataattttgattatgaattggacaataaa

SEQ ID NO: 67011 - DNA, 441 bp, Heterodera glycines
atggaaacgtatttaagaagttagagctaattaggtaagcaaaaatggtcattttcgaggtaggtatttttggtggctgattttgagaaaacgaagagagatacagaagctgagaaatagtgattaaatagagcaaagttagtactataagaatactaaaatataaagttttatttcataaaaattgaattattgaggggggggggccgagtctgaaagtggtttccagaaacggcatttttcaaaaccatcaaataacaaaattctttaataggggtcttggaaattccgaatttaattgaactagttaaaccgaccacgctgagttcgaacatagccttagatttgatctctgaattctcactgaacctgtacagctccaacttcatgcatggaattgaagcactacaagctcaagtagcaaagataggtcagatttaa

SEQ ID NO: 67012 - DNA, 864 bp, Heterodera glycines
atgtgttcattgatgctattcgttggaagaggaaatcaatgccaatggattggcaccgcgcgaaggcgccggagaaggcggaaaagcggtgccattgacggaggaggaggagaggagggcacaacgcacgtttggcatcaatcaggcgagaacaaagagcatgggcaggcagtgatcataaggcattcagttcaatctgatggcgagtgatcggatgtcgttgcgccgatcactgcccgacgttcggcgaaggcaatgccgccaaaagaaataccctccggcggacaaattgccgaatacaagcggtagggagggggagagggaggctgagttgggcattgggttgctgaaaatgctgatttttacttgcccagtgatcattgtcttccacaacgaagttggtctctgtttgccattttccattcaattatcatcctcccctcgaggccttttccacccttgcgcgaacaattaccaggtcagttgcaacacttgtccattaatgactaatgatgatgatcaagcactatttgctaattaccctcccttcccttcccctgaagtgtggtctcccactcgcctccttcgcttgtccatgaactgattctcgtcgacgatttctcagccagaagtttgtttcttattctcttctctctctctctccctctcgcactctctctatttctcttccttccccctctctccttctctccccctctctctcagtctatctccccttcattttccctttatcttgtctcagaatttctccgtactgaattggaacagtttctgaagcgtctttcgattcggactaaattgatcagagccaagaagcgtgttgggctgatccgtgctcgtctg

SEQ ID NO: 67013 - DNA, 462 bp, Heterodera glycines
atgtatgcggatcctgccggatcccgcacaaaaatcaaatttgcggatcctgttgcaggattggaattcaaaattttttgccggaccggatccggccggatctatcctgcaaatcctgcaatcctgcaaatcctgcattttccaaaaaatgcaggattgcggactgggatcctgcaaaatcctgcgcaggatccggtcctgctccgggctctattgtcaactgagcgactaccgccttttttggcattttcaaaaccgggatttttcgttattggttatatcgaattttattcatatttgacatgctatgaaaataatatggaaatttgagatgagaaatttttcaagtttttcattgcgaatttttgatcttgagcgcaaatcccgaatcagtaccgaattccagttcaggcttgaattatgtaatagttaaaaaatcgagctacacaccgctgatgggca

SEQ ID NO: 67014 - DNA, 4027 bp, Heterodera glycines
ttggacagcccccttttccaaacaacatcattcagtgctcaagaaacgaatactcgtgctgcatttgtggcccaaaaagccaaggaaatgtgccatgattggtaaatattggcactatttcagtttacgcgtctaatatcaatatgactatcctcagtttcttagggcataacttttttcgaacttagtcaaagcatacattcttgtgtattaatcgactgcttaaagtatcgggaatttaaaaatataaaaaaagatttttaatattactacaaagtacactgagaaaaaacaagaaattcaagttttaaaaacagttgcaatgttttttgaggagccatagcacatcaatcccgactctatatctcgttaggaaatgtttgcccgccaaatttttcagattctttctttgaagaccgagagaagcacgattgataaaataatttattcagatttagtctgggtatttaataatcatattttcacaaagattaatttttgtcatttaattttagactaaaatttaataatacaaagaatttgaggctttcgtttgataccatgaatgtaggcattgaccaagtaaaaagaagaaactaagtatggtttttgattggtcacgtaaattgtgaaaaagccaaaatacttttgcgttttcaacaaaaaataaatcatataaaattcccgccaatttttgaaggtatgatgaagatggtgctcaatggaattttattcgtgatgtggaaacaaatgcttcatgtccatgcacagaaaaacagataattatttaatcacgcataattaaatttgtcgataatatatttaaattaaaaagataacccatcaagttttaggctaaacttgacttgggccgttttatgcctcatccccgctgctcccaagaatttcggtaaatttttcccgctttcaaattcttgactttaatttggtctatcgtatttgtccggattaataattaattttattaaagggatattacatgctccgagatgatcggtgccaaaaattgttacatgagcgcccaaaatgtgtacggctcttacacgggcaaagccgattggcaatggcaggtccataatttttaaattttgcgaaaataaaatgtattaatgttaaaaattgattttccccagactttcggggatagaagatgtggaatcggggataaaaattaccgaataatttttttttgggatggcttaaaaattttgaaaaaaaactcacttagaaaatttcatttcttttatactaaatacaaccagacaatctaataaatcccaagcatttaatattattgatattaattctcctaaatttatttgataaaaaaaatcaaaaagtttgtcaaactgatcaaattcaccagcaaaaaactgatcaagacggaataataagggcaaatttatggctaaataaaatgagaaaaataatctctaaaattgacattaatattatttttatttttttatttaatattattcaaaaatgcaattaaacaaattgaggcaagcaaaacaaagcaagaaaaaagttttaatgaaatatttggccaaagatgaaacgatggaaaagaagaaaatctttgccaaattggtcaaataattcatggagaaacagttgatcagaataacgtattaggtcaaaatgaccaacaatttgatcaaattttggatgaaaatttggaagtgaaagaagaggaggaaagtgaagaaatgtcacaaattgtgaagaatcggaacaatttgcagaaaatagtggacaaatttgtgaaactttagatgataagaagaaaagagaaattattaaaaattgcataaaattaaagaaaaaattaagcaaatgggaaagaaacattcagaaaaagaacggaagaaaattgaaagaaaaatagtcaaaaaaattgggtgtcagttacgccaaaatttacaaatggaaaagagaatttggactgatcagaaatttgaattcggatcaggaaaaagataaaatattaaaacagtttgatcaaatctatggcaaaagtaaaaataaattaaaagaaaaattggaaggaaaaagcacaaaatataaaaaaataaaattattttaaagcaaaaaatgaatttataggaaatggaaaacactcagcgaaggaatggaaagaatttcaatcaaaaattatacaaaaattttgcgtgagttttttgacgattgaaagatgggccaagaaattaaaaatcaaaaaaatgtatcaaaaggtttgattcattaaaaattatctttacagagggaaaagtgttaacaaaatttgaagtgttatctgaaaaatgttatttttttcatggtactatgaccataattttgttcctgctttgttgattttttgtgttaaatatttgaatttatggcgaaatgccgaaagattaaaatacgaaaatttttttgtattgactcttaattgtgaaaataagacattttgggaaaacctaaagttcttcctcgatgctcgaggagtgaaggtcgaagatgaggaagaaatttccagtcaaatttgtccggaattctgggaaattgaaaatgttatggagtaacatacctttttaggggagaaaatttcataaaagtcttaaaaaataaaaaataaaattctgaagcaaaaaatccatagaaacgtgaatattctcagagtgcaaatgacgatttcgcaatttgccggatgtggaggaaccccctaataaaacctattaacaaatcacatgcttatctgaaccgcccgccagacccttacttttcataaaatttaaaaaagtaataaaaaaattaatcgtcaaaattttcctttcttaattttttagggcttatatctctaatatggatgacagttaaattcttaatctaaccaggatagttattatttcaaaacctaataataagtcaagttttaacattcgataatttttttgtatatttaacgattaaattttagatttttttctttaaaaacctgatcctggccagaatctatgtcaatattttgggaccttgattcaggatctcgaaaaaaaagtttaatcctgaaaccatgtcccaagcgaccggaatttctcaaaattctgggcccctattaacattttatttactgatagatgtcatcaaaataattaattacagttagctgaccttgttttcgttagaattttttttgatttgctggaaaaatttgttcaaaattttaaaattttgactctttccccatgtcgtcggcgatctccctccaccccttcaccaacctctttttacacctgtcccctaacccaatgggaatggggctccatttgggcctcttttcgggcccaaaccacataaaataaacaattcaatttaagatttaaatcaaagcttgaagattttttcagaatagaacttagaaatttcttttttgtctcataaatttcctgaatttttttacagtacaaccaaggctggggtggtgctgcatatacaactggtgctggtggtacgctgaatcgagaagggctcagagcaggggaggaaggcggacaaaagtgagaaaaatgttaaaaaacaataattttattgcaaaaaatttttaaaataaatttttataataaattaataattttatattaagaatttagtttaaaatttagtatattattatatttgtttaaataattgcagggagcttttaaaacaaatttccaatttaaaataatttgacagtttacagttaataaatatttattattttttcatttttttttactacaataaataatttcagataaaattttataaattaccaattattaaaaaaaattaattaacagccgatttgccacccattatggccaagtgtgctgctatgaccaggagggctatttgcaacagaccacctaccagccgaccctgaaagtgatcgaccaaatgttctacaatccgggatttccgctacgggcctatgagttcggctcctacccatatttgggccaattcgaagtgccgg

SEQ ID NO: 67015 - DNA, 1000 bp, Heterodera glycines
atggccgaagcagcaattcaccaactgtccgacgtgttccagcagttcttgactgctcagcaagcaaacgcggcagcaccagcacaaccgactccaatgccaaatttggcaaatttcgactgttttggtcttggtgaccatggcgaaagcgacatcgagggttggctggaacgcttcgcccttgcgcttgactgctcaacaccgaaccttcaggacgaattgaaggttaagctcttgctgacaaagctaagcgaatcggcctacagcgagtacaccaaacattgtttaccgaaaaagccaacagagtttgactttggcaaaacttccgaaatgctgaaaagcttattcgcgaagcacaaatcagtttggatcaaccgatatgagtgcttaaaggctgaaaagcaagacgaggaggaatttcgcggcttcatcaaccgccacaaaaggctgttaagcgattttgagtttaagaaactcaacgaagagcagttcaactgcttgatgctcctcgtggcgcttaaatcgccgaaggatgctgaattgcgaaagcgcatactgtcaaagttggctgccgacggtgacagagcaacatatgaaagtgttgttaacgacttacaaatgtttctgtcgaccatatcggaggcaaaagtaatggagagaccatcgaactccaatattttggctgtaaagcgcagccagcaaccgatgatgccatcatcgtcgccctgaggagtaggcagcgggggggagaagagaggaccacattaaaggcggaagaattgggcggtggtggcacagagcaaagcaaaaacaaagcggcagctataaaacaaaaagtgcgttgggatggaaaaacattgcctcaggggacactgggggatgaccaccaattgcaccacgctggctgctgaaatgggtatttgtggaaattttatagtgagcaaagtgtggtgcctggggaaatttgggcggagggacggcttttaaaaaaaaagtggca

SEQ ID NO: 67016 - DNA, 847 bp, Heterodera glycines
atggcctcattttgtacagtgttcgaatttcattggtactctcatgtccaatgcatcttcaggtaaaaataaaaatttatattattaataaatttatttttaaataaagtactacccaatggatgtgcaaacttgcctgatcgatttggcatcttatgcatacactgactcggacattggtaatctttcttaataggatctaataattcatttttatcctgtcttcattatttaattagctacatcaatcagggattcctagaaattccgatttacgatagttttggggttgaattccgattcataaattggctttggcatctctattgaaatccttccttccgtgcttttgtagacctcttattcatgagatttatccagttctcaaatgagacccgctttcgtctacttttcgtatttatacatagaagtgatccaaaaaataataaaatttaaaagtaattcggacaattttctccatattttcgaaaatcttttccggaatagaattgctgtcacaataccaaattatgctttttagaatatcgctggaagcaacaagaccccgttcagcttaaggacggacttgagtgagtttggaataaataagtgtttatttttaaatatttttttcaccaattttcaggtcatctttgccgagctttcagctgacgaacgtgtccacaacctcgtgcacttcaaagacaaatacgggcacatactcgtaaacatattaaactattatttaattaaaacccgaccatttgtgaaatgataaaattatagccgcaatacattcccccaatcccaccccacctcttgaattacttagcccagctatttgaaa

SEQ ID NO: 67017 - DNA, 70 bp, Heterodera glycines
tgtccgtttggggtactcaatcaattatggggagcaaaaatccaacgcagaattaaagtacaggctatag

SEQ ID NO: 67018 - DNA, 877 bp, Heterodera glycines
  unsure (1)..(877): unsure at all n locations
ttagagaatttgtacaatgtantacattaataaaacatatgccaccccgtattggtcncaaggaaatgccattactgaaagaacttttcgtacatatcacaacattttgtctaaatacatcaccaaggaaaacccagactttgatgaatacattgaatttgcctcattctgttataatacgtcgtgccattcatccaccaaagagaccccattctttttaatgtttggtcgggaccccattttctgtattgatcaaattttggacgttcgcgttcacaatcaagttgattttaaaactgatggcgaatttactcaaaaattagtcacaactttgagaaaagcttggaaatgtgcagcggaggcaattgaagaagcacagaaaaagatgaaaatacaatatgacaaaacaatgcgacagcccaaaatcagcgtcggcgatagggttttacttagaaactataccggaaaaattggcacttccaaaaaatttcaccttccctggaagggaatttttagggtagttgagctgaatggtgtccatgccaccataataagctgcatttcaccgaaccagccaccaaaaaaagtacatatcaaccagataaaaaagtgctttgagctaataggccccccctgcacatcgccaaaaactcctaatgatgagcaaatagtgccggaaaaattatcagttcatgctgatgtagaagcgctgagcaatgaaccatcagaagctggtaatttgaatcaagaaaacagtgaatcgaccattacaaacagacagaatgtgatcaatcaaggaattgcagacattaatggtgacagaagatattcgctgagaaatcgattagctataaccaaaccaaaacggttcactgaa

SEQ ID NO: 67019 - DNA, 603 bp, Heterodera glycines
catttcaatcactgggactcaattcatttccaatcactgggactcaacccaccagcatttcaatcactggcactcaacccaccagcatttcaatcactggcactcaacccaccagcatttcaatcactgggactcaacccaccagcatttcaatcactgggactcaattctgcatttcaatcactggcactcaacccaccagcatttcaatcactgggactcaacccaccagcatttcaatcactgggactcaacccaccagcatttcaatcactgggactcaattcatttcaatcactggcactcaacccaccagcatttcaatcactgggactcaatccaccaacatttcaatcactgggactcaacccaacagcatttcaatcactgggactcaacccaccagcatttcaatcactgggactcaatccaccaacatttcaatcactgggactcaacccaccagcattccaatcactgggactcaatccaccagcatttcaatcactgggactcaatccaccagcatttcaatcactgggactcaacccaccagcatttcaatcactgggactcaatccaccagcatatcaatcactgtga

SEQ ID NO: 67020 - DNA, 388 bp, Heterodera glycines
gcttaaaagcattgtacagcataattaaaagctaaaataattttcgtatatttttcacaatttatttcaaaagacaaaaaaaaatgattcaattttgaaacgaaatagtgcacaaaagggagggatggttagacgaaaagaggaatttttagaaaagagcgcaccccatctgatatttccatttttccgttccacaactggccaaaggcgactgtgctcattgacacgtcgttgtccaataaggtacttggactttccacagtaaaatgtggtacaaaattttggaactgtcccgcctcacggcggggcttaaaagcattgtactgcataattaaaagctaaaataattttcgtatatttttcacaatttatttcaaaaagccaaaaa

SEQ ID NO: 67021 - DNA, 1196 bp, Heterodera glycines
atggccggcgcacttcgctatactattatgcatccgggcgccggtgtgaagagtgccgaggcacggctgaagggcgtcgccacatttcgccagggcgcgatcggcatgcaactcaaaagtggtgcgtgaaatggcagagcaaactgatcggagcttagtggaagagcaaagtgatccgagctcagaacaaatgatcaaaaagagttggctgggttctatcggctcaagtcccgttttcccagattttcctgatcctgacccaatttttgggtcgatgaccccgccaagaccgggaatttacgacgaatgattagacaaggaatggatttacagttccagttacaaaataagcaaatttcttggggatttgaatgcattttcaaatagtagctttcaaagaaaacaaagattttggaaaagaattcaaaaaataattcaaaaattttatccaacgaatgtttagacagggaatggatttacagttccagttacaaactaaacaaatctttgggcgatttgaatgcattttttcgaatagtaaaatctctgtgcaacagttggctaaccctcaaaataattttcggtgaaaaatcattaaactttgattttaggcgacaaatcggacacaattccattggccaacaaaccctttttggcggagcaacagggcgatcgcatttggggcctaaatcgggagccaattgcggaaaaattgcgggtggaaaatgtgggcgaagctgacaaaacaacgttggtgatcttcttcaatgacaaaactgagaatgagcagttggaccacgatcttgacgacgcacaagtatgagagcaatcaataattagttgaaacagtatttcatgccctcaataccgtatctggggacaaaagggggtgactaattaacacaaatatcagggattaagcctatcctaaatttaaaaaaataacattttaacctcagcagccgaaaatttatgtggatttgtgaaccacgaagcgaaaaaaatcctatccgttaaatattttctcataaattttagattatttaaaatcataattagttagctgattatttttaaaaaatttttcaatatttttcacaggtatttcgtacaccgttggataagcctgaccccgaaagtctcgtcatccacattgaattcgttgtaaaaaaaataatttttaaattaaaaaaaaa

SEQ ID NO: 67022 - DNA, 558 bp, Heterodera glycines
atgtccaaatcagggctgggcgaagctcggtttggcactcgaagccgaagttcgaaacgaagcccaaaaattttccggggatcacaaaacagaaaagaaccttccttattcactacggcagatcaatcaatcacatgccaattgacaccaatttatgttgctgggaatattcataaatataaaattctagaaaaatgcatattaacaatgttgtatcgttatataatgcatgtgtctattggagattgattacaaattttatttcttaaaaatgtcggaatatggaaatatattcgaaattatttttgcgaaaatacaaaaaattgtcaatttttggcacttaattcatccgcctctgagcacttaggctgtcaaaaatatgttcaaaaattgatcaaaattttgagatgtaatttggtttgcagttgtgaagctcgaatttgatataatttggaattttaaaattttaaatccatttttagcagttttagtgtcttttttaagtctgtttaagcaaatattgaatattaacacactttttaaccaatttactaaaaa

SEQ ID NO: 67023 - DNA, 319 bp, Heterodera glycines
atgaaagtcgctttctttctgaacggaacacccgtccaatcgagtgggtgtcgactgatcagtgatttagcacagatcaaccaagaaagatctttttcaggtgaccgtgtgcaagtcttataccaaaacggatttgcattgctttcaatcgccgaagtcactgaacaggatgccggctactacgtttgtcaagccgaaaacgaaattggcagtgccgaaacatccgccactgtggtggtcgtgccacggaagggcgacggcaagtttttggccgaaagcgaaggtacgtgggaacgtggaagacatgcgcgagttgcag

SEQ ID NO: 67024 - DNA, 521 bp, Heterodera glycines
atgggagaaaattttattttcataaaagatttctgtagatattgcaaagaaaacgcaaaaattatgctggtaatttgcataaaagaaaaaataaataaatttatttatttacatattcggaaataactaaatattaatattaattaaataaaatatcaataaaaaatattttattgttttattccacccatttgatttttctttttttatcgttaattttatttattttatgtctttttaatataataaataattcattatttttctcagctaacaaataagttgcatattagaaggaaatcgttcccttttctgctttcttcgtccactttaaccataaaatccagtttttctttagaggagctttttaaagaaagaaggaggaaaatgagaatctccaattcaacggagtcgtagctcagtggcagagcaattgactgcagatcaataggtcaccggttcaactccggtcggctcctatccttttttcctaattttctattcacagtaaagccattaaa

SEQ ID NO: 67025 - DNA, 54 bp, Heterodera glycines; identical to SEQ ID NO: 55479

SEQ ID NO: 67026 - DNA, 638 bp, Heterodera glycines
atgtatgatattatttcagtgttcaacaatgaaagtcggctttattcactttaccttgagtttttgaccatcgccgactcaatgaattggctgaatgtaaaactaaaggtattaaatgcaattttaaaattaaaaattggctactttttaagttggatttgttcatttttgtccaatggaccgatgccaaaattgccaattccgccgcgtccatcgcccggcaaaagtgtgccaatgtttggaatcggcacaaatttttgttttacaaactgtacgaccgttggcatgacgaaccgctggacgaaatgccaaactttcaaatttatcaatcgatttttttgaatgaaatgaatttactttttgaaaaatttttgatgaaaagtgaaaaagcaatggacgaggaaattcggaaaataattgaaaaagcacagaaaaaatacgacgaaaaaaaagggacgagaaaagtgaaaggaaaagcgaaagaaagtgacaaaaacggggaaaattatgcgaaatttgaagtcaaattgggcgaaaagaatgttgaaacactgagcaaattggtggaggaaaacgccattttcaaaaaaatattaaaaaacagtaagaaaaagaaaagtggcaagagattactgtag

SEQ ID NO: 67027 - DNA, 485 bp, Heterodera glycines
  unsure (1)..(485): unsure at all n locations
atgatgatgtacaacgacaacaacagccaagcaccaccgcaacaggtgccatttgaatgatcagcataatcagcgaattccgtttgtttttagccgccccttccgtacgcgacgaatgaccaccaaaggcaacaccaccacttccaacaaccagcacagcagcaggacccgcgcatttacccacagcaaatgttttacaatccgccgcagcctatgccggnntcggttgggcagtcgccccctcccctccccgtgccaacaattcgaattgtgtgcgaattccctcccattttttcagcatcaataccaccaccaaactctgctgaaccgtctgcccaatgttccgcagccgtccgttgccgatgcgcaagtgatggtgccaccgccagcgatgaccgatattgcgcttgccggtgccgaacaggccattcagatgttctacaacaatgccgggattcacaatcaacagacgcaccagcagaatg

SEQ ID NO: 67028 - DNA, 1468 bp, Heterodera glycines
  unsure (1)..(1468): unsure at all n locations
atggaattggaggacgtggacatggatgaggacgaaatcgtcaaaacattggtgggccaccggggggggggggggggggaatgagggggtcatacctctcncgttgagttttgtttaattttttttaaatttcgaatgctatttgtatacctatgacatttttcgatgctccgtcccttaaattcaaacaattcgtttgtcagaatatggtgttcaccaacctcgacctctcccaattgcccgctttgtctcccggcgccggactttatgcaatggccaattatgcaattgaagagaaatccatcccgaaaagaaaggcggcggaggttccctcccccttctcatctcaaaagtattttaatgagtttagaagaaggttcccgaggatgtgttggagcccactttcctctccctggagcaagccatgcaaaggcatcgaattgcttttcgtccaatttcatttggtttttagagatcagaatttcaaggggaagctgttggacgcgttcttggaggactttcgggagcattttcagacgtatttctcccgtccgaattcgcaaacatttgacaaggatttgtgtgtccgtttccttcttcaacacttccctttcgtacgtttttccttttcctcaattttgcttctgtttgtcccttttccttcagtgccgtgttccgctcattgaacgactcgccgacgaattcgccggtcgttacgccgtcgccgcgtgggtttgcttttttgtggagagtcgtttcggcgttctcatgcgtcgatgtaagtgctgacaatggcacattttcacttggtaataaatatattttttagattttttgcacattgaacactccgaatgggtcattttgtccattccgaacgaaaacgcgcgaagacgccgcgccaattggctgcccgacccgtcggaagaggacgacacaacgctggccaattcaattcgcgagttccgcgctcgtctcgcccgtttccgtgccgattatccgcaactgttcctacccgactccaacaaactgagtcccgtccgtattttatgccattgatttaatttaaattattgttttccttttcagaatgccgaggaagtggcggtgtacaccgaaatgccgggtcttccgctgatcgaatgcatcgtttgcaccggtcaattccccgtcgcacgcactgtgtgttgccaaaacattgtcaattggaccattaccattgacccgactttgccttgttcgcctcccccccccctttccattttattttttaccattttccctccttttcagccggcctctcttcccaccgtttctgtgtcgagtgtttgattggccactctcgcgccgccacccaagaaatgccattggcggacggcggcatcggattgcgatgtatggccagcgactgcccaaatgcgatacttttttgtgagttcattccaacggaatattggagccaaacaaa

SEQ ID NO: 67029 - DNA, 208 bp, Heterodera glycines
ttggaggagagtttgggcgaagcgaagttggaccaattggaaaggtgggcaaatggaggggacgggaggggaaggaaggacaaaaatggggcggggacgtttaaatggcgtccgaaaagacaccccttggataataatgaagaaattggccgattcttttcattttttatttagatgcaaatcgtgcaactttgccatcattatcgag

SEQ ID NO: 67030 - DNA, 1520 bp, Heterodera glycines
ctgttacaaattgtcttaaataagtactatcggcgctagggatggcattgcgagacgcctatcattttcgaaattcggaattccgagacccaaaaatgacagaatcgaaatttcatgctcatcccagatcgtctccacttttcgaataatttggcaaattcgtttcacttaagtatttgtggataagttaaggcggtcgtcgctcggcgcgtcaaatgataagacaaagtcagtgaatgataaggcaaaggcattgatggcacccccccccccccatggaattcccccattcccttttcattgagtcactctttccctctcctttaaatttttcaaatttaattttgcttttattttcccaaatgcttttctccccgtccactgttctgctattgcttctgatcgtcctccctttctctctttctttcattttaatccctcaaaatgtccgccaaatttcccccgccctttcgtcgcgtcccttccgccgatttggccatttttctgtcattgccaaacgaaacccaattgttctcagtgagttcgcgttgtctgtgtgtcgcccatttgtccaattggccattcattttgtctaattttagtccccggcgacgggggaagtcggctaaaggcgaatttgacgggtgagagaagagaggggctgaagggggtaaggccaagggcactttaggcaaaccgtcggtggtccattacttttgccagcgacagaccaacgatttcttcgcgctttggctcgatttgcaagtgatctcttccgttcgcttcttttaattccctaattgcccagcaatttggcccttttgtcatcgattgttgggccgacaatatgcgcctcaacttcaacagaacgagcggaagggcgcaggatttggagggagtgaaagtgcgagtgcccggctttggacacacgcgaaccgtggaatggtcagaggggggggggggggaatggagcagcaaaacgcatccatttgaagaaaaacgcaaagggacggaaagacggaaagggttgggatgagaggggagggacactttcttcttaaatgggcagccaattcacaattattaaaaagaggtggaatttctgttgattttatgattgactcctccaaacggtcgccgagccgttacttcgcgcccatcgtcgcctccctcgccaaattgggctaccaacgcggcatcgatgtcatcggtgcaccgtacgactggcgaagagcgcccggtgggaagggacgaggaattattgggcacaaaaaattagaaattgccaaaatgagtttgataagtctgaaaatagatcgaaaaaccttttactgttcaaaaacaaggttttcatttggtccactcattttttatttattttttgctttaattttcatttgatagaataattttaatggtctactaacatgtcccaggtagtatagtggttagtatccgcgcctgtcacgtgcgagacccgggttcgattcccggcctgggagttcaattttttttgtttt

SEQ ID NO: 67031 - DNA, 1503 bp, Heterodera glycines
  unsure (1)..(1503): unsure at all n locations
cgtaatgtgccgaaacattcagcggataattggctaattatcttntcattttccctctaattaaaggtcttttgggagcctccggccgttttcaaatcgttgtgccaaatcgacgtccaatggtttccgttcgatgagcagctttgccaattgaaggtggtggaggaatccccgccaaaatttggcatctctttgctgtttacagttcggttcgtggagttatcccgcggatttgcttcgtctcacattttgggaggacgccaatggcacggaaacggaaagggaggacggaattggcaagcactttgtccattcattcgttgctttttgctaataagctcctcattttctcttaattacgctttttcgctttcattatcccccccctctctcttctcatcagatttgtccgattattacccttccgtcgaatgggacattatgtccgttaaggcagtgcgccattcccacttttattcggcccgttcctccgccggtgggccccccgccaaatgtgcggcagaaggactttgatgacattgtggtgaagcattgccattacagtgccattctctctctctctcctttcagtacaatttggcgttgcgccgtaagccgctcttttacaccatcaatttggtgagttttccaaagcaatgggcgatgtgatgattgaatgggactgaggatcactactgatcaatcagattagttgcttgagtcgtctccactcaaatgtcttttccttccccttttgtcttcccaaatgcttctctctctctctctccctctctctctccctctctctctctctcgccctccctctctctctctctccctctctctctcctctctctctctctctctcgccctccctctctctctctctctccctctctctctcctctctctctctctctctctctctttctctttctttctctggcccaatttgcttttctttccccctttttctgctttaggtttttccatgcgttggcatctctttcttgaccattctcgtcttttatttgccgtccgattctggcgaaaaggtccgtccgttggctcctcttttccccaaatttgatcattttccccatttccccccccccccacagattgccctttgcatttccattttggtcgctttaactgtcttttttctgcttttggtaattttcttccgtcgtcgttttttttcttttctcatttcccattttccaattctccaaagactgaaattattcctgccactggcactgtcatccctttgatcgaattgtcctttgtcaatatctttttcttttctattttccttaattcaagcagatatttgctgttcacaatgtgaatggtcactctttctgtgatgggcactgtttatggtcctttgatttgtcttcactttatatttgcttcctaattacccctaattacacattacattcatcacttaatttccatttccataagccaaccactcactctttttccccatgg

SEQ ID NO: 67032 - DNA, 4214 bp, Heterodera glycines
atgttcggatatcagcagactcaattcaattacggcgcttacgcttcagcaaacggtcagcagcaaagtttcatcaattatgctcagcaacaaaacaattcggcgactgctccggtggcgggaaatgccacaacaaatgcatatgcgtaaggctccttaagaatttcgtgttttgtcgacgcaaaatttggtttttttagtgcctcccaatattcgttggctgcttcggcttacgcacaatacagccaagccgcaacacaacagcagtccgttgctgcaacttacggagttcagcctccgccaccacctcctgactattcaggtttggaatccttaggaattcggtaatggaatgtttaacggcacttggaacaaatgttgacttagaaaatgatttctttgtagagccaaatagtcattggtttgtctcacaatcagcttcgtcgaccaccggcgcttacggcgtaattggcggtggcaaggcgaccggggccaacgctacttccgcggccaccggcgcaaatgcttcccattacaccggttacgaagcggctgtttatgcggctgcctcctcttaccttcagtccaaaaaccatgctccacaaccgcaaggaaattgggtcaacaaatcgtcgggtgggaacttcaacaaaggtttttatttttcttcgtttttaacgttctagaaatttttaagaatttcgcaagaagcgttacggattgggtcatcaaaatcgagatgtgcaacagcatttttgtgaagtgtgcaaaataagctgtgctggacaagctgcttataaagaccacttggagggaaaaccacacaaaaagaaggagatggcggccaagaacaagagtacggtgcccacttacaagggcgttgggttccgttgtgaagtttgcgagctgacttgttcaaggtaagaagcactgtgaactttgttttcaatgaattctattcagcaaggacacttacgatgcgcacataaaaggacagaagcaccaacgtaccgttgcacttctgagacggatgggcaagccggtccccgagcaattggacgtgtccccggctgttctcacttcggcaaatgcccaagcgcttggcaaaccaattccgaccgttggtggcaacgtgccgttgaaaaaagtcgttggtgtgactggcaccaaatttgttggtggcacgaccctcacaaccacaggcgaggagttgaaaacaggcggcaatcctgcgaatgttgttaccggagcgatgaaaccacaggatttggaggctaatatatctattctcctttttatatttttaatgctctgtgatttatagaaggctctgttggcggacgttgacataaaaccgattgggcaagaatatattgaggaggagacggacactaatggaaaattcatcaactacaattgcaaattgtgtgattgcaaatttagcgacaaaaatgcgaaagacattcatctcaagggacgtcgtcatcgacttcagtacaaagtcagtagttttttattgcaaatgaatgaataattgcattgtaattcagcaaaaagtcgacccgagcttgaaggttgaaatgaaacagtggggcgggaagaagcagcaacaaaagcacaaattcggagggccaggggcttatgctatgtcgtatgtgatttgcttcagtaccccctaaacagttgattatgttaattaggtatcacccgccaccacagcagccgcgtccgtttgttccaatgcaacgtggccatgagataatggatgaccaacacgtggtgcacaaacttcagcagatccaattgtccatggatgaaatgaattcagttgaaagtttagccgttttatccgaagtgagactttataaaccaatttttagatcactcatcttcaatttgtatactttttagaaaactctgaaggctgtttcggattcaatgctttccgaggctgattgtcccccggaaacgcaagaagaacatcgagttctcaagggagtgatgagagttgggctgttggccaagcacctgatgctcaagacggacacgcaggtgccttactaaacacttaggattttatattcttcgagtactttaaacatatttattaagtttgatttggtcgttttgtgttcaaaaattcctacggtcactttgctttaccaagtggtcgaatacttcaaaaaacatgccgaggttttttttattttaaaaccttaacttccaatgtaattaggtttctcccgacgacaaattgagtgtatccgaattggtcgaagagtccgctttttctgtctcgctgaattctctctctttcacctgccgtgtcacgctcacttgcgttcttcttcgtgagcctcagcaaaagcctaccgaaggttcacttggaaaaccttttttcttgtaaaatccaattccgccaactgaaacgcattgtctgagacttataggggtgcaaaattcgttgtttatgttgagatgcggctgggacggtttttaaaaataagaagctttccattgagtcgtccatttgcgtttggccccatctgcacagtagcaaaacacacggacccgatcagtcaccgttgatcgatatttattgaaaactctaataacataattagcaagtcattagtgaatttatgagttgatgaatggaatgtccgttgattgattgcgtgtgtttttctatgtaagacgggacatcagccgtttctcaagtggaggagaagccacccactgatccgttgccaaaggaaccttgcttgaaagcgttggcggagttgcgtcatgctaaatttttccaggtgagttttattagacagtttctatgcattaaaaatgagaattttaaaccatttaatcatgttaattagaagctgtcttacatttcacccataaaaatgtctgttctttctcggatttctttttctcatgcttgtcatgtaatttgtctgttctgacttttacggttatctcatcttcattcataatttagttattttcaggcgaagtgtgtgccgttgcattcggtcaattcgactgtgaaaattgtacgggacattggaaatcgtgtccaaacttggtccgcattgaattgttgggtaattttccatttccaaaatttctctgatccacgagccttacttcaggctattgaattacttgttgagaagacgctcgcttccatttcgatgccattaagtccgggtgacgcggtgcgtcggctgttcgaagttatttccagcggacaattcttgagcagtgagttacacatcgtcttgcctaatggcatttctgatttactgcaattctctgtgcttttgtttctctttgtttattctgctttttctcagaacgttccaaactgaccgatccgtgcgaaaaggatcaggtggacattttggctcatatcacggatcaggaacgtgaggacatcacttcgtcggcccagcacgcgattcgtctgatcgcctataatcagctctacaagattctcggcattgagcgcttgcccgatttgcgccccgctcctgcgcctcccgtgggaaatggaggtgcagcatcattgaaaaggccgttgagtcgcgatgagtcttctgctaacggcggtggtggccctgcaggcgccgcctccgctgcagcagactcatcgtcggaagggaatattgctggtgagtcatcgaccagtccaagtgatgggcgatcagtagacaaacgcgcctattagcttttaaaattatgggcctgttcgaccttgtagcctattaagtccctaatgatgatgactcacgagagcaaaaagttgcgtcctctttagtgcttggctttcatagctttgcatttctaaatactcttaaatgtcaaggattttttgcatgttttttcatgttaatcttttttcagagaagaagatgcggatggatgacacaaaggaagaaacggaagactaagtttgatgggagatttgtctgttttacatttcgtcagaattcaagtaaattgatcaatgaatttggagacgcttggtattttaaattgactgttttaaaaccctgcattcgtctggtatcacttctcttgtcgttttgttttgctttcaaacttctattgccggacattgccattgcaaatccctctccccgttctatgctagcggctgtcatggtcccctccccttcggccaattccttttgcccgtggtgaagaataaa

SEQ ID NO: 67033 - DNA, 339 bp, Heterodera glycines
gacagtgccgtcaatgtcttctggcacagtgtctccccttcgtgacgttcctctgcgtctctctgataagccctcccttccctttccctcccctcgccgtttgaccaatgactgtccttcttccccttctcccgctccgatcactttgtatctccgattggtcagttgggtctgctcaatgagtggccttctgttcggctacgcttcttcctccattaatgatttggtaggccttttccgtccccatcccctcattgtccccccccccctttttcgctccctttcatcgtccgtgagatgcgtctttggcctgctgaggttggcgtggtcatctcctgc

SEQ ID NO: 67034 - DNA, 786 bp, Heterodera glycines
ccacgaccacgaccctccgaatgaaaaaaagtgatcagaaaatagtttaaaggccgagttaatgggaaagttagctaatcagaagatgactaaatggaggaaaagatgggtcaaacaaattaagtgatctgatcagagtgatcaatcaaatgcgacgctttcccttcccttccaaaggttgtctctttcttcgcctcatgggccggactttttctcgtttctcggtttggcagacgaccgctgctgatgacgggacaaattggagtcattggaatgaacattctgatggcaatttgcttcggctttttccccttcggaccaattcggggatggctcacattggcacttttgctcgttttcctcacatttggccaaggatttatttctacggtcacatggtctgtgaaatgattctgtccactgattattgtatcaaaggcttctgacggctgaaatctttccgctgcatttgagggggatttgctcagggattggaatgtccgtcgcgtggggaactgcgttcgccgtcactatgcttatccccgtaagaaatggaacgaattccccgctttttatattaaaaaaccatcctgacagatcggaattcattccatcggcatggccgccaacttcgcatgccttgcccttcttggcctcatctctctattgtttgtgtggaattttcttccagaaacgcgcaacaaaacattggaagaattggaaaaacaattccaaaagagggattggacggcattgaaaagagaagggcaaaatgagagggacaga

SEQ ID NO: 67035 - DNA, 1290 bp, Heterodera glycines
atgagtcgcttctacaaaacatctctgtgcactttttaccagcagcgcggcttctgtaacaacggcgaccaatgtcggtgggcccatggcgaagccgaacttcgcaagggggcagtaagtgagaagaaaagagtaccccgtgttagacatttgtactaaacaaacatatacttaaggacggttcttctaatggactggcgaattattacgctgcgacaatgcaagcgatggccaccggtcagcagaacgccaacggctcgtcagccgaagcggcggcggctgccgctgctgccggttggaattgaattgattctcgatcatttgtataactaaccgattgtcaaaaattgttaagaatgcataacatttgggcaaaaatgtatctttcaatttgagcataaatcgcattttggcgctttatatcttttggtttataaaccttttatattgcagttttaatgattctttttttctgtcattttcctttttgattaagctgctgccgctgcggtctcttcgcaacagaacaattccaccagaggggaaggccaaatgatcggccctcaattggacgcccttctcagccagcggacgacgacgggcgtcgaaacgacggccaacgaagagaccgacgcagacgaagagagagggacacgaaagagaaaccgagaggaggcgggcatttgacaagcgaaaattgacaaataagaataattacaatgtaaaggaaaaagatcggggggggggggaatgaaaaaggcagctttggtgtgttcctactttactatttctatacttaattagggtaatatatgtgggccctctttttcagaaataattctcgtttttttttgtcggagtattcatgctgacatccatttcgaacccccgaacctggactcgaacaaaagtgtagaacttacttttaacaaagtcttattcttgcaccaaaaaaagccaattcttcgatgcgattttttagcttgaaattttaaactttctacgcagccaaactaatttagtttaaaaaaggaaatgaaacttagagtgtgaagacacgtgtattttgatttttggtcaaaatgtgagttttggcaaaagagttttcgactttttgttcgagtgggttcggatttgaaatgggtcgatattagatatcgtaatcagttcttcaacaccgaaaaccctaaaataatctcaaaacaattcgaatttttttttgtttgaaaagaggtaccacattagtgcttaaggaattttggcatacgtaccaaactattaattaataaa

SEQ ID NO: 67036 - DNA, 206 bp, Heterodera glycines
atgggtagagcacgtagaaaaaaggtaaattaaatcatttgttaaaaatataatttcgtttttcccaacctaatttacaggggaaaactgccagaagagctcggcaaggattgcttggatttacacgaattgcaagagaaggaaagaagccaaaacaatttgtgagcaattttatgctggttttaattctcagaaaatgtttttag

SEQ ID NO: 67037 - DNA, 560 bp, Heterodera glycines
atggtcgccgggatttggggggggggacgggtgagtcccgctttaacgaatgcttcaacgcgcacccaataatagcaacaccctgatcatgagcatcttcatcacatcaccatcatccgtcataaccccatcatcgtcatcaatgtgtaaaatgggagagacgaatccaaatttgtcctttgccctgcccccctccggcgcacattaattaatgcatttcattaaatttcatttttttttgtgacagcagcaagcacagctggtagtaggaagacaaatgaattgatgcgcaaaacatgctcaaaactgacgctccccccacccccaagttttaagcataattcacattttgatcatgctaatgcatgcgctcgcccatctccgtgttgttgaccatcagacaggacagggcaggaactgattaatgaattacatatatcattttttagggtttgacattacgcacagtcataattttatcaaatatttcatcaaaataatttaacccccccccccctatttttttttgtttaaattagagtaatgaagcttttttttaa

SEQ ID NO: 67038 - DNA, 510 bp, Heterodera glycines
atggacgtcaaactgatagtgaatgttatggagggaatggacaggacaaaaatgttgcaaatttgctaccagtaccaacagcagaaaatgaaggaggaggtttgttcgtccgcgattgtggtggtccccccgcttggagttccacagaaatcagtttcgccccaaatatgggcacataaaccaaaatgttaaccgaagaaggaaaaacgtcacaaaaaaaaaatttaaattcatttttttaactagccaagtttttgtctttcttctttaaggaaacataatttgttttcaacacaaaaagactttactgctgaatgcatgaatgtttataaacagagttcccaagtgtgcttatttctaagatttgtgcttatttcagcattacgtgcttattttttgatttggaagtaaaaaatgcaaaatttgaatgactgttttgacttataattttttttgaagcgaatatttgaattaattcaatattgaaaattaaaagtttattttcagtga

SEQ ID NO: 67039 - DNA, 279 bp, Heterodera glycines
ttagtacttatggggccggttgcgtctcaaacattttgttcggaaaaatatttttttttgatttatccgaaggcgcaaatattaataatttttttcttaaaactcatacgtatgaaaaagttacaagcatttttctaattcggagtgaaattgtgcggggtggaaacatagtgcacccatatcagaaaattgtttttgcatttttatacatttcatttgttttaaatcttttaatatagcccgaaaatggaaaacaatcaaataataacgaaacgaaac

SEQ ID NO: 67040 - DNA, 63 bp, Heterodera glycines
gttaacttagtcctttacaatggagaaggcctgcaaaatttggagagattatatcgattttag

SEQ ID NO: 67041 - DNA, 349 bp, Heterodera glycines
ttttcgctccatattgttttatattactcgtaaaacgacaccaaaatagtaaaaatgtccggcaattttgtcggcggcacataaaaatggtgacacatcaatacacaatcaaaaggagagaaaaaatgtttggcaaaaacaaacatttgttgaagcgaagcattgctttggatggatcaatcacaatcatcacaaattctgggaaaatttggtggcaacgacggaatgaaatattgtaatctttaaatatcgaaaaaagagagtgaaatttgacggaatgagagaaaggcaaacagtcgaaatgtgtaataagtgaaatgattgacgtggaagggaaatacaatgatga

SEQ ID NO: 67042 - DNA, 395 bp, Heterodera glycines
gcctcacagttttcccctttaggcaaaaaaagtttttttttgacagctatttcgagagagattcggatgaggaggaagaggcgaggaaagtggaaaaaggggaagagagcggccgaagacacgcgaaaagcagcgacagaaacggcggcagacaaagacaggacggcaaaaagatcagaagggaggaagaaaaacaaacggcggaggaggaggaggaagaagaagaggacccgttggacgcgttcatgaacgaaatcaacgaagtggcggaccaggcgaaggaggagagtctgcgcaaagagagccacgcgctgaacacgggcgaatacgcgggcggacagatgggaagggacgacatcgaacaggaggacatgcacggtcagctgactgactga

SEQ ID NO: 67043 - DNA, 505 bp, Heterodera glycines
caaaagttttttacaaccacttattgccaatttaatttcttgcagattgaaagccatccattgcctgccggttctcggcacagcaaagcactaatagggtgtttgactcacttcaaaaaataattcattacccaaaagttttttacaaccacttattgccaatctaatttcttgcagatttaaagctatccattgcctgccggttctcggcacagcaaagcactaatacggtgtttgattcacttcaaaaaataattccttacctaaaagttttttacaaccacttattgtcaatttaatttcttgcagatttaaagccatccattgcctgccggttctcggcacagcaaagcactaatacggtgtttgactaacttcaaaaaataattcattacccaaaagttttttacaaccacttattgccaatataatttcttgcagatttaaagctatccattgcctgccggttctcggcacagcaaagcactaatagggtgtttgactc

SEQ ID NO: 67044 - DNA, 56 bp, Heterodera glycines; identical to SEQ ID NO: 52733

SEQ ID NO: 67045 - DNA, 151 bp, Heterodera glycines
atgacttctcactttctcgtcggcgctgcagccttcggggcgggaatggtaagtgtttttttgttgtttttcgctccaaattttacatataaaacaaattttttttcaaattttcagtgcttcacgaagacgtacatggagaaaccgaagg

SEQ ID NO: 67046 - DNA, 708 bp, Heterodera glycines
atgatttccgtccaattttcccccatcgttttgctgctgcttctgctcactttgctgcacctttcttcaccggccaatgctcgtccccaatggtattacgccgacccaatttcgatggccaacaatcgcggcactcttttcgacaatttgtggggacggaagtgatttggcactcagaaagaccaacaaaacaattgtcaatttgtgcataatattgtgtaaagttttgtttaattttgttttaataaatgccattaattcatccgtttaacttcaaaaaatgattcattctgcaaaacaatttgtgcaaaaaattgtctaatatttttcactatataagaagaatctacccctctaactcatttaaaaactaatttaacactttctagcgagtttgcggggcgcgagtggtgtctatcgacgcagtttttcaagggctattagggaaaataagcacattcctattggttaagaattgttcgaactgcgttcgaaaaacgaggcaaaaattgcactttttttgatgaccaatttttgaacgctttttgcatgtcttaaaacgggtcaattcaaaaaacaaatatgtttatgcacatctacaaactcttggctttcgaatgataccagggttgttttggtccgggtccgggaagagctctaaaaagggatttcaagcacttttggtcgggattttttccaaaaaataaa

SEQ ID NO: 67047 - DNA, 348 bp, Heterodera glycines
tgaattaatggcatttattaaaacaaaattaaacaaaactttacacaatattatgcacaaattgacaattgttttgttggtctttctgagtgccaaatcacttccgtccccacaaattgtcgaaaagagtgccgcgattgttggccatcgaaattgggtcggcgtaataccattggggacgagcattggccggtgaagaaaggtgcagcaaagtgagcagaagcagcagcaaaacgatgggggaaaattggacggaaatcattttgtagaaaataaaataattaattaattaattatttgtgggaatttaaatgaatttgttgctgtttttgttgctgatgatgattt

SEQ ID NO: 67048 - DNA, 161 bp, Heterodera glycines
atgatttccgtccaattttcccccatcgttttgctgctgcttctgctcactttgctgcacctttcttcaccggccaatgctcgtccccaatggtattacgccgacccaatttcgatggccaacaatcgtggcactcttttcgacaatttgtggggacggaa

SEQ ID NO: 67049 - DNA, 1085 bp, Heterodera glycines
atggcaccgcctgccgaaaaaaagaaaaagcattcctccgccgaccaccgcctcattatttctgcatcaattggtggaaagaagcaacagcaaacgttgggctcagttattacatcatttggaaaacgacgaagtctccgcgtggccatgaaagagaattgccgaattttgaggaaaatgtgagcgccgtttcattttcaacttctattggcaaatgaaaagctttctttttgcatttcagttgggtgtgcaacgacatttggatggacattttccctcattttgatcgtcctcaactcggcctcaaaatggctctgctttcgccacgtttcaatgcgttggtggacaaacatttcgatggcataagccaattgacaatttggaacgcaataacaattcacaggatcggaacaaaagcgaaattggttgtagaggagaacaatgccaaatttccactgcccgaccatccgctgcgcaacaaaattcgctttaattaccttcgaatcgagtaaatcaaacaaaattcaaaaaagaattattaattgataaaagcatttgctgctttcaggtacattgactattccgtcatcacatttcttcgtgccaatcagcaaatttttgacaaaggcaccgatttgaatttgtttatgccgtactacgaccatgatgacaagaatgtccagccaatttgggatgattttgcccgtgcaatttggcccatttttgcaccaaacattcgccatttgtccttttccgatgcccatgcttttggcaatttgcgtcgccacatttcgccaacaattctcactgatctcaatcagttgaattcaatcgattccgattatttgttgcccgatgtgattggtgatgatgggccaaatgcaactgctggtcaagcgctgtccaaatggttgcaaattctgggaaaagatggaaagccaaagcaattgagttgtagcaattattatcatgcagctatgcctactatcaatgaatggatcgtcaatttcaaagaggtcaaaaagggactaatcacttttaattggcctttgttttttggtttccaattaaaatatttgcattaa

SEQ ID NO: 67050 - DNA, 90 bp, Heterodera glycines
ggattatttttcaaaacacctcgtagactgggggataattggagactgcgggataatagagactggtctataattagagcatatacggta

SEQ ID NO: 67051 - DNA, 815 bp, Heterodera glycines
  unsure (1)..(815): unsure at all n locations
tgcttcaacaggcgtttctccttctaggtcgtgcanggaagaagagaagaggagggcgggccctttcgacgggcgaagccgaccgagagaagggccaacagagacaaacggggccacacgcagcgcgacgagagaggggaaaggcccggaccgaagcaagacggacgacagcgaaagcaaccggcaagaagggcaccacaaaccaagaacgaaagacagagggacgaaggcgaccagacaccgcccaagcgcagaccgcaaacgacgccaaccagcgacccgccggcggacccaggcgcccaggcggggagcaacccggaaacgaaagcccaccggcgccgggggaagcatgcacgcaaagcagaaacccaaaggaacagacggaagggcaccaccaggagaggagccggcggcacaaaccgacacaacacggggaaacccacccggcccggacaccgcaaggaaagacagaaagagagcacacgcaggacgcggcggaaggaggagcacggccgcccccagagcgcggagcgaaaagacaggcgaataccgagaacgagcgagacacgagcccaccaaaaaggcggcacaacgccccggagggcacaacaacagagagggaacaccggcgcgcagccgcacgaaaccgagcaacaacaggccagcgaagcccaaagacgaccggggctgcacgcgcgctacactggcaaaatcagcgtgcttgtccttccccgaaaggggttggtaaaccggtgaaaatttgccgtgattgggatcggacattgcaattattgtccgtgaacgaggaattcctt

SEQ ID NO: 67052 - DNA, 516 bp, Heterodera glycines
gtggcaagaaaagtggaagtgaggcgtaaacattcaaaaaattgaaaaaaaattaataattaaattttttaaattttttccagacacaattccccccggtgaaaacggtgcgcagagaatgcacaaagatcgcagcttcatgcccatgcgggtatggcagctgtgtgtttgtcaccaggaagcaaatcgttgacgtttgttgtgccggcccttacgagtttaagtgctgccacaatgtgaggaatgccaattttggcgtttttatcacatttgaaatgtgccgggtcaccccaccaagggattatgatggatagaactggattttaatttctcaaacataacccattattattcggagcaatttaaaaatcagccacccatcacatgacgggggatcagtaacgcaaatgttttcctaattacttccggcctctctctggtcccatgcaccgactcaaagtgcatacaaaaaattgtaaaaatattcgctggcatgggaaataattttatggctaa

SEQ ID NO: 67053 - DNA, 471 bp, Heterodera glycines
atgtggttattatcctttcgcctgaccgggataggatcgtcgttcaccctatttctgagaaacgtgatgactcaacttaccccactggatctggtactcgatacgctgcagcaggtcgtcgccagcccggagcaccggccgacgcagctcgccgcccgtttcagcgcagactaccgccagcaggtggatggcaaggcgctgaacttcgagcagtttgagcaacacatggcgctgctgaagcggcaaacccgccgcatgacgctgagcgtgatcgcggcggcggagcagggcgaggcggtgctgacccaccatctggtcgagctggaaaagtgcgatggttcctgcagccgcgtgcgggtgctggcgcacttcaccgtgcgtgagggccgcatttgcgcctgtgacgaactgaccgagctgttggcgggctcccccggcgatcgcgatcttggctcgcgcgtgtcggaatga

SEQ ID NO: 67054 - DNA, 1721 bp, Heterodera glycines
atgcgccttttggacctcttcgctttggccacggtattcgcgcatttcttctaccgctctgtgcaaatcgtcaatcgaagtttgtttggcttttaggattgactttttcggtttcattttcaaaaattccgccggattatgcaccgaatgcatttgctggtcactgtcagtgatgtcgtcatcatttgtgcacatcgaagaagaagcactcgtagaaaaacctttagtatccatttgaagtttcccaaataataatcctaaacgaagaaattggaaaagggaatatttagggaatatggaaaagaaagaaacaacataatcttgagttaaataaaggcaaaagtgcagttaaaagataaaacgaagagtaaagccaaaaataaaactgacgcagaaagcgcacataaaaatgaatacacagcaaaattcagcgaattccaaagcaaaagagaatcgaattaaagtcaaatgaatgagacagcggcacttggcaatgcaatgcttaacaaaagaacgaaagattcacttttgactttttgggcatcagagaaagcgacataaaaattaggaaaagagcagaagaaagtcaaggaatgcgagcgaaggcgacggctaacggacagaaagaccacaactcggtcgggaattgaaagggcaaaaaaaaaacaagcaagaatatacaaaaaaaaaaaaaatcacttacctaactaggtacctattccttttccttatttttaggaaaaaaattaattacctagttttatttttataaattttatgccaaaaaatgatttggcaaatgccaacgcaatcgccaaagttaaaaaacagccaagctaaaaaaagacgatgcttttttttgtctacgttgctttcttgtttcattttgtaaatttttatttgaagtacctatttttattgacaggttaaggcattgcattgtaaacatatatttttgatcttttgacttcacgtgccattacgtatggaatctctaataccgatcattaataaacttcaaggtgtcccaaatgatacattattaaataactcaaaattttagatgtttttgctacaactggatacaaagaatcggaagtccaattgccacagatagtcgtcgtcggttcacaggtttattgatagatttttgattaatttcattgagaattactcaaataatgaatgcgtctaaattgatacgtttgacagagtgccggcaaaagttcggttctcgaaggaattgtcggcagggatttcttgcctcgcggaattggcattgtgactcgtcgtccgcttgtgcttcatcttcacttttgtcctgtcgccgatcctttacgtgtgcaaaaaggaggtttcataaacatatttaaggttttcgtggcttattctatacaaaattaagcgcctacccacgaagactgggctttgtttggacatcagccaaacgaagtttatgctgacttccaggcactcacaatagcaacagattttgtaacaaattattcgaatttcagcaagttcgtgaggagattgagaaggagacggagcgtgtgaccgggtccaacaagggcatttctccggcacccatcacattgacaatttattcttctcgggcggtgaatttgtcgctgatcgatttgccgggcatcacaaaagtgcccgttggagaccaaccaccagacattgaagttttgaactcgctctacgatttaatctaa

SEQ ID NO: 67055 - DNA, 623 bp, Heterodera glycines
atgaatattcttgcgacgcatcatccgcccgataaggactacggacacatgaaggtgaaatgaagtttaactattttatcgaactttgtcttaaatttaagatcgatgagccaaagactcctttcaacaattacagcgacagtgagggcgaagaactcacttccggtggtggaacttctcgaccgcgaagggtgtcgctggttggtgcggtggatgcggacgaattgcgtaaaactatttcggggggcacgcggagccaaatgaaagtgttggacccgccgggttcgggcgaagacgacgaggacagcgaaagtgggatgaccgaagagcaaatcggtgagtgtaatttgagcactggacgagaaaaataaaagcagaattcagtagctatgagttaattactaaatgaattccagtaaaaaagcgtgaattcgaaaagaagcgcaagacgcactacaacgaaggcgcctttctaaagaaaatgcgggagagagcagcgaaggaagaggaggaggaagacgaacagtgatggagaggaaaggacggaagatggagaagacggattgatatacttattggagtagcccagaagagaggggacttaactcaaaccattgaagcaa

SEQ ID NO: 67056 - DNA, 828 bp, Heterodera glycines
atgcattcggccggactcagtccatttgtgaaccattggagcaaagtgaccaaatccaagcgaaagcaatcatttttataaaattataattgttttaggtgcacaatttcacccctgagactggcaaatgccatttgtccccccacggcgtcgttttccaatccgccgccattcacaatttcccattggccgaacgcctcaacgattttgtcgcccattcgccgttggtcgaccggtggaaattgtgcattggaaatgcaaataattcgccactttttgtggaggaaaaagacgaaaactgtcaaacaactgacaatgagaaggtaatggtgaaacagaaacactcaatgaaaaaaaggaatttgtctttttaggacaacaatgtcttggttctgttacaacccgtggacggcttcaaccccggcctccgtttttatgccgaatccgtacaaatggccattgatttgcgtggcctgggaagactcgtggcgatgcaggacatcgacctgagggcgggagagtgggaagtgttgttgtgccaaaacaagcagcaaaagaaaaagcacatgacaaatagtaggttttcaaaaggaatttatatggcaaaaaaatgccttaagtggaggggagtacaatttcttctcccaattttcgtaaataataaaattattttaaaatttttgatggagtttaaattaacttttgtagtttttttttattttctcaaggaaaatttttttgttttgaagaaaacttaatattaaaaattcagtgtgggaaaacgacctgctacccaggaataacaagggaaatgaaattgtaaattaa

SEQ ID NO: 67057 - DNA, 96 bp, Heterodera glycines
cggtacaatgagagggtgaaacaatgcgtgaaggagtcgaacgtggcgcttgaaagtgattaccgcgacatttcaaacgatggagaaggacgccgg

SEQ ID NO: 67058 - DNA, 868 bp, Heterodera glycines
atggtcattcgtccgtcctctgttcaaatgcatccgccgctgcacaacaatcgcttccattccaaccaattttcgtttgccgttgccgctgagcagtgccaacaaccgccgatgaacggcggcggcggcacacagccgcccccggcgggaggcgcccttttccaacagccgttccctccggcgccgccccgcgggacggaagccgcggcacagattgaacagcaccaaatgatgctcatccgacaacaccagcaacaacagcagcagcaaatgctgctccatcagctgatgctgaggggcgaagttagccttcccccgcaggggcgtccttctgcccaaccgccgcattctttcccgccaaatccccacaacaattaccaacacattgtgggaggtgaataaaaaagggcctgttggagagagtttcgccgtgcccatttttaatcgagagtaattagcgtaattagcacagactactgagagggggttacgggcaagagtatctgctgcagtattctcgctttttctttcctcttctttttgtgttgtgtctttggcttaattaccgcattgttttagaactgacgccgcccccctctcagccgtccctcggcggactttcgtccccccaggccaacggcaacacgtcgtccgcggcactgttgttgaacgggttcaacccctcgtccaccaccgcttccgtatcctccggctacaattttcattctgtcggcgatctccaccatcccaccaccactgccactactgctgtctctgcctctgaactgctccaacggcagtgccaacaaatgcttttggccagacaggcagcggctgtcctgcagcaacaacagcagcacaagtcgat

SEQ ID NO: 67059 - DNA, 564 bp, Heterodera glycines
atgcttttaagccccgccgtgaggcgggacagttccaaaattttgtactacattttactgtggaaagtccaagtaccttattggacaactacgtgtcaatgagcacagtcgcctttggcctgttgtggaacggaaaatggaaatatcagatggggtgcgctcttttctaaaaattcctcttttcgtctaaccatccctcccttttgtgcactatttcgtttcaaaattgaatcatttttttttgtcttttgaaataaattgtgaaaaatatacgaaaattattttagcttttaattatgctgtacaatgcttttaagccccgccgtgaggcgggacagttccaaaattttgtaccacattttactgtggaaagtccaagtaccttattggacaactacgtgtcaatgagcacagtcgcctttggccagttgtggaacggaaaatggaaatatcagatggggtgcgctcttttctaaaaattcctcttttcgtctaaccatccctcccttttgtgcactatttcgtttcaaaattgaatcatttttttttgtcttttgaaataaa

SEQ ID NO: 67060 - DNA, 441 bp, Heterodera glycines
caattttgaaacgaaatagtgcacaaaagggagggatggttagacgaaaagaggaatttttagaaaagagcgcaccccatctgatatttccattttccgttccacaacaggccaaaggcgactgtgctcattgacacgtagttgtccaataaggtacttggactttccacagtaaaatgtagtacaaaattttggaactgtcccgcctcacggcggggcttaaaagcattgtacagcgtaattaaaagctaaaataattttcgtatatttttcacaatttatttcaaaaagccaaaaagtccggaaccaattttaaaaactaaaatagtgcacaaaaggggagccgccgcacggcggggcttaaaagcattgtacagcataattaaaaccgaaaataattttgtatatttttcacaatttatttcaaaagacaaaaaaaaa

SEQ ID NO: 67061 - DNA, 478 bp, Heterodera glycines
atgaatgttagaagcttcaaacaaagtgtagaaccttttttaagtcagcaaaaacaaagttatttgactataattcccatccctaattggtgatattgaatctcattaaagtcccattaaattctttttcaccacaatatataagtgattgattgattgcgtaatgcttttttttaattctccatggcataaattaaaaaaggcattttcttttcaaagaaattttagctcaaattgtagtatttatgcctcagaaataatttaattttcgcactaagcgtgctgtttcttgttttttgaaaaattcacggcccaaaaacagaaaagtaaacgaattttttaattttttttatataattaaatttaattttttagcttggaatatcgcacggcatttcaaaaagaatttgcacttttgttgaaattattttgcgagagttcttcttattctgcggttgcccacaacagcagtaaagaa

SEQ ID NO: 67062 - DNA, 976 bp, Heterodera glycines
atgaaaaaaaatatttataaaagattggtaatatttacaaaatatttataatatttattgacaaaacttcaaaatattgaaaaaaaaaatatttttttcaaaaacccctattttttattgaccaatagccaactgctgctggcttttgtgaggttgtgaactgatgagactctgccgtggtataaagaggatatgaaaatattttcattcacctattttattggttagccgacatttgcggaccgacatttgcggaccgacatttgcggaccgacatttgcggaccactatttctcgatagaactgtctaaataaagaaaaaaataataagaaattttaataaattcaatattcccaaattgaaattagtgaaggtaagctgatgcaaagcgatctgtctcaattggagagaagtcttatttgacataacttttttctttcttttttatagaatttctaacttataattaaactgtgaaattggcgaaaaaattagctaaattaaatataaaagtcagttcaagaattttataccaagaaaattttttatcttgtttcacttccacgctttagttaaccgagagcttaattttttccggcatgtcaaaccaattaaattaacaaacaaaaactaaaatagtttatctttttctcaaaattgtccgtaatttgctgttattaaaactatgggtccaaaattaaaaatgagcaactacatactatatttatctatggaaactaaacttctttaaaaaatgggttctttcgatattgattgcagaaagttgatcaattactcttgaagggcgatgttcaacttggtaaaaatcacaaataaaactacttagtcactcaatttttgaaaaaattattatttttttttttttttgacagttcaacccagaaatagtggtccgcaaatgtcggtccgcaaatgtcgcactacgccaaaaagattgaaaacgcttaaaataaa

SEQ ID NO: 67063 - DNA, 1163 bp, Heterodera glycines
atgaaactctgtttattattcttttcaattgtatttttaattgctcaaattgaaattggagcggaaaagaaaaaattggaacaaaaaacatttgaagaaatatttggagaaaaatgggaagaaaaagaaaatgaacagaaaaagagagaaattgttcaaaaattcaacaaaattaaagagaaaattaagcaaaaagagagaaaatattcaacaaaagaatggcataaaattgaattgaaaatcggaaaaaaattgggcacaaatcgaaacaaaatttacaaatggatcaaagaattaggaatatacaaaggccacaacaaatcaaaaacggatgtacaaaaaattgaaattgtgcaaaaatttaatgcaatgaaaaatgagtataaacaaaatggaagaaaatattcgacaaaagaatgggacaaaaattatgcagaaatttgtaagaaaattggagttggccatgatttaattaagagatggaagaaacaatttggaatgggtgaaagaataaatgagaaagaaaaaatggagaaaatgaaaatgtattggcaaatgaaaggagaaaatccaaaaatgagtgactcaaaaatttcaaaaatattgaaaattagtcaatggaccattttcaattggaagaaacaatttgaagaagaattaaatgaggattaaaaaacattgaggagataaaatatcttttcatttattctttttttcacgataaataacatttattttctttttacatttttaggaaaaaaatttatttcgcgaatttttataatttttatttatcttaaaaattattttaaaaaatagatttctattagagcccggatagaacatgatcttgtcatgatttgcattcactcaactttttgcttcgctcctaatccaaggccttgtcttcatatttgttttttaatccctatattgtatagccttacatatttttgatttttcttaagataattaagattaaaaaaaggtaacataggccaaaagaatcattggaacttgacacgggaccgccttttgcgttgaagtacagcagacagatgcattttatgaagcaatattggaacagcctaagaacgcaaactaaatacacgcctaagaatcgatcccaacaattttcagaaaatatacccctatgaaataaa

SEQ ID NO: 67064 - DNA, 2316 bp, Heterodera glycines
atgttcatttctttaaattcttatttctttagcaatttaaaaatgtcaaacttaaatcctggtaattggtggtattattttgagcgtcaaggcaaatcaactgctaaatgtaaagccgatggatgttcctactcaaagacattaaatgcttctctcagtacaacagtgcttgcttctcatctcaaaaatcaccacccacaactttacaaacagcgtgaagattgttcaagcagagaagcaaaaaacagaaaagaagggacaaagtggaataaacccattaaaaagggcttttgcaaatgcattttatggttcaagtcaacaaattactgatgacgaagaaaaggaagcgccgatttcatcaaaatcacctattttaattgggctaaatgcaaaaagtatgatctgattttttttctatgcgttattacattttgattaaggccagtggagcacggacggagacgcaacaattggcgcaaatcgggcactaatggaaatgctggttactcaattactgccatttaatctcgttgacggtgttggatttcgacaattcgttggaaaattacagccaaaatacaaaattcctcggcgcaatcatttcgctcaatatgaattgccaaattgttttgaagcgatgaaagtaataatcaaatttgcgctttcataattctaaaatttagaaaatagtcactgatgaatttctgtcagttaacaaaatcgctttgactgctgatgggtggacttcaaaggataatcgccattctttgatttcagttactgggcattttttggaccaaaaattcaagccaaaattttttgttttgagcaccaaaccaataaaaagtttttaatatagtcagagtttgaacattttatttttcagggcgacacacagctgaatcaattgtgtcatttattagagaagcattaaatgattttcaaattcaagagcagaaaatttcggctttgacgcgcgatacagaaaatacgatgaaaaaggttggaaaggacttgggttttgtgtcagtggattgcgcagcgcatgttttgcaattggtgataaaataatttaattaaatattaaaaacaagaattttagtgcattaaagagggactgaggtcaattgaagaggaagaacgtttaaaaaatctttttgaaaatgtcaaaagatttgtaagaaaggtgcgaaaatcaagagtgttgacggaacaactcgctgaactccaacaaaaggaggaaattgaggaagtaccaccaacagttttgattaaaaatgtcgaggtgcttttcttctatatttaactattcttataaaggaaattaatttcaggtgcgctggaatagttcatacaaaatgattgaacgttttatcaatttgctgtcaattgaacattaccagcttccaaaatttaacgctgatgattggttgcttttgtcatctattaaaagcatactttcaccaatttacgaggccactgttcttttacaaaatagaaattcctcttgttcaattataattccgctttttaaagtcagtattaattttctccccaatttattttaaaattcaggcaatttcattcggtttacgtgagaacaaggacaatcgttattcaaatataaagaaaacaattgcgaatgccatcgaattgcggcttaaacaagccgaagaacaaaaaaacctagttcttgcaactattttggacccacgttttaagaccatttaccttgacagcagtcggctgaatcagtacaaagactggttgataagtgaagttgagagttaccatgcaaagactgatgtgattttattttttctatttttgtaacttaatttttttaggaaattgatttacaaattgacgtaagagactgcagtggttcaagttcggctggggatattttttctcgttttgaaaaggacgcagaatttgagcaaaaatgaatactgtaaataaactttatatacccctcataataattaatttaaggcaacatcccccagtccatctgccttggagacaagacaaaaagccgaagttgaagtaaatgaatatttgcgggatccaaaaatcaaatccagggccgatccatcattatactgggaagtcaattcacaaaaatggccaatgattggtgacgttgtacggaaatttctttctccacctgcaacaagttcagaaattgagaggcttttctcaacggccggtctaatttcagatgacttgcgaaagagtttattaccagaaaatattgcaaaacttttgtttcttcatcacaatttgcttgtaaccggtttctcaattgaatga

SEQ ID NO: 67065 - DNA, 533 bp, Heterodera glycines
ggttcgatgaaactttttaaaatataagcctaaactttttggcctgtttaaaaaggaattaaaaatttttaaaatatttattcatctcccttttgatagaaaaagcatcagagagccttatttaacttttaattaacatttggtgcgtttcagagcactttctgaaaaaatatttatgaattaattttgcaaaataataaataattaatgaaaaagtcagaatttcgaaaaattttaaaaacaacaagcgttggcattttttcaggttaagttagtcctttacaatggagaaggcctgcaaaatttggagagattatatcgattttagtgcgctaggttcgatgaaactttttaaaatataagcctaaactttttggcctgtttaaaaaggaattaaaaatttttaaaatttttattcatctcccttttgatagaaaaagcatcagagagccttatttaacttttaattaacatttggtgcgtttcagagcactttctgaaaaaatacttatgaattaattttgcaaaaaata

SEQ ID NO: 67066 - DNA, 434 bp, Heterodera glycines
atgccttcgcatgagtttcagaatattaaagttaaaaacagaccaaactttgtcgaacagttcaacaaatgcaatgtgttctgtcagcagagtgaagctgaagaaaaggcgtcgcgaccgattgagcgcgtcacggaaaatgcgttcggttggtgccgtgacattgccgttgttgttgcattgttgcaggaacagtgccgaagaggacggcgcatttagcacatcgtattgggcagagggggtacaaaggacgtcgtaatgggccgaaaaagtggaggcaattaacaaaagcaatggcaaagacacttttaggggtaaacaacaaccattggcgtggtttgttcatccgatgtgacttcgcaaatggggccaacgacctcggaacagtgcgaatgtctgttgccggcggagaggcggtcgtattggggccgtga

SEQ ID NO: 67067 - DNA, 309 bp, Heterodera glycines
ggagccaaacgcaactcgggaaaggcttggacgattcattgccaccgatgcgccaacactccgcgcaacaaacgaatggcgaaaggaaagggacgaggaaaaccgacggaatgacaagcggaggggaaagcgaagaggtaggctaatcaaaatatatcttgtaaaagccttttttcattttcagcattgcccttctccgtcttcgccgcaaaatggcgacgctttcgacccgtcccattcgcttgcgcctccgccgcttccgcctcgaacgccgaggcaaaatgcggcacaatgttcaacagaaagtga

SEQ ID NO: 67068 - DNA, 52 bp, Heterodera glycines
gctttagaggtaaaaaaggctaatttagctgatgggggacgttctaatagag

SEQ ID NO: 67069 - DNA, 1727 bp, Heterodera glycines
atgggcatttcccagttgctccttcaattgcgacaacgttgtctgccctattattcatactctaaaagtgatcaaaagaatcatcatcatcattttgcactcggtggtggcttgttgctgcttttactgcttgccatcggcacttttgaaagcccagtgccattggtggcggtgccatcggcaacgaccctaatcattggcacaatggtcaccttgtttttggcttcccaagccgatttcatctaccggtcatggctgaccttggaacgggatttgacgtatggaaaaagcatttgggctttatttaaaattcgcaaaactcatttttcgaaaatcggtaaacactgatttgaatggttgtgaccggaaatgatcagtgcaaaatgcgttagtgaatcataatttcttgaaaatgagatactgagtagtatgatgatttaaaatttaagcgtaaatcatctgggaaaaagcttaaacaataatccaactacagtatattcagtttttccggatttggctttttcaaaattttattaaaatttttggacatttgaaaaaattaaacgaagaaattcagaacaagctttttatataattttaaccttttttttactacaatagctaatgctacagaactcactgaagcattttccgggagcccaaattgaccttaaacgaaccacagaatgtgatacatgatccgatcttaattttctgaaaataataaatttaaaaaatgtttaaattattcagcggcctttttcttctgatcaaaattcgacttgacatgaggcgacggatgcgagagaacaaaggcatacaacagatctttgttgatgtggtaaatgccgttttcaactggcacattatgttttctaacaaaaaactagctatgggaatttgaaaagatattcttggcattgttgaatattttcaagggcacatccgttaatggatttttactttataataattgggactgtaaattatatattaaaaaaaaatcgcaaaaatagcatataaaaattatataacttaaaataattttttagctatttaaaattgatataccattatcaaaaaatcaatttttgggggtacatttttcaaaaaaaaaaaaattctttagaatttttaattttcagccctaataataaatcatgaattccctttaggtcaatgcaaacccgaatggaatatgtgccatcgatatggtctgagacacattaactaaattgtttatcccaaatttttaatcttcttttttaaattaagacatccaataaacagtacacattccgcgaatttaatgcacttgccaatcgttttgccaacacttttttacaaaatggttaccgcagtggcgatgttgtggcacttttcatggaaaatagtgccgaatttgtagctggtcagtctattattattgtagaattcaattaattgttggaatataattaatttagcatggattgggttggccaaaattggtgtcgtaacggcatggatcaactccaacttgcgcatggactcattagtgcagttaattattttttgcaaacaattaaataattttatttattttttaaatttatttatttctaaacgtaaaattgtttaatttttcagctgtcttcgcgtttctgaatgtaaagcagttttatgttctgacatacttaagccaagtaatcgtttataaaatagttgacataattcaaatttaaaaa

SEQ ID NO: 67070 - DNA, 953 bp, Heterodera glycines
atgctttccacaattcggccaaacaatccattgttggtgtttgacggttatttgaaccaagaggagacaagtgcgtttttgattctaatctatgtaaaggatttttattattgtaaccatttttaaatctgatcagagattctgatcagattaattcgattaattctttggtacaataattaatctataatttttttaaaaatttgttgaaaaaaatatttgttttccagaaaaaaaagttgttcaaaatgtgttccgccatggggacagtgcctttttaactggtacaaaaaataaataattatttaaaaataaatatttttttaatttgaggtgacattcttcactgggaccgtcttggttatttgtattttcgaattcgaactggtgacacgttccgattcaagggtgaaaatgttagcactgctgaggcatgttttcaaatttatttatattttaattaaataaatttatttaattacctaattggataaattcaaattttatttttaaattacactcttaaggttgaagctgtccttctcccgttgaaatgtatcatcgacgcggttgtatacggtgtacgtgtacttgagcttgatggaagcgtcggcatggcagcattggtcaaaaacgacgaggcaggaacggacgatgtaagactgagcagacctgggacattaaaaaatttttttttggaatttagggattaaatggtttagcaaaaaaaaaataatggatttagctcaattaaaaaataagtgcccaacaaattttatttttaaagaaatttcttcgagagttgagtgcccgtcttcatgccaaccttcccgcatatgccattccacgattcattcgtatttgcaatgctgttgatagaactggtcattgttttcaaatttaaaattatggaaatcgcaactagcataaattaattaatttgaaaatcttaa

SEQ ID NO: 67071 - DNA, 173 bp, Heterodera glycines
atgctcctcctcctgcgcgttctgttggctgttgtgttgcgtgtcctcctccgagtcggctgctgctgctgcggcggcgctattagaacgaatggtgtccaaccggcgaagcaatttgcccatcagcgacgtcaacagttggaagccgccctcgttgccaaactgtgccaatt

SEQ ID NO: 67072 - DNA, 90 bp, Heterodera glycines
atgtgccgcgaattgaacggcggcgtacggcacaacacgcgcgagagaagcggaattgccgcgaaaaagggctacaaatccttgttcccg

SEQ ID NO: 67073 - DNA, 348 bp, Heterodera glycines; identical to SEQ ID NO: 62244

SEQ ID NO: 67074 - DNA, 381 bp, Heterodera glycines
atgtgcccaaaagaattggtggagcagcgcaaaaaggaaattgagcgcggattcaacaaaatgatcgaatatttggagggcagcaggtgacaaaaaacagcgagcaaattggtgcaatttgtctcccgcttcgtaccccccccccccccccacttaccattcctccgaattgcaagttcaagaaaatgtagaaaatttttttgatgaaatagaaaatttaaaaaaaattgttcgaaactttttttattgtcttttgtgaaaagcagaaaataagaagaattattataaaaatttgctggatttcaaaaaaaaaaaattctatgtaaaatttttagtgaggaaacggaaactccaaaaaaatattcgaattttttaatttaa

SEQ ID NO: 67075 - DNA, 486 bp, Heterodera glycines
atgtttaacgcaatatcgattgctcaccgcagagtcaaaccgatgcttcgccattttgctgcgcagggatccatctccttgattgttttgctgtccggcagcatagacgaagatgaatgtgttgttcgtgtcgttatcgaagtagtcgcgccagactggcactttgtccaatacagcttcctgctgctcccacgccctgttttcggttgcccatccaccctactcctcttcctgcgttgccctccatcttcctccttttcctcgcggggtgtgaagctggtggggtaccgtatcggccagggtcgacagtgcctcaccggtggatcattccaaacccggtgttattgtttgtttggggcggggtgtgaagctggtggggtaccgtatcggccagggtcgacagtgcctcaccggtggacatcccaaacccgttcacttatgttcgggagtgctggattgcggcaagctgacccttcggcactctga

SEQ ID NO: 67076 - DNA, 523 bp, Heterodera glycines
atgggacaaaacggcattcaggagcagcaactactccgtgacgagcgcacgcaaaaacgaaaagtagaagaccaattctatttttgcaatctgtcggcagatatgaaacgtgtgtatagtccaggcttttgcggcctgctctgcaaccatccgagacattctgatgttttggatgtaaggatgagcatttttgcttttgtcgaggtataattgctaggaaaatgtctgtgtgccagaaaaattgcgtttttagagcatgaagggcaccagcggcgaatactggcatattttgacgcccaagagcaaacggaattttgaggctgacatcggcaccactccgacctttctccaacccgggggaaagacggtgaccaccatcgccttaggcaaatatggccagggcaatcctgagccggtggccttgcgaccgaactattggctggagaccagccgtgagcgaaagcccgggctcggttactttcaagaatcacgctggaaggtctatacagcaaatgacctttaa

SEQ ID NO: 67077 - DNA, 335 bp, Heterodera glycines
atgtgttcaaaatttcttgttttaaccatgcttttgcaaatggcactggcaaatccctttggcacaaaacaatctgtaacagtttctggacacctcaaatgccaaggaaagccaagtgtcgggacaaaagtaaagctgtacgacaatgaccgtaaatatttaaaataatttaagaaattaataattttcaaattttttttttgatagattttacaattgatgatttgatggcacaatccaaaaccgacaataatggacatttcaaaatgagtgggacatcaaaagaaattgcgaacattgacccaaaattgaatttgtaccatgtgagaaattaa

SEQ ID NO: 67078 - DNA, 267 bp, Heterodera glycines
tacaaaaataaaagtgattttgggattcgggaccaaaggggggtgacaggatttttgattgaaaaatttttttcaccaaaaatcttccaaaaacatgtcattagggctattttatgacgctgatcacgaatacgtgatcagattttacttttgacatcgtcaagacctcagaatccctgtgtgattggggattctgaggcatcattttgaggggggagggggcaggttcggatccggacggtgtaacattatttttctgtgcatttt

SEQ ID NO: 67079 - DNA, 295 bp, Heterodera glycines
atgaaggtcagcttcaatcagtcttttcaaaattcacattttcttaaaatttagctctcacaacttttttctgaggtgtcaaattgcttagaattcgcttagaaaaaattctccttttcaaaatcttttttagatatcaaatttgttcggtttagttgggaatcaagcgaattatggttggtcaaaagaaactgcaaaatggcaataatcagtgtaatttttgaattagcgtgcaaaaaactacgccaattacttatttggcgtatttaaattgcattcgcatagtgcccgataa

SEQ ID NO: 67080 - DNA, 126 bp, Heterodera glycines
aaaaacttcgtgcttcgagcttcgaaacttcgcggtttttgggcttcgaacttcgaacttcgtgcttcgaaaaaaattgggcttcgccttcggcttcgagtgccgagccgagcttcgcccgtccct

SEQ ID NO: 67081 - DNA, 246 bp, Heterodera glycines
atggagaaggacctgcaaatttggagagattatatcgattttagtgcgctaggttcgatgaaactttttaaaatataagcctaaactttttggcctgtttaaaaaggaattaaaaatttttaaaatatttattcatctccctttttgatagtgaaagcatcagagagccttatttaacttttaattaacatttggtgcgtttcagagcacgttctaaaaatatttatgaattaattttgcaaaata

SEQ ID NO: 67082 - DNA, 76 bp, Heterodera glycines; identical to SEQ ID NO: 51235

SEQ ID NO: 67083 - DNA, 136 bp, Heterodera glycines
atgatgggatcgccaaatgcagctcagacgcttgatgggctcaacaaagtgggccatgacgaattgaagaaaatggcaactgctcaacgtggcggtgattggatcggaacagtgacaattgggggacaacaatttg

SEQ ID NO: 67084 - DNA, 590 bp, Heterodera glycines
ccggccccctggtccccaaatcaccaacatttttgcctacggtatcagttcggtgccgactgtttcggcgccgccaactttgaaatgccacaacatttttctttgccagttcacgtagcaaatctgggcaccatttgatagcacaatttgtgctatttgtaaaaaaaaagttatggcatgtagcgctgaaaaagctatgaaaaagtcaattttttcaccatattttttttgtaaattgatgaaattttttgaaatttagcttactaattgtgaaccttaataactatcgcatcatatcaaaaatttaatttggtttataatgaaaaaagtcattaccaactgcgccgaactgggcgtttcccttccatccaccggtctttctattcctcagtttttttattaagctctccaacctcttcattttttcctcattttcccctcattttcccctcaaaaattgaccccccccccataaattgttttctgatgcccattgatcacaatggcaaataaattaatgcgcattgcttttgctttcactccaaattcaatggatgaatagtgcgtgaattatctattatattattctc

SEQ ID NO: 67085 - DNA, 559 bp, Heterodera glycines
atgatattgcatacagaaaggcggtcgatatgctccaaacgtcatggcgtgccatctccgcaacagagaagaagacgaaaaacgacaaatgaacaaactgccaaggaggtgaagaagaacgtcgagaacgagttggaagagaagggccgagaggcgttggtcggtgccattttccaagcatttgttcgttcagcttaaacattgacggtaaaaaacaatcaaacaaattttcggtttgtgaaaagtcatccccattttcagatccccagaaggcaatgaagacgaacgaagatgcgtaggacattgcccagcagaaaatgcggccattgcatccgattcgccctggagtgggagtggcgctcaatttctccctttttctgcacggattcatgaaaatgccggaagagggtcgcaaattggctcaaaaggtcgtggacggagccgaacaaaacttttaactaccaatttttcatctcccaattttttacaggcttacgacgacgacagaaatgctgagctatttgacggagtcggctcttatatggtttacgccccataa

SEQ ID NO: 67086 - DNA, 1688 bp, Heterodera glycines
atgtcgggaagagacgcagagacagagagaacagcagtgaaagaggagggcggaagaggcaaaaaggacagttcatggttggatgagagtgagtccagagaaagagtggaatggaaaagaaaggtgtcgagggggaaaaagcgaaccaaaatatcgccacaaaagcgacagatgagaaagaaagtagaggaacagagaaatgcagcattaagtgatcaggaggagagccgagagagtgaccaaaacagagaaacaaagaaaaaatgggtaaaaacaagcgcaggaaaagtgccaaaagggcaaccacagtacagtacccacgctgagaaagaggcgcaccagcgagacggtacccaggcagacacaggagaacggaatttgtcattgcaacaacaggcgaatgatgctttaagtcagcagcagctgacagaaacagaaaccgaccgtcctatagacggacaacagtacggtagatttgctgtccgtactgtaaaagggcttccgaaatggcgacgggacggtattctgacagaggcgagcaaaagcacagaatcggaattcgaaacggcaccatcaaaaagcgaccgccaccattacgatacggatggaacacaacaacttcggcaagaacaatcttttctgagtggtgccagcacagaattgtccgaatttttggtcgaaagagttcgaccaaaaaatgagtaccgccgttacggtaacagtaaggaaagcagtgcagaagccatggaaaagagcccccgacacggaattggcatgacaaatcacttaaatctatcatcggacgaaatcgaaacggaccaatctttggagagccatcgctttcatagcaccgaaacggcaagccattttttgagccgatcggaacaaaaagaaacggatgataaaaacagcgccgggtggagaatcaggacggtgaaaaaggggggagaagtggtgccaacggaagaagatgagcagaaacaggcacaatttctgatgagaaaaactgaaagtgggacggaaggaaatttcggaataatggccaaaagtgatggccaaaaatggggggacagccaaaatgccaacgatggagcagacaatgagcgcagaaaagagcagcaggaggtaaaacaattcaagaaataatccaaattttacctaggtacaaaatgtgtacatgacaattaagtcaagggataatctgcaatggtttaatgaaagcgaagcagattgccggaggaggggtaatcactggcccgcttctgcccctcctttatgggcactcgccgcctctgcccctccttatgccaaatttgccctgctaatgagtccatcccgttaatggaatattcgttccataatcagttgttgttcagctgttccacttggccaatgctcaaccggcactttggttaaatgagtttggcgaggtgtcgcacagcaccgaccaaaggggtggccaaatgggactgccacactctgacgggtcgcgagcaatggccgaatgtcgcggttgggaagatgttcatcgagccataaaacggttcgtcaaatttcaactggcaaaggaagcgaaagtcgaacaaaaggatgattcatttttggccaaagttgcaattcggccacggattttcacccaaaagaggcaatggacggtcaaaatgccgaagttccactggtttcactga

SEQ ID NO: 67087 - DNA, 123 bp, Heterodera glycines
atgcaaagaccgataatcgtaaatataattgctctcgctaatctcggtaccggaattaaactaaactctctgacgatcaccgaatgcgaatttaagtataaccctagaaaattcaatgccgcg

SEQ ID NO: 67088 - DNA, 478 bp, Heterodera glycines
atgtgcaattttgcatcacccgacatggttggtcacaccggtaaatatgagccgacggtgaaggcgtgtgaagcgactggtacaaatccacacttttgtttctcatttttagatttaatttcccctaattattaaagatgtggcaattggacgcattttggaggcatgcagaaatcacggttatgtgctgttggtgaccgcggaccatggaaatgcggagcaaatgaaagcggatgatggcggcccacacacggcacacacgcgcaacaaaggtcagttctcgaaaagcattaattttgaacactcgttcatttttttttgcatttttcagttccgttcacctgctcttccgctgcacactccttcaaaagtgcgccgcccaccactgcggagggtgtgccccgggcgcgggcattgtgcgacgtggccccgactgtgctttaccttatgggactgcctaagccggaggagatggacg

SEQ ID NO: 67089 - DNA, 794 bp, Heterodera glycines
  unsure (1)..(794): unsure at all n locations
tgtccgtttgggtactcaaacaattatggggagcaaaaatccaacgcagaattaaagtacagactatagggaagctaatcccgaaggattcggtctcnncataaatctgggcgcatcggttcggggggactgccccgaaaacaaaaaaatcgattttttcaagtgtccgtttggggtactcaaacaattatggggagcaaaaatccaacgcagaatcaaagtacaggctatagggaagctattcccgaaggattcggtctccacataaatctgggcgcatcggttcggggggactgccccgaaaacaaaaaaatcgattttttcaagtgtccgtttggggtactcaaacatttatggggagcaaaactccaacgcagaattaaagtacagactatagggaagctattcccgaaggattcggtctccccataaatctgggcgcatcggttcagggggactgccccgaaaacccaaaaaaaaattttttggataaaaattatttaaatgaactgactagataatatttaaaataggttatttctcttcctttcagtatccctgcaaagtttggtgcgcttctgatcagtttctgaaaaaaaagttaagcctaaactttttggcctgtttaaaaaggaattaaaaatttttaaaaattttattcatctccctttttgatagaaaaagcatcagagtgcctaaactaacatgtaaataaaatttggtgcgtttcagaaccctttctgaaaaaatatttaagaattaattttgcaaaaaataaataaaaacgaaagact

SEQ ID NO: 67090 - DNA, 639 bp, Heterodera glycines
gtgcgactcaacccaccagcatttcaatcactgggactcaacccaacagcatttcaatcactgggactcaaaccaccagcatttcaatcactgggactcaaaccaccagcatttcaatcactgggactcaacccaccagcattccaatcactgggactcaacccaccagcatttcaatcactgggactcaacccaacagcatttcaatcactgggactcaacccaccagcatttcaatcactgggactcaacccaccagcatttcaatcactgggactcaacccaccagcatttcaatcactgggactcaacccaccagcatttcaatcactgggactcaacccaccagcatttcaatcactgggactcaacccaccagcatttcaatcactgggactcaacccaccagcatttcaatcactgggactcaacccaccagcatttcaatcactgggactcaacccaccagcatttcaatcactgggactcaacccaccagcatttcaatcactgggactcaacccaccagcatttcaatcactgggactcaacccaccagcatttcaatcactgggactcaacccaccagcatttcaatcactgggactcaacccaccagcatttcaatcactgggactc

SEQ ID NO: 67091 - DNA, 757 bp, Heterodera glycines
atggctgacgagaattggaaaggatcgataggtgatgggaatgttgggataaaatgcacaggaagaggaggaggaggcacggatttggggattgatggggcggaagaggtcgttttcggaagaggggtaattaggaataattgagaggatgatgatgatggttaacgcatggataataaaatgggtctcgggatttgtgtcgagagcgaggggaaaggcatggaaatgggtgatggtgatcgcgagtagcaagtgggtgacacgagagtcaaccacactgggaggattaccataataaaatgggacaaaaacattttgtgatttgaattttactcaattttcgaaattaaatttaaaaatgccactacctttgttatttgattgagattttgacatgccccacatattcaggcacggatacattttatatactgtccgatcactgctgatcaattactttcagagtcaatcaaaatcggcttacacctaacaagttctaaatgaagttagatcagtcactgggattaaccaaaaacgtggcatttgatcaagcacaggcactggtacaattcaatctgttgtccgctccgatcactattgattagtgcgtaccgtcgggactaatcgacggtgcgagagcgatttgtcaaaaatggcgacgcgaccaaaagcattatttctctccaaaaataatcatcgctaattatcacaatataaacgcatccgtccgtccgcgtccaacgaatttacgaataaa

SEQ ID NO: 67092 - DNA, 369 bp, Heterodera glycines
atgccggtcagccaagcaaattcttggatccctttggtattgtcactggtcttgagatttaggggtataaaaatggttgataaatatattcgagactcaatcaaaaattgcagagactcgacacactgaaagcaaaaatttctcgggtcgagactctcgagcagcaaattttaaagaaatatatcggtcagagcagttcaaaatttccgctctccttaaagatacagctcacaatcagtaatttttcctcaaaaatctgccgctattttatatacagatatatggtagggacgtaaaaattgcatttttttcccccgaaatttgggacgaatggtcgccgggaaccaattaaattggcaaaaaaataaa

SEQ ID NO: 67093 - DNA, 1401 bp, Heterodera glycines
atggacaccatttctctgcaagtactgctcgcatttgcgatgtttgccaccactgcgttggccggactgcttccgatcaaagtgatccgaaattattaatcgtggattttaattgagagaatttttagaagaaatttattttgtatattataggactgctgataatcttgaccaattttgattaggaattaatggatttttacaaaaatttaacagaaatataaattttaaaaaatcgaatagaataagcattaattattttaaatccaattttaatcaaaacatttgatcagaattttaattaattttcagcttcttcacgcgatcacacgtcgtcaggacgaaaatgatgagcagcggagcagaaaatcggattacattttgacgcttttgtcctgttttgcgggcggtgtgttcatgagcacttgcttcctggacattttcccacatattaagttagtttccgcttatgaatcccgattacattgtctggatatgtcttcgagagtcacgagacaaggattaaaattttaaaatatttatttaaaaattgaaataatttttatacaaaaatgtacgcaaaattccgatcagaatgtttgagttcgacatttatgtcaacaaataatgatccgatactgaacagcaaacaaatcctgacgatccccacttatcccccatttttcagcgagaattacgcccatttttggccaagtcccagtggaacaccgacttcccattcccgcaattctttgtctgctgcggctttttcttggtctattttctggaggagatttgcctaaaagtgttcgcgtccgcaaaacagcaccagcaacacgcgcactgtcacaacggtggccatggcggccattctcatggcaacagcgaagggtagggaaaaactggcaaaaaattttgaattcgaaacgagaaaaacatttgatggaccttgccttgccaccagaattggtttcattttcccattggaggtcctattttccaaatttatggtcctaaatcctaatcctagattaattttgtcggtttttggatttttcgaaacgaatacccctaataggcacagacaaatggtcgacattttttaaaacacaaatttgatgcccaatttttggtgcaaaaagcacacagcatttttgagcactagtgaaatgcacaatttgaaaatttcaacactaaattaaaacaaaatcataaagaaatgagctaacgccaaccaaaaaataattatatgtctgatacggtaaaatgccttaaatttctgctaattcgatcatttacagcaaatctcatcatcatcatcggcatggccatgaagagtgcaataatgagccgctgaaaacaaacgccggcagcgacaaaaaagggtcgaatttagggaca

SEQ ID NO: 67094 - DNA, 254 bp, Heterodera glycines
atggtcgggggactttcgtcaacaaaagtcgcaaaaagtcggaaaaatcttaataaacttttggcattagggcgccggcgatgcaggtaggcgccgccgggaaaatgttgaaaaattagattgcaatttgttaactgattttcaccaaataacaatttttgcgattttgagcgaaatttttaagaaaaaaacatgtttttagggtccagcggtgccgataggcgccgccgttttgggcaagatttgttaataaa

SEQ ID NO: 67095 - DNA, 552 bp, Heterodera glycines
gatgaagatcctcgaacccgaccagcaggacaggaacctgtacaggattttctcggatctgatccgtatgctgtatgttttttgttaaattcaacaagaccagcgacctgtttagataatatttttcatcataattcagataaatccagagaaaaatatgaaaaatcccttaacaaataaggaacgaaactaagcattcttaatgttgaaatcactaagttttcttatttctctacaaaatttccaaatttgttaattttcaataaatttaaagcaataaaagaaacttttgtgagcttttttgctcacaaaattttaaaaattaactaaaaaatctttttggcggatttaagaaacgccttatcactgccctcattgaataagcttttttagaccgaagaagactctctgcaattctttgaggaacaagaacggcaaattgcgctgcaaattgcacaggaaaatggagagaatgagcagcagaaagaagcggaagatgatgctgaggatggacaggcggaagaacagcaattggaagaggacgaagaagag

SEQ ID NO: 67096 - DNA, 103 bp, Heterodera glycines
atgaatacaaagaaaaaagcaaatattcaagaaaagaatggaaccaaaattattacgaaattggcgagaaaattggagttagccgatagaacaattaccaaat

SEQ ID NO: 67097 - DNA, 928 bp, Heterodera glycines
ttccaccaacattggacccgatgaggttggacattggcaacatttatgattggttcacaaatccacttccatatcaggtcatttgaattttaaaaattatcattccgtaatctgatatgtagatcctgaactgagatttcgatattgagacaggatttttaaattttatgaaaatttttggtaatcatcgcaaaaaatttttcaaaaagtttgcaatcttggctttgatttattttgaataaaaacggcaacagtatgccaaaaatgcaagttttgtcaactgatcgactaccgccttttttggcattttcaaaaccgggatttttcgttattggttatatcgaattttattcatatttgacatgctatgaaaataatatggaaatttgagatgagaaatttttcaagtttttcattgagaatttttgatcttgagcgcaaatcccgaatcagtaccgaattcctgttcaggcttgaattatgtaatagttaaaaaatcgagatgcacaccgctgatgggcaataaaatgtttttaaaacctaattcatttcaataatgagaaaaaaatatcattaaataaaaaaaattaagtctatattttttattatgtttcaaatttaatacaaaaattgtttgaaatttttataccttttatgaatattttttatttttaattaatttgttcaccaaaattgcttgatttttttatagtgagacgaacaacttttatttttctaagatattttaaattaatattaggttatgccaatctcgtggtacccacggaatttcacgaaccctgaccttaactacttggatcaatatgttcggatcagtgacgacacattgtacgctgttcaacttggcttatatgtggtcggatacaaagagtttcaagatgaccaggtgagcctaattacttaataa

SEQ ID NO: 67098 - DNA, 713 bp, Heterodera glycines
atgcgatctatgacaattgatggatcttttttttgttcaattgtttatgatttgtcttccgccatttttgcttcttttacaatgaaatcaacagttagtgtcactttgtcctcgcttttgttgtaaaagcctttgctcgggtccatcaattccttaattacctcataattggaagaattaagcaaaaaattgaattattcctcaccgaaaatttaatgaaatttttaaatccccagtcatataattcaccgttaaaaacatggtctttaaattccttcctgaaatcccaaacaccgtccatttgcggcacaattcggtaaattgccgccgaacatttgcaactccaatttttgtcttaatggcaattaattactttttaatatgaaaagaaaaaattgagagaaaaaaaaataaaatctcataatttataagagctcagactatccagtttctttgccctgctaccaaaatagcgagaaatattttaaaaaatgacctaaaacgggagaggaaaggagataatttgaaataaattatttttgttcattcagcaaaatattttcaaattgattggtcaattaatgcttctggtcatttaattgtcacacaccgtaaaagtggtaaagtgtgggaatcccgagctgttcgacgtgttgttaaaaacttcgccattaaaatctctactcaaatccgccacttcgctctttaataaa

SEQ ID NO: 67099 - DNA, 541 bp, Heterodera glycines
atgtccaaaccgttggctgaacgaatgaagcatttgttgagcgcgggagaggacgcggatgtttattttttggtgggggacggagacgcaaaagaggcgagtcttcaaattaaaaatttaatttattaattaaaaattggaaatttagtgaatggtaatttttgttgtatttttttaaatttaatccgcttaagcttgtgccagcccatagaatcattttgaagttggcttccgacgtttttgaggcaatgttccgttttgacgccaaaaaagaaagaccggaaaatggtaaaaaaataataattttaagggaaaatgccaattatgctatttgttcttcattttgtctctgctaatttccctaattaatttttcaattagtttctggtaattgtcctgatgttgtggagatacctgacattgaagcagaagcgttcaaagtgatgttgagcttcatttatacggatgatttaagtgatttgaatggagaaaatgcaatggctgtgctttacgccggtggatttaattttatgtgacaaaa

SEQ ID NO: 67100 - DNA, 279 bp, Heterodera glycines
atgaaagcactgacaaaaatgagaaatggttgggcttttctctttggtgcgatgcttctgaagaaggtgtaaaattactaataattaatatatatattaacaacaattaattaattgatattgagcagaaaattggagttgcaaatgttcttcaactcttcgaattgtttcgcaaaagcgcggcgttgcggatttcagaagaaaactcgatgaccatgtttttgacaataaaaacagaggctggggatacaatttcatttcatttgctgtgagtgacaa

SEQ ID NO: 67101 - DNA, 573 bp, Heterodera glycines
attgagtggcagacagggaatatggtgcggattgagcttccatcatcaaatgtcaccaacccccacgagcttagcaaaaatttatacaggctcctgggtgagggaagtgatcccttggcaaaaaaggtacgctcaacacagaattctttcatgcttgcaacaaataaggctcgccgctgggccagagaagagtacattaggcgaaaaacgaaagaaaaactgggcgtccgtgacgaagagctgctcctacaggccctaatgacagatactggaccattggttggtctcaacaccgtgacgcaaggccttctggcacgcgaaaagcatgctgaaacaagcaatatcgcgttgagaacgccaactgacgataacgattcgtaccagaaaaaattggatgactacttttctaaattaagtgagaaaaatttgagcattgttgatgaattgggtatgataaaattgaaagccgaaatcaaaaatttgacagaagaggaacgtgtgatcctcgaagccacaaaggaaatgggaacggaaggatggattcaatcctaccgtgagattcgtctagcttgg

SEQ ID NO: 67102 - DNA, 178 bp, Heterodera glycines
atgttttttctacttttttatttatttttattttcggttccgaaaacaaatgcagaggtaagtaaaatttttacatacattttgagccaataatgttcttaatcctataaaaattaaatttttttcagaacattgagactttggtttgaattgtaggattagaaaatgaaatattata

SEQ ID NO: 67103 - DNA, 370 bp, Heterodera glycines
atgccgcaaggtaaatttcaaattaaaacttaaatcaaattttgggatgttaacctgcttaaaaatttggagattaattacctcacagttaaatgttttttaaaaaaattcatcaaattcaagctaaataatttgaataaacccaagataaataaaatatttttagaaaaattccgacggcgccgaaaaaagcgccgcgatgaactgcttggaacgattatttcaattctgattatgttaggccttatgatagccctacgatgggttatcctgtttatcttatctcgtagccagcagctgaatgccgcaaatgcgagatgggcactaagacttccagcccaaattggagaagctcgtgaattttaattta

SEQ ID NO: 67104 - DNA, 1396 bp, Heterodera glycines
tcgccgggactcaaccctccagcatttcaatcaccgggactcaacccaccagcattccagtcgccgggactcaaccctccagcatttcaatcactgggactctatcctccagcattccagtcactgggactcaattctccggcatttcaatcaccggcactcaattctccagcattccagtcgccgggactcaattctccagcattccagtcgccgggactcaaccctccagcatttcaatcaccgggactcaacccaccagcattccagtcgccgggactcaaccctccagcatttcaatcactgggactcaatcctccggcattacaatcactgggactcaatcctccggcattccgaacactgggactcaaccctctagcatttcaatcactgggactcaacccaccagcagttcaatcactgggactcaattctccagcatttcaatcaccgggactcaatcctccagcattccagtcactgggactcaattctccagcatttcaatcactgggactcaattctccggcatttcaatcaccgggactcaatcctccagcattccagtcactgggactcaattctccggcatttcaatcaccgggactcaatcctccagcattccagtcactgggactcaacccaccagcatttcaatcactgggactcaattctccagcatttcaatcaccgggactcaatcctccagcattccagtcactgggactcaattctccagcatttcaatcactgggactcaattctccggcatttcaatcaccgggactcaacccaccagcatttcaatcactgggactcaacccaccagcatttcaatcactgggactcaatcctccggcatttcaagttttttgtttacatttcggcacaacatttggcattttcctcgtctttacttgtttctggcattttcttatggcacacgtctcttttctctaccttttcttccctttttttcattttcttatggccagacatttcttctcaatattttaatgacaaaacaattttaaaaacttcttacttggcaaacgttaatgccaaaataagtgtaaacatatagtcatttactaatcaaagcacaaatcaaattcaaagtcgagctttttcctattacaaaatgaaaacaattcaaaatcttttgcttcttcattttttactaaacaaaatcaaaaacacacgtctctttaactataaaattcttttctctttaacaataacaaattctttaataccattaacaaattcaaatgaaatcgcaaacaaaaaaacattaaataatgtagaaaagtaaaggcaaaattttctcacaaacaaaaacaggaatcaaaaagaaccattttcctctttcttttattaaatattttatata

SEQ ID NO: 67105 - DNA, 225 bp, Heterodera glycines
atggccgcaaaagcggtgaaagaggcggcactgtttggcgacgaaatgggcaacaaaagggtgcgcaatgtggccgcaacaattctctacacaatgccattgaaacgggaggaggaggaggcgaatgatgagggggaggagggaggaaaagaagggcacggcacagcggaggaaacggaggaggacgagcagaacaagcaaatgttgaaggaggaggaggaggaa

SEQ ID NO: 67106 - DNA, 719 bp, Heterodera glycines
gaccaattgctgtcggagacggatgtccacctggacactctgttggcaccgccgctggggcgtggcctcttttacatgtccaaatttacgttggcgcgaaagcgatggaaacaatcgccggcggagaatgaaaaagttttggaccgttttgaagtcagttttacataataatttcattttgtttttcgtttgacattcgttgctccccccccccccctccaatctgtaaaagtctgtgtaattcgttggtcgtgaatattacatcattgtgcagttaaaacccggttttgactatttttttaaagaaatcaaaaaaacaattttatttgaaacattttatgacttttgaaaaaaaaatcgaaacgggaagggagcaaacttaactgtttgttacccattgaatatgaatttttggagaggaaaagaggggaatgaaattgggagattcactctccataacactcccattttttactttattaaactttcttaagcctttctcacaaattgccatattttcaggtggctcttcaacatgtgtacagcttcttcttgacctaaagaaactgcgatggcacaatttttaatatgtgatggagagacaacaaattaagagagattttttgtttgatttatatgtgcaactaaggaaaatgactctataaaaatagttcgaaaattgtatcttttttcttttttaaatataatcagtgtgaaga

SEQ ID NO: 67107 - DNA, 753 bp, Heterodera glycines
atgaagaaagtgttcgacgcctacgagaacacctacaagacgccgaagcagaagctggacaaagtgaagcagctgcaggcggaaatatcggatgagctgcgcaacagcctgaagatgaccacggaccctgaggtgctgaaggaggcgtcgttcgccttcggcgatgtgccgaccttcaccggaatcaccaagagagtgtcggtgttgccgcccaaatacttgagcatcaaaggccatgaacaatgcgtggacaagtacgtcgtgtacggttggcaccagggatggcattccgaggcctcaaaaaggtcggaaatcgaaattccgtgccatccctggttggcaccagtcgtttgggattaagccaacgtcgctcaatttgccggcagggaaacacttgtacagaaacaaatgaatgttaaggtactccactggaacagaaaaaattcggcgtcaattcttttcaatttcaattgttcacgggtcaattcgttggtcagatcaaaggccaaaacggagtcagcaaaaggcaaacgaagccaaatgcggacaatgaaattgacgggggaagaagcataggcaaacacctaaaatgtggaaaattgattaagaaaaagtaaatagcaacaaatgtatgacacttttatgattggggagtggccatgaaaacccaaagacgcgcaatttggttcgcacagttttaattaagcgaatgatcattttttgtcaatgtgtaccgtaaaattgccaaataaa

SEQ ID NO: 67108 - DNA, 136 bp, Heterodera glycines
gaccaattgctgtcggagacggatgtccacctggacactctgttggcaccgccgctggggcgtggcctcttttacatgtccaaatttacgttggcgcgaaagcgatggaaacaatcgccggcggagaatgaaaaag

SEQ ID NO: 67109 - DNA, 728 bp, Heterodera glycines
atgctgtgctgctgctttttgtttcaattgtctctgtttttattccccttcacttcagcaacaatcgccggctatgagtcaaaaggtaattaaaaattgaaaatttattcgaaacccattgaccgtccgcacaattgggcccacccattcgagactaagtttcgctcaaattgaggcaactgatcagtcagtgtccaaaatgatcaaaatgaaaaaaagggttccgtggattttgcaaaaaatattcttaaatgagaatgaatcttttttttcaattttaagctgaaatgcccgccgctgcgcctcccgcgccgaactgtgccaatttagacgagaccagcgaggccaatgccaacgggcccaacccgttctgtgtgtacccggcactgatcggagtcactcattaatcacttttgcaattgtccaaattgcacctttttaggaccacccgtcgcccgggagacgccccggcgccaccaatccgactcaattcagtggcacggcgtttaatgaggaccacggggcgggggtaaaacaaagaatttcaaaacttagaatccatcaaaattttaggagtctccggccggcggttttcaagaggcttttgagcccggcgttggcccattcaaaccggcgggacgaaggcgacgagcgacggcacaattagcgagacaaatcaattgaaaaattgggatattaaaacccgaattgtaaaattcaataataaa

SEQ ID NO: 67110 - DNA, 1032 bp, Heterodera glycines
atgaactcgagtttggaattatttggagaagagtcagtccacgcttttgatgattgggctgaccgatttaaggactatttgtcactgacagggaaaaattggaccgaagaagaaaaggtcactcgccttaaactagcgctcaaggacacgccgagggaactattcaaagaactcaagtctaaccaaatcacgacattcaccagcgctttggaagcattgagggccaaattggactcgcctcaaagacgagaagtggcgaagcggaccctttcagtttgccggcaacgtgaggacgaaactgttgcccaatttttgagacgtcttacgccattgattgactcaacaaatccttctttaacgggtgatttgcgcaaagaaaaaatttgtgaggaatttctggaccgattaagaccaaacatgagctttttgattcgtttggtcgggcttacgcaacccaaaaatttggaaatggtaaaggcccaagcagaggaacttgaggcacttcttctcagcactggaggcggtgttacgcaaatcacacaactcatcaattcaatgacggaacaacgcggaaatgaagaaccgaatgaacaaaacgaaagaaaattcgaacaacaatggagcgacaatggtggggaattcagaaatgccacttcacatgacgcgcagtgctcgtacttagaaaacgaaaggagtgaaggtaaccaccaaaattggccaagaaggcgccacggaaatatgaaccgtagaaattggtccaattatccgacctgccaattgtgcaacagggccggacacagttcctacaactgccatgaaagaagggcacaatttgaagaccaagcaaatggcgaatggcaccaacatcgacgactaccatggaacaactggcgtgatcaggcaaatgaaatgaatgaaatgccgcaatcgacatcctctttggcacccgaattcatggaggacttggtaaaatcattaatcacactgaacttacaaaagctgaacaatacgaggccaaacaacagggactga

SEQ ID NO: 67111 - DNA, 133 bp, Heterodera glycines
  unsure (1)..(133): unsure at all n locations
tccggaataaattgctaattctcacataaaatgtccataaaagaattccattaatgtcgtctctatcaaatgaatgtgcaataatgtccgctnaatgttcacatgaagtgtaattgatcgaatctccgataaa

SEQ ID NO: 67112 - DNA, 756 bp, Heterodera glycines
atggacccaaatttgaccaaaattacatttaaattgcctcgctgccctgtggttacagagctctttgacaaggcagaccgatgccccaacatttatgccacagtggaggcccacagtaagcactgcgtcgcccggccgctggacatggaattcgaaaggaattccagccttgcgcagctgggccggggagaaaaagaagctgttgtggcccaaggggttgcgacagcggggccaacggtcgccaaacaatgacttccccagctccatggccttcttctcccattggccaccaacaaacaaccacaactgaacaaaatctgattttttttctttttttttctccattttacgcagccaaaacctttaaacccggccccaggttgtagttcaaatgatggacatgctcttcctccctgtgaagcgcaaacgcggaggttccgggaggcgcacagagcccacggatcatccgcgcatcgtccggcaaactggcctaggattaaaaccgtacaaaaaaaacacccaaattttgccaccattttttcatatgggccattgcaggactccaacaattgggtaatttgccggtaagagtccgtcgtttcggccggcggggcgaaccattgtgagccgtaataccattgtttcttcggcactaatccgctcacaaattcattgaaatacctatttttaataattgttcatatttcaggaaccaaaaaaaaaaccgttcaattccagcctccgattcatcagtga

SEQ ID NO: 67113 - DNA, 1707 bp, Heterodera glycines
atgccctcttttgcactgtccgacgatggaaatgaattggaacggttgaaggcccagcgaaaggcaattgacgcaaaaatagcagcagaattggtgcgatggcaaatggtgaattggggcaccgaattgacaccaaaggccaaggacaatttgaagcattgggaaacaattgaaaggttaaaagaaatgaattaattattattaattaggggtgatatttttagcttttacccccttttttaagcttcaaacgtttaaatttgagttattaatgcctatttttgggtttttggagccaattttaagttaaacaaaaaacattgagtcagtattgggcccgcaggcctatcacaattcattaccatagaaaaggcaattcagtaatagaaataataaattttattatacacctaaacatttttttgaaggactgccgaattaagggccgaataaaaaaaagtttttttttttttttttttttttttttgagctgtcattggcgctaattaaatttttgaaacacctttaattttgtactcatttttgtcagattgtacaccgacgactcgcttgcattatgttgaagcaaaagttgatgaggcgacacatcgtcccgaaaaaattggtgggtgagaaaaaaaacttaggggttttaatcttagtgattttaaacagcactaaattatgaaaaccggcttattaagaacaaaaattaggttttataggattttttttttttttttttaatcttgttaatactaaaaattaaaaatttttcaatggtatattttttttaaattccccaaaagtcgatccttaggggggtatttctcgcttttttttttttgcatttttcttttgaaaatttgccaaaaaaatgaccgaaatatgctctaaaaatgcaaaaatggtcaaatatacacttattctcaaaaacccccaaaatatttctttgtattgtgccctcaggcctcatactttactcaaattaaaatcagctttttttttaaatttctggacgaaattcacaatcggcttttatggatggttgacctgcactttgtgtacgaaagaaaaaaaaaaatgttttttttttttgaaattttagaaaaataaaagagagaaaagaaaatgttggccgtttaaaaaaggctaaaaaaaaaattaaaatttccaattttagcttttcttcgctcgtcccgtggtctttgaaggcatcgtgtccatttcgttttgtatccgatgtgccggatttctgctttttggtcgcccaatttcaggtttgcataaatcggggaaaaatgagaaaatgaataaaaatgatttaacatagaggggcattgaacctagcccttaaaaaaaaatagaaaaccaactgagccatgattttattgaattttaatgatgcatttactgagcacggaaaattgatatgagggaaagaataggtataaaaatagaaacatggctttcagcaaggcatcaggtccaagctgttcagagagaaaattttttttttttaagcatttccttctatttcaggtcatttctgttgaatggttcggcgacgattatgatggctcaaattgaatggtgggcacagtgaaagaagaaaaatggcgagaccagagaaattgaagataaatgaatttataaatgatggttttatttatttatttttaaaatcatttttaaatatttaataaa

SEQ ID NO: 67114 - DNA, 271 bp, Heterodera glycines
atggcactttcctcgctgatcgaattgggtaaaaatcggcaacaaactcagcgagacgaggctgaaaatggcattgacaatgagtaggcaaagattggcttacaattagcgtttaattgtcatttatcttttcttaattaattgcagcgattgccgtttcgatgggtccgtcgccgtttcgtcgccttcggtcatttcgtcgacttttgcggcaacaccagcgaactgttctgccgaaacattccaatcgcacgccaacggcacacacaat

SEQ ID NO: 67115 - DNA, 153 bp, Heterodera glycines
cacaatgtcgctgagcttcgccgcgtgcacgtcgatttgggggagcacagagtgggacagttcagtggacaaaccggcaaatatgagtacaatgcggagaagcaaacgatggaattcgaaaatttggaagtcgagaaggacgatggcttctga

SEQ ID NO: 67116 - DNA, 1569 bp, Heterodera glycines
atgatgggcagaagagggacaaatggaagacaaacgcagccaaaggaggaggaaaagcgggtggagacggagcagaagaagcaacccccgggggacgaggggacgtacggagggaccggtgagcagacgaagacacccagcaaaagcacggcatgccattggaattttatttagcgaaaaatgccaaagatgcaaattcgactgcgaaacaacgcaaagattcggccgtttcggagtttcttttgacggtggaacaacagcagaaaaagcgcattcgcagcacatccatatgcacggcacaaatgaaagcggcggaatgtcaggttggcacggcagagaaaaggacaaaaagacatttttggaagggggaggggagaagatgaacagatcaggaggaggaggaggaaagtgatcaatcagaccatgagaaaaaggggtgataaaattcggcatttattgaagaacaaaagaaggaatgtgaaaaagggggaggagaaaagatgaacagatcaggaggaggaggaggaagaaagtgatcaatcagaccatgagaaaaaggggtgataaaattcggcatttattgaagaacaaaagaaggaatgtgaaaaagaggggcgagagagagagagagagagtgaacagataacaaagagaaggaaagcaattgaacacctgtaattcttctaatcactgattagtgctattctaccattcctaaggtgatcgccaacctctcctatcaacacgcactcgccggcgatggtctcaaaaacggtcgcaaattctcctcttcgaccgcaaatgggggagcgatgcccccactgacgcgactgcgcattcagcaatgcttcagaaacgcaaagtcggtgaaaaggagggacacggggcatacttaaagcgaaacatttgccaattaacagtccattaaaatttaattaattcttttctgtgtttcggcattttctggccattctccgcactttcgttctgttcagacccgtcattggtccacaaattctgaaaagagcttctgccctccgtgccgaattcaaatcgttcattggccatttgcaggaagaaaaagcggacgaattggcaaatgacattttctcgctgatcactgaatgtgtggcgaacatcgaattgccatccaaagtcgccgccacttcgttcgcttttggcgaaatgcatgcccaactttgccactttggctttcggcccgagtttttttccaccatcgccgacgcgacaatcgccgaatgtttgcgattggacgcggggacgcagaagcgatgtgaaacattgtgagcagaaaacagcaaaacaaatgaacaatcaaattaatatggaaaatgacacaacgcaaaaaaagaaaaacggaaattgaaaaaagggaaaaaatgccaaaagaaatggccaatttggatggaatgcccttctccgtttttcaggttggcctggtctcagctcatgcagtttatgttttccaatgtccgtgatggttattatgccgaagtgcgccaacagcggcggtcctcacttccgcagcagcgattattgttaaaacag

SEQ ID NO: 67117 - DNA, 283 bp, Heterodera glycines
gtacctcttttagacgaagcgtcctaatttccctacaaagtttgaaaacgggcgcgaagcgcccgtcctgaggccgcgaagcggccgaatatcccccaaaaaaaattaaaaaacgggcgcgaagcgcccgtcatgaggccgccaagcggccaaatgttctcaaaaaattaaaagacgggcgcgaagcgccagttcttaggccgcgaagcggccgaatgtccccaaaaaaattaaaaaacgggcgcgaagcgcccgtcctgaggccgcgaagcggccgaatatt

SEQ ID NO: 67118 - DNA, 437 bp, Heterodera glycines
aaaatggtctaagtaaaaatcgtaattacgctcaaaaagcttctcaaacaattttagcgcttccaattccttctacaatcgcctttatacatcccattatgagcgctaaaattatcagagtgccgaaaatcgcatgtgatctaagcctagaaaaaatggtctaagtaaaaatcgtaattacgctcaaaaagcttctcaaacaattttagcgcttccaattccttctacaatcgcctttatacatcccattatgagcgctaaaattatcagagtgccgaaaatcgcatgtgatctaagcctagaaaaaatggtctaagtaaaaatcgtaattacgctcaaaaagcttctcaaacaattttagcgcatccaattccttctacaatcgcctttatacatcccattatgaacgctaaaattatcagagtgccgaaaatggc

SEQ ID NO: 67119 - DNA, 362 bp, Heterodera glycines
atgctgcaacgatgggtgccaaatccgaaagaagtcaactgcgtgccagccaatttcatggagccgtaacggaatgattggatcggcgtggtgggcgtaatttgcacttgattaaatcgattgatcacttgtaaattagtttaattaagtgtaatttcaattattttgcttctattttaggtttgatcacatttgcaacacatttatttttttcgtttttatttgattgtgtctgcaggcagggccgaaacacgttttagcattttccttagcattctgacagggtctgtactgatgaggcccgccctgtcacaatgcgattgcttttcaaatttagaagcaaagattactctatttgaaaa

SEQ ID NO: 67120 - DNA, 122 bp, Heterodera glycines
tgctcggctacgacatttcctggacaacatttaacatcattgaagtgatgtcgagcacgcgttacagcgaaaaacgcattggttatttggcggcggtgcaagcattcaatgacgaaaccgat

SEQ ID NO: 67121 - DNA, 57 bp, Heterodera glycines
gctatagtgaagctattccggaaggattcggtctccccataaatctgggcgcatcgg

SEQ ID NO: 67122 - DNA, 1555 bp, Heterodera glycines
  unsure (1)..(1555): unsure at all n locations
aaatcattctggtttttttagatgaattccnttaaattttaataaataatttttgtattatttcaattaacaaattttattttatatatatcataataaattcacttgggcaatattcaaaattaggctgttaattttgacaattttcatctttaaacgtgttggatgtgttgatatttaatattattaagtttcgacacgaatacttttattgattagttatttgttgatgggtcctctcccatcgactcattctttgcatttgtgttattttgcattcggtgtttattttcggactctctaatttgactccgtcgttattttattattattttgtgattctaattttattgtttattcatttaataaatttatcttgtttatgtgttagcaaaacacaacaactgccgacgcccgcgcatttttgagcttaaccgtgaattcaccaaaaagcgactctgacggtgcgagactgttcatttcctgtggacgtcaaatgttttggatgtcgaaagcaagggcacacgagaaatatttgcaccaattcagctcatccacgtgttcaatcacacgtcgtggtttcgactttcagtgtgaatggtgcgaccaaagaatggatatggattccattacaagtcaatggccaccagatcaaacttgcagccgattcgtgttcacatttgtcgatcatacagcttgcggtttggcaaagtttgggcgaaccgaggttggaaaaagttggtaaattagtgggttccttttcgggccacaaattgaagttgttgggaagtttcaagtgtgacgttctgttcagaggagtcacaatgcggcttgaactttcagtggcagacaccgaagcgccgagcatcatggcattggattggatcatccctttcgagcgtgccacccaacagccagtttcaaggcttccttcccgaaggtgtttcaacctggcttcggacattgtgtgaagacgaacgccacgctgcattttaagcaaaatgtgaagccagtgttctgcctgtcgctgcggatgacagccaaagtggaatcggagccacgatcagccatgtgtttccaaacggagtggagcgcgtcatcgagcacgccagccgaacgctcacccccgcggaacgaaattacgcccaaattgaacgagaagcgttgtctttgatcttcgctgttcaaaaatttcacaggatgatttacggtcgtaattttactctgttaacggatcataagcctctcttggctatattcggtaataaaaatgggatcccgatctacacggcttcccgattgcagcgttgggccctaattttgtccaattatgattttacaataaaattttaaatctgcaaattttggacatgccgacgttttgtctcgactgatttctgagcaccggacagactaagaagtcattgttgcccacacatcggacaacgacgtggacagcactgaagaagtcgaatatgctcttcttgtcaacttggagcagctgccagtcgatgcaaaagaagtgagcgaattgacgatttcggacgatttgttg

SEQ ID NO: 67123 - DNA, 780 bp, Heterodera glycines
atggttaataatcaagctttgtcaacgtgttgtttgaaatgatttttgcagctacaaaaagtctttgctctatgtcttaatcattttaaatagaaattaataatttatatttaatttaaagcggtaaaagttaatgaaaattggttaaaaactagctgtatgtcatgcatcctctatgccttctcgtgccgaatgttaattaattcttgttgattagaaaaaagattttaaaccataaaaaaaacttattatatcatttaaaaaaaatgaaaattataacaaatcgataataatactaaagttaaaaacactttaaactaatgtcagttgttcaaaatttaagtaatatataaaaacaatttttaaatttaacaaatctgccgacctaaagaatataaatatattttcaaaaaaaattctaaaatataacgaatttgcttaaatgttagtaacttttaatttataaaatcactatactgattaagttagttgaaaacgaaaaattattttataagtattagcaaatttagaaaattaaaatatttgtaaacggtgtgcgaaattttctaattaaaaataatattatgctagattttaaaccataaaaatcgagccaaaaaacttattggtacttaatacgacgaaaaaatttacgcactgattctcaagaaaaagagaattattgatctgcttaacgatttaaatggaaaattatattaaaaaaaaaattattttgttaaaatctcataccgaaagccctattaaattctcatttggaaa

SEQ ID NO: 67124 - DNA, 1026 bp, Heterodera glycines
atgcagaaaaaggatgtcactgtggtaaagaatactatgaattatttatttttaattaatagggctgggatttttaggtaaataaaaaattgattgattcactaaaatataaaatatttttttgataaaaattttggtttaaaaattgatcttattcgaaaaagtaactttaaaatttttaacaattcatttacaaatgaaaaataatcaaaattaaattttttaggttatgctacctaaaaatcgttactaataaattttaattacctatttactcgtaataacttttttgttatacttatttaaatacctactttacggtttttgcttatcttaacatcccagccttattaattaatttttcttaaattctaccctggaagtgtcatttacttattaatgcattcaaaaatgagcatttcctttaaaaataatatttatgtgtctttcagaatgtgttcgaagctgcccgtcagattttgagtgcggagacttcggttatgcagaagaatgagctgtacttcaccgattattcactaattccacttttcgtacaagaaaattatgtgaatgttcgcggatcacggatggggttttcttaacaatgtcctctaattaaattcattgtttttgcttaggaatttggaccatttgaatgcaattggacgcgccgcagatgcaattgcatttggagacataatcgacaagcaaattcgagcccatggaaattggaaccttatgccggaacatgtgattttttattttgtctttctattttcgtctttttatgataggaaaatggcaatttaaccattttcaattttgcagaggccaaaaacatttattattttatatttcataaactttttccatttgctaggcaatgttttcttctgcgcttccctccgctcggatggacggttatttgactgctcagattcaattccccgcttggtttggcaaacgttcgaccggacagaaaaggcaaagattaatgcgacaacttttgctccatacccatctaaa

SEQ ID NO: 67125 - DNA, 1285 bp, Heterodera glycines
  unsure (1)..(1285): unsure at all n locations
ctgctttatttcgaatcaacaaaattgaggaggcgcatcgagaatgtgcacgtgtgctggagaagaacccattggaccaggtgaaaagcgggggngggggggggggagagaatgggacgaaaagcaattggaaaattaattaaaatggtaaaattgaaaaagaatttggtaaaaagttcttttttccggaattctccttaatccattatttttgatatacaaaaatgttcacataaaaggccgcttggagcttgaaattggcctgcttcgcggaagaagtgttcgtggacgagttggagaacgacgaggccgggctggcggacgcgtacatggacttgggcacggcggtggccactgcggcacgccctggcacatcgctttcaaggcaaaaaatgcgaactaaagtaaatgcaagcagcgaaactcgtcattttacaggcctctgactggcacgagtgccggagggccgagtcccgcagttcggccaaggtcagtccgttgtcctcgggaccgtactactcagcttttttgaaatgagaaaactggacggtacaatcttcaatgaatttgtttattgtatttctttcttctaggactgcctcgggacgtccactttctggtaaactttgcatattttttcgaatttttgaattatttattatgaatttgtccatttattccaaatgggtgccaatgccattcattcgttaacccttccaagggatgcaacggcccgaaagccgtttgaagacgggcacccaaaacagcatggagcgcatgctgcgtacgtcgcgtacctcgcgcacttcgcggccaatctccgcggtcaccgcgcgacaagcgcgacttggcacagtttggaaacgcagcaaaacttaaatcaaattaacagcaacttaatcacaggcatcaatggttgcccagaaggacggcccgttcgtgaacatggcacggctcaatttggagaagtacgcgcgcgagggcaacgtcaacacgcacttggtagtactgtagtaccgtaattggacaaaatttgaagcaatccgaaaattaaactcttccaaagaattaattaatagaaaaaggtgctcattgagaccaattgatgatttatttagtcggtaatttaaacttgctaatgacacttatccaatgctttactttggtttatcgtttataccgtaacctttcttttccctacagtaacaagtgctaccgtatcattcttcacattttcctttagtttaattacgttttcctacacgaggctgatgctcgcagcgca

SEQ ID NO: 67126 - DNA, 277 bp, Heterodera glycines
atgctgttctgtggagctgtcgccggcaaaagtgatgattccgccgtcgcgcttggcgcgtacaaaagtcgccggaaaaaaatccccaaaaattttaaaatttaccgaaaattttttcaggaaatgcccaatatcatggacattgatgacaacgaatacatttcttgaaggactttgaattaatttattttgttggagcaattttttgggcggatcgttcgcggatttattgaggctcaacggacggacaaacgaaaaatccgttttttaaaataaa

SEQ ID NO: 67127 - DNA, 732 bp, Heterodera glycines
atggattgatctttctgctcctcaatcatttccatcgtcgcaattgtctgtttgctgtgcaaatgctgcttttcggcaccccgtattaaataataaaaattttaattaaagttcatttttgtttaaaaagatccatgctgtcctggcagccaacatgtcgtttcgatgatgaaagatcacaccggcacattctccgcttcgatgccaaagtcttcgctttgtatgagtgccgaaagagtcgccgctgcggtggaaaaccaactgaaaacaatttggtgccctggcaatggtagtcaaacactcatcaacgagatcaacgcaactcaatcatcatcaggtaccaaatcctcaattaaatccctttaaaatcatttatttttttaattgaaattcaatttctttaatttggctcctattagatgagtgtgctcgcagtctcggcttcgtccgtgccatgttcgaaattgccgcttccgccgcttcccatgccggtgccaacgccgatttggctgtccagttccgagaacaagttggcacaattgacagcaactgtgccgcgttgggcattcatgttgggcaaatcagcttggatgcccccaagggtttgaaataattattaaaatttatttttatttattttaatgaattaatttttcaggagaccatccgcaagtgcatgactctgagagtgtgcttagtaaccctggcaccagcgggtctcacaagcgcttt

SEQ ID NO: 67128 - DNA, 399 bp, Heterodera glycines
atgaccttcaaaatggacacaacaacggactcccaaaagaacagagtattgagcaggtaaaagcaacaaaacattttcacttttcctattatcttttttaggctgatgattcggtggacgaccttttcgacttggtctactgagttggacattttgccattgttggacaaaaaaggacaaagcgaagaagagtttttcgattttttatatttgaaccatcctcaaatttcctcaaacaattctaagcgaaaaatctcattattgtcatacgtctttttcaaaattttcccaaattcaaatattttcacaatgattcgtctcattttcatacaatcgttttgtttttctatttattccatttgtttcttcctgtttttctttttggctacttcattttaa

SEQ ID NO: 67129 - DNA, 298 bp, Heterodera glycines
atgcgccagtatccgacctgcatggagttcaacgagcgcttcctgattttcctgttcgagcatgcttatgcctccgagtttggctcatttttggtccgtattttaatttgaaaattttaaatcccaaatttaaactgcggattaattaatttgtgaaattctcagggcaacaatgagctggagaagaagcggttgggtgttaaggttggttttttcgagaaaattttttgaaatttttggacacttttaattgcgtttttgacttttttttctttcttcttaaacatattttaataaa
